United States Patent Application Publication US 2016/0319361 A1 - sequence listing, part 7

SEQ ID NO: 163936 - DNA, 30 bp, Artificial Sequence
  Synthetic oligonucleotide
tcgggttcataagtttgtaccaagggttag

SEQ ID NO: 163937 - DNA, 30 bp, Artificial Sequence
  Synthetic oligonucleotide
agctacttcggatgcgaatggaagggttag

SEQ ID NO: 163938 - DNA, 30 bp, Artificial Sequence
  Synthetic oligonucleotide
aagacgagagcaaacggttaacgtggttag

SEQ ID NO: 163939 - DNA, 30 bp, Artificial Sequence
  Synthetic oligonucleotide
cgtaggatgaaagcctcggagattggttag

SEQ ID NO: 163940 - DNA, 30 bp, Artificial Sequence
  Synthetic oligonucleotide
acgacaagtagcgaagaagcgcttggttag

SEQ ID NO: 163941 - DNA, 30 bp, Artificial Sequence
  Synthetic oligonucleotide
agaggcgtatgaataaattatcactgttag

SEQ ID NO: 163942 - DNA, 30 bp, Artificial Sequence
  Synthetic oligonucleotide
acagcacgtcaggctgtgatggactgttag

SEQ ID NO: 163943 - DNA, 30 bp, Artificial Sequence
  Synthetic oligonucleotide
agctacccccatacaccgaggcggtgttag

SEQ ID NO: 163944 - DNA, 30 bp, Artificial Sequence
  Synthetic oligonucleotide
gttagcgtaagacgtttcgatctgtgttag

SEQ ID NO: 163945 - DNA, 30 bp, Artificial Sequence
  Synthetic oligonucleotide
gcgctacgggtaaagttgtcgagttgttag

SEQ ID NO: 163946 - DNA, 30 bp, Artificial Sequence
  Synthetic oligonucleotide
cagcgttactaagcggacagcaaaatttag

SEQ ID NO: 163947 - DNA, 30 bp, Artificial Sequence
  Synthetic oligonucleotide
aggaaggtccgggtagacaccggaatttag

SEQ ID NO: 163948 - DNA, 30 bp, Artificial Sequence
  Synthetic oligonucleotide
ggcctggagaggcggttaagggagatttag

SEQ ID NO: 163949 - DNA, 30 bp, Artificial Sequence
  Synthetic oligonucleotide
cgggcaaacaatatcttcggccggatttag

SEQ ID NO: 163950 - DNA, 30 bp, Artificial Sequence
  Synthetic oligonucleotide
ctccgcatggtctcgagtatagctatttag

SEQ ID NO: 163951 - DNA, 30 bp, Artificial Sequence
  Synthetic oligonucleotide
gtgtccccgtgcatacggatgacactttag

SEQ ID NO: 163952 - DNA, 30 bp, Artificial Sequence
  Synthetic oligonucleotide
ggcgtatgggttagaacctgcgatctttag

SEQ ID NO: 163953 - DNA, 30 bp, Artificial Sequence
  Synthetic oligonucleotide
tgggagtcatctgggctaagtcaagtttag

SEQ ID NO: 163954 - DNA, 30 bp, Artificial Sequence
  Synthetic oligonucleotide
accgctccaacctttcaattacccgtttag

SEQ ID NO: 163955 - DNA, 30 bp, Artificial Sequence
  Synthetic oligonucleotide
cgaaaggaatcaacattccatcgattttag

SEQ ID NO: 163956 - DNA, 30 bp, Artificial Sequence
  Synthetic oligonucleotide
ggaaccaactagaccggtgaaagtttttag

SEQ ID NO: 163957 - DNA, 30 bp, Artificial Sequence
  Synthetic oligonucleotide
tgttgaaatgagagtctagggggtttttag

SEQ ID NO: 163958 - DNA, 30 bp, Artificial Sequence
  Synthetic oligonucleotide
tgagctggcatagcgtaatgataaaaaacg

SEQ ID NO: 163959 - DNA, 30 bp, Artificial Sequence
  Synthetic oligonucleotide
atcgcgtagtgggggaaaactccaaaaacg

SEQ ID NO: 163960 - DNA, 30 bp, Artificial Sequence
  Synthetic oligonucleotide
cagacgggcgatctgcagttgggaaaaacg

SEQ ID NO: 163961 - DNA, 30 bp, Artificial Sequence
  Synthetic oligonucleotide
tcgtcaggcgcacagtgagttaataaaacg

SEQ ID NO: 163962 - DNA, 30 bp, Artificial Sequence
  Synthetic oligonucleotide
ccaggtcgattggttacgccaactaaaacg

SEQ ID NO: 163963 - DNA, 30 bp, Artificial Sequence
  Synthetic oligonucleotide
atagattgggtgattctccgaaaacaaacg

SEQ ID NO: 163964 - DNA, 30 bp, Artificial Sequence
  Synthetic oligonucleotide
agcttcggtcagtgctctactcaacaaacg

SEQ ID NO: 163965 - DNA, 30 bp, Artificial Sequence
  Synthetic oligonucleotide
ttcgggatagctacgaaaagaatacaaacg

SEQ ID NO: 163966 - DNA, 30 bp, Artificial Sequence
  Synthetic oligonucleotide
gcatcccttctgaacacgacatctcaaacg

SEQ ID NO: 163967 - DNA, 30 bp, Artificial Sequence
  Synthetic oligonucleotide
ccgacctcaaacgagcctgccggtcaaacg

SEQ ID NO: 163968 - DNA, 30 bp, Artificial Sequence
  Synthetic oligonucleotide
ttggtatttattggcccttgccaagaaacg

SEQ ID NO: 163969 - DNA, 30 bp, Artificial Sequence
  Synthetic oligonucleotide
aactgtgactcggccagtgcagcagaaacg

SEQ ID NO: 163970 - DNA, 30 bp, Artificial Sequence
  Synthetic oligonucleotide
aaacgcatactttgcccgagttgagaaacg

SEQ ID NO: 163971 - DNA, 30 bp, Artificial Sequence
  Synthetic oligonucleotide
atgtaaaatacagatattgaggccgaaacg

SEQ ID NO: 163972 - DNA, 30 bp, Artificial Sequence
  Synthetic oligonucleotide
ttgtcgagtcacggtatcgcaacgtaaacg

SEQ ID NO: 163973 - DNA, 30 bp, Artificial Sequence
  Synthetic oligonucleotide
atcaaggggatttcaattcggtattaaacg

SEQ ID NO: 163974 - DNA, 30 bp, Artificial Sequence
  Synthetic oligonucleotide
tacgccatgtcgcatgacattgaaacaacg

SEQ ID NO: 163975 - DNA, 30 bp, Artificial Sequence
  Synthetic oligonucleotide
tacacggcgggtgacgtgagtcacacaacg

SEQ ID NO: 163976 - DNA, 30 bp, Artificial Sequence
  Synthetic oligonucleotide
ccggtatgatcgagtcggatgtccacaacg

SEQ ID NO: 163977 - DNA, 30 bp, Artificial Sequence
  Synthetic oligonucleotide
tcgcgctaccccgggcgtaaagggacaacg

SEQ ID NO: 163978 - DNA, 30 bp, Artificial Sequence
  Synthetic oligonucleotide
gatgtgtcgaggacatttctctcaccaacg

SEQ ID NO: 163979 - DNA, 30 bp, Artificial Sequence
  Synthetic oligonucleotide
atagtcgcaggctcgccgtacagaccaacg

SEQ ID NO: 163980 - DNA, 30 bp, Artificial Sequence
  Synthetic oligonucleotide
ccagcagaataggcccttctcgctccaacg

SEQ ID NO: 163981 - DNA, 30 bp, Artificial Sequence
  Synthetic oligonucleotide
tactgattatttacttatcggcttccaacg

SEQ ID NO: 163982 - DNA, 30 bp, Artificial Sequence
  Synthetic oligonucleotide
aggtatgctcgacacgcaaaaaaagcaacg

SEQ ID NO: 163983 - DNA, 30 bp, Artificial Sequence
  Synthetic oligonucleotide
tgtcgcgatggttcgatacggtcagcaacg

SEQ ID NO: 163984 - DNA, 30 bp, Artificial Sequence
  Synthetic oligonucleotide
taacccgcggctggtactaatcgagcaacg

SEQ ID NO: 163985 - DNA, 30 bp, Artificial Sequence
  Synthetic oligonucleotide
ctgtggtcagccaatgaatcttgagcaacg

SEQ ID NO: 163986 - DNA, 30 bp, Artificial Sequence
  Synthetic oligonucleotide
cgggaaaagtgcaatgcatgctccgcaacg

SEQ ID NO: 163987 - DNA, 30 bp, Artificial Sequence
  Synthetic oligonucleotide
actcgtatgagaggacatgctatggcaacg

SEQ ID NO: 163988 - DNA, 30 bp, Artificial Sequence
  Synthetic oligonucleotide
gcttctgtatagtatatttgggcatcaacg

SEQ ID NO: 163989 - DNA, 30 bp, Artificial Sequence
  Synthetic oligonucleotide
gaaaccgtggacgtagtcgggaactcaacg

SEQ ID NO: 163990 - DNA, 30 bp, Artificial Sequence
  Synthetic oligonucleotide
gtcgatcgcggtgatctggtttattcaacg

SEQ ID NO: 163991 - DNA, 30 bp, Artificial Sequence
  Synthetic oligonucleotide
acgcggaaccttttacggcaaccaagaacg

SEQ ID NO: 163992 - DNA, 30 bp, Artificial Sequence
  Synthetic oligonucleotide
agctccaccaccagaatatgtgtaagaacg

SEQ ID NO: 163993 - DNA, 30 bp, Artificial Sequence
  Synthetic oligonucleotide
tatctgccaaacgcgagtacattcagaacg

SEQ ID NO: 163994 - DNA, 30 bp, Artificial Sequence
  Synthetic oligonucleotide
agcgatctggggtgtagtctctagagaacg

SEQ ID NO: 163995 - DNA, 30 bp, Artificial Sequence
  Synthetic oligonucleotide
tctgctaagcaatccccgttgtatagaacg

SEQ ID NO: 163996 - DNA, 30 bp, Artificial Sequence
  Synthetic oligonucleotide
tgattgatacctcacggagaccaacgaacg

SEQ ID NO: 163997 - DNA, 30 bp, Artificial Sequence
  Synthetic oligonucleotide
ttaacgagaagcacctatacgccacgaacg

SEQ ID NO: 163998 - DNA, 30 bp, Artificial Sequence
  Synthetic oligonucleotide
agcagagtgcattcacaaccatcccgaacg

SEQ ID NO: 163999 - DNA, 30 bp, Artificial Sequence
  Synthetic oligonucleotide
ccagctagaccggaacatgcatatcgaacg

SEQ ID NO: 164000 - DNA, 30 bp, Artificial Sequence
  Synthetic oligonucleotide
tgcgaagatgaggccgaagtatgtcgaacg

SEQ ID NO: 164001 - DNA, 30 bp, Artificial Sequence
  Synthetic oligonucleotide
cgagtccgcaacttacgacccgttcgaacg

SEQ ID NO: 164002 - DNA, 30 bp, Artificial Sequence
  Synthetic oligonucleotide
cgatccacgatgagatggcatcaaggaacg

SEQ ID NO: 164003 - DNA, 30 bp, Artificial Sequence
  Synthetic oligonucleotide
cacatgaatagctcctcacttgcaggaacg

SEQ ID NO: 164004 - DNA, 30 bp, Artificial Sequence
  Synthetic oligonucleotide
ggtctcaccggaccaatgtggataggaacg

SEQ ID NO: 164005 - DNA, 30 bp, Artificial Sequence
  Synthetic oligonucleotide
gatggtcgtctctcaaaatgttccggaacg

SEQ ID NO: 164006 - DNA, 30 bp, Artificial Sequence
  Synthetic oligonucleotide
tttaggccagggaaaacatgttcgggaacg

SEQ ID NO: 164007 - DNA, 30 bp, Artificial Sequence
  Synthetic oligonucleotide
gtccaatacgacccggcaggcaggggaacg

SEQ ID NO: 164008 - DNA, 30 bp, Artificial Sequence
  Synthetic oligonucleotide
gccagcggtaaagggttcacgcggggaacg

SEQ ID NO: 164009 - DNA, 30 bp, Artificial Sequence
  Synthetic oligonucleotide
gactcataggcgtatgcatgtcctggaacg

SEQ ID NO: 164010 - DNA, 30 bp, Artificial Sequence
  Synthetic oligonucleotide
gcggcttcactgaaagactcccgtggaacg

SEQ ID NO: 164011 - DNA, 30 bp, Artificial Sequence
  Synthetic oligonucleotide
ggcgcgctttggcaagatccaatctgaacg

SEQ ID NO: 164012 - DNA, 30 bp, Artificial Sequence
  Synthetic oligonucleotide
gcccacgcggatgaccttgcgacgtgaacg

SEQ ID NO: 164013 - DNA, 30 bp, Artificial Sequence
  Synthetic oligonucleotide
agaaccattcttgactgatgttcgtgaacg

SEQ ID NO: 164014 - DNA, 30 bp, Artificial Sequence
  Synthetic oligonucleotide
gactgtcaagcaccctgatacatgtgaacg

SEQ ID NO: 164015 - DNA, 30 bp, Artificial Sequence
  Synthetic oligonucleotide
gatgacaatagccatgatagatcttgaacg

SEQ ID NO: 164016 - DNA, 30 bp, Artificial Sequence
  Synthetic oligonucleotide
agttgccagtatcagcacccgcaaataacg

SEQ ID NO: 164017 - DNA, 30 bp, Artificial Sequence
  Synthetic oligonucleotide
tcaacgtatgggggcctcatgagcataacg

SEQ ID NO: 164018 - DNA, 30 bp, Artificial Sequence
  Synthetic oligonucleotide
ggaaccgttactcggtgtgcagcgataacg

SEQ ID NO: 164019 - DNA, 30 bp, Artificial Sequence
  Synthetic oligonucleotide
gcgcatcgagcagaacaccacgaactaacg

SEQ ID NO: 164020 - DNA, 30 bp, Artificial Sequence
  Synthetic oligonucleotide
caccaagttccaattaccccgtgactaacg

SEQ ID NO: 164021 - DNA, 30 bp, Artificial Sequence
  Synthetic oligonucleotide
acatatgacctatatacgaaaaaagtaacg

SEQ ID NO: 164022 - DNA, 30 bp, Artificial Sequence
  Synthetic oligonucleotide
aacagttattaatgttcacaatgagtaacg

SEQ ID NO: 164023 - DNA, 30 bp, Artificial Sequence
  Synthetic oligonucleotide
ttctggtatacgcgaccaataatcgtaacg

SEQ ID NO: 164024 - DNA, 30 bp, Artificial Sequence
  Synthetic oligonucleotide
ctacagtcaaagggatatttgcaggtaacg

SEQ ID NO: 164025 - DNA, 30 bp, Artificial Sequence
  Synthetic oligonucleotide
taggcagtctaggagaaggggccggtaacg

SEQ ID NO: 164026 - DNA, 30 bp, Artificial Sequence
  Synthetic oligonucleotide
ttcgggcggtgaatcgctctggctgtaacg

SEQ ID NO: 164027 - DNA, 30 bp, Artificial Sequence
  Synthetic oligonucleotide
taagggctgctacatcgagggtgcttaacg

SEQ ID NO: 164028 - DNA, 30 bp, Artificial Sequence
  Synthetic oligonucleotide
cctgtcgatccgatagtctgaactttaacg

SEQ ID NO: 164029 - DNA, 30 bp, Artificial Sequence
  Synthetic oligonucleotide
tttgggaaatgttgacatccagttttaacg

SEQ ID NO: 164030 - DNA, 30 bp, Artificial Sequence
  Synthetic oligonucleotide
atcactcgggcaatattcggacgaaacacg

SEQ ID NO: 164031 - DNA, 30 bp, Artificial Sequence
  Synthetic oligonucleotide
gtacgtatatagtaaataaggcgaaacacg

SEQ ID NO: 164032 - DNA, 30 bp, Artificial Sequence
  Synthetic oligonucleotide
ggggcagttaaactgacatgatgaaacacg

SEQ ID NO: 164033 - DNA, 30 bp, Artificial Sequence
  Synthetic oligonucleotide
gttaaccgtgttgcgagggacataaacacg

SEQ ID NO: 164034 - DNA, 30 bp, Artificial Sequence
  Synthetic oligonucleotide
ctggtttcgaaggtgggtaattacaacacg

SEQ ID NO: 164035 - DNA, 30 bp, Artificial Sequence
  Synthetic oligonucleotide
tcgaccgacggggcagcttatgataacacg

SEQ ID NO: 164036 - DNA, 30 bp, Artificial Sequence
  Synthetic oligonucleotide
acatgctttgtgccactacatacccacacg

SEQ ID NO: 164037 - DNA, 30 bp, Artificial Sequence
  Synthetic oligonucleotide
tcgattcaagggtagcttttagtgcacacg

SEQ ID NO: 164038 - DNA, 30 bp, Artificial Sequence
  Synthetic oligonucleotide
tcattataggttaatgtttatgttcacacg

SEQ ID NO: 164039 - DNA, 30 bp, Artificial Sequence
  Synthetic oligonucleotide
tacggaatctaactatttgcgatagacacg

SEQ ID NO: 164040 - DNA, 30 bp, Artificial Sequence
  Synthetic oligonucleotide
gaactcaatggacggcgtatactagacacg

SEQ ID NO: 164041 - DNA, 30 bp, Artificial Sequence
  Synthetic oligonucleotide
aagggggaccatgtgcctaactatgacacg

SEQ ID NO: 164042 - DNA, 30 bp, Artificial Sequence
  Synthetic oligonucleotide
cgcttcagcaatcacctatctccatacacg

SEQ ID NO: 164043 - DNA, 30 bp, Artificial Sequence
  Synthetic oligonucleotide
tatcgcccggtccgttaagaaatctacacg

SEQ ID NO: 164044 - DNA, 30 bp, Artificial Sequence
  Synthetic oligonucleotide
gtgggttggatattgacagtttcgtacacg

SEQ ID NO: 164045 - DNA, 30 bp, Artificial Sequence
  Synthetic oligonucleotide
aggtattgaagactcggtctcccaaccacg

SEQ ID NO: 164046 - DNA, 30 bp, Artificial Sequence
  Synthetic oligonucleotide
ggggagacaaagacattaagaatcaccacg

SEQ ID NO: 164047 - DNA, 30 bp, Artificial Sequence
  Synthetic oligonucleotide
attaggttcgatgtcattcgaaagaccacg

SEQ ID NO: 164048 - DNA, 30 bp, Artificial Sequence
  Synthetic oligonucleotide
caaacgcagtgtatggatcgatggcccacg

SEQ ID NO: 164049 - DNA, 30 bp, Artificial Sequence
  Synthetic oligonucleotide
ctaactggctgggcgtagcatctgcccacg

SEQ ID NO: 164050 - DNA, 30 bp, Artificial Sequence
  Synthetic oligonucleotide
caatgtttacaagggactttgaacgccacg

SEQ ID NO: 164051 - DNA, 30 bp, Artificial Sequence
  Synthetic oligonucleotide
gacaagtcaggaaatttgagcatggccacg

SEQ ID NO: 164052 - DNA, 30 bp, Artificial Sequence
  Synthetic oligonucleotide
aggcaagtaggtgtgtacctctatgccacg

SEQ ID NO: 164053 - DNA, 30 bp, Artificial Sequence
  Synthetic oligonucleotide
ggttcaaggttgtcgaggggccgtgccacg

SEQ ID NO: 164054 - DNA, 30 bp, Artificial Sequence
  Synthetic oligonucleotide
gagtagcttcttcttagtaggatatccacg

SEQ ID NO: 164055 - DNA, 30 bp, Artificial Sequence
  Synthetic oligonucleotide
ggacgagcctactttcgagtggcctccacg

SEQ ID NO: 164056 - DNA, 30 bp, Artificial Sequence
  Synthetic oligonucleotide
ggatgccgtttaagtgctaagaaaagcacg

SEQ ID NO: 164057 - DNA, 30 bp, Artificial Sequence
  Synthetic oligonucleotide
ggatgtcgggcccagatgtatctaagcacg

SEQ ID NO: 164058 - DNA, 30 bp, Artificial Sequence
  Synthetic oligonucleotide
agggttgcggtggagggtttcgtgagcacg

SEQ ID NO: 164059 - DNA, 30 bp, Artificial Sequence
  Synthetic oligonucleotide
catgaggtagttggttcggcgtttagcacg

SEQ ID NO: 164060 - DNA, 30 bp, Artificial Sequence
  Synthetic oligonucleotide
cgttagaagtgtcaatcctttacccgcacg

SEQ ID NO: 164061 - DNA, 30 bp, Artificial Sequence
  Synthetic oligonucleotide
agttctgctatctggtgaagagtgggcacg

SEQ ID NO: 164062 - DNA, 30 bp, Artificial Sequence
  Synthetic oligonucleotide
gtcgaaagtgtatgttgcgtcactggcacg

SEQ ID NO: 164063 - DNA, 30 bp, Artificial Sequence
  Synthetic oligonucleotide
gtttacaaggtattactcgcattcatcacg

SEQ ID NO: 164064 - DNA, 30 bp, Artificial Sequence
  Synthetic oligonucleotide
cgttaaaactgggatagatgagcgatcacg

SEQ ID NO: 164065 - DNA, 30 bp, Artificial Sequence
  Synthetic oligonucleotide
gaaagccttaaagtcgtaaaaatgctcacg

SEQ ID NO: 164066 - DNA, 30 bp, Artificial Sequence
  Synthetic oligonucleotide
aaggagggagctcttggtatggtgctcacg

SEQ ID NO: 164067 - DNA, 30 bp, Artificial Sequence
  Synthetic oligonucleotide
acaggcgtggagttaattcatatcgtcacg

SEQ ID NO: 164068 - DNA, 30 bp, Artificial Sequence
  Synthetic oligonucleotide
aaaagctggacagctgggagacaattcacg

SEQ ID NO: 164069 - DNA, 30 bp, Artificial Sequence
  Synthetic oligonucleotide
caggactcctaaacattccagattttcacg

SEQ ID NO: 164070 - DNA, 30 bp, Artificial Sequence
  Synthetic oligonucleotide
cgtatcatttgagcgtctgagcagaagacg

SEQ ID NO: 164071 - DNA, 30 bp, Artificial Sequence
  Synthetic oligonucleotide
tatgcgacattggagccgcactcacagacg

SEQ ID NO: 164072 - DNA, 30 bp, Artificial Sequence
  Synthetic oligonucleotide
tctgggacgcagtcccctaaccgacagacg

SEQ ID NO: 164073 - DNA, 30 bp, Artificial Sequence
  Synthetic oligonucleotide
ttggcgggcatcgaagtagtagaccagacg

SEQ ID NO: 164074 - DNA, 30 bp, Artificial Sequence
  Synthetic oligonucleotide
taacgattagaagtttaggtgtaccagacg

SEQ ID NO: 164075 - DNA, 30 bp, Artificial Sequence
  Synthetic oligonucleotide
ttacgggcagcgccttacgtaggccagacg

SEQ ID NO: 164076 - DNA, 30 bp, Artificial Sequence
  Synthetic oligonucleotide
ctgatacgagtagtgcacggaattcagacg

SEQ ID NO: 164077 - DNA, 30 bp, Artificial Sequence
  Synthetic oligonucleotide
ggtatcgggatggtcggtaaggaagagacg

SEQ ID NO: 164078 - DNA, 30 bp, Artificial Sequence
  Synthetic oligonucleotide
ttccaaccagtcaacgccactgaggagacg

SEQ ID NO: 164079 - DNA, 30 bp, Artificial Sequence
  Synthetic oligonucleotide
agtccgctaggtaatgttcaaggggagacg

SEQ ID NO: 164080 - DNA, 30 bp, Artificial Sequence
  Synthetic oligonucleotide
cggggtgcgaagtctgtgttgggggagacg

SEQ ID NO: 164081 - DNA, 30 bp, Artificial Sequence
  Synthetic oligonucleotide
aacattcgagtaattacgtcataaacgacg

SEQ ID NO: 164082 - DNA, 30 bp, Artificial Sequence
  Synthetic oligonucleotide
gtcaggtggagagacgacccctcaacgacg

SEQ ID NO: 164083 - DNA, 30 bp, Artificial Sequence
  Synthetic oligonucleotide
aatagcatcccgcttaagtgggtaacgacg

SEQ ID NO: 164084 - DNA, 30 bp, Artificial Sequence
  Synthetic oligonucleotide
cgtgcgtcggggtgcgctaataccacgacg

SEQ ID NO: 164085 - DNA, 30 bp, Artificial Sequence
  Synthetic oligonucleotide
attgtacggaatttaagcaagttcacgacg

SEQ ID NO: 164086 - DNA, 30 bp, Artificial Sequence
  Synthetic oligonucleotide
agggtaatgagccccgccgatatgacgacg

SEQ ID NO: 164087 - DNA, 30 bp, Artificial Sequence
  Synthetic oligonucleotide
aagtcggaaacggatctatactgtccgacg

SEQ ID NO: 164088 - DNA, 30 bp, Artificial Sequence
  Synthetic oligonucleotide
cgttagtcttacttcgggctcaacgcgacg

SEQ ID NO: 164089 - DNA, 30 bp, Artificial Sequence
  Synthetic oligonucleotide
gggaggattatgtgatcgggagacgcgacg

SEQ ID NO: 164090 - DNA, 30 bp, Artificial Sequence
  Synthetic oligonucleotide
gattaatcgattgggtgggctaccgcgacg

SEQ ID NO: 164091 - DNA, 30 bp, Artificial Sequence
  Synthetic oligonucleotide
tggggtagggcccagcgttatagtgcgacg

SEQ ID NO: 164092 - DNA, 30 bp, Artificial Sequence
  Synthetic oligonucleotide
agttaggtgtccgtgcagctaggtgcgacg

SEQ ID NO: 164093 - DNA, 30 bp, Artificial Sequence
  Synthetic oligonucleotide
atacgtttggcccttggtcggtactcgacg

SEQ ID NO: 164094 - DNA, 30 bp, Artificial Sequence
  Synthetic oligonucleotide
aaggtcgaaggcgcaaagcggcagtcgacg

SEQ ID NO: 164095 - DNA, 30 bp, Artificial Sequence
  Synthetic oligonucleotide
agagctagatctggtgacgatctttcgacg

SEQ ID NO: 164096 - DNA, 30 bp, Artificial Sequence
  Synthetic oligonucleotide
gctttgtacaatgatcaaagtcacaggacg

SEQ ID NO: 164097 - DNA, 30 bp, Artificial Sequence
  Synthetic oligonucleotide
gctcgcgcactacgcatgtggagcaggacg

SEQ ID NO: 164098 - DNA, 30 bp, Artificial Sequence
  Synthetic oligonucleotide
tgcagactgggttgcgtgactttcaggacg

SEQ ID NO: 164099 - DNA, 30 bp, Artificial Sequence
  Synthetic oligonucleotide
agggcatggatccggctctcgcagaggacg

SEQ ID NO: 164100 - DNA, 30 bp, Artificial Sequence
  Synthetic oligonucleotide
gtaagttgggcttgaaattgaaatcggacg

SEQ ID NO: 164101 - DNA, 30 bp, Artificial Sequence
  Synthetic oligonucleotide
agacagcgcgtcgtcgggacgcaagggacg

SEQ ID NO: 164102 - DNA, 30 bp, Artificial Sequence
  Synthetic oligonucleotide
gtgcacgatactcgcagtctaatcgggacg

SEQ ID NO: 164103 - DNA, 30 bp, Artificial Sequence
  Synthetic oligonucleotide
gatgttctagaggggctaactctggggacg

SEQ ID NO: 164104 - DNA, 30 bp, Artificial Sequence
  Synthetic oligonucleotide
ataagcgtgtaagaattaccagatgggacg

SEQ ID NO: 164105 - DNA, 30 bp, Artificial Sequence
  Synthetic oligonucleotide
atgttgtaatgaaattctaaaaaatggacg

SEQ ID NO: 164106 - DNA, 30 bp, Artificial Sequence
  Synthetic oligonucleotide
caacatgattcaagggcaaagcgatggacg

SEQ ID NO: 164107 - DNA, 30 bp, Artificial Sequence
  Synthetic oligonucleotide
cccttgtcaacgacgatataaagctggacg

SEQ ID NO: 164108 - DNA, 30 bp, Artificial Sequence
  Synthetic oligonucleotide
gttacacatagccctgaagtctgctggacg

SEQ ID NO: 164109 - DNA, 30 bp, Artificial Sequence
  Synthetic oligonucleotide
ggtgacatgcatgcaaaggagtaaatgacg

SEQ ID NO: 164110 - DNA, 30 bp, Artificial Sequence
  Synthetic oligonucleotide
ggggactagggaataaccgtatgaatgacg

SEQ ID NO: 164111 - DNA, 30 bp, Artificial Sequence
  Synthetic oligonucleotide
aggatcgtgacgcatctcgaagccatgacg

SEQ ID NO: 164112 - DNA, 30 bp, Artificial Sequence
  Synthetic oligonucleotide
atcatgggtagatgatcgtaaatcatgacg

SEQ ID NO: 164113 - DNA, 30 bp, Artificial Sequence
  Synthetic oligonucleotide
tggtgatcttgaacggcgtgattgatgacg

SEQ ID NO: 164114 - DNA, 30 bp, Artificial Sequence
  Synthetic oligonucleotide
ggcgtggcgcacttctgggatgcactgacg

SEQ ID NO: 164115 - DNA, 30 bp, Artificial Sequence
  Synthetic oligonucleotide
gataatagaatggcgttgggacacctgacg

SEQ ID NO: 164116 - DNA, 30 bp, Artificial Sequence
  Synthetic oligonucleotide
cgaatcaaccgcgtttatactcatgtgacg

SEQ ID NO: 164117 - DNA, 30 bp, Artificial Sequence
  Synthetic oligonucleotide
aaaggggccacactttgcaaaggattgacg

SEQ ID NO: 164118 - DNA, 30 bp, Artificial Sequence
  Synthetic oligonucleotide
gaggcaaccaaggctgatcaaaatttgacg

SEQ ID NO: 164119 - DNA, 30 bp, Artificial Sequence
  Synthetic oligonucleotide
taagtcgcgattgtgttgggatctttgacg

SEQ ID NO: 164120 - DNA, 30 bp, Artificial Sequence
  Synthetic oligonucleotide
gccgtccgtgggatgggttctaccaatacg

SEQ ID NO: 164121 - DNA, 30 bp, Artificial Sequence
  Synthetic oligonucleotide
tggggaggattacactctagatccaatacg

SEQ ID NO: 164122 - DNA, 30 bp, Artificial Sequence
  Synthetic oligonucleotide
acggtcgttcttccacatgtgctgaatacg

SEQ ID NO: 164123 - DNA, 30 bp, Artificial Sequence
  Synthetic oligonucleotide
tatcgttcatgcgtaactatcaaacatacg

SEQ ID NO: 164124 - DNA, 29 bp, Artificial Sequence
  Synthetic oligonucleotide
gaccacgcatcgtcggaacatcacatacg

SEQ ID NO: 164125 - DNA, 30 bp, Artificial Sequence
  Synthetic oligonucleotide
tgggggccgaacgctatctatcagcatacg

SEQ ID NO: 164126 - DNA, 30 bp, Artificial Sequence
  Synthetic oligonucleotide
tcaaatgcgctctaaacacatgggcatacg

SEQ ID NO: 164127 - DNA, 30 bp, Artificial Sequence
  Synthetic oligonucleotide
gttagcatttatttcgcgtactcggatacg

SEQ ID NO: 164128 - DNA, 30 bp, Artificial Sequence
  Synthetic oligonucleotide
gtgggcggcagaggtttgcactcatatacg

SEQ ID NO: 164129 - DNA, 30 bp, Artificial Sequence
  Synthetic oligonucleotide
tcattctaccagaaccagccgggatatacg

SEQ ID NO: 164130 - DNA, 30 bp, Artificial Sequence
  Synthetic oligonucleotide
ctttacaactagtgaaagaacgtatatacg

SEQ ID NO: 164131 - DNA, 30 bp, Artificial Sequence
  Synthetic oligonucleotide
cctttgcccatgaggatttaagactatacg

SEQ ID NO: 164132 - DNA, 30 bp, Artificial Sequence
  Synthetic oligonucleotide
acgggctacaattcccaccctatctatacg

SEQ ID NO: 164133 - DNA, 30 bp, Artificial Sequence
  Synthetic oligonucleotide
gcgaatatcggcttgcccgtagcgactacg

SEQ ID NO: 164134 - DNA, 30 bp, Artificial Sequence
  Synthetic oligonucleotide
accccgctcattaatgtaactgcgactacg

SEQ ID NO: 164135 - DNA, 30 bp, Artificial Sequence
  Synthetic oligonucleotide
gccggcctgaaggggtcccgacgtactacg

SEQ ID NO: 164136 - DNA, 30 bp, Artificial Sequence
  Synthetic oligonucleotide
gtacagaatgagtctagacgcatccctacg

SEQ ID NO: 164137 - DNA, 30 bp, Artificial Sequence
  Synthetic oligonucleotide
acgctggaaaggggtcccaacgctcctacg

SEQ ID NO: 164138 - DNA, 30 bp, Artificial Sequence
  Synthetic oligonucleotide
tgaatacgtcctccctcgcaatctcctacg

SEQ ID NO: 164139 - DNA, 30 bp, Artificial Sequence
  Synthetic oligonucleotide
gcatgatgggctccactcacacaagctacg

SEQ ID NO: 164140 - DNA, 30 bp, Artificial Sequence
  Synthetic oligonucleotide
ctgtcaacgggtccagatctcacagctacg

SEQ ID NO: 164141 - DNA, 30 bp, Artificial Sequence
  Synthetic oligonucleotide
tgcccggccgagtaaatctgcatagctacg

SEQ ID NO: 164142 - DNA, 30 bp, Artificial Sequence
  Synthetic oligonucleotide
cgataggcgcttcatcgacgtacggctacg

SEQ ID NO: 164143 - DNA, 30 bp, Artificial Sequence
  Synthetic oligonucleotide
cgcaatgtgaagaaacacaagcgggctacg

SEQ ID NO: 164144 - DNA, 30 bp, Artificial Sequence
  Synthetic oligonucleotide
gagtatgcgtagataaaggagttggctacg

SEQ ID NO: 164145 - DNA, 30 bp, Artificial Sequence
  Synthetic oligonucleotide
accgcttgtcaacaaaaagatacatctacg

SEQ ID NO: 164146 - DNA, 30 bp, Artificial Sequence
  Synthetic oligonucleotide
catattcatgcaaaggccggtccctctacg

SEQ ID NO: 164147 - DNA, 30 bp, Artificial Sequence
  Synthetic oligonucleotide
cgggcgaattagcgctcaaggggctctacg

SEQ ID NO: 164148 - DNA, 30 bp, Artificial Sequence
  Synthetic oligonucleotide
gcgtatactgtagcctaatggcattctacg

SEQ ID NO: 164149 - DNA, 30 bp, Artificial Sequence
  Synthetic oligonucleotide
tagtccagaataaactaggtacgttctacg

SEQ ID NO: 164150 - DNA, 30 bp, Artificial Sequence
  Synthetic oligonucleotide
cgggcacccgtttggcaggatgacagtacg

SEQ ID NO: 164151 - DNA, 30 bp, Artificial Sequence
  Synthetic oligonucleotide
agtcggagacagttccatacgctcagtacg

SEQ ID NO: 164152 - DNA, 30 bp, Artificial Sequence
  Synthetic oligonucleotide
gagcggaatatactcgtttggttcagtacg

SEQ ID NO: 164153 - DNA, 30 bp, Artificial Sequence
  Synthetic oligonucleotide
ggtcattgttcgctaaaaatctctagtacg

SEQ ID NO: 164154 - DNA, 30 bp, Artificial Sequence
  Synthetic oligonucleotide
agggaagtgtactattagccggttagtacg

SEQ ID NO: 164155 - DNA, 30 bp, Artificial Sequence
  Synthetic oligonucleotide
agagtgaactgctcttgcaccgtacgtacg

SEQ ID NO: 164156 - DNA, 30 bp, Artificial Sequence
  Synthetic oligonucleotide
gacacaaagatcgcagattaatatcgtacg

SEQ ID NO: 164157 - DNA, 30 bp, Artificial Sequence
  Synthetic oligonucleotide
ggtgggcacttgcagtattcgacaggtacg

SEQ ID NO: 164158 - DNA, 30 bp, Artificial Sequence
  Synthetic oligonucleotide
aagacgttaggtcacgttcggacgggtacg

SEQ ID NO: 164159 - DNA, 30 bp, Artificial Sequence
  Synthetic oligonucleotide
gctctgtaaacggcatccagcaagattacg

SEQ ID NO: 164160 - DNA, 30 bp, Artificial Sequence
  Synthetic oligonucleotide
tcattagttaggctgtcgattgagattacg

SEQ ID NO: 164161 - DNA, 30 bp, Artificial Sequence
  Synthetic oligonucleotide
taaaccgacaatttcaccgggtggattacg

SEQ ID NO: 164162 - DNA, 30 bp, Artificial Sequence
  Synthetic oligonucleotide
gagtagtgggactggtattgacgtattacg

SEQ ID NO: 164163 - DNA, 30 bp, Artificial Sequence
  Synthetic oligonucleotide
gtcggagcgtcactcgtggctactcttacg

SEQ ID NO: 164164 - DNA, 30 bp, Artificial Sequence
  Synthetic oligonucleotide
gtgaaaggctattgtgaccccctcgttacg

SEQ ID NO: 164165 - DNA, 39 bp, Artificial Sequence
  Synthetic oligonucleotide
agtccgtttatatgcttgacaagacctcgataatttacg

SEQ ID NO: 164166 - DNA, 30 bp, Artificial Sequence
  Synthetic oligonucleotide
gctaaccaagccatttccaccatatttacg

SEQ ID NO: 164167 - DNA, 30 bp, Artificial Sequence
  Synthetic oligonucleotide
tagaggcacagggctggagcggtatttacg

SEQ ID NO: 164168 - DNA, 30 bp, Artificial Sequence
  Synthetic oligonucleotide
ccggcgtgagggtatggcttgcactttacg

SEQ ID NO: 164169 - DNA, 31 bp, Artificial Sequence
  Synthetic oligonucleotide
gtcactaacatgcgagaggaatccgtttacg

SEQ ID NO: 164170 - DNA, 30 bp, Artificial Sequence
  Synthetic oligonucleotide
cgtgcacggttctgcaatctttcgtttacg

SEQ ID NO: 164171 - DNA, 30 bp, Artificial Sequence
  Synthetic oligonucleotide
gtataaagtggttacaaggagagcaaaccg

SEQ ID NO: 164172 - DNA, 30 bp, Artificial Sequence
  Synthetic oligonucleotide
atccgtagcggaatggaactgggcaaaccg

SEQ ID NO: 164173 - DNA, 30 bp, Artificial Sequence
  Synthetic oligonucleotide
ctcgcaagtgtgaagtaattacgccaaccg

SEQ ID NO: 164174 - DNA, 30 bp, Artificial Sequence
  Synthetic oligonucleotide
gcgtctttagctgggacacacttccaaccg

SEQ ID NO: 164175 - DNA, 30 bp, Artificial Sequence
  Synthetic oligonucleotide
tatgttgcaagaaaggaatacgcgcaaccg

SEQ ID NO: 164176 - DNA, 30 bp, Artificial Sequence
  Synthetic oligonucleotide
ggacatggtcactagtgtgcgaacgaaccg

SEQ ID NO: 164177 - DNA, 30 bp, Artificial Sequence
  Synthetic oligonucleotide
atgctgtttttcataacacgtttcgaaccg

SEQ ID NO: 164178 - DNA, 30 bp, Artificial Sequence
  Synthetic oligonucleotide
gttagccactgtgccacttcagaggaaccg

SEQ ID NO: 164179 - DNA, 30 bp, Artificial Sequence
  Synthetic oligonucleotide
tgaatggtcaaacgagtgttggaggaaccg

SEQ ID NO: 164180 - DNA, 30 bp, Artificial Sequence
  Synthetic oligonucleotide
cggttgtctaggagcgtcatcacggaaccg

SEQ ID NO: 164181 - DNA, 30 bp, Artificial Sequence
  Synthetic oligonucleotide
gcgaagcgctacattacaatttcggaaccg

SEQ ID NO: 164182 - DNA, 30 bp, Artificial Sequence
  Synthetic oligonucleotide
ctaactcacgtgattcgatctgcgtaaccg

SEQ ID NO: 164183 - DNA, 30 bp, Artificial Sequence
  Synthetic oligonucleotide
ctgtcattcgattcatccgcactttaaccg

SEQ ID NO: 164184 - DNA, 30 bp, Artificial Sequence
  Synthetic oligonucleotide
aaataaaagtatcatactatagtaacaccg

SEQ ID NO: 164185 - DNA, 30 bp, Artificial Sequence
  Synthetic oligonucleotide
agggtgtctgtaccggctaaggcgacaccg

SEQ ID NO: 164186 - DNA, 30 bp, Artificial Sequence
  Synthetic oligonucleotide
agtcgtaacgaactggtctgttcaccaccg

SEQ ID NO: 164187 - DNA, 30 bp, Artificial Sequence
  Synthetic oligonucleotide
tcgattattgtgctgggggagttaccaccg

SEQ ID NO: 164188 - DNA, 30 bp, Artificial Sequence
  Synthetic oligonucleotide
aaggttgtgcattccgatgacaacccaccg

SEQ ID NO: 164189 - DNA, 30 bp, Artificial Sequence
  Synthetic oligonucleotide
cctggatgtcgaaatacgccggagccaccg

SEQ ID NO: 164190 - DNA, 30 bp, Artificial Sequence
  Synthetic oligonucleotide
ggggggcagtattacttaatggaagcaccg

SEQ ID NO: 164191 - DNA, 30 bp, Artificial Sequence
  Synthetic oligonucleotide
ttcggtcatggctcggcgttggtagcaccg

SEQ ID NO: 164192 - DNA, 30 bp, Artificial Sequence
  Synthetic oligonucleotide
accacttggtgccgatcaatctgcgcaccg

SEQ ID NO: 164193 - DNA, 30 bp, Artificial Sequence
  Synthetic oligonucleotide
cgggtccaagacctatggatttcggcaccg

SEQ ID NO: 164194 - DNA, 30 bp, Artificial Sequence
  Synthetic oligonucleotide
gaaaagagtggattgatcatttcatcaccg

SEQ ID NO: 164195 - DNA, 30 bp, Artificial Sequence
  Synthetic oligonucleotide
ctgcagctatattcccgacccgtatcaccg

SEQ ID NO: 164196 - DNA, 30 bp, Artificial Sequence
  Synthetic oligonucleotide
ggtgccgactttaagtcgacaggctcaccg

SEQ ID NO: 164197 - DNA, 30 bp, Artificial Sequence
  Synthetic oligonucleotide
agttgtgtggactaattaaagtgctcaccg

SEQ ID NO: 164198 - DNA, 30 bp, Artificial Sequence
  Synthetic oligonucleotide
cccaattatcatagtagtaaatagtcaccg

SEQ ID NO: 164199 - DNA, 30 bp, Artificial Sequence
  Synthetic oligonucleotide
agacggccgcgctgccatccaaaacgaccg

SEQ ID NO: 164200 - DNA, 30 bp, Artificial Sequence
  Synthetic oligonucleotide
tctacatgttatacaagaccggagcgaccg

SEQ ID NO: 164201 - DNA, 30 bp, Artificial Sequence
  Synthetic oligonucleotide
gggcggcctacctgtagaacagggcgaccg

SEQ ID NO: 164202 - DNA, 30 bp, Artificial Sequence
  Synthetic oligonucleotide
acaagttacgttatcaatggttaaggaccg

SEQ ID NO: 164203 - DNA, 30 bp, Artificial Sequence
  Synthetic oligonucleotide
cagtacaagccggagagcacaccaggaccg

SEQ ID NO: 164204 - DNA, 31 bp, Artificial Sequence
  Synthetic oligonucleotide
tgaaatcaagccggagagaggacccggaccg

SEQ ID NO: 164205 - DNA, 30 bp, Artificial Sequence
  Synthetic oligonucleotide
ttgattatgttaagctctcgtcagggaccg

SEQ ID NO: 164206 - DNA, 30 bp, Artificial Sequence
  Synthetic oligonucleotide
ggtgacgaaagtcgagagggggtgggaccg

SEQ ID NO: 164207 - DNA, 30 bp, Artificial Sequence
  Synthetic oligonucleotide
tagtatacgttacttccgtagcatggaccg

SEQ ID NO: 164208 - DNA, 30 bp, Artificial Sequence
  Synthetic oligonucleotide
gacgagagaggaacatgaagggcctgaccg

SEQ ID NO: 164209 - DNA, 30 bp, Artificial Sequence
  Synthetic oligonucleotide
tcaacctccagaaagtctctactctgaccg

SEQ ID NO: 164210 - DNA, 30 bp, Artificial Sequence
  Synthetic oligonucleotide
tctgctgtatcgtcttgtttgtggtgaccg

SEQ ID NO: 164211 - DNA, 30 bp, Artificial Sequence
  Synthetic oligonucleotide
cgcactgacggaggctatatttggataccg

SEQ ID NO: 164212 - DNA, 30 bp, Artificial Sequence
  Synthetic oligonucleotide
gcactgtgtgatatggttcaaatgataccg

SEQ ID NO: 164213 - DNA, 30 bp, Artificial Sequence
  Synthetic oligonucleotide
tggaggttcagactccagagatcactaccg

SEQ ID NO: 164214 - DNA, 30 bp, Artificial Sequence
  Synthetic oligonucleotide
ggtttcttaacaagggaggggatactaccg

SEQ ID NO: 164215 - DNA, 30 bp, Artificial Sequence
  Synthetic oligonucleotide
gggaagcatcacactcttaagtaagtaccg

SEQ ID NO: 164216 - DNA, 30 bp, Artificial Sequence
  Synthetic oligonucleotide
cgtcttattgggaacccgtccggagtaccg

SEQ ID NO: 164217 - DNA, 30 bp, Artificial Sequence
  Synthetic oligonucleotide
tttgggaactttatgcgggatgtggtaccg

SEQ ID NO: 164218 - DNA, 30 bp, Artificial Sequence
  Synthetic oligonucleotide
gctagcattcctcgaacaattcgtgtaccg

SEQ ID NO: 164219 - DNA, 31 bp, Artificial Sequence
  Synthetic oligonucleotide
gtaagtgctgtcgcgaatgtcttttgtaccg

SEQ ID NO: 164220 - DNA, 30 bp, Artificial Sequence
  Synthetic oligonucleotide
ctggttgcgagaaaacgatactcaaacccg

SEQ ID NO: 164221 - DNA, 30 bp, Artificial Sequence
  Synthetic oligonucleotide
gacatacaaataatcaggctacgcaacccg

SEQ ID NO: 164222 - DNA, 30 bp, Artificial Sequence
  Synthetic oligonucleotide
gatcatctattacttggaacgtgtaacccg

SEQ ID NO: 164223 - DNA, 30 bp, Artificial Sequence
  Synthetic oligonucleotide
tttacagataagacccagagacttaacccg

SEQ ID NO: 164224 - DNA, 30 bp, Artificial Sequence
  Synthetic oligonucleotide
ggctgtagcccgcaggcacaagaacacccg

SEQ ID NO: 164225 - DNA, 30 bp, Artificial Sequence
  Synthetic oligonucleotide
tgtgtacaccgaagcggtcggtcgcacccg

SEQ ID NO: 164226 - DNA, 29 bp, Artificial Sequence
  Synthetic oligonucleotide
gcgcaaagcttatctcttcttcgcacccg

SEQ ID NO: 164227 - DNA, 30 bp, Artificial Sequence
  Synthetic oligonucleotide
agcctgatgttttcctagggaatgcacccg

SEQ ID NO: 164228 - DNA, 30 bp, Artificial Sequence
  Synthetic oligonucleotide
aaggcatacggggcattctagtttcacccg

SEQ ID NO: 164229 - DNA, 30 bp, Artificial Sequence
  Synthetic oligonucleotide
cacggatcgaggttaattcgctaagacccg

SEQ ID NO: 164230 - DNA, 30 bp, Artificial Sequence
  Synthetic oligonucleotide
tcgggtgcaattccccgcgttacagacccg

SEQ ID NO: 164231 - DNA, 30 bp, Artificial Sequence
  Synthetic oligonucleotide
ttcactgtccaacgcggaatgatagacccg

SEQ ID NO: 164232 - DNA, 30 bp, Artificial Sequence
  Synthetic oligonucleotide
cacaccacaggttctcgcccacccgacccg

SEQ ID NO: 164233 - DNA, 30 bp, Artificial Sequence
  Synthetic oligonucleotide
cgcggctgttcagaatatgctaatgacccg

SEQ ID NO: 164234 - DNA, 30 bp, Artificial Sequence
  Synthetic oligonucleotide
tccgcgatgcaagatcagcgattctacccg

SEQ ID NO: 164235 - DNA, 30 bp, Artificial Sequence
  Synthetic oligonucleotide
tttctggcaactgaaggagataaaaccccg

SEQ ID NO: 164236 - DNA, 30 bp, Artificial Sequence
  Synthetic oligonucleotide
actcttggctaggtcttcaaggcgaccccg

SEQ ID NO: 164237 - DNA, 30 bp, Artificial Sequence
  Synthetic oligonucleotide
gggtatccactaagatatgcgattaccccg

SEQ ID NO: 164238 - DNA, 30 bp, Artificial Sequence
  Synthetic oligonucleotide
ctgatgggctattcacatcgttgacccccg

SEQ ID NO: 164239 - DNA, 30 bp, Artificial Sequence
  Synthetic oligonucleotide
cccacagagtcatcaagttctctccccccg

SEQ ID NO: 164240 - DNA, 30 bp, Artificial Sequence
  Synthetic oligonucleotide
tatcagcgcgaacagtttggtgattccccg

SEQ ID NO: 164241 - DNA, 30 bp, Artificial Sequence
  Synthetic oligonucleotide
tctaggcagtggtctccaacggtttccccg

SEQ ID NO: 164242 - DNA, 30 bp, Artificial Sequence
  Synthetic oligonucleotide
cgtccaagtatcggactctgcataagcccg

SEQ ID NO: 164243 - DNA, 30 bp, Artificial Sequence
  Synthetic oligonucleotide
gccaaccaagactggacgggtatcagcccg

SEQ ID NO: 164244 - DNA, 30 bp, Artificial Sequence
  Synthetic oligonucleotide
agagtgcattgcacgtcccagattagcccg

SEQ ID NO: 164245 - DNA, 30 bp, Artificial Sequence
  Synthetic oligonucleotide
catttcaggcattactcatgagttcgcccg

SEQ ID NO: 164246 - DNA, 30 bp, Artificial Sequence
  Synthetic oligonucleotide
taagtccgctttgtggaaagaaagggcccg

SEQ ID NO: 164247 - DNA, 30 bp, Artificial Sequence
  Synthetic oligonucleotide
tcacgcctacgttcaagttgtagtggcccg

SEQ ID NO: 164248 - DNA, 30 bp, Artificial Sequence
  Synthetic oligonucleotide
acgtgggtcacgcaccggtcaacatgcccg

SEQ ID NO: 164249 - DNA, 30 bp, Artificial Sequence
  Synthetic oligonucleotide
tattgtagaggggtgttattgaggtgcccg

SEQ ID NO: 164250 - DNA, 30 bp, Artificial Sequence
  Synthetic oligonucleotide
gtagccttagtgacaagagtcttgtgcccg

SEQ ID NO: 164251 - DNA, 30 bp, Artificial Sequence
  Synthetic oligonucleotide
cgcgagctctcttcagctgggcatatcccg

SEQ ID NO: 164252 - DNA, 30 bp, Artificial Sequence
  Synthetic oligonucleotide
cagtgacaggcaggggaacccgtactcccg

SEQ ID NO: 164253 - DNA, 30 bp, Artificial Sequence
  Synthetic oligonucleotide
tcaacacaatcatcgcaggggaacctcccg

SEQ ID NO: 164254 - DNA, 30 bp, Artificial Sequence
  Synthetic oligonucleotide
tcaaatgaaggtacgggaacctagctcccg

SEQ ID NO: 164255 - DNA, 30 bp, Artificial Sequence
  Synthetic oligonucleotide
tgatcaatagattagtcatgcgggctcccg

SEQ ID NO: 164256 - DNA, 30 bp, Artificial Sequence
  Synthetic oligonucleotide
atcctcaaatgcgcgaaaaagtgtctcccg

SEQ ID NO: 164257 - DNA, 30 bp, Artificial Sequence
  Synthetic oligonucleotide
gccacggaagcggaaccatagttagtcccg

SEQ ID NO: 164258 - DNA, 30 bp, Artificial Sequence
  Synthetic oligonucleotide
tatggtgtggtcacctaccgactcgtcccg

SEQ ID NO: 164259 - DNA, 30 bp, Artificial Sequence
  Synthetic oligonucleotide
tacaaagattcacgtcagatattcgtcccg

SEQ ID NO: 164260 - DNA, 30 bp, Artificial Sequence
  Synthetic oligonucleotide
gcctgatctggacatctctagaatgtcccg

SEQ ID NO: 164261 - DNA, 30 bp, Artificial Sequence
  Synthetic oligonucleotide
ttgtagggacaattgcgacctcggttcccg

SEQ ID NO: 164262 - DNA, 30 bp, Artificial Sequence
  Synthetic oligonucleotide
ctacgctgggacccttcgtagattttcccg

SEQ ID NO: 164263 - DNA, 30 bp, Artificial Sequence
  Synthetic oligonucleotide
ggttatatcgtcacttaccctatcaagccg

SEQ ID NO: 164264 - DNA, 30 bp, Artificial Sequence
  Synthetic oligonucleotide
ttgggaccaaaggcattgcgtctcaagccg

SEQ ID NO: 164265 - DNA, 30 bp, Artificial Sequence
  Synthetic oligonucleotide
tatagcggctgacatcgcgcaggtaagccg

SEQ ID NO: 164266 - DNA, 30 bp, Artificial Sequence
  Synthetic oligonucleotide
ctgatgaactcaaaaccttatcaccagccg

SEQ ID NO: 164267 - DNA, 30 bp, Artificial Sequence
  Synthetic oligonucleotide
tttcgcacacactcggaacatcgtcagccg

SEQ ID NO: 164268 - DNA, 30 bp, Artificial Sequence
  Synthetic oligonucleotide
ttattctagttaccggtagataccgagccg

SEQ ID NO: 164269 - DNA, 29 bp, Artificial Sequence
  Synthetic oligonucleotide
gaggcgtcggatgtcacatgccggagccg

SEQ ID NO: 164270 - DNA, 30 bp, Artificial Sequence
  Synthetic oligonucleotide
acttgtaggagttgtcgactcctggagccg

SEQ ID NO: 164271 - DNA, 30 bp, Artificial Sequence
  Synthetic oligonucleotide
tctatatctggccttacgacgaatgagccg

SEQ ID NO: 164272 - DNA, 30 bp, Artificial Sequence
  Synthetic oligonucleotide
ggaatgtaagagtccttattcggtgagccg

SEQ ID NO: 164273 - DNA, 30 bp, Artificial Sequence
  Synthetic oligonucleotide
agagcattccgcaagcaggaccactagccg

SEQ ID NO: 164274 - DNA, 30 bp, Artificial Sequence
  Synthetic oligonucleotide
gcgatctcctgtgcaataggatattagccg

SEQ ID NO: 164275 - DNA, 30 bp, Artificial Sequence
  Synthetic oligonucleotide
ggcttggatccatgcgtggctagttagccg

SEQ ID NO: 164276 - DNA, 30 bp, Artificial Sequence
  Synthetic oligonucleotide
tgtctggctatcccaagatctggcacgccg

SEQ ID NO: 164277 - DNA, 30 bp, Artificial Sequence
  Synthetic oligonucleotide
gttcaaatcgattctaagtgtggggcgccg

SEQ ID NO: 164278 - DNA, 30 bp, Artificial Sequence
  Synthetic oligonucleotide
atacgtcccgctaaactcgcaactgcgccg

SEQ ID NO: 164279 - DNA, 30 bp, Artificial Sequence
  Synthetic oligonucleotide
aaaaaggcctgtatggatttcgaatcgccg

SEQ ID NO: 164280 - DNA, 30 bp, Artificial Sequence
  Synthetic oligonucleotide
agtttgtattcattcagacagtgatcgccg

SEQ ID NO: 164281 - DNA, 30 bp, Artificial Sequence
  Synthetic oligonucleotide
gtgcgacgaactcctgaagggtgctcgccg

SEQ ID NO: 164282 - DNA, 29 bp, Artificial Sequence
  Synthetic oligonucleotide
gagaagcaaatgagcattctagttcgccg

SEQ ID NO: 164283 - DNA, 30 bp, Artificial Sequence
  Synthetic oligonucleotide
tccgtcgtacctagacctcatcgttcgccg

SEQ ID NO: 164284 - DNA, 30 bp, Artificial Sequence
  Synthetic oligonucleotide
gacttgcactttggcggggtcgtgaggccg

SEQ ID NO: 164285 - DNA, 30 bp, Artificial Sequence
  Synthetic oligonucleotide
gtacgggtagattaagaactgcgacggccg

SEQ ID NO: 164286 - DNA, 30 bp, Artificial Sequence
  Synthetic oligonucleotide
cggtatccgttctaagagtcatgccggccg

SEQ ID NO: 164287 - DNA, 30 bp, Artificial Sequence
  Synthetic oligonucleotide
ggtaatacatattgaacggcgtgggggccg

SEQ ID NO: 164288 - DNA, 31 bp, Artificial Sequence
  Synthetic oligonucleotide
ggtcggattaagcttaataagtttggggccg

SEQ ID NO: 164289 - DNA, 30 bp, Artificial Sequence
  Synthetic oligonucleotide
gcaggtacgatagggagtaagtgtgggccg

SEQ ID NO: 164290 - DNA, 30 bp, Artificial Sequence
  Synthetic oligonucleotide
gtgtctacgtactaacacagccttgggccg

SEQ ID NO: 164291 - DNA, 30 bp, Artificial Sequence
  Synthetic oligonucleotide
ggggcatgggcggatctgatggaatggccg

SEQ ID NO: 164292 - DNA, 30 bp, Artificial Sequence
  Synthetic oligonucleotide
tccagccgtagatgagctaatgcatggccg

SEQ ID NO: 164293 - DNA, 30 bp, Artificial Sequence
  Synthetic oligonucleotide
tatgcctagagtcataagactacttggccg

SEQ ID NO: 164294 - DNA, 30 bp, Artificial Sequence
  Synthetic oligonucleotide
ttgtgagctgacattgttttcccttggccg

SEQ ID NO: 164295 - DNA, 30 bp, Artificial Sequence
  Synthetic oligonucleotide
cgagcactatgtgccagtcaagccatgccg

SEQ ID NO: 164296 - DNA, 30 bp, Artificial Sequence
  Synthetic oligonucleotide
tggcaaatttgagattaatcatggatgccg

SEQ ID NO: 164297 - DNA, 30 bp, Artificial Sequence
  Synthetic oligonucleotide
tatgcggactcgagaagaggctttctgccg

SEQ ID NO: 164298 - DNA, 30 bp, Artificial Sequence
  Synthetic oligonucleotide
atggacccctcgctaacgaaacccgtgccg

SEQ ID NO: 164299 - DNA, 30 bp, Artificial Sequence
  Synthetic oligonucleotide
gtctctatgggcattgaggttcgggtgccg

SEQ ID NO: 164300 - DNA, 30 bp, Artificial Sequence
  Synthetic oligonucleotide
tgttaacaacgggagggtggacatgtgccg

SEQ ID NO: 164301 - DNA, 30 bp, Artificial Sequence
  Synthetic oligonucleotide
ggctgacttgggacgccggaaaagttgccg

SEQ ID NO: 164302 - DNA, 31 bp, Artificial Sequence
  Synthetic oligonucleotide
actcatgtgtgctacaacatttgcaaatccg

SEQ ID NO: 164303 - DNA, 30 bp, Artificial Sequence
  Synthetic oligonucleotide
tacaagtcagctttaggagtgacgaatccg

SEQ ID NO: 164304 - DNA, 30 bp, Artificial Sequence
  Synthetic oligonucleotide
tccacaggccggcccgtgtgatggaatccg

SEQ ID NO: 164305 - DNA, 30 bp, Artificial Sequence
  Synthetic oligonucleotide
cggcaatctggctgagtatgcaataatccg

SEQ ID NO: 164306 - DNA, 30 bp, Artificial Sequence
  Synthetic oligonucleotide
atatggggtttgtttggacttcgtaatccg

SEQ ID NO: 164307 - DNA, 30 bp, Artificial Sequence
  Synthetic oligonucleotide
ggtcctaatggaaggtctgtggttaatccg

SEQ ID NO: 164308 - DNA, 30 bp, Artificial Sequence
  Synthetic oligonucleotide
gctgagatgcaatgagtattacatcatccg

SEQ ID NO: 164309 - DNA, 30 bp, Artificial Sequence
  Synthetic oligonucleotide
gttaaaagattaccgttaattatagatccg

SEQ ID NO: 164310 - DNA, 30 bp, Artificial Sequence
  Synthetic oligonucleotide
tggtgggttatatattacggcaacgatccg

SEQ ID NO: 164311 - DNA, 30 bp, Artificial Sequence
  Synthetic oligonucleotide
atgcgggacctccaccggaatcacgatccg

SEQ ID NO: 164312 - DNA, 30 bp, Artificial Sequence
  Synthetic oligonucleotide
aaacttagttggaacaaggaataggatccg

SEQ ID NO: 164313 - DNA, 30 bp, Artificial Sequence
  Synthetic oligonucleotide
ctctatcgacccagtcgagagtgggatccg

SEQ ID NO: 164314 - DNA, 30 bp, Artificial Sequence
  Synthetic oligonucleotide
ccggttcggcgatggtttggccaatatccg

SEQ ID NO: 164315 - DNA, 30 bp, Artificial Sequence
  Synthetic oligonucleotide
ggttacctgtcctcggtacaacgatatccg

SEQ ID NO: 164316 - DNA, 30 bp, Artificial Sequence
  Synthetic oligonucleotide
tacccctaggaaacttcattcggctatccg

SEQ ID NO: 164317 - DNA, 30 bp, Artificial Sequence
  Synthetic oligonucleotide
ccaaggcgttaccgcagacagtcgactccg

SEQ ID NO: 164318 - DNA, 30 bp, Artificial Sequence
  Synthetic oligonucleotide
aacgaatgtatacaaaccgtagtgactccg

SEQ ID NO: 164319 - DNA, 30 bp, Artificial Sequence
  Synthetic oligonucleotide
cgatgacgtttcgcaatatcccaccctccg

SEQ ID NO: 164320 - DNA, 30 bp, Artificial Sequence
  Synthetic oligonucleotide
atgaatcatctgtacatatggcttcctccg

SEQ ID NO: 164321 - DNA, 30 bp, Artificial Sequence
  Synthetic oligonucleotide
ggctacataaaccgccatagactggctccg

SEQ ID NO: 164322 - DNA, 30 bp, Artificial Sequence
  Synthetic oligonucleotide
ctcgaaaaatacatcacgcccgtggctccg

SEQ ID NO: 164323 - DNA, 30 bp, Artificial Sequence
  Synthetic oligonucleotide
caaggtagcccgacggaaaaacaatctccg

SEQ ID NO: 164324 - DNA, 30 bp, Artificial Sequence
  Synthetic oligonucleotide
ggttaaggctgttgtgaggttcgaagtccg

SEQ ID NO: 164325 - DNA, 30 bp, Artificial Sequence
  Synthetic oligonucleotide
ggagtacgtgcgagcttaaggtagagtccg

SEQ ID NO: 164326 - DNA, 30 bp, Artificial Sequence
  Synthetic oligonucleotide
aaactgatacgttatgaccctaggagtccg

SEQ ID NO: 164327 - DNA, 30 bp, Artificial Sequence
  Synthetic oligonucleotide
gcgggacagtgaaggctcggtgttagtccg

SEQ ID NO: 164328 - DNA, 30 bp, Artificial Sequence
  Synthetic oligonucleotide
ctaaatactgcttgcgtgccccaccgtccg

SEQ ID NO: 164329 - DNA, 30 bp, Artificial Sequence
  Synthetic oligonucleotide
tggaatagaggtaaagttcaaccgcgtccg

SEQ ID NO: 164330 - DNA, 30 bp, Artificial Sequence
  Synthetic oligonucleotide
gtaacctgaatgacctgcgccggtcgtccg

SEQ ID NO: 164331 - DNA, 30 bp, Artificial Sequence
  Synthetic oligonucleotide
ggttcgggaaaggtggtgccgaccggtccg

SEQ ID NO: 164332 - DNA, 30 bp, Artificial Sequence
  Synthetic oligonucleotide
ccgctaaaatttgtaacgagcggcggtccg

SEQ ID NO: 164333 - DNA, 30 bp, Artificial Sequence
  Synthetic oligonucleotide
agacctagattccgctggcttgatggtccg

SEQ ID NO: 164334 - DNA, 30 bp, Artificial Sequence
  Synthetic oligonucleotide
gacagtaccttctagaactagcctggtccg

SEQ ID NO: 164335 - DNA, 30 bp, Artificial Sequence
  Synthetic oligonucleotide
agacaatcgggtcaatgactaggatgtccg

SEQ ID NO: 164336 - DNA, 30 bp, Artificial Sequence
  Synthetic oligonucleotide
tggtggagccacatccgtaggaatattccg

SEQ ID NO: 164337 - DNA, 30 bp, Artificial Sequence
  Synthetic oligonucleotide
tgagatcacaaatgcccttattatattccg

SEQ ID NO: 164338 - DNA, 30 bp, Artificial Sequence
  Synthetic oligonucleotide
ccggccacgccgatattctagtcacttccg

SEQ ID NO: 164339 - DNA, 30 bp, Artificial Sequence
  Synthetic oligonucleotide
aaggtctaagacggtaggaattagcttccg

SEQ ID NO: 164340 - DNA, 30 bp, Artificial Sequence
  Synthetic oligonucleotide
cctaacttcgcaacattaacccctcttccg

SEQ ID NO: 164341 - DNA, 30 bp, Artificial Sequence
  Synthetic oligonucleotide
ccgcggctcgactccagtgtatttcttccg

SEQ ID NO: 164342 - DNA, 30 bp, Artificial Sequence
  Synthetic oligonucleotide
aaacaaggaggttacgtgcgctgcgttccg

SEQ ID NO: 164343 - DNA, 30 bp, Artificial Sequence
  Synthetic oligonucleotide
tgatagaggctaaatcagaaacaggttccg

SEQ ID NO: 164344 - DNA, 30 bp, Artificial Sequence
  Synthetic oligonucleotide
caccacgcaaggtagaatcggtaggttccg

SEQ ID NO: 164345 - DNA, 30 bp, Artificial Sequence
  Synthetic oligonucleotide
gcacaagggtccctgcaaacctaatttccg

SEQ ID NO: 164346 - DNA, 30 bp, Artificial Sequence
  Synthetic oligonucleotide
ctgaatggcgacttcgcattccgatttccg

SEQ ID NO: 164347 - DNA, 30 bp, Artificial Sequence
  Synthetic oligonucleotide
tagtgtccaataggccacgcgtgatttccg

SEQ ID NO: 164348 - DNA, 30 bp, Artificial Sequence
  Synthetic oligonucleotide
atcctaagtggtacactggcgcgaaaagcg

SEQ ID NO: 164349 - DNA, 30 bp, Artificial Sequence
  Synthetic oligonucleotide
caagaggtgggtttctacgagtgcaaagcg

SEQ ID NO: 164350 - DNA, 30 bp, Artificial Sequence
  Synthetic oligonucleotide
ggcgtaggggacccggagtctcagaaagcg

SEQ ID NO: 164351 - DNA, 31 bp, Artificial Sequence
  Synthetic oligonucleotide
tacagtaactactgtataaagcatgaaagcg

SEQ ID NO: 164352 - DNA, 30 bp, Artificial Sequence
  Synthetic oligonucleotide
cggacatccggctcgaccccactgaaagcg

SEQ ID NO: 164353 - DNA, 30 bp, Artificial Sequence
  Synthetic oligonucleotide
atggatagactcgtgcttgctgaacaagcg

SEQ ID NO: 164354 - DNA, 30 bp, Artificial Sequence
  Synthetic oligonucleotide
ggccatgcgtcagaaccgccttaacaagcg

SEQ ID NO: 164355 - DNA, 30 bp, Artificial Sequence
  Synthetic oligonucleotide
atgtggcagcagttaatgtcattacaagcg

SEQ ID NO: 164356 - DNA, 30 bp, Artificial Sequence
  Synthetic oligonucleotide
ataaatcgttatttagcggaaatgcaagcg

SEQ ID NO: 164357 - DNA, 30 bp, Artificial Sequence
  Synthetic oligonucleotide
gtcgtaagtgttccagatgagattcaagcg

SEQ ID NO: 164358 - DNA, 30 bp, Artificial Sequence
  Synthetic oligonucleotide
ttctagtactgatcacaatcatgggaagcg

SEQ ID NO: 164359 - DNA, 30 bp, Artificial Sequence
  Synthetic oligonucleotide
atcaggtacctgtagcgccggacctaagcg

SEQ ID NO: 164360 - DNA, 30 bp, Artificial Sequence
  Synthetic oligonucleotide
gtccaaatactcgattcactgtcgtaagcg

SEQ ID NO: 164361 - DNA, 30 bp, Artificial Sequence
  Synthetic oligonucleotide
gtgcgctcaagggcaaatgtcctgtaagcg

SEQ ID NO: 164362 - DNA, 30 bp, Artificial Sequence
  Synthetic oligonucleotide
caggtttgggtaaaagtatacaccacagcg

SEQ ID NO: 164363 - DNA, 30 bp, Artificial Sequence
  Synthetic oligonucleotide
tgcgcccgtatcgtgcaatagtcgacagcg

SEQ ID NO: 164364 - DNA, 30 bp, Artificial Sequence
  Synthetic oligonucleotide
ggcggggcggtaaggcccctgtaaccagcg

SEQ ID NO: 164365 - DNA, 30 bp, Artificial Sequence
  Synthetic oligonucleotide
cgcaccggaccttcattgggttaaccagcg

SEQ ID NO: 164366 - DNA, 30 bp, Artificial Sequence
  Synthetic oligonucleotide
tggtggactcaaaacttgaccttaccagcg

SEQ ID NO: 164367 - DNA, 30 bp, Artificial Sequence
  Synthetic oligonucleotide
tgggtttgagggacacctggatacccagcg

SEQ ID NO: 164368 - DNA, 30 bp, Artificial Sequence
  Synthetic oligonucleotide
ccacgcaaacggttcatgataaggccagcg

SEQ ID NO: 164369 - DNA, 31 bp, Artificial Sequence
  Synthetic oligonucleotide
agtctcgtagtgtgtgcgacgtcggccagcg

SEQ ID NO: 164370 - DNA, 30 bp, Artificial Sequence
  Synthetic oligonucleotide
gcagcgcccggtctgaacatagatccagcg

SEQ ID NO: 164371 - DNA, 30 bp, Artificial Sequence
  Synthetic oligonucleotide
ggaaggccaacgaagttcagtttcgcagcg

SEQ ID NO: 164372 - DNA, 30 bp, Artificial Sequence
  Synthetic oligonucleotide
tagattgtagataaaaccattatatcagcg

SEQ ID NO: 164373 - DNA, 30 bp, Artificial Sequence
  Synthetic oligonucleotide
caaactggtccccaggcacctctctcagcg

SEQ ID NO: 164374 - DNA, 30 bp, Artificial Sequence
  Synthetic oligonucleotide
gacggtttggttattaccgagtattcagcg

SEQ ID NO: 164375 - DNA, 30 bp, Artificial Sequence
  Synthetic oligonucleotide
gcaccgaggaaattgtggagctcttcagcg

SEQ ID NO: 164376 - DNA, 30 bp, Artificial Sequence
  Synthetic oligonucleotide
cactggccaggccttagaagcttaagagcg

SEQ ID NO: 164377 - DNA, 30 bp, Artificial Sequence
  Synthetic oligonucleotide
gtaagtgatcgcaagcgattgaacagagcg

SEQ ID NO: 164378 - DNA, 30 bp, Artificial Sequence
  Synthetic oligonucleotide
cgtgagggcctcgcaggtttccagagagcg

SEQ ID NO: 164379 - DNA, 30 bp, Artificial Sequence
  Synthetic oligonucleotide
gcgcttgaggtgcatcagcatgatagagcg

SEQ ID NO: 164380 - DNA, 30 bp, Artificial Sequence
  Synthetic oligonucleotide
acggacgtactgctggtagccaaacgagcg

SEQ ID NO: 164381 - DNA, 30 bp, Artificial Sequence
  Synthetic oligonucleotide
taaggcggtaggcgcgacaagccccgagcg

SEQ ID NO: 164382 - DNA, 30 bp, Artificial Sequence
  Synthetic oligonucleotide
tgggcgtccgaatgtaacttaatgcgagcg

SEQ ID NO: 164383 - DNA, 30 bp, Artificial Sequence
  Synthetic oligonucleotide
cgggttaccaaccagttgggatctggagcg

SEQ ID NO: 164384 - DNA, 30 bp, Artificial Sequence
  Synthetic oligonucleotide
gggcgaggccacatgtcacagagtggagcg

SEQ ID NO: 164385 - DNA, 30 bp, Artificial Sequence
  Synthetic oligonucleotide
gggtgactaaaagactgaccacgtggagcg

SEQ ID NO: 164386 - DNA, 30 bp, Artificial Sequence
  Synthetic oligonucleotide
ggctgtttctgcccataggcgggtggagcg

SEQ ID NO: 164387 - DNA, 30 bp, Artificial Sequence
  Synthetic oligonucleotide
ccgtgatccaaggcccatcatctatgagcg

SEQ ID NO: 164388 - DNA, 30 bp, Artificial Sequence
  Synthetic oligonucleotide
attgtcgactgaattggccagttatgagcg

SEQ ID NO: 164389 - DNA, 30 bp, Artificial Sequence
  Synthetic oligonucleotide
aattggaactcggactgtaacggctgagcg

SEQ ID NO: 164390 - DNA, 30 bp, Artificial Sequence
  Synthetic oligonucleotide
ccgctgggcgaggaagttaagtagtgagcg

SEQ ID NO: 164391 - DNA, 30 bp, Artificial Sequence
  Synthetic oligonucleotide
tatgaaactatggggaccgtcccaatagcg

SEQ ID NO: 164392 - DNA, 30 bp, Artificial Sequence
  Synthetic oligonucleotide
gtggtccacactttgtggattatcatagcg

SEQ ID NO: 164393 - DNA, 30 bp, Artificial Sequence
  Synthetic oligonucleotide
tctaggggtttgccggggcttgtcatagcg

SEQ ID NO: 164394 - DNA, 30 bp, Artificial Sequence
  Synthetic oligonucleotide
gtggacctggtaaaaagtgcgtatatagcg

SEQ ID NO: 164395 - DNA, 30 bp, Artificial Sequence
  Synthetic oligonucleotide
tgggcttgtcaatcagaaagattgctagcg

SEQ ID NO: 164396 - DNA, 30 bp, Artificial Sequence
  Synthetic oligonucleotide
aggtcggccatctgggttaacattctagcg

SEQ ID NO: 164397 - DNA, 30 bp, Artificial Sequence
  Synthetic oligonucleotide
ataggcacggaactcgctattagcgtagcg

SEQ ID NO: 164398 - DNA, 30 bp, Artificial Sequence
  Synthetic oligonucleotide
aggaccaagtgcttggggtgctgtgtagcg

SEQ ID NO: 164399 - DNA, 30 bp, Artificial Sequence
  Synthetic oligonucleotide
taacagctggcggccgggtttgcattagcg

SEQ ID NO: 164400 - DNA, 30 bp, Artificial Sequence
  Synthetic oligonucleotide
tatgggcgccgtagcgtctgcggattagcg

SEQ ID NO: 164401 - DNA, 30 bp, Artificial Sequence
  Synthetic oligonucleotide
acctgagcggagggcactcctatgaacgcg

SEQ ID NO: 164402 - DNA, 30 bp, Artificial Sequence
  Synthetic oligonucleotide
tgttcctgaatgaataagtccagtaacgcg

SEQ ID NO: 164403 - DNA, 30 bp, Artificial Sequence
  Synthetic oligonucleotide
tgcggataggctgtggcaccgggtaacgcg

SEQ ID NO: 164404 - DNA, 30 bp, Artificial Sequence
  Synthetic oligonucleotide
gtaagaataggatctgtatcataacacgcg

SEQ ID NO: 164405 - DNA, 30 bp, Artificial Sequence
  Synthetic oligonucleotide
tggtacgataaatgacgaatttgacacgcg

SEQ ID NO: 164406 - DNA, 30 bp, Artificial Sequence
  Synthetic oligonucleotide
acactcgcaaattaatagaccagccacgcg

SEQ ID NO: 164407 - DNA, 30 bp, Artificial Sequence
  Synthetic oligonucleotide
tatggaggtaagacaagtgtgcttcacgcg

SEQ ID NO: 164408 - DNA, 30 bp, Artificial Sequence
  Synthetic oligonucleotide
tggcgtagagatcagggtggcttatacgcg

SEQ ID NO: 164409 - DNA, 30 bp, Artificial Sequence
  Synthetic oligonucleotide
gcgccaaaacgtgaaactggctcgtacgcg

SEQ ID NO: 164410 - DNA, 30 bp, Artificial Sequence
  Synthetic oligonucleotide
aagttcgggaccgaggttattagttacgcg

SEQ ID NO: 164411 - DNA, 30 bp, Artificial Sequence
  Synthetic oligonucleotide
ctcaggaatagcttatggagggaaaccgcg

SEQ ID NO: 164412 - DNA, 30 bp, Artificial Sequence
  Synthetic oligonucleotide
gttggaacccgcaattgcgcaataaccgcg

SEQ ID NO: 164413 - DNA, 30 bp, Artificial Sequence
  Synthetic oligonucleotide
gggggcatctctatgtgtaatataaccgcg

SEQ ID NO: 164414 - DNA, 30 bp, Artificial Sequence
  Synthetic oligonucleotide
aaacatggatctattgggagcttcaccgcg

SEQ ID NO: 164415 - DNA, 30 bp, Artificial Sequence
  Synthetic oligonucleotide
cactggcgaattgctatttgtgtgaccgcg

SEQ ID NO: 164416 - DNA, 30 bp, Artificial Sequence
  Synthetic oligonucleotide
aggtactcgtcctcaacgtaaaataccgcg

SEQ ID NO: 164417 - DNA, 30 bp, Artificial Sequence
  Synthetic oligonucleotide
ttattcgggcgcggaagagcaagtaccgcg

SEQ ID NO: 164418 - DNA, 30 bp, Artificial Sequence
  Synthetic oligonucleotide
gttaaattgtaaactagtttgaaccccgcg

SEQ ID NO: 164419 - DNA, 30 bp, Artificial Sequence
  Synthetic oligonucleotide
agttacttggctgaagtaaacttgcccgcg

SEQ ID NO: 164420 - DNA, 30 bp, Artificial Sequence
  Synthetic oligonucleotide
gggggcgccacgtctaccaaggatcccgcg

SEQ ID NO: 164421 - DNA, 30 bp, Artificial Sequence
  Synthetic oligonucleotide
gtataaggttattctggattccgtcccgcg

SEQ ID NO: 164422 - DNA, 30 bp, Artificial Sequence
  Synthetic oligonucleotide
cgaggggagtctgcgagcattctagccgcg

SEQ ID NO: 164423 - DNA, 30 bp, Artificial Sequence
  Synthetic oligonucleotide
ggaccgtccctctagcgttcgagtgccgcg

SEQ ID NO: 164424 - DNA, 30 bp, Artificial Sequence
  Synthetic oligonucleotide
gaacagtgtcaccttccgatggggtccgcg

SEQ ID NO: 164425 - DNA, 30 bp, Artificial Sequence
  Synthetic oligonucleotide
aggaccgtttgaaagcaacataaaagcgcg

SEQ ID NO: 164426 - DNA, 30 bp, Artificial Sequence
  Synthetic oligonucleotide
cttgacaactctggctccaggtgcagcgcg

SEQ ID NO: 164427 - DNA, 30 bp, Artificial Sequence
  Synthetic oligonucleotide
tgtcctcaaaagcgtccatatcgtagcgcg

SEQ ID NO: 164428 - DNA, 30 bp, Artificial Sequence
  Synthetic oligonucleotide
tatgccgtcgacactgtaaagtgtagcgcg

SEQ ID NO: 164429 - DNA, 30 bp, Artificial Sequence
  Synthetic oligonucleotide
cttgcttggatagtgcaatctgggcgcgcg

SEQ ID NO: 164430 - DNA, 30 bp, Artificial Sequence
  Synthetic oligonucleotide
aggaggagacattatttatttcaaggcgcg

SEQ ID NO: 164431 - DNA, 30 bp, Artificial Sequence
  Synthetic oligonucleotide
gttattagcggacttatccagaaatgcgcg

SEQ ID NO: 164432 - DNA, 30 bp, Artificial Sequence
  Synthetic oligonucleotide
gaactttagtgccgtgggagagtctgcgcg

SEQ ID NO: 164433 - DNA, 30 bp, Artificial Sequence
  Synthetic oligonucleotide
gttgttaagtaggtagataaagcgtgcgcg

SEQ ID NO: 164434 - DNA, 30 bp, Artificial Sequence
  Synthetic oligonucleotide
cggttgcacaccttttaagcgaattgcgcg

SEQ ID NO: 164435 - DNA, 30 bp, Artificial Sequence
  Synthetic oligonucleotide
gactaactatcgtagacagtcaatatcgcg

SEQ ID NO: 164436 - DNA, 30 bp, Artificial Sequence
  Synthetic oligonucleotide
cgcaggatcatggcttgacgggatatcgcg

SEQ ID NO: 164437 - DNA, 30 bp, Artificial Sequence
  Synthetic oligonucleotide
caatccaaaggccaggggttgtacctcgcg

SEQ ID NO: 164438 - DNA, 30 bp, Artificial Sequence
  Synthetic oligonucleotide
ccggggggtcgtggcagtaggtcattcgcg

SEQ ID NO: 164439 - DNA, 30 bp, Artificial Sequence
  Synthetic oligonucleotide
tgcagttagggtggtcctcgcggattcgcg

SEQ ID NO: 164440 - DNA, 30 bp, Artificial Sequence
  Synthetic oligonucleotide
gaccgttgcctcattgtgccacagttcgcg

SEQ ID NO: 164441 - DNA, 30 bp, Artificial Sequence
  Synthetic oligonucleotide
aacctgccgcactggatgggtacgttcgcg

SEQ ID NO: 164442 - DNA, 30 bp, Artificial Sequence
  Synthetic oligonucleotide
acgagcccaaccccgacaatgtttttcgcg

SEQ ID NO: 164443 - DNA, 30 bp, Artificial Sequence
  Synthetic oligonucleotide
acagcctccaaccagctgcggaaaaaggcg

SEQ ID NO: 164444 - DNA, 30 bp, Artificial Sequence
  Synthetic oligonucleotide
tagggaagtacttgcgttccaggaaaggcg

SEQ ID NO: 164445 - DNA, 30 bp, Artificial Sequence
  Synthetic oligonucleotide
gggtacactggctaactcgccgccaaggcg

SEQ ID NO: 164446 - DNA, 30 bp, Artificial Sequence
  Synthetic oligonucleotide
gtcgagctgaaagcattctactagaaggcg

SEQ ID NO: 164447 - DNA, 30 bp, Artificial Sequence
  Synthetic oligonucleotide
tgggttaagatgaccttccctaataaggcg

SEQ ID NO: 164448 - DNA, 30 bp, Artificial Sequence
  Synthetic oligonucleotide
agcgccgggtgcacgtcggaaactaaggcg

SEQ ID NO: 164449 - DNA, 30 bp, Artificial Sequence
  Synthetic oligonucleotide
aacgagtgtctgcgccgaataactaaggcg

SEQ ID NO: 164450 - DNA, 30 bp, Artificial Sequence
  Synthetic oligonucleotide
gtagctgacagatgtgcggttcgtaaggcg

SEQ ID NO: 164451 - DNA, 30 bp, Artificial Sequence
  Synthetic oligonucleotide
ttcacccctgggaggtcttctgcacaggcg

SEQ ID NO: 164452 - DNA, 30 bp, Artificial Sequence
  Synthetic oligonucleotide
gtagtctctaactgacatgagtgacaggcg

SEQ ID NO: 164453 - DNA, 30 bp, Artificial Sequence
  Synthetic oligonucleotide
ccactgtgccaggggagctcactccaggcg

SEQ ID NO: 164454 - DNA, 29 bp, Artificial Sequence
  Synthetic oligonucleotide
tgcgtacaggtagcccatgctagcaggcg

SEQ ID NO: 164455 - DNA, 30 bp, Artificial Sequence
  Synthetic oligonucleotide
gacacggtcgtgccagaatcgaatcaggcg

SEQ ID NO: 164456 - DNA, 30 bp, Artificial Sequence
  Synthetic oligonucleotide
gggggattatatcgttctcagagagaggcg

SEQ ID NO: 164457 - DNA, 30 bp, Artificial Sequence
  Synthetic oligonucleotide
agtaggacgtcctagatcacagtagaggcg

SEQ ID NO: 164458 - DNA, 30 bp, Artificial Sequence
  Synthetic oligonucleotide
gaaaaaccacctgaagctgggggcgaggcg

SEQ ID NO: 164459 - DNA, 30 bp, Artificial Sequence
  Synthetic oligonucleotide
tgtagacttacagaatgaagtggtgaggcg

SEQ ID NO: 164460 - DNA, 30 bp, Artificial Sequence
  Synthetic oligonucleotide
cgcaataatccagcacattgcttataggcg

SEQ ID NO: 164461 - DNA, 31 bp, Artificial Sequence
  Synthetic oligonucleotide
tccacactagaaccaccttggaggttaggcg

SEQ ID NO: 164462 - DNA, 30 bp, Artificial Sequence
  Synthetic oligonucleotide
gcatcgttagagcgagtacgcggaacggcg

SEQ ID NO: 164463 - DNA, 30 bp, Artificial Sequence
  Synthetic oligonucleotide
ctttaaccggaagtggggcgtatcccggcg

SEQ ID NO: 164464 - DNA, 30 bp, Artificial Sequence
  Synthetic oligonucleotide
agaaatgggcgggtgattgattgtccggcg

SEQ ID NO: 164465 - DNA, 30 bp, Artificial Sequence
  Synthetic oligonucleotide
taccaacccaaaacgcccgtaattccggcg

SEQ ID NO: 164466 - DNA, 30 bp, Artificial Sequence
  Synthetic oligonucleotide
attgtcaaattggcgtctctgccgtcggcg

SEQ ID NO: 164467 - DNA, 30 bp, Artificial Sequence
  Synthetic oligonucleotide
gaagaagcggacaggggtgttgaaagggcg

SEQ ID NO: 164468 - DNA, 30 bp, Artificial Sequence
  Synthetic oligonucleotide
gcacagatctaggaagtgcctagaagggcg

SEQ ID NO: 164469 - DNA, 30 bp, Artificial Sequence
  Synthetic oligonucleotide
aatataagggacgggagtcgtggaagggcg

SEQ ID NO: 164470 - DNA, 30 bp, Artificial Sequence
  Synthetic oligonucleotide
ccatatagcagggagtcgcaatccagggcg

SEQ ID NO: 164471 - DNA, 30 bp, Artificial Sequence
  Synthetic oligonucleotide
atgcgacggtgattagaacagccacgggcg

SEQ ID NO: 164472 - DNA, 30 bp, Artificial Sequence
  Synthetic oligonucleotide
agtgtattccttcagtctcgacctcgggcg

SEQ ID NO: 164473 - DNA, 30 bp, Artificial Sequence
  Synthetic oligonucleotide
cagagtttccgatgtacactatcaggggcg

SEQ ID NO: 164474 - DNA, 30 bp, Artificial Sequence
  Synthetic oligonucleotide
agtacgctctcctattgtgaatccggggcg

SEQ ID NO: 164475 - DNA, 30 bp, Artificial Sequence
  Synthetic oligonucleotide
cgtaaggaagtgcccaacggtatcggggcg

SEQ ID NO: 164476 - DNA, 30 bp, Artificial Sequence
  Synthetic oligonucleotide
gcatccgtgaggtaaggctgatggggggcg

SEQ ID NO: 164477 - DNA, 30 bp, Artificial Sequence
  Synthetic oligonucleotide
tgatcagcgcctaactcatacgaatgggcg

SEQ ID NO: 164478 - DNA, 30 bp, Artificial Sequence
  Synthetic oligonucleotide
gccagtcagatcccagtgatcgtatgggcg

SEQ ID NO: 164479 - DNA, 30 bp, Artificial Sequence
  Synthetic oligonucleotide
gaacagcatgcgctattaacgcgctgggcg

SEQ ID NO: 164480 - DNA, 30 bp, Artificial Sequence
  Synthetic oligonucleotide
actcataaacgaggctcattgaggtgggcg

SEQ ID NO: 164481 - DNA, 30 bp, Artificial Sequence
  Synthetic oligonucleotide
ttacggtttgtgcgcaaagggaacatggcg

SEQ ID NO: 164482 - DNA, 30 bp, Artificial Sequence
  Synthetic oligonucleotide
cggtagatgcgctggagtcaaaccatggcg

SEQ ID NO: 164483 - DNA, 30 bp, Artificial Sequence
  Synthetic oligonucleotide
cgacctaagacatttatcgtagcgatggcg

SEQ ID NO: 164484 - DNA, 30 bp, Artificial Sequence
  Synthetic oligonucleotide
cccgtcgatgtgggcctaagttggatggcg

SEQ ID NO: 164485 - DNA, 30 bp, Artificial Sequence
  Synthetic oligonucleotide
ccgtgcctcttagtgcgcttcagtctggcg

SEQ ID NO: 164486 - DNA, 30 bp, Artificial Sequence
  Synthetic oligonucleotide
caatccccctggattaattcaagcgtggcg

SEQ ID NO: 164487 - DNA, 30 bp, Artificial Sequence
  Synthetic oligonucleotide
cgagtttaagaatagataacatgcgtggcg

SEQ ID NO: 164488 - DNA, 30 bp, Artificial Sequence
  Synthetic oligonucleotide
actggctgagaaaaagggtaggaggtggcg

SEQ ID NO: 164489 - DNA, 30 bp, Artificial Sequence
  Synthetic oligonucleotide
aaaggtagcgataatgactgccgggtggcg

SEQ ID NO: 164490 - DNA, 30 bp, Artificial Sequence
  Synthetic oligonucleotide
tggtgtccatcggtgtttatagctgtggcg

SEQ ID NO: 164491 - DNA, 30 bp, Artificial Sequence
  Synthetic oligonucleotide
gggagcgtgcgaagctgggttttattggcg

SEQ ID NO: 164492 - DNA, 30 bp, Artificial Sequence
  Synthetic oligonucleotide
acagaaatatttgaaagcgtacccttggcg

SEQ ID NO: 164493 - DNA, 30 bp, Artificial Sequence
  Synthetic oligonucleotide
cgtgatttacggctaattgtcaggttggcg

SEQ ID NO: 164494 - DNA, 30 bp, Artificial Sequence
  Synthetic oligonucleotide
ctttggatacgcgagttcagtaggttggcg

SEQ ID NO: 164495 - DNA, 30 bp, Artificial Sequence
  Synthetic oligonucleotide
tgagaaggatcatcctcggagcaaaatgcg

SEQ ID NO: 164496 - DNA, 30 bp, Artificial Sequence
  Synthetic oligonucleotide
agaagaacaacgctagccgcttacaatgcg

SEQ ID NO: 164497 - DNA, 30 bp, Artificial Sequence
  Synthetic oligonucleotide
agtgtttaggagtgatttcgaggcaatgcg

SEQ ID NO: 164498 - DNA, 30 bp, Artificial Sequence
  Synthetic oligonucleotide
acaatgcacagcagagcggtcggcaatgcg

SEQ ID NO: 164499 - DNA, 30 bp, Artificial Sequence
  Synthetic oligonucleotide
ggagatggccagcgctacgttattaatgcg

SEQ ID NO: 164500 - DNA, 30 bp, Artificial Sequence
  Synthetic oligonucleotide
catgtgatcactgtcggttattaccatgcg

SEQ ID NO: 164501 - DNA, 30 bp, Artificial Sequence
  Synthetic oligonucleotide
aaacgtgctacttgtcgcacgagtcatgcg

SEQ ID NO: 164502 - DNA, 30 bp, Artificial Sequence
  Synthetic oligonucleotide
gtatagtcaggacagatctttggtcatgcg

SEQ ID NO: 164503 - DNA, 30 bp, Artificial Sequence
  Synthetic oligonucleotide
actctcagagatgcatgacagtgagatgcg

SEQ ID NO: 164504 - DNA, 30 bp, Artificial Sequence
  Synthetic oligonucleotide
tggtgggcagagagccaacagcaggatgcg

SEQ ID NO: 164505 - DNA, 30 bp, Artificial Sequence
  Synthetic oligonucleotide
taccccggcaggggggacataatcactgcg

SEQ ID NO: 164506 - DNA, 30 bp, Artificial Sequence
  Synthetic oligonucleotide
tgtggatagtacagagcccaaatgactgcg

SEQ ID NO: 164507 - DNA, 30 bp, Artificial Sequence
  Synthetic oligonucleotide
gggatgagcctaccagcataccggcctgcg

SEQ ID NO: 164508 - DNA, 30 bp, Artificial Sequence
  Synthetic oligonucleotide
gtgacaactttaaccggtttcagcgctgcg

SEQ ID NO: 164509 - DNA, 30 bp, Artificial Sequence
  Synthetic oligonucleotide
cgggaattgtgcccagaggtaaaggctgcg

SEQ ID NO: 164510 - DNA, 30 bp, Artificial Sequence
  Synthetic oligonucleotide
tgcctgcttcggaatatcattgcggctgcg

SEQ ID NO: 164511 - DNA, 30 bp, Artificial Sequence
  Synthetic oligonucleotide
gcactgtgctgcgagcttggttcggctgcg

SEQ ID NO: 164512 - DNA, 30 bp, Artificial Sequence
  Synthetic oligonucleotide
agtttcgggcaggactgggagactgctgcg

SEQ ID NO: 164513 - DNA, 30 bp, Artificial Sequence
  Synthetic oligonucleotide
tgtcgaattatttgataggtgacatctgcg

SEQ ID NO: 164514 - DNA, 30 bp, Artificial Sequence
  Synthetic oligonucleotide
gatctacaatggcgaagtacagactctgcg

SEQ ID NO: 164515 - DNA, 30 bp, Artificial Sequence
  Synthetic oligonucleotide
ggcccggttaccatggcacttaggtctgcg

SEQ ID NO: 164516 - DNA, 30 bp, Artificial Sequence
  Synthetic oligonucleotide
agagtaccaaaggttctctatgtgtctgcg

SEQ ID NO: 164517 - DNA, 30 bp, Artificial Sequence
  Synthetic oligonucleotide
aagcggcaacgcgtaacacgttcttctgcg

SEQ ID NO: 164518 - DNA, 30 bp, Artificial Sequence
  Synthetic oligonucleotide
taaggcgctcccgatgccttgagttctgcg

SEQ ID NO: 164519 - DNA, 30 bp, Artificial Sequence
  Synthetic oligonucleotide
gagcggggggttcaatagctattttctgcg

SEQ ID NO: 164520 - DNA, 30 bp, Artificial Sequence
  Synthetic oligonucleotide
agtctccacgacgacgttcctaccagtgcg

SEQ ID NO: 164521 - DNA, 30 bp, Artificial Sequence
  Synthetic oligonucleotide
gcttgcagctgaaccatcagacatagtgcg

SEQ ID NO: 164522 - DNA, 30 bp, Artificial Sequence
  Synthetic oligonucleotide
cttcatcactaagcgagcccttctagtgcg

SEQ ID NO: 164523 - DNA, 30 bp, Artificial Sequence
  Synthetic oligonucleotide
tgagatgctgttaggaccgcggttagtgcg

SEQ ID NO: 164524 - DNA, 30 bp, Artificial Sequence
  Synthetic oligonucleotide
ttttcaaaacatcggcggagtcgacgtgcg

SEQ ID NO: 164525 - DNA, 30 bp, Artificial Sequence
  Synthetic oligonucleotide
actctgttccccgtgaactgctagcgtgcg

SEQ ID NO: 164526 - DNA, 30 bp, Artificial Sequence
  Synthetic oligonucleotide
ggggaaaccatggttgctcttaggcgtgcg

SEQ ID NO: 164527 - DNA, 30 bp, Artificial Sequence
  Synthetic oligonucleotide
tgtaagtcacaagataagggggcaggtgcg

SEQ ID NO: 164528 - DNA, 30 bp, Artificial Sequence
  Synthetic oligonucleotide
gccgataccgacggtgtggtatccggtgcg

SEQ ID NO: 164529 - DNA, 25 bp, Artificial Sequence
  Synthetic oligonucleotide
acatgaaaaagggtgtgtatgtgcg

SEQ ID NO: 164530 - DNA, 30 bp, Artificial Sequence
  Synthetic oligonucleotide
aactgtccacaacgttccgtcgagtgtgcg

SEQ ID NO: 164531 - DNA, 30 bp, Artificial Sequence
  Synthetic oligonucleotide
tgccaagcgtccattccgcaaagtattgcg

SEQ ID NO: 164532 - DNA, 30 bp, Artificial Sequence
  Synthetic oligonucleotide
ttttcgggacggcaggacctccgacttgcg

SEQ ID NO: 164533 - DNA, 30 bp, Artificial Sequence
  Synthetic oligonucleotide
cgcttctcgtaattacgtgtcacccttgcg

SEQ ID NO: 164534 - DNA, 30 bp, Artificial Sequence
  Synthetic oligonucleotide
cgccaatgtcatcccttgggtagccttgcg

SEQ ID NO: 164535 - DNA, 30 bp, Artificial Sequence
  Synthetic oligonucleotide
tgcacataaagcatctacgagggccttgcg

SEQ ID NO: 164536 - DNA, 30 bp, Artificial Sequence
  Synthetic oligonucleotide
gcgcttagtataaaccgaagtttgtttgcg

SEQ ID NO: 164537 - DNA, 30 bp, Artificial Sequence
  Synthetic oligonucleotide
cgctattctataagtcttttaacaaaatcg

SEQ ID NO: 164538 - DNA, 30 bp, Artificial Sequence
  Synthetic oligonucleotide
atcgtaacccacgggggattaagaaaatcg

SEQ ID NO: 164539 - DNA, 30 bp, Artificial Sequence
  Synthetic oligonucleotide
acaatttcctatgcaggtaggcctaaatcg

SEQ ID NO: 164540 - DNA, 30 bp, Artificial Sequence
  Synthetic oligonucleotide
atagccccgtttgatgacacggttaaatcg

SEQ ID NO: 164541 - DNA, 30 bp, Artificial Sequence
  Synthetic oligonucleotide
gagtcatgaacatgaatatccgaacaatcg

SEQ ID NO: 164542 - DNA, 30 bp, Artificial Sequence
  Synthetic oligonucleotide
catggctacgggcataaaattcgacaatcg

SEQ ID NO: 164543 - DNA, 30 bp, Artificial Sequence
  Synthetic oligonucleotide
cattaagaataggtcatgagcatacaatcg

SEQ ID NO: 164544 - DNA, 30 bp, Artificial Sequence
  Synthetic oligonucleotide
tcagtgtggacactgttcagacatgaatcg

SEQ ID NO: 164545 - DNA, 30 bp, Artificial Sequence
  Synthetic oligonucleotide
ggaccgtccagatctgcataggttgaatcg

SEQ ID NO: 164546 - DNA, 30 bp, Artificial Sequence
  Synthetic oligonucleotide
ggcgatagagtaatctccgtaccataatcg

SEQ ID NO: 164547 - DNA, 30 bp, Artificial Sequence
  Synthetic oligonucleotide
atcaggatcagtggtttcgtacagtaatcg

SEQ ID NO: 164548 - DNA, 30 bp, Artificial Sequence
  Synthetic oligonucleotide
acacccgttattactagatcccggtaatcg

SEQ ID NO: 164549 - DNA, 30 bp, Artificial Sequence
  Synthetic oligonucleotide
gccataagctactggtaatgtcattaatcg

SEQ ID NO: 164550 - DNA, 30 bp, Artificial Sequence
  Synthetic oligonucleotide
acgccaggggatataccacgttcaacatcg

SEQ ID NO: 164551 - DNA, 30 bp, Artificial Sequence
  Synthetic oligonucleotide
cgttacaatcggttggctgacttcacatcg

SEQ ID NO: 164552 - DNA, 30 bp, Artificial Sequence
  Synthetic oligonucleotide
cttgctgtaggcggttttattgaaccatcg

SEQ ID NO: 164553 - DNA, 30 bp, Artificial Sequence
  Synthetic oligonucleotide
gagctgccgtgcgagctttatggaccatcg

SEQ ID NO: 164554 - DNA, 30 bp, Artificial Sequence
  Synthetic oligonucleotide
tcccgaacaacgataaccgtacccccatcg

SEQ ID NO: 164555 - DNA, 30 bp, Artificial Sequence
  Synthetic oligonucleotide
cttttaggataagtcaacgacttgccatcg

SEQ ID NO: 164556 - DNA, 30 bp, Artificial Sequence
  Synthetic oligonucleotide
atgctggcaatacctttagagagtccatcg

SEQ ID NO: 164557 - DNA, 30 bp, Artificial Sequence
  Synthetic oligonucleotide
tacgttccctgggggcttttcacggcatcg

SEQ ID NO: 164558 - DNA, 30 bp, Artificial Sequence
  Synthetic oligonucleotide
tctgtcataatatgtttgagagtggcatcg

SEQ ID NO: 164559 - DNA, 30 bp, Artificial Sequence
  Synthetic oligonucleotide
taatccagacgaaaggtttgggctgcatcg

SEQ ID NO: 164560 - DNA, 30 bp, Artificial Sequence
  Synthetic oligonucleotide
aggattgacacgtgcgacaatctctcatcg

SEQ ID NO: 164561 - DNA, 30 bp, Artificial Sequence
  Synthetic oligonucleotide
cgttgctaccagggcatttggatgtcatcg

SEQ ID NO: 164562 - DNA, 30 bp, Artificial Sequence
  Synthetic oligonucleotide
caattacacaagcgttcgtaacattcatcg

SEQ ID NO: 164563 - DNA, 30 bp, Artificial Sequence
  Synthetic oligonucleotide
actgtttcaccgtttacaacggcttcatcg

SEQ ID NO: 164564 - DNA, 30 bp, Artificial Sequence
  Synthetic oligonucleotide
ggcacttaggttgtataaaacttcagatcg

SEQ ID NO: 164565 - DNA, 30 bp, Artificial Sequence
  Synthetic oligonucleotide
cctgatatctttgagtaagtctttagatcg

SEQ ID NO: 164566 - DNA, 30 bp, Artificial Sequence
  Synthetic oligonucleotide
tacttaataggccctctgtacgaccgatcg

SEQ ID NO: 164567 - DNA, 30 bp, Artificial Sequence
  Synthetic oligonucleotide
aggctgggtcgcgtaacagacccgcgatcg

SEQ ID NO: 164568 - DNA, 30 bp, Artificial Sequence
  Synthetic oligonucleotide
atgtagttgtaatgcctatcaagtggatcg

SEQ ID NO: 164569 - DNA, 30 bp, Artificial Sequence
  Synthetic oligonucleotide
cgttaatttaaacacgattcacactgatcg

SEQ ID NO: 164570 - DNA, 30 bp, Artificial Sequence
  Synthetic oligonucleotide
ttgttacgcggatctcaaacgtcctgatcg

SEQ ID NO: 164571 - DNA, 30 bp, Artificial Sequence
  Synthetic oligonucleotide
ggacttcataaccgtgtaagcaattgatcg

SEQ ID NO: 164572 - DNA, 30 bp, Artificial Sequence
  Synthetic oligonucleotide
tcctaaaccgagtttacttagtcttgatcg

SEQ ID NO: 164573 - DNA, 30 bp, Artificial Sequence
  Synthetic oligonucleotide
caggtcgggtagcgtggccagtacatatcg

SEQ ID NO: 164574 - DNA, 30 bp, Artificial Sequence
  Synthetic oligonucleotide
ggtgtcagcagtatgaccaactgcatatcg

SEQ ID NO: 164575 - DNA, 30 bp, Artificial Sequence
  Synthetic oligonucleotide
cacgtcaggtggtctctagggtggatatcg

SEQ ID NO: 164576 - DNA, 30 bp, Artificial Sequence
  Synthetic oligonucleotide
aaataaactaagccaagctgtatgatatcg

SEQ ID NO: 164577 - DNA, 30 bp, Artificial Sequence
  Synthetic oligonucleotide
caggcgtactccccgtcttgcctgatatcg

SEQ ID NO: 164578 - DNA, 30 bp, Artificial Sequence
  Synthetic oligonucleotide
gatgctgatttcttattcgatgatatatcg

SEQ ID NO: 164579 - DNA, 30 bp, Artificial Sequence
  Synthetic oligonucleotide
ttagtttggtgaacaaccagaaacctatcg

SEQ ID NO: 164580 - DNA, 30 bp, Artificial Sequence
  Synthetic oligonucleotide
ttcacacacgtccgtagctaagcgctatcg

SEQ ID NO: 164581 - DNA, 30 bp, Artificial Sequence
  Synthetic oligonucleotide
acgaccgcttgaagccccactgctctatcg

SEQ ID NO: 164582 - DNA, 30 bp, Artificial Sequence
  Synthetic oligonucleotide
caacttccgaatggcaaggctgtcgtatcg

SEQ ID NO: 164583 - DNA, 30 bp, Artificial Sequence
  Synthetic oligonucleotide
gcgggcttcatcttcggggtgaaattatcg

SEQ ID NO: 164584 - DNA, 30 bp, Artificial Sequence
  Synthetic oligonucleotide
cggacctcacgacgccccggtgtcaactcg

SEQ ID NO: 164585 - DNA, 30 bp, Artificial Sequence
  Synthetic oligonucleotide
tcttgagaataggcgataagtatgaactcg

SEQ ID NO: 164586 - DNA, 30 bp, Artificial Sequence
  Synthetic oligonucleotide
tatgttcttaaatcaaagaatcgtaactcg

SEQ ID NO: 164587 - DNA, 30 bp, Artificial Sequence
  Synthetic oligonucleotide
ttgttccggggcagatttgttgtacactcg

SEQ ID NO: 164588 - DNA, 30 bp, Artificial Sequence
  Synthetic oligonucleotide
gtatcagtttaaacgattggggcccactcg

SEQ ID NO: 164589 - DNA, 30 bp, Artificial Sequence
  Synthetic oligonucleotide
tgtgtgtggatgtttcacgagtcccactcg

SEQ ID NO: 164590 - DNA, 30 bp, Artificial Sequence
  Synthetic oligonucleotide
acctctagagcactggcgccagcgcactcg

SEQ ID NO: 164591 - DNA, 30 bp, Artificial Sequence
  Synthetic oligonucleotide
aaaggatatcacagttaaaaacttcactcg

SEQ ID NO: 164592 - DNA, 30 bp, Artificial Sequence
  Synthetic oligonucleotide
caatggtacaagggttaaaataaagactcg

SEQ ID NO: 164593 - DNA, 30 bp, Artificial Sequence
  Synthetic oligonucleotide
gacctaagtggcgattaggattcggactcg

SEQ ID NO: 164594 - DNA, 30 bp, Artificial Sequence
  Synthetic oligonucleotide
tcgccgcttgggcatatggcaggtgactcg

SEQ ID NO: 164595 - DNA, 30 bp, Artificial Sequence
  Synthetic oligonucleotide
ccggatcttaaaaaaggagaaaagtactcg

SEQ ID NO: 164596 - DNA, 30 bp, Artificial Sequence
  Synthetic oligonucleotide
cccagggtagtcgaccatacgtagtactcg

SEQ ID NO: 164597 - DNA, 30 bp, Artificial Sequence
  Synthetic oligonucleotide
ttatgaacataccctgtcaagggttactcg

SEQ ID NO: 164598 - DNA, 30 bp, Artificial Sequence
  Synthetic oligonucleotide
acagaacggtgtgccttggcccacacctcg

SEQ ID NO: 164599 - DNA, 30 bp, Artificial Sequence
  Synthetic oligonucleotide
taatttgaattggggaggatactcacctcg

SEQ ID NO: 164600 - DNA, 30 bp, Artificial Sequence
  Synthetic oligonucleotide
cctgaccggatttcaaattcgtagacctcg

SEQ ID NO: 164601 - DNA, 30 bp, Artificial Sequence
  Synthetic oligonucleotide
gcaaccatcaattagcagatggggacctcg

SEQ ID NO: 164602 - DNA, 30 bp, Artificial Sequence
  Synthetic oligonucleotide
cgattcaggagccagtcagcgcttacctcg

SEQ ID NO: 164603 - DNA, 30 bp, Artificial Sequence
  Synthetic oligonucleotide
gccgattcgaattagtgttcgtagtcctcg

SEQ ID NO: 164604 - DNA, 30 bp, Artificial Sequence
  Synthetic oligonucleotide
ttgactggcaatacaggttcacggtcctcg

SEQ ID NO: 164605 - DNA, 30 bp, Artificial Sequence
  Synthetic oligonucleotide
agcgtccacgcgagggaatacctaagctcg

SEQ ID NO: 164606 - DNA, 30 bp, Artificial Sequence
  Synthetic oligonucleotide
tgtaaaaaggggaccacttagcggagctcg

SEQ ID NO: 164607 - DNA, 30 bp, Artificial Sequence
  Synthetic oligonucleotide
acacggaaagagcttgtcgcaattagctcg

SEQ ID NO: 164608 - DNA, 30 bp, Artificial Sequence
  Synthetic oligonucleotide
taggtaaacagcctggttcccccgcgctcg

SEQ ID NO: 164609 - DNA, 30 bp, Artificial Sequence
  Synthetic oligonucleotide
ctaatcattatcagccgggtagcaggctcg

SEQ ID NO: 164610 - DNA, 30 bp, Artificial Sequence
  Synthetic oligonucleotide
ggtgtataactaactgcgaactccggctcg

SEQ ID NO: 164611 - DNA, 30 bp, Artificial Sequence
  Synthetic oligonucleotide
ttttcttagattccagattgtactggctcg

SEQ ID NO: 164612 - DNA, 30 bp, Artificial Sequence
  Synthetic oligonucleotide
ggtaagtccaaaagaatttgcagtggctcg

SEQ ID NO: 164613 - DNA, 30 bp, Artificial Sequence
  Synthetic oligonucleotide
ataacagctccatagagcaacaaatgctcg

SEQ ID NO: 164614 - DNA, 30 bp, Artificial Sequence
  Synthetic oligonucleotide
cgtcactgtgtgcaacggtggggatgctcg

SEQ ID NO: 164615 - DNA, 30 bp, Artificial Sequence
  Synthetic oligonucleotide
gcggcagttgatggggaaatgttttgctcg

SEQ ID NO: 164616 - DNA, 30 bp, Artificial Sequence
  Synthetic oligonucleotide
gaacattacctcgcagttctggtaatctcg

SEQ ID NO: 164617 - DNA, 30 bp, Artificial Sequence
  Synthetic oligonucleotide
acggaatgtcttatcgcgacggtcatctcg

SEQ ID NO: 164618 - DNA, 30 bp, Artificial Sequence
  Synthetic oligonucleotide
cacaacgacgtgcgagtgcagtcactctcg

SEQ ID NO: 164619 - DNA, 30 bp, Artificial Sequence
  Synthetic oligonucleotide
ctccaactacaatagagcgactgactctcg

SEQ ID NO: 164620 - DNA, 30 bp, Artificial Sequence
  Synthetic oligonucleotide
gaactagtcgagtggattgcatagctctcg

SEQ ID NO: 164621 - DNA, 30 bp, Artificial Sequence
  Synthetic oligonucleotide
tgactagtactaggatgcagaaaagtctcg

SEQ ID NO: 164622 - DNA, 30 bp, Artificial Sequence
  Synthetic oligonucleotide
cgaaaggacggggacacgcgcccagtctcg

SEQ ID NO: 164623 - DNA, 30 bp, Artificial Sequence
  Synthetic oligonucleotide
ctgcaatatcatgtgcaatcccgagtctcg

SEQ ID NO: 164624 - DNA, 30 bp, Artificial Sequence
  Synthetic oligonucleotide
gcctagatagatattgatcgcgtagtctcg

SEQ ID NO: 164625 - DNA, 30 bp, Artificial Sequence
  Synthetic oligonucleotide
tcatggatattaggaacctagtcggtctcg

SEQ ID NO: 164626 - DNA, 30 bp, Artificial Sequence
  Synthetic oligonucleotide
gcgccctattatagggttaacaaattctcg

SEQ ID NO: 164627 - DNA, 30 bp, Artificial Sequence
  Synthetic oligonucleotide
cgcgcgaagcttcacactgaaccattctcg

SEQ ID NO: 164628 - DNA, 30 bp, Artificial Sequence
  Synthetic oligonucleotide
agcaaggttacccattgcctgggcttctcg

SEQ ID NO: 164629 - DNA, 30 bp, Artificial Sequence
  Synthetic oligonucleotide
ctagttcacgaacgtaacccacctttctcg

SEQ ID NO: 164630 - DNA, 30 bp, Artificial Sequence
  Synthetic oligonucleotide
aggactggccccatcgtaatcagtttctcg

SEQ ID NO: 164631 - DNA, 30 bp, Artificial Sequence
  Synthetic oligonucleotide
gccccactaacgtgatgcgatgtaaagtcg

SEQ ID NO: 164632 - DNA, 30 bp, Artificial Sequence
  Synthetic oligonucleotide
gtgacgggccgagtacttggagcgaagtcg

SEQ ID NO: 164633 - DNA, 30 bp, Artificial Sequence
  Synthetic oligonucleotide
agtatgacccaaagaacgtgttggaagtcg

SEQ ID NO: 164634 - DNA, 30 bp, Artificial Sequence
  Synthetic oligonucleotide
agtccgcatacttcgtcctacctgaagtcg

SEQ ID NO: 164635 - DNA, 30 bp, Artificial Sequence
  Synthetic oligonucleotide
cagactctgtagataaacctgctacagtcg

SEQ ID NO: 164636 - DNA, 30 bp, Artificial Sequence
  Synthetic oligonucleotide
atgggaccagccgttgctcaaaggcagtcg

SEQ ID NO: 164637 - DNA, 30 bp, Artificial Sequence
  Synthetic oligonucleotide
ggagcaatgaaactggcaggttgtcagtcg

SEQ ID NO: 164638 - DNA, 30 bp, Artificial Sequence
  Synthetic oligonucleotide
acccaagggacgggggtagttcttcagtcg

SEQ ID NO: 164639 - DNA, 30 bp, Artificial Sequence
  Synthetic oligonucleotide
tggccgtctgagataagttatacagagtcg

SEQ ID NO: 164640 - DNA, 30 bp, Artificial Sequence
  Synthetic oligonucleotide
tacacctgagccatttattgttgagagtcg

SEQ ID NO: 164641 - DNA, 30 bp, Artificial Sequence
  Synthetic oligonucleotide
tgaaattccttaaaaattcatatagagtcg

SEQ ID NO: 164642 - DNA, 30 bp, Artificial Sequence
  Synthetic oligonucleotide
acttggtatttacttgactttcatgagtcg

SEQ ID NO: 164643 - DNA, 30 bp, Artificial Sequence
  Synthetic oligonucleotide
cccggcgacagtaactaagtgtgatagtcg

SEQ ID NO: 164644 - DNA, 30 bp, Artificial Sequence
  Synthetic oligonucleotide
atcaggctaccgttcggagcagtatagtcg

SEQ ID NO: 164645 - DNA, 30 bp, Artificial Sequence
  Synthetic oligonucleotide
ctcgttggagattcatgtagtccttagtcg

SEQ ID NO: 164646 - DNA, 30 bp, Artificial Sequence
  Synthetic oligonucleotide
gggaaaacgcccaatgggtgccaaacgtcg

SEQ ID NO: 164647 - DNA, 30 bp, Artificial Sequence
  Synthetic oligonucleotide
ttggtacggtatgtttcctagagaacgtcg

SEQ ID NO: 164648 - DNA, 30 bp, Artificial Sequence
  Synthetic oligonucleotide
gttatagcagctcatcaatagcgaacgtcg

SEQ ID NO: 164649 - DNA, 30 bp, Artificial Sequence
  Synthetic oligonucleotide
tatgtatggtcgtatgctgaatttacgtcg

SEQ ID NO: 164650 - DNA, 30 bp, Artificial Sequence
  Synthetic oligonucleotide
gcgagacattcacactggaaagctccgtcg

SEQ ID NO: 164651 - DNA, 30 bp, Artificial Sequence
  Synthetic oligonucleotide
cgcccccttgtagaccgatctagtccgtcg

SEQ ID NO: 164652 - DNA, 30 bp, Artificial Sequence
  Synthetic oligonucleotide
acagacgcagagccaagatcgtacgcgtcg

SEQ ID NO: 164653 - DNA, 30 bp, Artificial Sequence
  Synthetic oligonucleotide
caaatggttaaagcagtgtcctgggcgtcg

SEQ ID NO: 164654 - DNA, 30 bp, Artificial Sequence
  Synthetic oligonucleotide
agtgggagtgaagctcgtcgtaatgcgtcg

SEQ ID NO: 164655 - DNA, 30 bp, Artificial Sequence
  Synthetic oligonucleotide
atgttccacaagcgaactctaggctcgtcg

SEQ ID NO: 164656 - DNA, 30 bp, Artificial Sequence
  Synthetic oligonucleotide
gataagagagaggccgcttacgggtcgtcg

SEQ ID NO: 164657 - DNA, 30 bp, Artificial Sequence
  Synthetic oligonucleotide
atgtataacgaaaattacttcatgtcgtcg

SEQ ID NO: 164658 - DNA, 30 bp, Artificial Sequence
  Synthetic oligonucleotide
aaccagcggttacgggatcattgttcgtcg

SEQ ID NO: 164659 - DNA, 30 bp, Artificial Sequence
  Synthetic oligonucleotide
gggaaaccaaactatgaatagttgaggtcg

SEQ ID NO: 164660 - DNA, 30 bp, Artificial Sequence
  Synthetic oligonucleotide
gaggtttaaattatgaagaagcataggtcg

SEQ ID NO: 164661 - DNA, 30 bp, Artificial Sequence
  Synthetic oligonucleotide
tgataatgacggtagagtccagctaggtcg

SEQ ID NO: 164662 - DNA, 30 bp, Artificial Sequence
  Synthetic oligonucleotide
gttcaggctcaaaattagcctttacggtcg

SEQ ID NO: 164663 - DNA, 30 bp, Artificial Sequence
  Synthetic oligonucleotide
cgatccgattgaaccattcaatgtcggtcg

SEQ ID NO: 164664 - DNA, 30 bp, Artificial Sequence
  Synthetic oligonucleotide
tgcacgatcacccaattcacggacgggtcg

SEQ ID NO: 164665 - DNA, 30 bp, Artificial Sequence
  Synthetic oligonucleotide
tcaggccgggcgtccagagccctcgggtcg

SEQ ID NO: 164666 - DNA, 30 bp, Artificial Sequence
  Synthetic oligonucleotide
ggggatagtatcatttgcatcatggggtcg

SEQ ID NO: 164667 - DNA, 30 bp, Artificial Sequence
  Synthetic oligonucleotide
tagcgtcgtccaaggatctgggtggggtcg

SEQ ID NO: 164668 - DNA, 30 bp, Artificial Sequence
  Synthetic oligonucleotide
ccaaggacgaggagcacagcgttggggtcg

SEQ ID NO: 164669 - DNA, 30 bp, Artificial Sequence
  Synthetic oligonucleotide
tcctatacagtcttgccccagggatggtcg

SEQ ID NO: 164670 - DNA, 30 bp, Artificial Sequence
  Synthetic oligonucleotide
actccggaggggcccgcatgtttatggtcg

SEQ ID NO: 164671 - DNA, 30 bp, Artificial Sequence
  Synthetic oligonucleotide
aatcttgttttgaatcttgttgcctggtcg

SEQ ID NO: 164672 - DNA, 30 bp, Artificial Sequence
  Synthetic oligonucleotide
tcccttgcgggtattttgaagctctggtcg

SEQ ID NO: 164673 - DNA, 30 bp, Artificial Sequence
  Synthetic oligonucleotide
ttgcttctcctagcatgctgtgattggtcg

SEQ ID NO: 164674 - DNA, 30 bp, Artificial Sequence
  Synthetic oligonucleotide
ctaagagttatacgttgctaggcttggtcg

SEQ ID NO: 164675 - DNA, 30 bp, Artificial Sequence
  Synthetic oligonucleotide
cacgtggcggtttgctgctcaggttggtcg

SEQ ID NO: 164676 - DNA, 30 bp, Artificial Sequence
  Synthetic oligonucleotide
gagtcgtctacgatggatgacgagatgtcg

SEQ ID NO: 164677 - DNA, 30 bp, Artificial Sequence
  Synthetic oligonucleotide
cgtctgagcccgatatgagtaagtatgtcg

SEQ ID NO: 164678 - DNA, 30 bp, Artificial Sequence
  Synthetic oligonucleotide
atcactataagaaagctcttcccagtgtcg

SEQ ID NO: 164679 - DNA, 30 bp, Artificial Sequence
  Synthetic oligonucleotide
cccacatatcgtcatgggcttttcgtgtcg

SEQ ID NO: 164680 - DNA, 30 bp, Artificial Sequence
  Synthetic oligonucleotide
ccggccagtatcagtacgatgctggtgtcg

SEQ ID NO: 164681 - DNA, 30 bp, Artificial Sequence
  Synthetic oligonucleotide
ctggttatatgggaaacgatacgtgtgtcg

SEQ ID NO: 164682 - DNA, 30 bp, Artificial Sequence
  Synthetic oligonucleotide
ctgtaaccgaacgtgatcaaattgttgtcg

SEQ ID NO: 164683 - DNA, 30 bp, Artificial Sequence
  Synthetic oligonucleotide
gttagtcagttagcaaggtaaatcaattcg

SEQ ID NO: 164684 - DNA, 30 bp, Artificial Sequence
  Synthetic oligonucleotide
ctggcgagctgtaaatcaggcaagaattcg

SEQ ID NO: 164685 - DNA, 30 bp, Artificial Sequence
  Synthetic oligonucleotide
cttgcagatcagtccccgaggggtaattcg

SEQ ID NO: 164686 - DNA, 30 bp, Artificial Sequence
  Synthetic oligonucleotide
cgaaagggagaatttcttccctgtaattcg

SEQ ID NO: 164687 - DNA, 30 bp, Artificial Sequence
  Synthetic oligonucleotide
atactggccaggggtgttagagaacattcg

SEQ ID NO: 164688 - DNA, 30 bp, Artificial Sequence
  Synthetic oligonucleotide
ttggactggtaaaacacctactgccattcg

SEQ ID NO: 164689 - DNA, 30 bp, Artificial Sequence
  Synthetic oligonucleotide
tccgacacacctaggacctcgtgagattcg

SEQ ID NO: 164690 - DNA, 30 bp, Artificial Sequence
  Synthetic oligonucleotide
cgaaggcactgtccattaaatgccgattcg

SEQ ID NO: 164691 - DNA, 30 bp, Artificial Sequence
  Synthetic oligonucleotide
ttggagggacctttcagtaagttggattcg

SEQ ID NO: 164692 - DNA, 30 bp, Artificial Sequence
  Synthetic oligonucleotide
ccgctccaaaaaacaaagctgccaacttcg

SEQ ID NO: 164693 - DNA, 30 bp, Artificial Sequence
  Synthetic oligonucleotide
ctataagaggttcagcttccaatcacttcg

SEQ ID NO: 164694 - DNA, 30 bp, Artificial Sequence
  Synthetic oligonucleotide
agacatattattgagtgacagtagacttcg

SEQ ID NO: 164695 - DNA, 30 bp, Artificial Sequence
  Synthetic oligonucleotide
gccacacgtttccgatatataaagccttcg

SEQ ID NO: 164696 - DNA, 30 bp, Artificial Sequence
  Synthetic oligonucleotide
gctcgggtattatgcaactcatagccttcg

SEQ ID NO: 164697 - DNA, 30 bp, Artificial Sequence
  Synthetic oligonucleotide
atgttaaacgctatggtgttaggtccttcg

SEQ ID NO: 164698 - DNA, 30 bp, Artificial Sequence
  Synthetic oligonucleotide
agcggtggtgcactgatccggggagcttcg

SEQ ID NO: 164699 - DNA, 30 bp, Artificial Sequence
  Synthetic oligonucleotide
cgacaaagaagctcagagcttggagcttcg

SEQ ID NO: 164700 - DNA, 30 bp, Artificial Sequence
  Synthetic oligonucleotide
aatcgcaagaaatgttaccaactagcttcg

SEQ ID NO: 164701 - DNA, 30 bp, Artificial Sequence
  Synthetic oligonucleotide
acgcttcgtatctacgccaatgcctcttcg

SEQ ID NO: 164702 - DNA, 30 bp, Artificial Sequence
  Synthetic oligonucleotide
cgcttcattctagggaaaaaaccgtcttcg

SEQ ID NO: 164703 - DNA, 30 bp, Artificial Sequence
  Synthetic oligonucleotide
ctaacctcttacccaatagaggggtcttcg

SEQ ID NO: 164704 - DNA, 30 bp, Artificial Sequence
  Synthetic oligonucleotide
aggtccgaggagagacaccgttattcttcg

SEQ ID NO: 164705 - DNA, 30 bp, Artificial Sequence
  Synthetic oligonucleotide
tgcaggtccgagactcctaagcgaagttcg

SEQ ID NO: 164706 - DNA, 30 bp, Artificial Sequence
  Synthetic oligonucleotide
ggtgctagagggactattaagcaccgttcg

SEQ ID NO: 164707 - DNA, 30 bp, Artificial Sequence
  Synthetic oligonucleotide
tagacgcgggggctctctgtgcaccgttcg

SEQ ID NO: 164708 - DNA, 30 bp, Artificial Sequence
  Synthetic oligonucleotide
gtgtagtggttgatagagactagccgttcg

SEQ ID NO: 164709 - DNA, 30 bp, Artificial Sequence
  Synthetic oligonucleotide
agctaggggagttgtggcaagtaaggttcg

SEQ ID NO: 164710 - DNA, 30 bp, Artificial Sequence
  Synthetic oligonucleotide
cttgtcagggtcgtagatgtgcgatgttcg

SEQ ID NO: 164711 - DNA, 30 bp, Artificial Sequence
  Synthetic oligonucleotide
tttcacagcatccgtagtggaatatgttcg

SEQ ID NO: 164712 - DNA, 30 bp, Artificial Sequence
  Synthetic oligonucleotide
tcaagtcgctcatcatatgacttatgttcg

SEQ ID NO: 164713 - DNA, 30 bp, Artificial Sequence
  Synthetic oligonucleotide
ctaatgccgattcatggggggggctgttcg

SEQ ID NO: 164714 - DNA, 30 bp, Artificial Sequence
  Synthetic oligonucleotide
actggcagtcaatatgacgtgcagtgttcg

SEQ ID NO: 164715 - DNA, 30 bp, Artificial Sequence
  Synthetic oligonucleotide
gtcgatcgagaacttaatctcgtgtgttcg

SEQ ID NO: 164716 - DNA, 30 bp, Artificial Sequence
  Synthetic oligonucleotide
cgagtcgatacctcgagagtcgaaatttcg

SEQ ID NO: 164717 - DNA, 30 bp, Artificial Sequence
  Synthetic oligonucleotide
gggggtgaatcggggactcgtgtaatttcg

SEQ ID NO: 164718 - DNA, 30 bp, Artificial Sequence
  Synthetic oligonucleotide
gtagtaacggcgtcaccactcgtcatttcg

SEQ ID NO: 164719 - DNA, 30 bp, Artificial Sequence
  Synthetic oligonucleotide
tgttagacgttcgtaacataatttatttcg

SEQ ID NO: 164720 - DNA, 30 bp, Artificial Sequence
  Synthetic oligonucleotide
tactaataaatgccataacaaaaactttcg

SEQ ID NO: 164721 - DNA, 30 bp, Artificial Sequence
  Synthetic oligonucleotide
taaatgcattaatagagtgtatcactttcg

SEQ ID NO: 164722 - DNA, 30 bp, Artificial Sequence
  Synthetic oligonucleotide
gggagcaagacttagcctttcgtggtttcg

SEQ ID NO: 164723 - DNA, 30 bp, Artificial Sequence
  Synthetic oligonucleotide
ttatctacatcgacaatattgattgtttcg

SEQ ID NO: 164724 - DNA, 30 bp, Artificial Sequence
  Synthetic oligonucleotide
agtacctacgtgtagcggtttagattttcg

SEQ ID NO: 164725 - DNA, 30 bp, Artificial Sequence
  Synthetic oligonucleotide
gcgtctgcttgtgtggtcccgaccttttcg

SEQ ID NO: 164726 - DNA, 30 bp, Artificial Sequence
  Synthetic oligonucleotide
catacatgtaggtgcgtctgcgggttttcg

SEQ ID NO: 164727 - DNA, 30 bp, Artificial Sequence
  Synthetic oligonucleotide
cattcgggggcggattgagaacttttttcg

SEQ ID NO: 164728 - DNA, 30 bp, Artificial Sequence
  Synthetic oligonucleotide
ggccacgtacaagtctaagttttaaaaagg

SEQ ID NO: 164729 - DNA, 30 bp, Artificial Sequence
  Synthetic oligonucleotide
gaaacggagccacaacggggtgataaaagg

SEQ ID NO: 164730 - DNA, 30 bp, Artificial Sequence
  Synthetic oligonucleotide
gtggtacagggacccctcaaggctaaaagg

SEQ ID NO: 164731 - DNA, 30 bp, Artificial Sequence
  Synthetic oligonucleotide
gatgaggaccaaatgcagctatctaaaagg

SEQ ID NO: 164732 - DNA, 30 bp, Artificial Sequence
  Synthetic oligonucleotide
aaagcatatacataagccacaaaacaaagg

SEQ ID NO: 164733 - DNA, 30 bp, Artificial Sequence
  Synthetic oligonucleotide
gttacgattcgtgtctacatatcacaaagg

SEQ ID NO: 164734 - DNA, 30 bp, Artificial Sequence
  Synthetic oligonucleotide
taaggtaaacgtacgtgcaccgttcaaagg

SEQ ID NO: 164735 - DNA, 30 bp, Artificial Sequence
  Synthetic oligonucleotide
cgtttgaaacctgatcgtccgaaagaaagg

SEQ ID NO: 164736 - DNA, 30 bp, Artificial Sequence
  Synthetic oligonucleotide
agtaggtctgggggcgattctcgagaaagg

SEQ ID NO: 164737 - DNA, 30 bp, Artificial Sequence
  Synthetic oligonucleotide
agccggcgggcatagcattatggagaaagg

SEQ ID NO: 164738 - DNA, 30 bp, Artificial Sequence
  Synthetic oligonucleotide
tcaccccgctcttggccggatctcgaaagg

SEQ ID NO: 164739 - DNA, 30 bp, Artificial Sequence
  Synthetic oligonucleotide
aaaccagaatcaatccgcccaacggaaagg

SEQ ID NO: 164740 - DNA, 30 bp, Artificial Sequence
  Synthetic oligonucleotide
aaacaatcggagaggagtcgtggggaaagg

SEQ ID NO: 164741 - DNA, 30 bp, Artificial Sequence
  Synthetic oligonucleotide
gatcttcagtaggtcgggtcgagtgaaagg

SEQ ID NO: 164742 - DNA, 30 bp, Artificial Sequence
  Synthetic oligonucleotide
attggtacggtcagacgggctgcataaagg

SEQ ID NO: 164743 - DNA, 30 bp, Artificial Sequence
  Synthetic oligonucleotide
ttgtgtgcaaaccaagggacgcgataaagg

SEQ ID NO: 164744 - DNA, 30 bp, Artificial Sequence
  Synthetic oligonucleotide
ccagacacgcactgatcaagcatataaagg

SEQ ID NO: 164745 - DNA, 30 bp, Artificial Sequence
  Synthetic oligonucleotide
gtgttcctacacacacgactcgaaacaagg

SEQ ID NO: 164746 - DNA, 30 bp, Artificial Sequence
  Synthetic oligonucleotide
tcaggtgttagaataacctttgtgacaagg

SEQ ID NO: 164747 - DNA, 30 bp, Artificial Sequence
  Synthetic oligonucleotide
tcgaggaagaaagcccccgttcagccaagg

SEQ ID NO: 164748 - DNA, 30 bp, Artificial Sequence
  Synthetic oligonucleotide
ctgacatcatgagacactaacgctccaagg

SEQ ID NO: 164749 - DNA, 30 bp, Artificial Sequence
  Synthetic oligonucleotide
gctcattaccccactaagggcagtccaagg

SEQ ID NO: 164750 - DNA, 31 bp, Artificial Sequence
  Synthetic oligonucleotide
agtagcgggaatcactgaatgtttagcaagg

SEQ ID NO: 164751 - DNA, 30 bp, Artificial Sequence
  Synthetic oligonucleotide
gggaaatagacaatccgggggagcgcaagg

SEQ ID NO: 164752 - DNA, 30 bp, Artificial Sequence
  Synthetic oligonucleotide
ccaacaaatttgcggtgcgataaggcaagg

SEQ ID NO: 164753 - DNA, 30 bp, Artificial Sequence
  Synthetic oligonucleotide
taactagaatgtttccgggtgacggcaagg

SEQ ID NO: 164754 - DNA, 30 bp, Artificial Sequence
  Synthetic oligonucleotide
agggacgcgaccttcaccgatatggcaagg

SEQ ID NO: 164755 - DNA, 30 bp, Artificial Sequence
  Synthetic oligonucleotide
caggcacgggataagaggggccctgcaagg

SEQ ID NO: 164756 - DNA, 30 bp, Artificial Sequence
  Synthetic oligonucleotide
cgttgagcgtggttcatcccagaatcaagg

SEQ ID NO: 164757 - DNA, 30 bp, Artificial Sequence
  Synthetic oligonucleotide
gggcaaattggtcacctggcgggctcaagg

SEQ ID NO: 164758 - DNA, 30 bp, Artificial Sequence
  Synthetic oligonucleotide
ttaaagaagcaaagtgagattatgtcaagg

SEQ ID NO: 164759 - DNA, 30 bp, Artificial Sequence
  Synthetic oligonucleotide
gataactcaatcgattttttgctgtcaagg

SEQ ID NO: 164760 - DNA, 30 bp, Artificial Sequence
  Synthetic oligonucleotide
ggtccgtgtggtctaccttgcaaaagaagg

SEQ ID NO: 164761 - DNA, 30 bp, Artificial Sequence
  Synthetic oligonucleotide
cccaaaggttcgccgatctgtacaagaagg

SEQ ID NO: 164762 - DNA, 30 bp, Artificial Sequence
  Synthetic oligonucleotide
ttggacggttagcagggagagcacagaagg

SEQ ID NO: 164763 - DNA, 30 bp, Artificial Sequence
  Synthetic oligonucleotide
tatcgaacatgttatacgaccgcgagaagg

SEQ ID NO: 164764 - DNA, 30 bp, Artificial Sequence
  Synthetic oligonucleotide
cacgtgagatccagtggagatgcacgaagg

SEQ ID NO: 164765 - DNA, 30 bp, Artificial Sequence
  Synthetic oligonucleotide
tgctcgagtcatgctgggtcggaccgaagg

SEQ ID NO: 164766 - DNA, 30 bp, Artificial Sequence
  Synthetic oligonucleotide
gtcacgtactgggatctaaaaatgcgaagg

SEQ ID NO: 164767 - DNA, 30 bp, Artificial Sequence
  Synthetic oligonucleotide
tcgtaaaggtctcggtatgataatcgaagg

SEQ ID NO: 164768 - DNA, 30 bp, Artificial Sequence
  Synthetic oligonucleotide
ggtcgccgtcgcatgggtctcgttcgaagg

SEQ ID NO: 164769 - DNA, 30 bp, Artificial Sequence
  Synthetic oligonucleotide
gggccgttcggttgaggaagatatggaagg

SEQ ID NO: 164770 - DNA, 30 bp, Artificial Sequence
  Synthetic oligonucleotide
agagcttctacgcgacgattcgaatgaagg

SEQ ID NO: 164771 - DNA, 30 bp, Artificial Sequence
  Synthetic oligonucleotide
atctgactgaatactaagtgtatctgaagg

SEQ ID NO: 164772 - DNA, 30 bp, Artificial Sequence
  Synthetic oligonucleotide
ggagccggcggcttgccaccagtgtgaagg

SEQ ID NO: 164773 - DNA, 30 bp, Artificial Sequence
  Synthetic oligonucleotide
ctagaaaacaaagctgcgacctaaataagg

SEQ ID NO: 164774 - DNA, 30 bp, Artificial Sequence
  Synthetic oligonucleotide
ctgtggggctgcaaacagatcttaataagg

SEQ ID NO: 164775 - DNA, 30 bp, Artificial Sequence
  Synthetic oligonucleotide
gcaagtctaatagcatttaagcccataagg

SEQ ID NO: 164776 - DNA, 30 bp, Artificial Sequence
  Synthetic oligonucleotide
ccagtcactgggcggtaagttgggataagg

SEQ ID NO: 164777 - DNA, 31 bp, Artificial Sequence
  Synthetic oligonucleotide
tacgtgtcgcacttaggaaatcgtgataagg

SEQ ID NO: 164778 - DNA, 30 bp, Artificial Sequence
  Synthetic oligonucleotide
atcgtcagcatatgcctgacctgtataagg

SEQ ID NO: 164779 - DNA, 30 bp, Artificial Sequence
  Synthetic oligonucleotide
ctcatattgcaagggttataaagactaagg

SEQ ID NO: 164780 - DNA, 30 bp, Artificial Sequence
  Synthetic oligonucleotide
aagttaggatcatcgggttggggcctaagg

SEQ ID NO: 164781 - DNA, 30 bp, Artificial Sequence
  Synthetic oligonucleotide
aacggtgagctgaagttgagttaggtaagg

SEQ ID NO: 164782 - DNA, 30 bp, Artificial Sequence
  Synthetic oligonucleotide
gatcgagcgctagcagttctatcggtaagg

SEQ ID NO: 164783 - DNA, 30 bp, Artificial Sequence
  Synthetic oligonucleotide
aaacataggacggagaaaggattggtaagg

SEQ ID NO: 164784 - DNA, 30 bp, Artificial Sequence
  Synthetic oligonucleotide
aaatgtaatgtcaagttcagcaatgtaagg

SEQ ID NO: 164785 - DNA, 30 bp, Artificial Sequence
  Synthetic oligonucleotide
taatcggtggcgcggtccgcgcaattaagg

SEQ ID NO: 164786 - DNA, 30 bp, Artificial Sequence
  Synthetic oligonucleotide
gcgacggacgggacaagaggtcaattaagg

SEQ ID NO: 164787 - DNA, 30 bp, Artificial Sequence
  Synthetic oligonucleotide
ttacccgtctgctggaaggagagattaagg

SEQ ID NO: 164788 - DNA, 30 bp, Artificial Sequence
  Synthetic oligonucleotide
tacaagttacacgagcaacgcgacttaagg

SEQ ID NO: 164789 - DNA, 30 bp, Artificial Sequence
  Synthetic oligonucleotide
atgcttataccggaaataacgaggttaagg

SEQ ID NO: 164790 - DNA, 30 bp, Artificial Sequence
  Synthetic oligonucleotide
gaaacgatcgcctgtacaattaggttaagg

SEQ ID NO: 164791 - DNA, 30 bp, Artificial Sequence
  Synthetic oligonucleotide
cattacataaatcctagtattagcaacagg

SEQ ID NO: 164792 - DNA, 30 bp, Artificial Sequence
  Synthetic oligonucleotide
aaggcatcgcatcgatgctaaaggaacagg

SEQ ID NO: 164793 - DNA, 30 bp, Artificial Sequence
  Synthetic oligonucleotide
gtacaatgtcctaccatgagtcggaacagg

SEQ ID NO: 164794 - DNA, 30 bp, Artificial Sequence
  Synthetic oligonucleotide
ggcgttacgatcgcccaataggtgaacagg

SEQ ID NO: 164795 - DNA, 30 bp, Artificial Sequence
  Synthetic oligonucleotide
atattcgaacaaggtcacccattgaacagg

SEQ ID NO: 164796 - DNA, 30 bp, Artificial Sequence
  Synthetic oligonucleotide
ccgactcctgaggcttggcgatctaacagg

SEQ ID NO: 164797 - DNA, 30 bp, Artificial Sequence
  Synthetic oligonucleotide
gtatcaattagaacttgcaggattaacagg

SEQ ID NO: 164798 - DNA, 30 bp, Artificial Sequence
  Synthetic oligonucleotide
aatgtcaaccgaatccggggagaacacagg

SEQ ID NO: 164799 - DNA, 30 bp, Artificial Sequence
  Synthetic oligonucleotide
gatacgtagaagagtaggcggacacacagg

SEQ ID NO: 164800 - DNA, 30 bp, Artificial Sequence
  Synthetic oligonucleotide
gggccagtttctaagagcgcttgacacagg

SEQ ID NO: 164801 - DNA, 30 bp, Artificial Sequence
  Synthetic oligonucleotide
tccgaagagttatggtcaggtaaccacagg

SEQ ID NO: 164802 - DNA, 30 bp, Artificial Sequence
  Synthetic oligonucleotide
ccgttgcgtcgatctgttatataccacagg

SEQ ID NO: 164803 - DNA, 30 bp, Artificial Sequence
  Synthetic oligonucleotide
taggagggtaagctcggtcagggccacagg

SEQ ID NO: 164804 - DNA, 30 bp, Artificial Sequence
  Synthetic oligonucleotide
tcacctggattaagaacctcctcgcacagg

SEQ ID NO: 164805 - DNA, 30 bp, Artificial Sequence
  Synthetic oligonucleotide
taagaatttgaagtgtggctacatcacagg

SEQ ID NO: 164806 - DNA, 30 bp, Artificial Sequence
  Synthetic oligonucleotide
ttgcaatccgaaggcgtttgagatcacagg

SEQ ID NO: 164807 - DNA, 30 bp, Artificial Sequence
  Synthetic oligonucleotide
atagtggattatacgaagagatatcacagg

SEQ ID NO: 164808 - DNA, 30 bp, Artificial Sequence
  Synthetic oligonucleotide
attgtccgggtaccgtggataagtcacagg

SEQ ID NO: 164809 - DNA, 30 bp, Artificial Sequence
  Synthetic oligonucleotide
actcatgttacaagtcaatgctacgacagg

SEQ ID NO: 164810 - DNA, 30 bp, Artificial Sequence
  Synthetic oligonucleotide
tcattgttatgcatttgcgaatccgacagg

SEQ ID NO: 164811 - DNA, 30 bp, Artificial Sequence
  Synthetic oligonucleotide
gggatcagaaagcgcaagtagggggacagg

SEQ ID NO: 164812 - DNA, 30 bp, Artificial Sequence
  Synthetic oligonucleotide
tctcaggtcgcgagtatggcttgggacagg

SEQ ID NO: 164813 - DNA, 30 bp, Artificial Sequence
  Synthetic oligonucleotide
acggcgttgtcggaaacagtatcctacagg

SEQ ID NO: 164814 - DNA, 30 bp, Artificial Sequence
  Synthetic oligonucleotide
cgacttacagtatgctcaagccagtacagg

SEQ ID NO: 164815 - DNA, 30 bp, Artificial Sequence
  Synthetic oligonucleotide
cacggaaccagagtcggccctgagtacagg

SEQ ID NO: 164816 - DNA, 30 bp, Artificial Sequence
  Synthetic oligonucleotide
gagatataacgaaagactacaaattacagg

SEQ ID NO: 164817 - DNA, 30 bp, Artificial Sequence
  Synthetic oligonucleotide
cagggctcgtgacggtacgattttaccagg

SEQ ID NO: 164818 - DNA, 30 bp, Artificial Sequence
  Synthetic oligonucleotide
gaaacaacgggtgatataatttagcccagg

SEQ ID NO: 164819 - DNA, 30 bp, Artificial Sequence
  Synthetic oligonucleotide
tgtggtttactaaatcaatagtctcccagg

SEQ ID NO: 164820 - DNA, 30 bp, Artificial Sequence
  Synthetic oligonucleotide
cgacaatgatatgagaggagcagagccagg

SEQ ID NO: 164821 - DNA, 30 bp, Artificial Sequence
  Synthetic oligonucleotide
ctaatatcgatgtgaccaaacgccgccagg

SEQ ID NO: 164822 - DNA, 30 bp, Artificial Sequence
  Synthetic oligonucleotide
taagagtcagggtcatgagtcagggccagg

SEQ ID NO: 164823 - DNA, 30 bp, Artificial Sequence
  Synthetic oligonucleotide
gcatagtgtaacaagcgtaacagtgccagg

SEQ ID NO: 164824 - DNA, 30 bp, Artificial Sequence
  Synthetic oligonucleotide
acggggtttatctctcttctttgtgccagg

SEQ ID NO: 164825 - DNA, 30 bp, Artificial Sequence
  Synthetic oligonucleotide
agcaaaaattagccggcttcaggatccagg

SEQ ID NO: 164826 - DNA, 30 bp, Artificial Sequence
  Synthetic oligonucleotide
aagtcctaaagagaagtgtatcgctccagg

SEQ ID NO: 164827 - DNA, 30 bp, Artificial Sequence
  Synthetic oligonucleotide
aatgacgtacgtggctccatcttctccagg

SEQ ID NO: 164828 - DNA, 30 bp, Artificial Sequence
  Synthetic oligonucleotide
tgttatatgggaagtttaaggtattccagg

SEQ ID NO: 164829 - DNA, 30 bp, Artificial Sequence
  Synthetic oligonucleotide
ggtttgaggggtttaccgggatcttccagg

SEQ ID NO: 164830 - DNA, 30 bp, Artificial Sequence
  Synthetic oligonucleotide
gcaaagaacaccacagactagtccagcagg

SEQ ID NO: 164831 - DNA, 30 bp, Artificial Sequence
  Synthetic oligonucleotide
tctccggatagaggattacaattcagcagg

SEQ ID NO: 164832 - DNA, 30 bp, Artificial Sequence
  Synthetic oligonucleotide
cgcgggtggggaattttaatcgcgagcagg

SEQ ID NO: 164833 - DNA, 30 bp, Artificial Sequence
  Synthetic oligonucleotide
cgcacacactagtgaggcgtattgagcagg

SEQ ID NO: 164834 - DNA, 30 bp, Artificial Sequence
  Synthetic oligonucleotide
agcgaccgtacaccatcagtgaatagcagg

SEQ ID NO: 164835 - DNA, 30 bp, Artificial Sequence
  Synthetic oligonucleotide
tctatattacgaggtggtgtaaaaggcagg

SEQ ID NO: 164836 - DNA, 30 bp, Artificial Sequence
  Synthetic oligonucleotide
tctgcagaacgtggattgaagccaggcagg

SEQ ID NO: 164837 - DNA, 30 bp, Artificial Sequence
  Synthetic oligonucleotide
accaattgggttagatattcatcaggcagg

SEQ ID NO: 164838 - DNA, 30 bp, Artificial Sequence
  Synthetic oligonucleotide
actgaccataccacggtggagaagggcagg

SEQ ID NO: 164839 - DNA, 30 bp, Artificial Sequence
  Synthetic oligonucleotide
aagcttgctgaggttttccagcggggcagg

SEQ ID NO: 164840 - DNA, 30 bp, Artificial Sequence
  Synthetic oligonucleotide
cccggctgtaccgaatcattgtggggcagg

SEQ ID NO: 164841 - DNA, 30 bp, Artificial Sequence
  Synthetic oligonucleotide
gatagtgttaacgtccgaaggttgggcagg

SEQ ID NO: 164842 - DNA, 30 bp, Artificial Sequence
  Synthetic oligonucleotide
cgataaattcaacagtgatatggtggcagg

SEQ ID NO: 164843 - DNA, 30 bp, Artificial Sequence
  Synthetic oligonucleotide
ctcgatgccaatagagggacagttggcagg

SEQ ID NO: 164844 - DNA, 30 bp, Artificial Sequence
  Synthetic oligonucleotide
aggcataagtggaaatctaatgtatgcagg

SEQ ID NO: 164845 - DNA, 30 bp, Artificial Sequence
  Synthetic oligonucleotide
ttgcacgtcgtggtccccgccggctgcagg

SEQ ID NO: 164846 - DNA, 30 bp, Artificial Sequence
  Synthetic oligonucleotide
tccctgggtataactcatggtggctgcagg

SEQ ID NO: 164847 - DNA, 30 bp, Artificial Sequence
  Synthetic oligonucleotide
ggtgctacaatgaatttgccttagtgcagg

SEQ ID NO: 164848 - DNA, 30 bp, Artificial Sequence
  Synthetic oligonucleotide
cctgcaacagaaaagacattatggtgcagg

SEQ ID NO: 164849 - DNA, 30 bp, Artificial Sequence
  Synthetic oligonucleotide
agttgtggcgttgtaccttaaggttgcagg

SEQ ID NO: 164850 - DNA, 30 bp, Artificial Sequence
  Synthetic oligonucleotide
gctgaaaatagggatttcacagcaatcagg

SEQ ID NO: 164851 - DNA, 30 bp, Artificial Sequence
  Synthetic oligonucleotide
gaacggatagtatgtccatgcaccatcagg

SEQ ID NO: 164852 - DNA, 30 bp, Artificial Sequence
  Synthetic oligonucleotide
gtggagaccttgctcgcgctggtcatcagg

SEQ ID NO: 164853 - DNA, 30 bp, Artificial Sequence
  Synthetic oligonucleotide
gcatgggacaattggctctggattatcagg

SEQ ID NO: 164854 - DNA, 30 bp, Artificial Sequence
  Synthetic oligonucleotide
gcaaaatgcgctgggcacttaggcctcagg

SEQ ID NO: 164855 - DNA, 30 bp, Artificial Sequence
  Synthetic oligonucleotide
attgcggctaggacagaccgtgtgctcagg

SEQ ID NO: 164856 - DNA, 30 bp, Artificial Sequence
  Synthetic oligonucleotide
caaagaacggatcagacgttgcaggtcagg

SEQ ID NO: 164857 - DNA, 30 bp, Artificial Sequence
  Synthetic oligonucleotide
agtcgccggtgcgtcgttgctacggtcagg

SEQ ID NO: 164858 - DNA, 30 bp, Artificial Sequence
  Synthetic oligonucleotide
tcacactagcgctcaacacacgtggtcagg

SEQ ID NO: 164859 - DNA, 30 bp, Artificial Sequence
  Synthetic oligonucleotide
attaatctaagacgggggcgtaatgtcagg

SEQ ID NO: 164860 - DNA, 30 bp, Artificial Sequence
  Synthetic oligonucleotide
ttgctaattcccacgatgcatcgtgtcagg

SEQ ID NO: 164861 - DNA, 30 bp, Artificial Sequence
  Synthetic oligonucleotide
atgtttgatttaagaacgtaacaattcagg

SEQ ID NO: 164862 - DNA, 30 bp, Artificial Sequence
  Synthetic oligonucleotide
ggaaaggggaggtggttcgagatattcagg

SEQ ID NO: 164863 - DNA, 30 bp, Artificial Sequence
  Synthetic oligonucleotide
gtaccaattgcggtaatccggtacttcagg

SEQ ID NO: 164864 - DNA, 30 bp, Artificial Sequence
  Synthetic oligonucleotide
accggaaatcttggaaggttttagttcagg

SEQ ID NO: 164865 - DNA, 30 bp, Artificial Sequence
  Synthetic oligonucleotide
cctctatatggcctcaggaggataaagagg

SEQ ID NO: 164866 - DNA, 30 bp, Artificial Sequence
  Synthetic oligonucleotide
tagtgtaaactaggctgaccacgccagagg

SEQ ID NO: 164867 - DNA, 30 bp, Artificial Sequence
  Synthetic oligonucleotide
aactacaactccgtatagacgatccagagg

SEQ ID NO: 164868 - DNA, 30 bp, Artificial Sequence
  Synthetic oligonucleotide
tattaatgtcgaaatcgaattgtgcagagg

SEQ ID NO: 164869 - DNA, 30 bp, Artificial Sequence
  Synthetic oligonucleotide
gcacatcctccgggttaatataatcagagg

SEQ ID NO: 164870 - DNA, 30 bp, Artificial Sequence
  Synthetic oligonucleotide
tcttgggcagtgtatcttcattctcagagg

SEQ ID NO: 164871 - DNA, 30 bp, Artificial Sequence
  Synthetic oligonucleotide
gctagaaggaagtccacatacagtcagagg

SEQ ID NO: 164872 - DNA, 31 bp, Artificial Sequence
  Synthetic oligonucleotide
attcggtaaaatgtcgtacgaccacgagagg

SEQ ID NO: 164873 - DNA, 30 bp, Artificial Sequence
  Synthetic oligonucleotide
tttgtcggtcggccaagagataaggagagg

SEQ ID NO: 164874 - DNA, 30 bp, Artificial Sequence
  Synthetic oligonucleotide
aactagcaagccatctgtgcgggctagagg

SEQ ID NO: 164875 - DNA, 30 bp, Artificial Sequence
  Synthetic oligonucleotide
tcgttactacccgttaccagtaattagagg

SEQ ID NO: 164876 - DNA, 30 bp, Artificial Sequence
  Synthetic oligonucleotide
cgggatatgctaggcaacgaggattagagg

SEQ ID NO: 164877 - DNA, 30 bp, Artificial Sequence
  Synthetic oligonucleotide
ggccgtaagtatctggacgctcgtacgagg

SEQ ID NO: 164878 - DNA, 30 bp, Artificial Sequence
  Synthetic oligonucleotide
gaactgaccaagtctactcggattacgagg

SEQ ID NO: 164879 - DNA, 30 bp, Artificial Sequence
  Synthetic oligonucleotide
ccctatatggtactgctgggggccccgagg

SEQ ID NO: 164880 - DNA, 30 bp, Artificial Sequence
  Synthetic oligonucleotide
agtgacccaaccggtactgtagggccgagg

SEQ ID NO: 164881 - DNA, 30 bp, Artificial Sequence
  Synthetic oligonucleotide
ccacctggatgggcgcgaataactccgagg

SEQ ID NO: 164882 - DNA, 30 bp, Artificial Sequence
  Synthetic oligonucleotide
ttgagtcagggatgtttttaaattccgagg

SEQ ID NO: 164883 - DNA, 30 bp, Artificial Sequence
  Synthetic oligonucleotide
tatagcaatactctcctagtcgaagcgagg

SEQ ID NO: 164884 - DNA, 30 bp, Artificial Sequence
  Synthetic oligonucleotide
ctttcagattggctgccacaaagcgcgagg

SEQ ID NO: 164885 - DNA, 30 bp, Artificial Sequence
  Synthetic oligonucleotide
agctcaatgggcaatggtattgtggcgagg

SEQ ID NO: 164886 - DNA, 30 bp, Artificial Sequence
  Synthetic oligonucleotide
tagcttaagggcgtcagtacatctgcgagg

SEQ ID NO: 164887 - DNA, 31 bp, Artificial Sequence
  Synthetic oligonucleotide
gataaggaattgaacatgggaatttgcgagg

SEQ ID NO: 164888 - DNA, 30 bp, Artificial Sequence
  Synthetic oligonucleotide
cttagcatatgcccaaacgcatgatcgagg

SEQ ID NO: 164889 - DNA, 30 bp, Artificial Sequence
  Synthetic oligonucleotide
tacttgaggaggaaccgagccacgtcgagg

SEQ ID NO: 164890 - DNA, 30 bp, Artificial Sequence
  Synthetic oligonucleotide
cgaaagaatctcacatgcgggatgtcgagg

SEQ ID NO: 164891 - DNA, 30 bp, Artificial Sequence
  Synthetic oligonucleotide
gcagtaaggaatgagcgccacataaggagg

SEQ ID NO: 164892 - DNA, 30 bp, Artificial Sequence
  Synthetic oligonucleotide
acaacggacaaggataacggtgccaggagg

SEQ ID NO: 164893 - DNA, 30 bp, Artificial Sequence
  Synthetic oligonucleotide
caactgcgaaaacgtaggggctgcaggagg

SEQ ID NO: 164894 - DNA, 30 bp, Artificial Sequence
  Synthetic oligonucleotide
agtgtgtttcggcgatgtgagcgacggagg

SEQ ID NO: 164895 - DNA, 30 bp, Artificial Sequence
  Synthetic oligonucleotide
tgactacgtccctttaatggcaaccggagg

SEQ ID NO: 164896 - DNA, 30 bp, Artificial Sequence
  Synthetic oligonucleotide
ctagcatggtctacggtctggatccggagg

SEQ ID NO: 164897 - DNA, 30 bp, Artificial Sequence
  Synthetic oligonucleotide
cctgagttcacaaacttatttgtgcggagg

SEQ ID NO: 164898 - DNA, 30 bp, Artificial Sequence
  Synthetic oligonucleotide
ataatttttgcgaggctgtaaaaagggagg

SEQ ID NO: 164899 - DNA, 30 bp, Artificial Sequence
  Synthetic oligonucleotide
taaaggagtgtacaaatgattcccgggagg

SEQ ID NO: 164900 - DNA, 30 bp, Artificial Sequence
  Synthetic oligonucleotide
tcgtgctcatgcggatgcacagccgggagg

SEQ ID NO: 164901 - DNA, 30 bp, Artificial Sequence
  Synthetic oligonucleotide
tctattagatcgtaatcgaactgggggagg

SEQ ID NO: 164902 - DNA, 30 bp, Artificial Sequence
  Synthetic oligonucleotide
tccaccctcgcgctcttcgcagatgggagg

SEQ ID NO: 164903 - DNA, 30 bp, Artificial Sequence
  Synthetic oligonucleotide
tctgaaagtagatcgatgcgatactggagg

SEQ ID NO: 164904 - DNA, 30 bp, Artificial Sequence
  Synthetic oligonucleotide
agtaaagaagaactttgggtcccctggagg

SEQ ID NO: 164905 - DNA, 30 bp, Artificial Sequence
  Synthetic oligonucleotide
cgcggacctagttagggtcgatgctggagg

SEQ ID NO: 164906 - DNA, 30 bp, Artificial Sequence
  Synthetic oligonucleotide
tcggacataaccctccgctggttctggagg

SEQ ID NO: 164907 - DNA, 30 bp, Artificial Sequence
  Synthetic oligonucleotide
gcttcgaccgtcgttataacttagtggagg

SEQ ID NO: 164908 - DNA, 30 bp, Artificial Sequence
  Synthetic oligonucleotide
acttgctcatgcgtaaactagtcgtggagg

SEQ ID NO: 164909 - DNA, 30 bp, Artificial Sequence
  Synthetic oligonucleotide
cggcatgccttgagtattgtggtttggagg

SEQ ID NO: 164910 - DNA, 30 bp, Artificial Sequence
  Synthetic oligonucleotide
tggtcgcaatcataacaatttgtttggagg

SEQ ID NO: 164911 - DNA, 30 bp, Artificial Sequence
  Synthetic oligonucleotide
gggcaaagtcattaagatcgcaacatgagg

SEQ ID NO: 164912 - DNA, 30 bp, Artificial Sequence
  Synthetic oligonucleotide
ctgtgcttgtggaactcatcgtacatgagg

SEQ ID NO: 164913 - DNA, 30 bp, Artificial Sequence
  Synthetic oligonucleotide
ttccattgtttggcaccaagatgcatgagg

SEQ ID NO: 164914 - DNA, 30 bp, Artificial Sequence
  Synthetic oligonucleotide
ctatgtgggattcgatatactgcgatgagg

SEQ ID NO: 164915 - DNA, 30 bp, Artificial Sequence
  Synthetic oligonucleotide
gacacttggggtgaggcgtgttcgatgagg

SEQ ID NO: 164916 - DNA, 30 bp, Artificial Sequence
  Synthetic oligonucleotide
caggtgagaatgcccacatgtgtgatgagg

SEQ ID NO: 164917 - DNA, 31 bp, Artificial Sequence
  Synthetic oligonucleotide
caacctaacgctatgagatacccttatgagg

SEQ ID NO: 164918 - DNA, 30 bp, Artificial Sequence
  Synthetic oligonucleotide
atgctcgaaagactaggtgatctcctgagg

SEQ ID NO: 164919 - DNA, 30 bp, Artificial Sequence
  Synthetic oligonucleotide
gggcctgcgccgaaagaatccctcgtgagg

SEQ ID NO: 164920 - DNA, 30 bp, Artificial Sequence
  Synthetic oligonucleotide
acagtctcagataaaggaagtcaggtgagg

SEQ ID NO: 164921 - DNA, 30 bp, Artificial Sequence
  Synthetic oligonucleotide
agtaccaagtttcactcagtacatgtgagg

SEQ ID NO: 164922 - DNA, 30 bp, Artificial Sequence
  Synthetic oligonucleotide
atgctctgcacaacaagattggatgtgagg

SEQ ID NO: 164923 - DNA, 30 bp, Artificial Sequence
  Synthetic oligonucleotide
cgggtagtataacttagtttaattgtgagg

SEQ ID NO: 164924 - DNA, 30 bp, Artificial Sequence
  Synthetic oligonucleotide
cattccatgcataattgcaggcttgtgagg

SEQ ID NO: 164925 - DNA, 30 bp, Artificial Sequence
  Synthetic oligonucleotide
gtcaggggcaacctgcgcgagtagttgagg

SEQ ID NO: 164926 - DNA, 30 bp, Artificial Sequence
  Synthetic oligonucleotide
ttgtccaggcaaaccgccgtttggttgagg

SEQ ID NO: 164927 - DNA, 31 bp, Artificial Sequence
  Synthetic oligonucleotide
atgctgcgcggggggcaaccctttgttgagg

SEQ ID NO: 164928 - DNA, 30 bp, Artificial Sequence
  Synthetic oligonucleotide
aattgactactagattagcggggaaatagg

SEQ ID NO: 164929 - DNA, 30 bp, Artificial Sequence
  Synthetic oligonucleotide
accaagaagatatggggcgccaacaatagg

SEQ ID NO: 164930 - DNA, 30 bp, Artificial Sequence
  Synthetic oligonucleotide
taagatggtctcagctatcatgacaatagg

SEQ ID NO: 164931 - DNA, 30 bp, Artificial Sequence
  Synthetic oligonucleotide
gacccgaatggagaactcagctacaatagg

SEQ ID NO: 164932 - DNA, 30 bp, Artificial Sequence
  Synthetic oligonucleotide
tgatccccacgttttggtacacagaatagg

SEQ ID NO: 164933 - DNA, 30 bp, Artificial Sequence
  Synthetic oligonucleotide
agctctggatggagctgcgatcagaatagg

SEQ ID NO: 164934 - DNA, 30 bp, Artificial Sequence
  Synthetic oligonucleotide
atgaacagatcctaaatattgtcgaatagg

SEQ ID NO: 164935 - DNA, 30 bp, Artificial Sequence
  Synthetic oligonucleotide
acgggtaaagatggcgttggcaaccatagg

SEQ ID NO: 164936 - DNA, 30 bp, Artificial Sequence
  Synthetic oligonucleotide
aatcagctacaggctcactgtggccatagg

SEQ ID NO: 164937 - DNA, 30 bp, Artificial Sequence
  Synthetic oligonucleotide
agggattcaggccaggatcgctggcatagg

SEQ ID NO: 164938 - DNA, 30 bp, Artificial Sequence
  Synthetic oligonucleotide
ctggttggaaaccacaataaacctcatagg

SEQ ID NO: 164939 - DNA, 30 bp, Artificial Sequence
  Synthetic oligonucleotide
gatcacggacaatagacatcgattcatagg

SEQ ID NO: 164940 - DNA, 30 bp, Artificial Sequence
  Synthetic oligonucleotide
ccctatagtaggactatagcttaggatagg

SEQ ID NO: 164941 - DNA, 30 bp, Artificial Sequence
  Synthetic oligonucleotide
gccgccgtaatggcaaggcacgaaactagg

SEQ ID NO: 164942 - DNA, 30 bp, Artificial Sequence
  Synthetic oligonucleotide
cgatgttgcgttgctcggtagaacactagg

SEQ ID NO: 164943 - DNA, 30 bp, Artificial Sequence
  Synthetic oligonucleotide
atagtttgaagtcactcgattatcactagg

SEQ ID NO: 164944 - DNA, 31 bp, Artificial Sequence
  Synthetic oligonucleotide
ccaacgctctaaaagggcgaaccagactagg

SEQ ID NO: 164945 - DNA, 30 bp, Artificial Sequence
  Synthetic oligonucleotide
atgagatcttcgcttccaagagcacctagg

SEQ ID NO: 164946 - DNA, 30 bp, Artificial Sequence
  Synthetic oligonucleotide
catttacacgataagcctgtcttacctagg

SEQ ID NO: 164947 - DNA, 30 bp, Artificial Sequence
  Synthetic oligonucleotide
ggcaactaaaaggacaaagcgactcctagg

SEQ ID NO: 164948 - DNA, 30 bp, Artificial Sequence
  Synthetic oligonucleotide
tgtgatgccctataggtaagtaccgctagg

SEQ ID NO: 164949 - DNA, 30 bp, Artificial Sequence
  Synthetic oligonucleotide
gggccaagagtcctcgacagagcggctagg

SEQ ID NO: 164950 - DNA, 30 bp, Artificial Sequence
  Synthetic oligonucleotide
aaaggcaaacgatggtggaaccagtctagg

SEQ ID NO: 164951 - DNA, 30 bp, Artificial Sequence
  Synthetic oligonucleotide
tggcgtggggaaccatccatacggtctagg

SEQ ID NO: 164952 - DNA, 30 bp, Artificial Sequence
  Synthetic oligonucleotide
aagacttcgtcgattccgacagtaagtagg

SEQ ID NO: 164953 - DNA, 30 bp, Artificial Sequence
  Synthetic oligonucleotide
cgtgtcttcaggaggggtaaagagagtagg

SEQ ID NO: 164954 - DNA, 30 bp, Artificial Sequence
  Synthetic oligonucleotide
tcccatagcggacataaaaactggagtagg

SEQ ID NO: 164955 - DNA, 30 bp, Artificial Sequence
  Synthetic oligonucleotide
cgtttcctcgattattcaaaggtgagtagg

SEQ ID NO: 164956 - DNA, 30 bp, Artificial Sequence
  Synthetic oligonucleotide
ccgcgtcttagaatagtcaagttgagtagg

SEQ ID NO: 164957 - DNA, 30 bp, Artificial Sequence
  Synthetic oligonucleotide
ggttatatgatgtcatagattgggcgtagg

SEQ ID NO: 164958 - DNA, 30 bp, Artificial Sequence
  Synthetic oligonucleotide
tttgggcaacctaaagtatcttctcgtagg

SEQ ID NO: 164959 - DNA, 30 bp, Artificial Sequence
  Synthetic oligonucleotide
ccaccttgtaaaccatccaagattcgtagg

SEQ ID NO: 164960 - DNA, 30 bp, Artificial Sequence
  Synthetic oligonucleotide
agtctgccttaccgtcgaggcaaaggtagg

SEQ ID NO: 164961 - DNA, 30 bp, Artificial Sequence
  Synthetic oligonucleotide
atgtttaacgtaagcggcactggaggtagg

SEQ ID NO: 164962 - DNA, 30 bp, Artificial Sequence
  Synthetic oligonucleotide
ttacagttcaatagcggattaggcggtagg

SEQ ID NO: 164963 - DNA, 30 bp, Artificial Sequence
  Synthetic oligonucleotide
ttctgtcacagagatgttaactcgggtagg

SEQ ID NO: 164964 - DNA, 30 bp, Artificial Sequence
  Synthetic oligonucleotide
tgggagggagaaatcaggggattgggtagg

SEQ ID NO: 164965 - DNA, 30 bp, Artificial Sequence
  Synthetic oligonucleotide
aagttgtcggtattcgttgagacatgtagg

SEQ ID NO: 164966 - DNA, 30 bp, Artificial Sequence
  Synthetic oligonucleotide
tgaaaacgactgacgggagtagcttgtagg

SEQ ID NO: 164967 - DNA, 30 bp, Artificial Sequence
  Synthetic oligonucleotide
ctttggctgtagatccagagggccattagg

SEQ ID NO: 164968 - DNA, 30 bp, Artificial Sequence
  Synthetic oligonucleotide
aaactactggaaggggctacgaatattagg

SEQ ID NO: 164969 - DNA, 30 bp, Artificial Sequence
  Synthetic oligonucleotide
ggactgatatctggatacatacgtattagg

SEQ ID NO: 164970 - DNA, 30 bp, Artificial Sequence
  Synthetic oligonucleotide
tgatctccggcggaatggtaccgtattagg

SEQ ID NO: 164971 - DNA, 30 bp, Artificial Sequence
  Synthetic oligonucleotide
agataaaggtaacaataagtaggtattagg

SEQ ID NO: 164972 - DNA, 30 bp, Artificial Sequence
  Synthetic oligonucleotide
ccaaatcgtacaagctaacttattattagg

SEQ ID NO: 164973 - DNA, 30 bp, Artificial Sequence
  Synthetic oligonucleotide
gcgaacgcgtaacttcgggtagcacttagg

SEQ ID NO: 164974 - DNA, 30 bp, Artificial Sequence
  Synthetic oligonucleotide
cgggtcatattatgtagagttcatcttagg

SEQ ID NO: 164975 - DNA, 30 bp, Artificial Sequence
  Synthetic oligonucleotide
tgtgacattaaagatgtacactacgttagg

SEQ ID NO: 164976 - DNA, 30 bp, Artificial Sequence
  Synthetic oligonucleotide
tcggattagatttgcaatcggaccgttagg

SEQ ID NO: 164977 - DNA, 30 bp, Artificial Sequence
  Synthetic oligonucleotide
caaaattgcaaccaagattcacgcgttagg

SEQ ID NO: 164978 - DNA, 30 bp, Artificial Sequence
  Synthetic oligonucleotide
caccgcataaactctgaacactgcgttagg

SEQ ID NO: 164979 - DNA, 30 bp, Artificial Sequence
  Synthetic oligonucleotide
actcgtggcactcttccagacaaggttagg

SEQ ID NO: 164980 - DNA, 30 bp, Artificial Sequence
  Synthetic oligonucleotide
tgctctagtgctcagacgatttgatttagg

SEQ ID NO: 164981 - DNA, 30 bp, Artificial Sequence
  Synthetic oligonucleotide
ttaggacgtgactcaacccgccagtttagg

SEQ ID NO: 164982 - DNA, 30 bp, Artificial Sequence
  Synthetic oligonucleotide
gggtcactattgacaatagtaagttttagg

SEQ ID NO: 164983 - DNA, 30 bp, Artificial Sequence
  Synthetic oligonucleotide
tctccatccaaaaaacaaaaatacaaacgg

SEQ ID NO: 164984 - DNA, 30 bp, Artificial Sequence
  Synthetic oligonucleotide
cgttgcatcggtaacacgtggtgcaaacgg

SEQ ID NO: 164985 - DNA, 30 bp, Artificial Sequence
  Synthetic oligonucleotide
aaaggtggacacgtagtcaaggagaaacgg

SEQ ID NO: 164986 - DNA, 30 bp, Artificial Sequence
  Synthetic oligonucleotide
attacgggctcaagtacgaggtcgaaacgg

SEQ ID NO: 164987 - DNA, 30 bp, Artificial Sequence
  Synthetic oligonucleotide
ctagactaacgtcgaatatccttagaacgg

SEQ ID NO: 164988 - DNA, 30 bp, Artificial Sequence
  Synthetic oligonucleotide
gagcccccccatccgtgaaataaggaacgg

SEQ ID NO: 164989 - DNA, 30 bp, Artificial Sequence
  Synthetic oligonucleotide
agtgaaccgccaacatgctacaactaacgg

SEQ ID NO: 164990 - DNA, 30 bp, Artificial Sequence
  Synthetic oligonucleotide
cgtcttcgcaaaacgggcggtaagtaacgg

SEQ ID NO: 164991 - DNA, 30 bp, Artificial Sequence
  Synthetic oligonucleotide
caacgaggacacatccggggacagtaacgg

SEQ ID NO: 164992 - DNA, 30 bp, Artificial Sequence
  Synthetic oligonucleotide
ccgaatataaccaaccgcaaatcgtaacgg

SEQ ID NO: 164993 - DNA, 30 bp, Artificial Sequence
  Synthetic oligonucleotide
tcgccaaatgtacaaatatggtggtaacgg

SEQ ID NO: 164994 - DNA, 30 bp, Artificial Sequence
  Synthetic oligonucleotide
acacacggaggtatcacgcggtgttaacgg

SEQ ID NO: 164995 - DNA, 30 bp, Artificial Sequence
  Synthetic oligonucleotide
ggatacagaaactgggccagaaaaacacgg

SEQ ID NO: 164996 - DNA, 30 bp, Artificial Sequence
  Synthetic oligonucleotide
gtagcgactaaagcgcgctaagaaacacgg

SEQ ID NO: 164997 - DNA, 30 bp, Artificial Sequence
  Synthetic oligonucleotide
tgtaagggattggaacgaatttatacacgg

SEQ ID NO: 164998 - DNA, 30 bp, Artificial Sequence
  Synthetic oligonucleotide
tgaaaaatgcaaacttaggttgtaccacgg

SEQ ID NO: 164999 - DNA, 30 bp, Artificial Sequence
  Synthetic oligonucleotide
agatagtgtcaaacctgtacacagccacgg

SEQ ID NO: 165000 - DNA, 30 bp, Artificial Sequence
  Synthetic oligonucleotide
cggagtattatgcgcgctatagtgccacgg

SEQ ID NO: 165001 - DNA, 30 bp, Artificial Sequence
  Synthetic oligonucleotide
gcttgtgtttcataaaacaaggatccacgg

SEQ ID NO: 165002 - DNA, 30 bp, Artificial Sequence
  Synthetic oligonucleotide
agagcaaacagtagctttaaatgggcacgg

SEQ ID NO: 165003 - DNA, 30 bp, Artificial Sequence
  Synthetic oligonucleotide
tgagtcttgctacttttacaaaaatcacgg

SEQ ID NO: 165004 - DNA, 31 bp, Artificial Sequence
  Synthetic oligonucleotide
ggtctcaagaccgcggttaggagagtcacgg

SEQ ID NO: 165005 - DNA, 30 bp, Artificial Sequence
  Synthetic oligonucleotide
agtttgcagcgcagaagaaacaaaagacgg

SEQ ID NO: 165006 - DNA, 29 bp, Artificial Sequence
  Synthetic oligonucleotide
tagcatgcgttcagaacagtcaaagacgg

SEQ ID NO: 165007 - DNA, 30 bp, Artificial Sequence
  Synthetic oligonucleotide
acacgcgatgaagtgtctacttgaagacgg

SEQ ID NO: 165008 - DNA, 30 bp, Artificial Sequence
  Synthetic oligonucleotide
tactactggggtcgatcttgctggcgacgg

SEQ ID NO: 165009 - DNA, 30 bp, Artificial Sequence
  Synthetic oligonucleotide
ttagagtcctggggtaaatggactcgacgg

SEQ ID NO: 165010 - DNA, 30 bp, Artificial Sequence
  Synthetic oligonucleotide
aaaaacagagatgtataccacagaggacgg

SEQ ID NO: 165011 - DNA, 30 bp, Artificial Sequence
  Synthetic oligonucleotide
gacgaggctatacgcatcgcagacggacgg

SEQ ID NO: 165012 - DNA, 30 bp, Artificial Sequence
  Synthetic oligonucleotide
ggagacagtgcttatgatttccccggacgg

SEQ ID NO: 165013 - DNA, 30 bp, Artificial Sequence
  Synthetic oligonucleotide
accagcgcgttcgtacataggtggggacgg

SEQ ID NO: 165014 - DNA, 30 bp, Artificial Sequence
  Synthetic oligonucleotide
atcacccagctttagatggtgagtggacgg

SEQ ID NO: 165015 - DNA, 30 bp, Artificial Sequence
  Synthetic oligonucleotide
gcggtctggaggcttagacctcacatacgg

SEQ ID NO: 165016 - DNA, 30 bp, Artificial Sequence
  Synthetic oligonucleotide
ctccgatagtgcaacatgagcgagatacgg

SEQ ID NO: 165017 - DNA, 30 bp, Artificial Sequence
  Synthetic oligonucleotide
ctggttgtttagcattattgccggatacgg

SEQ ID NO: 165018 - DNA, 30 bp, Artificial Sequence
  Synthetic oligonucleotide
acaatcgaaccaacccgatttctgatacgg

SEQ ID NO: 165019 - DNA, 30 bp, Artificial Sequence
  Synthetic oligonucleotide
ctgtcgatagacacaatgtagttgatacgg

SEQ ID NO: 165020 - DNA, 30 bp, Artificial Sequence
  Synthetic oligonucleotide
gtgtgctgcatgcgggcaaaagcactacgg

SEQ ID NO: 165021 - DNA, 30 bp, Artificial Sequence
  Synthetic oligonucleotide
accttgacctgactagtgagttgactacgg

SEQ ID NO: 165022 - DNA, 30 bp, Artificial Sequence
  Synthetic oligonucleotide
atcaatgttcgaacagcttatattctacgg

SEQ ID NO: 165023 - DNA, 30 bp, Artificial Sequence
  Synthetic oligonucleotide
atgaatgcaagtcttagaaggtgagtacgg

SEQ ID NO: 165024 - DNA, 30 bp, Artificial Sequence
  Synthetic oligonucleotide
agcgtaaatgggttcctggcactagtacgg

SEQ ID NO: 165025 - DNA, 30 bp, Artificial Sequence
  Synthetic oligonucleotide
acaggcccgcgaacactggagtaggtacgg

SEQ ID NO: 165026 - DNA, 30 bp, Artificial Sequence
  Synthetic oligonucleotide
tcgatgggcaggtaccaggtctctgtacgg

SEQ ID NO: 165027 - DNA, 30 bp, Artificial Sequence
  Synthetic oligonucleotide
gggagcagaatgtatgaattgctcttacgg

SEQ ID NO: 165028 - DNA, 30 bp, Artificial Sequence
  Synthetic oligonucleotide
gtaggcgacgaatgaagtgcatatttacgg

SEQ ID NO: 165029 - DNA, 30 bp, Artificial Sequence
  Synthetic oligonucleotide
cagaaaactaatgacgaatagcacaaccgg

SEQ ID NO: 165030 - DNA, 30 bp, Artificial Sequence
  Synthetic oligonucleotide
gtccaaagttattgacagggggtcaaccgg

SEQ ID NO: 165031 - DNA, 30 bp, Artificial Sequence
  Synthetic oligonucleotide
accagcccgcaacgggttggcttcaaccgg

SEQ ID NO: 165032 - DNA, 30 bp, Artificial Sequence
  Synthetic oligonucleotide
catcagggtcagtcccaaatgtagaaccgg

SEQ ID NO: 165033 - DNA, 30 bp, Artificial Sequence
  Synthetic oligonucleotide
gcaccatagaaattgcccggcacgaaccgg

SEQ ID NO: 165034 - DNA, 30 bp, Artificial Sequence
  Synthetic oligonucleotide
tattgcagctcaagcggaatctggaaccgg

SEQ ID NO: 165035 - DNA, 30 bp, Artificial Sequence
  Synthetic oligonucleotide
gtgataatccacgatgccaatggacaccgg

SEQ ID NO: 165036 - DNA, 30 bp, Artificial Sequence
  Synthetic oligonucleotide
cgacatctggatatatctcgtgagcaccgg

SEQ ID NO: 165037 - DNA, 30 bp, Artificial Sequence
  Synthetic oligonucleotide
ctagttggagaaggactacgcttgcaccgg

SEQ ID NO: 165038 - DNA, 30 bp, Artificial Sequence
  Synthetic oligonucleotide
gcagagtgacttatgacaaactcagaccgg

SEQ ID NO: 165039 - DNA, 30 bp, Artificial Sequence
  Synthetic oligonucleotide
ccataaccgtaatggtgcgatcaggaccgg

SEQ ID NO: 165040 - DNA, 27 bp, Artificial Sequence
  Synthetic oligonucleotide
ggagacgaagcgaggctcgcggaccgg

SEQ ID NO: 165041 - DNA, 30 bp, Artificial Sequence
  Synthetic oligonucleotide
tggatatgtggagaatggcatgcggaccgg

SEQ ID NO: 165042 - DNA, 30 bp, Artificial Sequence
  Synthetic oligonucleotide
tgtgaaccatagcgcttattgtgggaccgg

SEQ ID NO: 165043 - DNA, 30 bp, Artificial Sequence
  Synthetic oligonucleotide
cgtcaggcgacgttacgaggagatgaccgg

SEQ ID NO: 165044 - DNA, 30 bp, Artificial Sequence
  Synthetic oligonucleotide
taaaacgacgcgtatagagcaggataccgg

SEQ ID NO: 165045 - DNA, 30 bp, Artificial Sequence
  Synthetic oligonucleotide
tagcggtaacctcctcgaggatggtaccgg

SEQ ID NO: 165046 - DNA, 30 bp, Artificial Sequence
  Synthetic oligonucleotide
gcaattacggtcaagtcctcccgaacccgg

SEQ ID NO: 165047 - DNA, 30 bp, Artificial Sequence
  Synthetic oligonucleotide
agctcgcgtcttggttaactgactacccgg

SEQ ID NO: 165048 - DNA, 30 bp, Artificial Sequence
  Synthetic oligonucleotide
ctttaacacagcttggctcatcgtacccgg

SEQ ID NO: 165049 - DNA, 30 bp, Artificial Sequence
  Synthetic oligonucleotide
cgggaatgaattgtgagaacgggtacccgg

SEQ ID NO: 165050 - DNA, 30 bp, Artificial Sequence
  Synthetic oligonucleotide
cgcgagattaccctggaacaatttacccgg

SEQ ID NO: 165051 - DNA, 30 bp, Artificial Sequence
  Synthetic oligonucleotide
gtatacgagttctcaagtgtgaaaccccgg

SEQ ID NO: 165052 - DNA, 30 bp, Artificial Sequence
  Synthetic oligonucleotide
gatagggactgatggggcgatagagcccgg

SEQ ID NO: 165053 - DNA, 30 bp, Artificial Sequence
  Synthetic oligonucleotide
ctgtgtaggccgagtacgtcctccgcccgg

SEQ ID NO: 165054 - DNA, 30 bp, Artificial Sequence
  Synthetic oligonucleotide
ccgagacgttatacatttacggcatcccgg

SEQ ID NO: 165055 - DNA, 30 bp, Artificial Sequence
  Synthetic oligonucleotide
cgggagacatgtctgtctgggggatcccgg

SEQ ID NO: 165056 - DNA, 30 bp, Artificial Sequence
  Synthetic oligonucleotide
atgatgcgaacacggtcttagtattcccgg

SEQ ID NO: 165057 - DNA, 30 bp, Artificial Sequence
  Synthetic oligonucleotide
ccatataacctgtggtatcgtgtgagccgg

SEQ ID NO: 165058 - DNA, 30 bp, Artificial Sequence
  Synthetic oligonucleotide
cagcctgcgacttctcggagttttagccgg

SEQ ID NO: 165059 - DNA, 30 bp, Artificial Sequence
  Synthetic oligonucleotide
acggtatttctattgatgggagagcgccgg

SEQ ID NO: 165060 - DNA, 30 bp, Artificial Sequence
  Synthetic oligonucleotide
tgattacaaggcaacaaaatttctcgccgg

SEQ ID NO: 165061 - DNA, 30 bp, Artificial Sequence
  Synthetic oligonucleotide
gaatgatggtcaccgacgttctaaggccgg

SEQ ID NO: 165062 - DNA, 30 bp, Artificial Sequence
  Synthetic oligonucleotide
tcaatgattgcctaccagatgcacggccgg

SEQ ID NO: 165063 - DNA, 30 bp, Artificial Sequence
  Synthetic oligonucleotide
gattcgtacattgctggcttagcgggccgg

SEQ ID NO: 165064 - DNA, 31 bp, Artificial Sequence
  Synthetic oligonucleotide
cccagacgctactggggcgcaagctggccgg

SEQ ID NO: 165065 - DNA, 31 bp, Artificial Sequence
  Synthetic oligonucleotide
gaaccatcgcccggacacagaaaggtgccgg

SEQ ID NO: 165066 - DNA, 30 bp, Artificial Sequence
  Synthetic oligonucleotide
gggaaagactcgtcggccccttggtgccgg

SEQ ID NO: 165067 - DNA, 30 bp, Artificial Sequence
  Synthetic oligonucleotide
tccataggtcgggtgtttgtcgtgtgccgg

SEQ ID NO: 165068 - DNA, 30 bp, Artificial Sequence
  Synthetic oligonucleotide
atcacgagattggcagggcagccttgccgg

SEQ ID NO: 165069 - DNA, 30 bp, Artificial Sequence
  Synthetic oligonucleotide
agagcattagttcacgctgcggaaatccgg

SEQ ID NO: 165070 - DNA, 30 bp, Artificial Sequence
  Synthetic oligonucleotide
tgacgaaatacattggttctttgaatccgg

SEQ ID NO: 165071 - DNA, 30 bp, Artificial Sequence
  Synthetic oligonucleotide
tctctggtaactttacggtggataatccgg

SEQ ID NO: 165072 - DNA, 30 bp, Artificial Sequence
  Synthetic oligonucleotide
agtgaaataagctatgtgtgttgcctccgg

SEQ ID NO: 165073 - DNA, 30 bp, Artificial Sequence
  Synthetic oligonucleotide
cgattggtctgcttacgtcaggttgtccgg

SEQ ID NO: 165074 - DNA, 30 bp, Artificial Sequence
  Synthetic oligonucleotide
ggagtaatagtcagtacgcaacggttccgg

SEQ ID NO: 165075 - DNA, 30 bp, Artificial Sequence
  Synthetic oligonucleotide
tggcagaggttaatttcactgtatttccgg

SEQ ID NO: 165076 - DNA, 30 bp, Artificial Sequence
  Synthetic oligonucleotide
gagagtgattgtgctgtagttcacaagcgg

SEQ ID NO: 165077 - DNA, 30 bp, Artificial Sequence
  Synthetic oligonucleotide
gggactgggcgcctgggagccttcaagcgg

SEQ ID NO: 165078 - DNA, 30 bp, Artificial Sequence
  Synthetic oligonucleotide
ccaaatacttaagacgcctagccgaagcgg

SEQ ID NO: 165079 - DNA, 30 bp, Artificial Sequence
  Synthetic oligonucleotide
acagcaaacatgataggatcccgtaagcgg

SEQ ID NO: 165080 - DNA, 30 bp, Artificial Sequence
  Synthetic oligonucleotide
accgcgattgataggggtaaaacacagcgg

SEQ ID NO: 165081 - DNA, 30 bp, Artificial Sequence
  Synthetic oligonucleotide
ggtcctagcgaatattacttttaagagcgg

SEQ ID NO: 165082 - DNA, 30 bp, Artificial Sequence
  Synthetic oligonucleotide
ggaagtagttgcacgatgaccctagagcgg

SEQ ID NO: 165083 - DNA, 30 bp, Artificial Sequence
  Synthetic oligonucleotide
ctcgttagatgaggagggcctgtagagcgg

SEQ ID NO: 165084 - DNA, 30 bp, Artificial Sequence
  Synthetic oligonucleotide
tcactcagggacattgtcgagagatagcgg

SEQ ID NO: 165085 - DNA, 30 bp, Artificial Sequence
  Synthetic oligonucleotide
gccaggatgtcgaataatttaaagtagcgg

SEQ ID NO: 165086 - DNA, 30 bp, Artificial Sequence
  Synthetic oligonucleotide
tcagggtaagtatagtcacatctgacgcgg

SEQ ID NO: 165087 - DNA, 30 bp, Artificial Sequence
  Synthetic oligonucleotide
attggagataaagcgtaacgcactacgcgg

SEQ ID NO: 165088 - DNA, 30 bp, Artificial Sequence
  Synthetic oligonucleotide
ccgggaggtttatcgtcataacgaccgcgg

SEQ ID NO: 165089 - DNA, 30 bp, Artificial Sequence
  Synthetic oligonucleotide
aagcgcagttatagtagttagatcccgcgg

SEQ ID NO: 165090 - DNA, 30 bp, Artificial Sequence
  Synthetic oligonucleotide
aaatgctgaataagtcatacgctcccgcgg

SEQ ID NO: 165091 - DNA, 30 bp, Artificial Sequence
  Synthetic oligonucleotide
tgaataggccggcaaagcaggtgtccgcgg

SEQ ID NO: 165092 - DNA, 30 bp, Artificial Sequence
  Synthetic oligonucleotide
actgatcgatatgtcgctcagaccgcgcgg

SEQ ID NO: 165093 - DNA, 30 bp, Artificial Sequence
  Synthetic oligonucleotide
tatcagcgatgtactccctaatgcgcgcgg

SEQ ID NO: 165094 - DNA, 30 bp, Artificial Sequence
  Synthetic oligonucleotide
caggctaacttgataatcttcagggcgcgg

SEQ ID NO: 165095 - DNA, 30 bp, Artificial Sequence
  Synthetic oligonucleotide
taagtataagtccctgggatatgtgcgcgg

SEQ ID NO: 165096 - DNA, 30 bp, Artificial Sequence
  Synthetic oligonucleotide
agttccgggatagggtacgccctgtcgcgg

SEQ ID NO: 165097 - DNA, 30 bp, Artificial Sequence
  Synthetic oligonucleotide
atgtactcctagagataactgcgttcgcgg

SEQ ID NO: 165098 - DNA, 30 bp, Artificial Sequence
  Synthetic oligonucleotide
ggatggttcgccacgatcaagctaaggcgg

SEQ ID NO: 165099 - DNA, 30 bp, Artificial Sequence
  Synthetic oligonucleotide
tgacttctaggctgctacgatggtaggcgg

SEQ ID NO: 165100 - DNA, 30 bp, Artificial Sequence
  Synthetic oligonucleotide
gcggatcagtttgagataacggttaggcgg

SEQ ID NO: 165101 - DNA, 30 bp, Artificial Sequence
  Synthetic oligonucleotide
accctaccgaaagcggcgtaataacggcgg

SEQ ID NO: 165102 - DNA, 30 bp, Artificial Sequence
  Synthetic oligonucleotide
cattcgactccgcgaatctactaacggcgg

SEQ ID NO: 165103 - DNA, 30 bp, Artificial Sequence
  Synthetic oligonucleotide
tggcttatccctcgttggtcatcccggcgg

SEQ ID NO: 165104 - DNA, 30 bp, Artificial Sequence
  Synthetic oligonucleotide
gcaggctactttattttgagactagggcgg

SEQ ID NO: 165105 - DNA, 30 bp, Artificial Sequence
  Synthetic oligonucleotide
accacatcactaaccggttaaccctggcgg

SEQ ID NO: 165106 - DNA, 30 bp, Artificial Sequence
  Synthetic oligonucleotide
cgtccggtatcgagcttacctttttggcgg

SEQ ID NO: 165107 - DNA, 30 bp, Artificial Sequence
  Synthetic oligonucleotide
aggtactgccttgcgtggtggcgcatgcgg

SEQ ID NO: 165108 - DNA, 30 bp, Artificial Sequence
  Synthetic oligonucleotide
actagcaagagcaaattaaattttatgcgg

SEQ ID NO: 165109 - DNA, 30 bp, Artificial Sequence
  Synthetic oligonucleotide
actacgtggggttggtttctagttctgcgg

SEQ ID NO: 165110 - DNA, 30 bp, Artificial Sequence
  Synthetic oligonucleotide
ggacacatgcagaacggaccggccgtgcgg

SEQ ID NO: 165111 - DNA, 30 bp, Artificial Sequence
  Synthetic oligonucleotide
gggaactaatacctaacagttaaggtgcgg

SEQ ID NO: 165112 - DNA, 30 bp, Artificial Sequence
  Synthetic oligonucleotide
atccgcggaggtactcgccgaagtgtgcgg

SEQ ID NO: 165113 - DNA, 30 bp, Artificial Sequence
  Synthetic oligonucleotide
ggatgcttcccgccgagcccaggattgcgg

SEQ ID NO: 165114 - DNA, 30 bp, Artificial Sequence
  Synthetic oligonucleotide
tagccgcaggtcccaggggcctgattgcgg

SEQ ID NO: 165115 - DNA, 30 bp, Artificial Sequence
  Synthetic oligonucleotide
tcgttgatccggcaaagggggaaaaatcgg

SEQ ID NO: 165116 - DNA, 30 bp, Artificial Sequence
  Synthetic oligonucleotide
caaggtaaggggtttgatggtttcaatcgg

SEQ ID NO: 165117 - DNA, 30 bp, Artificial Sequence
  Synthetic oligonucleotide
aattcgaaaacgtagccggtagagaatcgg

SEQ ID NO: 165118 - DNA, 30 bp, Artificial Sequence
  Synthetic oligonucleotide
cacgtacaattcggagaatgtaggaatcgg

SEQ ID NO: 165119 - DNA, 30 bp, Artificial Sequence
  Synthetic oligonucleotide
ttgcgagtgaatcgcagctatgtgaatcgg

SEQ ID NO: 165120 - DNA, 30 bp, Artificial Sequence
  Synthetic oligonucleotide
ttccagacgggaaccagtccaatgcatcgg

SEQ ID NO: 165121 - DNA, 30 bp, Artificial Sequence
  Synthetic oligonucleotide
aacgatgaccaatgggcaggtttgcatcgg

SEQ ID NO: 165122 - DNA, 30 bp, Artificial Sequence
  Synthetic oligonucleotide
caggttgacggggcgtaccccttagatcgg

SEQ ID NO: 165123 - DNA, 30 bp, Artificial Sequence
  Synthetic oligonucleotide
cgcgcgtactttgagctatgcgccgatcgg

SEQ ID NO: 165124 - DNA, 30 bp, Artificial Sequence
  Synthetic oligonucleotide
gggacgagcgaggcgcacctccgatatcgg

SEQ ID NO: 165125 - DNA, 30 bp, Artificial Sequence
  Synthetic oligonucleotide
gatggatatcatatcaatacatgttatcgg

SEQ ID NO: 165126 - DNA, 30 bp, Artificial Sequence
  Synthetic oligonucleotide
cggatcgcgttaggcggggcaatgactcgg

SEQ ID NO: 165127 - DNA, 30 bp, Artificial Sequence
  Synthetic oligonucleotide
ctgccggccactacagacactatgactcgg

SEQ ID NO: 165128 - DNA, 30 bp, Artificial Sequence
  Synthetic oligonucleotide
tcgtggagaacactgcatttcggtactcgg

SEQ ID NO: 165129 - DNA, 30 bp, Artificial Sequence
  Synthetic oligonucleotide
tcaagcaaccagtcatggacaagacctcgg

SEQ ID NO: 165130 - DNA, 30 bp, Artificial Sequence
  Synthetic oligonucleotide
gcgtcgcccaaaaggggactaattcctcgg

SEQ ID NO: 165131 - DNA, 30 bp, Artificial Sequence
  Synthetic oligonucleotide
tataagcggcaaaatcgtcaaacctctcgg

SEQ ID NO: 165132 - DNA, 30 bp, Artificial Sequence
  Synthetic oligonucleotide
tgaagtcggattacctgtttagcctctcgg

SEQ ID NO: 165133 - DNA, 30 bp, Artificial Sequence
  Synthetic oligonucleotide
ggcccatgcaatgtatggcacggccgtcgg

SEQ ID NO: 165134 - DNA, 30 bp, Artificial Sequence
  Synthetic oligonucleotide
acgtcacgctttcaaagctacctccgtcgg

SEQ ID NO: 165135 - DNA, 30 bp, Artificial Sequence
  Synthetic oligonucleotide
aggtagtttgcacgggaggttcagcgtcgg

SEQ ID NO: 165136 - DNA, 30 bp, Artificial Sequence
  Synthetic oligonucleotide
gtagaagtagcgggacgagggtcaggtcgg

SEQ ID NO: 165137 - DNA, 30 bp, Artificial Sequence
  Synthetic oligonucleotide
agtgtcactctgtcgctgtcgaacggtcgg

SEQ ID NO: 165138 - DNA, 30 bp, Artificial Sequence
  Synthetic oligonucleotide
ttaggcagccaatcatatcgggatggtcgg

SEQ ID NO: 165139 - DNA, 30 bp, Artificial Sequence
  Synthetic oligonucleotide
gctcatagggaattggctcgggatggtcgg

SEQ ID NO: 165140 - DNA, 30 bp, Artificial Sequence
  Synthetic oligonucleotide
gaaaacggaaccgaggctattattggtcgg

SEQ ID NO: 165141 - DNA, 30 bp, Artificial Sequence
  Synthetic oligonucleotide
aatatacaacgacagaacaccctgtgtcgg

SEQ ID NO: 165142 - DNA, 30 bp, Artificial Sequence
  Synthetic oligonucleotide
tggaccacggctacagatacagtgtgtcgg

SEQ ID NO: 165143 - DNA, 30 bp, Artificial Sequence
  Synthetic oligonucleotide
gaatggcgatcacctgtcatgagttgtcgg

SEQ ID NO: 165144 - DNA, 30 bp, Artificial Sequence
  Synthetic oligonucleotide
tgtgtcgggtcggctaagtcagtttgtcgg

SEQ ID NO: 165145 - DNA, 30 bp, Artificial Sequence
  Synthetic oligonucleotide
ttgcttctagaatagaatggaagtattcgg

SEQ ID NO: 165146 - DNA, 30 bp, Artificial Sequence
  Synthetic oligonucleotide
gagactataagcatcccattgagtattcgg

SEQ ID NO: 165147 - DNA, 30 bp, Artificial Sequence
  Synthetic oligonucleotide
gcagagcctaaaaaagcgcccagacttcgg

SEQ ID NO: 165148 - DNA, 30 bp, Artificial Sequence
  Synthetic oligonucleotide
cccgtaataagaggaattgtggctcttcgg

SEQ ID NO: 165149 - DNA, 30 bp, Artificial Sequence
  Synthetic oligonucleotide
gggcagacgcgttatcgctggcgtcttcgg

SEQ ID NO: 165150 - DNA, 30 bp, Artificial Sequence
  Synthetic oligonucleotide
gccgatcagtgtagttgtttgcaagttcgg

SEQ ID NO: 165151 - DNA, 30 bp, Artificial Sequence
  Synthetic oligonucleotide
aagtacggttcgctctatctatcagttcgg

SEQ ID NO: 165152 - DNA, 30 bp, Artificial Sequence
  Synthetic oligonucleotide
gacatgctaccccatcttgaacgagttcgg

SEQ ID NO: 165153 - DNA, 30 bp, Artificial Sequence
  Synthetic oligonucleotide
agtcagactgcatgtcaaaagtgcgttcgg

SEQ ID NO: 165154 - DNA, 30 bp, Artificial Sequence
  Synthetic oligonucleotide
tgcaggcaagatactcaccggaaggttcgg

SEQ ID NO: 165155 - DNA, 30 bp, Artificial Sequence
  Synthetic oligonucleotide
cggaaggggcgccaggataagtattttcgg

SEQ ID NO: 165156 - DNA, 30 bp, Artificial Sequence
  Synthetic oligonucleotide
gggggagctcgactcgcattttcttttcgg

SEQ ID NO: 165157 - DNA, 30 bp, Artificial Sequence
  Synthetic oligonucleotide
gatcaggaggagcgccgctataaaaaaggg

SEQ ID NO: 165158 - DNA, 29 bp, Artificial Sequence
  Synthetic oligonucleotide
tgcattgcgaaaaagttcacttaaaaggg

SEQ ID NO: 165159 - DNA, 30 bp, Artificial Sequence
  Synthetic oligonucleotide
gtaaacttaccggggccgtaaatcaaaggg

SEQ ID NO: 165160 - DNA, 30 bp, Artificial Sequence
  Synthetic oligonucleotide
ctaagtaacaacgaaaataaggtcaaaggg

SEQ ID NO: 165161 - DNA, 30 bp, Artificial Sequence
  Synthetic oligonucleotide
ggcgtactcactgggggcggactgaaaggg

SEQ ID NO: 165162 - DNA, 30 bp, Artificial Sequence
  Synthetic oligonucleotide
actgcgcgcaccggaatctggcttaaaggg

SEQ ID NO: 165163 - DNA, 30 bp, Artificial Sequence
  Synthetic oligonucleotide
gggttggctttcatcaagaggaaacaaggg

SEQ ID NO: 165164 - DNA, 30 bp, Artificial Sequence
  Synthetic oligonucleotide
cctattaaccaccgtttttcatcccaaggg

SEQ ID NO: 165165 - DNA, 30 bp, Artificial Sequence
  Synthetic oligonucleotide
ccatctaatgacgatgggatctagcaaggg

SEQ ID NO: 165166 - DNA, 30 bp, Artificial Sequence
  Synthetic oligonucleotide
gccaacatggttccggacaaatctcaaggg

SEQ ID NO: 165167 - DNA, 30 bp, Artificial Sequence
  Synthetic oligonucleotide
aaaaaggcagcgggacgcccccaagaaggg

SEQ ID NO: 165168 - DNA, 30 bp, Artificial Sequence
  Synthetic oligonucleotide
caagttggaggggtccagcaaatagaaggg

SEQ ID NO: 165169 - DNA, 30 bp, Artificial Sequence
  Synthetic oligonucleotide
ttcaaccatatactatgtacaggcgaaggg

SEQ ID NO: 165170 - DNA, 30 bp, Artificial Sequence
  Synthetic oligonucleotide
ctgagacagagcggggcagagggcgaaggg

SEQ ID NO: 165171 - DNA, 30 bp, Artificial Sequence
  Synthetic oligonucleotide
ggccacaggagagtaggtgactaggaaggg

SEQ ID NO: 165172 - DNA, 30 bp, Artificial Sequence
  Synthetic oligonucleotide
gggtgaaacatacggaagctcatggaaggg

SEQ ID NO: 165173 - DNA, 30 bp, Artificial Sequence
  Synthetic oligonucleotide
aaagcattaggtagggtaacgcttgaaggg

SEQ ID NO: 165174 - DNA, 30 bp, Artificial Sequence
  Synthetic oligonucleotide
gataggtgtcgtttaacgaacgcataaggg

SEQ ID NO: 165175 - DNA, 30 bp, Artificial Sequence
  Synthetic oligonucleotide
cccgcaaccactacgccttttcactaaggg

SEQ ID NO: 165176 - DNA, 30 bp, Artificial Sequence
  Synthetic oligonucleotide
aatgagatcatatctgccagggattaaggg

SEQ ID NO: 165177 - DNA, 30 bp, Artificial Sequence
  Synthetic oligonucleotide
tctccacaagtaaatatagcatcttaaggg

SEQ ID NO: 165178 - DNA, 30 bp, Artificial Sequence
  Synthetic oligonucleotide
accggtccctctgaagagttacaaacaggg

SEQ ID NO: 165179 - DNA, 30 bp, Artificial Sequence
  Synthetic oligonucleotide
tccggtatgagaccggtaatagcaacaggg

SEQ ID NO: 165180 - DNA, 30 bp, Artificial Sequence
  Synthetic oligonucleotide
gggtcaaggaacgctaagcgttccacaggg

SEQ ID NO: 165181 - DNA, 30 bp, Artificial Sequence
  Synthetic oligonucleotide
tatgcattgaagacattttactggacaggg

SEQ ID NO: 165182 - DNA, 30 bp, Artificial Sequence
  Synthetic oligonucleotide
ttacatttcaaagatcgtacaaatacaggg

SEQ ID NO: 165183 - DNA, 30 bp, Artificial Sequence
  Synthetic oligonucleotide
agccacgaggctacggctcctaatacaggg

SEQ ID NO: 165184 - DNA, 30 bp, Artificial Sequence
  Synthetic oligonucleotide
ccggtctgtcggcggagaaaaattacaggg

SEQ ID NO: 165185 - DNA, 30 bp, Artificial Sequence
  Synthetic oligonucleotide
agaataaccgttcagagcggcaaaccaggg

SEQ ID NO: 165186 - DNA, 30 bp, Artificial Sequence
  Synthetic oligonucleotide
agcggggcttagcttgtaagttgaccaggg

SEQ ID NO: 165187 - DNA, 30 bp, Artificial Sequence
  Synthetic oligonucleotide
aacgactgggcaccacacggaccgccaggg

SEQ ID NO: 165188 - DNA, 30 bp, Artificial Sequence
  Synthetic oligonucleotide
tagtggttgcgggttcagctatatccaggg

SEQ ID NO: 165189 - DNA, 30 bp, Artificial Sequence
  Synthetic oligonucleotide
aggtgtgcgccaaaccattgacgtccaggg

SEQ ID NO: 165190 - DNA, 30 bp, Artificial Sequence
  Synthetic oligonucleotide
cagggcaatatggccctatggctagcaggg

SEQ ID NO: 165191 - DNA, 30 bp, Artificial Sequence
  Synthetic oligonucleotide
tggaaagcggacggttcatacagtgcaggg

SEQ ID NO: 165192 - DNA, 30 bp, Artificial Sequence
  Synthetic oligonucleotide
gcaatgactgatggtggagagtgtgcaggg

SEQ ID NO: 165193 - DNA, 30 bp, Artificial Sequence
  Synthetic oligonucleotide
cttattatctaatgggatactgcctcaggg

SEQ ID NO: 165194 - DNA, 30 bp, Artificial Sequence
  Synthetic oligonucleotide
tcgccgcgcattcagtttgtttgctcaggg

SEQ ID NO: 165195 - DNA, 30 bp, Artificial Sequence
  Synthetic oligonucleotide
gatacttagcataaaagcttgaagtcaggg

SEQ ID NO: 165196 - DNA, 30 bp, Artificial Sequence
  Synthetic oligonucleotide
ccgttgagaagtctgttttaacattcaggg

SEQ ID NO: 165197 - DNA, 30 bp, Artificial Sequence
  Synthetic oligonucleotide
tgccatagacgtagtttccatgcttcaggg

SEQ ID NO: 165198 - DNA, 30 bp, Artificial Sequence
  Synthetic oligonucleotide
tgttatccgagttctttcaccttttcaggg

SEQ ID NO: 165199 - DNA, 30 bp, Artificial Sequence
  Synthetic oligonucleotide
gagaatgaattacctcgtgcgagcagaggg

SEQ ID NO: 165200 - DNA, 30 bp, Artificial Sequence
  Synthetic oligonucleotide
cggttggtcgggcaggtctttcagcgaggg

SEQ ID NO: 165201 - DNA, 30 bp, Artificial Sequence
  Synthetic oligonucleotide
gatgaggctaacgatgtcttaaaaggaggg

SEQ ID NO: 165202 - DNA, 30 bp, Artificial Sequence
  Synthetic oligonucleotide
cacttagtgagtaacaacacaggcggaggg

SEQ ID NO: 165203 - DNA, 30 bp, Artificial Sequence
  Synthetic oligonucleotide
ctacagtctcagatcggctagctgggaggg

SEQ ID NO: 165204 - DNA, 30 bp, Artificial Sequence
  Synthetic oligonucleotide
actgcttctagtaggctgaggttgggaggg

SEQ ID NO: 165205 - DNA, 30 bp, Artificial Sequence
  Synthetic oligonucleotide
gcaataatatggatagtaattgctggaggg

SEQ ID NO: 165206 - DNA, 30 bp, Artificial Sequence
  Synthetic oligonucleotide
tatgagaatttgctacatagtacgtgaggg

SEQ ID NO: 165207 - DNA, 30 bp, Artificial Sequence
  Synthetic oligonucleotide
tgtagcgcacaagaagaaattatgtgaggg

SEQ ID NO: 165208 - DNA, 30 bp, Artificial Sequence
  Synthetic oligonucleotide
cctacacgcgaagggattccagtgtgaggg

SEQ ID NO: 165209 - DNA, 30 bp, Artificial Sequence
  Synthetic oligonucleotide
gtaaaatgggctaaactgtcaccaataggg

SEQ ID NO: 165210 - DNA, 30 bp, Artificial Sequence
  Synthetic oligonucleotide
cagcatcactccttcgtctcgagaataggg

SEQ ID NO: 165211 - DNA, 30 bp, Artificial Sequence
  Synthetic oligonucleotide
ggtagggcaaggtacgggcgtgccataggg

SEQ ID NO: 165212 - DNA, 30 bp, Artificial Sequence
  Synthetic oligonucleotide
cagcaagtgcatggttcatgagtcataggg

SEQ ID NO: 165213 - DNA, 30 bp, Artificial Sequence
  Synthetic oligonucleotide
cgtattcatgggattctacttgatataggg

SEQ ID NO: 165214 - DNA, 30 bp, Artificial Sequence
  Synthetic oligonucleotide
tcgcagcgggaggaatggagtacactaggg

SEQ ID NO: 165215 - DNA, 30 bp, Artificial Sequence
  Synthetic oligonucleotide
taatgtcaatccggttacttttagctaggg

SEQ ID NO: 165216 - DNA, 30 bp, Artificial Sequence
  Synthetic oligonucleotide
aacactggtggatcgtgctgggggctaggg

SEQ ID NO: 165217 - DNA, 30 bp, Artificial Sequence
  Synthetic oligonucleotide
accagctggagctactaattattgctaggg

SEQ ID NO: 165218 - DNA, 30 bp, Artificial Sequence
  Synthetic oligonucleotide
agaatataccgaaaacacgtggctgtaggg

SEQ ID NO: 165219 - DNA, 30 bp, Artificial Sequence
  Synthetic oligonucleotide
caaaaacgtctaagagatggcggattaggg

SEQ ID NO: 165220 - DNA, 30 bp, Artificial Sequence
  Synthetic oligonucleotide
gatagttgcccatacaatatatacttaggg

SEQ ID NO: 165221 - DNA, 30 bp, Artificial Sequence
  Synthetic oligonucleotide
ttctggtatgattgataaatgccgttaggg

SEQ ID NO: 165222 - DNA, 30 bp, Artificial Sequence
  Synthetic oligonucleotide
tggaactggctctatcaaatatggttaggg

SEQ ID NO: 165223 - DNA, 30 bp, Artificial Sequence
  Synthetic oligonucleotide
aaagtctagatacccgggcgtggtttaggg

SEQ ID NO: 165224 - DNA, 30 bp, Artificial Sequence
  Synthetic oligonucleotide
ccgttaaggccatctgtttgccagaacggg

SEQ ID NO: 165225 - DNA, 30 bp, Artificial Sequence
  Synthetic oligonucleotide
attgccggataaaacttgcacagtaacggg

SEQ ID NO: 165226 - DNA, 30 bp, Artificial Sequence
  Synthetic oligonucleotide
gtgaatggctgaaaattaactcgacacggg

SEQ ID NO: 165227 - DNA, 30 bp, Artificial Sequence
  Synthetic oligonucleotide
cccgaagaattggcatgggcggaagacggg

SEQ ID NO: 165228 - DNA, 30 bp, Artificial Sequence
  Synthetic oligonucleotide
ttcaatccgcgcgaccggaaagtggacggg

SEQ ID NO: 165229 - DNA, 30 bp, Artificial Sequence
  Synthetic oligonucleotide
gaaaaatgcatgagtatatgtttatacggg

SEQ ID NO: 165230 - DNA, 30 bp, Artificial Sequence
  Synthetic oligonucleotide
agatcgtaagccgctaacggcgactacggg

SEQ ID NO: 165231 - DNA, 30 bp, Artificial Sequence
  Synthetic oligonucleotide
tggcgatcattgccagggcatcggtacggg

SEQ ID NO: 165232 - DNA, 30 bp, Artificial Sequence
  Synthetic oligonucleotide
gcattcctctgcaacctctggctgtacggg

SEQ ID NO: 165233 - DNA, 30 bp, Artificial Sequence
  Synthetic oligonucleotide
cgatttcgtggtaacggtcgttcaaccggg

SEQ ID NO: 165234 - DNA, 30 bp, Artificial Sequence
  Synthetic oligonucleotide
tttgggctgcagaagaatatcaagaccggg

SEQ ID NO: 165235 - DNA, 30 bp, Artificial Sequence
  Synthetic oligonucleotide
cggccaagcctagataaaccctagaccggg

SEQ ID NO: 165236 - DNA, 30 bp, Artificial Sequence
  Synthetic oligonucleotide
ggaacttaacgctatcaacaactacccggg

SEQ ID NO: 165237 - DNA, 30 bp, Artificial Sequence
  Synthetic oligonucleotide
tacggcgggagagcgaggttgttagccggg

SEQ ID NO: 165238 - DNA, 30 bp, Artificial Sequence
  Synthetic oligonucleotide
aacgttaggccgatgatgaccaacgccggg

SEQ ID NO: 165239 - DNA, 30 bp, Artificial Sequence
  Synthetic oligonucleotide
tgcgaaatattccataagacacaggccggg

SEQ ID NO: 165240 - DNA, 30 bp, Artificial Sequence
  Synthetic oligonucleotide
gacgacttccattttcctgtacgggccggg

SEQ ID NO: 165241 - DNA, 30 bp, Artificial Sequence
  Synthetic oligonucleotide
aaatacaggtgaagcgagtagctggccggg

SEQ ID NO: 165242 - DNA, 30 bp, Artificial Sequence
  Synthetic oligonucleotide
gattggtgagcattttacgtgactgccggg

SEQ ID NO: 165243 - DNA, 30 bp, Artificial Sequence
  Synthetic oligonucleotide
aggggattgccgacgggttaacaatccggg

SEQ ID NO: 165244 - DNA, 30 bp, Artificial Sequence
  Synthetic oligonucleotide
gggaaaacgctacccacgatacaatccggg

SEQ ID NO: 165245 - DNA, 30 bp, Artificial Sequence
  Synthetic oligonucleotide
tcggaccgggggtgatagatccgatccggg

SEQ ID NO: 165246 - DNA, 30 bp, Artificial Sequence
  Synthetic oligonucleotide
tgggtcagatagaatctggctggctccggg

SEQ ID NO: 165247 - DNA, 30 bp, Artificial Sequence
  Synthetic oligonucleotide
cgggtgaaatcggtcccgagctgctccggg

SEQ ID NO: 165248 - DNA, 30 bp, Artificial Sequence
  Synthetic oligonucleotide
tcgccattacgtgaagagcaggtctccggg

SEQ ID NO: 165249 - DNA, 30 bp, Artificial Sequence
  Synthetic oligonucleotide
agaaagggcccctcggagccgaggtccggg

SEQ ID NO: 165250 - DNA, 30 bp, Artificial Sequence
  Synthetic oligonucleotide
gtgtcagtaggagacgctttacattccggg

SEQ ID NO: 165251 - DNA, 30 bp, Artificial Sequence
  Synthetic oligonucleotide
aagttgttcttgctcaaagagcattccggg

SEQ ID NO: 165252 - DNA, 30 bp, Artificial Sequence
  Synthetic oligonucleotide
caagcgtgtaggcacttcgcggattccggg

SEQ ID NO: 165253 - DNA, 30 bp, Artificial Sequence
  Synthetic oligonucleotide
agttaatctacgtcaccccgttcgagcggg

SEQ ID NO: 165254 - DNA, 30 bp, Artificial Sequence
  Synthetic oligonucleotide
taagattctagtgcgtgttgacaccgcggg

SEQ ID NO: 165255 - DNA, 30 bp, Artificial Sequence
  Synthetic oligonucleotide
agggaaagctgataatggagcccgcgcggg

SEQ ID NO: 165256 - DNA, 30 bp, Artificial Sequence
  Synthetic oligonucleotide
atcaacggctatagttctaggggaggcggg

SEQ ID NO: 165257 - DNA, 30 bp, Artificial Sequence
  Synthetic oligonucleotide
ggtggcaccaacgtcattcacccgggcggg

SEQ ID NO: 165258 - DNA, 30 bp, Artificial Sequence
  Synthetic oligonucleotide
attcactgttgttagcgcgtaaatggcggg

SEQ ID NO: 165259 - DNA, 30 bp, Artificial Sequence
  Synthetic oligonucleotide
acaagaagtctccacaggagcagtggcggg

SEQ ID NO: 165260 - DNA, 30 bp, Artificial Sequence
  Synthetic oligonucleotide
aaggataaacaaggcaccaggtgtggcggg

SEQ ID NO: 165261 - DNA, 30 bp, Artificial Sequence
  Synthetic oligonucleotide
aacctcacggaacacgacagacttggcggg

SEQ ID NO: 165262 - DNA, 30 bp, Artificial Sequence
  Synthetic oligonucleotide
cggactgcctgcgtttagggctcatgcggg

SEQ ID NO: 165263 - DNA, 30 bp, Artificial Sequence
  Synthetic oligonucleotide
ggtatatagtttatagaagacctctgcggg

SEQ ID NO: 165264 - DNA, 30 bp, Artificial Sequence
  Synthetic oligonucleotide
taggggaccctccacttttttaaaatcggg

SEQ ID NO: 165265 - DNA, 30 bp, Artificial Sequence
  Synthetic oligonucleotide
acgtagttcccaggcttccttgtaatcggg

SEQ ID NO: 165266 - DNA, 30 bp, Artificial Sequence
  Synthetic oligonucleotide
caactcaggtgccgactcaccatcatcggg

SEQ ID NO: 165267 - DNA, 30 bp, Artificial Sequence
  Synthetic oligonucleotide
aaaggtcgtgcgcaaaaggacacgatcggg

SEQ ID NO: 165268 - DNA, 30 bp, Artificial Sequence
  Synthetic oligonucleotide
accgacatgccaggctcctccacgatcggg

SEQ ID NO: 165269 - DNA, 31 bp, Artificial Sequence
  Synthetic oligonucleotide
aaccaaaaccgctcagattcaatatatcggg

SEQ ID NO: 165270 - DNA, 30 bp, Artificial Sequence
  Synthetic oligonucleotide
gaatgtagcatggaacccatcgcactcggg

SEQ ID NO: 165271 - DNA, 30 bp, Artificial Sequence
  Synthetic oligonucleotide
taagagtcatgcctatgactagacgtcggg

SEQ ID NO: 165272 - DNA, 30 bp, Artificial Sequence
  Synthetic oligonucleotide
ctaaggtagtgccttgggccaagattcggg

SEQ ID NO: 165273 - DNA, 30 bp, Artificial Sequence
  Synthetic oligonucleotide
tggggcaggacgcacgaagagttattcggg

SEQ ID NO: 165274 - DNA, 30 bp, Artificial Sequence
  Synthetic oligonucleotide
ggcaagcgttcctagtcggcttacttcggg

SEQ ID NO: 165275 - DNA, 30 bp, Artificial Sequence
  Synthetic oligonucleotide
gattatgaggcgaatgtgttggtaaagggg

SEQ ID NO: 165276 - DNA, 30 bp, Artificial Sequence
  Synthetic oligonucleotide
ccgtgattggtggggagcatacggaagggg

SEQ ID NO: 165277 - DNA, 30 bp, Artificial Sequence
  Synthetic oligonucleotide
gagatgctggtacgagtttacattaagggg

SEQ ID NO: 165278 - DNA, 30 bp, Artificial Sequence
  Synthetic oligonucleotide
agactttgagtacaccaaccaacccagggg

SEQ ID NO: 165279 - DNA, 30 bp, Artificial Sequence
  Synthetic oligonucleotide
cagtagagcttgttccacgggctccagggg

SEQ ID NO: 165280 - DNA, 30 bp, Artificial Sequence
  Synthetic oligonucleotide
cgaggccaggcacaattcacggttcagggg

SEQ ID NO: 165281 - DNA, 30 bp, Artificial Sequence
  Synthetic oligonucleotide
tatttaagtaacaggagcattcaagagggg

SEQ ID NO: 165282 - DNA, 30 bp, Artificial Sequence
  Synthetic oligonucleotide
aagacacaaacgcattgagctcccgagggg

SEQ ID NO: 165283 - DNA, 30 bp, Artificial Sequence
  Synthetic oligonucleotide
caaggctcggctactcacgtctgcgagggg

SEQ ID NO: 165284 - DNA, 30 bp, Artificial Sequence
  Synthetic oligonucleotide
tgtggccatagcccgataacaattgagggg

SEQ ID NO: 165285 - DNA, 30 bp, Artificial Sequence
  Synthetic oligonucleotide
gtgacttttcaggaggtgatgaaatagggg

SEQ ID NO: 165286 - DNA, 30 bp, Artificial Sequence
  Synthetic oligonucleotide
cgtctagttaatattagtgaagaatagggg

SEQ ID NO: 165287 - DNA, 30 bp, Artificial Sequence
  Synthetic oligonucleotide
ggcccaaaagggtggcgttcatagtagggg

SEQ ID NO: 165288 - DNA, 30 bp, Artificial Sequence
  Synthetic oligonucleotide
tggaggaagggctcagatcgtgtgtagggg

SEQ ID NO: 165289 - DNA, 30 bp, Artificial Sequence
  Synthetic oligonucleotide
gacggacagggtcatctaatcacttagggg

SEQ ID NO: 165290 - DNA, 30 bp, Artificial Sequence
  Synthetic oligonucleotide
agactgggatatagtatatgaaagacgggg

SEQ ID NO: 165291 - DNA, 30 bp, Artificial Sequence
  Synthetic oligonucleotide
gcaacgactgcggtttgctccacaccgggg

SEQ ID NO: 165292 - DNA, 30 bp, Artificial Sequence
  Synthetic oligonucleotide
ggagctgcccttgctaggtatggaccgggg

SEQ ID NO: 165293 - DNA, 30 bp, Artificial Sequence
  Synthetic oligonucleotide
ctcgttccggatgttggtcggtgaccgggg

SEQ ID NO: 165294 - DNA, 30 bp, Artificial Sequence
  Synthetic oligonucleotide
gtaagtaagcttacggcactcgccccgggg

SEQ ID NO: 165295 - DNA, 30 bp, Artificial Sequence
  Synthetic oligonucleotide
gaggattcacaatcgttttgaaagccgggg

SEQ ID NO: 165296 - DNA, 30 bp, Artificial Sequence
  Synthetic oligonucleotide
aagattacaactaattatactatagcgggg

SEQ ID NO: 165297 - DNA, 31 bp, Artificial Sequence
  Synthetic oligonucleotide
aacctatcggtcgctccgtcggccggcgggg

SEQ ID NO: 165298 - DNA, 30 bp, Artificial Sequence
  Synthetic oligonucleotide
agtcatactgtggacttctgtctggcgggg

SEQ ID NO: 165299 - DNA, 30 bp, Artificial Sequence
  Synthetic oligonucleotide
gacctagcattaaaaggtccgtatgcgggg

SEQ ID NO: 165300 - DNA, 30 bp, Artificial Sequence
  Synthetic oligonucleotide
taacatccgacgtacgacgtggcatcgggg

SEQ ID NO: 165301 - DNA, 30 bp, Artificial Sequence
  Synthetic oligonucleotide
tagaacttgggtatggggtttcgatcgggg

SEQ ID NO: 165302 - DNA, 30 bp, Artificial Sequence
  Synthetic oligonucleotide
ctataataatttatgccagacggctcgggg

SEQ ID NO: 165303 - DNA, 30 bp, Artificial Sequence
  Synthetic oligonucleotide
ctactgaagggaaatcacccactctcgggg

SEQ ID NO: 165304 - DNA, 30 bp, Artificial Sequence
  Synthetic oligonucleotide
gccgacgccacctaataccaggggtcgggg

SEQ ID NO: 165305 - DNA, 30 bp, Artificial Sequence
  Synthetic oligonucleotide
ctaggcgtagtacttaggatatacaggggg

SEQ ID NO: 165306 - DNA, 30 bp, Artificial Sequence
  Synthetic oligonucleotide
tacgtgattacactgaaagaagcgaggggg

SEQ ID NO: 165307 - DNA, 30 bp, Artificial Sequence
  Synthetic oligonucleotide
ggccatctatcaatagtgggtaggaggggg

SEQ ID NO: 165308 - DNA, 30 bp, Artificial Sequence
  Synthetic oligonucleotide
aagaaaccctattctgttgaagggaggggg

SEQ ID NO: 165309 - DNA, 30 bp, Artificial Sequence
  Synthetic oligonucleotide
ctgaggggtgtgctctcaggcgggaggggg

SEQ ID NO: 165310 - DNA, 29 bp, Artificial Sequence
  Synthetic oligonucleotide
aggcgtgaatctttcaaatccataggggg

SEQ ID NO: 165311 - DNA, 30 bp, Artificial Sequence
  Synthetic oligonucleotide
agatctacttggcgcggttacactaggggg

SEQ ID NO: 165312 - DNA, 29 bp, Artificial Sequence
  Synthetic oligonucleotide
tatgaggatattagagtctaattaggggg

SEQ ID NO: 165313 - DNA, 30 bp, Artificial Sequence
  Synthetic oligonucleotide
acgcgtggtgatgtccccacccaacggggg

SEQ ID NO: 165314 - DNA, 30 bp, Artificial Sequence
  Synthetic oligonucleotide
gagacgatatttaatagcacactccggggg

SEQ ID NO: 165315 - DNA, 30 bp, Artificial Sequence
  Synthetic oligonucleotide
gtgagtaccatgtccatttaggagcggggg

SEQ ID NO: 165316 - DNA, 30 bp, Artificial Sequence
  Synthetic oligonucleotide
cgctttgcgtcatgtgcaagctatcggggg

SEQ ID NO: 165317 - DNA, 30 bp, Artificial Sequence
  Synthetic oligonucleotide
agtaataacttggcatactccactcggggg

SEQ ID NO: 165318 - DNA, 30 bp, Artificial Sequence
  Synthetic oligonucleotide
gcggattatttttagacgggacaagggggg

SEQ ID NO: 165319 - DNA, 30 bp, Artificial Sequence
  Synthetic oligonucleotide
gactggtgaggtttatcccaagtcgggggg

SEQ ID NO: 165320 - DNA, 30 bp, Artificial Sequence
  Synthetic oligonucleotide
cagcctaatctgggcagcgtaaatgggggg

SEQ ID NO: 165321 - DNA, 30 bp, Artificial Sequence
  Synthetic oligonucleotide
aactagtggggcgtacaaacccgtgggggg

SEQ ID NO: 165322 - DNA, 30 bp, Artificial Sequence
  Synthetic oligonucleotide
ggaccaggtaccaaatcattatttgggggg

SEQ ID NO: 165323 - DNA, 30 bp, Artificial Sequence
  Synthetic oligonucleotide
tgcacttatccttacactggcccatggggg

SEQ ID NO: 165324 - DNA, 30 bp, Artificial Sequence
  Synthetic oligonucleotide
acaggtttaccgtgagccattttatggggg

SEQ ID NO: 165325 - DNA, 30 bp, Artificial Sequence
  Synthetic oligonucleotide
cacaacgagtccgtaaccgtcaactggggg

SEQ ID NO: 165326 - DNA, 30 bp, Artificial Sequence
  Synthetic oligonucleotide
tcagaggcctacgaacagcttccctggggg

SEQ ID NO: 165327 - DNA, 30 bp, Artificial Sequence
  Synthetic oligonucleotide
cccctgggcggaaataatccttagatgggg

SEQ ID NO: 165328 - DNA, 30 bp, Artificial Sequence
  Synthetic oligonucleotide
atattcaaaccaactgaacttaggatgggg

SEQ ID NO: 165329 - DNA, 30 bp, Artificial Sequence
  Synthetic oligonucleotide
ataccgagatcctaggtcattcctatgggg

SEQ ID NO: 165330 - DNA, 30 bp, Artificial Sequence
  Synthetic oligonucleotide
ccgaaaacctttggcactgagtgtatgggg

SEQ ID NO: 165331 - DNA, 30 bp, Artificial Sequence
  Synthetic oligonucleotide
cggggtgttctattgagaaacgttatgggg

SEQ ID NO: 165332 - DNA, 30 bp, Artificial Sequence
  Synthetic oligonucleotide
accttgaacaccatacgctgatcactgggg

SEQ ID NO: 165333 - DNA, 30 bp, Artificial Sequence
  Synthetic oligonucleotide
ctaagagcaagcgccaagaggcggctgggg

SEQ ID NO: 165334 - DNA, 30 bp, Artificial Sequence
  Synthetic oligonucleotide
ccatcgatagtgcggaccaaggtgctgggg

SEQ ID NO: 165335 - DNA, 30 bp, Artificial Sequence
  Synthetic oligonucleotide
agtaactgctgtcaagaggtggatctgggg

SEQ ID NO: 165336 - DNA, 30 bp, Artificial Sequence
  Synthetic oligonucleotide
aattaccagctgtcacactcgggagtgggg

SEQ ID NO: 165337 - DNA, 30 bp, Artificial Sequence
  Synthetic oligonucleotide
aaggtttgcggcggaggcttggtcgtgggg

SEQ ID NO: 165338 - DNA, 30 bp, Artificial Sequence
  Synthetic oligonucleotide
ccgatttagggcctttcagtttaggtgggg

SEQ ID NO: 165339 - DNA, 30 bp, Artificial Sequence
  Synthetic oligonucleotide
acgttggtggacaagtaatcccggttgggg

SEQ ID NO: 165340 - DNA, 30 bp, Artificial Sequence
  Synthetic oligonucleotide
aaggtaagtctatactcggggtgtttgggg

SEQ ID NO: 165341 - DNA, 30 bp, Artificial Sequence
  Synthetic oligonucleotide
cgaaagtgcctacgcgatgcaggaaatggg

SEQ ID NO: 165342 - DNA, 30 bp, Artificial Sequence
  Synthetic oligonucleotide
acgaatgacaatagcgttcggtgaaatggg

SEQ ID NO: 165343 - DNA, 30 bp, Artificial Sequence
  Synthetic oligonucleotide
gatgaaacatttgatttgccgcccaatggg

SEQ ID NO: 165344 - DNA, 30 bp, Artificial Sequence
  Synthetic oligonucleotide
tcatattgaataacacgatggactaatggg

SEQ ID NO: 165345 - DNA, 30 bp, Artificial Sequence
  Synthetic oligonucleotide
tacaataaaattaaataactggaacatggg

SEQ ID NO: 165346 - DNA, 30 bp, Artificial Sequence
  Synthetic oligonucleotide
tgacgtacgcgcagtagaaaaccagatggg

SEQ ID NO: 165347 - DNA, 30 bp, Artificial Sequence
  Synthetic oligonucleotide
gtcaataattcgttcgcatagcaggatggg

SEQ ID NO: 165348 - DNA, 30 bp, Artificial Sequence
  Synthetic oligonucleotide
ggtaatcagtgtaaatatggcacggatggg

SEQ ID NO: 165349 - DNA, 30 bp, Artificial Sequence
  Synthetic oligonucleotide
tgcttagtctggtcagtaccgccatatggg

SEQ ID NO: 165350 - DNA, 30 bp, Artificial Sequence
  Synthetic oligonucleotide
cttatcgttactccgcaatgaatatatggg

SEQ ID NO: 165351 - DNA, 30 bp, Artificial Sequence
  Synthetic oligonucleotide
atcgtaaacaatacaaacaacctatatggg

SEQ ID NO: 165352 - DNA, 30 bp, Artificial Sequence
  Synthetic oligonucleotide
taaagatctgtttagatgcaatagtatggg

SEQ ID NO: 165353 - DNA, 30 bp, Artificial Sequence
  Synthetic oligonucleotide
tactcggttgaaatgactggaaggtatggg

SEQ ID NO: 165354 - DNA, 30 bp, Artificial Sequence
  Synthetic oligonucleotide
acgactggcgtataagcgacactgtatggg

SEQ ID NO: 165355 - DNA, 30 bp, Artificial Sequence
  Synthetic oligonucleotide
tagagaggagtcagcgctctctattatggg

SEQ ID NO: 165356 - DNA, 30 bp, Artificial Sequence
  Synthetic oligonucleotide
cgtcccagggaattaaaaactgcttatggg

SEQ ID NO: 165357 - DNA, 30 bp, Artificial Sequence
  Synthetic oligonucleotide
cgcaggccacataacttatagaatactggg

SEQ ID NO: 165358 - DNA, 30 bp, Artificial Sequence
  Synthetic oligonucleotide
tgtataacattatagacactctatactggg

SEQ ID NO: 165359 - DNA, 30 bp, Artificial Sequence
  Synthetic oligonucleotide
gtgcaactggactggagagcgaaccctggg

SEQ ID NO: 165360 - DNA, 30 bp, Artificial Sequence
  Synthetic oligonucleotide
gaactcacgcactagtggtaagaccctggg

SEQ ID NO: 165361 - DNA, 30 bp, Artificial Sequence
  Synthetic oligonucleotide
aggaagtttccctcacttcctacccctggg

SEQ ID NO: 165362 - DNA, 30 bp, Artificial Sequence
  Synthetic oligonucleotide
cgccaagttaagggcgtctgacagcctggg

SEQ ID NO: 165363 - DNA, 30 bp, Artificial Sequence
  Synthetic oligonucleotide
caacttgctgctggtctacctactcctggg

SEQ ID NO: 165364 - DNA, 30 bp, Artificial Sequence
  Synthetic oligonucleotide
agcagtcgaactttaagaatcaaggctggg

SEQ ID NO: 165365 - DNA, 30 bp, Artificial Sequence
  Synthetic oligonucleotide
ctacgattgaagaacgctgggggtgctggg

SEQ ID NO: 165366 - DNA, 30 bp, Artificial Sequence
  Synthetic oligonucleotide
ggggtcataaatacccgcgtggaatctggg

SEQ ID NO: 165367 - DNA, 29 bp, Artificial Sequence
  Synthetic oligonucleotide
ctttctgcgtcaaatttaccccatctggg

SEQ ID NO: 165368 - DNA, 30 bp, Artificial Sequence
  Synthetic oligonucleotide
acacgccagcggcaaggccaatcatctggg

SEQ ID NO: 165369 - DNA, 30 bp, Artificial Sequence
  Synthetic oligonucleotide
acagggagggtgtgcagttatcactctggg

SEQ ID NO: 165370 - DNA, 30 bp, Artificial Sequence
  Synthetic oligonucleotide
aggagtccgtcggattagggagattctggg

SEQ ID NO: 165371 - DNA, 30 bp, Artificial Sequence
  Synthetic oligonucleotide
tacctaaaatcggaatctcgaacaagtggg

SEQ ID NO: 165372 - DNA, 30 bp, Artificial Sequence
  Synthetic oligonucleotide
aatcacaacctcgcccagacccacagtggg

SEQ ID NO: 165373 - DNA, 30 bp, Artificial Sequence
  Synthetic oligonucleotide
agattaaaccgtgcaagagactgccgtggg

SEQ ID NO: 165374 - DNA, 30 bp, Artificial Sequence
  Synthetic oligonucleotide
gccaggcccgacacgggaatggtccgtggg

SEQ ID NO: 165375 - DNA, 30 bp, Artificial Sequence
  Synthetic oligonucleotide
tatccaaattcgcgacttgtcttccgtggg

SEQ ID NO: 165376 - DNA, 30 bp, Artificial Sequence
  Synthetic oligonucleotide
actggtagggtacagatgcttgctcgtggg

SEQ ID NO: 165377 - DNA, 30 bp, Artificial Sequence
  Synthetic oligonucleotide
tataagcgaaccatttaaggtagaggtggg

SEQ ID NO: 165378 - DNA, 30 bp, Artificial Sequence
  Synthetic oligonucleotide
gggtacgggggaggcgttgaatgcggtggg

SEQ ID NO: 165379 - DNA, 30 bp, Artificial Sequence
  Synthetic oligonucleotide
ctcagcggggacactgggtgcactggtggg

SEQ ID NO: 165380 - DNA, 30 bp, Artificial Sequence
  Synthetic oligonucleotide
ttcacctgtgcaagacacgaaggtggtggg

SEQ ID NO: 165381 - DNA, 30 bp, Artificial Sequence
  Synthetic oligonucleotide
atgacaaggaacgatccctgacgctgtggg

SEQ ID NO: 165382 - DNA, 30 bp, Artificial Sequence
  Synthetic oligonucleotide
cgggtttaggttacagtgttaacgtgtggg

SEQ ID NO: 165383 - DNA, 30 bp, Artificial Sequence
  Synthetic oligonucleotide
gggctacatagggcgaacggaccgtgtggg

SEQ ID NO: 165384 - DNA, 30 bp, Artificial Sequence
  Synthetic oligonucleotide
ggacacagtttaaaagttaggtcaattggg

SEQ ID NO: 165385 - DNA, 30 bp, Artificial Sequence
  Synthetic oligonucleotide
gctcgcgggaggatcaagtgtatcattggg

SEQ ID NO: 165386 - DNA, 30 bp, Artificial Sequence
  Synthetic oligonucleotide
tcccaactctgtccggcgagccggattggg

SEQ ID NO: 165387 - DNA, 30 bp, Artificial Sequence
  Synthetic oligonucleotide
ggaaaaaaaccgctcgccatagagcttggg

SEQ ID NO: 165388 - DNA, 30 bp, Artificial Sequence
  Synthetic oligonucleotide
agggttccgagagtagtaagtctagttggg

SEQ ID NO: 165389 - DNA, 30 bp, Artificial Sequence
  Synthetic oligonucleotide
tccgaaggctagcatatctatcccgttggg

SEQ ID NO: 165390 - DNA, 30 bp, Artificial Sequence
  Synthetic oligonucleotide
aaggatacttaagctggatacaaggttggg

SEQ ID NO: 165391 - DNA, 30 bp, Artificial Sequence
  Synthetic oligonucleotide
tttgtgtaggtttactcatctactgttggg

SEQ ID NO: 165392 - DNA, 30 bp, Artificial Sequence
  Synthetic oligonucleotide
gccaccataaatgctacaaaacgtgttggg

SEQ ID NO: 165393 - DNA, 30 bp, Artificial Sequence
  Synthetic oligonucleotide
gccaacgcaagagggtgttactcatttggg

SEQ ID NO: 165394 - DNA, 30 bp, Artificial Sequence
  Synthetic oligonucleotide
tgcgaggagaggctagctatgatcaaatgg

SEQ ID NO: 165395 - DNA, 30 bp, Artificial Sequence
  Synthetic oligonucleotide
cgcacgaatgagattctaagtaataaatgg

SEQ ID NO: 165396 - DNA, 30 bp, Artificial Sequence
  Synthetic oligonucleotide
gtggattcagaggtacaaattgataaatgg

SEQ ID NO: 165397 - DNA, 30 bp, Artificial Sequence
  Synthetic oligonucleotide
tccgcagggtcaatcataagtcttaaatgg

SEQ ID NO: 165398 - DNA, 30 bp, Artificial Sequence
  Synthetic oligonucleotide
taatcactaagaccttcgtcctaacaatgg

SEQ ID NO: 165399 - DNA, 30 bp, Artificial Sequence
  Synthetic oligonucleotide
tcgttgttctgttggtgaatttaacaatgg

SEQ ID NO: 165400 - DNA, 30 bp, Artificial Sequence
  Synthetic oligonucleotide
ccgacactaaacatacgatgattacaatgg

SEQ ID NO: 165401 - DNA, 30 bp, Artificial Sequence
  Synthetic oligonucleotide
tcaaggcttgcaggtgattcatgccaatgg

SEQ ID NO: 165402 - DNA, 30 bp, Artificial Sequence
  Synthetic oligonucleotide
caatgcgcccttacatcgtccgatcaatgg

SEQ ID NO: 165403 - DNA, 30 bp, Artificial Sequence
  Synthetic oligonucleotide
tacgccccctagagcgctctgtaggaatgg

SEQ ID NO: 165404 - DNA, 30 bp, Artificial Sequence
  Synthetic oligonucleotide
ttacaacaggtttcgcctacgaatgaatgg

SEQ ID NO: 165405 - DNA, 30 bp, Artificial Sequence
  Synthetic oligonucleotide
cgtgataccacgtgtttcctgccgtaatgg

SEQ ID NO: 165406 - DNA, 30 bp, Artificial Sequence
  Synthetic oligonucleotide
gagctgagtgaacgtcaatgggattaatgg

SEQ ID NO: 165407 - DNA, 30 bp, Artificial Sequence
  Synthetic oligonucleotide
acgtataaacctggactggtcgaaacatgg

SEQ ID NO: 165408 - DNA, 30 bp, Artificial Sequence
  Synthetic oligonucleotide
cgacatgtaccgagaactataccaacatgg

SEQ ID NO: 165409 - DNA, 30 bp, Artificial Sequence
  Synthetic oligonucleotide
ccaattgtggtaattagtcatggaacatgg

SEQ ID NO: 165410 - DNA, 30 bp, Artificial Sequence
  Synthetic oligonucleotide
tagtcatgggcagtctggaagcggacatgg

SEQ ID NO: 165411 - DNA, 30 bp, Artificial Sequence
  Synthetic oligonucleotide
gaaaaaagtaggccctgggaaagaccatgg

SEQ ID NO: 165412 - DNA, 30 bp, Artificial Sequence
  Synthetic oligonucleotide
ggaagatatatgtacttgtgactaccatgg

SEQ ID NO: 165413 - DNA, 30 bp, Artificial Sequence
  Synthetic oligonucleotide
ttgaggagcatacaacgggagtccccatgg

SEQ ID NO: 165414 - DNA, 30 bp, Artificial Sequence
  Synthetic oligonucleotide
taggatgaatacgtcgagggagggccatgg

SEQ ID NO: 165415 - DNA, 30 bp, Artificial Sequence
  Synthetic oligonucleotide
agatatgggctggtagcaagcgtagcatgg

SEQ ID NO: 165416 - DNA, 30 bp, Artificial Sequence
  Synthetic oligonucleotide
aaacgaaggtataggtatcgtttggcatgg

SEQ ID NO: 165417 - DNA, 30 bp, Artificial Sequence
  Synthetic oligonucleotide
tcatagggtgtttatcagttaaaatcatgg

SEQ ID NO: 165418 - DNA, 30 bp, Artificial Sequence
  Synthetic oligonucleotide
ggaatacgctctggtgttcctagatcatgg

SEQ ID NO: 165419 - DNA, 30 bp, Artificial Sequence
  Synthetic oligonucleotide
cctcacgctacaactccgtacatctcatgg

SEQ ID NO: 165420 - DNA, 30 bp, Artificial Sequence
  Synthetic oligonucleotide
agatgtacgacctcagaaggggagtcatgg

SEQ ID NO: 165421 - DNA, 30 bp, Artificial Sequence
  Synthetic oligonucleotide
atcattgtgggtcagctaatgggttcatgg

SEQ ID NO: 165422 - DNA, 30 bp, Artificial Sequence
  Synthetic oligonucleotide
tgctgtgaattaaaggtcaattgaagatgg

SEQ ID NO: 165423 - DNA, 30 bp, Artificial Sequence
  Synthetic oligonucleotide
gttcaactgatgaggcggatagacagatgg

SEQ ID NO: 165424 - DNA, 30 bp, Artificial Sequence
  Synthetic oligonucleotide
taatctgataactcccagtgcgtgagatgg

SEQ ID NO: 165425 - DNA, 30 bp, Artificial Sequence
  Synthetic oligonucleotide
aaacagggaacattcggtaatagacgatgg

SEQ ID NO: 165426 - DNA, 30 bp, Artificial Sequence
  Synthetic oligonucleotide
atagtcaactgcaaggcgcgtagacgatgg

SEQ ID NO: 165427 - DNA, 30 bp, Artificial Sequence
  Synthetic oligonucleotide
tacgactcagtttgcttagaatcccgatgg

SEQ ID NO: 165428 - DNA, 30 bp, Artificial Sequence
  Synthetic oligonucleotide
ccaacgtattaccagtccagctagcgatgg

SEQ ID NO: 165429 - DNA, 30 bp, Artificial Sequence
  Synthetic oligonucleotide
aggtaagggccagacgcacatataggatgg

SEQ ID NO: 165430 - DNA, 30 bp, Artificial Sequence
  Synthetic oligonucleotide
tatccattaggcatgagtttgttaggatgg

SEQ ID NO: 165431 - DNA, 30 bp, Artificial Sequence
  Synthetic oligonucleotide
caaaaatgtggtacagcgtttaggggatgg

SEQ ID NO: 165432 - DNA, 30 bp, Artificial Sequence
  Synthetic oligonucleotide
cgaatatgggttttgcccccgaaatgatgg

SEQ ID NO: 165433 - DNA, 30 bp, Artificial Sequence
  Synthetic oligonucleotide
gggcacgtaggagagcagctcagatgatgg

SEQ ID NO: 165434 - DNA, 30 bp, Artificial Sequence
  Synthetic oligonucleotide
taatcgcacggcaacgtgtaaggatgatgg

SEQ ID NO: 165435 - DNA, 30 bp, Artificial Sequence
  Synthetic oligonucleotide
ggacaactggttagcaggtgcgtatgatgg

SEQ ID NO: 165436 - DNA, 30 bp, Artificial Sequence
  Synthetic oligonucleotide
tttaagcggagggaggtaagaccctgatgg

SEQ ID NO: 165437 - DNA, 30 bp, Artificial Sequence
  Synthetic oligonucleotide
cacggtacaatataggtagtctgctgatgg

SEQ ID NO: 165438 - DNA, 30 bp, Artificial Sequence
  Synthetic oligonucleotide
caattgtgaacaaatggatcaaggtgatgg

SEQ ID NO: 165439 - DNA, 30 bp, Artificial Sequence
  Synthetic oligonucleotide
cctaaaaagagtctggtcggggcaatatgg

SEQ ID NO: 165440 - DNA, 30 bp, Artificial Sequence
  Synthetic oligonucleotide
accgaagcacacgagtgattgggaatatgg

SEQ ID NO: 165441 - DNA, 30 bp, Artificial Sequence
  Synthetic oligonucleotide
gaatcggtttagcttgagagtactatatgg

SEQ ID NO: 165442 - DNA, 30 bp, Artificial Sequence
  Synthetic oligonucleotide
ctgggctcaggtcctagtgtagttatatgg

SEQ ID NO: 165443 - DNA, 30 bp, Artificial Sequence
  Synthetic oligonucleotide
taacaaatcggaaatggatgcgcactatgg

SEQ ID NO: 165444 - DNA, 30 bp, Artificial Sequence
  Synthetic oligonucleotide
atcatttgaggggggtctatgtcactatgg

SEQ ID NO: 165445 - DNA, 30 bp, Artificial Sequence
  Synthetic oligonucleotide
taccgtaaataaagaaacttccgagtatgg

SEQ ID NO: 165446 - DNA, 30 bp, Artificial Sequence
  Synthetic oligonucleotide
atgagttaaagcaaaagtcggaacgtatgg

SEQ ID NO: 165447 - DNA, 30 bp, Artificial Sequence
  Synthetic oligonucleotide
cgcgagtgagagaacaccaggttcgtatgg

SEQ ID NO: 165448 - DNA, 30 bp, Artificial Sequence
  Synthetic oligonucleotide
ggtatggaaaccaggagtctataggtatgg

SEQ ID NO: 165449 - DNA, 30 bp, Artificial Sequence
  Synthetic oligonucleotide
cgggtcggaagtgttaccgttttggtatgg

SEQ ID NO: 165450 - DNA, 30 bp, Artificial Sequence
  Synthetic oligonucleotide
tgaacaaactatgtatagagtattgtatgg

SEQ ID NO: 165451 - DNA, 30 bp, Artificial Sequence
  Synthetic oligonucleotide
gggattttccgaatggagagtagattatgg

SEQ ID NO: 165452 - DNA, 30 bp, Artificial Sequence
  Synthetic oligonucleotide
caagtgttgcgttgaaatcattccttatgg

SEQ ID NO: 165453 - DNA, 30 bp, Artificial Sequence
  Synthetic oligonucleotide
cgggtagccgtcggttccgagaagttatgg

SEQ ID NO: 165454 - DNA, 30 bp, Artificial Sequence
  Synthetic oligonucleotide
tataagtctgtgtaacggaccacgttatgg

SEQ ID NO: 165455 - DNA, 30 bp, Artificial Sequence
  Synthetic oligonucleotide
cgacacatgtgctggtgatatttcaactgg

SEQ ID NO: 165456 - DNA, 30 bp, Artificial Sequence
  Synthetic oligonucleotide
ctcgtgtccattcctgtctctcataactgg

SEQ ID NO: 165457 - DNA, 30 bp, Artificial Sequence
  Synthetic oligonucleotide
ccaatagtttttgagtcagtgaaccactgg

SEQ ID NO: 165458 - DNA, 30 bp, Artificial Sequence
  Synthetic oligonucleotide
gactcgctgtaaactctgcaatcgcactgg

SEQ ID NO: 165459 - DNA, 30 bp, Artificial Sequence
  Synthetic oligonucleotide
ctccactacttttccctgccctggcactgg

SEQ ID NO: 165460 - DNA, 30 bp, Artificial Sequence
  Synthetic oligonucleotide
gtgtaacggtcattttatctataggactgg

SEQ ID NO: 165461 - DNA, 30 bp, Artificial Sequence
  Synthetic oligonucleotide
actcctggttggcttcgggacaatgactgg

SEQ ID NO: 165462 - DNA, 30 bp, Artificial Sequence
  Synthetic oligonucleotide
gggttccgcaaaccgatagcataatactgg

SEQ ID NO: 165463 - DNA, 30 bp, Artificial Sequence
  Synthetic oligonucleotide
cgggcagagcatactctggtactttactgg

SEQ ID NO: 165464 - DNA, 30 bp, Artificial Sequence
  Synthetic oligonucleotide
ggttgaagtgatgctgtgtacacaacctgg

SEQ ID NO: 165465 - DNA, 30 bp, Artificial Sequence
  Synthetic oligonucleotide
atggagtaaggactgactgtcacgacctgg

SEQ ID NO: 165466 - DNA, 30 bp, Artificial Sequence
  Synthetic oligonucleotide
gtccaagacttacgcgaattgaggacctgg

SEQ ID NO: 165467 - DNA, 30 bp, Artificial Sequence
  Synthetic oligonucleotide
atctggttcagggaagggaaagttccctgg

SEQ ID NO: 165468 - DNA, 30 bp, Artificial Sequence
  Synthetic oligonucleotide
cgattattccgttgggcttgcaacgcctgg

SEQ ID NO: 165469 - DNA, 30 bp, Artificial Sequence
  Synthetic oligonucleotide
cgtaaactctacggacgcgaactcgcctgg

SEQ ID NO: 165470 - DNA, 30 bp, Artificial Sequence
  Synthetic oligonucleotide
tcccggagcggatagggtaagttatcctgg

SEQ ID NO: 165471 - DNA, 30 bp, Artificial Sequence
  Synthetic oligonucleotide
attgaaaggtgcctgtcatactcctcctgg

SEQ ID NO: 165472 - DNA, 30 bp, Artificial Sequence
  Synthetic oligonucleotide
cgtgttacttgatcccgtcaacattcctgg

SEQ ID NO: 165473 - DNA, 30 bp, Artificial Sequence
  Synthetic oligonucleotide
aaggcttcatgatgtcgtgatgattcctgg

SEQ ID NO: 165474 - DNA, 30 bp, Artificial Sequence
  Synthetic oligonucleotide
gtgcttcgatggctccactttaaaggctgg

SEQ ID NO: 165475 - DNA, 30 bp, Artificial Sequence
  Synthetic oligonucleotide
taaggccaatgaatattgttctacggctgg

SEQ ID NO: 165476 - DNA, 30 bp, Artificial Sequence
  Synthetic oligonucleotide
aaactaaagtacggacgaaaacggggctgg

SEQ ID NO: 165477 - DNA, 30 bp, Artificial Sequence
  Synthetic oligonucleotide
aatccaggacgtgaaaacaagccgtgctgg

SEQ ID NO: 165478 - DNA, 30 bp, Artificial Sequence
  Synthetic oligonucleotide
cacatttggatggattatcgtccgtgctgg

SEQ ID NO: 165479 - DNA, 30 bp, Artificial Sequence
  Synthetic oligonucleotide
taaactaagtccgagggcagggcgtgctgg

SEQ ID NO: 165480 - DNA, 30 bp, Artificial Sequence
  Synthetic oligonucleotide
agacgtctaggccgctctgaactgtgctgg

SEQ ID NO: 165481 - DNA, 30 bp, Artificial Sequence
  Synthetic oligonucleotide
atcggcgttcgcggaagactcgattgctgg

SEQ ID NO: 165482 - DNA, 30 bp, Artificial Sequence
  Synthetic oligonucleotide
agagcatgcggaatttgctgctaaatctgg

SEQ ID NO: 165483 - DNA, 30 bp, Artificial Sequence
  Synthetic oligonucleotide
tgacatttcagaacattgccacgcatctgg

SEQ ID NO: 165484 - DNA, 30 bp, Artificial Sequence
  Synthetic oligonucleotide
atcagcggggtaacgatcaccaacctctgg

SEQ ID NO: 165485 - DNA, 30 bp, Artificial Sequence
  Synthetic oligonucleotide
taaaagggaaggaagttcgcccacctctgg

SEQ ID NO: 165486 - DNA, 30 bp, Artificial Sequence
  Synthetic oligonucleotide
gagccaacccatgttgagctagctctctgg

SEQ ID NO: 165487 - DNA, 30 bp, Artificial Sequence
  Synthetic oligonucleotide
cgcgactacatgctaagcaaattcgtctgg

SEQ ID NO: 165488 - DNA, 30 bp, Artificial Sequence
  Synthetic oligonucleotide
aggattgttcaatcaggggtacgggtctgg

SEQ ID NO: 165489 - DNA, 30 bp, Artificial Sequence
  Synthetic oligonucleotide
tcaatgttcttaccacgtgcatgcttctgg

SEQ ID NO: 165490 - DNA, 30 bp, Artificial Sequence
  Synthetic oligonucleotide
aatttacgcagggtgcgcggccaaaagtgg

SEQ ID NO: 165491 - DNA, 30 bp, Artificial Sequence
  Synthetic oligonucleotide
gttaagttaggctcagaggacaacaagtgg

SEQ ID NO: 165492 - DNA, 30 bp, Artificial Sequence
  Synthetic oligonucleotide
ccgtacacgtcaggaaacgcccacaagtgg

SEQ ID NO: 165493 - DNA, 30 bp, Artificial Sequence
  Synthetic oligonucleotide
acctccaaagcccgactgacggacaagtgg

SEQ ID NO: 165494 - DNA, 30 bp, Artificial Sequence
  Synthetic oligonucleotide
ttataacgaatttactgctacaccaagtgg

SEQ ID NO: 165495 - DNA, 30 bp, Artificial Sequence
  Synthetic oligonucleotide
ttctatccacatgcatcggatcccaagtgg

SEQ ID NO: 165496 - DNA, 30 bp, Artificial Sequence
  Synthetic oligonucleotide
gacagtaagctttggaaatctttcaagtgg

SEQ ID NO: 165497 - DNA, 30 bp, Artificial Sequence
  Synthetic oligonucleotide
cgacgtccacctgacctgccagagaagtgg

SEQ ID NO: 165498 - DNA, 30 bp, Artificial Sequence
  Synthetic oligonucleotide
gtgctaagaacgatacgagtatcgaagtgg

SEQ ID NO: 165499 - DNA, 30 bp, Artificial Sequence
  Synthetic oligonucleotide
agtaacttgttcattaggcagtgacagtgg

SEQ ID NO: 165500 - DNA, 30 bp, Artificial Sequence
  Synthetic oligonucleotide
taaaacacgctgagagatgttatacagtgg

SEQ ID NO: 165501 - DNA, 30 bp, Artificial Sequence
  Synthetic oligonucleotide
ggtcccgctatcccggagtcgttacagtgg

SEQ ID NO: 165502 - DNA, 30 bp, Artificial Sequence
  Synthetic oligonucleotide
taggaaacggtcaagtgttcggcccagtgg

SEQ ID NO: 165503 - DNA, 30 bp, Artificial Sequence
  Synthetic oligonucleotide
tgacaaactttaagctcatacgtccagtgg

SEQ ID NO: 165504 - DNA, 30 bp, Artificial Sequence
  Synthetic oligonucleotide
caagcctcgcatcattgacggaaagagtgg

SEQ ID NO: 165505 - DNA, 30 bp, Artificial Sequence
  Synthetic oligonucleotide
ttggcattccggcgaccggttcaagagtgg

SEQ ID NO: 165506 - DNA, 30 bp, Artificial Sequence
  Synthetic oligonucleotide
gtaaacgccgggtaagaccaggtagagtgg

SEQ ID NO: 165507 - DNA, 30 bp, Artificial Sequence
  Synthetic oligonucleotide
gactagtttgtcaactaccacgacgagtgg

SEQ ID NO: 165508 - DNA, 30 bp, Artificial Sequence
  Synthetic oligonucleotide
aatactgtactaaatgagcacacggagtgg

SEQ ID NO: 165509 - DNA, 30 bp, Artificial Sequence
  Synthetic oligonucleotide
ttgggtttattcgcaagggagactgagtgg

SEQ ID NO: 165510 - DNA, 30 bp, Artificial Sequence
  Synthetic oligonucleotide
ataataggccttgtgccgcgacttgagtgg

SEQ ID NO: 165511 - DNA, 30 bp, Artificial Sequence
  Synthetic oligonucleotide
ttgaaagagatcagcttcgcaaggtagtgg

SEQ ID NO: 165512 - DNA, 30 bp, Artificial Sequence
  Synthetic oligonucleotide
ctagactacctagctaattgactttagtgg

SEQ ID NO: 165513 - DNA, 30 bp, Artificial Sequence
  Synthetic oligonucleotide
gctgttgcacgaggagagttgtgaacgtgg

SEQ ID NO: 165514 - DNA, 30 bp, Artificial Sequence
  Synthetic oligonucleotide
cgatcgatcgacggtaattgagatacgtgg

SEQ ID NO: 165515 - DNA, 30 bp, Artificial Sequence
  Synthetic oligonucleotide
cacccgcgttggtggccggatggtacgtgg

SEQ ID NO: 165516 - DNA, 30 bp, Artificial Sequence
  Synthetic oligonucleotide
atagttcgcataaggtaaacattcccgtgg

SEQ ID NO: 165517 - DNA, 30 bp, Artificial Sequence
  Synthetic oligonucleotide
gaggcgtggagggacaaccccacgccgtgg

SEQ ID NO: 165518 - DNA, 30 bp, Artificial Sequence
  Synthetic oligonucleotide
acctggcagggagggtcaggaggagcgtgg

SEQ ID NO: 165519 - DNA, 30 bp, Artificial Sequence
  Synthetic oligonucleotide
gggaaatatgtgggccatacggaggcgtgg

SEQ ID NO: 165520 - DNA, 30 bp, Artificial Sequence
  Synthetic oligonucleotide
gagattcaatccctccacacggcatcgtgg

SEQ ID NO: 165521 - DNA, 30 bp, Artificial Sequence
  Synthetic oligonucleotide
acctatacccgtctccactggatatcgtgg

SEQ ID NO: 165522 - DNA, 30 bp, Artificial Sequence
  Synthetic oligonucleotide
caaaattgtaagtcatttaaagcaaggtgg

SEQ ID NO: 165523 - DNA, 30 bp, Artificial Sequence
  Synthetic oligonucleotide
cgagtcgcacggtgaaagatgagcaggtgg

SEQ ID NO: 165524 - DNA, 30 bp, Artificial Sequence
  Synthetic oligonucleotide
ttagagtgcgccgcattatgactcaggtgg

SEQ ID NO: 165525 - DNA, 30 bp, Artificial Sequence
  Synthetic oligonucleotide
ttgagtcagcggtgttgtagtgcgaggtgg

SEQ ID NO: 165526 - DNA, 30 bp, Artificial Sequence
  Synthetic oligonucleotide
attttaaacagacaagtaatccggaggtgg

SEQ ID NO: 165527 - DNA, 30 bp, Artificial Sequence
  Synthetic oligonucleotide
ttctatacgacaacccgtattgggaggtgg

SEQ ID NO: 165528 - DNA, 30 bp, Artificial Sequence
  Synthetic oligonucleotide
aaggttaaaagggagacgcctttgaggtgg

SEQ ID NO: 165529 - DNA, 30 bp, Artificial Sequence
  Synthetic oligonucleotide
tgcccatacgtcagtccgggagctaggtgg

SEQ ID NO: 165530 - DNA, 30 bp, Artificial Sequence
  Synthetic oligonucleotide
gtgtaaatatctcgggttctgtgtaggtgg

SEQ ID NO: 165531 - DNA, 30 bp, Artificial Sequence
  Synthetic oligonucleotide
taaacacaaaattggactgacaaacggtgg

SEQ ID NO: 165532 - DNA, 30 bp, Artificial Sequence
  Synthetic oligonucleotide
ttggggcgacatactgagggagttcggtgg

SEQ ID NO: 165533 - DNA, 30 bp, Artificial Sequence
  Synthetic oligonucleotide
cacgtgctttaattagccgatttagggtgg

SEQ ID NO: 165534 - DNA, 30 bp, Artificial Sequence
  Synthetic oligonucleotide
cactatctgaaagcataatatatcgggtgg

SEQ ID NO: 165535 - DNA, 30 bp, Artificial Sequence
  Synthetic oligonucleotide
ctcaaataaatggtaggaccagaatggtgg

SEQ ID NO: 165536 - DNA, 30 bp, Artificial Sequence
  Synthetic oligonucleotide
accgaacacgcggcgattcgtatgtggtgg

SEQ ID NO: 165537 - DNA, 30 bp, Artificial Sequence
  Synthetic oligonucleotide
atctgtgataagccgcaaatatcttggtgg

SEQ ID NO: 165538 - DNA, 30 bp, Artificial Sequence
  Synthetic oligonucleotide
aacatgagaagtgcactgcaaggaatgtgg

SEQ ID NO: 165539 - DNA, 30 bp, Artificial Sequence
  Synthetic oligonucleotide
gcaagtggtagcggtgttgagggaatgtgg

SEQ ID NO: 165540 - DNA, 30 bp, Artificial Sequence
  Synthetic oligonucleotide
gcactactagacctagacgttctgatgtgg

SEQ ID NO: 165541 - DNA, 30 bp, Artificial Sequence
  Synthetic oligonucleotide
gcgctaccgtgtagttcgctgaagctgtgg

SEQ ID NO: 165542 - DNA, 30 bp, Artificial Sequence
  Synthetic oligonucleotide
gggtgataaccaaactaaccgcatctgtgg

SEQ ID NO: 165543 - DNA, 30 bp, Artificial Sequence
  Synthetic oligonucleotide
cgtcatgcggagcgtttcctgtgggtgtgg

SEQ ID NO: 165544 - DNA, 30 bp, Artificial Sequence
  Synthetic oligonucleotide
ttgcgccgagttctcacggcaccgttgtgg

SEQ ID NO: 165545 - DNA, 30 bp, Artificial Sequence
  Synthetic oligonucleotide
atggccgttctaactcggattaggttgtgg

SEQ ID NO: 165546 - DNA, 30 bp, Artificial Sequence
  Synthetic oligonucleotide
agagtaattggagtgacatctattttgtgg

SEQ ID NO: 165547 - DNA, 30 bp, Artificial Sequence
  Synthetic oligonucleotide
atgacgcccagttcgagcaaaaagaattgg

SEQ ID NO: 165548 - DNA, 30 bp, Artificial Sequence
  Synthetic oligonucleotide
gcggccgaaaccccctactggtagaattgg

SEQ ID NO: 165549 - DNA, 30 bp, Artificial Sequence
  Synthetic oligonucleotide
ggccaagacagctacctcgcgtctaattgg

SEQ ID NO: 165550 - DNA, 30 bp, Artificial Sequence
  Synthetic oligonucleotide
cacaatagccgagttagatttattaattgg

SEQ ID NO: 165551 - DNA, 30 bp, Artificial Sequence
  Synthetic oligonucleotide
agaaaattcgactttggaacgtgacattgg

SEQ ID NO: 165552 - DNA, 30 bp, Artificial Sequence
  Synthetic oligonucleotide
cctaggaagttcatagctcacggccattgg

SEQ ID NO: 165553 - DNA, 30 bp, Artificial Sequence
  Synthetic oligonucleotide
ggcgtggttaattgacgacactagcattgg

SEQ ID NO: 165554 - DNA, 30 bp, Artificial Sequence
  Synthetic oligonucleotide
tagcatccccgtcttggtctctgagattgg

SEQ ID NO: 165555 - DNA, 30 bp, Artificial Sequence
  Synthetic oligonucleotide
gtatataatggtatatagtactgcgattgg

SEQ ID NO: 165556 - DNA, 30 bp, Artificial Sequence
  Synthetic oligonucleotide
tgtgatgcacagaacttggtcttcgattgg

SEQ ID NO: 165557 - DNA, 30 bp, Artificial Sequence
  Synthetic oligonucleotide
gggatgatcccgacacctgaatatgattgg

SEQ ID NO: 165558 - DNA, 30 bp, Artificial Sequence
  Synthetic oligonucleotide
tccccgggcacataatggaagactgattgg

SEQ ID NO: 165559 - DNA, 30 bp, Artificial Sequence
  Synthetic oligonucleotide
cataataagtgggttcgtgttcttgattgg

SEQ ID NO: 165560 - DNA, 30 bp, Artificial Sequence
  Synthetic oligonucleotide
gcgtaccggctcgatcccaccatatattgg

SEQ ID NO: 165561 - DNA, 30 bp, Artificial Sequence
  Synthetic oligonucleotide
gggaggttaattttggctcccatatattgg

SEQ ID NO: 165562 - DNA, 30 bp, Artificial Sequence
  Synthetic oligonucleotide
ctcgttcagcagaggcgttcatcctattgg

SEQ ID NO: 165563 - DNA, 30 bp, Artificial Sequence
  Synthetic oligonucleotide
tacgagtactgtcaggtgaagcgttattgg

SEQ ID NO: 165564 - DNA, 30 bp, Artificial Sequence
  Synthetic oligonucleotide
ctagaaaagtcgacttatgaatgttattgg

SEQ ID NO: 165565 - DNA, 30 bp, Artificial Sequence
  Synthetic oligonucleotide
ttagtccaagagggccttccaccaacttgg

SEQ ID NO: 165566 - DNA, 30 bp, Artificial Sequence
  Synthetic oligonucleotide
cagtttcaatggatctgtttggttacttgg

SEQ ID NO: 165567 - DNA, 30 bp, Artificial Sequence
  Synthetic oligonucleotide
tcaccgtaacctgagattccgaaaccttgg

SEQ ID NO: 165568 - DNA, 30 bp, Artificial Sequence
  Synthetic oligonucleotide
aggtcactgaaaatgtaagaccgaccttgg

SEQ ID NO: 165569 - DNA, 30 bp, Artificial Sequence
  Synthetic oligonucleotide
gcactgtacgttgcgttgtggatcccttgg

SEQ ID NO: 165570 - DNA, 30 bp, Artificial Sequence
  Synthetic oligonucleotide
tccatcgagttcggcagttaaagtgcttgg

SEQ ID NO: 165571 - DNA, 30 bp, Artificial Sequence
  Synthetic oligonucleotide
gatcatagcacagcagtacagtttgcttgg

SEQ ID NO: 165572 - DNA, 30 bp, Artificial Sequence
  Synthetic oligonucleotide
atggagagtgggtttatatccggctcttgg

SEQ ID NO: 165573 - DNA, 30 bp, Artificial Sequence
  Synthetic oligonucleotide
cgccattgtataaggaagagcaggtcttgg

SEQ ID NO: 165574 - DNA, 30 bp, Artificial Sequence
  Synthetic oligonucleotide
acggtacacgctccgcacgcttggtcttgg

SEQ ID NO: 165575 - DNA, 30 bp, Artificial Sequence
  Synthetic oligonucleotide
gaggcccggggcgacgtggtgtacagttgg

SEQ ID NO: 165576 - DNA, 30 bp, Artificial Sequence
  Synthetic oligonucleotide
ggtgacagcaatagtgcgggttgcagttgg

SEQ ID NO: 165577 - DNA, 30 bp, Artificial Sequence
  Synthetic oligonucleotide
tagacattcgtcagagtaccgctgagttgg

SEQ ID NO: 165578 - DNA, 30 bp, Artificial Sequence
  Synthetic oligonucleotide
ggatcgaagatgagctaaagacatagttgg

SEQ ID NO: 165579 - DNA, 30 bp, Artificial Sequence
  Synthetic oligonucleotide
cgacaaatacggcgagatgtgaaaggttgg

SEQ ID NO: 165580 - DNA, 30 bp, Artificial Sequence
  Synthetic oligonucleotide
tctaaaaatgagggtattaaatcaggttgg

SEQ ID NO: 165581 - DNA, 30 bp, Artificial Sequence
  Synthetic oligonucleotide
gcggtacttattgctgtcacaggaggttgg

SEQ ID NO: 165582 - DNA, 30 bp, Artificial Sequence
  Synthetic oligonucleotide
gcgcattcttggttggaatgttgaggttgg

SEQ ID NO: 165583 - DNA, 30 bp, Artificial Sequence
  Synthetic oligonucleotide
tttaggagtacgaaaacattaatgggttgg

SEQ ID NO: 165584 - DNA, 30 bp, Artificial Sequence
  Synthetic oligonucleotide
agtgctacgggcaagttggctaatggttgg

SEQ ID NO: 165585 - DNA, 30 bp, Artificial Sequence
  Synthetic oligonucleotide
cagcggttaagaaatttccagacatgttgg

SEQ ID NO: 165586 - DNA, 30 bp, Artificial Sequence
  Synthetic oligonucleotide
tttgggcacgccgggaatcggcacatttgg

SEQ ID NO: 165587 - DNA, 30 bp, Artificial Sequence
  Synthetic oligonucleotide
accaccctagagctatgaatccccatttgg

SEQ ID NO: 165588 - DNA, 30 bp, Artificial Sequence
  Synthetic oligonucleotide
aaagtgcatcggaggaaggagacgctttgg

SEQ ID NO: 165589 - DNA, 30 bp, Artificial Sequence
  Synthetic oligonucleotide
ttatgccgagatgtattaccagtagtttgg

SEQ ID NO: 165590 - DNA, 30 bp, Artificial Sequence
  Synthetic oligonucleotide
gtgtaagtattactctgttatagcgtttgg

SEQ ID NO: 165591 - DNA, 30 bp, Artificial Sequence
  Synthetic oligonucleotide
ttacttatctgtcagtcactggcggtttgg

SEQ ID NO: 165592 - DNA, 30 bp, Artificial Sequence
  Synthetic oligonucleotide
cattgcaaacttgtttgtggtgcggtttgg

SEQ ID NO: 165593 - DNA, 30 bp, Artificial Sequence
  Synthetic oligonucleotide
gaaaggggtgcgccaattcactcggtttgg

SEQ ID NO: 165594 - DNA, 30 bp, Artificial Sequence
  Synthetic oligonucleotide
tcgggaagtatagtgatcacgaaattttgg

SEQ ID NO: 165595 - DNA, 30 bp, Artificial Sequence
  Synthetic oligonucleotide
ggactcgctaattccgcctacaacttttgg

SEQ ID NO: 165596 - DNA, 30 bp, Artificial Sequence
  Synthetic oligonucleotide
cacactgctgcatatttgaagtcgttttgg

SEQ ID NO: 165597 - DNA, 30 bp, Artificial Sequence
  Synthetic oligonucleotide
caatgtatggcggtgcaagccgttttttgg

SEQ ID NO: 165598 - DNA, 30 bp, Artificial Sequence
  Synthetic oligonucleotide
actatcgaaccggtggtacttgcaaaaatg

SEQ ID NO: 165599 - DNA, 30 bp, Artificial Sequence
  Synthetic oligonucleotide
tacatggccgcgcttggcgtatataaaatg

SEQ ID NO: 165600 - DNA, 30 bp, Artificial Sequence
  Synthetic oligonucleotide
ggcgccaaaacccagaacgtgtataaaatg

SEQ ID NO: 165601 - DNA, 30 bp, Artificial Sequence
  Synthetic oligonucleotide
cacaggcgcaatttatatggacggcaaatg

SEQ ID NO: 165602 - DNA, 30 bp, Artificial Sequence
  Synthetic oligonucleotide
gggtactagttacacccagaacctcaaatg

SEQ ID NO: 165603 - DNA, 30 bp, Artificial Sequence
  Synthetic oligonucleotide
gccggctaagagctcctttggtcagaaatg

SEQ ID NO: 165604 - DNA, 30 bp, Artificial Sequence
  Synthetic oligonucleotide
gtcggctacatggggacaatggtagaaatg

SEQ ID NO: 165605 - DNA, 30 bp, Artificial Sequence
  Synthetic oligonucleotide
acccggtcgtgggatttcctccaggaaatg

SEQ ID NO: 165606 - DNA, 30 bp, Artificial Sequence
  Synthetic oligonucleotide
catgatagctataagtatagtcaggaaatg

SEQ ID NO: 165607 - DNA, 30 bp, Artificial Sequence
  Synthetic oligonucleotide
ggttaacattacgagaataactcggaaatg

SEQ ID NO: 165608 - DNA, 30 bp, Artificial Sequence
  Synthetic oligonucleotide
atgagactggatctttttattggggaaatg

SEQ ID NO: 165609 - DNA, 30 bp, Artificial Sequence
  Synthetic oligonucleotide
cgatctcagttatgtgctcctgtggaaatg

SEQ ID NO: 165610 - DNA, 30 bp, Artificial Sequence
  Synthetic oligonucleotide
ggtgccgttcggatccctcaagcataaatg

SEQ ID NO: 165611 - DNA, 30 bp, Artificial Sequence
  Synthetic oligonucleotide
taacatcccagagcgcatatttgttaaatg

SEQ ID NO: 165612 - DNA, 30 bp, Artificial Sequence
  Synthetic oligonucleotide
cctatgacactccgcgccgagcacacaatg

SEQ ID NO: 165613 - DNA, 30 bp, Artificial Sequence
  Synthetic oligonucleotide
cggccatagtcacaggggaataggacaatg

SEQ ID NO: 165614 - DNA, 30 bp, Artificial Sequence
  Synthetic oligonucleotide
agggttctttgatgtccggaccctacaatg

SEQ ID NO: 165615 - DNA, 30 bp, Artificial Sequence
  Synthetic oligonucleotide
cacataaagtctaatccgtgtgctacaatg

SEQ ID NO: 165616 - DNA, 30 bp, Artificial Sequence
  Synthetic oligonucleotide
ggcacgtcggagagggaatcacaaccaatg

SEQ ID NO: 165617 - DNA, 30 bp, Artificial Sequence
  Synthetic oligonucleotide
aaggcatcaggagcgggggaatcgccaatg

SEQ ID NO: 165618 - DNA, 30 bp, Artificial Sequence
  Synthetic oligonucleotide
ggaccgggcgggcgaattatgctcgcaatg

SEQ ID NO: 165619 - DNA, 30 bp, Artificial Sequence
  Synthetic oligonucleotide
cgctacggtttgcttttcttcggtgcaatg

SEQ ID NO: 165620 - DNA, 30 bp, Artificial Sequence
  Synthetic oligonucleotide
gtgtacagatggacagggccctcatcaatg

SEQ ID NO: 165621 - DNA, 30 bp, Artificial Sequence
  Synthetic oligonucleotide
gatcagtcaatgtgtcagccgcactcaatg

SEQ ID NO: 165622 - DNA, 30 bp, Artificial Sequence
  Synthetic oligonucleotide
ggctaggttatcgtataatgcgactcaatg

SEQ ID NO: 165623 - DNA, 30 bp, Artificial Sequence
  Synthetic oligonucleotide
cgggggcgtctcctaaggctcacctcaatg

SEQ ID NO: 165624 - DNA, 30 bp, Artificial Sequence
  Synthetic oligonucleotide
cgggagtcactttattgttaatgctcaatg

SEQ ID NO: 165625 - DNA, 30 bp, Artificial Sequence
  Synthetic oligonucleotide
ccaatggtacgaggttgctcgaagtcaatg

SEQ ID NO: 165626 - DNA, 30 bp, Artificial Sequence
  Synthetic oligonucleotide
aaagttggtttaatgcgcttaataagaatg

SEQ ID NO: 165627 - DNA, 30 bp, Artificial Sequence
  Synthetic oligonucleotide
atcgttcaaggacgatacgtcgtcagaatg

SEQ ID NO: 165628 - DNA, 30 bp, Artificial Sequence
  Synthetic oligonucleotide
gcgggtctagggtgccgtgggaggagaatg

SEQ ID NO: 165629 - DNA, 30 bp, Artificial Sequence
  Synthetic oligonucleotide
ataacacggtaattgattaggatgagaatg

SEQ ID NO: 165630 - DNA, 30 bp, Artificial Sequence
  Synthetic oligonucleotide
ggctaagcgtggtaaacccgacatagaatg

SEQ ID NO: 165631 - DNA, 30 bp, Artificial Sequence
  Synthetic oligonucleotide
ataacaggacgggagaattgggctagaatg

SEQ ID NO: 165632 - DNA, 30 bp, Artificial Sequence
  Synthetic oligonucleotide
aggctccataagtgaacgacgctccgaatg

SEQ ID NO: 165633 - DNA, 30 bp, Artificial Sequence
  Synthetic oligonucleotide
tgggaattcggattcacaatctctcgaatg

SEQ ID NO: 165634 - DNA, 30 bp, Artificial Sequence
  Synthetic oligonucleotide
gtacggcattgtagagtccaaacaggaatg

SEQ ID NO: 165635 - DNA, 30 bp, Artificial Sequence
  Synthetic oligonucleotide
aattgttccactgcgactcgtacaggaatg

SEQ ID NO: 165636 - DNA, 31 bp, Artificial Sequence
  Synthetic oligonucleotide
tggctaagatgacttttaacagggaggaatg

SEQ ID NO: 165637 - DNA, 30 bp, Artificial Sequence
  Synthetic oligonucleotide
ccacgtggcatcctgcgttgttgaggaatg

SEQ ID NO: 165638 - DNA, 30 bp, Artificial Sequence
  Synthetic oligonucleotide
gattaatagaatacggattctctaggaatg

SEQ ID NO: 165639 - DNA, 30 bp, Artificial Sequence
  Synthetic oligonucleotide
tgaaacggaggcaatcttcgggacggaatg

SEQ ID NO: 165640 - DNA, 30 bp, Artificial Sequence
  Synthetic oligonucleotide
accttgactgtgataccctagatgggaatg

SEQ ID NO: 165641 - DNA, 30 bp, Artificial Sequence
  Synthetic oligonucleotide
ggctgactacggggcggagcttatggaatg

SEQ ID NO: 165642 - DNA, 30 bp, Artificial Sequence
  Synthetic oligonucleotide
cgcgcctccaggcagttgcgcgactgaatg

SEQ ID NO: 165643 - DNA, 30 bp, Artificial Sequence
  Synthetic oligonucleotide
gtcgttcgaccggtctatggtatctgaatg

SEQ ID NO: 165644 - DNA, 30 bp, Artificial Sequence
  Synthetic oligonucleotide
acttgcggagtgctgggttaaacgtgaatg

SEQ ID NO: 165645 - DNA, 30 bp, Artificial Sequence
  Synthetic oligonucleotide
gtaagtggaggtcctgctgcaacgtgaatg

SEQ ID NO: 165646 - DNA, 30 bp, Artificial Sequence
  Synthetic oligonucleotide
gcgggcggtgagcgagcttatttgtgaatg

SEQ ID NO: 165647 - DNA, 30 bp, Artificial Sequence
  Synthetic oligonucleotide
caaaagtaaataggatccgcgaaaataatg

SEQ ID NO: 165648 - DNA, 30 bp, Artificial Sequence
  Synthetic oligonucleotide
acatgaagcccctcatgatataaaataatg

SEQ ID NO: 165649 - DNA, 30 bp, Artificial Sequence
  Synthetic oligonucleotide
gggagggactcttcgaaaatatgaataatg

SEQ ID NO: 165650 - DNA, 30 bp, Artificial Sequence
  Synthetic oligonucleotide
ccacacaaatggatcaaattttgcataatg

SEQ ID NO: 165651 - DNA, 30 bp, Artificial Sequence
  Synthetic oligonucleotide
gcacgtggtaccttggcgcccacgataatg

SEQ ID NO: 165652 - DNA, 30 bp, Artificial Sequence
  Synthetic oligonucleotide
agtcgaagcgactacggtgtccctataatg

SEQ ID NO: 165653 - DNA, 30 bp, Artificial Sequence
  Synthetic oligonucleotide
tcgatacaatagattctaatatgactaatg

SEQ ID NO: 165654 - DNA, 30 bp, Artificial Sequence
  Synthetic oligonucleotide
gggcactgccctgatcctagactactaatg

SEQ ID NO: 165655 - DNA, 30 bp, Artificial Sequence
  Synthetic oligonucleotide
cactggtaccgcatatcctcaaggctaatg

SEQ ID NO: 165656 - DNA, 30 bp, Artificial Sequence
  Synthetic oligonucleotide
agaaaaaactgttcttgtacgtcagtaatg

SEQ ID NO: 165657 - DNA, 30 bp, Artificial Sequence
  Synthetic oligonucleotide
tggtagttcgactttaggaccttagtaatg

SEQ ID NO: 165658 - DNA, 30 bp, Artificial Sequence
  Synthetic oligonucleotide
caaatgctgacagcatcgccaccggtaatg

SEQ ID NO: 165659 - DNA, 30 bp, Artificial Sequence
  Synthetic oligonucleotide
ggacctcgcgtcgcgagtagatctgtaatg

SEQ ID NO: 165660 - DNA, 30 bp, Artificial Sequence
  Synthetic oligonucleotide
aaccggtcgcagtatcgatagagtgtaatg

SEQ ID NO: 165661 - DNA, 30 bp, Artificial Sequence
  Synthetic oligonucleotide
ggtcatccaagcagttcaaacgcattaatg

SEQ ID NO: 165662 - DNA, 30 bp, Artificial Sequence
  Synthetic oligonucleotide
tggccgccccaccatattcgtcacttaatg

SEQ ID NO: 165663 - DNA, 30 bp, Artificial Sequence
  Synthetic oligonucleotide
tgactgttgttgttgtgttaccccttaatg

SEQ ID NO: 165664 - DNA, 30 bp, Artificial Sequence
  Synthetic oligonucleotide
tgccatgacataatctgatacaggttaatg

SEQ ID NO: 165665 - DNA, 30 bp, Artificial Sequence
  Synthetic oligonucleotide
aaggatgttccaagaccaatcagcaacatg

SEQ ID NO: 165666 - DNA, 30 bp, Artificial Sequence
  Synthetic oligonucleotide
cgctgctcggaaacatagtgtgaacacatg

SEQ ID NO: 165667 - DNA, 30 bp, Artificial Sequence
  Synthetic oligonucleotide
gaggtatcaaaacaggtgtcactacacatg

SEQ ID NO: 165668 - DNA, 30 bp, Artificial Sequence
  Synthetic oligonucleotide
cgagggaatttgcttatcggattccacatg

SEQ ID NO: 165669 - DNA, 30 bp, Artificial Sequence
  Synthetic oligonucleotide
actcgtgcagacaagagcgatgggcacatg

SEQ ID NO: 165670 - DNA, 30 bp, Artificial Sequence
  Synthetic oligonucleotide
gttgaagacctaaagaattttgtgcacatg

SEQ ID NO: 165671 - DNA, 30 bp, Artificial Sequence
  Synthetic oligonucleotide
ccgcgcattagagcagttggccgagacatg

SEQ ID NO: 165672 - DNA, 30 bp, Artificial Sequence
  Synthetic oligonucleotide
atgtaatgacctgaggtgatcggagacatg

SEQ ID NO: 165673 - DNA, 30 bp, Artificial Sequence
  Synthetic oligonucleotide
gcggtttttcgatagattttcggcgacatg

SEQ ID NO: 165674 - DNA, 30 bp, Artificial Sequence
  Synthetic oligonucleotide
actacgtcaccgggcgacatgattgacatg

SEQ ID NO: 165675 - DNA, 30 bp, Artificial Sequence
  Synthetic oligonucleotide
catcattaataattcagtaccaaatacatg

SEQ ID NO: 165676 - DNA, 30 bp, Artificial Sequence
  Synthetic oligonucleotide
taggtacgcgggatctctaccagctacatg

SEQ ID NO: 165677 - DNA, 30 bp, Artificial Sequence
  Synthetic oligonucleotide
caattggtggggtatcagatccggtacatg

SEQ ID NO: 165678 - DNA, 30 bp, Artificial Sequence
  Synthetic oligonucleotide
agttcttagagcaggaaaggtatgtacatg

SEQ ID NO: 165679 - DNA, 30 bp, Artificial Sequence
  Synthetic oligonucleotide
agcgccataggacctgcctgactttacatg

SEQ ID NO: 165680 - DNA, 30 bp, Artificial Sequence
  Synthetic oligonucleotide
cgccctactacaatcctcgaattttacatg

SEQ ID NO: 165681 - DNA, 30 bp, Artificial Sequence
  Synthetic oligonucleotide
caccaagatggagcaaattcaatcaccatg

SEQ ID NO: 165682 - DNA, 30 bp, Artificial Sequence
  Synthetic oligonucleotide
cactctccggggcggtattggctcaccatg

SEQ ID NO: 165683 - DNA, 30 bp, Artificial Sequence
  Synthetic oligonucleotide
gggtcacaataaaatctattgtcgaccatg

SEQ ID NO: 165684 - DNA, 30 bp, Artificial Sequence
  Synthetic oligonucleotide
tacgtcaggatcctaggcatcaataccatg

SEQ ID NO: 165685 - DNA, 30 bp, Artificial Sequence
  Synthetic oligonucleotide
tctatggaacccaactgggctgtccccatg

SEQ ID NO: 165686 - DNA, 30 bp, Artificial Sequence
  Synthetic oligonucleotide
cgcaaaaatcgtggactatgagctcccatg

SEQ ID NO: 165687 - DNA, 30 bp, Artificial Sequence
  Synthetic oligonucleotide
agcccgacgcgactgagaaccgttcccatg

SEQ ID NO: 165688 - DNA, 27 bp, Artificial Sequence
  Synthetic oligonucleotide
tacggatggatagacataggagccatg

SEQ ID NO: 165689 - DNA, 30 bp, Artificial Sequence
  Synthetic oligonucleotide
gaacatttttccgggcgatccaacgccatg

SEQ ID NO: 165690 - DNA, 30 bp, Artificial Sequence
  Synthetic oligonucleotide
ggcccacgcgagtgagcagattgggccatg

SEQ ID NO: 165691 - DNA, 30 bp, Artificial Sequence
  Synthetic oligonucleotide
gaattcgtgcaaccaagtctcgaatccatg

SEQ ID NO: 165692 - DNA, 30 bp, Artificial Sequence
  Synthetic oligonucleotide
gccaggggtaaagaggtaaacttatccatg

SEQ ID NO: 165693 - DNA, 30 bp, Artificial Sequence
  Synthetic oligonucleotide
gcttcgctaactcaaaaagatgactccatg

SEQ ID NO: 165694 - DNA, 30 bp, Artificial Sequence
  Synthetic oligonucleotide
gcttaggctgatcatagggagccctccatg

SEQ ID NO: 165695 - DNA, 30 bp, Artificial Sequence
  Synthetic oligonucleotide
agcgcatgcgctaactgattcgcaagcatg

SEQ ID NO: 165696 - DNA, 30 bp, Artificial Sequence
  Synthetic oligonucleotide
ggatcacccctgcgaacgaacagtagcatg

SEQ ID NO: 165697 - DNA, 30 bp, Artificial Sequence
  Synthetic oligonucleotide
tttttgtgtaactcggtgaagggtagcatg

SEQ ID NO: 165698 - DNA, 30 bp, Artificial Sequence
  Synthetic oligonucleotide
gaagagtcaccagtttaatggaaacgcatg

SEQ ID NO: 165699 - DNA, 30 bp, Artificial Sequence
  Synthetic oligonucleotide
ctcatccaccccgaccaatcattccgcatg

SEQ ID NO: 165700 - DNA, 30 bp, Artificial Sequence
  Synthetic oligonucleotide
cactaccgggtcgtcgtgggtgcaggcatg

SEQ ID NO: 165701 - DNA, 30 bp, Artificial Sequence
  Synthetic oligonucleotide
catttcagttcaaaaaggtggaagggcatg

SEQ ID NO: 165702 - DNA, 30 bp, Artificial Sequence
  Synthetic oligonucleotide
agcctcgccaaacgcaccgtgaagggcatg

SEQ ID NO: 165703 - DNA, 30 bp, Artificial Sequence
  Synthetic oligonucleotide
tcaaccgggtcagctaggggaccgggcatg

SEQ ID NO: 165704 - DNA, 30 bp, Artificial Sequence
  Synthetic oligonucleotide
gacccggaaacctagaactataaatgcatg

SEQ ID NO: 165705 - DNA, 30 bp, Artificial Sequence
  Synthetic oligonucleotide
aacacggcgaacttactaccccgatgcatg

SEQ ID NO: 165706 - DNA, 30 bp, Artificial Sequence
  Synthetic oligonucleotide
aggattaaacgcctaagggcccattgcatg

SEQ ID NO: 165707 - DNA, 30 bp, Artificial Sequence
  Synthetic oligonucleotide
agttaaggttggcataagggctgcatcatg

SEQ ID NO: 165708 - DNA, 30 bp, Artificial Sequence
  Synthetic oligonucleotide
atccgcactatctaggcataaaagatcatg

SEQ ID NO: 165709 - DNA, 30 bp, Artificial Sequence
  Synthetic oligonucleotide
tacaaagcctcggaacatcacaagatcatg

SEQ ID NO: 165710 - DNA, 30 bp, Artificial Sequence
  Synthetic oligonucleotide
gcccaagcacctctgtccgtcgtgatcatg

SEQ ID NO: 165711 - DNA, 30 bp, Artificial Sequence
  Synthetic oligonucleotide
agagccggtgttacagggtatttgatcatg

SEQ ID NO: 165712 - DNA, 30 bp, Artificial Sequence
  Synthetic oligonucleotide
cctgtgcgtggatctagtaacacactcatg

SEQ ID NO: 165713 - DNA, 30 bp, Artificial Sequence
  Synthetic oligonucleotide
cgctgatggctaactggatccaacctcatg

SEQ ID NO: 165714 - DNA, 30 bp, Artificial Sequence
  Synthetic oligonucleotide
gggggtagcacgatgatttgtcggctcatg

SEQ ID NO: 165715 - DNA, 30 bp, Artificial Sequence
  Synthetic oligonucleotide
tatgacagagaatgtcctatgcatctcatg

SEQ ID NO: 165716 - DNA, 30 bp, Artificial Sequence
  Synthetic oligonucleotide
gttatacgcatgtgcgtctactatctcatg

SEQ ID NO: 165717 - DNA, 30 bp, Artificial Sequence
  Synthetic oligonucleotide
caagcgcgctaagacttatcgaaagtcatg

SEQ ID NO: 165718 - DNA, 40 bp, Artificial Sequence
  Synthetic oligonucleotide
ccattcgatctctaaaaatctatgcggcgggcgggtcatg

SEQ ID NO: 165719 - DNA, 30 bp, Artificial Sequence
  Synthetic oligonucleotide
tcgttgtagcttgaattacctggggtcatg

SEQ ID NO: 165720 - DNA, 30 bp, Artificial Sequence
  Synthetic oligonucleotide
taggttagcatctctttcgagatattcatg

SEQ ID NO: 165721 - DNA, 30 bp, Artificial Sequence
  Synthetic oligonucleotide
aaaatggagcgtagcggcgagctcttcatg

SEQ ID NO: 165722 - DNA, 30 bp, Artificial Sequence
  Synthetic oligonucleotide
acggtatataaccgacagtgatcgttcatg

SEQ ID NO: 165723 - DNA, 30 bp, Artificial Sequence
  Synthetic oligonucleotide
cagtcggcaccattttggcgtcggttcatg

SEQ ID NO: 165724 - DNA, 30 bp, Artificial Sequence
  Synthetic oligonucleotide
cacgaattgaaactcgtaataggtttcatg

SEQ ID NO: 165725 - DNA, 30 bp, Artificial Sequence
  Synthetic oligonucleotide
aacaggcatggactggggaactgtttcatg

SEQ ID NO: 165726 - DNA, 30 bp, Artificial Sequence
  Synthetic oligonucleotide
gaagagcagactaaacgtgcgtttttcatg

SEQ ID NO: 165727 - DNA, 30 bp, Artificial Sequence
  Synthetic oligonucleotide
ggcgttgcgcttaagaacattgaaaagatg

SEQ ID NO: 165728 - DNA, 30 bp, Artificial Sequence
  Synthetic oligonucleotide
tgtaattcacgtacccgatcaaacaagatg

SEQ ID NO: 165729 - DNA, 30 bp, Artificial Sequence
  Synthetic oligonucleotide
gcgttgaagatttagaatcggatcaagatg

SEQ ID NO: 165730 - DNA, 30 bp, Artificial Sequence
  Synthetic oligonucleotide
gcgatagtgatatcaacacctacacagatg

SEQ ID NO: 165731 - DNA, 30 bp, Artificial Sequence
  Synthetic oligonucleotide
ttacagtagccaacgactagcctacagatg

SEQ ID NO: 165732 - DNA, 30 bp, Artificial Sequence
  Synthetic oligonucleotide
gagaatccaacctgtgactataagcagatg

SEQ ID NO: 165733 - DNA, 31 bp, Artificial Sequence
  Synthetic oligonucleotide
aggttactctaaaagccatctgtggcagatg

SEQ ID NO: 165734 - DNA, 30 bp, Artificial Sequence
  Synthetic oligonucleotide
tacgagaattttattcggggacgtcagatg

SEQ ID NO: 165735 - DNA, 30 bp, Artificial Sequence
  Synthetic oligonucleotide
gcctggtgtcacttacgcctagtcgagatg

SEQ ID NO: 165736 - DNA, 30 bp, Artificial Sequence
  Synthetic oligonucleotide
ggtgcggaccggtcatggtatgcggagatg

SEQ ID NO: 165737 - DNA, 30 bp, Artificial Sequence
  Synthetic oligonucleotide
tcacttgcgtaacgaagttaaactgagatg

SEQ ID NO: 165738 - DNA, 30 bp, Artificial Sequence
  Synthetic oligonucleotide
aaacggttgtaggatgtgactaaatagatg

SEQ ID NO: 165739 - DNA, 30 bp, Artificial Sequence
  Synthetic oligonucleotide
cctcatcgagtatagggatccaactagatg

SEQ ID NO: 165740 - DNA, 30 bp, Artificial Sequence
  Synthetic oligonucleotide
ttcccgccaaaaaacggcatctgttagatg

SEQ ID NO: 165741 - DNA, 30 bp, Artificial Sequence
  Synthetic oligonucleotide
gtacaagtaagattagcggggatgacgatg

SEQ ID NO: 165742 - DNA, 30 bp, Artificial Sequence
  Synthetic oligonucleotide
cgtagtataagtgccggttctgtgacgatg

SEQ ID NO: 165743 - DNA, 30 bp, Artificial Sequence
  Synthetic oligonucleotide
ctaagggcgcggatcctgacaaacccgatg

SEQ ID NO: 165744 - DNA, 30 bp, Artificial Sequence
  Synthetic oligonucleotide
ttgtacaccggtaacatgtcaaatccgatg

SEQ ID NO: 165745 - DNA, 30 bp, Artificial Sequence
  Synthetic oligonucleotide
cagagccgacaaggtggatgaaatccgatg

SEQ ID NO: 165746 - DNA, 30 bp, Artificial Sequence
  Synthetic oligonucleotide
aattggatggacgtcctggtaaaagcgatg

SEQ ID NO: 165747 - DNA, 30 bp, Artificial Sequence
  Synthetic oligonucleotide
ccgtcggttgcatcagttcccgccgcgatg

SEQ ID NO: 165748 - DNA, 30 bp, Artificial Sequence
  Synthetic oligonucleotide
tcatgaatgaacaactttcatcgcgcgatg

SEQ ID NO: 165749 - DNA, 30 bp, Artificial Sequence
  Synthetic oligonucleotide
tatgcgcgatcggttacgataaaggcgatg

SEQ ID NO: 165750 - DNA, 30 bp, Artificial Sequence
  Synthetic oligonucleotide
tctgttgtaccatttctaaaccttgcgatg

SEQ ID NO: 165751 - DNA, 40 bp, Artificial Sequence
  Synthetic oligonucleotide
gtggaatgaatatactccttccgctctattttcgtcgatg

SEQ ID NO: 165752 - DNA, 30 bp, Artificial Sequence
  Synthetic oligonucleotide
cgtgctggtaattacccctctcattcgatg

SEQ ID NO: 165753 - DNA, 30 bp, Artificial Sequence
  Synthetic oligonucleotide
atataagtcggtacaaagaagacgaggatg

SEQ ID NO: 165754 - DNA, 30 bp, Artificial Sequence
  Synthetic oligonucleotide
attaagttcagtgcaaagctgtataggatg

SEQ ID NO: 165755 - DNA, 30 bp, Artificial Sequence
  Synthetic oligonucleotide
ccggagcgactctagacttgggttaggatg

SEQ ID NO: 165756 - DNA, 30 bp, Artificial Sequence
  Synthetic oligonucleotide
cttcaacgttacggatcaagtgttaggatg

SEQ ID NO: 165757 - DNA, 30 bp, Artificial Sequence
  Synthetic oligonucleotide
aagtagagtataagcccgagttcacggatg

SEQ ID NO: 165758 - DNA, 30 bp, Artificial Sequence
  Synthetic oligonucleotide
cttaaagcgagtcttagtttggggcggatg

SEQ ID NO: 165759 - DNA, 30 bp, Artificial Sequence
  Synthetic oligonucleotide
tggagtacgacccagaaccgtgtgcggatg

SEQ ID NO: 165760 - DNA, 30 bp, Artificial Sequence
  Synthetic oligonucleotide
ttatttaaagctgagcatcaaagtcggatg

SEQ ID NO: 165761 - DNA, 30 bp, Artificial Sequence
  Synthetic oligonucleotide
gtgtttccatcagggtgaagaagtcggatg

SEQ ID NO: 165762 - DNA, 29 bp, Artificial Sequence
  Synthetic oligonucleotide
ctcgaatagggttgggcaggggtcggatg

SEQ ID NO: 165763 - DNA, 30 bp, Artificial Sequence
  Synthetic oligonucleotide
caagttgtcaaatgagtggggcaagggatg

SEQ ID NO: 165764 - DNA, 30 bp, Artificial Sequence
  Synthetic oligonucleotide
cttgatgtatctttctaggacgaagggatg

SEQ ID NO: 165765 - DNA, 30 bp, Artificial Sequence
  Synthetic oligonucleotide
ccaacgcaaagtcggagactgcacgggatg

SEQ ID NO: 165766 - DNA, 30 bp, Artificial Sequence
  Synthetic oligonucleotide
acatagggtgtctagtcacatgcggggatg

SEQ ID NO: 165767 - DNA, 30 bp, Artificial Sequence
  Synthetic oligonucleotide
gtgaaatgtgggaaagcgtgttgggggatg

SEQ ID NO: 165768 - DNA, 30 bp, Artificial Sequence
  Synthetic oligonucleotide
tgatgtaacgtacattgcaagactgggatg

SEQ ID NO: 165769 - DNA, 30 bp, Artificial Sequence
  Synthetic oligonucleotide
gcaggcaacatagtcgtgtgcgaatggatg

SEQ ID NO: 165770 - DNA, 30 bp, Artificial Sequence
  Synthetic oligonucleotide
cgtgcaggtccgcggtccgggagatggatg

SEQ ID NO: 165771 - DNA, 30 bp, Artificial Sequence
  Synthetic oligonucleotide
aattcccaggcagagagtgagacgtggatg

SEQ ID NO: 165772 - DNA, 30 bp, Artificial Sequence
  Synthetic oligonucleotide
gcgaaatgatgcgtgaaggaattgtggatg

SEQ ID NO: 165773 - DNA, 30 bp, Artificial Sequence
  Synthetic oligonucleotide
accatccgttaggagtctaataattggatg

SEQ ID NO: 165774 - DNA, 30 bp, Artificial Sequence
  Synthetic oligonucleotide
gcagcagtatggcctgacttcccaatgatg

SEQ ID NO: 165775 - DNA, 30 bp, Artificial Sequence
  Synthetic oligonucleotide
cgcacgtaaatgacgtcgaagaccatgatg

SEQ ID NO: 165776 - DNA, 30 bp, Artificial Sequence
  Synthetic oligonucleotide
acaatcgattacgtattcgatcagatgatg

SEQ ID NO: 165777 - DNA, 30 bp, Artificial Sequence
  Synthetic oligonucleotide
gcaactagcacactgatcagtgggatgatg

SEQ ID NO: 165778 - DNA, 30 bp, Artificial Sequence
  Synthetic oligonucleotide
tgtcacaagcccagaggcgaggtgatgatg

SEQ ID NO: 165779 - DNA, 30 bp, Artificial Sequence
  Synthetic oligonucleotide
atgtgcgtggtggagtcgcccattatgatg

SEQ ID NO: 165780 - DNA, 30 bp, Artificial Sequence
  Synthetic oligonucleotide
catctttctacacgagtgcgcgttatgatg

SEQ ID NO: 165781 - DNA, 30 bp, Artificial Sequence
  Synthetic oligonucleotide
gctggtcgtcaaaccggccccgcactgatg

SEQ ID NO: 165782 - DNA, 30 bp, Artificial Sequence
  Synthetic oligonucleotide
aaagttatcaagttaagagccagactgatg

SEQ ID NO: 165783 - DNA, 30 bp, Artificial Sequence
  Synthetic oligonucleotide
taggtagtagcgcgttaaggtgtactgatg

SEQ ID NO: 165784 - DNA, 30 bp, Artificial Sequence
  Synthetic oligonucleotide
tggaaacatccggattaaaaggacctgatg

SEQ ID NO: 165785 - DNA, 30 bp, Artificial Sequence
  Synthetic oligonucleotide
gtctcgggcaaagatgacccgcatctgatg

SEQ ID NO: 165786 - DNA, 30 bp, Artificial Sequence
  Synthetic oligonucleotide
ttgcaatctggcattatttagattctgatg

SEQ ID NO: 165787 - DNA, 30 bp, Artificial Sequence
  Synthetic oligonucleotide
ggagcagcaaagaagcaacgttcagtgatg

SEQ ID NO: 165788 - DNA, 30 bp, Artificial Sequence
  Synthetic oligonucleotide
tcacacggacattaggtggtcggagtgatg

SEQ ID NO: 165789 - DNA, 30 bp, Artificial Sequence
  Synthetic oligonucleotide
ctacggacctggtaggcaggttacgtgatg

SEQ ID NO: 165790 - DNA, 30 bp, Artificial Sequence
  Synthetic oligonucleotide
aaccagagttcgattggttgtggcgtgatg

SEQ ID NO: 165791 - DNA, 30 bp, Artificial Sequence
  Synthetic oligonucleotide
catatacatgctagatgcataccggtgatg

SEQ ID NO: 165792 - DNA, 30 bp, Artificial Sequence
  Synthetic oligonucleotide
ggaacgggacttacacactggggggtgatg

SEQ ID NO: 165793 - DNA, 30 bp, Artificial Sequence
  Synthetic oligonucleotide
tttgaccatcggctgctgataactgtgatg

SEQ ID NO: 165794 - DNA, 30 bp, Artificial Sequence
  Synthetic oligonucleotide
tcgagcggtcccctaagcctccttgtgatg

SEQ ID NO: 165795 - DNA, 30 bp, Artificial Sequence
  Synthetic oligonucleotide
tgtccaccgcttgggatatgttgcttgatg

SEQ ID NO: 165796 - DNA, 31 bp, Artificial Sequence
  Synthetic oligonucleotide
ggcaacgtgcagatatctaccatggttgatg

SEQ ID NO: 165797 - DNA, 30 bp, Artificial Sequence
  Synthetic oligonucleotide
atggcgtagtagaattatccaaatttgatg

SEQ ID NO: 165798 - DNA, 30 bp, Artificial Sequence
  Synthetic oligonucleotide
gcagtgactctggttagtgtgtcaaatatg

SEQ ID NO: 165799 - DNA, 30 bp, Artificial Sequence
  Synthetic oligonucleotide
gaagaaccgacggttgaccgcggaaatatg

SEQ ID NO: 165800 - DNA, 30 bp, Artificial Sequence
  Synthetic oligonucleotide
aactcagattttaaatatcatctaaatatg

SEQ ID NO: 165801 - DNA, 30 bp, Artificial Sequence
  Synthetic oligonucleotide
gtagaggcgctaacggataaagtaaatatg

SEQ ID NO: 165802 - DNA, 30 bp, Artificial Sequence
  Synthetic oligonucleotide
tagacactgggttgcagtttgtacaatatg

SEQ ID NO: 165803 - DNA, 30 bp, Artificial Sequence
  Synthetic oligonucleotide
cgcaatcgaagcacccgccatgccaatatg

SEQ ID NO: 165804 - DNA, 30 bp, Artificial Sequence
  Synthetic oligonucleotide
cttcgacaagcaacttaacaatccaatatg

SEQ ID NO: 165805 - DNA, 30 bp, Artificial Sequence
  Synthetic oligonucleotide
gacaagtggaagcaaatattttagaatatg

SEQ ID NO: 165806 - DNA, 30 bp, Artificial Sequence
  Synthetic oligonucleotide
aaacgacgtacactacagactcataatatg

SEQ ID NO: 165807 - DNA, 30 bp, Artificial Sequence
  Synthetic oligonucleotide
aagattacacggcgcgtaaggccacatatg

SEQ ID NO: 165808 - DNA, 30 bp, Artificial Sequence
  Synthetic oligonucleotide
acataggtcaaagcgatgtgctcgcatatg

SEQ ID NO: 165809 - DNA, 30 bp, Artificial Sequence
  Synthetic oligonucleotide
tccaaaattctccgtggaagagctcatatg

SEQ ID NO: 165810 - DNA, 30 bp, Artificial Sequence
  Synthetic oligonucleotide
ttgtgactaccatcgagtaaacaagatatg

SEQ ID NO: 165811 - DNA, 30 bp, Artificial Sequence
  Synthetic oligonucleotide
ggcatcgtaaaagtagtacaagacgatatg

SEQ ID NO: 165812 - DNA, 30 bp, Artificial Sequence
  Synthetic oligonucleotide
taacacgagaactgttaagcaatcgatatg

SEQ ID NO: 165813 - DNA, 30 bp, Artificial Sequence
  Synthetic oligonucleotide
aatcccaattctacgcattacgtcgatatg

SEQ ID NO: 165814 - DNA, 30 bp, Artificial Sequence
  Synthetic oligonucleotide
ctgtccattacaacagacgggaatgatatg

SEQ ID NO: 165815 - DNA, 30 bp, Artificial Sequence
  Synthetic oligonucleotide
caagtccgacgcggcgaagcgacttatatg

SEQ ID NO: 165816 - DNA, 30 bp, Artificial Sequence
  Synthetic oligonucleotide
aactaaaagactagtcctggaaacactatg

SEQ ID NO: 165817 - DNA, 30 bp, Artificial Sequence
  Synthetic oligonucleotide
ccagttagaccggtagttcacgccactatg

SEQ ID NO: 165818 - DNA, 30 bp, Artificial Sequence
  Synthetic oligonucleotide
tatcacagtatgtgccatgatcgtactatg

SEQ ID NO: 165819 - DNA, 30 bp, Artificial Sequence
  Synthetic oligonucleotide
ggctgtaggccatcagtaacacaccctatg

SEQ ID NO: 165820 - DNA, 30 bp, Artificial Sequence
  Synthetic oligonucleotide
gctcatcgatcgatgcctgccgctcctatg

SEQ ID NO: 165821 - DNA, 30 bp, Artificial Sequence
  Synthetic oligonucleotide
gtcccaatccgttttcacgagatagctatg

SEQ ID NO: 165822 - DNA, 30 bp, Artificial Sequence
  Synthetic oligonucleotide
tgcggttaacgctatcggttgaaggctatg

SEQ ID NO: 165823 - DNA, 30 bp, Artificial Sequence
  Synthetic oligonucleotide
ggctggcaacgcggatgttgcgtggctatg

SEQ ID NO: 165824 - DNA, 30 bp, Artificial Sequence
  Synthetic oligonucleotide
ataagattacatagtggcacgagatctatg

SEQ ID NO: 165825 - DNA, 30 bp, Artificial Sequence
  Synthetic oligonucleotide
cgcgctacttaccccaagtagaactctatg

SEQ ID NO: 165826 - DNA, 30 bp, Artificial Sequence
  Synthetic oligonucleotide
tctgaatgcaagtccgtcgctgaaagtatg

SEQ ID NO: 165827 - DNA, 30 bp, Artificial Sequence
  Synthetic oligonucleotide
tgccgattacatttacaatcgcacagtatg

SEQ ID NO: 165828 - DNA, 30 bp, Artificial Sequence
  Synthetic oligonucleotide
gggttgctgttgaataaaccgctcagtatg

SEQ ID NO: 165829 - DNA, 30 bp, Artificial Sequence
  Synthetic oligonucleotide
ttcaaacccagcggtatcttatgtagtatg

SEQ ID NO: 165830 - DNA, 30 bp, Artificial Sequence
  Synthetic oligonucleotide
tcgggtactcacattgctcaacaccgtatg

SEQ ID NO: 165831 - DNA, 29 bp, Artificial Sequence
  Synthetic oligonucleotide
aactcctttttatgagggtcgaccgtatg

SEQ ID NO: 165832 - DNA, 30 bp, Artificial Sequence
  Synthetic oligonucleotide
gcactctccgacctaccgcgtggccgtatg

SEQ ID NO: 165833 - DNA, 30 bp, Artificial Sequence
  Synthetic oligonucleotide
tggcagagaccctgaattggtggtcgtatg

SEQ ID NO: 165834 - DNA, 30 bp, Artificial Sequence
  Synthetic oligonucleotide
caagataggagggcatactggaaaggtatg

SEQ ID NO: 165835 - DNA, 30 bp, Artificial Sequence
  Synthetic oligonucleotide
aatgatgtaaaactttcacctacaggtatg

SEQ ID NO: 165836 - DNA, 30 bp, Artificial Sequence
  Synthetic oligonucleotide
ggacagctcgcgggtctgcaaaatggtatg

SEQ ID NO: 165837 - DNA, 30 bp, Artificial Sequence
  Synthetic oligonucleotide
caagaaggagcactcgtggattaatgtatg

SEQ ID NO: 165838 - DNA, 30 bp, Artificial Sequence
  Synthetic oligonucleotide
tgaaatatgtcttggcagtaagactgtatg

SEQ ID NO: 165839 - DNA, 30 bp, Artificial Sequence
  Synthetic oligonucleotide
aacgttagtccagcctcaacgtggtgtatg

SEQ ID NO: 165840 - DNA, 30 bp, Artificial Sequence
  Synthetic oligonucleotide
gggaagctaacttcctcctcgtaaattatg

SEQ ID NO: 165841 - DNA, 30 bp, Artificial Sequence
  Synthetic oligonucleotide
tatcaccattcggggacggaatgaattatg

SEQ ID NO: 165842 - DNA, 30 bp, Artificial Sequence
  Synthetic oligonucleotide
gtaggggggcaccgcacctcctgaattatg

SEQ ID NO: 165843 - DNA, 30 bp, Artificial Sequence
  Synthetic oligonucleotide
tcgttctgtttagaagtcctcacgattatg

SEQ ID NO: 165844 - DNA, 30 bp, Artificial Sequence
  Synthetic oligonucleotide
tgagggctccattccgtcaagagtattatg

SEQ ID NO: 165845 - DNA, 30 bp, Artificial Sequence
  Synthetic oligonucleotide
cagggtaggctctgccatagcatccttatg

SEQ ID NO: 165846 - DNA, 30 bp, Artificial Sequence
  Synthetic oligonucleotide
attaggatgcggtatggcctccgagttatg

SEQ ID NO: 165847 - DNA, 30 bp, Artificial Sequence
  Synthetic oligonucleotide
caggaccgacggaccggatacatggttatg

SEQ ID NO: 165848 - DNA, 30 bp, Artificial Sequence
  Synthetic oligonucleotide
gggaaacatgccgaaacggggcatgttatg

SEQ ID NO: 165849 - DNA, 30 bp, Artificial Sequence
  Synthetic oligonucleotide
tcgggccaagttttccggtcacctgttatg

SEQ ID NO: 165850 - DNA, 30 bp, Artificial Sequence
  Synthetic oligonucleotide
acgaaggcggccccacccatgcaatttatg

SEQ ID NO: 165851 - DNA, 30 bp, Artificial Sequence
  Synthetic oligonucleotide
acggttggggagggcgctcatgcatttatg

SEQ ID NO: 165852 - DNA, 30 bp, Artificial Sequence
  Synthetic oligonucleotide
agtattcgtcagtattaaatctcgtttatg

SEQ ID NO: 165853 - DNA, 30 bp, Artificial Sequence
  Synthetic oligonucleotide
gctcgtattagaactcttaacatgtttatg

SEQ ID NO: 165854 - DNA, 30 bp, Artificial Sequence
  Synthetic oligonucleotide
ctgctcggggatatgcttgactgaaaactg

SEQ ID NO: 165855 - DNA, 30 bp, Artificial Sequence
  Synthetic oligonucleotide
tggaatttgaaaacttatgtttgaaaactg

SEQ ID NO: 165856 - DNA, 30 bp, Artificial Sequence
  Synthetic oligonucleotide
ctagctctgtgcttatgtctacacaaactg

SEQ ID NO: 165857 - DNA, 30 bp, Artificial Sequence
  Synthetic oligonucleotide
cgttattagggcgttgaaacttccaaactg

SEQ ID NO: 165858 - DNA, 30 bp, Artificial Sequence
  Synthetic oligonucleotide
aacggtcgtgagttgaactatccgaaactg

SEQ ID NO: 165859 - DNA, 30 bp, Artificial Sequence
  Synthetic oligonucleotide
agcagacttggttaacgcggggtgaaactg

SEQ ID NO: 165860 - DNA, 30 bp, Artificial Sequence
  Synthetic oligonucleotide
tataaacgtcgaggtattggatttaaactg

SEQ ID NO: 165861 - DNA, 30 bp, Artificial Sequence
  Synthetic oligonucleotide
gagttaggccggtctctcctaccacaactg

SEQ ID NO: 165862 - DNA, 30 bp, Artificial Sequence
  Synthetic oligonucleotide
ctcaatggaaggtctaaggggccacaactg

SEQ ID NO: 165863 - DNA, 30 bp, Artificial Sequence
  Synthetic oligonucleotide
ataaatcggcgaaactatacaggctaactg

SEQ ID NO: 165864 - DNA, 30 bp, Artificial Sequence
  Synthetic oligonucleotide
tccaagaatcggtttggtctttacacactg

SEQ ID NO: 165865 - DNA, 30 bp, Artificial Sequence
  Synthetic oligonucleotide
tcaggaggtcatagatccctctcaccactg

SEQ ID NO: 165866 - DNA, 30 bp, Artificial Sequence
  Synthetic oligonucleotide
cggagtgggctcggctggattggaccactg

SEQ ID NO: 165867 - DNA, 30 bp, Artificial Sequence
  Synthetic oligonucleotide
gttgtaatcactgctaatgcaagcccactg

SEQ ID NO: 165868 - DNA, 30 bp, Artificial Sequence
  Synthetic oligonucleotide
tgtccttaatggcgcaaagacctcccactg

SEQ ID NO: 165869 - DNA, 30 bp, Artificial Sequence
  Synthetic oligonucleotide
ctggccggaacaaccctgactctcccactg

SEQ ID NO: 165870 - DNA, 30 bp, Artificial Sequence
  Synthetic oligonucleotide
tgtgtcattgcgattgaacaggtcccactg

SEQ ID NO: 165871 - DNA, 30 bp, Artificial Sequence
  Synthetic oligonucleotide
agcccgatgtgcagtaaggaagcggcactg

SEQ ID NO: 165872 - DNA, 30 bp, Artificial Sequence
  Synthetic oligonucleotide
ctggcagtcccgaggtaaacgattgcactg

SEQ ID NO: 165873 - DNA, 30 bp, Artificial Sequence
  Synthetic oligonucleotide
aagaagctaagtctgttcttccaatcactg

SEQ ID NO: 165874 - DNA, 30 bp, Artificial Sequence
  Synthetic oligonucleotide
taacggtttgctaaggcaagagagtcactg

SEQ ID NO: 165875 - DNA, 30 bp, Artificial Sequence
  Synthetic oligonucleotide
accgaagaatcttctgacaaacgttcactg

SEQ ID NO: 165876 - DNA, 29 bp, Artificial Sequence
  Synthetic oligonucleotide
acgccgtatcatccccggcgacgagactg

SEQ ID NO: 165877 - DNA, 30 bp, Artificial Sequence
  Synthetic oligonucleotide
acggacatctgcatagacggcaggagactg

SEQ ID NO: 165878 - DNA, 30 bp, Artificial Sequence
  Synthetic oligonucleotide
gttccgtacggtgggtcgacgtatagactg

SEQ ID NO: 165879 - DNA, 30 bp, Artificial Sequence
  Synthetic oligonucleotide
tggggtcctaccacctgcgcagcgcgactg

SEQ ID NO: 165880 - DNA, 30 bp, Artificial Sequence
  Synthetic oligonucleotide
aagggggacggctgggtggctcatcgactg

SEQ ID NO: 165881 - DNA, 30 bp, Artificial Sequence
  Synthetic oligonucleotide
actatcatcgaataagccttgaagggactg

SEQ ID NO: 165882 - DNA, 30 bp, Artificial Sequence
  Synthetic oligonucleotide
gccagcggctgaccgtctagttggggactg

SEQ ID NO: 165883 - DNA, 30 bp, Artificial Sequence
  Synthetic oligonucleotide
tactaaccaaaataagggttccatggactg

SEQ ID NO: 165884 - DNA, 30 bp, Artificial Sequence
  Synthetic oligonucleotide
gtgcggatatgatagcctaactctggactg

SEQ ID NO: 165885 - DNA, 30 bp, Artificial Sequence
  Synthetic oligonucleotide
acggagtctattactgattaagcgctactg

SEQ ID NO: 165886 - DNA, 30 bp, Artificial Sequence
  Synthetic oligonucleotide
aaggtctaaacggcagtcaacagtctactg

SEQ ID NO: 165887 - DNA, 30 bp, Artificial Sequence
  Synthetic oligonucleotide
ggctatgccatgagccgctaatgagtactg

SEQ ID NO: 165888 - DNA, 30 bp, Artificial Sequence
  Synthetic oligonucleotide
tgaacgctattaaataaggtatgtgtactg

SEQ ID NO: 165889 - DNA, 30 bp, Artificial Sequence
  Synthetic oligonucleotide
aaatgttgacgtttaatgataagcttactg

SEQ ID NO: 165890 - DNA, 30 bp, Artificial Sequence
  Synthetic oligonucleotide
catgatacttgccatcattaaagaaacctg

SEQ ID NO: 165891 - DNA, 30 bp, Artificial Sequence
  Synthetic oligonucleotide
actccagcaatccgaaacaatcgaaacctg

SEQ ID NO: 165892 - DNA, 30 bp, Artificial Sequence
  Synthetic oligonucleotide
cccgtaggggcatattaagcagataacctg

SEQ ID NO: 165893 - DNA, 30 bp, Artificial Sequence
  Synthetic oligonucleotide
agtttgtaggcaactaaagtgggtaacctg

SEQ ID NO: 165894 - DNA, 30 bp, Artificial Sequence
  Synthetic oligonucleotide
acgtatggggaacgtggattttttaacctg

SEQ ID NO: 165895 - DNA, 30 bp, Artificial Sequence
  Synthetic oligonucleotide
gtgagaaagctcgttagtgctctacacctg

SEQ ID NO: 165896 - DNA, 30 bp, Artificial Sequence
  Synthetic oligonucleotide
acgtccgcaaaccacggggcacgccacctg

SEQ ID NO: 165897 - DNA, 30 bp, Artificial Sequence
  Synthetic oligonucleotide
ccccgattgcaaagaggtggtctgcacctg

SEQ ID NO: 165898 - DNA, 30 bp, Artificial Sequence
  Synthetic oligonucleotide
gcaagccatatctgctctaacggtcacctg

SEQ ID NO: 165899 - DNA, 30 bp, Artificial Sequence
  Synthetic oligonucleotide
ataatggcacttgcccctgttattcacctg

SEQ ID NO: 165900 - DNA, 30 bp, Artificial Sequence
  Synthetic oligonucleotide
tccctccatccgtgatgaatctacgacctg

SEQ ID NO: 165901 - DNA, 30 bp, Artificial Sequence
  Synthetic oligonucleotide
ggctccacccgcgcccgtgcgaccgacctg

SEQ ID NO: 165902 - DNA, 30 bp, Artificial Sequence
  Synthetic oligonucleotide
attgatagctcactggttggtatggacctg

SEQ ID NO: 165903 - DNA, 30 bp, Artificial Sequence
  Synthetic oligonucleotide
taaatctgtgattgggaatttactgacctg

SEQ ID NO: 165904 - DNA, 30 bp, Artificial Sequence
  Synthetic oligonucleotide
gagagagagagattggtgccacgtgacctg

SEQ ID NO: 165905 - DNA, 30 bp, Artificial Sequence
  Synthetic oligonucleotide
gtgttatatctcctcagtgatgtctacctg

SEQ ID NO: 165906 - DNA, 30 bp, Artificial Sequence
  Synthetic oligonucleotide
gtcacaaagaaggatgctatgtattacctg

SEQ ID NO: 165907 - DNA, 30 bp, Artificial Sequence
  Synthetic oligonucleotide
ttatataccacaccgttaaggggttacctg

SEQ ID NO: 165908 - DNA, 30 bp, Artificial Sequence
  Synthetic oligonucleotide
gcgacgcaaattcaacaactctgttacctg

SEQ ID NO: 165909 - DNA, 30 bp, Artificial Sequence
  Synthetic oligonucleotide
tacagccccaaacgggaattctacaccctg

SEQ ID NO: 165910 - DNA, 30 bp, Artificial Sequence
  Synthetic oligonucleotide
aagggatcagaaaaagggctaaataccctg

SEQ ID NO: 165911 - DNA, 30 bp, Artificial Sequence
  Synthetic oligonucleotide
aagacagacttggcagtctcggtccccctg

SEQ ID NO: 165912 - DNA, 30 bp, Artificial Sequence
  Synthetic oligonucleotide
atataaatctatggactgcgttatcccctg

SEQ ID NO: 165913 - DNA, 30 bp, Artificial Sequence
  Synthetic oligonucleotide
caggagttatgactcgagctatgtcccctg

SEQ ID NO: 165914 - DNA, 30 bp, Artificial Sequence
  Synthetic oligonucleotide
cagaaaccatctatgtgccagcttcccctg

SEQ ID NO: 165915 - DNA, 30 bp, Artificial Sequence
  Synthetic oligonucleotide
gtgtggagtaggcataatggggctgccctg

SEQ ID NO: 165916 - DNA, 29 bp, Artificial Sequence
  Synthetic oligonucleotide
tatgcatcatgaagtatggtccatccctg

SEQ ID NO: 165917 - DNA, 30 bp, Artificial Sequence
  Synthetic oligonucleotide
tcgtgcgcagatgcggcgataaactccctg

SEQ ID NO: 165918 - DNA, 30 bp, Artificial Sequence
  Synthetic oligonucleotide
agatcgataccacataaaggcctctccctg

SEQ ID NO: 165919 - DNA, 30 bp, Artificial Sequence
  Synthetic oligonucleotide
catcgttacggatgagactgattctccctg

SEQ ID NO: 165920 - DNA, 30 bp, Artificial Sequence
  Synthetic oligonucleotide
tcacgatgtgaacgagttactatgtccctg

SEQ ID NO: 165921 - DNA, 30 bp, Artificial Sequence
  Synthetic oligonucleotide
tgacgtgggccatgtcgccattacagcctg

SEQ ID NO: 165922 - DNA, 30 bp, Artificial Sequence
  Synthetic oligonucleotide
gaataatgacaactccgtggtccgagcctg

SEQ ID NO: 165923 - DNA, 30 bp, Artificial Sequence
  Synthetic oligonucleotide
ttgaaactctaatctagacgaaatagcctg

SEQ ID NO: 165924 - DNA, 30 bp, Artificial Sequence
  Synthetic oligonucleotide
tcacgacggtccgtaagccacaaacgcctg

SEQ ID NO: 165925 - DNA, 30 bp, Artificial Sequence
  Synthetic oligonucleotide
atcctaaggacacgggagatcaggcgcctg

SEQ ID NO: 165926 - DNA, 30 bp, Artificial Sequence
  Synthetic oligonucleotide
gggtacataggagaaggtcgtctaggcctg

SEQ ID NO: 165927 - DNA, 30 bp, Artificial Sequence
  Synthetic oligonucleotide
accctagtacatgtaacatctatcggcctg

SEQ ID NO: 165928 - DNA, 30 bp, Artificial Sequence
  Synthetic oligonucleotide
cgcacaacgagtaatgatcgggtatgcctg

SEQ ID NO: 165929 - DNA, 30 bp, Artificial Sequence
  Synthetic oligonucleotide
tgggtagtacccaaaagctgcgcaatcctg

SEQ ID NO: 165930 - DNA, 30 bp, Artificial Sequence
  Synthetic oligonucleotide
tctaatgagggtcatcggttatacatcctg

SEQ ID NO: 165931 - DNA, 30 bp, Artificial Sequence
  Synthetic oligonucleotide
ggacatgaggagcagattattcagatcctg

SEQ ID NO: 165932 - DNA, 30 bp, Artificial Sequence
  Synthetic oligonucleotide
cattaacggaggccttggctgcgtatcctg

SEQ ID NO: 165933 - DNA, 30 bp, Artificial Sequence
  Synthetic oligonucleotide
gcaaaataagtcatccggcctcgactcctg

SEQ ID NO: 165934 - DNA, 30 bp, Artificial Sequence
  Synthetic oligonucleotide
cggataatcgtgctaataaatagcctcctg

SEQ ID NO: 165935 - DNA, 30 bp, Artificial Sequence
  Synthetic oligonucleotide
aaaacactgtgagctggggtccaggtcctg

SEQ ID NO: 165936 - DNA, 30 bp, Artificial Sequence
  Synthetic oligonucleotide
gaagcgaagcattgcgcatggcccttcctg

SEQ ID NO: 165937 - DNA, 30 bp, Artificial Sequence
  Synthetic oligonucleotide
tcacggaaaatggcggtaattcgcaagctg

SEQ ID NO: 165938 - DNA, 30 bp, Artificial Sequence
  Synthetic oligonucleotide
tgttccatcaaaggccaacaactcaagctg

SEQ ID NO: 165939 - DNA, 30 bp, Artificial Sequence
  Synthetic oligonucleotide
tgcagttgattctaaaatccacagaagctg

SEQ ID NO: 165940 - DNA, 30 bp, Artificial Sequence
  Synthetic oligonucleotide
aatcacgtaggacatacaagcgtacagctg

SEQ ID NO: 165941 - DNA, 30 bp, Artificial Sequence
  Synthetic oligonucleotide
gtcagaatccatattatctattagcagctg

SEQ ID NO: 165942 - DNA, 30 bp, Artificial Sequence
  Synthetic oligonucleotide
caactgcaagtgtatatctgccttcagctg

SEQ ID NO: 165943 - DNA, 30 bp, Artificial Sequence
  Synthetic oligonucleotide
acgatgcatcacggacaggtctcagagctg

SEQ ID NO: 165944 - DNA, 30 bp, Artificial Sequence
  Synthetic oligonucleotide
aacgttaattctaccagcttgtgcgagctg

SEQ ID NO: 165945 - DNA, 30 bp, Artificial Sequence
  Synthetic oligonucleotide
tacaacttgcgattgtcctacctcgagctg

SEQ ID NO: 165946 - DNA, 30 bp, Artificial Sequence
  Synthetic oligonucleotide
acgctaattccagcgaggttgcgatagctg

SEQ ID NO: 165947 - DNA, 30 bp, Artificial Sequence
  Synthetic oligonucleotide
tgagatgcgtagcccaggtaccactagctg

SEQ ID NO: 165948 - DNA, 30 bp, Artificial Sequence
  Synthetic oligonucleotide
ggttaagagcaccttaagtggttgtagctg

SEQ ID NO: 165949 - DNA, 30 bp, Artificial Sequence
  Synthetic oligonucleotide
gtcatacgttgtaaaggatgattaacgctg

SEQ ID NO: 165950 - DNA, 30 bp, Artificial Sequence
  Synthetic oligonucleotide
ccgggtgctgttttggccgtgcccacgctg

SEQ ID NO: 165951 - DNA, 30 bp, Artificial Sequence
  Synthetic oligonucleotide
tcggtgtatctgcgttaaacaatcacgctg

SEQ ID NO: 165952 - DNA, 30 bp, Artificial Sequence
  Synthetic oligonucleotide
atgcgataagttagaacagatctcacgctg

SEQ ID NO: 165953 - DNA, 30 bp, Artificial Sequence
  Synthetic oligonucleotide
gaactaacgagtgatgagtgttctacgctg

SEQ ID NO: 165954 - DNA, 30 bp, Artificial Sequence
  Synthetic oligonucleotide
cccaggatgtcgaaaacgtgatgtacgctg

SEQ ID NO: 165955 - DNA, 30 bp, Artificial Sequence
  Synthetic oligonucleotide
gggcatgcgccacactcccagtttacgctg

SEQ ID NO: 165956 - DNA, 30 bp, Artificial Sequence
  Synthetic oligonucleotide
ctactcatataaggtgcgtccaaaccgctg

SEQ ID NO: 165957 - DNA, 30 bp, Artificial Sequence
  Synthetic oligonucleotide
acgggaccgcaagtgtctgtgccaccgctg

SEQ ID NO: 165958 - DNA, 30 bp, Artificial Sequence
  Synthetic oligonucleotide
aacacgtacaaaaagtcagcaaccccgctg

SEQ ID NO: 165959 - DNA, 30 bp, Artificial Sequence
  Synthetic oligonucleotide
agtccactcttgactgttaagcgtccgctg

SEQ ID NO: 165960 - DNA, 30 bp, Artificial Sequence
  Synthetic oligonucleotide
acgttctcactggtgttattgtaagcgctg

SEQ ID NO: 165961 - DNA, 30 bp, Artificial Sequence
  Synthetic oligonucleotide
tggactgtccgtgttgacatgctctcgctg

SEQ ID NO: 165962 - DNA, 30 bp, Artificial Sequence
  Synthetic oligonucleotide
tcctgggtaatggagtcggcgtgaaggctg

SEQ ID NO: 165963 - DNA, 30 bp, Artificial Sequence
  Synthetic oligonucleotide
tgtgttgtgtattaacaaccgaccaggctg

SEQ ID NO: 165964 - DNA, 30 bp, Artificial Sequence
  Synthetic oligonucleotide
taaacggcggctcatacgcataccaggctg

SEQ ID NO: 165965 - DNA, 30 bp, Artificial Sequence
  Synthetic oligonucleotide
gacatgcaaatattatgctcacccaggctg

SEQ ID NO: 165966 - DNA, 30 bp, Artificial Sequence
  Synthetic oligonucleotide
acccatagtcattcgctaacgcggaggctg

SEQ ID NO: 165967 - DNA, 30 bp, Artificial Sequence
  Synthetic oligonucleotide
tagttatagataatatccagtattaggctg

SEQ ID NO: 165968 - DNA, 30 bp, Artificial Sequence
  Synthetic oligonucleotide
taactcaggtatatggcgtaacttaggctg

SEQ ID NO: 165969 - DNA, 30 bp, Artificial Sequence
  Synthetic oligonucleotide
tgaggcgcactggttagcaaataccggctg

SEQ ID NO: 165970 - DNA, 30 bp, Artificial Sequence
  Synthetic oligonucleotide
gatcattcaaagcaaataccctgccggctg

SEQ ID NO: 165971 - DNA, 30 bp, Artificial Sequence
  Synthetic oligonucleotide
ttacattactaaagggatccataatggctg

SEQ ID NO: 165972 - DNA, 30 bp, Artificial Sequence
  Synthetic oligonucleotide
tgtcttagcggaagaggaacttagtggctg

SEQ ID NO: 165973 - DNA, 30 bp, Artificial Sequence
  Synthetic oligonucleotide
tgactggctgagccttcgaaggggtggctg

SEQ ID NO: 165974 - DNA, 30 bp, Artificial Sequence
  Synthetic oligonucleotide
ctcagttatgggttacgatggggcatgctg

SEQ ID NO: 165975 - DNA, 30 bp, Artificial Sequence
  Synthetic oligonucleotide
gcagccgtatcagcctgaggacgagtgctg

SEQ ID NO: 165976 - DNA, 30 bp, Artificial Sequence
  Synthetic oligonucleotide
ttggcttgcaaaggcgcaaaggtagtgctg

SEQ ID NO: 165977 - DNA, 30 bp, Artificial Sequence
  Synthetic oligonucleotide
tgatcaactgtatttttggggcaggtgctg

SEQ ID NO: 165978 - DNA, 30 bp, Artificial Sequence
  Synthetic oligonucleotide
gaagattcttgctgcagttggtgggtgctg

SEQ ID NO: 165979 - DNA, 30 bp, Artificial Sequence
  Synthetic oligonucleotide
atgcttagccggtcgagacatctggtgctg

SEQ ID NO: 165980 - DNA, 30 bp, Artificial Sequence
  Synthetic oligonucleotide
atttcgatagagatgcccttaagtgtgctg

SEQ ID NO: 165981 - DNA, 30 bp, Artificial Sequence
  Synthetic oligonucleotide
tgtgggatacggcggttagcatttgtgctg

SEQ ID NO: 165982 - DNA, 30 bp, Artificial Sequence
  Synthetic oligonucleotide
tactatcgggccgcgccaatgacaaatctg

SEQ ID NO: 165983 - DNA, 30 bp, Artificial Sequence
  Synthetic oligonucleotide
ggagatgaaggagctactatcaagaatctg

SEQ ID NO: 165984 - DNA, 30 bp, Artificial Sequence
  Synthetic oligonucleotide
acgcatttagctatatcagtatcgaatctg

SEQ ID NO: 165985 - DNA, 31 bp, Artificial Sequence
  Synthetic oligonucleotide
cataatggaacttggtgcatgtgcacatctg

SEQ ID NO: 165986 - DNA, 30 bp, Artificial Sequence
  Synthetic oligonucleotide
tatactaagcgagagggatccagacatctg

SEQ ID NO: 165987 - DNA, 30 bp, Artificial Sequence
  Synthetic oligonucleotide
gagtggaacctactctacccttgacatctg

SEQ ID NO: 165988 - DNA, 30 bp, Artificial Sequence
  Synthetic oligonucleotide
cgactttgactaggagtctttgtccatctg

SEQ ID NO: 165989 - DNA, 30 bp, Artificial Sequence
  Synthetic oligonucleotide
gctcaatgcgcatggcttcttttccatctg

SEQ ID NO: 165990 - DNA, 30 bp, Artificial Sequence
  Synthetic oligonucleotide
aacggaggggtgccgatggcagaagatctg

SEQ ID NO: 165991 - DNA, 30 bp, Artificial Sequence
  Synthetic oligonucleotide
ggaagatgttttcggataagtgtcgatctg

SEQ ID NO: 165992 - DNA, 30 bp, Artificial Sequence
  Synthetic oligonucleotide
agtaatgacaaggacagactggctgatctg

SEQ ID NO: 165993 - DNA, 30 bp, Artificial Sequence
  Synthetic oligonucleotide
agatagacaacttgaccctatgcatatctg

SEQ ID NO: 165994 - DNA, 30 bp, Artificial Sequence
  Synthetic oligonucleotide
gtgctgggaagtttggccgtcacgtatctg

SEQ ID NO: 165995 - DNA, 30 bp, Artificial Sequence
  Synthetic oligonucleotide
ctaagcgcataagctagtgagcattatctg

SEQ ID NO: 165996 - DNA, 30 bp, Artificial Sequence
  Synthetic oligonucleotide
ataataactaataggcgttcgtccactctg

SEQ ID NO: 165997 - DNA, 30 bp, Artificial Sequence
  Synthetic oligonucleotide
gggacacactactattaaagggtgactctg

SEQ ID NO: 165998 - DNA, 30 bp, Artificial Sequence
  Synthetic oligonucleotide
gtgtcagtactacaagtagggtctactctg

SEQ ID NO: 165999 - DNA, 30 bp, Artificial Sequence
  Synthetic oligonucleotide
tgcattttcccgagtgagaggggtactctg

SEQ ID NO: 166000 - DNA, 30 bp, Artificial Sequence
  Synthetic oligonucleotide
caatatgtctcataaagcgtgacatctctg

SEQ ID NO: 166001 - DNA, 30 bp, Artificial Sequence
  Synthetic oligonucleotide
aagcgcgtcaaattgttccacatatctctg

SEQ ID NO: 166002 - DNA, 30 bp, Artificial Sequence
  Synthetic oligonucleotide
aggacctcgcgctttacaaccatatctctg

SEQ ID NO: 166003 - DNA, 30 bp, Artificial Sequence
  Synthetic oligonucleotide
ccaggcccaagctactcaagttactctctg

SEQ ID NO: 166004 - DNA, 29 bp, Artificial Sequence
  Synthetic oligonucleotide
ggcggcatcagctcaccgtcgcttctctg

SEQ ID NO: 166005 - DNA, 30 bp, Artificial Sequence
  Synthetic oligonucleotide
tcatgaacccatttgttcattacaagtctg

SEQ ID NO: 166006 - DNA, 30 bp, Artificial Sequence
  Synthetic oligonucleotide
gcagagtgtcattcggtcgctagaagtctg

SEQ ID NO: 166007 - DNA, 30 bp, Artificial Sequence
  Synthetic oligonucleotide
ctgggccaccgatcggaacctcgcagtctg

SEQ ID NO: 166008 - DNA, 30 bp, Artificial Sequence
  Synthetic oligonucleotide
ggcagtagattaaagaaatgtaggagtctg

SEQ ID NO: 166009 - DNA, 30 bp, Artificial Sequence
  Synthetic oligonucleotide
gcggacgtccagaaccaagaatctagtctg

SEQ ID NO: 166010 - DNA, 30 bp, Artificial Sequence
  Synthetic oligonucleotide
taagccaagagggtctcgagagaacgtctg

SEQ ID NO: 166011 - DNA, 30 bp, Artificial Sequence
  Synthetic oligonucleotide
gcaaggaaaaacctaaaagtctatcgtctg

SEQ ID NO: 166012 - DNA, 30 bp, Artificial Sequence
  Synthetic oligonucleotide
tagtggatttaacagtaccaccgaggtctg

SEQ ID NO: 166013 - DNA, 30 bp, Artificial Sequence
  Synthetic oligonucleotide
tgcacaaaaacggctacaaacgtcggtctg

SEQ ID NO: 166014 - DNA, 30 bp, Artificial Sequence
  Synthetic oligonucleotide
ccgcggctagcaacttggtagactggtctg

SEQ ID NO: 166015 - DNA, 30 bp, Artificial Sequence
  Synthetic oligonucleotide
tgtggcagttaacattagtcgtgatgtctg

SEQ ID NO: 166016 - DNA, 30 bp, Artificial Sequence
  Synthetic oligonucleotide
tccacgggaaccccaagagtcagctgtctg

SEQ ID NO: 166017 - DNA, 30 bp, Artificial Sequence
  Synthetic oligonucleotide
aagtttagaataacatatagtccgtgtctg

SEQ ID NO: 166018 - DNA, 30 bp, Artificial Sequence
  Synthetic oligonucleotide
atgggtggacattcggcacgaatgtgtctg

SEQ ID NO: 166019 - DNA, 30 bp, Artificial Sequence
  Synthetic oligonucleotide
tcgaccggtatgatcttagtcgtttgtctg

SEQ ID NO: 166020 - DNA, 30 bp, Artificial Sequence
  Synthetic oligonucleotide
cataacggtccaaacacaataatcattctg

SEQ ID NO: 166021 - DNA, 30 bp, Artificial Sequence
  Synthetic oligonucleotide
tatcgacgggagagcatctacttcattctg

SEQ ID NO: 166022 - DNA, 30 bp, Artificial Sequence
  Synthetic oligonucleotide
cgtaaattcgtatgggcctgcttgattctg

SEQ ID NO: 166023 - DNA, 30 bp, Artificial Sequence
  Synthetic oligonucleotide
tcatataatgaaagcttgaggtatattctg

SEQ ID NO: 166024 - DNA, 30 bp, Artificial Sequence
  Synthetic oligonucleotide
tcatgtcttcgcctgtaccctacgcttctg

SEQ ID NO: 166025 - DNA, 31 bp, Artificial Sequence
  Synthetic oligonucleotide
caagatcatacaatcggtacggagagttctg

SEQ ID NO: 166026 - DNA, 30 bp, Artificial Sequence
  Synthetic oligonucleotide
taacaggcatgggagaggggtagcgttctg

SEQ ID NO: 166027 - DNA, 30 bp, Artificial Sequence
  Synthetic oligonucleotide
actgcagccaaccaaatggagcaggttctg

SEQ ID NO: 166028 - DNA, 30 bp, Artificial Sequence
  Synthetic oligonucleotide
agctctccatcaggtaatgccttatttctg

SEQ ID NO: 166029 - DNA, 30 bp, Artificial Sequence
  Synthetic oligonucleotide
tgtacggagccgcctcaaagtccgtttctg

SEQ ID NO: 166030 - DNA, 30 bp, Artificial Sequence
  Synthetic oligonucleotide
accatatttgttatgccagggagaaaagtg

SEQ ID NO: 166031 - DNA, 30 bp, Artificial Sequence
  Synthetic oligonucleotide
ctcacatgtatttgtcaattttggaaagtg

SEQ ID NO: 166032 - DNA, 30 bp, Artificial Sequence
  Synthetic oligonucleotide
atctgtgcagttccttcagggagtaaagtg

SEQ ID NO: 166033 - DNA, 30 bp, Artificial Sequence
  Synthetic oligonucleotide
ctgaccctcgggctggccaaacgtaaagtg

SEQ ID NO: 166034 - DNA, 30 bp, Artificial Sequence
  Synthetic oligonucleotide
caaaatttactgcaatacgcttgtaaagtg

SEQ ID NO: 166035 - DNA, 30 bp, Artificial Sequence
  Synthetic oligonucleotide
atcctcacaagaaaagcagacgaacaagtg

SEQ ID NO: 166036 - DNA, 30 bp, Artificial Sequence
  Synthetic oligonucleotide
tctggttgattgtctcgtaagacccaagtg

SEQ ID NO: 166037 - DNA, 30 bp, Artificial Sequence
  Synthetic oligonucleotide
gccaaagatcagtggtttagcgagcaagtg

SEQ ID NO: 166038 - DNA, 30 bp, Artificial Sequence
  Synthetic oligonucleotide
agttagtgggatggtgggcaggcgcaagtg

SEQ ID NO: 166039 - DNA, 30 bp, Artificial Sequence
  Synthetic oligonucleotide
gtccgttaccaggaagtggctgggcaagtg

SEQ ID NO: 166040 - DNA, 30 bp, Artificial Sequence
  Synthetic oligonucleotide
gtaagcggcgtcgtcgacagtgtgcaagtg

SEQ ID NO: 166041 - DNA, 30 bp, Artificial Sequence
  Synthetic oligonucleotide
aggagccagcggggtatgcataatcaagtg

SEQ ID NO: 166042 - DNA, 30 bp, Artificial Sequence
  Synthetic oligonucleotide
aataaaccgctaataaaggtttatcaagtg

SEQ ID NO: 166043 - DNA, 30 bp, Artificial Sequence
  Synthetic oligonucleotide
tagtcgtctagtacgtagtctcgtcaagtg

SEQ ID NO: 166044 - DNA, 30 bp, Artificial Sequence
  Synthetic oligonucleotide
tttgactataagcggtggaggtgcgaagtg

SEQ ID NO: 166045 - DNA, 30 bp, Artificial Sequence
  Synthetic oligonucleotide
tgttggaccgttagaaagtattaggaagtg

SEQ ID NO: 166046 - DNA, 30 bp, Artificial Sequence
  Synthetic oligonucleotide
atttgccacccatctctaacctatgaagtg

SEQ ID NO: 166047 - DNA, 30 bp, Artificial Sequence
  Synthetic oligonucleotide
agtgaaaaatgtatatcgggcggtgaagtg

SEQ ID NO: 166048 - DNA, 30 bp, Artificial Sequence
  Synthetic oligonucleotide
catagaagtccgctagaaaggtttgaagtg

SEQ ID NO: 166049 - DNA, 30 bp, Artificial Sequence
  Synthetic oligonucleotide
tatttagggatagaggctggtggctaagtg

SEQ ID NO: 166050 - DNA, 30 bp, Artificial Sequence
  Synthetic oligonucleotide
catgcggacttgctcgggtgcgattaagtg

SEQ ID NO: 166051 - DNA, 30 bp, Artificial Sequence
  Synthetic oligonucleotide
ggaccacggtaccaaacagtcccttaagtg

SEQ ID NO: 166052 - DNA, 30 bp, Artificial Sequence
  Synthetic oligonucleotide
tccgggacttattattcaacacgaacagtg

SEQ ID NO: 166053 - DNA, 30 bp, Artificial Sequence
  Synthetic oligonucleotide
gacgccggagctaggccgccctgaacagtg

SEQ ID NO: 166054 - DNA, 30 bp, Artificial Sequence
  Synthetic oligonucleotide
cgttttctttgggatctataggtaacagtg

SEQ ID NO: 166055 - DNA, 30 bp, Artificial Sequence
  Synthetic oligonucleotide
taatccaatccttccctacgcaagacagtg

SEQ ID NO: 166056 - DNA, 30 bp, Artificial Sequence
  Synthetic oligonucleotide
tattgaggaatgacaagtaataagacagtg

SEQ ID NO: 166057 - DNA, 30 bp, Artificial Sequence
  Synthetic oligonucleotide
tagggaggtacaatcgcgctagatacagtg

SEQ ID NO: 166058 - DNA, 30 bp, Artificial Sequence
  Synthetic oligonucleotide
ccgtcttataggtatacacatggaccagtg

SEQ ID NO: 166059 - DNA, 30 bp, Artificial Sequence
  Synthetic oligonucleotide
ttctcgagagagcagcaaagaacagcagtg

SEQ ID NO: 166060 - DNA, 30 bp, Artificial Sequence
  Synthetic oligonucleotide
tacaacctgcctgcgactgcaagagcagtg

SEQ ID NO: 166061 - DNA, 30 bp, Artificial Sequence
  Synthetic oligonucleotide
ttaaagaggcaacgtcaaattttagcagtg

SEQ ID NO: 166062 - DNA, 30 bp, Artificial Sequence
  Synthetic oligonucleotide
gatagatacatatatactcggcccgcagtg

SEQ ID NO: 166063 - DNA, 30 bp, Artificial Sequence
  Synthetic oligonucleotide
acggacaggtaccgttcattgcgcgcagtg

SEQ ID NO: 166064 - DNA, 30 bp, Artificial Sequence
  Synthetic oligonucleotide
ctaatgatctaactgatacggtgtgcagtg

SEQ ID NO: 166065 - DNA, 30 bp, Artificial Sequence
  Synthetic oligonucleotide
tttctcgcaaggtttcgtaaaacatcagtg

SEQ ID NO: 166066 - DNA, 30 bp, Artificial Sequence
  Synthetic oligonucleotide
tacggtgcgcgtgccacagaatcatcagtg

SEQ ID NO: 166067 - DNA, 30 bp, Artificial Sequence
  Synthetic oligonucleotide
tgcgacttaggaagtattcggtactcagtg

SEQ ID NO: 166068 - DNA, 30 bp, Artificial Sequence
  Synthetic oligonucleotide
cgttaagcacaactaggtagcagctcagtg

SEQ ID NO: 166069 - DNA, 30 bp, Artificial Sequence
  Synthetic oligonucleotide
acccttcaggcaatgatatacatctcagtg

SEQ ID NO: 166070 - DNA, 30 bp, Artificial Sequence
  Synthetic oligonucleotide
ccagtaataatgtgcggaggttgttcagtg

SEQ ID NO: 166071 - DNA, 30 bp, Artificial Sequence
  Synthetic oligonucleotide
acttcttaggactatttgtcgatttcagtg

SEQ ID NO: 166072 - DNA, 30 bp, Artificial Sequence
  Synthetic oligonucleotide
cggatacaggaaagtttgcacatgagagtg

SEQ ID NO: 166073 - DNA, 30 bp, Artificial Sequence
  Synthetic oligonucleotide
cgatcaggaccaacgcagcaagctagagtg

SEQ ID NO: 166074 - DNA, 30 bp, Artificial Sequence
  Synthetic oligonucleotide
tctgggcgtattacccgtacttgtagagtg

SEQ ID NO: 166075 - DNA, 30 bp, Artificial Sequence
  Synthetic oligonucleotide
aaattgtagacatactgaggttcaggagtg

SEQ ID NO: 166076 - DNA, 30 bp, Artificial Sequence
  Synthetic oligonucleotide
aataatgtgtccatcggtgctggcggagtg

SEQ ID NO: 166077 - DNA, 30 bp, Artificial Sequence
  Synthetic oligonucleotide
tactaagatatttaaagtttgttatgagtg

SEQ ID NO: 166078 - DNA, 30 bp, Artificial Sequence
  Synthetic oligonucleotide
ttcatagtgtgatttggtcggcactgagtg

SEQ ID NO: 166079 - DNA, 30 bp, Artificial Sequence
  Synthetic oligonucleotide
ggatcctagggcggttcagtactttgagtg

SEQ ID NO: 166080 - DNA, 30 bp, Artificial Sequence
  Synthetic oligonucleotide
cctcaaaccgattgaaaatctacaatagtg

SEQ ID NO: 166081 - DNA, 30 bp, Artificial Sequence
  Synthetic oligonucleotide
tgaacgacccaaaggcggttgtagatagtg

SEQ ID NO: 166082 - DNA, 30 bp, Artificial Sequence
  Synthetic oligonucleotide
aagacacagctcaagtacgatgggatagtg

SEQ ID NO: 166083 - DNA, 30 bp, Artificial Sequence
  Synthetic oligonucleotide
ttgggtgcaggtgttcagaagaatatagtg

SEQ ID NO: 166084 - DNA, 30 bp, Artificial Sequence
  Synthetic oligonucleotide
cgccaatccaaattgtcaagatatatagtg

SEQ ID NO: 166085 - DNA, 30 bp, Artificial Sequence
  Synthetic oligonucleotide
cgccagtgagtgaaatactattgtatagtg

SEQ ID NO: 166086 - DNA, 30 bp, Artificial Sequence
  Synthetic oligonucleotide
cagtaaatacgccatattttatgcctagtg

SEQ ID NO: 166087 - DNA, 30 bp, Artificial Sequence
  Synthetic oligonucleotide
cggtatctccgaagggagatcttcctagtg

SEQ ID NO: 166088 - DNA, 30 bp, Artificial Sequence
  Synthetic oligonucleotide
ggacgacaagaatatgttgcactcgtagtg

SEQ ID NO: 166089 - DNA, 30 bp, Artificial Sequence
  Synthetic oligonucleotide
cgtcatgaaattactgatcgctgggtagtg

SEQ ID NO: 166090 - DNA, 30 bp, Artificial Sequence
  Synthetic oligonucleotide
tgacttctgaagacagaaataatggtagtg

SEQ ID NO: 166091 - DNA, 30 bp, Artificial Sequence
  Synthetic oligonucleotide
aactgaggtaaattcattacagctgtagtg

SEQ ID NO: 166092 - DNA, 30 bp, Artificial Sequence
  Synthetic oligonucleotide
gtgaagtgctcagtaacatacgttgtagtg

SEQ ID NO: 166093 - DNA, 30 bp, Artificial Sequence
  Synthetic oligonucleotide
ataaaatgaatcgtaaatcccggattagtg

SEQ ID NO: 166094 - DNA, 30 bp, Artificial Sequence
  Synthetic oligonucleotide
gaaccgttcgtggatctgtagggattagtg

SEQ ID NO: 166095 - DNA, 30 bp, Artificial Sequence
  Synthetic oligonucleotide
gcgatgggctgctccaaacgcaagttagtg

SEQ ID NO: 166096 - DNA, 30 bp, Artificial Sequence
  Synthetic oligonucleotide
aatgccggtgggggttggagtgagttagtg

SEQ ID NO: 166097 - DNA, 30 bp, Artificial Sequence
  Synthetic oligonucleotide
tagtatggtcagttcatcaatggaaacgtg

SEQ ID NO: 166098 - DNA, 30 bp, Artificial Sequence
  Synthetic oligonucleotide
tccaaaactatcgtggctcgacacaacgtg

SEQ ID NO: 166099 - DNA, 30 bp, Artificial Sequence
  Synthetic oligonucleotide
gtggacggtgtaatacggcagccgaacgtg

SEQ ID NO: 166100 - DNA, 30 bp, Artificial Sequence
  Synthetic oligonucleotide
gggcatccaccatgcatgttacggcacgtg

SEQ ID NO: 166101 - DNA, 30 bp, Artificial Sequence
  Synthetic oligonucleotide
cgatccgacgcacggggatgctggcacgtg

SEQ ID NO: 166102 - DNA, 30 bp, Artificial Sequence
  Synthetic oligonucleotide
aaggaagtatatgttgcttgaaaagacgtg

SEQ ID NO: 166103 - DNA, 30 bp, Artificial Sequence
  Synthetic oligonucleotide
ggctcgaataaccttaatgcagaagacgtg

SEQ ID NO: 166104 - DNA, 28 bp, Artificial Sequence
  Synthetic oligonucleotide
ccaatcgaaacgcccaaatacgtacgtg

SEQ ID NO: 166105 - DNA, 30 bp, Artificial Sequence
  Synthetic oligonucleotide
taggtactctatatcgagaggggttacgtg

SEQ ID NO: 166106 - DNA, 30 bp, Artificial Sequence
  Synthetic oligonucleotide
tatcactgcctgtatagctacgtttacgtg

SEQ ID NO: 166107 - DNA, 30 bp, Artificial Sequence
  Synthetic oligonucleotide
ctaaggattcgctgtcagacgagaaccgtg

SEQ ID NO: 166108 - DNA, 30 bp, Artificial Sequence
  Synthetic oligonucleotide
ctaacctctatctggagctcacgaaccgtg

SEQ ID NO: 166109 - DNA, 30 bp, Artificial Sequence
  Synthetic oligonucleotide
tgtgggtctatgagctaggacttcaccgtg

SEQ ID NO: 166110 - DNA, 30 bp, Artificial Sequence
  Synthetic oligonucleotide
ataatattagccgtctcctgtgtccccgtg

SEQ ID NO: 166111 - DNA, 30 bp, Artificial Sequence
  Synthetic oligonucleotide
ggaaatccagaaccagttaattcgcccgtg

SEQ ID NO: 166112 - DNA, 30 bp, Artificial Sequence
  Synthetic oligonucleotide
gtaagtctgggttctgcgagtcttcccgtg

SEQ ID NO: 166113 - DNA, 30 bp, Artificial Sequence
  Synthetic oligonucleotide
tacgacttggctttccgttttacggccgtg

SEQ ID NO: 166114 - DNA, 30 bp, Artificial Sequence
  Synthetic oligonucleotide
ggccggtaaatcaacggagcttcggccgtg

SEQ ID NO: 166115 - DNA, 30 bp, Artificial Sequence
  Synthetic oligonucleotide
acgttggcttttaataactatcctgccgtg

SEQ ID NO: 166116 - DNA, 30 bp, Artificial Sequence
  Synthetic oligonucleotide
tacacgggagactgagttatcctatccgtg

SEQ ID NO: 166117 - DNA, 30 bp, Artificial Sequence
  Synthetic oligonucleotide
gacacccgattatctaggatgatttccgtg

SEQ ID NO: 166118 - DNA, 30 bp, Artificial Sequence
  Synthetic oligonucleotide
gggaatatcaaaacttgctactgaagcgtg

SEQ ID NO: 166119 - DNA, 30 bp, Artificial Sequence
  Synthetic oligonucleotide
gtattggggtgtcatacgtaagacagcgtg

SEQ ID NO: 166120 - DNA, 30 bp, Artificial Sequence
  Synthetic oligonucleotide
actgtcgttagctatcgacaaaaacgcgtg

SEQ ID NO: 166121 - DNA, 30 bp, Artificial Sequence
  Synthetic oligonucleotide
ccatcttcaagaatatgggagggccgcgtg

SEQ ID NO: 166122 - DNA, 30 bp, Artificial Sequence
  Synthetic oligonucleotide
atgattcgtaactgaaggctacagcgcgtg

SEQ ID NO: 166123 - DNA, 30 bp, Artificial Sequence
  Synthetic oligonucleotide
gtcgtggggcaataatcatactatcgcgtg

SEQ ID NO: 166124 - DNA, 30 bp, Artificial Sequence
  Synthetic oligonucleotide
gcaacagatatcacatcaaggcacggcgtg

SEQ ID NO: 166125 - DNA, 30 bp, Artificial Sequence
  Synthetic oligonucleotide
cctatttttacgttcaggtatctgggcgtg

SEQ ID NO: 166126 - DNA, 30 bp, Artificial Sequence
  Synthetic oligonucleotide
gtttgaggtcaccgcgggccagaatgcgtg

SEQ ID NO: 166127 - DNA, 30 bp, Artificial Sequence
  Synthetic oligonucleotide
tggacgtccggtggaccagtgttctgcgtg

SEQ ID NO: 166128 - DNA, 30 bp, Artificial Sequence
  Synthetic oligonucleotide
aggacagtcacattacttcacgtcatcgtg

SEQ ID NO: 166129 - DNA, 30 bp, Artificial Sequence
  Synthetic oligonucleotide
gatcttgatgctactactgtatgactcgtg

SEQ ID NO: 166130 - DNA, 30 bp, Artificial Sequence
  Synthetic oligonucleotide
ttaggtgtatgcgctaaattctcgctcgtg

SEQ ID NO: 166131 - DNA, 30 bp, Artificial Sequence
  Synthetic oligonucleotide
caggtggtcctagataatgcatgtctcgtg

SEQ ID NO: 166132 - DNA, 30 bp, Artificial Sequence
  Synthetic oligonucleotide
aggattaatcatgaaatgataaccgtcgtg

SEQ ID NO: 166133 - DNA, 30 bp, Artificial Sequence
  Synthetic oligonucleotide
cgttcctgttgaaatggcaaactcgtcgtg

SEQ ID NO: 166134 - DNA, 30 bp, Artificial Sequence
  Synthetic oligonucleotide
gaatgcggaggaaatgattaatggttcgtg

SEQ ID NO: 166135 - DNA, 30 bp, Artificial Sequence
  Synthetic oligonucleotide
tctgcctagatacacggagactggttcgtg

SEQ ID NO: 166136 - DNA, 30 bp, Artificial Sequence
  Synthetic oligonucleotide
catggctgatgtcctgtcagccaaaaggtg

SEQ ID NO: 166137 - DNA, 30 bp, Artificial Sequence
  Synthetic oligonucleotide
ttaatccatatggtgttaggactcaaggtg

SEQ ID NO: 166138 - DNA, 30 bp, Artificial Sequence
  Synthetic oligonucleotide
gtggacagatcccggtctaagaagaaggtg

SEQ ID NO: 166139 - DNA, 30 bp, Artificial Sequence
  Synthetic oligonucleotide
gggggcggtcaagcactgtcttagaaggtg

SEQ ID NO: 166140 - DNA, 30 bp, Artificial Sequence
  Synthetic oligonucleotide
gccgatttggatcgcgcgtaggcgaaggtg

SEQ ID NO: 166141 - DNA, 30 bp, Artificial Sequence
  Synthetic oligonucleotide
tgcgtaagcacgcacgttaaaaataaggtg

SEQ ID NO: 166142 - DNA, 30 bp, Artificial Sequence
  Synthetic oligonucleotide
accagcaggtggtgtcccgtgtataaggtg

SEQ ID NO: 166143 - DNA, 30 bp, Artificial Sequence
  Synthetic oligonucleotide
cccaaatatgaattggggaaaattaaggtg

SEQ ID NO: 166144 - DNA, 30 bp, Artificial Sequence
  Synthetic oligonucleotide
tggtgtaggtcgttacccaacctccaggtg

SEQ ID NO: 166145 - DNA, 30 bp, Artificial Sequence
  Synthetic oligonucleotide
ttaggtgtaagggaggatacgttccaggtg

SEQ ID NO: 166146 - DNA, 30 bp, Artificial Sequence
  Synthetic oligonucleotide
tagggcggtaccctggttcaggatcaggtg

SEQ ID NO: 166147 - DNA, 30 bp, Artificial Sequence
  Synthetic oligonucleotide
gttcggcgtgactggggcatgactcaggtg

SEQ ID NO: 166148 - DNA, 30 bp, Artificial Sequence
  Synthetic oligonucleotide
agcaccgtgatgggaagtgttcaggaggtg

SEQ ID NO: 166149 - DNA, 30 bp, Artificial Sequence
  Synthetic oligonucleotide
tgtagaagcagctaacataatccggaggtg

SEQ ID NO: 166150 - DNA, 30 bp, Artificial Sequence
  Synthetic oligonucleotide
tagggaagggtattacagacacgggaggtg

SEQ ID NO: 166151 - DNA, 30 bp, Artificial Sequence
  Synthetic oligonucleotide
ttcgcgggggcgggagattgacgggaggtg

SEQ ID NO: 166152 - DNA, 30 bp, Artificial Sequence
  Synthetic oligonucleotide
atcaggtcggtgccacgggcatgtgaggtg

SEQ ID NO: 166153 - DNA, 30 bp, Artificial Sequence
  Synthetic oligonucleotide
atgcgcaattgcatttttccgggttaggtg

SEQ ID NO: 166154 - DNA, 30 bp, Artificial Sequence
  Synthetic oligonucleotide
cttaaatagcattaaacgagctgttaggtg

SEQ ID NO: 166155 - DNA, 30 bp, Artificial Sequence
  Synthetic oligonucleotide
cctcgggcaaaaagagtcgaggtttaggtg

SEQ ID NO: 166156 - DNA, 27 bp, Artificial Sequence
  Synthetic oligonucleotide
cgacattcgcagcaagtttaaacggtg

SEQ ID NO: 166157 - DNA, 30 bp, Artificial Sequence
  Synthetic oligonucleotide
cacgcaggaatggcaggtgactgaacggtg

SEQ ID NO: 166158 - DNA, 30 bp, Artificial Sequence
  Synthetic oligonucleotide
cgggatggaggaacacatacagccacggtg

SEQ ID NO: 166159 - DNA, 30 bp, Artificial Sequence
  Synthetic oligonucleotide
cggtcaaaagaatatcttccggtcacggtg

SEQ ID NO: 166160 - DNA, 30 bp, Artificial Sequence
  Synthetic oligonucleotide
tcggttgtatccaagaatgagacgacggtg

SEQ ID NO: 166161 - DNA, 30 bp, Artificial Sequence
  Synthetic oligonucleotide
aattctacggcacatcaggacgggacggtg

SEQ ID NO: 166162 - DNA, 30 bp, Artificial Sequence
  Synthetic oligonucleotide
acggtgttaagggagaatgcgggtacggtg

SEQ ID NO: 166163 - DNA, 30 bp, Artificial Sequence
  Synthetic oligonucleotide
agggaaattaaaccatgctatataccggtg

SEQ ID NO: 166164 - DNA, 30 bp, Artificial Sequence
  Synthetic oligonucleotide
agagtgcctcgtatttcaaatcagccggtg

SEQ ID NO: 166165 - DNA, 30 bp, Artificial Sequence
  Synthetic oligonucleotide
gctcattaatgacgatcgtttggtccggtg

SEQ ID NO: 166166 - DNA, 30 bp, Artificial Sequence
  Synthetic oligonucleotide
cagttgagagtgccttatgtcttagcggtg

SEQ ID NO: 166167 - DNA, 30 bp, Artificial Sequence
  Synthetic oligonucleotide
cgcgggggtcaaggttgatggaccgcggtg

SEQ ID NO: 166168 - DNA, 30 bp, Artificial Sequence
  Synthetic oligonucleotide
tataataggtagagactgaatgatgcggtg

SEQ ID NO: 166169 - DNA, 30 bp, Artificial Sequence
  Synthetic oligonucleotide
agtgttcatccggataacttgtatgcggtg

SEQ ID NO: 166170 - DNA, 30 bp, Artificial Sequence
  Synthetic oligonucleotide
cctctcccgcaatgctagattatatcggtg

SEQ ID NO: 166171 - DNA, 30 bp, Artificial Sequence
  Synthetic oligonucleotide
atcaacatcgatagctagcgattatcggtg

SEQ ID NO: 166172 - DNA, 30 bp, Artificial Sequence
  Synthetic oligonucleotide
ctgcatgggtaaaactgggctgactcggtg

SEQ ID NO: 166173 - DNA, 30 bp, Artificial Sequence
  Synthetic oligonucleotide
gtacagtgggaattaggtactccgtcggtg

SEQ ID NO: 166174 - DNA, 30 bp, Artificial Sequence
  Synthetic oligonucleotide
acaagaaggtcagtttacgattcaagggtg

SEQ ID NO: 166175 - DNA, 30 bp, Artificial Sequence
  Synthetic oligonucleotide
tagtgtcgaagtatatttggccccagggtg

SEQ ID NO: 166176 - DNA, 30 bp, Artificial Sequence
  Synthetic oligonucleotide
ggtgcgggcactagaagcattatcagggtg

SEQ ID NO: 166177 - DNA, 30 bp, Artificial Sequence
  Synthetic oligonucleotide
aggtggctctgagcgagtggttagagggtg

SEQ ID NO: 166178 - DNA, 30 bp, Artificial Sequence
  Synthetic oligonucleotide
gagactctatcagagtagacacatagggtg

SEQ ID NO: 166179 - DNA, 30 bp, Artificial Sequence
  Synthetic oligonucleotide
cgcaaggaaagtcctggagcacgtagggtg

SEQ ID NO: 166180 - DNA, 30 bp, Artificial Sequence
  Synthetic oligonucleotide
aatcggccgggaaagtactttcgtcgggtg

SEQ ID NO: 166181 - DNA, 30 bp, Artificial Sequence
  Synthetic oligonucleotide
gggacgggtttctcggcagggggtcgggtg

SEQ ID NO: 166182 - DNA, 30 bp, Artificial Sequence
  Synthetic oligonucleotide
tctcaccttacggttataaacgttcgggtg

SEQ ID NO: 166183 - DNA, 30 bp, Artificial Sequence
  Synthetic oligonucleotide
ccagacctaaaaatgcatcaatttcgggtg

SEQ ID NO: 166184 - DNA, 30 bp, Artificial Sequence
  Synthetic oligonucleotide
taaaaggccgttataactcaacgaggggtg

SEQ ID NO: 166185 - DNA, 30 bp, Artificial Sequence
  Synthetic oligonucleotide
ggtcttacactgcattctttcttaggggtg

SEQ ID NO: 166186 - DNA, 30 bp, Artificial Sequence
  Synthetic oligonucleotide
cattagcctgcgaacccagacatcggggtg

SEQ ID NO: 166187 - DNA, 30 bp, Artificial Sequence
  Synthetic oligonucleotide
cagagaagtgttgcggcggggaagggggtg

SEQ ID NO: 166188 - DNA, 30 bp, Artificial Sequence
  Synthetic oligonucleotide
agggtcctgtgaaagtggatccaatgggtg

SEQ ID NO: 166189 - DNA, 30 bp, Artificial Sequence
  Synthetic oligonucleotide
ccgagtccgacgtttgacatgtaaatggtg

SEQ ID NO: 166190 - DNA, 30 bp, Artificial Sequence
  Synthetic oligonucleotide
aatgatgggacaggctcggttacaatggtg

SEQ ID NO: 166191 - DNA, 30 bp, Artificial Sequence
  Synthetic oligonucleotide
gatcaatcccgcgtaatacttcgcatggtg

SEQ ID NO: 166192 - DNA, 30 bp, Artificial Sequence
  Synthetic oligonucleotide
tgcatgcctccggaggaaggtttgatggtg

SEQ ID NO: 166193 - DNA, 30 bp, Artificial Sequence
  Synthetic oligonucleotide
tgcgtgattgcgctgaacaagaatatggtg

SEQ ID NO: 166194 - DNA, 30 bp, Artificial Sequence
  Synthetic oligonucleotide
gggcatcgccccctacgtagttctatggtg

SEQ ID NO: 166195 - DNA, 30 bp, Artificial Sequence
  Synthetic oligonucleotide
atgagtacttctacttctagctcactggtg

SEQ ID NO: 166196 - DNA, 30 bp, Artificial Sequence
  Synthetic oligonucleotide
tgtgagaattacgggtccgaaagcctggtg

SEQ ID NO: 166197 - DNA, 30 bp, Artificial Sequence
  Synthetic oligonucleotide
catatataaggggatcaacgggggctggtg

SEQ ID NO: 166198 - DNA, 30 bp, Artificial Sequence
  Synthetic oligonucleotide
ctacctccaccactaatcgaccgtctggtg

SEQ ID NO: 166199 - DNA, 30 bp, Artificial Sequence
  Synthetic oligonucleotide
atgactgcatacgtaccggggctattggtg

SEQ ID NO: 166200 - DNA, 30 bp, Artificial Sequence
  Synthetic oligonucleotide
ctgcgtagccctagcactatcaatttggtg

SEQ ID NO: 166201 - DNA, 30 bp, Artificial Sequence
  Synthetic oligonucleotide
tgcaaaggccaactctgtatacatttggtg

SEQ ID NO: 166202 - DNA, 30 bp, Artificial Sequence
  Synthetic oligonucleotide
gcagacgcgataggcatctacataaatgtg

SEQ ID NO: 166203 - DNA, 30 bp, Artificial Sequence
  Synthetic oligonucleotide
tagatcttaccgtccagttgtttaaatgtg

SEQ ID NO: 166204 - DNA, 30 bp, Artificial Sequence
  Synthetic oligonucleotide
ccaggcgcaatatattcagatcttaatgtg

SEQ ID NO: 166205 - DNA, 30 bp, Artificial Sequence
  Synthetic oligonucleotide
gcgcatatgaacacacgtccgtcacatgtg

SEQ ID NO: 166206 - DNA, 30 bp, Artificial Sequence
  Synthetic oligonucleotide
tctctagatgtgcatcggggagtccatgtg

SEQ ID NO: 166207 - DNA, 30 bp, Artificial Sequence
  Synthetic oligonucleotide
aacgctaaaattaataacgatgcagatgtg

SEQ ID NO: 166208 - DNA, 30 bp, Artificial Sequence
  Synthetic oligonucleotide
ccgaggcattacataccgcggagagatgtg

SEQ ID NO: 166209 - DNA, 30 bp, Artificial Sequence
  Synthetic oligonucleotide
taggaaactacggaatgcacgacggatgtg

SEQ ID NO: 166210 - DNA, 30 bp, Artificial Sequence
  Synthetic oligonucleotide
cgcagaggatcatcgcgaggtgcggatgtg

SEQ ID NO: 166211 - DNA, 30 bp, Artificial Sequence
  Synthetic oligonucleotide
ggagtcggctcgctgaccgatagggatgtg

SEQ ID NO: 166212 - DNA, 30 bp, Artificial Sequence
  Synthetic oligonucleotide
ggaaacaacggtacggagaagaatgatgtg

SEQ ID NO: 166213 - DNA, 30 bp, Artificial Sequence
  Synthetic oligonucleotide
gacggatccttggactagcaaggtgatgtg

SEQ ID NO: 166214 - DNA, 30 bp, Artificial Sequence
  Synthetic oligonucleotide
caacggggggtagcagggtcgtaatatgtg

SEQ ID NO: 166215 - DNA, 30 bp, Artificial Sequence
  Synthetic oligonucleotide
acagtagaatctctcaaactttagtatgtg

SEQ ID NO: 166216 - DNA, 30 bp, Artificial Sequence
  Synthetic oligonucleotide
aaagtccgggacacctggggattgtatgtg

SEQ ID NO: 166217 - DNA, 30 bp, Artificial Sequence
  Synthetic oligonucleotide
ttcagtacagtgaaaatctatcgcactgtg

SEQ ID NO: 166218 - DNA, 30 bp, Artificial Sequence
  Synthetic oligonucleotide
cgaattccaggtggactctctgggactgtg

SEQ ID NO: 166219 - DNA, 30 bp, Artificial Sequence
  Synthetic oligonucleotide
tgctcgggtctgttaagggagttgactgtg

SEQ ID NO: 166220 - DNA, 30 bp, Artificial Sequence
  Synthetic oligonucleotide
agagtaaaagattagtttcacacgcctgtg

SEQ ID NO: 166221 - DNA, 30 bp, Artificial Sequence
  Synthetic oligonucleotide
agaataagtctatgaagtacagtgcctgtg

SEQ ID NO: 166222 - DNA, 30 bp, Artificial Sequence
  Synthetic oligonucleotide
aaggctcccacggcgatagattgtgctgtg

SEQ ID NO: 166223 - DNA, 30 bp, Artificial Sequence
  Synthetic oligonucleotide
tcgtttatacagtacgtatatttatctgtg

SEQ ID NO: 166224 - DNA, 30 bp, Artificial Sequence
  Synthetic oligonucleotide
cagccacgctaggaaccagagagctctgtg

SEQ ID NO: 166225 - DNA, 30 bp, Artificial Sequence
  Synthetic oligonucleotide
tttgagcaataagcagcttaaccgtctgtg

SEQ ID NO: 166226 - DNA, 30 bp, Artificial Sequence
  Synthetic oligonucleotide
accagacagttaaacaattccagaagtgtg

SEQ ID NO: 166227 - DNA, 30 bp, Artificial Sequence
  Synthetic oligonucleotide
tggggggattggaaaggggggccgcgtgtg

SEQ ID NO: 166228 - DNA, 30 bp, Artificial Sequence
  Synthetic oligonucleotide
gcatgacccaaagggcggcactcgcgtgtg

SEQ ID NO: 166229 - DNA, 30 bp, Artificial Sequence
  Synthetic oligonucleotide
atatatgtattatcgaggcctaatcgtgtg

SEQ ID NO: 166230 - DNA, 30 bp, Artificial Sequence
  Synthetic oligonucleotide
ttagaacttttaaggctaggaataggtgtg

SEQ ID NO: 166231 - DNA, 30 bp, Artificial Sequence
  Synthetic oligonucleotide
ggggagctcggatgtgtaaactccggtgtg

SEQ ID NO: 166232 - DNA, 30 bp, Artificial Sequence
  Synthetic oligonucleotide
gtcgaagatgcgctcggcggtggtggtgtg

SEQ ID NO: 166233 - DNA, 30 bp, Artificial Sequence
  Synthetic oligonucleotide
gaagctagcgttgtgcatcatcaatgtgtg

SEQ ID NO: 166234 - DNA, 30 bp, Artificial Sequence
  Synthetic oligonucleotide
ttgagtatgtcaacacaccctctatgtgtg

SEQ ID NO: 166235 - DNA, 30 bp, Artificial Sequence
  Synthetic oligonucleotide
cacggctgtaggccatcgggtgagtgtgtg

SEQ ID NO: 166236 - DNA, 31 bp, Artificial Sequence
  Synthetic oligonucleotide
gtgactggccgtatgaaggcgttcgtgtgtg

SEQ ID NO: 166237 - DNA, 30 bp, Artificial Sequence
  Synthetic oligonucleotide
ctatccgggtcacttacattaagttgtgtg

SEQ ID NO: 166238 - DNA, 30 bp, Artificial Sequence
  Synthetic oligonucleotide
gcactcccaattcaagctgagacgattgtg

SEQ ID NO: 166239 - DNA, 30 bp, Artificial Sequence
  Synthetic oligonucleotide
gtgaaaactcttgggggaggataacttgtg

SEQ ID NO: 166240 - DNA, 30 bp, Artificial Sequence
  Synthetic oligonucleotide
tgggaattaatggggggaataacacttgtg

SEQ ID NO: 166241 - DNA, 30 bp, Artificial Sequence
  Synthetic oligonucleotide
ctgcttaaacttgatctatgatgtcttgtg

SEQ ID NO: 166242 - DNA, 30 bp, Artificial Sequence
  Synthetic oligonucleotide
gcataggtggtggcctttcttcttgttgtg

SEQ ID NO: 166243 - DNA, 30 bp, Artificial Sequence
  Synthetic oligonucleotide
gaacgaaatgtgtctgtacccaagtttgtg

SEQ ID NO: 166244 - DNA, 30 bp, Artificial Sequence
  Synthetic oligonucleotide
atctcaatgcgcctggttaaggaaaaattg

SEQ ID NO: 166245 - DNA, 30 bp, Artificial Sequence
  Synthetic oligonucleotide
cggcggattaatctataggccccaaaattg

SEQ ID NO: 166246 - DNA, 30 bp, Artificial Sequence
  Synthetic oligonucleotide
caatcaaggaaggctaacaagaccaaattg

SEQ ID NO: 166247 - DNA, 30 bp, Artificial Sequence
  Synthetic oligonucleotide
tcggtgtgccaatcatcagattccaaattg

SEQ ID NO: 166248 - DNA, 30 bp, Artificial Sequence
  Synthetic oligonucleotide
agtaatcagtgcgtcaccgggctgaaattg

SEQ ID NO: 166249 - DNA, 30 bp, Artificial Sequence
  Synthetic oligonucleotide
tagaaatcgtcgctatagaaggataaattg

SEQ ID NO: 166250 - DNA, 30 bp, Artificial Sequence
  Synthetic oligonucleotide
gcaccattcccctgacaacttacacaattg

SEQ ID NO: 166251 - DNA, 30 bp, Artificial Sequence
  Synthetic oligonucleotide
atggtcatcctatcgtacatgttccaattg

SEQ ID NO: 166252 - DNA, 30 bp, Artificial Sequence
  Synthetic oligonucleotide
gggatttcaaaggtatacttgtagcaattg

SEQ ID NO: 166253 - DNA, 30 bp, Artificial Sequence
  Synthetic oligonucleotide
agggccgtacaataatgcaaccatcaattg

SEQ ID NO: 166254 - DNA, 30 bp, Artificial Sequence
  Synthetic oligonucleotide
atacgaaattatctcgcgaatgatcaattg

SEQ ID NO: 166255 - DNA, 30 bp, Artificial Sequence
  Synthetic oligonucleotide
caatataggtccggagatgcctgtcaattg

SEQ ID NO: 166256 - DNA, 30 bp, Artificial Sequence
  Synthetic oligonucleotide
aggtccccgtgcgcagtgaggattcaattg

SEQ ID NO: 166257 - DNA, 30 bp, Artificial Sequence
  Synthetic oligonucleotide
aatagtcggacgaaacttacgagggaattg

SEQ ID NO: 166258 - DNA, 30 bp, Artificial Sequence
  Synthetic oligonucleotide
agaatgcggttttgggttcacaaataattg

SEQ ID NO: 166259 - DNA, 30 bp, Artificial Sequence
  Synthetic oligonucleotide
gacagatgtctgatatcacttgaataattg

SEQ ID NO: 166260 - DNA, 31 bp, Artificial Sequence
  Synthetic oligonucleotide
cgtgatctgttcacattcggacagataattg

SEQ ID NO: 166261 - DNA, 30 bp, Artificial Sequence
  Synthetic oligonucleotide
agattagggaagacgtatgcattctaattg

SEQ ID NO: 166262 - DNA, 30 bp, Artificial Sequence
  Synthetic oligonucleotide
catgactgcgtatgcccaccaacttaattg

SEQ ID NO: 166263 - DNA, 30 bp, Artificial Sequence
  Synthetic oligonucleotide
gtcgactaacgtatgaaaagccgttaattg

SEQ ID NO: 166264 - DNA, 30 bp, Artificial Sequence
  Synthetic oligonucleotide
gggagatgacccggccataccccgacattg

SEQ ID NO: 166265 - DNA, 30 bp, Artificial Sequence
  Synthetic oligonucleotide
agcgtatatgcgtatggtcgttggacattg

SEQ ID NO: 166266 - DNA, 30 bp, Artificial Sequence
  Synthetic oligonucleotide
tctccccggaaagtagagaagccaccattg

SEQ ID NO: 166267 - DNA, 30 bp, Artificial Sequence
  Synthetic oligonucleotide
ctgttcagtgggaacattaggggaccattg

SEQ ID NO: 166268 - DNA, 30 bp, Artificial Sequence
  Synthetic oligonucleotide
gctatgttacttgaggacaaatcgccattg

SEQ ID NO: 166269 - DNA, 30 bp, Artificial Sequence
  Synthetic oligonucleotide
agtagggctgggtgcagctagcggccattg

SEQ ID NO: 166270 - DNA, 30 bp, Artificial Sequence
  Synthetic oligonucleotide
caattccctggtgaatgtgaactgccattg

SEQ ID NO: 166271 - DNA, 30 bp, Artificial Sequence
  Synthetic oligonucleotide
aatgtacactcagacaacgttaaagcattg

SEQ ID NO: 166272 - DNA, 30 bp, Artificial Sequence
  Synthetic oligonucleotide
tcaggcggagcttggacgccccaagcattg

SEQ ID NO: 166273 - DNA, 30 bp, Artificial Sequence
  Synthetic oligonucleotide
tggggtcgtatccgtaaccgaccagcattg

SEQ ID NO: 166274 - DNA, 30 bp, Artificial Sequence
  Synthetic oligonucleotide
gaatataaccggcattcagatagagcattg

SEQ ID NO: 166275 - DNA, 30 bp, Artificial Sequence
  Synthetic oligonucleotide
gtgatgactgaagatccactagaggcattg

SEQ ID NO: 166276 - DNA, 30 bp, Artificial Sequence
  Synthetic oligonucleotide
tggggctggcttgccaagggctcggcattg

SEQ ID NO: 166277 - DNA, 30 bp, Artificial Sequence
  Synthetic oligonucleotide
cggactccaaaccatgagaatggggcattg

SEQ ID NO: 166278 - DNA, 30 bp, Artificial Sequence
  Synthetic oligonucleotide
ataggtcgacgaggtcgtcatacgtcattg

SEQ ID NO: 166279 - DNA, 30 bp, Artificial Sequence
  Synthetic oligonucleotide
ggacattgtccttagttggttcaaagattg

SEQ ID NO: 166280 - DNA, 30 bp, Artificial Sequence
  Synthetic oligonucleotide
ccggcgggggccggcgtgtccgaaagattg

SEQ ID NO: 166281 - DNA, 30 bp, Artificial Sequence
  Synthetic oligonucleotide
cgatcatgtgcgaacatcggctatagattg

SEQ ID NO: 166282 - DNA, 30 bp, Artificial Sequence
  Synthetic oligonucleotide
ctccaaggacactatcgaagctttagattg

SEQ ID NO: 166283 - DNA, 30 bp, Artificial Sequence
  Synthetic oligonucleotide
atgaagagaatattcagctttacacgattg

SEQ ID NO: 166284 - DNA, 31 bp, Artificial Sequence
  Synthetic oligonucleotide
gtgtggtcgggggtaggatctggagcgattg

SEQ ID NO: 166285 - DNA, 30 bp, Artificial Sequence
  Synthetic oligonucleotide
acgactgcaggcaagagtccgtctcgattg

SEQ ID NO: 166286 - DNA, 30 bp, Artificial Sequence
  Synthetic oligonucleotide
gtagtcatgtggcacacgaaaggaggattg

SEQ ID NO: 166287 - DNA, 30 bp, Artificial Sequence
  Synthetic oligonucleotide
gcgcattgagggtgtactaccttaggattg

SEQ ID NO: 166288 - DNA, 30 bp, Artificial Sequence
  Synthetic oligonucleotide
tccgtggtacactatggctttagcggattg

SEQ ID NO: 166289 - DNA, 30 bp, Artificial Sequence
  Synthetic oligonucleotide
cgattacttcaggaaacccgtcatggattg

SEQ ID NO: 166290 - DNA, 30 bp, Artificial Sequence
  Synthetic oligonucleotide
gaccatcatgcgcattgggacgaatgattg

SEQ ID NO: 166291 - DNA, 25 bp, Artificial Sequence
  Synthetic oligonucleotide
agccccgagagatgtctcatgattg

SEQ ID NO: 166292 - DNA, 30 bp, Artificial Sequence
  Synthetic oligonucleotide
cacgttatcacagattcccaggtctgattg

SEQ ID NO: 166293 - DNA, 30 bp, Artificial Sequence
  Synthetic oligonucleotide
acgagtgtacggcgcatgggtcagtgattg

SEQ ID NO: 166294 - DNA, 30 bp, Artificial Sequence
  Synthetic oligonucleotide
tggttcattttgggaaaacatatgtgattg

SEQ ID NO: 166295 - DNA, 30 bp, Artificial Sequence
  Synthetic oligonucleotide
gggtactgtccgttccaagagaccatattg

SEQ ID NO: 166296 - DNA, 30 bp, Artificial Sequence
  Synthetic oligonucleotide
gtgagacttagtatcgaattaacgatattg

SEQ ID NO: 166297 - DNA, 30 bp, Artificial Sequence
  Synthetic oligonucleotide
atacggcgtaatgaatataacagcctattg

SEQ ID NO: 166298 - DNA, 30 bp, Artificial Sequence
  Synthetic oligonucleotide
caggtctattcctgggccggggaggtattg

SEQ ID NO: 166299 - DNA, 30 bp, Artificial Sequence
  Synthetic oligonucleotide
cagggttgtacatggttgctgcgggtattg

SEQ ID NO: 166300 - DNA, 30 bp, Artificial Sequence
  Synthetic oligonucleotide
ggtccgtttaactgcacctagatggtattg

SEQ ID NO: 166301 - DNA, 29 bp, Artificial Sequence
  Synthetic oligonucleotide
gtgggcggaggggggctgggatggtattg

SEQ ID NO: 166302 - DNA, 31 bp, Artificial Sequence
  Synthetic oligonucleotide
atcaggaaaagtgctttagactattgtattg

SEQ ID NO: 166303 - DNA, 30 bp, Artificial Sequence
  Synthetic oligonucleotide
aaaattggtcagggtagggtctatttattg

SEQ ID NO: 166304 - DNA, 30 bp, Artificial Sequence
  Synthetic oligonucleotide
ccacgtcacacactgctgcgtgttttattg

SEQ ID NO: 166305 - DNA, 30 bp, Artificial Sequence
  Synthetic oligonucleotide
tgggagcgtgattcatctgtagtaaacttg

SEQ ID NO: 166306 - DNA, 30 bp, Artificial Sequence
  Synthetic oligonucleotide
aaaggatagcttagatttgaaaacaacttg

SEQ ID NO: 166307 - DNA, 30 bp, Artificial Sequence
  Synthetic oligonucleotide
atacaagtaaaaactgctaatatgaacttg

SEQ ID NO: 166308 - DNA, 30 bp, Artificial Sequence
  Synthetic oligonucleotide
tctgacttgtcattctaaatgcatcacttg

SEQ ID NO: 166309 - DNA, 30 bp, Artificial Sequence
  Synthetic oligonucleotide
gaggtggctcagggaaagttaacagacttg

SEQ ID NO: 166310 - DNA, 30 bp, Artificial Sequence
  Synthetic oligonucleotide
tggtcaggatgtttgggcctcagagacttg

SEQ ID NO: 166311 - DNA, 30 bp, Artificial Sequence
  Synthetic oligonucleotide
tgaaggaataacgcgggaatgtgcgacttg

SEQ ID NO: 166312 - DNA, 30 bp, Artificial Sequence
  Synthetic oligonucleotide
tataagacacacgcgaccactgtcgacttg

SEQ ID NO: 166313 - DNA, 30 bp, Artificial Sequence
  Synthetic oligonucleotide
cgagtgagaggctcggggacataggacttg

SEQ ID NO: 166314 - DNA, 30 bp, Artificial Sequence
  Synthetic oligonucleotide
cggaaaagtgatttgtgtcggggtgacttg

SEQ ID NO: 166315 - DNA, 30 bp, Artificial Sequence
  Synthetic oligonucleotide
ggtctaccaagcagtaatttattgtacttg

SEQ ID NO: 166316 - DNA, 30 bp, Artificial Sequence
  Synthetic oligonucleotide
gcgtaggacgaggcaacaccaacttacttg

SEQ ID NO: 166317 - DNA, 30 bp, Artificial Sequence
  Synthetic oligonucleotide
atgtaaagttagtctaagtatacttacttg

SEQ ID NO: 166318 - DNA, 30 bp, Artificial Sequence
  Synthetic oligonucleotide
gtaagggtcggagaaatggtttcaaccttg

SEQ ID NO: 166319 - DNA, 30 bp, Artificial Sequence
  Synthetic oligonucleotide
aatggcgttagacgagagtagagaaccttg

SEQ ID NO: 166320 - DNA, 30 bp, Artificial Sequence
  Synthetic oligonucleotide
acggatttccgggcacaatatctaaccttg

SEQ ID NO: 166321 - DNA, 30 bp, Artificial Sequence
  Synthetic oligonucleotide
agcaaagtgactggtcacgggcataccttg

SEQ ID NO: 166322 - DNA, 30 bp, Artificial Sequence
  Synthetic oligonucleotide
aaaacgcataattgagccattgataccttg

SEQ ID NO: 166323 - DNA, 30 bp, Artificial Sequence
  Synthetic oligonucleotide
ctgacttgaaagtaagtcccagctcccttg

SEQ ID NO: 166324 - DNA, 30 bp, Artificial Sequence
  Synthetic oligonucleotide
gtgataccggcaggtaaccgaccagccttg

SEQ ID NO: 166325 - DNA, 30 bp, Artificial Sequence
  Synthetic oligonucleotide
ttcggtagatagcgagccggacccagcttg

SEQ ID NO: 166326 - DNA, 30 bp, Artificial Sequence
  Synthetic oligonucleotide
gacatgagccactgttatatagagagcttg

SEQ ID NO: 166327 - DNA, 30 bp, Artificial Sequence
  Synthetic oligonucleotide
tacacagtatgggccccgagcaaacgcttg

SEQ ID NO: 166328 - DNA, 30 bp, Artificial Sequence
  Synthetic oligonucleotide
cctggtcacctatactatcttgagcgcttg

SEQ ID NO: 166329 - DNA, 30 bp, Artificial Sequence
  Synthetic oligonucleotide
agggtttaactcaattcaaaagggcgcttg

SEQ ID NO: 166330 - DNA, 30 bp, Artificial Sequence
  Synthetic oligonucleotide
cccggattcgagttggcagtaaacggcttg

SEQ ID NO: 166331 - DNA, 30 bp, Artificial Sequence
  Synthetic oligonucleotide
gtgcgtgtttgatgaaagttagccggcttg

SEQ ID NO: 166332 - DNA, 30 bp, Artificial Sequence
  Synthetic oligonucleotide
atggaagagtgttctgccacaagcggcttg

SEQ ID NO: 166333 - DNA, 30 bp, Artificial Sequence
  Synthetic oligonucleotide
gggacagtgtaggctggtgaactcggcttg

SEQ ID NO: 166334 - DNA, 30 bp, Artificial Sequence
  Synthetic oligonucleotide
aagaagcctcacgtgggatattatggcttg

SEQ ID NO: 166335 - DNA, 30 bp, Artificial Sequence
  Synthetic oligonucleotide
gggattgcactgtgcatcaacactggcttg

SEQ ID NO: 166336 - DNA, 30 bp, Artificial Sequence
  Synthetic oligonucleotide
attggaaaacccgaggtgttgtgatgcttg

SEQ ID NO: 166337 - DNA, 30 bp, Artificial Sequence
  Synthetic oligonucleotide
cccaatacaaaacatactggctcgtgcttg

SEQ ID NO: 166338 - DNA, 30 bp, Artificial Sequence
  Synthetic oligonucleotide
agacgcaaagggcacacgtgggtaatcttg

SEQ ID NO: 166339 - DNA, 31 bp, Artificial Sequence
  Synthetic oligonucleotide
cgatacaatgttttctctcgcggtcatcttg

SEQ ID NO: 166340 - DNA, 30 bp, Artificial Sequence
  Synthetic oligonucleotide
aagggatgccgggattccaccaagatcttg

SEQ ID NO: 166341 - DNA, 30 bp, Artificial Sequence
  Synthetic oligonucleotide
ctaatggttggacggacaggagtgatcttg

SEQ ID NO: 166342 - DNA, 30 bp, Artificial Sequence
  Synthetic oligonucleotide
ctcgagcctcgtagcggggtttatatcttg

SEQ ID NO: 166343 - DNA, 30 bp, Artificial Sequence
  Synthetic oligonucleotide
aagagggtccttagcatgtaaggtatcttg

SEQ ID NO: 166344 - DNA, 30 bp, Artificial Sequence
  Synthetic oligonucleotide
acctatacgacgtcatgtggacttatcttg

SEQ ID NO: 166345 - DNA, 30 bp, Artificial Sequence
  Synthetic oligonucleotide
aggtagacagttgcgggctgaaaagtcttg

SEQ ID NO: 166346 - DNA, 30 bp, Artificial Sequence
  Synthetic oligonucleotide
gggtttgcgaacaacacgacgtgtgtcttg

SEQ ID NO: 166347 - DNA, 30 bp, Artificial Sequence
  Synthetic oligonucleotide
agcacacacaaagtaatctcatccttcttg

SEQ ID NO: 166348 - DNA, 30 bp, Artificial Sequence
  Synthetic oligonucleotide
gctcaggataggcaatatctgaatttcttg

SEQ ID NO: 166349 - DNA, 30 bp, Artificial Sequence
  Synthetic oligonucleotide
aatcctcgtcaaccggatacggctttcttg

SEQ ID NO: 166350 - DNA, 30 bp, Artificial Sequence
  Synthetic oligonucleotide
aacacagcatccagctctatcagcaagttg

SEQ ID NO: 166351 - DNA, 30 bp, Artificial Sequence
  Synthetic oligonucleotide
aaacatggcactaggcaggtgggcaagttg

SEQ ID NO: 166352 - DNA, 30 bp, Artificial Sequence
  Synthetic oligonucleotide
gtcttatgtgaggaattgtctgagaagttg

SEQ ID NO: 166353 - DNA, 30 bp, Artificial Sequence
  Synthetic oligonucleotide
ctccaccttcctccattttctactaagttg

SEQ ID NO: 166354 - DNA, 30 bp, Artificial Sequence
  Synthetic oligonucleotide
tcgaaggcagtgtatcatttttgtaagttg

SEQ ID NO: 166355 - DNA, 30 bp, Artificial Sequence
  Synthetic oligonucleotide
ataagtgtacgttgagtgagtgtccagttg

SEQ ID NO: 166356 - DNA, 30 bp, Artificial Sequence
  Synthetic oligonucleotide
catgacgcgttaaaacatgtggctcagttg

SEQ ID NO: 166357 - DNA, 30 bp, Artificial Sequence
  Synthetic oligonucleotide
acccgatccgaaaaatgtgggagtcagttg

SEQ ID NO: 166358 - DNA, 30 bp, Artificial Sequence
  Synthetic oligonucleotide
acccgaggccaatgtcgaagccaagagttg

SEQ ID NO: 166359 - DNA, 30 bp, Artificial Sequence
  Synthetic oligonucleotide
gtcttcgcagagcgcactggatcagagttg

SEQ ID NO: 166360 - DNA, 30 bp, Artificial Sequence
  Synthetic oligonucleotide
gagatggcaatgcgagatatctacgagttg

SEQ ID NO: 166361 - DNA, 30 bp, Artificial Sequence
  Synthetic oligonucleotide
agactgttgggcgctactcatctctagttg

SEQ ID NO: 166362 - DNA, 30 bp, Artificial Sequence
  Synthetic oligonucleotide
actctgtgggcggcgaacgtacagtagttg

SEQ ID NO: 166363 - DNA, 30 bp, Artificial Sequence
  Synthetic oligonucleotide
aagagcgctgccgcaaaataatagtagttg

SEQ ID NO: 166364 - DNA, 30 bp, Artificial Sequence
  Synthetic oligonucleotide
acggcttcagtttaagcgaagcgttagttg

SEQ ID NO: 166365 - DNA, 30 bp, Artificial Sequence
  Synthetic oligonucleotide
tctttggtaatcacgcgtcggcgttagttg

SEQ ID NO: 166366 - DNA, 30 bp, Artificial Sequence
  Synthetic oligonucleotide
aataggcaatctcgggggctcggttagttg

SEQ ID NO: 166367 - DNA, 30 bp, Artificial Sequence
  Synthetic oligonucleotide
gccctataagcgacaaaattgttttagttg

SEQ ID NO: 166368 - DNA, 30 bp, Artificial Sequence
  Synthetic oligonucleotide
ttgtcacacctatacaacctataaacgttg

SEQ ID NO: 166369 - DNA, 30 bp, Artificial Sequence
  Synthetic oligonucleotide
gagagtaagccggtccggtgagacacgttg

SEQ ID NO: 166370 - DNA, 30 bp, Artificial Sequence
  Synthetic oligonucleotide
aaccatctccagggcatgagtgacacgttg

SEQ ID NO: 166371 - DNA, 30 bp, Artificial Sequence
  Synthetic oligonucleotide
ggtacacacgtgggggtgctcatgacgttg

SEQ ID NO: 166372 - DNA, 30 bp, Artificial Sequence
  Synthetic oligonucleotide
cgtttgcgatataggtgggaatctacgttg

SEQ ID NO: 166373 - DNA, 30 bp, Artificial Sequence
  Synthetic oligonucleotide
tttggactgcctccaaggtgtagtacgttg

SEQ ID NO: 166374 - DNA, 30 bp, Artificial Sequence
  Synthetic oligonucleotide
ggcacggaaaaaatgggatccggtacgttg

SEQ ID NO: 166375 - DNA, 30 bp, Artificial Sequence
  Synthetic oligonucleotide
ggagagaggtagagctctatagagccgttg

SEQ ID NO: 166376 - DNA, 30 bp, Artificial Sequence
  Synthetic oligonucleotide
ctcacgttcgcttgatcggcgtcgccgttg

SEQ ID NO: 166377 - DNA, 30 bp, Artificial Sequence
  Synthetic oligonucleotide
cgagttgcaatgctggcttgcgggccgttg

SEQ ID NO: 166378 - DNA, 30 bp, Artificial Sequence
  Synthetic oligonucleotide
gctaattaacaaggtgggttttgtccgttg

SEQ ID NO: 166379 - DNA, 30 bp, Artificial Sequence
  Synthetic oligonucleotide
attaaagggcgtgtaaggagtggagcgttg

SEQ ID NO: 166380 - DNA, 30 bp, Artificial Sequence
  Synthetic oligonucleotide
aatcgggtaaatcaaaagtaccgggcgttg

SEQ ID NO: 166381 - DNA, 30 bp, Artificial Sequence
  Synthetic oligonucleotide
gaacgccctatgttaacttaccatgcgttg

SEQ ID NO: 166382 - DNA, 30 bp, Artificial Sequence
  Synthetic oligonucleotide
gctacgtataagactaatcgattatcgttg

SEQ ID NO: 166383 - DNA, 30 bp, Artificial Sequence
  Synthetic oligonucleotide
ttagctgcggtatagatataatagtcgttg

SEQ ID NO: 166384 - DNA, 30 bp, Artificial Sequence
  Synthetic oligonucleotide
gccgaagataaagtccaaaagaggtcgttg

SEQ ID NO: 166385 - DNA, 30 bp, Artificial Sequence
  Synthetic oligonucleotide
gtgatcgtcgttcacgccgagaattcgttg

SEQ ID NO: 166386 - DNA, 30 bp, Artificial Sequence
  Synthetic oligonucleotide
cccagtggagggcacctcacagaaaggttg

SEQ ID NO: 166387 - DNA, 30 bp, Artificial Sequence
  Synthetic oligonucleotide
ctcggtagcctgtgcttctaattaaggttg

SEQ ID NO: 166388 - DNA, 30 bp, Artificial Sequence
  Synthetic oligonucleotide
aaatgaagaccaatacaatagcgcaggttg

SEQ ID NO: 166389 - DNA, 30 bp, Artificial Sequence
  Synthetic oligonucleotide
tgctgtaggttctttacagatctcaggttg

SEQ ID NO: 166390 - DNA, 30 bp, Artificial Sequence
  Synthetic oligonucleotide
ttaagtaggtgaggatcttggtggaggttg

SEQ ID NO: 166391 - DNA, 29 bp, Artificial Sequence
  Synthetic oligonucleotide
cctgagatcctcgattaagtctgaggttg

SEQ ID NO: 166392 - DNA, 30 bp, Artificial Sequence
  Synthetic oligonucleotide
tggaactgaacggagaccgaacataggttg

SEQ ID NO: 166393 - DNA, 30 bp, Artificial Sequence
  Synthetic oligonucleotide
taaggaccatggtggggctaaccacggttg

SEQ ID NO: 166394 - DNA, 30 bp, Artificial Sequence
  Synthetic oligonucleotide
actgcgtagcgttcggatctcggtcggttg

SEQ ID NO: 166395 - DNA, 30 bp, Artificial Sequence
  Synthetic oligonucleotide
gccacagcggtatgcgtcgaccacgggttg

SEQ ID NO: 166396 - DNA, 30 bp, Artificial Sequence
  Synthetic oligonucleotide
ctcaccaacgcgaagcaaagggtggggttg

SEQ ID NO: 166397 - DNA, 30 bp, Artificial Sequence
  Synthetic oligonucleotide
aaccaggttcatgggctcggtcatgggttg

SEQ ID NO: 166398 - DNA, 30 bp, Artificial Sequence
  Synthetic oligonucleotide
ggagctgctaggatgtccccctttgggttg

SEQ ID NO: 166399 - DNA, 30 bp, Artificial Sequence
  Synthetic oligonucleotide
accgacaacctagcgtctcgcaactggttg

SEQ ID NO: 166400 - DNA, 30 bp, Artificial Sequence
  Synthetic oligonucleotide
aaccttcagaggataggcgggatctggttg

SEQ ID NO: 166401 - DNA, 30 bp, Artificial Sequence
  Synthetic oligonucleotide
catcgaggcgtttatggagtgcaaatgttg

SEQ ID NO: 166402 - DNA, 30 bp, Artificial Sequence
  Synthetic oligonucleotide
aattgacagaaggagagttgcataatgttg

SEQ ID NO: 166403 - DNA, 30 bp, Artificial Sequence
  Synthetic oligonucleotide
cattgtggctgtcgcatttcagccatgttg

SEQ ID NO: 166404 - DNA, 30 bp, Artificial Sequence
  Synthetic oligonucleotide
tgagcagtcagaaacgtgtagtccatgttg

SEQ ID NO: 166405 - DNA, 30 bp, Artificial Sequence
  Synthetic oligonucleotide
gggacttaggatggatggtgtatcatgttg

SEQ ID NO: 166406 - DNA, 30 bp, Artificial Sequence
  Synthetic oligonucleotide
aaagacgcgtagtgtgaagccgcactgttg

SEQ ID NO: 166407 - DNA, 30 bp, Artificial Sequence
  Synthetic oligonucleotide
cttattccagagctaagtattgacctgttg

SEQ ID NO: 166408 - DNA, 30 bp, Artificial Sequence
  Synthetic oligonucleotide
tagtaatcgatacgtctcgtattcctgttg

SEQ ID NO: 166409 - DNA, 28 bp, Artificial Sequence
  Synthetic oligonucleotide
taggtatttgccgtaatgtcggctgttg

SEQ ID NO: 166410 - DNA, 30 bp, Artificial Sequence
  Synthetic oligonucleotide
ggtcttctactcgatatactcctgctgttg

SEQ ID NO: 166411 - DNA, 30 bp, Artificial Sequence
  Synthetic oligonucleotide
atcgcatctgaattacactgggtgctgttg

SEQ ID NO: 166412 - DNA, 30 bp, Artificial Sequence
  Synthetic oligonucleotide
acggttcctcacaagattgccactctgttg

SEQ ID NO: 166413 - DNA, 30 bp, Artificial Sequence
  Synthetic oligonucleotide
ggacagtatccgttacattcgatggtgttg

SEQ ID NO: 166414 - DNA, 30 bp, Artificial Sequence
  Synthetic oligonucleotide
agttcaccacactggtgattaaagttgttg

SEQ ID NO: 166415 - DNA, 30 bp, Artificial Sequence
  Synthetic oligonucleotide
gcaacgtgtagggtcaatactaatttgttg

SEQ ID NO: 166416 - DNA, 30 bp, Artificial Sequence
  Synthetic oligonucleotide
aatggagtttgcgcggaaagaacaaatttg

SEQ ID NO: 166417 - DNA, 26 bp, Artificial Sequence
  Synthetic oligonucleotide
tcgtcctcttcgccagtgccaatttg

SEQ ID NO: 166418 - DNA, 30 bp, Artificial Sequence
  Synthetic oligonucleotide
agtgagtggcatacaagtgagtagaatttg

SEQ ID NO: 166419 - DNA, 31 bp, Artificial Sequence
  Synthetic oligonucleotide
caggtatgtgaggtcagatcatttgaatttg

SEQ ID NO: 166420 - DNA, 30 bp, Artificial Sequence
  Synthetic oligonucleotide
tcaacttactggggaagtgcgggtaatttg

SEQ ID NO: 166421 - DNA, 30 bp, Artificial Sequence
  Synthetic oligonucleotide
cgtcttaaggagcgtacctcacagcatttg

SEQ ID NO: 166422 - DNA, 30 bp, Artificial Sequence
  Synthetic oligonucleotide
aaggatacaagggcaagttaatgcgatttg

SEQ ID NO: 166423 - DNA, 30 bp, Artificial Sequence
  Synthetic oligonucleotide
gttgactgcagtttccagggacaggatttg

SEQ ID NO: 166424 - DNA, 30 bp, Artificial Sequence
  Synthetic oligonucleotide
catatcatttcgtcgattcatgaatatttg

SEQ ID NO: 166425 - DNA, 30 bp, Artificial Sequence
  Synthetic oligonucleotide
ggtgtagggcctgcaggccaagcgtatttg

SEQ ID NO: 166426 - DNA, 30 bp, Artificial Sequence
  Synthetic oligonucleotide
gacgctccaggtcaagtcagtggaactttg

SEQ ID NO: 166427 - DNA, 30 bp, Artificial Sequence
  Synthetic oligonucleotide
atagtcccggtaccgataagttggactttg

SEQ ID NO: 166428 - DNA, 30 bp, Artificial Sequence
  Synthetic oligonucleotide
cctcattagaactactgaactaggcctttg

SEQ ID NO: 166429 - DNA, 30 bp, Artificial Sequence
  Synthetic oligonucleotide
atcgagacgcaagaaatctgacttcctttg

SEQ ID NO: 166430 - DNA, 30 bp, Artificial Sequence
  Synthetic oligonucleotide
gtgcacaaaccgttctccttttaagctttg

SEQ ID NO: 166431 - DNA, 30 bp, Artificial Sequence
  Synthetic oligonucleotide
acaccggatccctgaggcatgggtgctttg

SEQ ID NO: 166432 - DNA, 30 bp, Artificial Sequence
  Synthetic oligonucleotide
catccttgcataccgatgagatcatctttg

SEQ ID NO: 166433 - DNA, 30 bp, Artificial Sequence
  Synthetic oligonucleotide
taatctcacgtgtcctgcataatatctttg

SEQ ID NO: 166434 - DNA, 30 bp, Artificial Sequence
  Synthetic oligonucleotide
acctcggcacgtaggcggacgacctctttg

SEQ ID NO: 166435 - DNA, 30 bp, Artificial Sequence
  Synthetic oligonucleotide
gtaacagactaggtaaacctccagtctttg

SEQ ID NO: 166436 - DNA, 30 bp, Artificial Sequence
  Synthetic oligonucleotide
acaagttcgctttgattgcttacgtctttg

SEQ ID NO: 166437 - DNA, 30 bp, Artificial Sequence
  Synthetic oligonucleotide
ggccactcggtattcaagcctcggtctttg

SEQ ID NO: 166438 - DNA, 30 bp, Artificial Sequence
  Synthetic oligonucleotide
agatgtacagatgggaaccaaatgtctttg

SEQ ID NO: 166439 - DNA, 30 bp, Artificial Sequence
  Synthetic oligonucleotide
gcgggtagggacccaccattcatgtctttg

SEQ ID NO: 166440 - DNA, 30 bp, Artificial Sequence
  Synthetic oligonucleotide
agaaagggtaagtcagtaacggtgtctttg

SEQ ID NO: 166441 - DNA, 30 bp, Artificial Sequence
  Synthetic oligonucleotide
gggacgaaattatatagagacgaaagtttg

SEQ ID NO: 166442 - DNA, 30 bp, Artificial Sequence
  Synthetic oligonucleotide
gggctcccagctcggaggtgcactagtttg

SEQ ID NO: 166443 - DNA, 30 bp, Artificial Sequence
  Synthetic oligonucleotide
tccaagatggcgatttagcctcctagtttg

SEQ ID NO: 166444 - DNA, 30 bp, Artificial Sequence
  Synthetic oligonucleotide
atggctagaactagaaatatcgtaggtttg

SEQ ID NO: 166445 - DNA, 30 bp, Artificial Sequence
  Synthetic oligonucleotide
attggggattaccatatcgaggggggtttg

SEQ ID NO: 166446 - DNA, 30 bp, Artificial Sequence
  Synthetic oligonucleotide
ctgttggcccaaacaagagtggtgtgtttg

SEQ ID NO: 166447 - DNA, 30 bp, Artificial Sequence
  Synthetic oligonucleotide
tctaaaggccatcacgaccaagaaattttg

SEQ ID NO: 166448 - DNA, 30 bp, Artificial Sequence
  Synthetic oligonucleotide
cggcttggggaatatagcggaacaattttg

SEQ ID NO: 166449 - DNA, 30 bp, Artificial Sequence
  Synthetic oligonucleotide
taagccaaggcaagccgagttcgcattttg

SEQ ID NO: 166450 - DNA, 30 bp, Artificial Sequence
  Synthetic oligonucleotide
tctctcggacactgcccattctatattttg

SEQ ID NO: 166451 - DNA, 30 bp, Artificial Sequence
  Synthetic oligonucleotide
ttcaccactttgatttagatcgtacttttg

SEQ ID NO: 166452 - DNA, 30 bp, Artificial Sequence
  Synthetic oligonucleotide
gtcatggagaattggaaggttaggcttttg

SEQ ID NO: 166453 - DNA, 30 bp, Artificial Sequence
  Synthetic oligonucleotide
ggtcatgaaatgccatccacgagtcttttg

SEQ ID NO: 166454 - DNA, 30 bp, Artificial Sequence
  Synthetic oligonucleotide
ggtcgtctagtccaggcggccgaagttttg

SEQ ID NO: 166455 - DNA, 30 bp, Artificial Sequence
  Synthetic oligonucleotide
acttggttctaggataatgctttcgttttg

SEQ ID NO: 166456 - DNA, 30 bp, Artificial Sequence
  Synthetic oligonucleotide
cacgggttatcatggataggccagtttttg

SEQ ID NO: 166457 - DNA, 30 bp, Artificial Sequence
  Synthetic oligonucleotide
tacgcggcgaggcggaagataaggtttttg

SEQ ID NO: 166458 - DNA, 30 bp, Artificial Sequence
  Synthetic oligonucleotide
attgcacacaaggcagtgtgtgacaaaaat

SEQ ID NO: 166459 - DNA, 30 bp, Artificial Sequence
  Synthetic oligonucleotide
cgatacgaggggacactaatactcaaaaat

SEQ ID NO: 166460 - DNA, 30 bp, Artificial Sequence
  Synthetic oligonucleotide
aattgggaacccacttcaggcgtgaaaaat

SEQ ID NO: 166461 - DNA, 30 bp, Artificial Sequence
  Synthetic oligonucleotide
taccgaaggagcgaaatgactcaacaaaat

SEQ ID NO: 166462 - DNA, 30 bp, Artificial Sequence
  Synthetic oligonucleotide
taggtgaaagcagagtaggcaatacaaaat

SEQ ID NO: 166463 - DNA, 30 bp, Artificial Sequence
  Synthetic oligonucleotide
acaatttgtcagaacaagtgatgccaaaat

SEQ ID NO: 166464 - DNA, 30 bp, Artificial Sequence
  Synthetic oligonucleotide
gtatgttcgggtggggggcaccaagaaaat

SEQ ID NO: 166465 - DNA, 30 bp, Artificial Sequence
  Synthetic oligonucleotide
aaagtaaaggttcaattcgaataagaaaat

SEQ ID NO: 166466 - DNA, 30 bp, Artificial Sequence
  Synthetic oligonucleotide
cggtcactggggcaacaaggtaaggaaaat

SEQ ID NO: 166467 - DNA, 30 bp, Artificial Sequence
  Synthetic oligonucleotide
cgagtgcagagtttatatcgaccggaaaat

SEQ ID NO: 166468 - DNA, 30 bp, Artificial Sequence
  Synthetic oligonucleotide
caatggtgggtgaatgcagagcgataaaat

SEQ ID NO: 166469 - DNA, 30 bp, Artificial Sequence
  Synthetic oligonucleotide
tcagggaactgggtgtgaatcgtataaaat

SEQ ID NO: 166470 - DNA, 30 bp, Artificial Sequence
  Synthetic oligonucleotide
acccgttccgaaatccacggaagctaaaat

SEQ ID NO: 166471 - DNA, 30 bp, Artificial Sequence
  Synthetic oligonucleotide
ctggtcgaccaatgggtagatatttaaaat

SEQ ID NO: 166472 - DNA, 30 bp, Artificial Sequence
  Synthetic oligonucleotide
tgggaagatcgtatagggatgttttaaaat

SEQ ID NO: 166473 - DNA, 30 bp, Artificial Sequence
  Synthetic oligonucleotide
agtgtgcgacggatctggggcatgacaaat

SEQ ID NO: 166474 - DNA, 30 bp, Artificial Sequence
  Synthetic oligonucleotide
agctctctaagggtcgcgtagggtacaaat

SEQ ID NO: 166475 - DNA, 30 bp, Artificial Sequence
  Synthetic oligonucleotide
ctaaagtgcagggaaacggattcaccaaat

SEQ ID NO: 166476 - DNA, 30 bp, Artificial Sequence
  Synthetic oligonucleotide
aacggagggcaagagagttcggcagcaaat

SEQ ID NO: 166477 - DNA, 30 bp, Artificial Sequence
  Synthetic oligonucleotide
cgtcgggagtttacgggatgaggggcaaat

SEQ ID NO: 166478 - DNA, 30 bp, Artificial Sequence
  Synthetic oligonucleotide
aagcagcttgcaagaggtccgattgcaaat

SEQ ID NO: 166479 - DNA, 30 bp, Artificial Sequence
  Synthetic oligonucleotide
cgtctatcttccgcaagaatatgctcaaat

SEQ ID NO: 166480 - DNA, 30 bp, Artificial Sequence
  Synthetic oligonucleotide
acctaccagtcggtaaagagggtaagaaat

SEQ ID NO: 166481 - DNA, 30 bp, Artificial Sequence
  Synthetic oligonucleotide
tagggacgccaagaggagcgtgccagaaat

SEQ ID NO: 166482 - DNA, 30 bp, Artificial Sequence
  Synthetic oligonucleotide
gagggggaagtgtttataacgttgagaaat

SEQ ID NO: 166483 - DNA, 30 bp, Artificial Sequence
  Synthetic oligonucleotide
ccaagacaataaggagaccaacctagaaat

SEQ ID NO: 166484 - DNA, 30 bp, Artificial Sequence
  Synthetic oligonucleotide
tacaggcgacgagtgcgctgggctagaaat

SEQ ID NO: 166485 - DNA, 30 bp, Artificial Sequence
  Synthetic oligonucleotide
tgtgcgcatgatttcaacagagaccgaaat

SEQ ID NO: 166486 - DNA, 30 bp, Artificial Sequence
  Synthetic oligonucleotide
taccaccgctcatcttctaagcagcgaaat

SEQ ID NO: 166487 - DNA, 30 bp, Artificial Sequence
  Synthetic oligonucleotide
gcagacttacaggaagtactaacgcgaaat

SEQ ID NO: 166488 - DNA, 30 bp, Artificial Sequence
  Synthetic oligonucleotide
cggctgaagggagcgcctacccggcgaaat

SEQ ID NO: 166489 - DNA, 30 bp, Artificial Sequence
  Synthetic oligonucleotide
agggggttgttgcgtgcgataatgcgaaat

SEQ ID NO: 166490 - DNA, 30 bp, Artificial Sequence
  Synthetic oligonucleotide
ggcgcgcgacttctagcaatggatcgaaat

SEQ ID NO: 166491 - DNA, 30 bp, Artificial Sequence
  Synthetic oligonucleotide
caaccttccatacaagcatgttctcgaaat

SEQ ID NO: 166492 - DNA, 30 bp, Artificial Sequence
  Synthetic oligonucleotide
agttacgtactcttatacagctgtcgaaat

SEQ ID NO: 166493 - DNA, 30 bp, Artificial Sequence
  Synthetic oligonucleotide
cagccggcataggtcctctgcacaggaaat

SEQ ID NO: 166494 - DNA, 30 bp, Artificial Sequence
  Synthetic oligonucleotide
aatcttgacgagagtgccagactaggaaat

SEQ ID NO: 166495 - DNA, 30 bp, Artificial Sequence
  Synthetic oligonucleotide
ctagccgtcttacgacgtacccacggaaat

SEQ ID NO: 166496 - DNA, 30 bp, Artificial Sequence
  Synthetic oligonucleotide
tcacagttccttaggtgaggaaagggaaat

SEQ ID NO: 166497 - DNA, 30 bp, Artificial Sequence
  Synthetic oligonucleotide
gtatgcacgcatgcgaaactcaatggaaat

SEQ ID NO: 166498 - DNA, 30 bp, Artificial Sequence
  Synthetic oligonucleotide
ataagtgttaaggaataggcaatatgaaat

SEQ ID NO: 166499 - DNA, 30 bp, Artificial Sequence
  Synthetic oligonucleotide
gatggttccggtgcatgacgaacctgaaat

SEQ ID NO: 166500 - DNA, 30 bp, Artificial Sequence
  Synthetic oligonucleotide
atggcggtcgtccccctccagaggtgaaat

SEQ ID NO: 166501 - DNA, 30 bp, Artificial Sequence
  Synthetic oligonucleotide
gagccctaacgcaattggatgcaaataaat

SEQ ID NO: 166502 - DNA, 30 bp, Artificial Sequence
  Synthetic oligonucleotide
tgcgtacttacataatcgcctgggataaat

SEQ ID NO: 166503 - DNA, 30 bp, Artificial Sequence
  Synthetic oligonucleotide
gcgcccccgacacgaacaaaaatgataaat

SEQ ID NO: 166504 - DNA, 30 bp, Artificial Sequence
  Synthetic oligonucleotide
ctcccaaaaactcgccgtagattgataaat

SEQ ID NO: 166505 - DNA, 30 bp, Artificial Sequence
  Synthetic oligonucleotide
gacttgtctgacaggggtgacccactaaat

SEQ ID NO: 166506 - DNA, 30 bp, Artificial Sequence
  Synthetic oligonucleotide
aagtccagaccgataataaaagtactaaat

SEQ ID NO: 166507 - DNA, 30 bp, Artificial Sequence
  Synthetic oligonucleotide
tgaccgtacgtgtatttaaatgctctaaat

SEQ ID NO: 166508 - DNA, 30 bp, Artificial Sequence
  Synthetic oligonucleotide
tccggcgcttccagaagccattaagtaaat

SEQ ID NO: 166509 - DNA, 30 bp, Artificial Sequence
  Synthetic oligonucleotide
aggtagggcatacaatattcagctgtaaat

SEQ ID NO: 166510 - DNA, 30 bp, Artificial Sequence
  Synthetic oligonucleotide
tcgctgcgtagcacacgtcacgctgtaaat

SEQ ID NO: 166511 - DNA, 30 bp, Artificial Sequence
  Synthetic oligonucleotide
cccacgcgcgaccacattgatccattaaat

SEQ ID NO: 166512 - DNA, 30 bp, Artificial Sequence
  Synthetic oligonucleotide
tcagacacttaggggtggagcggattaaat

SEQ ID NO: 166513 - DNA, 30 bp, Artificial Sequence
  Synthetic oligonucleotide
gggacagcggtttacgtatggttgttaaat

SEQ ID NO: 166514 - DNA, 30 bp, Artificial Sequence
  Synthetic oligonucleotide
cgtattggctttagaaaggggagaaacaat

SEQ ID NO: 166515 - DNA, 30 bp, Artificial Sequence
  Synthetic oligonucleotide
tcttggacataaggggtataaaccaacaat

SEQ ID NO: 166516 - DNA, 30 bp, Artificial Sequence
  Synthetic oligonucleotide
gacctagacgcgagaacatcaagcaacaat

SEQ ID NO: 166517 - DNA, 30 bp, Artificial Sequence
  Synthetic oligonucleotide
tccacagctctatgatcattcttcaacaat

SEQ ID NO: 166518 - DNA, 30 bp, Artificial Sequence
  Synthetic oligonucleotide
gacagtctgacaagcattagcacgaacaat

SEQ ID NO: 166519 - DNA, 30 bp, Artificial Sequence
  Synthetic oligonucleotide
ggataggatttctctagacgccgacacaat

SEQ ID NO: 166520 - DNA, 31 bp, Artificial Sequence
  Synthetic oligonucleotide
tgcgcgcactcctaattatcaccagcacaat

SEQ ID NO: 166521 - DNA, 30 bp, Artificial Sequence
  Synthetic oligonucleotide
cattgtggttaagtggggaagtagcacaat

SEQ ID NO: 166522 - DNA, 30 bp, Artificial Sequence
  Synthetic oligonucleotide
acagccccaggcacgctaccctctcacaat

SEQ ID NO: 166523 - DNA, 30 bp, Artificial Sequence
  Synthetic oligonucleotide
gtattcgtaccgctcatcggaaactacaat

SEQ ID NO: 166524 - DNA, 30 bp, Artificial Sequence
  Synthetic oligonucleotide
tcatctagatgtgagtcgatcatgtacaat

SEQ ID NO: 166525 - DNA, 30 bp, Artificial Sequence
  Synthetic oligonucleotide
ccaagccggagggaaccaacataccccaat

SEQ ID NO: 166526 - DNA, 30 bp, Artificial Sequence
  Synthetic oligonucleotide
tggtggtagaggcgtaagaggacccccaat

SEQ ID NO: 166527 - DNA, 30 bp, Artificial Sequence
  Synthetic oligonucleotide
cctctgtgaacgagtaggtatagcgccaat

SEQ ID NO: 166528 - DNA, 30 bp, Artificial Sequence
  Synthetic oligonucleotide
tacatgctactgagttggataattgccaat

SEQ ID NO: 166529 - DNA, 30 bp, Artificial Sequence
  Synthetic oligonucleotide
cggagcaaggccattaggccgtaatccaat

SEQ ID NO: 166530 - DNA, 30 bp, Artificial Sequence
  Synthetic oligonucleotide
actgaaccttctacaaatacagcatccaat

SEQ ID NO: 166531 - DNA, 30 bp, Artificial Sequence
  Synthetic oligonucleotide
agtagaccatcggactcgccattctccaat

SEQ ID NO: 166532 - DNA, 30 bp, Artificial Sequence
  Synthetic oligonucleotide
acgttcgttatatctactcagcagagcaat

SEQ ID NO: 166533 - DNA, 30 bp, Artificial Sequence
  Synthetic oligonucleotide
cttatggagaaataacagttgccgagcaat

SEQ ID NO: 166534 - DNA, 30 bp, Artificial Sequence
  Synthetic oligonucleotide
gagacgttaacacgatagcgcatgagcaat

SEQ ID NO: 166535 - DNA, 30 bp, Artificial Sequence
  Synthetic oligonucleotide
ctataggtctcgtacgagatagggcgcaat

SEQ ID NO: 166536 - DNA, 30 bp, Artificial Sequence
  Synthetic oligonucleotide
ggggggtttgggtagaagcacgagggcaat

SEQ ID NO: 166537 - DNA, 30 bp, Artificial Sequence
  Synthetic oligonucleotide
tgagtatctatgtcgagtggactgggcaat

SEQ ID NO: 166538 - DNA, 30 bp, Artificial Sequence
  Synthetic oligonucleotide
gatctgagaatagtcctacaggtgggcaat

SEQ ID NO: 166539 - DNA, 30 bp, Artificial Sequence
  Synthetic oligonucleotide
tgcgtcctaggtgatggtgtggaaatcaat

SEQ ID NO: 166540 - DNA, 30 bp, Artificial Sequence
  Synthetic oligonucleotide
aaagggtggcgttaacagctacggatcaat

SEQ ID NO: 166541 - DNA, 30 bp, Artificial Sequence
  Synthetic oligonucleotide
ttcgggctagtgggaccgcctgctatcaat

SEQ ID NO: 166542 - DNA, 30 bp, Artificial Sequence
  Synthetic oligonucleotide
gaatcggtttcggttcaataatgtatcaat

SEQ ID NO: 166543 - DNA, 30 bp, Artificial Sequence
  Synthetic oligonucleotide
ttaagtagtgtacagcgcaattgtatcaat

SEQ ID NO: 166544 - DNA, 30 bp, Artificial Sequence
  Synthetic oligonucleotide
ttggggagcaagtacctggttgacctcaat

SEQ ID NO: 166545 - DNA, 30 bp, Artificial Sequence
  Synthetic oligonucleotide
atactctagtatatcttccgcgtcctcaat

SEQ ID NO: 166546 - DNA, 30 bp, Artificial Sequence
  Synthetic oligonucleotide
agcacatcagctaaacatttgatgctcaat

SEQ ID NO: 166547 - DNA, 30 bp, Artificial Sequence
  Synthetic oligonucleotide
acactcaagatcgtaggggagcctctcaat

SEQ ID NO: 166548 - DNA, 30 bp, Artificial Sequence
  Synthetic oligonucleotide
ccaggtgctcaagtgggtgccggagtcaat

SEQ ID NO: 166549 - DNA, 30 bp, Artificial Sequence
  Synthetic oligonucleotide
agggcctcgcatggtagagttccggtcaat

SEQ ID NO: 166550 - DNA, 30 bp, Artificial Sequence
  Synthetic oligonucleotide
cggtatagagaatccatagatcgggtcaat

SEQ ID NO: 166551 - DNA, 30 bp, Artificial Sequence
  Synthetic oligonucleotide
ggacataatgcgccgctatctgtggtcaat

SEQ ID NO: 166552 - DNA, 30 bp, Artificial Sequence
  Synthetic oligonucleotide
agcggagaaggttcgcgttccagattcaat

SEQ ID NO: 166553 - DNA, 30 bp, Artificial Sequence
  Synthetic oligonucleotide
gggggtactgcgggtgcatgcaagttcaat

SEQ ID NO: 166554 - DNA, 30 bp, Artificial Sequence
  Synthetic oligonucleotide
aggtgtctccttaaagtaacattgttcaat

SEQ ID NO: 166555 - DNA, 30 bp, Artificial Sequence
  Synthetic oligonucleotide
gaagttgcgtgacatatggtagttttcaat

SEQ ID NO: 166556 - DNA, 30 bp, Artificial Sequence
  Synthetic oligonucleotide
actatttccaggaggctggggggaaagaat

SEQ ID NO: 166557 - DNA, 30 bp, Artificial Sequence
  Synthetic oligonucleotide
ggtcggggtcaaactccgaaggaacagaat

SEQ ID NO: 166558 - DNA, 30 bp, Artificial Sequence
  Synthetic oligonucleotide
agtaaagacccgagcgcgcctagccagaat

SEQ ID NO: 166559 - DNA, 30 bp, Artificial Sequence
  Synthetic oligonucleotide
aacctaaaggctgagtcccgccagcagaat

SEQ ID NO: 166560 - DNA, 30 bp, Artificial Sequence
  Synthetic oligonucleotide
tctctataacttagccgttccgagcagaat

SEQ ID NO: 166561 - DNA, 30 bp, Artificial Sequence
  Synthetic oligonucleotide
cgagtatttcggtacgttgaataagagaat

SEQ ID NO: 166562 - DNA, 30 bp, Artificial Sequence
  Synthetic oligonucleotide
aaaggacttggttcgtccgaaaacgagaat

SEQ ID NO: 166563 - DNA, 30 bp, Artificial Sequence
  Synthetic oligonucleotide
accgtaatactaggtcaccacaccgagaat

SEQ ID NO: 166564 - DNA, 30 bp, Artificial Sequence
  Synthetic oligonucleotide
tggtgtgaattagatttaagttccgagaat

SEQ ID NO: 166565 - DNA, 30 bp, Artificial Sequence
  Synthetic oligonucleotide
cgtcatacatcgcatgaacgtcatgagaat

SEQ ID NO: 166566 - DNA, 30 bp, Artificial Sequence
  Synthetic oligonucleotide
aaccgatgcacctgtgttgactttgagaat

SEQ ID NO: 166567 - DNA, 30 bp, Artificial Sequence
  Synthetic oligonucleotide
cgaaggagcactagaacactaacctagaat

SEQ ID NO: 166568 - DNA, 30 bp, Artificial Sequence
  Synthetic oligonucleotide
tctcccagcattgaggaggacgcgtagaat

SEQ ID NO: 166569 - DNA, 30 bp, Artificial Sequence
  Synthetic oligonucleotide
aaaaagatagtcaaacaacgatcaacgaat

SEQ ID NO: 166570 - DNA, 30 bp, Artificial Sequence
  Synthetic oligonucleotide
gagccggtgctacaacaaacagccacgaat

SEQ ID NO: 166571 - DNA, 30 bp, Artificial Sequence
  Synthetic oligonucleotide
cagatcaaccccgcgctatctgccacgaat

SEQ ID NO: 166572 - DNA, 30 bp, Artificial Sequence
  Synthetic oligonucleotide
cctgctttagctgctcacgacggcacgaat

SEQ ID NO: 166573 - DNA, 30 bp, Artificial Sequence
  Synthetic oligonucleotide
tctcccgtcttcaaactttactgcacgaat

SEQ ID NO: 166574 - DNA, 30 bp, Artificial Sequence
  Synthetic oligonucleotide
cacacacgtatcgtgggtggcatcacgaat

SEQ ID NO: 166575 - DNA, 30 bp, Artificial Sequence
  Synthetic oligonucleotide
cccacggaaggtaacggagccctgacgaat

SEQ ID NO: 166576 - DNA, 30 bp, Artificial Sequence
  Synthetic oligonucleotide
ggtaccaccacaacatcctttctgacgaat

SEQ ID NO: 166577 - DNA, 30 bp, Artificial Sequence
  Synthetic oligonucleotide
gttaaataagttattggataaagtacgaat

SEQ ID NO: 166578 - DNA, 30 bp, Artificial Sequence
  Synthetic oligonucleotide
gtctcggatcttggttgccatatcccgaat

SEQ ID NO: 166579 - DNA, 30 bp, Artificial Sequence
  Synthetic oligonucleotide
tccgactccgaccagggctcagtgccgaat

SEQ ID NO: 166580 - DNA, 30 bp, Artificial Sequence
  Synthetic oligonucleotide
cagggacccgcgtagcgcggaagagcgaat

SEQ ID NO: 166581 - DNA, 30 bp, Artificial Sequence
  Synthetic oligonucleotide
tgagaaaatagtagcggtgcctgcgcgaat

SEQ ID NO: 166582 - DNA, 30 bp, Artificial Sequence
  Synthetic oligonucleotide
caaggttcctgtcctgactaaatggcgaat

SEQ ID NO: 166583 - DNA, 30 bp, Artificial Sequence
  Synthetic oligonucleotide
gactcgccaacgtacgggtctcgctcgaat

SEQ ID NO: 166584 - DNA, 30 bp, Artificial Sequence
  Synthetic oligonucleotide
tataagccgactccagcatggacgtcgaat

SEQ ID NO: 166585 - DNA, 30 bp, Artificial Sequence
  Synthetic oligonucleotide
gtgcacactacagtccgcgaataaaggaat

SEQ ID NO: 166586 - DNA, 30 bp, Artificial Sequence
  Synthetic oligonucleotide
ttgcccgggcaagtaaagacggcaaggaat

SEQ ID NO: 166587 - DNA, 30 bp, Artificial Sequence
  Synthetic oligonucleotide
aagtggactggtactaaatcggcaaggaat

SEQ ID NO: 166588 - DNA, 30 bp, Artificial Sequence
  Synthetic oligonucleotide
cccaatagttcaatggaagtcaacaggaat

SEQ ID NO: 166589 - DNA, 30 bp, Artificial Sequence
  Synthetic oligonucleotide
ctactgatatatgcgcgtccatgcaggaat

SEQ ID NO: 166590 - DNA, 30 bp, Artificial Sequence
  Synthetic oligonucleotide
acccatgtcagaatgcccggtttcaggaat

SEQ ID NO: 166591 - DNA, 30 bp, Artificial Sequence
  Synthetic oligonucleotide
cgaactcaactcgacttcagtcgacggaat

SEQ ID NO: 166592 - DNA, 30 bp, Artificial Sequence
  Synthetic oligonucleotide
ccgcgccggcacctaaatggacggcggaat

SEQ ID NO: 166593 - DNA, 30 bp, Artificial Sequence
  Synthetic oligonucleotide
ccctgggatgagtagaaacgtattcggaat

SEQ ID NO: 166594 - DNA, 30 bp, Artificial Sequence
  Synthetic oligonucleotide
tgcgaggcaaaatttgggaaagtagggaat

SEQ ID NO: 166595 - DNA, 30 bp, Artificial Sequence
  Synthetic oligonucleotide
tctggcataaacaaccatctctccgggaat

SEQ ID NO: 166596 - DNA, 30 bp, Artificial Sequence
  Synthetic oligonucleotide
gaacgttacatggcacaagtaaaggggaat

SEQ ID NO: 166597 - DNA, 30 bp, Artificial Sequence
  Synthetic oligonucleotide
ccgatggatatccttcgttctcaggggaat

SEQ ID NO: 166598 - DNA, 30 bp, Artificial Sequence
  Synthetic oligonucleotide
gcctggtaggcctaggacgagtggtggaat

SEQ ID NO: 166599 - DNA, 30 bp, Artificial Sequence
  Synthetic oligonucleotide
atgcctcgagggccgcccgattgttggaat

SEQ ID NO: 166600 - DNA, 30 bp, Artificial Sequence
  Synthetic oligonucleotide
cctcacggtagcaagaaagcccaaatgaat

SEQ ID NO: 166601 - DNA, 30 bp, Artificial Sequence
  Synthetic oligonucleotide
taaaaagcgatgaaattgtttccgatgaat

SEQ ID NO: 166602 - DNA, 30 bp, Artificial Sequence
  Synthetic oligonucleotide
agccaaagctacaaaacgctgatactgaat

SEQ ID NO: 166603 - DNA, 30 bp, Artificial Sequence
  Synthetic oligonucleotide
cgaccactggtgtccgatctgcacctgaat

SEQ ID NO: 166604 - DNA, 30 bp, Artificial Sequence
  Synthetic oligonucleotide
gctcgaggcgtagacccagaattcctgaat

SEQ ID NO: 166605 - DNA, 30 bp, Artificial Sequence
  Synthetic oligonucleotide
gcgcggttagcgtatgaaaatgagctgaat

SEQ ID NO: 166606 - DNA, 30 bp, Artificial Sequence
  Synthetic oligonucleotide
gtgaaagacgtttgtagcgccagggtgaat

SEQ ID NO: 166607 - DNA, 30 bp, Artificial Sequence
  Synthetic oligonucleotide
ttaggtattagaaaatatgaaacgttgaat

SEQ ID NO: 166608 - DNA, 30 bp, Artificial Sequence
  Synthetic oligonucleotide
atgttagagaattggtgtttgtgaaataat

SEQ ID NO: 166609 - DNA, 30 bp, Artificial Sequence
  Synthetic oligonucleotide
ccgcagagcagcttgtagttaacgaataat

SEQ ID NO: 166610 - DNA, 30 bp, Artificial Sequence
  Synthetic oligonucleotide
aggcggtcaaggtaatacccagtgaataat

SEQ ID NO: 166611 - DNA, 30 bp, Artificial Sequence
  Synthetic oligonucleotide
tctcaacggaccaacaagggcgcacataat

SEQ ID NO: 166612 - DNA, 30 bp, Artificial Sequence
  Synthetic oligonucleotide
cagataacgtaatcatttggttgacataat

SEQ ID NO: 166613 - DNA, 30 bp, Artificial Sequence
  Synthetic oligonucleotide
ggtgcgttatctaattataatgggcataat

SEQ ID NO: 166614 - DNA, 30 bp, Artificial Sequence
  Synthetic oligonucleotide
aacctgagggactcgcccacttggcataat

SEQ ID NO: 166615 - DNA, 30 bp, Artificial Sequence
  Synthetic oligonucleotide
acgccagggcctcctcgaaccccggataat

SEQ ID NO: 166616 - DNA, 30 bp, Artificial Sequence
  Synthetic oligonucleotide
caagccaatacgttatcccgggcggataat

SEQ ID NO: 166617 - DNA, 30 bp, Artificial Sequence
  Synthetic oligonucleotide
aatccgtaccggtcatagatggctgataat

SEQ ID NO: 166618 - DNA, 30 bp, Artificial Sequence
  Synthetic oligonucleotide
tgcggaatcggctgctgtaaaaaatataat

SEQ ID NO: 166619 - DNA, 30 bp, Artificial Sequence
  Synthetic oligonucleotide
ctcagcgagacccaggcaaccgtctataat

SEQ ID NO: 166620 - DNA, 30 bp, Artificial Sequence
  Synthetic oligonucleotide
tcgtatattgacacctcagtacgttataat

SEQ ID NO: 166621 - DNA, 30 bp, Artificial Sequence
  Synthetic oligonucleotide
ggtgaatgcatgcgctcacctgagactaat

SEQ ID NO: 166622 - DNA, 30 bp, Artificial Sequence
  Synthetic oligonucleotide
caccagtgccagggccgcgggctgactaat

SEQ ID NO: 166623 - DNA, 30 bp, Artificial Sequence
  Synthetic oligonucleotide
atggggcagtagtaaatggcctatactaat

SEQ ID NO: 166624 - DNA, 30 bp, Artificial Sequence
  Synthetic oligonucleotide
gttcggatcagaaaagggacgtctactaat

SEQ ID NO: 166625 - DNA, 30 bp, Artificial Sequence
  Synthetic oligonucleotide
cttggagacggatcatcactaggccctaat

SEQ ID NO: 166626 - DNA, 31 bp, Artificial Sequence
  Synthetic oligonucleotide
ataggggcgtaacgatgcgccactagctaat

SEQ ID NO: 166627 - DNA, 30 bp, Artificial Sequence
  Synthetic oligonucleotide
gtgcatctcgaagaaattgcgtcggctaat

SEQ ID NO: 166628 - DNA, 30 bp, Artificial Sequence
  Synthetic oligonucleotide
gccatggaaaggtactgcgggacatctaat

SEQ ID NO: 166629 - DNA, 30 bp, Artificial Sequence
  Synthetic oligonucleotide
cgcgagtttacagctattgcagaaagtaat

SEQ ID NO: 166630 - DNA, 30 bp, Artificial Sequence
  Synthetic oligonucleotide
tacccaaatccgaccggtgcgacaagtaat

SEQ ID NO: 166631 - DNA, 30 bp, Artificial Sequence
  Synthetic oligonucleotide
taggaagagcggcgaagacaagtaagtaat

SEQ ID NO: 166632 - DNA, 30 bp, Artificial Sequence
  Synthetic oligonucleotide
tcctaattatggagtacggatatgcgtaat

SEQ ID NO: 166633 - DNA, 30 bp, Artificial Sequence
  Synthetic oligonucleotide
acgacaggagagtaattgtcagtgcgtaat

SEQ ID NO: 166634 - DNA, 30 bp, Artificial Sequence
  Synthetic oligonucleotide
gctggtttagaagcgagcacccgaggtaat

SEQ ID NO: 166635 - DNA, 30 bp, Artificial Sequence
  Synthetic oligonucleotide
taattatgggcttaggccctcaacggtaat

SEQ ID NO: 166636 - DNA, 30 bp, Artificial Sequence
  Synthetic oligonucleotide
aacacgggactgggaaaaaatttcggtaat

SEQ ID NO: 166637 - DNA, 30 bp, Artificial Sequence
  Synthetic oligonucleotide
actgcgtctgacgtgacggtacagggtaat

SEQ ID NO: 166638 - DNA, 30 bp, Artificial Sequence
  Synthetic oligonucleotide
gtcggaatgggtcatcgacacccctgtaat

SEQ ID NO: 166639 - DNA, 30 bp, Artificial Sequence
  Synthetic oligonucleotide
caaggacagacacgttatagatgctgtaat

SEQ ID NO: 166640 - DNA, 30 bp, Artificial Sequence
  Synthetic oligonucleotide
tgtggcgcacttcaccattaagtctgtaat

SEQ ID NO: 166641 - DNA, 30 bp, Artificial Sequence
  Synthetic oligonucleotide
catcggtgacattgcccgcgcggttgtaat

SEQ ID NO: 166642 - DNA, 30 bp, Artificial Sequence
  Synthetic oligonucleotide
gtggggaaagttaggcgctgcggttgtaat

SEQ ID NO: 166643 - DNA, 30 bp, Artificial Sequence
  Synthetic oligonucleotide
cgaagacaatctggaggatatggttgtaat

SEQ ID NO: 166644 - DNA, 30 bp, Artificial Sequence
  Synthetic oligonucleotide
tatgaaaaaacggaatagcagtagattaat

SEQ ID NO: 166645 - DNA, 30 bp, Artificial Sequence
  Synthetic oligonucleotide
agcaaggggaggacgctgttagtgattaat

SEQ ID NO: 166646 - DNA, 30 bp, Artificial Sequence
  Synthetic oligonucleotide
ggcgcaaccagaggcagttagcggcttaat

SEQ ID NO: 166647 - DNA, 30 bp, Artificial Sequence
  Synthetic oligonucleotide
ctgggctacctggtgagcgagtgtcttaat

SEQ ID NO: 166648 - DNA, 30 bp, Artificial Sequence
  Synthetic oligonucleotide
gggcgatcactttccgaatatattcttaat

SEQ ID NO: 166649 - DNA, 30 bp, Artificial Sequence
  Synthetic oligonucleotide
catcttgctccattagatcatggagttaat

SEQ ID NO: 166650 - DNA, 30 bp, Artificial Sequence
  Synthetic oligonucleotide
tcgtgtcggctgggatagtcgaccgttaat

SEQ ID NO: 166651 - DNA, 30 bp, Artificial Sequence
  Synthetic oligonucleotide
ccacaatcgtgtcgcatggggggcgttaat

SEQ ID NO: 166652 - DNA, 30 bp, Artificial Sequence
  Synthetic oligonucleotide
cgtcttcaactagtcgcatataaggttaat

SEQ ID NO: 166653 - DNA, 30 bp, Artificial Sequence
  Synthetic oligonucleotide
tgcccatgcgcaagaccccctacggttaat

SEQ ID NO: 166654 - DNA, 30 bp, Artificial Sequence
  Synthetic oligonucleotide
gacgaattgcaagtgtgaacgttggttaat

SEQ ID NO: 166655 - DNA, 30 bp, Artificial Sequence
  Synthetic oligonucleotide
cttacgcgccaagagtgtccctaatttaat

SEQ ID NO: 166656 - DNA, 30 bp, Artificial Sequence
  Synthetic oligonucleotide
ggaatgcgtctcttacccgtactcaaacat

SEQ ID NO: 166657 - DNA, 30 bp, Artificial Sequence
  Synthetic oligonucleotide
acttagccctgtatagatatgcggaaacat

SEQ ID NO: 166658 - DNA, 30 bp, Artificial Sequence
  Synthetic oligonucleotide
attcatgagtggaggatcataatgaaacat

SEQ ID NO: 166659 - DNA, 30 bp, Artificial Sequence
  Synthetic oligonucleotide
agacccaatacaggcttatcttaacaacat

SEQ ID NO: 166660 - DNA, 30 bp, Artificial Sequence
  Synthetic oligonucleotide
agcatgcaggccgaattctaagcccaacat

SEQ ID NO: 166661 - DNA, 30 bp, Artificial Sequence
  Synthetic oligonucleotide
cttcattaatcttcggctactaagcaacat

SEQ ID NO: 166662 - DNA, 30 bp, Artificial Sequence
  Synthetic oligonucleotide
tagggcacagcgtttattaccgatcaacat

SEQ ID NO: 166663 - DNA, 30 bp, Artificial Sequence
  Synthetic oligonucleotide
gatccacccgggtgctagggctatcaacat

SEQ ID NO: 166664 - DNA, 30 bp, Artificial Sequence
  Synthetic oligonucleotide
ggcgactttggacgtcaaacagcagaacat

SEQ ID NO: 166665 - DNA, 30 bp, Artificial Sequence
  Synthetic oligonucleotide
agggttaatataccggtaattcgggaacat

SEQ ID NO: 166666 - DNA, 30 bp, Artificial Sequence
  Synthetic oligonucleotide
gaacggacccgaacggcactgtgggaacat

SEQ ID NO: 166667 - DNA, 30 bp, Artificial Sequence
  Synthetic oligonucleotide
aacaacattaatgaacactgggtggaacat

SEQ ID NO: 166668 - DNA, 30 bp, Artificial Sequence
  Synthetic oligonucleotide
ttggaatcgagtctattctagtgtgaacat

SEQ ID NO: 166669 - DNA, 30 bp, Artificial Sequence
  Synthetic oligonucleotide
acggttaccgtatagtggagcacataacat

SEQ ID NO: 166670 - DNA, 30 bp, Artificial Sequence
  Synthetic oligonucleotide
gtcatacccgctatcaagctggcataacat

SEQ ID NO: 166671 - DNA, 30 bp, Artificial Sequence
  Synthetic oligonucleotide
cactattgctgaagtaggaaatagtaacat

SEQ ID NO: 166672 - DNA, 30 bp, Artificial Sequence
  Synthetic oligonucleotide
tcctaatataataaggaaggagcaacacat

SEQ ID NO: 166673 - DNA, 30 bp, Artificial Sequence
  Synthetic oligonucleotide
agggtaatcagctgacgaaatagaacacat

SEQ ID NO: 166674 - DNA, 29 bp, Artificial Sequence
  Synthetic oligonucleotide
aaggagtctccggtcctcaagggacacat

SEQ ID NO: 166675 - DNA, 30 bp, Artificial Sequence
  Synthetic oligonucleotide
gtgaaatgaagcgcgatgacaattacacat

SEQ ID NO: 166676 - DNA, 30 bp, Artificial Sequence
  Synthetic oligonucleotide
cacgttcaccagtcgtggacgcttacacat

SEQ ID NO: 166677 - DNA, 30 bp, Artificial Sequence
  Synthetic oligonucleotide
cataaacagccatgtcttttgacaccacat

SEQ ID NO: 166678 - DNA, 30 bp, Artificial Sequence
  Synthetic oligonucleotide
ctacacgcccccgactgaatcactccacat

SEQ ID NO: 166679 - DNA, 30 bp, Artificial Sequence
  Synthetic oligonucleotide
gtgctacaaaccccagtatcccaagcacat

SEQ ID NO: 166680 - DNA, 30 bp, Artificial Sequence
  Synthetic oligonucleotide
cgatacccttcacctggcttgtgagcacat

SEQ ID NO: 166681 - DNA, 30 bp, Artificial Sequence
  Synthetic oligonucleotide
cttaaacgagacccatcgaccccggcacat

SEQ ID NO: 166682 - DNA, 30 bp, Artificial Sequence
  Synthetic oligonucleotide
tgactaaaaggctcccacgatgaatcacat

SEQ ID NO: 166683 - DNA, 30 bp, Artificial Sequence
  Synthetic oligonucleotide
gttagacaagcaaacatgtgtgcatcacat

SEQ ID NO: 166684 - DNA, 30 bp, Artificial Sequence
  Synthetic oligonucleotide
aacactagatgaccagagtaaatatcacat

SEQ ID NO: 166685 - DNA, 30 bp, Artificial Sequence
  Synthetic oligonucleotide
agcgcatacgctcagacttattggtcacat

SEQ ID NO: 166686 - DNA, 30 bp, Artificial Sequence
  Synthetic oligonucleotide
cagcggttgctgggattgcaatgttcacat

SEQ ID NO: 166687 - DNA, 30 bp, Artificial Sequence
  Synthetic oligonucleotide
tgcaagtcagacttaaggtgcatgagacat

SEQ ID NO: 166688 - DNA, 30 bp, Artificial Sequence
  Synthetic oligonucleotide
ccacggcagcgcgacatgaacaatagacat

SEQ ID NO: 166689 - DNA, 30 bp, Artificial Sequence
  Synthetic oligonucleotide
catggcacttccttgagactgcgtagacat

SEQ ID NO: 166690 - DNA, 30 bp, Artificial Sequence
  Synthetic oligonucleotide
gcggctatatcgctatgagaggaccgacat

SEQ ID NO: 166691 - DNA, 30 bp, Artificial Sequence
  Synthetic oligonucleotide
cttgcaaacgtgtgaaaggtttagggacat

SEQ ID NO: 166692 - DNA, 30 bp, Artificial Sequence
  Synthetic oligonucleotide
tagtgatgtgggtaatgataagaatgacat

SEQ ID NO: 166693 - DNA, 30 bp, Artificial Sequence
  Synthetic oligonucleotide
ctgacggacggtgtgggggtctaatgacat

SEQ ID NO: 166694 - DNA, 30 bp, Artificial Sequence
  Synthetic oligonucleotide
cttcagacttgcttatcggttgtatgacat

SEQ ID NO: 166695 - DNA, 30 bp, Artificial Sequence
  Synthetic oligonucleotide
ggcgtcataaacgctcgttgtaggtgacat

SEQ ID NO: 166696 - DNA, 30 bp, Artificial Sequence
  Synthetic oligonucleotide
aatccacaccgagagagtctgcgttgacat

SEQ ID NO: 166697 - DNA, 30 bp, Artificial Sequence
  Synthetic oligonucleotide
agaaggaccagtagactcctgttttgacat

SEQ ID NO: 166698 - DNA, 30 bp, Artificial Sequence
  Synthetic oligonucleotide
tcgagagtgagttgccaggcacaaatacat

SEQ ID NO: 166699 - DNA, 30 bp, Artificial Sequence
  Synthetic oligonucleotide
ggtccctatggcaagccctaaacaatacat

SEQ ID NO: 166700 - DNA, 30 bp, Artificial Sequence
  Synthetic oligonucleotide
caggctaatgcgttgagaataaagatacat

SEQ ID NO: 166701 - DNA, 30 bp, Artificial Sequence
  Synthetic oligonucleotide
cctaacctcgaccggtagtttactatacat

SEQ ID NO: 166702 - DNA, 30 bp, Artificial Sequence
  Synthetic oligonucleotide
cgtaccgtgcattcgaggttcaccctacat

SEQ ID NO: 166703 - DNA, 31 bp, Artificial Sequence
  Synthetic oligonucleotide
ggacgccatgccatggtcatgtggcctacat

SEQ ID NO: 166704 - DNA, 30 bp, Artificial Sequence
  Synthetic oligonucleotide
aacttgaaaaccgatctacctctcctacat

SEQ ID NO: 166705 - DNA, 30 bp, Artificial Sequence
  Synthetic oligonucleotide
agacgcgaagtagaatcttcacagctacat

SEQ ID NO: 166706 - DNA, 30 bp, Artificial Sequence
  Synthetic oligonucleotide
cgacagactatgaacgaggctgtgctacat

SEQ ID NO: 166707 - DNA, 30 bp, Artificial Sequence
  Synthetic oligonucleotide
tggagtctcttggtcaaggtgtgagtacat

SEQ ID NO: 166708 - DNA, 30 bp, Artificial Sequence
  Synthetic oligonucleotide
gacaagacggctagacttctgctagtacat

SEQ ID NO: 166709 - DNA, 30 bp, Artificial Sequence
  Synthetic oligonucleotide
ctctccgcagatagaggccggattgtacat

SEQ ID NO: 166710 - DNA, 30 bp, Artificial Sequence
  Synthetic oligonucleotide
agaaggtgggggacatccaattcaaaccat

SEQ ID NO: 166711 - DNA, 30 bp, Artificial Sequence
  Synthetic oligonucleotide
gaggtgaggtgcccttggagacgaaaccat

SEQ ID NO: 166712 - DNA, 30 bp, Artificial Sequence
  Synthetic oligonucleotide
agcagtggatgtggctgaatgtccaaccat

SEQ ID NO: 166713 - DNA, 30 bp, Artificial Sequence
  Synthetic oligonucleotide
caacaggaatccgcgaaggctgataaccat

SEQ ID NO: 166714 - DNA, 30 bp, Artificial Sequence
  Synthetic oligonucleotide
cgcaagagtcgtaaaatcaccaaccaccat

SEQ ID NO: 166715 - DNA, 30 bp, Artificial Sequence
  Synthetic oligonucleotide
gtcaggcggaccatgttgaacacccaccat

SEQ ID NO: 166716 - DNA, 30 bp, Artificial Sequence
  Synthetic oligonucleotide
atgtattcgttatgtcaggggttccaccat

SEQ ID NO: 166717 - DNA, 30 bp, Artificial Sequence
  Synthetic oligonucleotide
catgctcaaaggaaaggaatttgataccat

SEQ ID NO: 166718 - DNA, 30 bp, Artificial Sequence
  Synthetic oligonucleotide
gctaaagaacactggggggactagtaccat

SEQ ID NO: 166719 - DNA, 30 bp, Artificial Sequence
  Synthetic oligonucleotide
gccatctaaaccaaacggtatgcaacccat

SEQ ID NO: 166720 - DNA, 30 bp, Artificial Sequence
  Synthetic oligonucleotide
cactggccaccagaagatggaagaacccat

SEQ ID NO: 166721 - DNA, 30 bp, Artificial Sequence
  Synthetic oligonucleotide
ttgttggggctggacaacaatagaacccat

SEQ ID NO: 166722 - DNA, 30 bp, Artificial Sequence
  Synthetic oligonucleotide
agattctgtaatcggaaccacgacccccat

SEQ ID NO: 166723 - DNA, 30 bp, Artificial Sequence
  Synthetic oligonucleotide
tatctcagtcgccggccggtcctgccccat

SEQ ID NO: 166724 - DNA, 30 bp, Artificial Sequence
  Synthetic oligonucleotide
tatcaataccgacaaggagcaagggcccat

SEQ ID NO: 166725 - DNA, 30 bp, Artificial Sequence
  Synthetic oligonucleotide
gattgcccagagtgagacctagatgcccat

SEQ ID NO: 166726 - DNA, 30 bp, Artificial Sequence
  Synthetic oligonucleotide
aaattgcacgaggttcggagagactcccat

SEQ ID NO: 166727 - DNA, 30 bp, Artificial Sequence
  Synthetic oligonucleotide
gggtctggacagtaaatcacttaccgccat

SEQ ID NO: 166728 - DNA, 30 bp, Artificial Sequence
  Synthetic oligonucleotide
gtgtggttacgtggtctgaagcttcgccat

SEQ ID NO: 166729 - DNA, 30 bp, Artificial Sequence
  Synthetic oligonucleotide
tggccaaattagggcagactgtgcggccat

SEQ ID NO: 166730 - DNA, 30 bp, Artificial Sequence
  Synthetic oligonucleotide
tgacattcactgaaagaaatgactggccat

SEQ ID NO: 166731 - DNA, 30 bp, Artificial Sequence
  Synthetic oligonucleotide
cgaggtatcacaggacgaaacgcatgccat

SEQ ID NO: 166732 - DNA, 30 bp, Artificial Sequence
  Synthetic oligonucleotide
tggaggacgaccgtgaacgcgggctgccat

SEQ ID NO: 166733 - DNA, 30 bp, Artificial Sequence
  Synthetic oligonucleotide
gtatggaggagaaacacactgagaatccat

SEQ ID NO: 166734 - DNA, 30 bp, Artificial Sequence
  Synthetic oligonucleotide
cgcgaaaggcattgcataaaaggaatccat

SEQ ID NO: 166735 - DNA, 30 bp, Artificial Sequence
  Synthetic oligonucleotide
aaagcgtcagcagtttggtggcagatccat

SEQ ID NO: 166736 - DNA, 30 bp, Artificial Sequence
  Synthetic oligonucleotide
taaaccgatagtcaggccaagtagatccat

SEQ ID NO: 166737 - DNA, 30 bp, Artificial Sequence
  Synthetic oligonucleotide
cacggtgagagtgtgggccaggcactccat

SEQ ID NO: 166738 - DNA, 30 bp, Artificial Sequence
  Synthetic oligonucleotide
ggtgctcgacgtcgcaagctggcagtccat

SEQ ID NO: 166739 - DNA, 30 bp, Artificial Sequence
  Synthetic oligonucleotide
agacacctaatcgttgtctaaactgtccat

SEQ ID NO: 166740 - DNA, 30 bp, Artificial Sequence
  Synthetic oligonucleotide
gcgggcctgtgggaatcaatcacattccat

SEQ ID NO: 166741 - DNA, 30 bp, Artificial Sequence
  Synthetic oligonucleotide
cattgcgccaatgggtgaaagaacttccat

SEQ ID NO: 166742 - DNA, 30 bp, Artificial Sequence
  Synthetic oligonucleotide
atggtccggaacctcaggaatgacttccat

SEQ ID NO: 166743 - DNA, 30 bp, Artificial Sequence
  Synthetic oligonucleotide
tcattactggttgtattgaaaacgttccat

SEQ ID NO: 166744 - DNA, 30 bp, Artificial Sequence
  Synthetic oligonucleotide
tcggactactagaaaacggggcaaaagcat

SEQ ID NO: 166745 - DNA, 30 bp, Artificial Sequence
  Synthetic oligonucleotide
acgtaggaaccatacatctgtttcaagcat

SEQ ID NO: 166746 - DNA, 30 bp, Artificial Sequence
  Synthetic oligonucleotide
tgcgatgcttagccatcgtccgggaagcat

SEQ ID NO: 166747 - DNA, 30 bp, Artificial Sequence
  Synthetic oligonucleotide
ggggctgttcgtccaaaggacttgaagcat

SEQ ID NO: 166748 - DNA, 30 bp, Artificial Sequence
  Synthetic oligonucleotide
gtggcaggacatctcgaggtttataagcat

SEQ ID NO: 166749 - DNA, 30 bp, Artificial Sequence
  Synthetic oligonucleotide
acgaaatttactgctgaattccaacagcat

SEQ ID NO: 166750 - DNA, 30 bp, Artificial Sequence
  Synthetic oligonucleotide
tgtgagacttgttgcaaacggatccagcat

SEQ ID NO: 166751 - DNA, 30 bp, Artificial Sequence
  Synthetic oligonucleotide
cgatccgtgtcacatatacgcgtccagcat

SEQ ID NO: 166752 - DNA, 30 bp, Artificial Sequence
  Synthetic oligonucleotide
cgggaaggacacctccctgggtagcagcat

SEQ ID NO: 166753 - DNA, 30 bp, Artificial Sequence
  Synthetic oligonucleotide
atagtacagagtctttgtatacctcagcat

SEQ ID NO: 166754 - DNA, 30 bp, Artificial Sequence
  Synthetic oligonucleotide
cgcgcccactcaagcaacttggcagagcat

SEQ ID NO: 166755 - DNA, 30 bp, Artificial Sequence
  Synthetic oligonucleotide
gaccatgtgagccgtgaggtggaggagcat

SEQ ID NO: 166756 - DNA, 30 bp, Artificial Sequence
  Synthetic oligonucleotide
ggcaaatggcacctgagagcatcggagcat

SEQ ID NO: 166757 - DNA, 30 bp, Artificial Sequence
  Synthetic oligonucleotide
ggctgaagctgtagaaattttcatgagcat

SEQ ID NO: 166758 - DNA, 30 bp, Artificial Sequence
  Synthetic oligonucleotide
cactgggcccaaggctggtatatctagcat

SEQ ID NO: 166759 - DNA, 30 bp, Artificial Sequence
  Synthetic oligonucleotide
atggaggagatggaccggccagtctagcat

SEQ ID NO: 166760 - DNA, 30 bp, Artificial Sequence
  Synthetic oligonucleotide
acgaaggaacaggtctacgctccttagcat

SEQ ID NO: 166761 - DNA, 30 bp, Artificial Sequence
  Synthetic oligonucleotide
tgacgcccgattatacatatacgaacgcat

SEQ ID NO: 166762 - DNA, 30 bp, Artificial Sequence
  Synthetic oligonucleotide
gaccggttgctcgataatgctggaacgcat

SEQ ID NO: 166763 - DNA, 30 bp, Artificial Sequence
  Synthetic oligonucleotide
ctaaagctgtgaggcaccattaacacgcat

SEQ ID NO: 166764 - DNA, 30 bp, Artificial Sequence
  Synthetic oligonucleotide
agagattgatcggcgggcggtgtcacgcat

SEQ ID NO: 166765 - DNA, 30 bp, Artificial Sequence
  Synthetic oligonucleotide
gacggaacaccttggagaaaccgtacgcat

SEQ ID NO: 166766 - DNA, 30 bp, Artificial Sequence
  Synthetic oligonucleotide
gcacaggttaaacggtcaacgtccccgcat

SEQ ID NO: 166767 - DNA, 30 bp, Artificial Sequence
  Synthetic oligonucleotide
aggttgagctgaaaagccaagagtgcgcat

SEQ ID NO: 166768 - DNA, 30 bp, Artificial Sequence
  Synthetic oligonucleotide
atagtggaggggtggtaacctcgatcgcat

SEQ ID NO: 166769 - DNA, 30 bp, Artificial Sequence
  Synthetic oligonucleotide
aagtggatactacatttcacctgatcgcat

SEQ ID NO: 166770 - DNA, 30 bp, Artificial Sequence
  Synthetic oligonucleotide
taagtcctaaactgtgaggaggcctcgcat

SEQ ID NO: 166771 - DNA, 30 bp, Artificial Sequence
  Synthetic oligonucleotide
ggcctggtgcccttggaagacccgtcgcat

SEQ ID NO: 166772 - DNA, 30 bp, Artificial Sequence
  Synthetic oligonucleotide
ggttcattaggacggcggatgttaaggcat

SEQ ID NO: 166773 - DNA, 30 bp, Artificial Sequence
  Synthetic oligonucleotide
cgatgctattcaagtcgcggagccaggcat

SEQ ID NO: 166774 - DNA, 31 bp, Artificial Sequence
  Synthetic oligonucleotide
ggccacaccggcattaaggcacgggaggcat

SEQ ID NO: 166775 - DNA, 30 bp, Artificial Sequence
  Synthetic oligonucleotide
cgcatgaatcttcggcatttggtgaggcat

SEQ ID NO: 166776 - DNA, 30 bp, Artificial Sequence
  Synthetic oligonucleotide
ccccaaccacttacctagaataaccggcat

SEQ ID NO: 166777 - DNA, 30 bp, Artificial Sequence
  Synthetic oligonucleotide
agcggcaaaagagcgtcatgggaccggcat

SEQ ID NO: 166778 - DNA, 30 bp, Artificial Sequence
  Synthetic oligonucleotide
taagtccggttccagtaggatccgcggcat

SEQ ID NO: 166779 - DNA, 30 bp, Artificial Sequence
  Synthetic oligonucleotide
cgcccaaaattgagaaagctattagggcat

SEQ ID NO: 166780 - DNA, 30 bp, Artificial Sequence
  Synthetic oligonucleotide
gcgagcacacgccgtaccaactatgggcat

SEQ ID NO: 166781 - DNA, 30 bp, Artificial Sequence
  Synthetic oligonucleotide
cctgaccttaggaagaaatccgactggcat

SEQ ID NO: 166782 - DNA, 30 bp, Artificial Sequence
  Synthetic oligonucleotide
gcgaatgataacgtatgagatctttggcat

SEQ ID NO: 166783 - DNA, 30 bp, Artificial Sequence
  Synthetic oligonucleotide
tggtttagagtccctccaggtacaatgcat

SEQ ID NO: 166784 - DNA, 30 bp, Artificial Sequence
  Synthetic oligonucleotide
gtcatagggatgaatcgggttaagatgcat

SEQ ID NO: 166785 - DNA, 30 bp, Artificial Sequence
  Synthetic oligonucleotide
cgttttggggctattctgaatcggatgcat

SEQ ID NO: 166786 - DNA, 30 bp, Artificial Sequence
  Synthetic oligonucleotide
atgctacttctaagatcaatttgtatgcat

SEQ ID NO: 166787 - DNA, 30 bp, Artificial Sequence
  Synthetic oligonucleotide
actggtagcgggcccaaagtggcactgcat

SEQ ID NO: 166788 - DNA, 30 bp, Artificial Sequence
  Synthetic oligonucleotide
tgcatccatcgtgccaagcaatgactgcat

SEQ ID NO: 166789 - DNA, 30 bp, Artificial Sequence
  Synthetic oligonucleotide
ccggctcgccaattaaaaagacagctgcat

SEQ ID NO: 166790 - DNA, 30 bp, Artificial Sequence
  Synthetic oligonucleotide
gaagatgaactccgagtttgggaagtgcat

SEQ ID NO: 166791 - DNA, 30 bp, Artificial Sequence
  Synthetic oligonucleotide
catagggaggaagcattaaacaaggtgcat

SEQ ID NO: 166792 - DNA, 30 bp, Artificial Sequence
  Synthetic oligonucleotide
actacggtcactttccatattgtattgcat

SEQ ID NO: 166793 - DNA, 30 bp, Artificial Sequence
  Synthetic oligonucleotide
atagaggatctacgacgtcccttattgcat

SEQ ID NO: 166794 - DNA, 30 bp, Artificial Sequence
  Synthetic oligonucleotide
acagcaccagtatattcagcccagaatcat

SEQ ID NO: 166795 - DNA, 30 bp, Artificial Sequence
  Synthetic oligonucleotide
agcttgggatctgacggctgtgaccatcat

SEQ ID NO: 166796 - DNA, 30 bp, Artificial Sequence
  Synthetic oligonucleotide
tgagatgaacagtcccgtatttaccatcat

SEQ ID NO: 166797 - DNA, 30 bp, Artificial Sequence
  Synthetic oligonucleotide
tcatcgctcggactgagtaggttccatcat

SEQ ID NO: 166798 - DNA, 30 bp, Artificial Sequence
  Synthetic oligonucleotide
agcgagtgaaaggcattaaatgctgatcat

SEQ ID NO: 166799 - DNA, 30 bp, Artificial Sequence
  Synthetic oligonucleotide
aaggttgggtgcaagcgcaaggaatatcat

SEQ ID NO: 166800 - DNA, 30 bp, Artificial Sequence
  Synthetic oligonucleotide
gcgcagtaactcgcaattccgacatatcat

SEQ ID NO: 166801 - DNA, 30 bp, Artificial Sequence
  Synthetic oligonucleotide
gggatgcatgcttgtgtcaataggtatcat

SEQ ID NO: 166802 - DNA, 30 bp, Artificial Sequence
  Synthetic oligonucleotide
cctttcggacttagaatccggcattatcat

SEQ ID NO: 166803 - DNA, 30 bp, Artificial Sequence
  Synthetic oligonucleotide
ccaagcagctattgacaactcatcactcat

SEQ ID NO: 166804 - DNA, 30 bp, Artificial Sequence
  Synthetic oligonucleotide
gttacggcagttctcaaaaagaggcctcat

SEQ ID NO: 166805 - DNA, 30 bp, Artificial Sequence
  Synthetic oligonucleotide
cgtgaatctgaaccaaacaaatcggctcat

SEQ ID NO: 166806 - DNA, 30 bp, Artificial Sequence
  Synthetic oligonucleotide
agtaactgtttcgttaaagtaacatctcat

SEQ ID NO: 166807 - DNA, 30 bp, Artificial Sequence
  Synthetic oligonucleotide
aacgggtcgcaggaaccgattcgatctcat

SEQ ID NO: 166808 - DNA, 30 bp, Artificial Sequence
  Synthetic oligonucleotide
gccttgggttgacggaagcgcgcgtctcat

SEQ ID NO: 166809 - DNA, 30 bp, Artificial Sequence
  Synthetic oligonucleotide
gaaaaagggaagcacccgttgtcgtctcat

SEQ ID NO: 166810 - DNA, 30 bp, Artificial Sequence
  Synthetic oligonucleotide
aaacaagcgttggatcacacgtaaagtcat

SEQ ID NO: 166811 - DNA, 30 bp, Artificial Sequence
  Synthetic oligonucleotide
atctaaagtcacgccccggtcgacagtcat

SEQ ID NO: 166812 - DNA, 30 bp, Artificial Sequence
  Synthetic oligonucleotide
cacgaatctgtagttatgatgtacagtcat

SEQ ID NO: 166813 - DNA, 30 bp, Artificial Sequence
  Synthetic oligonucleotide
aagaaggaactgcatcagcagaaacgtcat

SEQ ID NO: 166814 - DNA, 30 bp, Artificial Sequence
  Synthetic oligonucleotide
cgccaaaatataaatcttacctcacgtcat

SEQ ID NO: 166815 - DNA, 30 bp, Artificial Sequence
  Synthetic oligonucleotide
ggccaattagaggtatagtaacgacgtcat

SEQ ID NO: 166816 - DNA, 30 bp, Artificial Sequence
  Synthetic oligonucleotide
aagcaaataagttaaggttcagagcgtcat

SEQ ID NO: 166817 - DNA, 30 bp, Artificial Sequence
  Synthetic oligonucleotide
cctagatctgtaccgttttgtatgcgtcat

SEQ ID NO: 166818 - DNA, 30 bp, Artificial Sequence
  Synthetic oligonucleotide
ggacgccgggctccaggtggtgtaggtcat

SEQ ID NO: 166819 - DNA, 29 bp, Artificial Sequence
  Synthetic oligonucleotide
acgtaatttacactggtagcagcggtcat

SEQ ID NO: 166820 - DNA, 30 bp, Artificial Sequence
  Synthetic oligonucleotide
aagcacgtacggctatagcgaaagggtcat

SEQ ID NO: 166821 - DNA, 30 bp, Artificial Sequence
  Synthetic oligonucleotide
taagcagaacaagcaaatctcgggggtcat

SEQ ID NO: 166822 - DNA, 30 bp, Artificial Sequence
  Synthetic oligonucleotide
ttaaggtaagcgatcgaccaactgggtcat

SEQ ID NO: 166823 - DNA, 30 bp, Artificial Sequence
  Synthetic oligonucleotide
gaatccactggcttcgaatatagctgtcat

SEQ ID NO: 166824 - DNA, 30 bp, Artificial Sequence
  Synthetic oligonucleotide
aggggggtcgagggatatggggtgtgtcat

SEQ ID NO: 166825 - DNA, 30 bp, Artificial Sequence
  Synthetic oligonucleotide
gacaaccacgtgaaaaactgccggattcat

SEQ ID NO: 166826 - DNA, 30 bp, Artificial Sequence
  Synthetic oligonucleotide
aggggactctggtatcatctataacttcat

SEQ ID NO: 166827 - DNA, 30 bp, Artificial Sequence
  Synthetic oligonucleotide
cggcccgaacgaaaccaagtctaacttcat

SEQ ID NO: 166828 - DNA, 30 bp, Artificial Sequence
  Synthetic oligonucleotide
ctaaaagccgcctaactagtgccgcttcat

SEQ ID NO: 166829 - DNA, 30 bp, Artificial Sequence
  Synthetic oligonucleotide
gtaatagccgatataaaaagtccgcttcat

SEQ ID NO: 166830 - DNA, 30 bp, Artificial Sequence
  Synthetic oligonucleotide
gaacaataaggacaacgtcgtcatcttcat

SEQ ID NO: 166831 - DNA, 30 bp, Artificial Sequence
  Synthetic oligonucleotide
ataaggctccaggacccatacttcgttcat

SEQ ID NO: 166832 - DNA, 30 bp, Artificial Sequence
  Synthetic oligonucleotide
agtcgagtaacaggctgtcgaggatttcat

SEQ ID NO: 166833 - DNA, 30 bp, Artificial Sequence
  Synthetic oligonucleotide
agtgggacaatctaatgccacatctttcat

SEQ ID NO: 166834 - DNA, 30 bp, Artificial Sequence
  Synthetic oligonucleotide
tacagatatagcacctggccgtcttttcat

SEQ ID NO: 166835 - DNA, 30 bp, Artificial Sequence
  Synthetic oligonucleotide
gttaagtcctcctgaaggacgagttttcat

SEQ ID NO: 166836 - DNA, 30 bp, Artificial Sequence
  Synthetic oligonucleotide
catcagatggcgggacggggcatgaaagat

SEQ ID NO: 166837 - DNA, 30 bp, Artificial Sequence
  Synthetic oligonucleotide
tgaagccccagtcacaagttgagtaaagat

SEQ ID NO: 166838 - DNA, 30 bp, Artificial Sequence
  Synthetic oligonucleotide
atgtaggagattgataacctacgtaaagat

SEQ ID NO: 166839 - DNA, 30 bp, Artificial Sequence
  Synthetic oligonucleotide
gaggtattctttatcgggtggacacaagat

SEQ ID NO: 166840 - DNA, 30 bp, Artificial Sequence
  Synthetic oligonucleotide
gctatgttatctgtagtgcgccagcaagat

SEQ ID NO: 166841 - DNA, 30 bp, Artificial Sequence
  Synthetic oligonucleotide
cggggcgcttatggggcaacagatcaagat

SEQ ID NO: 166842 - DNA, 30 bp, Artificial Sequence
  Synthetic oligonucleotide
ttggctggacccaatatgccggttcaagat

SEQ ID NO: 166843 - DNA, 30 bp, Artificial Sequence
  Synthetic oligonucleotide
cgtactatactcgcaaaaggggcagaagat

SEQ ID NO: 166844 - DNA, 30 bp, Artificial Sequence
  Synthetic oligonucleotide
ggccagcaaggtctatgaaacctcgaagat

SEQ ID NO: 166845 - DNA, 30 bp, Artificial Sequence
  Synthetic oligonucleotide
ttccatccaccatagacccccttcgaagat

SEQ ID NO: 166846 - DNA, 30 bp, Artificial Sequence
  Synthetic oligonucleotide
tcggtacaggatgagtgccggaaggaagat

SEQ ID NO: 166847 - DNA, 30 bp, Artificial Sequence
  Synthetic oligonucleotide
catgatgacgattattggtgccgggaagat

SEQ ID NO: 166848 - DNA, 30 bp, Artificial Sequence
  Synthetic oligonucleotide
acggacccgactcttgggagaactgaagat

SEQ ID NO: 166849 - DNA, 30 bp, Artificial Sequence
  Synthetic oligonucleotide
acgtaagagtccgctcaaatgtgtgaagat

SEQ ID NO: 166850 - DNA, 30 bp, Artificial Sequence
  Synthetic oligonucleotide
actgagtctcggctatacacctcataagat

SEQ ID NO: 166851 - DNA, 30 bp, Artificial Sequence
  Synthetic oligonucleotide
agatgcgccaaagtttattcatgataagat

SEQ ID NO: 166852 - DNA, 30 bp, Artificial Sequence
  Synthetic oligonucleotide
tctacaatacagcgccataaagtataagat

SEQ ID NO: 166853 - DNA, 30 bp, Artificial Sequence
  Synthetic oligonucleotide
ctgcaaaatgctgaacgcaaagggtaagat

SEQ ID NO: 166854 - DNA, 30 bp, Artificial Sequence
  Synthetic oligonucleotide
tctcagggacgtgaatttcaggattaagat

SEQ ID NO: 166855 - DNA, 30 bp, Artificial Sequence
  Synthetic oligonucleotide
gcggacgaaaagcaagccctaagttaagat

SEQ ID NO: 166856 - DNA, 30 bp, Artificial Sequence
  Synthetic oligonucleotide
gagcatagtgggccatttacgaaaacagat

SEQ ID NO: 166857 - DNA, 30 bp, Artificial Sequence
  Synthetic oligonucleotide
cgtttgttgggttacgggtggagaacagat

SEQ ID NO: 166858 - DNA, 30 bp, Artificial Sequence
  Synthetic oligonucleotide
aatactatagaaggagaaaagctaacagat

SEQ ID NO: 166859 - DNA, 30 bp, Artificial Sequence
  Synthetic oligonucleotide
gcgtggactaggtcatcagggagcacagat

SEQ ID NO: 166860 - DNA, 30 bp, Artificial Sequence
  Synthetic oligonucleotide
actatgtgggatctggaagtctcgacagat

SEQ ID NO: 166861 - DNA, 30 bp, Artificial Sequence
  Synthetic oligonucleotide
gtagaacaatagttaagtgggagtacagat

SEQ ID NO: 166862 - DNA, 30 bp, Artificial Sequence
  Synthetic oligonucleotide
tcgaacttgcactcggctcacgttacagat

SEQ ID NO: 166863 - DNA, 30 bp, Artificial Sequence
  Synthetic oligonucleotide
acggaaaacgtgttatagcgggttacagat

SEQ ID NO: 166864 - DNA, 30 bp, Artificial Sequence
  Synthetic oligonucleotide
cggttgcacctctcgtgtagagcaccagat

SEQ ID NO: 166865 - DNA, 30 bp, Artificial Sequence
  Synthetic oligonucleotide
tagacgtcctgtacttggctcgcaccagat

SEQ ID NO: 166866 - DNA, 30 bp, Artificial Sequence
  Synthetic oligonucleotide
cgatgttgctcggtaggactagatccagat

SEQ ID NO: 166867 - DNA, 30 bp, Artificial Sequence
  Synthetic oligonucleotide
tagagagacctcgcttattcttgtccagat

SEQ ID NO: 166868 - DNA, 30 bp, Artificial Sequence
  Synthetic oligonucleotide
aatgcaaagactcccgggttctgcgcagat

SEQ ID NO: 166869 - DNA, 30 bp, Artificial Sequence
  Synthetic oligonucleotide
aacattacattaaggatggcagttgcagat

SEQ ID NO: 166870 - DNA, 30 bp, Artificial Sequence
  Synthetic oligonucleotide
gggtacaagttaaggctcgaatactcagat

SEQ ID NO: 166871 - DNA, 31 bp, Artificial Sequence
  Synthetic oligonucleotide
attttcaagcaactcatattcctcctcagat

SEQ ID NO: 166872 - DNA, 30 bp, Artificial Sequence
  Synthetic oligonucleotide
tcgagcgcatggttggctcgagggtcagat

SEQ ID NO: 166873 - DNA, 30 bp, Artificial Sequence
  Synthetic oligonucleotide
agcgtgggggtgcaggtaccctcttcagat

SEQ ID NO: 166874 - DNA, 30 bp, Artificial Sequence
  Synthetic oligonucleotide
ggatggatcagtggccgcacgatttcagat

SEQ ID NO: 166875 - DNA, 30 bp, Artificial Sequence
  Synthetic oligonucleotide
acatggaaattgtgatgaaatgtttcagat

SEQ ID NO: 166876 - DNA, 30 bp, Artificial Sequence
  Synthetic oligonucleotide
atcacgtggggcatcccccaaccaagagat

SEQ ID NO: 166877 - DNA, 30 bp, Artificial Sequence
  Synthetic oligonucleotide
cacaaacgatttggcactaatcgcagagat

SEQ ID NO: 166878 - DNA, 30 bp, Artificial Sequence
  Synthetic oligonucleotide
catagctacgcgatattactaggcagagat

SEQ ID NO: 166879 - DNA, 30 bp, Artificial Sequence
  Synthetic oligonucleotide
aaggaggttgatctatgcgggcagagagat

SEQ ID NO: 166880 - DNA, 30 bp, Artificial Sequence
  Synthetic oligonucleotide
acgtcagggcggagttaccgagttagagat

SEQ ID NO: 166881 - DNA, 30 bp, Artificial Sequence
  Synthetic oligonucleotide
gaaacgtatacatagccctggccccgagat

SEQ ID NO: 166882 - DNA, 30 bp, Artificial Sequence
  Synthetic oligonucleotide
tccgagacatatgaagtctaaggccgagat

SEQ ID NO: 166883 - DNA, 30 bp, Artificial Sequence
  Synthetic oligonucleotide
atcatatcgtgcgcaccccatacgcgagat

SEQ ID NO: 166884 - DNA, 31 bp, Artificial Sequence
  Synthetic oligonucleotide
aataagattatggggacgaaaaggaggagat

SEQ ID NO: 166885 - DNA, 30 bp, Artificial Sequence
  Synthetic oligonucleotide
tatggctaatgggtttaagatttaggagat

SEQ ID NO: 166886 - DNA, 30 bp, Artificial Sequence
  Synthetic oligonucleotide
gtaaggcgccggcgtacggtgaagggagat

SEQ ID NO: 166887 - DNA, 30 bp, Artificial Sequence
  Synthetic oligonucleotide
attaagctacacgtaattatacatggagat

SEQ ID NO: 166888 - DNA, 30 bp, Artificial Sequence
  Synthetic oligonucleotide
gctcgttgtatcaacgtcaaccttggagat

SEQ ID NO: 166889 - DNA, 30 bp, Artificial Sequence
  Synthetic oligonucleotide
aattcaacgaggaagctcgagttatgagat

SEQ ID NO: 166890 - DNA, 30 bp, Artificial Sequence
  Synthetic oligonucleotide
taatagcaagccaactttcgccactgagat

SEQ ID NO: 166891 - DNA, 30 bp, Artificial Sequence
  Synthetic oligonucleotide
gcaaagaacggtagatcgtcaaagatagat

SEQ ID NO: 166892 - DNA, 30 bp, Artificial Sequence
  Synthetic oligonucleotide
aaacgcatggctggaaggggactgatagat

SEQ ID NO: 166893 - DNA, 30 bp, Artificial Sequence
  Synthetic oligonucleotide
tcaatggtgagatagagtttagggctagat

SEQ ID NO: 166894 - DNA, 30 bp, Artificial Sequence
  Synthetic oligonucleotide
tgagacggagcaggtcctcatttgctagat

SEQ ID NO: 166895 - DNA, 30 bp, Artificial Sequence
  Synthetic oligonucleotide
cacgcatgacgtggccgaaggcatctagat

SEQ ID NO: 166896 - DNA, 30 bp, Artificial Sequence
  Synthetic oligonucleotide
gtgacgtttctgcagttcgttcgtctagat

SEQ ID NO: 166897 - DNA, 30 bp, Artificial Sequence
  Synthetic oligonucleotide
gtagataatctgctagccgtgattctagat

SEQ ID NO: 166898 - DNA, 30 bp, Artificial Sequence
  Synthetic oligonucleotide
tggggtcaaggatgggccggcagagtagat

SEQ ID NO: 166899 - DNA, 30 bp, Artificial Sequence
  Synthetic oligonucleotide
caacgcaaagcgtaagagtcccgcgtagat

SEQ ID NO: 166900 - DNA, 30 bp, Artificial Sequence
  Synthetic oligonucleotide
ggcagctcatccggtgagcgaaaattagat

SEQ ID NO: 166901 - DNA, 30 bp, Artificial Sequence
  Synthetic oligonucleotide
ccgcccggttaagaaacagtcgcattagat

SEQ ID NO: 166902 - DNA, 30 bp, Artificial Sequence
  Synthetic oligonucleotide
acgcgtatagggacgcgaggcagattagat

SEQ ID NO: 166903 - DNA, 30 bp, Artificial Sequence
  Synthetic oligonucleotide
tcgcgaaggcacatgtccataggcttagat

SEQ ID NO: 166904 - DNA, 30 bp, Artificial Sequence
  Synthetic oligonucleotide
cgcaatcccggattaaagtaactcttagat

SEQ ID NO: 166905 - DNA, 30 bp, Artificial Sequence
  Synthetic oligonucleotide
gaaggcccggagtttgtgcaatagttagat

SEQ ID NO: 166906 - DNA, 30 bp, Artificial Sequence
  Synthetic oligonucleotide
cgccgtagacggctgctgaccgtgttagat

SEQ ID NO: 166907 - DNA, 30 bp, Artificial Sequence
  Synthetic oligonucleotide
cagtcttgattaggaggactaattttagat

SEQ ID NO: 166908 - DNA, 30 bp, Artificial Sequence
  Synthetic oligonucleotide
attcacgcattcattacggggccaaacgat

SEQ ID NO: 166909 - DNA, 30 bp, Artificial Sequence
  Synthetic oligonucleotide
tttcatgcgcgaactcgggaatgcaacgat

SEQ ID NO: 166910 - DNA, 30 bp, Artificial Sequence
  Synthetic oligonucleotide
ccaagcagatagattacggaatagaacgat

SEQ ID NO: 166911 - DNA, 30 bp, Artificial Sequence
  Synthetic oligonucleotide
gcaattgggggccatatcgcgcggaacgat

SEQ ID NO: 166912 - DNA, 30 bp, Artificial Sequence
  Synthetic oligonucleotide
cactagccggcacatctttcatggaacgat

SEQ ID NO: 166913 - DNA, 30 bp, Artificial Sequence
  Synthetic oligonucleotide
cgtgtacggactacagcccctcataacgat

SEQ ID NO: 166914 - DNA, 31 bp, Artificial Sequence
  Synthetic oligonucleotide
cgttgaagataggagcccgccgaaacacgat

SEQ ID NO: 166915 - DNA, 30 bp, Artificial Sequence
  Synthetic oligonucleotide
gaacgattgtctacgtcgcctcaacacgat

SEQ ID NO: 166916 - DNA, 30 bp, Artificial Sequence
  Synthetic oligonucleotide
aaacccctcaggaacgaggattaacacgat

SEQ ID NO: 166917 - DNA, 30 bp, Artificial Sequence
  Synthetic oligonucleotide
agttcgaatgagtccgacatagggcacgat

SEQ ID NO: 166918 - DNA, 30 bp, Artificial Sequence
  Synthetic oligonucleotide
cgatgagattatggggccatggaagacgat

SEQ ID NO: 166919 - DNA, 30 bp, Artificial Sequence
  Synthetic oligonucleotide
taagagacatgccgtgaacttagagacgat

SEQ ID NO: 166920 - DNA, 30 bp, Artificial Sequence
  Synthetic oligonucleotide
cagtcgacggaaaggtgcaaattggacgat

SEQ ID NO: 166921 - DNA, 30 bp, Artificial Sequence
  Synthetic oligonucleotide
acgacagaaggccgttttactagtgacgat

SEQ ID NO: 166922 - DNA, 30 bp, Artificial Sequence
  Synthetic oligonucleotide
ctgggataactcgccctacggggtgacgat

SEQ ID NO: 166923 - DNA, 30 bp, Artificial Sequence
  Synthetic oligonucleotide
ggccccccggatgcgagaatggaatacgat

SEQ ID NO: 166924 - DNA, 30 bp, Artificial Sequence
  Synthetic oligonucleotide
agatgtgcaatcgaagaagaataatacgat

SEQ ID NO: 166925 - DNA, 30 bp, Artificial Sequence
  Synthetic oligonucleotide
cgtatgcacggggccacctgctaatacgat

SEQ ID NO: 166926 - DNA, 30 bp, Artificial Sequence
  Synthetic oligonucleotide
ctgagtaacgagctactaaatcgatacgat

SEQ ID NO: 166927 - DNA, 30 bp, Artificial Sequence
  Synthetic oligonucleotide
gggtcttaccgagaatcatctggatacgat

SEQ ID NO: 166928 - DNA, 30 bp, Artificial Sequence
  Synthetic oligonucleotide
aacatggaccatttaagaaatccctacgat

SEQ ID NO: 166929 - DNA, 30 bp, Artificial Sequence
  Synthetic oligonucleotide
accttaggagcaacgacactgtcctacgat

SEQ ID NO: 166930 - DNA, 30 bp, Artificial Sequence
  Synthetic oligonucleotide
tagcgacgggacgagccgacggaaaccgat

SEQ ID NO: 166931 - DNA, 30 bp, Artificial Sequence
  Synthetic oligonucleotide
caacaacccttgtacatggagtgaaccgat

SEQ ID NO: 166932 - DNA, 27 bp, Artificial Sequence
  Synthetic oligonucleotide
ggcagaccctcagtccgatggcccgat

SEQ ID NO: 166933 - DNA, 30 bp, Artificial Sequence
  Synthetic oligonucleotide
gcccaaaaggtggatcttcgtcaagccgat

SEQ ID NO: 166934 - DNA, 30 bp, Artificial Sequence
  Synthetic oligonucleotide
gaaatcagaaatttcgagcatggagccgat

SEQ ID NO: 166935 - DNA, 30 bp, Artificial Sequence
  Synthetic oligonucleotide
ggttgcagtggcgcgtgcgctatggccgat

SEQ ID NO: 166936 - DNA, 30 bp, Artificial Sequence
  Synthetic oligonucleotide
atcaagtgacggataggtaggtcctccgat

SEQ ID NO: 166937 - DNA, 30 bp, Artificial Sequence
  Synthetic oligonucleotide
ggatttcgaagccaggtcgaccagtccgat

SEQ ID NO: 166938 - DNA, 30 bp, Artificial Sequence
  Synthetic oligonucleotide
aagggaataaagttgatcacctcttccgat

SEQ ID NO: 166939 - DNA, 30 bp, Artificial Sequence
  Synthetic oligonucleotide
attaaaggtagcgggagtgttacaagcgat

SEQ ID NO: 166940 - DNA, 30 bp, Artificial Sequence
  Synthetic oligonucleotide
cacgaaaagggttgtgaggtactcagcgat

SEQ ID NO: 166941 - DNA, 30 bp, Artificial Sequence
  Synthetic oligonucleotide
agcgtatggaacccgccggggtggagcgat

SEQ ID NO: 166942 - DNA, 30 bp, Artificial Sequence
  Synthetic oligonucleotide
atggcatacttcttttgaatctttcgcgat

SEQ ID NO: 166943 - DNA, 30 bp, Artificial Sequence
  Synthetic oligonucleotide
agactgcctgagtcggtatgcgtaggcgat

SEQ ID NO: 166944 - DNA, 30 bp, Artificial Sequence
  Synthetic oligonucleotide
cctgggcgcatcaggtagacgtcgggcgat

SEQ ID NO: 166945 - DNA, 30 bp, Artificial Sequence
  Synthetic oligonucleotide
ctacgaaatcttaacgtctcaattggcgat

SEQ ID NO: 166946 - DNA, 30 bp, Artificial Sequence
  Synthetic oligonucleotide
aacgagagcatggtgaatctccttggcgat

SEQ ID NO: 166947 - DNA, 30 bp, Artificial Sequence
  Synthetic oligonucleotide
aggtacttaagatcacaagaggaatgcgat

SEQ ID NO: 166948 - DNA, 30 bp, Artificial Sequence
  Synthetic oligonucleotide
caaggttaacgagtgtactattgatgcgat

SEQ ID NO: 166949 - DNA, 30 bp, Artificial Sequence
  Synthetic oligonucleotide
tgcgcaaaagaaacgagagatggaatcgat

SEQ ID NO: 166950 - DNA, 30 bp, Artificial Sequence
  Synthetic oligonucleotide
gaccgtcgtcatccctacgcaaggatcgat

SEQ ID NO: 166951 - DNA, 30 bp, Artificial Sequence
  Synthetic oligonucleotide
cataccgcatgttaaagatctgggatcgat

SEQ ID NO: 166952 - DNA, 30 bp, Artificial Sequence
  Synthetic oligonucleotide
aacgtcggcatagctagtctaatgatcgat

SEQ ID NO: 166953 - DNA, 30 bp, Artificial Sequence
  Synthetic oligonucleotide
gtcccagagccaatcaagtcagtagtcgat

SEQ ID NO: 166954 - DNA, 31 bp, Artificial Sequence
  Synthetic oligonucleotide
cgtccgttggtatatgaaaggccaggtcgat

SEQ ID NO: 166955 - DNA, 30 bp, Artificial Sequence
  Synthetic oligonucleotide
ggtgagcatccatcaacacgttaggtcgat

SEQ ID NO: 166956 - DNA, 30 bp, Artificial Sequence
  Synthetic oligonucleotide
tggaggttccatcgtttcgcttcggtcgat

SEQ ID NO: 166957 - DNA, 30 bp, Artificial Sequence
  Synthetic oligonucleotide
aggaatacaaaggctcatgcgcatttcgat

SEQ ID NO: 166958 - DNA, 30 bp, Artificial Sequence
  Synthetic oligonucleotide
ttgttaagtgtctccgctcttgtaaaggat

SEQ ID NO: 166959 - DNA, 30 bp, Artificial Sequence
  Synthetic oligonucleotide
attccaaaagtatagataaaggtgaaggat

SEQ ID NO: 166960 - DNA, 30 bp, Artificial Sequence
  Synthetic oligonucleotide
ggtatgaactttcggtgtctagataaggat

SEQ ID NO: 166961 - DNA, 30 bp, Artificial Sequence
  Synthetic oligonucleotide
ggagatgagcagtccagcggaattaaggat

SEQ ID NO: 166962 - DNA, 30 bp, Artificial Sequence
  Synthetic oligonucleotide
ctcgcagtgaccagagactcgagacaggat

SEQ ID NO: 166963 - DNA, 30 bp, Artificial Sequence
  Synthetic oligonucleotide
tatggagttattagcagtaagatacaggat

SEQ ID NO: 166964 - DNA, 30 bp, Artificial Sequence
  Synthetic oligonucleotide
cgaaggaatatgggcgtagaattacaggat

SEQ ID NO: 166965 - DNA, 30 bp, Artificial Sequence
  Synthetic oligonucleotide
gggcttcaaatgggtttccggcagcaggat

SEQ ID NO: 166966 - DNA, 30 bp, Artificial Sequence
  Synthetic oligonucleotide
caagcagcccgttgcactccggctcaggat

SEQ ID NO: 166967 - DNA, 30 bp, Artificial Sequence
  Synthetic oligonucleotide
cctgcggatagtgtcggcttgaaagaggat

SEQ ID NO: 166968 - DNA, 30 bp, Artificial Sequence
  Synthetic oligonucleotide
ctaacatggtttagcgtcagatgagaggat

SEQ ID NO: 166969 - DNA, 30 bp, Artificial Sequence
  Synthetic oligonucleotide
tttctggacctccatccagtgaacgaggat

SEQ ID NO: 166970 - DNA, 30 bp, Artificial Sequence
  Synthetic oligonucleotide
cgtaaacattatagtgtacggttcgaggat

SEQ ID NO: 166971 - DNA, 30 bp, Artificial Sequence
  Synthetic oligonucleotide
gaaaaagcaagtgtgctacttgaggaggat

SEQ ID NO: 166972 - DNA, 31 bp, Artificial Sequence
  Synthetic oligonucleotide
gttcaaaccgaaatgcggctgtatggaggat

SEQ ID NO: 166973 - DNA, 30 bp, Artificial Sequence
  Synthetic oligonucleotide
atgagtggcaactaagcgggctctgaggat

SEQ ID NO: 166974 - DNA, 30 bp, Artificial Sequence
  Synthetic oligonucleotide
ccgaccgataaactgtgccagcgataggat

SEQ ID NO: 166975 - DNA, 30 bp, Artificial Sequence
  Synthetic oligonucleotide
ccaccgtagagggttgggcctttataggat

SEQ ID NO: 166976 - DNA, 30 bp, Artificial Sequence
  Synthetic oligonucleotide
gggtggttacgatgtattcaatcttaggat

SEQ ID NO: 166977 - DNA, 30 bp, Artificial Sequence
  Synthetic oligonucleotide
ggcgtaaggcaacatgtcataccaacggat

SEQ ID NO: 166978 - DNA, 30 bp, Artificial Sequence
  Synthetic oligonucleotide
cagaggtaagagttatctctcgggacggat

SEQ ID NO: 166979 - DNA, 31 bp, Artificial Sequence
  Synthetic oligonucleotide
ctggaaggtccctgaacgacctcgcccggat

SEQ ID NO: 166980 - DNA, 30 bp, Artificial Sequence
  Synthetic oligonucleotide
agactcacgggtgccaagatttgcccggat

SEQ ID NO: 166981 - DNA, 30 bp, Artificial Sequence
  Synthetic oligonucleotide
gaattagtgcgtgaggcacattcgccggat

SEQ ID NO: 166982 - DNA, 30 bp, Artificial Sequence
  Synthetic oligonucleotide
gtggaattaaagcccataaaggggccggat

SEQ ID NO: 166983 - DNA, 30 bp, Artificial Sequence
  Synthetic oligonucleotide
gcccatacatgggaaaggtaccaagcggat

SEQ ID NO: 166984 - DNA, 30 bp, Artificial Sequence
  Synthetic oligonucleotide
tctccattcccaagtagcttacccgcggat

SEQ ID NO: 166985 - DNA, 30 bp, Artificial Sequence
  Synthetic oligonucleotide
cttacctcgtgcgtcgttagttctgcggat

SEQ ID NO: 166986 - DNA, 30 bp, Artificial Sequence
  Synthetic oligonucleotide
aatgcagaaaggcaggacagtggtgcggat

SEQ ID NO: 166987 - DNA, 30 bp, Artificial Sequence
  Synthetic oligonucleotide
atcatttagattcgggatagaagatcggat

SEQ ID NO: 166988 - DNA, 30 bp, Artificial Sequence
  Synthetic oligonucleotide
aggcgagcttgggttgagaacaagtcggat

SEQ ID NO: 166989 - DNA, 30 bp, Artificial Sequence
  Synthetic oligonucleotide
accatctcccggctgtgagctagttcggat

SEQ ID NO: 166990 - DNA, 30 bp, Artificial Sequence
  Synthetic oligonucleotide
cggaatcgatctgtagttccaccaagggat

SEQ ID NO: 166991 - DNA, 30 bp, Artificial Sequence
  Synthetic oligonucleotide
agatgttttaagaagatggacgtcagggat

SEQ ID NO: 166992 - DNA, 30 bp, Artificial Sequence
  Synthetic oligonucleotide
ccgcctgttatccgcaataaggagagggat

SEQ ID NO: 166993 - DNA, 30 bp, Artificial Sequence
  Synthetic oligonucleotide
cgactcgcctaaagtactatatcgagggat

SEQ ID NO: 166994 - DNA, 30 bp, Artificial Sequence
  Synthetic oligonucleotide
gatggaaggaggcgattggagactagggat

SEQ ID NO: 166995 - DNA, 30 bp, Artificial Sequence
  Synthetic oligonucleotide
ttcatatacttagagggacagatacgggat

SEQ ID NO: 166996 - DNA, 30 bp, Artificial Sequence
  Synthetic oligonucleotide
gaacagtataagggtcgagtcgggcgggat

SEQ ID NO: 166997 - DNA, 30 bp, Artificial Sequence
  Synthetic oligonucleotide
ccagaaactgacatccagaccctgcgggat

SEQ ID NO: 166998 - DNA, 30 bp, Artificial Sequence
  Synthetic oligonucleotide
ccggggaaccgcccgactgaagctcgggat

SEQ ID NO: 166999 - DNA, 30 bp, Artificial Sequence
  Synthetic oligonucleotide
cacctccagaagagcctacataaaggggat

SEQ ID NO: 167000 - DNA, 30 bp, Artificial Sequence
  Synthetic oligonucleotide
ccgcgcgtagaagaggtttcgttaggggat

SEQ ID NO: 167001 - DNA, 30 bp, Artificial Sequence
  Synthetic oligonucleotide
agatccggtgttttttaccacaacggggat

SEQ ID NO: 167002 - DNA, 30 bp, Artificial Sequence
  Synthetic oligonucleotide
gtaacggattgcgaaatgagttagggggat

SEQ ID NO: 167003 - DNA, 30 bp, Artificial Sequence
  Synthetic oligonucleotide
gcggcaacgagcctagacctcacgggggat

SEQ ID NO: 167004 - DNA, 30 bp, Artificial Sequence
  Synthetic oligonucleotide
acaagtgacccactctgagaatcgggggat

SEQ ID NO: 167005 - DNA, 30 bp, Artificial Sequence
  Synthetic oligonucleotide
aatttgcaccagatggatgagctgggggat

SEQ ID NO: 167006 - DNA, 30 bp, Artificial Sequence
  Synthetic oligonucleotide
aaggatgacgattgcgagggtcctggggat

SEQ ID NO: 167007 - DNA, 30 bp, Artificial Sequence
  Synthetic oligonucleotide
catcgaaaatcggtggatgcagaatgggat

SEQ ID NO: 167008 - DNA, 30 bp, Artificial Sequence
  Synthetic oligonucleotide
ctattatggaatccatgctccgtatgggat

SEQ ID NO: 167009 - DNA, 30 bp, Artificial Sequence
  Synthetic oligonucleotide
acgtgccttattaacggacggaactgggat

SEQ ID NO: 167010 - DNA, 30 bp, Artificial Sequence
  Synthetic oligonucleotide
cagagcagctaacaacgccgttaaatggat

SEQ ID NO: 167011 - DNA, 30 bp, Artificial Sequence
  Synthetic oligonucleotide
ctatacaccagactaacgttatagatggat

SEQ ID NO: 167012 - DNA, 30 bp, Artificial Sequence
  Synthetic oligonucleotide
acacacgacaagtttagcagtacactggat

SEQ ID NO: 167013 - DNA, 30 bp, Artificial Sequence
  Synthetic oligonucleotide
gaccttgaaccggaaactcagacagtggat

SEQ ID NO: 167014 - DNA, 30 bp, Artificial Sequence
  Synthetic oligonucleotide
cctagatggactaaattctcggacgtggat

SEQ ID NO: 167015 - DNA, 30 bp, Artificial Sequence
  Synthetic oligonucleotide
tgacaaaccatctgcaaactgggcgtggat

SEQ ID NO: 167016 - DNA, 30 bp, Artificial Sequence
  Synthetic oligonucleotide
tgaggttctttcctcttgagggcggtggat

SEQ ID NO: 167017 - DNA, 30 bp, Artificial Sequence
  Synthetic oligonucleotide
ggccacgcggtttgagccagtgggttggat

SEQ ID NO: 167018 - DNA, 30 bp, Artificial Sequence
  Synthetic oligonucleotide
gcttagactggttccgctgaggtgttggat

SEQ ID NO: 167019 - DNA, 29 bp, Artificial Sequence
  Synthetic oligonucleotide
gcacgagctggtggacgggccgaaatgat

SEQ ID NO: 167020 - DNA, 30 bp, Artificial Sequence
  Synthetic oligonucleotide
caatattcacccgttcgtattggaaatgat

SEQ ID NO: 167021 - DNA, 30 bp, Artificial Sequence
  Synthetic oligonucleotide
attgtgcgaagttcgaacgagctgaatgat

SEQ ID NO: 167022 - DNA, 30 bp, Artificial Sequence
  Synthetic oligonucleotide
aggcttcaaggtttacgtatgtcacatgat

SEQ ID NO: 167023 - DNA, 30 bp, Artificial Sequence
  Synthetic oligonucleotide
aactgtggataagagggggcgctacatgat

SEQ ID NO: 167024 - DNA, 30 bp, Artificial Sequence
  Synthetic oligonucleotide
gcacaaataatcagcactgggcagcatgat

SEQ ID NO: 167025 - DNA, 30 bp, Artificial Sequence
  Synthetic oligonucleotide
aacttacaatggcaaggctcacttcatgat

SEQ ID NO: 167026 - DNA, 30 bp, Artificial Sequence
  Synthetic oligonucleotide
tgcgatcgtaggatgggtgtagaagatgat

SEQ ID NO: 167027 - DNA, 30 bp, Artificial Sequence
  Synthetic oligonucleotide
gtggttacacgttatgtggatcgagatgat

SEQ ID NO: 167028 - DNA, 30 bp, Artificial Sequence
  Synthetic oligonucleotide
aatcgacaaggttaggccacccgcgatgat

SEQ ID NO: 167029 - DNA, 30 bp, Artificial Sequence
  Synthetic oligonucleotide
atcgttcgagtcctagaaacaaggtatgat

SEQ ID NO: 167030 - DNA, 30 bp, Artificial Sequence
  Synthetic oligonucleotide
aagcgacaagctggcttgatgataactgat

SEQ ID NO: 167031 - DNA, 30 bp, Artificial Sequence
  Synthetic oligonucleotide
gcatgacacttggctattcatcacactgat

SEQ ID NO: 167032 - DNA, 30 bp, Artificial Sequence
  Synthetic oligonucleotide
ttcgtcaaggtgtaccagtctttcactgat

SEQ ID NO: 167033 - DNA, 30 bp, Artificial Sequence
  Synthetic oligonucleotide
acagtagtcagcagttgggtacgacctgat

SEQ ID NO: 167034 - DNA, 30 bp, Artificial Sequence
  Synthetic oligonucleotide
tatgccggattgaaaatacgcgtacctgat

SEQ ID NO: 167035 - DNA, 30 bp, Artificial Sequence
  Synthetic oligonucleotide
gaacgggtcgaaaactcacacaccgctgat

SEQ ID NO: 167036 - DNA, 30 bp, Artificial Sequence
  Synthetic oligonucleotide
cgggaacacaatgcgccatgagatgctgat

SEQ ID NO: 167037 - DNA, 30 bp, Artificial Sequence
  Synthetic oligonucleotide
ttgtgaaccactagaggttggggtgctgat

SEQ ID NO: 167038 - DNA, 30 bp, Artificial Sequence
  Synthetic oligonucleotide
tgaccttggggatgcctcctctcatctgat

SEQ ID NO: 167039 - DNA, 30 bp, Artificial Sequence
  Synthetic oligonucleotide
cccgaaattcgaccatagctgctatctgat

SEQ ID NO: 167040 - DNA, 30 bp, Artificial Sequence
  Synthetic oligonucleotide
atgcacatgcacaggtggtgacactctgat

SEQ ID NO: 167041 - DNA, 30 bp, Artificial Sequence
  Synthetic oligonucleotide
tttccgctgggcaggcctgtgtcgtctgat

SEQ ID NO: 167042 - DNA, 30 bp, Artificial Sequence
  Synthetic oligonucleotide
tgccaacggcagccctaacagacaagtgat

SEQ ID NO: 167043 - DNA, 30 bp, Artificial Sequence
  Synthetic oligonucleotide
tctttacatcaatagacctcacgcagtgat

SEQ ID NO: 167044 - DNA, 30 bp, Artificial Sequence
  Synthetic oligonucleotide
acggggagtaatccattacatgaacgtgat

SEQ ID NO: 167045 - DNA, 30 bp, Artificial Sequence
  Synthetic oligonucleotide
aaggtccaacaggcccgcattatacgtgat

SEQ ID NO: 167046 - DNA, 30 bp, Artificial Sequence
  Synthetic oligonucleotide
gtgctataggggttacgtgaggcccgtgat

SEQ ID NO: 167047 - DNA, 30 bp, Artificial Sequence
  Synthetic oligonucleotide
aacgcatcagaggatctattgaggcgtgat

SEQ ID NO: 167048 - DNA, 30 bp, Artificial Sequence
  Synthetic oligonucleotide
aactgcgcatgatacctgaccttgcgtgat

SEQ ID NO: 167049 - DNA, 29 bp, Artificial Sequence
  Synthetic oligonucleotide
cttgcgtttggtggggggcaataggtgat

SEQ ID NO: 167050 - DNA, 30 bp, Artificial Sequence
  Synthetic oligonucleotide
ttacgtatagtttaagaaagatgcggtgat

SEQ ID NO: 167051 - DNA, 31 bp, Artificial Sequence
  Synthetic oligonucleotide
caaagaaacacgggccgcctgacgtggtgat

SEQ ID NO: 167052 - DNA, 30 bp, Artificial Sequence
  Synthetic oligonucleotide
cccggataaggacccacacatacatgtgat

SEQ ID NO: 167053 - DNA, 30 bp, Artificial Sequence
  Synthetic oligonucleotide
ctaacttggaaagacattaccaagtgtgat

SEQ ID NO: 167054 - DNA, 30 bp, Artificial Sequence
  Synthetic oligonucleotide
cattcagtaactgagtgagcctcgtgtgat

SEQ ID NO: 167055 - DNA, 30 bp, Artificial Sequence
  Synthetic oligonucleotide
tacttaccgtccaccgccataagttgtgat

SEQ ID NO: 167056 - DNA, 30 bp, Artificial Sequence
  Synthetic oligonucleotide
agatcctcggtggaagccaaattcattgat

SEQ ID NO: 167057 - DNA, 31 bp, Artificial Sequence
  Synthetic oligonucleotide
cctggatctgtggtaagatcgcacgattgat

SEQ ID NO: 167058 - DNA, 30 bp, Artificial Sequence
  Synthetic oligonucleotide
cgtgggagttttactcgcttccctattgat

SEQ ID NO: 167059 - DNA, 30 bp, Artificial Sequence
  Synthetic oligonucleotide
cccgttagtccgtgaaaacgagttattgat

SEQ ID NO: 167060 - DNA, 30 bp, Artificial Sequence
  Synthetic oligonucleotide
tgaatagttccctatctccgagaagttgat

SEQ ID NO: 167061 - DNA, 30 bp, Artificial Sequence
  Synthetic oligonucleotide
gcgtaagatttttacaccgatagagttgat

SEQ ID NO: 167062 - DNA, 30 bp, Artificial Sequence
  Synthetic oligonucleotide
tgactgggtcatagtactcagaccgttgat

SEQ ID NO: 167063 - DNA, 30 bp, Artificial Sequence
  Synthetic oligonucleotide
agtggaaccgggagtaacgggcgcgttgat

SEQ ID NO: 167064 - DNA, 30 bp, Artificial Sequence
  Synthetic oligonucleotide
tcccgatgataggggaagtttcgctttgat

SEQ ID NO: 167065 - DNA, 30 bp, Artificial Sequence
  Synthetic oligonucleotide
gcttacgggaagtggaatcaaagttttgat

SEQ ID NO: 167066 - DNA, 30 bp, Artificial Sequence
  Synthetic oligonucleotide
tgaacacgattgttatgcgcataaaaatat

SEQ ID NO: 167067 - DNA, 30 bp, Artificial Sequence
  Synthetic oligonucleotide
aacttgtgcctgaatctaagtcctaaatat

SEQ ID NO: 167068 - DNA, 30 bp, Artificial Sequence
  Synthetic oligonucleotide
acttcgtccatctattccttgcgtcaatat

SEQ ID NO: 167069 - DNA, 30 bp, Artificial Sequence
  Synthetic oligonucleotide
gccgaataaagccaaccaaggtacgaatat

SEQ ID NO: 167070 - DNA, 30 bp, Artificial Sequence
  Synthetic oligonucleotide
gattcatctccacagtgagcatgcgaatat

SEQ ID NO: 167071 - DNA, 30 bp, Artificial Sequence
  Synthetic oligonucleotide
tacgttgaagtctactttttattcgaatat

SEQ ID NO: 167072 - DNA, 30 bp, Artificial Sequence
  Synthetic oligonucleotide
ctaccgagctggaggacgactacggaatat

SEQ ID NO: 167073 - DNA, 30 bp, Artificial Sequence
  Synthetic oligonucleotide
tggctgagacattggactacggttgaatat

SEQ ID NO: 167074 - DNA, 30 bp, Artificial Sequence
  Synthetic oligonucleotide
acgtaccctggcaacccctggaaataatat

SEQ ID NO: 167075 - DNA, 30 bp, Artificial Sequence
  Synthetic oligonucleotide
gggtcgttcatacttttcaatgcataatat

SEQ ID NO: 167076 - DNA, 30 bp, Artificial Sequence
  Synthetic oligonucleotide
cggcgatcggggttaatagcttgataatat

SEQ ID NO: 167077 - DNA, 30 bp, Artificial Sequence
  Synthetic oligonucleotide
agataatccggagtattggtatactaatat

SEQ ID NO: 167078 - DNA, 30 bp, Artificial Sequence
  Synthetic oligonucleotide
cagagtctatgtggtgaacaaagctaatat

SEQ ID NO: 167079 - DNA, 40 bp, Artificial Sequence
  Synthetic oligonucleotide
cggctcacaatcccgtacattcattagccgtcggtaatat

SEQ ID NO: 167080 - DNA, 30 bp, Artificial Sequence
  Synthetic oligonucleotide
agcgcactgttctagcacgtggtttaatat

SEQ ID NO: 167081 - DNA, 30 bp, Artificial Sequence
  Synthetic oligonucleotide
tgaaacgcccgggctcgtaacataacatat

SEQ ID NO: 167082 - DNA, 30 bp, Artificial Sequence
  Synthetic oligonucleotide
cataatccgggcacagcgccgaagccatat

SEQ ID NO: 167083 - DNA, 30 bp, Artificial Sequence
  Synthetic oligonucleotide
gcttgagtagcgtcactggcgtcgccatat

SEQ ID NO: 167084 - DNA, 30 bp, Artificial Sequence
  Synthetic oligonucleotide
gacattaatcaagttcatatacggccatat

SEQ ID NO: 167085 - DNA, 30 bp, Artificial Sequence
  Synthetic oligonucleotide
gagggacaagaaaggttaactgaagcatat

SEQ ID NO: 167086 - DNA, 30 bp, Artificial Sequence
  Synthetic oligonucleotide
atgtgggcgttcgtagccatcttagcatat

SEQ ID NO: 167087 - DNA, 30 bp, Artificial Sequence
  Synthetic oligonucleotide
tagaaatgaatatagatcgcgtgggcatat

SEQ ID NO: 167088 - DNA, 30 bp, Artificial Sequence
  Synthetic oligonucleotide
agctagaactaagggctgactgtggcatat

SEQ ID NO: 167089 - DNA, 30 bp, Artificial Sequence
  Synthetic oligonucleotide
atgtgctgtactatagccgtcaaatcatat

SEQ ID NO: 167090 - DNA, 30 bp, Artificial Sequence
  Synthetic oligonucleotide
gtcattcgcatcggggtccgagagtcatat

SEQ ID NO: 167091 - DNA, 30 bp, Artificial Sequence
  Synthetic oligonucleotide
gacgcggggatgtgaggtaccgcttcatat

SEQ ID NO: 167092 - DNA, 30 bp, Artificial Sequence
  Synthetic oligonucleotide
ttaggacagactgtcgctcatctcagatat

SEQ ID NO: 167093 - DNA, 30 bp, Artificial Sequence
  Synthetic oligonucleotide
acacagatggagtgacaggtctgacgatat

SEQ ID NO: 167094 - DNA, 30 bp, Artificial Sequence
  Synthetic oligonucleotide
gatgtaaaaagttggtcggcggctcgatat

SEQ ID NO: 167095 - DNA, 30 bp, Artificial Sequence
  Synthetic oligonucleotide
catgttcttggcttcgagcgtagtcgatat

SEQ ID NO: 167096 - DNA, 30 bp, Artificial Sequence
  Synthetic oligonucleotide
ggacggcggtggattccatgttcttgatat

SEQ ID NO: 167097 - DNA, 30 bp, Artificial Sequence
  Synthetic oligonucleotide
gaggaggcggtcctagtatacaacatatat

SEQ ID NO: 167098 - DNA, 31 bp, Artificial Sequence
  Synthetic oligonucleotide
caggaggtaacatgtgggaacggccatatat

SEQ ID NO: 167099 - DNA, 30 bp, Artificial Sequence
  Synthetic oligonucleotide
aatgagacagaggcagagagttccatatat

SEQ ID NO: 167100 - DNA, 30 bp, Artificial Sequence
  Synthetic oligonucleotide
atgcacaaagaagaattcggcagcatatat

SEQ ID NO: 167101 - DNA, 30 bp, Artificial Sequence
  Synthetic oligonucleotide
gacataatagagatggacaagggcatatat

SEQ ID NO: 167102 - DNA, 30 bp, Artificial Sequence
  Synthetic oligonucleotide
tatcatggatgccactctccaatcctatat

SEQ ID NO: 167103 - DNA, 30 bp, Artificial Sequence
  Synthetic oligonucleotide
cgcaccggcgggtatccgtaggagctatat

SEQ ID NO: 167104 - DNA, 30 bp, Artificial Sequence
  Synthetic oligonucleotide
ggagggacattagcttgtgggcggctatat

SEQ ID NO: 167105 - DNA, 30 bp, Artificial Sequence
  Synthetic oligonucleotide
agggtgttggtgtgttatgtctccgtatat

SEQ ID NO: 167106 - DNA, 30 bp, Artificial Sequence
  Synthetic oligonucleotide
gacgctcagaaccggcacgaaagcgtatat

SEQ ID NO: 167107 - DNA, 30 bp, Artificial Sequence
  Synthetic oligonucleotide
tccaggagggcaaagacaagcgctgtatat

SEQ ID NO: 167108 - DNA, 30 bp, Artificial Sequence
  Synthetic oligonucleotide
gaccaaaaaaagttccctgtagaattatat

SEQ ID NO: 167109 - DNA, 30 bp, Artificial Sequence
  Synthetic oligonucleotide
ggtaaaggtgtcaatgccggctcattatat

SEQ ID NO: 167110 - DNA, 30 bp, Artificial Sequence
  Synthetic oligonucleotide
gtaagaagacgtggagtccaatgtaactat

SEQ ID NO: 167111 - DNA, 30 bp, Artificial Sequence
  Synthetic oligonucleotide
tatgtgagtaggctaatggacagcgactat

SEQ ID NO: 167112 - DNA, 30 bp, Artificial Sequence
  Synthetic oligonucleotide
tcaatattcatgcatcacaagtaggactat

SEQ ID NO: 167113 - DNA, 30 bp, Artificial Sequence
  Synthetic oligonucleotide
gtcattagagagcttcgggtaggtgactat

SEQ ID NO: 167114 - DNA, 30 bp, Artificial Sequence
  Synthetic oligonucleotide
gacgaacgtggttattcgttaatgtactat

SEQ ID NO: 167115 - DNA, 30 bp, Artificial Sequence
  Synthetic oligonucleotide
ttgttgtgttctctttttgtgttttactat

SEQ ID NO: 167116 - DNA, 30 bp, Artificial Sequence
  Synthetic oligonucleotide
aggtactaggcattagtaatgggaacctat

SEQ ID NO: 167117 - DNA, 30 bp, Artificial Sequence
  Synthetic oligonucleotide
gtctaatcacatcaccctaatggaacctat

SEQ ID NO: 167118 - DNA, 30 bp, Artificial Sequence
  Synthetic oligonucleotide
atcccggcatgaagcgcgtgccagacctat

SEQ ID NO: 167119 - DNA, 30 bp, Artificial Sequence
  Synthetic oligonucleotide
agttaccgaagtagaagggacggtccctat

SEQ ID NO: 167120 - DNA, 30 bp, Artificial Sequence
  Synthetic oligonucleotide
aggcatgaaaaacagggtccaatcgcctat

SEQ ID NO: 167121 - DNA, 30 bp, Artificial Sequence
  Synthetic oligonucleotide
taatacggaactacctctctttaaagctat

SEQ ID NO: 167122 - DNA, 30 bp, Artificial Sequence
  Synthetic oligonucleotide
ctcacaaccggataccctaacaggagctat

SEQ ID NO: 167123 - DNA, 30 bp, Artificial Sequence
  Synthetic oligonucleotide
aaacgtaaacaccaacggaacgagcgctat

SEQ ID NO: 167124 - DNA, 30 bp, Artificial Sequence
  Synthetic oligonucleotide
ccgtaccgtcagtgtggcgaggacggctat

SEQ ID NO: 167125 - DNA, 30 bp, Artificial Sequence
  Synthetic oligonucleotide
caaaattaaccgggcgtgggcgagggctat

SEQ ID NO: 167126 - DNA, 30 bp, Artificial Sequence
  Synthetic oligonucleotide
gcacaacgttctgaattgaactcatgctat

SEQ ID NO: 167127 - DNA, 31 bp, Artificial Sequence
  Synthetic oligonucleotide
tgaggtccagacaatcagcgaaacgatctat

SEQ ID NO: 167128 - DNA, 30 bp, Artificial Sequence
  Synthetic oligonucleotide
cacaagtgaaaggaacgacttactctctat

SEQ ID NO: 167129 - DNA, 30 bp, Artificial Sequence
  Synthetic oligonucleotide
agacacttttagcgcatacgtaaagtctat

SEQ ID NO: 167130 - DNA, 30 bp, Artificial Sequence
  Synthetic oligonucleotide
gaggcgattagggtctgtttatgcgtctat

SEQ ID NO: 167131 - DNA, 30 bp, Artificial Sequence
  Synthetic oligonucleotide
aacagcaaatgatcggaggcaacggtctat

SEQ ID NO: 167132 - DNA, 30 bp, Artificial Sequence
  Synthetic oligonucleotide
gtgcgctaaacccaagcgtcgaatgtctat

SEQ ID NO: 167133 - DNA, 30 bp, Artificial Sequence
  Synthetic oligonucleotide
ctcttcacctccgcccgggcacatgtctat

SEQ ID NO: 167134 - DNA, 30 bp, Artificial Sequence
  Synthetic oligonucleotide
gagagtataataggagcgtcttaattctat

SEQ ID NO: 167135 - DNA, 30 bp, Artificial Sequence
  Synthetic oligonucleotide
tgaggcggttatcaagcagtatagaagtat

SEQ ID NO: 167136 - DNA, 30 bp, Artificial Sequence
  Synthetic oligonucleotide
gaaagcacgctacctgagcattagaagtat

SEQ ID NO: 167137 - DNA, 30 bp, Artificial Sequence
  Synthetic oligonucleotide
gtgtggtaggtatattaatgtgggaagtat

SEQ ID NO: 167138 - DNA, 30 bp, Artificial Sequence
  Synthetic oligonucleotide
tagtaggagatatgtatcgcgagacagtat

SEQ ID NO: 167139 - DNA, 30 bp, Artificial Sequence
  Synthetic oligonucleotide
tcgtgtttaacacggctcgggatgcagtat

SEQ ID NO: 167140 - DNA, 30 bp, Artificial Sequence
  Synthetic oligonucleotide
ctcaaaccatttcagaaatcccgggagtat

SEQ ID NO: 167141 - DNA, 30 bp, Artificial Sequence
  Synthetic oligonucleotide
tggtctgaagtcatgcgtatgatggagtat

SEQ ID NO: 167142 - DNA, 30 bp, Artificial Sequence
  Synthetic oligonucleotide
gcacgcgtgggacggcgagatgttgagtat

SEQ ID NO: 167143 - DNA, 30 bp, Artificial Sequence
  Synthetic oligonucleotide
atcgacgcactgccccgccttagctagtat

SEQ ID NO: 167144 - DNA, 30 bp, Artificial Sequence
  Synthetic oligonucleotide
tgaaggaaagctatgccttggcacacgtat

SEQ ID NO: 167145 - DNA, 30 bp, Artificial Sequence
  Synthetic oligonucleotide
gacgaagagaatcgtgtctgattgacgtat

SEQ ID NO: 167146 - DNA, 30 bp, Artificial Sequence
  Synthetic oligonucleotide
aggtcatcacgtccaatgtgtggtacgtat

SEQ ID NO: 167147 - DNA, 30 bp, Artificial Sequence
  Synthetic oligonucleotide
tataaacggccgcgggcttcatgaccgtat

SEQ ID NO: 167148 - DNA, 30 bp, Artificial Sequence
  Synthetic oligonucleotide
acgactcacgccctgtcattgacagcgtat

SEQ ID NO: 167149 - DNA, 30 bp, Artificial Sequence
  Synthetic oligonucleotide
cagcgttggtcgccaagcatgccagcgtat

SEQ ID NO: 167150 - DNA, 30 bp, Artificial Sequence
  Synthetic oligonucleotide
cgaagcactcgagggttctaggcagcgtat

SEQ ID NO: 167151 - DNA, 30 bp, Artificial Sequence
  Synthetic oligonucleotide
gtctgtatggccctgtctgtatgagcgtat

SEQ ID NO: 167152 - DNA, 30 bp, Artificial Sequence
  Synthetic oligonucleotide
ggcactatcatacgttatgagtaggcgtat

SEQ ID NO: 167153 - DNA, 30 bp, Artificial Sequence
  Synthetic oligonucleotide
gtaaatcatgactaacctataccttcgtat

SEQ ID NO: 167154 - DNA, 30 bp, Artificial Sequence
  Synthetic oligonucleotide
gatgatgggtcgaaccaaggttagaggtat

SEQ ID NO: 167155 - DNA, 30 bp, Artificial Sequence
  Synthetic oligonucleotide
cgctgggactccgaaattggtgcgaggtat

SEQ ID NO: 167156 - DNA, 30 bp, Artificial Sequence
  Synthetic oligonucleotide
acatcacccgagggggtctacaataggtat

SEQ ID NO: 167157 - DNA, 30 bp, Artificial Sequence
  Synthetic oligonucleotide
tgctggtggtaacctaacatggttcggtat

SEQ ID NO: 167158 - DNA, 30 bp, Artificial Sequence
  Synthetic oligonucleotide
agtgggcaaggctcacattctagagggtat

SEQ ID NO: 167159 - DNA, 29 bp, Artificial Sequence
  Synthetic oligonucleotide
taagctaagtacggttaggtgacgggtat

SEQ ID NO: 167160 - DNA, 30 bp, Artificial Sequence
  Synthetic oligonucleotide
gcgtcgttaatgaggttagtgggcgggtat

SEQ ID NO: 167161 - DNA, 30 bp, Artificial Sequence
  Synthetic oligonucleotide
tgagcactacaaagatgagactgggggtat

SEQ ID NO: 167162 - DNA, 30 bp, Artificial Sequence
  Synthetic oligonucleotide
gtcgttagtcgtcaggtgacacatgggtat

SEQ ID NO: 167163 - DNA, 30 bp, Artificial Sequence
  Synthetic oligonucleotide
gtaaggatatctagcggccgatctgggtat

SEQ ID NO: 167164 - DNA, 30 bp, Artificial Sequence
  Synthetic oligonucleotide
tgcaaaccattcgaccatgcacaactgtat

SEQ ID NO: 167165 - DNA, 30 bp, Artificial Sequence
  Synthetic oligonucleotide
atacagtcatcgaaaagaactctactgtat

SEQ ID NO: 167166 - DNA, 30 bp, Artificial Sequence
  Synthetic oligonucleotide
gaggttccgtggagggtgactctagtgtat

SEQ ID NO: 167167 - DNA, 30 bp, Artificial Sequence
  Synthetic oligonucleotide
tgtcgcgttgatgtgcgatgaagcgtgtat

SEQ ID NO: 167168 - DNA, 30 bp, Artificial Sequence
  Synthetic oligonucleotide
gaaaggtacagagttctaaattaggtgtat

SEQ ID NO: 167169 - DNA, 30 bp, Artificial Sequence
  Synthetic oligonucleotide
caactaggcaaattatacgcatatgtgtat

SEQ ID NO: 167170 - DNA, 30 bp, Artificial Sequence
  Synthetic oligonucleotide
agtgggtgactgattcgtccaccattgtat

SEQ ID NO: 167171 - DNA, 28 bp, Artificial Sequence
  Synthetic oligonucleotide
caagcacagcggaatccacgcattgtat

SEQ ID NO: 167172 - DNA, 30 bp, Artificial Sequence
  Synthetic oligonucleotide
ggggtcgggcatagaactgtcgtgttgtat

SEQ ID NO: 167173 - DNA, 31 bp, Artificial Sequence
  Synthetic oligonucleotide
aacgacgcgctcacacagatgttggaattat

SEQ ID NO: 167174 - DNA, 30 bp, Artificial Sequence
  Synthetic oligonucleotide
aacgaaagggtcccctccaacgcacattat

SEQ ID NO: 167175 - DNA, 31 bp, Artificial Sequence
  Synthetic oligonucleotide
aagggtgaccgggaataaacctaggcattat

SEQ ID NO: 167176 - DNA, 30 bp, Artificial Sequence
  Synthetic oligonucleotide
tgccttggaatggttaggagattagattat

SEQ ID NO: 167177 - DNA, 30 bp, Artificial Sequence
  Synthetic oligonucleotide
acggctgtgttccaaggagtgcgtgattat

SEQ ID NO: 167178 - DNA, 30 bp, Artificial Sequence
  Synthetic oligonucleotide
ggaaacacaaggttcgtcgatttatattat

SEQ ID NO: 167179 - DNA, 30 bp, Artificial Sequence
  Synthetic oligonucleotide
ggttaggagttcatgctgccctgctattat

SEQ ID NO: 167180 - DNA, 30 bp, Artificial Sequence
  Synthetic oligonucleotide
agtaatggaggttggcatgccgtctattat

SEQ ID NO: 167181 - DNA, 30 bp, Artificial Sequence
  Synthetic oligonucleotide
aagcaccgaactgatttactaacttattat

SEQ ID NO: 167182 - DNA, 30 bp, Artificial Sequence
  Synthetic oligonucleotide
accagcctaacttaataatagtgtacttat

SEQ ID NO: 167183 - DNA, 30 bp, Artificial Sequence
  Synthetic oligonucleotide
gatacacagcttgctggactgctcccttat

SEQ ID NO: 167184 - DNA, 30 bp, Artificial Sequence
  Synthetic oligonucleotide
aggtgcctcggacaccaagtgtttgcttat

SEQ ID NO: 167185 - DNA, 30 bp, Artificial Sequence
  Synthetic oligonucleotide
aggttaagatcttctgcgatgggatcttat

SEQ ID NO: 167186 - DNA, 30 bp, Artificial Sequence
  Synthetic oligonucleotide
ggtcgcacgagaatggaaaatcagtcttat

SEQ ID NO: 167187 - DNA, 30 bp, Artificial Sequence
  Synthetic oligonucleotide
ggtcagaggaagtcacatatatcgtcttat

SEQ ID NO: 167188 - DNA, 30 bp, Artificial Sequence
  Synthetic oligonucleotide
catatccagagatttagccaccaaagttat

SEQ ID NO: 167189 - DNA, 30 bp, Artificial Sequence
  Synthetic oligonucleotide
tctatcaaaggggacgaaagccaaagttat

SEQ ID NO: 167190 - DNA, 30 bp, Artificial Sequence
  Synthetic oligonucleotide
actagtgcagatgggcagtacgaaagttat

SEQ ID NO: 167191 - DNA, 30 bp, Artificial Sequence
  Synthetic oligonucleotide
atgtatgcctcattacaacggtagagttat

SEQ ID NO: 167192 - DNA, 30 bp, Artificial Sequence
  Synthetic oligonucleotide
ataccgggcgtcagagatccatcgagttat

SEQ ID NO: 167193 - DNA, 30 bp, Artificial Sequence
  Synthetic oligonucleotide
ccgtatccgctgaggaatcgtaggagttat

SEQ ID NO: 167194 - DNA, 30 bp, Artificial Sequence
  Synthetic oligonucleotide
gcgtgacgtaaacaatgggacgagcgttat

SEQ ID NO: 167195 - DNA, 30 bp, Artificial Sequence
  Synthetic oligonucleotide
acgcccgtccgatcaatctcgcctcgttat

SEQ ID NO: 167196 - DNA, 30 bp, Artificial Sequence
  Synthetic oligonucleotide
tggcgcattcaccttgtaagggacggttat

SEQ ID NO: 167197 - DNA, 29 bp, Artificial Sequence
  Synthetic oligonucleotide
agacgtgatctgttgcacctttgggttat

SEQ ID NO: 167198 - DNA, 30 bp, Artificial Sequence
  Synthetic oligonucleotide
cccgggctcacacaacttgctaaatgttat

SEQ ID NO: 167199 - DNA, 30 bp, Artificial Sequence
  Synthetic oligonucleotide
gcacctgtgtcgcagggttagtcgtgttat

SEQ ID NO: 167200 - DNA, 30 bp, Artificial Sequence
  Synthetic oligonucleotide
tccccacatggagaggtggtatgttgttat

SEQ ID NO: 167201 - DNA, 30 bp, Artificial Sequence
  Synthetic oligonucleotide
tgcgactaagctggaatgctgacaatttat

SEQ ID NO: 167202 - DNA, 30 bp, Artificial Sequence
  Synthetic oligonucleotide
ctgaggcgtaataggcattaaagaatttat

SEQ ID NO: 167203 - DNA, 30 bp, Artificial Sequence
  Synthetic oligonucleotide
ctggactataaaacccgggattatctttat

SEQ ID NO: 167204 - DNA, 30 bp, Artificial Sequence
  Synthetic oligonucleotide
gcggtactgggtacactgaattaggtttat

SEQ ID NO: 167205 - DNA, 30 bp, Artificial Sequence
  Synthetic oligonucleotide
cgataacggacttagcccgagagtgtttat

SEQ ID NO: 167206 - DNA, 30 bp, Artificial Sequence
  Synthetic oligonucleotide
ccgatgaagggccattcaagtagcttttat

SEQ ID NO: 167207 - DNA, 30 bp, Artificial Sequence
  Synthetic oligonucleotide
gttacgtaagggtcttgtaacggtaaaact

SEQ ID NO: 167208 - DNA, 30 bp, Artificial Sequence
  Synthetic oligonucleotide
actatcaagaatcacaaggccttacaaact

SEQ ID NO: 167209 - DNA, 30 bp, Artificial Sequence
  Synthetic oligonucleotide
gattgtaggggtaacgggttcaagcaaact

SEQ ID NO: 167210 - DNA, 30 bp, Artificial Sequence
  Synthetic oligonucleotide
atacggtcgtcttaggcggccgtgcaaact

SEQ ID NO: 167211 - DNA, 30 bp, Artificial Sequence
  Synthetic oligonucleotide
ctagcaggtctcagcagtatcgtgcaaact

SEQ ID NO: 167212 - DNA, 30 bp, Artificial Sequence
  Synthetic oligonucleotide
aggatcggctgtactacgtcatctcaaact

SEQ ID NO: 167213 - DNA, 30 bp, Artificial Sequence
  Synthetic oligonucleotide
gcgttggcagggactcatacttaagaaact

SEQ ID NO: 167214 - DNA, 30 bp, Artificial Sequence
  Synthetic oligonucleotide
tcctaaaacaaaatagagagagtataaact

SEQ ID NO: 167215 - DNA, 30 bp, Artificial Sequence
  Synthetic oligonucleotide
aggcgagttgacgcttgtgagtgctaaact

SEQ ID NO: 167216 - DNA, 30 bp, Artificial Sequence
  Synthetic oligonucleotide
cgtagtggacgttacatactgtcgtaaact

SEQ ID NO: 167217 - DNA, 30 bp, Artificial Sequence
  Synthetic oligonucleotide
aggcagagcaagcgtcgtaatccggcaact

SEQ ID NO: 167218 - DNA, 30 bp, Artificial Sequence
  Synthetic oligonucleotide
atcgggtgagcggttctcggtctatcaact

SEQ ID NO: 167219 - DNA, 30 bp, Artificial Sequence
  Synthetic oligonucleotide
gcgcggggtgtgaagcgccaaatgagaact

SEQ ID NO: 167220 - DNA, 30 bp, Artificial Sequence
  Synthetic oligonucleotide
acagaaagtaattgatataactttcgaact

SEQ ID NO: 167221 - DNA, 30 bp, Artificial Sequence
  Synthetic oligonucleotide
atacgggcaaccaggacggctaaaggaact

SEQ ID NO: 167222 - DNA, 30 bp, Artificial Sequence
  Synthetic oligonucleotide
tgtcaggtctggtttaacattacaggaact

SEQ ID NO: 167223 - DNA, 30 bp, Artificial Sequence
  Synthetic oligonucleotide
tacgataaagcagccgtttaaaacggaact

SEQ ID NO: 167224 - DNA, 30 bp, Artificial Sequence
  Synthetic oligonucleotide
aatcgagaaaaaggtatgagggggggaact

SEQ ID NO: 167225 - DNA, 30 bp, Artificial Sequence
  Synthetic oligonucleotide
gctcggtccgataaacttctatctggaact

SEQ ID NO: 167226 - DNA, 30 bp, Artificial Sequence
  Synthetic oligonucleotide
ggtaccattctaacctcttgccactgaact

SEQ ID NO: 167227 - DNA, 30 bp, Artificial Sequence
  Synthetic oligonucleotide
ggtgaattccggtgaatgagagcctgaact

SEQ ID NO: 167228 - DNA, 30 bp, Artificial Sequence
  Synthetic oligonucleotide
ggacaataccggcctccttgctagtgaact

SEQ ID NO: 167229 - DNA, 30 bp, Artificial Sequence
  Synthetic oligonucleotide
cgtttcaaatcctggggctgcccgtgaact

SEQ ID NO: 167230 - DNA, 30 bp, Artificial Sequence
  Synthetic oligonucleotide
cgaggacacccggggtgtgaattttgaact

SEQ ID NO: 167231 - DNA, 30 bp, Artificial Sequence
  Synthetic oligonucleotide
aaagttagtgaaatggtatctgcaataact

SEQ ID NO: 167232 - DNA, 30 bp, Artificial Sequence
  Synthetic oligonucleotide
atcatctagctcaccgttcacctactaact

SEQ ID NO: 167233 - DNA, 30 bp, Artificial Sequence
  Synthetic oligonucleotide
taacagcgagaatctgtctaacttctaact

SEQ ID NO: 167234 - DNA, 30 bp, Artificial Sequence
  Synthetic oligonucleotide
tagtacaacatacgccccaacctagtaact

SEQ ID NO: 167235 - DNA, 30 bp, Artificial Sequence
  Synthetic oligonucleotide
tgggcggactcaacagcctcgtacgtaact

SEQ ID NO: 167236 - DNA, 30 bp, Artificial Sequence
  Synthetic oligonucleotide
gttgaaaagatctcggtacggcgggtaact

SEQ ID NO: 167237 - DNA, 30 bp, Artificial Sequence
  Synthetic oligonucleotide
acaaaagggtatcacaaattgctggtaact

SEQ ID NO: 167238 - DNA, 30 bp, Artificial Sequence
  Synthetic oligonucleotide
tatcaaggtagcgttgtgtaagatgtaact

SEQ ID NO: 167239 - DNA, 30 bp, Artificial Sequence
  Synthetic oligonucleotide
tttgaccattttctctaggcgagtgtaact

SEQ ID NO: 167240 - DNA, 30 bp, Artificial Sequence
  Synthetic oligonucleotide
cggaggcgtgattcgagattcacattaact

SEQ ID NO: 167241 - DNA, 30 bp, Artificial Sequence
  Synthetic oligonucleotide
taccgttctagctatctatcaccattaact

SEQ ID NO: 167242 - DNA, 30 bp, Artificial Sequence
  Synthetic oligonucleotide
tcaaagggacgatcatccccgtgattaact

SEQ ID NO: 167243 - DNA, 30 bp, Artificial Sequence
  Synthetic oligonucleotide
gcgtagtccaacacggagaactccttaact

SEQ ID NO: 167244 - DNA, 30 bp, Artificial Sequence
  Synthetic oligonucleotide
gtttatggacgattttctcgaggaaacact

SEQ ID NO: 167245 - DNA, 30 bp, Artificial Sequence
  Synthetic oligonucleotide
taagcgatttagccctcggcatgaaacact

SEQ ID NO: 167246 - DNA, 30 bp, Artificial Sequence
  Synthetic oligonucleotide
gcacgtgccagataaaggtactgaaacact

SEQ ID NO: 167247 - DNA, 30 bp, Artificial Sequence
  Synthetic oligonucleotide
atagccgagagaaagaataggctaaacact

SEQ ID NO: 167248 - DNA, 30 bp, Artificial Sequence
  Synthetic oligonucleotide
cgcgtctccacgctatgaataaacaacact

SEQ ID NO: 167249 - DNA, 30 bp, Artificial Sequence
  Synthetic oligonucleotide
ccgcaatagagctctacgaagagcaacact

SEQ ID NO: 167250 - DNA, 30 bp, Artificial Sequence
  Synthetic oligonucleotide
atgacgagatgagatgttgtttggaacact

SEQ ID NO: 167251 - DNA, 30 bp, Artificial Sequence
  Synthetic oligonucleotide
tgactatatcggaccagagctttgaacact

SEQ ID NO: 167252 - DNA, 30 bp, Artificial Sequence
  Synthetic oligonucleotide
gggcggtgcccgttaatatgggttaacact

SEQ ID NO: 167253 - DNA, 30 bp, Artificial Sequence
  Synthetic oligonucleotide
actgtagaaaaggtaacctctgaacacact

SEQ ID NO: 167254 - DNA, 30 bp, Artificial Sequence
  Synthetic oligonucleotide
ccgacacagtttaataatgcttgccacact

SEQ ID NO: 167255 - DNA, 30 bp, Artificial Sequence
  Synthetic oligonucleotide
tttctataacaacattattaatcgcacact

SEQ ID NO: 167256 - DNA, 30 bp, Artificial Sequence
  Synthetic oligonucleotide
agtcaatagtgacggttcgcgcaatacact

SEQ ID NO: 167257 - DNA, 30 bp, Artificial Sequence
  Synthetic oligonucleotide
attcgagacagtaggttcggttgctacact

SEQ ID NO: 167258 - DNA, 30 bp, Artificial Sequence
  Synthetic oligonucleotide
gcgatgtactttaacaagaatatctacact

SEQ ID NO: 167259 - DNA, 30 bp, Artificial Sequence
  Synthetic oligonucleotide
tagacggcgttttatcgacatctccccact

SEQ ID NO: 167260 - DNA, 30 bp, Artificial Sequence
  Synthetic oligonucleotide
agaaagactgtctaacgttgctgagccact

SEQ ID NO: 167261 - DNA, 30 bp, Artificial Sequence
  Synthetic oligonucleotide
agcaggctcaatttaaccgtaatcgccact

SEQ ID NO: 167262 - DNA, 30 bp, Artificial Sequence
  Synthetic oligonucleotide
cagttaacggcgactaaaccttatgccact

SEQ ID NO: 167263 - DNA, 30 bp, Artificial Sequence
  Synthetic oligonucleotide
aacggggactgcacgctagcatagtccact

SEQ ID NO: 167264 - DNA, 30 bp, Artificial Sequence
  Synthetic oligonucleotide
tgagaagattgcatacgttcgtcgtccact

SEQ ID NO: 167265 - DNA, 30 bp, Artificial Sequence
  Synthetic oligonucleotide
gatccgcgtgcaacaagcattaggtccact

SEQ ID NO: 167266 - DNA, 30 bp, Artificial Sequence
  Synthetic oligonucleotide
cgagttgccgtgatcctactctggtccact

SEQ ID NO: 167267 - DNA, 30 bp, Artificial Sequence
  Synthetic oligonucleotide
acaggctggcggagctaggattaaagcact

SEQ ID NO: 167268 - DNA, 30 bp, Artificial Sequence
  Synthetic oligonucleotide
ttcgaacgtgtcgggaccccccagagcact

SEQ ID NO: 167269 - DNA, 30 bp, Artificial Sequence
  Synthetic oligonucleotide
cgaatcatcctcggatcaataccgagcact

SEQ ID NO: 167270 - DNA, 30 bp, Artificial Sequence
  Synthetic oligonucleotide
cgcgagaccgcaagctaccaatggagcact

SEQ ID NO: 167271 - DNA, 30 bp, Artificial Sequence
  Synthetic oligonucleotide
tgatgacggaagccgacacccgaacgcact

SEQ ID NO: 167272 - DNA, 30 bp, Artificial Sequence
  Synthetic oligonucleotide
acatcgtatggagtcacgcggatcggcact

SEQ ID NO: 167273 - DNA, 30 bp, Artificial Sequence
  Synthetic oligonucleotide
accagtggtgtaattactgaaacgggcact

SEQ ID NO: 167274 - DNA, 30 bp, Artificial Sequence
  Synthetic oligonucleotide
tcggaacacataggacttagggttggcact

SEQ ID NO: 167275 - DNA, 30 bp, Artificial Sequence
  Synthetic oligonucleotide
ccagctgcagactgtttatagaaatgcact

SEQ ID NO: 167276 - DNA, 30 bp, Artificial Sequence
  Synthetic oligonucleotide
tgggcctgtaaggtcgtccagttttgcact

SEQ ID NO: 167277 - DNA, 30 bp, Artificial Sequence
  Synthetic oligonucleotide
gctgacctcggatatcgcctataaatcact

SEQ ID NO: 167278 - DNA, 30 bp, Artificial Sequence
  Synthetic oligonucleotide
cgtaaggaatctactgtaagcgagatcact

SEQ ID NO: 167279 - DNA, 30 bp, Artificial Sequence
  Synthetic oligonucleotide
caccttctgtgggacatagggtttatcact

SEQ ID NO: 167280 - DNA, 30 bp, Artificial Sequence
  Synthetic oligonucleotide
acgcgtgccagaacaccggccagagtcact

SEQ ID NO: 167281 - DNA, 30 bp, Artificial Sequence
  Synthetic oligonucleotide
aggaattattaacggacccttctagtcact

SEQ ID NO: 167282 - DNA, 30 bp, Artificial Sequence
  Synthetic oligonucleotide
tggagtcgttctcgacactgaaccgtcact

SEQ ID NO: 167283 - DNA, 30 bp, Artificial Sequence
  Synthetic oligonucleotide
ctgtaaggctttaacgaaggggctgtcact

SEQ ID NO: 167284 - DNA, 30 bp, Artificial Sequence
  Synthetic oligonucleotide
gaacaaacaatgcccagagtgggtgtcact

SEQ ID NO: 167285 - DNA, 30 bp, Artificial Sequence
  Synthetic oligonucleotide
gtcaggcggtccggtgatcctcagttcact

SEQ ID NO: 167286 - DNA, 30 bp, Artificial Sequence
  Synthetic oligonucleotide
ccgggacctgcattaatagcgggtttcact

SEQ ID NO: 167287 - DNA, 30 bp, Artificial Sequence
  Synthetic oligonucleotide
actgttgacattcatagtaagctgaagact

SEQ ID NO: 167288 - DNA, 30 bp, Artificial Sequence
  Synthetic oligonucleotide
tgtgctaacagcataattgttctgaagact

SEQ ID NO: 167289 - DNA, 30 bp, Artificial Sequence
  Synthetic oligonucleotide
acaacaatctagggacaccggctgcagact

SEQ ID NO: 167290 - DNA, 30 bp, Artificial Sequence
  Synthetic oligonucleotide
gatagctcccagaaaggcaactatcagact

SEQ ID NO: 167291 - DNA, 30 bp, Artificial Sequence
  Synthetic oligonucleotide
agactggctcaggcgtgctgagcagagact

SEQ ID NO: 167292 - DNA, 30 bp, Artificial Sequence
  Synthetic oligonucleotide
gactgaaacgctaacccactaggggagact

SEQ ID NO: 167293 - DNA, 30 bp, Artificial Sequence
  Synthetic oligonucleotide
tgaaccggatagactgcaatttcatagact

SEQ ID NO: 167294 - DNA, 30 bp, Artificial Sequence
  Synthetic oligonucleotide
cccgagtgtctcggctacgaaatttagact

SEQ ID NO: 167295 - DNA, 30 bp, Artificial Sequence
  Synthetic oligonucleotide
tggctccgaaggttagagggtttcacgact

SEQ ID NO: 167296 - DNA, 30 bp, Artificial Sequence
  Synthetic oligonucleotide
aatgaatccagggaccattcgtctccgact

SEQ ID NO: 167297 - DNA, 30 bp, Artificial Sequence
  Synthetic oligonucleotide
gactctagcagtcagggcgggtacgcgact

SEQ ID NO: 167298 - DNA, 30 bp, Artificial Sequence
  Synthetic oligonucleotide
gaaacctacacataggcgggtctggcgact

SEQ ID NO: 167299 - DNA, 30 bp, Artificial Sequence
  Synthetic oligonucleotide
tcgaacctcagtacagactagaatgcgact

SEQ ID NO: 167300 - DNA, 30 bp, Artificial Sequence
  Synthetic oligonucleotide
taatcgttccgtagctgggggaatgcgact

SEQ ID NO: 167301 - DNA, 30 bp, Artificial Sequence
  Synthetic oligonucleotide
acagaagctcgatcatggtaaaaatcgact

SEQ ID NO: 167302 - DNA, 30 bp, Artificial Sequence
  Synthetic oligonucleotide
cattcggacaacacagtcccccaaaggact

SEQ ID NO: 167303 - DNA, 30 bp, Artificial Sequence
  Synthetic oligonucleotide
acgtgaaagcgatcttgggatatcaggact

SEQ ID NO: 167304 - DNA, 30 bp, Artificial Sequence
  Synthetic oligonucleotide
gaggcgttcctgacaaatggggttaggact

SEQ ID NO: 167305 - DNA, 30 bp, Artificial Sequence
  Synthetic oligonucleotide
tttagagaaaatctagactaagtacggact

SEQ ID NO: 167306 - DNA, 30 bp, Artificial Sequence
  Synthetic oligonucleotide
aacgcgcacacatgcgttcccccagggact

SEQ ID NO: 167307 - DNA, 30 bp, Artificial Sequence
  Synthetic oligonucleotide
ttcacaacatcgagtaatttcagggggact

SEQ ID NO: 167308 - DNA, 30 bp, Artificial Sequence
  Synthetic oligonucleotide
ccggccaggagcgacgagatcggggggact

SEQ ID NO: 167309 - DNA, 30 bp, Artificial Sequence
  Synthetic oligonucleotide
gtattggaaagcgtcacatgaggtgggact

SEQ ID NO: 167310 - DNA, 30 bp, Artificial Sequence
  Synthetic oligonucleotide
caattagggcgacacatgcactaatggact

SEQ ID NO: 167311 - DNA, 30 bp, Artificial Sequence
  Synthetic oligonucleotide
gacgatttactgggcagtgcctaatggact

SEQ ID NO: 167312 - DNA, 30 bp, Artificial Sequence
  Synthetic oligonucleotide
cgctacccgttaccacagcaaaactggact

SEQ ID NO: 167313 - DNA, 30 bp, Artificial Sequence
  Synthetic oligonucleotide
ttgcagattgtgctaacaagatcttggact

SEQ ID NO: 167314 - DNA, 30 bp, Artificial Sequence
  Synthetic oligonucleotide
actataacagctttgaacgtcggttggact

SEQ ID NO: 167315 - DNA, 30 bp, Artificial Sequence
  Synthetic oligonucleotide
agctaaagcctgaaacactagaaaatgact

SEQ ID NO: 167316 - DNA, 30 bp, Artificial Sequence
  Synthetic oligonucleotide
caaaaaggagagttgagattacaaatgact

SEQ ID NO: 167317 - DNA, 30 bp, Artificial Sequence
  Synthetic oligonucleotide
catttatggggggttagcgatgagatgact

SEQ ID NO: 167318 - DNA, 30 bp, Artificial Sequence
  Synthetic oligonucleotide
aacacagaaaccgtgctagtgagactgact

SEQ ID NO: 167319 - DNA, 30 bp, Artificial Sequence
  Synthetic oligonucleotide
ctaggcgcggtttcacatcctgacctgact

SEQ ID NO: 167320 - DNA, 30 bp, Artificial Sequence
  Synthetic oligonucleotide
cattagaacgccacactacagcatctgact

SEQ ID NO: 167321 - DNA, 30 bp, Artificial Sequence
  Synthetic oligonucleotide
cggacaatggtcttagagggttgagtgact

SEQ ID NO: 167322 - DNA, 30 bp, Artificial Sequence
  Synthetic oligonucleotide
gcataaacgccggcttcgatcctggtgact

SEQ ID NO: 167323 - DNA, 30 bp, Artificial Sequence
  Synthetic oligonucleotide
gttaccttacgcgaggggcctcatgtgact

SEQ ID NO: 167324 - DNA, 30 bp, Artificial Sequence
  Synthetic oligonucleotide
accaaaggctaactaggagcacctgtgact

SEQ ID NO: 167325 - DNA, 30 bp, Artificial Sequence
  Synthetic oligonucleotide
caagcgggtgaaacctttctaccattgact

SEQ ID NO: 167326 - DNA, 30 bp, Artificial Sequence
  Synthetic oligonucleotide
agctgtaaccggggtttagcgccattgact

SEQ ID NO: 167327 - DNA, 30 bp, Artificial Sequence
  Synthetic oligonucleotide
cctcgatcgacgaaggaggaggtcttgact

SEQ ID NO: 167328 - DNA, 30 bp, Artificial Sequence
  Synthetic oligonucleotide
agacatggcagtatggcaacgatgttgact

SEQ ID NO: 167329 - DNA, 30 bp, Artificial Sequence
  Synthetic oligonucleotide
gccatttgcggcagagctgcaacaaatact

SEQ ID NO: 167330 - DNA, 30 bp, Artificial Sequence
  Synthetic oligonucleotide
cgctgaaataattacgtgcgcccaaatact

SEQ ID NO: 167331 - DNA, 30 bp, Artificial Sequence
  Synthetic oligonucleotide
ggtacgccaataccagaattttgaaatact

SEQ ID NO: 167332 - DNA, 30 bp, Artificial Sequence
  Synthetic oligonucleotide
taactttacggaacgtccaatccgaatact

SEQ ID NO: 167333 - DNA, 30 bp, Artificial Sequence
  Synthetic oligonucleotide
ttacatattcccccgggtacaccagatact

SEQ ID NO: 167334 - DNA, 30 bp, Artificial Sequence
  Synthetic oligonucleotide
tctacaaggacaacatgttacgcagatact

SEQ ID NO: 167335 - DNA, 30 bp, Artificial Sequence
  Synthetic oligonucleotide
aaacccagcgcaaggacggctagagatact

SEQ ID NO: 167336 - DNA, 30 bp, Artificial Sequence
  Synthetic oligonucleotide
gatggaaccttaagtacggatggagatact

SEQ ID NO: 167337 - DNA, 30 bp, Artificial Sequence
  Synthetic oligonucleotide
atcagggcggcgtcgaagccaatagatact

SEQ ID NO: 167338 - DNA, 30 bp, Artificial Sequence
  Synthetic oligonucleotide
ctcaacctaatagcatccacataggatact

SEQ ID NO: 167339 - DNA, 30 bp, Artificial Sequence
  Synthetic oligonucleotide
tagagatgggagcagcattacctgtatact

SEQ ID NO: 167340 - DNA, 30 bp, Artificial Sequence
  Synthetic oligonucleotide
caaacccgatgtaacttgacacatactact

SEQ ID NO: 167341 - DNA, 30 bp, Artificial Sequence
  Synthetic oligonucleotide
tccctatccgttgaaacaccacgtactact

SEQ ID NO: 167342 - DNA, 30 bp, Artificial Sequence
  Synthetic oligonucleotide
cgcgaaataaaggtcaggtagtcacctact

SEQ ID NO: 167343 - DNA, 30 bp, Artificial Sequence
  Synthetic oligonucleotide
tgcatataacaattaggcagttcggctact

SEQ ID NO: 167344 - DNA, 30 bp, Artificial Sequence
  Synthetic oligonucleotide
acttgttcgaagggcacgctgtactctact

SEQ ID NO: 167345 - DNA, 30 bp, Artificial Sequence
  Synthetic oligonucleotide
tttacgaagggtgtaaaaatccgctctact

SEQ ID NO: 167346 - DNA, 30 bp, Artificial Sequence
  Synthetic oligonucleotide
cgtcggataatctcgtaccatctctctact

SEQ ID NO: 167347 - DNA, 30 bp, Artificial Sequence
  Synthetic oligonucleotide
gcttccatagcgaacgcatctggttctact

SEQ ID NO: 167348 - DNA, 30 bp, Artificial Sequence
  Synthetic oligonucleotide
atagggcacaggggttataatggcagtact

SEQ ID NO: 167349 - DNA, 30 bp, Artificial Sequence
  Synthetic oligonucleotide
gtgggtaaaggtgtgtcaggcgaacgtact

SEQ ID NO: 167350 - DNA, 30 bp, Artificial Sequence
  Synthetic oligonucleotide
caccagataggatacagcgctaagtgtact

SEQ ID NO: 167351 - DNA, 30 bp, Artificial Sequence
  Synthetic oligonucleotide
ggaattatgggggattcaggcctgtgtact

SEQ ID NO: 167352 - DNA, 29 bp, Artificial Sequence
  Synthetic oligonucleotide
cacgacgtggtgaaattcagtatattact

SEQ ID NO: 167353 - DNA, 30 bp, Artificial Sequence
  Synthetic oligonucleotide
aagcgaagcacaggtgaggcttgtattact

SEQ ID NO: 167354 - DNA, 30 bp, Artificial Sequence
  Synthetic oligonucleotide
gtgggtgaagttgcgttatcgagccttact

SEQ ID NO: 167355 - DNA, 30 bp, Artificial Sequence
  Synthetic oligonucleotide
tggcggacaacaacattcctaaagcttact

SEQ ID NO: 167356 - DNA, 30 bp, Artificial Sequence
  Synthetic oligonucleotide
cgattgaattttagaagtaagccgcttact

SEQ ID NO: 167357 - DNA, 30 bp, Artificial Sequence
  Synthetic oligonucleotide
tactccgggtaagacgacgactctcttact

SEQ ID NO: 167358 - DNA, 30 bp, Artificial Sequence
  Synthetic oligonucleotide
ctgatctacacagtactatgagcagttact

SEQ ID NO: 167359 - DNA, 30 bp, Artificial Sequence
  Synthetic oligonucleotide
cgctaattggaaacatgtcgcaacgttact

SEQ ID NO: 167360 - DNA, 30 bp, Artificial Sequence
  Synthetic oligonucleotide
tacccggaacgctcgaagcggcagaaacct

SEQ ID NO: 167361 - DNA, 30 bp, Artificial Sequence
  Synthetic oligonucleotide
cgctgcgaccatgctagttacgtgaaacct

SEQ ID NO: 167362 - DNA, 30 bp, Artificial Sequence
  Synthetic oligonucleotide
gtcaatagtcatctactggagtgggaacct

SEQ ID NO: 167363 - DNA, 30 bp, Artificial Sequence
  Synthetic oligonucleotide
cggtatcagtgcgcgcactgtttggaacct

SEQ ID NO: 167364 - DNA, 30 bp, Artificial Sequence
  Synthetic oligonucleotide
atcgattgctacgtcaaaataaaataacct

SEQ ID NO: 167365 - DNA, 31 bp, Artificial Sequence
  Synthetic oligonucleotide
tcgatcctatcccgcaaccaattcctaacct

SEQ ID NO: 167366 - DNA, 30 bp, Artificial Sequence
  Synthetic oligonucleotide
ggtggtttcgggagattcatgcagtaacct

SEQ ID NO: 167367 - DNA, 30 bp, Artificial Sequence
  Synthetic oligonucleotide
gcagtacagctatagggaactcattaacct

SEQ ID NO: 167368 - DNA, 30 bp, Artificial Sequence
  Synthetic oligonucleotide
gttggatccgatcaatcttagtcttaacct

SEQ ID NO: 167369 - DNA, 30 bp, Artificial Sequence
  Synthetic oligonucleotide
aacaggaagtatttaaccggtcgaacacct

SEQ ID NO: 167370 - DNA, 30 bp, Artificial Sequence
  Synthetic oligonucleotide
cgccattcaggccggtaatgtcgtccacct

SEQ ID NO: 167371 - DNA, 30 bp, Artificial Sequence
  Synthetic oligonucleotide
aatcagcaccactccttcaatcttccacct

SEQ ID NO: 167372 - DNA, 30 bp, Artificial Sequence
  Synthetic oligonucleotide
aagagacgaggaagtagcgcgtaggcacct

SEQ ID NO: 167373 - DNA, 30 bp, Artificial Sequence
  Synthetic oligonucleotide
ggagggctgatttgcgtatttccggcacct

SEQ ID NO: 167374 - DNA, 30 bp, Artificial Sequence
  Synthetic oligonucleotide
acatgggcaaataggattagggtggcacct

SEQ ID NO: 167375 - DNA, 30 bp, Artificial Sequence
  Synthetic oligonucleotide
tagtgagtcatctctcgttgcgcctcacct

SEQ ID NO: 167376 - DNA, 30 bp, Artificial Sequence
  Synthetic oligonucleotide
ttaaccacggtacttctgtgcaaaagacct

SEQ ID NO: 167377 - DNA, 30 bp, Artificial Sequence
  Synthetic oligonucleotide
gatcggatcagtccgagtccaggtcgacct

SEQ ID NO: 167378 - DNA, 30 bp, Artificial Sequence
  Synthetic oligonucleotide
cgataccttcttcagagaatcaaaggacct

SEQ ID NO: 167379 - DNA, 30 bp, Artificial Sequence
  Synthetic oligonucleotide
tcagcagtaacatagttacgtataggacct

SEQ ID NO: 167380 - DNA, 31 bp, Artificial Sequence
  Synthetic oligonucleotide
ctgtaggataaatggggcctctttcggacct

SEQ ID NO: 167381 - DNA, 30 bp, Artificial Sequence
  Synthetic oligonucleotide
gacatactttaggtagcggaactgggacct

SEQ ID NO: 167382 - DNA, 30 bp, Artificial Sequence
  Synthetic oligonucleotide
accgtatgtcggcgatgcaggagtggacct

SEQ ID NO: 167383 - DNA, 30 bp, Artificial Sequence
  Synthetic oligonucleotide
acagagaacgcttttttggtgcgctgacct

SEQ ID NO: 167384 - DNA, 30 bp, Artificial Sequence
  Synthetic oligonucleotide
tccagggacacgcattaaattgtctgacct

SEQ ID NO: 167385 - DNA, 30 bp, Artificial Sequence
  Synthetic oligonucleotide
ttatcaaccggtgatctttaagcgtgacct

SEQ ID NO: 167386 - DNA, 30 bp, Artificial Sequence
  Synthetic oligonucleotide
gggccacaactttaacacagggggtgacct

SEQ ID NO: 167387 - DNA, 30 bp, Artificial Sequence
  Synthetic oligonucleotide
ggcgtgctcccgtggccccgggggtgacct

SEQ ID NO: 167388 - DNA, 30 bp, Artificial Sequence
  Synthetic oligonucleotide
acgggatcgtcaggcagggtttggtgacct

SEQ ID NO: 167389 - DNA, 30 bp, Artificial Sequence
  Synthetic oligonucleotide
tgcgagaccaggataggggattaaatacct

SEQ ID NO: 167390 - DNA, 30 bp, Artificial Sequence
  Synthetic oligonucleotide
agtgcccgagctccgaaaacaggaatacct

SEQ ID NO: 167391 - DNA, 30 bp, Artificial Sequence
  Synthetic oligonucleotide
acacataagaaagcaatattaaacatacct

SEQ ID NO: 167392 - DNA, 30 bp, Artificial Sequence
  Synthetic oligonucleotide
taagatcgcaaatagggccgggccatacct

SEQ ID NO: 167393 - DNA, 30 bp, Artificial Sequence
  Synthetic oligonucleotide
gcgcttaatagtagaataacggtcatacct

SEQ ID NO: 167394 - DNA, 30 bp, Artificial Sequence
  Synthetic oligonucleotide
tacgatgtggctatggcgaccatgatacct

SEQ ID NO: 167395 - DNA, 30 bp, Artificial Sequence
  Synthetic oligonucleotide
actagacaagatcactggttgtctatacct

SEQ ID NO: 167396 - DNA, 30 bp, Artificial Sequence
  Synthetic oligonucleotide
cctaattcgtaatctagactcatcgtacct

SEQ ID NO: 167397 - DNA, 30 bp, Artificial Sequence
  Synthetic oligonucleotide
gaggtacagtcttaggagctcgaattacct

SEQ ID NO: 167398 - DNA, 30 bp, Artificial Sequence
  Synthetic oligonucleotide
acgatccagttgctattcagtccattacct

SEQ ID NO: 167399 - DNA, 30 bp, Artificial Sequence
  Synthetic oligonucleotide
tggaaatcaacttatttcgggggcttacct

SEQ ID NO: 167400 - DNA, 30 bp, Artificial Sequence
  Synthetic oligonucleotide
taagtccagataagcagatgcaagttacct

SEQ ID NO: 167401 - DNA, 30 bp, Artificial Sequence
  Synthetic oligonucleotide
taaggagatccgggctaacgccagttacct

SEQ ID NO: 167402 - DNA, 30 bp, Artificial Sequence
  Synthetic oligonucleotide
agttggtacggacttcaaagagggcaccct

SEQ ID NO: 167403 - DNA, 30 bp, Artificial Sequence
  Synthetic oligonucleotide
cggtcaagccctttgtgatctggagaccct

SEQ ID NO: 167404 - DNA, 30 bp, Artificial Sequence
  Synthetic oligonucleotide
cgtcccgttctcggaccggtcgccgaccct

SEQ ID NO: 167405 - DNA, 30 bp, Artificial Sequence
  Synthetic oligonucleotide
gagctgaaagtagaggttagtaatgaccct

SEQ ID NO: 167406 - DNA, 30 bp, Artificial Sequence
  Synthetic oligonucleotide
ttcggagtcgcacagtgacaattataccct

SEQ ID NO: 167407 - DNA, 30 bp, Artificial Sequence
  Synthetic oligonucleotide
tgacagcgtcaatttcatcatctgtaccct

SEQ ID NO: 167408 - DNA, 30 bp, Artificial Sequence
  Synthetic oligonucleotide
tactcacccgaaccggagtgctgttaccct

SEQ ID NO: 167409 - DNA, 30 bp, Artificial Sequence
  Synthetic oligonucleotide
ataataggaaaggtgttgtcaaagacccct

SEQ ID NO: 167410 - DNA, 30 bp, Artificial Sequence
  Synthetic oligonucleotide
gcggttggtgggtgtgtagacgagacccct

SEQ ID NO: 167411 - DNA, 30 bp, Artificial Sequence
  Synthetic oligonucleotide
acatgctggccagtttccgggagtacccct

SEQ ID NO: 167412 - DNA, 30 bp, Artificial Sequence
  Synthetic oligonucleotide
caacataaattggagcactacacatcccct

SEQ ID NO: 167413 - DNA, 30 bp, Artificial Sequence
  Synthetic oligonucleotide
tgtgaacagttaatacccccattgtcccct

SEQ ID NO: 167414 - DNA, 30 bp, Artificial Sequence
  Synthetic oligonucleotide
ggtatacattaggtactgttataaagccct

SEQ ID NO: 167415 - DNA, 30 bp, Artificial Sequence
  Synthetic oligonucleotide
ggcacgtattaaaatgtggagacaagccct

SEQ ID NO: 167416 - DNA, 30 bp, Artificial Sequence
  Synthetic oligonucleotide
tacttaaggaacccactagccagtagccct

SEQ ID NO: 167417 - DNA, 30 bp, Artificial Sequence
  Synthetic oligonucleotide
ctagacgtgtgtggaagaacccttggccct

SEQ ID NO: 167418 - DNA, 30 bp, Artificial Sequence
  Synthetic oligonucleotide
tgtggcagggcgaataactcttccatccct

SEQ ID NO: 167419 - DNA, 30 bp, Artificial Sequence
  Synthetic oligonucleotide
ttggtgggatgaattgactcgatgatccct

SEQ ID NO: 167420 - DNA, 30 bp, Artificial Sequence
  Synthetic oligonucleotide
aaaagagctgccaattcgagagaagtccct

SEQ ID NO: 167421 - DNA, 30 bp, Artificial Sequence
  Synthetic oligonucleotide
gttaagagaatcagtcagctgattgtccct

SEQ ID NO: 167422 - DNA, 30 bp, Artificial Sequence
  Synthetic oligonucleotide
ggttattagacttacaagtaggtgttccct

SEQ ID NO: 167423 - DNA, 30 bp, Artificial Sequence
  Synthetic oligonucleotide
caagagtataattgaacgcggataaagcct

SEQ ID NO: 167424 - DNA, 30 bp, Artificial Sequence
  Synthetic oligonucleotide
ccatatccgcgaggctgcattcggaagcct

SEQ ID NO: 167425 - DNA, 30 bp, Artificial Sequence
  Synthetic oligonucleotide
attgctatggtccaagtgcacgaccagcct

SEQ ID NO: 167426 - DNA, 30 bp, Artificial Sequence
  Synthetic oligonucleotide
tcgccatgtggcagattagcgtaccagcct

SEQ ID NO: 167427 - DNA, 30 bp, Artificial Sequence
  Synthetic oligonucleotide
ctttaaagaggtaaggcggactttcagcct

SEQ ID NO: 167428 - DNA, 30 bp, Artificial Sequence
  Synthetic oligonucleotide
gtttatgcgcgaaaccatcagaaagagcct

SEQ ID NO: 167429 - DNA, 30 bp, Artificial Sequence
  Synthetic oligonucleotide
acgcgccctaatagtcagatgaaggagcct

SEQ ID NO: 167430 - DNA, 31 bp, Artificial Sequence
  Synthetic oligonucleotide
cctggagcccagtgctcggcctaatgagcct

SEQ ID NO: 167431 - DNA, 30 bp, Artificial Sequence
  Synthetic oligonucleotide
tggctaaaagaccatggtcggcctgagcct

SEQ ID NO: 167432 - DNA, 30 bp, Artificial Sequence
  Synthetic oligonucleotide
tctcgcagtcgtagagtaagcgcatagcct

SEQ ID NO: 167433 - DNA, 30 bp, Artificial Sequence
  Synthetic oligonucleotide
tcttacaccagacccacacgtaactagcct

SEQ ID NO: 167434 - DNA, 30 bp, Artificial Sequence
  Synthetic oligonucleotide
tgggagttgtagatctcctcatggtagcct

SEQ ID NO: 167435 - DNA, 30 bp, Artificial Sequence
  Synthetic oligonucleotide
ggaaatataccaacgggggttgattagcct

SEQ ID NO: 167436 - DNA, 30 bp, Artificial Sequence
  Synthetic oligonucleotide
agtttcatgtcttgagagtcgaccacgcct

SEQ ID NO: 167437 - DNA, 30 bp, Artificial Sequence
  Synthetic oligonucleotide
acagcaaacacacgcataaaatagacgcct

SEQ ID NO: 167438 - DNA, 30 bp, Artificial Sequence
  Synthetic oligonucleotide
agacactaggtcacaaaccaaaggacgcct

SEQ ID NO: 167439 - DNA, 30 bp, Artificial Sequence
  Synthetic oligonucleotide
cgggcaagaatcgtacaggattctacgcct

SEQ ID NO: 167440 - DNA, 30 bp, Artificial Sequence
  Synthetic oligonucleotide
cttggtagcaggagggggaaacaaccgcct

SEQ ID NO: 167441 - DNA, 30 bp, Artificial Sequence
  Synthetic oligonucleotide
tcggtggaatgtcaatacatgttaccgcct

SEQ ID NO: 167442 - DNA, 30 bp, Artificial Sequence
  Synthetic oligonucleotide
cagagttgtccagtatgccgaacagcgcct

SEQ ID NO: 167443 - DNA, 30 bp, Artificial Sequence
  Synthetic oligonucleotide
acgatatttaatttagcaaatcgagcgcct

SEQ ID NO: 167444 - DNA, 30 bp, Artificial Sequence
  Synthetic oligonucleotide
taggggtcagggaaagaattggtagcgcct

SEQ ID NO: 167445 - DNA, 30 bp, Artificial Sequence
  Synthetic oligonucleotide
ccacaacgaacatatcgaaggtagaggcct

SEQ ID NO: 167446 - DNA, 30 bp, Artificial Sequence
  Synthetic oligonucleotide
aaacaaagaggcgcagtcgatgtgaggcct

SEQ ID NO: 167447 - DNA, 30 bp, Artificial Sequence
  Synthetic oligonucleotide
tgtattgcctgaaccggacacccacggcct

SEQ ID NO: 167448 - DNA, 30 bp, Artificial Sequence
  Synthetic oligonucleotide
cgagtcccatcccgttgacaagatcggcct

SEQ ID NO: 167449 - DNA, 30 bp, Artificial Sequence
  Synthetic oligonucleotide
gattcatctgaattaataagtgttcggcct

SEQ ID NO: 167450 - DNA, 30 bp, Artificial Sequence
  Synthetic oligonucleotide
taaaatggagacggctatccattggggcct

SEQ ID NO: 167451 - DNA, 30 bp, Artificial Sequence
  Synthetic oligonucleotide
gcggacttgatgcgttgagcaggtgggcct

SEQ ID NO: 167452 - DNA, 30 bp, Artificial Sequence
  Synthetic oligonucleotide
ggtggggtgggcatccgtacgacatggcct

SEQ ID NO: 167453 - DNA, 30 bp, Artificial Sequence
  Synthetic oligonucleotide
gacaactaatgggcaaacactacgtggcct

SEQ ID NO: 167454 - DNA, 30 bp, Artificial Sequence
  Synthetic oligonucleotide
aaaaggtctcataagccacaatgtatgcct

SEQ ID NO: 167455 - DNA, 30 bp, Artificial Sequence
  Synthetic oligonucleotide
ctcagaataatcatataccgcgtactgcct

SEQ ID NO: 167456 - DNA, 30 bp, Artificial Sequence
  Synthetic oligonucleotide
ttggcttaaataagatccctttccctgcct

SEQ ID NO: 167457 - DNA, 30 bp, Artificial Sequence
  Synthetic oligonucleotide
gacttgaagaaaagcatccgccctgtgcct

SEQ ID NO: 167458 - DNA, 30 bp, Artificial Sequence
  Synthetic oligonucleotide
tgggagcaattgagcacatccgcattgcct

SEQ ID NO: 167459 - DNA, 30 bp, Artificial Sequence
  Synthetic oligonucleotide
gagatatcttaagataactagcgcttgcct

SEQ ID NO: 167460 - DNA, 30 bp, Artificial Sequence
  Synthetic oligonucleotide
atcacaagattgggttggcgtacgttgcct

SEQ ID NO: 167461 - DNA, 30 bp, Artificial Sequence
  Synthetic oligonucleotide
gccaggatcgaacattagcgtgttttgcct

SEQ ID NO: 167462 - DNA, 30 bp, Artificial Sequence
  Synthetic oligonucleotide
cttgctgcgaacacgaacgaacatcatcct

SEQ ID NO: 167463 - DNA, 30 bp, Artificial Sequence
  Synthetic oligonucleotide
ctcgtagaataatgcaaggccgcggatcct

SEQ ID NO: 167464 - DNA, 30 bp, Artificial Sequence
  Synthetic oligonucleotide
agcgggagtacgccttaaaagccatatcct

SEQ ID NO: 167465 - DNA, 30 bp, Artificial Sequence
  Synthetic oligonucleotide
gccgttggcggtcatagtatcagatatcct

SEQ ID NO: 167466 - DNA, 30 bp, Artificial Sequence
  Synthetic oligonucleotide
acgagagcgactaaccaaagatattatcct

SEQ ID NO: 167467 - DNA, 30 bp, Artificial Sequence
  Synthetic oligonucleotide
cgtctcaacaaaggagccaggggaactcct

SEQ ID NO: 167468 - DNA, 30 bp, Artificial Sequence
  Synthetic oligonucleotide
tggtagcggtagtgtcaggagggacctcct

SEQ ID NO: 167469 - DNA, 30 bp, Artificial Sequence
  Synthetic oligonucleotide
agaggacgaacgtagctactgatacctcct

SEQ ID NO: 167470 - DNA, 30 bp, Artificial Sequence
  Synthetic oligonucleotide
gctagggttaattatgagagttacgctcct

SEQ ID NO: 167471 - DNA, 30 bp, Artificial Sequence
  Synthetic oligonucleotide
gtgatgatctaagctacgtgttactctcct

SEQ ID NO: 167472 - DNA, 30 bp, Artificial Sequence
  Synthetic oligonucleotide
ggtagggtctgcacatctgactattctcct

SEQ ID NO: 167473 - DNA, 30 bp, Artificial Sequence
  Synthetic oligonucleotide
caaagattgaagaaagtattgcaaagtcct

SEQ ID NO: 167474 - DNA, 30 bp, Artificial Sequence
  Synthetic oligonucleotide
agactaacacaggaggcatatcgaagtcct

SEQ ID NO: 167475 - DNA, 30 bp, Artificial Sequence
  Synthetic oligonucleotide
gcatagaacagccagctgccttacagtcct

SEQ ID NO: 167476 - DNA, 30 bp, Artificial Sequence
  Synthetic oligonucleotide
gcttcggagaggtaaacagatgtgagtcct

SEQ ID NO: 167477 - DNA, 30 bp, Artificial Sequence
  Synthetic oligonucleotide
taaacggcttctgaaagctaataccgtcct

SEQ ID NO: 167478 - DNA, 30 bp, Artificial Sequence
  Synthetic oligonucleotide
cgccttgcctctccgccaaattgccgtcct

SEQ ID NO: 167479 - DNA, 30 bp, Artificial Sequence
  Synthetic oligonucleotide
aagaatgtggcaaatttgcgaaagcgtcct

SEQ ID NO: 167480 - DNA, 30 bp, Artificial Sequence
  Synthetic oligonucleotide
caggactctcaagtttaatacaacggtcct

SEQ ID NO: 167481 - DNA, 30 bp, Artificial Sequence
  Synthetic oligonucleotide
ggtcgcattgacttaggtgtctacggtcct

SEQ ID NO: 167482 - DNA, 30 bp, Artificial Sequence
  Synthetic oligonucleotide
agctaacatggacatagacgccatggtcct

SEQ ID NO: 167483 - DNA, 30 bp, Artificial Sequence
  Synthetic oligonucleotide
atgtttacagtcagaggaagataatgtcct

SEQ ID NO: 167484 - DNA, 30 bp, Artificial Sequence
  Synthetic oligonucleotide
taagctcaacaagacagagatccgtgtcct

SEQ ID NO: 167485 - DNA, 30 bp, Artificial Sequence
  Synthetic oligonucleotide
taggcaagatcctccatgagcaggcttcct

SEQ ID NO: 167486 - DNA, 30 bp, Artificial Sequence
  Synthetic oligonucleotide
ctaacgatcatggcatgaggtgtgcttcct

SEQ ID NO: 167487 - DNA, 30 bp, Artificial Sequence
  Synthetic oligonucleotide
tgcgaaactcactttggccatagcgttcct

SEQ ID NO: 167488 - DNA, 30 bp, Artificial Sequence
  Synthetic oligonucleotide
acgatgttcctttagaagagtgaggttcct

SEQ ID NO: 167489 - DNA, 30 bp, Artificial Sequence
  Synthetic oligonucleotide
gccacattacccttggctaaacaatttcct

SEQ ID NO: 167490 - DNA, 30 bp, Artificial Sequence
  Synthetic oligonucleotide
aggaagacggaacacgacatcgtgtttcct

SEQ ID NO: 167491 - DNA, 30 bp, Artificial Sequence
  Synthetic oligonucleotide
tgagcccttcctaaaggtcatggtaaagct

SEQ ID NO: 167492 - DNA, 30 bp, Artificial Sequence
  Synthetic oligonucleotide
tctttaaaggaccggatagtcattaaagct

SEQ ID NO: 167493 - DNA, 30 bp, Artificial Sequence
  Synthetic oligonucleotide
ctgcaaggggaatacggcaaggaacaagct

SEQ ID NO: 167494 - DNA, 30 bp, Artificial Sequence
  Synthetic oligonucleotide
aataccaacttaaactggggggaacaagct

SEQ ID NO: 167495 - DNA, 30 bp, Artificial Sequence
  Synthetic oligonucleotide
tcaaagaggtaacttagcatgtaacaagct

SEQ ID NO: 167496 - DNA, 30 bp, Artificial Sequence
  Synthetic oligonucleotide
gggattaacatggtcaagggattccaagct

SEQ ID NO: 167497 - DNA, 30 bp, Artificial Sequence
  Synthetic oligonucleotide
ggggaatgtcacgataggacgactcaagct

SEQ ID NO: 167498 - DNA, 30 bp, Artificial Sequence
  Synthetic oligonucleotide
gggttgaatagtttacaagaagctcaagct

SEQ ID NO: 167499 - DNA, 30 bp, Artificial Sequence
  Synthetic oligonucleotide
gcttgaatggaacacgcatttatcgaagct

SEQ ID NO: 167500 - DNA, 30 bp, Artificial Sequence
  Synthetic oligonucleotide
gatccgtgtgcggctcaggggaaggaagct

SEQ ID NO: 167501 - DNA, 30 bp, Artificial Sequence
  Synthetic oligonucleotide
agtgaacgtagggttataactagggaagct

SEQ ID NO: 167502 - DNA, 30 bp, Artificial Sequence
  Synthetic oligonucleotide
aagggactgcctcaaccttgtgtataagct

SEQ ID NO: 167503 - DNA, 30 bp, Artificial Sequence
  Synthetic oligonucleotide
gagccgtaaaactagaaatttcattaagct

SEQ ID NO: 167504 - DNA, 30 bp, Artificial Sequence
  Synthetic oligonucleotide
ggttttacgaaagtcacagcgtcttaagct

SEQ ID NO: 167505 - DNA, 30 bp, Artificial Sequence
  Synthetic oligonucleotide
agtcaattcgggttgtctcactgaacagct

SEQ ID NO: 167506 - DNA, 30 bp, Artificial Sequence
  Synthetic oligonucleotide
agctggtccattgagagaaggggtccagct

SEQ ID NO: 167507 - DNA, 30 bp, Artificial Sequence
  Synthetic oligonucleotide
ggatgagtagctcaatgatttatggcagct

SEQ ID NO: 167508 - DNA, 30 bp, Artificial Sequence
  Synthetic oligonucleotide
gaagcgcgacgtcaaaaatgaaatgcagct

SEQ ID NO: 167509 - DNA, 30 bp, Artificial Sequence
  Synthetic oligonucleotide
cgaagaatgtcaaccagcatttatgcagct

SEQ ID NO: 167510 - DNA, 30 bp, Artificial Sequence
  Synthetic oligonucleotide
tcagatcacagcacgagttaacaatcagct

SEQ ID NO: 167511 - DNA, 30 bp, Artificial Sequence
  Synthetic oligonucleotide
ggcgagaatgtcattggcatcttatcagct

SEQ ID NO: 167512 - DNA, 30 bp, Artificial Sequence
  Synthetic oligonucleotide
acttaaaatgatgaattgttgtgttcagct

SEQ ID NO: 167513 - DNA, 30 bp, Artificial Sequence
  Synthetic oligonucleotide
gcctgaagctgagatagagaaagaagagct

SEQ ID NO: 167514 - DNA, 30 bp, Artificial Sequence
  Synthetic oligonucleotide
gagcggattgttcgacgtcgacgaagagct

SEQ ID NO: 167515 - DNA, 30 bp, Artificial Sequence
  Synthetic oligonucleotide
ctaagctgtgcaggttctaccccgagagct

SEQ ID NO: 167516 - DNA, 30 bp, Artificial Sequence
  Synthetic oligonucleotide
ctagaacgccgttggaatctcaaccgagct

SEQ ID NO: 167517 - DNA, 30 bp, Artificial Sequence
  Synthetic oligonucleotide
cggggcggactgtagccgtcaggccgagct

SEQ ID NO: 167518 - DNA, 30 bp, Artificial Sequence
  Synthetic oligonucleotide
gtaggtgaaacggttttacaaaagcgagct

SEQ ID NO: 167519 - DNA, 30 bp, Artificial Sequence
  Synthetic oligonucleotide
cgcatattggccagtgtagtcgaaggagct

SEQ ID NO: 167520 - DNA, 30 bp, Artificial Sequence
  Synthetic oligonucleotide
acctcgggttagacccgtacatttggagct

SEQ ID NO: 167521 - DNA, 30 bp, Artificial Sequence
  Synthetic oligonucleotide
agggaattctgagaggcaattccatgagct

SEQ ID NO: 167522 - DNA, 30 bp, Artificial Sequence
  Synthetic oligonucleotide
aagcggcgggtgtcagcacctacgtgagct

SEQ ID NO: 167523 - DNA, 30 bp, Artificial Sequence
  Synthetic oligonucleotide
caaacaccatctcccctcaaggcttgagct

SEQ ID NO: 167524 - DNA, 30 bp, Artificial Sequence
  Synthetic oligonucleotide
atgatggagtaggtacaagatagaatagct

SEQ ID NO: 167525 - DNA, 30 bp, Artificial Sequence
  Synthetic oligonucleotide
gtagatccatctccaaacacccgcatagct

SEQ ID NO: 167526 - DNA, 30 bp, Artificial Sequence
  Synthetic oligonucleotide
aatcataatccggcgtcgaaggcgatagct

SEQ ID NO: 167527 - DNA, 30 bp, Artificial Sequence
  Synthetic oligonucleotide
tttaagccagagttcggggtgtggatagct

SEQ ID NO: 167528 - DNA, 30 bp, Artificial Sequence
  Synthetic oligonucleotide
ttgcagtcattccaggtgcatactatagct

SEQ ID NO: 167529 - DNA, 30 bp, Artificial Sequence
  Synthetic oligonucleotide
tgcacgacgagagatgatgccgttatagct

SEQ ID NO: 167530 - DNA, 30 bp, Artificial Sequence
  Synthetic oligonucleotide
actggtactcggatcttccatgggctagct

SEQ ID NO: 167531 - DNA, 30 bp, Artificial Sequence
  Synthetic oligonucleotide
taggtagcaagaggtcagggtgtgctagct

SEQ ID NO: 167532 - DNA, 30 bp, Artificial Sequence
  Synthetic oligonucleotide
gaatacgggaagatgattgcttgagtagct

SEQ ID NO: 167533 - DNA, 30 bp, Artificial Sequence
  Synthetic oligonucleotide
gagactaaactcgccacgataatattagct

SEQ ID NO: 167534 - DNA, 30 bp, Artificial Sequence
  Synthetic oligonucleotide
cacgggatagcaaataagttcagaaacgct

SEQ ID NO: 167535 - DNA, 30 bp, Artificial Sequence
  Synthetic oligonucleotide
tgggttttggagtagaggggtgacaacgct

SEQ ID NO: 167536 - DNA, 30 bp, Artificial Sequence
  Synthetic oligonucleotide
aaaatgaaaatcgctaggcgggaacacgct

SEQ ID NO: 167537 - DNA, 30 bp, Artificial Sequence
  Synthetic oligonucleotide
acatgattgctaaagatcccatactacgct

SEQ ID NO: 167538 - DNA, 30 bp, Artificial Sequence
  Synthetic oligonucleotide
ttagcctaacgtgatagataaacgtacgct

SEQ ID NO: 167539 - DNA, 30 bp, Artificial Sequence
  Synthetic oligonucleotide
agattttgcaggagaatctcgaacaccgct

SEQ ID NO: 167540 - DNA, 29 bp, Artificial Sequence
  Synthetic oligonucleotide
tggcataaatgagtcttgctggcaccgct

SEQ ID NO: 167541 - DNA, 30 bp, Artificial Sequence
  Synthetic oligonucleotide
tctgtaacgtaatggataaggtggaccgct

SEQ ID NO: 167542 - DNA, 30 bp, Artificial Sequence
  Synthetic oligonucleotide
actacaggccacgacgtcaacgtgaccgct

SEQ ID NO: 167543 - DNA, 30 bp, Artificial Sequence
  Synthetic oligonucleotide
ggatgacagtgcacgagcgcacaagccgct

SEQ ID NO: 167544 - DNA, 30 bp, Artificial Sequence
  Synthetic oligonucleotide
atcatcggggcaagaactccgtaagccgct

SEQ ID NO: 167545 - DNA, 30 bp, Artificial Sequence
  Synthetic oligonucleotide
atgttccatgcaatcatgaccatatccgct

SEQ ID NO: 167546 - DNA, 30 bp, Artificial Sequence
  Synthetic oligonucleotide
atagaagtaaactataagagttgcagcgct

SEQ ID NO: 167547 - DNA, 30 bp, Artificial Sequence
  Synthetic oligonucleotide
agtgattccagatgagtcagggggagcgct

SEQ ID NO: 167548 - DNA, 30 bp, Artificial Sequence
  Synthetic oligonucleotide
gacgactgtaacttatccacttgtagcgct

SEQ ID NO: 167549 - DNA, 30 bp, Artificial Sequence
  Synthetic oligonucleotide
acggttattagtgtggtgtattcccgcgct

SEQ ID NO: 167550 - DNA, 30 bp, Artificial Sequence
  Synthetic oligonucleotide
gatccgcctaagggataaaatatccgcgct

SEQ ID NO: 167551 - DNA, 30 bp, Artificial Sequence
  Synthetic oligonucleotide
gtaatgatataggatacaagggggcgcgct

SEQ ID NO: 167552 - DNA, 30 bp, Artificial Sequence
  Synthetic oligonucleotide
cggagatggtgcggttagagctgtcgcgct

SEQ ID NO: 167553 - DNA, 30 bp, Artificial Sequence
  Synthetic oligonucleotide
tgccgtcgggtatacttatcggtaggcgct

SEQ ID NO: 167554 - DNA, 30 bp, Artificial Sequence
  Synthetic oligonucleotide
gaccgtctgtctgtaagacaatgcggcgct

SEQ ID NO: 167555 - DNA, 30 bp, Artificial Sequence
  Synthetic oligonucleotide
caaggactaacggttgatatcaagtgcgct

SEQ ID NO: 167556 - DNA, 30 bp, Artificial Sequence
  Synthetic oligonucleotide
gttaccctgggggatccgacaacgtgcgct

SEQ ID NO: 167557 - DNA, 30 bp, Artificial Sequence
  Synthetic oligonucleotide
gctctaaggcgccaatgagcaaattgcgct

SEQ ID NO: 167558 - DNA, 30 bp, Artificial Sequence
  Synthetic oligonucleotide
cgatgatcgctcaggttagccgatatcgct

SEQ ID NO: 167559 - DNA, 30 bp, Artificial Sequence
  Synthetic oligonucleotide
tggctagagagtatccttgcgtccctcgct

SEQ ID NO: 167560 - DNA, 30 bp, Artificial Sequence
  Synthetic oligonucleotide
atcgctatgtccaaagcacacgggctcgct

SEQ ID NO: 167561 - DNA, 30 bp, Artificial Sequence
  Synthetic oligonucleotide
tcgttcgatattagcatccgtcaagtcgct

SEQ ID NO: 167562 - DNA, 30 bp, Artificial Sequence
  Synthetic oligonucleotide
tgggaatttagggtgggcgaggcattcgct

SEQ ID NO: 167563 - DNA, 30 bp, Artificial Sequence
  Synthetic oligonucleotide
agggggaggtaccagactatctcattcgct

SEQ ID NO: 167564 - DNA, 30 bp, Artificial Sequence
  Synthetic oligonucleotide
accgccgttataggcgctaggggtttcgct

SEQ ID NO: 167565 - DNA, 30 bp, Artificial Sequence
  Synthetic oligonucleotide
acgaccacggggcctgtcaagcacaaggct

SEQ ID NO: 167566 - DNA, 30 bp, Artificial Sequence
  Synthetic oligonucleotide
ggtggtcttcatgttggtcattccaaggct

SEQ ID NO: 167567 - DNA, 30 bp, Artificial Sequence
  Synthetic oligonucleotide
ggagacaccatattaacagtgacacaggct

SEQ ID NO: 167568 - DNA, 30 bp, Artificial Sequence
  Synthetic oligonucleotide
gcctaaacagtgtctaaggaactacaggct

SEQ ID NO: 167569 - DNA, 30 bp, Artificial Sequence
  Synthetic oligonucleotide
gggactgcaccgccacgaggactccaggct

SEQ ID NO: 167570 - DNA, 30 bp, Artificial Sequence
  Synthetic oligonucleotide
gtgctcgagtaagcttattcgcgtcaggct

SEQ ID NO: 167571 - DNA, 30 bp, Artificial Sequence
  Synthetic oligonucleotide
caggaaaaccctgagtagggaccggaggct

SEQ ID NO: 167572 - DNA, 30 bp, Artificial Sequence
  Synthetic oligonucleotide
caacgctgttttaaacgaaccggggaggct

SEQ ID NO: 167573 - DNA, 30 bp, Artificial Sequence
  Synthetic oligonucleotide
ggcaattcggacacgaccagatgggaggct

SEQ ID NO: 167574 - DNA, 30 bp, Artificial Sequence
  Synthetic oligonucleotide
cagagcgaggcatctttgacgactgaggct

SEQ ID NO: 167575 - DNA, 30 bp, Artificial Sequence
  Synthetic oligonucleotide
attcatgggcatcaggatgagacgtaggct

SEQ ID NO: 167576 - DNA, 30 bp, Artificial Sequence
  Synthetic oligonucleotide
gcacggagatgcatcggatgtgacacggct

SEQ ID NO: 167577 - DNA, 30 bp, Artificial Sequence
  Synthetic oligonucleotide
accaaagaagcgggatgtgtccagacggct

SEQ ID NO: 167578 - DNA, 30 bp, Artificial Sequence
  Synthetic oligonucleotide
cgaatactaccgtttactagccatccggct

SEQ ID NO: 167579 - DNA, 30 bp, Artificial Sequence
  Synthetic oligonucleotide
cgtcaccgggttacgattgttgaggcggct

SEQ ID NO: 167580 - DNA, 30 bp, Artificial Sequence
  Synthetic oligonucleotide
gcgatcagaaacgtaacttataagtcggct

SEQ ID NO: 167581 - DNA, 30 bp, Artificial Sequence
  Synthetic oligonucleotide
aatggtccttagcaggacacagggtcggct

SEQ ID NO: 167582 - DNA, 30 bp, Artificial Sequence
  Synthetic oligonucleotide
gtcgcttccatctatcgaaccatgtcggct

SEQ ID NO: 167583 - DNA, 30 bp, Artificial Sequence
  Synthetic oligonucleotide
tagcaactcgcacgagggaatgtttcggct

SEQ ID NO: 167584 - DNA, 30 bp, Artificial Sequence
  Synthetic oligonucleotide
agcaaaattaatattccatcaaaaagggct

SEQ ID NO: 167585 - DNA, 30 bp, Artificial Sequence
  Synthetic oligonucleotide
agacaacccatcggccggcgaagaagggct

SEQ ID NO: 167586 - DNA, 30 bp, Artificial Sequence
  Synthetic oligonucleotide
cgagcggacgttgagggcgctcggagggct

SEQ ID NO: 167587 - DNA, 30 bp, Artificial Sequence
  Synthetic oligonucleotide
caatcttgtaggcttatgttgatgagggct

SEQ ID NO: 167588 - DNA, 30 bp, Artificial Sequence
  Synthetic oligonucleotide
ggacatctatgtccctgagcgactagggct

SEQ ID NO: 167589 - DNA, 30 bp, Artificial Sequence
  Synthetic oligonucleotide
aggtccctactcagagaatcgactagggct

SEQ ID NO: 167590 - DNA, 30 bp, Artificial Sequence
  Synthetic oligonucleotide
gatgatagtcgagcgagacagctacgggct

SEQ ID NO: 167591 - DNA, 30 bp, Artificial Sequence
  Synthetic oligonucleotide
gccaagagtcagtgtagtctcaaatgggct

SEQ ID NO: 167592 - DNA, 30 bp, Artificial Sequence
  Synthetic oligonucleotide
ctaatgtttcggcttaggattatatgggct

SEQ ID NO: 167593 - DNA, 30 bp, Artificial Sequence
  Synthetic oligonucleotide
atgtaggaggagcatatatggtggatggct

SEQ ID NO: 167594 - DNA, 30 bp, Artificial Sequence
  Synthetic oligonucleotide
tactttgattgttggactgttcagctggct

SEQ ID NO: 167595 - DNA, 30 bp, Artificial Sequence
  Synthetic oligonucleotide
atcgggacctggcgaactaggccgctggct

SEQ ID NO: 167596 - DNA, 30 bp, Artificial Sequence
  Synthetic oligonucleotide
actaagttcatcacctcacaacacgtggct

SEQ ID NO: 167597 - DNA, 30 bp, Artificial Sequence
  Synthetic oligonucleotide
cggttgaaagcaaataccctaaccgtggct

SEQ ID NO: 167598 - DNA, 30 bp, Artificial Sequence
  Synthetic oligonucleotide
gaacaggacaaggactggccgtaattggct

SEQ ID NO: 167599 - DNA, 30 bp, Artificial Sequence
  Synthetic oligonucleotide
aggcccgtagcgtaatatgcgagattggct

SEQ ID NO: 167600 - DNA, 30 bp, Artificial Sequence
  Synthetic oligonucleotide
ccttctgagttggagtggttaggtttggct

SEQ ID NO: 167601 - DNA, 30 bp, Artificial Sequence
  Synthetic oligonucleotide
gaaggccctgctcgaaattactaaaatgct

SEQ ID NO: 167602 - DNA, 30 bp, Artificial Sequence
  Synthetic oligonucleotide
taaagtgagcgcggtacgacgaacaatgct

SEQ ID NO: 167603 - DNA, 30 bp, Artificial Sequence
  Synthetic oligonucleotide
cggggcgttgatctttccgttgacaatgct

SEQ ID NO: 167604 - DNA, 30 bp, Artificial Sequence
  Synthetic oligonucleotide
acggtatgtacgcaactacaacctaatgct

SEQ ID NO: 167605 - DNA, 30 bp, Artificial Sequence
  Synthetic oligonucleotide
tgggttcattgaagcctagactttaatgct

SEQ ID NO: 167606 - DNA, 30 bp, Artificial Sequence
  Synthetic oligonucleotide
tgctaaacatctatgaacccactccatgct

SEQ ID NO: 167607 - DNA, 30 bp, Artificial Sequence
  Synthetic oligonucleotide
ttagcgccacagtgaatcgtgcctcatgct

SEQ ID NO: 167608 - DNA, 30 bp, Artificial Sequence
  Synthetic oligonucleotide
tcatagccgcgtgtgtccttgtgtcatgct

SEQ ID NO: 167609 - DNA, 30 bp, Artificial Sequence
  Synthetic oligonucleotide
tcgatgactgattaagcgtggtccgatgct

SEQ ID NO: 167610 - DNA, 30 bp, Artificial Sequence
  Synthetic oligonucleotide
tcaccgacccgtgcaacgtcagggtatgct

SEQ ID NO: 167611 - DNA, 30 bp, Artificial Sequence
  Synthetic oligonucleotide
taagggtaaatccataggtcttcaactgct

SEQ ID NO: 167612 - DNA, 30 bp, Artificial Sequence
  Synthetic oligonucleotide
agtgatgagttaatcctggtggagactgct

SEQ ID NO: 167613 - DNA, 30 bp, Artificial Sequence
  Synthetic oligonucleotide
tgagccaaattccacgggagcagctctgct

SEQ ID NO: 167614 - DNA, 30 bp, Artificial Sequence
  Synthetic oligonucleotide
caacggcatagattatagaccgtcagtgct

SEQ ID NO: 167615 - DNA, 30 bp, Artificial Sequence
  Synthetic oligonucleotide
atcgaaaatggtagtagccgtcaacgtgct

SEQ ID NO: 167616 - DNA, 30 bp, Artificial Sequence
  Synthetic oligonucleotide
aagctacgtaagactggggcctggcgtgct

SEQ ID NO: 167617 - DNA, 30 bp, Artificial Sequence
  Synthetic oligonucleotide
accactggcgtgcacacgggaccaggtgct

SEQ ID NO: 167618 - DNA, 30 bp, Artificial Sequence
  Synthetic oligonucleotide
agggtgcattgaaacacttcgacgggtgct

SEQ ID NO: 167619 - DNA, 30 bp, Artificial Sequence
  Synthetic oligonucleotide
aaccggttcaggacaatgacaatgggtgct

SEQ ID NO: 167620 - DNA, 30 bp, Artificial Sequence
  Synthetic oligonucleotide
cgagtcgagacaaaactaactgtgggtgct

SEQ ID NO: 167621 - DNA, 30 bp, Artificial Sequence
  Synthetic oligonucleotide
aaagggatgatgagataagttaattgtgct

SEQ ID NO: 167622 - DNA, 30 bp, Artificial Sequence
  Synthetic oligonucleotide
ctgacccattaatatttaaacttcattgct

SEQ ID NO: 167623 - DNA, 30 bp, Artificial Sequence
  Synthetic oligonucleotide
acggaagcgttccgggcttgtaggattgct

SEQ ID NO: 167624 - DNA, 30 bp, Artificial Sequence
  Synthetic oligonucleotide
atagaaggcagacagggatgataacttgct

SEQ ID NO: 167625 - DNA, 30 bp, Artificial Sequence
  Synthetic oligonucleotide
aagtggcctaaatggaaaagatccgttgct

SEQ ID NO: 167626 - DNA, 30 bp, Artificial Sequence
  Synthetic oligonucleotide
aacgagattctgaccatctgccgcgttgct

SEQ ID NO: 167627 - DNA, 30 bp, Artificial Sequence
  Synthetic oligonucleotide
gagttaaatcaggatatccaagtcgttgct

SEQ ID NO: 167628 - DNA, 30 bp, Artificial Sequence
  Synthetic oligonucleotide
acaagctcaagctatgagacattcgttgct

SEQ ID NO: 167629 - DNA, 30 bp, Artificial Sequence
  Synthetic oligonucleotide
cacaggctagctgacacgggcctggttgct

SEQ ID NO: 167630 - DNA, 30 bp, Artificial Sequence
  Synthetic oligonucleotide
agggacctctatgatgtccccagatttgct

SEQ ID NO: 167631 - DNA, 30 bp, Artificial Sequence
  Synthetic oligonucleotide
caaatggataatacctaccaatattttgct

SEQ ID NO: 167632 - DNA, 30 bp, Artificial Sequence
  Synthetic oligonucleotide
tgtgaaacggcagacacctagccaaaatct

SEQ ID NO: 167633 - DNA, 30 bp, Artificial Sequence
  Synthetic oligonucleotide
aacgaggcctatagtgccggcttgaaatct

SEQ ID NO: 167634 - DNA, 30 bp, Artificial Sequence
  Synthetic oligonucleotide
cggatcatatggagcattagggagcaatct

SEQ ID NO: 167635 - DNA, 30 bp, Artificial Sequence
  Synthetic oligonucleotide
accgtgccaaacggcgtcactggagaatct

SEQ ID NO: 167636 - DNA, 30 bp, Artificial Sequence
  Synthetic oligonucleotide
tatgggtgcgtaatacggtccgacgaatct

SEQ ID NO: 167637 - DNA, 30 bp, Artificial Sequence
  Synthetic oligonucleotide
tgaaacctgggatggttgtgcaaggaatct

SEQ ID NO: 167638 - DNA, 30 bp, Artificial Sequence
  Synthetic oligonucleotide
cggctagacctatcttgtcgaggtgaatct

SEQ ID NO: 167639 - DNA, 30 bp, Artificial Sequence
  Synthetic oligonucleotide
tgaaggatgaaccagcctgagcgttaatct

SEQ ID NO: 167640 - DNA, 30 bp, Artificial Sequence
  Synthetic oligonucleotide
caggtaacaatactgaccggttggacatct

SEQ ID NO: 167641 - DNA, 30 bp, Artificial Sequence
  Synthetic oligonucleotide
tcactttaacccggtgcggtatgaccatct

SEQ ID NO: 167642 - DNA, 30 bp, Artificial Sequence
  Synthetic oligonucleotide
ttcatgccttacgaacacaaggcggcatct

SEQ ID NO: 167643 - DNA, 30 bp, Artificial Sequence
  Synthetic oligonucleotide
gtattatggtgagaggatgtcggggcatct

SEQ ID NO: 167644 - DNA, 30 bp, Artificial Sequence
  Synthetic oligonucleotide
ctaaaaaggcgcgtgggtaggatggcatct

SEQ ID NO: 167645 - DNA, 30 bp, Artificial Sequence
  Synthetic oligonucleotide
taaaggcggtattagccgctcgaatcatct

SEQ ID NO: 167646 - DNA, 30 bp, Artificial Sequence
  Synthetic oligonucleotide
tcaagggaaccggacatcgcccattcatct

SEQ ID NO: 167647 - DNA, 30 bp, Artificial Sequence
  Synthetic oligonucleotide
taagaaagcacaccttgggggaccagatct

SEQ ID NO: 167648 - DNA, 30 bp, Artificial Sequence
  Synthetic oligonucleotide
gatgagtgcgaactatactggaggagatct

SEQ ID NO: 167649 - DNA, 30 bp, Artificial Sequence
  Synthetic oligonucleotide
caactgactccagagccagttggtcgatct

SEQ ID NO: 167650 - DNA, 30 bp, Artificial Sequence
  Synthetic oligonucleotide
tgggtgatcgaagcctagaaggtaggatct

SEQ ID NO: 167651 - DNA, 30 bp, Artificial Sequence
  Synthetic oligonucleotide
ccaaccaggtaagaatgtagaggtggatct

SEQ ID NO: 167652 - DNA, 30 bp, Artificial Sequence
  Synthetic oligonucleotide
ttgacagtgtaactcgggttctgtggatct

SEQ ID NO: 167653 - DNA, 30 bp, Artificial Sequence
  Synthetic oligonucleotide
tgatatgtgggggatgcgcgttaatgatct

SEQ ID NO: 167654 - DNA, 30 bp, Artificial Sequence
  Synthetic oligonucleotide
agaaaccatgccaaattggataactgatct

SEQ ID NO: 167655 - DNA, 30 bp, Artificial Sequence
  Synthetic oligonucleotide
atccacataacaagcaacaggacgtgatct

SEQ ID NO: 167656 - DNA, 30 bp, Artificial Sequence
  Synthetic oligonucleotide
cactgaaagggcactcatgaaataatatct

SEQ ID NO: 167657 - DNA, 30 bp, Artificial Sequence
  Synthetic oligonucleotide
ttatgggaacgagactatctcgcgatatct

SEQ ID NO: 167658 - DNA, 30 bp, Artificial Sequence
  Synthetic oligonucleotide
ctgagcacaaccggcaggactgtgatatct

SEQ ID NO: 167659 - DNA, 30 bp, Artificial Sequence
  Synthetic oligonucleotide
cacgaaactggtgagaacatttgtatatct

SEQ ID NO: 167660 - DNA, 30 bp, Artificial Sequence
  Synthetic oligonucleotide
tccgaggcaacgtgcagatgtgttatatct

SEQ ID NO: 167661 - DNA, 30 bp, Artificial Sequence
  Synthetic oligonucleotide
gggtcaagccgcaggtccgaggaactatct

SEQ ID NO: 167662 - DNA, 30 bp, Artificial Sequence
  Synthetic oligonucleotide
acgtcagatcgttgtcctcgaactctatct

SEQ ID NO: 167663 - DNA, 30 bp, Artificial Sequence
  Synthetic oligonucleotide
atgttggcggcacagggctctcaagtatct

SEQ ID NO: 167664 - DNA, 30 bp, Artificial Sequence
  Synthetic oligonucleotide
ttcgggtaagctcgtccagtagcagtatct

SEQ ID NO: 167665 - DNA, 30 bp, Artificial Sequence
  Synthetic oligonucleotide
gatagtgaagataacgatcgggacgtatct

SEQ ID NO: 167666 - DNA, 30 bp, Artificial Sequence
  Synthetic oligonucleotide
cggccggtcaactcatgtgactttgtatct

SEQ ID NO: 167667 - DNA, 30 bp, Artificial Sequence
  Synthetic oligonucleotide
acctcatccagagtccaatcaccattatct

SEQ ID NO: 167668 - DNA, 30 bp, Artificial Sequence
  Synthetic oligonucleotide
tccataatcgcgtaggaacaggcattatct

SEQ ID NO: 167669 - DNA, 30 bp, Artificial Sequence
  Synthetic oligonucleotide
agcgtccgtaactagggtttcgtattatct

SEQ ID NO: 167670 - DNA, 30 bp, Artificial Sequence
  Synthetic oligonucleotide
ctggattcatcgcgatgacagtacttatct

SEQ ID NO: 167671 - DNA, 31 bp, Artificial Sequence
  Synthetic oligonucleotide
gaagctcatcgaattagggccagctttatct

SEQ ID NO: 167672 - DNA, 30 bp, Artificial Sequence
  Synthetic oligonucleotide
ccgagatgaaaatgatcactacaaaactct

SEQ ID NO: 167673 - DNA, 30 bp, Artificial Sequence
  Synthetic oligonucleotide
tcaccggttggtcgggattcgactaactct

SEQ ID NO: 167674 - DNA, 30 bp, Artificial Sequence
  Synthetic oligonucleotide
gttaagcggagagcccaagcccagcactct

SEQ ID NO: 167675 - DNA, 30 bp, Artificial Sequence
  Synthetic oligonucleotide
gtccggttgaagcgtgatgaggagcactct

SEQ ID NO: 167676 - DNA, 30 bp, Artificial Sequence
  Synthetic oligonucleotide
accagcgagacttacacggtcgatcactct

SEQ ID NO: 167677 - DNA, 30 bp, Artificial Sequence
  Synthetic oligonucleotide
atgaaacctttatactcatcggatcactct

SEQ ID NO: 167678 - DNA, 30 bp, Artificial Sequence
  Synthetic oligonucleotide
agttagctaaccactttccagatagactct

SEQ ID NO: 167679 - DNA, 30 bp, Artificial Sequence
  Synthetic oligonucleotide
gcgattaaagcagtcactataggcgactct

SEQ ID NO: 167680 - DNA, 30 bp, Artificial Sequence
  Synthetic oligonucleotide
tcttaaacaatagtaaattccaagacctct

SEQ ID NO: 167681 - DNA, 30 bp, Artificial Sequence
  Synthetic oligonucleotide
ctcgggactgcgagctccgatagaccctct

SEQ ID NO: 167682 - DNA, 30 bp, Artificial Sequence
  Synthetic oligonucleotide
agctgctcagtatctaggctcgtgccctct

SEQ ID NO: 167683 - DNA, 30 bp, Artificial Sequence
  Synthetic oligonucleotide
tcactgtctgatgcgataaattaagcctct

SEQ ID NO: 167684 - DNA, 30 bp, Artificial Sequence
  Synthetic oligonucleotide
acggtgtatactttcgtatgatgggcctct

SEQ ID NO: 167685 - DNA, 30 bp, Artificial Sequence
  Synthetic oligonucleotide
ccagaaaattctcaggatgtagttgcctct

SEQ ID NO: 167686 - DNA, 30 bp, Artificial Sequence
  Synthetic oligonucleotide
ttggggcaccaacgcgatgaaccatcctct

SEQ ID NO: 167687 - DNA, 30 bp, Artificial Sequence
  Synthetic oligonucleotide
agagcacattaagagtgtgaccgttcctct

SEQ ID NO: 167688 - DNA, 30 bp, Artificial Sequence
  Synthetic oligonucleotide
tggattccggaagcgtaggagcgttcctct

SEQ ID NO: 167689 - DNA, 30 bp, Artificial Sequence
  Synthetic oligonucleotide
gagcacactgtgacgttacgattttcctct

SEQ ID NO: 167690 - DNA, 30 bp, Artificial Sequence
  Synthetic oligonucleotide
acacgttccataacgagtagcaaaagctct

SEQ ID NO: 167691 - DNA, 30 bp, Artificial Sequence
  Synthetic oligonucleotide
tctcataagtcggctcaaagtaaaagctct

SEQ ID NO: 167692 - DNA, 30 bp, Artificial Sequence
  Synthetic oligonucleotide
tagtcggccaacggtaacgggttcagctct

SEQ ID NO: 167693 - DNA, 30 bp, Artificial Sequence
  Synthetic oligonucleotide
acgacaaaatgcacaccgccataccgctct

SEQ ID NO: 167694 - DNA, 30 bp, Artificial Sequence
  Synthetic oligonucleotide
caggctcggtccatacgctcaggaggctct

SEQ ID NO: 167695 - DNA, 30 bp, Artificial Sequence
  Synthetic oligonucleotide
tagaggtgttgtggccacagtagctgctct

SEQ ID NO: 167696 - DNA, 30 bp, Artificial Sequence
  Synthetic oligonucleotide
cagagacaatggaggttcacgaagtgctct

SEQ ID NO: 167697 - DNA, 30 bp, Artificial Sequence
  Synthetic oligonucleotide
tatctaggtggaagtcccgattggtgctct

SEQ ID NO: 167698 - DNA, 30 bp, Artificial Sequence
  Synthetic oligonucleotide
atcgggtagaccaaagttttggtgatctct

SEQ ID NO: 167699 - DNA, 31 bp, Artificial Sequence
  Synthetic oligonucleotide
cgtcaaggaacaagtacggacgaggctctct

SEQ ID NO: 167700 - DNA, 30 bp, Artificial Sequence
  Synthetic oligonucleotide
agcatattataaggtcgcgtggctctctct

SEQ ID NO: 167701 - DNA, 30 bp, Artificial Sequence
  Synthetic oligonucleotide
tacagttagcgatggcacgaagaattctct

SEQ ID NO: 167702 - DNA, 30 bp, Artificial Sequence
  Synthetic oligonucleotide
tctgacaataatgtgttttactaattctct

SEQ ID NO: 167703 - DNA, 30 bp, Artificial Sequence
  Synthetic oligonucleotide
cgcggacggaggggattatgaagattctct

SEQ ID NO: 167704 - DNA, 30 bp, Artificial Sequence
  Synthetic oligonucleotide
aacaggatgacctatatgagccacttctct

SEQ ID NO: 167705 - DNA, 30 bp, Artificial Sequence
  Synthetic oligonucleotide
agcgggaaaccggctaagggtgccaagtct

SEQ ID NO: 167706 - DNA, 30 bp, Artificial Sequence
  Synthetic oligonucleotide
tatcaatcgtcaaacaaccttgccaagtct

SEQ ID NO: 167707 - DNA, 30 bp, Artificial Sequence
  Synthetic oligonucleotide
ttgaataagttaacggtccacgcgaagtct

SEQ ID NO: 167708 - DNA, 31 bp, Artificial Sequence
  Synthetic oligonucleotide
gctcattactgaagagggtcaccggaagtct

SEQ ID NO: 167709 - DNA, 30 bp, Artificial Sequence
  Synthetic oligonucleotide
ctcattcagagagccgagtggctgaagtct

SEQ ID NO: 167710 - DNA, 30 bp, Artificial Sequence
  Synthetic oligonucleotide
gtgaaaaatacaagggtccgcgtgaagtct

SEQ ID NO: 167711 - DNA, 30 bp, Artificial Sequence
  Synthetic oligonucleotide
ttgtggaatgtgacactgcggtgtaagtct

SEQ ID NO: 167712 - DNA, 30 bp, Artificial Sequence
  Synthetic oligonucleotide
gcttaacatgggaatccgagtatacagtct

SEQ ID NO: 167713 - DNA, 30 bp, Artificial Sequence
  Synthetic oligonucleotide
tgatccgaatggcgagactgatctcagtct

SEQ ID NO: 167714 - DNA, 30 bp, Artificial Sequence
  Synthetic oligonucleotide
tgttgtgtgattcgactatattgcgagtct

SEQ ID NO: 167715 - DNA, 30 bp, Artificial Sequence
  Synthetic oligonucleotide
gatgcacgtgcagagacaggtggtgagtct

SEQ ID NO: 167716 - DNA, 30 bp, Artificial Sequence
  Synthetic oligonucleotide
aggtacctcgtggaagtacaataatagtct

SEQ ID NO: 167717 - DNA, 30 bp, Artificial Sequence
  Synthetic oligonucleotide
ggtaaactcctgagacgattgtaatagtct

SEQ ID NO: 167718 - DNA, 30 bp, Artificial Sequence
  Synthetic oligonucleotide
aagtgggacttcaatcgttgctcatagtct

SEQ ID NO: 167719 - DNA, 30 bp, Artificial Sequence
  Synthetic oligonucleotide
tctccggatggtttaacaacaggctagtct

SEQ ID NO: 167720 - DNA, 30 bp, Artificial Sequence
  Synthetic oligonucleotide
gccaatatatgtcagaggttcgaaacgtct

SEQ ID NO: 167721 - DNA, 30 bp, Artificial Sequence
  Synthetic oligonucleotide
tcgggtctgtaccgtagatgtggcacgtct

SEQ ID NO: 167722 - DNA, 30 bp, Artificial Sequence
  Synthetic oligonucleotide
agtaattccccagtatgtgtgaatacgtct

SEQ ID NO: 167723 - DNA, 31 bp, Artificial Sequence
  Synthetic oligonucleotide
tctaagatcttcaatgtggttgtgtacgtct

SEQ ID NO: 167724 - DNA, 30 bp, Artificial Sequence
  Synthetic oligonucleotide
catggttcagaaatttaaatgtgaccgtct

SEQ ID NO: 167725 - DNA, 30 bp, Artificial Sequence
  Synthetic oligonucleotide
caaaggtaaacggcgaacgtcacgccgtct

SEQ ID NO: 167726 - DNA, 30 bp, Artificial Sequence
  Synthetic oligonucleotide
ctatcgattttgcctggagtacaagcgtct

SEQ ID NO: 167727 - DNA, 30 bp, Artificial Sequence
  Synthetic oligonucleotide
tcggccaactgaccggtcgatgatgcgtct

SEQ ID NO: 167728 - DNA, 30 bp, Artificial Sequence
  Synthetic oligonucleotide
acggattcagctagtttcgcgtgctcgtct

SEQ ID NO: 167729 - DNA, 30 bp, Artificial Sequence
  Synthetic oligonucleotide
ggtctgtggggaagcgatggtttaaggtct

SEQ ID NO: 167730 - DNA, 30 bp, Artificial Sequence
  Synthetic oligonucleotide
ggcgtacaaggtgaatttccgttcaggtct

SEQ ID NO: 167731 - DNA, 30 bp, Artificial Sequence
  Synthetic oligonucleotide
gtatctttaaacaaggacatagcccggtct

SEQ ID NO: 167732 - DNA, 30 bp, Artificial Sequence
  Synthetic oligonucleotide
tcgaaatgggtcgcgcagaggggccggtct

SEQ ID NO: 167733 - DNA, 30 bp, Artificial Sequence
  Synthetic oligonucleotide
ggtgttgggcggcgtatgccattcgggtct

SEQ ID NO: 167734 - DNA, 30 bp, Artificial Sequence
  Synthetic oligonucleotide
tacgataagggaaacagattcgcctggtct

SEQ ID NO: 167735 - DNA, 30 bp, Artificial Sequence
  Synthetic oligonucleotide
agtattcacacaactcatcgtacgtggtct

SEQ ID NO: 167736 - DNA, 30 bp, Artificial Sequence
  Synthetic oligonucleotide
ctggttggtcgaggtaagggttggtggtct

SEQ ID NO: 167737 - DNA, 30 bp, Artificial Sequence
  Synthetic oligonucleotide
gttagcttgtaatccggaagaatgatgtct

SEQ ID NO: 167738 - DNA, 30 bp, Artificial Sequence
  Synthetic oligonucleotide
agtaacgtagtccactaggtggtactgtct

SEQ ID NO: 167739 - DNA, 30 bp, Artificial Sequence
  Synthetic oligonucleotide
atatccatcggaactggcttaaatctgtct

SEQ ID NO: 167740 - DNA, 30 bp, Artificial Sequence
  Synthetic oligonucleotide
gacaagagctcgccattaaatgatctgtct

SEQ ID NO: 167741 - DNA, 30 bp, Artificial Sequence
  Synthetic oligonucleotide
tacacgtggggctcattacgtaaggtgtct

SEQ ID NO: 167742 - DNA, 30 bp, Artificial Sequence
  Synthetic oligonucleotide
actggggatgtgcaaaaccggccggtgtct

SEQ ID NO: 167743 - DNA, 30 bp, Artificial Sequence
  Synthetic oligonucleotide
aggttcgcttcagagaattgattggtgtct

SEQ ID NO: 167744 - DNA, 30 bp, Artificial Sequence
  Synthetic oligonucleotide
aacttgagtgggttcgtctggttggtgtct

SEQ ID NO: 167745 - DNA, 30 bp, Artificial Sequence
  Synthetic oligonucleotide
tgcgttctccttttacagtcagttgtgtct

SEQ ID NO: 167746 - DNA, 30 bp, Artificial Sequence
  Synthetic oligonucleotide
cgaaaatcgtacgaagaactaatcttgtct

SEQ ID NO: 167747 - DNA, 30 bp, Artificial Sequence
  Synthetic oligonucleotide
gaaaggacgccctgaccgttagcgttgtct

SEQ ID NO: 167748 - DNA, 30 bp, Artificial Sequence
  Synthetic oligonucleotide
gacctgtatgcgtcgtgtaacagtttgtct

SEQ ID NO: 167749 - DNA, 30 bp, Artificial Sequence
  Synthetic oligonucleotide
tcacatgcgatcagtgagaaatgtttgtct

SEQ ID NO: 167750 - DNA, 30 bp, Artificial Sequence
  Synthetic oligonucleotide
tcatttatttaagaggatggcgtaaattct

SEQ ID NO: 167751 - DNA, 30 bp, Artificial Sequence
  Synthetic oligonucleotide
cgtgaagtggagcttcgacgccttaattct

SEQ ID NO: 167752 - DNA, 30 bp, Artificial Sequence
  Synthetic oligonucleotide
tcatgctaaacaggtctatgacttcattct

SEQ ID NO: 167753 - DNA, 30 bp, Artificial Sequence
  Synthetic oligonucleotide
acgcaatcctcgcatccgtcccttcattct

SEQ ID NO: 167754 - DNA, 30 bp, Artificial Sequence
  Synthetic oligonucleotide
ttgcgatggatggaaatgggattggattct

SEQ ID NO: 167755 - DNA, 30 bp, Artificial Sequence
  Synthetic oligonucleotide
tgcaaaaaccacaaattaagccttgattct

SEQ ID NO: 167756 - DNA, 30 bp, Artificial Sequence
  Synthetic oligonucleotide
aagtacgtctgaacgggaaccatatattct

SEQ ID NO: 167757 - DNA, 30 bp, Artificial Sequence
  Synthetic oligonucleotide
aaagtgaatggactctaggttgactattct

SEQ ID NO: 167758 - DNA, 30 bp, Artificial Sequence
  Synthetic oligonucleotide
ggagcttgtcggccgtcggtaggttattct

SEQ ID NO: 167759 - DNA, 30 bp, Artificial Sequence
  Synthetic oligonucleotide
aggcgtcgtacttaaaacggttatacttct

SEQ ID NO: 167760 - DNA, 30 bp, Artificial Sequence
  Synthetic oligonucleotide
caagacgtggaggccattattgttccttct

SEQ ID NO: 167761 - DNA, 31 bp, Artificial Sequence
  Synthetic oligonucleotide
ggatccgagagaaccaacttagggagcttct

SEQ ID NO: 167762 - DNA, 30 bp, Artificial Sequence
  Synthetic oligonucleotide
acagaccttgggtgcccggtgtctagttct

SEQ ID NO: 167763 - DNA, 30 bp, Artificial Sequence
  Synthetic oligonucleotide
taatggccatagtgttagagcagacgttct

SEQ ID NO: 167764 - DNA, 30 bp, Artificial Sequence
  Synthetic oligonucleotide
ggagggcgttcggttgaggagtttcgttct

SEQ ID NO: 167765 - DNA, 30 bp, Artificial Sequence
  Synthetic oligonucleotide
gcgctctgaggcgagtccttcgtaggttct

SEQ ID NO: 167766 - DNA, 30 bp, Artificial Sequence
  Synthetic oligonucleotide
cgaacacaaagaatgctagcatacggttct

SEQ ID NO: 167767 - DNA, 30 bp, Artificial Sequence
  Synthetic oligonucleotide
acacatgaaagacgcgaaacgcgcggttct

SEQ ID NO: 167768 - DNA, 30 bp, Artificial Sequence
  Synthetic oligonucleotide
ggcaatcgcgacaggattagctgctgttct

SEQ ID NO: 167769 - DNA, 30 bp, Artificial Sequence
  Synthetic oligonucleotide
gtgtgatgctatataattttggacatttct

SEQ ID NO: 167770 - DNA, 30 bp, Artificial Sequence
  Synthetic oligonucleotide
tgcaaacacacaggaacgtagctgctttct

SEQ ID NO: 167771 - DNA, 30 bp, Artificial Sequence
  Synthetic oligonucleotide
cggtaggggtgccaaatccgtccagtttct

SEQ ID NO: 167772 - DNA, 30 bp, Artificial Sequence
  Synthetic oligonucleotide
aagcaatgtgcgttcaacaaaatcgtttct

SEQ ID NO: 167773 - DNA, 30 bp, Artificial Sequence
  Synthetic oligonucleotide
caaagggctcgaatccacatgccggtttct

SEQ ID NO: 167774 - DNA, 30 bp, Artificial Sequence
  Synthetic oligonucleotide
ctgggagaagacgaccttgcggtattttct

SEQ ID NO: 167775 - DNA, 30 bp, Artificial Sequence
  Synthetic oligonucleotide
caacctatggataggaggtagacgttttct

SEQ ID NO: 167776 - DNA, 30 bp, Artificial Sequence
  Synthetic oligonucleotide
tgaccatagggtaaagaataccaaaaaagt

SEQ ID NO: 167777 - DNA, 30 bp, Artificial Sequence
  Synthetic oligonucleotide
gtcaggtgtcgatcgtaaatgtgaaaaagt

SEQ ID NO: 167778 - DNA, 30 bp, Artificial Sequence
  Synthetic oligonucleotide
caacgacggtgtgttacaaggtacaaaagt

SEQ ID NO: 167779 - DNA, 30 bp, Artificial Sequence
  Synthetic oligonucleotide
atgaaacaagaccggtatggttggaaaagt

SEQ ID NO: 167780 - DNA, 30 bp, Artificial Sequence
  Synthetic oligonucleotide
tgtaatcagattgcagcgccgggccaaagt

SEQ ID NO: 167781 - DNA, 30 bp, Artificial Sequence
  Synthetic oligonucleotide
ctactgtagtgtatcaatcacatgcaaagt

SEQ ID NO: 167782 - DNA, 30 bp, Artificial Sequence
  Synthetic oligonucleotide
cgaccttattctttgtgagtgcatcaaagt

SEQ ID NO: 167783 - DNA, 30 bp, Artificial Sequence
  Synthetic oligonucleotide
tctggcggacccagagaacggcctcaaagt

SEQ ID NO: 167784 - DNA, 30 bp, Artificial Sequence
  Synthetic oligonucleotide
aaatggtgaggcatcatggggcaagaaagt

SEQ ID NO: 167785 - DNA, 30 bp, Artificial Sequence
  Synthetic oligonucleotide
gaggagccgtcggtattacaacatgaaagt

SEQ ID NO: 167786 - DNA, 30 bp, Artificial Sequence
  Synthetic oligonucleotide
tattacggaatcaggccaactcatgaaagt

SEQ ID NO: 167787 - DNA, 30 bp, Artificial Sequence
  Synthetic oligonucleotide
tcggggtaaaacatgtaaaccggtgaaagt

SEQ ID NO: 167788 - DNA, 30 bp, Artificial Sequence
  Synthetic oligonucleotide
gtataaactggggccgacaagattgaaagt

SEQ ID NO: 167789 - DNA, 30 bp, Artificial Sequence
  Synthetic oligonucleotide
atcggaagctgttgaaatctgacgtaaagt

SEQ ID NO: 167790 - DNA, 30 bp, Artificial Sequence
  Synthetic oligonucleotide
cggtatccacggatgtgagcagtaacaagt

SEQ ID NO: 167791 - DNA, 30 bp, Artificial Sequence
  Synthetic oligonucleotide
cggatggcagtcgcgctgctagtaacaagt

SEQ ID NO: 167792 - DNA, 30 bp, Artificial Sequence
  Synthetic oligonucleotide
tgcgactgcttacagtgtagtgtaacaagt

SEQ ID NO: 167793 - DNA, 30 bp, Artificial Sequence
  Synthetic oligonucleotide
gtagagtcgtagacgtccgccttaacaagt

SEQ ID NO: 167794 - DNA, 30 bp, Artificial Sequence
  Synthetic oligonucleotide
cagctcatgttaggaaaggatcccacaagt

SEQ ID NO: 167795 - DNA, 30 bp, Artificial Sequence
  Synthetic oligonucleotide
gaattgacagaagtcatcaagtgaccaagt

SEQ ID NO: 167796 - DNA, 30 bp, Artificial Sequence
  Synthetic oligonucleotide
gggggaattgagaaggccggttacccaagt

SEQ ID NO: 167797 - DNA, 30 bp, Artificial Sequence
  Synthetic oligonucleotide
tggaatcgtcgaaaatgggtttatccaagt

SEQ ID NO: 167798 - DNA, 30 bp, Artificial Sequence
  Synthetic oligonucleotide
gtataaacacataagcggcattcggcaagt

SEQ ID NO: 167799 - DNA, 30 bp, Artificial Sequence
  Synthetic oligonucleotide
gaacggttcctgcttagattgacatcaagt

SEQ ID NO: 167800 - DNA, 30 bp, Artificial Sequence
  Synthetic oligonucleotide
gtaggtgaacgccggaaataatcgtcaagt

SEQ ID NO: 167801 - DNA, 30 bp, Artificial Sequence
  Synthetic oligonucleotide
tgagatgtgcgcttgcagggtgggtcaagt

SEQ ID NO: 167802 - DNA, 30 bp, Artificial Sequence
  Synthetic oligonucleotide
ctaactataaacaaaataggcacaagaagt

SEQ ID NO: 167803 - DNA, 30 bp, Artificial Sequence
  Synthetic oligonucleotide
gctccagaaattccaagtttaccaagaagt

SEQ ID NO: 167804 - DNA, 30 bp, Artificial Sequence
  Synthetic oligonucleotide
ttgagagacgatatcacgttcggaagaagt

SEQ ID NO: 167805 - DNA, 30 bp, Artificial Sequence
  Synthetic oligonucleotide
tgagacaggatgtagacgttcaaacgaagt

SEQ ID NO: 167806 - DNA, 30 bp, Artificial Sequence
  Synthetic oligonucleotide
acaggtcatgccttagcagcacaacgaagt

SEQ ID NO: 167807 - DNA, 30 bp, Artificial Sequence
  Synthetic oligonucleotide
aacagggacccacggagaagtcaacgaagt

SEQ ID NO: 167808 - DNA, 30 bp, Artificial Sequence
  Synthetic oligonucleotide
gcacgcaccatgcccgttagtttccgaagt

SEQ ID NO: 167809 - DNA, 30 bp, Artificial Sequence
  Synthetic oligonucleotide
ctgatagtatctcggagcctccagggaagt

SEQ ID NO: 167810 - DNA, 30 bp, Artificial Sequence
  Synthetic oligonucleotide
cactgtgatgggtggcgaccctggggaagt

SEQ ID NO: 167811 - DNA, 30 bp, Artificial Sequence
  Synthetic oligonucleotide
ccgcacgaggcctaaggcatggtgggaagt

SEQ ID NO: 167812 - DNA, 30 bp, Artificial Sequence
  Synthetic oligonucleotide
ggtaatttcgtgggtgataaatgtggaagt

SEQ ID NO: 167813 - DNA, 30 bp, Artificial Sequence
  Synthetic oligonucleotide
cgaattatacccagctctagatcatgaagt

SEQ ID NO: 167814 - DNA, 30 bp, Artificial Sequence
  Synthetic oligonucleotide
ggaccaagtggcatgtgcaagcgatgaagt

SEQ ID NO: 167815 - DNA, 30 bp, Artificial Sequence
  Synthetic oligonucleotide
gtcaccatctgcctcaccaggtagtgaagt

SEQ ID NO: 167816 - DNA, 30 bp, Artificial Sequence
  Synthetic oligonucleotide
tcctatcgctaaaatataattctgtgaagt

SEQ ID NO: 167817 - DNA, 30 bp, Artificial Sequence
  Synthetic oligonucleotide
gaacaagatcaattacaactcagttgaagt

SEQ ID NO: 167818 - DNA, 30 bp, Artificial Sequence
  Synthetic oligonucleotide
ctagagtgccttggacgagagaccataagt

SEQ ID NO: 167819 - DNA, 30 bp, Artificial Sequence
  Synthetic oligonucleotide
agattggcggtacctggagaaagactaagt

SEQ ID NO: 167820 - DNA, 30 bp, Artificial Sequence
  Synthetic oligonucleotide
cagtccgcagaccggcctggccagctaagt

SEQ ID NO: 167821 - DNA, 30 bp, Artificial Sequence
  Synthetic oligonucleotide
ggaaactgtagctcaaaagcgaatgtaagt

SEQ ID NO: 167822 - DNA, 30 bp, Artificial Sequence
  Synthetic oligonucleotide
gccatatagactcgtgattggtctgtaagt

SEQ ID NO: 167823 - DNA, 30 bp, Artificial Sequence
  Synthetic oligonucleotide
actatacaatattgacttgtgagtgtaagt

SEQ ID NO: 167824 - DNA, 30 bp, Artificial Sequence
  Synthetic oligonucleotide
cttacgggcaagaaaagctggattgtaagt

SEQ ID NO: 167825 - DNA, 30 bp, Artificial Sequence
  Synthetic oligonucleotide
agggacactatggataatatttcattaagt

SEQ ID NO: 167826 - DNA, 30 bp, Artificial Sequence
  Synthetic oligonucleotide
cgcgaaccatcacgggaactgcgattaagt

SEQ ID NO: 167827 - DNA, 30 bp, Artificial Sequence
  Synthetic oligonucleotide
cgttaaggttggaagtaagcgggtttaagt

SEQ ID NO: 167828 - DNA, 30 bp, Artificial Sequence
  Synthetic oligonucleotide
gttctaggtcgaaccacaaaagttttaagt

SEQ ID NO: 167829 - DNA, 30 bp, Artificial Sequence
  Synthetic oligonucleotide
tgtgagcatttccggcccaaagaaaacagt

SEQ ID NO: 167830 - DNA, 30 bp, Artificial Sequence
  Synthetic oligonucleotide
gatgtaccgaattataataaagtacacagt

SEQ ID NO: 167831 - DNA, 30 bp, Artificial Sequence
  Synthetic oligonucleotide
agcgaggagttttagtcttagcgggacagt

SEQ ID NO: 167832 - DNA, 30 bp, Artificial Sequence
  Synthetic oligonucleotide
cgtgacactagatccgcaccgcctgacagt

SEQ ID NO: 167833 - DNA, 30 bp, Artificial Sequence
  Synthetic oligonucleotide
gtgttccttcaaggcaaattaaactacagt

SEQ ID NO: 167834 - DNA, 30 bp, Artificial Sequence
  Synthetic oligonucleotide
agtggtcaagagcaagttctcatctacagt

SEQ ID NO: 167835 - DNA, 30 bp, Artificial Sequence
  Synthetic oligonucleotide
caaacacagtagcctcatgcgagttacagt

SEQ ID NO: 167836 - DNA, 30 bp, Artificial Sequence
  Synthetic oligonucleotide
atgtgtctgtgtaagaatcagcgaaccagt

SEQ ID NO: 167837 - DNA, 30 bp, Artificial Sequence
  Synthetic oligonucleotide
tccggtcgtaggtgtcagccatgcaccagt

SEQ ID NO: 167838 - DNA, 30 bp, Artificial Sequence
  Synthetic oligonucleotide
tagcgtatgttttgagctacacggaccagt

SEQ ID NO: 167839 - DNA, 30 bp, Artificial Sequence
  Synthetic oligonucleotide
gggtcgtcagcggccgtcccgcaacccagt

SEQ ID NO: 167840 - DNA, 30 bp, Artificial Sequence
  Synthetic oligonucleotide
tcacacgatgattgcacttctctacccagt

SEQ ID NO: 167841 - DNA, 30 bp, Artificial Sequence
  Synthetic oligonucleotide
agaggcaagatgtagactactacgcccagt

SEQ ID NO: 167842 - DNA, 30 bp, Artificial Sequence
  Synthetic oligonucleotide
gaagaactcaacgattgtatccgcgccagt

SEQ ID NO: 167843 - DNA, 30 bp, Artificial Sequence
  Synthetic oligonucleotide
ccgactatagaggtcttgaacaatgccagt

SEQ ID NO: 167844 - DNA, 30 bp, Artificial Sequence
  Synthetic oligonucleotide
tcgtctctagatgtacagagcgagtccagt

SEQ ID NO: 167845 - DNA, 30 bp, Artificial Sequence
  Synthetic oligonucleotide
ttataatcaggggaacgttcgacaagcagt

SEQ ID NO: 167846 - DNA, 30 bp, Artificial Sequence
  Synthetic oligonucleotide
gcctgcgtcaaatgaaaaataagaagcagt

SEQ ID NO: 167847 - DNA, 30 bp, Artificial Sequence
  Synthetic oligonucleotide
gtcatcgcctggtaatggcagataagcagt

SEQ ID NO: 167848 - DNA, 30 bp, Artificial Sequence
  Synthetic oligonucleotide
ccttgtgtaccttatatgccccagagcagt

SEQ ID NO: 167849 - DNA, 30 bp, Artificial Sequence
  Synthetic oligonucleotide
ataaactgtatgactctcggcattagcagt

SEQ ID NO: 167850 - DNA, 30 bp, Artificial Sequence
  Synthetic oligonucleotide
cactatcgactcgggcatgcgccgcgcagt

SEQ ID NO: 167851 - DNA, 30 bp, Artificial Sequence
  Synthetic oligonucleotide
tagtcaatctgtggaatgtaacaaggcagt

SEQ ID NO: 167852 - DNA, 30 bp, Artificial Sequence
  Synthetic oligonucleotide
gagacttagagcctagatgaagcaggcagt

SEQ ID NO: 167853 - DNA, 30 bp, Artificial Sequence
  Synthetic oligonucleotide
ttaaagaatgaggattagtaacccggcagt

SEQ ID NO: 167854 - DNA, 30 bp, Artificial Sequence
  Synthetic oligonucleotide
tgaggatactcgtagtatctaaggggcagt

SEQ ID NO: 167855 - DNA, 30 bp, Artificial Sequence
  Synthetic oligonucleotide
cggcactggaaaagtgagacgggctgcagt

SEQ ID NO: 167856 - DNA, 30 bp, Artificial Sequence
  Synthetic oligonucleotide
gggatagaatgattccaaaccacgtgcagt

SEQ ID NO: 167857 - DNA, 30 bp, Artificial Sequence
  Synthetic oligonucleotide
aacgtcggctgcaggagtgtcctgtgcagt

SEQ ID NO: 167858 - DNA, 30 bp, Artificial Sequence
  Synthetic oligonucleotide
atgggcatcccctgtcagtttccaatcagt

SEQ ID NO: 167859 - DNA, 30 bp, Artificial Sequence
  Synthetic oligonucleotide
ttgtactggcaatgagagttgtgaatcagt

SEQ ID NO: 167860 - DNA, 30 bp, Artificial Sequence
  Synthetic oligonucleotide
aagcactaacgtacaatgccgttaatcagt

SEQ ID NO: 167861 - DNA, 30 bp, Artificial Sequence
  Synthetic oligonucleotide
gggacaggagctggtttgcatgacatcagt

SEQ ID NO: 167862 - DNA, 30 bp, Artificial Sequence
  Synthetic oligonucleotide
attgtcaggctgattgagattggcatcagt

SEQ ID NO: 167863 - DNA, 30 bp, Artificial Sequence
  Synthetic oligonucleotide
gctccgtatggctcgaccattcagatcagt

SEQ ID NO: 167864 - DNA, 30 bp, Artificial Sequence
  Synthetic oligonucleotide
tagatggacaagggtgtgagacatatcagt

SEQ ID NO: 167865 - DNA, 30 bp, Artificial Sequence
  Synthetic oligonucleotide
gggtgtgcccccggaaagacgtcactcagt

SEQ ID NO: 167866 - DNA, 30 bp, Artificial Sequence
  Synthetic oligonucleotide
gtacacgtgttgtcggctatttcgctcagt

SEQ ID NO: 167867 - DNA, 30 bp, Artificial Sequence
  Synthetic oligonucleotide
taaattgacagcatgctggccaccgtcagt

SEQ ID NO: 167868 - DNA, 30 bp, Artificial Sequence
  Synthetic oligonucleotide
gcctagaaacgtattcgtagactattcagt

SEQ ID NO: 167869 - DNA, 30 bp, Artificial Sequence
  Synthetic oligonucleotide
ggagacaaacaatatgcacccaccttcagt

SEQ ID NO: 167870 - DNA, 30 bp, Artificial Sequence
  Synthetic oligonucleotide
acttgatgttcgggagtataagggttcagt

SEQ ID NO: 167871 - DNA, 30 bp, Artificial Sequence
  Synthetic oligonucleotide
aaggtaagggatttgggccgtactttcagt

SEQ ID NO: 167872 - DNA, 30 bp, Artificial Sequence
  Synthetic oligonucleotide
ccagcaatgttcaagaacggctgtttcagt

SEQ ID NO: 167873 - DNA, 30 bp, Artificial Sequence
  Synthetic oligonucleotide
ggctgtcacttatcccccgaggtgaagagt

SEQ ID NO: 167874 - DNA, 30 bp, Artificial Sequence
  Synthetic oligonucleotide
gcctcaggggctcaccaggctcataagagt

SEQ ID NO: 167875 - DNA, 30 bp, Artificial Sequence
  Synthetic oligonucleotide
tgcgctcaagaactcaggaagattaagagt

SEQ ID NO: 167876 - DNA, 30 bp, Artificial Sequence
  Synthetic oligonucleotide
tacgcggtccccgtgggcgttacacagagt

SEQ ID NO: 167877 - DNA, 30 bp, Artificial Sequence
  Synthetic oligonucleotide
tctcttatacagataactggccgacagagt

SEQ ID NO: 167878 - DNA, 30 bp, Artificial Sequence
  Synthetic oligonucleotide
tagtggctacttggagcagggggacagagt

SEQ ID NO: 167879 - DNA, 30 bp, Artificial Sequence
  Synthetic oligonucleotide
cttaaaaatctaagtaattgggtacagagt

SEQ ID NO: 167880 - DNA, 30 bp, Artificial Sequence
  Synthetic oligonucleotide
cacaaactgtgcggggcgacgtatcagagt

SEQ ID NO: 167881 - DNA, 30 bp, Artificial Sequence
  Synthetic oligonucleotide
cgtatcgcgggggtcacttaaagtcagagt

SEQ ID NO: 167882 - DNA, 30 bp, Artificial Sequence
  Synthetic oligonucleotide
cgcctgctggtctcatttaacccagagagt

SEQ ID NO: 167883 - DNA, 31 bp, Artificial Sequence
  Synthetic oligonucleotide
attggttcgcgtgtcattggtttcggagagt

SEQ ID NO: 167884 - DNA, 30 bp, Artificial Sequence
  Synthetic oligonucleotide
gaactagaaaccccgcggcgccctgagagt

SEQ ID NO: 167885 - DNA, 30 bp, Artificial Sequence
  Synthetic oligonucleotide
tgttgcaaattaacatgtttcgaatagagt

SEQ ID NO: 167886 - DNA, 30 bp, Artificial Sequence
  Synthetic oligonucleotide
cttttggagctgaagatgtggccatagagt

SEQ ID NO: 167887 - DNA, 30 bp, Artificial Sequence
  Synthetic oligonucleotide
taagaatgctcatgcctcctttcctagagt

SEQ ID NO: 167888 - DNA, 30 bp, Artificial Sequence
  Synthetic oligonucleotide
gatcgcaaacgagaaactcgggtctagagt

SEQ ID NO: 167889 - DNA, 30 bp, Artificial Sequence
  Synthetic oligonucleotide
ggacgaacagtgctggaagtgttctagagt

SEQ ID NO: 167890 - DNA, 30 bp, Artificial Sequence
  Synthetic oligonucleotide
acaggattggtaggagtagccccgtagagt

SEQ ID NO: 167891 - DNA, 30 bp, Artificial Sequence
  Synthetic oligonucleotide
tagacagaatcaaagaactacctaacgagt

SEQ ID NO: 167892 - DNA, 30 bp, Artificial Sequence
  Synthetic oligonucleotide
tgacttggccaaggtaagctttacacgagt

SEQ ID NO: 167893 - DNA, 30 bp, Artificial Sequence
  Synthetic oligonucleotide
gtactggctaaagagccgcttacgacgagt

SEQ ID NO: 167894 - DNA, 30 bp, Artificial Sequence
  Synthetic oligonucleotide
acgcgcttgtcacggataatattgacgagt

SEQ ID NO: 167895 - DNA, 30 bp, Artificial Sequence
  Synthetic oligonucleotide
acccatacggaaagggcatatataccgagt

SEQ ID NO: 167896 - DNA, 30 bp, Artificial Sequence
  Synthetic oligonucleotide
acgggtgagacgggttcggtacaggcgagt

SEQ ID NO: 167897 - DNA, 30 bp, Artificial Sequence
  Synthetic oligonucleotide
acagcatcaatcgttggcagaggggcgagt

SEQ ID NO: 167898 - DNA, 30 bp, Artificial Sequence
  Synthetic oligonucleotide
actggcgtgagcccgcaccctcgtgcgagt

SEQ ID NO: 167899 - DNA, 30 bp, Artificial Sequence
  Synthetic oligonucleotide
tcaatctattcgattcacgtagagtcgagt

SEQ ID NO: 167900 - DNA, 30 bp, Artificial Sequence
  Synthetic oligonucleotide
tctgagattcgcccaaatgtgtattcgagt

SEQ ID NO: 167901 - DNA, 30 bp, Artificial Sequence
  Synthetic oligonucleotide
gttagtgggaaaaaatcctaacgttcgagt

SEQ ID NO: 167902 - DNA, 30 bp, Artificial Sequence
  Synthetic oligonucleotide
agctatagagcttgagacctgggttcgagt

SEQ ID NO: 167903 - DNA, 30 bp, Artificial Sequence
  Synthetic oligonucleotide
ggcccagggtgggtcttggtaggaaggagt

SEQ ID NO: 167904 - DNA, 30 bp, Artificial Sequence
  Synthetic oligonucleotide
actacacaatctcggtggtatagacggagt

SEQ ID NO: 167905 - DNA, 30 bp, Artificial Sequence
  Synthetic oligonucleotide
tatcaccccgaatggcaggggacgcggagt

SEQ ID NO: 167906 - DNA, 30 bp, Artificial Sequence
  Synthetic oligonucleotide
actaccccgtaggcggatccagggcggagt

SEQ ID NO: 167907 - DNA, 30 bp, Artificial Sequence
  Synthetic oligonucleotide
gtcggagccgtgaagaagctggggcggagt

SEQ ID NO: 167908 - DNA, 30 bp, Artificial Sequence
  Synthetic oligonucleotide
gtcatagtgaccatcagacatcaagggagt

SEQ ID NO: 167909 - DNA, 30 bp, Artificial Sequence
  Synthetic oligonucleotide
agaggaactagtttaccctatctcgggagt

SEQ ID NO: 167910 - DNA, 30 bp, Artificial Sequence
  Synthetic oligonucleotide
gttgtacacagagaatggcccccggggagt

SEQ ID NO: 167911 - DNA, 30 bp, Artificial Sequence
  Synthetic oligonucleotide
acgtcttatcttaaggggccacatgggagt

SEQ ID NO: 167912 - DNA, 30 bp, Artificial Sequence
  Synthetic oligonucleotide
ctgaaagcgcgtactgcgacgtatgggagt

SEQ ID NO: 167913 - DNA, 30 bp, Artificial Sequence
  Synthetic oligonucleotide
acgagcaattgagaccctactcgatggagt

SEQ ID NO: 167914 - DNA, 30 bp, Artificial Sequence
  Synthetic oligonucleotide
cgtcgatattgatgacccaaattatggagt

SEQ ID NO: 167915 - DNA, 30 bp, Artificial Sequence
  Synthetic oligonucleotide
tacacaatcgggtgcgcttttccctggagt

SEQ ID NO: 167916 - DNA, 30 bp, Artificial Sequence
  Synthetic oligonucleotide
tcataggtttacttgtgcagaccgtggagt

SEQ ID NO: 167917 - DNA, 30 bp, Artificial Sequence
  Synthetic oligonucleotide
tgtcggataacgagttatcgtatttggagt

SEQ ID NO: 167918 - DNA, 30 bp, Artificial Sequence
  Synthetic oligonucleotide
gcgggtaaacaacaagcaagtttaatgagt

SEQ ID NO: 167919 - DNA, 30 bp, Artificial Sequence
  Synthetic oligonucleotide
gatttggaggttcaaaactcggacatgagt

SEQ ID NO: 167920 - DNA, 30 bp, Artificial Sequence
  Synthetic oligonucleotide
acctggacaaatgtcatgaaaactatgagt

SEQ ID NO: 167921 - DNA, 30 bp, Artificial Sequence
  Synthetic oligonucleotide
gccaagtacgcttgttccctatgtatgagt

SEQ ID NO: 167922 - DNA, 30 bp, Artificial Sequence
  Synthetic oligonucleotide
taaaaggcgcgagggccattgacactgagt

SEQ ID NO: 167923 - DNA, 30 bp, Artificial Sequence
  Synthetic oligonucleotide
tcccagcgtagatgttacgatatactgagt

SEQ ID NO: 167924 - DNA, 30 bp, Artificial Sequence
  Synthetic oligonucleotide
tgggctagagtattcgatgaggccctgagt

SEQ ID NO: 167925 - DNA, 30 bp, Artificial Sequence
  Synthetic oligonucleotide
aggttaagggccgtcggtttatggctgagt

SEQ ID NO: 167926 - DNA, 30 bp, Artificial Sequence
  Synthetic oligonucleotide
ttcgtattgcggtgttaagccgtgctgagt

SEQ ID NO: 167927 - DNA, 30 bp, Artificial Sequence
  Synthetic oligonucleotide
gaagccagggtcccttgtccgcacgtgagt

SEQ ID NO: 167928 - DNA, 30 bp, Artificial Sequence
  Synthetic oligonucleotide
cgagggtacataatccatgcttagttgagt

SEQ ID NO: 167929 - DNA, 30 bp, Artificial Sequence
  Synthetic oligonucleotide
aaatgtcgttcacgacggaccccgttgagt

SEQ ID NO: 167930 - DNA, 30 bp, Artificial Sequence
  Synthetic oligonucleotide
acttacgaccggtattgtccggaaaatagt

SEQ ID NO: 167931 - DNA, 30 bp, Artificial Sequence
  Synthetic oligonucleotide
tcatatggttgccgttcgtagtaaaatagt

SEQ ID NO: 167932 - DNA, 30 bp, Artificial Sequence
  Synthetic oligonucleotide
cacccgacaaggtcatgataactaaatagt

SEQ ID NO: 167933 - DNA, 30 bp, Artificial Sequence
  Synthetic oligonucleotide
gtgcaggcgtggcggtgaccccagaatagt

SEQ ID NO: 167934 - DNA, 30 bp, Artificial Sequence
  Synthetic oligonucleotide
cgtgtcgacacgaacaaggggcagaatagt

SEQ ID NO: 167935 - DNA, 30 bp, Artificial Sequence
  Synthetic oligonucleotide
gatggaaagcaacgaggaagcatagatagt

SEQ ID NO: 167936 - DNA, 30 bp, Artificial Sequence
  Synthetic oligonucleotide
tcggaggagaaagacacacccgtagatagt

SEQ ID NO: 167937 - DNA, 30 bp, Artificial Sequence
  Synthetic oligonucleotide
tttatccgacagaatcggatggtcgatagt

SEQ ID NO: 167938 - DNA, 30 bp, Artificial Sequence
  Synthetic oligonucleotide
gtacacataggaattggtgtaccggatagt

SEQ ID NO: 167939 - DNA, 30 bp, Artificial Sequence
  Synthetic oligonucleotide
cgtccacgcgattgcggaacagctgatagt

SEQ ID NO: 167940 - DNA, 30 bp, Artificial Sequence
  Synthetic oligonucleotide
gtttacacaatctcatgaccacactatagt

SEQ ID NO: 167941 - DNA, 30 bp, Artificial Sequence
  Synthetic oligonucleotide
tagccaataatcacatatggttactatagt

SEQ ID NO: 167942 - DNA, 30 bp, Artificial Sequence
  Synthetic oligonucleotide
agttcggtatgtttacaagatgaaactagt

SEQ ID NO: 167943 - DNA, 31 bp, Artificial Sequence
  Synthetic oligonucleotide
caagaatggcggcaatgccaatgcacctagt

SEQ ID NO: 167944 - DNA, 30 bp, Artificial Sequence
  Synthetic oligonucleotide
agaagtgaagctagcgtctaacgacctagt

SEQ ID NO: 167945 - DNA, 30 bp, Artificial Sequence
  Synthetic oligonucleotide
tttgggtgataacgataattggtgcctagt

SEQ ID NO: 167946 - DNA, 30 bp, Artificial Sequence
  Synthetic oligonucleotide
gcaaaggatgccgggtcaaccttgcctagt

SEQ ID NO: 167947 - DNA, 30 bp, Artificial Sequence
  Synthetic oligonucleotide
tgggtctgtaccggcttcggtagtcctagt

SEQ ID NO: 167948 - DNA, 30 bp, Artificial Sequence
  Synthetic oligonucleotide
gtcgccgtgcgtcactggagacgtcctagt

SEQ ID NO: 167949 - DNA, 30 bp, Artificial Sequence
  Synthetic oligonucleotide
taacatgttgtaatctaaataggtcctagt

SEQ ID NO: 167950 - DNA, 30 bp, Artificial Sequence
  Synthetic oligonucleotide
cgttatacagataacgagagattagctagt

SEQ ID NO: 167951 - DNA, 30 bp, Artificial Sequence
  Synthetic oligonucleotide
actgctgatataagcggtaagcatgctagt

SEQ ID NO: 167952 - DNA, 30 bp, Artificial Sequence
  Synthetic oligonucleotide
aggggcttcaaaacacgtagtactgctagt

SEQ ID NO: 167953 - DNA, 30 bp, Artificial Sequence
  Synthetic oligonucleotide
ctattcatggtgaagaaggatgagtctagt

SEQ ID NO: 167954 - DNA, 30 bp, Artificial Sequence
  Synthetic oligonucleotide
gcaaggtacgctctcgtcgagaggtctagt

SEQ ID NO: 167955 - DNA, 30 bp, Artificial Sequence
  Synthetic oligonucleotide
gcaatgaaagggtctgggcaccacagtagt

SEQ ID NO: 167956 - DNA, 30 bp, Artificial Sequence
  Synthetic oligonucleotide
ggaatggactacatcacgttcactagtagt

SEQ ID NO: 167957 - DNA, 30 bp, Artificial Sequence
  Synthetic oligonucleotide
ccttatttcgtcaagcctcagagtagtagt

SEQ ID NO: 167958 - DNA, 30 bp, Artificial Sequence
  Synthetic oligonucleotide
aaggtatattgagagtaatggaaacgtagt

SEQ ID NO: 167959 - DNA, 30 bp, Artificial Sequence
  Synthetic oligonucleotide
tgcgcatatcctcttccagttagccgtagt

SEQ ID NO: 167960 - DNA, 30 bp, Artificial Sequence
  Synthetic oligonucleotide
taaaattagtaaatctcgcaaggccgtagt

SEQ ID NO: 167961 - DNA, 30 bp, Artificial Sequence
  Synthetic oligonucleotide
ccagagtaggcgcgaggtcacacgcgtagt

SEQ ID NO: 167962 - DNA, 30 bp, Artificial Sequence
  Synthetic oligonucleotide
tactgccccaaaagcggtcttcggcgtagt

SEQ ID NO: 167963 - DNA, 30 bp, Artificial Sequence
  Synthetic oligonucleotide
gcattacctaatcacaaagtgggaggtagt

SEQ ID NO: 167964 - DNA, 30 bp, Artificial Sequence
  Synthetic oligonucleotide
ggcggggtctgcgagactgtggacggtagt

SEQ ID NO: 167965 - DNA, 30 bp, Artificial Sequence
  Synthetic oligonucleotide
aggcacatttgcaagagtattgctggtagt

SEQ ID NO: 167966 - DNA, 30 bp, Artificial Sequence
  Synthetic oligonucleotide
ggttgtccctgcagccgtggcgaatgtagt

SEQ ID NO: 167967 - DNA, 30 bp, Artificial Sequence
  Synthetic oligonucleotide
catggttcgtgtatatcagaagcctgtagt

SEQ ID NO: 167968 - DNA, 30 bp, Artificial Sequence
  Synthetic oligonucleotide
caggcggggggcacgactccctcctgtagt

SEQ ID NO: 167969 - DNA, 30 bp, Artificial Sequence
  Synthetic oligonucleotide
tcagcaataggttacatatgaaggtgtagt

SEQ ID NO: 167970 - DNA, 30 bp, Artificial Sequence
  Synthetic oligonucleotide
atgccgtcatagcacaggtgggtgtgtagt

SEQ ID NO: 167971 - DNA, 30 bp, Artificial Sequence
  Synthetic oligonucleotide
gcgcacacgtctggaatagttcgttgtagt

SEQ ID NO: 167972 - DNA, 30 bp, Artificial Sequence
  Synthetic oligonucleotide
gagagccgaccgtggctcatctcaattagt

SEQ ID NO: 167973 - DNA, 30 bp, Artificial Sequence
  Synthetic oligonucleotide
gagaggaaaccagttacggagcgaattagt

SEQ ID NO: 167974 - DNA, 30 bp, Artificial Sequence
  Synthetic oligonucleotide
ctgggggagatctaggggtggcgtattagt

SEQ ID NO: 167975 - DNA, 30 bp, Artificial Sequence
  Synthetic oligonucleotide
cgcgtcatttggtgcgaatgggttattagt

SEQ ID NO: 167976 - DNA, 30 bp, Artificial Sequence
  Synthetic oligonucleotide
gtttcacgcaaactgaagggcgaagttagt

SEQ ID NO: 167977 - DNA, 30 bp, Artificial Sequence
  Synthetic oligonucleotide
aagactgcgtacgaactccttctcgttagt

SEQ ID NO: 167978 - DNA, 30 bp, Artificial Sequence
  Synthetic oligonucleotide
cccccgagcgtatcagaccagagtgttagt

SEQ ID NO: 167979 - DNA, 30 bp, Artificial Sequence
  Synthetic oligonucleotide
gacataggagggatcaaagatggtgttagt

SEQ ID NO: 167980 - DNA, 30 bp, Artificial Sequence
  Synthetic oligonucleotide
acatgaacacacagcgtcctagcatttagt

SEQ ID NO: 167981 - DNA, 30 bp, Artificial Sequence
  Synthetic oligonucleotide
aatgcgaggggtacggctgggatatttagt

SEQ ID NO: 167982 - DNA, 30 bp, Artificial Sequence
  Synthetic oligonucleotide
cttgttgggctaacacatcgagtatttagt

SEQ ID NO: 167983 - DNA, 30 bp, Artificial Sequence
  Synthetic oligonucleotide
atgaagctcggcgcaattgccgccaaacgt

SEQ ID NO: 167984 - DNA, 30 bp, Artificial Sequence
  Synthetic oligonucleotide
tggccagaaggatgcacaagcgttaaacgt

SEQ ID NO: 167985 - DNA, 30 bp, Artificial Sequence
  Synthetic oligonucleotide
cagtaaaagacttatatgaaaaaacaacgt

SEQ ID NO: 167986 - DNA, 30 bp, Artificial Sequence
  Synthetic oligonucleotide
gccacggagttgataactagccaacaacgt

SEQ ID NO: 167987 - DNA, 29 bp, Artificial Sequence
  Synthetic oligonucleotide
tcacatgagtattgaccagttaacaacgt

SEQ ID NO: 167988 - DNA, 30 bp, Artificial Sequence
  Synthetic oligonucleotide
ctggtgcgccatccaggaactatacaacgt

SEQ ID NO: 167989 - DNA, 30 bp, Artificial Sequence
  Synthetic oligonucleotide
cgttagaatgccatcaacctatcgcaacgt

SEQ ID NO: 167990 - DNA, 30 bp, Artificial Sequence
  Synthetic oligonucleotide
ctttaacttagatcagctcatacagaacgt

SEQ ID NO: 167991 - DNA, 30 bp, Artificial Sequence
  Synthetic oligonucleotide
cgcgtggatcagtcaacgtcaacggaacgt

SEQ ID NO: 167992 - DNA, 30 bp, Artificial Sequence
  Synthetic oligonucleotide
gggatcttggctgatgacaattatgaacgt

SEQ ID NO: 167993 - DNA, 30 bp, Artificial Sequence
  Synthetic oligonucleotide
agcatctcagcgccttcacagtcataacgt

SEQ ID NO: 167994 - DNA, 30 bp, Artificial Sequence
  Synthetic oligonucleotide
gggaatactccggaaatggcagtgtaacgt

SEQ ID NO: 167995 - DNA, 30 bp, Artificial Sequence
  Synthetic oligonucleotide
cacacatcgggagatctggtctccacacgt

SEQ ID NO: 167996 - DNA, 30 bp, Artificial Sequence
  Synthetic oligonucleotide
cggaagcgtagattgtttattatgacacgt

SEQ ID NO: 167997 - DNA, 30 bp, Artificial Sequence
  Synthetic oligonucleotide
gagagcaacgaaacgagactaaatacacgt

SEQ ID NO: 167998 - DNA, 30 bp, Artificial Sequence
  Synthetic oligonucleotide
aactccagttaagcctcccaaactacacgt

SEQ ID NO: 167999 - DNA, 30 bp, Artificial Sequence
  Synthetic oligonucleotide
aggtaattaaagggtgcgcaacgcccacgt

SEQ ID NO: 168000 - DNA, 30 bp, Artificial Sequence
  Synthetic oligonucleotide
atgtggagcccggataaatgggagccacgt

SEQ ID NO: 168001 - DNA, 30 bp, Artificial Sequence
  Synthetic oligonucleotide
gcggccatcagccagtacggcgtgccacgt

SEQ ID NO: 168002 - DNA, 30 bp, Artificial Sequence
  Synthetic oligonucleotide
ggcctgaccaattacttaagtaaagcacgt

SEQ ID NO: 168003 - DNA, 30 bp, Artificial Sequence
  Synthetic oligonucleotide
tcgttcggttcaggctccacgggagcacgt

SEQ ID NO: 168004 - DNA, 30 bp, Artificial Sequence
  Synthetic oligonucleotide
cgagggcgcgaaggatcacgtagggcacgt

SEQ ID NO: 168005 - DNA, 30 bp, Artificial Sequence
  Synthetic oligonucleotide
catgagtagacagaatatataactgcacgt

SEQ ID NO: 168006 - DNA, 30 bp, Artificial Sequence
  Synthetic oligonucleotide
cgtgaggttccaagtcggacagactcacgt

SEQ ID NO: 168007 - DNA, 30 bp, Artificial Sequence
  Synthetic oligonucleotide
caactccaaactcaaacccaggggtcacgt

SEQ ID NO: 168008 - DNA, 30 bp, Artificial Sequence
  Synthetic oligonucleotide
aatgaaatgcctaatagcaatgcaagacgt

SEQ ID NO: 168009 - DNA, 30 bp, Artificial Sequence
  Synthetic oligonucleotide
tggttatgattgcctcattcaagaagacgt

SEQ ID NO: 168010 - DNA, 30 bp, Artificial Sequence
  Synthetic oligonucleotide
gaacaagataataatgcagtgatgagacgt

SEQ ID NO: 168011 - DNA, 30 bp, Artificial Sequence
  Synthetic oligonucleotide
tgtcattatacgtgtggtgttccaggacgt

SEQ ID NO: 168012 - DNA, 30 bp, Artificial Sequence
  Synthetic oligonucleotide
tgagagctgtcaaaccaagccgctggacgt

SEQ ID NO: 168013 - DNA, 30 bp, Artificial Sequence
  Synthetic oligonucleotide
ctaaaacaacaccgaataaaagcctgacgt

SEQ ID NO: 168014 - DNA, 30 bp, Artificial Sequence
  Synthetic oligonucleotide
ctatcgcaaacatgcttcatgtggatacgt

SEQ ID NO: 168015 - DNA, 30 bp, Artificial Sequence
  Synthetic oligonucleotide
cttaccgtcaataatacccaagctatacgt

SEQ ID NO: 168016 - DNA, 30 bp, Artificial Sequence
  Synthetic oligonucleotide
acgacacggaagagggtcgcttttctacgt

SEQ ID NO: 168017 - DNA, 30 bp, Artificial Sequence
  Synthetic oligonucleotide
tgttagtttcccggggaaagatttgtacgt

SEQ ID NO: 168018 - DNA, 30 bp, Artificial Sequence
  Synthetic oligonucleotide
ggcctaatctttaggcttcatgtcttacgt

SEQ ID NO: 168019 - DNA, 30 bp, Artificial Sequence
  Synthetic oligonucleotide
tgtcggcgtcatttataccatgttttacgt

SEQ ID NO: 168020 - DNA, 30 bp, Artificial Sequence
  Synthetic oligonucleotide
acggacgcgtgctaaacggacaaaaaccgt

SEQ ID NO: 168021 - DNA, 30 bp, Artificial Sequence
  Synthetic oligonucleotide
gaagaccttactggaagaaaaggaaaccgt

SEQ ID NO: 168022 - DNA, 30 bp, Artificial Sequence
  Synthetic oligonucleotide
acggactcactacatggggaatacaaccgt

SEQ ID NO: 168023 - DNA, 30 bp, Artificial Sequence
  Synthetic oligonucleotide
agggtaccatggttttacgatgtacaccgt

SEQ ID NO: 168024 - DNA, 30 bp, Artificial Sequence
  Synthetic oligonucleotide
tcggcagtccacgaggtacacctccaccgt

SEQ ID NO: 168025 - DNA, 30 bp, Artificial Sequence
  Synthetic oligonucleotide
gaggtactaaagtaaattgcttggcaccgt

SEQ ID NO: 168026 - DNA, 30 bp, Artificial Sequence
  Synthetic oligonucleotide
tcatttcacgccgtaaatacccctcaccgt

SEQ ID NO: 168027 - DNA, 30 bp, Artificial Sequence
  Synthetic oligonucleotide
aattgcagaattggtaatgatcaagaccgt

SEQ ID NO: 168028 - DNA, 30 bp, Artificial Sequence
  Synthetic oligonucleotide
agcgcgctgtaccgcgtaagtccagaccgt

SEQ ID NO: 168029 - DNA, 30 bp, Artificial Sequence
  Synthetic oligonucleotide
ataagttgggcaagtcctaaccccgaccgt

SEQ ID NO: 168030 - DNA, 30 bp, Artificial Sequence
  Synthetic oligonucleotide
agtgtggtagcatagtacgttgcggaccgt

SEQ ID NO: 168031 - DNA, 30 bp, Artificial Sequence
  Synthetic oligonucleotide
acctgaatgtcgtacggatcaaaaacccgt

SEQ ID NO: 168032 - DNA, 30 bp, Artificial Sequence
  Synthetic oligonucleotide
cagggaaccccggcacggcgacagccccgt

SEQ ID NO: 168033 - DNA, 30 bp, Artificial Sequence
  Synthetic oligonucleotide
ggaaatacagtggtcgacctgaaagcccgt

SEQ ID NO: 168034 - DNA, 30 bp, Artificial Sequence
  Synthetic oligonucleotide
acagatcctgattccacgaaagccgcccgt

SEQ ID NO: 168035 - DNA, 30 bp, Artificial Sequence
  Synthetic oligonucleotide
gtcttagttatacggaccatcttctcccgt

SEQ ID NO: 168036 - DNA, 30 bp, Artificial Sequence
  Synthetic oligonucleotide
tcaggcatgtcctaaccgtgcaattcccgt

SEQ ID NO: 168037 - DNA, 30 bp, Artificial Sequence
  Synthetic oligonucleotide
cgtatacattcgtctgcgtatacttcccgt

SEQ ID NO: 168038 - DNA, 30 bp, Artificial Sequence
  Synthetic oligonucleotide
ctatcggggctagcaagctcctccagccgt

SEQ ID NO: 168039 - DNA, 30 bp, Artificial Sequence
  Synthetic oligonucleotide
attaacggggtgggtaacgcgtgcagccgt

SEQ ID NO: 168040 - DNA, 30 bp, Artificial Sequence
  Synthetic oligonucleotide
tcagtctcgtgatagggccagtatagccgt

SEQ ID NO: 168041 - DNA, 30 bp, Artificial Sequence
  Synthetic oligonucleotide
atactcccttcactaacagaggcacgccgt

SEQ ID NO: 168042 - DNA, 30 bp, Artificial Sequence
  Synthetic oligonucleotide
aggaggcacaggtaccaaatgggacgccgt

SEQ ID NO: 168043 - DNA, 30 bp, Artificial Sequence
  Synthetic oligonucleotide
acacaaggggtcgcggggaaggctcgccgt

SEQ ID NO: 168044 - DNA, 30 bp, Artificial Sequence
  Synthetic oligonucleotide
taaacactggcacgcacgctcctaggccgt

SEQ ID NO: 168045 - DNA, 30 bp, Artificial Sequence
  Synthetic oligonucleotide
cggggtatcgcaattagcgtatagggccgt

SEQ ID NO: 168046 - DNA, 30 bp, Artificial Sequence
  Synthetic oligonucleotide
gggtatggcccaacacgaataggtggccgt

SEQ ID NO: 168047 - DNA, 30 bp, Artificial Sequence
  Synthetic oligonucleotide
tctgggtgtaatcgacacagtgtatgccgt

SEQ ID NO: 168048 - DNA, 30 bp, Artificial Sequence
  Synthetic oligonucleotide
tccgaggatgtggaccctggtcgttgccgt

SEQ ID NO: 168049 - DNA, 30 bp, Artificial Sequence
  Synthetic oligonucleotide
tgggtgaagcctgaatcccatgcaatccgt

SEQ ID NO: 168050 - DNA, 30 bp, Artificial Sequence
  Synthetic oligonucleotide
aatatgagccgtcgtctcaacatcctccgt

SEQ ID NO: 168051 - DNA, 30 bp, Artificial Sequence
  Synthetic oligonucleotide
tgctgctgagatcttgtcaacttcgtccgt

SEQ ID NO: 168052 - DNA, 30 bp, Artificial Sequence
  Synthetic oligonucleotide
ccccgaagcaatctgggcaacaatgtccgt

SEQ ID NO: 168053 - DNA, 30 bp, Artificial Sequence
  Synthetic oligonucleotide
ggtggatacgatccagtaggttctgtccgt

SEQ ID NO: 168054 - DNA, 30 bp, Artificial Sequence
  Synthetic oligonucleotide
ccaaagcaaggaatatcggcatcattccgt

SEQ ID NO: 168055 - DNA, 30 bp, Artificial Sequence
  Synthetic oligonucleotide
ttcaaatatgcaaacttgggaagattccgt

SEQ ID NO: 168056 - DNA, 30 bp, Artificial Sequence
  Synthetic oligonucleotide
atgttccagagtgtaccaccatgattccgt

SEQ ID NO: 168057 - DNA, 30 bp, Artificial Sequence
  Synthetic oligonucleotide
gcctaatcaaccctataagacacaaagcgt

SEQ ID NO: 168058 - DNA, 30 bp, Artificial Sequence
  Synthetic oligonucleotide
gtgtaactcccaggccaggtagcaaagcgt

SEQ ID NO: 168059 - DNA, 30 bp, Artificial Sequence
  Synthetic oligonucleotide
aataagatgctctggatttcgaacaagcgt

SEQ ID NO: 168060 - DNA, 29 bp, Artificial Sequence
  Synthetic oligonucleotide
gtccggcagccgtgcagcccgggaagcgt

SEQ ID NO: 168061 - DNA, 30 bp, Artificial Sequence
  Synthetic oligonucleotide
ttgacaaatgcgaggagatgaagtaagcgt

SEQ ID NO: 168062 - DNA, 30 bp, Artificial Sequence
  Synthetic oligonucleotide
ccatggcccgaggtttgcaattgtaagcgt

SEQ ID NO: 168063 - DNA, 30 bp, Artificial Sequence
  Synthetic oligonucleotide
gtaagtgcgttaacgtgtttacaacagcgt

SEQ ID NO: 168064 - DNA, 30 bp, Artificial Sequence
  Synthetic oligonucleotide
aagcgaactgccccatcgtgatgccagcgt

SEQ ID NO: 168065 - DNA, 30 bp, Artificial Sequence
  Synthetic oligonucleotide
agatggggtaaagctggctctgacgagcgt

SEQ ID NO: 168066 - DNA, 30 bp, Artificial Sequence
  Synthetic oligonucleotide
gatggtaaatgggtcaatggttgggagcgt

SEQ ID NO: 168067 - DNA, 30 bp, Artificial Sequence
  Synthetic oligonucleotide
agccgctaaaatgataaatactgtgagcgt

SEQ ID NO: 168068 - DNA, 30 bp, Artificial Sequence
  Synthetic oligonucleotide
ccgctaagttccgcgaaacctagatagcgt

SEQ ID NO: 168069 - DNA, 30 bp, Artificial Sequence
  Synthetic oligonucleotide
atggtcaggacgactccagtgaggtagcgt

SEQ ID NO: 168070 - DNA, 30 bp, Artificial Sequence
  Synthetic oligonucleotide
ggtagagaaactagtcatgaaacttagcgt

SEQ ID NO: 168071 - DNA, 30 bp, Artificial Sequence
  Synthetic oligonucleotide
gatgtaaaacctacttcctgatgaacgcgt

SEQ ID NO: 168072 - DNA, 30 bp, Artificial Sequence
  Synthetic oligonucleotide
gcgaaaaaagtaaggccatattacacgcgt

SEQ ID NO: 168073 - DNA, 30 bp, Artificial Sequence
  Synthetic oligonucleotide
ggcaatccgtgtctacagcgataaccgcgt

SEQ ID NO: 168074 - DNA, 30 bp, Artificial Sequence
  Synthetic oligonucleotide
caggcgttgttccatcatgtaacagcgcgt

SEQ ID NO: 168075 - DNA, 30 bp, Artificial Sequence
  Synthetic oligonucleotide
cagtctggacagtatgagcctttagcgcgt

SEQ ID NO: 168076 - DNA, 30 bp, Artificial Sequence
  Synthetic oligonucleotide
ctcaggaatcataaagtaaggtcggcgcgt

SEQ ID NO: 168077 - DNA, 30 bp, Artificial Sequence
  Synthetic oligonucleotide
ggcatatgtcgtggaaatcatggatcgcgt

SEQ ID NO: 168078 - DNA, 30 bp, Artificial Sequence
  Synthetic oligonucleotide
ttaccctgcatctaacaacaatgctcgcgt

SEQ ID NO: 168079 - DNA, 30 bp, Artificial Sequence
  Synthetic oligonucleotide
tgagtcaaaaaacctcgcaatgtctcgcgt

SEQ ID NO: 168080 - DNA, 30 bp, Artificial Sequence
  Synthetic oligonucleotide
caaccggatcggtgttatcagtaaaggcgt

SEQ ID NO: 168081 - DNA, 30 bp, Artificial Sequence
  Synthetic oligonucleotide
gtttccttaagcggaaggatgaggaggcgt

SEQ ID NO: 168082 - DNA, 30 bp, Artificial Sequence
  Synthetic oligonucleotide
cattgatgggaacacccctaataccggcgt

SEQ ID NO: 168083 - DNA, 30 bp, Artificial Sequence
  Synthetic oligonucleotide
ttcaccggtctgaaaatcgcgctgcggcgt

SEQ ID NO: 168084 - DNA, 30 bp, Artificial Sequence
  Synthetic oligonucleotide
gtaggggcttctgtgacaaacttggggcgt

SEQ ID NO: 168085 - DNA, 30 bp, Artificial Sequence
  Synthetic oligonucleotide
gggcatcatcggaggtcctggagtgggcgt

SEQ ID NO: 168086 - DNA, 30 bp, Artificial Sequence
  Synthetic oligonucleotide
acgctgtgccgttacggataatactggcgt

SEQ ID NO: 168087 - DNA, 30 bp, Artificial Sequence
  Synthetic oligonucleotide
tcctaagcatcttgtcgtaccccgtggcgt

SEQ ID NO: 168088 - DNA, 30 bp, Artificial Sequence
  Synthetic oligonucleotide
ccaacctccggagcccaatgattgtggcgt

SEQ ID NO: 168089 - DNA, 30 bp, Artificial Sequence
  Synthetic oligonucleotide
aaggagtgcgactctggtggctcgatgcgt

SEQ ID NO: 168090 - DNA, 30 bp, Artificial Sequence
  Synthetic oligonucleotide
agtacccagaatcataactaaaggatgcgt

SEQ ID NO: 168091 - DNA, 30 bp, Artificial Sequence
  Synthetic oligonucleotide
cggccatggtactgttgggaatatatgcgt

SEQ ID NO: 168092 - DNA, 30 bp, Artificial Sequence
  Synthetic oligonucleotide
tgggacggcattatccgtcggggtatgcgt

SEQ ID NO: 168093 - DNA, 30 bp, Artificial Sequence
  Synthetic oligonucleotide
gtcgtcagatatcagctgcagaccctgcgt

SEQ ID NO: 168094 - DNA, 30 bp, Artificial Sequence
  Synthetic oligonucleotide
ggttcgtctgcggaaatatgtcgtctgcgt

SEQ ID NO: 168095 - DNA, 30 bp, Artificial Sequence
  Synthetic oligonucleotide
gggccggagatttctaaatgctaagtgcgt

SEQ ID NO: 168096 - DNA, 30 bp, Artificial Sequence
  Synthetic oligonucleotide
taagttatcacagtggtctccggagtgcgt

SEQ ID NO: 168097 - DNA, 30 bp, Artificial Sequence
  Synthetic oligonucleotide
ctgtgcgcgtagaccagttagtgcgtgcgt

SEQ ID NO: 168098 - DNA, 30 bp, Artificial Sequence
  Synthetic oligonucleotide
ggtgagtaacagttccatctcggggtgcgt

SEQ ID NO: 168099 - DNA, 30 bp, Artificial Sequence
  Synthetic oligonucleotide
cgtcgttgtatcaagcttcatggggtgcgt

SEQ ID NO: 168100 - DNA, 30 bp, Artificial Sequence
  Synthetic oligonucleotide
tcaaaataagggtgcaagctatggttgcgt

SEQ ID NO: 168101 - DNA, 30 bp, Artificial Sequence
  Synthetic oligonucleotide
gtaacgtaaaagtaaggcgcttagaatcgt

SEQ ID NO: 168102 - DNA, 30 bp, Artificial Sequence
  Synthetic oligonucleotide
cgagtccgaatagattcttgggcgaatcgt

SEQ ID NO: 168103 - DNA, 30 bp, Artificial Sequence
  Synthetic oligonucleotide
tacctcaaggcagaggtgtcatggaatcgt

SEQ ID NO: 168104 - DNA, 30 bp, Artificial Sequence
  Synthetic oligonucleotide
accgtccatcgcttgtaattccctaatcgt

SEQ ID NO: 168105 - DNA, 30 bp, Artificial Sequence
  Synthetic oligonucleotide
aacgtgcacattgcgcgctatgaccatcgt

SEQ ID NO: 168106 - DNA, 30 bp, Artificial Sequence
  Synthetic oligonucleotide
ttaccggaaggaggcatatggtggcatcgt

SEQ ID NO: 168107 - DNA, 30 bp, Artificial Sequence
  Synthetic oligonucleotide
gggagagccccgagctcaggggtcgatcgt

SEQ ID NO: 168108 - DNA, 30 bp, Artificial Sequence
  Synthetic oligonucleotide
cacatattgggcagcactctgtcggatcgt

SEQ ID NO: 168109 - DNA, 30 bp, Artificial Sequence
  Synthetic oligonucleotide
agtctacttaatacagccgcgtctgatcgt

SEQ ID NO: 168110 - DNA, 30 bp, Artificial Sequence
  Synthetic oligonucleotide
gaaaccacacaggccttccgcaaatatcgt

SEQ ID NO: 168111 - DNA, 30 bp, Artificial Sequence
  Synthetic oligonucleotide
gatggtgtccaataaaattgcgtatatcgt

SEQ ID NO: 168112 - DNA, 30 bp, Artificial Sequence
  Synthetic oligonucleotide
agctgtggataccacccatatctgtatcgt

SEQ ID NO: 168113 - DNA, 30 bp, Artificial Sequence
  Synthetic oligonucleotide
gccaccctgtgaagtcgcaatgtgtatcgt

SEQ ID NO: 168114 - DNA, 30 bp, Artificial Sequence
  Synthetic oligonucleotide
tcgatcgttgaatgaagtagtagttatcgt

SEQ ID NO: 168115 - DNA, 30 bp, Artificial Sequence
  Synthetic oligonucleotide
ttgagcatcggccaaaaaagggtaactcgt

SEQ ID NO: 168116 - DNA, 30 bp, Artificial Sequence
  Synthetic oligonucleotide
tgctggggcatgggcttagatcacactcgt

SEQ ID NO: 168117 - DNA, 30 bp, Artificial Sequence
  Synthetic oligonucleotide
gtgtcgacccttttcagatcgtacactcgt

SEQ ID NO: 168118 - DNA, 30 bp, Artificial Sequence
  Synthetic oligonucleotide
agcgcacaataaccataggcaacgcctcgt

SEQ ID NO: 168119 - DNA, 30 bp, Artificial Sequence
  Synthetic oligonucleotide
gtatccacgactactgtggtagctgctcgt

SEQ ID NO: 168120 - DNA, 30 bp, Artificial Sequence
  Synthetic oligonucleotide
aggctgaaggtggattttgattgtgctcgt

SEQ ID NO: 168121 - DNA, 30 bp, Artificial Sequence
  Synthetic oligonucleotide
acgactagtattgaacacgtatcctctcgt

SEQ ID NO: 168122 - DNA, 30 bp, Artificial Sequence
  Synthetic oligonucleotide
taggggagtcgctgatagtaatagagtcgt

SEQ ID NO: 168123 - DNA, 30 bp, Artificial Sequence
  Synthetic oligonucleotide
gtgatacaacgggttcgaaggaaacgtcgt

SEQ ID NO: 168124 - DNA, 30 bp, Artificial Sequence
  Synthetic oligonucleotide
ttctccattgaacccactgatgttcgtcgt

SEQ ID NO: 168125 - DNA, 30 bp, Artificial Sequence
  Synthetic oligonucleotide
tcacgctgtgcagctacttgaaacggtcgt

SEQ ID NO: 168126 - DNA, 30 bp, Artificial Sequence
  Synthetic oligonucleotide
taggtctattagcttacgaagtatggtcgt

SEQ ID NO: 168127 - DNA, 29 bp, Artificial Sequence
  Synthetic oligonucleotide
gaaagaggcaaataaagtgtttctgtcgt

SEQ ID NO: 168128 - DNA, 30 bp, Artificial Sequence
  Synthetic oligonucleotide
tacgttttcgaagactcaagattgtgtcgt

SEQ ID NO: 168129 - DNA, 30 bp, Artificial Sequence
  Synthetic oligonucleotide
tgacaaggtgtaattagtttggcttgtcgt

SEQ ID NO: 168130 - DNA, 30 bp, Artificial Sequence
  Synthetic oligonucleotide
ctctgatacgagcaggcataacacattcgt

SEQ ID NO: 168131 - DNA, 30 bp, Artificial Sequence
  Synthetic oligonucleotide
gtgagttacattacatggttgcttattcgt

SEQ ID NO: 168132 - DNA, 30 bp, Artificial Sequence
  Synthetic oligonucleotide
caaaacggccgggggaggaatgctcttcgt

SEQ ID NO: 168133 - DNA, 30 bp, Artificial Sequence
  Synthetic oligonucleotide
gcactgatgggctgaataagatgtcttcgt

SEQ ID NO: 168134 - DNA, 30 bp, Artificial Sequence
  Synthetic oligonucleotide
cgagcatcctagaggcggccgcaagttcgt

SEQ ID NO: 168135 - DNA, 30 bp, Artificial Sequence
  Synthetic oligonucleotide
ttagcggtcgaggcttcagacgaagttcgt

SEQ ID NO: 168136 - DNA, 30 bp, Artificial Sequence
  Synthetic oligonucleotide
gcgtattcgtgtagggtggagtaagttcgt

SEQ ID NO: 168137 - DNA, 30 bp, Artificial Sequence
  Synthetic oligonucleotide
gtaaagaggccacttgcgagttgtgttcgt

SEQ ID NO: 168138 - DNA, 30 bp, Artificial Sequence
  Synthetic oligonucleotide
acgcaccacagtacacggatatcgtttcgt

SEQ ID NO: 168139 - DNA, 30 bp, Artificial Sequence
  Synthetic oligonucleotide
gtacacaggtcgtcaattttatgcaaaggt

SEQ ID NO: 168140 - DNA, 30 bp, Artificial Sequence
  Synthetic oligonucleotide
atcacatgaggcaaaggtcgctggaaaggt

SEQ ID NO: 168141 - DNA, 30 bp, Artificial Sequence
  Synthetic oligonucleotide
actgtgaattagaaccctaacatgaaaggt

SEQ ID NO: 168142 - DNA, 30 bp, Artificial Sequence
  Synthetic oligonucleotide
gcggatcacgcttcgacaacaaataaaggt

SEQ ID NO: 168143 - DNA, 30 bp, Artificial Sequence
  Synthetic oligonucleotide
aaactgttatcgagtagcgggaataaaggt

SEQ ID NO: 168144 - DNA, 30 bp, Artificial Sequence
  Synthetic oligonucleotide
ggagaacacagatccatagacgttaaaggt

SEQ ID NO: 168145 - DNA, 30 bp, Artificial Sequence
  Synthetic oligonucleotide
acagggggcatctgcccgctatttaaaggt

SEQ ID NO: 168146 - DNA, 30 bp, Artificial Sequence
  Synthetic oligonucleotide
ctgagtgtaaaggctgtccatcaacaaggt

SEQ ID NO: 168147 - DNA, 30 bp, Artificial Sequence
  Synthetic oligonucleotide
ccaaaagatttcacggtgtgtctccaaggt

SEQ ID NO: 168148 - DNA, 30 bp, Artificial Sequence
  Synthetic oligonucleotide
atgttaacgacgggaacttttaagcaaggt

SEQ ID NO: 168149 - DNA, 30 bp, Artificial Sequence
  Synthetic oligonucleotide
acgacgttgtctatgtcccccgctcaaggt

SEQ ID NO: 168150 - DNA, 30 bp, Artificial Sequence
  Synthetic oligonucleotide
gaatgggagttaaaacatgcgtctgaaggt

SEQ ID NO: 168151 - DNA, 30 bp, Artificial Sequence
  Synthetic oligonucleotide
ccaagttcgcattttacagtacgataaggt

SEQ ID NO: 168152 - DNA, 30 bp, Artificial Sequence
  Synthetic oligonucleotide
agagacactcaaagaaatgtacgataaggt

SEQ ID NO: 168153 - DNA, 30 bp, Artificial Sequence
  Synthetic oligonucleotide
acagtgagtgttacagcaccctagtaaggt

SEQ ID NO: 168154 - DNA, 30 bp, Artificial Sequence
  Synthetic oligonucleotide
cagctcaagtagggttctggcaggtaaggt

SEQ ID NO: 168155 - DNA, 30 bp, Artificial Sequence
  Synthetic oligonucleotide
gcggcaataccagcgacacaacgttaaggt

SEQ ID NO: 168156 - DNA, 30 bp, Artificial Sequence
  Synthetic oligonucleotide
gatgcgctagcagctgcaaaaggcacaggt

SEQ ID NO: 168157 - DNA, 30 bp, Artificial Sequence
  Synthetic oligonucleotide
agagacaaacgatagacacgctgcacaggt

SEQ ID NO: 168158 - DNA, 30 bp, Artificial Sequence
  Synthetic oligonucleotide
agaacgggactaattagactcgcgacaggt

SEQ ID NO: 168159 - DNA, 30 bp, Artificial Sequence
  Synthetic oligonucleotide
gatctagcatgatctcggaatggaccaggt

SEQ ID NO: 168160 - DNA, 30 bp, Artificial Sequence
  Synthetic oligonucleotide
cgaataagcgttgatacattcgttccaggt

SEQ ID NO: 168161 - DNA, 30 bp, Artificial Sequence
  Synthetic oligonucleotide
cagactgacatagggctgtggtaatcaggt

SEQ ID NO: 168162 - DNA, 30 bp, Artificial Sequence
  Synthetic oligonucleotide
tgaaagattgtatagggatcaaaaagaggt

SEQ ID NO: 168163 - DNA, 30 bp, Artificial Sequence
  Synthetic oligonucleotide
cgatgcggctagcattgaggcacaagaggt

SEQ ID NO: 168164 - DNA, 30 bp, Artificial Sequence
  Synthetic oligonucleotide
gacggtgcgtgtcaattttgagtaagaggt

SEQ ID NO: 168165 - DNA, 30 bp, Artificial Sequence
  Synthetic oligonucleotide
cccaaaattgcgctcgacacccacagaggt

SEQ ID NO: 168166 - DNA, 30 bp, Artificial Sequence
  Synthetic oligonucleotide
cccgcgtaaataaaacagttaatcagaggt

SEQ ID NO: 168167 - DNA, 30 bp, Artificial Sequence
  Synthetic oligonucleotide
gggtccagacatttcccggtgaatagaggt

SEQ ID NO: 168168 - DNA, 30 bp, Artificial Sequence
  Synthetic oligonucleotide
gcgcgtacatgaataatagctcctagaggt

SEQ ID NO: 168169 - DNA, 30 bp, Artificial Sequence
  Synthetic oligonucleotide
tggaaaggtagaaacgaaaaagctagaggt

SEQ ID NO: 168170 - DNA, 30 bp, Artificial Sequence
  Synthetic oligonucleotide
agaactcaccacgcgagctcccgtagaggt

SEQ ID NO: 168171 - DNA, 30 bp, Artificial Sequence
  Synthetic oligonucleotide
ggccccgtccaagagccattcgaacgaggt

SEQ ID NO: 168172 - DNA, 30 bp, Artificial Sequence
  Synthetic oligonucleotide
ctatgagcccgcacaaactaggcacgaggt

SEQ ID NO: 168173 - DNA, 30 bp, Artificial Sequence
  Synthetic oligonucleotide
gcatcacattcggcaggacgtgagcgaggt

SEQ ID NO: 168174 - DNA, 30 bp, Artificial Sequence
  Synthetic oligonucleotide
acgtatcgagatccaccactcctgcgaggt

SEQ ID NO: 168175 - DNA, 30 bp, Artificial Sequence
  Synthetic oligonucleotide
tgaggttgatgactgttaaggctgcgaggt

SEQ ID NO: 168176 - DNA, 30 bp, Artificial Sequence
  Synthetic oligonucleotide
acgcaaacaactaccgaaaccagcggaggt

SEQ ID NO: 168177 - DNA, 30 bp, Artificial Sequence
  Synthetic oligonucleotide
aacacgattaaatccctcgcctatggaggt

SEQ ID NO: 168178 - DNA, 30 bp, Artificial Sequence
  Synthetic oligonucleotide
gcaagataggtaagaagggaggctggaggt

SEQ ID NO: 168179 - DNA, 30 bp, Artificial Sequence
  Synthetic oligonucleotide
ctgaccatggtacggccacgatctggaggt

SEQ ID NO: 168180 - DNA, 30 bp, Artificial Sequence
  Synthetic oligonucleotide
agcctgcaacggggatagctcggtggaggt

SEQ ID NO: 168181 - DNA, 30 bp, Artificial Sequence
  Synthetic oligonucleotide
aaatagaattgtaaacatacacgctgaggt

SEQ ID NO: 168182 - DNA, 30 bp, Artificial Sequence
  Synthetic oligonucleotide
gtcggtcgcaatgtacgagcctattgaggt

SEQ ID NO: 168183 - DNA, 30 bp, Artificial Sequence
  Synthetic oligonucleotide
ttgggcttttcagtacaaggaatttgaggt

SEQ ID NO: 168184 - DNA, 30 bp, Artificial Sequence
  Synthetic oligonucleotide
ccgtgtggtatcatgagggtcatgataggt

SEQ ID NO: 168185 - DNA, 30 bp, Artificial Sequence
  Synthetic oligonucleotide
cggcgacagacttaaggcaggtgactaggt

SEQ ID NO: 168186 - DNA, 30 bp, Artificial Sequence
  Synthetic oligonucleotide
gtggattaccaccactaaattgacctaggt

SEQ ID NO: 168187 - DNA, 30 bp, Artificial Sequence
  Synthetic oligonucleotide
gttcacgtcgtggtgaagacgtagctaggt

SEQ ID NO: 168188 - DNA, 30 bp, Artificial Sequence
  Synthetic oligonucleotide
agggtcgatgtagagggcggaccgctaggt

SEQ ID NO: 168189 - DNA, 30 bp, Artificial Sequence
  Synthetic oligonucleotide
tctagatggaagaagccgactgggctaggt

SEQ ID NO: 168190 - DNA, 30 bp, Artificial Sequence
  Synthetic oligonucleotide
tcgttaaggctgccggggacttgagtaggt

SEQ ID NO: 168191 - DNA, 30 bp, Artificial Sequence
  Synthetic oligonucleotide
ccggaggtcgtcgtgccgaactgggtaggt

SEQ ID NO: 168192 - DNA, 30 bp, Artificial Sequence
  Synthetic oligonucleotide
cggtaagagcgtcgcgtgcggaacttaggt

SEQ ID NO: 168193 - DNA, 30 bp, Artificial Sequence
  Synthetic oligonucleotide
cttccagggataagccaacgcgagttaggt

SEQ ID NO: 168194 - DNA, 30 bp, Artificial Sequence
  Synthetic oligonucleotide
tgtccggtggggtagcacgtagtgttaggt

SEQ ID NO: 168195 - DNA, 30 bp, Artificial Sequence
  Synthetic oligonucleotide
aactaatatcatagcggtacaagaaacggt

SEQ ID NO: 168196 - DNA, 31 bp, Artificial Sequence
  Synthetic oligonucleotide
tgagggcattcgctcaatatggcacaacggt

SEQ ID NO: 168197 - DNA, 30 bp, Artificial Sequence
  Synthetic oligonucleotide
ggggggcataacttttagtagtacaacggt

SEQ ID NO: 168198 - DNA, 30 bp, Artificial Sequence
  Synthetic oligonucleotide
ttgggaaggcttttgtcgctacggaacggt

SEQ ID NO: 168199 - DNA, 30 bp, Artificial Sequence
  Synthetic oligonucleotide
tcaatgaaaacggccgcacggcaacacggt

SEQ ID NO: 168200 - DNA, 30 bp, Artificial Sequence
  Synthetic oligonucleotide
cgtgtatcgttgcataaggcggaccacggt

SEQ ID NO: 168201 - DNA, 30 bp, Artificial Sequence
  Synthetic oligonucleotide
ccctaaagggggcagatcaggcgcgacggt

SEQ ID NO: 168202 - DNA, 30 bp, Artificial Sequence
  Synthetic oligonucleotide
ctacgtggggtcggaaggtcccatgacggt

SEQ ID NO: 168203 - DNA, 30 bp, Artificial Sequence
  Synthetic oligonucleotide
attaggcactagaacaatagcggatacggt

SEQ ID NO: 168204 - DNA, 30 bp, Artificial Sequence
  Synthetic oligonucleotide
cgtgtagcaaagaggtaaaagttaaccggt

SEQ ID NO: 168205 - DNA, 30 bp, Artificial Sequence
  Synthetic oligonucleotide
tggttaagggtagcaggtgtgtccaccggt

SEQ ID NO: 168206 - DNA, 30 bp, Artificial Sequence
  Synthetic oligonucleotide
gcgacggtatagtacaatcgaccgaccggt

SEQ ID NO: 168207 - DNA, 30 bp, Artificial Sequence
  Synthetic oligonucleotide
acgaacgtaacctacgcgtgggataccggt

SEQ ID NO: 168208 - DNA, 30 bp, Artificial Sequence
  Synthetic oligonucleotide
ccatctgcccgctgggaatccggagccggt

SEQ ID NO: 168209 - DNA, 30 bp, Artificial Sequence
  Synthetic oligonucleotide
ctgcatacaccaaacagggtcgaatccggt

SEQ ID NO: 168210 - DNA, 30 bp, Artificial Sequence
  Synthetic oligonucleotide
gtactaatcgtgcccgaattcgaatccggt

SEQ ID NO: 168211 - DNA, 30 bp, Artificial Sequence
  Synthetic oligonucleotide
ttgacaggaccgagcttcggacgatccggt

SEQ ID NO: 168212 - DNA, 30 bp, Artificial Sequence
  Synthetic oligonucleotide
gggtagggtagttgggaacaaacttccggt

SEQ ID NO: 168213 - DNA, 30 bp, Artificial Sequence
  Synthetic oligonucleotide
tgcgcctatgatcggccaagggaaagcggt

SEQ ID NO: 168214 - DNA, 30 bp, Artificial Sequence
  Synthetic oligonucleotide
agtgacagagggccggcaatgtaaagcggt

SEQ ID NO: 168215 - DNA, 30 bp, Artificial Sequence
  Synthetic oligonucleotide
gcagtgtgccaggagctaaatcgtagcggt

SEQ ID NO: 168216 - DNA, 30 bp, Artificial Sequence
  Synthetic oligonucleotide
catagctgcagtcgcaaacgtgttagcggt

SEQ ID NO: 168217 - DNA, 30 bp, Artificial Sequence
  Synthetic oligonucleotide
taatactatctacttgatcttacaggcggt

SEQ ID NO: 168218 - DNA, 30 bp, Artificial Sequence
  Synthetic oligonucleotide
gagaaagtggattgcaacctagtaggcggt

SEQ ID NO: 168219 - DNA, 30 bp, Artificial Sequence
  Synthetic oligonucleotide
acgcacggggcgatgcactaatgtggcggt

SEQ ID NO: 168220 - DNA, 30 bp, Artificial Sequence
  Synthetic oligonucleotide
atcgggtgtatagcgccgagacgatgcggt

SEQ ID NO: 168221 - DNA, 30 bp, Artificial Sequence
  Synthetic oligonucleotide
ttcaggggacgtctgggggctggatgcggt

SEQ ID NO: 168222 - DNA, 30 bp, Artificial Sequence
  Synthetic oligonucleotide
gaggtatgttcgtatccatggaggtgcggt

SEQ ID NO: 168223 - DNA, 30 bp, Artificial Sequence
  Synthetic oligonucleotide
gctcgtaaatatgatatgtagcggtgcggt

SEQ ID NO: 168224 - DNA, 30 bp, Artificial Sequence
  Synthetic oligonucleotide
ggtgtactgaatcgttgggttgggtgcggt

SEQ ID NO: 168225 - DNA, 30 bp, Artificial Sequence
  Synthetic oligonucleotide
tattcggtcctatttccggagttgtgcggt

SEQ ID NO: 168226 - DNA, 30 bp, Artificial Sequence
  Synthetic oligonucleotide
ccggcgtagtttcgttaatacttaatcggt

SEQ ID NO: 168227 - DNA, 30 bp, Artificial Sequence
  Synthetic oligonucleotide
gtttgccctagccctaagatgggcatcggt

SEQ ID NO: 168228 - DNA, 30 bp, Artificial Sequence
  Synthetic oligonucleotide
gcggggggatggccaaataataaactcggt

SEQ ID NO: 168229 - DNA, 30 bp, Artificial Sequence
  Synthetic oligonucleotide
tttggatcgaacgggaggggtgaactcggt

SEQ ID NO: 168230 - DNA, 30 bp, Artificial Sequence
  Synthetic oligonucleotide
gagggggttgaaacttaggcgctactcggt

SEQ ID NO: 168231 - DNA, 30 bp, Artificial Sequence
  Synthetic oligonucleotide
gcagcgggtcaatcgacaatagatctcggt

SEQ ID NO: 168232 - DNA, 30 bp, Artificial Sequence
  Synthetic oligonucleotide
gggatgtgaacccaataaaattgtctcggt

SEQ ID NO: 168233 - DNA, 30 bp, Artificial Sequence
  Synthetic oligonucleotide
tgattgacacatgtccttaatgcagtcggt

SEQ ID NO: 168234 - DNA, 30 bp, Artificial Sequence
  Synthetic oligonucleotide
gcttaatcaagacagtgctgtgcggtcggt

SEQ ID NO: 168235 - DNA, 30 bp, Artificial Sequence
  Synthetic oligonucleotide
gtgccctctaggggggctagatcggtcggt

SEQ ID NO: 168236 - DNA, 30 bp, Artificial Sequence
  Synthetic oligonucleotide
tgaaaatccatcgaacgggggagggtcggt

SEQ ID NO: 168237 - DNA, 30 bp, Artificial Sequence
  Synthetic oligonucleotide
taaattcgccgaattatggtgatggtcggt

SEQ ID NO: 168238 - DNA, 30 bp, Artificial Sequence
  Synthetic oligonucleotide
tcgtaataatgaccccagtcactggtcggt

SEQ ID NO: 168239 - DNA, 30 bp, Artificial Sequence
  Synthetic oligonucleotide
gatgtatcgaacccaggttagcgtgtcggt

SEQ ID NO: 168240 - DNA, 30 bp, Artificial Sequence
  Synthetic oligonucleotide
taccgctggctaaaggatgtgtcattcggt

SEQ ID NO: 168241 - DNA, 30 bp, Artificial Sequence
  Synthetic oligonucleotide
aagctcgggcggtcgtgttgtgagttcggt

SEQ ID NO: 168242 - DNA, 30 bp, Artificial Sequence
  Synthetic oligonucleotide
gttgtgcggcactaaggtcgagcaaagggt

SEQ ID NO: 168243 - DNA, 30 bp, Artificial Sequence
  Synthetic oligonucleotide
agtgacgaaaagaacgttagcggaaagggt

SEQ ID NO: 168244 - DNA, 30 bp, Artificial Sequence
  Synthetic oligonucleotide
ttgaggttagggaggggatatggtaagggt

SEQ ID NO: 168245 - DNA, 30 bp, Artificial Sequence
  Synthetic oligonucleotide
aatagaaggtgcgtaagtgcgattaagggt

SEQ ID NO: 168246 - DNA, 30 bp, Artificial Sequence
  Synthetic oligonucleotide
gacgaattcgtctcgaggtctaggcagggt

SEQ ID NO: 168247 - DNA, 30 bp, Artificial Sequence
  Synthetic oligonucleotide
acgcactggaatttccaagtgatagagggt

SEQ ID NO: 168248 - DNA, 30 bp, Artificial Sequence
  Synthetic oligonucleotide
cccaaaactatgcatcaagaggatgagggt

SEQ ID NO: 168249 - DNA, 30 bp, Artificial Sequence
  Synthetic oligonucleotide
aacagggtaggatctgggcactgtgagggt

SEQ ID NO: 168250 - DNA, 30 bp, Artificial Sequence
  Synthetic oligonucleotide
cagcgaagcagcttagcacccaactagggt

SEQ ID NO: 168251 - DNA, 30 bp, Artificial Sequence
  Synthetic oligonucleotide
tggaaggtctgtgcagcttgagtctagggt

SEQ ID NO: 168252 - DNA, 30 bp, Artificial Sequence
  Synthetic oligonucleotide
ctaaacaattcgagtgcaaatccttagggt

SEQ ID NO: 168253 - DNA, 30 bp, Artificial Sequence
  Synthetic oligonucleotide
tgtgctaaaagaacatctagtacaacgggt

SEQ ID NO: 168254 - DNA, 30 bp, Artificial Sequence
  Synthetic oligonucleotide
atcgggagttgcaccgtgtcaccaacgggt

SEQ ID NO: 168255 - DNA, 30 bp, Artificial Sequence
  Synthetic oligonucleotide
acaacgtacgtgagcatcgtcgtcacgggt

SEQ ID NO: 168256 - DNA, 30 bp, Artificial Sequence
  Synthetic oligonucleotide
ggaggatattagggagacatcgagacgggt

SEQ ID NO: 168257 - DNA, 30 bp, Artificial Sequence
  Synthetic oligonucleotide
ggcagaaagcggatgatcagcaatacgggt

SEQ ID NO: 168258 - DNA, 30 bp, Artificial Sequence
  Synthetic oligonucleotide
gtaacgtcaaatacggtcaagtgaccgggt

SEQ ID NO: 168259 - DNA, 30 bp, Artificial Sequence
  Synthetic oligonucleotide
agacaaaactgatcataaaaaacgccgggt

SEQ ID NO: 168260 - DNA, 30 bp, Artificial Sequence
  Synthetic oligonucleotide
gagagatttgtatgccgagctgtggcgggt

SEQ ID NO: 168261 - DNA, 30 bp, Artificial Sequence
  Synthetic oligonucleotide
aggctaattggttctggttctccctcgggt

SEQ ID NO: 168262 - DNA, 30 bp, Artificial Sequence
  Synthetic oligonucleotide
gcgggtcgatgggttcgctaagtctcgggt

SEQ ID NO: 168263 - DNA, 30 bp, Artificial Sequence
  Synthetic oligonucleotide
gacggtgctaccggagaaatgccgtcgggt

SEQ ID NO: 168264 - DNA, 30 bp, Artificial Sequence
  Synthetic oligonucleotide
acacgtccaaacaggtaagcgcggtcgggt

SEQ ID NO: 168265 - DNA, 30 bp, Artificial Sequence
  Synthetic oligonucleotide
cacacgaaagcgacctatagagattcgggt

SEQ ID NO: 168266 - DNA, 30 bp, Artificial Sequence
  Synthetic oligonucleotide
gcaaggactgatctattcgaggtttcgggt

SEQ ID NO: 168267 - DNA, 30 bp, Artificial Sequence
  Synthetic oligonucleotide
gaagcacgcgtagcagctgaatgaaggggt

SEQ ID NO: 168268 - DNA, 30 bp, Artificial Sequence
  Synthetic oligonucleotide
tggtgcccgcgagttttcaggatgaggggt

SEQ ID NO: 168269 - DNA, 30 bp, Artificial Sequence
  Synthetic oligonucleotide
gacgtgtgttgctcagctttgggacggggt

SEQ ID NO: 168270 - DNA, 30 bp, Artificial Sequence
  Synthetic oligonucleotide
tgctaaagatcgattatagatcgccggggt

SEQ ID NO: 168271 - DNA, 30 bp, Artificial Sequence
  Synthetic oligonucleotide
gtgtccgtaaggtcggaccatttagggggt

SEQ ID NO: 168272 - DNA, 30 bp, Artificial Sequence
  Synthetic oligonucleotide
acggaggcgtgcagtaggtccggcgggggt

SEQ ID NO: 168273 - DNA, 30 bp, Artificial Sequence
  Synthetic oligonucleotide
agtccggatggctcacacaatgttgggggt

SEQ ID NO: 168274 - DNA, 30 bp, Artificial Sequence
  Synthetic oligonucleotide
caatcaggtaatcgctgtattgaatggggt

SEQ ID NO: 168275 - DNA, 30 bp, Artificial Sequence
  Synthetic oligonucleotide
caccatacaggtataacgaaggtctggggt

SEQ ID NO: 168276 - DNA, 30 bp, Artificial Sequence
  Synthetic oligonucleotide
gctcaaagatactgctcggtcgtgtggggt

SEQ ID NO: 168277 - DNA, 30 bp, Artificial Sequence
  Synthetic oligonucleotide
gaccaacggaaataggcccggagaatgggt

SEQ ID NO: 168278 - DNA, 30 bp, Artificial Sequence
  Synthetic oligonucleotide
aggccatgttactagacttggatcatgggt

SEQ ID NO: 168279 - DNA, 30 bp, Artificial Sequence
  Synthetic oligonucleotide
gcgacattctattcgatcgttaagatgggt

SEQ ID NO: 168280 - DNA, 30 bp, Artificial Sequence
  Synthetic oligonucleotide
tggcacaccggcgtgactgtagttatgggt

SEQ ID NO: 168281 - DNA, 30 bp, Artificial Sequence
  Synthetic oligonucleotide
acaataatgttgcatcaatctacagtgggt

SEQ ID NO: 168282 - DNA, 30 bp, Artificial Sequence
  Synthetic oligonucleotide
agtctggtaatataggtcagtcacgtgggt

SEQ ID NO: 168283 - DNA, 30 bp, Artificial Sequence
  Synthetic oligonucleotide
acgataagtcgggttgatagcagcgtgggt

SEQ ID NO: 168284 - DNA, 30 bp, Artificial Sequence
  Synthetic oligonucleotide
atgccatctactcacactagccaattgggt

SEQ ID NO: 168285 - DNA, 30 bp, Artificial Sequence
  Synthetic oligonucleotide
gggacgttcgggaacagggtgtgcttgggt

SEQ ID NO: 168286 - DNA, 30 bp, Artificial Sequence
  Synthetic oligonucleotide
gtctgccgctcctattgagtggcgttgggt

SEQ ID NO: 168287 - DNA, 30 bp, Artificial Sequence
  Synthetic oligonucleotide
gttagcgtggaggaactgtcagatttgggt

SEQ ID NO: 168288 - DNA, 30 bp, Artificial Sequence
  Synthetic oligonucleotide
ggtaaaatggagttggaaggtactttgggt

SEQ ID NO: 168289 - DNA, 30 bp, Artificial Sequence
  Synthetic oligonucleotide
tctgaaacaagcgagacatttggtttgggt

SEQ ID NO: 168290 - DNA, 30 bp, Artificial Sequence
  Synthetic oligonucleotide
cgatggcggcataacatgttggccaatggt

SEQ ID NO: 168291 - DNA, 30 bp, Artificial Sequence
  Synthetic oligonucleotide
cacctagagaacagttcgctcttcaatggt

SEQ ID NO: 168292 - DNA, 30 bp, Artificial Sequence
  Synthetic oligonucleotide
atactaaaaagaacgtcgcggcagaatggt

SEQ ID NO: 168293 - DNA, 30 bp, Artificial Sequence
  Synthetic oligonucleotide
cgggacaaaaggtgtagcgcctggaatggt

SEQ ID NO: 168294 - DNA, 30 bp, Artificial Sequence
  Synthetic oligonucleotide
tcgatccatttttgagggtacgtgaatggt

SEQ ID NO: 168295 - DNA, 30 bp, Artificial Sequence
  Synthetic oligonucleotide
tcgtaggggatcggcaaaggggttaatggt

SEQ ID NO: 168296 - DNA, 30 bp, Artificial Sequence
  Synthetic oligonucleotide
gggtcggcgaacgggcttagccaccatggt

SEQ ID NO: 168297 - DNA, 30 bp, Artificial Sequence
  Synthetic oligonucleotide
ttgagaacggggcgcgagtgagcccatggt

SEQ ID NO: 168298 - DNA, 30 bp, Artificial Sequence
  Synthetic oligonucleotide
tccacgccctatggttttggtaaagatggt

SEQ ID NO: 168299 - DNA, 30 bp, Artificial Sequence
  Synthetic oligonucleotide
gggcgacgacgtaagattcatttagatggt

SEQ ID NO: 168300 - DNA, 30 bp, Artificial Sequence
  Synthetic oligonucleotide
tgtgctgttttgaggggacgggcggatggt

SEQ ID NO: 168301 - DNA, 30 bp, Artificial Sequence
  Synthetic oligonucleotide
ctacaaagcggcaggcacgcagatgatggt

SEQ ID NO: 168302 - DNA, 30 bp, Artificial Sequence
  Synthetic oligonucleotide
tgatcttgtacaacagatatagcatatggt

SEQ ID NO: 168303 - DNA, 30 bp, Artificial Sequence
  Synthetic oligonucleotide
gtgaggagatataaatttttaggctatggt

SEQ ID NO: 168304 - DNA, 30 bp, Artificial Sequence
  Synthetic oligonucleotide
tctaccaccctggagatgaccggaactggt

SEQ ID NO: 168305 - DNA, 30 bp, Artificial Sequence
  Synthetic oligonucleotide
ttagcagcctgcaattggcactcgactggt

SEQ ID NO: 168306 - DNA, 30 bp, Artificial Sequence
  Synthetic oligonucleotide
attacgggcctggcttactacgttactggt

SEQ ID NO: 168307 - DNA, 30 bp, Artificial Sequence
  Synthetic oligonucleotide
aacgaacgtacgggtagactttgacctggt

SEQ ID NO: 168308 - DNA, 30 bp, Artificial Sequence
  Synthetic oligonucleotide
agtcgtcgggcatcggcttcagcatctggt

SEQ ID NO: 168309 - DNA, 30 bp, Artificial Sequence
  Synthetic oligonucleotide
ccatttcgaaaagactatagttgctctggt

SEQ ID NO: 168310 - DNA, 30 bp, Artificial Sequence
  Synthetic oligonucleotide
attcacaggcagtcttgtccgacttctggt

SEQ ID NO: 168311 - DNA, 30 bp, Artificial Sequence
  Synthetic oligonucleotide
cgcaaagcgcccgaagggcccgaaagtggt

SEQ ID NO: 168312 - DNA, 30 bp, Artificial Sequence
  Synthetic oligonucleotide
atcatgggagatcctccgtggggcagtggt

SEQ ID NO: 168313 - DNA, 30 bp, Artificial Sequence
  Synthetic oligonucleotide
ttgagtatagtctggcggatatagagtggt

SEQ ID NO: 168314 - DNA, 30 bp, Artificial Sequence
  Synthetic oligonucleotide
gtactgggtatgttcccacaattgagtggt

SEQ ID NO: 168315 - DNA, 30 bp, Artificial Sequence
  Synthetic oligonucleotide
tgaatacttctttgcacgatatgtagtggt

SEQ ID NO: 168316 - DNA, 30 bp, Artificial Sequence
  Synthetic oligonucleotide
gaagatagactggggaactgtcttagtggt

SEQ ID NO: 168317 - DNA, 30 bp, Artificial Sequence
  Synthetic oligonucleotide
ctaggacaagtgaccactcaagtccgtggt

SEQ ID NO: 168318 - DNA, 30 bp, Artificial Sequence
  Synthetic oligonucleotide
cggtaaattctcctgtatattactcgtggt

SEQ ID NO: 168319 - DNA, 30 bp, Artificial Sequence
  Synthetic oligonucleotide
agagcgcagagggcctttcttactcgtggt

SEQ ID NO: 168320 - DNA, 30 bp, Artificial Sequence
  Synthetic oligonucleotide
gctggggcggcgaagaaggtggaaggtggt

SEQ ID NO: 168321 - DNA, 30 bp, Artificial Sequence
  Synthetic oligonucleotide
aaccataggactactaatggaacaggtggt

SEQ ID NO: 168322 - DNA, 30 bp, Artificial Sequence
  Synthetic oligonucleotide
gcgaagagaaggttctccccactaggtggt

SEQ ID NO: 168323 - DNA, 30 bp, Artificial Sequence
  Synthetic oligonucleotide
ggcgaccagtacatcacgggctggggtggt

SEQ ID NO: 168324 - DNA, 30 bp, Artificial Sequence
  Synthetic oligonucleotide
agatcgttggcccactgttaacaatgtggt

SEQ ID NO: 168325 - DNA, 30 bp, Artificial Sequence
  Synthetic oligonucleotide
gtgactagcgctgaagtgcgtaggtgtggt

SEQ ID NO: 168326 - DNA, 30 bp, Artificial Sequence
  Synthetic oligonucleotide
aaatgactcgatacgtatgcgtattgtggt

SEQ ID NO: 168327 - DNA, 30 bp, Artificial Sequence
  Synthetic oligonucleotide
aggttcgttatcggaaagggcaaaattggt

SEQ ID NO: 168328 - DNA, 30 bp, Artificial Sequence
  Synthetic oligonucleotide
cgctagacgaacgttcaaaatggaattggt

SEQ ID NO: 168329 - DNA, 30 bp, Artificial Sequence
  Synthetic oligonucleotide
ggacaagctatggtcggaaaatatattggt

SEQ ID NO: 168330 - DNA, 30 bp, Artificial Sequence
  Synthetic oligonucleotide
acgttcggattgctaatgatgggacttggt

SEQ ID NO: 168331 - DNA, 30 bp, Artificial Sequence
  Synthetic oligonucleotide
cgtaaaaaggtaatttcgagcgaccttggt

SEQ ID NO: 168332 - DNA, 30 bp, Artificial Sequence
  Synthetic oligonucleotide
cttatagtaaagagtccggcgcgccttggt

SEQ ID NO: 168333 - DNA, 30 bp, Artificial Sequence
  Synthetic oligonucleotide
ccgggtcgcaaacggcgatagcggcttggt

SEQ ID NO: 168334 - DNA, 30 bp, Artificial Sequence
  Synthetic oligonucleotide
tatttcggccgtaaatagagttctcttggt

SEQ ID NO: 168335 - DNA, 30 bp, Artificial Sequence
  Synthetic oligonucleotide
gtgtaaggctacgtgtccggataagttggt

SEQ ID NO: 168336 - DNA, 30 bp, Artificial Sequence
  Synthetic oligonucleotide
tggaatgcaaagcagaccgatgacgttggt

SEQ ID NO: 168337 - DNA, 30 bp, Artificial Sequence
  Synthetic oligonucleotide
tcggttgttcataagcgagtgccggttggt

SEQ ID NO: 168338 - DNA, 30 bp, Artificial Sequence
  Synthetic oligonucleotide
gacaatggtgacatcttcagctcggttggt

SEQ ID NO: 168339 - DNA, 30 bp, Artificial Sequence
  Synthetic oligonucleotide
catcgccggtaattaccagaacactttggt

SEQ ID NO: 168340 - DNA, 30 bp, Artificial Sequence
  Synthetic oligonucleotide
aagcgcgactacttgtcttgtagctttggt

SEQ ID NO: 168341 - DNA, 30 bp, Artificial Sequence
  Synthetic oligonucleotide
caagtgtgggactgcgtgtgagtaaaatgt

SEQ ID NO: 168342 - DNA, 30 bp, Artificial Sequence
  Synthetic oligonucleotide
cgtcctgaaacaaaggcctaattaaaatgt

SEQ ID NO: 168343 - DNA, 30 bp, Artificial Sequence
  Synthetic oligonucleotide
gtcgacaaaactgcgtctcggtcgaaatgt

SEQ ID NO: 168344 - DNA, 30 bp, Artificial Sequence
  Synthetic oligonucleotide
aggaaattctcgggggctgagagacaatgt

SEQ ID NO: 168345 - DNA, 30 bp, Artificial Sequence
  Synthetic oligonucleotide
tgaatgcctgaggggacgtgctgacaatgt

SEQ ID NO: 168346 - DNA, 30 bp, Artificial Sequence
  Synthetic oligonucleotide
tgccaaaacgccgaagaacggaatcaatgt

SEQ ID NO: 168347 - DNA, 30 bp, Artificial Sequence
  Synthetic oligonucleotide
ggcgttgaagcaactttagatatagaatgt

SEQ ID NO: 168348 - DNA, 30 bp, Artificial Sequence
  Synthetic oligonucleotide
tgaaaatagtcggaagatagacctgaatgt

SEQ ID NO: 168349 - DNA, 30 bp, Artificial Sequence
  Synthetic oligonucleotide
cgtatatgatagtcaaccaaaagtgaatgt

SEQ ID NO: 168350 - DNA, 30 bp, Artificial Sequence
  Synthetic oligonucleotide
cgctctctcgcgcgggctcgtgtataatgt

SEQ ID NO: 168351 - DNA, 30 bp, Artificial Sequence
  Synthetic oligonucleotide
ccatgcggagctagagatgtataaacatgt

SEQ ID NO: 168352 - DNA, 30 bp, Artificial Sequence
  Synthetic oligonucleotide
ttcgcccggcaggtattgagcgtaacatgt

SEQ ID NO: 168353 - DNA, 30 bp, Artificial Sequence
  Synthetic oligonucleotide
agggtgaaacccattgggaacagcccatgt

SEQ ID NO: 168354 - DNA, 30 bp, Artificial Sequence
  Synthetic oligonucleotide
gagaactagttacatctcgtacgcccatgt

SEQ ID NO: 168355 - DNA, 30 bp, Artificial Sequence
  Synthetic oligonucleotide
tgaaacaacggagacgttggcgctccatgt

SEQ ID NO: 168356 - DNA, 30 bp, Artificial Sequence
  Synthetic oligonucleotide
ggtgtagcattgcccaaggatcgctcatgt

SEQ ID NO: 168357 - DNA, 30 bp, Artificial Sequence
  Synthetic oligonucleotide
gcgtataggacccaaaagttgcggtcatgt

SEQ ID NO: 168358 - DNA, 30 bp, Artificial Sequence
  Synthetic oligonucleotide
agaatgctgcaaagcaaccaactttcatgt

SEQ ID NO: 168359 - DNA, 30 bp, Artificial Sequence
  Synthetic oligonucleotide
agatccaatttgcagtgcaggtcaagatgt

SEQ ID NO: 168360 - DNA, 30 bp, Artificial Sequence
  Synthetic oligonucleotide
tgggtggtaaagcaggatccgtacagatgt

SEQ ID NO: 168361 - DNA, 30 bp, Artificial Sequence
  Synthetic oligonucleotide
tatcgaggcgggctcggaggggtcagatgt

SEQ ID NO: 168362 - DNA, 30 bp, Artificial Sequence
  Synthetic oligonucleotide
tgacactttcaattctacgagtatcgatgt

SEQ ID NO: 168363 - DNA, 30 bp, Artificial Sequence
  Synthetic oligonucleotide
cgctaggtactccaaggtggtaaatgatgt

SEQ ID NO: 168364 - DNA, 30 bp, Artificial Sequence
  Synthetic oligonucleotide
agcgaatactgcggggccttccaatgatgt

SEQ ID NO: 168365 - DNA, 30 bp, Artificial Sequence
  Synthetic oligonucleotide
caatcacagcaaggaacagccactatatgt

SEQ ID NO: 168366 - DNA, 30 bp, Artificial Sequence
  Synthetic oligonucleotide
gcaaggcacaggtattgttatagtatatgt

SEQ ID NO: 168367 - DNA, 30 bp, Artificial Sequence
  Synthetic oligonucleotide
cggggcgccttgtgcgtacggtttatatgt

SEQ ID NO: 168368 - DNA, 30 bp, Artificial Sequence
  Synthetic oligonucleotide
ctgccatactacactcaaaagagcctatgt

SEQ ID NO: 168369 - DNA, 30 bp, Artificial Sequence
  Synthetic oligonucleotide
ccagagtggttgtcaattttcagagtatgt

SEQ ID NO: 168370 - DNA, 30 bp, Artificial Sequence
  Synthetic oligonucleotide
aagtattaagacactccgtgccgagtatgt

SEQ ID NO: 168371 - DNA, 30 bp, Artificial Sequence
  Synthetic oligonucleotide
gctagctccgaccatggaacgtgggtatgt

SEQ ID NO: 168372 - DNA, 30 bp, Artificial Sequence
  Synthetic oligonucleotide
acagactttacccacgagaataatgtatgt

SEQ ID NO: 168373 - DNA, 30 bp, Artificial Sequence
  Synthetic oligonucleotide
cggcgcgtggttcttgatgacagtgtatgt

SEQ ID NO: 168374 - DNA, 30 bp, Artificial Sequence
  Synthetic oligonucleotide
taagcataaagccacatgaaacaattatgt

SEQ ID NO: 168375 - DNA, 30 bp, Artificial Sequence
  Synthetic oligonucleotide
ccagcctacggcagtgatatcttgttatgt

SEQ ID NO: 168376 - DNA, 30 bp, Artificial Sequence
  Synthetic oligonucleotide
catggtccaaacgtattaacagcaaactgt

SEQ ID NO: 168377 - DNA, 30 bp, Artificial Sequence
  Synthetic oligonucleotide
gctagttactctaatcaaagggtcaactgt

SEQ ID NO: 168378 - DNA, 30 bp, Artificial Sequence
  Synthetic oligonucleotide
cacagttgctcggcgtatggcctgaactgt

SEQ ID NO: 168379 - DNA, 30 bp, Artificial Sequence
  Synthetic oligonucleotide
gcgatgtgatacatagagcaaaatcactgt

SEQ ID NO: 168380 - DNA, 30 bp, Artificial Sequence
  Synthetic oligonucleotide
ttagatatgtcggcgggctaggctcactgt

SEQ ID NO: 168381 - DNA, 30 bp, Artificial Sequence
  Synthetic oligonucleotide
cacggagcagctgctctgataattcactgt

SEQ ID NO: 168382 - DNA, 30 bp, Artificial Sequence
  Synthetic oligonucleotide
cggtattcggcccagtgtagtggagactgt

SEQ ID NO: 168383 - DNA, 30 bp, Artificial Sequence
  Synthetic oligonucleotide
ggtcacaaaacagtcataacacccgactgt

SEQ ID NO: 168384 - DNA, 30 bp, Artificial Sequence
  Synthetic oligonucleotide
gagtcgagtgtatgtaatgccaaggactgt

SEQ ID NO: 168385 - DNA, 30 bp, Artificial Sequence
  Synthetic oligonucleotide
gtggttcaaagtcgagttaggcgggactgt

SEQ ID NO: 168386 - DNA, 30 bp, Artificial Sequence
  Synthetic oligonucleotide
atcgtacatcgtcgcccttttggttactgt

SEQ ID NO: 168387 - DNA, 31 bp, Artificial Sequence
  Synthetic oligonucleotide
caattacggatgggtactaagaatttactgt

SEQ ID NO: 168388 - DNA, 30 bp, Artificial Sequence
  Synthetic oligonucleotide
caacgtacttgtctaaggatcatcacctgt

SEQ ID NO: 168389 - DNA, 31 bp, Artificial Sequence
  Synthetic oligonucleotide
catatgcaccccgtacccagaacccccctgt

SEQ ID NO: 168390 - DNA, 30 bp, Artificial Sequence
  Synthetic oligonucleotide
actggtcactttattataagccccccctgt

SEQ ID NO: 168391 - DNA, 30 bp, Artificial Sequence
  Synthetic oligonucleotide
ttgtacgcatggagccatccccacgcctgt

SEQ ID NO: 168392 - DNA, 30 bp, Artificial Sequence
  Synthetic oligonucleotide
ttagaggtttacagaacacaaatctcctgt

SEQ ID NO: 168393 - DNA, 30 bp, Artificial Sequence
  Synthetic oligonucleotide
aaggaaatatgtaagtatgtggattcctgt

SEQ ID NO: 168394 - DNA, 30 bp, Artificial Sequence
  Synthetic oligonucleotide
gaagggttcaatgggcgctatctgagctgt

SEQ ID NO: 168395 - DNA, 30 bp, Artificial Sequence
  Synthetic oligonucleotide
aattctggctgggagtgcgaggatagctgt

SEQ ID NO: 168396 - DNA, 30 bp, Artificial Sequence
  Synthetic oligonucleotide
gatgaaaattcgagcacctaaggtagctgt

SEQ ID NO: 168397 - DNA, 30 bp, Artificial Sequence
  Synthetic oligonucleotide
agttatgcgatcatagcgcaacttagctgt

SEQ ID NO: 168398 - DNA, 30 bp, Artificial Sequence
  Synthetic oligonucleotide
ccacgtaatagtcaccacattgggcgctgt

SEQ ID NO: 168399 - DNA, 30 bp, Artificial Sequence
  Synthetic oligonucleotide
caaggagactgggctaaatggcgtcgctgt

SEQ ID NO: 168400 - DNA, 30 bp, Artificial Sequence
  Synthetic oligonucleotide
ggagatagggccagggctagggcatgctgt

SEQ ID NO: 168401 - DNA, 30 bp, Artificial Sequence
  Synthetic oligonucleotide
ccttcgtaaaagtagtactccagctgctgt

SEQ ID NO: 168402 - DNA, 30 bp, Artificial Sequence
  Synthetic oligonucleotide
gagctatttcaatccctccaagcgtgctgt

SEQ ID NO: 168403 - DNA, 30 bp, Artificial Sequence
  Synthetic oligonucleotide
tgtggtagtttctccagtgtagggtgctgt

SEQ ID NO: 168404 - DNA, 30 bp, Artificial Sequence
  Synthetic oligonucleotide
aactaaactcatagaaactcttcaatctgt

SEQ ID NO: 168405 - DNA, 30 bp, Artificial Sequence
  Synthetic oligonucleotide
tcaaagcccagggcatccgggtacatctgt

SEQ ID NO: 168406 - DNA, 30 bp, Artificial Sequence
  Synthetic oligonucleotide
catacccgcccacacacggggcgcatctgt

SEQ ID NO: 168407 - DNA, 30 bp, Artificial Sequence
  Synthetic oligonucleotide
agttaacagggggatagaccagcgatctgt

SEQ ID NO: 168408 - DNA, 30 bp, Artificial Sequence
  Synthetic oligonucleotide
cctagggccatttcagtgaggatgatctgt

SEQ ID NO: 168409 - DNA, 30 bp, Artificial Sequence
  Synthetic oligonucleotide
gggacacattcgaagcaaataggtatctgt

SEQ ID NO: 168410 - DNA, 30 bp, Artificial Sequence
  Synthetic oligonucleotide
ggggtgttgtttcgagatgttaaactctgt

SEQ ID NO: 168411 - DNA, 30 bp, Artificial Sequence
  Synthetic oligonucleotide
atttggagtggacgaatgttttagctctgt

SEQ ID NO: 168412 - DNA, 30 bp, Artificial Sequence
  Synthetic oligonucleotide
aaggcatggaatggcgcggaaaggctctgt

SEQ ID NO: 168413 - DNA, 30 bp, Artificial Sequence
  Synthetic oligonucleotide
acgtgttcttgtgctagagtcagagtctgt

SEQ ID NO: 168414 - DNA, 30 bp, Artificial Sequence
  Synthetic oligonucleotide
cggggtcttagcagtgatcgctgagtctgt

SEQ ID NO: 168415 - DNA, 30 bp, Artificial Sequence
  Synthetic oligonucleotide
gtcaaaaagcgtacacagaacatagtctgt

SEQ ID NO: 168416 - DNA, 30 bp, Artificial Sequence
  Synthetic oligonucleotide
ggggggactaaaaggatactgggggtctgt

SEQ ID NO: 168417 - DNA, 30 bp, Artificial Sequence
  Synthetic oligonucleotide
agtagatcggattttttcttaagcttctgt

SEQ ID NO: 168418 - DNA, 30 bp, Artificial Sequence
  Synthetic oligonucleotide
caaggagagcaattgccgagagccaagtgt

SEQ ID NO: 168419 - DNA, 30 bp, Artificial Sequence
  Synthetic oligonucleotide
aaagaccaccaccggaacccctctaagtgt

SEQ ID NO: 168420 - DNA, 30 bp, Artificial Sequence
  Synthetic oligonucleotide
atagctcactcaaagtaaatcagtaagtgt

SEQ ID NO: 168421 - DNA, 30 bp, Artificial Sequence
  Synthetic oligonucleotide
tcggtcgaaggaagatattcgacacagtgt

SEQ ID NO: 168422 - DNA, 30 bp, Artificial Sequence
  Synthetic oligonucleotide
caaatgtggtaatcaccaaggcaagagtgt

SEQ ID NO: 168423 - DNA, 30 bp, Artificial Sequence
  Synthetic oligonucleotide
gtgacccatcgacagctctatcccgagtgt

SEQ ID NO: 168424 - DNA, 30 bp, Artificial Sequence
  Synthetic oligonucleotide
actcgcacaaacgatacgcatccggagtgt

SEQ ID NO: 168425 - DNA, 30 bp, Artificial Sequence
  Synthetic oligonucleotide
gttggggcctctatcgtcaaaatggagtgt

SEQ ID NO: 168426 - DNA, 30 bp, Artificial Sequence
  Synthetic oligonucleotide
ttcgggtacgatgtgacgtccttatagtgt

SEQ ID NO: 168427 - DNA, 30 bp, Artificial Sequence
  Synthetic oligonucleotide
tggctactgtccgatggttgtttatagtgt

SEQ ID NO: 168428 - DNA, 30 bp, Artificial Sequence
  Synthetic oligonucleotide
cgcaacgcacaatcaagaagtaactagtgt

SEQ ID NO: 168429 - DNA, 30 bp, Artificial Sequence
  Synthetic oligonucleotide
ggcttctgggaataggagatagtgtagtgt

SEQ ID NO: 168430 - DNA, 30 bp, Artificial Sequence
  Synthetic oligonucleotide
cgcagggagtgacctctcgtgggttagtgt

SEQ ID NO: 168431 - DNA, 30 bp, Artificial Sequence
  Synthetic oligonucleotide
gactgttaatcaacaaagattcaaacgtgt

SEQ ID NO: 168432 - DNA, 30 bp, Artificial Sequence
  Synthetic oligonucleotide
gagacagagggtccacccgcataaacgtgt

SEQ ID NO: 168433 - DNA, 30 bp, Artificial Sequence
  Synthetic oligonucleotide
cgcgtcttaattctccttcagcgaacgtgt

SEQ ID NO: 168434 - DNA, 30 bp, Artificial Sequence
  Synthetic oligonucleotide
tcaacatcttaacaatagtgaactacgtgt

SEQ ID NO: 168435 - DNA, 30 bp, Artificial Sequence
  Synthetic oligonucleotide
ccggtggacactcggaaacacgccccgtgt

SEQ ID NO: 168436 - DNA, 30 bp, Artificial Sequence
  Synthetic oligonucleotide
ggtcgtgtgagtgaagatcaccgcccgtgt

SEQ ID NO: 168437 - DNA, 30 bp, Artificial Sequence
  Synthetic oligonucleotide
ataaggctgttagtgttgatcggcccgtgt

SEQ ID NO: 168438 - DNA, 30 bp, Artificial Sequence
  Synthetic oligonucleotide
gcaagggcatgtagaggcatactcccgtgt

SEQ ID NO: 168439 - DNA, 30 bp, Artificial Sequence
  Synthetic oligonucleotide
cgcaaacatatttcaagcgtgagcgcgtgt

SEQ ID NO: 168440 - DNA, 30 bp, Artificial Sequence
  Synthetic oligonucleotide
ccaaaaacgcagacagtaaggtttgcgtgt

SEQ ID NO: 168441 - DNA, 30 bp, Artificial Sequence
  Synthetic oligonucleotide
tcagtgacttgctcaaattcaggctcgtgt

SEQ ID NO: 168442 - DNA, 30 bp, Artificial Sequence
  Synthetic oligonucleotide
tttgccggccaggttgctccattctcgtgt

SEQ ID NO: 168443 - DNA, 30 bp, Artificial Sequence
  Synthetic oligonucleotide
tgagcactacggcctgtgatctcgtcgtgt

SEQ ID NO: 168444 - DNA, 30 bp, Artificial Sequence
  Synthetic oligonucleotide
acggatgaatttcttggaacgcggtcgtgt

SEQ ID NO: 168445 - DNA, 30 bp, Artificial Sequence
  Synthetic oligonucleotide
gggcggtagacacctaacgtgtattcgtgt

SEQ ID NO: 168446 - DNA, 30 bp, Artificial Sequence
  Synthetic oligonucleotide
tagcctcacgataaacgttgaacttcgtgt

SEQ ID NO: 168447 - DNA, 30 bp, Artificial Sequence
  Synthetic oligonucleotide
ggtcgtggatggccaatgagtttttcgtgt

SEQ ID NO: 168448 - DNA, 30 bp, Artificial Sequence
  Synthetic oligonucleotide
gggtttggtcagagaccgatctgaaggtgt

SEQ ID NO: 168449 - DNA, 30 bp, Artificial Sequence
  Synthetic oligonucleotide
gatgtagggcaagtgaggaagcgcaggtgt

SEQ ID NO: 168450 - DNA, 30 bp, Artificial Sequence
  Synthetic oligonucleotide
gtacatgctcacttggggaacatcaggtgt

SEQ ID NO: 168451 - DNA, 30 bp, Artificial Sequence
  Synthetic oligonucleotide
agtgaccctgactaattcgccggacggtgt

SEQ ID NO: 168452 - DNA, 30 bp, Artificial Sequence
  Synthetic oligonucleotide
tgcttgtgtcacgactattaagagcggtgt

SEQ ID NO: 168453 - DNA, 30 bp, Artificial Sequence
  Synthetic oligonucleotide
cgtcacaatcagcaccgtagttcgcggtgt

SEQ ID NO: 168454 - DNA, 30 bp, Artificial Sequence
  Synthetic oligonucleotide
gtccggagaagagcacgtgcacttcggtgt

SEQ ID NO: 168455 - DNA, 30 bp, Artificial Sequence
  Synthetic oligonucleotide
tgccgcgtgcactaagagcgtacagggtgt

SEQ ID NO: 168456 - DNA, 30 bp, Artificial Sequence
  Synthetic oligonucleotide
ggtacaagagatcatatcataaatgggtgt

SEQ ID NO: 168457 - DNA, 30 bp, Artificial Sequence
  Synthetic oligonucleotide
cagtggaaatagcaactcactagttggtgt

SEQ ID NO: 168458 - DNA, 30 bp, Artificial Sequence
  Synthetic oligonucleotide
gctccaaacataattaggctagccatgtgt

SEQ ID NO: 168459 - DNA, 30 bp, Artificial Sequence
  Synthetic oligonucleotide
ggttcgtttgatcaacgttagatcatgtgt

SEQ ID NO: 168460 - DNA, 30 bp, Artificial Sequence
  Synthetic oligonucleotide
cgggagtgtcgagactcacatcagatgtgt

SEQ ID NO: 168461 - DNA, 30 bp, Artificial Sequence
  Synthetic oligonucleotide
tccttaatggagctgtttggtgcgatgtgt

SEQ ID NO: 168462 - DNA, 30 bp, Artificial Sequence
  Synthetic oligonucleotide
tagactgcatacctaggggatacactgtgt

SEQ ID NO: 168463 - DNA, 30 bp, Artificial Sequence
  Synthetic oligonucleotide
acgggtatattgaaatcagataggctgtgt

SEQ ID NO: 168464 - DNA, 30 bp, Artificial Sequence
  Synthetic oligonucleotide
tcagggaaatgccacggtttcaaagtgtgt

SEQ ID NO: 168465 - DNA, 30 bp, Artificial Sequence
  Synthetic oligonucleotide
agtgattgtagaagctgtagaagcgtgtgt

SEQ ID NO: 168466 - DNA, 30 bp, Artificial Sequence
  Synthetic oligonucleotide
accgacagagctttgtggctaagattgtgt

SEQ ID NO: 168467 - DNA, 30 bp, Artificial Sequence
  Synthetic oligonucleotide
ccgaagtcttctcacacaccagcgttgtgt

SEQ ID NO: 168468 - DNA, 30 bp, Artificial Sequence
  Synthetic oligonucleotide
cgagctaaatctgcataaaacgccaattgt

SEQ ID NO: 168469 - DNA, 30 bp, Artificial Sequence
  Synthetic oligonucleotide
ccgggattcccgaacgaccgaaagaattgt

SEQ ID NO: 168470 - DNA, 30 bp, Artificial Sequence
  Synthetic oligonucleotide
tcccgtgccatggagcgtccttaacattgt

SEQ ID NO: 168471 - DNA, 30 bp, Artificial Sequence
  Synthetic oligonucleotide
gctattctgtcagagatggcctaccattgt

SEQ ID NO: 168472 - DNA, 30 bp, Artificial Sequence
  Synthetic oligonucleotide
accgtacgaggaccatgttatctgcattgt

SEQ ID NO: 168473 - DNA, 30 bp, Artificial Sequence
  Synthetic oligonucleotide
gtaacatcgaaacaggattttagtcattgt

SEQ ID NO: 168474 - DNA, 30 bp, Artificial Sequence
  Synthetic oligonucleotide
agctcgccagggagattaaacggtcattgt

SEQ ID NO: 168475 - DNA, 30 bp, Artificial Sequence
  Synthetic oligonucleotide
gaggatcgcaaatgctgcttgagtgattgt

SEQ ID NO: 168476 - DNA, 30 bp, Artificial Sequence
  Synthetic oligonucleotide
ttactgcgcttcgtgttcattgttgattgt

SEQ ID NO: 168477 - DNA, 30 bp, Artificial Sequence
  Synthetic oligonucleotide
caggcgcattcagtcatggcatgatattgt

SEQ ID NO: 168478 - DNA, 30 bp, Artificial Sequence
  Synthetic oligonucleotide
gcatgacgttaccagagttttccgtattgt

SEQ ID NO: 168479 - DNA, 30 bp, Artificial Sequence
  Synthetic oligonucleotide
tgctgtaaggcatgtgtaaggaacacttgt

SEQ ID NO: 168480 - DNA, 30 bp, Artificial Sequence
  Synthetic oligonucleotide
aggggtgattgtgcagttgacggcccttgt

SEQ ID NO: 168481 - DNA, 30 bp, Artificial Sequence
  Synthetic oligonucleotide
tggcacgtaccagccttaatactagcttgt

SEQ ID NO: 168482 - DNA, 30 bp, Artificial Sequence
  Synthetic oligonucleotide
atcgaggcacgctcaagggatgctgcttgt

SEQ ID NO: 168483 - DNA, 30 bp, Artificial Sequence
  Synthetic oligonucleotide
taattacgtaagtggggttgtcaatcttgt

SEQ ID NO: 168484 - DNA, 30 bp, Artificial Sequence
  Synthetic oligonucleotide
gatacaggaggttgtccatcaccttcttgt

SEQ ID NO: 168485 - DNA, 30 bp, Artificial Sequence
  Synthetic oligonucleotide
agcggcttcgcttaagatcagtgtagttgt

SEQ ID NO: 168486 - DNA, 30 bp, Artificial Sequence
  Synthetic oligonucleotide
agcttagtaactaggttattgacccgttgt

SEQ ID NO: 168487 - DNA, 30 bp, Artificial Sequence
  Synthetic oligonucleotide
ataccccgaggacaacaaaaaccgggttgt

SEQ ID NO: 168488 - DNA, 30 bp, Artificial Sequence
  Synthetic oligonucleotide
gcaccagagtgatggaagccgtcgggttgt

SEQ ID NO: 168489 - DNA, 30 bp, Artificial Sequence
  Synthetic oligonucleotide
cgcctttgcttggagccaaaaagtggttgt

SEQ ID NO: 168490 - DNA, 30 bp, Artificial Sequence
  Synthetic oligonucleotide
gttctcgatcctgagtaagtccgctgttgt

SEQ ID NO: 168491 - DNA, 30 bp, Artificial Sequence
  Synthetic oligonucleotide
taggagatgccgacgagaatctggtgttgt

SEQ ID NO: 168492 - DNA, 30 bp, Artificial Sequence
  Synthetic oligonucleotide
agtcttgcaccagagcgcactataatttgt

SEQ ID NO: 168493 - DNA, 30 bp, Artificial Sequence
  Synthetic oligonucleotide
agcgtggcataaaggccgtaacccatttgt

SEQ ID NO: 168494 - DNA, 30 bp, Artificial Sequence
  Synthetic oligonucleotide
gtttggggacatcatcaagtttgcatttgt

SEQ ID NO: 168495 - DNA, 30 bp, Artificial Sequence
  Synthetic oligonucleotide
cacagatctaaactgccacaaactatttgt

SEQ ID NO: 168496 - DNA, 30 bp, Artificial Sequence
  Synthetic oligonucleotide
tcgcaacatcgccccagaggtaggctttgt

SEQ ID NO: 168497 - DNA, 30 bp, Artificial Sequence
  Synthetic oligonucleotide
ggattcaagctaaatggatcccgtgtttgt

SEQ ID NO: 168498 - DNA, 30 bp, Artificial Sequence
  Synthetic oligonucleotide
agttcgttgagagcgtaattttgattttgt

SEQ ID NO: 168499 - DNA, 30 bp, Artificial Sequence
  Synthetic oligonucleotide
aaaagcaaagttaaacgagcgtacaaaatt

SEQ ID NO: 168500 - DNA, 31 bp, Artificial Sequence
  Synthetic oligonucleotide
agaggctctctgttatggtgaccccaaaatt

SEQ ID NO: 168501 - DNA, 30 bp, Artificial Sequence
  Synthetic oligonucleotide
tgtacatcgggataatacacgcggaaaatt

SEQ ID NO: 168502 - DNA, 30 bp, Artificial Sequence
  Synthetic oligonucleotide
gttgctccacgcccggggtgacgtaaaatt

SEQ ID NO: 168503 - DNA, 30 bp, Artificial Sequence
  Synthetic oligonucleotide
cgggcgtccggaagtcggaggccgcaaatt

SEQ ID NO: 168504 - DNA, 30 bp, Artificial Sequence
  Synthetic oligonucleotide
aggatgcactggcctgcgtaatgagaaatt

SEQ ID NO: 168505 - DNA, 30 bp, Artificial Sequence
  Synthetic oligonucleotide
agccggccgatgaaatgtagacacgaaatt

SEQ ID NO: 168506 - DNA, 30 bp, Artificial Sequence
  Synthetic oligonucleotide
aacagcaggatgtacaatatacccgaaatt

SEQ ID NO: 168507 - DNA, 30 bp, Artificial Sequence
  Synthetic oligonucleotide
catgtgggcagcctggccataccctaaatt

SEQ ID NO: 168508 - DNA, 30 bp, Artificial Sequence
  Synthetic oligonucleotide
gcattcagtagggggaaataatcgtaaatt

SEQ ID NO: 168509 - DNA, 30 bp, Artificial Sequence
  Synthetic oligonucleotide
tgcgagtcattaggggtaagcacttaaatt

SEQ ID NO: 168510 - DNA, 30 bp, Artificial Sequence
  Synthetic oligonucleotide
tatgacgtaaggaaagattttaggacaatt

SEQ ID NO: 168511 - DNA, 30 bp, Artificial Sequence
  Synthetic oligonucleotide
tgtaaaatcctgttcttaataggaccaatt

SEQ ID NO: 168512 - DNA, 30 bp, Artificial Sequence
  Synthetic oligonucleotide
cggaataataatagctctagctgaccaatt

SEQ ID NO: 168513 - DNA, 30 bp, Artificial Sequence
  Synthetic oligonucleotide
ataggtaaaggtcacgaaacgaagccaatt

SEQ ID NO: 168514 - DNA, 30 bp, Artificial Sequence
  Synthetic oligonucleotide
tacctaagatgcgacattgctaagccaatt

SEQ ID NO: 168515 - DNA, 30 bp, Artificial Sequence
  Synthetic oligonucleotide
ataagtggcgagggatgaggctggccaatt

SEQ ID NO: 168516 - DNA, 30 bp, Artificial Sequence
  Synthetic oligonucleotide
gggcattccgagtatcaacttcgagcaatt

SEQ ID NO: 168517 - DNA, 30 bp, Artificial Sequence
  Synthetic oligonucleotide
tgaccggagggctcatagaacgtagcaatt

SEQ ID NO: 168518 - DNA, 30 bp, Artificial Sequence
  Synthetic oligonucleotide
tgcgagcgcctaacggctaagcctgcaatt

SEQ ID NO: 168519 - DNA, 30 bp, Artificial Sequence
  Synthetic oligonucleotide
tctcaatcccaatggcagcgtgaatcaatt

SEQ ID NO: 168520 - DNA, 30 bp, Artificial Sequence
  Synthetic oligonucleotide
gtgtaaaagactatttacaactgttcaatt

SEQ ID NO: 168521 - DNA, 30 bp, Artificial Sequence
  Synthetic oligonucleotide
agtgcgtccgaagttcttatatcaagaatt

SEQ ID NO: 168522 - DNA, 30 bp, Artificial Sequence
  Synthetic oligonucleotide
agcaagaaccggtgtgttcaacgaagaatt

SEQ ID NO: 168523 - DNA, 30 bp, Artificial Sequence
  Synthetic oligonucleotide
ggcagagtcgaaaattgaggtttaagaatt

SEQ ID NO: 168524 - DNA, 30 bp, Artificial Sequence
  Synthetic oligonucleotide
cgagatataaggatcattttatagagaatt

SEQ ID NO: 168525 - DNA, 30 bp, Artificial Sequence
  Synthetic oligonucleotide
ttggagccgccatggatgacactacgaatt

SEQ ID NO: 168526 - DNA, 30 bp, Artificial Sequence
  Synthetic oligonucleotide
gctaggccagcaacttgcatagtccgaatt

SEQ ID NO: 168527 - DNA, 30 bp, Artificial Sequence
  Synthetic oligonucleotide
catggtttcagaagcttcagtgagcgaatt

SEQ ID NO: 168528 - DNA, 30 bp, Artificial Sequence
  Synthetic oligonucleotide
agagtaaggaaggaacgatttcgtcgaatt

SEQ ID NO: 168529 - DNA, 30 bp, Artificial Sequence
  Synthetic oligonucleotide
ttggtaagtatctataggttagttcgaatt

SEQ ID NO: 168530 - DNA, 30 bp, Artificial Sequence
  Synthetic oligonucleotide
aaacacaataatcagagtttgccaggaatt

SEQ ID NO: 168531 - DNA, 30 bp, Artificial Sequence
  Synthetic oligonucleotide
cgggcgtaacatgggtgtaaatgcggaatt

SEQ ID NO: 168532 - DNA, 31 bp, Artificial Sequence
  Synthetic oligonucleotide
accctaagggtggctgatcctagggggaatt

SEQ ID NO: 168533 - DNA, 31 bp, Artificial Sequence
  Synthetic oligonucleotide
cgggagccgagggagggatttgccatgaatt

SEQ ID NO: 168534 - DNA, 30 bp, Artificial Sequence
  Synthetic oligonucleotide
gaactggttgcctaccaaaaggcatgaatt

SEQ ID NO: 168535 - DNA, 30 bp, Artificial Sequence
  Synthetic oligonucleotide
gactacgggttgctagcggggggatgaatt

SEQ ID NO: 168536 - DNA, 30 bp, Artificial Sequence
  Synthetic oligonucleotide
ccgcagggaggcgccggaaaagtatgaatt

SEQ ID NO: 168537 - DNA, 31 bp, Artificial Sequence
  Synthetic oligonucleotide
accttatgagaaaaagcactgccagtgaatt

SEQ ID NO: 168538 - DNA, 30 bp, Artificial Sequence
  Synthetic oligonucleotide
ggccggtcctgtgaagagtatacgtgaatt

SEQ ID NO: 168539 - DNA, 30 bp, Artificial Sequence
  Synthetic oligonucleotide
taatgcgaacttgtatctgggagcctaatt

SEQ ID NO: 168540 - DNA, 30 bp, Artificial Sequence
  Synthetic oligonucleotide
taaccccttacaacctcggtccgcgtaatt

SEQ ID NO: 168541 - DNA, 30 bp, Artificial Sequence
  Synthetic oligonucleotide
agtacaaagattgatagggactgggtaatt

SEQ ID NO: 168542 - DNA, 30 bp, Artificial Sequence
  Synthetic oligonucleotide
cctgccgccacggagcgaaggcgattaatt

SEQ ID NO: 168543 - DNA, 30 bp, Artificial Sequence
  Synthetic oligonucleotide
aggggcgcgcctctcgggcggtagttaatt

SEQ ID NO: 168544 - DNA, 30 bp, Artificial Sequence
  Synthetic oligonucleotide
tgtaggtagcctgtaatcaatgctttaatt

SEQ ID NO: 168545 - DNA, 30 bp, Artificial Sequence
  Synthetic oligonucleotide
ataatcgttgaagtacctagaacaaacatt

SEQ ID NO: 168546 - DNA, 30 bp, Artificial Sequence
  Synthetic oligonucleotide
gagctgtagacgattacagggtggaacatt

SEQ ID NO: 168547 - DNA, 30 bp, Artificial Sequence
  Synthetic oligonucleotide
ggcgttatagttgccgaaatggtgaacatt

SEQ ID NO: 168548 - DNA, 30 bp, Artificial Sequence
  Synthetic oligonucleotide
cgggtgggattatgtttgatgcttaacatt

SEQ ID NO: 168549 - DNA, 30 bp, Artificial Sequence
  Synthetic oligonucleotide
gtagcatgtctacgcggatcgaaacacatt

SEQ ID NO: 168550 - DNA, 30 bp, Artificial Sequence
  Synthetic oligonucleotide
gtgttagtggatccttgcgtgtgccacatt

SEQ ID NO: 168551 - DNA, 30 bp, Artificial Sequence
  Synthetic oligonucleotide
tgcgaagaccgtgagggacgccatcacatt

SEQ ID NO: 168552 - DNA, 30 bp, Artificial Sequence
  Synthetic oligonucleotide
ctgacaaggtcctcatgatgcgtagacatt

SEQ ID NO: 168553 - DNA, 30 bp, Artificial Sequence
  Synthetic oligonucleotide
tcgatgagcacttctggtgcaccggacatt

SEQ ID NO: 168554 - DNA, 30 bp, Artificial Sequence
  Synthetic oligonucleotide
gctgtagaagcaaagttcccttatgacatt

SEQ ID NO: 168555 - DNA, 30 bp, Artificial Sequence
  Synthetic oligonucleotide
agatgaagtgtgttatggctaaagtacatt

SEQ ID NO: 168556 - DNA, 30 bp, Artificial Sequence
  Synthetic oligonucleotide
tccaactcggaagctgcgtcacgaaccatt

SEQ ID NO: 168557 - DNA, 30 bp, Artificial Sequence
  Synthetic oligonucleotide
ttcatgcaacgttatttatgccgaaccatt

SEQ ID NO: 168558 - DNA, 30 bp, Artificial Sequence
  Synthetic oligonucleotide
gggacaacgcatgtgagtgcaataaccatt

SEQ ID NO: 168559 - DNA, 30 bp, Artificial Sequence
  Synthetic oligonucleotide
ttggaacacgcaaacagtgtcgtcaccatt

SEQ ID NO: 168560 - DNA, 30 bp, Artificial Sequence
  Synthetic oligonucleotide
gagaccctgtaacacaagggtaggaccatt

SEQ ID NO: 168561 - DNA, 30 bp, Artificial Sequence
  Synthetic oligonucleotide
cgttctacaacatccttcaccgaccccatt

SEQ ID NO: 168562 - DNA, 30 bp, Artificial Sequence
  Synthetic oligonucleotide
tcggtaattcggaccccctggtacgccatt

SEQ ID NO: 168563 - DNA, 30 bp, Artificial Sequence
  Synthetic oligonucleotide
cctggaaaagatacgccccctcttgccatt

SEQ ID NO: 168564 - DNA, 30 bp, Artificial Sequence
  Synthetic oligonucleotide
aaagcgcgatcattgtacttaacctccatt

SEQ ID NO: 168565 - DNA, 30 bp, Artificial Sequence
  Synthetic oligonucleotide
ggttagtgggaagtaaagtatgtttccatt

SEQ ID NO: 168566 - DNA, 30 bp, Artificial Sequence
  Synthetic oligonucleotide
tacggatagcagtggaaacatgacagcatt

SEQ ID NO: 168567 - DNA, 30 bp, Artificial Sequence
  Synthetic oligonucleotide
ctcctccatagataacgatggaagagcatt

SEQ ID NO: 168568 - DNA, 30 bp, Artificial Sequence
  Synthetic oligonucleotide
gatcgagtgtacatttccaaaaatagcatt

SEQ ID NO: 168569 - DNA, 30 bp, Artificial Sequence
  Synthetic oligonucleotide
aaacgtggagaggtcattgtaacacgcatt

SEQ ID NO: 168570 - DNA, 30 bp, Artificial Sequence
  Synthetic oligonucleotide
ctgcccggtgttatgaatgaggtgggcatt

SEQ ID NO: 168571 - DNA, 30 bp, Artificial Sequence
  Synthetic oligonucleotide
gctaggctacatcggacagtgtatggcatt

SEQ ID NO: 168572 - DNA, 30 bp, Artificial Sequence
  Synthetic oligonucleotide
cggagcagagaaaacgtgcacgcttgcatt

SEQ ID NO: 168573 - DNA, 30 bp, Artificial Sequence
  Synthetic oligonucleotide
cgttacagctcctgcgcatccggttgcatt

SEQ ID NO: 168574 - DNA, 30 bp, Artificial Sequence
  Synthetic oligonucleotide
ggcattcttatcgagcaactaggcatcatt

SEQ ID NO: 168575 - DNA, 30 bp, Artificial Sequence
  Synthetic oligonucleotide
aacgtaccaactggtctgaatacgatcatt

SEQ ID NO: 168576 - DNA, 30 bp, Artificial Sequence
  Synthetic oligonucleotide
agaacacacaacgctgcgggatccctcatt

SEQ ID NO: 168577 - DNA, 30 bp, Artificial Sequence
  Synthetic oligonucleotide
tcatgaaggttgaggaagaggtatctcatt

SEQ ID NO: 168578 - DNA, 31 bp, Artificial Sequence
  Synthetic oligonucleotide
catgataagggacaccgacctcgaagtcatt

SEQ ID NO: 168579 - DNA, 30 bp, Artificial Sequence
  Synthetic oligonucleotide
atacgtcgcagtaagggagaaacagtcatt

SEQ ID NO: 168580 - DNA, 30 bp, Artificial Sequence
  Synthetic oligonucleotide
gaggaggcgtaacctgtgaattgggtcatt

SEQ ID NO: 168581 - DNA, 30 bp, Artificial Sequence
  Synthetic oligonucleotide
cgaatgatcatatacgaagtatgattcatt

SEQ ID NO: 168582 - DNA, 30 bp, Artificial Sequence
  Synthetic oligonucleotide
tacaacgaaggtgaacttaggatattcatt

SEQ ID NO: 168583 - DNA, 30 bp, Artificial Sequence
  Synthetic oligonucleotide
ctgtaacggcactctgtaaatgaaaagatt

SEQ ID NO: 168584 - DNA, 30 bp, Artificial Sequence
  Synthetic oligonucleotide
cacccggagcttaggctagtgaaacagatt

SEQ ID NO: 168585 - DNA, 30 bp, Artificial Sequence
  Synthetic oligonucleotide
agatgcacgggtgctgagaggctccagatt

SEQ ID NO: 168586 - DNA, 30 bp, Artificial Sequence
  Synthetic oligonucleotide
tcctgtttccagaggaatcgtcaagagatt

SEQ ID NO: 168587 - DNA, 30 bp, Artificial Sequence
  Synthetic oligonucleotide
ccttaatcgcaatgaaagaccatggagatt

SEQ ID NO: 168588 - DNA, 30 bp, Artificial Sequence
  Synthetic oligonucleotide
ctggtcacggaaactcagcccgatgagatt

SEQ ID NO: 168589 - DNA, 30 bp, Artificial Sequence
  Synthetic oligonucleotide
tggttggtcagtcacgggcgatagtagatt

SEQ ID NO: 168590 - DNA, 30 bp, Artificial Sequence
  Synthetic oligonucleotide
gcgtggtcaataccggcaatgagttagatt

SEQ ID NO: 168591 - DNA, 30 bp, Artificial Sequence
  Synthetic oligonucleotide
gacggcgaattcttgcagcgcggaacgatt

SEQ ID NO: 168592 - DNA, 30 bp, Artificial Sequence
  Synthetic oligonucleotide
taagacaagttcaaaagggaaggaccgatt

SEQ ID NO: 168593 - DNA, 30 bp, Artificial Sequence
  Synthetic oligonucleotide
aggggctgtttcgaataaaccaagccgatt

SEQ ID NO: 168594 - DNA, 30 bp, Artificial Sequence
  Synthetic oligonucleotide
gttgagcagtggaagggccgcactccgatt

SEQ ID NO: 168595 - DNA, 30 bp, Artificial Sequence
  Synthetic oligonucleotide
aatggcgccgaatggggagactcctcgatt

SEQ ID NO: 168596 - DNA, 30 bp, Artificial Sequence
  Synthetic oligonucleotide
gcagcagcacaagaaggtgcagtctcgatt

SEQ ID NO: 168597 - DNA, 30 bp, Artificial Sequence
  Synthetic oligonucleotide
acagactaataggaagcgggctgttcgatt

SEQ ID NO: 168598 - DNA, 30 bp, Artificial Sequence
  Synthetic oligonucleotide
aaaacgtactaatcatggtaaaagaggatt

SEQ ID NO: 168599 - DNA, 30 bp, Artificial Sequence
  Synthetic oligonucleotide
gaatgcacaggacaccaccgctggaggatt

SEQ ID NO: 168600 - DNA, 30 bp, Artificial Sequence
  Synthetic oligonucleotide
ccggatgaactatctcttaagatgaggatt

SEQ ID NO: 168601 - DNA, 30 bp, Artificial Sequence
  Synthetic oligonucleotide
gtcaaggacgccgggttagaatgtaggatt

SEQ ID NO: 168602 - DNA, 30 bp, Artificial Sequence
  Synthetic oligonucleotide
cggtcagagcacgtgaaacgagcacggatt

SEQ ID NO: 168603 - DNA, 30 bp, Artificial Sequence
  Synthetic oligonucleotide
cctaaggtagagccataagccgcccggatt

SEQ ID NO: 168604 - DNA, 30 bp, Artificial Sequence
  Synthetic oligonucleotide
caagagatatgggagtaattcggtcggatt

SEQ ID NO: 168605 - DNA, 30 bp, Artificial Sequence
  Synthetic oligonucleotide
cagggcatgaagaggtgtagtatagggatt

SEQ ID NO: 168606 - DNA, 30 bp, Artificial Sequence
  Synthetic oligonucleotide
atggtcaactgttataccttggacgggatt

SEQ ID NO: 168607 - DNA, 30 bp, Artificial Sequence
  Synthetic oligonucleotide
attatgcacgtctggagagtaaaggggatt

SEQ ID NO: 168608 - DNA, 30 bp, Artificial Sequence
  Synthetic oligonucleotide
atcgtataagtctattacagtactgggatt

SEQ ID NO: 168609 - DNA, 30 bp, Artificial Sequence
  Synthetic oligonucleotide
tggtatggaattccagatcctcaatggatt

SEQ ID NO: 168610 - DNA, 30 bp, Artificial Sequence
  Synthetic oligonucleotide
ttggcagattcggcagacgtcggctggatt

SEQ ID NO: 168611 - DNA, 30 bp, Artificial Sequence
  Synthetic oligonucleotide
gcaacacaaataccgcatacgaagtggatt

SEQ ID NO: 168612 - DNA, 30 bp, Artificial Sequence
  Synthetic oligonucleotide
cgcgggggtatcacggttaggaggtggatt

SEQ ID NO: 168613 - DNA, 30 bp, Artificial Sequence
  Synthetic oligonucleotide
tttggaaggagagcgttagaggaaatgatt

SEQ ID NO: 168614 - DNA, 30 bp, Artificial Sequence
  Synthetic oligonucleotide
ggtatcggtatgaggggttatccaatgatt

SEQ ID NO: 168615 - DNA, 30 bp, Artificial Sequence
  Synthetic oligonucleotide
gatgccaggaacggtaagacttccatgatt

SEQ ID NO: 168616 - DNA, 30 bp, Artificial Sequence
  Synthetic oligonucleotide
ctgggtacaaaaggcctaaacgcactgatt

SEQ ID NO: 168617 - DNA, 30 bp, Artificial Sequence
  Synthetic oligonucleotide
gggtgtcactttagtatctctgtactgatt

SEQ ID NO: 168618 - DNA, 30 bp, Artificial Sequence
  Synthetic oligonucleotide
tgtgccggaggagttggttaatccctgatt

SEQ ID NO: 168619 - DNA, 30 bp, Artificial Sequence
  Synthetic oligonucleotide
tagttactacatcatctcaaaacgctgatt

SEQ ID NO: 168620 - DNA, 30 bp, Artificial Sequence
  Synthetic oligonucleotide
aggaatagcgtatataaagttaatctgatt

SEQ ID NO: 168621 - DNA, 29 bp, Artificial Sequence
  Synthetic oligonucleotide
cgtcgataaagcgtcaatgtctagtgatt

SEQ ID NO: 168622 - DNA, 30 bp, Artificial Sequence
  Synthetic oligonucleotide
taacgttaaattgattaggtcccggtgatt

SEQ ID NO: 168623 - DNA, 30 bp, Artificial Sequence
  Synthetic oligonucleotide
ataagagctacgtggcagagtttgttgatt

SEQ ID NO: 168624 - DNA, 30 bp, Artificial Sequence
  Synthetic oligonucleotide
gacgaaaccgcacggacccttcgcaatatt

SEQ ID NO: 168625 - DNA, 30 bp, Artificial Sequence
  Synthetic oligonucleotide
tctgaggctaaaacacacctattcaatatt

SEQ ID NO: 168626 - DNA, 30 bp, Artificial Sequence
  Synthetic oligonucleotide
tgcacgatcgtcgaccgtttaaagaatatt

SEQ ID NO: 168627 - DNA, 30 bp, Artificial Sequence
  Synthetic oligonucleotide
ccttaagcagtttcgaaggtttcgaatatt

SEQ ID NO: 168628 - DNA, 30 bp, Artificial Sequence
  Synthetic oligonucleotide
cactggccggattgtgctccttagcatatt

SEQ ID NO: 168629 - DNA, 30 bp, Artificial Sequence
  Synthetic oligonucleotide
tacggatgcaattgaaggggcaggcatatt

SEQ ID NO: 168630 - DNA, 30 bp, Artificial Sequence
  Synthetic oligonucleotide
acgtgtaacccataatctaggtatcatatt

SEQ ID NO: 168631 - DNA, 30 bp, Artificial Sequence
  Synthetic oligonucleotide
gagagggtagaggtcatgataactcatatt

SEQ ID NO: 168632 - DNA, 30 bp, Artificial Sequence
  Synthetic oligonucleotide
aaacgaccagagggtttacgccgagatatt

SEQ ID NO: 168633 - DNA, 30 bp, Artificial Sequence
  Synthetic oligonucleotide
ccggttatagtaaggctgtccatagatatt

SEQ ID NO: 168634 - DNA, 30 bp, Artificial Sequence
  Synthetic oligonucleotide
ggatagattgaaataatcttacactatatt

SEQ ID NO: 168635 - DNA, 30 bp, Artificial Sequence
  Synthetic oligonucleotide
agaggattcaattcacgagtctgaactatt

SEQ ID NO: 168636 - DNA, 30 bp, Artificial Sequence
  Synthetic oligonucleotide
aaacttactagagaagcaagtgaggctatt

SEQ ID NO: 168637 - DNA, 30 bp, Artificial Sequence
  Synthetic oligonucleotide
caatatgcgtcccatatttggtatgctatt

SEQ ID NO: 168638 - DNA, 30 bp, Artificial Sequence
  Synthetic oligonucleotide
ctaagctcgtggcaatcaagaactgctatt

SEQ ID NO: 168639 - DNA, 30 bp, Artificial Sequence
  Synthetic oligonucleotide
acgatggcgcacagggatctttcgtctatt

SEQ ID NO: 168640 - DNA, 30 bp, Artificial Sequence
  Synthetic oligonucleotide
gaggtagagtcgtgtcagctaggcagtatt

SEQ ID NO: 168641 - DNA, 30 bp, Artificial Sequence
  Synthetic oligonucleotide
gcagcggtataagacatagagacgagtatt

SEQ ID NO: 168642 - DNA, 30 bp, Artificial Sequence
  Synthetic oligonucleotide
ctgggacggatagacagtaaaaggagtatt

SEQ ID NO: 168643 - DNA, 30 bp, Artificial Sequence
  Synthetic oligonucleotide
tattcaggcgatatctgggatagtagtatt

SEQ ID NO: 168644 - DNA, 30 bp, Artificial Sequence
  Synthetic oligonucleotide
actggaagtgacggaactaaaccacgtatt

SEQ ID NO: 168645 - DNA, 30 bp, Artificial Sequence
  Synthetic oligonucleotide
agtgacggacacctcacttacgccggtatt

SEQ ID NO: 168646 - DNA, 30 bp, Artificial Sequence
  Synthetic oligonucleotide
tgggattagggaactagagacatcggtatt

SEQ ID NO: 168647 - DNA, 30 bp, Artificial Sequence
  Synthetic oligonucleotide
agattggttagtggtagcttccagggtatt

SEQ ID NO: 168648 - DNA, 30 bp, Artificial Sequence
  Synthetic oligonucleotide
aagccatggccaatgtaactccctggtatt

SEQ ID NO: 168649 - DNA, 30 bp, Artificial Sequence
  Synthetic oligonucleotide
cagggggttatcatccagtacatctgtatt

SEQ ID NO: 168650 - DNA, 30 bp, Artificial Sequence
  Synthetic oligonucleotide
gtaagtatatttatggggatcgtgtgtatt

SEQ ID NO: 168651 - DNA, 30 bp, Artificial Sequence
  Synthetic oligonucleotide
aattaaactcgagggtttacggccattatt

SEQ ID NO: 168652 - DNA, 30 bp, Artificial Sequence
  Synthetic oligonucleotide
taaccaccaggaaacctggaaagtattatt

SEQ ID NO: 168653 - DNA, 30 bp, Artificial Sequence
  Synthetic oligonucleotide
tcgtgggcgcgcacgtcttaggcggttatt

SEQ ID NO: 168654 - DNA, 30 bp, Artificial Sequence
  Synthetic oligonucleotide
attactgattcagggaaaacgaactttatt

SEQ ID NO: 168655 - DNA, 30 bp, Artificial Sequence
  Synthetic oligonucleotide
cgttgtcgcgggcccactctatcctttatt

SEQ ID NO: 168656 - DNA, 30 bp, Artificial Sequence
  Synthetic oligonucleotide
accgtcatcgtggcgttgctccagtttatt

SEQ ID NO: 168657 - DNA, 30 bp, Artificial Sequence
  Synthetic oligonucleotide
aaggcaccatcattgcgacgtatgaaactt

SEQ ID NO: 168658 - DNA, 30 bp, Artificial Sequence
  Synthetic oligonucleotide
ccggccgatctgttcgtagaagaacaactt

SEQ ID NO: 168659 - DNA, 30 bp, Artificial Sequence
  Synthetic oligonucleotide
gggaggttagtgagacaacctatgcaactt

SEQ ID NO: 168660 - DNA, 30 bp, Artificial Sequence
  Synthetic oligonucleotide
atatggagagccgagcgaacataagaactt

SEQ ID NO: 168661 - DNA, 30 bp, Artificial Sequence
  Synthetic oligonucleotide
cattggaaaggtactatgcattacgaactt

SEQ ID NO: 168662 - DNA, 30 bp, Artificial Sequence
  Synthetic oligonucleotide
gcgcaagccgtcaaaggctatggtgaactt

SEQ ID NO: 168663 - DNA, 30 bp, Artificial Sequence
  Synthetic oligonucleotide
agcaaggtctcaatcgtagcattctaactt

SEQ ID NO: 168664 - DNA, 30 bp, Artificial Sequence
  Synthetic oligonucleotide
ccctacgaggcgaaaaagtctcaaacactt

SEQ ID NO: 168665 - DNA, 30 bp, Artificial Sequence
  Synthetic oligonucleotide
cgggcaaccacctcgcctctaactacactt

SEQ ID NO: 168666 - DNA, 30 bp, Artificial Sequence
  Synthetic oligonucleotide
gatgttgtcgacggtagtgatcaaccactt

SEQ ID NO: 168667 - DNA, 30 bp, Artificial Sequence
  Synthetic oligonucleotide
gtatgcaactaggaagaaccgcgagcactt

SEQ ID NO: 168668 - DNA, 30 bp, Artificial Sequence
  Synthetic oligonucleotide
tggctggaattccttaggtggcctgcactt

SEQ ID NO: 168669 - DNA, 30 bp, Artificial Sequence
  Synthetic oligonucleotide
gttccagaggacacttgtggaagatcactt

SEQ ID NO: 168670 - DNA, 30 bp, Artificial Sequence
  Synthetic oligonucleotide
tccattgggatacatccaccactaagactt

SEQ ID NO: 168671 - DNA, 30 bp, Artificial Sequence
  Synthetic oligonucleotide
gacggtaggaatatcaaagctctgcgactt

SEQ ID NO: 168672 - DNA, 30 bp, Artificial Sequence
  Synthetic oligonucleotide
accgatctaaaaccttgttctaaaggactt

SEQ ID NO: 168673 - DNA, 30 bp, Artificial Sequence
  Synthetic oligonucleotide
tagacttagtgacggctaacgccaggactt

SEQ ID NO: 168674 - DNA, 30 bp, Artificial Sequence
  Synthetic oligonucleotide
cacaactatcgcctagcgctccagggactt

SEQ ID NO: 168675 - DNA, 30 bp, Artificial Sequence
  Synthetic oligonucleotide
actcaattcgagtggaacagatggggactt

SEQ ID NO: 168676 - DNA, 30 bp, Artificial Sequence
  Synthetic oligonucleotide
ggtagacgtctaggacatccccagtgactt

SEQ ID NO: 168677 - DNA, 30 bp, Artificial Sequence
  Synthetic oligonucleotide
attcattgggaaaggctgaagcgcatactt

SEQ ID NO: 168678 - DNA, 30 bp, Artificial Sequence
  Synthetic oligonucleotide
aatgtcggccagaagcccatggagatactt

SEQ ID NO: 168679 - DNA, 30 bp, Artificial Sequence
  Synthetic oligonucleotide
agaagaagtgagacctacgcccggatactt

SEQ ID NO: 168680 - DNA, 30 bp, Artificial Sequence
  Synthetic oligonucleotide
atctaggttgtcatgataggatctatactt

SEQ ID NO: 168681 - DNA, 30 bp, Artificial Sequence
  Synthetic oligonucleotide
agcagaaacctccctatatgttctatactt

SEQ ID NO: 168682 - DNA, 30 bp, Artificial Sequence
  Synthetic oligonucleotide
cagggcgttctgaaccgcgagagactactt

SEQ ID NO: 168683 - DNA, 30 bp, Artificial Sequence
  Synthetic oligonucleotide
ggcggcagataggagcacggcccgctactt

SEQ ID NO: 168684 - DNA, 30 bp, Artificial Sequence
  Synthetic oligonucleotide
gatcgccgaaggtcacgaaccttgctactt

SEQ ID NO: 168685 - DNA, 30 bp, Artificial Sequence
  Synthetic oligonucleotide
ccgcacacgaacggcgagctgaatctactt

SEQ ID NO: 168686 - DNA, 30 bp, Artificial Sequence
  Synthetic oligonucleotide
gccttgagcataggtacgatttaagtactt

SEQ ID NO: 168687 - DNA, 30 bp, Artificial Sequence
  Synthetic oligonucleotide
gggaggcatagatcagtcaccccagtactt

SEQ ID NO: 168688 - DNA, 30 bp, Artificial Sequence
  Synthetic oligonucleotide
acgtgcggtcttggacggtcatcggtactt

SEQ ID NO: 168689 - DNA, 30 bp, Artificial Sequence
  Synthetic oligonucleotide
acgaggtgtcaatacacacgagatgtactt

SEQ ID NO: 168690 - DNA, 30 bp, Artificial Sequence
  Synthetic oligonucleotide
agcagaataggacaggcccggactgtactt

SEQ ID NO: 168691 - DNA, 30 bp, Artificial Sequence
  Synthetic oligonucleotide
accatatcagggcgttaaccgcttgtactt

SEQ ID NO: 168692 - DNA, 30 bp, Artificial Sequence
  Synthetic oligonucleotide
ccagctcctggtgatgggtcatgattactt

SEQ ID NO: 168693 - DNA, 30 bp, Artificial Sequence
  Synthetic oligonucleotide
ttaggagagagaataacacgacgtttactt

SEQ ID NO: 168694 - DNA, 30 bp, Artificial Sequence
  Synthetic oligonucleotide
ctgactggataaaacccccaggataacctt

SEQ ID NO: 168695 - DNA, 30 bp, Artificial Sequence
  Synthetic oligonucleotide
gccacccataacgggctacctgcccacctt

SEQ ID NO: 168696 - DNA, 30 bp, Artificial Sequence
  Synthetic oligonucleotide
aagcacaaaaggcattcgcgtgttcacctt

SEQ ID NO: 168697 - DNA, 30 bp, Artificial Sequence
  Synthetic oligonucleotide
tcgtaagtgggcaaccgcatcaccgacctt

SEQ ID NO: 168698 - DNA, 30 bp, Artificial Sequence
  Synthetic oligonucleotide
tgtcaagaagcaaaaactatctaggacctt

SEQ ID NO: 168699 - DNA, 30 bp, Artificial Sequence
  Synthetic oligonucleotide
acgagttagttagaacgcgtcccgtacctt

SEQ ID NO: 168700 - DNA, 30 bp, Artificial Sequence
  Synthetic oligonucleotide
actggataggaatcaatgcgcatttacctt

SEQ ID NO: 168701 - DNA, 29 bp, Artificial Sequence
  Synthetic oligonucleotide
agatgcagagggataacgtcgaaaccctt

SEQ ID NO: 168702 - DNA, 30 bp, Artificial Sequence
  Synthetic oligonucleotide
atgtcggcactcggccaagtgcataccctt

SEQ ID NO: 168703 - DNA, 30 bp, Artificial Sequence
  Synthetic oligonucleotide
cgatgttggttggggcgcaattgctccctt

SEQ ID NO: 168704 - DNA, 30 bp, Artificial Sequence
  Synthetic oligonucleotide
aattagaagacacacagagattgaagcctt

SEQ ID NO: 168705 - DNA, 30 bp, Artificial Sequence
  Synthetic oligonucleotide
gataaaggacaaagagaccgaattagcctt

SEQ ID NO: 168706 - DNA, 30 bp, Artificial Sequence
  Synthetic oligonucleotide
gcctcagacctgcatttaaactaacgcctt

SEQ ID NO: 168707 - DNA, 30 bp, Artificial Sequence
  Synthetic oligonucleotide
ccgggggcatacgtatcatttccacgcctt

SEQ ID NO: 168708 - DNA, 30 bp, Artificial Sequence
  Synthetic oligonucleotide
ctttctgagtatagaaaagatctgcgcctt

SEQ ID NO: 168709 - DNA, 30 bp, Artificial Sequence
  Synthetic oligonucleotide
aacaatacggacaggagttgcaggggcctt

SEQ ID NO: 168710 - DNA, 30 bp, Artificial Sequence
  Synthetic oligonucleotide
ttcacaatatgttatagttaaattggcctt

SEQ ID NO: 168711 - DNA, 30 bp, Artificial Sequence
  Synthetic oligonucleotide
aatacgtaaactaaatgcgcgataatcctt

SEQ ID NO: 168712 - DNA, 30 bp, Artificial Sequence
  Synthetic oligonucleotide
tgacgaccgtacctttaagagagcatcctt

SEQ ID NO: 168713 - DNA, 30 bp, Artificial Sequence
  Synthetic oligonucleotide
actcaccgggctccacgctaagatatcctt

SEQ ID NO: 168714 - DNA, 30 bp, Artificial Sequence
  Synthetic oligonucleotide
cagagggcaatcaagcccttaggtatcctt

SEQ ID NO: 168715 - DNA, 30 bp, Artificial Sequence
  Synthetic oligonucleotide
aagtagagcggcaaggatagagcattcctt

SEQ ID NO: 168716 - DNA, 30 bp, Artificial Sequence
  Synthetic oligonucleotide
acgggcatgtcgttgtgccctaggttcctt

SEQ ID NO: 168717 - DNA, 30 bp, Artificial Sequence
  Synthetic oligonucleotide
ttccgagggacttgtgaaatgtggttcctt

SEQ ID NO: 168718 - DNA, 30 bp, Artificial Sequence
  Synthetic oligonucleotide
ttggaggttcagccgggagtcaaaaagctt

SEQ ID NO: 168719 - DNA, 30 bp, Artificial Sequence
  Synthetic oligonucleotide
acattctccacaaacttcattcaacagctt

SEQ ID NO: 168720 - DNA, 30 bp, Artificial Sequence
  Synthetic oligonucleotide
gcagaaataggtgtggtcttgcgtcagctt

SEQ ID NO: 168721 - DNA, 30 bp, Artificial Sequence
  Synthetic oligonucleotide
tggtacgttgggtttttacaatgagagctt

SEQ ID NO: 168722 - DNA, 30 bp, Artificial Sequence
  Synthetic oligonucleotide
ctcatttaccaaagagaatagggcgagctt

SEQ ID NO: 168723 - DNA, 30 bp, Artificial Sequence
  Synthetic oligonucleotide
actcgcgtccataaagagcgacaggagctt

SEQ ID NO: 168724 - DNA, 30 bp, Artificial Sequence
  Synthetic oligonucleotide
cacatgcctataaataaaagtggggagctt

SEQ ID NO: 168725 - DNA, 30 bp, Artificial Sequence
  Synthetic oligonucleotide
tggtggggctccagtgcctcacgttagctt

SEQ ID NO: 168726 - DNA, 30 bp, Artificial Sequence
  Synthetic oligonucleotide
ggacaagaacgcaattagccgtgaacgctt

SEQ ID NO: 168727 - DNA, 30 bp, Artificial Sequence
  Synthetic oligonucleotide
ataccagttatgcgtacgaaaggcgcgctt

SEQ ID NO: 168728 - DNA, 30 bp, Artificial Sequence
  Synthetic oligonucleotide
tacccggcactatgagatgtgttcgcgctt

SEQ ID NO: 168729 - DNA, 30 bp, Artificial Sequence
  Synthetic oligonucleotide
tggggcactggtaaaacccgccttgcgctt

SEQ ID NO: 168730 - DNA, 31 bp, Artificial Sequence
  Synthetic oligonucleotide
gctagcggcggaccacagaaggaaatcgctt

SEQ ID NO: 168731 - DNA, 30 bp, Artificial Sequence
  Synthetic oligonucleotide
atacgccttctacagccagaccactcgctt

SEQ ID NO: 168732 - DNA, 30 bp, Artificial Sequence
  Synthetic oligonucleotide
agaacagaccaggcaccgactgcgtcgctt

SEQ ID NO: 168733 - DNA, 30 bp, Artificial Sequence
  Synthetic oligonucleotide
ataaccatcccggaagaggtcaccaggctt

SEQ ID NO: 168734 - DNA, 30 bp, Artificial Sequence
  Synthetic oligonucleotide
cagggtgcaaaggaacgcgtatccaggctt

SEQ ID NO: 168735 - DNA, 30 bp, Artificial Sequence
  Synthetic oligonucleotide
gggggaggtcaaatttcttactcacggctt

SEQ ID NO: 168736 - DNA, 30 bp, Artificial Sequence
  Synthetic oligonucleotide
accgcagtaagtgacacacactaccggctt

SEQ ID NO: 168737 - DNA, 30 bp, Artificial Sequence
  Synthetic oligonucleotide
ggggaggatccgggatattaggtccggctt

SEQ ID NO: 168738 - DNA, 30 bp, Artificial Sequence
  Synthetic oligonucleotide
taagcgcagtaggttatgtctggtcggctt

SEQ ID NO: 168739 - DNA, 30 bp, Artificial Sequence
  Synthetic oligonucleotide
ccgtccaagtgtgcaaacttctgggggctt

SEQ ID NO: 168740 - DNA, 30 bp, Artificial Sequence
  Synthetic oligonucleotide
caggtagtattagctcataggcgtgggctt

SEQ ID NO: 168741 - DNA, 30 bp, Artificial Sequence
  Synthetic oligonucleotide
ccatatacgtggcgaggcattaactggctt

SEQ ID NO: 168742 - DNA, 30 bp, Artificial Sequence
  Synthetic oligonucleotide
atgaggcacgtttgtacggtattttggctt

SEQ ID NO: 168743 - DNA, 30 bp, Artificial Sequence
  Synthetic oligonucleotide
aggcgtcggggacgggcgtgaagaatgctt

SEQ ID NO: 168744 - DNA, 30 bp, Artificial Sequence
  Synthetic oligonucleotide
aaagagaacgaacctgaggattatatgctt

SEQ ID NO: 168745 - DNA, 30 bp, Artificial Sequence
  Synthetic oligonucleotide
cagtgaaggctgcgtctaagaagcctgctt

SEQ ID NO: 168746 - DNA, 30 bp, Artificial Sequence
  Synthetic oligonucleotide
cagaaagcgtgaaaactcaaaacggtgctt

SEQ ID NO: 168747 - DNA, 30 bp, Artificial Sequence
  Synthetic oligonucleotide
tctacgcaagaggtcagagatggggtgctt

SEQ ID NO: 168748 - DNA, 30 bp, Artificial Sequence
  Synthetic oligonucleotide
atgagttgacctggtgtgtcacatgtgctt

SEQ ID NO: 168749 - DNA, 30 bp, Artificial Sequence
  Synthetic oligonucleotide
acaaagggcgtgatgaaagtgtgtgtgctt

SEQ ID NO: 168750 - DNA, 30 bp, Artificial Sequence
  Synthetic oligonucleotide
ccacggggctcatgattcagcattgtgctt

SEQ ID NO: 168751 - DNA, 30 bp, Artificial Sequence
  Synthetic oligonucleotide
cattgtatgctatggtcggaaacattgctt

SEQ ID NO: 168752 - DNA, 31 bp, Artificial Sequence
  Synthetic oligonucleotide
tccgatgaagatcgaagggtgcttattgctt

SEQ ID NO: 168753 - DNA, 30 bp, Artificial Sequence
  Synthetic oligonucleotide
atcggagataaatacgagtgtgtgttgctt

SEQ ID NO: 168754 - DNA, 30 bp, Artificial Sequence
  Synthetic oligonucleotide
cgccagtcggaatacgccgagaaacatctt

SEQ ID NO: 168755 - DNA, 30 bp, Artificial Sequence
  Synthetic oligonucleotide
cccagctgaaacataaatatttgccatctt

SEQ ID NO: 168756 - DNA, 30 bp, Artificial Sequence
  Synthetic oligonucleotide
aggaagggtctcttcttgattcctcatctt

SEQ ID NO: 168757 - DNA, 30 bp, Artificial Sequence
  Synthetic oligonucleotide
agcgaatttatcgaaaagatttaagatctt

SEQ ID NO: 168758 - DNA, 30 bp, Artificial Sequence
  Synthetic oligonucleotide
acccgtgactaacgaatgtgggcggatctt

SEQ ID NO: 168759 - DNA, 30 bp, Artificial Sequence
  Synthetic oligonucleotide
agaacgattagactttgttgtagtgatctt

SEQ ID NO: 168760 - DNA, 30 bp, Artificial Sequence
  Synthetic oligonucleotide
cggcccgaccgtatgcttctgttgtatctt

SEQ ID NO: 168761 - DNA, 30 bp, Artificial Sequence
  Synthetic oligonucleotide
ccgcgcacgtctgcaagcataacttatctt

SEQ ID NO: 168762 - DNA, 30 bp, Artificial Sequence
  Synthetic oligonucleotide
accatccagcgtgttactttgcagactctt

SEQ ID NO: 168763 - DNA, 30 bp, Artificial Sequence
  Synthetic oligonucleotide
cgcataggatcaggattaccctagactctt

SEQ ID NO: 168764 - DNA, 30 bp, Artificial Sequence
  Synthetic oligonucleotide
gagtcagccttgagcagaacgggtactctt

SEQ ID NO: 168765 - DNA, 30 bp, Artificial Sequence
  Synthetic oligonucleotide
ccccatgagtcaggatgcgtgactcctctt

SEQ ID NO: 168766 - DNA, 30 bp, Artificial Sequence
  Synthetic oligonucleotide
accgtgtgtggacgatggtgattagctctt

SEQ ID NO: 168767 - DNA, 30 bp, Artificial Sequence
  Synthetic oligonucleotide
aataactaggccgtgacctcgtccgctctt

SEQ ID NO: 168768 - DNA, 30 bp, Artificial Sequence
  Synthetic oligonucleotide
ggcggcaattgaaaatacaatattgctctt

SEQ ID NO: 168769 - DNA, 30 bp, Artificial Sequence
  Synthetic oligonucleotide
ggtgggtgactccatcgagttgaatctctt

SEQ ID NO: 168770 - DNA, 30 bp, Artificial Sequence
  Synthetic oligonucleotide
ttaggcgcgtggaactcattgtaatctctt

SEQ ID NO: 168771 - DNA, 30 bp, Artificial Sequence
  Synthetic oligonucleotide
tgaacacgctgtgcaatcaggcactctctt

SEQ ID NO: 168772 - DNA, 30 bp, Artificial Sequence
  Synthetic oligonucleotide
acaatttagtggcaacgaatggcttctctt

SEQ ID NO: 168773 - DNA, 30 bp, Artificial Sequence
  Synthetic oligonucleotide
aggaaggatccacctgacggggcaagtctt

SEQ ID NO: 168774 - DNA, 30 bp, Artificial Sequence
  Synthetic oligonucleotide
taaattgcggaggtcataaatgcacgtctt

SEQ ID NO: 168775 - DNA, 30 bp, Artificial Sequence
  Synthetic oligonucleotide
gaccccaccccataggaatgcgcccgtctt

SEQ ID NO: 168776 - DNA, 30 bp, Artificial Sequence
  Synthetic oligonucleotide
aggccgtttccagggtccggatcccgtctt

SEQ ID NO: 168777 - DNA, 30 bp, Artificial Sequence
  Synthetic oligonucleotide
actgcatcctagggagggggttcaggtctt

SEQ ID NO: 168778 - DNA, 30 bp, Artificial Sequence
  Synthetic oligonucleotide
aaaacactcaaccagcgaggtcgcggtctt

SEQ ID NO: 168779 - DNA, 30 bp, Artificial Sequence
  Synthetic oligonucleotide
cgctggtaacttaggcgaaaggatggtctt

SEQ ID NO: 168780 - DNA, 30 bp, Artificial Sequence
  Synthetic oligonucleotide
actacggtactggttggaaggtatggtctt

SEQ ID NO: 168781 - DNA, 30 bp, Artificial Sequence
  Synthetic oligonucleotide
gtactgaaatcgctaactacgtgtggtctt

SEQ ID NO: 168782 - DNA, 30 bp, Artificial Sequence
  Synthetic oligonucleotide
atctgtaaacaataaaataggtgtggtctt

SEQ ID NO: 168783 - DNA, 30 bp, Artificial Sequence
  Synthetic oligonucleotide
ataactggtgttaactgctccttctgtctt

SEQ ID NO: 168784 - DNA, 30 bp, Artificial Sequence
  Synthetic oligonucleotide
caagacagggccattcgaccttggtgtctt

SEQ ID NO: 168785 - DNA, 30 bp, Artificial Sequence
  Synthetic oligonucleotide
cttgagtctacatgtgaaagcacgattctt

SEQ ID NO: 168786 - DNA, 30 bp, Artificial Sequence
  Synthetic oligonucleotide
aagcactgacgagaacatatgcggattctt

SEQ ID NO: 168787 - DNA, 30 bp, Artificial Sequence
  Synthetic oligonucleotide
tcctagggacattagacttattgtgttctt

SEQ ID NO: 168788 - DNA, 30 bp, Artificial Sequence
  Synthetic oligonucleotide
cagggtgttccgtagggccaaggatttctt

SEQ ID NO: 168789 - DNA, 30 bp, Artificial Sequence
  Synthetic oligonucleotide
acgaccaggttctaggcaattaattttctt

SEQ ID NO: 168790 - DNA, 30 bp, Artificial Sequence
  Synthetic oligonucleotide
ccggcgcatggtcgaactggaagttttctt

SEQ ID NO: 168791 - DNA, 30 bp, Artificial Sequence
  Synthetic oligonucleotide
acggagcggccttggagggagcgaaaagtt

SEQ ID NO: 168792 - DNA, 30 bp, Artificial Sequence
  Synthetic oligonucleotide
tgaaggctacacagatgacgaattaaagtt

SEQ ID NO: 168793 - DNA, 30 bp, Artificial Sequence
  Synthetic oligonucleotide
agccaaaaggacttcgggaatattaaagtt

SEQ ID NO: 168794 - DNA, 30 bp, Artificial Sequence
  Synthetic oligonucleotide
agcccgtacctctaacagctttagcaagtt

SEQ ID NO: 168795 - DNA, 30 bp, Artificial Sequence
  Synthetic oligonucleotide
gtagtactggggggggttccaacgcaagtt

SEQ ID NO: 168796 - DNA, 30 bp, Artificial Sequence
  Synthetic oligonucleotide
ggggacgggtatgggtacatacggcaagtt

SEQ ID NO: 168797 - DNA, 30 bp, Artificial Sequence
  Synthetic oligonucleotide
acgcaaagcggtaccagaaacctgcaagtt

SEQ ID NO: 168798 - DNA, 30 bp, Artificial Sequence
  Synthetic oligonucleotide
ttaatcagtcagtcaggaaactccgaagtt

SEQ ID NO: 168799 - DNA, 30 bp, Artificial Sequence
  Synthetic oligonucleotide
cctgtcagacaaagtcacccggtggaagtt

SEQ ID NO: 168800 - DNA, 30 bp, Artificial Sequence
  Synthetic oligonucleotide
cctgaacccagtagagacagatctgaagtt

SEQ ID NO: 168801 - DNA, 30 bp, Artificial Sequence
  Synthetic oligonucleotide
cgcctaatcgataaacagccgggataagtt

SEQ ID NO: 168802 - DNA, 30 bp, Artificial Sequence
  Synthetic oligonucleotide
cgtccgtagggacgtttactcatataagtt

SEQ ID NO: 168803 - DNA, 30 bp, Artificial Sequence
  Synthetic oligonucleotide
actcataactcgtgagagggtgcaacagtt

SEQ ID NO: 168804 - DNA, 30 bp, Artificial Sequence
  Synthetic oligonucleotide
aacggcaagtaccacagcaaacgcacagtt

SEQ ID NO: 168805 - DNA, 30 bp, Artificial Sequence
  Synthetic oligonucleotide
gccgatatccagcccaaggagggcacagtt

SEQ ID NO: 168806 - DNA, 30 bp, Artificial Sequence
  Synthetic oligonucleotide
gaccatgtagacaaatacagtaagacagtt

SEQ ID NO: 168807 - DNA, 30 bp, Artificial Sequence
  Synthetic oligonucleotide
tggcacggtgagaactaactctggacagtt

SEQ ID NO: 168808 - DNA, 30 bp, Artificial Sequence
  Synthetic oligonucleotide
ccgtggtgtgatcttgtctgatgtccagtt

SEQ ID NO: 168809 - DNA, 30 bp, Artificial Sequence
  Synthetic oligonucleotide
gtactcaaggcatagaactcctttgcagtt

SEQ ID NO: 168810 - DNA, 30 bp, Artificial Sequence
  Synthetic oligonucleotide
caacggctttacaaatacctgtcatcagtt

SEQ ID NO: 168811 - DNA, 30 bp, Artificial Sequence
  Synthetic oligonucleotide
acggcggttgatgttggctgggactcagtt

SEQ ID NO: 168812 - DNA, 30 bp, Artificial Sequence
  Synthetic oligonucleotide
aacggatactaaacagggttaacctcagtt

SEQ ID NO: 168813 - DNA, 30 bp, Artificial Sequence
  Synthetic oligonucleotide
ggagcgcatctggagtgctgtggctcagtt

SEQ ID NO: 168814 - DNA, 30 bp, Artificial Sequence
  Synthetic oligonucleotide
agtcagtccctattaggtaggtggtcagtt

SEQ ID NO: 168815 - DNA, 30 bp, Artificial Sequence
  Synthetic oligonucleotide
ggcgttcagtgtggtccgcaagtttcagtt

SEQ ID NO: 168816 - DNA, 30 bp, Artificial Sequence
  Synthetic oligonucleotide
tggagaggtttttcggaggtaagaagagtt

SEQ ID NO: 168817 - DNA, 30 bp, Artificial Sequence
  Synthetic oligonucleotide
cggcaggcgtggttctttgacctaagagtt

SEQ ID NO: 168818 - DNA, 30 bp, Artificial Sequence
  Synthetic oligonucleotide
ccccctaccatcggggcacaaagcagagtt

SEQ ID NO: 168819 - DNA, 30 bp, Artificial Sequence
  Synthetic oligonucleotide
aaagtaattgtgcactgagactgacgagtt

SEQ ID NO: 168820 - DNA, 30 bp, Artificial Sequence
  Synthetic oligonucleotide
ggcaagatgtgaacgttgccagcccgagtt

SEQ ID NO: 168821 - DNA, 31 bp, Artificial Sequence
  Synthetic oligonucleotide
ctgtccgggcgcaagaggaatttctggagtt

SEQ ID NO: 168822 - DNA, 30 bp, Artificial Sequence
  Synthetic oligonucleotide
ggcatagcgcgtctgcacttttgatgagtt

SEQ ID NO: 168823 - DNA, 30 bp, Artificial Sequence
  Synthetic oligonucleotide
ccacacctgcgaacacttcgagtatgagtt

SEQ ID NO: 168824 - DNA, 30 bp, Artificial Sequence
  Synthetic oligonucleotide
ccagtttatcgcactgttggtgagtgagtt

SEQ ID NO: 168825 - DNA, 30 bp, Artificial Sequence
  Synthetic oligonucleotide
tgatagggtagtgtatagtgttgaatagtt

SEQ ID NO: 168826 - DNA, 26 bp, Artificial Sequence
  Synthetic oligonucleotide
cggaggcagaactaaacaacatagtt

SEQ ID NO: 168827 - DNA, 30 bp, Artificial Sequence
  Synthetic oligonucleotide
ggacacatccaaaatgtatctcccatagtt

SEQ ID NO: 168828 - DNA, 30 bp, Artificial Sequence
  Synthetic oligonucleotide
acattatagaacctcagtcattttatagtt

SEQ ID NO: 168829 - DNA, 30 bp, Artificial Sequence
  Synthetic oligonucleotide
acacaaatacgaaattaaactaccctagtt

SEQ ID NO: 168830 - DNA, 30 bp, Artificial Sequence
  Synthetic oligonucleotide
tatgtgagcaaaaaactagtcgtgctagtt

SEQ ID NO: 168831 - DNA, 30 bp, Artificial Sequence
  Synthetic oligonucleotide
tatgttaatggtgaatgacttcgcgtagtt

SEQ ID NO: 168832 - DNA, 30 bp, Artificial Sequence
  Synthetic oligonucleotide
aatgggcatacacaggttacgatcgtagtt

SEQ ID NO: 168833 - DNA, 30 bp, Artificial Sequence
  Synthetic oligonucleotide
gctgagattaaagtgtgaggacaggtagtt

SEQ ID NO: 168834 - DNA, 30 bp, Artificial Sequence
  Synthetic oligonucleotide
tgcatgcgtagatcccccttgagattagtt

SEQ ID NO: 168835 - DNA, 30 bp, Artificial Sequence
  Synthetic oligonucleotide
tcttgccatctgcggtaatatgtcttagtt

SEQ ID NO: 168836 - DNA, 30 bp, Artificial Sequence
  Synthetic oligonucleotide
acaccgctggtacctcggtaaacaaacgtt

SEQ ID NO: 168837 - DNA, 30 bp, Artificial Sequence
  Synthetic oligonucleotide
gtcgactgaaacaacgactccaccaacgtt

SEQ ID NO: 168838 - DNA, 30 bp, Artificial Sequence
  Synthetic oligonucleotide
aacagctagaataattgtgcagagaacgtt

SEQ ID NO: 168839 - DNA, 30 bp, Artificial Sequence
  Synthetic oligonucleotide
accgggtatctgggcgaagtgcaccacgtt

SEQ ID NO: 168840 - DNA, 30 bp, Artificial Sequence
  Synthetic oligonucleotide
cacgattacggtggacatatcgcccacgtt

SEQ ID NO: 168841 - DNA, 30 bp, Artificial Sequence
  Synthetic oligonucleotide
agtataatgtcacctgattgtaatcacgtt

SEQ ID NO: 168842 - DNA, 30 bp, Artificial Sequence
  Synthetic oligonucleotide
gaagcaggaagtgtcaccagaaacgacgtt

SEQ ID NO: 168843 - DNA, 30 bp, Artificial Sequence
  Synthetic oligonucleotide
catttgaatctgtacagtctgtgtgacgtt

SEQ ID NO: 168844 - DNA, 30 bp, Artificial Sequence
  Synthetic oligonucleotide
gagttattcgctaacctccatcaatacgtt

SEQ ID NO: 168845 - DNA, 30 bp, Artificial Sequence
  Synthetic oligonucleotide
cacgcaaggctctcccataaataatacgtt

SEQ ID NO: 168846 - DNA, 30 bp, Artificial Sequence
  Synthetic oligonucleotide
gcgtctaacagaaccgtactagtgtacgtt

SEQ ID NO: 168847 - DNA, 30 bp, Artificial Sequence
  Synthetic oligonucleotide
actcgagatgcttgtgatatagacaccgtt

SEQ ID NO: 168848 - DNA, 30 bp, Artificial Sequence
  Synthetic oligonucleotide
ggttagcggccaaaatccttgcgcaccgtt

SEQ ID NO: 168849 - DNA, 30 bp, Artificial Sequence
  Synthetic oligonucleotide
tgagattgaccacatgcggtctgcaccgtt

SEQ ID NO: 168850 - DNA, 30 bp, Artificial Sequence
  Synthetic oligonucleotide
tacagcgggcgtaaaattgcttataccgtt

SEQ ID NO: 168851 - DNA, 30 bp, Artificial Sequence
  Synthetic oligonucleotide
cgttaaagtaggtatcgcggtaaacccgtt

SEQ ID NO: 168852 - DNA, 30 bp, Artificial Sequence
  Synthetic oligonucleotide
ggagaagcatgttaaagttaaggacccgtt

SEQ ID NO: 168853 - DNA, 30 bp, Artificial Sequence
  Synthetic oligonucleotide
ggagtcccatagctaaagcttgaccccgtt

SEQ ID NO: 168854 - DNA, 30 bp, Artificial Sequence
  Synthetic oligonucleotide
tgattcagtgacacctagttatcccccgtt

SEQ ID NO: 168855 - DNA, 30 bp, Artificial Sequence
  Synthetic oligonucleotide
ctataaaggaccgttacgattgcgcccgtt

SEQ ID NO: 168856 - DNA, 30 bp, Artificial Sequence
  Synthetic oligonucleotide
tcatcgaaccattaacatgccaggcccgtt

SEQ ID NO: 168857 - DNA, 30 bp, Artificial Sequence
  Synthetic oligonucleotide
aaacttagaccatgcgactcttaagccgtt

SEQ ID NO: 168858 - DNA, 30 bp, Artificial Sequence
  Synthetic oligonucleotide
agcggcctcaagccggagtggggagccgtt

SEQ ID NO: 168859 - DNA, 30 bp, Artificial Sequence
  Synthetic oligonucleotide
cttggggtggtacgggccattcgctccgtt

SEQ ID NO: 168860 - DNA, 30 bp, Artificial Sequence
  Synthetic oligonucleotide
ggcctgcctgattcgtacacaaaacgcgtt

SEQ ID NO: 168861 - DNA, 30 bp, Artificial Sequence
  Synthetic oligonucleotide
gggcatcttaagtctcaattggttcgcgtt

SEQ ID NO: 168862 - DNA, 30 bp, Artificial Sequence
  Synthetic oligonucleotide
cacttatagggtccttattagaacggcgtt

SEQ ID NO: 168863 - DNA, 30 bp, Artificial Sequence
  Synthetic oligonucleotide
acaccggggcagcagaggggattcggcgtt

SEQ ID NO: 168864 - DNA, 30 bp, Artificial Sequence
  Synthetic oligonucleotide
tggaccacaatatttgcggcagaatgcgtt

SEQ ID NO: 168865 - DNA, 30 bp, Artificial Sequence
  Synthetic oligonucleotide
aaaggcctcgcctcgttagcgtgcatcgtt

SEQ ID NO: 168866 - DNA, 30 bp, Artificial Sequence
  Synthetic oligonucleotide
atctgacgcacgtcggtgtggactctcgtt

SEQ ID NO: 168867 - DNA, 30 bp, Artificial Sequence
  Synthetic oligonucleotide
gggtgttgcgaaaagcgtaggtaattcgtt

SEQ ID NO: 168868 - DNA, 30 bp, Artificial Sequence
  Synthetic oligonucleotide
tggcaacatcggtaggaatatacattcgtt

SEQ ID NO: 168869 - DNA, 30 bp, Artificial Sequence
  Synthetic oligonucleotide
acgcacagatgcgcggtttcgtacttcgtt

SEQ ID NO: 168870 - DNA, 30 bp, Artificial Sequence
  Synthetic oligonucleotide
gaatcgtggttcgttaaaaaggagttcgtt

SEQ ID NO: 168871 - DNA, 30 bp, Artificial Sequence
  Synthetic oligonucleotide
gaaggggccaatcaccgactagcgttcgtt

SEQ ID NO: 168872 - DNA, 30 bp, Artificial Sequence
  Synthetic oligonucleotide
ataaggttggaatccggtctacatttcgtt

SEQ ID NO: 168873 - DNA, 30 bp, Artificial Sequence
  Synthetic oligonucleotide
acctagcgagcaggtaattcctgtttcgtt

SEQ ID NO: 168874 - DNA, 30 bp, Artificial Sequence
  Synthetic oligonucleotide
acgactggggcgagccactagataaaggtt

SEQ ID NO: 168875 - DNA, 30 bp, Artificial Sequence
  Synthetic oligonucleotide
agtgcgggttgtgtataatagcccaaggtt

SEQ ID NO: 168876 - DNA, 30 bp, Artificial Sequence
  Synthetic oligonucleotide
ctatgtgggatggaggattgcatcaaggtt

SEQ ID NO: 168877 - DNA, 30 bp, Artificial Sequence
  Synthetic oligonucleotide
gctcagaaagctccctccaactagaaggtt

SEQ ID NO: 168878 - DNA, 30 bp, Artificial Sequence
  Synthetic oligonucleotide
caaagcaaggatgcggaagtgattaaggtt

SEQ ID NO: 168879 - DNA, 30 bp, Artificial Sequence
  Synthetic oligonucleotide
cagttcccgtaattaagttgagcacaggtt

SEQ ID NO: 168880 - DNA, 30 bp, Artificial Sequence
  Synthetic oligonucleotide
tggatagtacagtgggtcccacgccaggtt

SEQ ID NO: 168881 - DNA, 30 bp, Artificial Sequence
  Synthetic oligonucleotide
ccgtgtcgtgtagtgcaccacgggcaggtt

SEQ ID NO: 168882 - DNA, 30 bp, Artificial Sequence
  Synthetic oligonucleotide
gtcgtcgggtgaggacctagaaaagaggtt

SEQ ID NO: 168883 - DNA, 30 bp, Artificial Sequence
  Synthetic oligonucleotide
atccgtggtgatggatctggatgagaggtt

SEQ ID NO: 168884 - DNA, 30 bp, Artificial Sequence
  Synthetic oligonucleotide
gcgcagcagctggggggtcgtaaggaggtt

SEQ ID NO: 168885 - DNA, 30 bp, Artificial Sequence
  Synthetic oligonucleotide
atgagacttaacggcgcagattgggaggtt

SEQ ID NO: 168886 - DNA, 30 bp, Artificial Sequence
  Synthetic oligonucleotide
aacacacgattagaaatctggaatgaggtt

SEQ ID NO: 168887 - DNA, 30 bp, Artificial Sequence
  Synthetic oligonucleotide
gcgctggtgctaggtcagagtcatgaggtt

SEQ ID NO: 168888 - DNA, 30 bp, Artificial Sequence
  Synthetic oligonucleotide
tatgtgcttaaagagctggaatcataggtt

SEQ ID NO: 168889 - DNA, 30 bp, Artificial Sequence
  Synthetic oligonucleotide
gatgaaagcaacaaatcgcacccgtaggtt

SEQ ID NO: 168890 - DNA, 30 bp, Artificial Sequence
  Synthetic oligonucleotide
gcccaaagtagtttaagacatctgtaggtt

SEQ ID NO: 168891 - DNA, 30 bp, Artificial Sequence
  Synthetic oligonucleotide
aggggtgccaatattcgacactaaacggtt

SEQ ID NO: 168892 - DNA, 30 bp, Artificial Sequence
  Synthetic oligonucleotide
cagtccccgacctaggacgttcagacggtt

SEQ ID NO: 168893 - DNA, 30 bp, Artificial Sequence
  Synthetic oligonucleotide
cgtgtggagtattgagtcgcgataccggtt

SEQ ID NO: 168894 - DNA, 30 bp, Artificial Sequence
  Synthetic oligonucleotide
gtcttaagaaccgcgtacttatggccggtt

SEQ ID NO: 168895 - DNA, 30 bp, Artificial Sequence
  Synthetic oligonucleotide
ggtgcaacggtgacatcgccaaaagcggtt

SEQ ID NO: 168896 - DNA, 30 bp, Artificial Sequence
  Synthetic oligonucleotide
acgaacaccagaagcaaatcagtagcggtt

SEQ ID NO: 168897 - DNA, 30 bp, Artificial Sequence
  Synthetic oligonucleotide
acacaagtcagatctcaggactgcgcggtt

SEQ ID NO: 168898 - DNA, 30 bp, Artificial Sequence
  Synthetic oligonucleotide
ggcgaaaactctatcaagaatttcgcggtt

SEQ ID NO: 168899 - DNA, 30 bp, Artificial Sequence
  Synthetic oligonucleotide
acaagactcgatacaatctgctaggcggtt

SEQ ID NO: 168900 - DNA, 30 bp, Artificial Sequence
  Synthetic oligonucleotide
gtgaaggcaggacgggaggtgtcggcggtt

SEQ ID NO: 168901 - DNA, 30 bp, Artificial Sequence
  Synthetic oligonucleotide
caagtgctaaattatttgaatgggtcggtt

SEQ ID NO: 168902 - DNA, 30 bp, Artificial Sequence
  Synthetic oligonucleotide
tgagtgcgcgtattcaggtttcgttcggtt

SEQ ID NO: 168903 - DNA, 30 bp, Artificial Sequence
  Synthetic oligonucleotide
cggtacccactatctcattattgttcggtt

SEQ ID NO: 168904 - DNA, 30 bp, Artificial Sequence
  Synthetic oligonucleotide
gactaggagctttcaaagtaacacagggtt

SEQ ID NO: 168905 - DNA, 30 bp, Artificial Sequence
  Synthetic oligonucleotide
ctgggcgccttgccgcagtgcaggagggtt

SEQ ID NO: 168906 - DNA, 30 bp, Artificial Sequence
  Synthetic oligonucleotide
cttaagtgatcgtaaggggcagttagggtt

SEQ ID NO: 168907 - DNA, 30 bp, Artificial Sequence
  Synthetic oligonucleotide
gacgaggttcgtacattagatagacgggtt

SEQ ID NO: 168908 - DNA, 30 bp, Artificial Sequence
  Synthetic oligonucleotide
ccatccgcgaccccaaagtggggacgggtt

SEQ ID NO: 168909 - DNA, 30 bp, Artificial Sequence
  Synthetic oligonucleotide
tatgggtgtgagtactgtagttatcgggtt

SEQ ID NO: 168910 - DNA, 30 bp, Artificial Sequence
  Synthetic oligonucleotide
gctgcaagctagatcttagagggtcgggtt

SEQ ID NO: 168911 - DNA, 30 bp, Artificial Sequence
  Synthetic oligonucleotide
tagaacagattatgagggagagatggggtt

SEQ ID NO: 168912 - DNA, 30 bp, Artificial Sequence
  Synthetic oligonucleotide
tgctcgaaccatatcaaaaagacatgggtt

SEQ ID NO: 168913 - DNA, 30 bp, Artificial Sequence
  Synthetic oligonucleotide
acgacgctggcaaggctatagcgatgggtt

SEQ ID NO: 168914 - DNA, 30 bp, Artificial Sequence
  Synthetic oligonucleotide
catcgccatcgggatgcgtaatgctgggtt

SEQ ID NO: 168915 - DNA, 30 bp, Artificial Sequence
  Synthetic oligonucleotide
ggcagtcttatcggagagaaaaggtgggtt

SEQ ID NO: 168916 - DNA, 30 bp, Artificial Sequence
  Synthetic oligonucleotide
tgggcttgacggtgtatagtgacttgggtt

SEQ ID NO: 168917 - DNA, 30 bp, Artificial Sequence
  Synthetic oligonucleotide
gtccggacctatcctggcgacaagatggtt

SEQ ID NO: 168918 - DNA, 30 bp, Artificial Sequence
  Synthetic oligonucleotide
atcggtgggtttcagcccgtgaatatggtt

SEQ ID NO: 168919 - DNA, 30 bp, Artificial Sequence
  Synthetic oligonucleotide
acaggagaagacggcaaacgaactatggtt

SEQ ID NO: 168920 - DNA, 30 bp, Artificial Sequence
  Synthetic oligonucleotide
ttaacgagtcagcggccaatgattatggtt

SEQ ID NO: 168921 - DNA, 30 bp, Artificial Sequence
  Synthetic oligonucleotide
gatcaaatcgtaaggtctgatacgctggtt

SEQ ID NO: 168922 - DNA, 30 bp, Artificial Sequence
  Synthetic oligonucleotide
tggtcgacgtaggaagaagacgtagtggtt

SEQ ID NO: 168923 - DNA, 30 bp, Artificial Sequence
  Synthetic oligonucleotide
ggcactcatgcccatcgatttcgcgtggtt

SEQ ID NO: 168924 - DNA, 30 bp, Artificial Sequence
  Synthetic oligonucleotide
gggaagagtaataggcccaaatggttggtt

SEQ ID NO: 168925 - DNA, 30 bp, Artificial Sequence
  Synthetic oligonucleotide
aggcgcgccttttatggagaaatgttggtt

SEQ ID NO: 168926 - DNA, 30 bp, Artificial Sequence
  Synthetic oligonucleotide
atagatcaccacacagaacagagaaatgtt

SEQ ID NO: 168927 - DNA, 30 bp, Artificial Sequence
  Synthetic oligonucleotide
aggcacgaataataagcgacccctaatgtt

SEQ ID NO: 168928 - DNA, 30 bp, Artificial Sequence
  Synthetic oligonucleotide
gcggtagaactaggacgaggtagtaatgtt

SEQ ID NO: 168929 - DNA, 30 bp, Artificial Sequence
  Synthetic oligonucleotide
tagtaaagtggcgatgggtgcggacatgtt

SEQ ID NO: 168930 - DNA, 30 bp, Artificial Sequence
  Synthetic oligonucleotide
tagcagtaatagcagatccgtacccatgtt

SEQ ID NO: 168931 - DNA, 30 bp, Artificial Sequence
  Synthetic oligonucleotide
cattcatagtccgatccacaatggcatgtt

SEQ ID NO: 168932 - DNA, 30 bp, Artificial Sequence
  Synthetic oligonucleotide
gaagggtaagatgtcagcatgtgtcatgtt

SEQ ID NO: 168933 - DNA, 30 bp, Artificial Sequence
  Synthetic oligonucleotide
tatctaacagtaagctcagtccaagatgtt

SEQ ID NO: 168934 - DNA, 30 bp, Artificial Sequence
  Synthetic oligonucleotide
ttgcacttgagaagcttccaagaggatgtt

SEQ ID NO: 168935 - DNA, 30 bp, Artificial Sequence
  Synthetic oligonucleotide
aaggtctacgatcggaggttccaatatgtt

SEQ ID NO: 168936 - DNA, 30 bp, Artificial Sequence
  Synthetic oligonucleotide
aagggtctaagtcttcagtacggatatgtt

SEQ ID NO: 168937 - DNA, 30 bp, Artificial Sequence
  Synthetic oligonucleotide
gcttagttaaaagcatgtcgtaagtatgtt

SEQ ID NO: 168938 - DNA, 30 bp, Artificial Sequence
  Synthetic oligonucleotide
acagcatgaccagaggagaggctgtatgtt

SEQ ID NO: 168939 - DNA, 30 bp, Artificial Sequence
  Synthetic oligonucleotide
cgcaccagggcggacgcggctataactgtt

SEQ ID NO: 168940 - DNA, 30 bp, Artificial Sequence
  Synthetic oligonucleotide
caactcggcacccctatatcgatgactgtt

SEQ ID NO: 168941 - DNA, 30 bp, Artificial Sequence
  Synthetic oligonucleotide
tggtctaaattctatcgcattgctactgtt

SEQ ID NO: 168942 - DNA, 30 bp, Artificial Sequence
  Synthetic oligonucleotide
aagggtgtgtggagatacgtattccctgtt

SEQ ID NO: 168943 - DNA, 30 bp, Artificial Sequence
  Synthetic oligonucleotide
ttgaacgtaggcgcattgacacatgctgtt

SEQ ID NO: 168944 - DNA, 30 bp, Artificial Sequence
  Synthetic oligonucleotide
atgagcagtatagggcgatattctgctgtt

SEQ ID NO: 168945 - DNA, 30 bp, Artificial Sequence
  Synthetic oligonucleotide
taggccccactctatcaaggaattgctgtt

SEQ ID NO: 168946 - DNA, 30 bp, Artificial Sequence
  Synthetic oligonucleotide
ttgtgtgaaaagggcgaatggcttgctgtt

SEQ ID NO: 168947 - DNA, 29 bp, Artificial Sequence
  Synthetic oligonucleotide
atccagtgtaaagttaatcggttgctgtt

SEQ ID NO: 168948 - DNA, 30 bp, Artificial Sequence
  Synthetic oligonucleotide
agctcggctttactgtgagggatctctgtt

SEQ ID NO: 168949 - DNA, 30 bp, Artificial Sequence
  Synthetic oligonucleotide
gaaatgatccgataaagtgaatgcagtgtt

SEQ ID NO: 168950 - DNA, 30 bp, Artificial Sequence
  Synthetic oligonucleotide
caactcacggctcgctcgtcaccccgtgtt

SEQ ID NO: 168951 - DNA, 30 bp, Artificial Sequence
  Synthetic oligonucleotide
agcggcgaagctgagcaccgaaagcgtgtt

SEQ ID NO: 168952 - DNA, 30 bp, Artificial Sequence
  Synthetic oligonucleotide
caacggatgggcgtacagaaggggcgtgtt

SEQ ID NO: 168953 - DNA, 30 bp, Artificial Sequence
  Synthetic oligonucleotide
tgtggtcaaaaggatgattgtcgaggtgtt

SEQ ID NO: 168954 - DNA, 30 bp, Artificial Sequence
  Synthetic oligonucleotide
taagggctccggtacgttgtaataggtgtt

SEQ ID NO: 168955 - DNA, 30 bp, Artificial Sequence
  Synthetic oligonucleotide
tacgccacgaagatgttgtggagcattgtt

SEQ ID NO: 168956 - DNA, 30 bp, Artificial Sequence
  Synthetic oligonucleotide
tagtcactaaggcaacggcacaatattgtt

SEQ ID NO: 168957 - DNA, 30 bp, Artificial Sequence
  Synthetic oligonucleotide
cgaccaattatggcgtcatgctgccttgtt

SEQ ID NO: 168958 - DNA, 30 bp, Artificial Sequence
  Synthetic oligonucleotide
caagaggtgatccagtctataacagttgtt

SEQ ID NO: 168959 - DNA, 30 bp, Artificial Sequence
  Synthetic oligonucleotide
aaggggcccgaaaggtagaatacatttgtt

SEQ ID NO: 168960 - DNA, 30 bp, Artificial Sequence
  Synthetic oligonucleotide
aacaagggtcatcggggctgcccatttgtt

SEQ ID NO: 168961 - DNA, 30 bp, Artificial Sequence
  Synthetic oligonucleotide
cgattgatcgagcaacgggggtaaaaattt

SEQ ID NO: 168962 - DNA, 30 bp, Artificial Sequence
  Synthetic oligonucleotide
cacgaactacacgtcctgttgatcaaattt

SEQ ID NO: 168963 - DNA, 30 bp, Artificial Sequence
  Synthetic oligonucleotide
aacatcgcgagtcatcccctcacgaaattt

SEQ ID NO: 168964 - DNA, 30 bp, Artificial Sequence
  Synthetic oligonucleotide
ggcgaatttagtaaatagaggagtaaattt

SEQ ID NO: 168965 - DNA, 30 bp, Artificial Sequence
  Synthetic oligonucleotide
tcacacttcgtagcactgcaaagccaattt

SEQ ID NO: 168966 - DNA, 30 bp, Artificial Sequence
  Synthetic oligonucleotide
ataaggcgttagtctcggctgagccaattt

SEQ ID NO: 168967 - DNA, 30 bp, Artificial Sequence
  Synthetic oligonucleotide
cggctgctacgaagttataagttccaattt

SEQ ID NO: 168968 - DNA, 30 bp, Artificial Sequence
  Synthetic oligonucleotide
gacgggttcgcggtcgcacccaagcaattt

SEQ ID NO: 168969 - DNA, 30 bp, Artificial Sequence
  Synthetic oligonucleotide
gcgggtcaaaccgtgtgtctggagtaattt

SEQ ID NO: 168970 - DNA, 30 bp, Artificial Sequence
  Synthetic oligonucleotide
ctgcgagctaactcaagaagatattaattt

SEQ ID NO: 168971 - DNA, 30 bp, Artificial Sequence
  Synthetic oligonucleotide
atccgtcgaggtagtgtcgcagaaacattt

SEQ ID NO: 168972 - DNA, 30 bp, Artificial Sequence
  Synthetic oligonucleotide
gggaggtttactggtaagctggcaacattt

SEQ ID NO: 168973 - DNA, 30 bp, Artificial Sequence
  Synthetic oligonucleotide
gaccatgcgacggccataactccgacattt

SEQ ID NO: 168974 - DNA, 30 bp, Artificial Sequence
  Synthetic oligonucleotide
acgtcacccactcgaaggacatctacattt

SEQ ID NO: 168975 - DNA, 30 bp, Artificial Sequence
  Synthetic oligonucleotide
atggaaaccggtaggtaaacgggtccattt

SEQ ID NO: 168976 - DNA, 30 bp, Artificial Sequence
  Synthetic oligonucleotide
atcgtcggtcctgtcgtcgacactgcattt

SEQ ID NO: 168977 - DNA, 30 bp, Artificial Sequence
  Synthetic oligonucleotide
tttcgaacatggtacgtaggtagatcattt

SEQ ID NO: 168978 - DNA, 30 bp, Artificial Sequence
  Synthetic oligonucleotide
gctcgcaagggcatttgtgtaggttcattt

SEQ ID NO: 168979 - DNA, 30 bp, Artificial Sequence
  Synthetic oligonucleotide
gcgtcaactagaccagctttaatcagattt

SEQ ID NO: 168980 - DNA, 30 bp, Artificial Sequence
  Synthetic oligonucleotide
cgggaacaccgcaagacgagtaatagattt

SEQ ID NO: 168981 - DNA, 30 bp, Artificial Sequence
  Synthetic oligonucleotide
cgatacaagatctgaaggttcacacgattt

SEQ ID NO: 168982 - DNA, 30 bp, Artificial Sequence
  Synthetic oligonucleotide
cgctatgtgtcaggtcctctcatacgattt

SEQ ID NO: 168983 - DNA, 30 bp, Artificial Sequence
  Synthetic oligonucleotide
agtatcattatcacagaatgggcaggattt

SEQ ID NO: 168984 - DNA, 30 bp, Artificial Sequence
  Synthetic oligonucleotide
ggcgattggtgagttcggcaggagggattt

SEQ ID NO: 168985 - DNA, 30 bp, Artificial Sequence
  Synthetic oligonucleotide
tatcgtgaccgggtgtgctagacgggattt

SEQ ID NO: 168986 - DNA, 30 bp, Artificial Sequence
  Synthetic oligonucleotide
tgggaactaaaaacgtagaactcgtgattt

SEQ ID NO: 168987 - DNA, 30 bp, Artificial Sequence
  Synthetic oligonucleotide
aggttggggcccattcccagtataatattt

SEQ ID NO: 168988 - DNA, 30 bp, Artificial Sequence
  Synthetic oligonucleotide
tacagtccgaccaagtccgaagccatattt

SEQ ID NO: 168989 - DNA, 30 bp, Artificial Sequence
  Synthetic oligonucleotide
ctccagagttgcgagtatcttgaactattt

SEQ ID NO: 168990 - DNA, 30 bp, Artificial Sequence
  Synthetic oligonucleotide
ccaggaactgggtcagatctcccactattt

SEQ ID NO: 168991 - DNA, 30 bp, Artificial Sequence
  Synthetic oligonucleotide
gtgccactggtgctcgatattatactattt

SEQ ID NO: 168992 - DNA, 30 bp, Artificial Sequence
  Synthetic oligonucleotide
tacctgctatgactatctgagagagtattt

SEQ ID NO: 168993 - DNA, 30 bp, Artificial Sequence
  Synthetic oligonucleotide
cccacacggagcgtgcgtgtgcgagtattt

SEQ ID NO: 168994 - DNA, 30 bp, Artificial Sequence
  Synthetic oligonucleotide
gggcatgttgaaaaatcacatcacgtattt

SEQ ID NO: 168995 - DNA, 31 bp, Artificial Sequence
  Synthetic oligonucleotide
ttgacgaggtctgacgcaacgataggtattt

SEQ ID NO: 168996 - DNA, 30 bp, Artificial Sequence
  Synthetic oligonucleotide
acggggtttgcgctcactaggactgtattt

SEQ ID NO: 168997 - DNA, 30 bp, Artificial Sequence
  Synthetic oligonucleotide
ctggtagaagtcctggccgaataattattt

SEQ ID NO: 168998 - DNA, 30 bp, Artificial Sequence
  Synthetic oligonucleotide
acagcgtgtgcagaaatggttaacttattt

SEQ ID NO: 168999 - DNA, 30 bp, Artificial Sequence
  Synthetic oligonucleotide
cacgttccacagcatcgccattgtaacttt

SEQ ID NO: 169000 - DNA, 30 bp, Artificial Sequence
  Synthetic oligonucleotide
aaacgtcagccgaagactacccaagacttt

SEQ ID NO: 169001 - DNA, 30 bp, Artificial Sequence
  Synthetic oligonucleotide
tttaaaaagggttatcgcgggaccgacttt

SEQ ID NO: 169002 - DNA, 30 bp, Artificial Sequence
  Synthetic oligonucleotide
aagggtaggtaccgattcgtgtcggacttt

SEQ ID NO: 169003 - DNA, 30 bp, Artificial Sequence
  Synthetic oligonucleotide
tgtggataatcttggtttgtccgggacttt

SEQ ID NO: 169004 - DNA, 30 bp, Artificial Sequence
  Synthetic oligonucleotide
atctagaacacaagtcgtgatatatacttt

SEQ ID NO: 169005 - DNA, 30 bp, Artificial Sequence
  Synthetic oligonucleotide
ctatatggtctattgagtgcgccctacttt

SEQ ID NO: 169006 - DNA, 30 bp, Artificial Sequence
  Synthetic oligonucleotide
gaagtaaggagcttgcggagatcgtacttt

SEQ ID NO: 169007 - DNA, 30 bp, Artificial Sequence
  Synthetic oligonucleotide
ctgacttcgactctttgccatctgtacttt

SEQ ID NO: 169008 - DNA, 30 bp, Artificial Sequence
  Synthetic oligonucleotide
gggacgtatgaaaagcgtaatcgcaccttt

SEQ ID NO: 169009 - DNA, 30 bp, Artificial Sequence
  Synthetic oligonucleotide
tgcgcaagaatttcccggaaacgacccttt

SEQ ID NO: 169010 - DNA, 30 bp, Artificial Sequence
  Synthetic oligonucleotide
ccagaagggcgcgtcggtggcactcccttt

SEQ ID NO: 169011 - DNA, 30 bp, Artificial Sequence
  Synthetic oligonucleotide
tatgtgtcctaggaaggggtgactcccttt

SEQ ID NO: 169012 - DNA, 30 bp, Artificial Sequence
  Synthetic oligonucleotide
tctccatagatataatcaacgagagccttt

SEQ ID NO: 169013 - DNA, 30 bp, Artificial Sequence
  Synthetic oligonucleotide
atcacattgtgcgtctaaacgatctccttt

SEQ ID NO: 169014 - DNA, 30 bp, Artificial Sequence
  Synthetic oligonucleotide
tcttctgcgccaagcagacagctctccttt

SEQ ID NO: 169015 - DNA, 30 bp, Artificial Sequence
  Synthetic oligonucleotide
gtaaaaaacgagcaggcaaaaaagtccttt

SEQ ID NO: 169016 - DNA, 30 bp, Artificial Sequence
  Synthetic oligonucleotide
gtagaataagatcgtttgaatcagtccttt

SEQ ID NO: 169017 - DNA, 30 bp, Artificial Sequence
  Synthetic oligonucleotide
gtcactttggagcccccggtgagaagcttt

SEQ ID NO: 169018 - DNA, 30 bp, Artificial Sequence
  Synthetic oligonucleotide
gaaggacggacattagatgaatcaggcttt

SEQ ID NO: 169019 - DNA, 30 bp, Artificial Sequence
  Synthetic oligonucleotide
aggaagcggacagccgaaacgaggggcttt

SEQ ID NO: 169020 - DNA, 30 bp, Artificial Sequence
  Synthetic oligonucleotide
tcaactgttctagaggtacacatatgcttt

SEQ ID NO: 169021 - DNA, 30 bp, Artificial Sequence
  Synthetic oligonucleotide
tgccaacctcctcgaactgtgcattgcttt

SEQ ID NO: 169022 - DNA, 30 bp, Artificial Sequence
  Synthetic oligonucleotide
ggccgaagggtgtccggtagttcttgcttt

SEQ ID NO: 169023 - DNA, 30 bp, Artificial Sequence
  Synthetic oligonucleotide
aggccgctacagtaggcaactaaaatcttt

SEQ ID NO: 169024 - DNA, 30 bp, Artificial Sequence
  Synthetic oligonucleotide
cagcgaggggctctatttgcttacatcttt

SEQ ID NO: 169025 - DNA, 30 bp, Artificial Sequence
  Synthetic oligonucleotide
agggcaccattgggaggtaggctcatcttt

SEQ ID NO: 169026 - DNA, 30 bp, Artificial Sequence
  Synthetic oligonucleotide
tgccagggaataagaggtgcctttatcttt

SEQ ID NO: 169027 - DNA, 30 bp, Artificial Sequence
  Synthetic oligonucleotide
gcgaacataacaaagcgatctcccgtcttt

SEQ ID NO: 169028 - DNA, 30 bp, Artificial Sequence
  Synthetic oligonucleotide
cttgatgtataacgttgtgccatcgtcttt

SEQ ID NO: 169029 - DNA, 30 bp, Artificial Sequence
  Synthetic oligonucleotide
atgatcgggtctatcagctatgcattcttt

SEQ ID NO: 169030 - DNA, 30 bp, Artificial Sequence
  Synthetic oligonucleotide
agcacgctccggcggcagaaaggcttcttt

SEQ ID NO: 169031 - DNA, 30 bp, Artificial Sequence
  Synthetic oligonucleotide
cgaccacagtgatgagtaaaaccgttcttt

SEQ ID NO: 169032 - DNA, 30 bp, Artificial Sequence
  Synthetic oligonucleotide
tcagtggttagggcctcactgaatttcttt

SEQ ID NO: 169033 - DNA, 30 bp, Artificial Sequence
  Synthetic oligonucleotide
aaggtgatcctgtgaaaagagagtttcttt

SEQ ID NO: 169034 - DNA, 30 bp, Artificial Sequence
  Synthetic oligonucleotide
aaggaaatcctaagatcctggatgaagttt

SEQ ID NO: 169035 - DNA, 30 bp, Artificial Sequence
  Synthetic oligonucleotide
caccatcgttcaaaatagtttaaacagttt

SEQ ID NO: 169036 - DNA, 30 bp, Artificial Sequence
  Synthetic oligonucleotide
tcgatttatagtggtagctatccacagttt

SEQ ID NO: 169037 - DNA, 30 bp, Artificial Sequence
  Synthetic oligonucleotide
agtgaatacagtacaagacactgaacgttt

SEQ ID NO: 169038 - DNA, 31 bp, Artificial Sequence
  Synthetic oligonucleotide
atcacgggcctgatatcaccggctaacgttt

SEQ ID NO: 169039 - DNA, 30 bp, Artificial Sequence
  Synthetic oligonucleotide
agctagtgttattgatggcaaggcacgttt

SEQ ID NO: 169040 - DNA, 30 bp, Artificial Sequence
  Synthetic oligonucleotide
gctgtgaacttggcagggactgtgacgttt

SEQ ID NO: 169041 - DNA, 30 bp, Artificial Sequence
  Synthetic oligonucleotide
ttgtgttaaaggtattctcttcactcgttt

SEQ ID NO: 169042 - DNA, 30 bp, Artificial Sequence
  Synthetic oligonucleotide
taacggtatgcacgaatcgcgtactcgttt

SEQ ID NO: 169043 - DNA, 30 bp, Artificial Sequence
  Synthetic oligonucleotide
tcttaagaaaacaacgcctagtagtcgttt

SEQ ID NO: 169044 - DNA, 30 bp, Artificial Sequence
  Synthetic oligonucleotide
ggcgggatgagcttacagggtcgaaggttt

SEQ ID NO: 169045 - DNA, 30 bp, Artificial Sequence
  Synthetic oligonucleotide
cgaataatccgtgtgactttattaaggttt

SEQ ID NO: 169046 - DNA, 30 bp, Artificial Sequence
  Synthetic oligonucleotide
gttatggtaatgttctatatagtgaggttt

SEQ ID NO: 169047 - DNA, 30 bp, Artificial Sequence
  Synthetic oligonucleotide
cggcggggcagacggcttggcgaacggttt

SEQ ID NO: 169048 - DNA, 30 bp, Artificial Sequence
  Synthetic oligonucleotide
acgcaccaagggcaggggttccggcggttt

SEQ ID NO: 169049 - DNA, 30 bp, Artificial Sequence
  Synthetic oligonucleotide
tgggctaacggtcaagtgcacaatcggttt

SEQ ID NO: 169050 - DNA, 30 bp, Artificial Sequence
  Synthetic oligonucleotide
gttcagcgtagtcattagtagagagggttt

SEQ ID NO: 169051 - DNA, 30 bp, Artificial Sequence
  Synthetic oligonucleotide
tagcaggaacgaaaagttcgaacggggttt

SEQ ID NO: 169052 - DNA, 30 bp, Artificial Sequence
  Synthetic oligonucleotide
tgggatttaaggtctagactgttaatgttt

SEQ ID NO: 169053 - DNA, 30 bp, Artificial Sequence
  Synthetic oligonucleotide
tggaaaactggtaacttatataacatgttt

SEQ ID NO: 169054 - DNA, 30 bp, Artificial Sequence
  Synthetic oligonucleotide
ccaagatggatccgcaccacggggatgttt

SEQ ID NO: 169055 - DNA, 30 bp, Artificial Sequence
  Synthetic oligonucleotide
ggacaactaaaagtgtttgtttggatgttt

SEQ ID NO: 169056 - DNA, 31 bp, Artificial Sequence
  Synthetic oligonucleotide
gtgaaggaagctggatcgatcccgtatgttt

SEQ ID NO: 169057 - DNA, 30 bp, Artificial Sequence
  Synthetic oligonucleotide
gggagacagccggtgctgcttacactgttt

SEQ ID NO: 169058 - DNA, 30 bp, Artificial Sequence
  Synthetic oligonucleotide
ccgaagaaatgctttgaggctcatctgttt

SEQ ID NO: 169059 - DNA, 30 bp, Artificial Sequence
  Synthetic oligonucleotide
atgcgacgaccaatcgggcctgcagtgttt

SEQ ID NO: 169060 - DNA, 30 bp, Artificial Sequence
  Synthetic oligonucleotide
ggtgggtactgtccgtacattttagtgttt

SEQ ID NO: 169061 - DNA, 30 bp, Artificial Sequence
  Synthetic oligonucleotide
gttgtcatgccttatgtatcagacgtgttt

SEQ ID NO: 169062 - DNA, 30 bp, Artificial Sequence
  Synthetic oligonucleotide
acgggtagaaactagatcgtcctcgtgttt

SEQ ID NO: 169063 - DNA, 30 bp, Artificial Sequence
  Synthetic oligonucleotide
caaggccactatccgccttgaaaggtgttt

SEQ ID NO: 169064 - DNA, 30 bp, Artificial Sequence
  Synthetic oligonucleotide
tcatccgcggtaggctgaactcaggtgttt

SEQ ID NO: 169065 - DNA, 30 bp, Artificial Sequence
  Synthetic oligonucleotide
tattatacagggagggcgattggtgatttt

SEQ ID NO: 169066 - DNA, 29 bp, Artificial Sequence
  Synthetic oligonucleotide
acggaagcacaggtgatagccaatatttt

SEQ ID NO: 169067 - DNA, 31 bp, Artificial Sequence
  Synthetic oligonucleotide
cgaaccagatccttaagatctaccacctttt

SEQ ID NO: 169068 - DNA, 30 bp, Artificial Sequence
  Synthetic oligonucleotide
cgaatgccagctccagggataccagctttt

SEQ ID NO: 169069 - DNA, 30 bp, Artificial Sequence
  Synthetic oligonucleotide
cagccaacgctaggatatggggacgctttt

SEQ ID NO: 169070 - DNA, 30 bp, Artificial Sequence
  Synthetic oligonucleotide
aggtgatagggggacatcgtccaggctttt

SEQ ID NO: 169071 - DNA, 30 bp, Artificial Sequence
  Synthetic oligonucleotide
gtagggctagtagcgaagaaacgggctttt

SEQ ID NO: 169072 - DNA, 30 bp, Artificial Sequence
  Synthetic oligonucleotide
agtgagcagactgtgtggcgagaatctttt

SEQ ID NO: 169073 - DNA, 30 bp, Artificial Sequence
  Synthetic oligonucleotide
ctgctcaggtgtgcaaaatcagcatctttt

SEQ ID NO: 169074 - DNA, 30 bp, Artificial Sequence
  Synthetic oligonucleotide
actaatgtgcgaacttcagcgagatctttt

SEQ ID NO: 169075 - DNA, 30 bp, Artificial Sequence
  Synthetic oligonucleotide
cacaatactaagactggggataactctttt

SEQ ID NO: 169076 - DNA, 30 bp, Artificial Sequence
  Synthetic oligonucleotide
ctaaggaatggttatcttctaagctctttt

SEQ ID NO: 169077 - DNA, 30 bp, Artificial Sequence
  Synthetic oligonucleotide
agaagaggcaaacttgattaacaaagtttt

SEQ ID NO: 169078 - DNA, 30 bp, Artificial Sequence
  Synthetic oligonucleotide
acttacgcataggtgcgctgcgaaagtttt

SEQ ID NO: 169079 - DNA, 30 bp, Artificial Sequence
  Synthetic oligonucleotide
tggggcagaggaccaagtggatgaagtttt

SEQ ID NO: 169080 - DNA, 30 bp, Artificial Sequence
  Synthetic oligonucleotide
tagactgtttagaaccgaccccagagtttt

SEQ ID NO: 169081 - DNA, 30 bp, Artificial Sequence
  Synthetic oligonucleotide
gtactcgggactaggtttcggtagagtttt

SEQ ID NO: 169082 - DNA, 30 bp, Artificial Sequence
  Synthetic oligonucleotide
aacagtgttctaacgggaatacctagtttt

SEQ ID NO: 169083 - DNA, 31 bp, Artificial Sequence
  Synthetic oligonucleotide
ggaaatattggacctgtcggctcgccgtttt

SEQ ID NO: 169084 - DNA, 30 bp, Artificial Sequence
  Synthetic oligonucleotide
atatgaatccagaaaggaggagagcgtttt

SEQ ID NO: 169085 - DNA, 30 bp, Artificial Sequence
  Synthetic oligonucleotide
tcgtccgacctacaggtggtgctgcgtttt

SEQ ID NO: 169086 - DNA, 30 bp, Artificial Sequence
  Synthetic oligonucleotide
atgggatagcatcgaaaagcttaaggtttt

SEQ ID NO: 169087 - DNA, 30 bp, Artificial Sequence
  Synthetic oligonucleotide
cgtaacagatgaataactgaaactattttt

SEQ ID NO: 169088 - DNA, 30 bp, Artificial Sequence
  Synthetic oligonucleotide
caccgccgttcagcacttggaactattttt

SEQ ID NO: 169089 - DNA, 30 bp, Artificial Sequence
  Synthetic oligonucleotide
ctgtggagatcctcatctggagcacttttt

SEQ ID NO: 169090 - DNA, 30 bp, Artificial Sequence
  Synthetic oligonucleotide
taggggcaacgtgccatgctatcccttttt

SEQ ID NO: 169091 - DNA, 30 bp, Artificial Sequence
  Synthetic oligonucleotide
ccaagcacaatgtacttcggatagcttttt

SEQ ID NO: 169092 - DNA, 30 bp, Artificial Sequence
  Synthetic oligonucleotide
cgaggttgggcgccaacgtttggggttttt

SEQ ID NO: 169093 - DNA, 30 bp, Artificial Sequence
  Synthetic oligonucleotide
ctaagatgcatgccggaacgaggaaaaaaa

SEQ ID NO: 169094 - DNA, 30 bp, Artificial Sequence
  Synthetic oligonucleotide
agttaggacgagggcgtaacccgcaaaaaa

SEQ ID NO: 169095 - DNA, 30 bp, Artificial Sequence
  Synthetic oligonucleotide
agagcatgttctttagcatcaacgaaaaaa

SEQ ID NO: 169096 - DNA, 30 bp, Artificial Sequence
  Synthetic oligonucleotide
agaagggaagcgcgttaggccgtgaaaaaa

SEQ ID NO: 169097 - DNA, 30 bp, Artificial Sequence
  Synthetic oligonucleotide
ccgacttaatcggctgggtcgcaacaaaaa

SEQ ID NO: 169098 - DNA, 30 bp, Artificial Sequence
  Synthetic oligonucleotide
aacagtgccgggttcgtaagcccacaaaaa

SEQ ID NO: 169099 - DNA, 30 bp, Artificial Sequence
  Synthetic oligonucleotide
tcagtgtcttgtgaatcgtgtggccaaaaa

SEQ ID NO: 169100 - DNA, 30 bp, Artificial Sequence
  Synthetic oligonucleotide
tcatagaatgctcaagtctcagagcaaaaa

SEQ ID NO: 169101 - DNA, 30 bp, Artificial Sequence
  Synthetic oligonucleotide
tcaaacgggaacaggtgctgcatgcaaaaa

SEQ ID NO: 169102 - DNA, 30 bp, Artificial Sequence
  Synthetic oligonucleotide
tcaaaaaagatcttgaaacgaactcaaaaa

SEQ ID NO: 169103 - DNA, 30 bp, Artificial Sequence
  Synthetic oligonucleotide
agcactatatactatactaagattcaaaaa

SEQ ID NO: 169104 - DNA, 30 bp, Artificial Sequence
  Synthetic oligonucleotide
aaggatctagtcaggccagaaagcgaaaaa

SEQ ID NO: 169105 - DNA, 30 bp, Artificial Sequence
  Synthetic oligonucleotide
aacagagagatattctatgtataggaaaaa

SEQ ID NO: 169106 - DNA, 30 bp, Artificial Sequence
  Synthetic oligonucleotide
taccgtataagctacggggcggttgaaaaa

SEQ ID NO: 169107 - DNA, 31 bp, Artificial Sequence
  Synthetic oligonucleotide
gtaagagctcaggtcgtgataagactaaaaa

SEQ ID NO: 169108 - DNA, 30 bp, Artificial Sequence
  Synthetic oligonucleotide
tgtgaggctgcgcaaattgtgccctaaaaa

SEQ ID NO: 169109 - DNA, 31 bp, Artificial Sequence
  Synthetic oligonucleotide
agctttcagtaatttgtgcgaatcctaaaaa

SEQ ID NO: 169110 - DNA, 30 bp, Artificial Sequence
  Synthetic oligonucleotide
atcaacgggtcagtttggaagatctaaaaa

SEQ ID NO: 169111 - DNA, 30 bp, Artificial Sequence
  Synthetic oligonucleotide
cgtactcaaatccgagtgaccatgtaaaaa

SEQ ID NO: 169112 - DNA, 30 bp, Artificial Sequence
  Synthetic oligonucleotide
cgaattggtgaccgctccacactgtaaaaa

SEQ ID NO: 169113 - DNA, 30 bp, Artificial Sequence
  Synthetic oligonucleotide
cgtccgtgttggctatctcttaaaacaaaa

SEQ ID NO: 169114 - DNA, 30 bp, Artificial Sequence
  Synthetic oligonucleotide
ttggcccatgccggggatgtgagaacaaaa

SEQ ID NO: 169115 - DNA, 30 bp, Artificial Sequence
  Synthetic oligonucleotide
tagaagttaaccttaagaacaaggacaaaa

SEQ ID NO: 169116 - DNA, 30 bp, Artificial Sequence
  Synthetic oligonucleotide
tcggcgagggagcccactcgacatacaaaa

SEQ ID NO: 169117 - DNA, 30 bp, Artificial Sequence
  Synthetic oligonucleotide
ataatctattccctgtttcgacctacaaaa

SEQ ID NO: 169118 - DNA, 30 bp, Artificial Sequence
  Synthetic oligonucleotide
tgatggtgacatgcagtgactggtacaaaa

SEQ ID NO: 169119 - DNA, 30 bp, Artificial Sequence
  Synthetic oligonucleotide
gtgccgtaaaatgcctagtagtgtacaaaa

SEQ ID NO: 169120 - DNA, 30 bp, Artificial Sequence
  Synthetic oligonucleotide
ccaattccacccctccactaggggccaaaa

SEQ ID NO: 169121 - DNA, 30 bp, Artificial Sequence
  Synthetic oligonucleotide
gggctatctgccaaacgcgagtacgcaaaa

SEQ ID NO: 169122 - DNA, 30 bp, Artificial Sequence
  Synthetic oligonucleotide
ccagggggctttgaggcacctacttcaaaa

SEQ ID NO: 169123 - DNA, 30 bp, Artificial Sequence
  Synthetic oligonucleotide
cagactggttaccgttaacgacaaagaaaa

SEQ ID NO: 169124 - DNA, 30 bp, Artificial Sequence
  Synthetic oligonucleotide
ctatcgaaagccgccctccttcaacgaaaa

SEQ ID NO: 169125 - DNA, 29 bp, Artificial Sequence
  Synthetic oligonucleotide
aaatcccttaagtggaccacccacgaaaa

SEQ ID NO: 169126 - DNA, 30 bp, Artificial Sequence
  Synthetic oligonucleotide
aatgcactcgtggacatttagaaccgaaaa

SEQ ID NO: 169127 - DNA, 30 bp, Artificial Sequence
  Synthetic oligonucleotide
tgcccgaaaaatccatttgatctccgaaaa

SEQ ID NO: 169128 - DNA, 30 bp, Artificial Sequence
  Synthetic oligonucleotide
gtctagagactcacatctagggtccgaaaa

SEQ ID NO: 169129 - DNA, 30 bp, Artificial Sequence
  Synthetic oligonucleotide
cgggggaccaccagttgaatgttccgaaaa

SEQ ID NO: 169130 - DNA, 31 bp, Artificial Sequence
  Synthetic oligonucleotide
aatagaaggagtggcgtagtatccgcgaaaa

SEQ ID NO: 169131 - DNA, 30 bp, Artificial Sequence
  Synthetic oligonucleotide
ctcataatcaggggcgaacttgtgcgaaaa

SEQ ID NO: 169132 - DNA, 30 bp, Artificial Sequence
  Synthetic oligonucleotide
gtgcgcggggaaggagttatggatcgaaaa

SEQ ID NO: 169133 - DNA, 30 bp, Artificial Sequence
  Synthetic oligonucleotide
cgacctacggcagatgtccgttacggaaaa

SEQ ID NO: 169134 - DNA, 31 bp, Artificial Sequence
  Synthetic oligonucleotide
ggtagcattagcaatcaccttaacgggaaaa

SEQ ID NO: 169135 - DNA, 30 bp, Artificial Sequence
  Synthetic oligonucleotide
aataataggcgatacttacaaatgggaaaa

SEQ ID NO: 169136 - DNA, 30 bp, Artificial Sequence
  Synthetic oligonucleotide
caaaaaaaaaataccccgttaccctgaaaa

SEQ ID NO: 169137 - DNA, 30 bp, Artificial Sequence
  Synthetic oligonucleotide
cgaatatacagttggctattcatctgaaaa

SEQ ID NO: 169138 - DNA, 30 bp, Artificial Sequence
  Synthetic oligonucleotide
ccaattggaaataggggctcagtctgaaaa

SEQ ID NO: 169139 - DNA, 30 bp, Artificial Sequence
  Synthetic oligonucleotide
tcacttaagcactttctctgttggtgaaaa

SEQ ID NO: 169140 - DNA, 30 bp, Artificial Sequence
  Synthetic oligonucleotide
ttgtgtgaggacacacgcaattattgaaaa

SEQ ID NO: 169141 - DNA, 30 bp, Artificial Sequence
  Synthetic oligonucleotide
gatcgtcgggaatttcagcacagttgaaaa

SEQ ID NO: 169142 - DNA, 30 bp, Artificial Sequence
  Synthetic oligonucleotide
tctctacggtgaaaaggataacgttgaaaa

SEQ ID NO: 169143 - DNA, 30 bp, Artificial Sequence
  Synthetic oligonucleotide
tcagtgcgcgggaatcgagtccaaataaaa

SEQ ID NO: 169144 - DNA, 30 bp, Artificial Sequence
  Synthetic oligonucleotide
tgaccaaacagtcgactcctgagaataaaa

SEQ ID NO: 169145 - DNA, 30 bp, Artificial Sequence
  Synthetic oligonucleotide
ggttcgctgatgctaagggaatgaataaaa

SEQ ID NO: 169146 - DNA, 30 bp, Artificial Sequence
  Synthetic oligonucleotide
ctagtcgaggcccttgcgatatgcataaaa

SEQ ID NO: 169147 - DNA, 30 bp, Artificial Sequence
  Synthetic oligonucleotide
cagtgaatgatcgaggtagtcttcataaaa

SEQ ID NO: 169148 - DNA, 30 bp, Artificial Sequence
  Synthetic oligonucleotide
gcccgctttacaagccgataggggataaaa

SEQ ID NO: 169149 - DNA, 30 bp, Artificial Sequence
  Synthetic oligonucleotide
gataaggaagtctagctcatcaatataaaa

SEQ ID NO: 169150 - DNA, 30 bp, Artificial Sequence
  Synthetic oligonucleotide
acattctacgggcgagcctcaactataaaa

SEQ ID NO: 169151 - DNA, 30 bp, Artificial Sequence
  Synthetic oligonucleotide
tacagacctagatagggatgagcactaaaa

SEQ ID NO: 169152 - DNA, 30 bp, Artificial Sequence
  Synthetic oligonucleotide
aagccgaatgcaccctgggtattcctaaaa

SEQ ID NO: 169153 - DNA, 30 bp, Artificial Sequence
  Synthetic oligonucleotide
aactagaaatcctcccctgtaaagctaaaa

SEQ ID NO: 169154 - DNA, 30 bp, Artificial Sequence
  Synthetic oligonucleotide
caggtaacgtaagtcagtcgcgcgctaaaa

SEQ ID NO: 169155 - DNA, 30 bp, Artificial Sequence
  Synthetic oligonucleotide
aggtagttacttggctggtgttcgctaaaa

SEQ ID NO: 169156 - DNA, 30 bp, Artificial Sequence
  Synthetic oligonucleotide
ttattaaaacggaatacggagacagtaaaa

SEQ ID NO: 169157 - DNA, 30 bp, Artificial Sequence
  Synthetic oligonucleotide
cggagaaatgtttggcatcctgcagtaaaa

SEQ ID NO: 169158 - DNA, 30 bp, Artificial Sequence
  Synthetic oligonucleotide
tagtgggaagagactactcatcacgtaaaa

SEQ ID NO: 169159 - DNA, 30 bp, Artificial Sequence
  Synthetic oligonucleotide
acgtagatttcaggtctggtctccgtaaaa

SEQ ID NO: 169160 - DNA, 30 bp, Artificial Sequence
  Synthetic oligonucleotide
acgggatttagttaacagtcctgcgtaaaa

SEQ ID NO: 169161 - DNA, 30 bp, Artificial Sequence
  Synthetic oligonucleotide
agtgatgaagtcgtgtattgactcgtaaaa

SEQ ID NO: 169162 - DNA, 30 bp, Artificial Sequence
  Synthetic oligonucleotide
gaggtcgatgcaccgtgctgcaaggtaaaa

SEQ ID NO: 169163 - DNA, 30 bp, Artificial Sequence
  Synthetic oligonucleotide
atccagctaatgctgcgggatgcggtaaaa

SEQ ID NO: 169164 - DNA, 30 bp, Artificial Sequence
  Synthetic oligonucleotide
atagcaaaacacactggggggcgtgtaaaa

SEQ ID NO: 169165 - DNA, 30 bp, Artificial Sequence
  Synthetic oligonucleotide
gatccgggccaagaggatggctttgtaaaa

SEQ ID NO: 169166 - DNA, 30 bp, Artificial Sequence
  Synthetic oligonucleotide
gacaaggctatccgagtgatactattaaaa

SEQ ID NO: 169167 - DNA, 30 bp, Artificial Sequence
  Synthetic oligonucleotide
aggattaagtcgcctatatcgttcttaaaa

SEQ ID NO: 169168 - DNA, 30 bp, Artificial Sequence
  Synthetic oligonucleotide
tatgatgcatcaagaggtattaggttaaaa

SEQ ID NO: 169169 - DNA, 30 bp, Artificial Sequence
  Synthetic oligonucleotide
ttgtggcatgataattagagtgtgttaaaa

SEQ ID NO: 169170 - DNA, 30 bp, Artificial Sequence
  Synthetic oligonucleotide
taatgttcgaaattcgagactgcaaacaaa

SEQ ID NO: 169171 - DNA, 30 bp, Artificial Sequence
  Synthetic oligonucleotide
aagggctattaccagtggccaagaaacaaa

SEQ ID NO: 169172 - DNA, 30 bp, Artificial Sequence
  Synthetic oligonucleotide
ttgcgatgtacgtatagaaaatcgaacaaa

SEQ ID NO: 169173 - DNA, 30 bp, Artificial Sequence
  Synthetic oligonucleotide
gacggtcggggttccatttgaacacacaaa

SEQ ID NO: 169174 - DNA, 30 bp, Artificial Sequence
  Synthetic oligonucleotide
ttagttgtggtcatgaacctcgcacacaaa

SEQ ID NO: 169175 - DNA, 30 bp, Artificial Sequence
  Synthetic oligonucleotide
gtataggtgttctcggagacatgacacaaa

SEQ ID NO: 169176 - DNA, 30 bp, Artificial Sequence
  Synthetic oligonucleotide
agtgcgcatcttcgtcctgagtgacacaaa

SEQ ID NO: 169177 - DNA, 30 bp, Artificial Sequence
  Synthetic oligonucleotide
aatctgagcgccgtgcgaggtgaccacaaa

SEQ ID NO: 169178 - DNA, 30 bp, Artificial Sequence
  Synthetic oligonucleotide
cggttgcatgtgggccataactggcacaaa

SEQ ID NO: 169179 - DNA, 30 bp, Artificial Sequence
  Synthetic oligonucleotide
cacactggtacacgacagtatacagacaaa

SEQ ID NO: 169180 - DNA, 30 bp, Artificial Sequence
  Synthetic oligonucleotide
tctcccgaaggcattaggacgatcgacaaa

SEQ ID NO: 169181 - DNA, 30 bp, Artificial Sequence
  Synthetic oligonucleotide
acagggtctaatggaacacatatcgacaaa

SEQ ID NO: 169182 - DNA, 30 bp, Artificial Sequence
  Synthetic oligonucleotide
gagggccagcgacagccagacacatacaaa

SEQ ID NO: 169183 - DNA, 30 bp, Artificial Sequence
  Synthetic oligonucleotide
ctccataagagcctccccgtcgtatacaaa

SEQ ID NO: 169184 - DNA, 30 bp, Artificial Sequence
  Synthetic oligonucleotide
aaagacacgcatcaattggtgcgctacaaa

SEQ ID NO: 169185 - DNA, 30 bp, Artificial Sequence
  Synthetic oligonucleotide
agtttggtgtcgcacgtacaacagtacaaa

SEQ ID NO: 169186 - DNA, 30 bp, Artificial Sequence
  Synthetic oligonucleotide
gccgggtgctagaacagttgacagtacaaa

SEQ ID NO: 169187 - DNA, 30 bp, Artificial Sequence
  Synthetic oligonucleotide
caatagaaaggtcatcagaccaaaaccaaa

SEQ ID NO: 169188 - DNA, 30 bp, Artificial Sequence
  Synthetic oligonucleotide
tgacgagcggagtgccgtaggcgcaccaaa

SEQ ID NO: 169189 - DNA, 30 bp, Artificial Sequence
  Synthetic oligonucleotide
tgtggtggcttgggcacaacccctaccaaa

SEQ ID NO: 169190 - DNA, 30 bp, Artificial Sequence
  Synthetic oligonucleotide
aaacgtgtgtagaaatggccaagacccaaa

SEQ ID NO: 169191 - DNA, 30 bp, Artificial Sequence
  Synthetic oligonucleotide
ttaaggagtagtgggcggcaccaccccaaa

SEQ ID NO: 169192 - DNA, 30 bp, Artificial Sequence
  Synthetic oligonucleotide
acgcacctgcaggctggcctagaagccaaa

SEQ ID NO: 169193 - DNA, 30 bp, Artificial Sequence
  Synthetic oligonucleotide
gaggcttttaataggtcaaatctagccaaa

SEQ ID NO: 169194 - DNA, 30 bp, Artificial Sequence
  Synthetic oligonucleotide
cacggcaagggcggccgttcaaacgccaaa

SEQ ID NO: 169195 - DNA, 30 bp, Artificial Sequence
  Synthetic oligonucleotide
atgcccagtgtccgattgcggtccgccaaa

SEQ ID NO: 169196 - DNA, 30 bp, Artificial Sequence
  Synthetic oligonucleotide
cctactaaggaggcgcgcatgtcggccaaa

SEQ ID NO: 169197 - DNA, 30 bp, Artificial Sequence
  Synthetic oligonucleotide
agctttctagggtgggttacttaatccaaa

SEQ ID NO: 169198 - DNA, 30 bp, Artificial Sequence
  Synthetic oligonucleotide
cattaattatggaattctatcttatccaaa

SEQ ID NO: 169199 - DNA, 30 bp, Artificial Sequence
  Synthetic oligonucleotide
ccacaagaagcgttaataggcatctccaaa

SEQ ID NO: 169200 - DNA, 30 bp, Artificial Sequence
  Synthetic oligonucleotide
cggaacgggggtgattaggactcgtccaaa

SEQ ID NO: 169201 - DNA, 30 bp, Artificial Sequence
  Synthetic oligonucleotide
cagaatcacctgcataaagatccaagcaaa

SEQ ID NO: 169202 - DNA, 30 bp, Artificial Sequence
  Synthetic oligonucleotide
acgccctatttatcaggggggataagcaaa

SEQ ID NO: 169203 - DNA, 30 bp, Artificial Sequence
  Synthetic oligonucleotide
taggtaaaaaacagatctcatacgagcaaa

SEQ ID NO: 169204 - DNA, 30 bp, Artificial Sequence
  Synthetic oligonucleotide
tgatcagatggtagccggcgtcgtagcaaa

SEQ ID NO: 169205 - DNA, 30 bp, Artificial Sequence
  Synthetic oligonucleotide
gggacccccagtgtagcccgctgtagcaaa

SEQ ID NO: 169206 - DNA, 31 bp, Artificial Sequence
  Synthetic oligonucleotide
cagtggttgttcgctcacgctcccgcgcaaa

SEQ ID NO: 169207 - DNA, 30 bp, Artificial Sequence
  Synthetic oligonucleotide
acggctcactcacatgacggacgtcgcaaa

SEQ ID NO: 169208 - DNA, 30 bp, Artificial Sequence
  Synthetic oligonucleotide
aaaaagttcaagatcagagtgattcgcaaa

SEQ ID NO: 169209 - DNA, 30 bp, Artificial Sequence
  Synthetic oligonucleotide
tatgtggagtgtgtgtcgccggttcgcaaa

SEQ ID NO: 169210 - DNA, 30 bp, Artificial Sequence
  Synthetic oligonucleotide
agacggaggatgtcataactcacaggcaaa

SEQ ID NO: 169211 - DNA, 30 bp, Artificial Sequence
  Synthetic oligonucleotide
cccggtaccattaacaatccgacaggcaaa

SEQ ID NO: 169212 - DNA, 30 bp, Artificial Sequence
  Synthetic oligonucleotide
tcggagaatttaggattagcaccaggcaaa

SEQ ID NO: 169213 - DNA, 30 bp, Artificial Sequence
  Synthetic oligonucleotide
tcatgtttccgactttccacgctaggcaaa

SEQ ID NO: 169214 - DNA, 30 bp, Artificial Sequence
  Synthetic oligonucleotide
acagaatacacaccaattgactccggcaaa

SEQ ID NO: 169215 - DNA, 30 bp, Artificial Sequence
  Synthetic oligonucleotide
gaagtttgtacgacgagacagtggggcaaa

SEQ ID NO: 169216 - DNA, 31 bp, Artificial Sequence
  Synthetic oligonucleotide
caggttcggtagcctatggtactgctgcaaa

SEQ ID NO: 169217 - DNA, 30 bp, Artificial Sequence
  Synthetic oligonucleotide
tgttatagggaaggtgggtaggcttgcaaa

SEQ ID NO: 169218 - DNA, 30 bp, Artificial Sequence
  Synthetic oligonucleotide
cacctggtgtggggatcatctgcaatcaaa

SEQ ID NO: 169219 - DNA, 30 bp, Artificial Sequence
  Synthetic oligonucleotide
cggtcttgcaccgggcctcaaagcatcaaa

SEQ ID NO: 169220 - DNA, 30 bp, Artificial Sequence
  Synthetic oligonucleotide
cgcagcccggaattctgcttaactatcaaa

SEQ ID NO: 169221 - DNA, 30 bp, Artificial Sequence
  Synthetic oligonucleotide
acctcgcgcgcgcgtagttggggtatcaaa

SEQ ID NO: 169222 - DNA, 30 bp, Artificial Sequence
  Synthetic oligonucleotide
gctcgtcatatcgggatctactaactcaaa

SEQ ID NO: 169223 - DNA, 30 bp, Artificial Sequence
  Synthetic oligonucleotide
ctggttcccagtggtagcgtacacctcaaa

SEQ ID NO: 169224 - DNA, 30 bp, Artificial Sequence
  Synthetic oligonucleotide
accgaactagtaacgtaaagcgggctcaaa

SEQ ID NO: 169225 - DNA, 30 bp, Artificial Sequence
  Synthetic oligonucleotide
atagacccacacaggtacacccgtctcaaa

SEQ ID NO: 169226 - DNA, 30 bp, Artificial Sequence
  Synthetic oligonucleotide
acgcaaactccacttaaatgcagagtcaaa

SEQ ID NO: 169227 - DNA, 30 bp, Artificial Sequence
  Synthetic oligonucleotide
gacttgaacaatcgtattagactggtcaaa

SEQ ID NO: 169228 - DNA, 30 bp, Artificial Sequence
  Synthetic oligonucleotide
tagtttcgcgtccatcgtccccaattcaaa

SEQ ID NO: 169229 - DNA, 30 bp, Artificial Sequence
  Synthetic oligonucleotide
gcagtacggggcggtaggggcactttcaaa

SEQ ID NO: 169230 - DNA, 30 bp, Artificial Sequence
  Synthetic oligonucleotide
ggacctggtaagtatccagcaaaaaagaaa

SEQ ID NO: 169231 - DNA, 30 bp, Artificial Sequence
  Synthetic oligonucleotide
ctggattagcgaacgcgagttgcaaagaaa

SEQ ID NO: 169232 - DNA, 30 bp, Artificial Sequence
  Synthetic oligonucleotide
agtgcctgttcgttgggtgttgtaaagaaa

SEQ ID NO: 169233 - DNA, 30 bp, Artificial Sequence
  Synthetic oligonucleotide
tcccgagaacacacggacggggtcaagaaa

SEQ ID NO: 169234 - DNA, 30 bp, Artificial Sequence
  Synthetic oligonucleotide
tcacgtgtgtaaatgacacttgagaagaaa

SEQ ID NO: 169235 - DNA, 31 bp, Artificial Sequence
  Synthetic oligonucleotide
aaagcccacatctaaaacataaatgaagaaa

SEQ ID NO: 169236 - DNA, 30 bp, Artificial Sequence
  Synthetic oligonucleotide
cacacatgccgccgcgcgcgggataagaaa

SEQ ID NO: 169237 - DNA, 30 bp, Artificial Sequence
  Synthetic oligonucleotide
cggtattagcggggggctcagactaagaaa

SEQ ID NO: 169238 - DNA, 30 bp, Artificial Sequence
  Synthetic oligonucleotide
gtacttccccttaggtgacggcgtaagaaa

SEQ ID NO: 169239 - DNA, 30 bp, Artificial Sequence
  Synthetic oligonucleotide
cgtacatcgacgaagtaccgacaacagaaa

SEQ ID NO: 169240 - DNA, 30 bp, Artificial Sequence
  Synthetic oligonucleotide
tggcaggcccatgcgttgcagagacagaaa

SEQ ID NO: 169241 - DNA, 30 bp, Artificial Sequence
  Synthetic oligonucleotide
tatggaaccgcgtccatcaggcaccagaaa

SEQ ID NO: 169242 - DNA, 30 bp, Artificial Sequence
  Synthetic oligonucleotide
agtgcccactaaaaccaaagttagcagaaa

SEQ ID NO: 169243 - DNA, 30 bp, Artificial Sequence
  Synthetic oligonucleotide
acaatgaagcgctggttagctgggcagaaa

SEQ ID NO: 169244 - DNA, 30 bp, Artificial Sequence
  Synthetic oligonucleotide
tcattactgagagctgcgataaatcagaaa

SEQ ID NO: 169245 - DNA, 30 bp, Artificial Sequence
  Synthetic oligonucleotide
agacgttaacgagcggaaactaatcagaaa

SEQ ID NO: 169246 - DNA, 30 bp, Artificial Sequence
  Synthetic oligonucleotide
gatgtagccgtcattgacaagtcagagaaa

SEQ ID NO: 169247 - DNA, 30 bp, Artificial Sequence
  Synthetic oligonucleotide
ttatgcctccgatccataggaagcgagaaa

SEQ ID NO: 169248 - DNA, 30 bp, Artificial Sequence
  Synthetic oligonucleotide
acggccgaactattgggattcgaggagaaa

SEQ ID NO: 169249 - DNA, 30 bp, Artificial Sequence
  Synthetic oligonucleotide
ttcataatcggttgactgcgctcggagaaa

SEQ ID NO: 169250 - DNA, 30 bp, Artificial Sequence
  Synthetic oligonucleotide
gtaaagctaggttgtacaccaaatgagaaa

SEQ ID NO: 169251 - DNA, 30 bp, Artificial Sequence
  Synthetic oligonucleotide
tggcatcgtcaaaacgtgtggactgagaaa

SEQ ID NO: 169252 - DNA, 30 bp, Artificial Sequence
  Synthetic oligonucleotide
ctccggtacggctagcttggagctgagaaa

SEQ ID NO: 169253 - DNA, 30 bp, Artificial Sequence
  Synthetic oligonucleotide
cgtaccattcacggcaggtatagtgagaaa

SEQ ID NO: 169254 - DNA, 30 bp, Artificial Sequence
  Synthetic oligonucleotide
tgcaacctggccaagtaaatcagatagaaa

SEQ ID NO: 169255 - DNA, 30 bp, Artificial Sequence
  Synthetic oligonucleotide
tcctggtagagcgctcgtaggaactagaaa

SEQ ID NO: 169256 - DNA, 30 bp, Artificial Sequence
  Synthetic oligonucleotide
ctaggtacaaagatgaggggaatgtagaaa

SEQ ID NO: 169257 - DNA, 30 bp, Artificial Sequence
  Synthetic oligonucleotide
tcttgtacaaataagcggctacattagaaa

SEQ ID NO: 169258 - DNA, 30 bp, Artificial Sequence
  Synthetic oligonucleotide
gaaaagctgcctccgttatcggcttagaaa

SEQ ID NO: 169259 - DNA, 30 bp, Artificial Sequence
  Synthetic oligonucleotide
gttcgtaaaagccagccgcatgtttagaaa

SEQ ID NO: 169260 - DNA, 30 bp, Artificial Sequence
  Synthetic oligonucleotide
catggtatacagaggcccaattaaacgaaa

SEQ ID NO: 169261 - DNA, 30 bp, Artificial Sequence
  Synthetic oligonucleotide
aaatagggggggggtcgaagattcacgaaa

SEQ ID NO: 169262 - DNA, 30 bp, Artificial Sequence
  Synthetic oligonucleotide
acgcaccagtgctcattgcagaagacgaaa

SEQ ID NO: 169263 - DNA, 30 bp, Artificial Sequence
  Synthetic oligonucleotide
agaaaattgctcaagatactcgcgacgaaa

SEQ ID NO: 169264 - DNA, 30 bp, Artificial Sequence
  Synthetic oligonucleotide
aacacgtacaaccggtgggataggacgaaa

SEQ ID NO: 169265 - DNA, 30 bp, Artificial Sequence
  Synthetic oligonucleotide
acgagtctcatttaaaattgtagaccgaaa

SEQ ID NO: 169266 - DNA, 30 bp, Artificial Sequence
  Synthetic oligonucleotide
ctggcatattgtacgagctcatccccgaaa

SEQ ID NO: 169267 - DNA, 30 bp, Artificial Sequence
  Synthetic oligonucleotide
tatctggccgtaaggaagaagcgcccgaaa

SEQ ID NO: 169268 - DNA, 30 bp, Artificial Sequence
  Synthetic oligonucleotide
aatcttcagggtgacaacatccatccgaaa

SEQ ID NO: 169269 - DNA, 30 bp, Artificial Sequence
  Synthetic oligonucleotide
ccctactatgacatacaaccggttccgaaa

SEQ ID NO: 169270 - DNA, 30 bp, Artificial Sequence
  Synthetic oligonucleotide
taacgagtagtcaatccagacttcgcgaaa

SEQ ID NO: 169271 - DNA, 30 bp, Artificial Sequence
  Synthetic oligonucleotide
cggctcagtcgtggaagatccagggcgaaa

SEQ ID NO: 169272 - DNA, 30 bp, Artificial Sequence
  Synthetic oligonucleotide
gcaatatattcaacggaagttcatgcgaaa

SEQ ID NO: 169273 - DNA, 30 bp, Artificial Sequence
  Synthetic oligonucleotide
ccgagcttacggctgaacaagtcctcgaaa

SEQ ID NO: 169274 - DNA, 30 bp, Artificial Sequence
  Synthetic oligonucleotide
ccctgaggcagtcttgaaatcctgtcgaaa

SEQ ID NO: 169275 - DNA, 30 bp, Artificial Sequence
  Synthetic oligonucleotide
tacgtcgttcagtgttgtccattgtcgaaa

SEQ ID NO: 169276 - DNA, 30 bp, Artificial Sequence
  Synthetic oligonucleotide
ccaacgaatccacagtgtaatataaggaaa

SEQ ID NO: 169277 - DNA, 30 bp, Artificial Sequence
  Synthetic oligonucleotide
tcgagcgttggtctacatcgtaacaggaaa

SEQ ID NO: 169278 - DNA, 30 bp, Artificial Sequence
  Synthetic oligonucleotide
actcggtaggggattatgtcttccaggaaa

SEQ ID NO: 169279 - DNA, 30 bp, Artificial Sequence
  Synthetic oligonucleotide
actcgagtatcaggcattagctgcaggaaa

SEQ ID NO: 169280 - DNA, 30 bp, Artificial Sequence
  Synthetic oligonucleotide
gccaagagatacaacattatttgcaggaaa

SEQ ID NO: 169281 - DNA, 30 bp, Artificial Sequence
  Synthetic oligonucleotide
catgcccgtgaaaaataaaggttcaggaaa

SEQ ID NO: 169282 - DNA, 30 bp, Artificial Sequence
  Synthetic oligonucleotide
caccgcgtttagtgaggataaaggaggaaa

SEQ ID NO: 169283 - DNA, 30 bp, Artificial Sequence
  Synthetic oligonucleotide
ggttcgtatcagaacatcgctgttaggaaa

SEQ ID NO: 169284 - DNA, 30 bp, Artificial Sequence
  Synthetic oligonucleotide
cgctctaacgtgaaagattaggttcggaaa

SEQ ID NO: 169285 - DNA, 30 bp, Artificial Sequence
  Synthetic oligonucleotide
aaggtgacaagaccgcatttgcaagggaaa

SEQ ID NO: 169286 - DNA, 30 bp, Artificial Sequence
  Synthetic oligonucleotide
gtcaaacccacccgtaggataccagggaaa

SEQ ID NO: 169287 - DNA, 30 bp, Artificial Sequence
  Synthetic oligonucleotide
gtcaggtctagactagcctgtgacgggaaa

SEQ ID NO: 169288 - DNA, 30 bp, Artificial Sequence
  Synthetic oligonucleotide
ggggctacagcagcatctggatccgggaaa

SEQ ID NO: 169289 - DNA, 30 bp, Artificial Sequence
  Synthetic oligonucleotide
tggtgtgtcagcctttcgaggtaggggaaa

SEQ ID NO: 169290 - DNA, 30 bp, Artificial Sequence
  Synthetic oligonucleotide
tcgcagagattgcgcctatagtcggggaaa

SEQ ID NO: 169291 - DNA, 30 bp, Artificial Sequence
  Synthetic oligonucleotide
aattgcacgtagggcttctggatggggaaa

SEQ ID NO: 169292 - DNA, 30 bp, Artificial Sequence
  Synthetic oligonucleotide
acactgacgaaactagcggggttatggaaa

SEQ ID NO: 169293 - DNA, 30 bp, Artificial Sequence
  Synthetic oligonucleotide
tagtaaactttacttcacaaaacgtggaaa

SEQ ID NO: 169294 - DNA, 30 bp, Artificial Sequence
  Synthetic oligonucleotide
gttgctcgtcttttcgtgagcccaatgaaa

SEQ ID NO: 169295 - DNA, 30 bp, Artificial Sequence
  Synthetic oligonucleotide
gtcgtggggaaaagaccagtgataatgaaa

SEQ ID NO: 169296 - DNA, 30 bp, Artificial Sequence
  Synthetic oligonucleotide
gctggtgagagacttcctaacggcatgaaa

SEQ ID NO: 169297 - DNA, 30 bp, Artificial Sequence
  Synthetic oligonucleotide
gctgcaattcgaccatatctgctcatgaaa

SEQ ID NO: 169298 - DNA, 30 bp, Artificial Sequence
  Synthetic oligonucleotide
atactaaagtggatcgccgttaagatgaaa

SEQ ID NO: 169299 - DNA, 30 bp, Artificial Sequence
  Synthetic oligonucleotide
atgctacgagagaagggtaacctgatgaaa

SEQ ID NO: 169300 - DNA, 30 bp, Artificial Sequence
  Synthetic oligonucleotide
cgaacacaacaccccaatttttctatgaaa

SEQ ID NO: 169301 - DNA, 30 bp, Artificial Sequence
  Synthetic oligonucleotide
ttgcgccatctgagctcctgcggtatgaaa

SEQ ID NO: 169302 - DNA, 30 bp, Artificial Sequence
  Synthetic oligonucleotide
aaaagtcaaaagggtggtcaggccctgaaa

SEQ ID NO: 169303 - DNA, 30 bp, Artificial Sequence
  Synthetic oligonucleotide
atgtgagtcacgcaaatagatagcctgaaa

SEQ ID NO: 169304 - DNA, 30 bp, Artificial Sequence
  Synthetic oligonucleotide
gtccggtatcattacgttcattgcctgaaa

SEQ ID NO: 169305 - DNA, 30 bp, Artificial Sequence
  Synthetic oligonucleotide
tcaacgtctacactcacaagccctctgaaa

SEQ ID NO: 169306 - DNA, 30 bp, Artificial Sequence
  Synthetic oligonucleotide
tgctacggaagccactcgtggtccgtgaaa

SEQ ID NO: 169307 - DNA, 30 bp, Artificial Sequence
  Synthetic oligonucleotide
cgggtatcgatggcgtgctcgcaggtgaaa

SEQ ID NO: 169308 - DNA, 30 bp, Artificial Sequence
  Synthetic oligonucleotide
cagggtcggcaaagtatttgcgcggtgaaa

SEQ ID NO: 169309 - DNA, 30 bp, Artificial Sequence
  Synthetic oligonucleotide
cgctactcttatagtatcactcgattgaaa

SEQ ID NO: 169310 - DNA, 30 bp, Artificial Sequence
  Synthetic oligonucleotide
cggtatctggcggcaaaactgctattgaaa

SEQ ID NO: 169311 - DNA, 30 bp, Artificial Sequence
  Synthetic oligonucleotide
taagcgcgtggagtacaatcgaggttgaaa

SEQ ID NO: 169312 - DNA, 30 bp, Artificial Sequence
  Synthetic oligonucleotide
agaataactccgttcaaccggattttgaaa

SEQ ID NO: 169313 - DNA, 30 bp, Artificial Sequence
  Synthetic oligonucleotide
aataagacagcattgggaagttaaaataaa

SEQ ID NO: 169314 - DNA, 30 bp, Artificial Sequence
  Synthetic oligonucleotide
gctcggcatgggagcgttatgttaaataaa

SEQ ID NO: 169315 - DNA, 30 bp, Artificial Sequence
  Synthetic oligonucleotide
gccaaaacgagtagaacccttaacaataaa

SEQ ID NO: 169316 - DNA, 30 bp, Artificial Sequence
  Synthetic oligonucleotide
ggccacaggtctaaatgactatacaataaa

SEQ ID NO: 169317 - DNA, 30 bp, Artificial Sequence
  Synthetic oligonucleotide
tcacggaatgctgtagataaaagcaataaa

SEQ ID NO: 169318 - DNA, 30 bp, Artificial Sequence
  Synthetic oligonucleotide
cgcagatgtaaaacatccggagtgaataaa

SEQ ID NO: 169319 - DNA, 30 bp, Artificial Sequence
  Synthetic oligonucleotide
gtgccggcgactgcggcacgcgtgaataaa

SEQ ID NO: 169320 - DNA, 30 bp, Artificial Sequence
  Synthetic oligonucleotide
atgggctatcagaagctcgtctataataaa

SEQ ID NO: 169321 - DNA, 30 bp, Artificial Sequence
  Synthetic oligonucleotide
tcggtaaatatgtttgacagttgtaataaa

SEQ ID NO: 169322 - DNA, 30 bp, Artificial Sequence
  Synthetic oligonucleotide
cgagtattcagtcagaggatttgtaataaa

SEQ ID NO: 169323 - DNA, 30 bp, Artificial Sequence
  Synthetic oligonucleotide
tcaccccgcataaataaagcatcacataaa

SEQ ID NO: 169324 - DNA, 30 bp, Artificial Sequence
  Synthetic oligonucleotide
cgctcgtagacggggcagtgatcacataaa

SEQ ID NO: 169325 - DNA, 30 bp, Artificial Sequence
  Synthetic oligonucleotide
tcccagcgagctatgccagggagacataaa

SEQ ID NO: 169326 - DNA, 30 bp, Artificial Sequence
  Synthetic oligonucleotide
taccacggaccaacccggcatcaccataaa

SEQ ID NO: 169327 - DNA, 30 bp, Artificial Sequence
  Synthetic oligonucleotide
ttgcggccccacttgagccctgaccataaa

SEQ ID NO: 169328 - DNA, 30 bp, Artificial Sequence
  Synthetic oligonucleotide
cagtagttctacactcgggtccgccataaa

SEQ ID NO: 169329 - DNA, 30 bp, Artificial Sequence
  Synthetic oligonucleotide
tcagcaggttgcaagtgtcagcacgataaa

SEQ ID NO: 169330 - DNA, 30 bp, Artificial Sequence
  Synthetic oligonucleotide
ggctctgggtcactagcgtaggcggataaa

SEQ ID NO: 169331 - DNA, 30 bp, Artificial Sequence
  Synthetic oligonucleotide
tgtaaaatgccatacagttgaggggataaa

SEQ ID NO: 169332 - DNA, 30 bp, Artificial Sequence
  Synthetic oligonucleotide
gtagtaaccgacgtcttccagggtgataaa

SEQ ID NO: 169333 - DNA, 30 bp, Artificial Sequence
  Synthetic oligonucleotide
gaaactagaggtcgatcccggtgatataaa

SEQ ID NO: 169334 - DNA, 30 bp, Artificial Sequence
  Synthetic oligonucleotide
agcgaaattgcaccagttttcgagtataaa

SEQ ID NO: 169335 - DNA, 31 bp, Artificial Sequence
  Synthetic oligonucleotide
aggattgtgtttcttaggacggacgtataaa

SEQ ID NO: 169336 - DNA, 30 bp, Artificial Sequence
  Synthetic oligonucleotide
agagaccggattttattaagagattataaa

SEQ ID NO: 169337 - DNA, 30 bp, Artificial Sequence
  Synthetic oligonucleotide
gcggaaaatcgtagagtatcatcttataaa

SEQ ID NO: 169338 - DNA, 30 bp, Artificial Sequence
  Synthetic oligonucleotide
aaaaagcgggtaacgaataccagaactaaa

SEQ ID NO: 169339 - DNA, 30 bp, Artificial Sequence
  Synthetic oligonucleotide
taaattgcgttattgcaaccaagcactaaa

SEQ ID NO: 169340 - DNA, 30 bp, Artificial Sequence
  Synthetic oligonucleotide
aaataaataatgagacgcgagtggactaaa

SEQ ID NO: 169341 - DNA, 30 bp, Artificial Sequence
  Synthetic oligonucleotide
ctcggttgggttgtcaattggatgactaaa

SEQ ID NO: 169342 - DNA, 30 bp, Artificial Sequence
  Synthetic oligonucleotide
atggactccccgggcaatctttctactaaa

SEQ ID NO: 169343 - DNA, 30 bp, Artificial Sequence
  Synthetic oligonucleotide
gggaaccgcatatagacaagcaagcctaaa

SEQ ID NO: 169344 - DNA, 30 bp, Artificial Sequence
  Synthetic oligonucleotide
ggcacgtcgcggatgggtctctcgcctaaa

SEQ ID NO: 169345 - DNA, 30 bp, Artificial Sequence
  Synthetic oligonucleotide
catggaccgatgcgagaagcgagtcctaaa

SEQ ID NO: 169346 - DNA, 30 bp, Artificial Sequence
  Synthetic oligonucleotide
aaagagggtagtgcaaccacggaagctaaa

SEQ ID NO: 169347 - DNA, 30 bp, Artificial Sequence
  Synthetic oligonucleotide
cacaaactgtaagagaatttcaacgctaaa

SEQ ID NO: 169348 - DNA, 30 bp, Artificial Sequence
  Synthetic oligonucleotide
cggctaccccggtgcatcaattccgctaaa

SEQ ID NO: 169349 - DNA, 30 bp, Artificial Sequence
  Synthetic oligonucleotide
gatgtgcgactagacactaaaggcgctaaa

SEQ ID NO: 169350 - DNA, 30 bp, Artificial Sequence
  Synthetic oligonucleotide
aatagaaggatacgttacatgtgcgctaaa

SEQ ID NO: 169351 - DNA, 30 bp, Artificial Sequence
  Synthetic oligonucleotide
aagagacccgtacaaggaagagcggctaaa

SEQ ID NO: 169352 - DNA, 30 bp, Artificial Sequence
  Synthetic oligonucleotide
acgtcaatgagaaaacaccttttggctaaa

SEQ ID NO: 169353 - DNA, 30 bp, Artificial Sequence
  Synthetic oligonucleotide
tgcacaacccggaaagccttcaatgctaaa

SEQ ID NO: 169354 - DNA, 30 bp, Artificial Sequence
  Synthetic oligonucleotide
tatccacttgacagatatatcggtgctaaa

SEQ ID NO: 169355 - DNA, 31 bp, Artificial Sequence
  Synthetic oligonucleotide
tcacggtgatcgcatcgatgttcaatctaaa

SEQ ID NO: 169356 - DNA, 30 bp, Artificial Sequence
  Synthetic oligonucleotide
gctaaggaaccagaacctctatagtctaaa

SEQ ID NO: 169357 - DNA, 30 bp, Artificial Sequence
  Synthetic oligonucleotide
agtattggacaatgcaccccattgtctaaa

SEQ ID NO: 169358 - DNA, 30 bp, Artificial Sequence
  Synthetic oligonucleotide
gcacatatggccaatgcaaaatattctaaa

SEQ ID NO: 169359 - DNA, 30 bp, Artificial Sequence
  Synthetic oligonucleotide
ttgacagaggtgctgccatgtggttctaaa

SEQ ID NO: 169360 - DNA, 30 bp, Artificial Sequence
  Synthetic oligonucleotide
gctggggcagtacggcatgctaaaagtaaa

SEQ ID NO: 169361 - DNA, 30 bp, Artificial Sequence
  Synthetic oligonucleotide
agctttatggagcccgatctcaacagtaaa

SEQ ID NO: 169362 - DNA, 30 bp, Artificial Sequence
  Synthetic oligonucleotide
atgacgccagggatcgaaaacaccagtaaa

SEQ ID NO: 169363 - DNA, 30 bp, Artificial Sequence
  Synthetic oligonucleotide
gtgagtggtgagcgcgtctcaacgagtaaa

SEQ ID NO: 169364 - DNA, 30 bp, Artificial Sequence
  Synthetic oligonucleotide
agcggcgagaagcctcgaagcccgagtaaa

SEQ ID NO: 169365 - DNA, 30 bp, Artificial Sequence
  Synthetic oligonucleotide
actgaatgagattaccaatgggcgagtaaa

SEQ ID NO: 169366 - DNA, 30 bp, Artificial Sequence
  Synthetic oligonucleotide
ctggttataccccagtctaacaggagtaaa

SEQ ID NO: 169367 - DNA, 30 bp, Artificial Sequence
  Synthetic oligonucleotide
atttcggaaccttacaaacgagggagtaaa

SEQ ID NO: 169368 - DNA, 31 bp, Artificial Sequence
  Synthetic oligonucleotide
tcgagccttgatagcgcgttcgaatagtaaa

SEQ ID NO: 169369 - DNA, 30 bp, Artificial Sequence
  Synthetic oligonucleotide
ttcggaaaaaaatgtggagggactagtaaa

SEQ ID NO: 169370 - DNA, 30 bp, Artificial Sequence
  Synthetic oligonucleotide
gcaagtgccgtccacaaggaagaacgtaaa

SEQ ID NO: 169371 - DNA, 30 bp, Artificial Sequence
  Synthetic oligonucleotide
tgtccgggaacgtgttcttcgtgacgtaaa

SEQ ID NO: 169372 - DNA, 30 bp, Artificial Sequence
  Synthetic oligonucleotide
gcatagtagatcgactgagtgggccgtaaa

SEQ ID NO: 169373 - DNA, 30 bp, Artificial Sequence
  Synthetic oligonucleotide
caatttgaaggagagactccagagcgtaaa

SEQ ID NO: 169374 - DNA, 30 bp, Artificial Sequence
  Synthetic oligonucleotide
tgcaggaggatatcgtaaagaccgcgtaaa

SEQ ID NO: 169375 - DNA, 30 bp, Artificial Sequence
  Synthetic oligonucleotide
ttagagccggggcgtaacggactaggtaaa

SEQ ID NO: 169376 - DNA, 30 bp, Artificial Sequence
  Synthetic oligonucleotide
atgaatacgttaagcaaggtggccggtaaa

SEQ ID NO: 169377 - DNA, 31 bp, Artificial Sequence
  Synthetic oligonucleotide
tggtaaaaaaatggatagtagatcgggtaaa

SEQ ID NO: 169378 - DNA, 30 bp, Artificial Sequence
  Synthetic oligonucleotide
agtcgaataacctgtatgcatgtgggtaaa

SEQ ID NO: 169379 - DNA, 30 bp, Artificial Sequence
  Synthetic oligonucleotide
acctaaaagtgtggcaaatgtgcctgtaaa

SEQ ID NO: 169380 - DNA, 30 bp, Artificial Sequence
  Synthetic oligonucleotide
gtgatgcttaagtcagaacccacgtgtaaa

SEQ ID NO: 169381 - DNA, 30 bp, Artificial Sequence
  Synthetic oligonucleotide
ccgtcgctgagttcaggttgcataattaaa

SEQ ID NO: 169382 - DNA, 30 bp, Artificial Sequence
  Synthetic oligonucleotide
tctgtatataaagatcggcagttcattaaa

SEQ ID NO: 169383 - DNA, 30 bp, Artificial Sequence
  Synthetic oligonucleotide
tcgcgagagcgcccctctgagttcattaaa

SEQ ID NO: 169384 - DNA, 30 bp, Artificial Sequence
  Synthetic oligonucleotide
taagggatttgcaacacagtacagattaaa

SEQ ID NO: 169385 - DNA, 30 bp, Artificial Sequence
  Synthetic oligonucleotide
ctcactggtgggtaccatagctgtattaaa

SEQ ID NO: 169386 - DNA, 30 bp, Artificial Sequence
  Synthetic oligonucleotide
cgtcaccgactttagattgaaattattaaa

SEQ ID NO: 169387 - DNA, 30 bp, Artificial Sequence
  Synthetic oligonucleotide
cagttgacaagttgtgagattgttattaaa

SEQ ID NO: 169388 - DNA, 30 bp, Artificial Sequence
  Synthetic oligonucleotide
tgaacagttggtcctaagtaacctcttaaa

SEQ ID NO: 169389 - DNA, 30 bp, Artificial Sequence
  Synthetic oligonucleotide
gaagatctcctaaaggtatgagcggttaaa

SEQ ID NO: 169390 - DNA, 30 bp, Artificial Sequence
  Synthetic oligonucleotide
ggtcgtcagagcagtctgccatcggttaaa

SEQ ID NO: 169391 - DNA, 30 bp, Artificial Sequence
  Synthetic oligonucleotide
cttcaggggtgaagatcttgcagggttaaa

SEQ ID NO: 169392 - DNA, 30 bp, Artificial Sequence
  Synthetic oligonucleotide
atatgccgacgtagtaacatccatgttaaa

SEQ ID NO: 169393 - DNA, 30 bp, Artificial Sequence
  Synthetic oligonucleotide
acatagtgtcacagaccacttgatgttaaa

SEQ ID NO: 169394 - DNA, 30 bp, Artificial Sequence
  Synthetic oligonucleotide
cggcaccgcatagagctattgtttgttaaa

SEQ ID NO: 169395 - DNA, 30 bp, Artificial Sequence
  Synthetic oligonucleotide
ctgcggtaaacagagaattagccctttaaa

SEQ ID NO: 169396 - DNA, 30 bp, Artificial Sequence
  Synthetic oligonucleotide
ttcactcacataggtctcgggaccaaacaa

SEQ ID NO: 169397 - DNA, 30 bp, Artificial Sequence
  Synthetic oligonucleotide
ctgcatagacgaggttaagcaggcaaacaa

SEQ ID NO: 169398 - DNA, 30 bp, Artificial Sequence
  Synthetic oligonucleotide
agttgcggatagttcggtatgttcaaacaa

SEQ ID NO: 169399 - DNA, 30 bp, Artificial Sequence
  Synthetic oligonucleotide
acccgataaacatgtcatatatggaaacaa

SEQ ID NO: 169400 - DNA, 30 bp, Artificial Sequence
  Synthetic oligonucleotide
ctaaataaatgagtggattgtcgtaaacaa

SEQ ID NO: 169401 - DNA, 30 bp, Artificial Sequence
  Synthetic oligonucleotide
gacattggggctttcgatctcccgcaacaa

SEQ ID NO: 169402 - DNA, 30 bp, Artificial Sequence
  Synthetic oligonucleotide
gtttgtttagggaaaaaacatgggcaacaa

SEQ ID NO: 169403 - DNA, 29 bp, Artificial Sequence
  Synthetic oligonucleotide
cgcactaccagtggaagtacttgcaacaa

SEQ ID NO: 169404 - DNA, 30 bp, Artificial Sequence
  Synthetic oligonucleotide
ttggtggacattgactgatcttcagaacaa

SEQ ID NO: 169405 - DNA, 30 bp, Artificial Sequence
  Synthetic oligonucleotide
gaggtgcgtggttcatgtgcaacggaacaa

SEQ ID NO: 169406 - DNA, 30 bp, Artificial Sequence
  Synthetic oligonucleotide
ggtgtcaccagtaggtacctcacggaacaa

SEQ ID NO: 169407 - DNA, 30 bp, Artificial Sequence
  Synthetic oligonucleotide
aggggccatggttttgatgcttcggaacaa

SEQ ID NO: 169408 - DNA, 30 bp, Artificial Sequence
  Synthetic oligonucleotide
agacaaagcggttgccctctttgataacaa

SEQ ID NO: 169409 - DNA, 30 bp, Artificial Sequence
  Synthetic oligonucleotide
cgggtactcgataggcatatggtataacaa

SEQ ID NO: 169410 - DNA, 30 bp, Artificial Sequence
  Synthetic oligonucleotide
ggaggaaagggtctttcctgggattaacaa

SEQ ID NO: 169411 - DNA, 30 bp, Artificial Sequence
  Synthetic oligonucleotide
tattgagcggtgggtgtgaagggttaacaa

SEQ ID NO: 169412 - DNA, 30 bp, Artificial Sequence
  Synthetic oligonucleotide
tgtatgctagatcctaaagagtaaacacaa

SEQ ID NO: 169413 - DNA, 31 bp, Artificial Sequence
  Synthetic oligonucleotide
tcgctgctcagcagtggcaccgtcaacacaa

SEQ ID NO: 169414 - DNA, 30 bp, Artificial Sequence
  Synthetic oligonucleotide
ctacagataaaagcaatccgcaagacacaa

SEQ ID NO: 169415 - DNA, 30 bp, Artificial Sequence
  Synthetic oligonucleotide
atgtgatccttaaacattcaccagacacaa

SEQ ID NO: 169416 - DNA, 30 bp, Artificial Sequence
  Synthetic oligonucleotide
aataaacgtatatgaaagtccgatacacaa

SEQ ID NO: 169417 - DNA, 30 bp, Artificial Sequence
  Synthetic oligonucleotide
gggagtagcatattgtcaatccgaccacaa

SEQ ID NO: 169418 - DNA, 30 bp, Artificial Sequence
  Synthetic oligonucleotide
acaggatggtgagttgctttaatcccacaa

SEQ ID NO: 169419 - DNA, 30 bp, Artificial Sequence
  Synthetic oligonucleotide
cacaggtcgagtattgctcgctatccacaa

SEQ ID NO: 169420 - DNA, 30 bp, Artificial Sequence
  Synthetic oligonucleotide
cgtggattatttctgtataggacggcacaa

SEQ ID NO: 169421 - DNA, 30 bp, Artificial Sequence
  Synthetic oligonucleotide
caggaaatgctaacccagttaggggcacaa

SEQ ID NO: 169422 - DNA, 30 bp, Artificial Sequence
  Synthetic oligonucleotide
atccggggccgtgaggcgttgtgggcacaa

SEQ ID NO: 169423 - DNA, 30 bp, Artificial Sequence
  Synthetic oligonucleotide
cggcgccagcggcggatataagcatcacaa

SEQ ID NO: 169424 - DNA, 30 bp, Artificial Sequence
  Synthetic oligonucleotide
aggaaccgtccgtttagatcgggatcacaa

SEQ ID NO: 169425 - DNA, 30 bp, Artificial Sequence
  Synthetic oligonucleotide
ggtcttgcgtggggaccattactatcacaa

SEQ ID NO: 169426 - DNA, 30 bp, Artificial Sequence
  Synthetic oligonucleotide
gacagtgggaccgcggaatttggctcacaa

SEQ ID NO: 169427 - DNA, 30 bp, Artificial Sequence
  Synthetic oligonucleotide
agccaggcatcaggcctaaaatcgtcacaa

SEQ ID NO: 169428 - DNA, 30 bp, Artificial Sequence
  Synthetic oligonucleotide
atccctatactatcgaggaccctgtcacaa

SEQ ID NO: 169429 - DNA, 30 bp, Artificial Sequence
  Synthetic oligonucleotide
agcctataacaacatcgtaaagcttcacaa

SEQ ID NO: 169430 - DNA, 30 bp, Artificial Sequence
  Synthetic oligonucleotide
gaacgtgggtgatcccggggtctaagacaa

SEQ ID NO: 169431 - DNA, 30 bp, Artificial Sequence
  Synthetic oligonucleotide
gcgagttcgtccttcctctagaacagacaa

SEQ ID NO: 169432 - DNA, 30 bp, Artificial Sequence
  Synthetic oligonucleotide
gtgagtcggcaaggaaaccaccccagacaa

SEQ ID NO: 169433 - DNA, 30 bp, Artificial Sequence
  Synthetic oligonucleotide
ggacattgttgggcatgggaggagagacaa

SEQ ID NO: 169434 - DNA, 30 bp, Artificial Sequence
  Synthetic oligonucleotide
acggactggctgttttcatatcgtagacaa

SEQ ID NO: 169435 - DNA, 30 bp, Artificial Sequence
  Synthetic oligonucleotide
ttagtaacatggagacgcgcttcacgacaa

SEQ ID NO: 169436 - DNA, 30 bp, Artificial Sequence
  Synthetic oligonucleotide
gcacaaaattgctatgacataggccgacaa

SEQ ID NO: 169437 - DNA, 30 bp, Artificial Sequence
  Synthetic oligonucleotide
tagtgtcgcaatatcgtagcgtacggacaa

SEQ ID NO: 169438 - DNA, 30 bp, Artificial Sequence
  Synthetic oligonucleotide
acgtaaactaatacgcgcttatccggacaa

SEQ ID NO: 169439 - DNA, 30 bp, Artificial Sequence
  Synthetic oligonucleotide
ggtctatacccataatcagaccgcggacaa

SEQ ID NO: 169440 - DNA, 30 bp, Artificial Sequence
  Synthetic oligonucleotide
caccggttgtaatagacgcgatgcggacaa

SEQ ID NO: 169441 - DNA, 30 bp, Artificial Sequence
  Synthetic oligonucleotide
tcgcagaagtagaagatctgtttcggacaa

SEQ ID NO: 169442 - DNA, 30 bp, Artificial Sequence
  Synthetic oligonucleotide
ctagtctcgcgggtggattcacggggacaa

SEQ ID NO: 169443 - DNA, 30 bp, Artificial Sequence
  Synthetic oligonucleotide
ggaagtgttgtgtaaaatgcccggggacaa

SEQ ID NO: 169444 - DNA, 30 bp, Artificial Sequence
  Synthetic oligonucleotide
caggacccgaacattgcgggttatggacaa

SEQ ID NO: 169445 - DNA, 30 bp, Artificial Sequence
  Synthetic oligonucleotide
cagttagaccaagaattactatttggacaa

SEQ ID NO: 169446 - DNA, 30 bp, Artificial Sequence
  Synthetic oligonucleotide
aaccgtgtagtcgggctggctcgctgacaa

SEQ ID NO: 169447 - DNA, 30 bp, Artificial Sequence
  Synthetic oligonucleotide
cttaggtaccagcagggatgatcgtgacaa

SEQ ID NO: 169448 - DNA, 30 bp, Artificial Sequence
  Synthetic oligonucleotide
cacggaaccctaccccaatttccttgacaa

SEQ ID NO: 169449 - DNA, 30 bp, Artificial Sequence
  Synthetic oligonucleotide
aagacggattaggccactgagtcaatacaa

SEQ ID NO: 169450 - DNA, 30 bp, Artificial Sequence
  Synthetic oligonucleotide
tacggtgctaagatgtggtcaatcatacaa

SEQ ID NO: 169451 - DNA, 30 bp, Artificial Sequence
  Synthetic oligonucleotide
taagaaagccgggtctcttaggagatacaa

SEQ ID NO: 169452 - DNA, 30 bp, Artificial Sequence
  Synthetic oligonucleotide
cggcccgtccacgggagtagtccgatacaa

SEQ ID NO: 169453 - DNA, 30 bp, Artificial Sequence
  Synthetic oligonucleotide
aatcaccggcgcgaggtaaatgggatacaa

SEQ ID NO: 169454 - DNA, 30 bp, Artificial Sequence
  Synthetic oligonucleotide
gacgtaaactacacaggcatcggtatacaa

SEQ ID NO: 169455 - DNA, 30 bp, Artificial Sequence
  Synthetic oligonucleotide
gctgacgtcccgtgaccactttatctacaa

SEQ ID NO: 169456 - DNA, 30 bp, Artificial Sequence
  Synthetic oligonucleotide
gaccgcggcccatcgagcaggaaagtacaa

SEQ ID NO: 169457 - DNA, 30 bp, Artificial Sequence
  Synthetic oligonucleotide
tacatcaccctataacgtgcttcggtacaa

SEQ ID NO: 169458 - DNA, 30 bp, Artificial Sequence
  Synthetic oligonucleotide
tgtgggaacttatggagggccgtggtacaa

SEQ ID NO: 169459 - DNA, 30 bp, Artificial Sequence
  Synthetic oligonucleotide
gcctcggctcatgggatctgtggattacaa

SEQ ID NO: 169460 - DNA, 30 bp, Artificial Sequence
  Synthetic oligonucleotide
tattgaaacaagcagctagaacctaaccaa

SEQ ID NO: 169461 - DNA, 30 bp, Artificial Sequence
  Synthetic oligonucleotide
ccggacttatcggtgatgcgctcgcaccaa

SEQ ID NO: 169462 - DNA, 30 bp, Artificial Sequence
  Synthetic oligonucleotide
ggtctagcctagactggtttccctcaccaa

SEQ ID NO: 169463 - DNA, 30 bp, Artificial Sequence
  Synthetic oligonucleotide
tatctgtggaatagaaatgcatgcgaccaa

SEQ ID NO: 169464 - DNA, 30 bp, Artificial Sequence
  Synthetic oligonucleotide
ggtaaattcggtaccggtcaactggaccaa

SEQ ID NO: 169465 - DNA, 30 bp, Artificial Sequence
  Synthetic oligonucleotide
gacacgtagaaaaccagtgtgaatgaccaa

SEQ ID NO: 169466 - DNA, 30 bp, Artificial Sequence
  Synthetic oligonucleotide
atctattagcataatatgtcacgtgaccaa

SEQ ID NO: 169467 - DNA, 30 bp, Artificial Sequence
  Synthetic oligonucleotide
acatctcggcgttagtgggatagctaccaa

SEQ ID NO: 169468 - DNA, 30 bp, Artificial Sequence
  Synthetic oligonucleotide
tatacgggtgtgacgacatagggctaccaa

SEQ ID NO: 169469 - DNA, 30 bp, Artificial Sequence
  Synthetic oligonucleotide
aaaaccaatgtaaggtcccagtagtaccaa

SEQ ID NO: 169470 - DNA, 30 bp, Artificial Sequence
  Synthetic oligonucleotide
tagtccagtatcgtagtggtttcgtaccaa

SEQ ID NO: 169471 - DNA, 30 bp, Artificial Sequence
  Synthetic oligonucleotide
aaatgtcggatgccgaatcggcccacccaa

SEQ ID NO: 169472 - DNA, 30 bp, Artificial Sequence
  Synthetic oligonucleotide
gataatgtgtcgacatcgcgagttacccaa

SEQ ID NO: 169473 - DNA, 30 bp, Artificial Sequence
  Synthetic oligonucleotide
ctcactagaggactgggtcataaaccccaa

SEQ ID NO: 169474 - DNA, 30 bp, Artificial Sequence
  Synthetic oligonucleotide
gattctaagacaatatcggcgttgccccaa

SEQ ID NO: 169475 - DNA, 30 bp, Artificial Sequence
  Synthetic oligonucleotide
ataggtgagtaataggactgtacagcccaa

SEQ ID NO: 169476 - DNA, 30 bp, Artificial Sequence
  Synthetic oligonucleotide
taacgataagtggatcaatgggaatcccaa

SEQ ID NO: 169477 - DNA, 30 bp, Artificial Sequence
  Synthetic oligonucleotide
gtttcggcgtattcctgtcgtgaatcccaa

SEQ ID NO: 169478 - DNA, 30 bp, Artificial Sequence
  Synthetic oligonucleotide
gcgcctttggtcgtggagtcaaactcccaa

SEQ ID NO: 169479 - DNA, 30 bp, Artificial Sequence
  Synthetic oligonucleotide
ttagacacacaataggtgcatagttcccaa

SEQ ID NO: 169480 - DNA, 30 bp, Artificial Sequence
  Synthetic oligonucleotide
gacatagggtagttgatgtcatagagccaa

SEQ ID NO: 169481 - DNA, 30 bp, Artificial Sequence
  Synthetic oligonucleotide
ttgcgtaacacggccagctttggtcgccaa

SEQ ID NO: 169482 - DNA, 30 bp, Artificial Sequence
  Synthetic oligonucleotide
cccgctccatgtcaacattcaaaaggccaa

SEQ ID NO: 169483 - DNA, 30 bp, Artificial Sequence
  Synthetic oligonucleotide
gtcgttattacttgtaaaaaatgaggccaa

SEQ ID NO: 169484 - DNA, 30 bp, Artificial Sequence
  Synthetic oligonucleotide
ctagcaccgaggcaaggtgcgttaggccaa

SEQ ID NO: 169485 - DNA, 30 bp, Artificial Sequence
  Synthetic oligonucleotide
acatcgggttggcctccgggggagggccaa

SEQ ID NO: 169486 - DNA, 30 bp, Artificial Sequence
  Synthetic oligonucleotide
gctgtgtcgttggcttccggggatggccaa

SEQ ID NO: 169487 - DNA, 30 bp, Artificial Sequence
  Synthetic oligonucleotide
gaacgcgcttggaggacctgaaactgccaa

SEQ ID NO: 169488 - DNA, 30 bp, Artificial Sequence
  Synthetic oligonucleotide
cgtgccaaattggacaattggtcgtgccaa

SEQ ID NO: 169489 - DNA, 30 bp, Artificial Sequence
  Synthetic oligonucleotide
cgagagttaaatctccgaaggtggtgccaa

SEQ ID NO: 169490 - DNA, 30 bp, Artificial Sequence
  Synthetic oligonucleotide
cattggtcgttgaatatgctgatgtgccaa

SEQ ID NO: 169491 - DNA, 30 bp, Artificial Sequence
  Synthetic oligonucleotide
accctaatgtctaaagatcggcattgccaa

SEQ ID NO: 169492 - DNA, 30 bp, Artificial Sequence
  Synthetic oligonucleotide
cagtgagcgcacgagcgcgacgattgccaa

SEQ ID NO: 169493 - DNA, 30 bp, Artificial Sequence
  Synthetic oligonucleotide
cagccggttatcgtccggtcatgttgccaa

SEQ ID NO: 169494 - DNA, 30 bp, Artificial Sequence
  Synthetic oligonucleotide
ctgtgtctcgaatcttcaaagaaaatccaa

SEQ ID NO: 169495 - DNA, 30 bp, Artificial Sequence
  Synthetic oligonucleotide
ttacgttgaccacttttcttcacgatccaa

SEQ ID NO: 169496 - DNA, 30 bp, Artificial Sequence
  Synthetic oligonucleotide
tcaccacgaccacggtcagcccatatccaa

SEQ ID NO: 169497 - DNA, 30 bp, Artificial Sequence
  Synthetic oligonucleotide
actagagctctgtcaccggtattactccaa

SEQ ID NO: 169498 - DNA, 30 bp, Artificial Sequence
  Synthetic oligonucleotide
agtggaggggagagccatcgtagcctccaa

SEQ ID NO: 169499 - DNA, 30 bp, Artificial Sequence
  Synthetic oligonucleotide
cgcgtgcggttaacacgttccggcctccaa

SEQ ID NO: 169500 - DNA, 30 bp, Artificial Sequence
  Synthetic oligonucleotide
tcgaaactacgtcgtattatagggctccaa

SEQ ID NO: 169501 - DNA, 30 bp, Artificial Sequence
  Synthetic oligonucleotide
ggggcgacacaaagagcgtctactctccaa

SEQ ID NO: 169502 - DNA, 30 bp, Artificial Sequence
  Synthetic oligonucleotide
gcgtaacgggtaattcagcaacttctccaa

SEQ ID NO: 169503 - DNA, 30 bp, Artificial Sequence
  Synthetic oligonucleotide
ctcataaccagttggtgttaagaagtccaa

SEQ ID NO: 169504 - DNA, 30 bp, Artificial Sequence
  Synthetic oligonucleotide
gcgttaatatggatttgatgataagtccaa

SEQ ID NO: 169505 - DNA, 30 bp, Artificial Sequence
  Synthetic oligonucleotide
ataatattcagggagtacatctaagtccaa

SEQ ID NO: 169506 - DNA, 30 bp, Artificial Sequence
  Synthetic oligonucleotide
cttatcatcagtgcaattagcgtcttccaa

SEQ ID NO: 169507 - DNA, 30 bp, Artificial Sequence
  Synthetic oligonucleotide
gcgggaatctgggatctcaaggggttccaa

SEQ ID NO: 169508 - DNA, 30 bp, Artificial Sequence
  Synthetic oligonucleotide
gcccgttgagggaaaatgttaaaaaagcaa

SEQ ID NO: 169509 - DNA, 30 bp, Artificial Sequence
  Synthetic oligonucleotide
ttggccactttccggtacaggtaaaagcaa

SEQ ID NO: 169510 - DNA, 30 bp, Artificial Sequence
  Synthetic oligonucleotide
gtattatgcgtcgggaactagtcaaagcaa

SEQ ID NO: 169511 - DNA, 30 bp, Artificial Sequence
  Synthetic oligonucleotide
ctcactcgccaggttcaccgtctaaagcaa

SEQ ID NO: 169512 - DNA, 30 bp, Artificial Sequence
  Synthetic oligonucleotide
ggtaaagtactcgaaaagtgaggcaagcaa

SEQ ID NO: 169513 - DNA, 30 bp, Artificial Sequence
  Synthetic oligonucleotide
atcggtgagtgaccatggcagtagaagcaa

SEQ ID NO: 169514 - DNA, 30 bp, Artificial Sequence
  Synthetic oligonucleotide
tgctcttccggtgcgctacgaacgaagcaa

SEQ ID NO: 169515 - DNA, 30 bp, Artificial Sequence
  Synthetic oligonucleotide
gcttgcaaggtagcaaaggggagtaagcaa

SEQ ID NO: 169516 - DNA, 30 bp, Artificial Sequence
  Synthetic oligonucleotide
tacgatccgcgtatcacgtagggtaagcaa

SEQ ID NO: 169517 - DNA, 30 bp, Artificial Sequence
  Synthetic oligonucleotide
attaaatcgcccctgccctgtggtaagcaa

SEQ ID NO: 169518 - DNA, 30 bp, Artificial Sequence
  Synthetic oligonucleotide
cctgtattaccgacaagcaaatcgcagcaa

SEQ ID NO: 169519 - DNA, 30 bp, Artificial Sequence
  Synthetic oligonucleotide
ggtagaaattagacaagcgttttgcagcaa

SEQ ID NO: 169520 - DNA, 30 bp, Artificial Sequence
  Synthetic oligonucleotide
gacattatggcccgactccctacagagcaa

SEQ ID NO: 169521 - DNA, 30 bp, Artificial Sequence
  Synthetic oligonucleotide
gaggaggcaggtcggctgcacgtagagcaa

SEQ ID NO: 169522 - DNA, 30 bp, Artificial Sequence
  Synthetic oligonucleotide
gacagtgggggataaacaccgggtgagcaa

SEQ ID NO: 169523 - DNA, 30 bp, Artificial Sequence
  Synthetic oligonucleotide
atgcgtaatggtcctgtttatgtatagcaa

SEQ ID NO: 169524 - DNA, 30 bp, Artificial Sequence
  Synthetic oligonucleotide
aaaaggggaaacggttaggtgaccacgcaa

SEQ ID NO: 169525 - DNA, 30 bp, Artificial Sequence
  Synthetic oligonucleotide
tcgtgagcaccagaatcatgtttcacgcaa

SEQ ID NO: 169526 - DNA, 30 bp, Artificial Sequence
  Synthetic oligonucleotide
atagtggttgaccactaccggaatacgcaa

SEQ ID NO: 169527 - DNA, 30 bp, Artificial Sequence
  Synthetic oligonucleotide
gcatagagtggctcgggacgtacaccgcaa

SEQ ID NO: 169528 - DNA, 30 bp, Artificial Sequence
  Synthetic oligonucleotide
cgcgaatgtgtgacattgggcaccccgcaa

SEQ ID NO: 169529 - DNA, 30 bp, Artificial Sequence
  Synthetic oligonucleotide
cgataataggggtctaatccagggccgcaa

SEQ ID NO: 169530 - DNA, 30 bp, Artificial Sequence
  Synthetic oligonucleotide
ctgatagcctacgactcatgccgagcgcaa

SEQ ID NO: 169531 - DNA, 30 bp, Artificial Sequence
  Synthetic oligonucleotide
tatcggctctctggggccaaagaggcgcaa

SEQ ID NO: 169532 - DNA, 30 bp, Artificial Sequence
  Synthetic oligonucleotide
atgtcgcaaaacagtcattcccactcgcaa

SEQ ID NO: 169533 - DNA, 30 bp, Artificial Sequence
  Synthetic oligonucleotide
gccgttccggcaacgaggtcgcaaaggcaa

SEQ ID NO: 169534 - DNA, 30 bp, Artificial Sequence
  Synthetic oligonucleotide
ggtggttcactccagcagtcggtcaggcaa

SEQ ID NO: 169535 - DNA, 30 bp, Artificial Sequence
  Synthetic oligonucleotide
agggttatggttcgcgcgcgtcctaggcaa

SEQ ID NO: 169536 - DNA, 30 bp, Artificial Sequence
  Synthetic oligonucleotide
ataccaaaggctaatttggcaggtaggcaa

SEQ ID NO: 169537 - DNA, 30 bp, Artificial Sequence
  Synthetic oligonucleotide
gcctcggcttcatgtgttaaaaaacggcaa

SEQ ID NO: 169538 - DNA, 30 bp, Artificial Sequence
  Synthetic oligonucleotide
aaagaatcgctacacactcttagacggcaa

SEQ ID NO: 169539 - DNA, 30 bp, Artificial Sequence
  Synthetic oligonucleotide
tctcgtcagattatattgcgtacagggcaa

SEQ ID NO: 169540 - DNA, 30 bp, Artificial Sequence
  Synthetic oligonucleotide
aatgcaattcacgacatcccccaggggcaa

SEQ ID NO: 169541 - DNA, 30 bp, Artificial Sequence
  Synthetic oligonucleotide
aaagctcaggacctcgccgttctttggcaa

SEQ ID NO: 169542 - DNA, 30 bp, Artificial Sequence
  Synthetic oligonucleotide
gcgtgacgggtcgtaagtcaattcatgcaa

SEQ ID NO: 169543 - DNA, 30 bp, Artificial Sequence
  Synthetic oligonucleotide
cgggtgagcaattcatgaatcgctatgcaa

SEQ ID NO: 169544 - DNA, 30 bp, Artificial Sequence
  Synthetic oligonucleotide
ttataccagaaattagaagcaacggtgcaa

SEQ ID NO: 169545 - DNA, 30 bp, Artificial Sequence
  Synthetic oligonucleotide
ggagcaggctatattatcattgagttgcaa

SEQ ID NO: 169546 - DNA, 30 bp, Artificial Sequence
  Synthetic oligonucleotide
atgtgatatggtctcctatccccgttgcaa

SEQ ID NO: 169547 - DNA, 30 bp, Artificial Sequence
  Synthetic oligonucleotide
taacgggttcgggagaaaatattgttgcaa

SEQ ID NO: 169548 - DNA, 30 bp, Artificial Sequence
  Synthetic oligonucleotide
aggtccgagatcgttatcatatctttgcaa

SEQ ID NO: 169549 - DNA, 30 bp, Artificial Sequence
  Synthetic oligonucleotide
cgaaataggccgtctactatcgaaaatcaa

SEQ ID NO: 169550 - DNA, 30 bp, Artificial Sequence
  Synthetic oligonucleotide
ggttggctgggaaggctctaagcaaatcaa

SEQ ID NO: 169551 - DNA, 30 bp, Artificial Sequence
  Synthetic oligonucleotide
cgcgtgaagaccacgataaccctcaatcaa

SEQ ID NO: 169552 - DNA, 30 bp, Artificial Sequence
  Synthetic oligonucleotide
cagcgaccaagaatccgaacgggtaatcaa

SEQ ID NO: 169553 - DNA, 30 bp, Artificial Sequence
  Synthetic oligonucleotide
acgtcgggggggattccgtatgaacatcaa

SEQ ID NO: 169554 - DNA, 30 bp, Artificial Sequence
  Synthetic oligonucleotide
gggtaaaaaccgaagggacaggtacatcaa

SEQ ID NO: 169555 - DNA, 30 bp, Artificial Sequence
  Synthetic oligonucleotide
atcggatacggttcgcaaatcacccatcaa

SEQ ID NO: 169556 - DNA, 30 bp, Artificial Sequence
  Synthetic oligonucleotide
acctaccagggatcaccagcaagagatcaa

SEQ ID NO: 169557 - DNA, 30 bp, Artificial Sequence
  Synthetic oligonucleotide
gtctcgagttgggtaccgattatagatcaa

SEQ ID NO: 169558 - DNA, 30 bp, Artificial Sequence
  Synthetic oligonucleotide
attatgtcaggtacactgatggtagatcaa

SEQ ID NO: 169559 - DNA, 30 bp, Artificial Sequence
  Synthetic oligonucleotide
ttacgttccgacactttggcgacatatcaa

SEQ ID NO: 169560 - DNA, 30 bp, Artificial Sequence
  Synthetic oligonucleotide
cagcaacccatagttctttgtggctatcaa

SEQ ID NO: 169561 - DNA, 30 bp, Artificial Sequence
  Synthetic oligonucleotide
taccggtactcgttgctgacaaattatcaa

SEQ ID NO: 169562 - DNA, 30 bp, Artificial Sequence
  Synthetic oligonucleotide
cttcaaatgaggtacgtgcccctaactcaa

SEQ ID NO: 169563 - DNA, 30 bp, Artificial Sequence
  Synthetic oligonucleotide
tcttccacagacgagaaacagctaactcaa

SEQ ID NO: 169564 - DNA, 30 bp, Artificial Sequence
  Synthetic oligonucleotide
cctccgtttaactcgtggggtctaactcaa

SEQ ID NO: 169565 - DNA, 30 bp, Artificial Sequence
  Synthetic oligonucleotide
atggaactttaagtgcgtcgagacactcaa

SEQ ID NO: 169566 - DNA, 30 bp, Artificial Sequence
  Synthetic oligonucleotide
acgtgataatagcttgaatgccagactcaa

SEQ ID NO: 169567 - DNA, 30 bp, Artificial Sequence
  Synthetic oligonucleotide
ttaatgaatacgggtaaaacggatactcaa

SEQ ID NO: 169568 - DNA, 30 bp, Artificial Sequence
  Synthetic oligonucleotide
cacttcctccgaacctcaaaaagtactcaa

SEQ ID NO: 169569 - DNA, 30 bp, Artificial Sequence
  Synthetic oligonucleotide
aacatgtaaagtgcatgaaaaccccctcaa

SEQ ID NO: 169570 - DNA, 30 bp, Artificial Sequence
  Synthetic oligonucleotide
tgggttctccctgggggtcggaatcctcaa

SEQ ID NO: 169571 - DNA, 30 bp, Artificial Sequence
  Synthetic oligonucleotide
gcattcttttagggagttaaaagagctcaa

SEQ ID NO: 169572 - DNA, 30 bp, Artificial Sequence
  Synthetic oligonucleotide
aataggattggaatcagggaaatagctcaa

SEQ ID NO: 169573 - DNA, 30 bp, Artificial Sequence
  Synthetic oligonucleotide
tagggggtacgttagtccatactagctcaa

SEQ ID NO: 169574 - DNA, 30 bp, Artificial Sequence
  Synthetic oligonucleotide
gggagaagcagtatagaattgaccgctcaa

SEQ ID NO: 169575 - DNA, 30 bp, Artificial Sequence
  Synthetic oligonucleotide
gaaatccatacgaaaacgatcggggctcaa

SEQ ID NO: 169576 - DNA, 30 bp, Artificial Sequence
  Synthetic oligonucleotide
cgcacgcatgaacaaccaaagaaatctcaa

SEQ ID NO: 169577 - DNA, 30 bp, Artificial Sequence
  Synthetic oligonucleotide
gaggcccaggacgggtaattgcaatctcaa

SEQ ID NO: 169578 - DNA, 30 bp, Artificial Sequence
  Synthetic oligonucleotide
agccgccgagctatacgcctagcatctcaa

SEQ ID NO: 169579 - DNA, 30 bp, Artificial Sequence
  Synthetic oligonucleotide
gcatggtcttactatctacgagtatctcaa

SEQ ID NO: 169580 - DNA, 30 bp, Artificial Sequence
  Synthetic oligonucleotide
tctaccgcttgtgacacgccctgctctcaa

SEQ ID NO: 169581 - DNA, 30 bp, Artificial Sequence
  Synthetic oligonucleotide
ggccaagtgacgtagagccggcgttctcaa

SEQ ID NO: 169582 - DNA, 30 bp, Artificial Sequence
  Synthetic oligonucleotide
taagtggaccccgtggaatgtgcgagtcaa

SEQ ID NO: 169583 - DNA, 30 bp, Artificial Sequence
  Synthetic oligonucleotide
aggctataacaacggatagttgggagtcaa

SEQ ID NO: 169584 - DNA, 30 bp, Artificial Sequence
  Synthetic oligonucleotide
caaggaagcggacaatggtgggctagtcaa

SEQ ID NO: 169585 - DNA, 30 bp, Artificial Sequence
  Synthetic oligonucleotide
gcacaaacgccgtctaagaacaaacgtcaa

SEQ ID NO: 169586 - DNA, 30 bp, Artificial Sequence
  Synthetic oligonucleotide
ttatacttaggcgaaatgttataccgtcaa

SEQ ID NO: 169587 - DNA, 30 bp, Artificial Sequence
  Synthetic oligonucleotide
gtcgaccgtctcagggccgggtaccgtcaa

SEQ ID NO: 169588 - DNA, 30 bp, Artificial Sequence
  Synthetic oligonucleotide
aagttcctcgttcttcgttcaaggcgtcaa

SEQ ID NO: 169589 - DNA, 30 bp, Artificial Sequence
  Synthetic oligonucleotide
agagtctggccgtcctacacagctcgtcaa

SEQ ID NO: 169590 - DNA, 30 bp, Artificial Sequence
  Synthetic oligonucleotide
gttatctgtgcagaccatcggcgcggtcaa

SEQ ID NO: 169591 - DNA, 30 bp, Artificial Sequence
  Synthetic oligonucleotide
tgaatttgcagtcggcgtacagtgggtcaa

SEQ ID NO: 169592 - DNA, 30 bp, Artificial Sequence
  Synthetic oligonucleotide
cttccggagtgtgtaaattaacttggtcaa

SEQ ID NO: 169593 - DNA, 30 bp, Artificial Sequence
  Synthetic oligonucleotide
tgcacagcgttaaatgtggcgtttggtcaa

SEQ ID NO: 169594 - DNA, 30 bp, Artificial Sequence
  Synthetic oligonucleotide
ggttgctagcataagcgttattcatgtcaa

SEQ ID NO: 169595 - DNA, 30 bp, Artificial Sequence
  Synthetic oligonucleotide
gtaccgaggctatgggggcttagatgtcaa

SEQ ID NO: 169596 - DNA, 30 bp, Artificial Sequence
  Synthetic oligonucleotide
catgatagaaacgcgatgcgcacctgtcaa

SEQ ID NO: 169597 - DNA, 30 bp, Artificial Sequence
  Synthetic oligonucleotide
cgggactaaagctatttagctaagtgtcaa

SEQ ID NO: 169598 - DNA, 30 bp, Artificial Sequence
  Synthetic oligonucleotide
aatagtccaaacagacggtccaaaattcaa

SEQ ID NO: 169599 - DNA, 30 bp, Artificial Sequence
  Synthetic oligonucleotide
cattcaacgagctgtagtctgctcattcaa

SEQ ID NO: 169600 - DNA, 30 bp, Artificial Sequence
  Synthetic oligonucleotide
cgtgacacgtcatgggtgcccaagattcaa

SEQ ID NO: 169601 - DNA, 30 bp, Artificial Sequence
  Synthetic oligonucleotide
ggaaggagcataacgtttcataagattcaa

SEQ ID NO: 169602 - DNA, 30 bp, Artificial Sequence
  Synthetic oligonucleotide
agcacaggtcgatggtactccacgattcaa

SEQ ID NO: 169603 - DNA, 30 bp, Artificial Sequence
  Synthetic oligonucleotide
gctacaagaaccgcagagtggtgacttcaa

SEQ ID NO: 169604 - DNA, 30 bp, Artificial Sequence
  Synthetic oligonucleotide
atagcaagggtttggtccaggctgcttcaa

SEQ ID NO: 169605 - DNA, 30 bp, Artificial Sequence
  Synthetic oligonucleotide
aaaatggggaagccccgtggacatcttcaa

SEQ ID NO: 169606 - DNA, 30 bp, Artificial Sequence
  Synthetic oligonucleotide
atacttttgaagattgcaatagacgttcaa

SEQ ID NO: 169607 - DNA, 30 bp, Artificial Sequence
  Synthetic oligonucleotide
cgtgactagtaccagtggtgggacgttcaa

SEQ ID NO: 169608 - DNA, 30 bp, Artificial Sequence
  Synthetic oligonucleotide
tacgctcgctggtactatctgcgggttcaa

SEQ ID NO: 169609 - DNA, 30 bp, Artificial Sequence
  Synthetic oligonucleotide
caccagaggatcagcgtccggtgggttcaa

SEQ ID NO: 169610 - DNA, 30 bp, Artificial Sequence
  Synthetic oligonucleotide
ggtacatggttttaagtaccaactgttcaa

SEQ ID NO: 169611 - DNA, 30 bp, Artificial Sequence
  Synthetic oligonucleotide
gttcctcaaaaaagcagtttgagtgttcaa

SEQ ID NO: 169612 - DNA, 30 bp, Artificial Sequence
  Synthetic oligonucleotide
gaagtatgtggagtgtgtgcgaggtttcaa

SEQ ID NO: 169613 - DNA, 30 bp, Artificial Sequence
  Synthetic oligonucleotide
caaaaataacatagtgggatcgtgtttcaa

SEQ ID NO: 169614 - DNA, 30 bp, Artificial Sequence
  Synthetic oligonucleotide
catagttgctcgttagatttttgaaaagaa

SEQ ID NO: 169615 - DNA, 30 bp, Artificial Sequence
  Synthetic oligonucleotide
gccatgatcgcaacgtaagtcttaaaagaa

SEQ ID NO: 169616 - DNA, 30 bp, Artificial Sequence
  Synthetic oligonucleotide
aggttatttgaaggatgataccacaaagaa

SEQ ID NO: 169617 - DNA, 30 bp, Artificial Sequence
  Synthetic oligonucleotide
gccacctggtcctgctatcaccgtaaagaa

SEQ ID NO: 169618 - DNA, 30 bp, Artificial Sequence
  Synthetic oligonucleotide
aaatgggtcagatcccaaccacaacaagaa

SEQ ID NO: 169619 - DNA, 30 bp, Artificial Sequence
  Synthetic oligonucleotide
tgtacccaagaactcccggatcgacaagaa

SEQ ID NO: 169620 - DNA, 30 bp, Artificial Sequence
  Synthetic oligonucleotide
gtaagtggaagcccataaccttgacaagaa

SEQ ID NO: 169621 - DNA, 30 bp, Artificial Sequence
  Synthetic oligonucleotide
agtgcctttcaggccatagccatccaagaa

SEQ ID NO: 169622 - DNA, 30 bp, Artificial Sequence
  Synthetic oligonucleotide
tagccgacatcggctattggctagcaagaa

SEQ ID NO: 169623 - DNA, 30 bp, Artificial Sequence
  Synthetic oligonucleotide
atcctgatgaagtaaagtcttcggcaagaa

SEQ ID NO: 169624 - DNA, 30 bp, Artificial Sequence
  Synthetic oligonucleotide
atcaattagatagatctggatattcaagaa

SEQ ID NO: 169625 - DNA, 30 bp, Artificial Sequence
  Synthetic oligonucleotide
caaatcaggaacggacgggaaaaagaagaa

SEQ ID NO: 169626 - DNA, 30 bp, Artificial Sequence
  Synthetic oligonucleotide
gcgcgattcctttgctcttagaaggaagaa

SEQ ID NO: 169627 - DNA, 30 bp, Artificial Sequence
  Synthetic oligonucleotide
tctaaacaaggccggacaacataggaagaa

SEQ ID NO: 169628 - DNA, 30 bp, Artificial Sequence
  Synthetic oligonucleotide
cagcgcaacactttatttggtccggaagaa

SEQ ID NO: 169629 - DNA, 30 bp, Artificial Sequence
  Synthetic oligonucleotide
tgacccttatgctcgactcatagggaagaa

SEQ ID NO: 169630 - DNA, 30 bp, Artificial Sequence
  Synthetic oligonucleotide
gaggttagcaacatatccgatacataagaa

SEQ ID NO: 169631 - DNA, 30 bp, Artificial Sequence
  Synthetic oligonucleotide
cagagttcaattgcagttttaatgtaagaa

SEQ ID NO: 169632 - DNA, 30 bp, Artificial Sequence
  Synthetic oligonucleotide
gcataagaacgtttacggaccgcttaagaa

SEQ ID NO: 169633 - DNA, 30 bp, Artificial Sequence
  Synthetic oligonucleotide
gtaggagtattcataccacggtgttaagaa

SEQ ID NO: 169634 - DNA, 30 bp, Artificial Sequence
  Synthetic oligonucleotide
atgtattctattatatttggcagaacagaa

SEQ ID NO: 169635 - DNA, 30 bp, Artificial Sequence
  Synthetic oligonucleotide
tgcactacggcgactgattcactaacagaa

SEQ ID NO: 169636 - DNA, 30 bp, Artificial Sequence
  Synthetic oligonucleotide
ccgatagaatcggctcccgagctaacagaa

SEQ ID NO: 169637 - DNA, 30 bp, Artificial Sequence
  Synthetic oligonucleotide
atctgctgaccaagttcgaaggcgacagaa

SEQ ID NO: 169638 - DNA, 30 bp, Artificial Sequence
  Synthetic oligonucleotide
ttataaggtgaagggttgctcagtacagaa

SEQ ID NO: 169639 - DNA, 30 bp, Artificial Sequence
  Synthetic oligonucleotide
gttatgtcttcaaggcatgtaggtacagaa

SEQ ID NO: 169640 - DNA, 30 bp, Artificial Sequence
  Synthetic oligonucleotide
ggaatccctgttcgaggactggttacagaa

SEQ ID NO: 169641 - DNA, 30 bp, Artificial Sequence
  Synthetic oligonucleotide
atgtccaatgagttcccccggcgaccagaa

SEQ ID NO: 169642 - DNA, 30 bp, Artificial Sequence
  Synthetic oligonucleotide
tcaggggtagtcgtcggaatgcccccagaa

SEQ ID NO: 169643 - DNA, 27 bp, Artificial Sequence
  Synthetic oligonucleotide
actcatgatccaaagtcagcgccagaa

SEQ ID NO: 169644 - DNA, 30 bp, Artificial Sequence
  Synthetic oligonucleotide
gacgagcgtattagtaatctacggccagaa

SEQ ID NO: 169645 - DNA, 30 bp, Artificial Sequence
  Synthetic oligonucleotide
aataggacagctctcgccgcgtggccagaa

SEQ ID NO: 169646 - DNA, 30 bp, Artificial Sequence
  Synthetic oligonucleotide
tagggacacgtggaaccgtacgatccagaa

SEQ ID NO: 169647 - DNA, 30 bp, Artificial Sequence
  Synthetic oligonucleotide
agacgcgtaaattgctgtaaccgtccagaa

SEQ ID NO: 169648 - DNA, 30 bp, Artificial Sequence
  Synthetic oligonucleotide
tgcccagaggttggttaggagggtccagaa

SEQ ID NO: 169649 - DNA, 30 bp, Artificial Sequence
  Synthetic oligonucleotide
ttaagatggaatcgactctatcgagcagaa

SEQ ID NO: 169650 - DNA, 30 bp, Artificial Sequence
  Synthetic oligonucleotide
gctttagcttgccggacttcaagcgcagaa

SEQ ID NO: 169651 - DNA, 30 bp, Artificial Sequence
  Synthetic oligonucleotide
tactaggtaacacacgagcgttaggcagaa

SEQ ID NO: 169652 - DNA, 30 bp, Artificial Sequence
  Synthetic oligonucleotide
agccgcacgacttgggacgctatggcagaa

SEQ ID NO: 169653 - DNA, 30 bp, Artificial Sequence
  Synthetic oligonucleotide
catggcctgtcgtcactatcattggcagaa

SEQ ID NO: 169654 - DNA, 30 bp, Artificial Sequence
  Synthetic oligonucleotide
gagagatggtagtcatcggaagaatcagaa

SEQ ID NO: 169655 - DNA, 30 bp, Artificial Sequence
  Synthetic oligonucleotide
atcaatttggacgctcgacaagactcagaa

SEQ ID NO: 169656 - DNA, 30 bp, Artificial Sequence
  Synthetic oligonucleotide
aagtcgtgaatagtaattaatgactcagaa

SEQ ID NO: 169657 - DNA, 30 bp, Artificial Sequence
  Synthetic oligonucleotide
tatgtaagacggtatctgtacccgtcagaa

SEQ ID NO: 169658 - DNA, 30 bp, Artificial Sequence
  Synthetic oligonucleotide
taaggagagaaaggcggcttcgggtcagaa

SEQ ID NO: 169659 - DNA, 30 bp, Artificial Sequence
  Synthetic oligonucleotide
acgaattcacacattattataagaagagaa

SEQ ID NO: 169660 - DNA, 30 bp, Artificial Sequence
  Synthetic oligonucleotide
atgatgatgtatagtaatatgcgcagagaa

SEQ ID NO: 169661 - DNA, 30 bp, Artificial Sequence
  Synthetic oligonucleotide
ttgtaagctgttggctacaaactcagagaa

SEQ ID NO: 169662 - DNA, 30 bp, Artificial Sequence
  Synthetic oligonucleotide
tggatcgtctcagtcggatctgtgagagaa

SEQ ID NO: 169663 - DNA, 30 bp, Artificial Sequence
  Synthetic oligonucleotide
acgacccattgtgtagttcacggacgagaa

SEQ ID NO: 169664 - DNA, 30 bp, Artificial Sequence
  Synthetic oligonucleotide
tgggggtttcttttggattagactcgagaa

SEQ ID NO: 169665 - DNA, 30 bp, Artificial Sequence
  Synthetic oligonucleotide
caatcagactattgacatccccgtcgagaa

SEQ ID NO: 169666 - DNA, 30 bp, Artificial Sequence
  Synthetic oligonucleotide
gggcctgggattacgtaatcatttcgagaa

SEQ ID NO: 169667 - DNA, 30 bp, Artificial Sequence
  Synthetic oligonucleotide
aaacttagatgattgcaatccgcgggagaa

SEQ ID NO: 169668 - DNA, 30 bp, Artificial Sequence
  Synthetic oligonucleotide
gggtgcatcgataaagggtgtgcgggagaa

SEQ ID NO: 169669 - DNA, 30 bp, Artificial Sequence
  Synthetic oligonucleotide
agccagaaactgatatcattctggggagaa

SEQ ID NO: 169670 - DNA, 30 bp, Artificial Sequence
  Synthetic oligonucleotide
gtctaatgtcgctaacagtgtgtgggagaa

SEQ ID NO: 169671 - DNA, 30 bp, Artificial Sequence
  Synthetic oligonucleotide
ctgtgttaaccgtctactcattctggagaa

SEQ ID NO: 169672 - DNA, 30 bp, Artificial Sequence
  Synthetic oligonucleotide
cggatgttgctttacctaccggtatgagaa

SEQ ID NO: 169673 - DNA, 30 bp, Artificial Sequence
  Synthetic oligonucleotide
cagcccccgtagccacaagacctctgagaa

SEQ ID NO: 169674 - DNA, 30 bp, Artificial Sequence
  Synthetic oligonucleotide
caatatatttatacacgctctatgtgagaa

SEQ ID NO: 169675 - DNA, 30 bp, Artificial Sequence
  Synthetic oligonucleotide
aacaatcactgcgttagaagccattgagaa

SEQ ID NO: 169676 - DNA, 30 bp, Artificial Sequence
  Synthetic oligonucleotide
caccaggggttaacccccgaaggttgagaa

SEQ ID NO: 169677 - DNA, 30 bp, Artificial Sequence
  Synthetic oligonucleotide
atacagaaagctggatactaagtttgagaa

SEQ ID NO: 169678 - DNA, 30 bp, Artificial Sequence
  Synthetic oligonucleotide
ctgatactagcgctgagctagtgaatagaa

SEQ ID NO: 169679 - DNA, 30 bp, Artificial Sequence
  Synthetic oligonucleotide
aaaggagtacgtccggcgccgcacatagaa

SEQ ID NO: 169680 - DNA, 30 bp, Artificial Sequence
  Synthetic oligonucleotide
gggtaggctaccaacctggtcgacatagaa

SEQ ID NO: 169681 - DNA, 30 bp, Artificial Sequence
  Synthetic oligonucleotide
cacatatttgcatcctaagtacccatagaa

SEQ ID NO: 169682 - DNA, 30 bp, Artificial Sequence
  Synthetic oligonucleotide
aggcaacagcttacaggagtagttatagaa

SEQ ID NO: 169683 - DNA, 30 bp, Artificial Sequence
  Synthetic oligonucleotide
acacggtatccattgacatattttatagaa

SEQ ID NO: 169684 - DNA, 30 bp, Artificial Sequence
  Synthetic oligonucleotide
tgattgctgaaacgaccgaagagactagaa

SEQ ID NO: 169685 - DNA, 30 bp, Artificial Sequence
  Synthetic oligonucleotide
gccgcgcgagggggtcgcctggagctagaa

SEQ ID NO: 169686 - DNA, 30 bp, Artificial Sequence
  Synthetic oligonucleotide
ggaggactacccatatgtctggagctagaa

SEQ ID NO: 169687 - DNA, 30 bp, Artificial Sequence
  Synthetic oligonucleotide
acacatgagctcaaagcttttgtgctagaa

SEQ ID NO: 169688 - DNA, 30 bp, Artificial Sequence
  Synthetic oligonucleotide
ggatcatatgggtctacctagggtctagaa

SEQ ID NO: 169689 - DNA, 30 bp, Artificial Sequence
  Synthetic oligonucleotide
aaaatctgtgatacgaggaatgcagtagaa

SEQ ID NO: 169690 - DNA, 30 bp, Artificial Sequence
  Synthetic oligonucleotide
cgcgaagttcggcggaccgggtttgtagaa

SEQ ID NO: 169691 - DNA, 30 bp, Artificial Sequence
  Synthetic oligonucleotide
agaaatgtcagagaaggggcacccttagaa

SEQ ID NO: 169692 - DNA, 30 bp, Artificial Sequence
  Synthetic oligonucleotide
atggggatacaccgaaacgccatcttagaa

SEQ ID NO: 169693 - DNA, 30 bp, Artificial Sequence
  Synthetic oligonucleotide
gcggaaaaataggccaaatgggtcttagaa

SEQ ID NO: 169694 - DNA, 30 bp, Artificial Sequence
  Synthetic oligonucleotide
ggcttctggcgttcgtgaagttggttagaa

SEQ ID NO: 169695 - DNA, 30 bp, Artificial Sequence
  Synthetic oligonucleotide
gaaatggcctaaacgtgacggtttttagaa

SEQ ID NO: 169696 - DNA, 30 bp, Artificial Sequence
  Synthetic oligonucleotide
aaatgctaaagtagaatggacgcgaacgaa

SEQ ID NO: 169697 - DNA, 30 bp, Artificial Sequence
  Synthetic oligonucleotide
gctaccatcgatggggcgcacgataacgaa

SEQ ID NO: 169698 - DNA, 30 bp, Artificial Sequence
  Synthetic oligonucleotide
atactgacgaaattgtaggaccaacacgaa

SEQ ID NO: 169699 - DNA, 30 bp, Artificial Sequence
  Synthetic oligonucleotide
gtgtacaagtatattcgcatagaacacgaa

SEQ ID NO: 169700 - DNA, 30 bp, Artificial Sequence
  Synthetic oligonucleotide
ctacgatttgggctaatactggcacacgaa

SEQ ID NO: 169701 - DNA, 30 bp, Artificial Sequence
  Synthetic oligonucleotide
atccctcacagtgaggacgtcagacacgaa

SEQ ID NO: 169702 - DNA, 30 bp, Artificial Sequence
  Synthetic oligonucleotide
atagcgatagttccagatacggtccacgaa

SEQ ID NO: 169703 - DNA, 30 bp, Artificial Sequence
  Synthetic oligonucleotide
ctgagacagttgttgagtacagcgcacgaa

SEQ ID NO: 169704 - DNA, 30 bp, Artificial Sequence
  Synthetic oligonucleotide
ttcacgggtacggggcccttgaaagacgaa

SEQ ID NO: 169705 - DNA, 30 bp, Artificial Sequence
  Synthetic oligonucleotide
agtacggcgcacgaattttaaaacgacgaa

SEQ ID NO: 169706 - DNA, 30 bp, Artificial Sequence
  Synthetic oligonucleotide
tacactctcgtaagacattggggggacgaa

SEQ ID NO: 169707 - DNA, 30 bp, Artificial Sequence
  Synthetic oligonucleotide
tgccattagagactcaaccctccatacgaa

SEQ ID NO: 169708 - DNA, 30 bp, Artificial Sequence
  Synthetic oligonucleotide
tcgctgcacggtcgtaagtgacgatacgaa

SEQ ID NO: 169709 - DNA, 30 bp, Artificial Sequence
  Synthetic oligonucleotide
acaaccagccctgtaagacctctatacgaa

SEQ ID NO: 169710 - DNA, 30 bp, Artificial Sequence
  Synthetic oligonucleotide
gcgcgcctttagcgaaaaggcttatacgaa

SEQ ID NO: 169711 - DNA, 30 bp, Artificial Sequence
  Synthetic oligonucleotide
tcttgtgaagaaaggtgcggagcctacgaa

SEQ ID NO: 169712 - DNA, 30 bp, Artificial Sequence
  Synthetic oligonucleotide
gtggcgcacgtttacgattacgggtacgaa

SEQ ID NO: 169713 - DNA, 30 bp, Artificial Sequence
  Synthetic oligonucleotide
ctctcaggatattcgggtacaggttacgaa

SEQ ID NO: 169714 - DNA, 30 bp, Artificial Sequence
  Synthetic oligonucleotide
catagactggcttaacaaaccagcaccgaa

SEQ ID NO: 169715 - DNA, 30 bp, Artificial Sequence
  Synthetic oligonucleotide
gggcgtgtgtattcaaagcctgctaccgaa

SEQ ID NO: 169716 - DNA, 30 bp, Artificial Sequence
  Synthetic oligonucleotide
ccgccggcgatcgcaaagtcgggtaccgaa

SEQ ID NO: 169717 - DNA, 30 bp, Artificial Sequence
  Synthetic oligonucleotide
atgaagtcatcctatattatgccgcccgaa

SEQ ID NO: 169718 - DNA, 30 bp, Artificial Sequence
  Synthetic oligonucleotide
cggtgagcccaataagactggtggcccgaa

SEQ ID NO: 169719 - DNA, 30 bp, Artificial Sequence
  Synthetic oligonucleotide
tactcgtgtatggcacaggcctatcccgaa

SEQ ID NO: 169720 - DNA, 30 bp, Artificial Sequence
  Synthetic oligonucleotide
cagagccgttgtcccacaggctcagccgaa

SEQ ID NO: 169721 - DNA, 30 bp, Artificial Sequence
  Synthetic oligonucleotide
tgcagggtggatgtgcgtcaacgagccgaa

SEQ ID NO: 169722 - DNA, 30 bp, Artificial Sequence
  Synthetic oligonucleotide
cctagtggtttggttaggtaaggagccgaa

SEQ ID NO: 169723 - DNA, 30 bp, Artificial Sequence
  Synthetic oligonucleotide
caaagccgaagattgaaatctttcgccgaa

SEQ ID NO: 169724 - DNA, 30 bp, Artificial Sequence
  Synthetic oligonucleotide
aaatatcatcagtcgtatcttaatgccgaa

SEQ ID NO: 169725 - DNA, 30 bp, Artificial Sequence
  Synthetic oligonucleotide
cagtcctccgctacggcaggtgatgccgaa

SEQ ID NO: 169726 - DNA, 30 bp, Artificial Sequence
  Synthetic oligonucleotide
ggtacttgtactaggccaggtccatccgaa

SEQ ID NO: 169727 - DNA, 30 bp, Artificial Sequence
  Synthetic oligonucleotide
gcggaaatactactagtcgcgtgatccgaa

SEQ ID NO: 169728 - DNA, 30 bp, Artificial Sequence
  Synthetic oligonucleotide
gtgctcgacgtgtcctaacaattatccgaa

SEQ ID NO: 169729 - DNA, 30 bp, Artificial Sequence
  Synthetic oligonucleotide
gggaacatctcatacttaacgttctccgaa

SEQ ID NO: 169730 - DNA, 30 bp, Artificial Sequence
  Synthetic oligonucleotide
ttaagtccaagggaagtaagctggtccgaa

SEQ ID NO: 169731 - DNA, 30 bp, Artificial Sequence
  Synthetic oligonucleotide
cgattaaattatagccggtatgattccgaa

SEQ ID NO: 169732 - DNA, 30 bp, Artificial Sequence
  Synthetic oligonucleotide
ttcaggtcaacaattaacagaggaagcgaa

SEQ ID NO: 169733 - DNA, 30 bp, Artificial Sequence
  Synthetic oligonucleotide
ggtttgacacacaggatatgaatgagcgaa

SEQ ID NO: 169734 - DNA, 30 bp, Artificial Sequence
  Synthetic oligonucleotide
gagggctggactgattgtggatatagcgaa

SEQ ID NO: 169735 - DNA, 30 bp, Artificial Sequence
  Synthetic oligonucleotide
cgagtgggataggccggggcctatagcgaa

SEQ ID NO: 169736 - DNA, 30 bp, Artificial Sequence
  Synthetic oligonucleotide
gagcgaatcttcagcaatttctcccgcgaa

SEQ ID NO: 169737 - DNA, 30 bp, Artificial Sequence
  Synthetic oligonucleotide
tcgtttgatcgcattagctggtcccgcgaa

SEQ ID NO: 169738 - DNA, 30 bp, Artificial Sequence
  Synthetic oligonucleotide
gggcaacattagcggatagtccggcgcgaa

SEQ ID NO: 169739 - DNA, 30 bp, Artificial Sequence
  Synthetic oligonucleotide
gatctcccggaaggctccggacctcgcgaa

SEQ ID NO: 169740 - DNA, 30 bp, Artificial Sequence
  Synthetic oligonucleotide
gcagttaggaacaatctagcatctcgcgaa

SEQ ID NO: 169741 - DNA, 30 bp, Artificial Sequence
  Synthetic oligonucleotide
actgttgtggagtctcctaatgacggcgaa

SEQ ID NO: 169742 - DNA, 30 bp, Artificial Sequence
  Synthetic oligonucleotide
aaggtagctggctaacttgactgcggcgaa

SEQ ID NO: 169743 - DNA, 30 bp, Artificial Sequence
  Synthetic oligonucleotide
tgactagttgaggggtggcatccgggcgaa

SEQ ID NO: 169744 - DNA, 30 bp, Artificial Sequence
  Synthetic oligonucleotide
gagatgtaccgtgacagcattcactgcgaa

SEQ ID NO: 169745 - DNA, 30 bp, Artificial Sequence
  Synthetic oligonucleotide
gaatgcgctgaaaaggacctgtcaatcgaa

SEQ ID NO: 169746 - DNA, 30 bp, Artificial Sequence
  Synthetic oligonucleotide
tagaatcaccgggttaaatcactaatcgaa

SEQ ID NO: 169747 - DNA, 30 bp, Artificial Sequence
  Synthetic oligonucleotide
tcttgcaaccctttattggataacatcgaa

SEQ ID NO: 169748 - DNA, 30 bp, Artificial Sequence
  Synthetic oligonucleotide
ccgatagccgcagttagtggtaagatcgaa

SEQ ID NO: 169749 - DNA, 30 bp, Artificial Sequence
  Synthetic oligonucleotide
gaccagtcgggtaggagatatgcgatcgaa

SEQ ID NO: 169750 - DNA, 30 bp, Artificial Sequence
  Synthetic oligonucleotide
tggtcaaacaaatccgacaggatgatcgaa

SEQ ID NO: 169751 - DNA, 30 bp, Artificial Sequence
  Synthetic oligonucleotide
ttcatggggcgatgccacagtttgatcgaa

SEQ ID NO: 169752 - DNA, 30 bp, Artificial Sequence
  Synthetic oligonucleotide
acctttgcacaagggggacgagaactcgaa

SEQ ID NO: 169753 - DNA, 30 bp, Artificial Sequence
  Synthetic oligonucleotide
tgagcatcgaagatttcctgttacctcgaa

SEQ ID NO: 169754 - DNA, 30 bp, Artificial Sequence
  Synthetic oligonucleotide
caagttccggacatagagtatgcgctcgaa

SEQ ID NO: 169755 - DNA, 30 bp, Artificial Sequence
  Synthetic oligonucleotide
tgcgttatgaatgaggcgtggagcgtcgaa

SEQ ID NO: 169756 - DNA, 30 bp, Artificial Sequence
  Synthetic oligonucleotide
tactgttgtctacttcctgatttggtcgaa

SEQ ID NO: 169757 - DNA, 30 bp, Artificial Sequence
  Synthetic oligonucleotide
gggtggttaggtgttcacaaacatgtcgaa

SEQ ID NO: 169758 - DNA, 30 bp, Artificial Sequence
  Synthetic oligonucleotide
ggtgcgggttcaagattgagacttgtcgaa

SEQ ID NO: 169759 - DNA, 30 bp, Artificial Sequence
  Synthetic oligonucleotide
ttccttagttccctgaatgaaagattcgaa

SEQ ID NO: 169760 - DNA, 30 bp, Artificial Sequence
  Synthetic oligonucleotide
caacagggaaatccagcgggtatcttcgaa

SEQ ID NO: 169761 - DNA, 30 bp, Artificial Sequence
  Synthetic oligonucleotide
cccaaatgcttggcctatatacggttcgaa

SEQ ID NO: 169762 - DNA, 30 bp, Artificial Sequence
  Synthetic oligonucleotide
gagtcaagacatcggtacgcggtgttcgaa

SEQ ID NO: 169763 - DNA, 30 bp, Artificial Sequence
  Synthetic oligonucleotide
atctggagagttgactccgggaacaaggaa

SEQ ID NO: 169764 - DNA, 30 bp, Artificial Sequence
  Synthetic oligonucleotide
taccgtacgagtcgagttttgatcaaggaa

SEQ ID NO: 169765 - DNA, 30 bp, Artificial Sequence
  Synthetic oligonucleotide
ggataattaacgacctatttacggaaggaa

SEQ ID NO: 169766 - DNA, 30 bp, Artificial Sequence
  Synthetic oligonucleotide
cgtattttcgaacccttaaaaattaaggaa

SEQ ID NO: 169767 - DNA, 30 bp, Artificial Sequence
  Synthetic oligonucleotide
tcgccaccagtccgcctgcttattaaggaa

SEQ ID NO: 169768 - DNA, 30 bp, Artificial Sequence
  Synthetic oligonucleotide
cacgcacatatgcacttatttcgacaggaa

SEQ ID NO: 169769 - DNA, 30 bp, Artificial Sequence
  Synthetic oligonucleotide
cccatgtccattagttgggaattacaggaa

SEQ ID NO: 169770 - DNA, 30 bp, Artificial Sequence
  Synthetic oligonucleotide
caatttgggctgcctcgatccgcccaggaa

SEQ ID NO: 169771 - DNA, 30 bp, Artificial Sequence
  Synthetic oligonucleotide
gcaagacttgctgaagacatgcagcaggaa

SEQ ID NO: 169772 - DNA, 31 bp, Artificial Sequence
  Synthetic oligonucleotide
gccgaaaatcggacctgacatggtgcaggaa

SEQ ID NO: 169773 - DNA, 30 bp, Artificial Sequence
  Synthetic oligonucleotide
caacttagagtacaagaatcgaatcaggaa

SEQ ID NO: 169774 - DNA, 30 bp, Artificial Sequence
  Synthetic oligonucleotide
tgccccatactcatatcgggtttagaggaa

SEQ ID NO: 169775 - DNA, 30 bp, Artificial Sequence
  Synthetic oligonucleotide
ttacgtcactgacgtcaatccaccgaggaa

SEQ ID NO: 169776 - DNA, 30 bp, Artificial Sequence
  Synthetic oligonucleotide
ccgtgtttatggttatagcacagtgaggaa

SEQ ID NO: 169777 - DNA, 30 bp, Artificial Sequence
  Synthetic oligonucleotide
caagaatcctaattgaacttgccataggaa

SEQ ID NO: 169778 - DNA, 30 bp, Artificial Sequence
  Synthetic oligonucleotide
tattatgtgatcaagagaggccgataggaa

SEQ ID NO: 169779 - DNA, 30 bp, Artificial Sequence
  Synthetic oligonucleotide
atacagagccggttgagtattctataggaa

SEQ ID NO: 169780 - DNA, 30 bp, Artificial Sequence
  Synthetic oligonucleotide
ggtagaggacgcgagcaattgatgtaggaa

SEQ ID NO: 169781 - DNA, 30 bp, Artificial Sequence
  Synthetic oligonucleotide
tctatactgcacgcgaaacggtattaggaa

SEQ ID NO: 169782 - DNA, 30 bp, Artificial Sequence
  Synthetic oligonucleotide
aatatatgagcggcggaacggtccacggaa

SEQ ID NO: 169783 - DNA, 30 bp, Artificial Sequence
  Synthetic oligonucleotide
tctgctcatctttaggccatagagacggaa

SEQ ID NO: 169784 - DNA, 30 bp, Artificial Sequence
  Synthetic oligonucleotide
taactgtgccggaaagctaaggctacggaa

SEQ ID NO: 169785 - DNA, 30 bp, Artificial Sequence
  Synthetic oligonucleotide
tccccaacccactacgtctcacaaccggaa

SEQ ID NO: 169786 - DNA, 30 bp, Artificial Sequence
  Synthetic oligonucleotide
aagtctcaccactcagtgttccccccggaa

SEQ ID NO: 169787 - DNA, 30 bp, Artificial Sequence
  Synthetic oligonucleotide
acgcgcgggattcgacaacggacgccggaa

SEQ ID NO: 169788 - DNA, 30 bp, Artificial Sequence
  Synthetic oligonucleotide
aacgacgattacaattgaagggttccggaa

SEQ ID NO: 169789 - DNA, 30 bp, Artificial Sequence
  Synthetic oligonucleotide
tgcgattgaacagtaaaaactgaagcggaa

SEQ ID NO: 169790 - DNA, 30 bp, Artificial Sequence
  Synthetic oligonucleotide
acaggccttgttcttagtaggtaagcggaa

SEQ ID NO: 169791 - DNA, 30 bp, Artificial Sequence
  Synthetic oligonucleotide
acatcgttattaagtcaaagtatagcggaa

SEQ ID NO: 169792 - DNA, 30 bp, Artificial Sequence
  Synthetic oligonucleotide
ccagcgagggctctgtagtctcccgcggaa

SEQ ID NO: 169793 - DNA, 30 bp, Artificial Sequence
  Synthetic oligonucleotide
aatgtacccgagaagataattagcgcggaa

SEQ ID NO: 169794 - DNA, 30 bp, Artificial Sequence
  Synthetic oligonucleotide
tgcaccgtcgagattcatcattgcgcggaa

SEQ ID NO: 169795 - DNA, 30 bp, Artificial Sequence
  Synthetic oligonucleotide
accagtaaaaagtttttacgcgcggcggaa

SEQ ID NO: 169796 - DNA, 30 bp, Artificial Sequence
  Synthetic oligonucleotide
gcgagctcgccgtgagacaagggggcggaa

SEQ ID NO: 169797 - DNA, 30 bp, Artificial Sequence
  Synthetic oligonucleotide
cagtcagggctaggattcggtccatcggaa

SEQ ID NO: 169798 - DNA, 30 bp, Artificial Sequence
  Synthetic oligonucleotide
aatcggacctgcgcagagcttacgtcggaa

SEQ ID NO: 169799 - DNA, 30 bp, Artificial Sequence
  Synthetic oligonucleotide
ccgaccacgttactcatcctgctgtcggaa

SEQ ID NO: 169800 - DNA, 30 bp, Artificial Sequence
  Synthetic oligonucleotide
caacgtgtgatctcaggaatgaattcggaa

SEQ ID NO: 169801 - DNA, 30 bp, Artificial Sequence
  Synthetic oligonucleotide
ggaaatgtagcccccttagcggcttcggaa

SEQ ID NO: 169802 - DNA, 30 bp, Artificial Sequence
  Synthetic oligonucleotide
gttattaaagacggtgggcgaagttcggaa

SEQ ID NO: 169803 - DNA, 30 bp, Artificial Sequence
  Synthetic oligonucleotide
tttcctcaatggatcgagaacgaaagggaa

SEQ ID NO: 169804 - DNA, 30 bp, Artificial Sequence
  Synthetic oligonucleotide
ggaccaactcgtggtgcgtggacaagggaa

SEQ ID NO: 169805 - DNA, 30 bp, Artificial Sequence
  Synthetic oligonucleotide
gtgagttgatcaacggaacgacacagggaa

SEQ ID NO: 169806 - DNA, 30 bp, Artificial Sequence
  Synthetic oligonucleotide
tattaagtgcgggcgcttcggaggagggaa

SEQ ID NO: 169807 - DNA, 30 bp, Artificial Sequence
  Synthetic oligonucleotide
tccgggccagtaggggccagattgagggaa

SEQ ID NO: 169808 - DNA, 30 bp, Artificial Sequence
  Synthetic oligonucleotide
gccatctccaaggcgggctgaagtagggaa

SEQ ID NO: 169809 - DNA, 30 bp, Artificial Sequence
  Synthetic oligonucleotide
atggaccaccggttggggaagggtagggaa

SEQ ID NO: 169810 - DNA, 30 bp, Artificial Sequence
  Synthetic oligonucleotide
ccagactcagaagtaatctatggacgggaa

SEQ ID NO: 169811 - DNA, 30 bp, Artificial Sequence
  Synthetic oligonucleotide
tattgcattattatttgtgacatccgggaa

SEQ ID NO: 169812 - DNA, 30 bp, Artificial Sequence
  Synthetic oligonucleotide
acggcgaacagggatgcactttcgcgggaa

SEQ ID NO: 169813 - DNA, 30 bp, Artificial Sequence
  Synthetic oligonucleotide
ttatcgctggccatgatagatagtcgggaa

SEQ ID NO: 169814 - DNA, 30 bp, Artificial Sequence
  Synthetic oligonucleotide
gtccaacaccacaccgccgcgcgtcgggaa

SEQ ID NO: 169815 - DNA, 30 bp, Artificial Sequence
  Synthetic oligonucleotide
gctcaaacggtgcatcaaatcggtcgggaa

SEQ ID NO: 169816 - DNA, 31 bp, Artificial Sequence
  Synthetic oligonucleotide
tcttgaaattggagccggtagaattcgggaa

SEQ ID NO: 169817 - DNA, 30 bp, Artificial Sequence
  Synthetic oligonucleotide
gccgataatcccaagatagatctaggggaa

SEQ ID NO: 169818 - DNA, 30 bp, Artificial Sequence
  Synthetic oligonucleotide
taggtaccctattaaactcttcacggggaa

SEQ ID NO: 169819 - DNA, 30 bp, Artificial Sequence
  Synthetic oligonucleotide
atcggaggatacctataaagtcgcggggaa

SEQ ID NO: 169820 - DNA, 30 bp, Artificial Sequence
  Synthetic oligonucleotide
cactaccagttaattctgcggttcggggaa

SEQ ID NO: 169821 - DNA, 30 bp, Artificial Sequence
  Synthetic oligonucleotide
tgcattagtatagtggtcaggtcgggggaa

SEQ ID NO: 169822 - DNA, 30 bp, Artificial Sequence
  Synthetic oligonucleotide
tcgtctctattaagacatgacaggggggaa

SEQ ID NO: 169823 - DNA, 30 bp, Artificial Sequence
  Synthetic oligonucleotide
gatcgcttattggccagtagtggtggggaa

SEQ ID NO: 169824 - DNA, 30 bp, Artificial Sequence
  Synthetic oligonucleotide
cagtatcaaattacatacgaccaatgggaa

SEQ ID NO: 169825 - DNA, 30 bp, Artificial Sequence
  Synthetic oligonucleotide
ccaaggttgcgaaccacaatcgcatgggaa

SEQ ID NO: 169826 - DNA, 30 bp, Artificial Sequence
  Synthetic oligonucleotide
tggcatacatttcgttccctgtgatgggaa

SEQ ID NO: 169827 - DNA, 30 bp, Artificial Sequence
  Synthetic oligonucleotide
tccgttggggaggttctcgggaagtgggaa

SEQ ID NO: 169828 - DNA, 30 bp, Artificial Sequence
  Synthetic oligonucleotide
atcacatcttgcgggaaatgggcgtgggaa

SEQ ID NO: 169829 - DNA, 30 bp, Artificial Sequence
  Synthetic oligonucleotide
cggagattatcaggaccgatgaggtgggaa

SEQ ID NO: 169830 - DNA, 30 bp, Artificial Sequence
  Synthetic oligonucleotide
gatgtcatctgactcatattgggaatggaa

SEQ ID NO: 169831 - DNA, 30 bp, Artificial Sequence
  Synthetic oligonucleotide
cgtcgtcccgaatggcaatcattcatggaa

SEQ ID NO: 169832 - DNA, 30 bp, Artificial Sequence
  Synthetic oligonucleotide
atcgggggtattctctgacgacagatggaa

SEQ ID NO: 169833 - DNA, 30 bp, Artificial Sequence
  Synthetic oligonucleotide
gccagcaagacccgggatggaggtatggaa

SEQ ID NO: 169834 - DNA, 30 bp, Artificial Sequence
  Synthetic oligonucleotide
gcgcgtgccttgcgaatacttatactggaa

SEQ ID NO: 169835 - DNA, 30 bp, Artificial Sequence
  Synthetic oligonucleotide
cgaaaatagcttttgattatgtatctggaa

SEQ ID NO: 169836 - DNA, 30 bp, Artificial Sequence
  Synthetic oligonucleotide
atggataagagacgtcagctgagggtggaa

SEQ ID NO: 169837 - DNA, 30 bp, Artificial Sequence
  Synthetic oligonucleotide
aaccaaagtatcctgagtaatctggtggaa

SEQ ID NO: 169838 - DNA, 30 bp, Artificial Sequence
  Synthetic oligonucleotide
tgaatggagaacgcactagcagtggtggaa

SEQ ID NO: 169839 - DNA, 30 bp, Artificial Sequence
  Synthetic oligonucleotide
ggactggctgccaagcgacatttggtggaa

SEQ ID NO: 169840 - DNA, 30 bp, Artificial Sequence
  Synthetic oligonucleotide
gcaggcgacgttaaaaatgtcaatgtggaa

SEQ ID NO: 169841 - DNA, 30 bp, Artificial Sequence
  Synthetic oligonucleotide
gttcggagaaaactaatactaaccttggaa

SEQ ID NO: 169842 - DNA, 30 bp, Artificial Sequence
  Synthetic oligonucleotide
atactcgattgtattcaatgggccttggaa

SEQ ID NO: 169843 - DNA, 30 bp, Artificial Sequence
  Synthetic oligonucleotide
cgacactcagcggatcagcagtggttggaa

SEQ ID NO: 169844 - DNA, 30 bp, Artificial Sequence
  Synthetic oligonucleotide
aggcggttgctctccaaggatcatttggaa

SEQ ID NO: 169845 - DNA, 30 bp, Artificial Sequence
  Synthetic oligonucleotide
tttgtagcccgtcctacacctccaaatgaa

SEQ ID NO: 169846 - DNA, 29 bp, Artificial Sequence
  Synthetic oligonucleotide
atggacgttggatccccgcacagaatgaa

SEQ ID NO: 169847 - DNA, 30 bp, Artificial Sequence
  Synthetic oligonucleotide
tctgcgggtccaacgtaaaattggaatgaa

SEQ ID NO: 169848 - DNA, 30 bp, Artificial Sequence
  Synthetic oligonucleotide
acatgcggcctcaggctagggcgtcatgaa

SEQ ID NO: 169849 - DNA, 30 bp, Artificial Sequence
  Synthetic oligonucleotide
taagacgaatactaagggcaacttcatgaa

SEQ ID NO: 169850 - DNA, 30 bp, Artificial Sequence
  Synthetic oligonucleotide
aaaccgcagtggctcagtagttgagatgaa

SEQ ID NO: 169851 - DNA, 30 bp, Artificial Sequence
  Synthetic oligonucleotide
taaatggccgatagtctcagactggatgaa

SEQ ID NO: 169852 - DNA, 30 bp, Artificial Sequence
  Synthetic oligonucleotide
cacgttcgactattattactacgtgatgaa

SEQ ID NO: 169853 - DNA, 30 bp, Artificial Sequence
  Synthetic oligonucleotide
acgaaataggcaaaatgtacgggtgatgaa

SEQ ID NO: 169854 - DNA, 30 bp, Artificial Sequence
  Synthetic oligonucleotide
ctcgcgtctatagttcattgtggatatgaa

SEQ ID NO: 169855 - DNA, 30 bp, Artificial Sequence
  Synthetic oligonucleotide
cggtgaggcccaacccagtttggatatgaa

SEQ ID NO: 169856 - DNA, 30 bp, Artificial Sequence
  Synthetic oligonucleotide
acaggcattggaagctagccggattatgaa

SEQ ID NO: 169857 - DNA, 30 bp, Artificial Sequence
  Synthetic oligonucleotide
agtgtaggtgtgcccattgagttaactgaa

SEQ ID NO: 169858 - DNA, 30 bp, Artificial Sequence
  Synthetic oligonucleotide
tttcatgacatatgttggctgaacactgaa

SEQ ID NO: 169859 - DNA, 30 bp, Artificial Sequence
  Synthetic oligonucleotide
aggacttgagctatgtccgaaaccactgaa

SEQ ID NO: 169860 - DNA, 30 bp, Artificial Sequence
  Synthetic oligonucleotide
gcgggagcaagctcggtatccgtcactgaa

SEQ ID NO: 169861 - DNA, 31 bp, Artificial Sequence
  Synthetic oligonucleotide
gcaggacctctcattgtcactatagactgaa

SEQ ID NO: 169862 - DNA, 30 bp, Artificial Sequence
  Synthetic oligonucleotide
catgtgccaagctactaccctactcctgaa

SEQ ID NO: 169863 - DNA, 30 bp, Artificial Sequence
  Synthetic oligonucleotide
ctcgaaaaaaaatgcgagctaccagctgaa

SEQ ID NO: 169864 - DNA, 30 bp, Artificial Sequence
  Synthetic oligonucleotide
gtggcggtgtattattcaggtggagctgaa

SEQ ID NO: 169865 - DNA, 30 bp, Artificial Sequence
  Synthetic oligonucleotide
cctttactagaatccaatgcactcgctgaa

SEQ ID NO: 169866 - DNA, 30 bp, Artificial Sequence
  Synthetic oligonucleotide
ccaggctcatgactgtgtaacggtgctgaa

SEQ ID NO: 169867 - DNA, 30 bp, Artificial Sequence
  Synthetic oligonucleotide
ggggcaccttctatatggtaaaactctgaa

SEQ ID NO: 169868 - DNA, 30 bp, Artificial Sequence
  Synthetic oligonucleotide
tctatatgatccaggtgcaccgcctctgaa

SEQ ID NO: 169869 - DNA, 30 bp, Artificial Sequence
  Synthetic oligonucleotide
gattcatacaacgagacttgagagtctgaa

SEQ ID NO: 169870 - DNA, 30 bp, Artificial Sequence
  Synthetic oligonucleotide
ttatcgtcgatcttccatcaggggtctgaa

SEQ ID NO: 169871 - DNA, 30 bp, Artificial Sequence
  Synthetic oligonucleotide
cgttgcatctatactttatcaatttctgaa

SEQ ID NO: 169872 - DNA, 31 bp, Artificial Sequence
  Synthetic oligonucleotide
atggccatacggcctcagtgttttttctgaa

SEQ ID NO: 169873 - DNA, 30 bp, Artificial Sequence
  Synthetic oligonucleotide
tataacgctagagttaaaaggaccagtgaa

SEQ ID NO: 169874 - DNA, 30 bp, Artificial Sequence
  Synthetic oligonucleotide
gctggtccctaggcggaattgctcagtgaa

SEQ ID NO: 169875 - DNA, 30 bp, Artificial Sequence
  Synthetic oligonucleotide
ttcatgcttttgtcgttgctcaagagtgaa

SEQ ID NO: 169876 - DNA, 30 bp, Artificial Sequence
  Synthetic oligonucleotide
ttgatgttgtatggcatggaaccgagtgaa

SEQ ID NO: 169877 - DNA, 30 bp, Artificial Sequence
  Synthetic oligonucleotide
ttatatttggcgatatagagttcgagtgaa

SEQ ID NO: 169878 - DNA, 30 bp, Artificial Sequence
  Synthetic oligonucleotide
tagctgggagagcactttacatgtagtgaa

SEQ ID NO: 169879 - DNA, 30 bp, Artificial Sequence
  Synthetic oligonucleotide
tacctcgtggtcatggcattaacacgtgaa

SEQ ID NO: 169880 - DNA, 30 bp, Artificial Sequence
  Synthetic oligonucleotide
taagaattaatacatgaaaatggacgtgaa

SEQ ID NO: 169881 - DNA, 30 bp, Artificial Sequence
  Synthetic oligonucleotide
catggatcctataagaaattaacccgtgaa

SEQ ID NO: 169882 - DNA, 30 bp, Artificial Sequence
  Synthetic oligonucleotide
gagctacatagaaagtcaacgtgccgtgaa

SEQ ID NO: 169883 - DNA, 30 bp, Artificial Sequence
  Synthetic oligonucleotide
ccataccgctaagactagttaaagcgtgaa

SEQ ID NO: 169884 - DNA, 30 bp, Artificial Sequence
  Synthetic oligonucleotide
cgtcggagctaatgattgtaaaggcgtgaa

SEQ ID NO: 169885 - DNA, 30 bp, Artificial Sequence
  Synthetic oligonucleotide
acaaggaaattcacacgtgttgggcgtgaa

SEQ ID NO: 169886 - DNA, 30 bp, Artificial Sequence
  Synthetic oligonucleotide
tcgatactgataaaccaatcgctgcgtgaa

SEQ ID NO: 169887 - DNA, 30 bp, Artificial Sequence
  Synthetic oligonucleotide
gcaatgaagcgacacgtcaaatctcgtgaa

SEQ ID NO: 169888 - DNA, 30 bp, Artificial Sequence
  Synthetic oligonucleotide
gcgcgacacgcgccactctgatcaggtgaa

SEQ ID NO: 169889 - DNA, 30 bp, Artificial Sequence
  Synthetic oligonucleotide
gcaaccacgaattttccgggctccggtgaa

SEQ ID NO: 169890 - DNA, 30 bp, Artificial Sequence
  Synthetic oligonucleotide
aaggaccactacaaaatcatgtccggtgaa

SEQ ID NO: 169891 - DNA, 30 bp, Artificial Sequence
  Synthetic oligonucleotide
agttctatttcaatggaatggcagggtgaa

SEQ ID NO: 169892 - DNA, 30 bp, Artificial Sequence
  Synthetic oligonucleotide
atgtttgatgctacgtgtctggggggtgaa

SEQ ID NO: 169893 - DNA, 30 bp, Artificial Sequence
  Synthetic oligonucleotide
gattggggtgtcatcttcgactctggtgaa

SEQ ID NO: 169894 - DNA, 30 bp, Artificial Sequence
  Synthetic oligonucleotide
ccacatgtcaaatgttttcttcttggtgaa

SEQ ID NO: 169895 - DNA, 30 bp, Artificial Sequence
  Synthetic oligonucleotide
ccgaggggtgcgttccagctctactgtgaa

SEQ ID NO: 169896 - DNA, 30 bp, Artificial Sequence
  Synthetic oligonucleotide
tacgaagcgagggcagctatttcctgtgaa

SEQ ID NO: 169897 - DNA, 30 bp, Artificial Sequence
  Synthetic oligonucleotide
gtgcaacctgcgcacagtgttggctgtgaa

SEQ ID NO: 169898 - DNA, 30 bp, Artificial Sequence
  Synthetic oligonucleotide
tcccatatagggaggctgatttagtgtgaa

SEQ ID NO: 169899 - DNA, 30 bp, Artificial Sequence
  Synthetic oligonucleotide
tcaattatatcacgcgcgtcaaggtgtgaa

SEQ ID NO: 169900 - DNA, 30 bp, Artificial Sequence
  Synthetic oligonucleotide
gagcagggactttcggtatagtggtgtgaa

SEQ ID NO: 169901 - DNA, 30 bp, Artificial Sequence
  Synthetic oligonucleotide
ggggcatacgatcttagtgctatgtgtgaa

SEQ ID NO: 169902 - DNA, 30 bp, Artificial Sequence
  Synthetic oligonucleotide
caacctctaagctggggtccgttaattgaa

SEQ ID NO: 169903 - DNA, 30 bp, Artificial Sequence
  Synthetic oligonucleotide
ctcgctcgttgcatctcgtaaatgattgaa

SEQ ID NO: 169904 - DNA, 30 bp, Artificial Sequence
  Synthetic oligonucleotide
gagagggtctagtcatagagaccccttgaa

SEQ ID NO: 169905 - DNA, 30 bp, Artificial Sequence
  Synthetic oligonucleotide
actagcgcgttcgatgcacactcccttgaa

SEQ ID NO: 169906 - DNA, 30 bp, Artificial Sequence
  Synthetic oligonucleotide
tagctgggttgttttgcaagtgcgcttgaa

SEQ ID NO: 169907 - DNA, 30 bp, Artificial Sequence
  Synthetic oligonucleotide
atgccattcggccacaaggggcgtcttgaa

SEQ ID NO: 169908 - DNA, 30 bp, Artificial Sequence
  Synthetic oligonucleotide
gcctccgaggcgggtaccgaggcagttgaa

SEQ ID NO: 169909 - DNA, 30 bp, Artificial Sequence
  Synthetic oligonucleotide
cggcaaacgcaccacgggggtgcagttgaa

SEQ ID NO: 169910 - DNA, 30 bp, Artificial Sequence
  Synthetic oligonucleotide
atagattcaccagctcgttagcgagttgaa

SEQ ID NO: 169911 - DNA, 30 bp, Artificial Sequence
  Synthetic oligonucleotide
ttatcgtagatgaatgggttcctggttgaa

SEQ ID NO: 169912 - DNA, 30 bp, Artificial Sequence
  Synthetic oligonucleotide
ctagcggccctgaggaacgttagtgttgaa

SEQ ID NO: 169913 - DNA, 30 bp, Artificial Sequence
  Synthetic oligonucleotide
cctaggtagagggtaggtcactaatttgaa

SEQ ID NO: 169914 - DNA, 30 bp, Artificial Sequence
  Synthetic oligonucleotide
cgggctgctttgcaaattagaagatttgaa

SEQ ID NO: 169915 - DNA, 30 bp, Artificial Sequence
  Synthetic oligonucleotide
gggtccacagtggactcttcaagcaaataa

SEQ ID NO: 169916 - DNA, 30 bp, Artificial Sequence
  Synthetic oligonucleotide
ggtatagacttatcttagtcaccgaaataa

SEQ ID NO: 169917 - DNA, 30 bp, Artificial Sequence
  Synthetic oligonucleotide
aaggacacttatattcgaggagtgaaataa

SEQ ID NO: 169918 - DNA, 30 bp, Artificial Sequence
  Synthetic oligonucleotide
ggcttgtcggctatgccacgggcacaataa

SEQ ID NO: 169919 - DNA, 30 bp, Artificial Sequence
  Synthetic oligonucleotide
acaaccgtgccagcgtgtcgaagacaataa

SEQ ID NO: 169920 - DNA, 30 bp, Artificial Sequence
  Synthetic oligonucleotide
gctaagtcccgctcaagtaaagtacaataa

SEQ ID NO: 169921 - DNA, 30 bp, Artificial Sequence
  Synthetic oligonucleotide
aacctaatacctcgtgagatggtacaataa

SEQ ID NO: 169922 - DNA, 30 bp, Artificial Sequence
  Synthetic oligonucleotide
tactgtctctctctactaattcaccaataa

SEQ ID NO: 169923 - DNA, 30 bp, Artificial Sequence
  Synthetic oligonucleotide
tgtaccactggcatgggccgttgccaataa

SEQ ID NO: 169924 - DNA, 30 bp, Artificial Sequence
  Synthetic oligonucleotide
catccgcagtgtaggcagtcctatcaataa

SEQ ID NO: 169925 - DNA, 30 bp, Artificial Sequence
  Synthetic oligonucleotide
gttccaagtaactaagtcgtttatcaataa

SEQ ID NO: 169926 - DNA, 30 bp, Artificial Sequence
  Synthetic oligonucleotide
tagacaggtgaagggttaggagctcaataa

SEQ ID NO: 169927 - DNA, 30 bp, Artificial Sequence
  Synthetic oligonucleotide
gtggtgcccaggtacaacactgaagaataa

SEQ ID NO: 169928 - DNA, 30 bp, Artificial Sequence
  Synthetic oligonucleotide
aaaactaaagccccatcgtgcatagaataa

SEQ ID NO: 169929 - DNA, 30 bp, Artificial Sequence
  Synthetic oligonucleotide
aataggagcacaggcttatcgtgcgaataa

SEQ ID NO: 169930 - DNA, 30 bp, Artificial Sequence
  Synthetic oligonucleotide
ggacggctcctgcgacccaacacggaataa

SEQ ID NO: 169931 - DNA, 30 bp, Artificial Sequence
  Synthetic oligonucleotide
gtttcgcattcccacacattgcttgaataa

SEQ ID NO: 169932 - DNA, 30 bp, Artificial Sequence
  Synthetic oligonucleotide
gttaggatctggagtaagccggcataataa

SEQ ID NO: 169933 - DNA, 30 bp, Artificial Sequence
  Synthetic oligonucleotide
gccagatggcggtggcagtttcagtaataa

SEQ ID NO: 169934 - DNA, 30 bp, Artificial Sequence
  Synthetic oligonucleotide
taaatgcctcacgtacagtgcgaaacataa

SEQ ID NO: 169935 - DNA, 30 bp, Artificial Sequence
  Synthetic oligonucleotide
taattaacaaatgtcaagatcagcacataa

SEQ ID NO: 169936 - DNA, 30 bp, Artificial Sequence
  Synthetic oligonucleotide
ggagtaggtctgctgaatcagggcacataa

SEQ ID NO: 169937 - DNA, 30 bp, Artificial Sequence
  Synthetic oligonucleotide
ggagtagaatacatggaggacacgacataa

SEQ ID NO: 169938 - DNA, 30 bp, Artificial Sequence
  Synthetic oligonucleotide
gggtaattgggcacaccccgggatacataa

SEQ ID NO: 169939 - DNA, 30 bp, Artificial Sequence
  Synthetic oligonucleotide
agccggagcatgcattacccacaaccataa

SEQ ID NO: 169940 - DNA, 30 bp, Artificial Sequence
  Synthetic oligonucleotide
catggagggttacctaccttttggccataa

SEQ ID NO: 169941 - DNA, 30 bp, Artificial Sequence
  Synthetic oligonucleotide
aagcgggggtttacggcaccgcaagcataa

SEQ ID NO: 169942 - DNA, 30 bp, Artificial Sequence
  Synthetic oligonucleotide
ccaagtagaatcttcgaggtcacggcataa

SEQ ID NO: 169943 - DNA, 30 bp, Artificial Sequence
  Synthetic oligonucleotide
gtccgagcaagcatacccgtaagggcataa

SEQ ID NO: 169944 - DNA, 30 bp, Artificial Sequence
  Synthetic oligonucleotide
tcagtggacctaggcctcgccccctcataa

SEQ ID NO: 169945 - DNA, 30 bp, Artificial Sequence
  Synthetic oligonucleotide
atctagcccagcgatacgaacttttcataa

SEQ ID NO: 169946 - DNA, 30 bp, Artificial Sequence
  Synthetic oligonucleotide
gttctaaactggctgtgtagagaaagataa

SEQ ID NO: 169947 - DNA, 30 bp, Artificial Sequence
  Synthetic oligonucleotide
taatgtccttagaccctatgtgcaagataa

SEQ ID NO: 169948 - DNA, 30 bp, Artificial Sequence
  Synthetic oligonucleotide
gcccattcttagggcatcacaggaagataa

SEQ ID NO: 169949 - DNA, 30 bp, Artificial Sequence
  Synthetic oligonucleotide
caaagtcgagagcgcacatttaacagataa

SEQ ID NO: 169950 - DNA, 30 bp, Artificial Sequence
  Synthetic oligonucleotide
gaagtggtcacagtgaggggtcccagataa

SEQ ID NO: 169951 - DNA, 30 bp, Artificial Sequence
  Synthetic oligonucleotide
ttcctaaatggagagggttcattgagataa

SEQ ID NO: 169952 - DNA, 30 bp, Artificial Sequence
  Synthetic oligonucleotide
tatttgaagctgaggtaacggtatagataa

SEQ ID NO: 169953 - DNA, 30 bp, Artificial Sequence
  Synthetic oligonucleotide
gttcgtgtaggagaaaggcttgttagataa

SEQ ID NO: 169954 - DNA, 30 bp, Artificial Sequence
  Synthetic oligonucleotide
ccgaatgttcgataagttaaaggccgataa

SEQ ID NO: 169955 - DNA, 30 bp, Artificial Sequence
  Synthetic oligonucleotide
ttgccatacggattcaccaagtgcggataa

SEQ ID NO: 169956 - DNA, 30 bp, Artificial Sequence
  Synthetic oligonucleotide
ctagggcatgcggcgtctcgtcttggataa

SEQ ID NO: 169957 - DNA, 30 bp, Artificial Sequence
  Synthetic oligonucleotide
ctacacagatggcgaattggtgaatgataa

SEQ ID NO: 169958 - DNA, 30 bp, Artificial Sequence
  Synthetic oligonucleotide
agcgggcacacatcaagccaatgctgataa

SEQ ID NO: 169959 - DNA, 30 bp, Artificial Sequence
  Synthetic oligonucleotide
ttctttgagtcgaagggtacctgctgataa

SEQ ID NO: 169960 - DNA, 30 bp, Artificial Sequence
  Synthetic oligonucleotide
gaccaccagcgcgccaaagctgtttgataa

SEQ ID NO: 169961 - DNA, 30 bp, Artificial Sequence
  Synthetic oligonucleotide
gctacaattacgttcaacagatcaatataa

SEQ ID NO: 169962 - DNA, 30 bp, Artificial Sequence
  Synthetic oligonucleotide
gcctggatgcacaggggttcactaatataa

SEQ ID NO: 169963 - DNA, 30 bp, Artificial Sequence
  Synthetic oligonucleotide
aagtaaagccgtgacgtgagaaacatataa

SEQ ID NO: 169964 - DNA, 30 bp, Artificial Sequence
  Synthetic oligonucleotide
aatctgtacgaggctgaaggggagatataa

SEQ ID NO: 169965 - DNA, 30 bp, Artificial Sequence
  Synthetic oligonucleotide
tccgaattgtcacggggcaagtagatataa

SEQ ID NO: 169966 - DNA, 30 bp, Artificial Sequence
  Synthetic oligonucleotide
ggacatggacctcctctagcactgatataa

SEQ ID NO: 169967 - DNA, 30 bp, Artificial Sequence
  Synthetic oligonucleotide
cgaaccgttcacaagggtaagcttatataa

SEQ ID NO: 169968 - DNA, 30 bp, Artificial Sequence
  Synthetic oligonucleotide
gttccgatttatagctgatctgttatataa

SEQ ID NO: 169969 - DNA, 30 bp, Artificial Sequence
  Synthetic oligonucleotide
agataggcgcggtccaaaccgacactataa

SEQ ID NO: 169970 - DNA, 30 bp, Artificial Sequence
  Synthetic oligonucleotide
gccgtagttccaccaatccgctcactataa

SEQ ID NO: 169971 - DNA, 30 bp, Artificial Sequence
  Synthetic oligonucleotide
gggcgcaagcactgatcccggctgctataa

SEQ ID NO: 169972 - DNA, 30 bp, Artificial Sequence
  Synthetic oligonucleotide
gcggaaggggttggctttaagtcagtataa

SEQ ID NO: 169973 - DNA, 30 bp, Artificial Sequence
  Synthetic oligonucleotide
cgaggccccggttggttggatagagtataa

SEQ ID NO: 169974 - DNA, 30 bp, Artificial Sequence
  Synthetic oligonucleotide
cacttgcaagaaacgccccgcgacgtataa

SEQ ID NO: 169975 - DNA, 30 bp, Artificial Sequence
  Synthetic oligonucleotide
tagtcgacttaagagcacgtcgcggtataa

SEQ ID NO: 169976 - DNA, 30 bp, Artificial Sequence
  Synthetic oligonucleotide
gatcgttcgtcatcgggaaacagggtataa

SEQ ID NO: 169977 - DNA, 30 bp, Artificial Sequence
  Synthetic oligonucleotide
cgttggaactcaatttaagggtttgtataa

SEQ ID NO: 169978 - DNA, 30 bp, Artificial Sequence
  Synthetic oligonucleotide
gtgctaaggtggtggcaagattgcttataa

SEQ ID NO: 169979 - DNA, 30 bp, Artificial Sequence
  Synthetic oligonucleotide
tcgtgcggattgagattcgtgaagttataa

SEQ ID NO: 169980 - DNA, 30 bp, Artificial Sequence
  Synthetic oligonucleotide
tacagggctgctggaatagatatgttataa

SEQ ID NO: 169981 - DNA, 30 bp, Artificial Sequence
  Synthetic oligonucleotide
gtaaacgtggtatgttgataaaaaaactaa

SEQ ID NO: 169982 - DNA, 30 bp, Artificial Sequence
  Synthetic oligonucleotide
ccctccgaattctcaagggatttaaactaa

SEQ ID NO: 169983 - DNA, 30 bp, Artificial Sequence
  Synthetic oligonucleotide
gtcctcaggcgactagtgacagccaactaa

SEQ ID NO: 169984 - DNA, 30 bp, Artificial Sequence
  Synthetic oligonucleotide
gtcccatcagtctgaaaggtcgccaactaa

SEQ ID NO: 169985 - DNA, 30 bp, Artificial Sequence
  Synthetic oligonucleotide
acggtggtcgaatttctcacgtcgaactaa

SEQ ID NO: 169986 - DNA, 30 bp, Artificial Sequence
  Synthetic oligonucleotide
gcgcaatccgaaaggtccgtggtgaactaa

SEQ ID NO: 169987 - DNA, 30 bp, Artificial Sequence
  Synthetic oligonucleotide
tccagtgtttgcagtgtgtccgataactaa

SEQ ID NO: 169988 - DNA, 30 bp, Artificial Sequence
  Synthetic oligonucleotide
ataccgaataaaaaggtcccttataactaa

SEQ ID NO: 169989 - DNA, 30 bp, Artificial Sequence
  Synthetic oligonucleotide
aactggcgtgtattaccaatccgtaactaa

SEQ ID NO: 169990 - DNA, 30 bp, Artificial Sequence
  Synthetic oligonucleotide
atcgcgcatccagccactcgcggtaactaa

SEQ ID NO: 169991 - DNA, 30 bp, Artificial Sequence
  Synthetic oligonucleotide
cgtgtacactgacttggtagacttaactaa

SEQ ID NO: 169992 - DNA, 30 bp, Artificial Sequence
  Synthetic oligonucleotide
agtgaaacgagttgactcgtcaaacactaa

SEQ ID NO: 169993 - DNA, 30 bp, Artificial Sequence
  Synthetic oligonucleotide
acaacgaagtgcacctaaacagtacactaa

SEQ ID NO: 169994 - DNA, 30 bp, Artificial Sequence
  Synthetic oligonucleotide
gcctgcgttatgcgaattaattaccactaa

SEQ ID NO: 169995 - DNA, 30 bp, Artificial Sequence
  Synthetic oligonucleotide
atgttgagctcggtcaattacacgcactaa

SEQ ID NO: 169996 - DNA, 30 bp, Artificial Sequence
  Synthetic oligonucleotide
ccgaccgaaaacgcgggcgaaattcactaa

SEQ ID NO: 169997 - DNA, 30 bp, Artificial Sequence
  Synthetic oligonucleotide
cgtgttaggactgtgacttagcttcactaa

SEQ ID NO: 169998 - DNA, 30 bp, Artificial Sequence
  Synthetic oligonucleotide
tctaatccgaactcgactcccgttcactaa

SEQ ID NO: 169999 - DNA, 30 bp, Artificial Sequence
  Synthetic oligonucleotide
taagccacgaagcacgcatctaacgactaa

SEQ ID NO: 170000 - DNA, 30 bp, Artificial Sequence
  Synthetic oligonucleotide
aatcggcaggcggccttggggttcgactaa

SEQ ID NO: 170001 - DNA, 30 bp, Artificial Sequence
  Synthetic oligonucleotide
ggacgcggaaaggcgcggataaaggactaa

SEQ ID NO: 170002 - DNA, 30 bp, Artificial Sequence
  Synthetic oligonucleotide
aatggataaacctcactctagtactactaa

SEQ ID NO: 170003 - DNA, 30 bp, Artificial Sequence
  Synthetic oligonucleotide
ttgcggtgggatttccttaccgggtactaa

SEQ ID NO: 170004 - DNA, 30 bp, Artificial Sequence
  Synthetic oligonucleotide
atgtccacatagcgctggcgaggttactaa

SEQ ID NO: 170005 - DNA, 30 bp, Artificial Sequence
  Synthetic oligonucleotide
agccgccacggaactgagtggccaacctaa

SEQ ID NO: 170006 - DNA, 30 bp, Artificial Sequence
  Synthetic oligonucleotide
tagactctggggcgccatgttagaacctaa

SEQ ID NO: 170007 - DNA, 30 bp, Artificial Sequence
  Synthetic oligonucleotide
atccaatgtagagtgtaccgaataccctaa

SEQ ID NO: 170008 - DNA, 30 bp, Artificial Sequence
  Synthetic oligonucleotide
ggtctacggacgggtaggactagtccctaa

SEQ ID NO: 170009 - DNA, 30 bp, Artificial Sequence
  Synthetic oligonucleotide
caatttcatctcggtgatgtcagagcctaa

SEQ ID NO: 170010 - DNA, 30 bp, Artificial Sequence
  Synthetic oligonucleotide
tagtttacgggaatagtgcaacgagcctaa

SEQ ID NO: 170011 - DNA, 30 bp, Artificial Sequence
  Synthetic oligonucleotide
acttgcgttcgcgatatggcgaatgcctaa

SEQ ID NO: 170012 - DNA, 31 bp, Artificial Sequence
  Synthetic oligonucleotide
gcaccggacaaattcatcagtctgtgcctaa

SEQ ID NO: 170013 - DNA, 30 bp, Artificial Sequence
  Synthetic oligonucleotide
ggcttaaggtaagagaaatcttgctcctaa

SEQ ID NO: 170014 - DNA, 30 bp, Artificial Sequence
  Synthetic oligonucleotide
tgaatgccacaatcattttaaaccagctaa

SEQ ID NO: 170015 - DNA, 30 bp, Artificial Sequence
  Synthetic oligonucleotide
aggatcaaatatcttcgctttagcagctaa

SEQ ID NO: 170016 - DNA, 30 bp, Artificial Sequence
  Synthetic oligonucleotide
gctggcctaacacaggagagcccgagctaa

SEQ ID NO: 170017 - DNA, 30 bp, Artificial Sequence
  Synthetic oligonucleotide
gacccaagtcaaatcattatgtagcgctaa

SEQ ID NO: 170018 - DNA, 30 bp, Artificial Sequence
  Synthetic oligonucleotide
cgtcccgcatcctatatcggaatgcgctaa

SEQ ID NO: 170019 - DNA, 30 bp, Artificial Sequence
  Synthetic oligonucleotide
gctgaggatcggtgtacttcgttgcgctaa

SEQ ID NO: 170020 - DNA, 30 bp, Artificial Sequence
  Synthetic oligonucleotide
cacctagccgcgtgagcagtgtatcgctaa

SEQ ID NO: 170021 - DNA, 30 bp, Artificial Sequence
  Synthetic oligonucleotide
aagttaagggtcaatacacaatagggctaa

SEQ ID NO: 170022 - DNA, 30 bp, Artificial Sequence
  Synthetic oligonucleotide
caatatgccaagcgcaaatgatagggctaa

SEQ ID NO: 170023 - DNA, 30 bp, Artificial Sequence
  Synthetic oligonucleotide
cagactcctcaagctttcttgattggctaa

SEQ ID NO: 170024 - DNA, 30 bp, Artificial Sequence
  Synthetic oligonucleotide
cattcgcagtatcaaccttaaacatgctaa

SEQ ID NO: 170025 - DNA, 30 bp, Artificial Sequence
  Synthetic oligonucleotide
caatgaagcaaaagacggaagagatgctaa

SEQ ID NO: 170026 - DNA, 30 bp, Artificial Sequence
  Synthetic oligonucleotide
ctcagacgtatggtgaatcatgtctgctaa

SEQ ID NO: 170027 - DNA, 30 bp, Artificial Sequence
  Synthetic oligonucleotide
cgtcaggtcttggcagaactcctttgctaa

SEQ ID NO: 170028 - DNA, 30 bp, Artificial Sequence
  Synthetic oligonucleotide
atgataaatcagggcaatccgcaaatctaa

SEQ ID NO: 170029 - DNA, 30 bp, Artificial Sequence
  Synthetic oligonucleotide
agtagtctagaggatccatggacaatctaa

SEQ ID NO: 170030 - DNA, 30 bp, Artificial Sequence
  Synthetic oligonucleotide
tcatcaactgtcggtaaacataagatctaa

SEQ ID NO: 170031 - DNA, 30 bp, Artificial Sequence
  Synthetic oligonucleotide
gggaggtacaggtattcgtaaacgatctaa

SEQ ID NO: 170032 - DNA, 30 bp, Artificial Sequence
  Synthetic oligonucleotide
gcaacaatacaaactctcatcgctatctaa

SEQ ID NO: 170033 - DNA, 30 bp, Artificial Sequence
  Synthetic oligonucleotide
atcgacaatgaaagtggtaaccgtatctaa

SEQ ID NO: 170034 - DNA, 30 bp, Artificial Sequence
  Synthetic oligonucleotide
cgagacccaccacaacattaatgactctaa

SEQ ID NO: 170035 - DNA, 29 bp, Artificial Sequence
  Synthetic oligonucleotide
acgcgcagggcatgggttatgacctctaa

SEQ ID NO: 170036 - DNA, 30 bp, Artificial Sequence
  Synthetic oligonucleotide
acttagtgatggccctcacatatgctctaa

SEQ ID NO: 170037 - DNA, 30 bp, Artificial Sequence
  Synthetic oligonucleotide
tcgagatatcgcgacgacgagtctctctaa

SEQ ID NO: 170038 - DNA, 30 bp, Artificial Sequence
  Synthetic oligonucleotide
tcagaggggatacacacgttaagtgtctaa

SEQ ID NO: 170039 - DNA, 30 bp, Artificial Sequence
  Synthetic oligonucleotide
tcactatgtgggttggaatagttattctaa

SEQ ID NO: 170040 - DNA, 30 bp, Artificial Sequence
  Synthetic oligonucleotide
cccagtactaccctgcaaaacactttctaa

SEQ ID NO: 170041 - DNA, 30 bp, Artificial Sequence
  Synthetic oligonucleotide
actcgctagtggctcagggtctttttctaa

SEQ ID NO: 170042 - DNA, 30 bp, Artificial Sequence
  Synthetic oligonucleotide
cctcgggtggggtaggactggataaagtaa

SEQ ID NO: 170043 - DNA, 30 bp, Artificial Sequence
  Synthetic oligonucleotide
caagtgatcgaacccataccactaaagtaa

SEQ ID NO: 170044 - DNA, 30 bp, Artificial Sequence
  Synthetic oligonucleotide
tcggccgcgagactgccaacagtaaagtaa

SEQ ID NO: 170045 - DNA, 30 bp, Artificial Sequence
  Synthetic oligonucleotide
gaatggatgcttagtagtgacgtaaagtaa

SEQ ID NO: 170046 - DNA, 30 bp, Artificial Sequence
  Synthetic oligonucleotide
gcaggtgtcggaccttccagtgtaaagtaa

SEQ ID NO: 170047 - DNA, 30 bp, Artificial Sequence
  Synthetic oligonucleotide
gctgtacgggctaccaaatcttggaagtaa

SEQ ID NO: 170048 - DNA, 30 bp, Artificial Sequence
  Synthetic oligonucleotide
atgtcgggacagggcctagtatgtaagtaa

SEQ ID NO: 170049 - DNA, 30 bp, Artificial Sequence
  Synthetic oligonucleotide
ttcccaaccgaaagtcttgagtaccagtaa

SEQ ID NO: 170050 - DNA, 30 bp, Artificial Sequence
  Synthetic oligonucleotide
acccgatgccaggaagcgaagtggcagtaa

SEQ ID NO: 170051 - DNA, 30 bp, Artificial Sequence
  Synthetic oligonucleotide
tcggtcctggaaagtgaccgggtgcagtaa

SEQ ID NO: 170052 - DNA, 30 bp, Artificial Sequence
  Synthetic oligonucleotide
gcgggatagccagtcgcttctgatcagtaa

SEQ ID NO: 170053 - DNA, 30 bp, Artificial Sequence
  Synthetic oligonucleotide
agtgtgcgcgggtgctgttgaggtcagtaa

SEQ ID NO: 170054 - DNA, 30 bp, Artificial Sequence
  Synthetic oligonucleotide
ctacgtcttactgaaagattgggtcagtaa

SEQ ID NO: 170055 - DNA, 30 bp, Artificial Sequence
  Synthetic oligonucleotide
gaggcctagggggtcagaaggccagagtaa

SEQ ID NO: 170056 - DNA, 30 bp, Artificial Sequence
  Synthetic oligonucleotide
ggcacacgtttcggcccccactgcgagtaa

SEQ ID NO: 170057 - DNA, 30 bp, Artificial Sequence
  Synthetic oligonucleotide
gctagcgttaaggatagggattaggagtaa

SEQ ID NO: 170058 - DNA, 30 bp, Artificial Sequence
  Synthetic oligonucleotide
acattagatacgacagccggttaggagtaa

SEQ ID NO: 170059 - DNA, 30 bp, Artificial Sequence
  Synthetic oligonucleotide
atcgacctgaaggtgttattcagtgagtaa

SEQ ID NO: 170060 - DNA, 30 bp, Artificial Sequence
  Synthetic oligonucleotide
atgcatatatggtccaaccactcatagtaa

SEQ ID NO: 170061 - DNA, 30 bp, Artificial Sequence
  Synthetic oligonucleotide
agcctagatcaggccgtgaaaggatagtaa

SEQ ID NO: 170062 - DNA, 30 bp, Artificial Sequence
  Synthetic oligonucleotide
gtcttgggtagaacggtagaatcctagtaa

SEQ ID NO: 170063 - DNA, 30 bp, Artificial Sequence
  Synthetic oligonucleotide
atgaagtccagctgcgtactggtgtagtaa

SEQ ID NO: 170064 - DNA, 30 bp, Artificial Sequence
  Synthetic oligonucleotide
gtgtcgctttggaggaacgtataaacgtaa

SEQ ID NO: 170065 - DNA, 30 bp, Artificial Sequence
  Synthetic oligonucleotide
actagcccgatcaacgccggtcccacgtaa

SEQ ID NO: 170066 - DNA, 30 bp, Artificial Sequence
  Synthetic oligonucleotide
cgtattagccggaagtgatgccgcacgtaa

SEQ ID NO: 170067 - DNA, 30 bp, Artificial Sequence
  Synthetic oligonucleotide
taccgaggtcccacgttgaccatcacgtaa

SEQ ID NO: 170068 - DNA, 30 bp, Artificial Sequence
  Synthetic oligonucleotide
cagtatggttcgagtaagcgagtcacgtaa

SEQ ID NO: 170069 - DNA, 30 bp, Artificial Sequence
  Synthetic oligonucleotide
agaatagcttctgcacaaactggtacgtaa

SEQ ID NO: 170070 - DNA, 30 bp, Artificial Sequence
  Synthetic oligonucleotide
tggatataaaacagggggaagaaaccgtaa

SEQ ID NO: 170071 - DNA, 30 bp, Artificial Sequence
  Synthetic oligonucleotide
caccgctttccgtacacttttcaaccgtaa

SEQ ID NO: 170072 - DNA, 30 bp, Artificial Sequence
  Synthetic oligonucleotide
actgtggaccgatgcgggtagatcccgtaa

SEQ ID NO: 170073 - DNA, 30 bp, Artificial Sequence
  Synthetic oligonucleotide
ttaatgctaccaaagatttgatacgcgtaa

SEQ ID NO: 170074 - DNA, 30 bp, Artificial Sequence
  Synthetic oligonucleotide
gacgcatgtatggactgtttaagtgcgtaa

SEQ ID NO: 170075 - DNA, 30 bp, Artificial Sequence
  Synthetic oligonucleotide
gcggcaccatgcaccgaatcgatctcgtaa

SEQ ID NO: 170076 - DNA, 30 bp, Artificial Sequence
  Synthetic oligonucleotide
gacaaaaatgagcaggcccgaacttcgtaa

SEQ ID NO: 170077 - DNA, 30 bp, Artificial Sequence
  Synthetic oligonucleotide
cctccaatctctaatatagggtcttcgtaa

SEQ ID NO: 170078 - DNA, 30 bp, Artificial Sequence
  Synthetic oligonucleotide
gtcctgcatgaactagattgacaaaggtaa

SEQ ID NO: 170079 - DNA, 30 bp, Artificial Sequence
  Synthetic oligonucleotide
gtgggagacgtctacatctcctccaggtaa

SEQ ID NO: 170080 - DNA, 30 bp, Artificial Sequence
  Synthetic oligonucleotide
atctgaatacaatcgaatgggtccaggtaa

SEQ ID NO: 170081 - DNA, 30 bp, Artificial Sequence
  Synthetic oligonucleotide
catcaggtacgcttaagtgctgtacggtaa

SEQ ID NO: 170082 - DNA, 30 bp, Artificial Sequence
  Synthetic oligonucleotide
atcacgtttggtgtagaagctacgcggtaa

SEQ ID NO: 170083 - DNA, 30 bp, Artificial Sequence
  Synthetic oligonucleotide
atcgtccggaaaaactagaaccggcggtaa

SEQ ID NO: 170084 - DNA, 30 bp, Artificial Sequence
  Synthetic oligonucleotide
ctagtcccgagcaatgtgagagctcggtaa

SEQ ID NO: 170085 - DNA, 30 bp, Artificial Sequence
  Synthetic oligonucleotide
tttagcaatggaattcgcatctaagggtaa

SEQ ID NO: 170086 - DNA, 30 bp, Artificial Sequence
  Synthetic oligonucleotide
atggttcggctaaccgctcaagcagggtaa

SEQ ID NO: 170087 - DNA, 30 bp, Artificial Sequence
  Synthetic oligonucleotide
ttcgcaggaacgggattttcggcagggtaa

SEQ ID NO: 170088 - DNA, 30 bp, Artificial Sequence
  Synthetic oligonucleotide
atcatggatgtttccgatcgtgtagggtaa

SEQ ID NO: 170089 - DNA, 30 bp, Artificial Sequence
  Synthetic oligonucleotide
ccatcaaagagctatcgacatcacgggtaa

SEQ ID NO: 170090 - DNA, 30 bp, Artificial Sequence
  Synthetic oligonucleotide
ggccactggaagggtgcttcatacgggtaa

SEQ ID NO: 170091 - DNA, 30 bp, Artificial Sequence
  Synthetic oligonucleotide
caaatccagctttcgcccttgagcgggtaa

SEQ ID NO: 170092 - DNA, 30 bp, Artificial Sequence
  Synthetic oligonucleotide
acggtcttgcggacgtcggcacaggggtaa

SEQ ID NO: 170093 - DNA, 30 bp, Artificial Sequence
  Synthetic oligonucleotide
gctggggcatggcggtagccgcgtgggtaa

SEQ ID NO: 170094 - DNA, 30 bp, Artificial Sequence
  Synthetic oligonucleotide
cgggaataattgaagacaccagtctggtaa

SEQ ID NO: 170095 - DNA, 30 bp, Artificial Sequence
  Synthetic oligonucleotide
tctcaacgtgatcgataggtggtctggtaa

SEQ ID NO: 170096 - DNA, 30 bp, Artificial Sequence
  Synthetic oligonucleotide
gttgaaccaaaacgggagttagcgtggtaa

SEQ ID NO: 170097 - DNA, 30 bp, Artificial Sequence
  Synthetic oligonucleotide
ggtacagctacgtgcctttcgtattggtaa

SEQ ID NO: 170098 - DNA, 30 bp, Artificial Sequence
  Synthetic oligonucleotide
taggcctgtaatttgtacgagaaaatgtaa

SEQ ID NO: 170099 - DNA, 30 bp, Artificial Sequence
  Synthetic oligonucleotide
agcagcgccgaatattgaaaatgaatgtaa

SEQ ID NO: 170100 - DNA, 30 bp, Artificial Sequence
  Synthetic oligonucleotide
atctgagagcatatatcaccagtaatgtaa

SEQ ID NO: 170101 - DNA, 30 bp, Artificial Sequence
  Synthetic oligonucleotide
tgcgcctaattgagggtatgcatcatgtaa

SEQ ID NO: 170102 - DNA, 30 bp, Artificial Sequence
  Synthetic oligonucleotide
ttggcaaatggataggtgctgtagatgtaa

SEQ ID NO: 170103 - DNA, 30 bp, Artificial Sequence
  Synthetic oligonucleotide
gaagtgtccattggaattaatagtatgtaa

SEQ ID NO: 170104 - DNA, 30 bp, Artificial Sequence
  Synthetic oligonucleotide
caaacacgtgagagtaatcgaagcctgtaa

SEQ ID NO: 170105 - DNA, 30 bp, Artificial Sequence
  Synthetic oligonucleotide
tcagactgcgttcatattcataagctgtaa

SEQ ID NO: 170106 - DNA, 30 bp, Artificial Sequence
  Synthetic oligonucleotide
gtgtggtccaatacgtatcacctgctgtaa

SEQ ID NO: 170107 - DNA, 30 bp, Artificial Sequence
  Synthetic oligonucleotide
agatgtatctttatgagttgagctctgtaa

SEQ ID NO: 170108 - DNA, 30 bp, Artificial Sequence
  Synthetic oligonucleotide
atggtatgagccggggccgcggttctgtaa

SEQ ID NO: 170109 - DNA, 30 bp, Artificial Sequence
  Synthetic oligonucleotide
acaatggcagacgtacctcgccgagtgtaa

SEQ ID NO: 170110 - DNA, 30 bp, Artificial Sequence
  Synthetic oligonucleotide
agaaagaggcttgataactgcgacgtgtaa

SEQ ID NO: 170111 - DNA, 30 bp, Artificial Sequence
  Synthetic oligonucleotide
gatggcccccccttcattcaatacgtgtaa

SEQ ID NO: 170112 - DNA, 30 bp, Artificial Sequence
  Synthetic oligonucleotide
gggggatgcgtgtcgcagaggacggtgtaa

SEQ ID NO: 170113 - DNA, 30 bp, Artificial Sequence
  Synthetic oligonucleotide
ccgtggtggaatttttcgtatgatgtgtaa

SEQ ID NO: 170114 - DNA, 30 bp, Artificial Sequence
  Synthetic oligonucleotide
gtgttgaagcgtcgataccgggctgtgtaa

SEQ ID NO: 170115 - DNA, 30 bp, Artificial Sequence
  Synthetic oligonucleotide
ggtgggcggcccactacgataatattgtaa

SEQ ID NO: 170116 - DNA, 30 bp, Artificial Sequence
  Synthetic oligonucleotide
gaataccatctaagcgaaaaagagttgtaa

SEQ ID NO: 170117 - DNA, 30 bp, Artificial Sequence
  Synthetic oligonucleotide
gctacgtgtaatctgcaagagttgttgtaa

SEQ ID NO: 170118 - DNA, 30 bp, Artificial Sequence
  Synthetic oligonucleotide
cggaccgtcagcaatggtggccctttgtaa

SEQ ID NO: 170119 - DNA, 30 bp, Artificial Sequence
  Synthetic oligonucleotide
agatgcgcaacctcaggttcacgtttgtaa

SEQ ID NO: 170120 - DNA, 30 bp, Artificial Sequence
  Synthetic oligonucleotide
ccttcggtaccttcagggtgctgaaattaa

SEQ ID NO: 170121 - DNA, 30 bp, Artificial Sequence
  Synthetic oligonucleotide
cgccatatttgactaaggcgcgtcaattaa

SEQ ID NO: 170122 - DNA, 30 bp, Artificial Sequence
  Synthetic oligonucleotide
tgcgcctatcatttgagtaaattcaattaa

SEQ ID NO: 170123 - DNA, 30 bp, Artificial Sequence
  Synthetic oligonucleotide
gggattagtctcgtagttcagtagaattaa

SEQ ID NO: 170124 - DNA, 30 bp, Artificial Sequence
  Synthetic oligonucleotide
acttgtaagtatgcgacaggtgttaattaa

SEQ ID NO: 170125 - DNA, 30 bp, Artificial Sequence
  Synthetic oligonucleotide
cttggcacgataacttcgggcggacattaa

SEQ ID NO: 170126 - DNA, 30 bp, Artificial Sequence
  Synthetic oligonucleotide
tggagccgacgccagccgtgaatccattaa

SEQ ID NO: 170127 - DNA, 30 bp, Artificial Sequence
  Synthetic oligonucleotide
gtccgtgttgggggtgaagcaccgcattaa

SEQ ID NO: 170128 - DNA, 30 bp, Artificial Sequence
  Synthetic oligonucleotide
gcatacggcgtgctcatatagaccgattaa

SEQ ID NO: 170129 - DNA, 30 bp, Artificial Sequence
  Synthetic oligonucleotide
acgcttgccatattggattaaagcgattaa

SEQ ID NO: 170130 - DNA, 30 bp, Artificial Sequence
  Synthetic oligonucleotide
atttgcgaaaggagtacccagagcgattaa

SEQ ID NO: 170131 - DNA, 30 bp, Artificial Sequence
  Synthetic oligonucleotide
acgggcatgttcgtagaactcggcgattaa

SEQ ID NO: 170132 - DNA, 30 bp, Artificial Sequence
  Synthetic oligonucleotide
agttcaagtatttgcataagacgatattaa

SEQ ID NO: 170133 - DNA, 30 bp, Artificial Sequence
  Synthetic oligonucleotide
gtctgatgtacttccataagctgctattaa

SEQ ID NO: 170134 - DNA, 30 bp, Artificial Sequence
  Synthetic oligonucleotide
caatgggcgtactcaaacagtgtctattaa

SEQ ID NO: 170135 - DNA, 30 bp, Artificial Sequence
  Synthetic oligonucleotide
ggagtaacttcagccaagaaaaggtattaa

SEQ ID NO: 170136 - DNA, 30 bp, Artificial Sequence
  Synthetic oligonucleotide
atgtaaacttgccgcgagaagtggtattaa

SEQ ID NO: 170137 - DNA, 30 bp, Artificial Sequence
  Synthetic oligonucleotide
gtcaaagttttgaaagagtgagtcccttaa

SEQ ID NO: 170138 - DNA, 30 bp, Artificial Sequence
  Synthetic oligonucleotide
taccaggccttcagggggattcaagcttaa

SEQ ID NO: 170139 - DNA, 30 bp, Artificial Sequence
  Synthetic oligonucleotide
ggtagcaacctgcactgtgtggcagcttaa

SEQ ID NO: 170140 - DNA, 30 bp, Artificial Sequence
  Synthetic oligonucleotide
atggggatgtcagcccggagtcgagcttaa

SEQ ID NO: 170141 - DNA, 30 bp, Artificial Sequence
  Synthetic oligonucleotide
agcttccgctgcgactggcatacggcttaa

SEQ ID NO: 170142 - DNA, 30 bp, Artificial Sequence
  Synthetic oligonucleotide
aagatcctgctgggtcatccggactcttaa

SEQ ID NO: 170143 - DNA, 30 bp, Artificial Sequence
  Synthetic oligonucleotide
gcagtgatagccggagccggtcgttcttaa

SEQ ID NO: 170144 - DNA, 30 bp, Artificial Sequence
  Synthetic oligonucleotide
gtaacacgtgtgacgcggatggaaagttaa

SEQ ID NO: 170145 - DNA, 30 bp, Artificial Sequence
  Synthetic oligonucleotide
ttgtgtacatccagtgatacgctaagttaa

SEQ ID NO: 170146 - DNA, 30 bp, Artificial Sequence
  Synthetic oligonucleotide
aaaggcctaataagcaagcctgttcgttaa

SEQ ID NO: 170147 - DNA, 30 bp, Artificial Sequence
  Synthetic oligonucleotide
tggtgatatgcgctcgtcctccgaggttaa

SEQ ID NO: 170148 - DNA, 30 bp, Artificial Sequence
  Synthetic oligonucleotide
tcatccgaatacacccgcggctggggttaa

SEQ ID NO: 170149 - DNA, 30 bp, Artificial Sequence
  Synthetic oligonucleotide
acctaagatacaacagcaatattatgttaa

SEQ ID NO: 170150 - DNA, 30 bp, Artificial Sequence
  Synthetic oligonucleotide
acgcacgggaaatcaaacttgacttgttaa

SEQ ID NO: 170151 - DNA, 30 bp, Artificial Sequence
  Synthetic oligonucleotide
tgtgggcggcggtggtaatgcgacatttaa

SEQ ID NO: 170152 - DNA, 30 bp, Artificial Sequence
  Synthetic oligonucleotide
gccgtggggtggagcatacgtcagatttaa

SEQ ID NO: 170153 - DNA, 30 bp, Artificial Sequence
  Synthetic oligonucleotide
ccacacctggtcttgagctgtggtatttaa

SEQ ID NO: 170154 - DNA, 30 bp, Artificial Sequence
  Synthetic oligonucleotide
aatcgaaaaggagttccagccagggtttaa

SEQ ID NO: 170155 - DNA, 30 bp, Artificial Sequence
  Synthetic oligonucleotide
agtctagtgcacactgtcacaaatgtttaa

SEQ ID NO: 170156 - DNA, 30 bp, Artificial Sequence
  Synthetic oligonucleotide
caggcgaatgctttggtaaggtcattttaa

SEQ ID NO: 170157 - DNA, 30 bp, Artificial Sequence
  Synthetic oligonucleotide
gtaatgagcgaccgtgcgggtacgttttaa

SEQ ID NO: 170158 - DNA, 30 bp, Artificial Sequence
  Synthetic oligonucleotide
acctcagtcattgtatctttagcgttttaa

SEQ ID NO: 170159 - DNA, 30 bp, Artificial Sequence
  Synthetic oligonucleotide
ggtaaaatacgtctgcaaatgatgttttaa

SEQ ID NO: 170160 - DNA, 30 bp, Artificial Sequence
  Synthetic oligonucleotide
atatagaggacaagacggtagggaaaaaca

SEQ ID NO: 170161 - DNA, 29 bp, Artificial Sequence
  Synthetic oligonucleotide
ggaagacgggtagcggaagcccccaaaca

SEQ ID NO: 170162 - DNA, 30 bp, Artificial Sequence
  Synthetic oligonucleotide
gtagcaccgtcgcgtagctcggggcaaaca

SEQ ID NO: 170163 - DNA, 30 bp, Artificial Sequence
  Synthetic oligonucleotide
gcgcggtggatttagcactaacctcaaaca

SEQ ID NO: 170164 - DNA, 29 bp, Artificial Sequence
  Synthetic oligonucleotide
gggtgtaccctaacgctgtaagtcaaaca

SEQ ID NO: 170165 - DNA, 30 bp, Artificial Sequence
  Synthetic oligonucleotide
taaccgtgattgattaaaataattcaaaca

SEQ ID NO: 170166 - DNA, 30 bp, Artificial Sequence
  Synthetic oligonucleotide
cctattcttccgtaaatacaccttcaaaca

SEQ ID NO: 170167 - DNA, 30 bp, Artificial Sequence
  Synthetic oligonucleotide
actattggagagagcataatctaagaaaca

SEQ ID NO: 170168 - DNA, 30 bp, Artificial Sequence
  Synthetic oligonucleotide
aaagcccgggcatcctgtgtctaagaaaca

SEQ ID NO: 170169 - DNA, 30 bp, Artificial Sequence
  Synthetic oligonucleotide
caaactctcgtgtgtttatgcatagaaaca

SEQ ID NO: 170170 - DNA, 30 bp, Artificial Sequence
  Synthetic oligonucleotide
tcaggtacttaggcgggttgattggaaaca

SEQ ID NO: 170171 - DNA, 30 bp, Artificial Sequence
  Synthetic oligonucleotide
aggagtgtggattctcaccataactaaaca

SEQ ID NO: 170172 - DNA, 30 bp, Artificial Sequence
  Synthetic oligonucleotide
tgtcgtcagagcctgtcgagcccttaaaca

SEQ ID NO: 170173 - DNA, 30 bp, Artificial Sequence
  Synthetic oligonucleotide
cgataaatataatccccaagacgttaaaca

SEQ ID NO: 170174 - DNA, 30 bp, Artificial Sequence
  Synthetic oligonucleotide
gtgtggacactccgagatggagaaacaaca

SEQ ID NO: 170175 - DNA, 30 bp, Artificial Sequence
  Synthetic oligonucleotide
gatagcaaacgataatgggattgaacaaca

SEQ ID NO: 170176 - DNA, 30 bp, Artificial Sequence
  Synthetic oligonucleotide
taaatacttgctttaaaataagcgacaaca

SEQ ID NO: 170177 - DNA, 30 bp, Artificial Sequence
  Synthetic oligonucleotide
ggactacgatccgtcgggccattgacaaca

SEQ ID NO: 170178 - DNA, 30 bp, Artificial Sequence
  Synthetic oligonucleotide
cgacaagtaaagtggggtacgtaaccaaca

SEQ ID NO: 170179 - DNA, 31 bp, Artificial Sequence
  Synthetic oligonucleotide
gccttactgacggttagcgtgcaagccaaca

SEQ ID NO: 170180 - DNA, 30 bp, Artificial Sequence
  Synthetic oligonucleotide
ccgcctgagagactgtctcagtaagcaaca

SEQ ID NO: 170181 - DNA, 30 bp, Artificial Sequence
  Synthetic oligonucleotide
ggacggacgatcttatcgtaaggagcaaca

SEQ ID NO: 170182 - DNA, 30 bp, Artificial Sequence
  Synthetic oligonucleotide
cgtaccttggtttcatacgggcgggcaaca

SEQ ID NO: 170183 - DNA, 30 bp, Artificial Sequence
  Synthetic oligonucleotide
caagggatcgccggcgctagatgggcaaca

SEQ ID NO: 170184 - DNA, 30 bp, Artificial Sequence
  Synthetic oligonucleotide
taggtttcggtctaacctggaacatcaaca

SEQ ID NO: 170185 - DNA, 30 bp, Artificial Sequence
  Synthetic oligonucleotide
cattcgggtcgacgctactgtggatcaaca

SEQ ID NO: 170186 - DNA, 30 bp, Artificial Sequence
  Synthetic oligonucleotide
cttaatggggtcagatgtattaagtcaaca

SEQ ID NO: 170187 - DNA, 30 bp, Artificial Sequence
  Synthetic oligonucleotide
cgaggttgcatccccttgcgaccgtcaaca

SEQ ID NO: 170188 - DNA, 30 bp, Artificial Sequence
  Synthetic oligonucleotide
cgttctgattgttagtcagaaaattcaaca

SEQ ID NO: 170189 - DNA, 30 bp, Artificial Sequence
  Synthetic oligonucleotide
agtagccgcgattaatggtcgtattcaaca

SEQ ID NO: 170190 - DNA, 30 bp, Artificial Sequence
  Synthetic oligonucleotide
agaatgcttcaacggtcgtgaacttcaaca

SEQ ID NO: 170191 - DNA, 30 bp, Artificial Sequence
  Synthetic oligonucleotide
gattaagtcctcaagggccgaggaagaaca

SEQ ID NO: 170192 - DNA, 30 bp, Artificial Sequence
  Synthetic oligonucleotide
tacccatacacggcattcgccatgagaaca

SEQ ID NO: 170193 - DNA, 31 bp, Artificial Sequence
  Synthetic oligonucleotide
cggtctacactatgtggttcagtatagaaca

SEQ ID NO: 170194 - DNA, 30 bp, Artificial Sequence
  Synthetic oligonucleotide
caaaaatgtaacatacgacaagctagaaca

SEQ ID NO: 170195 - DNA, 30 bp, Artificial Sequence
  Synthetic oligonucleotide
accttgtaagtggtttagtggtgtagaaca

SEQ ID NO: 170196 - DNA, 30 bp, Artificial Sequence
  Synthetic oligonucleotide
cgattacgtgcaagttatcattcgcgaaca

SEQ ID NO: 170197 - DNA, 30 bp, Artificial Sequence
  Synthetic oligonucleotide
gcaagccaagttatagaacacaggcgaaca

SEQ ID NO: 170198 - DNA, 30 bp, Artificial Sequence
  Synthetic oligonucleotide
ctgcttcaagtctgtttgtccttgcgaaca

SEQ ID NO: 170199 - DNA, 30 bp, Artificial Sequence
  Synthetic oligonucleotide
cggtttcaatccatataaactcgaggaaca

SEQ ID NO: 170200 - DNA, 30 bp, Artificial Sequence
  Synthetic oligonucleotide
cagctgaggtccgagtcgagactaggaaca

SEQ ID NO: 170201 - DNA, 30 bp, Artificial Sequence
  Synthetic oligonucleotide
tgtgtggtcagacggaagaaagtaggaaca

SEQ ID NO: 170202 - DNA, 30 bp, Artificial Sequence
  Synthetic oligonucleotide
ctgttcaatcctccgtaaccgttcggaaca

SEQ ID NO: 170203 - DNA, 30 bp, Artificial Sequence
  Synthetic oligonucleotide
aacacttttcgaagagtggattggggaaca

SEQ ID NO: 170204 - DNA, 30 bp, Artificial Sequence
  Synthetic oligonucleotide
gtcaatggtgctgtggcaggtgaatgaaca

SEQ ID NO: 170205 - DNA, 30 bp, Artificial Sequence
  Synthetic oligonucleotide
gcacttatagcgtttcgagagggctgaaca

SEQ ID NO: 170206 - DNA, 30 bp, Artificial Sequence
  Synthetic oligonucleotide
tagttgagctctaattcaacgtagtgaaca

SEQ ID NO: 170207 - DNA, 30 bp, Artificial Sequence
  Synthetic oligonucleotide
atgggtatgcggtgaagtaggtagtgaaca

SEQ ID NO: 170208 - DNA, 30 bp, Artificial Sequence
  Synthetic oligonucleotide
ttagagtaaaataccacacacttgtgaaca

SEQ ID NO: 170209 - DNA, 31 bp, Artificial Sequence
  Synthetic oligonucleotide
tcagaccgagtcaggaaaggtcgattgaaca

SEQ ID NO: 170210 - DNA, 30 bp, Artificial Sequence
  Synthetic oligonucleotide
gtagaagtatggcgggatgaattaataaca

SEQ ID NO: 170211 - DNA, 30 bp, Artificial Sequence
  Synthetic oligonucleotide
aacggttacggtgggttatttcccataaca

SEQ ID NO: 170212 - DNA, 30 bp, Artificial Sequence
  Synthetic oligonucleotide
agggacgtgttatatgtatggagcataaca

SEQ ID NO: 170213 - DNA, 30 bp, Artificial Sequence
  Synthetic oligonucleotide
cctagaatctgggtacgggaaggcataaca

SEQ ID NO: 170214 - DNA, 30 bp, Artificial Sequence
  Synthetic oligonucleotide
gactagaaagggttagggcctccgataaca

SEQ ID NO: 170215 - DNA, 30 bp, Artificial Sequence
  Synthetic oligonucleotide
atcgccactccgtacaggtaagatataaca

SEQ ID NO: 170216 - DNA, 30 bp, Artificial Sequence
  Synthetic oligonucleotide
ctcctttaggttgaggtggatcttataaca

SEQ ID NO: 170217 - DNA, 30 bp, Artificial Sequence
  Synthetic oligonucleotide
taggtcggtcgctctagctatgcgctaaca

SEQ ID NO: 170218 - DNA, 30 bp, Artificial Sequence
  Synthetic oligonucleotide
cgccttcctgtgtcgtaatagattctaaca

SEQ ID NO: 170219 - DNA, 30 bp, Artificial Sequence
  Synthetic oligonucleotide
tgcggttggaatgcgtacagtaaggtaaca

SEQ ID NO: 170220 - DNA, 30 bp, Artificial Sequence
  Synthetic oligonucleotide
cgactattggatattgccctctaggtaaca

SEQ ID NO: 170221 - DNA, 30 bp, Artificial Sequence
  Synthetic oligonucleotide
tgattgcatccttacgggccagcggtaaca

SEQ ID NO: 170222 - DNA, 30 bp, Artificial Sequence
  Synthetic oligonucleotide
agcaccatggcgggctaggcggaattaaca

SEQ ID NO: 170223 - DNA, 30 bp, Artificial Sequence
  Synthetic oligonucleotide
tgaagaacgaggttacacctgtaattaaca

SEQ ID NO: 170224 - DNA, 30 bp, Artificial Sequence
  Synthetic oligonucleotide
gctccgaccggtctggcaacttatttaaca

SEQ ID NO: 170225 - DNA, 30 bp, Artificial Sequence
  Synthetic oligonucleotide
taacatcaggagtcgaaaatgcttttaaca

SEQ ID NO: 170226 - DNA, 30 bp, Artificial Sequence
  Synthetic oligonucleotide
ctagtgcgtaagccctgcaacacaaacaca

SEQ ID NO: 170227 - DNA, 30 bp, Artificial Sequence
  Synthetic oligonucleotide
taaatctcgttgtgataagggtcaaacaca

SEQ ID NO: 170228 - DNA, 30 bp, Artificial Sequence
  Synthetic oligonucleotide
ttcctatgtagaaagccctccgagaacaca

SEQ ID NO: 170229 - DNA, 30 bp, Artificial Sequence
  Synthetic oligonucleotide
tagctaatccgcaacaaagaagcgaacaca

SEQ ID NO: 170230 - DNA, 30 bp, Artificial Sequence
  Synthetic oligonucleotide
ttaacaggtcacggggtttgcgcgaacaca

SEQ ID NO: 170231 - DNA, 30 bp, Artificial Sequence
  Synthetic oligonucleotide
tcccatagtcagtatggtaggcggaacaca

SEQ ID NO: 170232 - DNA, 30 bp, Artificial Sequence
  Synthetic oligonucleotide
tactaggaatatccgatcctggggaacaca

SEQ ID NO: 170233 - DNA, 30 bp, Artificial Sequence
  Synthetic oligonucleotide
tggcgttcattgcaatcgtggtctaacaca

SEQ ID NO: 170234 - DNA, 30 bp, Artificial Sequence
  Synthetic oligonucleotide
cccgacaaaaaacgaaatattgtacacaca

SEQ ID NO: 170235 - DNA, 30 bp, Artificial Sequence
  Synthetic oligonucleotide
ttcgtctcgagagataatagtaatcacaca

SEQ ID NO: 170236 - DNA, 30 bp, Artificial Sequence
  Synthetic oligonucleotide
gacgagcggtgtttagtggccaaagacaca

SEQ ID NO: 170237 - DNA, 30 bp, Artificial Sequence
  Synthetic oligonucleotide
ggccaagtgatgagcaaattcaaagacaca

SEQ ID NO: 170238 - DNA, 30 bp, Artificial Sequence
  Synthetic oligonucleotide
gagttcaggtgctatgttagccgcgacaca

SEQ ID NO: 170239 - DNA, 30 bp, Artificial Sequence
  Synthetic oligonucleotide
aaagactgtttcactttgcacatcgacaca

SEQ ID NO: 170240 - DNA, 30 bp, Artificial Sequence
  Synthetic oligonucleotide
actggatttactagacatgaatgggacaca

SEQ ID NO: 170241 - DNA, 30 bp, Artificial Sequence
  Synthetic oligonucleotide
acactgccatcggctccgaaatgatacaca

SEQ ID NO: 170242 - DNA, 30 bp, Artificial Sequence
  Synthetic oligonucleotide
agcagagcgctggggagttgtgagtacaca

SEQ ID NO: 170243 - DNA, 30 bp, Artificial Sequence
  Synthetic oligonucleotide
gctcggatttcatgcgacgtaggttacaca

SEQ ID NO: 170244 - DNA, 30 bp, Artificial Sequence
  Synthetic oligonucleotide
agttaggcaatctgtaacaatcaaaccaca

SEQ ID NO: 170245 - DNA, 30 bp, Artificial Sequence
  Synthetic oligonucleotide
aaaggccctctcgtatcaaagagaaccaca

SEQ ID NO: 170246 - DNA, 30 bp, Artificial Sequence
  Synthetic oligonucleotide
caatctcatgcgaaagcgctgtgaaccaca

SEQ ID NO: 170247 - DNA, 30 bp, Artificial Sequence
  Synthetic oligonucleotide
tggactcaatgcacgtggctcgccaccaca

SEQ ID NO: 170248 - DNA, 30 bp, Artificial Sequence
  Synthetic oligonucleotide
accggaaagatggtagattaacctcccaca

SEQ ID NO: 170249 - DNA, 30 bp, Artificial Sequence
  Synthetic oligonucleotide
taaaaggtaccggtacaaaggcgagccaca

SEQ ID NO: 170250 - DNA, 30 bp, Artificial Sequence
  Synthetic oligonucleotide
aaagttaattaacgaaggcgcgccgccaca

SEQ ID NO: 170251 - DNA, 30 bp, Artificial Sequence
  Synthetic oligonucleotide
ttcagtatgagcacacatcctcttgccaca

SEQ ID NO: 170252 - DNA, 30 bp, Artificial Sequence
  Synthetic oligonucleotide
taaatctctcctaggcctgaaaaatccaca

SEQ ID NO: 170253 - DNA, 30 bp, Artificial Sequence
  Synthetic oligonucleotide
ggaactgcatggtccgcacaggcctccaca

SEQ ID NO: 170254 - DNA, 30 bp, Artificial Sequence
  Synthetic oligonucleotide
gtatccggcagcgagaagttagagtccaca

SEQ ID NO: 170255 - DNA, 30 bp, Artificial Sequence
  Synthetic oligonucleotide
gagaacggcttttatgaccagaggtccaca

SEQ ID NO: 170256 - DNA, 30 bp, Artificial Sequence
  Synthetic oligonucleotide
gtgcgagataggccatgcgcggacagcaca

SEQ ID NO: 170257 - DNA, 30 bp, Artificial Sequence
  Synthetic oligonucleotide
ttgtgttttctaagtaagctagtcagcaca

SEQ ID NO: 170258 - DNA, 30 bp, Artificial Sequence
  Synthetic oligonucleotide
acgcgtttaaactgctttgtggggagcaca

SEQ ID NO: 170259 - DNA, 30 bp, Artificial Sequence
  Synthetic oligonucleotide
gggccagaggatagcggcgcacatagcaca

SEQ ID NO: 170260 - DNA, 30 bp, Artificial Sequence
  Synthetic oligonucleotide
ccgtcgttggggagcttgggacatagcaca

SEQ ID NO: 170261 - DNA, 30 bp, Artificial Sequence
  Synthetic oligonucleotide
atcatgaggtagggaccagccgatagcaca

SEQ ID NO: 170262 - DNA, 30 bp, Artificial Sequence
  Synthetic oligonucleotide
tgcaccaagtagcagtgattccaacgcaca

SEQ ID NO: 170263 - DNA, 30 bp, Artificial Sequence
  Synthetic oligonucleotide
tcgaatttaaacgtgctccggagccgcaca

SEQ ID NO: 170264 - DNA, 30 bp, Artificial Sequence
  Synthetic oligonucleotide
gtacggtcttctatgtccagaaagcgcaca

SEQ ID NO: 170265 - DNA, 30 bp, Artificial Sequence
  Synthetic oligonucleotide
gtgcatcccgcagaaggattacggcgcaca

SEQ ID NO: 170266 - DNA, 30 bp, Artificial Sequence
  Synthetic oligonucleotide
gggcgaaacaacgaccctcatggaggcaca

SEQ ID NO: 170267 - DNA, 30 bp, Artificial Sequence
  Synthetic oligonucleotide
gtgggggtcccaaaaccgacacacggcaca

SEQ ID NO: 170268 - DNA, 30 bp, Artificial Sequence
  Synthetic oligonucleotide
cggagaatcctttcctgaaaggaatgcaca

SEQ ID NO: 170269 - DNA, 30 bp, Artificial Sequence
  Synthetic oligonucleotide
aaataggtgagttaggtggtgtagtgcaca

SEQ ID NO: 170270 - DNA, 30 bp, Artificial Sequence
  Synthetic oligonucleotide
ttggctgccctcataatggtggcaatcaca

SEQ ID NO: 170271 - DNA, 30 bp, Artificial Sequence
  Synthetic oligonucleotide
atgtcctcggagtctatgcgccccatcaca

SEQ ID NO: 170272 - DNA, 30 bp, Artificial Sequence
  Synthetic oligonucleotide
aatgaaggaggtaaccgctacggcctcaca

SEQ ID NO: 170273 - DNA, 30 bp, Artificial Sequence
  Synthetic oligonucleotide
gatgggagaaagatacgcgttattctcaca

SEQ ID NO: 170274 - DNA, 30 bp, Artificial Sequence
  Synthetic oligonucleotide
aaggattgttggccaattctgtacgtcaca

SEQ ID NO: 170275 - DNA, 30 bp, Artificial Sequence
  Synthetic oligonucleotide
tggataagtattgagcgtgggcgcgtcaca

SEQ ID NO: 170276 - DNA, 30 bp, Artificial Sequence
  Synthetic oligonucleotide
tcccgggcgtgatttgaatgcatgttcaca

SEQ ID NO: 170277 - DNA, 30 bp, Artificial Sequence
  Synthetic oligonucleotide
tcaactctcagctgcgaaccctcaaagaca

SEQ ID NO: 170278 - DNA, 30 bp, Artificial Sequence
  Synthetic oligonucleotide
tcattcgttcactgccggcttcgaaagaca

SEQ ID NO: 170279 - DNA, 30 bp, Artificial Sequence
  Synthetic oligonucleotide
acggaattactatctgcgtaaacgaagaca

SEQ ID NO: 170280 - DNA, 30 bp, Artificial Sequence
  Synthetic oligonucleotide
cagagtgtagcagtaggcctgaaacagaca

SEQ ID NO: 170281 - DNA, 30 bp, Artificial Sequence
  Synthetic oligonucleotide
gcatcttccgggaaactagatcaacagaca

SEQ ID NO: 170282 - DNA, 30 bp, Artificial Sequence
  Synthetic oligonucleotide
cgataaattctctcgcgccgggaacagaca

SEQ ID NO: 170283 - DNA, 30 bp, Artificial Sequence
  Synthetic oligonucleotide
agacctcgcggacttatcgtaagccagaca

SEQ ID NO: 170284 - DNA, 30 bp, Artificial Sequence
  Synthetic oligonucleotide
gagaaacggtccaaggtaagggtccagaca

SEQ ID NO: 170285 - DNA, 30 bp, Artificial Sequence
  Synthetic oligonucleotide
gggtgatttggtttagactgtgtccagaca

SEQ ID NO: 170286 - DNA, 30 bp, Artificial Sequence
  Synthetic oligonucleotide
gaaatggcagtgggacccctgcagcagaca

SEQ ID NO: 170287 - DNA, 30 bp, Artificial Sequence
  Synthetic oligonucleotide
atccccatatcacggcaaaatcccgagaca

SEQ ID NO: 170288 - DNA, 30 bp, Artificial Sequence
  Synthetic oligonucleotide
ggcgtataaattttaggggcaggcgagaca

SEQ ID NO: 170289 - DNA, 30 bp, Artificial Sequence
  Synthetic oligonucleotide
aatacggagggcccgcgggatatcgagaca

SEQ ID NO: 170290 - DNA, 30 bp, Artificial Sequence
  Synthetic oligonucleotide
atgcagcgttacaaggtaagcgtcgagaca

SEQ ID NO: 170291 - DNA, 30 bp, Artificial Sequence
  Synthetic oligonucleotide
attgggaattcggttcaaacgagggagaca

SEQ ID NO: 170292 - DNA, 30 bp, Artificial Sequence
  Synthetic oligonucleotide
aaacccgggaactggtacatgagggagaca

SEQ ID NO: 170293 - DNA, 30 bp, Artificial Sequence
  Synthetic oligonucleotide
cgacctcttagcccgtgctatatggagaca

SEQ ID NO: 170294 - DNA, 30 bp, Artificial Sequence
  Synthetic oligonucleotide
gggtcccattaatttcaaaccggtgagaca

SEQ ID NO: 170295 - DNA, 30 bp, Artificial Sequence
  Synthetic oligonucleotide
agcgttaccggggtgggcctggactagaca

SEQ ID NO: 170296 - DNA, 30 bp, Artificial Sequence
  Synthetic oligonucleotide
gcttccaagggcagccgtagtcgctagaca

SEQ ID NO: 170297 - DNA, 29 bp, Artificial Sequence
  Synthetic oligonucleotide
tgtagacgtgaaatgtgaatcagtagaca

SEQ ID NO: 170298 - DNA, 30 bp, Artificial Sequence
  Synthetic oligonucleotide
aggccaggctaaggacgacagtggtagaca

SEQ ID NO: 170299 - DNA, 30 bp, Artificial Sequence
  Synthetic oligonucleotide
gctcgtgaccctggcctaaattggtagaca

SEQ ID NO: 170300 - DNA, 30 bp, Artificial Sequence
  Synthetic oligonucleotide
cgcgccacactcagacctgcttattagaca

SEQ ID NO: 170301 - DNA, 30 bp, Artificial Sequence
  Synthetic oligonucleotide
ctacattagggatgaatgtggccttagaca

SEQ ID NO: 170302 - DNA, 30 bp, Artificial Sequence
  Synthetic oligonucleotide
gatccaggacggggcgctgatagttagaca

SEQ ID NO: 170303 - DNA, 30 bp, Artificial Sequence
  Synthetic oligonucleotide
acaacccgttcatgacaagagaaaacgaca

SEQ ID NO: 170304 - DNA, 30 bp, Artificial Sequence
  Synthetic oligonucleotide
gcatttgacaacggggattcaggaacgaca

SEQ ID NO: 170305 - DNA, 30 bp, Artificial Sequence
  Synthetic oligonucleotide
cggctcaatccccccaattgagccacgaca

SEQ ID NO: 170306 - DNA, 30 bp, Artificial Sequence
  Synthetic oligonucleotide
agcttagttgctgagcaatccattacgaca

SEQ ID NO: 170307 - DNA, 30 bp, Artificial Sequence
  Synthetic oligonucleotide
acagtaggtgctagggaaaggccaccgaca

SEQ ID NO: 170308 - DNA, 30 bp, Artificial Sequence
  Synthetic oligonucleotide
actacaggtaaactgttactcggcccgaca

SEQ ID NO: 170309 - DNA, 30 bp, Artificial Sequence
  Synthetic oligonucleotide
cttctcctgcagactgtgataaagccgaca

SEQ ID NO: 170310 - DNA, 30 bp, Artificial Sequence
  Synthetic oligonucleotide
acatggacttcatagggttaccatccgaca

SEQ ID NO: 170311 - DNA, 30 bp, Artificial Sequence
  Synthetic oligonucleotide
agtcattaggacatcagcgacaaagcgaca

SEQ ID NO: 170312 - DNA, 30 bp, Artificial Sequence
  Synthetic oligonucleotide
tcgacacggcctaccttactatcagcgaca

SEQ ID NO: 170313 - DNA, 30 bp, Artificial Sequence
  Synthetic oligonucleotide
accatggttagaacaaagaccggagcgaca

SEQ ID NO: 170314 - DNA, 30 bp, Artificial Sequence
  Synthetic oligonucleotide
acctctgcaaactctagaggcctagcgaca

SEQ ID NO: 170315 - DNA, 30 bp, Artificial Sequence
  Synthetic oligonucleotide
tgcttgcctaactgaagctgtctagcgaca

SEQ ID NO: 170316 - DNA, 30 bp, Artificial Sequence
  Synthetic oligonucleotide
attgcagtccaaggtagtacgtaggcgaca

SEQ ID NO: 170317 - DNA, 30 bp, Artificial Sequence
  Synthetic oligonucleotide
cgtggtatagcctgttcaataagggcgaca

SEQ ID NO: 170318 - DNA, 30 bp, Artificial Sequence
  Synthetic oligonucleotide
cgcgtattaatggtgtctggacctgcgaca

SEQ ID NO: 170319 - DNA, 30 bp, Artificial Sequence
  Synthetic oligonucleotide
ctggtttactctccagattgcgttgcgaca

SEQ ID NO: 170320 - DNA, 30 bp, Artificial Sequence
  Synthetic oligonucleotide
gccttagtgatgtcctacaattattcgaca

SEQ ID NO: 170321 - DNA, 30 bp, Artificial Sequence
  Synthetic oligonucleotide
ggtcgggtatggtatttatattgttcgaca

SEQ ID NO: 170322 - DNA, 30 bp, Artificial Sequence
  Synthetic oligonucleotide
ctcaaacgaatgtaacgtgcatataggaca

SEQ ID NO: 170323 - DNA, 30 bp, Artificial Sequence
  Synthetic oligonucleotide
ggccatgtcaatccggggagcactaggaca

SEQ ID NO: 170324 - DNA, 30 bp, Artificial Sequence
  Synthetic oligonucleotide
gccaagcgccgggtaatctggtgacggaca

SEQ ID NO: 170325 - DNA, 30 bp, Artificial Sequence
  Synthetic oligonucleotide
gttcaagatagaacagctattggccggaca

SEQ ID NO: 170326 - DNA, 30 bp, Artificial Sequence
  Synthetic oligonucleotide
tcttggggtggttttgtgtcatcgcggaca

SEQ ID NO: 170327 - DNA, 30 bp, Artificial Sequence
  Synthetic oligonucleotide
tacccacggtacatagctatatcgcggaca

SEQ ID NO: 170328 - DNA, 30 bp, Artificial Sequence
  Synthetic oligonucleotide
gaacggatatggtctgatatatttcggaca

SEQ ID NO: 170329 - DNA, 30 bp, Artificial Sequence
  Synthetic oligonucleotide
gtggccgtgtcggcatgtggcaaagggaca

SEQ ID NO: 170330 - DNA, 30 bp, Artificial Sequence
  Synthetic oligonucleotide
agactgcgtgtgaccccgcacgcagggaca

SEQ ID NO: 170331 - DNA, 30 bp, Artificial Sequence
  Synthetic oligonucleotide
cggcctggtaataaaagatatggagggaca

SEQ ID NO: 170332 - DNA, 30 bp, Artificial Sequence
  Synthetic oligonucleotide
gggtcgtcaagggacctctcggccgggaca

SEQ ID NO: 170333 - DNA, 30 bp, Artificial Sequence
  Synthetic oligonucleotide
aggaatgcacgtgtggaccaacgggggaca

SEQ ID NO: 170334 - DNA, 30 bp, Artificial Sequence
  Synthetic oligonucleotide
agggtactgcctaggcacgtacactggaca

SEQ ID NO: 170335 - DNA, 30 bp, Artificial Sequence
  Synthetic oligonucleotide
cctccgcgctcagattagaatacctggaca

SEQ ID NO: 170336 - DNA, 30 bp, Artificial Sequence
  Synthetic oligonucleotide
gaatctgtggatgtaacagggacgtggaca

SEQ ID NO: 170337 - DNA, 30 bp, Artificial Sequence
  Synthetic oligonucleotide
tccattgtgtgtaatcttcatgggtggaca

SEQ ID NO: 170338 - DNA, 30 bp, Artificial Sequence
  Synthetic oligonucleotide
gtttcaacggggtaacaagcacgttggaca

SEQ ID NO: 170339 - DNA, 30 bp, Artificial Sequence
  Synthetic oligonucleotide
agataaaggcagcatccgcttaacatgaca

SEQ ID NO: 170340 - DNA, 30 bp, Artificial Sequence
  Synthetic oligonucleotide
agtgagtagtcaggcaatacacgcatgaca

SEQ ID NO: 170341 - DNA, 30 bp, Artificial Sequence
  Synthetic oligonucleotide
acgcacaggatggcatattattagatgaca

SEQ ID NO: 170342 - DNA, 30 bp, Artificial Sequence
  Synthetic oligonucleotide
gggtgtactgactatttacggtcgatgaca

SEQ ID NO: 170343 - DNA, 30 bp, Artificial Sequence
  Synthetic oligonucleotide
aagagtgtgtatatgtatctcaggatgaca

SEQ ID NO: 170344 - DNA, 30 bp, Artificial Sequence
  Synthetic oligonucleotide
gagggaatttttggatttaccaacctgaca

SEQ ID NO: 170345 - DNA, 30 bp, Artificial Sequence
  Synthetic oligonucleotide
catatagggatgaccgaccctacgctgaca

SEQ ID NO: 170346 - DNA, 30 bp, Artificial Sequence
  Synthetic oligonucleotide
gttaccttgtgtcgggaggcgtttctgaca

SEQ ID NO: 170347 - DNA, 30 bp, Artificial Sequence
  Synthetic oligonucleotide
taaaggagtcggagctcgccagaagtgaca

SEQ ID NO: 170348 - DNA, 30 bp, Artificial Sequence
  Synthetic oligonucleotide
tacctttcctcgtttatgaactaagtgaca

SEQ ID NO: 170349 - DNA, 30 bp, Artificial Sequence
  Synthetic oligonucleotide
cggggcgcatggacgagtggcgtcgtgaca

SEQ ID NO: 170350 - DNA, 30 bp, Artificial Sequence
  Synthetic oligonucleotide
tttgttgtatcgaggcgtgagaaggtgaca

SEQ ID NO: 170351 - DNA, 30 bp, Artificial Sequence
  Synthetic oligonucleotide
ccatgtcggcttaatcttcgatcggtgaca

SEQ ID NO: 170352 - DNA, 30 bp, Artificial Sequence
  Synthetic oligonucleotide
aggctcaagtgagtgggggaggtggtgaca

SEQ ID NO: 170353 - DNA, 30 bp, Artificial Sequence
  Synthetic oligonucleotide
caccctagatggatttacagcgctgtgaca

SEQ ID NO: 170354 - DNA, 30 bp, Artificial Sequence
  Synthetic oligonucleotide
ggtgttcgctcggtctggctaggtgtgaca

SEQ ID NO: 170355 - DNA, 30 bp, Artificial Sequence
  Synthetic oligonucleotide
cgctaccctatggggacctgatttgtgaca

SEQ ID NO: 170356 - DNA, 30 bp, Artificial Sequence
  Synthetic oligonucleotide
ggcctccgagggaaaaagagaagattgaca

SEQ ID NO: 170357 - DNA, 30 bp, Artificial Sequence
  Synthetic oligonucleotide
gcaaaggataatgctatgttggacttgaca

SEQ ID NO: 170358 - DNA, 30 bp, Artificial Sequence
  Synthetic oligonucleotide
ctagcctctctccctccacctatcaataca

SEQ ID NO: 170359 - DNA, 30 bp, Artificial Sequence
  Synthetic oligonucleotide
ggtcacagccatcgtccgggtcttaataca

SEQ ID NO: 170360 - DNA, 30 bp, Artificial Sequence
  Synthetic oligonucleotide
accacgaggagggaccgcatgtaacataca

SEQ ID NO: 170361 - DNA, 30 bp, Artificial Sequence
  Synthetic oligonucleotide
agtaagggtgctgagcgctgtgcccataca

SEQ ID NO: 170362 - DNA, 30 bp, Artificial Sequence
  Synthetic oligonucleotide
agcattatcgtaggaactggcgtgcataca

SEQ ID NO: 170363 - DNA, 30 bp, Artificial Sequence
  Synthetic oligonucleotide
gccaccgcattgcctagagatcgtcataca

SEQ ID NO: 170364 - DNA, 30 bp, Artificial Sequence
  Synthetic oligonucleotide
ggattgcaataatcggtcagctaggataca

SEQ ID NO: 170365 - DNA, 30 bp, Artificial Sequence
  Synthetic oligonucleotide
gactgcgacgtgtgcgtagaacgatataca

SEQ ID NO: 170366 - DNA, 30 bp, Artificial Sequence
  Synthetic oligonucleotide
ctcattacgagaaactcttattactataca

SEQ ID NO: 170367 - DNA, 30 bp, Artificial Sequence
  Synthetic oligonucleotide
aattgggaaggcctggtgaactaaactaca

SEQ ID NO: 170368 - DNA, 29 bp, Artificial Sequence
  Synthetic oligonucleotide
ataaacaatccgcggccctcagaactaca

SEQ ID NO: 170369 - DNA, 30 bp, Artificial Sequence
  Synthetic oligonucleotide
taagatgcctacggtgttggcaacactaca

SEQ ID NO: 170370 - DNA, 30 bp, Artificial Sequence
  Synthetic oligonucleotide
tcgagtttttaccgttcgatcgtcactaca

SEQ ID NO: 170371 - DNA, 30 bp, Artificial Sequence
  Synthetic oligonucleotide
ctacagaagtccacccatattgcgactaca

SEQ ID NO: 170372 - DNA, 30 bp, Artificial Sequence
  Synthetic oligonucleotide
gatctaacaccatcgaggatactgactaca

SEQ ID NO: 170373 - DNA, 30 bp, Artificial Sequence
  Synthetic oligonucleotide
gccaagggggagtcactgctgcatactaca

SEQ ID NO: 170374 - DNA, 30 bp, Artificial Sequence
  Synthetic oligonucleotide
ttacttccatagtgtaccgctagtactaca

SEQ ID NO: 170375 - DNA, 30 bp, Artificial Sequence
  Synthetic oligonucleotide
aatccagatgcgcgcttaattatcgctaca

SEQ ID NO: 170376 - DNA, 30 bp, Artificial Sequence
  Synthetic oligonucleotide
tggaccctcagacaggaataagtggctaca

SEQ ID NO: 170377 - DNA, 30 bp, Artificial Sequence
  Synthetic oligonucleotide
tgtatgcgggcaatctaagtgaactctaca

SEQ ID NO: 170378 - DNA, 30 bp, Artificial Sequence
  Synthetic oligonucleotide
tacacttgtgtagctagccgaacgtctaca

SEQ ID NO: 170379 - DNA, 30 bp, Artificial Sequence
  Synthetic oligonucleotide
gccattcagaacggtataaggccaagtaca

SEQ ID NO: 170380 - DNA, 30 bp, Artificial Sequence
  Synthetic oligonucleotide
gggagcacggggtctccagtagccagtaca

SEQ ID NO: 170381 - DNA, 30 bp, Artificial Sequence
  Synthetic oligonucleotide
gcaaacctagagcaataagagcgcagtaca

SEQ ID NO: 170382 - DNA, 30 bp, Artificial Sequence
  Synthetic oligonucleotide
ggtctgcaagcctggcgtagcccgagtaca

SEQ ID NO: 170383 - DNA, 30 bp, Artificial Sequence
  Synthetic oligonucleotide
ggagaagaattgctgatgattaatagtaca

SEQ ID NO: 170384 - DNA, 30 bp, Artificial Sequence
  Synthetic oligonucleotide
gatcctcgaaggatacactttgaacgtaca

SEQ ID NO: 170385 - DNA, 30 bp, Artificial Sequence
  Synthetic oligonucleotide
gttagctaaatacacggatggctacgtaca

SEQ ID NO: 170386 - DNA, 30 bp, Artificial Sequence
  Synthetic oligonucleotide
aagaggaaaccaaacggttacaaccgtaca

SEQ ID NO: 170387 - DNA, 30 bp, Artificial Sequence
  Synthetic oligonucleotide
agctaggcagaacggcgtgaatgccgtaca

SEQ ID NO: 170388 - DNA, 30 bp, Artificial Sequence
  Synthetic oligonucleotide
gcagtgctcccaaagcctagctcgcgtaca

SEQ ID NO: 170389 - DNA, 30 bp, Artificial Sequence
  Synthetic oligonucleotide
aggacaggcatagttcgtctctgtcgtaca

SEQ ID NO: 170390 - DNA, 30 bp, Artificial Sequence
  Synthetic oligonucleotide
tgacgtaagggaatcgcttgtcgaggtaca

SEQ ID NO: 170391 - DNA, 30 bp, Artificial Sequence
  Synthetic oligonucleotide
agcggtatcgtttgacgaaggaccggtaca

SEQ ID NO: 170392 - DNA, 30 bp, Artificial Sequence
  Synthetic oligonucleotide
agggatgtgccgtgaaaatgtttcggtaca

SEQ ID NO: 170393 - DNA, 30 bp, Artificial Sequence
  Synthetic oligonucleotide
cagtagtaggccaccggggagaagggtaca

SEQ ID NO: 170394 - DNA, 30 bp, Artificial Sequence
  Synthetic oligonucleotide
tgcatatctgctagtatgcatgggggtaca

SEQ ID NO: 170395 - DNA, 30 bp, Artificial Sequence
  Synthetic oligonucleotide
tgtaaataggcgagcgggaggtggggtaca

SEQ ID NO: 170396 - DNA, 30 bp, Artificial Sequence
  Synthetic oligonucleotide
tcagaatgataatttaggtatcatggtaca

SEQ ID NO: 170397 - DNA, 30 bp, Artificial Sequence
  Synthetic oligonucleotide
tgctgtcaataccaggctgggtgtggtaca

SEQ ID NO: 170398 - DNA, 30 bp, Artificial Sequence
  Synthetic oligonucleotide
agtcatggttacggacatgcgctgtgtaca

SEQ ID NO: 170399 - DNA, 30 bp, Artificial Sequence
  Synthetic oligonucleotide
gaatgagtccattaactcgtgacaattaca

SEQ ID NO: 170400 - DNA, 30 bp, Artificial Sequence
  Synthetic oligonucleotide
ggatccaaagagaggggctggttaattaca

SEQ ID NO: 170401 - DNA, 30 bp, Artificial Sequence
  Synthetic oligonucleotide
tgcgcgctcgaggcctacactccgattaca

SEQ ID NO: 170402 - DNA, 30 bp, Artificial Sequence
  Synthetic oligonucleotide
actgcaggcgattcgatgtgagcgcttaca

SEQ ID NO: 170403 - DNA, 30 bp, Artificial Sequence
  Synthetic oligonucleotide
acagagggtgctaggtctttattgcttaca

SEQ ID NO: 170404 - DNA, 30 bp, Artificial Sequence
  Synthetic oligonucleotide
tattggcgcagacgggtgaagaaagttaca

SEQ ID NO: 170405 - DNA, 30 bp, Artificial Sequence
  Synthetic oligonucleotide
ctaaatttataggtatctccgtaagttaca

SEQ ID NO: 170406 - DNA, 30 bp, Artificial Sequence
  Synthetic oligonucleotide
aacattgtggtcaatagcgcgtcagttaca

SEQ ID NO: 170407 - DNA, 30 bp, Artificial Sequence
  Synthetic oligonucleotide
ccacgcgtgtttagggcgatattagttaca

SEQ ID NO: 170408 - DNA, 30 bp, Artificial Sequence
  Synthetic oligonucleotide
ctggagggagaaataagggctttcgttaca

SEQ ID NO: 170409 - DNA, 30 bp, Artificial Sequence
  Synthetic oligonucleotide
ctgcgaatcggaggcgcaggttcggttaca

SEQ ID NO: 170410 - DNA, 30 bp, Artificial Sequence
  Synthetic oligonucleotide
tatcgacacatgcccaagagccgggttaca

SEQ ID NO: 170411 - DNA, 31 bp, Artificial Sequence
  Synthetic oligonucleotide
cagagaaggaaggacgtactacttggttaca

SEQ ID NO: 170412 - DNA, 30 bp, Artificial Sequence
  Synthetic oligonucleotide
gctacgcggagggcgagatatcgatttaca

SEQ ID NO: 170413 - DNA, 31 bp, Artificial Sequence
  Synthetic oligonucleotide
gctacacctatttggtctgactaactttaca

SEQ ID NO: 170414 - DNA, 30 bp, Artificial Sequence
  Synthetic oligonucleotide
caggtggcacaactaggaaaagcctttaca

SEQ ID NO: 170415 - DNA, 30 bp, Artificial Sequence
  Synthetic oligonucleotide
tacacacatttctgttgcgataggtttaca

SEQ ID NO: 170416 - DNA, 30 bp, Artificial Sequence
  Synthetic oligonucleotide
cgggaactcgtgtcgggaatgtcttttaca

SEQ ID NO: 170417 - DNA, 30 bp, Artificial Sequence
  Synthetic oligonucleotide
agagatcgctctaggaatacagtcaaacca

SEQ ID NO: 170418 - DNA, 30 bp, Artificial Sequence
  Synthetic oligonucleotide
taagaaagacggtaagtcttgtggaaacca

SEQ ID NO: 170419 - DNA, 30 bp, Artificial Sequence
  Synthetic oligonucleotide
aatatctgcgtaggaaggatacttaaacca

SEQ ID NO: 170420 - DNA, 30 bp, Artificial Sequence
  Synthetic oligonucleotide
cggagccttgaattcttgtgcgtccaacca

SEQ ID NO: 170421 - DNA, 30 bp, Artificial Sequence
  Synthetic oligonucleotide
gaacaatcgcgggctgcgagctcgcaacca

SEQ ID NO: 170422 - DNA, 30 bp, Artificial Sequence
  Synthetic oligonucleotide
gggcaataagaaatctggatgcctcaacca

SEQ ID NO: 170423 - DNA, 30 bp, Artificial Sequence
  Synthetic oligonucleotide
gcgtaaaatggcgcagtgactcgtcaacca

SEQ ID NO: 170424 - DNA, 30 bp, Artificial Sequence
  Synthetic oligonucleotide
atcgctgtcatcgcgtctgatgttcaacca

SEQ ID NO: 170425 - DNA, 30 bp, Artificial Sequence
  Synthetic oligonucleotide
atgtctcatgttgctgaactagcagaacca

SEQ ID NO: 170426 - DNA, 30 bp, Artificial Sequence
  Synthetic oligonucleotide
tacataagtggtataaaagtaggagaacca

SEQ ID NO: 170427 - DNA, 30 bp, Artificial Sequence
  Synthetic oligonucleotide
agctgtcactgatactttttgcgggaacca

SEQ ID NO: 170428 - DNA, 30 bp, Artificial Sequence
  Synthetic oligonucleotide
cacctagagggtgctgtaatacctgaacca

SEQ ID NO: 170429 - DNA, 30 bp, Artificial Sequence
  Synthetic oligonucleotide
gtgtcgacacttcggggagtgctctaacca

SEQ ID NO: 170430 - DNA, 30 bp, Artificial Sequence
  Synthetic oligonucleotide
aatctgcttaagtagcacctcttctaacca

SEQ ID NO: 170431 - DNA, 30 bp, Artificial Sequence
  Synthetic oligonucleotide
caagtcgcggactgacggccctcgtaacca

SEQ ID NO: 170432 - DNA, 30 bp, Artificial Sequence
  Synthetic oligonucleotide
agaaaggaaaatccgcaaggccgttaacca

SEQ ID NO: 170433 - DNA, 30 bp, Artificial Sequence
  Synthetic oligonucleotide
tccgatgccatggactttgaagtttaacca

SEQ ID NO: 170434 - DNA, 30 bp, Artificial Sequence
  Synthetic oligonucleotide
tagcgcggtccgctttcgactggaacacca

SEQ ID NO: 170435 - DNA, 30 bp, Artificial Sequence
  Synthetic oligonucleotide
cgccacgcacacctttttaatgtaacacca

SEQ ID NO: 170436 - DNA, 30 bp, Artificial Sequence
  Synthetic oligonucleotide
tcggaggtcataatcattatccacacacca

SEQ ID NO: 170437 - DNA, 30 bp, Artificial Sequence
  Synthetic oligonucleotide
ccacgttagtggagactccacaggacacca

SEQ ID NO: 170438 - DNA, 30 bp, Artificial Sequence
  Synthetic oligonucleotide
tacagcaaggattgatatagcgtaccacca

SEQ ID NO: 170439 - DNA, 30 bp, Artificial Sequence
  Synthetic oligonucleotide
tgccaagtgcaccccctgcgctaagcacca

SEQ ID NO: 170440 - DNA, 30 bp, Artificial Sequence
  Synthetic oligonucleotide
cgtggtcccattatcattgggggcgcacca

SEQ ID NO: 170441 - DNA, 30 bp, Artificial Sequence
  Synthetic oligonucleotide
accgaaggggttgtagcacctagggcacca

SEQ ID NO: 170442 - DNA, 30 bp, Artificial Sequence
  Synthetic oligonucleotide
gtcttgcgacccttggctaaacctgcacca

SEQ ID NO: 170443 - DNA, 30 bp, Artificial Sequence
  Synthetic oligonucleotide
cgactgcttcaagttgcgtgtacatcacca

SEQ ID NO: 170444 - DNA, 30 bp, Artificial Sequence
  Synthetic oligonucleotide
tcggcttggttagggagaaggatctcacca

SEQ ID NO: 170445 - DNA, 30 bp, Artificial Sequence
  Synthetic oligonucleotide
taagggtcggacagaggcgtggcgtcacca

SEQ ID NO: 170446 - DNA, 30 bp, Artificial Sequence
  Synthetic oligonucleotide
catctccgcatgtctccggacagaagacca

SEQ ID NO: 170447 - DNA, 30 bp, Artificial Sequence
  Synthetic oligonucleotide
ccaggcttgcggtttctaatagtaagacca

SEQ ID NO: 170448 - DNA, 30 bp, Artificial Sequence
  Synthetic oligonucleotide
tgagttcaatccgtaacgcccggacgacca

SEQ ID NO: 170449 - DNA, 30 bp, Artificial Sequence
  Synthetic oligonucleotide
tcgatgctgcaaaggactgtagtaggacca

SEQ ID NO: 170450 - DNA, 30 bp, Artificial Sequence
  Synthetic oligonucleotide
atgactacgcgcatcgtgaagcagggacca

SEQ ID NO: 170451 - DNA, 30 bp, Artificial Sequence
  Synthetic oligonucleotide
aggggcaagtctgtgatttcaacgggacca

SEQ ID NO: 170452 - DNA, 30 bp, Artificial Sequence
  Synthetic oligonucleotide
gtccagttctcatgctccgagatatgacca

SEQ ID NO: 170453 - DNA, 30 bp, Artificial Sequence
  Synthetic oligonucleotide
gagactggtgtgacggtggtatagatacca

SEQ ID NO: 170454 - DNA, 30 bp, Artificial Sequence
  Synthetic oligonucleotide
agctctacatcgcgtttcgagtcgatacca

SEQ ID NO: 170455 - DNA, 30 bp, Artificial Sequence
  Synthetic oligonucleotide
gcgaccgcaactcttccggggtatatacca

SEQ ID NO: 170456 - DNA, 30 bp, Artificial Sequence
  Synthetic oligonucleotide
gtatggtgaagcgtattcactaaactacca

SEQ ID NO: 170457 - DNA, 30 bp, Artificial Sequence
  Synthetic oligonucleotide
tgtgtgttgaatactgatttgggactacca

SEQ ID NO: 170458 - DNA, 30 bp, Artificial Sequence
  Synthetic oligonucleotide
ttattgtccgtaatacagataaacctacca

SEQ ID NO: 170459 - DNA, 30 bp, Artificial Sequence
  Synthetic oligonucleotide
tcagatgtcggaatctgtgagcggctacca

SEQ ID NO: 170460 - DNA, 30 bp, Artificial Sequence
  Synthetic oligonucleotide
tgggtctaggaagacctgaggggagtacca

SEQ ID NO: 170461 - DNA, 30 bp, Artificial Sequence
  Synthetic oligonucleotide
ggaggcgtatgcgcgtaatcgcccgtacca

SEQ ID NO: 170462 - DNA, 30 bp, Artificial Sequence
  Synthetic oligonucleotide
tagtaggattacggtcgaacgtcggtacca

SEQ ID NO: 170463 - DNA, 30 bp, Artificial Sequence
  Synthetic oligonucleotide
taccacttatcgaagggacacggattacca

SEQ ID NO: 170464 - DNA, 30 bp, Artificial Sequence
  Synthetic oligonucleotide
gcgtgcaaatacaacagggctcacttacca

SEQ ID NO: 170465 - DNA, 30 bp, Artificial Sequence
  Synthetic oligonucleotide
accgaagaatacctgcaatgattgttacca

SEQ ID NO: 170466 - DNA, 30 bp, Artificial Sequence
  Synthetic oligonucleotide
gaaacagatatgtgttcatagaaaaaccca

SEQ ID NO: 170467 - DNA, 30 bp, Artificial Sequence
  Synthetic oligonucleotide
aaagtacaagtgagcaatttagccaaccca

SEQ ID NO: 170468 - DNA, 30 bp, Artificial Sequence
  Synthetic oligonucleotide
taacgcacgtgtgcagacccatagaaccca

SEQ ID NO: 170469 - DNA, 30 bp, Artificial Sequence
  Synthetic oligonucleotide
caccattggaatggttgtgcgctgaaccca

SEQ ID NO: 170470 - DNA, 30 bp, Artificial Sequence
  Synthetic oligonucleotide
tagcacgatctagctccttgggttaaccca

SEQ ID NO: 170471 - DNA, 30 bp, Artificial Sequence
  Synthetic oligonucleotide
tgaataatgggtgcacaattgtaccaccca

SEQ ID NO: 170472 - DNA, 30 bp, Artificial Sequence
  Synthetic oligonucleotide
tagcgccaagctgaacagataggccaccca

SEQ ID NO: 170473 - DNA, 30 bp, Artificial Sequence
  Synthetic oligonucleotide
gggcacaaatggtgctaacctgtccaccca

SEQ ID NO: 170474 - DNA, 30 bp, Artificial Sequence
  Synthetic oligonucleotide
gagccagttcggattggttattaagaccca

SEQ ID NO: 170475 - DNA, 29 bp, Artificial Sequence
  Synthetic oligonucleotide
ttgtccgggacgtcgtttacaccgaccca

SEQ ID NO: 170476 - DNA, 30 bp, Artificial Sequence
  Synthetic oligonucleotide
cgggcacagccattcgaaatgcgggaccca

SEQ ID NO: 170477 - DNA, 30 bp, Artificial Sequence
  Synthetic oligonucleotide
acgaaaggcgcttgaaagtactgtgaccca

SEQ ID NO: 170478 - DNA, 30 bp, Artificial Sequence
  Synthetic oligonucleotide
atcttcaagaggactagctcatcataccca

SEQ ID NO: 170479 - DNA, 30 bp, Artificial Sequence
  Synthetic oligonucleotide
agacacgcgtacagtgtcgcctgctaccca

SEQ ID NO: 170480 - DNA, 30 bp, Artificial Sequence
  Synthetic oligonucleotide
tgtgcacggcacacccttggctatccccca

SEQ ID NO: 170481 - DNA, 30 bp, Artificial Sequence
  Synthetic oligonucleotide
gcatgctaagaaggttctcggggggcccca

SEQ ID NO: 170482 - DNA, 30 bp, Artificial Sequence
  Synthetic oligonucleotide
tgcatcgataaggctgttcataatgcccca

SEQ ID NO: 170483 - DNA, 30 bp, Artificial Sequence
  Synthetic oligonucleotide
gaggctagtcaaagtattacgccgtcccca

SEQ ID NO: 170484 - DNA, 31 bp, Artificial Sequence
  Synthetic oligonucleotide
gaatggcgaaggttcaagagccaggtcccca

SEQ ID NO: 170485 - DNA, 30 bp, Artificial Sequence
  Synthetic oligonucleotide
aaaacgcaaaatataagcgaacacagccca

SEQ ID NO: 170486 - DNA, 30 bp, Artificial Sequence
  Synthetic oligonucleotide
cgatcgctagggggtcttagcaccagccca

SEQ ID NO: 170487 - DNA, 30 bp, Artificial Sequence
  Synthetic oligonucleotide
tgaataagcagggtgtcgttagccagccca

SEQ ID NO: 170488 - DNA, 30 bp, Artificial Sequence
  Synthetic oligonucleotide
agtacaaacgcgggttgaatgtagagccca

SEQ ID NO: 170489 - DNA, 30 bp, Artificial Sequence
  Synthetic oligonucleotide
tatcccagaatgcgcttcttagctagccca

SEQ ID NO: 170490 - DNA, 30 bp, Artificial Sequence
  Synthetic oligonucleotide
ccgagacgattcagttcagaatcgcgccca

SEQ ID NO: 170491 - DNA, 30 bp, Artificial Sequence
  Synthetic oligonucleotide
gcgcgttgatgtttagatcgagggcgccca

SEQ ID NO: 170492 - DNA, 30 bp, Artificial Sequence
  Synthetic oligonucleotide
tgtatgtcgctagacgactccacgggccca

SEQ ID NO: 170493 - DNA, 30 bp, Artificial Sequence
  Synthetic oligonucleotide
gcataatgctgcttacctcggatgggccca

SEQ ID NO: 170494 - DNA, 30 bp, Artificial Sequence
  Synthetic oligonucleotide
acagggccgggtagctaggtagctggccca

SEQ ID NO: 170495 - DNA, 30 bp, Artificial Sequence
  Synthetic oligonucleotide
tcgcaatgtctatgacttccgtttggccca

SEQ ID NO: 170496 - DNA, 30 bp, Artificial Sequence
  Synthetic oligonucleotide
acgatggcctcctcgcgatttaaatgccca

SEQ ID NO: 170497 - DNA, 30 bp, Artificial Sequence
  Synthetic oligonucleotide
ccagctgagcacaaaatatacaactgccca

SEQ ID NO: 170498 - DNA, 30 bp, Artificial Sequence
  Synthetic oligonucleotide
gcatgcagagattcccggatcatgtgccca

SEQ ID NO: 170499 - DNA, 30 bp, Artificial Sequence
  Synthetic oligonucleotide
gagtcggacttactcgtctaattgtgccca

SEQ ID NO: 170500 - DNA, 30 bp, Artificial Sequence
  Synthetic oligonucleotide
atgacataccgataacagacatattgccca

SEQ ID NO: 170501 - DNA, 30 bp, Artificial Sequence
  Synthetic oligonucleotide
agctagaagtcagatttgaagaaaatccca

SEQ ID NO: 170502 - DNA, 30 bp, Artificial Sequence
  Synthetic oligonucleotide
gtacgtgggtaggggcaatcgataatccca

SEQ ID NO: 170503 - DNA, 30 bp, Artificial Sequence
  Synthetic oligonucleotide
agaatagcgaaaatgcttctataactccca

SEQ ID NO: 170504 - DNA, 30 bp, Artificial Sequence
  Synthetic oligonucleotide
aaagcgccgtttcgtattcccagactccca

SEQ ID NO: 170505 - DNA, 30 bp, Artificial Sequence
  Synthetic oligonucleotide
ggagtgtacagtatggtaatgtgactccca

SEQ ID NO: 170506 - DNA, 30 bp, Artificial Sequence
  Synthetic oligonucleotide
taaggaaaaaatagggttcgttacctccca

SEQ ID NO: 170507 - DNA, 30 bp, Artificial Sequence
  Synthetic oligonucleotide
cacggttgccgatatcggtgatgcctccca

SEQ ID NO: 170508 - DNA, 30 bp, Artificial Sequence
  Synthetic oligonucleotide
ttgttacgagagtaatactctaatctccca

SEQ ID NO: 170509 - DNA, 30 bp, Artificial Sequence
  Synthetic oligonucleotide
tggaagatggttttagcaacagtcgtccca

SEQ ID NO: 170510 - DNA, 30 bp, Artificial Sequence
  Synthetic oligonucleotide
gcttgacctctatagtggaccgtcgtccca

SEQ ID NO: 170511 - DNA, 30 bp, Artificial Sequence
  Synthetic oligonucleotide
tggcctagtgcccattcaacattggtccca

SEQ ID NO: 170512 - DNA, 30 bp, Artificial Sequence
  Synthetic oligonucleotide
aggacgacgaatggataaacgggtgtccca

SEQ ID NO: 170513 - DNA, 30 bp, Artificial Sequence
  Synthetic oligonucleotide
tcaacgggaacgagaggggaaatattccca

SEQ ID NO: 170514 - DNA, 30 bp, Artificial Sequence
  Synthetic oligonucleotide
agggtaaacatcgtcggcaggcacttccca

SEQ ID NO: 170515 - DNA, 30 bp, Artificial Sequence
  Synthetic oligonucleotide
gtaagggtctgaagttgcaagaccttccca

SEQ ID NO: 170516 - DNA, 30 bp, Artificial Sequence
  Synthetic oligonucleotide
acagcacctggtctgaatctacgcttccca

SEQ ID NO: 170517 - DNA, 30 bp, Artificial Sequence
  Synthetic oligonucleotide
gggataaatcagaatggttgtctcttccca

SEQ ID NO: 170518 - DNA, 30 bp, Artificial Sequence
  Synthetic oligonucleotide
cataacgccgttccgttaataccgttccca

SEQ ID NO: 170519 - DNA, 30 bp, Artificial Sequence
  Synthetic oligonucleotide
gcctaggacggaagttctaagttaaagcca

SEQ ID NO: 170520 - DNA, 30 bp, Artificial Sequence
  Synthetic oligonucleotide
gtaggaaagaggagatcgggcaacaagcca

SEQ ID NO: 170521 - DNA, 30 bp, Artificial Sequence
  Synthetic oligonucleotide
aaaagatacggggttatggttcgcaagcca

SEQ ID NO: 170522 - DNA, 30 bp, Artificial Sequence
  Synthetic oligonucleotide
ttgggcccgtaagtgtgaccgatgaagcca

SEQ ID NO: 170523 - DNA, 30 bp, Artificial Sequence
  Synthetic oligonucleotide
tacgacatctctgatcaatatatgaagcca

SEQ ID NO: 170524 - DNA, 30 bp, Artificial Sequence
  Synthetic oligonucleotide
atggaagaaagctttgggaatactaagcca

SEQ ID NO: 170525 - DNA, 30 bp, Artificial Sequence
  Synthetic oligonucleotide
gttatcgtactcgatagtcaccgtaagcca

SEQ ID NO: 170526 - DNA, 30 bp, Artificial Sequence
  Synthetic oligonucleotide
aaaattaagacggttagacccattaagcca

SEQ ID NO: 170527 - DNA, 30 bp, Artificial Sequence
  Synthetic oligonucleotide
aaacaacgtttcgaagtttgtccacagcca

SEQ ID NO: 170528 - DNA, 30 bp, Artificial Sequence
  Synthetic oligonucleotide
cgaagatcctaaatctgggtctcacagcca

SEQ ID NO: 170529 - DNA, 30 bp, Artificial Sequence
  Synthetic oligonucleotide
aactggacgcaatggaaacatagacagcca

SEQ ID NO: 170530 - DNA, 30 bp, Artificial Sequence
  Synthetic oligonucleotide
acgggggccctcgacaaccgcgtccagcca

SEQ ID NO: 170531 - DNA, 30 bp, Artificial Sequence
  Synthetic oligonucleotide
gtagaaaacatgggtcctcatgttcagcca

SEQ ID NO: 170532 - DNA, 30 bp, Artificial Sequence
  Synthetic oligonucleotide
gaccagttacacggcttagcgtcagagcca

SEQ ID NO: 170533 - DNA, 30 bp, Artificial Sequence
  Synthetic oligonucleotide
gtgctattcagggtgtcagattcagagcca

SEQ ID NO: 170534 - DNA, 30 bp, Artificial Sequence
  Synthetic oligonucleotide
aaaggttgacctgaacaacgtaatgagcca

SEQ ID NO: 170535 - DNA, 30 bp, Artificial Sequence
  Synthetic oligonucleotide
aagcttcgagttgacccatcgcatgagcca

SEQ ID NO: 170536 - DNA, 30 bp, Artificial Sequence
  Synthetic oligonucleotide
gacaactattcccagagtcgggactagcca

SEQ ID NO: 170537 - DNA, 30 bp, Artificial Sequence
  Synthetic oligonucleotide
cttataactagtcggcctcgagggtagcca

SEQ ID NO: 170538 - DNA, 31 bp, Artificial Sequence
  Synthetic oligonucleotide
gtccggacaactcgtaaggatggtttagcca

SEQ ID NO: 170539 - DNA, 30 bp, Artificial Sequence
  Synthetic oligonucleotide
gtggagtaaccaatgtacgcggatacgcca

SEQ ID NO: 170540 - DNA, 30 bp, Artificial Sequence
  Synthetic oligonucleotide
gcgtactcgctatgggtccactctacgcca

SEQ ID NO: 170541 - DNA, 30 bp, Artificial Sequence
  Synthetic oligonucleotide
gggaagggcagtaatttcttcgtaccgcca

SEQ ID NO: 170542 - DNA, 30 bp, Artificial Sequence
  Synthetic oligonucleotide
cgtagtgcgtatatgtggaggttgccgcca

SEQ ID NO: 170543 - DNA, 30 bp, Artificial Sequence
  Synthetic oligonucleotide
cgacacccccgcttacatcggaatccgcca

SEQ ID NO: 170544 - DNA, 30 bp, Artificial Sequence
  Synthetic oligonucleotide
cggatcccaactgcaacaggttgagcgcca

SEQ ID NO: 170545 - DNA, 30 bp, Artificial Sequence
  Synthetic oligonucleotide
taactttgaatgatggattcgcgcgcgcca

SEQ ID NO: 170546 - DNA, 30 bp, Artificial Sequence
  Synthetic oligonucleotide
tgagcaaaccgttcgaagtgcagggcgcca

SEQ ID NO: 170547 - DNA, 30 bp, Artificial Sequence
  Synthetic oligonucleotide
tgggtaatctgagggccgaaagtttcgcca

SEQ ID NO: 170548 - DNA, 30 bp, Artificial Sequence
  Synthetic oligonucleotide
gctgcagacctctgatgtggattaaggcca

SEQ ID NO: 170549 - DNA, 29 bp, Artificial Sequence
  Synthetic oligonucleotide
taacgagttacgtcggcggttcgaggcca

SEQ ID NO: 170550 - DNA, 30 bp, Artificial Sequence
  Synthetic oligonucleotide
atagacgaagcgcgcataggtagtaggcca

SEQ ID NO: 170551 - DNA, 30 bp, Artificial Sequence
  Synthetic oligonucleotide
atgggtgtcccatgcactcatggacggcca

SEQ ID NO: 170552 - DNA, 30 bp, Artificial Sequence
  Synthetic oligonucleotide
tgcttcggcgctgacgaactagcgcggcca

SEQ ID NO: 170553 - DNA, 30 bp, Artificial Sequence
  Synthetic oligonucleotide
tagtgcacagccttcacataagaagggcca

SEQ ID NO: 170554 - DNA, 30 bp, Artificial Sequence
  Synthetic oligonucleotide
tgcgcgtgatttcatccgatctgagggcca

SEQ ID NO: 170555 - DNA, 30 bp, Artificial Sequence
  Synthetic oligonucleotide
tccctagtaaatggggcagaaaacgggcca

SEQ ID NO: 170556 - DNA, 30 bp, Artificial Sequence
  Synthetic oligonucleotide
gaaactggtacttcaagaaaatttgggcca

SEQ ID NO: 170557 - DNA, 30 bp, Artificial Sequence
  Synthetic oligonucleotide
accgttttcacgaactctacaaaatggcca

SEQ ID NO: 170558 - DNA, 30 bp, Artificial Sequence
  Synthetic oligonucleotide
acccatgctttcagggatagacggtggcca

SEQ ID NO: 170559 - DNA, 30 bp, Artificial Sequence
  Synthetic oligonucleotide
ctttcccgtaaccaactttagcgcatgcca

SEQ ID NO: 170560 - DNA, 30 bp, Artificial Sequence
  Synthetic oligonucleotide
ggctaagaaacatacgtagatgagatgcca

SEQ ID NO: 170561 - DNA, 30 bp, Artificial Sequence
  Synthetic oligonucleotide
ccaagtgtaaacgttgactatttgatgcca

SEQ ID NO: 170562 - DNA, 30 bp, Artificial Sequence
  Synthetic oligonucleotide
cagataggtggatacacttcacatatgcca

SEQ ID NO: 170563 - DNA, 30 bp, Artificial Sequence
  Synthetic oligonucleotide
gaggggtcgaacgccaaatcaatcctgcca

SEQ ID NO: 170564 - DNA, 30 bp, Artificial Sequence
  Synthetic oligonucleotide
cactttcgagctaaacatatgtgggtgcca

SEQ ID NO: 170565 - DNA, 30 bp, Artificial Sequence
  Synthetic oligonucleotide
cgtccggtagttagagccgtccggttgcca

SEQ ID NO: 170566 - DNA, 30 bp, Artificial Sequence
  Synthetic oligonucleotide
ctatacggaggtaagcgcgggattttgcca

SEQ ID NO: 170567 - DNA, 30 bp, Artificial Sequence
  Synthetic oligonucleotide
gttggaggaggggatataacaagaaatcca

SEQ ID NO: 170568 - DNA, 30 bp, Artificial Sequence
  Synthetic oligonucleotide
ggctttcacagtactggtatcctaaatcca

SEQ ID NO: 170569 - DNA, 30 bp, Artificial Sequence
  Synthetic oligonucleotide
tacaggacttgtaggggaagcgccaatcca

SEQ ID NO: 170570 - DNA, 30 bp, Artificial Sequence
  Synthetic oligonucleotide
gcgggttgacgttcttcgtcggtacatcca

SEQ ID NO: 170571 - DNA, 30 bp, Artificial Sequence
  Synthetic oligonucleotide
gtatgacgtgttctgctttgcaggcatcca

SEQ ID NO: 170572 - DNA, 30 bp, Artificial Sequence
  Synthetic oligonucleotide
agttactctttaagaacttcttgtgatcca

SEQ ID NO: 170573 - DNA, 30 bp, Artificial Sequence
  Synthetic oligonucleotide
agggtggcttaaaatgaattgtactatcca

SEQ ID NO: 170574 - DNA, 30 bp, Artificial Sequence
  Synthetic oligonucleotide
gggatcggtcactacgttcaactgtatcca

SEQ ID NO: 170575 - DNA, 30 bp, Artificial Sequence
  Synthetic oligonucleotide
acagccgctcacgagaacgagtgttatcca

SEQ ID NO: 170576 - DNA, 30 bp, Artificial Sequence
  Synthetic oligonucleotide
gcatgccaatcgtagtagggttgaactcca

SEQ ID NO: 170577 - DNA, 30 bp, Artificial Sequence
  Synthetic oligonucleotide
ccacgctatacgaaacttgcacagactcca

SEQ ID NO: 170578 - DNA, 30 bp, Artificial Sequence
  Synthetic oligonucleotide
aacggagtgcgccggcaaaggtggactcca

SEQ ID NO: 170579 - DNA, 30 bp, Artificial Sequence
  Synthetic oligonucleotide
atacagaaacgtcacaatgtgactactcca

SEQ ID NO: 170580 - DNA, 30 bp, Artificial Sequence
  Synthetic oligonucleotide
ggagataattatcacgggaatcaacctcca

SEQ ID NO: 170581 - DNA, 30 bp, Artificial Sequence
  Synthetic oligonucleotide
gggtccggaggtcagaaaaagtcacctcca

SEQ ID NO: 170582 - DNA, 30 bp, Artificial Sequence
  Synthetic oligonucleotide
tggctagttaagttctgagtattagctcca

SEQ ID NO: 170583 - DNA, 30 bp, Artificial Sequence
  Synthetic oligonucleotide
ggttgacccacgcgactattcgacgctcca

SEQ ID NO: 170584 - DNA, 30 bp, Artificial Sequence
  Synthetic oligonucleotide
acattgacagagtccagattgctcgctcca

SEQ ID NO: 170585 - DNA, 30 bp, Artificial Sequence
  Synthetic oligonucleotide
ccgaacgtggcattaatcgcagagtctcca

SEQ ID NO: 170586 - DNA, 30 bp, Artificial Sequence
  Synthetic oligonucleotide
gtgtatctggggtcgcgccgtctgtctcca

SEQ ID NO: 170587 - DNA, 30 bp, Artificial Sequence
  Synthetic oligonucleotide
ttaggggagcacttcccaccctgaagtcca

SEQ ID NO: 170588 - DNA, 30 bp, Artificial Sequence
  Synthetic oligonucleotide
atcgttgtgggcgaccactctctaagtcca

SEQ ID NO: 170589 - DNA, 30 bp, Artificial Sequence
  Synthetic oligonucleotide
gcgtggaataatggcttcaggcacagtcca

SEQ ID NO: 170590 - DNA, 30 bp, Artificial Sequence
  Synthetic oligonucleotide
gcggactccggtaaggctttactcagtcca

SEQ ID NO: 170591 - DNA, 30 bp, Artificial Sequence
  Synthetic oligonucleotide
taatgaacagtattaccataaatgagtcca

SEQ ID NO: 170592 - DNA, 30 bp, Artificial Sequence
  Synthetic oligonucleotide
tcgtaataggaccacccaacggctagtcca

SEQ ID NO: 170593 - DNA, 30 bp, Artificial Sequence
  Synthetic oligonucleotide
cgggttcctagttaaactgccaaacgtcca

SEQ ID NO: 170594 - DNA, 30 bp, Artificial Sequence
  Synthetic oligonucleotide
agtaaatgtccggtaatccacattcgtcca

SEQ ID NO: 170595 - DNA, 30 bp, Artificial Sequence
  Synthetic oligonucleotide
aaagaagaggtgcctaccctcgaaggtcca

SEQ ID NO: 170596 - DNA, 30 bp, Artificial Sequence
  Synthetic oligonucleotide
atattacagtgaacttcacttcgaggtcca

SEQ ID NO: 170597 - DNA, 30 bp, Artificial Sequence
  Synthetic oligonucleotide
tcacgtatagtaacacaataactaggtcca

SEQ ID NO: 170598 - DNA, 30 bp, Artificial Sequence
  Synthetic oligonucleotide
cggcagaaatggcgcttactagagggtcca

SEQ ID NO: 170599 - DNA, 30 bp, Artificial Sequence
  Synthetic oligonucleotide
catctctagtaaatctggcgagttggtcca

SEQ ID NO: 170600 - DNA, 30 bp, Artificial Sequence
  Synthetic oligonucleotide
ccgcccatatttaaaagggatttctgtcca

SEQ ID NO: 170601 - DNA, 30 bp, Artificial Sequence
  Synthetic oligonucleotide
caggagccaattagttcggctgattgtcca

SEQ ID NO: 170602 - DNA, 30 bp, Artificial Sequence
  Synthetic oligonucleotide
gaagaatctccgcattgaatattaattcca

SEQ ID NO: 170603 - DNA, 30 bp, Artificial Sequence
  Synthetic oligonucleotide
tagggaactattccttcctctactcttcca

SEQ ID NO: 170604 - DNA, 30 bp, Artificial Sequence
  Synthetic oligonucleotide
ctgcgcgtctctgaaaggatctaggttcca

SEQ ID NO: 170605 - DNA, 30 bp, Artificial Sequence
  Synthetic oligonucleotide
actacgtcgcgacgtagtcgatgatttcca

SEQ ID NO: 170606 - DNA, 30 bp, Artificial Sequence
  Synthetic oligonucleotide
taatacaacggattagctctataacaagca

SEQ ID NO: 170607 - DNA, 30 bp, Artificial Sequence
  Synthetic oligonucleotide
ggcctcacttaaaattcgttgccacaagca

SEQ ID NO: 170608 - DNA, 30 bp, Artificial Sequence
  Synthetic oligonucleotide
ctacactaaaggcaaagtctctgccaagca

SEQ ID NO: 170609 - DNA, 30 bp, Artificial Sequence
  Synthetic oligonucleotide
gaaagggttttcagacagcattgccaagca

SEQ ID NO: 170610 - DNA, 30 bp, Artificial Sequence
  Synthetic oligonucleotide
tgcgcaggtaaggactagcgttagcaagca

SEQ ID NO: 170611 - DNA, 30 bp, Artificial Sequence
  Synthetic oligonucleotide
atcagtccgaggtaggtataagggcaagca

SEQ ID NO: 170612 - DNA, 30 bp, Artificial Sequence
  Synthetic oligonucleotide
cgctcgtcgcgtgaagtcatgtctcaagca

SEQ ID NO: 170613 - DNA, 30 bp, Artificial Sequence
  Synthetic oligonucleotide
atagatgcaaaatgacaaagtgaagaagca

SEQ ID NO: 170614 - DNA, 30 bp, Artificial Sequence
  Synthetic oligonucleotide
acaacctagctaaagccaaccccggaagca

SEQ ID NO: 170615 - DNA, 30 bp, Artificial Sequence
  Synthetic oligonucleotide
atctggggtaatagtgtgacctgtgaagca

SEQ ID NO: 170616 - DNA, 30 bp, Artificial Sequence
  Synthetic oligonucleotide
tggcatcgacttattgttaatccgtaagca

SEQ ID NO: 170617 - DNA, 30 bp, Artificial Sequence
  Synthetic oligonucleotide
cactccgtaacaccaggccgcgggtaagca

SEQ ID NO: 170618 - DNA, 30 bp, Artificial Sequence
  Synthetic oligonucleotide
ctcaggggccatccagtgatgtattaagca

SEQ ID NO: 170619 - DNA, 30 bp, Artificial Sequence
  Synthetic oligonucleotide
ttctacagcaggtagcagattcgcacagca

SEQ ID NO: 170620 - DNA, 30 bp, Artificial Sequence
  Synthetic oligonucleotide
agaagctaggcgcccgcaattacgacagca

SEQ ID NO: 170621 - DNA, 30 bp, Artificial Sequence
  Synthetic oligonucleotide
ctcgtgaaagctagtgtgtccgatacagca

SEQ ID NO: 170622 - DNA, 30 bp, Artificial Sequence
  Synthetic oligonucleotide
gtaaaacgtagttcccgcccccttacagca

SEQ ID NO: 170623 - DNA, 30 bp, Artificial Sequence
  Synthetic oligonucleotide
ggatacctgttgacagcccggcgaccagca

SEQ ID NO: 170624 - DNA, 30 bp, Artificial Sequence
  Synthetic oligonucleotide
accatcgcacgatcaggcgcgggaccagca

SEQ ID NO: 170625 - DNA, 30 bp, Artificial Sequence
  Synthetic oligonucleotide
tgctttatctacggtagtaataacccagca

SEQ ID NO: 170626 - DNA, 30 bp, Artificial Sequence
  Synthetic oligonucleotide
caggaattcattgggtgccgtaagccagca

SEQ ID NO: 170627 - DNA, 30 bp, Artificial Sequence
  Synthetic oligonucleotide
cgttgaagcagcaccgaaaaagagccagca

SEQ ID NO: 170628 - DNA, 30 bp, Artificial Sequence
  Synthetic oligonucleotide
gcccgagacgtgtctagtccgtagccagca

SEQ ID NO: 170629 - DNA, 30 bp, Artificial Sequence
  Synthetic oligonucleotide
acttgtcggtcaaacgagtcttggccagca

SEQ ID NO: 170630 - DNA, 30 bp, Artificial Sequence
  Synthetic oligonucleotide
ggcaaaactttcccagggacttgcgcagca

SEQ ID NO: 170631 - DNA, 30 bp, Artificial Sequence
  Synthetic oligonucleotide
gctacccaaaatggattgttagcggcagca

SEQ ID NO: 170632 - DNA, 30 bp, Artificial Sequence
  Synthetic oligonucleotide
ggtaaccgggtcaacttatattctgcagca

SEQ ID NO: 170633 - DNA, 30 bp, Artificial Sequence
  Synthetic oligonucleotide
gtgtgttatggtgtggacgggcgtgcagca

SEQ ID NO: 170634 - DNA, 30 bp, Artificial Sequence
  Synthetic oligonucleotide
cacgatacgtgcctcccgcagtactcagca

SEQ ID NO: 170635 - DNA, 30 bp, Artificial Sequence
  Synthetic oligonucleotide
ctagtttgttggtataatctaagctcagca

SEQ ID NO: 170636 - DNA, 30 bp, Artificial Sequence
  Synthetic oligonucleotide
tatgttagatggtaagaatctcgctcagca

SEQ ID NO: 170637 - DNA, 30 bp, Artificial Sequence
  Synthetic oligonucleotide
gcgcagtgtgacaagcatcagtgctcagca

SEQ ID NO: 170638 - DNA, 30 bp, Artificial Sequence
  Synthetic oligonucleotide
taaagcaggttagcctaacttgagtcagca

SEQ ID NO: 170639 - DNA, 30 bp, Artificial Sequence
  Synthetic oligonucleotide
ccaatggcaattttgttatatgtgtcagca

SEQ ID NO: 170640 - DNA, 30 bp, Artificial Sequence
  Synthetic oligonucleotide
tgctgctataaataaccgaattattcagca

SEQ ID NO: 170641 - DNA, 30 bp, Artificial Sequence
  Synthetic oligonucleotide
taaaccataatgagaggcctaacttcagca

SEQ ID NO: 170642 - DNA, 30 bp, Artificial Sequence
  Synthetic oligonucleotide
aagacgcatcaacgacgaatcccttcagca

SEQ ID NO: 170643 - DNA, 30 bp, Artificial Sequence
  Synthetic oligonucleotide
gttgggatggccaaggagacgggttcagca

SEQ ID NO: 170644 - DNA, 30 bp, Artificial Sequence
  Synthetic oligonucleotide
agaagattcgtcaaacttttaataagagca

SEQ ID NO: 170645 - DNA, 30 bp, Artificial Sequence
  Synthetic oligonucleotide
attgcctagcaaacactcgcatagagagca

SEQ ID NO: 170646 - DNA, 30 bp, Artificial Sequence
  Synthetic oligonucleotide
tatcgtcagtgtaacactaagactagagca

SEQ ID NO: 170647 - DNA, 30 bp, Artificial Sequence
  Synthetic oligonucleotide
aaatgcatcaacagaaatcaaacacgagca

SEQ ID NO: 170648 - DNA, 30 bp, Artificial Sequence
  Synthetic oligonucleotide
cgtatacttgggaattgtacaaagcgagca

SEQ ID NO: 170649 - DNA, 30 bp, Artificial Sequence
  Synthetic oligonucleotide
atccacgctgaatttaacaacacgcgagca

SEQ ID NO: 170650 - DNA, 31 bp, Artificial Sequence
  Synthetic oligonucleotide
tccatggcgagtccgtgcatattggcgagca

SEQ ID NO: 170651 - DNA, 30 bp, Artificial Sequence
  Synthetic oligonucleotide
cgtggccagagcagatctcctttgcgagca

SEQ ID NO: 170652 - DNA, 30 bp, Artificial Sequence
  Synthetic oligonucleotide
cagggggattacggaaattgtctaggagca

SEQ ID NO: 170653 - DNA, 30 bp, Artificial Sequence
  Synthetic oligonucleotide
gttcatatcaagttactgaaagtcggagca

SEQ ID NO: 170654 - DNA, 30 bp, Artificial Sequence
  Synthetic oligonucleotide
gaatgccaaattaaacaggattttggagca

SEQ ID NO: 170655 - DNA, 30 bp, Artificial Sequence
  Synthetic oligonucleotide
agaaatcgggtggtgcaagcgagctgagca

SEQ ID NO: 170656 - DNA, 30 bp, Artificial Sequence
  Synthetic oligonucleotide
gatggagtctaggttctcggagagtgagca

SEQ ID NO: 170657 - DNA, 30 bp, Artificial Sequence
  Synthetic oligonucleotide
tgtgtcctgccggcggtgcgtacaatagca

SEQ ID NO: 170658 - DNA, 30 bp, Artificial Sequence
  Synthetic oligonucleotide
tggtaagcgataccttaagtttgtatagca

SEQ ID NO: 170659 - DNA, 30 bp, Artificial Sequence
  Synthetic oligonucleotide
aggctgggccgttatctttgggttatagca

SEQ ID NO: 170660 - DNA, 30 bp, Artificial Sequence
  Synthetic oligonucleotide
catgggatttatatagaaaagccactagca

SEQ ID NO: 170661 - DNA, 30 bp, Artificial Sequence
  Synthetic oligonucleotide
cattcggtatccgccccgccactactagca

SEQ ID NO: 170662 - DNA, 30 bp, Artificial Sequence
  Synthetic oligonucleotide
cttcgcagataactgaatggacccctagca

SEQ ID NO: 170663 - DNA, 30 bp, Artificial Sequence
  Synthetic oligonucleotide
tgtaaaatttgacgattttggtgcgtagca

SEQ ID NO: 170664 - DNA, 30 bp, Artificial Sequence
  Synthetic oligonucleotide
atagtattggtaaaatataagcctgtagca

SEQ ID NO: 170665 - DNA, 30 bp, Artificial Sequence
  Synthetic oligonucleotide
aacgtccggcatacgctagaagttgtagca

SEQ ID NO: 170666 - DNA, 30 bp, Artificial Sequence
  Synthetic oligonucleotide
tgaacggaacgctaacaagctctattagca

SEQ ID NO: 170667 - DNA, 30 bp, Artificial Sequence
  Synthetic oligonucleotide
acagctactcaccccaacgcggagttagca

SEQ ID NO: 170668 - DNA, 30 bp, Artificial Sequence
  Synthetic oligonucleotide
gctgataagcgttcttacgggcggttagca

SEQ ID NO: 170669 - DNA, 30 bp, Artificial Sequence
  Synthetic oligonucleotide
catgggccgactttgacgtccacaaacgca

SEQ ID NO: 170670 - DNA, 30 bp, Artificial Sequence
  Synthetic oligonucleotide
ttctatgaaaggaaggaaacgagaaacgca

SEQ ID NO: 170671 - DNA, 30 bp, Artificial Sequence
  Synthetic oligonucleotide
ccacgagggtcactttaactcctaaacgca

SEQ ID NO: 170672 - DNA, 30 bp, Artificial Sequence
  Synthetic oligonucleotide
agaagttatcaggaacgagcataacacgca

SEQ ID NO: 170673 - DNA, 30 bp, Artificial Sequence
  Synthetic oligonucleotide
tgtagggtacgcgagtgtgcattagacgca

SEQ ID NO: 170674 - DNA, 30 bp, Artificial Sequence
  Synthetic oligonucleotide
tctgcattgcaaggtcacccatcatacgca

SEQ ID NO: 170675 - DNA, 30 bp, Artificial Sequence
  Synthetic oligonucleotide
gacgcgtccagcgacaaaactggatacgca

SEQ ID NO: 170676 - DNA, 30 bp, Artificial Sequence
  Synthetic oligonucleotide
cgacatgcgggaacacggctctagtacgca

SEQ ID NO: 170677 - DNA, 30 bp, Artificial Sequence
  Synthetic oligonucleotide
tgaggacactctacatggtggtattacgca

SEQ ID NO: 170678 - DNA, 30 bp, Artificial Sequence
  Synthetic oligonucleotide
aggcaatgtttaatattgcctgtgaccgca

SEQ ID NO: 170679 - DNA, 30 bp, Artificial Sequence
  Synthetic oligonucleotide
gtcaacccaacttaggcgcgtgtgaccgca

SEQ ID NO: 170680 - DNA, 30 bp, Artificial Sequence
  Synthetic oligonucleotide
tgcaagtgacttgagtgcgggggccccgca

SEQ ID NO: 170681 - DNA, 30 bp, Artificial Sequence
  Synthetic oligonucleotide
caggtgggttgcgggtagatctgccccgca

SEQ ID NO: 170682 - DNA, 30 bp, Artificial Sequence
  Synthetic oligonucleotide
acgaggctctgagcaatacattagcccgca

SEQ ID NO: 170683 - DNA, 30 bp, Artificial Sequence
  Synthetic oligonucleotide
cgttaggggcaaatatggacctcagccgca

SEQ ID NO: 170684 - DNA, 30 bp, Artificial Sequence
  Synthetic oligonucleotide
acagcaagcttagttgagagattggccgca

SEQ ID NO: 170685 - DNA, 30 bp, Artificial Sequence
  Synthetic oligonucleotide
caagaaagcgctggattacaggtatccgca

SEQ ID NO: 170686 - DNA, 31 bp, Artificial Sequence
  Synthetic oligonucleotide
gtgttgagagtgcatgctaggtgactccgca

SEQ ID NO: 170687 - DNA, 30 bp, Artificial Sequence
  Synthetic oligonucleotide
cggtttaggcggccaggcagcgagtccgca

SEQ ID NO: 170688 - DNA, 30 bp, Artificial Sequence
  Synthetic oligonucleotide
tccttcaaggcttgcctgagtacaagcgca

SEQ ID NO: 170689 - DNA, 30 bp, Artificial Sequence
  Synthetic oligonucleotide
gacgccatacaggccgcgacacccagcgca

SEQ ID NO: 170690 - DNA, 30 bp, Artificial Sequence
  Synthetic oligonucleotide
acggccaggattaatgacaatgtcagcgca

SEQ ID NO: 170691 - DNA, 30 bp, Artificial Sequence
  Synthetic oligonucleotide
taacacttcatcatgtactgagagagcgca

SEQ ID NO: 170692 - DNA, 30 bp, Artificial Sequence
  Synthetic oligonucleotide
accaaggtgtcattaatggcaccgagcgca

SEQ ID NO: 170693 - DNA, 30 bp, Artificial Sequence
  Synthetic oligonucleotide
ggcggtagtgcatcgtgccgttgccgcgca

SEQ ID NO: 170694 - DNA, 30 bp, Artificial Sequence
  Synthetic oligonucleotide
ctattaatcagcccttcagaggagcgcgca

SEQ ID NO: 170695 - DNA, 30 bp, Artificial Sequence
  Synthetic oligonucleotide
aacatagcacggggcaagcatccgcgcgca

SEQ ID NO: 170696 - DNA, 30 bp, Artificial Sequence
  Synthetic oligonucleotide
cgcccagtaagggtgtccggtataggcgca

SEQ ID NO: 170697 - DNA, 30 bp, Artificial Sequence
  Synthetic oligonucleotide
ggtgctttgaagggctggagtcagggcgca

SEQ ID NO: 170698 - DNA, 30 bp, Artificial Sequence
  Synthetic oligonucleotide
gcccagggaagagcctgcgtgcggggcgca

SEQ ID NO: 170699 - DNA, 30 bp, Artificial Sequence
  Synthetic oligonucleotide
aagtggcgcctgtcgggtcgtcctggcgca

SEQ ID NO: 170700 - DNA, 30 bp, Artificial Sequence
  Synthetic oligonucleotide
gatcagtgagtgggcgtaagagctggcgca

SEQ ID NO: 170701 - DNA, 30 bp, Artificial Sequence
  Synthetic oligonucleotide
taaactggattgcgcggaagggaatgcgca

SEQ ID NO: 170702 - DNA, 30 bp, Artificial Sequence
  Synthetic oligonucleotide
acgcccccatctggacttcgctaatgcgca

SEQ ID NO: 170703 - DNA, 30 bp, Artificial Sequence
  Synthetic oligonucleotide
gcctcagacccggcatcaaaatcctgcgca

SEQ ID NO: 170704 - DNA, 30 bp, Artificial Sequence
  Synthetic oligonucleotide
ttacggtacatgccaagtttcttcatcgca

SEQ ID NO: 170705 - DNA, 30 bp, Artificial Sequence
  Synthetic oligonucleotide
catatctccgaattggccaggcttatcgca

SEQ ID NO: 170706 - DNA, 30 bp, Artificial Sequence
  Synthetic oligonucleotide
tcaacgggctattcatagggcatactcgca

SEQ ID NO: 170707 - DNA, 31 bp, Artificial Sequence
  Synthetic oligonucleotide
tgcactatccgtcttcggatcggccctcgca

SEQ ID NO: 170708 - DNA, 30 bp, Artificial Sequence
  Synthetic oligonucleotide
caacgacgacaaaagactgtggccctcgca

SEQ ID NO: 170709 - DNA, 30 bp, Artificial Sequence
  Synthetic oligonucleotide
aacgggatagcggcaccctgttctctcgca

SEQ ID NO: 170710 - DNA, 30 bp, Artificial Sequence
  Synthetic oligonucleotide
ggtcagcggacttaacagccccaggtcgca

SEQ ID NO: 170711 - DNA, 30 bp, Artificial Sequence
  Synthetic oligonucleotide
gacttactaggacggattctggacttcgca

SEQ ID NO: 170712 - DNA, 30 bp, Artificial Sequence
  Synthetic oligonucleotide
tacgtcaaataggtagtcggttagttcgca

SEQ ID NO: 170713 - DNA, 30 bp, Artificial Sequence
  Synthetic oligonucleotide
gctacactgaagatcagacattagaaggca

SEQ ID NO: 170714 - DNA, 30 bp, Artificial Sequence
  Synthetic oligonucleotide
agttagtgcggaaaaacggctgataaggca

SEQ ID NO: 170715 - DNA, 30 bp, Artificial Sequence
  Synthetic oligonucleotide
accttgcaacaggcactaagccctaaggca

SEQ ID NO: 170716 - DNA, 30 bp, Artificial Sequence
  Synthetic oligonucleotide
gtcagggacgtgagctgacgcccacaggca

SEQ ID NO: 170717 - DNA, 30 bp, Artificial Sequence
  Synthetic oligonucleotide
cgtatagtgaccccgccaatagcccaggca

SEQ ID NO: 170718 - DNA, 30 bp, Artificial Sequence
  Synthetic oligonucleotide
gacaatcatccagacctgaaaagtcaggca

SEQ ID NO: 170719 - DNA, 30 bp, Artificial Sequence
  Synthetic oligonucleotide
ccgtaaagttagtgagacgtagttcaggca

SEQ ID NO: 170720 - DNA, 30 bp, Artificial Sequence
  Synthetic oligonucleotide
aaataatggcatccgaagtggaaagaggca

SEQ ID NO: 170721 - DNA, 30 bp, Artificial Sequence
  Synthetic oligonucleotide
ctgacgtctagtgtctcaattagagaggca

SEQ ID NO: 170722 - DNA, 30 bp, Artificial Sequence
  Synthetic oligonucleotide
caaggctgacggtattacatggtagaggca

SEQ ID NO: 170723 - DNA, 30 bp, Artificial Sequence
  Synthetic oligonucleotide
ggtcactaagtagggacgggccgcgaggca

SEQ ID NO: 170724 - DNA, 30 bp, Artificial Sequence
  Synthetic oligonucleotide
atcgtgcgtagtcaaggcttggtcgaggca

SEQ ID NO: 170725 - DNA, 30 bp, Artificial Sequence
  Synthetic oligonucleotide
cttgaatcagtgtttataaagccggaggca

SEQ ID NO: 170726 - DNA, 30 bp, Artificial Sequence
  Synthetic oligonucleotide
ggagagcggttgtgcaaacgaaaataggca

SEQ ID NO: 170727 - DNA, 30 bp, Artificial Sequence
  Synthetic oligonucleotide
cactgtatctgaattgaggtgacataggca

SEQ ID NO: 170728 - DNA, 30 bp, Artificial Sequence
  Synthetic oligonucleotide
acagtaagtgactttgtactagggtaggca

SEQ ID NO: 170729 - DNA, 30 bp, Artificial Sequence
  Synthetic oligonucleotide
ggaggtgcaatgtataataccacaacggca

SEQ ID NO: 170730 - DNA, 30 bp, Artificial Sequence
  Synthetic oligonucleotide
tgtttacgtttccactataaaccaacggca

SEQ ID NO: 170731 - DNA, 30 bp, Artificial Sequence
  Synthetic oligonucleotide
atgtcgccttcgtagagaacatgaacggca

SEQ ID NO: 170732 - DNA, 30 bp, Artificial Sequence
  Synthetic oligonucleotide
gagaggggtcctaagtttacacagacggca

SEQ ID NO: 170733 - DNA, 30 bp, Artificial Sequence
  Synthetic oligonucleotide
tggattgacctttgtcaaagttggacggca

SEQ ID NO: 170734 - DNA, 30 bp, Artificial Sequence
  Synthetic oligonucleotide
cattaatggaccggattattagtgacggca

SEQ ID NO: 170735 - DNA, 30 bp, Artificial Sequence
  Synthetic oligonucleotide
gtaaaggacgcgccttcgaccatgccggca

SEQ ID NO: 170736 - DNA, 30 bp, Artificial Sequence
  Synthetic oligonucleotide
tggggacaggagttcagttgtcgtccggca

SEQ ID NO: 170737 - DNA, 30 bp, Artificial Sequence
  Synthetic oligonucleotide
atacctccaccagcatataggggcgcggca

SEQ ID NO: 170738 - DNA, 30 bp, Artificial Sequence
  Synthetic oligonucleotide
tcggtgatgtaatgctgtgatagggcggca

SEQ ID NO: 170739 - DNA, 30 bp, Artificial Sequence
  Synthetic oligonucleotide
tagatgttgttataccacatcaatgcggca

SEQ ID NO: 170740 - DNA, 30 bp, Artificial Sequence
  Synthetic oligonucleotide
catgattaggggagtcgatatgatgcggca

SEQ ID NO: 170741 - DNA, 30 bp, Artificial Sequence
  Synthetic oligonucleotide
agaatggataaacccccccgacgctcggca

SEQ ID NO: 170742 - DNA, 30 bp, Artificial Sequence
  Synthetic oligonucleotide
tggatcggacactcggggccaagttcggca

SEQ ID NO: 170743 - DNA, 30 bp, Artificial Sequence
  Synthetic oligonucleotide
tggacattaattgatgagaaggcaagggca

SEQ ID NO: 170744 - DNA, 30 bp, Artificial Sequence
  Synthetic oligonucleotide
tctgctctacgtcaagtaaataggagggca

SEQ ID NO: 170745 - DNA, 30 bp, Artificial Sequence
  Synthetic oligonucleotide
taaagtctgatacctacacggctgagggca

SEQ ID NO: 170746 - DNA, 30 bp, Artificial Sequence
  Synthetic oligonucleotide
agtaaactcgggttgtgggccatacgggca

SEQ ID NO: 170747 - DNA, 30 bp, Artificial Sequence
  Synthetic oligonucleotide
agcgtaccgagtcactaccactgccgggca

SEQ ID NO: 170748 - DNA, 30 bp, Artificial Sequence
  Synthetic oligonucleotide
tctaaagtgaaaacattcggctgcggggca

SEQ ID NO: 170749 - DNA, 30 bp, Artificial Sequence
  Synthetic oligonucleotide
tggttcgatggagcaccaagcatgggggca

SEQ ID NO: 170750 - DNA, 30 bp, Artificial Sequence
  Synthetic oligonucleotide
aaacattatttcaactcgaccgtatgggca

SEQ ID NO: 170751 - DNA, 30 bp, Artificial Sequence
  Synthetic oligonucleotide
ttatttagggtgtttaagtacaactgggca

SEQ ID NO: 170752 - DNA, 30 bp, Artificial Sequence
  Synthetic oligonucleotide
acatcaagctgactacatatcacctgggca

SEQ ID NO: 170753 - DNA, 30 bp, Artificial Sequence
  Synthetic oligonucleotide
atccaagacagtatatagctcgcgtgggca

SEQ ID NO: 170754 - DNA, 30 bp, Artificial Sequence
  Synthetic oligonucleotide
tgaagtagggagacactaaatttgtgggca

SEQ ID NO: 170755 - DNA, 30 bp, Artificial Sequence
  Synthetic oligonucleotide
gggtcccaggccggttaaacgttaatggca

SEQ ID NO: 170756 - DNA, 30 bp, Artificial Sequence
  Synthetic oligonucleotide
caaagctaccgcagggagttaaacatggca

SEQ ID NO: 170757 - DNA, 30 bp, Artificial Sequence
  Synthetic oligonucleotide
tggaagactcctgcatacaatcacatggca

SEQ ID NO: 170758 - DNA, 30 bp, Artificial Sequence
  Synthetic oligonucleotide
tcactgtataaaagacaaccaggactggca

SEQ ID NO: 170759 - DNA, 30 bp, Artificial Sequence
  Synthetic oligonucleotide
gtcgtgctacacttcgggctcctactggca

SEQ ID NO: 170760 - DNA, 30 bp, Artificial Sequence
  Synthetic oligonucleotide
ttgagtcgggagaaggtaactctactggca

SEQ ID NO: 170761 - DNA, 30 bp, Artificial Sequence
  Synthetic oligonucleotide
gcctccgctcgtcacgaaccgatcctggca

SEQ ID NO: 170762 - DNA, 30 bp, Artificial Sequence
  Synthetic oligonucleotide
aggaagttactcgtagtctggaatctggca

SEQ ID NO: 170763 - DNA, 30 bp, Artificial Sequence
  Synthetic oligonucleotide
ccggtccgtatgaccagcctggcagtggca

SEQ ID NO: 170764 - DNA, 30 bp, Artificial Sequence
  Synthetic oligonucleotide
ctgctatgtgcgtagacaatggccgtggca

SEQ ID NO: 170765 - DNA, 30 bp, Artificial Sequence
  Synthetic oligonucleotide
gcgtgggtaaacccacgtacattcgtggca

SEQ ID NO: 170766 - DNA, 30 bp, Artificial Sequence
  Synthetic oligonucleotide
caatgccttgggccgctcaggagggtggca

SEQ ID NO: 170767 - DNA, 30 bp, Artificial Sequence
  Synthetic oligonucleotide
acctctgtagacatctcaaccccattggca

SEQ ID NO: 170768 - DNA, 30 bp, Artificial Sequence
  Synthetic oligonucleotide
agtatgttaggtaccacgttactattggca

SEQ ID NO: 170769 - DNA, 30 bp, Artificial Sequence
  Synthetic oligonucleotide
gctggttctgtaatggtcgatgacttggca

SEQ ID NO: 170770 - DNA, 30 bp, Artificial Sequence
  Synthetic oligonucleotide
acgctaggatccagcagactgtagttggca

SEQ ID NO: 170771 - DNA, 30 bp, Artificial Sequence
  Synthetic oligonucleotide
actaatgctcagtgctggctttatttggca

SEQ ID NO: 170772 - DNA, 30 bp, Artificial Sequence
  Synthetic oligonucleotide
aggtgtgactgtccggtacggagtttggca

SEQ ID NO: 170773 - DNA, 30 bp, Artificial Sequence
  Synthetic oligonucleotide
cccttcaagtccctgaaagtactaaatgca

SEQ ID NO: 170774 - DNA, 30 bp, Artificial Sequence
  Synthetic oligonucleotide
cgaagagaccgcgctgcccctgtcaatgca

SEQ ID NO: 170775 - DNA, 30 bp, Artificial Sequence
  Synthetic oligonucleotide
ctgccgacgcgactgggctcgggtaatgca

SEQ ID NO: 170776 - DNA, 30 bp, Artificial Sequence
  Synthetic oligonucleotide
gctcgaaagtaaagaagggactttaatgca

SEQ ID NO: 170777 - DNA, 30 bp, Artificial Sequence
  Synthetic oligonucleotide
ctggtaccggggacccgctcgtgacatgca

SEQ ID NO: 170778 - DNA, 30 bp, Artificial Sequence
  Synthetic oligonucleotide
taggagtgtaagacggacaaaagtcatgca

SEQ ID NO: 170779 - DNA, 30 bp, Artificial Sequence
  Synthetic oligonucleotide
acgcccgtgcagacgggcacaggtcatgca

SEQ ID NO: 170780 - DNA, 30 bp, Artificial Sequence
  Synthetic oligonucleotide
aacgatcacagtccagcgcggaccgatgca

SEQ ID NO: 170781 - DNA, 30 bp, Artificial Sequence
  Synthetic oligonucleotide
tggcgagatatctatgacaggctatatgca

SEQ ID NO: 170782 - DNA, 30 bp, Artificial Sequence
  Synthetic oligonucleotide
tcgttagtgtaagagttaggggtctatgca

SEQ ID NO: 170783 - DNA, 30 bp, Artificial Sequence
  Synthetic oligonucleotide
tctcgtgttaccgcaaggctaaagtatgca

SEQ ID NO: 170784 - DNA, 30 bp, Artificial Sequence
  Synthetic oligonucleotide
gaggggagcgccttatatacgaagtatgca

SEQ ID NO: 170785 - DNA, 30 bp, Artificial Sequence
  Synthetic oligonucleotide
acaaacgttaacgcgcttttgtgaactgca

SEQ ID NO: 170786 - DNA, 30 bp, Artificial Sequence
  Synthetic oligonucleotide
agatggcttaagaggaccactacgactgca

SEQ ID NO: 170787 - DNA, 30 bp, Artificial Sequence
  Synthetic oligonucleotide
tgagccatatgtaacgtgtttctgactgca

SEQ ID NO: 170788 - DNA, 30 bp, Artificial Sequence
  Synthetic oligonucleotide
atcattgccatcgccaagatttatactgca

SEQ ID NO: 170789 - DNA, 30 bp, Artificial Sequence
  Synthetic oligonucleotide
gcggaactactgaagataccgcctactgca

SEQ ID NO: 170790 - DNA, 30 bp, Artificial Sequence
  Synthetic oligonucleotide
gcaattgatacaccacgggatggtactgca

SEQ ID NO: 170791 - DNA, 30 bp, Artificial Sequence
  Synthetic oligonucleotide
tgattgcgaaacatgtgtatagcacctgca

SEQ ID NO: 170792 - DNA, 30 bp, Artificial Sequence
  Synthetic oligonucleotide
ctgacgcaaaatcacgttctggactctgca

SEQ ID NO: 170793 - DNA, 30 bp, Artificial Sequence
  Synthetic oligonucleotide
acagggccttcctgacactattcctctgca

SEQ ID NO: 170794 - DNA, 30 bp, Artificial Sequence
  Synthetic oligonucleotide
ccgaggaagtcctttctgtcttgctctgca

SEQ ID NO: 170795 - DNA, 30 bp, Artificial Sequence
  Synthetic oligonucleotide
ggactgtccccagaggaagtaatctctgca

SEQ ID NO: 170796 - DNA, 30 bp, Artificial Sequence
  Synthetic oligonucleotide
agcttcatgggtggtaggtggtccagtgca

SEQ ID NO: 170797 - DNA, 30 bp, Artificial Sequence
  Synthetic oligonucleotide
gcagtctggtgtgaaacttgcgtgagtgca

SEQ ID NO: 170798 - DNA, 30 bp, Artificial Sequence
  Synthetic oligonucleotide
gtaacgcacgtaggtgagctggctagtgca

SEQ ID NO: 170799 - DNA, 30 bp, Artificial Sequence
  Synthetic oligonucleotide
tatcgttgtacaagttcagcgtgacgtgca

SEQ ID NO: 170800 - DNA, 30 bp, Artificial Sequence
  Synthetic oligonucleotide
gggaatcttcacagatgttaggaccgtgca

SEQ ID NO: 170801 - DNA, 30 bp, Artificial Sequence
  Synthetic oligonucleotide
cgggtgtaaggggcttacgtcatgcgtgca

SEQ ID NO: 170802 - DNA, 30 bp, Artificial Sequence
  Synthetic oligonucleotide
ttacagggtagatgtcattatctgcgtgca

SEQ ID NO: 170803 - DNA, 30 bp, Artificial Sequence
  Synthetic oligonucleotide
tgcttacgaaacacagattttggtcgtgca

SEQ ID NO: 170804 - DNA, 30 bp, Artificial Sequence
  Synthetic oligonucleotide
ctgtctggagatttaagatggtaaggtgca

SEQ ID NO: 170805 - DNA, 30 bp, Artificial Sequence
  Synthetic oligonucleotide
cggaatgggagcgtacatttaagaggtgca

SEQ ID NO: 170806 - DNA, 30 bp, Artificial Sequence
  Synthetic oligonucleotide
tttgatctgaggtgtgtagatgccggtgca

SEQ ID NO: 170807 - DNA, 30 bp, Artificial Sequence
  Synthetic oligonucleotide
tgtggtcgtatcccgtaataggctggtgca

SEQ ID NO: 170808 - DNA, 30 bp, Artificial Sequence
  Synthetic oligonucleotide
taaatgagatagcggaaatggtgtggtgca

SEQ ID NO: 170809 - DNA, 30 bp, Artificial Sequence
  Synthetic oligonucleotide
agattaattcgactacgtcttacatgtgca

SEQ ID NO: 170810 - DNA, 30 bp, Artificial Sequence
  Synthetic oligonucleotide
gtcaaattttgagacttagaccattgtgca

SEQ ID NO: 170811 - DNA, 30 bp, Artificial Sequence
  Synthetic oligonucleotide
cattcgtagaagacacttcttttcattgca

SEQ ID NO: 170812 - DNA, 30 bp, Artificial Sequence
  Synthetic oligonucleotide
ctcaccctctcggggaacacgtcccttgca

SEQ ID NO: 170813 - DNA, 30 bp, Artificial Sequence
  Synthetic oligonucleotide
cgctccgaatccaatagccggcgccttgca

SEQ ID NO: 170814 - DNA, 30 bp, Artificial Sequence
  Synthetic oligonucleotide
atagagagcggggccgacattactcttgca

SEQ ID NO: 170815 - DNA, 30 bp, Artificial Sequence
  Synthetic oligonucleotide
aaggaagaagctaactgccggggcgttgca

SEQ ID NO: 170816 - DNA, 30 bp, Artificial Sequence
  Synthetic oligonucleotide
aatggcatgtctaacttaaagcaggttgca

SEQ ID NO: 170817 - DNA, 30 bp, Artificial Sequence
  Synthetic oligonucleotide
ccttcatcattcagcatggcatgggttgca

SEQ ID NO: 170818 - DNA, 30 bp, Artificial Sequence
  Synthetic oligonucleotide
caaggattagccgaattacgcatggttgca

SEQ ID NO: 170819 - DNA, 30 bp, Artificial Sequence
  Synthetic oligonucleotide
ccgggtcgcagtactagagacctggttgca

SEQ ID NO: 170820 - DNA, 30 bp, Artificial Sequence
  Synthetic oligonucleotide
aacgtttgcgacgatgtactcattgttgca

SEQ ID NO: 170821 - DNA, 30 bp, Artificial Sequence
  Synthetic oligonucleotide
atggttcggaaactagtctggcgatttgca

SEQ ID NO: 170822 - DNA, 30 bp, Artificial Sequence
  Synthetic oligonucleotide
gccaactgagatgacttcacagggtttgca

SEQ ID NO: 170823 - DNA, 30 bp, Artificial Sequence
  Synthetic oligonucleotide
ttcgagtctactccgctccccaaacaatca

SEQ ID NO: 170824 - DNA, 30 bp, Artificial Sequence
  Synthetic oligonucleotide
tgcattctaagtgtaatcggttgacaatca

SEQ ID NO: 170825 - DNA, 30 bp, Artificial Sequence
  Synthetic oligonucleotide
taacgtggcgcacccacagacaaagaatca

SEQ ID NO: 170826 - DNA, 30 bp, Artificial Sequence
  Synthetic oligonucleotide
tttgaacgaaacaactaattttcagaatca

SEQ ID NO: 170827 - DNA, 30 bp, Artificial Sequence
  Synthetic oligonucleotide
cgtgcttaggacgcgcacagatcggaatca

SEQ ID NO: 170828 - DNA, 30 bp, Artificial Sequence
  Synthetic oligonucleotide
caacacttacaactgctgggtaatgaatca

SEQ ID NO: 170829 - DNA, 30 bp, Artificial Sequence
  Synthetic oligonucleotide
acacgcagagtgcagcccttcagtgaatca

SEQ ID NO: 170830 - DNA, 30 bp, Artificial Sequence
  Synthetic oligonucleotide
ctgacagacatcaaaggcggtccctaatca

SEQ ID NO: 170831 - DNA, 30 bp, Artificial Sequence
  Synthetic oligonucleotide
atcgccggtgatagtcacgggtgttaatca

SEQ ID NO: 170832 - DNA, 30 bp, Artificial Sequence
  Synthetic oligonucleotide
ggcctccgtattgaaaacaccttaacatca

SEQ ID NO: 170833 - DNA, 30 bp, Artificial Sequence
  Synthetic oligonucleotide
actcttagagaactcaacccaacgacatca

SEQ ID NO: 170834 - DNA, 30 bp, Artificial Sequence
  Synthetic oligonucleotide
gcacatagcgatgtggacgtcaggacatca

SEQ ID NO: 170835 - DNA, 30 bp, Artificial Sequence
  Synthetic oligonucleotide
cggctacgacggttagcatatcaaccatca

SEQ ID NO: 170836 - DNA, 30 bp, Artificial Sequence
  Synthetic oligonucleotide
agccacgtgaggctatgctaccggccatca

SEQ ID NO: 170837 - DNA, 30 bp, Artificial Sequence
  Synthetic oligonucleotide
ccatccgtggttggtttgccgatagcatca

SEQ ID NO: 170838 - DNA, 30 bp, Artificial Sequence
  Synthetic oligonucleotide
gaaggaggcctgcctggaagacacgcatca

SEQ ID NO: 170839 - DNA, 30 bp, Artificial Sequence
  Synthetic oligonucleotide
acaaccatggccgttagtgagcgcgcatca

SEQ ID NO: 170840 - DNA, 30 bp, Artificial Sequence
  Synthetic oligonucleotide
agcgtagccgctcgtcagcacgaatcatca

SEQ ID NO: 170841 - DNA, 30 bp, Artificial Sequence
  Synthetic oligonucleotide
aggttgtggtgtaatcaacaactctcatca

SEQ ID NO: 170842 - DNA, 30 bp, Artificial Sequence
  Synthetic oligonucleotide
cacttagacgtaagtttccataagtcatca

SEQ ID NO: 170843 - DNA, 30 bp, Artificial Sequence
  Synthetic oligonucleotide
gctaactacgacgcaccgaaagtgtcatca

SEQ ID NO: 170844 - DNA, 30 bp, Artificial Sequence
  Synthetic oligonucleotide
atcacctgcttccacgaaggaaaaagatca

SEQ ID NO: 170845 - DNA, 30 bp, Artificial Sequence
  Synthetic oligonucleotide
gagggagtggagtaatccctagcaagatca

SEQ ID NO: 170846 - DNA, 30 bp, Artificial Sequence
  Synthetic oligonucleotide
agtgaagtagcggcactggtgaccagatca

SEQ ID NO: 170847 - DNA, 30 bp, Artificial Sequence
  Synthetic oligonucleotide
actggccgggatatcattatgcccagatca

SEQ ID NO: 170848 - DNA, 30 bp, Artificial Sequence
  Synthetic oligonucleotide
cattcattcttactggctgtgaagagatca

SEQ ID NO: 170849 - DNA, 30 bp, Artificial Sequence
  Synthetic oligonucleotide
aagacacgtcctaccgtatctatgagatca

SEQ ID NO: 170850 - DNA, 30 bp, Artificial Sequence
  Synthetic oligonucleotide
gaatccaggggttatgaaatcagtagatca

SEQ ID NO: 170851 - DNA, 30 bp, Artificial Sequence
  Synthetic oligonucleotide
tctgctggaataaacttcgtgacacgatca

SEQ ID NO: 170852 - DNA, 30 bp, Artificial Sequence
  Synthetic oligonucleotide
cgctctgtgtcaatctatggcgaccgatca

SEQ ID NO: 170853 - DNA, 30 bp, Artificial Sequence
  Synthetic oligonucleotide
ggccgggcactgtgagcgccctaccgatca

SEQ ID NO: 170854 - DNA, 30 bp, Artificial Sequence
  Synthetic oligonucleotide
gtgcggcattctgcataatacacccgatca

SEQ ID NO: 170855 - DNA, 30 bp, Artificial Sequence
  Synthetic oligonucleotide
ggatgtaaaggttcgagaaggaatcgatca

SEQ ID NO: 170856 - DNA, 30 bp, Artificial Sequence
  Synthetic oligonucleotide
ctttagctggtgagaccaatcggaggatca

SEQ ID NO: 170857 - DNA, 30 bp, Artificial Sequence
  Synthetic oligonucleotide
gctaggggcccaagtttccgttctggatca

SEQ ID NO: 170858 - DNA, 30 bp, Artificial Sequence
  Synthetic oligonucleotide
cgtagtcccattttcatgactagtggatca

SEQ ID NO: 170859 - DNA, 30 bp, Artificial Sequence
  Synthetic oligonucleotide
aaggagtgggggggttgcgtacaatgatca

SEQ ID NO: 170860 - DNA, 30 bp, Artificial Sequence
  Synthetic oligonucleotide
gggagaaatgatccgcgtttaacctgatca

SEQ ID NO: 170861 - DNA, 30 bp, Artificial Sequence
  Synthetic oligonucleotide
gtttccgagcgagttgggattgcctgatca

SEQ ID NO: 170862 - DNA, 30 bp, Artificial Sequence
  Synthetic oligonucleotide
agcagctgggttatgaaattttggtgatca

SEQ ID NO: 170863 - DNA, 30 bp, Artificial Sequence
  Synthetic oligonucleotide
ttggcaacccctgtattctatggttgatca

SEQ ID NO: 170864 - DNA, 30 bp, Artificial Sequence
  Synthetic oligonucleotide
gccggatcaagttggtcacgggtaatatca

SEQ ID NO: 170865 - DNA, 30 bp, Artificial Sequence
  Synthetic oligonucleotide
tatgggatagtccgtcgggcccatatatca

SEQ ID NO: 170866 - DNA, 30 bp, Artificial Sequence
  Synthetic oligonucleotide
gtagatgctgggaagtgcggccatatatca

SEQ ID NO: 170867 - DNA, 30 bp, Artificial Sequence
  Synthetic oligonucleotide
tcgacctcgccgagagcgttatgcctatca

SEQ ID NO: 170868 - DNA, 30 bp, Artificial Sequence
  Synthetic oligonucleotide
aaactaggtagacccgagtttaagctatca

SEQ ID NO: 170869 - DNA, 30 bp, Artificial Sequence
  Synthetic oligonucleotide
gtttacaatgagtcaaatacagggctatca

SEQ ID NO: 170870 - DNA, 30 bp, Artificial Sequence
  Synthetic oligonucleotide
acgtcttgggggtgcgttagacttctatca

SEQ ID NO: 170871 - DNA, 30 bp, Artificial Sequence
  Synthetic oligonucleotide
atgccatcagcattcccaagcatcgtatca

SEQ ID NO: 170872 - DNA, 30 bp, Artificial Sequence
  Synthetic oligonucleotide
caggtgggaacgtcaggtgtcagggtatca

SEQ ID NO: 170873 - DNA, 30 bp, Artificial Sequence
  Synthetic oligonucleotide
ccgggcattgaagataattaatgggtatca

SEQ ID NO: 170874 - DNA, 30 bp, Artificial Sequence
  Synthetic oligonucleotide
tacgaggtgcggcgaggtgtagtggtatca

SEQ ID NO: 170875 - DNA, 30 bp, Artificial Sequence
  Synthetic oligonucleotide
acaacggcgtactacatggcagatgtatca

SEQ ID NO: 170876 - DNA, 31 bp, Artificial Sequence
  Synthetic oligonucleotide
cgacggcgattatcaaagagtcagattatca

SEQ ID NO: 170877 - DNA, 30 bp, Artificial Sequence
  Synthetic oligonucleotide
taagaccggggcgcggagagtatgttatca

SEQ ID NO: 170878 - DNA, 30 bp, Artificial Sequence
  Synthetic oligonucleotide
cctgacatgcacatgtccagttctttatca

SEQ ID NO: 170879 - DNA, 30 bp, Artificial Sequence
  Synthetic oligonucleotide
accatcaagctggggatgaaactaaactca

SEQ ID NO: 170880 - DNA, 31 bp, Artificial Sequence
  Synthetic oligonucleotide
tggattaccggcatcgttagcaaagaactca

SEQ ID NO: 170881 - DNA, 30 bp, Artificial Sequence
  Synthetic oligonucleotide
aaccggttatgtatcaatatgaggaactca

SEQ ID NO: 170882 - DNA, 30 bp, Artificial Sequence
  Synthetic oligonucleotide
tcccaaacaaggtaaggagcgtataactca

SEQ ID NO: 170883 - DNA, 30 bp, Artificial Sequence
  Synthetic oligonucleotide
gacttggttcaaatgagtcagacacactca

SEQ ID NO: 170884 - DNA, 30 bp, Artificial Sequence
  Synthetic oligonucleotide
ctagactctgggggtgtcggtgcacactca

SEQ ID NO: 170885 - DNA, 30 bp, Artificial Sequence
  Synthetic oligonucleotide
gataggtaagttattcgggcggaccactca

SEQ ID NO: 170886 - DNA, 30 bp, Artificial Sequence
  Synthetic oligonucleotide
cgcagcggcagggggcaaaggacgcactca

SEQ ID NO: 170887 - DNA, 30 bp, Artificial Sequence
  Synthetic oligonucleotide
aaagtaacgataccatcgctttctcactca

SEQ ID NO: 170888 - DNA, 30 bp, Artificial Sequence
  Synthetic oligonucleotide
gggatagctcggggggaaatactagactca

SEQ ID NO: 170889 - DNA, 30 bp, Artificial Sequence
  Synthetic oligonucleotide
caaataatgaagttattgtatcctgactca

SEQ ID NO: 170890 - DNA, 30 bp, Artificial Sequence
  Synthetic oligonucleotide
cgtcttgaacttcggagtcatacctactca

SEQ ID NO: 170891 - DNA, 30 bp, Artificial Sequence
  Synthetic oligonucleotide
atgaagaggtaccataaaagcgccacctca

SEQ ID NO: 170892 - DNA, 30 bp, Artificial Sequence
  Synthetic oligonucleotide
aagtgatattagttattcaaacttacctca

SEQ ID NO: 170893 - DNA, 30 bp, Artificial Sequence
  Synthetic oligonucleotide
gtcgtgggtgagaaatggataatagcctca

SEQ ID NO: 170894 - DNA, 29 bp, Artificial Sequence
  Synthetic oligonucleotide
gcgactttaatcctcgcgacctagcctca

SEQ ID NO: 170895 - DNA, 30 bp, Artificial Sequence
  Synthetic oligonucleotide
cagatctccagcaccacagacatgtcctca

SEQ ID NO: 170896 - DNA, 30 bp, Artificial Sequence
  Synthetic oligonucleotide
gtcaaactagcacgaacatacttgtcctca

SEQ ID NO: 170897 - DNA, 30 bp, Artificial Sequence
  Synthetic oligonucleotide
agcaacagataactgtgttataccagctca

SEQ ID NO: 170898 - DNA, 30 bp, Artificial Sequence
  Synthetic oligonucleotide
gtaaatacatcggtataatccaagagctca

SEQ ID NO: 170899 - DNA, 30 bp, Artificial Sequence
  Synthetic oligonucleotide
acacggtaataattctctatgcggagctca

SEQ ID NO: 170900 - DNA, 30 bp, Artificial Sequence
  Synthetic oligonucleotide
tcagagttgcaggagccggactgtagctca

SEQ ID NO: 170901 - DNA, 29 bp, Artificial Sequence
  Synthetic oligonucleotide
ctccagttgcataacataaatttagctca

SEQ ID NO: 170902 - DNA, 30 bp, Artificial Sequence
  Synthetic oligonucleotide
gtcggcgattagacgccagctccgcgctca

SEQ ID NO: 170903 - DNA, 30 bp, Artificial Sequence
  Synthetic oligonucleotide
agggtgaaacatctagcctgagcgcgctca

SEQ ID NO: 170904 - DNA, 30 bp, Artificial Sequence
  Synthetic oligonucleotide
attatgtggcaacgtcgtggaatgcgctca

SEQ ID NO: 170905 - DNA, 30 bp, Artificial Sequence
  Synthetic oligonucleotide
caagcgtcgctattagactcctaaggctca

SEQ ID NO: 170906 - DNA, 30 bp, Artificial Sequence
  Synthetic oligonucleotide
tagatccggtagttgtcttcagacggctca

SEQ ID NO: 170907 - DNA, 30 bp, Artificial Sequence
  Synthetic oligonucleotide
cgtccatttaagaggggcctagtcggctca

SEQ ID NO: 170908 - DNA, 30 bp, Artificial Sequence
  Synthetic oligonucleotide
aacatgggaaggtaaccagtcattggctca

SEQ ID NO: 170909 - DNA, 30 bp, Artificial Sequence
  Synthetic oligonucleotide
cccgttctctctagggactaatttggctca

SEQ ID NO: 170910 - DNA, 30 bp, Artificial Sequence
  Synthetic oligonucleotide
atatgtggggtaatcttctcgaaatgctca

SEQ ID NO: 170911 - DNA, 30 bp, Artificial Sequence
  Synthetic oligonucleotide
atggcgagctgcttggtacaggaatgctca

SEQ ID NO: 170912 - DNA, 30 bp, Artificial Sequence
  Synthetic oligonucleotide
gccggaatagagagttttctcacatgctca

SEQ ID NO: 170913 - DNA, 30 bp, Artificial Sequence
  Synthetic oligonucleotide
ttaattccgttaaaatcagcagactgctca

SEQ ID NO: 170914 - DNA, 30 bp, Artificial Sequence
  Synthetic oligonucleotide
agatgggaccttaacctctgactttgctca

SEQ ID NO: 170915 - DNA, 30 bp, Artificial Sequence
  Synthetic oligonucleotide
atagggcaagaagggcattaaatgatctca

SEQ ID NO: 170916 - DNA, 30 bp, Artificial Sequence
  Synthetic oligonucleotide
gagattcggtttagatcgtgatgtatctca

SEQ ID NO: 170917 - DNA, 30 bp, Artificial Sequence
  Synthetic oligonucleotide
ttgtattgcggggacatcgatgtgctctca

SEQ ID NO: 170918 - DNA, 31 bp, Artificial Sequence
  Synthetic oligonucleotide
tcacccctccattcctaagtaatatctctca

SEQ ID NO: 170919 - DNA, 30 bp, Artificial Sequence
  Synthetic oligonucleotide
ggtctgactctaggtaacacactggtctca

SEQ ID NO: 170920 - DNA, 30 bp, Artificial Sequence
  Synthetic oligonucleotide
ctccagtgccaacgattatatccgttctca

SEQ ID NO: 170921 - DNA, 30 bp, Artificial Sequence
  Synthetic oligonucleotide
ttgctagtgattagtatccactcgttctca

SEQ ID NO: 170922 - DNA, 30 bp, Artificial Sequence
  Synthetic oligonucleotide
tgacttgacctaatggacgatgatttctca

SEQ ID NO: 170923 - DNA, 30 bp, Artificial Sequence
  Synthetic oligonucleotide
aacgggtattaagaaaaccgttctttctca

SEQ ID NO: 170924 - DNA, 30 bp, Artificial Sequence
  Synthetic oligonucleotide
gattacgcgggtgcgcgggaacgaaagtca

SEQ ID NO: 170925 - DNA, 30 bp, Artificial Sequence
  Synthetic oligonucleotide
gctgggaccaagagcttcgattgcaagtca

SEQ ID NO: 170926 - DNA, 30 bp, Artificial Sequence
  Synthetic oligonucleotide
aatttaaagaagagtcggatccagaagtca

SEQ ID NO: 170927 - DNA, 30 bp, Artificial Sequence
  Synthetic oligonucleotide
aagaattgtggccacatactggagaagtca

SEQ ID NO: 170928 - DNA, 30 bp, Artificial Sequence
  Synthetic oligonucleotide
cggtagctggtgaaaagcacgtagaagtca

SEQ ID NO: 170929 - DNA, 30 bp, Artificial Sequence
  Synthetic oligonucleotide
agggattggtaaatgagagctaggaagtca

SEQ ID NO: 170930 - DNA, 30 bp, Artificial Sequence
  Synthetic oligonucleotide
cacttctgagaccccggggcccggaagtca

SEQ ID NO: 170931 - DNA, 30 bp, Artificial Sequence
  Synthetic oligonucleotide
caaggaaattgttttgaccatgggaagtca

SEQ ID NO: 170932 - DNA, 30 bp, Artificial Sequence
  Synthetic oligonucleotide
cgagcggacaccatgggcgggtctaagtca

SEQ ID NO: 170933 - DNA, 30 bp, Artificial Sequence
  Synthetic oligonucleotide
acgagccccgtgtatgttcggccacagtca

SEQ ID NO: 170934 - DNA, 30 bp, Artificial Sequence
  Synthetic oligonucleotide
cactctggatgccatctaataaaccagtca

SEQ ID NO: 170935 - DNA, 30 bp, Artificial Sequence
  Synthetic oligonucleotide
acttgctgggaatccaacgggtggcagtca

SEQ ID NO: 170936 - DNA, 30 bp, Artificial Sequence
  Synthetic oligonucleotide
cgctgggaccagcgatattgtctgcagtca

SEQ ID NO: 170937 - DNA, 30 bp, Artificial Sequence
  Synthetic oligonucleotide
actaaccgggcttgcttagcaaccgagtca

SEQ ID NO: 170938 - DNA, 30 bp, Artificial Sequence
  Synthetic oligonucleotide
ggaccatgagaagttaaacgccgtgagtca

SEQ ID NO: 170939 - DNA, 30 bp, Artificial Sequence
  Synthetic oligonucleotide
aaagttacacatccaggggggcttgagtca

SEQ ID NO: 170940 - DNA, 30 bp, Artificial Sequence
  Synthetic oligonucleotide
agcacaatcatttagtttggagaatagtca

SEQ ID NO: 170941 - DNA, 30 bp, Artificial Sequence
  Synthetic oligonucleotide
ggggccaaaaaggatccctataactagtca

SEQ ID NO: 170942 - DNA, 30 bp, Artificial Sequence
  Synthetic oligonucleotide
cgattagaagattgctttatctcgtagtca

SEQ ID NO: 170943 - DNA, 30 bp, Artificial Sequence
  Synthetic oligonucleotide
cgatgacctatactcgttgaaaggtagtca

SEQ ID NO: 170944 - DNA, 30 bp, Artificial Sequence
  Synthetic oligonucleotide
gcattcgtgaaatttaggtctaaaacgtca

SEQ ID NO: 170945 - DNA, 30 bp, Artificial Sequence
  Synthetic oligonucleotide
gctgcaatctccttcatcgtactaacgtca

SEQ ID NO: 170946 - DNA, 30 bp, Artificial Sequence
  Synthetic oligonucleotide
tccaagaaaggagagttagacgcgacgtca

SEQ ID NO: 170947 - DNA, 30 bp, Artificial Sequence
  Synthetic oligonucleotide
ggtacgtgctacatacaactgtcgacgtca

SEQ ID NO: 170948 - DNA, 30 bp, Artificial Sequence
  Synthetic oligonucleotide
ccgccatctcggtctaaacccagtacgtca

SEQ ID NO: 170949 - DNA, 30 bp, Artificial Sequence
  Synthetic oligonucleotide
tgcggatccggggcctgctctattacgtca

SEQ ID NO: 170950 - DNA, 30 bp, Artificial Sequence
  Synthetic oligonucleotide
ggttcgactagaatatttgctctaccgtca

SEQ ID NO: 170951 - DNA, 30 bp, Artificial Sequence
  Synthetic oligonucleotide
ggaggactctgtggaggttatccgccgtca

SEQ ID NO: 170952 - DNA, 30 bp, Artificial Sequence
  Synthetic oligonucleotide
ctcataacaatcgaacatttttggccgtca

SEQ ID NO: 170953 - DNA, 30 bp, Artificial Sequence
  Synthetic oligonucleotide
tgcgtacgggaccgggaacgcaaagcgtca

SEQ ID NO: 170954 - DNA, 30 bp, Artificial Sequence
  Synthetic oligonucleotide
atcgacatgtgattgtatggcggagcgtca

SEQ ID NO: 170955 - DNA, 30 bp, Artificial Sequence
  Synthetic oligonucleotide
gcactcgcacaatgatcgatagtagcgtca

SEQ ID NO: 170956 - DNA, 30 bp, Artificial Sequence
  Synthetic oligonucleotide
tatggaaactagatcaaggatcaggcgtca

SEQ ID NO: 170957 - DNA, 30 bp, Artificial Sequence
  Synthetic oligonucleotide
ctatagaccaatggatcagtcggtgcgtca

SEQ ID NO: 170958 - DNA, 30 bp, Artificial Sequence
  Synthetic oligonucleotide
gtgactggaaggatattacagaaatcgtca

SEQ ID NO: 170959 - DNA, 30 bp, Artificial Sequence
  Synthetic oligonucleotide
cgcgcgatctgcgcgtacttcgcatcgtca

SEQ ID NO: 170960 - DNA, 30 bp, Artificial Sequence
  Synthetic oligonucleotide
ggaatgggggcgatgggggcagtatcgtca

SEQ ID NO: 170961 - DNA, 30 bp, Artificial Sequence
  Synthetic oligonucleotide
agtgtagtttgtttcgattccccctcgtca

SEQ ID NO: 170962 - DNA, 30 bp, Artificial Sequence
  Synthetic oligonucleotide
ggctaatgacagttgtcccacgcttcgtca

SEQ ID NO: 170963 - DNA, 30 bp, Artificial Sequence
  Synthetic oligonucleotide
gatgaaacccatgcgaatttgtaaaggtca

SEQ ID NO: 170964 - DNA, 30 bp, Artificial Sequence
  Synthetic oligonucleotide
ggttggatgtcctctttgcacttaaggtca

SEQ ID NO: 170965 - DNA, 30 bp, Artificial Sequence
  Synthetic oligonucleotide
catcatgaaaaagacgttaggaccaggtca

SEQ ID NO: 170966 - DNA, 30 bp, Artificial Sequence
  Synthetic oligonucleotide
ttatatagccgagtgctataagggaggtca

SEQ ID NO: 170967 - DNA, 30 bp, Artificial Sequence
  Synthetic oligonucleotide
tcaagcggggatcgggacacgactaggtca

SEQ ID NO: 170968 - DNA, 30 bp, Artificial Sequence
  Synthetic oligonucleotide
ggtggtgttttttacccgtaggctaggtca

SEQ ID NO: 170969 - DNA, 30 bp, Artificial Sequence
  Synthetic oligonucleotide
ggtggtggtattcaaaaggcctggcggtca

SEQ ID NO: 170970 - DNA, 30 bp, Artificial Sequence
  Synthetic oligonucleotide
gcgtacgtggtggatcaagcgatagggtca

SEQ ID NO: 170971 - DNA, 30 bp, Artificial Sequence
  Synthetic oligonucleotide
agaagacaaacgtccaacaaaaccgggtca

SEQ ID NO: 170972 - DNA, 30 bp, Artificial Sequence
  Synthetic oligonucleotide
tcgttcatttcttcaattccgcaggggtca

SEQ ID NO: 170973 - DNA, 30 bp, Artificial Sequence
  Synthetic oligonucleotide
caagccgattgtggaccttatgaggggtca

SEQ ID NO: 170974 - DNA, 30 bp, Artificial Sequence
  Synthetic oligonucleotide
ttgggtgagaatccacctgttacatggtca

SEQ ID NO: 170975 - DNA, 30 bp, Artificial Sequence
  Synthetic oligonucleotide
gtagaatatcaggcctcattcccatggtca

SEQ ID NO: 170976 - DNA, 30 bp, Artificial Sequence
  Synthetic oligonucleotide
tcaaagctgccgggaagctgaatctggtca

SEQ ID NO: 170977 - DNA, 30 bp, Artificial Sequence
  Synthetic oligonucleotide
agaatgaatcaacaaggcgggggttggtca

SEQ ID NO: 170978 - DNA, 30 bp, Artificial Sequence
  Synthetic oligonucleotide
accatcgcatcgtattagaccacaatgtca

SEQ ID NO: 170979 - DNA, 30 bp, Artificial Sequence
  Synthetic oligonucleotide
aaggtacgtatcgcacagtcgcgaatgtca

SEQ ID NO: 170980 - DNA, 30 bp, Artificial Sequence
  Synthetic oligonucleotide
ccttaggccaatcgggacatactaatgtca

SEQ ID NO: 170981 - DNA, 30 bp, Artificial Sequence
  Synthetic oligonucleotide
ggcctgcttagggactaaacctgcatgtca

SEQ ID NO: 170982 - DNA, 30 bp, Artificial Sequence
  Synthetic oligonucleotide
gggttaccggctaacagaattgttatgtca

SEQ ID NO: 170983 - DNA, 30 bp, Artificial Sequence
  Synthetic oligonucleotide
tggaacgtcaatggctcggcggaactgtca

SEQ ID NO: 170984 - DNA, 30 bp, Artificial Sequence
  Synthetic oligonucleotide
tctcggtacatcctaatcaagcccctgtca

SEQ ID NO: 170985 - DNA, 30 bp, Artificial Sequence
  Synthetic oligonucleotide
acaggcattctggcgagaggggtcctgtca

SEQ ID NO: 170986 - DNA, 30 bp, Artificial Sequence
  Synthetic oligonucleotide
cttgtcaatttactgaactgtaaagtgtca

SEQ ID NO: 170987 - DNA, 30 bp, Artificial Sequence
  Synthetic oligonucleotide
tgctagagcatgcgttttacactagtgtca

SEQ ID NO: 170988 - DNA, 31 bp, Artificial Sequence
  Synthetic oligonucleotide
taaaagagactaacaaggtattcgcgtgtca

SEQ ID NO: 170989 - DNA, 30 bp, Artificial Sequence
  Synthetic oligonucleotide
gcgtgtagagcagacttgagactcgtgtca

SEQ ID NO: 170990 - DNA, 30 bp, Artificial Sequence
  Synthetic oligonucleotide
cttataaagtatttgctccaatgggtgtca

SEQ ID NO: 170991 - DNA, 30 bp, Artificial Sequence
  Synthetic oligonucleotide
gggatcaactacacagaaatgcgtgtgtca

SEQ ID NO: 170992 - DNA, 30 bp, Artificial Sequence
  Synthetic oligonucleotide
tgcgtggtgtcgcgtttaacgtcattgtca

SEQ ID NO: 170993 - DNA, 30 bp, Artificial Sequence
  Synthetic oligonucleotide
cggcgtcattcgggggaaacggcgttgtca

SEQ ID NO: 170994 - DNA, 30 bp, Artificial Sequence
  Synthetic oligonucleotide
gggatcaatctaaactgtgcattgttgtca

SEQ ID NO: 170995 - DNA, 30 bp, Artificial Sequence
  Synthetic oligonucleotide
tacgacgtacaattaacatacttgttgtca

SEQ ID NO: 170996 - DNA, 30 bp, Artificial Sequence
  Synthetic oligonucleotide
tgagtggcgaaggtgattgctcctttgtca

SEQ ID NO: 170997 - DNA, 30 bp, Artificial Sequence
  Synthetic oligonucleotide
ttgaccagcaaataacagcctacaaattca

SEQ ID NO: 170998 - DNA, 30 bp, Artificial Sequence
  Synthetic oligonucleotide
ggcccgaaagtatactcagtaggaaattca

SEQ ID NO: 170999 - DNA, 30 bp, Artificial Sequence
  Synthetic oligonucleotide
atagttcgcgaatagtagtgcggaaattca

SEQ ID NO: 171000 - DNA, 30 bp, Artificial Sequence
  Synthetic oligonucleotide
tcgatctcggaattaccaagaaacaattca

SEQ ID NO: 171001 - DNA, 30 bp, Artificial Sequence
  Synthetic oligonucleotide
ttgcaccatgcacaatatatcgagaattca

SEQ ID NO: 171002 - DNA, 30 bp, Artificial Sequence
  Synthetic oligonucleotide
caccataagaaaagacatatgcggaattca

SEQ ID NO: 171003 - DNA, 30 bp, Artificial Sequence
  Synthetic oligonucleotide
tataggtcgacccacagtcagtggaattca

SEQ ID NO: 171004 - DNA, 30 bp, Artificial Sequence
  Synthetic oligonucleotide
aacgaataaagcaattgttacatgaattca

SEQ ID NO: 171005 - DNA, 30 bp, Artificial Sequence
  Synthetic oligonucleotide
gaaaagcgcatatcgacgactttgaattca

SEQ ID NO: 171006 - DNA, 30 bp, Artificial Sequence
  Synthetic oligonucleotide
gcggacagttaaatcctggtgaataattca

SEQ ID NO: 171007 - DNA, 30 bp, Artificial Sequence
  Synthetic oligonucleotide
cggcccagggtaaggcagaggtgtaattca

SEQ ID NO: 171008 - DNA, 30 bp, Artificial Sequence
  Synthetic oligonucleotide
cggggcacactagtttcaacgattaattca

SEQ ID NO: 171009 - DNA, 30 bp, Artificial Sequence
  Synthetic oligonucleotide
tggcaaaggaccgatggtattttacattca

SEQ ID NO: 171010 - DNA, 30 bp, Artificial Sequence
  Synthetic oligonucleotide
gtaggcacctgcgaatcgtacacgcattca

SEQ ID NO: 171011 - DNA, 30 bp, Artificial Sequence
  Synthetic oligonucleotide
tccaattacaagaaggctagaactcattca

SEQ ID NO: 171012 - DNA, 30 bp, Artificial Sequence
  Synthetic oligonucleotide
accaggctacgaactaaatatgctcattca

SEQ ID NO: 171013 - DNA, 30 bp, Artificial Sequence
  Synthetic oligonucleotide
gatatgtcggcaaaatagtacccagattca

SEQ ID NO: 171014 - DNA, 30 bp, Artificial Sequence
  Synthetic oligonucleotide
tcaagttcatgtgacattggcatagattca

SEQ ID NO: 171015 - DNA, 30 bp, Artificial Sequence
  Synthetic oligonucleotide
ctcacttcggtaacaggatagtacgattca

SEQ ID NO: 171016 - DNA, 30 bp, Artificial Sequence
  Synthetic oligonucleotide
agagctatcctctgaaggtaccgcgattca

SEQ ID NO: 171017 - DNA, 30 bp, Artificial Sequence
  Synthetic oligonucleotide
acagccataggggatatctcgtgcgattca

SEQ ID NO: 171018 - DNA, 30 bp, Artificial Sequence
  Synthetic oligonucleotide
tccatgaagcgattataccgactatattca

SEQ ID NO: 171019 - DNA, 30 bp, Artificial Sequence
  Synthetic oligonucleotide
aaactggttatcccataaaaggtctattca

SEQ ID NO: 171020 - DNA, 30 bp, Artificial Sequence
  Synthetic oligonucleotide
gcgccgtttcatctgaactggtagacttca

SEQ ID NO: 171021 - DNA, 30 bp, Artificial Sequence
  Synthetic oligonucleotide
gtatgccagccactatataacttgacttca

SEQ ID NO: 171022 - DNA, 30 bp, Artificial Sequence
  Synthetic oligonucleotide
tggaacggcttcacaatttccggaccttca

SEQ ID NO: 171023 - DNA, 30 bp, Artificial Sequence
  Synthetic oligonucleotide
atacaccgtgtctcgggagtggagccttca

SEQ ID NO: 171024 - DNA, 30 bp, Artificial Sequence
  Synthetic oligonucleotide
atagaaccggcgccggaagtctcgccttca

SEQ ID NO: 171025 - DNA, 30 bp, Artificial Sequence
  Synthetic oligonucleotide
cttaacaatcggatgggcagtggggcttca

SEQ ID NO: 171026 - DNA, 30 bp, Artificial Sequence
  Synthetic oligonucleotide
cagaggacaattaggcctgccgttgcttca

SEQ ID NO: 171027 - DNA, 30 bp, Artificial Sequence
  Synthetic oligonucleotide
caacgatcagggccattctcgatgtcttca

SEQ ID NO: 171028 - DNA, 30 bp, Artificial Sequence
  Synthetic oligonucleotide
tctactagtgcagcgttaacggtaagttca

SEQ ID NO: 171029 - DNA, 30 bp, Artificial Sequence
  Synthetic oligonucleotide
cctggtcggtatatgaaagtaaacagttca

SEQ ID NO: 171030 - DNA, 30 bp, Artificial Sequence
  Synthetic oligonucleotide
acaagtaggcgtacaagggtttagagttca

SEQ ID NO: 171031 - DNA, 30 bp, Artificial Sequence
  Synthetic oligonucleotide
tgggaatctgacctgctgggctaccgttca

SEQ ID NO: 171032 - DNA, 30 bp, Artificial Sequence
  Synthetic oligonucleotide
gggagtcttacgaagctagtatcccgttca

SEQ ID NO: 171033 - DNA, 30 bp, Artificial Sequence
  Synthetic oligonucleotide
atagctaggcaagaggactttggccgttca

SEQ ID NO: 171034 - DNA, 30 bp, Artificial Sequence
  Synthetic oligonucleotide
gtcagtctagcgtagtggacaaagcgttca

SEQ ID NO: 171035 - DNA, 30 bp, Artificial Sequence
  Synthetic oligonucleotide
cgcaattttaagttgacaccgtcgcgttca

SEQ ID NO: 171036 - DNA, 30 bp, Artificial Sequence
  Synthetic oligonucleotide
cgtaaatgttatgaagcgcattcgcgttca

SEQ ID NO: 171037 - DNA, 30 bp, Artificial Sequence
  Synthetic oligonucleotide
gtaacgagagagtatcacatgtctcgttca

SEQ ID NO: 171038 - DNA, 30 bp, Artificial Sequence
  Synthetic oligonucleotide
cggcagacgaggaacagtttatttcgttca

SEQ ID NO: 171039 - DNA, 30 bp, Artificial Sequence
  Synthetic oligonucleotide
ggcgccttaggcacacactttcaaggttca

SEQ ID NO: 171040 - DNA, 30 bp, Artificial Sequence
  Synthetic oligonucleotide
tggtaattacgtgcgtggagtcggggttca

SEQ ID NO: 171041 - DNA, 30 bp, Artificial Sequence
  Synthetic oligonucleotide
caaataacggaagaacatttactgggttca

SEQ ID NO: 171042 - DNA, 30 bp, Artificial Sequence
  Synthetic oligonucleotide
atcgcgcgtgtagggtagtacatctgttca

SEQ ID NO: 171043 - DNA, 30 bp, Artificial Sequence
  Synthetic oligonucleotide
catgatggtactactgagtgcggtatttca

SEQ ID NO: 171044 - DNA, 30 bp, Artificial Sequence
  Synthetic oligonucleotide
atgaatagcttagatgttatatgtatttca

SEQ ID NO: 171045 - DNA, 30 bp, Artificial Sequence
  Synthetic oligonucleotide
cggctcacgacgcgactaagctgtatttca

SEQ ID NO: 171046 - DNA, 30 bp, Artificial Sequence
  Synthetic oligonucleotide
gaaatcaactgggtttcgtatcgactttca

SEQ ID NO: 171047 - DNA, 30 bp, Artificial Sequence
  Synthetic oligonucleotide
cttataatgcgagatagacaagaggtttca

SEQ ID NO: 171048 - DNA, 30 bp, Artificial Sequence
  Synthetic oligonucleotide
ctggtaaggtcgcaaggaggggaggtttca

SEQ ID NO: 171049 - DNA, 30 bp, Artificial Sequence
  Synthetic oligonucleotide
cggaggtaccaatagagctatgcggtttca

SEQ ID NO: 171050 - DNA, 30 bp, Artificial Sequence
  Synthetic oligonucleotide
gaccaagtgggcccattgcgtggggtttca

SEQ ID NO: 171051 - DNA, 30 bp, Artificial Sequence
  Synthetic oligonucleotide
aggacaactggtatatcgtaaggtgtttca

SEQ ID NO: 171052 - DNA, 30 bp, Artificial Sequence
  Synthetic oligonucleotide
ggatatcacaaatattattaatcattttca

SEQ ID NO: 171053 - DNA, 30 bp, Artificial Sequence
  Synthetic oligonucleotide
tataggatgttaaggcaaggggctttttca

SEQ ID NO: 171054 - DNA, 30 bp, Artificial Sequence
  Synthetic oligonucleotide
cgaaggtatgaacgcccatggtcaaaaaga

SEQ ID NO: 171055 - DNA, 30 bp, Artificial Sequence
  Synthetic oligonucleotide
atcatgtaccgcaccgagagtataaaaaga

SEQ ID NO: 171056 - DNA, 30 bp, Artificial Sequence
  Synthetic oligonucleotide
tgactcggacaacattagtgcgacaaaaga

SEQ ID NO: 171057 - DNA, 30 bp, Artificial Sequence
  Synthetic oligonucleotide
ccattacggaactccgcgaaaggcaaaaga

SEQ ID NO: 171058 - DNA, 30 bp, Artificial Sequence
  Synthetic oligonucleotide
tcaagagggcggtcgggtgggggcaaaaga

SEQ ID NO: 171059 - DNA, 30 bp, Artificial Sequence
  Synthetic oligonucleotide
aatgtgtatctgtggatccggttcaaaaga

SEQ ID NO: 171060 - DNA, 30 bp, Artificial Sequence
  Synthetic oligonucleotide
tgatgagcatagaggatgcgccagaaaaga

SEQ ID NO: 171061 - DNA, 30 bp, Artificial Sequence
  Synthetic oligonucleotide
ctcagcgcccttcaagggaattagaaaaga

SEQ ID NO: 171062 - DNA, 30 bp, Artificial Sequence
  Synthetic oligonucleotide
agttcgagctgatcaggtgcaaggaaaaga

SEQ ID NO: 171063 - DNA, 30 bp, Artificial Sequence
  Synthetic oligonucleotide
gacctgcctcacgtggttgtgcggaaaaga

SEQ ID NO: 171064 - DNA, 30 bp, Artificial Sequence
  Synthetic oligonucleotide
acggtttgtgtacggcttaaataccaaaga

SEQ ID NO: 171065 - DNA, 30 bp, Artificial Sequence
  Synthetic oligonucleotide
gccgaattggtaatcggtttcaggcaaaga

SEQ ID NO: 171066 - DNA, 30 bp, Artificial Sequence
  Synthetic oligonucleotide
ccgcgggaagcttgtcgagtgtggcaaaga

SEQ ID NO: 171067 - DNA, 30 bp, Artificial Sequence
  Synthetic oligonucleotide
aggagcatgctatatggggcgctgcaaaga

SEQ ID NO: 171068 - DNA, 30 bp, Artificial Sequence
  Synthetic oligonucleotide
ttttgattggaagataagggacccgaaaga

SEQ ID NO: 171069 - DNA, 30 bp, Artificial Sequence
  Synthetic oligonucleotide
agcgggggcatacggtactgtccggaaaga

SEQ ID NO: 171070 - DNA, 30 bp, Artificial Sequence
  Synthetic oligonucleotide
tataccagaggaccgtgggttactgaaaga

SEQ ID NO: 171071 - DNA, 30 bp, Artificial Sequence
  Synthetic oligonucleotide
aaccatgcgtaggcttacgagacttaaaga

SEQ ID NO: 171072 - DNA, 30 bp, Artificial Sequence
  Synthetic oligonucleotide
atgtgctgcatgtaaagtcgctgttaaaga

SEQ ID NO: 171073 - DNA, 30 bp, Artificial Sequence
  Synthetic oligonucleotide
acgttttgacgtatgggacgtgtttaaaga

SEQ ID NO: 171074 - DNA, 30 bp, Artificial Sequence
  Synthetic oligonucleotide
tgggcacctcatgtctagaacaggacaaga

SEQ ID NO: 171075 - DNA, 30 bp, Artificial Sequence
  Synthetic oligonucleotide
tggttggccctccacagagtgtggacaaga

SEQ ID NO: 171076 - DNA, 30 bp, Artificial Sequence
  Synthetic oligonucleotide
tacgtgctcatacagacgagccgtacaaga

SEQ ID NO: 171077 - DNA, 30 bp, Artificial Sequence
  Synthetic oligonucleotide
gtatggataaccaaggcacatcgtacaaga

SEQ ID NO: 171078 - DNA, 30 bp, Artificial Sequence
  Synthetic oligonucleotide
gtcggtctggtgcgaggctccgaaccaaga

SEQ ID NO: 171079 - DNA, 30 bp, Artificial Sequence
  Synthetic oligonucleotide
tggtctattagccaaaatgtcacaccaaga

SEQ ID NO: 171080 - DNA, 30 bp, Artificial Sequence
  Synthetic oligonucleotide
gcggacttagcggaacgttgcattccaaga

SEQ ID NO: 171081 - DNA, 30 bp, Artificial Sequence
  Synthetic oligonucleotide
ctcttcggaacatgggctaggtccgcaaga

SEQ ID NO: 171082 - DNA, 30 bp, Artificial Sequence
  Synthetic oligonucleotide
gacattagatgctttaagaacgtcgcaaga

SEQ ID NO: 171083 - DNA, 30 bp, Artificial Sequence
  Synthetic oligonucleotide
gactcgggcattcgagccagaggggcaaga

SEQ ID NO: 171084 - DNA, 30 bp, Artificial Sequence
  Synthetic oligonucleotide
ggggctcaagttaacctttgcagtgcaaga

SEQ ID NO: 171085 - DNA, 30 bp, Artificial Sequence
  Synthetic oligonucleotide
gggataaaagaacagaggtgggcatcaaga

SEQ ID NO: 171086 - DNA, 30 bp, Artificial Sequence
  Synthetic oligonucleotide
caaacttacaccggtctaaagtagtcaaga

SEQ ID NO: 171087 - DNA, 30 bp, Artificial Sequence
  Synthetic oligonucleotide
cgtggcgcgtaatttgtacaagtttcaaga

SEQ ID NO: 171088 - DNA, 30 bp, Artificial Sequence
  Synthetic oligonucleotide
gctcatcttcccgactcgattaaaagaaga

SEQ ID NO: 171089 - DNA, 30 bp, Artificial Sequence
  Synthetic oligonucleotide
cgacagtctccggacaccgtgaacagaaga

SEQ ID NO: 171090 - DNA, 30 bp, Artificial Sequence
  Synthetic oligonucleotide
gtcacatgcgcctgtgggaagtgcagaaga

SEQ ID NO: 171091 - DNA, 30 bp, Artificial Sequence
  Synthetic oligonucleotide
ggattagcactggggttggtgtgcagaaga

SEQ ID NO: 171092 - DNA, 30 bp, Artificial Sequence
  Synthetic oligonucleotide
ctgtggtagataagcgtagagctgagaaga

SEQ ID NO: 171093 - DNA, 30 bp, Artificial Sequence
  Synthetic oligonucleotide
agatgtgtggcgatacataccaatagaaga

SEQ ID NO: 171094 - DNA, 30 bp, Artificial Sequence
  Synthetic oligonucleotide
gtaggagtgggcgcgctctgtcaacgaaga

SEQ ID NO: 171095 - DNA, 30 bp, Artificial Sequence
  Synthetic oligonucleotide
ctgtgccgccccgcacggctcaggcgaaga

SEQ ID NO: 171096 - DNA, 30 bp, Artificial Sequence
  Synthetic oligonucleotide
atgttgatttcagttactcaggcaggaaga

SEQ ID NO: 171097 - DNA, 30 bp, Artificial Sequence
  Synthetic oligonucleotide
tggcccccaggcggacactccggaggaaga

SEQ ID NO: 171098 - DNA, 30 bp, Artificial Sequence
  Synthetic oligonucleotide
ccgtggcctagttaaaggtaaataggaaga

SEQ ID NO: 171099 - DNA, 30 bp, Artificial Sequence
  Synthetic oligonucleotide
ttcccgagccagccatttaagtacggaaga

SEQ ID NO: 171100 - DNA, 30 bp, Artificial Sequence
  Synthetic oligonucleotide
gtcataggagggcacacggagtccggaaga

SEQ ID NO: 171101 - DNA, 30 bp, Artificial Sequence
  Synthetic oligonucleotide
gtaccaaagtccagcggctttgcgggaaga

SEQ ID NO: 171102 - DNA, 30 bp, Artificial Sequence
  Synthetic oligonucleotide
tcgtaaacagccgcatatcaatgtggaaga

SEQ ID NO: 171103 - DNA, 30 bp, Artificial Sequence
  Synthetic oligonucleotide
ggctcgtcaaacatatgatctggatgaaga

SEQ ID NO: 171104 - DNA, 30 bp, Artificial Sequence
  Synthetic oligonucleotide
tgtcaaggtactttaatgaattgctgaaga

SEQ ID NO: 171105 - DNA, 30 bp, Artificial Sequence
  Synthetic oligonucleotide
gtaagtctcggaccttcgaatttctgaaga

SEQ ID NO: 171106 - DNA, 30 bp, Artificial Sequence
  Synthetic oligonucleotide
gagatctaagtgctaaagagccagtgaaga

SEQ ID NO: 171107 - DNA, 30 bp, Artificial Sequence
  Synthetic oligonucleotide
aaattagtacgtcacacctccgattgaaga

SEQ ID NO: 171108 - DNA, 30 bp, Artificial Sequence
  Synthetic oligonucleotide
aagtgtcagtaatcgctacttaaaataaga

SEQ ID NO: 171109 - DNA, 30 bp, Artificial Sequence
  Synthetic oligonucleotide
agcgcgaatcattatcaatgcaacataaga

SEQ ID NO: 171110 - DNA, 30 bp, Artificial Sequence
  Synthetic oligonucleotide
cgcgagacacatggtaattacctcataaga

SEQ ID NO: 171111 - DNA, 30 bp, Artificial Sequence
  Synthetic oligonucleotide
catgtacgctatgtatatgtcgagataaga

SEQ ID NO: 171112 - DNA, 30 bp, Artificial Sequence
  Synthetic oligonucleotide
tataacgtagcaaaacatcgttttataaga

SEQ ID NO: 171113 - DNA, 30 bp, Artificial Sequence
  Synthetic oligonucleotide
gtaacggttaagcctcaccaaacactaaga

SEQ ID NO: 171114 - DNA, 30 bp, Artificial Sequence
  Synthetic oligonucleotide
ttgatacccgcgacggtagacgtgctaaga

SEQ ID NO: 171115 - DNA, 30 bp, Artificial Sequence
  Synthetic oligonucleotide
atccccgcttgcccgtcacgatgtctaaga

SEQ ID NO: 171116 - DNA, 30 bp, Artificial Sequence
  Synthetic oligonucleotide
cggaatacatcatccatccagattctaaga

SEQ ID NO: 171117 - DNA, 30 bp, Artificial Sequence
  Synthetic oligonucleotide
gaccgggactggcgcaaatgaaaagtaaga

SEQ ID NO: 171118 - DNA, 30 bp, Artificial Sequence
  Synthetic oligonucleotide
atgaagattgggggctcagtagaagtaaga

SEQ ID NO: 171119 - DNA, 30 bp, Artificial Sequence
  Synthetic oligonucleotide
ggggaatgtcaagtccccaggatcgtaaga

SEQ ID NO: 171120 - DNA, 30 bp, Artificial Sequence
  Synthetic oligonucleotide
cgcttcggtagtatgagtcggatggtaaga

SEQ ID NO: 171121 - DNA, 30 bp, Artificial Sequence
  Synthetic oligonucleotide
catatcgccactgggacactcagcttaaga

SEQ ID NO: 171122 - DNA, 30 bp, Artificial Sequence
  Synthetic oligonucleotide
agcccttcctcgactacttactcgttaaga

SEQ ID NO: 171123 - DNA, 30 bp, Artificial Sequence
  Synthetic oligonucleotide
tagccactatggacccaaattcgtttaaga

SEQ ID NO: 171124 - DNA, 30 bp, Artificial Sequence
  Synthetic oligonucleotide
gcccacagtttgcgattagcaataaacaga

SEQ ID NO: 171125 - DNA, 30 bp, Artificial Sequence
  Synthetic oligonucleotide
ataacagggacacgttctttgaacaacaga

SEQ ID NO: 171126 - DNA, 30 bp, Artificial Sequence
  Synthetic oligonucleotide
tagtagaggttagagacatgccgcaacaga

SEQ ID NO: 171127 - DNA, 30 bp, Artificial Sequence
  Synthetic oligonucleotide
gttcgatccttcggacaagtcgtgaacaga

SEQ ID NO: 171128 - DNA, 30 bp, Artificial Sequence
  Synthetic oligonucleotide
gctactaaagctctaacgatgttgaacaga

SEQ ID NO: 171129 - DNA, 30 bp, Artificial Sequence
  Synthetic oligonucleotide
acgagacgtgtttgcagcagggaacacaga

SEQ ID NO: 171130 - DNA, 30 bp, Artificial Sequence
  Synthetic oligonucleotide
ataccttttgagtagaactatagacacaga

SEQ ID NO: 171131 - DNA, 30 bp, Artificial Sequence
  Synthetic oligonucleotide
tacggatctgcaaaataccgcgtacacaga

SEQ ID NO: 171132 - DNA, 30 bp, Artificial Sequence
  Synthetic oligonucleotide
cgggacattcgtcctacgtaggaagacaga

SEQ ID NO: 171133 - DNA, 30 bp, Artificial Sequence
  Synthetic oligonucleotide
gaaagacgaaaactgacacagtcagacaga

SEQ ID NO: 171134 - DNA, 30 bp, Artificial Sequence
  Synthetic oligonucleotide
ggtgggtaacgagcgttttaacgagacaga

SEQ ID NO: 171135 - DNA, 30 bp, Artificial Sequence
  Synthetic oligonucleotide
acccaagatctcgcttcagtgcgagacaga

SEQ ID NO: 171136 - DNA, 30 bp, Artificial Sequence
  Synthetic oligonucleotide
tagaggcatttgcgcgtccactccgacaga

SEQ ID NO: 171137 - DNA, 30 bp, Artificial Sequence
  Synthetic oligonucleotide
gtagagtgacacaagtcgctaggggacaga

SEQ ID NO: 171138 - DNA, 30 bp, Artificial Sequence
  Synthetic oligonucleotide
acaaattcgacgccgtaaccaggatacaga

SEQ ID NO: 171139 - DNA, 30 bp, Artificial Sequence
  Synthetic oligonucleotide
acatcgggattggagatctcagagtacaga

SEQ ID NO: 171140 - DNA, 30 bp, Artificial Sequence
  Synthetic oligonucleotide
agaaagcctgctcacattatcacgtacaga

SEQ ID NO: 171141 - DNA, 30 bp, Artificial Sequence
  Synthetic oligonucleotide
tcatgaatgtgcgggttggtaaattacaga

SEQ ID NO: 171142 - DNA, 30 bp, Artificial Sequence
  Synthetic oligonucleotide
ttcagatcgaaatgggccgaagtttacaga

SEQ ID NO: 171143 - DNA, 30 bp, Artificial Sequence
  Synthetic oligonucleotide
tagtgagggttggaatacgttataaccaga

SEQ ID NO: 171144 - DNA, 30 bp, Artificial Sequence
  Synthetic oligonucleotide
cagaaaggacttattaagccgggcaccaga

SEQ ID NO: 171145 - DNA, 30 bp, Artificial Sequence
  Synthetic oligonucleotide
cattgtcgggtcatagtcgagtgcaccaga

SEQ ID NO: 171146 - DNA, 30 bp, Artificial Sequence
  Synthetic oligonucleotide
gtaaggggtacagttcccgaacttaccaga

SEQ ID NO: 171147 - DNA, 30 bp, Artificial Sequence
  Synthetic oligonucleotide
tctatcaagagctctatatccaaacccaga

SEQ ID NO: 171148 - DNA, 30 bp, Artificial Sequence
  Synthetic oligonucleotide
agggctcggactcgtatcacacggcccaga

SEQ ID NO: 171149 - DNA, 30 bp, Artificial Sequence
  Synthetic oligonucleotide
gtattatgctttggaaaaagtagtcccaga

SEQ ID NO: 171150 - DNA, 30 bp, Artificial Sequence
  Synthetic oligonucleotide
actaaacgagatgactgacgaaaagccaga

SEQ ID NO: 171151 - DNA, 30 bp, Artificial Sequence
  Synthetic oligonucleotide
gtacgaatcagaaccgaactgtgagccaga

SEQ ID NO: 171152 - DNA, 30 bp, Artificial Sequence
  Synthetic oligonucleotide
gtgaggggttcgtggataccgtccgccaga

SEQ ID NO: 171153 - DNA, 30 bp, Artificial Sequence
  Synthetic oligonucleotide
cggcccaatctgctggatcatatggccaga

SEQ ID NO: 171154 - DNA, 30 bp, Artificial Sequence
  Synthetic oligonucleotide
gatatacagcttacttgctatatatccaga

SEQ ID NO: 171155 - DNA, 30 bp, Artificial Sequence
  Synthetic oligonucleotide
gttgcggatttggtttgctccccgtccaga

SEQ ID NO: 171156 - DNA, 30 bp, Artificial Sequence
  Synthetic oligonucleotide
ctggatggagaggactcctggctaagcaga

SEQ ID NO: 171157 - DNA, 30 bp, Artificial Sequence
  Synthetic oligonucleotide
gcatagacgacgtcggtcttcgccagcaga

SEQ ID NO: 171158 - DNA, 30 bp, Artificial Sequence
  Synthetic oligonucleotide
agaaacccacctgcgggccacactagcaga

SEQ ID NO: 171159 - DNA, 30 bp, Artificial Sequence
  Synthetic oligonucleotide
caggtcgggcgctcgtctaagaaacgcaga

SEQ ID NO: 171160 - DNA, 30 bp, Artificial Sequence
  Synthetic oligonucleotide
agagtgtacaatttaccatttaaacgcaga

SEQ ID NO: 171161 - DNA, 30 bp, Artificial Sequence
  Synthetic oligonucleotide
catgttcgttcgccggaccaccaacgcaga

SEQ ID NO: 171162 - DNA, 30 bp, Artificial Sequence
  Synthetic oligonucleotide
aggccaccgtgcaagctctgcgcacgcaga

SEQ ID NO: 171163 - DNA, 30 bp, Artificial Sequence
  Synthetic oligonucleotide
ttcacgtaaaacattcagccggtccgcaga

SEQ ID NO: 171164 - DNA, 30 bp, Artificial Sequence
  Synthetic oligonucleotide
gacccttgaacccggtgtgcctcaggcaga

SEQ ID NO: 171165 - DNA, 30 bp, Artificial Sequence
  Synthetic oligonucleotide
ggcaactcgtgcggccaaaagaccggcaga

SEQ ID NO: 171166 - DNA, 30 bp, Artificial Sequence
  Synthetic oligonucleotide
gacggcttaatcgtagacatgaccggcaga

SEQ ID NO: 171167 - DNA, 30 bp, Artificial Sequence
  Synthetic oligonucleotide
tagtcaagcgtacacaaatttctcggcaga

SEQ ID NO: 171168 - DNA, 30 bp, Artificial Sequence
  Synthetic oligonucleotide
catcgaccggcctcctggaacacgggcaga

SEQ ID NO: 171169 - DNA, 30 bp, Artificial Sequence
  Synthetic oligonucleotide
cgtcagttggatatgcggggcgactgcaga

SEQ ID NO: 171170 - DNA, 26 bp, Artificial Sequence
  Synthetic oligonucleotide
tagtccggcccccgtcagtctgcaga

SEQ ID NO: 171171 - DNA, 30 bp, Artificial Sequence
  Synthetic oligonucleotide
aaatttcgcgaaatgcaaaaagggtgcaga

SEQ ID NO: 171172 - DNA, 30 bp, Artificial Sequence
  Synthetic oligonucleotide
gtgtatgaaaaagtttgctgtctgtgcaga

SEQ ID NO: 171173 - DNA, 30 bp, Artificial Sequence
  Synthetic oligonucleotide
gtatcgaaagaatctctgtaggtttgcaga

SEQ ID NO: 171174 - DNA, 30 bp, Artificial Sequence
  Synthetic oligonucleotide
ctactaacctcaaggggaactctcatcaga

SEQ ID NO: 171175 - DNA, 30 bp, Artificial Sequence
  Synthetic oligonucleotide
ttacacggtgtttcattaagactgatcaga

SEQ ID NO: 171176 - DNA, 30 bp, Artificial Sequence
  Synthetic oligonucleotide
gtagacgagcccgcgggatatgatatcaga

SEQ ID NO: 171177 - DNA, 30 bp, Artificial Sequence
  Synthetic oligonucleotide
aatgcggagggcaaccagtggcaactcaga

SEQ ID NO: 171178 - DNA, 30 bp, Artificial Sequence
  Synthetic oligonucleotide
ccgtaacggtaacgtaatccttcactcaga

SEQ ID NO: 171179 - DNA, 30 bp, Artificial Sequence
  Synthetic oligonucleotide
tgggggcggttggctgactatttcctcaga

SEQ ID NO: 171180 - DNA, 30 bp, Artificial Sequence
  Synthetic oligonucleotide
atactgatgaagaccggggtgtgagtcaga

SEQ ID NO: 171181 - DNA, 30 bp, Artificial Sequence
  Synthetic oligonucleotide
aagcgaggcaggagtgtctagaacgtcaga

SEQ ID NO: 171182 - DNA, 30 bp, Artificial Sequence
  Synthetic oligonucleotide
aatgttaagacatagcgtgtggacgtcaga

SEQ ID NO: 171183 - DNA, 30 bp, Artificial Sequence
  Synthetic oligonucleotide
taatagataaggcactgtaatagtgtcaga

SEQ ID NO: 171184 - DNA, 30 bp, Artificial Sequence
  Synthetic oligonucleotide
aaactggccttgattgtatttttgttcaga

SEQ ID NO: 171185 - DNA, 30 bp, Artificial Sequence
  Synthetic oligonucleotide
cttctacgtgagactgaggttactttcaga

SEQ ID NO: 171186 - DNA, 30 bp, Artificial Sequence
  Synthetic oligonucleotide
cgattggcagttctgttgggcgctttcaga

SEQ ID NO: 171187 - DNA, 30 bp, Artificial Sequence
  Synthetic oligonucleotide
aggggaagcgaccttttcgcattaaagaga

SEQ ID NO: 171188 - DNA, 30 bp, Artificial Sequence
  Synthetic oligonucleotide
agtaactccctcggggaatcaaagaagaga

SEQ ID NO: 171189 - DNA, 30 bp, Artificial Sequence
  Synthetic oligonucleotide
cagcctacccgtagattcatatgtaagaga

SEQ ID NO: 171190 - DNA, 30 bp, Artificial Sequence
  Synthetic oligonucleotide
gtttgtgtgtattcattattgccccagaga

SEQ ID NO: 171191 - DNA, 30 bp, Artificial Sequence
  Synthetic oligonucleotide
tgagtttagcatggaggagaactagagaga

SEQ ID NO: 171192 - DNA, 30 bp, Artificial Sequence
  Synthetic oligonucleotide
gtatatagaaatggacaggagcccgagaga

SEQ ID NO: 171193 - DNA, 30 bp, Artificial Sequence
  Synthetic oligonucleotide
cattaaatttgttcgtcaatagccgagaga

SEQ ID NO: 171194 - DNA, 30 bp, Artificial Sequence
  Synthetic oligonucleotide
cttcccggaaggccacgagtgggcgagaga

SEQ ID NO: 171195 - DNA, 30 bp, Artificial Sequence
  Synthetic oligonucleotide
tggtatcggcttatgcgaagaagggagaga

SEQ ID NO: 171196 - DNA, 30 bp, Artificial Sequence
  Synthetic oligonucleotide
gtccttaagagtgcatgtgtaatggagaga

SEQ ID NO: 171197 - DNA, 30 bp, Artificial Sequence
  Synthetic oligonucleotide
ctctagagtatgggctctgcgagatagaga

SEQ ID NO: 171198 - DNA, 30 bp, Artificial Sequence
  Synthetic oligonucleotide
atggcttagtaccataacacctactagaga

SEQ ID NO: 171199 - DNA, 30 bp, Artificial Sequence
  Synthetic oligonucleotide
atcacagacattctacgttatcagtagaga

SEQ ID NO: 171200 - DNA, 30 bp, Artificial Sequence
  Synthetic oligonucleotide
tgttacattattacaggcccttcttagaga

SEQ ID NO: 171201 - DNA, 30 bp, Artificial Sequence
  Synthetic oligonucleotide
cgcgcttatggtataagaggtatttagaga

SEQ ID NO: 171202 - DNA, 30 bp, Artificial Sequence
  Synthetic oligonucleotide
gccgaagtcttacccactggaagaacgaga

SEQ ID NO: 171203 - DNA, 30 bp, Artificial Sequence
  Synthetic oligonucleotide
gacttagaagtcccgtgatgactaacgaga

SEQ ID NO: 171204 - DNA, 30 bp, Artificial Sequence
  Synthetic oligonucleotide
tcctgggaggcatatcgggagacgacgaga

SEQ ID NO: 171205 - DNA, 30 bp, Artificial Sequence
  Synthetic oligonucleotide
tggcagttcaatggttgagaggttacgaga

SEQ ID NO: 171206 - DNA, 30 bp, Artificial Sequence
  Synthetic oligonucleotide
taatagacaagagcggttaggcgaccgaga

SEQ ID NO: 171207 - DNA, 30 bp, Artificial Sequence
  Synthetic oligonucleotide
ctaccatgagaacgtagcagatgcccgaga

SEQ ID NO: 171208 - DNA, 30 bp, Artificial Sequence
  Synthetic oligonucleotide
ttggcggctctggtacctggattgccgaga

SEQ ID NO: 171209 - DNA, 30 bp, Artificial Sequence
  Synthetic oligonucleotide
cttaacatattctcccagcgttcagcgaga

SEQ ID NO: 171210 - DNA, 30 bp, Artificial Sequence
  Synthetic oligonucleotide
acaagtagaaggacgacgttgggcgcgaga

SEQ ID NO: 171211 - DNA, 30 bp, Artificial Sequence
  Synthetic oligonucleotide
acccctcatgcatgggcattacgggcgaga

SEQ ID NO: 171212 - DNA, 30 bp, Artificial Sequence
  Synthetic oligonucleotide
tgaaggccactaaggcaaggaagtgcgaga

SEQ ID NO: 171213 - DNA, 30 bp, Artificial Sequence
  Synthetic oligonucleotide
ttaagtgctcagggaggggccaaatcgaga

SEQ ID NO: 171214 - DNA, 30 bp, Artificial Sequence
  Synthetic oligonucleotide
caacgaggcgtctctatcagtagatcgaga

SEQ ID NO: 171215 - DNA, 30 bp, Artificial Sequence
  Synthetic oligonucleotide
tgcattgacgggaagtgaaatgactcgaga

SEQ ID NO: 171216 - DNA, 30 bp, Artificial Sequence
  Synthetic oligonucleotide
actagactgcgcttgcatttatactcgaga

SEQ ID NO: 171217 - DNA, 30 bp, Artificial Sequence
  Synthetic oligonucleotide
ggaaatagaggttgcattaggctgtcgaga

SEQ ID NO: 171218 - DNA, 30 bp, Artificial Sequence
  Synthetic oligonucleotide
tccgggttagtggggttaaggttgtcgaga

SEQ ID NO: 171219 - DNA, 30 bp, Artificial Sequence
  Synthetic oligonucleotide
aaatccgatcgttgaaacggcaaaaggaga

SEQ ID NO: 171220 - DNA, 30 bp, Artificial Sequence
  Synthetic oligonucleotide
cgatgcaataaaaacctaatacgcaggaga

SEQ ID NO: 171221 - DNA, 30 bp, Artificial Sequence
  Synthetic oligonucleotide
tgttagtttcgagggggtaagatcaggaga

SEQ ID NO: 171222 - DNA, 30 bp, Artificial Sequence
  Synthetic oligonucleotide
accggtttactgggccgccgaatgaggaga

SEQ ID NO: 171223 - DNA, 30 bp, Artificial Sequence
  Synthetic oligonucleotide
gttcgaacgagcactaatcagggtaggaga

SEQ ID NO: 171224 - DNA, 30 bp, Artificial Sequence
  Synthetic oligonucleotide
cagatccctgctccctgtgctaaacggaga

SEQ ID NO: 171225 - DNA, 30 bp, Artificial Sequence
  Synthetic oligonucleotide
cgaggggggtccgggcgagcgcatcggaga

SEQ ID NO: 171226 - DNA, 30 bp, Artificial Sequence
  Synthetic oligonucleotide
aattgctaaaacaaggacagtggtcggaga

SEQ ID NO: 171227 - DNA, 30 bp, Artificial Sequence
  Synthetic oligonucleotide
tgatcttcgccgagtgaaagttaagggaga

SEQ ID NO: 171228 - DNA, 30 bp, Artificial Sequence
  Synthetic oligonucleotide
gcaccagttctcgacagtgcgtcagggaga

SEQ ID NO: 171229 - DNA, 30 bp, Artificial Sequence
  Synthetic oligonucleotide
agataagtgaaatatgtgggtagagggaga

SEQ ID NO: 171230 - DNA, 30 bp, Artificial Sequence
  Synthetic oligonucleotide
cacttttatgatacactagcgatatggaga

SEQ ID NO: 171231 - DNA, 31 bp, Artificial Sequence
  Synthetic oligonucleotide
gggtggtctcgggacggcggaaaggtggaga

SEQ ID NO: 171232 - DNA, 30 bp, Artificial Sequence
  Synthetic oligonucleotide
cattcccccgggcagtaactagggtggaga

SEQ ID NO: 171233 - DNA, 30 bp, Artificial Sequence
  Synthetic oligonucleotide
gtgatgggagtatagctattcgggtggaga

SEQ ID NO: 171234 - DNA, 30 bp, Artificial Sequence
  Synthetic oligonucleotide
catggggcaacagacgattccacttggaga

SEQ ID NO: 171235 - DNA, 30 bp, Artificial Sequence
  Synthetic oligonucleotide
tgcgaccagtgagcatgaaaagcttggaga

SEQ ID NO: 171236 - DNA, 30 bp, Artificial Sequence
  Synthetic oligonucleotide
tatgtcctaagctgcgacagtgcaatgaga

SEQ ID NO: 171237 - DNA, 30 bp, Artificial Sequence
  Synthetic oligonucleotide
ccttatttagtaagaataaatgcgatgaga

SEQ ID NO: 171238 - DNA, 30 bp, Artificial Sequence
  Synthetic oligonucleotide
tagcagtgaggaatactggtggttatgaga

SEQ ID NO: 171239 - DNA, 30 bp, Artificial Sequence
  Synthetic oligonucleotide
ggccaagaccgttgtgccccatgactgaga

SEQ ID NO: 171240 - DNA, 30 bp, Artificial Sequence
  Synthetic oligonucleotide
cttatgatactgttgctccagaccctgaga

SEQ ID NO: 171241 - DNA, 30 bp, Artificial Sequence
  Synthetic oligonucleotide
gttccaccaagagcgagctatggtctgaga

SEQ ID NO: 171242 - DNA, 30 bp, Artificial Sequence
  Synthetic oligonucleotide
cgcacaggattctagtgccggcgagtgaga

SEQ ID NO: 171243 - DNA, 30 bp, Artificial Sequence
  Synthetic oligonucleotide
ttgaacgcgggcgggcctagtcaggtgaga

SEQ ID NO: 171244 - DNA, 30 bp, Artificial Sequence
  Synthetic oligonucleotide
agggattatgccaaacacagtttggtgaga

SEQ ID NO: 171245 - DNA, 30 bp, Artificial Sequence
  Synthetic oligonucleotide
acgacatattgggctccggaggctgtgaga

SEQ ID NO: 171246 - DNA, 30 bp, Artificial Sequence
  Synthetic oligonucleotide
gccgggaaccgcatcgttgagcgtgtgaga

SEQ ID NO: 171247 - DNA, 30 bp, Artificial Sequence
  Synthetic oligonucleotide
cacggatcgggctttagatgagcattgaga

SEQ ID NO: 171248 - DNA, 30 bp, Artificial Sequence
  Synthetic oligonucleotide
ccccgacgggtcggtgcgcgggcattgaga

SEQ ID NO: 171249 - DNA, 30 bp, Artificial Sequence
  Synthetic oligonucleotide
aacgcaatctatttcgtggtatagttgaga

SEQ ID NO: 171250 - DNA, 30 bp, Artificial Sequence
  Synthetic oligonucleotide
atacagacgtggctgtcatgagcaaataga

SEQ ID NO: 171251 - DNA, 31 bp, Artificial Sequence
  Synthetic oligonucleotide
acttagaaccacatggtcataatgaaataga

SEQ ID NO: 171252 - DNA, 30 bp, Artificial Sequence
  Synthetic oligonucleotide
cccttaagctagcatcgttgggtcaataga

SEQ ID NO: 171253 - DNA, 30 bp, Artificial Sequence
  Synthetic oligonucleotide
agtggcgatgaatcgccaatgtagaataga

SEQ ID NO: 171254 - DNA, 30 bp, Artificial Sequence
  Synthetic oligonucleotide
tgagtcggttggaagtaactaaataataga

SEQ ID NO: 171255 - DNA, 30 bp, Artificial Sequence
  Synthetic oligonucleotide
gcccaaaggtttgaagttaaacaacataga

SEQ ID NO: 171256 - DNA, 30 bp, Artificial Sequence
  Synthetic oligonucleotide
gcgtcagaggtggtgcgtcccacatataga

SEQ ID NO: 171257 - DNA, 30 bp, Artificial Sequence
  Synthetic oligonucleotide
gcacggaggcacgttagtatcacatataga

SEQ ID NO: 171258 - DNA, 30 bp, Artificial Sequence
  Synthetic oligonucleotide
gcttcagggggcaaatagagtctctataga

SEQ ID NO: 171259 - DNA, 30 bp, Artificial Sequence
  Synthetic oligonucleotide
ggtgcatacgttgagagggaatagtataga

SEQ ID NO: 171260 - DNA, 30 bp, Artificial Sequence
  Synthetic oligonucleotide
ttgacaaagtgtgccgaatgttcttataga

SEQ ID NO: 171261 - DNA, 30 bp, Artificial Sequence
  Synthetic oligonucleotide
ccggccctagtgctgtagagggaaactaga

SEQ ID NO: 171262 - DNA, 30 bp, Artificial Sequence
  Synthetic oligonucleotide
aggattagccgtagaatcatcccaactaga

SEQ ID NO: 171263 - DNA, 30 bp, Artificial Sequence
  Synthetic oligonucleotide
aaggtgcggcatccaatcgcatgaactaga

SEQ ID NO: 171264 - DNA, 30 bp, Artificial Sequence
  Synthetic oligonucleotide
tgtttataggattacttcggatacactaga

SEQ ID NO: 171265 - DNA, 30 bp, Artificial Sequence
  Synthetic oligonucleotide
aagaatctaagaccattagaagccactaga

SEQ ID NO: 171266 - DNA, 30 bp, Artificial Sequence
  Synthetic oligonucleotide
tggcactaacggcccactatacgcactaga

SEQ ID NO: 171267 - DNA, 30 bp, Artificial Sequence
  Synthetic oligonucleotide
catcctccttcggggtggaacggcactaga

SEQ ID NO: 171268 - DNA, 30 bp, Artificial Sequence
  Synthetic oligonucleotide
gctggcgcgcacgacacgttatgcactaga

SEQ ID NO: 171269 - DNA, 30 bp, Artificial Sequence
  Synthetic oligonucleotide
gggaatgggtcacggtcactagcacctaga

SEQ ID NO: 171270 - DNA, 30 bp, Artificial Sequence
  Synthetic oligonucleotide
caatatcagtgacctacaaggagacctaga

SEQ ID NO: 171271 - DNA, 30 bp, Artificial Sequence
  Synthetic oligonucleotide
tgctcccgtcaaataatcgagaagcctaga

SEQ ID NO: 171272 - DNA, 30 bp, Artificial Sequence
  Synthetic oligonucleotide
tacagggataagcttaaagactagcctaga

SEQ ID NO: 171273 - DNA, 30 bp, Artificial Sequence
  Synthetic oligonucleotide
gcgtggagcagttagtaaattccgcctaga

SEQ ID NO: 171274 - DNA, 30 bp, Artificial Sequence
  Synthetic oligonucleotide
gggtaagtaatcatgcgtcttttgcctaga

SEQ ID NO: 171275 - DNA, 30 bp, Artificial Sequence
  Synthetic oligonucleotide
ccagcaaacgatcaatgaaggtaatctaga

SEQ ID NO: 171276 - DNA, 30 bp, Artificial Sequence
  Synthetic oligonucleotide
gcgcggctgtcgcaaagtagttcatctaga

SEQ ID NO: 171277 - DNA, 30 bp, Artificial Sequence
  Synthetic oligonucleotide
taggacgagcgtatgagagaaatatctaga

SEQ ID NO: 171278 - DNA, 30 bp, Artificial Sequence
  Synthetic oligonucleotide
ggtactgcagtgtgactattaatgtctaga

SEQ ID NO: 171279 - DNA, 30 bp, Artificial Sequence
  Synthetic oligonucleotide
agagcgaaccttttaaacggaatgagtaga

SEQ ID NO: 171280 - DNA, 30 bp, Artificial Sequence
  Synthetic oligonucleotide
ggaacgatagggcatacctaagtgagtaga

SEQ ID NO: 171281 - DNA, 30 bp, Artificial Sequence
  Synthetic oligonucleotide
cataaggcagacggtcaatactatagtaga

SEQ ID NO: 171282 - DNA, 30 bp, Artificial Sequence
  Synthetic oligonucleotide
gagacaggtggcaatttatcacaacgtaga

SEQ ID NO: 171283 - DNA, 30 bp, Artificial Sequence
  Synthetic oligonucleotide
actattgcacggggcggcctcagacgtaga

SEQ ID NO: 171284 - DNA, 30 bp, Artificial Sequence
  Synthetic oligonucleotide
agcacgagcaaaccaccgctggaccgtaga

SEQ ID NO: 171285 - DNA, 30 bp, Artificial Sequence
  Synthetic oligonucleotide
gaagcgtggtatttgatatgtacccgtaga

SEQ ID NO: 171286 - DNA, 30 bp, Artificial Sequence
  Synthetic oligonucleotide
atgaaacttgcctcgagttatattcgtaga

SEQ ID NO: 171287 - DNA, 30 bp, Artificial Sequence
  Synthetic oligonucleotide
tagctgatcgtcataacgcgataaggtaga

SEQ ID NO: 171288 - DNA, 30 bp, Artificial Sequence
  Synthetic oligonucleotide
cgggactcatccgctgtgggtagaggtaga

SEQ ID NO: 171289 - DNA, 30 bp, Artificial Sequence
  Synthetic oligonucleotide
catcccgacccgtgccggataaagggtaga

SEQ ID NO: 171290 - DNA, 30 bp, Artificial Sequence
  Synthetic oligonucleotide
tctacggtcctaatagtcagcacgggtaga

SEQ ID NO: 171291 - DNA, 30 bp, Artificial Sequence
  Synthetic oligonucleotide
gaacagggtcacgtcacgggagggggtaga

SEQ ID NO: 171292 - DNA, 30 bp, Artificial Sequence
  Synthetic oligonucleotide
aaccggactgggacaatggattctggtaga

SEQ ID NO: 171293 - DNA, 30 bp, Artificial Sequence
  Synthetic oligonucleotide
tccagcaataaacagttactggaatgtaga

SEQ ID NO: 171294 - DNA, 31 bp, Artificial Sequence
  Synthetic oligonucleotide
catttgccggggatgatataacgcatgtaga

SEQ ID NO: 171295 - DNA, 30 bp, Artificial Sequence
  Synthetic oligonucleotide
gctgtaccaaaaatgcgaagctagtgtaga

SEQ ID NO: 171296 - DNA, 30 bp, Artificial Sequence
  Synthetic oligonucleotide
accgccaacattgcaaccccggggtgtaga

SEQ ID NO: 171297 - DNA, 30 bp, Artificial Sequence
  Synthetic oligonucleotide
atgcaataattaaaacttagtccaattaga

SEQ ID NO: 171298 - DNA, 30 bp, Artificial Sequence
  Synthetic oligonucleotide
cgtgggggagtgtattcgggagcaattaga

SEQ ID NO: 171299 - DNA, 30 bp, Artificial Sequence
  Synthetic oligonucleotide
ggtggcgtaatgcgtgcccatttaattaga

SEQ ID NO: 171300 - DNA, 30 bp, Artificial Sequence
  Synthetic oligonucleotide
agctgactcaatcctgcatgtgacattaga

SEQ ID NO: 171301 - DNA, 30 bp, Artificial Sequence
  Synthetic oligonucleotide
gagcagaatctggaggcaaaactgattaga

SEQ ID NO: 171302 - DNA, 30 bp, Artificial Sequence
  Synthetic oligonucleotide
cgttgtacatccagccgcgcctagcttaga

SEQ ID NO: 171303 - DNA, 30 bp, Artificial Sequence
  Synthetic oligonucleotide
ggggaaactgaactcctgggacatcttaga

SEQ ID NO: 171304 - DNA, 30 bp, Artificial Sequence
  Synthetic oligonucleotide
cagcaatagcaagacgaacccgaagttaga

SEQ ID NO: 171305 - DNA, 30 bp, Artificial Sequence
  Synthetic oligonucleotide
gaactcgttaaagaatggagataagttaga

SEQ ID NO: 171306 - DNA, 30 bp, Artificial Sequence
  Synthetic oligonucleotide
tcaattgggtaggtgcaccgcttcgttaga

SEQ ID NO: 171307 - DNA, 30 bp, Artificial Sequence
  Synthetic oligonucleotide
ccggcggagacaatatagcgcggggttaga

SEQ ID NO: 171308 - DNA, 30 bp, Artificial Sequence
  Synthetic oligonucleotide
gtgggaaatagctgctggctctgtgttaga

SEQ ID NO: 171309 - DNA, 30 bp, Artificial Sequence
  Synthetic oligonucleotide
catcggtgggaggggagatgtcttgttaga

SEQ ID NO: 171310 - DNA, 30 bp, Artificial Sequence
  Synthetic oligonucleotide
cgccatagttgtagctccctgttcaaacga

SEQ ID NO: 171311 - DNA, 30 bp, Artificial Sequence
  Synthetic oligonucleotide
ttagcggttgttgagtctagcttgaaacga

SEQ ID NO: 171312 - DNA, 30 bp, Artificial Sequence
  Synthetic oligonucleotide
gcaggtggggacgtaaaaatatgacaacga

SEQ ID NO: 171313 - DNA, 30 bp, Artificial Sequence
  Synthetic oligonucleotide
acagcacggatgaattttgatttacaacga

SEQ ID NO: 171314 - DNA, 30 bp, Artificial Sequence
  Synthetic oligonucleotide
cagtcattctcatgagtgcgttgccaacga

SEQ ID NO: 171315 - DNA, 30 bp, Artificial Sequence
  Synthetic oligonucleotide
tctttgtaccgcccttacaataagcaacga

SEQ ID NO: 171316 - DNA, 30 bp, Artificial Sequence
  Synthetic oligonucleotide
aactgacacatgttctagtcgtagcaacga

SEQ ID NO: 171317 - DNA, 30 bp, Artificial Sequence
  Synthetic oligonucleotide
gcaacgtaagattctgaccaaccataacga

SEQ ID NO: 171318 - DNA, 30 bp, Artificial Sequence
  Synthetic oligonucleotide
acaagtttgactcgggaggacagataacga

SEQ ID NO: 171319 - DNA, 30 bp, Artificial Sequence
  Synthetic oligonucleotide
catggccgtacatgccggggcaggacacga

SEQ ID NO: 171320 - DNA, 30 bp, Artificial Sequence
  Synthetic oligonucleotide
tcattacgagtgggataggatagtacacga

SEQ ID NO: 171321 - DNA, 30 bp, Artificial Sequence
  Synthetic oligonucleotide
agtctacgtccccaagctgaccccccacga

SEQ ID NO: 171322 - DNA, 30 bp, Artificial Sequence
  Synthetic oligonucleotide
taggcattgggctataaatgcgagccacga

SEQ ID NO: 171323 - DNA, 30 bp, Artificial Sequence
  Synthetic oligonucleotide
ttcgtgatagtatagacactgacagcacga

SEQ ID NO: 171324 - DNA, 30 bp, Artificial Sequence
  Synthetic oligonucleotide
gcactacgggttggatggataggggcacga

SEQ ID NO: 171325 - DNA, 30 bp, Artificial Sequence
  Synthetic oligonucleotide
tgccgaccgtgacacgaaaggctggcacga

SEQ ID NO: 171326 - DNA, 30 bp, Artificial Sequence
  Synthetic oligonucleotide
cactccgactcacccgatgtaaatgcacga

SEQ ID NO: 171327 - DNA, 30 bp, Artificial Sequence
  Synthetic oligonucleotide
gcaaaatcgcaacaagaagccggtgcacga

SEQ ID NO: 171328 - DNA, 30 bp, Artificial Sequence
  Synthetic oligonucleotide
tcggccgggaaattgcttcccggatcacga

SEQ ID NO: 171329 - DNA, 30 bp, Artificial Sequence
  Synthetic oligonucleotide
tcaggaagaatatcgttcaatatctcacga

SEQ ID NO: 171330 - DNA, 30 bp, Artificial Sequence
  Synthetic oligonucleotide
ggaggtctttatttgcgaatcggaagacga

SEQ ID NO: 171331 - DNA, 30 bp, Artificial Sequence
  Synthetic oligonucleotide
ctatcaggggaaaacagtccagccagacga

SEQ ID NO: 171332 - DNA, 30 bp, Artificial Sequence
  Synthetic oligonucleotide
gaacataagacctttagtgaatccagacga

SEQ ID NO: 171333 - DNA, 30 bp, Artificial Sequence
  Synthetic oligonucleotide
actaggtcgttaccggtgatgtgcagacga

SEQ ID NO: 171334 - DNA, 30 bp, Artificial Sequence
  Synthetic oligonucleotide
aatacggctacgctcggacatgaccgacga

SEQ ID NO: 171335 - DNA, 30 bp, Artificial Sequence
  Synthetic oligonucleotide
gatcattaggtcacagtacactaccgacga

SEQ ID NO: 171336 - DNA, 30 bp, Artificial Sequence
  Synthetic oligonucleotide
ccgcctcagctatcaatccgagagcgacga

SEQ ID NO: 171337 - DNA, 30 bp, Artificial Sequence
  Synthetic oligonucleotide
gcacgcacggcgtacattgcaattcgacga

SEQ ID NO: 171338 - DNA, 30 bp, Artificial Sequence
  Synthetic oligonucleotide
gaaggatgatgaacgggcttatcaggacga

SEQ ID NO: 171339 - DNA, 30 bp, Artificial Sequence
  Synthetic oligonucleotide
ttatagaatcaatagaggagagagggacga

SEQ ID NO: 171340 - DNA, 30 bp, Artificial Sequence
  Synthetic oligonucleotide
gagcttcaggattaacgctcaaactgacga

SEQ ID NO: 171341 - DNA, 30 bp, Artificial Sequence
  Synthetic oligonucleotide
tatcgatgtagtaggcgtgtagggtgacga

SEQ ID NO: 171342 - DNA, 30 bp, Artificial Sequence
  Synthetic oligonucleotide
caaggctcagtggtccctgcttaaatacga

SEQ ID NO: 171343 - DNA, 30 bp, Artificial Sequence
  Synthetic oligonucleotide
atcagagttggtatgtaccttagactacga

SEQ ID NO: 171344 - DNA, 30 bp, Artificial Sequence
  Synthetic oligonucleotide
tcattccttacgaggggtgttcacctacga

SEQ ID NO: 171345 - DNA, 30 bp, Artificial Sequence
  Synthetic oligonucleotide
tcagcttggctatataagagatgcctacga

SEQ ID NO: 171346 - DNA, 30 bp, Artificial Sequence
  Synthetic oligonucleotide
cggccctaaaagtggagtctcttagtacga

SEQ ID NO: 171347 - DNA, 30 bp, Artificial Sequence
  Synthetic oligonucleotide
catgacctggtcggctgtagcaacgtacga

SEQ ID NO: 171348 - DNA, 30 bp, Artificial Sequence
  Synthetic oligonucleotide
gtgagtctgccggatttattgaacgtacga

SEQ ID NO: 171349 - DNA, 30 bp, Artificial Sequence
  Synthetic oligonucleotide
gtatcaaagaaaaggttctggcgcgtacga

SEQ ID NO: 171350 - DNA, 30 bp, Artificial Sequence
  Synthetic oligonucleotide
gttgtcgcttagccagttagggcggtacga

SEQ ID NO: 171351 - DNA, 30 bp, Artificial Sequence
  Synthetic oligonucleotide
atcaggttagtaggagcagtgattgtacga

SEQ ID NO: 171352 - DNA, 30 bp, Artificial Sequence
  Synthetic oligonucleotide
caacggacgctcatcactgagagattacga

SEQ ID NO: 171353 - DNA, 30 bp, Artificial Sequence
  Synthetic oligonucleotide
gggtgagcacggactgttcaaggattacga

SEQ ID NO: 171354 - DNA, 30 bp, Artificial Sequence
  Synthetic oligonucleotide
tgcacgtcccgctggagtcttctcttacga

SEQ ID NO: 171355 - DNA, 30 bp, Artificial Sequence
  Synthetic oligonucleotide
ctatgcagatgacgcaaagggggtttacga

SEQ ID NO: 171356 - DNA, 30 bp, Artificial Sequence
  Synthetic oligonucleotide
cagtagaagtggaccgactggattttacga

SEQ ID NO: 171357 - DNA, 30 bp, Artificial Sequence
  Synthetic oligonucleotide
cactgtttaggttagactcttggaaaccga

SEQ ID NO: 171358 - DNA, 30 bp, Artificial Sequence
  Synthetic oligonucleotide
ggtcacatgcccctgaacggagtcaaccga

SEQ ID NO: 171359 - DNA, 30 bp, Artificial Sequence
  Synthetic oligonucleotide
ttaggtataccagcacattcgtggaaccga

SEQ ID NO: 171360 - DNA, 30 bp, Artificial Sequence
  Synthetic oligonucleotide
gcccactgggacattgcagggcataaccga

SEQ ID NO: 171361 - DNA, 30 bp, Artificial Sequence
  Synthetic oligonucleotide
agcaaatttcggaaggggggaggtaaccga

SEQ ID NO: 171362 - DNA, 30 bp, Artificial Sequence
  Synthetic oligonucleotide
ctccccacccaccgaaagtttctccaccga

SEQ ID NO: 171363 - DNA, 30 bp, Artificial Sequence
  Synthetic oligonucleotide
cgccgtcatgcttacaagccctcgcaccga

SEQ ID NO: 171364 - DNA, 31 bp, Artificial Sequence
  Synthetic oligonucleotide
ttcgtacagactaccggctgccctgcaccga

SEQ ID NO: 171365 - DNA, 30 bp, Artificial Sequence
  Synthetic oligonucleotide
tctacaggactgataggcaatgaagaccga

SEQ ID NO: 171366 - DNA, 30 bp, Artificial Sequence
  Synthetic oligonucleotide
ccatcgtattacaaaacaacgtgggaccga

SEQ ID NO: 171367 - DNA, 30 bp, Artificial Sequence
  Synthetic oligonucleotide
accccccgaacccataggggcagtgaccga

SEQ ID NO: 171368 - DNA, 30 bp, Artificial Sequence
  Synthetic oligonucleotide
aaggacccgtaatccagagttcgaacccga

SEQ ID NO: 171369 - DNA, 30 bp, Artificial Sequence
  Synthetic oligonucleotide
cggagcgttgtcaatgatcttaccacccga

SEQ ID NO: 171370 - DNA, 30 bp, Artificial Sequence
  Synthetic oligonucleotide
attcagtcttcacagcccaggatcacccga

SEQ ID NO: 171371 - DNA, 30 bp, Artificial Sequence
  Synthetic oligonucleotide
gtctctacggaagtataaagactgacccga

SEQ ID NO: 171372 - DNA, 30 bp, Artificial Sequence
  Synthetic oligonucleotide
tcatacttttagatacggcgtggtccccga

SEQ ID NO: 171373 - DNA, 30 bp, Artificial Sequence
  Synthetic oligonucleotide
ttcatcctgacctcactcggagaagcccga

SEQ ID NO: 171374 - DNA, 30 bp, Artificial Sequence
  Synthetic oligonucleotide
gcttgcacgaacgtacgaccctctgcccga

SEQ ID NO: 171375 - DNA, 30 bp, Artificial Sequence
  Synthetic oligonucleotide
tggttacctagctatcgctcgacttcccga

SEQ ID NO: 171376 - DNA, 30 bp, Artificial Sequence
  Synthetic oligonucleotide
aggggcttacttgagcatacaacaagccga

SEQ ID NO: 171377 - DNA, 30 bp, Artificial Sequence
  Synthetic oligonucleotide
cgttgcaatcctcagtatatagaacgccga

SEQ ID NO: 171378 - DNA, 30 bp, Artificial Sequence
  Synthetic oligonucleotide
gggacttttgaaagctagagttgccgccga

SEQ ID NO: 171379 - DNA, 30 bp, Artificial Sequence
  Synthetic oligonucleotide
aaatacggcagtgaggcctgtctgcgccga

SEQ ID NO: 171380 - DNA, 30 bp, Artificial Sequence
  Synthetic oligonucleotide
catcaaaatgtattaacggcaggaggccga

SEQ ID NO: 171381 - DNA, 30 bp, Artificial Sequence
  Synthetic oligonucleotide
ggatggagctcgacaaatgggaacggccga

SEQ ID NO: 171382 - DNA, 30 bp, Artificial Sequence
  Synthetic oligonucleotide
acagtgaacgaattactagctcgcggccga

SEQ ID NO: 171383 - DNA, 30 bp, Artificial Sequence
  Synthetic oligonucleotide
aatactcgactaagaaagaaatgcggccga

SEQ ID NO: 171384 - DNA, 30 bp, Artificial Sequence
  Synthetic oligonucleotide
agctttcagtcgctcactgtgtagggccga

SEQ ID NO: 171385 - DNA, 30 bp, Artificial Sequence
  Synthetic oligonucleotide
gcccctaacactagaattaacagatgccga

SEQ ID NO: 171386 - DNA, 30 bp, Artificial Sequence
  Synthetic oligonucleotide
tgtgactttgaacaccgttaaggaatccga

SEQ ID NO: 171387 - DNA, 30 bp, Artificial Sequence
  Synthetic oligonucleotide
tggtcgaggagatactatcgacagatccga

SEQ ID NO: 171388 - DNA, 30 bp, Artificial Sequence
  Synthetic oligonucleotide
aacaaagggacttgctccttagagatccga

SEQ ID NO: 171389 - DNA, 30 bp, Artificial Sequence
  Synthetic oligonucleotide
ggtatccagacacagaccacattgatccga

SEQ ID NO: 171390 - DNA, 30 bp, Artificial Sequence
  Synthetic oligonucleotide
cttgtagttcattcaaggcggcatatccga

SEQ ID NO: 171391 - DNA, 31 bp, Artificial Sequence
  Synthetic oligonucleotide
cattgtcggttggggcaagccacaagtccga

SEQ ID NO: 171392 - DNA, 30 bp, Artificial Sequence
  Synthetic oligonucleotide
ctgtcgtgtgaggtcgaccgccgagtccga

SEQ ID NO: 171393 - DNA, 30 bp, Artificial Sequence
  Synthetic oligonucleotide
gtgggccaagctggctgagagaatttccga

SEQ ID NO: 171394 - DNA, 30 bp, Artificial Sequence
  Synthetic oligonucleotide
ataggatcaactgtgaagttgacaaagcga

SEQ ID NO: 171395 - DNA, 30 bp, Artificial Sequence
  Synthetic oligonucleotide
cttgaatgatcaattttcattcgaaagcga

SEQ ID NO: 171396 - DNA, 30 bp, Artificial Sequence
  Synthetic oligonucleotide
gccccgcgctgaacaaagatctccaagcga

SEQ ID NO: 171397 - DNA, 30 bp, Artificial Sequence
  Synthetic oligonucleotide
acatacccctgtcctttaaggcataagcga

SEQ ID NO: 171398 - DNA, 30 bp, Artificial Sequence
  Synthetic oligonucleotide
gcagtggagccaggccaatggtcacagcga

SEQ ID NO: 171399 - DNA, 30 bp, Artificial Sequence
  Synthetic oligonucleotide
gtaaattttgacatcacaggtagccagcga

SEQ ID NO: 171400 - DNA, 30 bp, Artificial Sequence
  Synthetic oligonucleotide
taatcggtcttttagcaagcgtgccagcga

SEQ ID NO: 171401 - DNA, 30 bp, Artificial Sequence
  Synthetic oligonucleotide
cctccattgggggggaactagggtcagcga

SEQ ID NO: 171402 - DNA, 30 bp, Artificial Sequence
  Synthetic oligonucleotide
gttaccggcacaacggtacccccagagcga

SEQ ID NO: 171403 - DNA, 30 bp, Artificial Sequence
  Synthetic oligonucleotide
aactccgtccataagctgatcggtgagcga

SEQ ID NO: 171404 - DNA, 30 bp, Artificial Sequence
  Synthetic oligonucleotide
tgtgtgtagggaagtaatagaaaatagcga

SEQ ID NO: 171405 - DNA, 30 bp, Artificial Sequence
  Synthetic oligonucleotide
agaacggtagtccacatggtacactagcga

SEQ ID NO: 171406 - DNA, 30 bp, Artificial Sequence
  Synthetic oligonucleotide
aaatctgccattgtgagggacggctagcga

SEQ ID NO: 171407 - DNA, 30 bp, Artificial Sequence
  Synthetic oligonucleotide
tacgttgactaagttagtgttatctagcga

SEQ ID NO: 171408 - DNA, 30 bp, Artificial Sequence
  Synthetic oligonucleotide
tcgtcatgctgatgaagaagggcgtagcga

SEQ ID NO: 171409 - DNA, 30 bp, Artificial Sequence
  Synthetic oligonucleotide
ggaggaccgagagtcactcgtcggtagcga

SEQ ID NO: 171410 - DNA, 30 bp, Artificial Sequence
  Synthetic oligonucleotide
tcaatggcacgcgtatttgtgagttagcga

SEQ ID NO: 171411 - DNA, 30 bp, Artificial Sequence
  Synthetic oligonucleotide
tcgtatttcaagcattgacatggttagcga

SEQ ID NO: 171412 - DNA, 30 bp, Artificial Sequence
  Synthetic oligonucleotide
acaatcatgggcaccaggagtatgacgcga

SEQ ID NO: 171413 - DNA, 30 bp, Artificial Sequence
  Synthetic oligonucleotide
aatgttggcatcaacaataccgttacgcga

SEQ ID NO: 171414 - DNA, 30 bp, Artificial Sequence
  Synthetic oligonucleotide
tagtcacaggttatatgcaccgtgccgcga

SEQ ID NO: 171415 - DNA, 30 bp, Artificial Sequence
  Synthetic oligonucleotide
aaagataaaagggaaagtagtcttccgcga

SEQ ID NO: 171416 - DNA, 30 bp, Artificial Sequence
  Synthetic oligonucleotide
aatgatgtgggttcaatggtgtcagcgcga

SEQ ID NO: 171417 - DNA, 30 bp, Artificial Sequence
  Synthetic oligonucleotide
tttatcgtgcacccggaagacaaggcgcga

SEQ ID NO: 171418 - DNA, 30 bp, Artificial Sequence
  Synthetic oligonucleotide
ctcacaatgtcgagtaataatcgtgcgcga

SEQ ID NO: 171419 - DNA, 30 bp, Artificial Sequence
  Synthetic oligonucleotide
tccaggaccataacgcaactactatcgcga

SEQ ID NO: 171420 - DNA, 30 bp, Artificial Sequence
  Synthetic oligonucleotide
cggccgagctccggcccgctgaagtcgcga

SEQ ID NO: 171421 - DNA, 30 bp, Artificial Sequence
  Synthetic oligonucleotide
tccaaaggacggctgctttaagggtcgcga

SEQ ID NO: 171422 - DNA, 30 bp, Artificial Sequence
  Synthetic oligonucleotide
taagcgcggtaagagagtccggtgtcgcga

SEQ ID NO: 171423 - DNA, 30 bp, Artificial Sequence
  Synthetic oligonucleotide
acacttctttaaagcccgagacgaaggcga

SEQ ID NO: 171424 - DNA, 30 bp, Artificial Sequence
  Synthetic oligonucleotide
gcgacacccttgttaaagttcaccaggcga

SEQ ID NO: 171425 - DNA, 30 bp, Artificial Sequence
  Synthetic oligonucleotide
ggagtatccagcttctgaggttccaggcga

SEQ ID NO: 171426 - DNA, 30 bp, Artificial Sequence
  Synthetic oligonucleotide
tagggatgtgctgtagcctggaataggcga

SEQ ID NO: 171427 - DNA, 30 bp, Artificial Sequence
  Synthetic oligonucleotide
gagcagtggctaccccggggcgcacggcga

SEQ ID NO: 171428 - DNA, 30 bp, Artificial Sequence
  Synthetic oligonucleotide
cacacatggcttggccttctggaccggcga

SEQ ID NO: 171429 - DNA, 30 bp, Artificial Sequence
  Synthetic oligonucleotide
tgactaccgaactagggcccgcggcggcga

SEQ ID NO: 171430 - DNA, 30 bp, Artificial Sequence
  Synthetic oligonucleotide
attaatacatcgggaaaggtaactcggcga

SEQ ID NO: 171431 - DNA, 30 bp, Artificial Sequence
  Synthetic oligonucleotide
gattgagtgtgaagaaacttgaaagggcga

SEQ ID NO: 171432 - DNA, 30 bp, Artificial Sequence
  Synthetic oligonucleotide
gcgaggggtattttcgcattatcggggcga

SEQ ID NO: 171433 - DNA, 30 bp, Artificial Sequence
  Synthetic oligonucleotide
ttgtcctggatacaaaaacgcttggggcga

SEQ ID NO: 171434 - DNA, 30 bp, Artificial Sequence
  Synthetic oligonucleotide
ggggagtaacttcaaggaaaggtatggcga

SEQ ID NO: 171435 - DNA, 30 bp, Artificial Sequence
  Synthetic oligonucleotide
caagcctctgtatcaggggaccattggcga

SEQ ID NO: 171436 - DNA, 30 bp, Artificial Sequence
  Synthetic oligonucleotide
ttgttatatcctccctatgctagaatgcga

SEQ ID NO: 171437 - DNA, 30 bp, Artificial Sequence
  Synthetic oligonucleotide
tactgtaggcaatgttgtaagcgaatgcga

SEQ ID NO: 171438 - DNA, 30 bp, Artificial Sequence
  Synthetic oligonucleotide
acttagtattccttcagcaaactcatgcga

SEQ ID NO: 171439 - DNA, 30 bp, Artificial Sequence
  Synthetic oligonucleotide
ctggcgtcaaaagcagagccctggatgcga

SEQ ID NO: 171440 - DNA, 30 bp, Artificial Sequence
  Synthetic oligonucleotide
agaggtcgaagtcgcacttagtctatgcga

SEQ ID NO: 171441 - DNA, 30 bp, Artificial Sequence
  Synthetic oligonucleotide
ttgatatgcatacctgcagtgcaagtgcga

SEQ ID NO: 171442 - DNA, 30 bp, Artificial Sequence
  Synthetic oligonucleotide
agttggctcgccaggggccaacacgtgcga

SEQ ID NO: 171443 - DNA, 30 bp, Artificial Sequence
  Synthetic oligonucleotide
gacgtgatctgcgtgtttctcgtggtgcga

SEQ ID NO: 171444 - DNA, 30 bp, Artificial Sequence
  Synthetic oligonucleotide
tccggactcaaagtactaccgggattgcga

SEQ ID NO: 171445 - DNA, 30 bp, Artificial Sequence
  Synthetic oligonucleotide
gtcggtgtcgggacgatacgtggattgcga

SEQ ID NO: 171446 - DNA, 30 bp, Artificial Sequence
  Synthetic oligonucleotide
aggacctcccgcattgatggagggttgcga

SEQ ID NO: 171447 - DNA, 30 bp, Artificial Sequence
  Synthetic oligonucleotide
cgttatcaggagtgcaggggtgacaatcga

SEQ ID NO: 171448 - DNA, 30 bp, Artificial Sequence
  Synthetic oligonucleotide
actggatcgtagcgctcaggagagaatcga

SEQ ID NO: 171449 - DNA, 30 bp, Artificial Sequence
  Synthetic oligonucleotide
ggaaattcgagctcaatttttgagaatcga

SEQ ID NO: 171450 - DNA, 30 bp, Artificial Sequence
  Synthetic oligonucleotide
gcgaagagtatgacctaggaccttaatcga

SEQ ID NO: 171451 - DNA, 30 bp, Artificial Sequence
  Synthetic oligonucleotide
gaatcaaccaaccgatcaacgcttaatcga

SEQ ID NO: 171452 - DNA, 30 bp, Artificial Sequence
  Synthetic oligonucleotide
gcgatataataaggtgtaatgcgacatcga

SEQ ID NO: 171453 - DNA, 30 bp, Artificial Sequence
  Synthetic oligonucleotide
gctcgggtatgatcaagaacaacccatcga

SEQ ID NO: 171454 - DNA, 30 bp, Artificial Sequence
  Synthetic oligonucleotide
gcgatatcgtacggcaggcgatagcatcga

SEQ ID NO: 171455 - DNA, 30 bp, Artificial Sequence
  Synthetic oligonucleotide
ataagtcgcttaattaaaagaggtcatcga

SEQ ID NO: 171456 - DNA, 30 bp, Artificial Sequence
  Synthetic oligonucleotide
atagcactaagtctggctagcccagatcga

SEQ ID NO: 171457 - DNA, 30 bp, Artificial Sequence
  Synthetic oligonucleotide
ggactacgctcataaacgtatggcgatcga

SEQ ID NO: 171458 - DNA, 30 bp, Artificial Sequence
  Synthetic oligonucleotide
tcaaagacgggtccgtaaggatatgatcga

SEQ ID NO: 171459 - DNA, 30 bp, Artificial Sequence
  Synthetic oligonucleotide
taaagagaatgttctaatggtcttgatcga

SEQ ID NO: 171460 - DNA, 30 bp, Artificial Sequence
  Synthetic oligonucleotide
agatatcgatgtaaatatcttggatatcga

SEQ ID NO: 171461 - DNA, 30 bp, Artificial Sequence
  Synthetic oligonucleotide
ctgatacagaaattatctggaatatatcga

SEQ ID NO: 171462 - DNA, 30 bp, Artificial Sequence
  Synthetic oligonucleotide
caatggatgaaccggtgcatatgctatcga

SEQ ID NO: 171463 - DNA, 30 bp, Artificial Sequence
  Synthetic oligonucleotide
agtactaagagtagagctagtaagtatcga

SEQ ID NO: 171464 - DNA, 30 bp, Artificial Sequence
  Synthetic oligonucleotide
gattagaatgctcgtagaccaacgtatcga

SEQ ID NO: 171465 - DNA, 30 bp, Artificial Sequence
  Synthetic oligonucleotide
actacttggtaaatctgtcacacttatcga

SEQ ID NO: 171466 - DNA, 30 bp, Artificial Sequence
  Synthetic oligonucleotide
cgcttatccccgtgcaaatagatttatcga

SEQ ID NO: 171467 - DNA, 30 bp, Artificial Sequence
  Synthetic oligonucleotide
cagaacaaaacctgggtttagcaaactcga

SEQ ID NO: 171468 - DNA, 30 bp, Artificial Sequence
  Synthetic oligonucleotide
tccttcgcccagccaaaatctcagactcga

SEQ ID NO: 171469 - DNA, 30 bp, Artificial Sequence
  Synthetic oligonucleotide
cgtgttcaagcctaagcacttaatactcga

SEQ ID NO: 171470 - DNA, 30 bp, Artificial Sequence
  Synthetic oligonucleotide
ccgaaggtgtgcatcgctcagcatactcga

SEQ ID NO: 171471 - DNA, 30 bp, Artificial Sequence
  Synthetic oligonucleotide
gccgccgaataccgctgcgggcctactcga

SEQ ID NO: 171472 - DNA, 30 bp, Artificial Sequence
  Synthetic oligonucleotide
acgatagctagacgactcgtcggtactcga

SEQ ID NO: 171473 - DNA, 30 bp, Artificial Sequence
  Synthetic oligonucleotide
gtacacttcaaaatattgttaagacctcga

SEQ ID NO: 171474 - DNA, 30 bp, Artificial Sequence
  Synthetic oligonucleotide
tgcggctacgcctacccttacactcctcga

SEQ ID NO: 171475 - DNA, 30 bp, Artificial Sequence
  Synthetic oligonucleotide
ggtacgactttacaatacgggcttcctcga

SEQ ID NO: 171476 - DNA, 30 bp, Artificial Sequence
  Synthetic oligonucleotide
ggggagattactgaggttctactcgctcga

SEQ ID NO: 171477 - DNA, 30 bp, Artificial Sequence
  Synthetic oligonucleotide
taccgcctacgaggcctcaagttcgctcga

SEQ ID NO: 171478 - DNA, 30 bp, Artificial Sequence
  Synthetic oligonucleotide
caagtgggcacctaccacttgtaggctcga

SEQ ID NO: 171479 - DNA, 30 bp, Artificial Sequence
  Synthetic oligonucleotide
ggattaggacgtgttagtgggctggctcga

SEQ ID NO: 171480 - DNA, 30 bp, Artificial Sequence
  Synthetic oligonucleotide
gaggagcgtctcattaccctacttgctcga

SEQ ID NO: 171481 - DNA, 30 bp, Artificial Sequence
  Synthetic oligonucleotide
ctcatgggtcactgggcaacataatctcga

SEQ ID NO: 171482 - DNA, 30 bp, Artificial Sequence
  Synthetic oligonucleotide
cgtaatttacgtggaaaatgcacatctcga

SEQ ID NO: 171483 - DNA, 30 bp, Artificial Sequence
  Synthetic oligonucleotide
ggcaagagttggtgggatacttgatctcga

SEQ ID NO: 171484 - DNA, 30 bp, Artificial Sequence
  Synthetic oligonucleotide
tcggcattgagctaagcgactagttctcga

SEQ ID NO: 171485 - DNA, 30 bp, Artificial Sequence
  Synthetic oligonucleotide
caagtatggatcaagggaccgaccagtcga

SEQ ID NO: 171486 - DNA, 30 bp, Artificial Sequence
  Synthetic oligonucleotide
accatctattgatgccttcagcagagtcga

SEQ ID NO: 171487 - DNA, 30 bp, Artificial Sequence
  Synthetic oligonucleotide
atgagatctaatcttactacggtgagtcga

SEQ ID NO: 171488 - DNA, 30 bp, Artificial Sequence
  Synthetic oligonucleotide
ggtgttgcttaaggtgcctggtctagtcga

SEQ ID NO: 171489 - DNA, 30 bp, Artificial Sequence
  Synthetic oligonucleotide
ccgccttgctgatacgaaacacatcgtcga

SEQ ID NO: 171490 - DNA, 30 bp, Artificial Sequence
  Synthetic oligonucleotide
atcgctcgttcaaggcatgctattcgtcga

SEQ ID NO: 171491 - DNA, 30 bp, Artificial Sequence
  Synthetic oligonucleotide
aagtcaaagagaaaaatgtgccaaggtcga

SEQ ID NO: 171492 - DNA, 30 bp, Artificial Sequence
  Synthetic oligonucleotide
ccagtgccagtccagcagagctccggtcga

SEQ ID NO: 171493 - DNA, 30 bp, Artificial Sequence
  Synthetic oligonucleotide
taacatactcggcacgatacaagcggtcga

SEQ ID NO: 171494 - DNA, 30 bp, Artificial Sequence
  Synthetic oligonucleotide
aaaacacggagacgtcgatgtttcggtcga

SEQ ID NO: 171495 - DNA, 30 bp, Artificial Sequence
  Synthetic oligonucleotide
tgccaacaatgtgcggttgtaaatggtcga

SEQ ID NO: 171496 - DNA, 30 bp, Artificial Sequence
  Synthetic oligonucleotide
gccattggcgaacactaagaatatggtcga

SEQ ID NO: 171497 - DNA, 30 bp, Artificial Sequence
  Synthetic oligonucleotide
cagcgggctggagtatacgccattggtcga

SEQ ID NO: 171498 - DNA, 30 bp, Artificial Sequence
  Synthetic oligonucleotide
gtgtatgcgaactattctaacgttggtcga

SEQ ID NO: 171499 - DNA, 30 bp, Artificial Sequence
  Synthetic oligonucleotide
cttcggaggcccaggtgggcgcaatgtcga

SEQ ID NO: 171500 - DNA, 30 bp, Artificial Sequence
  Synthetic oligonucleotide
gatacttcagagcgtgccctgggatgtcga

SEQ ID NO: 171501 - DNA, 30 bp, Artificial Sequence
  Synthetic oligonucleotide
gcgaggttaggcccagagtatagaattcga

SEQ ID NO: 171502 - DNA, 30 bp, Artificial Sequence
  Synthetic oligonucleotide
gtctggaacggataccagccatacattcga

SEQ ID NO: 171503 - DNA, 30 bp, Artificial Sequence
  Synthetic oligonucleotide
atggtaatcaaggactatgaacccattcga

SEQ ID NO: 171504 - DNA, 30 bp, Artificial Sequence
  Synthetic oligonucleotide
cagtccgagtcaatggtgaaatagattcga

SEQ ID NO: 171505 - DNA, 30 bp, Artificial Sequence
  Synthetic oligonucleotide
cagactggccctttgaaatcaaaacttcga

SEQ ID NO: 171506 - DNA, 30 bp, Artificial Sequence
  Synthetic oligonucleotide
gggccatgccagtctgggcgtatccttcga

SEQ ID NO: 171507 - DNA, 30 bp, Artificial Sequence
  Synthetic oligonucleotide
gattcagatgggtgcgaaccacggcttcga

SEQ ID NO: 171508 - DNA, 30 bp, Artificial Sequence
  Synthetic oligonucleotide
gaggcaatgttgaacccacattctcttcga

SEQ ID NO: 171509 - DNA, 30 bp, Artificial Sequence
  Synthetic oligonucleotide
ctgtacagcttaaggcccagctgtcttcga

SEQ ID NO: 171510 - DNA, 30 bp, Artificial Sequence
  Synthetic oligonucleotide
cgttgccatcagtttcaagcgccagttcga

SEQ ID NO: 171511 - DNA, 30 bp, Artificial Sequence
  Synthetic oligonucleotide
tttggccccaggaatgatcaacgagttcga

SEQ ID NO: 171512 - DNA, 30 bp, Artificial Sequence
  Synthetic oligonucleotide
ccagtgctcaggtatagtactatagttcga

SEQ ID NO: 171513 - DNA, 30 bp, Artificial Sequence
  Synthetic oligonucleotide
gcgtccggcagtatgcatcgcgtagttcga

SEQ ID NO: 171514 - DNA, 30 bp, Artificial Sequence
  Synthetic oligonucleotide
gacgtacagggatagttatttaaggttcga

SEQ ID NO: 171515 - DNA, 30 bp, Artificial Sequence
  Synthetic oligonucleotide
tgatcgcaaataaccccatgtaatgttcga

SEQ ID NO: 171516 - DNA, 30 bp, Artificial Sequence
  Synthetic oligonucleotide
cgtgacaatgagatccccccattatttcga

SEQ ID NO: 171517 - DNA, 30 bp, Artificial Sequence
  Synthetic oligonucleotide
gggtacacccgatgtgtccctgactttcga

SEQ ID NO: 171518 - DNA, 30 bp, Artificial Sequence
  Synthetic oligonucleotide
gtgatgatgggaatctatgtccattttcga

SEQ ID NO: 171519 - DNA, 30 bp, Artificial Sequence
  Synthetic oligonucleotide
agaagaagcgaaatcggcagcaaaaaagga

SEQ ID NO: 171520 - DNA, 30 bp, Artificial Sequence
  Synthetic oligonucleotide
ggacctctgacaaactttgttgaaaaagga

SEQ ID NO: 171521 - DNA, 30 bp, Artificial Sequence
  Synthetic oligonucleotide
acgaataagaaggaattcagaacaaaagga

SEQ ID NO: 171522 - DNA, 30 bp, Artificial Sequence
  Synthetic oligonucleotide
gaacaaatgctgacccgccaccgaaaagga

SEQ ID NO: 171523 - DNA, 30 bp, Artificial Sequence
  Synthetic oligonucleotide
agtaatggcacgggtccattacgcaaagga

SEQ ID NO: 171524 - DNA, 30 bp, Artificial Sequence
  Synthetic oligonucleotide
gacttcgagaagcgcactttgtgcaaagga

SEQ ID NO: 171525 - DNA, 30 bp, Artificial Sequence
  Synthetic oligonucleotide
acaagccgctatgtattatatcagaaagga

SEQ ID NO: 171526 - DNA, 30 bp, Artificial Sequence
  Synthetic oligonucleotide
tggccctcaatttctcttcatacgaaagga

SEQ ID NO: 171527 - DNA, 30 bp, Artificial Sequence
  Synthetic oligonucleotide
atatgtgcccgctgagacaaggtgaaagga

SEQ ID NO: 171528 - DNA, 30 bp, Artificial Sequence
  Synthetic oligonucleotide
agggatctgggttaactggactataaagga

SEQ ID NO: 171529 - DNA, 30 bp, Artificial Sequence
  Synthetic oligonucleotide
attccgggaggcattaacgcccctaaagga

SEQ ID NO: 171530 - DNA, 30 bp, Artificial Sequence
  Synthetic oligonucleotide
aaccgacggggcataaaaggggctaaagga

SEQ ID NO: 171531 - DNA, 30 bp, Artificial Sequence
  Synthetic oligonucleotide
atagtacatgaatattcagcacgtaaagga

SEQ ID NO: 171532 - DNA, 30 bp, Artificial Sequence
  Synthetic oligonucleotide
agcttatggtagccaggttgagtacaagga

SEQ ID NO: 171533 - DNA, 30 bp, Artificial Sequence
  Synthetic oligonucleotide
cacgcccacgttggatccactcgccaagga

SEQ ID NO: 171534 - DNA, 30 bp, Artificial Sequence
  Synthetic oligonucleotide
tcgatccggaaatgaagtctggatcaagga

SEQ ID NO: 171535 - DNA, 30 bp, Artificial Sequence
  Synthetic oligonucleotide
atcaaggcaggaccgaattgttccgaagga

SEQ ID NO: 171536 - DNA, 30 bp, Artificial Sequence
  Synthetic oligonucleotide
tggacggtgcgcagcagctatggggaagga

SEQ ID NO: 171537 - DNA, 30 bp, Artificial Sequence
  Synthetic oligonucleotide
cggcctcggtggttagggcaatatgaagga

SEQ ID NO: 171538 - DNA, 30 bp, Artificial Sequence
  Synthetic oligonucleotide
gaccgtctttgcaggtcagctggtgaagga

SEQ ID NO: 171539 - DNA, 30 bp, Artificial Sequence
  Synthetic oligonucleotide
taacaactcgtgaacttggcatgtgaagga

SEQ ID NO: 171540 - DNA, 30 bp, Artificial Sequence
  Synthetic oligonucleotide
gtgccagccgatgcagaattggagtaagga

SEQ ID NO: 171541 - DNA, 30 bp, Artificial Sequence
  Synthetic oligonucleotide
tacagctgtgtccggaagtcgggttaagga

SEQ ID NO: 171542 - DNA, 30 bp, Artificial Sequence
  Synthetic oligonucleotide
agatttcactggtatcgcgagccaacagga

SEQ ID NO: 171543 - DNA, 30 bp, Artificial Sequence
  Synthetic oligonucleotide
atgccagacagtgggacctgcatcacagga

SEQ ID NO: 171544 - DNA, 30 bp, Artificial Sequence
  Synthetic oligonucleotide
tgacatcaaacaataggctttccagcagga

SEQ ID NO: 171545 - DNA, 30 bp, Artificial Sequence
  Synthetic oligonucleotide
agtcgccgtagaatagtgttactagcagga

SEQ ID NO: 171546 - DNA, 30 bp, Artificial Sequence
  Synthetic oligonucleotide
cacgcatgaggcaaggctatcggggcagga

SEQ ID NO: 171547 - DNA, 30 bp, Artificial Sequence
  Synthetic oligonucleotide
gcatccatagctcgcaaggccactgcagga

SEQ ID NO: 171548 - DNA, 30 bp, Artificial Sequence
  Synthetic oligonucleotide
tgatgagtgtgcgtgtcgaattttgcagga

SEQ ID NO: 171549 - DNA, 30 bp, Artificial Sequence
  Synthetic oligonucleotide
tcaaaaactttatacatgcgtggatcagga

SEQ ID NO: 171550 - DNA, 30 bp, Artificial Sequence
  Synthetic oligonucleotide
tagatgaacattcaatcaagctcgtcagga

SEQ ID NO: 171551 - DNA, 30 bp, Artificial Sequence
  Synthetic oligonucleotide
attaatacagcgaaacctcagtcgtcagga

SEQ ID NO: 171552 - DNA, 30 bp, Artificial Sequence
  Synthetic oligonucleotide
gtaaatgtacgatgtcatcggtggtcagga

SEQ ID NO: 171553 - DNA, 30 bp, Artificial Sequence
  Synthetic oligonucleotide
agaactcccaatttatcatggctgtcagga

SEQ ID NO: 171554 - DNA, 29 bp, Artificial Sequence
  Synthetic oligonucleotide
cttacgcgtggcattaaacctacagagga

SEQ ID NO: 171555 - DNA, 30 bp, Artificial Sequence
  Synthetic oligonucleotide
ttgggcctctgaaataggcatcccagagga

SEQ ID NO: 171556 - DNA, 30 bp, Artificial Sequence
  Synthetic oligonucleotide
aagggtcagtaatgattggtacggagagga

SEQ ID NO: 171557 - DNA, 30 bp, Artificial Sequence
  Synthetic oligonucleotide
agcggcttcatcgagtacgtcagtagagga

SEQ ID NO: 171558 - DNA, 30 bp, Artificial Sequence
  Synthetic oligonucleotide
gacccaatataaatctggcagggtagagga

SEQ ID NO: 171559 - DNA, 30 bp, Artificial Sequence
  Synthetic oligonucleotide
atgaagggagagaccgggggagttagagga

SEQ ID NO: 171560 - DNA, 30 bp, Artificial Sequence
  Synthetic oligonucleotide
tgggacatcattccgtctttgcaacgagga

SEQ ID NO: 171561 - DNA, 30 bp, Artificial Sequence
  Synthetic oligonucleotide
accctacaactagttggactgacgcgagga

SEQ ID NO: 171562 - DNA, 26 bp, Artificial Sequence
  Synthetic oligonucleotide
aggcccacgcgaggttcatgcgagga

SEQ ID NO: 171563 - DNA, 30 bp, Artificial Sequence
  Synthetic oligonucleotide
aggtagacgtgtttcagcacacaaggagga

SEQ ID NO: 171564 - DNA, 30 bp, Artificial Sequence
  Synthetic oligonucleotide
gagatcctagtagcacgtagagcaggagga

SEQ ID NO: 171565 - DNA, 30 bp, Artificial Sequence
  Synthetic oligonucleotide
gcggaatcataggagcaccgctcaggagga

SEQ ID NO: 171566 - DNA, 30 bp, Artificial Sequence
  Synthetic oligonucleotide
gcggtcgattgaagtatacccgccggagga

SEQ ID NO: 171567 - DNA, 30 bp, Artificial Sequence
  Synthetic oligonucleotide
atggcatcaaccgcatgttccatgggagga

SEQ ID NO: 171568 - DNA, 30 bp, Artificial Sequence
  Synthetic oligonucleotide
aaaaacaagtggagagctgcgcgtggagga

SEQ ID NO: 171569 - DNA, 30 bp, Artificial Sequence
  Synthetic oligonucleotide
ctggaagtattgtgtatgcggtcatgagga

SEQ ID NO: 171570 - DNA, 30 bp, Artificial Sequence
  Synthetic oligonucleotide
ctgagcgaacttggtcgttcagcctgagga

SEQ ID NO: 171571 - DNA, 30 bp, Artificial Sequence
  Synthetic oligonucleotide
tcccaattcgctggattggaggcctgagga

SEQ ID NO: 171572 - DNA, 30 bp, Artificial Sequence
  Synthetic oligonucleotide
atcgaactgcaccacaagtgtaatatagga

SEQ ID NO: 171573 - DNA, 30 bp, Artificial Sequence
  Synthetic oligonucleotide
agagatacgctggtaccgttcatactagga

SEQ ID NO: 171574 - DNA, 30 bp, Artificial Sequence
  Synthetic oligonucleotide
acatgagtgcattccattacctcgctagga

SEQ ID NO: 171575 - DNA, 30 bp, Artificial Sequence
  Synthetic oligonucleotide
tacggggcagtagtgtccattaggctagga

SEQ ID NO: 171576 - DNA, 30 bp, Artificial Sequence
  Synthetic oligonucleotide
ccacaagacagacgaaccacatatctagga

SEQ ID NO: 171577 - DNA, 30 bp, Artificial Sequence
  Synthetic oligonucleotide
agacgaatcccacgtgataacagtctagga

SEQ ID NO: 171578 - DNA, 30 bp, Artificial Sequence
  Synthetic oligonucleotide
ccgatgcctgcctggccagcaattctagga

SEQ ID NO: 171579 - DNA, 30 bp, Artificial Sequence
  Synthetic oligonucleotide
aacgcctctgggcccgtgggatccgtagga

SEQ ID NO: 171580 - DNA, 30 bp, Artificial Sequence
  Synthetic oligonucleotide
atgtcctgtaaaggaagttgccaggtagga

SEQ ID NO: 171581 - DNA, 29 bp, Artificial Sequence
  Synthetic oligonucleotide
tggcgttactagccgggacgacggtagga

SEQ ID NO: 171582 - DNA, 30 bp, Artificial Sequence
  Synthetic oligonucleotide
atccactcgtcaccacaaactgcattagga

SEQ ID NO: 171583 - DNA, 30 bp, Artificial Sequence
  Synthetic oligonucleotide
tcgtgtagcttcgacaatgtgagcttagga

SEQ ID NO: 171584 - DNA, 30 bp, Artificial Sequence
  Synthetic oligonucleotide
gtcgtctccgtacgacagtaggtcttagga

SEQ ID NO: 171585 - DNA, 30 bp, Artificial Sequence
  Synthetic oligonucleotide
tccaagagccggctcggtgttccgttagga

SEQ ID NO: 171586 - DNA, 30 bp, Artificial Sequence
  Synthetic oligonucleotide
gcgtaagtcgcacagccggggaatttagga

SEQ ID NO: 171587 - DNA, 30 bp, Artificial Sequence
  Synthetic oligonucleotide
atatatcaatccaatcaatccactttagga

SEQ ID NO: 171588 - DNA, 30 bp, Artificial Sequence
  Synthetic oligonucleotide
gacgggtaaaagtatttagtgactttagga

SEQ ID NO: 171589 - DNA, 30 bp, Artificial Sequence
  Synthetic oligonucleotide
gactggatcggtagtcgagattaaaacgga

SEQ ID NO: 171590 - DNA, 30 bp, Artificial Sequence
  Synthetic oligonucleotide
agtcgggtcgaagtacctggttacaacgga

SEQ ID NO: 171591 - DNA, 30 bp, Artificial Sequence
  Synthetic oligonucleotide
atacacccgggacggcttgcgtccaacgga

SEQ ID NO: 171592 - DNA, 30 bp, Artificial Sequence
  Synthetic oligonucleotide
ttgagcgagggattatagttttgcaacgga

SEQ ID NO: 171593 - DNA, 30 bp, Artificial Sequence
  Synthetic oligonucleotide
cgcgagtgtaaaagactaggtccgaacgga

SEQ ID NO: 171594 - DNA, 30 bp, Artificial Sequence
  Synthetic oligonucleotide
tccgtagggatcgcgttgtgccggaacgga

SEQ ID NO: 171595 - DNA, 30 bp, Artificial Sequence
  Synthetic oligonucleotide
tagtcaagctaggaggggcaatataacgga

SEQ ID NO: 171596 - DNA, 30 bp, Artificial Sequence
  Synthetic oligonucleotide
aagaccaacaagattgtaggttgccacgga

SEQ ID NO: 171597 - DNA, 30 bp, Artificial Sequence
  Synthetic oligonucleotide
ctacagtgtgtatcctcacagaggcacgga

SEQ ID NO: 171598 - DNA, 30 bp, Artificial Sequence
  Synthetic oligonucleotide
tgcgctcggctgactggagggtggcacgga

SEQ ID NO: 171599 - DNA, 30 bp, Artificial Sequence
  Synthetic oligonucleotide
tcagacatcaactagccaccaatcgacgga

SEQ ID NO: 171600 - DNA, 30 bp, Artificial Sequence
  Synthetic oligonucleotide
aggtatccatccttatgcgaggaggacgga

SEQ ID NO: 171601 - DNA, 30 bp, Artificial Sequence
  Synthetic oligonucleotide
tcagtcgtgcacacgtctgggtgggacgga

SEQ ID NO: 171602 - DNA, 30 bp, Artificial Sequence
  Synthetic oligonucleotide
tgttgatagaccagaagtccctaatacgga

SEQ ID NO: 171603 - DNA, 30 bp, Artificial Sequence
  Synthetic oligonucleotide
aacataagccgcttccctgtactatacgga

SEQ ID NO: 171604 - DNA, 30 bp, Artificial Sequence
  Synthetic oligonucleotide
cgaaaactgcggcacttaaggcgctacgga

SEQ ID NO: 171605 - DNA, 30 bp, Artificial Sequence
  Synthetic oligonucleotide
gtcatttaaccccacaatgttgtaaccgga

SEQ ID NO: 171606 - DNA, 30 bp, Artificial Sequence
  Synthetic oligonucleotide
tacgagtgtaaaagagtagaaactaccgga

SEQ ID NO: 171607 - DNA, 30 bp, Artificial Sequence
  Synthetic oligonucleotide
cccgacgaatgtgtaacgtctccacccgga

SEQ ID NO: 171608 - DNA, 30 bp, Artificial Sequence
  Synthetic oligonucleotide
agcacgacctctcttctgttctgccccgga

SEQ ID NO: 171609 - DNA, 30 bp, Artificial Sequence
  Synthetic oligonucleotide
gtaggtcgaaactcaactaacgtccccgga

SEQ ID NO: 171610 - DNA, 30 bp, Artificial Sequence
  Synthetic oligonucleotide
tgcgcgggagaaaaacaatggtttcccgga

SEQ ID NO: 171611 - DNA, 30 bp, Artificial Sequence
  Synthetic oligonucleotide
acctcggtcgatagcacggttctagccgga

SEQ ID NO: 171612 - DNA, 30 bp, Artificial Sequence
  Synthetic oligonucleotide
tcatcatattggggtgctacgtacgccgga

SEQ ID NO: 171613 - DNA, 30 bp, Artificial Sequence
  Synthetic oligonucleotide
gtagtcaaaatggtcgagtctatggccgga

SEQ ID NO: 171614 - DNA, 30 bp, Artificial Sequence
  Synthetic oligonucleotide
tatttaccgccagtaccagaggttgccgga

SEQ ID NO: 171615 - DNA, 30 bp, Artificial Sequence
  Synthetic oligonucleotide
ccttgtcaactcctttagagtgcctccgga

SEQ ID NO: 171616 - DNA, 30 bp, Artificial Sequence
  Synthetic oligonucleotide
atgcaataaataagtcgacgacgttccgga

SEQ ID NO: 171617 - DNA, 30 bp, Artificial Sequence
  Synthetic oligonucleotide
taagccttagtttggggaaaagacagcgga

SEQ ID NO: 171618 - DNA, 30 bp, Artificial Sequence
  Synthetic oligonucleotide
caatgccgatgattctatatagtcagcgga

SEQ ID NO: 171619 - DNA, 30 bp, Artificial Sequence
  Synthetic oligonucleotide
atcttagctgtggctgcactagtacgcgga

SEQ ID NO: 171620 - DNA, 30 bp, Artificial Sequence
  Synthetic oligonucleotide
taccgttgaggcaactattagggtcgcgga

SEQ ID NO: 171621 - DNA, 30 bp, Artificial Sequence
  Synthetic oligonucleotide
gtgttgagtgcggtgacagggtccggcgga

SEQ ID NO: 171622 - DNA, 29 bp, Artificial Sequence
  Synthetic oligonucleotide
cgggcgcacgtattgcatcggtcggcgga

SEQ ID NO: 171623 - DNA, 30 bp, Artificial Sequence
  Synthetic oligonucleotide
gatgtaggagcgagtgaggatcctggcgga

SEQ ID NO: 171624 - DNA, 30 bp, Artificial Sequence
  Synthetic oligonucleotide
atgaggttggtcagagtggattgatgcgga

SEQ ID NO: 171625 - DNA, 30 bp, Artificial Sequence
  Synthetic oligonucleotide
agacaattccccgccatgatttgctgcgga

SEQ ID NO: 171626 - DNA, 30 bp, Artificial Sequence
  Synthetic oligonucleotide
agattcatgatcggacgaaacacgtgcgga

SEQ ID NO: 171627 - DNA, 30 bp, Artificial Sequence
  Synthetic oligonucleotide
tgataggagactaggacacacccttgcgga

SEQ ID NO: 171628 - DNA, 30 bp, Artificial Sequence
  Synthetic oligonucleotide
tcagagtaatcgacttctcgtggcatcgga

SEQ ID NO: 171629 - DNA, 30 bp, Artificial Sequence
  Synthetic oligonucleotide
agcctctacaggggtagcaagaggatcgga

SEQ ID NO: 171630 - DNA, 30 bp, Artificial Sequence
  Synthetic oligonucleotide
agtgtctgacaaaggagtcacgcactcgga

SEQ ID NO: 171631 - DNA, 30 bp, Artificial Sequence
  Synthetic oligonucleotide
atggtggcaagtggatgtgtttgactcgga

SEQ ID NO: 171632 - DNA, 30 bp, Artificial Sequence
  Synthetic oligonucleotide
cggcactaaacccactgccgcatcctcgga

SEQ ID NO: 171633 - DNA, 30 bp, Artificial Sequence
  Synthetic oligonucleotide
cgtagcgtgaggttaaaacatatcctcgga

SEQ ID NO: 171634 - DNA, 30 bp, Artificial Sequence
  Synthetic oligonucleotide
gagatcgacgagagcagaacaccgctcgga

SEQ ID NO: 171635 - DNA, 30 bp, Artificial Sequence
  Synthetic oligonucleotide
ataccacgggagtaaaaggacgggctcgga

SEQ ID NO: 171636 - DNA, 30 bp, Artificial Sequence
  Synthetic oligonucleotide
gggcataggtggtcatgtgagtatgtcgga

SEQ ID NO: 171637 - DNA, 30 bp, Artificial Sequence
  Synthetic oligonucleotide
gacacatcctacgcttagcaacaattcgga

SEQ ID NO: 171638 - DNA, 30 bp, Artificial Sequence
  Synthetic oligonucleotide
gaagtaacaggccttctaaacgcgttcgga

SEQ ID NO: 171639 - DNA, 30 bp, Artificial Sequence
  Synthetic oligonucleotide
actaggtaatggaggagaattcatttcgga

SEQ ID NO: 171640 - DNA, 30 bp, Artificial Sequence
  Synthetic oligonucleotide
aaactatcaacgatagcaagtgatttcgga

SEQ ID NO: 171641 - DNA, 30 bp, Artificial Sequence
  Synthetic oligonucleotide
caacttcttcgcctagctccagctttcgga

SEQ ID NO: 171642 - DNA, 30 bp, Artificial Sequence
  Synthetic oligonucleotide
atagacctagttcgaaattcaacaaaggga

SEQ ID NO: 171643 - DNA, 30 bp, Artificial Sequence
  Synthetic oligonucleotide
tgagagatgctatctctagattgaaaggga

SEQ ID NO: 171644 - DNA, 30 bp, Artificial Sequence
  Synthetic oligonucleotide
cccaaagcaacaagggatttgcataaggga

SEQ ID NO: 171645 - DNA, 30 bp, Artificial Sequence
  Synthetic oligonucleotide
gagttgtatgttaacgtcacagataaggga

SEQ ID NO: 171646 - DNA, 30 bp, Artificial Sequence
  Synthetic oligonucleotide
tcaacatcgtgagacaaaggctctaaggga

SEQ ID NO: 171647 - DNA, 30 bp, Artificial Sequence
  Synthetic oligonucleotide
cgatggccaaagacatagctctgacaggga

SEQ ID NO: 171648 - DNA, 30 bp, Artificial Sequence
  Synthetic oligonucleotide
ttgagttctaaagctgcgactcgccaggga

SEQ ID NO: 171649 - DNA, 30 bp, Artificial Sequence
  Synthetic oligonucleotide
taccggtgcgaggtaatccagttccaggga

SEQ ID NO: 171650 - DNA, 30 bp, Artificial Sequence
  Synthetic oligonucleotide
aagtcaatgcggcgattagttctgcaggga

SEQ ID NO: 171651 - DNA, 30 bp, Artificial Sequence
  Synthetic oligonucleotide
caaggttgagaggtataggtacaagaggga

SEQ ID NO: 171652 - DNA, 30 bp, Artificial Sequence
  Synthetic oligonucleotide
ttgtgtccacgttctagacatccagaggga

SEQ ID NO: 171653 - DNA, 30 bp, Artificial Sequence
  Synthetic oligonucleotide
gatctatggccacatagagacctagaggga

SEQ ID NO: 171654 - DNA, 30 bp, Artificial Sequence
  Synthetic oligonucleotide
gggcggtacactccgtttacgcacgaggga

SEQ ID NO: 171655 - DNA, 30 bp, Artificial Sequence
  Synthetic oligonucleotide
cctatggcttttaagaacttaatctaggga

SEQ ID NO: 171656 - DNA, 30 bp, Artificial Sequence
  Synthetic oligonucleotide
ccgtggcgatggcagacaactgattaggga

SEQ ID NO: 171657 - DNA, 30 bp, Artificial Sequence
  Synthetic oligonucleotide
ggtgttagcgagcgagcaagctaaacggga

SEQ ID NO: 171658 - DNA, 30 bp, Artificial Sequence
  Synthetic oligonucleotide
gtgaggataacttattcatgctaaacggga

SEQ ID NO: 171659 - DNA, 30 bp, Artificial Sequence
  Synthetic oligonucleotide
aagccaagatcataagatgcaataacggga

SEQ ID NO: 171660 - DNA, 30 bp, Artificial Sequence
  Synthetic oligonucleotide
gggtgctcatcagtagctgaagccacggga

SEQ ID NO: 171661 - DNA, 30 bp, Artificial Sequence
  Synthetic oligonucleotide
aaaggcagtgacttacccatctgcacggga

SEQ ID NO: 171662 - DNA, 30 bp, Artificial Sequence
  Synthetic oligonucleotide
cgttttgggcctacttgtcaattcacggga

SEQ ID NO: 171663 - DNA, 30 bp, Artificial Sequence
  Synthetic oligonucleotide
aattagcgtagcgacatagacaatacggga

SEQ ID NO: 171664 - DNA, 30 bp, Artificial Sequence
  Synthetic oligonucleotide
cggaaactatcacaaattgcggatacggga

SEQ ID NO: 171665 - DNA, 30 bp, Artificial Sequence
  Synthetic oligonucleotide
tgaccataagggaccgtcaataacccggga

SEQ ID NO: 171666 - DNA, 30 bp, Artificial Sequence
  Synthetic oligonucleotide
cgttcgctgtctgtcaccgccaagccggga

SEQ ID NO: 171667 - DNA, 30 bp, Artificial Sequence
  Synthetic oligonucleotide
tagacaggtaatcctaatttgaagccggga

SEQ ID NO: 171668 - DNA, 30 bp, Artificial Sequence
  Synthetic oligonucleotide
ggctgcgttcgaaatagtgtggatccggga

SEQ ID NO: 171669 - DNA, 30 bp, Artificial Sequence
  Synthetic oligonucleotide
agcgtatcactgatatgggaacttccggga

SEQ ID NO: 171670 - DNA, 30 bp, Artificial Sequence
  Synthetic oligonucleotide
gaacgaaagatttatgaggtcaacgcggga

SEQ ID NO: 171671 - DNA, 30 bp, Artificial Sequence
  Synthetic oligonucleotide
caacggtccttccagaagtcggacgcggga

SEQ ID NO: 171672 - DNA, 30 bp, Artificial Sequence
  Synthetic oligonucleotide
gaatcgggtaactacgagcggggtgcggga

SEQ ID NO: 171673 - DNA, 30 bp, Artificial Sequence
  Synthetic oligonucleotide
acatattcctaagagggtgaaatatcggga

SEQ ID NO: 171674 - DNA, 30 bp, Artificial Sequence
  Synthetic oligonucleotide
accaagctccaacgacggcggtgttcggga

SEQ ID NO: 171675 - DNA, 30 bp, Artificial Sequence
  Synthetic oligonucleotide
taaacttgggcggaagatagttgttcggga

SEQ ID NO: 171676 - DNA, 30 bp, Artificial Sequence
  Synthetic oligonucleotide
taaagtggtcgttgtgcctgttgttcggga

SEQ ID NO: 171677 - DNA, 30 bp, Artificial Sequence
  Synthetic oligonucleotide
gggttgattaaacactcaatattttcggga

SEQ ID NO: 171678 - DNA, 30 bp, Artificial Sequence
  Synthetic oligonucleotide
atatcattcctctcgtacgactacagggga

SEQ ID NO: 171679 - DNA, 30 bp, Artificial Sequence
  Synthetic oligonucleotide
taaaattgccacacttccgaactcagggga

SEQ ID NO: 171680 - DNA, 30 bp, Artificial Sequence
  Synthetic oligonucleotide
tagagcatcacggataaggattttagggga

SEQ ID NO: 171681 - DNA, 30 bp, Artificial Sequence
  Synthetic oligonucleotide
aatattgcgacgcgactagataggcgggga

SEQ ID NO: 171682 - DNA, 30 bp, Artificial Sequence
  Synthetic oligonucleotide
gaacgataggtacccctacagttgcgggga

SEQ ID NO: 171683 - DNA, 30 bp, Artificial Sequence
  Synthetic oligonucleotide
tccagcagaaaatcaccactcacaggggga

SEQ ID NO: 171684 - DNA, 30 bp, Artificial Sequence
  Synthetic oligonucleotide
atgtgaaatgatccgtgggtgtcaggggga

SEQ ID NO: 171685 - DNA, 30 bp, Artificial Sequence
  Synthetic oligonucleotide
acggatatgatatccgaagtcggaggggga

SEQ ID NO: 171686 - DNA, 30 bp, Artificial Sequence
  Synthetic oligonucleotide
gcatggagggatgcgataatgggcggggga

SEQ ID NO: 171687 - DNA, 40 bp, Artificial Sequence
  Synthetic oligonucleotide
aagataatacaatcatggtatggtcggggatcggggggga

SEQ ID NO: 171688 - DNA, 30 bp, Artificial Sequence
  Synthetic oligonucleotide
agacgcgtgagacccggcggagaatgggga

SEQ ID NO: 171689 - DNA, 30 bp, Artificial Sequence
  Synthetic oligonucleotide
acgctgtagatataatttcctgaatgggga

SEQ ID NO: 171690 - DNA, 30 bp, Artificial Sequence
  Synthetic oligonucleotide
atctcgcggccgggagcagggacatgggga

SEQ ID NO: 171691 - DNA, 30 bp, Artificial Sequence
  Synthetic oligonucleotide
agctttcagcgccaattcgacgactgggga

SEQ ID NO: 171692 - DNA, 30 bp, Artificial Sequence
  Synthetic oligonucleotide
tctaatggtgccagaattgcgcagtgggga

SEQ ID NO: 171693 - DNA, 30 bp, Artificial Sequence
  Synthetic oligonucleotide
gaatgaagcgctacaattgcttattgggga

SEQ ID NO: 171694 - DNA, 30 bp, Artificial Sequence
  Synthetic oligonucleotide
agttaagttacctcctacgaatcttgggga

SEQ ID NO: 171695 - DNA, 30 bp, Artificial Sequence
  Synthetic oligonucleotide
acgacccgatggactgtatgtttttgggga

SEQ ID NO: 171696 - DNA, 30 bp, Artificial Sequence
  Synthetic oligonucleotide
gcgtacgttcatgatctaattaaaatggga

SEQ ID NO: 171697 - DNA, 30 bp, Artificial Sequence
  Synthetic oligonucleotide
gggtctcccaatcggtaaagctaaatggga

SEQ ID NO: 171698 - DNA, 30 bp, Artificial Sequence
  Synthetic oligonucleotide
gccggccggtgaaagggtgcctttatggga

SEQ ID NO: 171699 - DNA, 30 bp, Artificial Sequence
  Synthetic oligonucleotide
gaccagcacgacagggtggcatgcctggga

SEQ ID NO: 171700 - DNA, 30 bp, Artificial Sequence
  Synthetic oligonucleotide
ggcgtgttcaggcaaatcacagtgctggga

SEQ ID NO: 171701 - DNA, 30 bp, Artificial Sequence
  Synthetic oligonucleotide
gtgagacagaaacaatagttccgtctggga

SEQ ID NO: 171702 - DNA, 30 bp, Artificial Sequence
  Synthetic oligonucleotide
ggagtgggtttattctcgaggcgtctggga

SEQ ID NO: 171703 - DNA, 30 bp, Artificial Sequence
  Synthetic oligonucleotide
atcgcacgaatttacgagtggggtctggga

SEQ ID NO: 171704 - DNA, 30 bp, Artificial Sequence
  Synthetic oligonucleotide
cggacactgtatcctgacgcgtaagtggga

SEQ ID NO: 171705 - DNA, 30 bp, Artificial Sequence
  Synthetic oligonucleotide
catacaggttgggaatggcgtcccgtggga

SEQ ID NO: 171706 - DNA, 30 bp, Artificial Sequence
  Synthetic oligonucleotide
gtaaaacggcgagttgttcgggctgtggga

SEQ ID NO: 171707 - DNA, 30 bp, Artificial Sequence
  Synthetic oligonucleotide
acttgtagctacgtacaatgtctattggga

SEQ ID NO: 171708 - DNA, 30 bp, Artificial Sequence
  Synthetic oligonucleotide
tattgtagcccaggttaacaagcgttggga

SEQ ID NO: 171709 - DNA, 30 bp, Artificial Sequence
  Synthetic oligonucleotide
aggtagagcgtccgggggtgcctgttggga

SEQ ID NO: 171710 - DNA, 30 bp, Artificial Sequence
  Synthetic oligonucleotide
agcggggagtcggttatattatttttggga

SEQ ID NO: 171711 - DNA, 30 bp, Artificial Sequence
  Synthetic oligonucleotide
ctagtgtagcgggacagtaagtttttggga

SEQ ID NO: 171712 - DNA, 30 bp, Artificial Sequence
  Synthetic oligonucleotide
ctgtgatgattgtcgaaagtattaaatgga

SEQ ID NO: 171713 - DNA, 30 bp, Artificial Sequence
  Synthetic oligonucleotide
cggactcgcgcgatagcaagtttaaatgga

SEQ ID NO: 171714 - DNA, 30 bp, Artificial Sequence
  Synthetic oligonucleotide
gtggcgacacctacgcgcccgtgcaatgga

SEQ ID NO: 171715 - DNA, 30 bp, Artificial Sequence
  Synthetic oligonucleotide
ggtccggtggattgtccgggttagaatgga

SEQ ID NO: 171716 - DNA, 30 bp, Artificial Sequence
  Synthetic oligonucleotide
ccttgatctacatgtattatgtggaatgga

SEQ ID NO: 171717 - DNA, 30 bp, Artificial Sequence
  Synthetic oligonucleotide
cccatagttaccagagtaaatgataatgga

SEQ ID NO: 171718 - DNA, 30 bp, Artificial Sequence
  Synthetic oligonucleotide
cgaggctcggcttgggttaggactaatgga

SEQ ID NO: 171719 - DNA, 30 bp, Artificial Sequence
  Synthetic oligonucleotide
gaaattccgtaaataatgggtggtaatgga

SEQ ID NO: 171720 - DNA, 30 bp, Artificial Sequence
  Synthetic oligonucleotide
tgaaagcttacgtgatgtacagtccatgga

SEQ ID NO: 171721 - DNA, 30 bp, Artificial Sequence
  Synthetic oligonucleotide
ttggtggatacctaggagtcggtccatgga

SEQ ID NO: 171722 - DNA, 30 bp, Artificial Sequence
  Synthetic oligonucleotide
cgcgtgtgactcagggagaaaccgcatgga

SEQ ID NO: 171723 - DNA, 30 bp, Artificial Sequence
  Synthetic oligonucleotide
gaatcggtatcagtactattaggtcatgga

SEQ ID NO: 171724 - DNA, 30 bp, Artificial Sequence
  Synthetic oligonucleotide
tttgttgaggtgagatcagcgacagatgga

SEQ ID NO: 171725 - DNA, 30 bp, Artificial Sequence
  Synthetic oligonucleotide
ggataacaacgaagggcaccatacgatgga

SEQ ID NO: 171726 - DNA, 30 bp, Artificial Sequence
  Synthetic oligonucleotide
gcatcggttaacgtttaacggcgggatgga

SEQ ID NO: 171727 - DNA, 30 bp, Artificial Sequence
  Synthetic oligonucleotide
tcgactaagctttcctactagtatgatgga

SEQ ID NO: 171728 - DNA, 30 bp, Artificial Sequence
  Synthetic oligonucleotide
atctaacggaacctgagccgacctgatgga

SEQ ID NO: 171729 - DNA, 30 bp, Artificial Sequence
  Synthetic oligonucleotide
gtaacacagtatctctaccagcgctatgga

SEQ ID NO: 171730 - DNA, 30 bp, Artificial Sequence
  Synthetic oligonucleotide
agcaggctttcgcgggtgagcaggtatgga

SEQ ID NO: 171731 - DNA, 30 bp, Artificial Sequence
  Synthetic oligonucleotide
gtctaggagattaaccattgtcggtatgga

SEQ ID NO: 171732 - DNA, 30 bp, Artificial Sequence
  Synthetic oligonucleotide
ggggtgcgcgtccaaagtcgccaacctgga

SEQ ID NO: 171733 - DNA, 30 bp, Artificial Sequence
  Synthetic oligonucleotide
tcttggataccaaatcggggaatgcctgga

SEQ ID NO: 171734 - DNA, 30 bp, Artificial Sequence
  Synthetic oligonucleotide
acgtggccccgggtgctcagtgtagctgga

SEQ ID NO: 171735 - DNA, 30 bp, Artificial Sequence
  Synthetic oligonucleotide
aacaacaagattgcaaggaggctcgctgga

SEQ ID NO: 171736 - DNA, 30 bp, Artificial Sequence
  Synthetic oligonucleotide
ttgatccaagacaatgaatagcatgctgga

SEQ ID NO: 171737 - DNA, 30 bp, Artificial Sequence
  Synthetic oligonucleotide
actataagggtcaggggcacatgctctgga

SEQ ID NO: 171738 - DNA, 30 bp, Artificial Sequence
  Synthetic oligonucleotide
taaaacgggagagctggcgagcagtctgga

SEQ ID NO: 171739 - DNA, 30 bp, Artificial Sequence
  Synthetic oligonucleotide
ccaataatcgcgcatccccgatttagtgga

SEQ ID NO: 171740 - DNA, 30 bp, Artificial Sequence
  Synthetic oligonucleotide
cgtacgccgatgcgtggtgccccgcgtgga

SEQ ID NO: 171741 - DNA, 30 bp, Artificial Sequence
  Synthetic oligonucleotide
ctaacgctagaggatagcacttaaggtgga

SEQ ID NO: 171742 - DNA, 30 bp, Artificial Sequence
  Synthetic oligonucleotide
gcatgggtgcattagcctcaagccggtgga

SEQ ID NO: 171743 - DNA, 30 bp, Artificial Sequence
  Synthetic oligonucleotide
ctcttatgcgcatacaatctctagggtgga

SEQ ID NO: 171744 - DNA, 30 bp, Artificial Sequence
  Synthetic oligonucleotide
tggaaaccttggtacgggggattgggtgga

SEQ ID NO: 171745 - DNA, 30 bp, Artificial Sequence
  Synthetic oligonucleotide
acagatacgatgtttgtttggttgggtgga

SEQ ID NO: 171746 - DNA, 30 bp, Artificial Sequence
  Synthetic oligonucleotide
ttgtgaggcgccgatcacggaaatggtgga

SEQ ID NO: 171747 - DNA, 30 bp, Artificial Sequence
  Synthetic oligonucleotide
tggactgtatggataatggttcgtggtgga

SEQ ID NO: 171748 - DNA, 30 bp, Artificial Sequence
  Synthetic oligonucleotide
gaaggtgtggatctctgaacatcgtgtgga

SEQ ID NO: 171749 - DNA, 30 bp, Artificial Sequence
  Synthetic oligonucleotide
cgctgcacgcacttcgaacccaggtgtgga

SEQ ID NO: 171750 - DNA, 30 bp, Artificial Sequence
  Synthetic oligonucleotide
gctatcagcgagaggatatcccggtgtgga

SEQ ID NO: 171751 - DNA, 30 bp, Artificial Sequence
  Synthetic oligonucleotide
cgcactctgctatttcatctcgggtgtgga

SEQ ID NO: 171752 - DNA, 30 bp, Artificial Sequence
  Synthetic oligonucleotide
agcgcaccacgggaaacacaatattgtgga

SEQ ID NO: 171753 - DNA, 30 bp, Artificial Sequence
  Synthetic oligonucleotide
ttataacatcttagtcacgagtaaattgga

SEQ ID NO: 171754 - DNA, 30 bp, Artificial Sequence
  Synthetic oligonucleotide
gccgttgcgcaagtacgtttgacaattgga

SEQ ID NO: 171755 - DNA, 30 bp, Artificial Sequence
  Synthetic oligonucleotide
agagcacggtttcaaacaatgttaattgga

SEQ ID NO: 171756 - DNA, 30 bp, Artificial Sequence
  Synthetic oligonucleotide
gttgcttatacggccagaattaccattgga

SEQ ID NO: 171757 - DNA, 30 bp, Artificial Sequence
  Synthetic oligonucleotide
atgagcccactagagatacaagtcattgga

SEQ ID NO: 171758 - DNA, 30 bp, Artificial Sequence
  Synthetic oligonucleotide
cctaacgcagaatggcggtctgcgattgga

SEQ ID NO: 171759 - DNA, 30 bp, Artificial Sequence
  Synthetic oligonucleotide
tcctatatatgatgaagacgtgggattgga

SEQ ID NO: 171760 - DNA, 30 bp, Artificial Sequence
  Synthetic oligonucleotide
tcgtcgatataaaaggattacagccttgga

SEQ ID NO: 171761 - DNA, 30 bp, Artificial Sequence
  Synthetic oligonucleotide
tggtatttggctttggcgagtgtccttgga

SEQ ID NO: 171762 - DNA, 30 bp, Artificial Sequence
  Synthetic oligonucleotide
gaatgtcggggatgtgagaatcagcttgga

SEQ ID NO: 171763 - DNA, 30 bp, Artificial Sequence
  Synthetic oligonucleotide
ttgtacctagaagacgcgtgaaggcttgga

SEQ ID NO: 171764 - DNA, 30 bp, Artificial Sequence
  Synthetic oligonucleotide
gggcttcggggatggttcgtcatagttgga

SEQ ID NO: 171765 - DNA, 30 bp, Artificial Sequence
  Synthetic oligonucleotide
cgtacgacgggaagcttgtctgtcgttgga

SEQ ID NO: 171766 - DNA, 30 bp, Artificial Sequence
  Synthetic oligonucleotide
acctcgggtctaacaagacggtctgttgga

SEQ ID NO: 171767 - DNA, 30 bp, Artificial Sequence
  Synthetic oligonucleotide
cggacccacgtcagatgtcctgaatttgga

SEQ ID NO: 171768 - DNA, 30 bp, Artificial Sequence
  Synthetic oligonucleotide
tcgtaacggttgccactattatactttgga

SEQ ID NO: 171769 - DNA, 30 bp, Artificial Sequence
  Synthetic oligonucleotide
catagacacttctacgtgataacaaaatga

SEQ ID NO: 171770 - DNA, 30 bp, Artificial Sequence
  Synthetic oligonucleotide
ccggtgccacaaactgtagccgcaaaatga

SEQ ID NO: 171771 - DNA, 30 bp, Artificial Sequence
  Synthetic oligonucleotide
ggccgtcttctaatccctacacggaaatga

SEQ ID NO: 171772 - DNA, 30 bp, Artificial Sequence
  Synthetic oligonucleotide
ttggacccaatatcgggcgtactgaaatga

SEQ ID NO: 171773 - DNA, 30 bp, Artificial Sequence
  Synthetic oligonucleotide
gattcacgactagtgaacatgtataaatga

SEQ ID NO: 171774 - DNA, 30 bp, Artificial Sequence
  Synthetic oligonucleotide
cggaaacacaagcttttttttacacaatga

SEQ ID NO: 171775 - DNA, 30 bp, Artificial Sequence
  Synthetic oligonucleotide
cctagtgctaattcatgcattagacaatga

SEQ ID NO: 171776 - DNA, 30 bp, Artificial Sequence
  Synthetic oligonucleotide
tgcgttggtatagcctaacccgagcaatga

SEQ ID NO: 171777 - DNA, 30 bp, Artificial Sequence
  Synthetic oligonucleotide
gcaatctattgagaccagaatcccgaatga

SEQ ID NO: 171778 - DNA, 30 bp, Artificial Sequence
  Synthetic oligonucleotide
caaacctagtgcaggacacgtctcgaatga

SEQ ID NO: 171779 - DNA, 30 bp, Artificial Sequence
  Synthetic oligonucleotide
tcggtctccgtatcataaatgccggaatga

SEQ ID NO: 171780 - DNA, 30 bp, Artificial Sequence
  Synthetic oligonucleotide
ttgaaattgtgggccaatgttcgggaatga

SEQ ID NO: 171781 - DNA, 30 bp, Artificial Sequence
  Synthetic oligonucleotide
gtacgaattcatggtaatctactggaatga

SEQ ID NO: 171782 - DNA, 30 bp, Artificial Sequence
  Synthetic oligonucleotide
actgagttacacgacttgaaagttgaatga

SEQ ID NO: 171783 - DNA, 30 bp, Artificial Sequence
  Synthetic oligonucleotide
cctgatgccggtcagttacagtcataatga

SEQ ID NO: 171784 - DNA, 30 bp, Artificial Sequence
  Synthetic oligonucleotide
acatttgagcaggggggaggtaagtaatga

SEQ ID NO: 171785 - DNA, 30 bp, Artificial Sequence
  Synthetic oligonucleotide
tcgcaggttcgcaggtgctgcgagtaatga

SEQ ID NO: 171786 - DNA, 30 bp, Artificial Sequence
  Synthetic oligonucleotide
cggaactgcgtacccggatgttggtaatga

SEQ ID NO: 171787 - DNA, 30 bp, Artificial Sequence
  Synthetic oligonucleotide
agagtgacaaataatcatatgagttaatga

SEQ ID NO: 171788 - DNA, 30 bp, Artificial Sequence
  Synthetic oligonucleotide
tagtcccttgcaaaaggactagaaacatga

SEQ ID NO: 171789 - DNA, 30 bp, Artificial Sequence
  Synthetic oligonucleotide
ttcacggacaggccatacggagtgacatga

SEQ ID NO: 171790 - DNA, 30 bp, Artificial Sequence
  Synthetic oligonucleotide
tagtgtgtagtaaagtcagattacccatga

SEQ ID NO: 171791 - DNA, 30 bp, Artificial Sequence
  Synthetic oligonucleotide
tttcgtcaagagctgatgagcgagccatga

SEQ ID NO: 171792 - DNA, 29 bp, Artificial Sequence
  Synthetic oligonucleotide
agctacaactaagggataatgggccatga

SEQ ID NO: 171793 - DNA, 30 bp, Artificial Sequence
  Synthetic oligonucleotide
ataggctgtagccttactctattggcatga

SEQ ID NO: 171794 - DNA, 30 bp, Artificial Sequence
  Synthetic oligonucleotide
tggccttcacgtcatcgacaacgctcatga

SEQ ID NO: 171795 - DNA, 30 bp, Artificial Sequence
  Synthetic oligonucleotide
tgaactcggaagcgcgctcgcctctcatga

SEQ ID NO: 171796 - DNA, 30 bp, Artificial Sequence
  Synthetic oligonucleotide
acacggtcatatagggcccaattctcatga

SEQ ID NO: 171797 - DNA, 30 bp, Artificial Sequence
  Synthetic oligonucleotide
agcgacttttcggaatgggttgggtcatga

SEQ ID NO: 171798 - DNA, 30 bp, Artificial Sequence
  Synthetic oligonucleotide
tagtaaggagacagggcaccgccaagatga

SEQ ID NO: 171799 - DNA, 30 bp, Artificial Sequence
  Synthetic oligonucleotide
ctcatatatgttaggcgtacatcaagatga

SEQ ID NO: 171800 - DNA, 30 bp, Artificial Sequence
  Synthetic oligonucleotide
cgtcgtccgatgcatatgctcgacagatga

SEQ ID NO: 171801 - DNA, 30 bp, Artificial Sequence
  Synthetic oligonucleotide
gtcgtcagttagggatggaggcttagatga

SEQ ID NO: 171802 - DNA, 30 bp, Artificial Sequence
  Synthetic oligonucleotide
gcaacgcagtacagccggtgagttagatga

SEQ ID NO: 171803 - DNA, 30 bp, Artificial Sequence
  Synthetic oligonucleotide
acaaccctcttatgaaaaatgtttagatga

SEQ ID NO: 171804 - DNA, 30 bp, Artificial Sequence
  Synthetic oligonucleotide
cgatgctacctgacccaatcggtacgatga

SEQ ID NO: 171805 - DNA, 30 bp, Artificial Sequence
  Synthetic oligonucleotide
cccacagtgatgctgacatgggcgcgatga

SEQ ID NO: 171806 - DNA, 30 bp, Artificial Sequence
  Synthetic oligonucleotide
tcagcgattatcaggagcggacctcgatga

SEQ ID NO: 171807 - DNA, 30 bp, Artificial Sequence
  Synthetic oligonucleotide
caagcccatcgggtagagtgttctcgatga

SEQ ID NO: 171808 - DNA, 30 bp, Artificial Sequence
  Synthetic oligonucleotide
acgggatggaaacacgcaattagtcgatga

SEQ ID NO: 171809 - DNA, 30 bp, Artificial Sequence
  Synthetic oligonucleotide
gaagaacgttcataacggacttgaggatga

SEQ ID NO: 171810 - DNA, 30 bp, Artificial Sequence
  Synthetic oligonucleotide
gccaagcagtctcccgtgcccctcggatga

SEQ ID NO: 171811 - DNA, 30 bp, Artificial Sequence
  Synthetic oligonucleotide
gggtatcgacaaagcttccgttggggatga

SEQ ID NO: 171812 - DNA, 30 bp, Artificial Sequence
  Synthetic oligonucleotide
cgtatcagaaagtcggattggttgggatga

SEQ ID NO: 171813 - DNA, 30 bp, Artificial Sequence
  Synthetic oligonucleotide
tcacacttagacatccgttccagtggatga

SEQ ID NO: 171814 - DNA, 30 bp, Artificial Sequence
  Synthetic oligonucleotide
gcttaagagtttcacggtgagacatgatga

SEQ ID NO: 171815 - DNA, 30 bp, Artificial Sequence
  Synthetic oligonucleotide
gaaggcccatggctggatgcaccatgatga

SEQ ID NO: 171816 - DNA, 30 bp, Artificial Sequence
  Synthetic oligonucleotide
gtattgactaggtacagacgagtatgatga

SEQ ID NO: 171817 - DNA, 30 bp, Artificial Sequence
  Synthetic oligonucleotide
gaggattaagtagtcgctcgatactgatga

SEQ ID NO: 171818 - DNA, 30 bp, Artificial Sequence
  Synthetic oligonucleotide
ccgtaaccgggacagggcaacacctgatga

SEQ ID NO: 171819 - DNA, 30 bp, Artificial Sequence
  Synthetic oligonucleotide
atggtatagtctatcatgccctgctgatga

SEQ ID NO: 171820 - DNA, 30 bp, Artificial Sequence
  Synthetic oligonucleotide
tcccggattattggactctggctgtgatga

SEQ ID NO: 171821 - DNA, 30 bp, Artificial Sequence
  Synthetic oligonucleotide
acgtggggactgttagagacgccttgatga

SEQ ID NO: 171822 - DNA, 30 bp, Artificial Sequence
  Synthetic oligonucleotide
ttacaggtcaacgtgcacgaactaatatga

SEQ ID NO: 171823 - DNA, 30 bp, Artificial Sequence
  Synthetic oligonucleotide
agcaggcttaaaagatggatcgggatatga

SEQ ID NO: 171824 - DNA, 30 bp, Artificial Sequence
  Synthetic oligonucleotide
agtgtcatctatatcgtttcccttatatga

SEQ ID NO: 171825 - DNA, 30 bp, Artificial Sequence
  Synthetic oligonucleotide
ataaatggtcaagttttcatcgttatatga

SEQ ID NO: 171826 - DNA, 30 bp, Artificial Sequence
  Synthetic oligonucleotide
aacggagacttttggaaaggcagactatga

SEQ ID NO: 171827 - DNA, 30 bp, Artificial Sequence
  Synthetic oligonucleotide
gggagggcattcgtatcaaggggactatga

SEQ ID NO: 171828 - DNA, 30 bp, Artificial Sequence
  Synthetic oligonucleotide
cagggggggacccgtacggaccgagtatga

SEQ ID NO: 171829 - DNA, 30 bp, Artificial Sequence
  Synthetic oligonucleotide
gcatcctggataaactgtcgtggagtatga

SEQ ID NO: 171830 - DNA, 30 bp, Artificial Sequence
  Synthetic oligonucleotide
agatgacataccttccggagtctagtatga

SEQ ID NO: 171831 - DNA, 30 bp, Artificial Sequence
  Synthetic oligonucleotide
agtcagactaagattgcttggatcgtatga

SEQ ID NO: 171832 - DNA, 30 bp, Artificial Sequence
  Synthetic oligonucleotide
aagatcaactggcttgcatggacggtatga

SEQ ID NO: 171833 - DNA, 30 bp, Artificial Sequence
  Synthetic oligonucleotide
aaactagagatgaatcaagcacctgtatga

SEQ ID NO: 171834 - DNA, 30 bp, Artificial Sequence
  Synthetic oligonucleotide
ctgagtcgccaatgactaccccttgtatga

SEQ ID NO: 171835 - DNA, 30 bp, Artificial Sequence
  Synthetic oligonucleotide
gttcttcgtctaaccaacctagaattatga

SEQ ID NO: 171836 - DNA, 30 bp, Artificial Sequence
  Synthetic oligonucleotide
cgccctcactggaatagagaaaacttatga

SEQ ID NO: 171837 - DNA, 30 bp, Artificial Sequence
  Synthetic oligonucleotide
tatcggtaagggtaggactgtaggttatga

SEQ ID NO: 171838 - DNA, 30 bp, Artificial Sequence
  Synthetic oligonucleotide
cacgattagacgggaagtgtttatttatga

SEQ ID NO: 171839 - DNA, 30 bp, Artificial Sequence
  Synthetic oligonucleotide
aggtttctgtgcacgacttatggtttatga

SEQ ID NO: 171840 - DNA, 30 bp, Artificial Sequence
  Synthetic oligonucleotide
ggcagggcgttgcgtgtcggagaaaactga

SEQ ID NO: 171841 - DNA, 30 bp, Artificial Sequence
  Synthetic oligonucleotide
cattcaggatggtaagacaagagaaactga

SEQ ID NO: 171842 - DNA, 30 bp, Artificial Sequence
  Synthetic oligonucleotide
gtagtctatatagacttgtgacgaaactga

SEQ ID NO: 171843 - DNA, 30 bp, Artificial Sequence
  Synthetic oligonucleotide
ctaagcttagcgttctaacggcacaactga

SEQ ID NO: 171844 - DNA, 30 bp, Artificial Sequence
  Synthetic oligonucleotide
tggcggaaaattgataattgactcaactga

SEQ ID NO: 171845 - DNA, 30 bp, Artificial Sequence
  Synthetic oligonucleotide
aggtaacggatccgctagactttgaactga

SEQ ID NO: 171846 - DNA, 30 bp, Artificial Sequence
  Synthetic oligonucleotide
aaggcctttcaagctagcttggaacactga

SEQ ID NO: 171847 - DNA, 30 bp, Artificial Sequence
  Synthetic oligonucleotide
gagcttacagacgttaatccaacacactga

SEQ ID NO: 171848 - DNA, 30 bp, Artificial Sequence
  Synthetic oligonucleotide
atcagtagatcccagcgggcgagacactga

SEQ ID NO: 171849 - DNA, 30 bp, Artificial Sequence
  Synthetic oligonucleotide
caaggtatggaaacccgtcagtgccactga

SEQ ID NO: 171850 - DNA, 30 bp, Artificial Sequence
  Synthetic oligonucleotide
cacgccgcgcaataaaccaagattcactga

SEQ ID NO: 171851 - DNA, 30 bp, Artificial Sequence
  Synthetic oligonucleotide
cagtccgaagccgtagagtccagatactga

SEQ ID NO: 171852 - DNA, 30 bp, Artificial Sequence
  Synthetic oligonucleotide
gctcgaagatgcaatataggtagatactga

SEQ ID NO: 171853 - DNA, 30 bp, Artificial Sequence
  Synthetic oligonucleotide
gcggaacatgattcaggggttacgtactga

SEQ ID NO: 171854 - DNA, 30 bp, Artificial Sequence
  Synthetic oligonucleotide
atataacctaacgccccagaacattactga

SEQ ID NO: 171855 - DNA, 30 bp, Artificial Sequence
  Synthetic oligonucleotide
tggaatcccaaacggccaccgagcacctga

SEQ ID NO: 171856 - DNA, 30 bp, Artificial Sequence
  Synthetic oligonucleotide
atagccttcaagctcaaaccggatacctga

SEQ ID NO: 171857 - DNA, 30 bp, Artificial Sequence
  Synthetic oligonucleotide
atgggagcgaagcggtttccgcctacctga

SEQ ID NO: 171858 - DNA, 30 bp, Artificial Sequence
  Synthetic oligonucleotide
ggccagtgaggctggacttcgtcaccctga

SEQ ID NO: 171859 - DNA, 30 bp, Artificial Sequence
  Synthetic oligonucleotide
cgcacacgagatccggctacaaaagcctga

SEQ ID NO: 171860 - DNA, 30 bp, Artificial Sequence
  Synthetic oligonucleotide
catgaccgcacaagcacacaaggagcctga

SEQ ID NO: 171861 - DNA, 30 bp, Artificial Sequence
  Synthetic oligonucleotide
cagaaagtaaatctatacatgtccgcctga

SEQ ID NO: 171862 - DNA, 30 bp, Artificial Sequence
  Synthetic oligonucleotide
cgctttaatgggatcgagctaggcgcctga

SEQ ID NO: 171863 - DNA, 29 bp, Artificial Sequence
  Synthetic oligonucleotide
gtgggtacgcgtttttagtaacaagctga

SEQ ID NO: 171864 - DNA, 30 bp, Artificial Sequence
  Synthetic oligonucleotide
cccctagatagttcatatgtattaagctga

SEQ ID NO: 171865 - DNA, 30 bp, Artificial Sequence
  Synthetic oligonucleotide
tggtagcatcgaatggtactgctcagctga

SEQ ID NO: 171866 - DNA, 30 bp, Artificial Sequence
  Synthetic oligonucleotide
ttcaatgggagtggtcagcgataacgctga

SEQ ID NO: 171867 - DNA, 30 bp, Artificial Sequence
  Synthetic oligonucleotide
caacacgtctacccccagggagagcgctga

SEQ ID NO: 171868 - DNA, 30 bp, Artificial Sequence
  Synthetic oligonucleotide
caccgagtgggcaactgctgcagcggctga

SEQ ID NO: 171869 - DNA, 30 bp, Artificial Sequence
  Synthetic oligonucleotide
atcaaggacgaagaatttcgagagggctga

SEQ ID NO: 171870 - DNA, 30 bp, Artificial Sequence
  Synthetic oligonucleotide
cttaacttcaattatcgaccggggggctga

SEQ ID NO: 171871 - DNA, 30 bp, Artificial Sequence
  Synthetic oligonucleotide
acaaggttacacctacttggcatgggctga

SEQ ID NO: 171872 - DNA, 30 bp, Artificial Sequence
  Synthetic oligonucleotide
gtaaacgacgcgcataacgtgggtggctga

SEQ ID NO: 171873 - DNA, 30 bp, Artificial Sequence
  Synthetic oligonucleotide
tccttcaataccaacctacgtacctgctga

SEQ ID NO: 171874 - DNA, 30 bp, Artificial Sequence
  Synthetic oligonucleotide
aaagcattccaaccgtccagtccctgctga

SEQ ID NO: 171875 - DNA, 30 bp, Artificial Sequence
  Synthetic oligonucleotide
agaggagtacttaagtaatgaacgtgctga

SEQ ID NO: 171876 - DNA, 30 bp, Artificial Sequence
  Synthetic oligonucleotide
tgtgtgtccgggtattcaagtgggtgctga

SEQ ID NO: 171877 - DNA, 30 bp, Artificial Sequence
  Synthetic oligonucleotide
ctgctgcccaacgtggagtgcaattgctga

SEQ ID NO: 171878 - DNA, 30 bp, Artificial Sequence
  Synthetic oligonucleotide
cgatttcgactcacggatgtcttttgctga

SEQ ID NO: 171879 - DNA, 30 bp, Artificial Sequence
  Synthetic oligonucleotide
ggtcgggcggttcaaactcctaggatctga

SEQ ID NO: 171880 - DNA, 30 bp, Artificial Sequence
  Synthetic oligonucleotide
tcacagtggaggatacattggaagctctga

SEQ ID NO: 171881 - DNA, 30 bp, Artificial Sequence
  Synthetic oligonucleotide
tacgaggtctttccagggtagaaagtctga

SEQ ID NO: 171882 - DNA, 30 bp, Artificial Sequence
  Synthetic oligonucleotide
gcgccactctgagacagcaataaagtctga

SEQ ID NO: 171883 - DNA, 30 bp, Artificial Sequence
  Synthetic oligonucleotide
caggagcggtgagaacatatgcaagtctga

SEQ ID NO: 171884 - DNA, 30 bp, Artificial Sequence
  Synthetic oligonucleotide
gccgaaagaagaaggtagcacgaagtctga

SEQ ID NO: 171885 - DNA, 30 bp, Artificial Sequence
  Synthetic oligonucleotide
gggtctagcttaactggatccattgtctga

SEQ ID NO: 171886 - DNA, 30 bp, Artificial Sequence
  Synthetic oligonucleotide
tacgtggcgtgcagtcaggttgaattctga

SEQ ID NO: 171887 - DNA, 30 bp, Artificial Sequence
  Synthetic oligonucleotide
ttgctcggattcccctaaccaaacttctga

SEQ ID NO: 171888 - DNA, 30 bp, Artificial Sequence
  Synthetic oligonucleotide
cgacggtctaggtatataaataacttctga

SEQ ID NO: 171889 - DNA, 30 bp, Artificial Sequence
  Synthetic oligonucleotide
gttataccagcggcgggttgcgagttctga

SEQ ID NO: 171890 - DNA, 30 bp, Artificial Sequence
  Synthetic oligonucleotide
aggtgcttggtattttgagccgtgttctga

SEQ ID NO: 171891 - DNA, 30 bp, Artificial Sequence
  Synthetic oligonucleotide
tatactgataatcgatagccgttgttctga

SEQ ID NO: 171892 - DNA, 30 bp, Artificial Sequence
  Synthetic oligonucleotide
cggcttgaaaagacgtatagagttttctga

SEQ ID NO: 171893 - DNA, 30 bp, Artificial Sequence
  Synthetic oligonucleotide
gtatgaagaatgcgccgcatcccaaagtga

SEQ ID NO: 171894 - DNA, 30 bp, Artificial Sequence
  Synthetic oligonucleotide
tcttggctctgagggatagcagtaaagtga

SEQ ID NO: 171895 - DNA, 30 bp, Artificial Sequence
  Synthetic oligonucleotide
cgatggcgtatgatgatctctaacaagtga

SEQ ID NO: 171896 - DNA, 30 bp, Artificial Sequence
  Synthetic oligonucleotide
tatgtctgaacaaccgtgacgatcaagtga

SEQ ID NO: 171897 - DNA, 30 bp, Artificial Sequence
  Synthetic oligonucleotide
acttctactaatgtttgagccgtcaagtga

SEQ ID NO: 171898 - DNA, 30 bp, Artificial Sequence
  Synthetic oligonucleotide
catcactattgctcaaacagtacgaagtga

SEQ ID NO: 171899 - DNA, 30 bp, Artificial Sequence
  Synthetic oligonucleotide
tgcaccgggggtatcttccctcgacagtga

SEQ ID NO: 171900 - DNA, 30 bp, Artificial Sequence
  Synthetic oligonucleotide
tcgcttaatcaaaagaagacggcgcagtga

SEQ ID NO: 171901 - DNA, 30 bp, Artificial Sequence
  Synthetic oligonucleotide
ggattagaacgcagaggagctgtgcagtga

SEQ ID NO: 171902 - DNA, 30 bp, Artificial Sequence
  Synthetic oligonucleotide
gctgactggtgtgacccgacaggagagtga

SEQ ID NO: 171903 - DNA, 30 bp, Artificial Sequence
  Synthetic oligonucleotide
attggtctgaaaatatagcctatagagtga

SEQ ID NO: 171904 - DNA, 30 bp, Artificial Sequence
  Synthetic oligonucleotide
tgacttttcatgttcaaggaccgcgagtga

SEQ ID NO: 171905 - DNA, 30 bp, Artificial Sequence
  Synthetic oligonucleotide
ggcggactgtcatctaagtaaggggagtga

SEQ ID NO: 171906 - DNA, 30 bp, Artificial Sequence
  Synthetic oligonucleotide
ggtcgccggtgtggatcttggtactagtga

SEQ ID NO: 171907 - DNA, 30 bp, Artificial Sequence
  Synthetic oligonucleotide
ttgccaataaccggtaagcttctaacgtga

SEQ ID NO: 171908 - DNA, 29 bp, Artificial Sequence
  Synthetic oligonucleotide
ttattatagagggaagtaggaccacgtga

SEQ ID NO: 171909 - DNA, 30 bp, Artificial Sequence
  Synthetic oligonucleotide
ggggactttctcgcagttctcgggacgtga

SEQ ID NO: 171910 - DNA, 30 bp, Artificial Sequence
  Synthetic oligonucleotide
ggtgcggagaataccttcacgagtacgtga

SEQ ID NO: 171911 - DNA, 30 bp, Artificial Sequence
  Synthetic oligonucleotide
gtcggggggatattggaggcgtttacgtga

SEQ ID NO: 171912 - DNA, 30 bp, Artificial Sequence
  Synthetic oligonucleotide
tggaagctattgagggagcgagaaccgtga

SEQ ID NO: 171913 - DNA, 30 bp, Artificial Sequence
  Synthetic oligonucleotide
catctaatcgattgtaagtacagagcgtga

SEQ ID NO: 171914 - DNA, 30 bp, Artificial Sequence
  Synthetic oligonucleotide
agggtgtattgtatagggtgcatcgcgtga

SEQ ID NO: 171915 - DNA, 30 bp, Artificial Sequence
  Synthetic oligonucleotide
ggaaggactcgtcttttgtaaagggcgtga

SEQ ID NO: 171916 - DNA, 30 bp, Artificial Sequence
  Synthetic oligonucleotide
agaccctcccattaaggtttctgggcgtga

SEQ ID NO: 171917 - DNA, 30 bp, Artificial Sequence
  Synthetic oligonucleotide
ggagataattatgagtttctgctctcgtga

SEQ ID NO: 171918 - DNA, 30 bp, Artificial Sequence
  Synthetic oligonucleotide
caggggcagtgccaattgggtagaaggtga

SEQ ID NO: 171919 - DNA, 30 bp, Artificial Sequence
  Synthetic oligonucleotide
accagaattagctttcggcctcgaaggtga

SEQ ID NO: 171920 - DNA, 30 bp, Artificial Sequence
  Synthetic oligonucleotide
taaacgctatatttacagggatccaggtga

SEQ ID NO: 171921 - DNA, 30 bp, Artificial Sequence
  Synthetic oligonucleotide
tccgcgaccttaaagtgctactccaggtga

SEQ ID NO: 171922 - DNA, 30 bp, Artificial Sequence
  Synthetic oligonucleotide
ttggttcggatcattccgtaactcaggtga

SEQ ID NO: 171923 - DNA, 30 bp, Artificial Sequence
  Synthetic oligonucleotide
ggatgtttaaacgagacatccgtgaggtga

SEQ ID NO: 171924 - DNA, 30 bp, Artificial Sequence
  Synthetic oligonucleotide
aatgacaccggcttagacatcgataggtga

SEQ ID NO: 171925 - DNA, 30 bp, Artificial Sequence
  Synthetic oligonucleotide
taggtaacacgaaatgatggacctaggtga

SEQ ID NO: 171926 - DNA, 30 bp, Artificial Sequence
  Synthetic oligonucleotide
gcatatatggtgattcaacagcgtaggtga

SEQ ID NO: 171927 - DNA, 30 bp, Artificial Sequence
  Synthetic oligonucleotide
tcgcgcgtgcaatatagtgtagcacggtga

SEQ ID NO: 171928 - DNA, 30 bp, Artificial Sequence
  Synthetic oligonucleotide
caacgaagccccctagatagggtccggtga

SEQ ID NO: 171929 - DNA, 30 bp, Artificial Sequence
  Synthetic oligonucleotide
aacctataaagaggccaatatcagcggtga

SEQ ID NO: 171930 - DNA, 30 bp, Artificial Sequence
  Synthetic oligonucleotide
taacgtccaataagacgttttctgcggtga

SEQ ID NO: 171931 - DNA, 30 bp, Artificial Sequence
  Synthetic oligonucleotide
gttcgcacattatcaggctcgtaagggtga

SEQ ID NO: 171932 - DNA, 30 bp, Artificial Sequence
  Synthetic oligonucleotide
gggacataattctcgcaggtattcgggtga

SEQ ID NO: 171933 - DNA, 30 bp, Artificial Sequence
  Synthetic oligonucleotide
aagttcacgcatggcaattaaagggggtga

SEQ ID NO: 171934 - DNA, 30 bp, Artificial Sequence
  Synthetic oligonucleotide
tgtcggaacagtggggattacagggggtga

SEQ ID NO: 171935 - DNA, 30 bp, Artificial Sequence
  Synthetic oligonucleotide
tcgaacgacggtgagggtacctatgggtga

SEQ ID NO: 171936 - DNA, 30 bp, Artificial Sequence
  Synthetic oligonucleotide
agctgcaagatacatagatctttatggtga

SEQ ID NO: 171937 - DNA, 30 bp, Artificial Sequence
  Synthetic oligonucleotide
gacaagccttcagctttgggtggttggtga

SEQ ID NO: 171938 - DNA, 30 bp, Artificial Sequence
  Synthetic oligonucleotide
ctatgtaaggcgagtgactctttttggtga

SEQ ID NO: 171939 - DNA, 30 bp, Artificial Sequence
  Synthetic oligonucleotide
cgacgtgtcggagaagtaggaaccatgtga

SEQ ID NO: 171940 - DNA, 30 bp, Artificial Sequence
  Synthetic oligonucleotide
tcgcgctagtctatctgagaagccatgtga

SEQ ID NO: 171941 - DNA, 30 bp, Artificial Sequence
  Synthetic oligonucleotide
ggtcggatttagtcacatgggaagatgtga

SEQ ID NO: 171942 - DNA, 30 bp, Artificial Sequence
  Synthetic oligonucleotide
gaatcactccaaacaacagaacatatgtga

SEQ ID NO: 171943 - DNA, 30 bp, Artificial Sequence
  Synthetic oligonucleotide
catagcgggatcccgagagttcgtatgtga

SEQ ID NO: 171944 - DNA, 30 bp, Artificial Sequence
  Synthetic oligonucleotide
ggctcgtgaatattccctcaaatactgtga

SEQ ID NO: 171945 - DNA, 30 bp, Artificial Sequence
  Synthetic oligonucleotide
cgttacggaattaccacatttaaagtgtga

SEQ ID NO: 171946 - DNA, 29 bp, Artificial Sequence
  Synthetic oligonucleotide
gggtgatacacttggatgacagagtgtga

SEQ ID NO: 171947 - DNA, 30 bp, Artificial Sequence
  Synthetic oligonucleotide
actgtgaggaggtaacggcgacatgtgtga

SEQ ID NO: 171948 - DNA, 30 bp, Artificial Sequence
  Synthetic oligonucleotide
gatcttggagtcctactgtcttatgtgtga

SEQ ID NO: 171949 - DNA, 30 bp, Artificial Sequence
  Synthetic oligonucleotide
tggcggctcccctggaagacgtcgttgtga

SEQ ID NO: 171950 - DNA, 30 bp, Artificial Sequence
  Synthetic oligonucleotide
aacgtgccgtatttgaaacggctgttgtga

SEQ ID NO: 171951 - DNA, 30 bp, Artificial Sequence
  Synthetic oligonucleotide
cataactctggaaagccatgtttgttgtga

SEQ ID NO: 171952 - DNA, 30 bp, Artificial Sequence
  Synthetic oligonucleotide
taacgagattgtaccatcatggctttgtga

SEQ ID NO: 171953 - DNA, 30 bp, Artificial Sequence
  Synthetic oligonucleotide
tacgaaattgtttcgttaattggccattga

SEQ ID NO: 171954 - DNA, 30 bp, Artificial Sequence
  Synthetic oligonucleotide
aggacccggttcggttactgtgcgcattga

SEQ ID NO: 171955 - DNA, 30 bp, Artificial Sequence
  Synthetic oligonucleotide
gtgcgagcactacctttttaagggcattga

SEQ ID NO: 171956 - DNA, 30 bp, Artificial Sequence
  Synthetic oligonucleotide
cgacgtaagaagggggatttttggcattga

SEQ ID NO: 171957 - DNA, 30 bp, Artificial Sequence
  Synthetic oligonucleotide
gcagtgaaggcctgaggtttcggtcattga

SEQ ID NO: 171958 - DNA, 30 bp, Artificial Sequence
  Synthetic oligonucleotide
gataccgcgagtaagtatcaggttcattga

SEQ ID NO: 171959 - DNA, 30 bp, Artificial Sequence
  Synthetic oligonucleotide
gggcatggcgaattcgcaacatgcgattga

SEQ ID NO: 171960 - DNA, 30 bp, Artificial Sequence
  Synthetic oligonucleotide
tgcgcttctgcgagttattggccggattga

SEQ ID NO: 171961 - DNA, 30 bp, Artificial Sequence
  Synthetic oligonucleotide
cgtaagcgtgggttctccagaatggattga

SEQ ID NO: 171962 - DNA, 30 bp, Artificial Sequence
  Synthetic oligonucleotide
gagaataaaaacatccaagggtatgattga

SEQ ID NO: 171963 - DNA, 30 bp, Artificial Sequence
  Synthetic oligonucleotide
tctacaaccttggtactatcaggtgattga

SEQ ID NO: 171964 - DNA, 30 bp, Artificial Sequence
  Synthetic oligonucleotide
cgggtgacacttcagtcatgctcatattga

SEQ ID NO: 171965 - DNA, 30 bp, Artificial Sequence
  Synthetic oligonucleotide
gcgtaaaaggtcgagcattatgcgtattga

SEQ ID NO: 171966 - DNA, 30 bp, Artificial Sequence
  Synthetic oligonucleotide
gatggctacttatcaatgctcggttattga

SEQ ID NO: 171967 - DNA, 30 bp, Artificial Sequence
  Synthetic oligonucleotide
atcgtctggattcaatggtgttgaacttga

SEQ ID NO: 171968 - DNA, 30 bp, Artificial Sequence
  Synthetic oligonucleotide
cggaagggccgatcatgaaaccgcacttga

SEQ ID NO: 171969 - DNA, 30 bp, Artificial Sequence
  Synthetic oligonucleotide
agggcctcttggtcacgagagaaaccttga

SEQ ID NO: 171970 - DNA, 30 bp, Artificial Sequence
  Synthetic oligonucleotide
tctcaaccaacggactaacaacaaccttga

SEQ ID NO: 171971 - DNA, 30 bp, Artificial Sequence
  Synthetic oligonucleotide
ccagtcataaaaaggtgacacttgccttga

SEQ ID NO: 171972 - DNA, 30 bp, Artificial Sequence
  Synthetic oligonucleotide
catatgcttaggaatttgtgtacagcttga

SEQ ID NO: 171973 - DNA, 30 bp, Artificial Sequence
  Synthetic oligonucleotide
ttgcacgagttctatagctcatacgcttga

SEQ ID NO: 171974 - DNA, 30 bp, Artificial Sequence
  Synthetic oligonucleotide
tgcgacgcgagaaatgactagactgcttga

SEQ ID NO: 171975 - DNA, 30 bp, Artificial Sequence
  Synthetic oligonucleotide
acgaacgcctgcgatttaggaccgtcttga

SEQ ID NO: 171976 - DNA, 30 bp, Artificial Sequence
  Synthetic oligonucleotide
acttaaagtggggtgatcggattgtcttga

SEQ ID NO: 171977 - DNA, 30 bp, Artificial Sequence
  Synthetic oligonucleotide
tatcgaaccaagtagacgggagattcttga

SEQ ID NO: 171978 - DNA, 30 bp, Artificial Sequence
  Synthetic oligonucleotide
aacggggtgtatcggtaagcaacgagttga

SEQ ID NO: 171979 - DNA, 30 bp, Artificial Sequence
  Synthetic oligonucleotide
cgccccgaagtcattcgagtatatagttga

SEQ ID NO: 171980 - DNA, 30 bp, Artificial Sequence
  Synthetic oligonucleotide
ggggcttatcattgcccataacgtagttga

SEQ ID NO: 171981 - DNA, 30 bp, Artificial Sequence
  Synthetic oligonucleotide
ttggcaaaaagaccggactcctgacgttga

SEQ ID NO: 171982 - DNA, 30 bp, Artificial Sequence
  Synthetic oligonucleotide
cggctagggcgctccatattccatcgttga

SEQ ID NO: 171983 - DNA, 30 bp, Artificial Sequence
  Synthetic oligonucleotide
cacgagtataacttatctggcagaggttga

SEQ ID NO: 171984 - DNA, 30 bp, Artificial Sequence
  Synthetic oligonucleotide
ggcacaatcacgataaggaccgtaggttga

SEQ ID NO: 171985 - DNA, 30 bp, Artificial Sequence
  Synthetic oligonucleotide
caatatcggtccatgaaaagacctggttga

SEQ ID NO: 171986 - DNA, 30 bp, Artificial Sequence
  Synthetic oligonucleotide
gtcccagtagtgaatacaacggcatgttga

SEQ ID NO: 171987 - DNA, 30 bp, Artificial Sequence
  Synthetic oligonucleotide
cgtccgcgatccggggaataaatgtgttga

SEQ ID NO: 171988 - DNA, 30 bp, Artificial Sequence
  Synthetic oligonucleotide
tcactgttggccgtagaaaggtgaatttga

SEQ ID NO: 171989 - DNA, 30 bp, Artificial Sequence
  Synthetic oligonucleotide
ccagtacagaggcttgcagctcccatttga

SEQ ID NO: 171990 - DNA, 30 bp, Artificial Sequence
  Synthetic oligonucleotide
caaccgctcgagctgtctttgaagatttga

SEQ ID NO: 171991 - DNA, 30 bp, Artificial Sequence
  Synthetic oligonucleotide
ttggtttagcggctaggcgaattgctttga

SEQ ID NO: 171992 - DNA, 30 bp, Artificial Sequence
  Synthetic oligonucleotide
tacgcaaggtcgtgcgtgggtacggtttga

SEQ ID NO: 171993 - DNA, 30 bp, Artificial Sequence
  Synthetic oligonucleotide
agggcgaccgctgctggttgggatgtttga

SEQ ID NO: 171994 - DNA, 30 bp, Artificial Sequence
  Synthetic oligonucleotide
gaggtctctcgtcaatgtccctagttttga

SEQ ID NO: 171995 - DNA, 30 bp, Artificial Sequence
  Synthetic oligonucleotide
tcatgcaggtggaatgcgttgtagttttga

SEQ ID NO: 171996 - DNA, 30 bp, Artificial Sequence
  Synthetic oligonucleotide
cgggtaacgctactcatacaggaaaaaata

SEQ ID NO: 171997 - DNA, 30 bp, Artificial Sequence
  Synthetic oligonucleotide
gtccggtacagcacgtagggaccaaaaata

SEQ ID NO: 171998 - DNA, 30 bp, Artificial Sequence
  Synthetic oligonucleotide
atgcgtgaataataaacgagttgaaaaata

SEQ ID NO: 171999 - DNA, 30 bp, Artificial Sequence
  Synthetic oligonucleotide
cttgagttctcagagggttgcgcgaaaata

SEQ ID NO: 172000 - DNA, 30 bp, Artificial Sequence
  Synthetic oligonucleotide
tgatggggatcggacacttaataacaaata

SEQ ID NO: 172001 - DNA, 31 bp, Artificial Sequence
  Synthetic oligonucleotide
ccttaaggtcaactactcagagccacaaata

SEQ ID NO: 172002 - DNA, 30 bp, Artificial Sequence
  Synthetic oligonucleotide
ccaggcgggacaagttgtctggcacaaata

SEQ ID NO: 172003 - DNA, 30 bp, Artificial Sequence
  Synthetic oligonucleotide
ggtaatgcatactgcgtggattaccaaata

SEQ ID NO: 172004 - DNA, 30 bp, Artificial Sequence
  Synthetic oligonucleotide
gggcaaaccagtcacacttcaacccaaata

SEQ ID NO: 172005 - DNA, 30 bp, Artificial Sequence
  Synthetic oligonucleotide
tatgaccttagtggggtaataaagcaaata

SEQ ID NO: 172006 - DNA, 30 bp, Artificial Sequence
  Synthetic oligonucleotide
caggaattgtgacttatgctggggcaaata

SEQ ID NO: 172007 - DNA, 30 bp, Artificial Sequence
  Synthetic oligonucleotide
ttcaagaacctaacggaatatatgcaaata

SEQ ID NO: 172008 - DNA, 30 bp, Artificial Sequence
  Synthetic oligonucleotide
ctcccactgattccttctgtcctgcaaata

SEQ ID NO: 172009 - DNA, 30 bp, Artificial Sequence
  Synthetic oligonucleotide
catctgggtgttccggtcccggatcaaata

SEQ ID NO: 172010 - DNA, 30 bp, Artificial Sequence
  Synthetic oligonucleotide
tccgataacgtatgtgtacgccacgaaata

SEQ ID NO: 172011 - DNA, 30 bp, Artificial Sequence
  Synthetic oligonucleotide
catcaggtggactgcggggggcaggaaata

SEQ ID NO: 172012 - DNA, 30 bp, Artificial Sequence
  Synthetic oligonucleotide
ggagtcctttcaagggcagtggaggaaata

SEQ ID NO: 172013 - DNA, 30 bp, Artificial Sequence
  Synthetic oligonucleotide
aaaatgcagccaagcgaccgtatggaaata

SEQ ID NO: 172014 - DNA, 30 bp, Artificial Sequence
  Synthetic oligonucleotide
ttcaataaacgtggctggtgttatgaaata

SEQ ID NO: 172015 - DNA, 30 bp, Artificial Sequence
  Synthetic oligonucleotide
gataaaccctaatgttgctggtttgaaata

SEQ ID NO: 172016 - DNA, 30 bp, Artificial Sequence
  Synthetic oligonucleotide
acatgagatgccatctgcttaacctaaata

SEQ ID NO: 172017 - DNA, 30 bp, Artificial Sequence
  Synthetic oligonucleotide
gcctgagtctgaccagtgttaaagtaaata

SEQ ID NO: 172018 - DNA, 30 bp, Artificial Sequence
  Synthetic oligonucleotide
atgttcaagcttactaatatcaagtaaata

SEQ ID NO: 172019 - DNA, 30 bp, Artificial Sequence
  Synthetic oligonucleotide
gttatggttaacgaatcatctgggtaaata

SEQ ID NO: 172020 - DNA, 30 bp, Artificial Sequence
  Synthetic oligonucleotide
gttagcgatacctgagttgtgtattaaata

SEQ ID NO: 172021 - DNA, 30 bp, Artificial Sequence
  Synthetic oligonucleotide
ctgtcggagtttcgaacacgtagaacaata

SEQ ID NO: 172022 - DNA, 30 bp, Artificial Sequence
  Synthetic oligonucleotide
ccctaaagtaagtgaaccatgggcacaata

SEQ ID NO: 172023 - DNA, 30 bp, Artificial Sequence
  Synthetic oligonucleotide
tggcgatctgctagtttcttaatcgcaata

SEQ ID NO: 172024 - DNA, 30 bp, Artificial Sequence
  Synthetic oligonucleotide
gtgggtggcagcagtgctgagcgatcaata

SEQ ID NO: 172025 - DNA, 30 bp, Artificial Sequence
  Synthetic oligonucleotide
gtgacgtcgccccctagagagatatcaata

SEQ ID NO: 172026 - DNA, 30 bp, Artificial Sequence
  Synthetic oligonucleotide
ggtagctgaggttcggccattttatcaata

SEQ ID NO: 172027 - DNA, 30 bp, Artificial Sequence
  Synthetic oligonucleotide
gggtgccacatacttagggaatcctcaata

SEQ ID NO: 172028 - DNA, 30 bp, Artificial Sequence
  Synthetic oligonucleotide
cattaataagacactcgggggccaagaata

SEQ ID NO: 172029 - DNA, 30 bp, Artificial Sequence
  Synthetic oligonucleotide
cgagccgaacagcttgaggaacccagaata

SEQ ID NO: 172030 - DNA, 30 bp, Artificial Sequence
  Synthetic oligonucleotide
gagcctgcttagtccttagaatccagaata

SEQ ID NO: 172031 - DNA, 30 bp, Artificial Sequence
  Synthetic oligonucleotide
gagtcaagtgtagccggccagcgcagaata

SEQ ID NO: 172032 - DNA, 30 bp, Artificial Sequence
  Synthetic oligonucleotide
catccggggttcaatgattacatcagaata

SEQ ID NO: 172033 - DNA, 30 bp, Artificial Sequence
  Synthetic oligonucleotide
acataatcactactcggtagtatcagaata

SEQ ID NO: 172034 - DNA, 30 bp, Artificial Sequence
  Synthetic oligonucleotide
cgcatttcgatagaatcgaggttcagaata

SEQ ID NO: 172035 - DNA, 30 bp, Artificial Sequence
  Synthetic oligonucleotide
aaactcaggtaaggagacctgcatagaata

SEQ ID NO: 172036 - DNA, 31 bp, Artificial Sequence
  Synthetic oligonucleotide
gcagactcgggtgccgggagtcgaacgaata

SEQ ID NO: 172037 - DNA, 30 bp, Artificial Sequence
  Synthetic oligonucleotide
ggcctccagacggatgttcgattccgaata

SEQ ID NO: 172038 - DNA, 30 bp, Artificial Sequence
  Synthetic oligonucleotide
gaaccggcgagatctcatgaattgcgaata

SEQ ID NO: 172039 - DNA, 30 bp, Artificial Sequence
  Synthetic oligonucleotide
ctacagagatagttcgatagtcaaggaata

SEQ ID NO: 172040 - DNA, 30 bp, Artificial Sequence
  Synthetic oligonucleotide
gcagggcaatttcatacagtgaagggaata

SEQ ID NO: 172041 - DNA, 30 bp, Artificial Sequence
  Synthetic oligonucleotide
ggaagtcacagaagtggttgggagggaata

SEQ ID NO: 172042 - DNA, 30 bp, Artificial Sequence
  Synthetic oligonucleotide
gaacctggtcgagacaccgctacgggaata

SEQ ID NO: 172043 - DNA, 30 bp, Artificial Sequence
  Synthetic oligonucleotide
acctcatatcattcacgcttgccatgaata

SEQ ID NO: 172044 - DNA, 30 bp, Artificial Sequence
  Synthetic oligonucleotide
cctgcccaaggcgcaagtaaccggtgaata

SEQ ID NO: 172045 - DNA, 30 bp, Artificial Sequence
  Synthetic oligonucleotide
aaaagtgtttgtctagcgatgtggtgaata

SEQ ID NO: 172046 - DNA, 30 bp, Artificial Sequence
  Synthetic oligonucleotide
cagagccaaacatgctataacatgtgaata

SEQ ID NO: 172047 - DNA, 30 bp, Artificial Sequence
  Synthetic oligonucleotide
aacaggagggagtgatgagacgtttgaata

SEQ ID NO: 172048 - DNA, 30 bp, Artificial Sequence
  Synthetic oligonucleotide
agaatctccaagagcgcaaaacaaataata

SEQ ID NO: 172049 - DNA, 30 bp, Artificial Sequence
  Synthetic oligonucleotide
atgtcagtcgtcaagaggttttaaataata

SEQ ID NO: 172050 - DNA, 30 bp, Artificial Sequence
  Synthetic oligonucleotide
gtcacggcgcactggaattaacagataata

SEQ ID NO: 172051 - DNA, 30 bp, Artificial Sequence
  Synthetic oligonucleotide
acacacacagtgtaagcgtataggataata

SEQ ID NO: 172052 - DNA, 30 bp, Artificial Sequence
  Synthetic oligonucleotide
cctatggcgcctacaatctgcaatataata

SEQ ID NO: 172053 - DNA, 30 bp, Artificial Sequence
  Synthetic oligonucleotide
gaattaggaaaaccaagcaccggtataata

SEQ ID NO: 172054 - DNA, 30 bp, Artificial Sequence
  Synthetic oligonucleotide
atcttgatactgtagagtcggacactaata

SEQ ID NO: 172055 - DNA, 30 bp, Artificial Sequence
  Synthetic oligonucleotide
taacgttgcagttcttttatctagctaata

SEQ ID NO: 172056 - DNA, 30 bp, Artificial Sequence
  Synthetic oligonucleotide
taagcacaagtacatgcagcagcagtaata

SEQ ID NO: 172057 - DNA, 30 bp, Artificial Sequence
  Synthetic oligonucleotide
tagtatagatcaacgattattagagtaata

SEQ ID NO: 172058 - DNA, 30 bp, Artificial Sequence
  Synthetic oligonucleotide
acagtagggcggtttataatgaacgtaata

SEQ ID NO: 172059 - DNA, 30 bp, Artificial Sequence
  Synthetic oligonucleotide
tgcacacctgccaactggcaacaggtaata

SEQ ID NO: 172060 - DNA, 30 bp, Artificial Sequence
  Synthetic oligonucleotide
atgtgacgaacacggcaagctgaggtaata

SEQ ID NO: 172061 - DNA, 30 bp, Artificial Sequence
  Synthetic oligonucleotide
gatgttcaagggtatcatgtgtcggtaata

SEQ ID NO: 172062 - DNA, 30 bp, Artificial Sequence
  Synthetic oligonucleotide
ccccatgaccaacgtgttggggctgtaata

SEQ ID NO: 172063 - DNA, 30 bp, Artificial Sequence
  Synthetic oligonucleotide
atgcagagctagagcggccagtgtgtaata

SEQ ID NO: 172064 - DNA, 30 bp, Artificial Sequence
  Synthetic oligonucleotide
acggtgtaacaagtgtaaaaaggattaata

SEQ ID NO: 172065 - DNA, 30 bp, Artificial Sequence
  Synthetic oligonucleotide
accgacctgccactgaaaatcaacttaata

SEQ ID NO: 172066 - DNA, 30 bp, Artificial Sequence
  Synthetic oligonucleotide
cagttaacgggatgtggtgaacggttaata

SEQ ID NO: 172067 - DNA, 30 bp, Artificial Sequence
  Synthetic oligonucleotide
gattcgtgtgaaaagaggggccatttaata

SEQ ID NO: 172068 - DNA, 30 bp, Artificial Sequence
  Synthetic oligonucleotide
agagagtaagcgtgtctgttcaaaaacata

SEQ ID NO: 172069 - DNA, 30 bp, Artificial Sequence
  Synthetic oligonucleotide
cgtcataggcgggggggaggttgaaacata

SEQ ID NO: 172070 - DNA, 30 bp, Artificial Sequence
  Synthetic oligonucleotide
ggagtgattagttcacaggtagtaaacata

SEQ ID NO: 172071 - DNA, 31 bp, Artificial Sequence
  Synthetic oligonucleotide
cagctggtcacgcgtcggttacacgaacata

SEQ ID NO: 172072 - DNA, 30 bp, Artificial Sequence
  Synthetic oligonucleotide
gcttatagcacaatgcgatgaaaacacata

SEQ ID NO: 172073 - DNA, 31 bp, Artificial Sequence
  Synthetic oligonucleotide
aatgttcatagctacgactcggtgacacata

SEQ ID NO: 172074 - DNA, 30 bp, Artificial Sequence
  Synthetic oligonucleotide
tctaccgtccaacggaatgcccctcacata

SEQ ID NO: 172075 - DNA, 30 bp, Artificial Sequence
  Synthetic oligonucleotide
ggcctacaggctggatgtagccaagacata

SEQ ID NO: 172076 - DNA, 30 bp, Artificial Sequence
  Synthetic oligonucleotide
agtaggatccccacaacgacctcagacata

SEQ ID NO: 172077 - DNA, 30 bp, Artificial Sequence
  Synthetic oligonucleotide
tgaacgaacgacgcttatcatttggacata

SEQ ID NO: 172078 - DNA, 30 bp, Artificial Sequence
  Synthetic oligonucleotide
cgaggttgtaagttcgaggcacttgacata

SEQ ID NO: 172079 - DNA, 30 bp, Artificial Sequence
  Synthetic oligonucleotide
gtagtagcaccaagaggaaaaccatacata

SEQ ID NO: 172080 - DNA, 30 bp, Artificial Sequence
  Synthetic oligonucleotide
cgcatcgctcgaagaccctgaatctacata

SEQ ID NO: 172081 - DNA, 30 bp, Artificial Sequence
  Synthetic oligonucleotide
cagcggtttcgctgtcatagcaagtacata

SEQ ID NO: 172082 - DNA, 30 bp, Artificial Sequence
  Synthetic oligonucleotide
agaggccagaatcggaggcaccccaccata

SEQ ID NO: 172083 - DNA, 30 bp, Artificial Sequence
  Synthetic oligonucleotide
atcgtcctggactgttagtttacgaccata

SEQ ID NO: 172084 - DNA, 30 bp, Artificial Sequence
  Synthetic oligonucleotide
agaacgggggagcacgtcgctttgaccata

SEQ ID NO: 172085 - DNA, 30 bp, Artificial Sequence
  Synthetic oligonucleotide
gtcagggctatattcatatgaactaccata

SEQ ID NO: 172086 - DNA, 30 bp, Artificial Sequence
  Synthetic oligonucleotide
ctaagacgtaccataattaccgaccccata

SEQ ID NO: 172087 - DNA, 30 bp, Artificial Sequence
  Synthetic oligonucleotide
tcggataagttcaccgttgcgctccccata

SEQ ID NO: 172088 - DNA, 30 bp, Artificial Sequence
  Synthetic oligonucleotide
tagtaccagatggacataagacatcccata

SEQ ID NO: 172089 - DNA, 30 bp, Artificial Sequence
  Synthetic oligonucleotide
cggtgtaacggaggtccgaggcaagccata

SEQ ID NO: 172090 - DNA, 30 bp, Artificial Sequence
  Synthetic oligonucleotide
gcggatagctattctaaatacgatgccata

SEQ ID NO: 172091 - DNA, 30 bp, Artificial Sequence
  Synthetic oligonucleotide
tgattctggcactccacaccatctgccata

SEQ ID NO: 172092 - DNA, 30 bp, Artificial Sequence
  Synthetic oligonucleotide
tagttgccgaaatggcgtgtagaatccata

SEQ ID NO: 172093 - DNA, 30 bp, Artificial Sequence
  Synthetic oligonucleotide
gtaatgggcgatggggtattaaattccata

SEQ ID NO: 172094 - DNA, 30 bp, Artificial Sequence
  Synthetic oligonucleotide
atatacttaaaggaaaacacggcaagcata

SEQ ID NO: 172095 - DNA, 30 bp, Artificial Sequence
  Synthetic oligonucleotide
ggggacgtactcctcaaattatgaagcata

SEQ ID NO: 172096 - DNA, 30 bp, Artificial Sequence
  Synthetic oligonucleotide
cgggagttcctttcaatctaagtaagcata

SEQ ID NO: 172097 - DNA, 30 bp, Artificial Sequence
  Synthetic oligonucleotide
caaaggatcaatctagggtttaccagcata

SEQ ID NO: 172098 - DNA, 30 bp, Artificial Sequence
  Synthetic oligonucleotide
tgtgtagaaaccgtgatgaatatgagcata

SEQ ID NO: 172099 - DNA, 30 bp, Artificial Sequence
  Synthetic oligonucleotide
tgggcaaaactcgtccgcaggaatagcata

SEQ ID NO: 172100 - DNA, 30 bp, Artificial Sequence
  Synthetic oligonucleotide
tgatgcacctcggccaagagccatagcata

SEQ ID NO: 172101 - DNA, 30 bp, Artificial Sequence
  Synthetic oligonucleotide
gggctcgacgaagaatcattgtcgcgcata

SEQ ID NO: 172102 - DNA, 30 bp, Artificial Sequence
  Synthetic oligonucleotide
ggatgggcttcggaaagcgggattcgcata

SEQ ID NO: 172103 - DNA, 30 bp, Artificial Sequence
  Synthetic oligonucleotide
taagcccacgtagagacggggattcgcata

SEQ ID NO: 172104 - DNA, 30 bp, Artificial Sequence
  Synthetic oligonucleotide
gctcgtctggatgcgtgtgttgcatgcata

SEQ ID NO: 172105 - DNA, 30 bp, Artificial Sequence
  Synthetic oligonucleotide
tagctccatcaggctagtgacatttgcata

SEQ ID NO: 172106 - DNA, 30 bp, Artificial Sequence
  Synthetic oligonucleotide
ctgagggcaagccatgctgggtcaatcata

SEQ ID NO: 172107 - DNA, 30 bp, Artificial Sequence
  Synthetic oligonucleotide
caaacccacagtgagcactgttcaatcata

SEQ ID NO: 172108 - DNA, 30 bp, Artificial Sequence
  Synthetic oligonucleotide
cgggagccataagaagacaccgtaatcata

SEQ ID NO: 172109 - DNA, 30 bp, Artificial Sequence
  Synthetic oligonucleotide
cactagttccggtgtggcgagatgatcata

SEQ ID NO: 172110 - DNA, 30 bp, Artificial Sequence
  Synthetic oligonucleotide
acgagtccaccaagagcgtcggatatcata

SEQ ID NO: 172111 - DNA, 30 bp, Artificial Sequence
  Synthetic oligonucleotide
gtgcccgaaagaggggagcggcagctcata

SEQ ID NO: 172112 - DNA, 30 bp, Artificial Sequence
  Synthetic oligonucleotide
gcgtcatgatcggtgattacaaaggtcata

SEQ ID NO: 172113 - DNA, 30 bp, Artificial Sequence
  Synthetic oligonucleotide
gtttggcgacaaatgaaggtgtgggtcata

SEQ ID NO: 172114 - DNA, 30 bp, Artificial Sequence
  Synthetic oligonucleotide
ctttcataggaaaagcccctaactgtcata

SEQ ID NO: 172115 - DNA, 30 bp, Artificial Sequence
  Synthetic oligonucleotide
attagagacacccgcatttccattgtcata

SEQ ID NO: 172116 - DNA, 30 bp, Artificial Sequence
  Synthetic oligonucleotide
ggggattcgcccagttagagctcattcata

SEQ ID NO: 172117 - DNA, 30 bp, Artificial Sequence
  Synthetic oligonucleotide
caaaacgttcagaatgtagtgctattcata

SEQ ID NO: 172118 - DNA, 30 bp, Artificial Sequence
  Synthetic oligonucleotide
tcatcgtatgcgttgaaaagattcttcata

SEQ ID NO: 172119 - DNA, 30 bp, Artificial Sequence
  Synthetic oligonucleotide
gggtaggaaccgggtcgctcaccaaagata

SEQ ID NO: 172120 - DNA, 30 bp, Artificial Sequence
  Synthetic oligonucleotide
ttaagagcaaattagttaataggaaagata

SEQ ID NO: 172121 - DNA, 30 bp, Artificial Sequence
  Synthetic oligonucleotide
aatagagtaacctaagaacctcgacagata

SEQ ID NO: 172122 - DNA, 30 bp, Artificial Sequence
  Synthetic oligonucleotide
atagaggaaatcagatattttatgcagata

SEQ ID NO: 172123 - DNA, 30 bp, Artificial Sequence
  Synthetic oligonucleotide
aactaaccccccatagttaaggatcagata

SEQ ID NO: 172124 - DNA, 30 bp, Artificial Sequence
  Synthetic oligonucleotide
gtcactaccgataaggaccaccttcagata

SEQ ID NO: 172125 - DNA, 30 bp, Artificial Sequence
  Synthetic oligonucleotide
gtgttaggtgactcgatagcaacggagata

SEQ ID NO: 172126 - DNA, 30 bp, Artificial Sequence
  Synthetic oligonucleotide
tagacaccctaggagtctgctaatgagata

SEQ ID NO: 172127 - DNA, 30 bp, Artificial Sequence
  Synthetic oligonucleotide
acatggctagatttacacaaacatgagata

SEQ ID NO: 172128 - DNA, 30 bp, Artificial Sequence
  Synthetic oligonucleotide
aacattggcggagtcgccagtacatagata

SEQ ID NO: 172129 - DNA, 30 bp, Artificial Sequence
  Synthetic oligonucleotide
cctagacgtcaacaggactcagcttagata

SEQ ID NO: 172130 - DNA, 30 bp, Artificial Sequence
  Synthetic oligonucleotide
agatcgttgcacaacgcacaagcgacgata

SEQ ID NO: 172131 - DNA, 30 bp, Artificial Sequence
  Synthetic oligonucleotide
atatggatagcagaggaaagttcgacgata

SEQ ID NO: 172132 - DNA, 30 bp, Artificial Sequence
  Synthetic oligonucleotide
gaatgagcagagatatccaggaatacgata

SEQ ID NO: 172133 - DNA, 30 bp, Artificial Sequence
  Synthetic oligonucleotide
aggcccgtcaccaaacatctcgacccgata

SEQ ID NO: 172134 - DNA, 30 bp, Artificial Sequence
  Synthetic oligonucleotide
cggtagttcaagaatgtagtttccccgata

SEQ ID NO: 172135 - DNA, 30 bp, Artificial Sequence
  Synthetic oligonucleotide
ttataagacggggctgaactgcagccgata

SEQ ID NO: 172136 - DNA, 30 bp, Artificial Sequence
  Synthetic oligonucleotide
agctcagatccccataagtggggcgcgata

SEQ ID NO: 172137 - DNA, 30 bp, Artificial Sequence
  Synthetic oligonucleotide
ataacaagggcttcctacggttaggcgata

SEQ ID NO: 172138 - DNA, 30 bp, Artificial Sequence
  Synthetic oligonucleotide
agtctcttcggcgcggtgcgttcggcgata

SEQ ID NO: 172139 - DNA, 30 bp, Artificial Sequence
  Synthetic oligonucleotide
cgtttttgggaggttctgcggagggcgata

SEQ ID NO: 172140 - DNA, 30 bp, Artificial Sequence
  Synthetic oligonucleotide
gtgtttacaacgctattgctatgggcgata

SEQ ID NO: 172141 - DNA, 30 bp, Artificial Sequence
  Synthetic oligonucleotide
agaataatctagatcccaacgtgggcgata

SEQ ID NO: 172142 - DNA, 30 bp, Artificial Sequence
  Synthetic oligonucleotide
tggtgaccattgctagaagtgaactcgata

SEQ ID NO: 172143 - DNA, 30 bp, Artificial Sequence
  Synthetic oligonucleotide
ggatgcctgatttcatatctcgcctcgata

SEQ ID NO: 172144 - DNA, 30 bp, Artificial Sequence
  Synthetic oligonucleotide
gatcataccagtagggagtgggcgtcgata

SEQ ID NO: 172145 - DNA, 30 bp, Artificial Sequence
  Synthetic oligonucleotide
catggggcccagacgacgttgttgtcgata

SEQ ID NO: 172146 - DNA, 30 bp, Artificial Sequence
  Synthetic oligonucleotide
ctaaaatagaaccagagattgccttcgata

SEQ ID NO: 172147 - DNA, 30 bp, Artificial Sequence
  Synthetic oligonucleotide
gtcacatgagataatggtcgatcaaggata

SEQ ID NO: 172148 - DNA, 30 bp, Artificial Sequence
  Synthetic oligonucleotide
ggctgcaaagaggagctcaactccaggata

SEQ ID NO: 172149 - DNA, 30 bp, Artificial Sequence
  Synthetic oligonucleotide
ctctaatatcagaacgctcacaggaggata

SEQ ID NO: 172150 - DNA, 30 bp, Artificial Sequence
  Synthetic oligonucleotide
agtcgctaggatagtgcattattgaggata

SEQ ID NO: 172151 - DNA, 30 bp, Artificial Sequence
  Synthetic oligonucleotide
ataggtcaaaggtagttctgtggacggata

SEQ ID NO: 172152 - DNA, 30 bp, Artificial Sequence
  Synthetic oligonucleotide
ctcgggcggggaccggcaggtagcgggata

SEQ ID NO: 172153 - DNA, 30 bp, Artificial Sequence
  Synthetic oligonucleotide
gttaaaacaacgcgctagtgggtcgggata

SEQ ID NO: 172154 - DNA, 30 bp, Artificial Sequence
  Synthetic oligonucleotide
cctggatacgctggcgaatccaaatggata

SEQ ID NO: 172155 - DNA, 30 bp, Artificial Sequence
  Synthetic oligonucleotide
atgagtaggctgaccctctcgcaatggata

SEQ ID NO: 172156 - DNA, 30 bp, Artificial Sequence
  Synthetic oligonucleotide
gttcagatcgagaggccagaggaatggata

SEQ ID NO: 172157 - DNA, 30 bp, Artificial Sequence
  Synthetic oligonucleotide
ctttgagagtatcctcaggcaatgtggata

SEQ ID NO: 172158 - DNA, 30 bp, Artificial Sequence
  Synthetic oligonucleotide
atcactggaagtagtccctaatccatgata

SEQ ID NO: 172159 - DNA, 30 bp, Artificial Sequence
  Synthetic oligonucleotide
gccctggtcagggatgattgcttcatgata

SEQ ID NO: 172160 - DNA, 30 bp, Artificial Sequence
  Synthetic oligonucleotide
ccatcaaacgtacatggcgacaggatgata

SEQ ID NO: 172161 - DNA, 30 bp, Artificial Sequence
  Synthetic oligonucleotide
ttacaaaggaaccgatcggacaatatgata

SEQ ID NO: 172162 - DNA, 30 bp, Artificial Sequence
  Synthetic oligonucleotide
tcaggtgcaacaaaatatttgcaactgata

SEQ ID NO: 172163 - DNA, 30 bp, Artificial Sequence
  Synthetic oligonucleotide
ttcatgaacttggataaaactgcgctgata

SEQ ID NO: 172164 - DNA, 30 bp, Artificial Sequence
  Synthetic oligonucleotide
gaataaggagaaataatccgaatgctgata

SEQ ID NO: 172165 - DNA, 30 bp, Artificial Sequence
  Synthetic oligonucleotide
aatgcatacacggtaacctaaaaagtgata

SEQ ID NO: 172166 - DNA, 30 bp, Artificial Sequence
  Synthetic oligonucleotide
aatgtcaatccacactcggttgccgtgata

SEQ ID NO: 172167 - DNA, 30 bp, Artificial Sequence
  Synthetic oligonucleotide
cttcgaaactcaagttaagtcggcgtgata

SEQ ID NO: 172168 - DNA, 30 bp, Artificial Sequence
  Synthetic oligonucleotide
aacctatgcatttaaagcaagggcgtgata

SEQ ID NO: 172169 - DNA, 30 bp, Artificial Sequence
  Synthetic oligonucleotide
cactcataggaatgcttattcggggtgata

SEQ ID NO: 172170 - DNA, 30 bp, Artificial Sequence
  Synthetic oligonucleotide
gggcgtggatgacgttgcataggtgtgata

SEQ ID NO: 172171 - DNA, 30 bp, Artificial Sequence
  Synthetic oligonucleotide
atgtaggtcccaaatacgaatcttgtgata

SEQ ID NO: 172172 - DNA, 30 bp, Artificial Sequence
  Synthetic oligonucleotide
atcgggctgcggtgcgagagtagattgata

SEQ ID NO: 172173 - DNA, 30 bp, Artificial Sequence
  Synthetic oligonucleotide
atggcaacacactactcgacattattgata

SEQ ID NO: 172174 - DNA, 30 bp, Artificial Sequence
  Synthetic oligonucleotide
tggatgacaagttgtgacgattgcttgata

SEQ ID NO: 172175 - DNA, 30 bp, Artificial Sequence
  Synthetic oligonucleotide
ccaaggcagtcgcacgatgatatcttgata

SEQ ID NO: 172176 - DNA, 30 bp, Artificial Sequence
  Synthetic oligonucleotide
gcataacaggacagttcactccggttgata

SEQ ID NO: 172177 - DNA, 30 bp, Artificial Sequence
  Synthetic oligonucleotide
aggcgcagtggtctgagttggagtttgata

SEQ ID NO: 172178 - DNA, 30 bp, Artificial Sequence
  Synthetic oligonucleotide
cagaggtgctcctgaacctcgtgaaatata

SEQ ID NO: 172179 - DNA, 30 bp, Artificial Sequence
  Synthetic oligonucleotide
tacgataacagatagactgtcagtaatata

SEQ ID NO: 172180 - DNA, 30 bp, Artificial Sequence
  Synthetic oligonucleotide
gaggcaggagtgcagaccccttaacatata

SEQ ID NO: 172181 - DNA, 30 bp, Artificial Sequence
  Synthetic oligonucleotide
tagagggattcttccaccctaaaccatata

SEQ ID NO: 172182 - DNA, 30 bp, Artificial Sequence
  Synthetic oligonucleotide
ccgcgaggcgattgcttcttaagccatata

SEQ ID NO: 172183 - DNA, 30 bp, Artificial Sequence
  Synthetic oligonucleotide
gggccgttccgcgcgaacacgttgcatata

SEQ ID NO: 172184 - DNA, 30 bp, Artificial Sequence
  Synthetic oligonucleotide
atcgtcaaggctaagctcgacactcatata

SEQ ID NO: 172185 - DNA, 30 bp, Artificial Sequence
  Synthetic oligonucleotide
tacaacgttagttactactaaccagatata

SEQ ID NO: 172186 - DNA, 30 bp, Artificial Sequence
  Synthetic oligonucleotide
tggagatactgacagctcgggtgcgatata

SEQ ID NO: 172187 - DNA, 30 bp, Artificial Sequence
  Synthetic oligonucleotide
agactaatataagagtggggccatgatata

SEQ ID NO: 172188 - DNA, 30 bp, Artificial Sequence
  Synthetic oligonucleotide
ctcggaaaaaaatggtgggaccgatatata

SEQ ID NO: 172189 - DNA, 30 bp, Artificial Sequence
  Synthetic oligonucleotide
cgggggggcctgggactgctgcagtatata

SEQ ID NO: 172190 - DNA, 30 bp, Artificial Sequence
  Synthetic oligonucleotide
taaacaggtgcacccttgaaggagtatata

SEQ ID NO: 172191 - DNA, 30 bp, Artificial Sequence
  Synthetic oligonucleotide
cgagattacaggttttcgagcacgtatata

SEQ ID NO: 172192 - DNA, 30 bp, Artificial Sequence
  Synthetic oligonucleotide
gcaggtcgggcttgaatgaccatgactata

SEQ ID NO: 172193 - DNA, 30 bp, Artificial Sequence
  Synthetic oligonucleotide
taggaacgcgcaaatatgccacatactata

SEQ ID NO: 172194 - DNA, 30 bp, Artificial Sequence
  Synthetic oligonucleotide
gcaaattcaaggggataggggaaacctata

SEQ ID NO: 172195 - DNA, 30 bp, Artificial Sequence
  Synthetic oligonucleotide
gggatactaacactgatcacggtacctata

SEQ ID NO: 172196 - DNA, 30 bp, Artificial Sequence
  Synthetic oligonucleotide
gccattctagagtatccgagtcctcctata

SEQ ID NO: 172197 - DNA, 30 bp, Artificial Sequence
  Synthetic oligonucleotide
atcaggagacgcctgtccaggtaagctata

SEQ ID NO: 172198 - DNA, 30 bp, Artificial Sequence
  Synthetic oligonucleotide
catacgttgttgatgtgaccccgagctata

SEQ ID NO: 172199 - DNA, 30 bp, Artificial Sequence
  Synthetic oligonucleotide
cgcctaaccaggtacgcgcgggtagctata

SEQ ID NO: 172200 - DNA, 30 bp, Artificial Sequence
  Synthetic oligonucleotide
acgagcagcgccccgtcaggtaccgctata

SEQ ID NO: 172201 - DNA, 30 bp, Artificial Sequence
  Synthetic oligonucleotide
agtagccggcggaatagagtctctgctata

SEQ ID NO: 172202 - DNA, 30 bp, Artificial Sequence
  Synthetic oligonucleotide
acatcggtgtacagaccagcgcagtctata

SEQ ID NO: 172203 - DNA, 30 bp, Artificial Sequence
  Synthetic oligonucleotide
aggtaagggtgaccgggcctagggtctata

SEQ ID NO: 172204 - DNA, 30 bp, Artificial Sequence
  Synthetic oligonucleotide
acatagagacctatatgcatgaggagtata

SEQ ID NO: 172205 - DNA, 30 bp, Artificial Sequence
  Synthetic oligonucleotide
atgcgggggccgtagatacgctctagtata

SEQ ID NO: 172206 - DNA, 30 bp, Artificial Sequence
  Synthetic oligonucleotide
tgtagataccgacgtgacaacaaacgtata

SEQ ID NO: 172207 - DNA, 30 bp, Artificial Sequence
  Synthetic oligonucleotide
gccgaggtgacatagcgctggatgcgtata

SEQ ID NO: 172208 - DNA, 30 bp, Artificial Sequence
  Synthetic oligonucleotide
ggttggcgcctacgaccgtccaaaggtata

SEQ ID NO: 172209 - DNA, 30 bp, Artificial Sequence
  Synthetic oligonucleotide
attcgcgtagtgattcccaatcccggtata

SEQ ID NO: 172210 - DNA, 30 bp, Artificial Sequence
  Synthetic oligonucleotide
cagataggcgatgtatcttagggatgtata

SEQ ID NO: 172211 - DNA, 30 bp, Artificial Sequence
  Synthetic oligonucleotide
ggaggggatctgaggtgaaaaacctgtata

SEQ ID NO: 172212 - DNA, 30 bp, Artificial Sequence
  Synthetic oligonucleotide
agatataaaaatcacacgccgtacattata

SEQ ID NO: 172213 - DNA, 30 bp, Artificial Sequence
  Synthetic oligonucleotide
gggcccacgccatattctcaacccattata

SEQ ID NO: 172214 - DNA, 30 bp, Artificial Sequence
  Synthetic oligonucleotide
agcgtaagggttgtcatgttgatgattata

SEQ ID NO: 172215 - DNA, 30 bp, Artificial Sequence
  Synthetic oligonucleotide
cacgttatcgaatgtacggtctctattata

SEQ ID NO: 172216 - DNA, 30 bp, Artificial Sequence
  Synthetic oligonucleotide
tgtgcgcaactcgggactctccaccttata

SEQ ID NO: 172217 - DNA, 31 bp, Artificial Sequence
  Synthetic oligonucleotide
gacagcaggttcaccaaatgagccagttata

SEQ ID NO: 172218 - DNA, 30 bp, Artificial Sequence
  Synthetic oligonucleotide
gcaaaaggaggtgcatagccactggttata

SEQ ID NO: 172219 - DNA, 30 bp, Artificial Sequence
  Synthetic oligonucleotide
gtaagcgagtgatgtggttttgatgttata

SEQ ID NO: 172220 - DNA, 30 bp, Artificial Sequence
  Synthetic oligonucleotide
atgaattctaaaatgtgaatgactgttata

SEQ ID NO: 172221 - DNA, 30 bp, Artificial Sequence
  Synthetic oligonucleotide
ataacattgcgtaagatcggacgatttata

SEQ ID NO: 172222 - DNA, 30 bp, Artificial Sequence
  Synthetic oligonucleotide
accatccatgttcattgtaaccggtttata

SEQ ID NO: 172223 - DNA, 30 bp, Artificial Sequence
  Synthetic oligonucleotide
acatgcaaaggaataggttcacacaaacta

SEQ ID NO: 172224 - DNA, 30 bp, Artificial Sequence
  Synthetic oligonucleotide
agtgcgcctagggcgaagtccggcaaacta

SEQ ID NO: 172225 - DNA, 30 bp, Artificial Sequence
  Synthetic oligonucleotide
acctcatgacattcaaaatagggcaaacta

SEQ ID NO: 172226 - DNA, 30 bp, Artificial Sequence
  Synthetic oligonucleotide
acttcattcctcagatcggtaacacaacta

SEQ ID NO: 172227 - DNA, 30 bp, Artificial Sequence
  Synthetic oligonucleotide
cgctaagagttcaaaacaaccatacaacta

SEQ ID NO: 172228 - DNA, 30 bp, Artificial Sequence
  Synthetic oligonucleotide
aggttaaggtattaacatttgaagcaacta

SEQ ID NO: 172229 - DNA, 30 bp, Artificial Sequence
  Synthetic oligonucleotide
atcaaggttctttcttgaacggcataacta

SEQ ID NO: 172230 - DNA, 30 bp, Artificial Sequence
  Synthetic oligonucleotide
catgtgcccgccgactttaggtcataacta

SEQ ID NO: 172231 - DNA, 30 bp, Artificial Sequence
  Synthetic oligonucleotide
ccttctagcttataaaactttggataacta

SEQ ID NO: 172232 - DNA, 30 bp, Artificial Sequence
  Synthetic oligonucleotide
tgggaaacgaacccattagtcgtctaacta

SEQ ID NO: 172233 - DNA, 30 bp, Artificial Sequence
  Synthetic oligonucleotide
ccgcacacggttagcacgaatccgtaacta

SEQ ID NO: 172234 - DNA, 30 bp, Artificial Sequence
  Synthetic oligonucleotide
cgctgtcttaatataggaataggttaacta

SEQ ID NO: 172235 - DNA, 30 bp, Artificial Sequence
  Synthetic oligonucleotide
agcgagaatacgatgaaagaatggacacta

SEQ ID NO: 172236 - DNA, 30 bp, Artificial Sequence
  Synthetic oligonucleotide
aggccggatatgtctgctagggatacacta

SEQ ID NO: 172237 - DNA, 30 bp, Artificial Sequence
  Synthetic oligonucleotide
cggccgcagagaattggagaatttacacta

SEQ ID NO: 172238 - DNA, 30 bp, Artificial Sequence
  Synthetic oligonucleotide
aatcgggtgacaacgtgccccacgccacta

SEQ ID NO: 172239 - DNA, 30 bp, Artificial Sequence
  Synthetic oligonucleotide
caggatgcaggtaaaaaccatgcgccacta

SEQ ID NO: 172240 - DNA, 30 bp, Artificial Sequence
  Synthetic oligonucleotide
gtgtaacatgcgtgtccatggcaagcacta

SEQ ID NO: 172241 - DNA, 30 bp, Artificial Sequence
  Synthetic oligonucleotide
ggggggttaaagccgatttagcgcgcacta

SEQ ID NO: 172242 - DNA, 30 bp, Artificial Sequence
  Synthetic oligonucleotide
taatcatcacttgcagtcttgtcggcacta

SEQ ID NO: 172243 - DNA, 30 bp, Artificial Sequence
  Synthetic oligonucleotide
caactgagatgtacgaacagcggggcacta

SEQ ID NO: 172244 - DNA, 30 bp, Artificial Sequence
  Synthetic oligonucleotide
cgtttatggacgacgccagagctggcacta

SEQ ID NO: 172245 - DNA, 30 bp, Artificial Sequence
  Synthetic oligonucleotide
tggcattccggcgagttctcttgtgcacta

SEQ ID NO: 172246 - DNA, 30 bp, Artificial Sequence
  Synthetic oligonucleotide
ccgtctaataggtgcggtctgcttgcacta

SEQ ID NO: 172247 - DNA, 30 bp, Artificial Sequence
  Synthetic oligonucleotide
ttggcgttactgaaaatgaagaggtcacta

SEQ ID NO: 172248 - DNA, 30 bp, Artificial Sequence
  Synthetic oligonucleotide
cgtagcctgactgaatttcaaccaagacta

SEQ ID NO: 172249 - DNA, 30 bp, Artificial Sequence
  Synthetic oligonucleotide
tataaatcccataaatcagaaagaagacta

SEQ ID NO: 172250 - DNA, 30 bp, Artificial Sequence
  Synthetic oligonucleotide
tcactatgtgagaatagtcccggacgacta

SEQ ID NO: 172251 - DNA, 30 bp, Artificial Sequence
  Synthetic oligonucleotide
ggagagctaggtacgctatgttagcgacta

SEQ ID NO: 172252 - DNA, 30 bp, Artificial Sequence
  Synthetic oligonucleotide
ttgcaccgcgtccgaacggtcccaggacta

SEQ ID NO: 172253 - DNA, 30 bp, Artificial Sequence
  Synthetic oligonucleotide
ccatgagctgatagtactcccctaggacta

SEQ ID NO: 172254 - DNA, 30 bp, Artificial Sequence
  Synthetic oligonucleotide
cgggaccctgaccagagctcattaggacta

SEQ ID NO: 172255 - DNA, 30 bp, Artificial Sequence
  Synthetic oligonucleotide
actttaaattaagtgagatcagagggacta

SEQ ID NO: 172256 - DNA, 30 bp, Artificial Sequence
  Synthetic oligonucleotide
caggggacggttatgcttcatgggggacta

SEQ ID NO: 172257 - DNA, 30 bp, Artificial Sequence
  Synthetic oligonucleotide
taacaccgctgctcctcaaacctgggacta

SEQ ID NO: 172258 - DNA, 30 bp, Artificial Sequence
  Synthetic oligonucleotide
ggggtttccgaaatatgtgtaattggacta

SEQ ID NO: 172259 - DNA, 30 bp, Artificial Sequence
  Synthetic oligonucleotide
aaccagaacatgttacagtgttaatgacta

SEQ ID NO: 172260 - DNA, 30 bp, Artificial Sequence
  Synthetic oligonucleotide
aagacgcggtcaatctacattcaaatacta

SEQ ID NO: 172261 - DNA, 30 bp, Artificial Sequence
  Synthetic oligonucleotide
ccgcaaaaggggcgagataattgaatacta

SEQ ID NO: 172262 - DNA, 30 bp, Artificial Sequence
  Synthetic oligonucleotide
ttgagaagcagtggctggttacacatacta

SEQ ID NO: 172263 - DNA, 30 bp, Artificial Sequence
  Synthetic oligonucleotide
tctcactggcatggaaccaccaccatacta

SEQ ID NO: 172264 - DNA, 30 bp, Artificial Sequence
  Synthetic oligonucleotide
ggtggacacaagaacgggcacgtcatacta

SEQ ID NO: 172265 - DNA, 30 bp, Artificial Sequence
  Synthetic oligonucleotide
gccaggccaataaggccaagtcaactacta

SEQ ID NO: 172266 - DNA, 30 bp, Artificial Sequence
  Synthetic oligonucleotide
ttccgttgcgagtgtaacgcacccctacta

SEQ ID NO: 172267 - DNA, 30 bp, Artificial Sequence
  Synthetic oligonucleotide
aaaaatcacactggattgcgagtcctacta

SEQ ID NO: 172268 - DNA, 30 bp, Artificial Sequence
  Synthetic oligonucleotide
gaatatcgtgaactaagaatagggctacta

SEQ ID NO: 172269 - DNA, 30 bp, Artificial Sequence
  Synthetic oligonucleotide
ggctataaccgactgtcttcggaagtacta

SEQ ID NO: 172270 - DNA, 30 bp, Artificial Sequence
  Synthetic oligonucleotide
attagggggcagagcatccgccacgtacta

SEQ ID NO: 172271 - DNA, 30 bp, Artificial Sequence
  Synthetic oligonucleotide
tatcatgtgacatttggtcgacccgtacta

SEQ ID NO: 172272 - DNA, 30 bp, Artificial Sequence
  Synthetic oligonucleotide
tttcattccattcctagagtgcgggtacta

SEQ ID NO: 172273 - DNA, 30 bp, Artificial Sequence
  Synthetic oligonucleotide
tacgagggttcgaggcagaggcttgtacta

SEQ ID NO: 172274 - DNA, 30 bp, Artificial Sequence
  Synthetic oligonucleotide
acaggatagggagaaagccctatattacta

SEQ ID NO: 172275 - DNA, 30 bp, Artificial Sequence
  Synthetic oligonucleotide
tacatgaagaggtgaaaactgtctttacta

SEQ ID NO: 172276 - DNA, 30 bp, Artificial Sequence
  Synthetic oligonucleotide
tcattcacggtgctatagacggcaaaccta

SEQ ID NO: 172277 - DNA, 28 bp, Artificial Sequence
  Synthetic oligonucleotide
tcagatgctgtcgtattcaagaaaccta

SEQ ID NO: 172278 - DNA, 30 bp, Artificial Sequence
  Synthetic oligonucleotide
acaacgcatcccttggggttgagcaaccta

SEQ ID NO: 172279 - DNA, 30 bp, Artificial Sequence
  Synthetic oligonucleotide
gccggacacccaacaaacaccatcaaccta

SEQ ID NO: 172280 - DNA, 30 bp, Artificial Sequence
  Synthetic oligonucleotide
taaaaaaatatggaagcgtctgcgaaccta

SEQ ID NO: 172281 - DNA, 30 bp, Artificial Sequence
  Synthetic oligonucleotide
atgacgcgaagaccccgtaaagataaccta

SEQ ID NO: 172282 - DNA, 30 bp, Artificial Sequence
  Synthetic oligonucleotide
atgcaaaggccggatagtcaacttaaccta

SEQ ID NO: 172283 - DNA, 30 bp, Artificial Sequence
  Synthetic oligonucleotide
acagcacaaaaataatatgccggagaccta

SEQ ID NO: 172284 - DNA, 30 bp, Artificial Sequence
  Synthetic oligonucleotide
acccttagggagaccacgggggtggaccta

SEQ ID NO: 172285 - DNA, 30 bp, Artificial Sequence
  Synthetic oligonucleotide
cgccaattcagtcaggtccagtatgaccta

SEQ ID NO: 172286 - DNA, 30 bp, Artificial Sequence
  Synthetic oligonucleotide
tggcacgaaaagtttaaacgagaataccta

SEQ ID NO: 172287 - DNA, 30 bp, Artificial Sequence
  Synthetic oligonucleotide
gcgttatttggagctgtggcgacgtaccta

SEQ ID NO: 172288 - DNA, 30 bp, Artificial Sequence
  Synthetic oligonucleotide
cactcgggtgcacttcataatcgttaccta

SEQ ID NO: 172289 - DNA, 30 bp, Artificial Sequence
  Synthetic oligonucleotide
acagacacagcaagtctagcaggttaccta

SEQ ID NO: 172290 - DNA, 30 bp, Artificial Sequence
  Synthetic oligonucleotide
attggccgtgaggcatccccaataacccta

SEQ ID NO: 172291 - DNA, 30 bp, Artificial Sequence
  Synthetic oligonucleotide
aaaagggaatgataaggtcataagacccta

SEQ ID NO: 172292 - DNA, 31 bp, Artificial Sequence
  Synthetic oligonucleotide
agcgtttacgtccataaaggggcacccccta

SEQ ID NO: 172293 - DNA, 30 bp, Artificial Sequence
  Synthetic oligonucleotide
gcgacaggtatgcgacgccagtacgcccta

SEQ ID NO: 172294 - DNA, 30 bp, Artificial Sequence
  Synthetic oligonucleotide
aacgtgctcacagatgtttaaacaagccta

SEQ ID NO: 172295 - DNA, 30 bp, Artificial Sequence
  Synthetic oligonucleotide
taaatactaacggttgctaatgacagccta

SEQ ID NO: 172296 - DNA, 30 bp, Artificial Sequence
  Synthetic oligonucleotide
aagggtttcagactacggccttaacgccta

SEQ ID NO: 172297 - DNA, 30 bp, Artificial Sequence
  Synthetic oligonucleotide
taaagaggtggacgtcatattgcacgccta

SEQ ID NO: 172298 - DNA, 30 bp, Artificial Sequence
  Synthetic oligonucleotide
acccagcgtcgaaggaaatgtaaccgccta

SEQ ID NO: 172299 - DNA, 30 bp, Artificial Sequence
  Synthetic oligonucleotide
tctgaagctattgccttgatgcccggccta

SEQ ID NO: 172300 - DNA, 30 bp, Artificial Sequence
  Synthetic oligonucleotide
tggcgaggggattatttggcatgatgccta

SEQ ID NO: 172301 - DNA, 30 bp, Artificial Sequence
  Synthetic oligonucleotide
aagcacacgatgctttcaagagactgccta

SEQ ID NO: 172302 - DNA, 30 bp, Artificial Sequence
  Synthetic oligonucleotide
tgacagacctagcggatttgatcgtgccta

SEQ ID NO: 172303 - DNA, 30 bp, Artificial Sequence
  Synthetic oligonucleotide
tgctgaaatttatggaccaagaggatccta

SEQ ID NO: 172304 - DNA, 30 bp, Artificial Sequence
  Synthetic oligonucleotide
atgagctgaggcacgattcttatgctccta

SEQ ID NO: 172305 - DNA, 30 bp, Artificial Sequence
  Synthetic oligonucleotide
aaagaggtaccgcatgtgcacccggtccta

SEQ ID NO: 172306 - DNA, 30 bp, Artificial Sequence
  Synthetic oligonucleotide
tggagtcgcaaatatcaggggcgtgtccta

SEQ ID NO: 172307 - DNA, 30 bp, Artificial Sequence
  Synthetic oligonucleotide
gtcgtggcttccaataattggggtgtccta

SEQ ID NO: 172308 - DNA, 30 bp, Artificial Sequence
  Synthetic oligonucleotide
tcgattgtaacaacgaaaggaaccttccta

SEQ ID NO: 172309 - DNA, 30 bp, Artificial Sequence
  Synthetic oligonucleotide
atatcacgaagtcgggggagtacgttccta

SEQ ID NO: 172310 - DNA, 30 bp, Artificial Sequence
  Synthetic oligonucleotide
tgtaactatcgatagagccacggtttccta

SEQ ID NO: 172311 - DNA, 30 bp, Artificial Sequence
  Synthetic oligonucleotide
cgttcaaggttttcgcttaaaagaaagcta

SEQ ID NO: 172312 - DNA, 30 bp, Artificial Sequence
  Synthetic oligonucleotide
caatacaaaaaccggagtatggataagcta

SEQ ID NO: 172313 - DNA, 30 bp, Artificial Sequence
  Synthetic oligonucleotide
agtgtacaaacggcatactaaattaagcta

SEQ ID NO: 172314 - DNA, 30 bp, Artificial Sequence
  Synthetic oligonucleotide
cgagctggtcacttctgagttggacagcta

SEQ ID NO: 172315 - DNA, 30 bp, Artificial Sequence
  Synthetic oligonucleotide
taatgggtagtaagggatctaatcgagcta

SEQ ID NO: 172316 - DNA, 30 bp, Artificial Sequence
  Synthetic oligonucleotide
ttggtgactctggatacgtttcgtgagcta

SEQ ID NO: 172317 - DNA, 30 bp, Artificial Sequence
  Synthetic oligonucleotide
tcccaacactaactaatcgcgcaatagcta

SEQ ID NO: 172318 - DNA, 30 bp, Artificial Sequence
  Synthetic oligonucleotide
ggcactggcatctcgtgtaaaacatagcta

SEQ ID NO: 172319 - DNA, 30 bp, Artificial Sequence
  Synthetic oligonucleotide
agtcatactgaagcggggcgcagatagcta

SEQ ID NO: 172320 - DNA, 30 bp, Artificial Sequence
  Synthetic oligonucleotide
gaggcgacaagtacccaccggccctagcta

SEQ ID NO: 172321 - DNA, 30 bp, Artificial Sequence
  Synthetic oligonucleotide
gaccggaaattgcagcgtatcccgtagcta

SEQ ID NO: 172322 - DNA, 30 bp, Artificial Sequence
  Synthetic oligonucleotide
tcttgtgcgaaactggagattttttagcta

SEQ ID NO: 172323 - DNA, 30 bp, Artificial Sequence
  Synthetic oligonucleotide
ctcggtaatacatggtgaatagtaacgcta

SEQ ID NO: 172324 - DNA, 30 bp, Artificial Sequence
  Synthetic oligonucleotide
gtctgaatagggccgtcttacttaacgcta

SEQ ID NO: 172325 - DNA, 30 bp, Artificial Sequence
  Synthetic oligonucleotide
atcatttgactaaattcacgattcacgcta

SEQ ID NO: 172326 - DNA, 30 bp, Artificial Sequence
  Synthetic oligonucleotide
cgttcatacagggccaccacccgaccgcta

SEQ ID NO: 172327 - DNA, 30 bp, Artificial Sequence
  Synthetic oligonucleotide
tctgggggggctaagatttgtctcccgcta

SEQ ID NO: 172328 - DNA, 30 bp, Artificial Sequence
  Synthetic oligonucleotide
ggcctccggagaaaaccgcgtgaagcgcta

SEQ ID NO: 172329 - DNA, 30 bp, Artificial Sequence
  Synthetic oligonucleotide
gtgtggtctaaagttcgtgactcagcgcta

SEQ ID NO: 172330 - DNA, 30 bp, Artificial Sequence
  Synthetic oligonucleotide
gtccccaaacattggtgggagagagcgcta

SEQ ID NO: 172331 - DNA, 30 bp, Artificial Sequence
  Synthetic oligonucleotide
acgcacaaatacataacttggtacgcgcta

SEQ ID NO: 172332 - DNA, 29 bp, Artificial Sequence
  Synthetic oligonucleotide
tgtactttatgaagtggcggcccgcgcta

SEQ ID NO: 172333 - DNA, 30 bp, Artificial Sequence
  Synthetic oligonucleotide
acactcgggaatattgtgagtcgcgcgcta

SEQ ID NO: 172334 - DNA, 30 bp, Artificial Sequence
  Synthetic oligonucleotide
ctgacctgtggagtgcactcagcggcgcta

SEQ ID NO: 172335 - DNA, 30 bp, Artificial Sequence
  Synthetic oligonucleotide
ttccgtttgggggataggttggtggcgcta

SEQ ID NO: 172336 - DNA, 30 bp, Artificial Sequence
  Synthetic oligonucleotide
ttcgttagaatcggacttgtcgctgcgcta

SEQ ID NO: 172337 - DNA, 30 bp, Artificial Sequence
  Synthetic oligonucleotide
tgtaaggagtccaaatcgcactcatcgcta

SEQ ID NO: 172338 - DNA, 30 bp, Artificial Sequence
  Synthetic oligonucleotide
aaagaacctgcgctcacaatgttgtcgcta

SEQ ID NO: 172339 - DNA, 30 bp, Artificial Sequence
  Synthetic oligonucleotide
tagcagggcacgtcacccgacgagaggcta

SEQ ID NO: 172340 - DNA, 30 bp, Artificial Sequence
  Synthetic oligonucleotide
tctcagacacgaacgttggatgcacggcta

SEQ ID NO: 172341 - DNA, 30 bp, Artificial Sequence
  Synthetic oligonucleotide
ccgggagacgtcgaggactcgatagggcta

SEQ ID NO: 172342 - DNA, 30 bp, Artificial Sequence
  Synthetic oligonucleotide
cgggttataaccagtgtagtagtcgggcta

SEQ ID NO: 172343 - DNA, 30 bp, Artificial Sequence
  Synthetic oligonucleotide
tgctgacggaacccatgtatggactggcta

SEQ ID NO: 172344 - DNA, 30 bp, Artificial Sequence
  Synthetic oligonucleotide
gaccacattcaaaagccgggtgactggcta

SEQ ID NO: 172345 - DNA, 30 bp, Artificial Sequence
  Synthetic oligonucleotide
acagtgtagaaggggtaggcagagtggcta

SEQ ID NO: 172346 - DNA, 30 bp, Artificial Sequence
  Synthetic oligonucleotide
ttgagttgtactacgttgaccgagtggcta

SEQ ID NO: 172347 - DNA, 30 bp, Artificial Sequence
  Synthetic oligonucleotide
ggtgtcacgaatcgtcagacagggtggcta

SEQ ID NO: 172348 - DNA, 30 bp, Artificial Sequence
  Synthetic oligonucleotide
acggctcttcgactgtaatagtaaatgcta

SEQ ID NO: 172349 - DNA, 30 bp, Artificial Sequence
  Synthetic oligonucleotide
aaggactgagctcagtgggaggtcatgcta

SEQ ID NO: 172350 - DNA, 30 bp, Artificial Sequence
  Synthetic oligonucleotide
gccttcggaaaatgataaataatgatgcta

SEQ ID NO: 172351 - DNA, 30 bp, Artificial Sequence
  Synthetic oligonucleotide
gcgatcgctgggcctgagattctgatgcta

SEQ ID NO: 172352 - DNA, 30 bp, Artificial Sequence
  Synthetic oligonucleotide
gctaaatacgtagacacgtcatgactgcta

SEQ ID NO: 172353 - DNA, 30 bp, Artificial Sequence
  Synthetic oligonucleotide
aatcaaagtatactggaaaggatactgcta

SEQ ID NO: 172354 - DNA, 30 bp, Artificial Sequence
  Synthetic oligonucleotide
ctcgggaggtacccgggaaaacagctgcta

SEQ ID NO: 172355 - DNA, 30 bp, Artificial Sequence
  Synthetic oligonucleotide
agggcgtaacctcttgttcattcgctgcta

SEQ ID NO: 172356 - DNA, 30 bp, Artificial Sequence
  Synthetic oligonucleotide
ctaggcatattcctaccggtacatctgcta

SEQ ID NO: 172357 - DNA, 30 bp, Artificial Sequence
  Synthetic oligonucleotide
tgatgacctggaagtacatagattctgcta

SEQ ID NO: 172358 - DNA, 30 bp, Artificial Sequence
  Synthetic oligonucleotide
acctccttcactcggatgtgcgtagtgcta

SEQ ID NO: 172359 - DNA, 30 bp, Artificial Sequence
  Synthetic oligonucleotide
cgagataggcatagagccaggttagtgcta

SEQ ID NO: 172360 - DNA, 30 bp, Artificial Sequence
  Synthetic oligonucleotide
attaaagtatgggcgattgctagcgtgcta

SEQ ID NO: 172361 - DNA, 30 bp, Artificial Sequence
  Synthetic oligonucleotide
agaaggtgtaatacttgtcgtggcgtgcta

SEQ ID NO: 172362 - DNA, 30 bp, Artificial Sequence
  Synthetic oligonucleotide
gtgagttgaaatataatgtggcaggtgcta

SEQ ID NO: 172363 - DNA, 30 bp, Artificial Sequence
  Synthetic oligonucleotide
tttgtgtggttttagaaggtctcggtgcta

SEQ ID NO: 172364 - DNA, 30 bp, Artificial Sequence
  Synthetic oligonucleotide
ggcaatatcgttatcggttcaagggtgcta

SEQ ID NO: 172365 - DNA, 30 bp, Artificial Sequence
  Synthetic oligonucleotide
aggcatttatggatcgatgcgcgtgtgcta

SEQ ID NO: 172366 - DNA, 30 bp, Artificial Sequence
  Synthetic oligonucleotide
tctagttctaggggagcacatcgattgcta

SEQ ID NO: 172367 - DNA, 30 bp, Artificial Sequence
  Synthetic oligonucleotide
aggtggatgaaactaaatagtttattgcta

SEQ ID NO: 172368 - DNA, 30 bp, Artificial Sequence
  Synthetic oligonucleotide
cagccatgtgggacctggagttacttgcta

SEQ ID NO: 172369 - DNA, 30 bp, Artificial Sequence
  Synthetic oligonucleotide
agttggaaatagcgtggaccaacgttgcta

SEQ ID NO: 172370 - DNA, 30 bp, Artificial Sequence
  Synthetic oligonucleotide
acacaggttcaaggacactcaaatttgcta

SEQ ID NO: 172371 - DNA, 30 bp, Artificial Sequence
  Synthetic oligonucleotide
accggttcattcgcaagaccgacaaatcta

SEQ ID NO: 172372 - DNA, 30 bp, Artificial Sequence
  Synthetic oligonucleotide
ggccggtccgatagtacaccacgaaatcta

SEQ ID NO: 172373 - DNA, 30 bp, Artificial Sequence
  Synthetic oligonucleotide
tcgcacgcgtatcacaaggatggaaatcta

SEQ ID NO: 172374 - DNA, 30 bp, Artificial Sequence
  Synthetic oligonucleotide
ccgatattagtgtgtatatcgctcaatcta

SEQ ID NO: 172375 - DNA, 30 bp, Artificial Sequence
  Synthetic oligonucleotide
ccccaggtgcaaccagcgcttgctaatcta

SEQ ID NO: 172376 - DNA, 30 bp, Artificial Sequence
  Synthetic oligonucleotide
agcggccagtggtgccgatggtaacatcta

SEQ ID NO: 172377 - DNA, 30 bp, Artificial Sequence
  Synthetic oligonucleotide
taagacctggactcagtccgcccccatcta

SEQ ID NO: 172378 - DNA, 30 bp, Artificial Sequence
  Synthetic oligonucleotide
aacattatgaggatgcgattacgccatcta

SEQ ID NO: 172379 - DNA, 30 bp, Artificial Sequence
  Synthetic oligonucleotide
ggcaggcagtccaccgcttcctatcatcta

SEQ ID NO: 172380 - DNA, 30 bp, Artificial Sequence
  Synthetic oligonucleotide
tggtaaaatgagggctctagtgcagatcta

SEQ ID NO: 172381 - DNA, 30 bp, Artificial Sequence
  Synthetic oligonucleotide
ctcggcggttcccatacgtggacggatcta

SEQ ID NO: 172382 - DNA, 30 bp, Artificial Sequence
  Synthetic oligonucleotide
tcaggaatatacgtttgtagagaatatcta

SEQ ID NO: 172383 - DNA, 30 bp, Artificial Sequence
  Synthetic oligonucleotide
gttgataacgaccaaagtgtgctatatcta

SEQ ID NO: 172384 - DNA, 30 bp, Artificial Sequence
  Synthetic oligonucleotide
agaaacgcaagtcggtaatcttgctatcta

SEQ ID NO: 172385 - DNA, 30 bp, Artificial Sequence
  Synthetic oligonucleotide
cgatttattagaacggttgtcataactcta

SEQ ID NO: 172386 - DNA, 30 bp, Artificial Sequence
  Synthetic oligonucleotide
tcatgttagttgacgactggttcgactcta

SEQ ID NO: 172387 - DNA, 30 bp, Artificial Sequence
  Synthetic oligonucleotide
acatgccgtaaaaccgcggccggtactcta

SEQ ID NO: 172388 - DNA, 30 bp, Artificial Sequence
  Synthetic oligonucleotide
ccagggtcgtctgctcgggagctagctcta

SEQ ID NO: 172389 - DNA, 30 bp, Artificial Sequence
  Synthetic oligonucleotide
acgggttcacaaatcatcggttgggctcta

SEQ ID NO: 172390 - DNA, 30 bp, Artificial Sequence
  Synthetic oligonucleotide
atccaaaccgaagattggatctcctctcta

SEQ ID NO: 172391 - DNA, 30 bp, Artificial Sequence
  Synthetic oligonucleotide
ttcaacactcagagctagacacgcagtcta

SEQ ID NO: 172392 - DNA, 30 bp, Artificial Sequence
  Synthetic oligonucleotide
catgttaatacggggagacggtatagtcta

SEQ ID NO: 172393 - DNA, 30 bp, Artificial Sequence
  Synthetic oligonucleotide
cgcgatgtaaggggatttagttttagtcta

SEQ ID NO: 172394 - DNA, 30 bp, Artificial Sequence
  Synthetic oligonucleotide
ctcacgctgactaaatagctagaacgtcta

SEQ ID NO: 172395 - DNA, 30 bp, Artificial Sequence
  Synthetic oligonucleotide
gcgacgtaagcagtagaaagagctcgtcta

SEQ ID NO: 172396 - DNA, 30 bp, Artificial Sequence
  Synthetic oligonucleotide
tcgcaaggcgtaaatacctggaaaggtcta

SEQ ID NO: 172397 - DNA, 30 bp, Artificial Sequence
  Synthetic oligonucleotide
agaggttcttccgtgctgaggacaggtcta

SEQ ID NO: 172398 - DNA, 30 bp, Artificial Sequence
  Synthetic oligonucleotide
tacggcacccagaaccaactgtactgtcta

SEQ ID NO: 172399 - DNA, 30 bp, Artificial Sequence
  Synthetic oligonucleotide
atatgtgctagaacgactggcacctgtcta

SEQ ID NO: 172400 - DNA, 30 bp, Artificial Sequence
  Synthetic oligonucleotide
atcccgagaacacggtcagatttctgtcta

SEQ ID NO: 172401 - DNA, 30 bp, Artificial Sequence
  Synthetic oligonucleotide
cacggtaggaacatgttggcggattgtcta

SEQ ID NO: 172402 - DNA, 30 bp, Artificial Sequence
  Synthetic oligonucleotide
gccgcccgagccggtgtcaatacttgtcta

SEQ ID NO: 172403 - DNA, 30 bp, Artificial Sequence
  Synthetic oligonucleotide
aactattggacgtgagtcggaaaaattcta

SEQ ID NO: 172404 - DNA, 30 bp, Artificial Sequence
  Synthetic oligonucleotide
ttcctctgggtcaaggtccgggtacttcta

SEQ ID NO: 172405 - DNA, 30 bp, Artificial Sequence
  Synthetic oligonucleotide
tccaccgtggtcgtatgtaagggccttcta

SEQ ID NO: 172406 - DNA, 30 bp, Artificial Sequence
  Synthetic oligonucleotide
agaaatatggagctgacgtggacgcttcta

SEQ ID NO: 172407 - DNA, 30 bp, Artificial Sequence
  Synthetic oligonucleotide
cgatttgctgggcgcgctttgcggcttcta

SEQ ID NO: 172408 - DNA, 30 bp, Artificial Sequence
  Synthetic oligonucleotide
tttcgggcgtagtttcaaggcgatcttcta

SEQ ID NO: 172409 - DNA, 30 bp, Artificial Sequence
  Synthetic oligonucleotide
ggaacgtgtacatgcaatggaaaagttcta

SEQ ID NO: 172410 - DNA, 30 bp, Artificial Sequence
  Synthetic oligonucleotide
gtcaagtgaccttctaccgaaagcgttcta

SEQ ID NO: 172411 - DNA, 30 bp, Artificial Sequence
  Synthetic oligonucleotide
cgagaacgcgtcggtgtgtacagggttcta

SEQ ID NO: 172412 - DNA, 30 bp, Artificial Sequence
  Synthetic oligonucleotide
ctcaccgaggatgactggtggaatgttcta

SEQ ID NO: 172413 - DNA, 30 bp, Artificial Sequence
  Synthetic oligonucleotide
cggataaggtgtggtccttactatgttcta

SEQ ID NO: 172414 - DNA, 30 bp, Artificial Sequence
  Synthetic oligonucleotide
aacaaccggagggcacttataaaatttcta

SEQ ID NO: 172415 - DNA, 30 bp, Artificial Sequence
  Synthetic oligonucleotide
gattatctacatcatattggaagcaaagta

SEQ ID NO: 172416 - DNA, 30 bp, Artificial Sequence
  Synthetic oligonucleotide
tcaaacaggggcgatacgccaggcaaagta

SEQ ID NO: 172417 - DNA, 30 bp, Artificial Sequence
  Synthetic oligonucleotide
aaacactaatcgcttatagtatcgaaagta

SEQ ID NO: 172418 - DNA, 30 bp, Artificial Sequence
  Synthetic oligonucleotide
caggtattgagcaatactgtgcataaagta

SEQ ID NO: 172419 - DNA, 30 bp, Artificial Sequence
  Synthetic oligonucleotide
ataacacagccccgaatctcggttaaagta

SEQ ID NO: 172420 - DNA, 30 bp, Artificial Sequence
  Synthetic oligonucleotide
agtgaagaaagggggagcttgtttaaagta

SEQ ID NO: 172421 - DNA, 30 bp, Artificial Sequence
  Synthetic oligonucleotide
agggacacgccggagcgcggagatcaagta

SEQ ID NO: 172422 - DNA, 30 bp, Artificial Sequence
  Synthetic oligonucleotide
gacgcgtacatgcgctacaaagttcaagta

SEQ ID NO: 172423 - DNA, 30 bp, Artificial Sequence
  Synthetic oligonucleotide
ggggtgtgtaccaaacgcgcaagagaagta

SEQ ID NO: 172424 - DNA, 30 bp, Artificial Sequence
  Synthetic oligonucleotide
gtgccagtagcctgggggcgtggcgaagta

SEQ ID NO: 172425 - DNA, 30 bp, Artificial Sequence
  Synthetic oligonucleotide
tgaacgatgatctctaaggtctaggaagta

SEQ ID NO: 172426 - DNA, 30 bp, Artificial Sequence
  Synthetic oligonucleotide
gaaaagtacgggaaaccttaaagggaagta

SEQ ID NO: 172427 - DNA, 30 bp, Artificial Sequence
  Synthetic oligonucleotide
caggggacggattacaacgcgagtgaagta

SEQ ID NO: 172428 - DNA, 30 bp, Artificial Sequence
  Synthetic oligonucleotide
aatcctgctattaaaccgaataaataagta

SEQ ID NO: 172429 - DNA, 30 bp, Artificial Sequence
  Synthetic oligonucleotide
gatcctagaacacactgaggaaactaagta

SEQ ID NO: 172430 - DNA, 30 bp, Artificial Sequence
  Synthetic oligonucleotide
gtgcggggatcatttaattagacgtaagta

SEQ ID NO: 172431 - DNA, 30 bp, Artificial Sequence
  Synthetic oligonucleotide
atgtgagaccagaactccggcaaaacagta

SEQ ID NO: 172432 - DNA, 30 bp, Artificial Sequence
  Synthetic oligonucleotide
attagagacagggctggcggaacaacagta

SEQ ID NO: 172433 - DNA, 30 bp, Artificial Sequence
  Synthetic oligonucleotide
atatgactcgccaggatgggacccacagta

SEQ ID NO: 172434 - DNA, 30 bp, Artificial Sequence
  Synthetic oligonucleotide
acccgttctggaccgtataccctcacagta

SEQ ID NO: 172435 - DNA, 30 bp, Artificial Sequence
  Synthetic oligonucleotide
catgcgaatgtaggagacacgagtacagta

SEQ ID NO: 172436 - DNA, 28 bp, Artificial Sequence
  Synthetic oligonucleotide
tcgcgtatcacctcgcgatagtacagta

SEQ ID NO: 172437 - DNA, 30 bp, Artificial Sequence
  Synthetic oligonucleotide
ggccgcttatcacgttttatgccaccagta

SEQ ID NO: 172438 - DNA, 30 bp, Artificial Sequence
  Synthetic oligonucleotide
catgttagacagactcgttcgagaccagta

SEQ ID NO: 172439 - DNA, 30 bp, Artificial Sequence
  Synthetic oligonucleotide
tgaagaaaggtggttttttctagaccagta

SEQ ID NO: 172440 - DNA, 30 bp, Artificial Sequence
  Synthetic oligonucleotide
gcagaggcaggtaatttccattgaccagta

SEQ ID NO: 172441 - DNA, 30 bp, Artificial Sequence
  Synthetic oligonucleotide
tctccagacaccagttcgagccccccagta

SEQ ID NO: 172442 - DNA, 30 bp, Artificial Sequence
  Synthetic oligonucleotide
aggaatccagtggataatgactcgccagta

SEQ ID NO: 172443 - DNA, 30 bp, Artificial Sequence
  Synthetic oligonucleotide
aatatggtctggtatgaaccgagagcagta

SEQ ID NO: 172444 - DNA, 30 bp, Artificial Sequence
  Synthetic oligonucleotide
tcgccgagaccacatatacacggggcagta

SEQ ID NO: 172445 - DNA, 30 bp, Artificial Sequence
  Synthetic oligonucleotide
tgttggggaatcagagtgagaggatcagta

SEQ ID NO: 172446 - DNA, 30 bp, Artificial Sequence
  Synthetic oligonucleotide
ctcgtgagttataggtctgggggatcagta

SEQ ID NO: 172447 - DNA, 30 bp, Artificial Sequence
  Synthetic oligonucleotide
gcgaacacgagggtattaacctactcagta

SEQ ID NO: 172448 - DNA, 30 bp, Artificial Sequence
  Synthetic oligonucleotide
agaatagtcaatatgagctggttgtcagta

SEQ ID NO: 172449 - DNA, 30 bp, Artificial Sequence
  Synthetic oligonucleotide
caagactttggcgtcctatgaattagagta

SEQ ID NO: 172450 - DNA, 30 bp, Artificial Sequence
  Synthetic oligonucleotide
atagtgtggataaccgacaaggcacgagta

SEQ ID NO: 172451 - DNA, 30 bp, Artificial Sequence
  Synthetic oligonucleotide
ccctcgcaaatgtctgtagcgcaccgagta

SEQ ID NO: 172452 - DNA, 30 bp, Artificial Sequence
  Synthetic oligonucleotide
agctgggagttcatttgagaagcgcgagta

SEQ ID NO: 172453 - DNA, 30 bp, Artificial Sequence
  Synthetic oligonucleotide
ggcaaacgtggttggcgcgtggatcgagta

SEQ ID NO: 172454 - DNA, 30 bp, Artificial Sequence
  Synthetic oligonucleotide
gggagaaataccactggaactagtcgagta

SEQ ID NO: 172455 - DNA, 30 bp, Artificial Sequence
  Synthetic oligonucleotide
agaacgaacctacacttctgcataggagta

SEQ ID NO: 172456 - DNA, 30 bp, Artificial Sequence
  Synthetic oligonucleotide
aagatgaatgcgatcagcttcgtaggagta

SEQ ID NO: 172457 - DNA, 30 bp, Artificial Sequence
  Synthetic oligonucleotide
gctagcttcggcaaaatccagtggggagta

SEQ ID NO: 172458 - DNA, 30 bp, Artificial Sequence
  Synthetic oligonucleotide
ccacggctggatagatagactccatgagta

SEQ ID NO: 172459 - DNA, 30 bp, Artificial Sequence
  Synthetic oligonucleotide
tgttaacccgcgcctgcttagcactgagta

SEQ ID NO: 172460 - DNA, 30 bp, Artificial Sequence
  Synthetic oligonucleotide
ggagggtagatgagggtcttttgctgagta

SEQ ID NO: 172461 - DNA, 30 bp, Artificial Sequence
  Synthetic oligonucleotide
ccgattatgatggaccgcttaatctgagta

SEQ ID NO: 172462 - DNA, 30 bp, Artificial Sequence
  Synthetic oligonucleotide
caaaacataggtgtaagacctgcttgagta

SEQ ID NO: 172463 - DNA, 30 bp, Artificial Sequence
  Synthetic oligonucleotide
ggacgctactgacagggcgaatcttgagta

SEQ ID NO: 172464 - DNA, 30 bp, Artificial Sequence
  Synthetic oligonucleotide
tctgactgtgttcgatacacgagttgagta

SEQ ID NO: 172465 - DNA, 30 bp, Artificial Sequence
  Synthetic oligonucleotide
tcaggccgctcagtaacaacgatttgagta

SEQ ID NO: 172466 - DNA, 30 bp, Artificial Sequence
  Synthetic oligonucleotide
caccgaagatatagaagagacctttgagta

SEQ ID NO: 172467 - DNA, 30 bp, Artificial Sequence
  Synthetic oligonucleotide
cgattgttagataacagctgaggaatagta

SEQ ID NO: 172468 - DNA, 30 bp, Artificial Sequence
  Synthetic oligonucleotide
tgtcggaaagtccgctcagaagtaatagta

SEQ ID NO: 172469 - DNA, 30 bp, Artificial Sequence
  Synthetic oligonucleotide
acgtaattataggatcatagcaagctagta

SEQ ID NO: 172470 - DNA, 30 bp, Artificial Sequence
  Synthetic oligonucleotide
cgttggcaatgctgccttcaaaatctagta

SEQ ID NO: 172471 - DNA, 30 bp, Artificial Sequence
  Synthetic oligonucleotide
acttacaactaacagcagtttgatctagta

SEQ ID NO: 172472 - DNA, 30 bp, Artificial Sequence
  Synthetic oligonucleotide
tctgactcccgactaatcagtactctagta

SEQ ID NO: 172473 - DNA, 30 bp, Artificial Sequence
  Synthetic oligonucleotide
ttacatggtgcgcggtctaaatgtctagta

SEQ ID NO: 172474 - DNA, 30 bp, Artificial Sequence
  Synthetic oligonucleotide
catagttcatggtgttttggctcagtagta

SEQ ID NO: 172475 - DNA, 30 bp, Artificial Sequence
  Synthetic oligonucleotide
cagaccaacccgctaactcgtcaggtagta

SEQ ID NO: 172476 - DNA, 30 bp, Artificial Sequence
  Synthetic oligonucleotide
tctgacggccgggactgtgggatggtagta

SEQ ID NO: 172477 - DNA, 30 bp, Artificial Sequence
  Synthetic oligonucleotide
cgacgcaaccgatctcctctgagtgtagta

SEQ ID NO: 172478 - DNA, 30 bp, Artificial Sequence
  Synthetic oligonucleotide
agggtagcaacgaatggacggatcttagta

SEQ ID NO: 172479 - DNA, 30 bp, Artificial Sequence
  Synthetic oligonucleotide
acatagtcgacatcgcttatccgcaacgta

SEQ ID NO: 172480 - DNA, 30 bp, Artificial Sequence
  Synthetic oligonucleotide
tgtagggcaagaacgcgggcacagaacgta

SEQ ID NO: 172481 - DNA, 30 bp, Artificial Sequence
  Synthetic oligonucleotide
ctaaagtacagggcttatagggggaacgta

SEQ ID NO: 172482 - DNA, 30 bp, Artificial Sequence
  Synthetic oligonucleotide
gactacgactaattttcgggccataacgta

SEQ ID NO: 172483 - DNA, 30 bp, Artificial Sequence
  Synthetic oligonucleotide
ggtacgatttcgtttagagttgaacacgta

SEQ ID NO: 172484 - DNA, 30 bp, Artificial Sequence
  Synthetic oligonucleotide
cgcacgctcgcacaagcaaagccacacgta

SEQ ID NO: 172485 - DNA, 30 bp, Artificial Sequence
  Synthetic oligonucleotide
ttcggaagcggaccggaaaattgacacgta

SEQ ID NO: 172486 - DNA, 30 bp, Artificial Sequence
  Synthetic oligonucleotide
gtcgaagcgaacagtccaaccttacacgta

SEQ ID NO: 172487 - DNA, 30 bp, Artificial Sequence
  Synthetic oligonucleotide
gagaccgggggcgaagcgaggttacacgta

SEQ ID NO: 172488 - DNA, 30 bp, Artificial Sequence
  Synthetic oligonucleotide
aaattctgggcaccggcgccgaaccacgta

SEQ ID NO: 172489 - DNA, 30 bp, Artificial Sequence
  Synthetic oligonucleotide
ccgacgtggggatttctcaccttccacgta

SEQ ID NO: 172490 - DNA, 30 bp, Artificial Sequence
  Synthetic oligonucleotide
tgcgtattcagagatgcccactggcacgta

SEQ ID NO: 172491 - DNA, 30 bp, Artificial Sequence
  Synthetic oligonucleotide
tctcccattctttggcttcacgttcacgta

SEQ ID NO: 172492 - DNA, 30 bp, Artificial Sequence
  Synthetic oligonucleotide
ggaaagaagcgggtctgggcaggagacgta

SEQ ID NO: 172493 - DNA, 30 bp, Artificial Sequence
  Synthetic oligonucleotide
gctgagtcatttctattaactgcggacgta

SEQ ID NO: 172494 - DNA, 30 bp, Artificial Sequence
  Synthetic oligonucleotide
ttgagtgttgtgatttcgtcgtaatacgta

SEQ ID NO: 172495 - DNA, 30 bp, Artificial Sequence
  Synthetic oligonucleotide
gtggtgtgcgcagctaaggcaaactacgta

SEQ ID NO: 172496 - DNA, 30 bp, Artificial Sequence
  Synthetic oligonucleotide
gggcgtcggttagggtcagccggctacgta

SEQ ID NO: 172497 - DNA, 30 bp, Artificial Sequence
  Synthetic oligonucleotide
atgaaaatctgaagtcttttgctctacgta

SEQ ID NO: 172498 - DNA, 30 bp, Artificial Sequence
  Synthetic oligonucleotide
aaattattgccgtgagaaaagaggtacgta

SEQ ID NO: 172499 - DNA, 30 bp, Artificial Sequence
  Synthetic oligonucleotide
tatcgacttcacggtgttacagggtacgta

SEQ ID NO: 172500 - DNA, 30 bp, Artificial Sequence
  Synthetic oligonucleotide
tggattactatcaggagacatggttacgta

SEQ ID NO: 172501 - DNA, 30 bp, Artificial Sequence
  Synthetic oligonucleotide
accgggtgacatggtacagaactttacgta

SEQ ID NO: 172502 - DNA, 30 bp, Artificial Sequence
  Synthetic oligonucleotide
ggtttcgtgcggacatgaaaaaaaaccgta

SEQ ID NO: 172503 - DNA, 30 bp, Artificial Sequence
  Synthetic oligonucleotide
gtctagtgcggcgaaaagtcactcaccgta

SEQ ID NO: 172504 - DNA, 30 bp, Artificial Sequence
  Synthetic oligonucleotide
gcaggatcgttcagaaaggggccgaccgta

SEQ ID NO: 172505 - DNA, 30 bp, Artificial Sequence
  Synthetic oligonucleotide
tgttagcatgtctcagtacagcataccgta

SEQ ID NO: 172506 - DNA, 30 bp, Artificial Sequence
  Synthetic oligonucleotide
tcaattcagggtttatagctatgtaccgta

SEQ ID NO: 172507 - DNA, 30 bp, Artificial Sequence
  Synthetic oligonucleotide
agagcacaagccagggaggagggacccgta

SEQ ID NO: 172508 - DNA, 30 bp, Artificial Sequence
  Synthetic oligonucleotide
cccagatcaactccagccaagactcccgta

SEQ ID NO: 172509 - DNA, 30 bp, Artificial Sequence
  Synthetic oligonucleotide
aaggcattagtggtgccgccagtcgccgta

SEQ ID NO: 172510 - DNA, 30 bp, Artificial Sequence
  Synthetic oligonucleotide
tgggcatgctcgggtggacttgcggccgta

SEQ ID NO: 172511 - DNA, 30 bp, Artificial Sequence
  Synthetic oligonucleotide
cagccacaacgaataatggctatggccgta

SEQ ID NO: 172512 - DNA, 30 bp, Artificial Sequence
  Synthetic oligonucleotide
atcattgagggacgtcgacgtcatgccgta

SEQ ID NO: 172513 - DNA, 30 bp, Artificial Sequence
  Synthetic oligonucleotide
ttgatgtataattgcacacagggtgccgta

SEQ ID NO: 172514 - DNA, 30 bp, Artificial Sequence
  Synthetic oligonucleotide
ccgtcgccaaggtaaccttggggtgccgta

SEQ ID NO: 172515 - DNA, 30 bp, Artificial Sequence
  Synthetic oligonucleotide
atagtgatggtggccgcattggcatccgta

SEQ ID NO: 172516 - DNA, 30 bp, Artificial Sequence
  Synthetic oligonucleotide
tatcggcttacagtttcaggagggtccgta

SEQ ID NO: 172517 - DNA, 30 bp, Artificial Sequence
  Synthetic oligonucleotide
atcttcaaaagcaggggcgcggtgtccgta

SEQ ID NO: 172518 - DNA, 30 bp, Artificial Sequence
  Synthetic oligonucleotide
agaattacagagcaaaggtaactttccgta

SEQ ID NO: 172519 - DNA, 30 bp, Artificial Sequence
  Synthetic oligonucleotide
gattgtccttagactgatccgattagcgta

SEQ ID NO: 172520 - DNA, 30 bp, Artificial Sequence
  Synthetic oligonucleotide
aaacaatgcgatgggggattaaagcgcgta

SEQ ID NO: 172521 - DNA, 30 bp, Artificial Sequence
  Synthetic oligonucleotide
tgaccccagcaattgagggtgcatcgcgta

SEQ ID NO: 172522 - DNA, 30 bp, Artificial Sequence
  Synthetic oligonucleotide
aggctttgatggggtcggtctgctcgcgta

SEQ ID NO: 172523 - DNA, 30 bp, Artificial Sequence
  Synthetic oligonucleotide
ttgaacggggaaaaagacttacgaggcgta

SEQ ID NO: 172524 - DNA, 30 bp, Artificial Sequence
  Synthetic oligonucleotide
atgtacaaggacagctggagggtaggcgta

SEQ ID NO: 172525 - DNA, 30 bp, Artificial Sequence
  Synthetic oligonucleotide
tccttccaatgttaggcgggctacggcgta

SEQ ID NO: 172526 - DNA, 30 bp, Artificial Sequence
  Synthetic oligonucleotide
tctcgagtaccggaaagtttagtcggcgta

SEQ ID NO: 172527 - DNA, 30 bp, Artificial Sequence
  Synthetic oligonucleotide
aacagcaagttccacttagatccatgcgta

SEQ ID NO: 172528 - DNA, 30 bp, Artificial Sequence
  Synthetic oligonucleotide
taacttccttgaggtgggcctcgatgcgta

SEQ ID NO: 172529 - DNA, 30 bp, Artificial Sequence
  Synthetic oligonucleotide
ggtcacgctagtcccatgaatcactgcgta

SEQ ID NO: 172530 - DNA, 30 bp, Artificial Sequence
  Synthetic oligonucleotide
ctaatttatcaagaggcaaagttctgcgta

SEQ ID NO: 172531 - DNA, 30 bp, Artificial Sequence
  Synthetic oligonucleotide
tccagttagtttaagactaccgaaatcgta

SEQ ID NO: 172532 - DNA, 30 bp, Artificial Sequence
  Synthetic oligonucleotide
tgtagccacacgatatggagggaagtcgta

SEQ ID NO: 172533 - DNA, 30 bp, Artificial Sequence
  Synthetic oligonucleotide
atcttatgtatctaagtgtgggcggtcgta

SEQ ID NO: 172534 - DNA, 30 bp, Artificial Sequence
  Synthetic oligonucleotide
gttgaatatttttgactaacctctgtcgta

SEQ ID NO: 172535 - DNA, 30 bp, Artificial Sequence
  Synthetic oligonucleotide
gattcaggggaatcacaaggaaaattcgta

SEQ ID NO: 172536 - DNA, 30 bp, Artificial Sequence
  Synthetic oligonucleotide
aatagaacgcaagttcagtgcgcattcgta

SEQ ID NO: 172537 - DNA, 30 bp, Artificial Sequence
  Synthetic oligonucleotide
ggaaaagaagttcgtcgttcactattcgta

SEQ ID NO: 172538 - DNA, 30 bp, Artificial Sequence
  Synthetic oligonucleotide
ttcaagaaacttgaaaaatccaagttcgta

SEQ ID NO: 172539 - DNA, 30 bp, Artificial Sequence
  Synthetic oligonucleotide
agcatgcagtgtagcacacagaagttcgta

SEQ ID NO: 172540 - DNA, 30 bp, Artificial Sequence
  Synthetic oligonucleotide
gcgtggatccggcaatgcttagatttcgta

SEQ ID NO: 172541 - DNA, 30 bp, Artificial Sequence
  Synthetic oligonucleotide
ggtgagggagcgtacatcgcggaaaaggta

SEQ ID NO: 172542 - DNA, 30 bp, Artificial Sequence
  Synthetic oligonucleotide
gcgatgccaaattcacattgtttaaaggta

SEQ ID NO: 172543 - DNA, 30 bp, Artificial Sequence
  Synthetic oligonucleotide
tcgtttacatatactcaatggggcaaggta

SEQ ID NO: 172544 - DNA, 30 bp, Artificial Sequence
  Synthetic oligonucleotide
atgctggcgtccgaaactcatgtacaggta

SEQ ID NO: 172545 - DNA, 30 bp, Artificial Sequence
  Synthetic oligonucleotide
agtccttggaggagagttggaagccaggta

SEQ ID NO: 172546 - DNA, 30 bp, Artificial Sequence
  Synthetic oligonucleotide
aggactctagatgaggtgagccatcaggta

SEQ ID NO: 172547 - DNA, 30 bp, Artificial Sequence
  Synthetic oligonucleotide
aacagagagctgctcgaagggcgtcaggta

SEQ ID NO: 172548 - DNA, 30 bp, Artificial Sequence
  Synthetic oligonucleotide
gcgttcaacacgtgtaggcttaaagaggta

SEQ ID NO: 172549 - DNA, 30 bp, Artificial Sequence
  Synthetic oligonucleotide
gagctaggatcagtctagccattagaggta

SEQ ID NO: 172550 - DNA, 30 bp, Artificial Sequence
  Synthetic oligonucleotide
gtaaaggcacgcgtcatatgaaaggaggta

SEQ ID NO: 172551 - DNA, 30 bp, Artificial Sequence
  Synthetic oligonucleotide
agggaagatttatcggaaatgaatgaggta

SEQ ID NO: 172552 - DNA, 30 bp, Artificial Sequence
  Synthetic oligonucleotide
tgcaacgcattaggcatagagtctgaggta

SEQ ID NO: 172553 - DNA, 30 bp, Artificial Sequence
  Synthetic oligonucleotide
gcacaaagatatccttacatcatctaggta

SEQ ID NO: 172554 - DNA, 30 bp, Artificial Sequence
  Synthetic oligonucleotide
ctttcgatcgagccggatatgatttaggta

SEQ ID NO: 172555 - DNA, 30 bp, Artificial Sequence
  Synthetic oligonucleotide
tcaaagcgtgtaagtaggagtaccacggta

SEQ ID NO: 172556 - DNA, 30 bp, Artificial Sequence
  Synthetic oligonucleotide
cagtgtaccactaaggtaaactccacggta

SEQ ID NO: 172557 - DNA, 30 bp, Artificial Sequence
  Synthetic oligonucleotide
agacaagtggtggttaacttagtcacggta

SEQ ID NO: 172558 - DNA, 30 bp, Artificial Sequence
  Synthetic oligonucleotide
tctcgtgggctgtacggatgagctacggta

SEQ ID NO: 172559 - DNA, 30 bp, Artificial Sequence
  Synthetic oligonucleotide
tacgcgaggcgcaagcatctgtgaccggta

SEQ ID NO: 172560 - DNA, 30 bp, Artificial Sequence
  Synthetic oligonucleotide
cactgtcgactgtgcacagatttaccggta

SEQ ID NO: 172561 - DNA, 30 bp, Artificial Sequence
  Synthetic oligonucleotide
cagtgcttcctgaagtgggttagcccggta

SEQ ID NO: 172562 - DNA, 30 bp, Artificial Sequence
  Synthetic oligonucleotide
ttagaagtgatggcagagtcaaaagcggta

SEQ ID NO: 172563 - DNA, 30 bp, Artificial Sequence
  Synthetic oligonucleotide
tcttcacgggtccacagcagatacgcggta

SEQ ID NO: 172564 - DNA, 30 bp, Artificial Sequence
  Synthetic oligonucleotide
tagcatcgcttaaatattagtggggcggta

SEQ ID NO: 172565 - DNA, 30 bp, Artificial Sequence
  Synthetic oligonucleotide
gacaggccatatcgtcctaacatctcggta

SEQ ID NO: 172566 - DNA, 30 bp, Artificial Sequence
  Synthetic oligonucleotide
gctagaacgtggactatgcagagttcggta

SEQ ID NO: 172567 - DNA, 30 bp, Artificial Sequence
  Synthetic oligonucleotide
atagacggcttccgagagacaagaagggta

SEQ ID NO: 172568 - DNA, 30 bp, Artificial Sequence
  Synthetic oligonucleotide
agagctttcataagcgaggataccagggta

SEQ ID NO: 172569 - DNA, 30 bp, Artificial Sequence
  Synthetic oligonucleotide
agagcttgcgcgcactctgtaggcagggta

SEQ ID NO: 172570 - DNA, 30 bp, Artificial Sequence
  Synthetic oligonucleotide
cgccgcgggcatataattcgggcgagggta

SEQ ID NO: 172571 - DNA, 30 bp, Artificial Sequence
  Synthetic oligonucleotide
agtgcgggaacggagacgtcccggagggta

SEQ ID NO: 172572 - DNA, 30 bp, Artificial Sequence
  Synthetic oligonucleotide
ccgggacaagggatcgcgaggctgagggta

SEQ ID NO: 172573 - DNA, 30 bp, Artificial Sequence
  Synthetic oligonucleotide
ataaaaagcgtcctcaatttcgatagggta

SEQ ID NO: 172574 - DNA, 30 bp, Artificial Sequence
  Synthetic oligonucleotide
gtgggagcgtggacattggatactagggta

SEQ ID NO: 172575 - DNA, 30 bp, Artificial Sequence
  Synthetic oligonucleotide
gaaaggacgggtagtagacctccgcgggta

SEQ ID NO: 172576 - DNA, 30 bp, Artificial Sequence
  Synthetic oligonucleotide
gggatgaaagggtagagtgttcgcggggta

SEQ ID NO: 172577 - DNA, 30 bp, Artificial Sequence
  Synthetic oligonucleotide
gacataattatcccctgccatacgggggta

SEQ ID NO: 172578 - DNA, 30 bp, Artificial Sequence
  Synthetic oligonucleotide
cccatgaggtcaattcagctcaggggggta

SEQ ID NO: 172579 - DNA, 30 bp, Artificial Sequence
  Synthetic oligonucleotide
gggatctcagaacataatttcaggggggta

SEQ ID NO: 172580 - DNA, 30 bp, Artificial Sequence
  Synthetic oligonucleotide
tggacattcggagagattattaatggggta

SEQ ID NO: 172581 - DNA, 30 bp, Artificial Sequence
  Synthetic oligonucleotide
tctcatatgaatagggacaaaggctgggta

SEQ ID NO: 172582 - DNA, 30 bp, Artificial Sequence
  Synthetic oligonucleotide
tcggatattggctatgcgataaaaatggta

SEQ ID NO: 172583 - DNA, 30 bp, Artificial Sequence
  Synthetic oligonucleotide
tcaaaagcatgacgctctaccccgatggta

SEQ ID NO: 172584 - DNA, 30 bp, Artificial Sequence
  Synthetic oligonucleotide
ttaagcgatggtcctgatgacgggatggta

SEQ ID NO: 172585 - DNA, 30 bp, Artificial Sequence
  Synthetic oligonucleotide
ctcgggtaaatgtagctatcgagtatggta

SEQ ID NO: 172586 - DNA, 30 bp, Artificial Sequence
  Synthetic oligonucleotide
ttactgggcttagggatgcgcgctctggta

SEQ ID NO: 172587 - DNA, 30 bp, Artificial Sequence
  Synthetic oligonucleotide
tagggatctatgtctcgttacattctggta

SEQ ID NO: 172588 - DNA, 30 bp, Artificial Sequence
  Synthetic oligonucleotide
ccacaacacaatttcatcggataattggta

SEQ ID NO: 172589 - DNA, 30 bp, Artificial Sequence
  Synthetic oligonucleotide
acgctgaaagtaacctaagagacattggta

SEQ ID NO: 172590 - DNA, 30 bp, Artificial Sequence
  Synthetic oligonucleotide
ctaagaggcacaggcacaccgtacttggta

SEQ ID NO: 172591 - DNA, 30 bp, Artificial Sequence
  Synthetic oligonucleotide
accgacgccaatgtgcagggttagttggta

SEQ ID NO: 172592 - DNA, 30 bp, Artificial Sequence
  Synthetic oligonucleotide
cgctacgtgatcgattaccagcggttggta

SEQ ID NO: 172593 - DNA, 30 bp, Artificial Sequence
  Synthetic oligonucleotide
aaggtcccaggcgatccgcgccctttggta

SEQ ID NO: 172594 - DNA, 30 bp, Artificial Sequence
  Synthetic oligonucleotide
agtggtgttgtaaatccgcaactaaatgta

SEQ ID NO: 172595 - DNA, 30 bp, Artificial Sequence
  Synthetic oligonucleotide
tctgcggtccgaagcacagatactaatgta

SEQ ID NO: 172596 - DNA, 30 bp, Artificial Sequence
  Synthetic oligonucleotide
taagtatcaattggtgaaatgagtaatgta

SEQ ID NO: 172597 - DNA, 30 bp, Artificial Sequence
  Synthetic oligonucleotide
ggagaagtgcgtccgttaatcctccatgta

SEQ ID NO: 172598 - DNA, 30 bp, Artificial Sequence
  Synthetic oligonucleotide
ctagggggctcgccgagcttacatcatgta

SEQ ID NO: 172599 - DNA, 30 bp, Artificial Sequence
  Synthetic oligonucleotide
actggcggggccattcagctgtctcatgta

SEQ ID NO: 172600 - DNA, 30 bp, Artificial Sequence
  Synthetic oligonucleotide
caaagcagaggaggccattttccagatgta

SEQ ID NO: 172601 - DNA, 30 bp, Artificial Sequence
  Synthetic oligonucleotide
ctcgttccagccgaatagtgggcagatgta

SEQ ID NO: 172602 - DNA, 30 bp, Artificial Sequence
  Synthetic oligonucleotide
cacggtaatcaacatctaatcttcgatgta

SEQ ID NO: 172603 - DNA, 30 bp, Artificial Sequence
  Synthetic oligonucleotide
gtaatgacgttgtacggataagaatatgta

SEQ ID NO: 172604 - DNA, 30 bp, Artificial Sequence
  Synthetic oligonucleotide
acagactggcactctccgggggggtatgta

SEQ ID NO: 172605 - DNA, 30 bp, Artificial Sequence
  Synthetic oligonucleotide
tgggggtcatatgcggtcacgtaaactgta

SEQ ID NO: 172606 - DNA, 30 bp, Artificial Sequence
  Synthetic oligonucleotide
tctcggtatgaaaaaaggagtccaactgta

SEQ ID NO: 172607 - DNA, 30 bp, Artificial Sequence
  Synthetic oligonucleotide
acattagtcgtctctacgtacggaactgta

SEQ ID NO: 172608 - DNA, 30 bp, Artificial Sequence
  Synthetic oligonucleotide
cgcgaagcccggggtaaaacctacactgta

SEQ ID NO: 172609 - DNA, 30 bp, Artificial Sequence
  Synthetic oligonucleotide
taagctgggcctgagtttcgcctgactgta

SEQ ID NO: 172610 - DNA, 30 bp, Artificial Sequence
  Synthetic oligonucleotide
tccttctgcccgtgacacgtacctactgta

SEQ ID NO: 172611 - DNA, 30 bp, Artificial Sequence
  Synthetic oligonucleotide
tatccccaagcgcaaagtgtcgatcctgta

SEQ ID NO: 172612 - DNA, 30 bp, Artificial Sequence
  Synthetic oligonucleotide
ttggagtgaactgcacactggttggctgta

SEQ ID NO: 172613 - DNA, 30 bp, Artificial Sequence
  Synthetic oligonucleotide
tccgtatggatttcggctttttatgctgta

SEQ ID NO: 172614 - DNA, 30 bp, Artificial Sequence
  Synthetic oligonucleotide
ataagttagatcctcctaatcacatctgta

SEQ ID NO: 172615 - DNA, 30 bp, Artificial Sequence
  Synthetic oligonucleotide
acgaacatcggtgccatgacagagtctgta

SEQ ID NO: 172616 - DNA, 30 bp, Artificial Sequence
  Synthetic oligonucleotide
agctacgatgacaactgcctaagaagtgta

SEQ ID NO: 172617 - DNA, 30 bp, Artificial Sequence
  Synthetic oligonucleotide
tcggggactcctccctggtcttacagtgta

SEQ ID NO: 172618 - DNA, 30 bp, Artificial Sequence
  Synthetic oligonucleotide
agaaaccggtgtgataggtcgggcagtgta

SEQ ID NO: 172619 - DNA, 30 bp, Artificial Sequence
  Synthetic oligonucleotide
ccctcgctaacacaacacacaatcagtgta

SEQ ID NO: 172620 - DNA, 30 bp, Artificial Sequence
  Synthetic oligonucleotide
agcggtcattctaaccacagagtcagtgta

SEQ ID NO: 172621 - DNA, 30 bp, Artificial Sequence
  Synthetic oligonucleotide
accttataacgagagcagtaaaggagtgta

SEQ ID NO: 172622 - DNA, 30 bp, Artificial Sequence
  Synthetic oligonucleotide
cggcaaattggcgtctcgactgtgagtgta

SEQ ID NO: 172623 - DNA, 30 bp, Artificial Sequence
  Synthetic oligonucleotide
gcaaatcggagcaagaggttacgtagtgta

SEQ ID NO: 172624 - DNA, 30 bp, Artificial Sequence
  Synthetic oligonucleotide
atttcgggcccacagccgaacattagtgta

SEQ ID NO: 172625 - DNA, 30 bp, Artificial Sequence
  Synthetic oligonucleotide
attccagatgtgatggttgtggcacgtgta

SEQ ID NO: 172626 - DNA, 30 bp, Artificial Sequence
  Synthetic oligonucleotide
atctcgaagcgtcgactgctcctccgtgta

SEQ ID NO: 172627 - DNA, 30 bp, Artificial Sequence
  Synthetic oligonucleotide
cggatctggagataccggctgccgcgtgta

SEQ ID NO: 172628 - DNA, 30 bp, Artificial Sequence
  Synthetic oligonucleotide
cctggcctggcgtcgcttcttaaaggtgta

SEQ ID NO: 172629 - DNA, 30 bp, Artificial Sequence
  Synthetic oligonucleotide
tcactcttcgacagattttgagcaggtgta

SEQ ID NO: 172630 - DNA, 30 bp, Artificial Sequence
  Synthetic oligonucleotide
attggccgcaggcggttaatatccggtgta

SEQ ID NO: 172631 - DNA, 30 bp, Artificial Sequence
  Synthetic oligonucleotide
gagatggaaacgcgaccaggcttcggtgta

SEQ ID NO: 172632 - DNA, 30 bp, Artificial Sequence
  Synthetic oligonucleotide
tacagtgggagccggaagaattggggtgta

SEQ ID NO: 172633 - DNA, 30 bp, Artificial Sequence
  Synthetic oligonucleotide
ctggcgacagtatctcgtcgtccatgtgta

SEQ ID NO: 172634 - DNA, 30 bp, Artificial Sequence
  Synthetic oligonucleotide
gccaatgtaaacacttagacatactgtgta

SEQ ID NO: 172635 - DNA, 30 bp, Artificial Sequence
  Synthetic oligonucleotide
agtctgcatgctagagtccggctctgtgta

SEQ ID NO: 172636 - DNA, 30 bp, Artificial Sequence
  Synthetic oligonucleotide
tgtagtatgtatgtggaaacagagtgtgta

SEQ ID NO: 172637 - DNA, 30 bp, Artificial Sequence
  Synthetic oligonucleotide
tcgctttgcacgggtatttcggtgtgtgta

SEQ ID NO: 172638 - DNA, 30 bp, Artificial Sequence
  Synthetic oligonucleotide
ccagcggtgacattgttaaacttttgtgta

SEQ ID NO: 172639 - DNA, 30 bp, Artificial Sequence
  Synthetic oligonucleotide
taccgcaaggcatgaaacttgtgaattgta

SEQ ID NO: 172640 - DNA, 30 bp, Artificial Sequence
  Synthetic oligonucleotide
ggatcgcccctcagaaattggttaattgta

SEQ ID NO: 172641 - DNA, 30 bp, Artificial Sequence
  Synthetic oligonucleotide
cgattcacctcattagttgtcaggattgta

SEQ ID NO: 172642 - DNA, 30 bp, Artificial Sequence
  Synthetic oligonucleotide
gtgtccgtgaacaagctgaatggtattgta

SEQ ID NO: 172643 - DNA, 30 bp, Artificial Sequence
  Synthetic oligonucleotide
gatccacgagtgggttgggtttggcttgta

SEQ ID NO: 172644 - DNA, 30 bp, Artificial Sequence
  Synthetic oligonucleotide
catcgcttgcgaaggcctattggggttgta

SEQ ID NO: 172645 - DNA, 30 bp, Artificial Sequence
  Synthetic oligonucleotide
catatgtggagtgggtttaagacatttgta

SEQ ID NO: 172646 - DNA, 30 bp, Artificial Sequence
  Synthetic oligonucleotide
gaaagtcaaagaaggtggcttaagtttgta

SEQ ID NO: 172647 - DNA, 30 bp, Artificial Sequence
  Synthetic oligonucleotide
acatgagaaagaaggtcgggcaattttgta

SEQ ID NO: 172648 - DNA, 30 bp, Artificial Sequence
  Synthetic oligonucleotide
ttcgatatgcggtcaatgtggtattttgta

SEQ ID NO: 172649 - DNA, 30 bp, Artificial Sequence
  Synthetic oligonucleotide
gcgtacgatttcggaattctgctttttgta

SEQ ID NO: 172650 - DNA, 30 bp, Artificial Sequence
  Synthetic oligonucleotide
aaggagaaggccacgccgggctacaaatta

SEQ ID NO: 172651 - DNA, 30 bp, Artificial Sequence
  Synthetic oligonucleotide
cagaccaaccactaaaggatcactaaatta

SEQ ID NO: 172652 - DNA, 30 bp, Artificial Sequence
  Synthetic oligonucleotide
ttgcggtatcgaatattgaacgagcaatta

SEQ ID NO: 172653 - DNA, 30 bp, Artificial Sequence
  Synthetic oligonucleotide
agaatggcactgattaggtacccgcaatta

SEQ ID NO: 172654 - DNA, 30 bp, Artificial Sequence
  Synthetic oligonucleotide
actaatgccggtctgcctggttcgcaatta

SEQ ID NO: 172655 - DNA, 30 bp, Artificial Sequence
  Synthetic oligonucleotide
cgtcccccaggtgaaaaatccaaagaatta

SEQ ID NO: 172656 - DNA, 30 bp, Artificial Sequence
  Synthetic oligonucleotide
gggtttcgggagtataggcaccacgaatta

SEQ ID NO: 172657 - DNA, 30 bp, Artificial Sequence
  Synthetic oligonucleotide
gcaaatacttaggacaaataatacgaatta

SEQ ID NO: 172658 - DNA, 30 bp, Artificial Sequence
  Synthetic oligonucleotide
gtcacaggttcattatatgcaccggaatta

SEQ ID NO: 172659 - DNA, 30 bp, Artificial Sequence
  Synthetic oligonucleotide
gcagggatagagctcaccgagatgtaatta

SEQ ID NO: 172660 - DNA, 30 bp, Artificial Sequence
  Synthetic oligonucleotide
gcagggttaaaagcgtaccgtggttaatta

SEQ ID NO: 172661 - DNA, 30 bp, Artificial Sequence
  Synthetic oligonucleotide
tagatcatataggaatcttgcgtttaatta

SEQ ID NO: 172662 - DNA, 30 bp, Artificial Sequence
  Synthetic oligonucleotide
aacctactgtagtggccatcggatacatta

SEQ ID NO: 172663 - DNA, 30 bp, Artificial Sequence
  Synthetic oligonucleotide
gggttgcgcgtagctatcgaaactacatta

SEQ ID NO: 172664 - DNA, 30 bp, Artificial Sequence
  Synthetic oligonucleotide
agaatgttccaactaaactgtacaccatta

SEQ ID NO: 172665 - DNA, 30 bp, Artificial Sequence
  Synthetic oligonucleotide
cgggggacatagtgacactgtacgccatta

SEQ ID NO: 172666 - DNA, 30 bp, Artificial Sequence
  Synthetic oligonucleotide
cagagatggtacgaggattaacggccatta

SEQ ID NO: 172667 - DNA, 30 bp, Artificial Sequence
  Synthetic oligonucleotide
cgtccggtacggactaatggcctcgcatta

SEQ ID NO: 172668 - DNA, 30 bp, Artificial Sequence
  Synthetic oligonucleotide
aggagatttgctatacattgggctgcatta

SEQ ID NO: 172669 - DNA, 30 bp, Artificial Sequence
  Synthetic oligonucleotide
accaacatggaaacaatgacggttgcatta

SEQ ID NO: 172670 - DNA, 30 bp, Artificial Sequence
  Synthetic oligonucleotide
aggcctacatgagggtgagcctgttcatta

SEQ ID NO: 172671 - DNA, 30 bp, Artificial Sequence
  Synthetic oligonucleotide
ggtgatccccgccctatcggaaaaagatta

SEQ ID NO: 172672 - DNA, 30 bp, Artificial Sequence
  Synthetic oligonucleotide
aaatttaccgactactcgcgccgaagatta

SEQ ID NO: 172673 - DNA, 30 bp, Artificial Sequence
  Synthetic oligonucleotide
tagctcgtccgggaagacattcacagatta

SEQ ID NO: 172674 - DNA, 30 bp, Artificial Sequence
  Synthetic oligonucleotide
ccatttgatccggatagcgtcatcagatta

SEQ ID NO: 172675 - DNA, 30 bp, Artificial Sequence
  Synthetic oligonucleotide
agagcgataagttttccaagatcgagatta

SEQ ID NO: 172676 - DNA, 30 bp, Artificial Sequence
  Synthetic oligonucleotide
ccttgatgccagaaacatagggtgagatta

SEQ ID NO: 172677 - DNA, 30 bp, Artificial Sequence
  Synthetic oligonucleotide
agcgctaaccctagacctaaaattagatta

SEQ ID NO: 172678 - DNA, 30 bp, Artificial Sequence
  Synthetic oligonucleotide
taattggcctccgaagggacaagatgatta

SEQ ID NO: 172679 - DNA, 30 bp, Artificial Sequence
  Synthetic oligonucleotide
ataagcgtgctgtcggcaatgaactgatta

SEQ ID NO: 172680 - DNA, 30 bp, Artificial Sequence
  Synthetic oligonucleotide
ggaaagggtcgattgcttggagggtgatta

SEQ ID NO: 172681 - DNA, 30 bp, Artificial Sequence
  Synthetic oligonucleotide
cggggatggcagtggtgcatattgtgatta

SEQ ID NO: 172682 - DNA, 30 bp, Artificial Sequence
  Synthetic oligonucleotide
gactgcaaatagcagtaagtcacaatatta

SEQ ID NO: 172683 - DNA, 30 bp, Artificial Sequence
  Synthetic oligonucleotide
cttcctcagggaaggctgtcgtcgatatta

SEQ ID NO: 172684 - DNA, 30 bp, Artificial Sequence
  Synthetic oligonucleotide
tagcgggcgggaccttaggctctcctatta

SEQ ID NO: 172685 - DNA, 30 bp, Artificial Sequence
  Synthetic oligonucleotide
cacctccaacgcaaccctggctagctatta

SEQ ID NO: 172686 - DNA, 30 bp, Artificial Sequence
  Synthetic oligonucleotide
tgttacgatggatgagatgcgacgctatta

SEQ ID NO: 172687 - DNA, 30 bp, Artificial Sequence
  Synthetic oligonucleotide
ttgaggtgccaagaacatatggggctatta

SEQ ID NO: 172688 - DNA, 30 bp, Artificial Sequence
  Synthetic oligonucleotide
tgacactttgccgacaagaactaagtatta

SEQ ID NO: 172689 - DNA, 30 bp, Artificial Sequence
  Synthetic oligonucleotide
ccaaataccataccaagaacggtcgtatta

SEQ ID NO: 172690 - DNA, 30 bp, Artificial Sequence
  Synthetic oligonucleotide
ctacgagatgggcatgcactgtctgtatta

SEQ ID NO: 172691 - DNA, 30 bp, Artificial Sequence
  Synthetic oligonucleotide
atagaaggtctatgggccgcatgtgtatta

SEQ ID NO: 172692 - DNA, 30 bp, Artificial Sequence
  Synthetic oligonucleotide
ggtggaaggcttaaactagcggttgtatta

SEQ ID NO: 172693 - DNA, 30 bp, Artificial Sequence
  Synthetic oligonucleotide
aaggtaccacgcaagacacaatgattatta

SEQ ID NO: 172694 - DNA, 30 bp, Artificial Sequence
  Synthetic oligonucleotide
ggccgtttcatttaacaagaagcgttatta

SEQ ID NO: 172695 - DNA, 30 bp, Artificial Sequence
  Synthetic oligonucleotide
cctgcaagaaccaaacgaaagtttttatta

SEQ ID NO: 172696 - DNA, 30 bp, Artificial Sequence
  Synthetic oligonucleotide
gcatacaacgacaaggtattggtaaactta

SEQ ID NO: 172697 - DNA, 30 bp, Artificial Sequence
  Synthetic oligonucleotide
tgtggactccacgcgaaacgctttaactta

SEQ ID NO: 172698 - DNA, 30 bp, Artificial Sequence
  Synthetic oligonucleotide
tggataaagggacctatgctggaacactta

SEQ ID NO: 172699 - DNA, 30 bp, Artificial Sequence
  Synthetic oligonucleotide
cacgaagggtaggtgcgaggtttccactta

SEQ ID NO: 172700 - DNA, 30 bp, Artificial Sequence
  Synthetic oligonucleotide
agtactataaacttgatcggggagcactta

SEQ ID NO: 172701 - DNA, 30 bp, Artificial Sequence
  Synthetic oligonucleotide
ctttccagcctgccgcagtgccatgactta

SEQ ID NO: 172702 - DNA, 30 bp, Artificial Sequence
  Synthetic oligonucleotide
ggcctatcgggtatcaggctgtctgactta

SEQ ID NO: 172703 - DNA, 30 bp, Artificial Sequence
  Synthetic oligonucleotide
tcaaacggcacataggaagtttgatactta

SEQ ID NO: 172704 - DNA, 30 bp, Artificial Sequence
  Synthetic oligonucleotide
aatgcgagcccaggtaaaggggtatactta

SEQ ID NO: 172705 - DNA, 30 bp, Artificial Sequence
  Synthetic oligonucleotide
atgacctaagtacaagaagggtcctactta

SEQ ID NO: 172706 - DNA, 30 bp, Artificial Sequence
  Synthetic oligonucleotide
aagaggtagacacggagaaattcgtactta

SEQ ID NO: 172707 - DNA, 30 bp, Artificial Sequence
  Synthetic oligonucleotide
cgtggtgcgtgccgctttaggggttactta

SEQ ID NO: 172708 - DNA, 30 bp, Artificial Sequence
  Synthetic oligonucleotide
ttgtctatcagattctctgctgccacctta

SEQ ID NO: 172709 - DNA, 30 bp, Artificial Sequence
  Synthetic oligonucleotide
tagcttgggaaagaaatacgaagcacctta

SEQ ID NO: 172710 - DNA, 30 bp, Artificial Sequence
  Synthetic oligonucleotide
tgcgcgaggcaattgttaatactcacctta

SEQ ID NO: 172711 - DNA, 30 bp, Artificial Sequence
  Synthetic oligonucleotide
gctcaaactgtcgcaacactatagacctta

SEQ ID NO: 172712 - DNA, 30 bp, Artificial Sequence
  Synthetic oligonucleotide
agcggttagaggtataccacatctacctta

SEQ ID NO: 172713 - DNA, 30 bp, Artificial Sequence
  Synthetic oligonucleotide
atgccggtgagctccacggtgacgccctta

SEQ ID NO: 172714 - DNA, 30 bp, Artificial Sequence
  Synthetic oligonucleotide
accgataatgcaatgggtgctcccgcctta

SEQ ID NO: 172715 - DNA, 30 bp, Artificial Sequence
  Synthetic oligonucleotide
taggtggttgtaagacaaaagtgatcctta

SEQ ID NO: 172716 - DNA, 30 bp, Artificial Sequence
  Synthetic oligonucleotide
agggggtctaggggtcgacaaaagtcctta

SEQ ID NO: 172717 - DNA, 30 bp, Artificial Sequence
  Synthetic oligonucleotide
gcggctgagcgtttttataaacagtcctta

SEQ ID NO: 172718 - DNA, 30 bp, Artificial Sequence
  Synthetic oligonucleotide
gggatgccactttgccgatcacgttcctta

SEQ ID NO: 172719 - DNA, 30 bp, Artificial Sequence
  Synthetic oligonucleotide
tatttacagctatagggaaaagcaagctta

SEQ ID NO: 172720 - DNA, 30 bp, Artificial Sequence
  Synthetic oligonucleotide
cacgactccaatagtccgggcctcagctta

SEQ ID NO: 172721 - DNA, 30 bp, Artificial Sequence
  Synthetic oligonucleotide
ggcgccatgaaatgcggcagtatgagctta

SEQ ID NO: 172722 - DNA, 30 bp, Artificial Sequence
  Synthetic oligonucleotide
ctgacggtactaaggctaagaccacgctta

SEQ ID NO: 172723 - DNA, 30 bp, Artificial Sequence
  Synthetic oligonucleotide
accgcatctggaacgatatgactacgctta

SEQ ID NO: 172724 - DNA, 30 bp, Artificial Sequence
  Synthetic oligonucleotide
ggaaaacgagcgaactacgttgcccgctta

SEQ ID NO: 172725 - DNA, 30 bp, Artificial Sequence
  Synthetic oligonucleotide
ccccgatagattccaggtagcgagcgctta

SEQ ID NO: 172726 - DNA, 30 bp, Artificial Sequence
  Synthetic oligonucleotide
ttatggaagacttacggtagaatgcgctta

SEQ ID NO: 172727 - DNA, 30 bp, Artificial Sequence
  Synthetic oligonucleotide
tgcacaacgtctacttttcttctgcgctta

SEQ ID NO: 172728 - DNA, 30 bp, Artificial Sequence
  Synthetic oligonucleotide
ggggtcacgcgggttcgtccgtaaggctta

SEQ ID NO: 172729 - DNA, 30 bp, Artificial Sequence
  Synthetic oligonucleotide
cagcaataccattaaaggcggacatgctta

SEQ ID NO: 172730 - DNA, 30 bp, Artificial Sequence
  Synthetic oligonucleotide
aatggggatgcatgacacgggacatgctta

SEQ ID NO: 172731 - DNA, 30 bp, Artificial Sequence
  Synthetic oligonucleotide
aggctgatctcatagttggctggctgctta

SEQ ID NO: 172732 - DNA, 30 bp, Artificial Sequence
  Synthetic oligonucleotide
agaacttattaccgaatcacttcgtgctta

SEQ ID NO: 172733 - DNA, 30 bp, Artificial Sequence
  Synthetic oligonucleotide
ataaacaagttaaacatcttgcacatctta

SEQ ID NO: 172734 - DNA, 30 bp, Artificial Sequence
  Synthetic oligonucleotide
aggagatacacatttatggaaggcatctta

SEQ ID NO: 172735 - DNA, 30 bp, Artificial Sequence
  Synthetic oligonucleotide
caaatccggagtcgcataatgcttatctta

SEQ ID NO: 172736 - DNA, 30 bp, Artificial Sequence
  Synthetic oligonucleotide
tctgttactacacgtgcggcccacctctta

SEQ ID NO: 172737 - DNA, 30 bp, Artificial Sequence
  Synthetic oligonucleotide
ttccagctagggaagatacttgtcctctta

SEQ ID NO: 172738 - DNA, 30 bp, Artificial Sequence
  Synthetic oligonucleotide
aagggacaggcgccgagggtggtagtctta

SEQ ID NO: 172739 - DNA, 30 bp, Artificial Sequence
  Synthetic oligonucleotide
ccgggactgttacgttcggtctacgtctta

SEQ ID NO: 172740 - DNA, 30 bp, Artificial Sequence
  Synthetic oligonucleotide
cggctctgaatgccacacgacgtcgtctta

SEQ ID NO: 172741 - DNA, 29 bp, Artificial Sequence
  Synthetic oligonucleotide
aggcacttcataggtaagctccggtctta

SEQ ID NO: 172742 - DNA, 30 bp, Artificial Sequence
  Synthetic oligonucleotide
atgatgttaagcgaggtacagtcattctta

SEQ ID NO: 172743 - DNA, 30 bp, Artificial Sequence
  Synthetic oligonucleotide
gcataacaccgggagcgcttctacttctta

SEQ ID NO: 172744 - DNA, 30 bp, Artificial Sequence
  Synthetic oligonucleotide
ataagccctataatgagttcggagttctta

SEQ ID NO: 172745 - DNA, 30 bp, Artificial Sequence
  Synthetic oligonucleotide
ttcacggcgtacgacttcacctaaaagtta

SEQ ID NO: 172746 - DNA, 30 bp, Artificial Sequence
  Synthetic oligonucleotide
taacctgcagtcaatcctgtcatcaagtta

SEQ ID NO: 172747 - DNA, 30 bp, Artificial Sequence
  Synthetic oligonucleotide
cgttgcgttaacccagtcgttgcgaagtta

SEQ ID NO: 172748 - DNA, 30 bp, Artificial Sequence
  Synthetic oligonucleotide
gaaggtgtatacttggtccataagcagtta

SEQ ID NO: 172749 - DNA, 30 bp, Artificial Sequence
  Synthetic oligonucleotide
aagggcccgtagtcttggcagaaagagtta

SEQ ID NO: 172750 - DNA, 30 bp, Artificial Sequence
  Synthetic oligonucleotide
cgggttcttcaaggagtgcgtccagagtta

SEQ ID NO: 172751 - DNA, 30 bp, Artificial Sequence
  Synthetic oligonucleotide
taggtcctatcgcctgcaaagctagagtta

SEQ ID NO: 172752 - DNA, 30 bp, Artificial Sequence
  Synthetic oligonucleotide
ggctaacacccttatgacagtgacgagtta

SEQ ID NO: 172753 - DNA, 30 bp, Artificial Sequence
  Synthetic oligonucleotide
atcgaatgctggcatcggtgccgggagtta

SEQ ID NO: 172754 - DNA, 30 bp, Artificial Sequence
  Synthetic oligonucleotide
aagccaattacttcgtaatggattgagtta

SEQ ID NO: 172755 - DNA, 30 bp, Artificial Sequence
  Synthetic oligonucleotide
ttgctaacctgtgaggattgtacatagtta

SEQ ID NO: 172756 - DNA, 30 bp, Artificial Sequence
  Synthetic oligonucleotide
gggtcaaatcacatttatctgcgctagtta

SEQ ID NO: 172757 - DNA, 30 bp, Artificial Sequence
  Synthetic oligonucleotide
cgataagtaatccagaagaacccttagtta

SEQ ID NO: 172758 - DNA, 30 bp, Artificial Sequence
  Synthetic oligonucleotide
aaacgtcatgtcagcagcagggtaacgtta

SEQ ID NO: 172759 - DNA, 30 bp, Artificial Sequence
  Synthetic oligonucleotide
cagtcccgaaaggtaaatgcgggcacgtta

SEQ ID NO: 172760 - DNA, 30 bp, Artificial Sequence
  Synthetic oligonucleotide
aacgtgtaataaccattagcacaaccgtta

SEQ ID NO: 172761 - DNA, 30 bp, Artificial Sequence
  Synthetic oligonucleotide
gtggcgtcatttccagtccgtggcccgtta

SEQ ID NO: 172762 - DNA, 30 bp, Artificial Sequence
  Synthetic oligonucleotide
tgggtaattaaagcctgttacatgccgtta

SEQ ID NO: 172763 - DNA, 30 bp, Artificial Sequence
  Synthetic oligonucleotide
ccggtgaaatggactggtgagcatccgtta

SEQ ID NO: 172764 - DNA, 30 bp, Artificial Sequence
  Synthetic oligonucleotide
gtaatgaccaaaaaagtcgttcaagcgtta

SEQ ID NO: 172765 - DNA, 30 bp, Artificial Sequence
  Synthetic oligonucleotide
gtcttgggcggtatgggatggcgagcgtta

SEQ ID NO: 172766 - DNA, 30 bp, Artificial Sequence
  Synthetic oligonucleotide
ctatgctgaatcgagttggcgcacgcgtta

SEQ ID NO: 172767 - DNA, 30 bp, Artificial Sequence
  Synthetic oligonucleotide
cgtagctgtcaccgtgatcgaagggcgtta

SEQ ID NO: 172768 - DNA, 30 bp, Artificial Sequence
  Synthetic oligonucleotide
agcacgtaaaacccttttcatcctgcgtta

SEQ ID NO: 172769 - DNA, 30 bp, Artificial Sequence
  Synthetic oligonucleotide
cgctaaggcgggggattagagaaatcgtta

SEQ ID NO: 172770 - DNA, 30 bp, Artificial Sequence
  Synthetic oligonucleotide
gacggaaaatggctgatcgtattatcgtta

SEQ ID NO: 172771 - DNA, 30 bp, Artificial Sequence
  Synthetic oligonucleotide
cgcatagggagaaataaggggcactcgtta

SEQ ID NO: 172772 - DNA, 30 bp, Artificial Sequence
  Synthetic oligonucleotide
agcctacacagacagaatatgaggtcgtta

SEQ ID NO: 172773 - DNA, 30 bp, Artificial Sequence
  Synthetic oligonucleotide
ggtcgacaggattgtcgggccatttcgtta

SEQ ID NO: 172774 - DNA, 30 bp, Artificial Sequence
  Synthetic oligonucleotide
tcatcttcgagggagccgatgataaggtta

SEQ ID NO: 172775 - DNA, 30 bp, Artificial Sequence
  Synthetic oligonucleotide
gcagtatgggctagacaacatacgaggtta

SEQ ID NO: 172776 - DNA, 29 bp, Artificial Sequence
  Synthetic oligonucleotide
gaatgcaagactatcaagtgccgaggtta

SEQ ID NO: 172777 - DNA, 30 bp, Artificial Sequence
  Synthetic oligonucleotide
caggggaacgaagtaacactatataggtta

SEQ ID NO: 172778 - DNA, 30 bp, Artificial Sequence
  Synthetic oligonucleotide
gtatggttaatgtatgagaaacgtaggtta

SEQ ID NO: 172779 - DNA, 30 bp, Artificial Sequence
  Synthetic oligonucleotide
ggtctccaaaacgatataccacgacggtta

SEQ ID NO: 172780 - DNA, 30 bp, Artificial Sequence
  Synthetic oligonucleotide
ttgtggtgcggggagacctgcctacggtta

SEQ ID NO: 172781 - DNA, 30 bp, Artificial Sequence
  Synthetic oligonucleotide
gatctcagaggccagactaatgaccggtta

SEQ ID NO: 172782 - DNA, 30 bp, Artificial Sequence
  Synthetic oligonucleotide
gcaactctaaggctcaccgcggggcggtta

SEQ ID NO: 172783 - DNA, 30 bp, Artificial Sequence
  Synthetic oligonucleotide
gtaaggtgtcgtgtcctattgtctcggtta

SEQ ID NO: 172784 - DNA, 30 bp, Artificial Sequence
  Synthetic oligonucleotide
gggattcgacggacccaggtgctagggtta

SEQ ID NO: 172785 - DNA, 29 bp, Artificial Sequence
  Synthetic oligonucleotide
gcgtagtgtgaaagagaagaatggggtta

SEQ ID NO: 172786 - DNA, 30 bp, Artificial Sequence
  Synthetic oligonucleotide
ttacggtaaggaggcagtcactaatggtta

SEQ ID NO: 172787 - DNA, 30 bp, Artificial Sequence
  Synthetic oligonucleotide
tcggttccacagggtatggccccatggtta

SEQ ID NO: 172788 - DNA, 30 bp, Artificial Sequence
  Synthetic oligonucleotide
ccccaatgcgcaaggatggcggtctggtta

SEQ ID NO: 172789 - DNA, 30 bp, Artificial Sequence
  Synthetic oligonucleotide
gggatcgaccaggaattaccgtagtggtta

SEQ ID NO: 172790 - DNA, 30 bp, Artificial Sequence
  Synthetic oligonucleotide
agtcttcactggacggaaataggaatgtta

SEQ ID NO: 172791 - DNA, 30 bp, Artificial Sequence
  Synthetic oligonucleotide
cgtttgtctggcatatccaagggaatgtta

SEQ ID NO: 172792 - DNA, 30 bp, Artificial Sequence
  Synthetic oligonucleotide
tgatcccaacttcgaggccaaatcatgtta

SEQ ID NO: 172793 - DNA, 30 bp, Artificial Sequence
  Synthetic oligonucleotide
agctgtggccgacattagcggcatatgtta

SEQ ID NO: 172794 - DNA, 30 bp, Artificial Sequence
  Synthetic oligonucleotide
actgaaaacaagtcatcttcacgactgtta

SEQ ID NO: 172795 - DNA, 30 bp, Artificial Sequence
  Synthetic oligonucleotide
gcttgcggcgtcatctttctagccctgtta

SEQ ID NO: 172796 - DNA, 30 bp, Artificial Sequence
  Synthetic oligonucleotide
aagaggcacaggcaatatttcgccctgtta

SEQ ID NO: 172797 - DNA, 30 bp, Artificial Sequence
  Synthetic oligonucleotide
agatagtccgtcagaagggctaaagtgtta

SEQ ID NO: 172798 - DNA, 30 bp, Artificial Sequence
  Synthetic oligonucleotide
ctcaaatagcacacagcagatagagtgtta

SEQ ID NO: 172799 - DNA, 30 bp, Artificial Sequence
  Synthetic oligonucleotide
atggtgtcatagggcgccagaaccgtgtta

SEQ ID NO: 172800 - DNA, 30 bp, Artificial Sequence
  Synthetic oligonucleotide
atgccacgggggtgaggtaccgttgtgtta

SEQ ID NO: 172801 - DNA, 30 bp, Artificial Sequence
  Synthetic oligonucleotide
cgagtatataacccgccagtgtgattgtta

SEQ ID NO: 172802 - DNA, 30 bp, Artificial Sequence
  Synthetic oligonucleotide
accaggtccactttggctagcttattgtta

SEQ ID NO: 172803 - DNA, 30 bp, Artificial Sequence
  Synthetic oligonucleotide
gcaacgctcaaacccctagaccacttgtta

SEQ ID NO: 172804 - DNA, 30 bp, Artificial Sequence
  Synthetic oligonucleotide
cacttccgggggcatcaaagggacttgtta

SEQ ID NO: 172805 - DNA, 30 bp, Artificial Sequence
  Synthetic oligonucleotide
cagtcgtggtaaccgttttcgtgcttgtta

SEQ ID NO: 172806 - DNA, 30 bp, Artificial Sequence
  Synthetic oligonucleotide
ccggagctcggaatgactgcgtacaattta

SEQ ID NO: 172807 - DNA, 30 bp, Artificial Sequence
  Synthetic oligonucleotide
aggcgacggtttgtaagcaagcgcaattta

SEQ ID NO: 172808 - DNA, 30 bp, Artificial Sequence
  Synthetic oligonucleotide
gggggtcgggaaagagtataggagaattta

SEQ ID NO: 172809 - DNA, 30 bp, Artificial Sequence
  Synthetic oligonucleotide
ttgataggccttgaatgaatagtgaattta

SEQ ID NO: 172810 - DNA, 30 bp, Artificial Sequence
  Synthetic oligonucleotide
cagccggcgggattgccaaagcgacattta

SEQ ID NO: 172811 - DNA, 30 bp, Artificial Sequence
  Synthetic oligonucleotide
caagttcgtgtgtaatgtgagtgacattta

SEQ ID NO: 172812 - DNA, 30 bp, Artificial Sequence
  Synthetic oligonucleotide
atggggtaacagagcacaaataaccattta

SEQ ID NO: 172813 - DNA, 30 bp, Artificial Sequence
  Synthetic oligonucleotide
cacaggtcggttagttctaatccccattta

SEQ ID NO: 172814 - DNA, 30 bp, Artificial Sequence
  Synthetic oligonucleotide
gacgacgggcatccagcgctttggcattta

SEQ ID NO: 172815 - DNA, 30 bp, Artificial Sequence
  Synthetic oligonucleotide
aggatcgtctagaggtttatgcaagattta

SEQ ID NO: 172816 - DNA, 30 bp, Artificial Sequence
  Synthetic oligonucleotide
gagcgaaggcgatgaggtacgatagattta

SEQ ID NO: 172817 - DNA, 30 bp, Artificial Sequence
  Synthetic oligonucleotide
cggtcgagcggtggtggggtgcacgattta

SEQ ID NO: 172818 - DNA, 30 bp, Artificial Sequence
  Synthetic oligonucleotide
caccagggtaaaaacaacgccccctattta

SEQ ID NO: 172819 - DNA, 30 bp, Artificial Sequence
  Synthetic oligonucleotide
cacgacctaactgaatacagacggtattta

SEQ ID NO: 172820 - DNA, 30 bp, Artificial Sequence
  Synthetic oligonucleotide
cggttacagtgcaagggaatttcttattta

SEQ ID NO: 172821 - DNA, 30 bp, Artificial Sequence
  Synthetic oligonucleotide
tagtccctggcactcgaaatggcaacttta

SEQ ID NO: 172822 - DNA, 30 bp, Artificial Sequence
  Synthetic oligonucleotide
cgggttgaaacaccacaaaaggacacttta

SEQ ID NO: 172823 - DNA, 30 bp, Artificial Sequence
  Synthetic oligonucleotide
cgcgtaacagccagtactgcggtcacttta

SEQ ID NO: 172824 - DNA, 30 bp, Artificial Sequence
  Synthetic oligonucleotide
agggcctgtcaagcagtttctcacgcttta

SEQ ID NO: 172825 - DNA, 30 bp, Artificial Sequence
  Synthetic oligonucleotide
cggctagagacgcaataggtgaatgcttta

SEQ ID NO: 172826 - DNA, 30 bp, Artificial Sequence
  Synthetic oligonucleotide
cagatgtaagtgtgcgacaaatctgcttta

SEQ ID NO: 172827 - DNA, 30 bp, Artificial Sequence
  Synthetic oligonucleotide
gggtcggagcatcctgggtaccgatcttta

SEQ ID NO: 172828 - DNA, 30 bp, Artificial Sequence
  Synthetic oligonucleotide
ggcggtacttgggccgaacatggatcttta

SEQ ID NO: 172829 - DNA, 31 bp, Artificial Sequence
  Synthetic oligonucleotide
cgaccacaacgtgttgtattagctatcttta

SEQ ID NO: 172830 - DNA, 30 bp, Artificial Sequence
  Synthetic oligonucleotide
aatgggacctgagcgatttatacgtcttta

SEQ ID NO: 172831 - DNA, 30 bp, Artificial Sequence
  Synthetic oligonucleotide
gtatgagtcaggaatgcactttcgtcttta

SEQ ID NO: 172832 - DNA, 30 bp, Artificial Sequence
  Synthetic oligonucleotide
actaggcgttataatggttccgggtcttta

SEQ ID NO: 172833 - DNA, 30 bp, Artificial Sequence
  Synthetic oligonucleotide
tggagcatagctgccgtgaactacagttta

SEQ ID NO: 172834 - DNA, 30 bp, Artificial Sequence
  Synthetic oligonucleotide
ctacgtgttcgggactgacagggcagttta

SEQ ID NO: 172835 - DNA, 30 bp, Artificial Sequence
  Synthetic oligonucleotide
gccaagggagcgagtccccacgtaggttta

SEQ ID NO: 172836 - DNA, 30 bp, Artificial Sequence
  Synthetic oligonucleotide
gtcgcgtgtatagcgaaaatcaagggttta

SEQ ID NO: 172837 - DNA, 30 bp, Artificial Sequence
  Synthetic oligonucleotide
tatcaggcagatgttgcgccaacatgttta

SEQ ID NO: 172838 - DNA, 30 bp, Artificial Sequence
  Synthetic oligonucleotide
cgggtcgagattagctgttgcaagtgttta

SEQ ID NO: 172839 - DNA, 30 bp, Artificial Sequence
  Synthetic oligonucleotide
gtaagaccattaacatcgtcggcaatttta

SEQ ID NO: 172840 - DNA, 30 bp, Artificial Sequence
  Synthetic oligonucleotide
atggaacacacctatgctatatcactttta

SEQ ID NO: 172841 - DNA, 30 bp, Artificial Sequence
  Synthetic oligonucleotide
tctttaaaaaacatggtcaagaacctttta

SEQ ID NO: 172842 - DNA, 30 bp, Artificial Sequence
  Synthetic oligonucleotide
aggtaccggaagttaggctcgttcctttta

SEQ ID NO: 172843 - DNA, 30 bp, Artificial Sequence
  Synthetic oligonucleotide
ggaccgcgaagcctccatgcatgcgtttta

SEQ ID NO: 172844 - DNA, 30 bp, Artificial Sequence
  Synthetic oligonucleotide
aagtgtaaagggataaatcctatggtttta

SEQ ID NO: 172845 - DNA, 30 bp, Artificial Sequence
  Synthetic oligonucleotide
gggagacatagatgtgtataattggtttta

SEQ ID NO: 172846 - DNA, 30 bp, Artificial Sequence
  Synthetic oligonucleotide
ccaataattaaacacctctgaactgtttta

SEQ ID NO: 172847 - DNA, 30 bp, Artificial Sequence
  Synthetic oligonucleotide
caggcgtgtaggccacacacatatttttta

SEQ ID NO: 172848 - DNA, 30 bp, Artificial Sequence
  Synthetic oligonucleotide
tgcctacacacgtgctatagatagaaaaac

SEQ ID NO: 172849 - DNA, 30 bp, Artificial Sequence
  Synthetic oligonucleotide
ataataacaaagtccaagggagctaaaaac

SEQ ID NO: 172850 - DNA, 30 bp, Artificial Sequence
  Synthetic oligonucleotide
tctgtccggtagcgacagtgcggtaaaaac

SEQ ID NO: 172851 - DNA, 30 bp, Artificial Sequence
  Synthetic oligonucleotide
tgtgtaggtctatcgctgtggcttaaaaac

SEQ ID NO: 172852 - DNA, 30 bp, Artificial Sequence
  Synthetic oligonucleotide
cgtaggatcatccaggcactaccacaaaac

SEQ ID NO: 172853 - DNA, 30 bp, Artificial Sequence
  Synthetic oligonucleotide
agagtgggttgacaattctagccacaaaac

SEQ ID NO: 172854 - DNA, 30 bp, Artificial Sequence
  Synthetic oligonucleotide
cagtccagaagcatgtttgttacccaaaac

SEQ ID NO: 172855 - DNA, 30 bp, Artificial Sequence
  Synthetic oligonucleotide
ggtacctcaaccgtagcgaataatcaaaac

SEQ ID NO: 172856 - DNA, 30 bp, Artificial Sequence
  Synthetic oligonucleotide
gatgtcgttgcgttaaaagagcatcaaaac

SEQ ID NO: 172857 - DNA, 30 bp, Artificial Sequence
  Synthetic oligonucleotide
accgcaatcatcacgcggtggcatcaaaac

SEQ ID NO: 172858 - DNA, 30 bp, Artificial Sequence
  Synthetic oligonucleotide
gaagtccggcgtccatggacaccagaaaac

SEQ ID NO: 172859 - DNA, 30 bp, Artificial Sequence
  Synthetic oligonucleotide
ccgggatttgtaacgacagtcgtcgaaaac

SEQ ID NO: 172860 - DNA, 30 bp, Artificial Sequence
  Synthetic oligonucleotide
tcgtcacatgacacactgagtaaggaaaac

SEQ ID NO: 172861 - DNA, 30 bp, Artificial Sequence
  Synthetic oligonucleotide
ttgtcctgatttcatatcgctcgtgaaaac

SEQ ID NO: 172862 - DNA, 30 bp, Artificial Sequence
  Synthetic oligonucleotide
aaaggtgatctaacggtgacgaaataaaac

SEQ ID NO: 172863 - DNA, 30 bp, Artificial Sequence
  Synthetic oligonucleotide
cgttgatcactcctagaagccccataaaac

SEQ ID NO: 172864 - DNA, 30 bp, Artificial Sequence
  Synthetic oligonucleotide
ttggctccaatgatcaccacctactaaaac

SEQ ID NO: 172865 - DNA, 30 bp, Artificial Sequence
  Synthetic oligonucleotide
cgttagatatttgccaggactaagtaaaac

SEQ ID NO: 172866 - DNA, 30 bp, Artificial Sequence
  Synthetic oligonucleotide
ggaaccgagttttgggcgaggacaacaaac

SEQ ID NO: 172867 - DNA, 30 bp, Artificial Sequence
  Synthetic oligonucleotide
cgacatgggccaaaaacgctggcaacaaac

SEQ ID NO: 172868 - DNA, 30 bp, Artificial Sequence
  Synthetic oligonucleotide
agcccgtagtcaggaagttgccacacaaac

SEQ ID NO: 172869 - DNA, 30 bp, Artificial Sequence
  Synthetic oligonucleotide
ttgcattacacaaaactctgctccacaaac

SEQ ID NO: 172870 - DNA, 30 bp, Artificial Sequence
  Synthetic oligonucleotide
atcagagagttgacccgacggtggacaaac

SEQ ID NO: 172871 - DNA, 30 bp, Artificial Sequence
  Synthetic oligonucleotide
cgaatcctagtatacgactaacatacaaac

SEQ ID NO: 172872 - DNA, 30 bp, Artificial Sequence
  Synthetic oligonucleotide
aagctgatggcctttactgcatgtacaaac

SEQ ID NO: 172873 - DNA, 30 bp, Artificial Sequence
  Synthetic oligonucleotide
ggccgtaggcccgacgcgaccacaccaaac

SEQ ID NO: 172874 - DNA, 30 bp, Artificial Sequence
  Synthetic oligonucleotide
tacatcatggtcgtgtactgatcgccaaac

SEQ ID NO: 172875 - DNA, 30 bp, Artificial Sequence
  Synthetic oligonucleotide
gcgtgccatacattgggcgcatcagcaaac

SEQ ID NO: 172876 - DNA, 30 bp, Artificial Sequence
  Synthetic oligonucleotide
cagcgactcttacagaattgggcggcaaac

SEQ ID NO: 172877 - DNA, 30 bp, Artificial Sequence
  Synthetic oligonucleotide
aaagttgtgatgagccatttttgggcaaac

SEQ ID NO: 172878 - DNA, 30 bp, Artificial Sequence
  Synthetic oligonucleotide
ataacgaagggggtaaaatcctcatcaaac

SEQ ID NO: 172879 - DNA, 30 bp, Artificial Sequence
  Synthetic oligonucleotide
tagtaattgcgtcgacctactaactcaaac

SEQ ID NO: 172880 - DNA, 30 bp, Artificial Sequence
  Synthetic oligonucleotide
tcaagagctcgagggtgcaatctttcaaac

SEQ ID NO: 172881 - DNA, 30 bp, Artificial Sequence
  Synthetic oligonucleotide
gctcctatgcgcctttacatgaacagaaac

SEQ ID NO: 172882 - DNA, 30 bp, Artificial Sequence
  Synthetic oligonucleotide
gatatttaaaccggatccaagcgcagaaac

SEQ ID NO: 172883 - DNA, 30 bp, Artificial Sequence
  Synthetic oligonucleotide
tgattgtagagcagaggtcccgtcagaaac

SEQ ID NO: 172884 - DNA, 30 bp, Artificial Sequence
  Synthetic oligonucleotide
caacatacttgttattgcaccgagagaaac

SEQ ID NO: 172885 - DNA, 30 bp, Artificial Sequence
  Synthetic oligonucleotide
acctaagaagctgtttatcatacgagaaac

SEQ ID NO: 172886 - DNA, 30 bp, Artificial Sequence
  Synthetic oligonucleotide
ctatgcgaatgcaaggtattgattagaaac

SEQ ID NO: 172887 - DNA, 30 bp, Artificial Sequence
  Synthetic oligonucleotide
cattggatagccaatttggggtttagaaac

SEQ ID NO: 172888 - DNA, 30 bp, Artificial Sequence
  Synthetic oligonucleotide
tgcatttcaaagtgctaatttcaccgaaac

SEQ ID NO: 172889 - DNA, 30 bp, Artificial Sequence
  Synthetic oligonucleotide
taatgagtagaggtgtgcgttggccgaaac

SEQ ID NO: 172890 - DNA, 30 bp, Artificial Sequence
  Synthetic oligonucleotide
ccgcaagcatcgcccgagagtgcaggaaac

SEQ ID NO: 172891 - DNA, 30 bp, Artificial Sequence
  Synthetic oligonucleotide
tccccagacatttggattgcactcggaaac

SEQ ID NO: 172892 - DNA, 30 bp, Artificial Sequence
  Synthetic oligonucleotide
atgtaaagggccttggtgggcggtggaaac

SEQ ID NO: 172893 - DNA, 30 bp, Artificial Sequence
  Synthetic oligonucleotide
gggggtccccccgggaggaacattggaaac

SEQ ID NO: 172894 - DNA, 30 bp, Artificial Sequence
  Synthetic oligonucleotide
tgaacaggtggaagtaacctgattggaaac

SEQ ID NO: 172895 - DNA, 30 bp, Artificial Sequence
  Synthetic oligonucleotide
gagaaaaagtaacgtcgtaaactatgaaac

SEQ ID NO: 172896 - DNA, 30 bp, Artificial Sequence
  Synthetic oligonucleotide
aacatgctgataatatcaagtacctgaaac

SEQ ID NO: 172897 - DNA, 30 bp, Artificial Sequence
  Synthetic oligonucleotide
ggtaagattatcgcgtactcacgctgaaac

SEQ ID NO: 172898 - DNA, 30 bp, Artificial Sequence
  Synthetic oligonucleotide
acgaggaagggtaagtatctgcgctgaaac

SEQ ID NO: 172899 - DNA, 30 bp, Artificial Sequence
  Synthetic oligonucleotide
cgaacaggtgtttaacgtccaccgtgaaac

SEQ ID NO: 172900 - DNA, 30 bp, Artificial Sequence
  Synthetic oligonucleotide
ggcatttacgggagagctgacgtttgaaac

SEQ ID NO: 172901 - DNA, 30 bp, Artificial Sequence
  Synthetic oligonucleotide
ccagagataagtggtggagcatatataaac

SEQ ID NO: 172902 - DNA, 30 bp, Artificial Sequence
  Synthetic oligonucleotide
taatggtgtcctgggcttcaagaactaaac

SEQ ID NO: 172903 - DNA, 30 bp, Artificial Sequence
  Synthetic oligonucleotide
gagctggcaaggcgtacgaggtgactaaac

SEQ ID NO: 172904 - DNA, 30 bp, Artificial Sequence
  Synthetic oligonucleotide
tggcagcgggggtacgcccatccgctaaac

SEQ ID NO: 172905 - DNA, 29 bp, Artificial Sequence
  Synthetic oligonucleotide
gcaggcattggcacatggcaaggctaaac

SEQ ID NO: 172906 - DNA, 30 bp, Artificial Sequence
  Synthetic oligonucleotide
tctaatggacgtcgtgacagtcctctaaac

SEQ ID NO: 172907 - DNA, 30 bp, Artificial Sequence
  Synthetic oligonucleotide
ccactgggcgaagaattgccttgcgtaaac

SEQ ID NO: 172908 - DNA, 30 bp, Artificial Sequence
  Synthetic oligonucleotide
cgtccggtaacatcggtacgactcgtaaac

SEQ ID NO: 172909 - DNA, 30 bp, Artificial Sequence
  Synthetic oligonucleotide
tacaaagaacagtttgcggggctcgtaaac

SEQ ID NO: 172910 - DNA, 30 bp, Artificial Sequence
  Synthetic oligonucleotide
taggtgtggtctaagtccgccttcgtaaac

SEQ ID NO: 172911 - DNA, 30 bp, Artificial Sequence
  Synthetic oligonucleotide
tgaacccaggcaacgcggagcttcgtaaac

SEQ ID NO: 172912 - DNA, 30 bp, Artificial Sequence
  Synthetic oligonucleotide
acgcgagaatgagatcacgaacgggtaaac

SEQ ID NO: 172913 - DNA, 30 bp, Artificial Sequence
  Synthetic oligonucleotide
gtaacgagttgacactcccatggggtaaac

SEQ ID NO: 172914 - DNA, 30 bp, Artificial Sequence
  Synthetic oligonucleotide
cgaaaaacatttgggtaatcaagattaaac

SEQ ID NO: 172915 - DNA, 30 bp, Artificial Sequence
  Synthetic oligonucleotide
aagagctatagagcgaccttaaacttaaac

SEQ ID NO: 172916 - DNA, 30 bp, Artificial Sequence
  Synthetic oligonucleotide
ttgggaagtggtatgccacatcgcttaaac

SEQ ID NO: 172917 - DNA, 30 bp, Artificial Sequence
  Synthetic oligonucleotide
acggactatcaacagggggcccagttaaac

SEQ ID NO: 172918 - DNA, 30 bp, Artificial Sequence
  Synthetic oligonucleotide
cgacatggcacattcgtttacgagttaaac

SEQ ID NO: 172919 - DNA, 30 bp, Artificial Sequence
  Synthetic oligonucleotide
cgacgaacctcataagttagcttgttaaac

SEQ ID NO: 172920 - DNA, 30 bp, Artificial Sequence
  Synthetic oligonucleotide
gcagaacaggtatgtaaacgtcacaacaac

SEQ ID NO: 172921 - DNA, 30 bp, Artificial Sequence
  Synthetic oligonucleotide
ctacatatagaagtaaaaagctacaacaac

SEQ ID NO: 172922 - DNA, 30 bp, Artificial Sequence
  Synthetic oligonucleotide
acagacgatgggagcgttcactccaacaac

SEQ ID NO: 172923 - DNA, 30 bp, Artificial Sequence
  Synthetic oligonucleotide
tccaagtcgtaagaggatggagtacacaac

SEQ ID NO: 172924 - DNA, 30 bp, Artificial Sequence
  Synthetic oligonucleotide
ccaagggacacaatataaatcgtgcacaac

SEQ ID NO: 172925 - DNA, 30 bp, Artificial Sequence
  Synthetic oligonucleotide
taatgcgtagtacgatcagcattgcacaac

SEQ ID NO: 172926 - DNA, 30 bp, Artificial Sequence
  Synthetic oligonucleotide
cacctagtgcttaagcacgcaaatcacaac

SEQ ID NO: 172927 - DNA, 30 bp, Artificial Sequence
  Synthetic oligonucleotide
aaagcaagaggttttgtaaaaggggacaac

SEQ ID NO: 172928 - DNA, 30 bp, Artificial Sequence
  Synthetic oligonucleotide
tgccgggttacataaaagtggactgacaac

SEQ ID NO: 172929 - DNA, 30 bp, Artificial Sequence
  Synthetic oligonucleotide
tgcatgagggttatcagttccgagtacaac

SEQ ID NO: 172930 - DNA, 30 bp, Artificial Sequence
  Synthetic oligonucleotide
agaggcccagtagcacgaaagtcaaccaac

SEQ ID NO: 172931 - DNA, 30 bp, Artificial Sequence
  Synthetic oligonucleotide
cccacggattcccttgatgcgagtaccaac

SEQ ID NO: 172932 - DNA, 30 bp, Artificial Sequence
  Synthetic oligonucleotide
cctaagtcgtgacgattgtttcgccccaac

SEQ ID NO: 172933 - DNA, 30 bp, Artificial Sequence
  Synthetic oligonucleotide
ggacaccatttaacactccgaggcgccaac

SEQ ID NO: 172934 - DNA, 30 bp, Artificial Sequence
  Synthetic oligonucleotide
cgatgctgagggggataagctggcgccaac

SEQ ID NO: 172935 - DNA, 30 bp, Artificial Sequence
  Synthetic oligonucleotide
cgtggacgcacttcagtgtgatgcgccaac

SEQ ID NO: 172936 - DNA, 30 bp, Artificial Sequence
  Synthetic oligonucleotide
agtgcaggaaattgcagaattcttgccaac

SEQ ID NO: 172937 - DNA, 30 bp, Artificial Sequence
  Synthetic oligonucleotide
taataaggcgctctacgaagagaatccaac

SEQ ID NO: 172938 - DNA, 30 bp, Artificial Sequence
  Synthetic oligonucleotide
aataattcacaaagagctgtaatatccaac

SEQ ID NO: 172939 - DNA, 30 bp, Artificial Sequence
  Synthetic oligonucleotide
gtgggcaattagtaccctccttactccaac

SEQ ID NO: 172940 - DNA, 30 bp, Artificial Sequence
  Synthetic oligonucleotide
ttaagattcgacgaaacacacggaagcaac

SEQ ID NO: 172941 - DNA, 30 bp, Artificial Sequence
  Synthetic oligonucleotide
tacattatcgaggaaggaccgagccgcaac

SEQ ID NO: 172942 - DNA, 30 bp, Artificial Sequence
  Synthetic oligonucleotide
acatatcttctaggagcagaggttcgcaac

SEQ ID NO: 172943 - DNA, 30 bp, Artificial Sequence
  Synthetic oligonucleotide
cgctgacatgtaggtatcgaatgaggcaac

SEQ ID NO: 172944 - DNA, 30 bp, Artificial Sequence
  Synthetic oligonucleotide
ggctcactactgacgcaccactacggcaac

SEQ ID NO: 172945 - DNA, 30 bp, Artificial Sequence
  Synthetic oligonucleotide
caaagagcggttaagttggtaacgggcaac

SEQ ID NO: 172946 - DNA, 30 bp, Artificial Sequence
  Synthetic oligonucleotide
attgctaagaacattcccgaggcgggcaac

SEQ ID NO: 172947 - DNA, 30 bp, Artificial Sequence
  Synthetic oligonucleotide
acaggacataactaaccttacatatgcaac

SEQ ID NO: 172948 - DNA, 30 bp, Artificial Sequence
  Synthetic oligonucleotide
gtgtcccgcgacatccaataagagtgcaac

SEQ ID NO: 172949 - DNA, 30 bp, Artificial Sequence
  Synthetic oligonucleotide
ctggctacgaggcgacggaccttgtgcaac

SEQ ID NO: 172950 - DNA, 30 bp, Artificial Sequence
  Synthetic oligonucleotide
cctggattgtgaagggcacgctacatcaac

SEQ ID NO: 172951 - DNA, 30 bp, Artificial Sequence
  Synthetic oligonucleotide
ggcattgagcaggtagcacccttcatcaac

SEQ ID NO: 172952 - DNA, 30 bp, Artificial Sequence
  Synthetic oligonucleotide
gaagccccacgagcacacttagagatcaac

SEQ ID NO: 172953 - DNA, 30 bp, Artificial Sequence
  Synthetic oligonucleotide
taaatcaggatctcgatgccacttatcaac

SEQ ID NO: 172954 - DNA, 30 bp, Artificial Sequence
  Synthetic oligonucleotide
cagccgcggtagaacgtattcacactcaac

SEQ ID NO: 172955 - DNA, 30 bp, Artificial Sequence
  Synthetic oligonucleotide
ggcatgatgttaccgggtgacatactcaac

SEQ ID NO: 172956 - DNA, 30 bp, Artificial Sequence
  Synthetic oligonucleotide
tacgaaaagagatcagaaacgcggctcaac

SEQ ID NO: 172957 - DNA, 31 bp, Artificial Sequence
  Synthetic oligonucleotide
ccaaattccggggaataattagatgctcaac

SEQ ID NO: 172958 - DNA, 30 bp, Artificial Sequence
  Synthetic oligonucleotide
gtaaccagaaaccacgaggtggatctcaac

SEQ ID NO: 172959 - DNA, 30 bp, Artificial Sequence
  Synthetic oligonucleotide
cttgacagtatcaggggggaaggcttcaac

SEQ ID NO: 172960 - DNA, 30 bp, Artificial Sequence
  Synthetic oligonucleotide
tgtgcgtcactaaggggaaagctcttcaac

SEQ ID NO: 172961 - DNA, 30 bp, Artificial Sequence
  Synthetic oligonucleotide
ccgtggaccacgtggcgagacgcgttcaac

SEQ ID NO: 172962 - DNA, 30 bp, Artificial Sequence
  Synthetic oligonucleotide
gcaggctgtatgaagtttttagtaaagaac

SEQ ID NO: 172963 - DNA, 30 bp, Artificial Sequence
  Synthetic oligonucleotide
tccggtatcgaaatttccgttaggaagaac

SEQ ID NO: 172964 - DNA, 30 bp, Artificial Sequence
  Synthetic oligonucleotide
tgacaggctcgaggactatcacgtaagaac

SEQ ID NO: 172965 - DNA, 30 bp, Artificial Sequence
  Synthetic oligonucleotide
ttcctagacacatacgtaagtcaacagaac

SEQ ID NO: 172966 - DNA, 30 bp, Artificial Sequence
  Synthetic oligonucleotide
agagtgttactgtaaggaacaacgcagaac

SEQ ID NO: 172967 - DNA, 30 bp, Artificial Sequence
  Synthetic oligonucleotide
taagctgatgccttggagtccaggcagaac

SEQ ID NO: 172968 - DNA, 30 bp, Artificial Sequence
  Synthetic oligonucleotide
cagtcagggcttcaaggtgcagctcagaac

SEQ ID NO: 172969 - DNA, 30 bp, Artificial Sequence
  Synthetic oligonucleotide
agtacatggacccaatgtagctaagagaac

SEQ ID NO: 172970 - DNA, 30 bp, Artificial Sequence
  Synthetic oligonucleotide
ttcgtgcgcctacagtattcattagagaac

SEQ ID NO: 172971 - DNA, 30 bp, Artificial Sequence
  Synthetic oligonucleotide
cacagccgattctaccactcccacgagaac

SEQ ID NO: 172972 - DNA, 30 bp, Artificial Sequence
  Synthetic oligonucleotide
cagggcgtttcaaaccgttactgtgagaac

SEQ ID NO: 172973 - DNA, 30 bp, Artificial Sequence
  Synthetic oligonucleotide
actattacatgtcacgtgtgcacgtagaac

SEQ ID NO: 172974 - DNA, 30 bp, Artificial Sequence
  Synthetic oligonucleotide
gtaaatgaataagtgagtgcttattagaac

SEQ ID NO: 172975 - DNA, 30 bp, Artificial Sequence
  Synthetic oligonucleotide
aggaaatcgcccctcaaccgactttagaac

SEQ ID NO: 172976 - DNA, 30 bp, Artificial Sequence
  Synthetic oligonucleotide
tgaatatcgaccactaaggcgaaaacgaac

SEQ ID NO: 172977 - DNA, 30 bp, Artificial Sequence
  Synthetic oligonucleotide
actgtggatatcgcgcgtctaaacacgaac

SEQ ID NO: 172978 - DNA, 30 bp, Artificial Sequence
  Synthetic oligonucleotide
ccgaaaccactgctatacgtattcacgaac

SEQ ID NO: 172979 - DNA, 30 bp, Artificial Sequence
  Synthetic oligonucleotide
acggggtataagctcacgttttgaccgaac

SEQ ID NO: 172980 - DNA, 30 bp, Artificial Sequence
  Synthetic oligonucleotide
acttgtatggacttggaatgaaacccgaac

SEQ ID NO: 172981 - DNA, 30 bp, Artificial Sequence
  Synthetic oligonucleotide
cctcaggatgtgttatctgttgccccgaac

SEQ ID NO: 172982 - DNA, 30 bp, Artificial Sequence
  Synthetic oligonucleotide
agtttgtgactacatccctggtccccgaac

SEQ ID NO: 172983 - DNA, 30 bp, Artificial Sequence
  Synthetic oligonucleotide
gcacgcacaaaagggaggcccggtccgaac

SEQ ID NO: 172984 - DNA, 30 bp, Artificial Sequence
  Synthetic oligonucleotide
caagggctggtacatgtcaaataagcgaac

SEQ ID NO: 172985 - DNA, 30 bp, Artificial Sequence
  Synthetic oligonucleotide
gatacagattgggggaattgaacagcgaac

SEQ ID NO: 172986 - DNA, 30 bp, Artificial Sequence
  Synthetic oligonucleotide
gagggctgctcgatgcggctctgagcgaac

SEQ ID NO: 172987 - DNA, 30 bp, Artificial Sequence
  Synthetic oligonucleotide
atcttggagccggacgggtcaatctcgaac

SEQ ID NO: 172988 - DNA, 30 bp, Artificial Sequence
  Synthetic oligonucleotide
taggcaattcatccaggtaaagtaaggaac

SEQ ID NO: 172989 - DNA, 30 bp, Artificial Sequence
  Synthetic oligonucleotide
caagtcagtggaattcagtggggacggaac

SEQ ID NO: 172990 - DNA, 30 bp, Artificial Sequence
  Synthetic oligonucleotide
atcagcgatagaatcctatagaagcggaac

SEQ ID NO: 172991 - DNA, 30 bp, Artificial Sequence
  Synthetic oligonucleotide
cgcccactagaaattcaaggtagtcggaac

SEQ ID NO: 172992 - DNA, 30 bp, Artificial Sequence
  Synthetic oligonucleotide
ttatgccggtacctagggcgtcgagggaac

SEQ ID NO: 172993 - DNA, 30 bp, Artificial Sequence
  Synthetic oligonucleotide
ggaaacactcatcccatacgggaggggaac

SEQ ID NO: 172994 - DNA, 30 bp, Artificial Sequence
  Synthetic oligonucleotide
tcacaacgggtattgggcggttgtgggaac

SEQ ID NO: 172995 - DNA, 30 bp, Artificial Sequence
  Synthetic oligonucleotide
ggtgtggtacgcagttaagagagatggaac

SEQ ID NO: 172996 - DNA, 30 bp, Artificial Sequence
  Synthetic oligonucleotide
gaccaaacggatcgggtattgttctggaac

SEQ ID NO: 172997 - DNA, 30 bp, Artificial Sequence
  Synthetic oligonucleotide
ccgaacatagggattgacaatgaaatgaac

SEQ ID NO: 172998 - DNA, 30 bp, Artificial Sequence
  Synthetic oligonucleotide
acgagaagaacgcctgacatgtccatgaac

SEQ ID NO: 172999 - DNA, 30 bp, Artificial Sequence
  Synthetic oligonucleotide
cgtggcctcagtggcgatttgtagatgaac

SEQ ID NO: 173000 - DNA, 30 bp, Artificial Sequence
  Synthetic oligonucleotide
ggaccgtatcttgaacacgaatgactgaac

SEQ ID NO: 173001 - DNA, 30 bp, Artificial Sequence
  Synthetic oligonucleotide
agcggcgcgtaactaacgattatactgaac

SEQ ID NO: 173002 - DNA, 30 bp, Artificial Sequence
  Synthetic oligonucleotide
aacctattaccaaaaagttagacagtgaac

SEQ ID NO: 173003 - DNA, 30 bp, Artificial Sequence
  Synthetic oligonucleotide
gggtttgccttacactctgaattagtgaac

SEQ ID NO: 173004 - DNA, 30 bp, Artificial Sequence
  Synthetic oligonucleotide
cggacctggacacctattagcaacgtgaac

SEQ ID NO: 173005 - DNA, 30 bp, Artificial Sequence
  Synthetic oligonucleotide
gagaagatcagagcagttaacggcgtgaac

SEQ ID NO: 173006 - DNA, 30 bp, Artificial Sequence
  Synthetic oligonucleotide
cgctgatgacataaggttactgtattgaac

SEQ ID NO: 173007 - DNA, 30 bp, Artificial Sequence
  Synthetic oligonucleotide
ctcactaggcgttcgcaaactgtgttgaac

SEQ ID NO: 173008 - DNA, 30 bp, Artificial Sequence
  Synthetic oligonucleotide
tcaatgcggagtgcccgccggcccaataac

SEQ ID NO: 173009 - DNA, 30 bp, Artificial Sequence
  Synthetic oligonucleotide
catgggccccgctacggtggagtcaataac

SEQ ID NO: 173010 - DNA, 30 bp, Artificial Sequence
  Synthetic oligonucleotide
cgctcagtcagtacggtaaagtggaataac

SEQ ID NO: 173011 - DNA, 30 bp, Artificial Sequence
  Synthetic oligonucleotide
ggggcattctctaaggtgcgttcacataac

SEQ ID NO: 173012 - DNA, 30 bp, Artificial Sequence
  Synthetic oligonucleotide
gaggagggatcgcgtttgcagagccataac

SEQ ID NO: 173013 - DNA, 30 bp, Artificial Sequence
  Synthetic oligonucleotide
cttgtagataatactcgttaccggcataac

SEQ ID NO: 173014 - DNA, 30 bp, Artificial Sequence
  Synthetic oligonucleotide
gcaaagaaaagaaggctgttgactcataac

SEQ ID NO: 173015 - DNA, 30 bp, Artificial Sequence
  Synthetic oligonucleotide
agagcaatataacatgtgacaacagataac

SEQ ID NO: 173016 - DNA, 30 bp, Artificial Sequence
  Synthetic oligonucleotide
aattatcaagaatagggggagagcgataac

SEQ ID NO: 173017 - DNA, 30 bp, Artificial Sequence
  Synthetic oligonucleotide
cgcatataaaacttgctatggccggataac

SEQ ID NO: 173018 - DNA, 30 bp, Artificial Sequence
  Synthetic oligonucleotide
gatttgcgaaaagttaagtcttgggataac

SEQ ID NO: 173019 - DNA, 30 bp, Artificial Sequence
  Synthetic oligonucleotide
gatgcggcgtggagaggcgcatatgataac

SEQ ID NO: 173020 - DNA, 30 bp, Artificial Sequence
  Synthetic oligonucleotide
ctatcagacaaggcatacattactgataac

SEQ ID NO: 173021 - DNA, 30 bp, Artificial Sequence
  Synthetic oligonucleotide
tgccaatctaagaccatgtggcttgataac

SEQ ID NO: 173022 - DNA, 30 bp, Artificial Sequence
  Synthetic oligonucleotide
tgctctaagtcctccacagtgaaatataac

SEQ ID NO: 173023 - DNA, 30 bp, Artificial Sequence
  Synthetic oligonucleotide
cgatatagtagttgaaaatggggatataac

SEQ ID NO: 173024 - DNA, 30 bp, Artificial Sequence
  Synthetic oligonucleotide
gtaccttttggtaaagaattgccgtataac

SEQ ID NO: 173025 - DNA, 30 bp, Artificial Sequence
  Synthetic oligonucleotide
cagaggatgttcgaccagaattggtataac

SEQ ID NO: 173026 - DNA, 30 bp, Artificial Sequence
  Synthetic oligonucleotide
actacgacttagtagcgactcttaactaac

SEQ ID NO: 173027 - DNA, 30 bp, Artificial Sequence
  Synthetic oligonucleotide
caacacatacggtgatcgctggttactaac

SEQ ID NO: 173028 - DNA, 30 bp, Artificial Sequence
  Synthetic oligonucleotide
ggcaggttctttgaagatctgatccctaac

SEQ ID NO: 173029 - DNA, 30 bp, Artificial Sequence
  Synthetic oligonucleotide
ctacaccgcccaggcaagcgtggtcctaac

SEQ ID NO: 173030 - DNA, 30 bp, Artificial Sequence
  Synthetic oligonucleotide
agcgacagggatacatgcaataaagctaac

SEQ ID NO: 173031 - DNA, 30 bp, Artificial Sequence
  Synthetic oligonucleotide
tgtcgcctgaactcactgtagtcagctaac

SEQ ID NO: 173032 - DNA, 30 bp, Artificial Sequence
  Synthetic oligonucleotide
catggaatcgctcaactactagtcgctaac

SEQ ID NO: 173033 - DNA, 30 bp, Artificial Sequence
  Synthetic oligonucleotide
acaaagtgaccgagtttatatgtggctaac

SEQ ID NO: 173034 - DNA, 30 bp, Artificial Sequence
  Synthetic oligonucleotide
atgtcaagccgagagtccactttggctaac

SEQ ID NO: 173035 - DNA, 30 bp, Artificial Sequence
  Synthetic oligonucleotide
ggcccagcctagtcattctcacttgctaac

SEQ ID NO: 173036 - DNA, 30 bp, Artificial Sequence
  Synthetic oligonucleotide
taaaggtggatgcacaggccaaggtctaac

SEQ ID NO: 173037 - DNA, 30 bp, Artificial Sequence
  Synthetic oligonucleotide
agtaaagagctaatgagagtgtacagtaac

SEQ ID NO: 173038 - DNA, 30 bp, Artificial Sequence
  Synthetic oligonucleotide
gtagactacatatctcaatagagcagtaac

SEQ ID NO: 173039 - DNA, 30 bp, Artificial Sequence
  Synthetic oligonucleotide
gccgacctaaagttaatttccgcgagtaac

SEQ ID NO: 173040 - DNA, 30 bp, Artificial Sequence
  Synthetic oligonucleotide
gatggatgtgttcccacctctgctagtaac

SEQ ID NO: 173041 - DNA, 30 bp, Artificial Sequence
  Synthetic oligonucleotide
accaccacgacgatgatagcgattagtaac

SEQ ID NO: 173042 - DNA, 30 bp, Artificial Sequence
  Synthetic oligonucleotide
atttcggactgccctatatcccaacgtaac

SEQ ID NO: 173043 - DNA, 31 bp, Artificial Sequence
  Synthetic oligonucleotide
actggtgtatgcgaggcaaaggttacgtaac

SEQ ID NO: 173044 - DNA, 30 bp, Artificial Sequence
  Synthetic oligonucleotide
ggtatctaggatcaccccccatcaggtaac

SEQ ID NO: 173045 - DNA, 30 bp, Artificial Sequence
  Synthetic oligonucleotide
gatgttataaggcacagctagggcggtaac

SEQ ID NO: 173046 - DNA, 30 bp, Artificial Sequence
  Synthetic oligonucleotide
agacatagttactagttctgtgagggtaac

SEQ ID NO: 173047 - DNA, 30 bp, Artificial Sequence
  Synthetic oligonucleotide
tgggcaacacggctggtgacttgtggtaac

SEQ ID NO: 173048 - DNA, 30 bp, Artificial Sequence
  Synthetic oligonucleotide
tgcacaggctatacgtactgaaacattaac

SEQ ID NO: 173049 - DNA, 30 bp, Artificial Sequence
  Synthetic oligonucleotide
caaccagcactaacaacgcaatacattaac

SEQ ID NO: 173050 - DNA, 30 bp, Artificial Sequence
  Synthetic oligonucleotide
attcaccaggtgggaatgaagagcattaac

SEQ ID NO: 173051 - DNA, 30 bp, Artificial Sequence
  Synthetic oligonucleotide
ggaaagccaaacaatgtacaaatcattaac

SEQ ID NO: 173052 - DNA, 30 bp, Artificial Sequence
  Synthetic oligonucleotide
atagcccgctgagaaagtgacgagcttaac

SEQ ID NO: 173053 - DNA, 30 bp, Artificial Sequence
  Synthetic oligonucleotide
ggttattcacgcctatcagacttagttaac

SEQ ID NO: 173054 - DNA, 30 bp, Artificial Sequence
  Synthetic oligonucleotide
atatgtacgagaaaaatactcaaggttaac

SEQ ID NO: 173055 - DNA, 31 bp, Artificial Sequence
  Synthetic oligonucleotide
agacgcactgcaattgtaggggaaggttaac

SEQ ID NO: 173056 - DNA, 30 bp, Artificial Sequence
  Synthetic oligonucleotide
caattgagtatgttgtcgaggttggttaac

SEQ ID NO: 173057 - DNA, 30 bp, Artificial Sequence
  Synthetic oligonucleotide
cccaccgtgagatagacaagccctgttaac

SEQ ID NO: 173058 - DNA, 30 bp, Artificial Sequence
  Synthetic oligonucleotide
taaagaagccgttcctggacaggtgttaac

SEQ ID NO: 173059 - DNA, 30 bp, Artificial Sequence
  Synthetic oligonucleotide
gcacggaatttgtagcaacaagcgtttaac

SEQ ID NO: 173060 - DNA, 30 bp, Artificial Sequence
  Synthetic oligonucleotide
cagactgcagaattgcgataagtgtttaac

SEQ ID NO: 173061 - DNA, 30 bp, Artificial Sequence
  Synthetic oligonucleotide
tgcgagaaagtgccgtagtgaaattttaac

SEQ ID NO: 173062 - DNA, 30 bp, Artificial Sequence
  Synthetic oligonucleotide
attcgacgacgtgcgacaatagaaaaacac

SEQ ID NO: 173063 - DNA, 30 bp, Artificial Sequence
  Synthetic oligonucleotide
cgcaagtaatatcaattcatgaccaaacac

SEQ ID NO: 173064 - DNA, 30 bp, Artificial Sequence
  Synthetic oligonucleotide
attttagcggcctggagaacgatcaaacac

SEQ ID NO: 173065 - DNA, 30 bp, Artificial Sequence
  Synthetic oligonucleotide
gatctcacaggtctgtccttagtgaaacac

SEQ ID NO: 173066 - DNA, 30 bp, Artificial Sequence
  Synthetic oligonucleotide
ataccaattctgagtatggaaagtaaacac

SEQ ID NO: 173067 - DNA, 30 bp, Artificial Sequence
  Synthetic oligonucleotide
caaagctgtggatgattgccggcacaacac

SEQ ID NO: 173068 - DNA, 30 bp, Artificial Sequence
  Synthetic oligonucleotide
taaacgacggccgaccatgatctacaacac

SEQ ID NO: 173069 - DNA, 30 bp, Artificial Sequence
  Synthetic oligonucleotide
gttacagatcgcggatacacagtccaacac

SEQ ID NO: 173070 - DNA, 30 bp, Artificial Sequence
  Synthetic oligonucleotide
cactagtctactcatacggcctgagaacac

SEQ ID NO: 173071 - DNA, 30 bp, Artificial Sequence
  Synthetic oligonucleotide
ctaccgcaagtaaataggacagccgaacac

SEQ ID NO: 173072 - DNA, 30 bp, Artificial Sequence
  Synthetic oligonucleotide
tgtgtaactactggtcatgtataaacacac

SEQ ID NO: 173073 - DNA, 30 bp, Artificial Sequence
  Synthetic oligonucleotide
ttggagtctatgtaatacgcacgaacacac

SEQ ID NO: 173074 - DNA, 30 bp, Artificial Sequence
  Synthetic oligonucleotide
gtttatgggcggggagacaaaataacacac

SEQ ID NO: 173075 - DNA, 30 bp, Artificial Sequence
  Synthetic oligonucleotide
ctctactcaagaacgaggccccccacacac

SEQ ID NO: 173076 - DNA, 30 bp, Artificial Sequence
  Synthetic oligonucleotide
agtacttgtcacaaggtataggtcacacac

SEQ ID NO: 173077 - DNA, 30 bp, Artificial Sequence
  Synthetic oligonucleotide
gtcacgatctgcgcccctgcgcatacacac

SEQ ID NO: 173078 - DNA, 30 bp, Artificial Sequence
  Synthetic oligonucleotide
agtatgtaactagacacgactcgtacacac

SEQ ID NO: 173079 - DNA, 30 bp, Artificial Sequence
  Synthetic oligonucleotide
gtagacgcccgtttcgcgaattaagcacac

SEQ ID NO: 173080 - DNA, 30 bp, Artificial Sequence
  Synthetic oligonucleotide
tttaaggtaaaccccgtcattacagcacac

SEQ ID NO: 173081 - DNA, 30 bp, Artificial Sequence
  Synthetic oligonucleotide
agtatcaggtaggggagaaacgtcgcacac

SEQ ID NO: 173082 - DNA, 30 bp, Artificial Sequence
  Synthetic oligonucleotide
agtataagagacgaccgtgatgaggcacac

SEQ ID NO: 173083 - DNA, 30 bp, Artificial Sequence
  Synthetic oligonucleotide
tcggaaattatattttagactgctgcacac

SEQ ID NO: 173084 - DNA, 30 bp, Artificial Sequence
  Synthetic oligonucleotide
ggcacgaacctagtcattaacagatcacac

SEQ ID NO: 173085 - DNA, 30 bp, Artificial Sequence
  Synthetic oligonucleotide
gcgtatgtgtcaaaggacttacgaagacac

SEQ ID NO: 173086 - DNA, 30 bp, Artificial Sequence
  Synthetic oligonucleotide
ccgcaccgataaaattctcatcccagacac

SEQ ID NO: 173087 - DNA, 30 bp, Artificial Sequence
  Synthetic oligonucleotide
gtagcggctaatatcatgaaggctagacac

SEQ ID NO: 173088 - DNA, 30 bp, Artificial Sequence
  Synthetic oligonucleotide
gctgaggagcaagcgtggcttgtacgacac

SEQ ID NO: 173089 - DNA, 30 bp, Artificial Sequence
  Synthetic oligonucleotide
acgcgggttgatacttgtcgccagcgacac

SEQ ID NO: 173090 - DNA, 30 bp, Artificial Sequence
  Synthetic oligonucleotide
tagtttactccaataataatctagcgacac

SEQ ID NO: 173091 - DNA, 30 bp, Artificial Sequence
  Synthetic oligonucleotide
gtacgctgcaaccagccacactacggacac

SEQ ID NO: 173092 - DNA, 30 bp, Artificial Sequence
  Synthetic oligonucleotide
aagaaataaaatttcgtgaagccgggacac

SEQ ID NO: 173093 - DNA, 30 bp, Artificial Sequence
  Synthetic oligonucleotide
acccggataacacacaccgtgcggtgacac

SEQ ID NO: 173094 - DNA, 30 bp, Artificial Sequence
  Synthetic oligonucleotide
tgttcaataaatcaagcgtcgtcaatacac

SEQ ID NO: 173095 - DNA, 30 bp, Artificial Sequence
  Synthetic oligonucleotide
gcggaaagtctgctaccgagcaccatacac

SEQ ID NO: 173096 - DNA, 30 bp, Artificial Sequence
  Synthetic oligonucleotide
atctgaaataaatcggcctgccagatacac

SEQ ID NO: 173097 - DNA, 30 bp, Artificial Sequence
  Synthetic oligonucleotide
ggctggcatgcccaacgtctagggatacac

SEQ ID NO: 173098 - DNA, 30 bp, Artificial Sequence
  Synthetic oligonucleotide
ttaagacagctcgggactcgttggatacac

SEQ ID NO: 173099 - DNA, 30 bp, Artificial Sequence
  Synthetic oligonucleotide
agggaaaaatctccagaaactaaactacac

SEQ ID NO: 173100 - DNA, 30 bp, Artificial Sequence
  Synthetic oligonucleotide
gtcatgatacatgacgtgagcgacctacac

SEQ ID NO: 173101 - DNA, 30 bp, Artificial Sequence
  Synthetic oligonucleotide
acctatgaagccaaatacacaacagtacac

SEQ ID NO: 173102 - DNA, 30 bp, Artificial Sequence
  Synthetic oligonucleotide
acgattatcaggaaccggctaaatgtacac

SEQ ID NO: 173103 - DNA, 30 bp, Artificial Sequence
  Synthetic oligonucleotide
gtgtggaataaacgcctgggagagttacac

SEQ ID NO: 173104 - DNA, 30 bp, Artificial Sequence
  Synthetic oligonucleotide
tgtccgttaatattagtggggtagttacac

SEQ ID NO: 173105 - DNA, 30 bp, Artificial Sequence
  Synthetic oligonucleotide
tcaatcgatttcacatcctatggcaaccac

SEQ ID NO: 173106 - DNA, 30 bp, Artificial Sequence
  Synthetic oligonucleotide
cagccgctatttatatatccatcgaaccac

SEQ ID NO: 173107 - DNA, 30 bp, Artificial Sequence
  Synthetic oligonucleotide
cataatagacggtcgcgaagttaacaccac

SEQ ID NO: 173108 - DNA, 30 bp, Artificial Sequence
  Synthetic oligonucleotide
cgcacacggttagcgccaagtacacaccac

SEQ ID NO: 173109 - DNA, 30 bp, Artificial Sequence
  Synthetic oligonucleotide
atagatcaagtgtcgagcttccgtcaccac

SEQ ID NO: 173110 - DNA, 30 bp, Artificial Sequence
  Synthetic oligonucleotide
gtataagccatttctcttggaattcaccac

SEQ ID NO: 173111 - DNA, 30 bp, Artificial Sequence
  Synthetic oligonucleotide
actatctactaggagagtctgccagaccac

SEQ ID NO: 173112 - DNA, 30 bp, Artificial Sequence
  Synthetic oligonucleotide
caacgccagggccaggcactaagcgaccac

SEQ ID NO: 173113 - DNA, 30 bp, Artificial Sequence
  Synthetic oligonucleotide
ttaagcaacgggaacgtgcggaaggaccac

SEQ ID NO: 173114 - DNA, 30 bp, Artificial Sequence
  Synthetic oligonucleotide
ggacgcttgtacacgttcactacggaccac

SEQ ID NO: 173115 - DNA, 30 bp, Artificial Sequence
  Synthetic oligonucleotide
gctgcggaaaggacggggtcagatgaccac

SEQ ID NO: 173116 - DNA, 30 bp, Artificial Sequence
  Synthetic oligonucleotide
agccaaacaacgcttggtcaggctgaccac

SEQ ID NO: 173117 - DNA, 30 bp, Artificial Sequence
  Synthetic oligonucleotide
ggtattgggacaagaggtggtccataccac

SEQ ID NO: 173118 - DNA, 30 bp, Artificial Sequence
  Synthetic oligonucleotide
caagcatgatcaaaagctagaggataccac

SEQ ID NO: 173119 - DNA, 30 bp, Artificial Sequence
  Synthetic oligonucleotide
tcagataagttcggggagttacggtaccac

SEQ ID NO: 173120 - DNA, 30 bp, Artificial Sequence
  Synthetic oligonucleotide
ttatggagataaactaaatcttagacccac

SEQ ID NO: 173121 - DNA, 30 bp, Artificial Sequence
  Synthetic oligonucleotide
gtaaagcactacctgcgtgataatccccac

SEQ ID NO: 173122 - DNA, 30 bp, Artificial Sequence
  Synthetic oligonucleotide
aagagcagacggcttatgaatcggtcccac

SEQ ID NO: 173123 - DNA, 30 bp, Artificial Sequence
  Synthetic oligonucleotide
cgccgagcggtgcccttgaggagcagccac

SEQ ID NO: 173124 - DNA, 30 bp, Artificial Sequence
  Synthetic oligonucleotide
ttgttacgcgtcgaacgttcactcagccac

SEQ ID NO: 173125 - DNA, 30 bp, Artificial Sequence
  Synthetic oligonucleotide
cagtgctcggcagtcgttcaaatgagccac

SEQ ID NO: 173126 - DNA, 30 bp, Artificial Sequence
  Synthetic oligonucleotide
gatggtagacggtctgatgttaaacgccac

SEQ ID NO: 173127 - DNA, 30 bp, Artificial Sequence
  Synthetic oligonucleotide
cccggatacaacggtgcatgcatccgccac

SEQ ID NO: 173128 - DNA, 30 bp, Artificial Sequence
  Synthetic oligonucleotide
gctttctctgaaatcatataagcgcgccac

SEQ ID NO: 173129 - DNA, 30 bp, Artificial Sequence
  Synthetic oligonucleotide
acctcacctctgtccgaggatatgggccac

SEQ ID NO: 173130 - DNA, 30 bp, Artificial Sequence
  Synthetic oligonucleotide
acgactttaagcaaactaggtccatgccac

SEQ ID NO: 173131 - DNA, 30 bp, Artificial Sequence
  Synthetic oligonucleotide
aaggtcccatgtgggcaatttcgatgccac

SEQ ID NO: 173132 - DNA, 30 bp, Artificial Sequence
  Synthetic oligonucleotide
gtgtgtagtcgacatggctcatcctgccac

SEQ ID NO: 173133 - DNA, 30 bp, Artificial Sequence
  Synthetic oligonucleotide
taactaggattcatcttcagactttgccac

SEQ ID NO: 173134 - DNA, 30 bp, Artificial Sequence
  Synthetic oligonucleotide
ttctagcagaagggtaaagaaacactccac

SEQ ID NO: 173135 - DNA, 30 bp, Artificial Sequence
  Synthetic oligonucleotide
gcattcgccccggaatcaatgagcctccac

SEQ ID NO: 173136 - DNA, 30 bp, Artificial Sequence
  Synthetic oligonucleotide
tagtctcgaaggagcacgagtaggctccac

SEQ ID NO: 173137 - DNA, 30 bp, Artificial Sequence
  Synthetic oligonucleotide
ttcaatggcgatcaacccgccaatctccac

SEQ ID NO: 173138 - DNA, 30 bp, Artificial Sequence
  Synthetic oligonucleotide
gcaagtttcaacaccaatggatgtctccac

SEQ ID NO: 173139 - DNA, 30 bp, Artificial Sequence
  Synthetic oligonucleotide
aggtgagagtctgtgtagcagacagtccac

SEQ ID NO: 173140 - DNA, 30 bp, Artificial Sequence
  Synthetic oligonucleotide
ctattgcggggaggtcttacagacgtccac

SEQ ID NO: 173141 - DNA, 30 bp, Artificial Sequence
  Synthetic oligonucleotide
cctcacactattgccgactttccattccac

SEQ ID NO: 173142 - DNA, 30 bp, Artificial Sequence
  Synthetic oligonucleotide
gcgggcatccaaatacagcggctattccac

SEQ ID NO: 173143 - DNA, 30 bp, Artificial Sequence
  Synthetic oligonucleotide
gtaacctaacctcccactgtgcatttccac

SEQ ID NO: 173144 - DNA, 30 bp, Artificial Sequence
  Synthetic oligonucleotide
cagtcaagttaatctgaggcaacaaagcac

SEQ ID NO: 173145 - DNA, 30 bp, Artificial Sequence
  Synthetic oligonucleotide
cccctactgagcaccaacaattacaagcac

SEQ ID NO: 173146 - DNA, 30 bp, Artificial Sequence
  Synthetic oligonucleotide
gttgcacggatatgtcgtactgctaagcac

SEQ ID NO: 173147 - DNA, 30 bp, Artificial Sequence
  Synthetic oligonucleotide
gctcgtcaacgttttgttctgcgtaagcac

SEQ ID NO: 173148 - DNA, 30 bp, Artificial Sequence
  Synthetic oligonucleotide
gctacgtgtatacacgactagaaacagcac

SEQ ID NO: 173149 - DNA, 30 bp, Artificial Sequence
  Synthetic oligonucleotide
gagcgcgccccccccgattggtaacagcac

SEQ ID NO: 173150 - DNA, 30 bp, Artificial Sequence
  Synthetic oligonucleotide
cgtaaaacaccagcttgttttccccagcac

SEQ ID NO: 173151 - DNA, 30 bp, Artificial Sequence
  Synthetic oligonucleotide
ccgggaaacttaatccgactcgcccagcac

SEQ ID NO: 173152 - DNA, 30 bp, Artificial Sequence
  Synthetic oligonucleotide
ttgacattgagtggagaaaccggccagcac

SEQ ID NO: 173153 - DNA, 30 bp, Artificial Sequence
  Synthetic oligonucleotide
ggcgggtgattgataccgaagtacgagcac

SEQ ID NO: 173154 - DNA, 30 bp, Artificial Sequence
  Synthetic oligonucleotide
cagcggaaatatctgtaggctccatagcac

SEQ ID NO: 173155 - DNA, 30 bp, Artificial Sequence
  Synthetic oligonucleotide
tgtacattgactaaattacccagctagcac

SEQ ID NO: 173156 - DNA, 30 bp, Artificial Sequence
  Synthetic oligonucleotide
ctcccatcgtttcaccagtcaatctagcac

SEQ ID NO: 173157 - DNA, 30 bp, Artificial Sequence
  Synthetic oligonucleotide
gccgctgtagtaaaagcgtcggagtagcac

SEQ ID NO: 173158 - DNA, 30 bp, Artificial Sequence
  Synthetic oligonucleotide
gttgttagattcgacctacatagttagcac

SEQ ID NO: 173159 - DNA, 30 bp, Artificial Sequence
  Synthetic oligonucleotide
cgcacgacaaacagggtatggttttagcac

SEQ ID NO: 173160 - DNA, 30 bp, Artificial Sequence
  Synthetic oligonucleotide
acggttcctcgagtatgcaggtcaacgcac

SEQ ID NO: 173161 - DNA, 30 bp, Artificial Sequence
  Synthetic oligonucleotide
tcagtgctagttgaaagcagacttacgcac

SEQ ID NO: 173162 - DNA, 30 bp, Artificial Sequence
  Synthetic oligonucleotide
taacggagaccggtctcttgcgagtcgcac

SEQ ID NO: 173163 - DNA, 30 bp, Artificial Sequence
  Synthetic oligonucleotide
ggctcagggcgcgaagtttagtggtcgcac

SEQ ID NO: 173164 - DNA, 30 bp, Artificial Sequence
  Synthetic oligonucleotide
acccaaaggggaaggcttgatctgtcgcac

SEQ ID NO: 173165 - DNA, 30 bp, Artificial Sequence
  Synthetic oligonucleotide
cctcagtggcaggccgggatagattcgcac

SEQ ID NO: 173166 - DNA, 30 bp, Artificial Sequence
  Synthetic oligonucleotide
gcaaacctatggttagcgtaagcaaggcac

SEQ ID NO: 173167 - DNA, 30 bp, Artificial Sequence
  Synthetic oligonucleotide
cgtgaagcacctgccgaaagcaggaggcac

SEQ ID NO: 173168 - DNA, 30 bp, Artificial Sequence
  Synthetic oligonucleotide
agtagcattaagcccaagaaacgacggcac

SEQ ID NO: 173169 - DNA, 30 bp, Artificial Sequence
  Synthetic oligonucleotide
cgggcgggtatcttaactaggagtcggcac

SEQ ID NO: 173170 - DNA, 30 bp, Artificial Sequence
  Synthetic oligonucleotide
atgaccggccctaaagtcggggcagggcac

SEQ ID NO: 173171 - DNA, 30 bp, Artificial Sequence
  Synthetic oligonucleotide
cctaatgctaggaaggactccgccgggcac

SEQ ID NO: 173172 - DNA, 30 bp, Artificial Sequence
  Synthetic oligonucleotide
gagaccaaaagagtgcatagctccgggcac

SEQ ID NO: 173173 - DNA, 30 bp, Artificial Sequence
  Synthetic oligonucleotide
tttaggagcaaatattccagaagcgggcac

SEQ ID NO: 173174 - DNA, 30 bp, Artificial Sequence
  Synthetic oligonucleotide
tcgactgaacgagtgttacggacggggcac

SEQ ID NO: 173175 - DNA, 30 bp, Artificial Sequence
  Synthetic oligonucleotide
tcgtgtgaaccggacaacagtgttgggcac

SEQ ID NO: 173176 - DNA, 30 bp, Artificial Sequence
  Synthetic oligonucleotide
aaatgacagggctgctggcgagtctggcac

SEQ ID NO: 173177 - DNA, 30 bp, Artificial Sequence
  Synthetic oligonucleotide
caaagaagcggcgaggtttccgtctggcac

SEQ ID NO: 173178 - DNA, 30 bp, Artificial Sequence
  Synthetic oligonucleotide
tttctatgtcaccatcaaactccaatgcac

SEQ ID NO: 173179 - DNA, 30 bp, Artificial Sequence
  Synthetic oligonucleotide
atgacattatacgaaatgtagcggatgcac

SEQ ID NO: 173180 - DNA, 30 bp, Artificial Sequence
  Synthetic oligonucleotide
cgctgacaaaagaatctattcatgatgcac

SEQ ID NO: 173181 - DNA, 30 bp, Artificial Sequence
  Synthetic oligonucleotide
gatacgtgtggtcgctctcttctgatgcac

SEQ ID NO: 173182 - DNA, 30 bp, Artificial Sequence
  Synthetic oligonucleotide
gggctccggtgagtttctcacgtgatgcac

SEQ ID NO: 173183 - DNA, 30 bp, Artificial Sequence
  Synthetic oligonucleotide
tgggcaaagctcagatagtgattgatgcac

SEQ ID NO: 173184 - DNA, 30 bp, Artificial Sequence
  Synthetic oligonucleotide
gccagtacgaaagttgtaaatatactgcac

SEQ ID NO: 173185 - DNA, 30 bp, Artificial Sequence
  Synthetic oligonucleotide
ttaggggaaagggacggcaagtccctgcac

SEQ ID NO: 173186 - DNA, 30 bp, Artificial Sequence
  Synthetic oligonucleotide
tcatatcagctgtagtggtggcgagtgcac

SEQ ID NO: 173187 - DNA, 30 bp, Artificial Sequence
  Synthetic oligonucleotide
tgcattagtatacggtaaatggtattgcac

SEQ ID NO: 173188 - DNA, 30 bp, Artificial Sequence
  Synthetic oligonucleotide
gtagcgtgaattccggtatactgcttgcac

SEQ ID NO: 173189 - DNA, 30 bp, Artificial Sequence
  Synthetic oligonucleotide
gttaagtagaaggaacattatgctttgcac

SEQ ID NO: 173190 - DNA, 30 bp, Artificial Sequence
  Synthetic oligonucleotide
tggaaggctctccgttgcggcataaatcac

SEQ ID NO: 173191 - DNA, 30 bp, Artificial Sequence
  Synthetic oligonucleotide
ccgaaggggaccagtatacactgcaatcac

SEQ ID NO: 173192 - DNA, 30 bp, Artificial Sequence
  Synthetic oligonucleotide
cggaaacagatatagctcttcgagcatcac

SEQ ID NO: 173193 - DNA, 30 bp, Artificial Sequence
  Synthetic oligonucleotide
ggcacatgtcgcttaaacgaagcgcatcac

SEQ ID NO: 173194 - DNA, 30 bp, Artificial Sequence
  Synthetic oligonucleotide
ccgtaacgcaaaataagcactggagatcac

SEQ ID NO: 173195 - DNA, 30 bp, Artificial Sequence
  Synthetic oligonucleotide
tccggacctatcgcaggtctatccgatcac

SEQ ID NO: 173196 - DNA, 30 bp, Artificial Sequence
  Synthetic oligonucleotide
atcactggctgctcgttttcgaaatatcac

SEQ ID NO: 173197 - DNA, 30 bp, Artificial Sequence
  Synthetic oligonucleotide
ttggtagagatggcaacaatccgatatcac

SEQ ID NO: 173198 - DNA, 30 bp, Artificial Sequence
  Synthetic oligonucleotide
aaaactatgacagaaacggtttagtatcac

SEQ ID NO: 173199 - DNA, 30 bp, Artificial Sequence
  Synthetic oligonucleotide
cagaggatgcttttgagggagtggtatcac

SEQ ID NO: 173200 - DNA, 30 bp, Artificial Sequence
  Synthetic oligonucleotide
aatgggtagaactctagcgtcaattatcac

SEQ ID NO: 173201 - DNA, 30 bp, Artificial Sequence
  Synthetic oligonucleotide
gtaggaccgtatgagctatgttgttatcac

SEQ ID NO: 173202 - DNA, 30 bp, Artificial Sequence
  Synthetic oligonucleotide
aggggtggggtagtaccctgaaagactcac

SEQ ID NO: 173203 - DNA, 30 bp, Artificial Sequence
  Synthetic oligonucleotide
atcgcgaacagaagatggacgggagctcac

SEQ ID NO: 173204 - DNA, 30 bp, Artificial Sequence
  Synthetic oligonucleotide
gtagggtctaaaaaattgtatagtgctcac

SEQ ID NO: 173205 - DNA, 30 bp, Artificial Sequence
  Synthetic oligonucleotide
tgcgggtcgtgtgtcgctctcggatctcac

SEQ ID NO: 173206 - DNA, 29 bp, Artificial Sequence
  Synthetic oligonucleotide
catcagcaatactaacatacgtatctcac

SEQ ID NO: 173207 - DNA, 30 bp, Artificial Sequence
  Synthetic oligonucleotide
ttcaggggccggtgcgtttatcgctctcac

SEQ ID NO: 173208 - DNA, 30 bp, Artificial Sequence
  Synthetic oligonucleotide
gcagggttccatgaaaagagggggtctcac

SEQ ID NO: 173209 - DNA, 30 bp, Artificial Sequence
  Synthetic oligonucleotide
agtcatcattagggttaaactatttctcac

SEQ ID NO: 173210 - DNA, 30 bp, Artificial Sequence
  Synthetic oligonucleotide
catggcaaacgatcaaagagagtttctcac

SEQ ID NO: 173211 - DNA, 30 bp, Artificial Sequence
  Synthetic oligonucleotide
catgcctaccaacagaatgacgcaagtcac

SEQ ID NO: 173212 - DNA, 30 bp, Artificial Sequence
  Synthetic oligonucleotide
ctagtcgagttcgatacttaatgaagtcac

SEQ ID NO: 173213 - DNA, 30 bp, Artificial Sequence
  Synthetic oligonucleotide
gctccagagtatgtgggtaatgtaagtcac

SEQ ID NO: 173214 - DNA, 30 bp, Artificial Sequence
  Synthetic oligonucleotide
aagataaatagattttaataggacagtcac

SEQ ID NO: 173215 - DNA, 30 bp, Artificial Sequence
  Synthetic oligonucleotide
atcatgcattagaagagcagtaagagtcac

SEQ ID NO: 173216 - DNA, 30 bp, Artificial Sequence
  Synthetic oligonucleotide
cgtacattgttttcttacgtgtggagtcac

SEQ ID NO: 173217 - DNA, 30 bp, Artificial Sequence
  Synthetic oligonucleotide
tgccagagagttaaagagtataaccgtcac

SEQ ID NO: 173218 - DNA, 30 bp, Artificial Sequence
  Synthetic oligonucleotide
tatgagagcattacacgaagcatccgtcac

SEQ ID NO: 173219 - DNA, 30 bp, Artificial Sequence
  Synthetic oligonucleotide
gacgaatcagaaggttcaatgacgcgtcac

SEQ ID NO: 173220 - DNA, 30 bp, Artificial Sequence
  Synthetic oligonucleotide
ccaacgaacggtactgcagtgcatcgtcac

SEQ ID NO: 173221 - DNA, 30 bp, Artificial Sequence
  Synthetic oligonucleotide
actcagtgcctgagggggacttacggtcac

SEQ ID NO: 173222 - DNA, 30 bp, Artificial Sequence
  Synthetic oligonucleotide
aacgttgtctcggataagaatatgggtcac

SEQ ID NO: 173223 - DNA, 30 bp, Artificial Sequence
  Synthetic oligonucleotide
gtgacaaagaaccagctgagccttggtcac

SEQ ID NO: 173224 - DNA, 29 bp, Artificial Sequence
  Synthetic oligonucleotide
tggtcctcataagccaagtgggcattcac

SEQ ID NO: 173225 - DNA, 30 bp, Artificial Sequence
  Synthetic oligonucleotide
accaaccgggggcatctgctagcgattcac

SEQ ID NO: 173226 - DNA, 30 bp, Artificial Sequence
  Synthetic oligonucleotide
gggaagtaccgtaaagagaacgatattcac

SEQ ID NO: 173227 - DNA, 30 bp, Artificial Sequence
  Synthetic oligonucleotide
cctagggatagtacgtggtacatacttcac

SEQ ID NO: 173228 - DNA, 30 bp, Artificial Sequence
  Synthetic oligonucleotide
gcaggcgagagcaactgaagattacttcac

SEQ ID NO: 173229 - DNA, 30 bp, Artificial Sequence
  Synthetic oligonucleotide
ggcctcctgagatctaacataatccttcac

SEQ ID NO: 173230 - DNA, 30 bp, Artificial Sequence
  Synthetic oligonucleotide
tgagacccctatttagaattgggagttcac

SEQ ID NO: 173231 - DNA, 30 bp, Artificial Sequence
  Synthetic oligonucleotide
gcagctaaatggtgcttgccgacggttcac

SEQ ID NO: 173232 - DNA, 30 bp, Artificial Sequence
  Synthetic oligonucleotide
aagacgccgatgggcgacgccagctttcac

SEQ ID NO: 173233 - DNA, 35 bp, Artificial Sequence
  Synthetic oligonucleotide
gaatactagaccaccacgtgtccatcagaaaagac

SEQ ID NO: 173234 - DNA, 30 bp, Artificial Sequence
  Synthetic oligonucleotide
tcagacaccgcaacacactggctaaaagac

SEQ ID NO: 173235 - DNA, 30 bp, Artificial Sequence
  Synthetic oligonucleotide
gattactgaacaaagaacatgtccaaagac

SEQ ID NO: 173236 - DNA, 30 bp, Artificial Sequence
  Synthetic oligonucleotide
acgaagagacgtggcgtactagctaaagac

SEQ ID NO: 173237 - DNA, 30 bp, Artificial Sequence
  Synthetic oligonucleotide
gcaccgtagcgagtcacatgtcgccaagac

SEQ ID NO: 173238 - DNA, 30 bp, Artificial Sequence
  Synthetic oligonucleotide
caccggacatggaaatgctagttccaagac

SEQ ID NO: 173239 - DNA, 30 bp, Artificial Sequence
  Synthetic oligonucleotide
gaagagatagctcgtctaagtactcaagac

SEQ ID NO: 173240 - DNA, 30 bp, Artificial Sequence
  Synthetic oligonucleotide
tacgagaactcccgccatcgctgtcaagac

SEQ ID NO: 173241 - DNA, 30 bp, Artificial Sequence
  Synthetic oligonucleotide
ccaggaggatgaacgaaaccggtagaagac

SEQ ID NO: 173242 - DNA, 30 bp, Artificial Sequence
  Synthetic oligonucleotide
ttgatggaatgaaagttccctagcgaagac

SEQ ID NO: 173243 - DNA, 30 bp, Artificial Sequence
  Synthetic oligonucleotide
gggtcatcgttgtatattacttgtgaagac

SEQ ID NO: 173244 - DNA, 30 bp, Artificial Sequence
  Synthetic oligonucleotide
cagtaaaaatatattgcacaagggtaagac

SEQ ID NO: 173245 - DNA, 30 bp, Artificial Sequence
  Synthetic oligonucleotide
ttagtaggccttcgcgtgctcgtgtaagac

SEQ ID NO: 173246 - DNA, 30 bp, Artificial Sequence
  Synthetic oligonucleotide
gcaggatacaaaggcagagagttgtaagac

SEQ ID NO: 173247 - DNA, 30 bp, Artificial Sequence
  Synthetic oligonucleotide
tgcttgtcatggcggtagaacaggccagac

SEQ ID NO: 173248 - DNA, 30 bp, Artificial Sequence
  Synthetic oligonucleotide
taggcgttctcatccccacgctctccagac

SEQ ID NO: 173249 - DNA, 30 bp, Artificial Sequence
  Synthetic oligonucleotide
cctgggaaacgtgttatctcgtctccagac

SEQ ID NO: 173250 - DNA, 30 bp, Artificial Sequence
  Synthetic oligonucleotide
agcccgacaacactatgactctcagcagac

SEQ ID NO: 173251 - DNA, 30 bp, Artificial Sequence
  Synthetic oligonucleotide
gacggccactacgtagactatctagcagac

SEQ ID NO: 173252 - DNA, 30 bp, Artificial Sequence
  Synthetic oligonucleotide
tatggccgtgagcgggaggagcgatcagac

SEQ ID NO: 173253 - DNA, 30 bp, Artificial Sequence
  Synthetic oligonucleotide
gcgataagtatcgagggcgacctttcagac

SEQ ID NO: 173254 - DNA, 30 bp, Artificial Sequence
  Synthetic oligonucleotide
tggtcaaatggggttaaatacagcagagac

SEQ ID NO: 173255 - DNA, 30 bp, Artificial Sequence
  Synthetic oligonucleotide
ctagtttggcaggtgacaattcgcagagac

SEQ ID NO: 173256 - DNA, 30 bp, Artificial Sequence
  Synthetic oligonucleotide
tctgaagactaaatctgagttcagagagac

SEQ ID NO: 173257 - DNA, 30 bp, Artificial Sequence
  Synthetic oligonucleotide
cggggggtataacggacagtagcgagagac

SEQ ID NO: 173258 - DNA, 30 bp, Artificial Sequence
  Synthetic oligonucleotide
agcccatgatcttcggcgttgaaacgagac

SEQ ID NO: 173259 - DNA, 30 bp, Artificial Sequence
  Synthetic oligonucleotide
tttccgctagtaggtcgggtaatgcgagac

SEQ ID NO: 173260 - DNA, 30 bp, Artificial Sequence
  Synthetic oligonucleotide
cccattatccgtaagaaacaaggaggagac

SEQ ID NO: 173261 - DNA, 30 bp, Artificial Sequence
  Synthetic oligonucleotide
aactccggaatatcctacatcgctggagac

SEQ ID NO: 173262 - DNA, 30 bp, Artificial Sequence
  Synthetic oligonucleotide
tgagcgcagtataccgtgtgaggtggagac

SEQ ID NO: 173263 - DNA, 30 bp, Artificial Sequence
  Synthetic oligonucleotide
agcggtcaccacaagaggcttgtatgagac

SEQ ID NO: 173264 - DNA, 30 bp, Artificial Sequence
  Synthetic oligonucleotide
agctgtaaacccgggcgtcgcgattgagac

SEQ ID NO: 173265 - DNA, 30 bp, Artificial Sequence
  Synthetic oligonucleotide
tgacgagcaagaatgtgtaagagaatagac

SEQ ID NO: 173266 - DNA, 30 bp, Artificial Sequence
  Synthetic oligonucleotide
gtggttgcgggtttcgatgtgtgaatagac

SEQ ID NO: 173267 - DNA, 30 bp, Artificial Sequence
  Synthetic oligonucleotide
gcgggtaaatgggaagacgcgcccatagac

SEQ ID NO: 173268 - DNA, 30 bp, Artificial Sequence
  Synthetic oligonucleotide
atcaccgattcatgagtagtgtgcatagac

SEQ ID NO: 173269 - DNA, 30 bp, Artificial Sequence
  Synthetic oligonucleotide
aggagattaagtgaccagcaaactatagac

SEQ ID NO: 173270 - DNA, 30 bp, Artificial Sequence
  Synthetic oligonucleotide
gcaattgttaaggcgggccagacactagac

SEQ ID NO: 173271 - DNA, 30 bp, Artificial Sequence
  Synthetic oligonucleotide
caggcatatatttaagaaattaacctagac

SEQ ID NO: 173272 - DNA, 30 bp, Artificial Sequence
  Synthetic oligonucleotide
ccatccaatctggctgtgacatctctagac

SEQ ID NO: 173273 - DNA, 30 bp, Artificial Sequence
  Synthetic oligonucleotide
ggagataacagccatatcctatttctagac

SEQ ID NO: 173274 - DNA, 30 bp, Artificial Sequence
  Synthetic oligonucleotide
gatggcgcacgatccgccgtgtaagtagac

SEQ ID NO: 173275 - DNA, 30 bp, Artificial Sequence
  Synthetic oligonucleotide
atagtgctggacatatcttaatgagtagac

SEQ ID NO: 173276 - DNA, 30 bp, Artificial Sequence
  Synthetic oligonucleotide
acatcgacaacgatggattattccgtagac

SEQ ID NO: 173277 - DNA, 30 bp, Artificial Sequence
  Synthetic oligonucleotide
cccagttcggacaaagttatcgtggtagac

SEQ ID NO: 173278 - DNA, 30 bp, Artificial Sequence
  Synthetic oligonucleotide
agtccaccaacggttctcaatcgcttagac

SEQ ID NO: 173279 - DNA, 30 bp, Artificial Sequence
  Synthetic oligonucleotide
gctaggatctggcaactcaagacgttagac

SEQ ID NO: 173280 - DNA, 30 bp, Artificial Sequence
  Synthetic oligonucleotide
aagaaaggtagccggaactaccgaaacgac

SEQ ID NO: 173281 - DNA, 30 bp, Artificial Sequence
  Synthetic oligonucleotide
taatgtaggccgaggttgcggcacaacgac

SEQ ID NO: 173282 - DNA, 30 bp, Artificial Sequence
  Synthetic oligonucleotide
cagagtctgctggggatagcgtacaacgac

SEQ ID NO: 173283 - DNA, 30 bp, Artificial Sequence
  Synthetic oligonucleotide
aatagatagtgaatgcatcaacagaacgac

SEQ ID NO: 173284 - DNA, 30 bp, Artificial Sequence
  Synthetic oligonucleotide
cggcgacgtattcaaataagatgtaacgac

SEQ ID NO: 173285 - DNA, 30 bp, Artificial Sequence
  Synthetic oligonucleotide
tggcaggtccaaaacttagccatacacgac

SEQ ID NO: 173286 - DNA, 30 bp, Artificial Sequence
  Synthetic oligonucleotide
acaagaggtgacaacccacttaaccacgac

SEQ ID NO: 173287 - DNA, 30 bp, Artificial Sequence
  Synthetic oligonucleotide
ctcggataatacgagggcactctgcacgac

SEQ ID NO: 173288 - DNA, 30 bp, Artificial Sequence
  Synthetic oligonucleotide
gcaagggcggtcccttgagtaagtcacgac

SEQ ID NO: 173289 - DNA, 30 bp, Artificial Sequence
  Synthetic oligonucleotide
gtcttcaaacttgctacatacggtgacgac

SEQ ID NO: 173290 - DNA, 30 bp, Artificial Sequence
  Synthetic oligonucleotide
acacacacgatgtcttgctgctattacgac

SEQ ID NO: 173291 - DNA, 30 bp, Artificial Sequence
  Synthetic oligonucleotide
aaggggactcagagagacatatgttacgac

SEQ ID NO: 173292 - DNA, 30 bp, Artificial Sequence
  Synthetic oligonucleotide
atatccgagtaaaggtcttcatcaaccgac

SEQ ID NO: 173293 - DNA, 30 bp, Artificial Sequence
  Synthetic oligonucleotide
gggctttggcgggcaattccaaataccgac

SEQ ID NO: 173294 - DNA, 30 bp, Artificial Sequence
  Synthetic oligonucleotide
tcaagagacctcgtagtggcttttaccgac

SEQ ID NO: 173295 - DNA, 30 bp, Artificial Sequence
  Synthetic oligonucleotide
agatgcgatttttgcacatggttgcccgac

SEQ ID NO: 173296 - DNA, 30 bp, Artificial Sequence
  Synthetic oligonucleotide
caacggcccagcaaaagagggggggccgac

SEQ ID NO: 173297 - DNA, 30 bp, Artificial Sequence
  Synthetic oligonucleotide
acagtcagtgcgttcggcgcctcatccgac

SEQ ID NO: 173298 - DNA, 30 bp, Artificial Sequence
  Synthetic oligonucleotide
acggaacggttaggtcggtgcggatccgac

SEQ ID NO: 173299 - DNA, 30 bp, Artificial Sequence
  Synthetic oligonucleotide
cagaatgcatcatatttcttcttctccgac

SEQ ID NO: 173300 - DNA, 30 bp, Artificial Sequence
  Synthetic oligonucleotide
ggtcaattttgctgagttttcacgtccgac

SEQ ID NO: 173301 - DNA, 30 bp, Artificial Sequence
  Synthetic oligonucleotide
acaccacataattatgcacgagcgtccgac

SEQ ID NO: 173302 - DNA, 30 bp, Artificial Sequence
  Synthetic oligonucleotide
gatgttcaggttgctgggtcgtggtccgac

SEQ ID NO: 173303 - DNA, 30 bp, Artificial Sequence
  Synthetic oligonucleotide
ggtactaaatagcgcacgataatgtccgac

SEQ ID NO: 173304 - DNA, 30 bp, Artificial Sequence
  Synthetic oligonucleotide
gatcagaagagagcggacggagacagcgac

SEQ ID NO: 173305 - DNA, 30 bp, Artificial Sequence
  Synthetic oligonucleotide
gggataaaagaagtttgcgggacgagcgac

SEQ ID NO: 173306 - DNA, 30 bp, Artificial Sequence
  Synthetic oligonucleotide
ttcataccaagccaaccaaaggtccgcgac

SEQ ID NO: 173307 - DNA, 30 bp, Artificial Sequence
  Synthetic oligonucleotide
atcgcataaatctgcgcttgctcaggcgac

SEQ ID NO: 173308 - DNA, 30 bp, Artificial Sequence
  Synthetic oligonucleotide
cataccgtcagtcccgtgaaggcgggcgac

SEQ ID NO: 173309 - DNA, 30 bp, Artificial Sequence
  Synthetic oligonucleotide
ggagctagattgcaaattagcatgggcgac

SEQ ID NO: 173310 - DNA, 30 bp, Artificial Sequence
  Synthetic oligonucleotide
gcctgagagactgggggacaaaaatgcgac

SEQ ID NO: 173311 - DNA, 30 bp, Artificial Sequence
  Synthetic oligonucleotide
agccaataggacgatcactgatcatgcgac

SEQ ID NO: 173312 - DNA, 30 bp, Artificial Sequence
  Synthetic oligonucleotide
gcatggtgtacttaaacgctaagctgcgac

SEQ ID NO: 173313 - DNA, 30 bp, Artificial Sequence
  Synthetic oligonucleotide
gtacttgtggaccggcttagcatgtgcgac

SEQ ID NO: 173314 - DNA, 30 bp, Artificial Sequence
  Synthetic oligonucleotide
ccgattagggtcatagtatgcgtgtgcgac

SEQ ID NO: 173315 - DNA, 30 bp, Artificial Sequence
  Synthetic oligonucleotide
aactaggataacgcatcgccagattgcgac

SEQ ID NO: 173316 - DNA, 30 bp, Artificial Sequence
  Synthetic oligonucleotide
atagcgaagacaccaacggtggcaatcgac

SEQ ID NO: 173317 - DNA, 30 bp, Artificial Sequence
  Synthetic oligonucleotide
ctatagcgtcaacgggcccggtacctcgac

SEQ ID NO: 173318 - DNA, 30 bp, Artificial Sequence
  Synthetic oligonucleotide
tttgttggtacggcctaagaccgcctcgac

SEQ ID NO: 173319 - DNA, 30 bp, Artificial Sequence
  Synthetic oligonucleotide
aaattaggatgtcttcatagcactctcgac

SEQ ID NO: 173320 - DNA, 30 bp, Artificial Sequence
  Synthetic oligonucleotide
aaagttcggtcgtaataagcattagtcgac

SEQ ID NO: 173321 - DNA, 30 bp, Artificial Sequence
  Synthetic oligonucleotide
ttaacgcgttttcgaaaaccgtacgtcgac

SEQ ID NO: 173322 - DNA, 30 bp, Artificial Sequence
  Synthetic oligonucleotide
tcgtgctcagaggactccaaatgcgtcgac

SEQ ID NO: 173323 - DNA, 30 bp, Artificial Sequence
  Synthetic oligonucleotide
gtataggttgttaatgtgcgaatcgtcgac

SEQ ID NO: 173324 - DNA, 30 bp, Artificial Sequence
  Synthetic oligonucleotide
cacgacggctcgtagggactggaggtcgac

SEQ ID NO: 173325 - DNA, 30 bp, Artificial Sequence
  Synthetic oligonucleotide
catagtgacgtgcaagatttttgggtcgac

SEQ ID NO: 173326 - DNA, 30 bp, Artificial Sequence
  Synthetic oligonucleotide
caaacggagaacttctggagatgtgtcgac

SEQ ID NO: 173327 - DNA, 30 bp, Artificial Sequence
  Synthetic oligonucleotide
ggaacatggtaagtgacaggcttgttcgac

SEQ ID NO: 173328 - DNA, 30 bp, Artificial Sequence
  Synthetic oligonucleotide
cctggtgaagctatccattgggcaaaggac

SEQ ID NO: 173329 - DNA, 30 bp, Artificial Sequence
  Synthetic oligonucleotide
tgatgacctttatagggaggcggaaaggac

SEQ ID NO: 173330 - DNA, 30 bp, Artificial Sequence
  Synthetic oligonucleotide
taaggcctgcgagtaaccaaatgaaaggac

SEQ ID NO: 173331 - DNA, 30 bp, Artificial Sequence
  Synthetic oligonucleotide
aaaacaggttcaaattcacccccgaaggac

SEQ ID NO: 173332 - DNA, 30 bp, Artificial Sequence
  Synthetic oligonucleotide
gggagtgataggagcattgtggggaaggac

SEQ ID NO: 173333 - DNA, 30 bp, Artificial Sequence
  Synthetic oligonucleotide
ggtacccctggaacaaaagcttgccaggac

SEQ ID NO: 173334 - DNA, 30 bp, Artificial Sequence
  Synthetic oligonucleotide
atgaatgtcgtcgtggacatcaagcaggac

SEQ ID NO: 173335 - DNA, 30 bp, Artificial Sequence
  Synthetic oligonucleotide
agatagatgacatgaatgctaactcaggac

SEQ ID NO: 173336 - DNA, 30 bp, Artificial Sequence
  Synthetic oligonucleotide
atacgtcgtgaactccagtcacgagaggac

SEQ ID NO: 173337 - DNA, 30 bp, Artificial Sequence
  Synthetic oligonucleotide
gatgcgcaaaattcgcagtccatcgaggac

SEQ ID NO: 173338 - DNA, 30 bp, Artificial Sequence
  Synthetic oligonucleotide
gcagggcgggatatgcagcaacaataggac

SEQ ID NO: 173339 - DNA, 30 bp, Artificial Sequence
  Synthetic oligonucleotide
agcaccttgcgacagatatgatcataggac

SEQ ID NO: 173340 - DNA, 30 bp, Artificial Sequence
  Synthetic oligonucleotide
ttaatgagtgcgataacagcatgctaggac

SEQ ID NO: 173341 - DNA, 30 bp, Artificial Sequence
  Synthetic oligonucleotide
tgcttagtgcagaaaccaggattgtaggac

SEQ ID NO: 173342 - DNA, 30 bp, Artificial Sequence
  Synthetic oligonucleotide
attgactggttgactgtagacgtaacggac

SEQ ID NO: 173343 - DNA, 30 bp, Artificial Sequence
  Synthetic oligonucleotide
aacggaagcccattcactgaatacacggac

SEQ ID NO: 173344 - DNA, 30 bp, Artificial Sequence
  Synthetic oligonucleotide
agaaacacgcgcagaggattgaccacggac

SEQ ID NO: 173345 - DNA, 30 bp, Artificial Sequence
  Synthetic oligonucleotide
ctctcccccgcacggacgagagagacggac

SEQ ID NO: 173346 - DNA, 30 bp, Artificial Sequence
  Synthetic oligonucleotide
tgtgaaggcgttgttgaaaagtagacggac

SEQ ID NO: 173347 - DNA, 30 bp, Artificial Sequence
  Synthetic oligonucleotide
ggtcgaaaaatgggtaagcgttcgacggac

SEQ ID NO: 173348 - DNA, 30 bp, Artificial Sequence
  Synthetic oligonucleotide
gtcacctcttaattgcaaaaggggacggac

SEQ ID NO: 173349 - DNA, 30 bp, Artificial Sequence
  Synthetic oligonucleotide
cggtgttgggaaacccgttcctgaccggac

SEQ ID NO: 173350 - DNA, 30 bp, Artificial Sequence
  Synthetic oligonucleotide
acacaccctcacgctagcaactcctcggac

SEQ ID NO: 173351 - DNA, 30 bp, Artificial Sequence
  Synthetic oligonucleotide
ggcgtgtactaaagaattgtccgctcggac

SEQ ID NO: 173352 - DNA, 30 bp, Artificial Sequence
  Synthetic oligonucleotide
cgttatgtgaaacttctaactaattcggac

SEQ ID NO: 173353 - DNA, 30 bp, Artificial Sequence
  Synthetic oligonucleotide
cggaatttgtcctggggaaatgattcggac

SEQ ID NO: 173354 - DNA, 30 bp, Artificial Sequence
  Synthetic oligonucleotide
gccagcaatcaaacgtccatactaagggac

SEQ ID NO: 173355 - DNA, 30 bp, Artificial Sequence
  Synthetic oligonucleotide
actacgcaatgttatccatacggcagggac

SEQ ID NO: 173356 - DNA, 30 bp, Artificial Sequence
  Synthetic oligonucleotide
tcattcactcacgagattggatatagggac

SEQ ID NO: 173357 - DNA, 30 bp, Artificial Sequence
  Synthetic oligonucleotide
cacaagtaagggcgtaatgcgtgtagggac

SEQ ID NO: 173358 - DNA, 30 bp, Artificial Sequence
  Synthetic oligonucleotide
agcgagggccgacgtccctttaaacgggac

SEQ ID NO: 173359 - DNA, 30 bp, Artificial Sequence
  Synthetic oligonucleotide
catcgtgataacatttcagaatgccgggac

SEQ ID NO: 173360 - DNA, 30 bp, Artificial Sequence
  Synthetic oligonucleotide
ggcctgtatctgaccgcgaatcggcgggac

SEQ ID NO: 173361 - DNA, 30 bp, Artificial Sequence
  Synthetic oligonucleotide
aggatggggcgctgagctgtcgatcgggac

SEQ ID NO: 173362 - DNA, 30 bp, Artificial Sequence
  Synthetic oligonucleotide
gacagtgaaaccgggcactcgggtcgggac

SEQ ID NO: 173363 - DNA, 30 bp, Artificial Sequence
  Synthetic oligonucleotide
ccgggcactcggacaatggtgtaaggggac

SEQ ID NO: 173364 - DNA, 30 bp, Artificial Sequence
  Synthetic oligonucleotide
gtttaggtggcaaagtagataacgggggac

SEQ ID NO: 173365 - DNA, 30 bp, Artificial Sequence
  Synthetic oligonucleotide
ggtaaaatttgcttgaaaggtaaatgggac

SEQ ID NO: 173366 - DNA, 30 bp, Artificial Sequence
  Synthetic oligonucleotide
gtgggcgcatgtagaagtcgaatctgggac

SEQ ID NO: 173367 - DNA, 30 bp, Artificial Sequence
  Synthetic oligonucleotide
gaaccgcggtgcagcttacaggtctgggac

SEQ ID NO: 173368 - DNA, 30 bp, Artificial Sequence
  Synthetic oligonucleotide
aataggtcagagcagggcggggattgggac

SEQ ID NO: 173369 - DNA, 30 bp, Artificial Sequence
  Synthetic oligonucleotide
tcctcattggcaaatagcggtcagatggac

SEQ ID NO: 173370 - DNA, 30 bp, Artificial Sequence
  Synthetic oligonucleotide
caaatccgtaaaactgctggtcagatggac

SEQ ID NO: 173371 - DNA, 30 bp, Artificial Sequence
  Synthetic oligonucleotide
gatcaaggagcaacgcagcctgaactggac

SEQ ID NO: 173372 - DNA, 30 bp, Artificial Sequence
  Synthetic oligonucleotide
cacaaaggtgtcagaacacaccgactggac

SEQ ID NO: 173373 - DNA, 30 bp, Artificial Sequence
  Synthetic oligonucleotide
tgtggctagatggcaggtgggtgcctggac

SEQ ID NO: 173374 - DNA, 30 bp, Artificial Sequence
  Synthetic oligonucleotide
tgtgatgacactgtagctctaacgctggac

SEQ ID NO: 173375 - DNA, 30 bp, Artificial Sequence
  Synthetic oligonucleotide
aatacagtgtttaaacattgagaagtggac

SEQ ID NO: 173376 - DNA, 30 bp, Artificial Sequence
  Synthetic oligonucleotide
cagctggaggaaacaggcgattttgtggac

SEQ ID NO: 173377 - DNA, 30 bp, Artificial Sequence
  Synthetic oligonucleotide
tcgatactaattggttgagcaatattggac

SEQ ID NO: 173378 - DNA, 30 bp, Artificial Sequence
  Synthetic oligonucleotide
cattgtacgttgaataatggggcgttggac

SEQ ID NO: 173379 - DNA, 30 bp, Artificial Sequence
  Synthetic oligonucleotide
cggtcagagtgccaccgtggcgttttggac

SEQ ID NO: 173380 - DNA, 30 bp, Artificial Sequence
  Synthetic oligonucleotide
gaatgtcggggagacagatcaaaaaatgac

SEQ ID NO: 173381 - DNA, 30 bp, Artificial Sequence
  Synthetic oligonucleotide
cgccgcggaatgctctaattagacaatgac

SEQ ID NO: 173382 - DNA, 30 bp, Artificial Sequence
  Synthetic oligonucleotide
aaccaggacaaaactaccttcgtcaatgac

SEQ ID NO: 173383 - DNA, 30 bp, Artificial Sequence
  Synthetic oligonucleotide
atgcaggccagcgatagaacgttacatgac

SEQ ID NO: 173384 - DNA, 30 bp, Artificial Sequence
  Synthetic oligonucleotide
cagggagcgtactactacctatcccatgac

SEQ ID NO: 173385 - DNA, 30 bp, Artificial Sequence
  Synthetic oligonucleotide
ctcgctctaatctctcgaatacagcatgac

SEQ ID NO: 173386 - DNA, 30 bp, Artificial Sequence
  Synthetic oligonucleotide
atatgcatttgctccaactcgcggcatgac

SEQ ID NO: 173387 - DNA, 30 bp, Artificial Sequence
  Synthetic oligonucleotide
acaaagtcatgttccgaaacgcacgatgac

SEQ ID NO: 173388 - DNA, 30 bp, Artificial Sequence
  Synthetic oligonucleotide
agaccaaagtttaaggcgaacgccgatgac

SEQ ID NO: 173389 - DNA, 30 bp, Artificial Sequence
  Synthetic oligonucleotide
cattaccttgggtctcgccctccggatgac

SEQ ID NO: 173390 - DNA, 30 bp, Artificial Sequence
  Synthetic oligonucleotide
gatgcaacggacggttgaattattgatgac

SEQ ID NO: 173391 - DNA, 30 bp, Artificial Sequence
  Synthetic oligonucleotide
acaggcatgtttgacacatattcatatgac

SEQ ID NO: 173392 - DNA, 30 bp, Artificial Sequence
  Synthetic oligonucleotide
agcgggcccgccagaaaaagtgccactgac

SEQ ID NO: 173393 - DNA, 30 bp, Artificial Sequence
  Synthetic oligonucleotide
gcgagagaagagtttagggtgtgccctgac

SEQ ID NO: 173394 - DNA, 30 bp, Artificial Sequence
  Synthetic oligonucleotide
taaccggaatcttcgagcctaaagcctgac

SEQ ID NO: 173395 - DNA, 30 bp, Artificial Sequence
  Synthetic oligonucleotide
atcaactccagggggtagcagtatcctgac

SEQ ID NO: 173396 - DNA, 30 bp, Artificial Sequence
  Synthetic oligonucleotide
cgtacggccgtcgagacccgactagctgac

SEQ ID NO: 173397 - DNA, 30 bp, Artificial Sequence
  Synthetic oligonucleotide
cgtcgtcaccatttattttcaacctctgac

SEQ ID NO: 173398 - DNA, 30 bp, Artificial Sequence
  Synthetic oligonucleotide
agcaaaagtgaatgcaagtttggttctgac

SEQ ID NO: 173399 - DNA, 30 bp, Artificial Sequence
  Synthetic oligonucleotide
aagaaattggccggcaagtggccaagtgac

SEQ ID NO: 173400 - DNA, 30 bp, Artificial Sequence
  Synthetic oligonucleotide
aattgatatttttggaccaacgacagtgac

SEQ ID NO: 173401 - DNA, 30 bp, Artificial Sequence
  Synthetic oligonucleotide
atagtaacgtgcggtttcgcatatagtgac

SEQ ID NO: 173402 - DNA, 30 bp, Artificial Sequence
  Synthetic oligonucleotide
acccaaatcacgtttgcggcatttagtgac

SEQ ID NO: 173403 - DNA, 30 bp, Artificial Sequence
  Synthetic oligonucleotide
tgttaattctctaaagttactgtacgtgac

SEQ ID NO: 173404 - DNA, 30 bp, Artificial Sequence
  Synthetic oligonucleotide
agcggatcacgaaatgggccggcccgtgac

SEQ ID NO: 173405 - DNA, 30 bp, Artificial Sequence
  Synthetic oligonucleotide
ggcacctaattgttatcaataggaggtgac

SEQ ID NO: 173406 - DNA, 30 bp, Artificial Sequence
  Synthetic oligonucleotide
cccaattcgatgtaaatagtgggaggtgac

SEQ ID NO: 173407 - DNA, 30 bp, Artificial Sequence
  Synthetic oligonucleotide
ataagctcgaatcagacgataagcggtgac

SEQ ID NO: 173408 - DNA, 30 bp, Artificial Sequence
  Synthetic oligonucleotide
cataagtcgccgatcaagagtcgcggtgac

SEQ ID NO: 173409 - DNA, 30 bp, Artificial Sequence
  Synthetic oligonucleotide
aaggactgacttcatgaataactcggtgac

SEQ ID NO: 173410 - DNA, 30 bp, Artificial Sequence
  Synthetic oligonucleotide
tgatgcggatatgcggtggatctatgtgac

SEQ ID NO: 173411 - DNA, 30 bp, Artificial Sequence
  Synthetic oligonucleotide
aagtgagaagcggcctttacaagctgtgac

SEQ ID NO: 173412 - DNA, 30 bp, Artificial Sequence
  Synthetic oligonucleotide
ttgtagataatggtggcaaaacgctgtgac

SEQ ID NO: 173413 - DNA, 30 bp, Artificial Sequence
  Synthetic oligonucleotide
agccagttcgcctctacactagtctgtgac

SEQ ID NO: 173414 - DNA, 30 bp, Artificial Sequence
  Synthetic oligonucleotide
tctcggtccgaaacgtgcttgtagtgtgac

SEQ ID NO: 173415 - DNA, 30 bp, Artificial Sequence
  Synthetic oligonucleotide
gccatcccgagtgtgcgcggtccttgtgac

SEQ ID NO: 173416 - DNA, 30 bp, Artificial Sequence
  Synthetic oligonucleotide
caaatcgacgatcctcttgaatagattgac

SEQ ID NO: 173417 - DNA, 30 bp, Artificial Sequence
  Synthetic oligonucleotide
tatgagcgggtagtctcggtgtgccttgac

SEQ ID NO: 173418 - DNA, 30 bp, Artificial Sequence
  Synthetic oligonucleotide
acactcgaaggcgcggggtggctccttgac

SEQ ID NO: 173419 - DNA, 30 bp, Artificial Sequence
  Synthetic oligonucleotide
cagaaacgcccttgtgctcaagcagttgac

SEQ ID NO: 173420 - DNA, 30 bp, Artificial Sequence
  Synthetic oligonucleotide
gaagcgaaaaattaacagaatcatgttgac

SEQ ID NO: 173421 - DNA, 30 bp, Artificial Sequence
  Synthetic oligonucleotide
cacgtgctactgaccaaatggactgttgac

SEQ ID NO: 173422 - DNA, 30 bp, Artificial Sequence
  Synthetic oligonucleotide
cgaaattatatccgatggagaggtgttgac

SEQ ID NO: 173423 - DNA, 30 bp, Artificial Sequence
  Synthetic oligonucleotide
cggtacactccaatattggttggctttgac

SEQ ID NO: 173424 - DNA, 30 bp, Artificial Sequence
  Synthetic oligonucleotide
gagggcaacggttatttgtatggaaaatac

SEQ ID NO: 173425 - DNA, 30 bp, Artificial Sequence
  Synthetic oligonucleotide
cgggcttcaaaggtgtatgagtttaaatac

SEQ ID NO: 173426 - DNA, 30 bp, Artificial Sequence
  Synthetic oligonucleotide
ggtgaacagtgactaaggagcggacaatac

SEQ ID NO: 173427 - DNA, 30 bp, Artificial Sequence
  Synthetic oligonucleotide
gatgctccacaatctggattcggccaatac

SEQ ID NO: 173428 - DNA, 30 bp, Artificial Sequence
  Synthetic oligonucleotide
atggttataaatcgcattagtgagcaatac

SEQ ID NO: 173429 - DNA, 30 bp, Artificial Sequence
  Synthetic oligonucleotide
aacgtgccttattcggcaactcggcaatac

SEQ ID NO: 173430 - DNA, 30 bp, Artificial Sequence
  Synthetic oligonucleotide
acttgggaatctatcccaataatgcaatac

SEQ ID NO: 173431 - DNA, 30 bp, Artificial Sequence
  Synthetic oligonucleotide
acatacgggaggatgttgtatagtcaatac

SEQ ID NO: 173432 - DNA, 30 bp, Artificial Sequence
  Synthetic oligonucleotide
ctaagcacggctgttagtgcgcgtcaatac

SEQ ID NO: 173433 - DNA, 30 bp, Artificial Sequence
  Synthetic oligonucleotide
gattcacgcacttgcctcccacttcaatac

SEQ ID NO: 173434 - DNA, 30 bp, Artificial Sequence
  Synthetic oligonucleotide
gccggtaaggatggagcctagtaggaatac

SEQ ID NO: 173435 - DNA, 30 bp, Artificial Sequence
  Synthetic oligonucleotide
catggcatcatggttccggatacggaatac

SEQ ID NO: 173436 - DNA, 30 bp, Artificial Sequence
  Synthetic oligonucleotide
tgctggcccaccgctacaaaatgtgaatac

SEQ ID NO: 173437 - DNA, 30 bp, Artificial Sequence
  Synthetic oligonucleotide
cataacacataaggttggctggcctaatac

SEQ ID NO: 173438 - DNA, 30 bp, Artificial Sequence
  Synthetic oligonucleotide
agcgcatcagcgcaaccgagcttgtaatac

SEQ ID NO: 173439 - DNA, 30 bp, Artificial Sequence
  Synthetic oligonucleotide
gcattttgtccttgggtcaatgattaatac

SEQ ID NO: 173440 - DNA, 30 bp, Artificial Sequence
  Synthetic oligonucleotide
gcgacgatacccgaggcggccaacacatac

SEQ ID NO: 173441 - DNA, 30 bp, Artificial Sequence
  Synthetic oligonucleotide
gcaataatctaacaggaactggccacatac

SEQ ID NO: 173442 - DNA, 30 bp, Artificial Sequence
  Synthetic oligonucleotide
tgagacagtctatcgcaccctggaccatac

SEQ ID NO: 173443 - DNA, 30 bp, Artificial Sequence
  Synthetic oligonucleotide
gaggtcagctcgggatactagctcccatac

SEQ ID NO: 173444 - DNA, 30 bp, Artificial Sequence
  Synthetic oligonucleotide
ttagatagaatagagttatttgagccatac

SEQ ID NO: 173445 - DNA, 30 bp, Artificial Sequence
  Synthetic oligonucleotide
gcgatatatgctcatagaagttagccatac

SEQ ID NO: 173446 - DNA, 30 bp, Artificial Sequence
  Synthetic oligonucleotide
gactcattgcggcaacctacgaggccatac

SEQ ID NO: 173447 - DNA, 30 bp, Artificial Sequence
  Synthetic oligonucleotide
ggcctgagaggccgtctttcactagcatac

SEQ ID NO: 173448 - DNA, 30 bp, Artificial Sequence
  Synthetic oligonucleotide
aacgattcaagatgtctctagagggcatac

SEQ ID NO: 173449 - DNA, 30 bp, Artificial Sequence
  Synthetic oligonucleotide
gacgtagtgcctacgtactttctctcatac

SEQ ID NO: 173450 - DNA, 30 bp, Artificial Sequence
  Synthetic oligonucleotide
atgatgggacacaaaattcactagtcatac

SEQ ID NO: 173451 - DNA, 30 bp, Artificial Sequence
  Synthetic oligonucleotide
ccgggttgtggtgtctgtccagggtcatac

SEQ ID NO: 173452 - DNA, 30 bp, Artificial Sequence
  Synthetic oligonucleotide
gtgtgtgtgcttgtggtgctggggtcatac

SEQ ID NO: 173453 - DNA, 30 bp, Artificial Sequence
  Synthetic oligonucleotide
cggagatcaaggagactgcaaatgtcatac

SEQ ID NO: 173454 - DNA, 30 bp, Artificial Sequence
  Synthetic oligonucleotide
gctgataggtttgacccaactaattcatac

SEQ ID NO: 173455 - DNA, 30 bp, Artificial Sequence
  Synthetic oligonucleotide
caaaaacacggatagggcagggattcatac

SEQ ID NO: 173456 - DNA, 30 bp, Artificial Sequence
  Synthetic oligonucleotide
actgggatacaactatgtcttatttcatac

SEQ ID NO: 173457 - DNA, 30 bp, Artificial Sequence
  Synthetic oligonucleotide
gtagggggaaacccccaaagctggagatac

SEQ ID NO: 173458 - DNA, 30 bp, Artificial Sequence
  Synthetic oligonucleotide
gctcgaccaaggcctctccaaggtagatac

SEQ ID NO: 173459 - DNA, 30 bp, Artificial Sequence
  Synthetic oligonucleotide
tctgggataacccagagctccgttagatac

SEQ ID NO: 173460 - DNA, 30 bp, Artificial Sequence
  Synthetic oligonucleotide
atgaattgatccgtcttactccaccgatac

SEQ ID NO: 173461 - DNA, 30 bp, Artificial Sequence
  Synthetic oligonucleotide
aactgaataagcaatgctagtaagcgatac

SEQ ID NO: 173462 - DNA, 30 bp, Artificial Sequence
  Synthetic oligonucleotide
tgaagcggcggtgaagtggagctgcgatac

SEQ ID NO: 173463 - DNA, 30 bp, Artificial Sequence
  Synthetic oligonucleotide
acacttcatatgcgctacggctatcgatac

SEQ ID NO: 173464 - DNA, 30 bp, Artificial Sequence
  Synthetic oligonucleotide
ctacaaagctaccccgacagtccaggatac

SEQ ID NO: 173465 - DNA, 30 bp, Artificial Sequence
  Synthetic oligonucleotide
ttataaactctacacctatctgcaggatac

SEQ ID NO: 173466 - DNA, 30 bp, Artificial Sequence
  Synthetic oligonucleotide
gtgaagggatcgcacctaaaattaggatac

SEQ ID NO: 173467 - DNA, 30 bp, Artificial Sequence
  Synthetic oligonucleotide
acagcgaaagcagtagtaccgaacggatac

SEQ ID NO: 173468 - DNA, 30 bp, Artificial Sequence
  Synthetic oligonucleotide
cgacttcgcgaatcgaatcgggggggatac

SEQ ID NO: 173469 - DNA, 30 bp, Artificial Sequence
  Synthetic oligonucleotide
cgcgcagacaagacttgagcataatgatac

SEQ ID NO: 173470 - DNA, 30 bp, Artificial Sequence
  Synthetic oligonucleotide
actgtaaaatgagaaagactccggtgatac

SEQ ID NO: 173471 - DNA, 30 bp, Artificial Sequence
  Synthetic oligonucleotide
cagacgtacttcgattgtggtataatatac

SEQ ID NO: 173472 - DNA, 30 bp, Artificial Sequence
  Synthetic oligonucleotide
tgaagcgagggatcctaaggccccatatac

SEQ ID NO: 173473 - DNA, 30 bp, Artificial Sequence
  Synthetic oligonucleotide
aggatggtaacgggccaattggggatatac

SEQ ID NO: 173474 - DNA, 30 bp, Artificial Sequence
  Synthetic oligonucleotide
cggctacgctgttgtcattcgcttatatac

SEQ ID NO: 173475 - DNA, 30 bp, Artificial Sequence
  Synthetic oligonucleotide
tacatgtgctatgcgaaaacaacactatac

SEQ ID NO: 173476 - DNA, 30 bp, Artificial Sequence
  Synthetic oligonucleotide
acgcgattaacaccgtacaatacactatac

SEQ ID NO: 173477 - DNA, 30 bp, Artificial Sequence
  Synthetic oligonucleotide
gctacggacgggctcctaatcgagctatac

SEQ ID NO: 173478 - DNA, 30 bp, Artificial Sequence
  Synthetic oligonucleotide
cacttgaagcgggtcgcggtatatgtatac

SEQ ID NO: 173479 - DNA, 30 bp, Artificial Sequence
  Synthetic oligonucleotide
cgttaatgtggcgcgaccaattgattatac

SEQ ID NO: 173480 - DNA, 30 bp, Artificial Sequence
  Synthetic oligonucleotide
cttaagccgagggggaggcatgagttatac

SEQ ID NO: 173481 - DNA, 30 bp, Artificial Sequence
  Synthetic oligonucleotide
atgagagccaaaattcagaccactttatac

SEQ ID NO: 173482 - DNA, 30 bp, Artificial Sequence
  Synthetic oligonucleotide
ggcacctcggatcactgtgctgctttatac

SEQ ID NO: 173483 - DNA, 30 bp, Artificial Sequence
  Synthetic oligonucleotide
caccgtggatcatacatgcgtcacaactac

SEQ ID NO: 173484 - DNA, 30 bp, Artificial Sequence
  Synthetic oligonucleotide
tcgtcttcgagtcgcacggtaaaacactac

SEQ ID NO: 173485 - DNA, 30 bp, Artificial Sequence
  Synthetic oligonucleotide
aaaggcgtcaaccgacgcgactttcactac

SEQ ID NO: 173486 - DNA, 30 bp, Artificial Sequence
  Synthetic oligonucleotide
catgcgcactgcctgcacgtacgagactac

SEQ ID NO: 173487 - DNA, 30 bp, Artificial Sequence
  Synthetic oligonucleotide
tagggacttaaatggcacccgatagactac

SEQ ID NO: 173488 - DNA, 30 bp, Artificial Sequence
  Synthetic oligonucleotide
accggaagtaacgcctgaagctaggactac

SEQ ID NO: 173489 - DNA, 30 bp, Artificial Sequence
  Synthetic oligonucleotide
gtcggtccggtcagcttaacgcggtactac

SEQ ID NO: 173490 - DNA, 30 bp, Artificial Sequence
  Synthetic oligonucleotide
cttaaaccggcaggaggtcggcattactac

SEQ ID NO: 173491 - DNA, 30 bp, Artificial Sequence
  Synthetic oligonucleotide
caaagtacgactcggcgtcgccacccctac

SEQ ID NO: 173492 - DNA, 30 bp, Artificial Sequence
  Synthetic oligonucleotide
acgatagaataggggcactttaatccctac

SEQ ID NO: 173493 - DNA, 30 bp, Artificial Sequence
  Synthetic oligonucleotide
ccgttagcggacaaatttctgcttccctac

SEQ ID NO: 173494 - DNA, 30 bp, Artificial Sequence
  Synthetic oligonucleotide
tggatgggacttcggaacgatttagcctac

SEQ ID NO: 173495 - DNA, 30 bp, Artificial Sequence
  Synthetic oligonucleotide
tgcgctcgattcgtctagggggactcctac

SEQ ID NO: 173496 - DNA, 30 bp, Artificial Sequence
  Synthetic oligonucleotide
aggccgttgggtaatatcaacagcagctac

SEQ ID NO: 173497 - DNA, 30 bp, Artificial Sequence
  Synthetic oligonucleotide
acatgcagcatagcaattgagtgcagctac

SEQ ID NO: 173498 - DNA, 30 bp, Artificial Sequence
  Synthetic oligonucleotide
ctgaagagtccgtcgatcaagacgagctac

SEQ ID NO: 173499 - DNA, 30 bp, Artificial Sequence
  Synthetic oligonucleotide
cctttaaagcgaacggtcctgcctcgctac

SEQ ID NO: 173500 - DNA, 30 bp, Artificial Sequence
  Synthetic oligonucleotide
aaattaaggatcacgccaaatcttcgctac

SEQ ID NO: 173501 - DNA, 30 bp, Artificial Sequence
  Synthetic oligonucleotide
gcactgtgagcgaaacccaaggacggctac

SEQ ID NO: 173502 - DNA, 30 bp, Artificial Sequence
  Synthetic oligonucleotide
aacagactctgtgacgcctcctacggctac

SEQ ID NO: 173503 - DNA, 30 bp, Artificial Sequence
  Synthetic oligonucleotide
tcatgagtcaagtgatacctcgccggctac

SEQ ID NO: 173504 - DNA, 30 bp, Artificial Sequence
  Synthetic oligonucleotide
gagccgacatatgggtcatgcaggggctac

SEQ ID NO: 173505 - DNA, 30 bp, Artificial Sequence
  Synthetic oligonucleotide
aaataggccaagaggccgccttgatgctac

SEQ ID NO: 173506 - DNA, 30 bp, Artificial Sequence
  Synthetic oligonucleotide
tgcaggcgtgtaatgcagaacacctgctac

SEQ ID NO: 173507 - DNA, 30 bp, Artificial Sequence
  Synthetic oligonucleotide
cgggccacaagattttaccacatttgctac

SEQ ID NO: 173508 - DNA, 30 bp, Artificial Sequence
  Synthetic oligonucleotide
agggtgctgccgtacgtattttgaatctac

SEQ ID NO: 173509 - DNA, 30 bp, Artificial Sequence
  Synthetic oligonucleotide
agaagtaaacgatattttcaagccatctac

SEQ ID NO: 173510 - DNA, 30 bp, Artificial Sequence
  Synthetic oligonucleotide
caggtggagcccggagagttgttgatctac

SEQ ID NO: 173511 - DNA, 30 bp, Artificial Sequence
  Synthetic oligonucleotide
cgggtagggcgcagtcttaagcatctctac

SEQ ID NO: 173512 - DNA, 30 bp, Artificial Sequence
  Synthetic oligonucleotide
aatgtacatcggtaacaggtacgtctctac

SEQ ID NO: 173513 - DNA, 30 bp, Artificial Sequence
  Synthetic oligonucleotide
caggttccggtgtcgcctagtagagtctac

SEQ ID NO: 173514 - DNA, 30 bp, Artificial Sequence
  Synthetic oligonucleotide
ataggctaaaaagtatttggaagcgtctac

SEQ ID NO: 173515 - DNA, 30 bp, Artificial Sequence
  Synthetic oligonucleotide
aaagatacgggatagcggtcatgggtctac

SEQ ID NO: 173516 - DNA, 30 bp, Artificial Sequence
  Synthetic oligonucleotide
gtcattaaggaaatataatcactggtctac

SEQ ID NO: 173517 - DNA, 30 bp, Artificial Sequence
  Synthetic oligonucleotide
ttgggataaactaagacccacaccaagtac

SEQ ID NO: 173518 - DNA, 30 bp, Artificial Sequence
  Synthetic oligonucleotide
acacgggggttttgagcaatagtcaagtac

SEQ ID NO: 173519 - DNA, 30 bp, Artificial Sequence
  Synthetic oligonucleotide
tagcgtccggcctgcttacacgggaagtac

SEQ ID NO: 173520 - DNA, 30 bp, Artificial Sequence
  Synthetic oligonucleotide
aggtgaggtcggcggagtgcttataagtac

SEQ ID NO: 173521 - DNA, 30 bp, Artificial Sequence
  Synthetic oligonucleotide
tgaggttatccataagtttaaattaagtac

SEQ ID NO: 173522 - DNA, 30 bp, Artificial Sequence
  Synthetic oligonucleotide
cctcgatccagagtttagcctcttaagtac

SEQ ID NO: 173523 - DNA, 30 bp, Artificial Sequence
  Synthetic oligonucleotide
ttaggaatgctactaatattcccccagtac

SEQ ID NO: 173524 - DNA, 30 bp, Artificial Sequence
  Synthetic oligonucleotide
gttctcatgtagggggctccgcggcagtac

SEQ ID NO: 173525 - DNA, 28 bp, Artificial Sequence
  Synthetic oligonucleotide
gggaacgttcagtaatgtcctgcagtac

SEQ ID NO: 173526 - DNA, 30 bp, Artificial Sequence
  Synthetic oligonucleotide
catgcttaagcctatttagtccaagagtac

SEQ ID NO: 173527 - DNA, 30 bp, Artificial Sequence
  Synthetic oligonucleotide
ggcagaaggatcggcgtctgcggagagtac

SEQ ID NO: 173528 - DNA, 30 bp, Artificial Sequence
  Synthetic oligonucleotide
gccctgcactccggtaaacgaaacgagtac

SEQ ID NO: 173529 - DNA, 30 bp, Artificial Sequence
  Synthetic oligonucleotide
ttagttatgcgagacaaaaaccgggagtac

SEQ ID NO: 173530 - DNA, 30 bp, Artificial Sequence
  Synthetic oligonucleotide
ctcgtgcttctgacggcaaggggggagtac

SEQ ID NO: 173531 - DNA, 30 bp, Artificial Sequence
  Synthetic oligonucleotide
atcattcgttaactgacatctatgtagtac

SEQ ID NO: 173532 - DNA, 30 bp, Artificial Sequence
  Synthetic oligonucleotide
actggaaagactgatttagacttgtagtac

SEQ ID NO: 173533 - DNA, 30 bp, Artificial Sequence
  Synthetic oligonucleotide
tgggtaagaattaaaatctctgcttagtac

SEQ ID NO: 173534 - DNA, 30 bp, Artificial Sequence
  Synthetic oligonucleotide
acaggatcctgtctgactgtcaggacgtac

SEQ ID NO: 173535 - DNA, 30 bp, Artificial Sequence
  Synthetic oligonucleotide
gccacttggagagagagatcccgaccgtac

SEQ ID NO: 173536 - DNA, 30 bp, Artificial Sequence
  Synthetic oligonucleotide
gtcaggtagagcgatcggaccgtaccgtac

SEQ ID NO: 173537 - DNA, 30 bp, Artificial Sequence
  Synthetic oligonucleotide
tcacgaacagcagaatttgcacccccgtac

SEQ ID NO: 173538 - DNA, 30 bp, Artificial Sequence
  Synthetic oligonucleotide
tcgttagtgcaggtacttcaaagcccgtac

SEQ ID NO: 173539 - DNA, 30 bp, Artificial Sequence
  Synthetic oligonucleotide
acacgttagaccatcgcacagttgccgtac

SEQ ID NO: 173540 - DNA, 30 bp, Artificial Sequence
  Synthetic oligonucleotide
taacatcctcgtcaaccccatggtccgtac

SEQ ID NO: 173541 - DNA, 30 bp, Artificial Sequence
  Synthetic oligonucleotide
cgggtctaaagagtgtagtggagagcgtac

SEQ ID NO: 173542 - DNA, 30 bp, Artificial Sequence
  Synthetic oligonucleotide
agtctgaaaatggactccacaggagcgtac

SEQ ID NO: 173543 - DNA, 30 bp, Artificial Sequence
  Synthetic oligonucleotide
aggaacttgggtcggcaatggtccgcgtac

SEQ ID NO: 173544 - DNA, 30 bp, Artificial Sequence
  Synthetic oligonucleotide
cttgcggcgacaggcaactaaagcgcgtac

SEQ ID NO: 173545 - DNA, 30 bp, Artificial Sequence
  Synthetic oligonucleotide
aactgatgaagtgcttaaatcggggcgtac

SEQ ID NO: 173546 - DNA, 30 bp, Artificial Sequence
  Synthetic oligonucleotide
ccacgtctagggtggaaacagaactcgtac

SEQ ID NO: 173547 - DNA, 30 bp, Artificial Sequence
  Synthetic oligonucleotide
cacaactatcctggattatgagactcgtac

SEQ ID NO: 173548 - DNA, 30 bp, Artificial Sequence
  Synthetic oligonucleotide
cgaatccgcatattatgtgttatccggtac

SEQ ID NO: 173549 - DNA, 30 bp, Artificial Sequence
  Synthetic oligonucleotide
gtgtaatggggcactaaaatgtcgcggtac

SEQ ID NO: 173550 - DNA, 30 bp, Artificial Sequence
  Synthetic oligonucleotide
aagtcaccaggtatacgaatcgggcggtac

SEQ ID NO: 173551 - DNA, 30 bp, Artificial Sequence
  Synthetic oligonucleotide
atggtatcttgtgagttgtgctttcggtac

SEQ ID NO: 173552 - DNA, 30 bp, Artificial Sequence
  Synthetic oligonucleotide
caccggggcagcgcagtgggaagcgggtac

SEQ ID NO: 173553 - DNA, 30 bp, Artificial Sequence
  Synthetic oligonucleotide
aggatgttatacgtcgacgtaagcgggtac

SEQ ID NO: 173554 - DNA, 30 bp, Artificial Sequence
  Synthetic oligonucleotide
gaggaaacggatcgaaaatatcgtgggtac

SEQ ID NO: 173555 - DNA, 30 bp, Artificial Sequence
  Synthetic oligonucleotide
cgacttgtatgaaacgtagggggtgggtac

SEQ ID NO: 173556 - DNA, 30 bp, Artificial Sequence
  Synthetic oligonucleotide
gtgatctggatcatattgtcaccgtggtac

SEQ ID NO: 173557 - DNA, 30 bp, Artificial Sequence
  Synthetic oligonucleotide
gatcaggaatatactctatctgtgtggtac

SEQ ID NO: 173558 - DNA, 30 bp, Artificial Sequence
  Synthetic oligonucleotide
agttaggagctaagagatgcggtaatgtac

SEQ ID NO: 173559 - DNA, 30 bp, Artificial Sequence
  Synthetic oligonucleotide
tggggtgtctggcctgggtttagcatgtac

SEQ ID NO: 173560 - DNA, 30 bp, Artificial Sequence
  Synthetic oligonucleotide
ccactctacgcatgtcttaggtgcatgtac

SEQ ID NO: 173561 - DNA, 30 bp, Artificial Sequence
  Synthetic oligonucleotide
gcgggtgatcaataatagcttacgatgtac

SEQ ID NO: 173562 - DNA, 30 bp, Artificial Sequence
  Synthetic oligonucleotide
agcagattccactataaaaggccgatgtac

SEQ ID NO: 173563 - DNA, 30 bp, Artificial Sequence
  Synthetic oligonucleotide
agcatgaggagctacgggacttggatgtac

SEQ ID NO: 173564 - DNA, 30 bp, Artificial Sequence
  Synthetic oligonucleotide
ggcacaccacagtttatattcgatatgtac

SEQ ID NO: 173565 - DNA, 30 bp, Artificial Sequence
  Synthetic oligonucleotide
gagaagggaggaacccactggtcactgtac

SEQ ID NO: 173566 - DNA, 30 bp, Artificial Sequence
  Synthetic oligonucleotide
ataccggcatgataaaggaatgacctgtac

SEQ ID NO: 173567 - DNA, 30 bp, Artificial Sequence
  Synthetic oligonucleotide
aaccaacaacaaaaaacaacagccctgtac

SEQ ID NO: 173568 - DNA, 30 bp, Artificial Sequence
  Synthetic oligonucleotide
ttaggtcaaaagattgtagaatagctgtac

SEQ ID NO: 173569 - DNA, 30 bp, Artificial Sequence
  Synthetic oligonucleotide
tctgaatggggcacactctatttcgtgtac

SEQ ID NO: 173570 - DNA, 30 bp, Artificial Sequence
  Synthetic oligonucleotide
gaagctgctccgaccaaatttccggtgtac

SEQ ID NO: 173571 - DNA, 30 bp, Artificial Sequence
  Synthetic oligonucleotide
gtccgtttaacccttaaagcaattgtgtac

SEQ ID NO: 173572 - DNA, 30 bp, Artificial Sequence
  Synthetic oligonucleotide
catcaacgaactagacagggaaagaattac

SEQ ID NO: 173573 - DNA, 30 bp, Artificial Sequence
  Synthetic oligonucleotide
ggatggagtggacgctcaggatagaattac

SEQ ID NO: 173574 - DNA, 30 bp, Artificial Sequence
  Synthetic oligonucleotide
caaacagcaagtgttatcccatggaattac

SEQ ID NO: 173575 - DNA, 30 bp, Artificial Sequence
  Synthetic oligonucleotide
acgaccacgagcctaccgtttactaattac

SEQ ID NO: 173576 - DNA, 30 bp, Artificial Sequence
  Synthetic oligonucleotide
gcattggacattagtcaacattgtaattac

SEQ ID NO: 173577 - DNA, 30 bp, Artificial Sequence
  Synthetic oligonucleotide
cgcgttattgttaaggatcaagaacattac

SEQ ID NO: 173578 - DNA, 30 bp, Artificial Sequence
  Synthetic oligonucleotide
ctgcggtccttcgataaccgttggcattac

SEQ ID NO: 173579 - DNA, 30 bp, Artificial Sequence
  Synthetic oligonucleotide
tcaacggacttccttacgagggatcattac

SEQ ID NO: 173580 - DNA, 30 bp, Artificial Sequence
  Synthetic oligonucleotide
cgaagaaattagtcgaccttttcagattac

SEQ ID NO: 173581 - DNA, 30 bp, Artificial Sequence
  Synthetic oligonucleotide
taagatgagaaccgcatacaattggattac

SEQ ID NO: 173582 - DNA, 30 bp, Artificial Sequence
  Synthetic oligonucleotide
ggtcgggccctactaaacgccccgtattac

SEQ ID NO: 173583 - DNA, 29 bp, Artificial Sequence
  Synthetic oligonucleotide
gttgaacgtgacttaagttggcttattac

SEQ ID NO: 173584 - DNA, 30 bp, Artificial Sequence
  Synthetic oligonucleotide
tggtagatacggaatgccgatagaacttac

SEQ ID NO: 173585 - DNA, 30 bp, Artificial Sequence
  Synthetic oligonucleotide
aagccgctaccatgaggggacaccacttac

SEQ ID NO: 173586 - DNA, 30 bp, Artificial Sequence
  Synthetic oligonucleotide
tatccaagagaggtcccaggtcgcacttac

SEQ ID NO: 173587 - DNA, 30 bp, Artificial Sequence
  Synthetic oligonucleotide
tggggaacgaaagtgagttctgtgacttac

SEQ ID NO: 173588 - DNA, 30 bp, Artificial Sequence
  Synthetic oligonucleotide
cggtgcatcatccccgaagggcaaccttac

SEQ ID NO: 173589 - DNA, 30 bp, Artificial Sequence
  Synthetic oligonucleotide
agatagagtgagaccctgaaattagcttac

SEQ ID NO: 173590 - DNA, 30 bp, Artificial Sequence
  Synthetic oligonucleotide
actagcattgccttgcattggcacgcttac

SEQ ID NO: 173591 - DNA, 30 bp, Artificial Sequence
  Synthetic oligonucleotide
tgacttcaacatctctcggggcgtgcttac

SEQ ID NO: 173592 - DNA, 30 bp, Artificial Sequence
  Synthetic oligonucleotide
tatgacacaggatatacgagcagatcttac

SEQ ID NO: 173593 - DNA, 30 bp, Artificial Sequence
  Synthetic oligonucleotide
actgatctttggtccttttattgatcttac

SEQ ID NO: 173594 - DNA, 30 bp, Artificial Sequence
  Synthetic oligonucleotide
agaacttgccgcccaagatgacgctcttac

SEQ ID NO: 173595 - DNA, 30 bp, Artificial Sequence
  Synthetic oligonucleotide
ccagcggacataacgataatagtctcttac

SEQ ID NO: 173596 - DNA, 30 bp, Artificial Sequence
  Synthetic oligonucleotide
taacgcaacggagatcacctcgggtcttac

SEQ ID NO: 173597 - DNA, 30 bp, Artificial Sequence
  Synthetic oligonucleotide
gcacgtgagcagtaagggtaaggaagttac

SEQ ID NO: 173598 - DNA, 30 bp, Artificial Sequence
  Synthetic oligonucleotide
cggttagcccagtacagtcggaccagttac

SEQ ID NO: 173599 - DNA, 30 bp, Artificial Sequence
  Synthetic oligonucleotide
caatgccggatagcatgtggcgccagttac

SEQ ID NO: 173600 - DNA, 30 bp, Artificial Sequence
  Synthetic oligonucleotide
catgccacacccgcaacgaccaagagttac

SEQ ID NO: 173601 - DNA, 30 bp, Artificial Sequence
  Synthetic oligonucleotide
ctagtaggtgggtagagtccggctagttac

SEQ ID NO: 173602 - DNA, 30 bp, Artificial Sequence
  Synthetic oligonucleotide
actcatataagcagcgctgtaggacgttac

SEQ ID NO: 173603 - DNA, 30 bp, Artificial Sequence
  Synthetic oligonucleotide
tcgcggacactctcgagttacagccgttac

SEQ ID NO: 173604 - DNA, 30 bp, Artificial Sequence
  Synthetic oligonucleotide
ggctgaggtacgttagtgagatggcgttac

SEQ ID NO: 173605 - DNA, 30 bp, Artificial Sequence
  Synthetic oligonucleotide
atgactgtggatggaggggcagatcgttac

SEQ ID NO: 173606 - DNA, 30 bp, Artificial Sequence
  Synthetic oligonucleotide
gctggttaaatgtgttccatcaaaggttac

SEQ ID NO: 173607 - DNA, 30 bp, Artificial Sequence
  Synthetic oligonucleotide
gcgcggtagggttagcggaagagaggttac

SEQ ID NO: 173608 - DNA, 30 bp, Artificial Sequence
  Synthetic oligonucleotide
aagttaagagtgatttctccgtatggttac

SEQ ID NO: 173609 - DNA, 30 bp, Artificial Sequence
  Synthetic oligonucleotide
gtgaacaaacattcatgaatcgttggttac

SEQ ID NO: 173610 - DNA, 30 bp, Artificial Sequence
  Synthetic oligonucleotide
tcacttcaaaactcttgagatgttggttac

SEQ ID NO: 173611 - DNA, 30 bp, Artificial Sequence
  Synthetic oligonucleotide
ccaggacgcgggaattttgcggtctgttac

SEQ ID NO: 173612 - DNA, 30 bp, Artificial Sequence
  Synthetic oligonucleotide
cagagagcaaatatatccatcctttgttac

SEQ ID NO: 173613 - DNA, 30 bp, Artificial Sequence
  Synthetic oligonucleotide
taggtgaggaagttaaggcgcaatatttac

SEQ ID NO: 173614 - DNA, 30 bp, Artificial Sequence
  Synthetic oligonucleotide
tcttgtccgtctcccatgaacacactttac

SEQ ID NO: 173615 - DNA, 30 bp, Artificial Sequence
  Synthetic oligonucleotide
atagggcctaagactcattcatgactttac

SEQ ID NO: 173616 - DNA, 30 bp, Artificial Sequence
  Synthetic oligonucleotide
acattaactggtacacaattgcgggtttac

SEQ ID NO: 173617 - DNA, 30 bp, Artificial Sequence
  Synthetic oligonucleotide
aaacatggcccgatgactatagtggtttac

SEQ ID NO: 173618 - DNA, 30 bp, Artificial Sequence
  Synthetic oligonucleotide
cttactaaggcattcagctgcttggtttac

SEQ ID NO: 173619 - DNA, 30 bp, Artificial Sequence
  Synthetic oligonucleotide
cgatgagatccaagatagagtcttgtttac

SEQ ID NO: 173620 - DNA, 30 bp, Artificial Sequence
  Synthetic oligonucleotide
tatagagcaaggttactgtgggaaaaaacc

SEQ ID NO: 173621 - DNA, 30 bp, Artificial Sequence
  Synthetic oligonucleotide
cgtatttaaccttcggaatcgcctaaaacc

SEQ ID NO: 173622 - DNA, 30 bp, Artificial Sequence
  Synthetic oligonucleotide
catgtgaatgacatgccagctcagcaaacc

SEQ ID NO: 173623 - DNA, 30 bp, Artificial Sequence
  Synthetic oligonucleotide
aaatcaagaagcgcgttcgtcaggcaaacc

SEQ ID NO: 173624 - DNA, 30 bp, Artificial Sequence
  Synthetic oligonucleotide
tctcatgcgcgacgagcgccggatcaaacc

SEQ ID NO: 173625 - DNA, 30 bp, Artificial Sequence
  Synthetic oligonucleotide
agcgctcttaacgtgtgggtttaggaaacc

SEQ ID NO: 173626 - DNA, 30 bp, Artificial Sequence
  Synthetic oligonucleotide
catcagctaagtccatccggaaatgaaacc

SEQ ID NO: 173627 - DNA, 30 bp, Artificial Sequence
  Synthetic oligonucleotide
caaatgggcacgtcatgggacagtgaaacc

SEQ ID NO: 173628 - DNA, 30 bp, Artificial Sequence
  Synthetic oligonucleotide
cagtgctgatcgaatgacaagattgaaacc

SEQ ID NO: 173629 - DNA, 30 bp, Artificial Sequence
  Synthetic oligonucleotide
gcggcagcggcttcacctcaaaaataaacc

SEQ ID NO: 173630 - DNA, 30 bp, Artificial Sequence
  Synthetic oligonucleotide
catgaatctggcggaacaaaaccataaacc

SEQ ID NO: 173631 - DNA, 30 bp, Artificial Sequence
  Synthetic oligonucleotide
agggttataacgctaggcccgtcataaacc

SEQ ID NO: 173632 - DNA, 30 bp, Artificial Sequence
  Synthetic oligonucleotide
tcatactggtaacagaccacatgataaacc

SEQ ID NO: 173633 - DNA, 30 bp, Artificial Sequence
  Synthetic oligonucleotide
gggatgtttcactacagtgctgagtaaacc

SEQ ID NO: 173634 - DNA, 30 bp, Artificial Sequence
  Synthetic oligonucleotide
gatgctgaacgcacgtaaacgaggacaacc

SEQ ID NO: 173635 - DNA, 30 bp, Artificial Sequence
  Synthetic oligonucleotide
gggcctccagcaggagcacacgtgacaacc

SEQ ID NO: 173636 - DNA, 30 bp, Artificial Sequence
  Synthetic oligonucleotide
actgctccggcaacagggtaaagaccaacc

SEQ ID NO: 173637 - DNA, 30 bp, Artificial Sequence
  Synthetic oligonucleotide
tggatggtgggaatgcccgctctgccaacc

SEQ ID NO: 173638 - DNA, 30 bp, Artificial Sequence
  Synthetic oligonucleotide
cgaaaggatctacgcttacgacttccaacc

SEQ ID NO: 173639 - DNA, 30 bp, Artificial Sequence
  Synthetic oligonucleotide
acctgcgagtagccacacaaggcagcaacc

SEQ ID NO: 173640 - DNA, 30 bp, Artificial Sequence
  Synthetic oligonucleotide
tgcgctggtgctaccaattgaaaggcaacc

SEQ ID NO: 173641 - DNA, 30 bp, Artificial Sequence
  Synthetic oligonucleotide
gttcacagggtcagtccgtatagggcaacc

SEQ ID NO: 173642 - DNA, 30 bp, Artificial Sequence
  Synthetic oligonucleotide
ccgctggggcaaggcatgatagtggcaacc

SEQ ID NO: 173643 - DNA, 30 bp, Artificial Sequence
  Synthetic oligonucleotide
ttcacctagggcaggggaatccaatcaacc

SEQ ID NO: 173644 - DNA, 30 bp, Artificial Sequence
  Synthetic oligonucleotide
gtgggtcacgacaccgtaggtgagtcaacc

SEQ ID NO: 173645 - DNA, 30 bp, Artificial Sequence
  Synthetic oligonucleotide
aaaagagggagacgctctgtagggtcaacc

SEQ ID NO: 173646 - DNA, 30 bp, Artificial Sequence
  Synthetic oligonucleotide
agcagtgaccaacttcgaatgcattcaacc

SEQ ID NO: 173647 - DNA, 30 bp, Artificial Sequence
  Synthetic oligonucleotide
cgtgcgccaccacctcgaatttcaagaacc

SEQ ID NO: 173648 - DNA, 30 bp, Artificial Sequence
  Synthetic oligonucleotide
gcgccagaatgtggagaatgagacagaacc

SEQ ID NO: 173649 - DNA, 30 bp, Artificial Sequence
  Synthetic oligonucleotide
cggatcaaaacaaacattactccacgaacc

SEQ ID NO: 173650 - DNA, 30 bp, Artificial Sequence
  Synthetic oligonucleotide
tcatgagagcactctgtaccctcccgaacc

SEQ ID NO: 173651 - DNA, 30 bp, Artificial Sequence
  Synthetic oligonucleotide
gctagacgtgtcacgatgctatcgcgaacc

SEQ ID NO: 173652 - DNA, 30 bp, Artificial Sequence
  Synthetic oligonucleotide
tctggcaacgatatcgctccgtatcgaacc

SEQ ID NO: 173653 - DNA, 30 bp, Artificial Sequence
  Synthetic oligonucleotide
cagacagaggtcacacattcgggaggaacc

SEQ ID NO: 173654 - DNA, 31 bp, Artificial Sequence
  Synthetic oligonucleotide
tagaactatttcgaaaagggatcctggaacc

SEQ ID NO: 173655 - DNA, 30 bp, Artificial Sequence
  Synthetic oligonucleotide
acattaagtaacgcataaaaggactgaacc

SEQ ID NO: 173656 - DNA, 30 bp, Artificial Sequence
  Synthetic oligonucleotide
gtaatctcgattccgcaataatcttgaacc

SEQ ID NO: 173657 - DNA, 30 bp, Artificial Sequence
  Synthetic oligonucleotide
tcttctaacggcaagggcgcgtgactaacc

SEQ ID NO: 173658 - DNA, 30 bp, Artificial Sequence
  Synthetic oligonucleotide
gcgtgaagcttgaaaaggcatctgctaacc

SEQ ID NO: 173659 - DNA, 30 bp, Artificial Sequence
  Synthetic oligonucleotide
atcaaaacaggggtgctgagcgtgctaacc

SEQ ID NO: 173660 - DNA, 30 bp, Artificial Sequence
  Synthetic oligonucleotide
gtggaacatgccaggcccgagtctctaacc

SEQ ID NO: 173661 - DNA, 30 bp, Artificial Sequence
  Synthetic oligonucleotide
cgtggctttattagaattgatagtctaacc

SEQ ID NO: 173662 - DNA, 30 bp, Artificial Sequence
  Synthetic oligonucleotide
tgatcctgttgcaaatagcatcaagtaacc

SEQ ID NO: 173663 - DNA, 30 bp, Artificial Sequence
  Synthetic oligonucleotide
gcaaaaccgtgatagactagtgaagtaacc

SEQ ID NO: 173664 - DNA, 30 bp, Artificial Sequence
  Synthetic oligonucleotide
tatcgacaagactgagatccctaggtaacc

SEQ ID NO: 173665 - DNA, 30 bp, Artificial Sequence
  Synthetic oligonucleotide
cgtggctctgtggccatacacccattaacc

SEQ ID NO: 173666 - DNA, 30 bp, Artificial Sequence
  Synthetic oligonucleotide
atgacggctgtctggagtggtgtattaacc

SEQ ID NO: 173667 - DNA, 30 bp, Artificial Sequence
  Synthetic oligonucleotide
atcttgtgtgcgcaaaagaccactttaacc

SEQ ID NO: 173668 - DNA, 30 bp, Artificial Sequence
  Synthetic oligonucleotide
tcaataggcaatactcggggcccaaacacc

SEQ ID NO: 173669 - DNA, 30 bp, Artificial Sequence
  Synthetic oligonucleotide
gacaaatgatgtaaatcgtaacgaaacacc

SEQ ID NO: 173670 - DNA, 30 bp, Artificial Sequence
  Synthetic oligonucleotide
gtgacaccctgctatcaagcaagcaacacc

SEQ ID NO: 173671 - DNA, 30 bp, Artificial Sequence
  Synthetic oligonucleotide
acgatctctgttatcggtttggaacacacc

SEQ ID NO: 173672 - DNA, 30 bp, Artificial Sequence
  Synthetic oligonucleotide
tcgagtcaggcgtacatatgaggacacacc

SEQ ID NO: 173673 - DNA, 30 bp, Artificial Sequence
  Synthetic oligonucleotide
ccggatgatgggagagttcagcagcacacc

SEQ ID NO: 173674 - DNA, 30 bp, Artificial Sequence
  Synthetic oligonucleotide
atcggatgtgagtcccatatgtgagacacc

SEQ ID NO: 173675 - DNA, 30 bp, Artificial Sequence
  Synthetic oligonucleotide
cgagggtagattgaaacagatacggacacc

SEQ ID NO: 173676 - DNA, 30 bp, Artificial Sequence
  Synthetic oligonucleotide
tcgccttgccatggtacggtccactacacc

SEQ ID NO: 173677 - DNA, 30 bp, Artificial Sequence
  Synthetic oligonucleotide
ggggtgcccagacctattgaatagtacacc

SEQ ID NO: 173678 - DNA, 30 bp, Artificial Sequence
  Synthetic oligonucleotide
cgttgcctcaagtggccgggagcacccacc

SEQ ID NO: 173679 - DNA, 30 bp, Artificial Sequence
  Synthetic oligonucleotide
ttggcaacctgattgctgtcggcacccacc

SEQ ID NO: 173680 - DNA, 30 bp, Artificial Sequence
  Synthetic oligonucleotide
cgagaagaggggaagcaaagagttcccacc

SEQ ID NO: 173681 - DNA, 30 bp, Artificial Sequence
  Synthetic oligonucleotide
aatgagaaaccgggagtcgcccgatccacc

SEQ ID NO: 173682 - DNA, 30 bp, Artificial Sequence
  Synthetic oligonucleotide
ctggaactggtaggtcccttaaagagcacc

SEQ ID NO: 173683 - DNA, 30 bp, Artificial Sequence
  Synthetic oligonucleotide
gatctactgttaatgtttccacctagcacc

SEQ ID NO: 173684 - DNA, 30 bp, Artificial Sequence
  Synthetic oligonucleotide
agttggcaaaaatgtaacgctcgtagcacc

SEQ ID NO: 173685 - DNA, 30 bp, Artificial Sequence
  Synthetic oligonucleotide
ggttcaggggtgaatgatggggttagcacc

SEQ ID NO: 173686 - DNA, 30 bp, Artificial Sequence
  Synthetic oligonucleotide
tgattgtacacgcaacgcctaaaacgcacc

SEQ ID NO: 173687 - DNA, 30 bp, Artificial Sequence
  Synthetic oligonucleotide
cggctaatacagtgaaataccggacgcacc

SEQ ID NO: 173688 - DNA, 30 bp, Artificial Sequence
  Synthetic oligonucleotide
cctgtaggacagcttgcggaattgcgcacc

SEQ ID NO: 173689 - DNA, 30 bp, Artificial Sequence
  Synthetic oligonucleotide
tcccgcacaccgatccatcccaaaggcacc

SEQ ID NO: 173690 - DNA, 30 bp, Artificial Sequence
  Synthetic oligonucleotide
gcgagactgagactgcacctgtcgggcacc

SEQ ID NO: 173691 - DNA, 30 bp, Artificial Sequence
  Synthetic oligonucleotide
cactatatcgtgagtggcgatggtggcacc

SEQ ID NO: 173692 - DNA, 30 bp, Artificial Sequence
  Synthetic oligonucleotide
actttcttaaaaggtatagtcgtatgcacc

SEQ ID NO: 173693 - DNA, 30 bp, Artificial Sequence
  Synthetic oligonucleotide
caggtccggcggtcataatgcgactgcacc

SEQ ID NO: 173694 - DNA, 30 bp, Artificial Sequence
  Synthetic oligonucleotide
aggcatcgctcacaccacgggtcctgcacc

SEQ ID NO: 173695 - DNA, 30 bp, Artificial Sequence
  Synthetic oligonucleotide
ggtggttcaccttgctgccagccgtgcacc

SEQ ID NO: 173696 - DNA, 30 bp, Artificial Sequence
  Synthetic oligonucleotide
gatggctgtaaagggcatacaggttgcacc

SEQ ID NO: 173697 - DNA, 30 bp, Artificial Sequence
  Synthetic oligonucleotide
gcaccaccacgccacctgtttgacatcacc

SEQ ID NO: 173698 - DNA, 30 bp, Artificial Sequence
  Synthetic oligonucleotide
ttagtgggctaatctgaagaagggatcacc

SEQ ID NO: 173699 - DNA, 30 bp, Artificial Sequence
  Synthetic oligonucleotide
aaacctcaaatgggatacccccttatcacc

SEQ ID NO: 173700 - DNA, 31 bp, Artificial Sequence
  Synthetic oligonucleotide
acctgctgcggatggaccactgcttatcacc

SEQ ID NO: 173701 - DNA, 30 bp, Artificial Sequence
  Synthetic oligonucleotide
gcatcgacacattggtactttctcctcacc

SEQ ID NO: 173702 - DNA, 30 bp, Artificial Sequence
  Synthetic oligonucleotide
gcatcttgtgccttcgggtgggcggtcacc

SEQ ID NO: 173703 - DNA, 30 bp, Artificial Sequence
  Synthetic oligonucleotide
gggtgggcgaacaccggtgcaagattcacc

SEQ ID NO: 173704 - DNA, 30 bp, Artificial Sequence
  Synthetic oligonucleotide
gaattagccgggctggaaagtacgttcacc

SEQ ID NO: 173705 - DNA, 30 bp, Artificial Sequence
  Synthetic oligonucleotide
taactatgaggtggcttgccccgaaagacc

SEQ ID NO: 173706 - DNA, 30 bp, Artificial Sequence
  Synthetic oligonucleotide
atcaggtagtatacagggcacatgaagacc

SEQ ID NO: 173707 - DNA, 30 bp, Artificial Sequence
  Synthetic oligonucleotide
ataccagatcacccggggcttcagcagacc

SEQ ID NO: 173708 - DNA, 30 bp, Artificial Sequence
  Synthetic oligonucleotide
ttgatgcctcgttaggaataggagcagacc

SEQ ID NO: 173709 - DNA, 30 bp, Artificial Sequence
  Synthetic oligonucleotide
atgtcaccgttgagaggctgaaccgagacc

SEQ ID NO: 173710 - DNA, 30 bp, Artificial Sequence
  Synthetic oligonucleotide
tgtctgaactcttctacaacagaatagacc

SEQ ID NO: 173711 - DNA, 30 bp, Artificial Sequence
  Synthetic oligonucleotide
gtccataaaaacgtttgagatgactagacc

SEQ ID NO: 173712 - DNA, 30 bp, Artificial Sequence
  Synthetic oligonucleotide
catcgggaggtcgtggtaacttgctagacc

SEQ ID NO: 173713 - DNA, 30 bp, Artificial Sequence
  Synthetic oligonucleotide
aatctgatcccaaggtgtatgtagtagacc

SEQ ID NO: 173714 - DNA, 30 bp, Artificial Sequence
  Synthetic oligonucleotide
gacctgaacagatagatctgatgttagacc

SEQ ID NO: 173715 - DNA, 30 bp, Artificial Sequence
  Synthetic oligonucleotide
agaatgcttctaacccgctagagcacgacc

SEQ ID NO: 173716 - DNA, 30 bp, Artificial Sequence
  Synthetic oligonucleotide
ccacttaggggatagtgggtcaggacgacc

SEQ ID NO: 173717 - DNA, 30 bp, Artificial Sequence
  Synthetic oligonucleotide
ctcatattaggcggacttttggatacgacc

SEQ ID NO: 173718 - DNA, 30 bp, Artificial Sequence
  Synthetic oligonucleotide
caactacaagaccatttattatgcccgacc

SEQ ID NO: 173719 - DNA, 30 bp, Artificial Sequence
  Synthetic oligonucleotide
tcgctcagacgtattggagttagtccgacc

SEQ ID NO: 173720 - DNA, 30 bp, Artificial Sequence
  Synthetic oligonucleotide
tgatttgaagatgtgtccatctccgcgacc

SEQ ID NO: 173721 - DNA, 30 bp, Artificial Sequence
  Synthetic oligonucleotide
atcaagcatagcaagctaatggtcgcgacc

SEQ ID NO: 173722 - DNA, 30 bp, Artificial Sequence
  Synthetic oligonucleotide
gacgttaaatatcatcgacacgcggcgacc

SEQ ID NO: 173723 - DNA, 30 bp, Artificial Sequence
  Synthetic oligonucleotide
tcattaatacatggcgaatgaactgcgacc

SEQ ID NO: 173724 - DNA, 30 bp, Artificial Sequence
  Synthetic oligonucleotide
tgcgcacgaacgggtccccagtcgtcgacc

SEQ ID NO: 173725 - DNA, 30 bp, Artificial Sequence
  Synthetic oligonucleotide
atccaagggtcattgggatgagaaaggacc

SEQ ID NO: 173726 - DNA, 30 bp, Artificial Sequence
  Synthetic oligonucleotide
ccttacacggtcaagattgattcaaggacc

SEQ ID NO: 173727 - DNA, 30 bp, Artificial Sequence
  Synthetic oligonucleotide
gtgttcaattgttatacacagggaaggacc

SEQ ID NO: 173728 - DNA, 30 bp, Artificial Sequence
  Synthetic oligonucleotide
cgtttcaacaccaatgtgtcgagacggacc

SEQ ID NO: 173729 - DNA, 30 bp, Artificial Sequence
  Synthetic oligonucleotide
aggcctgaacggcaggtgctattccggacc

SEQ ID NO: 173730 - DNA, 30 bp, Artificial Sequence
  Synthetic oligonucleotide
gagacttgatagacatggaggagtcggacc

SEQ ID NO: 173731 - DNA, 30 bp, Artificial Sequence
  Synthetic oligonucleotide
atccgcgcccaataccttatacgggggacc

SEQ ID NO: 173732 - DNA, 30 bp, Artificial Sequence
  Synthetic oligonucleotide
gggtttgaggcctctccttcccgggggacc

SEQ ID NO: 173733 - DNA, 30 bp, Artificial Sequence
  Synthetic oligonucleotide
ccggggtaatagcctccgcccaaatggacc

SEQ ID NO: 173734 - DNA, 30 bp, Artificial Sequence
  Synthetic oligonucleotide
tgaacaagaaagtgttacgcacgatggacc

SEQ ID NO: 173735 - DNA, 30 bp, Artificial Sequence
  Synthetic oligonucleotide
cctggcaaagttggggccttattatggacc

SEQ ID NO: 173736 - DNA, 30 bp, Artificial Sequence
  Synthetic oligonucleotide
gcggcacatatgaacaatagaggttggacc

SEQ ID NO: 173737 - DNA, 30 bp, Artificial Sequence
  Synthetic oligonucleotide
ggtactgacatcataaaagattgttggacc

SEQ ID NO: 173738 - DNA, 30 bp, Artificial Sequence
  Synthetic oligonucleotide
tggaataggtcgactgaacgaaaaatgacc

SEQ ID NO: 173739 - DNA, 30 bp, Artificial Sequence
  Synthetic oligonucleotide
gaaacggagggcatccgacaaagtatgacc

SEQ ID NO: 173740 - DNA, 30 bp, Artificial Sequence
  Synthetic oligonucleotide
cagtacatagctcaatggtgtaaactgacc

SEQ ID NO: 173741 - DNA, 30 bp, Artificial Sequence
  Synthetic oligonucleotide
gctccgacggcctggtttaagagactgacc

SEQ ID NO: 173742 - DNA, 30 bp, Artificial Sequence
  Synthetic oligonucleotide
cctctagcttaatttcagcgagatctgacc

SEQ ID NO: 173743 - DNA, 30 bp, Artificial Sequence
  Synthetic oligonucleotide
gcgaatactatatgatgtcatgatctgacc

SEQ ID NO: 173744 - DNA, 30 bp, Artificial Sequence
  Synthetic oligonucleotide
gagcgagtatctatgtgtgtaagggtgacc

SEQ ID NO: 173745 - DNA, 30 bp, Artificial Sequence
  Synthetic oligonucleotide
atagtgcataccgcaagatagtaattgacc

SEQ ID NO: 173746 - DNA, 30 bp, Artificial Sequence
  Synthetic oligonucleotide
cctgtgattctcaatcttgcccgattgacc

SEQ ID NO: 173747 - DNA, 30 bp, Artificial Sequence
  Synthetic oligonucleotide
gcgcccgtaagattcccaggaaacttgacc

SEQ ID NO: 173748 - DNA, 30 bp, Artificial Sequence
  Synthetic oligonucleotide
cataaacacggtcaatgaatggacaatacc

SEQ ID NO: 173749 - DNA, 30 bp, Artificial Sequence
  Synthetic oligonucleotide
cggcagtcaaatagatccttcgcgaatacc

SEQ ID NO: 173750 - DNA, 30 bp, Artificial Sequence
  Synthetic oligonucleotide
aacggtttaaggtgaaaccagactaatacc

SEQ ID NO: 173751 - DNA, 30 bp, Artificial Sequence
  Synthetic oligonucleotide
gtgacgacaggagtaggaaacggacatacc

SEQ ID NO: 173752 - DNA, 30 bp, Artificial Sequence
  Synthetic oligonucleotide
gggcgcccgcgtcttctgattgtgcatacc

SEQ ID NO: 173753 - DNA, 30 bp, Artificial Sequence
  Synthetic oligonucleotide
tagtctagtagagccaaagaacgagatacc

SEQ ID NO: 173754 - DNA, 30 bp, Artificial Sequence
  Synthetic oligonucleotide
caaggttcagtgcgtgggtgtaaggatacc

SEQ ID NO: 173755 - DNA, 30 bp, Artificial Sequence
  Synthetic oligonucleotide
cgagtaggatcgtgcccagagtcggatacc

SEQ ID NO: 173756 - DNA, 30 bp, Artificial Sequence
  Synthetic oligonucleotide
cctagagcgcaaacaacgtggcgatatacc

SEQ ID NO: 173757 - DNA, 30 bp, Artificial Sequence
  Synthetic oligonucleotide
ggacttagttggctactcattcactatacc

SEQ ID NO: 173758 - DNA, 30 bp, Artificial Sequence
  Synthetic oligonucleotide
gagatgataaatcgtaaggtgtactatacc

SEQ ID NO: 173759 - DNA, 30 bp, Artificial Sequence
  Synthetic oligonucleotide
gataggctttgaaccggactgatctatacc

SEQ ID NO: 173760 - DNA, 30 bp, Artificial Sequence
  Synthetic oligonucleotide
tcgcatcaactgcgaccatcgcattatacc

SEQ ID NO: 173761 - DNA, 30 bp, Artificial Sequence
  Synthetic oligonucleotide
tacgtaagataccaacaggcgggttatacc

SEQ ID NO: 173762 - DNA, 30 bp, Artificial Sequence
  Synthetic oligonucleotide
gctgaggttagccacagagggataactacc

SEQ ID NO: 173763 - DNA, 30 bp, Artificial Sequence
  Synthetic oligonucleotide
accccacactgacccttgccaaacactacc

SEQ ID NO: 173764 - DNA, 30 bp, Artificial Sequence
  Synthetic oligonucleotide
cagtaaagatttactgggagaattactacc

SEQ ID NO: 173765 - DNA, 30 bp, Artificial Sequence
  Synthetic oligonucleotide
tactattgaggaacggggcaaggccctacc

SEQ ID NO: 173766 - DNA, 30 bp, Artificial Sequence
  Synthetic oligonucleotide
tttacaggatgggggaaggagaagcctacc

SEQ ID NO: 173767 - DNA, 30 bp, Artificial Sequence
  Synthetic oligonucleotide
gcgcaacgtgcaacagtacaaggggctacc

SEQ ID NO: 173768 - DNA, 30 bp, Artificial Sequence
  Synthetic oligonucleotide
cacgaaagacaaggaattaagtggtctacc

SEQ ID NO: 173769 - DNA, 30 bp, Artificial Sequence
  Synthetic oligonucleotide
ctgccgaggatccaggaattaccccgtacc

SEQ ID NO: 173770 - DNA, 30 bp, Artificial Sequence
  Synthetic oligonucleotide
acgtattacaacgctagctttgcccgtacc

SEQ ID NO: 173771 - DNA, 30 bp, Artificial Sequence
  Synthetic oligonucleotide
cggcgaccccagggagtgtttgctcgtacc

SEQ ID NO: 173772 - DNA, 30 bp, Artificial Sequence
  Synthetic oligonucleotide
ctgtatccaaagtttatgagagtctgtacc

SEQ ID NO: 173773 - DNA, 30 bp, Artificial Sequence
  Synthetic oligonucleotide
aaagactgcccatccataattaggtgtacc

SEQ ID NO: 173774 - DNA, 30 bp, Artificial Sequence
  Synthetic oligonucleotide
gccgacttgggcatttgtcagtaaattacc

SEQ ID NO: 173775 - DNA, 30 bp, Artificial Sequence
  Synthetic oligonucleotide
ggggatcagggtggcttccaccagattacc

SEQ ID NO: 173776 - DNA, 30 bp, Artificial Sequence
  Synthetic oligonucleotide
acataagaatgtccgatattgatgattacc

SEQ ID NO: 173777 - DNA, 30 bp, Artificial Sequence
  Synthetic oligonucleotide
tcactgcagagacaaggacgcgtgattacc

SEQ ID NO: 173778 - DNA, 30 bp, Artificial Sequence
  Synthetic oligonucleotide
cttggacccacaacagggaagactattacc

SEQ ID NO: 173779 - DNA, 30 bp, Artificial Sequence
  Synthetic oligonucleotide
aacaagaacacaagtcgggtgtgtattacc

SEQ ID NO: 173780 - DNA, 30 bp, Artificial Sequence
  Synthetic oligonucleotide
atcatataggagcttgttagaaaccttacc

SEQ ID NO: 173781 - DNA, 30 bp, Artificial Sequence
  Synthetic oligonucleotide
gccattgtcgagtccgctcacgacgttacc

SEQ ID NO: 173782 - DNA, 30 bp, Artificial Sequence
  Synthetic oligonucleotide
cgataggcaaatgttaggatacattttacc

SEQ ID NO: 173783 - DNA, 30 bp, Artificial Sequence
  Synthetic oligonucleotide
accaagcagtgtattcaacacgtcaaaccc

SEQ ID NO: 173784 - DNA, 30 bp, Artificial Sequence
  Synthetic oligonucleotide
acgccgtttggggctgggacggtgaaaccc

SEQ ID NO: 173785 - DNA, 30 bp, Artificial Sequence
  Synthetic oligonucleotide
ctccatttaattgtggtaggccgtaaaccc

SEQ ID NO: 173786 - DNA, 30 bp, Artificial Sequence
  Synthetic oligonucleotide
ctcgtcgatcgtacgagaagcagacaaccc

SEQ ID NO: 173787 - DNA, 30 bp, Artificial Sequence
  Synthetic oligonucleotide
aaacggacttggtaaacggactagcaaccc

SEQ ID NO: 173788 - DNA, 30 bp, Artificial Sequence
  Synthetic oligonucleotide
gaataggggagcaaattcggcttgcaaccc

SEQ ID NO: 173789 - DNA, 30 bp, Artificial Sequence
  Synthetic oligonucleotide
gtcctgtgaaaacgacctcgtcctcaaccc

SEQ ID NO: 173790 - DNA, 30 bp, Artificial Sequence
  Synthetic oligonucleotide
gatcggccgtggcaccaatacgaagaaccc

SEQ ID NO: 173791 - DNA, 30 bp, Artificial Sequence
  Synthetic oligonucleotide
cgccaaacagttaccatgagtggtgaaccc

SEQ ID NO: 173792 - DNA, 30 bp, Artificial Sequence
  Synthetic oligonucleotide
gagagctagaattgataagtgtagacaccc

SEQ ID NO: 173793 - DNA, 30 bp, Artificial Sequence
  Synthetic oligonucleotide
ccaaacttttcgtagacatagagaccaccc

SEQ ID NO: 173794 - DNA, 31 bp, Artificial Sequence
  Synthetic oligonucleotide
tatggggaactcattgcgcggtttcgcaccc

SEQ ID NO: 173795 - DNA, 30 bp, Artificial Sequence
  Synthetic oligonucleotide
agtctatcgaactccggatggacatcaccc

SEQ ID NO: 173796 - DNA, 30 bp, Artificial Sequence
  Synthetic oligonucleotide
catcaacctacctaatattaaatctcaccc

SEQ ID NO: 173797 - DNA, 30 bp, Artificial Sequence
  Synthetic oligonucleotide
aggagccacagttactataaagcttcaccc

SEQ ID NO: 173798 - DNA, 30 bp, Artificial Sequence
  Synthetic oligonucleotide
gtgactatcccagagacctgcggcagaccc

SEQ ID NO: 173799 - DNA, 30 bp, Artificial Sequence
  Synthetic oligonucleotide
gcctgagtagcgccggctgatcggagaccc

SEQ ID NO: 173800 - DNA, 30 bp, Artificial Sequence
  Synthetic oligonucleotide
ataaccggaaattaaagatgaagacgaccc

SEQ ID NO: 173801 - DNA, 30 bp, Artificial Sequence
  Synthetic oligonucleotide
cagacaatcgcccggtgcgaacgacgaccc

SEQ ID NO: 173802 - DNA, 30 bp, Artificial Sequence
  Synthetic oligonucleotide
tgctcagccaaattaagagggtgaggaccc

SEQ ID NO: 173803 - DNA, 30 bp, Artificial Sequence
  Synthetic oligonucleotide
gataccagaacacttacggggttaggaccc

SEQ ID NO: 173804 - DNA, 30 bp, Artificial Sequence
  Synthetic oligonucleotide
acaggccacggatcattgcgagagggaccc

SEQ ID NO: 173805 - DNA, 30 bp, Artificial Sequence
  Synthetic oligonucleotide
gcaaagtcggtagcagcaaacgaatgaccc

SEQ ID NO: 173806 - DNA, 30 bp, Artificial Sequence
  Synthetic oligonucleotide
gccataagcataggaagtgagatatgaccc

SEQ ID NO: 173807 - DNA, 30 bp, Artificial Sequence
  Synthetic oligonucleotide
aaatataaggaggtcttcccggcctgaccc

SEQ ID NO: 173808 - DNA, 30 bp, Artificial Sequence
  Synthetic oligonucleotide
tgatggaatgcttgtatgctcagaataccc

SEQ ID NO: 173809 - DNA, 30 bp, Artificial Sequence
  Synthetic oligonucleotide
gccgaagggactgactctaggggtctaccc

SEQ ID NO: 173810 - DNA, 30 bp, Artificial Sequence
  Synthetic oligonucleotide
tggaggtagaaccgcaacatagaagtaccc

SEQ ID NO: 173811 - DNA, 30 bp, Artificial Sequence
  Synthetic oligonucleotide
gaatactaagtccttactaaggcggtaccc

SEQ ID NO: 173812 - DNA, 30 bp, Artificial Sequence
  Synthetic oligonucleotide
ttacagcgtggtaaaaatctcactgtaccc

SEQ ID NO: 173813 - DNA, 30 bp, Artificial Sequence
  Synthetic oligonucleotide
caccatcccaggctacggatcccattaccc

SEQ ID NO: 173814 - DNA, 30 bp, Artificial Sequence
  Synthetic oligonucleotide
tcttatcaacagcaccctctcgggttaccc

SEQ ID NO: 173815 - DNA, 30 bp, Artificial Sequence
  Synthetic oligonucleotide
caacggagaattgaagaaactttgttaccc

SEQ ID NO: 173816 - DNA, 30 bp, Artificial Sequence
  Synthetic oligonucleotide
gaggactcaaaaataaaggtaaaaaacccc

SEQ ID NO: 173817 - DNA, 30 bp, Artificial Sequence
  Synthetic oligonucleotide
aaggggttcgtagtctcgcgtgtcaacccc

SEQ ID NO: 173818 - DNA, 30 bp, Artificial Sequence
  Synthetic oligonucleotide
tgagcaacctatacgttgggtgggaacccc

SEQ ID NO: 173819 - DNA, 30 bp, Artificial Sequence
  Synthetic oligonucleotide
acgagaacgggaaagtgccggtataacccc

SEQ ID NO: 173820 - DNA, 30 bp, Artificial Sequence
  Synthetic oligonucleotide
taactagttagtacagactgacgtcacccc

SEQ ID NO: 173821 - DNA, 30 bp, Artificial Sequence
  Synthetic oligonucleotide
tcggtaccatatcagtgtgccgtagacccc

SEQ ID NO: 173822 - DNA, 30 bp, Artificial Sequence
  Synthetic oligonucleotide
aactcgcaatcaatagtatggggtgacccc

SEQ ID NO: 173823 - DNA, 30 bp, Artificial Sequence
  Synthetic oligonucleotide
cacaattatggatcatatctaggctacccc

SEQ ID NO: 173824 - DNA, 30 bp, Artificial Sequence
  Synthetic oligonucleotide
gacagaacaatgggtgtccaatgctacccc

SEQ ID NO: 173825 - DNA, 30 bp, Artificial Sequence
  Synthetic oligonucleotide
ttaacgatgacactttaagcaggacccccc

SEQ ID NO: 173826 - DNA, 30 bp, Artificial Sequence
  Synthetic oligonucleotide
ttatcgcccaaagtaacgaagtggcccccc

SEQ ID NO: 173827 - DNA, 30 bp, Artificial Sequence
  Synthetic oligonucleotide
tgcacatcaatccagaaggcaaaatccccc

SEQ ID NO: 173828 - DNA, 30 bp, Artificial Sequence
  Synthetic oligonucleotide
ggatcgggtgatcttgtccctatcagcccc

SEQ ID NO: 173829 - DNA, 30 bp, Artificial Sequence
  Synthetic oligonucleotide
aagggtactgtatgcatccacgtgagcccc

SEQ ID NO: 173830 - DNA, 30 bp, Artificial Sequence
  Synthetic oligonucleotide
ctataaattcatcgaaagggcgcccgcccc

SEQ ID NO: 173831 - DNA, 30 bp, Artificial Sequence
  Synthetic oligonucleotide
cagcacccaatgtcggagggcacgcgcccc

SEQ ID NO: 173832 - DNA, 30 bp, Artificial Sequence
  Synthetic oligonucleotide
actacaaggacgctgtcgtactatcgcccc

SEQ ID NO: 173833 - DNA, 30 bp, Artificial Sequence
  Synthetic oligonucleotide
cggagagcaggctatcgtctacaatgcccc

SEQ ID NO: 173834 - DNA, 30 bp, Artificial Sequence
  Synthetic oligonucleotide
cagcacagaaccagagataggctatgcccc

SEQ ID NO: 173835 - DNA, 30 bp, Artificial Sequence
  Synthetic oligonucleotide
gctttatcctgtgacacagggccctgcccc

SEQ ID NO: 173836 - DNA, 30 bp, Artificial Sequence
  Synthetic oligonucleotide
ctcgctgcgtgataagcgtgtcgctgcccc

SEQ ID NO: 173837 - DNA, 30 bp, Artificial Sequence
  Synthetic oligonucleotide
cagtttcggttgatgtcaactaaaatcccc

SEQ ID NO: 173838 - DNA, 30 bp, Artificial Sequence
  Synthetic oligonucleotide
gaagaaaagtaccagatccataagatcccc

SEQ ID NO: 173839 - DNA, 30 bp, Artificial Sequence
  Synthetic oligonucleotide
tatgggtctcatatgacaatgaggatcccc

SEQ ID NO: 173840 - DNA, 30 bp, Artificial Sequence
  Synthetic oligonucleotide
atcagagcacacaacctgctgcggatcccc

SEQ ID NO: 173841 - DNA, 30 bp, Artificial Sequence
  Synthetic oligonucleotide
atacggcctatcaaccggatgtatatcccc

SEQ ID NO: 173842 - DNA, 30 bp, Artificial Sequence
  Synthetic oligonucleotide
agattcacactgatcccatccctactcccc

SEQ ID NO: 173843 - DNA, 30 bp, Artificial Sequence
  Synthetic oligonucleotide
taccgcctcactcgaatgaaaccggtcccc

SEQ ID NO: 173844 - DNA, 30 bp, Artificial Sequence
  Synthetic oligonucleotide
agaagatcatgtccacaactgggggtcccc

SEQ ID NO: 173845 - DNA, 30 bp, Artificial Sequence
  Synthetic oligonucleotide
ccgtgtaacacgaactggcttctattcccc

SEQ ID NO: 173846 - DNA, 30 bp, Artificial Sequence
  Synthetic oligonucleotide
gttaaaggtgcgcgcagttagtgaaagccc

SEQ ID NO: 173847 - DNA, 30 bp, Artificial Sequence
  Synthetic oligonucleotide
caggagcgtcaagtgattcagttaaagccc

SEQ ID NO: 173848 - DNA, 30 bp, Artificial Sequence
  Synthetic oligonucleotide
cgtggagacaagcccgggacactacagccc

SEQ ID NO: 173849 - DNA, 30 bp, Artificial Sequence
  Synthetic oligonucleotide
tgtgtcctgttaggctagaaaaaccagccc

SEQ ID NO: 173850 - DNA, 30 bp, Artificial Sequence
  Synthetic oligonucleotide
agcgaggaatgttttaaacaagaagagccc

SEQ ID NO: 173851 - DNA, 30 bp, Artificial Sequence
  Synthetic oligonucleotide
caagtttagagtaatgtgtctggtgagccc

SEQ ID NO: 173852 - DNA, 30 bp, Artificial Sequence
  Synthetic oligonucleotide
tgtacggaaacagacatagttggtgagccc

SEQ ID NO: 173853 - DNA, 30 bp, Artificial Sequence
  Synthetic oligonucleotide
aacttctgtgtgggggagggtattgagccc

SEQ ID NO: 173854 - DNA, 30 bp, Artificial Sequence
  Synthetic oligonucleotide
agatgaagagggccgcaacggtaatagccc

SEQ ID NO: 173855 - DNA, 30 bp, Artificial Sequence
  Synthetic oligonucleotide
ttatacgagggtcatcctagtgactagccc

SEQ ID NO: 173856 - DNA, 30 bp, Artificial Sequence
  Synthetic oligonucleotide
acgattctgcagatcattggtgactagccc

SEQ ID NO: 173857 - DNA, 30 bp, Artificial Sequence
  Synthetic oligonucleotide
agcgcaatcaaaacactggataatacgccc

SEQ ID NO: 173858 - DNA, 30 bp, Artificial Sequence
  Synthetic oligonucleotide
tcggtcacgttaaaacaaaatcgcccgccc

SEQ ID NO: 173859 - DNA, 30 bp, Artificial Sequence
  Synthetic oligonucleotide
caaaagtaagctcattcgagttcgccgccc

SEQ ID NO: 173860 - DNA, 31 bp, Artificial Sequence
  Synthetic oligonucleotide
gccacgccgttgctgccctccgttagcgccc

SEQ ID NO: 173861 - DNA, 30 bp, Artificial Sequence
  Synthetic oligonucleotide
gctaaagaatgccttatagtatacgcgccc

SEQ ID NO: 173862 - DNA, 30 bp, Artificial Sequence
  Synthetic oligonucleotide
cccggcaaatctcttcacttacctgcgccc

SEQ ID NO: 173863 - DNA, 30 bp, Artificial Sequence
  Synthetic oligonucleotide
gttccgccacgcatgataatcgcatcgccc

SEQ ID NO: 173864 - DNA, 30 bp, Artificial Sequence
  Synthetic oligonucleotide
aaagcgtcaagccacagtgacacgtcgccc

SEQ ID NO: 173865 - DNA, 30 bp, Artificial Sequence
  Synthetic oligonucleotide
tgaaatctgcagtgagaacaggtgtcgccc

SEQ ID NO: 173866 - DNA, 30 bp, Artificial Sequence
  Synthetic oligonucleotide
agcgctttatgttagtaactgtgttcgccc

SEQ ID NO: 173867 - DNA, 30 bp, Artificial Sequence
  Synthetic oligonucleotide
atacggtagatgcacgttttaaacaggccc

SEQ ID NO: 173868 - DNA, 30 bp, Artificial Sequence
  Synthetic oligonucleotide
aaagcagtggggattccaaggaagaggccc

SEQ ID NO: 173869 - DNA, 30 bp, Artificial Sequence
  Synthetic oligonucleotide
agtagcggcacgcatacaattccgaggccc

SEQ ID NO: 173870 - DNA, 30 bp, Artificial Sequence
  Synthetic oligonucleotide
agtgatgtctaaccggggggttataggccc

SEQ ID NO: 173871 - DNA, 30 bp, Artificial Sequence
  Synthetic oligonucleotide
aacatattcgggcgatgaacgtgtaggccc

SEQ ID NO: 173872 - DNA, 30 bp, Artificial Sequence
  Synthetic oligonucleotide
cagaggaggttaggctcaaaccaacggccc

SEQ ID NO: 173873 - DNA, 30 bp, Artificial Sequence
  Synthetic oligonucleotide
catctgctgtgtctctgaatataccggccc

SEQ ID NO: 173874 - DNA, 30 bp, Artificial Sequence
  Synthetic oligonucleotide
agtgttccacttggaagtttagtgcggccc

SEQ ID NO: 173875 - DNA, 30 bp, Artificial Sequence
  Synthetic oligonucleotide
acagatcaaagaacatcaggcaatcggccc

SEQ ID NO: 173876 - DNA, 30 bp, Artificial Sequence
  Synthetic oligonucleotide
ctaacttacgaaggaagctggtctgggccc

SEQ ID NO: 173877 - DNA, 30 bp, Artificial Sequence
  Synthetic oligonucleotide
ccgaatctaaggaagaatgggcttgggccc

SEQ ID NO: 173878 - DNA, 30 bp, Artificial Sequence
  Synthetic oligonucleotide
agggtagggtttgtggacacctcatggccc

SEQ ID NO: 173879 - DNA, 30 bp, Artificial Sequence
  Synthetic oligonucleotide
tgctctgtatctcgggacaatatcatgccc

SEQ ID NO: 173880 - DNA, 30 bp, Artificial Sequence
  Synthetic oligonucleotide
ccgccaacaagcatggaaccatggatgccc

SEQ ID NO: 173881 - DNA, 30 bp, Artificial Sequence
  Synthetic oligonucleotide
ttcacccatgaaagatgtcacacactgccc

SEQ ID NO: 173882 - DNA, 30 bp, Artificial Sequence
  Synthetic oligonucleotide
gccacctgaacgtaaaacgggccactgccc

SEQ ID NO: 173883 - DNA, 30 bp, Artificial Sequence
  Synthetic oligonucleotide
gatcacattgatttaatgcatagagtgccc

SEQ ID NO: 173884 - DNA, 30 bp, Artificial Sequence
  Synthetic oligonucleotide
tcctcgtgtgatatccctccaaatgtgccc

SEQ ID NO: 173885 - DNA, 30 bp, Artificial Sequence
  Synthetic oligonucleotide
aatggtagaccgtcaacaaacagattgccc

SEQ ID NO: 173886 - DNA, 30 bp, Artificial Sequence
  Synthetic oligonucleotide
gcggagttcggtcccgtatgacgattgccc

SEQ ID NO: 173887 - DNA, 30 bp, Artificial Sequence
  Synthetic oligonucleotide
gctagaggtaatctagcttaccatttgccc

SEQ ID NO: 173888 - DNA, 30 bp, Artificial Sequence
  Synthetic oligonucleotide
gtgccgaggtcgctcgtcactaacaatccc

SEQ ID NO: 173889 - DNA, 30 bp, Artificial Sequence
  Synthetic oligonucleotide
ctcgtgaaatctttcaagtttaacaatccc

SEQ ID NO: 173890 - DNA, 30 bp, Artificial Sequence
  Synthetic oligonucleotide
acagataaagccgcacagactaggaatccc

SEQ ID NO: 173891 - DNA, 30 bp, Artificial Sequence
  Synthetic oligonucleotide
cggcaataaacggggcagagtactcatccc

SEQ ID NO: 173892 - DNA, 30 bp, Artificial Sequence
  Synthetic oligonucleotide
tgtcaaggaactcagagctccacagatccc

SEQ ID NO: 173893 - DNA, 30 bp, Artificial Sequence
  Synthetic oligonucleotide
taaagtgagcaactggaagcgagggatccc

SEQ ID NO: 173894 - DNA, 30 bp, Artificial Sequence
  Synthetic oligonucleotide
gcaggcggctgagtctgatatagggatccc

SEQ ID NO: 173895 - DNA, 30 bp, Artificial Sequence
  Synthetic oligonucleotide
accgtaatatggtgtcgaatgcgtgatccc

SEQ ID NO: 173896 - DNA, 30 bp, Artificial Sequence
  Synthetic oligonucleotide
cgctcgtactgatcgtaagatcgttatccc

SEQ ID NO: 173897 - DNA, 30 bp, Artificial Sequence
  Synthetic oligonucleotide
agagtagacgaaatagacacatgaactccc

SEQ ID NO: 173898 - DNA, 30 bp, Artificial Sequence
  Synthetic oligonucleotide
agcgagccgctctatcaagcatccactccc

SEQ ID NO: 173899 - DNA, 30 bp, Artificial Sequence
  Synthetic oligonucleotide
cgaattacacctccgcgcgaactcactccc

SEQ ID NO: 173900 - DNA, 30 bp, Artificial Sequence
  Synthetic oligonucleotide
atgaaacgagttgggtcgtagcagactccc

SEQ ID NO: 173901 - DNA, 30 bp, Artificial Sequence
  Synthetic oligonucleotide
gttcagctctttagagccaaagcgactccc

SEQ ID NO: 173902 - DNA, 30 bp, Artificial Sequence
  Synthetic oligonucleotide
acagcacaagagatcgtgctcccgtctccc

SEQ ID NO: 173903 - DNA, 30 bp, Artificial Sequence
  Synthetic oligonucleotide
ccgtatatcgcctaccgcccaataagtccc

SEQ ID NO: 173904 - DNA, 30 bp, Artificial Sequence
  Synthetic oligonucleotide
taccatttggcaggtcaaagattgagtccc

SEQ ID NO: 173905 - DNA, 30 bp, Artificial Sequence
  Synthetic oligonucleotide
taacaagactggttgcgtgcacgtagtccc

SEQ ID NO: 173906 - DNA, 30 bp, Artificial Sequence
  Synthetic oligonucleotide
gggcgaggtaggtattgatagcgacgtccc

SEQ ID NO: 173907 - DNA, 30 bp, Artificial Sequence
  Synthetic oligonucleotide
ccttcgtgactggccatttgctaccgtccc

SEQ ID NO: 173908 - DNA, 30 bp, Artificial Sequence
  Synthetic oligonucleotide
atgcgcggttttgtctttactgtccgtccc

SEQ ID NO: 173909 - DNA, 30 bp, Artificial Sequence
  Synthetic oligonucleotide
gcgaagaccatgatttattacctgcgtccc

SEQ ID NO: 173910 - DNA, 30 bp, Artificial Sequence
  Synthetic oligonucleotide
aactgccttcactttgacaacaatcgtccc

SEQ ID NO: 173911 - DNA, 30 bp, Artificial Sequence
  Synthetic oligonucleotide
ggtcacggatattcttgatagaatcgtccc

SEQ ID NO: 173912 - DNA, 30 bp, Artificial Sequence
  Synthetic oligonucleotide
gattcgctgccgaactatccaaagggtccc

SEQ ID NO: 173913 - DNA, 30 bp, Artificial Sequence
  Synthetic oligonucleotide
aaagattgggcttatacaccggggggtccc

SEQ ID NO: 173914 - DNA, 30 bp, Artificial Sequence
  Synthetic oligonucleotide
agtagtgtttatttcaatgggtggggtccc

SEQ ID NO: 173915 - DNA, 30 bp, Artificial Sequence
  Synthetic oligonucleotide
tctaacagcgatgcaatcctaaatggtccc

SEQ ID NO: 173916 - DNA, 30 bp, Artificial Sequence
  Synthetic oligonucleotide
ctaggtactatctgtacagtcaatggtccc

SEQ ID NO: 173917 - DNA, 30 bp, Artificial Sequence
  Synthetic oligonucleotide
ccggatccacattaatcggatcgtggtccc

SEQ ID NO: 173918 - DNA, 30 bp, Artificial Sequence
  Synthetic oligonucleotide
acgaatggagaggactttatcgttggtccc

SEQ ID NO: 173919 - DNA, 30 bp, Artificial Sequence
  Synthetic oligonucleotide
ggtgataggcattcgtatgtagaatgtccc

SEQ ID NO: 173920 - DNA, 30 bp, Artificial Sequence
  Synthetic oligonucleotide
atgaactggcggctctcatacctatgtccc

SEQ ID NO: 173921 - DNA, 30 bp, Artificial Sequence
  Synthetic oligonucleotide
acagtgagttagttggtgcgaaccattccc

SEQ ID NO: 173922 - DNA, 30 bp, Artificial Sequence
  Synthetic oligonucleotide
ctgtcgcgacccatggccattcatattccc

SEQ ID NO: 173923 - DNA, 30 bp, Artificial Sequence
  Synthetic oligonucleotide
ccggaatgttagagctacgtatgacttccc

SEQ ID NO: 173924 - DNA, 30 bp, Artificial Sequence
  Synthetic oligonucleotide
ttgatatgacgcggtacatcatcgcttccc

SEQ ID NO: 173925 - DNA, 30 bp, Artificial Sequence
  Synthetic oligonucleotide
taagagtagaacttggaagatagtcttccc

SEQ ID NO: 173926 - DNA, 30 bp, Artificial Sequence
  Synthetic oligonucleotide
tggtgagggatttataggagcgtagttccc

SEQ ID NO: 173927 - DNA, 30 bp, Artificial Sequence
  Synthetic oligonucleotide
tcacgcgggtaggtgctcagacaggttccc

SEQ ID NO: 173928 - DNA, 30 bp, Artificial Sequence
  Synthetic oligonucleotide
aggtccccttcgctgataatgaaatttccc

SEQ ID NO: 173929 - DNA, 30 bp, Artificial Sequence
  Synthetic oligonucleotide
gaactcccagtacggccgtccgagtttccc

SEQ ID NO: 173930 - DNA, 30 bp, Artificial Sequence
  Synthetic oligonucleotide
ccaatatcctcgaacgtagtgatcaaagcc

SEQ ID NO: 173931 - DNA, 30 bp, Artificial Sequence
  Synthetic oligonucleotide
aagggcgttatttgagtgtagttcaaagcc

SEQ ID NO: 173932 - DNA, 30 bp, Artificial Sequence
  Synthetic oligonucleotide
gaagtaacaatcgaatccgacgagaaagcc

SEQ ID NO: 173933 - DNA, 30 bp, Artificial Sequence
  Synthetic oligonucleotide
caccagttttgtccttacctcacccaagcc

SEQ ID NO: 173934 - DNA, 30 bp, Artificial Sequence
  Synthetic oligonucleotide
tattacaatgagcctcatacgtagcaagcc

SEQ ID NO: 173935 - DNA, 30 bp, Artificial Sequence
  Synthetic oligonucleotide
cgggggccataactacgctggaggcaagcc

SEQ ID NO: 173936 - DNA, 30 bp, Artificial Sequence
  Synthetic oligonucleotide
atgagggattatgttaggtcctgtcaagcc

SEQ ID NO: 173937 - DNA, 30 bp, Artificial Sequence
  Synthetic oligonucleotide
acccattctcgaaccggagggttagaagcc

SEQ ID NO: 173938 - DNA, 30 bp, Artificial Sequence
  Synthetic oligonucleotide
agggtttcggtgggcctgcggaacgaagcc

SEQ ID NO: 173939 - DNA, 30 bp, Artificial Sequence
  Synthetic oligonucleotide
tacacagcatatttgaagaaaagcgaagcc

SEQ ID NO: 173940 - DNA, 30 bp, Artificial Sequence
  Synthetic oligonucleotide
catcggtaataacagaagcaactataagcc

SEQ ID NO: 173941 - DNA, 30 bp, Artificial Sequence
  Synthetic oligonucleotide
gtagtaaacactgggataatcccctaagcc

SEQ ID NO: 173942 - DNA, 30 bp, Artificial Sequence
  Synthetic oligonucleotide
gctagcgcctcgtctaccggctagtaagcc

SEQ ID NO: 173943 - DNA, 30 bp, Artificial Sequence
  Synthetic oligonucleotide
aaacgggtagattaaaccggagattaagcc

SEQ ID NO: 173944 - DNA, 30 bp, Artificial Sequence
  Synthetic oligonucleotide
actcttacggacagaggtgggtattaagcc

SEQ ID NO: 173945 - DNA, 30 bp, Artificial Sequence
  Synthetic oligonucleotide
ggatataacgaaaggtgttagatttaagcc

SEQ ID NO: 173946 - DNA, 30 bp, Artificial Sequence
  Synthetic oligonucleotide
gtgagatcagtgcatgggatgtgaacagcc

SEQ ID NO: 173947 - DNA, 30 bp, Artificial Sequence
  Synthetic oligonucleotide
gatgttcattacaagaggtcagtaacagcc

SEQ ID NO: 173948 - DNA, 30 bp, Artificial Sequence
  Synthetic oligonucleotide
cgttgatcccatctgatagaggacacagcc

SEQ ID NO: 173949 - DNA, 30 bp, Artificial Sequence
  Synthetic oligonucleotide
cgttctaagttataaggcggactgccagcc

SEQ ID NO: 173950 - DNA, 30 bp, Artificial Sequence
  Synthetic oligonucleotide
accggacggcgtattatcgtggatccagcc

SEQ ID NO: 173951 - DNA, 30 bp, Artificial Sequence
  Synthetic oligonucleotide
acagacagctaatggctcgctactccagcc

SEQ ID NO: 173952 - DNA, 30 bp, Artificial Sequence
  Synthetic oligonucleotide
tccaactctggtggacaagtctaggcagcc

SEQ ID NO: 173953 - DNA, 30 bp, Artificial Sequence
  Synthetic oligonucleotide
ccggggagtagaagggctcagccatcagcc

SEQ ID NO: 173954 - DNA, 30 bp, Artificial Sequence
  Synthetic oligonucleotide
tatagagcttgattggactcgttctcagcc

SEQ ID NO: 173955 - DNA, 30 bp, Artificial Sequence
  Synthetic oligonucleotide
ttgcaaaaatcacggggggattggtcagcc

SEQ ID NO: 173956 - DNA, 30 bp, Artificial Sequence
  Synthetic oligonucleotide
ggtgaaatacggaatggcgctcgttcagcc

SEQ ID NO: 173957 - DNA, 30 bp, Artificial Sequence
  Synthetic oligonucleotide
taagataggaggctaaaaccagcaagagcc

SEQ ID NO: 173958 - DNA, 30 bp, Artificial Sequence
  Synthetic oligonucleotide
atcggaaacctgcgcgagaagatgagagcc

SEQ ID NO: 173959 - DNA, 30 bp, Artificial Sequence
  Synthetic oligonucleotide
ggtcagcacgtatgatcgactgctagagcc

SEQ ID NO: 173960 - DNA, 30 bp, Artificial Sequence
  Synthetic oligonucleotide
gaggattcacaagaaattagtacccgagcc

SEQ ID NO: 173961 - DNA, 30 bp, Artificial Sequence
  Synthetic oligonucleotide
aacgaggtgcgatcgctgaaccccggagcc

SEQ ID NO: 173962 - DNA, 30 bp, Artificial Sequence
  Synthetic oligonucleotide
gcatgtcgtattacaagaaggaatggagcc

SEQ ID NO: 173963 - DNA, 30 bp, Artificial Sequence
  Synthetic oligonucleotide
gtcggtaacctgcgtagggggtactgagcc

SEQ ID NO: 173964 - DNA, 30 bp, Artificial Sequence
  Synthetic oligonucleotide
actgggcacggacaaagatacacctgagcc

SEQ ID NO: 173965 - DNA, 30 bp, Artificial Sequence
  Synthetic oligonucleotide
aattaattatcgaataacagccgctgagcc

SEQ ID NO: 173966 - DNA, 30 bp, Artificial Sequence
  Synthetic oligonucleotide
acgtacgcacaattaaaagcctgctgagcc

SEQ ID NO: 173967 - DNA, 30 bp, Artificial Sequence
  Synthetic oligonucleotide
tgataaagaggagaggcagccatgtgagcc

SEQ ID NO: 173968 - DNA, 30 bp, Artificial Sequence
  Synthetic oligonucleotide
caagtgcagtgggaaataaccataatagcc

SEQ ID NO: 173969 - DNA, 30 bp, Artificial Sequence
  Synthetic oligonucleotide
tgtcgaagttaacaataggtaggcatagcc

SEQ ID NO: 173970 - DNA, 30 bp, Artificial Sequence
  Synthetic oligonucleotide
aacgccattgcaaccccaaaggtcatagcc

SEQ ID NO: 173971 - DNA, 30 bp, Artificial Sequence
  Synthetic oligonucleotide
gggcctcgtttaggcaagattaagatagcc

SEQ ID NO: 173972 - DNA, 30 bp, Artificial Sequence
  Synthetic oligonucleotide
aacaggatacggttcacatccgtgatagcc

SEQ ID NO: 173973 - DNA, 30 bp, Artificial Sequence
  Synthetic oligonucleotide
agccgcaaaattttgagttacaccctagcc

SEQ ID NO: 173974 - DNA, 30 bp, Artificial Sequence
  Synthetic oligonucleotide
tgtaacggccgtggaaactacagtctagcc

SEQ ID NO: 173975 - DNA, 30 bp, Artificial Sequence
  Synthetic oligonucleotide
cggctaaggcctctgcttcatcatgtagcc

SEQ ID NO: 173976 - DNA, 30 bp, Artificial Sequence
  Synthetic oligonucleotide
ttgaaggacgacaccagtagtattgtagcc

SEQ ID NO: 173977 - DNA, 30 bp, Artificial Sequence
  Synthetic oligonucleotide
gaaagggtggatacaagcgtaccattagcc

SEQ ID NO: 173978 - DNA, 29 bp, Artificial Sequence
  Synthetic oligonucleotide
gttcgctcacatcaccctcgtgaaacgcc

SEQ ID NO: 173979 - DNA, 30 bp, Artificial Sequence
  Synthetic oligonucleotide
cgaatggtgaacctttagcgttgaaacgcc

SEQ ID NO: 173980 - DNA, 30 bp, Artificial Sequence
  Synthetic oligonucleotide
taagaccggcctttaagggagttaaacgcc

SEQ ID NO: 173981 - DNA, 30 bp, Artificial Sequence
  Synthetic oligonucleotide
tcgtcatggatgacttctactacgaacgcc

SEQ ID NO: 173982 - DNA, 30 bp, Artificial Sequence
  Synthetic oligonucleotide
ttgctgtgagacagacacgcacctaacgcc

SEQ ID NO: 173983 - DNA, 30 bp, Artificial Sequence
  Synthetic oligonucleotide
cgcgatgggcaaacggtatgaggccacgcc

SEQ ID NO: 173984 - DNA, 30 bp, Artificial Sequence
  Synthetic oligonucleotide
cgaagacaatcgcgcccgaaatatcacgcc

SEQ ID NO: 173985 - DNA, 30 bp, Artificial Sequence
  Synthetic oligonucleotide
aagagagtataagaaaagggtattcacgcc

SEQ ID NO: 173986 - DNA, 30 bp, Artificial Sequence
  Synthetic oligonucleotide
ggtggaagccacttccccacggcgtacgcc

SEQ ID NO: 173987 - DNA, 30 bp, Artificial Sequence
  Synthetic oligonucleotide
gtgcctcctacgaagagtagaggttacgcc

SEQ ID NO: 173988 - DNA, 30 bp, Artificial Sequence
  Synthetic oligonucleotide
gggggctatcttaaaacacctataaccgcc

SEQ ID NO: 173989 - DNA, 30 bp, Artificial Sequence
  Synthetic oligonucleotide
ttgcatcaatcttcactatggtcacccgcc

SEQ ID NO: 173990 - DNA, 28 bp, Artificial Sequence
  Synthetic oligonucleotide
caggagtacgcgcatcatttcccccgcc

SEQ ID NO: 173991 - DNA, 30 bp, Artificial Sequence
  Synthetic oligonucleotide
aacgtcaagcaaaatagtatattatccgcc

SEQ ID NO: 173992 - DNA, 30 bp, Artificial Sequence
  Synthetic oligonucleotide
gtgcgaggatcacattagagactttccgcc

SEQ ID NO: 173993 - DNA, 30 bp, Artificial Sequence
  Synthetic oligonucleotide
gcggatggcccgctatcaactattagcgcc

SEQ ID NO: 173994 - DNA, 30 bp, Artificial Sequence
  Synthetic oligonucleotide
caactaggtagcggtcgcattccgcgcgcc

SEQ ID NO: 173995 - DNA, 30 bp, Artificial Sequence
  Synthetic oligonucleotide
gcaggataaccaaggttccctaggcgcgcc

SEQ ID NO: 173996 - DNA, 30 bp, Artificial Sequence
  Synthetic oligonucleotide
tgcaggtacacagtacatgctagcggcgcc

SEQ ID NO: 173997 - DNA, 30 bp, Artificial Sequence
  Synthetic oligonucleotide
cggatgctctcgtgattcagtcgtggcgcc

SEQ ID NO: 173998 - DNA, 30 bp, Artificial Sequence
  Synthetic oligonucleotide
cggagatcaggccaaaacaccgaatgcgcc

SEQ ID NO: 173999 - DNA, 30 bp, Artificial Sequence
  Synthetic oligonucleotide
caaattcgaacgaatacgatcacaatcgcc

SEQ ID NO: 174000 - DNA, 30 bp, Artificial Sequence
  Synthetic oligonucleotide
aagacatactgaatgctcggggtcatcgcc

SEQ ID NO: 174001 - DNA, 30 bp, Artificial Sequence
  Synthetic oligonucleotide
agaaggtcttggagcaggaagagtatcgcc

SEQ ID NO: 174002 - DNA, 30 bp, Artificial Sequence
  Synthetic oligonucleotide
cagcggaagaaggatggttaagtcaaggcc

SEQ ID NO: 174003 - DNA, 30 bp, Artificial Sequence
  Synthetic oligonucleotide
tcgggaatttgagtgatcaggacgaaggcc

SEQ ID NO: 174004 - DNA, 30 bp, Artificial Sequence
  Synthetic oligonucleotide
ggctgatcacttaaaaggccttcacaggcc

SEQ ID NO: 174005 - DNA, 30 bp, Artificial Sequence
  Synthetic oligonucleotide
aagttaagcacggacatatagttccaggcc

SEQ ID NO: 174006 - DNA, 30 bp, Artificial Sequence
  Synthetic oligonucleotide
tggattgcggatgcgtaggatgggcaggcc

SEQ ID NO: 174007 - DNA, 30 bp, Artificial Sequence
  Synthetic oligonucleotide
acgtgaatggagcaaaagtcctggcaggcc

SEQ ID NO: 174008 - DNA, 30 bp, Artificial Sequence
  Synthetic oligonucleotide
tcggcgatgacgtggtcagttgtgcaggcc

SEQ ID NO: 174009 - DNA, 30 bp, Artificial Sequence
  Synthetic oligonucleotide
catcgaataatgtagtctctatcagaggcc

SEQ ID NO: 174010 - DNA, 31 bp, Artificial Sequence
  Synthetic oligonucleotide
gccctgagaaggggatgctataggagaggcc

SEQ ID NO: 174011 - DNA, 30 bp, Artificial Sequence
  Synthetic oligonucleotide
atgtgggattggtaaaatcctggcgaggcc

SEQ ID NO: 174012 - DNA, 30 bp, Artificial Sequence
  Synthetic oligonucleotide
agcacaaggctacgtgtgtgactcgaggcc

SEQ ID NO: 174013 - DNA, 30 bp, Artificial Sequence
  Synthetic oligonucleotide
cgactagctaggtgtatccttacggaggcc

SEQ ID NO: 174014 - DNA, 30 bp, Artificial Sequence
  Synthetic oligonucleotide
ggtccaacatagtcaagtactatggaggcc

SEQ ID NO: 174015 - DNA, 30 bp, Artificial Sequence
  Synthetic oligonucleotide
aatgggctacggagggtccgatatgaggcc

SEQ ID NO: 174016 - DNA, 30 bp, Artificial Sequence
  Synthetic oligonucleotide
aggggtaagggttcagaggcaaggtaggcc

SEQ ID NO: 174017 - DNA, 30 bp, Artificial Sequence
  Synthetic oligonucleotide
tctagtgtaacacaggtctctaaaacggcc

SEQ ID NO: 174018 - DNA, 30 bp, Artificial Sequence
  Synthetic oligonucleotide
acatcaaagggttcattaggcgatacggcc

SEQ ID NO: 174019 - DNA, 30 bp, Artificial Sequence
  Synthetic oligonucleotide
tgtcacaccagaatgtagtgtattacggcc

SEQ ID NO: 174020 - DNA, 30 bp, Artificial Sequence
  Synthetic oligonucleotide
tgctgtcgattcagactcgtggccgcggcc

SEQ ID NO: 174021 - DNA, 30 bp, Artificial Sequence
  Synthetic oligonucleotide
ggagcggcgtcatgagtgtagatcgcggcc

SEQ ID NO: 174022 - DNA, 30 bp, Artificial Sequence
  Synthetic oligonucleotide
tacacacaggcacggaagtggttcgcggcc

SEQ ID NO: 174023 - DNA, 30 bp, Artificial Sequence
  Synthetic oligonucleotide
tcataaattcgtttcgtgttaaaggcggcc

SEQ ID NO: 174024 - DNA, 30 bp, Artificial Sequence
  Synthetic oligonucleotide
tagggcaccgcgatagatcttgctgcggcc

SEQ ID NO: 174025 - DNA, 30 bp, Artificial Sequence
  Synthetic oligonucleotide
cggtcaccccactgttaagagcgtgcggcc

SEQ ID NO: 174026 - DNA, 30 bp, Artificial Sequence
  Synthetic oligonucleotide
taagtttaggccaccactcaccgatcggcc

SEQ ID NO: 174027 - DNA, 30 bp, Artificial Sequence
  Synthetic oligonucleotide
tgggagcaccgaacgccgtgttaaagggcc

SEQ ID NO: 174028 - DNA, 30 bp, Artificial Sequence
  Synthetic oligonucleotide
gcgaatacggggtaaccgtgcaagagggcc

SEQ ID NO: 174029 - DNA, 30 bp, Artificial Sequence
  Synthetic oligonucleotide
gcgatgattgcgaaacgctggacgagggcc

SEQ ID NO: 174030 - DNA, 30 bp, Artificial Sequence
  Synthetic oligonucleotide
aaaggacgccttacaacgtaaactagggcc

SEQ ID NO: 174031 - DNA, 30 bp, Artificial Sequence
  Synthetic oligonucleotide
ctgcttgtttcgatctaaccagttcgggcc

SEQ ID NO: 174032 - DNA, 30 bp, Artificial Sequence
  Synthetic oligonucleotide
acaccaggtacaatctcgtcccaaggggcc

SEQ ID NO: 174033 - DNA, 30 bp, Artificial Sequence
  Synthetic oligonucleotide
acggaggcatgactggcgcccgaaggggcc

SEQ ID NO: 174034 - DNA, 30 bp, Artificial Sequence
  Synthetic oligonucleotide
tgatatatagctaacacgggggcaggggcc

SEQ ID NO: 174035 - DNA, 30 bp, Artificial Sequence
  Synthetic oligonucleotide
taggggaacaggaactcttgtagcggggcc

SEQ ID NO: 174036 - DNA, 30 bp, Artificial Sequence
  Synthetic oligonucleotide
atgaaaagttgagtggttcgacggggggcc

SEQ ID NO: 174037 - DNA, 30 bp, Artificial Sequence
  Synthetic oligonucleotide
ataacgacgatctgccggtgtagatgggcc

SEQ ID NO: 174038 - DNA, 30 bp, Artificial Sequence
  Synthetic oligonucleotide
caccggaatcagagcagtaggtcctgggcc

SEQ ID NO: 174039 - DNA, 30 bp, Artificial Sequence
  Synthetic oligonucleotide
gagttacatgagtgacagagaccgtgggcc

SEQ ID NO: 174040 - DNA, 30 bp, Artificial Sequence
  Synthetic oligonucleotide
cttccggcaagagcaagaagtgcgtgggcc

SEQ ID NO: 174041 - DNA, 30 bp, Artificial Sequence
  Synthetic oligonucleotide
gtgcaagcaagattctacacggggtgggcc

SEQ ID NO: 174042 - DNA, 30 bp, Artificial Sequence
  Synthetic oligonucleotide
agcagggggacgcctcacgttaaaatggcc

SEQ ID NO: 174043 - DNA, 30 bp, Artificial Sequence
  Synthetic oligonucleotide
tattgtcaggaacatgctttacttatggcc

SEQ ID NO: 174044 - DNA, 30 bp, Artificial Sequence
  Synthetic oligonucleotide
ttaggcacagaacatagatctaagctggcc

SEQ ID NO: 174045 - DNA, 30 bp, Artificial Sequence
  Synthetic oligonucleotide
ctgcatgacggtgtggagttgagtctggcc

SEQ ID NO: 174046 - DNA, 30 bp, Artificial Sequence
  Synthetic oligonucleotide
tcgtccggcctcgattacgtcaaagtggcc

SEQ ID NO: 174047 - DNA, 30 bp, Artificial Sequence
  Synthetic oligonucleotide
ttgcaaactgaatatcgtcacaacgtggcc

SEQ ID NO: 174048 - DNA, 30 bp, Artificial Sequence
  Synthetic oligonucleotide
tgactcgagaagccaggcaaactcgtggcc

SEQ ID NO: 174049 - DNA, 30 bp, Artificial Sequence
  Synthetic oligonucleotide
cttcgcacatagccagatgtgcatgtggcc

SEQ ID NO: 174050 - DNA, 30 bp, Artificial Sequence
  Synthetic oligonucleotide
agtaaaacaaaataaaatcttagattggcc

SEQ ID NO: 174051 - DNA, 30 bp, Artificial Sequence
  Synthetic oligonucleotide
attcccgcgctgaatacgagaggattggcc

SEQ ID NO: 174052 - DNA, 30 bp, Artificial Sequence
  Synthetic oligonucleotide
ccaccgactgtaaatctttgcggtttggcc

SEQ ID NO: 174053 - DNA, 30 bp, Artificial Sequence
  Synthetic oligonucleotide
acactcctagtgggagcgtcaacaaatgcc

SEQ ID NO: 174054 - DNA, 30 bp, Artificial Sequence
  Synthetic oligonucleotide
accgatatattcgaagaactaagacatgcc

SEQ ID NO: 174055 - DNA, 30 bp, Artificial Sequence
  Synthetic oligonucleotide
gggacacgccaggtgatgaaatcgcatgcc

SEQ ID NO: 174056 - DNA, 30 bp, Artificial Sequence
  Synthetic oligonucleotide
tccgctgcattattacagctggggcatgcc

SEQ ID NO: 174057 - DNA, 30 bp, Artificial Sequence
  Synthetic oligonucleotide
gtaagtgctgaccgcaactaaggtcatgcc

SEQ ID NO: 174058 - DNA, 30 bp, Artificial Sequence
  Synthetic oligonucleotide
atgaggcgacttagaccatctcttcatgcc

SEQ ID NO: 174059 - DNA, 30 bp, Artificial Sequence
  Synthetic oligonucleotide
taacaataatcgtgtgggacaatagatgcc

SEQ ID NO: 174060 - DNA, 30 bp, Artificial Sequence
  Synthetic oligonucleotide
gtgtccgttactagtaccacccgggatgcc

SEQ ID NO: 174061 - DNA, 30 bp, Artificial Sequence
  Synthetic oligonucleotide
atggcgggataagtgcgtttacctgatgcc

SEQ ID NO: 174062 - DNA, 30 bp, Artificial Sequence
  Synthetic oligonucleotide
ctcatcgacattcttgtttattcatatgcc

SEQ ID NO: 174063 - DNA, 30 bp, Artificial Sequence
  Synthetic oligonucleotide
atgatatcctaggttaatacattatatgcc

SEQ ID NO: 174064 - DNA, 30 bp, Artificial Sequence
  Synthetic oligonucleotide
acgactcgcgacgctataatgggttatgcc

SEQ ID NO: 174065 - DNA, 30 bp, Artificial Sequence
  Synthetic oligonucleotide
caagaacattgagacgtaggagcggctgcc

SEQ ID NO: 174066 - DNA, 30 bp, Artificial Sequence
  Synthetic oligonucleotide
cggaatcatctgataggtagatcaagtgcc

SEQ ID NO: 174067 - DNA, 30 bp, Artificial Sequence
  Synthetic oligonucleotide
acacgagatccacgccgggattccagtgcc

SEQ ID NO: 174068 - DNA, 30 bp, Artificial Sequence
  Synthetic oligonucleotide
aactggcatatagtgcgtccattgagtgcc

SEQ ID NO: 174069 - DNA, 30 bp, Artificial Sequence
  Synthetic oligonucleotide
gcccaaggacagatgtacatggcgcgtgcc

SEQ ID NO: 174070 - DNA, 30 bp, Artificial Sequence
  Synthetic oligonucleotide
aggccccgcgttacttctggcacaggtgcc

SEQ ID NO: 174071 - DNA, 30 bp, Artificial Sequence
  Synthetic oligonucleotide
cttagtaatgaccgaaacataataggtgcc

SEQ ID NO: 174072 - DNA, 30 bp, Artificial Sequence
  Synthetic oligonucleotide
gtaacctggaaaaggacgtatcgcggtgcc

SEQ ID NO: 174073 - DNA, 30 bp, Artificial Sequence
  Synthetic oligonucleotide
atatggcaacatgaagtttttaagggtgcc

SEQ ID NO: 174074 - DNA, 29 bp, Artificial Sequence
  Synthetic oligonucleotide
ttaagtaattagaagtaacccagggtgcc

SEQ ID NO: 174075 - DNA, 30 bp, Artificial Sequence
  Synthetic oligonucleotide
gacagtccctgtctaatttcccagggtgcc

SEQ ID NO: 174076 - DNA, 30 bp, Artificial Sequence
  Synthetic oligonucleotide
acatcacgacgccgggatttagaatgtgcc

SEQ ID NO: 174077 - DNA, 30 bp, Artificial Sequence
  Synthetic oligonucleotide
attatgatatagcgtgactgctagtgtgcc

SEQ ID NO: 174078 - DNA, 30 bp, Artificial Sequence
  Synthetic oligonucleotide
tgacggtagatgcctggtgatctaattgcc

SEQ ID NO: 174079 - DNA, 30 bp, Artificial Sequence
  Synthetic oligonucleotide
gcgtatgtcccaagcgttatacacattgcc

SEQ ID NO: 174080 - DNA, 30 bp, Artificial Sequence
  Synthetic oligonucleotide
acagactcgtctagaaggctatttattgcc

SEQ ID NO: 174081 - DNA, 30 bp, Artificial Sequence
  Synthetic oligonucleotide
tcgcggacctaccgcgtattagcacttgcc

SEQ ID NO: 174082 - DNA, 30 bp, Artificial Sequence
  Synthetic oligonucleotide
tcgggcaagacggttgtcctacaagttgcc

SEQ ID NO: 174083 - DNA, 30 bp, Artificial Sequence
  Synthetic oligonucleotide
acccggttatgatgtcacaaggtcgttgcc

SEQ ID NO: 174084 - DNA, 30 bp, Artificial Sequence
  Synthetic oligonucleotide
agagtaattcgtgcagcgtagggggttgcc

SEQ ID NO: 174085 - DNA, 30 bp, Artificial Sequence
  Synthetic oligonucleotide
ggggagattcagttttactattgcaaatcc

SEQ ID NO: 174086 - DNA, 30 bp, Artificial Sequence
  Synthetic oligonucleotide
tgaatgctggggtccatgcaaaagaaatcc

SEQ ID NO: 174087 - DNA, 30 bp, Artificial Sequence
  Synthetic oligonucleotide
cagttggcagtttacaaaataatgaaatcc

SEQ ID NO: 174088 - DNA, 30 bp, Artificial Sequence
  Synthetic oligonucleotide
taatcagagggattagttacggttaaatcc

SEQ ID NO: 174089 - DNA, 30 bp, Artificial Sequence
  Synthetic oligonucleotide
gcctaaactattttatgggtgagccaatcc

SEQ ID NO: 174090 - DNA, 30 bp, Artificial Sequence
  Synthetic oligonucleotide
gtttaacctcagctgagtcgagtgcaatcc

SEQ ID NO: 174091 - DNA, 30 bp, Artificial Sequence
  Synthetic oligonucleotide
gcaacgctgtctatcgtaattttgcaatcc

SEQ ID NO: 174092 - DNA, 30 bp, Artificial Sequence
  Synthetic oligonucleotide
taaccataattaatctagtatctggaatcc

SEQ ID NO: 174093 - DNA, 30 bp, Artificial Sequence
  Synthetic oligonucleotide
atacgatgcgtataactgcctgtggaatcc

SEQ ID NO: 174094 - DNA, 30 bp, Artificial Sequence
  Synthetic oligonucleotide
agtcgtaacccggagctcatcccataatcc

SEQ ID NO: 174095 - DNA, 30 bp, Artificial Sequence
  Synthetic oligonucleotide
gatatggcataaccatcgtcaggctaatcc

SEQ ID NO: 174096 - DNA, 30 bp, Artificial Sequence
  Synthetic oligonucleotide
ggcgcatgatacctatcattttcgtaatcc

SEQ ID NO: 174097 - DNA, 31 bp, Artificial Sequence
  Synthetic oligonucleotide
aggggttttatatcattgacaacacacatcc

SEQ ID NO: 174098 - DNA, 30 bp, Artificial Sequence
  Synthetic oligonucleotide
ggttgaggcttccttcatgaggacacatcc

SEQ ID NO: 174099 - DNA, 30 bp, Artificial Sequence
  Synthetic oligonucleotide
aaatccgagtgtgagtcggacttgacatcc

SEQ ID NO: 174100 - DNA, 30 bp, Artificial Sequence
  Synthetic oligonucleotide
cgctcgatgtagtactctcggggtccatcc

SEQ ID NO: 174101 - DNA, 30 bp, Artificial Sequence
  Synthetic oligonucleotide
cttgctaacgatctcgcgaaatttccatcc

SEQ ID NO: 174102 - DNA, 30 bp, Artificial Sequence
  Synthetic oligonucleotide
tacgaaatcgctgaatgagtttttccatcc

SEQ ID NO: 174103 - DNA, 30 bp, Artificial Sequence
  Synthetic oligonucleotide
acgtacaaatgtcaaggtactgaagcatcc

SEQ ID NO: 174104 - DNA, 30 bp, Artificial Sequence
  Synthetic oligonucleotide
agaggtctaccgagttaagttacagcatcc

SEQ ID NO: 174105 - DNA, 30 bp, Artificial Sequence
  Synthetic oligonucleotide
gtgtcgttatgaaggttgcgctacgcatcc

SEQ ID NO: 174106 - DNA, 30 bp, Artificial Sequence
  Synthetic oligonucleotide
tggctcgcgtactgaagtaaaaattcatcc

SEQ ID NO: 174107 - DNA, 30 bp, Artificial Sequence
  Synthetic oligonucleotide
gaccatacgtaccgaaaagcccgttcatcc

SEQ ID NO: 174108 - DNA, 30 bp, Artificial Sequence
  Synthetic oligonucleotide
aggcttaatagtttggcgccccgaagatcc

SEQ ID NO: 174109 - DNA, 30 bp, Artificial Sequence
  Synthetic oligonucleotide
gggcgagattcgtctagataaaatagatcc

SEQ ID NO: 174110 - DNA, 30 bp, Artificial Sequence
  Synthetic oligonucleotide
gggccgtagcggcgggggttgtttagatcc

SEQ ID NO: 174111 - DNA, 30 bp, Artificial Sequence
  Synthetic oligonucleotide
tggcactacgtgtgactatgcacgcgatcc

SEQ ID NO: 174112 - DNA, 30 bp, Artificial Sequence
  Synthetic oligonucleotide
tgcctggcttaccaattgctctcgcgatcc

SEQ ID NO: 174113 - DNA, 30 bp, Artificial Sequence
  Synthetic oligonucleotide
cagaatgttacggcgcggggcaaaggatcc

SEQ ID NO: 174114 - DNA, 30 bp, Artificial Sequence
  Synthetic oligonucleotide
cagccacattcgagtagctagcggggatcc

SEQ ID NO: 174115 - DNA, 30 bp, Artificial Sequence
  Synthetic oligonucleotide
gtagcgacattcaagaaggagatatgatcc

SEQ ID NO: 174116 - DNA, 30 bp, Artificial Sequence
  Synthetic oligonucleotide
agcataaagggttcggcaaccgtatgatcc

SEQ ID NO: 174117 - DNA, 30 bp, Artificial Sequence
  Synthetic oligonucleotide
ctcagttacttttatcgttaccggtgatcc

SEQ ID NO: 174118 - DNA, 30 bp, Artificial Sequence
  Synthetic oligonucleotide
tcgagagtccagaaggcgggacgcatatcc

SEQ ID NO: 174119 - DNA, 30 bp, Artificial Sequence
  Synthetic oligonucleotide
acagcgtagggtaaactggcgggcatatcc

SEQ ID NO: 174120 - DNA, 30 bp, Artificial Sequence
  Synthetic oligonucleotide
tgagtggcgttggtcaccacgtagatatcc

SEQ ID NO: 174121 - DNA, 30 bp, Artificial Sequence
  Synthetic oligonucleotide
catgagcgggcaaaaccttgtatgctatcc

SEQ ID NO: 174122 - DNA, 30 bp, Artificial Sequence
  Synthetic oligonucleotide
gcgggttatgaagctgagcaagacgtatcc

SEQ ID NO: 174123 - DNA, 30 bp, Artificial Sequence
  Synthetic oligonucleotide
taggcgaattatctgagcgggtcggtatcc

SEQ ID NO: 174124 - DNA, 30 bp, Artificial Sequence
  Synthetic oligonucleotide
ctacttagattgattgatatgagcttatcc

SEQ ID NO: 174125 - DNA, 30 bp, Artificial Sequence
  Synthetic oligonucleotide
gcatcatccaactactggatgaagttatcc

SEQ ID NO: 174126 - DNA, 30 bp, Artificial Sequence
  Synthetic oligonucleotide
gactatcagtagtcagtgtagggaaactcc

SEQ ID NO: 174127 - DNA, 30 bp, Artificial Sequence
  Synthetic oligonucleotide
catattcgggcttagataatgagcaactcc

SEQ ID NO: 174128 - DNA, 30 bp, Artificial Sequence
  Synthetic oligonucleotide
ggtccagactccataaactaagttaactcc

SEQ ID NO: 174129 - DNA, 30 bp, Artificial Sequence
  Synthetic oligonucleotide
aaggttcaatcaacgtaagagggtcactcc

SEQ ID NO: 174130 - DNA, 30 bp, Artificial Sequence
  Synthetic oligonucleotide
catggaggatcctggagggaacaggactcc

SEQ ID NO: 174131 - DNA, 30 bp, Artificial Sequence
  Synthetic oligonucleotide
cgggttgggagctcgtcgaagagatactcc

SEQ ID NO: 174132 - DNA, 30 bp, Artificial Sequence
  Synthetic oligonucleotide
cactgaactgcgacgcatagatggtactcc

SEQ ID NO: 174133 - DNA, 30 bp, Artificial Sequence
  Synthetic oligonucleotide
acgaactaagcgtctagactaaaaacctcc

SEQ ID NO: 174134 - DNA, 30 bp, Artificial Sequence
  Synthetic oligonucleotide
tccgcaaagttcgcaaattgcgagacctcc

SEQ ID NO: 174135 - DNA, 30 bp, Artificial Sequence
  Synthetic oligonucleotide
ggccgcataccgtaaatcaaataaccctcc

SEQ ID NO: 174136 - DNA, 30 bp, Artificial Sequence
  Synthetic oligonucleotide
tcaggcaccgtgtgaagcctcccagcctcc

SEQ ID NO: 174137 - DNA, 30 bp, Artificial Sequence
  Synthetic oligonucleotide
tgcaccagactatcattttagggcgcctcc

SEQ ID NO: 174138 - DNA, 30 bp, Artificial Sequence
  Synthetic oligonucleotide
tgacatgacataccgagtccggcggcctcc

SEQ ID NO: 174139 - DNA, 30 bp, Artificial Sequence
  Synthetic oligonucleotide
ctaatcgtctgatgtaaaagctgctcctcc

SEQ ID NO: 174140 - DNA, 30 bp, Artificial Sequence
  Synthetic oligonucleotide
ggaccaacgcctatcattggggtgagctcc

SEQ ID NO: 174141 - DNA, 30 bp, Artificial Sequence
  Synthetic oligonucleotide
ccataagaagcagagcgtaacctccgctcc

SEQ ID NO: 174142 - DNA, 30 bp, Artificial Sequence
  Synthetic oligonucleotide
cctgtccgggagccgggcatactgcgctcc

SEQ ID NO: 174143 - DNA, 30 bp, Artificial Sequence
  Synthetic oligonucleotide
ggaatagatggcgatggatgagtgcgctcc

SEQ ID NO: 174144 - DNA, 30 bp, Artificial Sequence
  Synthetic oligonucleotide
cgttcggtgtaatcagcgtgttcaggctcc

SEQ ID NO: 174145 - DNA, 30 bp, Artificial Sequence
  Synthetic oligonucleotide
acagaattctctatgccgaggagaggctcc

SEQ ID NO: 174146 - DNA, 30 bp, Artificial Sequence
  Synthetic oligonucleotide
gcgattagggctagtggccgccatggctcc

SEQ ID NO: 174147 - DNA, 30 bp, Artificial Sequence
  Synthetic oligonucleotide
gtgaggcctaggtctagcggctgctgctcc

SEQ ID NO: 174148 - DNA, 30 bp, Artificial Sequence
  Synthetic oligonucleotide
cgcgtcaataattatgagagctaaatctcc

SEQ ID NO: 174149 - DNA, 30 bp, Artificial Sequence
  Synthetic oligonucleotide
aagtcgctacgaggtatagtctcaatctcc

SEQ ID NO: 174150 - DNA, 30 bp, Artificial Sequence
  Synthetic oligonucleotide
cttcggattatctgaataataccgatctcc

SEQ ID NO: 174151 - DNA, 30 bp, Artificial Sequence
  Synthetic oligonucleotide
agacggggtccaatcaaagcattgatctcc

SEQ ID NO: 174152 - DNA, 30 bp, Artificial Sequence
  Synthetic oligonucleotide
gtccgccggaccagtctatagcatatctcc

SEQ ID NO: 174153 - DNA, 30 bp, Artificial Sequence
  Synthetic oligonucleotide
gtttcgccgagaaaaagacagcccctctcc

SEQ ID NO: 174154 - DNA, 30 bp, Artificial Sequence
  Synthetic oligonucleotide
acggagggaccggtgttaataaaagtctcc

SEQ ID NO: 174155 - DNA, 30 bp, Artificial Sequence
  Synthetic oligonucleotide
gtctgttggtggtttccatagctagtctcc

SEQ ID NO: 174156 - DNA, 30 bp, Artificial Sequence
  Synthetic oligonucleotide
agccggacgcgggacactacaaaggtctcc

SEQ ID NO: 174157 - DNA, 30 bp, Artificial Sequence
  Synthetic oligonucleotide
ctgagatagtggcacaatctagccttctcc

SEQ ID NO: 174158 - DNA, 30 bp, Artificial Sequence
  Synthetic oligonucleotide
tcctctaccgaaatattcctgaagttctcc

SEQ ID NO: 174159 - DNA, 30 bp, Artificial Sequence
  Synthetic oligonucleotide
attcctcacgtggaaagtaatgaacagtcc

SEQ ID NO: 174160 - DNA, 30 bp, Artificial Sequence
  Synthetic oligonucleotide
cgggcagggcaggggtggccgggtcagtcc

SEQ ID NO: 174161 - DNA, 30 bp, Artificial Sequence
  Synthetic oligonucleotide
acccaattgggaattaccgtttgtgagtcc

SEQ ID NO: 174162 - DNA, 30 bp, Artificial Sequence
  Synthetic oligonucleotide
aatagctatcgacaccatcgtcaatagtcc

SEQ ID NO: 174163 - DNA, 30 bp, Artificial Sequence
  Synthetic oligonucleotide
tgcatcagcattatcctgtgctgaacgtcc

SEQ ID NO: 174164 - DNA, 30 bp, Artificial Sequence
  Synthetic oligonucleotide
taacattagcgagtaggccaatcgccgtcc

SEQ ID NO: 174165 - DNA, 30 bp, Artificial Sequence
  Synthetic oligonucleotide
cgcaggtcatcaaagtacagtaaagcgtcc

SEQ ID NO: 174166 - DNA, 30 bp, Artificial Sequence
  Synthetic oligonucleotide
agccccctgaataagatccaacgcgcgtcc

SEQ ID NO: 174167 - DNA, 30 bp, Artificial Sequence
  Synthetic oligonucleotide
cagaatagcattactctggcccgggcgtcc

SEQ ID NO: 174168 - DNA, 30 bp, Artificial Sequence
  Synthetic oligonucleotide
tgagactgtggtttaaacggatgtaggtcc

SEQ ID NO: 174169 - DNA, 30 bp, Artificial Sequence
  Synthetic oligonucleotide
cgtaccgggctgctggcgttctatcggtcc

SEQ ID NO: 174170 - DNA, 30 bp, Artificial Sequence
  Synthetic oligonucleotide
cacgttggtaaccagttgcactccgggtcc

SEQ ID NO: 174171 - DNA, 30 bp, Artificial Sequence
  Synthetic oligonucleotide
cccggaaagcgctcaaaggctcatgggtcc

SEQ ID NO: 174172 - DNA, 29 bp, Artificial Sequence
  Synthetic oligonucleotide
ctacgtggttaatacgtgtacctgggtcc

SEQ ID NO: 174173 - DNA, 30 bp, Artificial Sequence
  Synthetic oligonucleotide
agaggtaatcttagagcgaggccatggtcc

SEQ ID NO: 174174 - DNA, 30 bp, Artificial Sequence
  Synthetic oligonucleotide
ataactaacctcgccagagcgttatggtcc

SEQ ID NO: 174175 - DNA, 30 bp, Artificial Sequence
  Synthetic oligonucleotide
ctacttcagtggaatccgtctcactggtcc

SEQ ID NO: 174176 - DNA, 30 bp, Artificial Sequence
  Synthetic oligonucleotide
aaccaaggtccccagcacggcgggtggtcc

SEQ ID NO: 174177 - DNA, 30 bp, Artificial Sequence
  Synthetic oligonucleotide
cctcactcaaatcgattgcccctgtggtcc

SEQ ID NO: 174178 - DNA, 30 bp, Artificial Sequence
  Synthetic oligonucleotide
ccatgaggcgccatcgtataacacatgtcc

SEQ ID NO: 174179 - DNA, 30 bp, Artificial Sequence
  Synthetic oligonucleotide
ggcctggatacaggaaacttatctatgtcc

SEQ ID NO: 174180 - DNA, 30 bp, Artificial Sequence
  Synthetic oligonucleotide
acaatgtcgatggttcgttctccactgtcc

SEQ ID NO: 174181 - DNA, 30 bp, Artificial Sequence
  Synthetic oligonucleotide
acttgaattgtcagcggtacatagctgtcc

SEQ ID NO: 174182 - DNA, 30 bp, Artificial Sequence
  Synthetic oligonucleotide
cgtggagtttgggcaagattcgatctgtcc

SEQ ID NO: 174183 - DNA, 30 bp, Artificial Sequence
  Synthetic oligonucleotide
gtgcagtggagtctgagaaattccgtgtcc

SEQ ID NO: 174184 - DNA, 30 bp, Artificial Sequence
  Synthetic oligonucleotide
tgggatattcaaaccaagaatctcgtgtcc

SEQ ID NO: 174185 - DNA, 30 bp, Artificial Sequence
  Synthetic oligonucleotide
cggggaccatagagtgtagtattattgtcc

SEQ ID NO: 174186 - DNA, 30 bp, Artificial Sequence
  Synthetic oligonucleotide
cgaccggaaaacaacatggcagagaattcc

SEQ ID NO: 174187 - DNA, 30 bp, Artificial Sequence
  Synthetic oligonucleotide
tccagcagctaggaaaagtgctcgaattcc

SEQ ID NO: 174188 - DNA, 30 bp, Artificial Sequence
  Synthetic oligonucleotide
cgtctgtaaacaggtggaataaaccattcc

SEQ ID NO: 174189 - DNA, 30 bp, Artificial Sequence
  Synthetic oligonucleotide
cttggtgccgaatgtttgccagtagattcc

SEQ ID NO: 174190 - DNA, 30 bp, Artificial Sequence
  Synthetic oligonucleotide
cgatatgacgaccattgtgctatggattcc

SEQ ID NO: 174191 - DNA, 29 bp, Artificial Sequence
  Synthetic oligonucleotide
tcttatcggtacgaaactatgcctattcc

SEQ ID NO: 174192 - DNA, 30 bp, Artificial Sequence
  Synthetic oligonucleotide
gaaaacaggtggacgggaactagaacttcc

SEQ ID NO: 174193 - DNA, 30 bp, Artificial Sequence
  Synthetic oligonucleotide
tttgcagtcagcaaacgaggaattacttcc

SEQ ID NO: 174194 - DNA, 30 bp, Artificial Sequence
  Synthetic oligonucleotide
gagaggatgatggaattcagagttacttcc

SEQ ID NO: 174195 - DNA, 30 bp, Artificial Sequence
  Synthetic oligonucleotide
ttgggagacgaggcagcccgagcgccttcc

SEQ ID NO: 174196 - DNA, 29 bp, Artificial Sequence
  Synthetic oligonucleotide
tgtacatgaggcgcggttctgcagcttcc

SEQ ID NO: 174197 - DNA, 30 bp, Artificial Sequence
  Synthetic oligonucleotide
aaccggtccacacacgaaggtgaatcttcc

SEQ ID NO: 174198 - DNA, 30 bp, Artificial Sequence
  Synthetic oligonucleotide
tcgcgatagaagatgtatacgtagtcttcc

SEQ ID NO: 174199 - DNA, 30 bp, Artificial Sequence
  Synthetic oligonucleotide
aaacagtgtaccaggtaaagggattcttcc

SEQ ID NO: 174200 - DNA, 30 bp, Artificial Sequence
  Synthetic oligonucleotide
ctaacctcatggactactggaataagttcc

SEQ ID NO: 174201 - DNA, 30 bp, Artificial Sequence
  Synthetic oligonucleotide
ttggaaaagtgtttagaagaattcagttcc

SEQ ID NO: 174202 - DNA, 30 bp, Artificial Sequence
  Synthetic oligonucleotide
cgcaatcaaggtcgccggccgcatagttcc

SEQ ID NO: 174203 - DNA, 30 bp, Artificial Sequence
  Synthetic oligonucleotide
accaaaatatacggcaaaaaccctagttcc

SEQ ID NO: 174204 - DNA, 30 bp, Artificial Sequence
  Synthetic oligonucleotide
gagcagatttacggcaggagccagggttcc

SEQ ID NO: 174205 - DNA, 30 bp, Artificial Sequence
  Synthetic oligonucleotide
aaaggagaggaattaatcggttgtggttcc

SEQ ID NO: 174206 - DNA, 30 bp, Artificial Sequence
  Synthetic oligonucleotide
agaagcccatatgaccatcccgttggttcc

SEQ ID NO: 174207 - DNA, 30 bp, Artificial Sequence
  Synthetic oligonucleotide
ccgcaaaatcaaaggttaagaaactgttcc

SEQ ID NO: 174208 - DNA, 30 bp, Artificial Sequence
  Synthetic oligonucleotide
cagggcataaccgtataatagcgctgttcc

SEQ ID NO: 174209 - DNA, 30 bp, Artificial Sequence
  Synthetic oligonucleotide
caacgaattgccttcaagccggtctgttcc

SEQ ID NO: 174210 - DNA, 30 bp, Artificial Sequence
  Synthetic oligonucleotide
catacaagcagaactaaattgaaaatttcc

SEQ ID NO: 174211 - DNA, 30 bp, Artificial Sequence
  Synthetic oligonucleotide
tagcggggtgcgacgttagcgttaatttcc

SEQ ID NO: 174212 - DNA, 30 bp, Artificial Sequence
  Synthetic oligonucleotide
acaggcaatatagaatcaggtcagatttcc

SEQ ID NO: 174213 - DNA, 30 bp, Artificial Sequence
  Synthetic oligonucleotide
tagaaccggtcggaatttgtgatgatttcc

SEQ ID NO: 174214 - DNA, 30 bp, Artificial Sequence
  Synthetic oligonucleotide
actcgtaacaggcaaaggaggtctatttcc

SEQ ID NO: 174215 - DNA, 30 bp, Artificial Sequence
  Synthetic oligonucleotide
gccagtgaacaaggtatccaaacgctttcc

SEQ ID NO: 174216 - DNA, 30 bp, Artificial Sequence
  Synthetic oligonucleotide
actgctgcctgccaatcgcgtaatctttcc

SEQ ID NO: 174217 - DNA, 30 bp, Artificial Sequence
  Synthetic oligonucleotide
atgggtggacgataggaccccagagtttcc

SEQ ID NO: 174218 - DNA, 30 bp, Artificial Sequence
  Synthetic oligonucleotide
cggcgtgggcatcaggacatgttagtttcc

SEQ ID NO: 174219 - DNA, 30 bp, Artificial Sequence
  Synthetic oligonucleotide
tcatgcaaactgtataggctcggcttttcc

SEQ ID NO: 174220 - DNA, 30 bp, Artificial Sequence
  Synthetic oligonucleotide
gggaagagtgtgttcataccttcgttttcc

SEQ ID NO: 174221 - DNA, 30 bp, Artificial Sequence
  Synthetic oligonucleotide
cgaataaggaactgcacacgcattttttcc

SEQ ID NO: 174222 - DNA, 30 bp, Artificial Sequence
  Synthetic oligonucleotide
gtgggcaagtagcgacaaaacggcaaaagc

SEQ ID NO: 174223 - DNA, 30 bp, Artificial Sequence
  Synthetic oligonucleotide
acgaggaattctaaatgggcttgcaaaagc

SEQ ID NO: 174224 - DNA, 30 bp, Artificial Sequence
  Synthetic oligonucleotide
gccggtagatagattcaatgcgaacaaagc

SEQ ID NO: 174225 - DNA, 30 bp, Artificial Sequence
  Synthetic oligonucleotide
gacttaaatcaagtatttccagaagaaagc

SEQ ID NO: 174226 - DNA, 30 bp, Artificial Sequence
  Synthetic oligonucleotide
cgctataggtgctaggaattaatagaaagc

SEQ ID NO: 174227 - DNA, 30 bp, Artificial Sequence
  Synthetic oligonucleotide
gtagctcagacaattgtgcctctcgaaagc

SEQ ID NO: 174228 - DNA, 30 bp, Artificial Sequence
  Synthetic oligonucleotide
aaagcgctagctgggatgcctaaggaaagc

SEQ ID NO: 174229 - DNA, 30 bp, Artificial Sequence
  Synthetic oligonucleotide
ctgataaatgggttaaatctctaggaaagc

SEQ ID NO: 174230 - DNA, 30 bp, Artificial Sequence
  Synthetic oligonucleotide
aggtaggggacaaggtcactcgttgaaagc

SEQ ID NO: 174231 - DNA, 30 bp, Artificial Sequence
  Synthetic oligonucleotide
cgaaatggtgtaccttaaaagacataaagc

SEQ ID NO: 174232 - DNA, 30 bp, Artificial Sequence
  Synthetic oligonucleotide
ggaggaagtgacgattactgtatataaagc

SEQ ID NO: 174233 - DNA, 30 bp, Artificial Sequence
  Synthetic oligonucleotide
gacacaggcgccagatcctagaggtaaagc

SEQ ID NO: 174234 - DNA, 30 bp, Artificial Sequence
  Synthetic oligonucleotide
gagggtaaaacctttttagacaattaaagc

SEQ ID NO: 174235 - DNA, 30 bp, Artificial Sequence
  Synthetic oligonucleotide
agtacccatagagttgaacggctttaaagc

SEQ ID NO: 174236 - DNA, 30 bp, Artificial Sequence
  Synthetic oligonucleotide
gagcacggcgcgagccgatcctcaacaagc

SEQ ID NO: 174237 - DNA, 30 bp, Artificial Sequence
  Synthetic oligonucleotide
agccgtgcacacagcgtggcaggaacaagc

SEQ ID NO: 174238 - DNA, 30 bp, Artificial Sequence
  Synthetic oligonucleotide
tcgtgtaattatgtttttgcgttcacaagc

SEQ ID NO: 174239 - DNA, 30 bp, Artificial Sequence
  Synthetic oligonucleotide
tagtgatgtaaacttcaaaattagccaagc

SEQ ID NO: 174240 - DNA, 30 bp, Artificial Sequence
  Synthetic oligonucleotide
gcgtattcggttgcactatgaaccgcaagc

SEQ ID NO: 174241 - DNA, 30 bp, Artificial Sequence
  Synthetic oligonucleotide
gcgagcgcccgactacatagtaaggcaagc

SEQ ID NO: 174242 - DNA, 30 bp, Artificial Sequence
  Synthetic oligonucleotide
gtcagcaacgcagggtaatgtgcggcaagc

SEQ ID NO: 174243 - DNA, 30 bp, Artificial Sequence
  Synthetic oligonucleotide
tcacgaaatgcataggcgtcctgggcaagc

SEQ ID NO: 174244 - DNA, 30 bp, Artificial Sequence
  Synthetic oligonucleotide
cctataacgccctctcctgccagtgcaagc

SEQ ID NO: 174245 - DNA, 30 bp, Artificial Sequence
  Synthetic oligonucleotide
ctgttggggcttgttcacacatcctcaagc

SEQ ID NO: 174246 - DNA, 30 bp, Artificial Sequence
  Synthetic oligonucleotide
tcggtcaaatcttctgggcggtattcaagc

SEQ ID NO: 174247 - DNA, 30 bp, Artificial Sequence
  Synthetic oligonucleotide
tatggtgtagctaaggttgtcggaagaagc

SEQ ID NO: 174248 - DNA, 30 bp, Artificial Sequence
  Synthetic oligonucleotide
gttcccccgagtggaaaatgacacagaagc

SEQ ID NO: 174249 - DNA, 30 bp, Artificial Sequence
  Synthetic oligonucleotide
tataagtgtgaccaactcaatgacagaagc

SEQ ID NO: 174250 - DNA, 30 bp, Artificial Sequence
  Synthetic oligonucleotide
tcactgtacgcgtggtttgtattcagaagc

SEQ ID NO: 174251 - DNA, 30 bp, Artificial Sequence
  Synthetic oligonucleotide
ctggcacgtctaggataattcgatagaagc

SEQ ID NO: 174252 - DNA, 30 bp, Artificial Sequence
  Synthetic oligonucleotide
ccttttgacgcgaaaacactgctacgaagc

SEQ ID NO: 174253 - DNA, 30 bp, Artificial Sequence
  Synthetic oligonucleotide
aatggaagatggccccataaattacgaagc

SEQ ID NO: 174254 - DNA, 30 bp, Artificial Sequence
  Synthetic oligonucleotide
ctcttagacaactgttcagatatccgaagc

SEQ ID NO: 174255 - DNA, 30 bp, Artificial Sequence
  Synthetic oligonucleotide
tcgggacttactcccggtgaccgtcgaagc

SEQ ID NO: 174256 - DNA, 30 bp, Artificial Sequence
  Synthetic oligonucleotide
ccccgaaaatttgcaaagctggaaggaagc

SEQ ID NO: 174257 - DNA, 30 bp, Artificial Sequence
  Synthetic oligonucleotide
catgggcatctattattaatctcaggaagc

SEQ ID NO: 174258 - DNA, 30 bp, Artificial Sequence
  Synthetic oligonucleotide
tcagcaaattagcgggttaatcgaggaagc

SEQ ID NO: 174259 - DNA, 30 bp, Artificial Sequence
  Synthetic oligonucleotide
tcatttaccgatcacctggactgcggaagc

SEQ ID NO: 174260 - DNA, 30 bp, Artificial Sequence
  Synthetic oligonucleotide
cctatgcggctcgcatctggacatggaagc

SEQ ID NO: 174261 - DNA, 30 bp, Artificial Sequence
  Synthetic oligonucleotide
aataaccctgggcagggtacccatggaagc

SEQ ID NO: 174262 - DNA, 30 bp, Artificial Sequence
  Synthetic oligonucleotide
atcggcggagtctgtactgtaacatgaagc

SEQ ID NO: 174263 - DNA, 30 bp, Artificial Sequence
  Synthetic oligonucleotide
catcgaagaggaacttcacgagcatgaagc

SEQ ID NO: 174264 - DNA, 30 bp, Artificial Sequence
  Synthetic oligonucleotide
ccgcacatgagttgcaactgacggtgaagc

SEQ ID NO: 174265 - DNA, 30 bp, Artificial Sequence
  Synthetic oligonucleotide
gcactatcgggccaacaattggggtgaagc

SEQ ID NO: 174266 - DNA, 30 bp, Artificial Sequence
  Synthetic oligonucleotide
tgcagtctcaaggagcatcccaattgaagc

SEQ ID NO: 174267 - DNA, 30 bp, Artificial Sequence
  Synthetic oligonucleotide
tgacaaacgaatcggctgaaagtttgaagc

SEQ ID NO: 174268 - DNA, 30 bp, Artificial Sequence
  Synthetic oligonucleotide
tatcggagagtgcgtgtcaggcgaataagc

SEQ ID NO: 174269 - DNA, 30 bp, Artificial Sequence
  Synthetic oligonucleotide
acgctatatgcctgataacaattaataagc

SEQ ID NO: 174270 - DNA, 30 bp, Artificial Sequence
  Synthetic oligonucleotide
gaacgcgtcgtagagacgtatcacataagc

SEQ ID NO: 174271 - DNA, 30 bp, Artificial Sequence
  Synthetic oligonucleotide
aaggggggctaatatttaagaaaactaagc

SEQ ID NO: 174272 - DNA, 30 bp, Artificial Sequence
  Synthetic oligonucleotide
agttatcatgacactccccacatactaagc

SEQ ID NO: 174273 - DNA, 31 bp, Artificial Sequence
  Synthetic oligonucleotide
ggaacggtcccattttagagcactcctaagc

SEQ ID NO: 174274 - DNA, 30 bp, Artificial Sequence
  Synthetic oligonucleotide
ggaatttgggccaccagggatgggctaagc

SEQ ID NO: 174275 - DNA, 30 bp, Artificial Sequence
  Synthetic oligonucleotide
ctccactgcgttacccatgcgatagtaagc

SEQ ID NO: 174276 - DNA, 30 bp, Artificial Sequence
  Synthetic oligonucleotide
aaatatgattaaggatacactaccgtaagc

SEQ ID NO: 174277 - DNA, 30 bp, Artificial Sequence
  Synthetic oligonucleotide
gcatagcactgcccaacacctagggtaagc

SEQ ID NO: 174278 - DNA, 30 bp, Artificial Sequence
  Synthetic oligonucleotide
gcacataaatgctgattgtttaatgtaagc

SEQ ID NO: 174279 - DNA, 30 bp, Artificial Sequence
  Synthetic oligonucleotide
aacgctcctcgtcgttccggaaacttaagc

SEQ ID NO: 174280 - DNA, 30 bp, Artificial Sequence
  Synthetic oligonucleotide
ttggtatattggctactctaaacgttaagc

SEQ ID NO: 174281 - DNA, 31 bp, Artificial Sequence
  Synthetic oligonucleotide
accggtctagaaaggagcgactaggttaagc

SEQ ID NO: 174282 - DNA, 30 bp, Artificial Sequence
  Synthetic oligonucleotide
tatgtctcactctacacaggctggttaagc

SEQ ID NO: 174283 - DNA, 30 bp, Artificial Sequence
  Synthetic oligonucleotide
gatctttagggaggtgctgccgtgttaagc

SEQ ID NO: 174284 - DNA, 30 bp, Artificial Sequence
  Synthetic oligonucleotide
acgcggagggagagtatttgcccaaacagc

SEQ ID NO: 174285 - DNA, 31 bp, Artificial Sequence
  Synthetic oligonucleotide
gcaaacctctaaagtaaaaattctgaacagc

SEQ ID NO: 174286 - DNA, 30 bp, Artificial Sequence
  Synthetic oligonucleotide
ggacgggtctcgggggttggagataacagc

SEQ ID NO: 174287 - DNA, 30 bp, Artificial Sequence
  Synthetic oligonucleotide
cataggcgtttatagctaagcgttaacagc

SEQ ID NO: 174288 - DNA, 30 bp, Artificial Sequence
  Synthetic oligonucleotide
ttggtctcaggatacttagcttaacacagc

SEQ ID NO: 174289 - DNA, 30 bp, Artificial Sequence
  Synthetic oligonucleotide
ccacgcatgtccgcgtcacagcaccacagc

SEQ ID NO: 174290 - DNA, 30 bp, Artificial Sequence
  Synthetic oligonucleotide
tggttcgtgagttttaacttatatcacagc

SEQ ID NO: 174291 - DNA, 30 bp, Artificial Sequence
  Synthetic oligonucleotide
cttagcgtacatttaactaaagcggacagc

SEQ ID NO: 174292 - DNA, 30 bp, Artificial Sequence
  Synthetic oligonucleotide
gggtaccacagctgataaacaggtgacagc

SEQ ID NO: 174293 - DNA, 30 bp, Artificial Sequence
  Synthetic oligonucleotide
ggatttcataagggctaaaatacctacagc

SEQ ID NO: 174294 - DNA, 30 bp, Artificial Sequence
  Synthetic oligonucleotide
agaacgacgtatttggtatttagctacagc

SEQ ID NO: 174295 - DNA, 30 bp, Artificial Sequence
  Synthetic oligonucleotide
aggcataggcatataatgagaaattacagc

SEQ ID NO: 174296 - DNA, 30 bp, Artificial Sequence
  Synthetic oligonucleotide
tgaaaagggagtgacgaaggtcgttacagc

SEQ ID NO: 174297 - DNA, 30 bp, Artificial Sequence
  Synthetic oligonucleotide
gcaggataagcgacagtaacacacaccagc

SEQ ID NO: 174298 - DNA, 30 bp, Artificial Sequence
  Synthetic oligonucleotide
atcgtacttaccgcttaatactacaccagc

SEQ ID NO: 174299 - DNA, 30 bp, Artificial Sequence
  Synthetic oligonucleotide
aaaggaccacgctaaacgactatcaccagc

SEQ ID NO: 174300 - DNA, 30 bp, Artificial Sequence
  Synthetic oligonucleotide
gaggaggcctaatgggaaggagggaccagc

SEQ ID NO: 174301 - DNA, 30 bp, Artificial Sequence
  Synthetic oligonucleotide
ctgcaatagagagtttggtaactgaccagc

SEQ ID NO: 174302 - DNA, 30 bp, Artificial Sequence
  Synthetic oligonucleotide
ttggattggatcgtgggaaaggcacccagc

SEQ ID NO: 174303 - DNA, 30 bp, Artificial Sequence
  Synthetic oligonucleotide
caagcccgaatttcggctgaactacccagc

SEQ ID NO: 174304 - DNA, 30 bp, Artificial Sequence
  Synthetic oligonucleotide
gcggatcagtcctaatgcggcgcccccagc

SEQ ID NO: 174305 - DNA, 30 bp, Artificial Sequence
  Synthetic oligonucleotide
tagaacggtagtgcccatattgatcccagc

SEQ ID NO: 174306 - DNA, 30 bp, Artificial Sequence
  Synthetic oligonucleotide
ccagacacacgccaagcacccgcggccagc

SEQ ID NO: 174307 - DNA, 30 bp, Artificial Sequence
  Synthetic oligonucleotide
taaaacaacgtacaatgcatggttgccagc

SEQ ID NO: 174308 - DNA, 30 bp, Artificial Sequence
  Synthetic oligonucleotide
acagggtacatccgaggcccggcatccagc

SEQ ID NO: 174309 - DNA, 30 bp, Artificial Sequence
  Synthetic oligonucleotide
gacagggcgtctttgagaaggaactccagc

SEQ ID NO: 174310 - DNA, 30 bp, Artificial Sequence
  Synthetic oligonucleotide
caagaaagtcggtgctcctgttgctccagc

SEQ ID NO: 174311 - DNA, 30 bp, Artificial Sequence
  Synthetic oligonucleotide
acgcactactataagacgagctacagcagc

SEQ ID NO: 174312 - DNA, 30 bp, Artificial Sequence
  Synthetic oligonucleotide
ggtatcagtcgtagtgacttattcagcagc

SEQ ID NO: 174313 - DNA, 30 bp, Artificial Sequence
  Synthetic oligonucleotide
tcgggatgaaaaagatgtgcgctgagcagc

SEQ ID NO: 174314 - DNA, 30 bp, Artificial Sequence
  Synthetic oligonucleotide
gccatctgtcaatactgaggatatagcagc

SEQ ID NO: 174315 - DNA, 30 bp, Artificial Sequence
  Synthetic oligonucleotide
cactgatcagcactgtgtagcattagcagc

SEQ ID NO: 174316 - DNA, 30 bp, Artificial Sequence
  Synthetic oligonucleotide
gatggtgtgtgggcatggctccggcgcagc

SEQ ID NO: 174317 - DNA, 30 bp, Artificial Sequence
  Synthetic oligonucleotide
aacagtccgtggctaagggaattgggcagc

SEQ ID NO: 174318 - DNA, 30 bp, Artificial Sequence
  Synthetic oligonucleotide
tgcatacggcacgtgcaaacaatctgcagc

SEQ ID NO: 174319 - DNA, 30 bp, Artificial Sequence
  Synthetic oligonucleotide
taggttgccgcctgagggcatgtctgcagc

SEQ ID NO: 174320 - DNA, 30 bp, Artificial Sequence
  Synthetic oligonucleotide
gctacacgcacgctagtggaacggtgcagc

SEQ ID NO: 174321 - DNA, 30 bp, Artificial Sequence
  Synthetic oligonucleotide
atagtatagcgtaatcatcgtatgtgcagc

SEQ ID NO: 174322 - DNA, 30 bp, Artificial Sequence
  Synthetic oligonucleotide
aacagtcagagatcgctaaaaaattgcagc

SEQ ID NO: 174323 - DNA, 30 bp, Artificial Sequence
  Synthetic oligonucleotide
gccaaaattctgaggatgagattttgcagc

SEQ ID NO: 174324 - DNA, 30 bp, Artificial Sequence
  Synthetic oligonucleotide
gtgtgtcgtgttagtctatcatatatcagc

SEQ ID NO: 174325 - DNA, 30 bp, Artificial Sequence
  Synthetic oligonucleotide
gaacactcggctttcacaaacaacctcagc

SEQ ID NO: 174326 - DNA, 30 bp, Artificial Sequence
  Synthetic oligonucleotide
tagaacaattagagcactactcggctcagc

SEQ ID NO: 174327 - DNA, 30 bp, Artificial Sequence
  Synthetic oligonucleotide
gaggccctttggaggattaaggtgctcagc

SEQ ID NO: 174328 - DNA, 30 bp, Artificial Sequence
  Synthetic oligonucleotide
tgagcgggatcaacatagtttttagtcagc

SEQ ID NO: 174329 - DNA, 30 bp, Artificial Sequence
  Synthetic oligonucleotide
taccaggatttcaagtgtgaccccgtcagc

SEQ ID NO: 174330 - DNA, 30 bp, Artificial Sequence
  Synthetic oligonucleotide
cgagagggtcatctagacccagtcgtcagc

SEQ ID NO: 174331 - DNA, 30 bp, Artificial Sequence
  Synthetic oligonucleotide
tatagaactattgacagggaacgggtcagc

SEQ ID NO: 174332 - DNA, 30 bp, Artificial Sequence
  Synthetic oligonucleotide
attggtcccaaggacatgatatctgtcagc

SEQ ID NO: 174333 - DNA, 30 bp, Artificial Sequence
  Synthetic oligonucleotide
tctaaggaggcgtgacgctaagggttcagc

SEQ ID NO: 174334 - DNA, 30 bp, Artificial Sequence
  Synthetic oligonucleotide
cattgaggccattcggtgcacgggttcagc

SEQ ID NO: 174335 - DNA, 30 bp, Artificial Sequence
  Synthetic oligonucleotide
tttagacacgaaaaccaaactcatttcagc

SEQ ID NO: 174336 - DNA, 30 bp, Artificial Sequence
  Synthetic oligonucleotide
tcgcgaaacgactatcgtgagattttcagc

SEQ ID NO: 174337 - DNA, 30 bp, Artificial Sequence
  Synthetic oligonucleotide
gtgcctactgcactacgacggcgaaagagc

SEQ ID NO: 174338 - DNA, 30 bp, Artificial Sequence
  Synthetic oligonucleotide
gtaagcaagtcaggaatgtgttcgaagagc

SEQ ID NO: 174339 - DNA, 30 bp, Artificial Sequence
  Synthetic oligonucleotide
gacgtagtcctgacggaacacctgaagagc

SEQ ID NO: 174340 - DNA, 30 bp, Artificial Sequence
  Synthetic oligonucleotide
tgatattgaacatggacaacccgacagagc

SEQ ID NO: 174341 - DNA, 30 bp, Artificial Sequence
  Synthetic oligonucleotide
cccggtaaacaggctagagaaagccagagc

SEQ ID NO: 174342 - DNA, 30 bp, Artificial Sequence
  Synthetic oligonucleotide
taggaacttttcggcgatgtgttccagagc

SEQ ID NO: 174343 - DNA, 30 bp, Artificial Sequence
  Synthetic oligonucleotide
tgagttagacattatacgcaaagagagagc

SEQ ID NO: 174344 - DNA, 30 bp, Artificial Sequence
  Synthetic oligonucleotide
attacgtctttgaatatatagatagagagc

SEQ ID NO: 174345 - DNA, 30 bp, Artificial Sequence
  Synthetic oligonucleotide
aagcacggtgaaagaattcggcacgagagc

SEQ ID NO: 174346 - DNA, 30 bp, Artificial Sequence
  Synthetic oligonucleotide
tgagagataagagactttcgtggatagagc

SEQ ID NO: 174347 - DNA, 30 bp, Artificial Sequence
  Synthetic oligonucleotide
gaggcccttcctgtagattgttgatagagc

SEQ ID NO: 174348 - DNA, 30 bp, Artificial Sequence
  Synthetic oligonucleotide
ctctgaatgggcgggactcaagcctagagc

SEQ ID NO: 174349 - DNA, 30 bp, Artificial Sequence
  Synthetic oligonucleotide
gaaaaactggagcacataatctgctagagc

SEQ ID NO: 174350 - DNA, 30 bp, Artificial Sequence
  Synthetic oligonucleotide
atcagtgcattgtatctaacactgtagagc

SEQ ID NO: 174351 - DNA, 30 bp, Artificial Sequence
  Synthetic oligonucleotide
tcgggctacttttatccaatagtgtagagc

SEQ ID NO: 174352 - DNA, 30 bp, Artificial Sequence
  Synthetic oligonucleotide
ccttggcgacggcgacaaaaaacttagagc

SEQ ID NO: 174353 - DNA, 30 bp, Artificial Sequence
  Synthetic oligonucleotide
aggagggcataattagccacgtcttagagc

SEQ ID NO: 174354 - DNA, 30 bp, Artificial Sequence
  Synthetic oligonucleotide
gcacgaaataatactcttgaggacacgagc

SEQ ID NO: 174355 - DNA, 30 bp, Artificial Sequence
  Synthetic oligonucleotide
aaagaaaagatataagtaaattggccgagc

SEQ ID NO: 174356 - DNA, 30 bp, Artificial Sequence
  Synthetic oligonucleotide
cgcaaccttttatcgatgctcaatccgagc

SEQ ID NO: 174357 - DNA, 30 bp, Artificial Sequence
  Synthetic oligonucleotide
atcggacaggatacgcggcatggagcgagc

SEQ ID NO: 174358 - DNA, 30 bp, Artificial Sequence
  Synthetic oligonucleotide
gtacccgtacagtggggtcaaggtgcgagc

SEQ ID NO: 174359 - DNA, 30 bp, Artificial Sequence
  Synthetic oligonucleotide
agatgtgaagggcggagtctagcgtcgagc

SEQ ID NO: 174360 - DNA, 30 bp, Artificial Sequence
  Synthetic oligonucleotide
ggtcgaggggaagcgctctcgggaaggagc

SEQ ID NO: 174361 - DNA, 30 bp, Artificial Sequence
  Synthetic oligonucleotide
taagcgatagtaccctccgtatccaggagc

SEQ ID NO: 174362 - DNA, 30 bp, Artificial Sequence
  Synthetic oligonucleotide
gggatgtgttactctaacatgtagaggagc

SEQ ID NO: 174363 - DNA, 30 bp, Artificial Sequence
  Synthetic oligonucleotide
acacttcgatgcaagaaatcacggaggagc

SEQ ID NO: 174364 - DNA, 30 bp, Artificial Sequence
  Synthetic oligonucleotide
tgaaccgaaacttgcagccgacgtaggagc

SEQ ID NO: 174365 - DNA, 30 bp, Artificial Sequence
  Synthetic oligonucleotide
ctcggtgtattagccataatcgttaggagc

SEQ ID NO: 174366 - DNA, 30 bp, Artificial Sequence
  Synthetic oligonucleotide
aaaatgaaccagtggtaatgggttaggagc

SEQ ID NO: 174367 - DNA, 30 bp, Artificial Sequence
  Synthetic oligonucleotide
gtcccgtaaatattgactcactttaggagc

SEQ ID NO: 174368 - DNA, 30 bp, Artificial Sequence
  Synthetic oligonucleotide
tcattattcacgggattacttaagcggagc

SEQ ID NO: 174369 - DNA, 30 bp, Artificial Sequence
  Synthetic oligonucleotide
cgcgttaaaataatcacgtagttagggagc

SEQ ID NO: 174370 - DNA, 30 bp, Artificial Sequence
  Synthetic oligonucleotide
agatcaacatacagcaggggtgttgggagc

SEQ ID NO: 174371 - DNA, 31 bp, Artificial Sequence
  Synthetic oligonucleotide
tggctacccaaaattccgtctacaatggagc

SEQ ID NO: 174372 - DNA, 30 bp, Artificial Sequence
  Synthetic oligonucleotide
ccaatcgtggtatctcttccaatatggagc

SEQ ID NO: 174373 - DNA, 30 bp, Artificial Sequence
  Synthetic oligonucleotide
acaaattacaagaggcgcacggtatggagc

SEQ ID NO: 174374 - DNA, 30 bp, Artificial Sequence
  Synthetic oligonucleotide
gctgctagcgtacgcgcttatcagtggagc

SEQ ID NO: 174375 - DNA, 30 bp, Artificial Sequence
  Synthetic oligonucleotide
acgcgcggagtcgcgaggccactttggagc

SEQ ID NO: 174376 - DNA, 30 bp, Artificial Sequence
  Synthetic oligonucleotide
aaaatacacctgtaaggaaaacccatgagc

SEQ ID NO: 174377 - DNA, 30 bp, Artificial Sequence
  Synthetic oligonucleotide
aatccgatctcatattatcgagccatgagc

SEQ ID NO: 174378 - DNA, 30 bp, Artificial Sequence
  Synthetic oligonucleotide
aacagagggcattcatctaaatgactgagc

SEQ ID NO: 174379 - DNA, 30 bp, Artificial Sequence
  Synthetic oligonucleotide
cggttctgtcgtttatattcgtgactgagc

SEQ ID NO: 174380 - DNA, 30 bp, Artificial Sequence
  Synthetic oligonucleotide
atacggcgacgacgggggaggtagctgagc

SEQ ID NO: 174381 - DNA, 30 bp, Artificial Sequence
  Synthetic oligonucleotide
ggaaacttagatgctattatgtagctgagc

SEQ ID NO: 174382 - DNA, 30 bp, Artificial Sequence
  Synthetic oligonucleotide
acaccggatgactcatgctcaggtctgagc

SEQ ID NO: 174383 - DNA, 30 bp, Artificial Sequence
  Synthetic oligonucleotide
caaatatcggcactccaggcacgagtgagc

SEQ ID NO: 174384 - DNA, 30 bp, Artificial Sequence
  Synthetic oligonucleotide
aaggcaacgattcatcggtcaggagtgagc

SEQ ID NO: 174385 - DNA, 30 bp, Artificial Sequence
  Synthetic oligonucleotide
ctcttacggatagcaaagtgtaacgtgagc

SEQ ID NO: 174386 - DNA, 30 bp, Artificial Sequence
  Synthetic oligonucleotide
cgttccccttacggtttggcctgcgtgagc

SEQ ID NO: 174387 - DNA, 30 bp, Artificial Sequence
  Synthetic oligonucleotide
agtggtccaactgctgatgtctaattgagc

SEQ ID NO: 174388 - DNA, 30 bp, Artificial Sequence
  Synthetic oligonucleotide
aatagctaaaacgatttgggccgattgagc

SEQ ID NO: 174389 - DNA, 30 bp, Artificial Sequence
  Synthetic oligonucleotide
tactcaagtaaaatcaagcgcatattgagc

SEQ ID NO: 174390 - DNA, 30 bp, Artificial Sequence
  Synthetic oligonucleotide
tgtgcaatacctgtaggtgagcacttgagc

SEQ ID NO: 174391 - DNA, 30 bp, Artificial Sequence
  Synthetic oligonucleotide
gactccattctagaaggggatactttgagc

SEQ ID NO: 174392 - DNA, 30 bp, Artificial Sequence
  Synthetic oligonucleotide
ctgtcgacaaaacatattgggtttttgagc

SEQ ID NO: 174393 - DNA, 30 bp, Artificial Sequence
  Synthetic oligonucleotide
cgtgtttattgccgtatatgcgcaaatagc

SEQ ID NO: 174394 - DNA, 30 bp, Artificial Sequence
  Synthetic oligonucleotide
ttgccgctacccgaagtggtaagaaatagc

SEQ ID NO: 174395 - DNA, 30 bp, Artificial Sequence
  Synthetic oligonucleotide
taggttatggcagtgaaattgggcaatagc

SEQ ID NO: 174396 - DNA, 30 bp, Artificial Sequence
  Synthetic oligonucleotide
gaatgccaaccgcgtatggccaggaatagc

SEQ ID NO: 174397 - DNA, 30 bp, Artificial Sequence
  Synthetic oligonucleotide
aaaagctcagatatgcgccatctgaatagc

SEQ ID NO: 174398 - DNA, 30 bp, Artificial Sequence
  Synthetic oligonucleotide
cgcgtccttgcaagatcggcaattaatagc

SEQ ID NO: 174399 - DNA, 30 bp, Artificial Sequence
  Synthetic oligonucleotide
cgaccgtcgtgccctactgccttacatagc

SEQ ID NO: 174400 - DNA, 30 bp, Artificial Sequence
  Synthetic oligonucleotide
aggccagccgccggaggctatgaccatagc

SEQ ID NO: 174401 - DNA, 30 bp, Artificial Sequence
  Synthetic oligonucleotide
tggtaccaatatctagaatccccccatagc

SEQ ID NO: 174402 - DNA, 30 bp, Artificial Sequence
  Synthetic oligonucleotide
acggggcttccagcaggcgtgttccatagc

SEQ ID NO: 174403 - DNA, 30 bp, Artificial Sequence
  Synthetic oligonucleotide
gggggccttggggaggtagtaacgcatagc

SEQ ID NO: 174404 - DNA, 30 bp, Artificial Sequence
  Synthetic oligonucleotide
attcacaatcgaaactgtccgagcgatagc

SEQ ID NO: 174405 - DNA, 30 bp, Artificial Sequence
  Synthetic oligonucleotide
caccccagagcgtgaaaaaactcggatagc

SEQ ID NO: 174406 - DNA, 30 bp, Artificial Sequence
  Synthetic oligonucleotide
tgatggtggccaaatataacgagctatagc

SEQ ID NO: 174407 - DNA, 30 bp, Artificial Sequence
  Synthetic oligonucleotide
tacaggcagaagagaaccggtcggtatagc

SEQ ID NO: 174408 - DNA, 30 bp, Artificial Sequence
  Synthetic oligonucleotide
gaagaataaagtataaatgattcttatagc

SEQ ID NO: 174409 - DNA, 30 bp, Artificial Sequence
  Synthetic oligonucleotide
cttgcaagaagccaaagtctaacaactagc

SEQ ID NO: 174410 - DNA, 30 bp, Artificial Sequence
  Synthetic oligonucleotide
cttagctgctcgcgaagggaacttactagc

SEQ ID NO: 174411 - DNA, 31 bp, Artificial Sequence
  Synthetic oligonucleotide
ttgaccgagtcgtgggctgatgagacctagc

SEQ ID NO: 174412 - DNA, 30 bp, Artificial Sequence
  Synthetic oligonucleotide
gctaacggtccacggaaacatggtcctagc

SEQ ID NO: 174413 - DNA, 30 bp, Artificial Sequence
  Synthetic oligonucleotide
tactagtaagcaagcatacaactagctagc

SEQ ID NO: 174414 - DNA, 30 bp, Artificial Sequence
  Synthetic oligonucleotide
gtgtgttaaggtcggcagatcaacgctagc

SEQ ID NO: 174415 - DNA, 30 bp, Artificial Sequence
  Synthetic oligonucleotide
gggattgtaccgagtgacctcttcgctagc

SEQ ID NO: 174416 - DNA, 30 bp, Artificial Sequence
  Synthetic oligonucleotide
cagggaacactggttgcccaatgatctagc

SEQ ID NO: 174417 - DNA, 30 bp, Artificial Sequence
  Synthetic oligonucleotide
cgaatggaaccaatgactatttgatctagc

SEQ ID NO: 174418 - DNA, 30 bp, Artificial Sequence
  Synthetic oligonucleotide
ggcaacgatggaacagaatcccattctagc

SEQ ID NO: 174419 - DNA, 30 bp, Artificial Sequence
  Synthetic oligonucleotide
ttaggtaccggtcgcattctcaaaagtagc

SEQ ID NO: 174420 - DNA, 30 bp, Artificial Sequence
  Synthetic oligonucleotide
gtccgccggggttgaccgagtagcagtagc

SEQ ID NO: 174421 - DNA, 30 bp, Artificial Sequence
  Synthetic oligonucleotide
ccacgagatgtgccttcgctcatcagtagc

SEQ ID NO: 174422 - DNA, 30 bp, Artificial Sequence
  Synthetic oligonucleotide
cttggacgctcggaaggcaagtggagtagc

SEQ ID NO: 174423 - DNA, 30 bp, Artificial Sequence
  Synthetic oligonucleotide
gatccatagagtctgccgttagaacgtagc

SEQ ID NO: 174424 - DNA, 30 bp, Artificial Sequence
  Synthetic oligonucleotide
atgagggccagtactcaggtaatacgtagc

SEQ ID NO: 174425 - DNA, 30 bp, Artificial Sequence
  Synthetic oligonucleotide
atactttgtctgtcctggtacttacgtagc

SEQ ID NO: 174426 - DNA, 30 bp, Artificial Sequence
  Synthetic oligonucleotide
gatccttatgcaccaatgtgggagcgtagc

SEQ ID NO: 174427 - DNA, 30 bp, Artificial Sequence
  Synthetic oligonucleotide
ccgctaggctgaagtagaacgtagcgtagc

SEQ ID NO: 174428 - DNA, 30 bp, Artificial Sequence
  Synthetic oligonucleotide
aacaatgcgtgcgtttggtgagtgcgtagc

SEQ ID NO: 174429 - DNA, 30 bp, Artificial Sequence
  Synthetic oligonucleotide
gtcattatgtcaagagcagttagtcgtagc

SEQ ID NO: 174430 - DNA, 30 bp, Artificial Sequence
  Synthetic oligonucleotide
gtgactcaagttacgaaagcggtaggtagc

SEQ ID NO: 174431 - DNA, 30 bp, Artificial Sequence
  Synthetic oligonucleotide
gtgctaaacgggcttgcatatggatgtagc

SEQ ID NO: 174432 - DNA, 30 bp, Artificial Sequence
  Synthetic oligonucleotide
gcaccccgagaggatcttgtattgtgtagc

SEQ ID NO: 174433 - DNA, 30 bp, Artificial Sequence
  Synthetic oligonucleotide
cctagatcccggattgggtagacttgtagc

SEQ ID NO: 174434 - DNA, 30 bp, Artificial Sequence
  Synthetic oligonucleotide
atccaccgacctcaaggagggctaattagc

SEQ ID NO: 174435 - DNA, 30 bp, Artificial Sequence
  Synthetic oligonucleotide
caagcacctaaccccagttatgacattagc

SEQ ID NO: 174436 - DNA, 30 bp, Artificial Sequence
  Synthetic oligonucleotide
aaagatctactaagtagctcaggcattagc

SEQ ID NO: 174437 - DNA, 30 bp, Artificial Sequence
  Synthetic oligonucleotide
gctgacttaagaatccatatcaagattagc

SEQ ID NO: 174438 - DNA, 30 bp, Artificial Sequence
  Synthetic oligonucleotide
cctggatccgatacatcgacagatattagc

SEQ ID NO: 174439 - DNA, 30 bp, Artificial Sequence
  Synthetic oligonucleotide
agcaatccgacgcccgatcgggaacttagc

SEQ ID NO: 174440 - DNA, 30 bp, Artificial Sequence
  Synthetic oligonucleotide
ggtaactacgtaggcacaaaaccacttagc

SEQ ID NO: 174441 - DNA, 30 bp, Artificial Sequence
  Synthetic oligonucleotide
aggagaagcgctgggcggagaatacttagc

SEQ ID NO: 174442 - DNA, 30 bp, Artificial Sequence
  Synthetic oligonucleotide
gttcaaaacagcaacgaaatataccttagc

SEQ ID NO: 174443 - DNA, 30 bp, Artificial Sequence
  Synthetic oligonucleotide
ttccctagacacctatcacagtcagttagc

SEQ ID NO: 174444 - DNA, 30 bp, Artificial Sequence
  Synthetic oligonucleotide
attggtgtgactttcacattcctggttagc

SEQ ID NO: 174445 - DNA, 30 bp, Artificial Sequence
  Synthetic oligonucleotide
acaggaagcgcgtcggtttagggatttagc

SEQ ID NO: 174446 - DNA, 30 bp, Artificial Sequence
  Synthetic oligonucleotide
gtggagcaagaacacttcttgggatttagc

SEQ ID NO: 174447 - DNA, 30 bp, Artificial Sequence
  Synthetic oligonucleotide
gtatctcgttactggcaacaggtatttagc

SEQ ID NO: 174448 - DNA, 30 bp, Artificial Sequence
  Synthetic oligonucleotide
cgattccacaagggaaacgtagagtttagc

SEQ ID NO: 174449 - DNA, 30 bp, Artificial Sequence
  Synthetic oligonucleotide
accgaatcggccttggtcgaggagtttagc

SEQ ID NO: 174450 - DNA, 30 bp, Artificial Sequence
  Synthetic oligonucleotide
cgggtgttggacatatcgcccgggtttagc

SEQ ID NO: 174451 - DNA, 30 bp, Artificial Sequence
  Synthetic oligonucleotide
ttccgtgtcgaataatgtgctccttttagc

SEQ ID NO: 174452 - DNA, 30 bp, Artificial Sequence
  Synthetic oligonucleotide
agtagatctatgtgagggggcaaaaaacgc

SEQ ID NO: 174453 - DNA, 30 bp, Artificial Sequence
  Synthetic oligonucleotide
cgttagcccttcttttgcataacaaaacgc

SEQ ID NO: 174454 - DNA, 30 bp, Artificial Sequence
  Synthetic oligonucleotide
taaggttaagttaagaagaaattaaaacgc

SEQ ID NO: 174455 - DNA, 31 bp, Artificial Sequence
  Synthetic oligonucleotide
catggaggcgacgaaatctctgcccaaacgc

SEQ ID NO: 174456 - DNA, 30 bp, Artificial Sequence
  Synthetic oligonucleotide
atgaaccgcaagtttaataatgtcaaacgc

SEQ ID NO: 174457 - DNA, 30 bp, Artificial Sequence
  Synthetic oligonucleotide
gtgcacatctggggtcgaacgcggaaacgc

SEQ ID NO: 174458 - DNA, 30 bp, Artificial Sequence
  Synthetic oligonucleotide
ctacctccatcgctctgaactcaccaacgc

SEQ ID NO: 174459 - DNA, 30 bp, Artificial Sequence
  Synthetic oligonucleotide
agaccaacataatggggcctggggcaacgc

SEQ ID NO: 174460 - DNA, 30 bp, Artificial Sequence
  Synthetic oligonucleotide
tgataaatctacacacgactgtggcaacgc

SEQ ID NO: 174461 - DNA, 30 bp, Artificial Sequence
  Synthetic oligonucleotide
cattaaccgctgggtcttcacgtagaacgc

SEQ ID NO: 174462 - DNA, 30 bp, Artificial Sequence
  Synthetic oligonucleotide
tagagacatcgtcgcaaggcgaatgaacgc

SEQ ID NO: 174463 - DNA, 30 bp, Artificial Sequence
  Synthetic oligonucleotide
atgactagtaggcgtcaatctgctgaacgc

SEQ ID NO: 174464 - DNA, 30 bp, Artificial Sequence
  Synthetic oligonucleotide
catgattggatcctgataattagtgaacgc

SEQ ID NO: 174465 - DNA, 30 bp, Artificial Sequence
  Synthetic oligonucleotide
gccgtggcgcgcagtcaagagacataacgc

SEQ ID NO: 174466 - DNA, 30 bp, Artificial Sequence
  Synthetic oligonucleotide
tggaaggccgcacttatcaaaagctaacgc

SEQ ID NO: 174467 - DNA, 30 bp, Artificial Sequence
  Synthetic oligonucleotide
caggttcaaaaagcattaagacgctaacgc

SEQ ID NO: 174468 - DNA, 30 bp, Artificial Sequence
  Synthetic oligonucleotide
gtccggtcgggcacagttaaatattaacgc

SEQ ID NO: 174469 - DNA, 30 bp, Artificial Sequence
  Synthetic oligonucleotide
agaaataaacaagtgcataagtattaacgc

SEQ ID NO: 174470 - DNA, 30 bp, Artificial Sequence
  Synthetic oligonucleotide
atcccgagccagcaaataaaaggtacacgc

SEQ ID NO: 174471 - DNA, 30 bp, Artificial Sequence
  Synthetic oligonucleotide
taggactgcaatggtcgcgaacttacacgc

SEQ ID NO: 174472 - DNA, 30 bp, Artificial Sequence
  Synthetic oligonucleotide
ctaccttgcggtaaatcgggaggtccacgc

SEQ ID NO: 174473 - DNA, 30 bp, Artificial Sequence
  Synthetic oligonucleotide
atgggtagctcgaaacttccaacagcacgc

SEQ ID NO: 174474 - DNA, 30 bp, Artificial Sequence
  Synthetic oligonucleotide
cctaaacctatgggtactgaagtagcacgc

SEQ ID NO: 174475 - DNA, 30 bp, Artificial Sequence
  Synthetic oligonucleotide
tcgcacaagtgccactagcagaactcacgc

SEQ ID NO: 174476 - DNA, 30 bp, Artificial Sequence
  Synthetic oligonucleotide
cgatagcgggaatagttcgactcctcacgc

SEQ ID NO: 174477 - DNA, 30 bp, Artificial Sequence
  Synthetic oligonucleotide
ccttcctatcacatcatggaggtctcacgc

SEQ ID NO: 174478 - DNA, 30 bp, Artificial Sequence
  Synthetic oligonucleotide
catattagtcaactcgaaagagcccgacgc

SEQ ID NO: 174479 - DNA, 30 bp, Artificial Sequence
  Synthetic oligonucleotide
gccgatggggaactccgataaccaatacgc

SEQ ID NO: 174480 - DNA, 30 bp, Artificial Sequence
  Synthetic oligonucleotide
ggcacgtgtgcaagttgaggatagatacgc

SEQ ID NO: 174481 - DNA, 30 bp, Artificial Sequence
  Synthetic oligonucleotide
gcccgccgagtctagaacgtgctgatacgc

SEQ ID NO: 174482 - DNA, 30 bp, Artificial Sequence
  Synthetic oligonucleotide
caagatcgaagccctccccgtcttatacgc

SEQ ID NO: 174483 - DNA, 30 bp, Artificial Sequence
  Synthetic oligonucleotide
gcttcgtaagcgtgggtaacagccctacgc

SEQ ID NO: 174484 - DNA, 30 bp, Artificial Sequence
  Synthetic oligonucleotide
tttgctaaaatgtgcacctcaagcctacgc

SEQ ID NO: 174485 - DNA, 30 bp, Artificial Sequence
  Synthetic oligonucleotide
acaacaatcgctatccggttaaagctacgc

SEQ ID NO: 174486 - DNA, 30 bp, Artificial Sequence
  Synthetic oligonucleotide
caaatgccgcccgtatacgtgaaagtacgc

SEQ ID NO: 174487 - DNA, 30 bp, Artificial Sequence
  Synthetic oligonucleotide
gatgagatttaactagcatcagtggtacgc

SEQ ID NO: 174488 - DNA, 30 bp, Artificial Sequence
  Synthetic oligonucleotide
ggaagtgttaagtgaatcaacgaattacgc

SEQ ID NO: 174489 - DNA, 30 bp, Artificial Sequence
  Synthetic oligonucleotide
ttgcgtgccggcgtagctggtgcattacgc

SEQ ID NO: 174490 - DNA, 30 bp, Artificial Sequence
  Synthetic oligonucleotide
cacatcggtactagagttggggacttacgc

SEQ ID NO: 174491 - DNA, 30 bp, Artificial Sequence
  Synthetic oligonucleotide
ggtattatgcgaacaaggaccgatttacgc

SEQ ID NO: 174492 - DNA, 30 bp, Artificial Sequence
  Synthetic oligonucleotide
cagcccgggatagtagattcggctttacgc

SEQ ID NO: 174493 - DNA, 30 bp, Artificial Sequence
  Synthetic oligonucleotide
cattatagcagatagaattggggtttacgc

SEQ ID NO: 174494 - DNA, 30 bp, Artificial Sequence
  Synthetic oligonucleotide
actcctagtcatttgtgtagggaaaaccgc

SEQ ID NO: 174495 - DNA, 30 bp, Artificial Sequence
  Synthetic oligonucleotide
tagcaaaacgactgcccacgcacaaaccgc

SEQ ID NO: 174496 - DNA, 30 bp, Artificial Sequence
  Synthetic oligonucleotide
acaggtgaaggatcttgcactcccaaccgc

SEQ ID NO: 174497 - DNA, 30 bp, Artificial Sequence
  Synthetic oligonucleotide
ggcttggtgtggtctcaaaagaagaaccgc

SEQ ID NO: 174498 - DNA, 30 bp, Artificial Sequence
  Synthetic oligonucleotide
ttaccggtagtgctaactgttaagaaccgc

SEQ ID NO: 174499 - DNA, 30 bp, Artificial Sequence
  Synthetic oligonucleotide
acacgagatccactgactccgccgaaccgc

SEQ ID NO: 174500 - DNA, 30 bp, Artificial Sequence
  Synthetic oligonucleotide
acgtccggcgctccatccaggcggcaccgc

SEQ ID NO: 174501 - DNA, 30 bp, Artificial Sequence
  Synthetic oligonucleotide
aacctgggtgaggagcaggccaactaccgc

SEQ ID NO: 174502 - DNA, 30 bp, Artificial Sequence
  Synthetic oligonucleotide
ggataaatgtcaagggctaatagttaccgc

SEQ ID NO: 174503 - DNA, 30 bp, Artificial Sequence
  Synthetic oligonucleotide
ggccacgtgactaaaagtactggttaccgc

SEQ ID NO: 174504 - DNA, 30 bp, Artificial Sequence
  Synthetic oligonucleotide
cagtatgctatgaaagttcgcgcaacccgc

SEQ ID NO: 174505 - DNA, 30 bp, Artificial Sequence
  Synthetic oligonucleotide
tgaggtcgtcttcaaatatatgtcacccgc

SEQ ID NO: 174506 - DNA, 30 bp, Artificial Sequence
  Synthetic oligonucleotide
gcgaaaggtgcgagttctcacgggacccgc

SEQ ID NO: 174507 - DNA, 30 bp, Artificial Sequence
  Synthetic oligonucleotide
ggaatagttattctgtgagccggggcccgc

SEQ ID NO: 174508 - DNA, 30 bp, Artificial Sequence
  Synthetic oligonucleotide
agcataactcaagtatgatctctggcccgc

SEQ ID NO: 174509 - DNA, 30 bp, Artificial Sequence
  Synthetic oligonucleotide
atttccaacggcaccatcacacttgcccgc

SEQ ID NO: 174510 - DNA, 30 bp, Artificial Sequence
  Synthetic oligonucleotide
tttacccagccaggacagtcgaggtcccgc

SEQ ID NO: 174511 - DNA, 30 bp, Artificial Sequence
  Synthetic oligonucleotide
ggacccttcgtacacatgggctaaagccgc

SEQ ID NO: 174512 - DNA, 30 bp, Artificial Sequence
  Synthetic oligonucleotide
tcgtactgctctgaaaaactttgaagccgc

SEQ ID NO: 174513 - DNA, 30 bp, Artificial Sequence
  Synthetic oligonucleotide
gcacacggcagacatggtacaaatagccgc

SEQ ID NO: 174514 - DNA, 30 bp, Artificial Sequence
  Synthetic oligonucleotide
acatgctgagggaatttgggaccccgccgc

SEQ ID NO: 174515 - DNA, 30 bp, Artificial Sequence
  Synthetic oligonucleotide
acccaccacgggtagctaccgcctcgccgc

SEQ ID NO: 174516 - DNA, 30 bp, Artificial Sequence
  Synthetic oligonucleotide
ttacaggtatccggctcaggggaaggccgc

SEQ ID NO: 174517 - DNA, 30 bp, Artificial Sequence
  Synthetic oligonucleotide
gaagaattgcattcacgggtgaggtgccgc

SEQ ID NO: 174518 - DNA, 30 bp, Artificial Sequence
  Synthetic oligonucleotide
atgtagaatgaattccgtatgcgaatccgc

SEQ ID NO: 174519 - DNA, 30 bp, Artificial Sequence
  Synthetic oligonucleotide
actttggtatcgggatcctgagatatccgc

SEQ ID NO: 174520 - DNA, 30 bp, Artificial Sequence
  Synthetic oligonucleotide
aagaggcaacagtataaaacaattatccgc

SEQ ID NO: 174521 - DNA, 30 bp, Artificial Sequence
  Synthetic oligonucleotide
ctgctccgtgtaagcgcagtcgttatccgc

SEQ ID NO: 174522 - DNA, 30 bp, Artificial Sequence
  Synthetic oligonucleotide
cgtccctgggtcgttacatgtcgcctccgc

SEQ ID NO: 174523 - DNA, 30 bp, Artificial Sequence
  Synthetic oligonucleotide
ctcactagagttatcctaggaacagtccgc

SEQ ID NO: 174524 - DNA, 30 bp, Artificial Sequence
  Synthetic oligonucleotide
gtggcacaatcattataaaaccgagtccgc

SEQ ID NO: 174525 - DNA, 30 bp, Artificial Sequence
  Synthetic oligonucleotide
gtaggtgttcactagaatcacgaggtccgc

SEQ ID NO: 174526 - DNA, 30 bp, Artificial Sequence
  Synthetic oligonucleotide
gagagatttctatgtaggcgaatattccgc

SEQ ID NO: 174527 - DNA, 30 bp, Artificial Sequence
  Synthetic oligonucleotide
aagaagtgcgtaaagcagtctccaaagcgc

SEQ ID NO: 174528 - DNA, 30 bp, Artificial Sequence
  Synthetic oligonucleotide
cggttgggaatgaacagtgtctgcaagcgc

SEQ ID NO: 174529 - DNA, 30 bp, Artificial Sequence
  Synthetic oligonucleotide
tttctggccagtcaaaggcaagctaagcgc

SEQ ID NO: 174530 - DNA, 30 bp, Artificial Sequence
  Synthetic oligonucleotide
gggggaagagtatctgttacctctaagcgc

SEQ ID NO: 174531 - DNA, 30 bp, Artificial Sequence
  Synthetic oligonucleotide
ctacggtctagaccccagataagtaagcgc

SEQ ID NO: 174532 - DNA, 30 bp, Artificial Sequence
  Synthetic oligonucleotide
cgccaaatgagcacggaccatgacgagcgc

SEQ ID NO: 174533 - DNA, 30 bp, Artificial Sequence
  Synthetic oligonucleotide
cgtggcctgtcggcccagaaccaggagcgc

SEQ ID NO: 174534 - DNA, 30 bp, Artificial Sequence
  Synthetic oligonucleotide
tacattatatgaggctcatgtggtgagcgc

SEQ ID NO: 174535 - DNA, 30 bp, Artificial Sequence
  Synthetic oligonucleotide
atgcaataacgcgcattagaagttgagcgc

SEQ ID NO: 174536 - DNA, 30 bp, Artificial Sequence
  Synthetic oligonucleotide
aggcgagtacatgcggcgccatgatagcgc

SEQ ID NO: 174537 - DNA, 30 bp, Artificial Sequence
  Synthetic oligonucleotide
agtacgaaatgttaaaaagtagtctagcgc

SEQ ID NO: 174538 - DNA, 30 bp, Artificial Sequence
  Synthetic oligonucleotide
tgtgattatagcgactatgcgccatcgcgc

SEQ ID NO: 174539 - DNA, 31 bp, Artificial Sequence
  Synthetic oligonucleotide
cgggttatcgaggaaacattgggtctcgcgc

SEQ ID NO: 174540 - DNA, 30 bp, Artificial Sequence
  Synthetic oligonucleotide
atacacgtgaagaatcgggaatgcaggcgc

SEQ ID NO: 174541 - DNA, 30 bp, Artificial Sequence
  Synthetic oligonucleotide
tggttgagtggatcaatcagggggaggcgc

SEQ ID NO: 174542 - DNA, 30 bp, Artificial Sequence
  Synthetic oligonucleotide
ggaacacctaactcgaacgaccgacggcgc

SEQ ID NO: 174543 - DNA, 30 bp, Artificial Sequence
  Synthetic oligonucleotide
cataacgaaccataattgacggtccggcgc

SEQ ID NO: 174544 - DNA, 30 bp, Artificial Sequence
  Synthetic oligonucleotide
ggtaaatagaaaacggaccagaggcggcgc

SEQ ID NO: 174545 - DNA, 30 bp, Artificial Sequence
  Synthetic oligonucleotide
aacactctgggctaatataacctgcggcgc

SEQ ID NO: 174546 - DNA, 30 bp, Artificial Sequence
  Synthetic oligonucleotide
aggtggttggccacctcagattccgggcgc

SEQ ID NO: 174547 - DNA, 30 bp, Artificial Sequence
  Synthetic oligonucleotide
cgaacattactcctatccgaacgctggcgc

SEQ ID NO: 174548 - DNA, 30 bp, Artificial Sequence
  Synthetic oligonucleotide
gacaagccgaggttaggcgaaaggtggcgc

SEQ ID NO: 174549 - DNA, 30 bp, Artificial Sequence
  Synthetic oligonucleotide
agtcagtataatcgcctggagtgaatgcgc

SEQ ID NO: 174550 - DNA, 30 bp, Artificial Sequence
  Synthetic oligonucleotide
ccagtttcgctcggacctaccacgatgcgc

SEQ ID NO: 174551 - DNA, 30 bp, Artificial Sequence
  Synthetic oligonucleotide
gaacaaaggacattaaacagatgtatgcgc

SEQ ID NO: 174552 - DNA, 30 bp, Artificial Sequence
  Synthetic oligonucleotide
aaatgacggaaataaagaaaaaatctgcgc

SEQ ID NO: 174553 - DNA, 30 bp, Artificial Sequence
  Synthetic oligonucleotide
gtcttgttcctggaggtgcgtaaagtgcgc

SEQ ID NO: 174554 - DNA, 30 bp, Artificial Sequence
  Synthetic oligonucleotide
ggaggtatgggttagttactataagtgcgc

SEQ ID NO: 174555 - DNA, 30 bp, Artificial Sequence
  Synthetic oligonucleotide
tgcaggatacagtaaaaaaggccagtgcgc

SEQ ID NO: 174556 - DNA, 30 bp, Artificial Sequence
  Synthetic oligonucleotide
cgggctggtactaaaagtcagggattgcgc

SEQ ID NO: 174557 - DNA, 30 bp, Artificial Sequence
  Synthetic oligonucleotide
gacgggaaccaccgcacgtgttcaaatcgc

SEQ ID NO: 174558 - DNA, 30 bp, Artificial Sequence
  Synthetic oligonucleotide
aaagagacgctttgacgttggtgcaatcgc

SEQ ID NO: 174559 - DNA, 30 bp, Artificial Sequence
  Synthetic oligonucleotide
attgcaagaaacgaatcgcaacaacatcgc

SEQ ID NO: 174560 - DNA, 30 bp, Artificial Sequence
  Synthetic oligonucleotide
aaatatttgacatcacattagaagcatcgc

SEQ ID NO: 174561 - DNA, 30 bp, Artificial Sequence
  Synthetic oligonucleotide
tgcggcgcccaatgcgcctgctttcatcgc

SEQ ID NO: 174562 - DNA, 31 bp, Artificial Sequence
  Synthetic oligonucleotide
tcctggcattggatatcacgcccacgatcgc

SEQ ID NO: 174563 - DNA, 30 bp, Artificial Sequence
  Synthetic oligonucleotide
gtgtaaatttcgtacctaggagtcgatcgc

SEQ ID NO: 174564 - DNA, 30 bp, Artificial Sequence
  Synthetic oligonucleotide
gccgcgtaaagtctcaagtaagcggatcgc

SEQ ID NO: 174565 - DNA, 30 bp, Artificial Sequence
  Synthetic oligonucleotide
cttgcggttcatcgaagaaacgaatatcgc

SEQ ID NO: 174566 - DNA, 30 bp, Artificial Sequence
  Synthetic oligonucleotide
atacagttcggaaacctgatcacgtatcgc

SEQ ID NO: 174567 - DNA, 30 bp, Artificial Sequence
  Synthetic oligonucleotide
gtagcgagcaaatggaatcgatcaactcgc

SEQ ID NO: 174568 - DNA, 30 bp, Artificial Sequence
  Synthetic oligonucleotide
cgggtatccccctttgacttgttaactcgc

SEQ ID NO: 174569 - DNA, 30 bp, Artificial Sequence
  Synthetic oligonucleotide
gtctgacatggaactctaatgaatactcgc

SEQ ID NO: 174570 - DNA, 30 bp, Artificial Sequence
  Synthetic oligonucleotide
cataccatgggcaagacctatacacctcgc

SEQ ID NO: 174571 - DNA, 30 bp, Artificial Sequence
  Synthetic oligonucleotide
tagtagtgccttatgggaagcacgcctcgc

SEQ ID NO: 174572 - DNA, 30 bp, Artificial Sequence
  Synthetic oligonucleotide
ctgagtcaagagtttaggtcctacgctcgc

SEQ ID NO: 174573 - DNA, 30 bp, Artificial Sequence
  Synthetic oligonucleotide
taacttgacttagaggggaagaaggctcgc

SEQ ID NO: 174574 - DNA, 30 bp, Artificial Sequence
  Synthetic oligonucleotide
gggaaccgggcttaagaaacgtgggctcgc

SEQ ID NO: 174575 - DNA, 30 bp, Artificial Sequence
  Synthetic oligonucleotide
tccttttatggccggtataatggatctcgc

SEQ ID NO: 174576 - DNA, 30 bp, Artificial Sequence
  Synthetic oligonucleotide
ccgcatcctggggtaaatgtagtttctcgc

SEQ ID NO: 174577 - DNA, 30 bp, Artificial Sequence
  Synthetic oligonucleotide
gtggaccaggttaggaaggatgacagtcgc

SEQ ID NO: 174578 - DNA, 30 bp, Artificial Sequence
  Synthetic oligonucleotide
tccaggtcatagtgaagcgtttgcagtcgc

SEQ ID NO: 174579 - DNA, 30 bp, Artificial Sequence
  Synthetic oligonucleotide
gatgtacgtaactaatctaaaaagagtcgc

SEQ ID NO: 174580 - DNA, 30 bp, Artificial Sequence
  Synthetic oligonucleotide
ccgatccccccgtgcccacagagacgtcgc

SEQ ID NO: 174581 - DNA, 30 bp, Artificial Sequence
  Synthetic oligonucleotide
ataagggtaacgagggttgggctacgtcgc

SEQ ID NO: 174582 - DNA, 30 bp, Artificial Sequence
  Synthetic oligonucleotide
actaggtaacaataaccccagctccgtcgc

SEQ ID NO: 174583 - DNA, 30 bp, Artificial Sequence
  Synthetic oligonucleotide
acgctccaacctaaataaacattatgtcgc

SEQ ID NO: 174584 - DNA, 30 bp, Artificial Sequence
  Synthetic oligonucleotide
tccggaaagaataccctaaaaggcattcgc

SEQ ID NO: 174585 - DNA, 30 bp, Artificial Sequence
  Synthetic oligonucleotide
cccagaggatgaactgttaatatgattcgc

SEQ ID NO: 174586 - DNA, 30 bp, Artificial Sequence
  Synthetic oligonucleotide
gggcgtccagaacgacaggcgggtattcgc

SEQ ID NO: 174587 - DNA, 30 bp, Artificial Sequence
  Synthetic oligonucleotide
aggtgtcctagaatacggggagttattcgc

SEQ ID NO: 174588 - DNA, 30 bp, Artificial Sequence
  Synthetic oligonucleotide
ggaaccctgtgcaggaatcgttatcttcgc

SEQ ID NO: 174589 - DNA, 30 bp, Artificial Sequence
  Synthetic oligonucleotide
tgtaggatcatgctaaagttggctcttcgc

SEQ ID NO: 174590 - DNA, 30 bp, Artificial Sequence
  Synthetic oligonucleotide
agtcattgttcggctgctaaagacgttcgc

SEQ ID NO: 174591 - DNA, 30 bp, Artificial Sequence
  Synthetic oligonucleotide
tactcgatggtacggttcgacgccgttcgc

SEQ ID NO: 174592 - DNA, 30 bp, Artificial Sequence
  Synthetic oligonucleotide
gtgtggaacattaggatcgagtccgttcgc

SEQ ID NO: 174593 - DNA, 30 bp, Artificial Sequence
  Synthetic oligonucleotide
aaagagagtaaatttcataggccggttcgc

SEQ ID NO: 174594 - DNA, 30 bp, Artificial Sequence
  Synthetic oligonucleotide
cgcacgtctcagtttgtctgtaaatttcgc

SEQ ID NO: 174595 - DNA, 30 bp, Artificial Sequence
  Synthetic oligonucleotide
agggccttgtactatcggttcgtcaaaggc

SEQ ID NO: 174596 - DNA, 30 bp, Artificial Sequence
  Synthetic oligonucleotide
taactaagctaaagaagacaatgtaaaggc

SEQ ID NO: 174597 - DNA, 31 bp, Artificial Sequence
  Synthetic oligonucleotide
actcgaatgcggttaactagggtaacaaggc

SEQ ID NO: 174598 - DNA, 30 bp, Artificial Sequence
  Synthetic oligonucleotide
tagcggacatccgctggccagagacaaggc

SEQ ID NO: 174599 - DNA, 30 bp, Artificial Sequence
  Synthetic oligonucleotide
actggggagcgccctaaggagcaccaaggc

SEQ ID NO: 174600 - DNA, 30 bp, Artificial Sequence
  Synthetic oligonucleotide
tactttgtgctattgaataacgaccaaggc

SEQ ID NO: 174601 - DNA, 30 bp, Artificial Sequence
  Synthetic oligonucleotide
agcaaggatccgtatctttgataagaaggc

SEQ ID NO: 174602 - DNA, 30 bp, Artificial Sequence
  Synthetic oligonucleotide
ggcgaatagtggtcattaccaaacgaaggc

SEQ ID NO: 174603 - DNA, 30 bp, Artificial Sequence
  Synthetic oligonucleotide
caagaggggtatggtataacgaacgaaggc

SEQ ID NO: 174604 - DNA, 30 bp, Artificial Sequence
  Synthetic oligonucleotide
tcaatcggtatcaatgatctgcaggaaggc

SEQ ID NO: 174605 - DNA, 30 bp, Artificial Sequence
  Synthetic oligonucleotide
tgccttttacgaatcgggttacgggaaggc

SEQ ID NO: 174606 - DNA, 30 bp, Artificial Sequence
  Synthetic oligonucleotide
gtataggcaagtagatccacgcgtgaaggc

SEQ ID NO: 174607 - DNA, 30 bp, Artificial Sequence
  Synthetic oligonucleotide
acatctatataatagctcgattcataaggc

SEQ ID NO: 174608 - DNA, 30 bp, Artificial Sequence
  Synthetic oligonucleotide
aggcttaggcgataaaaccatcactaaggc

SEQ ID NO: 174609 - DNA, 30 bp, Artificial Sequence
  Synthetic oligonucleotide
caaacgagcgtgtcgtataagtcctaaggc

SEQ ID NO: 174610 - DNA, 30 bp, Artificial Sequence
  Synthetic oligonucleotide
gattgttaagacggaagagttcagtaaggc

SEQ ID NO: 174611 - DNA, 30 bp, Artificial Sequence
  Synthetic oligonucleotide
cgaggagtgggacccgggcgacgttaaggc

SEQ ID NO: 174612 - DNA, 30 bp, Artificial Sequence
  Synthetic oligonucleotide
agaatatcactttaatgggtggtaacaggc

SEQ ID NO: 174613 - DNA, 30 bp, Artificial Sequence
  Synthetic oligonucleotide
accagagggtatggggattaacgcacaggc

SEQ ID NO: 174614 - DNA, 30 bp, Artificial Sequence
  Synthetic oligonucleotide
atccgacacttaacggtagactgcacaggc

SEQ ID NO: 174615 - DNA, 30 bp, Artificial Sequence
  Synthetic oligonucleotide
ggtgctacccgtagcaacctctagacaggc

SEQ ID NO: 174616 - DNA, 30 bp, Artificial Sequence
  Synthetic oligonucleotide
cgaacgtgcgatgcgggcataacgacaggc

SEQ ID NO: 174617 - DNA, 30 bp, Artificial Sequence
  Synthetic oligonucleotide
tgtaagctctgaaggctagtcataccaggc

SEQ ID NO: 174618 - DNA, 30 bp, Artificial Sequence
  Synthetic oligonucleotide
cagagtgcgagacagaaagctacagcaggc

SEQ ID NO: 174619 - DNA, 30 bp, Artificial Sequence
  Synthetic oligonucleotide
caccgcccaaaaagccgcccgtgcgcaggc

SEQ ID NO: 174620 - DNA, 30 bp, Artificial Sequence
  Synthetic oligonucleotide
aatgaacagcgaccgtgtacgccggcaggc

SEQ ID NO: 174621 - DNA, 30 bp, Artificial Sequence
  Synthetic oligonucleotide
cccggtagtcccaaggtcaggctggcaggc

SEQ ID NO: 174622 - DNA, 30 bp, Artificial Sequence
  Synthetic oligonucleotide
aagtcaaatgaggccgcggtgaatgcaggc

SEQ ID NO: 174623 - DNA, 30 bp, Artificial Sequence
  Synthetic oligonucleotide
gcattcaatgcttggctaagcagatcaggc

SEQ ID NO: 174624 - DNA, 30 bp, Artificial Sequence
  Synthetic oligonucleotide
cttcaggcagtaacgtctaccttatcaggc

SEQ ID NO: 174625 - DNA, 30 bp, Artificial Sequence
  Synthetic oligonucleotide
ctggagattgttaattaaaacatgagaggc

SEQ ID NO: 174626 - DNA, 30 bp, Artificial Sequence
  Synthetic oligonucleotide
tcgcaaaaggaattctgtcgcaatagaggc

SEQ ID NO: 174627 - DNA, 31 bp, Artificial Sequence
  Synthetic oligonucleotide
gacaggaaaagtgcagcatgttattagaggc

SEQ ID NO: 174628 - DNA, 30 bp, Artificial Sequence
  Synthetic oligonucleotide
tcccaggcaagagacgatcatgaccgaggc

SEQ ID NO: 174629 - DNA, 30 bp, Artificial Sequence
  Synthetic oligonucleotide
aaacaagccgttggggtatgcgggcgaggc

SEQ ID NO: 174630 - DNA, 30 bp, Artificial Sequence
  Synthetic oligonucleotide
tctggtacgatacgaagcgaatggcgaggc

SEQ ID NO: 174631 - DNA, 30 bp, Artificial Sequence
  Synthetic oligonucleotide
tagtactgcatcgtggggaacgaaggaggc

SEQ ID NO: 174632 - DNA, 30 bp, Artificial Sequence
  Synthetic oligonucleotide
ttggagactgctctaccaaaaaacggaggc

SEQ ID NO: 174633 - DNA, 30 bp, Artificial Sequence
  Synthetic oligonucleotide
gctttaggtgcgccgcaaaaaggtggaggc

SEQ ID NO: 174634 - DNA, 30 bp, Artificial Sequence
  Synthetic oligonucleotide
ggcactaggccaagaactgggattggaggc

SEQ ID NO: 174635 - DNA, 30 bp, Artificial Sequence
  Synthetic oligonucleotide
ggcacgtgctgtttttatacaaactgaggc

SEQ ID NO: 174636 - DNA, 30 bp, Artificial Sequence
  Synthetic oligonucleotide
tgacctaaatccaaggcatttgcctgaggc

SEQ ID NO: 174637 - DNA, 30 bp, Artificial Sequence
  Synthetic oligonucleotide
cacaatctgggaacggtacttggctgaggc

SEQ ID NO: 174638 - DNA, 30 bp, Artificial Sequence
  Synthetic oligonucleotide
ctagaagtgtggccgcatgtttccataggc

SEQ ID NO: 174639 - DNA, 30 bp, Artificial Sequence
  Synthetic oligonucleotide
agcagtatgagaccgcggaaaggcataggc

SEQ ID NO: 174640 - DNA, 30 bp, Artificial Sequence
  Synthetic oligonucleotide
ggtgttaacttgcagatggccagggtaggc

SEQ ID NO: 174641 - DNA, 30 bp, Artificial Sequence
  Synthetic oligonucleotide
tagctctgctctagctccggcccgttaggc

SEQ ID NO: 174642 - DNA, 30 bp, Artificial Sequence
  Synthetic oligonucleotide
tgacaaggtgctggcaacacagcgttaggc

SEQ ID NO: 174643 - DNA, 30 bp, Artificial Sequence
  Synthetic oligonucleotide
gccagcccgaaggaggaatttggtttaggc

SEQ ID NO: 174644 - DNA, 30 bp, Artificial Sequence
  Synthetic oligonucleotide
gcctaactgaacggatgtgattgcaacggc

SEQ ID NO: 174645 - DNA, 30 bp, Artificial Sequence
  Synthetic oligonucleotide
gatcaaagataattatgagctttcaacggc

SEQ ID NO: 174646 - DNA, 30 bp, Artificial Sequence
  Synthetic oligonucleotide
caggggaaggcctcttccgtcatgaacggc

SEQ ID NO: 174647 - DNA, 30 bp, Artificial Sequence
  Synthetic oligonucleotide
cattagctggtggatcggacctgtaacggc

SEQ ID NO: 174648 - DNA, 30 bp, Artificial Sequence
  Synthetic oligonucleotide
ccccatatgactgtattaaaggagcacggc

SEQ ID NO: 174649 - DNA, 30 bp, Artificial Sequence
  Synthetic oligonucleotide
agcaggcgcaaagtcagattgactcacggc

SEQ ID NO: 174650 - DNA, 30 bp, Artificial Sequence
  Synthetic oligonucleotide
tccgaatcagtatctagaacgaaagacggc

SEQ ID NO: 174651 - DNA, 30 bp, Artificial Sequence
  Synthetic oligonucleotide
cgcattctttcactcgggaagcaagacggc

SEQ ID NO: 174652 - DNA, 30 bp, Artificial Sequence
  Synthetic oligonucleotide
aaataggctgctctgcgaagcaatgacggc

SEQ ID NO: 174653 - DNA, 30 bp, Artificial Sequence
  Synthetic oligonucleotide
tcgtgcaaggatggtagatcagttgacggc

SEQ ID NO: 174654 - DNA, 30 bp, Artificial Sequence
  Synthetic oligonucleotide
tggcacctaggagagtacgcatcatacggc

SEQ ID NO: 174655 - DNA, 30 bp, Artificial Sequence
  Synthetic oligonucleotide
ttagcttatttgatagcggggaggtacggc

SEQ ID NO: 174656 - DNA, 30 bp, Artificial Sequence
  Synthetic oligonucleotide
acaaggcgcccctttagcggtaggtacggc

SEQ ID NO: 174657 - DNA, 30 bp, Artificial Sequence
  Synthetic oligonucleotide
ggaacttggattagggtgatttattacggc

SEQ ID NO: 174658 - DNA, 30 bp, Artificial Sequence
  Synthetic oligonucleotide
gcaaggagtcgtcagcttggaacaaccggc

SEQ ID NO: 174659 - DNA, 30 bp, Artificial Sequence
  Synthetic oligonucleotide
atttaagtaggccacactttctgaaccggc

SEQ ID NO: 174660 - DNA, 29 bp, Artificial Sequence
  Synthetic oligonucleotide
cgctaataagccagcagatttgtaccggc

SEQ ID NO: 174661 - DNA, 30 bp, Artificial Sequence
  Synthetic oligonucleotide
aaaataggcatagtgcaagcattggccggc

SEQ ID NO: 174662 - DNA, 30 bp, Artificial Sequence
  Synthetic oligonucleotide
ttaaagtaacgctatcgacccagtgccggc

SEQ ID NO: 174663 - DNA, 30 bp, Artificial Sequence
  Synthetic oligonucleotide
cacgacgattcatttaatgaatcatccggc

SEQ ID NO: 174664 - DNA, 30 bp, Artificial Sequence
  Synthetic oligonucleotide
aggtgcagaaacccgtcatccaagtccggc

SEQ ID NO: 174665 - DNA, 30 bp, Artificial Sequence
  Synthetic oligonucleotide
aggtaagacatacaaaccgccaggtccggc

SEQ ID NO: 174666 - DNA, 30 bp, Artificial Sequence
  Synthetic oligonucleotide
tcgaactacgcggaagctcttgattccggc

SEQ ID NO: 174667 - DNA, 30 bp, Artificial Sequence
  Synthetic oligonucleotide
ctcgcgatttatacaacaagtgcgagcggc

SEQ ID NO: 174668 - DNA, 30 bp, Artificial Sequence
  Synthetic oligonucleotide
agctcctggtcgcgtgtcggcccgcgcggc

SEQ ID NO: 174669 - DNA, 30 bp, Artificial Sequence
  Synthetic oligonucleotide
tcacgcatgtggcgcttcccagcgcgcggc

SEQ ID NO: 174670 - DNA, 30 bp, Artificial Sequence
  Synthetic oligonucleotide
ttgacttagacggggttcccaatgcgcggc

SEQ ID NO: 174671 - DNA, 30 bp, Artificial Sequence
  Synthetic oligonucleotide
gtgtatgcctgcgtaagcaacccgggcggc

SEQ ID NO: 174672 - DNA, 30 bp, Artificial Sequence
  Synthetic oligonucleotide
acgtagtacggtaatgaccgtatgggcggc

SEQ ID NO: 174673 - DNA, 30 bp, Artificial Sequence
  Synthetic oligonucleotide
agggttacattagtacgcaagcatggcggc

SEQ ID NO: 174674 - DNA, 30 bp, Artificial Sequence
  Synthetic oligonucleotide
tctgataaaggggcaagaatttatggcggc

SEQ ID NO: 174675 - DNA, 30 bp, Artificial Sequence
  Synthetic oligonucleotide
cataggggacgcatcgaacgaggtggcggc

SEQ ID NO: 174676 - DNA, 30 bp, Artificial Sequence
  Synthetic oligonucleotide
ttatgtgtgaagtttagtgacaaatgcggc

SEQ ID NO: 174677 - DNA, 30 bp, Artificial Sequence
  Synthetic oligonucleotide
gttcagggtggcacgagccagagatgcggc

SEQ ID NO: 174678 - DNA, 30 bp, Artificial Sequence
  Synthetic oligonucleotide
tggtaattgagatcggtatcgtcaatcggc

SEQ ID NO: 174679 - DNA, 30 bp, Artificial Sequence
  Synthetic oligonucleotide
acgaccttggacagtgactattccatcggc

SEQ ID NO: 174680 - DNA, 30 bp, Artificial Sequence
  Synthetic oligonucleotide
gtagcgctgtcaggtacagagtgcatcggc

SEQ ID NO: 174681 - DNA, 30 bp, Artificial Sequence
  Synthetic oligonucleotide
aaagggcttaatgcagcgccaaatatcggc

SEQ ID NO: 174682 - DNA, 30 bp, Artificial Sequence
  Synthetic oligonucleotide
aacttacacccacgcgagttggcactcggc

SEQ ID NO: 174683 - DNA, 30 bp, Artificial Sequence
  Synthetic oligonucleotide
agccggacccaattattacttatcctcggc

SEQ ID NO: 174684 - DNA, 30 bp, Artificial Sequence
  Synthetic oligonucleotide
acgaggtaccgggtagctttgttcctcggc

SEQ ID NO: 174685 - DNA, 30 bp, Artificial Sequence
  Synthetic oligonucleotide
ctttttgttatacctagatgggggctcggc

SEQ ID NO: 174686 - DNA, 30 bp, Artificial Sequence
  Synthetic oligonucleotide
tggaccgatcagcttgctgttgtgctcggc

SEQ ID NO: 174687 - DNA, 30 bp, Artificial Sequence
  Synthetic oligonucleotide
ccagacgagactgattgtcaagaagtcggc

SEQ ID NO: 174688 - DNA, 30 bp, Artificial Sequence
  Synthetic oligonucleotide
tagcccttgatacacctaaatcacgtcggc

SEQ ID NO: 174689 - DNA, 30 bp, Artificial Sequence
  Synthetic oligonucleotide
ggcagtgatcgataatcgactcgtgtcggc

SEQ ID NO: 174690 - DNA, 30 bp, Artificial Sequence
  Synthetic oligonucleotide
ttgtcggcatggaacatcctggttgtcggc

SEQ ID NO: 174691 - DNA, 30 bp, Artificial Sequence
  Synthetic oligonucleotide
ccacaagcttccgggggacagggcttcggc

SEQ ID NO: 174692 - DNA, 30 bp, Artificial Sequence
  Synthetic oligonucleotide
tctatggatgggtccggcgtgtgcttcggc

SEQ ID NO: 174693 - DNA, 30 bp, Artificial Sequence
  Synthetic oligonucleotide
ctatggcagggcggtagggcgagaaagggc

SEQ ID NO: 174694 - DNA, 30 bp, Artificial Sequence
  Synthetic oligonucleotide
tggtagtcctatcgagcgttgaataagggc

SEQ ID NO: 174695 - DNA, 30 bp, Artificial Sequence
  Synthetic oligonucleotide
cgccaggcaaatgttcaattacctaagggc

SEQ ID NO: 174696 - DNA, 30 bp, Artificial Sequence
  Synthetic oligonucleotide
ccatcactattggacttcacacatcagggc

SEQ ID NO: 174697 - DNA, 30 bp, Artificial Sequence
  Synthetic oligonucleotide
acctacataaggacctgtgaaggtcagggc

SEQ ID NO: 174698 - DNA, 30 bp, Artificial Sequence
  Synthetic oligonucleotide
accttgtaacggaaacagcatgttcagggc

SEQ ID NO: 174699 - DNA, 30 bp, Artificial Sequence
  Synthetic oligonucleotide
gggtgtccctagagtcagatgagagagggc

SEQ ID NO: 174700 - DNA, 30 bp, Artificial Sequence
  Synthetic oligonucleotide
ggggtggggagaacggaattcatagagggc

SEQ ID NO: 174701 - DNA, 30 bp, Artificial Sequence
  Synthetic oligonucleotide
cactcccgggcttagggtctcctcgagggc

SEQ ID NO: 174702 - DNA, 30 bp, Artificial Sequence
  Synthetic oligonucleotide
accgcgaggtcggctactagaacgtagggc

SEQ ID NO: 174703 - DNA, 30 bp, Artificial Sequence
  Synthetic oligonucleotide
gccaaggctatcacgatcgtacaaacgggc

SEQ ID NO: 174704 - DNA, 30 bp, Artificial Sequence
  Synthetic oligonucleotide
tacagcggatctgaagcgagcaggacgggc

SEQ ID NO: 174705 - DNA, 30 bp, Artificial Sequence
  Synthetic oligonucleotide
tagcgtatatgtgcctatgaaattacgggc

SEQ ID NO: 174706 - DNA, 30 bp, Artificial Sequence
  Synthetic oligonucleotide
gaaggccgatgggagtacgaggtgccgggc

SEQ ID NO: 174707 - DNA, 30 bp, Artificial Sequence
  Synthetic oligonucleotide
cgttcgaggaacaccgcttcatatccgggc

SEQ ID NO: 174708 - DNA, 30 bp, Artificial Sequence
  Synthetic oligonucleotide
acacagtgtgccgggcaatgactagcgggc

SEQ ID NO: 174709 - DNA, 30 bp, Artificial Sequence
  Synthetic oligonucleotide
cggtagccttgggtaggataatcggcgggc

SEQ ID NO: 174710 - DNA, 30 bp, Artificial Sequence
  Synthetic oligonucleotide
aaaagaacatcacgggacgataattcgggc

SEQ ID NO: 174711 - DNA, 30 bp, Artificial Sequence
  Synthetic oligonucleotide
agtgccaagtgggccactgcgtccaggggc

SEQ ID NO: 174712 - DNA, 30 bp, Artificial Sequence
  Synthetic oligonucleotide
tttattaccgagcaaataatcgtcaggggc

SEQ ID NO: 174713 - DNA, 30 bp, Artificial Sequence
  Synthetic oligonucleotide
agggacgaactacacaatttgtagaggggc

SEQ ID NO: 174714 - DNA, 30 bp, Artificial Sequence
  Synthetic oligonucleotide
gaggcgaaaggtaagtcttttccgaggggc

SEQ ID NO: 174715 - DNA, 30 bp, Artificial Sequence
  Synthetic oligonucleotide
cggaggatctgtgtgcgaaaaatccggggc

SEQ ID NO: 174716 - DNA, 30 bp, Artificial Sequence
  Synthetic oligonucleotide
tagaatgggtgcaaaggctaccatcggggc

SEQ ID NO: 174717 - DNA, 30 bp, Artificial Sequence
  Synthetic oligonucleotide
atggtgcaatcagatgaggaacttcggggc

SEQ ID NO: 174718 - DNA, 30 bp, Artificial Sequence
  Synthetic oligonucleotide
aggcacctaaaaggtctccataaagggggc

SEQ ID NO: 174719 - DNA, 30 bp, Artificial Sequence
  Synthetic oligonucleotide
atggctgggtacctaatcaagaccgggggc

SEQ ID NO: 174720 - DNA, 30 bp, Artificial Sequence
  Synthetic oligonucleotide
gcgcggtggaaacttagcgcgcgcgggggc

SEQ ID NO: 174721 - DNA, 30 bp, Artificial Sequence
  Synthetic oligonucleotide
cgatccagagaaatggtccctgaggggggc

SEQ ID NO: 174722 - DNA, 30 bp, Artificial Sequence
  Synthetic oligonucleotide
gctatatccggcgcctgctgaagggggggc

SEQ ID NO: 174723 - DNA, 31 bp, Artificial Sequence
  Synthetic oligonucleotide
gtataggacctagagatgggtagaatggggc

SEQ ID NO: 174724 - DNA, 30 bp, Artificial Sequence
  Synthetic oligonucleotide
catacgaggatgtcgataattccctggggc

SEQ ID NO: 174725 - DNA, 30 bp, Artificial Sequence
  Synthetic oligonucleotide
cgtcgatcttcgcattattcgcgctggggc

SEQ ID NO: 174726 - DNA, 30 bp, Artificial Sequence
  Synthetic oligonucleotide
gtgtcatatgtactcggccgagcgatgggc

SEQ ID NO: 174727 - DNA, 30 bp, Artificial Sequence
  Synthetic oligonucleotide
tatctcgcgagtgcaatctcaagcctgggc

SEQ ID NO: 174728 - DNA, 30 bp, Artificial Sequence
  Synthetic oligonucleotide
gataattagcataagcctcacagtctgggc

SEQ ID NO: 174729 - DNA, 30 bp, Artificial Sequence
  Synthetic oligonucleotide
caaactaactcagaacagcctacggtgggc

SEQ ID NO: 174730 - DNA, 30 bp, Artificial Sequence
  Synthetic oligonucleotide
gtgtgcattaagatacgccagattgtgggc

SEQ ID NO: 174731 - DNA, 30 bp, Artificial Sequence
  Synthetic oligonucleotide
tatgtcgaactagggaaagctattgtgggc

SEQ ID NO: 174732 - DNA, 30 bp, Artificial Sequence
  Synthetic oligonucleotide
tagggaacccgatggtgtactggtttgggc

SEQ ID NO: 174733 - DNA, 30 bp, Artificial Sequence
  Synthetic oligonucleotide
aatgattggaactggaccagggccaatggc

SEQ ID NO: 174734 - DNA, 30 bp, Artificial Sequence
  Synthetic oligonucleotide
tcacgcatactcagattgtacgcgaatggc

SEQ ID NO: 174735 - DNA, 30 bp, Artificial Sequence
  Synthetic oligonucleotide
ctcctgtagtgggaatggggaatgaatggc

SEQ ID NO: 174736 - DNA, 30 bp, Artificial Sequence
  Synthetic oligonucleotide
atcgtgacgttacccataaaaactaatggc

SEQ ID NO: 174737 - DNA, 30 bp, Artificial Sequence
  Synthetic oligonucleotide
tgtcagagaggaaagaagcgcagtaatggc

SEQ ID NO: 174738 - DNA, 30 bp, Artificial Sequence
  Synthetic oligonucleotide
gatactgtggtgtgggatataagacatggc

SEQ ID NO: 174739 - DNA, 30 bp, Artificial Sequence
  Synthetic oligonucleotide
tagcctgtgctcataagaccatgacatggc

SEQ ID NO: 174740 - DNA, 30 bp, Artificial Sequence
  Synthetic oligonucleotide
cagttcaaagttaaaattgcccaccatggc

SEQ ID NO: 174741 - DNA, 30 bp, Artificial Sequence
  Synthetic oligonucleotide
gttaggaccataatgaatccgtcagatggc

SEQ ID NO: 174742 - DNA, 30 bp, Artificial Sequence
  Synthetic oligonucleotide
taaacattcgccagtgttctgtacgatggc

SEQ ID NO: 174743 - DNA, 30 bp, Artificial Sequence
  Synthetic oligonucleotide
gcaggaatcttagttaatggctgggatggc

SEQ ID NO: 174744 - DNA, 30 bp, Artificial Sequence
  Synthetic oligonucleotide
atcataggcgatgtcacgcgaagtgatggc

SEQ ID NO: 174745 - DNA, 30 bp, Artificial Sequence
  Synthetic oligonucleotide
aagaagggaaatcgagattcgggcactggc

SEQ ID NO: 174746 - DNA, 30 bp, Artificial Sequence
  Synthetic oligonucleotide
ataaaaaggatgactccatgggtacctggc

SEQ ID NO: 174747 - DNA, 30 bp, Artificial Sequence
  Synthetic oligonucleotide
gcgccatatggaggttaaatgcatcctggc

SEQ ID NO: 174748 - DNA, 30 bp, Artificial Sequence
  Synthetic oligonucleotide
tgcattgagagtgtcacgcccattcctggc

SEQ ID NO: 174749 - DNA, 30 bp, Artificial Sequence
  Synthetic oligonucleotide
ctaactacgggaaagagacacaacgctggc

SEQ ID NO: 174750 - DNA, 30 bp, Artificial Sequence
  Synthetic oligonucleotide
cgaaaggctccaggccaacggccggctggc

SEQ ID NO: 174751 - DNA, 30 bp, Artificial Sequence
  Synthetic oligonucleotide
aatagtctcgagtcatctaaccggtctggc

SEQ ID NO: 174752 - DNA, 30 bp, Artificial Sequence
  Synthetic oligonucleotide
aatgcgaagatatgcaagccgggaagtggc

SEQ ID NO: 174753 - DNA, 30 bp, Artificial Sequence
  Synthetic oligonucleotide
aagctattggggataggcgttaacagtggc

SEQ ID NO: 174754 - DNA, 30 bp, Artificial Sequence
  Synthetic oligonucleotide
ctctacgagggagggcacttatccagtggc

SEQ ID NO: 174755 - DNA, 30 bp, Artificial Sequence
  Synthetic oligonucleotide
gagccgtaatgtcctccggaaaggagtggc

SEQ ID NO: 174756 - DNA, 30 bp, Artificial Sequence
  Synthetic oligonucleotide
tgcatcaggagattcgaatgggttagtggc

SEQ ID NO: 174757 - DNA, 30 bp, Artificial Sequence
  Synthetic oligonucleotide
ccagcgtgcagtttggataaagagcgtggc

SEQ ID NO: 174758 - DNA, 30 bp, Artificial Sequence
  Synthetic oligonucleotide
ggtaaggggattgtatgctgcgtaggtggc

SEQ ID NO: 174759 - DNA, 30 bp, Artificial Sequence
  Synthetic oligonucleotide
cacacagtcttagaccagaaaaagggtggc

SEQ ID NO: 174760 - DNA, 30 bp, Artificial Sequence
  Synthetic oligonucleotide
ggccaacgcttcgcatggaaagagggtggc

SEQ ID NO: 174761 - DNA, 30 bp, Artificial Sequence
  Synthetic oligonucleotide
ataagattagctgcccctgcgacgggtggc

SEQ ID NO: 174762 - DNA, 30 bp, Artificial Sequence
  Synthetic oligonucleotide
agtggccagaaaacactccgtacgggtggc

SEQ ID NO: 174763 - DNA, 30 bp, Artificial Sequence
  Synthetic oligonucleotide
cgctaggtttggatttatgggtcgggtggc

SEQ ID NO: 174764 - DNA, 30 bp, Artificial Sequence
  Synthetic oligonucleotide
cctattagtggaatgctacagtaaattggc

SEQ ID NO: 174765 - DNA, 30 bp, Artificial Sequence
  Synthetic oligonucleotide
ctgcgcagtctgaacatgcacaatattggc

SEQ ID NO: 174766 - DNA, 30 bp, Artificial Sequence
  Synthetic oligonucleotide
aaggcaccccgtattgctatcattattggc

SEQ ID NO: 174767 - DNA, 30 bp, Artificial Sequence
  Synthetic oligonucleotide
aataaaacggtcatacgtttgtacgttggc

SEQ ID NO: 174768 - DNA, 30 bp, Artificial Sequence
  Synthetic oligonucleotide
aacgcccggaaacaacacccgacatttggc

SEQ ID NO: 174769 - DNA, 30 bp, Artificial Sequence
  Synthetic oligonucleotide
ttcctgacaatggtggggggagtgtttggc

SEQ ID NO: 174770 - DNA, 30 bp, Artificial Sequence
  Synthetic oligonucleotide
tgttcgcaatagatcggttctcccaaatgc

SEQ ID NO: 174771 - DNA, 30 bp, Artificial Sequence
  Synthetic oligonucleotide
actaactcctcagagtggagccctaaatgc

SEQ ID NO: 174772 - DNA, 30 bp, Artificial Sequence
  Synthetic oligonucleotide
agcgatcgtgcgaacatgcagaatcaatgc

SEQ ID NO: 174773 - DNA, 30 bp, Artificial Sequence
  Synthetic oligonucleotide
ggtaagcatcctccaagcattgaagaatgc

SEQ ID NO: 174774 - DNA, 30 bp, Artificial Sequence
  Synthetic oligonucleotide
gctgcacagagagatagaagactcgaatgc

SEQ ID NO: 174775 - DNA, 30 bp, Artificial Sequence
  Synthetic oligonucleotide
tcgcggatgctgctggctggcgtataatgc

SEQ ID NO: 174776 - DNA, 30 bp, Artificial Sequence
  Synthetic oligonucleotide
tcgccttggggactagaagcgatctaatgc

SEQ ID NO: 174777 - DNA, 30 bp, Artificial Sequence
  Synthetic oligonucleotide
aaactcacgaaatagtccgaacattaatgc

SEQ ID NO: 174778 - DNA, 30 bp, Artificial Sequence
  Synthetic oligonucleotide
cacgggggaaagtgagatgaagtttaatgc

SEQ ID NO: 174779 - DNA, 30 bp, Artificial Sequence
  Synthetic oligonucleotide
tttcgcaactaaactccactgaccacatgc

SEQ ID NO: 174780 - DNA, 30 bp, Artificial Sequence
  Synthetic oligonucleotide
gaaacagatgtaaactccctaaagacatgc

SEQ ID NO: 174781 - DNA, 30 bp, Artificial Sequence
  Synthetic oligonucleotide
ggagcaagacttgccactttttctacatgc

SEQ ID NO: 174782 - DNA, 30 bp, Artificial Sequence
  Synthetic oligonucleotide
taagcatgccagcgtggatcagatccatgc

SEQ ID NO: 174783 - DNA, 29 bp, Artificial Sequence
  Synthetic oligonucleotide
agactggatggctactgtagtttccatgc

SEQ ID NO: 174784 - DNA, 30 bp, Artificial Sequence
  Synthetic oligonucleotide
ggcaagtatgatcagttcgctgtagcatgc

SEQ ID NO: 174785 - DNA, 30 bp, Artificial Sequence
  Synthetic oligonucleotide
cacgattactgacaacctactaacgcatgc

SEQ ID NO: 174786 - DNA, 30 bp, Artificial Sequence
  Synthetic oligonucleotide
aaacaaacttgtaaagaaccggcggcatgc

SEQ ID NO: 174787 - DNA, 30 bp, Artificial Sequence
  Synthetic oligonucleotide
gtcaactcatcccagtttcggcgggcatgc

SEQ ID NO: 174788 - DNA, 30 bp, Artificial Sequence
  Synthetic oligonucleotide
ggtaaaactgacagtgtgccaccatcatgc

SEQ ID NO: 174789 - DNA, 30 bp, Artificial Sequence
  Synthetic oligonucleotide
cggggaattactgggatagcatgctcatgc

SEQ ID NO: 174790 - DNA, 30 bp, Artificial Sequence
  Synthetic oligonucleotide
aacgtttacctacgagttgaggattcatgc

SEQ ID NO: 174791 - DNA, 30 bp, Artificial Sequence
  Synthetic oligonucleotide
gaccgtttaaaaaggggctgagcttcatgc

SEQ ID NO: 174792 - DNA, 30 bp, Artificial Sequence
  Synthetic oligonucleotide
cagccttggacaaatgggttaggttcatgc

SEQ ID NO: 174793 - DNA, 30 bp, Artificial Sequence
  Synthetic oligonucleotide
tgtggctactagaacttctagaaaagatgc

SEQ ID NO: 174794 - DNA, 30 bp, Artificial Sequence
  Synthetic oligonucleotide
gccaccaaatgtatagcgggatacagatgc

SEQ ID NO: 174795 - DNA, 29 bp, Artificial Sequence
  Synthetic oligonucleotide
cacggtaacactgtcttgcaaccagatgc

SEQ ID NO: 174796 - DNA, 30 bp, Artificial Sequence
  Synthetic oligonucleotide
atacagaggtcatagaaaaaacggagatgc

SEQ ID NO: 174797 - DNA, 30 bp, Artificial Sequence
  Synthetic oligonucleotide
attacagaagcttggaaggaaatacgatgc

SEQ ID NO: 174798 - DNA, 30 bp, Artificial Sequence
  Synthetic oligonucleotide
gctggtctgaacgttagacattgccgatgc

SEQ ID NO: 174799 - DNA, 30 bp, Artificial Sequence
  Synthetic oligonucleotide
catgacctaccgtttacctcgagtcgatgc

SEQ ID NO: 174800 - DNA, 30 bp, Artificial Sequence
  Synthetic oligonucleotide
tgctcagggatacggctggttgacggatgc

SEQ ID NO: 174801 - DNA, 30 bp, Artificial Sequence
  Synthetic oligonucleotide
caaggtcaacatccttccacgcccggatgc

SEQ ID NO: 174802 - DNA, 30 bp, Artificial Sequence
  Synthetic oligonucleotide
gcgccgtctgtcgatagactctccggatgc

SEQ ID NO: 174803 - DNA, 30 bp, Artificial Sequence
  Synthetic oligonucleotide
gatgaatagcaacgcagtgcccagggatgc

SEQ ID NO: 174804 - DNA, 30 bp, Artificial Sequence
  Synthetic oligonucleotide
tacagccagaagccctgagcgcagggatgc

SEQ ID NO: 174805 - DNA, 30 bp, Artificial Sequence
  Synthetic oligonucleotide
tcggtaacggcgcatcctaatggctgatgc

SEQ ID NO: 174806 - DNA, 30 bp, Artificial Sequence
  Synthetic oligonucleotide
tgatccacgtgtcgcattcggatctgatgc

SEQ ID NO: 174807 - DNA, 30 bp, Artificial Sequence
  Synthetic oligonucleotide
cgcccatatctcgttctggtccgaatatgc

SEQ ID NO: 174808 - DNA, 30 bp, Artificial Sequence
  Synthetic oligonucleotide
gcacaaggtttatatctgtaggtaatatgc

SEQ ID NO: 174809 - DNA, 30 bp, Artificial Sequence
  Synthetic oligonucleotide
tcactgacgtttgacatcgaatgcatatgc

SEQ ID NO: 174810 - DNA, 30 bp, Artificial Sequence
  Synthetic oligonucleotide
gtcatacgagacacaccaactttgatatgc

SEQ ID NO: 174811 - DNA, 30 bp, Artificial Sequence
  Synthetic oligonucleotide
gagaccgggttagacggacactctatatgc

SEQ ID NO: 174812 - DNA, 30 bp, Artificial Sequence
  Synthetic oligonucleotide
tatacagtcaacggaagcgaacaactatgc

SEQ ID NO: 174813 - DNA, 30 bp, Artificial Sequence
  Synthetic oligonucleotide
taccttgtgtccagcatctcggaactatgc

SEQ ID NO: 174814 - DNA, 30 bp, Artificial Sequence
  Synthetic oligonucleotide
gtcacgcacgagtatatgggggatctatgc

SEQ ID NO: 174815 - DNA, 30 bp, Artificial Sequence
  Synthetic oligonucleotide
aaaggtaggaataagggtttgtctctatgc

SEQ ID NO: 174816 - DNA, 30 bp, Artificial Sequence
  Synthetic oligonucleotide
ttacagtaccggctctcaatagcagtatgc

SEQ ID NO: 174817 - DNA, 30 bp, Artificial Sequence
  Synthetic oligonucleotide
atatgatcggtgagtcgagaaagcgtatgc

SEQ ID NO: 174818 - DNA, 30 bp, Artificial Sequence
  Synthetic oligonucleotide
cggtagtaaaaattgcactatacggtatgc

SEQ ID NO: 174819 - DNA, 30 bp, Artificial Sequence
  Synthetic oligonucleotide
ctttataacgtggtatgcggattggtatgc

SEQ ID NO: 174820 - DNA, 30 bp, Artificial Sequence
  Synthetic oligonucleotide
acagtattgtctcgatatttctgtgtatgc

SEQ ID NO: 174821 - DNA, 30 bp, Artificial Sequence
  Synthetic oligonucleotide
gttcgtgttgagctggctgcaacaaactgc

SEQ ID NO: 174822 - DNA, 30 bp, Artificial Sequence
  Synthetic oligonucleotide
cacaatgcgctattcatcaacgtaaactgc

SEQ ID NO: 174823 - DNA, 30 bp, Artificial Sequence
  Synthetic oligonucleotide
gcgcagaaacacactgaacctcacaactgc

SEQ ID NO: 174824 - DNA, 30 bp, Artificial Sequence
  Synthetic oligonucleotide
ctagtcttgagtgcaagatcggttaactgc

SEQ ID NO: 174825 - DNA, 30 bp, Artificial Sequence
  Synthetic oligonucleotide
aaacgggagcggactgttgaggcacactgc

SEQ ID NO: 174826 - DNA, 30 bp, Artificial Sequence
  Synthetic oligonucleotide
aaaggcggattagtacgacgtaacgactgc

SEQ ID NO: 174827 - DNA, 30 bp, Artificial Sequence
  Synthetic oligonucleotide
acctcatggtacactgcaatacatgactgc

SEQ ID NO: 174828 - DNA, 30 bp, Artificial Sequence
  Synthetic oligonucleotide
cacggcgagatgaaggtggaccctgactgc

SEQ ID NO: 174829 - DNA, 30 bp, Artificial Sequence
  Synthetic oligonucleotide
tgcacttttcggaaagtgcggtctgactgc

SEQ ID NO: 174830 - DNA, 30 bp, Artificial Sequence
  Synthetic oligonucleotide
atcgatattgggttaatctaccggtactgc

SEQ ID NO: 174831 - DNA, 30 bp, Artificial Sequence
  Synthetic oligonucleotide
gtgaagggcaaattagatgcccattactgc

SEQ ID NO: 174832 - DNA, 30 bp, Artificial Sequence
  Synthetic oligonucleotide
tccaaagtccagtgagtatttcaaacctgc

SEQ ID NO: 174833 - DNA, 30 bp, Artificial Sequence
  Synthetic oligonucleotide
aacgttatagactcatagagtataacctgc

SEQ ID NO: 174834 - DNA, 30 bp, Artificial Sequence
  Synthetic oligonucleotide
ttctggcccattagagggaaggacacctgc

SEQ ID NO: 174835 - DNA, 30 bp, Artificial Sequence
  Synthetic oligonucleotide
caggtttacctaaacgagcctacgacctgc

SEQ ID NO: 174836 - DNA, 31 bp, Artificial Sequence
  Synthetic oligonucleotide
cccgagcaggttagacagatgaaatacctgc

SEQ ID NO: 174837 - DNA, 30 bp, Artificial Sequence
  Synthetic oligonucleotide
ccaggttggtcacatggtcggcatacctgc

SEQ ID NO: 174838 - DNA, 30 bp, Artificial Sequence
  Synthetic oligonucleotide
taagccgtgacttacatgtcccctacctgc

SEQ ID NO: 174839 - DNA, 30 bp, Artificial Sequence
  Synthetic oligonucleotide
tgttcaggagttacgagaagcgcagcctgc

SEQ ID NO: 174840 - DNA, 30 bp, Artificial Sequence
  Synthetic oligonucleotide
aaacacgaaggactggaagactgatcctgc

SEQ ID NO: 174841 - DNA, 30 bp, Artificial Sequence
  Synthetic oligonucleotide
ataatctcgacccacgtgcatcgctcctgc

SEQ ID NO: 174842 - DNA, 30 bp, Artificial Sequence
  Synthetic oligonucleotide
ctcggtaatttgtgctctcatgattcctgc

SEQ ID NO: 174843 - DNA, 30 bp, Artificial Sequence
  Synthetic oligonucleotide
gttaccggccgcggtgtaaaatgaagctgc

SEQ ID NO: 174844 - DNA, 30 bp, Artificial Sequence
  Synthetic oligonucleotide
cggtcccgcctaggcattatagagagctgc

SEQ ID NO: 174845 - DNA, 30 bp, Artificial Sequence
  Synthetic oligonucleotide
tgccgtatggactccagctagggacgctgc

SEQ ID NO: 174846 - DNA, 30 bp, Artificial Sequence
  Synthetic oligonucleotide
ttaaacgtaatattaaggtcggcccgctgc

SEQ ID NO: 174847 - DNA, 30 bp, Artificial Sequence
  Synthetic oligonucleotide
gcactatttgaggatacgtaagagcgctgc

SEQ ID NO: 174848 - DNA, 30 bp, Artificial Sequence
  Synthetic oligonucleotide
agtcagatccgatgtctaatgcaaggctgc

SEQ ID NO: 174849 - DNA, 30 bp, Artificial Sequence
  Synthetic oligonucleotide
agaagcaatctgtctcggttcaacggctgc

SEQ ID NO: 174850 - DNA, 30 bp, Artificial Sequence
  Synthetic oligonucleotide
acggatatgtaacaaaaggacaatggctgc

SEQ ID NO: 174851 - DNA, 30 bp, Artificial Sequence
  Synthetic oligonucleotide
acatacctggttttaagtcatctctgctgc

SEQ ID NO: 174852 - DNA, 30 bp, Artificial Sequence
  Synthetic oligonucleotide
tacaacagataagaatggcgtgggtgctgc

SEQ ID NO: 174853 - DNA, 30 bp, Artificial Sequence
  Synthetic oligonucleotide
tgattatcgtggcgtgtgagcgcttgctgc

SEQ ID NO: 174854 - DNA, 30 bp, Artificial Sequence
  Synthetic oligonucleotide
atgcctcaggttctgacaataccactctgc

SEQ ID NO: 174855 - DNA, 30 bp, Artificial Sequence
  Synthetic oligonucleotide
aatggaagcacagcattctctagcctctgc

SEQ ID NO: 174856 - DNA, 30 bp, Artificial Sequence
  Synthetic oligonucleotide
gacagtcgcattcggcttgttaatctctgc

SEQ ID NO: 174857 - DNA, 30 bp, Artificial Sequence
  Synthetic oligonucleotide
ggtaacagagcgcgggtgaaacatctctgc

SEQ ID NO: 174858 - DNA, 30 bp, Artificial Sequence
  Synthetic oligonucleotide
gttaataatcaccatggcagtcatctctgc

SEQ ID NO: 174859 - DNA, 30 bp, Artificial Sequence
  Synthetic oligonucleotide
tggccaacagtcagattccccagcgtctgc

SEQ ID NO: 174860 - DNA, 30 bp, Artificial Sequence
  Synthetic oligonucleotide
ttgagtgcgacctgaatcatagcattctgc

SEQ ID NO: 174861 - DNA, 30 bp, Artificial Sequence
  Synthetic oligonucleotide
cgtcacgcaggctaacttcccaatttctgc

SEQ ID NO: 174862 - DNA, 30 bp, Artificial Sequence
  Synthetic oligonucleotide
cacaagcatgggtttacatctagtttctgc

SEQ ID NO: 174863 - DNA, 30 bp, Artificial Sequence
  Synthetic oligonucleotide
cggattcgtacagcgtcgagcaaaaagtgc

SEQ ID NO: 174864 - DNA, 30 bp, Artificial Sequence
  Synthetic oligonucleotide
gcaacttatcagcccagaacgtcaaagtgc

SEQ ID NO: 174865 - DNA, 30 bp, Artificial Sequence
  Synthetic oligonucleotide
atcccgtggtaaaggtggcttgtacagtgc

SEQ ID NO: 174866 - DNA, 30 bp, Artificial Sequence
  Synthetic oligonucleotide
cctcaactaacttaacggatcttacagtgc

SEQ ID NO: 174867 - DNA, 30 bp, Artificial Sequence
  Synthetic oligonucleotide
tcggggtatcgttaaaggttgttagagtgc

SEQ ID NO: 174868 - DNA, 29 bp, Artificial Sequence
  Synthetic oligonucleotide
tgaagatactcgttgttctgcacgagtgc

SEQ ID NO: 174869 - DNA, 30 bp, Artificial Sequence
  Synthetic oligonucleotide
gaaccaaccttaaatgtataacaggagtgc

SEQ ID NO: 174870 - DNA, 30 bp, Artificial Sequence
  Synthetic oligonucleotide
acgaaaaactcgtctcgggaataatagtgc

SEQ ID NO: 174871 - DNA, 30 bp, Artificial Sequence
  Synthetic oligonucleotide
tcgacggtggtaaacgatattccctagtgc

SEQ ID NO: 174872 - DNA, 30 bp, Artificial Sequence
  Synthetic oligonucleotide
gcaggagtaaatgcttcgtgttaaacgtgc

SEQ ID NO: 174873 - DNA, 30 bp, Artificial Sequence
  Synthetic oligonucleotide
accttgtcacgctagaggcgactcacgtgc

SEQ ID NO: 174874 - DNA, 30 bp, Artificial Sequence
  Synthetic oligonucleotide
tcgacacataagcgcacaggaaaaccgtgc

SEQ ID NO: 174875 - DNA, 30 bp, Artificial Sequence
  Synthetic oligonucleotide
cgaaggaagcgggttgcgcttgaaccgtgc

SEQ ID NO: 174876 - DNA, 30 bp, Artificial Sequence
  Synthetic oligonucleotide
ccggtctatagaatttatggggacccgtgc

SEQ ID NO: 174877 - DNA, 30 bp, Artificial Sequence
  Synthetic oligonucleotide
ccctaaaaggaataaacccactccccgtgc

SEQ ID NO: 174878 - DNA, 30 bp, Artificial Sequence
  Synthetic oligonucleotide
caagaaacagttccatcattgcctccgtgc

SEQ ID NO: 174879 - DNA, 30 bp, Artificial Sequence
  Synthetic oligonucleotide
tgttatttccaggttcgcatataagcgtgc

SEQ ID NO: 174880 - DNA, 30 bp, Artificial Sequence
  Synthetic oligonucleotide
aggtctccagccgtaaattcagtagcgtgc

SEQ ID NO: 174881 - DNA, 30 bp, Artificial Sequence
  Synthetic oligonucleotide
gtgtctcatcgctaaagtgtatgcgcgtgc

SEQ ID NO: 174882 - DNA, 30 bp, Artificial Sequence
  Synthetic oligonucleotide
ctatcctgtgggggagggaacacggcgtgc

SEQ ID NO: 174883 - DNA, 30 bp, Artificial Sequence
  Synthetic oligonucleotide
gatttgggaataagggtgatagctgcgtgc

SEQ ID NO: 174884 - DNA, 30 bp, Artificial Sequence
  Synthetic oligonucleotide
agtgctctaccaaaaaggtgtgaatcgtgc

SEQ ID NO: 174885 - DNA, 30 bp, Artificial Sequence
  Synthetic oligonucleotide
ctactgctaatcgcataagtaggatcgtgc

SEQ ID NO: 174886 - DNA, 30 bp, Artificial Sequence
  Synthetic oligonucleotide
tgctgcgacgtagagtcggaacattcgtgc

SEQ ID NO: 174887 - DNA, 30 bp, Artificial Sequence
  Synthetic oligonucleotide
acgcgtgagcaataatggccagtaaggtgc

SEQ ID NO: 174888 - DNA, 30 bp, Artificial Sequence
  Synthetic oligonucleotide
tatgaagaaggtgccagggagcgcaggtgc

SEQ ID NO: 174889 - DNA, 30 bp, Artificial Sequence
  Synthetic oligonucleotide
caataaccacagtatttggggaggaggtgc

SEQ ID NO: 174890 - DNA, 30 bp, Artificial Sequence
  Synthetic oligonucleotide
ctaccgatgggtgatcggcatatccggtgc

SEQ ID NO: 174891 - DNA, 30 bp, Artificial Sequence
  Synthetic oligonucleotide
gaaacgaccgcgtcacaaggcacgcggtgc

SEQ ID NO: 174892 - DNA, 30 bp, Artificial Sequence
  Synthetic oligonucleotide
tgggttgaatacgtcacgcgaaggcggtgc

SEQ ID NO: 174893 - DNA, 30 bp, Artificial Sequence
  Synthetic oligonucleotide
aacaggttctgcactgtaagatatcggtgc

SEQ ID NO: 174894 - DNA, 30 bp, Artificial Sequence
  Synthetic oligonucleotide
ttattcatcacatgaattacgcgcgggtgc

SEQ ID NO: 174895 - DNA, 30 bp, Artificial Sequence
  Synthetic oligonucleotide
taataatcaaggtctcatgtcatcgggtgc

SEQ ID NO: 174896 - DNA, 30 bp, Artificial Sequence
  Synthetic oligonucleotide
tcagagataatcttgccgagacaggggtgc

SEQ ID NO: 174897 - DNA, 30 bp, Artificial Sequence
  Synthetic oligonucleotide
aagcatcctgctgttacatcgtctgggtgc

SEQ ID NO: 174898 - DNA, 30 bp, Artificial Sequence
  Synthetic oligonucleotide
gtgtattccataatttgggatcagtggtgc

SEQ ID NO: 174899 - DNA, 30 bp, Artificial Sequence
  Synthetic oligonucleotide
tgttcttcactcggcaccgaaaggatgtgc

SEQ ID NO: 174900 - DNA, 30 bp, Artificial Sequence
  Synthetic oligonucleotide
tgcttcataggaatttgtcgattgatgtgc

SEQ ID NO: 174901 - DNA, 30 bp, Artificial Sequence
  Synthetic oligonucleotide
cgtagtggggattatcttccaggactgtgc

SEQ ID NO: 174902 - DNA, 30 bp, Artificial Sequence
  Synthetic oligonucleotide
ggtcaaaattttgggcggggctaagtgtgc

SEQ ID NO: 174903 - DNA, 30 bp, Artificial Sequence
  Synthetic oligonucleotide
gaagaggtcgttggtagaggcaacgtgtgc

SEQ ID NO: 174904 - DNA, 30 bp, Artificial Sequence
  Synthetic oligonucleotide
ccctgagtcaggaaagatcaacgggtgtgc

SEQ ID NO: 174905 - DNA, 30 bp, Artificial Sequence
  Synthetic oligonucleotide
tcacatgtttggtaaggttacaccttgtgc

SEQ ID NO: 174906 - DNA, 30 bp, Artificial Sequence
  Synthetic oligonucleotide
ttacacaggacgaggaatagatccttgtgc

SEQ ID NO: 174907 - DNA, 30 bp, Artificial Sequence
  Synthetic oligonucleotide
tccggagatgttcgcatcaagaggttgtgc

SEQ ID NO: 174908 - DNA, 30 bp, Artificial Sequence
  Synthetic oligonucleotide
cgcgatcaaaggtaattttcaattttgtgc

SEQ ID NO: 174909 - DNA, 30 bp, Artificial Sequence
  Synthetic oligonucleotide
agtgatatataaggtgtacggcaaaattgc

SEQ ID NO: 174910 - DNA, 30 bp, Artificial Sequence
  Synthetic oligonucleotide
gttgtgaaggttgtgcaataacacaattgc

SEQ ID NO: 174911 - DNA, 30 bp, Artificial Sequence
  Synthetic oligonucleotide
ataggtctgtataatcaagatggcaattgc

SEQ ID NO: 174912 - DNA, 30 bp, Artificial Sequence
  Synthetic oligonucleotide
ttccatcgtcgagagaaacccgtccattgc

SEQ ID NO: 174913 - DNA, 30 bp, Artificial Sequence
  Synthetic oligonucleotide
gaatgcatagggctacacgcccatcattgc

SEQ ID NO: 174914 - DNA, 30 bp, Artificial Sequence
  Synthetic oligonucleotide
cagaaatgtcggcaaaagttgagtcattgc

SEQ ID NO: 174915 - DNA, 30 bp, Artificial Sequence
  Synthetic oligonucleotide
ggtcgggatacgcgattacgtcaagattgc

SEQ ID NO: 174916 - DNA, 30 bp, Artificial Sequence
  Synthetic oligonucleotide
gttgcaattatgccttggtctcaggattgc

SEQ ID NO: 174917 - DNA, 30 bp, Artificial Sequence
  Synthetic oligonucleotide
ccgtctgggccgagacttagcggggattgc

SEQ ID NO: 174918 - DNA, 30 bp, Artificial Sequence
  Synthetic oligonucleotide
caggtttcggctgttgaactcgaatattgc

SEQ ID NO: 174919 - DNA, 30 bp, Artificial Sequence
  Synthetic oligonucleotide
accaacggatggaatagggcttagtattgc

SEQ ID NO: 174920 - DNA, 30 bp, Artificial Sequence
  Synthetic oligonucleotide
tatgtagagtgggttgtttcaacgtattgc

SEQ ID NO: 174921 - DNA, 30 bp, Artificial Sequence
  Synthetic oligonucleotide
cataagcctcccgtgcatcatgtttattgc

SEQ ID NO: 174922 - DNA, 30 bp, Artificial Sequence
  Synthetic oligonucleotide
tcgatttacggtgagcggtaactcacttgc

SEQ ID NO: 174923 - DNA, 30 bp, Artificial Sequence
  Synthetic oligonucleotide
acatattcctgcgatatgtcgagtacttgc

SEQ ID NO: 174924 - DNA, 30 bp, Artificial Sequence
  Synthetic oligonucleotide
cagatcccagtcgtcactatcgtagcttgc

SEQ ID NO: 174925 - DNA, 30 bp, Artificial Sequence
  Synthetic oligonucleotide
gtcaagtggaaattgtgttgagcggcttgc

SEQ ID NO: 174926 - DNA, 30 bp, Artificial Sequence
  Synthetic oligonucleotide
gcctagcacgccgttgacagtagctcttgc

SEQ ID NO: 174927 - DNA, 30 bp, Artificial Sequence
  Synthetic oligonucleotide
ggaagtatagatctgaagcttcaaagttgc

SEQ ID NO: 174928 - DNA, 30 bp, Artificial Sequence
  Synthetic oligonucleotide
actgacgcctcgacttagagaagaagttgc

SEQ ID NO: 174929 - DNA, 30 bp, Artificial Sequence
  Synthetic oligonucleotide
ctagaccataaccaagataaggtgagttgc

SEQ ID NO: 174930 - DNA, 30 bp, Artificial Sequence
  Synthetic oligonucleotide
ataggaagaaaagacccatatttgcgttgc

SEQ ID NO: 174931 - DNA, 30 bp, Artificial Sequence
  Synthetic oligonucleotide
attggaaagtcgaatccgtactctcgttgc

SEQ ID NO: 174932 - DNA, 30 bp, Artificial Sequence
  Synthetic oligonucleotide
atcaaaggaggaacagcgacctttcgttgc

SEQ ID NO: 174933 - DNA, 30 bp, Artificial Sequence
  Synthetic oligonucleotide
gattagggggcattgaaaatacagggttgc

SEQ ID NO: 174934 - DNA, 30 bp, Artificial Sequence
  Synthetic oligonucleotide
aatcaaggacaggttgtggtagagggttgc

SEQ ID NO: 174935 - DNA, 30 bp, Artificial Sequence
  Synthetic oligonucleotide
taacaaaaggttaagccaccaagtggttgc

SEQ ID NO: 174936 - DNA, 30 bp, Artificial Sequence
  Synthetic oligonucleotide
gcggccagtgtaccaaagactgattgttgc

SEQ ID NO: 174937 - DNA, 30 bp, Artificial Sequence
  Synthetic oligonucleotide
gccagggcgtgttatcccgttaccatttgc

SEQ ID NO: 174938 - DNA, 30 bp, Artificial Sequence
  Synthetic oligonucleotide
atcatatgacatgttgtgtggttgatttgc

SEQ ID NO: 174939 - DNA, 30 bp, Artificial Sequence
  Synthetic oligonucleotide
agccgatagcatgtcatgtttcgcctttgc

SEQ ID NO: 174940 - DNA, 30 bp, Artificial Sequence
  Synthetic oligonucleotide
tctatataataaggtacagggcaagtttgc

SEQ ID NO: 174941 - DNA, 30 bp, Artificial Sequence
  Synthetic oligonucleotide
acacagttaatctgtgtggtagcgaaaatc

SEQ ID NO: 174942 - DNA, 30 bp, Artificial Sequence
  Synthetic oligonucleotide
ggtcttgcgggattgaagtcgcgtaaaatc

SEQ ID NO: 174943 - DNA, 30 bp, Artificial Sequence
  Synthetic oligonucleotide
cgtgcgaaaattcaacacgggattaaaatc

SEQ ID NO: 174944 - DNA, 30 bp, Artificial Sequence
  Synthetic oligonucleotide
caaatggtccgagaggaggtggttaaaatc

SEQ ID NO: 174945 - DNA, 30 bp, Artificial Sequence
  Synthetic oligonucleotide
ttaccgggaatagctatggccaaccaaatc

SEQ ID NO: 174946 - DNA, 30 bp, Artificial Sequence
  Synthetic oligonucleotide
cttcgcgaaaagatccgtcaacggcaaatc

SEQ ID NO: 174947 - DNA, 30 bp, Artificial Sequence
  Synthetic oligonucleotide
cacacgctctaattctgtggagttcaaatc

SEQ ID NO: 174948 - DNA, 30 bp, Artificial Sequence
  Synthetic oligonucleotide
atatcatgacaggagttcagggcggaaatc

SEQ ID NO: 174949 - DNA, 30 bp, Artificial Sequence
  Synthetic oligonucleotide
ccatgcagccgatccacaaagaatgaaatc

SEQ ID NO: 174950 - DNA, 30 bp, Artificial Sequence
  Synthetic oligonucleotide
gagaacgtgtaactagtatgccgtgaaatc

SEQ ID NO: 174951 - DNA, 30 bp, Artificial Sequence
  Synthetic oligonucleotide
ggcacccgaaaatccgaaaagattgaaatc

SEQ ID NO: 174952 - DNA, 30 bp, Artificial Sequence
  Synthetic oligonucleotide
ccgcgatcttggccgcataaacttgaaatc

SEQ ID NO: 174953 - DNA, 30 bp, Artificial Sequence
  Synthetic oligonucleotide
cgtagttaaacagttagagctagataaatc

SEQ ID NO: 174954 - DNA, 30 bp, Artificial Sequence
  Synthetic oligonucleotide
gacagtgacctcaagcactctaggtaaatc

SEQ ID NO: 174955 - DNA, 30 bp, Artificial Sequence
  Synthetic oligonucleotide
ccgatcagttattacataagccggtaaatc

SEQ ID NO: 174956 - DNA, 30 bp, Artificial Sequence
  Synthetic oligonucleotide
gtcaaattactagatttaaatctaacaatc

SEQ ID NO: 174957 - DNA, 30 bp, Artificial Sequence
  Synthetic oligonucleotide
taagaaaaaggaagtcaagcgttcacaatc

SEQ ID NO: 174958 - DNA, 30 bp, Artificial Sequence
  Synthetic oligonucleotide
agtaagaattggccggagacacggacaatc

SEQ ID NO: 174959 - DNA, 30 bp, Artificial Sequence
  Synthetic oligonucleotide
tttagcgccaagataattattgggacaatc

SEQ ID NO: 174960 - DNA, 30 bp, Artificial Sequence
  Synthetic oligonucleotide
gatgaatcaacggaaatggctcctacaatc

SEQ ID NO: 174961 - DNA, 30 bp, Artificial Sequence
  Synthetic oligonucleotide
ggttggccgtccggcaatgggcgtacaatc

SEQ ID NO: 174962 - DNA, 30 bp, Artificial Sequence
  Synthetic oligonucleotide
gagaccactgaaaagtgaggcgtagcaatc

SEQ ID NO: 174963 - DNA, 30 bp, Artificial Sequence
  Synthetic oligonucleotide
gtgtagtcataggcaatcgaaatcgcaatc

SEQ ID NO: 174964 - DNA, 30 bp, Artificial Sequence
  Synthetic oligonucleotide
cacgtggtctgctaacgagatatggcaatc

SEQ ID NO: 174965 - DNA, 30 bp, Artificial Sequence
  Synthetic oligonucleotide
agcagggccctcgcctggaggattgcaatc

SEQ ID NO: 174966 - DNA, 30 bp, Artificial Sequence
  Synthetic oligonucleotide
gggaaacaacggtccgctgattcatcaatc

SEQ ID NO: 174967 - DNA, 30 bp, Artificial Sequence
  Synthetic oligonucleotide
ctacaatggtgcagttccaaacagtcaatc

SEQ ID NO: 174968 - DNA, 30 bp, Artificial Sequence
  Synthetic oligonucleotide
cccgcatattgaggagggttcgcgtcaatc

SEQ ID NO: 174969 - DNA, 30 bp, Artificial Sequence
  Synthetic oligonucleotide
ttgcttggttgttgaggggggcggtcaatc

SEQ ID NO: 174970 - DNA, 30 bp, Artificial Sequence
  Synthetic oligonucleotide
tagtgagcatgtcaccttaagttaagaatc

SEQ ID NO: 174971 - DNA, 30 bp, Artificial Sequence
  Synthetic oligonucleotide
actgagttcggctgaatagcggccagaatc

SEQ ID NO: 174972 - DNA, 30 bp, Artificial Sequence
  Synthetic oligonucleotide
acaattcgacaggctaacttagctagaatc

SEQ ID NO: 174973 - DNA, 30 bp, Artificial Sequence
  Synthetic oligonucleotide
acctgaagagtccaccgcaattgtagaatc

SEQ ID NO: 174974 - DNA, 30 bp, Artificial Sequence
  Synthetic oligonucleotide
caagtgcatgcgttgcattagcgacgaatc

SEQ ID NO: 174975 - DNA, 30 bp, Artificial Sequence
  Synthetic oligonucleotide
gtctagacgaacaaagagtggatacgaatc

SEQ ID NO: 174976 - DNA, 30 bp, Artificial Sequence
  Synthetic oligonucleotide
cgttggagaacatgctggtgttaccgaatc

SEQ ID NO: 174977 - DNA, 30 bp, Artificial Sequence
  Synthetic oligonucleotide
gtcctgctaagggccattctaaggcgaatc

SEQ ID NO: 174978 - DNA, 31 bp, Artificial Sequence
  Synthetic oligonucleotide
ttgggtcgtcgcgaggctgtcgaatcgaatc

SEQ ID NO: 174979 - DNA, 31 bp, Artificial Sequence
  Synthetic oligonucleotide
ggtgaaactgcatcccttgttggatcgaatc

SEQ ID NO: 174980 - DNA, 30 bp, Artificial Sequence
  Synthetic oligonucleotide
ctaccacacgatggcgttaagcaaggaatc

SEQ ID NO: 174981 - DNA, 30 bp, Artificial Sequence
  Synthetic oligonucleotide
ggagcgggccgggcaagatgagcaggaatc

SEQ ID NO: 174982 - DNA, 30 bp, Artificial Sequence
  Synthetic oligonucleotide
ttgacaacttggtcgagcccactaggaatc

SEQ ID NO: 174983 - DNA, 30 bp, Artificial Sequence
  Synthetic oligonucleotide
acattgcttcgttcagcccgaccgggaatc

SEQ ID NO: 174984 - DNA, 30 bp, Artificial Sequence
  Synthetic oligonucleotide
tacggtaattatagtgcgtcttcgggaatc

SEQ ID NO: 174985 - DNA, 30 bp, Artificial Sequence
  Synthetic oligonucleotide
ttagggatgccaggacagccggtgggaatc

SEQ ID NO: 174986 - DNA, 30 bp, Artificial Sequence
  Synthetic oligonucleotide
ggccattgtagaagcattctggtgggaatc

SEQ ID NO: 174987 - DNA, 30 bp, Artificial Sequence
  Synthetic oligonucleotide
atagatccggtcacgatgtggttgggaatc

SEQ ID NO: 174988 - DNA, 30 bp, Artificial Sequence
  Synthetic oligonucleotide
agtcgccccagacacaggtaaaatggaatc

SEQ ID NO: 174989 - DNA, 30 bp, Artificial Sequence
  Synthetic oligonucleotide
tagactggagctgtatctgcggactgaatc

SEQ ID NO: 174990 - DNA, 30 bp, Artificial Sequence
  Synthetic oligonucleotide
caaccagggggcgccgctcccttgtgaatc

SEQ ID NO: 174991 - DNA, 30 bp, Artificial Sequence
  Synthetic oligonucleotide
catgagtgcgatgggcacactggttgaatc

SEQ ID NO: 174992 - DNA, 30 bp, Artificial Sequence
  Synthetic oligonucleotide
gagagactgagggggttggaaggcataatc

SEQ ID NO: 174993 - DNA, 30 bp, Artificial Sequence
  Synthetic oligonucleotide
aaggttaaagtgattcgagtcacgataatc

SEQ ID NO: 174994 - DNA, 30 bp, Artificial Sequence
  Synthetic oligonucleotide
gtaattcgggaatggagtctaacactaatc

SEQ ID NO: 174995 - DNA, 30 bp, Artificial Sequence
  Synthetic oligonucleotide
ataaaaagcggacttctcttgcgcctaatc

SEQ ID NO: 174996 - DNA, 30 bp, Artificial Sequence
  Synthetic oligonucleotide
ctggcagacatagtccgctactgtctaatc

SEQ ID NO: 174997 - DNA, 30 bp, Artificial Sequence
  Synthetic oligonucleotide
tcaagcggacgactccgatttggcgtaatc

SEQ ID NO: 174998 - DNA, 30 bp, Artificial Sequence
  Synthetic oligonucleotide
gatataggtgggcggacagcaacggtaatc

SEQ ID NO: 174999 - DNA, 30 bp, Artificial Sequence
  Synthetic oligonucleotide
ttccgacattctgagaattatcggaacatc

SEQ ID NO: 175000 - DNA, 30 bp, Artificial Sequence
  Synthetic oligonucleotide
ggtcgtgcgatgcgatgtacacgtaacatc

SEQ ID NO: 175001 - DNA, 30 bp, Artificial Sequence
  Synthetic oligonucleotide
tcagctgatttaacataaaagcttaacatc

SEQ ID NO: 175002 - DNA, 30 bp, Artificial Sequence
  Synthetic oligonucleotide
gttttggaatcgggggcggggtaacacatc

SEQ ID NO: 175003 - DNA, 30 bp, Artificial Sequence
  Synthetic oligonucleotide
gtgccgatacccaatggcatgggacacatc

SEQ ID NO: 175004 - DNA, 30 bp, Artificial Sequence
  Synthetic oligonucleotide
gaatacaataaaagtaagtgtgggcacatc

SEQ ID NO: 175005 - DNA, 30 bp, Artificial Sequence
  Synthetic oligonucleotide
tgtccgtacaagtacatcttgaatcacatc

SEQ ID NO: 175006 - DNA, 30 bp, Artificial Sequence
  Synthetic oligonucleotide
ctcagtgtaatcgagggtttcaccgacatc

SEQ ID NO: 175007 - DNA, 30 bp, Artificial Sequence
  Synthetic oligonucleotide
ggacctataaaagtaaagttgaaggacatc

SEQ ID NO: 175008 - DNA, 30 bp, Artificial Sequence
  Synthetic oligonucleotide
gggggggagcggccctattagtaggacatc

SEQ ID NO: 175009 - DNA, 30 bp, Artificial Sequence
  Synthetic oligonucleotide
ataagataagggctgcttggtgatgacatc

SEQ ID NO: 175010 - DNA, 30 bp, Artificial Sequence
  Synthetic oligonucleotide
ctatctgtcacaaactggtacttatacatc

SEQ ID NO: 175011 - DNA, 30 bp, Artificial Sequence
  Synthetic oligonucleotide
agaaccggttaaaagcctcaatactacatc

SEQ ID NO: 175012 - DNA, 30 bp, Artificial Sequence
  Synthetic oligonucleotide
ccgcactagacgctcagtggactttacatc

SEQ ID NO: 175013 - DNA, 30 bp, Artificial Sequence
  Synthetic oligonucleotide
gactcccgagttgtgaaacaaaaaaccatc

SEQ ID NO: 175014 - DNA, 30 bp, Artificial Sequence
  Synthetic oligonucleotide
gcggatgcgaacggccttattgccaccatc

SEQ ID NO: 175015 - DNA, 30 bp, Artificial Sequence
  Synthetic oligonucleotide
aaacacaaacggcggaagggggagaccatc

SEQ ID NO: 175016 - DNA, 30 bp, Artificial Sequence
  Synthetic oligonucleotide
gtgttgaaatgggccatcatgaataccatc

SEQ ID NO: 175017 - DNA, 30 bp, Artificial Sequence
  Synthetic oligonucleotide
gaggagaggggattgcagattccacccatc

SEQ ID NO: 175018 - DNA, 30 bp, Artificial Sequence
  Synthetic oligonucleotide
gatctgtcgactgaaaaacgcccgcccatc

SEQ ID NO: 175019 - DNA, 30 bp, Artificial Sequence
  Synthetic oligonucleotide
cgcgcagcgtcccaaggattgtctcccatc

SEQ ID NO: 175020 - DNA, 30 bp, Artificial Sequence
  Synthetic oligonucleotide
ctatgcttatgcctatcacgtaaggccatc

SEQ ID NO: 175021 - DNA, 30 bp, Artificial Sequence
  Synthetic oligonucleotide
ttatccgtcaatgagtatcgctaggccatc

SEQ ID NO: 175022 - DNA, 30 bp, Artificial Sequence
  Synthetic oligonucleotide
gggtaagcaggacagaatcccggggccatc

SEQ ID NO: 175023 - DNA, 30 bp, Artificial Sequence
  Synthetic oligonucleotide
gcgaacgatgagaaactgaacgtatccatc

SEQ ID NO: 175024 - DNA, 30 bp, Artificial Sequence
  Synthetic oligonucleotide
atcgcggcgttacgggtcatagactccatc

SEQ ID NO: 175025 - DNA, 30 bp, Artificial Sequence
  Synthetic oligonucleotide
gttccatataatgatcctgtcaaaagcatc

SEQ ID NO: 175026 - DNA, 30 bp, Artificial Sequence
  Synthetic oligonucleotide
actggctaagactcgcttgtacaaagcatc

SEQ ID NO: 175027 - DNA, 30 bp, Artificial Sequence
  Synthetic oligonucleotide
ctggagtcaaaaacacaccggaccagcatc

SEQ ID NO: 175028 - DNA, 30 bp, Artificial Sequence
  Synthetic oligonucleotide
ctttaggcgacactagggcatagcagcatc

SEQ ID NO: 175029 - DNA, 30 bp, Artificial Sequence
  Synthetic oligonucleotide
tgtgaggacgtcacatgtcgtcgtagcatc

SEQ ID NO: 175030 - DNA, 30 bp, Artificial Sequence
  Synthetic oligonucleotide
agggattgatatcaccgtctacaacgcatc

SEQ ID NO: 175031 - DNA, 30 bp, Artificial Sequence
  Synthetic oligonucleotide
gctagggaatgggtttacggggcgcgcatc

SEQ ID NO: 175032 - DNA, 30 bp, Artificial Sequence
  Synthetic oligonucleotide
tgccaattctatacgcggattactcgcatc

SEQ ID NO: 175033 - DNA, 30 bp, Artificial Sequence
  Synthetic oligonucleotide
aaccgtaaatccctgtacacttcaggcatc

SEQ ID NO: 175034 - DNA, 30 bp, Artificial Sequence
  Synthetic oligonucleotide
tatgtcgcgtaaggggacaacagaggcatc

SEQ ID NO: 175035 - DNA, 30 bp, Artificial Sequence
  Synthetic oligonucleotide
aacataaactcatatattacacacggcatc

SEQ ID NO: 175036 - DNA, 30 bp, Artificial Sequence
  Synthetic oligonucleotide
tataacggaacggtagaatctagcggcatc

SEQ ID NO: 175037 - DNA, 30 bp, Artificial Sequence
  Synthetic oligonucleotide
ttttgtacagcgacaaagaaacagggcatc

SEQ ID NO: 175038 - DNA, 30 bp, Artificial Sequence
  Synthetic oligonucleotide
cgcatgaaaacgggttagttgcagggcatc

SEQ ID NO: 175039 - DNA, 30 bp, Artificial Sequence
  Synthetic oligonucleotide
agaaccgcacgccacagttaaccgggcatc

SEQ ID NO: 175040 - DNA, 30 bp, Artificial Sequence
  Synthetic oligonucleotide
tgtagtcttacatagcgtgtgaggggcatc

SEQ ID NO: 175041 - DNA, 30 bp, Artificial Sequence
  Synthetic oligonucleotide
acgaagtagacggaggtctggtatggcatc

SEQ ID NO: 175042 - DNA, 30 bp, Artificial Sequence
  Synthetic oligonucleotide
acggcgtagggtatggaccacccatgcatc

SEQ ID NO: 175043 - DNA, 30 bp, Artificial Sequence
  Synthetic oligonucleotide
gtggtgtaacgtttcgtactatggtgcatc

SEQ ID NO: 175044 - DNA, 30 bp, Artificial Sequence
  Synthetic oligonucleotide
agtccgccagaggaccggtctagaatcatc

SEQ ID NO: 175045 - DNA, 30 bp, Artificial Sequence
  Synthetic oligonucleotide
tcgtcttccgaataccgcgcccacatcatc

SEQ ID NO: 175046 - DNA, 30 bp, Artificial Sequence
  Synthetic oligonucleotide
gctacatcggtatcgttatccgaactcatc

SEQ ID NO: 175047 - DNA, 30 bp, Artificial Sequence
  Synthetic oligonucleotide
atgtggcgcatcaacatgaaggccctcatc

SEQ ID NO: 175048 - DNA, 30 bp, Artificial Sequence
  Synthetic oligonucleotide
aacccaggtaagtctcagtaccaagtcatc

SEQ ID NO: 175049 - DNA, 30 bp, Artificial Sequence
  Synthetic oligonucleotide
acaacagtcaatcctaaatctacagtcatc

SEQ ID NO: 175050 - DNA, 30 bp, Artificial Sequence
  Synthetic oligonucleotide
aggaagcctgtgttgttgaaaagggtcatc

SEQ ID NO: 175051 - DNA, 30 bp, Artificial Sequence
  Synthetic oligonucleotide
ctggacgtcccataacttcgctatgtcatc

SEQ ID NO: 175052 - DNA, 30 bp, Artificial Sequence
  Synthetic oligonucleotide
ggcggctatccacttattttggaattcatc

SEQ ID NO: 175053 - DNA, 30 bp, Artificial Sequence
  Synthetic oligonucleotide
tgtagaagttctcaccggcctgggttcatc

SEQ ID NO: 175054 - DNA, 30 bp, Artificial Sequence
  Synthetic oligonucleotide
ggtgtacctaaaaatcggcaacgtttcatc

SEQ ID NO: 175055 - DNA, 30 bp, Artificial Sequence
  Synthetic oligonucleotide
aaacaagcgcaaggtcatctctaaaagatc

SEQ ID NO: 175056 - DNA, 30 bp, Artificial Sequence
  Synthetic oligonucleotide
cgctcttcatgattaagatcacagcagatc

SEQ ID NO: 175057 - DNA, 30 bp, Artificial Sequence
  Synthetic oligonucleotide
ggtcttcacattggtggggtcgctcagatc

SEQ ID NO: 175058 - DNA, 30 bp, Artificial Sequence
  Synthetic oligonucleotide
gaccgtgtgtcgacagccttcgtagagatc

SEQ ID NO: 175059 - DNA, 30 bp, Artificial Sequence
  Synthetic oligonucleotide
ccgacaagctcttaaccgcaggcggagatc

SEQ ID NO: 175060 - DNA, 30 bp, Artificial Sequence
  Synthetic oligonucleotide
catgcggatttcccaagtgtccgggagatc

SEQ ID NO: 175061 - DNA, 30 bp, Artificial Sequence
  Synthetic oligonucleotide
tcatcctcaaactgaacacaccaatagatc

SEQ ID NO: 175062 - DNA, 30 bp, Artificial Sequence
  Synthetic oligonucleotide
gcgtttgccgatggagtaccctgatagatc

SEQ ID NO: 175063 - DNA, 30 bp, Artificial Sequence
  Synthetic oligonucleotide
caatggccatgagcacttcggcggtagatc

SEQ ID NO: 175064 - DNA, 30 bp, Artificial Sequence
  Synthetic oligonucleotide
aatggaatgttgatagatcatggttagatc

SEQ ID NO: 175065 - DNA, 30 bp, Artificial Sequence
  Synthetic oligonucleotide
cgacagggcagtctgtatactttttagatc

SEQ ID NO: 175066 - DNA, 30 bp, Artificial Sequence
  Synthetic oligonucleotide
taccagaggggcccagactggtgcacgatc

SEQ ID NO: 175067 - DNA, 30 bp, Artificial Sequence
  Synthetic oligonucleotide
atgataatgaggcgtgcattaaatacgatc

SEQ ID NO: 175068 - DNA, 30 bp, Artificial Sequence
  Synthetic oligonucleotide
gaggacatatgctaagttttcataccgatc

SEQ ID NO: 175069 - DNA, 30 bp, Artificial Sequence
  Synthetic oligonucleotide
tcggatccgttggggacatgtcccccgatc

SEQ ID NO: 175070 - DNA, 30 bp, Artificial Sequence
  Synthetic oligonucleotide
cctgcgttgaccaacccatcacagccgatc

SEQ ID NO: 175071 - DNA, 30 bp, Artificial Sequence
  Synthetic oligonucleotide
acggtggtcgtaccatatatgcgcgcgatc

SEQ ID NO: 175072 - DNA, 30 bp, Artificial Sequence
  Synthetic oligonucleotide
acaaggtgatggcaacacgacgcatcgatc

SEQ ID NO: 175073 - DNA, 30 bp, Artificial Sequence
  Synthetic oligonucleotide
caaagtctgccaactgaactgacctcgatc

SEQ ID NO: 175074 - DNA, 30 bp, Artificial Sequence
  Synthetic oligonucleotide
agatttgctcaaacatcgtaccgctcgatc

SEQ ID NO: 175075 - DNA, 30 bp, Artificial Sequence
  Synthetic oligonucleotide
gtgtgcaatacttattttagtcagtcgatc

SEQ ID NO: 175076 - DNA, 30 bp, Artificial Sequence
  Synthetic oligonucleotide
gacattgaggctcggttttatgcgtcgatc

SEQ ID NO: 175077 - DNA, 30 bp, Artificial Sequence
  Synthetic oligonucleotide
tgaacttagacgacgataggcccaaggatc

SEQ ID NO: 175078 - DNA, 30 bp, Artificial Sequence
  Synthetic oligonucleotide
gagaagcattccgcacgactgcgaaggatc

SEQ ID NO: 175079 - DNA, 30 bp, Artificial Sequence
  Synthetic oligonucleotide
catagttggtactgaactcctggcaggatc

SEQ ID NO: 175080 - DNA, 30 bp, Artificial Sequence
  Synthetic oligonucleotide
cggtatcatgtatcgtgagaaagtaggatc

SEQ ID NO: 175081 - DNA, 30 bp, Artificial Sequence
  Synthetic oligonucleotide
cgtgccgtatatactgttgaccgtcggatc

SEQ ID NO: 175082 - DNA, 30 bp, Artificial Sequence
  Synthetic oligonucleotide
ccactgttgtgcatttgaacgtgtgggatc

SEQ ID NO: 175083 - DNA, 30 bp, Artificial Sequence
  Synthetic oligonucleotide
gccctgtgtatctaaaagccggagtggatc

SEQ ID NO: 175084 - DNA, 30 bp, Artificial Sequence
  Synthetic oligonucleotide
agtgagttaggggctacttaaaaaatgatc

SEQ ID NO: 175085 - DNA, 30 bp, Artificial Sequence
  Synthetic oligonucleotide
atgcgcgctgtccgaactcatccaatgatc

SEQ ID NO: 175086 - DNA, 30 bp, Artificial Sequence
  Synthetic oligonucleotide
aacctagaaaacttgaacgttaccatgatc

SEQ ID NO: 175087 - DNA, 30 bp, Artificial Sequence
  Synthetic oligonucleotide
acacatacatcacatcttttgagtatgatc

SEQ ID NO: 175088 - DNA, 30 bp, Artificial Sequence
  Synthetic oligonucleotide
acaggggttctgggcccatatattatgatc

SEQ ID NO: 175089 - DNA, 30 bp, Artificial Sequence
  Synthetic oligonucleotide
gcgctaaatccacaaggtcatcttatgatc

SEQ ID NO: 175090 - DNA, 30 bp, Artificial Sequence
  Synthetic oligonucleotide
ccattacgtctcccacaggtgggactgatc

SEQ ID NO: 175091 - DNA, 30 bp, Artificial Sequence
  Synthetic oligonucleotide
gtaagtaagtttccacaggaacacctgatc

SEQ ID NO: 175092 - DNA, 31 bp, Artificial Sequence
  Synthetic oligonucleotide
agtccgaaagcccgtaaatgttaccctgatc

SEQ ID NO: 175093 - DNA, 30 bp, Artificial Sequence
  Synthetic oligonucleotide
ctgacataggtgtccctcaataggctgatc

SEQ ID NO: 175094 - DNA, 30 bp, Artificial Sequence
  Synthetic oligonucleotide
ggacaactaattgggacctgccatctgatc

SEQ ID NO: 175095 - DNA, 30 bp, Artificial Sequence
  Synthetic oligonucleotide
cactagtgatggaggacaggatacgtgatc

SEQ ID NO: 175096 - DNA, 30 bp, Artificial Sequence
  Synthetic oligonucleotide
atccagtgtttgagagaactggtcgtgatc

SEQ ID NO: 175097 - DNA, 30 bp, Artificial Sequence
  Synthetic oligonucleotide
cggcgatgagatggggcccgtggtgtgatc

SEQ ID NO: 175098 - DNA, 30 bp, Artificial Sequence
  Synthetic oligonucleotide
tagctcactagagcattatttggtgtgatc

SEQ ID NO: 175099 - DNA, 30 bp, Artificial Sequence
  Synthetic oligonucleotide
ataacacggaccaagcaatgccccttgatc

SEQ ID NO: 175100 - DNA, 30 bp, Artificial Sequence
  Synthetic oligonucleotide
aggattcggactgacccgttattcttgatc

SEQ ID NO: 175101 - DNA, 30 bp, Artificial Sequence
  Synthetic oligonucleotide
atagagcattcgaagtgcttacggttgatc

SEQ ID NO: 175102 - DNA, 30 bp, Artificial Sequence
  Synthetic oligonucleotide
tttcgggacagataactataagtcaatatc

SEQ ID NO: 175103 - DNA, 30 bp, Artificial Sequence
  Synthetic oligonucleotide
cagccactagtagccttgccatcccatatc

SEQ ID NO: 175104 - DNA, 30 bp, Artificial Sequence
  Synthetic oligonucleotide
acatagcggagtgcgagcttgctccatatc

SEQ ID NO: 175105 - DNA, 30 bp, Artificial Sequence
  Synthetic oligonucleotide
gtcatagaccactgatcggactatcatatc

SEQ ID NO: 175106 - DNA, 30 bp, Artificial Sequence
  Synthetic oligonucleotide
gccttaatctagggggaatatcgggatatc

SEQ ID NO: 175107 - DNA, 30 bp, Artificial Sequence
  Synthetic oligonucleotide
gtgcgcgggaggcagtggtccgtatatatc

SEQ ID NO: 175108 - DNA, 30 bp, Artificial Sequence
  Synthetic oligonucleotide
ttaagatgccaaacgtaagcttaaactatc

SEQ ID NO: 175109 - DNA, 30 bp, Artificial Sequence
  Synthetic oligonucleotide
gcacactaaagacgcgtcgaacgcactatc

SEQ ID NO: 175110 - DNA, 30 bp, Artificial Sequence
  Synthetic oligonucleotide
ctatctggagtggttgaatatggcactatc

SEQ ID NO: 175111 - DNA, 30 bp, Artificial Sequence
  Synthetic oligonucleotide
agtagcacgcaactcttcgtagtcactatc

SEQ ID NO: 175112 - DNA, 30 bp, Artificial Sequence
  Synthetic oligonucleotide
acagtgaatctgaagaatatctagactatc

SEQ ID NO: 175113 - DNA, 30 bp, Artificial Sequence
  Synthetic oligonucleotide
tgtcgatgtggtaagagtaatacgactatc

SEQ ID NO: 175114 - DNA, 30 bp, Artificial Sequence
  Synthetic oligonucleotide
ttaatactggggcgtcgggaatctactatc

SEQ ID NO: 175115 - DNA, 30 bp, Artificial Sequence
  Synthetic oligonucleotide
atatcaccgtcgtcacgtgtgcgacctatc

SEQ ID NO: 175116 - DNA, 30 bp, Artificial Sequence
  Synthetic oligonucleotide
tatggcttaattgttctttattcgcctatc

SEQ ID NO: 175117 - DNA, 30 bp, Artificial Sequence
  Synthetic oligonucleotide
tgtggaaatgtgaagttgtcaccggctatc

SEQ ID NO: 175118 - DNA, 30 bp, Artificial Sequence
  Synthetic oligonucleotide
ctgagccattataaaaaggattaatctatc

SEQ ID NO: 175119 - DNA, 30 bp, Artificial Sequence
  Synthetic oligonucleotide
ggaacccaggccacaagatggccgtctatc

SEQ ID NO: 175120 - DNA, 31 bp, Artificial Sequence
  Synthetic oligonucleotide
aagggttcgtgactaaatcctgtacagtatc

SEQ ID NO: 175121 - DNA, 30 bp, Artificial Sequence
  Synthetic oligonucleotide
attaccaattgataaagaaacaggagtatc

SEQ ID NO: 175122 - DNA, 30 bp, Artificial Sequence
  Synthetic oligonucleotide
cgtattaattcgacgggaaagagtagtatc

SEQ ID NO: 175123 - DNA, 30 bp, Artificial Sequence
  Synthetic oligonucleotide
gacgtcctagggattaagtatatccgtatc

SEQ ID NO: 175124 - DNA, 30 bp, Artificial Sequence
  Synthetic oligonucleotide
agctaacttcagctgcctgggctccgtatc

SEQ ID NO: 175125 - DNA, 30 bp, Artificial Sequence
  Synthetic oligonucleotide
tagaagtaggtggcccggtcaatcggtatc

SEQ ID NO: 175126 - DNA, 30 bp, Artificial Sequence
  Synthetic oligonucleotide
agctaaaactaatgcggggggatcggtatc

SEQ ID NO: 175127 - DNA, 30 bp, Artificial Sequence
  Synthetic oligonucleotide
agactggaggcaccactgcatgttggtatc

SEQ ID NO: 175128 - DNA, 30 bp, Artificial Sequence
  Synthetic oligonucleotide
ggtattaagtgaacgattcatcgaattatc

SEQ ID NO: 175129 - DNA, 30 bp, Artificial Sequence
  Synthetic oligonucleotide
accaggagcaataatggatggcacattatc

SEQ ID NO: 175130 - DNA, 30 bp, Artificial Sequence
  Synthetic oligonucleotide
gacagggctgtgacgtttgagacgattatc

SEQ ID NO: 175131 - DNA, 30 bp, Artificial Sequence
  Synthetic oligonucleotide
cagcgtcggtgggtactcaacgcacttatc

SEQ ID NO: 175132 - DNA, 30 bp, Artificial Sequence
  Synthetic oligonucleotide
cgctgtcaagtacccggggctgtgcttatc

SEQ ID NO: 175133 - DNA, 30 bp, Artificial Sequence
  Synthetic oligonucleotide
agagggtgcggtcgttcggactgagttatc

SEQ ID NO: 175134 - DNA, 30 bp, Artificial Sequence
  Synthetic oligonucleotide
cgcaggaggactccgggggccagggttatc

SEQ ID NO: 175135 - DNA, 30 bp, Artificial Sequence
  Synthetic oligonucleotide
gggctactcaaggagttgaagtttgttatc

SEQ ID NO: 175136 - DNA, 30 bp, Artificial Sequence
  Synthetic oligonucleotide
caccctgctaatcagtagtatgccaaactc

SEQ ID NO: 175137 - DNA, 30 bp, Artificial Sequence
  Synthetic oligonucleotide
acaggttggcgcgaactgtatttcaaactc

SEQ ID NO: 175138 - DNA, 30 bp, Artificial Sequence
  Synthetic oligonucleotide
ggtacttaagtgaatcaaggggagaaactc

SEQ ID NO: 175139 - DNA, 30 bp, Artificial Sequence
  Synthetic oligonucleotide
ttacgtacacctacagggtgcgggaaactc

SEQ ID NO: 175140 - DNA, 30 bp, Artificial Sequence
  Synthetic oligonucleotide
gaacccgttagttaactatcagcgcaactc

SEQ ID NO: 175141 - DNA, 30 bp, Artificial Sequence
  Synthetic oligonucleotide
gggacccgaccgatgtcaatccgcgaactc

SEQ ID NO: 175142 - DNA, 30 bp, Artificial Sequence
  Synthetic oligonucleotide
ccattttagtactgcccgacgacggaactc

SEQ ID NO: 175143 - DNA, 30 bp, Artificial Sequence
  Synthetic oligonucleotide
gggtgtatccgcacacatatgaacacactc

SEQ ID NO: 175144 - DNA, 30 bp, Artificial Sequence
  Synthetic oligonucleotide
cttttacatcaagggaaaggagccacactc

SEQ ID NO: 175145 - DNA, 30 bp, Artificial Sequence
  Synthetic oligonucleotide
gcggaaagatcagtacatgcattcacactc

SEQ ID NO: 175146 - DNA, 30 bp, Artificial Sequence
  Synthetic oligonucleotide
gagaagggatcatattaagtaactgcactc

SEQ ID NO: 175147 - DNA, 30 bp, Artificial Sequence
  Synthetic oligonucleotide
tctcgtcgacttgttgaaatccgtgcactc

SEQ ID NO: 175148 - DNA, 30 bp, Artificial Sequence
  Synthetic oligonucleotide
atcggccgtacgctcgcaaaaacatcactc

SEQ ID NO: 175149 - DNA, 30 bp, Artificial Sequence
  Synthetic oligonucleotide
ataacggaaaagctggcgtatcgaagactc

SEQ ID NO: 175150 - DNA, 30 bp, Artificial Sequence
  Synthetic oligonucleotide
attgtaaacgtgctaaaaaaggtaagactc

SEQ ID NO: 175151 - DNA, 31 bp, Artificial Sequence
  Synthetic oligonucleotide
aaacagcgctgtgccaggagaaaacagactc

SEQ ID NO: 175152 - DNA, 30 bp, Artificial Sequence
  Synthetic oligonucleotide
tcaaagcgaatgttacggtaatgcagactc

SEQ ID NO: 175153 - DNA, 30 bp, Artificial Sequence
  Synthetic oligonucleotide
cgcgacaaccttgggggctcgaagagactc

SEQ ID NO: 175154 - DNA, 30 bp, Artificial Sequence
  Synthetic oligonucleotide
ccaacggcatatggcataaactcccgactc

SEQ ID NO: 175155 - DNA, 30 bp, Artificial Sequence
  Synthetic oligonucleotide
ctactgtagagacttcactcgaatcgactc

SEQ ID NO: 175156 - DNA, 30 bp, Artificial Sequence
  Synthetic oligonucleotide
gcggaactcaaagctgggtgcagaggactc

SEQ ID NO: 175157 - DNA, 30 bp, Artificial Sequence
  Synthetic oligonucleotide
cggcactgtagcccaaaatggtggggactc

SEQ ID NO: 175158 - DNA, 30 bp, Artificial Sequence
  Synthetic oligonucleotide
acagatcctatggtgacgagtcactgactc

SEQ ID NO: 175159 - DNA, 30 bp, Artificial Sequence
  Synthetic oligonucleotide
ccgtgggcgttcgcggaaaagcagtgactc

SEQ ID NO: 175160 - DNA, 30 bp, Artificial Sequence
  Synthetic oligonucleotide
agaacaactctggtaaaaaggcagtgactc

SEQ ID NO: 175161 - DNA, 30 bp, Artificial Sequence
  Synthetic oligonucleotide
cttgtggagcgtgcgccttaagtcctactc

SEQ ID NO: 175162 - DNA, 30 bp, Artificial Sequence
  Synthetic oligonucleotide
aaggtgtatcgggtataatacaatgtactc

SEQ ID NO: 175163 - DNA, 30 bp, Artificial Sequence
  Synthetic oligonucleotide
aaatgggcgagcaatttacaaagtgtactc

SEQ ID NO: 175164 - DNA, 30 bp, Artificial Sequence
  Synthetic oligonucleotide
gtgtatgattccatcgtgatcaccttactc

SEQ ID NO: 175165 - DNA, 30 bp, Artificial Sequence
  Synthetic oligonucleotide
actcaggagtaagatagggaatgtttactc

SEQ ID NO: 175166 - DNA, 30 bp, Artificial Sequence
  Synthetic oligonucleotide
aggagggagtattatatgtccgtcaacctc

SEQ ID NO: 175167 - DNA, 30 bp, Artificial Sequence
  Synthetic oligonucleotide
gcactattcggtcaatggctgaaagacctc

SEQ ID NO: 175168 - DNA, 30 bp, Artificial Sequence
  Synthetic oligonucleotide
acaaggcaagcttagtctcctaacgacctc

SEQ ID NO: 175169 - DNA, 30 bp, Artificial Sequence
  Synthetic oligonucleotide
tactgagttcactgtgaattccaggacctc

SEQ ID NO: 175170 - DNA, 30 bp, Artificial Sequence
  Synthetic oligonucleotide
cgacttggggcgaaggagaagagtgacctc

SEQ ID NO: 175171 - DNA, 30 bp, Artificial Sequence
  Synthetic oligonucleotide
ctgtcgactttgtcaacgtggcgtgacctc

SEQ ID NO: 175172 - DNA, 30 bp, Artificial Sequence
  Synthetic oligonucleotide
aaaggtggagctttaggaagtcaatacctc

SEQ ID NO: 175173 - DNA, 30 bp, Artificial Sequence
  Synthetic oligonucleotide
aaccgacgagtattttagtgacacgccctc

SEQ ID NO: 175174 - DNA, 30 bp, Artificial Sequence
  Synthetic oligonucleotide
ctacataggcatgtagtgagtaaatccctc

SEQ ID NO: 175175 - DNA, 30 bp, Artificial Sequence
  Synthetic oligonucleotide
agttaaaagtgtaaccacggcccatccctc

SEQ ID NO: 175176 - DNA, 30 bp, Artificial Sequence
  Synthetic oligonucleotide
aggcttagttgatgaataaggggctccctc

SEQ ID NO: 175177 - DNA, 30 bp, Artificial Sequence
  Synthetic oligonucleotide
cgacaggttacgagctgagtactaagcctc

SEQ ID NO: 175178 - DNA, 30 bp, Artificial Sequence
  Synthetic oligonucleotide
ctaggatcttcaaagggtagatatcgcctc

SEQ ID NO: 175179 - DNA, 30 bp, Artificial Sequence
  Synthetic oligonucleotide
ctcgctagtttcagataaatgtttcgcctc

SEQ ID NO: 175180 - DNA, 30 bp, Artificial Sequence
  Synthetic oligonucleotide
gttgtcatcgcctaatgctgggacggcctc

SEQ ID NO: 175181 - DNA, 30 bp, Artificial Sequence
  Synthetic oligonucleotide
ttccgttctgtcatcaacaagagtggcctc

SEQ ID NO: 175182 - DNA, 30 bp, Artificial Sequence
  Synthetic oligonucleotide
cagttctcgtgatatccagatcaatgcctc

SEQ ID NO: 175183 - DNA, 30 bp, Artificial Sequence
  Synthetic oligonucleotide
cagacggggtgcttgagccaaaggtgcctc

SEQ ID NO: 175184 - DNA, 30 bp, Artificial Sequence
  Synthetic oligonucleotide
caaattcagagcgtcccactcgggtgcctc

SEQ ID NO: 175185 - DNA, 30 bp, Artificial Sequence
  Synthetic oligonucleotide
gtcattaacgatcgccccgcccaaatcctc

SEQ ID NO: 175186 - DNA, 30 bp, Artificial Sequence
  Synthetic oligonucleotide
agagatgcgcgaatgatgcaaattatcctc

SEQ ID NO: 175187 - DNA, 30 bp, Artificial Sequence
  Synthetic oligonucleotide
aagtggtcagtcaaaatccaacttatcctc

SEQ ID NO: 175188 - DNA, 30 bp, Artificial Sequence
  Synthetic oligonucleotide
ctacattgtccgtaagtcctatgcctcctc

SEQ ID NO: 175189 - DNA, 30 bp, Artificial Sequence
  Synthetic oligonucleotide
catgagcatccggagggggtgtggttcctc

SEQ ID NO: 175190 - DNA, 30 bp, Artificial Sequence
  Synthetic oligonucleotide
atcataccattttgcggagagcgaaagctc

SEQ ID NO: 175191 - DNA, 30 bp, Artificial Sequence
  Synthetic oligonucleotide
tagggccttatcgcgtctttaaacaagctc

SEQ ID NO: 175192 - DNA, 30 bp, Artificial Sequence
  Synthetic oligonucleotide
cggacgagtcggaggaggtgtttccagctc

SEQ ID NO: 175193 - DNA, 30 bp, Artificial Sequence
  Synthetic oligonucleotide
ttgttcccctgggtattcaactgagagctc

SEQ ID NO: 175194 - DNA, 30 bp, Artificial Sequence
  Synthetic oligonucleotide
ttacagttgttcggaccactagtagagctc

SEQ ID NO: 175195 - DNA, 30 bp, Artificial Sequence
  Synthetic oligonucleotide
agatcgtggtctaacgaaagggcatagctc

SEQ ID NO: 175196 - DNA, 29 bp, Artificial Sequence
  Synthetic oligonucleotide
tcattaatgtgactggagttacgtagctc

SEQ ID NO: 175197 - DNA, 30 bp, Artificial Sequence
  Synthetic oligonucleotide
agaaacctgacataaggagctccgtagctc

SEQ ID NO: 175198 - DNA, 30 bp, Artificial Sequence
  Synthetic oligonucleotide
ccaagactaatatttagtagagcgtagctc

SEQ ID NO: 175199 - DNA, 30 bp, Artificial Sequence
  Synthetic oligonucleotide
gccaacaaagtatcgggttaggggtagctc

SEQ ID NO: 175200 - DNA, 30 bp, Artificial Sequence
  Synthetic oligonucleotide
gcatcgaacttccctaataaggattagctc

SEQ ID NO: 175201 - DNA, 30 bp, Artificial Sequence
  Synthetic oligonucleotide
aagcgcctggtgcattaatgcgaaacgctc

SEQ ID NO: 175202 - DNA, 30 bp, Artificial Sequence
  Synthetic oligonucleotide
ccgatagtttaaggggaagttcacacgctc

SEQ ID NO: 175203 - DNA, 30 bp, Artificial Sequence
  Synthetic oligonucleotide
catcagtgttgtagctcgggagctacgctc

SEQ ID NO: 175204 - DNA, 30 bp, Artificial Sequence
  Synthetic oligonucleotide
cgtgggtttagtcgccgcacgctcccgctc

SEQ ID NO: 175205 - DNA, 30 bp, Artificial Sequence
  Synthetic oligonucleotide
cgcggaggctgtacaacgacagcagcgctc

SEQ ID NO: 175206 - DNA, 30 bp, Artificial Sequence
  Synthetic oligonucleotide
cacattgtactgtgtctgtcatgatcgctc

SEQ ID NO: 175207 - DNA, 30 bp, Artificial Sequence
  Synthetic oligonucleotide
ccatatatatacagctttagcaaaaggctc

SEQ ID NO: 175208 - DNA, 30 bp, Artificial Sequence
  Synthetic oligonucleotide
aatcaccacagaaaagacaaaacaaggctc

SEQ ID NO: 175209 - DNA, 30 bp, Artificial Sequence
  Synthetic oligonucleotide
cagctaacccagaggaatccagacaggctc

SEQ ID NO: 175210 - DNA, 30 bp, Artificial Sequence
  Synthetic oligonucleotide
cgagggcacatggcggaaaaatttaggctc

SEQ ID NO: 175211 - DNA, 30 bp, Artificial Sequence
  Synthetic oligonucleotide
tatgtagcgctactctaagtaaaacggctc

SEQ ID NO: 175212 - DNA, 30 bp, Artificial Sequence
  Synthetic oligonucleotide
gcggtttataggccagaacaactgcggctc

SEQ ID NO: 175213 - DNA, 30 bp, Artificial Sequence
  Synthetic oligonucleotide
gtggcaaaattgttctatagaatagggctc

SEQ ID NO: 175214 - DNA, 30 bp, Artificial Sequence
  Synthetic oligonucleotide
ctaggttccgtcggcgtaagatgcgggctc

SEQ ID NO: 175215 - DNA, 30 bp, Artificial Sequence
  Synthetic oligonucleotide
tcaagacagaccgtgcttacagtcgggctc

SEQ ID NO: 175216 - DNA, 30 bp, Artificial Sequence
  Synthetic oligonucleotide
tttggcgaattagaaactgtgagtgggctc

SEQ ID NO: 175217 - DNA, 30 bp, Artificial Sequence
  Synthetic oligonucleotide
cgtactcctggcgtgcgccatacgtggctc

SEQ ID NO: 175218 - DNA, 30 bp, Artificial Sequence
  Synthetic oligonucleotide
tcagcaagtgtagactctagtgcgtggctc

SEQ ID NO: 175219 - DNA, 30 bp, Artificial Sequence
  Synthetic oligonucleotide
ataaaactcaagggtctaagtgacatgctc

SEQ ID NO: 175220 - DNA, 30 bp, Artificial Sequence
  Synthetic oligonucleotide
gtgccactgataggttacggggccatgctc

SEQ ID NO: 175221 - DNA, 30 bp, Artificial Sequence
  Synthetic oligonucleotide
cattgaaaagaagaaaacgcattcatgctc

SEQ ID NO: 175222 - DNA, 30 bp, Artificial Sequence
  Synthetic oligonucleotide
agcaataaaaaatagcactttagactgctc

SEQ ID NO: 175223 - DNA, 30 bp, Artificial Sequence
  Synthetic oligonucleotide
cgccatgcgtcagataagggagtgctgctc

SEQ ID NO: 175224 - DNA, 30 bp, Artificial Sequence
  Synthetic oligonucleotide
cggttcgtactacgtatacggtaagtgctc

SEQ ID NO: 175225 - DNA, 30 bp, Artificial Sequence
  Synthetic oligonucleotide
tacaggacatctcccacgagagccgtgctc

SEQ ID NO: 175226 - DNA, 30 bp, Artificial Sequence
  Synthetic oligonucleotide
ctgacactggcaaaaataatccgggtgctc

SEQ ID NO: 175227 - DNA, 30 bp, Artificial Sequence
  Synthetic oligonucleotide
acttgtaccagtgtgtgcggagcaaatctc

SEQ ID NO: 175228 - DNA, 30 bp, Artificial Sequence
  Synthetic oligonucleotide
ggcccaggttatcgaagggtcagaaatctc

SEQ ID NO: 175229 - DNA, 30 bp, Artificial Sequence
  Synthetic oligonucleotide
ccattcaggagaaggatcattttaaatctc

SEQ ID NO: 175230 - DNA, 30 bp, Artificial Sequence
  Synthetic oligonucleotide
cttcataactacggaaattacgtgaatctc

SEQ ID NO: 175231 - DNA, 30 bp, Artificial Sequence
  Synthetic oligonucleotide
attgtcgaaacgtaattcccctaacatctc

SEQ ID NO: 175232 - DNA, 30 bp, Artificial Sequence
  Synthetic oligonucleotide
gggaacttgtatcagtattagggacatctc

SEQ ID NO: 175233 - DNA, 30 bp, Artificial Sequence
  Synthetic oligonucleotide
gtaggacttagcgaaagtggcaaccatctc

SEQ ID NO: 175234 - DNA, 30 bp, Artificial Sequence
  Synthetic oligonucleotide
atgtatgcggaatccggactaaagcatctc

SEQ ID NO: 175235 - DNA, 30 bp, Artificial Sequence
  Synthetic oligonucleotide
tagtcaaaaaacgccggcgaacggcatctc

SEQ ID NO: 175236 - DNA, 30 bp, Artificial Sequence
  Synthetic oligonucleotide
atggtgtatacgtgtcattattatcatctc

SEQ ID NO: 175237 - DNA, 30 bp, Artificial Sequence
  Synthetic oligonucleotide
aagttcagagcagtggagggttttcatctc

SEQ ID NO: 175238 - DNA, 30 bp, Artificial Sequence
  Synthetic oligonucleotide
catgatcaataggctctacaccgggatctc

SEQ ID NO: 175239 - DNA, 30 bp, Artificial Sequence
  Synthetic oligonucleotide
atgtctaggtccggaccgccatcctatctc

SEQ ID NO: 175240 - DNA, 30 bp, Artificial Sequence
  Synthetic oligonucleotide
caagagttgcctcggtgacaggtgtatctc

SEQ ID NO: 175241 - DNA, 30 bp, Artificial Sequence
  Synthetic oligonucleotide
ggcggactcgagtacaatcacgacactctc

SEQ ID NO: 175242 - DNA, 30 bp, Artificial Sequence
  Synthetic oligonucleotide
gtgggtctcgaggattgcggcatcactctc

SEQ ID NO: 175243 - DNA, 30 bp, Artificial Sequence
  Synthetic oligonucleotide
tgaatgagattcgctgttgtcagacctctc

SEQ ID NO: 175244 - DNA, 30 bp, Artificial Sequence
  Synthetic oligonucleotide
gcaccgctttgccagtggttgcctcctctc

SEQ ID NO: 175245 - DNA, 30 bp, Artificial Sequence
  Synthetic oligonucleotide
cagtaggatagtagggtagcgttcgctctc

SEQ ID NO: 175246 - DNA, 30 bp, Artificial Sequence
  Synthetic oligonucleotide
acgagggagatcatgaggcggtcggctctc

SEQ ID NO: 175247 - DNA, 30 bp, Artificial Sequence
  Synthetic oligonucleotide
agtatgtattgcggtattcatagggctctc

SEQ ID NO: 175248 - DNA, 30 bp, Artificial Sequence
  Synthetic oligonucleotide
gcgctaacttaggatcagtgtgtggctctc

SEQ ID NO: 175249 - DNA, 30 bp, Artificial Sequence
  Synthetic oligonucleotide
actatcagccaatataatcagcaatctctc

SEQ ID NO: 175250 - DNA, 30 bp, Artificial Sequence
  Synthetic oligonucleotide
atttcgccaaagtaagaagatgagagtctc

SEQ ID NO: 175251 - DNA, 30 bp, Artificial Sequence
  Synthetic oligonucleotide
gaaagaccagagcgaatagagaggagtctc

SEQ ID NO: 175252 - DNA, 30 bp, Artificial Sequence
  Synthetic oligonucleotide
cgtatggtgagggggacggacactagtctc

SEQ ID NO: 175253 - DNA, 30 bp, Artificial Sequence
  Synthetic oligonucleotide
aagcactagcgtcacggctctaacggtctc

SEQ ID NO: 175254 - DNA, 30 bp, Artificial Sequence
  Synthetic oligonucleotide
cctaatcaaagattactctaactcggtctc

SEQ ID NO: 175255 - DNA, 30 bp, Artificial Sequence
  Synthetic oligonucleotide
tggcgatgtcaatttctcaggccatgtctc

SEQ ID NO: 175256 - DNA, 30 bp, Artificial Sequence
  Synthetic oligonucleotide
tcacacctctaacggggtgcgatctgtctc

SEQ ID NO: 175257 - DNA, 30 bp, Artificial Sequence
  Synthetic oligonucleotide
cgactccgggcaggcgactgaacttgtctc

SEQ ID NO: 175258 - DNA, 30 bp, Artificial Sequence
  Synthetic oligonucleotide
ggacgtcatctcggcgagacgaaaattctc

SEQ ID NO: 175259 - DNA, 30 bp, Artificial Sequence
  Synthetic oligonucleotide
acggagtacaagtacgtcgcgagcattctc

SEQ ID NO: 175260 - DNA, 30 bp, Artificial Sequence
  Synthetic oligonucleotide
tccgaggctaaaaattgcgcctttattctc

SEQ ID NO: 175261 - DNA, 30 bp, Artificial Sequence
  Synthetic oligonucleotide
acgatgaatagggacctgtgagcacttctc

SEQ ID NO: 175262 - DNA, 30 bp, Artificial Sequence
  Synthetic oligonucleotide
taacgggaggggcacgaggagcagcttctc

SEQ ID NO: 175263 - DNA, 30 bp, Artificial Sequence
  Synthetic oligonucleotide
taaccacggtttggaattaagtagcttctc

SEQ ID NO: 175264 - DNA, 30 bp, Artificial Sequence
  Synthetic oligonucleotide
gtctccactagaaaggccgtaaatcttctc

SEQ ID NO: 175265 - DNA, 30 bp, Artificial Sequence
  Synthetic oligonucleotide
cggatatttaatcggaggactagtgttctc

SEQ ID NO: 175266 - DNA, 30 bp, Artificial Sequence
  Synthetic oligonucleotide
tcttcgtcctccgctcctcatggtaaagtc

SEQ ID NO: 175267 - DNA, 30 bp, Artificial Sequence
  Synthetic oligonucleotide
ctgcaagcgtcatctttccgggcccaagtc

SEQ ID NO: 175268 - DNA, 30 bp, Artificial Sequence
  Synthetic oligonucleotide
aggaggccgttatgtgttcatcagcaagtc

SEQ ID NO: 175269 - DNA, 30 bp, Artificial Sequence
  Synthetic oligonucleotide
tagcctcgcaataagcaatgttcgcaagtc

SEQ ID NO: 175270 - DNA, 30 bp, Artificial Sequence
  Synthetic oligonucleotide
ctcccgccttcaggaggccgatggcaagtc

SEQ ID NO: 175271 - DNA, 30 bp, Artificial Sequence
  Synthetic oligonucleotide
gttgtgtcaaggctcaagcacatgcaagtc

SEQ ID NO: 175272 - DNA, 30 bp, Artificial Sequence
  Synthetic oligonucleotide
aatgaacacctcgtctaaataccagaagtc

SEQ ID NO: 175273 - DNA, 30 bp, Artificial Sequence
  Synthetic oligonucleotide
gtactactgccattccaaaggaacgaagtc

SEQ ID NO: 175274 - DNA, 30 bp, Artificial Sequence
  Synthetic oligonucleotide
tcatattggattatcggacacaccgaagtc

SEQ ID NO: 175275 - DNA, 30 bp, Artificial Sequence
  Synthetic oligonucleotide
tgctctgtgggttaagatggtcaggaagtc

SEQ ID NO: 175276 - DNA, 30 bp, Artificial Sequence
  Synthetic oligonucleotide
gcggcgtatgaaccttttgattaggaagtc

SEQ ID NO: 175277 - DNA, 30 bp, Artificial Sequence
  Synthetic oligonucleotide
cctgttcaatgttctagattggcggaagtc

SEQ ID NO: 175278 - DNA, 31 bp, Artificial Sequence
  Synthetic oligonucleotide
tgaaatcagcacatacagatcgtcggaagtc

SEQ ID NO: 175279 - DNA, 30 bp, Artificial Sequence
  Synthetic oligonucleotide
agagtaacacaagggaactgtcatgaagtc

SEQ ID NO: 175280 - DNA, 30 bp, Artificial Sequence
  Synthetic oligonucleotide
cgatcatatgaggcttccactggtgaagtc

SEQ ID NO: 175281 - DNA, 30 bp, Artificial Sequence
  Synthetic oligonucleotide
gctgcgtcaggaccatcgcggtgtgaagtc

SEQ ID NO: 175282 - DNA, 30 bp, Artificial Sequence
  Synthetic oligonucleotide
actaagcagaaaccgatggttccataagtc

SEQ ID NO: 175283 - DNA, 30 bp, Artificial Sequence
  Synthetic oligonucleotide
tatgcccgtcgaggttcaggactataagtc

SEQ ID NO: 175284 - DNA, 30 bp, Artificial Sequence
  Synthetic oligonucleotide
gcagttaacatacataaggcccagtaagtc

SEQ ID NO: 175285 - DNA, 30 bp, Artificial Sequence
  Synthetic oligonucleotide
caccgtatgcagtacagtacgaggtaagtc

SEQ ID NO: 175286 - DNA, 30 bp, Artificial Sequence
  Synthetic oligonucleotide
gttcgcttaaaagtacaagtaggttaagtc

SEQ ID NO: 175287 - DNA, 30 bp, Artificial Sequence
  Synthetic oligonucleotide
gtcagtaatgtatagagctcaggaacagtc

SEQ ID NO: 175288 - DNA, 30 bp, Artificial Sequence
  Synthetic oligonucleotide
gctgggttataggaatatctgctgccagtc

SEQ ID NO: 175289 - DNA, 30 bp, Artificial Sequence
  Synthetic oligonucleotide
ggaacccttattgtagccgaagtgccagtc

SEQ ID NO: 175290 - DNA, 30 bp, Artificial Sequence
  Synthetic oligonucleotide
tggccaccatcaacgctgcgaagtgcagtc

SEQ ID NO: 175291 - DNA, 30 bp, Artificial Sequence
  Synthetic oligonucleotide
accgttatttcaccaggaaaaggtgcagtc

SEQ ID NO: 175292 - DNA, 30 bp, Artificial Sequence
  Synthetic oligonucleotide
ggcacgggtgcgggacagggtttcagagtc

SEQ ID NO: 175293 - DNA, 30 bp, Artificial Sequence
  Synthetic oligonucleotide
tccctgggcacgaagtgggaattacgagtc

SEQ ID NO: 175294 - DNA, 30 bp, Artificial Sequence
  Synthetic oligonucleotide
tgcacgtatctagaaccccctgaccgagtc

SEQ ID NO: 175295 - DNA, 30 bp, Artificial Sequence
  Synthetic oligonucleotide
ttcgctaaaggttatcagttggcgcgagtc

SEQ ID NO: 175296 - DNA, 30 bp, Artificial Sequence
  Synthetic oligonucleotide
tttgcgctgagggcatagtttacaggagtc

SEQ ID NO: 175297 - DNA, 30 bp, Artificial Sequence
  Synthetic oligonucleotide
acgaaaggcaaatctgtgtggtacggagtc

SEQ ID NO: 175298 - DNA, 30 bp, Artificial Sequence
  Synthetic oligonucleotide
tgattgtcttctggactcagtcggggagtc

SEQ ID NO: 175299 - DNA, 30 bp, Artificial Sequence
  Synthetic oligonucleotide
cagaaccgacatcaaccgcttcatggagtc

SEQ ID NO: 175300 - DNA, 30 bp, Artificial Sequence
  Synthetic oligonucleotide
cgcgcagtaaataatgggcgatctggagtc

SEQ ID NO: 175301 - DNA, 30 bp, Artificial Sequence
  Synthetic oligonucleotide
cacttgagaggtggcagattaccatgagtc

SEQ ID NO: 175302 - DNA, 30 bp, Artificial Sequence
  Synthetic oligonucleotide
ggatacgtacattagcgagcaaactgagtc

SEQ ID NO: 175303 - DNA, 30 bp, Artificial Sequence
  Synthetic oligonucleotide
catgacaggtcgggctcttgtaattgagtc

SEQ ID NO: 175304 - DNA, 30 bp, Artificial Sequence
  Synthetic oligonucleotide
cacggctacaggtgaccctcactttgagtc

SEQ ID NO: 175305 - DNA, 30 bp, Artificial Sequence
  Synthetic oligonucleotide
aataacggtgccaacactatacaaatagtc

SEQ ID NO: 175306 - DNA, 30 bp, Artificial Sequence
  Synthetic oligonucleotide
aaacgaagagtacattaggcttagatagtc

SEQ ID NO: 175307 - DNA, 30 bp, Artificial Sequence
  Synthetic oligonucleotide
cactgaccgtatgtacatattacgatagtc

SEQ ID NO: 175308 - DNA, 30 bp, Artificial Sequence
  Synthetic oligonucleotide
actcagtatagaatacgtaaagctatagtc

SEQ ID NO: 175309 - DNA, 30 bp, Artificial Sequence
  Synthetic oligonucleotide
accatcatgccacgcatcgcgatactagtc

SEQ ID NO: 175310 - DNA, 30 bp, Artificial Sequence
  Synthetic oligonucleotide
tagttaccccattggggttcaaggctagtc

SEQ ID NO: 175311 - DNA, 30 bp, Artificial Sequence
  Synthetic oligonucleotide
ttagatgcttaacctgggagacaagtagtc

SEQ ID NO: 175312 - DNA, 30 bp, Artificial Sequence
  Synthetic oligonucleotide
taaatgaagtaaccataaacatgcgtagtc

SEQ ID NO: 175313 - DNA, 30 bp, Artificial Sequence
  Synthetic oligonucleotide
tgccatccgggaaacatcaaatgattagtc

SEQ ID NO: 175314 - DNA, 30 bp, Artificial Sequence
  Synthetic oligonucleotide
gaacggtacggttagtaaactgagttagtc

SEQ ID NO: 175315 - DNA, 30 bp, Artificial Sequence
  Synthetic oligonucleotide
tagacgggctagtggtatggacccaacgtc

SEQ ID NO: 175316 - DNA, 30 bp, Artificial Sequence
  Synthetic oligonucleotide
tttgacaaagtaagtgcccacagtaacgtc

SEQ ID NO: 175317 - DNA, 30 bp, Artificial Sequence
  Synthetic oligonucleotide
atcataaatcatggggggatcgcacacgtc

SEQ ID NO: 175318 - DNA, 30 bp, Artificial Sequence
  Synthetic oligonucleotide
ctgagaaattagcgaagggatgctcacgtc

SEQ ID NO: 175319 - DNA, 30 bp, Artificial Sequence
  Synthetic oligonucleotide
ctgcacacgttgttccgctaagttcacgtc

SEQ ID NO: 175320 - DNA, 30 bp, Artificial Sequence
  Synthetic oligonucleotide
taacagccgccgcatgttaacgaagacgtc

SEQ ID NO: 175321 - DNA, 30 bp, Artificial Sequence
  Synthetic oligonucleotide
cggcagcagcaaataccaagtgcagacgtc

SEQ ID NO: 175322 - DNA, 30 bp, Artificial Sequence
  Synthetic oligonucleotide
gtgcaatggaggatatagtgaacggacgtc

SEQ ID NO: 175323 - DNA, 30 bp, Artificial Sequence
  Synthetic oligonucleotide
ctaacgttacttgcgtaacgaggggacgtc

SEQ ID NO: 175324 - DNA, 30 bp, Artificial Sequence
  Synthetic oligonucleotide
ggcgctgaatagccgcataagcatgacgtc

SEQ ID NO: 175325 - DNA, 30 bp, Artificial Sequence
  Synthetic oligonucleotide
taactcagggtaggagaggccattgacgtc

SEQ ID NO: 175326 - DNA, 30 bp, Artificial Sequence
  Synthetic oligonucleotide
gcgagaccgtaataaaataaaggatacgtc

SEQ ID NO: 175327 - DNA, 30 bp, Artificial Sequence
  Synthetic oligonucleotide
gctgaatcggaaggaacctcaagctacgtc

SEQ ID NO: 175328 - DNA, 30 bp, Artificial Sequence
  Synthetic oligonucleotide
cgcgggaaggaaataacgcgtagctacgtc

SEQ ID NO: 175329 - DNA, 30 bp, Artificial Sequence
  Synthetic oligonucleotide
catccggcttgattaagaacactgtacgtc

SEQ ID NO: 175330 - DNA, 30 bp, Artificial Sequence
  Synthetic oligonucleotide
aaatgagtaccattcaataataacaccgtc

SEQ ID NO: 175331 - DNA, 30 bp, Artificial Sequence
  Synthetic oligonucleotide
ggtctcccctattcaaaatacgacaccgtc

SEQ ID NO: 175332 - DNA, 30 bp, Artificial Sequence
  Synthetic oligonucleotide
gggcggtgaccgaattaggccaatcccgtc

SEQ ID NO: 175333 - DNA, 30 bp, Artificial Sequence
  Synthetic oligonucleotide
gtatgttagttaccgggctcacgggccgtc

SEQ ID NO: 175334 - DNA, 31 bp, Artificial Sequence
  Synthetic oligonucleotide
atcatggcgggatcggctaaagaatgccgtc

SEQ ID NO: 175335 - DNA, 30 bp, Artificial Sequence
  Synthetic oligonucleotide
aattttacaattggggttcgtccatccgtc

SEQ ID NO: 175336 - DNA, 30 bp, Artificial Sequence
  Synthetic oligonucleotide
ctagttcggcacagaataatgtactccgtc

SEQ ID NO: 175337 - DNA, 30 bp, Artificial Sequence
  Synthetic oligonucleotide
gaatccggtctctgcgaactcctgagcgtc

SEQ ID NO: 175338 - DNA, 30 bp, Artificial Sequence
  Synthetic oligonucleotide
gagtagaccaagaagtcgaaagtgagcgtc

SEQ ID NO: 175339 - DNA, 30 bp, Artificial Sequence
  Synthetic oligonucleotide
tgtccgtatgcatggctctcttcccgcgtc

SEQ ID NO: 175340 - DNA, 30 bp, Artificial Sequence
  Synthetic oligonucleotide
cggggaacggggacgtaatgaccgcgcgtc

SEQ ID NO: 175341 - DNA, 30 bp, Artificial Sequence
  Synthetic oligonucleotide
ttaatccggcttcgtgtgtactgtggcgtc

SEQ ID NO: 175342 - DNA, 30 bp, Artificial Sequence
  Synthetic oligonucleotide
ctggtcaggctgcgtattacggtatgcgtc

SEQ ID NO: 175343 - DNA, 30 bp, Artificial Sequence
  Synthetic oligonucleotide
acaagtatgacgtagacacagacgtgcgtc

SEQ ID NO: 175344 - DNA, 30 bp, Artificial Sequence
  Synthetic oligonucleotide
gcctgtatcaaacaggggcttctgtgcgtc

SEQ ID NO: 175345 - DNA, 30 bp, Artificial Sequence
  Synthetic oligonucleotide
tgtcgtgttttgcttgttactttttgcgtc

SEQ ID NO: 175346 - DNA, 30 bp, Artificial Sequence
  Synthetic oligonucleotide
tggtataccgggacgcaaatgccgatcgtc

SEQ ID NO: 175347 - DNA, 30 bp, Artificial Sequence
  Synthetic oligonucleotide
atattagtaaaaaacattaatcttatcgtc

SEQ ID NO: 175348 - DNA, 30 bp, Artificial Sequence
  Synthetic oligonucleotide
gagggtgggggaggatggggggcactcgtc

SEQ ID NO: 175349 - DNA, 30 bp, Artificial Sequence
  Synthetic oligonucleotide
gaactagtcacagtcgggcttggactcgtc

SEQ ID NO: 175350 - DNA, 30 bp, Artificial Sequence
  Synthetic oligonucleotide
tcgggtagtaaggtaatggtgtacctcgtc

SEQ ID NO: 175351 - DNA, 35 bp, Artificial Sequence
  Synthetic oligonucleotide
gtcgccatgtctgggcgcagcgtggcagagtcgtc

SEQ ID NO: 175352 - DNA, 30 bp, Artificial Sequence
  Synthetic oligonucleotide
ataagcgtctctgttatgggggacgtcgtc

SEQ ID NO: 175353 - DNA, 30 bp, Artificial Sequence
  Synthetic oligonucleotide
tcaaacggcgggtgaaatccacaggtcgtc

SEQ ID NO: 175354 - DNA, 30 bp, Artificial Sequence
  Synthetic oligonucleotide
gtcaaaaaatacgatgagaccgttgtcgtc

SEQ ID NO: 175355 - DNA, 30 bp, Artificial Sequence
  Synthetic oligonucleotide
agggcggggatggcattgaaatttgtcgtc

SEQ ID NO: 175356 - DNA, 30 bp, Artificial Sequence
  Synthetic oligonucleotide
atcaattccgatacagtgtagttattcgtc

SEQ ID NO: 175357 - DNA, 30 bp, Artificial Sequence
  Synthetic oligonucleotide
tccattacggtctaacctgggcgcttcgtc

SEQ ID NO: 175358 - DNA, 30 bp, Artificial Sequence
  Synthetic oligonucleotide
gggatatcttgggggacataaacgttcgtc

SEQ ID NO: 175359 - DNA, 30 bp, Artificial Sequence
  Synthetic oligonucleotide
ttaattcgtggtacacgtctttggttcgtc

SEQ ID NO: 175360 - DNA, 30 bp, Artificial Sequence
  Synthetic oligonucleotide
ggttcggtccgtgcaggctcaagaaaggtc

SEQ ID NO: 175361 - DNA, 30 bp, Artificial Sequence
  Synthetic oligonucleotide
gaggctattgaacgtggtgttgataaggtc

SEQ ID NO: 175362 - DNA, 30 bp, Artificial Sequence
  Synthetic oligonucleotide
aggtacctggagtggtaccttgctaaggtc

SEQ ID NO: 175363 - DNA, 30 bp, Artificial Sequence
  Synthetic oligonucleotide
gcaggatcatatcgataagattttaaggtc

SEQ ID NO: 175364 - DNA, 30 bp, Artificial Sequence
  Synthetic oligonucleotide
atgatcggcaactccacatcacaacaggtc

SEQ ID NO: 175365 - DNA, 30 bp, Artificial Sequence
  Synthetic oligonucleotide
tctattaggttgccaccaatcttacaggtc

SEQ ID NO: 175366 - DNA, 30 bp, Artificial Sequence
  Synthetic oligonucleotide
ttaccagaggtaaccaggcctggccaggtc

SEQ ID NO: 175367 - DNA, 29 bp, Artificial Sequence
  Synthetic oligonucleotide
ggaggcactataagggtagttcgcaggtc

SEQ ID NO: 175368 - DNA, 30 bp, Artificial Sequence
  Synthetic oligonucleotide
ggtggaagatcttagttgaaggtagaggtc

SEQ ID NO: 175369 - DNA, 30 bp, Artificial Sequence
  Synthetic oligonucleotide
agcccccggcaagaagtgttcgatgaggtc

SEQ ID NO: 175370 - DNA, 30 bp, Artificial Sequence
  Synthetic oligonucleotide
aacccacattgaatgcgttaaacttaggtc

SEQ ID NO: 175371 - DNA, 30 bp, Artificial Sequence
  Synthetic oligonucleotide
taagacgtaaaccgtagtacgacttaggtc

SEQ ID NO: 175372 - DNA, 30 bp, Artificial Sequence
  Synthetic oligonucleotide
ggtgcccggattgccacttacaaaacggtc

SEQ ID NO: 175373 - DNA, 30 bp, Artificial Sequence
  Synthetic oligonucleotide
aggacgcaataaggtgctaacatgacggtc

SEQ ID NO: 175374 - DNA, 30 bp, Artificial Sequence
  Synthetic oligonucleotide
cgggtctaaacacacagcatgtaaccggtc

SEQ ID NO: 175375 - DNA, 30 bp, Artificial Sequence
  Synthetic oligonucleotide
gatacgacattcagtgtatgttgcccggtc

SEQ ID NO: 175376 - DNA, 30 bp, Artificial Sequence
  Synthetic oligonucleotide
ggacctctgcaaatagatttactcccggtc

SEQ ID NO: 175377 - DNA, 30 bp, Artificial Sequence
  Synthetic oligonucleotide
ggtacagctggcagggaaagcccggcggtc

SEQ ID NO: 175378 - DNA, 30 bp, Artificial Sequence
  Synthetic oligonucleotide
ggtcggttcacgtcaaccatggatgcggtc

SEQ ID NO: 175379 - DNA, 30 bp, Artificial Sequence
  Synthetic oligonucleotide
tatgcatgtataaaagccgaacggtcggtc

SEQ ID NO: 175380 - DNA, 30 bp, Artificial Sequence
  Synthetic oligonucleotide
ttggaagaccttttctagctattcagggtc

SEQ ID NO: 175381 - DNA, 30 bp, Artificial Sequence
  Synthetic oligonucleotide
aacgggatttcagttgaggccttacgggtc

SEQ ID NO: 175382 - DNA, 30 bp, Artificial Sequence
  Synthetic oligonucleotide
aggagccgcgggcgtaactcaaaaggggtc

SEQ ID NO: 175383 - DNA, 30 bp, Artificial Sequence
  Synthetic oligonucleotide
ggatcatatctggtgcagatcaagggggtc

SEQ ID NO: 175384 - DNA, 30 bp, Artificial Sequence
  Synthetic oligonucleotide
atgtataggcaggacgcgtatgggggggtc

SEQ ID NO: 175385 - DNA, 30 bp, Artificial Sequence
  Synthetic oligonucleotide
gacgttacactgacaatccggccatgggtc

SEQ ID NO: 175386 - DNA, 30 bp, Artificial Sequence
  Synthetic oligonucleotide
taagcttcagctacgttatcttattgggtc

SEQ ID NO: 175387 - DNA, 30 bp, Artificial Sequence
  Synthetic oligonucleotide
gtcagttagtccggaaagcatggttgggtc

SEQ ID NO: 175388 - DNA, 30 bp, Artificial Sequence
  Synthetic oligonucleotide
gcattgcgagccaatataatcatttgggtc

SEQ ID NO: 175389 - DNA, 30 bp, Artificial Sequence
  Synthetic oligonucleotide
gtcccgtgtaattgagagcttctgatggtc

SEQ ID NO: 175390 - DNA, 30 bp, Artificial Sequence
  Synthetic oligonucleotide
gcataaataggccgttcgttggctatggtc

SEQ ID NO: 175391 - DNA, 30 bp, Artificial Sequence
  Synthetic oligonucleotide
acggccaggctatgatatgggagtatggtc

SEQ ID NO: 175392 - DNA, 30 bp, Artificial Sequence
  Synthetic oligonucleotide
taagattctgaatggaaaagttgtatggtc

SEQ ID NO: 175393 - DNA, 30 bp, Artificial Sequence
  Synthetic oligonucleotide
tataggggtagacaacaaacgaaactggtc

SEQ ID NO: 175394 - DNA, 30 bp, Artificial Sequence
  Synthetic oligonucleotide
gcaagtagggatcttaaatactgcctggtc

SEQ ID NO: 175395 - DNA, 30 bp, Artificial Sequence
  Synthetic oligonucleotide
ggttgatttcaatacaaggaaaagctggtc

SEQ ID NO: 175396 - DNA, 30 bp, Artificial Sequence
  Synthetic oligonucleotide
catcaagccaatccgaaattttgtctggtc

SEQ ID NO: 175397 - DNA, 30 bp, Artificial Sequence
  Synthetic oligonucleotide
gtcacgtaatggactggatcctcagtggtc

SEQ ID NO: 175398 - DNA, 30 bp, Artificial Sequence
  Synthetic oligonucleotide
gaaaaggcctaattcacatattgggtggtc

SEQ ID NO: 175399 - DNA, 30 bp, Artificial Sequence
  Synthetic oligonucleotide
gacacgtattgccagacaaccattgtggtc

SEQ ID NO: 175400 - DNA, 30 bp, Artificial Sequence
  Synthetic oligonucleotide
cagaaagagcggcgcggacaaacgttggtc

SEQ ID NO: 175401 - DNA, 30 bp, Artificial Sequence
  Synthetic oligonucleotide
tcgttgcaaatggtggctaactggttggtc

SEQ ID NO: 175402 - DNA, 30 bp, Artificial Sequence
  Synthetic oligonucleotide
ctatgttgaagtttttacgtacctttggtc

SEQ ID NO: 175403 - DNA, 30 bp, Artificial Sequence
  Synthetic oligonucleotide
ttgtgatcctcacgcaaaatgtggaatgtc

SEQ ID NO: 175404 - DNA, 30 bp, Artificial Sequence
  Synthetic oligonucleotide
gatgggggaacggttatacgtttgaatgtc

SEQ ID NO: 175405 - DNA, 30 bp, Artificial Sequence
  Synthetic oligonucleotide
tcaattaaggcgatcaaacgtggtaatgtc

SEQ ID NO: 175406 - DNA, 30 bp, Artificial Sequence
  Synthetic oligonucleotide
cagtaattgtgaagagtttcaagacatgtc

SEQ ID NO: 175407 - DNA, 30 bp, Artificial Sequence
  Synthetic oligonucleotide
cggttggtcacaagggtaggccgacatgtc

SEQ ID NO: 175408 - DNA, 30 bp, Artificial Sequence
  Synthetic oligonucleotide
cttctacacggcttggagaggaagcatgtc

SEQ ID NO: 175409 - DNA, 30 bp, Artificial Sequence
  Synthetic oligonucleotide
agaaatggaattggccatccacaagatgtc

SEQ ID NO: 175410 - DNA, 30 bp, Artificial Sequence
  Synthetic oligonucleotide
attcgtggccgcggaccaaactcagatgtc

SEQ ID NO: 175411 - DNA, 30 bp, Artificial Sequence
  Synthetic oligonucleotide
tgtacggcctaatgctatcggtccgatgtc

SEQ ID NO: 175412 - DNA, 30 bp, Artificial Sequence
  Synthetic oligonucleotide
caccgaggggtctgtttccacgtcgatgtc

SEQ ID NO: 175413 - DNA, 30 bp, Artificial Sequence
  Synthetic oligonucleotide
ttgaaaggtggtgtacctcaataggatgtc

SEQ ID NO: 175414 - DNA, 30 bp, Artificial Sequence
  Synthetic oligonucleotide
ggactagcagtagaaagaaaatcggatgtc

SEQ ID NO: 175415 - DNA, 30 bp, Artificial Sequence
  Synthetic oligonucleotide
ggttaagtccaatgagatctttcggatgtc

SEQ ID NO: 175416 - DNA, 30 bp, Artificial Sequence
  Synthetic oligonucleotide
cgttattgaggccctctatcaagttatgtc

SEQ ID NO: 175417 - DNA, 30 bp, Artificial Sequence
  Synthetic oligonucleotide
attagagatggaagtatgcgcgaaactgtc

SEQ ID NO: 175418 - DNA, 30 bp, Artificial Sequence
  Synthetic oligonucleotide
gacgatcagtaaatgaacagaagaactgtc

SEQ ID NO: 175419 - DNA, 30 bp, Artificial Sequence
  Synthetic oligonucleotide
gcctggactatagctgaaaggctaactgtc

SEQ ID NO: 175420 - DNA, 30 bp, Artificial Sequence
  Synthetic oligonucleotide
ggggcttaccactgtaataggagtactgtc

SEQ ID NO: 175421 - DNA, 30 bp, Artificial Sequence
  Synthetic oligonucleotide
ctacttcctacgccgtggtggaaacctgtc

SEQ ID NO: 175422 - DNA, 30 bp, Artificial Sequence
  Synthetic oligonucleotide
tgccacatctgcctagttaacacacctgtc

SEQ ID NO: 175423 - DNA, 30 bp, Artificial Sequence
  Synthetic oligonucleotide
gcgggcgcccgtcaagagatggctcctgtc

SEQ ID NO: 175424 - DNA, 30 bp, Artificial Sequence
  Synthetic oligonucleotide
gtgctaataaggtcccactcgagtcctgtc

SEQ ID NO: 175425 - DNA, 30 bp, Artificial Sequence
  Synthetic oligonucleotide
taccatatggttgatcaaggctgtcctgtc

SEQ ID NO: 175426 - DNA, 30 bp, Artificial Sequence
  Synthetic oligonucleotide
agcgagtttcagcccaagcatgcagctgtc

SEQ ID NO: 175427 - DNA, 30 bp, Artificial Sequence
  Synthetic oligonucleotide
cttattacgagacaatagtttctggctgtc

SEQ ID NO: 175428 - DNA, 30 bp, Artificial Sequence
  Synthetic oligonucleotide
agcgcctgagtacggtaactggctgctgtc

SEQ ID NO: 175429 - DNA, 30 bp, Artificial Sequence
  Synthetic oligonucleotide
aagagccgcgggttccgcaatagtgctgtc

SEQ ID NO: 175430 - DNA, 30 bp, Artificial Sequence
  Synthetic oligonucleotide
tgcttaataatttagtactggtcatctgtc

SEQ ID NO: 175431 - DNA, 30 bp, Artificial Sequence
  Synthetic oligonucleotide
tgggggtatacaaagttttcaacctctgtc

SEQ ID NO: 175432 - DNA, 30 bp, Artificial Sequence
  Synthetic oligonucleotide
cgcactcaacgcatgttcgactccagtgtc

SEQ ID NO: 175433 - DNA, 30 bp, Artificial Sequence
  Synthetic oligonucleotide
tcatgtcgtgagcgccttaggcatagtgtc

SEQ ID NO: 175434 - DNA, 30 bp, Artificial Sequence
  Synthetic oligonucleotide
cagacggggggtctgctaagaggtagtgtc

SEQ ID NO: 175435 - DNA, 30 bp, Artificial Sequence
  Synthetic oligonucleotide
ctctcggtcgtcaatacctggctgcgtgtc

SEQ ID NO: 175436 - DNA, 30 bp, Artificial Sequence
  Synthetic oligonucleotide
acctagaatacagggatatgtggtcgtgtc

SEQ ID NO: 175437 - DNA, 30 bp, Artificial Sequence
  Synthetic oligonucleotide
atacttgataatcagcgggtgggaggtgtc

SEQ ID NO: 175438 - DNA, 30 bp, Artificial Sequence
  Synthetic oligonucleotide
catggtcaacattatcacaccgggggtgtc

SEQ ID NO: 175439 - DNA, 30 bp, Artificial Sequence
  Synthetic oligonucleotide
ctcgtctaatgactagagattatgggtgtc

SEQ ID NO: 175440 - DNA, 30 bp, Artificial Sequence
  Synthetic oligonucleotide
ggacatttcttcatggttgcatgtggtgtc

SEQ ID NO: 175441 - DNA, 30 bp, Artificial Sequence
  Synthetic oligonucleotide
gcgcacatggtatattacgctaagtgtgtc

SEQ ID NO: 175442 - DNA, 30 bp, Artificial Sequence
  Synthetic oligonucleotide
ttacttcaaaactactaacggtcaattgtc

SEQ ID NO: 175443 - DNA, 30 bp, Artificial Sequence
  Synthetic oligonucleotide
taatgcccaaataagagggaactaattgtc

SEQ ID NO: 175444 - DNA, 30 bp, Artificial Sequence
  Synthetic oligonucleotide
gagcaaagtgatggtccgggcaacattgtc

SEQ ID NO: 175445 - DNA, 30 bp, Artificial Sequence
  Synthetic oligonucleotide
ccttataggacatcggttacgcacattgtc

SEQ ID NO: 175446 - DNA, 30 bp, Artificial Sequence
  Synthetic oligonucleotide
cctccccggatccaaagaaaacgtcttgtc

SEQ ID NO: 175447 - DNA, 30 bp, Artificial Sequence
  Synthetic oligonucleotide
acagcacaatctcttaaaagactagttgtc

SEQ ID NO: 175448 - DNA, 30 bp, Artificial Sequence
  Synthetic oligonucleotide
gagaggtgcgtgggaaacgacgtcgttgtc

SEQ ID NO: 175449 - DNA, 30 bp, Artificial Sequence
  Synthetic oligonucleotide
caaacacgtgcaggacagggccaggttgtc

SEQ ID NO: 175450 - DNA, 30 bp, Artificial Sequence
  Synthetic oligonucleotide
ggtcgcttaggtcacaaggcgatggttgtc

SEQ ID NO: 175451 - DNA, 30 bp, Artificial Sequence
  Synthetic oligonucleotide
cgaggccctctactggtagtgtatgttgtc

SEQ ID NO: 175452 - DNA, 30 bp, Artificial Sequence
  Synthetic oligonucleotide
agacctacggaatcgaagagtatctttgtc

SEQ ID NO: 175453 - DNA, 30 bp, Artificial Sequence
  Synthetic oligonucleotide
cgagtagctattattacatacttctttgtc

SEQ ID NO: 175454 - DNA, 30 bp, Artificial Sequence
  Synthetic oligonucleotide
ctgagcgcgtagtggataatatggtttgtc

SEQ ID NO: 175455 - DNA, 30 bp, Artificial Sequence
  Synthetic oligonucleotide
cctgcggatttccggacataagccaaattc

SEQ ID NO: 175456 - DNA, 30 bp, Artificial Sequence
  Synthetic oligonucleotide
ctaaggtaccttgcaataactagcaaattc

SEQ ID NO: 175457 - DNA, 30 bp, Artificial Sequence
  Synthetic oligonucleotide
acataacggaatcttgataagttcaaattc

SEQ ID NO: 175458 - DNA, 30 bp, Artificial Sequence
  Synthetic oligonucleotide
acaatagcaccaatggtgaggcctaaattc

SEQ ID NO: 175459 - DNA, 30 bp, Artificial Sequence
  Synthetic oligonucleotide
ctggatcagtcagtgacccagtagcaattc

SEQ ID NO: 175460 - DNA, 30 bp, Artificial Sequence
  Synthetic oligonucleotide
tggctccagccagcgactcggaccgaattc

SEQ ID NO: 175461 - DNA, 30 bp, Artificial Sequence
  Synthetic oligonucleotide
acgtagatttctatgcggtcttccgaattc

SEQ ID NO: 175462 - DNA, 30 bp, Artificial Sequence
  Synthetic oligonucleotide
cgcgacattgggttattatcattggaattc

SEQ ID NO: 175463 - DNA, 30 bp, Artificial Sequence
  Synthetic oligonucleotide
catgggaagtagggcaagatgatttaattc

SEQ ID NO: 175464 - DNA, 30 bp, Artificial Sequence
  Synthetic oligonucleotide
aaacatgtgagactgaggtcggtttaattc

SEQ ID NO: 175465 - DNA, 30 bp, Artificial Sequence
  Synthetic oligonucleotide
acgaatccagtgctttaccggctaacattc

SEQ ID NO: 175466 - DNA, 30 bp, Artificial Sequence
  Synthetic oligonucleotide
aaacggcgtcgacaaatgacaacgacattc

SEQ ID NO: 175467 - DNA, 30 bp, Artificial Sequence
  Synthetic oligonucleotide
atgcgttcgtacttgcattccactacattc

SEQ ID NO: 175468 - DNA, 30 bp, Artificial Sequence
  Synthetic oligonucleotide
cggtgaatgcggaacgtaagctaaccattc

SEQ ID NO: 175469 - DNA, 30 bp, Artificial Sequence
  Synthetic oligonucleotide
agcgtccctgtaacatgaggtgcaccattc

SEQ ID NO: 175470 - DNA, 30 bp, Artificial Sequence
  Synthetic oligonucleotide
cgacatagaagctggctttcttagccattc

SEQ ID NO: 175471 - DNA, 30 bp, Artificial Sequence
  Synthetic oligonucleotide
gtgcctgatagcggaagtgagacagcattc

SEQ ID NO: 175472 - DNA, 30 bp, Artificial Sequence
  Synthetic oligonucleotide
gtagaatcaggacgagtaactcaggcattc

SEQ ID NO: 175473 - DNA, 30 bp, Artificial Sequence
  Synthetic oligonucleotide
taggctgtttagactgataatgaggcattc

SEQ ID NO: 175474 - DNA, 30 bp, Artificial Sequence
  Synthetic oligonucleotide
ggatccatttcccccgataagcgggcattc

SEQ ID NO: 175475 - DNA, 30 bp, Artificial Sequence
  Synthetic oligonucleotide
gtgtcacaagatcgcctttctagctcattc

SEQ ID NO: 175476 - DNA, 30 bp, Artificial Sequence
  Synthetic oligonucleotide
ccggcagcttctagtacagattagagattc

SEQ ID NO: 175477 - DNA, 30 bp, Artificial Sequence
  Synthetic oligonucleotide
ggaagtcaccctgaaggtggcccgagattc

SEQ ID NO: 175478 - DNA, 30 bp, Artificial Sequence
  Synthetic oligonucleotide
tggttaactacgggcggacagtatagattc

SEQ ID NO: 175479 - DNA, 30 bp, Artificial Sequence
  Synthetic oligonucleotide
tgcccaggaacaccaatccggagacgattc

SEQ ID NO: 175480 - DNA, 30 bp, Artificial Sequence
  Synthetic oligonucleotide
gcgcatgctaagcagccgtgctgacgattc

SEQ ID NO: 175481 - DNA, 30 bp, Artificial Sequence
  Synthetic oligonucleotide
ttggcagggggcttggttgcgacccgattc

SEQ ID NO: 175482 - DNA, 30 bp, Artificial Sequence
  Synthetic oligonucleotide
tagttgggctcggagttcaataagcgattc

SEQ ID NO: 175483 - DNA, 30 bp, Artificial Sequence
  Synthetic oligonucleotide
acgtgggtacaatcgtggaagctgcgattc

SEQ ID NO: 175484 - DNA, 30 bp, Artificial Sequence
  Synthetic oligonucleotide
gtatgatcgaggccagaaaaataaggattc

SEQ ID NO: 175485 - DNA, 30 bp, Artificial Sequence
  Synthetic oligonucleotide
gatagacagagaaataatggctcaggattc

SEQ ID NO: 175486 - DNA, 30 bp, Artificial Sequence
  Synthetic oligonucleotide
ataaaagctgcgtactaggagacatgattc

SEQ ID NO: 175487 - DNA, 30 bp, Artificial Sequence
  Synthetic oligonucleotide
ctactcgaacggatgctaatgacatgattc

SEQ ID NO: 175488 - DNA, 30 bp, Artificial Sequence
  Synthetic oligonucleotide
gtgagtttgcaaatacctctgccgtgattc

SEQ ID NO: 175489 - DNA, 30 bp, Artificial Sequence
  Synthetic oligonucleotide
atacgattgatcgggtttggaccaatattc

SEQ ID NO: 175490 - DNA, 30 bp, Artificial Sequence
  Synthetic oligonucleotide
gcgcggaggtactaagccgcgagcatattc

SEQ ID NO: 175491 - DNA, 30 bp, Artificial Sequence
  Synthetic oligonucleotide
tcaaaccgcgtgttccggctctagatattc

SEQ ID NO: 175492 - DNA, 30 bp, Artificial Sequence
  Synthetic oligonucleotide
aagaattccctcactgaactactgatattc

SEQ ID NO: 175493 - DNA, 30 bp, Artificial Sequence
  Synthetic oligonucleotide
ggtgggagatgagaaggcttaggactattc

SEQ ID NO: 175494 - DNA, 30 bp, Artificial Sequence
  Synthetic oligonucleotide
gacttaggaagcctggtcgcattactattc

SEQ ID NO: 175495 - DNA, 30 bp, Artificial Sequence
  Synthetic oligonucleotide
tggatgaatgttgccactgtaagcctattc

SEQ ID NO: 175496 - DNA, 30 bp, Artificial Sequence
  Synthetic oligonucleotide
ggcttacagggagattcttcctctctattc

SEQ ID NO: 175497 - DNA, 30 bp, Artificial Sequence
  Synthetic oligonucleotide
agcgacccgagcttattggtgtaagtattc

SEQ ID NO: 175498 - DNA, 30 bp, Artificial Sequence
  Synthetic oligonucleotide
gtataggtgacctctgggcggaatgtattc

SEQ ID NO: 175499 - DNA, 30 bp, Artificial Sequence
  Synthetic oligonucleotide
tgagagtattagtataagcccaggttattc

SEQ ID NO: 175500 - DNA, 30 bp, Artificial Sequence
  Synthetic oligonucleotide
actcacccttgctgtcaattatccaacttc

SEQ ID NO: 175501 - DNA, 30 bp, Artificial Sequence
  Synthetic oligonucleotide
aggtggctcctggagtagcagtataacttc

SEQ ID NO: 175502 - DNA, 30 bp, Artificial Sequence
  Synthetic oligonucleotide
cgggttaggcggaccgtagaggttaacttc

SEQ ID NO: 175503 - DNA, 30 bp, Artificial Sequence
  Synthetic oligonucleotide
acaggtctagtactcctcggggaacacttc

SEQ ID NO: 175504 - DNA, 30 bp, Artificial Sequence
  Synthetic oligonucleotide
cagccgccttccaacacgtacgaggacttc

SEQ ID NO: 175505 - DNA, 30 bp, Artificial Sequence
  Synthetic oligonucleotide
tcggcgcctaataaaaggtacaatgacttc

SEQ ID NO: 175506 - DNA, 30 bp, Artificial Sequence
  Synthetic oligonucleotide
gtccgaaacatctgcgaattatcatacttc

SEQ ID NO: 175507 - DNA, 30 bp, Artificial Sequence
  Synthetic oligonucleotide
atggagattaattgagagagtagttacttc

SEQ ID NO: 175508 - DNA, 30 bp, Artificial Sequence
  Synthetic oligonucleotide
gatggtcgtgcggtcagtagtgacaccttc

SEQ ID NO: 175509 - DNA, 30 bp, Artificial Sequence
  Synthetic oligonucleotide
atcagaccgccgtcaatccttcagaccttc

SEQ ID NO: 175510 - DNA, 30 bp, Artificial Sequence
  Synthetic oligonucleotide
aagcgcagtttaatatacagcaaacccttc

SEQ ID NO: 175511 - DNA, 30 bp, Artificial Sequence
  Synthetic oligonucleotide
catatggcctatatcgtaagctcacccttc

SEQ ID NO: 175512 - DNA, 30 bp, Artificial Sequence
  Synthetic oligonucleotide
aagcaacttcaacgatgactcacgcccttc

SEQ ID NO: 175513 - DNA, 30 bp, Artificial Sequence
  Synthetic oligonucleotide
acgaagtgataccactgaggctgctccttc

SEQ ID NO: 175514 - DNA, 31 bp, Artificial Sequence
  Synthetic oligonucleotide
tacggaccgagggcatgcacagaaccgcttc

SEQ ID NO: 175515 - DNA, 30 bp, Artificial Sequence
  Synthetic oligonucleotide
tgggttagagactaacgtagattccgcttc

SEQ ID NO: 175516 - DNA, 30 bp, Artificial Sequence
  Synthetic oligonucleotide
cgaagtgcacttgcgtttagaccaggcttc

SEQ ID NO: 175517 - DNA, 30 bp, Artificial Sequence
  Synthetic oligonucleotide
cagctgggtgaccgaacctcgttaggcttc

SEQ ID NO: 175518 - DNA, 30 bp, Artificial Sequence
  Synthetic oligonucleotide
tgttgtgctatacggccatcacagggcttc

SEQ ID NO: 175519 - DNA, 30 bp, Artificial Sequence
  Synthetic oligonucleotide
acatgatcagttactagtggttagggcttc

SEQ ID NO: 175520 - DNA, 30 bp, Artificial Sequence
  Synthetic oligonucleotide
tattcgtaatcggaaagggccaggggcttc

SEQ ID NO: 175521 - DNA, 30 bp, Artificial Sequence
  Synthetic oligonucleotide
ttaactgtgacagggcttcctaatggcttc

SEQ ID NO: 175522 - DNA, 30 bp, Artificial Sequence
  Synthetic oligonucleotide
taggccaagtcaaagaggtagactggcttc

SEQ ID NO: 175523 - DNA, 30 bp, Artificial Sequence
  Synthetic oligonucleotide
acgaagtcggaggcttcatctgtatgcttc

SEQ ID NO: 175524 - DNA, 30 bp, Artificial Sequence
  Synthetic oligonucleotide
gcaggcgtgcacgcgacagagtagatcttc

SEQ ID NO: 175525 - DNA, 30 bp, Artificial Sequence
  Synthetic oligonucleotide
gtggtgcgaaatgctagatatcggatcttc

SEQ ID NO: 175526 - DNA, 30 bp, Artificial Sequence
  Synthetic oligonucleotide
ccgtagtcctccttacctagggacctcttc

SEQ ID NO: 175527 - DNA, 30 bp, Artificial Sequence
  Synthetic oligonucleotide
tagggataagctgcacctcatcagctcttc

SEQ ID NO: 175528 - DNA, 31 bp, Artificial Sequence
  Synthetic oligonucleotide
agtcctcaggtattcgttgatagtgctcttc

SEQ ID NO: 175529 - DNA, 30 bp, Artificial Sequence
  Synthetic oligonucleotide
ataccttcgcggatgaaatgttcagtcttc

SEQ ID NO: 175530 - DNA, 30 bp, Artificial Sequence
  Synthetic oligonucleotide
gtggtactgtcctggccaagggtagtcttc

SEQ ID NO: 175531 - DNA, 30 bp, Artificial Sequence
  Synthetic oligonucleotide
taacgggtgacaaggacctagtgcgtcttc

SEQ ID NO: 175532 - DNA, 30 bp, Artificial Sequence
  Synthetic oligonucleotide
gttaccgcgtcactagatctgggtgtcttc

SEQ ID NO: 175533 - DNA, 30 bp, Artificial Sequence
  Synthetic oligonucleotide
caccggagttagaaacaggaacccttcttc

SEQ ID NO: 175534 - DNA, 30 bp, Artificial Sequence
  Synthetic oligonucleotide
ccatgttttaaaggatagaaacacaagttc

SEQ ID NO: 175535 - DNA, 30 bp, Artificial Sequence
  Synthetic oligonucleotide
atacggtccgtgacaacactcccacagttc

SEQ ID NO: 175536 - DNA, 30 bp, Artificial Sequence
  Synthetic oligonucleotide
caggcatcagaaatcgggctagtccagttc

SEQ ID NO: 175537 - DNA, 30 bp, Artificial Sequence
  Synthetic oligonucleotide
actaccgcaggaccacttgccgcgcagttc

SEQ ID NO: 175538 - DNA, 30 bp, Artificial Sequence
  Synthetic oligonucleotide
caagccgattacggctaagactaagagttc

SEQ ID NO: 175539 - DNA, 30 bp, Artificial Sequence
  Synthetic oligonucleotide
caacacgcccgactgctaatctaagagttc

SEQ ID NO: 175540 - DNA, 30 bp, Artificial Sequence
  Synthetic oligonucleotide
aaggaaatgtctgtcattaggattgagttc

SEQ ID NO: 175541 - DNA, 30 bp, Artificial Sequence
  Synthetic oligonucleotide
tatgcggttgtatggtctatgatatagttc

SEQ ID NO: 175542 - DNA, 30 bp, Artificial Sequence
  Synthetic oligonucleotide
acgacctaacacccctacctacggtagttc

SEQ ID NO: 175543 - DNA, 30 bp, Artificial Sequence
  Synthetic oligonucleotide
tgaatgacccgacaacagttatattagttc

SEQ ID NO: 175544 - DNA, 30 bp, Artificial Sequence
  Synthetic oligonucleotide
cgtgtgagtgacatttcacatgtttagttc

SEQ ID NO: 175545 - DNA, 30 bp, Artificial Sequence
  Synthetic oligonucleotide
acgtcaaggatggaaccgacaggaacgttc

SEQ ID NO: 175546 - DNA, 30 bp, Artificial Sequence
  Synthetic oligonucleotide
cttgagtcagggctaagatacctgacgttc

SEQ ID NO: 175547 - DNA, 30 bp, Artificial Sequence
  Synthetic oligonucleotide
tcgccggtaacacccagatgtatgccgttc

SEQ ID NO: 175548 - DNA, 30 bp, Artificial Sequence
  Synthetic oligonucleotide
ggtactggtagtgtcatcgtcgccgcgttc

SEQ ID NO: 175549 - DNA, 30 bp, Artificial Sequence
  Synthetic oligonucleotide
cacatgtgaataaccaccggatgcgcgttc

SEQ ID NO: 175550 - DNA, 30 bp, Artificial Sequence
  Synthetic oligonucleotide
tggccaaaccgtgtgttgttcactgcgttc

SEQ ID NO: 175551 - DNA, 30 bp, Artificial Sequence
  Synthetic oligonucleotide
ggagagagtagacgacgtcgtcttgcgttc

SEQ ID NO: 175552 - DNA, 30 bp, Artificial Sequence
  Synthetic oligonucleotide
tcaaacgaggctcacgttaggcaatcgttc

SEQ ID NO: 175553 - DNA, 30 bp, Artificial Sequence
  Synthetic oligonucleotide
aaagcgtatgttctatcacgatataggttc

SEQ ID NO: 175554 - DNA, 30 bp, Artificial Sequence
  Synthetic oligonucleotide
cggggggggcggttaggcgcacggcggttc

SEQ ID NO: 175555 - DNA, 30 bp, Artificial Sequence
  Synthetic oligonucleotide
ggcgcgacgttcatgcgaagctgagggttc

SEQ ID NO: 175556 - DNA, 30 bp, Artificial Sequence
  Synthetic oligonucleotide
gggtggcaactatggtgatgtcccgggttc

SEQ ID NO: 175557 - DNA, 30 bp, Artificial Sequence
  Synthetic oligonucleotide
aggatacacctggcataaatttgatggttc

SEQ ID NO: 175558 - DNA, 30 bp, Artificial Sequence
  Synthetic oligonucleotide
caataccgcagtgattagttgttatggttc

SEQ ID NO: 175559 - DNA, 30 bp, Artificial Sequence
  Synthetic oligonucleotide
ggcaaaggtttcaagaccagctggtggttc

SEQ ID NO: 175560 - DNA, 30 bp, Artificial Sequence
  Synthetic oligonucleotide
cttactatgcggagttagagccaaatgttc

SEQ ID NO: 175561 - DNA, 30 bp, Artificial Sequence
  Synthetic oligonucleotide
agccaggcacggttagcgaggtaaatgttc

SEQ ID NO: 175562 - DNA, 30 bp, Artificial Sequence
  Synthetic oligonucleotide
ttagttgggagtcgcccggttccaatgttc

SEQ ID NO: 175563 - DNA, 30 bp, Artificial Sequence
  Synthetic oligonucleotide
ccgatctgtggtacgtgtatgtgaatgttc

SEQ ID NO: 175564 - DNA, 30 bp, Artificial Sequence
  Synthetic oligonucleotide
actatctcggacgccgggagctcgatgttc

SEQ ID NO: 175565 - DNA, 30 bp, Artificial Sequence
  Synthetic oligonucleotide
gctacaatggttacgagcggctatatgttc

SEQ ID NO: 175566 - DNA, 30 bp, Artificial Sequence
  Synthetic oligonucleotide
tgcgcagatgctaccagcaggcgtatgttc

SEQ ID NO: 175567 - DNA, 30 bp, Artificial Sequence
  Synthetic oligonucleotide
atcatgacttagtagtccctagaactgttc

SEQ ID NO: 175568 - DNA, 30 bp, Artificial Sequence
  Synthetic oligonucleotide
ccgggcggatagctggtcctggatctgttc

SEQ ID NO: 175569 - DNA, 30 bp, Artificial Sequence
  Synthetic oligonucleotide
aggcctcatcaatggcaaccgggagtgttc

SEQ ID NO: 175570 - DNA, 30 bp, Artificial Sequence
  Synthetic oligonucleotide
gcggcgctatcgaccagccgcaccttgttc

SEQ ID NO: 175571 - DNA, 30 bp, Artificial Sequence
  Synthetic oligonucleotide
taataaacaggttacgttgtatcgaatttc

SEQ ID NO: 175572 - DNA, 30 bp, Artificial Sequence
  Synthetic oligonucleotide
tcgcacattcggtgaaagacaagtcatttc

SEQ ID NO: 175573 - DNA, 30 bp, Artificial Sequence
  Synthetic oligonucleotide
acgagccacgtgatgacggcactcgatttc

SEQ ID NO: 175574 - DNA, 30 bp, Artificial Sequence
  Synthetic oligonucleotide
caataaagcaggccatcctgtggctatttc

SEQ ID NO: 175575 - DNA, 30 bp, Artificial Sequence
  Synthetic oligonucleotide
atgcgccatcggcccatctcaccttatttc

SEQ ID NO: 175576 - DNA, 30 bp, Artificial Sequence
  Synthetic oligonucleotide
acggagaccacttccgctcacagccctttc

SEQ ID NO: 175577 - DNA, 30 bp, Artificial Sequence
  Synthetic oligonucleotide
ttgaggatcattcggcgcgacctgcctttc

SEQ ID NO: 175578 - DNA, 30 bp, Artificial Sequence
  Synthetic oligonucleotide
agtgtacatgcgtaatttccgtgtcctttc

SEQ ID NO: 175579 - DNA, 30 bp, Artificial Sequence
  Synthetic oligonucleotide
ttgagatccgagtacttgcaatatgctttc

SEQ ID NO: 175580 - DNA, 30 bp, Artificial Sequence
  Synthetic oligonucleotide
agatactgtgccaggctacggagatctttc

SEQ ID NO: 175581 - DNA, 30 bp, Artificial Sequence
  Synthetic oligonucleotide
ttaaagaggacagtcgtcagagtatctttc

SEQ ID NO: 175582 - DNA, 30 bp, Artificial Sequence
  Synthetic oligonucleotide
tccaagataacctaaagagtgatcagtttc

SEQ ID NO: 175583 - DNA, 30 bp, Artificial Sequence
  Synthetic oligonucleotide
cgcgaataccgtgctgcgagaaggagtttc

SEQ ID NO: 175584 - DNA, 30 bp, Artificial Sequence
  Synthetic oligonucleotide
cagggtgaggtgagtaagaatttgagtttc

SEQ ID NO: 175585 - DNA, 30 bp, Artificial Sequence
  Synthetic oligonucleotide
ttaggatacgttaaggcgagtcgtagtttc

SEQ ID NO: 175586 - DNA, 30 bp, Artificial Sequence
  Synthetic oligonucleotide
cagggtaactgtatctcacaccaacgtttc

SEQ ID NO: 175587 - DNA, 30 bp, Artificial Sequence
  Synthetic oligonucleotide
tcaaagagacatataacattcattcgtttc

SEQ ID NO: 175588 - DNA, 30 bp, Artificial Sequence
  Synthetic oligonucleotide
cgtctttaatggtccgtgatccagggtttc

SEQ ID NO: 175589 - DNA, 30 bp, Artificial Sequence
  Synthetic oligonucleotide
gtcgaaggcttacggaatcagtatggtttc

SEQ ID NO: 175590 - DNA, 30 bp, Artificial Sequence
  Synthetic oligonucleotide
tcagtgggctgggcaaaatgacctggtttc

SEQ ID NO: 175591 - DNA, 30 bp, Artificial Sequence
  Synthetic oligonucleotide
agacgataggcgtcaacctgttgtggtttc

SEQ ID NO: 175592 - DNA, 30 bp, Artificial Sequence
  Synthetic oligonucleotide
gtagtagtctcccaatgagccaaatgtttc

SEQ ID NO: 175593 - DNA, 30 bp, Artificial Sequence
  Synthetic oligonucleotide
cggtagatgcggcctaacgattcatgtttc

SEQ ID NO: 175594 - DNA, 30 bp, Artificial Sequence
  Synthetic oligonucleotide
ccaatgtagcacgataactatcgatgtttc

SEQ ID NO: 175595 - DNA, 30 bp, Artificial Sequence
  Synthetic oligonucleotide
gatacgatgctcaaatcgagacgttgtttc

SEQ ID NO: 175596 - DNA, 30 bp, Artificial Sequence
  Synthetic oligonucleotide
agatctattctttcgtcgggtttacttttc

SEQ ID NO: 175597 - DNA, 30 bp, Artificial Sequence
  Synthetic oligonucleotide
aggcggtatctggtaatccaaaccgttttc

SEQ ID NO: 175598 - DNA, 30 bp, Artificial Sequence
  Synthetic oligonucleotide
gaatatacaggcacggtataacacaaaaag

SEQ ID NO: 175599 - DNA, 30 bp, Artificial Sequence
  Synthetic oligonucleotide
tcatcacgacatgtcggtactaggaaaaag

SEQ ID NO: 175600 - DNA, 30 bp, Artificial Sequence
  Synthetic oligonucleotide
tcccccagatattgtctgcaacggaaaaag

SEQ ID NO: 175601 - DNA, 30 bp, Artificial Sequence
  Synthetic oligonucleotide
ggttcgctattcagtccccattggaaaaag

SEQ ID NO: 175602 - DNA, 30 bp, Artificial Sequence
  Synthetic oligonucleotide
tcagcactctgtggatcaatggataaaaag

SEQ ID NO: 175603 - DNA, 30 bp, Artificial Sequence
  Synthetic oligonucleotide
gtagacgggccattgcagatttataaaaag

SEQ ID NO: 175604 - DNA, 30 bp, Artificial Sequence
  Synthetic oligonucleotide
gtctttcccgtagtgttgttcagtaaaaag

SEQ ID NO: 175605 - DNA, 30 bp, Artificial Sequence
  Synthetic oligonucleotide
tctaatatatgccccagggtcacacaaaag

SEQ ID NO: 175606 - DNA, 30 bp, Artificial Sequence
  Synthetic oligonucleotide
aactactgaagacgtaaaaaccgacaaaag

SEQ ID NO: 175607 - DNA, 30 bp, Artificial Sequence
  Synthetic oligonucleotide
agattgcttcgagcgcacccctaccaaaag

SEQ ID NO: 175608 - DNA, 30 bp, Artificial Sequence
  Synthetic oligonucleotide
agcgtaatcaaccatgtgggagcgcaaaag

SEQ ID NO: 175609 - DNA, 30 bp, Artificial Sequence
  Synthetic oligonucleotide
tcatgtgtccggcactcaccttcgcaaaag

SEQ ID NO: 175610 - DNA, 30 bp, Artificial Sequence
  Synthetic oligonucleotide
ctggtctgcgacagtcattgcgatcaaaag

SEQ ID NO: 175611 - DNA, 30 bp, Artificial Sequence
  Synthetic oligonucleotide
tgtacgccagcagcccacagcaaagaaaag

SEQ ID NO: 175612 - DNA, 30 bp, Artificial Sequence
  Synthetic oligonucleotide
gtgtccttattcggataacgataagaaaag

SEQ ID NO: 175613 - DNA, 30 bp, Artificial Sequence
  Synthetic oligonucleotide
taaaccgtatgtaggaacggaacagaaaag

SEQ ID NO: 175614 - DNA, 30 bp, Artificial Sequence
  Synthetic oligonucleotide
tttcaggttgcatgggcgaaaggagaaaag

SEQ ID NO: 175615 - DNA, 30 bp, Artificial Sequence
  Synthetic oligonucleotide
taggttcaaggattttccagactagaaaag

SEQ ID NO: 175616 - DNA, 30 bp, Artificial Sequence
  Synthetic oligonucleotide
gtctctgttggacgacagtctgtagaaaag

SEQ ID NO: 175617 - DNA, 30 bp, Artificial Sequence
  Synthetic oligonucleotide
ggcggttctgaatgggattcagaggaaaag

SEQ ID NO: 175618 - DNA, 30 bp, Artificial Sequence
  Synthetic oligonucleotide
ttgcacacgggtagaaccgcgggggaaaag

SEQ ID NO: 175619 - DNA, 30 bp, Artificial Sequence
  Synthetic oligonucleotide
cgcgggggagggggaatgatgtgggaaaag

SEQ ID NO: 175620 - DNA, 30 bp, Artificial Sequence
  Synthetic oligonucleotide
gtgtgttgagtaggaacaagcttggaaaag

SEQ ID NO: 175621 - DNA, 30 bp, Artificial Sequence
  Synthetic oligonucleotide
aagagtggatttacctgttaaggtgaaaag

SEQ ID NO: 175622 - DNA, 30 bp, Artificial Sequence
  Synthetic oligonucleotide
acctcagcactggaaaactaatttgaaaag

SEQ ID NO: 175623 - DNA, 30 bp, Artificial Sequence
  Synthetic oligonucleotide
cctcgatgctttgaggatggacaataaaag

SEQ ID NO: 175624 - DNA, 30 bp, Artificial Sequence
  Synthetic oligonucleotide
caatttacgtgagtagactgagaataaaag

SEQ ID NO: 175625 - DNA, 30 bp, Artificial Sequence
  Synthetic oligonucleotide
aaggaaattcataacacgcacggataaaag

SEQ ID NO: 175626 - DNA, 30 bp, Artificial Sequence
  Synthetic oligonucleotide
tagcggtagggtgcggagaaagcctaaaag

SEQ ID NO: 175627 - DNA, 30 bp, Artificial Sequence
  Synthetic oligonucleotide
ggctcctggctggagtttcaggcgtaaaag

SEQ ID NO: 175628 - DNA, 30 bp, Artificial Sequence
  Synthetic oligonucleotide
agttcgcactcggttagcaaatcgtaaaag

SEQ ID NO: 175629 - DNA, 30 bp, Artificial Sequence
  Synthetic oligonucleotide
aagcgggtactcacagtgaccaggtaaaag

SEQ ID NO: 175630 - DNA, 30 bp, Artificial Sequence
  Synthetic oligonucleotide
cgatgtagctcaaagaatcgggggtaaaag

SEQ ID NO: 175631 - DNA, 30 bp, Artificial Sequence
  Synthetic oligonucleotide
atctataccgcattaaacttgatgtaaaag

SEQ ID NO: 175632 - DNA, 30 bp, Artificial Sequence
  Synthetic oligonucleotide
aggttcaaaaagtcaattcgtcattaaaag

SEQ ID NO: 175633 - DNA, 30 bp, Artificial Sequence
  Synthetic oligonucleotide
cactacaagatatagagtgtatgttaaaag

SEQ ID NO: 175634 - DNA, 30 bp, Artificial Sequence
  Synthetic oligonucleotide
atcgtaacctcatctacttttggcacaaag

SEQ ID NO: 175635 - DNA, 30 bp, Artificial Sequence
  Synthetic oligonucleotide
tgccgggcaaaaaggcgatcgcggacaaag

SEQ ID NO: 175636 - DNA, 30 bp, Artificial Sequence
  Synthetic oligonucleotide
caggaagctgccacggcacgaagtacaaag

SEQ ID NO: 175637 - DNA, 30 bp, Artificial Sequence
  Synthetic oligonucleotide
tgattgtgattatctaaatgaagtacaaag

SEQ ID NO: 175638 - DNA, 30 bp, Artificial Sequence
  Synthetic oligonucleotide
tggtgagacctgtcctgtgaagttacaaag

SEQ ID NO: 175639 - DNA, 30 bp, Artificial Sequence
  Synthetic oligonucleotide
agtattcatcggtcaagaatataaccaaag

SEQ ID NO: 175640 - DNA, 30 bp, Artificial Sequence
  Synthetic oligonucleotide
ttataaatcgcgaaactcctaacgccaaag

SEQ ID NO: 175641 - DNA, 30 bp, Artificial Sequence
  Synthetic oligonucleotide
cagctactcccctgtgggacgtatccaaag

SEQ ID NO: 175642 - DNA, 30 bp, Artificial Sequence
  Synthetic oligonucleotide
agtaaccccggtagagtaagccacgcaaag

SEQ ID NO: 175643 - DNA, 30 bp, Artificial Sequence
  Synthetic oligonucleotide
tctaaacggctcgcgtggtcctttgcaaag

SEQ ID NO: 175644 - DNA, 30 bp, Artificial Sequence
  Synthetic oligonucleotide
gacggtcttatctgagccgtttgatcaaag

SEQ ID NO: 175645 - DNA, 30 bp, Artificial Sequence
  Synthetic oligonucleotide
gagcatgataaatgctagccatagtcaaag

SEQ ID NO: 175646 - DNA, 30 bp, Artificial Sequence
  Synthetic oligonucleotide
acgaggacgcaactcaagctctcgtcaaag

SEQ ID NO: 175647 - DNA, 30 bp, Artificial Sequence
  Synthetic oligonucleotide
gaaaacacgtaccgccgccacccttcaaag

SEQ ID NO: 175648 - DNA, 30 bp, Artificial Sequence
  Synthetic oligonucleotide
catatcaggtaaactcgatattaaagaaag

SEQ ID NO: 175649 - DNA, 30 bp, Artificial Sequence
  Synthetic oligonucleotide
tctccgtaccgttgaacatggcgccgaaag

SEQ ID NO: 175650 - DNA, 30 bp, Artificial Sequence
  Synthetic oligonucleotide
gtagctggctactggctggcagcaggaaag

SEQ ID NO: 175651 - DNA, 30 bp, Artificial Sequence
  Synthetic oligonucleotide
gccgagcggactcgttctttccagggaaag

SEQ ID NO: 175652 - DNA, 30 bp, Artificial Sequence
  Synthetic oligonucleotide
attataacgcggtcaggtatggcgggaaag

SEQ ID NO: 175653 - DNA, 30 bp, Artificial Sequence
  Synthetic oligonucleotide
gggagaggcttctggacacttactggaaag

SEQ ID NO: 175654 - DNA, 30 bp, Artificial Sequence
  Synthetic oligonucleotide
cggcacttaaaggcgaggaaaggtggaaag

SEQ ID NO: 175655 - DNA, 30 bp, Artificial Sequence
  Synthetic oligonucleotide
tgacgatctgctcatacatataaatgaaag

SEQ ID NO: 175656 - DNA, 30 bp, Artificial Sequence
  Synthetic oligonucleotide
ccaggaacaccgataggttgattatgaaag

SEQ ID NO: 175657 - DNA, 30 bp, Artificial Sequence
  Synthetic oligonucleotide
ggggatgggcgacgcttcttcaactgaaag

SEQ ID NO: 175658 - DNA, 30 bp, Artificial Sequence
  Synthetic oligonucleotide
ttggcaatgacagccttcctgcactgaaag

SEQ ID NO: 175659 - DNA, 30 bp, Artificial Sequence
  Synthetic oligonucleotide
agcgcaattgagatcagagtgacctgaaag

SEQ ID NO: 175660 - DNA, 30 bp, Artificial Sequence
  Synthetic oligonucleotide
taagactcacagttatatgatcagtgaaag

SEQ ID NO: 175661 - DNA, 30 bp, Artificial Sequence
  Synthetic oligonucleotide
ggtttcatatgggcgacgaacctgtgaaag

SEQ ID NO: 175662 - DNA, 30 bp, Artificial Sequence
  Synthetic oligonucleotide
agacttttagaagaacaacttaattgaaag

SEQ ID NO: 175663 - DNA, 30 bp, Artificial Sequence
  Synthetic oligonucleotide
ttgatactgatctggggattactttgaaag

SEQ ID NO: 175664 - DNA, 30 bp, Artificial Sequence
  Synthetic oligonucleotide
atgttatctagatagtctggtacgataaag

SEQ ID NO: 175665 - DNA, 30 bp, Artificial Sequence
  Synthetic oligonucleotide
tggttaacggcggataaacattcgataaag

SEQ ID NO: 175666 - DNA, 30 bp, Artificial Sequence
  Synthetic oligonucleotide
gtagagttttcaaaagagcgatggataaag

SEQ ID NO: 175667 - DNA, 30 bp, Artificial Sequence
  Synthetic oligonucleotide
atttacagggaaacctagactgtgataaag

SEQ ID NO: 175668 - DNA, 30 bp, Artificial Sequence
  Synthetic oligonucleotide
gacatacatctatggcacttcgatataaag

SEQ ID NO: 175669 - DNA, 30 bp, Artificial Sequence
  Synthetic oligonucleotide
ttgcaacagactacgtatcgccctataaag

SEQ ID NO: 175670 - DNA, 30 bp, Artificial Sequence
  Synthetic oligonucleotide
catcaccgggccttgtttttgaacctaaag

SEQ ID NO: 175671 - DNA, 30 bp, Artificial Sequence
  Synthetic oligonucleotide
gcgtcagttcgcctccttaagtacctaaag

SEQ ID NO: 175672 - DNA, 30 bp, Artificial Sequence
  Synthetic oligonucleotide
aataatactgggtacaccgcggtcctaaag

SEQ ID NO: 175673 - DNA, 30 bp, Artificial Sequence
  Synthetic oligonucleotide
ctactgaggcacgaggtaactcttctaaag

SEQ ID NO: 175674 - DNA, 30 bp, Artificial Sequence
  Synthetic oligonucleotide
ctaataacgagcggcgttaagcgagtaaag

SEQ ID NO: 175675 - DNA, 30 bp, Artificial Sequence
  Synthetic oligonucleotide
cacaccaagcagtgaccaatatgagtaaag

SEQ ID NO: 175676 - DNA, 30 bp, Artificial Sequence
  Synthetic oligonucleotide
aggttgtctatagtgtacgaatccgtaaag

SEQ ID NO: 175677 - DNA, 30 bp, Artificial Sequence
  Synthetic oligonucleotide
gaactccctgcaagtttcgtgaaggtaaag

SEQ ID NO: 175678 - DNA, 30 bp, Artificial Sequence
  Synthetic oligonucleotide
agaaaatgggttacgactcagacattaaag

SEQ ID NO: 175679 - DNA, 30 bp, Artificial Sequence
  Synthetic oligonucleotide
atcgatttttaagccgttatttgattaaag

SEQ ID NO: 175680 - DNA, 30 bp, Artificial Sequence
  Synthetic oligonucleotide
gggggtgttttttattcaacggacttaaag

SEQ ID NO: 175681 - DNA, 30 bp, Artificial Sequence
  Synthetic oligonucleotide
caaccatgtgggccaccctggtcgttaaag

SEQ ID NO: 175682 - DNA, 30 bp, Artificial Sequence
  Synthetic oligonucleotide
atctgaaaatattaccccccttaacacaag

SEQ ID NO: 175683 - DNA, 30 bp, Artificial Sequence
  Synthetic oligonucleotide
tacaaggggggctgaataactgagcacaag

SEQ ID NO: 175684 - DNA, 30 bp, Artificial Sequence
  Synthetic oligonucleotide
gtgccctaagtgcgcgccttagatcacaag

SEQ ID NO: 175685 - DNA, 30 bp, Artificial Sequence
  Synthetic oligonucleotide
gaacatgtaacaccgctttctcgggacaag

SEQ ID NO: 175686 - DNA, 30 bp, Artificial Sequence
  Synthetic oligonucleotide
gaggaagactagaacactgtggtctacaag

SEQ ID NO: 175687 - DNA, 30 bp, Artificial Sequence
  Synthetic oligonucleotide
gagctaattcacttaagtcgtgagtacaag

SEQ ID NO: 175688 - DNA, 30 bp, Artificial Sequence
  Synthetic oligonucleotide
tcaagcgaccaatacagataactgtacaag

SEQ ID NO: 175689 - DNA, 31 bp, Artificial Sequence
  Synthetic oligonucleotide
gaaaaatgcaaccgaagggtgtttgtacaag

SEQ ID NO: 175690 - DNA, 30 bp, Artificial Sequence
  Synthetic oligonucleotide
ctggggtgagctatacatggctccaccaag

SEQ ID NO: 175691 - DNA, 30 bp, Artificial Sequence
  Synthetic oligonucleotide
gtatacctcctagtggtgctagcacccaag

SEQ ID NO: 175692 - DNA, 30 bp, Artificial Sequence
  Synthetic oligonucleotide
ctatgaaagtatatggtagacctacccaag

SEQ ID NO: 175693 - DNA, 30 bp, Artificial Sequence
  Synthetic oligonucleotide
ggacggaaaaacatcggtcgggaccccaag

SEQ ID NO: 175694 - DNA, 30 bp, Artificial Sequence
  Synthetic oligonucleotide
gactacctgctaaactctcagtgtcccaag

SEQ ID NO: 175695 - DNA, 30 bp, Artificial Sequence
  Synthetic oligonucleotide
tgaagaaatacatgttatgcatcagccaag

SEQ ID NO: 175696 - DNA, 30 bp, Artificial Sequence
  Synthetic oligonucleotide
cgcgggacacagcgaagtcaactagccaag

SEQ ID NO: 175697 - DNA, 30 bp, Artificial Sequence
  Synthetic oligonucleotide
tcacaaaatggtgctctctttcatgccaag

SEQ ID NO: 175698 - DNA, 30 bp, Artificial Sequence
  Synthetic oligonucleotide
caaaacgtgaaccagtaactgtttgccaag

SEQ ID NO: 175699 - DNA, 30 bp, Artificial Sequence
  Synthetic oligonucleotide
ccggaaaatccctgttcagggatatccaag

SEQ ID NO: 175700 - DNA, 30 bp, Artificial Sequence
  Synthetic oligonucleotide
gtgtgctttatggagagataaatgtccaag

SEQ ID NO: 175701 - DNA, 30 bp, Artificial Sequence
  Synthetic oligonucleotide
actctccgaagactgtgaggagggagcaag

SEQ ID NO: 175702 - DNA, 30 bp, Artificial Sequence
  Synthetic oligonucleotide
aattcaggtgtgtgtcgctactggagcaag

SEQ ID NO: 175703 - DNA, 30 bp, Artificial Sequence
  Synthetic oligonucleotide
gggcattgctgaaagtctctcttgagcaag

SEQ ID NO: 175704 - DNA, 30 bp, Artificial Sequence
  Synthetic oligonucleotide
agatgtcacgaacaactgggaagtagcaag

SEQ ID NO: 175705 - DNA, 30 bp, Artificial Sequence
  Synthetic oligonucleotide
gactgtgctggagtaactagaattcgcaag

SEQ ID NO: 175706 - DNA, 30 bp, Artificial Sequence
  Synthetic oligonucleotide
tcgtagtactacaacgtcttcttaggcaag

SEQ ID NO: 175707 - DNA, 30 bp, Artificial Sequence
  Synthetic oligonucleotide
atcggcgaacgccgtatagactcgggcaag

SEQ ID NO: 175708 - DNA, 30 bp, Artificial Sequence
  Synthetic oligonucleotide
taagaagtgtatcaggacggatctggcaag

SEQ ID NO: 175709 - DNA, 30 bp, Artificial Sequence
  Synthetic oligonucleotide
actcggcgccaaatccaatagcaatgcaag

SEQ ID NO: 175710 - DNA, 30 bp, Artificial Sequence
  Synthetic oligonucleotide
gtagatacaacttactcgactacatgcaag

SEQ ID NO: 175711 - DNA, 30 bp, Artificial Sequence
  Synthetic oligonucleotide
gcaaatccaagaactataaaggcttgcaag

SEQ ID NO: 175712 - DNA, 31 bp, Artificial Sequence
  Synthetic oligonucleotide
gttagacgccggccgagcgggggtttgcaag

SEQ ID NO: 175713 - DNA, 30 bp, Artificial Sequence
  Synthetic oligonucleotide
ggcaatatatgtttggagaacataatcaag

SEQ ID NO: 175714 - DNA, 30 bp, Artificial Sequence
  Synthetic oligonucleotide
gcagtgtcggccagaaagacggttatcaag

SEQ ID NO: 175715 - DNA, 30 bp, Artificial Sequence
  Synthetic oligonucleotide
caactaacataagccatgttacgcctcaag

SEQ ID NO: 175716 - DNA, 30 bp, Artificial Sequence
  Synthetic oligonucleotide
gttccaaatagcgttcaatcacggctcaag

SEQ ID NO: 175717 - DNA, 30 bp, Artificial Sequence
  Synthetic oligonucleotide
ttgatctacccgtatgggcctggtctcaag

SEQ ID NO: 175718 - DNA, 30 bp, Artificial Sequence
  Synthetic oligonucleotide
tcatgaggttaagccgatttgcgagtcaag

SEQ ID NO: 175719 - DNA, 30 bp, Artificial Sequence
  Synthetic oligonucleotide
cttcaaatggatacagtacgcctagtcaag

SEQ ID NO: 175720 - DNA, 30 bp, Artificial Sequence
  Synthetic oligonucleotide
ctgggatggcggtttgatatcagcgtcaag

SEQ ID NO: 175721 - DNA, 30 bp, Artificial Sequence
  Synthetic oligonucleotide
gttgggccagtgcgcaaacccatcgtcaag

SEQ ID NO: 175722 - DNA, 30 bp, Artificial Sequence
  Synthetic oligonucleotide
aggaagaaggtaacgatgcagttcgtcaag

SEQ ID NO: 175723 - DNA, 30 bp, Artificial Sequence
  Synthetic oligonucleotide
gcgaggggatattttgttggctctgtcaag

SEQ ID NO: 175724 - DNA, 30 bp, Artificial Sequence
  Synthetic oligonucleotide
tatgggactcggttgacggaattattcaag

SEQ ID NO: 175725 - DNA, 30 bp, Artificial Sequence
  Synthetic oligonucleotide
ggagatcttcagatccgcaggggaaagaag

SEQ ID NO: 175726 - DNA, 30 bp, Artificial Sequence
  Synthetic oligonucleotide
aaagcacccaccgacattagcgcacagaag

SEQ ID NO: 175727 - DNA, 30 bp, Artificial Sequence
  Synthetic oligonucleotide
tgataggacggggagtgaagatcacagaag

SEQ ID NO: 175728 - DNA, 30 bp, Artificial Sequence
  Synthetic oligonucleotide
tcatggattcggttcgggccattacagaag

SEQ ID NO: 175729 - DNA, 30 bp, Artificial Sequence
  Synthetic oligonucleotide
cagccggcataatggaatgctcaccagaag

SEQ ID NO: 175730 - DNA, 30 bp, Artificial Sequence
  Synthetic oligonucleotide
gttatattaagaccaggatctaagcagaag

SEQ ID NO: 175731 - DNA, 30 bp, Artificial Sequence
  Synthetic oligonucleotide
gggtgcttcaagagcgggatacggcagaag

SEQ ID NO: 175732 - DNA, 30 bp, Artificial Sequence
  Synthetic oligonucleotide
gcctcaggtgaggggacaactacggagaag

SEQ ID NO: 175733 - DNA, 30 bp, Artificial Sequence
  Synthetic oligonucleotide
taggtctcttccactagcatgcgatagaag

SEQ ID NO: 175734 - DNA, 30 bp, Artificial Sequence
  Synthetic oligonucleotide
atgtacccagcagaacgaccaacgtagaag

SEQ ID NO: 175735 - DNA, 30 bp, Artificial Sequence
  Synthetic oligonucleotide
aaaagagtactatagtttggaaggtagaag

SEQ ID NO: 175736 - DNA, 30 bp, Artificial Sequence
  Synthetic oligonucleotide
cactatcgacggtgggcttagcgttagaag

SEQ ID NO: 175737 - DNA, 30 bp, Artificial Sequence
  Synthetic oligonucleotide
agttcacttggttgatcactgctttagaag

SEQ ID NO: 175738 - DNA, 30 bp, Artificial Sequence
  Synthetic oligonucleotide
ttgcaggattatggattgcgcaaaacgaag

SEQ ID NO: 175739 - DNA, 30 bp, Artificial Sequence
  Synthetic oligonucleotide
taatacagacactccggaggggagacgaag

SEQ ID NO: 175740 - DNA, 30 bp, Artificial Sequence
  Synthetic oligonucleotide
gtcgaaattcgcactctctggggcccgaag

SEQ ID NO: 175741 - DNA, 30 bp, Artificial Sequence
  Synthetic oligonucleotide
gcacggcatcgtacggcgttggggccgaag

SEQ ID NO: 175742 - DNA, 30 bp, Artificial Sequence
  Synthetic oligonucleotide
tgaactgcccgatttcattaaatagcgaag

SEQ ID NO: 175743 - DNA, 30 bp, Artificial Sequence
  Synthetic oligonucleotide
cctgaattccgataccccccatacgcgaag

SEQ ID NO: 175744 - DNA, 30 bp, Artificial Sequence
  Synthetic oligonucleotide
gagcactgtccaaggcgacccgccgcgaag

SEQ ID NO: 175745 - DNA, 30 bp, Artificial Sequence
  Synthetic oligonucleotide
ttggacgtcgattgccgaggcaatgcgaag

SEQ ID NO: 175746 - DNA, 30 bp, Artificial Sequence
  Synthetic oligonucleotide
cgctgtgaaggccccagcgcgaactcgaag

SEQ ID NO: 175747 - DNA, 30 bp, Artificial Sequence
  Synthetic oligonucleotide
agacaagttgtggttcgacctgcttcgaag

SEQ ID NO: 175748 - DNA, 30 bp, Artificial Sequence
  Synthetic oligonucleotide
ggtatacaaataaactcttcaggttcgaag

SEQ ID NO: 175749 - DNA, 30 bp, Artificial Sequence
  Synthetic oligonucleotide
agacctcgactgattctagcatgttcgaag

SEQ ID NO: 175750 - DNA, 30 bp, Artificial Sequence
  Synthetic oligonucleotide
gggagcgtggtctagcagcaacaaaggaag

SEQ ID NO: 175751 - DNA, 30 bp, Artificial Sequence
  Synthetic oligonucleotide
gagagggtgccggtatctgtatcaaggaag

SEQ ID NO: 175752 - DNA, 30 bp, Artificial Sequence
  Synthetic oligonucleotide
aggttgaatacatatggcaattacaggaag

SEQ ID NO: 175753 - DNA, 30 bp, Artificial Sequence
  Synthetic oligonucleotide
ccgattatttgaggatctttatagaggaag

SEQ ID NO: 175754 - DNA, 30 bp, Artificial Sequence
  Synthetic oligonucleotide
cgtaactcgggcaaacagcccacgaggaag

SEQ ID NO: 175755 - DNA, 30 bp, Artificial Sequence
  Synthetic oligonucleotide
aacatatgctaagggttgcactctaggaag

SEQ ID NO: 175756 - DNA, 30 bp, Artificial Sequence
  Synthetic oligonucleotide
tgtggagtccatcgttttggttctcggaag

SEQ ID NO: 175757 - DNA, 30 bp, Artificial Sequence
  Synthetic oligonucleotide
acatcggatgacgccatgagaaccgggaag

SEQ ID NO: 175758 - DNA, 30 bp, Artificial Sequence
  Synthetic oligonucleotide
ataagacaattaggtcccacccccgggaag

SEQ ID NO: 175759 - DNA, 30 bp, Artificial Sequence
  Synthetic oligonucleotide
agactacgcgatgaggtttagtgcgggaag

SEQ ID NO: 175760 - DNA, 30 bp, Artificial Sequence
  Synthetic oligonucleotide
ctgtacatccttgcttagtacatcgggaag

SEQ ID NO: 175761 - DNA, 30 bp, Artificial Sequence
  Synthetic oligonucleotide
aggcgttgctgcaaggagtcgatcgggaag

SEQ ID NO: 175762 - DNA, 30 bp, Artificial Sequence
  Synthetic oligonucleotide
cgcgcagttaactagtactcacctgggaag

SEQ ID NO: 175763 - DNA, 30 bp, Artificial Sequence
  Synthetic oligonucleotide
tcggtacttgtaagaagaaccgaatggaag

SEQ ID NO: 175764 - DNA, 30 bp, Artificial Sequence
  Synthetic oligonucleotide
ttggattcttactagagagctcgatggaag

SEQ ID NO: 175765 - DNA, 30 bp, Artificial Sequence
  Synthetic oligonucleotide
ttactgtactcagagacagttggctggaag

SEQ ID NO: 175766 - DNA, 30 bp, Artificial Sequence
  Synthetic oligonucleotide
actcctccagagtatcaacaaatctggaag

SEQ ID NO: 175767 - DNA, 30 bp, Artificial Sequence
  Synthetic oligonucleotide
gccgtcccacaactctagggtgtctggaag

SEQ ID NO: 175768 - DNA, 30 bp, Artificial Sequence
  Synthetic oligonucleotide
cctacatatcggaccaaagagttctggaag

SEQ ID NO: 175769 - DNA, 30 bp, Artificial Sequence
  Synthetic oligonucleotide
tgggcgacatcacttaggatgtcgtggaag

SEQ ID NO: 175770 - DNA, 30 bp, Artificial Sequence
  Synthetic oligonucleotide
cgatctggataggacatgatgggttggaag

SEQ ID NO: 175771 - DNA, 30 bp, Artificial Sequence
  Synthetic oligonucleotide
gctggactgtttttgactgcgttaatgaag

SEQ ID NO: 175772 - DNA, 30 bp, Artificial Sequence
  Synthetic oligonucleotide
atgctcggtactgagagcaatttcatgaag

SEQ ID NO: 175773 - DNA, 29 bp, Artificial Sequence
  Synthetic oligonucleotide
gacaagacgacatcgtagcaaatatgaag

SEQ ID NO: 175774 - DNA, 30 bp, Artificial Sequence
  Synthetic oligonucleotide
aagtcggaaagattgaagtttaacctgaag

SEQ ID NO: 175775 - DNA, 30 bp, Artificial Sequence
  Synthetic oligonucleotide
ccgtcattgaatctctcactcgcagtgaag

SEQ ID NO: 175776 - DNA, 30 bp, Artificial Sequence
  Synthetic oligonucleotide
gtagaggatgaaaagcgtgacaccgtgaag

SEQ ID NO: 175777 - DNA, 30 bp, Artificial Sequence
  Synthetic oligonucleotide
tgacggttatccgtcttcacttccgtgaag

SEQ ID NO: 175778 - DNA, 30 bp, Artificial Sequence
  Synthetic oligonucleotide
taatgagctatgttcaggcggcaggtgaag

SEQ ID NO: 175779 - DNA, 30 bp, Artificial Sequence
  Synthetic oligonucleotide
gtaattggccatgctggatccatggtgaag

SEQ ID NO: 175780 - DNA, 30 bp, Artificial Sequence
  Synthetic oligonucleotide
acagatatgggcctcgtcatcgctgtgaag

SEQ ID NO: 175781 - DNA, 30 bp, Artificial Sequence
  Synthetic oligonucleotide
cgctataaagggttggcctcagcattgaag

SEQ ID NO: 175782 - DNA, 31 bp, Artificial Sequence
  Synthetic oligonucleotide
acgtcaaatatcgaatatgaattcattgaag

SEQ ID NO: 175783 - DNA, 30 bp, Artificial Sequence
  Synthetic oligonucleotide
tattgggagggaggtgatgctgtattgaag

SEQ ID NO: 175784 - DNA, 30 bp, Artificial Sequence
  Synthetic oligonucleotide
tcgaatgattttcgaagtagatgcttgaag

SEQ ID NO: 175785 - DNA, 30 bp, Artificial Sequence
  Synthetic oligonucleotide
gacagatcatgagaggcaattatcttgaag

SEQ ID NO: 175786 - DNA, 30 bp, Artificial Sequence
  Synthetic oligonucleotide
gatatatggtgacaccaacaacggttgaag

SEQ ID NO: 175787 - DNA, 30 bp, Artificial Sequence
  Synthetic oligonucleotide
cacacatgagctcccggtaaaaatttgaag

SEQ ID NO: 175788 - DNA, 30 bp, Artificial Sequence
  Synthetic oligonucleotide
accacagaatcgtctaatggagttttgaag

SEQ ID NO: 175789 - DNA, 30 bp, Artificial Sequence
  Synthetic oligonucleotide
ttaaggcagttcgcaatcagcgtaaataag

SEQ ID NO: 175790 - DNA, 30 bp, Artificial Sequence
  Synthetic oligonucleotide
caagtgtggaaaaggcagcagttaaataag

SEQ ID NO: 175791 - DNA, 30 bp, Artificial Sequence
  Synthetic oligonucleotide
tcttgtccgcacttccaaggcaccaataag

SEQ ID NO: 175792 - DNA, 30 bp, Artificial Sequence
  Synthetic oligonucleotide
acgacttcgggagtctaatgtccgaataag

SEQ ID NO: 175793 - DNA, 30 bp, Artificial Sequence
  Synthetic oligonucleotide
gggctatccgcggacagtgcccggaataag

SEQ ID NO: 175794 - DNA, 30 bp, Artificial Sequence
  Synthetic oligonucleotide
tagctaaggcttggcatccgtgggaataag

SEQ ID NO: 175795 - DNA, 30 bp, Artificial Sequence
  Synthetic oligonucleotide
acatcgaccacgaggattcattggaataag

SEQ ID NO: 175796 - DNA, 30 bp, Artificial Sequence
  Synthetic oligonucleotide
atacgagatgtgcagtgcgcactgaataag

SEQ ID NO: 175797 - DNA, 30 bp, Artificial Sequence
  Synthetic oligonucleotide
gaagacgatatgacccagagaaataataag

SEQ ID NO: 175798 - DNA, 30 bp, Artificial Sequence
  Synthetic oligonucleotide
aaaaaaggtcagacgtggtgtcgtaataag

SEQ ID NO: 175799 - DNA, 30 bp, Artificial Sequence
  Synthetic oligonucleotide
acaagcctggcgccggcctgcattaataag

SEQ ID NO: 175800 - DNA, 30 bp, Artificial Sequence
  Synthetic oligonucleotide
atagtcctcagctacctagggttacataag

SEQ ID NO: 175801 - DNA, 30 bp, Artificial Sequence
  Synthetic oligonucleotide
atggctgtggatcgcggagcaaggcataag

SEQ ID NO: 175802 - DNA, 30 bp, Artificial Sequence
  Synthetic oligonucleotide
ggtaactgcgggtgcagtagcaatcataag

SEQ ID NO: 175803 - DNA, 30 bp, Artificial Sequence
  Synthetic oligonucleotide
tatacgtaaagaggaattggttacgataag

SEQ ID NO: 175804 - DNA, 30 bp, Artificial Sequence
  Synthetic oligonucleotide
cagtggtgatcaatggtgacacccgataag

SEQ ID NO: 175805 - DNA, 30 bp, Artificial Sequence
  Synthetic oligonucleotide
ctcgtcgcatccaatgcacgtaaggataag

SEQ ID NO: 175806 - DNA, 30 bp, Artificial Sequence
  Synthetic oligonucleotide
agtataccattaattcataaagaggataag

SEQ ID NO: 175807 - DNA, 30 bp, Artificial Sequence
  Synthetic oligonucleotide
taataactctttgcgcaagatgtggataag

SEQ ID NO: 175808 - DNA, 30 bp, Artificial Sequence
  Synthetic oligonucleotide
cctgctgtagaattggagcgtttggataag

SEQ ID NO: 175809 - DNA, 30 bp, Artificial Sequence
  Synthetic oligonucleotide
ctagcctaagggaaatcgctttatgataag

SEQ ID NO: 175810 - DNA, 30 bp, Artificial Sequence
  Synthetic oligonucleotide
atcaaatctcgcgtacattcgcttgataag

SEQ ID NO: 175811 - DNA, 30 bp, Artificial Sequence
  Synthetic oligonucleotide
aggtgtatccggcagcagccaccatataag

SEQ ID NO: 175812 - DNA, 30 bp, Artificial Sequence
  Synthetic oligonucleotide
acctaggcaacgtgttacgccaactataag

SEQ ID NO: 175813 - DNA, 30 bp, Artificial Sequence
  Synthetic oligonucleotide
ctggacatagtagcacaacatacctataag

SEQ ID NO: 175814 - DNA, 30 bp, Artificial Sequence
  Synthetic oligonucleotide
cgaattaaggaatcatgatttaagtataag

SEQ ID NO: 175815 - DNA, 30 bp, Artificial Sequence
  Synthetic oligonucleotide
gaccactattgacgggcgcgggggtataag

SEQ ID NO: 175816 - DNA, 30 bp, Artificial Sequence
  Synthetic oligonucleotide
atctataacgctccaatttcatgaactaag

SEQ ID NO: 175817 - DNA, 30 bp, Artificial Sequence
  Synthetic oligonucleotide
agtgtatgactcaggacccgctgaactaag

SEQ ID NO: 175818 - DNA, 30 bp, Artificial Sequence
  Synthetic oligonucleotide
aagatggacctgtttggagacacgactaag

SEQ ID NO: 175819 - DNA, 30 bp, Artificial Sequence
  Synthetic oligonucleotide
cacataagcattttcgcgtaattgactaag

SEQ ID NO: 175820 - DNA, 30 bp, Artificial Sequence
  Synthetic oligonucleotide
agtagcagaactgttacagggaaacctaag

SEQ ID NO: 175821 - DNA, 30 bp, Artificial Sequence
  Synthetic oligonucleotide
agatgagtggtgcccgtgtggacacctaag

SEQ ID NO: 175822 - DNA, 30 bp, Artificial Sequence
  Synthetic oligonucleotide
tcttacatcactaaccagttggcacctaag

SEQ ID NO: 175823 - DNA, 27 bp, Artificial Sequence
  Synthetic oligonucleotide
cgtatagcctgggattagatacctaag

SEQ ID NO: 175824 - DNA, 30 bp, Artificial Sequence
  Synthetic oligonucleotide
cctggatacgtgagaaggcgagctcctaag

SEQ ID NO: 175825 - DNA, 30 bp, Artificial Sequence
  Synthetic oligonucleotide
ggggtacagagggtggaacgaatagctaag

SEQ ID NO: 175826 - DNA, 30 bp, Artificial Sequence
  Synthetic oligonucleotide
cggaatctctgccccctaagacaggctaag

SEQ ID NO: 175827 - DNA, 30 bp, Artificial Sequence
  Synthetic oligonucleotide
taatgactatacaaccgttcggaggctaag

SEQ ID NO: 175828 - DNA, 30 bp, Artificial Sequence
  Synthetic oligonucleotide
gggagctgtcgtcgttaacgaccggctaag

SEQ ID NO: 175829 - DNA, 30 bp, Artificial Sequence
  Synthetic oligonucleotide
aggaaatcttgtgcatctcccctggctaag

SEQ ID NO: 175830 - DNA, 30 bp, Artificial Sequence
  Synthetic oligonucleotide
ctcgcaggactattcatcgagaaatctaag

SEQ ID NO: 175831 - DNA, 30 bp, Artificial Sequence
  Synthetic oligonucleotide
ataaaaccacatagagacgtgtaatctaag

SEQ ID NO: 175832 - DNA, 30 bp, Artificial Sequence
  Synthetic oligonucleotide
tatccactccgatacgtacggacatctaag

SEQ ID NO: 175833 - DNA, 30 bp, Artificial Sequence
  Synthetic oligonucleotide
gtaaggggcaagaatcaagtatcatctaag

SEQ ID NO: 175834 - DNA, 30 bp, Artificial Sequence
  Synthetic oligonucleotide
gcttcacccagccgggtttgagcctctaag

SEQ ID NO: 175835 - DNA, 30 bp, Artificial Sequence
  Synthetic oligonucleotide
ttaggggcggagttcgcacggcgaagtaag

SEQ ID NO: 175836 - DNA, 30 bp, Artificial Sequence
  Synthetic oligonucleotide
aggttccggtaaaaagtccaacacagtaag

SEQ ID NO: 175837 - DNA, 29 bp, Artificial Sequence
  Synthetic oligonucleotide
gtgtagctctagtaggcgaggccagtaag

SEQ ID NO: 175838 - DNA, 30 bp, Artificial Sequence
  Synthetic oligonucleotide
gttactgatcatggagcgatctcgagtaag

SEQ ID NO: 175839 - DNA, 30 bp, Artificial Sequence
  Synthetic oligonucleotide
gctaaatcgaacgcttccttccggagtaag

SEQ ID NO: 175840 - DNA, 30 bp, Artificial Sequence
  Synthetic oligonucleotide
tgcatgaaccgagcaccaacagtgagtaag

SEQ ID NO: 175841 - DNA, 30 bp, Artificial Sequence
  Synthetic oligonucleotide
aattgagtaaactctaacagtacacgtaag

SEQ ID NO: 175842 - DNA, 30 bp, Artificial Sequence
  Synthetic oligonucleotide
agtcatcactagatattacaacgccgtaag

SEQ ID NO: 175843 - DNA, 30 bp, Artificial Sequence
  Synthetic oligonucleotide
cagaaacgattcgtttctggcccgcgtaag

SEQ ID NO: 175844 - DNA, 30 bp, Artificial Sequence
  Synthetic oligonucleotide
gcgatcctgagacaccgagccttgcgtaag

SEQ ID NO: 175845 - DNA, 30 bp, Artificial Sequence
  Synthetic oligonucleotide
ccgaataaaacttaggatttctatcgtaag

SEQ ID NO: 175846 - DNA, 30 bp, Artificial Sequence
  Synthetic oligonucleotide
gtatctcgacagttagagtaagttcgtaag

SEQ ID NO: 175847 - DNA, 30 bp, Artificial Sequence
  Synthetic oligonucleotide
cctcaggggggcatctggtgaccaggtaag

SEQ ID NO: 175848 - DNA, 30 bp, Artificial Sequence
  Synthetic oligonucleotide
tctcgggggggaccattttatctcggtaag

SEQ ID NO: 175849 - DNA, 30 bp, Artificial Sequence
  Synthetic oligonucleotide
gcagccattatcgtaagcaagcttggtaag

SEQ ID NO: 175850 - DNA, 30 bp, Artificial Sequence
  Synthetic oligonucleotide
cacacgtctccgtttgggacccaatgtaag

SEQ ID NO: 175851 - DNA, 30 bp, Artificial Sequence
  Synthetic oligonucleotide
gtataggatatgcacctggttacatgtaag

SEQ ID NO: 175852 - DNA, 30 bp, Artificial Sequence
  Synthetic oligonucleotide
ctacaatacgtgaaagtttttttatgtaag

SEQ ID NO: 175853 - DNA, 30 bp, Artificial Sequence
  Synthetic oligonucleotide
tcgcattggcccccgacgagtaactgtaag

SEQ ID NO: 175854 - DNA, 30 bp, Artificial Sequence
  Synthetic oligonucleotide
tgcacctgcttaaaacgtggccactgtaag

SEQ ID NO: 175855 - DNA, 30 bp, Artificial Sequence
  Synthetic oligonucleotide
ttgggtgaacatgtgagtgcggcctgtaag

SEQ ID NO: 175856 - DNA, 30 bp, Artificial Sequence
  Synthetic oligonucleotide
taccagtagggaagtgcggcatcttgtaag

SEQ ID NO: 175857 - DNA, 30 bp, Artificial Sequence
  Synthetic oligonucleotide
gctggctcccaacaattggccaaaattaag

SEQ ID NO: 175858 - DNA, 30 bp, Artificial Sequence
  Synthetic oligonucleotide
gacgaatatattggagtagcgcaaattaag

SEQ ID NO: 175859 - DNA, 30 bp, Artificial Sequence
  Synthetic oligonucleotide
gcaagatgatgacactcggttgaaattaag

SEQ ID NO: 175860 - DNA, 30 bp, Artificial Sequence
  Synthetic oligonucleotide
tcagaaaagtattttacggtactaattaag

SEQ ID NO: 175861 - DNA, 30 bp, Artificial Sequence
  Synthetic oligonucleotide
agaacattaacgcgcgttataaccattaag

SEQ ID NO: 175862 - DNA, 30 bp, Artificial Sequence
  Synthetic oligonucleotide
catgtccccggcttctgttttaccattaag

SEQ ID NO: 175863 - DNA, 30 bp, Artificial Sequence
  Synthetic oligonucleotide
tgtaagaattgaaaggattttcatattaag

SEQ ID NO: 175864 - DNA, 30 bp, Artificial Sequence
  Synthetic oligonucleotide
taggcagaaaaaagcgtaagtcctattaag

SEQ ID NO: 175865 - DNA, 30 bp, Artificial Sequence
  Synthetic oligonucleotide
cacttatgtgaggaggtatatcttattaag

SEQ ID NO: 175866 - DNA, 30 bp, Artificial Sequence
  Synthetic oligonucleotide
ctggggaacaatgtttgcgcaagacttaag

SEQ ID NO: 175867 - DNA, 30 bp, Artificial Sequence
  Synthetic oligonucleotide
tgaaccaacccatgcagacttacccttaag

SEQ ID NO: 175868 - DNA, 30 bp, Artificial Sequence
  Synthetic oligonucleotide
tgtagctctggataactgtgcgcccttaag

SEQ ID NO: 175869 - DNA, 30 bp, Artificial Sequence
  Synthetic oligonucleotide
caatctgtcaaggagtctattttccttaag

SEQ ID NO: 175870 - DNA, 30 bp, Artificial Sequence
  Synthetic oligonucleotide
agcgttggcggtcattaagtggtagttaag

SEQ ID NO: 175871 - DNA, 30 bp, Artificial Sequence
  Synthetic oligonucleotide
cataccatggtcctgtgcacaagcgttaag

SEQ ID NO: 175872 - DNA, 30 bp, Artificial Sequence
  Synthetic oligonucleotide
cgaggcttatacgccgcggaccgcgttaag

SEQ ID NO: 175873 - DNA, 30 bp, Artificial Sequence
  Synthetic oligonucleotide
tcggtattatatgtaacaagagaggttaag

SEQ ID NO: 175874 - DNA, 29 bp, Artificial Sequence
  Synthetic oligonucleotide
cagctcgttttcacggacctccggttaag

SEQ ID NO: 175875 - DNA, 30 bp, Artificial Sequence
  Synthetic oligonucleotide
gccaatcattacaaatctactgatgttaag

SEQ ID NO: 175876 - DNA, 30 bp, Artificial Sequence
  Synthetic oligonucleotide
gcacgacgtcgattataaaacgttgttaag

SEQ ID NO: 175877 - DNA, 30 bp, Artificial Sequence
  Synthetic oligonucleotide
taggaacacattgaacgcactgttgttaag

SEQ ID NO: 175878 - DNA, 30 bp, Artificial Sequence
  Synthetic oligonucleotide
gatgatacacccggccaactatttgttaag

SEQ ID NO: 175879 - DNA, 30 bp, Artificial Sequence
  Synthetic oligonucleotide
ccgaggccgtccgctgaattccaatttaag

SEQ ID NO: 175880 - DNA, 30 bp, Artificial Sequence
  Synthetic oligonucleotide
agtggaatgtaaatctgaaatggatttaag

SEQ ID NO: 175881 - DNA, 30 bp, Artificial Sequence
  Synthetic oligonucleotide
ccatgttaacgtaatcagaatcattttaag

SEQ ID NO: 175882 - DNA, 30 bp, Artificial Sequence
  Synthetic oligonucleotide
aagtctaataagttatttggtattaaacag

SEQ ID NO: 175883 - DNA, 30 bp, Artificial Sequence
  Synthetic oligonucleotide
gagcacacatcttggagcctggtacaacag

SEQ ID NO: 175884 - DNA, 30 bp, Artificial Sequence
  Synthetic oligonucleotide
ctgacccacatttatagaagcaaccaacag

SEQ ID NO: 175885 - DNA, 30 bp, Artificial Sequence
  Synthetic oligonucleotide
atagaattcaaagaacatcagcgccaacag

SEQ ID NO: 175886 - DNA, 30 bp, Artificial Sequence
  Synthetic oligonucleotide
caatatatgctgaggtgtgagtgccaacag

SEQ ID NO: 175887 - DNA, 30 bp, Artificial Sequence
  Synthetic oligonucleotide
acatacatcctaagtaaaaagtcgcaacag

SEQ ID NO: 175888 - DNA, 30 bp, Artificial Sequence
  Synthetic oligonucleotide
tatggcagttgagtagtggcaggagaacag

SEQ ID NO: 175889 - DNA, 30 bp, Artificial Sequence
  Synthetic oligonucleotide
gtctcaacaaggattaggcgtttagaacag

SEQ ID NO: 175890 - DNA, 30 bp, Artificial Sequence
  Synthetic oligonucleotide
ctcggcggtaacgaagtatactgcgaacag

SEQ ID NO: 175891 - DNA, 30 bp, Artificial Sequence
  Synthetic oligonucleotide
acagtatactagcccgtcgcgactgaacag

SEQ ID NO: 175892 - DNA, 30 bp, Artificial Sequence
  Synthetic oligonucleotide
tgaggccccctatcaggtaacgaataacag

SEQ ID NO: 175893 - DNA, 30 bp, Artificial Sequence
  Synthetic oligonucleotide
tgtatgtcataaatcttaatacgataacag

SEQ ID NO: 175894 - DNA, 30 bp, Artificial Sequence
  Synthetic oligonucleotide
cttcgcataccgtaacgaaccatgtaacag

SEQ ID NO: 175895 - DNA, 30 bp, Artificial Sequence
  Synthetic oligonucleotide
ggagcccaggaggccgtacgcctgtaacag

SEQ ID NO: 175896 - DNA, 30 bp, Artificial Sequence
  Synthetic oligonucleotide
aggctcacagcgcattgcgggcattaacag

SEQ ID NO: 175897 - DNA, 30 bp, Artificial Sequence
  Synthetic oligonucleotide
agggtaccaacgcgacggctgcgcacacag

SEQ ID NO: 175898 - DNA, 30 bp, Artificial Sequence
  Synthetic oligonucleotide
gcggaaaagcgtagttataatctcacacag

SEQ ID NO: 175899 - DNA, 30 bp, Artificial Sequence
  Synthetic oligonucleotide
agggccgcctcgagagaggcagtcacacag

SEQ ID NO: 175900 - DNA, 30 bp, Artificial Sequence
  Synthetic oligonucleotide
gtgaaggtctaccaaacgagcaagacacag

SEQ ID NO: 175901 - DNA, 30 bp, Artificial Sequence
  Synthetic oligonucleotide
ccttcgtgtaacaactgaacaacgacacag

SEQ ID NO: 175902 - DNA, 30 bp, Artificial Sequence
  Synthetic oligonucleotide
gaggtgacaacccaagtaggtactacacag

SEQ ID NO: 175903 - DNA, 30 bp, Artificial Sequence
  Synthetic oligonucleotide
ggtgccctccatatattccttaaaccacag

SEQ ID NO: 175904 - DNA, 30 bp, Artificial Sequence
  Synthetic oligonucleotide
cctccaacaagaggtagggtgtcgccacag

SEQ ID NO: 175905 - DNA, 30 bp, Artificial Sequence
  Synthetic oligonucleotide
aaagcaaggacatacttcgcgatcgcacag

SEQ ID NO: 175906 - DNA, 30 bp, Artificial Sequence
  Synthetic oligonucleotide
tcaaactcgaccatgatatggcggtcacag

SEQ ID NO: 175907 - DNA, 30 bp, Artificial Sequence
  Synthetic oligonucleotide
cccaatttgggaatggtccacagcagacag

SEQ ID NO: 175908 - DNA, 30 bp, Artificial Sequence
  Synthetic oligonucleotide
caggaacatgcccggatgcattatagacag

SEQ ID NO: 175909 - DNA, 30 bp, Artificial Sequence
  Synthetic oligonucleotide
gtagggggtagaaattcataatgtagacag

SEQ ID NO: 175910 - DNA, 30 bp, Artificial Sequence
  Synthetic oligonucleotide
caggcgcgggtcatgcaattgtaacgacag

SEQ ID NO: 175911 - DNA, 30 bp, Artificial Sequence
  Synthetic oligonucleotide
agcattagccataaggtgtactcacgacag

SEQ ID NO: 175912 - DNA, 30 bp, Artificial Sequence
  Synthetic oligonucleotide
tcatttacacgtacccagatgagacgacag

SEQ ID NO: 175913 - DNA, 30 bp, Artificial Sequence
  Synthetic oligonucleotide
cagctacgttatagcttgggcgcccgacag

SEQ ID NO: 175914 - DNA, 30 bp, Artificial Sequence
  Synthetic oligonucleotide
aaattgcacaggcttaatagaccgcgacag

SEQ ID NO: 175915 - DNA, 30 bp, Artificial Sequence
  Synthetic oligonucleotide
tcatactatatcagatgtctactaggacag

SEQ ID NO: 175916 - DNA, 30 bp, Artificial Sequence
  Synthetic oligonucleotide
agaccgtggttagctggttaacatggacag

SEQ ID NO: 175917 - DNA, 30 bp, Artificial Sequence
  Synthetic oligonucleotide
atgcggtctgatacttctgcaacatgacag

SEQ ID NO: 175918 - DNA, 30 bp, Artificial Sequence
  Synthetic oligonucleotide
ggtacctggggttcggtggatccctgacag

SEQ ID NO: 175919 - DNA, 30 bp, Artificial Sequence
  Synthetic oligonucleotide
actatggatttcctgcatccccagtgacag

SEQ ID NO: 175920 - DNA, 30 bp, Artificial Sequence
  Synthetic oligonucleotide
cctgctagaactcataagaggggttgacag

SEQ ID NO: 175921 - DNA, 30 bp, Artificial Sequence
  Synthetic oligonucleotide
ccatctttgcgagatgctcacatttgacag

SEQ ID NO: 175922 - DNA, 30 bp, Artificial Sequence
  Synthetic oligonucleotide
taacaaacctcggagtagggataaatacag

SEQ ID NO: 175923 - DNA, 30 bp, Artificial Sequence
  Synthetic oligonucleotide
tccttagtaaaaaatgacccctaaatacag

SEQ ID NO: 175924 - DNA, 30 bp, Artificial Sequence
  Synthetic oligonucleotide
tcgcagcgtaggcagaatactccaatacag

SEQ ID NO: 175925 - DNA, 30 bp, Artificial Sequence
  Synthetic oligonucleotide
ggtgtagacagtgccgtcactttcatacag

SEQ ID NO: 175926 - DNA, 30 bp, Artificial Sequence
  Synthetic oligonucleotide
gcgagagagtccccgtaaagactgatacag

SEQ ID NO: 175927 - DNA, 30 bp, Artificial Sequence
  Synthetic oligonucleotide
gccaggacacttaaataagctcgtatacag

SEQ ID NO: 175928 - DNA, 30 bp, Artificial Sequence
  Synthetic oligonucleotide
gggactacacagccaaattattcactacag

SEQ ID NO: 175929 - DNA, 30 bp, Artificial Sequence
  Synthetic oligonucleotide
tgtgggtagtactggtgaatgatactacag

SEQ ID NO: 175930 - DNA, 30 bp, Artificial Sequence
  Synthetic oligonucleotide
ctgactccaccggaaccggttatactacag

SEQ ID NO: 175931 - DNA, 30 bp, Artificial Sequence
  Synthetic oligonucleotide
atagttagggtaaggtgtaaactcctacag

SEQ ID NO: 175932 - DNA, 30 bp, Artificial Sequence
  Synthetic oligonucleotide
ttgggtcaggggtggcgggctggagtacag

SEQ ID NO: 175933 - DNA, 30 bp, Artificial Sequence
  Synthetic oligonucleotide
cctctagcattaacatacggtgatgtacag

SEQ ID NO: 175934 - DNA, 30 bp, Artificial Sequence
  Synthetic oligonucleotide
ttcacgatttaagtgatttggtctgtacag

SEQ ID NO: 175935 - DNA, 30 bp, Artificial Sequence
  Synthetic oligonucleotide
agttacaggttctcagtagtacgtgtacag

SEQ ID NO: 175936 - DNA, 30 bp, Artificial Sequence
  Synthetic oligonucleotide
atcaccgtgagtatgagtcactgtgtacag

SEQ ID NO: 175937 - DNA, 30 bp, Artificial Sequence
  Synthetic oligonucleotide
gagacactatggcgccgttgaaaattacag

SEQ ID NO: 175938 - DNA, 30 bp, Artificial Sequence
  Synthetic oligonucleotide
tgttgtagggaagctttcgcttgattacag

SEQ ID NO: 175939 - DNA, 30 bp, Artificial Sequence
  Synthetic oligonucleotide
ggagttcctgcagtaaaagggtacttacag

SEQ ID NO: 175940 - DNA, 30 bp, Artificial Sequence
  Synthetic oligonucleotide
gcgtaagttaatgtattcagaggtttacag

SEQ ID NO: 175941 - DNA, 30 bp, Artificial Sequence
  Synthetic oligonucleotide
cacacggtattatctctttcaggaaaccag

SEQ ID NO: 175942 - DNA, 30 bp, Artificial Sequence
  Synthetic oligonucleotide
ggttgtgtcataggcaggttgccgaaccag

SEQ ID NO: 175943 - DNA, 30 bp, Artificial Sequence
  Synthetic oligonucleotide
ccgactttccagaacgcaacgaggaaccag

SEQ ID NO: 175944 - DNA, 30 bp, Artificial Sequence
  Synthetic oligonucleotide
tgcattgtcgtctttgcaactctccaccag

SEQ ID NO: 175945 - DNA, 30 bp, Artificial Sequence
  Synthetic oligonucleotide
agctttctcccaactgccaacagtcaccag

SEQ ID NO: 175946 - DNA, 30 bp, Artificial Sequence
  Synthetic oligonucleotide
taagattcccaggggatcagtggagaccag

SEQ ID NO: 175947 - DNA, 30 bp, Artificial Sequence
  Synthetic oligonucleotide
aaaatgccgttttaaattctcgaggaccag

SEQ ID NO: 175948 - DNA, 30 bp, Artificial Sequence
  Synthetic oligonucleotide
ctttattttccactaattaagacggaccag

SEQ ID NO: 175949 - DNA, 30 bp, Artificial Sequence
  Synthetic oligonucleotide
ctaaacggactactgctatgtgtggaccag

SEQ ID NO: 175950 - DNA, 31 bp, Artificial Sequence
  Synthetic oligonucleotide
cactaattgaatcctcgcaatcacataccag

SEQ ID NO: 175951 - DNA, 30 bp, Artificial Sequence
  Synthetic oligonucleotide
cagaagataacagtaaaatcattgtaccag

SEQ ID NO: 175952 - DNA, 30 bp, Artificial Sequence
  Synthetic oligonucleotide
cccgcgttctatgccattctagtttaccag

SEQ ID NO: 175953 - DNA, 30 bp, Artificial Sequence
  Synthetic oligonucleotide
aagtccaccacaacaaaaagcgtaacccag

SEQ ID NO: 175954 - DNA, 30 bp, Artificial Sequence
  Synthetic oligonucleotide
gtcccccagattacgagatgggggacccag

SEQ ID NO: 175955 - DNA, 30 bp, Artificial Sequence
  Synthetic oligonucleotide
gcatactacttgatctgcacacacccccag

SEQ ID NO: 175956 - DNA, 30 bp, Artificial Sequence
  Synthetic oligonucleotide
tgaaaatcggggtaggatatattgccccag

SEQ ID NO: 175957 - DNA, 30 bp, Artificial Sequence
  Synthetic oligonucleotide
ttttgggaaatttgcatggacaatccccag

SEQ ID NO: 175958 - DNA, 30 bp, Artificial Sequence
  Synthetic oligonucleotide
ggtatggacttagaaacagggagtccccag

SEQ ID NO: 175959 - DNA, 30 bp, Artificial Sequence
  Synthetic oligonucleotide
tcgaggtctcccgcgccagcgtaagcccag

SEQ ID NO: 175960 - DNA, 30 bp, Artificial Sequence
  Synthetic oligonucleotide
tgttcctatcgtggaagcacaagagcccag

SEQ ID NO: 175961 - DNA, 30 bp, Artificial Sequence
  Synthetic oligonucleotide
aagcttcatacgtggagatccacggcccag

SEQ ID NO: 175962 - DNA, 30 bp, Artificial Sequence
  Synthetic oligonucleotide
cattgacctcattcgaccataattgcccag

SEQ ID NO: 175963 - DNA, 30 bp, Artificial Sequence
  Synthetic oligonucleotide
cgctaactaggagaggatcgatgctcccag

SEQ ID NO: 175964 - DNA, 30 bp, Artificial Sequence
  Synthetic oligonucleotide
gtattgttccaatgttcactcctctcccag

SEQ ID NO: 175965 - DNA, 30 bp, Artificial Sequence
  Synthetic oligonucleotide
tgcgcgcattccgactgtcggccttcccag

SEQ ID NO: 175966 - DNA, 30 bp, Artificial Sequence
  Synthetic oligonucleotide
ctggataaagcggtaaatgataacagccag

SEQ ID NO: 175967 - DNA, 30 bp, Artificial Sequence
  Synthetic oligonucleotide
acgtgaaagcattcttaaggaggtagccag

SEQ ID NO: 175968 - DNA, 30 bp, Artificial Sequence
  Synthetic oligonucleotide
gtgaggctttaggagcctttttaacgccag

SEQ ID NO: 175969 - DNA, 30 bp, Artificial Sequence
  Synthetic oligonucleotide
tgtttggatggatggcgtcacgggcgccag

SEQ ID NO: 175970 - DNA, 30 bp, Artificial Sequence
  Synthetic oligonucleotide
gtgagttgcctgacatacagtggtcgccag

SEQ ID NO: 175971 - DNA, 30 bp, Artificial Sequence
  Synthetic oligonucleotide
gcatacaccttaaagaagatattaggccag

SEQ ID NO: 175972 - DNA, 30 bp, Artificial Sequence
  Synthetic oligonucleotide
ggaacttaagtccgtctggccgggggccag

SEQ ID NO: 175973 - DNA, 30 bp, Artificial Sequence
  Synthetic oligonucleotide
gcgtcgctaacttaatgccgcaatggccag

SEQ ID NO: 175974 - DNA, 30 bp, Artificial Sequence
  Synthetic oligonucleotide
atgtaggggggtatattagatcactgccag

SEQ ID NO: 175975 - DNA, 30 bp, Artificial Sequence
  Synthetic oligonucleotide
taacacattgcggtgattggcgtctgccag

SEQ ID NO: 175976 - DNA, 30 bp, Artificial Sequence
  Synthetic oligonucleotide
gggttaaccaataccccagaaaagtgccag

SEQ ID NO: 175977 - DNA, 30 bp, Artificial Sequence
  Synthetic oligonucleotide
gcgaatagaattatgataggcatcatccag

SEQ ID NO: 175978 - DNA, 30 bp, Artificial Sequence
  Synthetic oligonucleotide
atactggatggctcggcgcacatgatccag

SEQ ID NO: 175979 - DNA, 30 bp, Artificial Sequence
  Synthetic oligonucleotide
ccgtcgtgtcaagaagtgggcggtctccag

SEQ ID NO: 175980 - DNA, 30 bp, Artificial Sequence
  Synthetic oligonucleotide
accattgtggcaccctttgaaccagtccag

SEQ ID NO: 175981 - DNA, 30 bp, Artificial Sequence
  Synthetic oligonucleotide
agacgaccgtaagcaggtaaaattgtccag

SEQ ID NO: 175982 - DNA, 31 bp, Artificial Sequence
  Synthetic oligonucleotide
ggcaatggtctcgagacctgtacttgtccag

SEQ ID NO: 175983 - DNA, 30 bp, Artificial Sequence
  Synthetic oligonucleotide
tgaccttcgcacttcacaggtggattccag

SEQ ID NO: 175984 - DNA, 30 bp, Artificial Sequence
  Synthetic oligonucleotide
tagacaaccgaataatagttgcagttccag

SEQ ID NO: 175985 - DNA, 30 bp, Artificial Sequence
  Synthetic oligonucleotide
taggcaagaaagaaaacctttgttttccag

SEQ ID NO: 175986 - DNA, 30 bp, Artificial Sequence
  Synthetic oligonucleotide
gtggtacaggtcccgcttccaaaaaagcag

SEQ ID NO: 175987 - DNA, 30 bp, Artificial Sequence
  Synthetic oligonucleotide
ctttcagtgggtaatggatgaaacaagcag

SEQ ID NO: 175988 - DNA, 30 bp, Artificial Sequence
  Synthetic oligonucleotide
ttttccacggcaaaacataccattcagcag

SEQ ID NO: 175989 - DNA, 30 bp, Artificial Sequence
  Synthetic oligonucleotide
caatgggtgggttagttaataaaagagcag

SEQ ID NO: 175990 - DNA, 30 bp, Artificial Sequence
  Synthetic oligonucleotide
cagatgttttagttagggccaaaggagcag

SEQ ID NO: 175991 - DNA, 30 bp, Artificial Sequence
  Synthetic oligonucleotide
ggctggacgtgtgtttgcctaatggagcag

SEQ ID NO: 175992 - DNA, 30 bp, Artificial Sequence
  Synthetic oligonucleotide
tcttggcaacccactggtagattggagcag

SEQ ID NO: 175993 - DNA, 30 bp, Artificial Sequence
  Synthetic oligonucleotide
gtgtgggtgggggggaggagcggtgagcag

SEQ ID NO: 175994 - DNA, 30 bp, Artificial Sequence
  Synthetic oligonucleotide
gtgcggaaacgtgggctgaggatatagcag

SEQ ID NO: 175995 - DNA, 30 bp, Artificial Sequence
  Synthetic oligonucleotide
cggttcgcttgcgcgataggtcagtagcag

SEQ ID NO: 175996 - DNA, 30 bp, Artificial Sequence
  Synthetic oligonucleotide
caaggtcaatggttgatctaatattagcag

SEQ ID NO: 175997 - DNA, 30 bp, Artificial Sequence
  Synthetic oligonucleotide
gtaactagcataaggagtgccgcttagcag

SEQ ID NO: 175998 - DNA, 30 bp, Artificial Sequence
  Synthetic oligonucleotide
ggtagcagttatgttcgaatgacaacgcag

SEQ ID NO: 175999 - DNA, 30 bp, Artificial Sequence
  Synthetic oligonucleotide
tatgcatggtgggcttccggggacacgcag

SEQ ID NO: 176000 - DNA, 30 bp, Artificial Sequence
  Synthetic oligonucleotide
acagccatgacctcccctcgaggcacgcag

SEQ ID NO: 176001 - DNA, 30 bp, Artificial Sequence
  Synthetic oligonucleotide
acatcacagccgagagggtgccctccgcag

SEQ ID NO: 176002 - DNA, 30 bp, Artificial Sequence
  Synthetic oligonucleotide
tatgctcaggggtgtacctcgtgagcgcag

SEQ ID NO: 176003 - DNA, 30 bp, Artificial Sequence
  Synthetic oligonucleotide
tcggggagaacgtcaccatacgacgcgcag

SEQ ID NO: 176004 - DNA, 30 bp, Artificial Sequence
  Synthetic oligonucleotide
cggccttggattgaatcggcacactcgcag

SEQ ID NO: 176005 - DNA, 30 bp, Artificial Sequence
  Synthetic oligonucleotide
gggggaatgcatgctctttgacggtcgcag

SEQ ID NO: 176006 - DNA, 30 bp, Artificial Sequence
  Synthetic oligonucleotide
agttcacgatcaaagatcaatttcaggcag

SEQ ID NO: 176007 - DNA, 30 bp, Artificial Sequence
  Synthetic oligonucleotide
actcatgctgaccatggactgatgaggcag

SEQ ID NO: 176008 - DNA, 30 bp, Artificial Sequence
  Synthetic oligonucleotide
aagaaaaaatgacggtgcgaacttaggcag

SEQ ID NO: 176009 - DNA, 30 bp, Artificial Sequence
  Synthetic oligonucleotide
gagcgtctagcaccagcgcgacttaggcag

SEQ ID NO: 176010 - DNA, 30 bp, Artificial Sequence
  Synthetic oligonucleotide
tcactaaatctagagtggccgccccggcag

SEQ ID NO: 176011 - DNA, 30 bp, Artificial Sequence
  Synthetic oligonucleotide
tgcgtggctgaataccgtagactccggcag

SEQ ID NO: 176012 - DNA, 30 bp, Artificial Sequence
  Synthetic oligonucleotide
ctatagtaaacagtaagtgacacagggcag

SEQ ID NO: 176013 - DNA, 30 bp, Artificial Sequence
  Synthetic oligonucleotide
cgttacaacaaccgacgtagactggggcag

SEQ ID NO: 176014 - DNA, 30 bp, Artificial Sequence
  Synthetic oligonucleotide
cttgtggtactggtcaaaatgtctgggcag

SEQ ID NO: 176015 - DNA, 30 bp, Artificial Sequence
  Synthetic oligonucleotide
aataactagtaccagtcaaccaaatggcag

SEQ ID NO: 176016 - DNA, 30 bp, Artificial Sequence
  Synthetic oligonucleotide
aggcgtggagcatggttgttgttatggcag

SEQ ID NO: 176017 - DNA, 30 bp, Artificial Sequence
  Synthetic oligonucleotide
agcacttgacgtggaagctaactctggcag

SEQ ID NO: 176018 - DNA, 30 bp, Artificial Sequence
  Synthetic oligonucleotide
aattagctggtcgccgggattgagtggcag

SEQ ID NO: 176019 - DNA, 30 bp, Artificial Sequence
  Synthetic oligonucleotide
tgaggctaagtggcgcgtggtatgtggcag

SEQ ID NO: 176020 - DNA, 30 bp, Artificial Sequence
  Synthetic oligonucleotide
gttagatgtacgccaggggtacattggcag

SEQ ID NO: 176021 - DNA, 30 bp, Artificial Sequence
  Synthetic oligonucleotide
cacattggtaacggacaaaacagttggcag

SEQ ID NO: 176022 - DNA, 30 bp, Artificial Sequence
  Synthetic oligonucleotide
ctgtatagtcaaaaggggattggcatgcag

SEQ ID NO: 176023 - DNA, 30 bp, Artificial Sequence
  Synthetic oligonucleotide
ggatagttggactatgacactatcatgcag

SEQ ID NO: 176024 - DNA, 30 bp, Artificial Sequence
  Synthetic oligonucleotide
gggattagtgtgaacatgctgtgtatgcag

SEQ ID NO: 176025 - DNA, 30 bp, Artificial Sequence
  Synthetic oligonucleotide
acaagccggccgtcagcgcagtgcctgcag

SEQ ID NO: 176026 - DNA, 30 bp, Artificial Sequence
  Synthetic oligonucleotide
gtcggtttgggtacagagctgaggctgcag

SEQ ID NO: 176027 - DNA, 30 bp, Artificial Sequence
  Synthetic oligonucleotide
agcctgccgtagtaaggcttggttctgcag

SEQ ID NO: 176028 - DNA, 30 bp, Artificial Sequence
  Synthetic oligonucleotide
ataacccgcaatcgacctagacaagtgcag

SEQ ID NO: 176029 - DNA, 35 bp, Artificial Sequence
  Synthetic oligonucleotide
gggcggagggaagttcggtggaggagggggtgcag

SEQ ID NO: 176030 - DNA, 30 bp, Artificial Sequence
  Synthetic oligonucleotide
ggcatacaacatgatttcatgaatgtgcag

SEQ ID NO: 176031 - DNA, 30 bp, Artificial Sequence
  Synthetic oligonucleotide
cagaagtggctcacctgctagtaattgcag

SEQ ID NO: 176032 - DNA, 30 bp, Artificial Sequence
  Synthetic oligonucleotide
atctcgctgaaggtgctctccaccttgcag

SEQ ID NO: 176033 - DNA, 30 bp, Artificial Sequence
  Synthetic oligonucleotide
ttcaagggcaagacgctcgtccttttgcag

SEQ ID NO: 176034 - DNA, 30 bp, Artificial Sequence
  Synthetic oligonucleotide
gtaccaccttttgatcaggtggcaaatcag

SEQ ID NO: 176035 - DNA, 30 bp, Artificial Sequence
  Synthetic oligonucleotide
attggggtagcccctccttcaaccaatcag

SEQ ID NO: 176036 - DNA, 30 bp, Artificial Sequence
  Synthetic oligonucleotide
gaaatcaagaggttagaacaagagaatcag

SEQ ID NO: 176037 - DNA, 30 bp, Artificial Sequence
  Synthetic oligonucleotide
gcgattgggttgagggtaggcagacatcag

SEQ ID NO: 176038 - DNA, 30 bp, Artificial Sequence
  Synthetic oligonucleotide
tcactaactgtacgggagctggctcatcag

SEQ ID NO: 176039 - DNA, 30 bp, Artificial Sequence
  Synthetic oligonucleotide
gccgtggagaaatgggtcgtatgagatcag

SEQ ID NO: 176040 - DNA, 26 bp, Artificial Sequence
  Synthetic oligonucleotide
gcttaggtcatgatccaaccgatcag

SEQ ID NO: 176041 - DNA, 30 bp, Artificial Sequence
  Synthetic oligonucleotide
tgccactgcaggcgaagacggtatgatcag

SEQ ID NO: 176042 - DNA, 30 bp, Artificial Sequence
  Synthetic oligonucleotide
gaagtgttggaatgtcctgctagatatcag

SEQ ID NO: 176043 - DNA, 30 bp, Artificial Sequence
  Synthetic oligonucleotide
tacatggcggcagaattgcgatgatatcag

SEQ ID NO: 176044 - DNA, 30 bp, Artificial Sequence
  Synthetic oligonucleotide
ttgaccatagacgtgaaggtttggtatcag

SEQ ID NO: 176045 - DNA, 30 bp, Artificial Sequence
  Synthetic oligonucleotide
gtgtggtatagtcacggcgcaatgtatcag

SEQ ID NO: 176046 - DNA, 30 bp, Artificial Sequence
  Synthetic oligonucleotide
tagatctgtattcgtgatatcgcttatcag

SEQ ID NO: 176047 - DNA, 30 bp, Artificial Sequence
  Synthetic oligonucleotide
gtcactaaatcggggttgttctgttatcag

SEQ ID NO: 176048 - DNA, 30 bp, Artificial Sequence
  Synthetic oligonucleotide
catctagtggcagggtatttgcatactcag

SEQ ID NO: 176049 - DNA, 30 bp, Artificial Sequence
  Synthetic oligonucleotide
ataccggcgactcagtggccctgacctcag

SEQ ID NO: 176050 - DNA, 30 bp, Artificial Sequence
  Synthetic oligonucleotide
gaaaatgtctcggaagtcggtgtacctcag

SEQ ID NO: 176051 - DNA, 30 bp, Artificial Sequence
  Synthetic oligonucleotide
aggttacatctatataattttccgcctcag

SEQ ID NO: 176052 - DNA, 30 bp, Artificial Sequence
  Synthetic oligonucleotide
ggagaaccgatgcaccgtgttctcgctcag

SEQ ID NO: 176053 - DNA, 30 bp, Artificial Sequence
  Synthetic oligonucleotide
ctcgggcattatccggttacggcggctcag

SEQ ID NO: 176054 - DNA, 30 bp, Artificial Sequence
  Synthetic oligonucleotide
ttaatactagagcaatcaaagcatgctcag

SEQ ID NO: 176055 - DNA, 30 bp, Artificial Sequence
  Synthetic oligonucleotide
tgtctatagtctattgtcaaatgtgctcag

SEQ ID NO: 176056 - DNA, 30 bp, Artificial Sequence
  Synthetic oligonucleotide
gagcgtcggagaacgcatcaacacagtcag

SEQ ID NO: 176057 - DNA, 30 bp, Artificial Sequence
  Synthetic oligonucleotide
gtaggccaggtacgagttcgagtcagtcag

SEQ ID NO: 176058 - DNA, 30 bp, Artificial Sequence
  Synthetic oligonucleotide
ctacggttcgactagcagaagatgagtcag

SEQ ID NO: 176059 - DNA, 30 bp, Artificial Sequence
  Synthetic oligonucleotide
catattgctgaccgtgcggttcctagtcag

SEQ ID NO: 176060 - DNA, 30 bp, Artificial Sequence
  Synthetic oligonucleotide
gaagtagttatgactctaatgcttagtcag

SEQ ID NO: 176061 - DNA, 30 bp, Artificial Sequence
  Synthetic oligonucleotide
gcataccatatttcttcatatatacgtcag

SEQ ID NO: 176062 - DNA, 30 bp, Artificial Sequence
  Synthetic oligonucleotide
ttggcacgtcggtaggtataggtacgtcag

SEQ ID NO: 176063 - DNA, 30 bp, Artificial Sequence
  Synthetic oligonucleotide
agccggaaatgggtcctatggtaccgtcag

SEQ ID NO: 176064 - DNA, 30 bp, Artificial Sequence
  Synthetic oligonucleotide
actagatttgcgagtatgcaagagcgtcag

SEQ ID NO: 176065 - DNA, 30 bp, Artificial Sequence
  Synthetic oligonucleotide
ctcagtgagccttgctacaaggaaggtcag

SEQ ID NO: 176066 - DNA, 30 bp, Artificial Sequence
  Synthetic oligonucleotide
cgtggaaattagttcatcgtgtacggtcag

SEQ ID NO: 176067 - DNA, 30 bp, Artificial Sequence
  Synthetic oligonucleotide
atcacgaaaaagggacaagcggtcggtcag

SEQ ID NO: 176068 - DNA, 30 bp, Artificial Sequence
  Synthetic oligonucleotide
tcggttataatcagtcattgagtgggtcag

SEQ ID NO: 176069 - DNA, 30 bp, Artificial Sequence
  Synthetic oligonucleotide
ccggtatcaagtcgcaccgactctggtcag

SEQ ID NO: 176070 - DNA, 30 bp, Artificial Sequence
  Synthetic oligonucleotide
aaaggtggtacaattgcgagtccatgtcag

SEQ ID NO: 176071 - DNA, 30 bp, Artificial Sequence
  Synthetic oligonucleotide
cacaagctatcgaatattacagactgtcag

SEQ ID NO: 176072 - DNA, 30 bp, Artificial Sequence
  Synthetic oligonucleotide
agtgagatagataagcgccctgtctgtcag

SEQ ID NO: 176073 - DNA, 30 bp, Artificial Sequence
  Synthetic oligonucleotide
caacagatggctcagtgcagcatgtgtcag

SEQ ID NO: 176074 - DNA, 30 bp, Artificial Sequence
  Synthetic oligonucleotide
gcgaagctgacgttgcccagcctgtgtcag

SEQ ID NO: 176075 - DNA, 30 bp, Artificial Sequence
  Synthetic oligonucleotide
gaaaggccggtcacgtattcctaaattcag

SEQ ID NO: 176076 - DNA, 30 bp, Artificial Sequence
  Synthetic oligonucleotide
caatgagacggctatgcaaaatctattcag

SEQ ID NO: 176077 - DNA, 30 bp, Artificial Sequence
  Synthetic oligonucleotide
aggggtaaatctcgggtacgatctattcag

SEQ ID NO: 176078 - DNA, 30 bp, Artificial Sequence
  Synthetic oligonucleotide
gttgcgcacaaaagcgcgttaggtattcag

SEQ ID NO: 176079 - DNA, 30 bp, Artificial Sequence
  Synthetic oligonucleotide
ggaatccaccgtgaggatcacggtattcag

SEQ ID NO: 176080 - DNA, 30 bp, Artificial Sequence
  Synthetic oligonucleotide
atgagtgtaacgacatgcactcgacttcag

SEQ ID NO: 176081 - DNA, 30 bp, Artificial Sequence
  Synthetic oligonucleotide
accctgagacagggatcaacattccttcag

SEQ ID NO: 176082 - DNA, 30 bp, Artificial Sequence
  Synthetic oligonucleotide
caatctctgcgattagctgagtagcttcag

SEQ ID NO: 176083 - DNA, 30 bp, Artificial Sequence
  Synthetic oligonucleotide
ggctttagtacacaagtggccgttcttcag

SEQ ID NO: 176084 - DNA, 30 bp, Artificial Sequence
  Synthetic oligonucleotide
agagattagttaacaggtcgcgttcttcag

SEQ ID NO: 176085 - DNA, 30 bp, Artificial Sequence
  Synthetic oligonucleotide
tgtgcaaggaacgagccctcgtaagttcag

SEQ ID NO: 176086 - DNA, 30 bp, Artificial Sequence
  Synthetic oligonucleotide
tttcagagtatcgtgacgcccttcgttcag

SEQ ID NO: 176087 - DNA, 30 bp, Artificial Sequence
  Synthetic oligonucleotide
gctcagtttcaatccgattctgaggttcag

SEQ ID NO: 176088 - DNA, 30 bp, Artificial Sequence
  Synthetic oligonucleotide
ctgactaggaatcttgtgtgctaggttcag

SEQ ID NO: 176089 - DNA, 30 bp, Artificial Sequence
  Synthetic oligonucleotide
ggacagggagccagtcatccagcggttcag

SEQ ID NO: 176090 - DNA, 30 bp, Artificial Sequence
  Synthetic oligonucleotide
atccgactgttaaacaccggcacatttcag

SEQ ID NO: 176091 - DNA, 30 bp, Artificial Sequence
  Synthetic oligonucleotide
tcgaactgctctccccatggtacctttcag

SEQ ID NO: 176092 - DNA, 30 bp, Artificial Sequence
  Synthetic oligonucleotide
gtggtttcgcgttgtggccgaatgtttcag

SEQ ID NO: 176093 - DNA, 30 bp, Artificial Sequence
  Synthetic oligonucleotide
aagcaagcatgggcgacccagagttttcag

SEQ ID NO: 176094 - DNA, 30 bp, Artificial Sequence
  Synthetic oligonucleotide
cgaccagcggacaccaaagctctttttcag

SEQ ID NO: 176095 - DNA, 30 bp, Artificial Sequence
  Synthetic oligonucleotide
ttggtcggcctaggtctggctaagaaagag

SEQ ID NO: 176096 - DNA, 30 bp, Artificial Sequence
  Synthetic oligonucleotide
tggctgtgaggaggatgtttttaacaagag

SEQ ID NO: 176097 - DNA, 30 bp, Artificial Sequence
  Synthetic oligonucleotide
tagtgtatctaacccaaccatagacaagag

SEQ ID NO: 176098 - DNA, 30 bp, Artificial Sequence
  Synthetic oligonucleotide
gacaaagcggcaaacccaagtggacaagag

SEQ ID NO: 176099 - DNA, 30 bp, Artificial Sequence
  Synthetic oligonucleotide
gtataagcgagtagagggggttaccaagag

SEQ ID NO: 176100 - DNA, 30 bp, Artificial Sequence
  Synthetic oligonucleotide
ccgactcgttgatacgtggtcactcaagag

SEQ ID NO: 176101 - DNA, 30 bp, Artificial Sequence
  Synthetic oligonucleotide
tacacgttcactgaacttcgtactcaagag

SEQ ID NO: 176102 - DNA, 30 bp, Artificial Sequence
  Synthetic oligonucleotide
caagcaccggtccgcggaagatgagaagag

SEQ ID NO: 176103 - DNA, 30 bp, Artificial Sequence
  Synthetic oligonucleotide
taacagggctagcaacgttgactagaagag

SEQ ID NO: 176104 - DNA, 30 bp, Artificial Sequence
  Synthetic oligonucleotide
gttgtgttaccctagggacccctagaagag

SEQ ID NO: 176105 - DNA, 30 bp, Artificial Sequence
  Synthetic oligonucleotide
cagtggtataattttactggaaacgaagag

SEQ ID NO: 176106 - DNA, 30 bp, Artificial Sequence
  Synthetic oligonucleotide
cggggctatgcttcgggtaagagcgaagag

SEQ ID NO: 176107 - DNA, 30 bp, Artificial Sequence
  Synthetic oligonucleotide
ggggtctgcccgtggaaagcgacataagag

SEQ ID NO: 176108 - DNA, 30 bp, Artificial Sequence
  Synthetic oligonucleotide
agcccttttagtttcccggacggataagag

SEQ ID NO: 176109 - DNA, 30 bp, Artificial Sequence
  Synthetic oligonucleotide
tgtgacaaagtttctacgaatacctaagag

SEQ ID NO: 176110 - DNA, 30 bp, Artificial Sequence
  Synthetic oligonucleotide
tcgtcacggtgtaaatctgcctcctaagag

SEQ ID NO: 176111 - DNA, 30 bp, Artificial Sequence
  Synthetic oligonucleotide
tttagcctgcgatggagtggttcctaagag

SEQ ID NO: 176112 - DNA, 30 bp, Artificial Sequence
  Synthetic oligonucleotide
agagtcaccgagcgaagctagaattaagag

SEQ ID NO: 176113 - DNA, 30 bp, Artificial Sequence
  Synthetic oligonucleotide
agctgggtgataaatcttaccgaaacagag

SEQ ID NO: 176114 - DNA, 30 bp, Artificial Sequence
  Synthetic oligonucleotide
actaaagtttgcacgaggagcgtaacagag

SEQ ID NO: 176115 - DNA, 30 bp, Artificial Sequence
  Synthetic oligonucleotide
aagacacgtgcggagtaataacggacagag

SEQ ID NO: 176116 - DNA, 30 bp, Artificial Sequence
  Synthetic oligonucleotide
gcgatggatgttcagctgaagcatacagag

SEQ ID NO: 176117 - DNA, 30 bp, Artificial Sequence
  Synthetic oligonucleotide
aaggacgggggatatttcgtgtatacagag

SEQ ID NO: 176118 - DNA, 30 bp, Artificial Sequence
  Synthetic oligonucleotide
tcataatcgatcaccaatgtctgtacagag

SEQ ID NO: 176119 - DNA, 30 bp, Artificial Sequence
  Synthetic oligonucleotide
ctgcataaaagaaatttcaggtaagcagag

SEQ ID NO: 176120 - DNA, 31 bp, Artificial Sequence
  Synthetic oligonucleotide
cacggtaacgtggatcgttaatagggcagag

SEQ ID NO: 176121 - DNA, 30 bp, Artificial Sequence
  Synthetic oligonucleotide
atagcaggccgtagggggtagctggcagag

SEQ ID NO: 176122 - DNA, 30 bp, Artificial Sequence
  Synthetic oligonucleotide
ccggctaattacggccgctttggatcagag

SEQ ID NO: 176123 - DNA, 30 bp, Artificial Sequence
  Synthetic oligonucleotide
ccactgttaggaaagcgtgacctgtcagag

SEQ ID NO: 176124 - DNA, 30 bp, Artificial Sequence
  Synthetic oligonucleotide
ggccttatcggtgttggctacttgtcagag

SEQ ID NO: 176125 - DNA, 30 bp, Artificial Sequence
  Synthetic oligonucleotide
gccagccactgaatggacggttgttcagag

SEQ ID NO: 176126 - DNA, 30 bp, Artificial Sequence
  Synthetic oligonucleotide
ggggcgcaatggcccccccagccaagagag

SEQ ID NO: 176127 - DNA, 30 bp, Artificial Sequence
  Synthetic oligonucleotide
atacaatggagtttgggggcgccaagagag

SEQ ID NO: 176128 - DNA, 30 bp, Artificial Sequence
  Synthetic oligonucleotide
gatatcgtgccacagcttaggaccagagag

SEQ ID NO: 176129 - DNA, 30 bp, Artificial Sequence
  Synthetic oligonucleotide
gatgctgccaattcactgctgaagagagag

SEQ ID NO: 176130 - DNA, 30 bp, Artificial Sequence
  Synthetic oligonucleotide
caactctagcagtagccttgtacgagagag

SEQ ID NO: 176131 - DNA, 30 bp, Artificial Sequence
  Synthetic oligonucleotide
tgcggtagtagccagtatccatggagagag

SEQ ID NO: 176132 - DNA, 30 bp, Artificial Sequence
  Synthetic oligonucleotide
cgcatagatcatacagctcctgatagagag

SEQ ID NO: 176133 - DNA, 30 bp, Artificial Sequence
  Synthetic oligonucleotide
gcggttgaattgtgatcgctcgctagagag

SEQ ID NO: 176134 - DNA, 30 bp, Artificial Sequence
  Synthetic oligonucleotide
cgggggttcgagacaactcgcggacgagag

SEQ ID NO: 176135 - DNA, 30 bp, Artificial Sequence
  Synthetic oligonucleotide
gtagtaagacccgcgttaactatacgagag

SEQ ID NO: 176136 - DNA, 30 bp, Artificial Sequence
  Synthetic oligonucleotide
caagtctgttgaacagctcgaaaccgagag

SEQ ID NO: 176137 - DNA, 30 bp, Artificial Sequence
  Synthetic oligonucleotide
taagcgagagagcttacccctgtccgagag

SEQ ID NO: 176138 - DNA, 30 bp, Artificial Sequence
  Synthetic oligonucleotide
gataagcgaagtgtttatgcaaagcgagag

SEQ ID NO: 176139 - DNA, 30 bp, Artificial Sequence
  Synthetic oligonucleotide
ctaattcgcacagggagaccgaggcgagag

SEQ ID NO: 176140 - DNA, 30 bp, Artificial Sequence
  Synthetic oligonucleotide
tgtgccgtccggaggcagcgcatgcgagag

SEQ ID NO: 176141 - DNA, 30 bp, Artificial Sequence
  Synthetic oligonucleotide
tgtaagcgagaatagaggcgcattcgagag

SEQ ID NO: 176142 - DNA, 30 bp, Artificial Sequence
  Synthetic oligonucleotide
taactggagtaggtaggcgttttaggagag

SEQ ID NO: 176143 - DNA, 30 bp, Artificial Sequence
  Synthetic oligonucleotide
ggcatccctcagcggtattatgccggagag

SEQ ID NO: 176144 - DNA, 30 bp, Artificial Sequence
  Synthetic oligonucleotide
ttggaggcgggtttgtcgaggtatggagag

SEQ ID NO: 176145 - DNA, 30 bp, Artificial Sequence
  Synthetic oligonucleotide
tagagactcgatcacgaattcattggagag

SEQ ID NO: 176146 - DNA, 30 bp, Artificial Sequence
  Synthetic oligonucleotide
cttggtcaatgggacgtcgtacttggagag

SEQ ID NO: 176147 - DNA, 30 bp, Artificial Sequence
  Synthetic oligonucleotide
agtctcgagttggactgaagcgttggagag

SEQ ID NO: 176148 - DNA, 30 bp, Artificial Sequence
  Synthetic oligonucleotide
cctagtcataccagtacagagaactgagag

SEQ ID NO: 176149 - DNA, 30 bp, Artificial Sequence
  Synthetic oligonucleotide
tgttacctgaccgccgaataattctgagag

SEQ ID NO: 176150 - DNA, 30 bp, Artificial Sequence
  Synthetic oligonucleotide
agaccatatcgcagcccctaagtgtgagag

SEQ ID NO: 176151 - DNA, 30 bp, Artificial Sequence
  Synthetic oligonucleotide
tactcgggggcatgattatgtacaatagag

SEQ ID NO: 176152 - DNA, 30 bp, Artificial Sequence
  Synthetic oligonucleotide
aaaggtcaggcgtatgtgccagtcatagag

SEQ ID NO: 176153 - DNA, 30 bp, Artificial Sequence
  Synthetic oligonucleotide
gccctcgcaacgtcatttgagacgatagag

SEQ ID NO: 176154 - DNA, 30 bp, Artificial Sequence
  Synthetic oligonucleotide
gacatgattacattggcggtggcgatagag

SEQ ID NO: 176155 - DNA, 30 bp, Artificial Sequence
  Synthetic oligonucleotide
atagagcggtttaccactgcacctatagag

SEQ ID NO: 176156 - DNA, 30 bp, Artificial Sequence
  Synthetic oligonucleotide
aacccctcctcggaatccgcggctatagag

SEQ ID NO: 176157 - DNA, 30 bp, Artificial Sequence
  Synthetic oligonucleotide
gatcccatgcccaccggcgctggtatagag

SEQ ID NO: 176158 - DNA, 30 bp, Artificial Sequence
  Synthetic oligonucleotide
taatccttgataatggtcacaacgctagag

SEQ ID NO: 176159 - DNA, 30 bp, Artificial Sequence
  Synthetic oligonucleotide
tcgttggagcacggaatagttatgctagag

SEQ ID NO: 176160 - DNA, 30 bp, Artificial Sequence
  Synthetic oligonucleotide
ggaacacaatttgtggacttaaaagtagag

SEQ ID NO: 176161 - DNA, 30 bp, Artificial Sequence
  Synthetic oligonucleotide
aaatggtcggcgggattccgggtagtagag

SEQ ID NO: 176162 - DNA, 30 bp, Artificial Sequence
  Synthetic oligonucleotide
ctatcttaggctggctccaacttagtagag

SEQ ID NO: 176163 - DNA, 30 bp, Artificial Sequence
  Synthetic oligonucleotide
ctaactcggcgtgcgggccacacggtagag

SEQ ID NO: 176164 - DNA, 30 bp, Artificial Sequence
  Synthetic oligonucleotide
cggtctggccttagtagtgtttgggtagag

SEQ ID NO: 176165 - DNA, 30 bp, Artificial Sequence
  Synthetic oligonucleotide
aattaaataagtatgaattgcgatgtagag

SEQ ID NO: 176166 - DNA, 30 bp, Artificial Sequence
  Synthetic oligonucleotide
gccatctgcctccgtttaggacaattagag

SEQ ID NO: 176167 - DNA, 30 bp, Artificial Sequence
  Synthetic oligonucleotide
ctggcctccaaaccggtaggaccattagag

SEQ ID NO: 176168 - DNA, 30 bp, Artificial Sequence
  Synthetic oligonucleotide
gttcacagaagaaaaaccgctagcttagag

SEQ ID NO: 176169 - DNA, 30 bp, Artificial Sequence
  Synthetic oligonucleotide
ggtggatggacttggcagagtagcttagag

SEQ ID NO: 176170 - DNA, 30 bp, Artificial Sequence
  Synthetic oligonucleotide
ggcgtgactgcaaggaacaagtgcttagag

SEQ ID NO: 176171 - DNA, 30 bp, Artificial Sequence
  Synthetic oligonucleotide
ggattattataaaggcggaaaatcttagag

SEQ ID NO: 176172 - DNA, 30 bp, Artificial Sequence
  Synthetic oligonucleotide
gatttgtagcattctatgaacctcttagag

SEQ ID NO: 176173 - DNA, 30 bp, Artificial Sequence
  Synthetic oligonucleotide
gacactcaggcgtcataagagtggttagag

SEQ ID NO: 176174 - DNA, 30 bp, Artificial Sequence
  Synthetic oligonucleotide
gaaacatggtgaatgattcttcatttagag

SEQ ID NO: 176175 - DNA, 30 bp, Artificial Sequence
  Synthetic oligonucleotide
ctactatgaccatgatgcttgcctttagag

SEQ ID NO: 176176 - DNA, 30 bp, Artificial Sequence
  Synthetic oligonucleotide
gctccacataataggcattgagctttagag

SEQ ID NO: 176177 - DNA, 30 bp, Artificial Sequence
  Synthetic oligonucleotide
ttgaagacttcaaggtggttgagtttagag

SEQ ID NO: 176178 - DNA, 30 bp, Artificial Sequence
  Synthetic oligonucleotide
gagaaacaattgtgtaaatttcgtttagag

SEQ ID NO: 176179 - DNA, 30 bp, Artificial Sequence
  Synthetic oligonucleotide
cggggacaagggcaggcattggttttagag

SEQ ID NO: 176180 - DNA, 30 bp, Artificial Sequence
  Synthetic oligonucleotide
gagtccacccgtgaggatattggaaacgag

SEQ ID NO: 176181 - DNA, 30 bp, Artificial Sequence
  Synthetic oligonucleotide
gtgggccttcggggatcgcaatgaaacgag

SEQ ID NO: 176182 - DNA, 30 bp, Artificial Sequence
  Synthetic oligonucleotide
cgccgagcgctaggataatggggtaacgag

SEQ ID NO: 176183 - DNA, 30 bp, Artificial Sequence
  Synthetic oligonucleotide
ccgggcacaaccagtccgaaaaggcacgag

SEQ ID NO: 176184 - DNA, 30 bp, Artificial Sequence
  Synthetic oligonucleotide
tgtgaagaataaagacctggttggcacgag

SEQ ID NO: 176185 - DNA, 30 bp, Artificial Sequence
  Synthetic oligonucleotide
aattgcggagtttgtaagatcgttcacgag

SEQ ID NO: 176186 - DNA, 30 bp, Artificial Sequence
  Synthetic oligonucleotide
gaagctttaacacacgggaccccagacgag

SEQ ID NO: 176187 - DNA, 30 bp, Artificial Sequence
  Synthetic oligonucleotide
atgaaacattttttagcgatgggagacgag

SEQ ID NO: 176188 - DNA, 30 bp, Artificial Sequence
  Synthetic oligonucleotide
ctgggcttaaagacacgggggggcgacgag

SEQ ID NO: 176189 - DNA, 30 bp, Artificial Sequence
  Synthetic oligonucleotide
aaaggcgttacagtttcgcggtgcgacgag

SEQ ID NO: 176190 - DNA, 30 bp, Artificial Sequence
  Synthetic oligonucleotide
aagggaaagtgctagatggagttggacgag

SEQ ID NO: 176191 - DNA, 30 bp, Artificial Sequence
  Synthetic oligonucleotide
atagtgaaccccggtgctaggcaatacgag

SEQ ID NO: 176192 - DNA, 30 bp, Artificial Sequence
  Synthetic oligonucleotide
ttagggaagtgccagacacagccatacgag

SEQ ID NO: 176193 - DNA, 30 bp, Artificial Sequence
  Synthetic oligonucleotide
gtctttgaagttagatagcgttcgtacgag

SEQ ID NO: 176194 - DNA, 30 bp, Artificial Sequence
  Synthetic oligonucleotide
gactttttcaccagattgacgtcttacgag

SEQ ID NO: 176195 - DNA, 30 bp, Artificial Sequence
  Synthetic oligonucleotide
ctcgtcgacagaaagactggcttttacgag

SEQ ID NO: 176196 - DNA, 30 bp, Artificial Sequence
  Synthetic oligonucleotide
ctcgtggctgacaaatacggtctcaccgag

SEQ ID NO: 176197 - DNA, 30 bp, Artificial Sequence
  Synthetic oligonucleotide
tgaggttgaacattaaggcgggtacccgag

SEQ ID NO: 176198 - DNA, 30 bp, Artificial Sequence
  Synthetic oligonucleotide
cccttttgaatagttcatctggagcccgag

SEQ ID NO: 176199 - DNA, 30 bp, Artificial Sequence
  Synthetic oligonucleotide
taccggaactcctaagagttggtgcccgag

SEQ ID NO: 176200 - DNA, 30 bp, Artificial Sequence
  Synthetic oligonucleotide
ctaccatggcctaggcatacagatcccgag

SEQ ID NO: 176201 - DNA, 30 bp, Artificial Sequence
  Synthetic oligonucleotide
actggagcccgggcctccatatgagccgag

SEQ ID NO: 176202 - DNA, 30 bp, Artificial Sequence
  Synthetic oligonucleotide
cagcacactatgtctgtgattgtagccgag

SEQ ID NO: 176203 - DNA, 30 bp, Artificial Sequence
  Synthetic oligonucleotide
ctatgtcacgaggctcgtgatttagccgag

SEQ ID NO: 176204 - DNA, 30 bp, Artificial Sequence
  Synthetic oligonucleotide
cgttagcattggcttccgcctaacgccgag

SEQ ID NO: 176205 - DNA, 30 bp, Artificial Sequence
  Synthetic oligonucleotide
cgatatcaaagaaacggttttgacgccgag

SEQ ID NO: 176206 - DNA, 30 bp, Artificial Sequence
  Synthetic oligonucleotide
catcggagaagtcgtgatacccgcgccgag

SEQ ID NO: 176207 - DNA, 30 bp, Artificial Sequence
  Synthetic oligonucleotide
tagaaaagatccagtaggcaaggggccgag

SEQ ID NO: 176208 - DNA, 27 bp, Artificial Sequence
  Synthetic oligonucleotide
tggggagacccaactgcctgggccgag

SEQ ID NO: 176209 - DNA, 30 bp, Artificial Sequence
  Synthetic oligonucleotide
ttattgtttccaaaagcgaaatatgccgag

SEQ ID NO: 176210 - DNA, 30 bp, Artificial Sequence
  Synthetic oligonucleotide
gtcagctttggaagaattggctggtccgag

SEQ ID NO: 176211 - DNA, 30 bp, Artificial Sequence
  Synthetic oligonucleotide
ataggtggcctacgcgaaagtgtgtccgag

SEQ ID NO: 176212 - DNA, 30 bp, Artificial Sequence
  Synthetic oligonucleotide
gtacccctggctgaaggataggcgagcgag

SEQ ID NO: 176213 - DNA, 30 bp, Artificial Sequence
  Synthetic oligonucleotide
cgctaaggcgtctatttagtaaatagcgag

SEQ ID NO: 176214 - DNA, 30 bp, Artificial Sequence
  Synthetic oligonucleotide
ttgtagcagcgcatagagtggattagcgag

SEQ ID NO: 176215 - DNA, 30 bp, Artificial Sequence
  Synthetic oligonucleotide
gtgttcgtgatgacgctatcgggccgcgag

SEQ ID NO: 176216 - DNA, 30 bp, Artificial Sequence
  Synthetic oligonucleotide
ttatcgacatcgctaaaccactggcgcgag

SEQ ID NO: 176217 - DNA, 30 bp, Artificial Sequence
  Synthetic oligonucleotide
gaagctgctagtggactaaggtggcgcgag

SEQ ID NO: 176218 - DNA, 30 bp, Artificial Sequence
  Synthetic oligonucleotide
gctcagcctcctgcactctataaaggcgag

SEQ ID NO: 176219 - DNA, 30 bp, Artificial Sequence
  Synthetic oligonucleotide
gtaaccagtcactgcgcaactagaggcgag

SEQ ID NO: 176220 - DNA, 30 bp, Artificial Sequence
  Synthetic oligonucleotide
cagaaacggtatgggtaggtttccggcgag

SEQ ID NO: 176221 - DNA, 30 bp, Artificial Sequence
  Synthetic oligonucleotide
cacgaacgctcacgccacatcgtcggcgag

SEQ ID NO: 176222 - DNA, 30 bp, Artificial Sequence
  Synthetic oligonucleotide
tgacaacatcttttaggggaagcgggcgag

SEQ ID NO: 176223 - DNA, 30 bp, Artificial Sequence
  Synthetic oligonucleotide
acctcgctacgagcattccagcggggcgag

SEQ ID NO: 176224 - DNA, 30 bp, Artificial Sequence
  Synthetic oligonucleotide
ccactacagtattggttatccccatgcgag

SEQ ID NO: 176225 - DNA, 30 bp, Artificial Sequence
  Synthetic oligonucleotide
taattatataggccagttcatgcgtgcgag

SEQ ID NO: 176226 - DNA, 30 bp, Artificial Sequence
  Synthetic oligonucleotide
ttatggaattgaaccgacttatcgtgcgag

SEQ ID NO: 176227 - DNA, 30 bp, Artificial Sequence
  Synthetic oligonucleotide
aacctccaggtaaatctagccataatcgag

SEQ ID NO: 176228 - DNA, 30 bp, Artificial Sequence
  Synthetic oligonucleotide
cggaccctgctgtgggccatgcgtatcgag

SEQ ID NO: 176229 - DNA, 30 bp, Artificial Sequence
  Synthetic oligonucleotide
cttagtgtaccttcaaaacgtggtatcgag

SEQ ID NO: 176230 - DNA, 30 bp, Artificial Sequence
  Synthetic oligonucleotide
ggcggaacagactttgatgggacactcgag

SEQ ID NO: 176231 - DNA, 30 bp, Artificial Sequence
  Synthetic oligonucleotide
ttagtgagtataactgctacgcgactcgag

SEQ ID NO: 176232 - DNA, 30 bp, Artificial Sequence
  Synthetic oligonucleotide
cggtgcccgaatccaaatgggctgctcgag

SEQ ID NO: 176233 - DNA, 30 bp, Artificial Sequence
  Synthetic oligonucleotide
tcagtataggtaactcgcccgcgtctcgag

SEQ ID NO: 176234 - DNA, 30 bp, Artificial Sequence
  Synthetic oligonucleotide
gtttgcgtggttcatcggtaccgagtcgag

SEQ ID NO: 176235 - DNA, 30 bp, Artificial Sequence
  Synthetic oligonucleotide
gcgaaatcaaagatcagtactcttgtcgag

SEQ ID NO: 176236 - DNA, 30 bp, Artificial Sequence
  Synthetic oligonucleotide
cagaagtatggccgattaccgcgattcgag

SEQ ID NO: 176237 - DNA, 30 bp, Artificial Sequence
  Synthetic oligonucleotide
aagcgacgtctagcatctcttcacttcgag

SEQ ID NO: 176238 - DNA, 30 bp, Artificial Sequence
  Synthetic oligonucleotide
agcataacataccaataatgacggttcgag

SEQ ID NO: 176239 - DNA, 30 bp, Artificial Sequence
  Synthetic oligonucleotide
caagccttcccgatgtcctgttggttcgag

SEQ ID NO: 176240 - DNA, 30 bp, Artificial Sequence
  Synthetic oligonucleotide
ttaccctggataaggctatttttgttcgag

SEQ ID NO: 176241 - DNA, 30 bp, Artificial Sequence
  Synthetic oligonucleotide
tcccctcctgatgtaacatcagctttcgag

SEQ ID NO: 176242 - DNA, 30 bp, Artificial Sequence
  Synthetic oligonucleotide
ccgcgttatctaacgagtagtattttcgag

SEQ ID NO: 176243 - DNA, 30 bp, Artificial Sequence
  Synthetic oligonucleotide
tttcccggggacgacacctattgaaaggag

SEQ ID NO: 176244 - DNA, 30 bp, Artificial Sequence
  Synthetic oligonucleotide
gccgtagcggtaggtcaggccaccaaggag

SEQ ID NO: 176245 - DNA, 30 bp, Artificial Sequence
  Synthetic oligonucleotide
aaagcttgaactgtcaatatcaccaaggag

SEQ ID NO: 176246 - DNA, 30 bp, Artificial Sequence
  Synthetic oligonucleotide
gtaacaagatccagctgtggcttcaaggag

SEQ ID NO: 176247 - DNA, 30 bp, Artificial Sequence
  Synthetic oligonucleotide
aggcatttatgtctgctgcaatagaaggag

SEQ ID NO: 176248 - DNA, 30 bp, Artificial Sequence
  Synthetic oligonucleotide
aggattcatcggtctcggtttttgaaggag

SEQ ID NO: 176249 - DNA, 30 bp, Artificial Sequence
  Synthetic oligonucleotide
atgaaggtcgggatcataactgataaggag

SEQ ID NO: 176250 - DNA, 30 bp, Artificial Sequence
  Synthetic oligonucleotide
gaatcactaatgtaattcattcctaaggag

SEQ ID NO: 176251 - DNA, 30 bp, Artificial Sequence
  Synthetic oligonucleotide
gcccggcagtgggcgaacaagaggcaggag

SEQ ID NO: 176252 - DNA, 30 bp, Artificial Sequence
  Synthetic oligonucleotide
aagaggactagccgaggcccctatcaggag

SEQ ID NO: 176253 - DNA, 30 bp, Artificial Sequence
  Synthetic oligonucleotide
tgttgcacaagtggtaatatcattcaggag

SEQ ID NO: 176254 - DNA, 30 bp, Artificial Sequence
  Synthetic oligonucleotide
tgattacccggcgggcgtcaagtggaggag

SEQ ID NO: 176255 - DNA, 30 bp, Artificial Sequence
  Synthetic oligonucleotide
gttatagcgtttgagcatcaggatgaggag

SEQ ID NO: 176256 - DNA, 30 bp, Artificial Sequence
  Synthetic oligonucleotide
tgctaggggtggtagtgatccggataggag

SEQ ID NO: 176257 - DNA, 30 bp, Artificial Sequence
  Synthetic oligonucleotide
cagccactgcaaacttacaggcgctaggag

SEQ ID NO: 176258 - DNA, 30 bp, Artificial Sequence
  Synthetic oligonucleotide
tctcagcggacatctaagagatgctaggag

SEQ ID NO: 176259 - DNA, 30 bp, Artificial Sequence
  Synthetic oligonucleotide
gaagccgcggcgagcgcaaaagcgtaggag

SEQ ID NO: 176260 - DNA, 30 bp, Artificial Sequence
  Synthetic oligonucleotide
ggttttcttgagagatatttaaattaggag

SEQ ID NO: 176261 - DNA, 30 bp, Artificial Sequence
  Synthetic oligonucleotide
gaatcaccgggtaaccaggggtattaggag

SEQ ID NO: 176262 - DNA, 30 bp, Artificial Sequence
  Synthetic oligonucleotide
acaattcggagagactaggttttaacggag

SEQ ID NO: 176263 - DNA, 30 bp, Artificial Sequence
  Synthetic oligonucleotide
gataagtccataatagtaatatacacggag

SEQ ID NO: 176264 - DNA, 30 bp, Artificial Sequence
  Synthetic oligonucleotide
taaaagcggggccgatcacttcggacggag

SEQ ID NO: 176265 - DNA, 30 bp, Artificial Sequence
  Synthetic oligonucleotide
ccaatattactcaaggatgattggacggag

SEQ ID NO: 176266 - DNA, 30 bp, Artificial Sequence
  Synthetic oligonucleotide
atgattggaccaacttcataacgtacggag

SEQ ID NO: 176267 - DNA, 30 bp, Artificial Sequence
  Synthetic oligonucleotide
tcactctttattaaatatgggtacccggag

SEQ ID NO: 176268 - DNA, 30 bp, Artificial Sequence
  Synthetic oligonucleotide
tctaactcaagattagtcgtgaggccggag

SEQ ID NO: 176269 - DNA, 30 bp, Artificial Sequence
  Synthetic oligonucleotide
acccaaggccggttgcttacccatccggag

SEQ ID NO: 176270 - DNA, 30 bp, Artificial Sequence
  Synthetic oligonucleotide
ctccatcgataaagagaaaccgcagcggag

SEQ ID NO: 176271 - DNA, 31 bp, Artificial Sequence
  Synthetic oligonucleotide
gtgtgcttcattggacaacttgtacgcggag

SEQ ID NO: 176272 - DNA, 30 bp, Artificial Sequence
  Synthetic oligonucleotide
ctcatttcgacgtgccggttacccgcggag

SEQ ID NO: 176273 - DNA, 30 bp, Artificial Sequence
  Synthetic oligonucleotide
ccccaatttcctgccgtgtagagggcggag

SEQ ID NO: 176274 - DNA, 30 bp, Artificial Sequence
  Synthetic oligonucleotide
cttaccggaatttgaggtaattgggcggag

SEQ ID NO: 176275 - DNA, 30 bp, Artificial Sequence
  Synthetic oligonucleotide
gtcaggaatgtccttgtatatgtggcggag

SEQ ID NO: 176276 - DNA, 30 bp, Artificial Sequence
  Synthetic oligonucleotide
acttttacagtcaacggactttgtgcggag

SEQ ID NO: 176277 - DNA, 30 bp, Artificial Sequence
  Synthetic oligonucleotide
ttgtagtcgtgggggtcatgggtatcggag

SEQ ID NO: 176278 - DNA, 30 bp, Artificial Sequence
  Synthetic oligonucleotide
ttagggaattatagggcccatttgtcggag

SEQ ID NO: 176279 - DNA, 30 bp, Artificial Sequence
  Synthetic oligonucleotide
tccagacagctggcgaggaaaagttcggag

SEQ ID NO: 176280 - DNA, 30 bp, Artificial Sequence
  Synthetic oligonucleotide
cagagttaaactacttaatgggtaagggag

SEQ ID NO: 176281 - DNA, 30 bp, Artificial Sequence
  Synthetic oligonucleotide
ttcaagaaatgaggttaaatcacgagggag

SEQ ID NO: 176282 - DNA, 30 bp, Artificial Sequence
  Synthetic oligonucleotide
tctcgcaggccggtcatatatggtagggag

SEQ ID NO: 176283 - DNA, 30 bp, Artificial Sequence
  Synthetic oligonucleotide
atcgattcacttgaccttacggaccgggag

SEQ ID NO: 176284 - DNA, 30 bp, Artificial Sequence
  Synthetic oligonucleotide
atggggaagagtaagtctgccctccgggag

SEQ ID NO: 176285 - DNA, 30 bp, Artificial Sequence
  Synthetic oligonucleotide
aacataggataacatatgagacaaggggag

SEQ ID NO: 176286 - DNA, 30 bp, Artificial Sequence
  Synthetic oligonucleotide
tctccccggcgcctgaatgaggaaggggag

SEQ ID NO: 176287 - DNA, 30 bp, Artificial Sequence
  Synthetic oligonucleotide
gagcctctacgacacaataagcatggggag

SEQ ID NO: 176288 - DNA, 30 bp, Artificial Sequence
  Synthetic oligonucleotide
ccgcgacaccggccatgtacgtcatgggag

SEQ ID NO: 176289 - DNA, 30 bp, Artificial Sequence
  Synthetic oligonucleotide
taggaaagggtgatgtcacctaagtgggag

SEQ ID NO: 176290 - DNA, 30 bp, Artificial Sequence
  Synthetic oligonucleotide
ctccgcggtgaagtgatatggatttgggag

SEQ ID NO: 176291 - DNA, 30 bp, Artificial Sequence
  Synthetic oligonucleotide
cgcggttatgttctctgttgaaaaatggag

SEQ ID NO: 176292 - DNA, 30 bp, Artificial Sequence
  Synthetic oligonucleotide
agcaggctgattcaaccgggatccatggag

SEQ ID NO: 176293 - DNA, 30 bp, Artificial Sequence
  Synthetic oligonucleotide
agtggattgcaatttcttatctagatggag

SEQ ID NO: 176294 - DNA, 30 bp, Artificial Sequence
  Synthetic oligonucleotide
acttatggacatgtggattcagttatggag

SEQ ID NO: 176295 - DNA, 30 bp, Artificial Sequence
  Synthetic oligonucleotide
aaagctgcccaggtatcctacaaactggag

SEQ ID NO: 176296 - DNA, 30 bp, Artificial Sequence
  Synthetic oligonucleotide
aatatcgagagcaacccctagaaactggag

SEQ ID NO: 176297 - DNA, 30 bp, Artificial Sequence
  Synthetic oligonucleotide
ttatagggaccggccgacaatgtactggag

SEQ ID NO: 176298 - DNA, 30 bp, Artificial Sequence
  Synthetic oligonucleotide
aggtccatgggctgcaggtgtttcctggag

SEQ ID NO: 176299 - DNA, 30 bp, Artificial Sequence
  Synthetic oligonucleotide
tgcgccagagccccggtaagagatctggag

SEQ ID NO: 176300 - DNA, 30 bp, Artificial Sequence
  Synthetic oligonucleotide
tgcgacatcagaagcgccaccttcgtggag

SEQ ID NO: 176301 - DNA, 31 bp, Artificial Sequence
  Synthetic oligonucleotide
atcacgcgatataatgggacagaatgtggag

SEQ ID NO: 176302 - DNA, 30 bp, Artificial Sequence
  Synthetic oligonucleotide
gggattcggcaggtgccatctactgtggag

SEQ ID NO: 176303 - DNA, 30 bp, Artificial Sequence
  Synthetic oligonucleotide
aaccagtggaggagcgtaaacgtattggag

SEQ ID NO: 176304 - DNA, 30 bp, Artificial Sequence
  Synthetic oligonucleotide
tggatgagataacggggtagtaggttggag

SEQ ID NO: 176305 - DNA, 30 bp, Artificial Sequence
  Synthetic oligonucleotide
cttagagaaagcggatgacttagtttggag

SEQ ID NO: 176306 - DNA, 30 bp, Artificial Sequence
  Synthetic oligonucleotide
cagtgtaataggggctattttcaaaatgag

SEQ ID NO: 176307 - DNA, 30 bp, Artificial Sequence
  Synthetic oligonucleotide
ggaaatctatggatctaaaggaacaatgag

SEQ ID NO: 176308 - DNA, 30 bp, Artificial Sequence
  Synthetic oligonucleotide
catttagtagacaagtgggttttcaatgag

SEQ ID NO: 176309 - DNA, 30 bp, Artificial Sequence
  Synthetic oligonucleotide
acatctgccaccacagttgttaaacatgag

SEQ ID NO: 176310 - DNA, 30 bp, Artificial Sequence
  Synthetic oligonucleotide
atgcccctgaccaatttaggggggcatgag

SEQ ID NO: 176311 - DNA, 30 bp, Artificial Sequence
  Synthetic oligonucleotide
ttaccgtaatggtcaaacagggatcatgag

SEQ ID NO: 176312 - DNA, 30 bp, Artificial Sequence
  Synthetic oligonucleotide
gcgtcccaataaatttacccgcctcatgag

SEQ ID NO: 176313 - DNA, 30 bp, Artificial Sequence
  Synthetic oligonucleotide
tgcgcgactaatataacggaggttcatgag

SEQ ID NO: 176314 - DNA, 30 bp, Artificial Sequence
  Synthetic oligonucleotide
cgacacatcgtattagtagaagtagatgag

SEQ ID NO: 176315 - DNA, 30 bp, Artificial Sequence
  Synthetic oligonucleotide
aaagatggatgtcgagagtaaatcgatgag

SEQ ID NO: 176316 - DNA, 30 bp, Artificial Sequence
  Synthetic oligonucleotide
ctgtcacttaggtgggctacacttgatgag

SEQ ID NO: 176317 - DNA, 30 bp, Artificial Sequence
  Synthetic oligonucleotide
gaaagcagggcccatgacgatcgatatgag

SEQ ID NO: 176318 - DNA, 30 bp, Artificial Sequence
  Synthetic oligonucleotide
tcagccaggtaactaccgcctatctatgag

SEQ ID NO: 176319 - DNA, 30 bp, Artificial Sequence
  Synthetic oligonucleotide
tagagtaaatacgacaattagtaaactgag

SEQ ID NO: 176320 - DNA, 30 bp, Artificial Sequence
  Synthetic oligonucleotide
ataacagacgtgttctgtctaggtactgag

SEQ ID NO: 176321 - DNA, 30 bp, Artificial Sequence
  Synthetic oligonucleotide
ggcatgcagcatagggacgtatgtactgag

SEQ ID NO: 176322 - DNA, 30 bp, Artificial Sequence
  Synthetic oligonucleotide
catggggttgcagattgagtctgtactgag

SEQ ID NO: 176323 - DNA, 30 bp, Artificial Sequence
  Synthetic oligonucleotide
gtagaatgacccgcataatcttgtactgag

SEQ ID NO: 176324 - DNA, 30 bp, Artificial Sequence
  Synthetic oligonucleotide
ggttagatttttcagtgggtaatacctgag

SEQ ID NO: 176325 - DNA, 30 bp, Artificial Sequence
  Synthetic oligonucleotide
acactcctcatcgccgaggagggggctgag

SEQ ID NO: 176326 - DNA, 30 bp, Artificial Sequence
  Synthetic oligonucleotide
gccttctcctaacgtgaggcgtcatctgag

SEQ ID NO: 176327 - DNA, 30 bp, Artificial Sequence
  Synthetic oligonucleotide
tcttaaatttttgatgtgaccaggtctgag

SEQ ID NO: 176328 - DNA, 30 bp, Artificial Sequence
  Synthetic oligonucleotide
gggtaaaatagtttgaataattgttctgag

SEQ ID NO: 176329 - DNA, 30 bp, Artificial Sequence
  Synthetic oligonucleotide
gtgggaaaggcgtttttaaatgggagtgag

SEQ ID NO: 176330 - DNA, 30 bp, Artificial Sequence
  Synthetic oligonucleotide
tctgtgatagtccgtggttctcctcgtgag

SEQ ID NO: 176331 - DNA, 30 bp, Artificial Sequence
  Synthetic oligonucleotide
taatggagacgataatgcccatttcgtgag

SEQ ID NO: 176332 - DNA, 30 bp, Artificial Sequence
  Synthetic oligonucleotide
ttgtgggagccagtgatcgttttaggtgag

SEQ ID NO: 176333 - DNA, 30 bp, Artificial Sequence
  Synthetic oligonucleotide
gacgtcaccagaatggtagacctgggtgag

SEQ ID NO: 176334 - DNA, 30 bp, Artificial Sequence
  Synthetic oligonucleotide
aactgcctggcgatcacctaagtgggtgag

SEQ ID NO: 176335 - DNA, 30 bp, Artificial Sequence
  Synthetic oligonucleotide
gtggtgattctaaactgggcagatggtgag

SEQ ID NO: 176336 - DNA, 30 bp, Artificial Sequence
  Synthetic oligonucleotide
taataaggaatcccacaaatgtactgtgag

SEQ ID NO: 176337 - DNA, 30 bp, Artificial Sequence
  Synthetic oligonucleotide
tgcagtttgatttactggccttcctgtgag

SEQ ID NO: 176338 - DNA, 30 bp, Artificial Sequence
  Synthetic oligonucleotide
gacttgtgtacaactatactcaagtgtgag

SEQ ID NO: 176339 - DNA, 30 bp, Artificial Sequence
  Synthetic oligonucleotide
aggttttccaagaaccattctgtcattgag

SEQ ID NO: 176340 - DNA, 30 bp, Artificial Sequence
  Synthetic oligonucleotide
aagtttcgggtgctaaaaatatggattgag

SEQ ID NO: 176341 - DNA, 30 bp, Artificial Sequence
  Synthetic oligonucleotide
cccgtcaaagcacctctttccctgattgag

SEQ ID NO: 176342 - DNA, 30 bp, Artificial Sequence
  Synthetic oligonucleotide
cattccacgcgtgctccgccaaatattgag

SEQ ID NO: 176343 - DNA, 30 bp, Artificial Sequence
  Synthetic oligonucleotide
acggtaccttccggcacctcacatattgag

SEQ ID NO: 176344 - DNA, 30 bp, Artificial Sequence
  Synthetic oligonucleotide
cgtgaaaaagtgaacggcacttttattgag

SEQ ID NO: 176345 - DNA, 30 bp, Artificial Sequence
  Synthetic oligonucleotide
atcgcatccgcgctgctatgccgccttgag

SEQ ID NO: 176346 - DNA, 30 bp, Artificial Sequence
  Synthetic oligonucleotide
gcctcgtcggaacgtgtccacttccttgag

SEQ ID NO: 176347 - DNA, 30 bp, Artificial Sequence
  Synthetic oligonucleotide
gaggaaatactggatattgtgttccttgag

SEQ ID NO: 176348 - DNA, 30 bp, Artificial Sequence
  Synthetic oligonucleotide
tccgtgctgacggcgcacgcgaggcttgag

SEQ ID NO: 176349 - DNA, 30 bp, Artificial Sequence
  Synthetic oligonucleotide
cactcaaaaggtgatgtgcgaatgcttgag

SEQ ID NO: 176350 - DNA, 30 bp, Artificial Sequence
  Synthetic oligonucleotide
aatgaaggttaccggaaaaaactgcttgag

SEQ ID NO: 176351 - DNA, 30 bp, Artificial Sequence
  Synthetic oligonucleotide
cagacccagatgtttgggatccttcttgag

SEQ ID NO: 176352 - DNA, 30 bp, Artificial Sequence
  Synthetic oligonucleotide
ctatatgtgggctagcgtgccgacgttgag

SEQ ID NO: 176353 - DNA, 30 bp, Artificial Sequence
  Synthetic oligonucleotide
accgttaacatttactgtttttaggttgag

SEQ ID NO: 176354 - DNA, 30 bp, Artificial Sequence
  Synthetic oligonucleotide
gcatcaagtgtagtacagatcgcggttgag

SEQ ID NO: 176355 - DNA, 30 bp, Artificial Sequence
  Synthetic oligonucleotide
aggccggttgggctagtcgcttgggttgag

SEQ ID NO: 176356 - DNA, 30 bp, Artificial Sequence
  Synthetic oligonucleotide
tttctaatgtgagatgataagtattttgag

SEQ ID NO: 176357 - DNA, 30 bp, Artificial Sequence
  Synthetic oligonucleotide
ttgtagcatttatatactgaacgttttgag

SEQ ID NO: 176358 - DNA, 30 bp, Artificial Sequence
  Synthetic oligonucleotide
gacaatagagatcgttccaggtacaaatag

SEQ ID NO: 176359 - DNA, 30 bp, Artificial Sequence
  Synthetic oligonucleotide
aaattgaggtaggtttgtactgccaaatag

SEQ ID NO: 176360 - DNA, 30 bp, Artificial Sequence
  Synthetic oligonucleotide
tcgcaaattgcttgttcctaacgcaaatag

SEQ ID NO: 176361 - DNA, 30 bp, Artificial Sequence
  Synthetic oligonucleotide
ataacggggtgggtttgaaccagtaaatag

SEQ ID NO: 176362 - DNA, 30 bp, Artificial Sequence
  Synthetic oligonucleotide
ccttaaagagttacaccgatggcccaatag

SEQ ID NO: 176363 - DNA, 30 bp, Artificial Sequence
  Synthetic oligonucleotide
gacttacaggattccgatatacgggaatag

SEQ ID NO: 176364 - DNA, 30 bp, Artificial Sequence
  Synthetic oligonucleotide
gacaccgttattatagtctttgatgaatag

SEQ ID NO: 176365 - DNA, 30 bp, Artificial Sequence
  Synthetic oligonucleotide
ttgtcattggtctttctcaccgttgaatag

SEQ ID NO: 176366 - DNA, 30 bp, Artificial Sequence
  Synthetic oligonucleotide
ctgtaagacaacgcggctggggttgaatag

SEQ ID NO: 176367 - DNA, 30 bp, Artificial Sequence
  Synthetic oligonucleotide
agagttctgtcgacacgaatggagtaatag

SEQ ID NO: 176368 - DNA, 30 bp, Artificial Sequence
  Synthetic oligonucleotide
taatgacaggtttgttgtcaatagtaatag

SEQ ID NO: 176369 - DNA, 30 bp, Artificial Sequence
  Synthetic oligonucleotide
tagaaggattggtgagaaaaagattaatag

SEQ ID NO: 176370 - DNA, 30 bp, Artificial Sequence
  Synthetic oligonucleotide
gcacgggcaatgtgtgcgcgggaaacatag

SEQ ID NO: 176371 - DNA, 30 bp, Artificial Sequence
  Synthetic oligonucleotide
tgatcggcggcctgtggcgattgaacatag

SEQ ID NO: 176372 - DNA, 30 bp, Artificial Sequence
  Synthetic oligonucleotide
tgaatacggatctagattagatccccatag

SEQ ID NO: 176373 - DNA, 30 bp, Artificial Sequence
  Synthetic oligonucleotide
ttcattatcgggttcccagagagcccatag

SEQ ID NO: 176374 - DNA, 30 bp, Artificial Sequence
  Synthetic oligonucleotide
agattatctcatacggtgggtttcccatag

SEQ ID NO: 176375 - DNA, 30 bp, Artificial Sequence
  Synthetic oligonucleotide
caggctctagcactctgtgaatcagcatag

SEQ ID NO: 176376 - DNA, 30 bp, Artificial Sequence
  Synthetic oligonucleotide
tcctattgttggctaaattctatagcatag

SEQ ID NO: 176377 - DNA, 30 bp, Artificial Sequence
  Synthetic oligonucleotide
ataactcttacaagcttttgattcgcatag

SEQ ID NO: 176378 - DNA, 30 bp, Artificial Sequence
  Synthetic oligonucleotide
ctccttaaaagggactcaggtctatcatag

SEQ ID NO: 176379 - DNA, 30 bp, Artificial Sequence
  Synthetic oligonucleotide
cttatgaatgctaaacaattcaactcatag

SEQ ID NO: 176380 - DNA, 30 bp, Artificial Sequence
  Synthetic oligonucleotide
aggagtcaagccgatcatgtcttctcatag

SEQ ID NO: 176381 - DNA, 30 bp, Artificial Sequence
  Synthetic oligonucleotide
ggtgagtcaactctattgggatcgtcatag

SEQ ID NO: 176382 - DNA, 30 bp, Artificial Sequence
  Synthetic oligonucleotide
tgccatatgtgcttccactcccaaagatag

SEQ ID NO: 176383 - DNA, 30 bp, Artificial Sequence
  Synthetic oligonucleotide
actctcgctaaacggccccgcgaaagatag

SEQ ID NO: 176384 - DNA, 30 bp, Artificial Sequence
  Synthetic oligonucleotide
attacccagctaatgtctatagcgagatag

SEQ ID NO: 176385 - DNA, 30 bp, Artificial Sequence
  Synthetic oligonucleotide
aaggacccgaagcggctacttaatagatag

SEQ ID NO: 176386 - DNA, 30 bp, Artificial Sequence
  Synthetic oligonucleotide
ccagacgtctcgtccctataaggtagatag

SEQ ID NO: 176387 - DNA, 30 bp, Artificial Sequence
  Synthetic oligonucleotide
cagccaggctttcaaccaatcattagatag

SEQ ID NO: 176388 - DNA, 30 bp, Artificial Sequence
  Synthetic oligonucleotide
tcagacaggaacccaccacctcaccgatag

SEQ ID NO: 176389 - DNA, 30 bp, Artificial Sequence
  Synthetic oligonucleotide
accgtattgtctgagggtaggtgccgatag

SEQ ID NO: 176390 - DNA, 30 bp, Artificial Sequence
  Synthetic oligonucleotide
atagcagtttaggaatgacattcgcgatag

SEQ ID NO: 176391 - DNA, 30 bp, Artificial Sequence
  Synthetic oligonucleotide
gagttgcggaaatcaagcgccgtgcgatag

SEQ ID NO: 176392 - DNA, 30 bp, Artificial Sequence
  Synthetic oligonucleotide
tagtgaagcttccatgattcctaaggatag

SEQ ID NO: 176393 - DNA, 30 bp, Artificial Sequence
  Synthetic oligonucleotide
tatgacagcgggaagacatacgggggatag

SEQ ID NO: 176394 - DNA, 30 bp, Artificial Sequence
  Synthetic oligonucleotide
tcaggtgttaattatggcggagtgggatag

SEQ ID NO: 176395 - DNA, 30 bp, Artificial Sequence
  Synthetic oligonucleotide
tcaaagattttgaaaggggcgaatggatag

SEQ ID NO: 176396 - DNA, 30 bp, Artificial Sequence
  Synthetic oligonucleotide
cacattagaggcccaacgggagttggatag

SEQ ID NO: 176397 - DNA, 30 bp, Artificial Sequence
  Synthetic oligonucleotide
ggcattgtaggtgtgaaagttaactgatag

SEQ ID NO: 176398 - DNA, 30 bp, Artificial Sequence
  Synthetic oligonucleotide
taattgaggcggatgatacattattgatag

SEQ ID NO: 176399 - DNA, 29 bp, Artificial Sequence
  Synthetic oligonucleotide
acgttcgtcttcgacagatagcaatatag

SEQ ID NO: 176400 - DNA, 30 bp, Artificial Sequence
  Synthetic oligonucleotide
tgaactcatactaaatgtggcaacatatag

SEQ ID NO: 176401 - DNA, 30 bp, Artificial Sequence
  Synthetic oligonucleotide
gcgtgatgtagcttgacgtgtcacatatag

SEQ ID NO: 176402 - DNA, 30 bp, Artificial Sequence
  Synthetic oligonucleotide
gtttgtcccaggagacagtcccgcatatag

SEQ ID NO: 176403 - DNA, 30 bp, Artificial Sequence
  Synthetic oligonucleotide
ccacgtagggtgtctggtagttggatatag

SEQ ID NO: 176404 - DNA, 30 bp, Artificial Sequence
  Synthetic oligonucleotide
tcgcacgcgaatagcatcttgcgtatatag

SEQ ID NO: 176405 - DNA, 30 bp, Artificial Sequence
  Synthetic oligonucleotide
cgtacatcgtcatccggtcaagtactatag

SEQ ID NO: 176406 - DNA, 30 bp, Artificial Sequence
  Synthetic oligonucleotide
ccaatctgggccgtccagagcatcctatag

SEQ ID NO: 176407 - DNA, 30 bp, Artificial Sequence
  Synthetic oligonucleotide
catccggccggtggatttaaagtcctatag

SEQ ID NO: 176408 - DNA, 30 bp, Artificial Sequence
  Synthetic oligonucleotide
gtccatgacatccacaacaatccgctatag

SEQ ID NO: 176409 - DNA, 30 bp, Artificial Sequence
  Synthetic oligonucleotide
tgatccctgtcggcaggacagatgctatag

SEQ ID NO: 176410 - DNA, 30 bp, Artificial Sequence
  Synthetic oligonucleotide
aaatcgaagtaagtaagggtataagtatag

SEQ ID NO: 176411 - DNA, 30 bp, Artificial Sequence
  Synthetic oligonucleotide
agaaagcttgggtttaacaaggaggtatag

SEQ ID NO: 176412 - DNA, 30 bp, Artificial Sequence
  Synthetic oligonucleotide
gctgttgaaaccaagtagatcatggtatag

SEQ ID NO: 176413 - DNA, 30 bp, Artificial Sequence
  Synthetic oligonucleotide
agtggttaatatttcctctaggatgtatag

SEQ ID NO: 176414 - DNA, 30 bp, Artificial Sequence
  Synthetic oligonucleotide
atacactgtcatcaaccttgggatgtatag

SEQ ID NO: 176415 - DNA, 30 bp, Artificial Sequence
  Synthetic oligonucleotide
ttagaacatatgaataagctgggtgtatag

SEQ ID NO: 176416 - DNA, 30 bp, Artificial Sequence
  Synthetic oligonucleotide
aaacaggctttggcccggagtgcgttatag

SEQ ID NO: 176417 - DNA, 30 bp, Artificial Sequence
  Synthetic oligonucleotide
ttggagtatagcatctcgacgtatttatag

SEQ ID NO: 176418 - DNA, 30 bp, Artificial Sequence
  Synthetic oligonucleotide
gcctcatccgttcctcaaaggttcaactag

SEQ ID NO: 176419 - DNA, 30 bp, Artificial Sequence
  Synthetic oligonucleotide
tcacgatggctccgcacgaccctgcactag

SEQ ID NO: 176420 - DNA, 30 bp, Artificial Sequence
  Synthetic oligonucleotide
tggtaagagcgggatggatccggagactag

SEQ ID NO: 176421 - DNA, 30 bp, Artificial Sequence
  Synthetic oligonucleotide
atgccatcaaggaacaactgcttcgactag

SEQ ID NO: 176422 - DNA, 30 bp, Artificial Sequence
  Synthetic oligonucleotide
cgaatttcacatggccactaaacggactag

SEQ ID NO: 176423 - DNA, 30 bp, Artificial Sequence
  Synthetic oligonucleotide
acatatgcgcctacctcagggacggactag

SEQ ID NO: 176424 - DNA, 30 bp, Artificial Sequence
  Synthetic oligonucleotide
ttcgagcggcacataccttatggtgactag

SEQ ID NO: 176425 - DNA, 30 bp, Artificial Sequence
  Synthetic oligonucleotide
gtattagctgttacaaagagctactactag

SEQ ID NO: 176426 - DNA, 30 bp, Artificial Sequence
  Synthetic oligonucleotide
atggaaagctgaaatcattttgtgtactag

SEQ ID NO: 176427 - DNA, 30 bp, Artificial Sequence
  Synthetic oligonucleotide
cagacaattcagtggcgttcatcttactag

SEQ ID NO: 176428 - DNA, 30 bp, Artificial Sequence
  Synthetic oligonucleotide
agatagtgcttcgcagagagcaatacctag

SEQ ID NO: 176429 - DNA, 30 bp, Artificial Sequence
  Synthetic oligonucleotide
ggtgctactgcatctggtattattacctag

SEQ ID NO: 176430 - DNA, 30 bp, Artificial Sequence
  Synthetic oligonucleotide
taaaggtactggtaatcgagcgagccctag

SEQ ID NO: 176431 - DNA, 30 bp, Artificial Sequence
  Synthetic oligonucleotide
attgagagtcacttgtagtctgatccctag

SEQ ID NO: 176432 - DNA, 30 bp, Artificial Sequence
  Synthetic oligonucleotide
gccatcaacgaagaccgcaggattccctag

SEQ ID NO: 176433 - DNA, 30 bp, Artificial Sequence
  Synthetic oligonucleotide
tgttgtccggatcttatggcaaaagcctag

SEQ ID NO: 176434 - DNA, 30 bp, Artificial Sequence
  Synthetic oligonucleotide
aggtttgcgaacgcaagcgggtccgcctag

SEQ ID NO: 176435 - DNA, 30 bp, Artificial Sequence
  Synthetic oligonucleotide
catggggactacgaggtaacgtaggcctag

SEQ ID NO: 176436 - DNA, 30 bp, Artificial Sequence
  Synthetic oligonucleotide
tttaggcgaaaatgccggcgaatggcctag

SEQ ID NO: 176437 - DNA, 30 bp, Artificial Sequence
  Synthetic oligonucleotide
gttgacttggtctctatgtggatggcctag

SEQ ID NO: 176438 - DNA, 30 bp, Artificial Sequence
  Synthetic oligonucleotide
ccacatagggacgagtgaaagcatgcctag

SEQ ID NO: 176439 - DNA, 30 bp, Artificial Sequence
  Synthetic oligonucleotide
gttaaccagggaaaccaatagtatgcctag

SEQ ID NO: 176440 - DNA, 30 bp, Artificial Sequence
  Synthetic oligonucleotide
gccaagaagtggcgggataggtctgcctag

SEQ ID NO: 176441 - DNA, 30 bp, Artificial Sequence
  Synthetic oligonucleotide
ctgcattcctggtggatactgtaatcctag

SEQ ID NO: 176442 - DNA, 30 bp, Artificial Sequence
  Synthetic oligonucleotide
tcgtgtatatcactcctaacgtggtcctag

SEQ ID NO: 176443 - DNA, 30 bp, Artificial Sequence
  Synthetic oligonucleotide
tttggccgatagggtgttatcatttcctag

SEQ ID NO: 176444 - DNA, 30 bp, Artificial Sequence
  Synthetic oligonucleotide
tacccggactcggactgggtcaccagctag

SEQ ID NO: 176445 - DNA, 30 bp, Artificial Sequence
  Synthetic oligonucleotide
caatcatgggtcctgtggtgtggcagctag

SEQ ID NO: 176446 - DNA, 30 bp, Artificial Sequence
  Synthetic oligonucleotide
gtcggtgtatcaaggcatgttttcagctag

SEQ ID NO: 176447 - DNA, 31 bp, Artificial Sequence
  Synthetic oligonucleotide
cattgtcatcggaagtgaggatagccgctag

SEQ ID NO: 176448 - DNA, 30 bp, Artificial Sequence
  Synthetic oligonucleotide
caacagtcggtttgtagaggtgcaggctag

SEQ ID NO: 176449 - DNA, 30 bp, Artificial Sequence
  Synthetic oligonucleotide
gggtatatcgtgttataatgttcgtgctag

SEQ ID NO: 176450 - DNA, 30 bp, Artificial Sequence
  Synthetic oligonucleotide
tgactgacttacacaataatgagttgctag

SEQ ID NO: 176451 - DNA, 30 bp, Artificial Sequence
  Synthetic oligonucleotide
gctgaaaagctggatttacatcaaatctag

SEQ ID NO: 176452 - DNA, 30 bp, Artificial Sequence
  Synthetic oligonucleotide
gcgtcacattgtatgtcaccggggatctag

SEQ ID NO: 176453 - DNA, 30 bp, Artificial Sequence
  Synthetic oligonucleotide
cgggataacttgcacagttcgaatatctag

SEQ ID NO: 176454 - DNA, 30 bp, Artificial Sequence
  Synthetic oligonucleotide
ggtagcgaagctaagctacagtctatctag

SEQ ID NO: 176455 - DNA, 30 bp, Artificial Sequence
  Synthetic oligonucleotide
aactagaatttttcgaacttagagctctag

SEQ ID NO: 176456 - DNA, 30 bp, Artificial Sequence
  Synthetic oligonucleotide
catcgggtgacatattgggatacgctctag

SEQ ID NO: 176457 - DNA, 30 bp, Artificial Sequence
  Synthetic oligonucleotide
gaggttatgtctgggagtaataggctctag

SEQ ID NO: 176458 - DNA, 31 bp, Artificial Sequence
  Synthetic oligonucleotide
agtgggtgatcagatccgcccgtgcgtctag

SEQ ID NO: 176459 - DNA, 30 bp, Artificial Sequence
  Synthetic oligonucleotide
aagacacatagacatattaggtgcgtctag

SEQ ID NO: 176460 - DNA, 30 bp, Artificial Sequence
  Synthetic oligonucleotide
ttaacaatgtatttttgatcttgcgtctag

SEQ ID NO: 176461 - DNA, 30 bp, Artificial Sequence
  Synthetic oligonucleotide
aaaatcacaccggcgaaggatcgggtctag

SEQ ID NO: 176462 - DNA, 30 bp, Artificial Sequence
  Synthetic oligonucleotide
caagaacttttttgtgtggcttgggtctag

SEQ ID NO: 176463 - DNA, 30 bp, Artificial Sequence
  Synthetic oligonucleotide
gtacgtattatatggaaagtattggtctag

SEQ ID NO: 176464 - DNA, 30 bp, Artificial Sequence
  Synthetic oligonucleotide
acggccatacgattaaggttacgtgtctag

SEQ ID NO: 176465 - DNA, 30 bp, Artificial Sequence
  Synthetic oligonucleotide
gacagtgatccaatcatacaacttgtctag

SEQ ID NO: 176466 - DNA, 30 bp, Artificial Sequence
  Synthetic oligonucleotide
attcgaggacaatgtccaacacttgtctag

SEQ ID NO: 176467 - DNA, 30 bp, Artificial Sequence
  Synthetic oligonucleotide
taacaaagggtcaaaccgcactgcttctag

SEQ ID NO: 176468 - DNA, 30 bp, Artificial Sequence
  Synthetic oligonucleotide
aatacgacggtccgtcatgcaacaaagtag

SEQ ID NO: 176469 - DNA, 30 bp, Artificial Sequence
  Synthetic oligonucleotide
tcgagctaggcatccttattgggaaagtag

SEQ ID NO: 176470 - DNA, 30 bp, Artificial Sequence
  Synthetic oligonucleotide
tggagatccttgatgggtctccacaagtag

SEQ ID NO: 176471 - DNA, 30 bp, Artificial Sequence
  Synthetic oligonucleotide
aacattcttagcgtaaaggaaaccaagtag

SEQ ID NO: 176472 - DNA, 30 bp, Artificial Sequence
  Synthetic oligonucleotide
tcatccgcaggatacggcccgcctaagtag

SEQ ID NO: 176473 - DNA, 30 bp, Artificial Sequence
  Synthetic oligonucleotide
ataaatggttaacttgttccacaacagtag

SEQ ID NO: 176474 - DNA, 30 bp, Artificial Sequence
  Synthetic oligonucleotide
gggaccatttgcccagacgtactacagtag

SEQ ID NO: 176475 - DNA, 30 bp, Artificial Sequence
  Synthetic oligonucleotide
acactggattaccaactatctaagcagtag

SEQ ID NO: 176476 - DNA, 30 bp, Artificial Sequence
  Synthetic oligonucleotide
gccagggtgccgatactggggatgcagtag

SEQ ID NO: 176477 - DNA, 30 bp, Artificial Sequence
  Synthetic oligonucleotide
ctagaccgtgtagcatcaccagctcagtag

SEQ ID NO: 176478 - DNA, 30 bp, Artificial Sequence
  Synthetic oligonucleotide
tcttcagaatattctggtttcgaagagtag

SEQ ID NO: 176479 - DNA, 30 bp, Artificial Sequence
  Synthetic oligonucleotide
caccggaattttcgctaccgattcgagtag

SEQ ID NO: 176480 - DNA, 30 bp, Artificial Sequence
  Synthetic oligonucleotide
ttgagattacttgattgtcttttcgagtag

SEQ ID NO: 176481 - DNA, 30 bp, Artificial Sequence
  Synthetic oligonucleotide
ggatgtgacaacgtcaaagagcaggagtag

SEQ ID NO: 176482 - DNA, 30 bp, Artificial Sequence
  Synthetic oligonucleotide
agaagccccctgcccgtcactcgggagtag

SEQ ID NO: 176483 - DNA, 30 bp, Artificial Sequence
  Synthetic oligonucleotide
gcgcagaccggcaacttggctcggtagtag

SEQ ID NO: 176484 - DNA, 30 bp, Artificial Sequence
  Synthetic oligonucleotide
ttacgtaagctcttgctcatcctgtagtag

SEQ ID NO: 176485 - DNA, 30 bp, Artificial Sequence
  Synthetic oligonucleotide
cccgctagtcctgtggtcaaagattagtag

SEQ ID NO: 176486 - DNA, 30 bp, Artificial Sequence
  Synthetic oligonucleotide
aagtagtagacagaggagcgaccttagtag

SEQ ID NO: 176487 - DNA, 30 bp, Artificial Sequence
  Synthetic oligonucleotide
ggctgatatgcaggcgcccccagttagtag

SEQ ID NO: 176488 - DNA, 30 bp, Artificial Sequence
  Synthetic oligonucleotide
ttcggatgaattccgttgaccatttagtag

SEQ ID NO: 176489 - DNA, 30 bp, Artificial Sequence
  Synthetic oligonucleotide
gagcagagcgaagggtttgacaaaacgtag

SEQ ID NO: 176490 - DNA, 30 bp, Artificial Sequence
  Synthetic oligonucleotide
gatacacgaagaataaagtcgcaaacgtag

SEQ ID NO: 176491 - DNA, 30 bp, Artificial Sequence
  Synthetic oligonucleotide
tgagctgttactaagatattaagtacgtag

SEQ ID NO: 176492 - DNA, 30 bp, Artificial Sequence
  Synthetic oligonucleotide
cccgatgactaacactgaacgggaccgtag

SEQ ID NO: 176493 - DNA, 30 bp, Artificial Sequence
  Synthetic oligonucleotide
atgatgaggggattcaattttagagcgtag

SEQ ID NO: 176494 - DNA, 30 bp, Artificial Sequence
  Synthetic oligonucleotide
cccatcggtgagcttatcgcctgagcgtag

SEQ ID NO: 176495 - DNA, 30 bp, Artificial Sequence
  Synthetic oligonucleotide
ccggggggttggattctcagctccgcgtag

SEQ ID NO: 176496 - DNA, 30 bp, Artificial Sequence
  Synthetic oligonucleotide
atctgaaaatcatcagcccatctcgcgtag

SEQ ID NO: 176497 - DNA, 30 bp, Artificial Sequence
  Synthetic oligonucleotide
tccgcagtgtgatccagtacacatgcgtag

SEQ ID NO: 176498 - DNA, 30 bp, Artificial Sequence
  Synthetic oligonucleotide
cgattattcggacaagcggttagtgcgtag

SEQ ID NO: 176499 - DNA, 30 bp, Artificial Sequence
  Synthetic oligonucleotide
atcgtgctttaaagagtaaggtgatcgtag

SEQ ID NO: 176500 - DNA, 30 bp, Artificial Sequence
  Synthetic oligonucleotide
tctagcaactcgtggcacgatgcctcgtag

SEQ ID NO: 176501 - DNA, 30 bp, Artificial Sequence
  Synthetic oligonucleotide
agggtcggtcgggcgcccaggctgtcgtag

SEQ ID NO: 176502 - DNA, 30 bp, Artificial Sequence
  Synthetic oligonucleotide
ccagccggaaccctaatactgcgttcgtag

SEQ ID NO: 176503 - DNA, 30 bp, Artificial Sequence
  Synthetic oligonucleotide
cgtggtccgtcgtgcagcttagaaaggtag

SEQ ID NO: 176504 - DNA, 30 bp, Artificial Sequence
  Synthetic oligonucleotide
tccaacaatggatttagcaaaataaggtag

SEQ ID NO: 176505 - DNA, 30 bp, Artificial Sequence
  Synthetic oligonucleotide
ccggcactagtgaagattaggccacggtag

SEQ ID NO: 176506 - DNA, 30 bp, Artificial Sequence
  Synthetic oligonucleotide
tccggtgcggacctcgaacctcaccggtag

SEQ ID NO: 176507 - DNA, 30 bp, Artificial Sequence
  Synthetic oligonucleotide
gggacacttgtttccgtactcatccggtag

SEQ ID NO: 176508 - DNA, 30 bp, Artificial Sequence
  Synthetic oligonucleotide
acaatggataggagtacaggtacgcggtag

SEQ ID NO: 176509 - DNA, 30 bp, Artificial Sequence
  Synthetic oligonucleotide
taccggcgtacacccccaacttggcggtag

SEQ ID NO: 176510 - DNA, 30 bp, Artificial Sequence
  Synthetic oligonucleotide
ggccttaacttttatacattgtaagggtag

SEQ ID NO: 176511 - DNA, 30 bp, Artificial Sequence
  Synthetic oligonucleotide
tatagtgtcctatcatgagggaacgggtag

SEQ ID NO: 176512 - DNA, 30 bp, Artificial Sequence
  Synthetic oligonucleotide
gcctcttacctggggagcggggacgggtag

SEQ ID NO: 176513 - DNA, 30 bp, Artificial Sequence
  Synthetic oligonucleotide
cacgtaaaagggttggcacttatcgggtag

SEQ ID NO: 176514 - DNA, 30 bp, Artificial Sequence
  Synthetic oligonucleotide
gcttggaggccacttgtcaaaccggggtag

SEQ ID NO: 176515 - DNA, 30 bp, Artificial Sequence
  Synthetic oligonucleotide
atttcgaaagatcttacggtacttgggtag

SEQ ID NO: 176516 - DNA, 30 bp, Artificial Sequence
  Synthetic oligonucleotide
gatattcagtgtctcggaattacatggtag

SEQ ID NO: 176517 - DNA, 30 bp, Artificial Sequence
  Synthetic oligonucleotide
gatcggttctggttgttcccaatatggtag

SEQ ID NO: 176518 - DNA, 30 bp, Artificial Sequence
  Synthetic oligonucleotide
ggcaccggtcaataacagtggaggtggtag

SEQ ID NO: 176519 - DNA, 30 bp, Artificial Sequence
  Synthetic oligonucleotide
aagagtcagtgatgaatagtagattggtag

SEQ ID NO: 176520 - DNA, 30 bp, Artificial Sequence
  Synthetic oligonucleotide
cgtgcctggccaaagctaactacttggtag

SEQ ID NO: 176521 - DNA, 30 bp, Artificial Sequence
  Synthetic oligonucleotide
ttcgtgttaaacgaaggcttgttttggtag

SEQ ID NO: 176522 - DNA, 30 bp, Artificial Sequence
  Synthetic oligonucleotide
caccaacaagactggtttatgagcatgtag

SEQ ID NO: 176523 - DNA, 30 bp, Artificial Sequence
  Synthetic oligonucleotide
ctgatcgggtaaatacctaaaaagatgtag

SEQ ID NO: 176524 - DNA, 30 bp, Artificial Sequence
  Synthetic oligonucleotide
ttgcggaggtatgcaattcctaagatgtag

SEQ ID NO: 176525 - DNA, 30 bp, Artificial Sequence
  Synthetic oligonucleotide
ttgctagtttagaagaagcgtacgatgtag

SEQ ID NO: 176526 - DNA, 30 bp, Artificial Sequence
  Synthetic oligonucleotide
gagccggggtcgcgagccggagtactgtag

SEQ ID NO: 176527 - DNA, 30 bp, Artificial Sequence
  Synthetic oligonucleotide
ctataatgaaccaaaactactcccctgtag

SEQ ID NO: 176528 - DNA, 30 bp, Artificial Sequence
  Synthetic oligonucleotide
gaaaaaaatggccctctgcaggagctgtag

SEQ ID NO: 176529 - DNA, 30 bp, Artificial Sequence
  Synthetic oligonucleotide
gacgggccagaaggtgtgctccggctgtag

SEQ ID NO: 176530 - DNA, 30 bp, Artificial Sequence
  Synthetic oligonucleotide
ggccccctcggaaagagagttcatctgtag

SEQ ID NO: 176531 - DNA, 30 bp, Artificial Sequence
  Synthetic oligonucleotide
acgtaatagtggggacccgctgatctgtag

SEQ ID NO: 176532 - DNA, 30 bp, Artificial Sequence
  Synthetic oligonucleotide
acgtctcgaccgggacgcaccggagtgtag

SEQ ID NO: 176533 - DNA, 30 bp, Artificial Sequence
  Synthetic oligonucleotide
ggttcagcgtaatctagtgagcgcgtgtag

SEQ ID NO: 176534 - DNA, 30 bp, Artificial Sequence
  Synthetic oligonucleotide
gttacagggtgtattagaaggaatgtgtag

SEQ ID NO: 176535 - DNA, 30 bp, Artificial Sequence
  Synthetic oligonucleotide
aaggattgcaattgaggtttgtatgtgtag

SEQ ID NO: 176536 - DNA, 30 bp, Artificial Sequence
  Synthetic oligonucleotide
gaactgtgtgataacgtcgccgttgtgtag

SEQ ID NO: 176537 - DNA, 30 bp, Artificial Sequence
  Synthetic oligonucleotide
ataggactagtcatcaaggcaggcttgtag

SEQ ID NO: 176538 - DNA, 30 bp, Artificial Sequence
  Synthetic oligonucleotide
gtggtgttaatgtgcgtaatggcgaattag

SEQ ID NO: 176539 - DNA, 30 bp, Artificial Sequence
  Synthetic oligonucleotide
gttgatgactgattgcctcacttgaattag

SEQ ID NO: 176540 - DNA, 30 bp, Artificial Sequence
  Synthetic oligonucleotide
gatgagacggtcctattgggcttgaattag

SEQ ID NO: 176541 - DNA, 30 bp, Artificial Sequence
  Synthetic oligonucleotide
acaagacttatgttctcgtacacccattag

SEQ ID NO: 176542 - DNA, 30 bp, Artificial Sequence
  Synthetic oligonucleotide
cgggagctctcttaactcaccctccattag

SEQ ID NO: 176543 - DNA, 30 bp, Artificial Sequence
  Synthetic oligonucleotide
gcaacgacggacagaccagaagtccattag

SEQ ID NO: 176544 - DNA, 29 bp, Artificial Sequence
  Synthetic oligonucleotide
aaggtggtgttgacgttatctggcattag

SEQ ID NO: 176545 - DNA, 30 bp, Artificial Sequence
  Synthetic oligonucleotide
tctactgtgttaaaggtacatctgcattag

SEQ ID NO: 176546 - DNA, 30 bp, Artificial Sequence
  Synthetic oligonucleotide
aggcgtttggctagtcagtgaactcattag

SEQ ID NO: 176547 - DNA, 30 bp, Artificial Sequence
  Synthetic oligonucleotide
gacagaaggtaaagactaccggctcattag

SEQ ID NO: 176548 - DNA, 30 bp, Artificial Sequence
  Synthetic oligonucleotide
gcaaccgagatgcgctgaaaccacgattag

SEQ ID NO: 176549 - DNA, 30 bp, Artificial Sequence
  Synthetic oligonucleotide
cttggacgagacggcgtcggagtggattag

SEQ ID NO: 176550 - DNA, 30 bp, Artificial Sequence
  Synthetic oligonucleotide
agcagctcacaggtccatcgattggattag

SEQ ID NO: 176551 - DNA, 30 bp, Artificial Sequence
  Synthetic oligonucleotide
gagccggcgaactcatgggttcatgattag

SEQ ID NO: 176552 - DNA, 30 bp, Artificial Sequence
  Synthetic oligonucleotide
caccggaaactgttatcctggtgtgattag

SEQ ID NO: 176553 - DNA, 30 bp, Artificial Sequence
  Synthetic oligonucleotide
cctggttcgaccaatcgtcgtattgattag

SEQ ID NO: 176554 - DNA, 30 bp, Artificial Sequence
  Synthetic oligonucleotide
tgaaagtctttccccgtcgccaactattag

SEQ ID NO: 176555 - DNA, 30 bp, Artificial Sequence
  Synthetic oligonucleotide
aaacctcgatccgttgaatataattattag

SEQ ID NO: 176556 - DNA, 30 bp, Artificial Sequence
  Synthetic oligonucleotide
tgtagcaattgtgtggccaaaagttattag

SEQ ID NO: 176557 - DNA, 30 bp, Artificial Sequence
  Synthetic oligonucleotide
gctagcggcataatttgccaatacacttag

SEQ ID NO: 176558 - DNA, 30 bp, Artificial Sequence
  Synthetic oligonucleotide
ggtatgtaaggtcaaaactcgtagacttag

SEQ ID NO: 176559 - DNA, 30 bp, Artificial Sequence
  Synthetic oligonucleotide
ctgaggagtctgttggcttctgatacttag

SEQ ID NO: 176560 - DNA, 30 bp, Artificial Sequence
  Synthetic oligonucleotide
acttattcgaaggataagtcgtatacttag

SEQ ID NO: 176561 - DNA, 30 bp, Artificial Sequence
  Synthetic oligonucleotide
gataaaacattcccgcaaactagtacttag

SEQ ID NO: 176562 - DNA, 30 bp, Artificial Sequence
  Synthetic oligonucleotide
acattacgggcctggccgaagaaaccttag

SEQ ID NO: 176563 - DNA, 30 bp, Artificial Sequence
  Synthetic oligonucleotide
cgtccacgcgccggcaaatgcgacccttag

SEQ ID NO: 176564 - DNA, 30 bp, Artificial Sequence
  Synthetic oligonucleotide
gttagactccatgatagtgctcccgcttag

SEQ ID NO: 176565 - DNA, 30 bp, Artificial Sequence
  Synthetic oligonucleotide
gggggtgcttctcaggtgtggctcgcttag

SEQ ID NO: 176566 - DNA, 30 bp, Artificial Sequence
  Synthetic oligonucleotide
tgctggaggtgccggtcctctaaggcttag

SEQ ID NO: 176567 - DNA, 30 bp, Artificial Sequence
  Synthetic oligonucleotide
gcgcacagtaccagatcgttgcactcttag

SEQ ID NO: 176568 - DNA, 30 bp, Artificial Sequence
  Synthetic oligonucleotide
ccgaggaccgctgtcctaaaacattcttag

SEQ ID NO: 176569 - DNA, 31 bp, Artificial Sequence
  Synthetic oligonucleotide
ggcgaccccaagattgctaatgcaaagttag

SEQ ID NO: 176570 - DNA, 30 bp, Artificial Sequence
  Synthetic oligonucleotide
tagtcgcagtaaggccaagaagaaagttag

SEQ ID NO: 176571 - DNA, 30 bp, Artificial Sequence
  Synthetic oligonucleotide
catttgcagccggatcgtaggtaaagttag

SEQ ID NO: 176572 - DNA, 30 bp, Artificial Sequence
  Synthetic oligonucleotide
aggcggaccattgccctctggtccagttag

SEQ ID NO: 176573 - DNA, 30 bp, Artificial Sequence
  Synthetic oligonucleotide
aatacacgaatgaggacgggacagagttag

SEQ ID NO: 176574 - DNA, 30 bp, Artificial Sequence
  Synthetic oligonucleotide
gtaaccagttccgcaagtccctcgagttag

SEQ ID NO: 176575 - DNA, 30 bp, Artificial Sequence
  Synthetic oligonucleotide
cttttgttcgtgactccgatgcggagttag

SEQ ID NO: 176576 - DNA, 30 bp, Artificial Sequence
  Synthetic oligonucleotide
gtgcggattggcctcataaatcggagttag

SEQ ID NO: 176577 - DNA, 30 bp, Artificial Sequence
  Synthetic oligonucleotide
taacgcgcgagcctgcgaaattgacgttag

SEQ ID NO: 176578 - DNA, 30 bp, Artificial Sequence
  Synthetic oligonucleotide
tgtaatagggccctaatcatttgtcgttag

SEQ ID NO: 176579 - DNA, 30 bp, Artificial Sequence
  Synthetic oligonucleotide
ggataacaatagcccattgcactaggttag

SEQ ID NO: 176580 - DNA, 30 bp, Artificial Sequence
  Synthetic oligonucleotide
gaaccgggggtaaatgggcaagagggttag

SEQ ID NO: 176581 - DNA, 30 bp, Artificial Sequence
  Synthetic oligonucleotide
cggcaagttcccccaagacgtgcgggttag

SEQ ID NO: 176582 - DNA, 30 bp, Artificial Sequence
  Synthetic oligonucleotide
ggattgtcattgaacaggaccatgggttag

SEQ ID NO: 176583 - DNA, 30 bp, Artificial Sequence
  Synthetic oligonucleotide
ggtaaagtaaacacacttgggtctggttag

SEQ ID NO: 176584 - DNA, 30 bp, Artificial Sequence
  Synthetic oligonucleotide
gtttctatgatctaattcatgagtggttag

SEQ ID NO: 176585 - DNA, 30 bp, Artificial Sequence
  Synthetic oligonucleotide
gaagccagcgctcgagttctaattggttag

SEQ ID NO: 176586 - DNA, 30 bp, Artificial Sequence
  Synthetic oligonucleotide
agacactctgaaacacaggtaaaatgttag

SEQ ID NO: 176587 - DNA, 30 bp, Artificial Sequence
  Synthetic oligonucleotide
attaagagtaagatacagcgatgctgttag

SEQ ID NO: 176588 - DNA, 30 bp, Artificial Sequence
  Synthetic oligonucleotide
ctaaaacgtcacctgcgaaacttctgttag

SEQ ID NO: 176589 - DNA, 30 bp, Artificial Sequence
  Synthetic oligonucleotide
ggacccatattcttctgtcaggcttgttag

SEQ ID NO: 176590 - DNA, 30 bp, Artificial Sequence
  Synthetic oligonucleotide
ggtactggtatgtataataaggcaatttag

SEQ ID NO: 176591 - DNA, 30 bp, Artificial Sequence
  Synthetic oligonucleotide
tgacattgaaagtgcggtggataactttag

SEQ ID NO: 176592 - DNA, 30 bp, Artificial Sequence
  Synthetic oligonucleotide
gcgccacactcgtctgtgttggcactttag

SEQ ID NO: 176593 - DNA, 30 bp, Artificial Sequence
  Synthetic oligonucleotide
tgcgtgctatgggtcacagatgtactttag

SEQ ID NO: 176594 - DNA, 30 bp, Artificial Sequence
  Synthetic oligonucleotide
ggcgaattcggtttaaaattcaaagtttag

SEQ ID NO: 176595 - DNA, 30 bp, Artificial Sequence
  Synthetic oligonucleotide
taagtgcgacgagaggaatcagaagtttag

SEQ ID NO: 176596 - DNA, 30 bp, Artificial Sequence
  Synthetic oligonucleotide
ggtgttgacatgttgggtctgagagtttag

SEQ ID NO: 176597 - DNA, 30 bp, Artificial Sequence
  Synthetic oligonucleotide
acttataaaatttcgaataaaggggtttag

SEQ ID NO: 176598 - DNA, 30 bp, Artificial Sequence
  Synthetic oligonucleotide
ggctagggaaaattcaaggattatgtttag

SEQ ID NO: 176599 - DNA, 30 bp, Artificial Sequence
  Synthetic oligonucleotide
acatttaagatcatgggcgaaaacttttag

SEQ ID NO: 176600 - DNA, 30 bp, Artificial Sequence
  Synthetic oligonucleotide
acggctagtcgcatgtaggaatcgttttag

SEQ ID NO: 176601 - DNA, 30 bp, Artificial Sequence
  Synthetic oligonucleotide
aaagcgtgtaagcgttagttggatttttag

SEQ ID NO: 176602 - DNA, 30 bp, Artificial Sequence
  Synthetic oligonucleotide
ccgaacgctgaagtacctacgagaaaaacg

SEQ ID NO: 176603 - DNA, 30 bp, Artificial Sequence
  Synthetic oligonucleotide
gtgatcacgttcatcagcattataaaaacg

SEQ ID NO: 176604 - DNA, 30 bp, Artificial Sequence
  Synthetic oligonucleotide
gattaagcgttccctcaccatcacaaaacg

SEQ ID NO: 176605 - DNA, 30 bp, Artificial Sequence
  Synthetic oligonucleotide
gtacgccactatggcctaagtgacaaaacg

SEQ ID NO: 176606 - DNA, 30 bp, Artificial Sequence
  Synthetic oligonucleotide
gggatggcgtcttgggggcactacaaaacg

SEQ ID NO: 176607 - DNA, 30 bp, Artificial Sequence
  Synthetic oligonucleotide
acccgcccccatacagacgggggcaaaacg

SEQ ID NO: 176608 - DNA, 30 bp, Artificial Sequence
  Synthetic oligonucleotide
tatcttacagctgtcatgaacctcaaaacg

SEQ ID NO: 176609 - DNA, 30 bp, Artificial Sequence
  Synthetic oligonucleotide
aagtaaagagctataatcccaaggaaaacg

SEQ ID NO: 176610 - DNA, 30 bp, Artificial Sequence
  Synthetic oligonucleotide
gctacagccgagatgtgcctaaggaaaacg

SEQ ID NO: 176611 - DNA, 30 bp, Artificial Sequence
  Synthetic oligonucleotide
gaggtgcgggccctgcgaccctgagaaacg

SEQ ID NO: 176612 - DNA, 30 bp, Artificial Sequence
  Synthetic oligonucleotide
aaattagcggccggaaaccatttagaaacg

SEQ ID NO: 176613 - DNA, 30 bp, Artificial Sequence
  Synthetic oligonucleotide
cccactgttccaaattgtcaattcgaaacg

SEQ ID NO: 176614 - DNA, 30 bp, Artificial Sequence
  Synthetic oligonucleotide
gttcctaataatggcatgtttgcggaaacg

SEQ ID NO: 176615 - DNA, 30 bp, Artificial Sequence
  Synthetic oligonucleotide
ttgcgaatggcactgtgcattactgaaacg

SEQ ID NO: 176616 - DNA, 30 bp, Artificial Sequence
  Synthetic oligonucleotide
atggacgagcgagtacatatctcataaacg

SEQ ID NO: 176617 - DNA, 30 bp, Artificial Sequence
  Synthetic oligonucleotide
gttccccagccaggagaatgactataaacg

SEQ ID NO: 176618 - DNA, 30 bp, Artificial Sequence
  Synthetic oligonucleotide
gtcaaagaggtcagatagaacgcgtaaacg

SEQ ID NO: 176619 - DNA, 30 bp, Artificial Sequence
  Synthetic oligonucleotide
aacgtgttcttattgagaggcatgtaaacg

SEQ ID NO: 176620 - DNA, 30 bp, Artificial Sequence
  Synthetic oligonucleotide
acttcatgactgcaagcggggggttaaacg

SEQ ID NO: 176621 - DNA, 30 bp, Artificial Sequence
  Synthetic oligonucleotide
tgaggcgaggaccagacttgttagacaacg

SEQ ID NO: 176622 - DNA, 30 bp, Artificial Sequence
  Synthetic oligonucleotide
agtagcaagctcctgatacgacatacaacg

SEQ ID NO: 176623 - DNA, 30 bp, Artificial Sequence
  Synthetic oligonucleotide
acgtgtcacacctggtggggatttacaacg

SEQ ID NO: 176624 - DNA, 30 bp, Artificial Sequence
  Synthetic oligonucleotide
ttagagtgaatgaccgcgacgcccccaacg

SEQ ID NO: 176625 - DNA, 30 bp, Artificial Sequence
  Synthetic oligonucleotide
ataaacggatgaagaaacactcagccaacg

SEQ ID NO: 176626 - DNA, 30 bp, Artificial Sequence
  Synthetic oligonucleotide
aagatgagggtctagcgggattggccaacg

SEQ ID NO: 176627 - DNA, 30 bp, Artificial Sequence
  Synthetic oligonucleotide
tatagccattaattccgtgcgtgggcaacg

SEQ ID NO: 176628 - DNA, 30 bp, Artificial Sequence
  Synthetic oligonucleotide
ggataacattgacgttcatcaaatgcaacg

SEQ ID NO: 176629 - DNA, 30 bp, Artificial Sequence
  Synthetic oligonucleotide
gcaatattgagtcagggatcatctgcaacg

SEQ ID NO: 176630 - DNA, 31 bp, Artificial Sequence
  Synthetic oligonucleotide
aggggggttggtcatccttgtacgtgcaacg

SEQ ID NO: 176631 - DNA, 30 bp, Artificial Sequence
  Synthetic oligonucleotide
cgcatgggagagctagcatgtgtatcaacg

SEQ ID NO: 176632 - DNA, 30 bp, Artificial Sequence
  Synthetic oligonucleotide
tgctctattagccagtatctaaagtcaacg

SEQ ID NO: 176633 - DNA, 30 bp, Artificial Sequence
  Synthetic oligonucleotide
tcagagcggggatgtgtataagcgtcaacg

SEQ ID NO: 176634 - DNA, 30 bp, Artificial Sequence
  Synthetic oligonucleotide
cgaatattagcgtatgaattgctgtcaacg

SEQ ID NO: 176635 - DNA, 30 bp, Artificial Sequence
  Synthetic oligonucleotide
gggttggtgcacctttcgatccattcaacg

SEQ ID NO: 176636 - DNA, 30 bp, Artificial Sequence
  Synthetic oligonucleotide
atactgggtagaaaacgtacgtgaagaacg

SEQ ID NO: 176637 - DNA, 30 bp, Artificial Sequence
  Synthetic oligonucleotide
aactcgagttatacctttctgtgaagaacg

SEQ ID NO: 176638 - DNA, 30 bp, Artificial Sequence
  Synthetic oligonucleotide
caaggctggctatataccacggttagaacg

SEQ ID NO: 176639 - DNA, 30 bp, Artificial Sequence
  Synthetic oligonucleotide
tcgcggacatggaagacgatcgaacgaacg

SEQ ID NO: 176640 - DNA, 30 bp, Artificial Sequence
  Synthetic oligonucleotide
ggcgttacaactgtcataaaatagcgaacg

SEQ ID NO: 176641 - DNA, 30 bp, Artificial Sequence
  Synthetic oligonucleotide
cttctttactggtatgagagtccgcgaacg

SEQ ID NO: 176642 - DNA, 30 bp, Artificial Sequence
  Synthetic oligonucleotide
acggcaagcttttatcaaacccttcgaacg

SEQ ID NO: 176643 - DNA, 30 bp, Artificial Sequence
  Synthetic oligonucleotide
ctgtcgctcctggtcacgaaattcggaacg

SEQ ID NO: 176644 - DNA, 30 bp, Artificial Sequence
  Synthetic oligonucleotide
ggacattaacagttgggggccgatggaacg

SEQ ID NO: 176645 - DNA, 30 bp, Artificial Sequence
  Synthetic oligonucleotide
gcctacgaacagtacacttgcgatggaacg

SEQ ID NO: 176646 - DNA, 30 bp, Artificial Sequence
  Synthetic oligonucleotide
ttcctggcgtgccgggtttgccaatgaacg

SEQ ID NO: 176647 - DNA, 30 bp, Artificial Sequence
  Synthetic oligonucleotide
ggatgcgatgggacaataaacacatgaacg

SEQ ID NO: 176648 - DNA, 30 bp, Artificial Sequence
  Synthetic oligonucleotide
tctacagtgagtgaggatcatacatgaacg

SEQ ID NO: 176649 - DNA, 30 bp, Artificial Sequence
  Synthetic oligonucleotide
tcagtcagtggtgtgtacagactctgaacg

SEQ ID NO: 176650 - DNA, 30 bp, Artificial Sequence
  Synthetic oligonucleotide
tggcagccattgactactcgcgcttgaacg

SEQ ID NO: 176651 - DNA, 30 bp, Artificial Sequence
  Synthetic oligonucleotide
tgttgagctcgtcgtgttgtcgagataacg

SEQ ID NO: 176652 - DNA, 30 bp, Artificial Sequence
  Synthetic oligonucleotide
gacgacaccatcgtaagaccatcgataacg

SEQ ID NO: 176653 - DNA, 30 bp, Artificial Sequence
  Synthetic oligonucleotide
acgaaggaatgtcttaatctacggataacg

SEQ ID NO: 176654 - DNA, 30 bp, Artificial Sequence
  Synthetic oligonucleotide
agagtgggacggcggacaggtcctataacg

SEQ ID NO: 176655 - DNA, 30 bp, Artificial Sequence
  Synthetic oligonucleotide
aaagatggcaatcctggggatagtataacg

SEQ ID NO: 176656 - DNA, 30 bp, Artificial Sequence
  Synthetic oligonucleotide
ctcgttgagcgttgataagtggcgctaacg

SEQ ID NO: 176657 - DNA, 30 bp, Artificial Sequence
  Synthetic oligonucleotide
ctggacatatctagggcggacgatctaacg

SEQ ID NO: 176658 - DNA, 30 bp, Artificial Sequence
  Synthetic oligonucleotide
gaacgtaaaccccggacacacagtctaacg

SEQ ID NO: 176659 - DNA, 30 bp, Artificial Sequence
  Synthetic oligonucleotide
gaaaaaggaccctgtacacatgaggtaacg

SEQ ID NO: 176660 - DNA, 30 bp, Artificial Sequence
  Synthetic oligonucleotide
tcagcaggtggacaagtgactggggtaacg

SEQ ID NO: 176661 - DNA, 30 bp, Artificial Sequence
  Synthetic oligonucleotide
tgaagtaccaaaatacacgcaagtgtaacg

SEQ ID NO: 176662 - DNA, 30 bp, Artificial Sequence
  Synthetic oligonucleotide
agaacggaaagcctcctgataaaattaacg

SEQ ID NO: 176663 - DNA, 30 bp, Artificial Sequence
  Synthetic oligonucleotide
atgatagcagcaagatcagacaacttaacg

SEQ ID NO: 176664 - DNA, 30 bp, Artificial Sequence
  Synthetic oligonucleotide
gcctaaactgctagccctcgagttttaacg

SEQ ID NO: 176665 - DNA, 30 bp, Artificial Sequence
  Synthetic oligonucleotide
tcgattgacgggttaatctatacaaacacg

SEQ ID NO: 176666 - DNA, 30 bp, Artificial Sequence
  Synthetic oligonucleotide
ggcagcggacgggaagcaagcggacacacg

SEQ ID NO: 176667 - DNA, 30 bp, Artificial Sequence
  Synthetic oligonucleotide
gaaactgctaacccgaccgaaaaccacacg

SEQ ID NO: 176668 - DNA, 30 bp, Artificial Sequence
  Synthetic oligonucleotide
gttattcgaaacgggctggggtatcacacg

SEQ ID NO: 176669 - DNA, 30 bp, Artificial Sequence
  Synthetic oligonucleotide
cggttaaagaccgagaaggagggtcacacg

SEQ ID NO: 176670 - DNA, 30 bp, Artificial Sequence
  Synthetic oligonucleotide
gtcgtaacgagctgaattggagcagacacg

SEQ ID NO: 176671 - DNA, 30 bp, Artificial Sequence
  Synthetic oligonucleotide
ataattggatgatatgctgtggcagacacg

SEQ ID NO: 176672 - DNA, 30 bp, Artificial Sequence
  Synthetic oligonucleotide
gcggcattcgaccgttaaggctcggacacg

SEQ ID NO: 176673 - DNA, 30 bp, Artificial Sequence
  Synthetic oligonucleotide
gactgaagtccggtgtatgaaggggacacg

SEQ ID NO: 176674 - DNA, 30 bp, Artificial Sequence
  Synthetic oligonucleotide
atagtgttggctaacgaggaatatgacacg

SEQ ID NO: 176675 - DNA, 30 bp, Artificial Sequence
  Synthetic oligonucleotide
cagagcgactgtacaccacgtccatacacg

SEQ ID NO: 176676 - DNA, 30 bp, Artificial Sequence
  Synthetic oligonucleotide
aatggcctccccctaaacggtggatacacg

SEQ ID NO: 176677 - DNA, 30 bp, Artificial Sequence
  Synthetic oligonucleotide
ataaaccgacgaattagagagccctacacg

SEQ ID NO: 176678 - DNA, 30 bp, Artificial Sequence
  Synthetic oligonucleotide
catcgtgtagaatgtgagtgagcctacacg

SEQ ID NO: 176679 - DNA, 30 bp, Artificial Sequence
  Synthetic oligonucleotide
tcttccaacaactggccatatttttacacg

SEQ ID NO: 176680 - DNA, 30 bp, Artificial Sequence
  Synthetic oligonucleotide
ggaaatggaaccggagatactcaaaccacg

SEQ ID NO: 176681 - DNA, 30 bp, Artificial Sequence
  Synthetic oligonucleotide
gtgctattgacttgcatcgtcgagaccacg

SEQ ID NO: 176682 - DNA, 30 bp, Artificial Sequence
  Synthetic oligonucleotide
aaagcgtaagggtcaaacatataacccacg

SEQ ID NO: 176683 - DNA, 30 bp, Artificial Sequence
  Synthetic oligonucleotide
catgttcagggacacaccgttatacccacg

SEQ ID NO: 176684 - DNA, 30 bp, Artificial Sequence
  Synthetic oligonucleotide
gacagtaaaggactcagacctccccccacg

SEQ ID NO: 176685 - DNA, 30 bp, Artificial Sequence
  Synthetic oligonucleotide
accactccggaaggctgttggcgagccacg

SEQ ID NO: 176686 - DNA, 30 bp, Artificial Sequence
  Synthetic oligonucleotide
taacgacatttttcatcataacgtgccacg

SEQ ID NO: 176687 - DNA, 30 bp, Artificial Sequence
  Synthetic oligonucleotide
attcaccagcctagtgagttacttgccacg

SEQ ID NO: 176688 - DNA, 30 bp, Artificial Sequence
  Synthetic oligonucleotide
cagccggaagatggttgggcaatatccacg

SEQ ID NO: 176689 - DNA, 30 bp, Artificial Sequence
  Synthetic oligonucleotide
gcgaggccctgccttgatatacagagcacg

SEQ ID NO: 176690 - DNA, 30 bp, Artificial Sequence
  Synthetic oligonucleotide
tgtgctactagcaacggccgatcgagcacg

SEQ ID NO: 176691 - DNA, 30 bp, Artificial Sequence
  Synthetic oligonucleotide
gcattaggaggcggtcgtgttcggcgcacg

SEQ ID NO: 176692 - DNA, 30 bp, Artificial Sequence
  Synthetic oligonucleotide
gcaaacgttagacacaacccaggcggcacg

SEQ ID NO: 176693 - DNA, 30 bp, Artificial Sequence
  Synthetic oligonucleotide
aagtagactcaaaccgttggcacgggcacg

SEQ ID NO: 176694 - DNA, 30 bp, Artificial Sequence
  Synthetic oligonucleotide
tagagatcaaatcgctattgcaggggcacg

SEQ ID NO: 176695 - DNA, 30 bp, Artificial Sequence
  Synthetic oligonucleotide
tcaggccccgccctgttaaaactgggcacg

SEQ ID NO: 176696 - DNA, 30 bp, Artificial Sequence
  Synthetic oligonucleotide
acgtatgcaggcccgcgaggtgctggcacg

SEQ ID NO: 176697 - DNA, 30 bp, Artificial Sequence
  Synthetic oligonucleotide
tacttgaccggaccgaactgacagtgcacg

SEQ ID NO: 176698 - DNA, 30 bp, Artificial Sequence
  Synthetic oligonucleotide
agggcccttcgggggagtatacagtgcacg

SEQ ID NO: 176699 - DNA, 30 bp, Artificial Sequence
  Synthetic oligonucleotide
tgggttcagatggcagtggagtagtgcacg

SEQ ID NO: 176700 - DNA, 30 bp, Artificial Sequence
  Synthetic oligonucleotide
ttccctcggtcgtttcaggataggtgcacg

SEQ ID NO: 176701 - DNA, 30 bp, Artificial Sequence
  Synthetic oligonucleotide
accatccgccccgaaacgattgggtgcacg

SEQ ID NO: 176702 - DNA, 30 bp, Artificial Sequence
  Synthetic oligonucleotide
aaacggctgggcaagataacaaaaatcacg

SEQ ID NO: 176703 - DNA, 30 bp, Artificial Sequence
  Synthetic oligonucleotide
agtaaatatactaatacaagccaaatcacg

SEQ ID NO: 176704 - DNA, 30 bp, Artificial Sequence
  Synthetic oligonucleotide
agggatcatacagtatcgccacgcatcacg

SEQ ID NO: 176705 - DNA, 30 bp, Artificial Sequence
  Synthetic oligonucleotide
gtcacaagtatacgattctctattatcacg

SEQ ID NO: 176706 - DNA, 30 bp, Artificial Sequence
  Synthetic oligonucleotide
aacttgtccctagagaagccaacactcacg

SEQ ID NO: 176707 - DNA, 30 bp, Artificial Sequence
  Synthetic oligonucleotide
acgcatacaaccgtcgaatgacacctcacg

SEQ ID NO: 176708 - DNA, 30 bp, Artificial Sequence
  Synthetic oligonucleotide
agcagactagctatctagtcatgcctcacg

SEQ ID NO: 176709 - DNA, 30 bp, Artificial Sequence
  Synthetic oligonucleotide
ggggaaagttgttattacattatgctcacg

SEQ ID NO: 176710 - DNA, 30 bp, Artificial Sequence
  Synthetic oligonucleotide
tactaccgagattaaaacttatttctcacg

SEQ ID NO: 176711 - DNA, 30 bp, Artificial Sequence
  Synthetic oligonucleotide
ttggcgtcctatctcaataccgcattcacg

SEQ ID NO: 176712 - DNA, 30 bp, Artificial Sequence
  Synthetic oligonucleotide
ccaagattaggaatagcggaggcattcacg

SEQ ID NO: 176713 - DNA, 30 bp, Artificial Sequence
  Synthetic oligonucleotide
gcgctatgatactaagacgaaaccttcacg

SEQ ID NO: 176714 - DNA, 30 bp, Artificial Sequence
  Synthetic oligonucleotide
ataggccaatctggaagggcgggtttcacg

SEQ ID NO: 176715 - DNA, 30 bp, Artificial Sequence
  Synthetic oligonucleotide
ctaatgcaatcgcggtgagctaaaaagacg

SEQ ID NO: 176716 - DNA, 30 bp, Artificial Sequence
  Synthetic oligonucleotide
ataacgtctggaccgtatctcggaaagacg

SEQ ID NO: 176717 - DNA, 30 bp, Artificial Sequence
  Synthetic oligonucleotide
atcgaaggccgttccgggcttgcgaagacg

SEQ ID NO: 176718 - DNA, 30 bp, Artificial Sequence
  Synthetic oligonucleotide
gagcgatagccttagcctcggtggaagacg

SEQ ID NO: 176719 - DNA, 30 bp, Artificial Sequence
  Synthetic oligonucleotide
tgcgcgtagttcggggggttactgaagacg

SEQ ID NO: 176720 - DNA, 30 bp, Artificial Sequence
  Synthetic oligonucleotide
atcatcctactctgtcaaaccgataagacg

SEQ ID NO: 176721 - DNA, 30 bp, Artificial Sequence
  Synthetic oligonucleotide
ccatcgcggcgccaaataagtcttcagacg

SEQ ID NO: 176722 - DNA, 30 bp, Artificial Sequence
  Synthetic oligonucleotide
attgcaggagcccttacttcggttcagacg

SEQ ID NO: 176723 - DNA, 30 bp, Artificial Sequence
  Synthetic oligonucleotide
tggcacacgaactacccgtggagggagacg

SEQ ID NO: 176724 - DNA, 30 bp, Artificial Sequence
  Synthetic oligonucleotide
ggactctcggatctgtagtacggggagacg

SEQ ID NO: 176725 - DNA, 30 bp, Artificial Sequence
  Synthetic oligonucleotide
gaagtggaattcatgaacggaatggagacg

SEQ ID NO: 176726 - DNA, 30 bp, Artificial Sequence
  Synthetic oligonucleotide
tcatacttgagaacgaagagtactgagacg

SEQ ID NO: 176727 - DNA, 30 bp, Artificial Sequence
  Synthetic oligonucleotide
caactttaagtgttgtagtcctgtgagacg

SEQ ID NO: 176728 - DNA, 30 bp, Artificial Sequence
  Synthetic oligonucleotide
tgctgtagcagatggaaatgatcttagacg

SEQ ID NO: 176729 - DNA, 30 bp, Artificial Sequence
  Synthetic oligonucleotide
cgtcaacggaagggcagacacgccacgacg

SEQ ID NO: 176730 - DNA, 30 bp, Artificial Sequence
  Synthetic oligonucleotide
taggatgctaagtgacaggtacagacgacg

SEQ ID NO: 176731 - DNA, 30 bp, Artificial Sequence
  Synthetic oligonucleotide
ggatagcatggggcgtacatagtgacgacg

SEQ ID NO: 176732 - DNA, 30 bp, Artificial Sequence
  Synthetic oligonucleotide
ggaatattagagcgaataacgtgtacgacg

SEQ ID NO: 176733 - DNA, 30 bp, Artificial Sequence
  Synthetic oligonucleotide
ggtaaacgttcaagggctaaaacaccgacg

SEQ ID NO: 176734 - DNA, 30 bp, Artificial Sequence
  Synthetic oligonucleotide
ccagtagatggtatgtgaccttagccgacg

SEQ ID NO: 176735 - DNA, 30 bp, Artificial Sequence
  Synthetic oligonucleotide
gatctcctcatacaaggcaacaggccgacg

SEQ ID NO: 176736 - DNA, 30 bp, Artificial Sequence
  Synthetic oligonucleotide
aacaaattacgcgaaactgcttatccgacg

SEQ ID NO: 176737 - DNA, 30 bp, Artificial Sequence
  Synthetic oligonucleotide
ccgagcagagggtttgcttagtttccgacg

SEQ ID NO: 176738 - DNA, 30 bp, Artificial Sequence
  Synthetic oligonucleotide
atgaacagtgatagaaagtggtaggcgacg

SEQ ID NO: 176739 - DNA, 30 bp, Artificial Sequence
  Synthetic oligonucleotide
gggggatgagcgcactgaacgtgggcgacg

SEQ ID NO: 176740 - DNA, 30 bp, Artificial Sequence
  Synthetic oligonucleotide
cggacaactgcaataagcggcctggcgacg

SEQ ID NO: 176741 - DNA, 30 bp, Artificial Sequence
  Synthetic oligonucleotide
tcacgacacagttaaaagaacgcatcgacg

SEQ ID NO: 176742 - DNA, 30 bp, Artificial Sequence
  Synthetic oligonucleotide
tttgagtgtattacatttaagtgatcgacg

SEQ ID NO: 176743 - DNA, 30 bp, Artificial Sequence
  Synthetic oligonucleotide
ccgtgcaaggcaagggtgcagtgctcgacg

SEQ ID NO: 176744 - DNA, 30 bp, Artificial Sequence
  Synthetic oligonucleotide
ccgttaattctaagtaatgccatctcgacg

SEQ ID NO: 176745 - DNA, 30 bp, Artificial Sequence
  Synthetic oligonucleotide
gacacacgattgttatactcaaagtcgacg

SEQ ID NO: 176746 - DNA, 30 bp, Artificial Sequence
  Synthetic oligonucleotide
cactaaggatgctttggtattgagtcgacg

SEQ ID NO: 176747 - DNA, 30 bp, Artificial Sequence
  Synthetic oligonucleotide
ttatggtcgttacataccaagaattcgacg

SEQ ID NO: 176748 - DNA, 30 bp, Artificial Sequence
  Synthetic oligonucleotide
atgagatattgaagggtacacgtaaggacg

SEQ ID NO: 176749 - DNA, 30 bp, Artificial Sequence
  Synthetic oligonucleotide
acgtagaaagctggtgatggtgtaaggacg

SEQ ID NO: 176750 - DNA, 30 bp, Artificial Sequence
  Synthetic oligonucleotide
cataggatgtctccgcctggcctgaggacg

SEQ ID NO: 176751 - DNA, 30 bp, Artificial Sequence
  Synthetic oligonucleotide
gtattgagaaggagacccctctataggacg

SEQ ID NO: 176752 - DNA, 30 bp, Artificial Sequence
  Synthetic oligonucleotide
cgagtcagtacgcgcacaagtactaggacg

SEQ ID NO: 176753 - DNA, 30 bp, Artificial Sequence
  Synthetic oligonucleotide
cttgagttctactagtcatggggagggacg

SEQ ID NO: 176754 - DNA, 30 bp, Artificial Sequence
  Synthetic oligonucleotide
ctagaacggcctggtgatgtgctagggacg

SEQ ID NO: 176755 - DNA, 30 bp, Artificial Sequence
  Synthetic oligonucleotide
tcttcgagcattgttcgtttgagggggacg

SEQ ID NO: 176756 - DNA, 30 bp, Artificial Sequence
  Synthetic oligonucleotide
cggagctaaccggaacagcgcatggggacg

SEQ ID NO: 176757 - DNA, 30 bp, Artificial Sequence
  Synthetic oligonucleotide
aagagtctctatgcatttagccgtgggacg

SEQ ID NO: 176758 - DNA, 30 bp, Artificial Sequence
  Synthetic oligonucleotide
gagcgatcgagggcgaaaaccgcctggacg

SEQ ID NO: 176759 - DNA, 30 bp, Artificial Sequence
  Synthetic oligonucleotide
tcagtcgagatgtggcgctgctgctggacg

SEQ ID NO: 176760 - DNA, 30 bp, Artificial Sequence
  Synthetic oligonucleotide
caaagatgcctgtccaagctgtcaatgacg

SEQ ID NO: 176761 - DNA, 26 bp, Artificial Sequence
  Synthetic oligonucleotide
tgggacagcaactcggtgtcatgacg

SEQ ID NO: 176762 - DNA, 30 bp, Artificial Sequence
  Synthetic oligonucleotide
ctgaagagtgattcagggggacaggtgacg

SEQ ID NO: 176763 - DNA, 30 bp, Artificial Sequence
  Synthetic oligonucleotide
acggtagtatatcaggaaggtgctgtgacg

SEQ ID NO: 176764 - DNA, 30 bp, Artificial Sequence
  Synthetic oligonucleotide
ccgttacgcctcgtggaagcctgattgacg

SEQ ID NO: 176765 - DNA, 30 bp, Artificial Sequence
  Synthetic oligonucleotide
tcttgccaaaatacgactgctcccttgacg

SEQ ID NO: 176766 - DNA, 30 bp, Artificial Sequence
  Synthetic oligonucleotide
cgtgattgtaacaggaacacggggttgacg

SEQ ID NO: 176767 - DNA, 30 bp, Artificial Sequence
  Synthetic oligonucleotide
gggttacaaattgcgcttgatttgttgacg

SEQ ID NO: 176768 - DNA, 30 bp, Artificial Sequence
  Synthetic oligonucleotide
ctgcgaacatatatcagaagagcaaatacg

SEQ ID NO: 176769 - DNA, 30 bp, Artificial Sequence
  Synthetic oligonucleotide
acctttgtgtaggaacactatggaaatacg

SEQ ID NO: 176770 - DNA, 30 bp, Artificial Sequence
  Synthetic oligonucleotide
ctaatacaggagtgtctaatcgccaatacg

SEQ ID NO: 176771 - DNA, 30 bp, Artificial Sequence
  Synthetic oligonucleotide
agagtgtcgggaggccaggccatcaatacg

SEQ ID NO: 176772 - DNA, 30 bp, Artificial Sequence
  Synthetic oligonucleotide
ttcaaatccccaccaggagcagataatacg

SEQ ID NO: 176773 - DNA, 30 bp, Artificial Sequence
  Synthetic oligonucleotide
gaacgtatataatgaagacggtaacatacg

SEQ ID NO: 176774 - DNA, 30 bp, Artificial Sequence
  Synthetic oligonucleotide
gcatgcatctacacaaaccagagacatacg

SEQ ID NO: 176775 - DNA, 30 bp, Artificial Sequence
  Synthetic oligonucleotide
ggcacccaaaggattccctggggccatacg

SEQ ID NO: 176776 - DNA, 30 bp, Artificial Sequence
  Synthetic oligonucleotide
ggccaggtcatcggggtcgtagatcatacg

SEQ ID NO: 176777 - DNA, 30 bp, Artificial Sequence
  Synthetic oligonucleotide
acttgcataccattggtatacattcatacg

SEQ ID NO: 176778 - DNA, 30 bp, Artificial Sequence
  Synthetic oligonucleotide
gtggagtactagttcagttcaatagatacg

SEQ ID NO: 176779 - DNA, 30 bp, Artificial Sequence
  Synthetic oligonucleotide
gcttgacggccgcgtaatttcgtcgatacg

SEQ ID NO: 176780 - DNA, 30 bp, Artificial Sequence
  Synthetic oligonucleotide
ctaatgaaccgtctatactggagatatacg

SEQ ID NO: 176781 - DNA, 30 bp, Artificial Sequence
  Synthetic oligonucleotide
aacagagtgggttagtttacggagtatacg

SEQ ID NO: 176782 - DNA, 30 bp, Artificial Sequence
  Synthetic oligonucleotide
ccaaccaggattcagggaggttagtatacg

SEQ ID NO: 176783 - DNA, 30 bp, Artificial Sequence
  Synthetic oligonucleotide
agcattgttgaacactcactaacgtatacg

SEQ ID NO: 176784 - DNA, 30 bp, Artificial Sequence
  Synthetic oligonucleotide
cgggatcttgtagatagtacaatgtatacg

SEQ ID NO: 176785 - DNA, 30 bp, Artificial Sequence
  Synthetic oligonucleotide
cccgttgctgtggaccattcgtccactacg

SEQ ID NO: 176786 - DNA, 30 bp, Artificial Sequence
  Synthetic oligonucleotide
caattgtgattattgtgatcccagactacg

SEQ ID NO: 176787 - DNA, 30 bp, Artificial Sequence
  Synthetic oligonucleotide
caggtcgatggtgagatcggcaggactacg

SEQ ID NO: 176788 - DNA, 31 bp, Artificial Sequence
  Synthetic oligonucleotide
tgatcatggcgacagtctaaaaattcctacg

SEQ ID NO: 176789 - DNA, 30 bp, Artificial Sequence
  Synthetic oligonucleotide
ggctaaatgttgcgttctgtcgttcctacg

SEQ ID NO: 176790 - DNA, 30 bp, Artificial Sequence
  Synthetic oligonucleotide
acgtcattgcgcgcttatcaagtagctacg

SEQ ID NO: 176791 - DNA, 30 bp, Artificial Sequence
  Synthetic oligonucleotide
catgtcttgtggtagtctacggggtctacg

SEQ ID NO: 176792 - DNA, 30 bp, Artificial Sequence
  Synthetic oligonucleotide
atggtggaaaatggatttgctacaagtacg

SEQ ID NO: 176793 - DNA, 30 bp, Artificial Sequence
  Synthetic oligonucleotide
gagcacctaagggatggccgtgacagtacg

SEQ ID NO: 176794 - DNA, 30 bp, Artificial Sequence
  Synthetic oligonucleotide
cttcgtccgcgggtggtgtaggtcagtacg

SEQ ID NO: 176795 - DNA, 30 bp, Artificial Sequence
  Synthetic oligonucleotide
cccgtcgtagccaatctatagaagagtacg

SEQ ID NO: 176796 - DNA, 30 bp, Artificial Sequence
  Synthetic oligonucleotide
aagcagcatacgcccaatctctggagtacg

SEQ ID NO: 176797 - DNA, 30 bp, Artificial Sequence
  Synthetic oligonucleotide
cgtcgcccgggccaggctggttggagtacg

SEQ ID NO: 176798 - DNA, 30 bp, Artificial Sequence
  Synthetic oligonucleotide
atggaatatcgggtggcaccgtttagtacg

SEQ ID NO: 176799 - DNA, 30 bp, Artificial Sequence
  Synthetic oligonucleotide
aacactactattgggacggtgttacgtacg

SEQ ID NO: 176800 - DNA, 30 bp, Artificial Sequence
  Synthetic oligonucleotide
caattagcgaaaagagtctgatcgcgtacg

SEQ ID NO: 176801 - DNA, 30 bp, Artificial Sequence
  Synthetic oligonucleotide
gcaaaacatagtaaacaatcttcgcgtacg

SEQ ID NO: 176802 - DNA, 30 bp, Artificial Sequence
  Synthetic oligonucleotide
caaccatcaacactgacccgtcggcgtacg

SEQ ID NO: 176803 - DNA, 30 bp, Artificial Sequence
  Synthetic oligonucleotide
acggatgtactaccggtacgttacggtacg

SEQ ID NO: 176804 - DNA, 30 bp, Artificial Sequence
  Synthetic oligonucleotide
ggtacacactaattttaccagcgcggtacg

SEQ ID NO: 176805 - DNA, 30 bp, Artificial Sequence
  Synthetic oligonucleotide
cgtggcagtctgatcaatccgaactgtacg

SEQ ID NO: 176806 - DNA, 30 bp, Artificial Sequence
  Synthetic oligonucleotide
aagacatactcatatgttctttggtgtacg

SEQ ID NO: 176807 - DNA, 30 bp, Artificial Sequence
  Synthetic oligonucleotide
aaccaaatcgtaatattttcgttttgtacg

SEQ ID NO: 176808 - DNA, 30 bp, Artificial Sequence
  Synthetic oligonucleotide
cttaccagtcccgtgagagccaccattacg

SEQ ID NO: 176809 - DNA, 30 bp, Artificial Sequence
  Synthetic oligonucleotide
ccgaaggttttctagaggatagcacttacg

SEQ ID NO: 176810 - DNA, 30 bp, Artificial Sequence
  Synthetic oligonucleotide
tcggcgtagtaatcatgtctctgacttacg

SEQ ID NO: 176811 - DNA, 30 bp, Artificial Sequence
  Synthetic oligonucleotide
atggaggccacatcaatacgattgcttacg

SEQ ID NO: 176812 - DNA, 30 bp, Artificial Sequence
  Synthetic oligonucleotide
aaaaggcaggcgtgtctgcttccagttacg

SEQ ID NO: 176813 - DNA, 30 bp, Artificial Sequence
  Synthetic oligonucleotide
agggcggtcggccgctgaacctacgttacg

SEQ ID NO: 176814 - DNA, 30 bp, Artificial Sequence
  Synthetic oligonucleotide
taaatctctaagttggaacagggcgttacg

SEQ ID NO: 176815 - DNA, 30 bp, Artificial Sequence
  Synthetic oligonucleotide
aggcgtcctgcacacggctcagtctttacg

SEQ ID NO: 176816 - DNA, 30 bp, Artificial Sequence
  Synthetic oligonucleotide
actaaaagatgtcacaagggtatttttacg

SEQ ID NO: 176817 - DNA, 30 bp, Artificial Sequence
  Synthetic oligonucleotide
aaatgcctacatgtcgaaagaagaaaaccg

SEQ ID NO: 176818 - DNA, 30 bp, Artificial Sequence
  Synthetic oligonucleotide
agttgcagtaatgcccagatgggcaaaccg

SEQ ID NO: 176819 - DNA, 30 bp, Artificial Sequence
  Synthetic oligonucleotide
tctagcagggattttctatatgggaaaccg

SEQ ID NO: 176820 - DNA, 30 bp, Artificial Sequence
  Synthetic oligonucleotide
gggaatagtagtaggggacttactaaaccg

SEQ ID NO: 176821 - DNA, 30 bp, Artificial Sequence
  Synthetic oligonucleotide
tttcgactacgagagtgtcgtacacaaccg

SEQ ID NO: 176822 - DNA, 30 bp, Artificial Sequence
  Synthetic oligonucleotide
aaaaagggggacggtctgtgatgccaaccg

SEQ ID NO: 176823 - DNA, 30 bp, Artificial Sequence
  Synthetic oligonucleotide
cttagaatatctactatgcctgctcaaccg

SEQ ID NO: 176824 - DNA, 30 bp, Artificial Sequence
  Synthetic oligonucleotide
ttaacaagatgttcaacgactgatgaaccg

SEQ ID NO: 176825 - DNA, 30 bp, Artificial Sequence
  Synthetic oligonucleotide
tcagccgccgaccggtatcgtcgctaaccg

SEQ ID NO: 176826 - DNA, 30 bp, Artificial Sequence
  Synthetic oligonucleotide
cgaagctaatgaagtcggcaaacttaaccg

SEQ ID NO: 176827 - DNA, 30 bp, Artificial Sequence
  Synthetic oligonucleotide
tacaattctcccgtgattctaggcacaccg

SEQ ID NO: 176828 - DNA, 30 bp, Artificial Sequence
  Synthetic oligonucleotide
aaattgggggaatctcatcacggcacaccg

SEQ ID NO: 176829 - DNA, 30 bp, Artificial Sequence
  Synthetic oligonucleotide
cactctatgcggaagccgacgtctacaccg

SEQ ID NO: 176830 - DNA, 30 bp, Artificial Sequence
  Synthetic oligonucleotide
gccatggctcgcttctactatccgccaccg

SEQ ID NO: 176831 - DNA, 30 bp, Artificial Sequence
  Synthetic oligonucleotide
cacatctaagaaatggtttaccctccaccg

SEQ ID NO: 176832 - DNA, 30 bp, Artificial Sequence
  Synthetic oligonucleotide
ttggtgcaaaccagtgtatgaggagcaccg

SEQ ID NO: 176833 - DNA, 30 bp, Artificial Sequence
  Synthetic oligonucleotide
tgtgtcagtgatgatactacgatcgcaccg

SEQ ID NO: 176834 - DNA, 30 bp, Artificial Sequence
  Synthetic oligonucleotide
gcgctggtcagccgtggttagtgtgcaccg

SEQ ID NO: 176835 - DNA, 30 bp, Artificial Sequence
  Synthetic oligonucleotide
tagcgagtatcttagacaccatggtcaccg

SEQ ID NO: 176836 - DNA, 30 bp, Artificial Sequence
  Synthetic oligonucleotide
gacggcggatatacatagccgagaagaccg

SEQ ID NO: 176837 - DNA, 30 bp, Artificial Sequence
  Synthetic oligonucleotide
tcattgagccccaatatcacaatcagaccg

SEQ ID NO: 176838 - DNA, 30 bp, Artificial Sequence
  Synthetic oligonucleotide
gatacgtcgataatagtagttctcagaccg

SEQ ID NO: 176839 - DNA, 30 bp, Artificial Sequence
  Synthetic oligonucleotide
atagtcatgggttacactcactagagaccg

SEQ ID NO: 176840 - DNA, 30 bp, Artificial Sequence
  Synthetic oligonucleotide
tgacctctaagcgatcgacgttgtagaccg

SEQ ID NO: 176841 - DNA, 30 bp, Artificial Sequence
  Synthetic oligonucleotide
tagcaaatgccagatcacgatatacgaccg

SEQ ID NO: 176842 - DNA, 30 bp, Artificial Sequence
  Synthetic oligonucleotide
aaggacttagcgttcttaaccagccgaccg

SEQ ID NO: 176843 - DNA, 30 bp, Artificial Sequence
  Synthetic oligonucleotide
tattcatcggaaggagatgggtagcgaccg

SEQ ID NO: 176844 - DNA, 30 bp, Artificial Sequence
  Synthetic oligonucleotide
taagtctggagtgttcgggcaaacggaccg

SEQ ID NO: 176845 - DNA, 30 bp, Artificial Sequence
  Synthetic oligonucleotide
catgcaagccctgtcaatgtatttggaccg

SEQ ID NO: 176846 - DNA, 30 bp, Artificial Sequence
  Synthetic oligonucleotide
tctacatcaagcgacatttggagctgaccg

SEQ ID NO: 176847 - DNA, 30 bp, Artificial Sequence
  Synthetic oligonucleotide
gcaaagcagggagtatctttgccaataccg

SEQ ID NO: 176848 - DNA, 30 bp, Artificial Sequence
  Synthetic oligonucleotide
aacttaaatcaagttccacatccgataccg

SEQ ID NO: 176849 - DNA, 30 bp, Artificial Sequence
  Synthetic oligonucleotide
ctcgcagtaccactactgctcactataccg

SEQ ID NO: 176850 - DNA, 30 bp, Artificial Sequence
  Synthetic oligonucleotide
gttatcgtaagcgactaacccctcgtaccg

SEQ ID NO: 176851 - DNA, 30 bp, Artificial Sequence
  Synthetic oligonucleotide
actaatgatacggacattttgaaggtaccg

SEQ ID NO: 176852 - DNA, 30 bp, Artificial Sequence
  Synthetic oligonucleotide
gccaggggatgatttagcctttgattaccg

SEQ ID NO: 176853 - DNA, 30 bp, Artificial Sequence
  Synthetic oligonucleotide
aagtgctccttgattagagagaacttaccg

SEQ ID NO: 176854 - DNA, 30 bp, Artificial Sequence
  Synthetic oligonucleotide
ctgtatgtagaagagagtttacacttaccg

SEQ ID NO: 176855 - DNA, 30 bp, Artificial Sequence
  Synthetic oligonucleotide
tcacgtatccatgagactgtggttttaccg

SEQ ID NO: 176856 - DNA, 30 bp, Artificial Sequence
  Synthetic oligonucleotide
caccatgcaaaactcagtgaggaaaacccg

SEQ ID NO: 176857 - DNA, 30 bp, Artificial Sequence
  Synthetic oligonucleotide
tgtcaaagttctcgtggggatataaacccg

SEQ ID NO: 176858 - DNA, 30 bp, Artificial Sequence
  Synthetic oligonucleotide
actttcaaacctgcgtagagaaacaacccg

SEQ ID NO: 176859 - DNA, 30 bp, Artificial Sequence
  Synthetic oligonucleotide
cacattgcacggagctaaacacaacacccg

SEQ ID NO: 176860 - DNA, 30 bp, Artificial Sequence
  Synthetic oligonucleotide
acggtatatcttgcccggtttgtccacccg

SEQ ID NO: 176861 - DNA, 30 bp, Artificial Sequence
  Synthetic oligonucleotide
ttattcagtattctaatgtgattccacccg

SEQ ID NO: 176862 - DNA, 30 bp, Artificial Sequence
  Synthetic oligonucleotide
actggccgcaaaagacgaacgggcgacccg

SEQ ID NO: 176863 - DNA, 30 bp, Artificial Sequence
  Synthetic oligonucleotide
tcaaacaagcggctaggtagtctcgacccg

SEQ ID NO: 176864 - DNA, 30 bp, Artificial Sequence
  Synthetic oligonucleotide
ccgttataacttaatcagtcataggacccg

SEQ ID NO: 176865 - DNA, 30 bp, Artificial Sequence
  Synthetic oligonucleotide
gaaaacttgctcttaatatcggaatacccg

SEQ ID NO: 176866 - DNA, 30 bp, Artificial Sequence
  Synthetic oligonucleotide
aacggttactgatatatcatatgatacccg

SEQ ID NO: 176867 - DNA, 30 bp, Artificial Sequence
  Synthetic oligonucleotide
agaaatggcattcgtaggttttgctacccg

SEQ ID NO: 176868 - DNA, 30 bp, Artificial Sequence
  Synthetic oligonucleotide
gatgtttgctaaaaagaactgaagtacccg

SEQ ID NO: 176869 - DNA, 30 bp, Artificial Sequence
  Synthetic oligonucleotide
tggggatgatcaacagtctgcggttacccg

SEQ ID NO: 176870 - DNA, 30 bp, Artificial Sequence
  Synthetic oligonucleotide
gcgcaagagcatgtatcaactgcaaccccg

SEQ ID NO: 176871 - DNA, 30 bp, Artificial Sequence
  Synthetic oligonucleotide
gagatacacacgacaagtgggagaaccccg

SEQ ID NO: 176872 - DNA, 30 bp, Artificial Sequence
  Synthetic oligonucleotide
gacaaacgtggcgtcttacatggaaccccg

SEQ ID NO: 176873 - DNA, 30 bp, Artificial Sequence
  Synthetic oligonucleotide
acggaatgtctgtttgccggcaccaccccg

SEQ ID NO: 176874 - DNA, 30 bp, Artificial Sequence
  Synthetic oligonucleotide
ccatctacacatcaggccgtagataccccg

SEQ ID NO: 176875 - DNA, 30 bp, Artificial Sequence
  Synthetic oligonucleotide
aggtaactatcatcagatgttaaggccccg

SEQ ID NO: 176876 - DNA, 30 bp, Artificial Sequence
  Synthetic oligonucleotide
tccattcctgtgcattacctaccggccccg

SEQ ID NO: 176877 - DNA, 30 bp, Artificial Sequence
  Synthetic oligonucleotide
taggtatcggaacggtcatgcccaagcccg

SEQ ID NO: 176878 - DNA, 30 bp, Artificial Sequence
  Synthetic oligonucleotide
agatggatcacaatgagatcgttaagcccg

SEQ ID NO: 176879 - DNA, 30 bp, Artificial Sequence
  Synthetic oligonucleotide
agttcgttatcgaacgattaacgtagcccg

SEQ ID NO: 176880 - DNA, 30 bp, Artificial Sequence
  Synthetic oligonucleotide
cagagggattattccaatggatcacgcccg

SEQ ID NO: 176881 - DNA, 30 bp, Artificial Sequence
  Synthetic oligonucleotide
tctaaggggcgattaaacatctcacgcccg

SEQ ID NO: 176882 - DNA, 30 bp, Artificial Sequence
  Synthetic oligonucleotide
accacgcataaagggagcacgttccgcccg

SEQ ID NO: 176883 - DNA, 30 bp, Artificial Sequence
  Synthetic oligonucleotide
ccagcatgaactgggaggaaaactcgcccg

SEQ ID NO: 176884 - DNA, 30 bp, Artificial Sequence
  Synthetic oligonucleotide
ctctaaagctgtaagcttgctgccggcccg

SEQ ID NO: 176885 - DNA, 30 bp, Artificial Sequence
  Synthetic oligonucleotide
acggggacaatgttgccgtcttgtggcccg

SEQ ID NO: 176886 - DNA, 30 bp, Artificial Sequence
  Synthetic oligonucleotide
acgtatgcgcgttgcaagatcgttggcccg

SEQ ID NO: 176887 - DNA, 30 bp, Artificial Sequence
  Synthetic oligonucleotide
gcgctgctttgttaatggattaaatgcccg

SEQ ID NO: 176888 - DNA, 30 bp, Artificial Sequence
  Synthetic oligonucleotide
caaggtctttccatttgtacccgatgcccg

SEQ ID NO: 176889 - DNA, 30 bp, Artificial Sequence
  Synthetic oligonucleotide
ctaccagtggcctagcggtccgagtgcccg

SEQ ID NO: 176890 - DNA, 30 bp, Artificial Sequence
  Synthetic oligonucleotide
gacaaatcatcgaattcctccctttgcccg

SEQ ID NO: 176891 - DNA, 30 bp, Artificial Sequence
  Synthetic oligonucleotide
tctcatgacatggaacataaccccatcccg

SEQ ID NO: 176892 - DNA, 30 bp, Artificial Sequence
  Synthetic oligonucleotide
ccacaaccccgtgtgattattcaactcccg

SEQ ID NO: 176893 - DNA, 30 bp, Artificial Sequence
  Synthetic oligonucleotide
cgcgcacgacacccatacggtacactcccg

SEQ ID NO: 176894 - DNA, 30 bp, Artificial Sequence
  Synthetic oligonucleotide
ttgcataggatcttgatttcccagctcccg

SEQ ID NO: 176895 - DNA, 30 bp, Artificial Sequence
  Synthetic oligonucleotide
acagtctataagaatgttccgtggctcccg

SEQ ID NO: 176896 - DNA, 30 bp, Artificial Sequence
  Synthetic oligonucleotide
agtgttattgttgccagattcgcagtcccg

SEQ ID NO: 176897 - DNA, 30 bp, Artificial Sequence
  Synthetic oligonucleotide
ctagtggagcacaagaggtgccgcgtcccg

SEQ ID NO: 176898 - DNA, 30 bp, Artificial Sequence
  Synthetic oligonucleotide
ggagtaatgtgcgtcaatgggggggtcccg

SEQ ID NO: 176899 - DNA, 30 bp, Artificial Sequence
  Synthetic oligonucleotide
atagccgagagcaatcttgttttggtcccg

SEQ ID NO: 176900 - DNA, 30 bp, Artificial Sequence
  Synthetic oligonucleotide
gccaatctccagtcatcccttcttgtcccg

SEQ ID NO: 176901 - DNA, 30 bp, Artificial Sequence
  Synthetic oligonucleotide
catgaaccgtgtgattgatgaatattcccg

SEQ ID NO: 176902 - DNA, 31 bp, Artificial Sequence
  Synthetic oligonucleotide
catttgggggagacatgcattagggttcccg

SEQ ID NO: 176903 - DNA, 30 bp, Artificial Sequence
  Synthetic oligonucleotide
attcagccgctccataaaaggtggttcccg

SEQ ID NO: 176904 - DNA, 30 bp, Artificial Sequence
  Synthetic oligonucleotide
cccgataaacgacttagtcctctaaagccg

SEQ ID NO: 176905 - DNA, 30 bp, Artificial Sequence
  Synthetic oligonucleotide
aagtcatggtgagacagaaatcgacagccg

SEQ ID NO: 176906 - DNA, 30 bp, Artificial Sequence
  Synthetic oligonucleotide
caacgaagctcgggcggatgccgccagccg

SEQ ID NO: 176907 - DNA, 31 bp, Artificial Sequence
  Synthetic oligonucleotide
cgcagattgacccaaggaaactctagagccg

SEQ ID NO: 176908 - DNA, 30 bp, Artificial Sequence
  Synthetic oligonucleotide
gatcacaaaggaggacaggaggcggagccg

SEQ ID NO: 176909 - DNA, 30 bp, Artificial Sequence
  Synthetic oligonucleotide
agtcagcattgaaatacgtgtagggagccg

SEQ ID NO: 176910 - DNA, 30 bp, Artificial Sequence
  Synthetic oligonucleotide
gtgtaaatcgttctaaagcattaatagccg

SEQ ID NO: 176911 - DNA, 30 bp, Artificial Sequence
  Synthetic oligonucleotide
tcctaggggcaggaaatcagcccatagccg

SEQ ID NO: 176912 - DNA, 30 bp, Artificial Sequence
  Synthetic oligonucleotide
ggcctcatctgtttcgccgaattctagccg

SEQ ID NO: 176913 - DNA, 30 bp, Artificial Sequence
  Synthetic oligonucleotide
ccacagactaaagcacacgcgcagtagccg

SEQ ID NO: 176914 - DNA, 30 bp, Artificial Sequence
  Synthetic oligonucleotide
aagtggcgcccccagaccaggctgtagccg

SEQ ID NO: 176915 - DNA, 30 bp, Artificial Sequence
  Synthetic oligonucleotide
ccaaggactagggacggatgggaaacgccg

SEQ ID NO: 176916 - DNA, 30 bp, Artificial Sequence
  Synthetic oligonucleotide
atgggagggtcaccactcaccgtaacgccg

SEQ ID NO: 176917 - DNA, 30 bp, Artificial Sequence
  Synthetic oligonucleotide
cgcctggacccgtaaagacctcagacgccg

SEQ ID NO: 176918 - DNA, 30 bp, Artificial Sequence
  Synthetic oligonucleotide
agacgtggagtggccgtaggaagtacgccg

SEQ ID NO: 176919 - DNA, 30 bp, Artificial Sequence
  Synthetic oligonucleotide
tcaaccaataaagtcttaagtcttacgccg

SEQ ID NO: 176920 - DNA, 30 bp, Artificial Sequence
  Synthetic oligonucleotide
ctgattatgtagtagtgtgtggtcgcgccg

SEQ ID NO: 176921 - DNA, 30 bp, Artificial Sequence
  Synthetic oligonucleotide
tgaggtacctgggggcaagccggggcgccg

SEQ ID NO: 176922 - DNA, 30 bp, Artificial Sequence
  Synthetic oligonucleotide
gagaatcattgcagtctgagctcatcgccg

SEQ ID NO: 176923 - DNA, 30 bp, Artificial Sequence
  Synthetic oligonucleotide
acagatcggatcaatcggaatgcctcgccg

SEQ ID NO: 176924 - DNA, 30 bp, Artificial Sequence
  Synthetic oligonucleotide
aacaatctcctgtgacgatagtcaaggccg

SEQ ID NO: 176925 - DNA, 30 bp, Artificial Sequence
  Synthetic oligonucleotide
aatgctagatcggactgaggttcaaggccg

SEQ ID NO: 176926 - DNA, 30 bp, Artificial Sequence
  Synthetic oligonucleotide
cgacaagccgtaaggccaaagctcaggccg

SEQ ID NO: 176927 - DNA, 30 bp, Artificial Sequence
  Synthetic oligonucleotide
gctaagctcaattactcacgcgtccggccg

SEQ ID NO: 176928 - DNA, 30 bp, Artificial Sequence
  Synthetic oligonucleotide
cgacgggtaatgtttcagcttgagcggccg

SEQ ID NO: 176929 - DNA, 30 bp, Artificial Sequence
  Synthetic oligonucleotide
taatatgaaaatcataaggacaatcggccg

SEQ ID NO: 176930 - DNA, 30 bp, Artificial Sequence
  Synthetic oligonucleotide
tagttcgagacgattctgcaatctcggccg

SEQ ID NO: 176931 - DNA, 30 bp, Artificial Sequence
  Synthetic oligonucleotide
ataccagtttccaaggcatccggagggccg

SEQ ID NO: 176932 - DNA, 30 bp, Artificial Sequence
  Synthetic oligonucleotide
gtaatagacggaaaatgctacgaggggccg

SEQ ID NO: 176933 - DNA, 30 bp, Artificial Sequence
  Synthetic oligonucleotide
aaaaatgatagcgtcacatcgtcggggccg

SEQ ID NO: 176934 - DNA, 30 bp, Artificial Sequence
  Synthetic oligonucleotide
gactgggggtactttcacccgcgggggccg

SEQ ID NO: 176935 - DNA, 30 bp, Artificial Sequence
  Synthetic oligonucleotide
tcaccattaagaataagtagatatgggccg

SEQ ID NO: 176936 - DNA, 30 bp, Artificial Sequence
  Synthetic oligonucleotide
gctacgagagaagggccaataagatggccg

SEQ ID NO: 176937 - DNA, 30 bp, Artificial Sequence
  Synthetic oligonucleotide
cagaggttcagacacagtctataaatgccg

SEQ ID NO: 176938 - DNA, 30 bp, Artificial Sequence
  Synthetic oligonucleotide
aagtcattcgggggagatgtaagaatgccg

SEQ ID NO: 176939 - DNA, 30 bp, Artificial Sequence
  Synthetic oligonucleotide
tgtaagctagcctcagcgaagaacatgccg

SEQ ID NO: 176940 - DNA, 30 bp, Artificial Sequence
  Synthetic oligonucleotide
catcaatatcctaaagatgtttacatgccg

SEQ ID NO: 176941 - DNA, 30 bp, Artificial Sequence
  Synthetic oligonucleotide
cgttttaacttacaacggagttcgatgccg

SEQ ID NO: 176942 - DNA, 30 bp, Artificial Sequence
  Synthetic oligonucleotide
tttactcagtcgagcgggctgaggatgccg

SEQ ID NO: 176943 - DNA, 30 bp, Artificial Sequence
  Synthetic oligonucleotide
gtatcaccgtggagtcgattaccactgccg

SEQ ID NO: 176944 - DNA, 30 bp, Artificial Sequence
  Synthetic oligonucleotide
agcttcgcttatcagccaccaaggctgccg

SEQ ID NO: 176945 - DNA, 30 bp, Artificial Sequence
  Synthetic oligonucleotide
catagacactcatcgtttgtgagagtgccg

SEQ ID NO: 176946 - DNA, 30 bp, Artificial Sequence
  Synthetic oligonucleotide
cgtggtgtactcgggaatagacccgtgccg

SEQ ID NO: 176947 - DNA, 30 bp, Artificial Sequence
  Synthetic oligonucleotide
ccctcgtcccacttggtcctggaggtgccg

SEQ ID NO: 176948 - DNA, 29 bp, Artificial Sequence
  Synthetic oligonucleotide
tgggtgggaggggggtgtcaaatgtgccg

SEQ ID NO: 176949 - DNA, 30 bp, Artificial Sequence
  Synthetic oligonucleotide
ccacaacgttttagtccgaagcgtgtgccg

SEQ ID NO: 176950 - DNA, 30 bp, Artificial Sequence
  Synthetic oligonucleotide
gtataaactgcgccgcataatttgttgccg

SEQ ID NO: 176951 - DNA, 30 bp, Artificial Sequence
  Synthetic oligonucleotide
aaccggtaccgttgtctacacaatttgccg

SEQ ID NO: 176952 - DNA, 30 bp, Artificial Sequence
  Synthetic oligonucleotide
cgctaggcgtaacgcgcctaggatttgccg

SEQ ID NO: 176953 - DNA, 30 bp, Artificial Sequence
  Synthetic oligonucleotide
cgcttcctctactctttcctctagaatccg

SEQ ID NO: 176954 - DNA, 30 bp, Artificial Sequence
  Synthetic oligonucleotide
acattttggtttctcatacaaaggaatccg

SEQ ID NO: 176955 - DNA, 30 bp, Artificial Sequence
  Synthetic oligonucleotide
ctcgtcataggtatgggtaccgggcatccg

SEQ ID NO: 176956 - DNA, 30 bp, Artificial Sequence
  Synthetic oligonucleotide
aattgagttaggtgagtatttgggcatccg

SEQ ID NO: 176957 - DNA, 30 bp, Artificial Sequence
  Synthetic oligonucleotide
actatgggaaaggatgagtattggcatccg

SEQ ID NO: 176958 - DNA, 30 bp, Artificial Sequence
  Synthetic oligonucleotide
catggaccactcgggcgcatttggcatccg

SEQ ID NO: 176959 - DNA, 30 bp, Artificial Sequence
  Synthetic oligonucleotide
agtgcacacaaggagatctcacatcatccg

SEQ ID NO: 176960 - DNA, 30 bp, Artificial Sequence
  Synthetic oligonucleotide
gcacaaacatataacgataatcttcatccg

SEQ ID NO: 176961 - DNA, 30 bp, Artificial Sequence
  Synthetic oligonucleotide
ccttcgcgagcagtctttccgagggatccg

SEQ ID NO: 176962 - DNA, 30 bp, Artificial Sequence
  Synthetic oligonucleotide
acatatcatcttcggaattgtcgtgatccg

SEQ ID NO: 176963 - DNA, 30 bp, Artificial Sequence
  Synthetic oligonucleotide
tcaggcgggagtgttccgcagggatatccg

SEQ ID NO: 176964 - DNA, 30 bp, Artificial Sequence
  Synthetic oligonucleotide
accgataaggtgattcattgagcctatccg

SEQ ID NO: 176965 - DNA, 30 bp, Artificial Sequence
  Synthetic oligonucleotide
gcgtattactagggttcctggttctatccg

SEQ ID NO: 176966 - DNA, 30 bp, Artificial Sequence
  Synthetic oligonucleotide
atgttatttagcaaccagtccaggtatccg

SEQ ID NO: 176967 - DNA, 30 bp, Artificial Sequence
  Synthetic oligonucleotide
gagcagggcaggtgtctgagtttgtatccg

SEQ ID NO: 176968 - DNA, 30 bp, Artificial Sequence
  Synthetic oligonucleotide
actgatattaaacgacccgcgcgaactccg

SEQ ID NO: 176969 - DNA, 30 bp, Artificial Sequence
  Synthetic oligonucleotide
taaatgcaattcccccatcgaggaactccg

SEQ ID NO: 176970 - DNA, 30 bp, Artificial Sequence
  Synthetic oligonucleotide
ggtgcggccgcgagatcgagtataactccg

SEQ ID NO: 176971 - DNA, 30 bp, Artificial Sequence
  Synthetic oligonucleotide
gggtgattctggtacctctacgacactccg

SEQ ID NO: 176972 - DNA, 30 bp, Artificial Sequence
  Synthetic oligonucleotide
gtgacacgtatgacgctaacgtgcactccg

SEQ ID NO: 176973 - DNA, 30 bp, Artificial Sequence
  Synthetic oligonucleotide
cggcttacgcgcccaactcgtcagactccg

SEQ ID NO: 176974 - DNA, 30 bp, Artificial Sequence
  Synthetic oligonucleotide
cgggtgagaatttcggcctagatccctccg

SEQ ID NO: 176975 - DNA, 30 bp, Artificial Sequence
  Synthetic oligonucleotide
cggcttgttcggaaatagggttgagctccg

SEQ ID NO: 176976 - DNA, 30 bp, Artificial Sequence
  Synthetic oligonucleotide
tgctggtcggagtgagtggccttagctccg

SEQ ID NO: 176977 - DNA, 30 bp, Artificial Sequence
  Synthetic oligonucleotide
cccatcgaccatcaagtcaatatatctccg

SEQ ID NO: 176978 - DNA, 30 bp, Artificial Sequence
  Synthetic oligonucleotide
cttcagtcttctgaatactctttctctccg

SEQ ID NO: 176979 - DNA, 30 bp, Artificial Sequence
  Synthetic oligonucleotide
gttaaccgcattataaaggtagagtctccg

SEQ ID NO: 176980 - DNA, 30 bp, Artificial Sequence
  Synthetic oligonucleotide
gtatggatcgaggcgggggagcattctccg

SEQ ID NO: 176981 - DNA, 30 bp, Artificial Sequence
  Synthetic oligonucleotide
gtcgttgggactggtgccacaccttctccg

SEQ ID NO: 176982 - DNA, 30 bp, Artificial Sequence
  Synthetic oligonucleotide
cttatgcccgaacggaaatcgcgcagtccg

SEQ ID NO: 176983 - DNA, 30 bp, Artificial Sequence
  Synthetic oligonucleotide
ttaattctgaggcctcaaagtccgagtccg

SEQ ID NO: 176984 - DNA, 30 bp, Artificial Sequence
  Synthetic oligonucleotide
tatatcattgaagttcttacagggagtccg

SEQ ID NO: 176985 - DNA, 30 bp, Artificial Sequence
  Synthetic oligonucleotide
gaatcatacgggatatactctgtgagtccg

SEQ ID NO: 176986 - DNA, 30 bp, Artificial Sequence
  Synthetic oligonucleotide
aggcataatcccaaaaggtcctcacgtccg

SEQ ID NO: 176987 - DNA, 30 bp, Artificial Sequence
  Synthetic oligonucleotide
taaatcgaggacgggaacttaagtcgtccg

SEQ ID NO: 176988 - DNA, 30 bp, Artificial Sequence
  Synthetic oligonucleotide
agtggtgggtgtgggtctggagacggtccg

SEQ ID NO: 176989 - DNA, 30 bp, Artificial Sequence
  Synthetic oligonucleotide
aacaagacctgatgggaagagtacggtccg

SEQ ID NO: 176990 - DNA, 30 bp, Artificial Sequence
  Synthetic oligonucleotide
ctaagtaaggaagcttagttccagggtccg

SEQ ID NO: 176991 - DNA, 30 bp, Artificial Sequence
  Synthetic oligonucleotide
ggtatccccattctccctgataatggtccg

SEQ ID NO: 176992 - DNA, 30 bp, Artificial Sequence
  Synthetic oligonucleotide
aataacacaagcatcatggaagatggtccg

SEQ ID NO: 176993 - DNA, 30 bp, Artificial Sequence
  Synthetic oligonucleotide
attgtgaatagtgacctctcaggatgtccg

SEQ ID NO: 176994 - DNA, 30 bp, Artificial Sequence
  Synthetic oligonucleotide
cgctaaacagattgtaatagtcgctgtccg

SEQ ID NO: 176995 - DNA, 30 bp, Artificial Sequence
  Synthetic oligonucleotide
atggagatttccagaagcaccgagtgtccg

SEQ ID NO: 176996 - DNA, 30 bp, Artificial Sequence
  Synthetic oligonucleotide
tcgagcgagtaagttatatatgtccttccg

SEQ ID NO: 176997 - DNA, 30 bp, Artificial Sequence
  Synthetic oligonucleotide
cctcgggatggaggtgttgtcaatcttccg

SEQ ID NO: 176998 - DNA, 30 bp, Artificial Sequence
  Synthetic oligonucleotide
caggttaatcaggttgtcgtgtttcttccg

SEQ ID NO: 176999 - DNA, 30 bp, Artificial Sequence
  Synthetic oligonucleotide
tacgaggacttcgatgtgtatttcgttccg

SEQ ID NO: 177000 - DNA, 30 bp, Artificial Sequence
  Synthetic oligonucleotide
acggagaacacaaatgaccccgaggttccg

SEQ ID NO: 177001 - DNA, 30 bp, Artificial Sequence
  Synthetic oligonucleotide
cacggattcaaaccacctgacatggttccg

SEQ ID NO: 177002 - DNA, 30 bp, Artificial Sequence
  Synthetic oligonucleotide
accactatggctctaaagcccggctttccg

SEQ ID NO: 177003 - DNA, 30 bp, Artificial Sequence
  Synthetic oligonucleotide
gatcacatactagtcacagtgcagtttccg

SEQ ID NO: 177004 - DNA, 30 bp, Artificial Sequence
  Synthetic oligonucleotide
ctacatgcctcgttaaacacaaaaaaagcg

SEQ ID NO: 177005 - DNA, 30 bp, Artificial Sequence
  Synthetic oligonucleotide
tcaacagtatccggtgggtgaaaaaaagcg

SEQ ID NO: 177006 - DNA, 30 bp, Artificial Sequence
  Synthetic oligonucleotide
aggcatacagggtctagctcgggaaaagcg

SEQ ID NO: 177007 - DNA, 30 bp, Artificial Sequence
  Synthetic oligonucleotide
cttgcaaaggtttaaaagagtggcaaagcg

SEQ ID NO: 177008 - DNA, 30 bp, Artificial Sequence
  Synthetic oligonucleotide
ggcatctaccttgacacactttgcaaagcg

SEQ ID NO: 177009 - DNA, 30 bp, Artificial Sequence
  Synthetic oligonucleotide
agcaacgtcttcgcttatgagatcaaagcg

SEQ ID NO: 177010 - DNA, 30 bp, Artificial Sequence
  Synthetic oligonucleotide
ataccaccgataagcgaactactcaaagcg

SEQ ID NO: 177011 - DNA, 30 bp, Artificial Sequence
  Synthetic oligonucleotide
ccgttgcatgccgtttgggttaagaaagcg

SEQ ID NO: 177012 - DNA, 30 bp, Artificial Sequence
  Synthetic oligonucleotide
tggctctcgtcctccacgcggtggaaagcg

SEQ ID NO: 177013 - DNA, 30 bp, Artificial Sequence
  Synthetic oligonucleotide
tgtcgtattataattctagagggacaagcg

SEQ ID NO: 177014 - DNA, 30 bp, Artificial Sequence
  Synthetic oligonucleotide
acttaactcaatcttacaaatagtcaagcg

SEQ ID NO: 177015 - DNA, 30 bp, Artificial Sequence
  Synthetic oligonucleotide
atggatcgactgaaatgacgactagaagcg

SEQ ID NO: 177016 - DNA, 30 bp, Artificial Sequence
  Synthetic oligonucleotide
ctagacaactcgagcctatatgtagaagcg

SEQ ID NO: 177017 - DNA, 30 bp, Artificial Sequence
  Synthetic oligonucleotide
caggcgcaacagttaacaatgaacgaagcg

SEQ ID NO: 177018 - DNA, 30 bp, Artificial Sequence
  Synthetic oligonucleotide
gacaaacaaatgtatgattcggccgaagcg

SEQ ID NO: 177019 - DNA, 30 bp, Artificial Sequence
  Synthetic oligonucleotide
aggttcttcaaagcgagaacaactgaagcg

SEQ ID NO: 177020 - DNA, 30 bp, Artificial Sequence
  Synthetic oligonucleotide
gtatgttcaatcttattgctgcgtgaagcg

SEQ ID NO: 177021 - DNA, 31 bp, Artificial Sequence
  Synthetic oligonucleotide
aagcggcagtcgtaacttcgggtgtgaagcg

SEQ ID NO: 177022 - DNA, 30 bp, Artificial Sequence
  Synthetic oligonucleotide
tatgaattgacttcggtgcgttgaacagcg

SEQ ID NO: 177023 - DNA, 30 bp, Artificial Sequence
  Synthetic oligonucleotide
agtaatggacgcggcctaccgataacagcg

SEQ ID NO: 177024 - DNA, 30 bp, Artificial Sequence
  Synthetic oligonucleotide
gttagggaaatatccataaataccacagcg

SEQ ID NO: 177025 - DNA, 30 bp, Artificial Sequence
  Synthetic oligonucleotide
gactgcgtgccgttggataaacgtacagcg

SEQ ID NO: 177026 - DNA, 30 bp, Artificial Sequence
  Synthetic oligonucleotide
ggcttgagtaagattcttatagttacagcg

SEQ ID NO: 177027 - DNA, 30 bp, Artificial Sequence
  Synthetic oligonucleotide
cgccgtagcgtgtatcatacggcaccagcg

SEQ ID NO: 177028 - DNA, 30 bp, Artificial Sequence
  Synthetic oligonucleotide
gataaaaaataaaacgtaacaggaccagcg

SEQ ID NO: 177029 - DNA, 30 bp, Artificial Sequence
  Synthetic oligonucleotide
ttgatctcgtagagaagcggcttaccagcg

SEQ ID NO: 177030 - DNA, 30 bp, Artificial Sequence
  Synthetic oligonucleotide
ctgtggttgcattgattctatatgccagcg

SEQ ID NO: 177031 - DNA, 30 bp, Artificial Sequence
  Synthetic oligonucleotide
acgtagtcgtctttttggaaggctccagcg

SEQ ID NO: 177032 - DNA, 30 bp, Artificial Sequence
  Synthetic oligonucleotide
gatgccccatcaggccagatcgcagcagcg

SEQ ID NO: 177033 - DNA, 30 bp, Artificial Sequence
  Synthetic oligonucleotide
ggcgacgcttttatgtggcattgggcagcg

SEQ ID NO: 177034 - DNA, 30 bp, Artificial Sequence
  Synthetic oligonucleotide
gtgcggatatggggaacaggcctggcagcg

SEQ ID NO: 177035 - DNA, 30 bp, Artificial Sequence
  Synthetic oligonucleotide
caccttcccatcaccgtttgaaggagagcg

SEQ ID NO: 177036 - DNA, 30 bp, Artificial Sequence
  Synthetic oligonucleotide
cgtacacgggccgcgctagtttgtagagcg

SEQ ID NO: 177037 - DNA, 30 bp, Artificial Sequence
  Synthetic oligonucleotide
cacgtagggccacgagacaagtgacgagcg

SEQ ID NO: 177038 - DNA, 30 bp, Artificial Sequence
  Synthetic oligonucleotide
agagtatcaggagtacgccggttacgagcg

SEQ ID NO: 177039 - DNA, 30 bp, Artificial Sequence
  Synthetic oligonucleotide
agtgtccattgttggaccggacagcgagcg

SEQ ID NO: 177040 - DNA, 30 bp, Artificial Sequence
  Synthetic oligonucleotide
ttcacgaaatgcataatggaaactcgagcg

SEQ ID NO: 177041 - DNA, 31 bp, Artificial Sequence
  Synthetic oligonucleotide
gcggggcggcgtttgaagattccctcgagcg

SEQ ID NO: 177042 - DNA, 30 bp, Artificial Sequence
  Synthetic oligonucleotide
ttacggggcggcatagatgcaggtcgagcg

SEQ ID NO: 177043 - DNA, 30 bp, Artificial Sequence
  Synthetic oligonucleotide
tcagacacattagtaccaaatgtaggagcg

SEQ ID NO: 177044 - DNA, 30 bp, Artificial Sequence
  Synthetic oligonucleotide
gtgccagtggatgggttcgacatcggagcg

SEQ ID NO: 177045 - DNA, 30 bp, Artificial Sequence
  Synthetic oligonucleotide
tgtgccatatgcacagcattatagggagcg

SEQ ID NO: 177046 - DNA, 30 bp, Artificial Sequence
  Synthetic oligonucleotide
aactgttagagttgtgatccggctggagcg

SEQ ID NO: 177047 - DNA, 30 bp, Artificial Sequence
  Synthetic oligonucleotide
gataggtttcatggctaggtccttggagcg

SEQ ID NO: 177048 - DNA, 29 bp, Artificial Sequence
  Synthetic oligonucleotide
gcaatgggcttccgcatgattcatgagcg

SEQ ID NO: 177049 - DNA, 30 bp, Artificial Sequence
  Synthetic oligonucleotide
ctctgcggggaccaaaaatactactgagcg

SEQ ID NO: 177050 - DNA, 30 bp, Artificial Sequence
  Synthetic oligonucleotide
tgttgagaatactgtcagaagttgtgagcg

SEQ ID NO: 177051 - DNA, 30 bp, Artificial Sequence
  Synthetic oligonucleotide
acagacccggtgcagacaggaaaaatagcg

SEQ ID NO: 177052 - DNA, 30 bp, Artificial Sequence
  Synthetic oligonucleotide
agatgcctgtagcagatgggtcgaatagcg

SEQ ID NO: 177053 - DNA, 30 bp, Artificial Sequence
  Synthetic oligonucleotide
tacccaaactaagaaatgatatgtatagcg

SEQ ID NO: 177054 - DNA, 30 bp, Artificial Sequence
  Synthetic oligonucleotide
gttacaacagaagccgtagactgtatagcg

SEQ ID NO: 177055 - DNA, 30 bp, Artificial Sequence
  Synthetic oligonucleotide
ttggggaacgaatctctcgggtgtatagcg

SEQ ID NO: 177056 - DNA, 30 bp, Artificial Sequence
  Synthetic oligonucleotide
cgttcttcccggtggtgaatttaactagcg

SEQ ID NO: 177057 - DNA, 30 bp, Artificial Sequence
  Synthetic oligonucleotide
gggcacaggaacctgagcagaaccctagcg

SEQ ID NO: 177058 - DNA, 30 bp, Artificial Sequence
  Synthetic oligonucleotide
aaaggtatactaacaatctggcggctagcg

SEQ ID NO: 177059 - DNA, 30 bp, Artificial Sequence
  Synthetic oligonucleotide
gcgacgtctgatggtacttcccttctagcg

SEQ ID NO: 177060 - DNA, 30 bp, Artificial Sequence
  Synthetic oligonucleotide
ggggctcatgcgtgccgctccctagtagcg

SEQ ID NO: 177061 - DNA, 30 bp, Artificial Sequence
  Synthetic oligonucleotide
cgcgttgtacgtaaatagaccgtagtagcg

SEQ ID NO: 177062 - DNA, 30 bp, Artificial Sequence
  Synthetic oligonucleotide
tgctttgactagcgttgagatttagtagcg

SEQ ID NO: 177063 - DNA, 30 bp, Artificial Sequence
  Synthetic oligonucleotide
tcaggagcaaggagttttataggcgtagcg

SEQ ID NO: 177064 - DNA, 30 bp, Artificial Sequence
  Synthetic oligonucleotide
acagaatcttggcgttaaactcaggtagcg

SEQ ID NO: 177065 - DNA, 30 bp, Artificial Sequence
  Synthetic oligonucleotide
cagtagtccggttgtggatcactggtagcg

SEQ ID NO: 177066 - DNA, 30 bp, Artificial Sequence
  Synthetic oligonucleotide
tcataagctgtttggacagggattgtagcg

SEQ ID NO: 177067 - DNA, 30 bp, Artificial Sequence
  Synthetic oligonucleotide
cgcgcgtaaggggttctacaaaacttagcg

SEQ ID NO: 177068 - DNA, 30 bp, Artificial Sequence
  Synthetic oligonucleotide
actgacatgaatataaaacgttcgttagcg

SEQ ID NO: 177069 - DNA, 30 bp, Artificial Sequence
  Synthetic oligonucleotide
taagtgtacggtctttgcggttatttagcg

SEQ ID NO: 177070 - DNA, 30 bp, Artificial Sequence
  Synthetic oligonucleotide
gcgcaggtattcccacacctaaaaaacgcg

SEQ ID NO: 177071 - DNA, 30 bp, Artificial Sequence
  Synthetic oligonucleotide
attttgattgtaaggagggggaaaaacgcg

SEQ ID NO: 177072 - DNA, 30 bp, Artificial Sequence
  Synthetic oligonucleotide
gtcatttgcgggcccttgacagaaaacgcg

SEQ ID NO: 177073 - DNA, 30 bp, Artificial Sequence
  Synthetic oligonucleotide
ggtaagacgcggttaaccataacaaacgcg

SEQ ID NO: 177074 - DNA, 30 bp, Artificial Sequence
  Synthetic oligonucleotide
tcctgtccatcctcccgtatccacaacgcg

SEQ ID NO: 177075 - DNA, 31 bp, Artificial Sequence
  Synthetic oligonucleotide
ccggtctcttatagcaactccaaggaacgcg

SEQ ID NO: 177076 - DNA, 30 bp, Artificial Sequence
  Synthetic oligonucleotide
ccgagtgcgacaactaggaaaagtaacgcg

SEQ ID NO: 177077 - DNA, 30 bp, Artificial Sequence
  Synthetic oligonucleotide
acggatggaattaatatcatcgtccacgcg

SEQ ID NO: 177078 - DNA, 30 bp, Artificial Sequence
  Synthetic oligonucleotide
tatcgaacaatttgcggggaacagcacgcg

SEQ ID NO: 177079 - DNA, 30 bp, Artificial Sequence
  Synthetic oligonucleotide
atcagcacctggcaatccagaaatcacgcg

SEQ ID NO: 177080 - DNA, 30 bp, Artificial Sequence
  Synthetic oligonucleotide
gaaagtgccctaggactgtgttatcacgcg

SEQ ID NO: 177081 - DNA, 30 bp, Artificial Sequence
  Synthetic oligonucleotide
gatactctggatcttatacagagtcacgcg

SEQ ID NO: 177082 - DNA, 30 bp, Artificial Sequence
  Synthetic oligonucleotide
agacgaatttgcaacgctactcaatacgcg

SEQ ID NO: 177083 - DNA, 30 bp, Artificial Sequence
  Synthetic oligonucleotide
ggcccctgaactcttgagtgtatatacgcg

SEQ ID NO: 177084 - DNA, 30 bp, Artificial Sequence
  Synthetic oligonucleotide
ctgggcagaatggaaagttaggtctacgcg

SEQ ID NO: 177085 - DNA, 30 bp, Artificial Sequence
  Synthetic oligonucleotide
cataaatcgtagtaatgcgatttctacgcg

SEQ ID NO: 177086 - DNA, 30 bp, Artificial Sequence
  Synthetic oligonucleotide
cagagacacgtgtcaaggagcaattacgcg

SEQ ID NO: 177087 - DNA, 31 bp, Artificial Sequence
  Synthetic oligonucleotide
agaggaacatgtcatggtggcattcaccgcg

SEQ ID NO: 177088 - DNA, 30 bp, Artificial Sequence
  Synthetic oligonucleotide
gtagcctccaggcgtatcagatcacccgcg

SEQ ID NO: 177089 - DNA, 30 bp, Artificial Sequence
  Synthetic oligonucleotide
cttgtgtgctacatctgtcatgagcccgcg

SEQ ID NO: 177090 - DNA, 30 bp, Artificial Sequence
  Synthetic oligonucleotide
gctgatgcttcaagtctctttcaagccgcg

SEQ ID NO: 177091 - DNA, 30 bp, Artificial Sequence
  Synthetic oligonucleotide
tttcaccattagcacaagcaaggagccgcg

SEQ ID NO: 177092 - DNA, 30 bp, Artificial Sequence
  Synthetic oligonucleotide
tgactggttttccccacaggcaacgccgcg

SEQ ID NO: 177093 - DNA, 30 bp, Artificial Sequence
  Synthetic oligonucleotide
taccgcgtccagcaaccccggagcgccgcg

SEQ ID NO: 177094 - DNA, 30 bp, Artificial Sequence
  Synthetic oligonucleotide
gttagaggttacgatttctcttaatccgcg

SEQ ID NO: 177095 - DNA, 30 bp, Artificial Sequence
  Synthetic oligonucleotide
caggcagactatagcgacactgtgtccgcg

SEQ ID NO: 177096 - DNA, 30 bp, Artificial Sequence
  Synthetic oligonucleotide
taaatgggtcattttgaagatctaagcgcg

SEQ ID NO: 177097 - DNA, 30 bp, Artificial Sequence
  Synthetic oligonucleotide
ctccgtgtgccctagtgaggctacagcgcg

SEQ ID NO: 177098 - DNA, 30 bp, Artificial Sequence
  Synthetic oligonucleotide
ggcgatcggtgaccgggataagcccgcgcg

SEQ ID NO: 177099 - DNA, 30 bp, Artificial Sequence
  Synthetic oligonucleotide
acacaggagagtttagctaattggcgcgcg

SEQ ID NO: 177100 - DNA, 30 bp, Artificial Sequence
  Synthetic oligonucleotide
ttagtggctgtcctgatcaaggtgcgcgcg

SEQ ID NO: 177101 - DNA, 30 bp, Artificial Sequence
  Synthetic oligonucleotide
gaccgccgggaatgaggtctatatcgcgcg

SEQ ID NO: 177102 - DNA, 30 bp, Artificial Sequence
  Synthetic oligonucleotide
tcgttcccgtgaaactacatgattcgcgcg

SEQ ID NO: 177103 - DNA, 30 bp, Artificial Sequence
  Synthetic oligonucleotide
gtcatgggcgataagcccgtaatgggcgcg

SEQ ID NO: 177104 - DNA, 30 bp, Artificial Sequence
  Synthetic oligonucleotide
cgttattaaatatagggggcatgtggcgcg

SEQ ID NO: 177105 - DNA, 30 bp, Artificial Sequence
  Synthetic oligonucleotide
attgcaaacgtcgggtccactcaatgcgcg

SEQ ID NO: 177106 - DNA, 30 bp, Artificial Sequence
  Synthetic oligonucleotide
cagtgtcctggcaaaagattcctctgcgcg

SEQ ID NO: 177107 - DNA, 30 bp, Artificial Sequence
  Synthetic oligonucleotide
ctgtccttacttggaataccgcagtgcgcg

SEQ ID NO: 177108 - DNA, 30 bp, Artificial Sequence
  Synthetic oligonucleotide
gtgagatacttccgtctttgggggtgcgcg

SEQ ID NO: 177109 - DNA, 30 bp, Artificial Sequence
  Synthetic oligonucleotide
ttacgtcattgggaccagaatttaatcgcg

SEQ ID NO: 177110 - DNA, 30 bp, Artificial Sequence
  Synthetic oligonucleotide
ggaatgtactcgtaggaagggagcatcgcg

SEQ ID NO: 177111 - DNA, 30 bp, Artificial Sequence
  Synthetic oligonucleotide
acgtatcacaacaagtattcgtggatcgcg

SEQ ID NO: 177112 - DNA, 30 bp, Artificial Sequence
  Synthetic oligonucleotide
agttagctattgtgtgaggacgatatcgcg

SEQ ID NO: 177113 - DNA, 30 bp, Artificial Sequence
  Synthetic oligonucleotide
caaggttgttggatagctgcgcgactcgcg

SEQ ID NO: 177114 - DNA, 30 bp, Artificial Sequence
  Synthetic oligonucleotide
gtccttcggccgaattatggtatactcgcg

SEQ ID NO: 177115 - DNA, 30 bp, Artificial Sequence
  Synthetic oligonucleotide
atttgtcaggaagcttgcctcagagtcgcg

SEQ ID NO: 177116 - DNA, 30 bp, Artificial Sequence
  Synthetic oligonucleotide
ctgaataaaccgagcactatcacggtcgcg

SEQ ID NO: 177117 - DNA, 31 bp, Artificial Sequence
  Synthetic oligonucleotide
ttcaatttaggtgggtaagcgcacattcgcg

SEQ ID NO: 177118 - DNA, 31 bp, Artificial Sequence
  Synthetic oligonucleotide
cgtccaagtgaagaggaaccacggattcgcg

SEQ ID NO: 177119 - DNA, 30 bp, Artificial Sequence
  Synthetic oligonucleotide
actaatagtctatggggggtggggttcgcg

SEQ ID NO: 177120 - DNA, 30 bp, Artificial Sequence
  Synthetic oligonucleotide
atggcttcgagggtctgtctagttaaggcg

SEQ ID NO: 177121 - DNA, 30 bp, Artificial Sequence
  Synthetic oligonucleotide
gacaaacacgcgataggccacgttaaggcg

SEQ ID NO: 177122 - DNA, 30 bp, Artificial Sequence
  Synthetic oligonucleotide
ataagagccctctgtctatggtcacaggcg

SEQ ID NO: 177123 - DNA, 30 bp, Artificial Sequence
  Synthetic oligonucleotide
gagattcgggcggcaatggcgagacaggcg

SEQ ID NO: 177124 - DNA, 30 bp, Artificial Sequence
  Synthetic oligonucleotide
ccatcgtttgaatgctaatgtcgacaggcg

SEQ ID NO: 177125 - DNA, 30 bp, Artificial Sequence
  Synthetic oligonucleotide
agtgttattacggaggtgatccagcaggcg

SEQ ID NO: 177126 - DNA, 30 bp, Artificial Sequence
  Synthetic oligonucleotide
taaaaaagcggtgcctaggatgatcaggcg

SEQ ID NO: 177127 - DNA, 30 bp, Artificial Sequence
  Synthetic oligonucleotide
cattgactcgtatctgccagatgtcaggcg

SEQ ID NO: 177128 - DNA, 30 bp, Artificial Sequence
  Synthetic oligonucleotide
ccacccaatggtatcggatcaatagaggcg

SEQ ID NO: 177129 - DNA, 30 bp, Artificial Sequence
  Synthetic oligonucleotide
agtaccgaaggtgagagttttaatgaggcg

SEQ ID NO: 177130 - DNA, 30 bp, Artificial Sequence
  Synthetic oligonucleotide
ggagcgcaatataccgctgaagatgaggcg

SEQ ID NO: 177131 - DNA, 30 bp, Artificial Sequence
  Synthetic oligonucleotide
atataccagccaagttcgtaaagtgaggcg

SEQ ID NO: 177132 - DNA, 30 bp, Artificial Sequence
  Synthetic oligonucleotide
taaaaagcctcatacatcgaaacataggcg

SEQ ID NO: 177133 - DNA, 30 bp, Artificial Sequence
  Synthetic oligonucleotide
ccgttggtctcctattgctgcctctaggcg

SEQ ID NO: 177134 - DNA, 30 bp, Artificial Sequence
  Synthetic oligonucleotide
gggcggttggtttcggataaaacgtaggcg

SEQ ID NO: 177135 - DNA, 30 bp, Artificial Sequence
  Synthetic oligonucleotide
gccattggaagaggctcttgagcgtaggcg

SEQ ID NO: 177136 - DNA, 30 bp, Artificial Sequence
  Synthetic oligonucleotide
gactacgactggcacgaattttggtaggcg

SEQ ID NO: 177137 - DNA, 30 bp, Artificial Sequence
  Synthetic oligonucleotide
ccgctgtggcaagccgcgatagattaggcg

SEQ ID NO: 177138 - DNA, 30 bp, Artificial Sequence
  Synthetic oligonucleotide
aagaaatagagcgagcgtcaaataacggcg

SEQ ID NO: 177139 - DNA, 30 bp, Artificial Sequence
  Synthetic oligonucleotide
gcaccacaatgccatagatacacgacggcg

SEQ ID NO: 177140 - DNA, 30 bp, Artificial Sequence
  Synthetic oligonucleotide
gagtcgtgcttcgagcacaggagtacggcg

SEQ ID NO: 177141 - DNA, 30 bp, Artificial Sequence
  Synthetic oligonucleotide
tttaacgtaaggacgttcagtgtagcggcg

SEQ ID NO: 177142 - DNA, 30 bp, Artificial Sequence
  Synthetic oligonucleotide
aacgcgcgataacgtcttctgttggcggcg

SEQ ID NO: 177143 - DNA, 30 bp, Artificial Sequence
  Synthetic oligonucleotide
cgttttacaccaaagatatctttatcggcg

SEQ ID NO: 177144 - DNA, 30 bp, Artificial Sequence
  Synthetic oligonucleotide
agttgattggtttagggccgtgcctcggcg

SEQ ID NO: 177145 - DNA, 30 bp, Artificial Sequence
  Synthetic oligonucleotide
gggtagagcgcctatttcagtcggtcggcg

SEQ ID NO: 177146 - DNA, 30 bp, Artificial Sequence
  Synthetic oligonucleotide
tcctatgatttaagtcacttgttaagggcg

SEQ ID NO: 177147 - DNA, 30 bp, Artificial Sequence
  Synthetic oligonucleotide
ccaaaagttgcgcccccacacccgagggcg

SEQ ID NO: 177148 - DNA, 30 bp, Artificial Sequence
  Synthetic oligonucleotide
aatctgtcgaccaatagtatgcctagggcg

SEQ ID NO: 177149 - DNA, 30 bp, Artificial Sequence
  Synthetic oligonucleotide
aatcatgttttcgtatggaacggtagggcg

SEQ ID NO: 177150 - DNA, 30 bp, Artificial Sequence
  Synthetic oligonucleotide
tcatggataattggcgcttgtacacgggcg

SEQ ID NO: 177151 - DNA, 30 bp, Artificial Sequence
  Synthetic oligonucleotide
ctgatgcaccatactggggtatcacgggcg

SEQ ID NO: 177152 - DNA, 30 bp, Artificial Sequence
  Synthetic oligonucleotide
gaaccataaccgcgaaaggggctgcgggcg

SEQ ID NO: 177153 - DNA, 30 bp, Artificial Sequence
  Synthetic oligonucleotide
cggggcatcccctgctggttaggaggggcg

SEQ ID NO: 177154 - DNA, 30 bp, Artificial Sequence
  Synthetic oligonucleotide
tgggagtaagattagccagggagcggggcg

SEQ ID NO: 177155 - DNA, 30 bp, Artificial Sequence
  Synthetic oligonucleotide
tggacaggccgggctgggcgtaagggggcg

SEQ ID NO: 177156 - DNA, 30 bp, Artificial Sequence
  Synthetic oligonucleotide
tcggatatgacgagctgatcagtgggggcg

SEQ ID NO: 177157 - DNA, 30 bp, Artificial Sequence
  Synthetic oligonucleotide
gggattagacccactcggttagcatgggcg

SEQ ID NO: 177158 - DNA, 30 bp, Artificial Sequence
  Synthetic oligonucleotide
agtttaatcggcggaatgcgtatctgggcg

SEQ ID NO: 177159 - DNA, 30 bp, Artificial Sequence
  Synthetic oligonucleotide
acctgagtgacacgcatatggccttgggcg

SEQ ID NO: 177160 - DNA, 30 bp, Artificial Sequence
  Synthetic oligonucleotide
ccttccgcggtctatgggggtaccatggcg

SEQ ID NO: 177161 - DNA, 28 bp, Artificial Sequence
  Synthetic oligonucleotide
tcaatccaacaagtaccgtcctatggcg

SEQ ID NO: 177162 - DNA, 30 bp, Artificial Sequence
  Synthetic oligonucleotide
tggcaccacgtaccgaggtcgccactggcg

SEQ ID NO: 177163 - DNA, 30 bp, Artificial Sequence
  Synthetic oligonucleotide
actggccggaacagccgacttcccctggcg

SEQ ID NO: 177164 - DNA, 30 bp, Artificial Sequence
  Synthetic oligonucleotide
agttaagaaagctagcagcagtagctggcg

SEQ ID NO: 177165 - DNA, 30 bp, Artificial Sequence
  Synthetic oligonucleotide
gcggtagtgtcttcaggccatagtctggcg

SEQ ID NO: 177166 - DNA, 30 bp, Artificial Sequence
  Synthetic oligonucleotide
attatgcgaatgatcacgagtcgagtggcg

SEQ ID NO: 177167 - DNA, 30 bp, Artificial Sequence
  Synthetic oligonucleotide
cggggatcatcttatgtggtgcccgtggcg

SEQ ID NO: 177168 - DNA, 30 bp, Artificial Sequence
  Synthetic oligonucleotide
agaaagcctgagtcgacgcgtaaggtggcg

SEQ ID NO: 177169 - DNA, 30 bp, Artificial Sequence
  Synthetic oligonucleotide
ggatgcctcttgactacacaaggattggcg

SEQ ID NO: 177170 - DNA, 30 bp, Artificial Sequence
  Synthetic oligonucleotide
ggggaaacctcgactcaacgtatattggcg

SEQ ID NO: 177171 - DNA, 30 bp, Artificial Sequence
  Synthetic oligonucleotide
actttcagaagcgatgaaagggtcttggcg

SEQ ID NO: 177172 - DNA, 30 bp, Artificial Sequence
  Synthetic oligonucleotide
gccaatttgcggatgactcaggagttggcg

SEQ ID NO: 177173 - DNA, 30 bp, Artificial Sequence
  Synthetic oligonucleotide
tctaatacctgcgcaaatgtcgtgttggcg

SEQ ID NO: 177174 - DNA, 30 bp, Artificial Sequence
  Synthetic oligonucleotide
agacgtaagaggtgttatggatttttggcg

SEQ ID NO: 177175 - DNA, 30 bp, Artificial Sequence
  Synthetic oligonucleotide
ataaaacaggatacacatgcctcaaatgcg

SEQ ID NO: 177176 - DNA, 30 bp, Artificial Sequence
  Synthetic oligonucleotide
ttgtgcctgtagatcgttatgggcaatgcg

SEQ ID NO: 177177 - DNA, 30 bp, Artificial Sequence
  Synthetic oligonucleotide
cagcttagagagactctgttaaggaatgcg

SEQ ID NO: 177178 - DNA, 30 bp, Artificial Sequence
  Synthetic oligonucleotide
gcctgtgaggtcgtgccggaccgtaatgcg

SEQ ID NO: 177179 - DNA, 30 bp, Artificial Sequence
  Synthetic oligonucleotide
taattagacttgtttaaaggatcagatgcg

SEQ ID NO: 177180 - DNA, 30 bp, Artificial Sequence
  Synthetic oligonucleotide
cccaatacgtgagtattgagctccgatgcg

SEQ ID NO: 177181 - DNA, 30 bp, Artificial Sequence
  Synthetic oligonucleotide
gctcgacttgaacacatgctaactgatgcg

SEQ ID NO: 177182 - DNA, 30 bp, Artificial Sequence
  Synthetic oligonucleotide
ggcgtccacaacggagaagacagtgatgcg

SEQ ID NO: 177183 - DNA, 30 bp, Artificial Sequence
  Synthetic oligonucleotide
cgattttagccctggtgtttgtcctatgcg

SEQ ID NO: 177184 - DNA, 30 bp, Artificial Sequence
  Synthetic oligonucleotide
ctaaacggtctatagcaattacgctatgcg

SEQ ID NO: 177185 - DNA, 30 bp, Artificial Sequence
  Synthetic oligonucleotide
caaagacatgtagccggggacggctatgcg

SEQ ID NO: 177186 - DNA, 30 bp, Artificial Sequence
  Synthetic oligonucleotide
cgcgtctaagtgggtacgttgggttatgcg

SEQ ID NO: 177187 - DNA, 30 bp, Artificial Sequence
  Synthetic oligonucleotide
ctttactcgcaagttgcgggaaacactgcg

SEQ ID NO: 177188 - DNA, 30 bp, Artificial Sequence
  Synthetic oligonucleotide
gtatacgcgcgtggtcagcataacactgcg

SEQ ID NO: 177189 - DNA, 30 bp, Artificial Sequence
  Synthetic oligonucleotide
cactccatggggttgattcggatcactgcg

SEQ ID NO: 177190 - DNA, 30 bp, Artificial Sequence
  Synthetic oligonucleotide
ccttggcttacacggggccgtggacctgcg

SEQ ID NO: 177191 - DNA, 30 bp, Artificial Sequence
  Synthetic oligonucleotide
cgctaataaagaagtcgtccgtaccctgcg

SEQ ID NO: 177192 - DNA, 30 bp, Artificial Sequence
  Synthetic oligonucleotide
cggtcaagcaataacctccagacgcctgcg

SEQ ID NO: 177193 - DNA, 30 bp, Artificial Sequence
  Synthetic oligonucleotide
catgtctacggataagattggtaagctgcg

SEQ ID NO: 177194 - DNA, 30 bp, Artificial Sequence
  Synthetic oligonucleotide
tttgagtcagcaaagattgtggccgctgcg

SEQ ID NO: 177195 - DNA, 30 bp, Artificial Sequence
  Synthetic oligonucleotide
tcgtacgtctaaccataccgtcaatctgcg

SEQ ID NO: 177196 - DNA, 30 bp, Artificial Sequence
  Synthetic oligonucleotide
tgcgcaaggtgttcccaagccgtatctgcg

SEQ ID NO: 177197 - DNA, 30 bp, Artificial Sequence
  Synthetic oligonucleotide
agacatcacgcgtagtaaggagtctctgcg

SEQ ID NO: 177198 - DNA, 30 bp, Artificial Sequence
  Synthetic oligonucleotide
ttacaccaaagaatacatcttaattctgcg

SEQ ID NO: 177199 - DNA, 30 bp, Artificial Sequence
  Synthetic oligonucleotide
agacgtagtaccatgaacctgtcttctgcg

SEQ ID NO: 177200 - DNA, 30 bp, Artificial Sequence
  Synthetic oligonucleotide
ctacaaggtaactcgctaaccgtttctgcg

SEQ ID NO: 177201 - DNA, 30 bp, Artificial Sequence
  Synthetic oligonucleotide
ggcggtaacacataaactatgtatagtgcg

SEQ ID NO: 177202 - DNA, 30 bp, Artificial Sequence
  Synthetic oligonucleotide
taacaccgagtgttcctcttgaaccgtgcg

SEQ ID NO: 177203 - DNA, 30 bp, Artificial Sequence
  Synthetic oligonucleotide
gcttcggggtgatctcacagtggaggtgcg

SEQ ID NO: 177204 - DNA, 30 bp, Artificial Sequence
  Synthetic oligonucleotide
aacatgggagcagtgggacgattaggtgcg

SEQ ID NO: 177205 - DNA, 30 bp, Artificial Sequence
  Synthetic oligonucleotide
actagccgtgccccgtctccacacggtgcg

SEQ ID NO: 177206 - DNA, 29 bp, Artificial Sequence
  Synthetic oligonucleotide
caagctggtaagaacatttctttggtgcg

SEQ ID NO: 177207 - DNA, 30 bp, Artificial Sequence
  Synthetic oligonucleotide
gcgccgcaggctctcattagagaatgtgcg

SEQ ID NO: 177208 - DNA, 30 bp, Artificial Sequence
  Synthetic oligonucleotide
tgagcccgcaggtgggaccggggatgtgcg

SEQ ID NO: 177209 - DNA, 30 bp, Artificial Sequence
  Synthetic oligonucleotide
acgctttggtttgatggcctggagtgtgcg

SEQ ID NO: 177210 - DNA, 30 bp, Artificial Sequence
  Synthetic oligonucleotide
atcatcgatagtgccaattcatctattgcg

SEQ ID NO: 177211 - DNA, 30 bp, Artificial Sequence
  Synthetic oligonucleotide
taccgtagtttcgttgcggttaaccttgcg

SEQ ID NO: 177212 - DNA, 30 bp, Artificial Sequence
  Synthetic oligonucleotide
cactgttctgggaagtaagtagggcttgcg

SEQ ID NO: 177213 - DNA, 30 bp, Artificial Sequence
  Synthetic oligonucleotide
cggcaattacgagatcttactcaagttgcg

SEQ ID NO: 177214 - DNA, 30 bp, Artificial Sequence
  Synthetic oligonucleotide
ggtttgggactagtacaccattgagttgcg

SEQ ID NO: 177215 - DNA, 30 bp, Artificial Sequence
  Synthetic oligonucleotide
accagcataaagacggctgcacaggttgcg

SEQ ID NO: 177216 - DNA, 30 bp, Artificial Sequence
  Synthetic oligonucleotide
agattaggctgagcgtacataggttttgcg

SEQ ID NO: 177217 - DNA, 30 bp, Artificial Sequence
  Synthetic oligonucleotide
tcatatacaatggggggcccacaaaaatcg

SEQ ID NO: 177218 - DNA, 30 bp, Artificial Sequence
  Synthetic oligonucleotide
gcttgaacaggaaccgtaggggaaaaatcg

SEQ ID NO: 177219 - DNA, 30 bp, Artificial Sequence
  Synthetic oligonucleotide
cgggaacgtcaagacccgtaatcaaaatcg

SEQ ID NO: 177220 - DNA, 30 bp, Artificial Sequence
  Synthetic oligonucleotide
tatcgagttgaaatgggttaaaggaaatcg

SEQ ID NO: 177221 - DNA, 30 bp, Artificial Sequence
  Synthetic oligonucleotide
cacggttccggacggaacaacccacaatcg

SEQ ID NO: 177222 - DNA, 30 bp, Artificial Sequence
  Synthetic oligonucleotide
cttttacgtgctaggggcgacaaccaatcg

SEQ ID NO: 177223 - DNA, 30 bp, Artificial Sequence
  Synthetic oligonucleotide
tagaacttaggatgttttggagaccaatcg

SEQ ID NO: 177224 - DNA, 30 bp, Artificial Sequence
  Synthetic oligonucleotide
ttcacgctccaatcagaccgggtgcaatcg

SEQ ID NO: 177225 - DNA, 30 bp, Artificial Sequence
  Synthetic oligonucleotide
acccactaaccgtgaaaatacgctcaatcg

SEQ ID NO: 177226 - DNA, 30 bp, Artificial Sequence
  Synthetic oligonucleotide
attacgaaatcaccagactagcaagaatcg

SEQ ID NO: 177227 - DNA, 30 bp, Artificial Sequence
  Synthetic oligonucleotide
gcagtcgagccggactgtagtacagaatcg

SEQ ID NO: 177228 - DNA, 30 bp, Artificial Sequence
  Synthetic oligonucleotide
agcgtgtttatatcataacctagggaatcg

SEQ ID NO: 177229 - DNA, 30 bp, Artificial Sequence
  Synthetic oligonucleotide
gagggtgggtttgaagattgggagtaatcg

SEQ ID NO: 177230 - DNA, 30 bp, Artificial Sequence
  Synthetic oligonucleotide
ggtttagaagcaacattatggcaaacatcg

SEQ ID NO: 177231 - DNA, 30 bp, Artificial Sequence
  Synthetic oligonucleotide
agtcatcattttggaccaccagaaacatcg

SEQ ID NO: 177232 - DNA, 30 bp, Artificial Sequence
  Synthetic oligonucleotide
tagtaagtcggcaaaggcgcgggcacatcg

SEQ ID NO: 177233 - DNA, 30 bp, Artificial Sequence
  Synthetic oligonucleotide
gcattcgggccgttagtcatagtcacatcg

SEQ ID NO: 177234 - DNA, 30 bp, Artificial Sequence
  Synthetic oligonucleotide
ggtcgcgatcctgtagcgtaagttacatcg

SEQ ID NO: 177235 - DNA, 30 bp, Artificial Sequence
  Synthetic oligonucleotide
cacaagaaccaatagtgcgtcgagccatcg

SEQ ID NO: 177236 - DNA, 30 bp, Artificial Sequence
  Synthetic oligonucleotide
atgcctcgcttggttgaccggtcgccatcg

SEQ ID NO: 177237 - DNA, 30 bp, Artificial Sequence
  Synthetic oligonucleotide
cggccgatgaagcctacgcatggtccatcg

SEQ ID NO: 177238 - DNA, 30 bp, Artificial Sequence
  Synthetic oligonucleotide
agtaactataatggttccatgtaagcatcg

SEQ ID NO: 177239 - DNA, 30 bp, Artificial Sequence
  Synthetic oligonucleotide
aaaatagggtattccgcagagtcagcatcg

SEQ ID NO: 177240 - DNA, 30 bp, Artificial Sequence
  Synthetic oligonucleotide
ggtaacggtgtatttatcgagaacgcatcg

SEQ ID NO: 177241 - DNA, 30 bp, Artificial Sequence
  Synthetic oligonucleotide
taggacattatgggttggaagcgcgcatcg

SEQ ID NO: 177242 - DNA, 30 bp, Artificial Sequence
  Synthetic oligonucleotide
ccgttggggtctccaaattttggcgcatcg

SEQ ID NO: 177243 - DNA, 30 bp, Artificial Sequence
  Synthetic oligonucleotide
tccgggccagtcagtacaactgatgcatcg

SEQ ID NO: 177244 - DNA, 30 bp, Artificial Sequence
  Synthetic oligonucleotide
aaagttgagacaagagcgccgtatgcatcg

SEQ ID NO: 177245 - DNA, 30 bp, Artificial Sequence
  Synthetic oligonucleotide
gtgcacgtgcagtggtgcctatcctcatcg

SEQ ID NO: 177246 - DNA, 30 bp, Artificial Sequence
  Synthetic oligonucleotide
gcgcccggcgggcggaggaaacgctcatcg

SEQ ID NO: 177247 - DNA, 30 bp, Artificial Sequence
  Synthetic oligonucleotide
tgatttaaacggtgcgatcgcaagtcatcg

SEQ ID NO: 177248 - DNA, 30 bp, Artificial Sequence
  Synthetic oligonucleotide
agaatccatcctgcacgcaattcaagatcg

SEQ ID NO: 177249 - DNA, 30 bp, Artificial Sequence
  Synthetic oligonucleotide
cttacactagaatccccgtcttatagatcg

SEQ ID NO: 177250 - DNA, 30 bp, Artificial Sequence
  Synthetic oligonucleotide
accgccgcccggacatgccggggtagatcg

SEQ ID NO: 177251 - DNA, 30 bp, Artificial Sequence
  Synthetic oligonucleotide
aaacgatgctgggcttggttttcacgatcg

SEQ ID NO: 177252 - DNA, 30 bp, Artificial Sequence
  Synthetic oligonucleotide
cgagtctctgtaaaaggttcttgacgatcg

SEQ ID NO: 177253 - DNA, 30 bp, Artificial Sequence
  Synthetic oligonucleotide
tgatggatctcctttctcgcaccccgatcg

SEQ ID NO: 177254 - DNA, 30 bp, Artificial Sequence
  Synthetic oligonucleotide
atatctgtacagtcgacttaggggcgatcg

SEQ ID NO: 177255 - DNA, 30 bp, Artificial Sequence
  Synthetic oligonucleotide
ttgtattatgtcgtcgacgggggaggatcg

SEQ ID NO: 177256 - DNA, 30 bp, Artificial Sequence
  Synthetic oligonucleotide
tagcttgtgcatgacgtcgccttgggatcg

SEQ ID NO: 177257 - DNA, 30 bp, Artificial Sequence
  Synthetic oligonucleotide
aatagattcgaggatgtcgagtactgatcg

SEQ ID NO: 177258 - DNA, 30 bp, Artificial Sequence
  Synthetic oligonucleotide
gaacaaagacctgtacagcggttctgatcg

SEQ ID NO: 177259 - DNA, 30 bp, Artificial Sequence
  Synthetic oligonucleotide
tcggacctgcgaacatagagataaatatcg

SEQ ID NO: 177260 - DNA, 30 bp, Artificial Sequence
  Synthetic oligonucleotide
ccaaaccacgtccagcttaagagaatatcg

SEQ ID NO: 177261 - DNA, 30 bp, Artificial Sequence
  Synthetic oligonucleotide
attttgcagttccaaacatctagaatatcg

SEQ ID NO: 177262 - DNA, 31 bp, Artificial Sequence
  Synthetic oligonucleotide
caaggctatagatatccggtaataactatcg

SEQ ID NO: 177263 - DNA, 30 bp, Artificial Sequence
  Synthetic oligonucleotide
cacagttggcaaaatattatcaacctatcg

SEQ ID NO: 177264 - DNA, 30 bp, Artificial Sequence
  Synthetic oligonucleotide
ggactcactccccctagacaaatgctatcg

SEQ ID NO: 177265 - DNA, 30 bp, Artificial Sequence
  Synthetic oligonucleotide
ccttagagattagagactcatgtgctatcg

SEQ ID NO: 177266 - DNA, 30 bp, Artificial Sequence
  Synthetic oligonucleotide
gtcaggatgagacatcgtgattctctatcg

SEQ ID NO: 177267 - DNA, 30 bp, Artificial Sequence
  Synthetic oligonucleotide
ggtgattaaggactagttgggtacgtatcg

SEQ ID NO: 177268 - DNA, 30 bp, Artificial Sequence
  Synthetic oligonucleotide
ggaagggtaatgggtgtattcacggtatcg

SEQ ID NO: 177269 - DNA, 30 bp, Artificial Sequence
  Synthetic oligonucleotide
ggcggctactggaggtgaagtaatgtatcg

SEQ ID NO: 177270 - DNA, 30 bp, Artificial Sequence
  Synthetic oligonucleotide
ttgaggcagccactgtcaagacaattatcg

SEQ ID NO: 177271 - DNA, 30 bp, Artificial Sequence
  Synthetic oligonucleotide
acaagtaatcgatattaagatagattatcg

SEQ ID NO: 177272 - DNA, 30 bp, Artificial Sequence
  Synthetic oligonucleotide
cagtgtaggggattctaatcatacttatcg

SEQ ID NO: 177273 - DNA, 30 bp, Artificial Sequence
  Synthetic oligonucleotide
gacatgccaaggttctaactccgaaactcg

SEQ ID NO: 177274 - DNA, 30 bp, Artificial Sequence
  Synthetic oligonucleotide
tggctgactagagtctgtctgttaaactcg

SEQ ID NO: 177275 - DNA, 30 bp, Artificial Sequence
  Synthetic oligonucleotide
gaacttggcagccctttcttacggaactcg

SEQ ID NO: 177276 - DNA, 30 bp, Artificial Sequence
  Synthetic oligonucleotide
ggtcgaggccgacaggggcaatcgcactcg

SEQ ID NO: 177277 - DNA, 30 bp, Artificial Sequence
  Synthetic oligonucleotide
aaacagcaacaagctatctaacatcactcg

SEQ ID NO: 177278 - DNA, 30 bp, Artificial Sequence
  Synthetic oligonucleotide
aggtcttctcgggtatcgttggctcactcg

SEQ ID NO: 177279 - DNA, 30 bp, Artificial Sequence
  Synthetic oligonucleotide
gtccccgtacagcagcccccaagcgactcg

SEQ ID NO: 177280 - DNA, 30 bp, Artificial Sequence
  Synthetic oligonucleotide
ggtctggttaaacattagcagctggactcg

SEQ ID NO: 177281 - DNA, 30 bp, Artificial Sequence
  Synthetic oligonucleotide
cacgcaccgaccttctatcggcgatactcg

SEQ ID NO: 177282 - DNA, 30 bp, Artificial Sequence
  Synthetic oligonucleotide
ggcctggaataaaggggtaatgtatactcg

SEQ ID NO: 177283 - DNA, 30 bp, Artificial Sequence
  Synthetic oligonucleotide
ttaattgacacaagattcgtcacgtactcg

SEQ ID NO: 177284 - DNA, 30 bp, Artificial Sequence
  Synthetic oligonucleotide
ttgctaatcttgtatacattttggtactcg

SEQ ID NO: 177285 - DNA, 30 bp, Artificial Sequence
  Synthetic oligonucleotide
tagttttgagagatctgcgtggtgtactcg

SEQ ID NO: 177286 - DNA, 30 bp, Artificial Sequence
  Synthetic oligonucleotide
tcgtatggaccaagctgcgggttgtactcg

SEQ ID NO: 177287 - DNA, 30 bp, Artificial Sequence
  Synthetic oligonucleotide
atattcatcatctgggcaagaaaaacctcg

SEQ ID NO: 177288 - DNA, 30 bp, Artificial Sequence
  Synthetic oligonucleotide
ccatcccacggcagccctagagacacctcg

SEQ ID NO: 177289 - DNA, 30 bp, Artificial Sequence
  Synthetic oligonucleotide
tgttcgtgcacggtgaaaagcacgacctcg

SEQ ID NO: 177290 - DNA, 30 bp, Artificial Sequence
  Synthetic oligonucleotide
ttaaatgatcggagtttgctctcgacctcg

SEQ ID NO: 177291 - DNA, 30 bp, Artificial Sequence
  Synthetic oligonucleotide
tgccgtttcgatccgaatgcgcaaccctcg

SEQ ID NO: 177292 - DNA, 30 bp, Artificial Sequence
  Synthetic oligonucleotide
atcacgttagctatatccagatacccctcg

SEQ ID NO: 177293 - DNA, 30 bp, Artificial Sequence
  Synthetic oligonucleotide
agcacaggcactaaaacggatgccccctcg

SEQ ID NO: 177294 - DNA, 30 bp, Artificial Sequence
  Synthetic oligonucleotide
ttcgttagtctggggtagcccctcccctcg

SEQ ID NO: 177295 - DNA, 30 bp, Artificial Sequence
  Synthetic oligonucleotide
gtctcaaaatggctagaaaaagttccctcg

SEQ ID NO: 177296 - DNA, 30 bp, Artificial Sequence
  Synthetic oligonucleotide
cacctcggtgcatattagatctcagcctcg

SEQ ID NO: 177297 - DNA, 31 bp, Artificial Sequence
  Synthetic oligonucleotide
gaagcactccgtaagagagacccaggcctcg

SEQ ID NO: 177298 - DNA, 30 bp, Artificial Sequence
  Synthetic oligonucleotide
acggtgtccgcatctatcgcgggggcctcg

SEQ ID NO: 177299 - DNA, 30 bp, Artificial Sequence
  Synthetic oligonucleotide
tcttcatgggatggtggcagaacctcctcg

SEQ ID NO: 177300 - DNA, 30 bp, Artificial Sequence
  Synthetic oligonucleotide
aaatgacaggggtccatgtcgcagtcctcg

SEQ ID NO: 177301 - DNA, 31 bp, Artificial Sequence
  Synthetic oligonucleotide
tgtgtaccattcgggtaaggatataagctcg

SEQ ID NO: 177302 - DNA, 30 bp, Artificial Sequence
  Synthetic oligonucleotide
tccatggctaacgactgatgggaacgctcg

SEQ ID NO: 177303 - DNA, 30 bp, Artificial Sequence
  Synthetic oligonucleotide
acgaaagagagcgcacggagccgccgctcg

SEQ ID NO: 177304 - DNA, 30 bp, Artificial Sequence
  Synthetic oligonucleotide
ccaaggatgggctggagattttccggctcg

SEQ ID NO: 177305 - DNA, 30 bp, Artificial Sequence
  Synthetic oligonucleotide
acctttgtaaagtaactgaagtagggctcg

SEQ ID NO: 177306 - DNA, 30 bp, Artificial Sequence
  Synthetic oligonucleotide
caagcaatattttgttgatagtagggctcg

SEQ ID NO: 177307 - DNA, 30 bp, Artificial Sequence
  Synthetic oligonucleotide
catttcatccgtgtcacagagtatggctcg

SEQ ID NO: 177308 - DNA, 30 bp, Artificial Sequence
  Synthetic oligonucleotide
ataacggaagtgccctcgcaaattggctcg

SEQ ID NO: 177309 - DNA, 30 bp, Artificial Sequence
  Synthetic oligonucleotide
tacgtaaacgggggtcaaagatacatctcg

SEQ ID NO: 177310 - DNA, 30 bp, Artificial Sequence
  Synthetic oligonucleotide
cgggaccgtgcattcgcgtacgtcatctcg

SEQ ID NO: 177311 - DNA, 30 bp, Artificial Sequence
  Synthetic oligonucleotide
tacttcgttgaatagttgtagcagatctcg

SEQ ID NO: 177312 - DNA, 30 bp, Artificial Sequence
  Synthetic oligonucleotide
tcgttgaaaggtcagcgtaagcaactctcg

SEQ ID NO: 177313 - DNA, 30 bp, Artificial Sequence
  Synthetic oligonucleotide
ctgacactttcataaaggacggatctctcg

SEQ ID NO: 177314 - DNA, 30 bp, Artificial Sequence
  Synthetic oligonucleotide
tggacaactctaccgatccgggcaaagtcg

SEQ ID NO: 177315 - DNA, 30 bp, Artificial Sequence
  Synthetic oligonucleotide
gggctatgcctacttctgatcacgaagtcg

SEQ ID NO: 177316 - DNA, 30 bp, Artificial Sequence
  Synthetic oligonucleotide
aagctgaagtgttgcgcgaccccgaagtcg

SEQ ID NO: 177317 - DNA, 30 bp, Artificial Sequence
  Synthetic oligonucleotide
gctgtctcaagggggtgagggtataagtcg

SEQ ID NO: 177318 - DNA, 30 bp, Artificial Sequence
  Synthetic oligonucleotide
ctgagttaccgcaactcaaacagtaagtcg

SEQ ID NO: 177319 - DNA, 30 bp, Artificial Sequence
  Synthetic oligonucleotide
ggttgatgaggccatcgaattttacagtcg

SEQ ID NO: 177320 - DNA, 30 bp, Artificial Sequence
  Synthetic oligonucleotide
tcatgaggaggctgatacgcaggccagtcg

SEQ ID NO: 177321 - DNA, 30 bp, Artificial Sequence
  Synthetic oligonucleotide
gtggtcaatttcctagtgaggggccagtcg

SEQ ID NO: 177322 - DNA, 30 bp, Artificial Sequence
  Synthetic oligonucleotide
cgtggggcccgcggtataaaaatccagtcg

SEQ ID NO: 177323 - DNA, 30 bp, Artificial Sequence
  Synthetic oligonucleotide
gtcgctgtcctgccgagacgggggcagtcg

SEQ ID NO: 177324 - DNA, 30 bp, Artificial Sequence
  Synthetic oligonucleotide
cgacggaatcgataacggtatgtgcagtcg

SEQ ID NO: 177325 - DNA, 30 bp, Artificial Sequence
  Synthetic oligonucleotide
aggtgaggaacgaagcggtgactagagtcg

SEQ ID NO: 177326 - DNA, 30 bp, Artificial Sequence
  Synthetic oligonucleotide
gtaaatactacgtcgtagggtagtgagtcg

SEQ ID NO: 177327 - DNA, 30 bp, Artificial Sequence
  Synthetic oligonucleotide
actcggtgtcgggaggaggcgcttgagtcg

SEQ ID NO: 177328 - DNA, 30 bp, Artificial Sequence
  Synthetic oligonucleotide
tgtttatgttacaagagtcacagatagtcg

SEQ ID NO: 177329 - DNA, 30 bp, Artificial Sequence
  Synthetic oligonucleotide
ccgggtacaccaatatacggtcccacgtcg

SEQ ID NO: 177330 - DNA, 30 bp, Artificial Sequence
  Synthetic oligonucleotide
caagcggtccatcggaccctttgcacgtcg

SEQ ID NO: 177331 - DNA, 30 bp, Artificial Sequence
  Synthetic oligonucleotide
gcccgtcacgtgaaaaaccaacagccgtcg

SEQ ID NO: 177332 - DNA, 30 bp, Artificial Sequence
  Synthetic oligonucleotide
gcttgctgttaattgccgctcacgccgtcg

SEQ ID NO: 177333 - DNA, 30 bp, Artificial Sequence
  Synthetic oligonucleotide
ttaggagcgtactttggctgtaggccgtcg

SEQ ID NO: 177334 - DNA, 30 bp, Artificial Sequence
  Synthetic oligonucleotide
gggaagagtcatacactagttagtgcgtcg

SEQ ID NO: 177335 - DNA, 30 bp, Artificial Sequence
  Synthetic oligonucleotide
gctaatgtggggcattgtttggtatcgtcg

SEQ ID NO: 177336 - DNA, 30 bp, Artificial Sequence
  Synthetic oligonucleotide
aacgcaatggtaaaatgagactgttcgtcg

SEQ ID NO: 177337 - DNA, 30 bp, Artificial Sequence
  Synthetic oligonucleotide
ttgtgcagatatctatagttgagcaggtcg

SEQ ID NO: 177338 - DNA, 30 bp, Artificial Sequence
  Synthetic oligonucleotide
tccaggtttacagtgttgatcgagaggtcg

SEQ ID NO: 177339 - DNA, 30 bp, Artificial Sequence
  Synthetic oligonucleotide
aaaaagcggagaaatatataattgaggtcg

SEQ ID NO: 177340 - DNA, 30 bp, Artificial Sequence
  Synthetic oligonucleotide
ttgcgactacttgcgattgagtttaggtcg

SEQ ID NO: 177341 - DNA, 30 bp, Artificial Sequence
  Synthetic oligonucleotide
aggggccgcctattccggaacacacggtcg

SEQ ID NO: 177342 - DNA, 30 bp, Artificial Sequence
  Synthetic oligonucleotide
gtactcaaagatagctgatgctgacggtcg

SEQ ID NO: 177343 - DNA, 30 bp, Artificial Sequence
  Synthetic oligonucleotide
atccagttgtgatgaaagctctcccggtcg

SEQ ID NO: 177344 - DNA, 30 bp, Artificial Sequence
  Synthetic oligonucleotide
aatttgccaatgcatgaaatcgtgcggtcg

SEQ ID NO: 177345 - DNA, 30 bp, Artificial Sequence
  Synthetic oligonucleotide
gtcctagaggtttaatctacataagggtcg

SEQ ID NO: 177346 - DNA, 30 bp, Artificial Sequence
  Synthetic oligonucleotide
gcagggaaccgtgtacagtacggatggtcg

SEQ ID NO: 177347 - DNA, 30 bp, Artificial Sequence
  Synthetic oligonucleotide
caaagcactgttctcgtacctatatggtcg

SEQ ID NO: 177348 - DNA, 30 bp, Artificial Sequence
  Synthetic oligonucleotide
ttaccaagctattgtggctaggtgtggtcg

SEQ ID NO: 177349 - DNA, 30 bp, Artificial Sequence
  Synthetic oligonucleotide
gaaggcacgcatacgaggctgaaaatgtcg

SEQ ID NO: 177350 - DNA, 30 bp, Artificial Sequence
  Synthetic oligonucleotide
gcacaggcagtgaaaggggtaccgatgtcg

SEQ ID NO: 177351 - DNA, 30 bp, Artificial Sequence
  Synthetic oligonucleotide
ctattttacataccatgaggcgggatgtcg

SEQ ID NO: 177352 - DNA, 30 bp, Artificial Sequence
  Synthetic oligonucleotide
acattaagactcaaagcggatatgatgtcg

SEQ ID NO: 177353 - DNA, 30 bp, Artificial Sequence
  Synthetic oligonucleotide
gcagtgctgggtgtcttcgtcgttatgtcg

SEQ ID NO: 177354 - DNA, 30 bp, Artificial Sequence
  Synthetic oligonucleotide
gcacctaccgcttatcacaggggactgtcg

SEQ ID NO: 177355 - DNA, 30 bp, Artificial Sequence
  Synthetic oligonucleotide
tgggtactttgcaagggttgaaggctgtcg

SEQ ID NO: 177356 - DNA, 30 bp, Artificial Sequence
  Synthetic oligonucleotide
aagccacaggccgaggtcgacaggctgtcg

SEQ ID NO: 177357 - DNA, 30 bp, Artificial Sequence
  Synthetic oligonucleotide
tgagagtcctgtgcgggcgggggtctgtcg

SEQ ID NO: 177358 - DNA, 30 bp, Artificial Sequence
  Synthetic oligonucleotide
agtaagtcaaatgtaacttactcagtgtcg

SEQ ID NO: 177359 - DNA, 30 bp, Artificial Sequence
  Synthetic oligonucleotide
cgactgaacccggattccctggaggtgtcg

SEQ ID NO: 177360 - DNA, 30 bp, Artificial Sequence
  Synthetic oligonucleotide
aacagtaccgctttagttgcccacttgtcg

SEQ ID NO: 177361 - DNA, 30 bp, Artificial Sequence
  Synthetic oligonucleotide
atagttgaatacttcctgggtaagttgtcg

SEQ ID NO: 177362 - DNA, 30 bp, Artificial Sequence
  Synthetic oligonucleotide
ccttcagtggtatcgggtgtcgcgttgtcg

SEQ ID NO: 177363 - DNA, 30 bp, Artificial Sequence
  Synthetic oligonucleotide
cacgattaacggttttatcgatcgttgtcg

SEQ ID NO: 177364 - DNA, 30 bp, Artificial Sequence
  Synthetic oligonucleotide
gcgctatttccccggaacgaacaaaattcg

SEQ ID NO: 177365 - DNA, 30 bp, Artificial Sequence
  Synthetic oligonucleotide
cagatacaatgctgtcgaccgtacaattcg

SEQ ID NO: 177366 - DNA, 30 bp, Artificial Sequence
  Synthetic oligonucleotide
tagctgcctcaggattttgcacagaattcg

SEQ ID NO: 177367 - DNA, 30 bp, Artificial Sequence
  Synthetic oligonucleotide
ggaatgttacgagcctatcccctgaattcg

SEQ ID NO: 177368 - DNA, 30 bp, Artificial Sequence
  Synthetic oligonucleotide
tgtggaggtgatggcgtaaatttgaattcg

SEQ ID NO: 177369 - DNA, 30 bp, Artificial Sequence
  Synthetic oligonucleotide
ggggcggcctggcaagggacttgtaattcg

SEQ ID NO: 177370 - DNA, 30 bp, Artificial Sequence
  Synthetic oligonucleotide
cgggccgtctggctgtaggagacacattcg

SEQ ID NO: 177371 - DNA, 30 bp, Artificial Sequence
  Synthetic oligonucleotide
cgcggcgaggtgagtacccgaccacattcg

SEQ ID NO: 177372 - DNA, 30 bp, Artificial Sequence
  Synthetic oligonucleotide
gacgaggctcttgctgtaggtctacattcg

SEQ ID NO: 177373 - DNA, 29 bp, Artificial Sequence
  Synthetic oligonucleotide
gtacggtcctgagtctcaggaaggattcg

SEQ ID NO: 177374 - DNA, 30 bp, Artificial Sequence
  Synthetic oligonucleotide
caatgcgaaaaacttaatagccgggattcg

SEQ ID NO: 177375 - DNA, 30 bp, Artificial Sequence
  Synthetic oligonucleotide
gggatgtcaaacctaatatatgtggattcg

SEQ ID NO: 177376 - DNA, 30 bp, Artificial Sequence
  Synthetic oligonucleotide
atcgggaaccctctagcctgatgatattcg

SEQ ID NO: 177377 - DNA, 30 bp, Artificial Sequence
  Synthetic oligonucleotide
ccatacgactcttcccgggaaacttattcg

SEQ ID NO: 177378 - DNA, 30 bp, Artificial Sequence
  Synthetic oligonucleotide
ctagatttggaaccctgccctataacttcg

SEQ ID NO: 177379 - DNA, 30 bp, Artificial Sequence
  Synthetic oligonucleotide
ccgggaacgcgagtgtggatgcagacttcg

SEQ ID NO: 177380 - DNA, 29 bp, Artificial Sequence
  Synthetic oligonucleotide
actggctcctccagccatagtttacttcg

SEQ ID NO: 177381 - DNA, 30 bp, Artificial Sequence
  Synthetic oligonucleotide
gacgggacttgagagtttccacggccttcg

SEQ ID NO: 177382 - DNA, 30 bp, Artificial Sequence
  Synthetic oligonucleotide
aatctgaacaccaccgagggtcggccttcg

SEQ ID NO: 177383 - DNA, 30 bp, Artificial Sequence
  Synthetic oligonucleotide
agacaagggatgaagtctgagtttccttcg

SEQ ID NO: 177384 - DNA, 30 bp, Artificial Sequence
  Synthetic oligonucleotide
cttgtcccgaactttaagggggaagcttcg

SEQ ID NO: 177385 - DNA, 30 bp, Artificial Sequence
  Synthetic oligonucleotide
ctaggagaccgcgtgcatacctaagcttcg

SEQ ID NO: 177386 - DNA, 30 bp, Artificial Sequence
  Synthetic oligonucleotide
tagcgtacataaagacaataactagcttcg

SEQ ID NO: 177387 - DNA, 30 bp, Artificial Sequence
  Synthetic oligonucleotide
ggattacgtcagcgtttatgtaaggcttcg

SEQ ID NO: 177388 - DNA, 30 bp, Artificial Sequence
  Synthetic oligonucleotide
ggggataagttctaggcactactctcttcg

SEQ ID NO: 177389 - DNA, 30 bp, Artificial Sequence
  Synthetic oligonucleotide
tgattcgaaatcaattaagccgtctcttcg

SEQ ID NO: 177390 - DNA, 30 bp, Artificial Sequence
  Synthetic oligonucleotide
gattacggcgcctagggttccggaagttcg

SEQ ID NO: 177391 - DNA, 30 bp, Artificial Sequence
  Synthetic oligonucleotide
agtgttacaactcgctctatcggaagttcg

SEQ ID NO: 177392 - DNA, 30 bp, Artificial Sequence
  Synthetic oligonucleotide
tgttaagattcatcgaggccgttaagttcg

SEQ ID NO: 177393 - DNA, 30 bp, Artificial Sequence
  Synthetic oligonucleotide
tacagaactggttgctgggctgacagttcg

SEQ ID NO: 177394 - DNA, 30 bp, Artificial Sequence
  Synthetic oligonucleotide
gatgccgcgtggggcgaagtaagtagttcg

SEQ ID NO: 177395 - DNA, 30 bp, Artificial Sequence
  Synthetic oligonucleotide
ataggagagtaggtaagtatctgtagttcg

SEQ ID NO: 177396 - DNA, 30 bp, Artificial Sequence
  Synthetic oligonucleotide
gacagatctgacgggcccctaagccgttcg

SEQ ID NO: 177397 - DNA, 30 bp, Artificial Sequence
  Synthetic oligonucleotide
atgaccgatccgaagacggcttaaggttcg

SEQ ID NO: 177398 - DNA, 30 bp, Artificial Sequence
  Synthetic oligonucleotide
agtgacgtcaattggaagtgtgtaggttcg

SEQ ID NO: 177399 - DNA, 30 bp, Artificial Sequence
  Synthetic oligonucleotide
tagcctgtattcggactcaaattcggttcg

SEQ ID NO: 177400 - DNA, 30 bp, Artificial Sequence
  Synthetic oligonucleotide
cccgtaggcaaagttactaaaatgggttcg

SEQ ID NO: 177401 - DNA, 30 bp, Artificial Sequence
  Synthetic oligonucleotide
gtaagatctgagtcggtagggaatggttcg

SEQ ID NO: 177402 - DNA, 30 bp, Artificial Sequence
  Synthetic oligonucleotide
gatctccagcaattgaggtgtcatggttcg

SEQ ID NO: 177403 - DNA, 30 bp, Artificial Sequence
  Synthetic oligonucleotide
gactacatcgatgattaatcagactgttcg

SEQ ID NO: 177404 - DNA, 30 bp, Artificial Sequence
  Synthetic oligonucleotide
agcacccaggcctagcggacaagttgttcg

SEQ ID NO: 177405 - DNA, 30 bp, Artificial Sequence
  Synthetic oligonucleotide
gcttcgatcataatcagcatccgtatttcg

SEQ ID NO: 177406 - DNA, 30 bp, Artificial Sequence
  Synthetic oligonucleotide
gagagaaatgtcgttgcctcaatgctttcg

SEQ ID NO: 177407 - DNA, 30 bp, Artificial Sequence
  Synthetic oligonucleotide
cacccacttggatcacttactaatctttcg

SEQ ID NO: 177408 - DNA, 30 bp, Artificial Sequence
  Synthetic oligonucleotide
ataggatgacacattacttgcggtctttcg

SEQ ID NO: 177409 - DNA, 30 bp, Artificial Sequence
  Synthetic oligonucleotide
gtggtagcagtactcgactcccgagtttcg

SEQ ID NO: 177410 - DNA, 30 bp, Artificial Sequence
  Synthetic oligonucleotide
ctgatttaaggggtggaacccgatgtttcg

SEQ ID NO: 177411 - DNA, 30 bp, Artificial Sequence
  Synthetic oligonucleotide
gtgatccagatcagggactagagtgtttcg

SEQ ID NO: 177412 - DNA, 30 bp, Artificial Sequence
  Synthetic oligonucleotide
ctgacggaaagtttggcatcaccattttcg

SEQ ID NO: 177413 - DNA, 30 bp, Artificial Sequence
  Synthetic oligonucleotide
atgggtaaatgtccgccaaaggttttttcg

SEQ ID NO: 177414 - DNA, 30 bp, Artificial Sequence
  Synthetic oligonucleotide
acagagtttcagttctatatataaaaaagg

SEQ ID NO: 177415 - DNA, 30 bp, Artificial Sequence
  Synthetic oligonucleotide
gtgggagcttcggggaatgtgcccaaaagg

SEQ ID NO: 177416 - DNA, 31 bp, Artificial Sequence
  Synthetic oligonucleotide
aggaggcgggccgttcacatgcgtcaaaagg

SEQ ID NO: 177417 - DNA, 30 bp, Artificial Sequence
  Synthetic oligonucleotide
gttaaaggctgcgcagggagcgcgaaaagg

SEQ ID NO: 177418 - DNA, 30 bp, Artificial Sequence
  Synthetic oligonucleotide
acgtgggtacaggctcccggtagtaaaagg

SEQ ID NO: 177419 - DNA, 30 bp, Artificial Sequence
  Synthetic oligonucleotide
tcagatggaaccaaaaatggtggtaaaagg

SEQ ID NO: 177420 - DNA, 30 bp, Artificial Sequence
  Synthetic oligonucleotide
aatcaagtggggaaattgaatcgccaaagg

SEQ ID NO: 177421 - DNA, 30 bp, Artificial Sequence
  Synthetic oligonucleotide
acgtagctgttccctgtgtattggcaaagg

SEQ ID NO: 177422 - DNA, 30 bp, Artificial Sequence
  Synthetic oligonucleotide
aacccaccggaggtaaaacgaatagaaagg

SEQ ID NO: 177423 - DNA, 30 bp, Artificial Sequence
  Synthetic oligonucleotide
gagcacctagtgcttgacaagaacgaaagg

SEQ ID NO: 177424 - DNA, 30 bp, Artificial Sequence
  Synthetic oligonucleotide
agttaacagtactgttcagcatcggaaagg

SEQ ID NO: 177425 - DNA, 30 bp, Artificial Sequence
  Synthetic oligonucleotide
tgcctgtgcggattccaatgattggaaagg

SEQ ID NO: 177426 - DNA, 30 bp, Artificial Sequence
  Synthetic oligonucleotide
agttggtgtcaaaagcgcaataactaaagg

SEQ ID NO: 177427 - DNA, 30 bp, Artificial Sequence
  Synthetic oligonucleotide
tcctggagatgcggctatgtccagtaaagg

SEQ ID NO: 177428 - DNA, 30 bp, Artificial Sequence
  Synthetic oligonucleotide
gtcagccattttagatctttatattaaagg

SEQ ID NO: 177429 - DNA, 30 bp, Artificial Sequence
  Synthetic oligonucleotide
cttcttgccaagtacgaacggtaaacaagg

SEQ ID NO: 177430 - DNA, 30 bp, Artificial Sequence
  Synthetic oligonucleotide
ttgagggtagcacacttacagggaacaagg

SEQ ID NO: 177431 - DNA, 30 bp, Artificial Sequence
  Synthetic oligonucleotide
gtcgtgcggtaaaccgaacccctcacaagg

SEQ ID NO: 177432 - DNA, 30 bp, Artificial Sequence
  Synthetic oligonucleotide
ccaatgtgacttttagtatggtcgacaagg

SEQ ID NO: 177433 - DNA, 30 bp, Artificial Sequence
  Synthetic oligonucleotide
agcaaaactcgactacgtcacgctacaagg

SEQ ID NO: 177434 - DNA, 30 bp, Artificial Sequence
  Synthetic oligonucleotide
cagggctcttcttaatcacgaattacaagg

SEQ ID NO: 177435 - DNA, 30 bp, Artificial Sequence
  Synthetic oligonucleotide
aaagagttcgccgttactttacaaccaagg

SEQ ID NO: 177436 - DNA, 30 bp, Artificial Sequence
  Synthetic oligonucleotide
cgtgtaggctgcactccgggggtaccaagg

SEQ ID NO: 177437 - DNA, 30 bp, Artificial Sequence
  Synthetic oligonucleotide
tcatgagtagtgtgcgcaagccatccaagg

SEQ ID NO: 177438 - DNA, 30 bp, Artificial Sequence
  Synthetic oligonucleotide
tgtagcgccgggttcctatggtatccaagg

SEQ ID NO: 177439 - DNA, 30 bp, Artificial Sequence
  Synthetic oligonucleotide
ggaacattacagttcaaaaattatccaagg

SEQ ID NO: 177440 - DNA, 30 bp, Artificial Sequence
  Synthetic oligonucleotide
gtgagaataactcagcgtccataagcaagg

SEQ ID NO: 177441 - DNA, 30 bp, Artificial Sequence
  Synthetic oligonucleotide
cgtagcggtcattccgagatagccgcaagg

SEQ ID NO: 177442 - DNA, 30 bp, Artificial Sequence
  Synthetic oligonucleotide
gaaaaccctcctacaagaaccgccgcaagg

SEQ ID NO: 177443 - DNA, 30 bp, Artificial Sequence
  Synthetic oligonucleotide
ttgcgtggtataactgagccggtcgcaagg

SEQ ID NO: 177444 - DNA, 31 bp, Artificial Sequence
  Synthetic oligonucleotide
agagtatatacgcggtcgaaactcggcaagg

SEQ ID NO: 177445 - DNA, 30 bp, Artificial Sequence
  Synthetic oligonucleotide
agagcagctcaaggactacgcgtggcaagg

SEQ ID NO: 177446 - DNA, 30 bp, Artificial Sequence
  Synthetic oligonucleotide
aggtccgaggtaaccccgaggaatgcaagg

SEQ ID NO: 177447 - DNA, 30 bp, Artificial Sequence
  Synthetic oligonucleotide
aaggtagcgtgggtgttccagattgcaagg

SEQ ID NO: 177448 - DNA, 30 bp, Artificial Sequence
  Synthetic oligonucleotide
aacgtgcatcgaatgtcatcgacatcaagg

SEQ ID NO: 177449 - DNA, 30 bp, Artificial Sequence
  Synthetic oligonucleotide
cggccacggcttccctttgagagctcaagg

SEQ ID NO: 177450 - DNA, 30 bp, Artificial Sequence
  Synthetic oligonucleotide
aggatacaaggtgatcatatcttctcaagg

SEQ ID NO: 177451 - DNA, 30 bp, Artificial Sequence
  Synthetic oligonucleotide
agtttaccacacgagttatatatgtcaagg

SEQ ID NO: 177452 - DNA, 30 bp, Artificial Sequence
  Synthetic oligonucleotide
gtagagcccgccctgacataaaattcaagg

SEQ ID NO: 177453 - DNA, 30 bp, Artificial Sequence
  Synthetic oligonucleotide
ggtgcttgcactatgcgatgcacttcaagg

SEQ ID NO: 177454 - DNA, 30 bp, Artificial Sequence
  Synthetic oligonucleotide
tgaggtaccatgcgggattacgtttcaagg

SEQ ID NO: 177455 - DNA, 30 bp, Artificial Sequence
  Synthetic oligonucleotide
ttgtcgctatctcgtccggaattttcaagg

SEQ ID NO: 177456 - DNA, 30 bp, Artificial Sequence
  Synthetic oligonucleotide
acatctctagaaatctaggaggaaagaagg

SEQ ID NO: 177457 - DNA, 30 bp, Artificial Sequence
  Synthetic oligonucleotide
ttaagtccccagggggatgtataaagaagg

SEQ ID NO: 177458 - DNA, 30 bp, Artificial Sequence
  Synthetic oligonucleotide
cgaacaacagcggatgtctccgctagaagg

SEQ ID NO: 177459 - DNA, 30 bp, Artificial Sequence
  Synthetic oligonucleotide
tcggcatttctgggccggaactttagaagg

SEQ ID NO: 177460 - DNA, 30 bp, Artificial Sequence
  Synthetic oligonucleotide
gaacaccatccctctcgatttccacgaagg

SEQ ID NO: 177461 - DNA, 30 bp, Artificial Sequence
  Synthetic oligonucleotide
cagatgagggattggcgatacagacgaagg

SEQ ID NO: 177462 - DNA, 30 bp, Artificial Sequence
  Synthetic oligonucleotide
gacgcgaaccgcgcttaagaataccgaagg

SEQ ID NO: 177463 - DNA, 30 bp, Artificial Sequence
  Synthetic oligonucleotide
cgcttgataacctgcgaaggacatcgaagg

SEQ ID NO: 177464 - DNA, 30 bp, Artificial Sequence
  Synthetic oligonucleotide
caagcgtgggcaggatcgtgcaaaggaagg

SEQ ID NO: 177465 - DNA, 30 bp, Artificial Sequence
  Synthetic oligonucleotide
caagcgctctgaaggttggggacaggaagg

SEQ ID NO: 177466 - DNA, 30 bp, Artificial Sequence
  Synthetic oligonucleotide
gcgtgaactcccgtgtttgcggcaggaagg

SEQ ID NO: 177467 - DNA, 30 bp, Artificial Sequence
  Synthetic oligonucleotide
atctgagtcgcataacggactcacggaagg

SEQ ID NO: 177468 - DNA, 30 bp, Artificial Sequence
  Synthetic oligonucleotide
ttataacataggcgtcttaagtacggaagg

SEQ ID NO: 177469 - DNA, 30 bp, Artificial Sequence
  Synthetic oligonucleotide
ataggtgatggcacaacagaaatgggaagg

SEQ ID NO: 177470 - DNA, 30 bp, Artificial Sequence
  Synthetic oligonucleotide
tcccccggtaagtgataatggcctggaagg

SEQ ID NO: 177471 - DNA, 30 bp, Artificial Sequence
  Synthetic oligonucleotide
cggcaatttgtccaacatttaacatgaagg

SEQ ID NO: 177472 - DNA, 30 bp, Artificial Sequence
  Synthetic oligonucleotide
ggcggtaacatcctatcttgtatatgaagg

SEQ ID NO: 177473 - DNA, 30 bp, Artificial Sequence
  Synthetic oligonucleotide
cgacctgtgagttcaacaggcttatgaagg

SEQ ID NO: 177474 - DNA, 30 bp, Artificial Sequence
  Synthetic oligonucleotide
tgcgtggctccgttttcgctagcgtgaagg

SEQ ID NO: 177475 - DNA, 30 bp, Artificial Sequence
  Synthetic oligonucleotide
gtgtgctgcactctgctggtcaggtgaagg

SEQ ID NO: 177476 - DNA, 30 bp, Artificial Sequence
  Synthetic oligonucleotide
cagggtggttcgactatctgacggtgaagg

SEQ ID NO: 177477 - DNA, 30 bp, Artificial Sequence
  Synthetic oligonucleotide
ccaagtaccacccccaaccaggggtgaagg

SEQ ID NO: 177478 - DNA, 30 bp, Artificial Sequence
  Synthetic oligonucleotide
ggtttaacgtagtaatagcccgtgtgaagg

SEQ ID NO: 177479 - DNA, 30 bp, Artificial Sequence
  Synthetic oligonucleotide
ggcccttcgatgataaaataagattgaagg

SEQ ID NO: 177480 - DNA, 30 bp, Artificial Sequence
  Synthetic oligonucleotide
tttgagtcacgatatgcccacgaaataagg

SEQ ID NO: 177481 - DNA, 30 bp, Artificial Sequence
  Synthetic oligonucleotide
gggttatacggggcaggcccctcaataagg

SEQ ID NO: 177482 - DNA, 30 bp, Artificial Sequence
  Synthetic oligonucleotide
actgagtttgagacttgaggcgtaataagg

SEQ ID NO: 177483 - DNA, 30 bp, Artificial Sequence
  Synthetic oligonucleotide
cattcggagcgtttgaggctagacataagg

SEQ ID NO: 177484 - DNA, 30 bp, Artificial Sequence
  Synthetic oligonucleotide
atgactctgggcgcttcagactacataagg

SEQ ID NO: 177485 - DNA, 30 bp, Artificial Sequence
  Synthetic oligonucleotide
tgcgatgagagacatttaacaatgataagg

SEQ ID NO: 177486 - DNA, 30 bp, Artificial Sequence
  Synthetic oligonucleotide
tccatatccacatccatctgagttataagg

SEQ ID NO: 177487 - DNA, 30 bp, Artificial Sequence
  Synthetic oligonucleotide
tagggttcagggtcagggcgtcacctaagg

SEQ ID NO: 177488 - DNA, 30 bp, Artificial Sequence
  Synthetic oligonucleotide
gcgtccagtcactgacacacattcctaagg

SEQ ID NO: 177489 - DNA, 30 bp, Artificial Sequence
  Synthetic oligonucleotide
tagggtcgcataggatccgagaagctaagg

SEQ ID NO: 177490 - DNA, 30 bp, Artificial Sequence
  Synthetic oligonucleotide
ccccctgttggaggaggtaaagagctaagg

SEQ ID NO: 177491 - DNA, 30 bp, Artificial Sequence
  Synthetic oligonucleotide
agaatacacgtcaatttgcttgagctaagg

SEQ ID NO: 177492 - DNA, 30 bp, Artificial Sequence
  Synthetic oligonucleotide
gcgctcgactagatatgaaatttcgtaagg

SEQ ID NO: 177493 - DNA, 30 bp, Artificial Sequence
  Synthetic oligonucleotide
tggaattggtgaaacactaacagggtaagg

SEQ ID NO: 177494 - DNA, 30 bp, Artificial Sequence
  Synthetic oligonucleotide
atagtgccagggtatgtagggatggtaagg

SEQ ID NO: 177495 - DNA, 30 bp, Artificial Sequence
  Synthetic oligonucleotide
gaaaaggggtgaactcatgggcctgtaagg

SEQ ID NO: 177496 - DNA, 30 bp, Artificial Sequence
  Synthetic oligonucleotide
ccatgcttaggcgtaacaactgctgtaagg

SEQ ID NO: 177497 - DNA, 30 bp, Artificial Sequence
  Synthetic oligonucleotide
agggtaggatataaaagcggaattgtaagg

SEQ ID NO: 177498 - DNA, 30 bp, Artificial Sequence
  Synthetic oligonucleotide
taaatttgtatacgattggctgttgtaagg

SEQ ID NO: 177499 - DNA, 30 bp, Artificial Sequence
  Synthetic oligonucleotide
taccagatatgtagaggacaaacattaagg

SEQ ID NO: 177500 - DNA, 30 bp, Artificial Sequence
  Synthetic oligonucleotide
caggacctcgttacattgtgcttattaagg

SEQ ID NO: 177501 - DNA, 30 bp, Artificial Sequence
  Synthetic oligonucleotide
aggctggaaagaccagaacctccgttaagg

SEQ ID NO: 177502 - DNA, 30 bp, Artificial Sequence
  Synthetic oligonucleotide
aggcctatttactagactctcctgttaagg

SEQ ID NO: 177503 - DNA, 30 bp, Artificial Sequence
  Synthetic oligonucleotide
ccctaacactgaacaccacagaatttaagg

SEQ ID NO: 177504 - DNA, 30 bp, Artificial Sequence
  Synthetic oligonucleotide
agttatcgattcttaatgcagagaaacagg

SEQ ID NO: 177505 - DNA, 30 bp, Artificial Sequence
  Synthetic oligonucleotide
gcccgggcggtcaataccccctacaacagg

SEQ ID NO: 177506 - DNA, 30 bp, Artificial Sequence
  Synthetic oligonucleotide
taacgtacaaaccttgacagtacgaacagg

SEQ ID NO: 177507 - DNA, 30 bp, Artificial Sequence
  Synthetic oligonucleotide
tctacagtctgcgtttacggcagccacagg

SEQ ID NO: 177508 - DNA, 30 bp, Artificial Sequence
  Synthetic oligonucleotide
acagatttttggcgggatactagccacagg

SEQ ID NO: 177509 - DNA, 30 bp, Artificial Sequence
  Synthetic oligonucleotide
gacagtaataatcttgtagccaatcacagg

SEQ ID NO: 177510 - DNA, 30 bp, Artificial Sequence
  Synthetic oligonucleotide
ccaattggttggagaatcgggattcacagg

SEQ ID NO: 177511 - DNA, 30 bp, Artificial Sequence
  Synthetic oligonucleotide
ccatatagtaaggtgtattggttagacagg

SEQ ID NO: 177512 - DNA, 30 bp, Artificial Sequence
  Synthetic oligonucleotide
taaggatctgacagacacatcgtcgacagg

SEQ ID NO: 177513 - DNA, 30 bp, Artificial Sequence
  Synthetic oligonucleotide
agacagacgtgtgtgttcatggtatacagg

SEQ ID NO: 177514 - DNA, 30 bp, Artificial Sequence
  Synthetic oligonucleotide
cggatgtcccaatcttacggagactacagg

SEQ ID NO: 177515 - DNA, 30 bp, Artificial Sequence
  Synthetic oligonucleotide
acggagcatcttactcgcatattttacagg

SEQ ID NO: 177516 - DNA, 30 bp, Artificial Sequence
  Synthetic oligonucleotide
gggtgcgcttgtgtcccgacgttaaccagg

SEQ ID NO: 177517 - DNA, 30 bp, Artificial Sequence
  Synthetic oligonucleotide
gacataagtccgttcacgtgaagtaccagg

SEQ ID NO: 177518 - DNA, 30 bp, Artificial Sequence
  Synthetic oligonucleotide
tatattgggctccgagcaagcggtaccagg

SEQ ID NO: 177519 - DNA, 30 bp, Artificial Sequence
  Synthetic oligonucleotide
atagaagggtccatttaggtggtacccagg

SEQ ID NO: 177520 - DNA, 30 bp, Artificial Sequence
  Synthetic oligonucleotide
gcattggagtgtatcccaatggagcccagg

SEQ ID NO: 177521 - DNA, 30 bp, Artificial Sequence
  Synthetic oligonucleotide
ccgttcgttacgtctcagtccgatcccagg

SEQ ID NO: 177522 - DNA, 30 bp, Artificial Sequence
  Synthetic oligonucleotide
ctacgatgtgcagtgggctcgggtcccagg

SEQ ID NO: 177523 - DNA, 30 bp, Artificial Sequence
  Synthetic oligonucleotide
gggcctactgccttctttcacgccgccagg

SEQ ID NO: 177524 - DNA, 30 bp, Artificial Sequence
  Synthetic oligonucleotide
cgctgcaatttgctatatctggtatccagg

SEQ ID NO: 177525 - DNA, 30 bp, Artificial Sequence
  Synthetic oligonucleotide
tgtgtatcccgtaaacttgtagggtccagg

SEQ ID NO: 177526 - DNA, 30 bp, Artificial Sequence
  Synthetic oligonucleotide
ggtattggctttcttaaagcagtgtccagg

SEQ ID NO: 177527 - DNA, 30 bp, Artificial Sequence
  Synthetic oligonucleotide
ggcggcacaacagaagtgggtacttccagg

SEQ ID NO: 177528 - DNA, 30 bp, Artificial Sequence
  Synthetic oligonucleotide
gatcagcaaattgcacgaaatagttccagg

SEQ ID NO: 177529 - DNA, 30 bp, Artificial Sequence
  Synthetic oligonucleotide
ttcgagggtggttgtggaccgtagagcagg

SEQ ID NO: 177530 - DNA, 30 bp, Artificial Sequence
  Synthetic oligonucleotide
ccggaacgaatcccgtcctgtgaaggcagg

SEQ ID NO: 177531 - DNA, 30 bp, Artificial Sequence
  Synthetic oligonucleotide
atacattaataatcacatactacaggcagg

SEQ ID NO: 177532 - DNA, 30 bp, Artificial Sequence
  Synthetic oligonucleotide
gcattccttagaaatcacactaagggcagg

SEQ ID NO: 177533 - DNA, 30 bp, Artificial Sequence
  Synthetic oligonucleotide
gataagaacggatggttagcgtcgggcagg

SEQ ID NO: 177534 - DNA, 30 bp, Artificial Sequence
  Synthetic oligonucleotide
acacatatggttggagattctcggggcagg

SEQ ID NO: 177535 - DNA, 30 bp, Artificial Sequence
  Synthetic oligonucleotide
tgtgggaagtggcctggtggatggggcagg

SEQ ID NO: 177536 - DNA, 30 bp, Artificial Sequence
  Synthetic oligonucleotide
ggtaacaacaataaaagatgaattggcagg

SEQ ID NO: 177537 - DNA, 30 bp, Artificial Sequence
  Synthetic oligonucleotide
tatgaattccaggaatgggggggctgcagg

SEQ ID NO: 177538 - DNA, 30 bp, Artificial Sequence
  Synthetic oligonucleotide
gggaaaattgctgccactcgtttctgcagg

SEQ ID NO: 177539 - DNA, 30 bp, Artificial Sequence
  Synthetic oligonucleotide
atatcgtaacagtaggacatcccgtgcagg

SEQ ID NO: 177540 - DNA, 30 bp, Artificial Sequence
  Synthetic oligonucleotide
acaagtgttagggcaatttaggccatcagg

SEQ ID NO: 177541 - DNA, 30 bp, Artificial Sequence
  Synthetic oligonucleotide
tccagagttttacaacagtcctccatcagg

SEQ ID NO: 177542 - DNA, 30 bp, Artificial Sequence
  Synthetic oligonucleotide
gcaattcgatgcaaaaacacttagctcagg

SEQ ID NO: 177543 - DNA, 30 bp, Artificial Sequence
  Synthetic oligonucleotide
agttcgcttgcaatccgtccagatctcagg

SEQ ID NO: 177544 - DNA, 30 bp, Artificial Sequence
  Synthetic oligonucleotide
acatttcgaagacactgcagtcacgtcagg

SEQ ID NO: 177545 - DNA, 30 bp, Artificial Sequence
  Synthetic oligonucleotide
acccagaacggttacgggctggacgtcagg

SEQ ID NO: 177546 - DNA, 30 bp, Artificial Sequence
  Synthetic oligonucleotide
gctgcctcgacagaataacgaactgtcagg

SEQ ID NO: 177547 - DNA, 30 bp, Artificial Sequence
  Synthetic oligonucleotide
aggagcgtgcaagttatacaataattcagg

SEQ ID NO: 177548 - DNA, 30 bp, Artificial Sequence
  Synthetic oligonucleotide
ccgtctctggatgtttatggacacttcagg

SEQ ID NO: 177549 - DNA, 31 bp, Artificial Sequence
  Synthetic oligonucleotide
attgagtcaccggtggttgttaaagttcagg

SEQ ID NO: 177550 - DNA, 30 bp, Artificial Sequence
  Synthetic oligonucleotide
gacgtacagacgacatgcgcccggttcagg

SEQ ID NO: 177551 - DNA, 30 bp, Artificial Sequence
  Synthetic oligonucleotide
tcttgaatgatataaccaaacactttcagg

SEQ ID NO: 177552 - DNA, 30 bp, Artificial Sequence
  Synthetic oligonucleotide
gatgattctaagtattaccggatcaagagg

SEQ ID NO: 177553 - DNA, 30 bp, Artificial Sequence
  Synthetic oligonucleotide
gacaaaaccgtatagaactgcctcaagagg

SEQ ID NO: 177554 - DNA, 30 bp, Artificial Sequence
  Synthetic oligonucleotide
gtacagatgcaaaaccgtgctcataagagg

SEQ ID NO: 177555 - DNA, 30 bp, Artificial Sequence
  Synthetic oligonucleotide
aagttcttaaaagaactttcagcacagagg

SEQ ID NO: 177556 - DNA, 30 bp, Artificial Sequence
  Synthetic oligonucleotide
agtgcgggatcggggaagtatccgcagagg

SEQ ID NO: 177557 - DNA, 30 bp, Artificial Sequence
  Synthetic oligonucleotide
gcctccagctacggactgtgggggcagagg

SEQ ID NO: 177558 - DNA, 30 bp, Artificial Sequence
  Synthetic oligonucleotide
agaaagattgaaccgacttgtcccgagagg

SEQ ID NO: 177559 - DNA, 30 bp, Artificial Sequence
  Synthetic oligonucleotide
ttatttaggtagtcaccgtggggcgagagg

SEQ ID NO: 177560 - DNA, 30 bp, Artificial Sequence
  Synthetic oligonucleotide
atgtaaagcgacgcatttaatttggagagg

SEQ ID NO: 177561 - DNA, 30 bp, Artificial Sequence
  Synthetic oligonucleotide
gccttcgtgttggaagccggaagtgagagg

SEQ ID NO: 177562 - DNA, 30 bp, Artificial Sequence
  Synthetic oligonucleotide
tgagcaagtatgtgggcacagctatagagg

SEQ ID NO: 177563 - DNA, 30 bp, Artificial Sequence
  Synthetic oligonucleotide
aattatgggtataaaaatgatatctagagg

SEQ ID NO: 177564 - DNA, 30 bp, Artificial Sequence
  Synthetic oligonucleotide
tatgcacattaagtcgtggatttctagagg

SEQ ID NO: 177565 - DNA, 30 bp, Artificial Sequence
  Synthetic oligonucleotide
tggcttatcatcagtcccgccagaacgagg

SEQ ID NO: 177566 - DNA, 30 bp, Artificial Sequence
  Synthetic oligonucleotide
tggtaatcatagccttaagccgacacgagg

SEQ ID NO: 177567 - DNA, 30 bp, Artificial Sequence
  Synthetic oligonucleotide
ggtcgacctgaaagggtcttgtggacgagg

SEQ ID NO: 177568 - DNA, 30 bp, Artificial Sequence
  Synthetic oligonucleotide
cacaccccggcacgtcttgccaatacgagg

SEQ ID NO: 177569 - DNA, 30 bp, Artificial Sequence
  Synthetic oligonucleotide
gtacccgcccttgtagaagggaaaccgagg

SEQ ID NO: 177570 - DNA, 30 bp, Artificial Sequence
  Synthetic oligonucleotide
ttaacgtcgtgtattctacggtaaccgagg

SEQ ID NO: 177571 - DNA, 30 bp, Artificial Sequence
  Synthetic oligonucleotide
gaaaagagcagaacctggctcataccgagg

SEQ ID NO: 177572 - DNA, 30 bp, Artificial Sequence
  Synthetic oligonucleotide
tgcggcagtatagcacccacttacccgagg

SEQ ID NO: 177573 - DNA, 30 bp, Artificial Sequence
  Synthetic oligonucleotide
ttagattgctgacggcagtcgagcccgagg

SEQ ID NO: 177574 - DNA, 30 bp, Artificial Sequence
  Synthetic oligonucleotide
agcgtcacattatgagaatagaagccgagg

SEQ ID NO: 177575 - DNA, 30 bp, Artificial Sequence
  Synthetic oligonucleotide
tatacgggggttggggatacgtgcgcgagg

SEQ ID NO: 177576 - DNA, 30 bp, Artificial Sequence
  Synthetic oligonucleotide
tacacgcgctccaggtttacactcgcgagg

SEQ ID NO: 177577 - DNA, 30 bp, Artificial Sequence
  Synthetic oligonucleotide
tggttcttaagaataagcggaaatgcgagg

SEQ ID NO: 177578 - DNA, 30 bp, Artificial Sequence
  Synthetic oligonucleotide
gtcggttcacattagtcaggttatgcgagg

SEQ ID NO: 177579 - DNA, 29 bp, Artificial Sequence
  Synthetic oligonucleotide
caaagcgagtccaaatgctacggtcgagg

SEQ ID NO: 177580 - DNA, 30 bp, Artificial Sequence
  Synthetic oligonucleotide
gacaacactacaggatctacggggtcgagg

SEQ ID NO: 177581 - DNA, 30 bp, Artificial Sequence
  Synthetic oligonucleotide
gacaaccctcggagcggtatagtgtcgagg

SEQ ID NO: 177582 - DNA, 30 bp, Artificial Sequence
  Synthetic oligonucleotide
tacaggatcaaaattccgatgcattcgagg

SEQ ID NO: 177583 - DNA, 30 bp, Artificial Sequence
  Synthetic oligonucleotide
ctttcccagtcccactaacaaagaaggagg

SEQ ID NO: 177584 - DNA, 30 bp, Artificial Sequence
  Synthetic oligonucleotide
taccctgactcccgggggaatataaggagg

SEQ ID NO: 177585 - DNA, 30 bp, Artificial Sequence
  Synthetic oligonucleotide
gagctaagagacatgttcccaaacaggagg

SEQ ID NO: 177586 - DNA, 30 bp, Artificial Sequence
  Synthetic oligonucleotide
ccgggccagccggatcctgcactgaggagg

SEQ ID NO: 177587 - DNA, 30 bp, Artificial Sequence
  Synthetic oligonucleotide
tgggctaatcgcgtccacacagttaggagg

SEQ ID NO: 177588 - DNA, 30 bp, Artificial Sequence
  Synthetic oligonucleotide
gaactagcaagaggatgaggactacggagg

SEQ ID NO: 177589 - DNA, 30 bp, Artificial Sequence
  Synthetic oligonucleotide
aaatcagataattgttacgtacgtcggagg

SEQ ID NO: 177590 - DNA, 30 bp, Artificial Sequence
  Synthetic oligonucleotide
aagacgcctattgcccgcaagaaagggagg

SEQ ID NO: 177591 - DNA, 30 bp, Artificial Sequence
  Synthetic oligonucleotide
cgagttaaactagctacccactaagggagg

SEQ ID NO: 177592 - DNA, 30 bp, Artificial Sequence
  Synthetic oligonucleotide
taataaaccaaattatccggcagagggagg

SEQ ID NO: 177593 - DNA, 30 bp, Artificial Sequence
  Synthetic oligonucleotide
ggccgttagggtgactatagtatagggagg

SEQ ID NO: 177594 - DNA, 30 bp, Artificial Sequence
  Synthetic oligonucleotide
actgcgcgttatgcatattatggggggagg

SEQ ID NO: 177595 - DNA, 30 bp, Artificial Sequence
  Synthetic oligonucleotide
gcattaagatcaaagataacaccctggagg

SEQ ID NO: 177596 - DNA, 30 bp, Artificial Sequence
  Synthetic oligonucleotide
gggcgacgaagcatttgatgtccctggagg

SEQ ID NO: 177597 - DNA, 30 bp, Artificial Sequence
  Synthetic oligonucleotide
aagcgtgctttagatagagtaccaatgagg

SEQ ID NO: 177598 - DNA, 30 bp, Artificial Sequence
  Synthetic oligonucleotide
aactggtgaatctgtcaacgcaccatgagg

SEQ ID NO: 177599 - DNA, 30 bp, Artificial Sequence
  Synthetic oligonucleotide
agtagctaatttagtaaataatatatgagg

SEQ ID NO: 177600 - DNA, 30 bp, Artificial Sequence
  Synthetic oligonucleotide
ctccagaagggcacatcggtcggtatgagg

SEQ ID NO: 177601 - DNA, 30 bp, Artificial Sequence
  Synthetic oligonucleotide
atcattgcttacttgatattcgaactgagg

SEQ ID NO: 177602 - DNA, 30 bp, Artificial Sequence
  Synthetic oligonucleotide
attagcgggtaatagcaaggactactgagg

SEQ ID NO: 177603 - DNA, 30 bp, Artificial Sequence
  Synthetic oligonucleotide
agatctacaacggtcgtttcccatctgagg

SEQ ID NO: 177604 - DNA, 30 bp, Artificial Sequence
  Synthetic oligonucleotide
atcgcatacggcaaactggtgtatctgagg

SEQ ID NO: 177605 - DNA, 30 bp, Artificial Sequence
  Synthetic oligonucleotide
aataaacttcgatgagcctaggtagtgagg

SEQ ID NO: 177606 - DNA, 30 bp, Artificial Sequence
  Synthetic oligonucleotide
cctttatgatgtccataaggaaacgtgagg

SEQ ID NO: 177607 - DNA, 30 bp, Artificial Sequence
  Synthetic oligonucleotide
cggtgagccgttaccgaggaatacgtgagg

SEQ ID NO: 177608 - DNA, 30 bp, Artificial Sequence
  Synthetic oligonucleotide
cagggatacaagtcggccgttcccgtgagg

SEQ ID NO: 177609 - DNA, 30 bp, Artificial Sequence
  Synthetic oligonucleotide
atcctaaaaactggcgttctagcggtgagg

SEQ ID NO: 177610 - DNA, 30 bp, Artificial Sequence
  Synthetic oligonucleotide
tgtaaatcatgtgagtactctgcggtgagg

SEQ ID NO: 177611 - DNA, 30 bp, Artificial Sequence
  Synthetic oligonucleotide
tccaacaggtaacgagacaacttggtgagg

SEQ ID NO: 177612 - DNA, 30 bp, Artificial Sequence
  Synthetic oligonucleotide
tcgaggaagcgctaattacgcactgtgagg

SEQ ID NO: 177613 - DNA, 30 bp, Artificial Sequence
  Synthetic oligonucleotide
tagagggcacatggatatgtgggcttgagg

SEQ ID NO: 177614 - DNA, 30 bp, Artificial Sequence
  Synthetic oligonucleotide
cataaggataaacttattcaagcgttgagg

SEQ ID NO: 177615 - DNA, 30 bp, Artificial Sequence
  Synthetic oligonucleotide
gcggtcacgagaaaaaaaggctcgttgagg

SEQ ID NO: 177616 - DNA, 30 bp, Artificial Sequence
  Synthetic oligonucleotide
acgatgaacgagactagtatacttttgagg

SEQ ID NO: 177617 - DNA, 30 bp, Artificial Sequence
  Synthetic oligonucleotide
tgaggaatatcgtgttataacaaaaatagg

SEQ ID NO: 177618 - DNA, 30 bp, Artificial Sequence
  Synthetic oligonucleotide
gttagttacaggctttagacgggaaatagg

SEQ ID NO: 177619 - DNA, 30 bp, Artificial Sequence
  Synthetic oligonucleotide
gactctggatgatcaattatcgacaatagg

SEQ ID NO: 177620 - DNA, 30 bp, Artificial Sequence
  Synthetic oligonucleotide
ttatgatccgggcaagtttcggataatagg

SEQ ID NO: 177621 - DNA, 30 bp, Artificial Sequence
  Synthetic oligonucleotide
acatggggtattgtctgaaaggttaatagg

SEQ ID NO: 177622 - DNA, 30 bp, Artificial Sequence
  Synthetic oligonucleotide
ttggccatcctgttcgtcgatccacatagg

SEQ ID NO: 177623 - DNA, 30 bp, Artificial Sequence
  Synthetic oligonucleotide
tccaacgaggctggctatgaaaaccatagg

SEQ ID NO: 177624 - DNA, 30 bp, Artificial Sequence
  Synthetic oligonucleotide
catcactaaaaaccctagacggaccatagg

SEQ ID NO: 177625 - DNA, 30 bp, Artificial Sequence
  Synthetic oligonucleotide
ctatagatactagtaggtagcagtcatagg

SEQ ID NO: 177626 - DNA, 30 bp, Artificial Sequence
  Synthetic oligonucleotide
caaagaagtacggctggccggggagatagg

SEQ ID NO: 177627 - DNA, 30 bp, Artificial Sequence
  Synthetic oligonucleotide
atgcgtatcgcatgcagttatcacgatagg

SEQ ID NO: 177628 - DNA, 30 bp, Artificial Sequence
  Synthetic oligonucleotide
gtgtatacgctccattaacctcaggatagg

SEQ ID NO: 177629 - DNA, 30 bp, Artificial Sequence
  Synthetic oligonucleotide
cataggcaggtggggctcaccgcggatagg

SEQ ID NO: 177630 - DNA, 30 bp, Artificial Sequence
  Synthetic oligonucleotide
gctcaatgacgtcatatatagttggatagg

SEQ ID NO: 177631 - DNA, 30 bp, Artificial Sequence
  Synthetic oligonucleotide
tataacaaactattaaagtacagtgatagg

SEQ ID NO: 177632 - DNA, 30 bp, Artificial Sequence
  Synthetic oligonucleotide
caagtgagaaggtgattacatattgatagg

SEQ ID NO: 177633 - DNA, 30 bp, Artificial Sequence
  Synthetic oligonucleotide
ttgcgtgccacatattagagatttgatagg

SEQ ID NO: 177634 - DNA, 30 bp, Artificial Sequence
  Synthetic oligonucleotide
actacttgctcctagcctctaggatatagg

SEQ ID NO: 177635 - DNA, 30 bp, Artificial Sequence
  Synthetic oligonucleotide
aggcggagtgaaaacgatatcatatatagg

SEQ ID NO: 177636 - DNA, 30 bp, Artificial Sequence
  Synthetic oligonucleotide
agtagtaccgtgcggctcaacgtatatagg

SEQ ID NO: 177637 - DNA, 30 bp, Artificial Sequence
  Synthetic oligonucleotide
cacagggaactgtcacagaaacggtatagg

SEQ ID NO: 177638 - DNA, 30 bp, Artificial Sequence
  Synthetic oligonucleotide
ccgcaactaaggtatacaaaagtgtatagg

SEQ ID NO: 177639 - DNA, 30 bp, Artificial Sequence
  Synthetic oligonucleotide
aggatcccccgtgggagaagcgtgtatagg

SEQ ID NO: 177640 - DNA, 30 bp, Artificial Sequence
  Synthetic oligonucleotide
tcaactatgggttggtaacctgtttatagg

SEQ ID NO: 177641 - DNA, 30 bp, Artificial Sequence
  Synthetic oligonucleotide
ggggaatatgccatgcgaaatccaactagg

SEQ ID NO: 177642 - DNA, 30 bp, Artificial Sequence
  Synthetic oligonucleotide
ttgaggtttaatagagctcacagaactagg

SEQ ID NO: 177643 - DNA, 30 bp, Artificial Sequence
  Synthetic oligonucleotide
gtcggcattgctagattcgacagtactagg

SEQ ID NO: 177644 - DNA, 30 bp, Artificial Sequence
  Synthetic oligonucleotide
ccctgcgtatcttaaggtgaacgtactagg

SEQ ID NO: 177645 - DNA, 30 bp, Artificial Sequence
  Synthetic oligonucleotide
tttgggggactcacgatgagctcacctagg

SEQ ID NO: 177646 - DNA, 30 bp, Artificial Sequence
  Synthetic oligonucleotide
ctatcgggggcgatcgaggtagatcctagg

SEQ ID NO: 177647 - DNA, 30 bp, Artificial Sequence
  Synthetic oligonucleotide
aggtctggagagtgttaaccgtctgctagg

SEQ ID NO: 177648 - DNA, 30 bp, Artificial Sequence
  Synthetic oligonucleotide
gcgcagtgagtgtcaagttcacagtctagg

SEQ ID NO: 177649 - DNA, 30 bp, Artificial Sequence
  Synthetic oligonucleotide
tggaaagtcagtggtggtttaagttctagg

SEQ ID NO: 177650 - DNA, 30 bp, Artificial Sequence
  Synthetic oligonucleotide
agacgggaccttcgcatcaagtaaagtagg

SEQ ID NO: 177651 - DNA, 30 bp, Artificial Sequence
  Synthetic oligonucleotide
catatattgtaaacgaggtatgtaagtagg

SEQ ID NO: 177652 - DNA, 30 bp, Artificial Sequence
  Synthetic oligonucleotide
agagctaacacaagcgagactttaagtagg

SEQ ID NO: 177653 - DNA, 30 bp, Artificial Sequence
  Synthetic oligonucleotide
acgatgctccacgcaccgaaaatcagtagg

SEQ ID NO: 177654 - DNA, 30 bp, Artificial Sequence
  Synthetic oligonucleotide
cgcttctatgtggctacagttttcagtagg

SEQ ID NO: 177655 - DNA, 30 bp, Artificial Sequence
  Synthetic oligonucleotide
acaatggttaagtgagtgaattagagtagg

SEQ ID NO: 177656 - DNA, 30 bp, Artificial Sequence
  Synthetic oligonucleotide
ggtaccatgggattgtgagggccgagtagg

SEQ ID NO: 177657 - DNA, 30 bp, Artificial Sequence
  Synthetic oligonucleotide
gggaccgcggcgagggtcttcgggagtagg

SEQ ID NO: 177658 - DNA, 30 bp, Artificial Sequence
  Synthetic oligonucleotide
ggcctattgttgacatagggggggagtagg

SEQ ID NO: 177659 - DNA, 30 bp, Artificial Sequence
  Synthetic oligonucleotide
gggaaaaacgttcgtaagaatgtgagtagg

SEQ ID NO: 177660 - DNA, 30 bp, Artificial Sequence
  Synthetic oligonucleotide
cactacattcggtttggagagagtagtagg

SEQ ID NO: 177661 - DNA, 30 bp, Artificial Sequence
  Synthetic oligonucleotide
aatataggctattggggtagaaaacgtagg

SEQ ID NO: 177662 - DNA, 30 bp, Artificial Sequence
  Synthetic oligonucleotide
aacggtgtaaagttgtagcgggaacgtagg

SEQ ID NO: 177663 - DNA, 30 bp, Artificial Sequence
  Synthetic oligonucleotide
ttcggatatttcagggaaatccagcgtagg

SEQ ID NO: 177664 - DNA, 30 bp, Artificial Sequence
  Synthetic oligonucleotide
aaaggcgtacgccgtcaggatcatcgtagg

SEQ ID NO: 177665 - DNA, 30 bp, Artificial Sequence
  Synthetic oligonucleotide
cgagtggcaatgggggaagccataggtagg

SEQ ID NO: 177666 - DNA, 30 bp, Artificial Sequence
  Synthetic oligonucleotide
gtggagggttggtagcctaaggacggtagg

SEQ ID NO: 177667 - DNA, 30 bp, Artificial Sequence
  Synthetic oligonucleotide
ttacatcaggttatagaccaaccgggtagg

SEQ ID NO: 177668 - DNA, 30 bp, Artificial Sequence
  Synthetic oligonucleotide
gaatcttaaaagagagacacgaggggtagg

SEQ ID NO: 177669 - DNA, 30 bp, Artificial Sequence
  Synthetic oligonucleotide
cagtttcagttagtcacactaaaatgtagg

SEQ ID NO: 177670 - DNA, 30 bp, Artificial Sequence
  Synthetic oligonucleotide
cctgtagggaggctcagaacagaatgtagg

SEQ ID NO: 177671 - DNA, 30 bp, Artificial Sequence
  Synthetic oligonucleotide
agaagttgaatcagcggagggcgatgtagg

SEQ ID NO: 177672 - DNA, 30 bp, Artificial Sequence
  Synthetic oligonucleotide
gggttgtttgatatagtgaaaggatgtagg

SEQ ID NO: 177673 - DNA, 30 bp, Artificial Sequence
  Synthetic oligonucleotide
caataagtaagttcatcttcacgctgtagg

SEQ ID NO: 177674 - DNA, 30 bp, Artificial Sequence
  Synthetic oligonucleotide
tggagcctagccagttgatcgttgtgtagg

SEQ ID NO: 177675 - DNA, 30 bp, Artificial Sequence
  Synthetic oligonucleotide
ttaccaggggagatgggagatggaattagg

SEQ ID NO: 177676 - DNA, 30 bp, Artificial Sequence
  Synthetic oligonucleotide
agatgctctggactcgacataataattagg

SEQ ID NO: 177677 - DNA, 30 bp, Artificial Sequence
  Synthetic oligonucleotide
tgtcatggatgccctctaggggtaattagg

SEQ ID NO: 177678 - DNA, 30 bp, Artificial Sequence
  Synthetic oligonucleotide
agtccgcttccagggatcaacttaattagg

SEQ ID NO: 177679 - DNA, 30 bp, Artificial Sequence
  Synthetic oligonucleotide
tgggacacccgaacgagcggcgacattagg

SEQ ID NO: 177680 - DNA, 30 bp, Artificial Sequence
  Synthetic oligonucleotide
cggcccaaagacactataaaatctattagg

SEQ ID NO: 177681 - DNA, 30 bp, Artificial Sequence
  Synthetic oligonucleotide
gcgcacaatccgacttcagtgaccgttagg

SEQ ID NO: 177682 - DNA, 30 bp, Artificial Sequence
  Synthetic oligonucleotide
tcatggggggatgaaggctcgggggttagg

SEQ ID NO: 177683 - DNA, 30 bp, Artificial Sequence
  Synthetic oligonucleotide
gcgccaattaaccgtaagcgaatggttagg

SEQ ID NO: 177684 - DNA, 31 bp, Artificial Sequence
  Synthetic oligonucleotide
aatgagctgcggacctcgacgtctggttagg

SEQ ID NO: 177685 - DNA, 30 bp, Artificial Sequence
  Synthetic oligonucleotide
atgccataacgggaccatctcaagtttagg

SEQ ID NO: 177686 - DNA, 30 bp, Artificial Sequence
  Synthetic oligonucleotide
aagacccatttttggtatatgtcacaacgg

SEQ ID NO: 177687 - DNA, 30 bp, Artificial Sequence
  Synthetic oligonucleotide
gcacatgggcaatacctcgcagaccaacgg

SEQ ID NO: 177688 - DNA, 30 bp, Artificial Sequence
  Synthetic oligonucleotide
acaacactcagaggctcccaagcccaacgg

SEQ ID NO: 177689 - DNA, 30 bp, Artificial Sequence
  Synthetic oligonucleotide
gggaggcgtgccgatttaccacgtcaacgg

SEQ ID NO: 177690 - DNA, 30 bp, Artificial Sequence
  Synthetic oligonucleotide
tcttagtgcaatgaagataatcgtcaacgg

SEQ ID NO: 177691 - DNA, 30 bp, Artificial Sequence
  Synthetic oligonucleotide
ggtcaaacatgatccgagaccatagaacgg

SEQ ID NO: 177692 - DNA, 30 bp, Artificial Sequence
  Synthetic oligonucleotide
ggcgtcttcgtaacgggaaaaggggaacgg

SEQ ID NO: 177693 - DNA, 30 bp, Artificial Sequence
  Synthetic oligonucleotide
ctagattgaaaggcacgtaacggctaacgg

SEQ ID NO: 177694 - DNA, 30 bp, Artificial Sequence
  Synthetic oligonucleotide
agtacgaagattgtttaactttcgtaacgg

SEQ ID NO: 177695 - DNA, 30 bp, Artificial Sequence
  Synthetic oligonucleotide
ttggatcgttaacgggacaattcttaacgg

SEQ ID NO: 177696 - DNA, 30 bp, Artificial Sequence
  Synthetic oligonucleotide
cttcatcgccgtgcaagaaggataccacgg

SEQ ID NO: 177697 - DNA, 30 bp, Artificial Sequence
  Synthetic oligonucleotide
agaggaggttcagccagataattcccacgg

SEQ ID NO: 177698 - DNA, 30 bp, Artificial Sequence
  Synthetic oligonucleotide
aatcagaagaccggaggaaagaggccacgg

SEQ ID NO: 177699 - DNA, 30 bp, Artificial Sequence
  Synthetic oligonucleotide
aacctacggcgataccagaattatccacgg

SEQ ID NO: 177700 - DNA, 30 bp, Artificial Sequence
  Synthetic oligonucleotide
gacaagttagtcctgatagcgggtccacgg

SEQ ID NO: 177701 - DNA, 30 bp, Artificial Sequence
  Synthetic oligonucleotide
gagccaagtcagtcgctgttaagagcacgg

SEQ ID NO: 177702 - DNA, 30 bp, Artificial Sequence
  Synthetic oligonucleotide
ggggaagattcataaccgattggagcacgg

SEQ ID NO: 177703 - DNA, 30 bp, Artificial Sequence
  Synthetic oligonucleotide
agctcgcggaagtcgcatcacaaatcacgg

SEQ ID NO: 177704 - DNA, 30 bp, Artificial Sequence
  Synthetic oligonucleotide
atgtggcatgcaatctgttccacatcacgg

SEQ ID NO: 177705 - DNA, 30 bp, Artificial Sequence
  Synthetic oligonucleotide
accctgcaatccgcccgagggaattcacgg

SEQ ID NO: 177706 - DNA, 30 bp, Artificial Sequence
  Synthetic oligonucleotide
atgcccaagtacaagttaatgcattcacgg

SEQ ID NO: 177707 - DNA, 30 bp, Artificial Sequence
  Synthetic oligonucleotide
ttaggacaggcaactgtatgaccttcacgg

SEQ ID NO: 177708 - DNA, 30 bp, Artificial Sequence
  Synthetic oligonucleotide
atcgccgtagtacaagggcttgttagacgg

SEQ ID NO: 177709 - DNA, 30 bp, Artificial Sequence
  Synthetic oligonucleotide
cctggtaagcgcaaagaagctctacgacgg

SEQ ID NO: 177710 - DNA, 30 bp, Artificial Sequence
  Synthetic oligonucleotide
ggggttaacactgatgttggatcgcgacgg

SEQ ID NO: 177711 - DNA, 30 bp, Artificial Sequence
  Synthetic oligonucleotide
ctaccaagagtacaaagctttcagggacgg

SEQ ID NO: 177712 - DNA, 30 bp, Artificial Sequence
  Synthetic oligonucleotide
agaccattggtatatgctatttggggacgg

SEQ ID NO: 177713 - DNA, 30 bp, Artificial Sequence
  Synthetic oligonucleotide
ttgcgatgttgggcatgctagcatggacgg

SEQ ID NO: 177714 - DNA, 30 bp, Artificial Sequence
  Synthetic oligonucleotide
tcagtcaacaaagaaactcgatcctgacgg

SEQ ID NO: 177715 - DNA, 30 bp, Artificial Sequence
  Synthetic oligonucleotide
ggatctaccggggtatcgatacggtgacgg

SEQ ID NO: 177716 - DNA, 30 bp, Artificial Sequence
  Synthetic oligonucleotide
ccttgatacgggaaatacagcatgtgacgg

SEQ ID NO: 177717 - DNA, 30 bp, Artificial Sequence
  Synthetic oligonucleotide
agactggtacgtgaggacgatacttgacgg

SEQ ID NO: 177718 - DNA, 30 bp, Artificial Sequence
  Synthetic oligonucleotide
tgtcttaggttcaccagcttgagaatacgg

SEQ ID NO: 177719 - DNA, 30 bp, Artificial Sequence
  Synthetic oligonucleotide
caaattggggcgttcgagcctttaatacgg

SEQ ID NO: 177720 - DNA, 30 bp, Artificial Sequence
  Synthetic oligonucleotide
ggaatcaaccctggtagtgggaacatacgg

SEQ ID NO: 177721 - DNA, 30 bp, Artificial Sequence
  Synthetic oligonucleotide
ggtgtccgtaaagctctaagaatgatacgg

SEQ ID NO: 177722 - DNA, 30 bp, Artificial Sequence
  Synthetic oligonucleotide
atttggccatggatagtttagcgcctacgg

SEQ ID NO: 177723 - DNA, 30 bp, Artificial Sequence
  Synthetic oligonucleotide
catcggctggatcttgcccaccatctacgg

SEQ ID NO: 177724 - DNA, 30 bp, Artificial Sequence
  Synthetic oligonucleotide
accgagatcgggctttcatagttagtacgg

SEQ ID NO: 177725 - DNA, 30 bp, Artificial Sequence
  Synthetic oligonucleotide
ttcagcgtgatgttatcggcctccgtacgg

SEQ ID NO: 177726 - DNA, 30 bp, Artificial Sequence
  Synthetic oligonucleotide
gggatgttacaaataagtaatcgcgtacgg

SEQ ID NO: 177727 - DNA, 30 bp, Artificial Sequence
  Synthetic oligonucleotide
gtagaacagactctaccgaaaggcgtacgg

SEQ ID NO: 177728 - DNA, 30 bp, Artificial Sequence
  Synthetic oligonucleotide
ttggtccagcaatggtgccgaggggtacgg

SEQ ID NO: 177729 - DNA, 30 bp, Artificial Sequence
  Synthetic oligonucleotide
aaacgatgtttccgaataaagggggtacgg

SEQ ID NO: 177730 - DNA, 30 bp, Artificial Sequence
  Synthetic oligonucleotide
gtctcatcaccattatatacttcattacgg

SEQ ID NO: 177731 - DNA, 30 bp, Artificial Sequence
  Synthetic oligonucleotide
ggtagacacatgagccagatggtgttacgg

SEQ ID NO: 177732 - DNA, 30 bp, Artificial Sequence
  Synthetic oligonucleotide
ggcggggtattgtcccaaagtgatttacgg

SEQ ID NO: 177733 - DNA, 30 bp, Artificial Sequence
  Synthetic oligonucleotide
aactatgtgcactgccgttgaaaaaaccgg

SEQ ID NO: 177734 - DNA, 30 bp, Artificial Sequence
  Synthetic oligonucleotide
ttccatctagcgcggctgagggccaaccgg

SEQ ID NO: 177735 - DNA, 30 bp, Artificial Sequence
  Synthetic oligonucleotide
gactaatggaattcggcgttaaggaaccgg

SEQ ID NO: 177736 - DNA, 30 bp, Artificial Sequence
  Synthetic oligonucleotide
ggccagatctgaagacacacaagacaccgg

SEQ ID NO: 177737 - DNA, 30 bp, Artificial Sequence
  Synthetic oligonucleotide
ggttcactcagttcaggcttacaccaccgg

SEQ ID NO: 177738 - DNA, 30 bp, Artificial Sequence
  Synthetic oligonucleotide
catgcaggataacgtcgtagcatgcaccgg

SEQ ID NO: 177739 - DNA, 30 bp, Artificial Sequence
  Synthetic oligonucleotide
atgcagcgtgagtcgcaagtattgcaccgg

SEQ ID NO: 177740 - DNA, 30 bp, Artificial Sequence
  Synthetic oligonucleotide
cctgaagtgtgaaccgtcatttttcaccgg

SEQ ID NO: 177741 - DNA, 30 bp, Artificial Sequence
  Synthetic oligonucleotide
cgaacaaactggaccgttcgctgagaccgg

SEQ ID NO: 177742 - DNA, 30 bp, Artificial Sequence
  Synthetic oligonucleotide
attgtggttagtttggacgaaatcgaccgg

SEQ ID NO: 177743 - DNA, 30 bp, Artificial Sequence
  Synthetic oligonucleotide
gtcagcggtaacccacagatttaggaccgg

SEQ ID NO: 177744 - DNA, 30 bp, Artificial Sequence
  Synthetic oligonucleotide
ttgtggcgctaagtctcatatgcctaccgg

SEQ ID NO: 177745 - DNA, 30 bp, Artificial Sequence
  Synthetic oligonucleotide
ctaaaagacacacacaaagccggttaccgg

SEQ ID NO: 177746 - DNA, 30 bp, Artificial Sequence
  Synthetic oligonucleotide
acaacgagtcagaatgatacgggttaccgg

SEQ ID NO: 177747 - DNA, 30 bp, Artificial Sequence
  Synthetic oligonucleotide
gaccggacaacacggtaggagtccacccgg

SEQ ID NO: 177748 - DNA, 30 bp, Artificial Sequence
  Synthetic oligonucleotide
ccttgtcgaggctacagaatcggtacccgg

SEQ ID NO: 177749 - DNA, 30 bp, Artificial Sequence
  Synthetic oligonucleotide
agctgtatgactgtagttgagagaccccgg

SEQ ID NO: 177750 - DNA, 30 bp, Artificial Sequence
  Synthetic oligonucleotide
tgcttaggtttatccgaagtccacccccgg

SEQ ID NO: 177751 - DNA, 30 bp, Artificial Sequence
  Synthetic oligonucleotide
ttacgttattacgtctgaagaccagcccgg

SEQ ID NO: 177752 - DNA, 30 bp, Artificial Sequence
  Synthetic oligonucleotide
atagattgcattccctttttagtcgcccgg

SEQ ID NO: 177753 - DNA, 30 bp, Artificial Sequence
  Synthetic oligonucleotide
gatcctgaatgtagttgcatgagtgcccgg

SEQ ID NO: 177754 - DNA, 30 bp, Artificial Sequence
  Synthetic oligonucleotide
agtaaagggaggtatctttttgtgtcccgg

SEQ ID NO: 177755 - DNA, 30 bp, Artificial Sequence
  Synthetic oligonucleotide
cgatgtttctaccgccgtagaaattcccgg

SEQ ID NO: 177756 - DNA, 30 bp, Artificial Sequence
  Synthetic oligonucleotide
ctaaaagcgtaccttcggatatagagccgg

SEQ ID NO: 177757 - DNA, 30 bp, Artificial Sequence
  Synthetic oligonucleotide
gatatgacagggattggatcttggagccgg

SEQ ID NO: 177758 - DNA, 30 bp, Artificial Sequence
  Synthetic oligonucleotide
aaacgacggggattgactacattgagccgg

SEQ ID NO: 177759 - DNA, 30 bp, Artificial Sequence
  Synthetic oligonucleotide
ttactagggggtcagtagatttatagccgg

SEQ ID NO: 177760 - DNA, 30 bp, Artificial Sequence
  Synthetic oligonucleotide
caataagataacgttgtgttgacacgccgg

SEQ ID NO: 177761 - DNA, 30 bp, Artificial Sequence
  Synthetic oligonucleotide
tgggaagcactaaatgctcacaagcgccgg

SEQ ID NO: 177762 - DNA, 30 bp, Artificial Sequence
  Synthetic oligonucleotide
gctgtccgagcagtagcgtaggagcgccgg

SEQ ID NO: 177763 - DNA, 30 bp, Artificial Sequence
  Synthetic oligonucleotide
tgagaggggcattttaaatgtgtgcgccgg

SEQ ID NO: 177764 - DNA, 30 bp, Artificial Sequence
  Synthetic oligonucleotide
cgcgtgtgatattttcagcgacaaggccgg

SEQ ID NO: 177765 - DNA, 30 bp, Artificial Sequence
  Synthetic oligonucleotide
cggtgatacttgtagaaagtttaaggccgg

SEQ ID NO: 177766 - DNA, 30 bp, Artificial Sequence
  Synthetic oligonucleotide
acgacagggtatctaagcgtcaccggccgg

SEQ ID NO: 177767 - DNA, 30 bp, Artificial Sequence
  Synthetic oligonucleotide
aagcatggtaatggcacgtcgaccggccgg

SEQ ID NO: 177768 - DNA, 30 bp, Artificial Sequence
  Synthetic oligonucleotide
cagtttaacattccagattaatcgggccgg

SEQ ID NO: 177769 - DNA, 30 bp, Artificial Sequence
  Synthetic oligonucleotide
cttcgacattgcgttacctacagctgccgg

SEQ ID NO: 177770 - DNA, 30 bp, Artificial Sequence
  Synthetic oligonucleotide
gtgagaatggtgggaaagcggagctgccgg

SEQ ID NO: 177771 - DNA, 30 bp, Artificial Sequence
  Synthetic oligonucleotide
atcggaggagagctacagggaatctgccgg

SEQ ID NO: 177772 - DNA, 30 bp, Artificial Sequence
  Synthetic oligonucleotide
cgctctgatacaatcttacgattaatccgg

SEQ ID NO: 177773 - DNA, 30 bp, Artificial Sequence
  Synthetic oligonucleotide
ggtataagtccgatccgagcggcgatccgg

SEQ ID NO: 177774 - DNA, 30 bp, Artificial Sequence
  Synthetic oligonucleotide
gtctgtagagaatggcgggctaatatccgg

SEQ ID NO: 177775 - DNA, 30 bp, Artificial Sequence
  Synthetic oligonucleotide
catagctcgtctattgtagtaattatccgg

SEQ ID NO: 177776 - DNA, 30 bp, Artificial Sequence
  Synthetic oligonucleotide
aacgtccgcgttggagatttaatcctccgg

SEQ ID NO: 177777 - DNA, 30 bp, Artificial Sequence
  Synthetic oligonucleotide
ataaacaacccaaacctcaaataagtccgg

SEQ ID NO: 177778 - DNA, 30 bp, Artificial Sequence
  Synthetic oligonucleotide
tcacgtcacgcaaggtacgtgcgagtccgg

SEQ ID NO: 177779 - DNA, 30 bp, Artificial Sequence
  Synthetic oligonucleotide
tagaccaaaaggagctaaaaccccgtccgg

SEQ ID NO: 177780 - DNA, 30 bp, Artificial Sequence
  Synthetic oligonucleotide
ttggatattgggatcgtcagaattgtccgg

SEQ ID NO: 177781 - DNA, 30 bp, Artificial Sequence
  Synthetic oligonucleotide
gtgcatataagaaactggggaattgtccgg

SEQ ID NO: 177782 - DNA, 30 bp, Artificial Sequence
  Synthetic oligonucleotide
acattttagagaaacataggggaattccgg

SEQ ID NO: 177783 - DNA, 30 bp, Artificial Sequence
  Synthetic oligonucleotide
gtcaaaaagggattcataaactgattccgg

SEQ ID NO: 177784 - DNA, 30 bp, Artificial Sequence
  Synthetic oligonucleotide
ttgttcacgaataaccgagctaggttccgg

SEQ ID NO: 177785 - DNA, 30 bp, Artificial Sequence
  Synthetic oligonucleotide
cacatgacaccctaagtgccatatttccgg

SEQ ID NO: 177786 - DNA, 30 bp, Artificial Sequence
  Synthetic oligonucleotide
aagttacactatttaaccctatatttccgg

SEQ ID NO: 177787 - DNA, 30 bp, Artificial Sequence
  Synthetic oligonucleotide
ggcgcgagcttcgcaagctggccaaagcgg

SEQ ID NO: 177788 - DNA, 30 bp, Artificial Sequence
  Synthetic oligonucleotide
ttctcctaatatcgaagattatgtaagcgg

SEQ ID NO: 177789 - DNA, 30 bp, Artificial Sequence
  Synthetic oligonucleotide
ttcagggtggcgatacttgtcaaacagcgg

SEQ ID NO: 177790 - DNA, 30 bp, Artificial Sequence
  Synthetic oligonucleotide
aacacgttcacgatcgagcgtactcagcgg

SEQ ID NO: 177791 - DNA, 30 bp, Artificial Sequence
  Synthetic oligonucleotide
aagtttggcaatcaagaatctgccgagcgg

SEQ ID NO: 177792 - DNA, 30 bp, Artificial Sequence
  Synthetic oligonucleotide
aaccccttgggaaggcggatgatcgagcgg

SEQ ID NO: 177793 - DNA, 30 bp, Artificial Sequence
  Synthetic oligonucleotide
caaatctcagatttgtcatatagggagcgg

SEQ ID NO: 177794 - DNA, 31 bp, Artificial Sequence
  Synthetic oligonucleotide
actctagatgttgcgaactacagtgtagcgg

SEQ ID NO: 177795 - DNA, 30 bp, Artificial Sequence
  Synthetic oligonucleotide
ttcctcactgtatgaattggaaaaacgcgg

SEQ ID NO: 177796 - DNA, 30 bp, Artificial Sequence
  Synthetic oligonucleotide
cgggattaacactgccaatatcgaacgcgg

SEQ ID NO: 177797 - DNA, 30 bp, Artificial Sequence
  Synthetic oligonucleotide
ggccagacctggaagtcgtatctaacgcgg

SEQ ID NO: 177798 - DNA, 30 bp, Artificial Sequence
  Synthetic oligonucleotide
tgcattttaccgacatggattcacacgcgg

SEQ ID NO: 177799 - DNA, 30 bp, Artificial Sequence
  Synthetic oligonucleotide
caaattgcttaatgaatggctggtacgcgg

SEQ ID NO: 177800 - DNA, 30 bp, Artificial Sequence
  Synthetic oligonucleotide
aaggtttgaatgagtggagtagtcccgcgg

SEQ ID NO: 177801 - DNA, 30 bp, Artificial Sequence
  Synthetic oligonucleotide
tatacctgatcatacggtaaccagccgcgg

SEQ ID NO: 177802 - DNA, 30 bp, Artificial Sequence
  Synthetic oligonucleotide
tcggaatgtcttttaaaatgtcttccgcgg

SEQ ID NO: 177803 - DNA, 30 bp, Artificial Sequence
  Synthetic oligonucleotide
accggttagcgaacccctgctggggcgcgg

SEQ ID NO: 177804 - DNA, 30 bp, Artificial Sequence
  Synthetic oligonucleotide
aagtccggcaagtggcaagagctggcgcgg

SEQ ID NO: 177805 - DNA, 30 bp, Artificial Sequence
  Synthetic oligonucleotide
aacaacccgttcacgctatagtgttcgcgg

SEQ ID NO: 177806 - DNA, 30 bp, Artificial Sequence
  Synthetic oligonucleotide
atgtggggtgtaggttacatcttttcgcgg

SEQ ID NO: 177807 - DNA, 30 bp, Artificial Sequence
  Synthetic oligonucleotide
gcaatatacggggttcgaaaacaaaggcgg

SEQ ID NO: 177808 - DNA, 30 bp, Artificial Sequence
  Synthetic oligonucleotide
cgagggcccttggcccaaagagataggcgg

SEQ ID NO: 177809 - DNA, 30 bp, Artificial Sequence
  Synthetic oligonucleotide
acggagcgaataggttatttatgtaggcgg

SEQ ID NO: 177810 - DNA, 30 bp, Artificial Sequence
  Synthetic oligonucleotide
tgatgtgtagacgttctcgaccaccggcgg

SEQ ID NO: 177811 - DNA, 30 bp, Artificial Sequence
  Synthetic oligonucleotide
aatgatgatgatcgcttgcgcgagcggcgg

SEQ ID NO: 177812 - DNA, 30 bp, Artificial Sequence
  Synthetic oligonucleotide
gaaagagcaccaaattgggtagttcggcgg

SEQ ID NO: 177813 - DNA, 30 bp, Artificial Sequence
  Synthetic oligonucleotide
agggtcgatacacggttgcggtcggggcgg

SEQ ID NO: 177814 - DNA, 30 bp, Artificial Sequence
  Synthetic oligonucleotide
gatcaaaaaccgaaaggcgtaaggtggcgg

SEQ ID NO: 177815 - DNA, 30 bp, Artificial Sequence
  Synthetic oligonucleotide
atggaattgcctctccaatcgagaatgcgg

SEQ ID NO: 177816 - DNA, 30 bp, Artificial Sequence
  Synthetic oligonucleotide
agcaaccacgcttggagtagggcgatgcgg

SEQ ID NO: 177817 - DNA, 30 bp, Artificial Sequence
  Synthetic oligonucleotide
aaaacacggcaatagttctcctggatgcgg

SEQ ID NO: 177818 - DNA, 30 bp, Artificial Sequence
  Synthetic oligonucleotide
gaaggagatttcgcaatactgcaactgcgg

SEQ ID NO: 177819 - DNA, 30 bp, Artificial Sequence
  Synthetic oligonucleotide
gcacaggatattgcgcacggaccactgcgg

SEQ ID NO: 177820 - DNA, 30 bp, Artificial Sequence
  Synthetic oligonucleotide
cgttccgagtagatacttcggctactgcgg

SEQ ID NO: 177821 - DNA, 30 bp, Artificial Sequence
  Synthetic oligonucleotide
gattagggagacctgcccggatagctgcgg

SEQ ID NO: 177822 - DNA, 31 bp, Artificial Sequence
  Synthetic oligonucleotide
gtcgtagatgagcctgtataattgagtgcgg

SEQ ID NO: 177823 - DNA, 30 bp, Artificial Sequence
  Synthetic oligonucleotide
atcccgacaagagagagggggccggtgcgg

SEQ ID NO: 177824 - DNA, 30 bp, Artificial Sequence
  Synthetic oligonucleotide
tccgtattgctatctctgtcttcggtgcgg

SEQ ID NO: 177825 - DNA, 30 bp, Artificial Sequence
  Synthetic oligonucleotide
cgggcaggccaggtgattgcagtggtgcgg

SEQ ID NO: 177826 - DNA, 30 bp, Artificial Sequence
  Synthetic oligonucleotide
actggacgaccaggcttctaggctttgcgg

SEQ ID NO: 177827 - DNA, 31 bp, Artificial Sequence
  Synthetic oligonucleotide
acatcaaatgtgttcagttggtgctttgcgg

SEQ ID NO: 177828 - DNA, 30 bp, Artificial Sequence
  Synthetic oligonucleotide
ggcccaccttttttggcgcaaattttgcgg

SEQ ID NO: 177829 - DNA, 30 bp, Artificial Sequence
  Synthetic oligonucleotide
taccgagcccgagtagcaagataaaatcgg

SEQ ID NO: 177830 - DNA, 30 bp, Artificial Sequence
  Synthetic oligonucleotide
cgttccgcggattcccgagtgctaaatcgg

SEQ ID NO: 177831 - DNA, 30 bp, Artificial Sequence
  Synthetic oligonucleotide
ggcgttcaatgtgataggaaattaaatcgg

SEQ ID NO: 177832 - DNA, 30 bp, Artificial Sequence
  Synthetic oligonucleotide
aggcacatgagacgcgcatcaaagaatcgg

SEQ ID NO: 177833 - DNA, 30 bp, Artificial Sequence
  Synthetic oligonucleotide
agttgtctttacagccggtatgggaatcgg

SEQ ID NO: 177834 - DNA, 30 bp, Artificial Sequence
  Synthetic oligonucleotide
aggcaacagcattttatctgcatgaatcgg

SEQ ID NO: 177835 - DNA, 30 bp, Artificial Sequence
  Synthetic oligonucleotide
agggccgatacataaactaaaaaacatcgg

SEQ ID NO: 177836 - DNA, 30 bp, Artificial Sequence
  Synthetic oligonucleotide
gcgggtcactgcgcccaatacatccatcgg

SEQ ID NO: 177837 - DNA, 30 bp, Artificial Sequence
  Synthetic oligonucleotide
tcatctgatcaaacacgttcgcagcatcgg

SEQ ID NO: 177838 - DNA, 30 bp, Artificial Sequence
  Synthetic oligonucleotide
atacggcataatatgcgtaatatgcatcgg

SEQ ID NO: 177839 - DNA, 30 bp, Artificial Sequence
  Synthetic oligonucleotide
gatcacgtttatatagcaggtgatcatcgg

SEQ ID NO: 177840 - DNA, 30 bp, Artificial Sequence
  Synthetic oligonucleotide
acgcccctacgcattttagtcactcatcgg

SEQ ID NO: 177841 - DNA, 30 bp, Artificial Sequence
  Synthetic oligonucleotide
gggaacgaagacagtggtatgcttcatcgg

SEQ ID NO: 177842 - DNA, 30 bp, Artificial Sequence
  Synthetic oligonucleotide
cgaacgcggctaacattcggagaagatcgg

SEQ ID NO: 177843 - DNA, 27 bp, Artificial Sequence
  Synthetic oligonucleotide
ggtagctaaaataataacaacgatcgg

SEQ ID NO: 177844 - DNA, 30 bp, Artificial Sequence
  Synthetic oligonucleotide
gcttttgggccgccttgtcaacaggatcgg

SEQ ID NO: 177845 - DNA, 30 bp, Artificial Sequence
  Synthetic oligonucleotide
tccaacgtagctcacaagtgttttgatcgg

SEQ ID NO: 177846 - DNA, 30 bp, Artificial Sequence
  Synthetic oligonucleotide
tttagtgtgtttacttggttggagtatcgg

SEQ ID NO: 177847 - DNA, 30 bp, Artificial Sequence
  Synthetic oligonucleotide
catagagccgcccgtccaaacaggtatcgg

SEQ ID NO: 177848 - DNA, 30 bp, Artificial Sequence
  Synthetic oligonucleotide
gatcagtggcaagtaccttatagcactcgg

SEQ ID NO: 177849 - DNA, 30 bp, Artificial Sequence
  Synthetic oligonucleotide
aagataaatgatgactgcgtgcagactcgg

SEQ ID NO: 177850 - DNA, 30 bp, Artificial Sequence
  Synthetic oligonucleotide
caaaaggcgccggccgaaattactactcgg

SEQ ID NO: 177851 - DNA, 30 bp, Artificial Sequence
  Synthetic oligonucleotide
ttactaatggtcgctaatcgataacctcgg

SEQ ID NO: 177852 - DNA, 30 bp, Artificial Sequence
  Synthetic oligonucleotide
tctattgccagatcagaagtcctgcctcgg

SEQ ID NO: 177853 - DNA, 30 bp, Artificial Sequence
  Synthetic oligonucleotide
acaattcagagtgggtcctatgttcctcgg

SEQ ID NO: 177854 - DNA, 30 bp, Artificial Sequence
  Synthetic oligonucleotide
gttctggcgggggagcgtactgttcctcgg

SEQ ID NO: 177855 - DNA, 30 bp, Artificial Sequence
  Synthetic oligonucleotide
ctatcgattcagccttaggacggtgctcgg

SEQ ID NO: 177856 - DNA, 30 bp, Artificial Sequence
  Synthetic oligonucleotide
tgaagagctggcgcttattacggatctcgg

SEQ ID NO: 177857 - DNA, 30 bp, Artificial Sequence
  Synthetic oligonucleotide
cccttgaatggctagtcgaccccttctcgg

SEQ ID NO: 177858 - DNA, 30 bp, Artificial Sequence
  Synthetic oligonucleotide
aacagacctaagtcgagaatattaagtcgg

SEQ ID NO: 177859 - DNA, 30 bp, Artificial Sequence
  Synthetic oligonucleotide
agttctatggggtaagtgccttacagtcgg

SEQ ID NO: 177860 - DNA, 30 bp, Artificial Sequence
  Synthetic oligonucleotide
gaaaatggagggtaaaggactagcagtcgg

SEQ ID NO: 177861 - DNA, 30 bp, Artificial Sequence
  Synthetic oligonucleotide
aacgttgaatagttgcggcattagagtcgg

SEQ ID NO: 177862 - DNA, 30 bp, Artificial Sequence
  Synthetic oligonucleotide
gccgtggcagtcacgtagtcttagagtcgg

SEQ ID NO: 177863 - DNA, 30 bp, Artificial Sequence
  Synthetic oligonucleotide
tcacagtttgctcttgcaagcgtgagtcgg

SEQ ID NO: 177864 - DNA, 30 bp, Artificial Sequence
  Synthetic oligonucleotide
atccaaagtggcaacagcactgcccgtcgg

SEQ ID NO: 177865 - DNA, 30 bp, Artificial Sequence
  Synthetic oligonucleotide
ctgttataaacagcttatcggcgccgtcgg

SEQ ID NO: 177866 - DNA, 30 bp, Artificial Sequence
  Synthetic oligonucleotide
tccgatttatgatgctggtatgatcgtcgg

SEQ ID NO: 177867 - DNA, 30 bp, Artificial Sequence
  Synthetic oligonucleotide
ccgatatgcactaaatcgacgtaaggtcgg

SEQ ID NO: 177868 - DNA, 30 bp, Artificial Sequence
  Synthetic oligonucleotide
tggtaaagtttgtctaagtggtgaggtcgg

SEQ ID NO: 177869 - DNA, 30 bp, Artificial Sequence
  Synthetic oligonucleotide
tcgacattcggcgacgcgacttgaggtcgg

SEQ ID NO: 177870 - DNA, 30 bp, Artificial Sequence
  Synthetic oligonucleotide
atgaatttggacggggcgctaataggtcgg

SEQ ID NO: 177871 - DNA, 30 bp, Artificial Sequence
  Synthetic oligonucleotide
gttagagtgttagacatatattatggtcgg

SEQ ID NO: 177872 - DNA, 30 bp, Artificial Sequence
  Synthetic oligonucleotide
tcccatgtggaagattgaagcatatgtcgg

SEQ ID NO: 177873 - DNA, 30 bp, Artificial Sequence
  Synthetic oligonucleotide
tgccgtgagccagcgaaacggacgtgtcgg

SEQ ID NO: 177874 - DNA, 30 bp, Artificial Sequence
  Synthetic oligonucleotide
tgcgtaagctaggcggggtttatgtgtcgg

SEQ ID NO: 177875 - DNA, 30 bp, Artificial Sequence
  Synthetic oligonucleotide
caaatcccaccgaaaaatacctgaattcgg

SEQ ID NO: 177876 - DNA, 30 bp, Artificial Sequence
  Synthetic oligonucleotide
tggcttgcgttcgttggcacacgcattcgg

SEQ ID NO: 177877 - DNA, 30 bp, Artificial Sequence
  Synthetic oligonucleotide
agactacaagaagcttctctagagattcgg

SEQ ID NO: 177878 - DNA, 30 bp, Artificial Sequence
  Synthetic oligonucleotide
cacacttgatcgtaaatctacgatattcgg

SEQ ID NO: 177879 - DNA, 30 bp, Artificial Sequence
  Synthetic oligonucleotide
cccttgatatgcaactagacaacacttcgg

SEQ ID NO: 177880 - DNA, 30 bp, Artificial Sequence
  Synthetic oligonucleotide
gcaggatatcagaagcagggattacttcgg

SEQ ID NO: 177881 - DNA, 30 bp, Artificial Sequence
  Synthetic oligonucleotide
gcggcgtaatgcgagtaacgctatcttcgg

SEQ ID NO: 177882 - DNA, 30 bp, Artificial Sequence
  Synthetic oligonucleotide
ttgctggacagcagtataaacaacgttcgg

SEQ ID NO: 177883 - DNA, 30 bp, Artificial Sequence
  Synthetic oligonucleotide
gggaacggaatgattgatgggtaggttcgg

SEQ ID NO: 177884 - DNA, 30 bp, Artificial Sequence
  Synthetic oligonucleotide
actatgcaacattagggctagttggttcgg

SEQ ID NO: 177885 - DNA, 30 bp, Artificial Sequence
  Synthetic oligonucleotide
aagcaactgtgcaatccagttgatgttcgg

SEQ ID NO: 177886 - DNA, 30 bp, Artificial Sequence
  Synthetic oligonucleotide
tggggtacctagaattagcagactgttcgg

SEQ ID NO: 177887 - DNA, 30 bp, Artificial Sequence
  Synthetic oligonucleotide
cggactgcaggcatcggtaagcaatttcgg

SEQ ID NO: 177888 - DNA, 30 bp, Artificial Sequence
  Synthetic oligonucleotide
tgcgatgtgaccaatcgttaacgatttcgg

SEQ ID NO: 177889 - DNA, 30 bp, Artificial Sequence
  Synthetic oligonucleotide
aggctagtgatggcaaggcttcactttcgg

SEQ ID NO: 177890 - DNA, 30 bp, Artificial Sequence
  Synthetic oligonucleotide
ataagctagaccgcgaatactatctttcgg

SEQ ID NO: 177891 - DNA, 30 bp, Artificial Sequence
  Synthetic oligonucleotide
acaacggagagtgaatgacatccgtttcgg

SEQ ID NO: 177892 - DNA, 30 bp, Artificial Sequence
  Synthetic oligonucleotide
gaaggagaaccgaatgtactcgtttttcgg

SEQ ID NO: 177893 - DNA, 30 bp, Artificial Sequence
  Synthetic oligonucleotide
agtcgcgggcgaaggttggaggaaaaaggg

SEQ ID NO: 177894 - DNA, 30 bp, Artificial Sequence
  Synthetic oligonucleotide
aacaggtaattctactttcgcccaaaaggg

SEQ ID NO: 177895 - DNA, 30 bp, Artificial Sequence
  Synthetic oligonucleotide
ctcgggctgtccgtaaccccctcaaaaggg

SEQ ID NO: 177896 - DNA, 30 bp, Artificial Sequence
  Synthetic oligonucleotide
gtgtcacggtcattcataggacgaaaaggg

SEQ ID NO: 177897 - DNA, 30 bp, Artificial Sequence
  Synthetic oligonucleotide
tatgccgccggtagcctaaatttcaaaggg

SEQ ID NO: 177898 - DNA, 30 bp, Artificial Sequence
  Synthetic oligonucleotide
ttggcaccaattaatagcattaagaaaggg

SEQ ID NO: 177899 - DNA, 30 bp, Artificial Sequence
  Synthetic oligonucleotide
aatgatggagtcgggaggcctaggaaaggg

SEQ ID NO: 177900 - DNA, 30 bp, Artificial Sequence
  Synthetic oligonucleotide
caacgatcacatggagaaatcgggaaaggg

SEQ ID NO: 177901 - DNA, 30 bp, Artificial Sequence
  Synthetic oligonucleotide
ccaagtatcatggggtgtgcttggaaaggg

SEQ ID NO: 177902 - DNA, 31 bp, Artificial Sequence
  Synthetic oligonucleotide
cccatgtccggtgggaaaataaactaaaggg

SEQ ID NO: 177903 - DNA, 30 bp, Artificial Sequence
  Synthetic oligonucleotide
ctttcaaaccgataattgttgacccaaggg

SEQ ID NO: 177904 - DNA, 30 bp, Artificial Sequence
  Synthetic oligonucleotide
gtggtcaagtattaacacgagcgccaaggg

SEQ ID NO: 177905 - DNA, 30 bp, Artificial Sequence
  Synthetic oligonucleotide
atttgaagattgctatggagggtgcaaggg

SEQ ID NO: 177906 - DNA, 30 bp, Artificial Sequence
  Synthetic oligonucleotide
gatgtcaggacaaaccgcagatttcaaggg

SEQ ID NO: 177907 - DNA, 30 bp, Artificial Sequence
  Synthetic oligonucleotide
aataggttaaccgggctcgacacagaaggg

SEQ ID NO: 177908 - DNA, 30 bp, Artificial Sequence
  Synthetic oligonucleotide
agtgtgggccaatgcaccgccggcgaaggg

SEQ ID NO: 177909 - DNA, 30 bp, Artificial Sequence
  Synthetic oligonucleotide
acgcgcattttgcagctgcgggtcgaaggg

SEQ ID NO: 177910 - DNA, 30 bp, Artificial Sequence
  Synthetic oligonucleotide
ccttcctgtaaccaccccgcgcgtgaaggg

SEQ ID NO: 177911 - DNA, 30 bp, Artificial Sequence
  Synthetic oligonucleotide
caccttagaatcctagggggtggtgaaggg

SEQ ID NO: 177912 - DNA, 30 bp, Artificial Sequence
  Synthetic oligonucleotide
tgggcacaggcgattctgaaaaaataaggg

SEQ ID NO: 177913 - DNA, 28 bp, Artificial Sequence
  Synthetic oligonucleotide
tagatgataaaatcgaatcacctaaggg

SEQ ID NO: 177914 - DNA, 30 bp, Artificial Sequence
  Synthetic oligonucleotide
ggtatattcgcttgttcagtgtaaacaggg

SEQ ID NO: 177915 - DNA, 30 bp, Artificial Sequence
  Synthetic oligonucleotide
tggtgtgagtacgcggtgcgccggacaggg

SEQ ID NO: 177916 - DNA, 30 bp, Artificial Sequence
  Synthetic oligonucleotide
tggcatagggggataggtgcgtgtacaggg

SEQ ID NO: 177917 - DNA, 30 bp, Artificial Sequence
  Synthetic oligonucleotide
gcggccgcttatattagggaagttacaggg

SEQ ID NO: 177918 - DNA, 30 bp, Artificial Sequence
  Synthetic oligonucleotide
gaataactcttaggtcctaccgttacaggg

SEQ ID NO: 177919 - DNA, 30 bp, Artificial Sequence
  Synthetic oligonucleotide
atattccagactcagcggctaacaccaggg

SEQ ID NO: 177920 - DNA, 30 bp, Artificial Sequence
  Synthetic oligonucleotide
tattgggcttgccacgttgaatacgcaggg

SEQ ID NO: 177921 - DNA, 30 bp, Artificial Sequence
  Synthetic oligonucleotide
gataagcctcagggattagttccggcaggg

SEQ ID NO: 177922 - DNA, 31 bp, Artificial Sequence
  Synthetic oligonucleotide
taagggtgggtctgaataggaaggggcaggg

SEQ ID NO: 177923 - DNA, 30 bp, Artificial Sequence
  Synthetic oligonucleotide
tacggatgcgaccataatcggggatcaggg

SEQ ID NO: 177924 - DNA, 30 bp, Artificial Sequence
  Synthetic oligonucleotide
tcgttagtccggccaatgtccgagtcaggg

SEQ ID NO: 177925 - DNA, 30 bp, Artificial Sequence
  Synthetic oligonucleotide
agttcatgctttagcatatgttcttcaggg

SEQ ID NO: 177926 - DNA, 30 bp, Artificial Sequence
  Synthetic oligonucleotide
actctgggtcccatgggaacgtgttcaggg

SEQ ID NO: 177927 - DNA, 30 bp, Artificial Sequence
  Synthetic oligonucleotide
tggtcggaaatttacgtgggaatttcaggg

SEQ ID NO: 177928 - DNA, 30 bp, Artificial Sequence
  Synthetic oligonucleotide
aacctcattaaccgtatgtacatttcaggg

SEQ ID NO: 177929 - DNA, 30 bp, Artificial Sequence
  Synthetic oligonucleotide
ttgacttacggtccgcgacccgtttcaggg

SEQ ID NO: 177930 - DNA, 31 bp, Artificial Sequence
  Synthetic oligonucleotide
ttatgtgaagtccatgtcccaatgaagaggg

SEQ ID NO: 177931 - DNA, 30 bp, Artificial Sequence
  Synthetic oligonucleotide
gcccgaatgtctttagggcatgagagaggg

SEQ ID NO: 177932 - DNA, 30 bp, Artificial Sequence
  Synthetic oligonucleotide
cccggctgcagtcaccatgcagcgagaggg

SEQ ID NO: 177933 - DNA, 30 bp, Artificial Sequence
  Synthetic oligonucleotide
gatagagactaggtcagggccgggagaggg

SEQ ID NO: 177934 - DNA, 30 bp, Artificial Sequence
  Synthetic oligonucleotide
gaaatatgggtaataatcccatgtagaggg

SEQ ID NO: 177935 - DNA, 30 bp, Artificial Sequence
  Synthetic oligonucleotide
taaggattgctggtgcatttacgacgaggg

SEQ ID NO: 177936 - DNA, 30 bp, Artificial Sequence
  Synthetic oligonucleotide
cccagaggccaatctcatggtgaccgaggg

SEQ ID NO: 177937 - DNA, 30 bp, Artificial Sequence
  Synthetic oligonucleotide
tctccatggactatcatctaggtgcgaggg

SEQ ID NO: 177938 - DNA, 30 bp, Artificial Sequence
  Synthetic oligonucleotide
cacgggttgatccgattaagggatcgaggg

SEQ ID NO: 177939 - DNA, 30 bp, Artificial Sequence
  Synthetic oligonucleotide
tggagaacgggaatagccggttatcgaggg

SEQ ID NO: 177940 - DNA, 30 bp, Artificial Sequence
  Synthetic oligonucleotide
accacggtacgttggcattcgttaggaggg

SEQ ID NO: 177941 - DNA, 30 bp, Artificial Sequence
  Synthetic oligonucleotide
cgcaatcgtttctggaagcttgacggaggg

SEQ ID NO: 177942 - DNA, 30 bp, Artificial Sequence
  Synthetic oligonucleotide
cgacgtatgtcagatagtaacaggggaggg

SEQ ID NO: 177943 - DNA, 30 bp, Artificial Sequence
  Synthetic oligonucleotide
gtcatgggtcagagaagtgagttgggaggg

SEQ ID NO: 177944 - DNA, 30 bp, Artificial Sequence
  Synthetic oligonucleotide
cgctaatggagatgggtttagcctggaggg

SEQ ID NO: 177945 - DNA, 30 bp, Artificial Sequence
  Synthetic oligonucleotide
caatggtagtatgggctccattgctgaggg

SEQ ID NO: 177946 - DNA, 30 bp, Artificial Sequence
  Synthetic oligonucleotide
ccgattgatcagaaaacaacatggtgaggg

SEQ ID NO: 177947 - DNA, 30 bp, Artificial Sequence
  Synthetic oligonucleotide
cgcgagcgcacactgcgtggtcaaataggg

SEQ ID NO: 177948 - DNA, 30 bp, Artificial Sequence
  Synthetic oligonucleotide
cactgctcgagcggttagtacggaataggg

SEQ ID NO: 177949 - DNA, 30 bp, Artificial Sequence
  Synthetic oligonucleotide
gccaacggaattcgatcccacatcataggg

SEQ ID NO: 177950 - DNA, 30 bp, Artificial Sequence
  Synthetic oligonucleotide
ggactagatgacagtcgaatcagtataggg

SEQ ID NO: 177951 - DNA, 30 bp, Artificial Sequence
  Synthetic oligonucleotide
gcgggtgcgtgcgagaatgctagtataggg

SEQ ID NO: 177952 - DNA, 30 bp, Artificial Sequence
  Synthetic oligonucleotide
gctgctacaaacgggtactggcttataggg

SEQ ID NO: 177953 - DNA, 30 bp, Artificial Sequence
  Synthetic oligonucleotide
gcgtccagaaagcatgcacggaatctaggg

SEQ ID NO: 177954 - DNA, 30 bp, Artificial Sequence
  Synthetic oligonucleotide
gaacctagctgagattgtgcgcatctaggg

SEQ ID NO: 177955 - DNA, 30 bp, Artificial Sequence
  Synthetic oligonucleotide
cacagaccttacgttcccaagtaagtaggg

SEQ ID NO: 177956 - DNA, 30 bp, Artificial Sequence
  Synthetic oligonucleotide
tcacaccgattgtggtattgggccgtaggg

SEQ ID NO: 177957 - DNA, 30 bp, Artificial Sequence
  Synthetic oligonucleotide
taaggagaaaacaacccaaaatgcgtaggg

SEQ ID NO: 177958 - DNA, 30 bp, Artificial Sequence
  Synthetic oligonucleotide
accacatccccataggcatgtgcggtaggg

SEQ ID NO: 177959 - DNA, 30 bp, Artificial Sequence
  Synthetic oligonucleotide
actgcgccataaaggccctgatgggtaggg

SEQ ID NO: 177960 - DNA, 30 bp, Artificial Sequence
  Synthetic oligonucleotide
caaacgccaaatcgtttgttttgggtaggg

SEQ ID NO: 177961 - DNA, 30 bp, Artificial Sequence
  Synthetic oligonucleotide
ccgggtacagctcctggagtatatgtaggg

SEQ ID NO: 177962 - DNA, 30 bp, Artificial Sequence
  Synthetic oligonucleotide
gtgcaagtatgttgcaccccagcattaggg

SEQ ID NO: 177963 - DNA, 30 bp, Artificial Sequence
  Synthetic oligonucleotide
tcaggcctgatgtgagcacaagtcttaggg

SEQ ID NO: 177964 - DNA, 30 bp, Artificial Sequence
  Synthetic oligonucleotide
gatccacgggccagtggatgcgtcttaggg

SEQ ID NO: 177965 - DNA, 30 bp, Artificial Sequence
  Synthetic oligonucleotide
aactgccaaagtcaagaggtatttttaggg

SEQ ID NO: 177966 - DNA, 30 bp, Artificial Sequence
  Synthetic oligonucleotide
ggatacggttcatatcgggaacaaaacggg

SEQ ID NO: 177967 - DNA, 30 bp, Artificial Sequence
  Synthetic oligonucleotide
taaacttactacctggcatgggacaacggg

SEQ ID NO: 177968 - DNA, 30 bp, Artificial Sequence
  Synthetic oligonucleotide
caaggttgccttctggtcaaaaccaacggg

SEQ ID NO: 177969 - DNA, 30 bp, Artificial Sequence
  Synthetic oligonucleotide
agcgttggagatcgctgctgtagcaacggg

SEQ ID NO: 177970 - DNA, 30 bp, Artificial Sequence
  Synthetic oligonucleotide
ccaaagcggatcgtattcgcgacacacggg

SEQ ID NO: 177971 - DNA, 31 bp, Artificial Sequence
  Synthetic oligonucleotide
agcgatggacgcatttacgaaatagcacggg

SEQ ID NO: 177972 - DNA, 30 bp, Artificial Sequence
  Synthetic oligonucleotide
caataatggctcaggctaaccttggacggg

SEQ ID NO: 177973 - DNA, 30 bp, Artificial Sequence
  Synthetic oligonucleotide
agttaggataaagctcgatgcactgacggg

SEQ ID NO: 177974 - DNA, 30 bp, Artificial Sequence
  Synthetic oligonucleotide
gggacctgtggtagagtcgctattgacggg

SEQ ID NO: 177975 - DNA, 30 bp, Artificial Sequence
  Synthetic oligonucleotide
tgttcgcgataggcccacgggaaatacggg

SEQ ID NO: 177976 - DNA, 30 bp, Artificial Sequence
  Synthetic oligonucleotide
aagagtcgtaaattccgttgggactacggg

SEQ ID NO: 177977 - DNA, 30 bp, Artificial Sequence
  Synthetic oligonucleotide
tcttcagtttgaacccaaggcacctacggg

SEQ ID NO: 177978 - DNA, 30 bp, Artificial Sequence
  Synthetic oligonucleotide
tcttctcggcctataactcttgagtacggg

SEQ ID NO: 177979 - DNA, 30 bp, Artificial Sequence
  Synthetic oligonucleotide
gggtccggtcctgagaaggtatagtacggg

SEQ ID NO: 177980 - DNA, 30 bp, Artificial Sequence
  Synthetic oligonucleotide
gaattccaagaaagaccatctttgtacggg

SEQ ID NO: 177981 - DNA, 30 bp, Artificial Sequence
  Synthetic oligonucleotide
tattactaagtagaactgtttaattacggg

SEQ ID NO: 177982 - DNA, 30 bp, Artificial Sequence
  Synthetic oligonucleotide
ggtatcagccggtaataaagcgtttacggg

SEQ ID NO: 177983 - DNA, 30 bp, Artificial Sequence
  Synthetic oligonucleotide
tgaacagatgaggtgcgctacaccaccggg

SEQ ID NO: 177984 - DNA, 30 bp, Artificial Sequence
  Synthetic oligonucleotide
acccaggtgcgaggctgagaaagcaccggg

SEQ ID NO: 177985 - DNA, 30 bp, Artificial Sequence
  Synthetic oligonucleotide
tgcagcgaactacgcggcttattgaccggg

SEQ ID NO: 177986 - DNA, 30 bp, Artificial Sequence
  Synthetic oligonucleotide
gctgagcgcgccagaagcacgggtaccggg

SEQ ID NO: 177987 - DNA, 29 bp, Artificial Sequence
  Synthetic oligonucleotide
ttgtttcgaatcacgagttgcttaccggg

SEQ ID NO: 177988 - DNA, 30 bp, Artificial Sequence
  Synthetic oligonucleotide
tggatttgcaattaattgaggatccccggg

SEQ ID NO: 177989 - DNA, 30 bp, Artificial Sequence
  Synthetic oligonucleotide
gaccgagcagtttgggaagagtttcccggg

SEQ ID NO: 177990 - DNA, 31 bp, Artificial Sequence
  Synthetic oligonucleotide
caccataagctctgaaacttgtacagccggg

SEQ ID NO: 177991 - DNA, 30 bp, Artificial Sequence
  Synthetic oligonucleotide
tagtgttcgcagtgtacaacaggagccggg

SEQ ID NO: 177992 - DNA, 30 bp, Artificial Sequence
  Synthetic oligonucleotide
ggaccagtagatgggtttgaaatggccggg

SEQ ID NO: 177993 - DNA, 30 bp, Artificial Sequence
  Synthetic oligonucleotide
cggactaaatatgaattccgagaatccggg

SEQ ID NO: 177994 - DNA, 30 bp, Artificial Sequence
  Synthetic oligonucleotide
aacgttggtctttgcgcggtcatttccggg

SEQ ID NO: 177995 - DNA, 30 bp, Artificial Sequence
  Synthetic oligonucleotide
cacttccctcctaagcattatatttccggg

SEQ ID NO: 177996 - DNA, 30 bp, Artificial Sequence
  Synthetic oligonucleotide
accccagcgtgtcacgcgttggaaagcggg

SEQ ID NO: 177997 - DNA, 30 bp, Artificial Sequence
  Synthetic oligonucleotide
gaggtgtcggcgctcgtagtgtaaagcggg

SEQ ID NO: 177998 - DNA, 30 bp, Artificial Sequence
  Synthetic oligonucleotide
ccagggtgatgtgtgaggatatgcagcggg

SEQ ID NO: 177999 - DNA, 30 bp, Artificial Sequence
  Synthetic oligonucleotide
ccggggccattaatagcgaagatcagcggg

SEQ ID NO: 178000 - DNA, 30 bp, Artificial Sequence
  Synthetic oligonucleotide
atactatgccgaaggcgagagggtagcggg

SEQ ID NO: 178001 - DNA, 30 bp, Artificial Sequence
  Synthetic oligonucleotide
tgaataggtcgttcagaacccaggcgcggg

SEQ ID NO: 178002 - DNA, 30 bp, Artificial Sequence
  Synthetic oligonucleotide
tctcgtaagagcgttcccatcgggcgcggg

SEQ ID NO: 178003 - DNA, 30 bp, Artificial Sequence
  Synthetic oligonucleotide
ccagtgaggaggcaagtgacgaaaggcggg

SEQ ID NO: 178004 - DNA, 30 bp, Artificial Sequence
  Synthetic oligonucleotide
gggagagaacaatctaggtgagacggcggg

SEQ ID NO: 178005 - DNA, 30 bp, Artificial Sequence
  Synthetic oligonucleotide
cagggaaccattaatgttgttgcgggcggg

SEQ ID NO: 178006 - DNA, 30 bp, Artificial Sequence
  Synthetic oligonucleotide
atagagaaaagctttgtattcgtgtgcggg

SEQ ID NO: 178007 - DNA, 30 bp, Artificial Sequence
  Synthetic oligonucleotide
tcatagttcgcatttcgggaggtgtgcggg

SEQ ID NO: 178008 - DNA, 30 bp, Artificial Sequence
  Synthetic oligonucleotide
tggttgatcgttattacaagcagaatcggg

SEQ ID NO: 178009 - DNA, 30 bp, Artificial Sequence
  Synthetic oligonucleotide
agaatgctttggctcaggatttccatcggg

SEQ ID NO: 178010 - DNA, 30 bp, Artificial Sequence
  Synthetic oligonucleotide
actatacagaccttaaacttttccatcggg

SEQ ID NO: 178011 - DNA, 29 bp, Artificial Sequence
  Synthetic oligonucleotide
tctttggccacccactggtcgcgatcggg

SEQ ID NO: 178012 - DNA, 30 bp, Artificial Sequence
  Synthetic oligonucleotide
agtcgcagcgagtaccttgagcggatcggg

SEQ ID NO: 178013 - DNA, 30 bp, Artificial Sequence
  Synthetic oligonucleotide
tgccaatgtcactctcacggggcactcggg

SEQ ID NO: 178014 - DNA, 30 bp, Artificial Sequence
  Synthetic oligonucleotide
atgtggtattgtttatatcataccctcggg

SEQ ID NO: 178015 - DNA, 30 bp, Artificial Sequence
  Synthetic oligonucleotide
attaagctaagacctacgttctccctcggg

SEQ ID NO: 178016 - DNA, 30 bp, Artificial Sequence
  Synthetic oligonucleotide
cgaaccgcgaatgtcaacccctgcctcggg

SEQ ID NO: 178017 - DNA, 30 bp, Artificial Sequence
  Synthetic oligonucleotide
caaatatgtttcatccgtatcgagctcggg

SEQ ID NO: 178018 - DNA, 30 bp, Artificial Sequence
  Synthetic oligonucleotide
gccctgggccggcgacaccattagctcggg

SEQ ID NO: 178019 - DNA, 30 bp, Artificial Sequence
  Synthetic oligonucleotide
gtgttaatagccagccgctaaaccgtcggg

SEQ ID NO: 178020 - DNA, 30 bp, Artificial Sequence
  Synthetic oligonucleotide
gcactcacggctgagcaggctagcgtcggg

SEQ ID NO: 178021 - DNA, 30 bp, Artificial Sequence
  Synthetic oligonucleotide
tgtaaaactaggcctggatatggggtcggg

SEQ ID NO: 178022 - DNA, 30 bp, Artificial Sequence
  Synthetic oligonucleotide
gagaataattccataaatcggtctgtcggg

SEQ ID NO: 178023 - DNA, 30 bp, Artificial Sequence
  Synthetic oligonucleotide
ttgcgagggcatcaaaatgggaggttcggg

SEQ ID NO: 178024 - DNA, 30 bp, Artificial Sequence
  Synthetic oligonucleotide
actgaaacacgggagtccccaagtttcggg

SEQ ID NO: 178025 - DNA, 30 bp, Artificial Sequence
  Synthetic oligonucleotide
gtctatcaccttcattatcgcgtcaagggg

SEQ ID NO: 178026 - DNA, 30 bp, Artificial Sequence
  Synthetic oligonucleotide
ttcagcggggcaacgtattaatataagggg

SEQ ID NO: 178027 - DNA, 30 bp, Artificial Sequence
  Synthetic oligonucleotide
catctgctcatagaaacgagtggtaagggg

SEQ ID NO: 178028 - DNA, 30 bp, Artificial Sequence
  Synthetic oligonucleotide
taacctctcaccgagttcagaatgcagggg

SEQ ID NO: 178029 - DNA, 30 bp, Artificial Sequence
  Synthetic oligonucleotide
gcgatatggagcacagcacatatgcagggg

SEQ ID NO: 178030 - DNA, 30 bp, Artificial Sequence
  Synthetic oligonucleotide
catcacggaactgttaccctttctcagggg

SEQ ID NO: 178031 - DNA, 30 bp, Artificial Sequence
  Synthetic oligonucleotide
aatcttgctatctatacttcaagtcagggg

SEQ ID NO: 178032 - DNA, 30 bp, Artificial Sequence
  Synthetic oligonucleotide
ttaggcctaaccatattcactggtcagggg

SEQ ID NO: 178033 - DNA, 30 bp, Artificial Sequence
  Synthetic oligonucleotide
gttgaggcacaaccatgcagcgaagagggg

SEQ ID NO: 178034 - DNA, 30 bp, Artificial Sequence
  Synthetic oligonucleotide
cacgcaatgttgtagaatctgttagagggg

SEQ ID NO: 178035 - DNA, 30 bp, Artificial Sequence
  Synthetic oligonucleotide
ggctgagctgggctagcgagccttgagggg

SEQ ID NO: 178036 - DNA, 30 bp, Artificial Sequence
  Synthetic oligonucleotide
gccacagggtgaagtgctcaccaatagggg

SEQ ID NO: 178037 - DNA, 30 bp, Artificial Sequence
  Synthetic oligonucleotide
accttaaggtcctttatatcacagtagggg

SEQ ID NO: 178038 - DNA, 30 bp, Artificial Sequence
  Synthetic oligonucleotide
ggagagatcaatttgggttcatcgtagggg

SEQ ID NO: 178039 - DNA, 30 bp, Artificial Sequence
  Synthetic oligonucleotide
ctactgcgggctccgatggcgtgttagggg

SEQ ID NO: 178040 - DNA, 30 bp, Artificial Sequence
  Synthetic oligonucleotide
aaggcttctgcaaagctctcgaaaacgggg

SEQ ID NO: 178041 - DNA, 30 bp, Artificial Sequence
  Synthetic oligonucleotide
agaaattactacgtacaacggttaacgggg

SEQ ID NO: 178042 - DNA, 30 bp, Artificial Sequence
  Synthetic oligonucleotide
ccacacgcacccatagcatagctgacgggg

SEQ ID NO: 178043 - DNA, 30 bp, Artificial Sequence
  Synthetic oligonucleotide
cagtcggagggtgaataaagagctacgggg

SEQ ID NO: 178044 - DNA, 30 bp, Artificial Sequence
  Synthetic oligonucleotide
ggttacactagttgcagtgttttcgcgggg

SEQ ID NO: 178045 - DNA, 30 bp, Artificial Sequence
  Synthetic oligonucleotide
catcacctatttacaaagctcggtgcgggg

SEQ ID NO: 178046 - DNA, 30 bp, Artificial Sequence
  Synthetic oligonucleotide
tgcccaggaacaaaggcttgattatcgggg

SEQ ID NO: 178047 - DNA, 30 bp, Artificial Sequence
  Synthetic oligonucleotide
tcagtgctaacataacctgcccagtcgggg

SEQ ID NO: 178048 - DNA, 30 bp, Artificial Sequence
  Synthetic oligonucleotide
gtgtcattttcctcatttaacacgtcgggg

SEQ ID NO: 178049 - DNA, 30 bp, Artificial Sequence
  Synthetic oligonucleotide
ggaaactggtctgtgggcgtgtcgtcgggg

SEQ ID NO: 178050 - DNA, 30 bp, Artificial Sequence
  Synthetic oligonucleotide
gtatctaggtctacttgatcggtgtcgggg

SEQ ID NO: 178051 - DNA, 30 bp, Artificial Sequence
  Synthetic oligonucleotide
ccaaggcaccggcatctagcacattcgggg

SEQ ID NO: 178052 - DNA, 30 bp, Artificial Sequence
  Synthetic oligonucleotide
tggggctttttaccacaaaatgaaaggggg

SEQ ID NO: 178053 - DNA, 30 bp, Artificial Sequence
  Synthetic oligonucleotide
gtaaacagtaggcataaggattacaggggg

SEQ ID NO: 178054 - DNA, 30 bp, Artificial Sequence
  Synthetic oligonucleotide
ctccgaatcaataaggttagcaccaggggg

SEQ ID NO: 178055 - DNA, 30 bp, Artificial Sequence
  Synthetic oligonucleotide
ttggggcacaagggcttaagtaccaggggg

SEQ ID NO: 178056 - DNA, 30 bp, Artificial Sequence
  Synthetic oligonucleotide
cgtcatctcgatcccgatccagagaggggg

SEQ ID NO: 178057 - DNA, 30 bp, Artificial Sequence
  Synthetic oligonucleotide
ggcgcggagagcgtcggggcgcttaggggg

SEQ ID NO: 178058 - DNA, 30 bp, Artificial Sequence
  Synthetic oligonucleotide
attaaagtcgctagaagacaagaccggggg

SEQ ID NO: 178059 - DNA, 30 bp, Artificial Sequence
  Synthetic oligonucleotide
agagaccctctgagctctctggctcggggg

SEQ ID NO: 178060 - DNA, 30 bp, Artificial Sequence
  Synthetic oligonucleotide
acatggttaaccttaccaaagtaagggggg

SEQ ID NO: 178061 - DNA, 30 bp, Artificial Sequence
  Synthetic oligonucleotide
gtttagcctttccagcgtcagaccgggggg

SEQ ID NO: 178062 - DNA, 31 bp, Artificial Sequence
  Synthetic oligonucleotide
ccgcgcgagacataggtttaaaacctggggg

SEQ ID NO: 178063 - DNA, 30 bp, Artificial Sequence
  Synthetic oligonucleotide
tgttagagccattttgatgtccaaatgggg

SEQ ID NO: 178064 - DNA, 30 bp, Artificial Sequence
  Synthetic oligonucleotide
agccaatcgtcggttcctgcgaacatgggg

SEQ ID NO: 178065 - DNA, 30 bp, Artificial Sequence
  Synthetic oligonucleotide
gtccttgaaataagtcttacaaggatgggg

SEQ ID NO: 178066 - DNA, 30 bp, Artificial Sequence
  Synthetic oligonucleotide
tgggtgccgagtaccaacctcgtgatgggg

SEQ ID NO: 178067 - DNA, 30 bp, Artificial Sequence
  Synthetic oligonucleotide
ataccctcgactttagtattaaacctgggg

SEQ ID NO: 178068 - DNA, 30 bp, Artificial Sequence
  Synthetic oligonucleotide
catctaacagcatctatggtttctctgggg

SEQ ID NO: 178069 - DNA, 30 bp, Artificial Sequence
  Synthetic oligonucleotide
tgtgtcgacacgtggtcttttcttctgggg

SEQ ID NO: 178070 - DNA, 30 bp, Artificial Sequence
  Synthetic oligonucleotide
gtgccgtgggttgaataagaagtcgtgggg

SEQ ID NO: 178071 - DNA, 30 bp, Artificial Sequence
  Synthetic oligonucleotide
gtcaaaggataactgtattaggttgtgggg

SEQ ID NO: 178072 - DNA, 30 bp, Artificial Sequence
  Synthetic oligonucleotide
tccatcgggagggtcactccctttgtgggg

SEQ ID NO: 178073 - DNA, 30 bp, Artificial Sequence
  Synthetic oligonucleotide
catgagagaggactgccgtgcgcattgggg

SEQ ID NO: 178074 - DNA, 30 bp, Artificial Sequence
  Synthetic oligonucleotide
cgataattatcgttcagagagaagttgggg

SEQ ID NO: 178075 - DNA, 30 bp, Artificial Sequence
  Synthetic oligonucleotide
tgcagacgtcctgcgctctaatagttgggg

SEQ ID NO: 178076 - DNA, 30 bp, Artificial Sequence
  Synthetic oligonucleotide
gactcgtggaggccgctcagatagttgggg

SEQ ID NO: 178077 - DNA, 30 bp, Artificial Sequence
  Synthetic oligonucleotide
gtcgcggcagaggttttccgtccgaatggg

SEQ ID NO: 178078 - DNA, 30 bp, Artificial Sequence
  Synthetic oligonucleotide
cccgggcgccactgtggagtccggaatggg

SEQ ID NO: 178079 - DNA, 30 bp, Artificial Sequence
  Synthetic oligonucleotide
ggatcacacagtcagcgtacgcctaatggg

SEQ ID NO: 178080 - DNA, 30 bp, Artificial Sequence
  Synthetic oligonucleotide
ggccaaggtgtcattcttggctctaatggg

SEQ ID NO: 178081 - DNA, 30 bp, Artificial Sequence
  Synthetic oligonucleotide
atatcagaaccataaggcatggaagatggg

SEQ ID NO: 178082 - DNA, 30 bp, Artificial Sequence
  Synthetic oligonucleotide
ggtgtacatacaggcacaggtaagtatggg

SEQ ID NO: 178083 - DNA, 30 bp, Artificial Sequence
  Synthetic oligonucleotide
gcagcgttcgctcgtagaataaggtatggg

SEQ ID NO: 178084 - DNA, 30 bp, Artificial Sequence
  Synthetic oligonucleotide
ttcatagcgcgcgaaaacgtcacttatggg

SEQ ID NO: 178085 - DNA, 30 bp, Artificial Sequence
  Synthetic oligonucleotide
aatccgcgaagcttaaaccggcgttatggg

SEQ ID NO: 178086 - DNA, 30 bp, Artificial Sequence
  Synthetic oligonucleotide
aacgtagttcgataagcgatgggttatggg

SEQ ID NO: 178087 - DNA, 30 bp, Artificial Sequence
  Synthetic oligonucleotide
aggctcttaacatccttaagaggcactggg

SEQ ID NO: 178088 - DNA, 30 bp, Artificial Sequence
  Synthetic oligonucleotide
ctcccaattgcgctcgtgtaaacgactggg

SEQ ID NO: 178089 - DNA, 30 bp, Artificial Sequence
  Synthetic oligonucleotide
tcgttcgtgtggaacagattcgcacctggg

SEQ ID NO: 178090 - DNA, 30 bp, Artificial Sequence
  Synthetic oligonucleotide
agacacgtaacgttcgatcttcgccctggg

SEQ ID NO: 178091 - DNA, 30 bp, Artificial Sequence
  Synthetic oligonucleotide
tttgcgccgagggggtgagcccgggctggg

SEQ ID NO: 178092 - DNA, 30 bp, Artificial Sequence
  Synthetic oligonucleotide
tcatgttaggtttaacgatttatggctggg

SEQ ID NO: 178093 - DNA, 30 bp, Artificial Sequence
  Synthetic oligonucleotide
ggagcaggttaggcgaggatatgatctggg

SEQ ID NO: 178094 - DNA, 30 bp, Artificial Sequence
  Synthetic oligonucleotide
tgaattgaaatagctaacctagcctctggg

SEQ ID NO: 178095 - DNA, 30 bp, Artificial Sequence
  Synthetic oligonucleotide
gatagactagcggcgagtgtgcaaagtggg

SEQ ID NO: 178096 - DNA, 30 bp, Artificial Sequence
  Synthetic oligonucleotide
gaatgaggcacgtggccaactttgagtggg

SEQ ID NO: 178097 - DNA, 30 bp, Artificial Sequence
  Synthetic oligonucleotide
tgtcccagggggtctcgtaggactagtggg

SEQ ID NO: 178098 - DNA, 30 bp, Artificial Sequence
  Synthetic oligonucleotide
gcggcctgtttatgctaactaagtagtggg

SEQ ID NO: 178099 - DNA, 30 bp, Artificial Sequence
  Synthetic oligonucleotide
agggcgtcctgctttaaaaagcagcgtggg

SEQ ID NO: 178100 - DNA, 30 bp, Artificial Sequence
  Synthetic oligonucleotide
agggtcatggacgtatactcctctcgtggg

SEQ ID NO: 178101 - DNA, 30 bp, Artificial Sequence
  Synthetic oligonucleotide
gcagggacgtaaatcgcttgtgaaggtggg

SEQ ID NO: 178102 - DNA, 30 bp, Artificial Sequence
  Synthetic oligonucleotide
ctgaagggagatgccttgatatagggtggg

SEQ ID NO: 178103 - DNA, 30 bp, Artificial Sequence
  Synthetic oligonucleotide
gattcccacaagggggtcagaaggggtggg

SEQ ID NO: 178104 - DNA, 30 bp, Artificial Sequence
  Synthetic oligonucleotide
gctggaactcacatgtaggtactgggtggg

SEQ ID NO: 178105 - DNA, 30 bp, Artificial Sequence
  Synthetic oligonucleotide
ctgtaaggggtgaacggctagctgggtggg

SEQ ID NO: 178106 - DNA, 30 bp, Artificial Sequence
  Synthetic oligonucleotide
aaatatcggtaggtgagaaatagatgtggg

SEQ ID NO: 178107 - DNA, 30 bp, Artificial Sequence
  Synthetic oligonucleotide
gcctgctaacaagtacctccgcgctgtggg

SEQ ID NO: 178108 - DNA, 30 bp, Artificial Sequence
  Synthetic oligonucleotide
gaccgggactatgatccggctgcgtgtggg

SEQ ID NO: 178109 - DNA, 30 bp, Artificial Sequence
  Synthetic oligonucleotide
ttttagtcgcgtatcagagaagcttgtggg

SEQ ID NO: 178110 - DNA, 30 bp, Artificial Sequence
  Synthetic oligonucleotide
atgcagggctgagccggattaggttgtggg

SEQ ID NO: 178111 - DNA, 30 bp, Artificial Sequence
  Synthetic oligonucleotide
ggcacaagccacgtaggcggtcaaattggg

SEQ ID NO: 178112 - DNA, 30 bp, Artificial Sequence
  Synthetic oligonucleotide
agtatacaagacaagggagggagaattggg

SEQ ID NO: 178113 - DNA, 30 bp, Artificial Sequence
  Synthetic oligonucleotide
ctcacacagttcgccccgaggatcattggg

SEQ ID NO: 178114 - DNA, 30 bp, Artificial Sequence
  Synthetic oligonucleotide
aaggtatgaatcctgaaacattggattggg

SEQ ID NO: 178115 - DNA, 30 bp, Artificial Sequence
  Synthetic oligonucleotide
cctccggcatgacctgggcggatgattggg

SEQ ID NO: 178116 - DNA, 30 bp, Artificial Sequence
  Synthetic oligonucleotide
tcggacctactagtaaagagttatattggg

SEQ ID NO: 178117 - DNA, 30 bp, Artificial Sequence
  Synthetic oligonucleotide
gtgataattcaatcaggcactgggcttggg

SEQ ID NO: 178118 - DNA, 30 bp, Artificial Sequence
  Synthetic oligonucleotide
gtcccggttaaaggatttaaagttcttggg

SEQ ID NO: 178119 - DNA, 30 bp, Artificial Sequence
  Synthetic oligonucleotide
aactattaaggtaccagtaggccggttggg

SEQ ID NO: 178120 - DNA, 30 bp, Artificial Sequence
  Synthetic oligonucleotide
actgaaaaaaattaatcgtaggtggttggg

SEQ ID NO: 178121 - DNA, 30 bp, Artificial Sequence
  Synthetic oligonucleotide
tagagataagtgtcccgctttcgtgttggg

SEQ ID NO: 178122 - DNA, 30 bp, Artificial Sequence
  Synthetic oligonucleotide
aacggacctcggataccgtactgtgttggg

SEQ ID NO: 178123 - DNA, 30 bp, Artificial Sequence
  Synthetic oligonucleotide
gacctaggctcaaatagttgcccatttggg

SEQ ID NO: 178124 - DNA, 30 bp, Artificial Sequence
  Synthetic oligonucleotide
acctgcctgtgacaaggtagcctatttggg

SEQ ID NO: 178125 - DNA, 30 bp, Artificial Sequence
  Synthetic oligonucleotide
ccacaccattcaagctattgagcctttggg

SEQ ID NO: 178126 - DNA, 30 bp, Artificial Sequence
  Synthetic oligonucleotide
ttgtcactaccagagggaaagcggtttggg

SEQ ID NO: 178127 - DNA, 30 bp, Artificial Sequence
  Synthetic oligonucleotide
agatctgcgactgtcaggctaaattttggg

SEQ ID NO: 178128 - DNA, 30 bp, Artificial Sequence
  Synthetic oligonucleotide
aggagctggtagctgataatatcttttggg

SEQ ID NO: 178129 - DNA, 30 bp, Artificial Sequence
  Synthetic oligonucleotide
tttgttgggtctcacattccggtttttggg

SEQ ID NO: 178130 - DNA, 30 bp, Artificial Sequence
  Synthetic oligonucleotide
cagaccagcgcgggaccgaaacaccaatgg

SEQ ID NO: 178131 - DNA, 30 bp, Artificial Sequence
  Synthetic oligonucleotide
gggtccaaaccgttaccttgctggcaatgg

SEQ ID NO: 178132 - DNA, 30 bp, Artificial Sequence
  Synthetic oligonucleotide
gggtccaggtcatatgggttattgcaatgg

SEQ ID NO: 178133 - DNA, 30 bp, Artificial Sequence
  Synthetic oligonucleotide
gtgctaatattagatgatggacttcaatgg

SEQ ID NO: 178134 - DNA, 30 bp, Artificial Sequence
  Synthetic oligonucleotide
taaatgttcggaaacgtccactaggaatgg

SEQ ID NO: 178135 - DNA, 30 bp, Artificial Sequence
  Synthetic oligonucleotide
ggattggatctagggagagcctaggaatgg

SEQ ID NO: 178136 - DNA, 30 bp, Artificial Sequence
  Synthetic oligonucleotide
catatcggaccgttagggtacggggaatgg

SEQ ID NO: 178137 - DNA, 29 bp, Artificial Sequence
  Synthetic oligonucleotide
atcacgagcgggtaacgagactggaatgg

SEQ ID NO: 178138 - DNA, 30 bp, Artificial Sequence
  Synthetic oligonucleotide
ttgtcacctcgattggacttcagtgaatgg

SEQ ID NO: 178139 - DNA, 30 bp, Artificial Sequence
  Synthetic oligonucleotide
gcatagcaatgtgtacagtacgttgaatgg

SEQ ID NO: 178140 - DNA, 30 bp, Artificial Sequence
  Synthetic oligonucleotide
agacaccatgagcataatgccgttgaatgg

SEQ ID NO: 178141 - DNA, 30 bp, Artificial Sequence
  Synthetic oligonucleotide
ctctacaaagaccaaaatgtaatctaatgg

SEQ ID NO: 178142 - DNA, 30 bp, Artificial Sequence
  Synthetic oligonucleotide
tgggttggatgggaaatatatgagtaatgg

SEQ ID NO: 178143 - DNA, 30 bp, Artificial Sequence
  Synthetic oligonucleotide
agctagatacgtaaattctattcgtaatgg

SEQ ID NO: 178144 - DNA, 30 bp, Artificial Sequence
  Synthetic oligonucleotide
aagctgagtttgttctctgcgagcacatgg

SEQ ID NO: 178145 - DNA, 30 bp, Artificial Sequence
  Synthetic oligonucleotide
tagggatgctcaccgatcccggagacatgg

SEQ ID NO: 178146 - DNA, 30 bp, Artificial Sequence
  Synthetic oligonucleotide
atgatatggttagaaggggtggggacatgg

SEQ ID NO: 178147 - DNA, 30 bp, Artificial Sequence
  Synthetic oligonucleotide
tgctattggtctatctcttgcacagcatgg

SEQ ID NO: 178148 - DNA, 30 bp, Artificial Sequence
  Synthetic oligonucleotide
gatgtgccagcaggttcagagacagcatgg

SEQ ID NO: 178149 - DNA, 30 bp, Artificial Sequence
  Synthetic oligonucleotide
gcaaacgcatcgttataaccgatcgcatgg

SEQ ID NO: 178150 - DNA, 30 bp, Artificial Sequence
  Synthetic oligonucleotide
ttggaactgataattaatcgcaatgcatgg

SEQ ID NO: 178151 - DNA, 30 bp, Artificial Sequence
  Synthetic oligonucleotide
tgcgcgggcacgtcgcacgatatatcatgg

SEQ ID NO: 178152 - DNA, 30 bp, Artificial Sequence
  Synthetic oligonucleotide
aagattcaggcggggccagtcccctcatgg

SEQ ID NO: 178153 - DNA, 30 bp, Artificial Sequence
  Synthetic oligonucleotide
acagtttaatacccgacgtgttcgagatgg

SEQ ID NO: 178154 - DNA, 30 bp, Artificial Sequence
  Synthetic oligonucleotide
gtgccgtaggagaacgatctatgtagatgg

SEQ ID NO: 178155 - DNA, 30 bp, Artificial Sequence
  Synthetic oligonucleotide
aagtggagccacgagaaccgtttacgatgg

SEQ ID NO: 178156 - DNA, 30 bp, Artificial Sequence
  Synthetic oligonucleotide
tagtaggggtctgaccccggtcatcgatgg

SEQ ID NO: 178157 - DNA, 30 bp, Artificial Sequence
  Synthetic oligonucleotide
tactggagcacaggcagattaaaaggatgg

SEQ ID NO: 178158 - DNA, 30 bp, Artificial Sequence
  Synthetic oligonucleotide
tgccctattctgagggaaaatatcggatgg

SEQ ID NO: 178159 - DNA, 30 bp, Artificial Sequence
  Synthetic oligonucleotide
actacaatctgaaaatagagactcggatgg

SEQ ID NO: 178160 - DNA, 30 bp, Artificial Sequence
  Synthetic oligonucleotide
ggcggcgtttgaaccgtaacgttcggatgg

SEQ ID NO: 178161 - DNA, 30 bp, Artificial Sequence
  Synthetic oligonucleotide
gaatcctctgtcggaggacgagaatgatgg

SEQ ID NO: 178162 - DNA, 30 bp, Artificial Sequence
  Synthetic oligonucleotide
aataacgttcgaagatgtcaggcatgatgg

SEQ ID NO: 178163 - DNA, 30 bp, Artificial Sequence
  Synthetic oligonucleotide
agcagacttgcgtcgactatgtggtgatgg

SEQ ID NO: 178164 - DNA, 30 bp, Artificial Sequence
  Synthetic oligonucleotide
gtgatagcctcagatcgatttcattgatgg

SEQ ID NO: 178165 - DNA, 30 bp, Artificial Sequence
  Synthetic oligonucleotide
cgtgtcgtcgctgccggacagagttgatgg

SEQ ID NO: 178166 - DNA, 30 bp, Artificial Sequence
  Synthetic oligonucleotide
cgtccagtatcagctggcatgaaaatatgg

SEQ ID NO: 178167 - DNA, 30 bp, Artificial Sequence
  Synthetic oligonucleotide
agaacagggggttccgcgctagaaatatgg

SEQ ID NO: 178168 - DNA, 30 bp, Artificial Sequence
  Synthetic oligonucleotide
ggagtagatcccagacttaatctcatatgg

SEQ ID NO: 178169 - DNA, 30 bp, Artificial Sequence
  Synthetic oligonucleotide
aaactggcagatacggtacgtctcatatgg

SEQ ID NO: 178170 - DNA, 30 bp, Artificial Sequence
  Synthetic oligonucleotide
agcgccgtttaggccatagtatctatatgg

SEQ ID NO: 178171 - DNA, 30 bp, Artificial Sequence
  Synthetic oligonucleotide
ctgcctgagttaacctacgcctgtctatgg

SEQ ID NO: 178172 - DNA, 30 bp, Artificial Sequence
  Synthetic oligonucleotide
gttcgattaggttcagttaattttgtatgg

SEQ ID NO: 178173 - DNA, 30 bp, Artificial Sequence
  Synthetic oligonucleotide
agatcggatatcatgaagctactcttatgg

SEQ ID NO: 178174 - DNA, 30 bp, Artificial Sequence
  Synthetic oligonucleotide
ttcaatcgtcctgattaacacactttatgg

SEQ ID NO: 178175 - DNA, 31 bp, Artificial Sequence
  Synthetic oligonucleotide
aacagggcttggagtgcacctacctttatgg

SEQ ID NO: 178176 - DNA, 30 bp, Artificial Sequence
  Synthetic oligonucleotide
gtacatctcttgagaatgtgagctttatgg

SEQ ID NO: 178177 - DNA, 30 bp, Artificial Sequence
  Synthetic oligonucleotide
gaatgggtgtgcttcccagcacgtttatgg

SEQ ID NO: 178178 - DNA, 30 bp, Artificial Sequence
  Synthetic oligonucleotide
gcaattgatgggagcgggcggattttatgg

SEQ ID NO: 178179 - DNA, 30 bp, Artificial Sequence
  Synthetic oligonucleotide
gagcgtaaagttgatagagacgagaactgg

SEQ ID NO: 178180 - DNA, 30 bp, Artificial Sequence
  Synthetic oligonucleotide
ctacccgatttgagggcccaatcgaactgg

SEQ ID NO: 178181 - DNA, 30 bp, Artificial Sequence
  Synthetic oligonucleotide
gcctaaggcgaaatatgctagtttaactgg

SEQ ID NO: 178182 - DNA, 30 bp, Artificial Sequence
  Synthetic oligonucleotide
gttgatagttgctcagctagttcacactgg

SEQ ID NO: 178183 - DNA, 30 bp, Artificial Sequence
  Synthetic oligonucleotide
gtgttcaaagtaattacatagatacactgg

SEQ ID NO: 178184 - DNA, 30 bp, Artificial Sequence
  Synthetic oligonucleotide
ggaccccggacgaagcgaaaagaccactgg

SEQ ID NO: 178185 - DNA, 30 bp, Artificial Sequence
  Synthetic oligonucleotide
gataggaccacaacagcacaggagcactgg

SEQ ID NO: 178186 - DNA, 30 bp, Artificial Sequence
  Synthetic oligonucleotide
cctcacatatagagtggtggatcgcactgg

SEQ ID NO: 178187 - DNA, 30 bp, Artificial Sequence
  Synthetic oligonucleotide
aggacatcaggtaccgacatatggcactgg

SEQ ID NO: 178188 - DNA, 30 bp, Artificial Sequence
  Synthetic oligonucleotide
aggcctataacaaagggccgagtgcactgg

SEQ ID NO: 178189 - DNA, 30 bp, Artificial Sequence
  Synthetic oligonucleotide
tgtcctactgtggattgaaattttcactgg

SEQ ID NO: 178190 - DNA, 30 bp, Artificial Sequence
  Synthetic oligonucleotide
actatcgccgtaagttgtcaccacgactgg

SEQ ID NO: 178191 - DNA, 30 bp, Artificial Sequence
  Synthetic oligonucleotide
ccgcaggggagtaaaggttttgaggactgg

SEQ ID NO: 178192 - DNA, 30 bp, Artificial Sequence
  Synthetic oligonucleotide
tgggtcgctagatgtgagtgaatggactgg

SEQ ID NO: 178193 - DNA, 30 bp, Artificial Sequence
  Synthetic oligonucleotide
gctaataggatacggaaagacaaatactgg

SEQ ID NO: 178194 - DNA, 30 bp, Artificial Sequence
  Synthetic oligonucleotide
gcatatacgtccggtccagtggactactgg

SEQ ID NO: 178195 - DNA, 30 bp, Artificial Sequence
  Synthetic oligonucleotide
gcttgacacacgtccaacagatattactgg

SEQ ID NO: 178196 - DNA, 30 bp, Artificial Sequence
  Synthetic oligonucleotide
agatgaagttgccctttagtaataccctgg

SEQ ID NO: 178197 - DNA, 30 bp, Artificial Sequence
  Synthetic oligonucleotide
ggctacgcgcgggctgaccaccgcccctgg

SEQ ID NO: 178198 - DNA, 30 bp, Artificial Sequence
  Synthetic oligonucleotide
acaacgctctaccttctccgttggccctgg

SEQ ID NO: 178199 - DNA, 30 bp, Artificial Sequence
  Synthetic oligonucleotide
cggagagaaaaggtatatcagagtccctgg

SEQ ID NO: 178200 - DNA, 30 bp, Artificial Sequence
  Synthetic oligonucleotide
catcggatagagacaggcacattagcctgg

SEQ ID NO: 178201 - DNA, 30 bp, Artificial Sequence
  Synthetic oligonucleotide
gacgcaggtaagacagcggagggctcctgg

SEQ ID NO: 178202 - DNA, 30 bp, Artificial Sequence
  Synthetic oligonucleotide
tgacgactcctccagaacccggtctcctgg

SEQ ID NO: 178203 - DNA, 30 bp, Artificial Sequence
  Synthetic oligonucleotide
acatcgcgggttggcaactttttctcctgg

SEQ ID NO: 178204 - DNA, 30 bp, Artificial Sequence
  Synthetic oligonucleotide
cgaatgaacaggatattgaggacttcctgg

SEQ ID NO: 178205 - DNA, 30 bp, Artificial Sequence
  Synthetic oligonucleotide
cagaaaccttatgtaacctcagacagctgg

SEQ ID NO: 178206 - DNA, 30 bp, Artificial Sequence
  Synthetic oligonucleotide
acccaaaaacatctatagtgagccagctgg

SEQ ID NO: 178207 - DNA, 30 bp, Artificial Sequence
  Synthetic oligonucleotide
tgaaaatgctgacatacaggcacgagctgg

SEQ ID NO: 178208 - DNA, 30 bp, Artificial Sequence
  Synthetic oligonucleotide
aacaaaatagggagccattttgatagctgg

SEQ ID NO: 178209 - DNA, 30 bp, Artificial Sequence
  Synthetic oligonucleotide
agggagacagtaccaatcctgggtagctgg

SEQ ID NO: 178210 - DNA, 30 bp, Artificial Sequence
  Synthetic oligonucleotide
cggtagactgaagcagtactagcacgctgg

SEQ ID NO: 178211 - DNA, 30 bp, Artificial Sequence
  Synthetic oligonucleotide
tgggcattattcattggtagcatgcgctgg

SEQ ID NO: 178212 - DNA, 30 bp, Artificial Sequence
  Synthetic oligonucleotide
tacgtctagacgtattccttaggaggctgg

SEQ ID NO: 178213 - DNA, 30 bp, Artificial Sequence
  Synthetic oligonucleotide
agaattcgaacgtttcttcagaagggctgg

SEQ ID NO: 178214 - DNA, 30 bp, Artificial Sequence
  Synthetic oligonucleotide
gtaaacccacatgggatacgggatggctgg

SEQ ID NO: 178215 - DNA, 30 bp, Artificial Sequence
  Synthetic oligonucleotide
ttcgggaacagacggcacgtaacatgctgg

SEQ ID NO: 178216 - DNA, 30 bp, Artificial Sequence
  Synthetic oligonucleotide
tcatatctaatcccaccgctaacgtgctgg

SEQ ID NO: 178217 - DNA, 30 bp, Artificial Sequence
  Synthetic oligonucleotide
cgagttgtaagaattttatctaaaatctgg

SEQ ID NO: 178218 - DNA, 30 bp, Artificial Sequence
  Synthetic oligonucleotide
tactcaattatcgaatgccggccaatctgg

SEQ ID NO: 178219 - DNA, 30 bp, Artificial Sequence
  Synthetic oligonucleotide
aactgcctgatacatgtcagcaacatctgg

SEQ ID NO: 178220 - DNA, 30 bp, Artificial Sequence
  Synthetic oligonucleotide
aggtctccccgtaactttcaatacatctgg

SEQ ID NO: 178221 - DNA, 30 bp, Artificial Sequence
  Synthetic oligonucleotide
tcgatgtttagattagcacccttgatctgg

SEQ ID NO: 178222 - DNA, 30 bp, Artificial Sequence
  Synthetic oligonucleotide
agacggtaatgggagattgcgtatatctgg

SEQ ID NO: 178223 - DNA, 30 bp, Artificial Sequence
  Synthetic oligonucleotide
tcctcacacggtcgtaagatagttctctgg

SEQ ID NO: 178224 - DNA, 30 bp, Artificial Sequence
  Synthetic oligonucleotide
tatggccctaagactggttgttatgtctgg

SEQ ID NO: 178225 - DNA, 30 bp, Artificial Sequence
  Synthetic oligonucleotide
atagaaattcggcccatatgaggattctgg

SEQ ID NO: 178226 - DNA, 30 bp, Artificial Sequence
  Synthetic oligonucleotide
ggataaattcgcaagctcgtaagcttctgg

SEQ ID NO: 178227 - DNA, 30 bp, Artificial Sequence
  Synthetic oligonucleotide
cgtgcgaaaaatcggaaccgatagttctgg

SEQ ID NO: 178228 - DNA, 30 bp, Artificial Sequence
  Synthetic oligonucleotide
cggctaggtccatcataggcgtccaagtgg

SEQ ID NO: 178229 - DNA, 30 bp, Artificial Sequence
  Synthetic oligonucleotide
gagcagactgtgttataaaggcgtaagtgg

SEQ ID NO: 178230 - DNA, 30 bp, Artificial Sequence
  Synthetic oligonucleotide
acggcagaacgcatgatcacaattaagtgg

SEQ ID NO: 178231 - DNA, 30 bp, Artificial Sequence
  Synthetic oligonucleotide
aggcattggaatatcaagggcgaacagtgg

SEQ ID NO: 178232 - DNA, 30 bp, Artificial Sequence
  Synthetic oligonucleotide
tgcagtgccaattatctaaccctacagtgg

SEQ ID NO: 178233 - DNA, 30 bp, Artificial Sequence
  Synthetic oligonucleotide
taaaatggtaacggctcttgtgcgcagtgg

SEQ ID NO: 178234 - DNA, 30 bp, Artificial Sequence
  Synthetic oligonucleotide
ccacgagccatcaccggaatagacgagtgg

SEQ ID NO: 178235 - DNA, 30 bp, Artificial Sequence
  Synthetic oligonucleotide
aagaattagagctgctgcattttcgagtgg

SEQ ID NO: 178236 - DNA, 30 bp, Artificial Sequence
  Synthetic oligonucleotide
taaataacgttgataatcgcgatggagtgg

SEQ ID NO: 178237 - DNA, 30 bp, Artificial Sequence
  Synthetic oligonucleotide
ggacgccgactacgtgatgtaggtgagtgg

SEQ ID NO: 178238 - DNA, 30 bp, Artificial Sequence
  Synthetic oligonucleotide
agacaaatccgcgaagcccagtaatagtgg

SEQ ID NO: 178239 - DNA, 30 bp, Artificial Sequence
  Synthetic oligonucleotide
ccaaactatgctataataacacgcacgtgg

SEQ ID NO: 178240 - DNA, 30 bp, Artificial Sequence
  Synthetic oligonucleotide
acaaaattgccatgcaattcatagacgtgg

SEQ ID NO: 178241 - DNA, 30 bp, Artificial Sequence
  Synthetic oligonucleotide
cactcaacctacaacgctgggacgacgtgg

SEQ ID NO: 178242 - DNA, 30 bp, Artificial Sequence
  Synthetic oligonucleotide
gctgcagtgggtaatattataacaccgtgg

SEQ ID NO: 178243 - DNA, 30 bp, Artificial Sequence
  Synthetic oligonucleotide
tcgggtttgattgtaagtccaaccccgtgg

SEQ ID NO: 178244 - DNA, 30 bp, Artificial Sequence
  Synthetic oligonucleotide
taaactagtgtttacaacagggaagcgtgg

SEQ ID NO: 178245 - DNA, 30 bp, Artificial Sequence
  Synthetic oligonucleotide
atggaaagcatgggcatcccgtacgcgtgg

SEQ ID NO: 178246 - DNA, 30 bp, Artificial Sequence
  Synthetic oligonucleotide
ggtggtcctaaatttgtaaaaacggcgtgg

SEQ ID NO: 178247 - DNA, 30 bp, Artificial Sequence
  Synthetic oligonucleotide
agtttggccgggcaggtcaatgtatcgtgg

SEQ ID NO: 178248 - DNA, 30 bp, Artificial Sequence
  Synthetic oligonucleotide
ttcattctccgtttgacagaggagtcgtgg

SEQ ID NO: 178249 - DNA, 30 bp, Artificial Sequence
  Synthetic oligonucleotide
caatagcaaccggtgtatcatacgtcgtgg

SEQ ID NO: 178250 - DNA, 30 bp, Artificial Sequence
  Synthetic oligonucleotide
tccgctggtaacgccctgcgggggtcgtgg

SEQ ID NO: 178251 - DNA, 30 bp, Artificial Sequence
  Synthetic oligonucleotide
aggtctgagcgaccataatgttacaggtgg

SEQ ID NO: 178252 - DNA, 30 bp, Artificial Sequence
  Synthetic oligonucleotide
gtaatcggcacagtagtgtcgagcaggtgg

SEQ ID NO: 178253 - DNA, 30 bp, Artificial Sequence
  Synthetic oligonucleotide
ttcggaccgatctgattaataatgaggtgg

SEQ ID NO: 178254 - DNA, 30 bp, Artificial Sequence
  Synthetic oligonucleotide
attcggaacatggccaaaagaaataggtgg

SEQ ID NO: 178255 - DNA, 30 bp, Artificial Sequence
  Synthetic oligonucleotide
tggcccatggaaaaacactagcgacggtgg

SEQ ID NO: 178256 - DNA, 30 bp, Artificial Sequence
  Synthetic oligonucleotide
ggctgagagacttacggcctaatacggtgg

SEQ ID NO: 178257 - DNA, 30 bp, Artificial Sequence
  Synthetic oligonucleotide
acctcacgaacctgtcacacgttccggtgg

SEQ ID NO: 178258 - DNA, 30 bp, Artificial Sequence
  Synthetic oligonucleotide
ctgacaacatgcggccaagcactgcggtgg

SEQ ID NO: 178259 - DNA, 30 bp, Artificial Sequence
  Synthetic oligonucleotide
tattggatgtttcgtatctgtattcggtgg

SEQ ID NO: 178260 - DNA, 30 bp, Artificial Sequence
  Synthetic oligonucleotide
cacgacaggggaggtacacttattcggtgg

SEQ ID NO: 178261 - DNA, 30 bp, Artificial Sequence
  Synthetic oligonucleotide
tatgggtggttcaggtttccataagggtgg

SEQ ID NO: 178262 - DNA, 30 bp, Artificial Sequence
  Synthetic oligonucleotide
gagtatacagtatagactaagcgagggtgg

SEQ ID NO: 178263 - DNA, 30 bp, Artificial Sequence
  Synthetic oligonucleotide
cgcaatagtatttccctaacatgagggtgg

SEQ ID NO: 178264 - DNA, 30 bp, Artificial Sequence
  Synthetic oligonucleotide
attcggcaggatagtgaccactacgggtgg

SEQ ID NO: 178265 - DNA, 30 bp, Artificial Sequence
  Synthetic oligonucleotide
tcctaccatcatcagaaaagctaggggtgg

SEQ ID NO: 178266 - DNA, 30 bp, Artificial Sequence
  Synthetic oligonucleotide
tcgtttgatcgagatcggagaactgggtgg

SEQ ID NO: 178267 - DNA, 30 bp, Artificial Sequence
  Synthetic oligonucleotide
aaatagcgtgtcgtccggccaagtgggtgg

SEQ ID NO: 178268 - DNA, 30 bp, Artificial Sequence
  Synthetic oligonucleotide
aagaataggaacgggatagctggtgggtgg

SEQ ID NO: 178269 - DNA, 30 bp, Artificial Sequence
  Synthetic oligonucleotide
aagtttacgataggctgcaagtgtgggtgg

SEQ ID NO: 178270 - DNA, 30 bp, Artificial Sequence
  Synthetic oligonucleotide
ttgagaaatcctgggatcaatgactggtgg

SEQ ID NO: 178271 - DNA, 30 bp, Artificial Sequence
  Synthetic oligonucleotide
gatacctggccgaattaattgtcgtggtgg

SEQ ID NO: 178272 - DNA, 30 bp, Artificial Sequence
  Synthetic oligonucleotide
taccaagtctttattgtggtggattggtgg

SEQ ID NO: 178273 - DNA, 30 bp, Artificial Sequence
  Synthetic oligonucleotide
gtataatgcgaaaggacatcgaaactgtgg

SEQ ID NO: 178274 - DNA, 30 bp, Artificial Sequence
  Synthetic oligonucleotide
aggcagttgtcgggaaccgtacaactgtgg

SEQ ID NO: 178275 - DNA, 30 bp, Artificial Sequence
  Synthetic oligonucleotide
acgttgaaatctctattattggagctgtgg

SEQ ID NO: 178276 - DNA, 30 bp, Artificial Sequence
  Synthetic oligonucleotide
gagccttaccacgtcaaacgtgcagtgtgg

SEQ ID NO: 178277 - DNA, 30 bp, Artificial Sequence
  Synthetic oligonucleotide
tcgagtgagtaaaccgaaattttagtgtgg

SEQ ID NO: 178278 - DNA, 30 bp, Artificial Sequence
  Synthetic oligonucleotide
acgggtccttcgcaagctcgttgtgtgtgg

SEQ ID NO: 178279 - DNA, 30 bp, Artificial Sequence
  Synthetic oligonucleotide
tatctaggatgtggaggatctcagttgtgg

SEQ ID NO: 178280 - DNA, 30 bp, Artificial Sequence
  Synthetic oligonucleotide
tgaactcgtcgaagtcgattaacaaattgg

SEQ ID NO: 178281 - DNA, 30 bp, Artificial Sequence
  Synthetic oligonucleotide
gtatctgtgcgtaggacattgatacattgg

SEQ ID NO: 178282 - DNA, 30 bp, Artificial Sequence
  Synthetic oligonucleotide
cgccgcaagacgggcctgaatttacattgg

SEQ ID NO: 178283 - DNA, 30 bp, Artificial Sequence
  Synthetic oligonucleotide
ggtgcctctgcattcttccgagcccattgg

SEQ ID NO: 178284 - DNA, 30 bp, Artificial Sequence
  Synthetic oligonucleotide
gtgagaaaagcctatctatagtgccattgg

SEQ ID NO: 178285 - DNA, 30 bp, Artificial Sequence
  Synthetic oligonucleotide
acaccctgagtgcgagcggagtttcattgg

SEQ ID NO: 178286 - DNA, 30 bp, Artificial Sequence
  Synthetic oligonucleotide
ttggatctcttcagcggtccacacgattgg

SEQ ID NO: 178287 - DNA, 30 bp, Artificial Sequence
  Synthetic oligonucleotide
aggggcgtgtacgcatggcgccaggattgg

SEQ ID NO: 178288 - DNA, 30 bp, Artificial Sequence
  Synthetic oligonucleotide
tccttttccaagattctggggcatgattgg

SEQ ID NO: 178289 - DNA, 30 bp, Artificial Sequence
  Synthetic oligonucleotide
tggccgctatgccatgttatcagtgattgg

SEQ ID NO: 178290 - DNA, 30 bp, Artificial Sequence
  Synthetic oligonucleotide
cattgtggtcccctgtgggtagaatattgg

SEQ ID NO: 178291 - DNA, 30 bp, Artificial Sequence
  Synthetic oligonucleotide
gtgcgttcaccttcaccgtaaacatattgg

SEQ ID NO: 178292 - DNA, 30 bp, Artificial Sequence
  Synthetic oligonucleotide
ggtggtcccgtaggaatcaaggactattgg

SEQ ID NO: 178293 - DNA, 30 bp, Artificial Sequence
  Synthetic oligonucleotide
gcagtgaatgggcaacgtctgggctattgg

SEQ ID NO: 178294 - DNA, 30 bp, Artificial Sequence
  Synthetic oligonucleotide
agcgtcatataaacagcggtacagtattgg

SEQ ID NO: 178295 - DNA, 30 bp, Artificial Sequence
  Synthetic oligonucleotide
ataagggaattggagcggtaatgttattgg

SEQ ID NO: 178296 - DNA, 30 bp, Artificial Sequence
  Synthetic oligonucleotide
aacactgcatggtaggattgtaccacttgg

SEQ ID NO: 178297 - DNA, 30 bp, Artificial Sequence
  Synthetic oligonucleotide
gagtaagaaccaacgaggctggagacttgg

SEQ ID NO: 178298 - DNA, 30 bp, Artificial Sequence
  Synthetic oligonucleotide
tagaccgcgatcagatatccggggacttgg

SEQ ID NO: 178299 - DNA, 30 bp, Artificial Sequence
  Synthetic oligonucleotide
tactctatcaagagttaactacgaccttgg

SEQ ID NO: 178300 - DNA, 30 bp, Artificial Sequence
  Synthetic oligonucleotide
aggagaaggagacagcggttcgcgccttgg

SEQ ID NO: 178301 - DNA, 30 bp, Artificial Sequence
  Synthetic oligonucleotide
cgacatcatccgtttacaagcaggccttgg

SEQ ID NO: 178302 - DNA, 30 bp, Artificial Sequence
  Synthetic oligonucleotide
gagcgctctttcgaaccgggtgggccttgg

SEQ ID NO: 178303 - DNA, 30 bp, Artificial Sequence
  Synthetic oligonucleotide
tcaacccgggggaaaatggctttagcttgg

SEQ ID NO: 178304 - DNA, 30 bp, Artificial Sequence
  Synthetic oligonucleotide
ggcatacacacatcactatcctgctcttgg

SEQ ID NO: 178305 - DNA, 30 bp, Artificial Sequence
  Synthetic oligonucleotide
ggattcaaccgaaagggtcataagtcttgg

SEQ ID NO: 178306 - DNA, 30 bp, Artificial Sequence
  Synthetic oligonucleotide
gagcgtgacacgcccttaagacggtcttgg

SEQ ID NO: 178307 - DNA, 30 bp, Artificial Sequence
  Synthetic oligonucleotide
taattcagacggagaactatcataagttgg

SEQ ID NO: 178308 - DNA, 30 bp, Artificial Sequence
  Synthetic oligonucleotide
tgcgatgaggattagttgccacggagttgg

SEQ ID NO: 178309 - DNA, 30 bp, Artificial Sequence
  Synthetic oligonucleotide
tcatctgaaatggcctgccaggagcgttgg

SEQ ID NO: 178310 - DNA, 30 bp, Artificial Sequence
  Synthetic oligonucleotide
ttgtacggcaggttttgtatctaaggttgg

SEQ ID NO: 178311 - DNA, 30 bp, Artificial Sequence
  Synthetic oligonucleotide
caagcagtctgtgcaagtgtgagaggttgg

SEQ ID NO: 178312 - DNA, 30 bp, Artificial Sequence
  Synthetic oligonucleotide
cgggataaaggttcgattctagtatgttgg

SEQ ID NO: 178313 - DNA, 30 bp, Artificial Sequence
  Synthetic oligonucleotide
agggtaaacagagcaaactggcgttgttgg

SEQ ID NO: 178314 - DNA, 30 bp, Artificial Sequence
  Synthetic oligonucleotide
gactcctgtgcgaagtgagatttttgttgg

SEQ ID NO: 178315 - DNA, 30 bp, Artificial Sequence
  Synthetic oligonucleotide
aatggaaggcacccgaaaaaccgaatttgg

SEQ ID NO: 178316 - DNA, 30 bp, Artificial Sequence
  Synthetic oligonucleotide
tcaaagtcaatgtcatcggggattatttgg

SEQ ID NO: 178317 - DNA, 30 bp, Artificial Sequence
  Synthetic oligonucleotide
accaaccccacctgactacttatactttgg

SEQ ID NO: 178318 - DNA, 30 bp, Artificial Sequence
  Synthetic oligonucleotide
aatggagagaaattgggccgcaccctttgg

SEQ ID NO: 178319 - DNA, 30 bp, Artificial Sequence
  Synthetic oligonucleotide
caatagtactaagtagttgagtagctttgg

SEQ ID NO: 178320 - DNA, 30 bp, Artificial Sequence
  Synthetic oligonucleotide
ttctaagacttcaacagaactgatctttgg

SEQ ID NO: 178321 - DNA, 30 bp, Artificial Sequence
  Synthetic oligonucleotide
acgaactaatcgtctgttaaggaggtttgg

SEQ ID NO: 178322 - DNA, 30 bp, Artificial Sequence
  Synthetic oligonucleotide
gcgggttccagcaggaggctttatgtttgg

SEQ ID NO: 178323 - DNA, 30 bp, Artificial Sequence
  Synthetic oligonucleotide
tttaagcgtggataactgtattctgtttgg

SEQ ID NO: 178324 - DNA, 30 bp, Artificial Sequence
  Synthetic oligonucleotide
tcaccaaaaacgtgtccgagcagtgtttgg

SEQ ID NO: 178325 - DNA, 30 bp, Artificial Sequence
  Synthetic oligonucleotide
tttgagatctcggacctggatagattttgg

SEQ ID NO: 178326 - DNA, 30 bp, Artificial Sequence
  Synthetic oligonucleotide
gtaaaacaaggcccaccgacttacttttgg

SEQ ID NO: 178327 - DNA, 30 bp, Artificial Sequence
  Synthetic oligonucleotide
actagaccggctatctttataaatttttgg

SEQ ID NO: 178328 - DNA, 30 bp, Artificial Sequence
  Synthetic oligonucleotide
tgatattgcgagggtaagtaaggtttttgg

SEQ ID NO: 178329 - DNA, 30 bp, Artificial Sequence
  Synthetic oligonucleotide
gctcatgcgtctgatttgacggaaaaaatg

SEQ ID NO: 178330 - DNA, 30 bp, Artificial Sequence
  Synthetic oligonucleotide
tgtcagcaggtttgtattcatgaaaaaatg

SEQ ID NO: 178331 - DNA, 30 bp, Artificial Sequence
  Synthetic oligonucleotide
cttaacgtcggtatgtagtggcccaaaatg

SEQ ID NO: 178332 - DNA, 30 bp, Artificial Sequence
  Synthetic oligonucleotide
cagggtatcaaacgtcctttgacgaaaatg

SEQ ID NO: 178333 - DNA, 30 bp, Artificial Sequence
  Synthetic oligonucleotide
atcgctgccttggttgaggaacgtaaaatg

SEQ ID NO: 178334 - DNA, 30 bp, Artificial Sequence
  Synthetic oligonucleotide
tttgggcatattccagagagagtccaaatg

SEQ ID NO: 178335 - DNA, 30 bp, Artificial Sequence
  Synthetic oligonucleotide
ctggaagccattacatataattagcaaatg

SEQ ID NO: 178336 - DNA, 30 bp, Artificial Sequence
  Synthetic oligonucleotide
aacatgacgcgtgcctggtgtacgcaaatg

SEQ ID NO: 178337 - DNA, 30 bp, Artificial Sequence
  Synthetic oligonucleotide
tagtcctgagtctactcagttcatcaaatg

SEQ ID NO: 178338 - DNA, 30 bp, Artificial Sequence
  Synthetic oligonucleotide
acgaatggctcctgatacaagtgagaaatg

SEQ ID NO: 178339 - DNA, 30 bp, Artificial Sequence
  Synthetic oligonucleotide
actgggtaccgctgctgccgagaataaatg

SEQ ID NO: 178340 - DNA, 30 bp, Artificial Sequence
  Synthetic oligonucleotide
catactgatcggggaaatcggggataaatg

SEQ ID NO: 178341 - DNA, 30 bp, Artificial Sequence
  Synthetic oligonucleotide
cccgtaggcttagggacgtaatcttaaatg

SEQ ID NO: 178342 - DNA, 30 bp, Artificial Sequence
  Synthetic oligonucleotide
ccggatcctcggggtgcacacaacacaatg

SEQ ID NO: 178343 - DNA, 30 bp, Artificial Sequence
  Synthetic oligonucleotide
acgggacggatccaagcccgcaacacaatg

SEQ ID NO: 178344 - DNA, 30 bp, Artificial Sequence
  Synthetic oligonucleotide
cgatcagatccagttttatgcgacacaatg

SEQ ID NO: 178345 - DNA, 30 bp, Artificial Sequence
  Synthetic oligonucleotide
ggggggtcttgagtcagactggtaccaatg

SEQ ID NO: 178346 - DNA, 30 bp, Artificial Sequence
  Synthetic oligonucleotide
ggcgagcgtggttccaatggcaagccaatg

SEQ ID NO: 178347 - DNA, 30 bp, Artificial Sequence
  Synthetic oligonucleotide
gccgtggttcgaatctccgttcggccaatg

SEQ ID NO: 178348 - DNA, 30 bp, Artificial Sequence
  Synthetic oligonucleotide
ccaaccaattaagtctcaccatggccaatg

SEQ ID NO: 178349 - DNA, 30 bp, Artificial Sequence
  Synthetic oligonucleotide
gccatagggagcccggttgaatatccaatg

SEQ ID NO: 178350 - DNA, 30 bp, Artificial Sequence
  Synthetic oligonucleotide
ggggtgtcataccggaaccgcattccaatg

SEQ ID NO: 178351 - DNA, 30 bp, Artificial Sequence
  Synthetic oligonucleotide
gaccgcgtctgtgtcaccgtcttagcaatg

SEQ ID NO: 178352 - DNA, 30 bp, Artificial Sequence
  Synthetic oligonucleotide
gttaccagccgacccagtctgggcgcaatg

SEQ ID NO: 178353 - DNA, 30 bp, Artificial Sequence
  Synthetic oligonucleotide
tctgaacgggcctatgacaacctcgcaatg

SEQ ID NO: 178354 - DNA, 30 bp, Artificial Sequence
  Synthetic oligonucleotide
atgcattccagtcggaattagctcgcaatg

SEQ ID NO: 178355 - DNA, 30 bp, Artificial Sequence
  Synthetic oligonucleotide
taatgagtcatactcatccgagtcgcaatg

SEQ ID NO: 178356 - DNA, 30 bp, Artificial Sequence
  Synthetic oligonucleotide
ccgcgattctccgccggatcccaatcaatg

SEQ ID NO: 178357 - DNA, 30 bp, Artificial Sequence
  Synthetic oligonucleotide
gtgaataagtacggcataacaccatcaatg

SEQ ID NO: 178358 - DNA, 30 bp, Artificial Sequence
  Synthetic oligonucleotide
aaggtgtaggtgactacgtccgcctcaatg

SEQ ID NO: 178359 - DNA, 30 bp, Artificial Sequence
  Synthetic oligonucleotide
tcagtacttcgtctttcaacccagtcaatg

SEQ ID NO: 178360 - DNA, 30 bp, Artificial Sequence
  Synthetic oligonucleotide
gcttagcacgcaaaccgtgcttattcaatg

SEQ ID NO: 178361 - DNA, 30 bp, Artificial Sequence
  Synthetic oligonucleotide
gacgagtgaggagaagtcctaagttcaatg

SEQ ID NO: 178362 - DNA, 30 bp, Artificial Sequence
  Synthetic oligonucleotide
aaactcaggtggtattagaaaatttcaatg

SEQ ID NO: 178363 - DNA, 30 bp, Artificial Sequence
  Synthetic oligonucleotide
atgaggagcgcacgggaacggttcagaatg

SEQ ID NO: 178364 - DNA, 30 bp, Artificial Sequence
  Synthetic oligonucleotide
gtatcgggtgcacgagcatagaatagaatg

SEQ ID NO: 178365 - DNA, 30 bp, Artificial Sequence
  Synthetic oligonucleotide
ttagatgacacacggccgcaatgtagaatg

SEQ ID NO: 178366 - DNA, 30 bp, Artificial Sequence
  Synthetic oligonucleotide
acctaaaatacgtgtcccctgcttagaatg

SEQ ID NO: 178367 - DNA, 30 bp, Artificial Sequence
  Synthetic oligonucleotide
gacctcgtagtacggatgtgaccccgaatg

SEQ ID NO: 178368 - DNA, 30 bp, Artificial Sequence
  Synthetic oligonucleotide
aatacatgacccgaacggagtagccgaatg

SEQ ID NO: 178369 - DNA, 30 bp, Artificial Sequence
  Synthetic oligonucleotide
tgctaggaccactcaatcgggtgccgaatg

SEQ ID NO: 178370 - DNA, 30 bp, Artificial Sequence
  Synthetic oligonucleotide
ctggagattagatgggcaatagggcgaatg

SEQ ID NO: 178371 - DNA, 30 bp, Artificial Sequence
  Synthetic oligonucleotide
tcacccctctctccaatccctgtgcgaatg

SEQ ID NO: 178372 - DNA, 30 bp, Artificial Sequence
  Synthetic oligonucleotide
aaggacggagctagtatctgacctcgaatg

SEQ ID NO: 178373 - DNA, 30 bp, Artificial Sequence
  Synthetic oligonucleotide
gaagacgatctttacacgaatcttcgaatg

SEQ ID NO: 178374 - DNA, 30 bp, Artificial Sequence
  Synthetic oligonucleotide
cgggattatagtagtgtcggaccaggaatg

SEQ ID NO: 178375 - DNA, 30 bp, Artificial Sequence
  Synthetic oligonucleotide
gttaatcgctgatttaggacgataggaatg

SEQ ID NO: 178376 - DNA, 30 bp, Artificial Sequence
  Synthetic oligonucleotide
ataaattcacatcatcgcaagcagggaatg

SEQ ID NO: 178377 - DNA, 30 bp, Artificial Sequence
  Synthetic oligonucleotide
actcgcaggttaaatttcaagtttggaatg

SEQ ID NO: 178378 - DNA, 30 bp, Artificial Sequence
  Synthetic oligonucleotide
gagcaacgcctagtaagaggcaaatgaatg

SEQ ID NO: 178379 - DNA, 30 bp, Artificial Sequence
  Synthetic oligonucleotide
atttacgctggcgagctcgtggcatgaatg

SEQ ID NO: 178380 - DNA, 30 bp, Artificial Sequence
  Synthetic oligonucleotide
tcctccaggctgccgacatatgcatgaatg

SEQ ID NO: 178381 - DNA, 30 bp, Artificial Sequence
  Synthetic oligonucleotide
acagggagttgatatcaccttcactgaatg

SEQ ID NO: 178382 - DNA, 30 bp, Artificial Sequence
  Synthetic oligonucleotide
aaaacgacaacaaagattcctgattgaatg

SEQ ID NO: 178383 - DNA, 30 bp, Artificial Sequence
  Synthetic oligonucleotide
gatgctatgcgacagactttatcttgaatg

SEQ ID NO: 178384 - DNA, 30 bp, Artificial Sequence
  Synthetic oligonucleotide
acatgaggaaggcattcactctgttgaatg

SEQ ID NO: 178385 - DNA, 30 bp, Artificial Sequence
  Synthetic oligonucleotide
aggagagatccatatatgagaacaataatg

SEQ ID NO: 178386 - DNA, 30 bp, Artificial Sequence
  Synthetic oligonucleotide
tgcgtggagatactagtgctctccataatg

SEQ ID NO: 178387 - DNA, 30 bp, Artificial Sequence
  Synthetic oligonucleotide
aatatttcgcggatccacggcccgataatg

SEQ ID NO: 178388 - DNA, 30 bp, Artificial Sequence
  Synthetic oligonucleotide
ccttcccaccgggtgcacatggcgataatg

SEQ ID NO: 178389 - DNA, 30 bp, Artificial Sequence
  Synthetic oligonucleotide
gatatggtccacccgactactgggataatg

SEQ ID NO: 178390 - DNA, 30 bp, Artificial Sequence
  Synthetic oligonucleotide
gttaccgccgggcgtacggtagtgataatg

SEQ ID NO: 178391 - DNA, 30 bp, Artificial Sequence
  Synthetic oligonucleotide
gggtcctacgggaaggcggcgaaactaatg

SEQ ID NO: 178392 - DNA, 30 bp, Artificial Sequence
  Synthetic oligonucleotide
agtcaccagaaaagtttgtcttaactaatg

SEQ ID NO: 178393 - DNA, 30 bp, Artificial Sequence
  Synthetic oligonucleotide
tgtctacactctatagaaacgcgactaatg

SEQ ID NO: 178394 - DNA, 30 bp, Artificial Sequence
  Synthetic oligonucleotide
tggaggaaactctaagtctcaacgctaatg

SEQ ID NO: 178395 - DNA, 30 bp, Artificial Sequence
  Synthetic oligonucleotide
accgcatctgtggactgaagtatgctaatg

SEQ ID NO: 178396 - DNA, 30 bp, Artificial Sequence
  Synthetic oligonucleotide
tcctattcaggatcaaagccgtaagtaatg

SEQ ID NO: 178397 - DNA, 30 bp, Artificial Sequence
  Synthetic oligonucleotide
agaattaaggctctcttattcacagtaatg

SEQ ID NO: 178398 - DNA, 30 bp, Artificial Sequence
  Synthetic oligonucleotide
cgagagaggaaggcttggggtttagtaatg

SEQ ID NO: 178399 - DNA, 30 bp, Artificial Sequence
  Synthetic oligonucleotide
ataagccttgtataatatagtgccgtaatg

SEQ ID NO: 178400 - DNA, 30 bp, Artificial Sequence
  Synthetic oligonucleotide
taggagagggtggatttcaccggggtaatg

SEQ ID NO: 178401 - DNA, 30 bp, Artificial Sequence
  Synthetic oligonucleotide
tgtggtcaaccgcaatacctggtggtaatg

SEQ ID NO: 178402 - DNA, 30 bp, Artificial Sequence
  Synthetic oligonucleotide
tcatggtggacacaggcttacttggtaatg

SEQ ID NO: 178403 - DNA, 30 bp, Artificial Sequence
  Synthetic oligonucleotide
ttcgttcgtaaaatggtcatgcatgtaatg

SEQ ID NO: 178404 - DNA, 30 bp, Artificial Sequence
  Synthetic oligonucleotide
caaatcggggtgtctccacgaattgtaatg

SEQ ID NO: 178405 - DNA, 30 bp, Artificial Sequence
  Synthetic oligonucleotide
gtatgctaacgttcatagatcttattaatg

SEQ ID NO: 178406 - DNA, 31 bp, Artificial Sequence
  Synthetic oligonucleotide
tgggaagattaattatgtcacagacttaatg

SEQ ID NO: 178407 - DNA, 30 bp, Artificial Sequence
  Synthetic oligonucleotide
ttatgcgtactgttcgaaacatacttaatg

SEQ ID NO: 178408 - DNA, 30 bp, Artificial Sequence
  Synthetic oligonucleotide
gctccgttcggaccgcctgaggagttaatg

SEQ ID NO: 178409 - DNA, 30 bp, Artificial Sequence
  Synthetic oligonucleotide
atgagtgaccctgcatacgaccctttaatg

SEQ ID NO: 178410 - DNA, 30 bp, Artificial Sequence
  Synthetic oligonucleotide
atacaagacgacttgaggaggtctttaatg

SEQ ID NO: 178411 - DNA, 30 bp, Artificial Sequence
  Synthetic oligonucleotide
aaaagggggacctatagcttgacaaacatg

SEQ ID NO: 178412 - DNA, 30 bp, Artificial Sequence
  Synthetic oligonucleotide
tgggaatttttagaggtatggggaaacatg

SEQ ID NO: 178413 - DNA, 30 bp, Artificial Sequence
  Synthetic oligonucleotide
caccatccatcgttagtttccctaaacatg

SEQ ID NO: 178414 - DNA, 30 bp, Artificial Sequence
  Synthetic oligonucleotide
gctctacggactaaagggacaagcaacatg

SEQ ID NO: 178415 - DNA, 30 bp, Artificial Sequence
  Synthetic oligonucleotide
tgggacgaatgcctgtaagcatgcaacatg

SEQ ID NO: 178416 - DNA, 30 bp, Artificial Sequence
  Synthetic oligonucleotide
tctctcaatagggatacctgcatcaacatg

SEQ ID NO: 178417 - DNA, 30 bp, Artificial Sequence
  Synthetic oligonucleotide
cggggtagcctgacactaagcccgaacatg

SEQ ID NO: 178418 - DNA, 30 bp, Artificial Sequence
  Synthetic oligonucleotide
cgggggtttcgtaagtcggtgggtaacatg

SEQ ID NO: 178419 - DNA, 30 bp, Artificial Sequence
  Synthetic oligonucleotide
gataattaacaattggcatgtttacacatg

SEQ ID NO: 178420 - DNA, 30 bp, Artificial Sequence
  Synthetic oligonucleotide
ttcgtaccccctgaacattctaaccacatg

SEQ ID NO: 178421 - DNA, 30 bp, Artificial Sequence
  Synthetic oligonucleotide
gtgggtaaggttacgggctcagtccacatg

SEQ ID NO: 178422 - DNA, 30 bp, Artificial Sequence
  Synthetic oligonucleotide
tcatggaggtcgcgtaaaaggctgcacatg

SEQ ID NO: 178423 - DNA, 30 bp, Artificial Sequence
  Synthetic oligonucleotide
gacgcggcgtgggagcggtgacatcacatg

SEQ ID NO: 178424 - DNA, 30 bp, Artificial Sequence
  Synthetic oligonucleotide
atagacggtggaggttgtccacaggacatg

SEQ ID NO: 178425 - DNA, 30 bp, Artificial Sequence
  Synthetic oligonucleotide
caggaataaaccaaaaagttcatggacatg

SEQ ID NO: 178426 - DNA, 30 bp, Artificial Sequence
  Synthetic oligonucleotide
atacccaatggggtaaacaacggatacatg

SEQ ID NO: 178427 - DNA, 30 bp, Artificial Sequence
  Synthetic oligonucleotide
ccacatcagaatggatataagccctacatg

SEQ ID NO: 178428 - DNA, 30 bp, Artificial Sequence
  Synthetic oligonucleotide
atagccattgaactacgggagccctacatg

SEQ ID NO: 178429 - DNA, 30 bp, Artificial Sequence
  Synthetic oligonucleotide
tcaatgcgtggatgagatgaagggtacatg

SEQ ID NO: 178430 - DNA, 30 bp, Artificial Sequence
  Synthetic oligonucleotide
taaggtcttgcctgtatagtgtcaaccatg

SEQ ID NO: 178431 - DNA, 30 bp, Artificial Sequence
  Synthetic oligonucleotide
atctatgtatctcacgtcaatggaaccatg

SEQ ID NO: 178432 - DNA, 30 bp, Artificial Sequence
  Synthetic oligonucleotide
tgggcgcatgtggctacaggcccgaccatg

SEQ ID NO: 178433 - DNA, 30 bp, Artificial Sequence
  Synthetic oligonucleotide
tggactgtgttacctatgcatgtgaccatg

SEQ ID NO: 178434 - DNA, 30 bp, Artificial Sequence
  Synthetic oligonucleotide
ttggcgacctcgacatgacctaaagccatg

SEQ ID NO: 178435 - DNA, 30 bp, Artificial Sequence
  Synthetic oligonucleotide
ctacatcgtacactgtaagtaacagccatg

SEQ ID NO: 178436 - DNA, 30 bp, Artificial Sequence
  Synthetic oligonucleotide
tgcgaacgcttgatggacattactgccatg

SEQ ID NO: 178437 - DNA, 30 bp, Artificial Sequence
  Synthetic oligonucleotide
actagagcattatgcgctaagtttgccatg

SEQ ID NO: 178438 - DNA, 30 bp, Artificial Sequence
  Synthetic oligonucleotide
aaaaataatctgacgacgattctatccatg

SEQ ID NO: 178439 - DNA, 30 bp, Artificial Sequence
  Synthetic oligonucleotide
aggtgtccagggggcgctcatccttccatg

SEQ ID NO: 178440 - DNA, 30 bp, Artificial Sequence
  Synthetic oligonucleotide
atcccaagtaaacgacaaggctgaagcatg

SEQ ID NO: 178441 - DNA, 30 bp, Artificial Sequence
  Synthetic oligonucleotide
ggaccaacgtcttgctccctatacagcatg

SEQ ID NO: 178442 - DNA, 30 bp, Artificial Sequence
  Synthetic oligonucleotide
ctgaccgaaacaaccgggcgcatgagcatg

SEQ ID NO: 178443 - DNA, 30 bp, Artificial Sequence
  Synthetic oligonucleotide
ggaaaagatgcgttcccgcccgtgagcatg

SEQ ID NO: 178444 - DNA, 30 bp, Artificial Sequence
  Synthetic oligonucleotide
ctacaattgatagggtgggacgaacgcatg

SEQ ID NO: 178445 - DNA, 30 bp, Artificial Sequence
  Synthetic oligonucleotide
cgtttgcgtaggattaaagtgtagcgcatg

SEQ ID NO: 178446 - DNA, 30 bp, Artificial Sequence
  Synthetic oligonucleotide
cgctattcgggcatggaaggtaatcgcatg

SEQ ID NO: 178447 - DNA, 30 bp, Artificial Sequence
  Synthetic oligonucleotide
tttggagctcctatgcacaagacaggcatg

SEQ ID NO: 178448 - DNA, 30 bp, Artificial Sequence
  Synthetic oligonucleotide
actcgcgcatcagttcgtaaaccaggcatg

SEQ ID NO: 178449 - DNA, 30 bp, Artificial Sequence
  Synthetic oligonucleotide
taatcctcgccgcggagaggcaccggcatg

SEQ ID NO: 178450 - DNA, 30 bp, Artificial Sequence
  Synthetic oligonucleotide
gggtaaccggttgatgacgttgcgggcatg

SEQ ID NO: 178451 - DNA, 30 bp, Artificial Sequence
  Synthetic oligonucleotide
catatttcacccaatcagcacacctgcatg

SEQ ID NO: 178452 - DNA, 30 bp, Artificial Sequence
  Synthetic oligonucleotide
ccgtaagacaagcacagtactcagtgcatg

SEQ ID NO: 178453 - DNA, 30 bp, Artificial Sequence
  Synthetic oligonucleotide
gccttgtcatagccgccctatgagtgcatg

SEQ ID NO: 178454 - DNA, 30 bp, Artificial Sequence
  Synthetic oligonucleotide
cctaaagagagggatatggtcccttgcatg

SEQ ID NO: 178455 - DNA, 30 bp, Artificial Sequence
  Synthetic oligonucleotide
gcgatgcaaatcagaccaaggtcttgcatg

SEQ ID NO: 178456 - DNA, 30 bp, Artificial Sequence
  Synthetic oligonucleotide
ataaaacaagtggtaagccgcatttgcatg

SEQ ID NO: 178457 - DNA, 30 bp, Artificial Sequence
  Synthetic oligonucleotide
tcgtataatgaacaaactatgttaatcatg

SEQ ID NO: 178458 - DNA, 30 bp, Artificial Sequence
  Synthetic oligonucleotide
tggagactcgcttgcgcttaaggcatcatg

SEQ ID NO: 178459 - DNA, 30 bp, Artificial Sequence
  Synthetic oligonucleotide
aaccgtgaagacctacgtcatatcatcatg

SEQ ID NO: 178460 - DNA, 30 bp, Artificial Sequence
  Synthetic oligonucleotide
ccgttaacatgctcgatgccccagatcatg

SEQ ID NO: 178461 - DNA, 30 bp, Artificial Sequence
  Synthetic oligonucleotide
gaggctgtttagcccagtatgctgatcatg

SEQ ID NO: 178462 - DNA, 30 bp, Artificial Sequence
  Synthetic oligonucleotide
atgattggaggaaaggttagtgtgatcatg

SEQ ID NO: 178463 - DNA, 30 bp, Artificial Sequence
  Synthetic oligonucleotide
gcctcagacggatcctggtagagtatcatg

SEQ ID NO: 178464 - DNA, 30 bp, Artificial Sequence
  Synthetic oligonucleotide
gatacctccttaccagccaacccactcatg

SEQ ID NO: 178465 - DNA, 30 bp, Artificial Sequence
  Synthetic oligonucleotide
tcgtgcttgcattccaaattgaccctcatg

SEQ ID NO: 178466 - DNA, 30 bp, Artificial Sequence
  Synthetic oligonucleotide
ggccaaaagtatctacaagagctcctcatg

SEQ ID NO: 178467 - DNA, 30 bp, Artificial Sequence
  Synthetic oligonucleotide
cgtgacgtggatctgagagtggctctcatg

SEQ ID NO: 178468 - DNA, 30 bp, Artificial Sequence
  Synthetic oligonucleotide
tatactagtacggggaacacgtcggtcatg

SEQ ID NO: 178469 - DNA, 30 bp, Artificial Sequence
  Synthetic oligonucleotide
ttatctccagtgatgtcgttacaattcatg

SEQ ID NO: 178470 - DNA, 30 bp, Artificial Sequence
  Synthetic oligonucleotide
gagctccgctgcgtcgataggtgattcatg

SEQ ID NO: 178471 - DNA, 30 bp, Artificial Sequence
  Synthetic oligonucleotide
tggcgatggcgacgggatgacactttcatg

SEQ ID NO: 178472 - DNA, 30 bp, Artificial Sequence
  Synthetic oligonucleotide
accaaagttcgttcaaggcggtgaaagatg

SEQ ID NO: 178473 - DNA, 30 bp, Artificial Sequence
  Synthetic oligonucleotide
tagcctggaaaattcaggctatagaagatg

SEQ ID NO: 178474 - DNA, 30 bp, Artificial Sequence
  Synthetic oligonucleotide
gcaatcacaacgatcgtcgaagggaagatg

SEQ ID NO: 178475 - DNA, 30 bp, Artificial Sequence
  Synthetic oligonucleotide
taaactgttaagggccgccgcgataagatg

SEQ ID NO: 178476 - DNA, 30 bp, Artificial Sequence
  Synthetic oligonucleotide
gtgtcaggctggggcgcatcataacagatg

SEQ ID NO: 178477 - DNA, 30 bp, Artificial Sequence
  Synthetic oligonucleotide
acccgttacgtcggcaggctaagacagatg

SEQ ID NO: 178478 - DNA, 30 bp, Artificial Sequence
  Synthetic oligonucleotide
gcgactaatagatggtccactgtccagatg

SEQ ID NO: 178479 - DNA, 30 bp, Artificial Sequence
  Synthetic oligonucleotide
ctgatctctgcatagtgcacgaggcagatg

SEQ ID NO: 178480 - DNA, 30 bp, Artificial Sequence
  Synthetic oligonucleotide
ggtttaacagcacctaatcgtttgcagatg

SEQ ID NO: 178481 - DNA, 30 bp, Artificial Sequence
  Synthetic oligonucleotide
agatgattttttatgcaccccaatcagatg

SEQ ID NO: 178482 - DNA, 30 bp, Artificial Sequence
  Synthetic oligonucleotide
taagcgctggtataaagtagttgtcagatg

SEQ ID NO: 178483 - DNA, 30 bp, Artificial Sequence
  Synthetic oligonucleotide
cacttaccaccggaaaaacaatttcagatg

SEQ ID NO: 178484 - DNA, 30 bp, Artificial Sequence
  Synthetic oligonucleotide
gtcataagtttttcatatcacgtagagatg

SEQ ID NO: 178485 - DNA, 30 bp, Artificial Sequence
  Synthetic oligonucleotide
agattctgatgggctatcgttagcgagatg

SEQ ID NO: 178486 - DNA, 30 bp, Artificial Sequence
  Synthetic oligonucleotide
gtctcgaagatatacgctcgtattgagatg

SEQ ID NO: 178487 - DNA, 30 bp, Artificial Sequence
  Synthetic oligonucleotide
gacggtgcgtgacagtagatggggtagatg

SEQ ID NO: 178488 - DNA, 30 bp, Artificial Sequence
  Synthetic oligonucleotide
cgtgggcccgtgcaatgacctcattagatg

SEQ ID NO: 178489 - DNA, 30 bp, Artificial Sequence
  Synthetic oligonucleotide
acggggggctgtagaccaaatctttagatg

SEQ ID NO: 178490 - DNA, 30 bp, Artificial Sequence
  Synthetic oligonucleotide
agggcttagacattcggacattgaacgatg

SEQ ID NO: 178491 - DNA, 30 bp, Artificial Sequence
  Synthetic oligonucleotide
tcggcagtaagatatcttcctttaacgatg

SEQ ID NO: 178492 - DNA, 30 bp, Artificial Sequence
  Synthetic oligonucleotide
agcttagagggggtagaccgtgccacgatg

SEQ ID NO: 178493 - DNA, 30 bp, Artificial Sequence
  Synthetic oligonucleotide
tcggggacgtacggactgcgaagcacgatg

SEQ ID NO: 178494 - DNA, 30 bp, Artificial Sequence
  Synthetic oligonucleotide
gtaggctggatgacatgcatgtctacgatg

SEQ ID NO: 178495 - DNA, 30 bp, Artificial Sequence
  Synthetic oligonucleotide
cagaggcctacgtacttatctgttacgatg

SEQ ID NO: 178496 - DNA, 30 bp, Artificial Sequence
  Synthetic oligonucleotide
acgacgtcaataagcactgcgtgaccgatg

SEQ ID NO: 178497 - DNA, 30 bp, Artificial Sequence
  Synthetic oligonucleotide
acgaccggcctatgaaatcaacgcccgatg

SEQ ID NO: 178498 - DNA, 30 bp, Artificial Sequence
  Synthetic oligonucleotide
gcaatacatgcttaacccacagggccgatg

SEQ ID NO: 178499 - DNA, 30 bp, Artificial Sequence
  Synthetic oligonucleotide
aaggttaggccgaggtaaaatcgggcgatg

SEQ ID NO: 178500 - DNA, 30 bp, Artificial Sequence
  Synthetic oligonucleotide
agaacgtgtgtgtctttccagaatgcgatg

SEQ ID NO: 178501 - DNA, 30 bp, Artificial Sequence
  Synthetic oligonucleotide
acgcagagtttgatagtaggccgctcgatg

SEQ ID NO: 178502 - DNA, 30 bp, Artificial Sequence
  Synthetic oligonucleotide
aggccgcaaagcctacgagctgggtcgatg

SEQ ID NO: 178503 - DNA, 30 bp, Artificial Sequence
  Synthetic oligonucleotide
cggtagtttatacgatggtgtaaaaggatg

SEQ ID NO: 178504 - DNA, 30 bp, Artificial Sequence
  Synthetic oligonucleotide
cctattaaattcacaaagagcgacaggatg

SEQ ID NO: 178505 - DNA, 30 bp, Artificial Sequence
  Synthetic oligonucleotide
cgtggtccgtcacgcctttttacgaggatg

SEQ ID NO: 178506 - DNA, 30 bp, Artificial Sequence
  Synthetic oligonucleotide
ggctgagtccaactccaccccttgaggatg

SEQ ID NO: 178507 - DNA, 30 bp, Artificial Sequence
  Synthetic oligonucleotide
ctattgacggccttctatgtgtaccggatg

SEQ ID NO: 178508 - DNA, 30 bp, Artificial Sequence
  Synthetic oligonucleotide
tttaaaatcttggcgccacgtaagcggatg

SEQ ID NO: 178509 - DNA, 30 bp, Artificial Sequence
  Synthetic oligonucleotide
agtgggcgtcgtctatggggtcaagggatg

SEQ ID NO: 178510 - DNA, 30 bp, Artificial Sequence
  Synthetic oligonucleotide
gcccccagcggcacaatagactaggggatg

SEQ ID NO: 178511 - DNA, 30 bp, Artificial Sequence
  Synthetic oligonucleotide
aagtattgtaagttgctacttgactggatg

SEQ ID NO: 178512 - DNA, 30 bp, Artificial Sequence
  Synthetic oligonucleotide
tggtgtttgtgcggactttgctgctggatg

SEQ ID NO: 178513 - DNA, 30 bp, Artificial Sequence
  Synthetic oligonucleotide
ctccaccgttgtagtgtagaagagtggatg

SEQ ID NO: 178514 - DNA, 30 bp, Artificial Sequence
  Synthetic oligonucleotide
tgagctgtcttttttcccgcacattggatg

SEQ ID NO: 178515 - DNA, 30 bp, Artificial Sequence
  Synthetic oligonucleotide
gaccaaacggtcattcgacgtagttggatg

SEQ ID NO: 178516 - DNA, 30 bp, Artificial Sequence
  Synthetic oligonucleotide
agaagatggtacctttgaaatcgcatgatg

SEQ ID NO: 178517 - DNA, 30 bp, Artificial Sequence
  Synthetic oligonucleotide
agatgtgacagcactagccagctgatgatg

SEQ ID NO: 178518 - DNA, 30 bp, Artificial Sequence
  Synthetic oligonucleotide
ccaaagtgttgcctcgccgagaatatgatg

SEQ ID NO: 178519 - DNA, 30 bp, Artificial Sequence
  Synthetic oligonucleotide
gaaaccactcattagcgataccaactgatg

SEQ ID NO: 178520 - DNA, 30 bp, Artificial Sequence
  Synthetic oligonucleotide
cggttgaaaccctaagttgttccactgatg

SEQ ID NO: 178521 - DNA, 30 bp, Artificial Sequence
  Synthetic oligonucleotide
cggcgacttggcgggattgagaccctgatg

SEQ ID NO: 178522 - DNA, 30 bp, Artificial Sequence
  Synthetic oligonucleotide
gggttattgcttggccgccgccgcctgatg

SEQ ID NO: 178523 - DNA, 30 bp, Artificial Sequence
  Synthetic oligonucleotide
aacacggtaactccgcgcctcatcctgatg

SEQ ID NO: 178524 - DNA, 30 bp, Artificial Sequence
  Synthetic oligonucleotide
gtgacagcgcggtgctaagactagctgatg

SEQ ID NO: 178525 - DNA, 30 bp, Artificial Sequence
  Synthetic oligonucleotide
agtttcccaagacagtggggatctctgatg

SEQ ID NO: 178526 - DNA, 30 bp, Artificial Sequence
  Synthetic oligonucleotide
atcctccgggaaacccaaacacacgtgatg

SEQ ID NO: 178527 - DNA, 30 bp, Artificial Sequence
  Synthetic oligonucleotide
acacggataaatggcgggcctagggtgatg

SEQ ID NO: 178528 - DNA, 30 bp, Artificial Sequence
  Synthetic oligonucleotide
tgtgagcaggccctccgtaaagctgtgatg

SEQ ID NO: 178529 - DNA, 30 bp, Artificial Sequence
  Synthetic oligonucleotide
gcagacagcggtgcggcccagcgtgtgatg

SEQ ID NO: 178530 - DNA, 30 bp, Artificial Sequence
  Synthetic oligonucleotide
tctcattcatcccagctaacaattgtgatg

SEQ ID NO: 178531 - DNA, 30 bp, Artificial Sequence
  Synthetic oligonucleotide
tagggacaagcgcccattggaggattgatg

SEQ ID NO: 178532 - DNA, 30 bp, Artificial Sequence
  Synthetic oligonucleotide
tgtaacgcaccaatgttcacggtattgatg

SEQ ID NO: 178533 - DNA, 30 bp, Artificial Sequence
  Synthetic oligonucleotide
aaacaaagtcgaggtctgaacaggttgatg

SEQ ID NO: 178534 - DNA, 30 bp, Artificial Sequence
  Synthetic oligonucleotide
ggcgaggcttaggaagcttgacctttgatg

SEQ ID NO: 178535 - DNA, 30 bp, Artificial Sequence
  Synthetic oligonucleotide
tgggtccacaataatatatcagctttgatg

SEQ ID NO: 178536 - DNA, 30 bp, Artificial Sequence
  Synthetic oligonucleotide
tacaataaatgatgggtgggccgtttgatg

SEQ ID NO: 178537 - DNA, 30 bp, Artificial Sequence
  Synthetic oligonucleotide
ggtcgcgtttgtggcgggtagctaaatatg

SEQ ID NO: 178538 - DNA, 30 bp, Artificial Sequence
  Synthetic oligonucleotide
gctgaagagtaggtttacgaggacaatatg

SEQ ID NO: 178539 - DNA, 30 bp, Artificial Sequence
  Synthetic oligonucleotide
acatgcgatcttagttgtatgtcgaatatg

SEQ ID NO: 178540 - DNA, 30 bp, Artificial Sequence
  Synthetic oligonucleotide
gtcggaaccgtggggtgcgtttggaatatg

SEQ ID NO: 178541 - DNA, 30 bp, Artificial Sequence
  Synthetic oligonucleotide
ttaggtaactaggatcggtgggataatatg

SEQ ID NO: 178542 - DNA, 30 bp, Artificial Sequence
  Synthetic oligonucleotide
ggccatgctttatgagcatcagctaatatg

SEQ ID NO: 178543 - DNA, 30 bp, Artificial Sequence
  Synthetic oligonucleotide
actgggcaaacacgtctacggagccatatg

SEQ ID NO: 178544 - DNA, 30 bp, Artificial Sequence
  Synthetic oligonucleotide
acactggattgactaatcaactgccatatg

SEQ ID NO: 178545 - DNA, 30 bp, Artificial Sequence
  Synthetic oligonucleotide
ccagtgggcgctagtaagtacagtcatatg

SEQ ID NO: 178546 - DNA, 30 bp, Artificial Sequence
  Synthetic oligonucleotide
ccccatacctaaacccggggaagcgatatg

SEQ ID NO: 178547 - DNA, 30 bp, Artificial Sequence
  Synthetic oligonucleotide
gccttagctcggggggtttaaaatgatatg

SEQ ID NO: 178548 - DNA, 30 bp, Artificial Sequence
  Synthetic oligonucleotide
ctgagtcgtgctaatgatcatgatgatatg

SEQ ID NO: 178549 - DNA, 30 bp, Artificial Sequence
  Synthetic oligonucleotide
tacccagcatctgagatgggcggtgatatg

SEQ ID NO: 178550 - DNA, 30 bp, Artificial Sequence
  Synthetic oligonucleotide
tcagaaagtgcgtctacagagatatatatg

SEQ ID NO: 178551 - DNA, 30 bp, Artificial Sequence
  Synthetic oligonucleotide
actagattgtcaagacggtcaaactatatg

SEQ ID NO: 178552 - DNA, 30 bp, Artificial Sequence
  Synthetic oligonucleotide
agtctgaaacatctacattgtaactatatg

SEQ ID NO: 178553 - DNA, 30 bp, Artificial Sequence
  Synthetic oligonucleotide
ggttatttcttctatgcgtctacctatatg

SEQ ID NO: 178554 - DNA, 30 bp, Artificial Sequence
  Synthetic oligonucleotide
gcgcagtcttcggaaggtcacatctatatg

SEQ ID NO: 178555 - DNA, 30 bp, Artificial Sequence
  Synthetic oligonucleotide
gctcccgccgaatggttgtatgtctatatg

SEQ ID NO: 178556 - DNA, 30 bp, Artificial Sequence
  Synthetic oligonucleotide
gcaagtgtcaagtttaaaggggggtatatg

SEQ ID NO: 178557 - DNA, 30 bp, Artificial Sequence
  Synthetic oligonucleotide
taaccgacgagctacatcagccgttatatg

SEQ ID NO: 178558 - DNA, 30 bp, Artificial Sequence
  Synthetic oligonucleotide
taatcgtcgatatccatgaactgaactatg

SEQ ID NO: 178559 - DNA, 30 bp, Artificial Sequence
  Synthetic oligonucleotide
atgcaataggtggcgcactttaagactatg

SEQ ID NO: 178560 - DNA, 30 bp, Artificial Sequence
  Synthetic oligonucleotide
gaagactattataataacaaccagactatg

SEQ ID NO: 178561 - DNA, 30 bp, Artificial Sequence
  Synthetic oligonucleotide
caaattggtagacggcctgcccggactatg

SEQ ID NO: 178562 - DNA, 30 bp, Artificial Sequence
  Synthetic oligonucleotide
taggaaccgcccgacagaatcctacctatg

SEQ ID NO: 178563 - DNA, 30 bp, Artificial Sequence
  Synthetic oligonucleotide
cgatatgtagtcgtcagttcacagcctatg

SEQ ID NO: 178564 - DNA, 30 bp, Artificial Sequence
  Synthetic oligonucleotide
gcctaagagagtcgtccagaattgcctatg

SEQ ID NO: 178565 - DNA, 30 bp, Artificial Sequence
  Synthetic oligonucleotide
tagctggatgaaagaacgcccgctcctatg

SEQ ID NO: 178566 - DNA, 30 bp, Artificial Sequence
  Synthetic oligonucleotide
tataatgcatacattgccttatgtcctatg

SEQ ID NO: 178567 - DNA, 30 bp, Artificial Sequence
  Synthetic oligonucleotide
aatgtgtggccatcaaaaatctatgctatg

SEQ ID NO: 178568 - DNA, 30 bp, Artificial Sequence
  Synthetic oligonucleotide
gtaactacaagtgtgaaggcgagatctatg

SEQ ID NO: 178569 - DNA, 30 bp, Artificial Sequence
  Synthetic oligonucleotide
cggacttggtagaaactatacatgtctatg

SEQ ID NO: 178570 - DNA, 30 bp, Artificial Sequence
  Synthetic oligonucleotide
ggaacggactgacacaaggcagcttctatg

SEQ ID NO: 178571 - DNA, 30 bp, Artificial Sequence
  Synthetic oligonucleotide
taaggcaactttggatcacgttgcagtatg

SEQ ID NO: 178572 - DNA, 30 bp, Artificial Sequence
  Synthetic oligonucleotide
gccaacccactttttgacacccatagtatg

SEQ ID NO: 178573 - DNA, 30 bp, Artificial Sequence
  Synthetic oligonucleotide
cagtgggagattaaagcattatttagtatg

SEQ ID NO: 178574 - DNA, 30 bp, Artificial Sequence
  Synthetic oligonucleotide
tgcgatacatgcgataagtatacacgtatg

SEQ ID NO: 178575 - DNA, 30 bp, Artificial Sequence
  Synthetic oligonucleotide
ctgtaaacgtaacgcaagttaagacgtatg

SEQ ID NO: 178576 - DNA, 30 bp, Artificial Sequence
  Synthetic oligonucleotide
attgaaaggagaccaagcggggcccgtatg

SEQ ID NO: 178577 - DNA, 30 bp, Artificial Sequence
  Synthetic oligonucleotide
ttggtgagttaaatgactcagttccgtatg

SEQ ID NO: 178578 - DNA, 30 bp, Artificial Sequence
  Synthetic oligonucleotide
gtaatcacggacaagcggatagagcgtatg

SEQ ID NO: 178579 - DNA, 30 bp, Artificial Sequence
  Synthetic oligonucleotide
ggtgagtttacttgaagttgttggcgtatg

SEQ ID NO: 178580 - DNA, 30 bp, Artificial Sequence
  Synthetic oligonucleotide
ggacctcgatatgtatggtactaaggtatg

SEQ ID NO: 178581 - DNA, 30 bp, Artificial Sequence
  Synthetic oligonucleotide
caccaccatacatagtggagttaaggtatg

SEQ ID NO: 178582 - DNA, 30 bp, Artificial Sequence
  Synthetic oligonucleotide
ggatgctccagttgaagggactcatgtatg

SEQ ID NO: 178583 - DNA, 31 bp, Artificial Sequence
  Synthetic oligonucleotide
tagtaggagcgagcccctactgtcatgtatg

SEQ ID NO: 178584 - DNA, 30 bp, Artificial Sequence
  Synthetic oligonucleotide
tctctaactctacgaacttgtcgttgtatg

SEQ ID NO: 178585 - DNA, 30 bp, Artificial Sequence
  Synthetic oligonucleotide
taagatcaaggcgaaagtagtctttgtatg

SEQ ID NO: 178586 - DNA, 30 bp, Artificial Sequence
  Synthetic oligonucleotide
tattgaggtcccagtgtcggaagaattatg

SEQ ID NO: 178587 - DNA, 30 bp, Artificial Sequence
  Synthetic oligonucleotide
cacggctcaacgatcacaaaaatcattatg

SEQ ID NO: 178588 - DNA, 30 bp, Artificial Sequence
  Synthetic oligonucleotide
caggggtaagcgcttacgtagttcattatg

SEQ ID NO: 178589 - DNA, 30 bp, Artificial Sequence
  Synthetic oligonucleotide
ttatatctcagaatagatacccggattatg

SEQ ID NO: 178590 - DNA, 30 bp, Artificial Sequence
  Synthetic oligonucleotide
gataactccgaaccggtaccgattattatg

SEQ ID NO: 178591 - DNA, 30 bp, Artificial Sequence
  Synthetic oligonucleotide
ggcgatgaagatccgtcgcccatacttatg

SEQ ID NO: 178592 - DNA, 30 bp, Artificial Sequence
  Synthetic oligonucleotide
tagtctacttcactcgagttagatcttatg

SEQ ID NO: 178593 - DNA, 30 bp, Artificial Sequence
  Synthetic oligonucleotide
tatcagcaggggcgcagtagtgttcttatg

SEQ ID NO: 178594 - DNA, 30 bp, Artificial Sequence
  Synthetic oligonucleotide
gctaaatgcaggatattcaccggtgttatg

SEQ ID NO: 178595 - DNA, 30 bp, Artificial Sequence
  Synthetic oligonucleotide
tagaatcatgagaatacagtcgaatttatg

SEQ ID NO: 178596 - DNA, 30 bp, Artificial Sequence
  Synthetic oligonucleotide
gtgatgctctgctgccccgagtcatttatg

SEQ ID NO: 178597 - DNA, 30 bp, Artificial Sequence
  Synthetic oligonucleotide
ggcttgtaaaggccatgtagatgatttatg

SEQ ID NO: 178598 - DNA, 30 bp, Artificial Sequence
  Synthetic oligonucleotide
actactactaggaacgtcatgaccaaactg

SEQ ID NO: 178599 - DNA, 30 bp, Artificial Sequence
  Synthetic oligonucleotide
tttcgtaaatcatgaccgggtgccaaactg

SEQ ID NO: 178600 - DNA, 30 bp, Artificial Sequence
  Synthetic oligonucleotide
aaggagctcgtgctatgatcacagaaactg

SEQ ID NO: 178601 - DNA, 30 bp, Artificial Sequence
  Synthetic oligonucleotide
ctgtcaggcgataagtcagccagtaaactg

SEQ ID NO: 178602 - DNA, 30 bp, Artificial Sequence
  Synthetic oligonucleotide
tgtttaacgcctcgacatagggaccaactg

SEQ ID NO: 178603 - DNA, 30 bp, Artificial Sequence
  Synthetic oligonucleotide
tattcattgtaaccagaggaaaaggaactg

SEQ ID NO: 178604 - DNA, 30 bp, Artificial Sequence
  Synthetic oligonucleotide
taggtcagtggtcgacgatcaccataactg

SEQ ID NO: 178605 - DNA, 30 bp, Artificial Sequence
  Synthetic oligonucleotide
ctagtgtgttcaaaggtggataattaactg

SEQ ID NO: 178606 - DNA, 30 bp, Artificial Sequence
  Synthetic oligonucleotide
tagcggggccagcttagttacagttaactg

SEQ ID NO: 178607 - DNA, 30 bp, Artificial Sequence
  Synthetic oligonucleotide
gtcataatccgcgtatcgaatggttaactg

SEQ ID NO: 178608 - DNA, 30 bp, Artificial Sequence
  Synthetic oligonucleotide
aaagtcaggaagcttacttacctaacactg

SEQ ID NO: 178609 - DNA, 30 bp, Artificial Sequence
  Synthetic oligonucleotide
gaagtcggataaacaatctcgtgtacactg

SEQ ID NO: 178610 - DNA, 30 bp, Artificial Sequence
  Synthetic oligonucleotide
cgtttgttcattgctcccaaccgcccactg

SEQ ID NO: 178611 - DNA, 30 bp, Artificial Sequence
  Synthetic oligonucleotide
agaagaacgttccatgtgttgggtccactg

SEQ ID NO: 178612 - DNA, 30 bp, Artificial Sequence
  Synthetic oligonucleotide
gtcacgtgctaatagaattgatttccactg

SEQ ID NO: 178613 - DNA, 30 bp, Artificial Sequence
  Synthetic oligonucleotide
acaaccggggttttagtcaatacggcactg

SEQ ID NO: 178614 - DNA, 30 bp, Artificial Sequence
  Synthetic oligonucleotide
aagacatatactgctcaaccgagggcactg

SEQ ID NO: 178615 - DNA, 30 bp, Artificial Sequence
  Synthetic oligonucleotide
agggcagggtgaccgccgtatcgggcactg

SEQ ID NO: 178616 - DNA, 30 bp, Artificial Sequence
  Synthetic oligonucleotide
atagtgccgacagcattacgtctggcactg

SEQ ID NO: 178617 - DNA, 30 bp, Artificial Sequence
  Synthetic oligonucleotide
ctcgacgatgcaaccgtacagactgcactg

SEQ ID NO: 178618 - DNA, 30 bp, Artificial Sequence
  Synthetic oligonucleotide
acactcacgtaatcggcatgcgctgcactg

SEQ ID NO: 178619 - DNA, 30 bp, Artificial Sequence
  Synthetic oligonucleotide
tgacaacacgcgcgctttttacgatcactg

SEQ ID NO: 178620 - DNA, 30 bp, Artificial Sequence
  Synthetic oligonucleotide
catcagaaggagccgccgtacatctcactg

SEQ ID NO: 178621 - DNA, 30 bp, Artificial Sequence
  Synthetic oligonucleotide
actcaggatattgtagtcgacgaaagactg

SEQ ID NO: 178622 - DNA, 30 bp, Artificial Sequence
  Synthetic oligonucleotide
tagatcgcttccgtttgttcgtcaagactg

SEQ ID NO: 178623 - DNA, 30 bp, Artificial Sequence
  Synthetic oligonucleotide
acgcgcctcgttgcatgggcctgcagactg

SEQ ID NO: 178624 - DNA, 30 bp, Artificial Sequence
  Synthetic oligonucleotide
atcggtccggtcaaacataattgcagactg

SEQ ID NO: 178625 - DNA, 30 bp, Artificial Sequence
  Synthetic oligonucleotide
agggcagcgcaatcacgaagagcgagactg

SEQ ID NO: 178626 - DNA, 30 bp, Artificial Sequence
  Synthetic oligonucleotide
agaccaaccttgcggtgcacgtgtagactg

SEQ ID NO: 178627 - DNA, 30 bp, Artificial Sequence
  Synthetic oligonucleotide
taccagtgccattggataccaacacgactg

SEQ ID NO: 178628 - DNA, 30 bp, Artificial Sequence
  Synthetic oligonucleotide
gaaaaaacaatatgtgcttggcaccgactg

SEQ ID NO: 178629 - DNA, 30 bp, Artificial Sequence
  Synthetic oligonucleotide
caggtgttttcgtagtttgtacccggactg

SEQ ID NO: 178630 - DNA, 30 bp, Artificial Sequence
  Synthetic oligonucleotide
aagagacgaaaccagcaaccgcccggactg

SEQ ID NO: 178631 - DNA, 30 bp, Artificial Sequence
  Synthetic oligonucleotide
caaggtagccgggtatatgtggtcggactg

SEQ ID NO: 178632 - DNA, 30 bp, Artificial Sequence
  Synthetic oligonucleotide
gcgagtcgtgagttacactcttactgactg

SEQ ID NO: 178633 - DNA, 30 bp, Artificial Sequence
  Synthetic oligonucleotide
ctctcttcgcgattgtaggttccaatactg

SEQ ID NO: 178634 - DNA, 31 bp, Artificial Sequence
  Synthetic oligonucleotide
aaacgaaaattaggtattcataagaatactg

SEQ ID NO: 178635 - DNA, 30 bp, Artificial Sequence
  Synthetic oligonucleotide
ggtacgcgtctcatgccgtcattaatactg

SEQ ID NO: 178636 - DNA, 30 bp, Artificial Sequence
  Synthetic oligonucleotide
cgctaagaatgacgtttgctatatatactg

SEQ ID NO: 178637 - DNA, 30 bp, Artificial Sequence
  Synthetic oligonucleotide
aacataaaagatgaccccaaacctatactg

SEQ ID NO: 178638 - DNA, 30 bp, Artificial Sequence
  Synthetic oligonucleotide
aaggctccagtacaaaagcatttgctactg

SEQ ID NO: 178639 - DNA, 30 bp, Artificial Sequence
  Synthetic oligonucleotide
aacgagcggaggattccttcgcttctactg

SEQ ID NO: 178640 - DNA, 30 bp, Artificial Sequence
  Synthetic oligonucleotide
tcggaggattctgccagggccgtagtactg

SEQ ID NO: 178641 - DNA, 30 bp, Artificial Sequence
  Synthetic oligonucleotide
catgaatgacacacatgggtggtagtactg

SEQ ID NO: 178642 - DNA, 30 bp, Artificial Sequence
  Synthetic oligonucleotide
tagcctattgaagggtacgctaccgtactg

SEQ ID NO: 178643 - DNA, 30 bp, Artificial Sequence
  Synthetic oligonucleotide
gcatgatggtgatcgcccattcaggtactg

SEQ ID NO: 178644 - DNA, 31 bp, Artificial Sequence
  Synthetic oligonucleotide
ccagccggccattaaaccgttcgaggtactg

SEQ ID NO: 178645 - DNA, 30 bp, Artificial Sequence
  Synthetic oligonucleotide
taagttagcaggttgcccatctaggtactg

SEQ ID NO: 178646 - DNA, 30 bp, Artificial Sequence
  Synthetic oligonucleotide
ccgagtgactagtagaaaacggcggtactg

SEQ ID NO: 178647 - DNA, 30 bp, Artificial Sequence
  Synthetic oligonucleotide
tgactcaaaaaaacatatgaatgattactg

SEQ ID NO: 178648 - DNA, 30 bp, Artificial Sequence
  Synthetic oligonucleotide
gccatacgaaattcagacccatagttactg

SEQ ID NO: 178649 - DNA, 30 bp, Artificial Sequence
  Synthetic oligonucleotide
gcgcaattaagtgcatgcacacggttactg

SEQ ID NO: 178650 - DNA, 30 bp, Artificial Sequence
  Synthetic oligonucleotide
cgtactgggggacagcagtcgcatttactg

SEQ ID NO: 178651 - DNA, 30 bp, Artificial Sequence
  Synthetic oligonucleotide
agtgaggacttaggagtggctaggaacctg

SEQ ID NO: 178652 - DNA, 30 bp, Artificial Sequence
  Synthetic oligonucleotide
caagcagttcaaagaaaacctcggaacctg

SEQ ID NO: 178653 - DNA, 30 bp, Artificial Sequence
  Synthetic oligonucleotide
aattggtaatgtcctagccttcgtaacctg

SEQ ID NO: 178654 - DNA, 30 bp, Artificial Sequence
  Synthetic oligonucleotide
acaagaaaaggtggcgagtgtacgcacctg

SEQ ID NO: 178655 - DNA, 30 bp, Artificial Sequence
  Synthetic oligonucleotide
ctgggggttcttgccatcgggactcacctg

SEQ ID NO: 178656 - DNA, 30 bp, Artificial Sequence
  Synthetic oligonucleotide
cctatcagcgcgcgcaagagcgttcacctg

SEQ ID NO: 178657 - DNA, 30 bp, Artificial Sequence
  Synthetic oligonucleotide
aggattccttgcagtggcggccagtacctg

SEQ ID NO: 178658 - DNA, 30 bp, Artificial Sequence
  Synthetic oligonucleotide
gcttcagcaaagggggaagcatcttacctg

SEQ ID NO: 178659 - DNA, 30 bp, Artificial Sequence
  Synthetic oligonucleotide
aggtattagatggttactgttagttacctg

SEQ ID NO: 178660 - DNA, 30 bp, Artificial Sequence
  Synthetic oligonucleotide
tcgaaatgaccgttgcaccgatgttacctg

SEQ ID NO: 178661 - DNA, 30 bp, Artificial Sequence
  Synthetic oligonucleotide
cggtagcctgggagagtctcataaaccctg

SEQ ID NO: 178662 - DNA, 30 bp, Artificial Sequence
  Synthetic oligonucleotide
ataatgtggagaaacatattctacaccctg

SEQ ID NO: 178663 - DNA, 30 bp, Artificial Sequence
  Synthetic oligonucleotide
tagcaatctatgataaattatgataccctg

SEQ ID NO: 178664 - DNA, 30 bp, Artificial Sequence
  Synthetic oligonucleotide
ctacacgcgtctgaaataggacaccccctg

SEQ ID NO: 178665 - DNA, 30 bp, Artificial Sequence
  Synthetic oligonucleotide
ctaggtcagcgttaacgcccggggcccctg

SEQ ID NO: 178666 - DNA, 30 bp, Artificial Sequence
  Synthetic oligonucleotide
cctttcgttcgggaaactttgtgcgccctg

SEQ ID NO: 178667 - DNA, 30 bp, Artificial Sequence
  Synthetic oligonucleotide
caatgggtgattagcttgagggtcgccctg

SEQ ID NO: 178668 - DNA, 30 bp, Artificial Sequence
  Synthetic oligonucleotide
tctgtaaagcctcagtctcccaggagcctg

SEQ ID NO: 178669 - DNA, 30 bp, Artificial Sequence
  Synthetic oligonucleotide
acaacgaccatggatggatgttgtagcctg

SEQ ID NO: 178670 - DNA, 30 bp, Artificial Sequence
  Synthetic oligonucleotide
tgtctatgtcctcctctgcatttccgcctg

SEQ ID NO: 178671 - DNA, 30 bp, Artificial Sequence
  Synthetic oligonucleotide
tacgcccaaggcgtgtcattccagtgcctg

SEQ ID NO: 178672 - DNA, 30 bp, Artificial Sequence
  Synthetic oligonucleotide
tcaaccatctgatggttggctttaatcctg

SEQ ID NO: 178673 - DNA, 30 bp, Artificial Sequence
  Synthetic oligonucleotide
atataagtaaactcgcgttagagcatcctg

SEQ ID NO: 178674 - DNA, 30 bp, Artificial Sequence
  Synthetic oligonucleotide
gcgagcgccgatccacgactcgaactcctg

SEQ ID NO: 178675 - DNA, 30 bp, Artificial Sequence
  Synthetic oligonucleotide
aggccattaatggggggcgttgtggtcctg

SEQ ID NO: 178676 - DNA, 30 bp, Artificial Sequence
  Synthetic oligonucleotide
ctggagtatcaggtattgccggttgtcctg

SEQ ID NO: 178677 - DNA, 30 bp, Artificial Sequence
  Synthetic oligonucleotide
gaccggcatctggctgagtactgattcctg

SEQ ID NO: 178678 - DNA, 30 bp, Artificial Sequence
  Synthetic oligonucleotide
ggattgtgtacaagactagagttgttcctg

SEQ ID NO: 178679 - DNA, 30 bp, Artificial Sequence
  Synthetic oligonucleotide
cgccgaacaattggccgacgaattttcctg

SEQ ID NO: 178680 - DNA, 30 bp, Artificial Sequence
  Synthetic oligonucleotide
gtacgagtacgcggtccccaacttttcctg

SEQ ID NO: 178681 - DNA, 30 bp, Artificial Sequence
  Synthetic oligonucleotide
gccagtcagttagtctgtcattaaaagctg

SEQ ID NO: 178682 - DNA, 30 bp, Artificial Sequence
  Synthetic oligonucleotide
caagtggtagacggttcaccggtcaagctg

SEQ ID NO: 178683 - DNA, 30 bp, Artificial Sequence
  Synthetic oligonucleotide
gatacatggaggagtcgctaggggaagctg

SEQ ID NO: 178684 - DNA, 30 bp, Artificial Sequence
  Synthetic oligonucleotide
gttaataggcttgactgaagctaccagctg

SEQ ID NO: 178685 - DNA, 30 bp, Artificial Sequence
  Synthetic oligonucleotide
tgtggcgctgaatgctgcgagctagagctg

SEQ ID NO: 178686 - DNA, 30 bp, Artificial Sequence
  Synthetic oligonucleotide
tcactcgacaccaacagtcactacgagctg

SEQ ID NO: 178687 - DNA, 30 bp, Artificial Sequence
  Synthetic oligonucleotide
atagtacctatgaagaagagaatggagctg

SEQ ID NO: 178688 - DNA, 30 bp, Artificial Sequence
  Synthetic oligonucleotide
gtattgttggatcgtcaaagctgtgagctg

SEQ ID NO: 178689 - DNA, 30 bp, Artificial Sequence
  Synthetic oligonucleotide
cgtagggacagggtacttaaatactagctg

SEQ ID NO: 178690 - DNA, 30 bp, Artificial Sequence
  Synthetic oligonucleotide
aggccacccggaatagcagctacctagctg

SEQ ID NO: 178691 - DNA, 30 bp, Artificial Sequence
  Synthetic oligonucleotide
attaccgcaacgtgaagtcgctagtagctg

SEQ ID NO: 178692 - DNA, 30 bp, Artificial Sequence
  Synthetic oligonucleotide
gtgggatcggtacttatcctggattagctg

SEQ ID NO: 178693 - DNA, 30 bp, Artificial Sequence
  Synthetic oligonucleotide
tggccacttagaggtttacgttcttagctg

SEQ ID NO: 178694 - DNA, 30 bp, Artificial Sequence
  Synthetic oligonucleotide
cactgcggataggaggacttcaagacgctg

SEQ ID NO: 178695 - DNA, 30 bp, Artificial Sequence
  Synthetic oligonucleotide
aggtgcaaacgggggaaataattgacgctg

SEQ ID NO: 178696 - DNA, 30 bp, Artificial Sequence
  Synthetic oligonucleotide
gtctacgtggttttggtgcgttcaccgctg

SEQ ID NO: 178697 - DNA, 30 bp, Artificial Sequence
  Synthetic oligonucleotide
cattaaggactttttaatacttatccgctg

SEQ ID NO: 178698 - DNA, 30 bp, Artificial Sequence
  Synthetic oligonucleotide
agtaactgccacgttgtaccacaagcgctg

SEQ ID NO: 178699 - DNA, 30 bp, Artificial Sequence
  Synthetic oligonucleotide
atattgggaccccacgcagaaatagcgctg

SEQ ID NO: 178700 - DNA, 30 bp, Artificial Sequence
  Synthetic oligonucleotide
gttgcgccgagaaaacgtcgagtagcgctg

SEQ ID NO: 178701 - DNA, 30 bp, Artificial Sequence
  Synthetic oligonucleotide
cttgtcaagccttagcgaatgtcggcgctg

SEQ ID NO: 178702 - DNA, 30 bp, Artificial Sequence
  Synthetic oligonucleotide
tgtgggtcgttaaggaatactaatgcgctg

SEQ ID NO: 178703 - DNA, 30 bp, Artificial Sequence
  Synthetic oligonucleotide
gatggcggcgtgcttatcaaccaatcgctg

SEQ ID NO: 178704 - DNA, 30 bp, Artificial Sequence
  Synthetic oligonucleotide
cgatcgagccactcgtcgtttatatcgctg

SEQ ID NO: 178705 - DNA, 30 bp, Artificial Sequence
  Synthetic oligonucleotide
ctacgcagggcgcggaatattaggtcgctg

SEQ ID NO: 178706 - DNA, 30 bp, Artificial Sequence
  Synthetic oligonucleotide
acagactatctttacctactccggtcgctg

SEQ ID NO: 178707 - DNA, 30 bp, Artificial Sequence
  Synthetic oligonucleotide
gggtggtgctcgctttctcgactgtcgctg

SEQ ID NO: 178708 - DNA, 30 bp, Artificial Sequence
  Synthetic oligonucleotide
taccttgtactccgtaccaccgtgaggctg

SEQ ID NO: 178709 - DNA, 30 bp, Artificial Sequence
  Synthetic oligonucleotide
ttgtatatgcacgccaacaaacgacggctg

SEQ ID NO: 178710 - DNA, 30 bp, Artificial Sequence
  Synthetic oligonucleotide
actagatttgagtttaattccacagggctg

SEQ ID NO: 178711 - DNA, 30 bp, Artificial Sequence
  Synthetic oligonucleotide
ccgtccacacgtcactttgactgcgggctg

SEQ ID NO: 178712 - DNA, 30 bp, Artificial Sequence
  Synthetic oligonucleotide
cttgaacggccaagtacggcgctggggctg

SEQ ID NO: 178713 - DNA, 30 bp, Artificial Sequence
  Synthetic oligonucleotide
cggtaggattcccctatctcctttgggctg

SEQ ID NO: 178714 - DNA, 30 bp, Artificial Sequence
  Synthetic oligonucleotide
aacaattcgaagagatgatctacctggctg

SEQ ID NO: 178715 - DNA, 30 bp, Artificial Sequence
  Synthetic oligonucleotide
accgatccggaacgaacttctcaaatgctg

SEQ ID NO: 178716 - DNA, 30 bp, Artificial Sequence
  Synthetic oligonucleotide
tgctaatcgagcgaaacgcgggtaatgctg

SEQ ID NO: 178717 - DNA, 30 bp, Artificial Sequence
  Synthetic oligonucleotide
cagggaaccatcccaaacgcaaatctgctg

SEQ ID NO: 178718 - DNA, 30 bp, Artificial Sequence
  Synthetic oligonucleotide
cacctccctggtggcataaataaagtgctg

SEQ ID NO: 178719 - DNA, 30 bp, Artificial Sequence
  Synthetic oligonucleotide
gctagttacgtcttgagaattttagtgctg

SEQ ID NO: 178720 - DNA, 30 bp, Artificial Sequence
  Synthetic oligonucleotide
gctgacggaggaccaaactagagggtgctg

SEQ ID NO: 178721 - DNA, 30 bp, Artificial Sequence
  Synthetic oligonucleotide
ggttgacctcccctcaaacgaactgtgctg

SEQ ID NO: 178722 - DNA, 30 bp, Artificial Sequence
  Synthetic oligonucleotide
agctggtcgtagcgaatttcggaattgctg

SEQ ID NO: 178723 - DNA, 30 bp, Artificial Sequence
  Synthetic oligonucleotide
taattcaacccgcacaagctcgagttgctg

SEQ ID NO: 178724 - DNA, 30 bp, Artificial Sequence
  Synthetic oligonucleotide
ggtagaacagcgtatgcgattcacaatctg

SEQ ID NO: 178725 - DNA, 30 bp, Artificial Sequence
  Synthetic oligonucleotide
tttaatcaccgaccgtataacgggaatctg

SEQ ID NO: 178726 - DNA, 30 bp, Artificial Sequence
  Synthetic oligonucleotide
agaaggttggggatcggatttctgaatctg

SEQ ID NO: 178727 - DNA, 30 bp, Artificial Sequence
  Synthetic oligonucleotide
tctcataggtataaccttgcgtataatctg

SEQ ID NO: 178728 - DNA, 30 bp, Artificial Sequence
  Synthetic oligonucleotide
actagcgtccaccgttagggtagtaatctg

SEQ ID NO: 178729 - DNA, 30 bp, Artificial Sequence
  Synthetic oligonucleotide
catgctgtgtaacacctgcgagaacatctg

SEQ ID NO: 178730 - DNA, 30 bp, Artificial Sequence
  Synthetic oligonucleotide
acaatagagggggcagccccaagccatctg

SEQ ID NO: 178731 - DNA, 30 bp, Artificial Sequence
  Synthetic oligonucleotide
gctaaccctgttgtgagagggcgccatctg

SEQ ID NO: 178732 - DNA, 30 bp, Artificial Sequence
  Synthetic oligonucleotide
tcaatacaactcactcaccacttagatctg

SEQ ID NO: 178733 - DNA, 30 bp, Artificial Sequence
  Synthetic oligonucleotide
gtcaaatccagactctcgttttaggatctg

SEQ ID NO: 178734 - DNA, 30 bp, Artificial Sequence
  Synthetic oligonucleotide
aaagaccatccggagttggtacaatatctg

SEQ ID NO: 178735 - DNA, 30 bp, Artificial Sequence
  Synthetic oligonucleotide
tcgcaaagatggccttctttgggctatctg

SEQ ID NO: 178736 - DNA, 30 bp, Artificial Sequence
  Synthetic oligonucleotide
ccaaccccggactaaaaaaacacttatctg

SEQ ID NO: 178737 - DNA, 30 bp, Artificial Sequence
  Synthetic oligonucleotide
gtatcgaaaggctggcatattgcttatctg

SEQ ID NO: 178738 - DNA, 29 bp, Artificial Sequence
  Synthetic oligonucleotide
tgagagatccgcgtattgctataactctg

SEQ ID NO: 178739 - DNA, 30 bp, Artificial Sequence
  Synthetic oligonucleotide
atggttcggacgtttaatctttccactctg

SEQ ID NO: 178740 - DNA, 30 bp, Artificial Sequence
  Synthetic oligonucleotide
gcgtaatgttagttgcgacaaaggactctg

SEQ ID NO: 178741 - DNA, 30 bp, Artificial Sequence
  Synthetic oligonucleotide
cagtatggcacacttatagcacatgctctg

SEQ ID NO: 178742 - DNA, 30 bp, Artificial Sequence
  Synthetic oligonucleotide
gtctgcaagacataacggcccacaagtctg

SEQ ID NO: 178743 - DNA, 30 bp, Artificial Sequence
  Synthetic oligonucleotide
tgaaataatttatgtaatattcgcagtctg

SEQ ID NO: 178744 - DNA, 30 bp, Artificial Sequence
  Synthetic oligonucleotide
tctaacaaaacagctgtttgggtcagtctg

SEQ ID NO: 178745 - DNA, 30 bp, Artificial Sequence
  Synthetic oligonucleotide
aaaatagcggagcggggtacttatagtctg

SEQ ID NO: 178746 - DNA, 30 bp, Artificial Sequence
  Synthetic oligonucleotide
acgtttcggaatccacagcggagtagtctg

SEQ ID NO: 178747 - DNA, 30 bp, Artificial Sequence
  Synthetic oligonucleotide
gaaccattaccgagttcgaagatacgtctg

SEQ ID NO: 178748 - DNA, 30 bp, Artificial Sequence
  Synthetic oligonucleotide
gaccaaatcagtcccgggttagtacgtctg

SEQ ID NO: 178749 - DNA, 30 bp, Artificial Sequence
  Synthetic oligonucleotide
aagaatcctatacgtttgggtcaccgtctg

SEQ ID NO: 178750 - DNA, 30 bp, Artificial Sequence
  Synthetic oligonucleotide
agtggacatatctacgttaagatgcgtctg

SEQ ID NO: 178751 - DNA, 30 bp, Artificial Sequence
  Synthetic oligonucleotide
caagccatccccgcgttatgatccggtctg

SEQ ID NO: 178752 - DNA, 30 bp, Artificial Sequence
  Synthetic oligonucleotide
cgactacatccgacgcacgtaatgggtctg

SEQ ID NO: 178753 - DNA, 30 bp, Artificial Sequence
  Synthetic oligonucleotide
gaccggtcccagaaggcgacgctatgtctg

SEQ ID NO: 178754 - DNA, 30 bp, Artificial Sequence
  Synthetic oligonucleotide
acaaaagtatgacactcacgaccctgtctg

SEQ ID NO: 178755 - DNA, 30 bp, Artificial Sequence
  Synthetic oligonucleotide
cgatccccgatggttacaggggtctgtctg

SEQ ID NO: 178756 - DNA, 30 bp, Artificial Sequence
  Synthetic oligonucleotide
gaacagtaccatccatgtcgtcagtgtctg

SEQ ID NO: 178757 - DNA, 30 bp, Artificial Sequence
  Synthetic oligonucleotide
ggggaaggcggagcaaactatccgtgtctg

SEQ ID NO: 178758 - DNA, 30 bp, Artificial Sequence
  Synthetic oligonucleotide
acctcacctggcctgactctgaggtgtctg

SEQ ID NO: 178759 - DNA, 30 bp, Artificial Sequence
  Synthetic oligonucleotide
acaccaactggatgataaatttattgtctg

SEQ ID NO: 178760 - DNA, 30 bp, Artificial Sequence
  Synthetic oligonucleotide
cgggcttatcacatcagctgaaaaattctg

SEQ ID NO: 178761 - DNA, 30 bp, Artificial Sequence
  Synthetic oligonucleotide
acacatttaatcttttccatccgcattctg

SEQ ID NO: 178762 - DNA, 30 bp, Artificial Sequence
  Synthetic oligonucleotide
taccgaaatcgggagactaaggagattctg

SEQ ID NO: 178763 - DNA, 30 bp, Artificial Sequence
  Synthetic oligonucleotide
taaaatatgtctgcatttcgatatattctg

SEQ ID NO: 178764 - DNA, 30 bp, Artificial Sequence
  Synthetic oligonucleotide
cagcaacacgagtaaacagggaggcttctg

SEQ ID NO: 178765 - DNA, 30 bp, Artificial Sequence
  Synthetic oligonucleotide
acggttgtcatggcttttccgtaatttctg

SEQ ID NO: 178766 - DNA, 30 bp, Artificial Sequence
  Synthetic oligonucleotide
tgcattgtatgcattcaggagtgatttctg

SEQ ID NO: 178767 - DNA, 30 bp, Artificial Sequence
  Synthetic oligonucleotide
cagaggttactacaatggtatttgtttctg

SEQ ID NO: 178768 - DNA, 30 bp, Artificial Sequence
  Synthetic oligonucleotide
cttagagggcaggccggtaggcaaaaagtg

SEQ ID NO: 178769 - DNA, 30 bp, Artificial Sequence
  Synthetic oligonucleotide
atctcacaatcgatgcgagggttaaaagtg

SEQ ID NO: 178770 - DNA, 30 bp, Artificial Sequence
  Synthetic oligonucleotide
cttgggctcaattgttgtcatttaaaagtg

SEQ ID NO: 178771 - DNA, 30 bp, Artificial Sequence
  Synthetic oligonucleotide
gaccgatcggttaagtgagggttcaaagtg

SEQ ID NO: 178772 - DNA, 30 bp, Artificial Sequence
  Synthetic oligonucleotide
gtgtatggatacacgtatgcgcggaaagtg

SEQ ID NO: 178773 - DNA, 29 bp, Artificial Sequence
  Synthetic oligonucleotide
tgcgacaactacacccgattactaaagtg

SEQ ID NO: 178774 - DNA, 31 bp, Artificial Sequence
  Synthetic oligonucleotide
atggggttaaaggtaactaagtcaacaagtg

SEQ ID NO: 178775 - DNA, 30 bp, Artificial Sequence
  Synthetic oligonucleotide
tataaagatagcgcaggtacggtccaagtg

SEQ ID NO: 178776 - DNA, 30 bp, Artificial Sequence
  Synthetic oligonucleotide
ctcaaggcaacacggttttgtacggaagtg

SEQ ID NO: 178777 - DNA, 30 bp, Artificial Sequence
  Synthetic oligonucleotide
aagagacgtggagtgtcgtagctggaagtg

SEQ ID NO: 178778 - DNA, 30 bp, Artificial Sequence
  Synthetic oligonucleotide
acacggtcgcgcattgagttacatgaagtg

SEQ ID NO: 178779 - DNA, 30 bp, Artificial Sequence
  Synthetic oligonucleotide
agtagtactcctcctacatggagtgaagtg

SEQ ID NO: 178780 - DNA, 30 bp, Artificial Sequence
  Synthetic oligonucleotide
cgcaagtcggtctcttgctatgcataagtg

SEQ ID NO: 178781 - DNA, 30 bp, Artificial Sequence
  Synthetic oligonucleotide
tgaataacgcttccagtctttggataagtg

SEQ ID NO: 178782 - DNA, 30 bp, Artificial Sequence
  Synthetic oligonucleotide
tttctacaaattacaaggacagactaagtg

SEQ ID NO: 178783 - DNA, 30 bp, Artificial Sequence
  Synthetic oligonucleotide
accttcagcaatcacgaaaaaagttaagtg

SEQ ID NO: 178784 - DNA, 30 bp, Artificial Sequence
  Synthetic oligonucleotide
aatcggcttagtcgggatcagaaaacagtg

SEQ ID NO: 178785 - DNA, 30 bp, Artificial Sequence
  Synthetic oligonucleotide
gtgtcccgcgaagcaatgcggtaaacagtg

SEQ ID NO: 178786 - DNA, 30 bp, Artificial Sequence
  Synthetic oligonucleotide
ggaccggctgacccgaggggttacacagtg

SEQ ID NO: 178787 - DNA, 30 bp, Artificial Sequence
  Synthetic oligonucleotide
attcagttgggatgaaacaggtagacagtg

SEQ ID NO: 178788 - DNA, 30 bp, Artificial Sequence
  Synthetic oligonucleotide
ggacctcacgttaatctcaattggacagtg

SEQ ID NO: 178789 - DNA, 30 bp, Artificial Sequence
  Synthetic oligonucleotide
cctatccctatgtgacgacataatacagtg

SEQ ID NO: 178790 - DNA, 30 bp, Artificial Sequence
  Synthetic oligonucleotide
cattttgcgcatgtagggttaaaaccagtg

SEQ ID NO: 178791 - DNA, 30 bp, Artificial Sequence
  Synthetic oligonucleotide
actgtaacgtaacgtttctaaggaccagtg

SEQ ID NO: 178792 - DNA, 30 bp, Artificial Sequence
  Synthetic oligonucleotide
ctaaggtgggttatgtttcagctcccagtg

SEQ ID NO: 178793 - DNA, 30 bp, Artificial Sequence
  Synthetic oligonucleotide
tcacctgaacagtgcgcactgcagccagtg

SEQ ID NO: 178794 - DNA, 30 bp, Artificial Sequence
  Synthetic oligonucleotide
gcctggacaagcgcaggatagtcgccagtg

SEQ ID NO: 178795 - DNA, 30 bp, Artificial Sequence
  Synthetic oligonucleotide
tcacgcgcaacgcaatctacatggccagtg

SEQ ID NO: 178796 - DNA, 30 bp, Artificial Sequence
  Synthetic oligonucleotide
caaatgttttgagtgggactaagtccagtg

SEQ ID NO: 178797 - DNA, 30 bp, Artificial Sequence
  Synthetic oligonucleotide
cgccgcaggagctagtactatattccagtg

SEQ ID NO: 178798 - DNA, 30 bp, Artificial Sequence
  Synthetic oligonucleotide
ttgcaattgaggatttcatcaagagcagtg

SEQ ID NO: 178799 - DNA, 30 bp, Artificial Sequence
  Synthetic oligonucleotide
atatgagaggtcgcccgggcggaggcagtg

SEQ ID NO: 178800 - DNA, 30 bp, Artificial Sequence
  Synthetic oligonucleotide
ctaacagcaacgcctcctagcccggcagtg

SEQ ID NO: 178801 - DNA, 30 bp, Artificial Sequence
  Synthetic oligonucleotide
gcatggtttatcggtgcgcctaatgcagtg

SEQ ID NO: 178802 - DNA, 30 bp, Artificial Sequence
  Synthetic oligonucleotide
aatgaggtcatcacataatcggctgcagtg

SEQ ID NO: 178803 - DNA, 30 bp, Artificial Sequence
  Synthetic oligonucleotide
gacgggtcgccgaagacttcctgatcagtg

SEQ ID NO: 178804 - DNA, 30 bp, Artificial Sequence
  Synthetic oligonucleotide
gggttctgagcataagttgggttatcagtg

SEQ ID NO: 178805 - DNA, 30 bp, Artificial Sequence
  Synthetic oligonucleotide
accccgccagaatgctattctcgctcagtg

SEQ ID NO: 178806 - DNA, 30 bp, Artificial Sequence
  Synthetic oligonucleotide
tgagacagctttgtcttacctcggtcagtg

SEQ ID NO: 178807 - DNA, 30 bp, Artificial Sequence
  Synthetic oligonucleotide
cttttcagccataaatctcaaagttcagtg

SEQ ID NO: 178808 - DNA, 30 bp, Artificial Sequence
  Synthetic oligonucleotide
gggagcactcgcaggttatgtacaagagtg

SEQ ID NO: 178809 - DNA, 30 bp, Artificial Sequence
  Synthetic oligonucleotide
cttcaataagtgcacccagaagcaagagtg

SEQ ID NO: 178810 - DNA, 30 bp, Artificial Sequence
  Synthetic oligonucleotide
actgacccggcgaggatcacttcaagagtg

SEQ ID NO: 178811 - DNA, 30 bp, Artificial Sequence
  Synthetic oligonucleotide
cccgctaattcatatggagtggtaagagtg

SEQ ID NO: 178812 - DNA, 30 bp, Artificial Sequence
  Synthetic oligonucleotide
ggatatctagagtataatctgaatagagtg

SEQ ID NO: 178813 - DNA, 30 bp, Artificial Sequence
  Synthetic oligonucleotide
actttaaatcagatcccggtgggacgagtg

SEQ ID NO: 178814 - DNA, 30 bp, Artificial Sequence
  Synthetic oligonucleotide
ggctgaggctgcagtgcgggtgaccgagtg

SEQ ID NO: 178815 - DNA, 30 bp, Artificial Sequence
  Synthetic oligonucleotide
ttacggtggactaggatcgcggaatgagtg

SEQ ID NO: 178816 - DNA, 30 bp, Artificial Sequence
  Synthetic oligonucleotide
catgcaatagagaatagtgttcgctgagtg

SEQ ID NO: 178817 - DNA, 30 bp, Artificial Sequence
  Synthetic oligonucleotide
ctcgaagatgcgctgccatcagtctgagtg

SEQ ID NO: 178818 - DNA, 30 bp, Artificial Sequence
  Synthetic oligonucleotide
aaacttagagccacgcttcgtaagtgagtg

SEQ ID NO: 178819 - DNA, 30 bp, Artificial Sequence
  Synthetic oligonucleotide
tcagtatcgcacccgattcccaggtgagtg

SEQ ID NO: 178820 - DNA, 30 bp, Artificial Sequence
  Synthetic oligonucleotide
gacggcaattatgcatccccttaaatagtg

SEQ ID NO: 178821 - DNA, 30 bp, Artificial Sequence
  Synthetic oligonucleotide
cgccagtcgtacgttcccacctgaatagtg

SEQ ID NO: 178822 - DNA, 30 bp, Artificial Sequence
  Synthetic oligonucleotide
tgttttatgtagtcggccgtcctaatagtg

SEQ ID NO: 178823 - DNA, 30 bp, Artificial Sequence
  Synthetic oligonucleotide
tctggttgctgggtagaaaaacacatagtg

SEQ ID NO: 178824 - DNA, 30 bp, Artificial Sequence
  Synthetic oligonucleotide
cagcggagatttacaccctacatgatagtg

SEQ ID NO: 178825 - DNA, 30 bp, Artificial Sequence
  Synthetic oligonucleotide
atacgcctgtttaaattaagacatatagtg

SEQ ID NO: 178826 - DNA, 30 bp, Artificial Sequence
  Synthetic oligonucleotide
tcttcagtctcctcattggatggtatagtg

SEQ ID NO: 178827 - DNA, 30 bp, Artificial Sequence
  Synthetic oligonucleotide
aaactgccaggacgaagtgcgaaactagtg

SEQ ID NO: 178828 - DNA, 30 bp, Artificial Sequence
  Synthetic oligonucleotide
taatatacttagctgcacctacccctagtg

SEQ ID NO: 178829 - DNA, 30 bp, Artificial Sequence
  Synthetic oligonucleotide
tttgtcgacaaagactcgagggatctagtg

SEQ ID NO: 178830 - DNA, 30 bp, Artificial Sequence
  Synthetic oligonucleotide
agcggtgtagacgggaatcgttgagtagtg

SEQ ID NO: 178831 - DNA, 30 bp, Artificial Sequence
  Synthetic oligonucleotide
ataaccagcaacaagctatccaaggtagtg

SEQ ID NO: 178832 - DNA, 30 bp, Artificial Sequence
  Synthetic oligonucleotide
acttgactaatcatgtggctacaggtagtg

SEQ ID NO: 178833 - DNA, 30 bp, Artificial Sequence
  Synthetic oligonucleotide
ttcgttctaatgtccttccatagggtagtg

SEQ ID NO: 178834 - DNA, 30 bp, Artificial Sequence
  Synthetic oligonucleotide
gactccttcaatatggaccttagtgtagtg

SEQ ID NO: 178835 - DNA, 31 bp, Artificial Sequence
  Synthetic oligonucleotide
agttaatcattaaaagatacacatattagtg

SEQ ID NO: 178836 - DNA, 30 bp, Artificial Sequence
  Synthetic oligonucleotide
aaacgggatagggtggaactcctattagtg

SEQ ID NO: 178837 - DNA, 30 bp, Artificial Sequence
  Synthetic oligonucleotide
ctgggggtacgagtgtaacgcaccttagtg

SEQ ID NO: 178838 - DNA, 30 bp, Artificial Sequence
  Synthetic oligonucleotide
gatcatggtatcaatttattggtgttagtg

SEQ ID NO: 178839 - DNA, 30 bp, Artificial Sequence
  Synthetic oligonucleotide
acttctgagatacgtatgcatggaaacgtg

SEQ ID NO: 178840 - DNA, 30 bp, Artificial Sequence
  Synthetic oligonucleotide
gatccgtggtatgtcaacaagtgaaacgtg

SEQ ID NO: 178841 - DNA, 30 bp, Artificial Sequence
  Synthetic oligonucleotide
gataagggtgcctagtaggcattaaacgtg

SEQ ID NO: 178842 - DNA, 29 bp, Artificial Sequence
  Synthetic oligonucleotide
accgttaatagagctgactgcccaacgtg

SEQ ID NO: 178843 - DNA, 30 bp, Artificial Sequence
  Synthetic oligonucleotide
tagtagttcctcgggtatttctgcaacgtg

SEQ ID NO: 178844 - DNA, 30 bp, Artificial Sequence
  Synthetic oligonucleotide
gaatcggttaattatcagcacgaccacgtg

SEQ ID NO: 178845 - DNA, 30 bp, Artificial Sequence
  Synthetic oligonucleotide
aagtgatacggagacactacagagcacgtg

SEQ ID NO: 178846 - DNA, 30 bp, Artificial Sequence
  Synthetic oligonucleotide
acagtgatagtctgaggagttatggacgtg

SEQ ID NO: 178847 - DNA, 30 bp, Artificial Sequence
  Synthetic oligonucleotide
ctcggtagggaatcatgatagtcatacgtg

SEQ ID NO: 178848 - DNA, 30 bp, Artificial Sequence
  Synthetic oligonucleotide
gaaattagtgaagcgcaatggtactacgtg

SEQ ID NO: 178849 - DNA, 30 bp, Artificial Sequence
  Synthetic oligonucleotide
cgatcgaaacgtcgacagtatgagtacgtg

SEQ ID NO: 178850 - DNA, 30 bp, Artificial Sequence
  Synthetic oligonucleotide
caacgggtacgcctaaagtacagttacgtg

SEQ ID NO: 178851 - DNA, 30 bp, Artificial Sequence
  Synthetic oligonucleotide
gtacgaagctgtgagtcaacacgaaccgtg

SEQ ID NO: 178852 - DNA, 30 bp, Artificial Sequence
  Synthetic oligonucleotide
aacaggatcccctcactaaagcgaaccgtg

SEQ ID NO: 178853 - DNA, 30 bp, Artificial Sequence
  Synthetic oligonucleotide
tggaggcatggccgctattcatggaccgtg

SEQ ID NO: 178854 - DNA, 30 bp, Artificial Sequence
  Synthetic oligonucleotide
agtctccagacatccgggccggataccgtg

SEQ ID NO: 178855 - DNA, 30 bp, Artificial Sequence
  Synthetic oligonucleotide
cgtcttagttattagtgaaagtaccccgtg

SEQ ID NO: 178856 - DNA, 30 bp, Artificial Sequence
  Synthetic oligonucleotide
gctaaaaagcgtcaatttatagcccccgtg

SEQ ID NO: 178857 - DNA, 30 bp, Artificial Sequence
  Synthetic oligonucleotide
agccgttgagtctcaacatacgtcgccgtg

SEQ ID NO: 178858 - DNA, 30 bp, Artificial Sequence
  Synthetic oligonucleotide
ctaatatttttgcggtgcgaccaggccgtg

SEQ ID NO: 178859 - DNA, 30 bp, Artificial Sequence
  Synthetic oligonucleotide
ccgtttgttagctgagggttgccggccgtg

SEQ ID NO: 178860 - DNA, 30 bp, Artificial Sequence
  Synthetic oligonucleotide
tttgcggtttcggaataggcatctgccgtg

SEQ ID NO: 178861 - DNA, 30 bp, Artificial Sequence
  Synthetic oligonucleotide
tccaacaatatggacaaattcttatccgtg

SEQ ID NO: 178862 - DNA, 30 bp, Artificial Sequence
  Synthetic oligonucleotide
tacagcgacatataatcttcgtgctccgtg

SEQ ID NO: 178863 - DNA, 30 bp, Artificial Sequence
  Synthetic oligonucleotide
gacctactgcggcttgtgggaaagtccgtg

SEQ ID NO: 178864 - DNA, 30 bp, Artificial Sequence
  Synthetic oligonucleotide
tagaaaccctgggcatattcccgttccgtg

SEQ ID NO: 178865 - DNA, 30 bp, Artificial Sequence
  Synthetic oligonucleotide
ggcgacagaaaatttcgcttagcgagcgtg

SEQ ID NO: 178866 - DNA, 30 bp, Artificial Sequence
  Synthetic oligonucleotide
caaaggtactgaacgtagacctcgagcgtg

SEQ ID NO: 178867 - DNA, 30 bp, Artificial Sequence
  Synthetic oligonucleotide
cggggtgaaggtttatattctaatagcgtg

SEQ ID NO: 178868 - DNA, 30 bp, Artificial Sequence
  Synthetic oligonucleotide
aaaggaaacggtcctgcatgttaccgcgtg

SEQ ID NO: 178869 - DNA, 30 bp, Artificial Sequence
  Synthetic oligonucleotide
ctgtcatagaaacaagtggcctgccgcgtg

SEQ ID NO: 178870 - DNA, 30 bp, Artificial Sequence
  Synthetic oligonucleotide
taatgacgatatgaaataaagcttcgcgtg

SEQ ID NO: 178871 - DNA, 30 bp, Artificial Sequence
  Synthetic oligonucleotide
gagctggtcccgctaaagatagttcgcgtg

SEQ ID NO: 178872 - DNA, 30 bp, Artificial Sequence
  Synthetic oligonucleotide
gatatgggacagtggagagctggaggcgtg

SEQ ID NO: 178873 - DNA, 30 bp, Artificial Sequence
  Synthetic oligonucleotide
ccagctctgtatcttgatggatacggcgtg

SEQ ID NO: 178874 - DNA, 30 bp, Artificial Sequence
  Synthetic oligonucleotide
ttacgtgagtggggaccggagatcggcgtg

SEQ ID NO: 178875 - DNA, 30 bp, Artificial Sequence
  Synthetic oligonucleotide
aaaatggaaacggctatgatatactgcgtg

SEQ ID NO: 178876 - DNA, 30 bp, Artificial Sequence
  Synthetic oligonucleotide
cgcgcgtaatcaatatactaggttatcgtg

SEQ ID NO: 178877 - DNA, 30 bp, Artificial Sequence
  Synthetic oligonucleotide
aggtggcttcatgtagagatgttgctcgtg

SEQ ID NO: 178878 - DNA, 30 bp, Artificial Sequence
  Synthetic oligonucleotide
gttttagataaaggggctcgacatctcgtg

SEQ ID NO: 178879 - DNA, 30 bp, Artificial Sequence
  Synthetic oligonucleotide
atatgacgttcggaattcatcatagtcgtg

SEQ ID NO: 178880 - DNA, 30 bp, Artificial Sequence
  Synthetic oligonucleotide
tctggcgaatcggccggatgctcattcgtg

SEQ ID NO: 178881 - DNA, 30 bp, Artificial Sequence
  Synthetic oligonucleotide
ggccaacaatcttcgccgtatgacttcgtg

SEQ ID NO: 178882 - DNA, 30 bp, Artificial Sequence
  Synthetic oligonucleotide
aatatgcgtattgcagttaactatttcgtg

SEQ ID NO: 178883 - DNA, 30 bp, Artificial Sequence
  Synthetic oligonucleotide
gtgttgatgacagcgaggccaacaaaggtg

SEQ ID NO: 178884 - DNA, 30 bp, Artificial Sequence
  Synthetic oligonucleotide
gacgaccaaatcacgtaccttacaaaggtg

SEQ ID NO: 178885 - DNA, 30 bp, Artificial Sequence
  Synthetic oligonucleotide
ggcggcttgttggtttggttatacaaggtg

SEQ ID NO: 178886 - DNA, 30 bp, Artificial Sequence
  Synthetic oligonucleotide
aaatagatctagcacgagcgtccacaggtg

SEQ ID NO: 178887 - DNA, 30 bp, Artificial Sequence
  Synthetic oligonucleotide
aatcaggggggagtgtaaattctacaggtg

SEQ ID NO: 178888 - DNA, 30 bp, Artificial Sequence
  Synthetic oligonucleotide
ccttcaggttaactacaaggacgtcaggtg

SEQ ID NO: 178889 - DNA, 30 bp, Artificial Sequence
  Synthetic oligonucleotide
ccggaatgacggttcggggtgattcaggtg

SEQ ID NO: 178890 - DNA, 30 bp, Artificial Sequence
  Synthetic oligonucleotide
atggactttcgcagttattgccacgaggtg

SEQ ID NO: 178891 - DNA, 30 bp, Artificial Sequence
  Synthetic oligonucleotide
gtgtaccggaacgtagggatgttcgaggtg

SEQ ID NO: 178892 - DNA, 30 bp, Artificial Sequence
  Synthetic oligonucleotide
gctattcatcctgtgacaattctggaggtg

SEQ ID NO: 178893 - DNA, 30 bp, Artificial Sequence
  Synthetic oligonucleotide
aggtacgatagttggattggtgggtaggtg

SEQ ID NO: 178894 - DNA, 30 bp, Artificial Sequence
  Synthetic oligonucleotide
ccatggggtgcgggcggctcgggtacggtg

SEQ ID NO: 178895 - DNA, 30 bp, Artificial Sequence
  Synthetic oligonucleotide
tcgcccgacaagagattaactcgcccggtg

SEQ ID NO: 178896 - DNA, 30 bp, Artificial Sequence
  Synthetic oligonucleotide
ctttccaacaatactagggcatcagcggtg

SEQ ID NO: 178897 - DNA, 30 bp, Artificial Sequence
  Synthetic oligonucleotide
gatgggaccgcaagctcgtacttagcggtg

SEQ ID NO: 178898 - DNA, 30 bp, Artificial Sequence
  Synthetic oligonucleotide
catgcattctagggaagtccagacgcggtg

SEQ ID NO: 178899 - DNA, 30 bp, Artificial Sequence
  Synthetic oligonucleotide
agggctcttgcagaattgagtatatcggtg

SEQ ID NO: 178900 - DNA, 30 bp, Artificial Sequence
  Synthetic oligonucleotide
cgccgttcaaagcagattggtacctcggtg

SEQ ID NO: 178901 - DNA, 30 bp, Artificial Sequence
  Synthetic oligonucleotide
gaatagaggtaaggcaggataagctcggtg

SEQ ID NO: 178902 - DNA, 30 bp, Artificial Sequence
  Synthetic oligonucleotide
agaacttaaacaaatcatgatcagtcggtg

SEQ ID NO: 178903 - DNA, 30 bp, Artificial Sequence
  Synthetic oligonucleotide
cgtttatttttcacataacacgcgtcggtg

SEQ ID NO: 178904 - DNA, 30 bp, Artificial Sequence
  Synthetic oligonucleotide
gtttggagctcagcgtataaccattcggtg

SEQ ID NO: 178905 - DNA, 30 bp, Artificial Sequence
  Synthetic oligonucleotide
gattgagtacgtgggtcgcatgccagggtg

SEQ ID NO: 178906 - DNA, 30 bp, Artificial Sequence
  Synthetic oligonucleotide
gtaagtggtcgtggttgtccccgcagggtg

SEQ ID NO: 178907 - DNA, 30 bp, Artificial Sequence
  Synthetic oligonucleotide
cgtggcagcggtctggtaaagctcagggtg

SEQ ID NO: 178908 - DNA, 30 bp, Artificial Sequence
  Synthetic oligonucleotide
gtgggtaagcagcccgacgataagagggtg

SEQ ID NO: 178909 - DNA, 30 bp, Artificial Sequence
  Synthetic oligonucleotide
ttgtttggcggtgaggtggactctagggtg

SEQ ID NO: 178910 - DNA, 30 bp, Artificial Sequence
  Synthetic oligonucleotide
cctcgaaggtacagagatacaggtagggtg

SEQ ID NO: 178911 - DNA, 30 bp, Artificial Sequence
  Synthetic oligonucleotide
ataaaaggtagaagtacactcaaccgggtg

SEQ ID NO: 178912 - DNA, 30 bp, Artificial Sequence
  Synthetic oligonucleotide
ggtgtttgcactaggttagggaagcgggtg

SEQ ID NO: 178913 - DNA, 30 bp, Artificial Sequence
  Synthetic oligonucleotide
cctgaagggggactataatgtcagcgggtg

SEQ ID NO: 178914 - DNA, 30 bp, Artificial Sequence
  Synthetic oligonucleotide
acaagtagggatattaagcgggggcgggtg

SEQ ID NO: 178915 - DNA, 30 bp, Artificial Sequence
  Synthetic oligonucleotide
tacaaggctctgggtgacgttcctcgggtg

SEQ ID NO: 178916 - DNA, 30 bp, Artificial Sequence
  Synthetic oligonucleotide
gcggcggaggccgggcggctggaaggggtg

SEQ ID NO: 178917 - DNA, 30 bp, Artificial Sequence
  Synthetic oligonucleotide
tgcgagaaacttcctaagtgctcgggggtg

SEQ ID NO: 178918 - DNA, 30 bp, Artificial Sequence
  Synthetic oligonucleotide
tggcacgtgtaacttgccggctatggggtg

SEQ ID NO: 178919 - DNA, 30 bp, Artificial Sequence
  Synthetic oligonucleotide
gcgagaattacccggatattcattggggtg

SEQ ID NO: 178920 - DNA, 30 bp, Artificial Sequence
  Synthetic oligonucleotide
tatgtggccggtagggcgtggcaatgggtg

SEQ ID NO: 178921 - DNA, 30 bp, Artificial Sequence
  Synthetic oligonucleotide
ttgaaacagttcaagccgtgaccctgggtg

SEQ ID NO: 178922 - DNA, 30 bp, Artificial Sequence
  Synthetic oligonucleotide
gactaaaaggtttgctttagcccctgggtg

SEQ ID NO: 178923 - DNA, 30 bp, Artificial Sequence
  Synthetic oligonucleotide
aagagagtcgagcttccgtaagtgtgggtg

SEQ ID NO: 178924 - DNA, 30 bp, Artificial Sequence
  Synthetic oligonucleotide
ataaaccatgaatatatccttcgaatggtg

SEQ ID NO: 178925 - DNA, 30 bp, Artificial Sequence
  Synthetic oligonucleotide
atgacagaaaaccaaccggtactaatggtg

SEQ ID NO: 178926 - DNA, 30 bp, Artificial Sequence
  Synthetic oligonucleotide
tcgagtactatttgctgcgtccgcatggtg

SEQ ID NO: 178927 - DNA, 30 bp, Artificial Sequence
  Synthetic oligonucleotide
ggggacggctcgatttttcacgttatggtg

SEQ ID NO: 178928 - DNA, 30 bp, Artificial Sequence
  Synthetic oligonucleotide
tagtaagtagctcgctccaatatgctggtg

SEQ ID NO: 178929 - DNA, 30 bp, Artificial Sequence
  Synthetic oligonucleotide
tagcgttgcatgcctagatggcctctggtg

SEQ ID NO: 178930 - DNA, 30 bp, Artificial Sequence
  Synthetic oligonucleotide
gctaaagcgatttacatgataaaggtggtg

SEQ ID NO: 178931 - DNA, 30 bp, Artificial Sequence
  Synthetic oligonucleotide
ttacgggccaaatagcggtagaatgtggtg

SEQ ID NO: 178932 - DNA, 30 bp, Artificial Sequence
  Synthetic oligonucleotide
cacagaagtgattatagcagttatgtggtg

SEQ ID NO: 178933 - DNA, 30 bp, Artificial Sequence
  Synthetic oligonucleotide
tatggggctcatatgggcttacgattggtg

SEQ ID NO: 178934 - DNA, 30 bp, Artificial Sequence
  Synthetic oligonucleotide
gggtagaataaagaaatcaacacgttggtg

SEQ ID NO: 178935 - DNA, 30 bp, Artificial Sequence
  Synthetic oligonucleotide
actccgagtttaacagcaggatgtttggtg

SEQ ID NO: 178936 - DNA, 30 bp, Artificial Sequence
  Synthetic oligonucleotide
aaaggctaaaagcggagtttacaaaatgtg

SEQ ID NO: 178937 - DNA, 30 bp, Artificial Sequence
  Synthetic oligonucleotide
aacgggaagtcacatattcggagaaatgtg

SEQ ID NO: 178938 - DNA, 30 bp, Artificial Sequence
  Synthetic oligonucleotide
ctggcctgtatagctatcgagcgaaatgtg

SEQ ID NO: 178939 - DNA, 30 bp, Artificial Sequence
  Synthetic oligonucleotide
cgatttcgcagaagccccaaatgcaatgtg

SEQ ID NO: 178940 - DNA, 30 bp, Artificial Sequence
  Synthetic oligonucleotide
gacggcatttatatcattcgtttcaatgtg

SEQ ID NO: 178941 - DNA, 30 bp, Artificial Sequence
  Synthetic oligonucleotide
ccactagtcgcttagcgcgagtagaatgtg

SEQ ID NO: 178942 - DNA, 30 bp, Artificial Sequence
  Synthetic oligonucleotide
ttaaacagtcgggcgtgttaataacatgtg

SEQ ID NO: 178943 - DNA, 30 bp, Artificial Sequence
  Synthetic oligonucleotide
tccgagctgtcctcggcgttcccacatgtg

SEQ ID NO: 178944 - DNA, 30 bp, Artificial Sequence
  Synthetic oligonucleotide
gtaccatacacgctgcgaatgggacatgtg

SEQ ID NO: 178945 - DNA, 30 bp, Artificial Sequence
  Synthetic oligonucleotide
gactgaccggagtatgactgcgtccatgtg

SEQ ID NO: 178946 - DNA, 30 bp, Artificial Sequence
  Synthetic oligonucleotide
tctcgttttgtacatgttaaataagatgtg

SEQ ID NO: 178947 - DNA, 30 bp, Artificial Sequence
  Synthetic oligonucleotide
ggaaataagcccagagtcattatagatgtg

SEQ ID NO: 178948 - DNA, 30 bp, Artificial Sequence
  Synthetic oligonucleotide
ggacgctactgtttttataggtccgatgtg

SEQ ID NO: 178949 - DNA, 30 bp, Artificial Sequence
  Synthetic oligonucleotide
acaacgcactaccaatcttggtcggatgtg

SEQ ID NO: 178950 - DNA, 30 bp, Artificial Sequence
  Synthetic oligonucleotide
aaacgggtgatataggaacacgatgatgtg

SEQ ID NO: 178951 - DNA, 30 bp, Artificial Sequence
  Synthetic oligonucleotide
tgtcagggatccaagtacgttgttgatgtg

SEQ ID NO: 178952 - DNA, 29 bp, Artificial Sequence
  Synthetic oligonucleotide
cagcgtaaatagcgcagggcgtatatgtg

SEQ ID NO: 178953 - DNA, 30 bp, Artificial Sequence
  Synthetic oligonucleotide
cgaactgtctgctgacgttattcttatgtg

SEQ ID NO: 178954 - DNA, 30 bp, Artificial Sequence
  Synthetic oligonucleotide
gtgaaaattactggagagagcatttatgtg

SEQ ID NO: 178955 - DNA, 30 bp, Artificial Sequence
  Synthetic oligonucleotide
agtacacaggcactctaggcagtaactgtg

SEQ ID NO: 178956 - DNA, 30 bp, Artificial Sequence
  Synthetic oligonucleotide
gtaaggctttcgagacccgagttaactgtg

SEQ ID NO: 178957 - DNA, 30 bp, Artificial Sequence
  Synthetic oligonucleotide
tgattgatgtgccgacattcggggactgtg

SEQ ID NO: 178958 - DNA, 30 bp, Artificial Sequence
  Synthetic oligonucleotide
ggttggtataggtgatgtgtgaggcctgtg

SEQ ID NO: 178959 - DNA, 30 bp, Artificial Sequence
  Synthetic oligonucleotide
tggcagccaatttcggcagtctggcctgtg

SEQ ID NO: 178960 - DNA, 30 bp, Artificial Sequence
  Synthetic oligonucleotide
gggaggtggtatcacagcagagtgcctgtg

SEQ ID NO: 178961 - DNA, 30 bp, Artificial Sequence
  Synthetic oligonucleotide
tgattggcccgcgctacgttcaacgctgtg

SEQ ID NO: 178962 - DNA, 30 bp, Artificial Sequence
  Synthetic oligonucleotide
gggactccggtgaatcatgcgggggctgtg

SEQ ID NO: 178963 - DNA, 30 bp, Artificial Sequence
  Synthetic oligonucleotide
taggaagttcccagcccagaaagatctgtg

SEQ ID NO: 178964 - DNA, 30 bp, Artificial Sequence
  Synthetic oligonucleotide
acgagtacttattatgcttctaactctgtg

SEQ ID NO: 178965 - DNA, 30 bp, Artificial Sequence
  Synthetic oligonucleotide
atggtgcaaacggtttcctaacactctgtg

SEQ ID NO: 178966 - DNA, 30 bp, Artificial Sequence
  Synthetic oligonucleotide
tcgcacaagtgtgagtgccagggctctgtg

SEQ ID NO: 178967 - DNA, 30 bp, Artificial Sequence
  Synthetic oligonucleotide
ctgtggcaatgcgatcatatgtattctgtg

SEQ ID NO: 178968 - DNA, 30 bp, Artificial Sequence
  Synthetic oligonucleotide
cagaatcagcacgcatcgacgagcagtgtg

SEQ ID NO: 178969 - DNA, 30 bp, Artificial Sequence
  Synthetic oligonucleotide
agctacttataagcaattttcggacgtgtg

SEQ ID NO: 178970 - DNA, 30 bp, Artificial Sequence
  Synthetic oligonucleotide
acggttgcgaactgaggtattatgcgtgtg

SEQ ID NO: 178971 - DNA, 30 bp, Artificial Sequence
  Synthetic oligonucleotide
tacgcagttcatctgccgggtgtgcgtgtg

SEQ ID NO: 178972 - DNA, 30 bp, Artificial Sequence
  Synthetic oligonucleotide
tcgttgccaactagtttgaaacttcgtgtg

SEQ ID NO: 178973 - DNA, 30 bp, Artificial Sequence
  Synthetic oligonucleotide
gttgaggttcagtacggggtacaaggtgtg

SEQ ID NO: 178974 - DNA, 30 bp, Artificial Sequence
  Synthetic oligonucleotide
gcgctcacggtaaggcgatgttaaggtgtg

SEQ ID NO: 178975 - DNA, 30 bp, Artificial Sequence
  Synthetic oligonucleotide
ggatgtacgtggtggttgcgcagaggtgtg

SEQ ID NO: 178976 - DNA, 30 bp, Artificial Sequence
  Synthetic oligonucleotide
tcgacaagaggtataggggggagcggtgtg

SEQ ID NO: 178977 - DNA, 30 bp, Artificial Sequence
  Synthetic oligonucleotide
gaaagaagatcgcgagttgtacagggtgtg

SEQ ID NO: 178978 - DNA, 30 bp, Artificial Sequence
  Synthetic oligonucleotide
cgactaggatatgataagcccaggtgtgtg

SEQ ID NO: 178979 - DNA, 30 bp, Artificial Sequence
  Synthetic oligonucleotide
ctatttcagaatcatttccaaaaaattgtg

SEQ ID NO: 178980 - DNA, 30 bp, Artificial Sequence
  Synthetic oligonucleotide
cacataacgtcacccagtgaggtaattgtg

SEQ ID NO: 178981 - DNA, 30 bp, Artificial Sequence
  Synthetic oligonucleotide
cacggttacctatggcgttagaggattgtg

SEQ ID NO: 178982 - DNA, 30 bp, Artificial Sequence
  Synthetic oligonucleotide
gatgattcataagatcgacattggattgtg

SEQ ID NO: 178983 - DNA, 30 bp, Artificial Sequence
  Synthetic oligonucleotide
caatggctttggaccacctgcgatattgtg

SEQ ID NO: 178984 - DNA, 30 bp, Artificial Sequence
  Synthetic oligonucleotide
gggccgtgacaggacagtatagcccttgtg

SEQ ID NO: 178985 - DNA, 30 bp, Artificial Sequence
  Synthetic oligonucleotide
tctgtcgcgaggcccttgatagtccttgtg

SEQ ID NO: 178986 - DNA, 30 bp, Artificial Sequence
  Synthetic oligonucleotide
gagaggtacgataactgctcggccgttgtg

SEQ ID NO: 178987 - DNA, 30 bp, Artificial Sequence
  Synthetic oligonucleotide
tgggcgataggtaaatgtcgggtcgttgtg

SEQ ID NO: 178988 - DNA, 30 bp, Artificial Sequence
  Synthetic oligonucleotide
attgggcgaccacgggggccactggttgtg

SEQ ID NO: 178989 - DNA, 30 bp, Artificial Sequence
  Synthetic oligonucleotide
aatgggcactgtcaggacttacatgttgtg

SEQ ID NO: 178990 - DNA, 30 bp, Artificial Sequence
  Synthetic oligonucleotide
caagtagaccgaagctatatatctgttgtg

SEQ ID NO: 178991 - DNA, 30 bp, Artificial Sequence
  Synthetic oligonucleotide
gatatatgagaagcatgaagctaatttgtg

SEQ ID NO: 178992 - DNA, 30 bp, Artificial Sequence
  Synthetic oligonucleotide
gtaggattactgtttacgacaacctttgtg

SEQ ID NO: 178993 - DNA, 30 bp, Artificial Sequence
  Synthetic oligonucleotide
ctcagtgggatagatcgacgtccctttgtg

SEQ ID NO: 178994 - DNA, 30 bp, Artificial Sequence
  Synthetic oligonucleotide
ttccgtgcatgggcgaagtatgcgtttgtg

SEQ ID NO: 178995 - DNA, 30 bp, Artificial Sequence
  Synthetic oligonucleotide
agcaatacaatcatgagattatcgtttgtg

SEQ ID NO: 178996 - DNA, 30 bp, Artificial Sequence
  Synthetic oligonucleotide
ggtcaaactcacaatttggataaaaaattg

SEQ ID NO: 178997 - DNA, 30 bp, Artificial Sequence
  Synthetic oligonucleotide
tattgcggcgagtcatacatccaaaaattg

SEQ ID NO: 178998 - DNA, 30 bp, Artificial Sequence
  Synthetic oligonucleotide
cgctatcatcacagtagttcgataaaattg

SEQ ID NO: 178999 - DNA, 30 bp, Artificial Sequence
  Synthetic oligonucleotide
ttcggaggatgatttgtatatgccaaattg

SEQ ID NO: 179000 - DNA, 30 bp, Artificial Sequence
  Synthetic oligonucleotide
gttgatatgtggtgagatcttgtcaaattg

SEQ ID NO: 179001 - DNA, 30 bp, Artificial Sequence
  Synthetic oligonucleotide
acatagctaagttatctgtggtggaaattg

SEQ ID NO: 179002 - DNA, 30 bp, Artificial Sequence
  Synthetic oligonucleotide
ctacaaggaattctgccccggatgaaattg

SEQ ID NO: 179003 - DNA, 30 bp, Artificial Sequence
  Synthetic oligonucleotide
ttacaagctcgggttatgtcgaataaattg

SEQ ID NO: 179004 - DNA, 30 bp, Artificial Sequence
  Synthetic oligonucleotide
aggtttgcgaaggagaacctcagacaattg

SEQ ID NO: 179005 - DNA, 30 bp, Artificial Sequence
  Synthetic oligonucleotide
aagttcgtatccaagtttctgctccaattg

SEQ ID NO: 179006 - DNA, 30 bp, Artificial Sequence
  Synthetic oligonucleotide
tccttgcctggccgacctgccttccaattg

SEQ ID NO: 179007 - DNA, 30 bp, Artificial Sequence
  Synthetic oligonucleotide
cgcaccgtacctactgtatgaaagcaattg

SEQ ID NO: 179008 - DNA, 30 bp, Artificial Sequence
  Synthetic oligonucleotide
gtcagggaacgaccgactagccagcaattg

SEQ ID NO: 179009 - DNA, 30 bp, Artificial Sequence
  Synthetic oligonucleotide
tacggaaggagtcggtacgattggcaattg

SEQ ID NO: 179010 - DNA, 30 bp, Artificial Sequence
  Synthetic oligonucleotide
acagttcccctgaattcgaggcttcaattg

SEQ ID NO: 179011 - DNA, 30 bp, Artificial Sequence
  Synthetic oligonucleotide
ccatgtcctatgggttaggctcttcaattg

SEQ ID NO: 179012 - DNA, 30 bp, Artificial Sequence
  Synthetic oligonucleotide
aaggtccttacagggggccgggaagaattg

SEQ ID NO: 179013 - DNA, 31 bp, Artificial Sequence
  Synthetic oligonucleotide
cggcggtctcccgtaccattgtatagaattg

SEQ ID NO: 179014 - DNA, 30 bp, Artificial Sequence
  Synthetic oligonucleotide
gggtatataccttcttcatcagttgaattg

SEQ ID NO: 179015 - DNA, 30 bp, Artificial Sequence
  Synthetic oligonucleotide
tagtgctagaccggactgggaaaataattg

SEQ ID NO: 179016 - DNA, 30 bp, Artificial Sequence
  Synthetic oligonucleotide
cgacctgggcgggccgtgaataattaattg

SEQ ID NO: 179017 - DNA, 30 bp, Artificial Sequence
  Synthetic oligonucleotide
caagtgagtacctacaaagaggattaattg

SEQ ID NO: 179018 - DNA, 30 bp, Artificial Sequence
  Synthetic oligonucleotide
tcacggatgattggtagtacctaaacattg

SEQ ID NO: 179019 - DNA, 30 bp, Artificial Sequence
  Synthetic oligonucleotide
tcttaaatcctagtggagtcgccaacattg

SEQ ID NO: 179020 - DNA, 30 bp, Artificial Sequence
  Synthetic oligonucleotide
cagttttgtcctatcttggaaaacacattg

SEQ ID NO: 179021 - DNA, 30 bp, Artificial Sequence
  Synthetic oligonucleotide
ggccaggacgcattctatcagcccacattg

SEQ ID NO: 179022 - DNA, 30 bp, Artificial Sequence
  Synthetic oligonucleotide
gctagtggtagtcttcgagcattgacattg

SEQ ID NO: 179023 - DNA, 30 bp, Artificial Sequence
  Synthetic oligonucleotide
gtcacagggagtctattaaactctacattg

SEQ ID NO: 179024 - DNA, 30 bp, Artificial Sequence
  Synthetic oligonucleotide
ataggacatacgtaaacattagacccattg

SEQ ID NO: 179025 - DNA, 30 bp, Artificial Sequence
  Synthetic oligonucleotide
ttgggccagtccagtgctgcgcaagcattg

SEQ ID NO: 179026 - DNA, 30 bp, Artificial Sequence
  Synthetic oligonucleotide
tcgtggttcaatatgcaggaaatagcattg

SEQ ID NO: 179027 - DNA, 30 bp, Artificial Sequence
  Synthetic oligonucleotide
tgtatcactgacaagggaataatggcattg

SEQ ID NO: 179028 - DNA, 30 bp, Artificial Sequence
  Synthetic oligonucleotide
acttactcaatatttatcgtatatgcattg

SEQ ID NO: 179029 - DNA, 30 bp, Artificial Sequence
  Synthetic oligonucleotide
tgtttgaaggtgcgaataatgtactcattg

SEQ ID NO: 179030 - DNA, 30 bp, Artificial Sequence
  Synthetic oligonucleotide
atccgccaacgtgggatacgcaattcattg

SEQ ID NO: 179031 - DNA, 30 bp, Artificial Sequence
  Synthetic oligonucleotide
ttgcgattaagcagcgagcgcggcagattg

SEQ ID NO: 179032 - DNA, 30 bp, Artificial Sequence
  Synthetic oligonucleotide
cgcactcggcacccccatggtaagagattg

SEQ ID NO: 179033 - DNA, 30 bp, Artificial Sequence
  Synthetic oligonucleotide
agcctcgcggtattggcggcatagagattg

SEQ ID NO: 179034 - DNA, 30 bp, Artificial Sequence
  Synthetic oligonucleotide
atgggggcttacactgtgcagaggagattg

SEQ ID NO: 179035 - DNA, 30 bp, Artificial Sequence
  Synthetic oligonucleotide
caaaactagaatgaagggtaatcacgattg

SEQ ID NO: 179036 - DNA, 30 bp, Artificial Sequence
  Synthetic oligonucleotide
cgactagcaggagtttacgtaatacgattg

SEQ ID NO: 179037 - DNA, 30 bp, Artificial Sequence
  Synthetic oligonucleotide
cggtctgcgtgtctgggggtggggcgattg

SEQ ID NO: 179038 - DNA, 30 bp, Artificial Sequence
  Synthetic oligonucleotide
cgactagtcacatgaatccgcgcaggattg

SEQ ID NO: 179039 - DNA, 30 bp, Artificial Sequence
  Synthetic oligonucleotide
caggaaacttattctaaggttgggggattg

SEQ ID NO: 179040 - DNA, 30 bp, Artificial Sequence
  Synthetic oligonucleotide
gcacgcaggtgggttgacccaatgggattg

SEQ ID NO: 179041 - DNA, 30 bp, Artificial Sequence
  Synthetic oligonucleotide
tatagaggtatactaaaccgctatggattg

SEQ ID NO: 179042 - DNA, 30 bp, Artificial Sequence
  Synthetic oligonucleotide
tggaagcattgataatgtcagggatgattg

SEQ ID NO: 179043 - DNA, 30 bp, Artificial Sequence
  Synthetic oligonucleotide
ttggagcggcctgacagtcagcactgattg

SEQ ID NO: 179044 - DNA, 30 bp, Artificial Sequence
  Synthetic oligonucleotide
ttgttctcgcgatggggcgaggagtgattg

SEQ ID NO: 179045 - DNA, 30 bp, Artificial Sequence
  Synthetic oligonucleotide
caatgttcggaacagaaacgatggtgattg

SEQ ID NO: 179046 - DNA, 30 bp, Artificial Sequence
  Synthetic oligonucleotide
aacggaagagtagtaggcctgctgtgattg

SEQ ID NO: 179047 - DNA, 30 bp, Artificial Sequence
  Synthetic oligonucleotide
tagttcagagtggttgaggaagcttgattg

SEQ ID NO: 179048 - DNA, 30 bp, Artificial Sequence
  Synthetic oligonucleotide
gatcggataaattggtaagacttcatattg

SEQ ID NO: 179049 - DNA, 30 bp, Artificial Sequence
  Synthetic oligonucleotide
tgtcacagtgcttgaactctctatatattg

SEQ ID NO: 179050 - DNA, 30 bp, Artificial Sequence
  Synthetic oligonucleotide
gggctgcggagaataactcggcctatattg

SEQ ID NO: 179051 - DNA, 30 bp, Artificial Sequence
  Synthetic oligonucleotide
cattacaagaaaggcgcgcgtaaactattg

SEQ ID NO: 179052 - DNA, 30 bp, Artificial Sequence
  Synthetic oligonucleotide
ggtatcgaaccttctgttgatatactattg

SEQ ID NO: 179053 - DNA, 30 bp, Artificial Sequence
  Synthetic oligonucleotide
gttcgccccaaggtatgtaaccacctattg

SEQ ID NO: 179054 - DNA, 30 bp, Artificial Sequence
  Synthetic oligonucleotide
ggggtaccgcgttgcctgtggtcgctattg

SEQ ID NO: 179055 - DNA, 30 bp, Artificial Sequence
  Synthetic oligonucleotide
cgcatactccggcagggacggaatctattg

SEQ ID NO: 179056 - DNA, 30 bp, Artificial Sequence
  Synthetic oligonucleotide
tcaggagtacagctacggagataagtattg

SEQ ID NO: 179057 - DNA, 30 bp, Artificial Sequence
  Synthetic oligonucleotide
ggatgttactggtagccaactaccgtattg

SEQ ID NO: 179058 - DNA, 30 bp, Artificial Sequence
  Synthetic oligonucleotide
atcgaggtcagacggatccgtcccgtattg

SEQ ID NO: 179059 - DNA, 30 bp, Artificial Sequence
  Synthetic oligonucleotide
gaagcgtcaaggacatcgttccgcgtattg

SEQ ID NO: 179060 - DNA, 30 bp, Artificial Sequence
  Synthetic oligonucleotide
gcgacgtcatcccatcatgcgattgtattg

SEQ ID NO: 179061 - DNA, 30 bp, Artificial Sequence
  Synthetic oligonucleotide
cttttgacgatacatactgagcgattattg

SEQ ID NO: 179062 - DNA, 30 bp, Artificial Sequence
  Synthetic oligonucleotide
cagaaggacgtccagttcttcttattattg

SEQ ID NO: 179063 - DNA, 30 bp, Artificial Sequence
  Synthetic oligonucleotide
tagcgcactccgcctgaactacttttattg

SEQ ID NO: 179064 - DNA, 30 bp, Artificial Sequence
  Synthetic oligonucleotide
aactgttgaactacgagcttaacaaacttg

SEQ ID NO: 179065 - DNA, 30 bp, Artificial Sequence
  Synthetic oligonucleotide
aatacataggatgaatcacgcacaaacttg

SEQ ID NO: 179066 - DNA, 30 bp, Artificial Sequence
  Synthetic oligonucleotide
aattgtaaaagtgggctaaggagaaacttg

SEQ ID NO: 179067 - DNA, 30 bp, Artificial Sequence
  Synthetic oligonucleotide
agcttctgaggggatatggatcggaacttg

SEQ ID NO: 179068 - DNA, 30 bp, Artificial Sequence
  Synthetic oligonucleotide
tgcctcgatgaatgttgcagtggtaacttg

SEQ ID NO: 179069 - DNA, 30 bp, Artificial Sequence
  Synthetic oligonucleotide
atgagattctctacggtaactgaccacttg

SEQ ID NO: 179070 - DNA, 30 bp, Artificial Sequence
  Synthetic oligonucleotide
ttcctagcgagatccgcaacctgccacttg

SEQ ID NO: 179071 - DNA, 31 bp, Artificial Sequence
  Synthetic oligonucleotide
tcgaccgtaagggagagcggtttgccacttg

SEQ ID NO: 179072 - DNA, 30 bp, Artificial Sequence
  Synthetic oligonucleotide
ggcgttacggcgggataaacgaggcacttg

SEQ ID NO: 179073 - DNA, 30 bp, Artificial Sequence
  Synthetic oligonucleotide
ataagaaaccgcaaagaaatcaatcacttg

SEQ ID NO: 179074 - DNA, 30 bp, Artificial Sequence
  Synthetic oligonucleotide
accgacaggagcacacgctatgatcacttg

SEQ ID NO: 179075 - DNA, 30 bp, Artificial Sequence
  Synthetic oligonucleotide
ggtatacacgttgcgacattacgtcacttg

SEQ ID NO: 179076 - DNA, 30 bp, Artificial Sequence
  Synthetic oligonucleotide
acagcgcagggatcgctcattgcagacttg

SEQ ID NO: 179077 - DNA, 30 bp, Artificial Sequence
  Synthetic oligonucleotide
tgatacatcaatcggggttactcagacttg

SEQ ID NO: 179078 - DNA, 30 bp, Artificial Sequence
  Synthetic oligonucleotide
ttgagtcaaaaacaaatcgaacgctacttg

SEQ ID NO: 179079 - DNA, 30 bp, Artificial Sequence
  Synthetic oligonucleotide
gacgggaaacacgcgaaagttgaaaccttg

SEQ ID NO: 179080 - DNA, 30 bp, Artificial Sequence
  Synthetic oligonucleotide
agattaatggttctctgggctctcaccttg

SEQ ID NO: 179081 - DNA, 30 bp, Artificial Sequence
  Synthetic oligonucleotide
aggagttcatccatcttatttcagaccttg

SEQ ID NO: 179082 - DNA, 30 bp, Artificial Sequence
  Synthetic oligonucleotide
ccaaaacgatcctcgcccagaatgaccttg

SEQ ID NO: 179083 - DNA, 30 bp, Artificial Sequence
  Synthetic oligonucleotide
gttcgggacttgtgcgatcgagataccttg

SEQ ID NO: 179084 - DNA, 30 bp, Artificial Sequence
  Synthetic oligonucleotide
ggaacgaaacacggaataggcgctaccttg

SEQ ID NO: 179085 - DNA, 30 bp, Artificial Sequence
  Synthetic oligonucleotide
gtgagctagtgctgtcctcttcgtaccttg

SEQ ID NO: 179086 - DNA, 30 bp, Artificial Sequence
  Synthetic oligonucleotide
actattgctaaacatagggttattaccttg

SEQ ID NO: 179087 - DNA, 30 bp, Artificial Sequence
  Synthetic oligonucleotide
ttgagcagtggaaaaattctcggacccttg

SEQ ID NO: 179088 - DNA, 30 bp, Artificial Sequence
  Synthetic oligonucleotide
aggtttggggatgcttcgtgtatagccttg

SEQ ID NO: 179089 - DNA, 30 bp, Artificial Sequence
  Synthetic oligonucleotide
ccaggtgccagaagacagttttacgccttg

SEQ ID NO: 179090 - DNA, 30 bp, Artificial Sequence
  Synthetic oligonucleotide
actagcacacaattgcagtggcccgccttg

SEQ ID NO: 179091 - DNA, 30 bp, Artificial Sequence
  Synthetic oligonucleotide
gacgtatgtgcaccagcgaggggcgccttg

SEQ ID NO: 179092 - DNA, 30 bp, Artificial Sequence
  Synthetic oligonucleotide
tatcccaaaatagcaaaatcggctgccttg

SEQ ID NO: 179093 - DNA, 30 bp, Artificial Sequence
  Synthetic oligonucleotide
gtgcgcaaagtatctaagaatagttccttg

SEQ ID NO: 179094 - DNA, 30 bp, Artificial Sequence
  Synthetic oligonucleotide
tcaccgtcgatcgttagggaggaacgcttg

SEQ ID NO: 179095 - DNA, 30 bp, Artificial Sequence
  Synthetic oligonucleotide
tttaggctaggatgggaactgaatcgcttg

SEQ ID NO: 179096 - DNA, 30 bp, Artificial Sequence
  Synthetic oligonucleotide
gttagggtggggaccagacattatcgcttg

SEQ ID NO: 179097 - DNA, 30 bp, Artificial Sequence
  Synthetic oligonucleotide
tcacgtcatataagacattagggcggcttg

SEQ ID NO: 179098 - DNA, 30 bp, Artificial Sequence
  Synthetic oligonucleotide
cgaggggaatatcggttcggtctcggcttg

SEQ ID NO: 179099 - DNA, 30 bp, Artificial Sequence
  Synthetic oligonucleotide
tatggaaagagagtgtgggggtggggcttg

SEQ ID NO: 179100 - DNA, 30 bp, Artificial Sequence
  Synthetic oligonucleotide
catacggtactaaggcggtacttgggcttg

SEQ ID NO: 179101 - DNA, 30 bp, Artificial Sequence
  Synthetic oligonucleotide
atgcgtacggagagttatagagggtgcttg

SEQ ID NO: 179102 - DNA, 30 bp, Artificial Sequence
  Synthetic oligonucleotide
aacggccggctgatattggaacgcatcttg

SEQ ID NO: 179103 - DNA, 30 bp, Artificial Sequence
  Synthetic oligonucleotide
ggctatggagttaatttattagctatcttg

SEQ ID NO: 179104 - DNA, 30 bp, Artificial Sequence
  Synthetic oligonucleotide
tattggtaagggatagccagtgttatcttg

SEQ ID NO: 179105 - DNA, 30 bp, Artificial Sequence
  Synthetic oligonucleotide
tatagatctcccactcagaaactactcttg

SEQ ID NO: 179106 - DNA, 31 bp, Artificial Sequence
  Synthetic oligonucleotide
aaactggagcttccgtcgatttgcgctcttg

SEQ ID NO: 179107 - DNA, 30 bp, Artificial Sequence
  Synthetic oligonucleotide
ttgggcgaagtcgcaaaaattcgtctcttg

SEQ ID NO: 179108 - DNA, 30 bp, Artificial Sequence
  Synthetic oligonucleotide
aatggccgttagaatttgtgccgcgtcttg

SEQ ID NO: 179109 - DNA, 30 bp, Artificial Sequence
  Synthetic oligonucleotide
ccactggaatttcgatagcagtcattcttg

SEQ ID NO: 179110 - DNA, 30 bp, Artificial Sequence
  Synthetic oligonucleotide
atggtgtgaccgttcgtcctcgaaaagttg

SEQ ID NO: 179111 - DNA, 30 bp, Artificial Sequence
  Synthetic oligonucleotide
acaggccactgtctttggaaacccaagttg

SEQ ID NO: 179112 - DNA, 30 bp, Artificial Sequence
  Synthetic oligonucleotide
aaagctccataggatgactgcgagaagttg

SEQ ID NO: 179113 - DNA, 30 bp, Artificial Sequence
  Synthetic oligonucleotide
acgcttcactcggatagaccggcgaagttg

SEQ ID NO: 179114 - DNA, 30 bp, Artificial Sequence
  Synthetic oligonucleotide
ctatcccaagagtaatattcaatacagttg

SEQ ID NO: 179115 - DNA, 30 bp, Artificial Sequence
  Synthetic oligonucleotide
gatattgggtgtataatagctaatcagttg

SEQ ID NO: 179116 - DNA, 30 bp, Artificial Sequence
  Synthetic oligonucleotide
ccgcgtgtatcaaggtctcatggagagttg

SEQ ID NO: 179117 - DNA, 30 bp, Artificial Sequence
  Synthetic oligonucleotide
ccagtatcggctaaacagcttctcgagttg

SEQ ID NO: 179118 - DNA, 30 bp, Artificial Sequence
  Synthetic oligonucleotide
aggagctggctggtgggccggggggagttg

SEQ ID NO: 179119 - DNA, 30 bp, Artificial Sequence
  Synthetic oligonucleotide
acgttagtgctgatcggctctgtggagttg

SEQ ID NO: 179120 - DNA, 30 bp, Artificial Sequence
  Synthetic oligonucleotide
ccggggccctcggagtgcataactgagttg

SEQ ID NO: 179121 - DNA, 30 bp, Artificial Sequence
  Synthetic oligonucleotide
acataaaaggttgacttaagggcgtagttg

SEQ ID NO: 179122 - DNA, 30 bp, Artificial Sequence
  Synthetic oligonucleotide
gtgagtcggggatgcggatagtcaacgttg

SEQ ID NO: 179123 - DNA, 30 bp, Artificial Sequence
  Synthetic oligonucleotide
cacatgcgatcggtgcactccataacgttg

SEQ ID NO: 179124 - DNA, 31 bp, Artificial Sequence
  Synthetic oligonucleotide
cccagtagttattgggaggagagacacgttg

SEQ ID NO: 179125 - DNA, 30 bp, Artificial Sequence
  Synthetic oligonucleotide
taaacaacagtgagcaaggcgtcgacgttg

SEQ ID NO: 179126 - DNA, 30 bp, Artificial Sequence
  Synthetic oligonucleotide
ccttatagggagaagcaaagcatgacgttg

SEQ ID NO: 179127 - DNA, 31 bp, Artificial Sequence
  Synthetic oligonucleotide
gcgtacgtcgcatcagaacgatcgtccgttg

SEQ ID NO: 179128 - DNA, 30 bp, Artificial Sequence
  Synthetic oligonucleotide
agctggaccgtgttctctctcgaagcgttg

SEQ ID NO: 179129 - DNA, 30 bp, Artificial Sequence
  Synthetic oligonucleotide
cacataaagcagtaatttttttacgcgttg

SEQ ID NO: 179130 - DNA, 30 bp, Artificial Sequence
  Synthetic oligonucleotide
gcatcgagacgacgtgggaatggggcgttg

SEQ ID NO: 179131 - DNA, 30 bp, Artificial Sequence
  Synthetic oligonucleotide
agcggcattatagtgtgattgttggcgttg

SEQ ID NO: 179132 - DNA, 30 bp, Artificial Sequence
  Synthetic oligonucleotide
gcacgtgtctgttttaagcgaaatgcgttg

SEQ ID NO: 179133 - DNA, 30 bp, Artificial Sequence
  Synthetic oligonucleotide
tattatctgtctcggcgccataactcgttg

SEQ ID NO: 179134 - DNA, 30 bp, Artificial Sequence
  Synthetic oligonucleotide
ccgttaccggcaggcaaaaatggctcgttg

SEQ ID NO: 179135 - DNA, 30 bp, Artificial Sequence
  Synthetic oligonucleotide
cggtgaacaagggccaaggttttttcgttg

SEQ ID NO: 179136 - DNA, 30 bp, Artificial Sequence
  Synthetic oligonucleotide
atagcatgggatcgcgggctaaacaggttg

SEQ ID NO: 179137 - DNA, 30 bp, Artificial Sequence
  Synthetic oligonucleotide
caccattcaacgcgatcaaagttgaggttg

SEQ ID NO: 179138 - DNA, 30 bp, Artificial Sequence
  Synthetic oligonucleotide
gggcagcccccactaattattaagcggttg

SEQ ID NO: 179139 - DNA, 30 bp, Artificial Sequence
  Synthetic oligonucleotide
agatagaaattaggcgattctgccgggttg

SEQ ID NO: 179140 - DNA, 30 bp, Artificial Sequence
  Synthetic oligonucleotide
cacgtgtgccctcccagaggctccgggttg

SEQ ID NO: 179141 - DNA, 29 bp, Artificial Sequence
  Synthetic oligonucleotide
ataactagctttgatcgccccgcgggttg

SEQ ID NO: 179142 - DNA, 30 bp, Artificial Sequence
  Synthetic oligonucleotide
caaacgcaagaacacgcacataaggggttg

SEQ ID NO: 179143 - DNA, 30 bp, Artificial Sequence
  Synthetic oligonucleotide
tgcaatcttacccggacacgccgtgggttg

SEQ ID NO: 179144 - DNA, 30 bp, Artificial Sequence
  Synthetic oligonucleotide
ctcgacagccgattgggttgacttgggttg

SEQ ID NO: 179145 - DNA, 30 bp, Artificial Sequence
  Synthetic oligonucleotide
ggacagtcggaacccgattccacatggttg

SEQ ID NO: 179146 - DNA, 30 bp, Artificial Sequence
  Synthetic oligonucleotide
tcttcagtaggctcttgtatacggtggttg

SEQ ID NO: 179147 - DNA, 30 bp, Artificial Sequence
  Synthetic oligonucleotide
atagagctagccaattatcgagtttggttg

SEQ ID NO: 179148 - DNA, 30 bp, Artificial Sequence
  Synthetic oligonucleotide
tctagcatggggacacttcaccaaatgttg

SEQ ID NO: 179149 - DNA, 30 bp, Artificial Sequence
  Synthetic oligonucleotide
cacgacatctgagccctcttatcaatgttg

SEQ ID NO: 179150 - DNA, 30 bp, Artificial Sequence
  Synthetic oligonucleotide
tattgagaaactggtgctcgttccatgttg

SEQ ID NO: 179151 - DNA, 30 bp, Artificial Sequence
  Synthetic oligonucleotide
atcgcttggtcccgggattttagcatgttg

SEQ ID NO: 179152 - DNA, 30 bp, Artificial Sequence
  Synthetic oligonucleotide
gaaagagtttcaaagggaaggaagatgttg

SEQ ID NO: 179153 - DNA, 30 bp, Artificial Sequence
  Synthetic oligonucleotide
gagacagagcgtatggaaaaccgtatgttg

SEQ ID NO: 179154 - DNA, 30 bp, Artificial Sequence
  Synthetic oligonucleotide
atacactacccctatccaatagcactgttg

SEQ ID NO: 179155 - DNA, 30 bp, Artificial Sequence
  Synthetic oligonucleotide
ttggatactcgtaaggcgcgattactgttg

SEQ ID NO: 179156 - DNA, 30 bp, Artificial Sequence
  Synthetic oligonucleotide
ttgagtaatagacgcgataatatcctgttg

SEQ ID NO: 179157 - DNA, 30 bp, Artificial Sequence
  Synthetic oligonucleotide
cctttgtacggctcatagggtaaagtgttg

SEQ ID NO: 179158 - DNA, 30 bp, Artificial Sequence
  Synthetic oligonucleotide
ccgcatccccaatgtaattttgaggtgttg

SEQ ID NO: 179159 - DNA, 30 bp, Artificial Sequence
  Synthetic oligonucleotide
tgaagaatggatctggcttatttggtgttg

SEQ ID NO: 179160 - DNA, 30 bp, Artificial Sequence
  Synthetic oligonucleotide
agacagcttctgtgagcctggagtgtgttg

SEQ ID NO: 179161 - DNA, 30 bp, Artificial Sequence
  Synthetic oligonucleotide
cgtccggcgctcacctatggtttattgttg

SEQ ID NO: 179162 - DNA, 30 bp, Artificial Sequence
  Synthetic oligonucleotide
cgatcgataagtaaattcggttccaatttg

SEQ ID NO: 179163 - DNA, 30 bp, Artificial Sequence
  Synthetic oligonucleotide
tacttccatcagttggcctttcagaatttg

SEQ ID NO: 179164 - DNA, 30 bp, Artificial Sequence
  Synthetic oligonucleotide
atactagacaaacataccgagaggaatttg

SEQ ID NO: 179165 - DNA, 30 bp, Artificial Sequence
  Synthetic oligonucleotide
ttgttccgatctctctacacatctaatttg

SEQ ID NO: 179166 - DNA, 30 bp, Artificial Sequence
  Synthetic oligonucleotide
catatagctttaggaaaagttaacgatttg

SEQ ID NO: 179167 - DNA, 30 bp, Artificial Sequence
  Synthetic oligonucleotide
cctgcacagattagagtaatattcgatttg

SEQ ID NO: 179168 - DNA, 30 bp, Artificial Sequence
  Synthetic oligonucleotide
tatgataagatggtatggtgtttatatttg

SEQ ID NO: 179169 - DNA, 30 bp, Artificial Sequence
  Synthetic oligonucleotide
agcggacaacttggttcatacatctatttg

SEQ ID NO: 179170 - DNA, 30 bp, Artificial Sequence
  Synthetic oligonucleotide
ctcaggtgtaaacattgagtaccgtatttg

SEQ ID NO: 179171 - DNA, 30 bp, Artificial Sequence
  Synthetic oligonucleotide
gcgtgtcaactaggtgaataacattatttg

SEQ ID NO: 179172 - DNA, 30 bp, Artificial Sequence
  Synthetic oligonucleotide
ggagcgacatttggtcgaatacagactttg

SEQ ID NO: 179173 - DNA, 30 bp, Artificial Sequence
  Synthetic oligonucleotide
taacattgcccgaagcgagtatagactttg

SEQ ID NO: 179174 - DNA, 30 bp, Artificial Sequence
  Synthetic oligonucleotide
tggccggactaataaacaggtcaacctttg

SEQ ID NO: 179175 - DNA, 31 bp, Artificial Sequence
  Synthetic oligonucleotide
ctactgctctctgttattaccctaccctttg

SEQ ID NO: 179176 - DNA, 30 bp, Artificial Sequence
  Synthetic oligonucleotide
tcgagagtttccgccaggttagggcctttg

SEQ ID NO: 179177 - DNA, 30 bp, Artificial Sequence
  Synthetic oligonucleotide
gggacaaggaggggcgcaatacaagctttg

SEQ ID NO: 179178 - DNA, 30 bp, Artificial Sequence
  Synthetic oligonucleotide
ccattgctggattcgttcttccgtgctttg

SEQ ID NO: 179179 - DNA, 30 bp, Artificial Sequence
  Synthetic oligonucleotide
ggggaaggcaatcggctttgagtatctttg

SEQ ID NO: 179180 - DNA, 30 bp, Artificial Sequence
  Synthetic oligonucleotide
ggcactcgtaccgaaggtcttataagtttg

SEQ ID NO: 179181 - DNA, 30 bp, Artificial Sequence
  Synthetic oligonucleotide
ccaatatgcccttgtttaaaactaagtttg

SEQ ID NO: 179182 - DNA, 30 bp, Artificial Sequence
  Synthetic oligonucleotide
gcatgcgggtgcgtcctctgtctaagtttg

SEQ ID NO: 179183 - DNA, 30 bp, Artificial Sequence
  Synthetic oligonucleotide
gtggaaacgccagtatctcatcgtagtttg

SEQ ID NO: 179184 - DNA, 30 bp, Artificial Sequence
  Synthetic oligonucleotide
ataagctgaacttagtaaacatgacgtttg

SEQ ID NO: 179185 - DNA, 30 bp, Artificial Sequence
  Synthetic oligonucleotide
cggttaaccattcacggctctcgccgtttg

SEQ ID NO: 179186 - DNA, 30 bp, Artificial Sequence
  Synthetic oligonucleotide
cgccatgcttgtggtgggagaaagcgtttg

SEQ ID NO: 179187 - DNA, 30 bp, Artificial Sequence
  Synthetic oligonucleotide
tggtgcgaagggggccatcagggaggtttg

SEQ ID NO: 179188 - DNA, 30 bp, Artificial Sequence
  Synthetic oligonucleotide
gcttcgacctgaattatctcgaatggtttg

SEQ ID NO: 179189 - DNA, 30 bp, Artificial Sequence
  Synthetic oligonucleotide
tgatgcgcgtgggtttaaactaatggtttg

SEQ ID NO: 179190 - DNA, 30 bp, Artificial Sequence
  Synthetic oligonucleotide
tcaaagggaagtgaatagggtgctggtttg

SEQ ID NO: 179191 - DNA, 30 bp, Artificial Sequence
  Synthetic oligonucleotide
attgttgtgtctcacaggctgatctgtttg

SEQ ID NO: 179192 - DNA, 30 bp, Artificial Sequence
  Synthetic oligonucleotide
aagatcaggaggcaatatcaaaagtgtttg

SEQ ID NO: 179193 - DNA, 30 bp, Artificial Sequence
  Synthetic oligonucleotide
ctacgcaagcagtgcgggggtgggtgtttg

SEQ ID NO: 179194 - DNA, 31 bp, Artificial Sequence
  Synthetic oligonucleotide
cgtgtatgttatatccagttaatggtgtttg

SEQ ID NO: 179195 - DNA, 30 bp, Artificial Sequence
  Synthetic oligonucleotide
gtcaccactgataagtatacacattgtttg

SEQ ID NO: 179196 - DNA, 30 bp, Artificial Sequence
  Synthetic oligonucleotide
tgcatgtggaacatatcaagcgacattttg

SEQ ID NO: 179197 - DNA, 30 bp, Artificial Sequence
  Synthetic oligonucleotide
aattcaccgctgagctcgaagatcattttg

SEQ ID NO: 179198 - DNA, 30 bp, Artificial Sequence
  Synthetic oligonucleotide
gcgacggaatctgctcaagtaaggattttg

SEQ ID NO: 179199 - DNA, 30 bp, Artificial Sequence
  Synthetic oligonucleotide
gtgctgtagcggttagctaggatgattttg

SEQ ID NO: 179200 - DNA, 30 bp, Artificial Sequence
  Synthetic oligonucleotide
atcaagaggcgcgtgcgtagatatattttg

SEQ ID NO: 179201 - DNA, 30 bp, Artificial Sequence
  Synthetic oligonucleotide
cggcaacatcggcattacttgtttattttg

SEQ ID NO: 179202 - DNA, 31 bp, Artificial Sequence
  Synthetic oligonucleotide
tcgggcctcctaacctttacacttgcttttg

SEQ ID NO: 179203 - DNA, 30 bp, Artificial Sequence
  Synthetic oligonucleotide
actaactgtgcccatttgtaacatcttttg

SEQ ID NO: 179204 - DNA, 30 bp, Artificial Sequence
  Synthetic oligonucleotide
ttgggggacttgaagtactacactcttttg

SEQ ID NO: 179205 - DNA, 30 bp, Artificial Sequence
  Synthetic oligonucleotide
cgagagagctccaatctggtgtgtcttttg

SEQ ID NO: 179206 - DNA, 30 bp, Artificial Sequence
  Synthetic oligonucleotide
aaggcacaaagtgtgtgaaatgttcttttg

SEQ ID NO: 179207 - DNA, 30 bp, Artificial Sequence
  Synthetic oligonucleotide
agtggcagtggtttctaatgtgtagttttg

SEQ ID NO: 179208 - DNA, 30 bp, Artificial Sequence
  Synthetic oligonucleotide
cggttaaaccttatggagcgacacgttttg

SEQ ID NO: 179209 - DNA, 30 bp, Artificial Sequence
  Synthetic oligonucleotide
ctccacgagttaagtacaggattgtttttg

SEQ ID NO: 179210 - DNA, 30 bp, Artificial Sequence
  Synthetic oligonucleotide
gcgctagtcggataaagtacggtcaaaaat

SEQ ID NO: 179211 - DNA, 30 bp, Artificial Sequence
  Synthetic oligonucleotide
tgtgttgtacacattccctcgtagaaaaat

SEQ ID NO: 179212 - DNA, 30 bp, Artificial Sequence
  Synthetic oligonucleotide
ccatcagggggatcctatgcgacgaaaaat

SEQ ID NO: 179213 - DNA, 30 bp, Artificial Sequence
  Synthetic oligonucleotide
cttaagatcatacatcctattagtaaaaat

SEQ ID NO: 179214 - DNA, 30 bp, Artificial Sequence
  Synthetic oligonucleotide
acggcaattgcaacgtgggtcgaacaaaat

SEQ ID NO: 179215 - DNA, 30 bp, Artificial Sequence
  Synthetic oligonucleotide
ctggaccccacagagtaggtcgtacaaaat

SEQ ID NO: 179216 - DNA, 30 bp, Artificial Sequence
  Synthetic oligonucleotide
ggagcggctcgcaccatttaacagcaaaat

SEQ ID NO: 179217 - DNA, 30 bp, Artificial Sequence
  Synthetic oligonucleotide
cttaggaggcgcattggcgtctggcaaaat

SEQ ID NO: 179218 - DNA, 30 bp, Artificial Sequence
  Synthetic oligonucleotide
gcttacgaggaaagtattctgctgcaaaat

SEQ ID NO: 179219 - DNA, 30 bp, Artificial Sequence
  Synthetic oligonucleotide
tctaggggaccattcgaaattctagaaaat

SEQ ID NO: 179220 - DNA, 30 bp, Artificial Sequence
  Synthetic oligonucleotide
gtggatggcacgacggtatgatacgaaaat

SEQ ID NO: 179221 - DNA, 30 bp, Artificial Sequence
  Synthetic oligonucleotide
gtcggaaccccttcgtctatgtctgaaaat

SEQ ID NO: 179222 - DNA, 30 bp, Artificial Sequence
  Synthetic oligonucleotide
gaagactcatacagaccaccacgtgaaaat

SEQ ID NO: 179223 - DNA, 30 bp, Artificial Sequence
  Synthetic oligonucleotide
cgatccgtatatggcgcactaccataaaat

SEQ ID NO: 179224 - DNA, 30 bp, Artificial Sequence
  Synthetic oligonucleotide
caggcttcgacggggcaaaaaacctaaaat

SEQ ID NO: 179225 - DNA, 30 bp, Artificial Sequence
  Synthetic oligonucleotide
gcacgcttaaaagatccaaggcagtaaaat

SEQ ID NO: 179226 - DNA, 30 bp, Artificial Sequence
  Synthetic oligonucleotide
cccgataccagctagtttaggagttaaaat

SEQ ID NO: 179227 - DNA, 30 bp, Artificial Sequence
  Synthetic oligonucleotide
taggaacggatactttccttaggttaaaat

SEQ ID NO: 179228 - DNA, 30 bp, Artificial Sequence
  Synthetic oligonucleotide
agaataaggaaaaaacctcaagtaacaaat

SEQ ID NO: 179229 - DNA, 30 bp, Artificial Sequence
  Synthetic oligonucleotide
ggggacccagttctgctatcggatacaaat

SEQ ID NO: 179230 - DNA, 30 bp, Artificial Sequence
  Synthetic oligonucleotide
tctcaataaatcgctgggtgagaaccaaat

SEQ ID NO: 179231 - DNA, 30 bp, Artificial Sequence
  Synthetic oligonucleotide
tgtgcgactgggaatgttttgactccaaat

SEQ ID NO: 179232 - DNA, 30 bp, Artificial Sequence
  Synthetic oligonucleotide
ggcgtagtctgaccatttgctggagcaaat

SEQ ID NO: 179233 - DNA, 30 bp, Artificial Sequence
  Synthetic oligonucleotide
tgcaggttagggaatctgcgcagcgcaaat

SEQ ID NO: 179234 - DNA, 30 bp, Artificial Sequence
  Synthetic oligonucleotide
ctagatcaaagcttcgtgctactcgcaaat

SEQ ID NO: 179235 - DNA, 30 bp, Artificial Sequence
  Synthetic oligonucleotide
tctgtggtcagactctgtagacaatcaaat

SEQ ID NO: 179236 - DNA, 30 bp, Artificial Sequence
  Synthetic oligonucleotide
gtcaatcggataaatttaatgtaatcaaat

SEQ ID NO: 179237 - DNA, 31 bp, Artificial Sequence
  Synthetic oligonucleotide
cgtttgaaagaaccggcgtatcgcctcaaat

SEQ ID NO: 179238 - DNA, 30 bp, Artificial Sequence
  Synthetic oligonucleotide
gcttaagagtcaacctaatggtgctcaaat

SEQ ID NO: 179239 - DNA, 30 bp, Artificial Sequence
  Synthetic oligonucleotide
taacccaagccaattggtgtttgttcaaat

SEQ ID NO: 179240 - DNA, 30 bp, Artificial Sequence
  Synthetic oligonucleotide
taatacagagttcaatttttctacagaaat

SEQ ID NO: 179241 - DNA, 30 bp, Artificial Sequence
  Synthetic oligonucleotide
agggaacgaagcccgaggctgtccagaaat

SEQ ID NO: 179242 - DNA, 30 bp, Artificial Sequence
  Synthetic oligonucleotide
gatagtctccgacacgtgaggctcagaaat

SEQ ID NO: 179243 - DNA, 30 bp, Artificial Sequence
  Synthetic oligonucleotide
caggcctatagcagaacggtagagagaaat

SEQ ID NO: 179244 - DNA, 30 bp, Artificial Sequence
  Synthetic oligonucleotide
tctaatggaggtccgtacggggcgagaaat

SEQ ID NO: 179245 - DNA, 30 bp, Artificial Sequence
  Synthetic oligonucleotide
cgattagcagcacaccgtgcggtgagaaat

SEQ ID NO: 179246 - DNA, 30 bp, Artificial Sequence
  Synthetic oligonucleotide
agggcattttttacccttgtcgatagaaat

SEQ ID NO: 179247 - DNA, 30 bp, Artificial Sequence
  Synthetic oligonucleotide
actaagggggaggggaaaggcgcgcgaaat

SEQ ID NO: 179248 - DNA, 30 bp, Artificial Sequence
  Synthetic oligonucleotide
gcctgtaaacagaatggaggaattcgaaat

SEQ ID NO: 179249 - DNA, 30 bp, Artificial Sequence
  Synthetic oligonucleotide
acctagaatgggggaacaattagaggaaat

SEQ ID NO: 179250 - DNA, 30 bp, Artificial Sequence
  Synthetic oligonucleotide
tcagagacattttcaagtgggataggaaat

SEQ ID NO: 179251 - DNA, 30 bp, Artificial Sequence
  Synthetic oligonucleotide
gctggaacaggaaccgttcttctaggaaat

SEQ ID NO: 179252 - DNA, 30 bp, Artificial Sequence
  Synthetic oligonucleotide
ctgcgtacggtcttcggctctaagggaaat

SEQ ID NO: 179253 - DNA, 31 bp, Artificial Sequence
  Synthetic oligonucleotide
cataaggtatgggacatgggcgcgtggaaat

SEQ ID NO: 179254 - DNA, 30 bp, Artificial Sequence
  Synthetic oligonucleotide
agagataatagactgaaagtgattggaaat

SEQ ID NO: 179255 - DNA, 30 bp, Artificial Sequence
  Synthetic oligonucleotide
agcgacacgcgtatggtctgcccatgaaat

SEQ ID NO: 179256 - DNA, 30 bp, Artificial Sequence
  Synthetic oligonucleotide
tgcagtacaatcagggcttaaagatgaaat

SEQ ID NO: 179257 - DNA, 30 bp, Artificial Sequence
  Synthetic oligonucleotide
catgtggtctttgaaaggaacgtatgaaat

SEQ ID NO: 179258 - DNA, 30 bp, Artificial Sequence
  Synthetic oligonucleotide
ccattacagtagatgcattccaagtgaaat

SEQ ID NO: 179259 - DNA, 30 bp, Artificial Sequence
  Synthetic oligonucleotide
actatgtacaaagatacaatatagtgaaat

SEQ ID NO: 179260 - DNA, 31 bp, Artificial Sequence
  Synthetic oligonucleotide
ttgagcgttacctgggtactcccaaataaat

SEQ ID NO: 179261 - DNA, 30 bp, Artificial Sequence
  Synthetic oligonucleotide
ataagcgaggccgatccgttcggaataaat

SEQ ID NO: 179262 - DNA, 30 bp, Artificial Sequence
  Synthetic oligonucleotide
agagctgggtaagttaaggcttccataaat

SEQ ID NO: 179263 - DNA, 30 bp, Artificial Sequence
  Synthetic oligonucleotide
agagtcgacttatgtgacctggcgctaaat

SEQ ID NO: 179264 - DNA, 30 bp, Artificial Sequence
  Synthetic oligonucleotide
aaaagcggcggggagccgagtagcgtaaat

SEQ ID NO: 179265 - DNA, 30 bp, Artificial Sequence
  Synthetic oligonucleotide
ccaaatggctcgacggccgatggcgtaaat

SEQ ID NO: 179266 - DNA, 30 bp, Artificial Sequence
  Synthetic oligonucleotide
agtaggcgtccgtttacatagatcgtaaat

SEQ ID NO: 179267 - DNA, 30 bp, Artificial Sequence
  Synthetic oligonucleotide
cataccgacgtacaggtacaggtcgtaaat

SEQ ID NO: 179268 - DNA, 30 bp, Artificial Sequence
  Synthetic oligonucleotide
ttccgaaggccaggttcagattgggtaaat

SEQ ID NO: 179269 - DNA, 30 bp, Artificial Sequence
  Synthetic oligonucleotide
gtagtgataagagctcgtcctgtggtaaat

SEQ ID NO: 179270 - DNA, 30 bp, Artificial Sequence
  Synthetic oligonucleotide
agtggtaccaccaatcaagtagaattaaat

SEQ ID NO: 179271 - DNA, 30 bp, Artificial Sequence
  Synthetic oligonucleotide
acagtacagtgcgggtgggaaaacttaaat

SEQ ID NO: 179272 - DNA, 30 bp, Artificial Sequence
  Synthetic oligonucleotide
cgcccgctggaataggttgtaggcttaaat

SEQ ID NO: 179273 - DNA, 30 bp, Artificial Sequence
  Synthetic oligonucleotide
tggagggttgatgccggcgttggcttaaat

SEQ ID NO: 179274 - DNA, 30 bp, Artificial Sequence
  Synthetic oligonucleotide
agtcgcgcagcaccgaaaggagacaacaat

SEQ ID NO: 179275 - DNA, 30 bp, Artificial Sequence
  Synthetic oligonucleotide
cgaccgagagtgttgacctaccccaacaat

SEQ ID NO: 179276 - DNA, 30 bp, Artificial Sequence
  Synthetic oligonucleotide
ggtcgggacatcgtatcttcaacgaacaat

SEQ ID NO: 179277 - DNA, 30 bp, Artificial Sequence
  Synthetic oligonucleotide
actaagtattgcgtcgaatcaaggaacaat

SEQ ID NO: 179278 - DNA, 30 bp, Artificial Sequence
  Synthetic oligonucleotide
gactaggtgctgtgttagtacgagcacaat

SEQ ID NO: 179279 - DNA, 30 bp, Artificial Sequence
  Synthetic oligonucleotide
cattagcaagggtcgcgctatcggcacaat

SEQ ID NO: 179280 - DNA, 30 bp, Artificial Sequence
  Synthetic oligonucleotide
gcaagcaacatacgtgacagttggcacaat

SEQ ID NO: 179281 - DNA, 30 bp, Artificial Sequence
  Synthetic oligonucleotide
accttaacactctgactagtggtagacaat

SEQ ID NO: 179282 - DNA, 30 bp, Artificial Sequence
  Synthetic oligonucleotide
aattggagtcgatcccacctcaacgacaat

SEQ ID NO: 179283 - DNA, 30 bp, Artificial Sequence
  Synthetic oligonucleotide
atggatagagacggcacagagcgcgacaat

SEQ ID NO: 179284 - DNA, 30 bp, Artificial Sequence
  Synthetic oligonucleotide
ataaaacaatggtgtttgtgcctcgacaat

SEQ ID NO: 179285 - DNA, 30 bp, Artificial Sequence
  Synthetic oligonucleotide
gtgaacggacagttagtaaagattgacaat

SEQ ID NO: 179286 - DNA, 30 bp, Artificial Sequence
  Synthetic oligonucleotide
aacgcgtaaaaggatacacacgcgtacaat

SEQ ID NO: 179287 - DNA, 30 bp, Artificial Sequence
  Synthetic oligonucleotide
aaggtcacttttgtttcaacaaattacaat

SEQ ID NO: 179288 - DNA, 30 bp, Artificial Sequence
  Synthetic oligonucleotide
gcaaggtcctacacagaggtgatttacaat

SEQ ID NO: 179289 - DNA, 30 bp, Artificial Sequence
  Synthetic oligonucleotide
aaaggtggcgtacatctagatatgaccaat

SEQ ID NO: 179290 - DNA, 30 bp, Artificial Sequence
  Synthetic oligonucleotide
tagtattcacgacaagcatagcggcccaat

SEQ ID NO: 179291 - DNA, 31 bp, Artificial Sequence
  Synthetic oligonucleotide
tgggaaggatccatgctcgagttggcccaat

SEQ ID NO: 179292 - DNA, 30 bp, Artificial Sequence
  Synthetic oligonucleotide
acagacggagacacgacggacaaagccaat

SEQ ID NO: 179293 - DNA, 30 bp, Artificial Sequence
  Synthetic oligonucleotide
cactaaatacgcttcgcgcatacggccaat

SEQ ID NO: 179294 - DNA, 30 bp, Artificial Sequence
  Synthetic oligonucleotide
tcgtacagcgtagttcctggcatggccaat

SEQ ID NO: 179295 - DNA, 30 bp, Artificial Sequence
  Synthetic oligonucleotide
gagagcttgtctacaagatatctggccaat

SEQ ID NO: 179296 - DNA, 30 bp, Artificial Sequence
  Synthetic oligonucleotide
tcaaatgccgagttcgtgctcccatccaat

SEQ ID NO: 179297 - DNA, 30 bp, Artificial Sequence
  Synthetic oligonucleotide
gaatacggacaacgataagcgtgatccaat

SEQ ID NO: 179298 - DNA, 30 bp, Artificial Sequence
  Synthetic oligonucleotide
tctggtgtactgccatccacggcctccaat

SEQ ID NO: 179299 - DNA, 30 bp, Artificial Sequence
  Synthetic oligonucleotide
tatccgacttaacacagttagatttccaat

SEQ ID NO: 179300 - DNA, 31 bp, Artificial Sequence
  Synthetic oligonucleotide
aggactaaaaaactatcctaaggtttccaat

SEQ ID NO: 179301 - DNA, 30 bp, Artificial Sequence
  Synthetic oligonucleotide
gcagccgcgaggtctttggcagggagcaat

SEQ ID NO: 179302 - DNA, 30 bp, Artificial Sequence
  Synthetic oligonucleotide
gacgtacgaggggttactacgctacgcaat

SEQ ID NO: 179303 - DNA, 30 bp, Artificial Sequence
  Synthetic oligonucleotide
gcgtacattggggtaatagaagcgcgcaat

SEQ ID NO: 179304 - DNA, 30 bp, Artificial Sequence
  Synthetic oligonucleotide
aagcgtccgatccagcttctggaaggcaat

SEQ ID NO: 179305 - DNA, 30 bp, Artificial Sequence
  Synthetic oligonucleotide
cgcttgaggggtctcaccaggggaggcaat

SEQ ID NO: 179306 - DNA, 30 bp, Artificial Sequence
  Synthetic oligonucleotide
cctggcgcagacggacttactatcggcaat

SEQ ID NO: 179307 - DNA, 30 bp, Artificial Sequence
  Synthetic oligonucleotide
tccttaccgaatcactggagagtcggcaat

SEQ ID NO: 179308 - DNA, 30 bp, Artificial Sequence
  Synthetic oligonucleotide
attgtgactggatagacgtgaagtggcaat

SEQ ID NO: 179309 - DNA, 30 bp, Artificial Sequence
  Synthetic oligonucleotide
gaacgacttgaggcctgaaggccctgcaat

SEQ ID NO: 179310 - DNA, 30 bp, Artificial Sequence
  Synthetic oligonucleotide
cgtcacagtgtggagaaaagcttctgcaat

SEQ ID NO: 179311 - DNA, 30 bp, Artificial Sequence
  Synthetic oligonucleotide
ccacctgtggacagccgtaccatgtgcaat

SEQ ID NO: 179312 - DNA, 30 bp, Artificial Sequence
  Synthetic oligonucleotide
ggtaggatggcgagaaaatgtgaaatcaat

SEQ ID NO: 179313 - DNA, 30 bp, Artificial Sequence
  Synthetic oligonucleotide
tacctcagcctcgcccgatagctaatcaat

SEQ ID NO: 179314 - DNA, 30 bp, Artificial Sequence
  Synthetic oligonucleotide
ggtgtagaaataagcctcgtccctatcaat

SEQ ID NO: 179315 - DNA, 30 bp, Artificial Sequence
  Synthetic oligonucleotide
aacaggataaatcaagaagtgagactcaat

SEQ ID NO: 179316 - DNA, 30 bp, Artificial Sequence
  Synthetic oligonucleotide
agtgcatgtcgaatgatggcggtgctcaat

SEQ ID NO: 179317 - DNA, 30 bp, Artificial Sequence
  Synthetic oligonucleotide
acactagttggccaaactgtccacgtcaat

SEQ ID NO: 179318 - DNA, 30 bp, Artificial Sequence
  Synthetic oligonucleotide
gaaggcaaagacccatggtttagcgtcaat

SEQ ID NO: 179319 - DNA, 30 bp, Artificial Sequence
  Synthetic oligonucleotide
gacaagggaaaccagtcagatccggtcaat

SEQ ID NO: 179320 - DNA, 30 bp, Artificial Sequence
  Synthetic oligonucleotide
tgggagacaccgaaacagcagatggtcaat

SEQ ID NO: 179321 - DNA, 30 bp, Artificial Sequence
  Synthetic oligonucleotide
ggtgagctgtgtactagatataacttcaat

SEQ ID NO: 179322 - DNA, 30 bp, Artificial Sequence
  Synthetic oligonucleotide
gcgcaatctgcgcccttaagtatcttcaat

SEQ ID NO: 179323 - DNA, 30 bp, Artificial Sequence
  Synthetic oligonucleotide
gtgcacttaaatagaggcccgtgtttcaat

SEQ ID NO: 179324 - DNA, 30 bp, Artificial Sequence
  Synthetic oligonucleotide
ggagtaagacgccgaaagaacgaaaagaat

SEQ ID NO: 179325 - DNA, 30 bp, Artificial Sequence
  Synthetic oligonucleotide
cagctcaaaacgcctgaacaccccaagaat

SEQ ID NO: 179326 - DNA, 30 bp, Artificial Sequence
  Synthetic oligonucleotide
ggtacctgggttctaaggtggtgcaagaat

SEQ ID NO: 179327 - DNA, 30 bp, Artificial Sequence
  Synthetic oligonucleotide
gttagggaaaaactataccaggtcaagaat

SEQ ID NO: 179328 - DNA, 30 bp, Artificial Sequence
  Synthetic oligonucleotide
tcaggatgaagtacgatctttgtcaagaat

SEQ ID NO: 179329 - DNA, 30 bp, Artificial Sequence
  Synthetic oligonucleotide
ctcggtgttaagcttgctctccagaagaat

SEQ ID NO: 179330 - DNA, 30 bp, Artificial Sequence
  Synthetic oligonucleotide
cagaacactaattatgcaccaaggaagaat

SEQ ID NO: 179331 - DNA, 31 bp, Artificial Sequence
  Synthetic oligonucleotide
gcggggtggtttgctacagggaatgaagaat

SEQ ID NO: 179332 - DNA, 30 bp, Artificial Sequence
  Synthetic oligonucleotide
gtttggcgaaactctcaggtaatgaagaat

SEQ ID NO: 179333 - DNA, 30 bp, Artificial Sequence
  Synthetic oligonucleotide
tccaacacagtagatttaaatccgcagaat

SEQ ID NO: 179334 - DNA, 30 bp, Artificial Sequence
  Synthetic oligonucleotide
agggaaggaggtgtgacctcccggcagaat

SEQ ID NO: 179335 - DNA, 30 bp, Artificial Sequence
  Synthetic oligonucleotide
ttaacgaatgacggaagaggtgctcagaat

SEQ ID NO: 179336 - DNA, 30 bp, Artificial Sequence
  Synthetic oligonucleotide
aggggttctggcactacgaactgtcagaat

SEQ ID NO: 179337 - DNA, 30 bp, Artificial Sequence
  Synthetic oligonucleotide
agttatggagagctaacacccggagagaat

SEQ ID NO: 179338 - DNA, 30 bp, Artificial Sequence
  Synthetic oligonucleotide
ctcacggccgcattatcaaggtccgagaat

SEQ ID NO: 179339 - DNA, 30 bp, Artificial Sequence
  Synthetic oligonucleotide
tggtagggccctaagctacttaatgagaat

SEQ ID NO: 179340 - DNA, 30 bp, Artificial Sequence
  Synthetic oligonucleotide
tttactatggatacaggacatcctgagaat

SEQ ID NO: 179341 - DNA, 30 bp, Artificial Sequence
  Synthetic oligonucleotide
gggcaaagtacaacactgcattaaacgaat

SEQ ID NO: 179342 - DNA, 30 bp, Artificial Sequence
  Synthetic oligonucleotide
ggcagtgtctatgacgacagaggcccgaat

SEQ ID NO: 179343 - DNA, 30 bp, Artificial Sequence
  Synthetic oligonucleotide
caccaaaggctatgagaataaactccgaat

SEQ ID NO: 179344 - DNA, 30 bp, Artificial Sequence
  Synthetic oligonucleotide
ataacctacctcacgagcataactccgaat

SEQ ID NO: 179345 - DNA, 30 bp, Artificial Sequence
  Synthetic oligonucleotide
aaccggtgttctactcgtgagggtccgaat

SEQ ID NO: 179346 - DNA, 30 bp, Artificial Sequence
  Synthetic oligonucleotide
ggaccacggcgatagggaccgatagcgaat

SEQ ID NO: 179347 - DNA, 30 bp, Artificial Sequence
  Synthetic oligonucleotide
atcgtaggaaaagatgtggactgcgcgaat

SEQ ID NO: 179348 - DNA, 30 bp, Artificial Sequence
  Synthetic oligonucleotide
tgagaatcgtcagtcgacgggaaggcgaat

SEQ ID NO: 179349 - DNA, 30 bp, Artificial Sequence
  Synthetic oligonucleotide
ttacaccattcctggtcgggccgggcgaat

SEQ ID NO: 179350 - DNA, 30 bp, Artificial Sequence
  Synthetic oligonucleotide
ttttcgcaatcatgggtgtgcatctcgaat

SEQ ID NO: 179351 - DNA, 30 bp, Artificial Sequence
  Synthetic oligonucleotide
gaggaatatctttcgagtagcacgtcgaat

SEQ ID NO: 179352 - DNA, 30 bp, Artificial Sequence
  Synthetic oligonucleotide
agtgaaggtcgatgtagtaagtcgtcgaat

SEQ ID NO: 179353 - DNA, 30 bp, Artificial Sequence
  Synthetic oligonucleotide
catctattcagtttatggcctcggtcgaat

SEQ ID NO: 179354 - DNA, 30 bp, Artificial Sequence
  Synthetic oligonucleotide
tagaaatatagcgaatagcgtcgaaggaat

SEQ ID NO: 179355 - DNA, 30 bp, Artificial Sequence
  Synthetic oligonucleotide
ggacgtggacttaaggctggaaacaggaat

SEQ ID NO: 179356 - DNA, 30 bp, Artificial Sequence
  Synthetic oligonucleotide
gggcccactcacgatgaaatggataggaat

SEQ ID NO: 179357 - DNA, 30 bp, Artificial Sequence
  Synthetic oligonucleotide
gagggtatgcgacccagggcgtataggaat

SEQ ID NO: 179358 - DNA, 30 bp, Artificial Sequence
  Synthetic oligonucleotide
gtacgggaagtcaacttacgatttaggaat

SEQ ID NO: 179359 - DNA, 30 bp, Artificial Sequence
  Synthetic oligonucleotide
ggagcaggcaaagagccccagcaccggaat

SEQ ID NO: 179360 - DNA, 30 bp, Artificial Sequence
  Synthetic oligonucleotide
gcgatgctttacgtaggcgcatatcggaat

SEQ ID NO: 179361 - DNA, 30 bp, Artificial Sequence
  Synthetic oligonucleotide
ttcgaccggacccgtaaacttattcggaat

SEQ ID NO: 179362 - DNA, 30 bp, Artificial Sequence
  Synthetic oligonucleotide
ggtttcccgatcgcataaacgaaagggaat

SEQ ID NO: 179363 - DNA, 31 bp, Artificial Sequence
  Synthetic oligonucleotide
ttagttacgagggaaaaggaggcaagggaat

SEQ ID NO: 179364 - DNA, 30 bp, Artificial Sequence
  Synthetic oligonucleotide
tcatgaaattcggcaccagcgcgagggaat

SEQ ID NO: 179365 - DNA, 30 bp, Artificial Sequence
  Synthetic oligonucleotide
ccactgtttggttctagaagcgtagggaat

SEQ ID NO: 179366 - DNA, 30 bp, Artificial Sequence
  Synthetic oligonucleotide
tcctggaaggaacgtggtggattagggaat

SEQ ID NO: 179367 - DNA, 30 bp, Artificial Sequence
  Synthetic oligonucleotide
actctctgaactagcttggctcccgggaat

SEQ ID NO: 179368 - DNA, 30 bp, Artificial Sequence
  Synthetic oligonucleotide
tcaggaaggtactaaacagcccgcgggaat

SEQ ID NO: 179369 - DNA, 30 bp, Artificial Sequence
  Synthetic oligonucleotide
gttcgaataaaatggatcgagtgcgggaat

SEQ ID NO: 179370 - DNA, 30 bp, Artificial Sequence
  Synthetic oligonucleotide
gctagtagtccaaggcgtggttgcgggaat

SEQ ID NO: 179371 - DNA, 30 bp, Artificial Sequence
  Synthetic oligonucleotide
tggctgatatacagtaatcgtgaggggaat

SEQ ID NO: 179372 - DNA, 30 bp, Artificial Sequence
  Synthetic oligonucleotide
cttttggagtaagcgtaaatctcggggaat

SEQ ID NO: 179373 - DNA, 30 bp, Artificial Sequence
  Synthetic oligonucleotide
attttggggagtggaaatacatgggggaat

SEQ ID NO: 179374 - DNA, 30 bp, Artificial Sequence
  Synthetic oligonucleotide
gactgataacggggatcaccacatgggaat

SEQ ID NO: 179375 - DNA, 30 bp, Artificial Sequence
  Synthetic oligonucleotide
catgggaaacacagttagcgaaactggaat

SEQ ID NO: 179376 - DNA, 30 bp, Artificial Sequence
  Synthetic oligonucleotide
tgggtgggaggaattgctttaaattggaat

SEQ ID NO: 179377 - DNA, 30 bp, Artificial Sequence
  Synthetic oligonucleotide
gcatccaccgatatacaggagataatgaat

SEQ ID NO: 179378 - DNA, 30 bp, Artificial Sequence
  Synthetic oligonucleotide
cgtcaaccctctaggtgagcaaacatgaat

SEQ ID NO: 179379 - DNA, 30 bp, Artificial Sequence
  Synthetic oligonucleotide
tgacgccgtggtgacagagactccatgaat

SEQ ID NO: 179380 - DNA, 30 bp, Artificial Sequence
  Synthetic oligonucleotide
gtgactgctactcgttgtaaaatcatgaat

SEQ ID NO: 179381 - DNA, 30 bp, Artificial Sequence
  Synthetic oligonucleotide
agggttacagaccgcaaatgagtcatgaat

SEQ ID NO: 179382 - DNA, 30 bp, Artificial Sequence
  Synthetic oligonucleotide
cagcgtagctcgttaggttgaaatctgaat

SEQ ID NO: 179383 - DNA, 30 bp, Artificial Sequence
  Synthetic oligonucleotide
atgctaccaggtcgtcgggcgcaagtgaat

SEQ ID NO: 179384 - DNA, 30 bp, Artificial Sequence
  Synthetic oligonucleotide
tagcgtctccagaagacttgttcagtgaat

SEQ ID NO: 179385 - DNA, 30 bp, Artificial Sequence
  Synthetic oligonucleotide
tgggaagtggtgtgggtccgcgaggtgaat

SEQ ID NO: 179386 - DNA, 30 bp, Artificial Sequence
  Synthetic oligonucleotide
acggtttggtatacgagatgacgtgtgaat

SEQ ID NO: 179387 - DNA, 30 bp, Artificial Sequence
  Synthetic oligonucleotide
actgcgagaaaaatgcaaggaatattgaat

SEQ ID NO: 179388 - DNA, 30 bp, Artificial Sequence
  Synthetic oligonucleotide
ccctcgagagtgtcagtatggcccttgaat

SEQ ID NO: 179389 - DNA, 30 bp, Artificial Sequence
  Synthetic oligonucleotide
taatgaagccatccatggtacttgttgaat

SEQ ID NO: 179390 - DNA, 30 bp, Artificial Sequence
  Synthetic oligonucleotide
tagactaccatgtgaagataacaaaataat

SEQ ID NO: 179391 - DNA, 30 bp, Artificial Sequence
  Synthetic oligonucleotide
atctgccattaacatctaacgggtaataat

SEQ ID NO: 179392 - DNA, 30 bp, Artificial Sequence
  Synthetic oligonucleotide
cacgcaaagatggccaggtgattacataat

SEQ ID NO: 179393 - DNA, 30 bp, Artificial Sequence
  Synthetic oligonucleotide
tcaagctattaaatacaaaatgagcataat

SEQ ID NO: 179394 - DNA, 30 bp, Artificial Sequence
  Synthetic oligonucleotide
cagtccggtcagaaatcgacacacgataat

SEQ ID NO: 179395 - DNA, 30 bp, Artificial Sequence
  Synthetic oligonucleotide
gggcgctgtcggcctatataggacactaat

SEQ ID NO: 179396 - DNA, 30 bp, Artificial Sequence
  Synthetic oligonucleotide
agcgcgttcccccatgaatagatgactaat

SEQ ID NO: 179397 - DNA, 30 bp, Artificial Sequence
  Synthetic oligonucleotide
tcaaggttctatcgtagaaacttgactaat

SEQ ID NO: 179398 - DNA, 30 bp, Artificial Sequence
  Synthetic oligonucleotide
aaaacaacgcggggaaataaactacctaat

SEQ ID NO: 179399 - DNA, 30 bp, Artificial Sequence
  Synthetic oligonucleotide
agatggtgcaacacccatcagcgccctaat

SEQ ID NO: 179400 - DNA, 30 bp, Artificial Sequence
  Synthetic oligonucleotide
gtaagggtactatcaatagtacagcctaat

SEQ ID NO: 179401 - DNA, 30 bp, Artificial Sequence
  Synthetic oligonucleotide
tctatgtgcaaggcctgaaagaatcctaat

SEQ ID NO: 179402 - DNA, 30 bp, Artificial Sequence
  Synthetic oligonucleotide
ttatcgggcacgatgtgacgtcgtcctaat

SEQ ID NO: 179403 - DNA, 30 bp, Artificial Sequence
  Synthetic oligonucleotide
gaatggtcagatttgccgtcttgtcctaat

SEQ ID NO: 179404 - DNA, 30 bp, Artificial Sequence
  Synthetic oligonucleotide
ttatgacacgaccaagtaacgctcgctaat

SEQ ID NO: 179405 - DNA, 30 bp, Artificial Sequence
  Synthetic oligonucleotide
gggagaggtataccccttgcattcgctaat

SEQ ID NO: 179406 - DNA, 30 bp, Artificial Sequence
  Synthetic oligonucleotide
gtgggggggatttgcgcaaaggaatctaat

SEQ ID NO: 179407 - DNA, 30 bp, Artificial Sequence
  Synthetic oligonucleotide
tctgccaactcaactggtatctcctctaat

SEQ ID NO: 179408 - DNA, 30 bp, Artificial Sequence
  Synthetic oligonucleotide
atcacgtaaagtaaattctcccgctctaat

SEQ ID NO: 179409 - DNA, 30 bp, Artificial Sequence
  Synthetic oligonucleotide
gacaactctctcgacagggatcgctctaat

SEQ ID NO: 179410 - DNA, 30 bp, Artificial Sequence
  Synthetic oligonucleotide
atgcgtcgtgctcatagcgtgtattctaat

SEQ ID NO: 179411 - DNA, 30 bp, Artificial Sequence
  Synthetic oligonucleotide
aaaggcgaggtctcggtttgggtacgtaat

SEQ ID NO: 179412 - DNA, 30 bp, Artificial Sequence
  Synthetic oligonucleotide
ccaaagggggctcaccagcgtaaccgtaat

SEQ ID NO: 179413 - DNA, 30 bp, Artificial Sequence
  Synthetic oligonucleotide
cataaatcaggacggctcgtcctccgtaat

SEQ ID NO: 179414 - DNA, 30 bp, Artificial Sequence
  Synthetic oligonucleotide
tctggtggcgcaaagggttagaaaggtaat

SEQ ID NO: 179415 - DNA, 30 bp, Artificial Sequence
  Synthetic oligonucleotide
cgcaatagttcagcgctcgctagaggtaat

SEQ ID NO: 179416 - DNA, 30 bp, Artificial Sequence
  Synthetic oligonucleotide
cggctgaagtcgtacggcctgtccggtaat

SEQ ID NO: 179417 - DNA, 30 bp, Artificial Sequence
  Synthetic oligonucleotide
tacgcgaccgaagctagtcgctagggtaat

SEQ ID NO: 179418 - DNA, 30 bp, Artificial Sequence
  Synthetic oligonucleotide
gacatgggactactcacttaatttggtaat

SEQ ID NO: 179419 - DNA, 30 bp, Artificial Sequence
  Synthetic oligonucleotide
tcgatgaagagccgggttcactcatgtaat

SEQ ID NO: 179420 - DNA, 30 bp, Artificial Sequence
  Synthetic oligonucleotide
accgaacgagaagagttgttaacttgtaat

SEQ ID NO: 179421 - DNA, 29 bp, Artificial Sequence
  Synthetic oligonucleotide
agctgtcgggatagaatgctccttgtaat

SEQ ID NO: 179422 - DNA, 30 bp, Artificial Sequence
  Synthetic oligonucleotide
ctgtcgctgtaggcatgatcacaaattaat

SEQ ID NO: 179423 - DNA, 30 bp, Artificial Sequence
  Synthetic oligonucleotide
gtcgggttgagtattgacaaaagcattaat

SEQ ID NO: 179424 - DNA, 30 bp, Artificial Sequence
  Synthetic oligonucleotide
ataaagggggaaagtaggggtagacttaat

SEQ ID NO: 179425 - DNA, 30 bp, Artificial Sequence
  Synthetic oligonucleotide
acaggaccaagagatggatccgcgcttaat

SEQ ID NO: 179426 - DNA, 30 bp, Artificial Sequence
  Synthetic oligonucleotide
agattcagtctcggattcattgtgcttaat

SEQ ID NO: 179427 - DNA, 30 bp, Artificial Sequence
  Synthetic oligonucleotide
ggtatgctcagagcacactgcgacgttaat

SEQ ID NO: 179428 - DNA, 30 bp, Artificial Sequence
  Synthetic oligonucleotide
gcccgtacgactgtaaggtgctacgttaat

SEQ ID NO: 179429 - DNA, 30 bp, Artificial Sequence
  Synthetic oligonucleotide
aggatcgaagcccattccgtactcgttaat

SEQ ID NO: 179430 - DNA, 30 bp, Artificial Sequence
  Synthetic oligonucleotide
acgacgaggccgtcataccacatggttaat

SEQ ID NO: 179431 - DNA, 30 bp, Artificial Sequence
  Synthetic oligonucleotide
agactaaactagctcttgtcaaagtttaat

SEQ ID NO: 179432 - DNA, 30 bp, Artificial Sequence
  Synthetic oligonucleotide
tgcatgcagaatgcacgacagacaaaacat

SEQ ID NO: 179433 - DNA, 30 bp, Artificial Sequence
  Synthetic oligonucleotide
cctgggttggtaacatcttagggcaaacat

SEQ ID NO: 179434 - DNA, 30 bp, Artificial Sequence
  Synthetic oligonucleotide
tttgaaaaaggactgctggatttcaaacat

SEQ ID NO: 179435 - DNA, 30 bp, Artificial Sequence
  Synthetic oligonucleotide
cttgggacgtgttttaggagcccgaaacat

SEQ ID NO: 179436 - DNA, 30 bp, Artificial Sequence
  Synthetic oligonucleotide
caagatcactctacggtgtacggccaacat

SEQ ID NO: 179437 - DNA, 30 bp, Artificial Sequence
  Synthetic oligonucleotide
cgaaaacaccgattatgcattcatcaacat

SEQ ID NO: 179438 - DNA, 30 bp, Artificial Sequence
  Synthetic oligonucleotide
gagctacgttcccatatactctgagaacat

SEQ ID NO: 179439 - DNA, 30 bp, Artificial Sequence
  Synthetic oligonucleotide
aactcctagcgactagttgacaatgaacat

SEQ ID NO: 179440 - DNA, 30 bp, Artificial Sequence
  Synthetic oligonucleotide
tgtgcacagcacattgtgcgtgactaacat

SEQ ID NO: 179441 - DNA, 30 bp, Artificial Sequence
  Synthetic oligonucleotide
agccggggaaaggtttggaacaagtaacat

SEQ ID NO: 179442 - DNA, 30 bp, Artificial Sequence
  Synthetic oligonucleotide
tgcaggatgagaggctacaccgagtaacat

SEQ ID NO: 179443 - DNA, 30 bp, Artificial Sequence
  Synthetic oligonucleotide
gccctcacacactgacagtgcatttaacat

SEQ ID NO: 179444 - DNA, 30 bp, Artificial Sequence
  Synthetic oligonucleotide
aatcatagggactgtaggaaactaacacat

SEQ ID NO: 179445 - DNA, 30 bp, Artificial Sequence
  Synthetic oligonucleotide
aattagagaacctgaaactcgctcacacat

SEQ ID NO: 179446 - DNA, 30 bp, Artificial Sequence
  Synthetic oligonucleotide
gtatctaaacacgtcttactaacgacacat

SEQ ID NO: 179447 - DNA, 30 bp, Artificial Sequence
  Synthetic oligonucleotide
aggttattcgaaccttgatggacgacacat

SEQ ID NO: 179448 - DNA, 30 bp, Artificial Sequence
  Synthetic oligonucleotide
ctgtcgccaaactctatgaagaaaccacat

SEQ ID NO: 179449 - DNA, 30 bp, Artificial Sequence
  Synthetic oligonucleotide
gttcggggttaagctcgtctaggtccacat

SEQ ID NO: 179450 - DNA, 30 bp, Artificial Sequence
  Synthetic oligonucleotide
ggagggttaagcagactgaagggtccacat

SEQ ID NO: 179451 - DNA, 30 bp, Artificial Sequence
  Synthetic oligonucleotide
agccacctaaacggcttacatattccacat

SEQ ID NO: 179452 - DNA, 30 bp, Artificial Sequence
  Synthetic oligonucleotide
tatggggggaaagggagcacgcatgcacat

SEQ ID NO: 179453 - DNA, 30 bp, Artificial Sequence
  Synthetic oligonucleotide
ccgggatacgcgacctcgcatcctgcacat

SEQ ID NO: 179454 - DNA, 30 bp, Artificial Sequence
  Synthetic oligonucleotide
gacaaccacggccagatctggcagtcacat

SEQ ID NO: 179455 - DNA, 30 bp, Artificial Sequence
  Synthetic oligonucleotide
cttgaccttgaaggtacattgggttcacat

SEQ ID NO: 179456 - DNA, 30 bp, Artificial Sequence
  Synthetic oligonucleotide
ctaagtggtcagggaagcattataagacat

SEQ ID NO: 179457 - DNA, 30 bp, Artificial Sequence
  Synthetic oligonucleotide
agagcgtctaatccgaactctaacagacat

SEQ ID NO: 179458 - DNA, 30 bp, Artificial Sequence
  Synthetic oligonucleotide
gcgtattagctttaagaggacgccagacat

SEQ ID NO: 179459 - DNA, 30 bp, Artificial Sequence
  Synthetic oligonucleotide
caagcctactattggtgcctttggagacat

SEQ ID NO: 179460 - DNA, 30 bp, Artificial Sequence
  Synthetic oligonucleotide
atagcctaggtaaaagggtcgttgagacat

SEQ ID NO: 179461 - DNA, 30 bp, Artificial Sequence
  Synthetic oligonucleotide
accacaaacgtcggctgtcttcaacgacat

SEQ ID NO: 179462 - DNA, 30 bp, Artificial Sequence
  Synthetic oligonucleotide
ttcaaacctattacttcaccggaacgacat

SEQ ID NO: 179463 - DNA, 30 bp, Artificial Sequence
  Synthetic oligonucleotide
gtgttgcaagggaatgcgcacgaaggacat

SEQ ID NO: 179464 - DNA, 30 bp, Artificial Sequence
  Synthetic oligonucleotide
gttcaaattacgtctgataggaccggacat

SEQ ID NO: 179465 - DNA, 30 bp, Artificial Sequence
  Synthetic oligonucleotide
gacaggtcccataaggttcggatcggacat

SEQ ID NO: 179466 - DNA, 30 bp, Artificial Sequence
  Synthetic oligonucleotide
ttgtttgcgtgatctacgacactcggacat

SEQ ID NO: 179467 - DNA, 30 bp, Artificial Sequence
  Synthetic oligonucleotide
gagaagtagtgcgataatctattcggacat

SEQ ID NO: 179468 - DNA, 30 bp, Artificial Sequence
  Synthetic oligonucleotide
gcctgtaaaaggcgtatttgatagggacat

SEQ ID NO: 179469 - DNA, 30 bp, Artificial Sequence
  Synthetic oligonucleotide
ggggttgtgtcggtacgggggacgggacat

SEQ ID NO: 179470 - DNA, 30 bp, Artificial Sequence
  Synthetic oligonucleotide
gatcggagggtcatgaaacttcgtggacat

SEQ ID NO: 179471 - DNA, 29 bp, Artificial Sequence
  Synthetic oligonucleotide
gtagacacaagtgtctacacagatgacat

SEQ ID NO: 179472 - DNA, 30 bp, Artificial Sequence
  Synthetic oligonucleotide
gatttgaaaggacagtcaaagtgatgacat

SEQ ID NO: 179473 - DNA, 30 bp, Artificial Sequence
  Synthetic oligonucleotide
atgggtattcgggtcttatcaccttgacat

SEQ ID NO: 179474 - DNA, 30 bp, Artificial Sequence
  Synthetic oligonucleotide
ggacgaagattacggttcgttaaaatacat

SEQ ID NO: 179475 - DNA, 30 bp, Artificial Sequence
  Synthetic oligonucleotide
agatctaggtcgtcttccccgtcaatacat

SEQ ID NO: 179476 - DNA, 30 bp, Artificial Sequence
  Synthetic oligonucleotide
caggcagcagcattcatctcgtcactacat

SEQ ID NO: 179477 - DNA, 30 bp, Artificial Sequence
  Synthetic oligonucleotide
atactcaatgcgtcactactatcgctacat

SEQ ID NO: 179478 - DNA, 30 bp, Artificial Sequence
  Synthetic oligonucleotide
cggtgtaagcactttacatccatgctacat

SEQ ID NO: 179479 - DNA, 30 bp, Artificial Sequence
  Synthetic oligonucleotide
acgcccttaagaacttactgctgagtacat

SEQ ID NO: 179480 - DNA, 30 bp, Artificial Sequence
  Synthetic oligonucleotide
aaaggtgtacgttgacctgtatgcttacat

SEQ ID NO: 179481 - DNA, 30 bp, Artificial Sequence
  Synthetic oligonucleotide
gttacgtctacgggtacggatggaaaccat

SEQ ID NO: 179482 - DNA, 30 bp, Artificial Sequence
  Synthetic oligonucleotide
gcaatcacctatccgcatgtcgacaaccat

SEQ ID NO: 179483 - DNA, 30 bp, Artificial Sequence
  Synthetic oligonucleotide
tcctcacgcaactgtggggtaacgaaccat

SEQ ID NO: 179484 - DNA, 30 bp, Artificial Sequence
  Synthetic oligonucleotide
catcgacgcagtcggaagaagacgaaccat

SEQ ID NO: 179485 - DNA, 30 bp, Artificial Sequence
  Synthetic oligonucleotide
atcacgcgcccccctctgtactaacaccat

SEQ ID NO: 179486 - DNA, 30 bp, Artificial Sequence
  Synthetic oligonucleotide
tgtgaatgatattatgatactgggcaccat

SEQ ID NO: 179487 - DNA, 30 bp, Artificial Sequence
  Synthetic oligonucleotide
agaaatgggtaaaaagttttgattcaccat

SEQ ID NO: 179488 - DNA, 30 bp, Artificial Sequence
  Synthetic oligonucleotide
acacaactggactatcaagccgaataccat

SEQ ID NO: 179489 - DNA, 30 bp, Artificial Sequence
  Synthetic oligonucleotide
cactacagataggcaagccgggtgtaccat

SEQ ID NO: 179490 - DNA, 31 bp, Artificial Sequence
  Synthetic oligonucleotide
ttggcaccagacgacgaattactgttaccat

SEQ ID NO: 179491 - DNA, 30 bp, Artificial Sequence
  Synthetic oligonucleotide
ctggtaaacttacgaacgccgagaacccat

SEQ ID NO: 179492 - DNA, 30 bp, Artificial Sequence
  Synthetic oligonucleotide
tacaagcaggcgaagtgttatatcacccat

SEQ ID NO: 179493 - DNA, 30 bp, Artificial Sequence
  Synthetic oligonucleotide
ggcggaaggagagtcggtttcaggacccat

SEQ ID NO: 179494 - DNA, 30 bp, Artificial Sequence
  Synthetic oligonucleotide
tccgttcgacatcatcgagaccggccccat

SEQ ID NO: 179495 - DNA, 30 bp, Artificial Sequence
  Synthetic oligonucleotide
gtaaagtcgtactacggaggtcaagcccat

SEQ ID NO: 179496 - DNA, 30 bp, Artificial Sequence
  Synthetic oligonucleotide
ctttgaatcactaaccggagataggcccat

SEQ ID NO: 179497 - DNA, 30 bp, Artificial Sequence
  Synthetic oligonucleotide
tacgggtgttataatgtagaatactcccat

SEQ ID NO: 179498 - DNA, 30 bp, Artificial Sequence
  Synthetic oligonucleotide
gcgggcacagtgcaccctgccgggtcccat

SEQ ID NO: 179499 - DNA, 30 bp, Artificial Sequence
  Synthetic oligonucleotide
cgcatatcgcctcacatcggcagaagccat

SEQ ID NO: 179500 - DNA, 30 bp, Artificial Sequence
  Synthetic oligonucleotide
ggatagagacagcgctccagtcacagccat

SEQ ID NO: 179501 - DNA, 30 bp, Artificial Sequence
  Synthetic oligonucleotide
ttccggatttcgggggaaagtaccagccat

SEQ ID NO: 179502 - DNA, 30 bp, Artificial Sequence
  Synthetic oligonucleotide
catgggacagtggatacattccctagccat

SEQ ID NO: 179503 - DNA, 31 bp, Artificial Sequence
  Synthetic oligonucleotide
gaacgaaaagcagcaacctgccgttagccat

SEQ ID NO: 179504 - DNA, 30 bp, Artificial Sequence
  Synthetic oligonucleotide
ttaaagtaatggggcggaaagagacgccat

SEQ ID NO: 179505 - DNA, 30 bp, Artificial Sequence
  Synthetic oligonucleotide
tgtgaatgactgtttaacaggagacgccat

SEQ ID NO: 179506 - DNA, 30 bp, Artificial Sequence
  Synthetic oligonucleotide
gggtaggtgtcctcaattctggatcgccat

SEQ ID NO: 179507 - DNA, 30 bp, Artificial Sequence
  Synthetic oligonucleotide
catacccagttatcgggtgcatgtcgccat

SEQ ID NO: 179508 - DNA, 30 bp, Artificial Sequence
  Synthetic oligonucleotide
agatgtgagtcatgattcggcctaggccat

SEQ ID NO: 179509 - DNA, 30 bp, Artificial Sequence
  Synthetic oligonucleotide
ccaacgaagcttacgacactcaccggccat

SEQ ID NO: 179510 - DNA, 30 bp, Artificial Sequence
  Synthetic oligonucleotide
aaaaaagaggcgcgatttgaaacgggccat

SEQ ID NO: 179511 - DNA, 30 bp, Artificial Sequence
  Synthetic oligonucleotide
gaagagcctgcacgccgaaataggggccat

SEQ ID NO: 179512 - DNA, 30 bp, Artificial Sequence
  Synthetic oligonucleotide
aatacacgggctagcaaatcgcgtggccat

SEQ ID NO: 179513 - DNA, 30 bp, Artificial Sequence
  Synthetic oligonucleotide
gaccagagcatacctccatgggaatgccat

SEQ ID NO: 179514 - DNA, 30 bp, Artificial Sequence
  Synthetic oligonucleotide
caaggtaacggctcttatcttcagtgccat

SEQ ID NO: 179515 - DNA, 30 bp, Artificial Sequence
  Synthetic oligonucleotide
aagcagcacacaacctacttgcacatccat

SEQ ID NO: 179516 - DNA, 30 bp, Artificial Sequence
  Synthetic oligonucleotide
tgagtactatgggcaaaatcgttcatccat

SEQ ID NO: 179517 - DNA, 30 bp, Artificial Sequence
  Synthetic oligonucleotide
ttgacggtcctattcaaaggcaaactccat

SEQ ID NO: 179518 - DNA, 30 bp, Artificial Sequence
  Synthetic oligonucleotide
tattggggatcacaagtggagccactccat

SEQ ID NO: 179519 - DNA, 30 bp, Artificial Sequence
  Synthetic oligonucleotide
agcatatgttcgtcggcatactcactccat

SEQ ID NO: 179520 - DNA, 30 bp, Artificial Sequence
  Synthetic oligonucleotide
cacgtgaggtctcagccattgcaagtccat

SEQ ID NO: 179521 - DNA, 30 bp, Artificial Sequence
  Synthetic oligonucleotide
gataataagagtcacaccctcggagtccat

SEQ ID NO: 179522 - DNA, 30 bp, Artificial Sequence
  Synthetic oligonucleotide
caagtatagcttagtgcttttggggtccat

SEQ ID NO: 179523 - DNA, 30 bp, Artificial Sequence
  Synthetic oligonucleotide
ttctgctagagagcagattgtgcattccat

SEQ ID NO: 179524 - DNA, 30 bp, Artificial Sequence
  Synthetic oligonucleotide
tgcggtcgacctgcgtggatatgaaagcat

SEQ ID NO: 179525 - DNA, 30 bp, Artificial Sequence
  Synthetic oligonucleotide
attgaagcacccagaaagtggtgaaagcat

SEQ ID NO: 179526 - DNA, 30 bp, Artificial Sequence
  Synthetic oligonucleotide
cattgaattgcgaaacagtccgagaagcat

SEQ ID NO: 179527 - DNA, 30 bp, Artificial Sequence
  Synthetic oligonucleotide
gaggtaatgtatttggagctcgggaagcat

SEQ ID NO: 179528 - DNA, 30 bp, Artificial Sequence
  Synthetic oligonucleotide
ttctactacctgtgtatcccgtgtaagcat

SEQ ID NO: 179529 - DNA, 30 bp, Artificial Sequence
  Synthetic oligonucleotide
aaaagagctggtgcgtgggcgtgtaagcat

SEQ ID NO: 179530 - DNA, 30 bp, Artificial Sequence
  Synthetic oligonucleotide
ccccaacaactctgcactgggcgagagcat

SEQ ID NO: 179531 - DNA, 30 bp, Artificial Sequence
  Synthetic oligonucleotide
cttctagaaggccaagccacgcccgagcat

SEQ ID NO: 179532 - DNA, 30 bp, Artificial Sequence
  Synthetic oligonucleotide
cattgacgtggtaatttaaatgccgagcat

SEQ ID NO: 179533 - DNA, 30 bp, Artificial Sequence
  Synthetic oligonucleotide
tcacggggtgctctaacgggaaaggagcat

SEQ ID NO: 179534 - DNA, 30 bp, Artificial Sequence
  Synthetic oligonucleotide
gagtaaagttgggcttaggacgaggagcat

SEQ ID NO: 179535 - DNA, 30 bp, Artificial Sequence
  Synthetic oligonucleotide
cttggactgccgtgctacggagctgagcat

SEQ ID NO: 179536 - DNA, 30 bp, Artificial Sequence
  Synthetic oligonucleotide
gtgatatccgttagaatcgtataatagcat

SEQ ID NO: 179537 - DNA, 30 bp, Artificial Sequence
  Synthetic oligonucleotide
gctaacagcgagatataccgcccatagcat

SEQ ID NO: 179538 - DNA, 30 bp, Artificial Sequence
  Synthetic oligonucleotide
tcttgtgattgatatcactgcagctagcat

SEQ ID NO: 179539 - DNA, 30 bp, Artificial Sequence
  Synthetic oligonucleotide
aaggcatggcgggttgatcactaaacgcat

SEQ ID NO: 179540 - DNA, 30 bp, Artificial Sequence
  Synthetic oligonucleotide
gtatcctggcgggtcgatcatagtacgcat

SEQ ID NO: 179541 - DNA, 30 bp, Artificial Sequence
  Synthetic oligonucleotide
catacgctagccggttaactttccccgcat

SEQ ID NO: 179542 - DNA, 30 bp, Artificial Sequence
  Synthetic oligonucleotide
tagatcacgagccgtaatgttatcccgcat

SEQ ID NO: 179543 - DNA, 30 bp, Artificial Sequence
  Synthetic oligonucleotide
ccatgaccgttcgccaagggtgaagcgcat

SEQ ID NO: 179544 - DNA, 30 bp, Artificial Sequence
  Synthetic oligonucleotide
gtgtgtaaataatcgggccgataagcgcat

SEQ ID NO: 179545 - DNA, 30 bp, Artificial Sequence
  Synthetic oligonucleotide
aggtgcgtgcaccttgaccatagggcgcat

SEQ ID NO: 179546 - DNA, 30 bp, Artificial Sequence
  Synthetic oligonucleotide
aacagaacgctgaaaattgtacttgcgcat

SEQ ID NO: 179547 - DNA, 30 bp, Artificial Sequence
  Synthetic oligonucleotide
tgaaaactcgggaggacctagtttgcgcat

SEQ ID NO: 179548 - DNA, 30 bp, Artificial Sequence
  Synthetic oligonucleotide
gagaagcagtataccgcccaagtctcgcat

SEQ ID NO: 179549 - DNA, 30 bp, Artificial Sequence
  Synthetic oligonucleotide
gaggaaagaccaaaatgttgctcttcgcat

SEQ ID NO: 179550 - DNA, 30 bp, Artificial Sequence
  Synthetic oligonucleotide
ggcaggtggccaaagtcacagcaaaggcat

SEQ ID NO: 179551 - DNA, 30 bp, Artificial Sequence
  Synthetic oligonucleotide
tctcggtttgctgtctggggacccaggcat

SEQ ID NO: 179552 - DNA, 30 bp, Artificial Sequence
  Synthetic oligonucleotide
tagccttcagagtacgggaaaagcaggcat

SEQ ID NO: 179553 - DNA, 30 bp, Artificial Sequence
  Synthetic oligonucleotide
tcgctcaagacggcatcaattggcaggcat

SEQ ID NO: 179554 - DNA, 30 bp, Artificial Sequence
  Synthetic oligonucleotide
tcaagatagataatgaacgctgggaggcat

SEQ ID NO: 179555 - DNA, 30 bp, Artificial Sequence
  Synthetic oligonucleotide
atgcgataagacttggtacctgataggcat

SEQ ID NO: 179556 - DNA, 30 bp, Artificial Sequence
  Synthetic oligonucleotide
cggcttgagctttccctaagataacggcat

SEQ ID NO: 179557 - DNA, 30 bp, Artificial Sequence
  Synthetic oligonucleotide
gagtattccggtagacgaataagacggcat

SEQ ID NO: 179558 - DNA, 30 bp, Artificial Sequence
  Synthetic oligonucleotide
acatataaggatcagtgaaaagcccggcat

SEQ ID NO: 179559 - DNA, 30 bp, Artificial Sequence
  Synthetic oligonucleotide
gcgcacgactacagtttaaacagccggcat

SEQ ID NO: 179560 - DNA, 30 bp, Artificial Sequence
  Synthetic oligonucleotide
gtaccggacagataaactaatgaagggcat

SEQ ID NO: 179561 - DNA, 30 bp, Artificial Sequence
  Synthetic oligonucleotide
cgataggaggttgagtcagtttcagggcat

SEQ ID NO: 179562 - DNA, 30 bp, Artificial Sequence
  Synthetic oligonucleotide
ccctgctctttgccggcgataaaggggcat

SEQ ID NO: 179563 - DNA, 30 bp, Artificial Sequence
  Synthetic oligonucleotide
ctgtgattagttagaccggtgagggggcat

SEQ ID NO: 179564 - DNA, 30 bp, Artificial Sequence
  Synthetic oligonucleotide
gcttctggcctccgttggtgtcgtgggcat

SEQ ID NO: 179565 - DNA, 30 bp, Artificial Sequence
  Synthetic oligonucleotide
tgcaatgcgttaggggtgcagatgtggcat

SEQ ID NO: 179566 - DNA, 30 bp, Artificial Sequence
  Synthetic oligonucleotide
ggctagtccagccctaaatgcgtgtggcat

SEQ ID NO: 179567 - DNA, 30 bp, Artificial Sequence
  Synthetic oligonucleotide
taattcaaatgcaggacggtaagttggcat

SEQ ID NO: 179568 - DNA, 30 bp, Artificial Sequence
  Synthetic oligonucleotide
ggaaattagagttagagaatgggttggcat

SEQ ID NO: 179569 - DNA, 30 bp, Artificial Sequence
  Synthetic oligonucleotide
tcattgcgtccaacggtagagcgaatgcat

SEQ ID NO: 179570 - DNA, 30 bp, Artificial Sequence
  Synthetic oligonucleotide
agtaaggatactgaatttgaactgatgcat

SEQ ID NO: 179571 - DNA, 30 bp, Artificial Sequence
  Synthetic oligonucleotide
cctgacaatcggtccaaaactctgatgcat

SEQ ID NO: 179572 - DNA, 30 bp, Artificial Sequence
  Synthetic oligonucleotide
tcagtgtaaagaccgacatccgtgatgcat

SEQ ID NO: 179573 - DNA, 30 bp, Artificial Sequence
  Synthetic oligonucleotide
atcataaataatttatagggggcagtgcat

SEQ ID NO: 179574 - DNA, 30 bp, Artificial Sequence
  Synthetic oligonucleotide
acaggcgtgtgacatgggcgttgcgtgcat

SEQ ID NO: 179575 - DNA, 30 bp, Artificial Sequence
  Synthetic oligonucleotide
taacgcaaaagggcgaaaccgtgtgtgcat

SEQ ID NO: 179576 - DNA, 30 bp, Artificial Sequence
  Synthetic oligonucleotide
agacaggcaaattggggtcgatcgttgcat

SEQ ID NO: 179577 - DNA, 30 bp, Artificial Sequence
  Synthetic oligonucleotide
atcgtcagtaacttttagacagtcaatcat

SEQ ID NO: 179578 - DNA, 30 bp, Artificial Sequence
  Synthetic oligonucleotide
gaccaacgactttaacgggctgtcaatcat

SEQ ID NO: 179579 - DNA, 30 bp, Artificial Sequence
  Synthetic oligonucleotide
gaggtgtatcccaaacgacaattgaatcat

SEQ ID NO: 179580 - DNA, 30 bp, Artificial Sequence
  Synthetic oligonucleotide
tgatttgcgtgccagaccaaagctaatcat

SEQ ID NO: 179581 - DNA, 30 bp, Artificial Sequence
  Synthetic oligonucleotide
gcaattccactcagtatgggtggtaatcat

SEQ ID NO: 179582 - DNA, 30 bp, Artificial Sequence
  Synthetic oligonucleotide
gatggcacttagctcaggctcccgcatcat

SEQ ID NO: 179583 - DNA, 30 bp, Artificial Sequence
  Synthetic oligonucleotide
cgtgatggagacttatactagttgcatcat

SEQ ID NO: 179584 - DNA, 30 bp, Artificial Sequence
  Synthetic oligonucleotide
gggcagatgggcttggatgggtgagatcat

SEQ ID NO: 179585 - DNA, 30 bp, Artificial Sequence
  Synthetic oligonucleotide
atagggatgttaaatccggattaggatcat

SEQ ID NO: 179586 - DNA, 30 bp, Artificial Sequence
  Synthetic oligonucleotide
cggtacacctcatgccttcaatcctatcat

SEQ ID NO: 179587 - DNA, 30 bp, Artificial Sequence
  Synthetic oligonucleotide
gcgactagcccactaaacggatagtatcat

SEQ ID NO: 179588 - DNA, 30 bp, Artificial Sequence
  Synthetic oligonucleotide
atttcgtcacaagacccctcctcaactcat

SEQ ID NO: 179589 - DNA, 30 bp, Artificial Sequence
  Synthetic oligonucleotide
gtgaaactaaaagacgcatacactactcat

SEQ ID NO: 179590 - DNA, 30 bp, Artificial Sequence
  Synthetic oligonucleotide
aaagctaacgcgtacgtgccttgtactcat

SEQ ID NO: 179591 - DNA, 30 bp, Artificial Sequence
  Synthetic oligonucleotide
tgacgagatactgcaatatatgcacctcat

SEQ ID NO: 179592 - DNA, 30 bp, Artificial Sequence
  Synthetic oligonucleotide
ggtaatgagtaccgcccagcatagcctcat

SEQ ID NO: 179593 - DNA, 30 bp, Artificial Sequence
  Synthetic oligonucleotide
agaaccgttctgaccccactgagatctcat

SEQ ID NO: 179594 - DNA, 30 bp, Artificial Sequence
  Synthetic oligonucleotide
agtacactgcaggcatggcgttactctcat

SEQ ID NO: 179595 - DNA, 30 bp, Artificial Sequence
  Synthetic oligonucleotide
aatgtaaggaggtaaccggacagttctcat

SEQ ID NO: 179596 - DNA, 30 bp, Artificial Sequence
  Synthetic oligonucleotide
cggtcgcgagtggatgtatggagttctcat

SEQ ID NO: 179597 - DNA, 30 bp, Artificial Sequence
  Synthetic oligonucleotide
gccgaacgcctccaacaagtgatcagtcat

SEQ ID NO: 179598 - DNA, 30 bp, Artificial Sequence
  Synthetic oligonucleotide
aagagcaggaaccctgtgatagtgagtcat

SEQ ID NO: 179599 - DNA, 30 bp, Artificial Sequence
  Synthetic oligonucleotide
acatgtagggaatattcctcttttagtcat

SEQ ID NO: 179600 - DNA, 30 bp, Artificial Sequence
  Synthetic oligonucleotide
caccaggacttgcgaatgggtacacgtcat

SEQ ID NO: 179601 - DNA, 30 bp, Artificial Sequence
  Synthetic oligonucleotide
cgaatcaggtattgacgcaatgacggtcat

SEQ ID NO: 179602 - DNA, 30 bp, Artificial Sequence
  Synthetic oligonucleotide
ggacacacaaggtcgtccacaaccggtcat

SEQ ID NO: 179603 - DNA, 30 bp, Artificial Sequence
  Synthetic oligonucleotide
gcgaatcaccgttatatggtgacatgtcat

SEQ ID NO: 179604 - DNA, 30 bp, Artificial Sequence
  Synthetic oligonucleotide
tgtggggcgcctcgaacaccacactgtcat

SEQ ID NO: 179605 - DNA, 30 bp, Artificial Sequence
  Synthetic oligonucleotide
gacacgcacgtggtatagaaaaggtgtcat

SEQ ID NO: 179606 - DNA, 30 bp, Artificial Sequence
  Synthetic oligonucleotide
atacttgagcagataaggcggtggtgtcat

SEQ ID NO: 179607 - DNA, 30 bp, Artificial Sequence
  Synthetic oligonucleotide
ataagatccatggacgacaatgatattcat

SEQ ID NO: 179608 - DNA, 30 bp, Artificial Sequence
  Synthetic oligonucleotide
gtaggcgtgcatgcgatttcgtttattcat

SEQ ID NO: 179609 - DNA, 30 bp, Artificial Sequence
  Synthetic oligonucleotide
gaatgatccgtgctgctgactcaccttcat

SEQ ID NO: 179610 - DNA, 30 bp, Artificial Sequence
  Synthetic oligonucleotide
tcgcggcacgcgaaaagccgattggttcat

SEQ ID NO: 179611 - DNA, 30 bp, Artificial Sequence
  Synthetic oligonucleotide
ctggcaaacatgaatgcaaagttggttcat

SEQ ID NO: 179612 - DNA, 30 bp, Artificial Sequence
  Synthetic oligonucleotide
agctaaggtctatattctagtagaaaagat

SEQ ID NO: 179613 - DNA, 30 bp, Artificial Sequence
  Synthetic oligonucleotide
aagctgtatctaaatgcttgagggaaagat

SEQ ID NO: 179614 - DNA, 30 bp, Artificial Sequence
  Synthetic oligonucleotide
acgatgtagagagtacttaaggataaagat

SEQ ID NO: 179615 - DNA, 30 bp, Artificial Sequence
  Synthetic oligonucleotide
ttggcataggaagtatgaggacaccaagat

SEQ ID NO: 179616 - DNA, 30 bp, Artificial Sequence
  Synthetic oligonucleotide
cggtctttagtgtcgccgtgtcaccaagat

SEQ ID NO: 179617 - DNA, 30 bp, Artificial Sequence
  Synthetic oligonucleotide
atggttaagggaggaagtaacggtcaagat

SEQ ID NO: 179618 - DNA, 30 bp, Artificial Sequence
  Synthetic oligonucleotide
gaacaagggccttgggtcttcaaagaagat

SEQ ID NO: 179619 - DNA, 30 bp, Artificial Sequence
  Synthetic oligonucleotide
aaacttaatcaagcactggcctcggaagat

SEQ ID NO: 179620 - DNA, 30 bp, Artificial Sequence
  Synthetic oligonucleotide
cgcccacgcacggttcctaattaataagat

SEQ ID NO: 179621 - DNA, 30 bp, Artificial Sequence
  Synthetic oligonucleotide
agtaccattagagcagatccatcataagat

SEQ ID NO: 179622 - DNA, 30 bp, Artificial Sequence
  Synthetic oligonucleotide
cctaaatatggcgtacggatgcgctaagat

SEQ ID NO: 179623 - DNA, 30 bp, Artificial Sequence
  Synthetic oligonucleotide
tacagagctgcaaacgtccatctctaagat

SEQ ID NO: 179624 - DNA, 30 bp, Artificial Sequence
  Synthetic oligonucleotide
gtagactataggctgcccacattgtaagat

SEQ ID NO: 179625 - DNA, 30 bp, Artificial Sequence
  Synthetic oligonucleotide
cgatcgcggccgggaggtattcgttaagat

SEQ ID NO: 179626 - DNA, 30 bp, Artificial Sequence
  Synthetic oligonucleotide
cggacaacgggttgctccatgcaaacagat

SEQ ID NO: 179627 - DNA, 30 bp, Artificial Sequence
  Synthetic oligonucleotide
ttaaattggggaacacggccacacacagat

SEQ ID NO: 179628 - DNA, 30 bp, Artificial Sequence
  Synthetic oligonucleotide
agaaggacgcctcggcagaatttcacagat

SEQ ID NO: 179629 - DNA, 30 bp, Artificial Sequence
  Synthetic oligonucleotide
aattgatagaagctcatttgagcgacagat

SEQ ID NO: 179630 - DNA, 30 bp, Artificial Sequence
  Synthetic oligonucleotide
ctgtaacgttaaaatggttgccgtacagat

SEQ ID NO: 179631 - DNA, 30 bp, Artificial Sequence
  Synthetic oligonucleotide
ggagtacttaacgctcaccgtcttacagat

SEQ ID NO: 179632 - DNA, 30 bp, Artificial Sequence
  Synthetic oligonucleotide
aattacctgtccacctgagcagcaccagat

SEQ ID NO: 179633 - DNA, 30 bp, Artificial Sequence
  Synthetic oligonucleotide
actttaatagacactattcagcgaccagat

SEQ ID NO: 179634 - DNA, 30 bp, Artificial Sequence
  Synthetic oligonucleotide
ggagatgtgtggagaggccacgtaccagat

SEQ ID NO: 179635 - DNA, 30 bp, Artificial Sequence
  Synthetic oligonucleotide
agaggaccgcgtaagcccggcctcccagat

SEQ ID NO: 179636 - DNA, 30 bp, Artificial Sequence
  Synthetic oligonucleotide
catcgggggtctgtgtgcaaggagccagat

SEQ ID NO: 179637 - DNA, 30 bp, Artificial Sequence
  Synthetic oligonucleotide
tcgacacttgacaggcattcataagcagat

SEQ ID NO: 179638 - DNA, 30 bp, Artificial Sequence
  Synthetic oligonucleotide
gaccttcagttataattggaacgggcagat

SEQ ID NO: 179639 - DNA, 30 bp, Artificial Sequence
  Synthetic oligonucleotide
agcaggataatagcgctagtcgatgcagat

SEQ ID NO: 179640 - DNA, 30 bp, Artificial Sequence
  Synthetic oligonucleotide
acggcgatcgtatgagataccgttgcagat

SEQ ID NO: 179641 - DNA, 30 bp, Artificial Sequence
  Synthetic oligonucleotide
gcgtaattagggtctaggtcagaatcagat

SEQ ID NO: 179642 - DNA, 30 bp, Artificial Sequence
  Synthetic oligonucleotide
aagtatcagatcggcggggtcgcatcagat

SEQ ID NO: 179643 - DNA, 30 bp, Artificial Sequence
  Synthetic oligonucleotide
tcgaacgtgctttctaggtggagatcagat

SEQ ID NO: 179644 - DNA, 30 bp, Artificial Sequence
  Synthetic oligonucleotide
acgcacaataacaactattagtcctcagat

SEQ ID NO: 179645 - DNA, 30 bp, Artificial Sequence
  Synthetic oligonucleotide
gaacaggtaatgcccccgacgaagagagat

SEQ ID NO: 179646 - DNA, 30 bp, Artificial Sequence
  Synthetic oligonucleotide
ggccatcgtgaagattccttgaagagagat

SEQ ID NO: 179647 - DNA, 30 bp, Artificial Sequence
  Synthetic oligonucleotide
tcacttcgaagaataccaactagacgagat

SEQ ID NO: 179648 - DNA, 30 bp, Artificial Sequence
  Synthetic oligonucleotide
ggttgattgagagaacgaacggagcgagat

SEQ ID NO: 179649 - DNA, 30 bp, Artificial Sequence
  Synthetic oligonucleotide
tcaagtgcgatcgaactccgggtgcgagat

SEQ ID NO: 179650 - DNA, 30 bp, Artificial Sequence
  Synthetic oligonucleotide
tgggaaatgagttgtagacccccaggagat

SEQ ID NO: 179651 - DNA, 30 bp, Artificial Sequence
  Synthetic oligonucleotide
atcgcgagcataagccacagacgaggagat

SEQ ID NO: 179652 - DNA, 30 bp, Artificial Sequence
  Synthetic oligonucleotide
taagaattgcgttccatattcataggagat

SEQ ID NO: 179653 - DNA, 30 bp, Artificial Sequence
  Synthetic oligonucleotide
gagcttgcgcgttggtaggattacggagat

SEQ ID NO: 179654 - DNA, 30 bp, Artificial Sequence
  Synthetic oligonucleotide
tgtgtgctgccttcataattaccgggagat

SEQ ID NO: 179655 - DNA, 30 bp, Artificial Sequence
  Synthetic oligonucleotide
agctgcaaagtcccgtaaggagtgtgagat

SEQ ID NO: 179656 - DNA, 30 bp, Artificial Sequence
  Synthetic oligonucleotide
tggctggttcgcgtcgtcctagacatagat

SEQ ID NO: 179657 - DNA, 30 bp, Artificial Sequence
  Synthetic oligonucleotide
ccccgaacacataatgaaccgaagatagat

SEQ ID NO: 179658 - DNA, 30 bp, Artificial Sequence
  Synthetic oligonucleotide
gacatcttcaacaaggtatacccgatagat

SEQ ID NO: 179659 - DNA, 30 bp, Artificial Sequence
  Synthetic oligonucleotide
actagatacgtgacacaaatcgggatagat

SEQ ID NO: 179660 - DNA, 30 bp, Artificial Sequence
  Synthetic oligonucleotide
ccatctccttaatggtcggctatgatagat

SEQ ID NO: 179661 - DNA, 30 bp, Artificial Sequence
  Synthetic oligonucleotide
tattgggtggagacagttcagagtatagat

SEQ ID NO: 179662 - DNA, 30 bp, Artificial Sequence
  Synthetic oligonucleotide
gtgccggcacagctgaccaaaaccctagat

SEQ ID NO: 179663 - DNA, 30 bp, Artificial Sequence
  Synthetic oligonucleotide
tgatcgaattccagttgatgtaccttagat

SEQ ID NO: 179664 - DNA, 30 bp, Artificial Sequence
  Synthetic oligonucleotide
tgataccatgcagccgtcatcgccttagat

SEQ ID NO: 179665 - DNA, 30 bp, Artificial Sequence
  Synthetic oligonucleotide
taccggcgcatgcataatgaccatttagat

SEQ ID NO: 179666 - DNA, 30 bp, Artificial Sequence
  Synthetic oligonucleotide
aagggtggcttcacatctctggcaaacgat

SEQ ID NO: 179667 - DNA, 30 bp, Artificial Sequence
  Synthetic oligonucleotide
gtcagaggttgtgtggtgaccataaacgat

SEQ ID NO: 179668 - DNA, 30 bp, Artificial Sequence
  Synthetic oligonucleotide
ccgtagtgttaactgtgtagtgtaaacgat

SEQ ID NO: 179669 - DNA, 30 bp, Artificial Sequence
  Synthetic oligonucleotide
atcctcatagcagctttgggacagaacgat

SEQ ID NO: 179670 - DNA, 30 bp, Artificial Sequence
  Synthetic oligonucleotide
taaaccgtaggaacgcgagatcagaacgat

SEQ ID NO: 179671 - DNA, 30 bp, Artificial Sequence
  Synthetic oligonucleotide
gccaaagtcaatgaagcgtaactacacgat

SEQ ID NO: 179672 - DNA, 30 bp, Artificial Sequence
  Synthetic oligonucleotide
gcatagttagatcgacgtggatcagacgat

SEQ ID NO: 179673 - DNA, 30 bp, Artificial Sequence
  Synthetic oligonucleotide
acaccaattcgtacctataacttcgacgat

SEQ ID NO: 179674 - DNA, 30 bp, Artificial Sequence
  Synthetic oligonucleotide
cgatagttccgggaatgatgcagatacgat

SEQ ID NO: 179675 - DNA, 30 bp, Artificial Sequence
  Synthetic oligonucleotide
ataaggaagaggaaaatatttatatacgat

SEQ ID NO: 179676 - DNA, 30 bp, Artificial Sequence
  Synthetic oligonucleotide
cattctaagcgccagctacacgcctacgat

SEQ ID NO: 179677 - DNA, 30 bp, Artificial Sequence
  Synthetic oligonucleotide
agaacaccgtaacacctctggtcctacgat

SEQ ID NO: 179678 - DNA, 30 bp, Artificial Sequence
  Synthetic oligonucleotide
aaagcacataagacggcttgcagttacgat

SEQ ID NO: 179679 - DNA, 30 bp, Artificial Sequence
  Synthetic oligonucleotide
cgagggtttcttcaaatcgttgtaaccgat

SEQ ID NO: 179680 - DNA, 30 bp, Artificial Sequence
  Synthetic oligonucleotide
aagtccgaaatgggccgggcacaacccgat

SEQ ID NO: 179681 - DNA, 30 bp, Artificial Sequence
  Synthetic oligonucleotide
actaggtcatatgtaacaaacagacccgat

SEQ ID NO: 179682 - DNA, 30 bp, Artificial Sequence
  Synthetic oligonucleotide
ccgtacataggaacacgataattacccgat

SEQ ID NO: 179683 - DNA, 30 bp, Artificial Sequence
  Synthetic oligonucleotide
cggggagaatatctagcatcaaatcccgat

SEQ ID NO: 179684 - DNA, 30 bp, Artificial Sequence
  Synthetic oligonucleotide
tctactatgtgagtaagaccatcgtccgat

SEQ ID NO: 179685 - DNA, 30 bp, Artificial Sequence
  Synthetic oligonucleotide
tcatgcatcgatatacacacatacagcgat

SEQ ID NO: 179686 - DNA, 30 bp, Artificial Sequence
  Synthetic oligonucleotide
gggtggacataactaggaataagcagcgat

SEQ ID NO: 179687 - DNA, 30 bp, Artificial Sequence
  Synthetic oligonucleotide
gaagcagggtcagtgtataagtgcagcgat

SEQ ID NO: 179688 - DNA, 30 bp, Artificial Sequence
  Synthetic oligonucleotide
gccgggtgcgaggtttgttaatgtagcgat

SEQ ID NO: 179689 - DNA, 30 bp, Artificial Sequence
  Synthetic oligonucleotide
cgcgctgggtgccatgtttatcgacgcgat

SEQ ID NO: 179690 - DNA, 30 bp, Artificial Sequence
  Synthetic oligonucleotide
gggggctctgtcaaggaggtagtacgcgat

SEQ ID NO: 179691 - DNA, 30 bp, Artificial Sequence
  Synthetic oligonucleotide
gtatcatgggtacaaggttcctggcgcgat

SEQ ID NO: 179692 - DNA, 30 bp, Artificial Sequence
  Synthetic oligonucleotide
gtggtaagccaagcaacacagtggcgcgat

SEQ ID NO: 179693 - DNA, 30 bp, Artificial Sequence
  Synthetic oligonucleotide
tcgacggcggggtagctaagggttcgcgat

SEQ ID NO: 179694 - DNA, 30 bp, Artificial Sequence
  Synthetic oligonucleotide
agctcaagggtaccgtcaagaaaaggcgat

SEQ ID NO: 179695 - DNA, 30 bp, Artificial Sequence
  Synthetic oligonucleotide
tctgtcgtggcgtacaatgtcaccggcgat

SEQ ID NO: 179696 - DNA, 29 bp, Artificial Sequence
  Synthetic oligonucleotide
tcaaagacctttacagagagatgggcgat

SEQ ID NO: 179697 - DNA, 30 bp, Artificial Sequence
  Synthetic oligonucleotide
ggcagcggtaccaagagttgcaactgcgat

SEQ ID NO: 179698 - DNA, 30 bp, Artificial Sequence
  Synthetic oligonucleotide
tttcagctcagaggagtgccaaggtgcgat

SEQ ID NO: 179699 - DNA, 30 bp, Artificial Sequence
  Synthetic oligonucleotide
gaccgctcactcatcatgaacaaaatcgat

SEQ ID NO: 179700 - DNA, 30 bp, Artificial Sequence
  Synthetic oligonucleotide
caccgggtgggtatataatcgttcatcgat

SEQ ID NO: 179701 - DNA, 30 bp, Artificial Sequence
  Synthetic oligonucleotide
caggcaaagcggaaatactctccgatcgat

SEQ ID NO: 179702 - DNA, 30 bp, Artificial Sequence
  Synthetic oligonucleotide
actgtgagtatcggattggacactatcgat

SEQ ID NO: 179703 - DNA, 30 bp, Artificial Sequence
  Synthetic oligonucleotide
tcagtttcattcccccgagcaaccgtcgat

SEQ ID NO: 179704 - DNA, 30 bp, Artificial Sequence
  Synthetic oligonucleotide
gtgggggatcaaacagcgcgattcgtcgat

SEQ ID NO: 179705 - DNA, 30 bp, Artificial Sequence
  Synthetic oligonucleotide
atagacggttggcacccccttcgggtcgat

SEQ ID NO: 179706 - DNA, 30 bp, Artificial Sequence
  Synthetic oligonucleotide
ttaacaccaattgcgcggacttctgtcgat

SEQ ID NO: 179707 - DNA, 30 bp, Artificial Sequence
  Synthetic oligonucleotide
ccggtggtattgacgtagtgacaattcgat

SEQ ID NO: 179708 - DNA, 30 bp, Artificial Sequence
  Synthetic oligonucleotide
gttcaacacatgctcggtgaatatttcgat

SEQ ID NO: 179709 - DNA, 30 bp, Artificial Sequence
  Synthetic oligonucleotide
gtggatgcttatcgctgttgctgtttcgat

SEQ ID NO: 179710 - DNA, 30 bp, Artificial Sequence
  Synthetic oligonucleotide
ctttggctaaggcccttcatctcaaaggat

SEQ ID NO: 179711 - DNA, 30 bp, Artificial Sequence
  Synthetic oligonucleotide
gcgaaatgcagtttagaaattgtcaaggat

SEQ ID NO: 179712 - DNA, 30 bp, Artificial Sequence
  Synthetic oligonucleotide
ccaagtatttggatgtttgcgctgaaggat

SEQ ID NO: 179713 - DNA, 30 bp, Artificial Sequence
  Synthetic oligonucleotide
tcccaggcaatatggctaaatgataaggat

SEQ ID NO: 179714 - DNA, 30 bp, Artificial Sequence
  Synthetic oligonucleotide
gccagcacgctaacggcaccgggtaaggat

SEQ ID NO: 179715 - DNA, 30 bp, Artificial Sequence
  Synthetic oligonucleotide
gctggtaagctttggtacacgattaaggat

SEQ ID NO: 179716 - DNA, 30 bp, Artificial Sequence
  Synthetic oligonucleotide
taaaaaatgagagtgggaagcgaacaggat

SEQ ID NO: 179717 - DNA, 30 bp, Artificial Sequence
  Synthetic oligonucleotide
tctctagagagatcaaggatttagcaggat

SEQ ID NO: 179718 - DNA, 30 bp, Artificial Sequence
  Synthetic oligonucleotide
tgaatcagattagcttatagtgggcaggat

SEQ ID NO: 179719 - DNA, 30 bp, Artificial Sequence
  Synthetic oligonucleotide
aataagatgatctgtgcatgtagtcaggat

SEQ ID NO: 179720 - DNA, 30 bp, Artificial Sequence
  Synthetic oligonucleotide
ccctactcgcgtaaaagtatgttagaggat

SEQ ID NO: 179721 - DNA, 30 bp, Artificial Sequence
  Synthetic oligonucleotide
agatttcagagtgcgtgaccaggggaggat

SEQ ID NO: 179722 - DNA, 30 bp, Artificial Sequence
  Synthetic oligonucleotide
tgggatcgtgagcgtagcgaaaaataggat

SEQ ID NO: 179723 - DNA, 30 bp, Artificial Sequence
  Synthetic oligonucleotide
tagaagattaaccacgataataggtaggat

SEQ ID NO: 179724 - DNA, 30 bp, Artificial Sequence
  Synthetic oligonucleotide
gtttgtaagaaaaatgatgggtggtaggat

SEQ ID NO: 179725 - DNA, 30 bp, Artificial Sequence
  Synthetic oligonucleotide
tggcttcggaagacgacattgttgtaggat

SEQ ID NO: 179726 - DNA, 30 bp, Artificial Sequence
  Synthetic oligonucleotide
tttggaggcctatgagagggtcgttaggat

SEQ ID NO: 179727 - DNA, 30 bp, Artificial Sequence
  Synthetic oligonucleotide
gaactacctgggccggcgaggaaaacggat

SEQ ID NO: 179728 - DNA, 30 bp, Artificial Sequence
  Synthetic oligonucleotide
gccaatagcgtgctaaatagcagcacggat

SEQ ID NO: 179729 - DNA, 30 bp, Artificial Sequence
  Synthetic oligonucleotide
aaaggggcattattatggggaccaccggat

SEQ ID NO: 179730 - DNA, 30 bp, Artificial Sequence
  Synthetic oligonucleotide
ccgcgatgcccacttaggtgatacccggat

SEQ ID NO: 179731 - DNA, 30 bp, Artificial Sequence
  Synthetic oligonucleotide
aggagataactggttggatccccgccggat

SEQ ID NO: 179732 - DNA, 30 bp, Artificial Sequence
  Synthetic oligonucleotide
aggggggatctcgaggaaaggccgccggat

SEQ ID NO: 179733 - DNA, 30 bp, Artificial Sequence
  Synthetic oligonucleotide
caaactttggatacgttctgtgaagcggat

SEQ ID NO: 179734 - DNA, 30 bp, Artificial Sequence
  Synthetic oligonucleotide
gcctcaccgcatggtgatctcagggcggat

SEQ ID NO: 179735 - DNA, 30 bp, Artificial Sequence
  Synthetic oligonucleotide
gtaacagtttggtataattatcctgcggat

SEQ ID NO: 179736 - DNA, 30 bp, Artificial Sequence
  Synthetic oligonucleotide
atcatacaatgattgatttgggcatcggat

SEQ ID NO: 179737 - DNA, 30 bp, Artificial Sequence
  Synthetic oligonucleotide
cgccgaccattagcgggtacctcctcggat

SEQ ID NO: 179738 - DNA, 30 bp, Artificial Sequence
  Synthetic oligonucleotide
ggtgaatggccccaaataagaccgtcggat

SEQ ID NO: 179739 - DNA, 30 bp, Artificial Sequence
  Synthetic oligonucleotide
tcccgtgtgaacagacgagttggttcggat

SEQ ID NO: 179740 - DNA, 30 bp, Artificial Sequence
  Synthetic oligonucleotide
gcttggcatacggaatagggaaccagggat

SEQ ID NO: 179741 - DNA, 30 bp, Artificial Sequence
  Synthetic oligonucleotide
gacaacggcttagttacacaggttagggat

SEQ ID NO: 179742 - DNA, 30 bp, Artificial Sequence
  Synthetic oligonucleotide
cccgagatattgcatctaggcggccgggat

SEQ ID NO: 179743 - DNA, 30 bp, Artificial Sequence
  Synthetic oligonucleotide
tccaatacattgatttgttgaaggcgggat

SEQ ID NO: 179744 - DNA, 30 bp, Artificial Sequence
  Synthetic oligonucleotide
atgttagaatcttagtcagtcacaggggat

SEQ ID NO: 179745 - DNA, 30 bp, Artificial Sequence
  Synthetic oligonucleotide
cgttcgataatcaggagtgtcaggggggat

SEQ ID NO: 179746 - DNA, 30 bp, Artificial Sequence
  Synthetic oligonucleotide
cggggaaatgcgctaccttaagggggggat

SEQ ID NO: 179747 - DNA, 30 bp, Artificial Sequence
  Synthetic oligonucleotide
gtcaagaagcttattaatgaactgggggat

SEQ ID NO: 179748 - DNA, 30 bp, Artificial Sequence
  Synthetic oligonucleotide
gtcaggtcgaggccttcattaaatggggat

SEQ ID NO: 179749 - DNA, 30 bp, Artificial Sequence
  Synthetic oligonucleotide
aggacacgaaaattatttaggtatggggat

SEQ ID NO: 179750 - DNA, 30 bp, Artificial Sequence
  Synthetic oligonucleotide
gcttgagttaaaacgtaaaacattggggat

SEQ ID NO: 179751 - DNA, 30 bp, Artificial Sequence
  Synthetic oligonucleotide
gtaccaaatactgggatcctatgatgggat

SEQ ID NO: 179752 - DNA, 30 bp, Artificial Sequence
  Synthetic oligonucleotide
ctagactgaggaggcctgtttcactgggat

SEQ ID NO: 179753 - DNA, 30 bp, Artificial Sequence
  Synthetic oligonucleotide
tctgaggtacaggcaaacctttcctgggat

SEQ ID NO: 179754 - DNA, 30 bp, Artificial Sequence
  Synthetic oligonucleotide
tacctgagacattgcagggtccattgggat

SEQ ID NO: 179755 - DNA, 30 bp, Artificial Sequence
  Synthetic oligonucleotide
tctgacaggctcagtcaaaagtcaatggat

SEQ ID NO: 179756 - DNA, 30 bp, Artificial Sequence
  Synthetic oligonucleotide
gagccataggcaccggtactacagatggat

SEQ ID NO: 179757 - DNA, 30 bp, Artificial Sequence
  Synthetic oligonucleotide
ttcgcattaacatggtagtaacctatggat

SEQ ID NO: 179758 - DNA, 30 bp, Artificial Sequence
  Synthetic oligonucleotide
tacccacggcactaagggataaaactggat

SEQ ID NO: 179759 - DNA, 30 bp, Artificial Sequence
  Synthetic oligonucleotide
caatgtttctaagagagtgcgtgactggat

SEQ ID NO: 179760 - DNA, 30 bp, Artificial Sequence
  Synthetic oligonucleotide
agaggaaggcggatttatttttgactggat

SEQ ID NO: 179761 - DNA, 30 bp, Artificial Sequence
  Synthetic oligonucleotide
cagttggagaactgtctcttgcggctggat

SEQ ID NO: 179762 - DNA, 30 bp, Artificial Sequence
  Synthetic oligonucleotide
tgctttgacagaaacggaaggcatctggat

SEQ ID NO: 179763 - DNA, 30 bp, Artificial Sequence
  Synthetic oligonucleotide
tatgggcccggatataatggaccagtggat

SEQ ID NO: 179764 - DNA, 30 bp, Artificial Sequence
  Synthetic oligonucleotide
cacggggaacgattgtatttgtccgtggat

SEQ ID NO: 179765 - DNA, 30 bp, Artificial Sequence
  Synthetic oligonucleotide
atggtagtcggagttcattgacgcgtggat

SEQ ID NO: 179766 - DNA, 30 bp, Artificial Sequence
  Synthetic oligonucleotide
agcggcggttctcttcggcctatcgtggat

SEQ ID NO: 179767 - DNA, 30 bp, Artificial Sequence
  Synthetic oligonucleotide
acgcgccagtttaagcgagtctgggtggat

SEQ ID NO: 179768 - DNA, 30 bp, Artificial Sequence
  Synthetic oligonucleotide
agtcggatagtcaaggcggcactggtggat

SEQ ID NO: 179769 - DNA, 30 bp, Artificial Sequence
  Synthetic oligonucleotide
taacgggttatgtcctaaaaaactttggat

SEQ ID NO: 179770 - DNA, 30 bp, Artificial Sequence
  Synthetic oligonucleotide
cactgcaaaagtttgtgtcaatctttggat

SEQ ID NO: 179771 - DNA, 30 bp, Artificial Sequence
  Synthetic oligonucleotide
cgtccgagtaatcgcgttcaagaaaatgat

SEQ ID NO: 179772 - DNA, 30 bp, Artificial Sequence
  Synthetic oligonucleotide
cggactcggcaaatggagcgggaacatgat

SEQ ID NO: 179773 - DNA, 30 bp, Artificial Sequence
  Synthetic oligonucleotide
tctacagagattggtctgataagacatgat

SEQ ID NO: 179774 - DNA, 30 bp, Artificial Sequence
  Synthetic oligonucleotide
agacaggtccggggtcaataccgacatgat

SEQ ID NO: 179775 - DNA, 30 bp, Artificial Sequence
  Synthetic oligonucleotide
cacaagccctacgaaatggtatgacatgat

SEQ ID NO: 179776 - DNA, 30 bp, Artificial Sequence
  Synthetic oligonucleotide
gatcacaaacaggtagaaacctttcatgat

SEQ ID NO: 179777 - DNA, 30 bp, Artificial Sequence
  Synthetic oligonucleotide
agctgctatctcgtgaccggaagcgatgat

SEQ ID NO: 179778 - DNA, 30 bp, Artificial Sequence
  Synthetic oligonucleotide
acatgaaaagtgagggcagtgttcgatgat

SEQ ID NO: 179779 - DNA, 30 bp, Artificial Sequence
  Synthetic oligonucleotide
tcgaatcagttttatcccataggggatgat

SEQ ID NO: 179780 - DNA, 30 bp, Artificial Sequence
  Synthetic oligonucleotide
ctaccaagggaagaactcggaccaactgat

SEQ ID NO: 179781 - DNA, 30 bp, Artificial Sequence
  Synthetic oligonucleotide
cgtgtgtgtccactaccaccacgtactgat

SEQ ID NO: 179782 - DNA, 30 bp, Artificial Sequence
  Synthetic oligonucleotide
ctcgtcgatgacttgcccggaaaacctgat

SEQ ID NO: 179783 - DNA, 30 bp, Artificial Sequence
  Synthetic oligonucleotide
gcggtctatgcaccgcaggtgatggctgat

SEQ ID NO: 179784 - DNA, 30 bp, Artificial Sequence
  Synthetic oligonucleotide
catgcgggcaacacataataaaatgctgat

SEQ ID NO: 179785 - DNA, 30 bp, Artificial Sequence
  Synthetic oligonucleotide
cacggactgccacttgtcgtgcatgctgat

SEQ ID NO: 179786 - DNA, 30 bp, Artificial Sequence
  Synthetic oligonucleotide
gaatcgtggtcgtagtacttggttgctgat

SEQ ID NO: 179787 - DNA, 30 bp, Artificial Sequence
  Synthetic oligonucleotide
tacaaggattcactaaggtccagatctgat

SEQ ID NO: 179788 - DNA, 30 bp, Artificial Sequence
  Synthetic oligonucleotide
tgagatggatctcttgagctcagatctgat

SEQ ID NO: 179789 - DNA, 30 bp, Artificial Sequence
  Synthetic oligonucleotide
cagagagtacagcgcgccgacctgtctgat

SEQ ID NO: 179790 - DNA, 30 bp, Artificial Sequence
  Synthetic oligonucleotide
tcctgggtcaacgtccgttgaacttctgat

SEQ ID NO: 179791 - DNA, 30 bp, Artificial Sequence
  Synthetic oligonucleotide
tcacaagatgagtgttcaatctcgagtgat

SEQ ID NO: 179792 - DNA, 30 bp, Artificial Sequence
  Synthetic oligonucleotide
tagccgagcacttgctgcgggaaacgtgat

SEQ ID NO: 179793 - DNA, 30 bp, Artificial Sequence
  Synthetic oligonucleotide
acgacaccgatgagaggtgacttacgtgat

SEQ ID NO: 179794 - DNA, 30 bp, Artificial Sequence
  Synthetic oligonucleotide
agtcaacgctcatttagaggtaagcgtgat

SEQ ID NO: 179795 - DNA, 30 bp, Artificial Sequence
  Synthetic oligonucleotide
caattcttcagtagcctcggatcaggtgat

SEQ ID NO: 179796 - DNA, 30 bp, Artificial Sequence
  Synthetic oligonucleotide
caccccggcgtaagtaagtccacgggtgat

SEQ ID NO: 179797 - DNA, 30 bp, Artificial Sequence
  Synthetic oligonucleotide
ggaaagttttatgttgatatcagatgtgat

SEQ ID NO: 179798 - DNA, 30 bp, Artificial Sequence
  Synthetic oligonucleotide
ttataagagaaatcttggagccggtgtgat

SEQ ID NO: 179799 - DNA, 30 bp, Artificial Sequence
  Synthetic oligonucleotide
acttgagaactttaggaaccgtgttgtgat

SEQ ID NO: 179800 - DNA, 30 bp, Artificial Sequence
  Synthetic oligonucleotide
agacaggtgactgtcgtgtaggatattgat

SEQ ID NO: 179801 - DNA, 30 bp, Artificial Sequence
  Synthetic oligonucleotide
agttgttaagctagctcagtgagtattgat

SEQ ID NO: 179802 - DNA, 30 bp, Artificial Sequence
  Synthetic oligonucleotide
cgacctagtcacaaagtgccgtcacttgat

SEQ ID NO: 179803 - DNA, 30 bp, Artificial Sequence
  Synthetic oligonucleotide
ccgatcgtggctagcgggagtaccgttgat

SEQ ID NO: 179804 - DNA, 30 bp, Artificial Sequence
  Synthetic oligonucleotide
tgaagtctgacggcagtcaagagcgttgat

SEQ ID NO: 179805 - DNA, 30 bp, Artificial Sequence
  Synthetic oligonucleotide
acctaaattgaaataggggtaatcgttgat

SEQ ID NO: 179806 - DNA, 30 bp, Artificial Sequence
  Synthetic oligonucleotide
acaagccgaataaaatataacagtgttgat

SEQ ID NO: 179807 - DNA, 30 bp, Artificial Sequence
  Synthetic oligonucleotide
cgctaaaagcgtaataatttcggtgttgat

SEQ ID NO: 179808 - DNA, 30 bp, Artificial Sequence
  Synthetic oligonucleotide
ggttggcctggtcaccgaaaaaaatttgat

SEQ ID NO: 179809 - DNA, 30 bp, Artificial Sequence
  Synthetic oligonucleotide
ttggtaacgtaaacttgcagcgcatttgat

SEQ ID NO: 179810 - DNA, 30 bp, Artificial Sequence
  Synthetic oligonucleotide
acaagataggacttaatatcattatttgat

SEQ ID NO: 179811 - DNA, 30 bp, Artificial Sequence
  Synthetic oligonucleotide
gcgtggatcaaaggatcttgttctaaatat

SEQ ID NO: 179812 - DNA, 30 bp, Artificial Sequence
  Synthetic oligonucleotide
tccaaaaaaataccccacagagaacaatat

SEQ ID NO: 179813 - DNA, 30 bp, Artificial Sequence
  Synthetic oligonucleotide
acgacacattgagccactacaatccaatat

SEQ ID NO: 179814 - DNA, 30 bp, Artificial Sequence
  Synthetic oligonucleotide
ctgctacacaggacgcgatggactcaatat

SEQ ID NO: 179815 - DNA, 30 bp, Artificial Sequence
  Synthetic oligonucleotide
tagacagaattaaatctcgcgagcgaatat

SEQ ID NO: 179816 - DNA, 30 bp, Artificial Sequence
  Synthetic oligonucleotide
aatccatatgcccttcgcgactaggaatat

SEQ ID NO: 179817 - DNA, 30 bp, Artificial Sequence
  Synthetic oligonucleotide
cgagtcatggatccggaccgtacggaatat

SEQ ID NO: 179818 - DNA, 30 bp, Artificial Sequence
  Synthetic oligonucleotide
tcgccaggtaatcacgcctgtcgggaatat

SEQ ID NO: 179819 - DNA, 30 bp, Artificial Sequence
  Synthetic oligonucleotide
gcgagatcgtcctgcgaacaaggtgaatat

SEQ ID NO: 179820 - DNA, 30 bp, Artificial Sequence
  Synthetic oligonucleotide
ggtgtgagaattgacatggctgaataatat

SEQ ID NO: 179821 - DNA, 30 bp, Artificial Sequence
  Synthetic oligonucleotide
aggctcacagatgtggttggctcctaatat

SEQ ID NO: 179822 - DNA, 30 bp, Artificial Sequence
  Synthetic oligonucleotide
ggaggtactcctctggcgacggcaacatat

SEQ ID NO: 179823 - DNA, 30 bp, Artificial Sequence
  Synthetic oligonucleotide
atcacaagcgacatacgcatgaacccatat

SEQ ID NO: 179824 - DNA, 30 bp, Artificial Sequence
  Synthetic oligonucleotide
gcgtagctccaagagaaacggcccccatat

SEQ ID NO: 179825 - DNA, 30 bp, Artificial Sequence
  Synthetic oligonucleotide
cgggaggcgacgataatttcagtgccatat

SEQ ID NO: 179826 - DNA, 30 bp, Artificial Sequence
  Synthetic oligonucleotide
gtaagcatctccgcctaacctagagcatat

SEQ ID NO: 179827 - DNA, 30 bp, Artificial Sequence
  Synthetic oligonucleotide
gccctcggtagtccggtcggtagagcatat

SEQ ID NO: 179828 - DNA, 30 bp, Artificial Sequence
  Synthetic oligonucleotide
tgtatatagagtgccgaactacgcgcatat

SEQ ID NO: 179829 - DNA, 30 bp, Artificial Sequence
  Synthetic oligonucleotide
acgcctggttcgtatattgcccgggcatat

SEQ ID NO: 179830 - DNA, 30 bp, Artificial Sequence
  Synthetic oligonucleotide
gccaaataaggggtaaaaaacatggcatat

SEQ ID NO: 179831 - DNA, 30 bp, Artificial Sequence
  Synthetic oligonucleotide
cgcgattaaaagaccagcactggtgcatat

SEQ ID NO: 179832 - DNA, 30 bp, Artificial Sequence
  Synthetic oligonucleotide
acgcggcccctactagcagcagactcatat

SEQ ID NO: 179833 - DNA, 30 bp, Artificial Sequence
  Synthetic oligonucleotide
agaaaacggcaaactctcgcgccctcatat

SEQ ID NO: 179834 - DNA, 30 bp, Artificial Sequence
  Synthetic oligonucleotide
gaggacttctccacatctcgcccgtcatat

SEQ ID NO: 179835 - DNA, 30 bp, Artificial Sequence
  Synthetic oligonucleotide
agcctacggcaacaccgggtgacaagatat

SEQ ID NO: 179836 - DNA, 30 bp, Artificial Sequence
  Synthetic oligonucleotide
taacaacgagatgtgtcgtatagaagatat

SEQ ID NO: 179837 - DNA, 30 bp, Artificial Sequence
  Synthetic oligonucleotide
ggcggtcatgcgttacagaactgaagatat

SEQ ID NO: 179838 - DNA, 30 bp, Artificial Sequence
  Synthetic oligonucleotide
cgtatccccagcggagtagaacctagatat

SEQ ID NO: 179839 - DNA, 30 bp, Artificial Sequence
  Synthetic oligonucleotide
aacaatcgaaacaacgtagattatcgatat

SEQ ID NO: 179840 - DNA, 30 bp, Artificial Sequence
  Synthetic oligonucleotide
tctataaacgaggctgcgcaggacggatat

SEQ ID NO: 179841 - DNA, 30 bp, Artificial Sequence
  Synthetic oligonucleotide
caagccattagggtaatgtattagggatat

SEQ ID NO: 179842 - DNA, 30 bp, Artificial Sequence
  Synthetic oligonucleotide
ggaacccaccactaacctgtgacgggatat

SEQ ID NO: 179843 - DNA, 30 bp, Artificial Sequence
  Synthetic oligonucleotide
acgggctgagatagagcatgcatgggatat

SEQ ID NO: 179844 - DNA, 30 bp, Artificial Sequence
  Synthetic oligonucleotide
aggggtcatcaaatacaatccaatggatat

SEQ ID NO: 179845 - DNA, 30 bp, Artificial Sequence
  Synthetic oligonucleotide
catctagtcgcgatgcgtcactgatgatat

SEQ ID NO: 179846 - DNA, 31 bp, Artificial Sequence
  Synthetic oligonucleotide
catatttctgttaaaattagaactatgatat

SEQ ID NO: 179847 - DNA, 30 bp, Artificial Sequence
  Synthetic oligonucleotide
tccgatgatccaagaatcaatgtatgatat

SEQ ID NO: 179848 - DNA, 31 bp, Artificial Sequence
  Synthetic oligonucleotide
tcaatacgcgtcgcgaaggatgtactgatat

SEQ ID NO: 179849 - DNA, 30 bp, Artificial Sequence
  Synthetic oligonucleotide
aagtgccaaagtttccctcaggcgtgatat

SEQ ID NO: 179850 - DNA, 30 bp, Artificial Sequence
  Synthetic oligonucleotide
aattgtggctggtcggtaagcctgtgatat

SEQ ID NO: 179851 - DNA, 30 bp, Artificial Sequence
  Synthetic oligonucleotide
gccccaacatgtacaggtttccaaatatat

SEQ ID NO: 179852 - DNA, 30 bp, Artificial Sequence
  Synthetic oligonucleotide
ggagataatcgtggacccaaagatatatat

SEQ ID NO: 179853 - DNA, 30 bp, Artificial Sequence
  Synthetic oligonucleotide
atcgcgagatcaacgcagaagatgctatat

SEQ ID NO: 179854 - DNA, 30 bp, Artificial Sequence
  Synthetic oligonucleotide
acacccacagacatgaaatcaactctatat

SEQ ID NO: 179855 - DNA, 30 bp, Artificial Sequence
  Synthetic oligonucleotide
cgtacaccaagacgctgagtgggagtatat

SEQ ID NO: 179856 - DNA, 30 bp, Artificial Sequence
  Synthetic oligonucleotide
caataggtttttcatagaatgatcgtatat

SEQ ID NO: 179857 - DNA, 30 bp, Artificial Sequence
  Synthetic oligonucleotide
aggacaggggaggtgttcatacgggtatat

SEQ ID NO: 179858 - DNA, 30 bp, Artificial Sequence
  Synthetic oligonucleotide
aggtgccctgggcacttttagttggtatat

SEQ ID NO: 179859 - DNA, 30 bp, Artificial Sequence
  Synthetic oligonucleotide
agttaggcgaaaggtacatgagatgtatat

SEQ ID NO: 179860 - DNA, 30 bp, Artificial Sequence
  Synthetic oligonucleotide
gggcttaacaggctgatggttaccttatat

SEQ ID NO: 179861 - DNA, 30 bp, Artificial Sequence
  Synthetic oligonucleotide
gggagaatgatagggataaggagcttatat

SEQ ID NO: 179862 - DNA, 30 bp, Artificial Sequence
  Synthetic oligonucleotide
accataggagcggctcggcgaaggttatat

SEQ ID NO: 179863 - DNA, 30 bp, Artificial Sequence
  Synthetic oligonucleotide
cattactcgaggtagagcgtatggttatat

SEQ ID NO: 179864 - DNA, 30 bp, Artificial Sequence
  Synthetic oligonucleotide
tactagagagtcgatcagaatatgaactat

SEQ ID NO: 179865 - DNA, 30 bp, Artificial Sequence
  Synthetic oligonucleotide
gcagtcgggttcctggaacgacaatactat

SEQ ID NO: 179866 - DNA, 30 bp, Artificial Sequence
  Synthetic oligonucleotide
gcatcgcgtaccggttgctatacatactat

SEQ ID NO: 179867 - DNA, 40 bp, Artificial Sequence
  Synthetic oligonucleotide
gatgcgtgatcgtcgagctgcgcaggcctaagcatactat

SEQ ID NO: 179868 - DNA, 30 bp, Artificial Sequence
  Synthetic oligonucleotide
aaacaagtaaagccgtttcaggagtactat

SEQ ID NO: 179869 - DNA, 30 bp, Artificial Sequence
  Synthetic oligonucleotide
aagaacccgcaaaagaggatacggtactat

SEQ ID NO: 179870 - DNA, 30 bp, Artificial Sequence
  Synthetic oligonucleotide
agggagcatcggcgcgatagtgcgacctat

SEQ ID NO: 179871 - DNA, 30 bp, Artificial Sequence
  Synthetic oligonucleotide
gtaaacccacactgcctctcgggcccctat

SEQ ID NO: 179872 - DNA, 30 bp, Artificial Sequence
  Synthetic oligonucleotide
aagcaggagcgacgactcccggagccctat

SEQ ID NO: 179873 - DNA, 30 bp, Artificial Sequence
  Synthetic oligonucleotide
aattggccatcattagccacgcctccctat

SEQ ID NO: 179874 - DNA, 30 bp, Artificial Sequence
  Synthetic oligonucleotide
cccaggccgaccacacgatcttcctcctat

SEQ ID NO: 179875 - DNA, 30 bp, Artificial Sequence
  Synthetic oligonucleotide
aagaatcaggttcaagactagttgtcctat

SEQ ID NO: 179876 - DNA, 30 bp, Artificial Sequence
  Synthetic oligonucleotide
accggagtattatattaaatcgattcctat

SEQ ID NO: 179877 - DNA, 30 bp, Artificial Sequence
  Synthetic oligonucleotide
gaggaactaagtatccatagtataagctat

SEQ ID NO: 179878 - DNA, 30 bp, Artificial Sequence
  Synthetic oligonucleotide
ttgaactcgggtagccaatattagagctat

SEQ ID NO: 179879 - DNA, 30 bp, Artificial Sequence
  Synthetic oligonucleotide
atggaagtagatgatgcagtggtgagctat

SEQ ID NO: 179880 - DNA, 30 bp, Artificial Sequence
  Synthetic oligonucleotide
ccgatgaatcgcttgttcggaagtggctat

SEQ ID NO: 179881 - DNA, 30 bp, Artificial Sequence
  Synthetic oligonucleotide
tttatttgcaaaaggggcggggcactctat

SEQ ID NO: 179882 - DNA, 30 bp, Artificial Sequence
  Synthetic oligonucleotide
tataaaatgtgctccaagatgaccctctat

SEQ ID NO: 179883 - DNA, 30 bp, Artificial Sequence
  Synthetic oligonucleotide
tgatgccgcactctgtggaatgtgctctat

SEQ ID NO: 179884 - DNA, 30 bp, Artificial Sequence
  Synthetic oligonucleotide
aaaggacgctaaaaggcaaaagttctctat

SEQ ID NO: 179885 - DNA, 30 bp, Artificial Sequence
  Synthetic oligonucleotide
atgggtagtgtcccactagtttgagtctat

SEQ ID NO: 179886 - DNA, 30 bp, Artificial Sequence
  Synthetic oligonucleotide
taaatgtcgacaatcaaggtctgcttctat

SEQ ID NO: 179887 - DNA, 30 bp, Artificial Sequence
  Synthetic oligonucleotide
attcgttgaccaagttagatcgaaaagtat

SEQ ID NO: 179888 - DNA, 30 bp, Artificial Sequence
  Synthetic oligonucleotide
gggatatcgaccttacttggggtaaagtat

SEQ ID NO: 179889 - DNA, 30 bp, Artificial Sequence
  Synthetic oligonucleotide
ggcaggacagcattttatcgtcacaagtat

SEQ ID NO: 179890 - DNA, 30 bp, Artificial Sequence
  Synthetic oligonucleotide
agtaatagggtcaaaccccttgggcagtat

SEQ ID NO: 179891 - DNA, 30 bp, Artificial Sequence
  Synthetic oligonucleotide
ttaaccaataagctgtgggaaaatcagtat

SEQ ID NO: 179892 - DNA, 30 bp, Artificial Sequence
  Synthetic oligonucleotide
atgtgtacgagaaccccaatagtagagtat

SEQ ID NO: 179893 - DNA, 30 bp, Artificial Sequence
  Synthetic oligonucleotide
cacggaccttctagcctaacgcaatagtat

SEQ ID NO: 179894 - DNA, 30 bp, Artificial Sequence
  Synthetic oligonucleotide
gtgagatccgcggctgcgagatcctagtat

SEQ ID NO: 179895 - DNA, 30 bp, Artificial Sequence
  Synthetic oligonucleotide
ctaggctgccatggtagaccagacacgtat

SEQ ID NO: 179896 - DNA, 30 bp, Artificial Sequence
  Synthetic oligonucleotide
gattgggaatagggggccttagtcacgtat

SEQ ID NO: 179897 - DNA, 30 bp, Artificial Sequence
  Synthetic oligonucleotide
gcgtgtacggccccgtcgggatagacgtat

SEQ ID NO: 179898 - DNA, 30 bp, Artificial Sequence
  Synthetic oligonucleotide
tttccaccgatatcagctcacccgacgtat

SEQ ID NO: 179899 - DNA, 30 bp, Artificial Sequence
  Synthetic oligonucleotide
ggtgttttgctgaagaaagctcggacgtat

SEQ ID NO: 179900 - DNA, 30 bp, Artificial Sequence
  Synthetic oligonucleotide
ctgtttaaaaagaactggaaagttacgtat

SEQ ID NO: 179901 - DNA, 30 bp, Artificial Sequence
  Synthetic oligonucleotide
accgtgttgagagtcgtcgtctatccgtat

SEQ ID NO: 179902 - DNA, 30 bp, Artificial Sequence
  Synthetic oligonucleotide
acgggagcgcggaactccattgttccgtat

SEQ ID NO: 179903 - DNA, 30 bp, Artificial Sequence
  Synthetic oligonucleotide
ggacaagattacagtcctcaccaagcgtat

SEQ ID NO: 179904 - DNA, 30 bp, Artificial Sequence
  Synthetic oligonucleotide
gctgaggcctaaggctttagcacagcgtat

SEQ ID NO: 179905 - DNA, 30 bp, Artificial Sequence
  Synthetic oligonucleotide
cggttgagaactaggcaagtcatagcgtat

SEQ ID NO: 179906 - DNA, 30 bp, Artificial Sequence
  Synthetic oligonucleotide
tggctcaagctacagctagatccctcgtat

SEQ ID NO: 179907 - DNA, 30 bp, Artificial Sequence
  Synthetic oligonucleotide
cctagttgagagcccaggctacagtcgtat

SEQ ID NO: 179908 - DNA, 30 bp, Artificial Sequence
  Synthetic oligonucleotide
acgggctcaccatgggttcttcattcgtat

SEQ ID NO: 179909 - DNA, 30 bp, Artificial Sequence
  Synthetic oligonucleotide
gttgtgggcaaccttcggtaaacaaggtat

SEQ ID NO: 179910 - DNA, 30 bp, Artificial Sequence
  Synthetic oligonucleotide
gggaagctctcactagcacgctcaaggtat

SEQ ID NO: 179911 - DNA, 30 bp, Artificial Sequence
  Synthetic oligonucleotide
ccgaacttactcgccaaagcgtgaaggtat

SEQ ID NO: 179912 - DNA, 30 bp, Artificial Sequence
  Synthetic oligonucleotide
agcaaaaggcgcagacaggaactaaggtat

SEQ ID NO: 179913 - DNA, 30 bp, Artificial Sequence
  Synthetic oligonucleotide
gcgttataaggtataaagtataataggtat

SEQ ID NO: 179914 - DNA, 30 bp, Artificial Sequence
  Synthetic oligonucleotide
tacggggaaatctgacacccccctaggtat

SEQ ID NO: 179915 - DNA, 30 bp, Artificial Sequence
  Synthetic oligonucleotide
aagaggtattacatggcgagaaaccggtat

SEQ ID NO: 179916 - DNA, 30 bp, Artificial Sequence
  Synthetic oligonucleotide
ttccagataccaaactgcaacccgcggtat

SEQ ID NO: 179917 - DNA, 30 bp, Artificial Sequence
  Synthetic oligonucleotide
aatgtaggtaacgacatctgcttgcggtat

SEQ ID NO: 179918 - DNA, 30 bp, Artificial Sequence
  Synthetic oligonucleotide
cgtaaaaacctgtgtgattaggtcgggtat

SEQ ID NO: 179919 - DNA, 30 bp, Artificial Sequence
  Synthetic oligonucleotide
ctggacgcaaggaggaaagtgcaggggtat

SEQ ID NO: 179920 - DNA, 30 bp, Artificial Sequence
  Synthetic oligonucleotide
agcgggagcatacgaacgagttgggggtat

SEQ ID NO: 179921 - DNA, 30 bp, Artificial Sequence
  Synthetic oligonucleotide
aaaaatcgatcaagctggggactggggtat

SEQ ID NO: 179922 - DNA, 30 bp, Artificial Sequence
  Synthetic oligonucleotide
tccaaaggtaaaaaagtactatcctggtat

SEQ ID NO: 179923 - DNA, 30 bp, Artificial Sequence
  Synthetic oligonucleotide
aatgggcggaatagtagctctagctggtat

SEQ ID NO: 179924 - DNA, 30 bp, Artificial Sequence
  Synthetic oligonucleotide
accgatcggggcgaccaatcatgctggtat

SEQ ID NO: 179925 - DNA, 30 bp, Artificial Sequence
  Synthetic oligonucleotide
atcaccctcattcttcggagaccttggtat

SEQ ID NO: 179926 - DNA, 30 bp, Artificial Sequence
  Synthetic oligonucleotide
taagtggggaaaaagggctagtcttggtat

SEQ ID NO: 179927 - DNA, 30 bp, Artificial Sequence
  Synthetic oligonucleotide
acgtcttgacgtctccaggatcaaatgtat

SEQ ID NO: 179928 - DNA, 30 bp, Artificial Sequence
  Synthetic oligonucleotide
caatgggggagcccagagatgataatgtat

SEQ ID NO: 179929 - DNA, 30 bp, Artificial Sequence
  Synthetic oligonucleotide
atgagtgactgttggagtcgatacatgtat

SEQ ID NO: 179930 - DNA, 30 bp, Artificial Sequence
  Synthetic oligonucleotide
aacgttagctgatgtagatagttcatgtat

SEQ ID NO: 179931 - DNA, 30 bp, Artificial Sequence
  Synthetic oligonucleotide
tttatgcacaagtatgctggacatatgtat

SEQ ID NO: 179932 - DNA, 30 bp, Artificial Sequence
  Synthetic oligonucleotide
taacgttcgtgccagtgtttctgtatgtat

SEQ ID NO: 179933 - DNA, 30 bp, Artificial Sequence
  Synthetic oligonucleotide
gttaaaggctgaatgtaccaaattatgtat

SEQ ID NO: 179934 - DNA, 30 bp, Artificial Sequence
  Synthetic oligonucleotide
attgggtgagaatggataatgggactgtat

SEQ ID NO: 179935 - DNA, 30 bp, Artificial Sequence
  Synthetic oligonucleotide
tgcaatgtacttctattcgtggtactgtat

SEQ ID NO: 179936 - DNA, 30 bp, Artificial Sequence
  Synthetic oligonucleotide
gaccttcagacaaaagttcgagctctgtat

SEQ ID NO: 179937 - DNA, 30 bp, Artificial Sequence
  Synthetic oligonucleotide
ttcaacatgtaaaccgctaaaggcgtgtat

SEQ ID NO: 179938 - DNA, 30 bp, Artificial Sequence
  Synthetic oligonucleotide
acgggcggtgattatatggaaacggtgtat

SEQ ID NO: 179939 - DNA, 30 bp, Artificial Sequence
  Synthetic oligonucleotide
gtcacacgataaccaggctgagtggtgtat

SEQ ID NO: 179940 - DNA, 30 bp, Artificial Sequence
  Synthetic oligonucleotide
catctacgtgtggttcggataattgtgtat

SEQ ID NO: 179941 - DNA, 30 bp, Artificial Sequence
  Synthetic oligonucleotide
tcttatctgttgtgtttgcctcttgtgtat

SEQ ID NO: 179942 - DNA, 30 bp, Artificial Sequence
  Synthetic oligonucleotide
tcgtatctgttgtgttttcctcttgtgtat

SEQ ID NO: 179943 - DNA, 30 bp, Artificial Sequence
  Synthetic oligonucleotide
ccttagtgcgagcgatgaacagaattgtat

SEQ ID NO: 179944 - DNA, 30 bp, Artificial Sequence
  Synthetic oligonucleotide
aggctaaaaggctaacaccatcagttgtat

SEQ ID NO: 179945 - DNA, 30 bp, Artificial Sequence
  Synthetic oligonucleotide
ttgcacgggtcgttctagtccccaaattat

SEQ ID NO: 179946 - DNA, 30 bp, Artificial Sequence
  Synthetic oligonucleotide
gagatgaaccggcgactgggcccaaattat

SEQ ID NO: 179947 - DNA, 30 bp, Artificial Sequence
  Synthetic oligonucleotide
cttggtgaatcgtcgtcgggccggaattat

SEQ ID NO: 179948 - DNA, 30 bp, Artificial Sequence
  Synthetic oligonucleotide
tcagataaactgggaggagatggacattat

SEQ ID NO: 179949 - DNA, 30 bp, Artificial Sequence
  Synthetic oligonucleotide
tgcccgaacaatagaatcactcgtcattat

SEQ ID NO: 179950 - DNA, 30 bp, Artificial Sequence
  Synthetic oligonucleotide
actaataaacaattcaacataccagattat

SEQ ID NO: 179951 - DNA, 30 bp, Artificial Sequence
  Synthetic oligonucleotide
cggggcaatagatttagagagagagattat

SEQ ID NO: 179952 - DNA, 30 bp, Artificial Sequence
  Synthetic oligonucleotide
actcagatgatgacgtctcagacggattat

SEQ ID NO: 179953 - DNA, 30 bp, Artificial Sequence
  Synthetic oligonucleotide
tgaggacccaaagtgcttgccagggattat

SEQ ID NO: 179954 - DNA, 30 bp, Artificial Sequence
  Synthetic oligonucleotide
gtaaggactgtcgacgatcggcatgattat

SEQ ID NO: 179955 - DNA, 30 bp, Artificial Sequence
  Synthetic oligonucleotide
tccgaacggttggaagaacctcctgattat

SEQ ID NO: 179956 - DNA, 30 bp, Artificial Sequence
  Synthetic oligonucleotide
atggttgattgaatattatagcaatattat

SEQ ID NO: 179957 - DNA, 30 bp, Artificial Sequence
  Synthetic oligonucleotide
acagggtgaggttcgagcctagtttattat

SEQ ID NO: 179958 - DNA, 30 bp, Artificial Sequence
  Synthetic oligonucleotide
cctaccgtaaggtagtaacctccaacttat

SEQ ID NO: 179959 - DNA, 30 bp, Artificial Sequence
  Synthetic oligonucleotide
tagacactcggaaatggactagcaacttat

SEQ ID NO: 179960 - DNA, 30 bp, Artificial Sequence
  Synthetic oligonucleotide
gatcggacgaccgtgcgtattaagacttat

SEQ ID NO: 179961 - DNA, 29 bp, Artificial Sequence
  Synthetic oligonucleotide
tctcattaccatccacttaaagtacttat

SEQ ID NO: 179962 - DNA, 30 bp, Artificial Sequence
  Synthetic oligonucleotide
ccacttttgatctagtaaaggagagcttat

SEQ ID NO: 179963 - DNA, 30 bp, Artificial Sequence
  Synthetic oligonucleotide
gcagtgcgacgaaatgttgaaaacgcttat

SEQ ID NO: 179964 - DNA, 30 bp, Artificial Sequence
  Synthetic oligonucleotide
caccaacgtactggaatcgaatgggcttat

SEQ ID NO: 179965 - DNA, 30 bp, Artificial Sequence
  Synthetic oligonucleotide
tcggggaaaggagagtgcggatttgcttat

SEQ ID NO: 179966 - DNA, 30 bp, Artificial Sequence
  Synthetic oligonucleotide
gtagacttgcaagtacgggagacttcttat

SEQ ID NO: 179967 - DNA, 30 bp, Artificial Sequence
  Synthetic oligonucleotide
gagcaatcggtgatatcttatgaaagttat

SEQ ID NO: 179968 - DNA, 30 bp, Artificial Sequence
  Synthetic oligonucleotide
acgggtagaggtcaacatgtaacaagttat

SEQ ID NO: 179969 - DNA, 30 bp, Artificial Sequence
  Synthetic oligonucleotide
aaaggacctatgcgatacctccagagttat

SEQ ID NO: 179970 - DNA, 30 bp, Artificial Sequence
  Synthetic oligonucleotide
ggctatggaacgtggtgaaccgctagttat

SEQ ID NO: 179971 - DNA, 30 bp, Artificial Sequence
  Synthetic oligonucleotide
cttgttaatagactgggaccgaaccgttat

SEQ ID NO: 179972 - DNA, 30 bp, Artificial Sequence
  Synthetic oligonucleotide
taatcacagaatgagctgggtagccgttat

SEQ ID NO: 179973 - DNA, 30 bp, Artificial Sequence
  Synthetic oligonucleotide
ggatgagctaaggaaggtccgcgtcgttat

SEQ ID NO: 179974 - DNA, 30 bp, Artificial Sequence
  Synthetic oligonucleotide
tcagaggacgtacaggaacatcgtcgttat

SEQ ID NO: 179975 - DNA, 30 bp, Artificial Sequence
  Synthetic oligonucleotide
accacagcaaggaatccggtagaaggttat

SEQ ID NO: 179976 - DNA, 29 bp, Artificial Sequence
  Synthetic oligonucleotide
ccttggctagtggggtctctggaggttat

SEQ ID NO: 179977 - DNA, 30 bp, Artificial Sequence
  Synthetic oligonucleotide
tcaatataaactgtgccgtgaaagtgttat

SEQ ID NO: 179978 - DNA, 30 bp, Artificial Sequence
  Synthetic oligonucleotide
tacttagccataggatcaacggattgttat

SEQ ID NO: 179979 - DNA, 30 bp, Artificial Sequence
  Synthetic oligonucleotide
cttagttgtggaaagaaattgagaatttat

SEQ ID NO: 179980 - DNA, 30 bp, Artificial Sequence
  Synthetic oligonucleotide
aaggtctggtcaaatgcgaatcgaatttat

SEQ ID NO: 179981 - DNA, 30 bp, Artificial Sequence
  Synthetic oligonucleotide
actggcagccgagaggttcttgatatttat

SEQ ID NO: 179982 - DNA, 30 bp, Artificial Sequence
  Synthetic oligonucleotide
ctaaaattagacagattaacagttatttat

SEQ ID NO: 179983 - DNA, 30 bp, Artificial Sequence
  Synthetic oligonucleotide
ggctgaaatcgctggcgcgtcgccaaaact

SEQ ID NO: 179984 - DNA, 30 bp, Artificial Sequence
  Synthetic oligonucleotide
tgctgaaggaaagctagtcaagtcaaaact

SEQ ID NO: 179985 - DNA, 30 bp, Artificial Sequence
  Synthetic oligonucleotide
acgttggatacggttcaacacgagaaaact

SEQ ID NO: 179986 - DNA, 30 bp, Artificial Sequence
  Synthetic oligonucleotide
ctgggcgatactgtcttctagtagaaaact

SEQ ID NO: 179987 - DNA, 30 bp, Artificial Sequence
  Synthetic oligonucleotide
ttacggaggtaacgctactatgtgaaaact

SEQ ID NO: 179988 - DNA, 30 bp, Artificial Sequence
  Synthetic oligonucleotide
cactggtcggtcatggatccttataaaact

SEQ ID NO: 179989 - DNA, 30 bp, Artificial Sequence
  Synthetic oligonucleotide
cctgctattaggggatccaggtgtaaaact

SEQ ID NO: 179990 - DNA, 30 bp, Artificial Sequence
  Synthetic oligonucleotide
agctaagggtattaggtaggaccacaaact

SEQ ID NO: 179991 - DNA, 30 bp, Artificial Sequence
  Synthetic oligonucleotide
gcgtcgtaaccaattgcccgtgttcaaact

SEQ ID NO: 179992 - DNA, 30 bp, Artificial Sequence
  Synthetic oligonucleotide
tgtctacggtgttcagaatatgaagaaact

SEQ ID NO: 179993 - DNA, 30 bp, Artificial Sequence
  Synthetic oligonucleotide
gcatggaggtaaccataccctgtggaaact

SEQ ID NO: 179994 - DNA, 30 bp, Artificial Sequence
  Synthetic oligonucleotide
taaataaacagctaaatagacagtgaaact

SEQ ID NO: 179995 - DNA, 30 bp, Artificial Sequence
  Synthetic oligonucleotide
gatagcaaaagggtgaggagtatataaact

SEQ ID NO: 179996 - DNA, 30 bp, Artificial Sequence
  Synthetic oligonucleotide
caagtgatacagtgatggcaactataaact

SEQ ID NO: 179997 - DNA, 30 bp, Artificial Sequence
  Synthetic oligonucleotide
gacactatccggatctccctagtataaact

SEQ ID NO: 179998 - DNA, 30 bp, Artificial Sequence
  Synthetic oligonucleotide
aacggactagacatattggagttttaaact

SEQ ID NO: 179999 - DNA, 30 bp, Artificial Sequence
  Synthetic oligonucleotide
cccgcgcgcgtggccagacaatgaacaact

SEQ ID NO: 180000 - DNA, 30 bp, Artificial Sequence
  Synthetic oligonucleotide
gcccaacctcgaagtacgagtaacacaact

SEQ ID NO: 180001 - DNA, 30 bp, Artificial Sequence
  Synthetic oligonucleotide
agatgacacgacaagaggaacattacaact

SEQ ID NO: 180002 - DNA, 30 bp, Artificial Sequence
  Synthetic oligonucleotide
ctaactagtggcaatatcgcgacgccaact

SEQ ID NO: 180003 - DNA, 30 bp, Artificial Sequence
  Synthetic oligonucleotide
gctggtgtaaacggtgatttgtaagcaact

SEQ ID NO: 180004 - DNA, 30 bp, Artificial Sequence
  Synthetic oligonucleotide
gtaggacgtccaccttattctagagcaact

SEQ ID NO: 180005 - DNA, 30 bp, Artificial Sequence
  Synthetic oligonucleotide
tacaagctggcgaaacctaccggagcaact

SEQ ID NO: 180006 - DNA, 30 bp, Artificial Sequence
  Synthetic oligonucleotide
actgtacacgagactggttagcgcgcaact

SEQ ID NO: 180007 - DNA, 30 bp, Artificial Sequence
  Synthetic oligonucleotide
tcgcgaggcatcatttcatgtcgcgcaact

SEQ ID NO: 180008 - DNA, 30 bp, Artificial Sequence
  Synthetic oligonucleotide
gcctcggatgcaacgattcttgtcgcaact

SEQ ID NO: 180009 - DNA, 30 bp, Artificial Sequence
  Synthetic oligonucleotide
caaattgtaaagtgcacgccaaatgcaact

SEQ ID NO: 180010 - DNA, 30 bp, Artificial Sequence
  Synthetic oligonucleotide
catctcacgatgggacggattaatgcaact

SEQ ID NO: 180011 - DNA, 30 bp, Artificial Sequence
  Synthetic oligonucleotide
atccgggagcgcaaggttccacatgcaact

SEQ ID NO: 180012 - DNA, 30 bp, Artificial Sequence
  Synthetic oligonucleotide
tcacgcactttttactacacttcgtcaact

SEQ ID NO: 180013 - DNA, 30 bp, Artificial Sequence
  Synthetic oligonucleotide
acggggactcgcaacctttcgagttcaact

SEQ ID NO: 180014 - DNA, 30 bp, Artificial Sequence
  Synthetic oligonucleotide
caccggaacggggacgaatcttacagaact

SEQ ID NO: 180015 - DNA, 30 bp, Artificial Sequence
  Synthetic oligonucleotide
agagcacagcaaaatccgccgcgccgaact

SEQ ID NO: 180016 - DNA, 30 bp, Artificial Sequence
  Synthetic oligonucleotide
tcaaggatcgaagtggagcattgccgaact

SEQ ID NO: 180017 - DNA, 30 bp, Artificial Sequence
  Synthetic oligonucleotide
cccggagatctgtgctcttcattgcgaact

SEQ ID NO: 180018 - DNA, 30 bp, Artificial Sequence
  Synthetic oligonucleotide
tggagcattaatctcacgtcctagggaact

SEQ ID NO: 180019 - DNA, 30 bp, Artificial Sequence
  Synthetic oligonucleotide
cagtctactcgttttatggcaaggggaact

SEQ ID NO: 180020 - DNA, 30 bp, Artificial Sequence
  Synthetic oligonucleotide
ggttgattgggccggattgccagatgaact

SEQ ID NO: 180021 - DNA, 30 bp, Artificial Sequence
  Synthetic oligonucleotide
cggctcacaatctaccaggacaactgaact

SEQ ID NO: 180022 - DNA, 30 bp, Artificial Sequence
  Synthetic oligonucleotide
tatgtgtcgcttatacaatgaacttgaact

SEQ ID NO: 180023 - DNA, 30 bp, Artificial Sequence
  Synthetic oligonucleotide
ggaaagttaggataatcacctcaaataact

SEQ ID NO: 180024 - DNA, 30 bp, Artificial Sequence
  Synthetic oligonucleotide
gtatggtcaggaccgcttaacggaataact

SEQ ID NO: 180025 - DNA, 30 bp, Artificial Sequence
  Synthetic oligonucleotide
ttcatcaggaggagagattaagagataact

SEQ ID NO: 180026 - DNA, 30 bp, Artificial Sequence
  Synthetic oligonucleotide
gagatggatcgaatttgtattactataact

SEQ ID NO: 180027 - DNA, 30 bp, Artificial Sequence
  Synthetic oligonucleotide
ctgcggctgcgtgtgagccaagtagtaact

SEQ ID NO: 180028 - DNA, 30 bp, Artificial Sequence
  Synthetic oligonucleotide
gacagggctctggtgcggcggggcgtaact

SEQ ID NO: 180029 - DNA, 30 bp, Artificial Sequence
  Synthetic oligonucleotide
acgcgggtctcagcaacgaaatctttaact

SEQ ID NO: 180030 - DNA, 30 bp, Artificial Sequence
  Synthetic oligonucleotide
aaggagagacaagggctcagaccaaacact

SEQ ID NO: 180031 - DNA, 30 bp, Artificial Sequence
  Synthetic oligonucleotide
acgaccgcgtgttgggattacagaaacact

SEQ ID NO: 180032 - DNA, 30 bp, Artificial Sequence
  Synthetic oligonucleotide
gagcaacgcgaactgatgctactaaacact

SEQ ID NO: 180033 - DNA, 30 bp, Artificial Sequence
  Synthetic oligonucleotide
gtaccatgcatgggtcatggaaggaacact

SEQ ID NO: 180034 - DNA, 26 bp, Artificial Sequence
  Synthetic oligonucleotide
tatagccccagctcagaacacacact

SEQ ID NO: 180035 - DNA, 30 bp, Artificial Sequence
  Synthetic oligonucleotide
ttgagtggaacgaaacgtgttccacacact

SEQ ID NO: 180036 - DNA, 30 bp, Artificial Sequence
  Synthetic oligonucleotide
aatattgggtgggccggttaaaaccacact

SEQ ID NO: 180037 - DNA, 30 bp, Artificial Sequence
  Synthetic oligonucleotide
tgaccgtgtcggactatccctgggcacact

SEQ ID NO: 180038 - DNA, 30 bp, Artificial Sequence
  Synthetic oligonucleotide
agttagatccctaggtcggatcaagacact

SEQ ID NO: 180039 - DNA, 30 bp, Artificial Sequence
  Synthetic oligonucleotide
cctgcaaactccagttcggacaactacact

SEQ ID NO: 180040 - DNA, 30 bp, Artificial Sequence
  Synthetic oligonucleotide
gtatgcataggtgcatgcatacacaccact

SEQ ID NO: 180041 - DNA, 30 bp, Artificial Sequence
  Synthetic oligonucleotide
acgaaacaatcgcttgactcgcacaccact

SEQ ID NO: 180042 - DNA, 30 bp, Artificial Sequence
  Synthetic oligonucleotide
agtaaggtggagactaattaggacaccact

SEQ ID NO: 180043 - DNA, 30 bp, Artificial Sequence
  Synthetic oligonucleotide
atcgcctgcccacagggatgagccaccact

SEQ ID NO: 180044 - DNA, 30 bp, Artificial Sequence
  Synthetic oligonucleotide
cgggggcagaactatctcaaggcccccact

SEQ ID NO: 180045 - DNA, 30 bp, Artificial Sequence
  Synthetic oligonucleotide
ccgaggtaaaatgacacctatgacgccact

SEQ ID NO: 180046 - DNA, 30 bp, Artificial Sequence
  Synthetic oligonucleotide
gtatgctatttgagaggactagccgccact

SEQ ID NO: 180047 - DNA, 30 bp, Artificial Sequence
  Synthetic oligonucleotide
cggaaatcgcatccttgttcgagcgccact

SEQ ID NO: 180048 - DNA, 30 bp, Artificial Sequence
  Synthetic oligonucleotide
ccgctgaaggcacaagcagtctgcgccact

SEQ ID NO: 180049 - DNA, 30 bp, Artificial Sequence
  Synthetic oligonucleotide
gaacgcggacgcgcacccggaatcgccact

SEQ ID NO: 180050 - DNA, 30 bp, Artificial Sequence
  Synthetic oligonucleotide
gcgcaggcaggacatcggggaggatccact

SEQ ID NO: 180051 - DNA, 30 bp, Artificial Sequence
  Synthetic oligonucleotide
gtatatgcactttttcgaacaggctccact

SEQ ID NO: 180052 - DNA, 30 bp, Artificial Sequence
  Synthetic oligonucleotide
ccaggactaagttctcaggcttcgtccact

SEQ ID NO: 180053 - DNA, 30 bp, Artificial Sequence
  Synthetic oligonucleotide
gctaacgcgttagcgtacataatcagcact

SEQ ID NO: 180054 - DNA, 30 bp, Artificial Sequence
  Synthetic oligonucleotide
ttaacaggggctactggactaaatagcact

SEQ ID NO: 180055 - DNA, 30 bp, Artificial Sequence
  Synthetic oligonucleotide
tcagtaaatgggcaacattagaaccgcact

SEQ ID NO: 180056 - DNA, 30 bp, Artificial Sequence
  Synthetic oligonucleotide
tgcaaaaaaaggcatggaagagcccgcact

SEQ ID NO: 180057 - DNA, 30 bp, Artificial Sequence
  Synthetic oligonucleotide
caataataacggcaaatgttggcccgcact

SEQ ID NO: 180058 - DNA, 30 bp, Artificial Sequence
  Synthetic oligonucleotide
tttaagaaaaacgaacgggcagggcgcact

SEQ ID NO: 180059 - DNA, 30 bp, Artificial Sequence
  Synthetic oligonucleotide
cctctaagatcatgactatgggacggcact

SEQ ID NO: 180060 - DNA, 30 bp, Artificial Sequence
  Synthetic oligonucleotide
tggtttagagcggcgtgagttaatggcact

SEQ ID NO: 180061 - DNA, 31 bp, Artificial Sequence
  Synthetic oligonucleotide
aaaaaccatatgaggaggcggaagctgcact

SEQ ID NO: 180062 - DNA, 30 bp, Artificial Sequence
  Synthetic oligonucleotide
tggcttaccccgctagatttagggtgcact

SEQ ID NO: 180063 - DNA, 30 bp, Artificial Sequence
  Synthetic oligonucleotide
tccggggtattagggtcctcaatgtgcact

SEQ ID NO: 180064 - DNA, 29 bp, Artificial Sequence
  Synthetic oligonucleotide
agggaactacaaaagctccacccatcact

SEQ ID NO: 180065 - DNA, 30 bp, Artificial Sequence
  Synthetic oligonucleotide
acacggctttgaagaccaggcgcgatcact

SEQ ID NO: 180066 - DNA, 30 bp, Artificial Sequence
  Synthetic oligonucleotide
cgtgcccaaaggtaacgggtattgatcact

SEQ ID NO: 180067 - DNA, 30 bp, Artificial Sequence
  Synthetic oligonucleotide
acaaatggtacacttggttgggatctcact

SEQ ID NO: 180068 - DNA, 30 bp, Artificial Sequence
  Synthetic oligonucleotide
cgcggccctgtcctacatcaagctctcact

SEQ ID NO: 180069 - DNA, 30 bp, Artificial Sequence
  Synthetic oligonucleotide
gatcgctcgctaaatttacccattctcact

SEQ ID NO: 180070 - DNA, 30 bp, Artificial Sequence
  Synthetic oligonucleotide
aggtgcagctaaatgtgaggcaaagtcact

SEQ ID NO: 180071 - DNA, 30 bp, Artificial Sequence
  Synthetic oligonucleotide
taatatctagtcggttggaagtaagtcact

SEQ ID NO: 180072 - DNA, 30 bp, Artificial Sequence
  Synthetic oligonucleotide
ggtacactgcccaacttttagcgagtcact

SEQ ID NO: 180073 - DNA, 30 bp, Artificial Sequence
  Synthetic oligonucleotide
cttcaactaacccgagttatactagtcact

SEQ ID NO: 180074 - DNA, 30 bp, Artificial Sequence
  Synthetic oligonucleotide
atgagtgtatgacgaacagactccgtcact

SEQ ID NO: 180075 - DNA, 30 bp, Artificial Sequence
  Synthetic oligonucleotide
ggcactaccggagatcgcccaatcttcact

SEQ ID NO: 180076 - DNA, 30 bp, Artificial Sequence
  Synthetic oligonucleotide
ggcgtctcaccaagtgggcggtagttcact

SEQ ID NO: 180077 - DNA, 30 bp, Artificial Sequence
  Synthetic oligonucleotide
atactatcgcggacacgagttacgttcact

SEQ ID NO: 180078 - DNA, 30 bp, Artificial Sequence
  Synthetic oligonucleotide
ttggtgataggtagaagtcttactttcact

SEQ ID NO: 180079 - DNA, 31 bp, Artificial Sequence
  Synthetic oligonucleotide
gcagtcaattaggggggaacagtgtttcact

SEQ ID NO: 180080 - DNA, 30 bp, Artificial Sequence
  Synthetic oligonucleotide
atagtggtatgctccttagcaatcaagact

SEQ ID NO: 180081 - DNA, 30 bp, Artificial Sequence
  Synthetic oligonucleotide
tgaggtccctgctcgccgaccgcgaagact

SEQ ID NO: 180082 - DNA, 30 bp, Artificial Sequence
  Synthetic oligonucleotide
gttacgaaagactgtccacgcattaagact

SEQ ID NO: 180083 - DNA, 30 bp, Artificial Sequence
  Synthetic oligonucleotide
tcatctgtaacgccatcgtattagcagact

SEQ ID NO: 180084 - DNA, 30 bp, Artificial Sequence
  Synthetic oligonucleotide
atagaacggccattgtaagaactagagact

SEQ ID NO: 180085 - DNA, 30 bp, Artificial Sequence
  Synthetic oligonucleotide
ctgcatcatcaaattcttagcgtagagact

SEQ ID NO: 180086 - DNA, 30 bp, Artificial Sequence
  Synthetic oligonucleotide
gaggcagggagtcgagagaggatcgagact

SEQ ID NO: 180087 - DNA, 31 bp, Artificial Sequence
  Synthetic oligonucleotide
cacaagtggacgcttaatggcgtcggagact

SEQ ID NO: 180088 - DNA, 30 bp, Artificial Sequence
  Synthetic oligonucleotide
aaccatcaggattgagtggatagggagact

SEQ ID NO: 180089 - DNA, 30 bp, Artificial Sequence
  Synthetic oligonucleotide
tctcgcgtagtctcgtctgcctcttagact

SEQ ID NO: 180090 - DNA, 30 bp, Artificial Sequence
  Synthetic oligonucleotide
gccagactaccgggatttggaggtacgact

SEQ ID NO: 180091 - DNA, 30 bp, Artificial Sequence
  Synthetic oligonucleotide
catcctaggcaagtactctcatttacgact

SEQ ID NO: 180092 - DNA, 30 bp, Artificial Sequence
  Synthetic oligonucleotide
gcacgtcaggtcttcagcacgtaaccgact

SEQ ID NO: 180093 - DNA, 30 bp, Artificial Sequence
  Synthetic oligonucleotide
tgtgggaaccccgttcatgtagtaccgact

SEQ ID NO: 180094 - DNA, 30 bp, Artificial Sequence
  Synthetic oligonucleotide
ttacgagctcgagtgtcaacggacgcgact

SEQ ID NO: 180095 - DNA, 30 bp, Artificial Sequence
  Synthetic oligonucleotide
gggcatcggggttaccagccgagtgcgact

SEQ ID NO: 180096 - DNA, 30 bp, Artificial Sequence
  Synthetic oligonucleotide
ggtaggcgtatcagcttgcgctagtcgact

SEQ ID NO: 180097 - DNA, 30 bp, Artificial Sequence
  Synthetic oligonucleotide
atggagagcaatacacccgcaacttcgact

SEQ ID NO: 180098 - DNA, 30 bp, Artificial Sequence
  Synthetic oligonucleotide
ccgatactattacgttttgagccttcgact

SEQ ID NO: 180099 - DNA, 30 bp, Artificial Sequence
  Synthetic oligonucleotide
attcgtacgactgtgcggacattcaggact

SEQ ID NO: 180100 - DNA, 30 bp, Artificial Sequence
  Synthetic oligonucleotide
tagagagcgacagctgtcgaagcgaggact

SEQ ID NO: 180101 - DNA, 30 bp, Artificial Sequence
  Synthetic oligonucleotide
gcaggacgccagttcaccttaatgaggact

SEQ ID NO: 180102 - DNA, 30 bp, Artificial Sequence
  Synthetic oligonucleotide
taaacccacacaaaagcgtcctggcggact

SEQ ID NO: 180103 - DNA, 30 bp, Artificial Sequence
  Synthetic oligonucleotide
ataaggagaattagcgcccaaactcggact

SEQ ID NO: 180104 - DNA, 30 bp, Artificial Sequence
  Synthetic oligonucleotide
gtttgggcggttacagccggcaaagggact

SEQ ID NO: 180105 - DNA, 30 bp, Artificial Sequence
  Synthetic oligonucleotide
tccctatcccggctatcagagggggggact

SEQ ID NO: 180106 - DNA, 30 bp, Artificial Sequence
  Synthetic oligonucleotide
tgagccagtctcgtagttaatacatggact

SEQ ID NO: 180107 - DNA, 30 bp, Artificial Sequence
  Synthetic oligonucleotide
accgtagcgaataggtaatcagtatggact

SEQ ID NO: 180108 - DNA, 30 bp, Artificial Sequence
  Synthetic oligonucleotide
ccatgaagattggcgctaatcgactggact

SEQ ID NO: 180109 - DNA, 30 bp, Artificial Sequence
  Synthetic oligonucleotide
agtcaacgacctggggagaggtactggact

SEQ ID NO: 180110 - DNA, 30 bp, Artificial Sequence
  Synthetic oligonucleotide
gctgtaactcatgggagtcatggctggact

SEQ ID NO: 180111 - DNA, 30 bp, Artificial Sequence
  Synthetic oligonucleotide
ctaacacaagctgagcgcagtgaaatgact

SEQ ID NO: 180112 - DNA, 30 bp, Artificial Sequence
  Synthetic oligonucleotide
ttcgggagtctggctgcagatttaatgact

SEQ ID NO: 180113 - DNA, 30 bp, Artificial Sequence
  Synthetic oligonucleotide
ctaaggcccgtgttcaaagagggactgact

SEQ ID NO: 180114 - DNA, 30 bp, Artificial Sequence
  Synthetic oligonucleotide
ggtaaaacccattaaagcggacagctgact

SEQ ID NO: 180115 - DNA, 30 bp, Artificial Sequence
  Synthetic oligonucleotide
tagtctagtagctggtaggtgcgagtgact

SEQ ID NO: 180116 - DNA, 30 bp, Artificial Sequence
  Synthetic oligonucleotide
aggcaggtttcatcaagtttgttagtgact

SEQ ID NO: 180117 - DNA, 30 bp, Artificial Sequence
  Synthetic oligonucleotide
tggctaggttgggcttgggagtacgtgact

SEQ ID NO: 180118 - DNA, 30 bp, Artificial Sequence
  Synthetic oligonucleotide
tgagtcaaatcttaatgaccgaaggtgact

SEQ ID NO: 180119 - DNA, 29 bp, Artificial Sequence
  Synthetic oligonucleotide
aatgttagtatgatagtacggaggtgact

SEQ ID NO: 180120 - DNA, 30 bp, Artificial Sequence
  Synthetic oligonucleotide
agtggtgtgtgctatgaaggcccggtgact

SEQ ID NO: 180121 - DNA, 30 bp, Artificial Sequence
  Synthetic oligonucleotide
taacagagattcttttaaagtagggtgact

SEQ ID NO: 180122 - DNA, 30 bp, Artificial Sequence
  Synthetic oligonucleotide
taaagaaataacaggggggacttggtgact

SEQ ID NO: 180123 - DNA, 30 bp, Artificial Sequence
  Synthetic oligonucleotide
acacgccagagggttccctggaatgtgact

SEQ ID NO: 180124 - DNA, 30 bp, Artificial Sequence
  Synthetic oligonucleotide
tatcaccctaaccatggcaaaaagttgact

SEQ ID NO: 180125 - DNA, 30 bp, Artificial Sequence
  Synthetic oligonucleotide
acaggtgaacatacgtgagacctaaatact

SEQ ID NO: 180126 - DNA, 30 bp, Artificial Sequence
  Synthetic oligonucleotide
ttctgccgtcgacctgggagtaccaatact

SEQ ID NO: 180127 - DNA, 30 bp, Artificial Sequence
  Synthetic oligonucleotide
aactaggtacttaactcaatccccaatact

SEQ ID NO: 180128 - DNA, 30 bp, Artificial Sequence
  Synthetic oligonucleotide
aatgtgtatgttggcatactagcacatact

SEQ ID NO: 180129 - DNA, 30 bp, Artificial Sequence
  Synthetic oligonucleotide
gttacgcacccggcatcagggcagcatact

SEQ ID NO: 180130 - DNA, 30 bp, Artificial Sequence
  Synthetic oligonucleotide
tggtcttacttacagacttggggagatact

SEQ ID NO: 180131 - DNA, 30 bp, Artificial Sequence
  Synthetic oligonucleotide
taagcgggcggaggaatcatatgcgatact

SEQ ID NO: 180132 - DNA, 30 bp, Artificial Sequence
  Synthetic oligonucleotide
aacaacagggtgaattcgctgctcgatact

SEQ ID NO: 180133 - DNA, 30 bp, Artificial Sequence
  Synthetic oligonucleotide
cggaacgtcacgtcgccatcagtcgatact

SEQ ID NO: 180134 - DNA, 30 bp, Artificial Sequence
  Synthetic oligonucleotide
catatgcatagtaaactctgagtcgatact

SEQ ID NO: 180135 - DNA, 30 bp, Artificial Sequence
  Synthetic oligonucleotide
atgaaaccttcgggggtataaccggatact

SEQ ID NO: 180136 - DNA, 30 bp, Artificial Sequence
  Synthetic oligonucleotide
ttactctgagtcacactgggttgggatact

SEQ ID NO: 180137 - DNA, 30 bp, Artificial Sequence
  Synthetic oligonucleotide
cattgtatcgttaactagactggtgatact

SEQ ID NO: 180138 - DNA, 30 bp, Artificial Sequence
  Synthetic oligonucleotide
taggtgctatgagttacaagacttgatact

SEQ ID NO: 180139 - DNA, 30 bp, Artificial Sequence
  Synthetic oligonucleotide
tccttgggtacatacaagccccaatatact

SEQ ID NO: 180140 - DNA, 30 bp, Artificial Sequence
  Synthetic oligonucleotide
gtgtagctttaaacccttcatgaatatact

SEQ ID NO: 180141 - DNA, 30 bp, Artificial Sequence
  Synthetic oligonucleotide
tcacttattgtcctgaataagtcgtatact

SEQ ID NO: 180142 - DNA, 30 bp, Artificial Sequence
  Synthetic oligonucleotide
gcgaatgcagggttaagcctgataactact

SEQ ID NO: 180143 - DNA, 30 bp, Artificial Sequence
  Synthetic oligonucleotide
acttaagcagggtgcattggtacgactact

SEQ ID NO: 180144 - DNA, 30 bp, Artificial Sequence
  Synthetic oligonucleotide
tacctggtaagtcttgggagtgtgactact

SEQ ID NO: 180145 - DNA, 30 bp, Artificial Sequence
  Synthetic oligonucleotide
gagccctggcgagtgactaggcatactact

SEQ ID NO: 180146 - DNA, 30 bp, Artificial Sequence
  Synthetic oligonucleotide
ctcgaaattgtagtgggctggaggcctact

SEQ ID NO: 180147 - DNA, 30 bp, Artificial Sequence
  Synthetic oligonucleotide
gcggagatttctctatgtggacttcctact

SEQ ID NO: 180148 - DNA, 30 bp, Artificial Sequence
  Synthetic oligonucleotide
gaggtcacgggaacttctgttttggctact

SEQ ID NO: 180149 - DNA, 30 bp, Artificial Sequence
  Synthetic oligonucleotide
caacaatctcaaacgaattaatgctctact

SEQ ID NO: 180150 - DNA, 30 bp, Artificial Sequence
  Synthetic oligonucleotide
ggggctaaactgaggctcatactctctact

SEQ ID NO: 180151 - DNA, 30 bp, Artificial Sequence
  Synthetic oligonucleotide
gggggcaatcttgagggagtttaaagtact

SEQ ID NO: 180152 - DNA, 30 bp, Artificial Sequence
  Synthetic oligonucleotide
ctaggctcttactaagggtgcgacagtact

SEQ ID NO: 180153 - DNA, 30 bp, Artificial Sequence
  Synthetic oligonucleotide
gtagtcaaggaaaacgattgatgcagtact

SEQ ID NO: 180154 - DNA, 30 bp, Artificial Sequence
  Synthetic oligonucleotide
gacagaccacttgaacagggcaagagtact

SEQ ID NO: 180155 - DNA, 30 bp, Artificial Sequence
  Synthetic oligonucleotide
tggtacctgatctaagcggacaatagtact

SEQ ID NO: 180156 - DNA, 30 bp, Artificial Sequence
  Synthetic oligonucleotide
ttgaataggcgaaatcaggcctttagtact

SEQ ID NO: 180157 - DNA, 30 bp, Artificial Sequence
  Synthetic oligonucleotide
aaggagagttttagttatttggtgcgtact

SEQ ID NO: 180158 - DNA, 30 bp, Artificial Sequence
  Synthetic oligonucleotide
tcaacacctaacgctagtagggttcgtact

SEQ ID NO: 180159 - DNA, 30 bp, Artificial Sequence
  Synthetic oligonucleotide
atgcaaaccaccacggacaaattaggtact

SEQ ID NO: 180160 - DNA, 30 bp, Artificial Sequence
  Synthetic oligonucleotide
ccgagctcgtcgttgaataatctgggtact

SEQ ID NO: 180161 - DNA, 30 bp, Artificial Sequence
  Synthetic oligonucleotide
ctagtcagaccgtgtgaaatcagatgtact

SEQ ID NO: 180162 - DNA, 30 bp, Artificial Sequence
  Synthetic oligonucleotide
gcttaagctcggacatcgaaggcgtgtact

SEQ ID NO: 180163 - DNA, 30 bp, Artificial Sequence
  Synthetic oligonucleotide
gttcggatcgtacattacgtacggtgtact

SEQ ID NO: 180164 - DNA, 30 bp, Artificial Sequence
  Synthetic oligonucleotide
ttcagtgatatggagagaggaaggattact

SEQ ID NO: 180165 - DNA, 30 bp, Artificial Sequence
  Synthetic oligonucleotide
tccgtgacatatcagtagtattctattact

SEQ ID NO: 180166 - DNA, 30 bp, Artificial Sequence
  Synthetic oligonucleotide
aataacacgccatatcgggaatagcttact

SEQ ID NO: 180167 - DNA, 30 bp, Artificial Sequence
  Synthetic oligonucleotide
ttgggactatgcggtgaaagagatcttact

SEQ ID NO: 180168 - DNA, 30 bp, Artificial Sequence
  Synthetic oligonucleotide
ggacgttcatataggcattagtgagttact

SEQ ID NO: 180169 - DNA, 30 bp, Artificial Sequence
  Synthetic oligonucleotide
ttgaataaaggagtatttgaagacgttact

SEQ ID NO: 180170 - DNA, 30 bp, Artificial Sequence
  Synthetic oligonucleotide
tatgcatggatactattggcggtatttact

SEQ ID NO: 180171 - DNA, 31 bp, Artificial Sequence
  Synthetic oligonucleotide
gggcgtaacaagccagcgacaacagtttact

SEQ ID NO: 180172 - DNA, 30 bp, Artificial Sequence
  Synthetic oligonucleotide
gtcgtgcatcaggtcctaagctgaaaacct

SEQ ID NO: 180173 - DNA, 30 bp, Artificial Sequence
  Synthetic oligonucleotide
aagcagcagatgggggtgctaaggaaacct

SEQ ID NO: 180174 - DNA, 30 bp, Artificial Sequence
  Synthetic oligonucleotide
ctactccatctcgtgaagatacggaaacct

SEQ ID NO: 180175 - DNA, 30 bp, Artificial Sequence
  Synthetic oligonucleotide
ctctaaaggtactactagaaaatgaaacct

SEQ ID NO: 180176 - DNA, 30 bp, Artificial Sequence
  Synthetic oligonucleotide
taacgcagattgacaatagcgcataaacct

SEQ ID NO: 180177 - DNA, 30 bp, Artificial Sequence
  Synthetic oligonucleotide
gataaccgatgggtaggccctcttcaacct

SEQ ID NO: 180178 - DNA, 30 bp, Artificial Sequence
  Synthetic oligonucleotide
cggatacgggaggggccgtatctcgaacct

SEQ ID NO: 180179 - DNA, 30 bp, Artificial Sequence
  Synthetic oligonucleotide
agttaggttgctggaacataccaggaacct

SEQ ID NO: 180180 - DNA, 30 bp, Artificial Sequence
  Synthetic oligonucleotide
gtgaaattagacgaatgcccgtgggaacct

SEQ ID NO: 180181 - DNA, 30 bp, Artificial Sequence
  Synthetic oligonucleotide
agggggataaggggctgatgctgtgaacct

SEQ ID NO: 180182 - DNA, 30 bp, Artificial Sequence
  Synthetic oligonucleotide
tcctacgcgagacgtcgcttgtgataacct

SEQ ID NO: 180183 - DNA, 30 bp, Artificial Sequence
  Synthetic oligonucleotide
tgggtcaggttgtgtccaattctgtaacct

SEQ ID NO: 180184 - DNA, 30 bp, Artificial Sequence
  Synthetic oligonucleotide
aaggcgtaaggtgggttgatgataacacct

SEQ ID NO: 180185 - DNA, 30 bp, Artificial Sequence
  Synthetic oligonucleotide
aaacatcatgctctgtaatgggagacacct

SEQ ID NO: 180186 - DNA, 30 bp, Artificial Sequence
  Synthetic oligonucleotide
ggtgcccccgtcgatcaagccagcccacct

SEQ ID NO: 180187 - DNA, 30 bp, Artificial Sequence
  Synthetic oligonucleotide
agtggaggacaccctaaagactgcccacct

SEQ ID NO: 180188 - DNA, 30 bp, Artificial Sequence
  Synthetic oligonucleotide
aacccgaagtgatgcatgcataagccacct

SEQ ID NO: 180189 - DNA, 30 bp, Artificial Sequence
  Synthetic oligonucleotide
gacggcggtggatccaggcatcagccacct

SEQ ID NO: 180190 - DNA, 30 bp, Artificial Sequence
  Synthetic oligonucleotide
aatggtgccaatctacgccgcgcgccacct

SEQ ID NO: 180191 - DNA, 30 bp, Artificial Sequence
  Synthetic oligonucleotide
aggagcggatttcaaagggattgcgcacct

SEQ ID NO: 180192 - DNA, 30 bp, Artificial Sequence
  Synthetic oligonucleotide
gggcaaataaggcgtggacacgtctcacct

SEQ ID NO: 180193 - DNA, 30 bp, Artificial Sequence
  Synthetic oligonucleotide
cagtagcgatgtaatagacacgcgtcacct

SEQ ID NO: 180194 - DNA, 30 bp, Artificial Sequence
  Synthetic oligonucleotide
gcgatggtggtggttagtcctaggtcacct

SEQ ID NO: 180195 - DNA, 30 bp, Artificial Sequence
  Synthetic oligonucleotide
gctacgatgctcgtatccaagcaaagacct

SEQ ID NO: 180196 - DNA, 30 bp, Artificial Sequence
  Synthetic oligonucleotide
ggccctcgtgccaggcaggtcaagagacct

SEQ ID NO: 180197 - DNA, 30 bp, Artificial Sequence
  Synthetic oligonucleotide
acacgtaagactggttataaccggagacct

SEQ ID NO: 180198 - DNA, 30 bp, Artificial Sequence
  Synthetic oligonucleotide
ctatttcagcccagttagcatacacgacct

SEQ ID NO: 180199 - DNA, 30 bp, Artificial Sequence
  Synthetic oligonucleotide
ggttgttttcaagtacaactcccccgacct

SEQ ID NO: 180200 - DNA, 30 bp, Artificial Sequence
  Synthetic oligonucleotide
cgaactctggtccatattaacagccgacct

SEQ ID NO: 180201 - DNA, 30 bp, Artificial Sequence
  Synthetic oligonucleotide
tcaaccaaactgacggaaaattcatgacct

SEQ ID NO: 180202 - DNA, 30 bp, Artificial Sequence
  Synthetic oligonucleotide
cgatgggcacgccttggatgtgtctgacct

SEQ ID NO: 180203 - DNA, 30 bp, Artificial Sequence
  Synthetic oligonucleotide
tagcatcctgcgagaaagcacccaatacct

SEQ ID NO: 180204 - DNA, 30 bp, Artificial Sequence
  Synthetic oligonucleotide
aaagctcttgcactttggacctagatacct

SEQ ID NO: 180205 - DNA, 30 bp, Artificial Sequence
  Synthetic oligonucleotide
agtgcgtcgacggtgtggtgaggcctacct

SEQ ID NO: 180206 - DNA, 30 bp, Artificial Sequence
  Synthetic oligonucleotide
agtgtagctgaaccccatgggcacgtacct

SEQ ID NO: 180207 - DNA, 30 bp, Artificial Sequence
  Synthetic oligonucleotide
acttctgtttactgatgggacggcgtacct

SEQ ID NO: 180208 - DNA, 30 bp, Artificial Sequence
  Synthetic oligonucleotide
tgggaagggtttggttcaataggtgtacct

SEQ ID NO: 180209 - DNA, 30 bp, Artificial Sequence
  Synthetic oligonucleotide
tcgtaggagacagcgcgattcggtgtacct

SEQ ID NO: 180210 - DNA, 30 bp, Artificial Sequence
  Synthetic oligonucleotide
cttatctgagatgattagtttgttgtacct

SEQ ID NO: 180211 - DNA, 30 bp, Artificial Sequence
  Synthetic oligonucleotide
tagtggcggtgtggtgtaatgttcttacct

SEQ ID NO: 180212 - DNA, 30 bp, Artificial Sequence
  Synthetic oligonucleotide
catggaccagaagttatgggtactttacct

SEQ ID NO: 180213 - DNA, 30 bp, Artificial Sequence
  Synthetic oligonucleotide
gccgtgggacttagcaacatacaagaccct

SEQ ID NO: 180214 - DNA, 30 bp, Artificial Sequence
  Synthetic oligonucleotide
ccgaaccggataggaaccgctttcgaccct

SEQ ID NO: 180215 - DNA, 30 bp, Artificial Sequence
  Synthetic oligonucleotide
tactacacgaattccatttttgatgaccct

SEQ ID NO: 180216 - DNA, 30 bp, Artificial Sequence
  Synthetic oligonucleotide
ttgaatcggtcgtgaattgtttgttaccct

SEQ ID NO: 180217 - DNA, 30 bp, Artificial Sequence
  Synthetic oligonucleotide
ttcggtgttggctctgcagcaggaccccct

SEQ ID NO: 180218 - DNA, 30 bp, Artificial Sequence
  Synthetic oligonucleotide
cacccgagttactgcgtgcgaactccccct

SEQ ID NO: 180219 - DNA, 30 bp, Artificial Sequence
  Synthetic oligonucleotide
ctgaacgactatagatttcatggtccccct

SEQ ID NO: 180220 - DNA, 30 bp, Artificial Sequence
  Synthetic oligonucleotide
gggaaatgcgtcatgaagtaagtcgcccct

SEQ ID NO: 180221 - DNA, 30 bp, Artificial Sequence
  Synthetic oligonucleotide
gtaacgaagtcagaaagcttgggtgcccct

SEQ ID NO: 180222 - DNA, 30 bp, Artificial Sequence
  Synthetic oligonucleotide
acagggctagtaaaacggagtaaaagccct

SEQ ID NO: 180223 - DNA, 30 bp, Artificial Sequence
  Synthetic oligonucleotide
tacctcgcagaaaaagtgagggcgagccct

SEQ ID NO: 180224 - DNA, 30 bp, Artificial Sequence
  Synthetic oligonucleotide
accaaggccagagccgaccagccacgccct

SEQ ID NO: 180225 - DNA, 30 bp, Artificial Sequence
  Synthetic oligonucleotide
cttaggctaggtcacgtccctcaccgccct

SEQ ID NO: 180226 - DNA, 30 bp, Artificial Sequence
  Synthetic oligonucleotide
agacaaattgcactccctgggatccgccct

SEQ ID NO: 180227 - DNA, 30 bp, Artificial Sequence
  Synthetic oligonucleotide
gcgctgtactagaaagcgggtggtcgccct

SEQ ID NO: 180228 - DNA, 30 bp, Artificial Sequence
  Synthetic oligonucleotide
agctactcggatgtcagggaatccggccct

SEQ ID NO: 180229 - DNA, 30 bp, Artificial Sequence
  Synthetic oligonucleotide
gctcgcacaaataaagcagttatcggccct

SEQ ID NO: 180230 - DNA, 30 bp, Artificial Sequence
  Synthetic oligonucleotide
catattggggtcttggagccgaatggccct

SEQ ID NO: 180231 - DNA, 30 bp, Artificial Sequence
  Synthetic oligonucleotide
ggccactacatcggagttcattcgtgccct

SEQ ID NO: 180232 - DNA, 30 bp, Artificial Sequence
  Synthetic oligonucleotide
actttcatgcaatctctatcgacttgccct

SEQ ID NO: 180233 - DNA, 30 bp, Artificial Sequence
  Synthetic oligonucleotide
cgggtgaattgatcgtagcaccacctccct

SEQ ID NO: 180234 - DNA, 30 bp, Artificial Sequence
  Synthetic oligonucleotide
tacctgaacccaagttggcaatcgctccct

SEQ ID NO: 180235 - DNA, 30 bp, Artificial Sequence
  Synthetic oligonucleotide
tttaggagctcgagcacatagcgcaagcct

SEQ ID NO: 180236 - DNA, 30 bp, Artificial Sequence
  Synthetic oligonucleotide
gctaaatgacaatacaataggttgaagcct

SEQ ID NO: 180237 - DNA, 30 bp, Artificial Sequence
  Synthetic oligonucleotide
cgtcatcagacgtaagaaatcaataagcct

SEQ ID NO: 180238 - DNA, 30 bp, Artificial Sequence
  Synthetic oligonucleotide
aaagaaagctgacgagctaattctaagcct

SEQ ID NO: 180239 - DNA, 30 bp, Artificial Sequence
  Synthetic oligonucleotide
acgggaatcgggtcggtataagtccagcct

SEQ ID NO: 180240 - DNA, 30 bp, Artificial Sequence
  Synthetic oligonucleotide
gcgaatgtcgtcgggattatccggcagcct

SEQ ID NO: 180241 - DNA, 30 bp, Artificial Sequence
  Synthetic oligonucleotide
ggtacactatggtataagcccaaagagcct

SEQ ID NO: 180242 - DNA, 30 bp, Artificial Sequence
  Synthetic oligonucleotide
ctaaatgagatccagtgtcaagatgagcct

SEQ ID NO: 180243 - DNA, 30 bp, Artificial Sequence
  Synthetic oligonucleotide
gaaaaagcaagtatagaaatacgtgagcct

SEQ ID NO: 180244 - DNA, 30 bp, Artificial Sequence
  Synthetic oligonucleotide
gtacaaggataagtcgatcaatctacgcct

SEQ ID NO: 180245 - DNA, 30 bp, Artificial Sequence
  Synthetic oligonucleotide
tgcttccttagctaccagttttccccgcct

SEQ ID NO: 180246 - DNA, 30 bp, Artificial Sequence
  Synthetic oligonucleotide
atatgaataggctggcctgctgagccgcct

SEQ ID NO: 180247 - DNA, 30 bp, Artificial Sequence
  Synthetic oligonucleotide
gactaatcacttctacgaaaaccgccgcct

SEQ ID NO: 180248 - DNA, 30 bp, Artificial Sequence
  Synthetic oligonucleotide
tagtatcggagaaaccattgacccgcgcct

SEQ ID NO: 180249 - DNA, 30 bp, Artificial Sequence
  Synthetic oligonucleotide
agtaaactctgtgtaggccaacctaggcct

SEQ ID NO: 180250 - DNA, 30 bp, Artificial Sequence
  Synthetic oligonucleotide
atacaatgatatcgttacccagttcggcct

SEQ ID NO: 180251 - DNA, 30 bp, Artificial Sequence
  Synthetic oligonucleotide
ttcaataacattcgtccgaccatagggcct

SEQ ID NO: 180252 - DNA, 30 bp, Artificial Sequence
  Synthetic oligonucleotide
ttaagtgagaataccttcatccttgggcct

SEQ ID NO: 180253 - DNA, 30 bp, Artificial Sequence
  Synthetic oligonucleotide
cgtttgttattgacgagaccgggatggcct

SEQ ID NO: 180254 - DNA, 30 bp, Artificial Sequence
  Synthetic oligonucleotide
acggatagcaatcgtcagtcggcaatgcct

SEQ ID NO: 180255 - DNA, 30 bp, Artificial Sequence
  Synthetic oligonucleotide
ggatacaacatactgaataccgtcatgcct

SEQ ID NO: 180256 - DNA, 30 bp, Artificial Sequence
  Synthetic oligonucleotide
gtaaaaagagccccgaactgtgagatgcct

SEQ ID NO: 180257 - DNA, 30 bp, Artificial Sequence
  Synthetic oligonucleotide
gctaatgaagtgcgcaagacgaaactgcct

SEQ ID NO: 180258 - DNA, 30 bp, Artificial Sequence
  Synthetic oligonucleotide
acaagttggtattgcatagggaaactgcct

SEQ ID NO: 180259 - DNA, 30 bp, Artificial Sequence
  Synthetic oligonucleotide
agatcggggatcaaatgattactactgcct

SEQ ID NO: 180260 - DNA, 30 bp, Artificial Sequence
  Synthetic oligonucleotide
gaggcaagttatcctggtctgtgcctgcct

SEQ ID NO: 180261 - DNA, 30 bp, Artificial Sequence
  Synthetic oligonucleotide
cggccggactaggtcgggaagacagtgcct

SEQ ID NO: 180262 - DNA, 30 bp, Artificial Sequence
  Synthetic oligonucleotide
tatgtcagggcgggcatcgagacagtgcct

SEQ ID NO: 180263 - DNA, 30 bp, Artificial Sequence
  Synthetic oligonucleotide
ggggcggggaccgcaggcgagctagtgcct

SEQ ID NO: 180264 - DNA, 30 bp, Artificial Sequence
  Synthetic oligonucleotide
cgcaaactttcacagtggaatccggtgcct

SEQ ID NO: 180265 - DNA, 30 bp, Artificial Sequence
  Synthetic oligonucleotide
ctggaggggtgaggggagaacggcttgcct

SEQ ID NO: 180266 - DNA, 30 bp, Artificial Sequence
  Synthetic oligonucleotide
acatggtcgctagccacatatgtgttgcct

SEQ ID NO: 180267 - DNA, 30 bp, Artificial Sequence
  Synthetic oligonucleotide
aggaataatgtgcatgcactctcaaatcct

SEQ ID NO: 180268 - DNA, 30 bp, Artificial Sequence
  Synthetic oligonucleotide
atgatccaggagcattctaaggtaaatcct

SEQ ID NO: 180269 - DNA, 30 bp, Artificial Sequence
  Synthetic oligonucleotide
cagatgaagacgcggtgaagatacaatcct

SEQ ID NO: 180270 - DNA, 30 bp, Artificial Sequence
  Synthetic oligonucleotide
cgtggaaagtgaactggtctaaataatcct

SEQ ID NO: 180271 - DNA, 30 bp, Artificial Sequence
  Synthetic oligonucleotide
agcggatcgggtagtgccaggactaatcct

SEQ ID NO: 180272 - DNA, 30 bp, Artificial Sequence
  Synthetic oligonucleotide
ggtcagccaagtatactaaatattaatcct

SEQ ID NO: 180273 - DNA, 30 bp, Artificial Sequence
  Synthetic oligonucleotide
cattgcgaaaagcagaaaattcttaatcct

SEQ ID NO: 180274 - DNA, 30 bp, Artificial Sequence
  Synthetic oligonucleotide
agtacgtcgtaaacgattgccagccatcct

SEQ ID NO: 180275 - DNA, 30 bp, Artificial Sequence
  Synthetic oligonucleotide
ggcgagttcctcaaagaaagatagcatcct

SEQ ID NO: 180276 - DNA, 30 bp, Artificial Sequence
  Synthetic oligonucleotide
agtttacgaaatgccgttcaaaggcatcct

SEQ ID NO: 180277 - DNA, 30 bp, Artificial Sequence
  Synthetic oligonucleotide
gaggtaaaggttcctctctgggatcatcct

SEQ ID NO: 180278 - DNA, 30 bp, Artificial Sequence
  Synthetic oligonucleotide
tgttatgcctggtcacccgatcacgatcct

SEQ ID NO: 180279 - DNA, 30 bp, Artificial Sequence
  Synthetic oligonucleotide
tacagtactagtaacaggcaaagggatcct

SEQ ID NO: 180280 - DNA, 30 bp, Artificial Sequence
  Synthetic oligonucleotide
accgccattaatgttgacggctgatatcct

SEQ ID NO: 180281 - DNA, 30 bp, Artificial Sequence
  Synthetic oligonucleotide
gctagcaccggtagcgtgatgaagtatcct

SEQ ID NO: 180282 - DNA, 30 bp, Artificial Sequence
  Synthetic oligonucleotide
ggcaagcgatttacacctaccacaactcct

SEQ ID NO: 180283 - DNA, 30 bp, Artificial Sequence
  Synthetic oligonucleotide
acaatgctcataaagtaatatcccactcct

SEQ ID NO: 180284 - DNA, 30 bp, Artificial Sequence
  Synthetic oligonucleotide
agctacataagtgctgggaaagatactcct

SEQ ID NO: 180285 - DNA, 30 bp, Artificial Sequence
  Synthetic oligonucleotide
gtatcaaaagcctattaagaagtccctcct

SEQ ID NO: 180286 - DNA, 30 bp, Artificial Sequence
  Synthetic oligonucleotide
atgcttggggtgtgtggttgtgctcctcct

SEQ ID NO: 180287 - DNA, 30 bp, Artificial Sequence
  Synthetic oligonucleotide
acatcactggcactaagaatacacgctcct

SEQ ID NO: 180288 - DNA, 30 bp, Artificial Sequence
  Synthetic oligonucleotide
acatccgttaaaatcgactctagggctcct

SEQ ID NO: 180289 - DNA, 30 bp, Artificial Sequence
  Synthetic oligonucleotide
aattgggtgagggtaaattaagatcgtcct

SEQ ID NO: 180290 - DNA, 30 bp, Artificial Sequence
  Synthetic oligonucleotide
taacggccaccaacgggggctgcaggtcct

SEQ ID NO: 180291 - DNA, 30 bp, Artificial Sequence
  Synthetic oligonucleotide
ttttggatgtcaatcgcgtctgagggtcct

SEQ ID NO: 180292 - DNA, 30 bp, Artificial Sequence
  Synthetic oligonucleotide
cgggactcatcgatcaagaacgatggtcct

SEQ ID NO: 180293 - DNA, 31 bp, Artificial Sequence
  Synthetic oligonucleotide
cacggggcagataagtggctgataatgtcct

SEQ ID NO: 180294 - DNA, 30 bp, Artificial Sequence
  Synthetic oligonucleotide
caacagaaggcatgtacaaaggcatgtcct

SEQ ID NO: 180295 - DNA, 30 bp, Artificial Sequence
  Synthetic oligonucleotide
tgagtcttagcggaactaaggtggtgtcct

SEQ ID NO: 180296 - DNA, 30 bp, Artificial Sequence
  Synthetic oligonucleotide
acacgcttattggggaacccgtgttgtcct

SEQ ID NO: 180297 - DNA, 30 bp, Artificial Sequence
  Synthetic oligonucleotide
aacagtaatgggtggccacttaagattcct

SEQ ID NO: 180298 - DNA, 30 bp, Artificial Sequence
  Synthetic oligonucleotide
ggaagctacactgggatcgacctgattcct

SEQ ID NO: 180299 - DNA, 30 bp, Artificial Sequence
  Synthetic oligonucleotide
ctaccagttcgttagcccaatagccttcct

SEQ ID NO: 180300 - DNA, 30 bp, Artificial Sequence
  Synthetic oligonucleotide
aactagtctcagcagagtattagccttcct

SEQ ID NO: 180301 - DNA, 30 bp, Artificial Sequence
  Synthetic oligonucleotide
atatcaaagctactgagtggggtggttcct

SEQ ID NO: 180302 - DNA, 30 bp, Artificial Sequence
  Synthetic oligonucleotide
tcgactcgacaatacgaggagtcatttcct

SEQ ID NO: 180303 - DNA, 30 bp, Artificial Sequence
  Synthetic oligonucleotide
tggaatacactggttcagatgacgtttcct

SEQ ID NO: 180304 - DNA, 30 bp, Artificial Sequence
  Synthetic oligonucleotide
aaagccggtatcagtagtcatccgaaagct

SEQ ID NO: 180305 - DNA, 30 bp, Artificial Sequence
  Synthetic oligonucleotide
tagtgcgagacttaacggcttgtgaaagct

SEQ ID NO: 180306 - DNA, 30 bp, Artificial Sequence
  Synthetic oligonucleotide
cggggcgtcgatgcaactggaccgcaagct

SEQ ID NO: 180307 - DNA, 30 bp, Artificial Sequence
  Synthetic oligonucleotide
aggctgctgaggaacgcaggtatagaagct

SEQ ID NO: 180308 - DNA, 30 bp, Artificial Sequence
  Synthetic oligonucleotide
cttgaaaataatatctcaaggcacgaagct

SEQ ID NO: 180309 - DNA, 30 bp, Artificial Sequence
  Synthetic oligonucleotide
tcagtggagaggggcacaccgcaggaagct

SEQ ID NO: 180310 - DNA, 30 bp, Artificial Sequence
  Synthetic oligonucleotide
tcggcggggtgacgatattgtgatgaagct

SEQ ID NO: 180311 - DNA, 30 bp, Artificial Sequence
  Synthetic oligonucleotide
tgggtggtttaactgagtgccattgaagct

SEQ ID NO: 180312 - DNA, 30 bp, Artificial Sequence
  Synthetic oligonucleotide
aggtgataacttgatgtaatggaataagct

SEQ ID NO: 180313 - DNA, 30 bp, Artificial Sequence
  Synthetic oligonucleotide
tcgagactagagagatggaagctctaagct

SEQ ID NO: 180314 - DNA, 30 bp, Artificial Sequence
  Synthetic oligonucleotide
aatgccctgcagcttgcgtcagagtaagct

SEQ ID NO: 180315 - DNA, 30 bp, Artificial Sequence
  Synthetic oligonucleotide
ggattggcctgacatgtgtgatcgtaagct

SEQ ID NO: 180316 - DNA, 30 bp, Artificial Sequence
  Synthetic oligonucleotide
gatcactcggtgaaatagaggccaacagct

SEQ ID NO: 180317 - DNA, 30 bp, Artificial Sequence
  Synthetic oligonucleotide
ggctcatactggcattaaggcgtcacagct

SEQ ID NO: 180318 - DNA, 30 bp, Artificial Sequence
  Synthetic oligonucleotide
tcgcttgggtaaccaaagctagtgacagct

SEQ ID NO: 180319 - DNA, 30 bp, Artificial Sequence
  Synthetic oligonucleotide
aagagaaaggaacaggggggttatacagct

SEQ ID NO: 180320 - DNA, 30 bp, Artificial Sequence
  Synthetic oligonucleotide
cgtaccctaaacaggtctataaaaccagct

SEQ ID NO: 180321 - DNA, 30 bp, Artificial Sequence
  Synthetic oligonucleotide
agggagccgaacaacgcgctaattgcagct

SEQ ID NO: 180322 - DNA, 30 bp, Artificial Sequence
  Synthetic oligonucleotide
ctctggtgattgaaagcggtggaatcagct

SEQ ID NO: 180323 - DNA, 30 bp, Artificial Sequence
  Synthetic oligonucleotide
aagccacccagtgcatgcattttatcagct

SEQ ID NO: 180324 - DNA, 30 bp, Artificial Sequence
  Synthetic oligonucleotide
ccagatcattaggaagtataagtctcagct

SEQ ID NO: 180325 - DNA, 30 bp, Artificial Sequence
  Synthetic oligonucleotide
ctaatgggaccgacggaccttaagagagct

SEQ ID NO: 180326 - DNA, 30 bp, Artificial Sequence
  Synthetic oligonucleotide
acaggggagcttaccggagtattacgagct

SEQ ID NO: 180327 - DNA, 30 bp, Artificial Sequence
  Synthetic oligonucleotide
ctagctcgaagtgttagttaagaaggagct

SEQ ID NO: 180328 - DNA, 30 bp, Artificial Sequence
  Synthetic oligonucleotide
aacgagtagtcgctaaacaattaaggagct

SEQ ID NO: 180329 - DNA, 30 bp, Artificial Sequence
  Synthetic oligonucleotide
aagcgacaaagccatctgactaccggagct

SEQ ID NO: 180330 - DNA, 30 bp, Artificial Sequence
  Synthetic oligonucleotide
tggtggggtgacaaaaagtgcggcggagct

SEQ ID NO: 180331 - DNA, 30 bp, Artificial Sequence
  Synthetic oligonucleotide
atcaatagatgaggagccgtacagggagct

SEQ ID NO: 180332 - DNA, 30 bp, Artificial Sequence
  Synthetic oligonucleotide
tatacccggtcatgcgtggtcgaatgagct

SEQ ID NO: 180333 - DNA, 30 bp, Artificial Sequence
  Synthetic oligonucleotide
gtggatcggtatgcggaactgcagtgagct

SEQ ID NO: 180334 - DNA, 30 bp, Artificial Sequence
  Synthetic oligonucleotide
atgtgtgcgacccatgatgagacttgagct

SEQ ID NO: 180335 - DNA, 30 bp, Artificial Sequence
  Synthetic oligonucleotide
agggcgattgttacttatcgtggttgagct

SEQ ID NO: 180336 - DNA, 30 bp, Artificial Sequence
  Synthetic oligonucleotide
taaaacattcctgaagtattatcaatagct

SEQ ID NO: 180337 - DNA, 30 bp, Artificial Sequence
  Synthetic oligonucleotide
agaacagctctggggagtcgttttctagct

SEQ ID NO: 180338 - DNA, 30 bp, Artificial Sequence
  Synthetic oligonucleotide
aatcgaccgccagttaaccaaccggtagct

SEQ ID NO: 180339 - DNA, 30 bp, Artificial Sequence
  Synthetic oligonucleotide
gtttggatgtgcgacgacacagtggtagct

SEQ ID NO: 180340 - DNA, 30 bp, Artificial Sequence
  Synthetic oligonucleotide
gtgtgagtatcccatgaagttactgtagct

SEQ ID NO: 180341 - DNA, 30 bp, Artificial Sequence
  Synthetic oligonucleotide
atattgcgacagccaccaaatatattagct

SEQ ID NO: 180342 - DNA, 30 bp, Artificial Sequence
  Synthetic oligonucleotide
tgaattctctctgaactagtgcacttagct

SEQ ID NO: 180343 - DNA, 30 bp, Artificial Sequence
  Synthetic oligonucleotide
cgagttctgtcacctcgagctgccttagct

SEQ ID NO: 180344 - DNA, 30 bp, Artificial Sequence
  Synthetic oligonucleotide
agcggaccagattacagcgtatggttagct

SEQ ID NO: 180345 - DNA, 30 bp, Artificial Sequence
  Synthetic oligonucleotide
gcagctcgtgtgaaaagtatcggtttagct

SEQ ID NO: 180346 - DNA, 30 bp, Artificial Sequence
  Synthetic oligonucleotide
atagatagtccatgtgggcgtggaaacgct

SEQ ID NO: 180347 - DNA, 30 bp, Artificial Sequence
  Synthetic oligonucleotide
gtcgggcgcaggggtcggagctacaacgct

SEQ ID NO: 180348 - DNA, 30 bp, Artificial Sequence
  Synthetic oligonucleotide
ctcgaccaagcatataagaactgcaacgct

SEQ ID NO: 180349 - DNA, 30 bp, Artificial Sequence
  Synthetic oligonucleotide
catacgcactttcattgagagttgaacgct

SEQ ID NO: 180350 - DNA, 30 bp, Artificial Sequence
  Synthetic oligonucleotide
ccctatggcacgagggccaacgaggacgct

SEQ ID NO: 180351 - DNA, 30 bp, Artificial Sequence
  Synthetic oligonucleotide
cacggcaaagaagatgacccgaggtacgct

SEQ ID NO: 180352 - DNA, 30 bp, Artificial Sequence
  Synthetic oligonucleotide
attggcccagggtggtcatagggttacgct

SEQ ID NO: 180353 - DNA, 30 bp, Artificial Sequence
  Synthetic oligonucleotide
acctgggggagcggaggtcagaaaaccgct

SEQ ID NO: 180354 - DNA, 30 bp, Artificial Sequence
  Synthetic oligonucleotide
ggatcaaggacgtcgctcacgatgaccgct

SEQ ID NO: 180355 - DNA, 30 bp, Artificial Sequence
  Synthetic oligonucleotide
actagccgaccatgtgatatatgccccgct

SEQ ID NO: 180356 - DNA, 30 bp, Artificial Sequence
  Synthetic oligonucleotide
atggtgtctactccgtctaaagcgcccgct

SEQ ID NO: 180357 - DNA, 30 bp, Artificial Sequence
  Synthetic oligonucleotide
aaaatttaatgaaggcacattcacgccgct

SEQ ID NO: 180358 - DNA, 30 bp, Artificial Sequence
  Synthetic oligonucleotide
tgagtcgacgagggaaagcctgtggccgct

SEQ ID NO: 180359 - DNA, 30 bp, Artificial Sequence
  Synthetic oligonucleotide
ggccctagcacgaatatgtgcctcagcgct

SEQ ID NO: 180360 - DNA, 30 bp, Artificial Sequence
  Synthetic oligonucleotide
tagatgaggataggagttcgatctagcgct

SEQ ID NO: 180361 - DNA, 30 bp, Artificial Sequence
  Synthetic oligonucleotide
cacagaactcaccactgaactacacgcgct

SEQ ID NO: 180362 - DNA, 30 bp, Artificial Sequence
  Synthetic oligonucleotide
ggcaacagcgatacaacgttactccgcgct

SEQ ID NO: 180363 - DNA, 30 bp, Artificial Sequence
  Synthetic oligonucleotide
cctaatcatggcacagagcaactgcgcgct

SEQ ID NO: 180364 - DNA, 30 bp, Artificial Sequence
  Synthetic oligonucleotide
atgaaaggttatcgggcccagctaggcgct

SEQ ID NO: 180365 - DNA, 30 bp, Artificial Sequence
  Synthetic oligonucleotide
gaattacatgagtcccagcgtgtctgcgct

SEQ ID NO: 180366 - DNA, 30 bp, Artificial Sequence
  Synthetic oligonucleotide
atgcagattcgccggggcttggtgtgcgct

SEQ ID NO: 180367 - DNA, 30 bp, Artificial Sequence
  Synthetic oligonucleotide
aacgatgatatagattatttaagaatcgct

SEQ ID NO: 180368 - DNA, 30 bp, Artificial Sequence
  Synthetic oligonucleotide
tcgtgctaatggtttgaccctaacatcgct

SEQ ID NO: 180369 - DNA, 30 bp, Artificial Sequence
  Synthetic oligonucleotide
agctttggtgggttagcagttcggatcgct

SEQ ID NO: 180370 - DNA, 30 bp, Artificial Sequence
  Synthetic oligonucleotide
tgggacgcaaggtcgtgcatgcgagtcgct

SEQ ID NO: 180371 - DNA, 30 bp, Artificial Sequence
  Synthetic oligonucleotide
aaacccatgaccaatggcaacgcaaaggct

SEQ ID NO: 180372 - DNA, 30 bp, Artificial Sequence
  Synthetic oligonucleotide
agcgtagcgacagtagtcttgtcaaaggct

SEQ ID NO: 180373 - DNA, 30 bp, Artificial Sequence
  Synthetic oligonucleotide
tcttatttggattgctcgacggcgaaggct

SEQ ID NO: 180374 - DNA, 30 bp, Artificial Sequence
  Synthetic oligonucleotide
gaggtcgtcctcgtatggaaccggaaggct

SEQ ID NO: 180375 - DNA, 30 bp, Artificial Sequence
  Synthetic oligonucleotide
cgtccggcagatcgttactgaatgaaggct

SEQ ID NO: 180376 - DNA, 30 bp, Artificial Sequence
  Synthetic oligonucleotide
gaaaggaggttaacagataattataaggct

SEQ ID NO: 180377 - DNA, 30 bp, Artificial Sequence
  Synthetic oligonucleotide
tcaagtacgcacctttcaatttaccaggct

SEQ ID NO: 180378 - DNA, 30 bp, Artificial Sequence
  Synthetic oligonucleotide
gataattggtgcgtaccaagcacccaggct

SEQ ID NO: 180379 - DNA, 30 bp, Artificial Sequence
  Synthetic oligonucleotide
actaaatctaacaggttcctccagcaggct

SEQ ID NO: 180380 - DNA, 30 bp, Artificial Sequence
  Synthetic oligonucleotide
cgctttaaataaatcaaacactcgcaggct

SEQ ID NO: 180381 - DNA, 30 bp, Artificial Sequence
  Synthetic oligonucleotide
accttcacctaatcgttctgagccgaggct

SEQ ID NO: 180382 - DNA, 30 bp, Artificial Sequence
  Synthetic oligonucleotide
agcatgacacctggagttactcgataggct

SEQ ID NO: 180383 - DNA, 30 bp, Artificial Sequence
  Synthetic oligonucleotide
tcacttatcggaagttgtactgtttaggct

SEQ ID NO: 180384 - DNA, 30 bp, Artificial Sequence
  Synthetic oligonucleotide
gctagattaaggcattgtccgttttaggct

SEQ ID NO: 180385 - DNA, 30 bp, Artificial Sequence
  Synthetic oligonucleotide
ctgcttatatagagaggaaccccgacggct

SEQ ID NO: 180386 - DNA, 30 bp, Artificial Sequence
  Synthetic oligonucleotide
cttggcgtccttctaatccatgtgacggct

SEQ ID NO: 180387 - DNA, 30 bp, Artificial Sequence
  Synthetic oligonucleotide
gctgaaattgctttttgcgcgaatacggct

SEQ ID NO: 180388 - DNA, 30 bp, Artificial Sequence
  Synthetic oligonucleotide
ccggtatgtagggtaatactgcaagcggct

SEQ ID NO: 180389 - DNA, 30 bp, Artificial Sequence
  Synthetic oligonucleotide
ggcgagacggatggaggcggtgcagcggct

SEQ ID NO: 180390 - DNA, 30 bp, Artificial Sequence
  Synthetic oligonucleotide
caagaaacctattgaatattgcaggcggct

SEQ ID NO: 180391 - DNA, 30 bp, Artificial Sequence
  Synthetic oligonucleotide
gttcgcattcatagcgggactattgcggct

SEQ ID NO: 180392 - DNA, 30 bp, Artificial Sequence
  Synthetic oligonucleotide
taagttggtatcattcttcgaacatcggct

SEQ ID NO: 180393 - DNA, 30 bp, Artificial Sequence
  Synthetic oligonucleotide
ctgcacagataacgttacaaggtatcggct

SEQ ID NO: 180394 - DNA, 30 bp, Artificial Sequence
  Synthetic oligonucleotide
acaaagggtaaaggtttacctacctcggct

SEQ ID NO: 180395 - DNA, 30 bp, Artificial Sequence
  Synthetic oligonucleotide
gaacgaatgccggcgttttgctcctcggct

SEQ ID NO: 180396 - DNA, 30 bp, Artificial Sequence
  Synthetic oligonucleotide
tgctagtcttcacttgtgaggtcctcggct

SEQ ID NO: 180397 - DNA, 30 bp, Artificial Sequence
  Synthetic oligonucleotide
caatggcctacacaccagatagattcggct

SEQ ID NO: 180398 - DNA, 30 bp, Artificial Sequence
  Synthetic oligonucleotide
gtagaccagcatagtgccgatcaaagggct

SEQ ID NO: 180399 - DNA, 30 bp, Artificial Sequence
  Synthetic oligonucleotide
gtttgagccatactgggatttggacgggct

SEQ ID NO: 180400 - DNA, 30 bp, Artificial Sequence
  Synthetic oligonucleotide
gaatagacacctgaccgaaagcgtcgggct

SEQ ID NO: 180401 - DNA, 30 bp, Artificial Sequence
  Synthetic oligonucleotide
tcgtcactctctaaatgtcaggttcgggct

SEQ ID NO: 180402 - DNA, 30 bp, Artificial Sequence
  Synthetic oligonucleotide
tcgttaggggctggaaagctgccaggggct

SEQ ID NO: 180403 - DNA, 30 bp, Artificial Sequence
  Synthetic oligonucleotide
ctgcaattttcatgagcgaagcccggggct

SEQ ID NO: 180404 - DNA, 30 bp, Artificial Sequence
  Synthetic oligonucleotide
tcgtgcatcgctcacggttcagatggggct

SEQ ID NO: 180405 - DNA, 30 bp, Artificial Sequence
  Synthetic oligonucleotide
tgtaaaatcccagtacccataacgtgggct

SEQ ID NO: 180406 - DNA, 30 bp, Artificial Sequence
  Synthetic oligonucleotide
cagggaccgtactactttcttgtttgggct

SEQ ID NO: 180407 - DNA, 30 bp, Artificial Sequence
  Synthetic oligonucleotide
acgtaggatgtgggaaagaacacgatggct

SEQ ID NO: 180408 - DNA, 30 bp, Artificial Sequence
  Synthetic oligonucleotide
agtcttcgctcttgaaatagccaactggct

SEQ ID NO: 180409 - DNA, 30 bp, Artificial Sequence
  Synthetic oligonucleotide
tgggagattaattatgaaggagtcctggct

SEQ ID NO: 180410 - DNA, 30 bp, Artificial Sequence
  Synthetic oligonucleotide
ggagcattccacaaactgtagtagctggct

SEQ ID NO: 180411 - DNA, 30 bp, Artificial Sequence
  Synthetic oligonucleotide
acattccgagggctgcccttgtaggtggct

SEQ ID NO: 180412 - DNA, 30 bp, Artificial Sequence
  Synthetic oligonucleotide
ccggcaggagctgtcccaacttgtgtggct

SEQ ID NO: 180413 - DNA, 30 bp, Artificial Sequence
  Synthetic oligonucleotide
agcaaccacggcaccctaggtcggttggct

SEQ ID NO: 180414 - DNA, 30 bp, Artificial Sequence
  Synthetic oligonucleotide
cagaggggactgaaaaggtccctcaatgct

SEQ ID NO: 180415 - DNA, 30 bp, Artificial Sequence
  Synthetic oligonucleotide
aactcaaaagagcctgagccggcgaatgct

SEQ ID NO: 180416 - DNA, 30 bp, Artificial Sequence
  Synthetic oligonucleotide
caatgtgcgccgggctttcggtgtaatgct

SEQ ID NO: 180417 - DNA, 30 bp, Artificial Sequence
  Synthetic oligonucleotide
gatgtagggaacagacgacagtcacatgct

SEQ ID NO: 180418 - DNA, 30 bp, Artificial Sequence
  Synthetic oligonucleotide
atttctagaatcaaattgtgaatccatgct

SEQ ID NO: 180419 - DNA, 30 bp, Artificial Sequence
  Synthetic oligonucleotide
aggggaacgcatctgagtcttctccatgct

SEQ ID NO: 180420 - DNA, 30 bp, Artificial Sequence
  Synthetic oligonucleotide
acgttctatccgacactggcagagcatgct

SEQ ID NO: 180421 - DNA, 30 bp, Artificial Sequence
  Synthetic oligonucleotide
tgaattcggaagttggataggtagcatgct

SEQ ID NO: 180422 - DNA, 30 bp, Artificial Sequence
  Synthetic oligonucleotide
cctagcgagtaggcaggaccgactcatgct

SEQ ID NO: 180423 - DNA, 30 bp, Artificial Sequence
  Synthetic oligonucleotide
gacttccggcaaggtacacgagtggatgct

SEQ ID NO: 180424 - DNA, 30 bp, Artificial Sequence
  Synthetic oligonucleotide
aacggctgggaataaattgtatgtgatgct

SEQ ID NO: 180425 - DNA, 30 bp, Artificial Sequence
  Synthetic oligonucleotide
atttgcgatggtaaaaggcgacactatgct

SEQ ID NO: 180426 - DNA, 30 bp, Artificial Sequence
  Synthetic oligonucleotide
tggcaaggaccgaattataaccggtatgct

SEQ ID NO: 180427 - DNA, 30 bp, Artificial Sequence
  Synthetic oligonucleotide
caggtgcgaagttatcttaaggtgtatgct

SEQ ID NO: 180428 - DNA, 30 bp, Artificial Sequence
  Synthetic oligonucleotide
tgctctaggcacgcgtgtatctcttatgct

SEQ ID NO: 180429 - DNA, 30 bp, Artificial Sequence
  Synthetic oligonucleotide
agtcctatgcatctaacgtaagaaactgct

SEQ ID NO: 180430 - DNA, 30 bp, Artificial Sequence
  Synthetic oligonucleotide
actaggacttagttggttgccaagcctgct

SEQ ID NO: 180431 - DNA, 30 bp, Artificial Sequence
  Synthetic oligonucleotide
tctgacatgggcgatctttgcccagctgct

SEQ ID NO: 180432 - DNA, 30 bp, Artificial Sequence
  Synthetic oligonucleotide
gtagttgcattaaggacaagtagtgctgct

SEQ ID NO: 180433 - DNA, 30 bp, Artificial Sequence
  Synthetic oligonucleotide
gtagatggattgataaatacggagtctgct

SEQ ID NO: 180434 - DNA, 30 bp, Artificial Sequence
  Synthetic oligonucleotide
agatcacaggtgaactattaagggtctgct

SEQ ID NO: 180435 - DNA, 30 bp, Artificial Sequence
  Synthetic oligonucleotide
agtcaatggtccggatccaatcattctgct

SEQ ID NO: 180436 - DNA, 30 bp, Artificial Sequence
  Synthetic oligonucleotide
tatggaatggaagtaacggttctcagtgct

SEQ ID NO: 180437 - DNA, 30 bp, Artificial Sequence
  Synthetic oligonucleotide
cagaatgttcggaatcaccgggggagtgct

SEQ ID NO: 180438 - DNA, 30 bp, Artificial Sequence
  Synthetic oligonucleotide
tgtgcagggtattaggtggggactagtgct

SEQ ID NO: 180439 - DNA, 31 bp, Artificial Sequence
  Synthetic oligonucleotide
cagtatcataaaagagtcagtaagtagtgct

SEQ ID NO: 180440 - DNA, 30 bp, Artificial Sequence
  Synthetic oligonucleotide
taacatctacggtccacgcaaggacgtgct

SEQ ID NO: 180441 - DNA, 30 bp, Artificial Sequence
  Synthetic oligonucleotide
ggggtctgttgggttcaggcaatacgtgct

SEQ ID NO: 180442 - DNA, 30 bp, Artificial Sequence
  Synthetic oligonucleotide
aaaaaaatcaaaggtggaccagagcgtgct

SEQ ID NO: 180443 - DNA, 30 bp, Artificial Sequence
  Synthetic oligonucleotide
gtcagctaaggatttggtataatgcgtgct

SEQ ID NO: 180444 - DNA, 30 bp, Artificial Sequence
  Synthetic oligonucleotide
gaggtttaaacaagggctcattaaggtgct

SEQ ID NO: 180445 - DNA, 30 bp, Artificial Sequence
  Synthetic oligonucleotide
aactaagtatgccgtgaaggtcgcggtgct

SEQ ID NO: 180446 - DNA, 30 bp, Artificial Sequence
  Synthetic oligonucleotide
atcttagcgtggttataccttaggggtgct

SEQ ID NO: 180447 - DNA, 30 bp, Artificial Sequence
  Synthetic oligonucleotide
ttcgtcaaaaaggctatcgtgttgtgtgct

SEQ ID NO: 180448 - DNA, 30 bp, Artificial Sequence
  Synthetic oligonucleotide
cgtcagggtgccgaagaacgccgcattgct

SEQ ID NO: 180449 - DNA, 30 bp, Artificial Sequence
  Synthetic oligonucleotide
catctacaaagggagaaagttttacttgct

SEQ ID NO: 180450 - DNA, 30 bp, Artificial Sequence
  Synthetic oligonucleotide
tgtatgcaagaactgtgatgccatcttgct

SEQ ID NO: 180451 - DNA, 30 bp, Artificial Sequence
  Synthetic oligonucleotide
acgtggctcatgataaagcgggctgttgct

SEQ ID NO: 180452 - DNA, 30 bp, Artificial Sequence
  Synthetic oligonucleotide
tgctcgacacacgtaccctctcggtttgct

SEQ ID NO: 180453 - DNA, 30 bp, Artificial Sequence
  Synthetic oligonucleotide
gcaaaaaacgcggctttgtaactaaaatct

SEQ ID NO: 180454 - DNA, 30 bp, Artificial Sequence
  Synthetic oligonucleotide
atagcttggggaaaatggggtaacaaatct

SEQ ID NO: 180455 - DNA, 30 bp, Artificial Sequence
  Synthetic oligonucleotide
gcaaaatccgccacttcccaggtcaaatct

SEQ ID NO: 180456 - DNA, 30 bp, Artificial Sequence
  Synthetic oligonucleotide
ggccctaggtcgaaatatctctgacaatct

SEQ ID NO: 180457 - DNA, 30 bp, Artificial Sequence
  Synthetic oligonucleotide
agttcaagatggggccgtccgtggcaatct

SEQ ID NO: 180458 - DNA, 30 bp, Artificial Sequence
  Synthetic oligonucleotide
aagccatgaaaccgtttgttagaggaatct

SEQ ID NO: 180459 - DNA, 30 bp, Artificial Sequence
  Synthetic oligonucleotide
gggtgatcaacagatcaaagcccggaatct

SEQ ID NO: 180460 - DNA, 30 bp, Artificial Sequence
  Synthetic oligonucleotide
tgtcctaatatgctgtcggaagtggaatct

SEQ ID NO: 180461 - DNA, 30 bp, Artificial Sequence
  Synthetic oligonucleotide
ccactcaggctaggattcacgcaataatct

SEQ ID NO: 180462 - DNA, 30 bp, Artificial Sequence
  Synthetic oligonucleotide
atgggatggcagacgaccttttactaatct

SEQ ID NO: 180463 - DNA, 30 bp, Artificial Sequence
  Synthetic oligonucleotide
aagcgccccagtacctcgcgcgcctaatct

SEQ ID NO: 180464 - DNA, 30 bp, Artificial Sequence
  Synthetic oligonucleotide
ctggagttaaagagcatgtagtagtaatct

SEQ ID NO: 180465 - DNA, 30 bp, Artificial Sequence
  Synthetic oligonucleotide
agggcgttgcgcggaaatcacgacacatct

SEQ ID NO: 180466 - DNA, 31 bp, Artificial Sequence
  Synthetic oligonucleotide
accggaggatcctatggtctacttgacatct

SEQ ID NO: 180467 - DNA, 30 bp, Artificial Sequence
  Synthetic oligonucleotide
ccgtatgttataacagtggatttaccatct

SEQ ID NO: 180468 - DNA, 30 bp, Artificial Sequence
  Synthetic oligonucleotide
ggtgtcgcgggttaaggtgggttgccatct

SEQ ID NO: 180469 - DNA, 31 bp, Artificial Sequence
  Synthetic oligonucleotide
tgcgtaacgacacctatgttaccttccatct

SEQ ID NO: 180470 - DNA, 30 bp, Artificial Sequence
  Synthetic oligonucleotide
aaacgcgtatttgtggatatttaagcatct

SEQ ID NO: 180471 - DNA, 30 bp, Artificial Sequence
  Synthetic oligonucleotide
ctccatgaggaaggtagaggggcggcatct

SEQ ID NO: 180472 - DNA, 30 bp, Artificial Sequence
  Synthetic oligonucleotide
tcacattataaaaaaatgatgctggcatct

SEQ ID NO: 180473 - DNA, 30 bp, Artificial Sequence
  Synthetic oligonucleotide
atgactagcggatggaggtatagatcatct

SEQ ID NO: 180474 - DNA, 30 bp, Artificial Sequence
  Synthetic oligonucleotide
ctcgtttgtaagatcaccgcctgatcatct

SEQ ID NO: 180475 - DNA, 30 bp, Artificial Sequence
  Synthetic oligonucleotide
cgccaatgatatcaacgtcatgtctcatct

SEQ ID NO: 180476 - DNA, 30 bp, Artificial Sequence
  Synthetic oligonucleotide
taggaattccggaggtttacaaagtcatct

SEQ ID NO: 180477 - DNA, 30 bp, Artificial Sequence
  Synthetic oligonucleotide
agtgattcggaatcacagtgtacgtcatct

SEQ ID NO: 180478 - DNA, 30 bp, Artificial Sequence
  Synthetic oligonucleotide
gaacagatgcgtcccgacgcaaggtcatct

SEQ ID NO: 180479 - DNA, 30 bp, Artificial Sequence
  Synthetic oligonucleotide
cctcccaggcctaagaaacaaaccagatct

SEQ ID NO: 180480 - DNA, 30 bp, Artificial Sequence
  Synthetic oligonucleotide
tcggggtaccgggaaacggccgtcagatct

SEQ ID NO: 180481 - DNA, 30 bp, Artificial Sequence
  Synthetic oligonucleotide
cggacgcgctcgagaatcctaatgagatct

SEQ ID NO: 180482 - DNA, 30 bp, Artificial Sequence
  Synthetic oligonucleotide
tgaattctggatcgaagtcccggacgatct

SEQ ID NO: 180483 - DNA, 30 bp, Artificial Sequence
  Synthetic oligonucleotide
cgattctctagtattagggtcctgcgatct

SEQ ID NO: 180484 - DNA, 30 bp, Artificial Sequence
  Synthetic oligonucleotide
gtgcgcaaaatcttccgtccgtgtcgatct

SEQ ID NO: 180485 - DNA, 30 bp, Artificial Sequence
  Synthetic oligonucleotide
cattaggtaaatcacgggtgtgacggatct

SEQ ID NO: 180486 - DNA, 30 bp, Artificial Sequence
  Synthetic oligonucleotide
tccgtacccaccgacgaaaggtattgatct

SEQ ID NO: 180487 - DNA, 30 bp, Artificial Sequence
  Synthetic oligonucleotide
gaaagatcaatgggattcaaacacatatct

SEQ ID NO: 180488 - DNA, 30 bp, Artificial Sequence
  Synthetic oligonucleotide
tggatttcaagacaaagaccccacatatct

SEQ ID NO: 180489 - DNA, 30 bp, Artificial Sequence
  Synthetic oligonucleotide
gcagggtgagacgccccaaggtgcatatct

SEQ ID NO: 180490 - DNA, 29 bp, Artificial Sequence
  Synthetic oligonucleotide
atctgtcggaaatcaaagtgaatctatct

SEQ ID NO: 180491 - DNA, 30 bp, Artificial Sequence
  Synthetic oligonucleotide
tcttgatcaagaaatcatacactagtatct

SEQ ID NO: 180492 - DNA, 30 bp, Artificial Sequence
  Synthetic oligonucleotide
gaaggtacatgatcctcaacgcacgtatct

SEQ ID NO: 180493 - DNA, 30 bp, Artificial Sequence
  Synthetic oligonucleotide
cacgtcagtcgcccagtcgattacgtatct

SEQ ID NO: 180494 - DNA, 30 bp, Artificial Sequence
  Synthetic oligonucleotide
aactgtgaggcacatcctcttggcgtatct

SEQ ID NO: 180495 - DNA, 30 bp, Artificial Sequence
  Synthetic oligonucleotide
ctaggggtggatcaaacagaggttgtatct

SEQ ID NO: 180496 - DNA, 30 bp, Artificial Sequence
  Synthetic oligonucleotide
caagtcacactcgtatcgtcgagattatct

SEQ ID NO: 180497 - DNA, 30 bp, Artificial Sequence
  Synthetic oligonucleotide
cggggaaagcaatatcgacgagtattatct

SEQ ID NO: 180498 - DNA, 30 bp, Artificial Sequence
  Synthetic oligonucleotide
atcataaaaagtagtcaagggtacttatct

SEQ ID NO: 180499 - DNA, 30 bp, Artificial Sequence
  Synthetic oligonucleotide
ttcggcgatactaaaatttagctgaactct

SEQ ID NO: 180500 - DNA, 30 bp, Artificial Sequence
  Synthetic oligonucleotide
gtcatgcgatagggcgaaatgactaactct

SEQ ID NO: 180501 - DNA, 30 bp, Artificial Sequence
  Synthetic oligonucleotide
tggacggcgtaaccgtgggctcctaactct

SEQ ID NO: 180502 - DNA, 30 bp, Artificial Sequence
  Synthetic oligonucleotide
aacggtcgcgcatgtcctgtcgcccactct

SEQ ID NO: 180503 - DNA, 30 bp, Artificial Sequence
  Synthetic oligonucleotide
aaaataactaaggcctaagccaggcactct

SEQ ID NO: 180504 - DNA, 30 bp, Artificial Sequence
  Synthetic oligonucleotide
aagctggtttcggaaggggtagaagactct

SEQ ID NO: 180505 - DNA, 30 bp, Artificial Sequence
  Synthetic oligonucleotide
ttacagtggagggttgtaagacacgactct

SEQ ID NO: 180506 - DNA, 30 bp, Artificial Sequence
  Synthetic oligonucleotide
cccaccccgactgcaacggaattcgactct

SEQ ID NO: 180507 - DNA, 30 bp, Artificial Sequence
  Synthetic oligonucleotide
cgactcaagatcgtgcggtactgatactct

SEQ ID NO: 180508 - DNA, 30 bp, Artificial Sequence
  Synthetic oligonucleotide
tgtcgggggtaagactagttccagtactct

SEQ ID NO: 180509 - DNA, 30 bp, Artificial Sequence
  Synthetic oligonucleotide
atgatgttgatcagatataacccttactct

SEQ ID NO: 180510 - DNA, 30 bp, Artificial Sequence
  Synthetic oligonucleotide
acgatgtttaaacgtttgaggccttactct

SEQ ID NO: 180511 - DNA, 30 bp, Artificial Sequence
  Synthetic oligonucleotide
tgagtgtgcggtcaggcatgtgtttactct

SEQ ID NO: 180512 - DNA, 30 bp, Artificial Sequence
  Synthetic oligonucleotide
gaaggaaccgtcagcagctggagaacctct

SEQ ID NO: 180513 - DNA, 30 bp, Artificial Sequence
  Synthetic oligonucleotide
ggagacggcggaaataaatacgacacctct

SEQ ID NO: 180514 - DNA, 30 bp, Artificial Sequence
  Synthetic oligonucleotide
tccgagaaccagggctgtaatatgacctct

SEQ ID NO: 180515 - DNA, 30 bp, Artificial Sequence
  Synthetic oligonucleotide
gtacgatgcgggaacttgaggacagcctct

SEQ ID NO: 180516 - DNA, 30 bp, Artificial Sequence
  Synthetic oligonucleotide
ataatataggtctaggaaaggggtgcctct

SEQ ID NO: 180517 - DNA, 30 bp, Artificial Sequence
  Synthetic oligonucleotide
agggcgagggcacagatacattgtgcctct

SEQ ID NO: 180518 - DNA, 30 bp, Artificial Sequence
  Synthetic oligonucleotide
cttaaatgaacggttccgactcgctcctct

SEQ ID NO: 180519 - DNA, 30 bp, Artificial Sequence
  Synthetic oligonucleotide
tgtgactaacggtcacggcaagttagctct

SEQ ID NO: 180520 - DNA, 30 bp, Artificial Sequence
  Synthetic oligonucleotide
gagaagaacgcgaatagatagtaacgctct

SEQ ID NO: 180521 - DNA, 30 bp, Artificial Sequence
  Synthetic oligonucleotide
ggctacgaacgtcgacacacgtcccgctct

SEQ ID NO: 180522 - DNA, 30 bp, Artificial Sequence
  Synthetic oligonucleotide
gacacttttgcaatacttaatgagcgctct

SEQ ID NO: 180523 - DNA, 30 bp, Artificial Sequence
  Synthetic oligonucleotide
atgttctcggggtatacaattgggcgctct

SEQ ID NO: 180524 - DNA, 30 bp, Artificial Sequence
  Synthetic oligonucleotide
aacacaacctaagcatcttggtggcgctct

SEQ ID NO: 180525 - DNA, 30 bp, Artificial Sequence
  Synthetic oligonucleotide
caatcaattgtgatgcgtttgttgcgctct

SEQ ID NO: 180526 - DNA, 30 bp, Artificial Sequence
  Synthetic oligonucleotide
cgaaacctcgtcctcgttccgggcggctct

SEQ ID NO: 180527 - DNA, 30 bp, Artificial Sequence
  Synthetic oligonucleotide
atggttcagggaacggatcggatgggctct

SEQ ID NO: 180528 - DNA, 30 bp, Artificial Sequence
  Synthetic oligonucleotide
cagatattatgcgtactacccatctgctct

SEQ ID NO: 180529 - DNA, 30 bp, Artificial Sequence
  Synthetic oligonucleotide
gagctaataatggggagccaaccttgctct

SEQ ID NO: 180530 - DNA, 30 bp, Artificial Sequence
  Synthetic oligonucleotide
atggctggtcagatgaacggtatgctctct

SEQ ID NO: 180531 - DNA, 30 bp, Artificial Sequence
  Synthetic oligonucleotide
tggttgcaaatcacgagttagtatctctct

SEQ ID NO: 180532 - DNA, 30 bp, Artificial Sequence
  Synthetic oligonucleotide
ccggcgcgaatgctacaaaagcaggtctct

SEQ ID NO: 180533 - DNA, 30 bp, Artificial Sequence
  Synthetic oligonucleotide
ctaagagcgacctgagtggaccgtgtctct

SEQ ID NO: 180534 - DNA, 30 bp, Artificial Sequence
  Synthetic oligonucleotide
gcggacggcaattcttacagggtgttctct

SEQ ID NO: 180535 - DNA, 30 bp, Artificial Sequence
  Synthetic oligonucleotide
aatgtacagagctgaactaagtatttctct

SEQ ID NO: 180536 - DNA, 30 bp, Artificial Sequence
  Synthetic oligonucleotide
gagagagatatatggccaacgccaaagtct

SEQ ID NO: 180537 - DNA, 30 bp, Artificial Sequence
  Synthetic oligonucleotide
gctttgcggtggtcctcaaatataaagtct

SEQ ID NO: 180538 - DNA, 30 bp, Artificial Sequence
  Synthetic oligonucleotide
gtgtcaaatgaggctcaaagaagcaagtct

SEQ ID NO: 180539 - DNA, 30 bp, Artificial Sequence
  Synthetic oligonucleotide
aacatcccggcgagttggtaggggaagtct

SEQ ID NO: 180540 - DNA, 30 bp, Artificial Sequence
  Synthetic oligonucleotide
gtcaaccgaactaacatgctcggacagtct

SEQ ID NO: 180541 - DNA, 30 bp, Artificial Sequence
  Synthetic oligonucleotide
ttcgtttagaaagtcgacatgggacagtct

SEQ ID NO: 180542 - DNA, 30 bp, Artificial Sequence
  Synthetic oligonucleotide
cacgaggattgttacttcgttccagagtct

SEQ ID NO: 180543 - DNA, 30 bp, Artificial Sequence
  Synthetic oligonucleotide
tggtattcagtgaatcacagagcagagtct

SEQ ID NO: 180544 - DNA, 30 bp, Artificial Sequence
  Synthetic oligonucleotide
tggcgatgatagacggaggcgtgatagtct

SEQ ID NO: 180545 - DNA, 30 bp, Artificial Sequence
  Synthetic oligonucleotide
tcagcataggtgccgtacacctaaacgtct

SEQ ID NO: 180546 - DNA, 30 bp, Artificial Sequence
  Synthetic oligonucleotide
catgtcatattagtaatattagtaacgtct

SEQ ID NO: 180547 - DNA, 30 bp, Artificial Sequence
  Synthetic oligonucleotide
gcatggtgctgacaggggcttcagccgtct

SEQ ID NO: 180548 - DNA, 30 bp, Artificial Sequence
  Synthetic oligonucleotide
ttcactgtcataatagtagctctgccgtct

SEQ ID NO: 180549 - DNA, 29 bp, Artificial Sequence
  Synthetic oligonucleotide
cgtttaacaaacgctaacaatcagcgtct

SEQ ID NO: 180550 - DNA, 30 bp, Artificial Sequence
  Synthetic oligonucleotide
aggggtgctgttcattaaacccgagcgtct

SEQ ID NO: 180551 - DNA, 30 bp, Artificial Sequence
  Synthetic oligonucleotide
ctgatctgattcacaatcgcaaacgcgtct

SEQ ID NO: 180552 - DNA, 30 bp, Artificial Sequence
  Synthetic oligonucleotide
acatgccgtggggggatagtagccgcgtct

SEQ ID NO: 180553 - DNA, 30 bp, Artificial Sequence
  Synthetic oligonucleotide
cccagctctgagacaattacaatcgcgtct

SEQ ID NO: 180554 - DNA, 30 bp, Artificial Sequence
  Synthetic oligonucleotide
gaggttgtgtattcggatttcgatgcgtct

SEQ ID NO: 180555 - DNA, 30 bp, Artificial Sequence
  Synthetic oligonucleotide
atgttggccattggtcgtgatgatgcgtct

SEQ ID NO: 180556 - DNA, 30 bp, Artificial Sequence
  Synthetic oligonucleotide
cacctagtgagtcggactccaccctcgtct

SEQ ID NO: 180557 - DNA, 30 bp, Artificial Sequence
  Synthetic oligonucleotide
cgaggtgagggcttcttaccaatctcgtct

SEQ ID NO: 180558 - DNA, 30 bp, Artificial Sequence
  Synthetic oligonucleotide
tgtgggcagttgagaaggcagctttcgtct

SEQ ID NO: 180559 - DNA, 30 bp, Artificial Sequence
  Synthetic oligonucleotide
aagagatccacttagaagtctcaaaggtct

SEQ ID NO: 180560 - DNA, 30 bp, Artificial Sequence
  Synthetic oligonucleotide
gggattgatattcgagcgtgctcaaggtct

SEQ ID NO: 180561 - DNA, 30 bp, Artificial Sequence
  Synthetic oligonucleotide
cgcaagtagtattaggagaggctaaggtct

SEQ ID NO: 180562 - DNA, 30 bp, Artificial Sequence
  Synthetic oligonucleotide
tcgaccgacgagagtccgaaccggaggtct

SEQ ID NO: 180563 - DNA, 30 bp, Artificial Sequence
  Synthetic oligonucleotide
agtgtggggctttaaagagacatccggtct

SEQ ID NO: 180564 - DNA, 30 bp, Artificial Sequence
  Synthetic oligonucleotide
cgatctcccagtcctatgatccacgggtct

SEQ ID NO: 180565 - DNA, 30 bp, Artificial Sequence
  Synthetic oligonucleotide
cgttagatcatgaaccacgttggcgggtct

SEQ ID NO: 180566 - DNA, 30 bp, Artificial Sequence
  Synthetic oligonucleotide
ctggtctcccgtacgattattgagtggtct

SEQ ID NO: 180567 - DNA, 30 bp, Artificial Sequence
  Synthetic oligonucleotide
cagtatccattggagtactgtataatgtct

SEQ ID NO: 180568 - DNA, 30 bp, Artificial Sequence
  Synthetic oligonucleotide
cagctgtctgcatcgggtaacaacatgtct

SEQ ID NO: 180569 - DNA, 30 bp, Artificial Sequence
  Synthetic oligonucleotide
gtaggccatagatgaggcatgtccatgtct

SEQ ID NO: 180570 - DNA, 30 bp, Artificial Sequence
  Synthetic oligonucleotide
tcttgtgggcaagcaagtgtggctatgtct

SEQ ID NO: 180571 - DNA, 30 bp, Artificial Sequence
  Synthetic oligonucleotide
gcgaacctctcatcgaggaacaccctgtct

SEQ ID NO: 180572 - DNA, 30 bp, Artificial Sequence
  Synthetic oligonucleotide
cgccatgggctcaggtagtaatcagtgtct

SEQ ID NO: 180573 - DNA, 30 bp, Artificial Sequence
  Synthetic oligonucleotide
ccgtgaagggcgggtgccgggaatgtgtct

SEQ ID NO: 180574 - DNA, 30 bp, Artificial Sequence
  Synthetic oligonucleotide
ctcggacaaagggtgggtggcacattgtct

SEQ ID NO: 180575 - DNA, 30 bp, Artificial Sequence
  Synthetic oligonucleotide
caatctactaggcagtgtgtcgcattgtct

SEQ ID NO: 180576 - DNA, 30 bp, Artificial Sequence
  Synthetic oligonucleotide
acggcaaattcccaaagaggaatgttgtct

SEQ ID NO: 180577 - DNA, 30 bp, Artificial Sequence
  Synthetic oligonucleotide
attggccgcgttacaagaggaagcaattct

SEQ ID NO: 180578 - DNA, 30 bp, Artificial Sequence
  Synthetic oligonucleotide
tgtggtcgctgggaccataagatcaattct

SEQ ID NO: 180579 - DNA, 30 bp, Artificial Sequence
  Synthetic oligonucleotide
aagggcccctaaggcctgcgtcaccattct

SEQ ID NO: 180580 - DNA, 30 bp, Artificial Sequence
  Synthetic oligonucleotide
aaggacgatgagacaaaccgctggcattct

SEQ ID NO: 180581 - DNA, 30 bp, Artificial Sequence
  Synthetic oligonucleotide
gctacctgtaaagctagagagactcattct

SEQ ID NO: 180582 - DNA, 30 bp, Artificial Sequence
  Synthetic oligonucleotide
aggtgccatgctaatttccaaagtcattct

SEQ ID NO: 180583 - DNA, 30 bp, Artificial Sequence
  Synthetic oligonucleotide
taaagaagcggaagccgattataaacttct

SEQ ID NO: 180584 - DNA, 30 bp, Artificial Sequence
  Synthetic oligonucleotide
ggacccttgctcaatatccacatcacttct

SEQ ID NO: 180585 - DNA, 30 bp, Artificial Sequence
  Synthetic oligonucleotide
atcaaaccagaggccctcaacacgacttct

SEQ ID NO: 180586 - DNA, 30 bp, Artificial Sequence
  Synthetic oligonucleotide
gtgcccatgggcgtctcgacatttacttct

SEQ ID NO: 180587 - DNA, 30 bp, Artificial Sequence
  Synthetic oligonucleotide
gagaaagcatcggtaaagctgaaaccttct

SEQ ID NO: 180588 - DNA, 30 bp, Artificial Sequence
  Synthetic oligonucleotide
tatctgaagtgttgaactcgagatccttct

SEQ ID NO: 180589 - DNA, 30 bp, Artificial Sequence
  Synthetic oligonucleotide
accctaagcctttcggagaagtcagcttct

SEQ ID NO: 180590 - DNA, 30 bp, Artificial Sequence
  Synthetic oligonucleotide
cacgattcgggaggtacgatcttcgcttct

SEQ ID NO: 180591 - DNA, 30 bp, Artificial Sequence
  Synthetic oligonucleotide
gaaactagtggcaaggcgtgtaaggcttct

SEQ ID NO: 180592 - DNA, 30 bp, Artificial Sequence
  Synthetic oligonucleotide
aggtggggaattgacttctgaattgcttct

SEQ ID NO: 180593 - DNA, 30 bp, Artificial Sequence
  Synthetic oligonucleotide
atggcactacaggagtgtgcgtcctcttct

SEQ ID NO: 180594 - DNA, 30 bp, Artificial Sequence
  Synthetic oligonucleotide
acttatagcaagcaagccaggcacagttct

SEQ ID NO: 180595 - DNA, 30 bp, Artificial Sequence
  Synthetic oligonucleotide
ggcagagaacaaagtgccacctccagttct

SEQ ID NO: 180596 - DNA, 30 bp, Artificial Sequence
  Synthetic oligonucleotide
tgcatatcctgcgtagcctccgcgagttct

SEQ ID NO: 180597 - DNA, 30 bp, Artificial Sequence
  Synthetic oligonucleotide
ccaaaggcgggctgatgagaattgagttct

SEQ ID NO: 180598 - DNA, 30 bp, Artificial Sequence
  Synthetic oligonucleotide
cgtgccctccttttgcataggttacgttct

SEQ ID NO: 180599 - DNA, 30 bp, Artificial Sequence
  Synthetic oligonucleotide
tggatcccaactttgccgttgaaccgttct

SEQ ID NO: 180600 - DNA, 30 bp, Artificial Sequence
  Synthetic oligonucleotide
ggaccgcgaggcttctacccccgccgttct

SEQ ID NO: 180601 - DNA, 30 bp, Artificial Sequence
  Synthetic oligonucleotide
aggcagtcgtctgctaaggagccgcgttct

SEQ ID NO: 180602 - DNA, 30 bp, Artificial Sequence
  Synthetic oligonucleotide
ggatacagagtgaagtcggcaatgcgttct

SEQ ID NO: 180603 - DNA, 30 bp, Artificial Sequence
  Synthetic oligonucleotide
ccgaaactagacaaagaattctgtcgttct

SEQ ID NO: 180604 - DNA, 30 bp, Artificial Sequence
  Synthetic oligonucleotide
cggcccttcatgctcgatccaaaaggttct

SEQ ID NO: 180605 - DNA, 30 bp, Artificial Sequence
  Synthetic oligonucleotide
aaccgaagatttaaggcctttcgaggttct

SEQ ID NO: 180606 - DNA, 30 bp, Artificial Sequence
  Synthetic oligonucleotide
tcgtgaccttggggattagtagagggttct

SEQ ID NO: 180607 - DNA, 30 bp, Artificial Sequence
  Synthetic oligonucleotide
aagccaccacgagttatctcggctggttct

SEQ ID NO: 180608 - DNA, 30 bp, Artificial Sequence
  Synthetic oligonucleotide
gtcgttcaagccgcggggatgtgctgttct

SEQ ID NO: 180609 - DNA, 30 bp, Artificial Sequence
  Synthetic oligonucleotide
agaggcctgacagctaattcgaattgttct

SEQ ID NO: 180610 - DNA, 30 bp, Artificial Sequence
  Synthetic oligonucleotide
ttaggccagaagtaaccacaagattgttct

SEQ ID NO: 180611 - DNA, 30 bp, Artificial Sequence
  Synthetic oligonucleotide
tcgccaaagatttttggactgggttgttct

SEQ ID NO: 180612 - DNA, 30 bp, Artificial Sequence
  Synthetic oligonucleotide
taaccattccgcagatggttcgaaatttct

SEQ ID NO: 180613 - DNA, 30 bp, Artificial Sequence
  Synthetic oligonucleotide
gtggtaaagaaccgaatccgattactttct

SEQ ID NO: 180614 - DNA, 30 bp, Artificial Sequence
  Synthetic oligonucleotide
ggaaacggtgggtggaaaccagtgctttct

SEQ ID NO: 180615 - DNA, 30 bp, Artificial Sequence
  Synthetic oligonucleotide
gtaaggttcgaacgaaagctgcccgtttct

SEQ ID NO: 180616 - DNA, 30 bp, Artificial Sequence
  Synthetic oligonucleotide
tggagggtcagcatttatcttctcaaaagt

SEQ ID NO: 180617 - DNA, 30 bp, Artificial Sequence
  Synthetic oligonucleotide
caagatctaatcagaaaactcgtcaaaagt

SEQ ID NO: 180618 - DNA, 30 bp, Artificial Sequence
  Synthetic oligonucleotide
aacgcgtaagtccgcaatgacatgaaaagt

SEQ ID NO: 180619 - DNA, 30 bp, Artificial Sequence
  Synthetic oligonucleotide
taatacgacggaataggtaagacccaaagt

SEQ ID NO: 180620 - DNA, 30 bp, Artificial Sequence
  Synthetic oligonucleotide
ttctaaaccagaatggcggccaagcaaagt

SEQ ID NO: 180621 - DNA, 30 bp, Artificial Sequence
  Synthetic oligonucleotide
gggaaatcaacgttagattatcagcaaagt

SEQ ID NO: 180622 - DNA, 30 bp, Artificial Sequence
  Synthetic oligonucleotide
ttcgaaggctttcccctccggcggcaaagt

SEQ ID NO: 180623 - DNA, 30 bp, Artificial Sequence
  Synthetic oligonucleotide
tcgtcttgataccgccaaaattgtcaaagt

SEQ ID NO: 180624 - DNA, 30 bp, Artificial Sequence
  Synthetic oligonucleotide
gtgattaggcggattgcatggggagaaagt

SEQ ID NO: 180625 - DNA, 30 bp, Artificial Sequence
  Synthetic oligonucleotide
gatagccagtgagaccgtgtcgtagaaagt

SEQ ID NO: 180626 - DNA, 30 bp, Artificial Sequence
  Synthetic oligonucleotide
tttggcgacgtaccgagtgcttgtgaaagt

SEQ ID NO: 180627 - DNA, 30 bp, Artificial Sequence
  Synthetic oligonucleotide
gtcgaaagctcacgacgacgtctataaagt

SEQ ID NO: 180628 - DNA, 30 bp, Artificial Sequence
  Synthetic oligonucleotide
acggtgacctctgctgtgatgagctaaagt

SEQ ID NO: 180629 - DNA, 30 bp, Artificial Sequence
  Synthetic oligonucleotide
gcccgtatgcaaacagagaatccaacaagt

SEQ ID NO: 180630 - DNA, 30 bp, Artificial Sequence
  Synthetic oligonucleotide
ttcttcaatatcgcgctaggagccacaagt

SEQ ID NO: 180631 - DNA, 30 bp, Artificial Sequence
  Synthetic oligonucleotide
ctaattgatcgtgggcatgagcgcacaagt

SEQ ID NO: 180632 - DNA, 30 bp, Artificial Sequence
  Synthetic oligonucleotide
ccccattctgagaatgagagaaagacaagt

SEQ ID NO: 180633 - DNA, 30 bp, Artificial Sequence
  Synthetic oligonucleotide
ccttcaggtacctggtttgagtgcccaagt

SEQ ID NO: 180634 - DNA, 30 bp, Artificial Sequence
  Synthetic oligonucleotide
atccaagactaatgtaaaagcttgccaagt

SEQ ID NO: 180635 - DNA, 30 bp, Artificial Sequence
  Synthetic oligonucleotide
ccaacggactgttcggaggtatcagcaagt

SEQ ID NO: 180636 - DNA, 30 bp, Artificial Sequence
  Synthetic oligonucleotide
cgccaatgtagtagtgcgataagagcaagt

SEQ ID NO: 180637 - DNA, 30 bp, Artificial Sequence
  Synthetic oligonucleotide
atcaggtgttagcgtttcagggatgcaagt

SEQ ID NO: 180638 - DNA, 30 bp, Artificial Sequence
  Synthetic oligonucleotide
aaatttggcgaacggctatgacgtgcaagt

SEQ ID NO: 180639 - DNA, 30 bp, Artificial Sequence
  Synthetic oligonucleotide
tagggtttaggcgtatccgatggtgcaagt

SEQ ID NO: 180640 - DNA, 30 bp, Artificial Sequence
  Synthetic oligonucleotide
aggtaaacggtgtcctatgcgaagtcaagt

SEQ ID NO: 180641 - DNA, 30 bp, Artificial Sequence
  Synthetic oligonucleotide
gaacacgtttatatagaatcgacaagaagt

SEQ ID NO: 180642 - DNA, 30 bp, Artificial Sequence
  Synthetic oligonucleotide
cggaggatgaaggtgagtccgtcaagaagt

SEQ ID NO: 180643 - DNA, 30 bp, Artificial Sequence
  Synthetic oligonucleotide
ggtacgtccatgcatgccgttgtcagaagt

SEQ ID NO: 180644 - DNA, 30 bp, Artificial Sequence
  Synthetic oligonucleotide
gactatagtgaaataagctcgtggagaagt

SEQ ID NO: 180645 - DNA, 30 bp, Artificial Sequence
  Synthetic oligonucleotide
actacaggatcggcggccctccgacgaagt

SEQ ID NO: 180646 - DNA, 30 bp, Artificial Sequence
  Synthetic oligonucleotide
ttggatcaatcgacacgatatggccgaagt

SEQ ID NO: 180647 - DNA, 30 bp, Artificial Sequence
  Synthetic oligonucleotide
ctagtccgaaggcgctcagattgccgaagt

SEQ ID NO: 180648 - DNA, 30 bp, Artificial Sequence
  Synthetic oligonucleotide
ctagatcgtacgcgtagagtgaggcgaagt

SEQ ID NO: 180649 - DNA, 30 bp, Artificial Sequence
  Synthetic oligonucleotide
gatgctaagggtccgggtgacgtaggaagt

SEQ ID NO: 180650 - DNA, 30 bp, Artificial Sequence
  Synthetic oligonucleotide
gagaaactgtaagatagcgaaaccggaagt

SEQ ID NO: 180651 - DNA, 30 bp, Artificial Sequence
  Synthetic oligonucleotide
atactggtcggtatccatagatagggaagt

SEQ ID NO: 180652 - DNA, 30 bp, Artificial Sequence
  Synthetic oligonucleotide
cgccacgggtttgacgagccaatatgaagt

SEQ ID NO: 180653 - DNA, 30 bp, Artificial Sequence
  Synthetic oligonucleotide
cggacgtccgcaaataaaaaacgctgaagt

SEQ ID NO: 180654 - DNA, 30 bp, Artificial Sequence
  Synthetic oligonucleotide
ccacggacgatcgcgtacgttcgttgaagt

SEQ ID NO: 180655 - DNA, 30 bp, Artificial Sequence
  Synthetic oligonucleotide
caacaaacgcggtggtcttgcaaaataagt

SEQ ID NO: 180656 - DNA, 30 bp, Artificial Sequence
  Synthetic oligonucleotide
agttatacgagctgtattgtgagcataagt

SEQ ID NO: 180657 - DNA, 30 bp, Artificial Sequence
  Synthetic oligonucleotide
acgctggcgggtgctctctatgggataagt

SEQ ID NO: 180658 - DNA, 30 bp, Artificial Sequence
  Synthetic oligonucleotide
cgtttggcaaaattaggatgccatataagt

SEQ ID NO: 180659 - DNA, 30 bp, Artificial Sequence
  Synthetic oligonucleotide
tggcgagcagacccgacacaacgtataagt

SEQ ID NO: 180660 - DNA, 30 bp, Artificial Sequence
  Synthetic oligonucleotide
agcgttgccggcacccctctgcgtataagt

SEQ ID NO: 180661 - DNA, 30 bp, Artificial Sequence
  Synthetic oligonucleotide
gtgacctcgggacggactggcacactaagt

SEQ ID NO: 180662 - DNA, 30 bp, Artificial Sequence
  Synthetic oligonucleotide
agggagtgtgacaaaatcgttccactaagt

SEQ ID NO: 180663 - DNA, 30 bp, Artificial Sequence
  Synthetic oligonucleotide
agggctctggcacttacgaccaggctaagt

SEQ ID NO: 180664 - DNA, 30 bp, Artificial Sequence
  Synthetic oligonucleotide
ttggcaatcatcacattgcggactctaagt

SEQ ID NO: 180665 - DNA, 30 bp, Artificial Sequence
  Synthetic oligonucleotide
gctactactccatgcgaacattaagtaagt

SEQ ID NO: 180666 - DNA, 30 bp, Artificial Sequence
  Synthetic oligonucleotide
ggggcactgtcagtaaggtatactgtaagt

SEQ ID NO: 180667 - DNA, 30 bp, Artificial Sequence
  Synthetic oligonucleotide
tcacaagacgggcctcagactaccttaagt

SEQ ID NO: 180668 - DNA, 30 bp, Artificial Sequence
  Synthetic oligonucleotide
tcgagtagacagaaggacgggacaaacagt

SEQ ID NO: 180669 - DNA, 30 bp, Artificial Sequence
  Synthetic oligonucleotide
aatttaaggtgcagtgaagacgagaacagt

SEQ ID NO: 180670 - DNA, 30 bp, Artificial Sequence
  Synthetic oligonucleotide
atcatgtacacgcttaaaagctcgaacagt

SEQ ID NO: 180671 - DNA, 30 bp, Artificial Sequence
  Synthetic oligonucleotide
gccccatcagaaacatttcgcggtaacagt

SEQ ID NO: 180672 - DNA, 30 bp, Artificial Sequence
  Synthetic oligonucleotide
tgctgtgggagatcacgagtgtgtaacagt

SEQ ID NO: 180673 - DNA, 30 bp, Artificial Sequence
  Synthetic oligonucleotide
gtgctctcgtgaacacgtataattaacagt

SEQ ID NO: 180674 - DNA, 30 bp, Artificial Sequence
  Synthetic oligonucleotide
taagaggcatgctgagtaaatcaccacagt

SEQ ID NO: 180675 - DNA, 30 bp, Artificial Sequence
  Synthetic oligonucleotide
ccgctccacataagatctaaacgccacagt

SEQ ID NO: 180676 - DNA, 30 bp, Artificial Sequence
  Synthetic oligonucleotide
tccgaagaagagaacatctgcaagcacagt

SEQ ID NO: 180677 - DNA, 30 bp, Artificial Sequence
  Synthetic oligonucleotide
ggggacatattattgtaaggagatcacagt

SEQ ID NO: 180678 - DNA, 31 bp, Artificial Sequence
  Synthetic oligonucleotide
ctgactcatgccagccctttaaactcacagt

SEQ ID NO: 180679 - DNA, 30 bp, Artificial Sequence
  Synthetic oligonucleotide
aggctttaaggcggcttggcccctcacagt

SEQ ID NO: 180680 - DNA, 30 bp, Artificial Sequence
  Synthetic oligonucleotide
gcggcctcgtgaaagtttaatagggacagt

SEQ ID NO: 180681 - DNA, 30 bp, Artificial Sequence
  Synthetic oligonucleotide
ggctagtaatctctcaaactagtggacagt

SEQ ID NO: 180682 - DNA, 30 bp, Artificial Sequence
  Synthetic oligonucleotide
tagggaatggtggccaatggggagtacagt

SEQ ID NO: 180683 - DNA, 30 bp, Artificial Sequence
  Synthetic oligonucleotide
gcgtaccccaaacgtcatgctttttacagt

SEQ ID NO: 180684 - DNA, 30 bp, Artificial Sequence
  Synthetic oligonucleotide
ggcatagtgtagtgtgtctaaacgaccagt

SEQ ID NO: 180685 - DNA, 30 bp, Artificial Sequence
  Synthetic oligonucleotide
gtgttaatgagggctatacggcctaccagt

SEQ ID NO: 180686 - DNA, 30 bp, Artificial Sequence
  Synthetic oligonucleotide
aattggagatgtcatcatatgatacccagt

SEQ ID NO: 180687 - DNA, 30 bp, Artificial Sequence
  Synthetic oligonucleotide
gggcaagtgtcctcgatagataagcccagt

SEQ ID NO: 180688 - DNA, 30 bp, Artificial Sequence
  Synthetic oligonucleotide
aaccggtcccagacataggggtaagccagt

SEQ ID NO: 180689 - DNA, 30 bp, Artificial Sequence
  Synthetic oligonucleotide
gcgttcaccggtggaacacacccggccagt

SEQ ID NO: 180690 - DNA, 30 bp, Artificial Sequence
  Synthetic oligonucleotide
tcagagatgccaaaatgtcttagggccagt

SEQ ID NO: 180691 - DNA, 30 bp, Artificial Sequence
  Synthetic oligonucleotide
tatgaccagctcaaatgtgccttggccagt

SEQ ID NO: 180692 - DNA, 30 bp, Artificial Sequence
  Synthetic oligonucleotide
agccagaaaagtcacaggccatatgccagt

SEQ ID NO: 180693 - DNA, 30 bp, Artificial Sequence
  Synthetic oligonucleotide
accgttcaagcccattaaaaaatgtccagt

SEQ ID NO: 180694 - DNA, 30 bp, Artificial Sequence
  Synthetic oligonucleotide
tggtgccttcgttagagagttcgtagcagt

SEQ ID NO: 180695 - DNA, 30 bp, Artificial Sequence
  Synthetic oligonucleotide
tctgtagggggttctgcgtggcttagcagt

SEQ ID NO: 180696 - DNA, 30 bp, Artificial Sequence
  Synthetic oligonucleotide
cacagcgctgacctggcagccgtacgcagt

SEQ ID NO: 180697 - DNA, 30 bp, Artificial Sequence
  Synthetic oligonucleotide
taggtacttcacaaaggactctaccgcagt

SEQ ID NO: 180698 - DNA, 30 bp, Artificial Sequence
  Synthetic oligonucleotide
tgttccaaagtgtgaacggggctgcgcagt

SEQ ID NO: 180699 - DNA, 30 bp, Artificial Sequence
  Synthetic oligonucleotide
taatcatcgaacgctctaccttcgggcagt

SEQ ID NO: 180700 - DNA, 30 bp, Artificial Sequence
  Synthetic oligonucleotide
gagggcagcgaagttcaggcggatggcagt

SEQ ID NO: 180701 - DNA, 30 bp, Artificial Sequence
  Synthetic oligonucleotide
ccaacagcctcggtctaggcaactggcagt

SEQ ID NO: 180702 - DNA, 30 bp, Artificial Sequence
  Synthetic oligonucleotide
aaccgacacggaaccttacaatcgtgcagt

SEQ ID NO: 180703 - DNA, 30 bp, Artificial Sequence
  Synthetic oligonucleotide
ggcaatgaaccagatatgctgtggtgcagt

SEQ ID NO: 180704 - DNA, 30 bp, Artificial Sequence
  Synthetic oligonucleotide
aggacgtatggttagcagcgacgttgcagt

SEQ ID NO: 180705 - DNA, 30 bp, Artificial Sequence
  Synthetic oligonucleotide
taaaaacatcgcttattacaccgaatcagt

SEQ ID NO: 180706 - DNA, 30 bp, Artificial Sequence
  Synthetic oligonucleotide
taccggcgtcacgggtcggacaacatcagt

SEQ ID NO: 180707 - DNA, 30 bp, Artificial Sequence
  Synthetic oligonucleotide
cagatattgggccccgaccgctacatcagt

SEQ ID NO: 180708 - DNA, 30 bp, Artificial Sequence
  Synthetic oligonucleotide
aagggttgcgacacatagtgggtcatcagt

SEQ ID NO: 180709 - DNA, 30 bp, Artificial Sequence
  Synthetic oligonucleotide
gctcacacgtgctttcgtaacgttatcagt

SEQ ID NO: 180710 - DNA, 30 bp, Artificial Sequence
  Synthetic oligonucleotide
tggaatatgccagtactaccattgctcagt

SEQ ID NO: 180711 - DNA, 30 bp, Artificial Sequence
  Synthetic oligonucleotide
gtaatcggctgagtcgggcatacggtcagt

SEQ ID NO: 180712 - DNA, 30 bp, Artificial Sequence
  Synthetic oligonucleotide
ttccgaagagaaagtgccaccgtggtcagt

SEQ ID NO: 180713 - DNA, 30 bp, Artificial Sequence
  Synthetic oligonucleotide
gttaaacaaaagcacctcgaggatgtcagt

SEQ ID NO: 180714 - DNA, 30 bp, Artificial Sequence
  Synthetic oligonucleotide
gtaaagaatgggacacgcgggaaattcagt

SEQ ID NO: 180715 - DNA, 30 bp, Artificial Sequence
  Synthetic oligonucleotide
gtaggtgctttatagcatttcaacttcagt

SEQ ID NO: 180716 - DNA, 30 bp, Artificial Sequence
  Synthetic oligonucleotide
ttggataatgtacggatctatggcttcagt

SEQ ID NO: 180717 - DNA, 30 bp, Artificial Sequence
  Synthetic oligonucleotide
ctgtcaaaatgtcgtttccagttcttcagt

SEQ ID NO: 180718 - DNA, 30 bp, Artificial Sequence
  Synthetic oligonucleotide
taactttggatggttgttagttagttcagt

SEQ ID NO: 180719 - DNA, 30 bp, Artificial Sequence
  Synthetic oligonucleotide
ggtgtgcgtgcagccaagatgtttttcagt

SEQ ID NO: 180720 - DNA, 30 bp, Artificial Sequence
  Synthetic oligonucleotide
aactggtgagccgttgcgagaacaaagagt

SEQ ID NO: 180721 - DNA, 30 bp, Artificial Sequence
  Synthetic oligonucleotide
cacagagtaatatcttataccttaaagagt

SEQ ID NO: 180722 - DNA, 30 bp, Artificial Sequence
  Synthetic oligonucleotide
acgctccgtttagtggcatcgactaagagt

SEQ ID NO: 180723 - DNA, 30 bp, Artificial Sequence
  Synthetic oligonucleotide
gtcttcggtttgtcttgatggggtaagagt

SEQ ID NO: 180724 - DNA, 30 bp, Artificial Sequence
  Synthetic oligonucleotide
cagaggccggcaataaattgtcgacagagt

SEQ ID NO: 180725 - DNA, 30 bp, Artificial Sequence
  Synthetic oligonucleotide
gacgtgctcagagatctgttctgacagagt

SEQ ID NO: 180726 - DNA, 30 bp, Artificial Sequence
  Synthetic oligonucleotide
taataagagttattggacagctctcagagt

SEQ ID NO: 180727 - DNA, 30 bp, Artificial Sequence
  Synthetic oligonucleotide
ttcgcactaaggcgtagccgttgtcagagt

SEQ ID NO: 180728 - DNA, 30 bp, Artificial Sequence
  Synthetic oligonucleotide
gcagaacgaaacaagcctgagcttcagagt

SEQ ID NO: 180729 - DNA, 30 bp, Artificial Sequence
  Synthetic oligonucleotide
tgtgacctgttaaactaaaagacagagagt

SEQ ID NO: 180730 - DNA, 30 bp, Artificial Sequence
  Synthetic oligonucleotide
ggagagaaaggatccggcttggcagagagt

SEQ ID NO: 180731 - DNA, 30 bp, Artificial Sequence
  Synthetic oligonucleotide
ggatgaaaagtgacacggaggccggagagt

SEQ ID NO: 180732 - DNA, 30 bp, Artificial Sequence
  Synthetic oligonucleotide
catatagaggggacgaatattcatgagagt

SEQ ID NO: 180733 - DNA, 30 bp, Artificial Sequence
  Synthetic oligonucleotide
atgcatgcggtaattgtcgggggtgagagt

SEQ ID NO: 180734 - DNA, 30 bp, Artificial Sequence
  Synthetic oligonucleotide
atacccaatatcgcccaatctgcatagagt

SEQ ID NO: 180735 - DNA, 30 bp, Artificial Sequence
  Synthetic oligonucleotide
ctctggtcgagtattcgctttggatagagt

SEQ ID NO: 180736 - DNA, 30 bp, Artificial Sequence
  Synthetic oligonucleotide
gacctggaaaatccgagaaacagctagagt

SEQ ID NO: 180737 - DNA, 30 bp, Artificial Sequence
  Synthetic oligonucleotide
ttgggaaagataaggctattccgctagagt

SEQ ID NO: 180738 - DNA, 30 bp, Artificial Sequence
  Synthetic oligonucleotide
aggatggtctattttatcttggtctagagt

SEQ ID NO: 180739 - DNA, 30 bp, Artificial Sequence
  Synthetic oligonucleotide
cgggcaaagagctgttcttatgggtagagt

SEQ ID NO: 180740 - DNA, 30 bp, Artificial Sequence
  Synthetic oligonucleotide
tctatggactataaaatacaggtgtagagt

SEQ ID NO: 180741 - DNA, 30 bp, Artificial Sequence
  Synthetic oligonucleotide
gcccgcgattttgtggactaacattagagt

SEQ ID NO: 180742 - DNA, 30 bp, Artificial Sequence
  Synthetic oligonucleotide
aggttgaagcggagtatccgcagttagagt

SEQ ID NO: 180743 - DNA, 30 bp, Artificial Sequence
  Synthetic oligonucleotide
cgtccccccgggtatgtgtagtaaacgagt

SEQ ID NO: 180744 - DNA, 30 bp, Artificial Sequence
  Synthetic oligonucleotide
ctttgggagccatttgcgtttggaacgagt

SEQ ID NO: 180745 - DNA, 30 bp, Artificial Sequence
  Synthetic oligonucleotide
tagaagttcgctgttgccacatgaacgagt

SEQ ID NO: 180746 - DNA, 30 bp, Artificial Sequence
  Synthetic oligonucleotide
tgtcgtaaacatggtcgctggataacgagt

SEQ ID NO: 180747 - DNA, 30 bp, Artificial Sequence
  Synthetic oligonucleotide
atatgaagtactctggctggggcgacgagt

SEQ ID NO: 180748 - DNA, 30 bp, Artificial Sequence
  Synthetic oligonucleotide
ggtcgatttcagccccagtacaatacgagt

SEQ ID NO: 180749 - DNA, 30 bp, Artificial Sequence
  Synthetic oligonucleotide
gacggaatccagagaagatcccatacgagt

SEQ ID NO: 180750 - DNA, 30 bp, Artificial Sequence
  Synthetic oligonucleotide
gcggtgacgtcattttgagtggttacgagt

SEQ ID NO: 180751 - DNA, 30 bp, Artificial Sequence
  Synthetic oligonucleotide
tccagattcctccacgtggataaaccgagt

SEQ ID NO: 180752 - DNA, 30 bp, Artificial Sequence
  Synthetic oligonucleotide
aggcctagctaggcctgcagtgcaccgagt

SEQ ID NO: 180753 - DNA, 30 bp, Artificial Sequence
  Synthetic oligonucleotide
tcatggtttacaaagttacaagtgccgagt

SEQ ID NO: 180754 - DNA, 30 bp, Artificial Sequence
  Synthetic oligonucleotide
gcatctcagttgacccttcagtgtgcgagt

SEQ ID NO: 180755 - DNA, 30 bp, Artificial Sequence
  Synthetic oligonucleotide
gaaaagacaacgcgccgaaccattgcgagt

SEQ ID NO: 180756 - DNA, 30 bp, Artificial Sequence
  Synthetic oligonucleotide
gtcgcgatttaactgacaccattctcgagt

SEQ ID NO: 180757 - DNA, 30 bp, Artificial Sequence
  Synthetic oligonucleotide
gtgactgaataattttagtgttcgtcgagt

SEQ ID NO: 180758 - DNA, 30 bp, Artificial Sequence
  Synthetic oligonucleotide
aacccaggaagcttgtcggtgctaaggagt

SEQ ID NO: 180759 - DNA, 30 bp, Artificial Sequence
  Synthetic oligonucleotide
tggggtagcgcccttgttattgtaaggagt

SEQ ID NO: 180760 - DNA, 30 bp, Artificial Sequence
  Synthetic oligonucleotide
atagcggtggtcagggatattcagaggagt

SEQ ID NO: 180761 - DNA, 30 bp, Artificial Sequence
  Synthetic oligonucleotide
ggatgagatttagagcgatgagaacggagt

SEQ ID NO: 180762 - DNA, 30 bp, Artificial Sequence
  Synthetic oligonucleotide
cttaaccgacctggtcacccccgacggagt

SEQ ID NO: 180763 - DNA, 30 bp, Artificial Sequence
  Synthetic oligonucleotide
ggggtcattgcattgaaaggtggacggagt

SEQ ID NO: 180764 - DNA, 30 bp, Artificial Sequence
  Synthetic oligonucleotide
tccttgaggcgacacaaataagcccggagt

SEQ ID NO: 180765 - DNA, 30 bp, Artificial Sequence
  Synthetic oligonucleotide
gggcaacgtttagtaggctttcgccggagt

SEQ ID NO: 180766 - DNA, 30 bp, Artificial Sequence
  Synthetic oligonucleotide
taccatccgtacaccgaatctacagggagt

SEQ ID NO: 180767 - DNA, 30 bp, Artificial Sequence
  Synthetic oligonucleotide
tggaaaaaacgaactcaaccactagggagt

SEQ ID NO: 180768 - DNA, 30 bp, Artificial Sequence
  Synthetic oligonucleotide
ggagtggggtcatttagtgtcggtgggagt

SEQ ID NO: 180769 - DNA, 30 bp, Artificial Sequence
  Synthetic oligonucleotide
gactgcggtccagcgagcgattgatggagt

SEQ ID NO: 180770 - DNA, 30 bp, Artificial Sequence
  Synthetic oligonucleotide
gcccaagacgaaggaaaagaccgttggagt

SEQ ID NO: 180771 - DNA, 30 bp, Artificial Sequence
  Synthetic oligonucleotide
gtaaacgtaaaaagtcccgccttttggagt

SEQ ID NO: 180772 - DNA, 30 bp, Artificial Sequence
  Synthetic oligonucleotide
tctagctatcattgggtagcggacatgagt

SEQ ID NO: 180773 - DNA, 30 bp, Artificial Sequence
  Synthetic oligonucleotide
caactgaagcgagcattttaagagatgagt

SEQ ID NO: 180774 - DNA, 30 bp, Artificial Sequence
  Synthetic oligonucleotide
gcggacttatcacagccgacttagatgagt

SEQ ID NO: 180775 - DNA, 30 bp, Artificial Sequence
  Synthetic oligonucleotide
caaaagggtcgtataagataatctatgagt

SEQ ID NO: 180776 - DNA, 30 bp, Artificial Sequence
  Synthetic oligonucleotide
ttcggacacagaagaataatcaagctgagt

SEQ ID NO: 180777 - DNA, 30 bp, Artificial Sequence
  Synthetic oligonucleotide
tgtttaacccgcggagaggaatagctgagt

SEQ ID NO: 180778 - DNA, 30 bp, Artificial Sequence
  Synthetic oligonucleotide
gctggttcctagccgcgggtcaggctgagt

SEQ ID NO: 180779 - DNA, 30 bp, Artificial Sequence
  Synthetic oligonucleotide
acaaggccgtagttactcgtcatgctgagt

SEQ ID NO: 180780 - DNA, 30 bp, Artificial Sequence
  Synthetic oligonucleotide
cagattttggagaagacagtatttctgagt

SEQ ID NO: 180781 - DNA, 30 bp, Artificial Sequence
  Synthetic oligonucleotide
atagggagcaaatcatcgttctacgtgagt

SEQ ID NO: 180782 - DNA, 30 bp, Artificial Sequence
  Synthetic oligonucleotide
cgttcagctttgggcattgctcttgtgagt

SEQ ID NO: 180783 - DNA, 30 bp, Artificial Sequence
  Synthetic oligonucleotide
tcagggcggattaacggtggcatattgagt

SEQ ID NO: 180784 - DNA, 30 bp, Artificial Sequence
  Synthetic oligonucleotide
ctagactgtcatttctagctcaacttgagt

SEQ ID NO: 180785 - DNA, 30 bp, Artificial Sequence
  Synthetic oligonucleotide
tttgacagaccaatggaagaaactttgagt

SEQ ID NO: 180786 - DNA, 30 bp, Artificial Sequence
  Synthetic oligonucleotide
aaagacccaaagcaaacatgcaggaatagt

SEQ ID NO: 180787 - DNA, 30 bp, Artificial Sequence
  Synthetic oligonucleotide
cagtctgtgcgaaccaaaagcgagcatagt

SEQ ID NO: 180788 - DNA, 30 bp, Artificial Sequence
  Synthetic oligonucleotide
atgtcgcaagctgtaacgtgcgccgatagt

SEQ ID NO: 180789 - DNA, 30 bp, Artificial Sequence
  Synthetic oligonucleotide
caaccgttgccacgagtgcaaagcgatagt

SEQ ID NO: 180790 - DNA, 30 bp, Artificial Sequence
  Synthetic oligonucleotide
cttagcactgtatactacttctcggatagt

SEQ ID NO: 180791 - DNA, 30 bp, Artificial Sequence
  Synthetic oligonucleotide
cgaacagaataaggctatatgtcggatagt

SEQ ID NO: 180792 - DNA, 30 bp, Artificial Sequence
  Synthetic oligonucleotide
ctcagtgcacgagcagagaaagctgatagt

SEQ ID NO: 180793 - DNA, 30 bp, Artificial Sequence
  Synthetic oligonucleotide
atggtacactagaaatctagagttgatagt

SEQ ID NO: 180794 - DNA, 30 bp, Artificial Sequence
  Synthetic oligonucleotide
gctaataataggggcgtgtaatttgatagt

SEQ ID NO: 180795 - DNA, 30 bp, Artificial Sequence
  Synthetic oligonucleotide
tcagtgggccgaaactcctggcggtatagt

SEQ ID NO: 180796 - DNA, 30 bp, Artificial Sequence
  Synthetic oligonucleotide
catggaaaaatagctactttaaattatagt

SEQ ID NO: 180797 - DNA, 30 bp, Artificial Sequence
  Synthetic oligonucleotide
gacgggggggagatagggccgcaaactagt

SEQ ID NO: 180798 - DNA, 30 bp, Artificial Sequence
  Synthetic oligonucleotide
aagctagcctttaagaaccaacacactagt

SEQ ID NO: 180799 - DNA, 30 bp, Artificial Sequence
  Synthetic oligonucleotide
gggtaaatgtagtaaggcaagctcactagt

SEQ ID NO: 180800 - DNA, 30 bp, Artificial Sequence
  Synthetic oligonucleotide
cagagaaccgtatggggatcgaagcctagt

SEQ ID NO: 180801 - DNA, 30 bp, Artificial Sequence
  Synthetic oligonucleotide
cggcgataagcgaatggtgtggccgctagt

SEQ ID NO: 180802 - DNA, 30 bp, Artificial Sequence
  Synthetic oligonucleotide
cgaacgagagctttgtcacgtcgggctagt

SEQ ID NO: 180803 - DNA, 30 bp, Artificial Sequence
  Synthetic oligonucleotide
aggccttctagtgaacctatagtggctagt

SEQ ID NO: 180804 - DNA, 30 bp, Artificial Sequence
  Synthetic oligonucleotide
ctgagttccccaatctttcgacatgctagt

SEQ ID NO: 180805 - DNA, 30 bp, Artificial Sequence
  Synthetic oligonucleotide
ggccgcatagagttgccttgaagtgctagt

SEQ ID NO: 180806 - DNA, 30 bp, Artificial Sequence
  Synthetic oligonucleotide
gctgtaaggtgatcgacgacagttgctagt

SEQ ID NO: 180807 - DNA, 30 bp, Artificial Sequence
  Synthetic oligonucleotide
gtggccatgattaagattacaatatctagt

SEQ ID NO: 180808 - DNA, 30 bp, Artificial Sequence
  Synthetic oligonucleotide
tacacgtacgcccttcatgttccgtctagt

SEQ ID NO: 180809 - DNA, 30 bp, Artificial Sequence
  Synthetic oligonucleotide
gtcgtatgactgccgaatttaatcagtagt

SEQ ID NO: 180810 - DNA, 30 bp, Artificial Sequence
  Synthetic oligonucleotide
aatcagtgcaagaaccctccatcgagtagt

SEQ ID NO: 180811 - DNA, 30 bp, Artificial Sequence
  Synthetic oligonucleotide
gtggtgcgtccttaggactgactgagtagt

SEQ ID NO: 180812 - DNA, 30 bp, Artificial Sequence
  Synthetic oligonucleotide
cgggatgtcaactgaaaaggtacacgtagt

SEQ ID NO: 180813 - DNA, 30 bp, Artificial Sequence
  Synthetic oligonucleotide
tgagataaagattcggcgcgcatacgtagt

SEQ ID NO: 180814 - DNA, 30 bp, Artificial Sequence
  Synthetic oligonucleotide
ggaaacttcgatgggaattacgtccgtagt

SEQ ID NO: 180815 - DNA, 30 bp, Artificial Sequence
  Synthetic oligonucleotide
gtgcagtctgagggaacgtgtatgcgtagt

SEQ ID NO: 180816 - DNA, 30 bp, Artificial Sequence
  Synthetic oligonucleotide
ccagttcggaggcgggactaggtgcgtagt

SEQ ID NO: 180817 - DNA, 30 bp, Artificial Sequence
  Synthetic oligonucleotide
gggatgcgtcaagagcgattcaagggtagt

SEQ ID NO: 180818 - DNA, 30 bp, Artificial Sequence
  Synthetic oligonucleotide
tacctgtccgatccatgagaagagggtagt

SEQ ID NO: 180819 - DNA, 30 bp, Artificial Sequence
  Synthetic oligonucleotide
cttgcataatcgtgtggtacgaactgtagt

SEQ ID NO: 180820 - DNA, 30 bp, Artificial Sequence
  Synthetic oligonucleotide
ctgggtcgtcgaagggtcaacgtgtgtagt

SEQ ID NO: 180821 - DNA, 30 bp, Artificial Sequence
  Synthetic oligonucleotide
tgcgctgctcgacaaagtttagaaattagt

SEQ ID NO: 180822 - DNA, 30 bp, Artificial Sequence
  Synthetic oligonucleotide
atcaaaccttcaacccagcattaaattagt

SEQ ID NO: 180823 - DNA, 30 bp, Artificial Sequence
  Synthetic oligonucleotide
cctcaagataactctggggcgtagattagt

SEQ ID NO: 180824 - DNA, 30 bp, Artificial Sequence
  Synthetic oligonucleotide
ggggtacgaagacgataaccctaacttagt

SEQ ID NO: 180825 - DNA, 30 bp, Artificial Sequence
  Synthetic oligonucleotide
ccgcaatttaaacaggtagacatgcttagt

SEQ ID NO: 180826 - DNA, 30 bp, Artificial Sequence
  Synthetic oligonucleotide
aagctgcacagccgcgcaaagaaagttagt

SEQ ID NO: 180827 - DNA, 30 bp, Artificial Sequence
  Synthetic oligonucleotide
ggagtcccacgtttcaagcagagagttagt

SEQ ID NO: 180828 - DNA, 30 bp, Artificial Sequence
  Synthetic oligonucleotide
tgaacgttttgcccacgatgcttagttagt

SEQ ID NO: 180829 - DNA, 30 bp, Artificial Sequence
  Synthetic oligonucleotide
taagagtaccgggggtagcattaggttagt

SEQ ID NO: 180830 - DNA, 30 bp, Artificial Sequence
  Synthetic oligonucleotide
agcgaattatacgctgatcaagaatttagt

SEQ ID NO: 180831 - DNA, 31 bp, Artificial Sequence
  Synthetic oligonucleotide
tccgggatgtgcagacaaatattaaaaacgt

SEQ ID NO: 180832 - DNA, 31 bp, Artificial Sequence
  Synthetic oligonucleotide
tcatcgcgggtagtgttcgtctacgaaacgt

SEQ ID NO: 180833 - DNA, 30 bp, Artificial Sequence
  Synthetic oligonucleotide
gcagtgagagccgacttacgggataaacgt

SEQ ID NO: 180834 - DNA, 30 bp, Artificial Sequence
  Synthetic oligonucleotide
tcctaggaacgacagggttctcaccaacgt

SEQ ID NO: 180835 - DNA, 30 bp, Artificial Sequence
  Synthetic oligonucleotide
aggtataccgagtttcaattggaggaacgt

SEQ ID NO: 180836 - DNA, 30 bp, Artificial Sequence
  Synthetic oligonucleotide
ttcgcgttgctgatgataaaaggtgaacgt

SEQ ID NO: 180837 - DNA, 30 bp, Artificial Sequence
  Synthetic oligonucleotide
tcacgagtagtatcccgatgcgttgaacgt

SEQ ID NO: 180838 - DNA, 30 bp, Artificial Sequence
  Synthetic oligonucleotide
agcacaaatggcctcattatggattaacgt

SEQ ID NO: 180839 - DNA, 30 bp, Artificial Sequence
  Synthetic oligonucleotide
ccgttgagaaagcagcatatggtaacacgt

SEQ ID NO: 180840 - DNA, 30 bp, Artificial Sequence
  Synthetic oligonucleotide
tagcagaaaccaagtcggcccaccacacgt

SEQ ID NO: 180841 - DNA, 30 bp, Artificial Sequence
  Synthetic oligonucleotide
gacggaatatcccggaggcaatatacacgt

SEQ ID NO: 180842 - DNA, 30 bp, Artificial Sequence
  Synthetic oligonucleotide
gagagcacaagagcgtgtatgtaaccacgt

SEQ ID NO: 180843 - DNA, 30 bp, Artificial Sequence
  Synthetic oligonucleotide
cgttaaaccgtatgacataagccaccacgt

SEQ ID NO: 180844 - DNA, 30 bp, Artificial Sequence
  Synthetic oligonucleotide
attgcggaactgagatggatgcgaccacgt

SEQ ID NO: 180845 - DNA, 31 bp, Artificial Sequence
  Synthetic oligonucleotide
tggaaaggcgtccaggcttcgaggaccacgt

SEQ ID NO: 180846 - DNA, 30 bp, Artificial Sequence
  Synthetic oligonucleotide
acgacgtcgtgagacactaaatccgcacgt

SEQ ID NO: 180847 - DNA, 30 bp, Artificial Sequence
  Synthetic oligonucleotide
attagggatgtcacccgcaagagcgcacgt

SEQ ID NO: 180848 - DNA, 30 bp, Artificial Sequence
  Synthetic oligonucleotide
ttgggtagacaacgggagtccaatgcacgt

SEQ ID NO: 180849 - DNA, 30 bp, Artificial Sequence
  Synthetic oligonucleotide
gggaatggctggtaggactaggactcacgt

SEQ ID NO: 180850 - DNA, 30 bp, Artificial Sequence
  Synthetic oligonucleotide
aatcacagttgcttgaataagaagtcacgt

SEQ ID NO: 180851 - DNA, 30 bp, Artificial Sequence
  Synthetic oligonucleotide
tcctcgcgagccacctaccgagcgtcacgt

SEQ ID NO: 180852 - DNA, 30 bp, Artificial Sequence
  Synthetic oligonucleotide
gaatgattggagatcggaaatatcagacgt

SEQ ID NO: 180853 - DNA, 30 bp, Artificial Sequence
  Synthetic oligonucleotide
tgcactttcgagcagccaggcctcagacgt

SEQ ID NO: 180854 - DNA, 30 bp, Artificial Sequence
  Synthetic oligonucleotide
ctggagggcgaggtaggacaggtgagacgt

SEQ ID NO: 180855 - DNA, 30 bp, Artificial Sequence
  Synthetic oligonucleotide
gtccgtcgatgcaccataccaaggcgacgt

SEQ ID NO: 180856 - DNA, 30 bp, Artificial Sequence
  Synthetic oligonucleotide
cagactgccgcaaaaaggtatgctcgacgt

SEQ ID NO: 180857 - DNA, 30 bp, Artificial Sequence
  Synthetic oligonucleotide
agagacatgcttggtatcttattaggacgt

SEQ ID NO: 180858 - DNA, 30 bp, Artificial Sequence
  Synthetic oligonucleotide
tagagcacttgggttaactgcaccggacgt

SEQ ID NO: 180859 - DNA, 30 bp, Artificial Sequence
  Synthetic oligonucleotide
ggtgcctgtcagagacacatcttcggacgt

SEQ ID NO: 180860 - DNA, 30 bp, Artificial Sequence
  Synthetic oligonucleotide
accatcgtgaattcaaaccctgtgggacgt

SEQ ID NO: 180861 - DNA, 30 bp, Artificial Sequence
  Synthetic oligonucleotide
gggtgcttggatagaacaaaacaatgacgt

SEQ ID NO: 180862 - DNA, 30 bp, Artificial Sequence
  Synthetic oligonucleotide
tgtgtgtggattttgagttatgtatgacgt

SEQ ID NO: 180863 - DNA, 30 bp, Artificial Sequence
  Synthetic oligonucleotide
ggggcatctcgccggcggaggaattgacgt

SEQ ID NO: 180864 - DNA, 30 bp, Artificial Sequence
  Synthetic oligonucleotide
agcggataggtacaagaatcaacaatacgt

SEQ ID NO: 180865 - DNA, 30 bp, Artificial Sequence
  Synthetic oligonucleotide
tcatggataacacctcgatatgcaatacgt

SEQ ID NO: 180866 - DNA, 30 bp, Artificial Sequence
  Synthetic oligonucleotide
aaaggaaatgcattggcgatgaacatacgt

SEQ ID NO: 180867 - DNA, 30 bp, Artificial Sequence
  Synthetic oligonucleotide
gccatcgcaatcaatgatggccccatacgt

SEQ ID NO: 180868 - DNA, 30 bp, Artificial Sequence
  Synthetic oligonucleotide
gaaactaggggtagaattctgtccatacgt

SEQ ID NO: 180869 - DNA, 30 bp, Artificial Sequence
  Synthetic oligonucleotide
aacattaagtacgatatgcggtagatacgt

SEQ ID NO: 180870 - DNA, 30 bp, Artificial Sequence
  Synthetic oligonucleotide
acatggtgaaattcggtgagttttatacgt

SEQ ID NO: 180871 - DNA, 30 bp, Artificial Sequence
  Synthetic oligonucleotide
gtgtccctcgattgggacaagccactacgt

SEQ ID NO: 180872 - DNA, 30 bp, Artificial Sequence
  Synthetic oligonucleotide
cgatatcaatgctcggaggtatacctacgt

SEQ ID NO: 180873 - DNA, 30 bp, Artificial Sequence
  Synthetic oligonucleotide
ctagatggaatcgtccaaggtcaagtacgt

SEQ ID NO: 180874 - DNA, 30 bp, Artificial Sequence
  Synthetic oligonucleotide
ctcgaggctcctagtgtcgtcttagtacgt

SEQ ID NO: 180875 - DNA, 30 bp, Artificial Sequence
  Synthetic oligonucleotide
tgtgcgcacagactcaactgtctcgtacgt

SEQ ID NO: 180876 - DNA, 30 bp, Artificial Sequence
  Synthetic oligonucleotide
gttccgggcgcgcaataataaggggtacgt

SEQ ID NO: 180877 - DNA, 30 bp, Artificial Sequence
  Synthetic oligonucleotide
tatgtctgcggagattttccgcaattacgt

SEQ ID NO: 180878 - DNA, 30 bp, Artificial Sequence
  Synthetic oligonucleotide
tgccacctaaggcacacataccggttacgt

SEQ ID NO: 180879 - DNA, 30 bp, Artificial Sequence
  Synthetic oligonucleotide
tgtaaggggaatctggggtacacaaaccgt

SEQ ID NO: 180880 - DNA, 30 bp, Artificial Sequence
  Synthetic oligonucleotide
ctggtattgtcggataccaggtcaaaccgt

SEQ ID NO: 180881 - DNA, 30 bp, Artificial Sequence
  Synthetic oligonucleotide
tccaatgcgtattcacctcgattcaaccgt

SEQ ID NO: 180882 - DNA, 30 bp, Artificial Sequence
  Synthetic oligonucleotide
tcgttcttgtccatatggaatccccaccgt

SEQ ID NO: 180883 - DNA, 30 bp, Artificial Sequence
  Synthetic oligonucleotide
agtggaaatgcaaactttactgcagaccgt

SEQ ID NO: 180884 - DNA, 30 bp, Artificial Sequence
  Synthetic oligonucleotide
taagatctcaagataggtcacatagaccgt

SEQ ID NO: 180885 - DNA, 30 bp, Artificial Sequence
  Synthetic oligonucleotide
atggtcaccattacgtagtatacggaccgt

SEQ ID NO: 180886 - DNA, 30 bp, Artificial Sequence
  Synthetic oligonucleotide
gacgaaagcccacacataattggtgaccgt

SEQ ID NO: 180887 - DNA, 30 bp, Artificial Sequence
  Synthetic oligonucleotide
tccttgtttgtctacttacaggttgaccgt

SEQ ID NO: 180888 - DNA, 30 bp, Artificial Sequence
  Synthetic oligonucleotide
tacatcgtaaagaaggatatgctataccgt

SEQ ID NO: 180889 - DNA, 30 bp, Artificial Sequence
  Synthetic oligonucleotide
ttgagtcaggtagagtaaatgatctaccgt

SEQ ID NO: 180890 - DNA, 30 bp, Artificial Sequence
  Synthetic oligonucleotide
cctgcaagttagatgtggtggtggtaccgt

SEQ ID NO: 180891 - DNA, 30 bp, Artificial Sequence
  Synthetic oligonucleotide
atacaataataacctccactttccacccgt

SEQ ID NO: 180892 - DNA, 30 bp, Artificial Sequence
  Synthetic oligonucleotide
agactagcagatgaaccggggcgcacccgt

SEQ ID NO: 180893 - DNA, 30 bp, Artificial Sequence
  Synthetic oligonucleotide
tggtcgatcaggcgatgttcgtagccccgt

SEQ ID NO: 180894 - DNA, 30 bp, Artificial Sequence
  Synthetic oligonucleotide
tacagtcgcacgaatgtcccacaagcccgt

SEQ ID NO: 180895 - DNA, 30 bp, Artificial Sequence
  Synthetic oligonucleotide
aacattatacattgctcgtgcgtcgcccgt

SEQ ID NO: 180896 - DNA, 30 bp, Artificial Sequence
  Synthetic oligonucleotide
tgtatacgaaaaatattacagcctgcccgt

SEQ ID NO: 180897 - DNA, 30 bp, Artificial Sequence
  Synthetic oligonucleotide
agtaccaagaggcaccacgatagtgcccgt

SEQ ID NO: 180898 - DNA, 30 bp, Artificial Sequence
  Synthetic oligonucleotide
acctgcctagctcattcacgatcatcccgt

SEQ ID NO: 180899 - DNA, 30 bp, Artificial Sequence
  Synthetic oligonucleotide
gtgaaaacgggctacgtacttttatcccgt

SEQ ID NO: 180900 - DNA, 30 bp, Artificial Sequence
  Synthetic oligonucleotide
gtcgattgatccgcggggggatacagccgt

SEQ ID NO: 180901 - DNA, 30 bp, Artificial Sequence
  Synthetic oligonucleotide
cgaagcggcgacgtcacgggttagagccgt

SEQ ID NO: 180902 - DNA, 30 bp, Artificial Sequence
  Synthetic oligonucleotide
acatcctgttagaataagaagtgtagccgt

SEQ ID NO: 180903 - DNA, 30 bp, Artificial Sequence
  Synthetic oligonucleotide
gcatgatgtgaaccccgtgttgttagccgt

SEQ ID NO: 180904 - DNA, 30 bp, Artificial Sequence
  Synthetic oligonucleotide
cgatatgtccaagatcttcttgaacgccgt

SEQ ID NO: 180905 - DNA, 30 bp, Artificial Sequence
  Synthetic oligonucleotide
tctgttatagactgtgtgcggacaggccgt

SEQ ID NO: 180906 - DNA, 30 bp, Artificial Sequence
  Synthetic oligonucleotide
atacgacgtctgaaatctctgctcggccgt

SEQ ID NO: 180907 - DNA, 30 bp, Artificial Sequence
  Synthetic oligonucleotide
cgcgaagatgtgattgtgagaacgggccgt

SEQ ID NO: 180908 - DNA, 30 bp, Artificial Sequence
  Synthetic oligonucleotide
tggagagagcgttttgaaattgtgggccgt

SEQ ID NO: 180909 - DNA, 30 bp, Artificial Sequence
  Synthetic oligonucleotide
ccgagtacgccactttcgaaacatggccgt

SEQ ID NO: 180910 - DNA, 30 bp, Artificial Sequence
  Synthetic oligonucleotide
aaacccataggcaaacaagctgaatgccgt

SEQ ID NO: 180911 - DNA, 30 bp, Artificial Sequence
  Synthetic oligonucleotide
tctgcttccatcccgaagttaacttgccgt

SEQ ID NO: 180912 - DNA, 30 bp, Artificial Sequence
  Synthetic oligonucleotide
ctggaaaaagcctcttcttagagttgccgt

SEQ ID NO: 180913 - DNA, 30 bp, Artificial Sequence
  Synthetic oligonucleotide
gtatgtgtatctacaccgtagcgtatccgt

SEQ ID NO: 180914 - DNA, 30 bp, Artificial Sequence
  Synthetic oligonucleotide
atgtcaagaatgttataaggagttatccgt

SEQ ID NO: 180915 - DNA, 30 bp, Artificial Sequence
  Synthetic oligonucleotide
ggtgccttccaggaagcggataaggtccgt

SEQ ID NO: 180916 - DNA, 30 bp, Artificial Sequence
  Synthetic oligonucleotide
ggcttagcctcatactttatagatgtccgt

SEQ ID NO: 180917 - DNA, 30 bp, Artificial Sequence
  Synthetic oligonucleotide
gatcatcacacgggggagcacatattccgt

SEQ ID NO: 180918 - DNA, 30 bp, Artificial Sequence
  Synthetic oligonucleotide
tacgacatgtcttgggccaacactttccgt

SEQ ID NO: 180919 - DNA, 30 bp, Artificial Sequence
  Synthetic oligonucleotide
ttacgaacgtattagcaggtaggtttccgt

SEQ ID NO: 180920 - DNA, 30 bp, Artificial Sequence
  Synthetic oligonucleotide
tgcagactgaaaagagtgcgcagaaagcgt

SEQ ID NO: 180921 - DNA, 30 bp, Artificial Sequence
  Synthetic oligonucleotide
gagggatagcctatacctcctatcaagcgt

SEQ ID NO: 180922 - DNA, 30 bp, Artificial Sequence
  Synthetic oligonucleotide
agcttgggtattgtggggtcttcccagcgt

SEQ ID NO: 180923 - DNA, 30 bp, Artificial Sequence
  Synthetic oligonucleotide
agggaaacgttaaggttcgttaagcagcgt

SEQ ID NO: 180924 - DNA, 30 bp, Artificial Sequence
  Synthetic oligonucleotide
atacacgggccgtggtccgcatgagagcgt

SEQ ID NO: 180925 - DNA, 30 bp, Artificial Sequence
  Synthetic oligonucleotide
ttcgtaacagaaagaccaaggaacgagcgt

SEQ ID NO: 180926 - DNA, 30 bp, Artificial Sequence
  Synthetic oligonucleotide
gtctgccagcccgaacccatctaggagcgt

SEQ ID NO: 180927 - DNA, 30 bp, Artificial Sequence
  Synthetic oligonucleotide
ctacttcgcagtaggaggaaaatggagcgt

SEQ ID NO: 180928 - DNA, 30 bp, Artificial Sequence
  Synthetic oligonucleotide
ttagacgtctatcaggtagagattgagcgt

SEQ ID NO: 180929 - DNA, 30 bp, Artificial Sequence
  Synthetic oligonucleotide
accgttttgggttcaaaagggagatagcgt

SEQ ID NO: 180930 - DNA, 30 bp, Artificial Sequence
  Synthetic oligonucleotide
cctaggagctagttccgaccggagtagcgt

SEQ ID NO: 180931 - DNA, 30 bp, Artificial Sequence
  Synthetic oligonucleotide
aaatcgccgggacctgagagcacgtagcgt

SEQ ID NO: 180932 - DNA, 30 bp, Artificial Sequence
  Synthetic oligonucleotide
aaagatcatgtggtctcgcacccttagcgt

SEQ ID NO: 180933 - DNA, 30 bp, Artificial Sequence
  Synthetic oligonucleotide
aacgcggtactgactggaacaacaacgcgt

SEQ ID NO: 180934 - DNA, 30 bp, Artificial Sequence
  Synthetic oligonucleotide
agatgcccagactccagtctaagcacgcgt

SEQ ID NO: 180935 - DNA, 30 bp, Artificial Sequence
  Synthetic oligonucleotide
atgcgtgatagggagaacatgtgcacgcgt

SEQ ID NO: 180936 - DNA, 30 bp, Artificial Sequence
  Synthetic oligonucleotide
catgcggacatcgggacgtgaatcacgcgt

SEQ ID NO: 180937 - DNA, 30 bp, Artificial Sequence
  Synthetic oligonucleotide
gcctacaaaggggataaggctcgaccgcgt

SEQ ID NO: 180938 - DNA, 30 bp, Artificial Sequence
  Synthetic oligonucleotide
gtacgtccgtggaagacccggggtccgcgt

SEQ ID NO: 180939 - DNA, 30 bp, Artificial Sequence
  Synthetic oligonucleotide
gtgagaaaggagtccagtcagtttccgcgt

SEQ ID NO: 180940 - DNA, 30 bp, Artificial Sequence
  Synthetic oligonucleotide
agccgattgttcaactgagaaaacgcgcgt

SEQ ID NO: 180941 - DNA, 30 bp, Artificial Sequence
  Synthetic oligonucleotide
tatgtatttagctgcgtcacccatgcgcgt

SEQ ID NO: 180942 - DNA, 30 bp, Artificial Sequence
  Synthetic oligonucleotide
ctaactggactctctggaggaatctcgcgt

SEQ ID NO: 180943 - DNA, 30 bp, Artificial Sequence
  Synthetic oligonucleotide
acaattcggtctaagcgaaacatgtcgcgt

SEQ ID NO: 180944 - DNA, 30 bp, Artificial Sequence
  Synthetic oligonucleotide
acaaggcacactatacttgaccagaggcgt

SEQ ID NO: 180945 - DNA, 30 bp, Artificial Sequence
  Synthetic oligonucleotide
tcactaagtcccgataaaaagtgtaggcgt

SEQ ID NO: 180946 - DNA, 30 bp, Artificial Sequence
  Synthetic oligonucleotide
ctcgggtagattacatagggcaaccggcgt

SEQ ID NO: 180947 - DNA, 30 bp, Artificial Sequence
  Synthetic oligonucleotide
aggtgacatgtagttagagcactgcggcgt

SEQ ID NO: 180948 - DNA, 30 bp, Artificial Sequence
  Synthetic oligonucleotide
caatgctcagaacaatattcatcggggcgt

SEQ ID NO: 180949 - DNA, 30 bp, Artificial Sequence
  Synthetic oligonucleotide
tcgtccgacacatataaccttacatggcgt

SEQ ID NO: 180950 - DNA, 30 bp, Artificial Sequence
  Synthetic oligonucleotide
acagaaggggttgcgtgcttcgtttggcgt

SEQ ID NO: 180951 - DNA, 30 bp, Artificial Sequence
  Synthetic oligonucleotide
tcgtaccagggattcctggtgggactgcgt

SEQ ID NO: 180952 - DNA, 30 bp, Artificial Sequence
  Synthetic oligonucleotide
caccaagcgggggtaacgcggtaagtgcgt

SEQ ID NO: 180953 - DNA, 30 bp, Artificial Sequence
  Synthetic oligonucleotide
tgacgggctctgtcaatcggcacagtgcgt

SEQ ID NO: 180954 - DNA, 30 bp, Artificial Sequence
  Synthetic oligonucleotide
catacccaaaatatgtggatgcccgtgcgt

SEQ ID NO: 180955 - DNA, 30 bp, Artificial Sequence
  Synthetic oligonucleotide
agcgtcacagagcgtcgcgatttattgcgt

SEQ ID NO: 180956 - DNA, 30 bp, Artificial Sequence
  Synthetic oligonucleotide
cactggctttggttggaaactgccttgcgt

SEQ ID NO: 180957 - DNA, 30 bp, Artificial Sequence
  Synthetic oligonucleotide
cgtaggctacaggaacgcgaatagttgcgt

SEQ ID NO: 180958 - DNA, 30 bp, Artificial Sequence
  Synthetic oligonucleotide
atttacagtggtggttatgccctgttgcgt

SEQ ID NO: 180959 - DNA, 30 bp, Artificial Sequence
  Synthetic oligonucleotide
tcgaggtccgtagttaggaaatgaaatcgt

SEQ ID NO: 180960 - DNA, 30 bp, Artificial Sequence
  Synthetic oligonucleotide
aactgggacctctgccattgcacgaatcgt

SEQ ID NO: 180961 - DNA, 30 bp, Artificial Sequence
  Synthetic oligonucleotide
tattgcggagcatacgcctggcgacatcgt

SEQ ID NO: 180962 - DNA, 30 bp, Artificial Sequence
  Synthetic oligonucleotide
agaagaataggtggctgagctgtacatcgt

SEQ ID NO: 180963 - DNA, 30 bp, Artificial Sequence
  Synthetic oligonucleotide
ataagtgagataaatactgcaagagatcgt

SEQ ID NO: 180964 - DNA, 30 bp, Artificial Sequence
  Synthetic oligonucleotide
caagtcaacggctccgaaagtagggatcgt

SEQ ID NO: 180965 - DNA, 30 bp, Artificial Sequence
  Synthetic oligonucleotide
agttatatatcgtatctatgtaaatatcgt

SEQ ID NO: 180966 - DNA, 30 bp, Artificial Sequence
  Synthetic oligonucleotide
aacacaagagttcacccaatgcagtatcgt

SEQ ID NO: 180967 - DNA, 30 bp, Artificial Sequence
  Synthetic oligonucleotide
catgaccacgtaaaatgagtataaactcgt

SEQ ID NO: 180968 - DNA, 30 bp, Artificial Sequence
  Synthetic oligonucleotide
gccagaggtacagtatggcacaggactcgt

SEQ ID NO: 180969 - DNA, 30 bp, Artificial Sequence
  Synthetic oligonucleotide
acgtaagcaggaaacgaagcacttactcgt

SEQ ID NO: 180970 - DNA, 30 bp, Artificial Sequence
  Synthetic oligonucleotide
actgctaatcgttgtttctgtaggcctcgt

SEQ ID NO: 180971 - DNA, 30 bp, Artificial Sequence
  Synthetic oligonucleotide
ggcacggcttaccggtacaaactagctcgt

SEQ ID NO: 180972 - DNA, 30 bp, Artificial Sequence
  Synthetic oligonucleotide
atacttggcgctaatggcaaatcaagtcgt

SEQ ID NO: 180973 - DNA, 30 bp, Artificial Sequence
  Synthetic oligonucleotide
gggcaatcgaatcacgagaggtgcagtcgt

SEQ ID NO: 180974 - DNA, 30 bp, Artificial Sequence
  Synthetic oligonucleotide
taaatttatagagtaagattgaagagtcgt

SEQ ID NO: 180975 - DNA, 30 bp, Artificial Sequence
  Synthetic oligonucleotide
tcgaacaaccggaattctcatcagcgtcgt

SEQ ID NO: 180976 - DNA, 30 bp, Artificial Sequence
  Synthetic oligonucleotide
tatacaagggctaggtcgcaactaggtcgt

SEQ ID NO: 180977 - DNA, 30 bp, Artificial Sequence
  Synthetic oligonucleotide
ggctcatgtgagggtgcctcaggcggtcgt

SEQ ID NO: 180978 - DNA, 30 bp, Artificial Sequence
  Synthetic oligonucleotide
gggaaaaggatccattatggcttcggtcgt

SEQ ID NO: 180979 - DNA, 30 bp, Artificial Sequence
  Synthetic oligonucleotide
tgcaagcccatacggtacgaagcgggtcgt

SEQ ID NO: 180980 - DNA, 30 bp, Artificial Sequence
  Synthetic oligonucleotide
acggtaccggatccacctataaggggtcgt

SEQ ID NO: 180981 - DNA, 30 bp, Artificial Sequence
  Synthetic oligonucleotide
catcgaggtcgccttggttaacatggtcgt

SEQ ID NO: 180982 - DNA, 30 bp, Artificial Sequence
  Synthetic oligonucleotide
tactacgttccatcgtccgggtgatgtcgt

SEQ ID NO: 180983 - DNA, 30 bp, Artificial Sequence
  Synthetic oligonucleotide
tcgggctatgaaggacagcgggcctgtcgt

SEQ ID NO: 180984 - DNA, 31 bp, Artificial Sequence
  Synthetic oligonucleotide
aaacgaagatagttcgaggtacacgtgtcgt

SEQ ID NO: 180985 - DNA, 30 bp, Artificial Sequence
  Synthetic oligonucleotide
caaagcgctcaaaggacgtgatcttgtcgt

SEQ ID NO: 180986 - DNA, 30 bp, Artificial Sequence
  Synthetic oligonucleotide
agagctaacactggtagccgaaagattcgt

SEQ ID NO: 180987 - DNA, 30 bp, Artificial Sequence
  Synthetic oligonucleotide
gctgcagatgtctaagggaggtgccttcgt

SEQ ID NO: 180988 - DNA, 30 bp, Artificial Sequence
  Synthetic oligonucleotide
atacggcatcaaatcgtcagtctccttcgt

SEQ ID NO: 180989 - DNA, 30 bp, Artificial Sequence
  Synthetic oligonucleotide
tgtgaggggatcaacaccacgtaagttcgt

SEQ ID NO: 180990 - DNA, 30 bp, Artificial Sequence
  Synthetic oligonucleotide
tcctcctaccgaatctccagctcggttcgt

SEQ ID NO: 180991 - DNA, 30 bp, Artificial Sequence
  Synthetic oligonucleotide
acggccggttatgtttgtaacagggttcgt

SEQ ID NO: 180992 - DNA, 30 bp, Artificial Sequence
  Synthetic oligonucleotide
acgaagagctttaaagcgtcaacgtttcgt

SEQ ID NO: 180993 - DNA, 30 bp, Artificial Sequence
  Synthetic oligonucleotide
agaatggttcaagtcccttagcgcaaaggt

SEQ ID NO: 180994 - DNA, 30 bp, Artificial Sequence
  Synthetic oligonucleotide
aaggtaaatgtgggccttgggctcaaaggt

SEQ ID NO: 180995 - DNA, 30 bp, Artificial Sequence
  Synthetic oligonucleotide
ctggtacgcgttattattgagtggaaaggt

SEQ ID NO: 180996 - DNA, 30 bp, Artificial Sequence
  Synthetic oligonucleotide
acaatgagagcgcgatttaaacataaaggt

SEQ ID NO: 180997 - DNA, 30 bp, Artificial Sequence
  Synthetic oligonucleotide
cggatttgaagccaacacctctgacaaggt

SEQ ID NO: 180998 - DNA, 30 bp, Artificial Sequence
  Synthetic oligonucleotide
taggaaaaggcgcgactaaggttacaaggt

SEQ ID NO: 180999 - DNA, 30 bp, Artificial Sequence
  Synthetic oligonucleotide
tatttggctgaggcgttgcgtgcccaaggt

SEQ ID NO: 181000 - DNA, 30 bp, Artificial Sequence
  Synthetic oligonucleotide
cgaccgatgcatgtaagacccagccaaggt

SEQ ID NO: 181001 - DNA, 30 bp, Artificial Sequence
  Synthetic oligonucleotide
ctcgcgcatccggtgcagggtgtgcaaggt

SEQ ID NO: 181002 - DNA, 30 bp, Artificial Sequence
  Synthetic oligonucleotide
gtaaatgtcgaacaaaaatggtgcgaaggt

SEQ ID NO: 181003 - DNA, 30 bp, Artificial Sequence
  Synthetic oligonucleotide
gtagggaagaaatgtgaagagacggaaggt

SEQ ID NO: 181004 - DNA, 30 bp, Artificial Sequence
  Synthetic oligonucleotide
gccgaatttggttgcagagttcgggaaggt

SEQ ID NO: 181005 - DNA, 30 bp, Artificial Sequence
  Synthetic oligonucleotide
cgatcggtcgcatggtgaggaaatgaaggt

SEQ ID NO: 181006 - DNA, 30 bp, Artificial Sequence
  Synthetic oligonucleotide
gatgatctgcaggtgggctggcatgaaggt

SEQ ID NO: 181007 - DNA, 30 bp, Artificial Sequence
  Synthetic oligonucleotide
tataacaagttacagaacaaaccataaggt

SEQ ID NO: 181008 - DNA, 30 bp, Artificial Sequence
  Synthetic oligonucleotide
gaacggcagtgaagttaggtccgataaggt

SEQ ID NO: 181009 - DNA, 30 bp, Artificial Sequence
  Synthetic oligonucleotide
cgagcacgcagatacgttagcaactaaggt

SEQ ID NO: 181010 - DNA, 30 bp, Artificial Sequence
  Synthetic oligonucleotide
ttacgggattccttttttgatcactaaggt

SEQ ID NO: 181011 - DNA, 30 bp, Artificial Sequence
  Synthetic oligonucleotide
agtaggtatgcacctcggtgaccctaaggt

SEQ ID NO: 181012 - DNA, 30 bp, Artificial Sequence
  Synthetic oligonucleotide
gcaagaagattacgtgtgggtaagtaaggt

SEQ ID NO: 181013 - DNA, 30 bp, Artificial Sequence
  Synthetic oligonucleotide
attcctggaatagacgtaactgagtaaggt

SEQ ID NO: 181014 - DNA, 30 bp, Artificial Sequence
  Synthetic oligonucleotide
tagatgtcgagtcccaaatgtgcgtaaggt

SEQ ID NO: 181015 - DNA, 30 bp, Artificial Sequence
  Synthetic oligonucleotide
gaacaacgctgcggactggactgttaaggt

SEQ ID NO: 181016 - DNA, 30 bp, Artificial Sequence
  Synthetic oligonucleotide
taaaacgaggaataagcacgccgcacaggt

SEQ ID NO: 181017 - DNA, 30 bp, Artificial Sequence
  Synthetic oligonucleotide
tgcggggggtgtagcgcattctgcacaggt

SEQ ID NO: 181018 - DNA, 30 bp, Artificial Sequence
  Synthetic oligonucleotide
ggatagcgtttcgtcaattaattcacaggt

SEQ ID NO: 181019 - DNA, 30 bp, Artificial Sequence
  Synthetic oligonucleotide
cagctagtgcgttgaaggacttagacaggt

SEQ ID NO: 181020 - DNA, 30 bp, Artificial Sequence
  Synthetic oligonucleotide
tgtataggaactaaagaaaacatgacaggt

SEQ ID NO: 181021 - DNA, 30 bp, Artificial Sequence
  Synthetic oligonucleotide
ttctttatgtaaacttgtggatatacaggt

SEQ ID NO: 181022 - DNA, 30 bp, Artificial Sequence
  Synthetic oligonucleotide
tagcggaacgggtatgaacaacctccaggt

SEQ ID NO: 181023 - DNA, 30 bp, Artificial Sequence
  Synthetic oligonucleotide
gaatggatcaaacaaagttgcagggcaggt

SEQ ID NO: 181024 - DNA, 30 bp, Artificial Sequence
  Synthetic oligonucleotide
caatactccgcaggactgtgagaaagaggt

SEQ ID NO: 181025 - DNA, 30 bp, Artificial Sequence
  Synthetic oligonucleotide
gacgacttagagggctaagggagaagaggt

SEQ ID NO: 181026 - DNA, 30 bp, Artificial Sequence
  Synthetic oligonucleotide
gattcgcttgacaacgggataataagaggt

SEQ ID NO: 181027 - DNA, 30 bp, Artificial Sequence
  Synthetic oligonucleotide
gtcaaatccacgatattgtatataagaggt

SEQ ID NO: 181028 - DNA, 30 bp, Artificial Sequence
  Synthetic oligonucleotide
ataaagatgagaagtacaaaaagccgaggt

SEQ ID NO: 181029 - DNA, 30 bp, Artificial Sequence
  Synthetic oligonucleotide
atgagatgggtacccgaaaggcgccgaggt

SEQ ID NO: 181030 - DNA, 30 bp, Artificial Sequence
  Synthetic oligonucleotide
gcaacaccccatgattgaaaagatcgaggt

SEQ ID NO: 181031 - DNA, 30 bp, Artificial Sequence
  Synthetic oligonucleotide
ggaccgggtggaacaatattcggtcgaggt

SEQ ID NO: 181032 - DNA, 30 bp, Artificial Sequence
  Synthetic oligonucleotide
cccatcattctatatctagaaccaggaggt

SEQ ID NO: 181033 - DNA, 30 bp, Artificial Sequence
  Synthetic oligonucleotide
gggatgagaatgacggaattgcgaggaggt

SEQ ID NO: 181034 - DNA, 30 bp, Artificial Sequence
  Synthetic oligonucleotide
gtacaagcaggattgaatggggtaggaggt

SEQ ID NO: 181035 - DNA, 30 bp, Artificial Sequence
  Synthetic oligonucleotide
aagatgacgtatgaatcacggaagggaggt

SEQ ID NO: 181036 - DNA, 30 bp, Artificial Sequence
  Synthetic oligonucleotide
gaacaaaatggtgtaagtcaacggggaggt

SEQ ID NO: 181037 - DNA, 30 bp, Artificial Sequence
  Synthetic oligonucleotide
ctcggccggatttggtaagctgatggaggt

SEQ ID NO: 181038 - DNA, 30 bp, Artificial Sequence
  Synthetic oligonucleotide
attccagggtaaagaaaagagattggaggt

SEQ ID NO: 181039 - DNA, 30 bp, Artificial Sequence
  Synthetic oligonucleotide
tgcgatactatttctcgagattcatgaggt

SEQ ID NO: 181040 - DNA, 30 bp, Artificial Sequence
  Synthetic oligonucleotide
cataacgaacgttatgcctcacgttgaggt

SEQ ID NO: 181041 - DNA, 30 bp, Artificial Sequence
  Synthetic oligonucleotide
ccagttcggcaatgggaaaacgcgataggt

SEQ ID NO: 181042 - DNA, 30 bp, Artificial Sequence
  Synthetic oligonucleotide
cttgtatataagattctagaatggataggt

SEQ ID NO: 181043 - DNA, 30 bp, Artificial Sequence
  Synthetic oligonucleotide
agagccgaaggaatgttatcgtaactaggt

SEQ ID NO: 181044 - DNA, 30 bp, Artificial Sequence
  Synthetic oligonucleotide
taacagacccttcgatctaaagcactaggt

SEQ ID NO: 181045 - DNA, 30 bp, Artificial Sequence
  Synthetic oligonucleotide
gccgagccgacacatgatgatggactaggt

SEQ ID NO: 181046 - DNA, 30 bp, Artificial Sequence
  Synthetic oligonucleotide
cgataatcacgtataatcggacacctaggt

SEQ ID NO: 181047 - DNA, 30 bp, Artificial Sequence
  Synthetic oligonucleotide
cggatcttatcgcacatcagaggtctaggt

SEQ ID NO: 181048 - DNA, 30 bp, Artificial Sequence
  Synthetic oligonucleotide
ctcgtgatgaacacagatatggaagtaggt

SEQ ID NO: 181049 - DNA, 30 bp, Artificial Sequence
  Synthetic oligonucleotide
tcaaacgaaacaggtttttttggcgtaggt

SEQ ID NO: 181050 - DNA, 30 bp, Artificial Sequence
  Synthetic oligonucleotide
gccgaagggggttcccagctagaattaggt

SEQ ID NO: 181051 - DNA, 30 bp, Artificial Sequence
  Synthetic oligonucleotide
tggtcagtgtgacctgtggggatattaggt

SEQ ID NO: 181052 - DNA, 30 bp, Artificial Sequence
  Synthetic oligonucleotide
accaagttacggagcgaaagagacttaggt

SEQ ID NO: 181053 - DNA, 30 bp, Artificial Sequence
  Synthetic oligonucleotide
caacggtaacatagaatgtcctggttaggt

SEQ ID NO: 181054 - DNA, 30 bp, Artificial Sequence
  Synthetic oligonucleotide
tatcgcccgcagttatcggaggtgttaggt

SEQ ID NO: 181055 - DNA, 30 bp, Artificial Sequence
  Synthetic oligonucleotide
gggtacgtttcaagtgtaactcgcaacggt

SEQ ID NO: 181056 - DNA, 30 bp, Artificial Sequence
  Synthetic oligonucleotide
agggtcgtgcgtcgcaacggtcgcaacggt

SEQ ID NO: 181057 - DNA, 30 bp, Artificial Sequence
  Synthetic oligonucleotide
ggagtgtgaaatctgtggctacataacggt

SEQ ID NO: 181058 - DNA, 30 bp, Artificial Sequence
  Synthetic oligonucleotide
agacagggtggggaatcatatgctaacggt

SEQ ID NO: 181059 - DNA, 30 bp, Artificial Sequence
  Synthetic oligonucleotide
ctgctagtcaagaatggtaactgtaacggt

SEQ ID NO: 181060 - DNA, 30 bp, Artificial Sequence
  Synthetic oligonucleotide
gtgagagagggaataaatgcgtttcacggt

SEQ ID NO: 181061 - DNA, 30 bp, Artificial Sequence
  Synthetic oligonucleotide
atccgtagctaagatacgataatcgacggt

SEQ ID NO: 181062 - DNA, 30 bp, Artificial Sequence
  Synthetic oligonucleotide
agggaagttgcaaacatatggtatgacggt

SEQ ID NO: 181063 - DNA, 30 bp, Artificial Sequence
  Synthetic oligonucleotide
tagaaatttggatcaagaggatcgtacggt

SEQ ID NO: 181064 - DNA, 30 bp, Artificial Sequence
  Synthetic oligonucleotide
gggaaacaacggcacataacgttgtacggt

SEQ ID NO: 181065 - DNA, 30 bp, Artificial Sequence
  Synthetic oligonucleotide
gctcgctatacacaagggagatcaaccggt

SEQ ID NO: 181066 - DNA, 30 bp, Artificial Sequence
  Synthetic oligonucleotide
tctagtgttggacgcgtcgactcaaccggt

SEQ ID NO: 181067 - DNA, 30 bp, Artificial Sequence
  Synthetic oligonucleotide
tgataagcatgacgacaaggtaaccccggt

SEQ ID NO: 181068 - DNA, 30 bp, Artificial Sequence
  Synthetic oligonucleotide
tcaggggcaaatacgcgagctcgcgccggt

SEQ ID NO: 181069 - DNA, 30 bp, Artificial Sequence
  Synthetic oligonucleotide
atatcgagggaatgtgagagtcaatccggt

SEQ ID NO: 181070 - DNA, 30 bp, Artificial Sequence
  Synthetic oligonucleotide
gggacatctgcgcattgtgtacactccggt

SEQ ID NO: 181071 - DNA, 30 bp, Artificial Sequence
  Synthetic oligonucleotide
tgcgtccaatacatatcactcaggtccggt

SEQ ID NO: 181072 - DNA, 30 bp, Artificial Sequence
  Synthetic oligonucleotide
ggaggttgtgatgaaagtaacgtgtccggt

SEQ ID NO: 181073 - DNA, 30 bp, Artificial Sequence
  Synthetic oligonucleotide
ccgcaatggtaaggcttcgaagccagcggt

SEQ ID NO: 181074 - DNA, 30 bp, Artificial Sequence
  Synthetic oligonucleotide
ttctggccaagagacgttggggccagcggt

SEQ ID NO: 181075 - DNA, 30 bp, Artificial Sequence
  Synthetic oligonucleotide
ggcgcacaaaactcaaattttaaacgcggt

SEQ ID NO: 181076 - DNA, 30 bp, Artificial Sequence
  Synthetic oligonucleotide
agttagtagtctaaaaatggtcggcgcggt

SEQ ID NO: 181077 - DNA, 30 bp, Artificial Sequence
  Synthetic oligonucleotide
acaagggagtattcgcagctttatcgcggt

SEQ ID NO: 181078 - DNA, 30 bp, Artificial Sequence
  Synthetic oligonucleotide
aggtaaaaccttcggggtttaggtcgcggt

SEQ ID NO: 181079 - DNA, 30 bp, Artificial Sequence
  Synthetic oligonucleotide
tctgactgggggaccgggtatcttcgcggt

SEQ ID NO: 181080 - DNA, 30 bp, Artificial Sequence
  Synthetic oligonucleotide
gggaatgcaaggttttacggggaaggcggt

SEQ ID NO: 181081 - DNA, 30 bp, Artificial Sequence
  Synthetic oligonucleotide
cgcgtgcaaatatcatttcagaggggcggt

SEQ ID NO: 181082 - DNA, 30 bp, Artificial Sequence
  Synthetic oligonucleotide
cgccattattggtaaatttgtgctggcggt

SEQ ID NO: 181083 - DNA, 30 bp, Artificial Sequence
  Synthetic oligonucleotide
caacctgaggacacatcgtacgtatgcggt

SEQ ID NO: 181084 - DNA, 30 bp, Artificial Sequence
  Synthetic oligonucleotide
acaggacttccataagctagtcattgcggt

SEQ ID NO: 181085 - DNA, 30 bp, Artificial Sequence
  Synthetic oligonucleotide
ggcgcgtcgagaagagggcgtccttgcggt

SEQ ID NO: 181086 - DNA, 30 bp, Artificial Sequence
  Synthetic oligonucleotide
tttaagaaacatagtcaaaacgtttgcggt

SEQ ID NO: 181087 - DNA, 30 bp, Artificial Sequence
  Synthetic oligonucleotide
gcggttacgcacgttaagtcgaacatcggt

SEQ ID NO: 181088 - DNA, 30 bp, Artificial Sequence
  Synthetic oligonucleotide
gaacagatagtggggctgttaaccatcggt

SEQ ID NO: 181089 - DNA, 30 bp, Artificial Sequence
  Synthetic oligonucleotide
cgccccataggtcccctccgcaagatcggt

SEQ ID NO: 181090 - DNA, 30 bp, Artificial Sequence
  Synthetic oligonucleotide
tgcgaccatttacataaatattcgatcggt

SEQ ID NO: 181091 - DNA, 30 bp, Artificial Sequence
  Synthetic oligonucleotide
aaataagacatgagtcactagcctatcggt

SEQ ID NO: 181092 - DNA, 30 bp, Artificial Sequence
  Synthetic oligonucleotide
acgttataggtgtctgtcgatggtatcggt

SEQ ID NO: 181093 - DNA, 30 bp, Artificial Sequence
  Synthetic oligonucleotide
tgtttggaggtgatgtcgattgggctcggt

SEQ ID NO: 181094 - DNA, 30 bp, Artificial Sequence
  Synthetic oligonucleotide
gaagtccgaattcttctatcgactctcggt

SEQ ID NO: 181095 - DNA, 30 bp, Artificial Sequence
  Synthetic oligonucleotide
agagattctgaagagaatgggaacgtcggt

SEQ ID NO: 181096 - DNA, 30 bp, Artificial Sequence
  Synthetic oligonucleotide
tcggaggatactagcgttctgagcttcggt

SEQ ID NO: 181097 - DNA, 29 bp, Artificial Sequence
  Synthetic oligonucleotide
taacgacgcgaaggcactagctgttcggt

SEQ ID NO: 181098 - DNA, 30 bp, Artificial Sequence
  Synthetic oligonucleotide
ctatccatgttcggaatgggagtgttcggt

SEQ ID NO: 181099 - DNA, 30 bp, Artificial Sequence
  Synthetic oligonucleotide
gcatcaaaggtcctgttaacgtgaaagggt

SEQ ID NO: 181100 - DNA, 30 bp, Artificial Sequence
  Synthetic oligonucleotide
atcagtggttaagcatgccctgggaagggt

SEQ ID NO: 181101 - DNA, 30 bp, Artificial Sequence
  Synthetic oligonucleotide
gctagtcagggcttcccctccattaagggt

SEQ ID NO: 181102 - DNA, 30 bp, Artificial Sequence
  Synthetic oligonucleotide
agaatggcctgtcgcgttgagtaccagggt

SEQ ID NO: 181103 - DNA, 30 bp, Artificial Sequence
  Synthetic oligonucleotide
ggtgtggctaccatgccgaaagagcagggt

SEQ ID NO: 181104 - DNA, 30 bp, Artificial Sequence
  Synthetic oligonucleotide
cgagttgtgtatgtaaaaagccggcagggt

SEQ ID NO: 181105 - DNA, 30 bp, Artificial Sequence
  Synthetic oligonucleotide
gtaaggctaatcctcccaagagcagagggt

SEQ ID NO: 181106 - DNA, 30 bp, Artificial Sequence
  Synthetic oligonucleotide
acgtggccctctagttaacacagagagggt

SEQ ID NO: 181107 - DNA, 30 bp, Artificial Sequence
  Synthetic oligonucleotide
ggtgaggttgcagcaaatgtttatgagggt

SEQ ID NO: 181108 - DNA, 30 bp, Artificial Sequence
  Synthetic oligonucleotide
agaacacttgcacagttcgggtgtgagggt

SEQ ID NO: 181109 - DNA, 30 bp, Artificial Sequence
  Synthetic oligonucleotide
agcacatgttgggcgtacccatttgagggt

SEQ ID NO: 181110 - DNA, 30 bp, Artificial Sequence
  Synthetic oligonucleotide
catgtacaatccctgagccataactagggt

SEQ ID NO: 181111 - DNA, 30 bp, Artificial Sequence
  Synthetic oligonucleotide
tcgttatccacactatagagtaactagggt

SEQ ID NO: 181112 - DNA, 30 bp, Artificial Sequence
  Synthetic oligonucleotide
atcctcaagctcattacttatgaaacgggt

SEQ ID NO: 181113 - DNA, 30 bp, Artificial Sequence
  Synthetic oligonucleotide
gggagaaaaccactctaacttagaacgggt

SEQ ID NO: 181114 - DNA, 30 bp, Artificial Sequence
  Synthetic oligonucleotide
atagggttatcgtggacttatatcacgggt

SEQ ID NO: 181115 - DNA, 30 bp, Artificial Sequence
  Synthetic oligonucleotide
gcgttgcgaatgttcctcgattatacgggt

SEQ ID NO: 181116 - DNA, 30 bp, Artificial Sequence
  Synthetic oligonucleotide
gtagcatgaaaattaacaacaagaccgggt

SEQ ID NO: 181117 - DNA, 30 bp, Artificial Sequence
  Synthetic oligonucleotide
ggggcagtcactataacacggctaccgggt

SEQ ID NO: 181118 - DNA, 30 bp, Artificial Sequence
  Synthetic oligonucleotide
aacgttgcacgtaaaaagacgctgccgggt

SEQ ID NO: 181119 - DNA, 31 bp, Artificial Sequence
  Synthetic oligonucleotide
aagtggtatggtagaacctggcattccgggt

SEQ ID NO: 181120 - DNA, 30 bp, Artificial Sequence
  Synthetic oligonucleotide
aggcgtggtgatggcggttccgccgcgggt

SEQ ID NO: 181121 - DNA, 30 bp, Artificial Sequence
  Synthetic oligonucleotide
atttccgagtggatactgcggacggcgggt

SEQ ID NO: 181122 - DNA, 30 bp, Artificial Sequence
  Synthetic oligonucleotide
aaaagaagcctgaacacgtcgttggcgggt

SEQ ID NO: 181123 - DNA, 30 bp, Artificial Sequence
  Synthetic oligonucleotide
gtcgctgagtaatggctgccccctgcgggt

SEQ ID NO: 181124 - DNA, 30 bp, Artificial Sequence
  Synthetic oligonucleotide
gcacagggggccatgagctcaggtgcgggt

SEQ ID NO: 181125 - DNA, 30 bp, Artificial Sequence
  Synthetic oligonucleotide
ggacccgacaggcatcctactaactcgggt

SEQ ID NO: 181126 - DNA, 30 bp, Artificial Sequence
  Synthetic oligonucleotide
tcaaagtaaagggtgcaccaaaagtcgggt

SEQ ID NO: 181127 - DNA, 30 bp, Artificial Sequence
  Synthetic oligonucleotide
gcccggagtaaacgtgaaccggcgtcgggt

SEQ ID NO: 181128 - DNA, 30 bp, Artificial Sequence
  Synthetic oligonucleotide
gcttcgctgtcgtcaagggtccattcgggt

SEQ ID NO: 181129 - DNA, 30 bp, Artificial Sequence
  Synthetic oligonucleotide
gggttaaaaaagtggtgtcccacaaggggt

SEQ ID NO: 181130 - DNA, 30 bp, Artificial Sequence
  Synthetic oligonucleotide
aaccacagcttcgacagggcacacaggggt

SEQ ID NO: 181131 - DNA, 30 bp, Artificial Sequence
  Synthetic oligonucleotide
atagatcaagctataacggatggcaggggt

SEQ ID NO: 181132 - DNA, 35 bp, Artificial Sequence
  Synthetic oligonucleotide
atagagcgtgcgggaggcgcggaatgccccggggt

SEQ ID NO: 181133 - DNA, 30 bp, Artificial Sequence
  Synthetic oligonucleotide
acgtgaagtcgggatgaaaggcagcggggt

SEQ ID NO: 181134 - DNA, 30 bp, Artificial Sequence
  Synthetic oligonucleotide
aagcattgctgtaaagggaagaatcggggt

SEQ ID NO: 181135 - DNA, 30 bp, Artificial Sequence
  Synthetic oligonucleotide
gggcactgaaagacgagggcaattcggggt

SEQ ID NO: 181136 - DNA, 30 bp, Artificial Sequence
  Synthetic oligonucleotide
acgtcgggccgaaagaggtttacgtggggt

SEQ ID NO: 181137 - DNA, 30 bp, Artificial Sequence
  Synthetic oligonucleotide
caagcgtttaccgttaagtagtcaatgggt

SEQ ID NO: 181138 - DNA, 30 bp, Artificial Sequence
  Synthetic oligonucleotide
taaacagagcacgactcattctagatgggt

SEQ ID NO: 181139 - DNA, 30 bp, Artificial Sequence
  Synthetic oligonucleotide
tgtgacaaaaatggcttgtgcgatatgggt

SEQ ID NO: 181140 - DNA, 30 bp, Artificial Sequence
  Synthetic oligonucleotide
gccagtagaagcgctatttacactatgggt

SEQ ID NO: 181141 - DNA, 30 bp, Artificial Sequence
  Synthetic oligonucleotide
gaccatgagtctattaggcgggctatgggt

SEQ ID NO: 181142 - DNA, 30 bp, Artificial Sequence
  Synthetic oligonucleotide
atcgtgaggcataaacaatgaggactgggt

SEQ ID NO: 181143 - DNA, 30 bp, Artificial Sequence
  Synthetic oligonucleotide
atcatctggtttgtgtacagttcgctgggt

SEQ ID NO: 181144 - DNA, 30 bp, Artificial Sequence
  Synthetic oligonucleotide
ttaaaaaatgtgttacacggttcgctgggt

SEQ ID NO: 181145 - DNA, 30 bp, Artificial Sequence
  Synthetic oligonucleotide
agtacgggcctgacaacacaccaagtgggt

SEQ ID NO: 181146 - DNA, 30 bp, Artificial Sequence
  Synthetic oligonucleotide
cacgctcgtttcaggaatcctaacgtgggt

SEQ ID NO: 181147 - DNA, 31 bp, Artificial Sequence
  Synthetic oligonucleotide
ctacggaccacgattgccaatcaaggtgggt

SEQ ID NO: 181148 - DNA, 30 bp, Artificial Sequence
  Synthetic oligonucleotide
gactaagttgcaaactacggccctgtgggt

SEQ ID NO: 181149 - DNA, 30 bp, Artificial Sequence
  Synthetic oligonucleotide
cggatgaaatttgagtacaaattattgggt

SEQ ID NO: 181150 - DNA, 30 bp, Artificial Sequence
  Synthetic oligonucleotide
atgctcgtctaggtatacgatgggttgggt

SEQ ID NO: 181151 - DNA, 30 bp, Artificial Sequence
  Synthetic oligonucleotide
tttgcaccggagcccgagaagtacaatggt

SEQ ID NO: 181152 - DNA, 30 bp, Artificial Sequence
  Synthetic oligonucleotide
taccacgggctaaccaaagcaatcaatggt

SEQ ID NO: 181153 - DNA, 30 bp, Artificial Sequence
  Synthetic oligonucleotide
ggcgacttgccattcatacacgctaatggt

SEQ ID NO: 181154 - DNA, 28 bp, Artificial Sequence
  Synthetic oligonucleotide
tggaaggaaatagagttacacacatggt

SEQ ID NO: 181155 - DNA, 30 bp, Artificial Sequence
  Synthetic oligonucleotide
ttcatgcggaatcacggtcgcgggcatggt

SEQ ID NO: 181156 - DNA, 30 bp, Artificial Sequence
  Synthetic oligonucleotide
gaatggagttggcggcgcgcgattcatggt

SEQ ID NO: 181157 - DNA, 30 bp, Artificial Sequence
  Synthetic oligonucleotide
gggaggctcaacgacacatggacggatggt

SEQ ID NO: 181158 - DNA, 30 bp, Artificial Sequence
  Synthetic oligonucleotide
gtaagcaattcgctgatccggaatgatggt

SEQ ID NO: 181159 - DNA, 31 bp, Artificial Sequence
  Synthetic oligonucleotide
gtaacacgtgacgtaacgcgaggatgatggt

SEQ ID NO: 181160 - DNA, 30 bp, Artificial Sequence
  Synthetic oligonucleotide
cgaccggttggcggacttggggttgatggt

SEQ ID NO: 181161 - DNA, 30 bp, Artificial Sequence
  Synthetic oligonucleotide
cgagcatcaagtcattcttaggggtatggt

SEQ ID NO: 181162 - DNA, 30 bp, Artificial Sequence
  Synthetic oligonucleotide
ggccaaaactggtaccgtgtgatgtatggt

SEQ ID NO: 181163 - DNA, 30 bp, Artificial Sequence
  Synthetic oligonucleotide
gctaatatgtggcacctaagcgaaactggt

SEQ ID NO: 181164 - DNA, 30 bp, Artificial Sequence
  Synthetic oligonucleotide
agggagccctacacggtaaacgtaactggt

SEQ ID NO: 181165 - DNA, 30 bp, Artificial Sequence
  Synthetic oligonucleotide
gtaggtcaagtcggcgcacaggccactggt

SEQ ID NO: 181166 - DNA, 30 bp, Artificial Sequence
  Synthetic oligonucleotide
ctgagctggttgcctagcgtagggactggt

SEQ ID NO: 181167 - DNA, 30 bp, Artificial Sequence
  Synthetic oligonucleotide
aaatataagcaggatagtcgatgtactggt

SEQ ID NO: 181168 - DNA, 30 bp, Artificial Sequence
  Synthetic oligonucleotide
agtaggtgtcaagcgggtagttctgctggt

SEQ ID NO: 181169 - DNA, 30 bp, Artificial Sequence
  Synthetic oligonucleotide
gctctcattagaggagattgatagtctggt

SEQ ID NO: 181170 - DNA, 30 bp, Artificial Sequence
  Synthetic oligonucleotide
attaatatctgcgcaattgtggcgtctggt

SEQ ID NO: 181171 - DNA, 30 bp, Artificial Sequence
  Synthetic oligonucleotide
gcctgggccaacaaggcaaagaggtctggt

SEQ ID NO: 181172 - DNA, 30 bp, Artificial Sequence
  Synthetic oligonucleotide
gacagccttaataggcgactggaaagtggt

SEQ ID NO: 181173 - DNA, 30 bp, Artificial Sequence
  Synthetic oligonucleotide
ttgaagttctgcgacgtaaccctaagtggt

SEQ ID NO: 181174 - DNA, 35 bp, Artificial Sequence
  Synthetic oligonucleotide
cgatgaaagttcggggtggtgtaattactagtggt

SEQ ID NO: 181175 - DNA, 30 bp, Artificial Sequence
  Synthetic oligonucleotide
tatactgcgaacaaggggtcagctagtggt

SEQ ID NO: 181176 - DNA, 30 bp, Artificial Sequence
  Synthetic oligonucleotide
ttacgagtagggtattggttaaggggtggt

SEQ ID NO: 181177 - DNA, 30 bp, Artificial Sequence
  Synthetic oligonucleotide
tggggttcacaaaactgacgccctggtggt

SEQ ID NO: 181178 - DNA, 30 bp, Artificial Sequence
  Synthetic oligonucleotide
cggcgttaccctgaatgagacgttggtggt

SEQ ID NO: 181179 - DNA, 30 bp, Artificial Sequence
  Synthetic oligonucleotide
gccagtggactataccagataatatgtggt

SEQ ID NO: 181180 - DNA, 30 bp, Artificial Sequence
  Synthetic oligonucleotide
taaagatcgccgaaatattgaaagtgtggt

SEQ ID NO: 181181 - DNA, 30 bp, Artificial Sequence
  Synthetic oligonucleotide
cttgaatagactttgtatcatcagtgtggt

SEQ ID NO: 181182 - DNA, 30 bp, Artificial Sequence
  Synthetic oligonucleotide
attgacgatcctgggggaggctagtgtggt

SEQ ID NO: 181183 - DNA, 30 bp, Artificial Sequence
  Synthetic oligonucleotide
ggaggcaaggcggcaccgcttgtttgtggt

SEQ ID NO: 181184 - DNA, 30 bp, Artificial Sequence
  Synthetic oligonucleotide
ggatgttgtcatcccaacacactacttggt

SEQ ID NO: 181185 - DNA, 30 bp, Artificial Sequence
  Synthetic oligonucleotide
tctccgaaataaggagaccaaattcttggt

SEQ ID NO: 181186 - DNA, 30 bp, Artificial Sequence
  Synthetic oligonucleotide
tacctcccgctacgataatggtgtgttggt

SEQ ID NO: 181187 - DNA, 30 bp, Artificial Sequence
  Synthetic oligonucleotide
ccggggtgagacctttaacgctaatttggt

SEQ ID NO: 181188 - DNA, 30 bp, Artificial Sequence
  Synthetic oligonucleotide
gatataagccagcgtgttgattagtttggt

SEQ ID NO: 181189 - DNA, 30 bp, Artificial Sequence
  Synthetic oligonucleotide
ggaggctcaaccgggtcggcgtaaaaatgt

SEQ ID NO: 181190 - DNA, 30 bp, Artificial Sequence
  Synthetic oligonucleotide
tgaggtcggcgtgccctcagtacaaaatgt

SEQ ID NO: 181191 - DNA, 30 bp, Artificial Sequence
  Synthetic oligonucleotide
cgggagcttctgaagggtatgtacaaatgt

SEQ ID NO: 181192 - DNA, 30 bp, Artificial Sequence
  Synthetic oligonucleotide
gccagggtaggtgggtttcttcccaaatgt

SEQ ID NO: 181193 - DNA, 30 bp, Artificial Sequence
  Synthetic oligonucleotide
gagggatcgaagtggtgactgatcaaatgt

SEQ ID NO: 181194 - DNA, 30 bp, Artificial Sequence
  Synthetic oligonucleotide
gtaggccacaaacaaaattatatgaaatgt

SEQ ID NO: 181195 - DNA, 30 bp, Artificial Sequence
  Synthetic oligonucleotide
ggggccaaaagatgaacgtcgtataaatgt

SEQ ID NO: 181196 - DNA, 30 bp, Artificial Sequence
  Synthetic oligonucleotide
tgacggacagacgtgaaagggactaaatgt

SEQ ID NO: 181197 - DNA, 30 bp, Artificial Sequence
  Synthetic oligonucleotide
gaggggtgctgaacaagattaacacaatgt

SEQ ID NO: 181198 - DNA, 30 bp, Artificial Sequence
  Synthetic oligonucleotide
ttgctagtatgggatccgtgttcacaatgt

SEQ ID NO: 181199 - DNA, 30 bp, Artificial Sequence
  Synthetic oligonucleotide
agaagtactagcatataaagaagacaatgt

SEQ ID NO: 181200 - DNA, 30 bp, Artificial Sequence
  Synthetic oligonucleotide
gcgcgcttatcctaagtcggttaccaatgt

SEQ ID NO: 181201 - DNA, 30 bp, Artificial Sequence
  Synthetic oligonucleotide
tatacagatgtcgatttctaccctcaatgt

SEQ ID NO: 181202 - DNA, 30 bp, Artificial Sequence
  Synthetic oligonucleotide
acacccttcaggaagtggtttaaagaatgt

SEQ ID NO: 181203 - DNA, 30 bp, Artificial Sequence
  Synthetic oligonucleotide
tgcgacgaaggcttcattaggcaagaatgt

SEQ ID NO: 181204 - DNA, 30 bp, Artificial Sequence
  Synthetic oligonucleotide
caaattcgcctcagattatcgcccgaatgt

SEQ ID NO: 181205 - DNA, 30 bp, Artificial Sequence
  Synthetic oligonucleotide
ccacagcgtgtgcaagtacgtggcgaatgt

SEQ ID NO: 181206 - DNA, 30 bp, Artificial Sequence
  Synthetic oligonucleotide
tgtattcgggaaaacaccgggcaggaatgt

SEQ ID NO: 181207 - DNA, 30 bp, Artificial Sequence
  Synthetic oligonucleotide
gactccggttcgctcgacaaagtcacatgt

SEQ ID NO: 181208 - DNA, 31 bp, Artificial Sequence
  Synthetic oligonucleotide
agtccgcagggcagactcggtatatacatgt

SEQ ID NO: 181209 - DNA, 30 bp, Artificial Sequence
  Synthetic oligonucleotide
gatgcttacatgtataaagcgaaaccatgt

SEQ ID NO: 181210 - DNA, 30 bp, Artificial Sequence
  Synthetic oligonucleotide
ttgaatcgaagtgctgctttccaaccatgt

SEQ ID NO: 181211 - DNA, 30 bp, Artificial Sequence
  Synthetic oligonucleotide
acactaatctacgttcgtaggtaaccatgt

SEQ ID NO: 181212 - DNA, 30 bp, Artificial Sequence
  Synthetic oligonucleotide
ggtactaaagctcgagtggctcacccatgt

SEQ ID NO: 181213 - DNA, 30 bp, Artificial Sequence
  Synthetic oligonucleotide
ccgtagtttcgagacacagatagtccatgt

SEQ ID NO: 181214 - DNA, 30 bp, Artificial Sequence
  Synthetic oligonucleotide
cgcgctgatggctaaggtgccaaagcatgt

SEQ ID NO: 181215 - DNA, 30 bp, Artificial Sequence
  Synthetic oligonucleotide
aggaaatcgtagctatatatctaagcatgt

SEQ ID NO: 181216 - DNA, 30 bp, Artificial Sequence
  Synthetic oligonucleotide
cctatacacaatgaccgactaggcgcatgt

SEQ ID NO: 181217 - DNA, 30 bp, Artificial Sequence
  Synthetic oligonucleotide
atatagctagacgcatggggccgggcatgt

SEQ ID NO: 181218 - DNA, 30 bp, Artificial Sequence
  Synthetic oligonucleotide
ggtctatgtaaatcccttggcgtggcatgt

SEQ ID NO: 181219 - DNA, 30 bp, Artificial Sequence
  Synthetic oligonucleotide
gccttgggaaccccgatatattacagatgt

SEQ ID NO: 181220 - DNA, 30 bp, Artificial Sequence
  Synthetic oligonucleotide
gctatggggggaccgacatcagccagatgt

SEQ ID NO: 181221 - DNA, 30 bp, Artificial Sequence
  Synthetic oligonucleotide
gcaactaagactattgacataggcagatgt

SEQ ID NO: 181222 - DNA, 30 bp, Artificial Sequence
  Synthetic oligonucleotide
tgaagagaaagcttagttgacaagagatgt

SEQ ID NO: 181223 - DNA, 30 bp, Artificial Sequence
  Synthetic oligonucleotide
atcccaaaaccctgcgtagaaaaacgatgt

SEQ ID NO: 181224 - DNA, 30 bp, Artificial Sequence
  Synthetic oligonucleotide
tgtccgtccgtccttaattgacaccgatgt

SEQ ID NO: 181225 - DNA, 30 bp, Artificial Sequence
  Synthetic oligonucleotide
aagaataggcatattttattaccgcgatgt

SEQ ID NO: 181226 - DNA, 30 bp, Artificial Sequence
  Synthetic oligonucleotide
actaggccactaaagagggaagaaggatgt

SEQ ID NO: 181227 - DNA, 30 bp, Artificial Sequence
  Synthetic oligonucleotide
aaatgcgtcaggtgttcgaagcgaggatgt

SEQ ID NO: 181228 - DNA, 30 bp, Artificial Sequence
  Synthetic oligonucleotide
acgggactcttgggggaccggaggggatgt

SEQ ID NO: 181229 - DNA, 30 bp, Artificial Sequence
  Synthetic oligonucleotide
agcgtcgcatgcataactagatcatgatgt

SEQ ID NO: 181230 - DNA, 30 bp, Artificial Sequence
  Synthetic oligonucleotide
cttgcgaacgtaccattgaagagatgatgt

SEQ ID NO: 181231 - DNA, 30 bp, Artificial Sequence
  Synthetic oligonucleotide
ctagactggttttggtcagggagctgatgt

SEQ ID NO: 181232 - DNA, 30 bp, Artificial Sequence
  Synthetic oligonucleotide
gtggagtaatgtagagccgaatgctgatgt

SEQ ID NO: 181233 - DNA, 30 bp, Artificial Sequence
  Synthetic oligonucleotide
atcgcgtactccacctaacgtttgtgatgt

SEQ ID NO: 181234 - DNA, 30 bp, Artificial Sequence
  Synthetic oligonucleotide
cggggctataatgatgcatagatttgatgt

SEQ ID NO: 181235 - DNA, 30 bp, Artificial Sequence
  Synthetic oligonucleotide
tgcgcgggtcgagccagctgcgcaatatgt

SEQ ID NO: 181236 - DNA, 30 bp, Artificial Sequence
  Synthetic oligonucleotide
ccttgaaaacggtcgagtatgagaatatgt

SEQ ID NO: 181237 - DNA, 30 bp, Artificial Sequence
  Synthetic oligonucleotide
caagcgagtacgccgcgggactgtgtatgt

SEQ ID NO: 181238 - DNA, 30 bp, Artificial Sequence
  Synthetic oligonucleotide
ggtgtggatctaggggtgtgattgttatgt

SEQ ID NO: 181239 - DNA, 30 bp, Artificial Sequence
  Synthetic oligonucleotide
gtggggaggcccatctgtgatattttatgt

SEQ ID NO: 181240 - DNA, 30 bp, Artificial Sequence
  Synthetic oligonucleotide
atggggcaaaactggatgacgtcgaactgt

SEQ ID NO: 181241 - DNA, 30 bp, Artificial Sequence
  Synthetic oligonucleotide
tgcatacttgagcgtgtcgatagtaactgt

SEQ ID NO: 181242 - DNA, 30 bp, Artificial Sequence
  Synthetic oligonucleotide
cgtagaataaacacccttgagaaccactgt

SEQ ID NO: 181243 - DNA, 30 bp, Artificial Sequence
  Synthetic oligonucleotide
tcgggggatcatacgagatcgacccactgt

SEQ ID NO: 181244 - DNA, 30 bp, Artificial Sequence
  Synthetic oligonucleotide
agctaatcaaggtccgagactccgcactgt

SEQ ID NO: 181245 - DNA, 30 bp, Artificial Sequence
  Synthetic oligonucleotide
tcgcaaatgtaaaagtataagcacgactgt

SEQ ID NO: 181246 - DNA, 30 bp, Artificial Sequence
  Synthetic oligonucleotide
tcctcgacaggttgtcggacggaggactgt

SEQ ID NO: 181247 - DNA, 29 bp, Artificial Sequence
  Synthetic oligonucleotide
ctatacctcctctgatatcaacgtactgt

SEQ ID NO: 181248 - DNA, 30 bp, Artificial Sequence
  Synthetic oligonucleotide
gcgattatgtggcgggaggcgaggtactgt

SEQ ID NO: 181249 - DNA, 30 bp, Artificial Sequence
  Synthetic oligonucleotide
tttgggctggtgctaactgggtcaacctgt

SEQ ID NO: 181250 - DNA, 30 bp, Artificial Sequence
  Synthetic oligonucleotide
ttcgacagcaaaaaaagagactacacctgt

SEQ ID NO: 181251 - DNA, 30 bp, Artificial Sequence
  Synthetic oligonucleotide
acgaagagcgcataattcaaatgcccctgt

SEQ ID NO: 181252 - DNA, 30 bp, Artificial Sequence
  Synthetic oligonucleotide
tccaacatttagaaatcagggacggcctgt

SEQ ID NO: 181253 - DNA, 30 bp, Artificial Sequence
  Synthetic oligonucleotide
tatgagcttcagttctctgcgcaatcctgt

SEQ ID NO: 181254 - DNA, 30 bp, Artificial Sequence
  Synthetic oligonucleotide
caatgcgggcagcatgcgcacagctcctgt

SEQ ID NO: 181255 - DNA, 30 bp, Artificial Sequence
  Synthetic oligonucleotide
tcaggtatcttggcagaactttaaagctgt

SEQ ID NO: 181256 - DNA, 30 bp, Artificial Sequence
  Synthetic oligonucleotide
atatgttcacaatactctaagatcagctgt

SEQ ID NO: 181257 - DNA, 30 bp, Artificial Sequence
  Synthetic oligonucleotide
aaatctggttaaacggagttgaagagctgt

SEQ ID NO: 181258 - DNA, 30 bp, Artificial Sequence
  Synthetic oligonucleotide
gatagccacaatttccactagagtagctgt

SEQ ID NO: 181259 - DNA, 30 bp, Artificial Sequence
  Synthetic oligonucleotide
ggcgaatctcactaatcttctgtcggctgt

SEQ ID NO: 181260 - DNA, 30 bp, Artificial Sequence
  Synthetic oligonucleotide
gaaggtagtctgtagtcgtatgggggctgt

SEQ ID NO: 181261 - DNA, 30 bp, Artificial Sequence
  Synthetic oligonucleotide
atgacgcgcatagtgcaataaattggctgt

SEQ ID NO: 181262 - DNA, 30 bp, Artificial Sequence
  Synthetic oligonucleotide
gccatcggagaatcaggacccattggctgt

SEQ ID NO: 181263 - DNA, 30 bp, Artificial Sequence
  Synthetic oligonucleotide
ccgaaccaatctcaaatccagcattgctgt

SEQ ID NO: 181264 - DNA, 30 bp, Artificial Sequence
  Synthetic oligonucleotide
tgtcaggaacttatgaatcgcccttgctgt

SEQ ID NO: 181265 - DNA, 30 bp, Artificial Sequence
  Synthetic oligonucleotide
cagcattgctgaaaacattggccttgctgt

SEQ ID NO: 181266 - DNA, 30 bp, Artificial Sequence
  Synthetic oligonucleotide
caccttaccgctcctcaagtctgttgctgt

SEQ ID NO: 181267 - DNA, 30 bp, Artificial Sequence
  Synthetic oligonucleotide
gggccaagtaattgcatcgcgagtatctgt

SEQ ID NO: 181268 - DNA, 30 bp, Artificial Sequence
  Synthetic oligonucleotide
aggccggaccattatcgcgtcctactctgt

SEQ ID NO: 181269 - DNA, 30 bp, Artificial Sequence
  Synthetic oligonucleotide
ctcgtcgcttaatcacgtccatgcctctgt

SEQ ID NO: 181270 - DNA, 30 bp, Artificial Sequence
  Synthetic oligonucleotide
cggctagcgatgtaggcaccattcctctgt

SEQ ID NO: 181271 - DNA, 30 bp, Artificial Sequence
  Synthetic oligonucleotide
tcagcccagggatgatttcattacgtctgt

SEQ ID NO: 181272 - DNA, 30 bp, Artificial Sequence
  Synthetic oligonucleotide
taaggtggcctaagtgtacgtgaggtctgt

SEQ ID NO: 181273 - DNA, 31 bp, Artificial Sequence
  Synthetic oligonucleotide
ttgcgtactcaaaacccctggtttggtctgt

SEQ ID NO: 181274 - DNA, 30 bp, Artificial Sequence
  Synthetic oligonucleotide
gaacgtagcctgtggacctcaaatgtctgt

SEQ ID NO: 181275 - DNA, 29 bp, Artificial Sequence
  Synthetic oligonucleotide
gctggtaaaagcgtatgaggcgattctgt

SEQ ID NO: 181276 - DNA, 30 bp, Artificial Sequence
  Synthetic oligonucleotide
tctgggcagacagaaatctgtcacaagtgt

SEQ ID NO: 181277 - DNA, 30 bp, Artificial Sequence
  Synthetic oligonucleotide
taagtggctccagcgaccgggtggaagtgt

SEQ ID NO: 181278 - DNA, 30 bp, Artificial Sequence
  Synthetic oligonucleotide
aaaaattctaatgagagactggttaagtgt

SEQ ID NO: 181279 - DNA, 30 bp, Artificial Sequence
  Synthetic oligonucleotide
ggggcgactccgtagggaaggacacagtgt

SEQ ID NO: 181280 - DNA, 30 bp, Artificial Sequence
  Synthetic oligonucleotide
gtagaccaggtcgaagttcacaaccagtgt

SEQ ID NO: 181281 - DNA, 30 bp, Artificial Sequence
  Synthetic oligonucleotide
cttgtgtgccctaaactgctgagccagtgt

SEQ ID NO: 181282 - DNA, 30 bp, Artificial Sequence
  Synthetic oligonucleotide
gtcatcgctcactggcgctattcgcagtgt

SEQ ID NO: 181283 - DNA, 30 bp, Artificial Sequence
  Synthetic oligonucleotide
cgtcggtagtctttcgaggactggcagtgt

SEQ ID NO: 181284 - DNA, 30 bp, Artificial Sequence
  Synthetic oligonucleotide
tagaagtacgtaaacgggagttggcagtgt

SEQ ID NO: 181285 - DNA, 30 bp, Artificial Sequence
  Synthetic oligonucleotide
caagtagtgcgccgttatcaaccagagtgt

SEQ ID NO: 181286 - DNA, 30 bp, Artificial Sequence
  Synthetic oligonucleotide
acaggccttgcgaggtctacatcagagtgt

SEQ ID NO: 181287 - DNA, 30 bp, Artificial Sequence
  Synthetic oligonucleotide
cacaacatacgaggaaaaggcaccgagtgt

SEQ ID NO: 181288 - DNA, 30 bp, Artificial Sequence
  Synthetic oligonucleotide
tatgccgtgcgtcaccgatttaaggagtgt

SEQ ID NO: 181289 - DNA, 30 bp, Artificial Sequence
  Synthetic oligonucleotide
gatacaaccagcccgtagcgacatgagtgt

SEQ ID NO: 181290 - DNA, 30 bp, Artificial Sequence
  Synthetic oligonucleotide
gttgaagtgtataggcagtttcagtagtgt

SEQ ID NO: 181291 - DNA, 30 bp, Artificial Sequence
  Synthetic oligonucleotide
accaaacacaacgctttagcccgaacgtgt

SEQ ID NO: 181292 - DNA, 30 bp, Artificial Sequence
  Synthetic oligonucleotide
caaacgagaggtgagaggcttgtaacgtgt

SEQ ID NO: 181293 - DNA, 30 bp, Artificial Sequence
  Synthetic oligonucleotide
tgatggggagaaagttgcaaaaggacgtgt

SEQ ID NO: 181294 - DNA, 30 bp, Artificial Sequence
  Synthetic oligonucleotide
ggtggggttatctgggcaatatggacgtgt

SEQ ID NO: 181295 - DNA, 30 bp, Artificial Sequence
  Synthetic oligonucleotide
aggtgggggatgaacccggctaacccgtgt

SEQ ID NO: 181296 - DNA, 30 bp, Artificial Sequence
  Synthetic oligonucleotide
ccgcagcgggcagggggtgattggccgtgt

SEQ ID NO: 181297 - DNA, 30 bp, Artificial Sequence
  Synthetic oligonucleotide
agttccgtgcggcggggttgaggtccgtgt

SEQ ID NO: 181298 - DNA, 30 bp, Artificial Sequence
  Synthetic oligonucleotide
cgcgcaaagtaacgtgcttgacatgcgtgt

SEQ ID NO: 181299 - DNA, 30 bp, Artificial Sequence
  Synthetic oligonucleotide
agcatgttagtggatttcaatgactcgtgt

SEQ ID NO: 181300 - DNA, 31 bp, Artificial Sequence
  Synthetic oligonucleotide
catggttagatggtaacgctgatcgtcgtgt

SEQ ID NO: 181301 - DNA, 30 bp, Artificial Sequence
  Synthetic oligonucleotide
gtctcgcgcttgcgttctttcgaaaggtgt

SEQ ID NO: 181302 - DNA, 30 bp, Artificial Sequence
  Synthetic oligonucleotide
tacgttggttcgactccctttacaaggtgt

SEQ ID NO: 181303 - DNA, 30 bp, Artificial Sequence
  Synthetic oligonucleotide
ggtgagtacccaatgagccgggtacggtgt

SEQ ID NO: 181304 - DNA, 30 bp, Artificial Sequence
  Synthetic oligonucleotide
tggtcagatttcgaattgttaccccggtgt

SEQ ID NO: 181305 - DNA, 30 bp, Artificial Sequence
  Synthetic oligonucleotide
attagatattcaggaagaagtcggcggtgt

SEQ ID NO: 181306 - DNA, 30 bp, Artificial Sequence
  Synthetic oligonucleotide
cacgttgaatcaccaggcaaggctcggtgt

SEQ ID NO: 181307 - DNA, 31 bp, Artificial Sequence
  Synthetic oligonucleotide
ccgtgcgagaggtttcattcgctacgggtgt

SEQ ID NO: 181308 - DNA, 30 bp, Artificial Sequence
  Synthetic oligonucleotide
gtctagacaccttgagcagattgttggtgt

SEQ ID NO: 181309 - DNA, 30 bp, Artificial Sequence
  Synthetic oligonucleotide
ggtgcgagggaaattggttacataatgtgt

SEQ ID NO: 181310 - DNA, 30 bp, Artificial Sequence
  Synthetic oligonucleotide
gtgtgcgggagaagcacacccataatgtgt

SEQ ID NO: 181311 - DNA, 30 bp, Artificial Sequence
  Synthetic oligonucleotide
aacggtctctggagcccgcaatgcatgtgt

SEQ ID NO: 181312 - DNA, 30 bp, Artificial Sequence
  Synthetic oligonucleotide
gcgttctgagttgcagctgaggatatgtgt

SEQ ID NO: 181313 - DNA, 30 bp, Artificial Sequence
  Synthetic oligonucleotide
ctcaactcgaactagtagaccgccctgtgt

SEQ ID NO: 181314 - DNA, 30 bp, Artificial Sequence
  Synthetic oligonucleotide
cgaggaccaggtcactgtaaaagcctgtgt

SEQ ID NO: 181315 - DNA, 30 bp, Artificial Sequence
  Synthetic oligonucleotide
ttaaaaaacctaaaggcgttgctgctgtgt

SEQ ID NO: 181316 - DNA, 30 bp, Artificial Sequence
  Synthetic oligonucleotide
cggtgtaagagaagcaactagcaagtgtgt

SEQ ID NO: 181317 - DNA, 30 bp, Artificial Sequence
  Synthetic oligonucleotide
catgaaaggcgattttaaagggacgtgtgt

SEQ ID NO: 181318 - DNA, 30 bp, Artificial Sequence
  Synthetic oligonucleotide
aggctactcgccgaggtgcggttcgtgtgt

SEQ ID NO: 181319 - DNA, 30 bp, Artificial Sequence
  Synthetic oligonucleotide
ctagtcttagacagagcatgagaggtgtgt

SEQ ID NO: 181320 - DNA, 30 bp, Artificial Sequence
  Synthetic oligonucleotide
tgaagcccgccgagtaacatgttggtgtgt

SEQ ID NO: 181321 - DNA, 30 bp, Artificial Sequence
  Synthetic oligonucleotide
caaatcgcacagcggattgtctatgtgtgt

SEQ ID NO: 181322 - DNA, 30 bp, Artificial Sequence
  Synthetic oligonucleotide
aatcgtgatatccagtgagttaaattgtgt

SEQ ID NO: 181323 - DNA, 30 bp, Artificial Sequence
  Synthetic oligonucleotide
ggtgcggtaggtaagcatatcaatttgtgt

SEQ ID NO: 181324 - DNA, 30 bp, Artificial Sequence
  Synthetic oligonucleotide
tacaagcggaacctgggaggcttcaattgt

SEQ ID NO: 181325 - DNA, 30 bp, Artificial Sequence
  Synthetic oligonucleotide
cttgcctcacaagcagaaggaacgaattgt

SEQ ID NO: 181326 - DNA, 30 bp, Artificial Sequence
  Synthetic oligonucleotide
ttagaatgaatgtaccgtcgcccgaattgt

SEQ ID NO: 181327 - DNA, 30 bp, Artificial Sequence
  Synthetic oligonucleotide
agttgtccctggcgtacctgaaataattgt

SEQ ID NO: 181328 - DNA, 30 bp, Artificial Sequence
  Synthetic oligonucleotide
gacacccttgtattggtggattcacattgt

SEQ ID NO: 181329 - DNA, 30 bp, Artificial Sequence
  Synthetic oligonucleotide
agtcgtccgaccgggacagtgtaccattgt

SEQ ID NO: 181330 - DNA, 30 bp, Artificial Sequence
  Synthetic oligonucleotide
acgaactaagggaacaagagatcccattgt

SEQ ID NO: 181331 - DNA, 30 bp, Artificial Sequence
  Synthetic oligonucleotide
ggtttagagaaagtgcagcaatgagattgt

SEQ ID NO: 181332 - DNA, 30 bp, Artificial Sequence
  Synthetic oligonucleotide
ttgaagggcacctaaccattgctctattgt

SEQ ID NO: 181333 - DNA, 29 bp, Artificial Sequence
  Synthetic oligonucleotide
ctgtgtactatgtttcgtaagtgtattgt

SEQ ID NO: 181334 - DNA, 30 bp, Artificial Sequence
  Synthetic oligonucleotide
gcagccctaagcagattagagtaaacttgt

SEQ ID NO: 181335 - DNA, 30 bp, Artificial Sequence
  Synthetic oligonucleotide
cggggagtattccattcgctgcgaacttgt

SEQ ID NO: 181336 - DNA, 30 bp, Artificial Sequence
  Synthetic oligonucleotide
cattccatggaaaggtccttgataccttgt

SEQ ID NO: 181337 - DNA, 30 bp, Artificial Sequence
  Synthetic oligonucleotide
atactacatgaggacgtggaatacccttgt

SEQ ID NO: 181338 - DNA, 30 bp, Artificial Sequence
  Synthetic oligonucleotide
agacaatacccacccagtgaacatccttgt

SEQ ID NO: 181339 - DNA, 30 bp, Artificial Sequence
  Synthetic oligonucleotide
ggtgagaccacgtggaatgaccaagcttgt

SEQ ID NO: 181340 - DNA, 30 bp, Artificial Sequence
  Synthetic oligonucleotide
gcaggtctttgcatcgcgcattcagcttgt

SEQ ID NO: 181341 - DNA, 30 bp, Artificial Sequence
  Synthetic oligonucleotide
tactggctagttgaaggagttcgcgcttgt

SEQ ID NO: 181342 - DNA, 30 bp, Artificial Sequence
  Synthetic oligonucleotide
tatcatgaaataagctctaatcgggcttgt

SEQ ID NO: 181343 - DNA, 30 bp, Artificial Sequence
  Synthetic oligonucleotide
agtaatgagccccactggcatgttgcttgt

SEQ ID NO: 181344 - DNA, 30 bp, Artificial Sequence
  Synthetic oligonucleotide
gtctgggaaagaacggcgatccatagttgt

SEQ ID NO: 181345 - DNA, 30 bp, Artificial Sequence
  Synthetic oligonucleotide
gtaaaaaaaagtactctgtcgtgacgttgt

SEQ ID NO: 181346 - DNA, 30 bp, Artificial Sequence
  Synthetic oligonucleotide
ggtcatgaacggcgccggtgagatcgttgt

SEQ ID NO: 181347 - DNA, 30 bp, Artificial Sequence
  Synthetic oligonucleotide
aagcgccagcggataacatcgtgtcgttgt

SEQ ID NO: 181348 - DNA, 30 bp, Artificial Sequence
  Synthetic oligonucleotide
gctaacaaacacccaatgaaaaaaggttgt

SEQ ID NO: 181349 - DNA, 30 bp, Artificial Sequence
  Synthetic oligonucleotide
gtttaatcaaacgtgagaacagagggttgt

SEQ ID NO: 181350 - DNA, 30 bp, Artificial Sequence
  Synthetic oligonucleotide
cgggacctctaagtgaagacaaaatgttgt

SEQ ID NO: 181351 - DNA, 30 bp, Artificial Sequence
  Synthetic oligonucleotide
aggttgcgtctcgtgattgtatcatgttgt

SEQ ID NO: 181352 - DNA, 30 bp, Artificial Sequence
  Synthetic oligonucleotide
ctacaccatttggcatcgaacatatgttgt

SEQ ID NO: 181353 - DNA, 30 bp, Artificial Sequence
  Synthetic oligonucleotide
tccgccagaggtcgtagatagtcttgttgt

SEQ ID NO: 181354 - DNA, 30 bp, Artificial Sequence
  Synthetic oligonucleotide
ggttcgtaggcttccgaaagcacgatttgt

SEQ ID NO: 181355 - DNA, 30 bp, Artificial Sequence
  Synthetic oligonucleotide
aaagacgcgtgattaaagccgagactttgt

SEQ ID NO: 181356 - DNA, 30 bp, Artificial Sequence
  Synthetic oligonucleotide
cgtatcgagtcgaccgtcagggggctttgt

SEQ ID NO: 181357 - DNA, 30 bp, Artificial Sequence
  Synthetic oligonucleotide
taaggcccttggcacgcgagtgaggtttgt

SEQ ID NO: 181358 - DNA, 30 bp, Artificial Sequence
  Synthetic oligonucleotide
cctgcaatcgggaggccatcagcggtttgt

SEQ ID NO: 181359 - DNA, 31 bp, Artificial Sequence
  Synthetic oligonucleotide
cgtatagcataactatagtacgtatttttgt

SEQ ID NO: 181360 - DNA, 30 bp, Artificial Sequence
  Synthetic oligonucleotide
tatcgtggcgtggtgacgacgtcaaaaatt

SEQ ID NO: 181361 - DNA, 30 bp, Artificial Sequence
  Synthetic oligonucleotide
ggccactgcattaacaattaaagcaaaatt

SEQ ID NO: 181362 - DNA, 30 bp, Artificial Sequence
  Synthetic oligonucleotide
agaaacaaccttcgagccgcgctgaaaatt

SEQ ID NO: 181363 - DNA, 30 bp, Artificial Sequence
  Synthetic oligonucleotide
tcgaattaaacacgtggacttgtgaaaatt

SEQ ID NO: 181364 - DNA, 30 bp, Artificial Sequence
  Synthetic oligonucleotide
aggaggctgtgtcagggacgccgtaaaatt

SEQ ID NO: 181365 - DNA, 30 bp, Artificial Sequence
  Synthetic oligonucleotide
tttactgaatcgaccttaggcaaacaaatt

SEQ ID NO: 181366 - DNA, 30 bp, Artificial Sequence
  Synthetic oligonucleotide
cgcatcacgtcacaaaacgttatacaaatt

SEQ ID NO: 181367 - DNA, 30 bp, Artificial Sequence
  Synthetic oligonucleotide
gctggagatagagcactctttaatgaaatt

SEQ ID NO: 181368 - DNA, 30 bp, Artificial Sequence
  Synthetic oligonucleotide
gtaagcccccacacagtgtggcgataaatt

SEQ ID NO: 181369 - DNA, 30 bp, Artificial Sequence
  Synthetic oligonucleotide
gagaggggtaaggtgttcggatcctaaatt

SEQ ID NO: 181370 - DNA, 30 bp, Artificial Sequence
  Synthetic oligonucleotide
aaagggtacctcaggggacaaaagtaaatt

SEQ ID NO: 181371 - DNA, 30 bp, Artificial Sequence
  Synthetic oligonucleotide
ggacacgctaagatgtcgccctcgtaaatt

SEQ ID NO: 181372 - DNA, 30 bp, Artificial Sequence
  Synthetic oligonucleotide
ctagactagcatacttggtttgattaaatt

SEQ ID NO: 181373 - DNA, 30 bp, Artificial Sequence
  Synthetic oligonucleotide
gtagggagccacggggccttacagacaatt

SEQ ID NO: 181374 - DNA, 29 bp, Artificial Sequence
  Synthetic oligonucleotide
cagaggcccgaatctttggtggtacaatt

SEQ ID NO: 181375 - DNA, 30 bp, Artificial Sequence
  Synthetic oligonucleotide
acgagctaatccaaacggcccccaccaatt

SEQ ID NO: 181376 - DNA, 30 bp, Artificial Sequence
  Synthetic oligonucleotide
tgtgcattaggaacagcatcgccaccaatt

SEQ ID NO: 181377 - DNA, 30 bp, Artificial Sequence
  Synthetic oligonucleotide
aatcggctaccacgcccgatgtctccaatt

SEQ ID NO: 181378 - DNA, 30 bp, Artificial Sequence
  Synthetic oligonucleotide
cgtcgggggatgtgcatacatacagcaatt

SEQ ID NO: 181379 - DNA, 30 bp, Artificial Sequence
  Synthetic oligonucleotide
gatacaggatggggcatggatacagcaatt

SEQ ID NO: 181380 - DNA, 30 bp, Artificial Sequence
  Synthetic oligonucleotide
ctcatgctgtccaacagtggatgcgcaatt

SEQ ID NO: 181381 - DNA, 30 bp, Artificial Sequence
  Synthetic oligonucleotide
agtctagaactagggtactgaggtgcaatt

SEQ ID NO: 181382 - DNA, 30 bp, Artificial Sequence
  Synthetic oligonucleotide
aggcctgacatgaacaataatcagtcaatt

SEQ ID NO: 181383 - DNA, 30 bp, Artificial Sequence
  Synthetic oligonucleotide
cacagggtgatggcagcgatttattcaatt

SEQ ID NO: 181384 - DNA, 30 bp, Artificial Sequence
  Synthetic oligonucleotide
tgagaaacgagtgtctgtggaccttcaatt

SEQ ID NO: 181385 - DNA, 30 bp, Artificial Sequence
  Synthetic oligonucleotide
gctggtctagcgtcgggttagcaaagaatt

SEQ ID NO: 181386 - DNA, 30 bp, Artificial Sequence
  Synthetic oligonucleotide
tggacactaattaagcagtccgcgagaatt

SEQ ID NO: 181387 - DNA, 30 bp, Artificial Sequence
  Synthetic oligonucleotide
ttagccgccatgtcaggggcgaaacgaatt

SEQ ID NO: 181388 - DNA, 30 bp, Artificial Sequence
  Synthetic oligonucleotide
ttaattagttacaatctgaattagcgaatt

SEQ ID NO: 181389 - DNA, 30 bp, Artificial Sequence
  Synthetic oligonucleotide
cccggatgggtgctggttcggtgtcgaatt

SEQ ID NO: 181390 - DNA, 30 bp, Artificial Sequence
  Synthetic oligonucleotide
tgataggcgtaaaagactggacccggaatt

SEQ ID NO: 181391 - DNA, 30 bp, Artificial Sequence
  Synthetic oligonucleotide
gtaaaaagtcaggggagacggacatgaatt

SEQ ID NO: 181392 - DNA, 30 bp, Artificial Sequence
  Synthetic oligonucleotide
actaatgtggcacacaaaagggtatgaatt

SEQ ID NO: 181393 - DNA, 30 bp, Artificial Sequence
  Synthetic oligonucleotide
agaataagacgctattacaaatcgtgaatt

SEQ ID NO: 181394 - DNA, 30 bp, Artificial Sequence
  Synthetic oligonucleotide
ggggttcctgtacgtgacccgcaaataatt

SEQ ID NO: 181395 - DNA, 30 bp, Artificial Sequence
  Synthetic oligonucleotide
acagctttgagcaaacttagccgaataatt

SEQ ID NO: 181396 - DNA, 30 bp, Artificial Sequence
  Synthetic oligonucleotide
aaacacactctgggcatcgtccgaataatt

SEQ ID NO: 181397 - DNA, 30 bp, Artificial Sequence
  Synthetic oligonucleotide
aaagcgtccagagagtggtcctacataatt

SEQ ID NO: 181398 - DNA, 30 bp, Artificial Sequence
  Synthetic oligonucleotide
ccgtgcatgaaggcagggagcagcataatt

SEQ ID NO: 181399 - DNA, 30 bp, Artificial Sequence
  Synthetic oligonucleotide
taaggtatacactatcaagtagtgataatt

SEQ ID NO: 181400 - DNA, 30 bp, Artificial Sequence
  Synthetic oligonucleotide
gaaagtcgaaggaacgacgctgaactaatt

SEQ ID NO: 181401 - DNA, 30 bp, Artificial Sequence
  Synthetic oligonucleotide
cacggccaacatttcttcgtttcactaatt

SEQ ID NO: 181402 - DNA, 30 bp, Artificial Sequence
  Synthetic oligonucleotide
cgatgcgagagcgatggcgagttcctaatt

SEQ ID NO: 181403 - DNA, 30 bp, Artificial Sequence
  Synthetic oligonucleotide
tgacactctgactaaacatgcgatctaatt

SEQ ID NO: 181404 - DNA, 30 bp, Artificial Sequence
  Synthetic oligonucleotide
aacatgcaaagttgcactggggacttaatt

SEQ ID NO: 181405 - DNA, 30 bp, Artificial Sequence
  Synthetic oligonucleotide
ggtgtttgcaaggaggctttgaagttaatt

SEQ ID NO: 181406 - DNA, 30 bp, Artificial Sequence
  Synthetic oligonucleotide
cgcacaagggaccaacagcgcgagttaatt

SEQ ID NO: 181407 - DNA, 30 bp, Artificial Sequence
  Synthetic oligonucleotide
aaggtatgtactcaaattgtagggttaatt

SEQ ID NO: 181408 - DNA, 30 bp, Artificial Sequence
  Synthetic oligonucleotide
tgatctaagccgggtcttcggcaaaacatt

SEQ ID NO: 181409 - DNA, 30 bp, Artificial Sequence
  Synthetic oligonucleotide
gtacggaacacgtaagattgactaaacatt

SEQ ID NO: 181410 - DNA, 30 bp, Artificial Sequence
  Synthetic oligonucleotide
tttggcgagggcatagacagacacaacatt

SEQ ID NO: 181411 - DNA, 30 bp, Artificial Sequence
  Synthetic oligonucleotide
atccttacaagtcaggacccactcaacatt

SEQ ID NO: 181412 - DNA, 30 bp, Artificial Sequence
  Synthetic oligonucleotide
ctcacggggtgagtgccaagctataacatt

SEQ ID NO: 181413 - DNA, 30 bp, Artificial Sequence
  Synthetic oligonucleotide
ttagcaccgtacggtctcaggtgtaacatt

SEQ ID NO: 181414 - DNA, 30 bp, Artificial Sequence
  Synthetic oligonucleotide
ccctggttgcgctaaaccccgtcccacatt

SEQ ID NO: 181415 - DNA, 30 bp, Artificial Sequence
  Synthetic oligonucleotide
ctcaaatatgaagctggaaaagggcacatt

SEQ ID NO: 181416 - DNA, 30 bp, Artificial Sequence
  Synthetic oligonucleotide
atgggaagtccatcagtgttgctagacatt

SEQ ID NO: 181417 - DNA, 30 bp, Artificial Sequence
  Synthetic oligonucleotide
tctgtgagccctttgtggaactcggacatt

SEQ ID NO: 181418 - DNA, 30 bp, Artificial Sequence
  Synthetic oligonucleotide
gacgaacagcagggtggcccgtcggacatt

SEQ ID NO: 181419 - DNA, 30 bp, Artificial Sequence
  Synthetic oligonucleotide
cagtcacacatcttaaatgagaatgacatt

SEQ ID NO: 181420 - DNA, 30 bp, Artificial Sequence
  Synthetic oligonucleotide
gcaaagcgggatctttgcgcgtactacatt

SEQ ID NO: 181421 - DNA, 30 bp, Artificial Sequence
  Synthetic oligonucleotide
tagagtccacctaacaaagatcagtacatt

SEQ ID NO: 181422 - DNA, 30 bp, Artificial Sequence
  Synthetic oligonucleotide
acaaatcaaagagctgcatataggaccatt

SEQ ID NO: 181423 - DNA, 30 bp, Artificial Sequence
  Synthetic oligonucleotide
gtgatccgacgtggtagcgtcttgaccatt

SEQ ID NO: 181424 - DNA, 30 bp, Artificial Sequence
  Synthetic oligonucleotide
cactggggtgaccggtcagaagttaccatt

SEQ ID NO: 181425 - DNA, 30 bp, Artificial Sequence
  Synthetic oligonucleotide
tgaacgcggattttattatcaagacccatt

SEQ ID NO: 181426 - DNA, 30 bp, Artificial Sequence
  Synthetic oligonucleotide
aggccctcaattaagtggttccgacccatt

SEQ ID NO: 181427 - DNA, 30 bp, Artificial Sequence
  Synthetic oligonucleotide
ttgtcgggacgtattaacccaagccccatt

SEQ ID NO: 181428 - DNA, 30 bp, Artificial Sequence
  Synthetic oligonucleotide
acgatctctttagttaatcgggaagccatt

SEQ ID NO: 181429 - DNA, 30 bp, Artificial Sequence
  Synthetic oligonucleotide
acatcaagactgtgtacgcatccagccatt

SEQ ID NO: 181430 - DNA, 30 bp, Artificial Sequence
  Synthetic oligonucleotide
ggatgctgtgcatctccggctccagccatt

SEQ ID NO: 181431 - DNA, 30 bp, Artificial Sequence
  Synthetic oligonucleotide
taatctaatcagtaatagcgcaacgccatt

SEQ ID NO: 181432 - DNA, 29 bp, Artificial Sequence
  Synthetic oligonucleotide
tgggattagacgaaacccaagtcgccatt

SEQ ID NO: 181433 - DNA, 30 bp, Artificial Sequence
  Synthetic oligonucleotide
ggttagagcatttaagaagatcaatccatt

SEQ ID NO: 181434 - DNA, 30 bp, Artificial Sequence
  Synthetic oligonucleotide
ttgataccgggtgcggtcgatacatccatt

SEQ ID NO: 181435 - DNA, 30 bp, Artificial Sequence
  Synthetic oligonucleotide
atcctggaggggcctggcggggtctccatt

SEQ ID NO: 181436 - DNA, 30 bp, Artificial Sequence
  Synthetic oligonucleotide
acgactttggttacaattagatgttccatt

SEQ ID NO: 181437 - DNA, 30 bp, Artificial Sequence
  Synthetic oligonucleotide
cgagccatgtgtcgcctcgtagcgagcatt

SEQ ID NO: 181438 - DNA, 30 bp, Artificial Sequence
  Synthetic oligonucleotide
taagaatggaaataagacgaattgagcatt

SEQ ID NO: 181439 - DNA, 30 bp, Artificial Sequence
  Synthetic oligonucleotide
cacggctcaaacaagcactcatcccgcatt

SEQ ID NO: 181440 - DNA, 30 bp, Artificial Sequence
  Synthetic oligonucleotide
gagagcgttagagatgccacatatcgcatt

SEQ ID NO: 181441 - DNA, 30 bp, Artificial Sequence
  Synthetic oligonucleotide
gctcaaggcactctggttgttcctcgcatt

SEQ ID NO: 181442 - DNA, 30 bp, Artificial Sequence
  Synthetic oligonucleotide
tcagggacgtagagtgagagatgcggcatt

SEQ ID NO: 181443 - DNA, 30 bp, Artificial Sequence
  Synthetic oligonucleotide
cttgtccgtaagtgatgcctaatatgcatt

SEQ ID NO: 181444 - DNA, 30 bp, Artificial Sequence
  Synthetic oligonucleotide
tgggtgcatctcgtcgtagaagtatgcatt

SEQ ID NO: 181445 - DNA, 30 bp, Artificial Sequence
  Synthetic oligonucleotide
gcatgggggccgcacagctagaactgcatt

SEQ ID NO: 181446 - DNA, 30 bp, Artificial Sequence
  Synthetic oligonucleotide
aacggaggtgcgtcatcgaggaccatcatt

SEQ ID NO: 181447 - DNA, 30 bp, Artificial Sequence
  Synthetic oligonucleotide
atggggcgtgtgttcactcgggcgatcatt

SEQ ID NO: 181448 - DNA, 30 bp, Artificial Sequence
  Synthetic oligonucleotide
tacgggtagtagaaactatggatgatcatt

SEQ ID NO: 181449 - DNA, 30 bp, Artificial Sequence
  Synthetic oligonucleotide
ttggatatagataactacagaggtatcatt

SEQ ID NO: 181450 - DNA, 30 bp, Artificial Sequence
  Synthetic oligonucleotide
gagagctcagatctcgttcgtctcctcatt

SEQ ID NO: 181451 - DNA, 30 bp, Artificial Sequence
  Synthetic oligonucleotide
aagcgcaattttccggatacaactctcatt

SEQ ID NO: 181452 - DNA, 30 bp, Artificial Sequence
  Synthetic oligonucleotide
gcaagatacattgacatgagggaagtcatt

SEQ ID NO: 181453 - DNA, 30 bp, Artificial Sequence
  Synthetic oligonucleotide
acagacacaccaacactatttaaggtcatt

SEQ ID NO: 181454 - DNA, 30 bp, Artificial Sequence
  Synthetic oligonucleotide
gttatacgaccctcccagattggtgtcatt

SEQ ID NO: 181455 - DNA, 30 bp, Artificial Sequence
  Synthetic oligonucleotide
agggtaggaaagacaatacctattttcatt

SEQ ID NO: 181456 - DNA, 30 bp, Artificial Sequence
  Synthetic oligonucleotide
gctcgtaacttggggagtgtctggaagatt

SEQ ID NO: 181457 - DNA, 30 bp, Artificial Sequence
  Synthetic oligonucleotide
acttaggctcgtgtggtccgaaaccagatt

SEQ ID NO: 181458 - DNA, 31 bp, Artificial Sequence
  Synthetic oligonucleotide
agtagaagtctggatatcattaccgcagatt

SEQ ID NO: 181459 - DNA, 30 bp, Artificial Sequence
  Synthetic oligonucleotide
tggaaatgtgcccaaagccgccggcagatt

SEQ ID NO: 181460 - DNA, 30 bp, Artificial Sequence
  Synthetic oligonucleotide
tggtttctagggtcgcgaatagggcagatt

SEQ ID NO: 181461 - DNA, 30 bp, Artificial Sequence
  Synthetic oligonucleotide
aaagcgtagggcccaccggtctaggagatt

SEQ ID NO: 181462 - DNA, 30 bp, Artificial Sequence
  Synthetic oligonucleotide
cactagcgacttcgcggcctatgtgagatt

SEQ ID NO: 181463 - DNA, 30 bp, Artificial Sequence
  Synthetic oligonucleotide
atagtggttggttcgcttcctgttgagatt

SEQ ID NO: 181464 - DNA, 30 bp, Artificial Sequence
  Synthetic oligonucleotide
ggcgtaatccaccgtctgatgtaatagatt

SEQ ID NO: 181465 - DNA, 30 bp, Artificial Sequence
  Synthetic oligonucleotide
atgcttctggtgcaggacgggccgtagatt

SEQ ID NO: 181466 - DNA, 30 bp, Artificial Sequence
  Synthetic oligonucleotide
gtgccgttagaagatctgagggtgtagatt

SEQ ID NO: 181467 - DNA, 30 bp, Artificial Sequence
  Synthetic oligonucleotide
gcatctaaaaggcccagatcagcttagatt

SEQ ID NO: 181468 - DNA, 30 bp, Artificial Sequence
  Synthetic oligonucleotide
tggaatcggctggtggtgtaggcaacgatt

SEQ ID NO: 181469 - DNA, 30 bp, Artificial Sequence
  Synthetic oligonucleotide
agtacacattgtgcagtataaatcacgatt

SEQ ID NO: 181470 - DNA, 30 bp, Artificial Sequence
  Synthetic oligonucleotide
ggccgtcatctccgtcaatacaagacgatt

SEQ ID NO: 181471 - DNA, 30 bp, Artificial Sequence
  Synthetic oligonucleotide
tcaagtaggtcggtcccgccatagacgatt

SEQ ID NO: 181472 - DNA, 30 bp, Artificial Sequence
  Synthetic oligonucleotide
gttgcttttggaaggacatgggtgacgatt

SEQ ID NO: 181473 - DNA, 30 bp, Artificial Sequence
  Synthetic oligonucleotide
agttgatgcgagtgtggtgctggtacgatt

SEQ ID NO: 181474 - DNA, 30 bp, Artificial Sequence
  Synthetic oligonucleotide
ccacgaatgcggcgggtaattaacccgatt

SEQ ID NO: 181475 - DNA, 30 bp, Artificial Sequence
  Synthetic oligonucleotide
actagttggattcgccaatacgagccgatt

SEQ ID NO: 181476 - DNA, 30 bp, Artificial Sequence
  Synthetic oligonucleotide
atcatcatcccacacatagaggctccgatt

SEQ ID NO: 181477 - DNA, 30 bp, Artificial Sequence
  Synthetic oligonucleotide
tcccatcccaccgagacatgaaaagcgatt

SEQ ID NO: 181478 - DNA, 30 bp, Artificial Sequence
  Synthetic oligonucleotide
ggaaccattaaagcaactgcgaaagcgatt

SEQ ID NO: 181479 - DNA, 30 bp, Artificial Sequence
  Synthetic oligonucleotide
aggtctctgcgagtcgcggatagagcgatt

SEQ ID NO: 181480 - DNA, 30 bp, Artificial Sequence
  Synthetic oligonucleotide
atataagtcaatcgcagattatatgcgatt

SEQ ID NO: 181481 - DNA, 30 bp, Artificial Sequence
  Synthetic oligonucleotide
atccgcgggtgtaacaacattgcctcgatt

SEQ ID NO: 181482 - DNA, 30 bp, Artificial Sequence
  Synthetic oligonucleotide
tttaatagtgacacccccatgacgtcgatt

SEQ ID NO: 181483 - DNA, 30 bp, Artificial Sequence
  Synthetic oligonucleotide
tacgggggtcgccaaggtttaatgtcgatt

SEQ ID NO: 181484 - DNA, 30 bp, Artificial Sequence
  Synthetic oligonucleotide
aacattggggacacatggcttgaaaggatt

SEQ ID NO: 181485 - DNA, 30 bp, Artificial Sequence
  Synthetic oligonucleotide
cttgttcactacgaagattgtaggaggatt

SEQ ID NO: 181486 - DNA, 30 bp, Artificial Sequence
  Synthetic oligonucleotide
tgtccagagtaatggcttactcttaggatt

SEQ ID NO: 181487 - DNA, 30 bp, Artificial Sequence
  Synthetic oligonucleotide
aaggaatggcaagacagacctaacgggatt

SEQ ID NO: 181488 - DNA, 30 bp, Artificial Sequence
  Synthetic oligonucleotide
gggggacacttccaagatcgtaccgggatt

SEQ ID NO: 181489 - DNA, 30 bp, Artificial Sequence
  Synthetic oligonucleotide
tcattgttttaaaagtacaaatccgggatt

SEQ ID NO: 181490 - DNA, 30 bp, Artificial Sequence
  Synthetic oligonucleotide
ttagggcaaaattccagaaatgtcgggatt

SEQ ID NO: 181491 - DNA, 30 bp, Artificial Sequence
  Synthetic oligonucleotide
gataaagtgcgaaagatgaacggggggatt

SEQ ID NO: 181492 - DNA, 30 bp, Artificial Sequence
  Synthetic oligonucleotide
gtggttgacggcgtgggttcacactggatt

SEQ ID NO: 181493 - DNA, 30 bp, Artificial Sequence
  Synthetic oligonucleotide
ctaggtttaagaaactaggaatgaatgatt

SEQ ID NO: 181494 - DNA, 30 bp, Artificial Sequence
  Synthetic oligonucleotide
aagcaacgagcgtgaccagcattaatgatt

SEQ ID NO: 181495 - DNA, 30 bp, Artificial Sequence
  Synthetic oligonucleotide
gaggctatagagttattaaaccacatgatt

SEQ ID NO: 181496 - DNA, 30 bp, Artificial Sequence
  Synthetic oligonucleotide
tgtgaaggaacataaggggtctatatgatt

SEQ ID NO: 181497 - DNA, 30 bp, Artificial Sequence
  Synthetic oligonucleotide
gacactgtctataacccccaggaactgatt

SEQ ID NO: 181498 - DNA, 30 bp, Artificial Sequence
  Synthetic oligonucleotide
gcaccacttcaacaaccgtatatgctgatt

SEQ ID NO: 181499 - DNA, 30 bp, Artificial Sequence
  Synthetic oligonucleotide
ggattagagcatccaggcgactgtctgatt

SEQ ID NO: 181500 - DNA, 30 bp, Artificial Sequence
  Synthetic oligonucleotide
tacttcattgcaatgggcacgtgtctgatt

SEQ ID NO: 181501 - DNA, 30 bp, Artificial Sequence
  Synthetic oligonucleotide
caagccttaaagaaagctctctcagtgatt

SEQ ID NO: 181502 - DNA, 30 bp, Artificial Sequence
  Synthetic oligonucleotide
gaaaagggaacactgccttgcgtagtgatt

SEQ ID NO: 181503 - DNA, 30 bp, Artificial Sequence
  Synthetic oligonucleotide
ctcgccaggtggccagacacaattgtgatt

SEQ ID NO: 181504 - DNA, 30 bp, Artificial Sequence
  Synthetic oligonucleotide
cgtgtacgcttaaaacgcgtggtattgatt

SEQ ID NO: 181505 - DNA, 30 bp, Artificial Sequence
  Synthetic oligonucleotide
tcgtaaggttaattattatgtatcttgatt

SEQ ID NO: 181506 - DNA, 30 bp, Artificial Sequence
  Synthetic oligonucleotide
gtagagtccgaactacctcaatagttgatt

SEQ ID NO: 181507 - DNA, 30 bp, Artificial Sequence
  Synthetic oligonucleotide
agctatgtagggcgctgagagggtttgatt

SEQ ID NO: 181508 - DNA, 30 bp, Artificial Sequence
  Synthetic oligonucleotide
ttatgcttgccaagagggcataggaatatt

SEQ ID NO: 181509 - DNA, 30 bp, Artificial Sequence
  Synthetic oligonucleotide
cggtgaagtgtaaaatgtgggcgggatatt

SEQ ID NO: 181510 - DNA, 30 bp, Artificial Sequence
  Synthetic oligonucleotide
attgttacagtgcccgtgggagtggatatt

SEQ ID NO: 181511 - DNA, 30 bp, Artificial Sequence
  Synthetic oligonucleotide
gtctagcgggagagcatgtagagctatatt

SEQ ID NO: 181512 - DNA, 30 bp, Artificial Sequence
  Synthetic oligonucleotide
tagtgatcaagtagtagttaacgctatatt

SEQ ID NO: 181513 - DNA, 30 bp, Artificial Sequence
  Synthetic oligonucleotide
cggggagtattgaccaaaaaagcttatatt

SEQ ID NO: 181514 - DNA, 30 bp, Artificial Sequence
  Synthetic oligonucleotide
caaggcgagccaatcacggcactttatatt

SEQ ID NO: 181515 - DNA, 30 bp, Artificial Sequence
  Synthetic oligonucleotide
tgatccgacgtgactggtcaacaatctatt

SEQ ID NO: 181516 - DNA, 30 bp, Artificial Sequence
  Synthetic oligonucleotide
gtagagaccgtaccttccaccgaatctatt

SEQ ID NO: 181517 - DNA, 30 bp, Artificial Sequence
  Synthetic oligonucleotide
aacctatcgaaccgagtctgcacgtctatt

SEQ ID NO: 181518 - DNA, 30 bp, Artificial Sequence
  Synthetic oligonucleotide
cactccggagaagttagggtaaggtctatt

SEQ ID NO: 181519 - DNA, 30 bp, Artificial Sequence
  Synthetic oligonucleotide
catatagataaagaggtagattcaagtatt

SEQ ID NO: 181520 - DNA, 30 bp, Artificial Sequence
  Synthetic oligonucleotide
ttgaaccgcaccattcggtgggtcagtatt

SEQ ID NO: 181521 - DNA, 30 bp, Artificial Sequence
  Synthetic oligonucleotide
cgtggacacctaggcttaacacggagtatt

SEQ ID NO: 181522 - DNA, 30 bp, Artificial Sequence
  Synthetic oligonucleotide
acgtatgttagtcagcactgtgggcgtatt

SEQ ID NO: 181523 - DNA, 30 bp, Artificial Sequence
  Synthetic oligonucleotide
aaaaagtaaacacacttccaaactcgtatt

SEQ ID NO: 181524 - DNA, 30 bp, Artificial Sequence
  Synthetic oligonucleotide
acgaacaattggctgggacatgttcgtatt

SEQ ID NO: 181525 - DNA, 30 bp, Artificial Sequence
  Synthetic oligonucleotide
cgtcatcccggatgggctattcgaggtatt

SEQ ID NO: 181526 - DNA, 30 bp, Artificial Sequence
  Synthetic oligonucleotide
gccgtactagttgcggtagagtagggtatt

SEQ ID NO: 181527 - DNA, 30 bp, Artificial Sequence
  Synthetic oligonucleotide
tctgggagcgagcgaagcgtcttgggtatt

SEQ ID NO: 181528 - DNA, 30 bp, Artificial Sequence
  Synthetic oligonucleotide
atgtcaagcggatgacttatgattggtatt

SEQ ID NO: 181529 - DNA, 30 bp, Artificial Sequence
  Synthetic oligonucleotide
actaaagcgctgccgtatggccttggtatt

SEQ ID NO: 181530 - DNA, 30 bp, Artificial Sequence
  Synthetic oligonucleotide
tggccactgtcttggactgaagtatgtatt

SEQ ID NO: 181531 - DNA, 30 bp, Artificial Sequence
  Synthetic oligonucleotide
attcggacaggttccaatggcatcattatt

SEQ ID NO: 181532 - DNA, 30 bp, Artificial Sequence
  Synthetic oligonucleotide
aaatgggcacagatcggtgcctggattatt

SEQ ID NO: 181533 - DNA, 30 bp, Artificial Sequence
  Synthetic oligonucleotide
cggtacggttaaaccaaagagagtcttatt

SEQ ID NO: 181534 - DNA, 30 bp, Artificial Sequence
  Synthetic oligonucleotide
aatgcaacacgtgaacgggtggacgttatt

SEQ ID NO: 181535 - DNA, 30 bp, Artificial Sequence
  Synthetic oligonucleotide
agcaaggcggcgagctttgattgcgttatt

SEQ ID NO: 181536 - DNA, 30 bp, Artificial Sequence
  Synthetic oligonucleotide
cacttctgcctccagtattacctcgttatt

SEQ ID NO: 181537 - DNA, 30 bp, Artificial Sequence
  Synthetic oligonucleotide
gaaggacaacggtgagtaggggatgttatt

SEQ ID NO: 181538 - DNA, 30 bp, Artificial Sequence
  Synthetic oligonucleotide
cgggcatttctggagataatctggtttatt

SEQ ID NO: 181539 - DNA, 30 bp, Artificial Sequence
  Synthetic oligonucleotide
ctaagactaggagtaaaatagcaaaaactt

SEQ ID NO: 181540 - DNA, 30 bp, Artificial Sequence
  Synthetic oligonucleotide
ctgcggaacgtgacatctgcaccgaaactt

SEQ ID NO: 181541 - DNA, 30 bp, Artificial Sequence
  Synthetic oligonucleotide
agtaccgtagacctgagcatagctaaactt

SEQ ID NO: 181542 - DNA, 30 bp, Artificial Sequence
  Synthetic oligonucleotide
aacacaggaaatggttaggttgaacaactt

SEQ ID NO: 181543 - DNA, 30 bp, Artificial Sequence
  Synthetic oligonucleotide
tcagataggagtcgaaggaaccgccaactt

SEQ ID NO: 181544 - DNA, 30 bp, Artificial Sequence
  Synthetic oligonucleotide
ggagagagagcaaggttactttgtcaactt

SEQ ID NO: 181545 - DNA, 30 bp, Artificial Sequence
  Synthetic oligonucleotide
aacgttagaacctggaccacttgagaactt

SEQ ID NO: 181546 - DNA, 30 bp, Artificial Sequence
  Synthetic oligonucleotide
ggcaacttacagaataaaatgatggaactt

SEQ ID NO: 181547 - DNA, 30 bp, Artificial Sequence
  Synthetic oligonucleotide
gagcaccctcaaccttttccgcttgaactt

SEQ ID NO: 181548 - DNA, 30 bp, Artificial Sequence
  Synthetic oligonucleotide
ggaagtaggtggatcacaaaagagtaactt

SEQ ID NO: 181549 - DNA, 30 bp, Artificial Sequence
  Synthetic oligonucleotide
tagttaaataaagtatagtacccgtaactt

SEQ ID NO: 181550 - DNA, 30 bp, Artificial Sequence
  Synthetic oligonucleotide
caccacgtttggccacgataccaaacactt

SEQ ID NO: 181551 - DNA, 30 bp, Artificial Sequence
  Synthetic oligonucleotide
cgggggacgcaataccgctccacaacactt

SEQ ID NO: 181552 - DNA, 30 bp, Artificial Sequence
  Synthetic oligonucleotide
cggcacggacagctgacagcctggacactt

SEQ ID NO: 181553 - DNA, 30 bp, Artificial Sequence
  Synthetic oligonucleotide
tcgtcggtgtagcgcttgaaagggccactt

SEQ ID NO: 181554 - DNA, 30 bp, Artificial Sequence
  Synthetic oligonucleotide
taactgtgggctttagaagtcaccgcactt

SEQ ID NO: 181555 - DNA, 30 bp, Artificial Sequence
  Synthetic oligonucleotide
acaccgaaatccacaggcccgcaatcactt

SEQ ID NO: 181556 - DNA, 30 bp, Artificial Sequence
  Synthetic oligonucleotide
aacgacggcccagcttacctttggtcactt

SEQ ID NO: 181557 - DNA, 30 bp, Artificial Sequence
  Synthetic oligonucleotide
tactcacgggggaacctttattattcactt

SEQ ID NO: 181558 - DNA, 30 bp, Artificial Sequence
  Synthetic oligonucleotide
gtgtaataaactttgcagtgaagttcactt

SEQ ID NO: 181559 - DNA, 30 bp, Artificial Sequence
  Synthetic oligonucleotide
caaactgtaaggagatacgaaggttcactt

SEQ ID NO: 181560 - DNA, 30 bp, Artificial Sequence
  Synthetic oligonucleotide
aactagcatttgctggggattgggagactt

SEQ ID NO: 181561 - DNA, 30 bp, Artificial Sequence
  Synthetic oligonucleotide
ccgttagactaaaattaacaccatagactt

SEQ ID NO: 181562 - DNA, 30 bp, Artificial Sequence
  Synthetic oligonucleotide
acttcaggcgagcgtccattaagacgactt

SEQ ID NO: 181563 - DNA, 30 bp, Artificial Sequence
  Synthetic oligonucleotide
atggccctggtaaccgtttgctgacgactt

SEQ ID NO: 181564 - DNA, 30 bp, Artificial Sequence
  Synthetic oligonucleotide
agcaaagaccacagagtcggatagcgactt

SEQ ID NO: 181565 - DNA, 30 bp, Artificial Sequence
  Synthetic oligonucleotide
gaagcggagaagccttgagtgtcgcgactt

SEQ ID NO: 181566 - DNA, 30 bp, Artificial Sequence
  Synthetic oligonucleotide
ggggacgggcagattggaaataatggactt

SEQ ID NO: 181567 - DNA, 30 bp, Artificial Sequence
  Synthetic oligonucleotide
ccttgagcacatgttctattcgaatgactt

SEQ ID NO: 181568 - DNA, 30 bp, Artificial Sequence
  Synthetic oligonucleotide
ccattaaccttcgttgggatcacgtgactt

SEQ ID NO: 181569 - DNA, 30 bp, Artificial Sequence
  Synthetic oligonucleotide
ggacgtaacgtatgcggacggacgtgactt

SEQ ID NO: 181570 - DNA, 30 bp, Artificial Sequence
  Synthetic oligonucleotide
aagggaacatatgagataaaaatgtgactt

SEQ ID NO: 181571 - DNA, 30 bp, Artificial Sequence
  Synthetic oligonucleotide
gatatggattagggaacatcccattgactt

SEQ ID NO: 181572 - DNA, 30 bp, Artificial Sequence
  Synthetic oligonucleotide
gatacggacccacgttagagattaatactt

SEQ ID NO: 181573 - DNA, 30 bp, Artificial Sequence
  Synthetic oligonucleotide
ggcacacaaagcgaagagcgccacatactt

SEQ ID NO: 181574 - DNA, 30 bp, Artificial Sequence
  Synthetic oligonucleotide
ccaactcacagccatgccgaggacatactt

SEQ ID NO: 181575 - DNA, 30 bp, Artificial Sequence
  Synthetic oligonucleotide
atggtatacctggccaaacaatacatactt

SEQ ID NO: 181576 - DNA, 30 bp, Artificial Sequence
  Synthetic oligonucleotide
aggtataagcaggcaaatatgtggatactt

SEQ ID NO: 181577 - DNA, 30 bp, Artificial Sequence
  Synthetic oligonucleotide
actcactgatagcagagtgctgtgatactt

SEQ ID NO: 181578 - DNA, 30 bp, Artificial Sequence
  Synthetic oligonucleotide
atgggatcaggtacagggaaagaactactt

SEQ ID NO: 181579 - DNA, 30 bp, Artificial Sequence
  Synthetic oligonucleotide
cgccaacagcaatagttatgatcactactt

SEQ ID NO: 181580 - DNA, 30 bp, Artificial Sequence
  Synthetic oligonucleotide
aaccaagctggaggacccagccacgtactt

SEQ ID NO: 181581 - DNA, 30 bp, Artificial Sequence
  Synthetic oligonucleotide
ttacaactgaaaatggtgttataattactt

SEQ ID NO: 181582 - DNA, 30 bp, Artificial Sequence
  Synthetic oligonucleotide
cagtagggcacggcaacatcttaaaacctt

SEQ ID NO: 181583 - DNA, 30 bp, Artificial Sequence
  Synthetic oligonucleotide
ggcgtatgtgaggatcacgaaaccaacctt

SEQ ID NO: 181584 - DNA, 30 bp, Artificial Sequence
  Synthetic oligonucleotide
gtaggacggtagcgcgtagcagtacacctt

SEQ ID NO: 181585 - DNA, 30 bp, Artificial Sequence
  Synthetic oligonucleotide
ccaggacaatggagactgctcgatcacctt

SEQ ID NO: 181586 - DNA, 30 bp, Artificial Sequence
  Synthetic oligonucleotide
catacgatggcgatgcaacaagccgacctt

SEQ ID NO: 181587 - DNA, 30 bp, Artificial Sequence
  Synthetic oligonucleotide
acacatatagaaagtccaacctatgacctt

SEQ ID NO: 181588 - DNA, 31 bp, Artificial Sequence
  Synthetic oligonucleotide
ctgcaaaccggacagtccatgtgaatacctt

SEQ ID NO: 181589 - DNA, 30 bp, Artificial Sequence
  Synthetic oligonucleotide
tatgcgcgacgatcgctcatcgaaaccctt

SEQ ID NO: 181590 - DNA, 30 bp, Artificial Sequence
  Synthetic oligonucleotide
tacgtactatggagagaggtaacccccctt

SEQ ID NO: 181591 - DNA, 30 bp, Artificial Sequence
  Synthetic oligonucleotide
cagaagtgtagggatgctacccgagccctt

SEQ ID NO: 181592 - DNA, 30 bp, Artificial Sequence
  Synthetic oligonucleotide
ctcgtggagacaaatatggctcgagccctt

SEQ ID NO: 181593 - DNA, 30 bp, Artificial Sequence
  Synthetic oligonucleotide
ataaggaaccaggtcctaagctgatccctt

SEQ ID NO: 181594 - DNA, 30 bp, Artificial Sequence
  Synthetic oligonucleotide
cgggtcaaagctaagtgatgtctttccctt

SEQ ID NO: 181595 - DNA, 30 bp, Artificial Sequence
  Synthetic oligonucleotide
cgtgctccggaagggctctggaaaagcctt

SEQ ID NO: 181596 - DNA, 30 bp, Artificial Sequence
  Synthetic oligonucleotide
caacctgccctaccgagtggacctagcctt

SEQ ID NO: 181597 - DNA, 30 bp, Artificial Sequence
  Synthetic oligonucleotide
agtacatgagttcgcagatgcgaacgcctt

SEQ ID NO: 181598 - DNA, 30 bp, Artificial Sequence
  Synthetic oligonucleotide
gctggcaacgtgttagtcgggataggcctt

SEQ ID NO: 181599 - DNA, 30 bp, Artificial Sequence
  Synthetic oligonucleotide
gaaagtgcaggttacaacagtcaatgcctt

SEQ ID NO: 181600 - DNA, 30 bp, Artificial Sequence
  Synthetic oligonucleotide
cgaagtaaaaatcggacgtgaaactgcctt

SEQ ID NO: 181601 - DNA, 30 bp, Artificial Sequence
  Synthetic oligonucleotide
gaagagtcgtgagttctaaacgcctgcctt

SEQ ID NO: 181602 - DNA, 30 bp, Artificial Sequence
  Synthetic oligonucleotide
agggtcggacctttattaaacagttgcctt

SEQ ID NO: 181603 - DNA, 30 bp, Artificial Sequence
  Synthetic oligonucleotide
tagtgcgtcgagcaatgggtaacaatcctt

SEQ ID NO: 181604 - DNA, 30 bp, Artificial Sequence
  Synthetic oligonucleotide
gcaaaacagaatgaggcatgcgcactcctt

SEQ ID NO: 181605 - DNA, 30 bp, Artificial Sequence
  Synthetic oligonucleotide
aatgtaagcggcatgggatcgggagtcctt

SEQ ID NO: 181606 - DNA, 30 bp, Artificial Sequence
  Synthetic oligonucleotide
aacgccagatcgttagatggcgcgttcctt

SEQ ID NO: 181607 - DNA, 30 bp, Artificial Sequence
  Synthetic oligonucleotide
cggtaaagacatgatggtacctctttcctt

SEQ ID NO: 181608 - DNA, 30 bp, Artificial Sequence
  Synthetic oligonucleotide
aaaacatgcgcacgtagtagataaaagctt

SEQ ID NO: 181609 - DNA, 30 bp, Artificial Sequence
  Synthetic oligonucleotide
gccataacgtgcagaactcatgtaaagctt

SEQ ID NO: 181610 - DNA, 30 bp, Artificial Sequence
  Synthetic oligonucleotide
agccgtagggttcatttatatcacaagctt

SEQ ID NO: 181611 - DNA, 30 bp, Artificial Sequence
  Synthetic oligonucleotide
atgctcgagcacataagccaatgcaagctt

SEQ ID NO: 181612 - DNA, 30 bp, Artificial Sequence
  Synthetic oligonucleotide
taggaagtgtcctattaggtcagtaagctt

SEQ ID NO: 181613 - DNA, 30 bp, Artificial Sequence
  Synthetic oligonucleotide
acaattcaagggactcgaattttccagctt

SEQ ID NO: 181614 - DNA, 30 bp, Artificial Sequence
  Synthetic oligonucleotide
aggaaggcggccaggagagcgtagcagctt

SEQ ID NO: 181615 - DNA, 30 bp, Artificial Sequence
  Synthetic oligonucleotide
aaagcatctcttgtaacgttctctcagctt

SEQ ID NO: 181616 - DNA, 30 bp, Artificial Sequence
  Synthetic oligonucleotide
tccggatcaaatatctagtgtgttgagctt

SEQ ID NO: 181617 - DNA, 30 bp, Artificial Sequence
  Synthetic oligonucleotide
tcacgattcgtctccgttactgactagctt

SEQ ID NO: 181618 - DNA, 30 bp, Artificial Sequence
  Synthetic oligonucleotide
tacagggatacgcaaccgccaaaaacgctt

SEQ ID NO: 181619 - DNA, 30 bp, Artificial Sequence
  Synthetic oligonucleotide
ctgagtgcaacagtcacagctaccacgctt

SEQ ID NO: 181620 - DNA, 30 bp, Artificial Sequence
  Synthetic oligonucleotide
acacatatttcccaataagtacatacgctt

SEQ ID NO: 181621 - DNA, 30 bp, Artificial Sequence
  Synthetic oligonucleotide
ggatatgtaaaataatcaatccatacgctt

SEQ ID NO: 181622 - DNA, 30 bp, Artificial Sequence
  Synthetic oligonucleotide
ataagtagaggaatttttaagggtacgctt

SEQ ID NO: 181623 - DNA, 30 bp, Artificial Sequence
  Synthetic oligonucleotide
atgtgcagggtactgaatgctttaccgctt

SEQ ID NO: 181624 - DNA, 30 bp, Artificial Sequence
  Synthetic oligonucleotide
gacggcgagtaacctcgtgtataagcgctt

SEQ ID NO: 181625 - DNA, 30 bp, Artificial Sequence
  Synthetic oligonucleotide
caatgtcttctacgggtaactttagcgctt

SEQ ID NO: 181626 - DNA, 30 bp, Artificial Sequence
  Synthetic oligonucleotide
aacggaaaagaggctatgatttatgcgctt

SEQ ID NO: 181627 - DNA, 30 bp, Artificial Sequence
  Synthetic oligonucleotide
accattggaatggaaaccctccgatcgctt

SEQ ID NO: 181628 - DNA, 30 bp, Artificial Sequence
  Synthetic oligonucleotide
gcgggcgtaacgcagattggactttcgctt

SEQ ID NO: 181629 - DNA, 30 bp, Artificial Sequence
  Synthetic oligonucleotide
aagaagacttccaaccaacttggaaggctt

SEQ ID NO: 181630 - DNA, 30 bp, Artificial Sequence
  Synthetic oligonucleotide
cattgcgggccttcctcacgtcacaggctt

SEQ ID NO: 181631 - DNA, 30 bp, Artificial Sequence
  Synthetic oligonucleotide
acgcgtgggttacatgccagagataggctt

SEQ ID NO: 181632 - DNA, 30 bp, Artificial Sequence
  Synthetic oligonucleotide
cgcttggtacgggtagtctaggcacggctt

SEQ ID NO: 181633 - DNA, 30 bp, Artificial Sequence
  Synthetic oligonucleotide
agaatccgcggcgttagaaaaatacggctt

SEQ ID NO: 181634 - DNA, 30 bp, Artificial Sequence
  Synthetic oligonucleotide
agcggatctcatgcaaacgctgtacggctt

SEQ ID NO: 181635 - DNA, 30 bp, Artificial Sequence
  Synthetic oligonucleotide
tattgaaactaaattatacagagagggctt

SEQ ID NO: 181636 - DNA, 30 bp, Artificial Sequence
  Synthetic oligonucleotide
tcggggaagccttatgcggattcggggctt

SEQ ID NO: 181637 - DNA, 30 bp, Artificial Sequence
  Synthetic oligonucleotide
caacggaaatgtaacagcgcatgtgggctt

SEQ ID NO: 181638 - DNA, 30 bp, Artificial Sequence
  Synthetic oligonucleotide
gtgtcctcgcaacttcatagagttgggctt

SEQ ID NO: 181639 - DNA, 30 bp, Artificial Sequence
  Synthetic oligonucleotide
gggtgttaagtgcgtcttgtgtttgggctt

SEQ ID NO: 181640 - DNA, 30 bp, Artificial Sequence
  Synthetic oligonucleotide
agccgatagtatcatagttgacactggctt

SEQ ID NO: 181641 - DNA, 30 bp, Artificial Sequence
  Synthetic oligonucleotide
aactgggaggatcgttcttattcaatgctt

SEQ ID NO: 181642 - DNA, 30 bp, Artificial Sequence
  Synthetic oligonucleotide
ggatagacttgaccgacgtatagaatgctt

SEQ ID NO: 181643 - DNA, 30 bp, Artificial Sequence
  Synthetic oligonucleotide
ggtgaagtcccagaaatggatggaatgctt

SEQ ID NO: 181644 - DNA, 30 bp, Artificial Sequence
  Synthetic oligonucleotide
gcgatagataagatgttgcacgggatgctt

SEQ ID NO: 181645 - DNA, 30 bp, Artificial Sequence
  Synthetic oligonucleotide
tgtccggaatccgtaaattggccactgctt

SEQ ID NO: 181646 - DNA, 30 bp, Artificial Sequence
  Synthetic oligonucleotide
gtacgcatttttctgcgtagatgactgctt

SEQ ID NO: 181647 - DNA, 30 bp, Artificial Sequence
  Synthetic oligonucleotide
ttcgggtgaagctgtatcggagtcctgctt

SEQ ID NO: 181648 - DNA, 30 bp, Artificial Sequence
  Synthetic oligonucleotide
cggacacagctcgaggcacacgggctgctt

SEQ ID NO: 181649 - DNA, 30 bp, Artificial Sequence
  Synthetic oligonucleotide
cactgtcgaggaatcatagggggcgtgctt

SEQ ID NO: 181650 - DNA, 30 bp, Artificial Sequence
  Synthetic oligonucleotide
ccgtaggtagtccgacatactatgttgctt

SEQ ID NO: 181651 - DNA, 30 bp, Artificial Sequence
  Synthetic oligonucleotide
ccaggagagaagtgagattgcactttgctt

SEQ ID NO: 181652 - DNA, 30 bp, Artificial Sequence
  Synthetic oligonucleotide
ccgggctggctctgtgggaacctaaatctt

SEQ ID NO: 181653 - DNA, 30 bp, Artificial Sequence
  Synthetic oligonucleotide
atgcttcgttgcatcattaggtccaatctt

SEQ ID NO: 181654 - DNA, 30 bp, Artificial Sequence
  Synthetic oligonucleotide
gtcgggctgatctcacagttgaaacatctt

SEQ ID NO: 181655 - DNA, 30 bp, Artificial Sequence
  Synthetic oligonucleotide
cgtgttagtaacgaggccagctgacatctt

SEQ ID NO: 181656 - DNA, 30 bp, Artificial Sequence
  Synthetic oligonucleotide
tgacagttacagctagcgatgctccatctt

SEQ ID NO: 181657 - DNA, 30 bp, Artificial Sequence
  Synthetic oligonucleotide
cgacactcggtccctagtgaatggcatctt

SEQ ID NO: 181658 - DNA, 30 bp, Artificial Sequence
  Synthetic oligonucleotide
gatgggagaccacttcaaatattagatctt

SEQ ID NO: 181659 - DNA, 30 bp, Artificial Sequence
  Synthetic oligonucleotide
gtgtctgctcgcggaggagcaaccgatctt

SEQ ID NO: 181660 - DNA, 30 bp, Artificial Sequence
  Synthetic oligonucleotide
cggcggtcagataattcttactaggatctt

SEQ ID NO: 181661 - DNA, 30 bp, Artificial Sequence
  Synthetic oligonucleotide
gctctgaaaatcatgtcgctgttggatctt

SEQ ID NO: 181662 - DNA, 30 bp, Artificial Sequence
  Synthetic oligonucleotide
accgatatgccggcccggagttactatctt

SEQ ID NO: 181663 - DNA, 30 bp, Artificial Sequence
  Synthetic oligonucleotide
atataggtgtgcgttaagtgtaccactctt

SEQ ID NO: 181664 - DNA, 30 bp, Artificial Sequence
  Synthetic oligonucleotide
cagggcctaatcattgaggagaggactctt

SEQ ID NO: 181665 - DNA, 30 bp, Artificial Sequence
  Synthetic oligonucleotide
ctcataaatggccgttagtctcatactctt

SEQ ID NO: 181666 - DNA, 30 bp, Artificial Sequence
  Synthetic oligonucleotide
gcacagcacgttgccatcatcagagctctt

SEQ ID NO: 181667 - DNA, 30 bp, Artificial Sequence
  Synthetic oligonucleotide
gaaggcgagtagctacgcactcccgctctt

SEQ ID NO: 181668 - DNA, 30 bp, Artificial Sequence
  Synthetic oligonucleotide
cctccgattcgacagacttattgtgctctt

SEQ ID NO: 181669 - DNA, 30 bp, Artificial Sequence
  Synthetic oligonucleotide
gtgatcacgctgccactaaccaggtctctt

SEQ ID NO: 181670 - DNA, 30 bp, Artificial Sequence
  Synthetic oligonucleotide
atcacgggaaactcctctaaggacagtctt

SEQ ID NO: 181671 - DNA, 30 bp, Artificial Sequence
  Synthetic oligonucleotide
cgcgggactcagggggtggatgctagtctt

SEQ ID NO: 181672 - DNA, 30 bp, Artificial Sequence
  Synthetic oligonucleotide
atttgagatgcttagtactgttaccgtctt

SEQ ID NO: 181673 - DNA, 30 bp, Artificial Sequence
  Synthetic oligonucleotide
agtcatgggacctcagacacttcgcgtctt

SEQ ID NO: 181674 - DNA, 30 bp, Artificial Sequence
  Synthetic oligonucleotide
cgcaatcgccgggaagtgctgatcggtctt

SEQ ID NO: 181675 - DNA, 30 bp, Artificial Sequence
  Synthetic oligonucleotide
gtgtgctggcgtgcgctcgggtcgggtctt

SEQ ID NO: 181676 - DNA, 30 bp, Artificial Sequence
  Synthetic oligonucleotide
tgaaggcacggattaagaccgagtggtctt

SEQ ID NO: 181677 - DNA, 30 bp, Artificial Sequence
  Synthetic oligonucleotide
gagcctaaagcaacaccagtcattggtctt

SEQ ID NO: 181678 - DNA, 30 bp, Artificial Sequence
  Synthetic oligonucleotide
acgttcgcgacaaactaacgtaaatgtctt

SEQ ID NO: 181679 - DNA, 30 bp, Artificial Sequence
  Synthetic oligonucleotide
tgttaagcagtccctaccagacgatgtctt

SEQ ID NO: 181680 - DNA, 30 bp, Artificial Sequence
  Synthetic oligonucleotide
tggtcaaagtggcgccggagaacctgtctt

SEQ ID NO: 181681 - DNA, 30 bp, Artificial Sequence
  Synthetic oligonucleotide
gcaataaagttcacactcagacatattctt

SEQ ID NO: 181682 - DNA, 30 bp, Artificial Sequence
  Synthetic oligonucleotide
atgggatcatgggtatgtaaacgcgttctt

SEQ ID NO: 181683 - DNA, 30 bp, Artificial Sequence
  Synthetic oligonucleotide
gcaccaaccggcccagatttcgaggttctt

SEQ ID NO: 181684 - DNA, 30 bp, Artificial Sequence
  Synthetic oligonucleotide
agcctcatataagcggaccagtggtttctt

SEQ ID NO: 181685 - DNA, 30 bp, Artificial Sequence
  Synthetic oligonucleotide
tctccattgccgacgtcacggccaaaagtt

SEQ ID NO: 181686 - DNA, 30 bp, Artificial Sequence
  Synthetic oligonucleotide
ccacttcatgctacctaatcgcgaaaagtt

SEQ ID NO: 181687 - DNA, 30 bp, Artificial Sequence
  Synthetic oligonucleotide
ggacacgacaccctgctattattgaaagtt

SEQ ID NO: 181688 - DNA, 30 bp, Artificial Sequence
  Synthetic oligonucleotide
acaaactatgatgaaaggtaaaataaagtt

SEQ ID NO: 181689 - DNA, 30 bp, Artificial Sequence
  Synthetic oligonucleotide
tctagcgttttggaatggaagtgtaaagtt

SEQ ID NO: 181690 - DNA, 30 bp, Artificial Sequence
  Synthetic oligonucleotide
gggagaaaaagatataactttgtccaagtt

SEQ ID NO: 181691 - DNA, 30 bp, Artificial Sequence
  Synthetic oligonucleotide
cgttggcggtacaaatttagttaagaagtt

SEQ ID NO: 181692 - DNA, 30 bp, Artificial Sequence
  Synthetic oligonucleotide
ttagagtaatgttgccccattgtagaagtt

SEQ ID NO: 181693 - DNA, 30 bp, Artificial Sequence
  Synthetic oligonucleotide
ccctgcactgcctcctaaagttaataagtt

SEQ ID NO: 181694 - DNA, 30 bp, Artificial Sequence
  Synthetic oligonucleotide
tttgaatccacagactcgtccagataagtt

SEQ ID NO: 181695 - DNA, 30 bp, Artificial Sequence
  Synthetic oligonucleotide
tgcattatgcgcgaaatttcccaaacagtt

SEQ ID NO: 181696 - DNA, 30 bp, Artificial Sequence
  Synthetic oligonucleotide
agtaagaggaggaggcaaaggtaaacagtt

SEQ ID NO: 181697 - DNA, 30 bp, Artificial Sequence
  Synthetic oligonucleotide
gcaagccatctggtttgcatcataacagtt

SEQ ID NO: 181698 - DNA, 30 bp, Artificial Sequence
  Synthetic oligonucleotide
gacgcgcattaattccgttgggtaacagtt

SEQ ID NO: 181699 - DNA, 30 bp, Artificial Sequence
  Synthetic oligonucleotide
tacctggcgtggaatcgccaacttgcagtt

SEQ ID NO: 181700 - DNA, 30 bp, Artificial Sequence
  Synthetic oligonucleotide
ttgcaataagcttcattctacgtctcagtt

SEQ ID NO: 181701 - DNA, 30 bp, Artificial Sequence
  Synthetic oligonucleotide
acggcattagacatgcgattggattcagtt

SEQ ID NO: 181702 - DNA, 29 bp, Artificial Sequence
  Synthetic oligonucleotide
gctatgctctagtgtatttcaaaagagtt

SEQ ID NO: 181703 - DNA, 30 bp, Artificial Sequence
  Synthetic oligonucleotide
agctgatatgcgcccagccacatgggagtt

SEQ ID NO: 181704 - DNA, 30 bp, Artificial Sequence
  Synthetic oligonucleotide
tccgtggagtacaaccaaattgttggagtt

SEQ ID NO: 181705 - DNA, 30 bp, Artificial Sequence
  Synthetic oligonucleotide
tcgaaggctccacacaaaaatccgtgagtt

SEQ ID NO: 181706 - DNA, 30 bp, Artificial Sequence
  Synthetic oligonucleotide
ggcgttgacaattcctaatcaggcatagtt

SEQ ID NO: 181707 - DNA, 31 bp, Artificial Sequence
  Synthetic oligonucleotide
ccgaacagccagactatagtaccccctagtt

SEQ ID NO: 181708 - DNA, 30 bp, Artificial Sequence
  Synthetic oligonucleotide
atctcaagcttcggtctggctctcctagtt

SEQ ID NO: 181709 - DNA, 30 bp, Artificial Sequence
  Synthetic oligonucleotide
gtagggacacgtggatgtacagagctagtt

SEQ ID NO: 181710 - DNA, 30 bp, Artificial Sequence
  Synthetic oligonucleotide
atgcgagcaatccggccataccttctagtt

SEQ ID NO: 181711 - DNA, 30 bp, Artificial Sequence
  Synthetic oligonucleotide
cttagtcacaggagggcatgctttctagtt

SEQ ID NO: 181712 - DNA, 30 bp, Artificial Sequence
  Synthetic oligonucleotide
tggtggtattagtattcatcgaaagtagtt

SEQ ID NO: 181713 - DNA, 30 bp, Artificial Sequence
  Synthetic oligonucleotide
ggcggggtccaccaaaggacctaagtagtt

SEQ ID NO: 181714 - DNA, 30 bp, Artificial Sequence
  Synthetic oligonucleotide
gttagataattggtaactcgatcagtagtt

SEQ ID NO: 181715 - DNA, 30 bp, Artificial Sequence
  Synthetic oligonucleotide
ttacgttggcatagatagatccacgtagtt

SEQ ID NO: 181716 - DNA, 30 bp, Artificial Sequence
  Synthetic oligonucleotide
taagactcactcaaggggaacgaggtagtt

SEQ ID NO: 181717 - DNA, 30 bp, Artificial Sequence
  Synthetic oligonucleotide
cagagtgtatgctcgtcctagccggtagtt

SEQ ID NO: 181718 - DNA, 30 bp, Artificial Sequence
  Synthetic oligonucleotide
caaccatcgctaagataaccctatttagtt

SEQ ID NO: 181719 - DNA, 30 bp, Artificial Sequence
  Synthetic oligonucleotide
aaagggatcggtattgggaaagtcaacgtt

SEQ ID NO: 181720 - DNA, 30 bp, Artificial Sequence
  Synthetic oligonucleotide
cagtcacaccgtacctcaggaaagaacgtt

SEQ ID NO: 181721 - DNA, 30 bp, Artificial Sequence
  Synthetic oligonucleotide
tcgccctggaaagaggtgcacttgaacgtt

SEQ ID NO: 181722 - DNA, 30 bp, Artificial Sequence
  Synthetic oligonucleotide
ttagggtactcaatgaacgacagtaacgtt

SEQ ID NO: 181723 - DNA, 30 bp, Artificial Sequence
  Synthetic oligonucleotide
gctgaagggtcctcgcacagcagacacgtt

SEQ ID NO: 181724 - DNA, 30 bp, Artificial Sequence
  Synthetic oligonucleotide
caacgttgtggcgtgcggtattatcacgtt

SEQ ID NO: 181725 - DNA, 30 bp, Artificial Sequence
  Synthetic oligonucleotide
tgagcacagtgtaaggtaaccaaatacgtt

SEQ ID NO: 181726 - DNA, 30 bp, Artificial Sequence
  Synthetic oligonucleotide
gatcagctctttccggcattgggctacgtt

SEQ ID NO: 181727 - DNA, 30 bp, Artificial Sequence
  Synthetic oligonucleotide
gtcagtgcaactgcttcatatgaaaccgtt

SEQ ID NO: 181728 - DNA, 30 bp, Artificial Sequence
  Synthetic oligonucleotide
gactgggacaagctgcctggaagaaccgtt

SEQ ID NO: 181729 - DNA, 30 bp, Artificial Sequence
  Synthetic oligonucleotide
agtgaactgatgaaggcaggtctaaccgtt

SEQ ID NO: 181730 - DNA, 30 bp, Artificial Sequence
  Synthetic oligonucleotide
actgcaaagtgaacaactaggaaacccgtt

SEQ ID NO: 181731 - DNA, 30 bp, Artificial Sequence
  Synthetic oligonucleotide
agttgtgatggctgaggacgaccacccgtt

SEQ ID NO: 181732 - DNA, 30 bp, Artificial Sequence
  Synthetic oligonucleotide
ttacggacgcctcagcgaaatagccccgtt

SEQ ID NO: 181733 - DNA, 30 bp, Artificial Sequence
  Synthetic oligonucleotide
caaagtattcatagttgttagctagccgtt

SEQ ID NO: 181734 - DNA, 30 bp, Artificial Sequence
  Synthetic oligonucleotide
gtgactgtacgaatcagtgtagcggccgtt

SEQ ID NO: 181735 - DNA, 30 bp, Artificial Sequence
  Synthetic oligonucleotide
attgtcaggttgtgataatgaatggccgtt

SEQ ID NO: 181736 - DNA, 30 bp, Artificial Sequence
  Synthetic oligonucleotide
aagttcaaaagtgtgcgatccactgccgtt

SEQ ID NO: 181737 - DNA, 30 bp, Artificial Sequence
  Synthetic oligonucleotide
gtggcatgttaacaagagagatcaagcgtt

SEQ ID NO: 181738 - DNA, 30 bp, Artificial Sequence
  Synthetic oligonucleotide
tcagcagctgtactagtagtagttagcgtt

SEQ ID NO: 181739 - DNA, 30 bp, Artificial Sequence
  Synthetic oligonucleotide
gtctagagtgacattttactcccccgcgtt

SEQ ID NO: 181740 - DNA, 30 bp, Artificial Sequence
  Synthetic oligonucleotide
cgcgggagaagagtgaacgcaccgcgcgtt

SEQ ID NO: 181741 - DNA, 30 bp, Artificial Sequence
  Synthetic oligonucleotide
tacacattgagggggacaggttccggcgtt

SEQ ID NO: 181742 - DNA, 30 bp, Artificial Sequence
  Synthetic oligonucleotide
caaacagaatgtgacacagaagatggcgtt

SEQ ID NO: 181743 - DNA, 30 bp, Artificial Sequence
  Synthetic oligonucleotide
gaactaggtgcctagtgagaaaagtgcgtt

SEQ ID NO: 181744 - DNA, 30 bp, Artificial Sequence
  Synthetic oligonucleotide
ccaagcggggggaaatagcgctagtgcgtt

SEQ ID NO: 181745 - DNA, 30 bp, Artificial Sequence
  Synthetic oligonucleotide
tgtctctagcagacagcggttaggctcgtt

SEQ ID NO: 181746 - DNA, 30 bp, Artificial Sequence
  Synthetic oligonucleotide
gctctgggggacacatccgtacgtctcgtt

SEQ ID NO: 181747 - DNA, 30 bp, Artificial Sequence
  Synthetic oligonucleotide
tggctaatagcgctcaggcttccagtcgtt

SEQ ID NO: 181748 - DNA, 30 bp, Artificial Sequence
  Synthetic oligonucleotide
gtttcaactcaccgttccctacccgtcgtt

SEQ ID NO: 181749 - DNA, 30 bp, Artificial Sequence
  Synthetic oligonucleotide
tggtaatgtaaacttactcagtaggtcgtt

SEQ ID NO: 181750 - DNA, 30 bp, Artificial Sequence
  Synthetic oligonucleotide
gagaggctggcacattatctggacttcgtt

SEQ ID NO: 181751 - DNA, 30 bp, Artificial Sequence
  Synthetic oligonucleotide
ggaagagactttgcctgtcgcgagaaggtt

SEQ ID NO: 181752 - DNA, 30 bp, Artificial Sequence
  Synthetic oligonucleotide
agccatgtccattgatgactacggaaggtt

SEQ ID NO: 181753 - DNA, 30 bp, Artificial Sequence
  Synthetic oligonucleotide
gtacaacattcatagatcagtgttaaggtt

SEQ ID NO: 181754 - DNA, 30 bp, Artificial Sequence
  Synthetic oligonucleotide
cctcgtacgggcccaggcaaatttaaggtt

SEQ ID NO: 181755 - DNA, 30 bp, Artificial Sequence
  Synthetic oligonucleotide
tgggcaattccttgggcgccctagcaggtt

SEQ ID NO: 181756 - DNA, 30 bp, Artificial Sequence
  Synthetic oligonucleotide
cattggaaagaaaaacacggcgctcaggtt

SEQ ID NO: 181757 - DNA, 30 bp, Artificial Sequence
  Synthetic oligonucleotide
aagcgaagggtaactggactgtgtcaggtt

SEQ ID NO: 181758 - DNA, 30 bp, Artificial Sequence
  Synthetic oligonucleotide
ccaatggatacttactacctctgggaggtt

SEQ ID NO: 181759 - DNA, 30 bp, Artificial Sequence
  Synthetic oligonucleotide
ctaaacgattaaaattgagtatatgaggtt

SEQ ID NO: 181760 - DNA, 30 bp, Artificial Sequence
  Synthetic oligonucleotide
tcgaggttgtgagatcaaatacacacggtt

SEQ ID NO: 181761 - DNA, 30 bp, Artificial Sequence
  Synthetic oligonucleotide
tgtagtttataaatgcgagaggtgacggtt

SEQ ID NO: 181762 - DNA, 30 bp, Artificial Sequence
  Synthetic oligonucleotide
ctgggtgcaagattcagaggcgctacggtt

SEQ ID NO: 181763 - DNA, 30 bp, Artificial Sequence
  Synthetic oligonucleotide
tagctcgtgatggaagactgctgaccggtt

SEQ ID NO: 181764 - DNA, 30 bp, Artificial Sequence
  Synthetic oligonucleotide
taacggtcaatcaataaacagcagccggtt

SEQ ID NO: 181765 - DNA, 30 bp, Artificial Sequence
  Synthetic oligonucleotide
agtccaggaatacccatgcacgaggcggtt

SEQ ID NO: 181766 - DNA, 30 bp, Artificial Sequence
  Synthetic oligonucleotide
tccatgcccatgtgtcttcgccgtgcggtt

SEQ ID NO: 181767 - DNA, 30 bp, Artificial Sequence
  Synthetic oligonucleotide
catcattaatttaggaagacgaaatcggtt

SEQ ID NO: 181768 - DNA, 30 bp, Artificial Sequence
  Synthetic oligonucleotide
ggaacaaccgcaacacaattgtgctcggtt

SEQ ID NO: 181769 - DNA, 30 bp, Artificial Sequence
  Synthetic oligonucleotide
tccgggaggcgcacttgcctagcgtcggtt

SEQ ID NO: 181770 - DNA, 30 bp, Artificial Sequence
  Synthetic oligonucleotide
tgagagtacaaaacgggggcgggttcggtt

SEQ ID NO: 181771 - DNA, 30 bp, Artificial Sequence
  Synthetic oligonucleotide
cagcacatggttttaagaaagtgttcggtt

SEQ ID NO: 181772 - DNA, 30 bp, Artificial Sequence
  Synthetic oligonucleotide
tccgtagtttctcgtaatagctaaagggtt

SEQ ID NO: 181773 - DNA, 30 bp, Artificial Sequence
  Synthetic oligonucleotide
taactcccggatcgaaggatatgcagggtt

SEQ ID NO: 181774 - DNA, 30 bp, Artificial Sequence
  Synthetic oligonucleotide
gtgaagtgaaatttgaagtgtccgagggtt

SEQ ID NO: 181775 - DNA, 30 bp, Artificial Sequence
  Synthetic oligonucleotide
cgagactgctcaaacgcgtgccatagggtt

SEQ ID NO: 181776 - DNA, 30 bp, Artificial Sequence
  Synthetic oligonucleotide
catagtcttgaaataaatcaacgtagggtt

SEQ ID NO: 181777 - DNA, 30 bp, Artificial Sequence
  Synthetic oligonucleotide
gtatgttcagatacataggggtcacgggtt

SEQ ID NO: 181778 - DNA, 30 bp, Artificial Sequence
  Synthetic oligonucleotide
taacctgtggagggcaatgacccgcgggtt

SEQ ID NO: 181779 - DNA, 30 bp, Artificial Sequence
  Synthetic oligonucleotide
cactggcgggatctcggaatccatcgggtt

SEQ ID NO: 181780 - DNA, 30 bp, Artificial Sequence
  Synthetic oligonucleotide
atggtaaccgtgtcaatccagcttggggtt

SEQ ID NO: 181781 - DNA, 30 bp, Artificial Sequence
  Synthetic oligonucleotide
acagagaccagaaatggtaaagggtgggtt

SEQ ID NO: 181782 - DNA, 30 bp, Artificial Sequence
  Synthetic oligonucleotide
ggtattagtagacaaaattcgggttgggtt

SEQ ID NO: 181783 - DNA, 30 bp, Artificial Sequence
  Synthetic oligonucleotide
ccgatatgggcttacacgcacggaatggtt

SEQ ID NO: 181784 - DNA, 31 bp, Artificial Sequence
  Synthetic oligonucleotide
catcgtcggggcgttcaacacagagatggtt

SEQ ID NO: 181785 - DNA, 30 bp, Artificial Sequence
  Synthetic oligonucleotide
acttcgtattaagagcggtagaggatggtt

SEQ ID NO: 181786 - DNA, 30 bp, Artificial Sequence
  Synthetic oligonucleotide
tagcgtgtatgtgagctaccaattatggtt

SEQ ID NO: 181787 - DNA, 30 bp, Artificial Sequence
  Synthetic oligonucleotide
tcggtacctaagtcaaggggccaactggtt

SEQ ID NO: 181788 - DNA, 30 bp, Artificial Sequence
  Synthetic oligonucleotide
gaaaacgtactttctggcgtgaacctggtt

SEQ ID NO: 181789 - DNA, 30 bp, Artificial Sequence
  Synthetic oligonucleotide
tcgggctccgctaaggtagccaggctggtt

SEQ ID NO: 181790 - DNA, 30 bp, Artificial Sequence
  Synthetic oligonucleotide
ttcgatatccatagaggcacgcgcgtggtt

SEQ ID NO: 181791 - DNA, 30 bp, Artificial Sequence
  Synthetic oligonucleotide
taaagcggatcgacttgtcttagaaatgtt

SEQ ID NO: 181792 - DNA, 30 bp, Artificial Sequence
  Synthetic oligonucleotide
gggtgaattgtaccattttagcaacatgtt

SEQ ID NO: 181793 - DNA, 30 bp, Artificial Sequence
  Synthetic oligonucleotide
gttaccaaacgtatgacagctgtacatgtt

SEQ ID NO: 181794 - DNA, 30 bp, Artificial Sequence
  Synthetic oligonucleotide
ctaggtcacctagaccatgtcgcgcatgtt

SEQ ID NO: 181795 - DNA, 30 bp, Artificial Sequence
  Synthetic oligonucleotide
tgcaaacggacaatggaaaagttagatgtt

SEQ ID NO: 181796 - DNA, 30 bp, Artificial Sequence
  Synthetic oligonucleotide
caacgtgatcctaaattgtatgtcgatgtt

SEQ ID NO: 181797 - DNA, 30 bp, Artificial Sequence
  Synthetic oligonucleotide
taggatgtgggggcctcaacgactgatgtt

SEQ ID NO: 181798 - DNA, 30 bp, Artificial Sequence
  Synthetic oligonucleotide
ggaaaggcgtcggatggctacacatatgtt

SEQ ID NO: 181799 - DNA, 30 bp, Artificial Sequence
  Synthetic oligonucleotide
atcgtggcagtcggtccgcccggcactgtt

SEQ ID NO: 181800 - DNA, 30 bp, Artificial Sequence
  Synthetic oligonucleotide
gaaaagcaccgtatgaatccgagtactgtt

SEQ ID NO: 181801 - DNA, 30 bp, Artificial Sequence
  Synthetic oligonucleotide
gaccgaactggccaagaacatgatcctgtt

SEQ ID NO: 181802 - DNA, 30 bp, Artificial Sequence
  Synthetic oligonucleotide
taatggccgaagcgtatagccatagctgtt

SEQ ID NO: 181803 - DNA, 30 bp, Artificial Sequence
  Synthetic oligonucleotide
cgttatcgactccaattacagttcgctgtt

SEQ ID NO: 181804 - DNA, 30 bp, Artificial Sequence
  Synthetic oligonucleotide
gcatgaaaggaatcgcctccttgctctgtt

SEQ ID NO: 181805 - DNA, 30 bp, Artificial Sequence
  Synthetic oligonucleotide
aggcacatatctggggacaaatattctgtt

SEQ ID NO: 181806 - DNA, 30 bp, Artificial Sequence
  Synthetic oligonucleotide
cgccatcgagtttctaatatagccagtgtt

SEQ ID NO: 181807 - DNA, 30 bp, Artificial Sequence
  Synthetic oligonucleotide
attaaaagtaccctaagggaggaccgtgtt

SEQ ID NO: 181808 - DNA, 30 bp, Artificial Sequence
  Synthetic oligonucleotide
aggatactgacactcacaactttccgtgtt

SEQ ID NO: 181809 - DNA, 30 bp, Artificial Sequence
  Synthetic oligonucleotide
cattaacctggggtaacacgcgatcgtgtt

SEQ ID NO: 181810 - DNA, 30 bp, Artificial Sequence
  Synthetic oligonucleotide
agacaccgtagagcggtcatccctcgtgtt

SEQ ID NO: 181811 - DNA, 30 bp, Artificial Sequence
  Synthetic oligonucleotide
caaaagcacagcctcaaagccgtaggtgtt

SEQ ID NO: 181812 - DNA, 30 bp, Artificial Sequence
  Synthetic oligonucleotide
gggtacgcaggggaataatgctgtggtgtt

SEQ ID NO: 181813 - DNA, 30 bp, Artificial Sequence
  Synthetic oligonucleotide
cgacacaaggacgtattgcccgcatgtgtt

SEQ ID NO: 181814 - DNA, 30 bp, Artificial Sequence
  Synthetic oligonucleotide
gctcggcaatatgatgtttggacctgtgtt

SEQ ID NO: 181815 - DNA, 30 bp, Artificial Sequence
  Synthetic oligonucleotide
catagattaagtcatgtctcggcctgtgtt

SEQ ID NO: 181816 - DNA, 30 bp, Artificial Sequence
  Synthetic oligonucleotide
acgtaaaatgtagcctgctccaaaattgtt

SEQ ID NO: 181817 - DNA, 30 bp, Artificial Sequence
  Synthetic oligonucleotide
gaaagcgttaaggctgaaatcaagattgtt

SEQ ID NO: 181818 - DNA, 30 bp, Artificial Sequence
  Synthetic oligonucleotide
tgagaacgtggccatctaaggtgggttgtt

SEQ ID NO: 181819 - DNA, 30 bp, Artificial Sequence
  Synthetic oligonucleotide
aacaggaaataaaattcgtcaagtgttgtt

SEQ ID NO: 181820 - DNA, 30 bp, Artificial Sequence
  Synthetic oligonucleotide
ctgagagaggtatgagcatcaggtgttgtt

SEQ ID NO: 181821 - DNA, 30 bp, Artificial Sequence
  Synthetic oligonucleotide
ctatgacaacatgtggtctgcgactttgtt

SEQ ID NO: 181822 - DNA, 30 bp, Artificial Sequence
  Synthetic oligonucleotide
gatgcgaaatgaatggcggtgacctttgtt

SEQ ID NO: 181823 - DNA, 30 bp, Artificial Sequence
  Synthetic oligonucleotide
tgctaagtcttacccctcgagcagtttgtt

SEQ ID NO: 181824 - DNA, 30 bp, Artificial Sequence
  Synthetic oligonucleotide
agcggggtatgagagaacgtacattttgtt

SEQ ID NO: 181825 - DNA, 30 bp, Artificial Sequence
  Synthetic oligonucleotide
cacaggaaatgcgtgccttttaaaaaattt

SEQ ID NO: 181826 - DNA, 30 bp, Artificial Sequence
  Synthetic oligonucleotide
tggcgtgtggtgatcaggggagtaaaattt

SEQ ID NO: 181827 - DNA, 30 bp, Artificial Sequence
  Synthetic oligonucleotide
gtaacaggacacgacaagagccacaaattt

SEQ ID NO: 181828 - DNA, 30 bp, Artificial Sequence
  Synthetic oligonucleotide
aatcgagcaatggcgtcggaacgcaaattt

SEQ ID NO: 181829 - DNA, 30 bp, Artificial Sequence
  Synthetic oligonucleotide
cgttctggtgggaaccatctcactaaattt

SEQ ID NO: 181830 - DNA, 30 bp, Artificial Sequence
  Synthetic oligonucleotide
ggggtctagctcaacgaactaagacaattt

SEQ ID NO: 181831 - DNA, 30 bp, Artificial Sequence
  Synthetic oligonucleotide
aggtatcaaatgatggaggatgtgcaattt

SEQ ID NO: 181832 - DNA, 31 bp, Artificial Sequence
  Synthetic oligonucleotide
caggctaacatgctagtgggcaaaagaattt

SEQ ID NO: 181833 - DNA, 30 bp, Artificial Sequence
  Synthetic oligonucleotide
gtgcatgtcctacctcgtcaccgtgaattt

SEQ ID NO: 181834 - DNA, 30 bp, Artificial Sequence
  Synthetic oligonucleotide
accacgggaatggcagtgacgaaataattt

SEQ ID NO: 181835 - DNA, 30 bp, Artificial Sequence
  Synthetic oligonucleotide
aagagcactgtcacagaagttcaataattt

SEQ ID NO: 181836 - DNA, 30 bp, Artificial Sequence
  Synthetic oligonucleotide
cggcagacatacagacgggggggctaattt

SEQ ID NO: 181837 - DNA, 30 bp, Artificial Sequence
  Synthetic oligonucleotide
ccggggcgtgaggccaaactgacgtaattt

SEQ ID NO: 181838 - DNA, 30 bp, Artificial Sequence
  Synthetic oligonucleotide
cgttttaaactggaaccgcggaattaattt

SEQ ID NO: 181839 - DNA, 30 bp, Artificial Sequence
  Synthetic oligonucleotide
tccgtcagtatgtgatccagaacttaattt

SEQ ID NO: 181840 - DNA, 30 bp, Artificial Sequence
  Synthetic oligonucleotide
agtgtcaccctcacgtgaacgataacattt

SEQ ID NO: 181841 - DNA, 30 bp, Artificial Sequence
  Synthetic oligonucleotide
gcgcgggacaagcgtgttatgataacattt

SEQ ID NO: 181842 - DNA, 30 bp, Artificial Sequence
  Synthetic oligonucleotide
taggggcggtacgaaccacatgggacattt

SEQ ID NO: 181843 - DNA, 30 bp, Artificial Sequence
  Synthetic oligonucleotide
agattggcaaaacttttgcgtgtaccattt

SEQ ID NO: 181844 - DNA, 30 bp, Artificial Sequence
  Synthetic oligonucleotide
aggaaccaagaatatgaagaccggccattt

SEQ ID NO: 181845 - DNA, 30 bp, Artificial Sequence
  Synthetic oligonucleotide
cgggtacgatacgattttattctgccattt

SEQ ID NO: 181846 - DNA, 30 bp, Artificial Sequence
  Synthetic oligonucleotide
tccatgcggaaaaaataaccgtgagcattt

SEQ ID NO: 181847 - DNA, 30 bp, Artificial Sequence
  Synthetic oligonucleotide
ggatcaggtgacttttggaaactcgcattt

SEQ ID NO: 181848 - DNA, 30 bp, Artificial Sequence
  Synthetic oligonucleotide
cgggatttgctgctgtcttgcctcgcattt

SEQ ID NO: 181849 - DNA, 30 bp, Artificial Sequence
  Synthetic oligonucleotide
aaggcaataacagagtacgcattggcattt

SEQ ID NO: 181850 - DNA, 30 bp, Artificial Sequence
  Synthetic oligonucleotide
gcacaccatacctatgcgctcagtgcattt

SEQ ID NO: 181851 - DNA, 30 bp, Artificial Sequence
  Synthetic oligonucleotide
tgtaggccatgagacgagaccagatcattt

SEQ ID NO: 181852 - DNA, 30 bp, Artificial Sequence
  Synthetic oligonucleotide
ctcgggtagctaaaagatgggttctcattt

SEQ ID NO: 181853 - DNA, 31 bp, Artificial Sequence
  Synthetic oligonucleotide
cattcagctggggggatgttgggcgtcattt

SEQ ID NO: 181854 - DNA, 30 bp, Artificial Sequence
  Synthetic oligonucleotide
acaaaagctggtgtataacgtgtgtcattt

SEQ ID NO: 181855 - DNA, 30 bp, Artificial Sequence
  Synthetic oligonucleotide
aacgataaccaagttttataagattcattt

SEQ ID NO: 181856 - DNA, 30 bp, Artificial Sequence
  Synthetic oligonucleotide
cgcatgttagcggatcataggagttcattt

SEQ ID NO: 181857 - DNA, 30 bp, Artificial Sequence
  Synthetic oligonucleotide
acgtcatgcaaagatatcggtaacagattt

SEQ ID NO: 181858 - DNA, 30 bp, Artificial Sequence
  Synthetic oligonucleotide
caaacagcttccaagcggtgactgagattt

SEQ ID NO: 181859 - DNA, 30 bp, Artificial Sequence
  Synthetic oligonucleotide
ttgaaaaggtggcgggcggcgatacgattt

SEQ ID NO: 181860 - DNA, 30 bp, Artificial Sequence
  Synthetic oligonucleotide
cgtgtagccgaccacttatatatgcgattt

SEQ ID NO: 181861 - DNA, 29 bp, Artificial Sequence
  Synthetic oligonucleotide
tggcagggattagaggtggaaatggattt

SEQ ID NO: 181862 - DNA, 30 bp, Artificial Sequence
  Synthetic oligonucleotide
tgtcctttacaggatttggctaatggattt

SEQ ID NO: 181863 - DNA, 30 bp, Artificial Sequence
  Synthetic oligonucleotide
taaaccatgggggctcacggtgatggattt

SEQ ID NO: 181864 - DNA, 30 bp, Artificial Sequence
  Synthetic oligonucleotide
gtgccgcaaacaaggactgactctggattt

SEQ ID NO: 181865 - DNA, 30 bp, Artificial Sequence
  Synthetic oligonucleotide
tctcgggtacgagtcgctcatattggattt

SEQ ID NO: 181866 - DNA, 30 bp, Artificial Sequence
  Synthetic oligonucleotide
ccaagatcgaagctgtacttcacatgattt

SEQ ID NO: 181867 - DNA, 30 bp, Artificial Sequence
  Synthetic oligonucleotide
gcccagaatctacccgaagtcccatgattt

SEQ ID NO: 181868 - DNA, 30 bp, Artificial Sequence
  Synthetic oligonucleotide
cggacatttcagttcatcgagatttgattt

SEQ ID NO: 181869 - DNA, 30 bp, Artificial Sequence
  Synthetic oligonucleotide
gttatgtaaagcaggtgaaggtccatattt

SEQ ID NO: 181870 - DNA, 30 bp, Artificial Sequence
  Synthetic oligonucleotide
tggtacgttaagaatccctgtgcgatattt

SEQ ID NO: 181871 - DNA, 30 bp, Artificial Sequence
  Synthetic oligonucleotide
gaggacaattaagatagcgcgaatatattt

SEQ ID NO: 181872 - DNA, 30 bp, Artificial Sequence
  Synthetic oligonucleotide
tcgaacggagaagccttctcagtactattt

SEQ ID NO: 181873 - DNA, 30 bp, Artificial Sequence
  Synthetic oligonucleotide
acgaaacggcgcgttaaatattacctattt

SEQ ID NO: 181874 - DNA, 30 bp, Artificial Sequence
  Synthetic oligonucleotide
gtagggatctgtcctactagcaatctattt

SEQ ID NO: 181875 - DNA, 30 bp, Artificial Sequence
  Synthetic oligonucleotide
ctctacctacgcgacaggcaggaggtattt

SEQ ID NO: 181876 - DNA, 30 bp, Artificial Sequence
  Synthetic oligonucleotide
tcgaatgctgacaaatgggctccggtattt

SEQ ID NO: 181877 - DNA, 30 bp, Artificial Sequence
  Synthetic oligonucleotide
tgggagtgaatcgggtataaattggtattt

SEQ ID NO: 181878 - DNA, 30 bp, Artificial Sequence
  Synthetic oligonucleotide
cgagcttagcatcacgtgtctgggttattt

SEQ ID NO: 181879 - DNA, 30 bp, Artificial Sequence
  Synthetic oligonucleotide
cacgagtttgtcgtaggtcatatgttattt

SEQ ID NO: 181880 - DNA, 30 bp, Artificial Sequence
  Synthetic oligonucleotide
acaatcgtggtggtcacgcactgtttattt

SEQ ID NO: 181881 - DNA, 30 bp, Artificial Sequence
  Synthetic oligonucleotide
ataatcgggattgcactgggggcacacttt

SEQ ID NO: 181882 - DNA, 30 bp, Artificial Sequence
  Synthetic oligonucleotide
cgatcgtgtaagtggatatatacccacttt

SEQ ID NO: 181883 - DNA, 30 bp, Artificial Sequence
  Synthetic oligonucleotide
cgtattgcaacaatacaggcacagcacttt

SEQ ID NO: 181884 - DNA, 30 bp, Artificial Sequence
  Synthetic oligonucleotide
aaggcgttacacaaggggccacggcacttt

SEQ ID NO: 181885 - DNA, 30 bp, Artificial Sequence
  Synthetic oligonucleotide
aattcaactagggaaaggagagatcacttt

SEQ ID NO: 181886 - DNA, 30 bp, Artificial Sequence
  Synthetic oligonucleotide
ctcgacttatgagcgtacaaggaggacttt

SEQ ID NO: 181887 - DNA, 30 bp, Artificial Sequence
  Synthetic oligonucleotide
atgtcgataaaatcaacttagagggacttt

SEQ ID NO: 181888 - DNA, 30 bp, Artificial Sequence
  Synthetic oligonucleotide
agcgatggtcacgcgttgtccaaatacttt

SEQ ID NO: 181889 - DNA, 30 bp, Artificial Sequence
  Synthetic oligonucleotide
tgacggacaatagcgattacgatgtacttt

SEQ ID NO: 181890 - DNA, 30 bp, Artificial Sequence
  Synthetic oligonucleotide
ggataaagagggccgcaccccagaaccttt

SEQ ID NO: 181891 - DNA, 30 bp, Artificial Sequence
  Synthetic oligonucleotide
gtattgaaaacattctacccagtgaccttt

SEQ ID NO: 181892 - DNA, 30 bp, Artificial Sequence
  Synthetic oligonucleotide
cggatactggagaagtttttcgataccttt

SEQ ID NO: 181893 - DNA, 30 bp, Artificial Sequence
  Synthetic oligonucleotide
tcacggatccttgcgcgctcctctaccttt

SEQ ID NO: 181894 - DNA, 30 bp, Artificial Sequence
  Synthetic oligonucleotide
ggcgaagcgatcgaagacatcgaccccttt

SEQ ID NO: 181895 - DNA, 30 bp, Artificial Sequence
  Synthetic oligonucleotide
ggaacatccaccagaagttttcacgccttt

SEQ ID NO: 181896 - DNA, 30 bp, Artificial Sequence
  Synthetic oligonucleotide
atcggggagtattagtggttgcgcgccttt

SEQ ID NO: 181897 - DNA, 30 bp, Artificial Sequence
  Synthetic oligonucleotide
ctacgatttatacgtaaaacggcttccttt

SEQ ID NO: 181898 - DNA, 30 bp, Artificial Sequence
  Synthetic oligonucleotide
aaggccagtggccggagccgtaaaagcttt

SEQ ID NO: 181899 - DNA, 30 bp, Artificial Sequence
  Synthetic oligonucleotide
gcatataatgaaaactataaggcaagcttt

SEQ ID NO: 181900 - DNA, 30 bp, Artificial Sequence
  Synthetic oligonucleotide
aggtcaatgagtatgaccggggtaagcttt

SEQ ID NO: 181901 - DNA, 30 bp, Artificial Sequence
  Synthetic oligonucleotide
aacaagggttaagtcactgttcccagcttt

SEQ ID NO: 181902 - DNA, 30 bp, Artificial Sequence
  Synthetic oligonucleotide
ttgctaaagagcgtttaaaatgtcagcttt

SEQ ID NO: 181903 - DNA, 30 bp, Artificial Sequence
  Synthetic oligonucleotide
gtcataactacagggcattagtaccgcttt

SEQ ID NO: 181904 - DNA, 30 bp, Artificial Sequence
  Synthetic oligonucleotide
cgcctcgcgcattgggcccaacgaggcttt

SEQ ID NO: 181905 - DNA, 30 bp, Artificial Sequence
  Synthetic oligonucleotide
actaatccctcaacgtttatcttaggcttt

SEQ ID NO: 181906 - DNA, 30 bp, Artificial Sequence
  Synthetic oligonucleotide
gcactagaaaacttacctatttacggcttt

SEQ ID NO: 181907 - DNA, 30 bp, Artificial Sequence
  Synthetic oligonucleotide
cgaggcttcactgactgtaagctgggcttt

SEQ ID NO: 181908 - DNA, 30 bp, Artificial Sequence
  Synthetic oligonucleotide
ggacgacatcctaccgtatgtacatgcttt

SEQ ID NO: 181909 - DNA, 30 bp, Artificial Sequence
  Synthetic oligonucleotide
gactagatagctgagttggcagactgcttt

SEQ ID NO: 181910 - DNA, 30 bp, Artificial Sequence
  Synthetic oligonucleotide
cgagctgtagcttagtccacttattgcttt

SEQ ID NO: 181911 - DNA, 30 bp, Artificial Sequence
  Synthetic oligonucleotide
atcgccctgaacatgtcttttttgatcttt

SEQ ID NO: 181912 - DNA, 30 bp, Artificial Sequence
  Synthetic oligonucleotide
aaagagcgggagatgacacatgccctcttt

SEQ ID NO: 181913 - DNA, 30 bp, Artificial Sequence
  Synthetic oligonucleotide
acacattgcgaataactaggcggtctcttt

SEQ ID NO: 181914 - DNA, 30 bp, Artificial Sequence
  Synthetic oligonucleotide
ttgaagtagcgaggccatacgtgagtcttt

SEQ ID NO: 181915 - DNA, 30 bp, Artificial Sequence
  Synthetic oligonucleotide
aacgagatcatggccggagcgtaggtcttt

SEQ ID NO: 181916 - DNA, 30 bp, Artificial Sequence
  Synthetic oligonucleotide
ctccatctcgtagttcagtatcatgtcttt

SEQ ID NO: 181917 - DNA, 31 bp, Artificial Sequence
  Synthetic oligonucleotide
ctgaaagtctaatgccccggaaataaagttt

SEQ ID NO: 181918 - DNA, 30 bp, Artificial Sequence
  Synthetic oligonucleotide
gttctgaggactcgagggcaacgcaagttt

SEQ ID NO: 181919 - DNA, 30 bp, Artificial Sequence
  Synthetic oligonucleotide
ccttgtagttagaataaggggcgacagttt

SEQ ID NO: 181920 - DNA, 30 bp, Artificial Sequence
  Synthetic oligonucleotide
ggtgccttgtaagagacttcagaccagttt

SEQ ID NO: 181921 - DNA, 30 bp, Artificial Sequence
  Synthetic oligonucleotide
tcattcggataatcaaataaatagcagttt

SEQ ID NO: 181922 - DNA, 30 bp, Artificial Sequence
  Synthetic oligonucleotide
ttgtcctcaaagggtcgattttagcagttt

SEQ ID NO: 181923 - DNA, 30 bp, Artificial Sequence
  Synthetic oligonucleotide
aggggatcccggttgctcttaatgcagttt

SEQ ID NO: 181924 - DNA, 30 bp, Artificial Sequence
  Synthetic oligonucleotide
tcgatatagtagcggatacctgccgagttt

SEQ ID NO: 181925 - DNA, 30 bp, Artificial Sequence
  Synthetic oligonucleotide
accggccgggtgaatgggtgtttatagttt

SEQ ID NO: 181926 - DNA, 30 bp, Artificial Sequence
  Synthetic oligonucleotide
ccggcaaatacggcaatagagagaacgttt

SEQ ID NO: 181927 - DNA, 30 bp, Artificial Sequence
  Synthetic oligonucleotide
cgtaggttccacgaggtacatggcacgttt

SEQ ID NO: 181928 - DNA, 30 bp, Artificial Sequence
  Synthetic oligonucleotide
gccagatccgcaaagagctattgcacgttt

SEQ ID NO: 181929 - DNA, 30 bp, Artificial Sequence
  Synthetic oligonucleotide
cgcaccgaccacggggggtggactacgttt

SEQ ID NO: 181930 - DNA, 30 bp, Artificial Sequence
  Synthetic oligonucleotide
taccaatgaaaatgtcgtaatctaccgttt

SEQ ID NO: 181931 - DNA, 30 bp, Artificial Sequence
  Synthetic oligonucleotide
gggcttatcctagcgaaatcccacgcgttt

SEQ ID NO: 181932 - DNA, 30 bp, Artificial Sequence
  Synthetic oligonucleotide
agtcctctcaaaccacagggaatcgcgttt

SEQ ID NO: 181933 - DNA, 30 bp, Artificial Sequence
  Synthetic oligonucleotide
acttcggagtcagacatcatggtggcgttt

SEQ ID NO: 181934 - DNA, 30 bp, Artificial Sequence
  Synthetic oligonucleotide
atataaaggtcggacttgatgtgtgcgttt

SEQ ID NO: 181935 - DNA, 30 bp, Artificial Sequence
  Synthetic oligonucleotide
ccagtgacagtgaatttgtctgaatcgttt

SEQ ID NO: 181936 - DNA, 30 bp, Artificial Sequence
  Synthetic oligonucleotide
cattggatctaagacggacgctcctcgttt

SEQ ID NO: 181937 - DNA, 30 bp, Artificial Sequence
  Synthetic oligonucleotide
gtatccgttagaggcgagtaggagtcgttt

SEQ ID NO: 181938 - DNA, 30 bp, Artificial Sequence
  Synthetic oligonucleotide
tttgaaagcaggagagtgggggtgtcgttt

SEQ ID NO: 181939 - DNA, 30 bp, Artificial Sequence
  Synthetic oligonucleotide
cacctaggccaagttggagagttgtcgttt

SEQ ID NO: 181940 - DNA, 30 bp, Artificial Sequence
  Synthetic oligonucleotide
cggacggggggtagattaagtgataggttt

SEQ ID NO: 181941 - DNA, 30 bp, Artificial Sequence
  Synthetic oligonucleotide
agttaagcggacccggaaggaagtaggttt

SEQ ID NO: 181942 - DNA, 30 bp, Artificial Sequence
  Synthetic oligonucleotide
ttgtttacgtctaacaatctacagcggttt

SEQ ID NO: 181943 - DNA, 30 bp, Artificial Sequence
  Synthetic oligonucleotide
ggtcgtgctgtcttataaatgtatcggttt

SEQ ID NO: 181944 - DNA, 30 bp, Artificial Sequence
  Synthetic oligonucleotide
agcacaaccagaaagccaatacaagggttt

SEQ ID NO: 181945 - DNA, 30 bp, Artificial Sequence
  Synthetic oligonucleotide
agataatcaccccctgtgtcaccagggttt

SEQ ID NO: 181946 - DNA, 30 bp, Artificial Sequence
  Synthetic oligonucleotide
aacagtttgagatacgtggattgggggttt

SEQ ID NO: 181947 - DNA, 30 bp, Artificial Sequence
  Synthetic oligonucleotide
tggcgggcgtaggaccacctgtctgggttt

SEQ ID NO: 181948 - DNA, 30 bp, Artificial Sequence
  Synthetic oligonucleotide
aaatggggcacaacattcaattcatggttt

SEQ ID NO: 181949 - DNA, 30 bp, Artificial Sequence
  Synthetic oligonucleotide
ggaccaatatgcgctagcgggccaatgttt

SEQ ID NO: 181950 - DNA, 30 bp, Artificial Sequence
  Synthetic oligonucleotide
ataagtgaacggccaaccatggatatgttt

SEQ ID NO: 181951 - DNA, 30 bp, Artificial Sequence
  Synthetic oligonucleotide
ccgatattgcagtaagtggacgtcctgttt

SEQ ID NO: 181952 - DNA, 30 bp, Artificial Sequence
  Synthetic oligonucleotide
tcttatctgttgtgttttcctcttgtgttt

SEQ ID NO: 181953 - DNA, 31 bp, Artificial Sequence
  Synthetic oligonucleotide
caaccaatcggcattgtaaatcatcttgttt

SEQ ID NO: 181954 - DNA, 30 bp, Artificial Sequence
  Synthetic oligonucleotide
aaaggaccatcagagcaaaaccggttgttt

SEQ ID NO: 181955 - DNA, 30 bp, Artificial Sequence
  Synthetic oligonucleotide
cagacacctcttagggcaggggatttgttt

SEQ ID NO: 181956 - DNA, 30 bp, Artificial Sequence
  Synthetic oligonucleotide
cggggtgatcggaagtgtaatgaaaatttt

SEQ ID NO: 181957 - DNA, 31 bp, Artificial Sequence
  Synthetic oligonucleotide
agccgaacaaaacaagaacggatcaaatttt

SEQ ID NO: 181958 - DNA, 30 bp, Artificial Sequence
  Synthetic oligonucleotide
gacgggcggacgctcgcctcggtaaatttt

SEQ ID NO: 181959 - DNA, 30 bp, Artificial Sequence
  Synthetic oligonucleotide
gtgcgttaaaggtggaatggggcccatttt

SEQ ID NO: 181960 - DNA, 31 bp, Artificial Sequence
  Synthetic oligonucleotide
tgagatagcgaacttgtatcaattgcatttt

SEQ ID NO: 181961 - DNA, 30 bp, Artificial Sequence
  Synthetic oligonucleotide
cccggggcaggcaataaggggtgtcatttt

SEQ ID NO: 181962 - DNA, 30 bp, Artificial Sequence
  Synthetic oligonucleotide
accgaaaagattgtaatagattgtcatttt

SEQ ID NO: 181963 - DNA, 30 bp, Artificial Sequence
  Synthetic oligonucleotide
agattgacatcaatgatatcagcagatttt

SEQ ID NO: 181964 - DNA, 30 bp, Artificial Sequence
  Synthetic oligonucleotide
gcgctaagccactggtaattacgagatttt

SEQ ID NO: 181965 - DNA, 30 bp, Artificial Sequence
  Synthetic oligonucleotide
tgctaacagcgagtcgcgcttccggatttt

SEQ ID NO: 181966 - DNA, 30 bp, Artificial Sequence
  Synthetic oligonucleotide
caggcttaggggacaataggcagggatttt

SEQ ID NO: 181967 - DNA, 30 bp, Artificial Sequence
  Synthetic oligonucleotide
taaggtgctaacagtacagtcgctgatttt

SEQ ID NO: 181968 - DNA, 30 bp, Artificial Sequence
  Synthetic oligonucleotide
gggaatggtggagcactaagtaaatatttt

SEQ ID NO: 181969 - DNA, 30 bp, Artificial Sequence
  Synthetic oligonucleotide
cgtgttcgactcggaccagctggatatttt

SEQ ID NO: 181970 - DNA, 30 bp, Artificial Sequence
  Synthetic oligonucleotide
caagtgacagagcgactggattgatatttt

SEQ ID NO: 181971 - DNA, 30 bp, Artificial Sequence
  Synthetic oligonucleotide
caaagattacagtttgctcattcttatttt

SEQ ID NO: 181972 - DNA, 30 bp, Artificial Sequence
  Synthetic oligonucleotide
ttacgaagcctgctaaccacctagactttt

SEQ ID NO: 181973 - DNA, 30 bp, Artificial Sequence
  Synthetic oligonucleotide
acgtgggccttctgctacatctaacctttt

SEQ ID NO: 181974 - DNA, 30 bp, Artificial Sequence
  Synthetic oligonucleotide
accgggacgttcacgaaaggcggacctttt

SEQ ID NO: 181975 - DNA, 30 bp, Artificial Sequence
  Synthetic oligonucleotide
acgacgccgaacccgtggaattgccctttt

SEQ ID NO: 181976 - DNA, 30 bp, Artificial Sequence
  Synthetic oligonucleotide
cgaaacatgcgtttagccttcagtcctttt

SEQ ID NO: 181977 - DNA, 30 bp, Artificial Sequence
  Synthetic oligonucleotide
cgaaaacagtactaaagtatactagctttt

SEQ ID NO: 181978 - DNA, 30 bp, Artificial Sequence
  Synthetic oligonucleotide
ggaaatatcacagatcgactggacgctttt

SEQ ID NO: 181979 - DNA, 30 bp, Artificial Sequence
  Synthetic oligonucleotide
caactgagcaataaggaggcgaatgctttt

SEQ ID NO: 181980 - DNA, 30 bp, Artificial Sequence
  Synthetic oligonucleotide
caagcagtcaacaacagaatagcttctttt

SEQ ID NO: 181981 - DNA, 30 bp, Artificial Sequence
  Synthetic oligonucleotide
gctaggcggcacgaacatcccgtaagtttt

SEQ ID NO: 181982 - DNA, 30 bp, Artificial Sequence
  Synthetic oligonucleotide
atggtgggatcaacttgcaccaacagtttt

SEQ ID NO: 181983 - DNA, 30 bp, Artificial Sequence
  Synthetic oligonucleotide
atactcagggacaagtttatgacgagtttt

SEQ ID NO: 181984 - DNA, 30 bp, Artificial Sequence
  Synthetic oligonucleotide
tcgaatgcgttataatggtgaccgagtttt

SEQ ID NO: 181985 - DNA, 30 bp, Artificial Sequence
  Synthetic oligonucleotide
caatgataagacgactcgtcatcgagtttt

SEQ ID NO: 181986 - DNA, 30 bp, Artificial Sequence
  Synthetic oligonucleotide
ggtacgtgggcccgacttgcatttagtttt

SEQ ID NO: 181987 - DNA, 29 bp, Artificial Sequence
  Synthetic oligonucleotide
gctgggtggcgaggtggacagctcgtttt

SEQ ID NO: 181988 - DNA, 30 bp, Artificial Sequence
  Synthetic oligonucleotide
caaggccgcatacgaatacggcacggtttt

SEQ ID NO: 181989 - DNA, 30 bp, Artificial Sequence
  Synthetic oligonucleotide
atggacatacagaagaaaagagagggtttt

SEQ ID NO: 181990 - DNA, 30 bp, Artificial Sequence
  Synthetic oligonucleotide
tcaaatcatccacacagtccaaactgtttt

SEQ ID NO: 181991 - DNA, 30 bp, Artificial Sequence
  Synthetic oligonucleotide
ctgtcttccagtgggaggaacggctgtttt

SEQ ID NO: 181992 - DNA, 30 bp, Artificial Sequence
  Synthetic oligonucleotide
taacgtacatcatgtcgtacccggattttt

SEQ ID NO: 181993 - DNA, 31 bp, Artificial Sequence
  Synthetic oligonucleotide
cgggattgacactacggagaataaacttttt

SEQ ID NO: 181994 - DNA, 30 bp, Artificial Sequence
  Synthetic oligonucleotide
ttgatatctcggaaacatcgagcacttttt

SEQ ID NO: 181995 - DNA, 30 bp, Artificial Sequence
  Synthetic oligonucleotide
caaatgggggatgacatacatctccttttt

SEQ ID NO: 181996 - DNA, 30 bp, Artificial Sequence
  Synthetic oligonucleotide
acgttgaaccatactcgattggtgcttttt

SEQ ID NO: 181997 - DNA, 30 bp, Artificial Sequence
  Synthetic oligonucleotide
agatctcgttgacaggagttgtccgttttt

SEQ ID NO: 181998 - DNA, 30 bp, Artificial Sequence
  Synthetic oligonucleotide
catgagtaagagcatttgtactgggttttt

SEQ ID NO: 181999 - DNA, 30 bp, Artificial Sequence
  Synthetic oligonucleotide
caataagcaaggctggacaaatctgttttt

SEQ ID NO: 182000 - DNA, 30 bp, Artificial Sequence
  Synthetic oligonucleotide
gaggacagtaggaaataaacgcaatttttt

SEQ ID NO: 182001 - DNA, 30 bp, Artificial Sequence
  Synthetic oligonucleotide
aacaagggcgtggcggtaacgatatttttt

SEQ ID NO: 182002 - DNA, 30 bp, Artificial Sequence
  Synthetic oligonucleotide
gtagataagtaagaggtgctatattttttt

SEQ ID NO: 182003 - DNA, 30 bp, Artificial Sequence
  Synthetic oligonucleotide
taggcatacttacccggcggtgtcaaaaaa

SEQ ID NO: 182004 - DNA, 30 bp, Artificial Sequence
  Synthetic oligonucleotide
gtgcacaggatccgtagaagatggaaaaaa

SEQ ID NO: 182005 - DNA, 30 bp, Artificial Sequence
  Synthetic oligonucleotide
atgggttaatgtcatcaaccccgtaaaaaa

SEQ ID NO: 182006 - DNA, 30 bp, Artificial Sequence
  Synthetic oligonucleotide
caacattaatcaggtgacggtgtacaaaaa

SEQ ID NO: 182007 - DNA, 30 bp, Artificial Sequence
  Synthetic oligonucleotide
agcaagggtttcccgcgtgcatcccaaaaa

SEQ ID NO: 182008 - DNA, 30 bp, Artificial Sequence
  Synthetic oligonucleotide
attcaagaaactaagtaaaggtcccaaaaa

SEQ ID NO: 182009 - DNA, 30 bp, Artificial Sequence
  Synthetic oligonucleotide
agacggggcaactgatttgcagtccaaaaa

SEQ ID NO: 182010 - DNA, 30 bp, Artificial Sequence
  Synthetic oligonucleotide
catacggccgtaattgagcagtggcaaaaa

SEQ ID NO: 182011 - DNA, 30 bp, Artificial Sequence
  Synthetic oligonucleotide
gaagaagaacctcgcccgacgatgcaaaaa

SEQ ID NO: 182012 - DNA, 30 bp, Artificial Sequence
  Synthetic oligonucleotide
agcttcggtgctcacgctttgtctcaaaaa

SEQ ID NO: 182013 - DNA, 30 bp, Artificial Sequence
  Synthetic oligonucleotide
gcgcttcaaggaacaactttcggggaaaaa

SEQ ID NO: 182014 - DNA, 30 bp, Artificial Sequence
  Synthetic oligonucleotide
taagtcggattagggacgagtgatgaaaaa

SEQ ID NO: 182015 - DNA, 30 bp, Artificial Sequence
  Synthetic oligonucleotide
ggcgtgatagaccttcttggctatgaaaaa

SEQ ID NO: 182016 - DNA, 30 bp, Artificial Sequence
  Synthetic oligonucleotide
tggagtcatcaggtgggtctttttgaaaaa

SEQ ID NO: 182017 - DNA, 30 bp, Artificial Sequence
  Synthetic oligonucleotide
gccattcagttagaagaataccgataaaaa

SEQ ID NO: 182018 - DNA, 30 bp, Artificial Sequence
  Synthetic oligonucleotide
gaaacgtcgtggtcaacgtgaacgtaaaaa

SEQ ID NO: 182019 - DNA, 30 bp, Artificial Sequence
  Synthetic oligonucleotide
agggccacctgtatgggcttcctgtaaaaa

SEQ ID NO: 182020 - DNA, 30 bp, Artificial Sequence
  Synthetic oligonucleotide
tatggcgctagcacaatcccatattaaaaa

SEQ ID NO: 182021 - DNA, 30 bp, Artificial Sequence
  Synthetic oligonucleotide
taccactaggtactaaagacagcttaaaaa

SEQ ID NO: 182022 - DNA, 30 bp, Artificial Sequence
  Synthetic oligonucleotide
acagcctgttccgatccgtggaagacaaaa

SEQ ID NO: 182023 - DNA, 30 bp, Artificial Sequence
  Synthetic oligonucleotide
atcatccgagcgttcgaagtagatacaaaa

SEQ ID NO: 182024 - DNA, 30 bp, Artificial Sequence
  Synthetic oligonucleotide
ggtggttaggaggtatgtgattctacaaaa

SEQ ID NO: 182025 - DNA, 30 bp, Artificial Sequence
  Synthetic oligonucleotide
ttccccggggaatgcgggccatttacaaaa

SEQ ID NO: 182026 - DNA, 30 bp, Artificial Sequence
  Synthetic oligonucleotide
ccagagacatcaggtctgttttagccaaaa

SEQ ID NO: 182027 - DNA, 30 bp, Artificial Sequence
  Synthetic oligonucleotide
gaattgtagaaacggctgaacggcgcaaaa

SEQ ID NO: 182028 - DNA, 30 bp, Artificial Sequence
  Synthetic oligonucleotide
cgttagagcaaatgtaatacggaggcaaaa

SEQ ID NO: 182029 - DNA, 30 bp, Artificial Sequence
  Synthetic oligonucleotide
aggcgcctgcccgacacttccgcggcaaaa

SEQ ID NO: 182030 - DNA, 30 bp, Artificial Sequence
  Synthetic oligonucleotide
tatggagcccaatgattgaactatgcaaaa

SEQ ID NO: 182031 - DNA, 30 bp, Artificial Sequence
  Synthetic oligonucleotide
acgcaaccctcctgctcgacggaatcaaaa

SEQ ID NO: 182032 - DNA, 30 bp, Artificial Sequence
  Synthetic oligonucleotide
caaaaccggggttgtcatagaagatcaaaa

SEQ ID NO: 182033 - DNA, 30 bp, Artificial Sequence
  Synthetic oligonucleotide
gtagtggttacgaaagcacagaattcaaaa

SEQ ID NO: 182034 - DNA, 30 bp, Artificial Sequence
  Synthetic oligonucleotide
gcgctcttcgtggagcggtgcttttcaaaa

SEQ ID NO: 182035 - DNA, 30 bp, Artificial Sequence
  Synthetic oligonucleotide
cgaaccgcactgctacccgtgataagaaaa

SEQ ID NO: 182036 - DNA, 30 bp, Artificial Sequence
  Synthetic oligonucleotide
cattaatagtggcgggactctgacagaaaa

SEQ ID NO: 182037 - DNA, 30 bp, Artificial Sequence
  Synthetic oligonucleotide
aggccacagtgatccgaacttccacgaaaa

SEQ ID NO: 182038 - DNA, 30 bp, Artificial Sequence
  Synthetic oligonucleotide
gcacttgccccgcacaattgtgaccgaaaa

SEQ ID NO: 182039 - DNA, 30 bp, Artificial Sequence
  Synthetic oligonucleotide
gaccataggcaactccaagcataccgaaaa

SEQ ID NO: 182040 - DNA, 30 bp, Artificial Sequence
  Synthetic oligonucleotide
acatagggtactcgtactcgaacccgaaaa

SEQ ID NO: 182041 - DNA, 30 bp, Artificial Sequence
  Synthetic oligonucleotide
agccaggtgttagcgaacgcattccgaaaa

SEQ ID NO: 182042 - DNA, 30 bp, Artificial Sequence
  Synthetic oligonucleotide
ggttgggcaacattgagtcctggtcgaaaa

SEQ ID NO: 182043 - DNA, 30 bp, Artificial Sequence
  Synthetic oligonucleotide
agtgtatcccactgctggtctagaggaaaa

SEQ ID NO: 182044 - DNA, 30 bp, Artificial Sequence
  Synthetic oligonucleotide
catagtactgagcgagtaaacaacggaaaa

SEQ ID NO: 182045 - DNA, 28 bp, Artificial Sequence
  Synthetic oligonucleotide
ctcaggtgcagttagacgtaccggaaaa

SEQ ID NO: 182046 - DNA, 30 bp, Artificial Sequence
  Synthetic oligonucleotide
cggtaacctcgcgggatggcgttcggaaaa

SEQ ID NO: 182047 - DNA, 30 bp, Artificial Sequence
  Synthetic oligonucleotide
tagccaatggcacgactcctcgggggaaaa

SEQ ID NO: 182048 - DNA, 30 bp, Artificial Sequence
  Synthetic oligonucleotide
cggttccgggccccgcgcgagaatggaaaa

SEQ ID NO: 182049 - DNA, 30 bp, Artificial Sequence
  Synthetic oligonucleotide
cactgcctaacgcccgcgaccgctggaaaa

SEQ ID NO: 182050 - DNA, 30 bp, Artificial Sequence
  Synthetic oligonucleotide
ctgtgcacacagtgttatgatgtatgaaaa

SEQ ID NO: 182051 - DNA, 30 bp, Artificial Sequence
  Synthetic oligonucleotide
aaggctatatggcatgcatgagcctgaaaa

SEQ ID NO: 182052 - DNA, 30 bp, Artificial Sequence
  Synthetic oligonucleotide
acgaagtggttgattccgattatgtgaaaa

SEQ ID NO: 182053 - DNA, 30 bp, Artificial Sequence
  Synthetic oligonucleotide
acaccatatcgcaagaacaacccttgaaaa

SEQ ID NO: 182054 - DNA, 30 bp, Artificial Sequence
  Synthetic oligonucleotide
aagcataggtgaagctgtaaccaaataaaa

SEQ ID NO: 182055 - DNA, 30 bp, Artificial Sequence
  Synthetic oligonucleotide
taagagggacttttcagctaatgcataaaa

SEQ ID NO: 182056 - DNA, 30 bp, Artificial Sequence
  Synthetic oligonucleotide
tgttgtagaaggggcaaatccgtcataaaa

SEQ ID NO: 182057 - DNA, 30 bp, Artificial Sequence
  Synthetic oligonucleotide
cttcatttacgagataaataaagtataaaa

SEQ ID NO: 182058 - DNA, 30 bp, Artificial Sequence
  Synthetic oligonucleotide
gcggtcgggtcgtgagaggggagtataaaa

SEQ ID NO: 182059 - DNA, 30 bp, Artificial Sequence
  Synthetic oligonucleotide
tagcttaagccatcgaagcagctcctaaaa

SEQ ID NO: 182060 - DNA, 30 bp, Artificial Sequence
  Synthetic oligonucleotide
catgcggtgacccttgaatgaacgctaaaa

SEQ ID NO: 182061 - DNA, 30 bp, Artificial Sequence
  Synthetic oligonucleotide
gtaacacggttggtgaatcatgtagtaaaa

SEQ ID NO: 182062 - DNA, 30 bp, Artificial Sequence
  Synthetic oligonucleotide
tgaagcgaactggataacactagcgtaaaa

SEQ ID NO: 182063 - DNA, 30 bp, Artificial Sequence
  Synthetic oligonucleotide
gattggtactacaggtctgtcaaggtaaaa

SEQ ID NO: 182064 - DNA, 30 bp, Artificial Sequence
  Synthetic oligonucleotide
gaaccaatgagtattccctatccggtaaaa

SEQ ID NO: 182065 - DNA, 30 bp, Artificial Sequence
  Synthetic oligonucleotide
tccgcgatccacgaaaaaggttgggtaaaa

SEQ ID NO: 182066 - DNA, 30 bp, Artificial Sequence
  Synthetic oligonucleotide
accggcgattgatagccgtacaatgtaaaa

SEQ ID NO: 182067 - DNA, 30 bp, Artificial Sequence
  Synthetic oligonucleotide
gggcgactcaggatacaacatcctgtaaaa

SEQ ID NO: 182068 - DNA, 30 bp, Artificial Sequence
  Synthetic oligonucleotide
catcgctctgtggtaggtcgcaaattaaaa

SEQ ID NO: 182069 - DNA, 30 bp, Artificial Sequence
  Synthetic oligonucleotide
gaccgggggagaaacaatataaacttaaaa

SEQ ID NO: 182070 - DNA, 30 bp, Artificial Sequence
  Synthetic oligonucleotide
agggatttgagtccagtgccagagttaaaa

SEQ ID NO: 182071 - DNA, 30 bp, Artificial Sequence
  Synthetic oligonucleotide
aaatcataagtccgtacggtgaggttaaaa

SEQ ID NO: 182072 - DNA, 30 bp, Artificial Sequence
  Synthetic oligonucleotide
accggcgcatgcaggctaaagttgttaaaa

SEQ ID NO: 182073 - DNA, 30 bp, Artificial Sequence
  Synthetic oligonucleotide
ctggagatgtgaggtagtgcacatttaaaa

SEQ ID NO: 182074 - DNA, 30 bp, Artificial Sequence
  Synthetic oligonucleotide
cccacaaaagtatcaaactaaagtttaaaa

SEQ ID NO: 182075 - DNA, 30 bp, Artificial Sequence
  Synthetic oligonucleotide
tatgtgcccctcagggataaataaaacaaa

SEQ ID NO: 182076 - DNA, 30 bp, Artificial Sequence
  Synthetic oligonucleotide
accgcataagataagttgcaaccaaacaaa

SEQ ID NO: 182077 - DNA, 30 bp, Artificial Sequence
  Synthetic oligonucleotide
gtcaagagtacaaattgttcacacaacaaa

SEQ ID NO: 182078 - DNA, 30 bp, Artificial Sequence
  Synthetic oligonucleotide
atcatcatttatccaggctaacagaacaaa

SEQ ID NO: 182079 - DNA, 30 bp, Artificial Sequence
  Synthetic oligonucleotide
gcgtgaattatttgtgtgtcgacgaacaaa

SEQ ID NO: 182080 - DNA, 30 bp, Artificial Sequence
  Synthetic oligonucleotide
gtttaccagagacggacccgcatgaacaaa

SEQ ID NO: 182081 - DNA, 30 bp, Artificial Sequence
  Synthetic oligonucleotide
agacggtaatgctttagcttgtataacaaa

SEQ ID NO: 182082 - DNA, 30 bp, Artificial Sequence
  Synthetic oligonucleotide
tcctcagtgtcggcatgcctagaacacaaa

SEQ ID NO: 182083 - DNA, 30 bp, Artificial Sequence
  Synthetic oligonucleotide
ggtcagtaatggcttaagatgacacacaaa

SEQ ID NO: 182084 - DNA, 30 bp, Artificial Sequence
  Synthetic oligonucleotide
ttcctcatagaaagtccattcatacacaaa

SEQ ID NO: 182085 - DNA, 30 bp, Artificial Sequence
  Synthetic oligonucleotide
atgcgctcaaactctcacactcgccacaaa

SEQ ID NO: 182086 - DNA, 30 bp, Artificial Sequence
  Synthetic oligonucleotide
tggcataacgattcggtacttcagcacaaa

SEQ ID NO: 182087 - DNA, 30 bp, Artificial Sequence
  Synthetic oligonucleotide
gattcaccggatgaatttagggggcacaaa

SEQ ID NO: 182088 - DNA, 30 bp, Artificial Sequence
  Synthetic oligonucleotide
aaacagggtcgtaggcactagcgtcacaaa

SEQ ID NO: 182089 - DNA, 30 bp, Artificial Sequence
  Synthetic oligonucleotide
gtctcacgcggcgacactacacttcacaaa

SEQ ID NO: 182090 - DNA, 30 bp, Artificial Sequence
  Synthetic oligonucleotide
actactcagaaaacacgcgcgtcagacaaa

SEQ ID NO: 182091 - DNA, 30 bp, Artificial Sequence
  Synthetic oligonucleotide
tgctgacatcgctccatataatgcgacaaa

SEQ ID NO: 182092 - DNA, 30 bp, Artificial Sequence
  Synthetic oligonucleotide
gtgccaagagcgggcggttgcagtgacaaa

SEQ ID NO: 182093 - DNA, 30 bp, Artificial Sequence
  Synthetic oligonucleotide
tacaagggcatcggttggagaaactacaaa

SEQ ID NO: 182094 - DNA, 30 bp, Artificial Sequence
  Synthetic oligonucleotide
gtgctgatatcattcctgcgaccttacaaa

SEQ ID NO: 182095 - DNA, 30 bp, Artificial Sequence
  Synthetic oligonucleotide
gcctcgacaaaaggatgatcccagaccaaa

SEQ ID NO: 182096 - DNA, 30 bp, Artificial Sequence
  Synthetic oligonucleotide
cggtgacatctgaagttatggtgtaccaaa

SEQ ID NO: 182097 - DNA, 30 bp, Artificial Sequence
  Synthetic oligonucleotide
acgggcatggatgaaatagcttaacccaaa

SEQ ID NO: 182098 - DNA, 30 bp, Artificial Sequence
  Synthetic oligonucleotide
atgcattgtagttcacatgaatcacccaaa

SEQ ID NO: 182099 - DNA, 30 bp, Artificial Sequence
  Synthetic oligonucleotide
agggtgcacatacggcgacagttacccaaa

SEQ ID NO: 182100 - DNA, 30 bp, Artificial Sequence
  Synthetic oligonucleotide
gcaatgactggccaagagagttcccccaaa

SEQ ID NO: 182101 - DNA, 30 bp, Artificial Sequence
  Synthetic oligonucleotide
aggtcctggggttcacgccagaagcccaaa

SEQ ID NO: 182102 - DNA, 30 bp, Artificial Sequence
  Synthetic oligonucleotide
gggttcgttacgattcgtagggagcccaaa

SEQ ID NO: 182103 - DNA, 30 bp, Artificial Sequence
  Synthetic oligonucleotide
acggaggatctacgtatctagtatcccaaa

SEQ ID NO: 182104 - DNA, 30 bp, Artificial Sequence
  Synthetic oligonucleotide
cgacctcgcgagtgaccgaagggagccaaa

SEQ ID NO: 182105 - DNA, 30 bp, Artificial Sequence
  Synthetic oligonucleotide
aacacggacaggtcacaacctgcggccaaa

SEQ ID NO: 182106 - DNA, 30 bp, Artificial Sequence
  Synthetic oligonucleotide
ggaacatctattaatcagatttgggccaaa

SEQ ID NO: 182107 - DNA, 31 bp, Artificial Sequence
  Synthetic oligonucleotide
cctgcgagcggcctaggacccagcctccaaa

SEQ ID NO: 182108 - DNA, 30 bp, Artificial Sequence
  Synthetic oligonucleotide
atactgaaatgtcatggatagaacagcaaa

SEQ ID NO: 182109 - DNA, 30 bp, Artificial Sequence
  Synthetic oligonucleotide
agtgagtggttgcagttaattttacgcaaa

SEQ ID NO: 182110 - DNA, 30 bp, Artificial Sequence
  Synthetic oligonucleotide
cggttcaatagctatgtcagggggcgcaaa

SEQ ID NO: 182111 - DNA, 30 bp, Artificial Sequence
  Synthetic oligonucleotide
acaccttcaacagtacgagtgcatcgcaaa

SEQ ID NO: 182112 - DNA, 30 bp, Artificial Sequence
  Synthetic oligonucleotide
agatcggctaagcttggtctcagtcgcaaa

SEQ ID NO: 182113 - DNA, 30 bp, Artificial Sequence
  Synthetic oligonucleotide
ggttacttgtagttaccaaagcttcgcaaa

SEQ ID NO: 182114 - DNA, 30 bp, Artificial Sequence
  Synthetic oligonucleotide
tcacctatttaattttctcagccaggcaaa

SEQ ID NO: 182115 - DNA, 30 bp, Artificial Sequence
  Synthetic oligonucleotide
cgacgatcaacgtttgtaagagacggcaaa

SEQ ID NO: 182116 - DNA, 30 bp, Artificial Sequence
  Synthetic oligonucleotide
agcaccggctattgtcttttagtgggcaaa

SEQ ID NO: 182117 - DNA, 30 bp, Artificial Sequence
  Synthetic oligonucleotide
tggcgtacgataaagctcgacccctgcaaa

SEQ ID NO: 182118 - DNA, 30 bp, Artificial Sequence
  Synthetic oligonucleotide
ttgtgatactgtccaaacatggcctgcaaa

SEQ ID NO: 182119 - DNA, 30 bp, Artificial Sequence
  Synthetic oligonucleotide
ttacagggttgtgagtttatcaagtgcaaa

SEQ ID NO: 182120 - DNA, 30 bp, Artificial Sequence
  Synthetic oligonucleotide
tgtagggagtccttataaagaaggtgcaaa

SEQ ID NO: 182121 - DNA, 30 bp, Artificial Sequence
  Synthetic oligonucleotide
acacagggttgtcgcttactagggtgcaaa

SEQ ID NO: 182122 - DNA, 30 bp, Artificial Sequence
  Synthetic oligonucleotide
atgtcgcaggagccgaggaatgtttgcaaa

SEQ ID NO: 182123 - DNA, 30 bp, Artificial Sequence
  Synthetic oligonucleotide
taataactagttcacgaagatcgaatcaaa

SEQ ID NO: 182124 - DNA, 30 bp, Artificial Sequence
  Synthetic oligonucleotide
gtgccttggctaaacataatatgaatcaaa

SEQ ID NO: 182125 - DNA, 30 bp, Artificial Sequence
  Synthetic oligonucleotide
aaaaaacccggagacagttcgctgatcaaa

SEQ ID NO: 182126 - DNA, 30 bp, Artificial Sequence
  Synthetic oligonucleotide
cacgggcgttccaaagagttaaatatcaaa

SEQ ID NO: 182127 - DNA, 30 bp, Artificial Sequence
  Synthetic oligonucleotide
attaaagctctagtgtttcacgttatcaaa

SEQ ID NO: 182128 - DNA, 30 bp, Artificial Sequence
  Synthetic oligonucleotide
ggccgttcatcctgcgaaaggccgctcaaa

SEQ ID NO: 182129 - DNA, 30 bp, Artificial Sequence
  Synthetic oligonucleotide
tggattgcagcccatgggctgggagtcaaa

SEQ ID NO: 182130 - DNA, 30 bp, Artificial Sequence
  Synthetic oligonucleotide
aagtgaagaagggttgatgtacgcgtcaaa

SEQ ID NO: 182131 - DNA, 30 bp, Artificial Sequence
  Synthetic oligonucleotide
tctcaaagtgcgggataagccgcggtcaaa

SEQ ID NO: 182132 - DNA, 30 bp, Artificial Sequence
  Synthetic oligonucleotide
tcctccattggcttagaccatactgtcaaa

SEQ ID NO: 182133 - DNA, 30 bp, Artificial Sequence
  Synthetic oligonucleotide
gacagagtaagggaagcctcactattcaaa

SEQ ID NO: 182134 - DNA, 30 bp, Artificial Sequence
  Synthetic oligonucleotide
agcttggggacaagtgctcacaggttcaaa

SEQ ID NO: 182135 - DNA, 30 bp, Artificial Sequence
  Synthetic oligonucleotide
ctgcttatatctaaaaagttaaatttcaaa

SEQ ID NO: 182136 - DNA, 30 bp, Artificial Sequence
  Synthetic oligonucleotide
aggtgtgacaacaatcgccgtcccaagaaa

SEQ ID NO: 182137 - DNA, 30 bp, Artificial Sequence
  Synthetic oligonucleotide
caggggtcattatagcatcatggcaagaaa

SEQ ID NO: 182138 - DNA, 30 bp, Artificial Sequence
  Synthetic oligonucleotide
ggtcagttatgtatcactgtagcgaagaaa

SEQ ID NO: 182139 - DNA, 30 bp, Artificial Sequence
  Synthetic oligonucleotide
gctcaaagctagaacgcgatattgaagaaa

SEQ ID NO: 182140 - DNA, 30 bp, Artificial Sequence
  Synthetic oligonucleotide
gctcaatcgtagacgtagatgaataagaaa

SEQ ID NO: 182141 - DNA, 30 bp, Artificial Sequence
  Synthetic oligonucleotide
ggacttcgccgtgggggggaacataagaaa

SEQ ID NO: 182142 - DNA, 30 bp, Artificial Sequence
  Synthetic oligonucleotide
aaaggaattctaaaggtaccaagtaagaaa

SEQ ID NO: 182143 - DNA, 30 bp, Artificial Sequence
  Synthetic oligonucleotide
atcacattgagctgcccaccataccagaaa

SEQ ID NO: 182144 - DNA, 30 bp, Artificial Sequence
  Synthetic oligonucleotide
cgagcgtgacatatcgagtcaagccagaaa

SEQ ID NO: 182145 - DNA, 30 bp, Artificial Sequence
  Synthetic oligonucleotide
aagatttgatcttgaacggatgatcagaaa

SEQ ID NO: 182146 - DNA, 30 bp, Artificial Sequence
  Synthetic oligonucleotide
ttcgccctcctaaggcacgagcgtcagaaa

SEQ ID NO: 182147 - DNA, 30 bp, Artificial Sequence
  Synthetic oligonucleotide
agttgcaacagacctacgtaactagagaaa

SEQ ID NO: 182148 - DNA, 30 bp, Artificial Sequence
  Synthetic oligonucleotide
gcacaggttaatcttcagaccggggagaaa

SEQ ID NO: 182149 - DNA, 30 bp, Artificial Sequence
  Synthetic oligonucleotide
ttgattgtgtggaggacgcgtcctgagaaa

SEQ ID NO: 182150 - DNA, 30 bp, Artificial Sequence
  Synthetic oligonucleotide
tagcaccggcgtgatgcataaggtgagaaa

SEQ ID NO: 182151 - DNA, 30 bp, Artificial Sequence
  Synthetic oligonucleotide
tctacgtattgtaagtcttaagttgagaaa

SEQ ID NO: 182152 - DNA, 30 bp, Artificial Sequence
  Synthetic oligonucleotide
ggtccacgggcattaggtgtttcatagaaa

SEQ ID NO: 182153 - DNA, 30 bp, Artificial Sequence
  Synthetic oligonucleotide
ttcctgggaaaggcgtcgaaaccctagaaa

SEQ ID NO: 182154 - DNA, 30 bp, Artificial Sequence
  Synthetic oligonucleotide
gcgcaagcttgaatgggacttgcctagaaa

SEQ ID NO: 182155 - DNA, 30 bp, Artificial Sequence
  Synthetic oligonucleotide
caaattacagaaacatgtagagtctagaaa

SEQ ID NO: 182156 - DNA, 31 bp, Artificial Sequence
  Synthetic oligonucleotide
gaactgcaaagcatcaggaccgggttagaaa

SEQ ID NO: 182157 - DNA, 30 bp, Artificial Sequence
  Synthetic oligonucleotide
tagaggcatgccgcaagagggcaaacgaaa

SEQ ID NO: 182158 - DNA, 30 bp, Artificial Sequence
  Synthetic oligonucleotide
taatgaaatctggcagcagggggaacgaaa

SEQ ID NO: 182159 - DNA, 30 bp, Artificial Sequence
  Synthetic oligonucleotide
ccgtagggtacataccacgcattaacgaaa

SEQ ID NO: 182160 - DNA, 30 bp, Artificial Sequence
  Synthetic oligonucleotide
tatttagttgcatgatacgacgagacgaaa

SEQ ID NO: 182161 - DNA, 30 bp, Artificial Sequence
  Synthetic oligonucleotide
tgaagactaggattaggccgcatgacgaaa

SEQ ID NO: 182162 - DNA, 30 bp, Artificial Sequence
  Synthetic oligonucleotide
ccaagcgctaccgtatggcttcgcccgaaa

SEQ ID NO: 182163 - DNA, 30 bp, Artificial Sequence
  Synthetic oligonucleotide
cggatggttaatgcggagagaaagccgaaa

SEQ ID NO: 182164 - DNA, 30 bp, Artificial Sequence
  Synthetic oligonucleotide
gtagatggcttcctgatgtgggtagcgaaa

SEQ ID NO: 182165 - DNA, 30 bp, Artificial Sequence
  Synthetic oligonucleotide
ttgttgcgaacatagatgatgggcgcgaaa

SEQ ID NO: 182166 - DNA, 30 bp, Artificial Sequence
  Synthetic oligonucleotide
tcacctagggcaatgcaggaataggcgaaa

SEQ ID NO: 182167 - DNA, 30 bp, Artificial Sequence
  Synthetic oligonucleotide
tgcgatcatgcggttggcggctttgcgaaa

SEQ ID NO: 182168 - DNA, 30 bp, Artificial Sequence
  Synthetic oligonucleotide
tacatttttgtaaaaagcgaactgtcgaaa

SEQ ID NO: 182169 - DNA, 30 bp, Artificial Sequence
  Synthetic oligonucleotide
tgaagttaagggccctgatcggcaaggaaa

SEQ ID NO: 182170 - DNA, 30 bp, Artificial Sequence
  Synthetic oligonucleotide
agagctatcgtatcacccggggacaggaaa

SEQ ID NO: 182171 - DNA, 30 bp, Artificial Sequence
  Synthetic oligonucleotide
aacgttctaccatagccgggtctcaggaaa

SEQ ID NO: 182172 - DNA, 30 bp, Artificial Sequence
  Synthetic oligonucleotide
ttatacagcaatgagttctctttcaggaaa

SEQ ID NO: 182173 - DNA, 30 bp, Artificial Sequence
  Synthetic oligonucleotide
ccttcatgctcttaacctgaagggaggaaa

SEQ ID NO: 182174 - DNA, 30 bp, Artificial Sequence
  Synthetic oligonucleotide
gtgtgcatatgaagaaccaaacttaggaaa

SEQ ID NO: 182175 - DNA, 30 bp, Artificial Sequence
  Synthetic oligonucleotide
tgcatcagaacaatgaagtaacttaggaaa

SEQ ID NO: 182176 - DNA, 30 bp, Artificial Sequence
  Synthetic oligonucleotide
ttcgctagatatgaagtcggactacggaaa

SEQ ID NO: 182177 - DNA, 31 bp, Artificial Sequence
  Synthetic oligonucleotide
gaagccaaccattaccaaggaaaaccggaaa

SEQ ID NO: 182178 - DNA, 30 bp, Artificial Sequence
  Synthetic oligonucleotide
aaagatgggctgatccagcaatcccggaaa

SEQ ID NO: 182179 - DNA, 30 bp, Artificial Sequence
  Synthetic oligonucleotide
tactggcattgtgatcgttctggccggaaa

SEQ ID NO: 182180 - DNA, 30 bp, Artificial Sequence
  Synthetic oligonucleotide
ctataagctgcgggacgttatgatcggaaa

SEQ ID NO: 182181 - DNA, 30 bp, Artificial Sequence
  Synthetic oligonucleotide
gtatttctagtattaataaggacagggaaa

SEQ ID NO: 182182 - DNA, 30 bp, Artificial Sequence
  Synthetic oligonucleotide
cgtaatcaaaggctaccatcgtcagggaaa

SEQ ID NO: 182183 - DNA, 30 bp, Artificial Sequence
  Synthetic oligonucleotide
ttaaagaaagccggggttagcgaggggaaa

SEQ ID NO: 182184 - DNA, 30 bp, Artificial Sequence
  Synthetic oligonucleotide
gaacgtggattactggtcgacagggggaaa

SEQ ID NO: 182185 - DNA, 30 bp, Artificial Sequence
  Synthetic oligonucleotide
tctaaggcgatgtagcggggggatgggaaa

SEQ ID NO: 182186 - DNA, 30 bp, Artificial Sequence
  Synthetic oligonucleotide
catatgccgaaattaatagtctaatggaaa

SEQ ID NO: 182187 - DNA, 30 bp, Artificial Sequence
  Synthetic oligonucleotide
agaccagaaaggacccctatgcactggaaa

SEQ ID NO: 182188 - DNA, 30 bp, Artificial Sequence
  Synthetic oligonucleotide
cctaagcaaaggtaagcacaccagtggaaa

SEQ ID NO: 182189 - DNA, 30 bp, Artificial Sequence
  Synthetic oligonucleotide
ttggcaggttgaacaggaacgacgtggaaa

SEQ ID NO: 182190 - DNA, 30 bp, Artificial Sequence
  Synthetic oligonucleotide
catcatgatgcttctgaaaggtgttggaaa

SEQ ID NO: 182191 - DNA, 30 bp, Artificial Sequence
  Synthetic oligonucleotide
agaacagtcgcgcccactatataaatgaaa

SEQ ID NO: 182192 - DNA, 30 bp, Artificial Sequence
  Synthetic oligonucleotide
tgggtggtttccaggttatccaccatgaaa

SEQ ID NO: 182193 - DNA, 30 bp, Artificial Sequence
  Synthetic oligonucleotide
gtggggctgctaagtgtcactcgcatgaaa

SEQ ID NO: 182194 - DNA, 30 bp, Artificial Sequence
  Synthetic oligonucleotide
gaacaaatagataaccaatccgggatgaaa

SEQ ID NO: 182195 - DNA, 30 bp, Artificial Sequence
  Synthetic oligonucleotide
agcaatggtactagaaaaacccctatgaaa

SEQ ID NO: 182196 - DNA, 30 bp, Artificial Sequence
  Synthetic oligonucleotide
tggcaataaaatcggggttaatgactgaaa

SEQ ID NO: 182197 - DNA, 30 bp, Artificial Sequence
  Synthetic oligonucleotide
gatggtgtgcaagaaattccgttactgaaa

SEQ ID NO: 182198 - DNA, 30 bp, Artificial Sequence
  Synthetic oligonucleotide
gccacatcgaaaggcgcgttctgcctgaaa

SEQ ID NO: 182199 - DNA, 30 bp, Artificial Sequence
  Synthetic oligonucleotide
ctacctggaagcaaagcttgagagctgaaa

SEQ ID NO: 182200 - DNA, 30 bp, Artificial Sequence
  Synthetic oligonucleotide
gtcacgcgttgccactaaatgaatctgaaa

SEQ ID NO: 182201 - DNA, 30 bp, Artificial Sequence
  Synthetic oligonucleotide
gggttgcaacctaatacttgttgtctgaaa

SEQ ID NO: 182202 - DNA, 30 bp, Artificial Sequence
  Synthetic oligonucleotide
gggaaaaagacaaaatcctagtaagtgaaa

SEQ ID NO: 182203 - DNA, 30 bp, Artificial Sequence
  Synthetic oligonucleotide
tgtgacacgatgcgatgagcccgagtgaaa

SEQ ID NO: 182204 - DNA, 30 bp, Artificial Sequence
  Synthetic oligonucleotide
gagatagaccactggatctcgggcgtgaaa

SEQ ID NO: 182205 - DNA, 30 bp, Artificial Sequence
  Synthetic oligonucleotide
gggaccacgggatgcctttgtacggtgaaa

SEQ ID NO: 182206 - DNA, 30 bp, Artificial Sequence
  Synthetic oligonucleotide
cagaagggaccggcaagctatttggtgaaa

SEQ ID NO: 182207 - DNA, 30 bp, Artificial Sequence
  Synthetic oligonucleotide
tagaaaggatgataggtgtcctgtgtgaaa

SEQ ID NO: 182208 - DNA, 30 bp, Artificial Sequence
  Synthetic oligonucleotide
tggacggtccgatatccgcgctaattgaaa

SEQ ID NO: 182209 - DNA, 30 bp, Artificial Sequence
  Synthetic oligonucleotide
gtcagggtagatacaaatgtcgtattgaaa

SEQ ID NO: 182210 - DNA, 30 bp, Artificial Sequence
  Synthetic oligonucleotide
gtggccgtagacctagttgactacttgaaa

SEQ ID NO: 182211 - DNA, 30 bp, Artificial Sequence
  Synthetic oligonucleotide
tactcgctgagctagtgatgtcgcttgaaa

SEQ ID NO: 182212 - DNA, 30 bp, Artificial Sequence
  Synthetic oligonucleotide
aaccttgtggccgttcgttaagcgttgaaa

SEQ ID NO: 182213 - DNA, 30 bp, Artificial Sequence
  Synthetic oligonucleotide
ggccagtgttggacttgatattggttgaaa

SEQ ID NO: 182214 - DNA, 30 bp, Artificial Sequence
  Synthetic oligonucleotide
aacaggtaataaagggtttacaatttgaaa

SEQ ID NO: 182215 - DNA, 30 bp, Artificial Sequence
  Synthetic oligonucleotide
tcgacacattatagctcgggacaaaataaa

SEQ ID NO: 182216 - DNA, 30 bp, Artificial Sequence
  Synthetic oligonucleotide
agaagtaggataactggggaagaaaataaa

SEQ ID NO: 182217 - DNA, 30 bp, Artificial Sequence
  Synthetic oligonucleotide
aacagattgtaggctaatagggcaaataaa

SEQ ID NO: 182218 - DNA, 30 bp, Artificial Sequence
  Synthetic oligonucleotide
tgcgcttgcccagggtcactctacaataaa

SEQ ID NO: 182219 - DNA, 30 bp, Artificial Sequence
  Synthetic oligonucleotide
gcaagacagcatgaggggtaacgcaataaa

SEQ ID NO: 182220 - DNA, 30 bp, Artificial Sequence
  Synthetic oligonucleotide
atcactaacatcgggtcaggggggaataaa

SEQ ID NO: 182221 - DNA, 30 bp, Artificial Sequence
  Synthetic oligonucleotide
tcggagtcagtggtggaacgcgataataaa

SEQ ID NO: 182222 - DNA, 30 bp, Artificial Sequence
  Synthetic oligonucleotide
gtaggtcagggtaaagctctaacacataaa

SEQ ID NO: 182223 - DNA, 30 bp, Artificial Sequence
  Synthetic oligonucleotide
gggtacggggaaaagtgagtcatacataaa

SEQ ID NO: 182224 - DNA, 30 bp, Artificial Sequence
  Synthetic oligonucleotide
acgtgggctgaacgtaatgtcggccataaa

SEQ ID NO: 182225 - DNA, 30 bp, Artificial Sequence
  Synthetic oligonucleotide
gtgcataagctgtgggaagggtgccataaa

SEQ ID NO: 182226 - DNA, 30 bp, Artificial Sequence
  Synthetic oligonucleotide
atttattcaggaaatttaggaaagcataaa

SEQ ID NO: 182227 - DNA, 30 bp, Artificial Sequence
  Synthetic oligonucleotide
gaggagatagatatgcgtaaacagcataaa

SEQ ID NO: 182228 - DNA, 30 bp, Artificial Sequence
  Synthetic oligonucleotide
ggcagaaaagagtaacttctcccgcataaa

SEQ ID NO: 182229 - DNA, 30 bp, Artificial Sequence
  Synthetic oligonucleotide
gtcgatagcacgtgtccataagtgcataaa

SEQ ID NO: 182230 - DNA, 27 bp, Artificial Sequence
  Synthetic oligonucleotide
aaagaggattgcgtgactaaagataaa

SEQ ID NO: 182231 - DNA, 30 bp, Artificial Sequence
  Synthetic oligonucleotide
gtcaggccacgtttttaaatacaagataaa

SEQ ID NO: 182232 - DNA, 30 bp, Artificial Sequence
  Synthetic oligonucleotide
gcaaggtttcaacacttagaatcagataaa

SEQ ID NO: 182233 - DNA, 30 bp, Artificial Sequence
  Synthetic oligonucleotide
gaaagatactaaatggataacggagataaa

SEQ ID NO: 182234 - DNA, 30 bp, Artificial Sequence
  Synthetic oligonucleotide
gtagccgtcaggaaaggatttttagataaa

SEQ ID NO: 182235 - DNA, 30 bp, Artificial Sequence
  Synthetic oligonucleotide
ataaatgagttggcgcacatctaggataaa

SEQ ID NO: 182236 - DNA, 30 bp, Artificial Sequence
  Synthetic oligonucleotide
attacctcgagaaggtcacatgcggataaa

SEQ ID NO: 182237 - DNA, 30 bp, Artificial Sequence
  Synthetic oligonucleotide
ccaggggtctaaaaaagaggtagtgataaa

SEQ ID NO: 182238 - DNA, 30 bp, Artificial Sequence
  Synthetic oligonucleotide
aagatcaattcagagtgcccgtgctataaa

SEQ ID NO: 182239 - DNA, 30 bp, Artificial Sequence
  Synthetic oligonucleotide
gtcatacgcacgaagcgtggcatgtataaa

SEQ ID NO: 182240 - DNA, 30 bp, Artificial Sequence
  Synthetic oligonucleotide
tgaagcggtcggttcgggatagcttataaa

SEQ ID NO: 182241 - DNA, 31 bp, Artificial Sequence
  Synthetic oligonucleotide
cttagctgaagtggtaatggatatttataaa

SEQ ID NO: 182242 - DNA, 30 bp, Artificial Sequence
  Synthetic oligonucleotide
agattcttcaattagggggctaggactaaa

SEQ ID NO: 182243 - DNA, 30 bp, Artificial Sequence
  Synthetic oligonucleotide
attgcacgcaggtacacggaaactactaaa

SEQ ID NO: 182244 - DNA, 30 bp, Artificial Sequence
  Synthetic oligonucleotide
gtgtagccatcgactggatggatacctaaa

SEQ ID NO: 182245 - DNA, 30 bp, Artificial Sequence
  Synthetic oligonucleotide
catactgctcaagcactacaggcccctaaa

SEQ ID NO: 182246 - DNA, 30 bp, Artificial Sequence
  Synthetic oligonucleotide
tcaggctagtattggggaagtatccctaaa

SEQ ID NO: 182247 - DNA, 30 bp, Artificial Sequence
  Synthetic oligonucleotide
ctaaatatatacttccagtgctaagctaaa

SEQ ID NO: 182248 - DNA, 30 bp, Artificial Sequence
  Synthetic oligonucleotide
ggtgcagcttgcaagtctgtatgagctaaa

SEQ ID NO: 182249 - DNA, 30 bp, Artificial Sequence
  Synthetic oligonucleotide
ccaagagtaataaaaacttcggacgctaaa

SEQ ID NO: 182250 - DNA, 30 bp, Artificial Sequence
  Synthetic oligonucleotide
aaaagacatttgacgacgtaacgcgctaaa

SEQ ID NO: 182251 - DNA, 30 bp, Artificial Sequence
  Synthetic oligonucleotide
ccatcaggggggtggcgtctcggcgctaaa

SEQ ID NO: 182252 - DNA, 30 bp, Artificial Sequence
  Synthetic oligonucleotide
atcagtacattataacatcactaatctaaa

SEQ ID NO: 182253 - DNA, 30 bp, Artificial Sequence
  Synthetic oligonucleotide
ctagcttacccgaaaacggaaacatctaaa

SEQ ID NO: 182254 - DNA, 30 bp, Artificial Sequence
  Synthetic oligonucleotide
ataggttgagaggtcgagactcactctaaa

SEQ ID NO: 182255 - DNA, 30 bp, Artificial Sequence
  Synthetic oligonucleotide
ctatgtagtccatggacaggggactctaaa

SEQ ID NO: 182256 - DNA, 30 bp, Artificial Sequence
  Synthetic oligonucleotide
cgactagacaggtttcaatgtagctctaaa

SEQ ID NO: 182257 - DNA, 30 bp, Artificial Sequence
  Synthetic oligonucleotide
atagccgatctgagctctcgcgtgtctaaa

SEQ ID NO: 182258 - DNA, 30 bp, Artificial Sequence
  Synthetic oligonucleotide
gcggtgcggtgcgaggctgttccttctaaa

SEQ ID NO: 182259 - DNA, 30 bp, Artificial Sequence
  Synthetic oligonucleotide
ttgggcatctctctcgacaatcgttctaaa

SEQ ID NO: 182260 - DNA, 30 bp, Artificial Sequence
  Synthetic oligonucleotide
ggtgagcagtctgcgcgctgtaaaagtaaa

SEQ ID NO: 182261 - DNA, 30 bp, Artificial Sequence
  Synthetic oligonucleotide
gtgcgacggaattgtgcaataatgagtaaa

SEQ ID NO: 182262 - DNA, 30 bp, Artificial Sequence
  Synthetic oligonucleotide
agtaaacgagttataatgccgatacgtaaa

SEQ ID NO: 182263 - DNA, 30 bp, Artificial Sequence
  Synthetic oligonucleotide
agagggtttaaatatgttgaacagcgtaaa

SEQ ID NO: 182264 - DNA, 30 bp, Artificial Sequence
  Synthetic oligonucleotide
gggcatcgaccgataggaattgggcgtaaa

SEQ ID NO: 182265 - DNA, 30 bp, Artificial Sequence
  Synthetic oligonucleotide
gcgaaagttccatagctaatgattcgtaaa

SEQ ID NO: 182266 - DNA, 29 bp, Artificial Sequence
  Synthetic oligonucleotide
ttaggacccatgcgaggatcgcaggtaaa

SEQ ID NO: 182267 - DNA, 30 bp, Artificial Sequence
  Synthetic oligonucleotide
gggaaaaatccacaaagttgagtatgtaaa

SEQ ID NO: 182268 - DNA, 30 bp, Artificial Sequence
  Synthetic oligonucleotide
gaaatcgtactcaaactttcgtactgtaaa

SEQ ID NO: 182269 - DNA, 30 bp, Artificial Sequence
  Synthetic oligonucleotide
atataaggtgcaaggtttagaggctgtaaa

SEQ ID NO: 182270 - DNA, 30 bp, Artificial Sequence
  Synthetic oligonucleotide
tgaaattgattagggcacagcggctgtaaa

SEQ ID NO: 182271 - DNA, 30 bp, Artificial Sequence
  Synthetic oligonucleotide
agagcttgatcggagagttagccgtgtaaa

SEQ ID NO: 182272 - DNA, 30 bp, Artificial Sequence
  Synthetic oligonucleotide
tcaggaagaagagctactctagggtgtaaa

SEQ ID NO: 182273 - DNA, 30 bp, Artificial Sequence
  Synthetic oligonucleotide
ccggaaatatagggggcctacccttgtaaa

SEQ ID NO: 182274 - DNA, 30 bp, Artificial Sequence
  Synthetic oligonucleotide
acggaggctaaggggctacaacgcattaaa

SEQ ID NO: 182275 - DNA, 30 bp, Artificial Sequence
  Synthetic oligonucleotide
acaacccatttgaaatatacaggcattaaa

SEQ ID NO: 182276 - DNA, 30 bp, Artificial Sequence
  Synthetic oligonucleotide
aagccgccactaataagagggactattaaa

SEQ ID NO: 182277 - DNA, 30 bp, Artificial Sequence
  Synthetic oligonucleotide
tacgggctaaatcgagcggcataccttaaa

SEQ ID NO: 182278 - DNA, 30 bp, Artificial Sequence
  Synthetic oligonucleotide
aaaacatttcaacgctccagatgccttaaa

SEQ ID NO: 182279 - DNA, 30 bp, Artificial Sequence
  Synthetic oligonucleotide
ttaagggtccccagtccattagcgcttaaa

SEQ ID NO: 182280 - DNA, 30 bp, Artificial Sequence
  Synthetic oligonucleotide
actagcatcgtccgagtaacggcgcttaaa

SEQ ID NO: 182281 - DNA, 30 bp, Artificial Sequence
  Synthetic oligonucleotide
gcagagacttctcaccaggtcgatcttaaa

SEQ ID NO: 182282 - DNA, 30 bp, Artificial Sequence
  Synthetic oligonucleotide
acgggttgaatgatggccgggactcttaaa

SEQ ID NO: 182283 - DNA, 30 bp, Artificial Sequence
  Synthetic oligonucleotide
ctgatacgaacttaacagcataaagttaaa

SEQ ID NO: 182284 - DNA, 30 bp, Artificial Sequence
  Synthetic oligonucleotide
cctccagagtatgctatatccctagttaaa

SEQ ID NO: 182285 - DNA, 30 bp, Artificial Sequence
  Synthetic oligonucleotide
agccttggtaagattaaccctcaggttaaa

SEQ ID NO: 182286 - DNA, 30 bp, Artificial Sequence
  Synthetic oligonucleotide
tagaagatacggagccaaagtctggttaaa

SEQ ID NO: 182287 - DNA, 30 bp, Artificial Sequence
  Synthetic oligonucleotide
ggcacgtgatcacaagtcgaggtggttaaa

SEQ ID NO: 182288 - DNA, 30 bp, Artificial Sequence
  Synthetic oligonucleotide
cacgaagtctgcttccgtcaccatgttaaa

SEQ ID NO: 182289 - DNA, 30 bp, Artificial Sequence
  Synthetic oligonucleotide
gacggactgccagttttctgccatgttaaa

SEQ ID NO: 182290 - DNA, 30 bp, Artificial Sequence
  Synthetic oligonucleotide
gtacgatcggctagagtcaaggctgttaaa

SEQ ID NO: 182291 - DNA, 30 bp, Artificial Sequence
  Synthetic oligonucleotide
ccggtagctctactggcacgatctgttaaa

SEQ ID NO: 182292 - DNA, 30 bp, Artificial Sequence
  Synthetic oligonucleotide
gtgtaatttcgctcgcccaactctgttaaa

SEQ ID NO: 182293 - DNA, 30 bp, Artificial Sequence
  Synthetic oligonucleotide
ggacgttcggctgtgcatcgcttatttaaa

SEQ ID NO: 182294 - DNA, 30 bp, Artificial Sequence
  Synthetic oligonucleotide
acaatcacgataagactcacgcgctttaaa

SEQ ID NO: 182295 - DNA, 30 bp, Artificial Sequence
  Synthetic oligonucleotide
cagatcaggtataagcgccttgtctttaaa

SEQ ID NO: 182296 - DNA, 30 bp, Artificial Sequence
  Synthetic oligonucleotide
aggtcggggagataatacacgtagtttaaa

SEQ ID NO: 182297 - DNA, 30 bp, Artificial Sequence
  Synthetic oligonucleotide
caaagctatccacaatattgtgccaaacaa

SEQ ID NO: 182298 - DNA, 30 bp, Artificial Sequence
  Synthetic oligonucleotide
aaagtttacaaaacatgggtctgcaaacaa

SEQ ID NO: 182299 - DNA, 30 bp, Artificial Sequence
  Synthetic oligonucleotide
ccgggactagtagaagtttattagaaacaa

SEQ ID NO: 182300 - DNA, 30 bp, Artificial Sequence
  Synthetic oligonucleotide
gagagtttgggaagacttgaggggaaacaa

SEQ ID NO: 182301 - DNA, 30 bp, Artificial Sequence
  Synthetic oligonucleotide
tattggccgtacccgcttcacggtaaacaa

SEQ ID NO: 182302 - DNA, 30 bp, Artificial Sequence
  Synthetic oligonucleotide
agactaggttaccagcgggagtgtaaacaa

SEQ ID NO: 182303 - DNA, 30 bp, Artificial Sequence
  Synthetic oligonucleotide
acttgctggcaaactggttgacaccaacaa

SEQ ID NO: 182304 - DNA, 30 bp, Artificial Sequence
  Synthetic oligonucleotide
tgaaagtatatggaatcggtaagccaacaa

SEQ ID NO: 182305 - DNA, 30 bp, Artificial Sequence
  Synthetic oligonucleotide
acactaacgcggatccgaagatccgaacaa

SEQ ID NO: 182306 - DNA, 30 bp, Artificial Sequence
  Synthetic oligonucleotide
gctctttaacagtatagtgcgctcgaacaa

SEQ ID NO: 182307 - DNA, 30 bp, Artificial Sequence
  Synthetic oligonucleotide
ctggtttgctgaagccgatgggaggaacaa

SEQ ID NO: 182308 - DNA, 30 bp, Artificial Sequence
  Synthetic oligonucleotide
tactatctccaatccgagttctcggaacaa

SEQ ID NO: 182309 - DNA, 30 bp, Artificial Sequence
  Synthetic oligonucleotide
agtattgtgagccgaacggtccgggaacaa

SEQ ID NO: 182310 - DNA, 30 bp, Artificial Sequence
  Synthetic oligonucleotide
tgtaaagggggagtatggccgtgggaacaa

SEQ ID NO: 182311 - DNA, 30 bp, Artificial Sequence
  Synthetic oligonucleotide
gaagcgggacaacattgaaggatggaacaa

SEQ ID NO: 182312 - DNA, 30 bp, Artificial Sequence
  Synthetic oligonucleotide
acctctataactaagcaaagccctgaacaa

SEQ ID NO: 182313 - DNA, 30 bp, Artificial Sequence
  Synthetic oligonucleotide
gcaaggtggccagttgtggcggctgaacaa

SEQ ID NO: 182314 - DNA, 30 bp, Artificial Sequence
  Synthetic oligonucleotide
gggtcggtataaaagttcccactataacaa

SEQ ID NO: 182315 - DNA, 30 bp, Artificial Sequence
  Synthetic oligonucleotide
gattcgacgtgtcggaacagagtataacaa

SEQ ID NO: 182316 - DNA, 30 bp, Artificial Sequence
  Synthetic oligonucleotide
gcgtgggtagccgcaaagtagcactaacaa

SEQ ID NO: 182317 - DNA, 30 bp, Artificial Sequence
  Synthetic oligonucleotide
atagctcatcgtgtggtacgctagtaacaa

SEQ ID NO: 182318 - DNA, 30 bp, Artificial Sequence
  Synthetic oligonucleotide
tccgataacattcgctacaatccgtaacaa

SEQ ID NO: 182319 - DNA, 30 bp, Artificial Sequence
  Synthetic oligonucleotide
acattggtaatttcacctggccggtaacaa

SEQ ID NO: 182320 - DNA, 30 bp, Artificial Sequence
  Synthetic oligonucleotide
acgcttacttaaatcgatctcgtgtaacaa

SEQ ID NO: 182321 - DNA, 30 bp, Artificial Sequence
  Synthetic oligonucleotide
tactgcgaaggctggaagtcgggcacacaa

SEQ ID NO: 182322 - DNA, 30 bp, Artificial Sequence
  Synthetic oligonucleotide
ggcgtggatcgacttcgcgtggggacacaa

SEQ ID NO: 182323 - DNA, 30 bp, Artificial Sequence
  Synthetic oligonucleotide
gattggcagttgtggtcaaaccatacacaa

SEQ ID NO: 182324 - DNA, 30 bp, Artificial Sequence
  Synthetic oligonucleotide
cttagactggcgctatagttactagcacaa

SEQ ID NO: 182325 - DNA, 30 bp, Artificial Sequence
  Synthetic oligonucleotide
gggaaacagcgtgtgacagtaagcgcacaa

SEQ ID NO: 182326 - DNA, 30 bp, Artificial Sequence
  Synthetic oligonucleotide
agaaaacggtagcgggagcaggttgcacaa

SEQ ID NO: 182327 - DNA, 30 bp, Artificial Sequence
  Synthetic oligonucleotide
ttctgcgagtaatcctggatccgatcacaa

SEQ ID NO: 182328 - DNA, 30 bp, Artificial Sequence
  Synthetic oligonucleotide
tggtatcctaaggtgaactgcggatcacaa

SEQ ID NO: 182329 - DNA, 30 bp, Artificial Sequence
  Synthetic oligonucleotide
gagtgtcagactatggacctaacctcacaa

SEQ ID NO: 182330 - DNA, 30 bp, Artificial Sequence
  Synthetic oligonucleotide
aggtggcttctaagtgactacaattcacaa

SEQ ID NO: 182331 - DNA, 30 bp, Artificial Sequence
  Synthetic oligonucleotide
ggttagtgagtaagggacgctgaaagacaa

SEQ ID NO: 182332 - DNA, 30 bp, Artificial Sequence
  Synthetic oligonucleotide
gacatacatatgacttgctctctaagacaa

SEQ ID NO: 182333 - DNA, 30 bp, Artificial Sequence
  Synthetic oligonucleotide
gttccatgggggttataactaagtagacaa

SEQ ID NO: 182334 - DNA, 30 bp, Artificial Sequence
  Synthetic oligonucleotide
aggttctgtcatttcgacaaaacacgacaa

SEQ ID NO: 182335 - DNA, 30 bp, Artificial Sequence
  Synthetic oligonucleotide
gcgatcctgactaaccgcatgagacgacaa

SEQ ID NO: 182336 - DNA, 30 bp, Artificial Sequence
  Synthetic oligonucleotide
cgaattggttctttctatgggtgacgacaa

SEQ ID NO: 182337 - DNA, 30 bp, Artificial Sequence
  Synthetic oligonucleotide
agggacagcgcacccttattcaaccgacaa

SEQ ID NO: 182338 - DNA, 30 bp, Artificial Sequence
  Synthetic oligonucleotide
gcctatagcatacggattcgtatccgacaa

SEQ ID NO: 182339 - DNA, 30 bp, Artificial Sequence
  Synthetic oligonucleotide
tgaaatgaagggttgccggagtggcgacaa

SEQ ID NO: 182340 - DNA, 30 bp, Artificial Sequence
  Synthetic oligonucleotide
tggaaaaacatcccccgatggatgcgacaa

SEQ ID NO: 182341 - DNA, 30 bp, Artificial Sequence
  Synthetic oligonucleotide
ggggacatataatgcggcggagaaggacaa

SEQ ID NO: 182342 - DNA, 30 bp, Artificial Sequence
  Synthetic oligonucleotide
ctccgttgaaaatcgtgccgcgtaggacaa

SEQ ID NO: 182343 - DNA, 30 bp, Artificial Sequence
  Synthetic oligonucleotide
tgaatctaatcttgaattgtaaccggacaa

SEQ ID NO: 182344 - DNA, 30 bp, Artificial Sequence
  Synthetic oligonucleotide
tatgtataaagacgtgtctgcccgggacaa

SEQ ID NO: 182345 - DNA, 30 bp, Artificial Sequence
  Synthetic oligonucleotide
gctgggaatcaaaagacagtttgatgacaa

SEQ ID NO: 182346 - DNA, 30 bp, Artificial Sequence
  Synthetic oligonucleotide
cgagtaccatcggtcatgtcgcgctgacaa

SEQ ID NO: 182347 - DNA, 30 bp, Artificial Sequence
  Synthetic oligonucleotide
attgtcgatcatgactctaatgcgtgacaa

SEQ ID NO: 182348 - DNA, 30 bp, Artificial Sequence
  Synthetic oligonucleotide
atgtattagttcatgtatcaatggtgacaa

SEQ ID NO: 182349 - DNA, 30 bp, Artificial Sequence
  Synthetic oligonucleotide
ggcaccattgaattcattcatgtgtgacaa

SEQ ID NO: 182350 - DNA, 30 bp, Artificial Sequence
  Synthetic oligonucleotide
ggtgattgggaattatacgaccagatacaa

SEQ ID NO: 182351 - DNA, 30 bp, Artificial Sequence
  Synthetic oligonucleotide
ctgtagagtattttccttcgctcgatacaa

SEQ ID NO: 182352 - DNA, 29 bp, Artificial Sequence
  Synthetic oligonucleotide
gcaaagaccacaatacgaatatgatacaa

SEQ ID NO: 182353 - DNA, 30 bp, Artificial Sequence
  Synthetic oligonucleotide
taatgagggaagaagacccccgctatacaa

SEQ ID NO: 182354 - DNA, 30 bp, Artificial Sequence
  Synthetic oligonucleotide
gagctaagaatagattgctaggctatacaa

SEQ ID NO: 182355 - DNA, 30 bp, Artificial Sequence
  Synthetic oligonucleotide
ctgaggcgtacgccccaatacaaactacaa

SEQ ID NO: 182356 - DNA, 30 bp, Artificial Sequence
  Synthetic oligonucleotide
tgaggctcacgctccgacatcgaactacaa

SEQ ID NO: 182357 - DNA, 30 bp, Artificial Sequence
  Synthetic oligonucleotide
tgagacaccacctgggattgtgtactacaa

SEQ ID NO: 182358 - DNA, 29 bp, Artificial Sequence
  Synthetic oligonucleotide
tgtcggtaaggtcctagcgacggctacaa

SEQ ID NO: 182359 - DNA, 30 bp, Artificial Sequence
  Synthetic oligonucleotide
ggggaatgctcatcgggggtaatgctacaa

SEQ ID NO: 182360 - DNA, 30 bp, Artificial Sequence
  Synthetic oligonucleotide
ggcgtaattatagacgtgaggtatctacaa

SEQ ID NO: 182361 - DNA, 30 bp, Artificial Sequence
  Synthetic oligonucleotide
caacctaaaggcacaaagaagcttctacaa

SEQ ID NO: 182362 - DNA, 30 bp, Artificial Sequence
  Synthetic oligonucleotide
tctctgcaatgcgaagtatatacggtacaa

SEQ ID NO: 182363 - DNA, 30 bp, Artificial Sequence
  Synthetic oligonucleotide
ccacgggcagttccggtgagtccggtacaa

SEQ ID NO: 182364 - DNA, 30 bp, Artificial Sequence
  Synthetic oligonucleotide
actgagcccgggttccgctcacgggtacaa

SEQ ID NO: 182365 - DNA, 30 bp, Artificial Sequence
  Synthetic oligonucleotide
agctggggtgttagtcggcacggtgtacaa

SEQ ID NO: 182366 - DNA, 30 bp, Artificial Sequence
  Synthetic oligonucleotide
aggctgctgaaagaaggcgtgtagttacaa

SEQ ID NO: 182367 - DNA, 30 bp, Artificial Sequence
  Synthetic oligonucleotide
tcaggaggtcgtatggagctcgatttacaa

SEQ ID NO: 182368 - DNA, 30 bp, Artificial Sequence
  Synthetic oligonucleotide
atgtgaagctacgtagtaaatgccaaccaa

SEQ ID NO: 182369 - DNA, 30 bp, Artificial Sequence
  Synthetic oligonucleotide
agcgctccatacgatggctacagcaaccaa

SEQ ID NO: 182370 - DNA, 30 bp, Artificial Sequence
  Synthetic oligonucleotide
ggcaataaacattcttcccatgagaaccaa

SEQ ID NO: 182371 - DNA, 30 bp, Artificial Sequence
  Synthetic oligonucleotide
gcatgaagaacgcagtggtcaagtaaccaa

SEQ ID NO: 182372 - DNA, 30 bp, Artificial Sequence
  Synthetic oligonucleotide
aaaagcaagagaatttggatcgaacaccaa

SEQ ID NO: 182373 - DNA, 30 bp, Artificial Sequence
  Synthetic oligonucleotide
ctagtagaccatcttagccagcagcaccaa

SEQ ID NO: 182374 - DNA, 30 bp, Artificial Sequence
  Synthetic oligonucleotide
aacgtccgaggctggggatagtatcaccaa

SEQ ID NO: 182375 - DNA, 30 bp, Artificial Sequence
  Synthetic oligonucleotide
acgacatgtttcaccccgaaacctcaccaa

SEQ ID NO: 182376 - DNA, 30 bp, Artificial Sequence
  Synthetic oligonucleotide
gccccgcaagtcaacagtactgctcaccaa

SEQ ID NO: 182377 - DNA, 30 bp, Artificial Sequence
  Synthetic oligonucleotide
caagggtttaagaaagtcgaatcagaccaa

SEQ ID NO: 182378 - DNA, 30 bp, Artificial Sequence
  Synthetic oligonucleotide
ggggccatacagtggtcatacactgaccaa

SEQ ID NO: 182379 - DNA, 30 bp, Artificial Sequence
  Synthetic oligonucleotide
gcgactcctcagtaagaggtaccctaccaa

SEQ ID NO: 182380 - DNA, 30 bp, Artificial Sequence
  Synthetic oligonucleotide
ggtagcgatagcgtttgaggattgtaccaa

SEQ ID NO: 182381 - DNA, 30 bp, Artificial Sequence
  Synthetic oligonucleotide
gaagcagccggagacaaacattattaccaa

SEQ ID NO: 182382 - DNA, 30 bp, Artificial Sequence
  Synthetic oligonucleotide
acgtaggctggtaacgtgggtccttaccaa

SEQ ID NO: 182383 - DNA, 30 bp, Artificial Sequence
  Synthetic oligonucleotide
ggttgaagcgtaagcttacagaaaacccaa

SEQ ID NO: 182384 - DNA, 30 bp, Artificial Sequence
  Synthetic oligonucleotide
catcgagggactccaagaccacgcacccaa

SEQ ID NO: 182385 - DNA, 30 bp, Artificial Sequence
  Synthetic oligonucleotide
acggattgtaagaccgttttgtagacccaa

SEQ ID NO: 182386 - DNA, 30 bp, Artificial Sequence
  Synthetic oligonucleotide
cgcgatcctaatccgcaaaacaggacccaa

SEQ ID NO: 182387 - DNA, 30 bp, Artificial Sequence
  Synthetic oligonucleotide
ctaactgacaattagtttctactgacccaa

SEQ ID NO: 182388 - DNA, 30 bp, Artificial Sequence
  Synthetic oligonucleotide
tcatcaggcatttatgggaagagaccccaa

SEQ ID NO: 182389 - DNA, 30 bp, Artificial Sequence
  Synthetic oligonucleotide
ggcagctgcctgcatcaaccattcccccaa

SEQ ID NO: 182390 - DNA, 30 bp, Artificial Sequence
  Synthetic oligonucleotide
atatcagacgtctaggtaaaagggccccaa

SEQ ID NO: 182391 - DNA, 30 bp, Artificial Sequence
  Synthetic oligonucleotide
cgtactgataattgtgaaaatgctccccaa

SEQ ID NO: 182392 - DNA, 30 bp, Artificial Sequence
  Synthetic oligonucleotide
cggcggatgcgtaaaggtccgcgagcccaa

SEQ ID NO: 182393 - DNA, 30 bp, Artificial Sequence
  Synthetic oligonucleotide
aaagttatcgacgggggtacagtagcccaa

SEQ ID NO: 182394 - DNA, 30 bp, Artificial Sequence
  Synthetic oligonucleotide
tgccacatatccgctaactgaacggcccaa

SEQ ID NO: 182395 - DNA, 30 bp, Artificial Sequence
  Synthetic oligonucleotide
gggcgagagttctgccatcagcgggcccaa

SEQ ID NO: 182396 - DNA, 30 bp, Artificial Sequence
  Synthetic oligonucleotide
tacatactggcagatatagtagtggcccaa

SEQ ID NO: 182397 - DNA, 30 bp, Artificial Sequence
  Synthetic oligonucleotide
cagcaaggcgacagtcgacgtgaatcccaa

SEQ ID NO: 182398 - DNA, 30 bp, Artificial Sequence
  Synthetic oligonucleotide
gattaaaggaggtcagaaggaatacgccaa

SEQ ID NO: 182399 - DNA, 30 bp, Artificial Sequence
  Synthetic oligonucleotide
cagttatggagcataaaggttatccgccaa

SEQ ID NO: 182400 - DNA, 30 bp, Artificial Sequence
  Synthetic oligonucleotide
gtcggtaagcgatcgaggatctatcgccaa

SEQ ID NO: 182401 - DNA, 30 bp, Artificial Sequence
  Synthetic oligonucleotide
ttgggcgatagtccatcgtacattcgccaa

SEQ ID NO: 182402 - DNA, 30 bp, Artificial Sequence
  Synthetic oligonucleotide
gggcgcgtatagacggggttgggaggccaa

SEQ ID NO: 182403 - DNA, 30 bp, Artificial Sequence
  Synthetic oligonucleotide
gaagagcgacactcgacaatccacggccaa

SEQ ID NO: 182404 - DNA, 30 bp, Artificial Sequence
  Synthetic oligonucleotide
gaaaaaagataaggtactggtgtcggccaa

SEQ ID NO: 182405 - DNA, 30 bp, Artificial Sequence
  Synthetic oligonucleotide
gagcacctgactacaacggactcgggccaa

SEQ ID NO: 182406 - DNA, 30 bp, Artificial Sequence
  Synthetic oligonucleotide
cgcatggactggaaatgtccgtggggccaa

SEQ ID NO: 182407 - DNA, 30 bp, Artificial Sequence
  Synthetic oligonucleotide
tgcaggtcaggcggatgcggtgatggccaa

SEQ ID NO: 182408 - DNA, 30 bp, Artificial Sequence
  Synthetic oligonucleotide
taggaaatcgagcctagaggacttggccaa

SEQ ID NO: 182409 - DNA, 30 bp, Artificial Sequence
  Synthetic oligonucleotide
aatcggggcctagccctcggctcctgccaa

SEQ ID NO: 182410 - DNA, 30 bp, Artificial Sequence
  Synthetic oligonucleotide
tgggctgataacaatattgagcattgccaa

SEQ ID NO: 182411 - DNA, 30 bp, Artificial Sequence
  Synthetic oligonucleotide
gggaatacagacggcagtggtagttgccaa

SEQ ID NO: 182412 - DNA, 30 bp, Artificial Sequence
  Synthetic oligonucleotide
cttatggaggatattagctgcagaatccaa

SEQ ID NO: 182413 - DNA, 30 bp, Artificial Sequence
  Synthetic oligonucleotide
tcaaaaggacatggcaacgttataatccaa

SEQ ID NO: 182414 - DNA, 30 bp, Artificial Sequence
  Synthetic oligonucleotide
ctctagacgtaaacgactaaaaacatccaa

SEQ ID NO: 182415 - DNA, 30 bp, Artificial Sequence
  Synthetic oligonucleotide
gcgttagttcagttgaaggatgatatccaa

SEQ ID NO: 182416 - DNA, 30 bp, Artificial Sequence
  Synthetic oligonucleotide
atcggaagtcatggtgtaccttgtatccaa

SEQ ID NO: 182417 - DNA, 30 bp, Artificial Sequence
  Synthetic oligonucleotide
tgaacgtcttgatggtataacattatccaa

SEQ ID NO: 182418 - DNA, 30 bp, Artificial Sequence
  Synthetic oligonucleotide
gcgacgcatttgttacgtacagctctccaa

SEQ ID NO: 182419 - DNA, 30 bp, Artificial Sequence
  Synthetic oligonucleotide
taggcaacaatagtcggccctgttctccaa

SEQ ID NO: 182420 - DNA, 30 bp, Artificial Sequence
  Synthetic oligonucleotide
agtagcaaaggtgacttggttccagtccaa

SEQ ID NO: 182421 - DNA, 30 bp, Artificial Sequence
  Synthetic oligonucleotide
acatgtcgttacggcgcccgttcagtccaa

SEQ ID NO: 182422 - DNA, 30 bp, Artificial Sequence
  Synthetic oligonucleotide
gcgccgaatatccctgcgtatgcggtccaa

SEQ ID NO: 182423 - DNA, 30 bp, Artificial Sequence
  Synthetic oligonucleotide
gtgctttgcagtcttcacacaggaaagcaa

SEQ ID NO: 182424 - DNA, 30 bp, Artificial Sequence
  Synthetic oligonucleotide
tgtctactcgaggaaggaattttaaagcaa

SEQ ID NO: 182425 - DNA, 30 bp, Artificial Sequence
  Synthetic oligonucleotide
cagggacaatcctagcccgtatgcaagcaa

SEQ ID NO: 182426 - DNA, 30 bp, Artificial Sequence
  Synthetic oligonucleotide
acatgtacgtacctaagagcgtataagcaa

SEQ ID NO: 182427 - DNA, 30 bp, Artificial Sequence
  Synthetic oligonucleotide
ctgcgattgcacttttcgttgggtaagcaa

SEQ ID NO: 182428 - DNA, 30 bp, Artificial Sequence
  Synthetic oligonucleotide
ggtagtgatactcaggcctgtcagcagcaa

SEQ ID NO: 182429 - DNA, 30 bp, Artificial Sequence
  Synthetic oligonucleotide
ggttccctggcagacatactcaggcagcaa

SEQ ID NO: 182430 - DNA, 30 bp, Artificial Sequence
  Synthetic oligonucleotide
gattgcacggctatgatcacttcagagcaa

SEQ ID NO: 182431 - DNA, 30 bp, Artificial Sequence
  Synthetic oligonucleotide
gcccagaaacgtggcgggttttcagagcaa

SEQ ID NO: 182432 - DNA, 30 bp, Artificial Sequence
  Synthetic oligonucleotide
atgtacattgtgctcggtcagggagagcaa

SEQ ID NO: 182433 - DNA, 30 bp, Artificial Sequence
  Synthetic oligonucleotide
gtgtagtcggtatcatgagaagacgagcaa

SEQ ID NO: 182434 - DNA, 30 bp, Artificial Sequence
  Synthetic oligonucleotide
aactccttacttgttattaatagcgagcaa

SEQ ID NO: 182435 - DNA, 30 bp, Artificial Sequence
  Synthetic oligonucleotide
gcgacttgcggtggccattgtaaggagcaa

SEQ ID NO: 182436 - DNA, 30 bp, Artificial Sequence
  Synthetic oligonucleotide
cactcggccacatgatagtcatcggagcaa

SEQ ID NO: 182437 - DNA, 30 bp, Artificial Sequence
  Synthetic oligonucleotide
acagaacacatcaagtctttgatggagcaa

SEQ ID NO: 182438 - DNA, 30 bp, Artificial Sequence
  Synthetic oligonucleotide
cgttcagcagccaactggagatatgagcaa

SEQ ID NO: 182439 - DNA, 30 bp, Artificial Sequence
  Synthetic oligonucleotide
accaggtctcgggtatgaagttgtgagcaa

SEQ ID NO: 182440 - DNA, 29 bp, Artificial Sequence
  Synthetic oligonucleotide
tgttagccagtgtaccggtggttgagcaa

SEQ ID NO: 182441 - DNA, 30 bp, Artificial Sequence
  Synthetic oligonucleotide
ttcgtgggaagtcaatttcgctgatagcaa

SEQ ID NO: 182442 - DNA, 30 bp, Artificial Sequence
  Synthetic oligonucleotide
atctacgatcactatagaacttcgtagcaa

SEQ ID NO: 182443 - DNA, 30 bp, Artificial Sequence
  Synthetic oligonucleotide
gtatccagggtaaaagataatctgtagcaa

SEQ ID NO: 182444 - DNA, 30 bp, Artificial Sequence
  Synthetic oligonucleotide
ggagaggaagtagtggtgtgtttgtagcaa

SEQ ID NO: 182445 - DNA, 30 bp, Artificial Sequence
  Synthetic oligonucleotide
atcttaatccctgttagtgagctttagcaa

SEQ ID NO: 182446 - DNA, 30 bp, Artificial Sequence
  Synthetic oligonucleotide
ccacctgtggcaagtcatgtccaaacgcaa

SEQ ID NO: 182447 - DNA, 30 bp, Artificial Sequence
  Synthetic oligonucleotide
aacaagtccggatacggaataggaacgcaa

SEQ ID NO: 182448 - DNA, 30 bp, Artificial Sequence
  Synthetic oligonucleotide
acatagagtcaacatgtgataggaacgcaa

SEQ ID NO: 182449 - DNA, 30 bp, Artificial Sequence
  Synthetic oligonucleotide
aggcgatctgtcttgtagcgcctaacgcaa

SEQ ID NO: 182450 - DNA, 30 bp, Artificial Sequence
  Synthetic oligonucleotide
cgtcttgctcgacacacttaaaacacgcaa

SEQ ID NO: 182451 - DNA, 30 bp, Artificial Sequence
  Synthetic oligonucleotide
ggtcaaaagggcaaggggcaaagaccgcaa

SEQ ID NO: 182452 - DNA, 30 bp, Artificial Sequence
  Synthetic oligonucleotide
actgagtcagtaaacgtgttcagaccgcaa

SEQ ID NO: 182453 - DNA, 30 bp, Artificial Sequence
  Synthetic oligonucleotide
gggtggggatgatttcgtgtacgaccgcaa

SEQ ID NO: 182454 - DNA, 30 bp, Artificial Sequence
  Synthetic oligonucleotide
agtgagagcgaaacatcgttcctcccgcaa

SEQ ID NO: 182455 - DNA, 30 bp, Artificial Sequence
  Synthetic oligonucleotide
tggacgttatccgagaggctcgtcccgcaa

SEQ ID NO: 182456 - DNA, 30 bp, Artificial Sequence
  Synthetic oligonucleotide
gagcatggtcgactggtactcactccgcaa

SEQ ID NO: 182457 - DNA, 30 bp, Artificial Sequence
  Synthetic oligonucleotide
tgcggccatattggtcgaaaatgtccgcaa

SEQ ID NO: 182458 - DNA, 30 bp, Artificial Sequence
  Synthetic oligonucleotide
gccagtaagtcatgggtcgttcaagcgcaa

SEQ ID NO: 182459 - DNA, 30 bp, Artificial Sequence
  Synthetic oligonucleotide
agacaccactactagccccagttagcgcaa

SEQ ID NO: 182460 - DNA, 30 bp, Artificial Sequence
  Synthetic oligonucleotide
gttaatagcgacgttattactcgggcgcaa

SEQ ID NO: 182461 - DNA, 30 bp, Artificial Sequence
  Synthetic oligonucleotide
tgcccaagcgaagtgtttaaatatgcgcaa

SEQ ID NO: 182462 - DNA, 30 bp, Artificial Sequence
  Synthetic oligonucleotide
taggtaatagtaaatttcccccttgcgcaa

SEQ ID NO: 182463 - DNA, 30 bp, Artificial Sequence
  Synthetic oligonucleotide
ttccctcataataacttaacggaatcgcaa

SEQ ID NO: 182464 - DNA, 30 bp, Artificial Sequence
  Synthetic oligonucleotide
cctctctagattagccacgccagttcgcaa

SEQ ID NO: 182465 - DNA, 30 bp, Artificial Sequence
  Synthetic oligonucleotide
gtctattaccattcggagacagcaaggcaa

SEQ ID NO: 182466 - DNA, 30 bp, Artificial Sequence
  Synthetic oligonucleotide
ccgtgattagagatttcgatagcaaggcaa

SEQ ID NO: 182467 - DNA, 30 bp, Artificial Sequence
  Synthetic oligonucleotide
aattggaccaataacgcgataggaaggcaa

SEQ ID NO: 182468 - DNA, 30 bp, Artificial Sequence
  Synthetic oligonucleotide
gtcacgagcaggaatgtcgctaggaggcaa

SEQ ID NO: 182469 - DNA, 30 bp, Artificial Sequence
  Synthetic oligonucleotide
accagtaaaggccctcccaaagtgaggcaa

SEQ ID NO: 182470 - DNA, 30 bp, Artificial Sequence
  Synthetic oligonucleotide
caacttcctgccgtcagataccataggcaa

SEQ ID NO: 182471 - DNA, 30 bp, Artificial Sequence
  Synthetic oligonucleotide
gaggctatatccgctcatggttataggcaa

SEQ ID NO: 182472 - DNA, 30 bp, Artificial Sequence
  Synthetic oligonucleotide
ggcagacgtaatcaggaaggttcacggcaa

SEQ ID NO: 182473 - DNA, 30 bp, Artificial Sequence
  Synthetic oligonucleotide
tatgggactctctaacttagttagcggcaa

SEQ ID NO: 182474 - DNA, 30 bp, Artificial Sequence
  Synthetic oligonucleotide
tcatgtacaaaaacgtccgtttggcggcaa

SEQ ID NO: 182475 - DNA, 30 bp, Artificial Sequence
  Synthetic oligonucleotide
atgtgataggttctaggatctggtcggcaa

SEQ ID NO: 182476 - DNA, 30 bp, Artificial Sequence
  Synthetic oligonucleotide
aatcagggaagggatagacaatacgggcaa

SEQ ID NO: 182477 - DNA, 30 bp, Artificial Sequence
  Synthetic oligonucleotide
cactgggaccaccgaggttgattcgggcaa

SEQ ID NO: 182478 - DNA, 30 bp, Artificial Sequence
  Synthetic oligonucleotide
gtgttcgagcgttaatcgcgtcaggggcaa

SEQ ID NO: 182479 - DNA, 30 bp, Artificial Sequence
  Synthetic oligonucleotide
aggttagcagagtggcctattggggggcaa

SEQ ID NO: 182480 - DNA, 30 bp, Artificial Sequence
  Synthetic oligonucleotide
gctagtgggcatttcgtcgaactatggcaa

SEQ ID NO: 182481 - DNA, 30 bp, Artificial Sequence
  Synthetic oligonucleotide
ggcatggcgaccccgagcgaggcgtggcaa

SEQ ID NO: 182482 - DNA, 30 bp, Artificial Sequence
  Synthetic oligonucleotide
tcgggtttcgtacgctgtacagtgtggcaa

SEQ ID NO: 182483 - DNA, 30 bp, Artificial Sequence
  Synthetic oligonucleotide
aacagccgggcagaaacacgattaatgcaa

SEQ ID NO: 182484 - DNA, 30 bp, Artificial Sequence
  Synthetic oligonucleotide
cacagataggataaatatccgcgtatgcaa

SEQ ID NO: 182485 - DNA, 30 bp, Artificial Sequence
  Synthetic oligonucleotide
cagcaccctatgcgtgctaacctactgcaa

SEQ ID NO: 182486 - DNA, 30 bp, Artificial Sequence
  Synthetic oligonucleotide
tcactagaaactgttctagccaatctgcaa

SEQ ID NO: 182487 - DNA, 30 bp, Artificial Sequence
  Synthetic oligonucleotide
atcagtgcagctgggcccggccctctgcaa

SEQ ID NO: 182488 - DNA, 30 bp, Artificial Sequence
  Synthetic oligonucleotide
accgaatcgagacgcaccaacaaggtgcaa

SEQ ID NO: 182489 - DNA, 30 bp, Artificial Sequence
  Synthetic oligonucleotide
agcgcgggcccccaaacgggctaggtgcaa

SEQ ID NO: 182490 - DNA, 30 bp, Artificial Sequence
  Synthetic oligonucleotide
ccgctgtactaaactaacctagttgtgcaa

SEQ ID NO: 182491 - DNA, 30 bp, Artificial Sequence
  Synthetic oligonucleotide
gggcgccgtgagtccattgtctagttgcaa

SEQ ID NO: 182492 - DNA, 30 bp, Artificial Sequence
  Synthetic oligonucleotide
tcttgtgggcctcagtcacagacgttgcaa

SEQ ID NO: 182493 - DNA, 30 bp, Artificial Sequence
  Synthetic oligonucleotide
actaggtattgtgtagagggagaaaatcaa

SEQ ID NO: 182494 - DNA, 30 bp, Artificial Sequence
  Synthetic oligonucleotide
gcgaagctcccattaaggcaataaaatcaa

SEQ ID NO: 182495 - DNA, 30 bp, Artificial Sequence
  Synthetic oligonucleotide
cgcgtgtggggactgacgcctataaatcaa

SEQ ID NO: 182496 - DNA, 30 bp, Artificial Sequence
  Synthetic oligonucleotide
tacctgggtgggaggtcaacatagaatcaa

SEQ ID NO: 182497 - DNA, 30 bp, Artificial Sequence
  Synthetic oligonucleotide
aaatagacatctatgaacacgtggaatcaa

SEQ ID NO: 182498 - DNA, 30 bp, Artificial Sequence
  Synthetic oligonucleotide
gtctcaagggtaaagacgctagctaatcaa

SEQ ID NO: 182499 - DNA, 30 bp, Artificial Sequence
  Synthetic oligonucleotide
gaatttcgaccgtaggcgtccaaacatcaa

SEQ ID NO: 182500 - DNA, 30 bp, Artificial Sequence
  Synthetic oligonucleotide
ccgaatctcacaggtctgtagtagcatcaa

SEQ ID NO: 182501 - DNA, 30 bp, Artificial Sequence
  Synthetic oligonucleotide
agcatatgtgaacgtgtgttcccgcatcaa

SEQ ID NO: 182502 - DNA, 30 bp, Artificial Sequence
  Synthetic oligonucleotide
gttcacagggtcagattttgagggcatcaa

SEQ ID NO: 182503 - DNA, 30 bp, Artificial Sequence
  Synthetic oligonucleotide
gctggatcaagtgcatgctatcacgatcaa

SEQ ID NO: 182504 - DNA, 30 bp, Artificial Sequence
  Synthetic oligonucleotide
cacgcactaatcgccatgccaaccgatcaa

SEQ ID NO: 182505 - DNA, 30 bp, Artificial Sequence
  Synthetic oligonucleotide
agacgtttgcgtggttatgtacccgatcaa

SEQ ID NO: 182506 - DNA, 30 bp, Artificial Sequence
  Synthetic oligonucleotide
tgggattctttgcactcaaaaacggatcaa

SEQ ID NO: 182507 - DNA, 30 bp, Artificial Sequence
  Synthetic oligonucleotide
agtattgatcgatagcagctactggatcaa

SEQ ID NO: 182508 - DNA, 30 bp, Artificial Sequence
  Synthetic oligonucleotide
caatccggctcagtacccagttatgatcaa

SEQ ID NO: 182509 - DNA, 30 bp, Artificial Sequence
  Synthetic oligonucleotide
atagcaacaacccacgcagatgttgatcaa

SEQ ID NO: 182510 - DNA, 30 bp, Artificial Sequence
  Synthetic oligonucleotide
taccatgttgtatgcgtaataaaatatcaa

SEQ ID NO: 182511 - DNA, 30 bp, Artificial Sequence
  Synthetic oligonucleotide
ggcgattaaggtaccgttttgacatatcaa

SEQ ID NO: 182512 - DNA, 30 bp, Artificial Sequence
  Synthetic oligonucleotide
cgttcaatggattattcaagacaaactcaa

SEQ ID NO: 182513 - DNA, 30 bp, Artificial Sequence
  Synthetic oligonucleotide
aggccactttgtcaaccgtacccgactcaa

SEQ ID NO: 182514 - DNA, 30 bp, Artificial Sequence
  Synthetic oligonucleotide
gctgcatataactccaacgagctgactcaa

SEQ ID NO: 182515 - DNA, 30 bp, Artificial Sequence
  Synthetic oligonucleotide
tgccatacgcaatatccaacctgtactcaa

SEQ ID NO: 182516 - DNA, 30 bp, Artificial Sequence
  Synthetic oligonucleotide
agcggattattcgagatagcccttactcaa

SEQ ID NO: 182517 - DNA, 30 bp, Artificial Sequence
  Synthetic oligonucleotide
caagcgtggttattacgtattaaacctcaa

SEQ ID NO: 182518 - DNA, 30 bp, Artificial Sequence
  Synthetic oligonucleotide
gttgaggtctataaatcacgtcgtcctcaa

SEQ ID NO: 182519 - DNA, 30 bp, Artificial Sequence
  Synthetic oligonucleotide
gagcggtgagtatccggttattgtcctcaa

SEQ ID NO: 182520 - DNA, 30 bp, Artificial Sequence
  Synthetic oligonucleotide
cgctctacaacggatggtgtttttcctcaa

SEQ ID NO: 182521 - DNA, 30 bp, Artificial Sequence
  Synthetic oligonucleotide
tgcgaccgcgcgagtttagttatcgctcaa

SEQ ID NO: 182522 - DNA, 30 bp, Artificial Sequence
  Synthetic oligonucleotide
gacctcgttttagaggctggataggctcaa

SEQ ID NO: 182523 - DNA, 30 bp, Artificial Sequence
  Synthetic oligonucleotide
tagtaacataggcgttagtggaatgctcaa

SEQ ID NO: 182524 - DNA, 30 bp, Artificial Sequence
  Synthetic oligonucleotide
cgtcggataaatgctaaaattaaatctcaa

SEQ ID NO: 182525 - DNA, 30 bp, Artificial Sequence
  Synthetic oligonucleotide
caactattaatctgttcaaagtgctctcaa

SEQ ID NO: 182526 - DNA, 30 bp, Artificial Sequence
  Synthetic oligonucleotide
agtgaaacggccaggtggtcaaagtctcaa

SEQ ID NO: 182527 - DNA, 30 bp, Artificial Sequence
  Synthetic oligonucleotide
gaatcacgagcgatacaaaataagtctcaa

SEQ ID NO: 182528 - DNA, 30 bp, Artificial Sequence
  Synthetic oligonucleotide
ccagccgtttcaacaagctaattgtctcaa

SEQ ID NO: 182529 - DNA, 30 bp, Artificial Sequence
  Synthetic oligonucleotide
ccagcgtcagctagagacggggccagtcaa

SEQ ID NO: 182530 - DNA, 30 bp, Artificial Sequence
  Synthetic oligonucleotide
taggagccggtgcggacattcatgagtcaa

SEQ ID NO: 182531 - DNA, 30 bp, Artificial Sequence
  Synthetic oligonucleotide
gcatcttgcgggaatttacatacacgtcaa

SEQ ID NO: 182532 - DNA, 30 bp, Artificial Sequence
  Synthetic oligonucleotide
atagaacaaaaatcattatgtatccgtcaa

SEQ ID NO: 182533 - DNA, 30 bp, Artificial Sequence
  Synthetic oligonucleotide
gcagctactcctggttgtgaatctcgtcaa

SEQ ID NO: 182534 - DNA, 30 bp, Artificial Sequence
  Synthetic oligonucleotide
gtcctggtaatttggtacattataggtcaa

SEQ ID NO: 182535 - DNA, 30 bp, Artificial Sequence
  Synthetic oligonucleotide
cccagtccggaggcgattcacgtaggtcaa

SEQ ID NO: 182536 - DNA, 30 bp, Artificial Sequence
  Synthetic oligonucleotide
cctcaatgtacttgaggtaacttaggtcaa

SEQ ID NO: 182537 - DNA, 30 bp, Artificial Sequence
  Synthetic oligonucleotide
cacgaggaaccgttgtcaaacgcgggtcaa

SEQ ID NO: 182538 - DNA, 30 bp, Artificial Sequence
  Synthetic oligonucleotide
cttgagtacgaataaagtgactttggtcaa

SEQ ID NO: 182539 - DNA, 30 bp, Artificial Sequence
  Synthetic oligonucleotide
taatatcacgatctaaggaaccactgtcaa

SEQ ID NO: 182540 - DNA, 30 bp, Artificial Sequence
  Synthetic oligonucleotide
agcaagaacttaaagttctacccgtgtcaa

SEQ ID NO: 182541 - DNA, 31 bp, Artificial Sequence
  Synthetic oligonucleotide
cgatcatgaaccagggtagtgttaaattcaa

SEQ ID NO: 182542 - DNA, 30 bp, Artificial Sequence
  Synthetic oligonucleotide
ggaattgggaccaaagatggctacattcaa

SEQ ID NO: 182543 - DNA, 30 bp, Artificial Sequence
  Synthetic oligonucleotide
acgcggcaaagttaatcctacgtccttcaa

SEQ ID NO: 182544 - DNA, 30 bp, Artificial Sequence
  Synthetic oligonucleotide
tacaaggtcattctcaggacgaggcttcaa

SEQ ID NO: 182545 - DNA, 30 bp, Artificial Sequence
  Synthetic oligonucleotide
caattctacaccatagacatatatcttcaa

SEQ ID NO: 182546 - DNA, 30 bp, Artificial Sequence
  Synthetic oligonucleotide
cctgggtccaacgcaataggataggttcaa

SEQ ID NO: 182547 - DNA, 30 bp, Artificial Sequence
  Synthetic oligonucleotide
ataggtactaactccagcagaggggttcaa

SEQ ID NO: 182548 - DNA, 30 bp, Artificial Sequence
  Synthetic oligonucleotide
aagaggtcggcaggaatagaatatgttcaa

SEQ ID NO: 182549 - DNA, 30 bp, Artificial Sequence
  Synthetic oligonucleotide
agaccgatgagtttcattcagaaatttcaa

SEQ ID NO: 182550 - DNA, 30 bp, Artificial Sequence
  Synthetic oligonucleotide
atgaagatgaatcctgcgttagcctttcaa

SEQ ID NO: 182551 - DNA, 30 bp, Artificial Sequence
  Synthetic oligonucleotide
cgtctcatcttaaaggcatcatcttttcaa

SEQ ID NO: 182552 - DNA, 30 bp, Artificial Sequence
  Synthetic oligonucleotide
cagtacgaacgacaacctttgtgtaaagaa

SEQ ID NO: 182553 - DNA, 30 bp, Artificial Sequence
  Synthetic oligonucleotide
aaaaggagtatattcaccaaggtacaagaa

SEQ ID NO: 182554 - DNA, 30 bp, Artificial Sequence
  Synthetic oligonucleotide
gtcacctgtcgccaaccccgttgccaagaa

SEQ ID NO: 182555 - DNA, 30 bp, Artificial Sequence
  Synthetic oligonucleotide
aactatgggcgtaatggagataagcaagaa

SEQ ID NO: 182556 - DNA, 30 bp, Artificial Sequence
  Synthetic oligonucleotide
aagagcaggctttgtacaggtcagcaagaa

SEQ ID NO: 182557 - DNA, 30 bp, Artificial Sequence
  Synthetic oligonucleotide
gtctgcgtcccggtaaggtaatcagaagaa

SEQ ID NO: 182558 - DNA, 30 bp, Artificial Sequence
  Synthetic oligonucleotide
tatagaagaagtaacgatgacgtagaagaa

SEQ ID NO: 182559 - DNA, 30 bp, Artificial Sequence
  Synthetic oligonucleotide
ggatggccaagtatcgggacgttagaagaa

SEQ ID NO: 182560 - DNA, 30 bp, Artificial Sequence
  Synthetic oligonucleotide
aaaagtaagcaggaatccacgctcgaagaa

SEQ ID NO: 182561 - DNA, 30 bp, Artificial Sequence
  Synthetic oligonucleotide
ccttccgtatgataatcgccctaggaagaa

SEQ ID NO: 182562 - DNA, 30 bp, Artificial Sequence
  Synthetic oligonucleotide
tttgagccaatcggttactatacggaagaa

SEQ ID NO: 182563 - DNA, 30 bp, Artificial Sequence
  Synthetic oligonucleotide
ggcaccgtcacacggatcccctgggaagaa

SEQ ID NO: 182564 - DNA, 30 bp, Artificial Sequence
  Synthetic oligonucleotide
ggttgattcatgtaaaccaacttggaagaa

SEQ ID NO: 182565 - DNA, 30 bp, Artificial Sequence
  Synthetic oligonucleotide
ctacgttatttgacacttgatctctaagaa

SEQ ID NO: 182566 - DNA, 30 bp, Artificial Sequence
  Synthetic oligonucleotide
gtgcagaaaaggctgaatgtagcgtaagaa

SEQ ID NO: 182567 - DNA, 30 bp, Artificial Sequence
  Synthetic oligonucleotide
ccttacagtgggaagcctgtacattaagaa

SEQ ID NO: 182568 - DNA, 30 bp, Artificial Sequence
  Synthetic oligonucleotide
agcggttacatatggccaaggacaacagaa

SEQ ID NO: 182569 - DNA, 30 bp, Artificial Sequence
  Synthetic oligonucleotide
ttatatcctttcgcaagaggactaacagaa

SEQ ID NO: 182570 - DNA, 30 bp, Artificial Sequence
  Synthetic oligonucleotide
ccaacggagtctgaatgatgagacacagaa

SEQ ID NO: 182571 - DNA, 30 bp, Artificial Sequence
  Synthetic oligonucleotide
ctaaagggctcttcaatagcttacacagaa

SEQ ID NO: 182572 - DNA, 30 bp, Artificial Sequence
  Synthetic oligonucleotide
cgcaatgctaacacaaagtcccggacagaa

SEQ ID NO: 182573 - DNA, 30 bp, Artificial Sequence
  Synthetic oligonucleotide
agttagcgcagtctgaagatcgggacagaa

SEQ ID NO: 182574 - DNA, 30 bp, Artificial Sequence
  Synthetic oligonucleotide
gttatcttaccggggacatcatttacagaa

SEQ ID NO: 182575 - DNA, 30 bp, Artificial Sequence
  Synthetic oligonucleotide
tagctgcaatatactgtttatgccccagaa

SEQ ID NO: 182576 - DNA, 30 bp, Artificial Sequence
  Synthetic oligonucleotide
aatatcggctcgcgtagggtaatcccagaa

SEQ ID NO: 182577 - DNA, 31 bp, Artificial Sequence
  Synthetic oligonucleotide
aaggtgccaattaatcatttagattccagaa

SEQ ID NO: 182578 - DNA, 30 bp, Artificial Sequence
  Synthetic oligonucleotide
ttttacaagtggtcaaggtaatttccagaa

SEQ ID NO: 182579 - DNA, 30 bp, Artificial Sequence
  Synthetic oligonucleotide
ataacaatctatagcgtaagcaggtcagaa

SEQ ID NO: 182580 - DNA, 30 bp, Artificial Sequence
  Synthetic oligonucleotide
cccaagcaggtgccttatacccggtcagaa

SEQ ID NO: 182581 - DNA, 30 bp, Artificial Sequence
  Synthetic oligonucleotide
ccatattgttgttcgctggaggggtcagaa

SEQ ID NO: 182582 - DNA, 30 bp, Artificial Sequence
  Synthetic oligonucleotide
aagagacggcgtataacaaactcttcagaa

SEQ ID NO: 182583 - DNA, 30 bp, Artificial Sequence
  Synthetic oligonucleotide
atagtgggtcggccttaaggcaaaagagaa

SEQ ID NO: 182584 - DNA, 30 bp, Artificial Sequence
  Synthetic oligonucleotide
aagggttactagcggggctcgtaaagagaa

SEQ ID NO: 182585 - DNA, 30 bp, Artificial Sequence
  Synthetic oligonucleotide
gcagcgacaaacttgccttaggtcagagaa

SEQ ID NO: 182586 - DNA, 30 bp, Artificial Sequence
  Synthetic oligonucleotide
ggttatacaacatcggggcggctgagagaa

SEQ ID NO: 182587 - DNA, 30 bp, Artificial Sequence
  Synthetic oligonucleotide
aatagagacggtagctacacgacccgagaa

SEQ ID NO: 182588 - DNA, 30 bp, Artificial Sequence
  Synthetic oligonucleotide
aaacacgagagtgcgatagtaactcgagaa

SEQ ID NO: 182589 - DNA, 30 bp, Artificial Sequence
  Synthetic oligonucleotide
gcgggtgtcggggcgggtttatgtcgagaa

SEQ ID NO: 182590 - DNA, 30 bp, Artificial Sequence
  Synthetic oligonucleotide
tcactgttgagactgcccacttgaggagaa

SEQ ID NO: 182591 - DNA, 30 bp, Artificial Sequence
  Synthetic oligonucleotide
ggtgattgagctcgcgcagccaagggagaa

SEQ ID NO: 182592 - DNA, 30 bp, Artificial Sequence
  Synthetic oligonucleotide
cccctaggagtgcatgggcacaggggagaa

SEQ ID NO: 182593 - DNA, 30 bp, Artificial Sequence
  Synthetic oligonucleotide
gcggttggcggttcgaatcccgatggagaa

SEQ ID NO: 182594 - DNA, 30 bp, Artificial Sequence
  Synthetic oligonucleotide
ctcagtgtgtcgacgatatagtgctgagaa

SEQ ID NO: 182595 - DNA, 30 bp, Artificial Sequence
  Synthetic oligonucleotide
aaacttacacctcggtggcagttctgagaa

SEQ ID NO: 182596 - DNA, 30 bp, Artificial Sequence
  Synthetic oligonucleotide
taaggatcgaaggacgctcggtaaatagaa

SEQ ID NO: 182597 - DNA, 30 bp, Artificial Sequence
  Synthetic oligonucleotide
aacagatcgagggcaattatcaacatagaa

SEQ ID NO: 182598 - DNA, 30 bp, Artificial Sequence
  Synthetic oligonucleotide
taaagattagacagaagactgaacatagaa

SEQ ID NO: 182599 - DNA, 30 bp, Artificial Sequence
  Synthetic oligonucleotide
ctgccgtaccctgtcagtgtacacatagaa

SEQ ID NO: 182600 - DNA, 30 bp, Artificial Sequence
  Synthetic oligonucleotide
ccagagtgaggacctacattggatatagaa

SEQ ID NO: 182601 - DNA, 30 bp, Artificial Sequence
  Synthetic oligonucleotide
agcgggagtatagaacttcccgaactagaa

SEQ ID NO: 182602 - DNA, 30 bp, Artificial Sequence
  Synthetic oligonucleotide
aattagagtaggaaccctgtagtactagaa

SEQ ID NO: 182603 - DNA, 30 bp, Artificial Sequence
  Synthetic oligonucleotide
gttggtatcatccaagtaggcaccctagaa

SEQ ID NO: 182604 - DNA, 30 bp, Artificial Sequence
  Synthetic oligonucleotide
aatgggggcaccggtgcgggccggctagaa

SEQ ID NO: 182605 - DNA, 30 bp, Artificial Sequence
  Synthetic oligonucleotide
gagtgggctgaccggtgatgagatctagaa

SEQ ID NO: 182606 - DNA, 30 bp, Artificial Sequence
  Synthetic oligonucleotide
gttagtcaccatacggtagggagtctagaa

SEQ ID NO: 182607 - DNA, 30 bp, Artificial Sequence
  Synthetic oligonucleotide
ttagatagctccgatattctataagtagaa

SEQ ID NO: 182608 - DNA, 30 bp, Artificial Sequence
  Synthetic oligonucleotide
gatcgtatagcgtagcacgagttagtagaa

SEQ ID NO: 182609 - DNA, 30 bp, Artificial Sequence
  Synthetic oligonucleotide
gcatcatacactcctggagaagccgtagaa

SEQ ID NO: 182610 - DNA, 27 bp, Artificial Sequence
  Synthetic oligonucleotide
gaggcttttaacagagagggcgtagaa

SEQ ID NO: 182611 - DNA, 30 bp, Artificial Sequence
  Synthetic oligonucleotide
ggtatcaactacctctcacgaatcgtagaa

SEQ ID NO: 182612 - DNA, 30 bp, Artificial Sequence
  Synthetic oligonucleotide
ccacgttggtggtaaggacggtaattagaa

SEQ ID NO: 182613 - DNA, 30 bp, Artificial Sequence
  Synthetic oligonucleotide
cacagcgaccattagacgttcacattagaa

SEQ ID NO: 182614 - DNA, 30 bp, Artificial Sequence
  Synthetic oligonucleotide
ctctgcgtctgtgggactctactaaacgaa

SEQ ID NO: 182615 - DNA, 30 bp, Artificial Sequence
  Synthetic oligonucleotide
tgcaagacgcaagtacggagtcagaacgaa

SEQ ID NO: 182616 - DNA, 30 bp, Artificial Sequence
  Synthetic oligonucleotide
tgaaacccgttcgcggaaagaaataacgaa

SEQ ID NO: 182617 - DNA, 30 bp, Artificial Sequence
  Synthetic oligonucleotide
tctgtgaccagcctcacgggtaataacgaa

SEQ ID NO: 182618 - DNA, 30 bp, Artificial Sequence
  Synthetic oligonucleotide
ggaaaccgtcgaatggtataaactaacgaa

SEQ ID NO: 182619 - DNA, 30 bp, Artificial Sequence
  Synthetic oligonucleotide
tttagacttcgaaagtggagcaaacacgaa

SEQ ID NO: 182620 - DNA, 30 bp, Artificial Sequence
  Synthetic oligonucleotide
actactcctaaatccttcgaggaacacgaa

SEQ ID NO: 182621 - DNA, 30 bp, Artificial Sequence
  Synthetic oligonucleotide
cggtatagcattcggccatcattacacgaa

SEQ ID NO: 182622 - DNA, 30 bp, Artificial Sequence
  Synthetic oligonucleotide
cttatatgcccacgacgacgtgaccacgaa

SEQ ID NO: 182623 - DNA, 30 bp, Artificial Sequence
  Synthetic oligonucleotide
tggcagctacttcaataggtttggcacgaa

SEQ ID NO: 182624 - DNA, 30 bp, Artificial Sequence
  Synthetic oligonucleotide
gcgggcggtgaatcggtgtcgacagacgaa

SEQ ID NO: 182625 - DNA, 30 bp, Artificial Sequence
  Synthetic oligonucleotide
aatcgtccatagaccttgtcctcggacgaa

SEQ ID NO: 182626 - DNA, 30 bp, Artificial Sequence
  Synthetic oligonucleotide
ttattagggagtaccgtttaggctgacgaa

SEQ ID NO: 182627 - DNA, 30 bp, Artificial Sequence
  Synthetic oligonucleotide
gtcggatttcgatggctatgaattgacgaa

SEQ ID NO: 182628 - DNA, 30 bp, Artificial Sequence
  Synthetic oligonucleotide
agctgatacggaataaatttgacatacgaa

SEQ ID NO: 182629 - DNA, 30 bp, Artificial Sequence
  Synthetic oligonucleotide
gcgctatgcggcctctaagtacgatacgaa

SEQ ID NO: 182630 - DNA, 30 bp, Artificial Sequence
  Synthetic oligonucleotide
agtaaacatacagtatccaagctatacgaa

SEQ ID NO: 182631 - DNA, 30 bp, Artificial Sequence
  Synthetic oligonucleotide
agacacggataaaagtctcccttatacgaa

SEQ ID NO: 182632 - DNA, 30 bp, Artificial Sequence
  Synthetic oligonucleotide
gaatgcctaacgtcaaagcttgactacgaa

SEQ ID NO: 182633 - DNA, 30 bp, Artificial Sequence
  Synthetic oligonucleotide
ggtacagtatggatgtacggttcgtacgaa

SEQ ID NO: 182634 - DNA, 30 bp, Artificial Sequence
  Synthetic oligonucleotide
gtagtgacattgtgtcgctttatgtacgaa

SEQ ID NO: 182635 - DNA, 30 bp, Artificial Sequence
  Synthetic oligonucleotide
ggttttcacagaaggtagagaacaaccgaa

SEQ ID NO: 182636 - DNA, 30 bp, Artificial Sequence
  Synthetic oligonucleotide
tacaattgaaagaagaagttggcaaccgaa

SEQ ID NO: 182637 - DNA, 30 bp, Artificial Sequence
  Synthetic oligonucleotide
agcgtagttatttaacgcaacgtaaccgaa

SEQ ID NO: 182638 - DNA, 30 bp, Artificial Sequence
  Synthetic oligonucleotide
tacaaaatgggagcgtaggcaatcaccgaa

SEQ ID NO: 182639 - DNA, 30 bp, Artificial Sequence
  Synthetic oligonucleotide
atcttcgatttcaaccttgaacaacccgaa

SEQ ID NO: 182640 - DNA, 30 bp, Artificial Sequence
  Synthetic oligonucleotide
tctagaaaggggatctgtaaatatcccgaa

SEQ ID NO: 182641 - DNA, 30 bp, Artificial Sequence
  Synthetic oligonucleotide
caaagcggccatttgtcgggtcctcccgaa

SEQ ID NO: 182642 - DNA, 30 bp, Artificial Sequence
  Synthetic oligonucleotide
ttccccggtcatcggtgcgaacgtcccgaa

SEQ ID NO: 182643 - DNA, 30 bp, Artificial Sequence
  Synthetic oligonucleotide
taaagctggtacgggtttaccgaagccgaa

SEQ ID NO: 182644 - DNA, 30 bp, Artificial Sequence
  Synthetic oligonucleotide
agctaaaccagctagaagcgattagccgaa

SEQ ID NO: 182645 - DNA, 30 bp, Artificial Sequence
  Synthetic oligonucleotide
gcagaggactaagttgtaaggcaggccgaa

SEQ ID NO: 182646 - DNA, 30 bp, Artificial Sequence
  Synthetic oligonucleotide
cgtgcctatagcatactagccagggccgaa

SEQ ID NO: 182647 - DNA, 31 bp, Artificial Sequence
  Synthetic oligonucleotide
tatagtagtaaaggcagataggttggccgaa

SEQ ID NO: 182648 - DNA, 30 bp, Artificial Sequence
  Synthetic oligonucleotide
gtaagttagtcctgtgcacgaactgccgaa

SEQ ID NO: 182649 - DNA, 30 bp, Artificial Sequence
  Synthetic oligonucleotide
caaaactacaatgaggcggatcagtccgaa

SEQ ID NO: 182650 - DNA, 30 bp, Artificial Sequence
  Synthetic oligonucleotide
agccggttgggagtggtgtgggggtccgaa

SEQ ID NO: 182651 - DNA, 30 bp, Artificial Sequence
  Synthetic oligonucleotide
gcatttatggtttgtacttatggttccgaa

SEQ ID NO: 182652 - DNA, 30 bp, Artificial Sequence
  Synthetic oligonucleotide
ttactagtatggatcgacgtcgtttccgaa

SEQ ID NO: 182653 - DNA, 30 bp, Artificial Sequence
  Synthetic oligonucleotide
agctaaaagtgattgtggagtaacagcgaa

SEQ ID NO: 182654 - DNA, 30 bp, Artificial Sequence
  Synthetic oligonucleotide
ggattaagcactccatgtgtgtttagcgaa

SEQ ID NO: 182655 - DNA, 30 bp, Artificial Sequence
  Synthetic oligonucleotide
aggacacgaggggtcgggaggaaccgcgaa

SEQ ID NO: 182656 - DNA, 30 bp, Artificial Sequence
  Synthetic oligonucleotide
cgttagtagctgagggtgttcacccgcgaa

SEQ ID NO: 182657 - DNA, 30 bp, Artificial Sequence
  Synthetic oligonucleotide
gtgtagtagccgagccactttagccgcgaa

SEQ ID NO: 182658 - DNA, 30 bp, Artificial Sequence
  Synthetic oligonucleotide
tttgccgactagacacttcgatagcgcgaa

SEQ ID NO: 182659 - DNA, 30 bp, Artificial Sequence
  Synthetic oligonucleotide
atagatagcctgtcaggtcgctggcgcgaa

SEQ ID NO: 182660 - DNA, 30 bp, Artificial Sequence
  Synthetic oligonucleotide
acggtctcgagtgtgtcaggcctaggcgaa

SEQ ID NO: 182661 - DNA, 30 bp, Artificial Sequence
  Synthetic oligonucleotide
cggtgaaatggagactcgccgtagggcgaa

SEQ ID NO: 182662 - DNA, 30 bp, Artificial Sequence
  Synthetic oligonucleotide
atgagttatgagatgtagaattggggcgaa

SEQ ID NO: 182663 - DNA, 30 bp, Artificial Sequence
  Synthetic oligonucleotide
tgtgcaatcgtcactcgcatactgggcgaa

SEQ ID NO: 182664 - DNA, 30 bp, Artificial Sequence
  Synthetic oligonucleotide
ttagatcatgtgtgaaagcgttaatgcgaa

SEQ ID NO: 182665 - DNA, 30 bp, Artificial Sequence
  Synthetic oligonucleotide
ctcaaagtgggactattggcggtctgcgaa

SEQ ID NO: 182666 - DNA, 30 bp, Artificial Sequence
  Synthetic oligonucleotide
tgcgcgcatacatgttaggctgtctgcgaa

SEQ ID NO: 182667 - DNA, 30 bp, Artificial Sequence
  Synthetic oligonucleotide
gaatccacccacgatctggttgtgtgcgaa

SEQ ID NO: 182668 - DNA, 30 bp, Artificial Sequence
  Synthetic oligonucleotide
aacgtgactggtgtagaatacacaatcgaa

SEQ ID NO: 182669 - DNA, 30 bp, Artificial Sequence
  Synthetic oligonucleotide
atataaggaccagccgtgctgtgcatcgaa

SEQ ID NO: 182670 - DNA, 30 bp, Artificial Sequence
  Synthetic oligonucleotide
tcgaagacaggaattgctccgatcatcgaa

SEQ ID NO: 182671 - DNA, 30 bp, Artificial Sequence
  Synthetic oligonucleotide
tctagcgcaaaaatggtaagaccgatcgaa

SEQ ID NO: 182672 - DNA, 30 bp, Artificial Sequence
  Synthetic oligonucleotide
aatggtggtgggttcatgttgttgatcgaa

SEQ ID NO: 182673 - DNA, 30 bp, Artificial Sequence
  Synthetic oligonucleotide
tcggatcccgtggaatgtaatcttatcgaa

SEQ ID NO: 182674 - DNA, 30 bp, Artificial Sequence
  Synthetic oligonucleotide
tatgccatggggatatagagaggactcgaa

SEQ ID NO: 182675 - DNA, 30 bp, Artificial Sequence
  Synthetic oligonucleotide
cctagaaaatcaggcagattgctcctcgaa

SEQ ID NO: 182676 - DNA, 30 bp, Artificial Sequence
  Synthetic oligonucleotide
aaccgacctaaaatatccactgcgctcgaa

SEQ ID NO: 182677 - DNA, 30 bp, Artificial Sequence
  Synthetic oligonucleotide
taggtcagaaactaaatttctcggctcgaa

SEQ ID NO: 182678 - DNA, 30 bp, Artificial Sequence
  Synthetic oligonucleotide
tgcgcttctggagaccctgtgaccgtcgaa

SEQ ID NO: 182679 - DNA, 30 bp, Artificial Sequence
  Synthetic oligonucleotide
gggccttcgggagaccctcagccggtcgaa

SEQ ID NO: 182680 - DNA, 30 bp, Artificial Sequence
  Synthetic oligonucleotide
ttgatctaagagggcaggctggtggtcgaa

SEQ ID NO: 182681 - DNA, 30 bp, Artificial Sequence
  Synthetic oligonucleotide
atgctgcaacctcgggccccggttgtcgaa

SEQ ID NO: 182682 - DNA, 30 bp, Artificial Sequence
  Synthetic oligonucleotide
agcgttgtcagcgctgctgaggaattcgaa

SEQ ID NO: 182683 - DNA, 30 bp, Artificial Sequence
  Synthetic oligonucleotide
tggcagaccagatgaacggtgcccttcgaa

SEQ ID NO: 182684 - DNA, 30 bp, Artificial Sequence
  Synthetic oligonucleotide
ctcggacttatagagcaatatatgttcgaa

SEQ ID NO: 182685 - DNA, 30 bp, Artificial Sequence
  Synthetic oligonucleotide
aggaaaaccgatcttcagtgccacaaggaa

SEQ ID NO: 182686 - DNA, 30 bp, Artificial Sequence
  Synthetic oligonucleotide
ccatggcacactacgaagattctcaaggaa

SEQ ID NO: 182687 - DNA, 30 bp, Artificial Sequence
  Synthetic oligonucleotide
ttggactagccaaacaacggagtcaaggaa

SEQ ID NO: 182688 - DNA, 30 bp, Artificial Sequence
  Synthetic oligonucleotide
taaaggtcgacgcacaggtgtaaacaggaa

SEQ ID NO: 182689 - DNA, 30 bp, Artificial Sequence
  Synthetic oligonucleotide
atacacctcgagactcaaacgtcacaggaa

SEQ ID NO: 182690 - DNA, 30 bp, Artificial Sequence
  Synthetic oligonucleotide
ttgtcggctcactttcgcaattcacaggaa

SEQ ID NO: 182691 - DNA, 30 bp, Artificial Sequence
  Synthetic oligonucleotide
gaaacttatgatggacacgttcgacaggaa

SEQ ID NO: 182692 - DNA, 30 bp, Artificial Sequence
  Synthetic oligonucleotide
cgaaaggtagcatgtagcccaccccaggaa

SEQ ID NO: 182693 - DNA, 30 bp, Artificial Sequence
  Synthetic oligonucleotide
gcctatcgttctgagtcttgaaccgaggaa

SEQ ID NO: 182694 - DNA, 30 bp, Artificial Sequence
  Synthetic oligonucleotide
tcgatgcggttccgacctaaggtggaggaa

SEQ ID NO: 182695 - DNA, 29 bp, Artificial Sequence
  Synthetic oligonucleotide
atagaaatgtgatctgttactatgaggaa

SEQ ID NO: 182696 - DNA, 30 bp, Artificial Sequence
  Synthetic oligonucleotide
tgtgcgagcgtacccgccggtactgaggaa

SEQ ID NO: 182697 - DNA, 30 bp, Artificial Sequence
  Synthetic oligonucleotide
gatatgcccggggtgcaattagcataggaa

SEQ ID NO: 182698 - DNA, 30 bp, Artificial Sequence
  Synthetic oligonucleotide
aagtcccgttcctggaggaccggataggaa

SEQ ID NO: 182699 - DNA, 30 bp, Artificial Sequence
  Synthetic oligonucleotide
actctggacggaaccaaggcttgttaggaa

SEQ ID NO: 182700 - DNA, 30 bp, Artificial Sequence
  Synthetic oligonucleotide
tgcgctcaacattttatcgaaaaaacggaa

SEQ ID NO: 182701 - DNA, 30 bp, Artificial Sequence
  Synthetic oligonucleotide
gttagattatcgtgataattcacaacggaa

SEQ ID NO: 182702 - DNA, 30 bp, Artificial Sequence
  Synthetic oligonucleotide
gctggaacaatgcgatgtccaataacggaa

SEQ ID NO: 182703 - DNA, 30 bp, Artificial Sequence
  Synthetic oligonucleotide
gaatgcgaacttataatccgaaggacggaa

SEQ ID NO: 182704 - DNA, 30 bp, Artificial Sequence
  Synthetic oligonucleotide
tgagggtcggggcttggactgcggacggaa

SEQ ID NO: 182705 - DNA, 30 bp, Artificial Sequence
  Synthetic oligonucleotide
tttgattaaaagtgggaagcgaaaccggaa

SEQ ID NO: 182706 - DNA, 30 bp, Artificial Sequence
  Synthetic oligonucleotide
atcagctacgtaaataacgctctaccggaa

SEQ ID NO: 182707 - DNA, 30 bp, Artificial Sequence
  Synthetic oligonucleotide
ctgtaccgaaccctcaccatagagccggaa

SEQ ID NO: 182708 - DNA, 30 bp, Artificial Sequence
  Synthetic oligonucleotide
ttagtacgagcaggtgtacgcaacgcggaa

SEQ ID NO: 182709 - DNA, 30 bp, Artificial Sequence
  Synthetic oligonucleotide
cttaggccacaaattctggcgtcggcggaa

SEQ ID NO: 182710 - DNA, 30 bp, Artificial Sequence
  Synthetic oligonucleotide
gtaactagactggcttgcctgagtgcggaa

SEQ ID NO: 182711 - DNA, 30 bp, Artificial Sequence
  Synthetic oligonucleotide
tgtaacgatataaaggtacgtgaatcggaa

SEQ ID NO: 182712 - DNA, 30 bp, Artificial Sequence
  Synthetic oligonucleotide
gtagtcaaacgcaatgtctattagtcggaa

SEQ ID NO: 182713 - DNA, 30 bp, Artificial Sequence
  Synthetic oligonucleotide
acggcaatgcagccagcacggcggtcggaa

SEQ ID NO: 182714 - DNA, 30 bp, Artificial Sequence
  Synthetic oligonucleotide
cactgggtttgctccaacagtgggtcggaa

SEQ ID NO: 182715 - DNA, 30 bp, Artificial Sequence
  Synthetic oligonucleotide
cggtttaggtgagcgtagggcaaaagggaa

SEQ ID NO: 182716 - DNA, 30 bp, Artificial Sequence
  Synthetic oligonucleotide
gggaaaatgtactctgacgagaaaagggaa

SEQ ID NO: 182717 - DNA, 30 bp, Artificial Sequence
  Synthetic oligonucleotide
cacactgtactcggacaaggcataagggaa

SEQ ID NO: 182718 - DNA, 30 bp, Artificial Sequence
  Synthetic oligonucleotide
aggcacccacatgacgtactagccagggaa

SEQ ID NO: 182719 - DNA, 30 bp, Artificial Sequence
  Synthetic oligonucleotide
ccataggccccagtagaaaccaagagggaa

SEQ ID NO: 182720 - DNA, 30 bp, Artificial Sequence
  Synthetic oligonucleotide
ttgtgatgacaggcggggtagatgagggaa

SEQ ID NO: 182721 - DNA, 30 bp, Artificial Sequence
  Synthetic oligonucleotide
atgtgaactgtactataattagttagggaa

SEQ ID NO: 182722 - DNA, 30 bp, Artificial Sequence
  Synthetic oligonucleotide
agaaggaatagctatatcaacgttagggaa

SEQ ID NO: 182723 - DNA, 30 bp, Artificial Sequence
  Synthetic oligonucleotide
tggtgagaatcacccacttagacacgggaa

SEQ ID NO: 182724 - DNA, 30 bp, Artificial Sequence
  Synthetic oligonucleotide
gatgtgcaaggactggtaatcagccgggaa

SEQ ID NO: 182725 - DNA, 30 bp, Artificial Sequence
  Synthetic oligonucleotide
tgcacagggtttgcggatgaggagcgggaa

SEQ ID NO: 182726 - DNA, 30 bp, Artificial Sequence
  Synthetic oligonucleotide
tgaaatctcgctggcgatttacaaggggaa

SEQ ID NO: 182727 - DNA, 30 bp, Artificial Sequence
  Synthetic oligonucleotide
cgtatttcgactgccggttaaataggggaa

SEQ ID NO: 182728 - DNA, 30 bp, Artificial Sequence
  Synthetic oligonucleotide
agggcgacacatcccccgtatctaggggaa

SEQ ID NO: 182729 - DNA, 30 bp, Artificial Sequence
  Synthetic oligonucleotide
tttaaccggatccaaaggctaaccggggaa

SEQ ID NO: 182730 - DNA, 30 bp, Artificial Sequence
  Synthetic oligonucleotide
ggatagatgatgaccatccaggagggggaa

SEQ ID NO: 182731 - DNA, 30 bp, Artificial Sequence
  Synthetic oligonucleotide
tcaaattattttcacgcgagctagggggaa

SEQ ID NO: 182732 - DNA, 30 bp, Artificial Sequence
  Synthetic oligonucleotide
tgttatgggctatacgcgaaaacgggggaa

SEQ ID NO: 182733 - DNA, 30 bp, Artificial Sequence
  Synthetic oligonucleotide
aaccccgctaaattttggactgtgggggaa

SEQ ID NO: 182734 - DNA, 30 bp, Artificial Sequence
  Synthetic oligonucleotide
agtcccaaactatgacgtgtattgggggaa

SEQ ID NO: 182735 - DNA, 30 bp, Artificial Sequence
  Synthetic oligonucleotide
acgtagaataatacaggtagtcttggggaa

SEQ ID NO: 182736 - DNA, 30 bp, Artificial Sequence
  Synthetic oligonucleotide
tgaaggacacatgctagcatcaagtgggaa

SEQ ID NO: 182737 - DNA, 30 bp, Artificial Sequence
  Synthetic oligonucleotide
actgtgattaattttgcctggtagtgggaa

SEQ ID NO: 182738 - DNA, 30 bp, Artificial Sequence
  Synthetic oligonucleotide
gagaaccttcaacatgctgctttgtgggaa

SEQ ID NO: 182739 - DNA, 30 bp, Artificial Sequence
  Synthetic oligonucleotide
tagagagcgcgcaaattcgcaaagatggaa

SEQ ID NO: 182740 - DNA, 30 bp, Artificial Sequence
  Synthetic oligonucleotide
gacgtaaggtgaagggtaccgtatatggaa

SEQ ID NO: 182741 - DNA, 30 bp, Artificial Sequence
  Synthetic oligonucleotide
cctcacgtgcgcgtcctgagtcgactggaa

SEQ ID NO: 182742 - DNA, 31 bp, Artificial Sequence
  Synthetic oligonucleotide
ataataaccgctacatatctaaatactggaa

SEQ ID NO: 182743 - DNA, 30 bp, Artificial Sequence
  Synthetic oligonucleotide
taaccaagctttatctagagtgtactggaa

SEQ ID NO: 182744 - DNA, 30 bp, Artificial Sequence
  Synthetic oligonucleotide
catccttgtcgttacctccagcccctggaa

SEQ ID NO: 182745 - DNA, 30 bp, Artificial Sequence
  Synthetic oligonucleotide
ttaaaaacggttatagcggcttccctggaa

SEQ ID NO: 182746 - DNA, 30 bp, Artificial Sequence
  Synthetic oligonucleotide
tcgttcgagaggtagttggtctgcctggaa

SEQ ID NO: 182747 - DNA, 30 bp, Artificial Sequence
  Synthetic oligonucleotide
aaggcacttacggtgtacgtaaagctggaa

SEQ ID NO: 182748 - DNA, 30 bp, Artificial Sequence
  Synthetic oligonucleotide
ctgatagtgataggcggtacacaagtggaa

SEQ ID NO: 182749 - DNA, 30 bp, Artificial Sequence
  Synthetic oligonucleotide
atatgaccttaaagaaacgcattcgtggaa

SEQ ID NO: 182750 - DNA, 30 bp, Artificial Sequence
  Synthetic oligonucleotide
gaaaggcccaggcgggcaacgacggtggaa

SEQ ID NO: 182751 - DNA, 30 bp, Artificial Sequence
  Synthetic oligonucleotide
agtcccgcagggcaaacaacgcgggtggaa

SEQ ID NO: 182752 - DNA, 30 bp, Artificial Sequence
  Synthetic oligonucleotide
tgattccagcttagggagtatgtggtggaa

SEQ ID NO: 182753 - DNA, 30 bp, Artificial Sequence
  Synthetic oligonucleotide
gtggtcatggataacggggagagtgtggaa

SEQ ID NO: 182754 - DNA, 30 bp, Artificial Sequence
  Synthetic oligonucleotide
ttcaggagaactccttggccaggattggaa

SEQ ID NO: 182755 - DNA, 30 bp, Artificial Sequence
  Synthetic oligonucleotide
tgccttcgtataagttagcataccttggaa

SEQ ID NO: 182756 - DNA, 30 bp, Artificial Sequence
  Synthetic oligonucleotide
gagtaagatagttggtaagcgggcttggaa

SEQ ID NO: 182757 - DNA, 30 bp, Artificial Sequence
  Synthetic oligonucleotide
ttgaatgtgcatggtgcgggttagttggaa

SEQ ID NO: 182758 - DNA, 30 bp, Artificial Sequence
  Synthetic oligonucleotide
ctggcacttttttaggtacttcctttggaa

SEQ ID NO: 182759 - DNA, 30 bp, Artificial Sequence
  Synthetic oligonucleotide
ccacacatcaagtcactcattcaaaatgaa

SEQ ID NO: 182760 - DNA, 30 bp, Artificial Sequence
  Synthetic oligonucleotide
ggtagtataagcgaggagcttgaaaatgaa

SEQ ID NO: 182761 - DNA, 30 bp, Artificial Sequence
  Synthetic oligonucleotide
ctctgggttagaatcagccacacaaatgaa

SEQ ID NO: 182762 - DNA, 30 bp, Artificial Sequence
  Synthetic oligonucleotide
atgatgatatgaactatgtgagacaatgaa

SEQ ID NO: 182763 - DNA, 30 bp, Artificial Sequence
  Synthetic oligonucleotide
cttacactggtgcctgcaaagggcaatgaa

SEQ ID NO: 182764 - DNA, 30 bp, Artificial Sequence
  Synthetic oligonucleotide
gcgttaggccgcaccattgactagaatgaa

SEQ ID NO: 182765 - DNA, 30 bp, Artificial Sequence
  Synthetic oligonucleotide
acctctcaatctccggtgtgcggtaatgaa

SEQ ID NO: 182766 - DNA, 30 bp, Artificial Sequence
  Synthetic oligonucleotide
cgtatgcatgtcaagcaacgcacacatgaa

SEQ ID NO: 182767 - DNA, 30 bp, Artificial Sequence
  Synthetic oligonucleotide
acaacgttttcaggagaatcatcacatgaa

SEQ ID NO: 182768 - DNA, 30 bp, Artificial Sequence
  Synthetic oligonucleotide
taaacggaatttatttacgatagacatgaa

SEQ ID NO: 182769 - DNA, 30 bp, Artificial Sequence
  Synthetic oligonucleotide
agccgcttccacgctgggttaggccatgaa

SEQ ID NO: 182770 - DNA, 30 bp, Artificial Sequence
  Synthetic oligonucleotide
acattcacgacctgtgaagtttggcatgaa

SEQ ID NO: 182771 - DNA, 30 bp, Artificial Sequence
  Synthetic oligonucleotide
gaacagtgtattagtcaatagtatcatgaa

SEQ ID NO: 182772 - DNA, 30 bp, Artificial Sequence
  Synthetic oligonucleotide
gcgcgcaaagtggtaacattaattcatgaa

SEQ ID NO: 182773 - DNA, 30 bp, Artificial Sequence
  Synthetic oligonucleotide
cgcggtgtgagttatcgagggatcgatgaa

SEQ ID NO: 182774 - DNA, 30 bp, Artificial Sequence
  Synthetic oligonucleotide
tactgaaacctgtaaacaagtttcgatgaa

SEQ ID NO: 182775 - DNA, 30 bp, Artificial Sequence
  Synthetic oligonucleotide
gagtacattaatgaagtacaacgtgatgaa

SEQ ID NO: 182776 - DNA, 30 bp, Artificial Sequence
  Synthetic oligonucleotide
gttaaagcatacattaacgacaagcctgaa

SEQ ID NO: 182777 - DNA, 30 bp, Artificial Sequence
  Synthetic oligonucleotide
cgttatggacggaacggtagcttgcctgaa

SEQ ID NO: 182778 - DNA, 30 bp, Artificial Sequence
  Synthetic oligonucleotide
ggcccgttgaggggatagggttctcctgaa

SEQ ID NO: 182779 - DNA, 30 bp, Artificial Sequence
  Synthetic oligonucleotide
gaccaagtgttcgcactccaaaaggctgaa

SEQ ID NO: 182780 - DNA, 30 bp, Artificial Sequence
  Synthetic oligonucleotide
tttaaaaccgcgttgcagaggtcggctgaa

SEQ ID NO: 182781 - DNA, 30 bp, Artificial Sequence
  Synthetic oligonucleotide
gaataatagtactcaacgagactggctgaa

SEQ ID NO: 182782 - DNA, 30 bp, Artificial Sequence
  Synthetic oligonucleotide
tgtgtaggctggagcgctacccgtgctgaa

SEQ ID NO: 182783 - DNA, 30 bp, Artificial Sequence
  Synthetic oligonucleotide
tacaggcaacttgagcggggccaatctgaa

SEQ ID NO: 182784 - DNA, 30 bp, Artificial Sequence
  Synthetic oligonucleotide
caaagtatcaccaagaaattacattctgaa

SEQ ID NO: 182785 - DNA, 30 bp, Artificial Sequence
  Synthetic oligonucleotide
tccaggtaaggcggcgtagaagcttctgaa

SEQ ID NO: 182786 - DNA, 31 bp, Artificial Sequence
  Synthetic oligonucleotide
ggggtcccgagtgagtaaaggtttttctgaa

SEQ ID NO: 182787 - DNA, 30 bp, Artificial Sequence
  Synthetic oligonucleotide
cagactaaaaccataggaaggcagagtgaa

SEQ ID NO: 182788 - DNA, 30 bp, Artificial Sequence
  Synthetic oligonucleotide
atgtttcattacatcatgaatttgagtgaa

SEQ ID NO: 182789 - DNA, 30 bp, Artificial Sequence
  Synthetic oligonucleotide
cgctctatcagcggttcccgtgctagtgaa

SEQ ID NO: 182790 - DNA, 30 bp, Artificial Sequence
  Synthetic oligonucleotide
attagcggtcgtcatgcaatatcccgtgaa

SEQ ID NO: 182791 - DNA, 30 bp, Artificial Sequence
  Synthetic oligonucleotide
gtaacaccttaacttatctatgagcgtgaa

SEQ ID NO: 182792 - DNA, 30 bp, Artificial Sequence
  Synthetic oligonucleotide
gtaagcacctcccttaacttttatcgtgaa

SEQ ID NO: 182793 - DNA, 30 bp, Artificial Sequence
  Synthetic oligonucleotide
ccatgggaccacattaggcgctctcgtgaa

SEQ ID NO: 182794 - DNA, 30 bp, Artificial Sequence
  Synthetic oligonucleotide
gccggcagatcgcacgtaagcgtaggtgaa

SEQ ID NO: 182795 - DNA, 31 bp, Artificial Sequence
  Synthetic oligonucleotide
cttaccgaacgccatagaccacaagggtgaa

SEQ ID NO: 182796 - DNA, 30 bp, Artificial Sequence
  Synthetic oligonucleotide
agatactaaattagcgatcaatatggtgaa

SEQ ID NO: 182797 - DNA, 30 bp, Artificial Sequence
  Synthetic oligonucleotide
acagcgcgaggactcatatgatttggtgaa

SEQ ID NO: 182798 - DNA, 30 bp, Artificial Sequence
  Synthetic oligonucleotide
aagccgtccaaattaagtccatcctgtgaa

SEQ ID NO: 182799 - DNA, 30 bp, Artificial Sequence
  Synthetic oligonucleotide
tcgccctgtatttgggggaagcggtgtgaa

SEQ ID NO: 182800 - DNA, 30 bp, Artificial Sequence
  Synthetic oligonucleotide
taggtcgtgaggttactaacatattgtgaa

SEQ ID NO: 182801 - DNA, 30 bp, Artificial Sequence
  Synthetic oligonucleotide
gtgaaggcgcatatagtatgcagttgtgaa

SEQ ID NO: 182802 - DNA, 30 bp, Artificial Sequence
  Synthetic oligonucleotide
tatgcgcccaattccctagctgcaattgaa

SEQ ID NO: 182803 - DNA, 30 bp, Artificial Sequence
  Synthetic oligonucleotide
tctgaaattgaaccgatagaatacattgaa

SEQ ID NO: 182804 - DNA, 30 bp, Artificial Sequence
  Synthetic oligonucleotide
caatagctggagcgaggtactaccattgaa

SEQ ID NO: 182805 - DNA, 30 bp, Artificial Sequence
  Synthetic oligonucleotide
atgaaactcgaaatgcgacagatcattgaa

SEQ ID NO: 182806 - DNA, 30 bp, Artificial Sequence
  Synthetic oligonucleotide
tcaacattcaggtaaggtgcggagattgaa

SEQ ID NO: 182807 - DNA, 30 bp, Artificial Sequence
  Synthetic oligonucleotide
gttgctggatatgtttagttaatgattgaa

SEQ ID NO: 182808 - DNA, 30 bp, Artificial Sequence
  Synthetic oligonucleotide
tgtaagcgtattagaaatattattattgaa

SEQ ID NO: 182809 - DNA, 30 bp, Artificial Sequence
  Synthetic oligonucleotide
cactggtcttcaaaactggagtttattgaa

SEQ ID NO: 182810 - DNA, 30 bp, Artificial Sequence
  Synthetic oligonucleotide
cgaaaagtggtgctgattcgggcccttgaa

SEQ ID NO: 182811 - DNA, 30 bp, Artificial Sequence
  Synthetic oligonucleotide
aaaagcgtcgatggcggcggaagtcttgaa

SEQ ID NO: 182812 - DNA, 30 bp, Artificial Sequence
  Synthetic oligonucleotide
gggtacggtggattcgtggttactgttgaa

SEQ ID NO: 182813 - DNA, 30 bp, Artificial Sequence
  Synthetic oligonucleotide
cgaaggatcgccacgttgaggagtgttgaa

SEQ ID NO: 182814 - DNA, 30 bp, Artificial Sequence
  Synthetic oligonucleotide
attgcggataatatgtgttacaggtttgaa

SEQ ID NO: 182815 - DNA, 30 bp, Artificial Sequence
  Synthetic oligonucleotide
gtgcggggccagatgggtacagattttgaa

SEQ ID NO: 182816 - DNA, 30 bp, Artificial Sequence
  Synthetic oligonucleotide
accagatctgacaaggggtagtgttttgaa

SEQ ID NO: 182817 - DNA, 30 bp, Artificial Sequence
  Synthetic oligonucleotide
gtctaatcagtacctcagatggcaaaataa

SEQ ID NO: 182818 - DNA, 30 bp, Artificial Sequence
  Synthetic oligonucleotide
caacataaaggaaatgacagaagaaaataa

SEQ ID NO: 182819 - DNA, 30 bp, Artificial Sequence
  Synthetic oligonucleotide
ttagtgtacttccagatcgctaacaaataa

SEQ ID NO: 182820 - DNA, 30 bp, Artificial Sequence
  Synthetic oligonucleotide
ccgtaagagtgcatattcaaacagaaataa

SEQ ID NO: 182821 - DNA, 30 bp, Artificial Sequence
  Synthetic oligonucleotide
agacagatttgcgccacttcgacgaaataa

SEQ ID NO: 182822 - DNA, 30 bp, Artificial Sequence
  Synthetic oligonucleotide
gttggatcgcatttttaatgtgcgaaataa

SEQ ID NO: 182823 - DNA, 30 bp, Artificial Sequence
  Synthetic oligonucleotide
agagagaaagcttccgctacctataaataa

SEQ ID NO: 182824 - DNA, 30 bp, Artificial Sequence
  Synthetic oligonucleotide
gtaaactcgtcgtccgtcttgcagcaataa

SEQ ID NO: 182825 - DNA, 30 bp, Artificial Sequence
  Synthetic oligonucleotide
aacaagcgacactgtgaaattccagaataa

SEQ ID NO: 182826 - DNA, 29 bp, Artificial Sequence
  Synthetic oligonucleotide
cagcgtacagttagtggtatatcgaataa

SEQ ID NO: 182827 - DNA, 30 bp, Artificial Sequence
  Synthetic oligonucleotide
aaaatggccattggaggggatctcgaataa

SEQ ID NO: 182828 - DNA, 30 bp, Artificial Sequence
  Synthetic oligonucleotide
cgacagaaatcaccattactgtaggaataa

SEQ ID NO: 182829 - DNA, 30 bp, Artificial Sequence
  Synthetic oligonucleotide
cagtagggataggatgcataaacggaataa

SEQ ID NO: 182830 - DNA, 30 bp, Artificial Sequence
  Synthetic oligonucleotide
ctgctgcattggactcctacaggggaataa

SEQ ID NO: 182831 - DNA, 30 bp, Artificial Sequence
  Synthetic oligonucleotide
agctgcttatagctagtcacttgggaataa

SEQ ID NO: 182832 - DNA, 30 bp, Artificial Sequence
  Synthetic oligonucleotide
aagtgagatctacttaatgacattgaataa

SEQ ID NO: 182833 - DNA, 30 bp, Artificial Sequence
  Synthetic oligonucleotide
tcgtgtaaatagttggtttatatataataa

SEQ ID NO: 182834 - DNA, 30 bp, Artificial Sequence
  Synthetic oligonucleotide
gggtctatgcggggagaacatgtcacataa

SEQ ID NO: 182835 - DNA, 30 bp, Artificial Sequence
  Synthetic oligonucleotide
acatcgcttaatcgagtctcgaagacataa

SEQ ID NO: 182836 - DNA, 30 bp, Artificial Sequence
  Synthetic oligonucleotide
gtgcctgccttaagcgcagggcatacataa

SEQ ID NO: 182837 - DNA, 30 bp, Artificial Sequence
  Synthetic oligonucleotide
cctataggatccatgtagaatcccccataa

SEQ ID NO: 182838 - DNA, 30 bp, Artificial Sequence
  Synthetic oligonucleotide
aacgactataagttgcgcgtttccccataa

SEQ ID NO: 182839 - DNA, 30 bp, Artificial Sequence
  Synthetic oligonucleotide
attcgttcgcaaaaagccgaaaagccataa

SEQ ID NO: 182840 - DNA, 30 bp, Artificial Sequence
  Synthetic oligonucleotide
ttgtttcgactgtaactaatacagccataa

SEQ ID NO: 182841 - DNA, 30 bp, Artificial Sequence
  Synthetic oligonucleotide
cctagccaatctccacaggtcggtccataa

SEQ ID NO: 182842 - DNA, 30 bp, Artificial Sequence
  Synthetic oligonucleotide
taaagggtaaatcgtccccaggaagcataa

SEQ ID NO: 182843 - DNA, 30 bp, Artificial Sequence
  Synthetic oligonucleotide
aaaggaagatgaggtaaaaacggcgcataa

SEQ ID NO: 182844 - DNA, 30 bp, Artificial Sequence
  Synthetic oligonucleotide
aaggacactagtgagtcgcacgtcgcataa

SEQ ID NO: 182845 - DNA, 30 bp, Artificial Sequence
  Synthetic oligonucleotide
ggcatggcacaacggatgactaatgcataa

SEQ ID NO: 182846 - DNA, 30 bp, Artificial Sequence
  Synthetic oligonucleotide
gggcattccccagtaaaggaactatcataa

SEQ ID NO: 182847 - DNA, 30 bp, Artificial Sequence
  Synthetic oligonucleotide
tcgtctttcagcgctacgccacactcataa

SEQ ID NO: 182848 - DNA, 30 bp, Artificial Sequence
  Synthetic oligonucleotide
acataacacgggagcttgtaggcgtcataa

SEQ ID NO: 182849 - DNA, 30 bp, Artificial Sequence
  Synthetic oligonucleotide
aacaaggacatgcaggctgaggcaagataa

SEQ ID NO: 182850 - DNA, 30 bp, Artificial Sequence
  Synthetic oligonucleotide
acggctttgccgctaggggagctcagataa

SEQ ID NO: 182851 - DNA, 30 bp, Artificial Sequence
  Synthetic oligonucleotide
tccagaagttgttctaataaatagagataa

SEQ ID NO: 182852 - DNA, 30 bp, Artificial Sequence
  Synthetic oligonucleotide
acacaatgtgtcgtgatgggcccgagataa

SEQ ID NO: 182853 - DNA, 30 bp, Artificial Sequence
  Synthetic oligonucleotide
gagagatgacctgggtgaggtctgagataa

SEQ ID NO: 182854 - DNA, 30 bp, Artificial Sequence
  Synthetic oligonucleotide
ttatgtcatccgaatactccctatagataa

SEQ ID NO: 182855 - DNA, 30 bp, Artificial Sequence
  Synthetic oligonucleotide
ttcggagatagggctaagactgaccgataa

SEQ ID NO: 182856 - DNA, 30 bp, Artificial Sequence
  Synthetic oligonucleotide
gggtaattaaaaaccaaatagatccgataa

SEQ ID NO: 182857 - DNA, 30 bp, Artificial Sequence
  Synthetic oligonucleotide
ctgggccaaaatgtaggcccattccgataa

SEQ ID NO: 182858 - DNA, 30 bp, Artificial Sequence
  Synthetic oligonucleotide
gcgagcaagtcctcgaacgaagcgcgataa

SEQ ID NO: 182859 - DNA, 30 bp, Artificial Sequence
  Synthetic oligonucleotide
actggatatcatgggtggggtaggcgataa

SEQ ID NO: 182860 - DNA, 30 bp, Artificial Sequence
  Synthetic oligonucleotide
taacttaccttttgcaggtgcgggcgataa

SEQ ID NO: 182861 - DNA, 30 bp, Artificial Sequence
  Synthetic oligonucleotide
gggacgcgggagtcgtcaagggccggataa

SEQ ID NO: 182862 - DNA, 30 bp, Artificial Sequence
  Synthetic oligonucleotide
cagagtctgaagtattcgagcgagggataa

SEQ ID NO: 182863 - DNA, 30 bp, Artificial Sequence
  Synthetic oligonucleotide
atcgatataactgagtcgtcaagtggataa

SEQ ID NO: 182864 - DNA, 30 bp, Artificial Sequence
  Synthetic oligonucleotide
ggtaacccagtaggtaaatgggtatgataa

SEQ ID NO: 182865 - DNA, 30 bp, Artificial Sequence
  Synthetic oligonucleotide
cagtgggtgaatggccagagatagtgataa

SEQ ID NO: 182866 - DNA, 30 bp, Artificial Sequence
  Synthetic oligonucleotide
tagggcggctcgaaagcttacttgtgataa

SEQ ID NO: 182867 - DNA, 30 bp, Artificial Sequence
  Synthetic oligonucleotide
tagtgcgcgagtcaccatgtttattgataa

SEQ ID NO: 182868 - DNA, 30 bp, Artificial Sequence
  Synthetic oligonucleotide
ttttgggcatgcggggcttatgcttgataa

SEQ ID NO: 182869 - DNA, 30 bp, Artificial Sequence
  Synthetic oligonucleotide
tctgacccccagagacacttcgtaatataa

SEQ ID NO: 182870 - DNA, 30 bp, Artificial Sequence
  Synthetic oligonucleotide
ggaaaaccattcataactttatccatataa

SEQ ID NO: 182871 - DNA, 30 bp, Artificial Sequence
  Synthetic oligonucleotide
gtatatacgatataagatgtctcgatataa

SEQ ID NO: 182872 - DNA, 30 bp, Artificial Sequence
  Synthetic oligonucleotide
cggtctgaggggggcctaattgcactataa

SEQ ID NO: 182873 - DNA, 30 bp, Artificial Sequence
  Synthetic oligonucleotide
gcctcacgacccgcacttgagatactataa

SEQ ID NO: 182874 - DNA, 30 bp, Artificial Sequence
  Synthetic oligonucleotide
gagatgctcgaaggatcttacgtactataa

SEQ ID NO: 182875 - DNA, 30 bp, Artificial Sequence
  Synthetic oligonucleotide
cgacaagttatgagttcaacggtgctataa

SEQ ID NO: 182876 - DNA, 30 bp, Artificial Sequence
  Synthetic oligonucleotide
tagtcagttgagaatatgcggttgctataa

SEQ ID NO: 182877 - DNA, 30 bp, Artificial Sequence
  Synthetic oligonucleotide
tcgagatgggctgtagagaaaaatctataa

SEQ ID NO: 182878 - DNA, 30 bp, Artificial Sequence
  Synthetic oligonucleotide
ctgcgagaaagatgcaggcgagctctataa

SEQ ID NO: 182879 - DNA, 30 bp, Artificial Sequence
  Synthetic oligonucleotide
acagaaggcattagataatgcacagtataa

SEQ ID NO: 182880 - DNA, 30 bp, Artificial Sequence
  Synthetic oligonucleotide
ttcgcgataatgtccttacacaaggtataa

SEQ ID NO: 182881 - DNA, 30 bp, Artificial Sequence
  Synthetic oligonucleotide
acggacaatcgtgacgtacgcaaggtataa

SEQ ID NO: 182882 - DNA, 30 bp, Artificial Sequence
  Synthetic oligonucleotide
taaacgatggtgtaatccatcagggtataa

SEQ ID NO: 182883 - DNA, 30 bp, Artificial Sequence
  Synthetic oligonucleotide
tccactaaaggtgtggtgatcctggtataa

SEQ ID NO: 182884 - DNA, 30 bp, Artificial Sequence
  Synthetic oligonucleotide
ctgagtaaccaaaggggggacagattataa

SEQ ID NO: 182885 - DNA, 30 bp, Artificial Sequence
  Synthetic oligonucleotide
ggaaaacgtggagtctgttaaagcttataa

SEQ ID NO: 182886 - DNA, 30 bp, Artificial Sequence
  Synthetic oligonucleotide
atgtggcgcgctgtacaggcaggtttataa

SEQ ID NO: 182887 - DNA, 30 bp, Artificial Sequence
  Synthetic oligonucleotide
gtacaaatttagtcggctaagaacaactaa

SEQ ID NO: 182888 - DNA, 30 bp, Artificial Sequence
  Synthetic oligonucleotide
tgtgtatcaaagtccgagactcccaactaa

SEQ ID NO: 182889 - DNA, 30 bp, Artificial Sequence
  Synthetic oligonucleotide
tgagagaaaccgcagtgattgagcaactaa

SEQ ID NO: 182890 - DNA, 30 bp, Artificial Sequence
  Synthetic oligonucleotide
tatccgacactcggccaagaatggaactaa

SEQ ID NO: 182891 - DNA, 30 bp, Artificial Sequence
  Synthetic oligonucleotide
tcggtagtgaaataatgactgtttaactaa

SEQ ID NO: 182892 - DNA, 30 bp, Artificial Sequence
  Synthetic oligonucleotide
atagtaaagaagagtgggcggcgacactaa

SEQ ID NO: 182893 - DNA, 30 bp, Artificial Sequence
  Synthetic oligonucleotide
tccgcatgcaagggggatagtcgccactaa

SEQ ID NO: 182894 - DNA, 30 bp, Artificial Sequence
  Synthetic oligonucleotide
cacataaagcaacgtggagccctccactaa

SEQ ID NO: 182895 - DNA, 30 bp, Artificial Sequence
  Synthetic oligonucleotide
ggctggaatgtgtttaggtctgagcactaa

SEQ ID NO: 182896 - DNA, 30 bp, Artificial Sequence
  Synthetic oligonucleotide
cgtaacgtggggtgattcactacgcactaa

SEQ ID NO: 182897 - DNA, 30 bp, Artificial Sequence
  Synthetic oligonucleotide
acctggagacaatataatctagtgcactaa

SEQ ID NO: 182898 - DNA, 30 bp, Artificial Sequence
  Synthetic oligonucleotide
gtgctgggtgctagattgttggaagactaa

SEQ ID NO: 182899 - DNA, 30 bp, Artificial Sequence
  Synthetic oligonucleotide
cacgggttcacgaccgccgacctagactaa

SEQ ID NO: 182900 - DNA, 30 bp, Artificial Sequence
  Synthetic oligonucleotide
tgagaaagccgaacgcaacgcggcgactaa

SEQ ID NO: 182901 - DNA, 30 bp, Artificial Sequence
  Synthetic oligonucleotide
gggggtcagtgtctagggaacaatgactaa

SEQ ID NO: 182902 - DNA, 30 bp, Artificial Sequence
  Synthetic oligonucleotide
atgtggtcggccgtgagtcctccctactaa

SEQ ID NO: 182903 - DNA, 30 bp, Artificial Sequence
  Synthetic oligonucleotide
gagcgccagccagtgacatatatttactaa

SEQ ID NO: 182904 - DNA, 30 bp, Artificial Sequence
  Synthetic oligonucleotide
aaatgggctcataggggttaaggtacctaa

SEQ ID NO: 182905 - DNA, 30 bp, Artificial Sequence
  Synthetic oligonucleotide
gttccaggggtcataatgcgggtggcctaa

SEQ ID NO: 182906 - DNA, 30 bp, Artificial Sequence
  Synthetic oligonucleotide
agcccggaagctggtcaggatgtggcctaa

SEQ ID NO: 182907 - DNA, 30 bp, Artificial Sequence
  Synthetic oligonucleotide
caacgtgattcacaagtaggcgatgcctaa

SEQ ID NO: 182908 - DNA, 31 bp, Artificial Sequence
  Synthetic oligonucleotide
ctacaccgcgggactccaccaccttgcctaa

SEQ ID NO: 182909 - DNA, 30 bp, Artificial Sequence
  Synthetic oligonucleotide
gctcctggttcgatttagagctcctcctaa

SEQ ID NO: 182910 - DNA, 30 bp, Artificial Sequence
  Synthetic oligonucleotide
catcgcagacagcctgtaacagcttcctaa

SEQ ID NO: 182911 - DNA, 30 bp, Artificial Sequence
  Synthetic oligonucleotide
ctaggtaagcaacatcttcccttttcctaa

SEQ ID NO: 182912 - DNA, 30 bp, Artificial Sequence
  Synthetic oligonucleotide
aaaaaagatgtataagacagcgacagctaa

SEQ ID NO: 182913 - DNA, 30 bp, Artificial Sequence
  Synthetic oligonucleotide
taagcacgattacagtgcttcgacagctaa

SEQ ID NO: 182914 - DNA, 30 bp, Artificial Sequence
  Synthetic oligonucleotide
atattggatacacaagatggttagagctaa

SEQ ID NO: 182915 - DNA, 30 bp, Artificial Sequence
  Synthetic oligonucleotide
ggttagcagccaagaggtcaaccgagctaa

SEQ ID NO: 182916 - DNA, 30 bp, Artificial Sequence
  Synthetic oligonucleotide
ctactttccagtacgatacgttttagctaa

SEQ ID NO: 182917 - DNA, 30 bp, Artificial Sequence
  Synthetic oligonucleotide
tgaaagggaaggtattgaatatcccgctaa

SEQ ID NO: 182918 - DNA, 30 bp, Artificial Sequence
  Synthetic oligonucleotide
gtgagcgttcattaaccgggcaggcgctaa

SEQ ID NO: 182919 - DNA, 30 bp, Artificial Sequence
  Synthetic oligonucleotide
tttcagagcagcggttccagcgaaggctaa

SEQ ID NO: 182920 - DNA, 30 bp, Artificial Sequence
  Synthetic oligonucleotide
aggagaacactcacgacgattgcaggctaa

SEQ ID NO: 182921 - DNA, 30 bp, Artificial Sequence
  Synthetic oligonucleotide
atctcctatatagagtaaccgtgaggctaa

SEQ ID NO: 182922 - DNA, 29 bp, Artificial Sequence
  Synthetic oligonucleotide
cggtaaatcaaaggatcactactggctaa

SEQ ID NO: 182923 - DNA, 30 bp, Artificial Sequence
  Synthetic oligonucleotide
gtcgtaacgaagcgcggagctggtggctaa

SEQ ID NO: 182924 - DNA, 30 bp, Artificial Sequence
  Synthetic oligonucleotide
attcagctacggaaaccaaaactatgctaa

SEQ ID NO: 182925 - DNA, 30 bp, Artificial Sequence
  Synthetic oligonucleotide
tcaaaaacacaactagcggcagcgtgctaa

SEQ ID NO: 182926 - DNA, 30 bp, Artificial Sequence
  Synthetic oligonucleotide
gaccttcaggaattgagtactaggtgctaa

SEQ ID NO: 182927 - DNA, 30 bp, Artificial Sequence
  Synthetic oligonucleotide
agtggctttagatacttgctaccaatctaa

SEQ ID NO: 182928 - DNA, 30 bp, Artificial Sequence
  Synthetic oligonucleotide
gtatatgggcgcgtctctggtgccatctaa

SEQ ID NO: 182929 - DNA, 30 bp, Artificial Sequence
  Synthetic oligonucleotide
atcgtcagattatgagcgtacgttatctaa

SEQ ID NO: 182930 - DNA, 30 bp, Artificial Sequence
  Synthetic oligonucleotide
gaattaggagggtgcgggtaatcactctaa

SEQ ID NO: 182931 - DNA, 30 bp, Artificial Sequence
  Synthetic oligonucleotide
gaatcagcggtgtacactcgcacgctctaa

SEQ ID NO: 182932 - DNA, 30 bp, Artificial Sequence
  Synthetic oligonucleotide
gagggggccagtcagcttcacagtctctaa

SEQ ID NO: 182933 - DNA, 30 bp, Artificial Sequence
  Synthetic oligonucleotide
agtgagaccatagctccttgagctgtctaa

SEQ ID NO: 182934 - DNA, 30 bp, Artificial Sequence
  Synthetic oligonucleotide
aggggtctactggggagatattcattctaa

SEQ ID NO: 182935 - DNA, 30 bp, Artificial Sequence
  Synthetic oligonucleotide
tgtgcgtgcttaggtgggtcagtattctaa

SEQ ID NO: 182936 - DNA, 30 bp, Artificial Sequence
  Synthetic oligonucleotide
ttagtccagtggcgtactgtgttattctaa

SEQ ID NO: 182937 - DNA, 30 bp, Artificial Sequence
  Synthetic oligonucleotide
caagtacgtagacctgagccatcaaagtaa

SEQ ID NO: 182938 - DNA, 30 bp, Artificial Sequence
  Synthetic oligonucleotide
atattgccaaagtagtcaatcagaaagtaa

SEQ ID NO: 182939 - DNA, 30 bp, Artificial Sequence
  Synthetic oligonucleotide
aagttgtaaacggtcaaacaaaccaagtaa

SEQ ID NO: 182940 - DNA, 30 bp, Artificial Sequence
  Synthetic oligonucleotide
ctgtttacggtgaaacattatccgaagtaa

SEQ ID NO: 182941 - DNA, 30 bp, Artificial Sequence
  Synthetic oligonucleotide
acgaaccagctgggaccagcttggaagtaa

SEQ ID NO: 182942 - DNA, 30 bp, Artificial Sequence
  Synthetic oligonucleotide
aagtacctgcgcgagtaaccaaataagtaa

SEQ ID NO: 182943 - DNA, 30 bp, Artificial Sequence
  Synthetic oligonucleotide
taaatcccgtacgtcggtacgtctaagtaa

SEQ ID NO: 182944 - DNA, 30 bp, Artificial Sequence
  Synthetic oligonucleotide
acggtattgacgtttggcttaggtaagtaa

SEQ ID NO: 182945 - DNA, 30 bp, Artificial Sequence
  Synthetic oligonucleotide
ggatgcataacagggggggtcacacagtaa

SEQ ID NO: 182946 - DNA, 30 bp, Artificial Sequence
  Synthetic oligonucleotide
actaaagttgcatcggactagctacagtaa

SEQ ID NO: 182947 - DNA, 30 bp, Artificial Sequence
  Synthetic oligonucleotide
taaagagagtacctctgtagaacccagtaa

SEQ ID NO: 182948 - DNA, 30 bp, Artificial Sequence
  Synthetic oligonucleotide
attaaacttgtctagatccattcccagtaa

SEQ ID NO: 182949 - DNA, 30 bp, Artificial Sequence
  Synthetic oligonucleotide
aaagctgccgggtcgtctcggcgccagtaa

SEQ ID NO: 182950 - DNA, 30 bp, Artificial Sequence
  Synthetic oligonucleotide
tgcctcggaaggtagcactatcagcagtaa

SEQ ID NO: 182951 - DNA, 30 bp, Artificial Sequence
  Synthetic oligonucleotide
gcgcagtgtttatagtataattaagagtaa

SEQ ID NO: 182952 - DNA, 30 bp, Artificial Sequence
  Synthetic oligonucleotide
caggtgggtcagcaaatcccaccagagtaa

SEQ ID NO: 182953 - DNA, 30 bp, Artificial Sequence
  Synthetic oligonucleotide
aggaagtcggaaatcatttctagagagtaa

SEQ ID NO: 182954 - DNA, 30 bp, Artificial Sequence
  Synthetic oligonucleotide
gtatacaacgcgatccttaataatgagtaa

SEQ ID NO: 182955 - DNA, 30 bp, Artificial Sequence
  Synthetic oligonucleotide
ggtagacgtgatggattcttgcaatagtaa

SEQ ID NO: 182956 - DNA, 30 bp, Artificial Sequence
  Synthetic oligonucleotide
agaattcgcactgtggacgttcgatagtaa

SEQ ID NO: 182957 - DNA, 30 bp, Artificial Sequence
  Synthetic oligonucleotide
agggaagtatatgtacgataaggatagtaa

SEQ ID NO: 182958 - DNA, 30 bp, Artificial Sequence
  Synthetic oligonucleotide
cgatggctatgcatgtttgtgcactagtaa

SEQ ID NO: 182959 - DNA, 30 bp, Artificial Sequence
  Synthetic oligonucleotide
tcgtcaattaaaaagttagtggattagtaa

SEQ ID NO: 182960 - DNA, 30 bp, Artificial Sequence
  Synthetic oligonucleotide
gacgggggcactggttatcgcaagccgtaa

SEQ ID NO: 182961 - DNA, 30 bp, Artificial Sequence
  Synthetic oligonucleotide
accgatatgcgttaactcaaaagtccgtaa

SEQ ID NO: 182962 - DNA, 30 bp, Artificial Sequence
  Synthetic oligonucleotide
ttgcctattgcaaaatattgagttccgtaa

SEQ ID NO: 182963 - DNA, 30 bp, Artificial Sequence
  Synthetic oligonucleotide
gccggtgttgttgaataactatcagcgtaa

SEQ ID NO: 182964 - DNA, 30 bp, Artificial Sequence
  Synthetic oligonucleotide
cctcgcacggcacgactaggcggagcgtaa

SEQ ID NO: 182965 - DNA, 30 bp, Artificial Sequence
  Synthetic oligonucleotide
aacgtaagggtaaatatttgtctcgcgtaa

SEQ ID NO: 182966 - DNA, 30 bp, Artificial Sequence
  Synthetic oligonucleotide
gcccagccaaaaaggccggacggggcgtaa

SEQ ID NO: 182967 - DNA, 30 bp, Artificial Sequence
  Synthetic oligonucleotide
gaggagtttaacaaaacataaggatcgtaa

SEQ ID NO: 182968 - DNA, 30 bp, Artificial Sequence
  Synthetic oligonucleotide
tgggaacttaggaaatttttaatatcgtaa

SEQ ID NO: 182969 - DNA, 30 bp, Artificial Sequence
  Synthetic oligonucleotide
gtatcaagtataagtaagaggtagtcgtaa

SEQ ID NO: 182970 - DNA, 30 bp, Artificial Sequence
  Synthetic oligonucleotide
tgtcctaaatgacacgatgaatattcgtaa

SEQ ID NO: 182971 - DNA, 30 bp, Artificial Sequence
  Synthetic oligonucleotide
atcactgcctgttatatctgtccttcgtaa

SEQ ID NO: 182972 - DNA, 30 bp, Artificial Sequence
  Synthetic oligonucleotide
aaacgattgacatcagaacgacaaaggtaa

SEQ ID NO: 182973 - DNA, 30 bp, Artificial Sequence
  Synthetic oligonucleotide
accgacaagaatttacacctacaaaggtaa

SEQ ID NO: 182974 - DNA, 30 bp, Artificial Sequence
  Synthetic oligonucleotide
cccacggggcctgtaaccttggacaggtaa

SEQ ID NO: 182975 - DNA, 30 bp, Artificial Sequence
  Synthetic oligonucleotide
aggtcggattacgtcagaattagcaggtaa

SEQ ID NO: 182976 - DNA, 30 bp, Artificial Sequence
  Synthetic oligonucleotide
gcatcacgattataggactccgtgaggtaa

SEQ ID NO: 182977 - DNA, 30 bp, Artificial Sequence
  Synthetic oligonucleotide
cctcaaatttggacaatcgtacataggtaa

SEQ ID NO: 182978 - DNA, 30 bp, Artificial Sequence
  Synthetic oligonucleotide
tacaatacgcgtatgtgaaggactaggtaa

SEQ ID NO: 182979 - DNA, 30 bp, Artificial Sequence
  Synthetic oligonucleotide
gtccaggtagtgtcccgcgaacgtaggtaa

SEQ ID NO: 182980 - DNA, 30 bp, Artificial Sequence
  Synthetic oligonucleotide
cccccattgatgcgagcagaaggtaggtaa

SEQ ID NO: 182981 - DNA, 30 bp, Artificial Sequence
  Synthetic oligonucleotide
acgacgcggtacttgcgcttagaccggtaa

SEQ ID NO: 182982 - DNA, 30 bp, Artificial Sequence
  Synthetic oligonucleotide
agtcccatagggatacaaatcacgcggtaa

SEQ ID NO: 182983 - DNA, 30 bp, Artificial Sequence
  Synthetic oligonucleotide
gcaagtggggacctagaattgaatcggtaa

SEQ ID NO: 182984 - DNA, 30 bp, Artificial Sequence
  Synthetic oligonucleotide
cagacttgctgtcgactgtctcctcggtaa

SEQ ID NO: 182985 - DNA, 30 bp, Artificial Sequence
  Synthetic oligonucleotide
ctatgtgcaagtggcagtcctgttcggtaa

SEQ ID NO: 182986 - DNA, 30 bp, Artificial Sequence
  Synthetic oligonucleotide
ggctagttgatatccccgcagaaagggtaa

SEQ ID NO: 182987 - DNA, 30 bp, Artificial Sequence
  Synthetic oligonucleotide
gttagtttgagaaggatattgaacgggtaa

SEQ ID NO: 182988 - DNA, 31 bp, Artificial Sequence
  Synthetic oligonucleotide
agccctcgcgatcaaaagtcatatcgggtaa

SEQ ID NO: 182989 - DNA, 30 bp, Artificial Sequence
  Synthetic oligonucleotide
ggtccaccaagcgtaaagattttcgggtaa

SEQ ID NO: 182990 - DNA, 30 bp, Artificial Sequence
  Synthetic oligonucleotide
aaggcaatgcactggaaagattgggggtaa

SEQ ID NO: 182991 - DNA, 30 bp, Artificial Sequence
  Synthetic oligonucleotide
ctccgacatgaagcgaattcacatgggtaa

SEQ ID NO: 182992 - DNA, 30 bp, Artificial Sequence
  Synthetic oligonucleotide
tatatccgtcacttatgaagcggtgggtaa

SEQ ID NO: 182993 - DNA, 30 bp, Artificial Sequence
  Synthetic oligonucleotide
aagaaacgaatttgaacactttaatggtaa

SEQ ID NO: 182994 - DNA, 30 bp, Artificial Sequence
  Synthetic oligonucleotide
gtcaggcactcgaagatggactcatggtaa

SEQ ID NO: 182995 - DNA, 30 bp, Artificial Sequence
  Synthetic oligonucleotide
ctgctaggctaatgggatctctggtggtaa

SEQ ID NO: 182996 - DNA, 30 bp, Artificial Sequence
  Synthetic oligonucleotide
gtcaagattcgtgagttaataagttggtaa

SEQ ID NO: 182997 - DNA, 30 bp, Artificial Sequence
  Synthetic oligonucleotide
catcgcgtactctcgctaatggaaatgtaa

SEQ ID NO: 182998 - DNA, 30 bp, Artificial Sequence
  Synthetic oligonucleotide
ttaagaggagctaatctactggcaatgtaa

SEQ ID NO: 182999 - DNA, 30 bp, Artificial Sequence
  Synthetic oligonucleotide
ggtttccacgagattgaaacttgaatgtaa

SEQ ID NO: 183000 - DNA, 30 bp, Artificial Sequence
  Synthetic oligonucleotide
cgcgcccctatagtggtcggtgtaatgtaa

SEQ ID NO: 183001 - DNA, 30 bp, Artificial Sequence
  Synthetic oligonucleotide
taggtctccatcagagtccttaccatgtaa

SEQ ID NO: 183002 - DNA, 30 bp, Artificial Sequence
  Synthetic oligonucleotide
tagcgggaatatctcaaaactgagatgtaa

SEQ ID NO: 183003 - DNA, 30 bp, Artificial Sequence
  Synthetic oligonucleotide
tgcatacccagacagcaacaaaggatgtaa

SEQ ID NO: 183004 - DNA, 30 bp, Artificial Sequence
  Synthetic oligonucleotide
tacaccatactaggatcaaagtatatgtaa

SEQ ID NO: 183005 - DNA, 30 bp, Artificial Sequence
  Synthetic oligonucleotide
gtctctagtaatctgagtgaagaactgtaa

SEQ ID NO: 183006 - DNA, 30 bp, Artificial Sequence
  Synthetic oligonucleotide
acggatatgcggtcgtacaactaactgtaa

SEQ ID NO: 183007 - DNA, 30 bp, Artificial Sequence
  Synthetic oligonucleotide
cctgagctacttaatgagcagggactgtaa

SEQ ID NO: 183008 - DNA, 30 bp, Artificial Sequence
  Synthetic oligonucleotide
cgacggctcaatagccgcacggccctgtaa

SEQ ID NO: 183009 - DNA, 31 bp, Artificial Sequence
  Synthetic oligonucleotide
ccgatagttatgcacataataaactctgtaa

SEQ ID NO: 183010 - DNA, 30 bp, Artificial Sequence
  Synthetic oligonucleotide
caaacagtgacttccgttggtgttctgtaa

SEQ ID NO: 183011 - DNA, 30 bp, Artificial Sequence
  Synthetic oligonucleotide
cggagcctttaaggcaactgggaagtgtaa

SEQ ID NO: 183012 - DNA, 30 bp, Artificial Sequence
  Synthetic oligonucleotide
aactgggcataagagacactgaacgtgtaa

SEQ ID NO: 183013 - DNA, 30 bp, Artificial Sequence
  Synthetic oligonucleotide
ccgtgccatcgcccttccttagccgtgtaa

SEQ ID NO: 183014 - DNA, 30 bp, Artificial Sequence
  Synthetic oligonucleotide
ggagtggggtgacttcaggcacgggtgtaa

SEQ ID NO: 183015 - DNA, 30 bp, Artificial Sequence
  Synthetic oligonucleotide
caaacgggtagcgaaccttgaggggtgtaa

SEQ ID NO: 183016 - DNA, 30 bp, Artificial Sequence
  Synthetic oligonucleotide
tcagacggactttcaaggtaggatgtgtaa

SEQ ID NO: 183017 - DNA, 30 bp, Artificial Sequence
  Synthetic oligonucleotide
ctttatagacaccgcaggagggatgtgtaa

SEQ ID NO: 183018 - DNA, 30 bp, Artificial Sequence
  Synthetic oligonucleotide
cacatatgtcgatttgaaaggaacttgtaa

SEQ ID NO: 183019 - DNA, 30 bp, Artificial Sequence
  Synthetic oligonucleotide
ttacgtgtaagatacctgtagaagttgtaa

SEQ ID NO: 183020 - DNA, 30 bp, Artificial Sequence
  Synthetic oligonucleotide
gttccgaccttagagacctcgcaaaattaa

SEQ ID NO: 183021 - DNA, 30 bp, Artificial Sequence
  Synthetic oligonucleotide
gagcgctcagttgcgaaattgctaaattaa

SEQ ID NO: 183022 - DNA, 30 bp, Artificial Sequence
  Synthetic oligonucleotide
aacacaatgcgcaagaacaagaccaattaa

SEQ ID NO: 183023 - DNA, 30 bp, Artificial Sequence
  Synthetic oligonucleotide
ggcggacgggtacccacttactggaattaa

SEQ ID NO: 183024 - DNA, 30 bp, Artificial Sequence
  Synthetic oligonucleotide
tagagcagtggagtcaccttgattaattaa

SEQ ID NO: 183025 - DNA, 30 bp, Artificial Sequence
  Synthetic oligonucleotide
aagcccatatcgaaatccgctaaacattaa

SEQ ID NO: 183026 - DNA, 30 bp, Artificial Sequence
  Synthetic oligonucleotide
gagcttacaacggaattttgaatgcattaa

SEQ ID NO: 183027 - DNA, 30 bp, Artificial Sequence
  Synthetic oligonucleotide
ggataatttatctagaccagcgtgcattaa

SEQ ID NO: 183028 - DNA, 30 bp, Artificial Sequence
  Synthetic oligonucleotide
gactaggaaggtccgacgacgggtcattaa

SEQ ID NO: 183029 - DNA, 30 bp, Artificial Sequence
  Synthetic oligonucleotide
attataaagggttcatatgcaacagattaa

SEQ ID NO: 183030 - DNA, 30 bp, Artificial Sequence
  Synthetic oligonucleotide
catgccgggtgaagtgcgacaccggattaa

SEQ ID NO: 183031 - DNA, 30 bp, Artificial Sequence
  Synthetic oligonucleotide
gccaatagattcgaccgggccctggattaa

SEQ ID NO: 183032 - DNA, 30 bp, Artificial Sequence
  Synthetic oligonucleotide
ggaggaaccgtaggagaggtcttggattaa

SEQ ID NO: 183033 - DNA, 30 bp, Artificial Sequence
  Synthetic oligonucleotide
cagcttcaggcattttgatcccgtgattaa

SEQ ID NO: 183034 - DNA, 30 bp, Artificial Sequence
  Synthetic oligonucleotide
cagttgagtgaacagcgatagaaatattaa

SEQ ID NO: 183035 - DNA, 30 bp, Artificial Sequence
  Synthetic oligonucleotide
ttgctcgggctggaaataggacgatattaa

SEQ ID NO: 183036 - DNA, 30 bp, Artificial Sequence
  Synthetic oligonucleotide
agataacgggctgcatggcgtacctattaa

SEQ ID NO: 183037 - DNA, 30 bp, Artificial Sequence
  Synthetic oligonucleotide
tgaagtatggtggaaaccaccgtgtattaa

SEQ ID NO: 183038 - DNA, 30 bp, Artificial Sequence
  Synthetic oligonucleotide
cttcgggcgcgacatgcgactgggacttaa

SEQ ID NO: 183039 - DNA, 30 bp, Artificial Sequence
  Synthetic oligonucleotide
ggtcctaaacggttgtttggtagtacttaa

SEQ ID NO: 183040 - DNA, 30 bp, Artificial Sequence
  Synthetic oligonucleotide
ctggtttgctaagtctgaccgagagcttaa

SEQ ID NO: 183041 - DNA, 30 bp, Artificial Sequence
  Synthetic oligonucleotide
ctcgcatttcagcgagagcaagcggcttaa

SEQ ID NO: 183042 - DNA, 30 bp, Artificial Sequence
  Synthetic oligonucleotide
tagacgatctctggaactataagtgcttaa

SEQ ID NO: 183043 - DNA, 30 bp, Artificial Sequence
  Synthetic oligonucleotide
gggaactcccgcagtggggtgtagtcttaa

SEQ ID NO: 183044 - DNA, 30 bp, Artificial Sequence
  Synthetic oligonucleotide
atgtgaaattgaagaacgactaaaagttaa

SEQ ID NO: 183045 - DNA, 30 bp, Artificial Sequence
  Synthetic oligonucleotide
gtgacatcggggggaccgcgagaaagttaa

SEQ ID NO: 183046 - DNA, 30 bp, Artificial Sequence
  Synthetic oligonucleotide
caaatgagtacttggaagggataaagttaa

SEQ ID NO: 183047 - DNA, 30 bp, Artificial Sequence
  Synthetic oligonucleotide
agctcgtaggttgtatataaagcaagttaa

SEQ ID NO: 183048 - DNA, 30 bp, Artificial Sequence
  Synthetic oligonucleotide
catgcgtttcccgaatggtagttcagttaa

SEQ ID NO: 183049 - DNA, 30 bp, Artificial Sequence
  Synthetic oligonucleotide
agacgaatttattattacatctggagttaa

SEQ ID NO: 183050 - DNA, 30 bp, Artificial Sequence
  Synthetic oligonucleotide
agattcatcagcccgcggatatctagttaa

SEQ ID NO: 183051 - DNA, 30 bp, Artificial Sequence
  Synthetic oligonucleotide
tgggagaatctgagccttcccaaacgttaa

SEQ ID NO: 183052 - DNA, 30 bp, Artificial Sequence
  Synthetic oligonucleotide
agtgaatgaactttccgctcaagtcgttaa

SEQ ID NO: 183053 - DNA, 30 bp, Artificial Sequence
  Synthetic oligonucleotide
tagtgattggccaccgagtaaacaggttaa

SEQ ID NO: 183054 - DNA, 30 bp, Artificial Sequence
  Synthetic oligonucleotide
cggcttgctactcaaattaagataggttaa

SEQ ID NO: 183055 - DNA, 30 bp, Artificial Sequence
  Synthetic oligonucleotide
ggtcacagtgctcattcaagatccggttaa

SEQ ID NO: 183056 - DNA, 30 bp, Artificial Sequence
  Synthetic oligonucleotide
ccaaagatcacgcgttgcactcgcggttaa

SEQ ID NO: 183057 - DNA, 30 bp, Artificial Sequence
  Synthetic oligonucleotide
aagatgacagctttgtgcgtatgcggttaa

SEQ ID NO: 183058 - DNA, 30 bp, Artificial Sequence
  Synthetic oligonucleotide
atgtaagtctcgaggagtactgatggttaa

SEQ ID NO: 183059 - DNA, 30 bp, Artificial Sequence
  Synthetic oligonucleotide
acacgtatacagcgctcggcggcatgttaa

SEQ ID NO: 183060 - DNA, 30 bp, Artificial Sequence
  Synthetic oligonucleotide
ataaaatacgatcagtcagaaagatgttaa

SEQ ID NO: 183061 - DNA, 30 bp, Artificial Sequence
  Synthetic oligonucleotide
cttggccgtataactttcagggagtgttaa

SEQ ID NO: 183062 - DNA, 30 bp, Artificial Sequence
  Synthetic oligonucleotide
tttcgatgtgcgtagaatcgagtgtgttaa

SEQ ID NO: 183063 - DNA, 30 bp, Artificial Sequence
  Synthetic oligonucleotide
actgtaataagaactaaaaggggaatttaa

SEQ ID NO: 183064 - DNA, 30 bp, Artificial Sequence
  Synthetic oligonucleotide
atgtatgagaatcctgtacgattgatttaa

SEQ ID NO: 183065 - DNA, 30 bp, Artificial Sequence
  Synthetic oligonucleotide
gtgagcccccctatcattatcgttatttaa

SEQ ID NO: 183066 - DNA, 30 bp, Artificial Sequence
  Synthetic oligonucleotide
cacgcgtaaggagttcgtacggttatttaa

SEQ ID NO: 183067 - DNA, 30 bp, Artificial Sequence
  Synthetic oligonucleotide
actcatgactgcaaaatcgagtaactttaa

SEQ ID NO: 183068 - DNA, 30 bp, Artificial Sequence
  Synthetic oligonucleotide
acaatcctcgggaaaccccggagactttaa

SEQ ID NO: 183069 - DNA, 30 bp, Artificial Sequence
  Synthetic oligonucleotide
ttggcagggctatttgggcagctactttaa

SEQ ID NO: 183070 - DNA, 30 bp, Artificial Sequence
  Synthetic oligonucleotide
agagttgaggatgcccatcaggagctttaa

SEQ ID NO: 183071 - DNA, 30 bp, Artificial Sequence
  Synthetic oligonucleotide
atcatcgtggcggaaaaaatgaggctttaa

SEQ ID NO: 183072 - DNA, 30 bp, Artificial Sequence
  Synthetic oligonucleotide
accgcggtacttggggagactgctctttaa

SEQ ID NO: 183073 - DNA, 30 bp, Artificial Sequence
  Synthetic oligonucleotide
agaggtatagcaaagatgcaccgagtttaa

SEQ ID NO: 183074 - DNA, 30 bp, Artificial Sequence
  Synthetic oligonucleotide
aagaattagaaaggttctcacttagtttaa

SEQ ID NO: 183075 - DNA, 30 bp, Artificial Sequence
  Synthetic oligonucleotide
aggcttttatgttacgtgtgtcgcgtttaa

SEQ ID NO: 183076 - DNA, 30 bp, Artificial Sequence
  Synthetic oligonucleotide
cgagttcatggtacattcaaactggtttaa

SEQ ID NO: 183077 - DNA, 30 bp, Artificial Sequence
  Synthetic oligonucleotide
cggtgcacttcgtaaaggtgtacattttaa

SEQ ID NO: 183078 - DNA, 30 bp, Artificial Sequence
  Synthetic oligonucleotide
gcaagagaacgcgatggttagatattttaa

SEQ ID NO: 183079 - DNA, 30 bp, Artificial Sequence
  Synthetic oligonucleotide
gaaagaggaagataaccatgttatttttaa

SEQ ID NO: 183080 - DNA, 30 bp, Artificial Sequence
  Synthetic oligonucleotide
atccggctgaaggacacacacacaaaaaca

SEQ ID NO: 183081 - DNA, 30 bp, Artificial Sequence
  Synthetic oligonucleotide
tcaatcgcggagcgtgtatgaccaaaaaca

SEQ ID NO: 183082 - DNA, 30 bp, Artificial Sequence
  Synthetic oligonucleotide
tgataaagtgaacgtttgatggctaaaaca

SEQ ID NO: 183083 - DNA, 30 bp, Artificial Sequence
  Synthetic oligonucleotide
cgcggactctgttgtgacggacttaaaaca

SEQ ID NO: 183084 - DNA, 30 bp, Artificial Sequence
  Synthetic oligonucleotide
attacacgtagtgtgttgaagcgccaaaca

SEQ ID NO: 183085 - DNA, 30 bp, Artificial Sequence
  Synthetic oligonucleotide
ataggaaaagccatctgacgagcgcaaaca

SEQ ID NO: 183086 - DNA, 30 bp, Artificial Sequence
  Synthetic oligonucleotide
tccctgctattggtaggggacccagaaaca

SEQ ID NO: 183087 - DNA, 30 bp, Artificial Sequence
  Synthetic oligonucleotide
caatcgttggggtaatagctccgcgaaaca

SEQ ID NO: 183088 - DNA, 30 bp, Artificial Sequence
  Synthetic oligonucleotide
gctagacgaacaggttgccgttatgaaaca

SEQ ID NO: 183089 - DNA, 30 bp, Artificial Sequence
  Synthetic oligonucleotide
gcattaccaaggtcgagggaatctgaaaca

SEQ ID NO: 183090 - DNA, 30 bp, Artificial Sequence
  Synthetic oligonucleotide
ggttaaaggaacacgtggctaaaataaaca

SEQ ID NO: 183091 - DNA, 30 bp, Artificial Sequence
  Synthetic oligonucleotide
cacaagtagaatctctataatctataaaca

SEQ ID NO: 183092 - DNA, 30 bp, Artificial Sequence
  Synthetic oligonucleotide
acatataaactcgcgtgatgcttataaaca

SEQ ID NO: 183093 - DNA, 30 bp, Artificial Sequence
  Synthetic oligonucleotide
gggatgaaaaggtaaattagatcctaaaca

SEQ ID NO: 183094 - DNA, 30 bp, Artificial Sequence
  Synthetic oligonucleotide
aagtacctacggtgtcatccaggctaaaca

SEQ ID NO: 183095 - DNA, 30 bp, Artificial Sequence
  Synthetic oligonucleotide
tgcagcgaagcgacagcggggtcttaaaca

SEQ ID NO: 183096 - DNA, 30 bp, Artificial Sequence
  Synthetic oligonucleotide
agtgcctagcacatacggtctgtttaaaca

SEQ ID NO: 183097 - DNA, 30 bp, Artificial Sequence
  Synthetic oligonucleotide
caacgatcggtgaacatttcgcaaacaaca

SEQ ID NO: 183098 - DNA, 30 bp, Artificial Sequence
  Synthetic oligonucleotide
gccggaggcactcaaaaaacgttcacaaca

SEQ ID NO: 183099 - DNA, 30 bp, Artificial Sequence
  Synthetic oligonucleotide
gaaggacagcgtatccaataaatgacaaca

SEQ ID NO: 183100 - DNA, 30 bp, Artificial Sequence
  Synthetic oligonucleotide
gcgacgtctccggtctcagttggtacaaca

SEQ ID NO: 183101 - DNA, 30 bp, Artificial Sequence
  Synthetic oligonucleotide
ctgctcgggtatatgtttctcggcccaaca

SEQ ID NO: 183102 - DNA, 30 bp, Artificial Sequence
  Synthetic oligonucleotide
actagtagtgttaacgagcgaccagcaaca

SEQ ID NO: 183103 - DNA, 30 bp, Artificial Sequence
  Synthetic oligonucleotide
tcgactgtgttcgtccgcgaaagagcaaca

SEQ ID NO: 183104 - DNA, 31 bp, Artificial Sequence
  Synthetic oligonucleotide
atctgtaccgactgctgatatcatagcaaca

SEQ ID NO: 183105 - DNA, 30 bp, Artificial Sequence
  Synthetic oligonucleotide
ttagcctcttacagggttgtgttagcaaca

SEQ ID NO: 183106 - DNA, 30 bp, Artificial Sequence
  Synthetic oligonucleotide
ggctatgtcggtggataccttgccgcaaca

SEQ ID NO: 183107 - DNA, 30 bp, Artificial Sequence
  Synthetic oligonucleotide
ccactgcttggttaacggaattttgcaaca

SEQ ID NO: 183108 - DNA, 30 bp, Artificial Sequence
  Synthetic oligonucleotide
tatcacttattgtcactggtactatcaaca

SEQ ID NO: 183109 - DNA, 30 bp, Artificial Sequence
  Synthetic oligonucleotide
ttccctccagattgcggtgctgagtcaaca

SEQ ID NO: 183110 - DNA, 30 bp, Artificial Sequence
  Synthetic oligonucleotide
ccgctccgtcaccaactgccgagttcaaca

SEQ ID NO: 183111 - DNA, 30 bp, Artificial Sequence
  Synthetic oligonucleotide
cgatggtaagccaaggccgacatacgaaca

SEQ ID NO: 183112 - DNA, 30 bp, Artificial Sequence
  Synthetic oligonucleotide
ggtgaaggagattgctacgtttaccgaaca

SEQ ID NO: 183113 - DNA, 30 bp, Artificial Sequence
  Synthetic oligonucleotide
gctgtcctccaagctgtgtatacccgaaca

SEQ ID NO: 183114 - DNA, 30 bp, Artificial Sequence
  Synthetic oligonucleotide
cacctgtcacctgtaccgagaagccgaaca

SEQ ID NO: 183115 - DNA, 30 bp, Artificial Sequence
  Synthetic oligonucleotide
aagtacatccactgactcgatggccgaaca

SEQ ID NO: 183116 - DNA, 30 bp, Artificial Sequence
  Synthetic oligonucleotide
gcggagtagaaaaagacttacgtccgaaca

SEQ ID NO: 183117 - DNA, 30 bp, Artificial Sequence
  Synthetic oligonucleotide
atcgatttcgttcgcggggctcggcgaaca

SEQ ID NO: 183118 - DNA, 30 bp, Artificial Sequence
  Synthetic oligonucleotide
ggaagttataaggatggcgcgatgcgaaca

SEQ ID NO: 183119 - DNA, 30 bp, Artificial Sequence
  Synthetic oligonucleotide
attacggaagactaatgtttcaatcgaaca

SEQ ID NO: 183120 - DNA, 30 bp, Artificial Sequence
  Synthetic oligonucleotide
ggagctgctgtcgccgttacggaaggaaca

SEQ ID NO: 183121 - DNA, 30 bp, Artificial Sequence
  Synthetic oligonucleotide
attaaaggaggaggcaaaaatggcggaaca

SEQ ID NO: 183122 - DNA, 30 bp, Artificial Sequence
  Synthetic oligonucleotide
gctagatgtcggccacaacctggcggaaca

SEQ ID NO: 183123 - DNA, 30 bp, Artificial Sequence
  Synthetic oligonucleotide
agctcaggcgtttgactgtggcctggaaca

SEQ ID NO: 183124 - DNA, 30 bp, Artificial Sequence
  Synthetic oligonucleotide
acgcggagtgtgaacgctgcaacctgaaca

SEQ ID NO: 183125 - DNA, 30 bp, Artificial Sequence
  Synthetic oligonucleotide
ttggtcatggtgtgcgcgtgcacttgaaca

SEQ ID NO: 183126 - DNA, 30 bp, Artificial Sequence
  Synthetic oligonucleotide
agcagagataattcttaggcgatttgaaca

SEQ ID NO: 183127 - DNA, 30 bp, Artificial Sequence
  Synthetic oligonucleotide
ccttcaggccgggctggtacaataataaca

SEQ ID NO: 183128 - DNA, 30 bp, Artificial Sequence
  Synthetic oligonucleotide
tccaaaggtccacgccaccggctaataaca

SEQ ID NO: 183129 - DNA, 30 bp, Artificial Sequence
  Synthetic oligonucleotide
tccacctagcgaccacccgaggccataaca

SEQ ID NO: 183130 - DNA, 30 bp, Artificial Sequence
  Synthetic oligonucleotide
cgtattaatggtaagtatagttccataaca

SEQ ID NO: 183131 - DNA, 30 bp, Artificial Sequence
  Synthetic oligonucleotide
gcccgctttcactacagaagtgctataaca

SEQ ID NO: 183132 - DNA, 30 bp, Artificial Sequence
  Synthetic oligonucleotide
atcttggggggcaatacgcctatactaaca

SEQ ID NO: 183133 - DNA, 30 bp, Artificial Sequence
  Synthetic oligonucleotide
aattaacctaacgaggtggtggtactaaca

SEQ ID NO: 183134 - DNA, 30 bp, Artificial Sequence
  Synthetic oligonucleotide
ggttatccgcctgataactcgatcctaaca

SEQ ID NO: 183135 - DNA, 30 bp, Artificial Sequence
  Synthetic oligonucleotide
cattgaagagatccagtagcattgctaaca

SEQ ID NO: 183136 - DNA, 30 bp, Artificial Sequence
  Synthetic oligonucleotide
tggaaactcgacataagttggccagtaaca

SEQ ID NO: 183137 - DNA, 30 bp, Artificial Sequence
  Synthetic oligonucleotide
tcttttaacggccaagatcgttgagtaaca

SEQ ID NO: 183138 - DNA, 30 bp, Artificial Sequence
  Synthetic oligonucleotide
tcgcatgttatccaatagtcttgcgtaaca

SEQ ID NO: 183139 - DNA, 30 bp, Artificial Sequence
  Synthetic oligonucleotide
agttctcgcatagacattggaacggtaaca

SEQ ID NO: 183140 - DNA, 30 bp, Artificial Sequence
  Synthetic oligonucleotide
ctcctgagcttcataaggttatatgtaaca

SEQ ID NO: 183141 - DNA, 30 bp, Artificial Sequence
  Synthetic oligonucleotide
ccagcgtgagtaacggagaggcgcttaaca

SEQ ID NO: 183142 - DNA, 30 bp, Artificial Sequence
  Synthetic oligonucleotide
ctccacacgaggaatgatttgttgttaaca

SEQ ID NO: 183143 - DNA, 30 bp, Artificial Sequence
  Synthetic oligonucleotide
taggtccacaaagacgctagggttttaaca

SEQ ID NO: 183144 - DNA, 30 bp, Artificial Sequence
  Synthetic oligonucleotide
cgattgactcagtcttcctcagcaaacaca

SEQ ID NO: 183145 - DNA, 30 bp, Artificial Sequence
  Synthetic oligonucleotide
tatgctttaagagaaactagacgaaacaca

SEQ ID NO: 183146 - DNA, 30 bp, Artificial Sequence
  Synthetic oligonucleotide
taattggtgattgtcagaaggagtaacaca

SEQ ID NO: 183147 - DNA, 30 bp, Artificial Sequence
  Synthetic oligonucleotide
accttacgcaagagttattgagaacacaca

SEQ ID NO: 183148 - DNA, 30 bp, Artificial Sequence
  Synthetic oligonucleotide
tgccagcagcaacctgttacgatacacaca

SEQ ID NO: 183149 - DNA, 30 bp, Artificial Sequence
  Synthetic oligonucleotide
gacgttatgcgcctcctgcggtaccacaca

SEQ ID NO: 183150 - DNA, 30 bp, Artificial Sequence
  Synthetic oligonucleotide
tcccaggatggagagttgcgcggccacaca

SEQ ID NO: 183151 - DNA, 30 bp, Artificial Sequence
  Synthetic oligonucleotide
aacaacttcaaataccaacaagcgcacaca

SEQ ID NO: 183152 - DNA, 30 bp, Artificial Sequence
  Synthetic oligonucleotide
aacggttaacatgtgtaagatgatcacaca

SEQ ID NO: 183153 - DNA, 30 bp, Artificial Sequence
  Synthetic oligonucleotide
gtttggcgatacgattcctcaagtcacaca

SEQ ID NO: 183154 - DNA, 30 bp, Artificial Sequence
  Synthetic oligonucleotide
ggttcctacaaaagggagcgaggtcacaca

SEQ ID NO: 183155 - DNA, 30 bp, Artificial Sequence
  Synthetic oligonucleotide
agaaatgctgatgtatgtacctaagacaca

SEQ ID NO: 183156 - DNA, 30 bp, Artificial Sequence
  Synthetic oligonucleotide
gtgtcacttgagactaagtgccgagacaca

SEQ ID NO: 183157 - DNA, 30 bp, Artificial Sequence
  Synthetic oligonucleotide
tacatcagctgtcactggatggacgacaca

SEQ ID NO: 183158 - DNA, 30 bp, Artificial Sequence
  Synthetic oligonucleotide
tacatcaaataggcattaacgcaggacaca

SEQ ID NO: 183159 - DNA, 30 bp, Artificial Sequence
  Synthetic oligonucleotide
taattacaaggtgggttagtacaatacaca

SEQ ID NO: 183160 - DNA, 30 bp, Artificial Sequence
  Synthetic oligonucleotide
ctcatcgccattcgctttccttcatacaca

SEQ ID NO: 183161 - DNA, 30 bp, Artificial Sequence
  Synthetic oligonucleotide
tggagatggcccctttagtgtcattacaca

SEQ ID NO: 183162 - DNA, 30 bp, Artificial Sequence
  Synthetic oligonucleotide
ctaaagggagcgatcactctagtttacaca

SEQ ID NO: 183163 - DNA, 30 bp, Artificial Sequence
  Synthetic oligonucleotide
gatgctatgggatgtagaacttaaaccaca

SEQ ID NO: 183164 - DNA, 30 bp, Artificial Sequence
  Synthetic oligonucleotide
tagtggtagcagtacgaagtcataaccaca

SEQ ID NO: 183165 - DNA, 30 bp, Artificial Sequence
  Synthetic oligonucleotide
tgcagagcatttccacgaatcaacaccaca

SEQ ID NO: 183166 - DNA, 30 bp, Artificial Sequence
  Synthetic oligonucleotide
acgggggagtagctgcacgccagcaccaca

SEQ ID NO: 183167 - DNA, 31 bp, Artificial Sequence
  Synthetic oligonucleotide
taacaccgggtgcgtgagaaatctcaccaca

SEQ ID NO: 183168 - DNA, 30 bp, Artificial Sequence
  Synthetic oligonucleotide
aggatcgaccatgccggagaacaacccaca

SEQ ID NO: 183169 - DNA, 30 bp, Artificial Sequence
  Synthetic oligonucleotide
gatattttggggtaacgggtacgccccaca

SEQ ID NO: 183170 - DNA, 30 bp, Artificial Sequence
  Synthetic oligonucleotide
tcctgaggacgggcggtcgtgacgcccaca

SEQ ID NO: 183171 - DNA, 30 bp, Artificial Sequence
  Synthetic oligonucleotide
gtgcccaaaacacaagagcctgatcccaca

SEQ ID NO: 183172 - DNA, 30 bp, Artificial Sequence
  Synthetic oligonucleotide
catactgaacgcagagcgatcgtagccaca

SEQ ID NO: 183173 - DNA, 30 bp, Artificial Sequence
  Synthetic oligonucleotide
ccatgagtacgtggcccggactgcgccaca

SEQ ID NO: 183174 - DNA, 30 bp, Artificial Sequence
  Synthetic oligonucleotide
aagcgttcacgttgctgaaacgtggccaca

SEQ ID NO: 183175 - DNA, 30 bp, Artificial Sequence
  Synthetic oligonucleotide
tctcggaactggggcttccatttggccaca

SEQ ID NO: 183176 - DNA, 30 bp, Artificial Sequence
  Synthetic oligonucleotide
aacgcgaggtgttaggctgctacatccaca

SEQ ID NO: 183177 - DNA, 30 bp, Artificial Sequence
  Synthetic oligonucleotide
ggttaggagcactcgattgttgtgagcaca

SEQ ID NO: 183178 - DNA, 30 bp, Artificial Sequence
  Synthetic oligonucleotide
tgacgtccagtacagcactgggaacgcaca

SEQ ID NO: 183179 - DNA, 30 bp, Artificial Sequence
  Synthetic oligonucleotide
atgaagcagtatacacgggcctagcgcaca

SEQ ID NO: 183180 - DNA, 30 bp, Artificial Sequence
  Synthetic oligonucleotide
cagaggtcgcaactacgaatctggcgcaca

SEQ ID NO: 183181 - DNA, 30 bp, Artificial Sequence
  Synthetic oligonucleotide
agcctatggcaaaatagtaaacaaggcaca

SEQ ID NO: 183182 - DNA, 30 bp, Artificial Sequence
  Synthetic oligonucleotide
ctcccaacacgcgaatgaacacacggcaca

SEQ ID NO: 183183 - DNA, 30 bp, Artificial Sequence
  Synthetic oligonucleotide
gatattaatttcagcgtgtctcacggcaca

SEQ ID NO: 183184 - DNA, 30 bp, Artificial Sequence
  Synthetic oligonucleotide
agagtgtagtatgtaaagcgtggcggcaca

SEQ ID NO: 183185 - DNA, 30 bp, Artificial Sequence
  Synthetic oligonucleotide
tggtgcggacagatggctgaggcgggcaca

SEQ ID NO: 183186 - DNA, 30 bp, Artificial Sequence
  Synthetic oligonucleotide
tcaaggcgggcaggcaatcctaggggcaca

SEQ ID NO: 183187 - DNA, 30 bp, Artificial Sequence
  Synthetic oligonucleotide
gcgcaggtaatgacgttggagattggcaca

SEQ ID NO: 183188 - DNA, 30 bp, Artificial Sequence
  Synthetic oligonucleotide
aatcatgaatcaacatgggtgtcatgcaca

SEQ ID NO: 183189 - DNA, 30 bp, Artificial Sequence
  Synthetic oligonucleotide
tcgagaccggttgtatgtgtaatatgcaca

SEQ ID NO: 183190 - DNA, 30 bp, Artificial Sequence
  Synthetic oligonucleotide
tggattagagctaggactggacactgcaca

SEQ ID NO: 183191 - DNA, 30 bp, Artificial Sequence
  Synthetic oligonucleotide
ttgaagaactgtagagagtcatgctgcaca

SEQ ID NO: 183192 - DNA, 30 bp, Artificial Sequence
  Synthetic oligonucleotide
aaagaatccgcgattaggatccagtgcaca

SEQ ID NO: 183193 - DNA, 30 bp, Artificial Sequence
  Synthetic oligonucleotide
ttgcagagttgagcattgataacaatcaca

SEQ ID NO: 183194 - DNA, 30 bp, Artificial Sequence
  Synthetic oligonucleotide
ccgggttgagtgtgtcatcataggatcaca

SEQ ID NO: 183195 - DNA, 30 bp, Artificial Sequence
  Synthetic oligonucleotide
gtctctgtgcgccacagaatatggatcaca

SEQ ID NO: 183196 - DNA, 30 bp, Artificial Sequence
  Synthetic oligonucleotide
gcactcttcataggacactcaacgctcaca

SEQ ID NO: 183197 - DNA, 30 bp, Artificial Sequence
  Synthetic oligonucleotide
gatcccgatggggtcccattgaggctcaca

SEQ ID NO: 183198 - DNA, 30 bp, Artificial Sequence
  Synthetic oligonucleotide
tcttcaagcagttgatctgtcttagtcaca

SEQ ID NO: 183199 - DNA, 30 bp, Artificial Sequence
  Synthetic oligonucleotide
gtatctacccgcgatatcagtcatttcaca

SEQ ID NO: 183200 - DNA, 30 bp, Artificial Sequence
  Synthetic oligonucleotide
gcgtcttctcatagttaccaacgtttcaca

SEQ ID NO: 183201 - DNA, 30 bp, Artificial Sequence
  Synthetic oligonucleotide
ataaatacaagacgttgtgatcaaaagaca

SEQ ID NO: 183202 - DNA, 30 bp, Artificial Sequence
  Synthetic oligonucleotide
gtctggcagtcatacaccgctagaaagaca

SEQ ID NO: 183203 - DNA, 30 bp, Artificial Sequence
  Synthetic oligonucleotide
aacccagtgtagcgggtcaacataaagaca

SEQ ID NO: 183204 - DNA, 30 bp, Artificial Sequence
  Synthetic oligonucleotide
tgcaagaagattaatttcatcgggaagaca

SEQ ID NO: 183205 - DNA, 30 bp, Artificial Sequence
  Synthetic oligonucleotide
tacttacttagggttgggacgtgtaagaca

SEQ ID NO: 183206 - DNA, 30 bp, Artificial Sequence
  Synthetic oligonucleotide
gcccgattatcgagacgacgaggtcagaca

SEQ ID NO: 183207 - DNA, 30 bp, Artificial Sequence
  Synthetic oligonucleotide
ccatgataaactcataatccgtgtcagaca

SEQ ID NO: 183208 - DNA, 30 bp, Artificial Sequence
  Synthetic oligonucleotide
atacagcccttaacttttgccaaagagaca

SEQ ID NO: 183209 - DNA, 30 bp, Artificial Sequence
  Synthetic oligonucleotide
cggttagactccgagcagccttaagagaca

SEQ ID NO: 183210 - DNA, 30 bp, Artificial Sequence
  Synthetic oligonucleotide
tcctcacgcctcgaaactgttggagagaca

SEQ ID NO: 183211 - DNA, 30 bp, Artificial Sequence
  Synthetic oligonucleotide
agtggtatgtacccaggggctaccgagaca

SEQ ID NO: 183212 - DNA, 30 bp, Artificial Sequence
  Synthetic oligonucleotide
acgctatttgtaattctgaggttcgagaca

SEQ ID NO: 183213 - DNA, 30 bp, Artificial Sequence
  Synthetic oligonucleotide
ctcggtgcttctggaatgaacaaggagaca

SEQ ID NO: 183214 - DNA, 30 bp, Artificial Sequence
  Synthetic oligonucleotide
gctggggcttcacgtaatgctgaggagaca

SEQ ID NO: 183215 - DNA, 30 bp, Artificial Sequence
  Synthetic oligonucleotide
tgatccagtccatggtatggtagggagaca

SEQ ID NO: 183216 - DNA, 30 bp, Artificial Sequence
  Synthetic oligonucleotide
agtttaagagtaaatgaacggactgagaca

SEQ ID NO: 183217 - DNA, 30 bp, Artificial Sequence
  Synthetic oligonucleotide
gcggggcttattagtaatgcaaactagaca

SEQ ID NO: 183218 - DNA, 30 bp, Artificial Sequence
  Synthetic oligonucleotide
tcggttggcccctgctacacgataacgaca

SEQ ID NO: 183219 - DNA, 30 bp, Artificial Sequence
  Synthetic oligonucleotide
cctttgcaacaactctctcacggcacgaca

SEQ ID NO: 183220 - DNA, 30 bp, Artificial Sequence
  Synthetic oligonucleotide
aaggccgggcacgcttggcagaggacgaca

SEQ ID NO: 183221 - DNA, 30 bp, Artificial Sequence
  Synthetic oligonucleotide
cacagaagttcattgggggttgttacgaca

SEQ ID NO: 183222 - DNA, 30 bp, Artificial Sequence
  Synthetic oligonucleotide
cgagaaagctttcctgctgggagaccgaca

SEQ ID NO: 183223 - DNA, 30 bp, Artificial Sequence
  Synthetic oligonucleotide
atggcatcatcagtttacgaccttccgaca

SEQ ID NO: 183224 - DNA, 30 bp, Artificial Sequence
  Synthetic oligonucleotide
ctgaagccgggatcgtcagcatcagcgaca

SEQ ID NO: 183225 - DNA, 30 bp, Artificial Sequence
  Synthetic oligonucleotide
acaaccaacagcgacgggcgaggggcgaca

SEQ ID NO: 183226 - DNA, 31 bp, Artificial Sequence
  Synthetic oligonucleotide
ataacgcacgctttaaagacacgatgcgaca

SEQ ID NO: 183227 - DNA, 30 bp, Artificial Sequence
  Synthetic oligonucleotide
atccgacgaactccgaagacgtatgcgaca

SEQ ID NO: 183228 - DNA, 30 bp, Artificial Sequence
  Synthetic oligonucleotide
ccatcactacgattgctatgaggtgcgaca

SEQ ID NO: 183229 - DNA, 30 bp, Artificial Sequence
  Synthetic oligonucleotide
tggatcatataacgtatttatgcctcgaca

SEQ ID NO: 183230 - DNA, 30 bp, Artificial Sequence
  Synthetic oligonucleotide
ctaatgccaagatattaacaatagtcgaca

SEQ ID NO: 183231 - DNA, 30 bp, Artificial Sequence
  Synthetic oligonucleotide
ggtgtcggttatttctaaggatggtcgaca

SEQ ID NO: 183232 - DNA, 30 bp, Artificial Sequence
  Synthetic oligonucleotide
ctggatccgaaccgagggtggtacaggaca

SEQ ID NO: 183233 - DNA, 30 bp, Artificial Sequence
  Synthetic oligonucleotide
caagcacgaactcgacttggaatcaggaca

SEQ ID NO: 183234 - DNA, 30 bp, Artificial Sequence
  Synthetic oligonucleotide
agaacgactggcaccgaggaaacacggaca

SEQ ID NO: 183235 - DNA, 30 bp, Artificial Sequence
  Synthetic oligonucleotide
tccgagaactcctacgagttgtagcggaca

SEQ ID NO: 183236 - DNA, 30 bp, Artificial Sequence
  Synthetic oligonucleotide
gctctcgatcctacgaaaataactcggaca

SEQ ID NO: 183237 - DNA, 30 bp, Artificial Sequence
  Synthetic oligonucleotide
aagccgcgcgagagtagattcccagggaca

SEQ ID NO: 183238 - DNA, 30 bp, Artificial Sequence
  Synthetic oligonucleotide
ttgcctgcttgggaaagcgaaggggggaca

SEQ ID NO: 183239 - DNA, 30 bp, Artificial Sequence
  Synthetic oligonucleotide
caagcaggatttggaatgtgctgtgggaca

SEQ ID NO: 183240 - DNA, 30 bp, Artificial Sequence
  Synthetic oligonucleotide
gctcagtagagaaagcaagttacatggaca

SEQ ID NO: 183241 - DNA, 30 bp, Artificial Sequence
  Synthetic oligonucleotide
atcgtagacgttccgtatgcggcatggaca

SEQ ID NO: 183242 - DNA, 30 bp, Artificial Sequence
  Synthetic oligonucleotide
taattggctaggatcacactgagatggaca

SEQ ID NO: 183243 - DNA, 30 bp, Artificial Sequence
  Synthetic oligonucleotide
agcggggaggccagaataaaatgctggaca

SEQ ID NO: 183244 - DNA, 30 bp, Artificial Sequence
  Synthetic oligonucleotide
ggcagatgcgccctctaactgatctggaca

SEQ ID NO: 183245 - DNA, 30 bp, Artificial Sequence
  Synthetic oligonucleotide
tatgcactaagtatcttcactcattggaca

SEQ ID NO: 183246 - DNA, 30 bp, Artificial Sequence
  Synthetic oligonucleotide
tccccgctaagggctaagagtgtttggaca

SEQ ID NO: 183247 - DNA, 30 bp, Artificial Sequence
  Synthetic oligonucleotide
gtttgaacgtttagtgggaaccaaatgaca

SEQ ID NO: 183248 - DNA, 30 bp, Artificial Sequence
  Synthetic oligonucleotide
cgcgaaacacgagcttactctcctatgaca

SEQ ID NO: 183249 - DNA, 30 bp, Artificial Sequence
  Synthetic oligonucleotide
gcactatagcaaaattttcaatcactgaca

SEQ ID NO: 183250 - DNA, 30 bp, Artificial Sequence
  Synthetic oligonucleotide
ttctagccaggacaggatgatgagctgaca

SEQ ID NO: 183251 - DNA, 30 bp, Artificial Sequence
  Synthetic oligonucleotide
tggacttcgttaccgtatttcttgctgaca

SEQ ID NO: 183252 - DNA, 30 bp, Artificial Sequence
  Synthetic oligonucleotide
aagagccttgagaattaccactaagtgaca

SEQ ID NO: 183253 - DNA, 30 bp, Artificial Sequence
  Synthetic oligonucleotide
acgcacctaacgccctgacctgcagtgaca

SEQ ID NO: 183254 - DNA, 30 bp, Artificial Sequence
  Synthetic oligonucleotide
caggccgagtcccatattcacatggtgaca

SEQ ID NO: 183255 - DNA, 30 bp, Artificial Sequence
  Synthetic oligonucleotide
atgatgtatccatataccatcgaattgaca

SEQ ID NO: 183256 - DNA, 30 bp, Artificial Sequence
  Synthetic oligonucleotide
tggttcgtcgcgattgttagttcattgaca

SEQ ID NO: 183257 - DNA, 30 bp, Artificial Sequence
  Synthetic oligonucleotide
aggagctgatgaactttgcttatattgaca

SEQ ID NO: 183258 - DNA, 30 bp, Artificial Sequence
  Synthetic oligonucleotide
atggctggtgcgactggcgagtcgttgaca

SEQ ID NO: 183259 - DNA, 30 bp, Artificial Sequence
  Synthetic oligonucleotide
gacataacgcgggcagcggcgcaaaataca

SEQ ID NO: 183260 - DNA, 30 bp, Artificial Sequence
  Synthetic oligonucleotide
cgcctcggtatacaaattgccagaaataca

SEQ ID NO: 183261 - DNA, 30 bp, Artificial Sequence
  Synthetic oligonucleotide
tggtactcaacagcggtaagcataaataca

SEQ ID NO: 183262 - DNA, 30 bp, Artificial Sequence
  Synthetic oligonucleotide
tgctcgggtagatagaagtcgttaaataca

SEQ ID NO: 183263 - DNA, 30 bp, Artificial Sequence
  Synthetic oligonucleotide
tagagagataggacttccaacaagaataca

SEQ ID NO: 183264 - DNA, 30 bp, Artificial Sequence
  Synthetic oligonucleotide
aggtatgttccgtttcagtgggataataca

SEQ ID NO: 183265 - DNA, 30 bp, Artificial Sequence
  Synthetic oligonucleotide
ccggtgtggcattcgagtctagagcataca

SEQ ID NO: 183266 - DNA, 30 bp, Artificial Sequence
  Synthetic oligonucleotide
atacgggtggggcggttgcgccggcataca

SEQ ID NO: 183267 - DNA, 30 bp, Artificial Sequence
  Synthetic oligonucleotide
cggtgactcgcaagaaaatgaaatcataca

SEQ ID NO: 183268 - DNA, 30 bp, Artificial Sequence
  Synthetic oligonucleotide
taaatcagtgcgggcctagaacctcataca

SEQ ID NO: 183269 - DNA, 30 bp, Artificial Sequence
  Synthetic oligonucleotide
actcatgcaagggtgagaaacaaagataca

SEQ ID NO: 183270 - DNA, 30 bp, Artificial Sequence
  Synthetic oligonucleotide
tcgcattcagtcttatgttagatagataca

SEQ ID NO: 183271 - DNA, 30 bp, Artificial Sequence
  Synthetic oligonucleotide
ccgcattgttgctgatagtccaccgataca

SEQ ID NO: 183272 - DNA, 30 bp, Artificial Sequence
  Synthetic oligonucleotide
accgttgaaccgtgcacggaaggcgataca

SEQ ID NO: 183273 - DNA, 30 bp, Artificial Sequence
  Synthetic oligonucleotide
gtgagggagttagtgaatttgtaggataca

SEQ ID NO: 183274 - DNA, 30 bp, Artificial Sequence
  Synthetic oligonucleotide
caaagtgcgctgttggaattcggggataca

SEQ ID NO: 183275 - DNA, 30 bp, Artificial Sequence
  Synthetic oligonucleotide
ccacgggagtgccagtttttgttggataca

SEQ ID NO: 183276 - DNA, 30 bp, Artificial Sequence
  Synthetic oligonucleotide
cccggagaacaacggcgatacactgataca

SEQ ID NO: 183277 - DNA, 30 bp, Artificial Sequence
  Synthetic oligonucleotide
cgctggcagagagaggagttgactgataca

SEQ ID NO: 183278 - DNA, 30 bp, Artificial Sequence
  Synthetic oligonucleotide
cggaaggtgatcgtaatgctagttgataca

SEQ ID NO: 183279 - DNA, 30 bp, Artificial Sequence
  Synthetic oligonucleotide
cttttgtgattacaatccgtcgttgataca

SEQ ID NO: 183280 - DNA, 30 bp, Artificial Sequence
  Synthetic oligonucleotide
gaatcgagtcgtggggactcggcctataca

SEQ ID NO: 183281 - DNA, 30 bp, Artificial Sequence
  Synthetic oligonucleotide
tcaggggattgagtacctgagggctataca

SEQ ID NO: 183282 - DNA, 30 bp, Artificial Sequence
  Synthetic oligonucleotide
cgtaaatcaaagggtctcgcttcgtataca

SEQ ID NO: 183283 - DNA, 30 bp, Artificial Sequence
  Synthetic oligonucleotide
acagctcaggaagacgcccctatgtataca

SEQ ID NO: 183284 - DNA, 30 bp, Artificial Sequence
  Synthetic oligonucleotide
tgatggtacgttggaacattgaattataca

SEQ ID NO: 183285 - DNA, 30 bp, Artificial Sequence
  Synthetic oligonucleotide
tcgcgttaatacctctttaaacgttataca

SEQ ID NO: 183286 - DNA, 30 bp, Artificial Sequence
  Synthetic oligonucleotide
agcgtgggggagcccctaggtccgcctaca

SEQ ID NO: 183287 - DNA, 30 bp, Artificial Sequence
  Synthetic oligonucleotide
ccattgtggagcaccatctgggcgcctaca

SEQ ID NO: 183288 - DNA, 30 bp, Artificial Sequence
  Synthetic oligonucleotide
cgtagatcaaaaacgtgcgtgatgcctaca

SEQ ID NO: 183289 - DNA, 30 bp, Artificial Sequence
  Synthetic oligonucleotide
ggtacttccgtgtactatcgacgagctaca

SEQ ID NO: 183290 - DNA, 30 bp, Artificial Sequence
  Synthetic oligonucleotide
aacttggctgttcgtgtgagccatgctaca

SEQ ID NO: 183291 - DNA, 30 bp, Artificial Sequence
  Synthetic oligonucleotide
gttcaaagtgcatgggaagggggctctaca

SEQ ID NO: 183292 - DNA, 30 bp, Artificial Sequence
  Synthetic oligonucleotide
gttaactcacacaacctaaattggtctaca

SEQ ID NO: 183293 - DNA, 30 bp, Artificial Sequence
  Synthetic oligonucleotide
gctagtacgtcgcgacactgcgcaagtaca

SEQ ID NO: 183294 - DNA, 30 bp, Artificial Sequence
  Synthetic oligonucleotide
gccagtggataaagccggatctcacgtaca

SEQ ID NO: 183295 - DNA, 30 bp, Artificial Sequence
  Synthetic oligonucleotide
aaaccagtagagccaggtggctaccgtaca

SEQ ID NO: 183296 - DNA, 30 bp, Artificial Sequence
  Synthetic oligonucleotide
gcgtaacacgtccggacgggacgaggtaca

SEQ ID NO: 183297 - DNA, 30 bp, Artificial Sequence
  Synthetic oligonucleotide
gtgtgaggtcaaagatcaagaccgggtaca

SEQ ID NO: 183298 - DNA, 30 bp, Artificial Sequence
  Synthetic oligonucleotide
agggagcacggtctggttgaagatggtaca

SEQ ID NO: 183299 - DNA, 30 bp, Artificial Sequence
  Synthetic oligonucleotide
ggtaccagggggaagagttcctttggtaca

SEQ ID NO: 183300 - DNA, 30 bp, Artificial Sequence
  Synthetic oligonucleotide
cgaatagagtacggttacgaatactgtaca

SEQ ID NO: 183301 - DNA, 30 bp, Artificial Sequence
  Synthetic oligonucleotide
atagctaaggatgtttctgcgctgtgtaca

SEQ ID NO: 183302 - DNA, 30 bp, Artificial Sequence
  Synthetic oligonucleotide
gcagatgcgtcagctatagccgattgtaca

SEQ ID NO: 183303 - DNA, 30 bp, Artificial Sequence
  Synthetic oligonucleotide
atcgtcgtataaaccgtagtctattgtaca

SEQ ID NO: 183304 - DNA, 30 bp, Artificial Sequence
  Synthetic oligonucleotide
aacaagcgcatatccgtagtgcgaattaca

SEQ ID NO: 183305 - DNA, 30 bp, Artificial Sequence
  Synthetic oligonucleotide
caggggcggtaaagggggttagtaattaca

SEQ ID NO: 183306 - DNA, 30 bp, Artificial Sequence
  Synthetic oligonucleotide
tcgaccgtcttgtaacctttcagcattaca

SEQ ID NO: 183307 - DNA, 30 bp, Artificial Sequence
  Synthetic oligonucleotide
cagatcaacatggcagcaaatagtattaca

SEQ ID NO: 183308 - DNA, 30 bp, Artificial Sequence
  Synthetic oligonucleotide
caatcaagtagcctgcaaagcacccttaca

SEQ ID NO: 183309 - DNA, 30 bp, Artificial Sequence
  Synthetic oligonucleotide
tgcacgaggtgcgtaattcacacgcttaca

SEQ ID NO: 183310 - DNA, 30 bp, Artificial Sequence
  Synthetic oligonucleotide
aaacaacattatcttgaaataccgcttaca

SEQ ID NO: 183311 - DNA, 30 bp, Artificial Sequence
  Synthetic oligonucleotide
aatgaattctgctagtgcgtgaatcttaca

SEQ ID NO: 183312 - DNA, 30 bp, Artificial Sequence
  Synthetic oligonucleotide
cccggatcaatagcagagcttaatcttaca

SEQ ID NO: 183313 - DNA, 30 bp, Artificial Sequence
  Synthetic oligonucleotide
ggtgtgcgcgtaaccctcgaaacagttaca

SEQ ID NO: 183314 - DNA, 30 bp, Artificial Sequence
  Synthetic oligonucleotide
aggcaccgtccctgatgcgagatagttaca

SEQ ID NO: 183315 - DNA, 30 bp, Artificial Sequence
  Synthetic oligonucleotide
ttaaagccgaaggacaataatctagttaca

SEQ ID NO: 183316 - DNA, 30 bp, Artificial Sequence
  Synthetic oligonucleotide
gatcggatcctcgcaggccaagacgttaca

SEQ ID NO: 183317 - DNA, 30 bp, Artificial Sequence
  Synthetic oligonucleotide
ccttacatacctcgtacatgcagggttaca

SEQ ID NO: 183318 - DNA, 30 bp, Artificial Sequence
  Synthetic oligonucleotide
atcgcattagcgccattgggactaaaacca

SEQ ID NO: 183319 - DNA, 30 bp, Artificial Sequence
  Synthetic oligonucleotide
cgtataaggaatacggcccctaagaaacca

SEQ ID NO: 183320 - DNA, 30 bp, Artificial Sequence
  Synthetic oligonucleotide
attaaccttaagccgcgaacgagtaaacca

SEQ ID NO: 183321 - DNA, 30 bp, Artificial Sequence
  Synthetic oligonucleotide
tcttccaggtgcgcatatagcgtgcaacca

SEQ ID NO: 183322 - DNA, 30 bp, Artificial Sequence
  Synthetic oligonucleotide
accgcgactaaacaatccacgtgtcaacca

SEQ ID NO: 183323 - DNA, 30 bp, Artificial Sequence
  Synthetic oligonucleotide
acacagaggccctttgtcataggagaacca

SEQ ID NO: 183324 - DNA, 30 bp, Artificial Sequence
  Synthetic oligonucleotide
ttgtaagtgtttggaaggtcatgcgaacca

SEQ ID NO: 183325 - DNA, 30 bp, Artificial Sequence
  Synthetic oligonucleotide
ggagtgttgccgagccgtaacctcgaacca

SEQ ID NO: 183326 - DNA, 30 bp, Artificial Sequence
  Synthetic oligonucleotide
cggtgaggctggtactaccaaggtgaacca

SEQ ID NO: 183327 - DNA, 30 bp, Artificial Sequence
  Synthetic oligonucleotide
gcttcatatcagcaggcgcgcgaataacca

SEQ ID NO: 183328 - DNA, 30 bp, Artificial Sequence
  Synthetic oligonucleotide
acgcacgttcacactccaatgaggtaacca

SEQ ID NO: 183329 - DNA, 30 bp, Artificial Sequence
  Synthetic oligonucleotide
tggaagaaaatggtgattcaagtgtaacca

SEQ ID NO: 183330 - DNA, 30 bp, Artificial Sequence
  Synthetic oligonucleotide
catacgcgcaagcacgctgcaacttaacca

SEQ ID NO: 183331 - DNA, 30 bp, Artificial Sequence
  Synthetic oligonucleotide
tcaatgcaagccttgcgtggcccttaacca

SEQ ID NO: 183332 - DNA, 30 bp, Artificial Sequence
  Synthetic oligonucleotide
gaagaggcctcaaaactattacaaacacca

SEQ ID NO: 183333 - DNA, 30 bp, Artificial Sequence
  Synthetic oligonucleotide
ccatacccgagcttagaatgacgaacacca

SEQ ID NO: 183334 - DNA, 30 bp, Artificial Sequence
  Synthetic oligonucleotide
cattaagtcatacttacctatatcccacca

SEQ ID NO: 183335 - DNA, 30 bp, Artificial Sequence
  Synthetic oligonucleotide
cgtgaaccccccctgactggggcgccacca

SEQ ID NO: 183336 - DNA, 30 bp, Artificial Sequence
  Synthetic oligonucleotide
ttcaggtgggcgtatccaaagctagcacca

SEQ ID NO: 183337 - DNA, 30 bp, Artificial Sequence
  Synthetic oligonucleotide
cgccagatggatgcatagagaaacgcacca

SEQ ID NO: 183338 - DNA, 30 bp, Artificial Sequence
  Synthetic oligonucleotide
ataactaccctgtatagaaagcatgcacca

SEQ ID NO: 183339 - DNA, 30 bp, Artificial Sequence
  Synthetic oligonucleotide
tgttcattacaaaaagatataactgcacca

SEQ ID NO: 183340 - DNA, 30 bp, Artificial Sequence
  Synthetic oligonucleotide
agttaagactcatacatggactgatcacca

SEQ ID NO: 183341 - DNA, 30 bp, Artificial Sequence
  Synthetic oligonucleotide
acggacgtatgtttccatgacatatcacca

SEQ ID NO: 183342 - DNA, 29 bp, Artificial Sequence
  Synthetic oligonucleotide
aactatacgagaatggtaaagcttcacca

SEQ ID NO: 183343 - DNA, 30 bp, Artificial Sequence
  Synthetic oligonucleotide
accttatgagtccgtggtgaccgttcacca

SEQ ID NO: 183344 - DNA, 30 bp, Artificial Sequence
  Synthetic oligonucleotide
tagaaatcaggacaatcaactatttcacca

SEQ ID NO: 183345 - DNA, 30 bp, Artificial Sequence
  Synthetic oligonucleotide
gtgggggtaatcaagacgtgtggaagacca

SEQ ID NO: 183346 - DNA, 30 bp, Artificial Sequence
  Synthetic oligonucleotide
gataaatatatgcgggtatcactacgacca

SEQ ID NO: 183347 - DNA, 30 bp, Artificial Sequence
  Synthetic oligonucleotide
ctattgcaaagcggtccctagctaggacca

SEQ ID NO: 183348 - DNA, 30 bp, Artificial Sequence
  Synthetic oligonucleotide
acagagcgtttcatatttgttcagtgacca

SEQ ID NO: 183349 - DNA, 30 bp, Artificial Sequence
  Synthetic oligonucleotide
ccagatcaccgtgggttgcgaatgtgacca

SEQ ID NO: 183350 - DNA, 30 bp, Artificial Sequence
  Synthetic oligonucleotide
atccccgggacacgtgtcgcacgcatacca

SEQ ID NO: 183351 - DNA, 30 bp, Artificial Sequence
  Synthetic oligonucleotide
cattagagtctcccacagttgaagatacca

SEQ ID NO: 183352 - DNA, 30 bp, Artificial Sequence
  Synthetic oligonucleotide
tagggtctgaaatatggaagttagatacca

SEQ ID NO: 183353 - DNA, 30 bp, Artificial Sequence
  Synthetic oligonucleotide
caggtggtgctaacgacatcatctatacca

SEQ ID NO: 183354 - DNA, 30 bp, Artificial Sequence
  Synthetic oligonucleotide
ttccatccgtcctacttagtaattatacca

SEQ ID NO: 183355 - DNA, 30 bp, Artificial Sequence
  Synthetic oligonucleotide
gaccctgggagctaaccccaatccctacca

SEQ ID NO: 183356 - DNA, 30 bp, Artificial Sequence
  Synthetic oligonucleotide
tggcgagaggttaatcgctcatccctacca

SEQ ID NO: 183357 - DNA, 30 bp, Artificial Sequence
  Synthetic oligonucleotide
gggcgcacaggggccccatgcacgctacca

SEQ ID NO: 183358 - DNA, 30 bp, Artificial Sequence
  Synthetic oligonucleotide
tctaacgagattatctgaattagtctacca

SEQ ID NO: 183359 - DNA, 30 bp, Artificial Sequence
  Synthetic oligonucleotide
tgctgaattttctgaccccgtaaagtacca

SEQ ID NO: 183360 - DNA, 30 bp, Artificial Sequence
  Synthetic oligonucleotide
gtgccttgcgcaggcacctccgccgtacca

SEQ ID NO: 183361 - DNA, 30 bp, Artificial Sequence
  Synthetic oligonucleotide
tcaagatcctgaaccgacaaaaaggtacca

SEQ ID NO: 183362 - DNA, 30 bp, Artificial Sequence
  Synthetic oligonucleotide
actggtaccctagaaataatcgaggtacca

SEQ ID NO: 183363 - DNA, 30 bp, Artificial Sequence
  Synthetic oligonucleotide
attcaagggggacgacatcgccatgtacca

SEQ ID NO: 183364 - DNA, 30 bp, Artificial Sequence
  Synthetic oligonucleotide
gaggctcgcgaataatagcgttttgtacca

SEQ ID NO: 183365 - DNA, 30 bp, Artificial Sequence
  Synthetic oligonucleotide
ggatagattgtcttcgatgtgatcttacca

SEQ ID NO: 183366 - DNA, 30 bp, Artificial Sequence
  Synthetic oligonucleotide
gagaggactttctcacccaactaaaaccca

SEQ ID NO: 183367 - DNA, 30 bp, Artificial Sequence
  Synthetic oligonucleotide
gctagggacggtcctcccattaacaaccca

SEQ ID NO: 183368 - DNA, 30 bp, Artificial Sequence
  Synthetic oligonucleotide
gactatcctgagatatccgtacacaaccca

SEQ ID NO: 183369 - DNA, 30 bp, Artificial Sequence
  Synthetic oligonucleotide
cgttcgcgggtgcacagaggaacccaccca

SEQ ID NO: 183370 - DNA, 30 bp, Artificial Sequence
  Synthetic oligonucleotide
aatcattcccgttaaaagtagtgccaccca

SEQ ID NO: 183371 - DNA, 30 bp, Artificial Sequence
  Synthetic oligonucleotide
aaagtgtatttcctaaggatcatgcaccca

SEQ ID NO: 183372 - DNA, 30 bp, Artificial Sequence
  Synthetic oligonucleotide
atggggtgaccgatggattgagctcaccca

SEQ ID NO: 183373 - DNA, 30 bp, Artificial Sequence
  Synthetic oligonucleotide
gtaaaagggggcagatctattaacgaccca

SEQ ID NO: 183374 - DNA, 30 bp, Artificial Sequence
  Synthetic oligonucleotide
gctattcatagtgttgaaaaggccgaccca

SEQ ID NO: 183375 - DNA, 30 bp, Artificial Sequence
  Synthetic oligonucleotide
tgggaacaaagtattcggcgtcaggaccca

SEQ ID NO: 183376 - DNA, 30 bp, Artificial Sequence
  Synthetic oligonucleotide
cacgcgcgcggcggcttcttacaataccca

SEQ ID NO: 183377 - DNA, 30 bp, Artificial Sequence
  Synthetic oligonucleotide
ccgaattaagtggtcttcctacactaccca

SEQ ID NO: 183378 - DNA, 30 bp, Artificial Sequence
  Synthetic oligonucleotide
ggacaactggatggataaggtcgttaccca

SEQ ID NO: 183379 - DNA, 30 bp, Artificial Sequence
  Synthetic oligonucleotide
aacccgcgaggtgtgtacgtgtagacccca

SEQ ID NO: 183380 - DNA, 30 bp, Artificial Sequence
  Synthetic oligonucleotide
cgcacgcactcccacgataagaggacccca

SEQ ID NO: 183381 - DNA, 30 bp, Artificial Sequence
  Synthetic oligonucleotide
ccgtgagagcgctgactagatatgacccca

SEQ ID NO: 183382 - DNA, 30 bp, Artificial Sequence
  Synthetic oligonucleotide
agacttgaaatggcacggttttcaccccca

SEQ ID NO: 183383 - DNA, 30 bp, Artificial Sequence
  Synthetic oligonucleotide
gtccatgggcctgaatcaatagtcccccca

SEQ ID NO: 183384 - DNA, 30 bp, Artificial Sequence
  Synthetic oligonucleotide
cggagattccgccggttaatgtggccccca

SEQ ID NO: 183385 - DNA, 30 bp, Artificial Sequence
  Synthetic oligonucleotide
tgataggctaacgtctgtaccgtgccccca

SEQ ID NO: 183386 - DNA, 30 bp, Artificial Sequence
  Synthetic oligonucleotide
gggattagatcgggaggcccgctagcccca

SEQ ID NO: 183387 - DNA, 30 bp, Artificial Sequence
  Synthetic oligonucleotide
gcaatggttggaacattagttctagcccca

SEQ ID NO: 183388 - DNA, 30 bp, Artificial Sequence
  Synthetic oligonucleotide
gttacgcatcctgccaagattcagtcccca

SEQ ID NO: 183389 - DNA, 30 bp, Artificial Sequence
  Synthetic oligonucleotide
gagtacgagaatccggacagagagtcccca

SEQ ID NO: 183390 - DNA, 30 bp, Artificial Sequence
  Synthetic oligonucleotide
agaactagtacactcgacagcgagtcccca

SEQ ID NO: 183391 - DNA, 30 bp, Artificial Sequence
  Synthetic oligonucleotide
tcgagctatgcagtcagtattccgtcccca

SEQ ID NO: 183392 - DNA, 30 bp, Artificial Sequence
  Synthetic oligonucleotide
ggtgccggaaggggcactataatttcccca

SEQ ID NO: 183393 - DNA, 30 bp, Artificial Sequence
  Synthetic oligonucleotide
gccttcatgcggcgtgtacagggaagccca

SEQ ID NO: 183394 - DNA, 30 bp, Artificial Sequence
  Synthetic oligonucleotide
cgtatccaattttgcggtataataagccca

SEQ ID NO: 183395 - DNA, 30 bp, Artificial Sequence
  Synthetic oligonucleotide
aaacctgtcgacgcgatgcataacagccca

SEQ ID NO: 183396 - DNA, 30 bp, Artificial Sequence
  Synthetic oligonucleotide
gccactcagtgacaaaaagcagatagccca

SEQ ID NO: 183397 - DNA, 30 bp, Artificial Sequence
  Synthetic oligonucleotide
caattgcgatcttcaccaacatgtagccca

SEQ ID NO: 183398 - DNA, 30 bp, Artificial Sequence
  Synthetic oligonucleotide
cacttgcgaagatcaggaaatttgcgccca

SEQ ID NO: 183399 - DNA, 30 bp, Artificial Sequence
  Synthetic oligonucleotide
tcaacatactagcgaactctgtacggccca

SEQ ID NO: 183400 - DNA, 30 bp, Artificial Sequence
  Synthetic oligonucleotide
aattgatcggaacatgaacaagtgggccca

SEQ ID NO: 183401 - DNA, 30 bp, Artificial Sequence
  Synthetic oligonucleotide
tcgtcgtgtcattcaaatattagtggccca

SEQ ID NO: 183402 - DNA, 30 bp, Artificial Sequence
  Synthetic oligonucleotide
ggtggttgccaccgtgagccgattggccca

SEQ ID NO: 183403 - DNA, 30 bp, Artificial Sequence
  Synthetic oligonucleotide
tggcactctggtgctgaggttcacatccca

SEQ ID NO: 183404 - DNA, 30 bp, Artificial Sequence
  Synthetic oligonucleotide
aagcccatgcgtggagttacttcgctccca

SEQ ID NO: 183405 - DNA, 30 bp, Artificial Sequence
  Synthetic oligonucleotide
tttgaatgggcaacgatgtgtctgctccca

SEQ ID NO: 183406 - DNA, 30 bp, Artificial Sequence
  Synthetic oligonucleotide
tccgacggagccacagacgaagttctccca

SEQ ID NO: 183407 - DNA, 30 bp, Artificial Sequence
  Synthetic oligonucleotide
gaaggacctattcgtgaaagcgccgtccca

SEQ ID NO: 183408 - DNA, 30 bp, Artificial Sequence
  Synthetic oligonucleotide
cacgagaggggcgctatcatgtccgtccca

SEQ ID NO: 183409 - DNA, 30 bp, Artificial Sequence
  Synthetic oligonucleotide
gtcctcgcgaggcgagtcgaagatgtccca

SEQ ID NO: 183410 - DNA, 30 bp, Artificial Sequence
  Synthetic oligonucleotide
tttagcgaatggcgatcctagcacttccca

SEQ ID NO: 183411 - DNA, 30 bp, Artificial Sequence
  Synthetic oligonucleotide
acctaaaattctgcctcaccgaccttccca

SEQ ID NO: 183412 - DNA, 30 bp, Artificial Sequence
  Synthetic oligonucleotide
aagcaagacgggcgacaagtacgcttccca

SEQ ID NO: 183413 - DNA, 30 bp, Artificial Sequence
  Synthetic oligonucleotide
tcggaggtaccaaagggtttatgcttccca

SEQ ID NO: 183414 - DNA, 30 bp, Artificial Sequence
  Synthetic oligonucleotide
cgttccgctggggacggatctacgttccca

SEQ ID NO: 183415 - DNA, 30 bp, Artificial Sequence
  Synthetic oligonucleotide
gggggataccccgtatcgcagtcgttccca

SEQ ID NO: 183416 - DNA, 30 bp, Artificial Sequence
  Synthetic oligonucleotide
gtttgattgccgggcttatctgtgaagcca

SEQ ID NO: 183417 - DNA, 30 bp, Artificial Sequence
  Synthetic oligonucleotide
gaatacggagcgcttcaacttaaacagcca

SEQ ID NO: 183418 - DNA, 30 bp, Artificial Sequence
  Synthetic oligonucleotide
gcataaagataggcgctttgcatacagcca

SEQ ID NO: 183419 - DNA, 30 bp, Artificial Sequence
  Synthetic oligonucleotide
tcgcaacactgggtctaggaaattcagcca

SEQ ID NO: 183420 - DNA, 30 bp, Artificial Sequence
  Synthetic oligonucleotide
gccagcgtaggggcggtctttggagagcca

SEQ ID NO: 183421 - DNA, 30 bp, Artificial Sequence
  Synthetic oligonucleotide
cgcaagaatacaaggtctacaaaggagcca

SEQ ID NO: 183422 - DNA, 30 bp, Artificial Sequence
  Synthetic oligonucleotide
gggattacattccccctaaggtatgagcca

SEQ ID NO: 183423 - DNA, 30 bp, Artificial Sequence
  Synthetic oligonucleotide
aggtacgaaatgggcattattcctgagcca

SEQ ID NO: 183424 - DNA, 30 bp, Artificial Sequence
  Synthetic oligonucleotide
gttaaggaaagattgaaagcctctgagcca

SEQ ID NO: 183425 - DNA, 30 bp, Artificial Sequence
  Synthetic oligonucleotide
gcgggcgaggcatccacttcaaaatagcca

SEQ ID NO: 183426 - DNA, 30 bp, Artificial Sequence
  Synthetic oligonucleotide
ggtacgtgatatttttcagcggcatagcca

SEQ ID NO: 183427 - DNA, 31 bp, Artificial Sequence
  Synthetic oligonucleotide
tcgggttaatactcagacaacatcatagcca

SEQ ID NO: 183428 - DNA, 30 bp, Artificial Sequence
  Synthetic oligonucleotide
taactacgcgcatgccgtgagatctagcca

SEQ ID NO: 183429 - DNA, 30 bp, Artificial Sequence
  Synthetic oligonucleotide
gttcaattaacgcaatcatcgtgaacgcca

SEQ ID NO: 183430 - DNA, 30 bp, Artificial Sequence
  Synthetic oligonucleotide
cctccataattgggacacctgttaacgcca

SEQ ID NO: 183431 - DNA, 30 bp, Artificial Sequence
  Synthetic oligonucleotide
cacatagtgcccctccaatgtttaacgcca

SEQ ID NO: 183432 - DNA, 30 bp, Artificial Sequence
  Synthetic oligonucleotide
agaccatcacttatcattactcgcacgcca

SEQ ID NO: 183433 - DNA, 30 bp, Artificial Sequence
  Synthetic oligonucleotide
ttgctagacgagtactgagcaaagacgcca

SEQ ID NO: 183434 - DNA, 30 bp, Artificial Sequence
  Synthetic oligonucleotide
gtaagctgctgcgttggcacacaaccgcca

SEQ ID NO: 183435 - DNA, 30 bp, Artificial Sequence
  Synthetic oligonucleotide
atttggtctcggaagaaaagcgcaccgcca

SEQ ID NO: 183436 - DNA, 30 bp, Artificial Sequence
  Synthetic oligonucleotide
taatctagaattaataccgggactccgcca

SEQ ID NO: 183437 - DNA, 30 bp, Artificial Sequence
  Synthetic oligonucleotide
acttcagagtctgggaatttatgtccgcca

SEQ ID NO: 183438 - DNA, 30 bp, Artificial Sequence
  Synthetic oligonucleotide
tgtaaagacgtcaccgtcaggcaggcgcca

SEQ ID NO: 183439 - DNA, 30 bp, Artificial Sequence
  Synthetic oligonucleotide
aggcctactcatcatgttcgataggcgcca

SEQ ID NO: 183440 - DNA, 30 bp, Artificial Sequence
  Synthetic oligonucleotide
ggaggcttgcgttacctggatagggcgcca

SEQ ID NO: 183441 - DNA, 30 bp, Artificial Sequence
  Synthetic oligonucleotide
aaccggggaggcctggggtcgatggcgcca

SEQ ID NO: 183442 - DNA, 30 bp, Artificial Sequence
  Synthetic oligonucleotide
catggcccattaataagtcatgatgcgcca

SEQ ID NO: 183443 - DNA, 30 bp, Artificial Sequence
  Synthetic oligonucleotide
tggtggacacgctatttagcaggtgcgcca

SEQ ID NO: 183444 - DNA, 30 bp, Artificial Sequence
  Synthetic oligonucleotide
cggacatatgggtcccttacgtactcgcca

SEQ ID NO: 183445 - DNA, 30 bp, Artificial Sequence
  Synthetic oligonucleotide
caggtaatacggggtttggtcttctcgcca

SEQ ID NO: 183446 - DNA, 30 bp, Artificial Sequence
  Synthetic oligonucleotide
agaaaatttggtagcagggaattgaggcca

SEQ ID NO: 183447 - DNA, 30 bp, Artificial Sequence
  Synthetic oligonucleotide
gaacatgtcatcctaagcagccaacggcca

SEQ ID NO: 183448 - DNA, 30 bp, Artificial Sequence
  Synthetic oligonucleotide
tggactcaacgctacaacgtagcccggcca

SEQ ID NO: 183449 - DNA, 30 bp, Artificial Sequence
  Synthetic oligonucleotide
cgcacattcaccgaacatgccggagggcca

SEQ ID NO: 183450 - DNA, 30 bp, Artificial Sequence
  Synthetic oligonucleotide
tgaaaggaccctctgcaatcgttagggcca

SEQ ID NO: 183451 - DNA, 30 bp, Artificial Sequence
  Synthetic oligonucleotide
agggtccatacgtgcagaatcacggggcca

SEQ ID NO: 183452 - DNA, 30 bp, Artificial Sequence
  Synthetic oligonucleotide
tggcgtattgcttgctaatgcatggggcca

SEQ ID NO: 183453 - DNA, 30 bp, Artificial Sequence
  Synthetic oligonucleotide
actactagaggaacgagtaagaatgggcca

SEQ ID NO: 183454 - DNA, 30 bp, Artificial Sequence
  Synthetic oligonucleotide
tgggcgataggtcaaattaggattgggcca

SEQ ID NO: 183455 - DNA, 30 bp, Artificial Sequence
  Synthetic oligonucleotide
aaaacgattgcggtagtagagggatggcca

SEQ ID NO: 183456 - DNA, 30 bp, Artificial Sequence
  Synthetic oligonucleotide
gtatgggggatggatcgaggagtctggcca

SEQ ID NO: 183457 - DNA, 30 bp, Artificial Sequence
  Synthetic oligonucleotide
gcgttccagtgtcattcgtattcttggcca

SEQ ID NO: 183458 - DNA, 30 bp, Artificial Sequence
  Synthetic oligonucleotide
cgatcgcgggaggcaacatctagaatgcca

SEQ ID NO: 183459 - DNA, 30 bp, Artificial Sequence
  Synthetic oligonucleotide
tcgtccctggcaggtcagaaagagatgcca

SEQ ID NO: 183460 - DNA, 30 bp, Artificial Sequence
  Synthetic oligonucleotide
gtagtggctaaatctgcctgatagatgcca

SEQ ID NO: 183461 - DNA, 30 bp, Artificial Sequence
  Synthetic oligonucleotide
caccgccggcaagtccggtcagcgatgcca

SEQ ID NO: 183462 - DNA, 30 bp, Artificial Sequence
  Synthetic oligonucleotide
aggcatcaccgggtacggcacgcgatgcca

SEQ ID NO: 183463 - DNA, 30 bp, Artificial Sequence
  Synthetic oligonucleotide
catcccgccatagcagccagcattatgcca

SEQ ID NO: 183464 - DNA, 30 bp, Artificial Sequence
  Synthetic oligonucleotide
cgagcggcggaactacggatacgactgcca

SEQ ID NO: 183465 - DNA, 30 bp, Artificial Sequence
  Synthetic oligonucleotide
gccaacagttggcggtaacaccatctgcca

SEQ ID NO: 183466 - DNA, 30 bp, Artificial Sequence
  Synthetic oligonucleotide
gttagtgttaaaatattacaaagtctgcca

SEQ ID NO: 183467 - DNA, 30 bp, Artificial Sequence
  Synthetic oligonucleotide
caggtagattcgggatgaggccgagtgcca

SEQ ID NO: 183468 - DNA, 30 bp, Artificial Sequence
  Synthetic oligonucleotide
ttcgtggcttaaaatgtaggtcatgtgcca

SEQ ID NO: 183469 - DNA, 30 bp, Artificial Sequence
  Synthetic oligonucleotide
gattagtaagctggcggttggaaattgcca

SEQ ID NO: 183470 - DNA, 30 bp, Artificial Sequence
  Synthetic oligonucleotide
agtagaaggttcggagatgtttgattgcca

SEQ ID NO: 183471 - DNA, 30 bp, Artificial Sequence
  Synthetic oligonucleotide
gcaatgtcgcgtcaagcagacgatttgcca

SEQ ID NO: 183472 - DNA, 30 bp, Artificial Sequence
  Synthetic oligonucleotide
catcttcgttacttgcctcagtcaaatcca

SEQ ID NO: 183473 - DNA, 30 bp, Artificial Sequence
  Synthetic oligonucleotide
aggttcgtacggtgcccggctgtaaatcca

SEQ ID NO: 183474 - DNA, 30 bp, Artificial Sequence
  Synthetic oligonucleotide
tacacgaaatgatccagttgtaggaatcca

SEQ ID NO: 183475 - DNA, 30 bp, Artificial Sequence
  Synthetic oligonucleotide
agaagagcgttaccacggtctggacatcca

SEQ ID NO: 183476 - DNA, 30 bp, Artificial Sequence
  Synthetic oligonucleotide
gcggtagataaagaagcttggatacatcca

SEQ ID NO: 183477 - DNA, 30 bp, Artificial Sequence
  Synthetic oligonucleotide
catctggattacatgtttatgggccatcca

SEQ ID NO: 183478 - DNA, 30 bp, Artificial Sequence
  Synthetic oligonucleotide
aagcgttgaggaacactgaacctgcatcca

SEQ ID NO: 183479 - DNA, 30 bp, Artificial Sequence
  Synthetic oligonucleotide
ctcataaggtgtgttaaactcctgcatcca

SEQ ID NO: 183480 - DNA, 30 bp, Artificial Sequence
  Synthetic oligonucleotide
cgacaaaattttcatcggttgaatcatcca

SEQ ID NO: 183481 - DNA, 30 bp, Artificial Sequence
  Synthetic oligonucleotide
accggcaagacccgtataatataggatcca

SEQ ID NO: 183482 - DNA, 30 bp, Artificial Sequence
  Synthetic oligonucleotide
cgatcatgaatgaaaatgggtaactatcca

SEQ ID NO: 183483 - DNA, 30 bp, Artificial Sequence
  Synthetic oligonucleotide
aagggaaacacattatccccactgtatcca

SEQ ID NO: 183484 - DNA, 30 bp, Artificial Sequence
  Synthetic oligonucleotide
agggtcacaaaatgaaggtcgggaactcca

SEQ ID NO: 183485 - DNA, 30 bp, Artificial Sequence
  Synthetic oligonucleotide
ggtaaatgattaagggtaaagaagactcca

SEQ ID NO: 183486 - DNA, 30 bp, Artificial Sequence
  Synthetic oligonucleotide
atagcattggctaaggacatgcctactcca

SEQ ID NO: 183487 - DNA, 30 bp, Artificial Sequence
  Synthetic oligonucleotide
tcatcaaaaacagaaactaggatccctcca

SEQ ID NO: 183488 - DNA, 30 bp, Artificial Sequence
  Synthetic oligonucleotide
gaccaaaataaatttgacccgccgcctcca

SEQ ID NO: 183489 - DNA, 30 bp, Artificial Sequence
  Synthetic oligonucleotide
ctgatggaatgatgggcaacggtgcctcca

SEQ ID NO: 183490 - DNA, 30 bp, Artificial Sequence
  Synthetic oligonucleotide
ataccgcatcacagctctgctaatcctcca

SEQ ID NO: 183491 - DNA, 30 bp, Artificial Sequence
  Synthetic oligonucleotide
ttgctctcgttctgtaatagcacagctcca

SEQ ID NO: 183492 - DNA, 30 bp, Artificial Sequence
  Synthetic oligonucleotide
gtagacccaatctcaatacacagggctcca

SEQ ID NO: 183493 - DNA, 30 bp, Artificial Sequence
  Synthetic oligonucleotide
acgtaaggctgtatctgacgccctgctcca

SEQ ID NO: 183494 - DNA, 30 bp, Artificial Sequence
  Synthetic oligonucleotide
actgaaggtgggctgagtcacctatctcca

SEQ ID NO: 183495 - DNA, 30 bp, Artificial Sequence
  Synthetic oligonucleotide
cggtataggaatctcccttagccaagtcca

SEQ ID NO: 183496 - DNA, 30 bp, Artificial Sequence
  Synthetic oligonucleotide
tcaagctgaatggaatcgtcaaagagtcca

SEQ ID NO: 183497 - DNA, 30 bp, Artificial Sequence
  Synthetic oligonucleotide
ttaccagggatcactcaacgacggagtcca

SEQ ID NO: 183498 - DNA, 30 bp, Artificial Sequence
  Synthetic oligonucleotide
gagcgttggcaaattgtactctaacgtcca

SEQ ID NO: 183499 - DNA, 30 bp, Artificial Sequence
  Synthetic oligonucleotide
ccgattcgcttagcgacatgagcacgtcca

SEQ ID NO: 183500 - DNA, 30 bp, Artificial Sequence
  Synthetic oligonucleotide
ggtgggagttttaaagttcgtggacgtcca

SEQ ID NO: 183501 - DNA, 30 bp, Artificial Sequence
  Synthetic oligonucleotide
tctgtagaaggggtcggcttttgacgtcca

SEQ ID NO: 183502 - DNA, 30 bp, Artificial Sequence
  Synthetic oligonucleotide
cggagtcaatcttgatcccgggaccgtcca

SEQ ID NO: 183503 - DNA, 30 bp, Artificial Sequence
  Synthetic oligonucleotide
ggctgaattctaagttgcaattagggtcca

SEQ ID NO: 183504 - DNA, 30 bp, Artificial Sequence
  Synthetic oligonucleotide
cggaaaaccgtactcctaacgaggggtcca

SEQ ID NO: 183505 - DNA, 30 bp, Artificial Sequence
  Synthetic oligonucleotide
cgctaggggctacgatagcgcactggtcca

SEQ ID NO: 183506 - DNA, 30 bp, Artificial Sequence
  Synthetic oligonucleotide
tgacgcgaggaacaaagtaagtttggtcca

SEQ ID NO: 183507 - DNA, 30 bp, Artificial Sequence
  Synthetic oligonucleotide
aagccacggcccgggcgatctaaaattcca

SEQ ID NO: 183508 - DNA, 30 bp, Artificial Sequence
  Synthetic oligonucleotide
cggccggtaggctgctttataagaattcca

SEQ ID NO: 183509 - DNA, 28 bp, Artificial Sequence
  Synthetic oligonucleotide
tagggcgggcgattccgtaataattcca

SEQ ID NO: 183510 - DNA, 30 bp, Artificial Sequence
  Synthetic oligonucleotide
cggacgggcacccgtgcggttttaattcca

SEQ ID NO: 183511 - DNA, 30 bp, Artificial Sequence
  Synthetic oligonucleotide
catcttgcgaaactactgggggacattcca

SEQ ID NO: 183512 - DNA, 30 bp, Artificial Sequence
  Synthetic oligonucleotide
gcagtacaatccgcgaagctcctcattcca

SEQ ID NO: 183513 - DNA, 31 bp, Artificial Sequence
  Synthetic oligonucleotide
tgcttaatctgcgtacacggtagaacttcca

SEQ ID NO: 183514 - DNA, 30 bp, Artificial Sequence
  Synthetic oligonucleotide
ccgcatatgattcccgtggactgacttcca

SEQ ID NO: 183515 - DNA, 30 bp, Artificial Sequence
  Synthetic oligonucleotide
atatacctgagtggcctatacgagcttcca

SEQ ID NO: 183516 - DNA, 30 bp, Artificial Sequence
  Synthetic oligonucleotide
gatactgcgtcttcaaggggtgagcttcca

SEQ ID NO: 183517 - DNA, 30 bp, Artificial Sequence
  Synthetic oligonucleotide
tgtcaagcacccagtaagagcccagttcca

SEQ ID NO: 183518 - DNA, 30 bp, Artificial Sequence
  Synthetic oligonucleotide
taggttggtctgcgcgcctacagagttcca

SEQ ID NO: 183519 - DNA, 30 bp, Artificial Sequence
  Synthetic oligonucleotide
cacagcggttcaccggtgcacatcgttcca

SEQ ID NO: 183520 - DNA, 30 bp, Artificial Sequence
  Synthetic oligonucleotide
gtacaacagcaactcctcaatgaggttcca

SEQ ID NO: 183521 - DNA, 30 bp, Artificial Sequence
  Synthetic oligonucleotide
tgggagcctccggtcttctgattggttcca

SEQ ID NO: 183522 - DNA, 30 bp, Artificial Sequence
  Synthetic oligonucleotide
acgtatgtcttgctcgatcttgctgttcca

SEQ ID NO: 183523 - DNA, 30 bp, Artificial Sequence
  Synthetic oligonucleotide
tgtgggagtagaattggggcaagtgttcca

SEQ ID NO: 183524 - DNA, 30 bp, Artificial Sequence
  Synthetic oligonucleotide
ctcgaagaagagtaagcgacatcgtttcca

SEQ ID NO: 183525 - DNA, 30 bp, Artificial Sequence
  Synthetic oligonucleotide
cataagtgaaagattttgaactcgtttcca

SEQ ID NO: 183526 - DNA, 30 bp, Artificial Sequence
  Synthetic oligonucleotide
acattagacaggccgtagaagtacaaagca

SEQ ID NO: 183527 - DNA, 30 bp, Artificial Sequence
  Synthetic oligonucleotide
tatgcagaagactctcacctcctcaaagca

SEQ ID NO: 183528 - DNA, 30 bp, Artificial Sequence
  Synthetic oligonucleotide
gtcctcatcatactttgctaccaacaagca

SEQ ID NO: 183529 - DNA, 30 bp, Artificial Sequence
  Synthetic oligonucleotide
acagtcgttttcaaacgaactacacaagca

SEQ ID NO: 183530 - DNA, 30 bp, Artificial Sequence
  Synthetic oligonucleotide
gactaggtagaacactcactagtacaagca

SEQ ID NO: 183531 - DNA, 30 bp, Artificial Sequence
  Synthetic oligonucleotide
ggtattgcctgacgcacgaagagccaagca

SEQ ID NO: 183532 - DNA, 30 bp, Artificial Sequence
  Synthetic oligonucleotide
aggctgcattattcggcgataggccaagca

SEQ ID NO: 183533 - DNA, 30 bp, Artificial Sequence
  Synthetic oligonucleotide
gatgagtagtgttcgccggcagcgcaagca

SEQ ID NO: 183534 - DNA, 30 bp, Artificial Sequence
  Synthetic oligonucleotide
aatccgtaggtggtacaggttcaagaagca

SEQ ID NO: 183535 - DNA, 30 bp, Artificial Sequence
  Synthetic oligonucleotide
ttcaaatgcatgatgcgaactgaagaagca

SEQ ID NO: 183536 - DNA, 30 bp, Artificial Sequence
  Synthetic oligonucleotide
gatgtccggcccgcgacagtgcgggaagca

SEQ ID NO: 183537 - DNA, 30 bp, Artificial Sequence
  Synthetic oligonucleotide
acaaatctacccaatgaacgtgtataagca

SEQ ID NO: 183538 - DNA, 30 bp, Artificial Sequence
  Synthetic oligonucleotide
gcatgagccttccaagaacctctgtaagca

SEQ ID NO: 183539 - DNA, 30 bp, Artificial Sequence
  Synthetic oligonucleotide
atgatttgtgcataccgggagaattaagca

SEQ ID NO: 183540 - DNA, 30 bp, Artificial Sequence
  Synthetic oligonucleotide
tcgggcataccaggaaggcttttttaagca

SEQ ID NO: 183541 - DNA, 30 bp, Artificial Sequence
  Synthetic oligonucleotide
gtatcagaaagtcaacccgttggaacagca

SEQ ID NO: 183542 - DNA, 30 bp, Artificial Sequence
  Synthetic oligonucleotide
gcgatcaagacaatcattgttccgacagca

SEQ ID NO: 183543 - DNA, 30 bp, Artificial Sequence
  Synthetic oligonucleotide
tatcatctagtactaaatactgggacagca

SEQ ID NO: 183544 - DNA, 30 bp, Artificial Sequence
  Synthetic oligonucleotide
gttagttgcacgaaggtccacagtacagca

SEQ ID NO: 183545 - DNA, 30 bp, Artificial Sequence
  Synthetic oligonucleotide
cgatgggtctcggtgggtctataaccagca

SEQ ID NO: 183546 - DNA, 30 bp, Artificial Sequence
  Synthetic oligonucleotide
cgatgcgttattcgactaacaaagccagca

SEQ ID NO: 183547 - DNA, 30 bp, Artificial Sequence
  Synthetic oligonucleotide
aatcgggggtttttccccgggaagccagca

SEQ ID NO: 183548 - DNA, 30 bp, Artificial Sequence
  Synthetic oligonucleotide
acccgagaaagcgcctgccgtctgccagca

SEQ ID NO: 183549 - DNA, 30 bp, Artificial Sequence
  Synthetic oligonucleotide
gtctatatgacgaccctaattgttccagca

SEQ ID NO: 183550 - DNA, 30 bp, Artificial Sequence
  Synthetic oligonucleotide
atatctaatacctgcatttctagagcagca

SEQ ID NO: 183551 - DNA, 30 bp, Artificial Sequence
  Synthetic oligonucleotide
gctggcgagtaggaactttccaacgcagca

SEQ ID NO: 183552 - DNA, 30 bp, Artificial Sequence
  Synthetic oligonucleotide
gcggcgaagcaaggtgcagtgcaggcagca

SEQ ID NO: 183553 - DNA, 30 bp, Artificial Sequence
  Synthetic oligonucleotide
cagagacgatggcccggagttgaggcagca

SEQ ID NO: 183554 - DNA, 30 bp, Artificial Sequence
  Synthetic oligonucleotide
atgaccggtctgcccagtgagggtgcagca

SEQ ID NO: 183555 - DNA, 30 bp, Artificial Sequence
  Synthetic oligonucleotide
tgaatctctgggatccaccgcgagtcagca

SEQ ID NO: 183556 - DNA, 30 bp, Artificial Sequence
  Synthetic oligonucleotide
tcaaagtcgtattcaatggatgagtcagca

SEQ ID NO: 183557 - DNA, 30 bp, Artificial Sequence
  Synthetic oligonucleotide
catagaaccggcggagggaattattcagca

SEQ ID NO: 183558 - DNA, 30 bp, Artificial Sequence
  Synthetic oligonucleotide
aagctgcgtaatgaaacggatgtttcagca

SEQ ID NO: 183559 - DNA, 30 bp, Artificial Sequence
  Synthetic oligonucleotide
acatgggggttctcgtccggcaaaagagca

SEQ ID NO: 183560 - DNA, 30 bp, Artificial Sequence
  Synthetic oligonucleotide
agcgaaatagattcgtatctcggaagagca

SEQ ID NO: 183561 - DNA, 30 bp, Artificial Sequence
  Synthetic oligonucleotide
gacacggaaagcatcccgcactgaagagca

SEQ ID NO: 183562 - DNA, 30 bp, Artificial Sequence
  Synthetic oligonucleotide
ctgtagcccctaccgtagtaattcagagca

SEQ ID NO: 183563 - DNA, 30 bp, Artificial Sequence
  Synthetic oligonucleotide
tagtatcaacagggacgcaattagagagca

SEQ ID NO: 183564 - DNA, 30 bp, Artificial Sequence
  Synthetic oligonucleotide
tgcactcacatggcgcgtcggtaacgagca

SEQ ID NO: 183565 - DNA, 30 bp, Artificial Sequence
  Synthetic oligonucleotide
ttaaaaaagcaagtaaggtgagaccgagca

SEQ ID NO: 183566 - DNA, 29 bp, Artificial Sequence
  Synthetic oligonucleotide
ggcctgagttcgcaaagatttcaggagca

SEQ ID NO: 183567 - DNA, 30 bp, Artificial Sequence
  Synthetic oligonucleotide
tcaggtcatgggcgctactgtttaggagca

SEQ ID NO: 183568 - DNA, 30 bp, Artificial Sequence
  Synthetic oligonucleotide
attggcagagggtgtcccatgaacggagca

SEQ ID NO: 183569 - DNA, 30 bp, Artificial Sequence
  Synthetic oligonucleotide
cctggcggtgtaatggggccgcacggagca

SEQ ID NO: 183570 - DNA, 30 bp, Artificial Sequence
  Synthetic oligonucleotide
aggctaatacggcactcttcagtgggagca

SEQ ID NO: 183571 - DNA, 30 bp, Artificial Sequence
  Synthetic oligonucleotide
gtcgaacttagaacattggtgaatggagca

SEQ ID NO: 183572 - DNA, 30 bp, Artificial Sequence
  Synthetic oligonucleotide
cctagaggcaatgcacacattgaatgagca

SEQ ID NO: 183573 - DNA, 30 bp, Artificial Sequence
  Synthetic oligonucleotide
gtgtgacagggagcaagcacgcaaatagca

SEQ ID NO: 183574 - DNA, 30 bp, Artificial Sequence
  Synthetic oligonucleotide
tcaggcacaccgcccaggtatcacatagca

SEQ ID NO: 183575 - DNA, 30 bp, Artificial Sequence
  Synthetic oligonucleotide
ggcccacgatttattgtaatggacatagca

SEQ ID NO: 183576 - DNA, 30 bp, Artificial Sequence
  Synthetic oligonucleotide
cgtccacgcctatggacatcgaccatagca

SEQ ID NO: 183577 - DNA, 30 bp, Artificial Sequence
  Synthetic oligonucleotide
aaggcagattttaaaactgcactcatagca

SEQ ID NO: 183578 - DNA, 30 bp, Artificial Sequence
  Synthetic oligonucleotide
gttgagccgtattgcgtcagttgtatagca

SEQ ID NO: 183579 - DNA, 30 bp, Artificial Sequence
  Synthetic oligonucleotide
taggaacgcgcaatgttcgtcattatagca

SEQ ID NO: 183580 - DNA, 30 bp, Artificial Sequence
  Synthetic oligonucleotide
cgcccggtgaatacttttaattctctagca

SEQ ID NO: 183581 - DNA, 30 bp, Artificial Sequence
  Synthetic oligonucleotide
gtcacagacggattcgtatgacgtctagca

SEQ ID NO: 183582 - DNA, 30 bp, Artificial Sequence
  Synthetic oligonucleotide
aaaccggctaggcatgcaggttgtctagca

SEQ ID NO: 183583 - DNA, 30 bp, Artificial Sequence
  Synthetic oligonucleotide
ttacaggaacatgacgatgtaacagtagca

SEQ ID NO: 183584 - DNA, 30 bp, Artificial Sequence
  Synthetic oligonucleotide
gaagaccgttggtatcgtagtagcgtagca

SEQ ID NO: 183585 - DNA, 30 bp, Artificial Sequence
  Synthetic oligonucleotide
taataagcgaaggcctataggtctgtagca

SEQ ID NO: 183586 - DNA, 30 bp, Artificial Sequence
  Synthetic oligonucleotide
atgtaatgttatgtaggagccagtgtagca

SEQ ID NO: 183587 - DNA, 30 bp, Artificial Sequence
  Synthetic oligonucleotide
ccgtggggcaagtgtctttgacagttagca

SEQ ID NO: 183588 - DNA, 30 bp, Artificial Sequence
  Synthetic oligonucleotide
gtttcatttgagagactcgtctggttagca

SEQ ID NO: 183589 - DNA, 30 bp, Artificial Sequence
  Synthetic oligonucleotide
ctgcgatgggtggtcgcctagagtttagca

SEQ ID NO: 183590 - DNA, 30 bp, Artificial Sequence
  Synthetic oligonucleotide
acatgcatgggtggcgtgtagtttttagca

SEQ ID NO: 183591 - DNA, 30 bp, Artificial Sequence
  Synthetic oligonucleotide
acagcgggtgactcaagtgcccgaaacgca

SEQ ID NO: 183592 - DNA, 30 bp, Artificial Sequence
  Synthetic oligonucleotide
gtggatacgccaagtatttgatacaacgca

SEQ ID NO: 183593 - DNA, 30 bp, Artificial Sequence
  Synthetic oligonucleotide
agttcatgccccctgccgaagagcaacgca

SEQ ID NO: 183594 - DNA, 30 bp, Artificial Sequence
  Synthetic oligonucleotide
gacggtagcagccgtcgtagtatcaacgca

SEQ ID NO: 183595 - DNA, 30 bp, Artificial Sequence
  Synthetic oligonucleotide
agcgagtcatcgaattgagatgtcaacgca

SEQ ID NO: 183596 - DNA, 30 bp, Artificial Sequence
  Synthetic oligonucleotide
aagtatctgagcacaatgttacttaacgca

SEQ ID NO: 183597 - DNA, 30 bp, Artificial Sequence
  Synthetic oligonucleotide
agagtcgtcataagtgcagttccacacgca

SEQ ID NO: 183598 - DNA, 30 bp, Artificial Sequence
  Synthetic oligonucleotide
tttacataatggatacgaatgcaccacgca

SEQ ID NO: 183599 - DNA, 30 bp, Artificial Sequence
  Synthetic oligonucleotide
gggcttgaaagttgggatcatggccacgca

SEQ ID NO: 183600 - DNA, 30 bp, Artificial Sequence
  Synthetic oligonucleotide
tggaagaacaaaggagccgcacagcacgca

SEQ ID NO: 183601 - DNA, 30 bp, Artificial Sequence
  Synthetic oligonucleotide
ctcacgtcgtagtactagcaagcgcacgca

SEQ ID NO: 183602 - DNA, 30 bp, Artificial Sequence
  Synthetic oligonucleotide
cgcgggcaatagagaatacctcgtcacgca

SEQ ID NO: 183603 - DNA, 30 bp, Artificial Sequence
  Synthetic oligonucleotide
cattgttgcggggacgcaagatgtcacgca

SEQ ID NO: 183604 - DNA, 30 bp, Artificial Sequence
  Synthetic oligonucleotide
gattcgtccggctgtcgaccacaatacgca

SEQ ID NO: 183605 - DNA, 30 bp, Artificial Sequence
  Synthetic oligonucleotide
accgggacctgtattggcagggtatacgca

SEQ ID NO: 183606 - DNA, 30 bp, Artificial Sequence
  Synthetic oligonucleotide
accactgcccccaaactcaggtggtacgca

SEQ ID NO: 183607 - DNA, 30 bp, Artificial Sequence
  Synthetic oligonucleotide
gctaggatgctaaacgcgggaagaaccgca

SEQ ID NO: 183608 - DNA, 30 bp, Artificial Sequence
  Synthetic oligonucleotide
aaagtggttatgactatcgagacccccgca

SEQ ID NO: 183609 - DNA, 30 bp, Artificial Sequence
  Synthetic oligonucleotide
cgcgagtcagaatagttaacgtagcccgca

SEQ ID NO: 183610 - DNA, 30 bp, Artificial Sequence
  Synthetic oligonucleotide
caaataaagaagtagattgtgtcgcccgca

SEQ ID NO: 183611 - DNA, 30 bp, Artificial Sequence
  Synthetic oligonucleotide
acgggggtcggttttacgacaagtcccgca

SEQ ID NO: 183612 - DNA, 30 bp, Artificial Sequence
  Synthetic oligonucleotide
tagcgctgggaattaagatgccgcgccgca

SEQ ID NO: 183613 - DNA, 30 bp, Artificial Sequence
  Synthetic oligonucleotide
cccaaactcaagttattcatagtatccgca

SEQ ID NO: 183614 - DNA, 30 bp, Artificial Sequence
  Synthetic oligonucleotide
gaggcgggcagaccaaaaggattatccgca

SEQ ID NO: 183615 - DNA, 30 bp, Artificial Sequence
  Synthetic oligonucleotide
tttggccatacgccacaatgggactccgca

SEQ ID NO: 183616 - DNA, 30 bp, Artificial Sequence
  Synthetic oligonucleotide
ataggagaagatctactaatagcgtccgca

SEQ ID NO: 183617 - DNA, 30 bp, Artificial Sequence
  Synthetic oligonucleotide
aaagaaccgcccgccaatagagtaagcgca

SEQ ID NO: 183618 - DNA, 30 bp, Artificial Sequence
  Synthetic oligonucleotide
tacgccaagacttacaggacggttagcgca

SEQ ID NO: 183619 - DNA, 30 bp, Artificial Sequence
  Synthetic oligonucleotide
agcatcaggtagccaccgagccgacgcgca

SEQ ID NO: 183620 - DNA, 30 bp, Artificial Sequence
  Synthetic oligonucleotide
ggttagcaaccataaatcgagctacgcgca

SEQ ID NO: 183621 - DNA, 30 bp, Artificial Sequence
  Synthetic oligonucleotide
agtgttaaccgaaataattcaaggcgcgca

SEQ ID NO: 183622 - DNA, 30 bp, Artificial Sequence
  Synthetic oligonucleotide
tgttgagaggttaggtcccagcatcgcgca

SEQ ID NO: 183623 - DNA, 30 bp, Artificial Sequence
  Synthetic oligonucleotide
ccaaacaggtatttcttgagactaggcgca

SEQ ID NO: 183624 - DNA, 30 bp, Artificial Sequence
  Synthetic oligonucleotide
gggccatgagtggtataagatccgggcgca

SEQ ID NO: 183625 - DNA, 30 bp, Artificial Sequence
  Synthetic oligonucleotide
gcgtaaaactggtttgcaatctggggcgca

SEQ ID NO: 183626 - DNA, 30 bp, Artificial Sequence
  Synthetic oligonucleotide
catggatacctctcggcagatggtggcgca

SEQ ID NO: 183627 - DNA, 30 bp, Artificial Sequence
  Synthetic oligonucleotide
accaccctgactttagcgctaagatgcgca

SEQ ID NO: 183628 - DNA, 30 bp, Artificial Sequence
  Synthetic oligonucleotide
gtttggctaagtcgggcctcggtatgcgca

SEQ ID NO: 183629 - DNA, 30 bp, Artificial Sequence
  Synthetic oligonucleotide
cccacggcgctgactccaggcaactgcgca

SEQ ID NO: 183630 - DNA, 30 bp, Artificial Sequence
  Synthetic oligonucleotide
cgctggggcccctcgagttaagattgcgca

SEQ ID NO: 183631 - DNA, 30 bp, Artificial Sequence
  Synthetic oligonucleotide
ctaggtcggcgcctacatattcgaatcgca

SEQ ID NO: 183632 - DNA, 30 bp, Artificial Sequence
  Synthetic oligonucleotide
caaaccgatccagagtgcataggaatcgca

SEQ ID NO: 183633 - DNA, 30 bp, Artificial Sequence
  Synthetic oligonucleotide
cgccacctctagatgtggtgacccatcgca

SEQ ID NO: 183634 - DNA, 30 bp, Artificial Sequence
  Synthetic oligonucleotide
cgtgttgttacatcatagtgaggtatcgca

SEQ ID NO: 183635 - DNA, 30 bp, Artificial Sequence
  Synthetic oligonucleotide
gtgggaggatagttcatgcgtgacctcgca

SEQ ID NO: 183636 - DNA, 30 bp, Artificial Sequence
  Synthetic oligonucleotide
tggaactttgtagaacgtgagatgctcgca

SEQ ID NO: 183637 - DNA, 29 bp, Artificial Sequence
  Synthetic oligonucleotide
gctgtacaggcttaaccagaagtctcgca

SEQ ID NO: 183638 - DNA, 30 bp, Artificial Sequence
  Synthetic oligonucleotide
ttgataataggggtggactatatagtcgca

SEQ ID NO: 183639 - DNA, 30 bp, Artificial Sequence
  Synthetic oligonucleotide
gagtagttaagcaggtatgaaagcgtcgca

SEQ ID NO: 183640 - DNA, 30 bp, Artificial Sequence
  Synthetic oligonucleotide
ggttgggctgtacaagcaaccggcgtcgca

SEQ ID NO: 183641 - DNA, 30 bp, Artificial Sequence
  Synthetic oligonucleotide
tgggcgcgctccgcgtgaaagagggtcgca

SEQ ID NO: 183642 - DNA, 30 bp, Artificial Sequence
  Synthetic oligonucleotide
cagcggactctcaatgacgtagtggtcgca

SEQ ID NO: 183643 - DNA, 30 bp, Artificial Sequence
  Synthetic oligonucleotide
tacataatcgaatctacctcaacattcgca

SEQ ID NO: 183644 - DNA, 30 bp, Artificial Sequence
  Synthetic oligonucleotide
gcggtcgtataagcgtcagatcagttcgca

SEQ ID NO: 183645 - DNA, 30 bp, Artificial Sequence
  Synthetic oligonucleotide
gcgtaattctgggtcggttgctcaaaggca

SEQ ID NO: 183646 - DNA, 30 bp, Artificial Sequence
  Synthetic oligonucleotide
cacgggacgtgtgtagcagggcgaaaggca

SEQ ID NO: 183647 - DNA, 30 bp, Artificial Sequence
  Synthetic oligonucleotide
cgcatcatctacaaataaaatggaaaggca

SEQ ID NO: 183648 - DNA, 30 bp, Artificial Sequence
  Synthetic oligonucleotide
gtacgtatgagccggacagcactaaaggca

SEQ ID NO: 183649 - DNA, 30 bp, Artificial Sequence
  Synthetic oligonucleotide
tcaccgacttaacaaagcggtggcaaggca

SEQ ID NO: 183650 - DNA, 30 bp, Artificial Sequence
  Synthetic oligonucleotide
tcaggtcccgcctgacgaatcgataaggca

SEQ ID NO: 183651 - DNA, 30 bp, Artificial Sequence
  Synthetic oligonucleotide
tcaacatggttaccatcggaacttaaggca

SEQ ID NO: 183652 - DNA, 30 bp, Artificial Sequence
  Synthetic oligonucleotide
actcgcagaactgtacagcagagacaggca

SEQ ID NO: 183653 - DNA, 30 bp, Artificial Sequence
  Synthetic oligonucleotide
gaacggtggtgtgttaaatacatacaggca

SEQ ID NO: 183654 - DNA, 30 bp, Artificial Sequence
  Synthetic oligonucleotide
cacgtctatacacatttatttttacaggca

SEQ ID NO: 183655 - DNA, 30 bp, Artificial Sequence
  Synthetic oligonucleotide
tgcagaatggagcagggcattggagaggca

SEQ ID NO: 183656 - DNA, 30 bp, Artificial Sequence
  Synthetic oligonucleotide
gtaacggtaatctaaggtcagcgggaggca

SEQ ID NO: 183657 - DNA, 30 bp, Artificial Sequence
  Synthetic oligonucleotide
tagttagtgttgtcaggggccatggaggca

SEQ ID NO: 183658 - DNA, 30 bp, Artificial Sequence
  Synthetic oligonucleotide
tgggttgttctcgctctaagcgctgaggca

SEQ ID NO: 183659 - DNA, 31 bp, Artificial Sequence
  Synthetic oligonucleotide
acggcatagatagtattcttacaaataggca

SEQ ID NO: 183660 - DNA, 30 bp, Artificial Sequence
  Synthetic oligonucleotide
tatcaaagtttactacatgtgaagtaggca

SEQ ID NO: 183661 - DNA, 30 bp, Artificial Sequence
  Synthetic oligonucleotide
gcaactactggtcttcgcttggggtaggca

SEQ ID NO: 183662 - DNA, 30 bp, Artificial Sequence
  Synthetic oligonucleotide
tctcgttcatactacggacgtgattaggca

SEQ ID NO: 183663 - DNA, 30 bp, Artificial Sequence
  Synthetic oligonucleotide
ggaggcgttagcgttcgtcgacggacggca

SEQ ID NO: 183664 - DNA, 30 bp, Artificial Sequence
  Synthetic oligonucleotide
tccctgtgcttgacactatcaggaccggca

SEQ ID NO: 183665 - DNA, 30 bp, Artificial Sequence
  Synthetic oligonucleotide
gcattggacctgctaaattcgcctccggca

SEQ ID NO: 183666 - DNA, 30 bp, Artificial Sequence
  Synthetic oligonucleotide
catacgagtccggcgggaagcggtccggca

SEQ ID NO: 183667 - DNA, 30 bp, Artificial Sequence
  Synthetic oligonucleotide
aattgaccagtggtaaataactaggcggca

SEQ ID NO: 183668 - DNA, 30 bp, Artificial Sequence
  Synthetic oligonucleotide
ttgggtcttaatccaaaagccgtttcggca

SEQ ID NO: 183669 - DNA, 30 bp, Artificial Sequence
  Synthetic oligonucleotide
tgtgaatgcgttattgtagttatgagggca

SEQ ID NO: 183670 - DNA, 30 bp, Artificial Sequence
  Synthetic oligonucleotide
gcgatccctgatatacggtcgaatagggca

SEQ ID NO: 183671 - DNA, 30 bp, Artificial Sequence
  Synthetic oligonucleotide
gtcattagacagtgtgcacgtgatagggca

SEQ ID NO: 183672 - DNA, 30 bp, Artificial Sequence
  Synthetic oligonucleotide
ggtcattgtagtttcctctgccgccgggca

SEQ ID NO: 183673 - DNA, 30 bp, Artificial Sequence
  Synthetic oligonucleotide
gttgtgactacgactacccaaatccgggca

SEQ ID NO: 183674 - DNA, 30 bp, Artificial Sequence
  Synthetic oligonucleotide
ccgcttattggtgcacgggtagtgcgggca

SEQ ID NO: 183675 - DNA, 30 bp, Artificial Sequence
  Synthetic oligonucleotide
agagttcggagggtggtttcagatcgggca

SEQ ID NO: 183676 - DNA, 30 bp, Artificial Sequence
  Synthetic oligonucleotide
tcgcgtgatgaaggcgaaagtgctcgggca

SEQ ID NO: 183677 - DNA, 30 bp, Artificial Sequence
  Synthetic oligonucleotide
ccttgttcgaaagttgctgccacaggggca

SEQ ID NO: 183678 - DNA, 30 bp, Artificial Sequence
  Synthetic oligonucleotide
gtgtacaaacagacttgcaagcggggggca

SEQ ID NO: 183679 - DNA, 30 bp, Artificial Sequence
  Synthetic oligonucleotide
gtcggctaaaaggtgcagcgttatggggca

SEQ ID NO: 183680 - DNA, 30 bp, Artificial Sequence
  Synthetic oligonucleotide
agaaatggccattattgggcaattggggca

SEQ ID NO: 183681 - DNA, 30 bp, Artificial Sequence
  Synthetic oligonucleotide
tgtgttgcggaaaaggtacttccatgggca

SEQ ID NO: 183682 - DNA, 30 bp, Artificial Sequence
  Synthetic oligonucleotide
gtgagggatcttcggctttgaggatgggca

SEQ ID NO: 183683 - DNA, 30 bp, Artificial Sequence
  Synthetic oligonucleotide
aaagatagaattgtcggtccctcgtgggca

SEQ ID NO: 183684 - DNA, 30 bp, Artificial Sequence
  Synthetic oligonucleotide
gagcgcatcaacataagctgcacttgggca

SEQ ID NO: 183685 - DNA, 30 bp, Artificial Sequence
  Synthetic oligonucleotide
tcggtcaaggtcttgttgacacgaatggca

SEQ ID NO: 183686 - DNA, 30 bp, Artificial Sequence
  Synthetic oligonucleotide
tcatgtacattggagccctggcgaatggca

SEQ ID NO: 183687 - DNA, 30 bp, Artificial Sequence
  Synthetic oligonucleotide
actcgtttgaaataggcagttggaatggca

SEQ ID NO: 183688 - DNA, 30 bp, Artificial Sequence
  Synthetic oligonucleotide
cgttggcacataacttctgactgaatggca

SEQ ID NO: 183689 - DNA, 30 bp, Artificial Sequence
  Synthetic oligonucleotide
tgggctcaaacagggtgcaagatcatggca

SEQ ID NO: 183690 - DNA, 30 bp, Artificial Sequence
  Synthetic oligonucleotide
tggtcggccaagcgtattagcgcgatggca

SEQ ID NO: 183691 - DNA, 30 bp, Artificial Sequence
  Synthetic oligonucleotide
gccgctgcaacggggctcgtaactatggca

SEQ ID NO: 183692 - DNA, 30 bp, Artificial Sequence
  Synthetic oligonucleotide
cgaggttaacggggaatttggccactggca

SEQ ID NO: 183693 - DNA, 30 bp, Artificial Sequence
  Synthetic oligonucleotide
atggatacttaggcgaagcttaagctggca

SEQ ID NO: 183694 - DNA, 30 bp, Artificial Sequence
  Synthetic oligonucleotide
ctatgaccgtaccgctttgacagagtggca

SEQ ID NO: 183695 - DNA, 30 bp, Artificial Sequence
  Synthetic oligonucleotide
cgaactggcgggacgcaaaagcgagtggca

SEQ ID NO: 183696 - DNA, 30 bp, Artificial Sequence
  Synthetic oligonucleotide
gactcatacgggaatcatctcttagtggca

SEQ ID NO: 183697 - DNA, 30 bp, Artificial Sequence
  Synthetic oligonucleotide
tgtgagccgcgagccgcaaaacttgtggca

SEQ ID NO: 183698 - DNA, 30 bp, Artificial Sequence
  Synthetic oligonucleotide
tggtcgtgattatgcaatctatttgtggca

SEQ ID NO: 183699 - DNA, 30 bp, Artificial Sequence
  Synthetic oligonucleotide
gaatgaccgaacaacgattttcaattggca

SEQ ID NO: 183700 - DNA, 30 bp, Artificial Sequence
  Synthetic oligonucleotide
gatatatggaggggagtgatcgccttggca

SEQ ID NO: 183701 - DNA, 30 bp, Artificial Sequence
  Synthetic oligonucleotide
tcgcgaccccagctcactattcagttggca

SEQ ID NO: 183702 - DNA, 31 bp, Artificial Sequence
  Synthetic oligonucleotide
gatgagtcgcgttgttgcgagcctgttggca

SEQ ID NO: 183703 - DNA, 30 bp, Artificial Sequence
  Synthetic oligonucleotide
ggtcgtccgattcaacgatcccgtttggca

SEQ ID NO: 183704 - DNA, 30 bp, Artificial Sequence
  Synthetic oligonucleotide
ttaggtggacctgcacggaaataaaatgca

SEQ ID NO: 183705 - DNA, 30 bp, Artificial Sequence
  Synthetic oligonucleotide
tcgatcgtatagccacgagggctaaatgca

SEQ ID NO: 183706 - DNA, 30 bp, Artificial Sequence
  Synthetic oligonucleotide
gctcttggatgggataacgtcgagaatgca

SEQ ID NO: 183707 - DNA, 30 bp, Artificial Sequence
  Synthetic oligonucleotide
gagctagagaacatccgactgggtaatgca

SEQ ID NO: 183708 - DNA, 30 bp, Artificial Sequence
  Synthetic oligonucleotide
ctgaaccgagtaagttgccttggacatgca

SEQ ID NO: 183709 - DNA, 30 bp, Artificial Sequence
  Synthetic oligonucleotide
gcaccccccaggtaaagcaaccaccatgca

SEQ ID NO: 183710 - DNA, 30 bp, Artificial Sequence
  Synthetic oligonucleotide
catctcgctgagggccctagatagcatgca

SEQ ID NO: 183711 - DNA, 30 bp, Artificial Sequence
  Synthetic oligonucleotide
atataaacctcgtaggttaagatgcatgca

SEQ ID NO: 183712 - DNA, 30 bp, Artificial Sequence
  Synthetic oligonucleotide
ctactcaaggtctagttaggttatcatgca

SEQ ID NO: 183713 - DNA, 30 bp, Artificial Sequence
  Synthetic oligonucleotide
tcgggtggtaatggtaacgaatttcatgca

SEQ ID NO: 183714 - DNA, 30 bp, Artificial Sequence
  Synthetic oligonucleotide
tcgtgaggacgtgaggtgttttcggatgca

SEQ ID NO: 183715 - DNA, 30 bp, Artificial Sequence
  Synthetic oligonucleotide
tcaaatatcatggtagtgtctccatatgca

SEQ ID NO: 183716 - DNA, 30 bp, Artificial Sequence
  Synthetic oligonucleotide
gcaatgttttgtgccgaaggtcgatatgca

SEQ ID NO: 183717 - DNA, 30 bp, Artificial Sequence
  Synthetic oligonucleotide
ggcctccgcgttgccaggagcctaactgca

SEQ ID NO: 183718 - DNA, 30 bp, Artificial Sequence
  Synthetic oligonucleotide
agacgcgtgtacgtcaacttaccgactgca

SEQ ID NO: 183719 - DNA, 30 bp, Artificial Sequence
  Synthetic oligonucleotide
aatagattgataaggccatggctgactgca

SEQ ID NO: 183720 - DNA, 30 bp, Artificial Sequence
  Synthetic oligonucleotide
ccgcctgctcacaaacgggaaagacctgca

SEQ ID NO: 183721 - DNA, 30 bp, Artificial Sequence
  Synthetic oligonucleotide
ataccaaactagttatagtatcgccctgca

SEQ ID NO: 183722 - DNA, 30 bp, Artificial Sequence
  Synthetic oligonucleotide
ccagtcagttaagcatactcatgccctgca

SEQ ID NO: 183723 - DNA, 30 bp, Artificial Sequence
  Synthetic oligonucleotide
gatagacctcgtaacagcttgtgccctgca

SEQ ID NO: 183724 - DNA, 30 bp, Artificial Sequence
  Synthetic oligonucleotide
ccggagcaaagagctacacgtgagcctgca

SEQ ID NO: 183725 - DNA, 30 bp, Artificial Sequence
  Synthetic oligonucleotide
tcagtgtaaaagcatggcttctgagctgca

SEQ ID NO: 183726 - DNA, 30 bp, Artificial Sequence
  Synthetic oligonucleotide
acttcttcataaatgtaaatggtagctgca

SEQ ID NO: 183727 - DNA, 31 bp, Artificial Sequence
  Synthetic oligonucleotide
tcgtcgacagatataggcaggtggcgctgca

SEQ ID NO: 183728 - DNA, 30 bp, Artificial Sequence
  Synthetic oligonucleotide
agttctgagaagataaacatttatgctgca

SEQ ID NO: 183729 - DNA, 30 bp, Artificial Sequence
  Synthetic oligonucleotide
ttagcacgttagggttacgacagtgctgca

SEQ ID NO: 183730 - DNA, 30 bp, Artificial Sequence
  Synthetic oligonucleotide
ggtgtcgttaaccaattggtggggtctgca

SEQ ID NO: 183731 - DNA, 30 bp, Artificial Sequence
  Synthetic oligonucleotide
cgaattggatgggcagtgagttaaagtgca

SEQ ID NO: 183732 - DNA, 30 bp, Artificial Sequence
  Synthetic oligonucleotide
aactctgcaagaaggttcaatacaagtgca

SEQ ID NO: 183733 - DNA, 30 bp, Artificial Sequence
  Synthetic oligonucleotide
ggaggctaggtatgtaacatgtgaagtgca

SEQ ID NO: 183734 - DNA, 30 bp, Artificial Sequence
  Synthetic oligonucleotide
tggatgctcgaaactcgcacatacagtgca

SEQ ID NO: 183735 - DNA, 30 bp, Artificial Sequence
  Synthetic oligonucleotide
taacgtccttcgggcggatgccggagtgca

SEQ ID NO: 183736 - DNA, 30 bp, Artificial Sequence
  Synthetic oligonucleotide
aacacaaggccaatgagaggaattagtgca

SEQ ID NO: 183737 - DNA, 30 bp, Artificial Sequence
  Synthetic oligonucleotide
atcgatgtactgttcagacctaaacgtgca

SEQ ID NO: 183738 - DNA, 30 bp, Artificial Sequence
  Synthetic oligonucleotide
gtgggaaatctagcatttgttcatcgtgca

SEQ ID NO: 183739 - DNA, 30 bp, Artificial Sequence
  Synthetic oligonucleotide
ggcgcaaagaataggcactatattcgtgca

SEQ ID NO: 183740 - DNA, 30 bp, Artificial Sequence
  Synthetic oligonucleotide
cgctagccttagttatctagcataggtgca

SEQ ID NO: 183741 - DNA, 30 bp, Artificial Sequence
  Synthetic oligonucleotide
gtcgataggattactgcgcactatggtgca

SEQ ID NO: 183742 - DNA, 30 bp, Artificial Sequence
  Synthetic oligonucleotide
tatgaaactgtggaattaagcaagtgtgca

SEQ ID NO: 183743 - DNA, 30 bp, Artificial Sequence
  Synthetic oligonucleotide
aagcaagcccgagtgtttcggctgtgtgca

SEQ ID NO: 183744 - DNA, 30 bp, Artificial Sequence
  Synthetic oligonucleotide
ttgtatggttgtcactctatacagattgca

SEQ ID NO: 183745 - DNA, 30 bp, Artificial Sequence
  Synthetic oligonucleotide
aatggtagtagggaactcaacgcacttgca

SEQ ID NO: 183746 - DNA, 30 bp, Artificial Sequence
  Synthetic oligonucleotide
actgaacatgtacacgtagatgaccttgca

SEQ ID NO: 183747 - DNA, 30 bp, Artificial Sequence
  Synthetic oligonucleotide
gcaaccttcgtggcatcgaaatgtcttgca

SEQ ID NO: 183748 - DNA, 30 bp, Artificial Sequence
  Synthetic oligonucleotide
gtccgacacattaagtagagcctagttgca

SEQ ID NO: 183749 - DNA, 31 bp, Artificial Sequence
  Synthetic oligonucleotide
ttcaattgcgatgaagaagagagacgttgca

SEQ ID NO: 183750 - DNA, 30 bp, Artificial Sequence
  Synthetic oligonucleotide
aggcgtctctgtccgatcggtaaggttgca

SEQ ID NO: 183751 - DNA, 30 bp, Artificial Sequence
  Synthetic oligonucleotide
agcctcgttcaatccacacacagatttgca

SEQ ID NO: 183752 - DNA, 30 bp, Artificial Sequence
  Synthetic oligonucleotide
tagatgacacagtgtctggcctagtttgca

SEQ ID NO: 183753 - DNA, 30 bp, Artificial Sequence
  Synthetic oligonucleotide
aacgttctagctgttgaccattagtttgca

SEQ ID NO: 183754 - DNA, 30 bp, Artificial Sequence
  Synthetic oligonucleotide
acatgcacgttgaggttagttatttttgca

SEQ ID NO: 183755 - DNA, 30 bp, Artificial Sequence
  Synthetic oligonucleotide
gcgattcgtttaatggatatctcaaaatca

SEQ ID NO: 183756 - DNA, 30 bp, Artificial Sequence
  Synthetic oligonucleotide
gacggaggaccgtgtacattaggaaaatca

SEQ ID NO: 183757 - DNA, 30 bp, Artificial Sequence
  Synthetic oligonucleotide
tggtgctgttagtctcagcaacgcaaatca

SEQ ID NO: 183758 - DNA, 30 bp, Artificial Sequence
  Synthetic oligonucleotide
agcatgagccaaaaatggggcctcaaatca

SEQ ID NO: 183759 - DNA, 30 bp, Artificial Sequence
  Synthetic oligonucleotide
aggtgggcggaccggcggacaaggaaatca

SEQ ID NO: 183760 - DNA, 30 bp, Artificial Sequence
  Synthetic oligonucleotide
gtcccgtataggtaactcatatgacaatca

SEQ ID NO: 183761 - DNA, 30 bp, Artificial Sequence
  Synthetic oligonucleotide
gcacttctggtctaaaaagtgatgcaatca

SEQ ID NO: 183762 - DNA, 30 bp, Artificial Sequence
  Synthetic oligonucleotide
aggagaactgctgtttctgcaggtcaatca

SEQ ID NO: 183763 - DNA, 30 bp, Artificial Sequence
  Synthetic oligonucleotide
attgtccgatgcgagaacgtccttcaatca

SEQ ID NO: 183764 - DNA, 30 bp, Artificial Sequence
  Synthetic oligonucleotide
ctctgacttgaggtagtcagccacgaatca

SEQ ID NO: 183765 - DNA, 30 bp, Artificial Sequence
  Synthetic oligonucleotide
tgatgggagatttgatatcctgatgaatca

SEQ ID NO: 183766 - DNA, 30 bp, Artificial Sequence
  Synthetic oligonucleotide
gggcaggtagccttacgggtccaataatca

SEQ ID NO: 183767 - DNA, 30 bp, Artificial Sequence
  Synthetic oligonucleotide
cggaatatcgtgaggtggccgtaataatca

SEQ ID NO: 183768 - DNA, 30 bp, Artificial Sequence
  Synthetic oligonucleotide
cacgtgtcatgtcggccgatattataatca

SEQ ID NO: 183769 - DNA, 30 bp, Artificial Sequence
  Synthetic oligonucleotide
cgttcaccagtaattaacgcgaactaatca

SEQ ID NO: 183770 - DNA, 30 bp, Artificial Sequence
  Synthetic oligonucleotide
tgaacatgcgaccctaccttgtcgtaatca

SEQ ID NO: 183771 - DNA, 30 bp, Artificial Sequence
  Synthetic oligonucleotide
ctaactaaacggcttttcgccaggtaatca

SEQ ID NO: 183772 - DNA, 30 bp, Artificial Sequence
  Synthetic oligonucleotide
gaaggagggggtcacgctagagggtaatca

SEQ ID NO: 183773 - DNA, 30 bp, Artificial Sequence
  Synthetic oligonucleotide
aaaaagcaggactttctgagagtgtaatca

SEQ ID NO: 183774 - DNA, 30 bp, Artificial Sequence
  Synthetic oligonucleotide
acgatcatccggcgatacaatccttaatca

SEQ ID NO: 183775 - DNA, 30 bp, Artificial Sequence
  Synthetic oligonucleotide
attgcgagcagcatacaattccaaacatca

SEQ ID NO: 183776 - DNA, 30 bp, Artificial Sequence
  Synthetic oligonucleotide
agcgcgtcgatacgctgcccattaacatca

SEQ ID NO: 183777 - DNA, 30 bp, Artificial Sequence
  Synthetic oligonucleotide
gtcatagagtcccgatgataaaacacatca

SEQ ID NO: 183778 - DNA, 30 bp, Artificial Sequence
  Synthetic oligonucleotide
tcagaggatcctagggaatacgccacatca

SEQ ID NO: 183779 - DNA, 30 bp, Artificial Sequence
  Synthetic oligonucleotide
aaaacaagccaagtcaaaagcatcacatca

SEQ ID NO: 183780 - DNA, 30 bp, Artificial Sequence
  Synthetic oligonucleotide
gtctgcggtggcgaacgggccctcacatca

SEQ ID NO: 183781 - DNA, 30 bp, Artificial Sequence
  Synthetic oligonucleotide
aggactcaggtgggggggtcaaggacatca

SEQ ID NO: 183782 - DNA, 30 bp, Artificial Sequence
  Synthetic oligonucleotide
acgtctcgatcataatcgtctttgacatca

SEQ ID NO: 183783 - DNA, 30 bp, Artificial Sequence
  Synthetic oligonucleotide
gctaaggcgagctagtccactcctacatca

SEQ ID NO: 183784 - DNA, 30 bp, Artificial Sequence
  Synthetic oligonucleotide
cactttcacgaaggtcgaacatgtacatca

SEQ ID NO: 183785 - DNA, 30 bp, Artificial Sequence
  Synthetic oligonucleotide
tgccactaccaaaaagcatcctaaccatca

SEQ ID NO: 183786 - DNA, 30 bp, Artificial Sequence
  Synthetic oligonucleotide
tacgcaaggactggcattaattggccatca

SEQ ID NO: 183787 - DNA, 30 bp, Artificial Sequence
  Synthetic oligonucleotide
gcgtggggtcccgcaaaaggtaacgcatca

SEQ ID NO: 183788 - DNA, 30 bp, Artificial Sequence
  Synthetic oligonucleotide
acggaacggttaggtctatgtgaggcatca

SEQ ID NO: 183789 - DNA, 30 bp, Artificial Sequence
  Synthetic oligonucleotide
gttaggccataatagaagagttaggcatca

SEQ ID NO: 183790 - DNA, 30 bp, Artificial Sequence
  Synthetic oligonucleotide
agtgtgacacatagccaaaacacatcatca

SEQ ID NO: 183791 - DNA, 30 bp, Artificial Sequence
  Synthetic oligonucleotide
taagtaggaaactgcgatacggactcatca

SEQ ID NO: 183792 - DNA, 30 bp, Artificial Sequence
  Synthetic oligonucleotide
gttcttatctacaacacgagtgcgtcatca

SEQ ID NO: 183793 - DNA, 30 bp, Artificial Sequence
  Synthetic oligonucleotide
gcgatcttcgaagagaagcctttgtcatca

SEQ ID NO: 183794 - DNA, 30 bp, Artificial Sequence
  Synthetic oligonucleotide
atctatgttctgattaggagagaaagatca

SEQ ID NO: 183795 - DNA, 30 bp, Artificial Sequence
  Synthetic oligonucleotide
tggctaatacacgtgaagtgtcacagatca

SEQ ID NO: 183796 - DNA, 30 bp, Artificial Sequence
  Synthetic oligonucleotide
tgctggaataataacgaaggtgccagatca

SEQ ID NO: 183797 - DNA, 30 bp, Artificial Sequence
  Synthetic oligonucleotide
ccgtgcagactggtgctaaggcggagatca

SEQ ID NO: 183798 - DNA, 30 bp, Artificial Sequence
  Synthetic oligonucleotide
aatatcgtggttaggagttgctatagatca

SEQ ID NO: 183799 - DNA, 30 bp, Artificial Sequence
  Synthetic oligonucleotide
tttagagtcgtcctgaaggagactagatca

SEQ ID NO: 183800 - DNA, 30 bp, Artificial Sequence
  Synthetic oligonucleotide
ctaaaagtctataggcggtttgttagatca

SEQ ID NO: 183801 - DNA, 30 bp, Artificial Sequence
  Synthetic oligonucleotide
gttatggaggatccagcgtggaaccgatca

SEQ ID NO: 183802 - DNA, 30 bp, Artificial Sequence
  Synthetic oligonucleotide
accctaagtgtctagtctggaatccgatca

SEQ ID NO: 183803 - DNA, 30 bp, Artificial Sequence
  Synthetic oligonucleotide
tcacgacttccagggccagtgcatcgatca

SEQ ID NO: 183804 - DNA, 29 bp, Artificial Sequence
  Synthetic oligonucleotide
cctttgtttcaccgatcggtcaaggatca

SEQ ID NO: 183805 - DNA, 30 bp, Artificial Sequence
  Synthetic oligonucleotide
gtagattccggggccgcgatgcgtggatca

SEQ ID NO: 183806 - DNA, 30 bp, Artificial Sequence
  Synthetic oligonucleotide
aagaattgaattaagaatgaagtatgatca

SEQ ID NO: 183807 - DNA, 30 bp, Artificial Sequence
  Synthetic oligonucleotide
ccacacacaactctgctgccgttaatatca

SEQ ID NO: 183808 - DNA, 30 bp, Artificial Sequence
  Synthetic oligonucleotide
ggagcagggccccatgtgttcttcatatca

SEQ ID NO: 183809 - DNA, 30 bp, Artificial Sequence
  Synthetic oligonucleotide
tcatgtgcaacatttaagccgtgactatca

SEQ ID NO: 183810 - DNA, 30 bp, Artificial Sequence
  Synthetic oligonucleotide
aaagggtggatcacgtaatgcaagctatca

SEQ ID NO: 183811 - DNA, 30 bp, Artificial Sequence
  Synthetic oligonucleotide
gtggatgttacacggcatccgcgtctatca

SEQ ID NO: 183812 - DNA, 30 bp, Artificial Sequence
  Synthetic oligonucleotide
gcttatcacaggtttagtggctgtctatca

SEQ ID NO: 183813 - DNA, 30 bp, Artificial Sequence
  Synthetic oligonucleotide
gcagtggtatgcccctgcagtcaggtatca

SEQ ID NO: 183814 - DNA, 30 bp, Artificial Sequence
  Synthetic oligonucleotide
ttcaacgggttttttaaagggaacttatca

SEQ ID NO: 183815 - DNA, 30 bp, Artificial Sequence
  Synthetic oligonucleotide
cgttggggacaatgaaggcttaacttatca

SEQ ID NO: 183816 - DNA, 30 bp, Artificial Sequence
  Synthetic oligonucleotide
acgcaatacgtaacgatggatcatttatca

SEQ ID NO: 183817 - DNA, 30 bp, Artificial Sequence
  Synthetic oligonucleotide
gcgtttcctgcaaagatgtacgacaactca

SEQ ID NO: 183818 - DNA, 30 bp, Artificial Sequence
  Synthetic oligonucleotide
tcagtttcaatgaaatacgttgacaactca

SEQ ID NO: 183819 - DNA, 30 bp, Artificial Sequence
  Synthetic oligonucleotide
tgcccaccgagggaagtcaatgccaactca

SEQ ID NO: 183820 - DNA, 30 bp, Artificial Sequence
  Synthetic oligonucleotide
cggtccaggcatcaacttaggagtaactca

SEQ ID NO: 183821 - DNA, 30 bp, Artificial Sequence
  Synthetic oligonucleotide
agaagtaggtaaaacctccgtcgtaactca

SEQ ID NO: 183822 - DNA, 30 bp, Artificial Sequence
  Synthetic oligonucleotide
accggctcaacatgcattaaaactcactca

SEQ ID NO: 183823 - DNA, 30 bp, Artificial Sequence
  Synthetic oligonucleotide
acgttattaggggggaagaattcagactca

SEQ ID NO: 183824 - DNA, 30 bp, Artificial Sequence
  Synthetic oligonucleotide
gacagccgatttgttaatggttcagactca

SEQ ID NO: 183825 - DNA, 30 bp, Artificial Sequence
  Synthetic oligonucleotide
gggtgaacctatgggtccatacgagactca

SEQ ID NO: 183826 - DNA, 30 bp, Artificial Sequence
  Synthetic oligonucleotide
cgggtgggagttttgcaaagtatcgactca

SEQ ID NO: 183827 - DNA, 30 bp, Artificial Sequence
  Synthetic oligonucleotide
gatattgcgccaagcacggtaagatactca

SEQ ID NO: 183828 - DNA, 30 bp, Artificial Sequence
  Synthetic oligonucleotide
agttggcctcggggaccctcagggtactca

SEQ ID NO: 183829 - DNA, 30 bp, Artificial Sequence
  Synthetic oligonucleotide
attcccgtgctcgctcgggaaggaacctca

SEQ ID NO: 183830 - DNA, 30 bp, Artificial Sequence
  Synthetic oligonucleotide
caccttggcacaactataaactccacctca

SEQ ID NO: 183831 - DNA, 30 bp, Artificial Sequence
  Synthetic oligonucleotide
agatgcatcaacgcttataaaagcacctca

SEQ ID NO: 183832 - DNA, 30 bp, Artificial Sequence
  Synthetic oligonucleotide
gacgagatgcgttcttgtcttcggacctca

SEQ ID NO: 183833 - DNA, 30 bp, Artificial Sequence
  Synthetic oligonucleotide
tcgatcatcaccattggaagaatgacctca

SEQ ID NO: 183834 - DNA, 30 bp, Artificial Sequence
  Synthetic oligonucleotide
tgaggtcgaggggatggatcatgaccctca

SEQ ID NO: 183835 - DNA, 30 bp, Artificial Sequence
  Synthetic oligonucleotide
cggttaaagtaattatcgctcaaagcctca

SEQ ID NO: 183836 - DNA, 30 bp, Artificial Sequence
  Synthetic oligonucleotide
gacgcttacgaacggtgttaaatcgcctca

SEQ ID NO: 183837 - DNA, 30 bp, Artificial Sequence
  Synthetic oligonucleotide
tcataataattggggtggaactaatcctca

SEQ ID NO: 183838 - DNA, 30 bp, Artificial Sequence
  Synthetic oligonucleotide
caagtcaccgtgggggaaaagccatcctca

SEQ ID NO: 183839 - DNA, 30 bp, Artificial Sequence
  Synthetic oligonucleotide
catagtaaggaaagaacctgttagtcctca

SEQ ID NO: 183840 - DNA, 30 bp, Artificial Sequence
  Synthetic oligonucleotide
cgaactagtaaatccagcccattgtcctca

SEQ ID NO: 183841 - DNA, 30 bp, Artificial Sequence
  Synthetic oligonucleotide
catcgctaacgatctaatgatgacagctca

SEQ ID NO: 183842 - DNA, 30 bp, Artificial Sequence
  Synthetic oligonucleotide
gcaggttgcgttggtactgactggagctca

SEQ ID NO: 183843 - DNA, 30 bp, Artificial Sequence
  Synthetic oligonucleotide
cgtgccagactgtatgcggcgttgagctca

SEQ ID NO: 183844 - DNA, 30 bp, Artificial Sequence
  Synthetic oligonucleotide
gtcccgtattcttctagcgaaaatagctca

SEQ ID NO: 183845 - DNA, 30 bp, Artificial Sequence
  Synthetic oligonucleotide
gtaggcgcgaatcaataaatccttagctca

SEQ ID NO: 183846 - DNA, 30 bp, Artificial Sequence
  Synthetic oligonucleotide
tcttgcgggattatcgcataacgacgctca

SEQ ID NO: 183847 - DNA, 30 bp, Artificial Sequence
  Synthetic oligonucleotide
gagagcgttccggagatgatatatcgctca

SEQ ID NO: 183848 - DNA, 30 bp, Artificial Sequence
  Synthetic oligonucleotide
gggaaaaggggcctgaccggaagtcgctca

SEQ ID NO: 183849 - DNA, 30 bp, Artificial Sequence
  Synthetic oligonucleotide
accggaggtgttcatacgctaagcggctca

SEQ ID NO: 183850 - DNA, 30 bp, Artificial Sequence
  Synthetic oligonucleotide
gcaagcaaagatggggggaccgtcggctca

SEQ ID NO: 183851 - DNA, 30 bp, Artificial Sequence
  Synthetic oligonucleotide
caccatcgagaatctgctctgtagtgctca

SEQ ID NO: 183852 - DNA, 30 bp, Artificial Sequence
  Synthetic oligonucleotide
aaccgtcatgtaaacggaagcgcaatctca

SEQ ID NO: 183853 - DNA, 30 bp, Artificial Sequence
  Synthetic oligonucleotide
tccggctcgccactttgcgaccacatctca

SEQ ID NO: 183854 - DNA, 30 bp, Artificial Sequence
  Synthetic oligonucleotide
cagggaattcagtataataaagacatctca

SEQ ID NO: 183855 - DNA, 30 bp, Artificial Sequence
  Synthetic oligonucleotide
acgccaatggcgggtaatcctgtgatctca

SEQ ID NO: 183856 - DNA, 30 bp, Artificial Sequence
  Synthetic oligonucleotide
agatgttcagcccacgcctcgaaagtctca

SEQ ID NO: 183857 - DNA, 30 bp, Artificial Sequence
  Synthetic oligonucleotide
gtcgaagggcaatatgcaacttcagtctca

SEQ ID NO: 183858 - DNA, 30 bp, Artificial Sequence
  Synthetic oligonucleotide
ttactggcctaaaatcgacccatcgtctca

SEQ ID NO: 183859 - DNA, 30 bp, Artificial Sequence
  Synthetic oligonucleotide
taggtgtaggtaaaatgcaaataggtctca

SEQ ID NO: 183860 - DNA, 30 bp, Artificial Sequence
  Synthetic oligonucleotide
caagtggtatcacgggtaaggtaggtctca

SEQ ID NO: 183861 - DNA, 30 bp, Artificial Sequence
  Synthetic oligonucleotide
caagctcccgtgagggttgtcacggtctca

SEQ ID NO: 183862 - DNA, 30 bp, Artificial Sequence
  Synthetic oligonucleotide
ccttttagcgtagacttcgggccggtctca

SEQ ID NO: 183863 - DNA, 30 bp, Artificial Sequence
  Synthetic oligonucleotide
gtgcgcttgtcttttcgcagagcggtctca

SEQ ID NO: 183864 - DNA, 30 bp, Artificial Sequence
  Synthetic oligonucleotide
gacgctgtagagagtagctgagtggtctca

SEQ ID NO: 183865 - DNA, 30 bp, Artificial Sequence
  Synthetic oligonucleotide
gcgagtctcctccgaccaagtcgtgtctca

SEQ ID NO: 183866 - DNA, 30 bp, Artificial Sequence
  Synthetic oligonucleotide
cggccgttagtctgaacgaggaacttctca

SEQ ID NO: 183867 - DNA, 30 bp, Artificial Sequence
  Synthetic oligonucleotide
tcaccagtgtcacgttatttgtagttctca

SEQ ID NO: 183868 - DNA, 30 bp, Artificial Sequence
  Synthetic oligonucleotide
tttaaaccacgggaccaaggaaccaagtca

SEQ ID NO: 183869 - DNA, 30 bp, Artificial Sequence
  Synthetic oligonucleotide
taagtatcagcggccgagcttaataagtca

SEQ ID NO: 183870 - DNA, 30 bp, Artificial Sequence
  Synthetic oligonucleotide
gcattcgctctagagcgatcaaaacagtca

SEQ ID NO: 183871 - DNA, 30 bp, Artificial Sequence
  Synthetic oligonucleotide
aaggggataaactggaggtcattacagtca

SEQ ID NO: 183872 - DNA, 30 bp, Artificial Sequence
  Synthetic oligonucleotide
gaggcaatagcatcgagatgtttacagtca

SEQ ID NO: 183873 - DNA, 30 bp, Artificial Sequence
  Synthetic oligonucleotide
tgatcgggagtgagggtcacaaaccagtca

SEQ ID NO: 183874 - DNA, 30 bp, Artificial Sequence
  Synthetic oligonucleotide
agcccaacgaacaatccgtcttcccagtca

SEQ ID NO: 183875 - DNA, 30 bp, Artificial Sequence
  Synthetic oligonucleotide
ttccagtcgaaacagtacgttaggcagtca

SEQ ID NO: 183876 - DNA, 30 bp, Artificial Sequence
  Synthetic oligonucleotide
aagtcccatttactatcattacggcagtca

SEQ ID NO: 183877 - DNA, 30 bp, Artificial Sequence
  Synthetic oligonucleotide
tcgacagtgataatccgtgcgtggcagtca

SEQ ID NO: 183878 - DNA, 30 bp, Artificial Sequence
  Synthetic oligonucleotide
aggatgtggtaagacgacagagatcagtca

SEQ ID NO: 183879 - DNA, 30 bp, Artificial Sequence
  Synthetic oligonucleotide
ggaagttatcgtcaatattggatagagtca

SEQ ID NO: 183880 - DNA, 30 bp, Artificial Sequence
  Synthetic oligonucleotide
ctaaaggctttatcacggcctaccgagtca

SEQ ID NO: 183881 - DNA, 30 bp, Artificial Sequence
  Synthetic oligonucleotide
atgccccgcggggagaaattttatgagtca

SEQ ID NO: 183882 - DNA, 30 bp, Artificial Sequence
  Synthetic oligonucleotide
agccttcaaaggatcggacagcttgagtca

SEQ ID NO: 183883 - DNA, 30 bp, Artificial Sequence
  Synthetic oligonucleotide
tcaggggcgcaatcgtaccggtttgagtca

SEQ ID NO: 183884 - DNA, 30 bp, Artificial Sequence
  Synthetic oligonucleotide
gaagtgctggaacttactttgaaatagtca

SEQ ID NO: 183885 - DNA, 30 bp, Artificial Sequence
  Synthetic oligonucleotide
gttacgatcgagcgctagattatatagtca

SEQ ID NO: 183886 - DNA, 30 bp, Artificial Sequence
  Synthetic oligonucleotide
gtcataacattagaagttatttactagtca

SEQ ID NO: 183887 - DNA, 30 bp, Artificial Sequence
  Synthetic oligonucleotide
tacaaaggcgataggacgggcatgtagtca

SEQ ID NO: 183888 - DNA, 30 bp, Artificial Sequence
  Synthetic oligonucleotide
gaccttattcgggaggaaatggcttagtca

SEQ ID NO: 183889 - DNA, 30 bp, Artificial Sequence
  Synthetic oligonucleotide
tgtcgtgtcaataggctatttggttagtca

SEQ ID NO: 183890 - DNA, 30 bp, Artificial Sequence
  Synthetic oligonucleotide
acatcagcgggccgtgtggcatgaacgtca

SEQ ID NO: 183891 - DNA, 30 bp, Artificial Sequence
  Synthetic oligonucleotide
cagaatctttgataggctcacttaacgtca

SEQ ID NO: 183892 - DNA, 30 bp, Artificial Sequence
  Synthetic oligonucleotide
gcgggctcttcacctccatttatcacgtca

SEQ ID NO: 183893 - DNA, 30 bp, Artificial Sequence
  Synthetic oligonucleotide
ttgctcagctctctaataaaagatacgtca

SEQ ID NO: 183894 - DNA, 30 bp, Artificial Sequence
  Synthetic oligonucleotide
acgcgagacccagatccgttaagaccgtca

SEQ ID NO: 183895 - DNA, 30 bp, Artificial Sequence
  Synthetic oligonucleotide
aacaggtgctataccgttcatagcccgtca

SEQ ID NO: 183896 - DNA, 30 bp, Artificial Sequence
  Synthetic oligonucleotide
aggcaaaaggttggcccgacggtcccgtca

SEQ ID NO: 183897 - DNA, 30 bp, Artificial Sequence
  Synthetic oligonucleotide
aaaggtttctgtgggaggacctggccgtca

SEQ ID NO: 183898 - DNA, 30 bp, Artificial Sequence
  Synthetic oligonucleotide
gacttcgattatccaggaggtgtgccgtca

SEQ ID NO: 183899 - DNA, 30 bp, Artificial Sequence
  Synthetic oligonucleotide
cagggtcatcgtcccgcgacagatccgtca

SEQ ID NO: 183900 - DNA, 30 bp, Artificial Sequence
  Synthetic oligonucleotide
ggcctatttgtacaagtaaaggtagcgtca

SEQ ID NO: 183901 - DNA, 30 bp, Artificial Sequence
  Synthetic oligonucleotide
attgttacaaaccttccgagtagggcgtca

SEQ ID NO: 183902 - DNA, 30 bp, Artificial Sequence
  Synthetic oligonucleotide
gtcagttaggtgtctggatatggtgcgtca

SEQ ID NO: 183903 - DNA, 30 bp, Artificial Sequence
  Synthetic oligonucleotide
attatagagcagtgcctagtcttatcgtca

SEQ ID NO: 183904 - DNA, 30 bp, Artificial Sequence
  Synthetic oligonucleotide
ggtcgaggatatcgtatcaggtattcgtca

SEQ ID NO: 183905 - DNA, 30 bp, Artificial Sequence
  Synthetic oligonucleotide
gggcacgaacgtcgcgccgatagaaggtca

SEQ ID NO: 183906 - DNA, 30 bp, Artificial Sequence
  Synthetic oligonucleotide
ctacttaaaatctgcccattctctaggtca

SEQ ID NO: 183907 - DNA, 30 bp, Artificial Sequence
  Synthetic oligonucleotide
tctggtcgctaatgatcaggtgttaggtca

SEQ ID NO: 183908 - DNA, 30 bp, Artificial Sequence
  Synthetic oligonucleotide
tatctggcgggggcttggttcaaacggtca

SEQ ID NO: 183909 - DNA, 30 bp, Artificial Sequence
  Synthetic oligonucleotide
cggaagttgcagcgtcttcgcggccggtca

SEQ ID NO: 183910 - DNA, 30 bp, Artificial Sequence
  Synthetic oligonucleotide
caacgtaatatctgggatttaatgcggtca

SEQ ID NO: 183911 - DNA, 30 bp, Artificial Sequence
  Synthetic oligonucleotide
ttggtcgcggtagacagtgtcactcggtca

SEQ ID NO: 183912 - DNA, 30 bp, Artificial Sequence
  Synthetic oligonucleotide
taagaaggcgattcatggtgtaaagggtca

SEQ ID NO: 183913 - DNA, 30 bp, Artificial Sequence
  Synthetic oligonucleotide
agtagatctcatgatctggggcaagggtca

SEQ ID NO: 183914 - DNA, 30 bp, Artificial Sequence
  Synthetic oligonucleotide
tcggcatctttcccatgattgtcagggtca

SEQ ID NO: 183915 - DNA, 30 bp, Artificial Sequence
  Synthetic oligonucleotide
aacgattatcttgacactgtccgagggtca

SEQ ID NO: 183916 - DNA, 30 bp, Artificial Sequence
  Synthetic oligonucleotide
ccaccgtcgattcgcggttgtcgggggtca

SEQ ID NO: 183917 - DNA, 30 bp, Artificial Sequence
  Synthetic oligonucleotide
ccatagtgagcttgttgccccggatggtca

SEQ ID NO: 183918 - DNA, 30 bp, Artificial Sequence
  Synthetic oligonucleotide
cgtaacattcccgaaatgggatagtggtca

SEQ ID NO: 183919 - DNA, 30 bp, Artificial Sequence
  Synthetic oligonucleotide
ttccaatgcggcaattagatagcttggtca

SEQ ID NO: 183920 - DNA, 30 bp, Artificial Sequence
  Synthetic oligonucleotide
taaatgaggttagaggggttccccatgtca

SEQ ID NO: 183921 - DNA, 30 bp, Artificial Sequence
  Synthetic oligonucleotide
cctcgcggaggggcaattagagccatgtca

SEQ ID NO: 183922 - DNA, 30 bp, Artificial Sequence
  Synthetic oligonucleotide
gagtacgaatgtttagagtggtagatgtca

SEQ ID NO: 183923 - DNA, 30 bp, Artificial Sequence
  Synthetic oligonucleotide
tcccagtaaactagatcctctgcgatgtca

SEQ ID NO: 183924 - DNA, 30 bp, Artificial Sequence
  Synthetic oligonucleotide
gaaaaactgtcgactacagattagctgtca

SEQ ID NO: 183925 - DNA, 30 bp, Artificial Sequence
  Synthetic oligonucleotide
acaggttgcgacgtgggaattaaagtgtca

SEQ ID NO: 183926 - DNA, 30 bp, Artificial Sequence
  Synthetic oligonucleotide
ttccgatgggtcaaatcatgtcgagtgtca

SEQ ID NO: 183927 - DNA, 30 bp, Artificial Sequence
  Synthetic oligonucleotide
cttccaaaacaatattattaggcggtgtca

SEQ ID NO: 183928 - DNA, 30 bp, Artificial Sequence
  Synthetic oligonucleotide
tatggtgacaggtagtaaagatcggtgtca

SEQ ID NO: 183929 - DNA, 30 bp, Artificial Sequence
  Synthetic oligonucleotide
agtccctaggataccttgacctgtgtgtca

SEQ ID NO: 183930 - DNA, 30 bp, Artificial Sequence
  Synthetic oligonucleotide
taggggtatagggtcttatagtaattgtca

SEQ ID NO: 183931 - DNA, 30 bp, Artificial Sequence
  Synthetic oligonucleotide
gtgacagaacagccgatgctcaacttgtca

SEQ ID NO: 183932 - DNA, 30 bp, Artificial Sequence
  Synthetic oligonucleotide
attggatggtgatgttgggtgaccttgtca

SEQ ID NO: 183933 - DNA, 30 bp, Artificial Sequence
  Synthetic oligonucleotide
ccacaggagttggctcacaaatccttgtca

SEQ ID NO: 183934 - DNA, 30 bp, Artificial Sequence
  Synthetic oligonucleotide
cagggggttactctgcgagtacgtttgtca

SEQ ID NO: 183935 - DNA, 30 bp, Artificial Sequence
  Synthetic oligonucleotide
agggcactaaaaaccccctcaaccaattca

SEQ ID NO: 183936 - DNA, 30 bp, Artificial Sequence
  Synthetic oligonucleotide
agcgacgccaactgtgctgattaacattca

SEQ ID NO: 183937 - DNA, 30 bp, Artificial Sequence
  Synthetic oligonucleotide
gtgggaaatgctagctgaaatccacattca

SEQ ID NO: 183938 - DNA, 30 bp, Artificial Sequence
  Synthetic oligonucleotide
ccgacgcgttgagcactactctagcattca

SEQ ID NO: 183939 - DNA, 30 bp, Artificial Sequence
  Synthetic oligonucleotide
ttgttatatggagagagaaggcgtcattca

SEQ ID NO: 183940 - DNA, 30 bp, Artificial Sequence
  Synthetic oligonucleotide
ggtggcgaggacagcattcggatcgattca

SEQ ID NO: 183941 - DNA, 30 bp, Artificial Sequence
  Synthetic oligonucleotide
ctcgtataacggctacattatgtcgattca

SEQ ID NO: 183942 - DNA, 30 bp, Artificial Sequence
  Synthetic oligonucleotide
gtatggcaacgagtgtaggtgaaatattca

SEQ ID NO: 183943 - DNA, 30 bp, Artificial Sequence
  Synthetic oligonucleotide
tcgagagtaattaaaacctagcaatattca

SEQ ID NO: 183944 - DNA, 30 bp, Artificial Sequence
  Synthetic oligonucleotide
agctattcagtttccggagtgaactattca

SEQ ID NO: 183945 - DNA, 30 bp, Artificial Sequence
  Synthetic oligonucleotide
gatccgtggcacgtttagcgggtctattca

SEQ ID NO: 183946 - DNA, 30 bp, Artificial Sequence
  Synthetic oligonucleotide
ccaggtgcaagctagttggtagtgtattca

SEQ ID NO: 183947 - DNA, 30 bp, Artificial Sequence
  Synthetic oligonucleotide
cattcaaggccaacgttactaggttattca

SEQ ID NO: 183948 - DNA, 30 bp, Artificial Sequence
  Synthetic oligonucleotide
cttaacaagctgtcttgcacgtaaccttca

SEQ ID NO: 183949 - DNA, 30 bp, Artificial Sequence
  Synthetic oligonucleotide
cccccggacgcggatatacgtacagcttca

SEQ ID NO: 183950 - DNA, 30 bp, Artificial Sequence
  Synthetic oligonucleotide
tgaagaacgcgaatcgcggcagcagcttca

SEQ ID NO: 183951 - DNA, 30 bp, Artificial Sequence
  Synthetic oligonucleotide
gtttgaaggaaagtgatcagacgagcttca

SEQ ID NO: 183952 - DNA, 30 bp, Artificial Sequence
  Synthetic oligonucleotide
taaatttataacaccagtaggcgagcttca

SEQ ID NO: 183953 - DNA, 30 bp, Artificial Sequence
  Synthetic oligonucleotide
cagttagggcatgcaagaacatgcgcttca

SEQ ID NO: 183954 - DNA, 30 bp, Artificial Sequence
  Synthetic oligonucleotide
agattaggtgtattccctgtcgaggcttca

SEQ ID NO: 183955 - DNA, 30 bp, Artificial Sequence
  Synthetic oligonucleotide
aagtatacgctttggaaatggattgcttca

SEQ ID NO: 183956 - DNA, 30 bp, Artificial Sequence
  Synthetic oligonucleotide
cgctcaaagaacattgataatgaaagttca

SEQ ID NO: 183957 - DNA, 30 bp, Artificial Sequence
  Synthetic oligonucleotide
aatggaggaactatgtattgcccaagttca

SEQ ID NO: 183958 - DNA, 30 bp, Artificial Sequence
  Synthetic oligonucleotide
gggggctgagtgtggaccgtacccagttca

SEQ ID NO: 183959 - DNA, 30 bp, Artificial Sequence
  Synthetic oligonucleotide
cgccagatagactgcgggttcaagagttca

SEQ ID NO: 183960 - DNA, 30 bp, Artificial Sequence
  Synthetic oligonucleotide
taattaaatccgggcaaaatctaacgttca

SEQ ID NO: 183961 - DNA, 30 bp, Artificial Sequence
  Synthetic oligonucleotide
cgttaccacacatttcagaagcaaggttca

SEQ ID NO: 183962 - DNA, 30 bp, Artificial Sequence
  Synthetic oligonucleotide
atcggtcccaaaggtatgcgctgaggttca

SEQ ID NO: 183963 - DNA, 30 bp, Artificial Sequence
  Synthetic oligonucleotide
atcatgagcggaactgaagcgaatggttca

SEQ ID NO: 183964 - DNA, 30 bp, Artificial Sequence
  Synthetic oligonucleotide
ggtcagcactgttactaaggacctggttca

SEQ ID NO: 183965 - DNA, 30 bp, Artificial Sequence
  Synthetic oligonucleotide
actaactgggatcgaacatcagcgtgttca

SEQ ID NO: 183966 - DNA, 30 bp, Artificial Sequence
  Synthetic oligonucleotide
agggcattcgactcaagtgtgacttgttca

SEQ ID NO: 183967 - DNA, 30 bp, Artificial Sequence
  Synthetic oligonucleotide
acacgccgaatgaggggaggcccaatttca

SEQ ID NO: 183968 - DNA, 30 bp, Artificial Sequence
  Synthetic oligonucleotide
aagaaactggctagcgcaaaaggcatttca

SEQ ID NO: 183969 - DNA, 30 bp, Artificial Sequence
  Synthetic oligonucleotide
cactgtgcgaagatacaggctatcatttca

SEQ ID NO: 183970 - DNA, 30 bp, Artificial Sequence
  Synthetic oligonucleotide
aagcaggtcggatggccttgagttatttca

SEQ ID NO: 183971 - DNA, 30 bp, Artificial Sequence
  Synthetic oligonucleotide
ggagcgttgttgcgcacttttagactttca

SEQ ID NO: 183972 - DNA, 30 bp, Artificial Sequence
  Synthetic oligonucleotide
ggcagctgcaatgtgacacgacgcctttca

SEQ ID NO: 183973 - DNA, 30 bp, Artificial Sequence
  Synthetic oligonucleotide
ccatgtggtccatgtcggatacgcctttca

SEQ ID NO: 183974 - DNA, 30 bp, Artificial Sequence
  Synthetic oligonucleotide
gctcattactaacatgtgtgagcgctttca

SEQ ID NO: 183975 - DNA, 30 bp, Artificial Sequence
  Synthetic oligonucleotide
aggtaacgggacatccaaagggacgtttca

SEQ ID NO: 183976 - DNA, 30 bp, Artificial Sequence
  Synthetic oligonucleotide
taaaggattaatgcgtagttgggcgtttca

SEQ ID NO: 183977 - DNA, 30 bp, Artificial Sequence
  Synthetic oligonucleotide
ccattacgtacgatatgcaaattcgtttca

SEQ ID NO: 183978 - DNA, 30 bp, Artificial Sequence
  Synthetic oligonucleotide
gacggactagaattgcattagtgggtttca

SEQ ID NO: 183979 - DNA, 30 bp, Artificial Sequence
  Synthetic oligonucleotide
agttctcgagggtggggtcccttggtttca

SEQ ID NO: 183980 - DNA, 30 bp, Artificial Sequence
  Synthetic oligonucleotide
ggaggaagtgaagtcgcttaggtattttca

SEQ ID NO: 183981 - DNA, 30 bp, Artificial Sequence
  Synthetic oligonucleotide
acaaggtgtggggggcttccgcccttttca

SEQ ID NO: 183982 - DNA, 30 bp, Artificial Sequence
  Synthetic oligonucleotide
ggactaaggggtgtgatgtaatgcttttca

SEQ ID NO: 183983 - DNA, 30 bp, Artificial Sequence
  Synthetic oligonucleotide
ctgtgatgctcggcaatcgcatgcttttca

SEQ ID NO: 183984 - DNA, 30 bp, Artificial Sequence
  Synthetic oligonucleotide
taggtggccataataacacattgaaaaaga

SEQ ID NO: 183985 - DNA, 30 bp, Artificial Sequence
  Synthetic oligonucleotide
tttaacgtcacataagccactaacaaaaga

SEQ ID NO: 183986 - DNA, 30 bp, Artificial Sequence
  Synthetic oligonucleotide
tcgtgtcatggatcgaaaggatcgaaaaga

SEQ ID NO: 183987 - DNA, 30 bp, Artificial Sequence
  Synthetic oligonucleotide
aattaaacgttgaactgtcctcggaaaaga

SEQ ID NO: 183988 - DNA, 30 bp, Artificial Sequence
  Synthetic oligonucleotide
ctcgtatagcttgctgaaccttataaaaga

SEQ ID NO: 183989 - DNA, 30 bp, Artificial Sequence
  Synthetic oligonucleotide
aggagggcaactacggtagcggttaaaaga

SEQ ID NO: 183990 - DNA, 30 bp, Artificial Sequence
  Synthetic oligonucleotide
actctaagccatggccccgaggaacaaaga

SEQ ID NO: 183991 - DNA, 30 bp, Artificial Sequence
  Synthetic oligonucleotide
gtttggacaattccaatcgcagggcaaaga

SEQ ID NO: 183992 - DNA, 30 bp, Artificial Sequence
  Synthetic oligonucleotide
ggctctgacgtgcgttgacggctgcaaaga

SEQ ID NO: 183993 - DNA, 31 bp, Artificial Sequence
  Synthetic oligonucleotide
gaatggaggtcggatccttgtgaatcaaaga

SEQ ID NO: 183994 - DNA, 30 bp, Artificial Sequence
  Synthetic oligonucleotide
gtgttgggacttgtgagttatgatcaaaga

SEQ ID NO: 183995 - DNA, 30 bp, Artificial Sequence
  Synthetic oligonucleotide
ctaccgcgtcaacgtggcctgtacgaaaga

SEQ ID NO: 183996 - DNA, 30 bp, Artificial Sequence
  Synthetic oligonucleotide
aggcccacgggtaagtctataatcgaaaga

SEQ ID NO: 183997 - DNA, 30 bp, Artificial Sequence
  Synthetic oligonucleotide
ccagtggtacaaccacctaaagctgaaaga

SEQ ID NO: 183998 - DNA, 30 bp, Artificial Sequence
  Synthetic oligonucleotide
gacgccagaggcgttccattgcactaaaga

SEQ ID NO: 183999 - DNA, 30 bp, Artificial Sequence
  Synthetic oligonucleotide
gtgagggcataccgccaggttacgtaaaga

SEQ ID NO: 184000 - DNA, 30 bp, Artificial Sequence
  Synthetic oligonucleotide
ctgttgcagtcacggacttggcggtaaaga

SEQ ID NO: 184001 - DNA, 30 bp, Artificial Sequence
  Synthetic oligonucleotide
ggagaagtacacggtagattggggtaaaga

SEQ ID NO: 184002 - DNA, 30 bp, Artificial Sequence
  Synthetic oligonucleotide
caattttctaagattaagacgaccacaaga

SEQ ID NO: 184003 - DNA, 30 bp, Artificial Sequence
  Synthetic oligonucleotide
ggtcccgacctttaatgcgcttgtacaaga

SEQ ID NO: 184004 - DNA, 30 bp, Artificial Sequence
  Synthetic oligonucleotide
gtgggatccagctcgcgtgggtttacaaga

SEQ ID NO: 184005 - DNA, 30 bp, Artificial Sequence
  Synthetic oligonucleotide
gtatgagggccgtccgctgctgatccaaga

SEQ ID NO: 184006 - DNA, 30 bp, Artificial Sequence
  Synthetic oligonucleotide
cccgtcaaaacaaccttatctatcgcaaga

SEQ ID NO: 184007 - DNA, 30 bp, Artificial Sequence
  Synthetic oligonucleotide
acagctcagaggtggattgtaccatcaaga

SEQ ID NO: 184008 - DNA, 30 bp, Artificial Sequence
  Synthetic oligonucleotide
tggcgttgtgcactccaagctgagtcaaga

SEQ ID NO: 184009 - DNA, 30 bp, Artificial Sequence
  Synthetic oligonucleotide
gttgaagctggggagtgagatggttcaaga

SEQ ID NO: 184010 - DNA, 30 bp, Artificial Sequence
  Synthetic oligonucleotide
aggtggtcaaaatgtttccagaaaagaaga

SEQ ID NO: 184011 - DNA, 30 bp, Artificial Sequence
  Synthetic oligonucleotide
atgccggcacaaggaggtctctaaagaaga

SEQ ID NO: 184012 - DNA, 30 bp, Artificial Sequence
  Synthetic oligonucleotide
aaggtcgctagagcgagtcttttcagaaga

SEQ ID NO: 184013 - DNA, 30 bp, Artificial Sequence
  Synthetic oligonucleotide
gtataacagcagccgcttaaggggagaaga

SEQ ID NO: 184014 - DNA, 30 bp, Artificial Sequence
  Synthetic oligonucleotide
gcacaatgcttgttaaatgttctgagaaga

SEQ ID NO: 184015 - DNA, 30 bp, Artificial Sequence
  Synthetic oligonucleotide
agagaggtaagagagcttcccaatagaaga

SEQ ID NO: 184016 - DNA, 30 bp, Artificial Sequence
  Synthetic oligonucleotide
gcaaacgcacgaggtcgatcggaacgaaga

SEQ ID NO: 184017 - DNA, 30 bp, Artificial Sequence
  Synthetic oligonucleotide
actatgtacctgggttttaggccccgaaga

SEQ ID NO: 184018 - DNA, 30 bp, Artificial Sequence
  Synthetic oligonucleotide
ttggaactccgtgtgaagtaggtaggaaga

SEQ ID NO: 184019 - DNA, 30 bp, Artificial Sequence
  Synthetic oligonucleotide
gagtcgttccaacatacgctctacggaaga

SEQ ID NO: 184020 - DNA, 30 bp, Artificial Sequence
  Synthetic oligonucleotide
ggtgcacacgagctggggagcagcggaaga

SEQ ID NO: 184021 - DNA, 30 bp, Artificial Sequence
  Synthetic oligonucleotide
tagttgcaaaagcgacgtccacggggaaga

SEQ ID NO: 184022 - DNA, 30 bp, Artificial Sequence
  Synthetic oligonucleotide
gtgtggtggcgtaatcctttttgtggaaga

SEQ ID NO: 184023 - DNA, 30 bp, Artificial Sequence
  Synthetic oligonucleotide
cggactattaaagggggaggatgctgaaga

SEQ ID NO: 184024 - DNA, 30 bp, Artificial Sequence
  Synthetic oligonucleotide
ccgcgtcaaaatcccggctgcatctgaaga

SEQ ID NO: 184025 - DNA, 30 bp, Artificial Sequence
  Synthetic oligonucleotide
cgatcattaatgcttattgcgaagtgaaga

SEQ ID NO: 184026 - DNA, 30 bp, Artificial Sequence
  Synthetic oligonucleotide
ggtacaccccattgctgtcaatattgaaga

SEQ ID NO: 184027 - DNA, 30 bp, Artificial Sequence
  Synthetic oligonucleotide
cgtccgttagtttcattgggccaaataaga

SEQ ID NO: 184028 - DNA, 30 bp, Artificial Sequence
  Synthetic oligonucleotide
accggagaatccctctcgtaggtcataaga

SEQ ID NO: 184029 - DNA, 30 bp, Artificial Sequence
  Synthetic oligonucleotide
ctatgccgtttgctgcgacgccctataaga

SEQ ID NO: 184030 - DNA, 30 bp, Artificial Sequence
  Synthetic oligonucleotide
actgcgtcggactttgttggggaactaaga

SEQ ID NO: 184031 - DNA, 30 bp, Artificial Sequence
  Synthetic oligonucleotide
agtgcgccatggtagggcggtttactaaga

SEQ ID NO: 184032 - DNA, 30 bp, Artificial Sequence
  Synthetic oligonucleotide
gtagtgcacaggccataactggtcctaaga

SEQ ID NO: 184033 - DNA, 30 bp, Artificial Sequence
  Synthetic oligonucleotide
tgttggcttcagatatttcaatcgctaaga

SEQ ID NO: 184034 - DNA, 30 bp, Artificial Sequence
  Synthetic oligonucleotide
cagagttagtcagataatgcctatctaaga

SEQ ID NO: 184035 - DNA, 30 bp, Artificial Sequence
  Synthetic oligonucleotide
ggacttccggccaccactcataacgtaaga

SEQ ID NO: 184036 - DNA, 30 bp, Artificial Sequence
  Synthetic oligonucleotide
tgggccaaaaaaatattggcggccgtaaga

SEQ ID NO: 184037 - DNA, 30 bp, Artificial Sequence
  Synthetic oligonucleotide
gccttaaactgcagcgttaggcaggtaaga

SEQ ID NO: 184038 - DNA, 30 bp, Artificial Sequence
  Synthetic oligonucleotide
caaccttactgtcagtaagttggggtaaga

SEQ ID NO: 184039 - DNA, 30 bp, Artificial Sequence
  Synthetic oligonucleotide
cgcctagatgatggctctatggtggtaaga

SEQ ID NO: 184040 - DNA, 30 bp, Artificial Sequence
  Synthetic oligonucleotide
gacagacgcgttacagtaaaccttgtaaga

SEQ ID NO: 184041 - DNA, 30 bp, Artificial Sequence
  Synthetic oligonucleotide
ctaagcacacggcacgatcgaaaattaaga

SEQ ID NO: 184042 - DNA, 30 bp, Artificial Sequence
  Synthetic oligonucleotide
ttagacatccaattacacctgtagttaaga

SEQ ID NO: 184043 - DNA, 30 bp, Artificial Sequence
  Synthetic oligonucleotide
tcctcggactgacatccacgtctgttaaga

SEQ ID NO: 184044 - DNA, 30 bp, Artificial Sequence
  Synthetic oligonucleotide
gggggacggcaccagaaataggtgttaaga

SEQ ID NO: 184045 - DNA, 30 bp, Artificial Sequence
  Synthetic oligonucleotide
aacttacattacttcgatcgtgaaaacaga

SEQ ID NO: 184046 - DNA, 30 bp, Artificial Sequence
  Synthetic oligonucleotide
gggaattacatcgggggcctgagaaacaga

SEQ ID NO: 184047 - DNA, 30 bp, Artificial Sequence
  Synthetic oligonucleotide
ctaaagtgtgggtgtggactgcccaacaga

SEQ ID NO: 184048 - DNA, 30 bp, Artificial Sequence
  Synthetic oligonucleotide
gtgctgatattcggacatccaagcaacaga

SEQ ID NO: 184049 - DNA, 30 bp, Artificial Sequence
  Synthetic oligonucleotide
tatgctcctgcatacagatcaggcaacaga

SEQ ID NO: 184050 - DNA, 30 bp, Artificial Sequence
  Synthetic oligonucleotide
cgtatctttaaaaggggtgacacgaacaga

SEQ ID NO: 184051 - DNA, 30 bp, Artificial Sequence
  Synthetic oligonucleotide
gaacgcgcgagactggattgttgacacaga

SEQ ID NO: 184052 - DNA, 30 bp, Artificial Sequence
  Synthetic oligonucleotide
ttagcgtttgtgcagaaagtaacccacaga

SEQ ID NO: 184053 - DNA, 30 bp, Artificial Sequence
  Synthetic oligonucleotide
gtgggcttctcggaacagtgacccgacaga

SEQ ID NO: 184054 - DNA, 30 bp, Artificial Sequence
  Synthetic oligonucleotide
gaaaccgtggtttggatggtaagcgacaga

SEQ ID NO: 184055 - DNA, 30 bp, Artificial Sequence
  Synthetic oligonucleotide
ctatcctgggcttccgtgcatgtcgacaga

SEQ ID NO: 184056 - DNA, 30 bp, Artificial Sequence
  Synthetic oligonucleotide
agtatttgataacttcagtcagaatacaga

SEQ ID NO: 184057 - DNA, 30 bp, Artificial Sequence
  Synthetic oligonucleotide
atccgcggtcgagtcccacgcacatacaga

SEQ ID NO: 184058 - DNA, 30 bp, Artificial Sequence
  Synthetic oligonucleotide
caggctctagagctatcaatcagatacaga

SEQ ID NO: 184059 - DNA, 30 bp, Artificial Sequence
  Synthetic oligonucleotide
gagcgtgtgccgactcggtatatatacaga

SEQ ID NO: 184060 - DNA, 30 bp, Artificial Sequence
  Synthetic oligonucleotide
agaaacaactcccggcacgtaagctacaga

SEQ ID NO: 184061 - DNA, 30 bp, Artificial Sequence
  Synthetic oligonucleotide
aggagatttgtgcagagctgaggctacaga

SEQ ID NO: 184062 - DNA, 30 bp, Artificial Sequence
  Synthetic oligonucleotide
ataaagaattttccgacgtattagtacaga

SEQ ID NO: 184063 - DNA, 30 bp, Artificial Sequence
  Synthetic oligonucleotide
tcgcacgaactcgtgggggattaaaccaga

SEQ ID NO: 184064 - DNA, 30 bp, Artificial Sequence
  Synthetic oligonucleotide
acggctacggcagtagcgggtggaaccaga

SEQ ID NO: 184065 - DNA, 30 bp, Artificial Sequence
  Synthetic oligonucleotide
taagcctttcccgggataggagacaccaga

SEQ ID NO: 184066 - DNA, 30 bp, Artificial Sequence
  Synthetic oligonucleotide
gtcgtcgcatatttgccaagccccaccaga

SEQ ID NO: 184067 - DNA, 30 bp, Artificial Sequence
  Synthetic oligonucleotide
tctcagagtgcgatcgttgcggggaccaga

SEQ ID NO: 184068 - DNA, 30 bp, Artificial Sequence
  Synthetic oligonucleotide
ggtgatttaagccctccggcctctaccaga

SEQ ID NO: 184069 - DNA, 30 bp, Artificial Sequence
  Synthetic oligonucleotide
aaggtgttagatttggatccgcttaccaga

SEQ ID NO: 184070 - DNA, 30 bp, Artificial Sequence
  Synthetic oligonucleotide
gcagtcacggggtcgatctgaaaccccaga

SEQ ID NO: 184071 - DNA, 30 bp, Artificial Sequence
  Synthetic oligonucleotide
caaacgatcattgcgtattgcacgcccaga

SEQ ID NO: 184072 - DNA, 30 bp, Artificial Sequence
  Synthetic oligonucleotide
gggatcccggatcgcgcataaaatcccaga

SEQ ID NO: 184073 - DNA, 30 bp, Artificial Sequence
  Synthetic oligonucleotide
ttctttggaagggagctggttattcccaga

SEQ ID NO: 184074 - DNA, 30 bp, Artificial Sequence
  Synthetic oligonucleotide
attcgttaacggtgagcaaaaatagccaga

SEQ ID NO: 184075 - DNA, 30 bp, Artificial Sequence
  Synthetic oligonucleotide
aaagcggtctggtgcgaccctagcgccaga

SEQ ID NO: 184076 - DNA, 30 bp, Artificial Sequence
  Synthetic oligonucleotide
cacacagccctattccgacggtaggccaga

SEQ ID NO: 184077 - DNA, 30 bp, Artificial Sequence
  Synthetic oligonucleotide
gcggaccacgttcggtgtccgcgtgccaga

SEQ ID NO: 184078 - DNA, 30 bp, Artificial Sequence
  Synthetic oligonucleotide
gcctatatctttaatagtagtattgccaga

SEQ ID NO: 184079 - DNA, 30 bp, Artificial Sequence
  Synthetic oligonucleotide
tacgggttattttggcagccataatccaga

SEQ ID NO: 184080 - DNA, 30 bp, Artificial Sequence
  Synthetic oligonucleotide
acgaccttatgcatctcaatataatccaga

SEQ ID NO: 184081 - DNA, 30 bp, Artificial Sequence
  Synthetic oligonucleotide
tagtctctgaggcgggcgagagtatccaga

SEQ ID NO: 184082 - DNA, 30 bp, Artificial Sequence
  Synthetic oligonucleotide
tttcaccctgcgcaatggctgtactccaga

SEQ ID NO: 184083 - DNA, 30 bp, Artificial Sequence
  Synthetic oligonucleotide
tcgagatacacggtttatagttcaagcaga

SEQ ID NO: 184084 - DNA, 30 bp, Artificial Sequence
  Synthetic oligonucleotide
tctagctgtcacgttaagcgaacgagcaga

SEQ ID NO: 184085 - DNA, 30 bp, Artificial Sequence
  Synthetic oligonucleotide
tcgctgccgttgggacaaattacacgcaga

SEQ ID NO: 184086 - DNA, 30 bp, Artificial Sequence
  Synthetic oligonucleotide
gataatggctcctaggcatccacccgcaga

SEQ ID NO: 184087 - DNA, 30 bp, Artificial Sequence
  Synthetic oligonucleotide
ctttcggacagacccacatagatccgcaga

SEQ ID NO: 184088 - DNA, 30 bp, Artificial Sequence
  Synthetic oligonucleotide
gtatcgtctgtactggagctttcgcgcaga

SEQ ID NO: 184089 - DNA, 30 bp, Artificial Sequence
  Synthetic oligonucleotide
acgccctagggtgttaaccggtggcgcaga

SEQ ID NO: 184090 - DNA, 30 bp, Artificial Sequence
  Synthetic oligonucleotide
caggaggcccactatagcgcgcatcgcaga

SEQ ID NO: 184091 - DNA, 30 bp, Artificial Sequence
  Synthetic oligonucleotide
tgtaggaattatccgactgaggccggcaga

SEQ ID NO: 184092 - DNA, 30 bp, Artificial Sequence
  Synthetic oligonucleotide
aacagttacgtaggaagcggaaagggcaga

SEQ ID NO: 184093 - DNA, 30 bp, Artificial Sequence
  Synthetic oligonucleotide
taaaccattgcactggacgatcggggcaga

SEQ ID NO: 184094 - DNA, 30 bp, Artificial Sequence
  Synthetic oligonucleotide
ctacgcgtcgaagcgtgcggttatggcaga

SEQ ID NO: 184095 - DNA, 30 bp, Artificial Sequence
  Synthetic oligonucleotide
atgcaatgcaattttcgtataactggcaga

SEQ ID NO: 184096 - DNA, 30 bp, Artificial Sequence
  Synthetic oligonucleotide
tatccgtcgtgttcaacatcgtgtggcaga

SEQ ID NO: 184097 - DNA, 30 bp, Artificial Sequence
  Synthetic oligonucleotide
tacgtcgtctagccacaggcttgatgcaga

SEQ ID NO: 184098 - DNA, 30 bp, Artificial Sequence
  Synthetic oligonucleotide
caataaaaccgtggctggtattgctgcaga

SEQ ID NO: 184099 - DNA, 30 bp, Artificial Sequence
  Synthetic oligonucleotide
ggccctatactgaaaaaccgtccaatcaga

SEQ ID NO: 184100 - DNA, 30 bp, Artificial Sequence
  Synthetic oligonucleotide
gacaaatctagagtgggcacctgaatcaga

SEQ ID NO: 184101 - DNA, 30 bp, Artificial Sequence
  Synthetic oligonucleotide
acacgacctgccgctggcggaaacatcaga

SEQ ID NO: 184102 - DNA, 30 bp, Artificial Sequence
  Synthetic oligonucleotide
ctatgacacaatgtcagtagacagatcaga

SEQ ID NO: 184103 - DNA, 30 bp, Artificial Sequence
  Synthetic oligonucleotide
gaacaagacagaaaaacctgctgtatcaga

SEQ ID NO: 184104 - DNA, 30 bp, Artificial Sequence
  Synthetic oligonucleotide
aggcgtaaactgttaagtctagaactcaga

SEQ ID NO: 184105 - DNA, 30 bp, Artificial Sequence
  Synthetic oligonucleotide
tctgcgccgggaatggataaatcgctcaga

SEQ ID NO: 184106 - DNA, 30 bp, Artificial Sequence
  Synthetic oligonucleotide
aggcaaggactgccctgttgatcgctcaga

SEQ ID NO: 184107 - DNA, 30 bp, Artificial Sequence
  Synthetic oligonucleotide
cttccacagggcacgagttactggctcaga

SEQ ID NO: 184108 - DNA, 30 bp, Artificial Sequence
  Synthetic oligonucleotide
cgcaggatagaatctacttatttgctcaga

SEQ ID NO: 184109 - DNA, 30 bp, Artificial Sequence
  Synthetic oligonucleotide
atagactacgtatggttgcttgatctcaga

SEQ ID NO: 184110 - DNA, 30 bp, Artificial Sequence
  Synthetic oligonucleotide
tatacaatatcgttcacactgcctctcaga

SEQ ID NO: 184111 - DNA, 30 bp, Artificial Sequence
  Synthetic oligonucleotide
tattacccaatgatatattggtctctcaga

SEQ ID NO: 184112 - DNA, 30 bp, Artificial Sequence
  Synthetic oligonucleotide
gatcttccagctaagttcggtaacgtcaga

SEQ ID NO: 184113 - DNA, 30 bp, Artificial Sequence
  Synthetic oligonucleotide
acagtgagatatacagtttctaccgtcaga

SEQ ID NO: 184114 - DNA, 30 bp, Artificial Sequence
  Synthetic oligonucleotide
gctcggacatgctccttacagcgcgtcaga

SEQ ID NO: 184115 - DNA, 30 bp, Artificial Sequence
  Synthetic oligonucleotide
gacatccgctggtccgccctgggggtcaga

SEQ ID NO: 184116 - DNA, 30 bp, Artificial Sequence
  Synthetic oligonucleotide
gattgcgccaacttcggatattgcttcaga

SEQ ID NO: 184117 - DNA, 30 bp, Artificial Sequence
  Synthetic oligonucleotide
gacggggtttcgcaaaatggtgtgttcaga

SEQ ID NO: 184118 - DNA, 30 bp, Artificial Sequence
  Synthetic oligonucleotide
tatatggcaaaggggatcaacaatttcaga

SEQ ID NO: 184119 - DNA, 30 bp, Artificial Sequence
  Synthetic oligonucleotide
agccgtcagctacagataaccaaaaagaga

SEQ ID NO: 184120 - DNA, 30 bp, Artificial Sequence
  Synthetic oligonucleotide
ttcagattcgtctctctaatcaaaaagaga

SEQ ID NO: 184121 - DNA, 30 bp, Artificial Sequence
  Synthetic oligonucleotide
cgcttcgctcttagaaggtcacgaaagaga

SEQ ID NO: 184122 - DNA, 30 bp, Artificial Sequence
  Synthetic oligonucleotide
tataattgggtcactagacatcggaagaga

SEQ ID NO: 184123 - DNA, 30 bp, Artificial Sequence
  Synthetic oligonucleotide
tgggcggctttggacgtcgcccgtaagaga

SEQ ID NO: 184124 - DNA, 30 bp, Artificial Sequence
  Synthetic oligonucleotide
ttaggttcaaacgtacacaaaggtaagaga

SEQ ID NO: 184125 - DNA, 30 bp, Artificial Sequence
  Synthetic oligonucleotide
tttggagccagggatgatggggtccagaga

SEQ ID NO: 184126 - DNA, 30 bp, Artificial Sequence
  Synthetic oligonucleotide
ggacaagtctaaacgagcacccggcagaga

SEQ ID NO: 184127 - DNA, 30 bp, Artificial Sequence
  Synthetic oligonucleotide
aacgtagtttaactgcactatcatcagaga

SEQ ID NO: 184128 - DNA, 29 bp, Artificial Sequence
  Synthetic oligonucleotide
aatctggcacaggctgagagtcggagaga

SEQ ID NO: 184129 - DNA, 30 bp, Artificial Sequence
  Synthetic oligonucleotide
attcagacgggagttccgagttcggagaga

SEQ ID NO: 184130 - DNA, 30 bp, Artificial Sequence
  Synthetic oligonucleotide
acataatcagaattccgaggctatgagaga

SEQ ID NO: 184131 - DNA, 30 bp, Artificial Sequence
  Synthetic oligonucleotide
cgacttgtctgacacgtagggtctgagaga

SEQ ID NO: 184132 - DNA, 30 bp, Artificial Sequence
  Synthetic oligonucleotide
cgacaaagcactgttttatcttaatagaga

SEQ ID NO: 184133 - DNA, 30 bp, Artificial Sequence
  Synthetic oligonucleotide
gcgtttcagatcaagataccatagtagaga

SEQ ID NO: 184134 - DNA, 30 bp, Artificial Sequence
  Synthetic oligonucleotide
ctttgtggtcacatcactggcgtgtagaga

SEQ ID NO: 184135 - DNA, 30 bp, Artificial Sequence
  Synthetic oligonucleotide
ggtcacccggcagtacataatttgtagaga

SEQ ID NO: 184136 - DNA, 30 bp, Artificial Sequence
  Synthetic oligonucleotide
gaggtttacgggttagacgtaaaaacgaga

SEQ ID NO: 184137 - DNA, 30 bp, Artificial Sequence
  Synthetic oligonucleotide
tatgaatcttcactgaggaaatcaacgaga

SEQ ID NO: 184138 - DNA, 30 bp, Artificial Sequence
  Synthetic oligonucleotide
cagaagagacggttggttattcacacgaga

SEQ ID NO: 184139 - DNA, 30 bp, Artificial Sequence
  Synthetic oligonucleotide
cttagaaggactttcgtcgatggcacgaga

SEQ ID NO: 184140 - DNA, 30 bp, Artificial Sequence
  Synthetic oligonucleotide
gtggcccgcgcgtgcagggaagtgacgaga

SEQ ID NO: 184141 - DNA, 30 bp, Artificial Sequence
  Synthetic oligonucleotide
atcgcttgactataatcctgcagtacgaga

SEQ ID NO: 184142 - DNA, 30 bp, Artificial Sequence
  Synthetic oligonucleotide
ttcgcgcagcgcgactcactgattacgaga

SEQ ID NO: 184143 - DNA, 30 bp, Artificial Sequence
  Synthetic oligonucleotide
ttcaggtgggctagaactatttaaccgaga

SEQ ID NO: 184144 - DNA, 30 bp, Artificial Sequence
  Synthetic oligonucleotide
caagccggcaaccttgattgagtaccgaga

SEQ ID NO: 184145 - DNA, 30 bp, Artificial Sequence
  Synthetic oligonucleotide
ccaattacggcacgggtaggaaagccgaga

SEQ ID NO: 184146 - DNA, 30 bp, Artificial Sequence
  Synthetic oligonucleotide
ccccgggcgaatcgttttcgactcgcgaga

SEQ ID NO: 184147 - DNA, 30 bp, Artificial Sequence
  Synthetic oligonucleotide
cagaagggtactgcatgtgtttaggcgaga

SEQ ID NO: 184148 - DNA, 30 bp, Artificial Sequence
  Synthetic oligonucleotide
gctgtcctaatagtcacgtattgggcgaga

SEQ ID NO: 184149 - DNA, 30 bp, Artificial Sequence
  Synthetic oligonucleotide
ccaatggaatcaattggggcatcctcgaga

SEQ ID NO: 184150 - DNA, 30 bp, Artificial Sequence
  Synthetic oligonucleotide
ctggcgtcccatggactcggaatctcgaga

SEQ ID NO: 184151 - DNA, 30 bp, Artificial Sequence
  Synthetic oligonucleotide
catgacaattctccgtgaaggctcaggaga

SEQ ID NO: 184152 - DNA, 30 bp, Artificial Sequence
  Synthetic oligonucleotide
tatgagtaccaggtggttgtcgtcaggaga

SEQ ID NO: 184153 - DNA, 30 bp, Artificial Sequence
  Synthetic oligonucleotide
gcgttgagctcaactacaggtatgaggaga

SEQ ID NO: 184154 - DNA, 30 bp, Artificial Sequence
  Synthetic oligonucleotide
gcccgaggtttccctgaacatgtgaggaga

SEQ ID NO: 184155 - DNA, 30 bp, Artificial Sequence
  Synthetic oligonucleotide
agaaagtagttccgggtcgtcgaacggaga

SEQ ID NO: 184156 - DNA, 30 bp, Artificial Sequence
  Synthetic oligonucleotide
tgatcgaccgttcatgaagtcctacggaga

SEQ ID NO: 184157 - DNA, 30 bp, Artificial Sequence
  Synthetic oligonucleotide
ccagcttatagagagtgtaccagccggaga

SEQ ID NO: 184158 - DNA, 30 bp, Artificial Sequence
  Synthetic oligonucleotide
acttttcacgtcttgcaggagggtcggaga

SEQ ID NO: 184159 - DNA, 30 bp, Artificial Sequence
  Synthetic oligonucleotide
tgtaagtagtccgggggcaagctagggaga

SEQ ID NO: 184160 - DNA, 30 bp, Artificial Sequence
  Synthetic oligonucleotide
gcttgaggtgaaggcattcaggatgggaga

SEQ ID NO: 184161 - DNA, 30 bp, Artificial Sequence
  Synthetic oligonucleotide
cacgggcaaaaatgcccctcttatgggaga

SEQ ID NO: 184162 - DNA, 30 bp, Artificial Sequence
  Synthetic oligonucleotide
gaccggccttcgacacaacttatatggaga

SEQ ID NO: 184163 - DNA, 30 bp, Artificial Sequence
  Synthetic oligonucleotide
cgcccttacggcattgtttcctactggaga

SEQ ID NO: 184164 - DNA, 29 bp, Artificial Sequence
  Synthetic oligonucleotide
acgggtcgacggcgtgtgccgattggaga

SEQ ID NO: 184165 - DNA, 30 bp, Artificial Sequence
  Synthetic oligonucleotide
gtgacgtgcaagccgcagagctgaatgaga

SEQ ID NO: 184166 - DNA, 30 bp, Artificial Sequence
  Synthetic oligonucleotide
aaactgggtgcgtggttgctatcgatgaga

SEQ ID NO: 184167 - DNA, 30 bp, Artificial Sequence
  Synthetic oligonucleotide
taaaggtacttaccgtatgacaggatgaga

SEQ ID NO: 184168 - DNA, 30 bp, Artificial Sequence
  Synthetic oligonucleotide
gacccttctagcgtgtcttcgaatatgaga

SEQ ID NO: 184169 - DNA, 29 bp, Artificial Sequence
  Synthetic oligonucleotide
tatttagacattgcgaaaagcgtatgaga

SEQ ID NO: 184170 - DNA, 30 bp, Artificial Sequence
  Synthetic oligonucleotide
tccctggaaattgtgttataaaggctgaga

SEQ ID NO: 184171 - DNA, 30 bp, Artificial Sequence
  Synthetic oligonucleotide
tcagattagcggatggtgccggaagtgaga

SEQ ID NO: 184172 - DNA, 30 bp, Artificial Sequence
  Synthetic oligonucleotide
cggtccgtggaagttcctttaatcgtgaga

SEQ ID NO: 184173 - DNA, 30 bp, Artificial Sequence
  Synthetic oligonucleotide
tgacagaacgtagtcgggttcgcggtgaga

SEQ ID NO: 184174 - DNA, 30 bp, Artificial Sequence
  Synthetic oligonucleotide
gtaaagtgggcggtgcgctgttacttgaga

SEQ ID NO: 184175 - DNA, 30 bp, Artificial Sequence
  Synthetic oligonucleotide
catcgcccgacttggggtgattaaaataga

SEQ ID NO: 184176 - DNA, 30 bp, Artificial Sequence
  Synthetic oligonucleotide
ttgaaccatccttgcgtccagtcaaataga

SEQ ID NO: 184177 - DNA, 30 bp, Artificial Sequence
  Synthetic oligonucleotide
cttaaccaacatctaccttgtataaataga

SEQ ID NO: 184178 - DNA, 30 bp, Artificial Sequence
  Synthetic oligonucleotide
acaacagaccctgttcaatacccgaataga

SEQ ID NO: 184179 - DNA, 30 bp, Artificial Sequence
  Synthetic oligonucleotide
ggagccaacgggcgagattcgtgtaataga

SEQ ID NO: 184180 - DNA, 30 bp, Artificial Sequence
  Synthetic oligonucleotide
taatcgtcaaagctttcacaagaacataga

SEQ ID NO: 184181 - DNA, 30 bp, Artificial Sequence
  Synthetic oligonucleotide
ctgataagacattattcgggtgaacataga

SEQ ID NO: 184182 - DNA, 30 bp, Artificial Sequence
  Synthetic oligonucleotide
aataggcctcaatagctactgaatcataga

SEQ ID NO: 184183 - DNA, 30 bp, Artificial Sequence
  Synthetic oligonucleotide
gtagctaatagccccaatagatcagataga

SEQ ID NO: 184184 - DNA, 30 bp, Artificial Sequence
  Synthetic oligonucleotide
agaggcttttttaaacttaattgagataga

SEQ ID NO: 184185 - DNA, 30 bp, Artificial Sequence
  Synthetic oligonucleotide
ttcgtggggcggacgttaatagccgataga

SEQ ID NO: 184186 - DNA, 30 bp, Artificial Sequence
  Synthetic oligonucleotide
aaaaggagaacttctccctgcctcgataga

SEQ ID NO: 184187 - DNA, 30 bp, Artificial Sequence
  Synthetic oligonucleotide
gcagcacatgatcagtagaacgtcgataga

SEQ ID NO: 184188 - DNA, 30 bp, Artificial Sequence
  Synthetic oligonucleotide
cttaaggccaaaactgggacactggataga

SEQ ID NO: 184189 - DNA, 30 bp, Artificial Sequence
  Synthetic oligonucleotide
ccactgaccagtctagatcaccatgataga

SEQ ID NO: 184190 - DNA, 30 bp, Artificial Sequence
  Synthetic oligonucleotide
agcgttgcatagtactcaggtggtgataga

SEQ ID NO: 184191 - DNA, 30 bp, Artificial Sequence
  Synthetic oligonucleotide
agtagatatatgtgtcacacataatataga

SEQ ID NO: 184192 - DNA, 30 bp, Artificial Sequence
  Synthetic oligonucleotide
tcagccgattgtgtgtgatggagttataga

SEQ ID NO: 184193 - DNA, 30 bp, Artificial Sequence
  Synthetic oligonucleotide
aaaaccgtaaataccgaatgtggttataga

SEQ ID NO: 184194 - DNA, 30 bp, Artificial Sequence
  Synthetic oligonucleotide
agaactttagagtcactaccatgcactaga

SEQ ID NO: 184195 - DNA, 30 bp, Artificial Sequence
  Synthetic oligonucleotide
caaacatatagttgaggctattgacctaga

SEQ ID NO: 184196 - DNA, 30 bp, Artificial Sequence
  Synthetic oligonucleotide
aatgaacttttggggatcatcgtacctaga

SEQ ID NO: 184197 - DNA, 29 bp, Artificial Sequence
  Synthetic oligonucleotide
cattaggtcttggatttggataagctaga

SEQ ID NO: 184198 - DNA, 30 bp, Artificial Sequence
  Synthetic oligonucleotide
caaccttatcgcgatagccaagcggctaga

SEQ ID NO: 184199 - DNA, 30 bp, Artificial Sequence
  Synthetic oligonucleotide
gccaaggcctccgacggaaattatgctaga

SEQ ID NO: 184200 - DNA, 30 bp, Artificial Sequence
  Synthetic oligonucleotide
ataccacggtaggtggtataaactgctaga

SEQ ID NO: 184201 - DNA, 30 bp, Artificial Sequence
  Synthetic oligonucleotide
atcttgagctaggcgtacggcggtgctaga

SEQ ID NO: 184202 - DNA, 30 bp, Artificial Sequence
  Synthetic oligonucleotide
tcgaactcgggcacgagtccatttgctaga

SEQ ID NO: 184203 - DNA, 30 bp, Artificial Sequence
  Synthetic oligonucleotide
aaatgtggggatcatacgttgaagtctaga

SEQ ID NO: 184204 - DNA, 30 bp, Artificial Sequence
  Synthetic oligonucleotide
agagaaaaggatggacatctttcgtctaga

SEQ ID NO: 184205 - DNA, 30 bp, Artificial Sequence
  Synthetic oligonucleotide
agtacaaatcaagggctcatatggagtaga

SEQ ID NO: 184206 - DNA, 30 bp, Artificial Sequence
  Synthetic oligonucleotide
acgattgctatcaagactttggctagtaga

SEQ ID NO: 184207 - DNA, 30 bp, Artificial Sequence
  Synthetic oligonucleotide
agcattatcacatttggagcgcaccgtaga

SEQ ID NO: 184208 - DNA, 30 bp, Artificial Sequence
  Synthetic oligonucleotide
tccacgctagcggatcaacctgagcgtaga

SEQ ID NO: 184209 - DNA, 30 bp, Artificial Sequence
  Synthetic oligonucleotide
cggacgtcctcctctgccttttcgcgtaga

SEQ ID NO: 184210 - DNA, 30 bp, Artificial Sequence
  Synthetic oligonucleotide
cgcgctggaatccttttggaattaggtaga

SEQ ID NO: 184211 - DNA, 30 bp, Artificial Sequence
  Synthetic oligonucleotide
ataagataagcctgcactatcacgggtaga

SEQ ID NO: 184212 - DNA, 30 bp, Artificial Sequence
  Synthetic oligonucleotide
tggcgggctggttaagagctgtgtggtaga

SEQ ID NO: 184213 - DNA, 30 bp, Artificial Sequence
  Synthetic oligonucleotide
gagagtggatagggaatggatcaatgtaga

SEQ ID NO: 184214 - DNA, 30 bp, Artificial Sequence
  Synthetic oligonucleotide
gccatgtgggtgtgatgataggcttgtaga

SEQ ID NO: 184215 - DNA, 30 bp, Artificial Sequence
  Synthetic oligonucleotide
aatctcgaggatttccggactggttgtaga

SEQ ID NO: 184216 - DNA, 30 bp, Artificial Sequence
  Synthetic oligonucleotide
taaaagcttgtaactcgattgaacattaga

SEQ ID NO: 184217 - DNA, 30 bp, Artificial Sequence
  Synthetic oligonucleotide
agcgaacgggcaagtaactcggagattaga

SEQ ID NO: 184218 - DNA, 30 bp, Artificial Sequence
  Synthetic oligonucleotide
tataaaatcggtaataatacgaggattaga

SEQ ID NO: 184219 - DNA, 30 bp, Artificial Sequence
  Synthetic oligonucleotide
attagcaagacgttggtccataggattaga

SEQ ID NO: 184220 - DNA, 30 bp, Artificial Sequence
  Synthetic oligonucleotide
gcatgacaggtgaaagggttatctattaga

SEQ ID NO: 184221 - DNA, 30 bp, Artificial Sequence
  Synthetic oligonucleotide
attcggccagagatttgtagtacacttaga

SEQ ID NO: 184222 - DNA, 30 bp, Artificial Sequence
  Synthetic oligonucleotide
atcccgttctgaatttgtgacagacttaga

SEQ ID NO: 184223 - DNA, 30 bp, Artificial Sequence
  Synthetic oligonucleotide
tcgcgtttattcacaagttttctacttaga

SEQ ID NO: 184224 - DNA, 30 bp, Artificial Sequence
  Synthetic oligonucleotide
cagtgaggaaactggcactagaatcttaga

SEQ ID NO: 184225 - DNA, 30 bp, Artificial Sequence
  Synthetic oligonucleotide
tagtgcacgcttccctccatcaaagttaga

SEQ ID NO: 184226 - DNA, 30 bp, Artificial Sequence
  Synthetic oligonucleotide
ctacaaagatacggttgacgcgtcgttaga

SEQ ID NO: 184227 - DNA, 30 bp, Artificial Sequence
  Synthetic oligonucleotide
ttcctaaaattggccaacacacgggttaga

SEQ ID NO: 184228 - DNA, 30 bp, Artificial Sequence
  Synthetic oligonucleotide
acagcgccctagagtgttagttttgttaga

SEQ ID NO: 184229 - DNA, 30 bp, Artificial Sequence
  Synthetic oligonucleotide
tgaaggagctaaggaattgagctatttaga

SEQ ID NO: 184230 - DNA, 30 bp, Artificial Sequence
  Synthetic oligonucleotide
tcaatgccgaattcgagcagattatttaga

SEQ ID NO: 184231 - DNA, 30 bp, Artificial Sequence
  Synthetic oligonucleotide
ggtagagtcgcaaaagatcgcaaaaaacga

SEQ ID NO: 184232 - DNA, 31 bp, Artificial Sequence
  Synthetic oligonucleotide
tcggcacgccgttagggttcctgaaaaacga

SEQ ID NO: 184233 - DNA, 30 bp, Artificial Sequence
  Synthetic oligonucleotide
ggtaaccgacccgtcgtgtagagaaaacga

SEQ ID NO: 184234 - DNA, 30 bp, Artificial Sequence
  Synthetic oligonucleotide
ctaatcatggaactagaaactaccaaacga

SEQ ID NO: 184235 - DNA, 30 bp, Artificial Sequence
  Synthetic oligonucleotide
acttcgaaatacgcattatttaccaaacga

SEQ ID NO: 184236 - DNA, 30 bp, Artificial Sequence
  Synthetic oligonucleotide
taaccggccaacccgagccgaagcaaacga

SEQ ID NO: 184237 - DNA, 30 bp, Artificial Sequence
  Synthetic oligonucleotide
agctctatttatgtacggggttggaaacga

SEQ ID NO: 184238 - DNA, 30 bp, Artificial Sequence
  Synthetic oligonucleotide
tcgggcaatggtaccgcttaccataaacga

SEQ ID NO: 184239 - DNA, 30 bp, Artificial Sequence
  Synthetic oligonucleotide
cgcccaaccccattctgctgtattaaacga

SEQ ID NO: 184240 - DNA, 30 bp, Artificial Sequence
  Synthetic oligonucleotide
cgtttagctgcttaagttcgtaaacaacga

SEQ ID NO: 184241 - DNA, 30 bp, Artificial Sequence
  Synthetic oligonucleotide
gggttggcagattcaaacccatggcaacga

SEQ ID NO: 184242 - DNA, 30 bp, Artificial Sequence
  Synthetic oligonucleotide
tctagccaatccccggtctgctttcaacga

SEQ ID NO: 184243 - DNA, 30 bp, Artificial Sequence
  Synthetic oligonucleotide
cacattgaacaccggactgtctaagaacga

SEQ ID NO: 184244 - DNA, 30 bp, Artificial Sequence
  Synthetic oligonucleotide
gctcccgaccccggggacgtccgagaacga

SEQ ID NO: 184245 - DNA, 31 bp, Artificial Sequence
  Synthetic oligonucleotide
tcgcgacaatatcacggactatagcgaacga

SEQ ID NO: 184246 - DNA, 30 bp, Artificial Sequence
  Synthetic oligonucleotide
tttgaagccctagtgggaaggtgcgaacga

SEQ ID NO: 184247 - DNA, 30 bp, Artificial Sequence
  Synthetic oligonucleotide
agcgaccaggtcgccgggaaaccggaacga

SEQ ID NO: 184248 - DNA, 30 bp, Artificial Sequence
  Synthetic oligonucleotide
gttggacaaagcactacagggatggaacga

SEQ ID NO: 184249 - DNA, 30 bp, Artificial Sequence
  Synthetic oligonucleotide
ggcctctagtctgctagcgtgatataacga

SEQ ID NO: 184250 - DNA, 30 bp, Artificial Sequence
  Synthetic oligonucleotide
gaggtggaaggttttttataagcgtaacga

SEQ ID NO: 184251 - DNA, 30 bp, Artificial Sequence
  Synthetic oligonucleotide
gcgatgtatatgttttatagatcgtaacga

SEQ ID NO: 184252 - DNA, 30 bp, Artificial Sequence
  Synthetic oligonucleotide
ggaaaagtattgtcatcttacctgtaacga

SEQ ID NO: 184253 - DNA, 30 bp, Artificial Sequence
  Synthetic oligonucleotide
aaatcgtggaattctgagccactaacacga

SEQ ID NO: 184254 - DNA, 30 bp, Artificial Sequence
  Synthetic oligonucleotide
tcatagcggagaaatgtggttccaccacga

SEQ ID NO: 184255 - DNA, 30 bp, Artificial Sequence
  Synthetic oligonucleotide
gactacagacttcttgtgagcccgccacga

SEQ ID NO: 184256 - DNA, 30 bp, Artificial Sequence
  Synthetic oligonucleotide
agaaaagctgctggcatacttcctccacga

SEQ ID NO: 184257 - DNA, 30 bp, Artificial Sequence
  Synthetic oligonucleotide
atggctccgagatttcttggcagtccacga

SEQ ID NO: 184258 - DNA, 30 bp, Artificial Sequence
  Synthetic oligonucleotide
aaagaaggaccacgcggttcagatgcacga

SEQ ID NO: 184259 - DNA, 30 bp, Artificial Sequence
  Synthetic oligonucleotide
cgttcagtcgtccaggcgtcaattgcacga

SEQ ID NO: 184260 - DNA, 30 bp, Artificial Sequence
  Synthetic oligonucleotide
gatagtggttgaaatggcgaaatctcacga

SEQ ID NO: 184261 - DNA, 30 bp, Artificial Sequence
  Synthetic oligonucleotide
gcttgatcggcctactaaccgtattcacga

SEQ ID NO: 184262 - DNA, 30 bp, Artificial Sequence
  Synthetic oligonucleotide
atgtcaaagatatgggagcgtttttcacga

SEQ ID NO: 184263 - DNA, 30 bp, Artificial Sequence
  Synthetic oligonucleotide
gatcgatgagtaggtaacaccaggagacga

SEQ ID NO: 184264 - DNA, 30 bp, Artificial Sequence
  Synthetic oligonucleotide
atacgagtggggatgggcactgtgagacga

SEQ ID NO: 184265 - DNA, 30 bp, Artificial Sequence
  Synthetic oligonucleotide
agaaagacgtcacatctagcatatcgacga

SEQ ID NO: 184266 - DNA, 30 bp, Artificial Sequence
  Synthetic oligonucleotide
aggaccctattcaacaaggaaactcgacga

SEQ ID NO: 184267 - DNA, 30 bp, Artificial Sequence
  Synthetic oligonucleotide
gaatatctgtagtggatagtaggtcgacga

SEQ ID NO: 184268 - DNA, 30 bp, Artificial Sequence
  Synthetic oligonucleotide
cttactagtcaacttagcgagtgtcgacga

SEQ ID NO: 184269 - DNA, 30 bp, Artificial Sequence
  Synthetic oligonucleotide
tatacgccaactaacatctctggaggacga

SEQ ID NO: 184270 - DNA, 30 bp, Artificial Sequence
  Synthetic oligonucleotide
cgaagtatgggggactgttgaaccggacga

SEQ ID NO: 184271 - DNA, 30 bp, Artificial Sequence
  Synthetic oligonucleotide
gaacgacgctttaatacaagttcttgacga

SEQ ID NO: 184272 - DNA, 30 bp, Artificial Sequence
  Synthetic oligonucleotide
cggttctacctgggcaggtactccatacga

SEQ ID NO: 184273 - DNA, 30 bp, Artificial Sequence
  Synthetic oligonucleotide
ctaatgaaagtggtaatactacgcatacga

SEQ ID NO: 184274 - DNA, 30 bp, Artificial Sequence
  Synthetic oligonucleotide
cgcttagccagatgagttcatcagatacga

SEQ ID NO: 184275 - DNA, 30 bp, Artificial Sequence
  Synthetic oligonucleotide
gcggttcggttagatagaatacatatacga

SEQ ID NO: 184276 - DNA, 30 bp, Artificial Sequence
  Synthetic oligonucleotide
tattaggtctccgtttcacaaatactacga

SEQ ID NO: 184277 - DNA, 30 bp, Artificial Sequence
  Synthetic oligonucleotide
gtaatagaaggatggaacccgtagctacga

SEQ ID NO: 184278 - DNA, 30 bp, Artificial Sequence
  Synthetic oligonucleotide
agcttcaatagtaaccgcgctccgctacga

SEQ ID NO: 184279 - DNA, 30 bp, Artificial Sequence
  Synthetic oligonucleotide
ccatgtcaatagaaggccttgcatctacga

SEQ ID NO: 184280 - DNA, 30 bp, Artificial Sequence
  Synthetic oligonucleotide
ataagggtcacggagggacgttatctacga

SEQ ID NO: 184281 - DNA, 30 bp, Artificial Sequence
  Synthetic oligonucleotide
ggggtgacttcggccgagaactaagtacga

SEQ ID NO: 184282 - DNA, 30 bp, Artificial Sequence
  Synthetic oligonucleotide
ataaggggttgctcttaagcgttagtacga

SEQ ID NO: 184283 - DNA, 30 bp, Artificial Sequence
  Synthetic oligonucleotide
tctagagtgggtgtctcgaaaaacgtacga

SEQ ID NO: 184284 - DNA, 30 bp, Artificial Sequence
  Synthetic oligonucleotide
tatgtaactaacaatctccaaatcgtacga

SEQ ID NO: 184285 - DNA, 30 bp, Artificial Sequence
  Synthetic oligonucleotide
accgcgaatgtcattgagacaacgttacga

SEQ ID NO: 184286 - DNA, 30 bp, Artificial Sequence
  Synthetic oligonucleotide
gcatggtatgcaaactggacacccaaccga

SEQ ID NO: 184287 - DNA, 30 bp, Artificial Sequence
  Synthetic oligonucleotide
tcgtagcgtgtctcgcaagaaactaaccga

SEQ ID NO: 184288 - DNA, 30 bp, Artificial Sequence
  Synthetic oligonucleotide
gtcgaggagactcgttgccgccgtaaccga

SEQ ID NO: 184289 - DNA, 30 bp, Artificial Sequence
  Synthetic oligonucleotide
agagaaggcacggtcgtattcattaaccga

SEQ ID NO: 184290 - DNA, 30 bp, Artificial Sequence
  Synthetic oligonucleotide
tcgcaccaccagcgcgcggtaatacaccga

SEQ ID NO: 184291 - DNA, 30 bp, Artificial Sequence
  Synthetic oligonucleotide
cgatgggtctttcaaaggatttagcaccga

SEQ ID NO: 184292 - DNA, 30 bp, Artificial Sequence
  Synthetic oligonucleotide
ttgcggggtctggagaccaagtggcaccga

SEQ ID NO: 184293 - DNA, 30 bp, Artificial Sequence
  Synthetic oligonucleotide
tgtgcccaattgctcgacacctatcaccga

SEQ ID NO: 184294 - DNA, 30 bp, Artificial Sequence
  Synthetic oligonucleotide
gcgcctaggaaaggcaacgatacagaccga

SEQ ID NO: 184295 - DNA, 30 bp, Artificial Sequence
  Synthetic oligonucleotide
tataacgaattgagggttctacacgaccga

SEQ ID NO: 184296 - DNA, 30 bp, Artificial Sequence
  Synthetic oligonucleotide
caatgacacagcgacctttcacatgaccga

SEQ ID NO: 184297 - DNA, 30 bp, Artificial Sequence
  Synthetic oligonucleotide
agttcctttcgagactcttagcaataccga

SEQ ID NO: 184298 - DNA, 30 bp, Artificial Sequence
  Synthetic oligonucleotide
tgttgtacacttcacatgaagctataccga

SEQ ID NO: 184299 - DNA, 30 bp, Artificial Sequence
  Synthetic oligonucleotide
gcgaaatagggaagatcgtacggctaccga

SEQ ID NO: 184300 - DNA, 30 bp, Artificial Sequence
  Synthetic oligonucleotide
caaccaacctatcattacgtttcttaccga

SEQ ID NO: 184301 - DNA, 30 bp, Artificial Sequence
  Synthetic oligonucleotide
aacacaggctcgtaaatgggaccaacccga

SEQ ID NO: 184302 - DNA, 31 bp, Artificial Sequence
  Synthetic oligonucleotide
gcatgtctctaaattcgcatcgttaacccga

SEQ ID NO: 184303 - DNA, 30 bp, Artificial Sequence
  Synthetic oligonucleotide
taacggtattaatgcacattagtcacccga

SEQ ID NO: 184304 - DNA, 30 bp, Artificial Sequence
  Synthetic oligonucleotide
gatgactcgactatgggcctcctaccccga

SEQ ID NO: 184305 - DNA, 30 bp, Artificial Sequence
  Synthetic oligonucleotide
agcatgctcgagactctatctgacccccga

SEQ ID NO: 184306 - DNA, 30 bp, Artificial Sequence
  Synthetic oligonucleotide
acgctcgtaaagggcggtgttctcccccga

SEQ ID NO: 184307 - DNA, 30 bp, Artificial Sequence
  Synthetic oligonucleotide
gttcacttgttacgtaacaacttggcccga

SEQ ID NO: 184308 - DNA, 30 bp, Artificial Sequence
  Synthetic oligonucleotide
gcagccatagtgagtttgcgtgtctcccga

SEQ ID NO: 184309 - DNA, 30 bp, Artificial Sequence
  Synthetic oligonucleotide
gagtagcgtcccccggagaaagcgtcccga

SEQ ID NO: 184310 - DNA, 30 bp, Artificial Sequence
  Synthetic oligonucleotide
cattcataacataccaaatcgaattcccga

SEQ ID NO: 184311 - DNA, 30 bp, Artificial Sequence
  Synthetic oligonucleotide
tctcgtcctgctcgcgttaagtaaagccga

SEQ ID NO: 184312 - DNA, 30 bp, Artificial Sequence
  Synthetic oligonucleotide
taccggaatgctaattggaagcaacgccga

SEQ ID NO: 184313 - DNA, 30 bp, Artificial Sequence
  Synthetic oligonucleotide
cggaggaagtgtgggtccacaagacgccga

SEQ ID NO: 184314 - DNA, 30 bp, Artificial Sequence
  Synthetic oligonucleotide
cggtagtttggcgggtcctacgtacgccga

SEQ ID NO: 184315 - DNA, 30 bp, Artificial Sequence
  Synthetic oligonucleotide
ataggtttacacaaaggggtgtcgcgccga

SEQ ID NO: 184316 - DNA, 30 bp, Artificial Sequence
  Synthetic oligonucleotide
gtagtcgcgggtggcgtgtgcaatcgccga

SEQ ID NO: 184317 - DNA, 30 bp, Artificial Sequence
  Synthetic oligonucleotide
gcctatattgatgtgatttttcatcgccga

SEQ ID NO: 184318 - DNA, 30 bp, Artificial Sequence
  Synthetic oligonucleotide
attgtcaccgaacgaaattaggaaggccga

SEQ ID NO: 184319 - DNA, 30 bp, Artificial Sequence
  Synthetic oligonucleotide
tggcatcctaaaccaaatgatgtcggccga

SEQ ID NO: 184320 - DNA, 30 bp, Artificial Sequence
  Synthetic oligonucleotide
tcggtcgggcagcttacgcgacagggccga

SEQ ID NO: 184321 - DNA, 30 bp, Artificial Sequence
  Synthetic oligonucleotide
aaagtaaaaggaactcccgaggggggccga

SEQ ID NO: 184322 - DNA, 30 bp, Artificial Sequence
  Synthetic oligonucleotide
gaaatgagcgggtgtaaacggcttggccga

SEQ ID NO: 184323 - DNA, 30 bp, Artificial Sequence
  Synthetic oligonucleotide
tgtgcgagcaggttaccgtctgcatgccga

SEQ ID NO: 184324 - DNA, 30 bp, Artificial Sequence
  Synthetic oligonucleotide
aacgaggaacaattgggtgtctgatgccga

SEQ ID NO: 184325 - DNA, 30 bp, Artificial Sequence
  Synthetic oligonucleotide
atgccatccgatcgagagtgctactgccga

SEQ ID NO: 184326 - DNA, 30 bp, Artificial Sequence
  Synthetic oligonucleotide
gcattcgggaatgtaagtcacccaatccga

SEQ ID NO: 184327 - DNA, 30 bp, Artificial Sequence
  Synthetic oligonucleotide
gcagtaacagctatacggcccagaatccga

SEQ ID NO: 184328 - DNA, 30 bp, Artificial Sequence
  Synthetic oligonucleotide
acgctcctcctcgtaattacaggcatccga

SEQ ID NO: 184329 - DNA, 30 bp, Artificial Sequence
  Synthetic oligonucleotide
ctacggcgtagccagcccctatggatccga

SEQ ID NO: 184330 - DNA, 30 bp, Artificial Sequence
  Synthetic oligonucleotide
aaataaatggcgaagttcttaaatatccga

SEQ ID NO: 184331 - DNA, 30 bp, Artificial Sequence
  Synthetic oligonucleotide
gaaacatcgtgatggtaggcctacctccga

SEQ ID NO: 184332 - DNA, 30 bp, Artificial Sequence
  Synthetic oligonucleotide
tcgcctatgtccaaacgtacggccctccga

SEQ ID NO: 184333 - DNA, 30 bp, Artificial Sequence
  Synthetic oligonucleotide
gtaagacgatggcacacggctaggctccga

SEQ ID NO: 184334 - DNA, 30 bp, Artificial Sequence
  Synthetic oligonucleotide
agttccaagccgccggtcaagatgctccga

SEQ ID NO: 184335 - DNA, 30 bp, Artificial Sequence
  Synthetic oligonucleotide
acttcggatgatatggtcagtatagtccga

SEQ ID NO: 184336 - DNA, 30 bp, Artificial Sequence
  Synthetic oligonucleotide
gcacgtcacgtcgccatatacagggtccga

SEQ ID NO: 184337 - DNA, 30 bp, Artificial Sequence
  Synthetic oligonucleotide
gtgcaattgacgcgattaaacttggtccga

SEQ ID NO: 184338 - DNA, 30 bp, Artificial Sequence
  Synthetic oligonucleotide
acctcccacgtatacccacttgaattccga

SEQ ID NO: 184339 - DNA, 30 bp, Artificial Sequence
  Synthetic oligonucleotide
ataaagagcggatggttaacctaattccga

SEQ ID NO: 184340 - DNA, 30 bp, Artificial Sequence
  Synthetic oligonucleotide
tgaaagagattcttgtaatacgagttccga

SEQ ID NO: 184341 - DNA, 30 bp, Artificial Sequence
  Synthetic oligonucleotide
ctttgcccccaataggtatagatgttccga

SEQ ID NO: 184342 - DNA, 30 bp, Artificial Sequence
  Synthetic oligonucleotide
actctcaagaaattcggtggcaggaagcga

SEQ ID NO: 184343 - DNA, 30 bp, Artificial Sequence
  Synthetic oligonucleotide
catgagccctgacgacgcattgggaagcga

SEQ ID NO: 184344 - DNA, 30 bp, Artificial Sequence
  Synthetic oligonucleotide
agcaaatgcgctatcctatgaagtaagcga

SEQ ID NO: 184345 - DNA, 30 bp, Artificial Sequence
  Synthetic oligonucleotide
cattcgtgtgtaaattcgaggggacagcga

SEQ ID NO: 184346 - DNA, 30 bp, Artificial Sequence
  Synthetic oligonucleotide
caacacttcaagcccagtcatgaccagcga

SEQ ID NO: 184347 - DNA, 30 bp, Artificial Sequence
  Synthetic oligonucleotide
ttattgcgctattgggaagtagcccagcga

SEQ ID NO: 184348 - DNA, 30 bp, Artificial Sequence
  Synthetic oligonucleotide
ccacgagtctcgtcaaaaagagtccagcga

SEQ ID NO: 184349 - DNA, 30 bp, Artificial Sequence
  Synthetic oligonucleotide
gtcctcgggatggtaaaggcattccagcga

SEQ ID NO: 184350 - DNA, 30 bp, Artificial Sequence
  Synthetic oligonucleotide
acgatagtacaataacgtacaacgcagcga

SEQ ID NO: 184351 - DNA, 30 bp, Artificial Sequence
  Synthetic oligonucleotide
acgttcagtcacactttactatgtcagcga

SEQ ID NO: 184352 - DNA, 30 bp, Artificial Sequence
  Synthetic oligonucleotide
tggaatacatttgtggaataaaaagagcga

SEQ ID NO: 184353 - DNA, 30 bp, Artificial Sequence
  Synthetic oligonucleotide
acttattgtgcctagggattatgcgagcga

SEQ ID NO: 184354 - DNA, 30 bp, Artificial Sequence
  Synthetic oligonucleotide
ggacgtaagcggagcgtagtagatgagcga

SEQ ID NO: 184355 - DNA, 31 bp, Artificial Sequence
  Synthetic oligonucleotide
caaaagggacatgccaggcctcggtgagcga

SEQ ID NO: 184356 - DNA, 30 bp, Artificial Sequence
  Synthetic oligonucleotide
gcaggctaaagtgcatccagactatagcga

SEQ ID NO: 184357 - DNA, 30 bp, Artificial Sequence
  Synthetic oligonucleotide
tggattgtgcctgccacgatccggtagcga

SEQ ID NO: 184358 - DNA, 30 bp, Artificial Sequence
  Synthetic oligonucleotide
cttcaaatcaactactacctacgcacgcga

SEQ ID NO: 184359 - DNA, 30 bp, Artificial Sequence
  Synthetic oligonucleotide
gtgactttcattagcaagaaatatacgcga

SEQ ID NO: 184360 - DNA, 30 bp, Artificial Sequence
  Synthetic oligonucleotide
cgaataccggttagcgtagcgtgcccgcga

SEQ ID NO: 184361 - DNA, 30 bp, Artificial Sequence
  Synthetic oligonucleotide
ccatgccagagttgaagcgctactccgcga

SEQ ID NO: 184362 - DNA, 30 bp, Artificial Sequence
  Synthetic oligonucleotide
tactcacattataatggatcgcacgcgcga

SEQ ID NO: 184363 - DNA, 30 bp, Artificial Sequence
  Synthetic oligonucleotide
tccgacacaagcctgctcatagaggcgcga

SEQ ID NO: 184364 - DNA, 30 bp, Artificial Sequence
  Synthetic oligonucleotide
ctgataaaactacgtactgaataggcgcga

SEQ ID NO: 184365 - DNA, 30 bp, Artificial Sequence
  Synthetic oligonucleotide
gcaagcacatggaagtagacttcggcgcga

SEQ ID NO: 184366 - DNA, 30 bp, Artificial Sequence
  Synthetic oligonucleotide
gggagcccaagacgtagtgcgggggcgcga

SEQ ID NO: 184367 - DNA, 30 bp, Artificial Sequence
  Synthetic oligonucleotide
ctagaatttaatgaacacacacctgcgcga

SEQ ID NO: 184368 - DNA, 30 bp, Artificial Sequence
  Synthetic oligonucleotide
acagctgaaagctgttacactgactcgcga

SEQ ID NO: 184369 - DNA, 30 bp, Artificial Sequence
  Synthetic oligonucleotide
ctgcgtgaccttagttgcgtgatgtcgcga

SEQ ID NO: 184370 - DNA, 30 bp, Artificial Sequence
  Synthetic oligonucleotide
ggatcgcggaattaaggtttcaaaaggcga

SEQ ID NO: 184371 - DNA, 30 bp, Artificial Sequence
  Synthetic oligonucleotide
acgtacggtgtaaagttgtacttaaggcga

SEQ ID NO: 184372 - DNA, 30 bp, Artificial Sequence
  Synthetic oligonucleotide
aatatgaagcgtcgagtctatgccaggcga

SEQ ID NO: 184373 - DNA, 30 bp, Artificial Sequence
  Synthetic oligonucleotide
atcggcgcccagacaggcactgcgaggcga

SEQ ID NO: 184374 - DNA, 30 bp, Artificial Sequence
  Synthetic oligonucleotide
cttagataaagtatggcgagactgaggcga

SEQ ID NO: 184375 - DNA, 30 bp, Artificial Sequence
  Synthetic oligonucleotide
actgtacgctcacccacaaggtttaggcga

SEQ ID NO: 184376 - DNA, 30 bp, Artificial Sequence
  Synthetic oligonucleotide
ttcacacggaagggtgtaagcaaacggcga

SEQ ID NO: 184377 - DNA, 30 bp, Artificial Sequence
  Synthetic oligonucleotide
cttaggttaaactctaaaggtgtacggcga

SEQ ID NO: 184378 - DNA, 30 bp, Artificial Sequence
  Synthetic oligonucleotide
aaaaagcacgatcttgagctcagccggcga

SEQ ID NO: 184379 - DNA, 30 bp, Artificial Sequence
  Synthetic oligonucleotide
ggggtccactcctgtaaatggcggcggcga

SEQ ID NO: 184380 - DNA, 30 bp, Artificial Sequence
  Synthetic oligonucleotide
ccgccacagcgaaagatatcattgcggcga

SEQ ID NO: 184381 - DNA, 30 bp, Artificial Sequence
  Synthetic oligonucleotide
gatacagatctttagtctagtggtcggcga

SEQ ID NO: 184382 - DNA, 30 bp, Artificial Sequence
  Synthetic oligonucleotide
agtgggcagtaatctagacccagagggcga

SEQ ID NO: 184383 - DNA, 30 bp, Artificial Sequence
  Synthetic oligonucleotide
ttgttacattcgcaagcgattagagggcga

SEQ ID NO: 184384 - DNA, 30 bp, Artificial Sequence
  Synthetic oligonucleotide
ttaggacatgggtaaggggtatacgggcga

SEQ ID NO: 184385 - DNA, 30 bp, Artificial Sequence
  Synthetic oligonucleotide
ttgtcgataaccaagcggtgtgtggggcga

SEQ ID NO: 184386 - DNA, 30 bp, Artificial Sequence
  Synthetic oligonucleotide
ggtcccagttctttcgtatgcattgggcga

SEQ ID NO: 184387 - DNA, 30 bp, Artificial Sequence
  Synthetic oligonucleotide
cttatcgttcctggatgcaaaaagtggcga

SEQ ID NO: 184388 - DNA, 30 bp, Artificial Sequence
  Synthetic oligonucleotide
aatcgagcctggcagtgtattatgtggcga

SEQ ID NO: 184389 - DNA, 30 bp, Artificial Sequence
  Synthetic oligonucleotide
cgggttcacccgcaacgtaacgtgctgcga

SEQ ID NO: 184390 - DNA, 30 bp, Artificial Sequence
  Synthetic oligonucleotide
tgtacgtaggtgaaagtaattattctgcga

SEQ ID NO: 184391 - DNA, 30 bp, Artificial Sequence
  Synthetic oligonucleotide
cggagacagtggggtaggggcggcgtgcga

SEQ ID NO: 184392 - DNA, 30 bp, Artificial Sequence
  Synthetic oligonucleotide
aactgacacctaaatgtgttctgggtgcga

SEQ ID NO: 184393 - DNA, 30 bp, Artificial Sequence
  Synthetic oligonucleotide
catacattcggtagaccgacaaatgtgcga

SEQ ID NO: 184394 - DNA, 30 bp, Artificial Sequence
  Synthetic oligonucleotide
ttaagttcgtaaagcgtattagaattgcga

SEQ ID NO: 184395 - DNA, 30 bp, Artificial Sequence
  Synthetic oligonucleotide
aaagacatagagcgctaagaaccattgcga

SEQ ID NO: 184396 - DNA, 30 bp, Artificial Sequence
  Synthetic oligonucleotide
gtttgataaattaccaggggagcattgcga

SEQ ID NO: 184397 - DNA, 30 bp, Artificial Sequence
  Synthetic oligonucleotide
cgcttgcgagctagtattacgacgttgcga

SEQ ID NO: 184398 - DNA, 30 bp, Artificial Sequence
  Synthetic oligonucleotide
aatgagtaaagaataggatatcaaaatcga

SEQ ID NO: 184399 - DNA, 30 bp, Artificial Sequence
  Synthetic oligonucleotide
ccgggactacagtgccgatctcgaaatcga

SEQ ID NO: 184400 - DNA, 30 bp, Artificial Sequence
  Synthetic oligonucleotide
cgatgaggataagacgtggtcctaaatcga

SEQ ID NO: 184401 - DNA, 30 bp, Artificial Sequence
  Synthetic oligonucleotide
atgcgggcattcggtcctgtatcgaatcga

SEQ ID NO: 184402 - DNA, 30 bp, Artificial Sequence
  Synthetic oligonucleotide
acattaacacagggcaactcgagtaatcga

SEQ ID NO: 184403 - DNA, 30 bp, Artificial Sequence
  Synthetic oligonucleotide
gagctcatggttatagtgtgtttacatcga

SEQ ID NO: 184404 - DNA, 30 bp, Artificial Sequence
  Synthetic oligonucleotide
ttaccggaagtgccatgacaggagcatcga

SEQ ID NO: 184405 - DNA, 29 bp, Artificial Sequence
  Synthetic oligonucleotide
cgggctggctatctcaatatatgcatcga

SEQ ID NO: 184406 - DNA, 30 bp, Artificial Sequence
  Synthetic oligonucleotide
tgggagtaagtcgttacgtctcctcatcga

SEQ ID NO: 184407 - DNA, 30 bp, Artificial Sequence
  Synthetic oligonucleotide
aattaaacagtagattctgtcgttcatcga

SEQ ID NO: 184408 - DNA, 30 bp, Artificial Sequence
  Synthetic oligonucleotide
tcaataataaattagtagatgcgagatcga

SEQ ID NO: 184409 - DNA, 30 bp, Artificial Sequence
  Synthetic oligonucleotide
atcctgtcatctaaagccacgcatgatcga

SEQ ID NO: 184410 - DNA, 30 bp, Artificial Sequence
  Synthetic oligonucleotide
atcggcaccagtgtaataggcgaatatcga

SEQ ID NO: 184411 - DNA, 30 bp, Artificial Sequence
  Synthetic oligonucleotide
ggatggttcgttcggcgtgagatatatcga

SEQ ID NO: 184412 - DNA, 30 bp, Artificial Sequence
  Synthetic oligonucleotide
ttggcccggttggttgggagaaactatcga

SEQ ID NO: 184413 - DNA, 30 bp, Artificial Sequence
  Synthetic oligonucleotide
gctccggaggtcccaacgtatgggtatcga

SEQ ID NO: 184414 - DNA, 30 bp, Artificial Sequence
  Synthetic oligonucleotide
tggtgcctgcgagcggcggggacaactcga

SEQ ID NO: 184415 - DNA, 30 bp, Artificial Sequence
  Synthetic oligonucleotide
tgcgtttaaaaatcgtatggtgcaactcga

SEQ ID NO: 184416 - DNA, 30 bp, Artificial Sequence
  Synthetic oligonucleotide
agagagactccccatatcttgggaactcga

SEQ ID NO: 184417 - DNA, 30 bp, Artificial Sequence
  Synthetic oligonucleotide
tctgatagcttcgttcggtggaagactcga

SEQ ID NO: 184418 - DNA, 30 bp, Artificial Sequence
  Synthetic oligonucleotide
taacggtacatggcacaccctgctactcga

SEQ ID NO: 184419 - DNA, 30 bp, Artificial Sequence
  Synthetic oligonucleotide
gacacaagatagttcaccggggcgcctcga

SEQ ID NO: 184420 - DNA, 30 bp, Artificial Sequence
  Synthetic oligonucleotide
ctacgtccggcagcatacatcgcagctcga

SEQ ID NO: 184421 - DNA, 30 bp, Artificial Sequence
  Synthetic oligonucleotide
tcaacggctccaccatcttctgcagctcga

SEQ ID NO: 184422 - DNA, 30 bp, Artificial Sequence
  Synthetic oligonucleotide
gttaacttgaataaatacttgtgcgctcga

SEQ ID NO: 184423 - DNA, 30 bp, Artificial Sequence
  Synthetic oligonucleotide
cggcccgggaggaaagttaaactatctcga

SEQ ID NO: 184424 - DNA, 30 bp, Artificial Sequence
  Synthetic oligonucleotide
cgtgcaaacgtgagtttagaaaaaagtcga

SEQ ID NO: 184425 - DNA, 30 bp, Artificial Sequence
  Synthetic oligonucleotide
cacccctgaggaaatcacacataaagtcga

SEQ ID NO: 184426 - DNA, 30 bp, Artificial Sequence
  Synthetic oligonucleotide
cccccagggcatgtggctgtccggagtcga

SEQ ID NO: 184427 - DNA, 30 bp, Artificial Sequence
  Synthetic oligonucleotide
tgccaggtatttacggggggcatccgtcga

SEQ ID NO: 184428 - DNA, 30 bp, Artificial Sequence
  Synthetic oligonucleotide
gtgatcagtagagtgttctggtcgcgtcga

SEQ ID NO: 184429 - DNA, 30 bp, Artificial Sequence
  Synthetic oligonucleotide
atgcccatgagttggaaataatatcgtcga

SEQ ID NO: 184430 - DNA, 30 bp, Artificial Sequence
  Synthetic oligonucleotide
tgtaggactaactcggatggctagggtcga

SEQ ID NO: 184431 - DNA, 30 bp, Artificial Sequence
  Synthetic oligonucleotide
gacgtcatagtgggaccagctaaatgtcga

SEQ ID NO: 184432 - DNA, 30 bp, Artificial Sequence
  Synthetic oligonucleotide
gcacttgggccatcgggtcgcgaatgtcga

SEQ ID NO: 184433 - DNA, 30 bp, Artificial Sequence
  Synthetic oligonucleotide
cacgacgaagtcaacacttacgtctgtcga

SEQ ID NO: 184434 - DNA, 30 bp, Artificial Sequence
  Synthetic oligonucleotide
ctgatgcggtcaaagggggtggtgtgtcga

SEQ ID NO: 184435 - DNA, 30 bp, Artificial Sequence
  Synthetic oligonucleotide
tgcatggagtacctctatgtaaattgtcga

SEQ ID NO: 184436 - DNA, 30 bp, Artificial Sequence
  Synthetic oligonucleotide
gaacggggaaccgcaagcgaattttgtcga

SEQ ID NO: 184437 - DNA, 30 bp, Artificial Sequence
  Synthetic oligonucleotide
ttaacaaactatagtgcgacggcaattcga

SEQ ID NO: 184438 - DNA, 29 bp, Artificial Sequence
  Synthetic oligonucleotide
tgtcaaatgctcatcaaagtagaattcga

SEQ ID NO: 184439 - DNA, 30 bp, Artificial Sequence
  Synthetic oligonucleotide
cgtgtataccaattccggggtgaccttcga

SEQ ID NO: 184440 - DNA, 30 bp, Artificial Sequence
  Synthetic oligonucleotide
cgaaagaggtataaaacaggggaagttcga

SEQ ID NO: 184441 - DNA, 30 bp, Artificial Sequence
  Synthetic oligonucleotide
agtacatgatcggtcaattaaacagttcga

SEQ ID NO: 184442 - DNA, 30 bp, Artificial Sequence
  Synthetic oligonucleotide
taactgctttgtcatcctcgccgagttcga

SEQ ID NO: 184443 - DNA, 30 bp, Artificial Sequence
  Synthetic oligonucleotide
ctagtaagacgagaatcgaagaacgttcga

SEQ ID NO: 184444 - DNA, 30 bp, Artificial Sequence
  Synthetic oligonucleotide
ggcatccagacaactaaatagagcgttcga

SEQ ID NO: 184445 - DNA, 30 bp, Artificial Sequence
  Synthetic oligonucleotide
cctagatactagtcaagggacgcggttcga

SEQ ID NO: 184446 - DNA, 30 bp, Artificial Sequence
  Synthetic oligonucleotide
cctcgaagcaggaaaaacttctcggttcga

SEQ ID NO: 184447 - DNA, 30 bp, Artificial Sequence
  Synthetic oligonucleotide
cggccaggtagttgctggcctactgttcga

SEQ ID NO: 184448 - DNA, 30 bp, Artificial Sequence
  Synthetic oligonucleotide
aatgtggatctattatcataggcatttcga

SEQ ID NO: 184449 - DNA, 30 bp, Artificial Sequence
  Synthetic oligonucleotide
tccgatcggttggtcaccgagtgatttcga

SEQ ID NO: 184450 - DNA, 30 bp, Artificial Sequence
  Synthetic oligonucleotide
tcgatctgcgacatctctaagcagtttcga

SEQ ID NO: 184451 - DNA, 30 bp, Artificial Sequence
  Synthetic oligonucleotide
ggtataatacagaccatgcggtattttcga

SEQ ID NO: 184452 - DNA, 30 bp, Artificial Sequence
  Synthetic oligonucleotide
tatggctggtgttatacagattaaaaagga

SEQ ID NO: 184453 - DNA, 30 bp, Artificial Sequence
  Synthetic oligonucleotide
gtagcactttctggttcaccttaaaaagga

SEQ ID NO: 184454 - DNA, 30 bp, Artificial Sequence
  Synthetic oligonucleotide
tggaagcgacttagcaacgaccgcaaagga

SEQ ID NO: 184455 - DNA, 30 bp, Artificial Sequence
  Synthetic oligonucleotide
gcgggttttaggaagagtagggtcaaagga

SEQ ID NO: 184456 - DNA, 30 bp, Artificial Sequence
  Synthetic oligonucleotide
gaagtaagcctagacgtaaacttcaaagga

SEQ ID NO: 184457 - DNA, 30 bp, Artificial Sequence
  Synthetic oligonucleotide
agaggtctggaatcctggtaccataaagga

SEQ ID NO: 184458 - DNA, 30 bp, Artificial Sequence
  Synthetic oligonucleotide
atataacgtggcctagttacgcttaaagga

SEQ ID NO: 184459 - DNA, 30 bp, Artificial Sequence
  Synthetic oligonucleotide
tactgtagcataggctacatcaaccaagga

SEQ ID NO: 184460 - DNA, 30 bp, Artificial Sequence
  Synthetic oligonucleotide
ttatggctctccgccgtgccgactcaagga

SEQ ID NO: 184461 - DNA, 30 bp, Artificial Sequence
  Synthetic oligonucleotide
agtaatgccccttattgaaagagtcaagga

SEQ ID NO: 184462 - DNA, 30 bp, Artificial Sequence
  Synthetic oligonucleotide
tcgaggtacatttaatgtatccacgaagga

SEQ ID NO: 184463 - DNA, 30 bp, Artificial Sequence
  Synthetic oligonucleotide
ccaaaggaagactgcaccacatcggaagga

SEQ ID NO: 184464 - DNA, 29 bp, Artificial Sequence
  Synthetic oligonucleotide
ttaaagagcgtacgtatctacctgaagga

SEQ ID NO: 184465 - DNA, 30 bp, Artificial Sequence
  Synthetic oligonucleotide
gggtgtacattctgctcgagaggtgaagga

SEQ ID NO: 184466 - DNA, 30 bp, Artificial Sequence
  Synthetic oligonucleotide
cagaagcgcggattatcacagtgataagga

SEQ ID NO: 184467 - DNA, 30 bp, Artificial Sequence
  Synthetic oligonucleotide
ttaggccggctatggccaacattataagga

SEQ ID NO: 184468 - DNA, 30 bp, Artificial Sequence
  Synthetic oligonucleotide
taagtatcgtaacagccgtaccgctaagga

SEQ ID NO: 184469 - DNA, 30 bp, Artificial Sequence
  Synthetic oligonucleotide
ctgtattgtgagtgctatggcgtctaagga

SEQ ID NO: 184470 - DNA, 30 bp, Artificial Sequence
  Synthetic oligonucleotide
gccttagatggataaatacgtatgtaagga

SEQ ID NO: 184471 - DNA, 30 bp, Artificial Sequence
  Synthetic oligonucleotide
cggaatgatttcttcgagcgctgttaagga

SEQ ID NO: 184472 - DNA, 30 bp, Artificial Sequence
  Synthetic oligonucleotide
atttaactccaaaacatagagtgttaagga

SEQ ID NO: 184473 - DNA, 30 bp, Artificial Sequence
  Synthetic oligonucleotide
ggatagcgtcgaacctcgacttagacagga

SEQ ID NO: 184474 - DNA, 30 bp, Artificial Sequence
  Synthetic oligonucleotide
cgtatagagacttcaataggcgggacagga

SEQ ID NO: 184475 - DNA, 30 bp, Artificial Sequence
  Synthetic oligonucleotide
ttggcccgaccacgggaagcccgagcagga

SEQ ID NO: 184476 - DNA, 30 bp, Artificial Sequence
  Synthetic oligonucleotide
tcgtaaccaactgatatgaacttcgcagga

SEQ ID NO: 184477 - DNA, 30 bp, Artificial Sequence
  Synthetic oligonucleotide
gtgatataacgtctcatgccttatgcagga

SEQ ID NO: 184478 - DNA, 30 bp, Artificial Sequence
  Synthetic oligonucleotide
aaaggatgtggcaggagaactggatcagga

SEQ ID NO: 184479 - DNA, 30 bp, Artificial Sequence
  Synthetic oligonucleotide
gaatgattaggtatgcaaacgtgatcagga

SEQ ID NO: 184480 - DNA, 30 bp, Artificial Sequence
  Synthetic oligonucleotide
agacaacgaagtccccttcacgtctcagga

SEQ ID NO: 184481 - DNA, 30 bp, Artificial Sequence
  Synthetic oligonucleotide
ccagaccagggccactgctgctcgtcagga

SEQ ID NO: 184482 - DNA, 30 bp, Artificial Sequence
  Synthetic oligonucleotide
gtttgttaacagagaaccggactgtcagga

SEQ ID NO: 184483 - DNA, 30 bp, Artificial Sequence
  Synthetic oligonucleotide
gtccgagttactgaataatgttaaagagga

SEQ ID NO: 184484 - DNA, 30 bp, Artificial Sequence
  Synthetic oligonucleotide
ccttagatgcttgaaatctgttaaagagga

SEQ ID NO: 184485 - DNA, 30 bp, Artificial Sequence
  Synthetic oligonucleotide
actgggacggaggaggtttttgtaagagga

SEQ ID NO: 184486 - DNA, 30 bp, Artificial Sequence
  Synthetic oligonucleotide
gaggacagggtttttagccacagcagagga

SEQ ID NO: 184487 - DNA, 30 bp, Artificial Sequence
  Synthetic oligonucleotide
gttatcccttacaatgtttataagagagga

SEQ ID NO: 184488 - DNA, 30 bp, Artificial Sequence
  Synthetic oligonucleotide
cgggatgtgctgtaggacgcgcggagagga

SEQ ID NO: 184489 - DNA, 29 bp, Artificial Sequence
  Synthetic oligonucleotide
gacatttcctacgactgagaacacgagga

SEQ ID NO: 184490 - DNA, 30 bp, Artificial Sequence
  Synthetic oligonucleotide
aaagcgccttacgatcgaacatcaggagga

SEQ ID NO: 184491 - DNA, 30 bp, Artificial Sequence
  Synthetic oligonucleotide
tagactatgatgacttctccgtacggagga

SEQ ID NO: 184492 - DNA, 30 bp, Artificial Sequence
  Synthetic oligonucleotide
acgcatgaccgtgggtatggtcccggagga

SEQ ID NO: 184493 - DNA, 30 bp, Artificial Sequence
  Synthetic oligonucleotide
tcggtataaaattgacatcctcgcggagga

SEQ ID NO: 184494 - DNA, 30 bp, Artificial Sequence
  Synthetic oligonucleotide
attacaaagtgttaaagtgcgaagggagga

SEQ ID NO: 184495 - DNA, 30 bp, Artificial Sequence
  Synthetic oligonucleotide
ggggagttgcagcattgtttacatggagga

SEQ ID NO: 184496 - DNA, 30 bp, Artificial Sequence
  Synthetic oligonucleotide
acaaatgcgagaattcctgggatatgagga

SEQ ID NO: 184497 - DNA, 30 bp, Artificial Sequence
  Synthetic oligonucleotide
tgttaagctgctcaagcccacctctgagga

SEQ ID NO: 184498 - DNA, 30 bp, Artificial Sequence
  Synthetic oligonucleotide
tcgtattacacgagattagacagttgagga

SEQ ID NO: 184499 - DNA, 30 bp, Artificial Sequence
  Synthetic oligonucleotide
taaaaatatgattcagcaagttaaatagga

SEQ ID NO: 184500 - DNA, 30 bp, Artificial Sequence
  Synthetic oligonucleotide
gggatccttaccatactcgacacaatagga

SEQ ID NO: 184501 - DNA, 30 bp, Artificial Sequence
  Synthetic oligonucleotide
acgtggtcaatatttatcgtttcaatagga

SEQ ID NO: 184502 - DNA, 30 bp, Artificial Sequence
  Synthetic oligonucleotide
agagccccgctgcctaagaccgggatagga

SEQ ID NO: 184503 - DNA, 30 bp, Artificial Sequence
  Synthetic oligonucleotide
gcgttatcaactccgtggcaccatatagga

SEQ ID NO: 184504 - DNA, 30 bp, Artificial Sequence
  Synthetic oligonucleotide
taaagcaaggaatgggactacatactagga

SEQ ID NO: 184505 - DNA, 30 bp, Artificial Sequence
  Synthetic oligonucleotide
tctcctgctgaaaatgaggactacctagga

SEQ ID NO: 184506 - DNA, 30 bp, Artificial Sequence
  Synthetic oligonucleotide
ggtcctcccaacagaggtctcagcctagga

SEQ ID NO: 184507 - DNA, 30 bp, Artificial Sequence
  Synthetic oligonucleotide
gtacatttagtagcataatgtagcctagga

SEQ ID NO: 184508 - DNA, 30 bp, Artificial Sequence
  Synthetic oligonucleotide
gctgcccgagaatgggcggtacgcgtagga

SEQ ID NO: 184509 - DNA, 30 bp, Artificial Sequence
  Synthetic oligonucleotide
ggttgcgcatcccgcgcaatggaggtagga

SEQ ID NO: 184510 - DNA, 30 bp, Artificial Sequence
  Synthetic oligonucleotide
gcgtccgtagtcttggccctttaggtagga

SEQ ID NO: 184511 - DNA, 30 bp, Artificial Sequence
  Synthetic oligonucleotide
tcaggcgtcaccaggggataggcggtagga

SEQ ID NO: 184512 - DNA, 30 bp, Artificial Sequence
  Synthetic oligonucleotide
ctcaacccgtaggagaaacggtcggtagga

SEQ ID NO: 184513 - DNA, 30 bp, Artificial Sequence
  Synthetic oligonucleotide
ctgttagaagccggtttcgcaggggtagga

SEQ ID NO: 184514 - DNA, 30 bp, Artificial Sequence
  Synthetic oligonucleotide
cggctccattgggcgatccaatgggtagga

SEQ ID NO: 184515 - DNA, 30 bp, Artificial Sequence
  Synthetic oligonucleotide
acttagatacactgactacggagtgtagga

SEQ ID NO: 184516 - DNA, 30 bp, Artificial Sequence
  Synthetic oligonucleotide
aaagatcggcgtaaacagataagattagga

SEQ ID NO: 184517 - DNA, 30 bp, Artificial Sequence
  Synthetic oligonucleotide
tggaacttgcaaatacatgcgcgcttagga

SEQ ID NO: 184518 - DNA, 30 bp, Artificial Sequence
  Synthetic oligonucleotide
agagaaccggtctcgcgcgtgaggttagga

SEQ ID NO: 184519 - DNA, 30 bp, Artificial Sequence
  Synthetic oligonucleotide
cggaaaacggagcaacacgcccctttagga

SEQ ID NO: 184520 - DNA, 30 bp, Artificial Sequence
  Synthetic oligonucleotide
gcgctccagtatgcgaaatgcaaaaacgga

SEQ ID NO: 184521 - DNA, 30 bp, Artificial Sequence
  Synthetic oligonucleotide
ctgtacctggattggttgaggtaaaacgga

SEQ ID NO: 184522 - DNA, 30 bp, Artificial Sequence
  Synthetic oligonucleotide
tctgcagactaagatcgactatacaacgga

SEQ ID NO: 184523 - DNA, 30 bp, Artificial Sequence
  Synthetic oligonucleotide
ttactgggcatgggcggtcactagaacgga

SEQ ID NO: 184524 - DNA, 30 bp, Artificial Sequence
  Synthetic oligonucleotide
ttacagacgttccggggtgtcgcgaacgga

SEQ ID NO: 184525 - DNA, 30 bp, Artificial Sequence
  Synthetic oligonucleotide
taggctaatgtgaagcctagactgaacgga

SEQ ID NO: 184526 - DNA, 30 bp, Artificial Sequence
  Synthetic oligonucleotide
tggagctaatggccgacacttagtaacgga

SEQ ID NO: 184527 - DNA, 30 bp, Artificial Sequence
  Synthetic oligonucleotide
tgaattagcacaacggccccatgccacgga

SEQ ID NO: 184528 - DNA, 30 bp, Artificial Sequence
  Synthetic oligonucleotide
ggtcaaaagctgtggcgcacgcgtcacgga

SEQ ID NO: 184529 - DNA, 30 bp, Artificial Sequence
  Synthetic oligonucleotide
tggactaaatcgaaagcctatagtgacgga

SEQ ID NO: 184530 - DNA, 30 bp, Artificial Sequence
  Synthetic oligonucleotide
tatagagcttgtaaaaaaagaggtgacgga

SEQ ID NO: 184531 - DNA, 30 bp, Artificial Sequence
  Synthetic oligonucleotide
taataaggtaggttttaggaaccatacgga

SEQ ID NO: 184532 - DNA, 30 bp, Artificial Sequence
  Synthetic oligonucleotide
gcaagtcctaaatcgtggtgattatacgga

SEQ ID NO: 184533 - DNA, 30 bp, Artificial Sequence
  Synthetic oligonucleotide
tgagctgtgaaagtagatgagggctacgga

SEQ ID NO: 184534 - DNA, 30 bp, Artificial Sequence
  Synthetic oligonucleotide
gacaaggtttgaactattgggttttacgga

SEQ ID NO: 184535 - DNA, 30 bp, Artificial Sequence
  Synthetic oligonucleotide
taggtccatggtgtttcaagcgcaaccgga

SEQ ID NO: 184536 - DNA, 30 bp, Artificial Sequence
  Synthetic oligonucleotide
ccgaatataggcggcggtgcgcccaccgga

SEQ ID NO: 184537 - DNA, 30 bp, Artificial Sequence
  Synthetic oligonucleotide
cgtccacatacgctaattcgaatgaccgga

SEQ ID NO: 184538 - DNA, 30 bp, Artificial Sequence
  Synthetic oligonucleotide
gatggtactcgccgaactatgaaacccgga

SEQ ID NO: 184539 - DNA, 30 bp, Artificial Sequence
  Synthetic oligonucleotide
gggcattgtatgtacctgggaacgcccgga

SEQ ID NO: 184540 - DNA, 30 bp, Artificial Sequence
  Synthetic oligonucleotide
gctcgtggttatcccattaagttgcccgga

SEQ ID NO: 184541 - DNA, 30 bp, Artificial Sequence
  Synthetic oligonucleotide
agtctagctcaggagaagcaggtagccgga

SEQ ID NO: 184542 - DNA, 30 bp, Artificial Sequence
  Synthetic oligonucleotide
ggttcacttagaggcaccccaacggccgga

SEQ ID NO: 184543 - DNA, 30 bp, Artificial Sequence
  Synthetic oligonucleotide
aagggggggattcgcgacagactggccgga

SEQ ID NO: 184544 - DNA, 30 bp, Artificial Sequence
  Synthetic oligonucleotide
aacgagcagactgttatatggcgatccgga

SEQ ID NO: 184545 - DNA, 30 bp, Artificial Sequence
  Synthetic oligonucleotide
agatccaaccactctcggttattatccgga

SEQ ID NO: 184546 - DNA, 30 bp, Artificial Sequence
  Synthetic oligonucleotide
tagcgagcgggaaagcgagtggcaagcgga

SEQ ID NO: 184547 - DNA, 30 bp, Artificial Sequence
  Synthetic oligonucleotide
ggcagtcaaaacggcttgaaattaagcgga

SEQ ID NO: 184548 - DNA, 30 bp, Artificial Sequence
  Synthetic oligonucleotide
ggaagacgagggactcctggcgaccgcgga

SEQ ID NO: 184549 - DNA, 30 bp, Artificial Sequence
  Synthetic oligonucleotide
ggtcatcttaaacaagggtctaagcgcgga

SEQ ID NO: 184550 - DNA, 30 bp, Artificial Sequence
  Synthetic oligonucleotide
gactggtttcgacgtgtgaacgatcgcgga

SEQ ID NO: 184551 - DNA, 30 bp, Artificial Sequence
  Synthetic oligonucleotide
tcttagaatcatattgaacaaaaaggcgga

SEQ ID NO: 184552 - DNA, 30 bp, Artificial Sequence
  Synthetic oligonucleotide
ctaagccacgcgatggctaccgaaggcgga

SEQ ID NO: 184553 - DNA, 30 bp, Artificial Sequence
  Synthetic oligonucleotide
agctaggtagatatggtttcaagcggcgga

SEQ ID NO: 184554 - DNA, 30 bp, Artificial Sequence
  Synthetic oligonucleotide
atggttccaacccgtaatccctagggcgga

SEQ ID NO: 184555 - DNA, 30 bp, Artificial Sequence
  Synthetic oligonucleotide
agggaagtaagctagtgtactgatggcgga

SEQ ID NO: 184556 - DNA, 30 bp, Artificial Sequence
  Synthetic oligonucleotide
gacggcaaaattcacctgatagcttgcgga

SEQ ID NO: 184557 - DNA, 30 bp, Artificial Sequence
  Synthetic oligonucleotide
cagcataggtttacatacattcgttgcgga

SEQ ID NO: 184558 - DNA, 30 bp, Artificial Sequence
  Synthetic oligonucleotide
tgagccgagataccactttctgtttgcgga

SEQ ID NO: 184559 - DNA, 30 bp, Artificial Sequence
  Synthetic oligonucleotide
cgccgaaggcatttgtaggtggcaatcgga

SEQ ID NO: 184560 - DNA, 30 bp, Artificial Sequence
  Synthetic oligonucleotide
agcaccgacgtggtggggactgcaatcgga

SEQ ID NO: 184561 - DNA, 30 bp, Artificial Sequence
  Synthetic oligonucleotide
ctgaatctcagataccttgtggtaatcgga

SEQ ID NO: 184562 - DNA, 30 bp, Artificial Sequence
  Synthetic oligonucleotide
gtcatatgctaagaagcccaggacatcgga

SEQ ID NO: 184563 - DNA, 30 bp, Artificial Sequence
  Synthetic oligonucleotide
taggcacgttcccgacaatggtacctcgga

SEQ ID NO: 184564 - DNA, 30 bp, Artificial Sequence
  Synthetic oligonucleotide
gtcggatcggagctgggggctttcctcgga

SEQ ID NO: 184565 - DNA, 30 bp, Artificial Sequence
  Synthetic oligonucleotide
cgttcagtggtctggctgcatcaagtcgga

SEQ ID NO: 184566 - DNA, 30 bp, Artificial Sequence
  Synthetic oligonucleotide
ataaaattccaaggcgtcaactaggtcgga

SEQ ID NO: 184567 - DNA, 30 bp, Artificial Sequence
  Synthetic oligonucleotide
aaggggacatgactacgtgtgacggtcgga

SEQ ID NO: 184568 - DNA, 30 bp, Artificial Sequence
  Synthetic oligonucleotide
gggtagcatggacccttgggtgatgtcgga

SEQ ID NO: 184569 - DNA, 30 bp, Artificial Sequence
  Synthetic oligonucleotide
cagacgtaatgcttgaaagccactgtcgga

SEQ ID NO: 184570 - DNA, 30 bp, Artificial Sequence
  Synthetic oligonucleotide
aagatcaaacgccacacccaggttgtcgga

SEQ ID NO: 184571 - DNA, 30 bp, Artificial Sequence
  Synthetic oligonucleotide
gcataatggtaagcggggtatccattcgga

SEQ ID NO: 184572 - DNA, 30 bp, Artificial Sequence
  Synthetic oligonucleotide
gttagcagagcgaaaaagaaaaccttcgga

SEQ ID NO: 184573 - DNA, 30 bp, Artificial Sequence
  Synthetic oligonucleotide
gtcgcttgaccacggggggtaaggttcgga

SEQ ID NO: 184574 - DNA, 30 bp, Artificial Sequence
  Synthetic oligonucleotide
taggtggtagtctcaaccgcaactttcgga

SEQ ID NO: 184575 - DNA, 30 bp, Artificial Sequence
  Synthetic oligonucleotide
catcaggagtttgttcgccgatctttcgga

SEQ ID NO: 184576 - DNA, 30 bp, Artificial Sequence
  Synthetic oligonucleotide
gataaggcatcaagtgggagacttttcgga

SEQ ID NO: 184577 - DNA, 30 bp, Artificial Sequence
  Synthetic oligonucleotide
tttcagtcgaattggcgggattgaaaggga

SEQ ID NO: 184578 - DNA, 30 bp, Artificial Sequence
  Synthetic oligonucleotide
tcgcgcaaccacggctgccatgtaaaggga

SEQ ID NO: 184579 - DNA, 30 bp, Artificial Sequence
  Synthetic oligonucleotide
ggcatatcctcggtgccaggtcgcaaggga

SEQ ID NO: 184580 - DNA, 30 bp, Artificial Sequence
  Synthetic oligonucleotide
cggtcaatcatcctaaaggaatgcaaggga

SEQ ID NO: 184581 - DNA, 30 bp, Artificial Sequence
  Synthetic oligonucleotide
cgcgattgaggtgaaaacctaatgaaggga

SEQ ID NO: 184582 - DNA, 30 bp, Artificial Sequence
  Synthetic oligonucleotide
caccggggaccgggcgttcaggaccaggga

SEQ ID NO: 184583 - DNA, 30 bp, Artificial Sequence
  Synthetic oligonucleotide
atagggtgtcggcttctaaccaggcaggga

SEQ ID NO: 184584 - DNA, 30 bp, Artificial Sequence
  Synthetic oligonucleotide
tggtagccagggcgtgagaagctgcaggga

SEQ ID NO: 184585 - DNA, 30 bp, Artificial Sequence
  Synthetic oligonucleotide
aagcccatgtgcgttccatcggtgcaggga

SEQ ID NO: 184586 - DNA, 30 bp, Artificial Sequence
  Synthetic oligonucleotide
ctattgaatagagggttgaatactcaggga

SEQ ID NO: 184587 - DNA, 30 bp, Artificial Sequence
  Synthetic oligonucleotide
tgaagctccttcacattaccgagtcaggga

SEQ ID NO: 184588 - DNA, 30 bp, Artificial Sequence
  Synthetic oligonucleotide
accgtgggttgtcttcctcggaaagaggga

SEQ ID NO: 184589 - DNA, 30 bp, Artificial Sequence
  Synthetic oligonucleotide
ttagctgagggatctcgccttcaagaggga

SEQ ID NO: 184590 - DNA, 30 bp, Artificial Sequence
  Synthetic oligonucleotide
agggtatatatatacagaacggaagaggga

SEQ ID NO: 184591 - DNA, 30 bp, Artificial Sequence
  Synthetic oligonucleotide
gtcaacaagatgacctagcgccacgaggga

SEQ ID NO: 184592 - DNA, 30 bp, Artificial Sequence
  Synthetic oligonucleotide
tagttcttttagcaatcaaaggacgaggga

SEQ ID NO: 184593 - DNA, 30 bp, Artificial Sequence
  Synthetic oligonucleotide
caaagcgcaatatgccaggtactggaggga

SEQ ID NO: 184594 - DNA, 30 bp, Artificial Sequence
  Synthetic oligonucleotide
actccccctgatcgagagccatttgaggga

SEQ ID NO: 184595 - DNA, 30 bp, Artificial Sequence
  Synthetic oligonucleotide
caaagttaccaagtacgacccatataggga

SEQ ID NO: 184596 - DNA, 30 bp, Artificial Sequence
  Synthetic oligonucleotide
agaggctggacccgcacttgctactaggga

SEQ ID NO: 184597 - DNA, 30 bp, Artificial Sequence
  Synthetic oligonucleotide
ggaaaatagcgccgagttagaatctaggga

SEQ ID NO: 184598 - DNA, 30 bp, Artificial Sequence
  Synthetic oligonucleotide
acgaccgtgtggggcaataccacgtaggga

SEQ ID NO: 184599 - DNA, 30 bp, Artificial Sequence
  Synthetic oligonucleotide
gacctcggcaaattattcctaccgtaggga

SEQ ID NO: 184600 - DNA, 30 bp, Artificial Sequence
  Synthetic oligonucleotide
gcgttatgtaactagtccctcgcttaggga

SEQ ID NO: 184601 - DNA, 30 bp, Artificial Sequence
  Synthetic oligonucleotide
caaaataggtcgtctcacgggggttaggga

SEQ ID NO: 184602 - DNA, 30 bp, Artificial Sequence
  Synthetic oligonucleotide
ttcaagaggcttccctgactaaagacggga

SEQ ID NO: 184603 - DNA, 30 bp, Artificial Sequence
  Synthetic oligonucleotide
agggcgatatggggcgcaggtcatacggga

SEQ ID NO: 184604 - DNA, 30 bp, Artificial Sequence
  Synthetic oligonucleotide
atgtaagcgattaggggtggttatacggga

SEQ ID NO: 184605 - DNA, 30 bp, Artificial Sequence
  Synthetic oligonucleotide
tgaatagtgataactgcgtgttctacggga

SEQ ID NO: 184606 - DNA, 30 bp, Artificial Sequence
  Synthetic oligonucleotide
tgaacgccaccatgggggtcacgtacggga

SEQ ID NO: 184607 - DNA, 30 bp, Artificial Sequence
  Synthetic oligonucleotide
cagaaagacttatcacgatgtaaaccggga

SEQ ID NO: 184608 - DNA, 30 bp, Artificial Sequence
  Synthetic oligonucleotide
cgagttgataattgaaccggggggccggga

SEQ ID NO: 184609 - DNA, 30 bp, Artificial Sequence
  Synthetic oligonucleotide
taatgacacagggtgttaagttggccggga

SEQ ID NO: 184610 - DNA, 30 bp, Artificial Sequence
  Synthetic oligonucleotide
gggacaagcgaaagccgggcgttgccggga

SEQ ID NO: 184611 - DNA, 30 bp, Artificial Sequence
  Synthetic oligonucleotide
ttcgttaaagccggtcgttcatatccggga

SEQ ID NO: 184612 - DNA, 30 bp, Artificial Sequence
  Synthetic oligonucleotide
agaccggtcttattgcagtagcaagcggga

SEQ ID NO: 184613 - DNA, 30 bp, Artificial Sequence
  Synthetic oligonucleotide
aaaggtggatatgaaatcggcgaatcggga

SEQ ID NO: 184614 - DNA, 30 bp, Artificial Sequence
  Synthetic oligonucleotide
caagcgatcagacagtaagtgtgatcggga

SEQ ID NO: 184615 - DNA, 30 bp, Artificial Sequence
  Synthetic oligonucleotide
ttgttcgcgtgtattatggggatctcggga

SEQ ID NO: 184616 - DNA, 30 bp, Artificial Sequence
  Synthetic oligonucleotide
cctacaattgcgggtgcagggaattcggga

SEQ ID NO: 184617 - DNA, 30 bp, Artificial Sequence
  Synthetic oligonucleotide
tgaaatcgttatggaggctatagaagggga

SEQ ID NO: 184618 - DNA, 30 bp, Artificial Sequence
  Synthetic oligonucleotide
aacatgctgtgtgtcagcaccagcagggga

SEQ ID NO: 184619 - DNA, 30 bp, Artificial Sequence
  Synthetic oligonucleotide
cggtaccatattgactggcacaatagggga

SEQ ID NO: 184620 - DNA, 30 bp, Artificial Sequence
  Synthetic oligonucleotide
ttgtagccacgctccataaagactagggga

SEQ ID NO: 184621 - DNA, 30 bp, Artificial Sequence
  Synthetic oligonucleotide
atcattaatcaagagtgatgttctagggga

SEQ ID NO: 184622 - DNA, 30 bp, Artificial Sequence
  Synthetic oligonucleotide
atgattcaaaaagaattggcgtgtagggga

SEQ ID NO: 184623 - DNA, 30 bp, Artificial Sequence
  Synthetic oligonucleotide
tgactatgtaaggtctggcgtgcacgggga

SEQ ID NO: 184624 - DNA, 30 bp, Artificial Sequence
  Synthetic oligonucleotide
tcgatcatgcaatcactcttagtacgggga

SEQ ID NO: 184625 - DNA, 30 bp, Artificial Sequence
  Synthetic oligonucleotide
tcacatcagtgaaataaatgaattcgggga

SEQ ID NO: 184626 - DNA, 30 bp, Artificial Sequence
  Synthetic oligonucleotide
cagaaattatagctattagcgaaaggggga

SEQ ID NO: 184627 - DNA, 30 bp, Artificial Sequence
  Synthetic oligonucleotide
cgggcaaaaaatcccatgccaccaggggga

SEQ ID NO: 184628 - DNA, 30 bp, Artificial Sequence
  Synthetic oligonucleotide
ccagatgttcaacatgaaatcggaggggga

SEQ ID NO: 184629 - DNA, 31 bp, Artificial Sequence
  Synthetic oligonucleotide
ataaagtcacggcgacagctgaggcggggga

SEQ ID NO: 184630 - DNA, 29 bp, Artificial Sequence
  Synthetic oligonucleotide
ttcatggtatggtcggggatcggggggga

SEQ ID NO: 184631 - DNA, 30 bp, Artificial Sequence
  Synthetic oligonucleotide
gcaaaatctggtgtcgggtcacctggggga

SEQ ID NO: 184632 - DNA, 30 bp, Artificial Sequence
  Synthetic oligonucleotide
tacaaccgccccgaagcttgatgtggggga

SEQ ID NO: 184633 - DNA, 30 bp, Artificial Sequence
  Synthetic oligonucleotide
ataagggttagatcggggactccatgggga

SEQ ID NO: 184634 - DNA, 30 bp, Artificial Sequence
  Synthetic oligonucleotide
actcgagtgattacttgggaactatgggga

SEQ ID NO: 184635 - DNA, 30 bp, Artificial Sequence
  Synthetic oligonucleotide
tatgtgcacgtactcacgctcgtctgggga

SEQ ID NO: 184636 - DNA, 30 bp, Artificial Sequence
  Synthetic oligonucleotide
tcttcaaagttctgccgtgctaagtgggga

SEQ ID NO: 184637 - DNA, 30 bp, Artificial Sequence
  Synthetic oligonucleotide
gcatttgcaatcctctggcacgagtgggga

SEQ ID NO: 184638 - DNA, 30 bp, Artificial Sequence
  Synthetic oligonucleotide
gaaatcttaggttcgtctgaggagtgggga

SEQ ID NO: 184639 - DNA, 30 bp, Artificial Sequence
  Synthetic oligonucleotide
agtcggtgtgaggagtatatttagtgggga

SEQ ID NO: 184640 - DNA, 30 bp, Artificial Sequence
  Synthetic oligonucleotide
agaagactggcactatggaaagggtgggga

SEQ ID NO: 184641 - DNA, 30 bp, Artificial Sequence
  Synthetic oligonucleotide
actgcacttgatcaaccctctcattgggga

SEQ ID NO: 184642 - DNA, 30 bp, Artificial Sequence
  Synthetic oligonucleotide
gaagacggcgaaacgtgaacgctcatggga

SEQ ID NO: 184643 - DNA, 30 bp, Artificial Sequence
  Synthetic oligonucleotide
cactactctcgtgtcagtagacatatggga

SEQ ID NO: 184644 - DNA, 30 bp, Artificial Sequence
  Synthetic oligonucleotide
taaacgagtgggtgaccgcgatatatggga

SEQ ID NO: 184645 - DNA, 30 bp, Artificial Sequence
  Synthetic oligonucleotide
tgtacagtcaagtgtcaacaccgtatggga

SEQ ID NO: 184646 - DNA, 30 bp, Artificial Sequence
  Synthetic oligonucleotide
gcgggattgtttgatgacggtcgtatggga

SEQ ID NO: 184647 - DNA, 30 bp, Artificial Sequence
  Synthetic oligonucleotide
tatcgagtggtggttgtgatgcttatggga

SEQ ID NO: 184648 - DNA, 30 bp, Artificial Sequence
  Synthetic oligonucleotide
ctcagggctaccgcttagaaagcgctggga

SEQ ID NO: 184649 - DNA, 30 bp, Artificial Sequence
  Synthetic oligonucleotide
cccggagaaagactcttacattatctggga

SEQ ID NO: 184650 - DNA, 30 bp, Artificial Sequence
  Synthetic oligonucleotide
ctatgagacggcgacaacttccgtctggga

SEQ ID NO: 184651 - DNA, 30 bp, Artificial Sequence
  Synthetic oligonucleotide
gccgttaggaaccaggtaggaggagtggga

SEQ ID NO: 184652 - DNA, 30 bp, Artificial Sequence
  Synthetic oligonucleotide
gtagcaaaccgcttggtaacgttagtggga

SEQ ID NO: 184653 - DNA, 30 bp, Artificial Sequence
  Synthetic oligonucleotide
cgcggttaggtcagataactgatcgtggga

SEQ ID NO: 184654 - DNA, 30 bp, Artificial Sequence
  Synthetic oligonucleotide
ccagggtaaagcaaactgaggtcggtggga

SEQ ID NO: 184655 - DNA, 30 bp, Artificial Sequence
  Synthetic oligonucleotide
gctgtactatgagtgatgtcaagtgtggga

SEQ ID NO: 184656 - DNA, 30 bp, Artificial Sequence
  Synthetic oligonucleotide
tgcacgataccctttccctccattgtggga

SEQ ID NO: 184657 - DNA, 30 bp, Artificial Sequence
  Synthetic oligonucleotide
accgcgtcgaggctgttctgcattgtggga

SEQ ID NO: 184658 - DNA, 30 bp, Artificial Sequence
  Synthetic oligonucleotide
agaagagcgtattatcattggtttgtggga

SEQ ID NO: 184659 - DNA, 30 bp, Artificial Sequence
  Synthetic oligonucleotide
cccggaatgtattagatatacggattggga

SEQ ID NO: 184660 - DNA, 30 bp, Artificial Sequence
  Synthetic oligonucleotide
gggagaatgatcgatgctgtttgattggga

SEQ ID NO: 184661 - DNA, 30 bp, Artificial Sequence
  Synthetic oligonucleotide
acccaaacagaatcaatttgttccttggga

SEQ ID NO: 184662 - DNA, 30 bp, Artificial Sequence
  Synthetic oligonucleotide
tatacacctgttgcgatgaacgcgttggga

SEQ ID NO: 184663 - DNA, 30 bp, Artificial Sequence
  Synthetic oligonucleotide
ccagttgcattcgtcaaccaggggttggga

SEQ ID NO: 184664 - DNA, 30 bp, Artificial Sequence
  Synthetic oligonucleotide
ctataagtgttaacggcacaatggttggga

SEQ ID NO: 184665 - DNA, 30 bp, Artificial Sequence
  Synthetic oligonucleotide
attcccgcaaagagtgctgggagaaatgga

SEQ ID NO: 184666 - DNA, 30 bp, Artificial Sequence
  Synthetic oligonucleotide
tgcccaatgattcgatgggtcgtaaatgga

SEQ ID NO: 184667 - DNA, 30 bp, Artificial Sequence
  Synthetic oligonucleotide
cggatttaggcgtaacattaaatcaatgga

SEQ ID NO: 184668 - DNA, 30 bp, Artificial Sequence
  Synthetic oligonucleotide
gatggcaagactgcctagccgctcaatgga

SEQ ID NO: 184669 - DNA, 30 bp, Artificial Sequence
  Synthetic oligonucleotide
ggtttagcggaagatacgcttaggaatgga

SEQ ID NO: 184670 - DNA, 30 bp, Artificial Sequence
  Synthetic oligonucleotide
acctggcaccgcgccttctagggtaatgga

SEQ ID NO: 184671 - DNA, 30 bp, Artificial Sequence
  Synthetic oligonucleotide
atcaagcgggcttcgcgcttagttaatgga

SEQ ID NO: 184672 - DNA, 30 bp, Artificial Sequence
  Synthetic oligonucleotide
catgtttacctatgaaccagcgttaatgga

SEQ ID NO: 184673 - DNA, 30 bp, Artificial Sequence
  Synthetic oligonucleotide
aagtaggtaaggttagtcttctgacatgga

SEQ ID NO: 184674 - DNA, 30 bp, Artificial Sequence
  Synthetic oligonucleotide
ccccggagaccgggatacattgtacatgga

SEQ ID NO: 184675 - DNA, 30 bp, Artificial Sequence
  Synthetic oligonucleotide
atcgtttggtgggcaaggattgtacatgga

SEQ ID NO: 184676 - DNA, 30 bp, Artificial Sequence
  Synthetic oligonucleotide
taatatgctacccacgaacggcgccatgga

SEQ ID NO: 184677 - DNA, 30 bp, Artificial Sequence
  Synthetic oligonucleotide
acgaaggcttgaatgtacgcagagcatgga

SEQ ID NO: 184678 - DNA, 30 bp, Artificial Sequence
  Synthetic oligonucleotide
atgataccctctgggctgtcgaccgatgga

SEQ ID NO: 184679 - DNA, 30 bp, Artificial Sequence
  Synthetic oligonucleotide
gttaattgccatgcactgcgggaatatgga

SEQ ID NO: 184680 - DNA, 30 bp, Artificial Sequence
  Synthetic oligonucleotide
tggttcgaataggcagctaaggagtatgga

SEQ ID NO: 184681 - DNA, 30 bp, Artificial Sequence
  Synthetic oligonucleotide
gtttgagagatggcttttagtgagtatgga

SEQ ID NO: 184682 - DNA, 30 bp, Artificial Sequence
  Synthetic oligonucleotide
gtaacgaggaacccggcaatctagtatgga

SEQ ID NO: 184683 - DNA, 30 bp, Artificial Sequence
  Synthetic oligonucleotide
tccacatccgggagggaaatattttatgga

SEQ ID NO: 184684 - DNA, 30 bp, Artificial Sequence
  Synthetic oligonucleotide
cgatgcttgccaatgttgactgaaactgga

SEQ ID NO: 184685 - DNA, 30 bp, Artificial Sequence
  Synthetic oligonucleotide
gggtaacaaccagtccagcttgtaactgga

SEQ ID NO: 184686 - DNA, 30 bp, Artificial Sequence
  Synthetic oligonucleotide
ctaaaaaaccagcaagttacttccactgga

SEQ ID NO: 184687 - DNA, 30 bp, Artificial Sequence
  Synthetic oligonucleotide
gcatgatagtctgcctttacatagactgga

SEQ ID NO: 184688 - DNA, 30 bp, Artificial Sequence
  Synthetic oligonucleotide
gcaggggcttattctaagcttcgacctgga

SEQ ID NO: 184689 - DNA, 30 bp, Artificial Sequence
  Synthetic oligonucleotide
aggaatttgtagatctcaaattgacctgga

SEQ ID NO: 184690 - DNA, 30 bp, Artificial Sequence
  Synthetic oligonucleotide
caccagccgtgatgccgtggataccctgga

SEQ ID NO: 184691 - DNA, 30 bp, Artificial Sequence
  Synthetic oligonucleotide
gagactaacaccccgggcacagcccctgga

SEQ ID NO: 184692 - DNA, 30 bp, Artificial Sequence
  Synthetic oligonucleotide
ggggcgatgtttaaataaccggcagctgga

SEQ ID NO: 184693 - DNA, 30 bp, Artificial Sequence
  Synthetic oligonucleotide
agaattcaagctcgttctgcgctagctgga

SEQ ID NO: 184694 - DNA, 30 bp, Artificial Sequence
  Synthetic oligonucleotide
ataagtctaccatgcctggcaaacgctgga

SEQ ID NO: 184695 - DNA, 30 bp, Artificial Sequence
  Synthetic oligonucleotide
gttaattggaactctaaatcaaacgctgga

SEQ ID NO: 184696 - DNA, 30 bp, Artificial Sequence
  Synthetic oligonucleotide
ccatttcctatgttaggagtgtacgctgga

SEQ ID NO: 184697 - DNA, 30 bp, Artificial Sequence
  Synthetic oligonucleotide
aaagtatgtgatcatagtagggtggctgga

SEQ ID NO: 184698 - DNA, 30 bp, Artificial Sequence
  Synthetic oligonucleotide
agcgttatctgggtaggataacgtgctgga

SEQ ID NO: 184699 - DNA, 30 bp, Artificial Sequence
  Synthetic oligonucleotide
ggacatcacgaacgtaaagttattgctgga

SEQ ID NO: 184700 - DNA, 30 bp, Artificial Sequence
  Synthetic oligonucleotide
tccggatggccgtcatgcaccacctctgga

SEQ ID NO: 184701 - DNA, 30 bp, Artificial Sequence
  Synthetic oligonucleotide
tcggagcaatggttcctccaaaggtctgga

SEQ ID NO: 184702 - DNA, 30 bp, Artificial Sequence
  Synthetic oligonucleotide
gacaccctcgttggtgttgtgtattctgga

SEQ ID NO: 184703 - DNA, 30 bp, Artificial Sequence
  Synthetic oligonucleotide
cagcaacgtacgggtgaggcgggttctgga

SEQ ID NO: 184704 - DNA, 30 bp, Artificial Sequence
  Synthetic oligonucleotide
ggcccgacgacataaaccttcatttctgga

SEQ ID NO: 184705 - DNA, 30 bp, Artificial Sequence
  Synthetic oligonucleotide
ggtcaaataggtgggacatttaaaagtgga

SEQ ID NO: 184706 - DNA, 30 bp, Artificial Sequence
  Synthetic oligonucleotide
cgcgtcagttggcttgtgccaggaagtgga

SEQ ID NO: 184707 - DNA, 30 bp, Artificial Sequence
  Synthetic oligonucleotide
ctgggcaaggcaacgcccgatggaagtgga

SEQ ID NO: 184708 - DNA, 30 bp, Artificial Sequence
  Synthetic oligonucleotide
cgtactgtgctacgtaattcgtgaagtgga

SEQ ID NO: 184709 - DNA, 30 bp, Artificial Sequence
  Synthetic oligonucleotide
acggggaactccgccaagccaaacagtgga

SEQ ID NO: 184710 - DNA, 30 bp, Artificial Sequence
  Synthetic oligonucleotide
ctgggctgattataaatgccttacagtgga

SEQ ID NO: 184711 - DNA, 30 bp, Artificial Sequence
  Synthetic oligonucleotide
gctcggtaggggttcgggcgaagcagtgga

SEQ ID NO: 184712 - DNA, 30 bp, Artificial Sequence
  Synthetic oligonucleotide
acattggctcctggaggcgcggggagtgga

SEQ ID NO: 184713 - DNA, 30 bp, Artificial Sequence
  Synthetic oligonucleotide
gcttgttagcataaatacctggggagtgga

SEQ ID NO: 184714 - DNA, 30 bp, Artificial Sequence
  Synthetic oligonucleotide
caatcacaggcagataactgggaacgtgga

SEQ ID NO: 184715 - DNA, 30 bp, Artificial Sequence
  Synthetic oligonucleotide
agggctaagtttatcaggcctagacgtgga

SEQ ID NO: 184716 - DNA, 30 bp, Artificial Sequence
  Synthetic oligonucleotide
ggcacaggtcctaggcgagggggacgtgga

SEQ ID NO: 184717 - DNA, 30 bp, Artificial Sequence
  Synthetic oligonucleotide
gaagttatgaaatgataaacgactcgtgga

SEQ ID NO: 184718 - DNA, 30 bp, Artificial Sequence
  Synthetic oligonucleotide
gcacatgattaagggaaagcgtctcgtgga

SEQ ID NO: 184719 - DNA, 30 bp, Artificial Sequence
  Synthetic oligonucleotide
aaagccgaccgagtagaccaacttcgtgga

SEQ ID NO: 184720 - DNA, 30 bp, Artificial Sequence
  Synthetic oligonucleotide
gggtagtcaagacgagggcagtaaggtgga

SEQ ID NO: 184721 - DNA, 30 bp, Artificial Sequence
  Synthetic oligonucleotide
atgtgtggtttaaaggatccctgaggtgga

SEQ ID NO: 184722 - DNA, 30 bp, Artificial Sequence
  Synthetic oligonucleotide
ggaggactagggagcgggactaacggtgga

SEQ ID NO: 184723 - DNA, 30 bp, Artificial Sequence
  Synthetic oligonucleotide
ccaccacaccattgcaagctgagcggtgga

SEQ ID NO: 184724 - DNA, 30 bp, Artificial Sequence
  Synthetic oligonucleotide
gtcatgtgtgggactgcggggtgcggtgga

SEQ ID NO: 184725 - DNA, 30 bp, Artificial Sequence
  Synthetic oligonucleotide
agcctccgcccttacactctggggggtgga

SEQ ID NO: 184726 - DNA, 30 bp, Artificial Sequence
  Synthetic oligonucleotide
gtcactaaagcccgagaatgatggggtgga

SEQ ID NO: 184727 - DNA, 30 bp, Artificial Sequence
  Synthetic oligonucleotide
tcgaaatatagccagatatggcaatgtgga

SEQ ID NO: 184728 - DNA, 30 bp, Artificial Sequence
  Synthetic oligonucleotide
tgatagacacggctcagaaaagcatgtgga

SEQ ID NO: 184729 - DNA, 30 bp, Artificial Sequence
  Synthetic oligonucleotide
tggcgtcgagtaaccagccatcggtgtgga

SEQ ID NO: 184730 - DNA, 30 bp, Artificial Sequence
  Synthetic oligonucleotide
cagtgtgtgcttagacagggctaaattgga

SEQ ID NO: 184731 - DNA, 30 bp, Artificial Sequence
  Synthetic oligonucleotide
gacctcgatagtatggtacatcacattgga

SEQ ID NO: 184732 - DNA, 30 bp, Artificial Sequence
  Synthetic oligonucleotide
agtacggatcgctgccgtaccgggattgga

SEQ ID NO: 184733 - DNA, 30 bp, Artificial Sequence
  Synthetic oligonucleotide
cgttaaccaatcgataaaatactgattgga

SEQ ID NO: 184734 - DNA, 30 bp, Artificial Sequence
  Synthetic oligonucleotide
tggtctagggtctagcttttgagtattgga

SEQ ID NO: 184735 - DNA, 30 bp, Artificial Sequence
  Synthetic oligonucleotide
gtcagggggcgtggtgagggtgtgcttgga

SEQ ID NO: 184736 - DNA, 30 bp, Artificial Sequence
  Synthetic oligonucleotide
actgagttggttcaggacatcgatcttgga

SEQ ID NO: 184737 - DNA, 30 bp, Artificial Sequence
  Synthetic oligonucleotide
aaaggaggtgctttgaccctcactcttgga

SEQ ID NO: 184738 - DNA, 30 bp, Artificial Sequence
  Synthetic oligonucleotide
taaatgcggtgtacaaagaaaggtcttgga

SEQ ID NO: 184739 - DNA, 30 bp, Artificial Sequence
  Synthetic oligonucleotide
actatgatgggtgcaacccttgaagttgga

SEQ ID NO: 184740 - DNA, 30 bp, Artificial Sequence
  Synthetic oligonucleotide
gaagaacggtcggctcacaacatcgttgga

SEQ ID NO: 184741 - DNA, 30 bp, Artificial Sequence
  Synthetic oligonucleotide
cactgatacgttgtttggccaaaggttgga

SEQ ID NO: 184742 - DNA, 30 bp, Artificial Sequence
  Synthetic oligonucleotide
taaggacgcgctagcggagtggctgttgga

SEQ ID NO: 184743 - DNA, 31 bp, Artificial Sequence
  Synthetic oligonucleotide
aagacattgcgggcacgcgcgtagtgttgga

SEQ ID NO: 184744 - DNA, 30 bp, Artificial Sequence
  Synthetic oligonucleotide
atctaatcaagttgcatgagttgtgttgga

SEQ ID NO: 184745 - DNA, 30 bp, Artificial Sequence
  Synthetic oligonucleotide
agtgctaaatatgtcgtcagctttgttgga

SEQ ID NO: 184746 - DNA, 30 bp, Artificial Sequence
  Synthetic oligonucleotide
ggcacgtgtgtgcaaacagttagatttgga

SEQ ID NO: 184747 - DNA, 30 bp, Artificial Sequence
  Synthetic oligonucleotide
ggaccagggtaaaaaaacgggttatttgga

SEQ ID NO: 184748 - DNA, 30 bp, Artificial Sequence
  Synthetic oligonucleotide
acggcggtcgcggggatacgagcctttgga

SEQ ID NO: 184749 - DNA, 30 bp, Artificial Sequence
  Synthetic oligonucleotide
cagggggtattgctttagatcatgtttgga

SEQ ID NO: 184750 - DNA, 30 bp, Artificial Sequence
  Synthetic oligonucleotide
gggatgaacggacgttctagcctgtttgga

SEQ ID NO: 184751 - DNA, 30 bp, Artificial Sequence
  Synthetic oligonucleotide
tgctaacggggtgctggagccagttttgga

SEQ ID NO: 184752 - DNA, 30 bp, Artificial Sequence
  Synthetic oligonucleotide
ataaaatacgacgaacctgctagaaaatga

SEQ ID NO: 184753 - DNA, 30 bp, Artificial Sequence
  Synthetic oligonucleotide
actccatccagaccgccatcctgcaaatga

SEQ ID NO: 184754 - DNA, 30 bp, Artificial Sequence
  Synthetic oligonucleotide
tccgccccgacagtcagtctcgtcaaatga

SEQ ID NO: 184755 - DNA, 30 bp, Artificial Sequence
  Synthetic oligonucleotide
ccatggaggcatctgtcttctcgtaaatga

SEQ ID NO: 184756 - DNA, 30 bp, Artificial Sequence
  Synthetic oligonucleotide
tatgtgctgctggggatgcgaagacaatga

SEQ ID NO: 184757 - DNA, 30 bp, Artificial Sequence
  Synthetic oligonucleotide
aaatatgtgcacagttgtattacccaatga

SEQ ID NO: 184758 - DNA, 30 bp, Artificial Sequence
  Synthetic oligonucleotide
ttcaagggaggtgcacgttttcagcaatga

SEQ ID NO: 184759 - DNA, 30 bp, Artificial Sequence
  Synthetic oligonucleotide
atgtaggtgccccgagtatggtggcaatga

SEQ ID NO: 184760 - DNA, 30 bp, Artificial Sequence
  Synthetic oligonucleotide
ttatcctaataggtgaccgaccatcaatga

SEQ ID NO: 184761 - DNA, 30 bp, Artificial Sequence
  Synthetic oligonucleotide
ggtcaagtgcagatcccaggtgatcaatga

SEQ ID NO: 184762 - DNA, 30 bp, Artificial Sequence
  Synthetic oligonucleotide
ttgaatctaggctctagaccgacagaatga

SEQ ID NO: 184763 - DNA, 30 bp, Artificial Sequence
  Synthetic oligonucleotide
taatattggggagcccgagcagacgaatga

SEQ ID NO: 184764 - DNA, 30 bp, Artificial Sequence
  Synthetic oligonucleotide
atcccaagagcgcatagtcttagcgaatga

SEQ ID NO: 184765 - DNA, 30 bp, Artificial Sequence
  Synthetic oligonucleotide
caatcgggtactaaatcatattaggaatga

SEQ ID NO: 184766 - DNA, 30 bp, Artificial Sequence
  Synthetic oligonucleotide
taggattggtaggaaagtgtcattgaatga

SEQ ID NO: 184767 - DNA, 30 bp, Artificial Sequence
  Synthetic oligonucleotide
tgcaaaaatgtacgggggctaacataatga

SEQ ID NO: 184768 - DNA, 30 bp, Artificial Sequence
  Synthetic oligonucleotide
aggatccctgggagggggccatcataatga

SEQ ID NO: 184769 - DNA, 30 bp, Artificial Sequence
  Synthetic oligonucleotide
tttcgcaacaattcacgaggtctataatga

SEQ ID NO: 184770 - DNA, 30 bp, Artificial Sequence
  Synthetic oligonucleotide
ggggcaaactacccactatggaactaatga

SEQ ID NO: 184771 - DNA, 30 bp, Artificial Sequence
  Synthetic oligonucleotide
agtgataacccgatcaaattatactaatga

SEQ ID NO: 184772 - DNA, 30 bp, Artificial Sequence
  Synthetic oligonucleotide
ccggccattaacgtgaccggtatctaatga

SEQ ID NO: 184773 - DNA, 30 bp, Artificial Sequence
  Synthetic oligonucleotide
cgtatttcgggaacgaggggtctgtaatga

SEQ ID NO: 184774 - DNA, 30 bp, Artificial Sequence
  Synthetic oligonucleotide
aaaagtggtagaggttgatagtgtacatga

SEQ ID NO: 184775 - DNA, 30 bp, Artificial Sequence
  Synthetic oligonucleotide
atagagaatctttcagtagactagccatga

SEQ ID NO: 184776 - DNA, 30 bp, Artificial Sequence
  Synthetic oligonucleotide
accaacaagggtagtacgcccgctccatga

SEQ ID NO: 184777 - DNA, 30 bp, Artificial Sequence
  Synthetic oligonucleotide
gcactatataatccacaaggctaagcatga

SEQ ID NO: 184778 - DNA, 30 bp, Artificial Sequence
  Synthetic oligonucleotide
cgtggtgtagatatagctaccgcagcatga

SEQ ID NO: 184779 - DNA, 30 bp, Artificial Sequence
  Synthetic oligonucleotide
gcgataatccttcgatgggcagtagcatga

SEQ ID NO: 184780 - DNA, 30 bp, Artificial Sequence
  Synthetic oligonucleotide
gtgtgggcaggtaaccacgactacgcatga

SEQ ID NO: 184781 - DNA, 30 bp, Artificial Sequence
  Synthetic oligonucleotide
cgttatccgatcaaatgcttgatcgcatga

SEQ ID NO: 184782 - DNA, 30 bp, Artificial Sequence
  Synthetic oligonucleotide
acattcttgtttacggctcggttcgcatga

SEQ ID NO: 184783 - DNA, 30 bp, Artificial Sequence
  Synthetic oligonucleotide
tcaagaaaggagctgttcacttcggcatga

SEQ ID NO: 184784 - DNA, 30 bp, Artificial Sequence
  Synthetic oligonucleotide
tgcgagcaccagtgtccaaaggtggcatga

SEQ ID NO: 184785 - DNA, 30 bp, Artificial Sequence
  Synthetic oligonucleotide
ctggctggggacaactaataccatgcatga

SEQ ID NO: 184786 - DNA, 30 bp, Artificial Sequence
  Synthetic oligonucleotide
gaagggccttgtttgaatatgagatcatga

SEQ ID NO: 184787 - DNA, 30 bp, Artificial Sequence
  Synthetic oligonucleotide
acagtgactttaataaacagggtttcatga

SEQ ID NO: 184788 - DNA, 30 bp, Artificial Sequence
  Synthetic oligonucleotide
aacagttagaagatgccccggagaagatga

SEQ ID NO: 184789 - DNA, 30 bp, Artificial Sequence
  Synthetic oligonucleotide
ggaccgacgctgattaatgcgtacagatga

SEQ ID NO: 184790 - DNA, 30 bp, Artificial Sequence
  Synthetic oligonucleotide
ggcccacatctacgcaagacgcccagatga

SEQ ID NO: 184791 - DNA, 30 bp, Artificial Sequence
  Synthetic oligonucleotide
acacagtatcaataacgttgtggcagatga

SEQ ID NO: 184792 - DNA, 30 bp, Artificial Sequence
  Synthetic oligonucleotide
gatgactactcatggtcgacactgagatga

SEQ ID NO: 184793 - DNA, 30 bp, Artificial Sequence
  Synthetic oligonucleotide
cgatccatggcgtatgccgtatgtagatga

SEQ ID NO: 184794 - DNA, 30 bp, Artificial Sequence
  Synthetic oligonucleotide
gcacgaggatttcttacgtatggacgatga

SEQ ID NO: 184795 - DNA, 30 bp, Artificial Sequence
  Synthetic oligonucleotide
tggcgaccgtctgtagtacgagggcgatga

SEQ ID NO: 184796 - DNA, 30 bp, Artificial Sequence
  Synthetic oligonucleotide
gtttaacaacggaaaaactggcagggatga

SEQ ID NO: 184797 - DNA, 30 bp, Artificial Sequence
  Synthetic oligonucleotide
ggaagccaggttattctctggtcctgatga

SEQ ID NO: 184798 - DNA, 30 bp, Artificial Sequence
  Synthetic oligonucleotide
taggacctttcaccagtatggatctgatga

SEQ ID NO: 184799 - DNA, 30 bp, Artificial Sequence
  Synthetic oligonucleotide
aatagtgctattagcagccaacggtgatga

SEQ ID NO: 184800 - DNA, 30 bp, Artificial Sequence
  Synthetic oligonucleotide
ttaacctctggaaaagaacatgaaatatga

SEQ ID NO: 184801 - DNA, 30 bp, Artificial Sequence
  Synthetic oligonucleotide
aaaaaggggtatcaaaggaggtaaatatga

SEQ ID NO: 184802 - DNA, 30 bp, Artificial Sequence
  Synthetic oligonucleotide
ataccagggggtaaatcatgtgacatatga

SEQ ID NO: 184803 - DNA, 30 bp, Artificial Sequence
  Synthetic oligonucleotide
gaccgtaatgtcttggctatgacgatatga

SEQ ID NO: 184804 - DNA, 30 bp, Artificial Sequence
  Synthetic oligonucleotide
gcgctaattaatggggtttaaaggatatga

SEQ ID NO: 184805 - DNA, 30 bp, Artificial Sequence
  Synthetic oligonucleotide
atatggtgatctggcagtactttgatatga

SEQ ID NO: 184806 - DNA, 30 bp, Artificial Sequence
  Synthetic oligonucleotide
tgaattaacagctagtgttgtattatatga

SEQ ID NO: 184807 - DNA, 30 bp, Artificial Sequence
  Synthetic oligonucleotide
ctcatgcgtcggaggattcttatactatga

SEQ ID NO: 184808 - DNA, 30 bp, Artificial Sequence
  Synthetic oligonucleotide
cagccgggttaatatagcggatctctatga

SEQ ID NO: 184809 - DNA, 30 bp, Artificial Sequence
  Synthetic oligonucleotide
tgacaggtcagcaggggaaccaaagtatga

SEQ ID NO: 184810 - DNA, 30 bp, Artificial Sequence
  Synthetic oligonucleotide
actttgaggtgacacgccattacagtatga

SEQ ID NO: 184811 - DNA, 30 bp, Artificial Sequence
  Synthetic oligonucleotide
tgtcctatcgactttactccacgagtatga

SEQ ID NO: 184812 - DNA, 30 bp, Artificial Sequence
  Synthetic oligonucleotide
ttgcgtgcgttggtcttcgacggcgtatga

SEQ ID NO: 184813 - DNA, 30 bp, Artificial Sequence
  Synthetic oligonucleotide
gggatcgtccgtgtttcccgataggtatga

SEQ ID NO: 184814 - DNA, 30 bp, Artificial Sequence
  Synthetic oligonucleotide
ggttcgctatcggtcaaggggaaattatga

SEQ ID NO: 184815 - DNA, 30 bp, Artificial Sequence
  Synthetic oligonucleotide
gttatccgctgtgagggaggagtcttatga

SEQ ID NO: 184816 - DNA, 30 bp, Artificial Sequence
  Synthetic oligonucleotide
tcgaggtcagttaaaccgtccctgttatga

SEQ ID NO: 184817 - DNA, 30 bp, Artificial Sequence
  Synthetic oligonucleotide
ccctttagaaggtgccttcttcctttatga

SEQ ID NO: 184818 - DNA, 30 bp, Artificial Sequence
  Synthetic oligonucleotide
gcggcttgcttagctattgacaaaaactga

SEQ ID NO: 184819 - DNA, 30 bp, Artificial Sequence
  Synthetic oligonucleotide
accgtgttcgcaatgtatttcaaaaactga

SEQ ID NO: 184820 - DNA, 30 bp, Artificial Sequence
  Synthetic oligonucleotide
aagatattacgcggggcggatacaaactga

SEQ ID NO: 184821 - DNA, 30 bp, Artificial Sequence
  Synthetic oligonucleotide
agttaggtaatgttatcctgtagaaactga

SEQ ID NO: 184822 - DNA, 30 bp, Artificial Sequence
  Synthetic oligonucleotide
cgagggtatgcaaggtcattgtccaactga

SEQ ID NO: 184823 - DNA, 30 bp, Artificial Sequence
  Synthetic oligonucleotide
gaagcagactcggtagcaataccgaactga

SEQ ID NO: 184824 - DNA, 30 bp, Artificial Sequence
  Synthetic oligonucleotide
tattggacttaaagagaggacagtaactga

SEQ ID NO: 184825 - DNA, 30 bp, Artificial Sequence
  Synthetic oligonucleotide
tgatggcggcgcacgtcaatcgtgcactga

SEQ ID NO: 184826 - DNA, 30 bp, Artificial Sequence
  Synthetic oligonucleotide
aacctacattccacttgtacacatcactga

SEQ ID NO: 184827 - DNA, 30 bp, Artificial Sequence
  Synthetic oligonucleotide
caacagtagtagcgtcaaataattcactga

SEQ ID NO: 184828 - DNA, 30 bp, Artificial Sequence
  Synthetic oligonucleotide
agctagacagctagtctcctacgagactga

SEQ ID NO: 184829 - DNA, 30 bp, Artificial Sequence
  Synthetic oligonucleotide
tgcaccgataggtatttaagggcggactga

SEQ ID NO: 184830 - DNA, 30 bp, Artificial Sequence
  Synthetic oligonucleotide
caaggtatatcggttgcccgactggactga

SEQ ID NO: 184831 - DNA, 30 bp, Artificial Sequence
  Synthetic oligonucleotide
gtgggtatcccggtagtgtatagtgactga

SEQ ID NO: 184832 - DNA, 30 bp, Artificial Sequence
  Synthetic oligonucleotide
cttctgggtgtcgggacgataggatactga

SEQ ID NO: 184833 - DNA, 30 bp, Artificial Sequence
  Synthetic oligonucleotide
atcacaaggagctcggcctctgggtactga

SEQ ID NO: 184834 - DNA, 30 bp, Artificial Sequence
  Synthetic oligonucleotide
cgatttcgcttaaaagacagagcttactga

SEQ ID NO: 184835 - DNA, 30 bp, Artificial Sequence
  Synthetic oligonucleotide
gaaggaggcacacacgggtcgcgtacctga

SEQ ID NO: 184836 - DNA, 30 bp, Artificial Sequence
  Synthetic oligonucleotide
tagtccagactaattcgcaacattacctga

SEQ ID NO: 184837 - DNA, 30 bp, Artificial Sequence
  Synthetic oligonucleotide
atgcctggttgacaaacactaagaccctga

SEQ ID NO: 184838 - DNA, 30 bp, Artificial Sequence
  Synthetic oligonucleotide
ccaaggggttacagacagacaataccctga

SEQ ID NO: 184839 - DNA, 30 bp, Artificial Sequence
  Synthetic oligonucleotide
catagggaaacgagacacgtaagtccctga

SEQ ID NO: 184840 - DNA, 30 bp, Artificial Sequence
  Synthetic oligonucleotide
ttagaagtcggatcgctaaataaagcctga

SEQ ID NO: 184841 - DNA, 30 bp, Artificial Sequence
  Synthetic oligonucleotide
gaacgataaattacgggtatggtagcctga

SEQ ID NO: 184842 - DNA, 30 bp, Artificial Sequence
  Synthetic oligonucleotide
gggggtccttctcgaggttcggtcgcctga

SEQ ID NO: 184843 - DNA, 30 bp, Artificial Sequence
  Synthetic oligonucleotide
gtaagcagaccaagggtttatgtatcctga

SEQ ID NO: 184844 - DNA, 30 bp, Artificial Sequence
  Synthetic oligonucleotide
ccgcacgggggtgctatatctgtatcctga

SEQ ID NO: 184845 - DNA, 30 bp, Artificial Sequence
  Synthetic oligonucleotide
gggagctttaaacacaatacggagtcctga

SEQ ID NO: 184846 - DNA, 30 bp, Artificial Sequence
  Synthetic oligonucleotide
gggtacctcgagaaattgtacgcgtcctga

SEQ ID NO: 184847 - DNA, 30 bp, Artificial Sequence
  Synthetic oligonucleotide
taaagaataatggaaagtattggttcctga

SEQ ID NO: 184848 - DNA, 30 bp, Artificial Sequence
  Synthetic oligonucleotide
cataagatcactttatattaaaaaagctga

SEQ ID NO: 184849 - DNA, 30 bp, Artificial Sequence
  Synthetic oligonucleotide
ggttcgagttggacgtcgctcgccagctga

SEQ ID NO: 184850 - DNA, 30 bp, Artificial Sequence
  Synthetic oligonucleotide
cgacagggacggacatgcagtaggagctga

SEQ ID NO: 184851 - DNA, 30 bp, Artificial Sequence
  Synthetic oligonucleotide
tatgcataattctagatccagctacgctga

SEQ ID NO: 184852 - DNA, 30 bp, Artificial Sequence
  Synthetic oligonucleotide
cctcctacagcaagctcctatacccgctga

SEQ ID NO: 184853 - DNA, 30 bp, Artificial Sequence
  Synthetic oligonucleotide
agaatgacactgattgagtatcggggctga

SEQ ID NO: 184854 - DNA, 30 bp, Artificial Sequence
  Synthetic oligonucleotide
ttcgaagtatttataagtgttttgggctga

SEQ ID NO: 184855 - DNA, 30 bp, Artificial Sequence
  Synthetic oligonucleotide
ttgatcgacaatcgatcgaacagtggctga

SEQ ID NO: 184856 - DNA, 30 bp, Artificial Sequence
  Synthetic oligonucleotide
gcgtgaattttctgcgtaaatcactgctga

SEQ ID NO: 184857 - DNA, 30 bp, Artificial Sequence
  Synthetic oligonucleotide
cgacagcgctcatatctaactagttgctga

SEQ ID NO: 184858 - DNA, 30 bp, Artificial Sequence
  Synthetic oligonucleotide
taaaaacaagggacacgggaaatttgctga

SEQ ID NO: 184859 - DNA, 30 bp, Artificial Sequence
  Synthetic oligonucleotide
ttgtgcgagcttctcacgtccgacatctga

SEQ ID NO: 184860 - DNA, 30 bp, Artificial Sequence
  Synthetic oligonucleotide
gcgaaagatatgctgcacccgagcatctga

SEQ ID NO: 184861 - DNA, 30 bp, Artificial Sequence
  Synthetic oligonucleotide
acggcttggaatagacccagccagatctga

SEQ ID NO: 184862 - DNA, 30 bp, Artificial Sequence
  Synthetic oligonucleotide
gaaagataaaggtgccaccacaatatctga

SEQ ID NO: 184863 - DNA, 30 bp, Artificial Sequence
  Synthetic oligonucleotide
ggcgcgttcgacgcattactcaaactctga

SEQ ID NO: 184864 - DNA, 30 bp, Artificial Sequence
  Synthetic oligonucleotide
gcggagtcgtttacgtagaatgcactctga

SEQ ID NO: 184865 - DNA, 30 bp, Artificial Sequence
  Synthetic oligonucleotide
gatctcggaacgctcagggtgaatctctga

SEQ ID NO: 184866 - DNA, 30 bp, Artificial Sequence
  Synthetic oligonucleotide
ccgcagtatatttgcgcctgaaccgtctga

SEQ ID NO: 184867 - DNA, 30 bp, Artificial Sequence
  Synthetic oligonucleotide
cggcgactgtcctgtggttaatgcgtctga

SEQ ID NO: 184868 - DNA, 30 bp, Artificial Sequence
  Synthetic oligonucleotide
cttgtatcatagccgaccctgtgcgtctga

SEQ ID NO: 184869 - DNA, 30 bp, Artificial Sequence
  Synthetic oligonucleotide
agctgcggtaggccaacgggccaggtctga

SEQ ID NO: 184870 - DNA, 30 bp, Artificial Sequence
  Synthetic oligonucleotide
gccaaaaatgagatgatattgaccttctga

SEQ ID NO: 184871 - DNA, 30 bp, Artificial Sequence
  Synthetic oligonucleotide
ttaggagcgcgcgcaagttggtagttctga

SEQ ID NO: 184872 - DNA, 30 bp, Artificial Sequence
  Synthetic oligonucleotide
ctggcatgacatggttagcaggcaaagtga

SEQ ID NO: 184873 - DNA, 30 bp, Artificial Sequence
  Synthetic oligonucleotide
gcggggtgttgacggcggtgtggaaagtga

SEQ ID NO: 184874 - DNA, 30 bp, Artificial Sequence
  Synthetic oligonucleotide
gggggcggtttggatcacggtagcaagtga

SEQ ID NO: 184875 - DNA, 30 bp, Artificial Sequence
  Synthetic oligonucleotide
atcggagattcgatgagtaaccggaagtga

SEQ ID NO: 184876 - DNA, 30 bp, Artificial Sequence
  Synthetic oligonucleotide
gcaagtagtactatcatgtcgtggaagtga

SEQ ID NO: 184877 - DNA, 30 bp, Artificial Sequence
  Synthetic oligonucleotide
cacggcttaattctgtcggtggtgaagtga

SEQ ID NO: 184878 - DNA, 30 bp, Artificial Sequence
  Synthetic oligonucleotide
gagatgaaggctactgacagaagtaagtga

SEQ ID NO: 184879 - DNA, 30 bp, Artificial Sequence
  Synthetic oligonucleotide
ccacgcatcgcctacccgaagtcccagtga

SEQ ID NO: 184880 - DNA, 30 bp, Artificial Sequence
  Synthetic oligonucleotide
gcttaatacgatattgccctgcgccagtga

SEQ ID NO: 184881 - DNA, 30 bp, Artificial Sequence
  Synthetic oligonucleotide
tggcaagaacttaactagatttgccagtga

SEQ ID NO: 184882 - DNA, 30 bp, Artificial Sequence
  Synthetic oligonucleotide
tgccacccagacactttgaaagggcagtga

SEQ ID NO: 184883 - DNA, 30 bp, Artificial Sequence
  Synthetic oligonucleotide
ccaaccattttacctccacgaactcagtga

SEQ ID NO: 184884 - DNA, 30 bp, Artificial Sequence
  Synthetic oligonucleotide
gtactccgcacccaaagagagactcagtga

SEQ ID NO: 184885 - DNA, 30 bp, Artificial Sequence
  Synthetic oligonucleotide
tgaggttatcaactcggctttcaggagtga

SEQ ID NO: 184886 - DNA, 30 bp, Artificial Sequence
  Synthetic oligonucleotide
ataggtgtgatgtatgactcaggggagtga

SEQ ID NO: 184887 - DNA, 30 bp, Artificial Sequence
  Synthetic oligonucleotide
cgtacaatttggggttcagtctcatagtga

SEQ ID NO: 184888 - DNA, 30 bp, Artificial Sequence
  Synthetic oligonucleotide
taacgaagtttgtcaaggatatcgtagtga

SEQ ID NO: 184889 - DNA, 29 bp, Artificial Sequence
  Synthetic oligonucleotide
gcgagatttcatgatgtggggaaacgtga

SEQ ID NO: 184890 - DNA, 30 bp, Artificial Sequence
  Synthetic oligonucleotide
gcgacaacaggattgggttgagttacgtga

SEQ ID NO: 184891 - DNA, 30 bp, Artificial Sequence
  Synthetic oligonucleotide
taggggtaaaagttacaagaccacccgtga

SEQ ID NO: 184892 - DNA, 30 bp, Artificial Sequence
  Synthetic oligonucleotide
aattaggtgagatatacgggagccccgtga

SEQ ID NO: 184893 - DNA, 30 bp, Artificial Sequence
  Synthetic oligonucleotide
ggggtggcaattggagattactgtccgtga

SEQ ID NO: 184894 - DNA, 30 bp, Artificial Sequence
  Synthetic oligonucleotide
gttaatccgcgcttacatggcagtgcgtga

SEQ ID NO: 184895 - DNA, 30 bp, Artificial Sequence
  Synthetic oligonucleotide
gtgggatgctgagctgctggatcatcgtga

SEQ ID NO: 184896 - DNA, 30 bp, Artificial Sequence
  Synthetic oligonucleotide
aagatctttagacggcgcccaagatcgtga

SEQ ID NO: 184897 - DNA, 30 bp, Artificial Sequence
  Synthetic oligonucleotide
agaaaaatcgcgattcagggaaactcgtga

SEQ ID NO: 184898 - DNA, 30 bp, Artificial Sequence
  Synthetic oligonucleotide
gaatacgatattggggtcgcgtcgtcgtga

SEQ ID NO: 184899 - DNA, 30 bp, Artificial Sequence
  Synthetic oligonucleotide
tctagccagtccgaaggcggaaattcgtga

SEQ ID NO: 184900 - DNA, 30 bp, Artificial Sequence
  Synthetic oligonucleotide
tgacccgtatgggaattaagattttcgtga

SEQ ID NO: 184901 - DNA, 30 bp, Artificial Sequence
  Synthetic oligonucleotide
gcaacaaaggaagtgtgatattaaaggtga

SEQ ID NO: 184902 - DNA, 30 bp, Artificial Sequence
  Synthetic oligonucleotide
gagggacaagttattttagtgacaaggtga

SEQ ID NO: 184903 - DNA, 30 bp, Artificial Sequence
  Synthetic oligonucleotide
gggcggagtttggatgttggttcaaggtga

SEQ ID NO: 184904 - DNA, 30 bp, Artificial Sequence
  Synthetic oligonucleotide
ttctataggagcgtcagaatgcaacggtga

SEQ ID NO: 184905 - DNA, 30 bp, Artificial Sequence
  Synthetic oligonucleotide
atcttgaaacacctttagttaatacggtga

SEQ ID NO: 184906 - DNA, 30 bp, Artificial Sequence
  Synthetic oligonucleotide
gttcgggaacggacattggtagcccggtga

SEQ ID NO: 184907 - DNA, 30 bp, Artificial Sequence
  Synthetic oligonucleotide
cggctggaacgcgtcacggatagccggtga

SEQ ID NO: 184908 - DNA, 30 bp, Artificial Sequence
  Synthetic oligonucleotide
tgcctagagaaggaggatcgtggtcggtga

SEQ ID NO: 184909 - DNA, 30 bp, Artificial Sequence
  Synthetic oligonucleotide
gcggcttgagtttcgggtaagtacgggtga

SEQ ID NO: 184910 - DNA, 30 bp, Artificial Sequence
  Synthetic oligonucleotide
gcggtacacactaaatggactttcgggtga

SEQ ID NO: 184911 - DNA, 30 bp, Artificial Sequence
  Synthetic oligonucleotide
ggaagcagacgacggacggatcgtgggtga

SEQ ID NO: 184912 - DNA, 31 bp, Artificial Sequence
  Synthetic oligonucleotide
ggttgacgcgtaacctggggctggtgggtga

SEQ ID NO: 184913 - DNA, 30 bp, Artificial Sequence
  Synthetic oligonucleotide
tgtgggagagtgagcatcccgtgtgggtga

SEQ ID NO: 184914 - DNA, 30 bp, Artificial Sequence
  Synthetic oligonucleotide
gtgcgtagagaagttgccgttattgggtga

SEQ ID NO: 184915 - DNA, 31 bp, Artificial Sequence
  Synthetic oligonucleotide
tggctagggtgtgagcgaggaagttgggtga

SEQ ID NO: 184916 - DNA, 30 bp, Artificial Sequence
  Synthetic oligonucleotide
cccagatagcagcttcactgacaatggtga

SEQ ID NO: 184917 - DNA, 30 bp, Artificial Sequence
  Synthetic oligonucleotide
tgtacgcgacgtacgcgacctccatggtga

SEQ ID NO: 184918 - DNA, 30 bp, Artificial Sequence
  Synthetic oligonucleotide
acgtggttcgcatccaatttgcgatggtga

SEQ ID NO: 184919 - DNA, 29 bp, Artificial Sequence
  Synthetic oligonucleotide
agattgttcggaacgttatattatggtga

SEQ ID NO: 184920 - DNA, 30 bp, Artificial Sequence
  Synthetic oligonucleotide
gttaatgaagctaagttgtaacactggtga

SEQ ID NO: 184921 - DNA, 30 bp, Artificial Sequence
  Synthetic oligonucleotide
gctacaccccgtagagacgatgggtggtga

SEQ ID NO: 184922 - DNA, 30 bp, Artificial Sequence
  Synthetic oligonucleotide
gtgtcacgtatttaggctaattcttggtga

SEQ ID NO: 184923 - DNA, 30 bp, Artificial Sequence
  Synthetic oligonucleotide
acatgcaagctcttcgatctctacatgtga

SEQ ID NO: 184924 - DNA, 30 bp, Artificial Sequence
  Synthetic oligonucleotide
ggtcagccatagaggccacataagatgtga

SEQ ID NO: 184925 - DNA, 30 bp, Artificial Sequence
  Synthetic oligonucleotide
taatcaagcactctaactagaaggatgtga

SEQ ID NO: 184926 - DNA, 30 bp, Artificial Sequence
  Synthetic oligonucleotide
agaactgccggagtagtgtcttggatgtga

SEQ ID NO: 184927 - DNA, 30 bp, Artificial Sequence
  Synthetic oligonucleotide
aaaaccttgacaataaatagggatatgtga

SEQ ID NO: 184928 - DNA, 30 bp, Artificial Sequence
  Synthetic oligonucleotide
gtaaactattgataattaaaggctatgtga

SEQ ID NO: 184929 - DNA, 30 bp, Artificial Sequence
  Synthetic oligonucleotide
ccgaagatcaaaaagtgttgagttatgtga

SEQ ID NO: 184930 - DNA, 30 bp, Artificial Sequence
  Synthetic oligonucleotide
ggggatggtgcatcgccaagttttatgtga

SEQ ID NO: 184931 - DNA, 30 bp, Artificial Sequence
  Synthetic oligonucleotide
ccaagcgcggaattgtgatatcaactgtga

SEQ ID NO: 184932 - DNA, 30 bp, Artificial Sequence
  Synthetic oligonucleotide
cagtcccgttgtcgcaaggaattcctgtga

SEQ ID NO: 184933 - DNA, 30 bp, Artificial Sequence
  Synthetic oligonucleotide
ttacccggcatctgaccagagaagctgtga

SEQ ID NO: 184934 - DNA, 30 bp, Artificial Sequence
  Synthetic oligonucleotide
tttgtcgcgggctccatcggggcgctgtga

SEQ ID NO: 184935 - DNA, 30 bp, Artificial Sequence
  Synthetic oligonucleotide
tagaagagtaatatcgaaacgaggctgtga

SEQ ID NO: 184936 - DNA, 30 bp, Artificial Sequence
  Synthetic oligonucleotide
gtcaagacctaaaccgattctcttctgtga

SEQ ID NO: 184937 - DNA, 30 bp, Artificial Sequence
  Synthetic oligonucleotide
gcagagaagcagcccatgaggtcagtgtga

SEQ ID NO: 184938 - DNA, 30 bp, Artificial Sequence
  Synthetic oligonucleotide
tttgtaggaaggacttagcatgaggtgtga

SEQ ID NO: 184939 - DNA, 30 bp, Artificial Sequence
  Synthetic oligonucleotide
atgtgccgctattaccgttactaggtgtga

SEQ ID NO: 184940 - DNA, 30 bp, Artificial Sequence
  Synthetic oligonucleotide
gcaaaggcttatcttctcggtccggtgtga

SEQ ID NO: 184941 - DNA, 30 bp, Artificial Sequence
  Synthetic oligonucleotide
taaagcaaaggattggccgctggggtgtga

SEQ ID NO: 184942 - DNA, 30 bp, Artificial Sequence
  Synthetic oligonucleotide
gggccaaggttacgttcgagagaattgtga

SEQ ID NO: 184943 - DNA, 30 bp, Artificial Sequence
  Synthetic oligonucleotide
agaaggatggcaaggacactaggcttgtga

SEQ ID NO: 184944 - DNA, 30 bp, Artificial Sequence
  Synthetic oligonucleotide
gctgaagcaggctcaatgacgctcttgtga

SEQ ID NO: 184945 - DNA, 30 bp, Artificial Sequence
  Synthetic oligonucleotide
aggtctgcaggataggtgaacgtcttgtga

SEQ ID NO: 184946 - DNA, 31 bp, Artificial Sequence
  Synthetic oligonucleotide
cagcgggttcttggacttctaatcaaattga

SEQ ID NO: 184947 - DNA, 30 bp, Artificial Sequence
  Synthetic oligonucleotide
actttgcagaggagataaccgtcgaattga

SEQ ID NO: 184948 - DNA, 30 bp, Artificial Sequence
  Synthetic oligonucleotide
actttggcgaacctatttggtgtgaattga

SEQ ID NO: 184949 - DNA, 30 bp, Artificial Sequence
  Synthetic oligonucleotide
ccacgttacttgaaagcaggatataattga

SEQ ID NO: 184950 - DNA, 30 bp, Artificial Sequence
  Synthetic oligonucleotide
ggctggcaatagatatattcctataattga

SEQ ID NO: 184951 - DNA, 30 bp, Artificial Sequence
  Synthetic oligonucleotide
ctcaaaccagaagtattcggaagtaattga

SEQ ID NO: 184952 - DNA, 30 bp, Artificial Sequence
  Synthetic oligonucleotide
gcctggtcggatcccatggcactacattga

SEQ ID NO: 184953 - DNA, 30 bp, Artificial Sequence
  Synthetic oligonucleotide
cggagtacgccgggttaaaaggtacattga

SEQ ID NO: 184954 - DNA, 30 bp, Artificial Sequence
  Synthetic oligonucleotide
actgtcggccgcccgtcagtcatgcattga

SEQ ID NO: 184955 - DNA, 30 bp, Artificial Sequence
  Synthetic oligonucleotide
acgattgctgatttagtgcccaatcattga

SEQ ID NO: 184956 - DNA, 30 bp, Artificial Sequence
  Synthetic oligonucleotide
gacacaatcgaatgaccttgatatgattga

SEQ ID NO: 184957 - DNA, 30 bp, Artificial Sequence
  Synthetic oligonucleotide
cctgacaagtggaaggattttcctgattga

SEQ ID NO: 184958 - DNA, 30 bp, Artificial Sequence
  Synthetic oligonucleotide
ttacatgagcggatttaaatctctgattga

SEQ ID NO: 184959 - DNA, 30 bp, Artificial Sequence
  Synthetic oligonucleotide
ccggaaatcattagtgaggcggaaacttga

SEQ ID NO: 184960 - DNA, 30 bp, Artificial Sequence
  Synthetic oligonucleotide
ggaggggtcgattccgtcttcgagacttga

SEQ ID NO: 184961 - DNA, 30 bp, Artificial Sequence
  Synthetic oligonucleotide
gacttgaagtgcgacggattttgtacttga

SEQ ID NO: 184962 - DNA, 30 bp, Artificial Sequence
  Synthetic oligonucleotide
acaacgtaagtcgtaggcattatggcttga

SEQ ID NO: 184963 - DNA, 30 bp, Artificial Sequence
  Synthetic oligonucleotide
ccaaagaactcctagaactattgctcttga

SEQ ID NO: 184964 - DNA, 30 bp, Artificial Sequence
  Synthetic oligonucleotide
tcatgaacttcgaatgttcggttttcttga

SEQ ID NO: 184965 - DNA, 30 bp, Artificial Sequence
  Synthetic oligonucleotide
ttaactgagcaataggacccatcaagttga

SEQ ID NO: 184966 - DNA, 30 bp, Artificial Sequence
  Synthetic oligonucleotide
gtcaagcaggctaagtgtctgagaagttga

SEQ ID NO: 184967 - DNA, 30 bp, Artificial Sequence
  Synthetic oligonucleotide
tcacatcaggcgtcaggagagttcagttga

SEQ ID NO: 184968 - DNA, 30 bp, Artificial Sequence
  Synthetic oligonucleotide
ggtacaacgctcataagaccatgacgttga

SEQ ID NO: 184969 - DNA, 30 bp, Artificial Sequence
  Synthetic oligonucleotide
aagcttcttttataatttacgtgacgttga

SEQ ID NO: 184970 - DNA, 30 bp, Artificial Sequence
  Synthetic oligonucleotide
gccaccgagcggggttcctcaagaggttga

SEQ ID NO: 184971 - DNA, 30 bp, Artificial Sequence
  Synthetic oligonucleotide
cgatgtattagtgcccccccgcacggttga

SEQ ID NO: 184972 - DNA, 30 bp, Artificial Sequence
  Synthetic oligonucleotide
ttcagtctatagtagcagccccggggttga

SEQ ID NO: 184973 - DNA, 30 bp, Artificial Sequence
  Synthetic oligonucleotide
gccataaaagcgcaccagcgaaagatttga

SEQ ID NO: 184974 - DNA, 30 bp, Artificial Sequence
  Synthetic oligonucleotide
taactcgaagttggcgtcactaatatttga

SEQ ID NO: 184975 - DNA, 30 bp, Artificial Sequence
  Synthetic oligonucleotide
attccgtggcgaagagcttgcgagctttga

SEQ ID NO: 184976 - DNA, 30 bp, Artificial Sequence
  Synthetic oligonucleotide
agactggcacagcattccgtgcaagtttga

SEQ ID NO: 184977 - DNA, 30 bp, Artificial Sequence
  Synthetic oligonucleotide
gcttgcatcgcatgccacgagtccgtttga

SEQ ID NO: 184978 - DNA, 30 bp, Artificial Sequence
  Synthetic oligonucleotide
ttaagaataagggatcaatatattgtttga

SEQ ID NO: 184979 - DNA, 30 bp, Artificial Sequence
  Synthetic oligonucleotide
agcacagacatgtcagatgttcgattttga

SEQ ID NO: 184980 - DNA, 31 bp, Artificial Sequence
  Synthetic oligonucleotide
cttagatcacgagccgcattttaccttttga

SEQ ID NO: 184981 - DNA, 30 bp, Artificial Sequence
  Synthetic oligonucleotide
caatatcataaatgctttacactcttttga

SEQ ID NO: 184982 - DNA, 30 bp, Artificial Sequence
  Synthetic oligonucleotide
caagtaaccaaaagcactccggcaaaaata

SEQ ID NO: 184983 - DNA, 30 bp, Artificial Sequence
  Synthetic oligonucleotide
tgtcatagggctgtacgtgccttaaaaata

SEQ ID NO: 184984 - DNA, 30 bp, Artificial Sequence
  Synthetic oligonucleotide
agttctacgtgaacttgtcgagacaaaata

SEQ ID NO: 184985 - DNA, 30 bp, Artificial Sequence
  Synthetic oligonucleotide
gcgaaatgggtgcgggtcaatcggaaaata

SEQ ID NO: 184986 - DNA, 30 bp, Artificial Sequence
  Synthetic oligonucleotide
actcacaacgtaggcgacatgtataaaata

SEQ ID NO: 184987 - DNA, 30 bp, Artificial Sequence
  Synthetic oligonucleotide
ccaacgggctgacactaaagtcgtaaaata

SEQ ID NO: 184988 - DNA, 30 bp, Artificial Sequence
  Synthetic oligonucleotide
gtttgggagggcgggccgagtaggcaaata

SEQ ID NO: 184989 - DNA, 30 bp, Artificial Sequence
  Synthetic oligonucleotide
atcgtatacgttcgacaaactaaggaaata

SEQ ID NO: 184990 - DNA, 30 bp, Artificial Sequence
  Synthetic oligonucleotide
ggtgactaagggctaaactggtaggaaata

SEQ ID NO: 184991 - DNA, 30 bp, Artificial Sequence
  Synthetic oligonucleotide
gatcgaggttcgtaggctccaatggaaata

SEQ ID NO: 184992 - DNA, 30 bp, Artificial Sequence
  Synthetic oligonucleotide
tagcatgtgccgatcgaccgtgtggaaata

SEQ ID NO: 184993 - DNA, 30 bp, Artificial Sequence
  Synthetic oligonucleotide
gaactcgcttagttcgggactatataaata

SEQ ID NO: 184994 - DNA, 30 bp, Artificial Sequence
  Synthetic oligonucleotide
gaacggttggcgccttcgttactgtaaata

SEQ ID NO: 184995 - DNA, 30 bp, Artificial Sequence
  Synthetic oligonucleotide
agtcagatgagatgattaaagaattaaata

SEQ ID NO: 184996 - DNA, 30 bp, Artificial Sequence
  Synthetic oligonucleotide
agcgacatcgatcgtggtaacggttaaata

SEQ ID NO: 184997 - DNA, 30 bp, Artificial Sequence
  Synthetic oligonucleotide
ctgggaaatagcggtagggacggaacaata

SEQ ID NO: 184998 - DNA, 30 bp, Artificial Sequence
  Synthetic oligonucleotide
ctgatagatgcttagaggtgaacgacaata

SEQ ID NO: 184999 - DNA, 30 bp, Artificial Sequence
  Synthetic oligonucleotide
agggattcggtgactatcatttaaccaata

SEQ ID NO: 185000 - DNA, 30 bp, Artificial Sequence
  Synthetic oligonucleotide
atgtctccctgaaaacccaatgcaccaata

SEQ ID NO: 185001 - DNA, 30 bp, Artificial Sequence
  Synthetic oligonucleotide
taatagtgggcgggtggtaacataccaata

SEQ ID NO: 185002 - DNA, 30 bp, Artificial Sequence
  Synthetic oligonucleotide
aatcaacttcccgagtataccgtaccaata

SEQ ID NO: 185003 - DNA, 30 bp, Artificial Sequence
  Synthetic oligonucleotide
caaacttaagtatgaaatgggttaccaata

SEQ ID NO: 185004 - DNA, 30 bp, Artificial Sequence
  Synthetic oligonucleotide
atcggaatggacacaactttgtagccaata

SEQ ID NO: 185005 - DNA, 30 bp, Artificial Sequence
  Synthetic oligonucleotide
tcacaactcaaactaggcttaaggccaata

SEQ ID NO: 185006 - DNA, 30 bp, Artificial Sequence
  Synthetic oligonucleotide
gcacatagtacaacagagccagtgccaata

SEQ ID NO: 185007 - DNA, 30 bp, Artificial Sequence
  Synthetic oligonucleotide
agcgcagccctcgtagggtggaatccaata

SEQ ID NO: 185008 - DNA, 30 bp, Artificial Sequence
  Synthetic oligonucleotide
ggatcagtagatggtccagcatgtccaata

SEQ ID NO: 185009 - DNA, 30 bp, Artificial Sequence
  Synthetic oligonucleotide
tttcggggtggtgtatcggcaattccaata

SEQ ID NO: 185010 - DNA, 30 bp, Artificial Sequence
  Synthetic oligonucleotide
aaaggccggaaagcgggctgggaagcaata

SEQ ID NO: 185011 - DNA, 30 bp, Artificial Sequence
  Synthetic oligonucleotide
cgataagaatatttatagtgaagcgcaata

SEQ ID NO: 185012 - DNA, 30 bp, Artificial Sequence
  Synthetic oligonucleotide
atcgacaacgtttaacggataaatgcaata

SEQ ID NO: 185013 - DNA, 29 bp, Artificial Sequence
  Synthetic oligonucleotide
accgataagaaaacaatacggttgcaata

SEQ ID NO: 185014 - DNA, 30 bp, Artificial Sequence
  Synthetic oligonucleotide
ataacagcctatagaccgggatattcaata

SEQ ID NO: 185015 - DNA, 30 bp, Artificial Sequence
  Synthetic oligonucleotide
gcagacgcgttgataatgctgtattcaata

SEQ ID NO: 185016 - DNA, 30 bp, Artificial Sequence
  Synthetic oligonucleotide
ggacaacactctgctgcggatacaagaata

SEQ ID NO: 185017 - DNA, 30 bp, Artificial Sequence
  Synthetic oligonucleotide
ctactaactgctacccggactgccagaata

SEQ ID NO: 185018 - DNA, 30 bp, Artificial Sequence
  Synthetic oligonucleotide
aagcgccatggtgggcaggtgcgcagaata

SEQ ID NO: 185019 - DNA, 30 bp, Artificial Sequence
  Synthetic oligonucleotide
aaaggtatagtatcgatacaaagtagaata

SEQ ID NO: 185020 - DNA, 30 bp, Artificial Sequence
  Synthetic oligonucleotide
ctaaagaaatcggaaccgcggagtagaata

SEQ ID NO: 185021 - DNA, 30 bp, Artificial Sequence
  Synthetic oligonucleotide
gacattaagatgtacatggcccaacgaata

SEQ ID NO: 185022 - DNA, 30 bp, Artificial Sequence
  Synthetic oligonucleotide
tgatagagggaatttatgcaggaccgaata

SEQ ID NO: 185023 - DNA, 30 bp, Artificial Sequence
  Synthetic oligonucleotide
acactcactagtggtagctctctgcgaata

SEQ ID NO: 185024 - DNA, 30 bp, Artificial Sequence
  Synthetic oligonucleotide
cttatatcgtccaactagcccattcgaata

SEQ ID NO: 185025 - DNA, 30 bp, Artificial Sequence
  Synthetic oligonucleotide
tggacgggtcggttattggtttaaggaata

SEQ ID NO: 185026 - DNA, 30 bp, Artificial Sequence
  Synthetic oligonucleotide
ggtgctaaccgcagggaaattgggggaata

SEQ ID NO: 185027 - DNA, 30 bp, Artificial Sequence
  Synthetic oligonucleotide
gccgcctgagtttgagcactctgtggaata

SEQ ID NO: 185028 - DNA, 30 bp, Artificial Sequence
  Synthetic oligonucleotide
tgccgctggctgaagacaccgcttggaata

SEQ ID NO: 185029 - DNA, 30 bp, Artificial Sequence
  Synthetic oligonucleotide
gcaacgtggaagagcttattggcaataata

SEQ ID NO: 185030 - DNA, 30 bp, Artificial Sequence
  Synthetic oligonucleotide
gggaagttactaatacttcaaagcataata

SEQ ID NO: 185031 - DNA, 30 bp, Artificial Sequence
  Synthetic oligonucleotide
cgaaaacctcgaaataatagaggcataata

SEQ ID NO: 185032 - DNA, 30 bp, Artificial Sequence
  Synthetic oligonucleotide
gctccgagactttggtagagggcactaata

SEQ ID NO: 185033 - DNA, 30 bp, Artificial Sequence
  Synthetic oligonucleotide
tgagctcgcttcacataacgggggctaata

SEQ ID NO: 185034 - DNA, 29 bp, Artificial Sequence
  Synthetic oligonucleotide
agagaaaaagttctatcggggatctaata

SEQ ID NO: 185035 - DNA, 30 bp, Artificial Sequence
  Synthetic oligonucleotide
gacttatgaggttcacacgtgtatctaata

SEQ ID NO: 185036 - DNA, 30 bp, Artificial Sequence
  Synthetic oligonucleotide
cgcggaacagctagacctaaccttctaata

SEQ ID NO: 185037 - DNA, 30 bp, Artificial Sequence
  Synthetic oligonucleotide
tcaccggtattcgctcacggccaagtaata

SEQ ID NO: 185038 - DNA, 30 bp, Artificial Sequence
  Synthetic oligonucleotide
agtctaatttttatggttgcactagtaata

SEQ ID NO: 185039 - DNA, 30 bp, Artificial Sequence
  Synthetic oligonucleotide
actcccttacccacaggcgcgaacgtaata

SEQ ID NO: 185040 - DNA, 30 bp, Artificial Sequence
  Synthetic oligonucleotide
ggcagccgtgatagcgcgacatacgtaata

SEQ ID NO: 185041 - DNA, 30 bp, Artificial Sequence
  Synthetic oligonucleotide
taaactaaatcatatcgcgactccgtaata

SEQ ID NO: 185042 - DNA, 30 bp, Artificial Sequence
  Synthetic oligonucleotide
agcagcaggacctcagtgctgctcgtaata

SEQ ID NO: 185043 - DNA, 30 bp, Artificial Sequence
  Synthetic oligonucleotide
ctgcgatttgaagccgtgtgaatggtaata

SEQ ID NO: 185044 - DNA, 30 bp, Artificial Sequence
  Synthetic oligonucleotide
gctccagctacataatatgaattggtaata

SEQ ID NO: 185045 - DNA, 30 bp, Artificial Sequence
  Synthetic oligonucleotide
tagatgggcctgcacgtaaatggtgtaata

SEQ ID NO: 185046 - DNA, 30 bp, Artificial Sequence
  Synthetic oligonucleotide
ttgctccgagaacattaacaccttgtaata

SEQ ID NO: 185047 - DNA, 30 bp, Artificial Sequence
  Synthetic oligonucleotide
accacgggatctcagttcgaaacattaata

SEQ ID NO: 185048 - DNA, 31 bp, Artificial Sequence
  Synthetic oligonucleotide
acagatgttcacgagggtttggctgttaata

SEQ ID NO: 185049 - DNA, 30 bp, Artificial Sequence
  Synthetic oligonucleotide
catcaacgtgtgtcacggacaggtttaata

SEQ ID NO: 185050 - DNA, 30 bp, Artificial Sequence
  Synthetic oligonucleotide
gctcgaaggaaattaagggcaggtttaata

SEQ ID NO: 185051 - DNA, 30 bp, Artificial Sequence
  Synthetic oligonucleotide
tcgagcagttagacagagtcagtaaacata

SEQ ID NO: 185052 - DNA, 30 bp, Artificial Sequence
  Synthetic oligonucleotide
accagccaagctcccacgctatacaacata

SEQ ID NO: 185053 - DNA, 30 bp, Artificial Sequence
  Synthetic oligonucleotide
tactcctcccggcacaggtgcgagaacata

SEQ ID NO: 185054 - DNA, 30 bp, Artificial Sequence
  Synthetic oligonucleotide
gggcaggcacgagcatagggacttaacata

SEQ ID NO: 185055 - DNA, 30 bp, Artificial Sequence
  Synthetic oligonucleotide
agaacagggttaaataacacccaccacata

SEQ ID NO: 185056 - DNA, 30 bp, Artificial Sequence
  Synthetic oligonucleotide
aaagatgtgaggccaccgctcccgcacata

SEQ ID NO: 185057 - DNA, 30 bp, Artificial Sequence
  Synthetic oligonucleotide
gctttgaagatgcgcgaccgagtgcacata

SEQ ID NO: 185058 - DNA, 30 bp, Artificial Sequence
  Synthetic oligonucleotide
tgaggtaaccggagtaataatcgcgacata

SEQ ID NO: 185059 - DNA, 30 bp, Artificial Sequence
  Synthetic oligonucleotide
tggactttcaaaaagaacttcctcgacata

SEQ ID NO: 185060 - DNA, 30 bp, Artificial Sequence
  Synthetic oligonucleotide
catattaggggtgggtgctctatggacata

SEQ ID NO: 185061 - DNA, 30 bp, Artificial Sequence
  Synthetic oligonucleotide
gttagcgtaggagatgtcgagtatgacata

SEQ ID NO: 185062 - DNA, 30 bp, Artificial Sequence
  Synthetic oligonucleotide
aatgtagcttatccccgtggaccatacata

SEQ ID NO: 185063 - DNA, 30 bp, Artificial Sequence
  Synthetic oligonucleotide
acctggtgagtattgaacgtattatacata

SEQ ID NO: 185064 - DNA, 30 bp, Artificial Sequence
  Synthetic oligonucleotide
ggattgtgaattaactctgtgtagtacata

SEQ ID NO: 185065 - DNA, 30 bp, Artificial Sequence
  Synthetic oligonucleotide
aacagggggtatccgtgacgttacaccata

SEQ ID NO: 185066 - DNA, 30 bp, Artificial Sequence
  Synthetic oligonucleotide
cacgtaacaatttggggttctcgcaccata

SEQ ID NO: 185067 - DNA, 30 bp, Artificial Sequence
  Synthetic oligonucleotide
gtgcgggcccgataggaaagtggtaccata

SEQ ID NO: 185068 - DNA, 30 bp, Artificial Sequence
  Synthetic oligonucleotide
gtgcctgtgaaatgggactagcaacccata

SEQ ID NO: 185069 - DNA, 30 bp, Artificial Sequence
  Synthetic oligonucleotide
cgaactattgaagtatacaactcagccata

SEQ ID NO: 185070 - DNA, 30 bp, Artificial Sequence
  Synthetic oligonucleotide
gcgggtgtgttcaaaaaaggccacgccata

SEQ ID NO: 185071 - DNA, 30 bp, Artificial Sequence
  Synthetic oligonucleotide
ggccgaaggcggcgtgtactgcacgccata

SEQ ID NO: 185072 - DNA, 30 bp, Artificial Sequence
  Synthetic oligonucleotide
gttcgaacaattaccagaagcaaggccata

SEQ ID NO: 185073 - DNA, 30 bp, Artificial Sequence
  Synthetic oligonucleotide
aaggctatactacgattcgtatcatccata

SEQ ID NO: 185074 - DNA, 31 bp, Artificial Sequence
  Synthetic oligonucleotide
tccgacaacactgaataccttctactccata

SEQ ID NO: 185075 - DNA, 30 bp, Artificial Sequence
  Synthetic oligonucleotide
cctggagtggctctaggcttcccctccata

SEQ ID NO: 185076 - DNA, 30 bp, Artificial Sequence
  Synthetic oligonucleotide
atcatatagttcacacgggttaaaagcata

SEQ ID NO: 185077 - DNA, 30 bp, Artificial Sequence
  Synthetic oligonucleotide
tcactggcctgaatatattgaccaagcata

SEQ ID NO: 185078 - DNA, 30 bp, Artificial Sequence
  Synthetic oligonucleotide
tcggaaccccgaacaactctacatagcata

SEQ ID NO: 185079 - DNA, 30 bp, Artificial Sequence
  Synthetic oligonucleotide
ataatagtgtcaaagttaaatagtagcata

SEQ ID NO: 185080 - DNA, 30 bp, Artificial Sequence
  Synthetic oligonucleotide
cggagctgtgagtcaatggtcattagcata

SEQ ID NO: 185081 - DNA, 30 bp, Artificial Sequence
  Synthetic oligonucleotide
gtatataaacaatatcagacctcacgcata

SEQ ID NO: 185082 - DNA, 30 bp, Artificial Sequence
  Synthetic oligonucleotide
ctagtgttcatgtagaatttactacgcata

SEQ ID NO: 185083 - DNA, 30 bp, Artificial Sequence
  Synthetic oligonucleotide
acgctctcggggtagagtacacagcgcata

SEQ ID NO: 185084 - DNA, 30 bp, Artificial Sequence
  Synthetic oligonucleotide
actgagtcgacgatccgggaacggcgcata

SEQ ID NO: 185085 - DNA, 30 bp, Artificial Sequence
  Synthetic oligonucleotide
aggaaagcatgttctcaacctgtgcgcata

SEQ ID NO: 185086 - DNA, 30 bp, Artificial Sequence
  Synthetic oligonucleotide
agtgcatcgtacgttccgaccaaaggcata

SEQ ID NO: 185087 - DNA, 30 bp, Artificial Sequence
  Synthetic oligonucleotide
caatcgcgctatagcaacgtaccaggcata

SEQ ID NO: 185088 - DNA, 30 bp, Artificial Sequence
  Synthetic oligonucleotide
gatgcgtagcgttgtggtttagccggcata

SEQ ID NO: 185089 - DNA, 30 bp, Artificial Sequence
  Synthetic oligonucleotide
atcgcgccaacgtaaaccattttcggcata

SEQ ID NO: 185090 - DNA, 30 bp, Artificial Sequence
  Synthetic oligonucleotide
tagaaacggtaagttaatagaaaatgcata

SEQ ID NO: 185091 - DNA, 30 bp, Artificial Sequence
  Synthetic oligonucleotide
gcgggggggggaggacggacaatctgcata

SEQ ID NO: 185092 - DNA, 30 bp, Artificial Sequence
  Synthetic oligonucleotide
tggatcctctaaagcatctaacggtgcata

SEQ ID NO: 185093 - DNA, 30 bp, Artificial Sequence
  Synthetic oligonucleotide
gtggagtcttagtatgagtaactgtgcata

SEQ ID NO: 185094 - DNA, 30 bp, Artificial Sequence
  Synthetic oligonucleotide
tgtcggtccagagatgcgattcagatcata

SEQ ID NO: 185095 - DNA, 30 bp, Artificial Sequence
  Synthetic oligonucleotide
taacacactaaaactgcaaggctgatcata

SEQ ID NO: 185096 - DNA, 30 bp, Artificial Sequence
  Synthetic oligonucleotide
acggcctggcccgagtcgcaccttatcata

SEQ ID NO: 185097 - DNA, 30 bp, Artificial Sequence
  Synthetic oligonucleotide
tgacctcaacccctataagggaaactcata

SEQ ID NO: 185098 - DNA, 30 bp, Artificial Sequence
  Synthetic oligonucleotide
gcgagtagccctaccgtcctgacactcata

SEQ ID NO: 185099 - DNA, 30 bp, Artificial Sequence
  Synthetic oligonucleotide
tgcttaacgcaacctcaatggttcctcata

SEQ ID NO: 185100 - DNA, 30 bp, Artificial Sequence
  Synthetic oligonucleotide
tagtagcagaatagctacttccatctcata

SEQ ID NO: 185101 - DNA, 30 bp, Artificial Sequence
  Synthetic oligonucleotide
atgaaaatagtgtgcacgaagcgtctcata

SEQ ID NO: 185102 - DNA, 30 bp, Artificial Sequence
  Synthetic oligonucleotide
agggattgactctaaattaattaggtcata

SEQ ID NO: 185103 - DNA, 30 bp, Artificial Sequence
  Synthetic oligonucleotide
caaactgggttagcaaaaggtacggtcata

SEQ ID NO: 185104 - DNA, 30 bp, Artificial Sequence
  Synthetic oligonucleotide
tgtgttcgtggctgggctaccggggtcata

SEQ ID NO: 185105 - DNA, 30 bp, Artificial Sequence
  Synthetic oligonucleotide
agtgcaggttcctagacgtgcgctttcata

SEQ ID NO: 185106 - DNA, 30 bp, Artificial Sequence
  Synthetic oligonucleotide
gcatgaaaagaggaaagcgtacttttcata

SEQ ID NO: 185107 - DNA, 30 bp, Artificial Sequence
  Synthetic oligonucleotide
ggccgaaaccgggaaaacgtatttttcata

SEQ ID NO: 185108 - DNA, 30 bp, Artificial Sequence
  Synthetic oligonucleotide
ttgattaaaatgaagtggcgcaacaagata

SEQ ID NO: 185109 - DNA, 30 bp, Artificial Sequence
  Synthetic oligonucleotide
agcgatgagtgaaagtcacccaccaagata

SEQ ID NO: 185110 - DNA, 30 bp, Artificial Sequence
  Synthetic oligonucleotide
tgagtgtttcggatatagagattcaagata

SEQ ID NO: 185111 - DNA, 30 bp, Artificial Sequence
  Synthetic oligonucleotide
caattaactgatctcacatacgcgaagata

SEQ ID NO: 185112 - DNA, 30 bp, Artificial Sequence
  Synthetic oligonucleotide
aaactaacttacactggccacttccagata

SEQ ID NO: 185113 - DNA, 27 bp, Artificial Sequence
  Synthetic oligonucleotide
gaacttcacagtgctagccttcagata

SEQ ID NO: 185114 - DNA, 30 bp, Artificial Sequence
  Synthetic oligonucleotide
ggagcgccaccacatgatgggtttcagata

SEQ ID NO: 185115 - DNA, 30 bp, Artificial Sequence
  Synthetic oligonucleotide
ccgctacgttgaggggcagacttcgagata

SEQ ID NO: 185116 - DNA, 30 bp, Artificial Sequence
  Synthetic oligonucleotide
attcgtaacggttcccgggtggaggagata

SEQ ID NO: 185117 - DNA, 30 bp, Artificial Sequence
  Synthetic oligonucleotide
gccacaagagatagaagtctctaatagata

SEQ ID NO: 185118 - DNA, 30 bp, Artificial Sequence
  Synthetic oligonucleotide
ggtgcaattgcttccctcacgtgatagata

SEQ ID NO: 185119 - DNA, 30 bp, Artificial Sequence
  Synthetic oligonucleotide
gagcagttagtatgagattcgtactagata

SEQ ID NO: 185120 - DNA, 30 bp, Artificial Sequence
  Synthetic oligonucleotide
ttggcggatggcgagatgatttcctagata

SEQ ID NO: 185121 - DNA, 30 bp, Artificial Sequence
  Synthetic oligonucleotide
ccgtttcaggggatgtccaattgctagata

SEQ ID NO: 185122 - DNA, 30 bp, Artificial Sequence
  Synthetic oligonucleotide
gaagatggcacggatcttacccagtagata

SEQ ID NO: 185123 - DNA, 30 bp, Artificial Sequence
  Synthetic oligonucleotide
gaagggttacgttttgtggtctagtagata

SEQ ID NO: 185124 - DNA, 30 bp, Artificial Sequence
  Synthetic oligonucleotide
ggggaacaggcaatagccgtgtggtagata

SEQ ID NO: 185125 - DNA, 30 bp, Artificial Sequence
  Synthetic oligonucleotide
cccgagaagtacttggcgatggtgtagata

SEQ ID NO: 185126 - DNA, 30 bp, Artificial Sequence
  Synthetic oligonucleotide
ggcatctgcgtaatcagtgtgttgtagata

SEQ ID NO: 185127 - DNA, 30 bp, Artificial Sequence
  Synthetic oligonucleotide
atctcagccgtcacagactcgcattagata

SEQ ID NO: 185128 - DNA, 30 bp, Artificial Sequence
  Synthetic oligonucleotide
ggaggaactctggcacaaggcagaacgata

SEQ ID NO: 185129 - DNA, 30 bp, Artificial Sequence
  Synthetic oligonucleotide
gggtcgttcgcctcaaatattggcacgata

SEQ ID NO: 185130 - DNA, 30 bp, Artificial Sequence
  Synthetic oligonucleotide
gacggaacgaagggttgaaacccgacgata

SEQ ID NO: 185131 - DNA, 30 bp, Artificial Sequence
  Synthetic oligonucleotide
catctggctgatacatcggataacccgata

SEQ ID NO: 185132 - DNA, 30 bp, Artificial Sequence
  Synthetic oligonucleotide
ttcatagcgatcgtaaagaccgagccgata

SEQ ID NO: 185133 - DNA, 30 bp, Artificial Sequence
  Synthetic oligonucleotide
gctccccggactgagcccacatatccgata

SEQ ID NO: 185134 - DNA, 30 bp, Artificial Sequence
  Synthetic oligonucleotide
gcgattgagtaatcttcgagcactccgata

SEQ ID NO: 185135 - DNA, 30 bp, Artificial Sequence
  Synthetic oligonucleotide
ttatactccgggtatagatagcctccgata

SEQ ID NO: 185136 - DNA, 31 bp, Artificial Sequence
  Synthetic oligonucleotide
ttgaaggtgggacgcgtgccgccgtccgata

SEQ ID NO: 185137 - DNA, 30 bp, Artificial Sequence
  Synthetic oligonucleotide
gatggatggcccgccttgtgactagcgata

SEQ ID NO: 185138 - DNA, 30 bp, Artificial Sequence
  Synthetic oligonucleotide
acgtacacaatcaatctacgtcacgcgata

SEQ ID NO: 185139 - DNA, 30 bp, Artificial Sequence
  Synthetic oligonucleotide
gtccagagtctccatgccccactggcgata

SEQ ID NO: 185140 - DNA, 30 bp, Artificial Sequence
  Synthetic oligonucleotide
tcctgcccttgcacacgttatgaatcgata

SEQ ID NO: 185141 - DNA, 30 bp, Artificial Sequence
  Synthetic oligonucleotide
ccaggaagtcaaaatggctaattatcgata

SEQ ID NO: 185142 - DNA, 30 bp, Artificial Sequence
  Synthetic oligonucleotide
aggttgccttaactattgatggattcgata

SEQ ID NO: 185143 - DNA, 30 bp, Artificial Sequence
  Synthetic oligonucleotide
tcccccgggaaagagggtgtaacaaggata

SEQ ID NO: 185144 - DNA, 30 bp, Artificial Sequence
  Synthetic oligonucleotide
gagcgctggacagacgtgtccggcaggata

SEQ ID NO: 185145 - DNA, 30 bp, Artificial Sequence
  Synthetic oligonucleotide
gtgtagccatcgtaaaaatttaggaggata

SEQ ID NO: 185146 - DNA, 30 bp, Artificial Sequence
  Synthetic oligonucleotide
gcgtcacctgggtctggattcttgaggata

SEQ ID NO: 185147 - DNA, 30 bp, Artificial Sequence
  Synthetic oligonucleotide
taccgctccataggcgagcagttgaggata

SEQ ID NO: 185148 - DNA, 30 bp, Artificial Sequence
  Synthetic oligonucleotide
acggtgtcccagaatggtaagggacggata

SEQ ID NO: 185149 - DNA, 30 bp, Artificial Sequence
  Synthetic oligonucleotide
ctggactatagagggactcattcccggata

SEQ ID NO: 185150 - DNA, 30 bp, Artificial Sequence
  Synthetic oligonucleotide
gtacttaagctggatttcaaaatgcggata

SEQ ID NO: 185151 - DNA, 30 bp, Artificial Sequence
  Synthetic oligonucleotide
ttgcatttgcgcgggcccaggatgcggata

SEQ ID NO: 185152 - DNA, 30 bp, Artificial Sequence
  Synthetic oligonucleotide
aaacaggagaggatacctaaggctcggata

SEQ ID NO: 185153 - DNA, 30 bp, Artificial Sequence
  Synthetic oligonucleotide
gcccagagtgggcgtgcggtcaacgggata

SEQ ID NO: 185154 - DNA, 30 bp, Artificial Sequence
  Synthetic oligonucleotide
ggccgattgcgttgctcaatggccgggata

SEQ ID NO: 185155 - DNA, 30 bp, Artificial Sequence
  Synthetic oligonucleotide
tcaagtcactgctagtgccattgcgggata

SEQ ID NO: 185156 - DNA, 30 bp, Artificial Sequence
  Synthetic oligonucleotide
taatggctcgctcggccctcgaaggggata

SEQ ID NO: 185157 - DNA, 30 bp, Artificial Sequence
  Synthetic oligonucleotide
caatagggcgggacgcgaggaatggggata

SEQ ID NO: 185158 - DNA, 30 bp, Artificial Sequence
  Synthetic oligonucleotide
gatgaggcgacaagattttggttggggata

SEQ ID NO: 185159 - DNA, 30 bp, Artificial Sequence
  Synthetic oligonucleotide
gcacagaagttgaggaccgattagtggata

SEQ ID NO: 185160 - DNA, 30 bp, Artificial Sequence
  Synthetic oligonucleotide
gggccaccagttaagccaagcgggtggata

SEQ ID NO: 185161 - DNA, 30 bp, Artificial Sequence
  Synthetic oligonucleotide
tcgtagttcaatatgattactgtgtggata

SEQ ID NO: 185162 - DNA, 30 bp, Artificial Sequence
  Synthetic oligonucleotide
caagcaccggcagaactccggcgttggata

SEQ ID NO: 185163 - DNA, 30 bp, Artificial Sequence
  Synthetic oligonucleotide
atttggccaggggtactgcccccaatgata

SEQ ID NO: 185164 - DNA, 30 bp, Artificial Sequence
  Synthetic oligonucleotide
atcaaatcttcagccaaatgacccatgata

SEQ ID NO: 185165 - DNA, 30 bp, Artificial Sequence
  Synthetic oligonucleotide
gagtacctctcctggggtagtggcatgata

SEQ ID NO: 185166 - DNA, 30 bp, Artificial Sequence
  Synthetic oligonucleotide
cggcctgcaatctgacatacaaggatgata

SEQ ID NO: 185167 - DNA, 30 bp, Artificial Sequence
  Synthetic oligonucleotide
agagctcggaagtgcgcgacatggatgata

SEQ ID NO: 185168 - DNA, 30 bp, Artificial Sequence
  Synthetic oligonucleotide
gctaggtgattaagcatggcttatatgata

SEQ ID NO: 185169 - DNA, 31 bp, Artificial Sequence
  Synthetic oligonucleotide
taggagccatatttcaaccagtagcctgata

SEQ ID NO: 185170 - DNA, 30 bp, Artificial Sequence
  Synthetic oligonucleotide
gaagtatatgcaatgcccgataatctgata

SEQ ID NO: 185171 - DNA, 30 bp, Artificial Sequence
  Synthetic oligonucleotide
accagggactcgggcaaaaagggtctgata

SEQ ID NO: 185172 - DNA, 30 bp, Artificial Sequence
  Synthetic oligonucleotide
atatgacgtccggtggaccttatagtgata

SEQ ID NO: 185173 - DNA, 30 bp, Artificial Sequence
  Synthetic oligonucleotide
acaatccggtgagccagcggcctagtgata

SEQ ID NO: 185174 - DNA, 30 bp, Artificial Sequence
  Synthetic oligonucleotide
ccgagacaacattcgtcttcgttagtgata

SEQ ID NO: 185175 - DNA, 30 bp, Artificial Sequence
  Synthetic oligonucleotide
aaaaggatttgtgattgagtgggcgtgata

SEQ ID NO: 185176 - DNA, 30 bp, Artificial Sequence
  Synthetic oligonucleotide
atgggcctcgcgagcaatactgaggtgata

SEQ ID NO: 185177 - DNA, 30 bp, Artificial Sequence
  Synthetic oligonucleotide
tacgattcagcgcttaatctatcggtgata

SEQ ID NO: 185178 - DNA, 30 bp, Artificial Sequence
  Synthetic oligonucleotide
aatggtcaagaggggatacgtggggtgata

SEQ ID NO: 185179 - DNA, 30 bp, Artificial Sequence
  Synthetic oligonucleotide
tgattgtccgacgttattccggtggtgata

SEQ ID NO: 185180 - DNA, 30 bp, Artificial Sequence
  Synthetic oligonucleotide
taaaaaccgggaaaaaatggttcattgata

SEQ ID NO: 185181 - DNA, 30 bp, Artificial Sequence
  Synthetic oligonucleotide
aggtaagtagcaacgtgacggcgcttgata

SEQ ID NO: 185182 - DNA, 30 bp, Artificial Sequence
  Synthetic oligonucleotide
cctccgaaggcgaagcttaatcggttgata

SEQ ID NO: 185183 - DNA, 30 bp, Artificial Sequence
  Synthetic oligonucleotide
cgggggatagacaaacctcaggggttgata

SEQ ID NO: 185184 - DNA, 30 bp, Artificial Sequence
  Synthetic oligonucleotide
gtctcattagctggtacaaactggttgata

SEQ ID NO: 185185 - DNA, 30 bp, Artificial Sequence
  Synthetic oligonucleotide
cgagctggttcgcaagatcggggtttgata

SEQ ID NO: 185186 - DNA, 30 bp, Artificial Sequence
  Synthetic oligonucleotide
cgcgtatgtaggacaaccataataaatata

SEQ ID NO: 185187 - DNA, 30 bp, Artificial Sequence
  Synthetic oligonucleotide
gctgcataggccaggggttctaacaatata

SEQ ID NO: 185188 - DNA, 30 bp, Artificial Sequence
  Synthetic oligonucleotide
acggccagtagcacactgggtaggaatata

SEQ ID NO: 185189 - DNA, 30 bp, Artificial Sequence
  Synthetic oligonucleotide
gcaacaacatattcaggaagttggaatata

SEQ ID NO: 185190 - DNA, 30 bp, Artificial Sequence
  Synthetic oligonucleotide
aacattacgagtaaccacttatctcatata

SEQ ID NO: 185191 - DNA, 30 bp, Artificial Sequence
  Synthetic oligonucleotide
tggcgtgtagcccacctgacacttcatata

SEQ ID NO: 185192 - DNA, 30 bp, Artificial Sequence
  Synthetic oligonucleotide
ttacgctgttaacaaaggccagacgatata

SEQ ID NO: 185193 - DNA, 30 bp, Artificial Sequence
  Synthetic oligonucleotide
ggtcatagcaaggtaccgcatcaggatata

SEQ ID NO: 185194 - DNA, 30 bp, Artificial Sequence
  Synthetic oligonucleotide
ctgggaagtatcggagtcacggaggatata

SEQ ID NO: 185195 - DNA, 30 bp, Artificial Sequence
  Synthetic oligonucleotide
aacagaaatgggctttaggttcgggatata

SEQ ID NO: 185196 - DNA, 30 bp, Artificial Sequence
  Synthetic oligonucleotide
aggcgtgcgggaagggagcgtaatgatata

SEQ ID NO: 185197 - DNA, 30 bp, Artificial Sequence
  Synthetic oligonucleotide
agacagggcggcggatgaatatatgatata

SEQ ID NO: 185198 - DNA, 30 bp, Artificial Sequence
  Synthetic oligonucleotide
gtgcaccgcgtttaccgatcaaaatatata

SEQ ID NO: 185199 - DNA, 30 bp, Artificial Sequence
  Synthetic oligonucleotide
gttgactgcttcacataatggcagtatata

SEQ ID NO: 185200 - DNA, 30 bp, Artificial Sequence
  Synthetic oligonucleotide
acgacgcaactgcgagaccccgcttatata

SEQ ID NO: 185201 - DNA, 30 bp, Artificial Sequence
  Synthetic oligonucleotide
gaagggaacgccgggatatcaatttatata

SEQ ID NO: 185202 - DNA, 30 bp, Artificial Sequence
  Synthetic oligonucleotide
tgagagttttcatggcaattcgaaactata

SEQ ID NO: 185203 - DNA, 30 bp, Artificial Sequence
  Synthetic oligonucleotide
gcgcggtgccaaaagaagccgctcactata

SEQ ID NO: 185204 - DNA, 30 bp, Artificial Sequence
  Synthetic oligonucleotide
atcaatgttatgattgacatgccgactata

SEQ ID NO: 185205 - DNA, 30 bp, Artificial Sequence
  Synthetic oligonucleotide
catcagggatttcgtccatagtatactata

SEQ ID NO: 185206 - DNA, 30 bp, Artificial Sequence
  Synthetic oligonucleotide
caaggggtgtctctgtaactgtaccctata

SEQ ID NO: 185207 - DNA, 30 bp, Artificial Sequence
  Synthetic oligonucleotide
atggtcgttgaaggctacggcatccctata

SEQ ID NO: 185208 - DNA, 30 bp, Artificial Sequence
  Synthetic oligonucleotide
agatgaccagtgcaccctacctagcctata

SEQ ID NO: 185209 - DNA, 30 bp, Artificial Sequence
  Synthetic oligonucleotide
acgcatccgagagccgctagtatgcctata

SEQ ID NO: 185210 - DNA, 30 bp, Artificial Sequence
  Synthetic oligonucleotide
agacggcaagcttgtctcagccgagctata

SEQ ID NO: 185211 - DNA, 30 bp, Artificial Sequence
  Synthetic oligonucleotide
aatacggaacattaacttatagtagctata

SEQ ID NO: 185212 - DNA, 30 bp, Artificial Sequence
  Synthetic oligonucleotide
accggaaagacgggagggctctgcgctata

SEQ ID NO: 185213 - DNA, 30 bp, Artificial Sequence
  Synthetic oligonucleotide
atcacaacccgaataaatcattatgctata

SEQ ID NO: 185214 - DNA, 30 bp, Artificial Sequence
  Synthetic oligonucleotide
cacaagaggaagtggttcatatcgtctata

SEQ ID NO: 185215 - DNA, 30 bp, Artificial Sequence
  Synthetic oligonucleotide
catgggagcaaaacccgagtagggtctata

SEQ ID NO: 185216 - DNA, 30 bp, Artificial Sequence
  Synthetic oligonucleotide
acaccatacacccggtttcggtccagtata

SEQ ID NO: 185217 - DNA, 30 bp, Artificial Sequence
  Synthetic oligonucleotide
gatccgcattaatagagccgctaacgtata

SEQ ID NO: 185218 - DNA, 30 bp, Artificial Sequence
  Synthetic oligonucleotide
tgcattaacaaggtgctagcgtaccgtata

SEQ ID NO: 185219 - DNA, 30 bp, Artificial Sequence
  Synthetic oligonucleotide
ctgatactgtaccaaccttcgcggcgtata

SEQ ID NO: 185220 - DNA, 30 bp, Artificial Sequence
  Synthetic oligonucleotide
ttcggcgcggattgctaatcgctaggtata

SEQ ID NO: 185221 - DNA, 30 bp, Artificial Sequence
  Synthetic oligonucleotide
atgggggcttagcatgcaacatagggtata

SEQ ID NO: 185222 - DNA, 30 bp, Artificial Sequence
  Synthetic oligonucleotide
tgttgcaacagtgtcagcataccgggtata

SEQ ID NO: 185223 - DNA, 30 bp, Artificial Sequence
  Synthetic oligonucleotide
ctcacgtttaggaactcccttgggggtata

SEQ ID NO: 185224 - DNA, 30 bp, Artificial Sequence
  Synthetic oligonucleotide
gagaaggtgataatatcgaatggtggtata

SEQ ID NO: 185225 - DNA, 30 bp, Artificial Sequence
  Synthetic oligonucleotide
ggtgtcgttacaaacggcaagtttggtata

SEQ ID NO: 185226 - DNA, 31 bp, Artificial Sequence
  Synthetic oligonucleotide
accctgagagtaacccatacagtactgtata

SEQ ID NO: 185227 - DNA, 30 bp, Artificial Sequence
  Synthetic oligonucleotide
ggaccaaattccgcaggcggaacgattata

SEQ ID NO: 185228 - DNA, 30 bp, Artificial Sequence
  Synthetic oligonucleotide
tactgcggccgctagataccaaagcttata

SEQ ID NO: 185229 - DNA, 30 bp, Artificial Sequence
  Synthetic oligonucleotide
atggagcgacgatgggggaataggcttata

SEQ ID NO: 185230 - DNA, 30 bp, Artificial Sequence
  Synthetic oligonucleotide
agtatcggcgcagtgcagtgtaaagttata

SEQ ID NO: 185231 - DNA, 30 bp, Artificial Sequence
  Synthetic oligonucleotide
acttgtgggcagctttcgttaacagttata

SEQ ID NO: 185232 - DNA, 30 bp, Artificial Sequence
  Synthetic oligonucleotide
agaggggattgtcagtggtaaaacgttata

SEQ ID NO: 185233 - DNA, 30 bp, Artificial Sequence
  Synthetic oligonucleotide
cacagactagcgccgtctgtgaccgttata

SEQ ID NO: 185234 - DNA, 30 bp, Artificial Sequence
  Synthetic oligonucleotide
gaagagtattatatagagaacgttgttata

SEQ ID NO: 185235 - DNA, 30 bp, Artificial Sequence
  Synthetic oligonucleotide
ctccgcgtgatcacagataagacatttata

SEQ ID NO: 185236 - DNA, 30 bp, Artificial Sequence
  Synthetic oligonucleotide
gagactgtagaacgaacggctaactttata

SEQ ID NO: 185237 - DNA, 30 bp, Artificial Sequence
  Synthetic oligonucleotide
aaagcatgctagaggatgcggaggtttata

SEQ ID NO: 185238 - DNA, 30 bp, Artificial Sequence
  Synthetic oligonucleotide
tgccaatattgggtgctttatgccaaacta

SEQ ID NO: 185239 - DNA, 30 bp, Artificial Sequence
  Synthetic oligonucleotide
tgtaatactactaaagcaacgggcaaacta

SEQ ID NO: 185240 - DNA, 30 bp, Artificial Sequence
  Synthetic oligonucleotide
caaatgtgagcggttttggggtgtaaacta

SEQ ID NO: 185241 - DNA, 30 bp, Artificial Sequence
  Synthetic oligonucleotide
cgctctcatgtccctgagctcaaacaacta

SEQ ID NO: 185242 - DNA, 30 bp, Artificial Sequence
  Synthetic oligonucleotide
agctgattactgaaccgaataacacaacta

SEQ ID NO: 185243 - DNA, 30 bp, Artificial Sequence
  Synthetic oligonucleotide
agaccgtcctccctagctcgtgatcaacta

SEQ ID NO: 185244 - DNA, 30 bp, Artificial Sequence
  Synthetic oligonucleotide
tgaggccctgaagaaccggtccgggaacta

SEQ ID NO: 185245 - DNA, 30 bp, Artificial Sequence
  Synthetic oligonucleotide
acaggtacaagggtggggtctggtgaacta

SEQ ID NO: 185246 - DNA, 30 bp, Artificial Sequence
  Synthetic oligonucleotide
tgcaagtacacggaccaaattgcataacta

SEQ ID NO: 185247 - DNA, 30 bp, Artificial Sequence
  Synthetic oligonucleotide
gacgaaaagacgacctgaatttactaacta

SEQ ID NO: 185248 - DNA, 30 bp, Artificial Sequence
  Synthetic oligonucleotide
tgctggcttatgtttcacgggtcttaacta

SEQ ID NO: 185249 - DNA, 30 bp, Artificial Sequence
  Synthetic oligonucleotide
gaggtttcactctcggttgactacacacta

SEQ ID NO: 185250 - DNA, 30 bp, Artificial Sequence
  Synthetic oligonucleotide
tcatatctcaggtttccaaaaagcacacta

SEQ ID NO: 185251 - DNA, 30 bp, Artificial Sequence
  Synthetic oligonucleotide
ctgcgcacggttggtagcgcgagcacacta

SEQ ID NO: 185252 - DNA, 30 bp, Artificial Sequence
  Synthetic oligonucleotide
cagcgatatagaatgttgagacctacacta

SEQ ID NO: 185253 - DNA, 30 bp, Artificial Sequence
  Synthetic oligonucleotide
tcgtggatctcttctgctcatggtacacta

SEQ ID NO: 185254 - DNA, 30 bp, Artificial Sequence
  Synthetic oligonucleotide
tactctgctgttgcgtgaacataaccacta

SEQ ID NO: 185255 - DNA, 30 bp, Artificial Sequence
  Synthetic oligonucleotide
cgaccacgctgtgcccaccctcgcccacta

SEQ ID NO: 185256 - DNA, 30 bp, Artificial Sequence
  Synthetic oligonucleotide
tctcataggcattatacggtcttgccacta

SEQ ID NO: 185257 - DNA, 30 bp, Artificial Sequence
  Synthetic oligonucleotide
cgaaaacttatattgtgcgttaatccacta

SEQ ID NO: 185258 - DNA, 30 bp, Artificial Sequence
  Synthetic oligonucleotide
agatatgtttatatggggcgcttagcacta

SEQ ID NO: 185259 - DNA, 30 bp, Artificial Sequence
  Synthetic oligonucleotide
tatggtaataagagtgaccttatcgcacta

SEQ ID NO: 185260 - DNA, 30 bp, Artificial Sequence
  Synthetic oligonucleotide
acgtgtcggtattaggcaggaggggcacta

SEQ ID NO: 185261 - DNA, 30 bp, Artificial Sequence
  Synthetic oligonucleotide
acgcttacgctggaaatccaggatgcacta

SEQ ID NO: 185262 - DNA, 30 bp, Artificial Sequence
  Synthetic oligonucleotide
tcttacgggaccggtacgatcccctcacta

SEQ ID NO: 185263 - DNA, 30 bp, Artificial Sequence
  Synthetic oligonucleotide
taaagctcgcaagtgacgatgcgctcacta

SEQ ID NO: 185264 - DNA, 30 bp, Artificial Sequence
  Synthetic oligonucleotide
tggaccggggtctatattagcggctcacta

SEQ ID NO: 185265 - DNA, 30 bp, Artificial Sequence
  Synthetic oligonucleotide
atacagccgcgaaatctatcccaaagacta

SEQ ID NO: 185266 - DNA, 30 bp, Artificial Sequence
  Synthetic oligonucleotide
gagcgagctaaataggtgtgctgaagacta

SEQ ID NO: 185267 - DNA, 30 bp, Artificial Sequence
  Synthetic oligonucleotide
gacgttaatccgaggactgggtgaagacta

SEQ ID NO: 185268 - DNA, 30 bp, Artificial Sequence
  Synthetic oligonucleotide
ggttagtaggaaagcagctttaacagacta

SEQ ID NO: 185269 - DNA, 30 bp, Artificial Sequence
  Synthetic oligonucleotide
cctcagtcagcagcgcgtgaactcagacta

SEQ ID NO: 185270 - DNA, 30 bp, Artificial Sequence
  Synthetic oligonucleotide
tacaacaggacacagtctagatagagacta

SEQ ID NO: 185271 - DNA, 30 bp, Artificial Sequence
  Synthetic oligonucleotide
ccgtgcactctaggtgggtctcggagacta

SEQ ID NO: 185272 - DNA, 30 bp, Artificial Sequence
  Synthetic oligonucleotide
aggaatgccggatcaacggctgtgagacta

SEQ ID NO: 185273 - DNA, 30 bp, Artificial Sequence
  Synthetic oligonucleotide
gcacctctttatgttaatgaacctagacta

SEQ ID NO: 185274 - DNA, 30 bp, Artificial Sequence
  Synthetic oligonucleotide
tcaagacctgtgatgggcctattacgacta

SEQ ID NO: 185275 - DNA, 30 bp, Artificial Sequence
  Synthetic oligonucleotide
tggtaccagtctaagcatcgcgaccgacta

SEQ ID NO: 185276 - DNA, 30 bp, Artificial Sequence
  Synthetic oligonucleotide
actttgcgccacacctcaacgtgccgacta

SEQ ID NO: 185277 - DNA, 30 bp, Artificial Sequence
  Synthetic oligonucleotide
agcggtttctcgcatcgataggtcggacta

SEQ ID NO: 185278 - DNA, 30 bp, Artificial Sequence
  Synthetic oligonucleotide
tgaatctataccggggtagaaacgggacta

SEQ ID NO: 185279 - DNA, 30 bp, Artificial Sequence
  Synthetic oligonucleotide
agcgaatagctttactgaggtgctggacta

SEQ ID NO: 185280 - DNA, 30 bp, Artificial Sequence
  Synthetic oligonucleotide
ataatcgggaccgcccaacacctatgacta

SEQ ID NO: 185281 - DNA, 30 bp, Artificial Sequence
  Synthetic oligonucleotide
tataccgggcaaacaactgtacgctgacta

SEQ ID NO: 185282 - DNA, 30 bp, Artificial Sequence
  Synthetic oligonucleotide
tgtagcggacatattcccacagagtgacta

SEQ ID NO: 185283 - DNA, 30 bp, Artificial Sequence
  Synthetic oligonucleotide
ctggcgggcgggacaactcctccttgacta

SEQ ID NO: 185284 - DNA, 30 bp, Artificial Sequence
  Synthetic oligonucleotide
ctggaataatgtagtggaacactaatacta

SEQ ID NO: 185285 - DNA, 30 bp, Artificial Sequence
  Synthetic oligonucleotide
tacaacattggtttcagtacccacatacta

SEQ ID NO: 185286 - DNA, 30 bp, Artificial Sequence
  Synthetic oligonucleotide
tagggccgatactccgccggggacatacta

SEQ ID NO: 185287 - DNA, 31 bp, Artificial Sequence
  Synthetic oligonucleotide
ctcgccctggctgcaaagccaccccatacta

SEQ ID NO: 185288 - DNA, 30 bp, Artificial Sequence
  Synthetic oligonucleotide
aacattaaatgcaaccagggttatatacta

SEQ ID NO: 185289 - DNA, 30 bp, Artificial Sequence
  Synthetic oligonucleotide
taactggcattggtatataaccgtatacta

SEQ ID NO: 185290 - DNA, 30 bp, Artificial Sequence
  Synthetic oligonucleotide
ggactgccctgtcgatggcgattactacta

SEQ ID NO: 185291 - DNA, 30 bp, Artificial Sequence
  Synthetic oligonucleotide
tcgtgcagattgcctggtgtgttgctacta

SEQ ID NO: 185292 - DNA, 30 bp, Artificial Sequence
  Synthetic oligonucleotide
tccatagtgcgcgcgtagtctaatctacta

SEQ ID NO: 185293 - DNA, 30 bp, Artificial Sequence
  Synthetic oligonucleotide
cataaatagactcaaattgtcgatctacta

SEQ ID NO: 185294 - DNA, 30 bp, Artificial Sequence
  Synthetic oligonucleotide
atcagtcattagaggatagtcaaagtacta

SEQ ID NO: 185295 - DNA, 30 bp, Artificial Sequence
  Synthetic oligonucleotide
ccgggtacacgcaaaggggcaggcgtacta

SEQ ID NO: 185296 - DNA, 30 bp, Artificial Sequence
  Synthetic oligonucleotide
atccgctcgagaacgagccggcaggtacta

SEQ ID NO: 185297 - DNA, 30 bp, Artificial Sequence
  Synthetic oligonucleotide
gggtcgtgcattatccccagggctgtacta

SEQ ID NO: 185298 - DNA, 30 bp, Artificial Sequence
  Synthetic oligonucleotide
tctgatggtacatgtccaagtggattacta

SEQ ID NO: 185299 - DNA, 30 bp, Artificial Sequence
  Synthetic oligonucleotide
gctatgaaagtggaggggcatgtattacta

SEQ ID NO: 185300 - DNA, 30 bp, Artificial Sequence
  Synthetic oligonucleotide
ccttacatgggccgccgcgagacgttacta

SEQ ID NO: 185301 - DNA, 30 bp, Artificial Sequence
  Synthetic oligonucleotide
cctaacgtcacggggacatgggttttacta

SEQ ID NO: 185302 - DNA, 30 bp, Artificial Sequence
  Synthetic oligonucleotide
gaaacgcaccagtgatcgacaggaaaccta

SEQ ID NO: 185303 - DNA, 30 bp, Artificial Sequence
  Synthetic oligonucleotide
tgagagtgcctaagtaattctataaaccta

SEQ ID NO: 185304 - DNA, 30 bp, Artificial Sequence
  Synthetic oligonucleotide
cactgggttcacgaatgtgcccgcaaccta

SEQ ID NO: 185305 - DNA, 30 bp, Artificial Sequence
  Synthetic oligonucleotide
acatgtcagctccgatagttgtgcaaccta

SEQ ID NO: 185306 - DNA, 30 bp, Artificial Sequence
  Synthetic oligonucleotide
agataatgcaccgtatctttggagaaccta

SEQ ID NO: 185307 - DNA, 30 bp, Artificial Sequence
  Synthetic oligonucleotide
gcactactaggtaccaaataaggtaaccta

SEQ ID NO: 185308 - DNA, 30 bp, Artificial Sequence
  Synthetic oligonucleotide
aacgagtatgaattatgccagaaacaccta

SEQ ID NO: 185309 - DNA, 30 bp, Artificial Sequence
  Synthetic oligonucleotide
cctggggggaagtgtatcttggaacaccta

SEQ ID NO: 185310 - DNA, 30 bp, Artificial Sequence
  Synthetic oligonucleotide
acggtgcaatacagtgacgacaggcaccta

SEQ ID NO: 185311 - DNA, 30 bp, Artificial Sequence
  Synthetic oligonucleotide
caaatggggcggggcttctggggtcaccta

SEQ ID NO: 185312 - DNA, 30 bp, Artificial Sequence
  Synthetic oligonucleotide
aataacagcggttaagttggaagcgaccta

SEQ ID NO: 185313 - DNA, 30 bp, Artificial Sequence
  Synthetic oligonucleotide
agatggtaaagttagatcatgttcgaccta

SEQ ID NO: 185314 - DNA, 30 bp, Artificial Sequence
  Synthetic oligonucleotide
atttgggctcgtagactatcatgggaccta

SEQ ID NO: 185315 - DNA, 30 bp, Artificial Sequence
  Synthetic oligonucleotide
gctcaacgtgcccgccaatttctggaccta

SEQ ID NO: 185316 - DNA, 30 bp, Artificial Sequence
  Synthetic oligonucleotide
agatcatgcacccgggtgatatttgaccta

SEQ ID NO: 185317 - DNA, 30 bp, Artificial Sequence
  Synthetic oligonucleotide
cgggtatcgcaacgcatatttccaacccta

SEQ ID NO: 185318 - DNA, 30 bp, Artificial Sequence
  Synthetic oligonucleotide
ctcgtgtgacgtaggattaataacacccta

SEQ ID NO: 185319 - DNA, 30 bp, Artificial Sequence
  Synthetic oligonucleotide
gaccgtggacgatacgaagcgcagacccta

SEQ ID NO: 185320 - DNA, 30 bp, Artificial Sequence
  Synthetic oligonucleotide
ggggagagatataacgggtggacgacccta

SEQ ID NO: 185321 - DNA, 30 bp, Artificial Sequence
  Synthetic oligonucleotide
gtgtgtcttgatccattgaactggacccta

SEQ ID NO: 185322 - DNA, 30 bp, Artificial Sequence
  Synthetic oligonucleotide
cggcctggctagcaaccttggtcgccccta

SEQ ID NO: 185323 - DNA, 30 bp, Artificial Sequence
  Synthetic oligonucleotide
ggaaccagaattgagtgttgtaggccccta

SEQ ID NO: 185324 - DNA, 30 bp, Artificial Sequence
  Synthetic oligonucleotide
tgtgccgagactttactatattctccccta

SEQ ID NO: 185325 - DNA, 30 bp, Artificial Sequence
  Synthetic oligonucleotide
agactttgattccggctcaattccagccta

SEQ ID NO: 185326 - DNA, 30 bp, Artificial Sequence
  Synthetic oligonucleotide
acggctgctgtattctcttgagcgagccta

SEQ ID NO: 185327 - DNA, 30 bp, Artificial Sequence
  Synthetic oligonucleotide
gcaagcacgatctatacatcagtacgccta

SEQ ID NO: 185328 - DNA, 30 bp, Artificial Sequence
  Synthetic oligonucleotide
tcctgatactgggcccccaagaccggccta

SEQ ID NO: 185329 - DNA, 30 bp, Artificial Sequence
  Synthetic oligonucleotide
ctgagtatatgttatcaaaataagggccta

SEQ ID NO: 185330 - DNA, 30 bp, Artificial Sequence
  Synthetic oligonucleotide
acgaatcatttctgggatattggttgccta

SEQ ID NO: 185331 - DNA, 29 bp, Artificial Sequence
  Synthetic oligonucleotide
cgttgtctggacgtattaaatgttgccta

SEQ ID NO: 185332 - DNA, 30 bp, Artificial Sequence
  Synthetic oligonucleotide
gcctcaagtggcctttctcaacaaatccta

SEQ ID NO: 185333 - DNA, 30 bp, Artificial Sequence
  Synthetic oligonucleotide
ctagcagattattctggtgcacgactccta

SEQ ID NO: 185334 - DNA, 30 bp, Artificial Sequence
  Synthetic oligonucleotide
cgcatgttcaagactatgaaaggactccta

SEQ ID NO: 185335 - DNA, 30 bp, Artificial Sequence
  Synthetic oligonucleotide
gaagcaaggttgtctcagttttcgctccta

SEQ ID NO: 185336 - DNA, 30 bp, Artificial Sequence
  Synthetic oligonucleotide
tcatgttatcgctatatttcagatctccta

SEQ ID NO: 185337 - DNA, 30 bp, Artificial Sequence
  Synthetic oligonucleotide
tacgagtcgggtcctccatagcttctccta

SEQ ID NO: 185338 - DNA, 30 bp, Artificial Sequence
  Synthetic oligonucleotide
gcaaggagcagagatcttctggcggtccta

SEQ ID NO: 185339 - DNA, 30 bp, Artificial Sequence
  Synthetic oligonucleotide
aacataatcacacggtcggcctctgtccta

SEQ ID NO: 185340 - DNA, 30 bp, Artificial Sequence
  Synthetic oligonucleotide
gtactaagcgtacggaagctggttgtccta

SEQ ID NO: 185341 - DNA, 30 bp, Artificial Sequence
  Synthetic oligonucleotide
tatgggaatgggctggtcgaagcgttccta

SEQ ID NO: 185342 - DNA, 30 bp, Artificial Sequence
  Synthetic oligonucleotide
ctgctctcgtcgagttcaagtagaaagcta

SEQ ID NO: 185343 - DNA, 30 bp, Artificial Sequence
  Synthetic oligonucleotide
gtaaaaggtgttggtaagctatccaagcta

SEQ ID NO: 185344 - DNA, 30 bp, Artificial Sequence
  Synthetic oligonucleotide
tacctacccgctcgtgaggcgagcaagcta

SEQ ID NO: 185345 - DNA, 30 bp, Artificial Sequence
  Synthetic oligonucleotide
aagacctttacgaaatatcctgcgaagcta

SEQ ID NO: 185346 - DNA, 30 bp, Artificial Sequence
  Synthetic oligonucleotide
ctaaagtgtggttggttcatcatacagcta

SEQ ID NO: 185347 - DNA, 30 bp, Artificial Sequence
  Synthetic oligonucleotide
tacaacgagttagctgaataaaggcagcta

SEQ ID NO: 185348 - DNA, 30 bp, Artificial Sequence
  Synthetic oligonucleotide
gattatccatcaaggcaggaaattcagcta

SEQ ID NO: 185349 - DNA, 30 bp, Artificial Sequence
  Synthetic oligonucleotide
agggcgtggatgcctctccatggagagcta

SEQ ID NO: 185350 - DNA, 30 bp, Artificial Sequence
  Synthetic oligonucleotide
tattagtcactgaacatgcgacaggagcta

SEQ ID NO: 185351 - DNA, 30 bp, Artificial Sequence
  Synthetic oligonucleotide
gacggctgtcactattgccaaggggagcta

SEQ ID NO: 185352 - DNA, 30 bp, Artificial Sequence
  Synthetic oligonucleotide
tgtgcgcaccttcaatttaccggggagcta

SEQ ID NO: 185353 - DNA, 30 bp, Artificial Sequence
  Synthetic oligonucleotide
tgagtaacgagtacgcacgccatggagcta

SEQ ID NO: 185354 - DNA, 30 bp, Artificial Sequence
  Synthetic oligonucleotide
taaatgcgatgcacggcttaattggagcta

SEQ ID NO: 185355 - DNA, 30 bp, Artificial Sequence
  Synthetic oligonucleotide
ataaaggggaagaggctgttcgaatagcta

SEQ ID NO: 185356 - DNA, 30 bp, Artificial Sequence
  Synthetic oligonucleotide
gacgagtaaaactagtggacgccctagcta

SEQ ID NO: 185357 - DNA, 30 bp, Artificial Sequence
  Synthetic oligonucleotide
atgaagccgcccaggcttccattctagcta

SEQ ID NO: 185358 - DNA, 30 bp, Artificial Sequence
  Synthetic oligonucleotide
tctcgaatgtcaacgcttggacattagcta

SEQ ID NO: 185359 - DNA, 30 bp, Artificial Sequence
  Synthetic oligonucleotide
caacaatcaattgtttgaatggtttagcta

SEQ ID NO: 185360 - DNA, 30 bp, Artificial Sequence
  Synthetic oligonucleotide
caacataagtggggggtcaacttcacgcta

SEQ ID NO: 185361 - DNA, 30 bp, Artificial Sequence
  Synthetic oligonucleotide
cgctagattggtctacaagttttcacgcta

SEQ ID NO: 185362 - DNA, 30 bp, Artificial Sequence
  Synthetic oligonucleotide
tggtaaaaatggatgccagacctaccgcta

SEQ ID NO: 185363 - DNA, 31 bp, Artificial Sequence
  Synthetic oligonucleotide
ggttataatatcgcctgagaatctcccgcta

SEQ ID NO: 185364 - DNA, 30 bp, Artificial Sequence
  Synthetic oligonucleotide
acttcactatcatggtgtaaagtcccgcta

SEQ ID NO: 185365 - DNA, 30 bp, Artificial Sequence
  Synthetic oligonucleotide
tgcactactgtaccagtaagtagcgcgcta

SEQ ID NO: 185366 - DNA, 30 bp, Artificial Sequence
  Synthetic oligonucleotide
tcaggcgtgtattcgatagaacgcgcgcta

SEQ ID NO: 185367 - DNA, 30 bp, Artificial Sequence
  Synthetic oligonucleotide
gttaatcggaactatgtgtaaggatcgcta

SEQ ID NO: 185368 - DNA, 30 bp, Artificial Sequence
  Synthetic oligonucleotide
agtctaataattgaagcaatgggatcgcta

SEQ ID NO: 185369 - DNA, 30 bp, Artificial Sequence
  Synthetic oligonucleotide
agtcagcgagtaagtgtctttagttcgcta

SEQ ID NO: 185370 - DNA, 30 bp, Artificial Sequence
  Synthetic oligonucleotide
gcgcaatccactcctaacattgaaaggcta

SEQ ID NO: 185371 - DNA, 30 bp, Artificial Sequence
  Synthetic oligonucleotide
atctggaggacagaaaacaaatgcaggcta

SEQ ID NO: 185372 - DNA, 30 bp, Artificial Sequence
  Synthetic oligonucleotide
ggcatggacgtacctctctagtataggcta

SEQ ID NO: 185373 - DNA, 30 bp, Artificial Sequence
  Synthetic oligonucleotide
gatatcgaggctaacagtgcaagtaggcta

SEQ ID NO: 185374 - DNA, 30 bp, Artificial Sequence
  Synthetic oligonucleotide
gcagtggatctcatgtaacagtgtaggcta

SEQ ID NO: 185375 - DNA, 30 bp, Artificial Sequence
  Synthetic oligonucleotide
ataaaaactaatgtccgctggctggggcta

SEQ ID NO: 185376 - DNA, 30 bp, Artificial Sequence
  Synthetic oligonucleotide
gtaaagcgtatgtgctcttcgagaatgcta

SEQ ID NO: 185377 - DNA, 30 bp, Artificial Sequence
  Synthetic oligonucleotide
catagcggtagtgggaacttgtccatgcta

SEQ ID NO: 185378 - DNA, 30 bp, Artificial Sequence
  Synthetic oligonucleotide
aggctggcataacacggacacagcatgcta

SEQ ID NO: 185379 - DNA, 30 bp, Artificial Sequence
  Synthetic oligonucleotide
gggagccaattgcagatcaaaatcatgcta

SEQ ID NO: 185380 - DNA, 30 bp, Artificial Sequence
  Synthetic oligonucleotide
attacaacgggctcggaaggtcttatgcta

SEQ ID NO: 185381 - DNA, 30 bp, Artificial Sequence
  Synthetic oligonucleotide
tgtaccctgaggattggagatatactgcta

SEQ ID NO: 185382 - DNA, 30 bp, Artificial Sequence
  Synthetic oligonucleotide
gtaccggccgcgggcggtaaccgagtgcta

SEQ ID NO: 185383 - DNA, 30 bp, Artificial Sequence
  Synthetic oligonucleotide
gtgagcggcgcagacaaacaactagtgcta

SEQ ID NO: 185384 - DNA, 30 bp, Artificial Sequence
  Synthetic oligonucleotide
taaccgctcgacaagtactgtcctttgcta

SEQ ID NO: 185385 - DNA, 30 bp, Artificial Sequence
  Synthetic oligonucleotide
gggtacatcttccggagaaatcgtttgcta

SEQ ID NO: 185386 - DNA, 30 bp, Artificial Sequence
  Synthetic oligonucleotide
aatgtggtcagagcacagtggggtttgcta

SEQ ID NO: 185387 - DNA, 30 bp, Artificial Sequence
  Synthetic oligonucleotide
gcgtggggtgtaacaacttctgtgaatcta

SEQ ID NO: 185388 - DNA, 30 bp, Artificial Sequence
  Synthetic oligonucleotide
taatcatacggtagaccatggggtaatcta

SEQ ID NO: 185389 - DNA, 30 bp, Artificial Sequence
  Synthetic oligonucleotide
caagcggaaggtccatgaagaaagcatcta

SEQ ID NO: 185390 - DNA, 30 bp, Artificial Sequence
  Synthetic oligonucleotide
cagatagtgagaaatccaagcaggcatcta

SEQ ID NO: 185391 - DNA, 30 bp, Artificial Sequence
  Synthetic oligonucleotide
taagggattaccgattggataagagatcta

SEQ ID NO: 185392 - DNA, 30 bp, Artificial Sequence
  Synthetic oligonucleotide
tggactgtaggacgaacatctgaggatcta

SEQ ID NO: 185393 - DNA, 30 bp, Artificial Sequence
  Synthetic oligonucleotide
agttttgctcctattcggccgacggatcta

SEQ ID NO: 185394 - DNA, 30 bp, Artificial Sequence
  Synthetic oligonucleotide
gattactggatagaacccatgccggatcta

SEQ ID NO: 185395 - DNA, 30 bp, Artificial Sequence
  Synthetic oligonucleotide
gggatggagtcacgtggtgggatgtatcta

SEQ ID NO: 185396 - DNA, 30 bp, Artificial Sequence
  Synthetic oligonucleotide
ggcggtgaaatcctagacatgtaaactcta

SEQ ID NO: 185397 - DNA, 30 bp, Artificial Sequence
  Synthetic oligonucleotide
ggcgatgtcgaaggcaagagtctaactcta

SEQ ID NO: 185398 - DNA, 30 bp, Artificial Sequence
  Synthetic oligonucleotide
acggcgaagtctagtaacgctgacactcta

SEQ ID NO: 185399 - DNA, 30 bp, Artificial Sequence
  Synthetic oligonucleotide
gcatagcagcacaaacgcatacgcactcta

SEQ ID NO: 185400 - DNA, 30 bp, Artificial Sequence
  Synthetic oligonucleotide
aacgcgtaaacggtatgcaagtaagctcta

SEQ ID NO: 185401 - DNA, 30 bp, Artificial Sequence
  Synthetic oligonucleotide
ctcgaaagcagaacatgtctccgagctcta

SEQ ID NO: 185402 - DNA, 30 bp, Artificial Sequence
  Synthetic oligonucleotide
aaagtaatgtacccatcacttcgagctcta

SEQ ID NO: 185403 - DNA, 30 bp, Artificial Sequence
  Synthetic oligonucleotide
gcggaatccatccccgcactattggctcta

SEQ ID NO: 185404 - DNA, 30 bp, Artificial Sequence
  Synthetic oligonucleotide
agagccttaccgtaacatgagcatgctcta

SEQ ID NO: 185405 - DNA, 30 bp, Artificial Sequence
  Synthetic oligonucleotide
taggctggtctcgcgacgatggatgctcta

SEQ ID NO: 185406 - DNA, 30 bp, Artificial Sequence
  Synthetic oligonucleotide
ttacagcgcctcgtttttcaatgtgctcta

SEQ ID NO: 185407 - DNA, 30 bp, Artificial Sequence
  Synthetic oligonucleotide
actgcttagcccgaaactttatgatctcta

SEQ ID NO: 185408 - DNA, 30 bp, Artificial Sequence
  Synthetic oligonucleotide
tcgagctgatacatcgagcagaaaagtcta

SEQ ID NO: 185409 - DNA, 30 bp, Artificial Sequence
  Synthetic oligonucleotide
aatcttcgtgaatagaaggggacaagtcta

SEQ ID NO: 185410 - DNA, 30 bp, Artificial Sequence
  Synthetic oligonucleotide
atagcaaaataaacagatccgacgagtcta

SEQ ID NO: 185411 - DNA, 30 bp, Artificial Sequence
  Synthetic oligonucleotide
gcgatcgcaaccacaaacccgggtagtcta

SEQ ID NO: 185412 - DNA, 30 bp, Artificial Sequence
  Synthetic oligonucleotide
cgtataatctctgcatattcatttagtcta

SEQ ID NO: 185413 - DNA, 30 bp, Artificial Sequence
  Synthetic oligonucleotide
gtgccggaatcttgtcacatcctccgtcta

SEQ ID NO: 185414 - DNA, 30 bp, Artificial Sequence
  Synthetic oligonucleotide
tcaggtcaaccaattatcccattccgtcta

SEQ ID NO: 185415 - DNA, 30 bp, Artificial Sequence
  Synthetic oligonucleotide
accggttgatacactgggcgacgtcgtcta

SEQ ID NO: 185416 - DNA, 30 bp, Artificial Sequence
  Synthetic oligonucleotide
ggtagaactaacactttgttgccaggtcta

SEQ ID NO: 185417 - DNA, 30 bp, Artificial Sequence
  Synthetic oligonucleotide
tacggtgacaatacttcgttatatggtcta

SEQ ID NO: 185418 - DNA, 30 bp, Artificial Sequence
  Synthetic oligonucleotide
atacaagttggaccaaatgtgtcgtgtcta

SEQ ID NO: 185419 - DNA, 30 bp, Artificial Sequence
  Synthetic oligonucleotide
acaaaagatatccgtaacgacctttgtcta

SEQ ID NO: 185420 - DNA, 30 bp, Artificial Sequence
  Synthetic oligonucleotide
ctgcgcaggaataaatacgtcgaaattcta

SEQ ID NO: 185421 - DNA, 30 bp, Artificial Sequence
  Synthetic oligonucleotide
tcggcccaccacccacgagagtgaattcta

SEQ ID NO: 185422 - DNA, 30 bp, Artificial Sequence
  Synthetic oligonucleotide
cccgatcggatggagtagcggtatattcta

SEQ ID NO: 185423 - DNA, 30 bp, Artificial Sequence
  Synthetic oligonucleotide
acgcccctcacttcaatgttccgcgttcta

SEQ ID NO: 185424 - DNA, 30 bp, Artificial Sequence
  Synthetic oligonucleotide
cgccactgaggggttgaatccactgttcta

SEQ ID NO: 185425 - DNA, 30 bp, Artificial Sequence
  Synthetic oligonucleotide
gcctcaatggtctggtcgctaggatttcta

SEQ ID NO: 185426 - DNA, 30 bp, Artificial Sequence
  Synthetic oligonucleotide
gcgggcgccattgtatagcgctgatttcta

SEQ ID NO: 185427 - DNA, 30 bp, Artificial Sequence
  Synthetic oligonucleotide
agaaggattgttaacagtcccgcgtttcta

SEQ ID NO: 185428 - DNA, 30 bp, Artificial Sequence
  Synthetic oligonucleotide
agagtaatgccaatttctaccaggaaagta

SEQ ID NO: 185429 - DNA, 30 bp, Artificial Sequence
  Synthetic oligonucleotide
agaagaacagaggacccgccggctaaagta

SEQ ID NO: 185430 - DNA, 30 bp, Artificial Sequence
  Synthetic oligonucleotide
gtaacctgtcgacggctttatggtaaagta

SEQ ID NO: 185431 - DNA, 30 bp, Artificial Sequence
  Synthetic oligonucleotide
atctgacatgaagttcggaatgttaaagta

SEQ ID NO: 185432 - DNA, 30 bp, Artificial Sequence
  Synthetic oligonucleotide
tcttatacccgacacgctgaaggacaagta

SEQ ID NO: 185433 - DNA, 30 bp, Artificial Sequence
  Synthetic oligonucleotide
gcgttcgaggaaatctgaatattacaagta

SEQ ID NO: 185434 - DNA, 30 bp, Artificial Sequence
  Synthetic oligonucleotide
tcgcgtgtagtgcatgctcaccaccaagta

SEQ ID NO: 185435 - DNA, 30 bp, Artificial Sequence
  Synthetic oligonucleotide
gaggtacaccgctgtggaggtgtcgaagta

SEQ ID NO: 185436 - DNA, 30 bp, Artificial Sequence
  Synthetic oligonucleotide
gctgttacgacagttactacagaggaagta

SEQ ID NO: 185437 - DNA, 30 bp, Artificial Sequence
  Synthetic oligonucleotide
cgatccacggcaacagcattagtggaagta

SEQ ID NO: 185438 - DNA, 30 bp, Artificial Sequence
  Synthetic oligonucleotide
agaaaagcgtcctttaccgggggataagta

SEQ ID NO: 185439 - DNA, 30 bp, Artificial Sequence
  Synthetic oligonucleotide
gaggacataagcacgatcgatgcctaagta

SEQ ID NO: 185440 - DNA, 30 bp, Artificial Sequence
  Synthetic oligonucleotide
tatgaaattagggccgcatcgtcaacagta

SEQ ID NO: 185441 - DNA, 30 bp, Artificial Sequence
  Synthetic oligonucleotide
actatttaaacagctgataaaggaacagta

SEQ ID NO: 185442 - DNA, 30 bp, Artificial Sequence
  Synthetic oligonucleotide
caaaggtttcagatccttgaggtaacagta

SEQ ID NO: 185443 - DNA, 30 bp, Artificial Sequence
  Synthetic oligonucleotide
acctagggaggactcgcgtgtggcacagta

SEQ ID NO: 185444 - DNA, 30 bp, Artificial Sequence
  Synthetic oligonucleotide
taggagagcatctaattgcgctgcacagta

SEQ ID NO: 185445 - DNA, 30 bp, Artificial Sequence
  Synthetic oligonucleotide
tggtaggatgaaccgcatggtgagacagta

SEQ ID NO: 185446 - DNA, 30 bp, Artificial Sequence
  Synthetic oligonucleotide
taagaataattttccgctcaaccgacagta

SEQ ID NO: 185447 - DNA, 30 bp, Artificial Sequence
  Synthetic oligonucleotide
gaatatcgataagggctttcctatacagta

SEQ ID NO: 185448 - DNA, 30 bp, Artificial Sequence
  Synthetic oligonucleotide
gacgaacttaccgtattataaggtacagta

SEQ ID NO: 185449 - DNA, 30 bp, Artificial Sequence
  Synthetic oligonucleotide
gctcaaacccacccgccactggttacagta

SEQ ID NO: 185450 - DNA, 30 bp, Artificial Sequence
  Synthetic oligonucleotide
aaacaacgaaacgggtgttactccccagta

SEQ ID NO: 185451 - DNA, 30 bp, Artificial Sequence
  Synthetic oligonucleotide
atgaacatttcgctcacctcggagccagta

SEQ ID NO: 185452 - DNA, 30 bp, Artificial Sequence
  Synthetic oligonucleotide
tacccagtggacgtgccatagcggccagta

SEQ ID NO: 185453 - DNA, 30 bp, Artificial Sequence
  Synthetic oligonucleotide
ctatcaaattataccgacgaataggcagta

SEQ ID NO: 185454 - DNA, 30 bp, Artificial Sequence
  Synthetic oligonucleotide
aaaccctggcgggcagagaatacggcagta

SEQ ID NO: 185455 - DNA, 30 bp, Artificial Sequence
  Synthetic oligonucleotide
gaacgggcggaatgcgaattctttgcagta

SEQ ID NO: 185456 - DNA, 30 bp, Artificial Sequence
  Synthetic oligonucleotide
ttagtcaggagcaggctgggaacatcagta

SEQ ID NO: 185457 - DNA, 30 bp, Artificial Sequence
  Synthetic oligonucleotide
gttaggatgagaggccggttctcatcagta

SEQ ID NO: 185458 - DNA, 30 bp, Artificial Sequence
  Synthetic oligonucleotide
tgggaaattcgtcccgatgcacagtcagta

SEQ ID NO: 185459 - DNA, 30 bp, Artificial Sequence
  Synthetic oligonucleotide
agttgcgtggtaaaccagctttaaagagta

SEQ ID NO: 185460 - DNA, 30 bp, Artificial Sequence
  Synthetic oligonucleotide
aatagcaagaggagggaattcccaagagta

SEQ ID NO: 185461 - DNA, 30 bp, Artificial Sequence
  Synthetic oligonucleotide
cttccgtgaccggccatcacacacagagta

SEQ ID NO: 185462 - DNA, 30 bp, Artificial Sequence
  Synthetic oligonucleotide
gtttccataggatcgatcgtgtccagagta

SEQ ID NO: 185463 - DNA, 30 bp, Artificial Sequence
  Synthetic oligonucleotide
ggaacatcatcatacgagaatcatagagta

SEQ ID NO: 185464 - DNA, 30 bp, Artificial Sequence
  Synthetic oligonucleotide
gacattaggggaaacggtataaaccgagta

SEQ ID NO: 185465 - DNA, 30 bp, Artificial Sequence
  Synthetic oligonucleotide
atccgatcacactggcccaaggcccgagta

SEQ ID NO: 185466 - DNA, 30 bp, Artificial Sequence
  Synthetic oligonucleotide
acggtcaaatgcaggatatgtgcccgagta

SEQ ID NO: 185467 - DNA, 30 bp, Artificial Sequence
  Synthetic oligonucleotide
tatagccacagggaccagcaagggcgagta

SEQ ID NO: 185468 - DNA, 30 bp, Artificial Sequence
  Synthetic oligonucleotide
agagtgactgacctttgcacccctcgagta

SEQ ID NO: 185469 - DNA, 30 bp, Artificial Sequence
  Synthetic oligonucleotide
aacagtcgctgtcactaactgaaaggagta

SEQ ID NO: 185470 - DNA, 30 bp, Artificial Sequence
  Synthetic oligonucleotide
caaactggggacgtgtgaacagaaggagta

SEQ ID NO: 185471 - DNA, 30 bp, Artificial Sequence
  Synthetic oligonucleotide
acacttatcgggtatgtaaactggggagta

SEQ ID NO: 185472 - DNA, 30 bp, Artificial Sequence
  Synthetic oligonucleotide
gaatagatgagaggattaactgtgggagta

SEQ ID NO: 185473 - DNA, 30 bp, Artificial Sequence
  Synthetic oligonucleotide
tgtgagtctataacaataaaccatggagta

SEQ ID NO: 185474 - DNA, 30 bp, Artificial Sequence
  Synthetic oligonucleotide
tagatatgctttagaatacttagtggagta

SEQ ID NO: 185475 - DNA, 30 bp, Artificial Sequence
  Synthetic oligonucleotide
gttgcgcacagcgcctatacatgtggagta

SEQ ID NO: 185476 - DNA, 30 bp, Artificial Sequence
  Synthetic oligonucleotide
ccaagtacgtccaagggctactactgagta

SEQ ID NO: 185477 - DNA, 30 bp, Artificial Sequence
  Synthetic oligonucleotide
gtatagcgacgatgtggtgtagtaatagta

SEQ ID NO: 185478 - DNA, 30 bp, Artificial Sequence
  Synthetic oligonucleotide
caccggctgttggagcgtgatgtcatagta

SEQ ID NO: 185479 - DNA, 30 bp, Artificial Sequence
  Synthetic oligonucleotide
ccggtgaaaatgccgccgcacaggatagta

SEQ ID NO: 185480 - DNA, 30 bp, Artificial Sequence
  Synthetic oligonucleotide
gtatcatggggattgtactcgcgtatagta

SEQ ID NO: 185481 - DNA, 30 bp, Artificial Sequence
  Synthetic oligonucleotide
tagggctctataagactttttgcactagta

SEQ ID NO: 185482 - DNA, 30 bp, Artificial Sequence
  Synthetic oligonucleotide
ggcgctagtacgacggttcgtttactagta

SEQ ID NO: 185483 - DNA, 30 bp, Artificial Sequence
  Synthetic oligonucleotide
gcgtattttaatcaatgactagacctagta

SEQ ID NO: 185484 - DNA, 30 bp, Artificial Sequence
  Synthetic oligonucleotide
cgggctctgttagccaacttctccctagta

SEQ ID NO: 185485 - DNA, 30 bp, Artificial Sequence
  Synthetic oligonucleotide
tgatcagcgtcaatgacgatatcagtagta

SEQ ID NO: 185486 - DNA, 30 bp, Artificial Sequence
  Synthetic oligonucleotide
cagcgagcatgaggatgtttaagagtagta

SEQ ID NO: 185487 - DNA, 30 bp, Artificial Sequence
  Synthetic oligonucleotide
gcaccaacacattgagcttacatcgtagta

SEQ ID NO: 185488 - DNA, 30 bp, Artificial Sequence
  Synthetic oligonucleotide
tattgttagacttggggaagaccggtagta

SEQ ID NO: 185489 - DNA, 30 bp, Artificial Sequence
  Synthetic oligonucleotide
taggacaggccgagaagcagcaatgtagta

SEQ ID NO: 185490 - DNA, 30 bp, Artificial Sequence
  Synthetic oligonucleotide
ttgccgagcagcacgaaagtagatgtagta

SEQ ID NO: 185491 - DNA, 30 bp, Artificial Sequence
  Synthetic oligonucleotide
cgcaaatgtcacgtctttcgtctcttagta

SEQ ID NO: 185492 - DNA, 30 bp, Artificial Sequence
  Synthetic oligonucleotide
gggataccataatcatcacagctgttagta

SEQ ID NO: 185493 - DNA, 30 bp, Artificial Sequence
  Synthetic oligonucleotide
attagcgttagattcggccaggcaaacgta

SEQ ID NO: 185494 - DNA, 30 bp, Artificial Sequence
  Synthetic oligonucleotide
acaagaattagtcataaggaaataaacgta

SEQ ID NO: 185495 - DNA, 30 bp, Artificial Sequence
  Synthetic oligonucleotide
agtaactagtgggagctcggcagcaacgta

SEQ ID NO: 185496 - DNA, 30 bp, Artificial Sequence
  Synthetic oligonucleotide
tgacctgtgtggtactatctcagcaacgta

SEQ ID NO: 185497 - DNA, 30 bp, Artificial Sequence
  Synthetic oligonucleotide
aacaagcaagactaatatacattcaacgta

SEQ ID NO: 185498 - DNA, 30 bp, Artificial Sequence
  Synthetic oligonucleotide
ttcaatacgacagagtagagggcacacgta

SEQ ID NO: 185499 - DNA, 30 bp, Artificial Sequence
  Synthetic oligonucleotide
atcaacttcaaatactaccgatttcacgta

SEQ ID NO: 185500 - DNA, 30 bp, Artificial Sequence
  Synthetic oligonucleotide
acctgcatcgaacttcggggagacgacgta

SEQ ID NO: 185501 - DNA, 30 bp, Artificial Sequence
  Synthetic oligonucleotide
cgcctacacatgcttctttcggccgacgta

SEQ ID NO: 185502 - DNA, 30 bp, Artificial Sequence
  Synthetic oligonucleotide
aactaccgaaacagttagcggagctacgta

SEQ ID NO: 185503 - DNA, 30 bp, Artificial Sequence
  Synthetic oligonucleotide
attactgattgagtaattatacggtacgta

SEQ ID NO: 185504 - DNA, 30 bp, Artificial Sequence
  Synthetic oligonucleotide
tgcgatcggaactccataagatgttacgta

SEQ ID NO: 185505 - DNA, 30 bp, Artificial Sequence
  Synthetic oligonucleotide
attgtaggtgttgagatcaagcccaccgta

SEQ ID NO: 185506 - DNA, 30 bp, Artificial Sequence
  Synthetic oligonucleotide
gagagagatgggagtggacccggcaccgta

SEQ ID NO: 185507 - DNA, 30 bp, Artificial Sequence
  Synthetic oligonucleotide
cctggtgcgaggtatgacgagcggaccgta

SEQ ID NO: 185508 - DNA, 30 bp, Artificial Sequence
  Synthetic oligonucleotide
tccacgaagataagagccacggataccgta

SEQ ID NO: 185509 - DNA, 30 bp, Artificial Sequence
  Synthetic oligonucleotide
tacatggtctagtagatcacatatcccgta

SEQ ID NO: 185510 - DNA, 30 bp, Artificial Sequence
  Synthetic oligonucleotide
cttttgactccactatctcgatatcccgta

SEQ ID NO: 185511 - DNA, 30 bp, Artificial Sequence
  Synthetic oligonucleotide
caggttccatagttaaacactactgccgta

SEQ ID NO: 185512 - DNA, 30 bp, Artificial Sequence
  Synthetic oligonucleotide
cactagcgtgtcactgggttaagtgccgta

SEQ ID NO: 185513 - DNA, 30 bp, Artificial Sequence
  Synthetic oligonucleotide
ttgcgcgacaacgcgtgggtttaatccgta

SEQ ID NO: 185514 - DNA, 30 bp, Artificial Sequence
  Synthetic oligonucleotide
tgactcaatggatttcgaagaggatccgta

SEQ ID NO: 185515 - DNA, 30 bp, Artificial Sequence
  Synthetic oligonucleotide
tgaggaccatcgccgctagagcactccgta

SEQ ID NO: 185516 - DNA, 30 bp, Artificial Sequence
  Synthetic oligonucleotide
ctggatcggtcgcgcatgcattactccgta

SEQ ID NO: 185517 - DNA, 30 bp, Artificial Sequence
  Synthetic oligonucleotide
agacagcaccaatcgaagaaagcctccgta

SEQ ID NO: 185518 - DNA, 30 bp, Artificial Sequence
  Synthetic oligonucleotide
gcactggatactgtgttacgagagtccgta

SEQ ID NO: 185519 - DNA, 31 bp, Artificial Sequence
  Synthetic oligonucleotide
tatgtttatgggcgaatctagcaaaagcgta

SEQ ID NO: 185520 - DNA, 30 bp, Artificial Sequence
  Synthetic oligonucleotide
gccgcacgggtccattgtccggcaagcgta

SEQ ID NO: 185521 - DNA, 30 bp, Artificial Sequence
  Synthetic oligonucleotide
ttaccaatagcaccctaagcatgaagcgta

SEQ ID NO: 185522 - DNA, 30 bp, Artificial Sequence
  Synthetic oligonucleotide
cacataactcgggggtgaagttagagcgta

SEQ ID NO: 185523 - DNA, 30 bp, Artificial Sequence
  Synthetic oligonucleotide
tttgtgggaataggtcctctccctagcgta

SEQ ID NO: 185524 - DNA, 30 bp, Artificial Sequence
  Synthetic oligonucleotide
tatacggagttctggatttcgttacgcgta

SEQ ID NO: 185525 - DNA, 30 bp, Artificial Sequence
  Synthetic oligonucleotide
tgggctgcgtggcagcttatgtttcgcgta

SEQ ID NO: 185526 - DNA, 30 bp, Artificial Sequence
  Synthetic oligonucleotide
cattggatgggatgttagaatctcggcgta

SEQ ID NO: 185527 - DNA, 30 bp, Artificial Sequence
  Synthetic oligonucleotide
ctgagaacccggagtccataaaggggcgta

SEQ ID NO: 185528 - DNA, 30 bp, Artificial Sequence
  Synthetic oligonucleotide
tctggccgacacctcgtgcagatgggcgta

SEQ ID NO: 185529 - DNA, 30 bp, Artificial Sequence
  Synthetic oligonucleotide
ccttgcacaataggccaactgtgatgcgta

SEQ ID NO: 185530 - DNA, 30 bp, Artificial Sequence
  Synthetic oligonucleotide
ggagacacgctaaatcccatggactgcgta

SEQ ID NO: 185531 - DNA, 30 bp, Artificial Sequence
  Synthetic oligonucleotide
ctccgtgtttcggtaacagaaatgtgcgta

SEQ ID NO: 185532 - DNA, 30 bp, Artificial Sequence
  Synthetic oligonucleotide
ttatcatcaagataaatagggctgtgcgta

SEQ ID NO: 185533 - DNA, 30 bp, Artificial Sequence
  Synthetic oligonucleotide
attaacctggattagacaagttccatcgta

SEQ ID NO: 185534 - DNA, 30 bp, Artificial Sequence
  Synthetic oligonucleotide
tctggccttagcgtacctccgtgcatcgta

SEQ ID NO: 185535 - DNA, 30 bp, Artificial Sequence
  Synthetic oligonucleotide
ttactgggggcaaccgggctttggatcgta

SEQ ID NO: 185536 - DNA, 30 bp, Artificial Sequence
  Synthetic oligonucleotide
gcgcagtcagcgttgtgtccactcctcgta

SEQ ID NO: 185537 - DNA, 30 bp, Artificial Sequence
  Synthetic oligonucleotide
tgctaattaaatttaagatggtcgctcgta

SEQ ID NO: 185538 - DNA, 30 bp, Artificial Sequence
  Synthetic oligonucleotide
gagactgttccatcaatcgcgaggctcgta

SEQ ID NO: 185539 - DNA, 30 bp, Artificial Sequence
  Synthetic oligonucleotide
atagcgggcgttagagtctcgatgctcgta

SEQ ID NO: 185540 - DNA, 30 bp, Artificial Sequence
  Synthetic oligonucleotide
gaggctgactaaatctacctcgtgctcgta

SEQ ID NO: 185541 - DNA, 30 bp, Artificial Sequence
  Synthetic oligonucleotide
tcccgctcgaaaaacattcctcgtctcgta

SEQ ID NO: 185542 - DNA, 30 bp, Artificial Sequence
  Synthetic oligonucleotide
cttccaaaggggtagacatcccttctcgta

SEQ ID NO: 185543 - DNA, 30 bp, Artificial Sequence
  Synthetic oligonucleotide
gtctgcgaacccacccgctcgacagtcgta

SEQ ID NO: 185544 - DNA, 30 bp, Artificial Sequence
  Synthetic oligonucleotide
gtcataggagcaatatgctagtgagtcgta

SEQ ID NO: 185545 - DNA, 30 bp, Artificial Sequence
  Synthetic oligonucleotide
cagagcgaaagcccgctgaggatcgtcgta

SEQ ID NO: 185546 - DNA, 30 bp, Artificial Sequence
  Synthetic oligonucleotide
tagcacagaacggcatagcgccatgtcgta

SEQ ID NO: 185547 - DNA, 30 bp, Artificial Sequence
  Synthetic oligonucleotide
ttccagcgcttctaaaccaagcctgtcgta

SEQ ID NO: 185548 - DNA, 30 bp, Artificial Sequence
  Synthetic oligonucleotide
cggtaatttcgcaggattccgtctgtcgta

SEQ ID NO: 185549 - DNA, 30 bp, Artificial Sequence
  Synthetic oligonucleotide
tgtgccaaaagaccggtcagagacttcgta

SEQ ID NO: 185550 - DNA, 30 bp, Artificial Sequence
  Synthetic oligonucleotide
tctattgtaaaatccgctttggccttcgta

SEQ ID NO: 185551 - DNA, 30 bp, Artificial Sequence
  Synthetic oligonucleotide
ccgggacgacaattaagctagtgcttcgta

SEQ ID NO: 185552 - DNA, 30 bp, Artificial Sequence
  Synthetic oligonucleotide
ctcggctatcccacagaagactgaaaggta

SEQ ID NO: 185553 - DNA, 30 bp, Artificial Sequence
  Synthetic oligonucleotide
gcgtttgcacactccccatacataaaggta

SEQ ID NO: 185554 - DNA, 30 bp, Artificial Sequence
  Synthetic oligonucleotide
agtcataataggggcagccgactaaaggta

SEQ ID NO: 185555 - DNA, 30 bp, Artificial Sequence
  Synthetic oligonucleotide
aggttggcttgctccctcttcgggaaggta

SEQ ID NO: 185556 - DNA, 30 bp, Artificial Sequence
  Synthetic oligonucleotide
taatgagggacgcgccccgatcgacaggta

SEQ ID NO: 185557 - DNA, 30 bp, Artificial Sequence
  Synthetic oligonucleotide
agcatggtttcctcattagtagaccaggta

SEQ ID NO: 185558 - DNA, 30 bp, Artificial Sequence
  Synthetic oligonucleotide
aacatgacgtggtatgaccatggccaggta

SEQ ID NO: 185559 - DNA, 30 bp, Artificial Sequence
  Synthetic oligonucleotide
aactaggatacgggttatgacgagcaggta

SEQ ID NO: 185560 - DNA, 30 bp, Artificial Sequence
  Synthetic oligonucleotide
agcatgtcgtgcccaaatccggcgcaggta

SEQ ID NO: 185561 - DNA, 30 bp, Artificial Sequence
  Synthetic oligonucleotide
atttaggcgtaaggcttgcaacggcaggta

SEQ ID NO: 185562 - DNA, 30 bp, Artificial Sequence
  Synthetic oligonucleotide
tgttaaatcggttacgggggctatcaggta

SEQ ID NO: 185563 - DNA, 30 bp, Artificial Sequence
  Synthetic oligonucleotide
tggatgctgtacctacggctcaaagaggta

SEQ ID NO: 185564 - DNA, 30 bp, Artificial Sequence
  Synthetic oligonucleotide
caggatctcgaaggttcctgagccgaggta

SEQ ID NO: 185565 - DNA, 30 bp, Artificial Sequence
  Synthetic oligonucleotide
tcttaaattaaagtcagggcacgcgaggta

SEQ ID NO: 185566 - DNA, 30 bp, Artificial Sequence
  Synthetic oligonucleotide
ctacattattcataaggtatagtggaggta

SEQ ID NO: 185567 - DNA, 30 bp, Artificial Sequence
  Synthetic oligonucleotide
gttccactgtcttaggcaaacgatgaggta

SEQ ID NO: 185568 - DNA, 30 bp, Artificial Sequence
  Synthetic oligonucleotide
gtaaatagaattgaataggaacgataggta

SEQ ID NO: 185569 - DNA, 30 bp, Artificial Sequence
  Synthetic oligonucleotide
aacactagtgcgtgttactgtgcctaggta

SEQ ID NO: 185570 - DNA, 30 bp, Artificial Sequence
  Synthetic oligonucleotide
cgatacagttgacgattccaattctaggta

SEQ ID NO: 185571 - DNA, 30 bp, Artificial Sequence
  Synthetic oligonucleotide
agcgaatacgttaacgctcgtagttaggta

SEQ ID NO: 185572 - DNA, 30 bp, Artificial Sequence
  Synthetic oligonucleotide
aaacgactgccatcctattgggagacggta

SEQ ID NO: 185573 - DNA, 29 bp, Artificial Sequence
  Synthetic oligonucleotide
tgtcgaagtaagcgcgaggagaaccggta

SEQ ID NO: 185574 - DNA, 30 bp, Artificial Sequence
  Synthetic oligonucleotide
ggtaaagagggcttacggaggtcaccggta

SEQ ID NO: 185575 - DNA, 30 bp, Artificial Sequence
  Synthetic oligonucleotide
aagtgtcgcgcgtgactgcgttccccggta

SEQ ID NO: 185576 - DNA, 30 bp, Artificial Sequence
  Synthetic oligonucleotide
aggtgtactatacttcttgtaagcccggta

SEQ ID NO: 185577 - DNA, 30 bp, Artificial Sequence
  Synthetic oligonucleotide
tacagagcttatttaagtacagtcccggta

SEQ ID NO: 185578 - DNA, 30 bp, Artificial Sequence
  Synthetic oligonucleotide
gtgcccatacccgcgacatccttagcggta

SEQ ID NO: 185579 - DNA, 30 bp, Artificial Sequence
  Synthetic oligonucleotide
atgtcgagtaccatctttataaacgcggta

SEQ ID NO: 185580 - DNA, 30 bp, Artificial Sequence
  Synthetic oligonucleotide
tcgcagtatgcatggccatacgacgcggta

SEQ ID NO: 185581 - DNA, 30 bp, Artificial Sequence
  Synthetic oligonucleotide
gacatgtcacgctgatttcgggcggcggta

SEQ ID NO: 185582 - DNA, 30 bp, Artificial Sequence
  Synthetic oligonucleotide
tgcaagcctctaaagcgcccaggatcggta

SEQ ID NO: 185583 - DNA, 30 bp, Artificial Sequence
  Synthetic oligonucleotide
tgaatattccacttgggcccgaactcggta

SEQ ID NO: 185584 - DNA, 30 bp, Artificial Sequence
  Synthetic oligonucleotide
gatgaatttactgagtggcacgcctcggta

SEQ ID NO: 185585 - DNA, 30 bp, Artificial Sequence
  Synthetic oligonucleotide
taggtggggccccagtgggcatggtcggta

SEQ ID NO: 185586 - DNA, 30 bp, Artificial Sequence
  Synthetic oligonucleotide
tcgcacaatcatatattacccgcttcggta

SEQ ID NO: 185587 - DNA, 30 bp, Artificial Sequence
  Synthetic oligonucleotide
gttgtcattgtatgagcaggagacagggta

SEQ ID NO: 185588 - DNA, 30 bp, Artificial Sequence
  Synthetic oligonucleotide
aaggatcttacggtaaaagagtgcagggta

SEQ ID NO: 185589 - DNA, 30 bp, Artificial Sequence
  Synthetic oligonucleotide
ccactaaattgccgaacatgcttgagggta

SEQ ID NO: 185590 - DNA, 30 bp, Artificial Sequence
  Synthetic oligonucleotide
tttcaagtatggcagaccagacgtagggta

SEQ ID NO: 185591 - DNA, 30 bp, Artificial Sequence
  Synthetic oligonucleotide
gtatgacatcaagggggctagtcacgggta

SEQ ID NO: 185592 - DNA, 30 bp, Artificial Sequence
  Synthetic oligonucleotide
gtcgataaattgatcatcagcgtacgggta

SEQ ID NO: 185593 - DNA, 30 bp, Artificial Sequence
  Synthetic oligonucleotide
cggataggggaagatgaacaaggccgggta

SEQ ID NO: 185594 - DNA, 30 bp, Artificial Sequence
  Synthetic oligonucleotide
tgaacgtgccggcgagggagtactcgggta

SEQ ID NO: 185595 - DNA, 30 bp, Artificial Sequence
  Synthetic oligonucleotide
gtatttgaagggctattatattctcgggta

SEQ ID NO: 185596 - DNA, 30 bp, Artificial Sequence
  Synthetic oligonucleotide
ccgatgtggagcagcgaacgtggaggggta

SEQ ID NO: 185597 - DNA, 30 bp, Artificial Sequence
  Synthetic oligonucleotide
gcttcattccacgtaagatatgagggggta

SEQ ID NO: 185598 - DNA, 29 bp, Artificial Sequence
  Synthetic oligonucleotide
tcgggcatagtcacttgtagagtggggta

SEQ ID NO: 185599 - DNA, 30 bp, Artificial Sequence
  Synthetic oligonucleotide
gatccgggtaccgcctcgagcttatgggta

SEQ ID NO: 185600 - DNA, 30 bp, Artificial Sequence
  Synthetic oligonucleotide
acgagtagtggatagctcggttactgggta

SEQ ID NO: 185601 - DNA, 30 bp, Artificial Sequence
  Synthetic oligonucleotide
tctccagggcccatcgaggcacagtgggta

SEQ ID NO: 185602 - DNA, 30 bp, Artificial Sequence
  Synthetic oligonucleotide
taacaagcacgaacgtgccccgattgggta

SEQ ID NO: 185603 - DNA, 30 bp, Artificial Sequence
  Synthetic oligonucleotide
tggaatgtgaaaatattaacataaatggta

SEQ ID NO: 185604 - DNA, 30 bp, Artificial Sequence
  Synthetic oligonucleotide
atggggtttggaaacaatccaaggatggta

SEQ ID NO: 185605 - DNA, 30 bp, Artificial Sequence
  Synthetic oligonucleotide
tacctggaagtgaagccccacaaactggta

SEQ ID NO: 185606 - DNA, 30 bp, Artificial Sequence
  Synthetic oligonucleotide
gcattgtaggacgtaggtcttagactggta

SEQ ID NO: 185607 - DNA, 30 bp, Artificial Sequence
  Synthetic oligonucleotide
gaaggaactgtagcataatgggccctggta

SEQ ID NO: 185608 - DNA, 30 bp, Artificial Sequence
  Synthetic oligonucleotide
gtcatagttgctcctatgagtccagtggta

SEQ ID NO: 185609 - DNA, 30 bp, Artificial Sequence
  Synthetic oligonucleotide
tactcggggatgctctagaaactggtggta

SEQ ID NO: 185610 - DNA, 30 bp, Artificial Sequence
  Synthetic oligonucleotide
tgtcatgaaagggtcgggcacgttgtggta

SEQ ID NO: 185611 - DNA, 30 bp, Artificial Sequence
  Synthetic oligonucleotide
tcaaggagtttgggtagggttagattggta

SEQ ID NO: 185612 - DNA, 30 bp, Artificial Sequence
  Synthetic oligonucleotide
gtgcgcttaagatggcgtcatatcttggta

SEQ ID NO: 185613 - DNA, 30 bp, Artificial Sequence
  Synthetic oligonucleotide
aacggttttgctcctgatatcggtttggta

SEQ ID NO: 185614 - DNA, 30 bp, Artificial Sequence
  Synthetic oligonucleotide
aatcaaggaagtagactacgtcaaaatgta

SEQ ID NO: 185615 - DNA, 30 bp, Artificial Sequence
  Synthetic oligonucleotide
gtgaaggcgctgccggtatactaaaatgta

SEQ ID NO: 185616 - DNA, 30 bp, Artificial Sequence
  Synthetic oligonucleotide
ctccatcaagatagctaacacaacaatgta

SEQ ID NO: 185617 - DNA, 30 bp, Artificial Sequence
  Synthetic oligonucleotide
acttggaataattgagaccgagacaatgta

SEQ ID NO: 185618 - DNA, 30 bp, Artificial Sequence
  Synthetic oligonucleotide
aggctagacagcgagtttaccgacaatgta

SEQ ID NO: 185619 - DNA, 30 bp, Artificial Sequence
  Synthetic oligonucleotide
ggcggccgccgagcgttggccaataatgta

SEQ ID NO: 185620 - DNA, 30 bp, Artificial Sequence
  Synthetic oligonucleotide
ggcaaatactgcatacggaccttacatgta

SEQ ID NO: 185621 - DNA, 30 bp, Artificial Sequence
  Synthetic oligonucleotide
ctggcctaccaatcaaatgttggccatgta

SEQ ID NO: 185622 - DNA, 30 bp, Artificial Sequence
  Synthetic oligonucleotide
agcgtgaacaacaccgctgggtgccatgta

SEQ ID NO: 185623 - DNA, 30 bp, Artificial Sequence
  Synthetic oligonucleotide
acgataaggacaaagtataccatccatgta

SEQ ID NO: 185624 - DNA, 30 bp, Artificial Sequence
  Synthetic oligonucleotide
gccactacccaagcaccgtgtactcatgta

SEQ ID NO: 185625 - DNA, 30 bp, Artificial Sequence
  Synthetic oligonucleotide
acaccagtaccacagtctcagagtcatgta

SEQ ID NO: 185626 - DNA, 30 bp, Artificial Sequence
  Synthetic oligonucleotide
aagggcacatcagttgtgtactgagatgta

SEQ ID NO: 185627 - DNA, 30 bp, Artificial Sequence
  Synthetic oligonucleotide
tggaagtcgctgggtcgcgaaatcgatgta

SEQ ID NO: 185628 - DNA, 30 bp, Artificial Sequence
  Synthetic oligonucleotide
atggagtcaaagtgactgttaaaggatgta

SEQ ID NO: 185629 - DNA, 30 bp, Artificial Sequence
  Synthetic oligonucleotide
ttagaactagaccggatgtagacggatgta

SEQ ID NO: 185630 - DNA, 31 bp, Artificial Sequence
  Synthetic oligonucleotide
actacgaaagaaaggtcatcccgctgatgta

SEQ ID NO: 185631 - DNA, 30 bp, Artificial Sequence
  Synthetic oligonucleotide
gttattcagacaacgaaggggcaatatgta

SEQ ID NO: 185632 - DNA, 30 bp, Artificial Sequence
  Synthetic oligonucleotide
ggttggcgctgtcccgtcccagtatatgta

SEQ ID NO: 185633 - DNA, 30 bp, Artificial Sequence
  Synthetic oligonucleotide
cgtataaaaggtttgtggatggactatgta

SEQ ID NO: 185634 - DNA, 30 bp, Artificial Sequence
  Synthetic oligonucleotide
aatgtatatcaactcggagcttggtatgta

SEQ ID NO: 185635 - DNA, 30 bp, Artificial Sequence
  Synthetic oligonucleotide
taaatccgagttaaagcaggcccttatgta

SEQ ID NO: 185636 - DNA, 30 bp, Artificial Sequence
  Synthetic oligonucleotide
gaccgcattcactcaaaaaagggttatgta

SEQ ID NO: 185637 - DNA, 30 bp, Artificial Sequence
  Synthetic oligonucleotide
acgtatcgaccattagcgggcatttatgta

SEQ ID NO: 185638 - DNA, 30 bp, Artificial Sequence
  Synthetic oligonucleotide
atcacaacatatgactattctagaactgta

SEQ ID NO: 185639 - DNA, 30 bp, Artificial Sequence
  Synthetic oligonucleotide
attccggggaccttggctgctcgaactgta

SEQ ID NO: 185640 - DNA, 30 bp, Artificial Sequence
  Synthetic oligonucleotide
tacagtggtgcggaaaggacactaactgta

SEQ ID NO: 185641 - DNA, 30 bp, Artificial Sequence
  Synthetic oligonucleotide
gacacgtctaaactgtcagaacacactgta

SEQ ID NO: 185642 - DNA, 30 bp, Artificial Sequence
  Synthetic oligonucleotide
gacggggtcagagtaagaaccatacctgta

SEQ ID NO: 185643 - DNA, 30 bp, Artificial Sequence
  Synthetic oligonucleotide
cctggattcctgaaccgaaggaggcctgta

SEQ ID NO: 185644 - DNA, 30 bp, Artificial Sequence
  Synthetic oligonucleotide
ccgatttgtaattgtccaggcatgcctgta

SEQ ID NO: 185645 - DNA, 30 bp, Artificial Sequence
  Synthetic oligonucleotide
tttgtgcatgcgatcgaagtcagagctgta

SEQ ID NO: 185646 - DNA, 30 bp, Artificial Sequence
  Synthetic oligonucleotide
aagtgtctataggtcgagtgccccgctgta

SEQ ID NO: 185647 - DNA, 30 bp, Artificial Sequence
  Synthetic oligonucleotide
cagtactttttggactctggtggggctgta

SEQ ID NO: 185648 - DNA, 30 bp, Artificial Sequence
  Synthetic oligonucleotide
caccagagtgtgcccatgggataatctgta

SEQ ID NO: 185649 - DNA, 30 bp, Artificial Sequence
  Synthetic oligonucleotide
taaaagcaagctcttcatatttagtctgta

SEQ ID NO: 185650 - DNA, 30 bp, Artificial Sequence
  Synthetic oligonucleotide
ttaagcgggctccacggactatggtctgta

SEQ ID NO: 185651 - DNA, 30 bp, Artificial Sequence
  Synthetic oligonucleotide
acgccaacggagatggcgcgtttttctgta

SEQ ID NO: 185652 - DNA, 30 bp, Artificial Sequence
  Synthetic oligonucleotide
cactttataaacccccaggagcaaagtgta

SEQ ID NO: 185653 - DNA, 30 bp, Artificial Sequence
  Synthetic oligonucleotide
tcgtgttccctggtagtgttacgaagtgta

SEQ ID NO: 185654 - DNA, 30 bp, Artificial Sequence
  Synthetic oligonucleotide
ttgctccaaccacaccggcagataagtgta

SEQ ID NO: 185655 - DNA, 30 bp, Artificial Sequence
  Synthetic oligonucleotide
cgggccgactaattcgtacccgggagtgta

SEQ ID NO: 185656 - DNA, 30 bp, Artificial Sequence
  Synthetic oligonucleotide
aaggccgtagggcgagaaattctgagtgta

SEQ ID NO: 185657 - DNA, 30 bp, Artificial Sequence
  Synthetic oligonucleotide
tggtggaggcggcacagaggcactagtgta

SEQ ID NO: 185658 - DNA, 30 bp, Artificial Sequence
  Synthetic oligonucleotide
gcaaccagatcacaaaaagacagacgtgta

SEQ ID NO: 185659 - DNA, 30 bp, Artificial Sequence
  Synthetic oligonucleotide
cagatggcacctcaacgttggagacgtgta

SEQ ID NO: 185660 - DNA, 30 bp, Artificial Sequence
  Synthetic oligonucleotide
tcttacaccctcacccccggaatacgtgta

SEQ ID NO: 185661 - DNA, 30 bp, Artificial Sequence
  Synthetic oligonucleotide
cgagtccacggaacatgcgcccgccgtgta

SEQ ID NO: 185662 - DNA, 30 bp, Artificial Sequence
  Synthetic oligonucleotide
cgcgagcgcatgcaggctcttttccgtgta

SEQ ID NO: 185663 - DNA, 30 bp, Artificial Sequence
  Synthetic oligonucleotide
cagttaagctgtattggtcccggtcgtgta

SEQ ID NO: 185664 - DNA, 30 bp, Artificial Sequence
  Synthetic oligonucleotide
atgcatgcagtgcgcgaaattgttcgtgta

SEQ ID NO: 185665 - DNA, 30 bp, Artificial Sequence
  Synthetic oligonucleotide
actctgccaaaacctgcgggtaaaggtgta

SEQ ID NO: 185666 - DNA, 30 bp, Artificial Sequence
  Synthetic oligonucleotide
gaggctcgcggacggaattaaccaggtgta

SEQ ID NO: 185667 - DNA, 30 bp, Artificial Sequence
  Synthetic oligonucleotide
attaaggcagtaataagacatgagggtgta

SEQ ID NO: 185668 - DNA, 30 bp, Artificial Sequence
  Synthetic oligonucleotide
actggaggtctatgactacaccggggtgta

SEQ ID NO: 185669 - DNA, 30 bp, Artificial Sequence
  Synthetic oligonucleotide
taaggttattgttaccctcagggtggtgta

SEQ ID NO: 185670 - DNA, 30 bp, Artificial Sequence
  Synthetic oligonucleotide
cgatagctagcgcacagtatgcaatgtgta

SEQ ID NO: 185671 - DNA, 30 bp, Artificial Sequence
  Synthetic oligonucleotide
acatgcaggctttactttcacccatgtgta

SEQ ID NO: 185672 - DNA, 30 bp, Artificial Sequence
  Synthetic oligonucleotide
tgtgcgcacacagtaaagctgtgatgtgta

SEQ ID NO: 185673 - DNA, 30 bp, Artificial Sequence
  Synthetic oligonucleotide
atctgtaacgcaactaatgagaggtgtgta

SEQ ID NO: 185674 - DNA, 30 bp, Artificial Sequence
  Synthetic oligonucleotide
cgtgaagggtgtactaaccgatggtgtgta

SEQ ID NO: 185675 - DNA, 30 bp, Artificial Sequence
  Synthetic oligonucleotide
atgttaggaacaacttaaacgtcttgtgta

SEQ ID NO: 185676 - DNA, 30 bp, Artificial Sequence
  Synthetic oligonucleotide
taaacgtgctgacgctcatcccgtattgta

SEQ ID NO: 185677 - DNA, 30 bp, Artificial Sequence
  Synthetic oligonucleotide
tcaggtgcgtcccttttgaaagagcttgta

SEQ ID NO: 185678 - DNA, 30 bp, Artificial Sequence
  Synthetic oligonucleotide
gcagagacgtgcaggatatattatcttgta

SEQ ID NO: 185679 - DNA, 30 bp, Artificial Sequence
  Synthetic oligonucleotide
agcatacagtaactacgaaaaagtcttgta

SEQ ID NO: 185680 - DNA, 30 bp, Artificial Sequence
  Synthetic oligonucleotide
gtggaaccctaggttaggcgaacagttgta

SEQ ID NO: 185681 - DNA, 30 bp, Artificial Sequence
  Synthetic oligonucleotide
agtgtagctgacgcatcgttcacagttgta

SEQ ID NO: 185682 - DNA, 30 bp, Artificial Sequence
  Synthetic oligonucleotide
gatgtgctttagaaagttaaaggagttgta

SEQ ID NO: 185683 - DNA, 30 bp, Artificial Sequence
  Synthetic oligonucleotide
attagcgtgccgacaatacctttggttgta

SEQ ID NO: 185684 - DNA, 30 bp, Artificial Sequence
  Synthetic oligonucleotide
cgtgtaagaccggtcagcaatggtgttgta

SEQ ID NO: 185685 - DNA, 30 bp, Artificial Sequence
  Synthetic oligonucleotide
gccctggaataaggctgagcaccatttgta

SEQ ID NO: 185686 - DNA, 30 bp, Artificial Sequence
  Synthetic oligonucleotide
cagctgaagatcaagataagaacctttgta

SEQ ID NO: 185687 - DNA, 30 bp, Artificial Sequence
  Synthetic oligonucleotide
caacgaagaactcagaatcgcccttttgta

SEQ ID NO: 185688 - DNA, 30 bp, Artificial Sequence
  Synthetic oligonucleotide
acgattgttacatgatagttccaaaaatta

SEQ ID NO: 185689 - DNA, 30 bp, Artificial Sequence
  Synthetic oligonucleotide
gtacacagttcgcgaacaattacgaaatta

SEQ ID NO: 185690 - DNA, 31 bp, Artificial Sequence
  Synthetic oligonucleotide
tcggctgcaagcatccgcttttccgaaatta

SEQ ID NO: 185691 - DNA, 30 bp, Artificial Sequence
  Synthetic oligonucleotide
aatgggaatgcgaagctttcgtgtaaatta

SEQ ID NO: 185692 - DNA, 30 bp, Artificial Sequence
  Synthetic oligonucleotide
ggcgttcgtctggcatcctagagacaatta

SEQ ID NO: 185693 - DNA, 30 bp, Artificial Sequence
  Synthetic oligonucleotide
cctaaagggcgacggaaaatcgaccaatta

SEQ ID NO: 185694 - DNA, 30 bp, Artificial Sequence
  Synthetic oligonucleotide
cttgtccggagggtattaccaactcaatta

SEQ ID NO: 185695 - DNA, 30 bp, Artificial Sequence
  Synthetic oligonucleotide
aaaggtcttcaacggaggcctaaagaatta

SEQ ID NO: 185696 - DNA, 30 bp, Artificial Sequence
  Synthetic oligonucleotide
atttctagacacgacacaaagtacgaatta

SEQ ID NO: 185697 - DNA, 30 bp, Artificial Sequence
  Synthetic oligonucleotide
cttccatgctttgcttctgcctgcgaatta

SEQ ID NO: 185698 - DNA, 30 bp, Artificial Sequence
  Synthetic oligonucleotide
aggcatgttctcgttggtatttaggaatta

SEQ ID NO: 185699 - DNA, 30 bp, Artificial Sequence
  Synthetic oligonucleotide
ccacgtattggcgagtgcaattctgaatta

SEQ ID NO: 185700 - DNA, 30 bp, Artificial Sequence
  Synthetic oligonucleotide
cctgtaaattcgaaaggcgtgagtgaatta

SEQ ID NO: 185701 - DNA, 30 bp, Artificial Sequence
  Synthetic oligonucleotide
tcaaaatgaacacccaaatatacataatta

SEQ ID NO: 185702 - DNA, 30 bp, Artificial Sequence
  Synthetic oligonucleotide
acctggacgtccgatagaacggactaatta

SEQ ID NO: 185703 - DNA, 30 bp, Artificial Sequence
  Synthetic oligonucleotide
gcacgaatgagcttactatgcaggtaatta

SEQ ID NO: 185704 - DNA, 30 bp, Artificial Sequence
  Synthetic oligonucleotide
gggtcgtcgaaacgcggttctgtgtaatta

SEQ ID NO: 185705 - DNA, 30 bp, Artificial Sequence
  Synthetic oligonucleotide
gattagagccactctgaatggtcaacatta

SEQ ID NO: 185706 - DNA, 30 bp, Artificial Sequence
  Synthetic oligonucleotide
gcatgcggaagacgaagctagttaacatta

SEQ ID NO: 185707 - DNA, 30 bp, Artificial Sequence
  Synthetic oligonucleotide
ctttaaattatcaacaacccctccacatta

SEQ ID NO: 185708 - DNA, 30 bp, Artificial Sequence
  Synthetic oligonucleotide
ccagcatggtggctcggagctcgcacatta

SEQ ID NO: 185709 - DNA, 30 bp, Artificial Sequence
  Synthetic oligonucleotide
agcatgtacgctactcgttccgtaccatta

SEQ ID NO: 185710 - DNA, 30 bp, Artificial Sequence
  Synthetic oligonucleotide
ggttgaatccccgcttgaagtgtaccatta

SEQ ID NO: 185711 - DNA, 30 bp, Artificial Sequence
  Synthetic oligonucleotide
agtgtagtatgcctgctcggctacccatta

SEQ ID NO: 185712 - DNA, 30 bp, Artificial Sequence
  Synthetic oligonucleotide
gggccggaggtactccgacatcccccatta

SEQ ID NO: 185713 - DNA, 30 bp, Artificial Sequence
  Synthetic oligonucleotide
agttaaagggagataatcttcatcccatta

SEQ ID NO: 185714 - DNA, 30 bp, Artificial Sequence
  Synthetic oligonucleotide
aaaagtagcgtgccaacaggctggccatta

SEQ ID NO: 185715 - DNA, 30 bp, Artificial Sequence
  Synthetic oligonucleotide
gataagttccggttcagggtctgtccatta

SEQ ID NO: 185716 - DNA, 30 bp, Artificial Sequence
  Synthetic oligonucleotide
cagaaaagctcgtgggcggacaccgcatta

SEQ ID NO: 185717 - DNA, 30 bp, Artificial Sequence
  Synthetic oligonucleotide
tagcatggattatcaagggcaaaggcatta

SEQ ID NO: 185718 - DNA, 30 bp, Artificial Sequence
  Synthetic oligonucleotide
aggcagtagttcacgatgcatggtgcatta

SEQ ID NO: 185719 - DNA, 30 bp, Artificial Sequence
  Synthetic oligonucleotide
ccggtgacgtcgtcccaccgctaaagatta

SEQ ID NO: 185720 - DNA, 30 bp, Artificial Sequence
  Synthetic oligonucleotide
tcatatagccagatcttcggtaacagatta

SEQ ID NO: 185721 - DNA, 31 bp, Artificial Sequence
  Synthetic oligonucleotide
tcacatatagagtggaccacggcacagatta

SEQ ID NO: 185722 - DNA, 30 bp, Artificial Sequence
  Synthetic oligonucleotide
cgtcgcgcacgtaaacgtctaactagatta

SEQ ID NO: 185723 - DNA, 30 bp, Artificial Sequence
  Synthetic oligonucleotide
ggctactcagaagaagaacagcttagatta

SEQ ID NO: 185724 - DNA, 30 bp, Artificial Sequence
  Synthetic oligonucleotide
cttcactctacgacaatttatatacgatta

SEQ ID NO: 185725 - DNA, 30 bp, Artificial Sequence
  Synthetic oligonucleotide
cgtccagagttaaagcgggggccgcgatta

SEQ ID NO: 185726 - DNA, 30 bp, Artificial Sequence
  Synthetic oligonucleotide
ctgggcctactacctcaccctcgtcgatta

SEQ ID NO: 185727 - DNA, 30 bp, Artificial Sequence
  Synthetic oligonucleotide
ggcgcctgtcgtgcggaaaggagaggatta

SEQ ID NO: 185728 - DNA, 30 bp, Artificial Sequence
  Synthetic oligonucleotide
agaggatggtcggtaggaccggggggatta

SEQ ID NO: 185729 - DNA, 30 bp, Artificial Sequence
  Synthetic oligonucleotide
gtatcggttcgtttgcaggatggtggatta

SEQ ID NO: 185730 - DNA, 30 bp, Artificial Sequence
  Synthetic oligonucleotide
tgagcgagtagcaggcccacgggctgatta

SEQ ID NO: 185731 - DNA, 30 bp, Artificial Sequence
  Synthetic oligonucleotide
taccggctacccgaaaggcggtagtgatta

SEQ ID NO: 185732 - DNA, 30 bp, Artificial Sequence
  Synthetic oligonucleotide
gcaacaaactaggcacccgtgcaaatatta

SEQ ID NO: 185733 - DNA, 30 bp, Artificial Sequence
  Synthetic oligonucleotide
tgagtacgtgttgcagtgtggggaatatta

SEQ ID NO: 185734 - DNA, 30 bp, Artificial Sequence
  Synthetic oligonucleotide
taccatctcacgaccggggacataatatta

SEQ ID NO: 185735 - DNA, 30 bp, Artificial Sequence
  Synthetic oligonucleotide
atgcatgctgatgcgaatcttgacatatta

SEQ ID NO: 185736 - DNA, 30 bp, Artificial Sequence
  Synthetic oligonucleotide
gtgactgaccttcgaagtgcaagtatatta

SEQ ID NO: 185737 - DNA, 30 bp, Artificial Sequence
  Synthetic oligonucleotide
ggaactgggtccggactgattcaactatta

SEQ ID NO: 185738 - DNA, 30 bp, Artificial Sequence
  Synthetic oligonucleotide
ccgttggagtacgtacgaaggctactatta

SEQ ID NO: 185739 - DNA, 30 bp, Artificial Sequence
  Synthetic oligonucleotide
taacggaacttatatgcagggcatctatta

SEQ ID NO: 185740 - DNA, 30 bp, Artificial Sequence
  Synthetic oligonucleotide
aaacggatctgagtcgagaagcctctatta

SEQ ID NO: 185741 - DNA, 30 bp, Artificial Sequence
  Synthetic oligonucleotide
taatagatggcggagatgtactccgtatta

SEQ ID NO: 185742 - DNA, 30 bp, Artificial Sequence
  Synthetic oligonucleotide
gactgggggaggttaccaatacaggtatta

SEQ ID NO: 185743 - DNA, 30 bp, Artificial Sequence
  Synthetic oligonucleotide
gtgtagggcgcaagcacgggatatgtatta

SEQ ID NO: 185744 - DNA, 30 bp, Artificial Sequence
  Synthetic oligonucleotide
atgcacttaaagcagtgaacttatgtatta

SEQ ID NO: 185745 - DNA, 30 bp, Artificial Sequence
  Synthetic oligonucleotide
tgggggccatgatactctgctcttgtatta

SEQ ID NO: 185746 - DNA, 30 bp, Artificial Sequence
  Synthetic oligonucleotide
gtgagatctaaaggaccatttggattatta

SEQ ID NO: 185747 - DNA, 30 bp, Artificial Sequence
  Synthetic oligonucleotide
gtcaaggcgaacctagcaagccggttatta

SEQ ID NO: 185748 - DNA, 30 bp, Artificial Sequence
  Synthetic oligonucleotide
tgcattaagcaaccgtctgaaccaaactta

SEQ ID NO: 185749 - DNA, 30 bp, Artificial Sequence
  Synthetic oligonucleotide
ggaacacgttttgggcatgcccacaactta

SEQ ID NO: 185750 - DNA, 30 bp, Artificial Sequence
  Synthetic oligonucleotide
gcgcgagttaaattgtcagcgtacaactta

SEQ ID NO: 185751 - DNA, 30 bp, Artificial Sequence
  Synthetic oligonucleotide
gggatatacaagtgttgaaggtaccactta

SEQ ID NO: 185752 - DNA, 30 bp, Artificial Sequence
  Synthetic oligonucleotide
gagcaaggagatccggcatcctagcactta

SEQ ID NO: 185753 - DNA, 30 bp, Artificial Sequence
  Synthetic oligonucleotide
tacgtgacccgaggaggtgtgacagactta

SEQ ID NO: 185754 - DNA, 30 bp, Artificial Sequence
  Synthetic oligonucleotide
gcagcagagggaacacactcggacgactta

SEQ ID NO: 185755 - DNA, 30 bp, Artificial Sequence
  Synthetic oligonucleotide
agcaccccgtggtcgaaccgattatactta

SEQ ID NO: 185756 - DNA, 30 bp, Artificial Sequence
  Synthetic oligonucleotide
tatcgatcccacgttccgtggataccctta

SEQ ID NO: 185757 - DNA, 30 bp, Artificial Sequence
  Synthetic oligonucleotide
atgaatttaatgatggtatcctagccctta

SEQ ID NO: 185758 - DNA, 30 bp, Artificial Sequence
  Synthetic oligonucleotide
acaatatatcgacccgtgcctccagcctta

SEQ ID NO: 185759 - DNA, 30 bp, Artificial Sequence
  Synthetic oligonucleotide
tctttcatccagcaatccatagcagcctta

SEQ ID NO: 185760 - DNA, 30 bp, Artificial Sequence
  Synthetic oligonucleotide
tggggctaaacggtatattaacgcgcctta

SEQ ID NO: 185761 - DNA, 30 bp, Artificial Sequence
  Synthetic oligonucleotide
caaattcaggaatcttccatccgcgcctta

SEQ ID NO: 185762 - DNA, 30 bp, Artificial Sequence
  Synthetic oligonucleotide
tatctagtggaaccgtcgtattgcgcctta

SEQ ID NO: 185763 - DNA, 30 bp, Artificial Sequence
  Synthetic oligonucleotide
ctaattaacgggatgcgtaagtattcctta

SEQ ID NO: 185764 - DNA, 30 bp, Artificial Sequence
  Synthetic oligonucleotide
gagctcgacatgatagaatagatttcctta

SEQ ID NO: 185765 - DNA, 30 bp, Artificial Sequence
  Synthetic oligonucleotide
atgccctacacaaaagcaatttgcagctta

SEQ ID NO: 185766 - DNA, 30 bp, Artificial Sequence
  Synthetic oligonucleotide
gctaacataccagccggttccgtgagctta

SEQ ID NO: 185767 - DNA, 30 bp, Artificial Sequence
  Synthetic oligonucleotide
cactcgcttactgaattcctcttccgctta

SEQ ID NO: 185768 - DNA, 30 bp, Artificial Sequence
  Synthetic oligonucleotide
aggggatagcgcagcctggcaaatcgctta

SEQ ID NO: 185769 - DNA, 30 bp, Artificial Sequence
  Synthetic oligonucleotide
ggcggacgatgattctcagaggcaggctta

SEQ ID NO: 185770 - DNA, 30 bp, Artificial Sequence
  Synthetic oligonucleotide
catctgacaaatataatgaagcgaggctta

SEQ ID NO: 185771 - DNA, 30 bp, Artificial Sequence
  Synthetic oligonucleotide
ttcgtgagtaggccagcgggagacggctta

SEQ ID NO: 185772 - DNA, 30 bp, Artificial Sequence
  Synthetic oligonucleotide
ggcctacctggcgggcgtcccagcggctta

SEQ ID NO: 185773 - DNA, 30 bp, Artificial Sequence
  Synthetic oligonucleotide
ggctcagtcccgggcttatacacatgctta

SEQ ID NO: 185774 - DNA, 30 bp, Artificial Sequence
  Synthetic oligonucleotide
tggcgcttcaggagccttatgacatgctta

SEQ ID NO: 185775 - DNA, 31 bp, Artificial Sequence
  Synthetic oligonucleotide
actggaaaagatataacccgagatatgctta

SEQ ID NO: 185776 - DNA, 30 bp, Artificial Sequence
  Synthetic oligonucleotide
gatccacatagtgttggcttacgttgctta

SEQ ID NO: 185777 - DNA, 30 bp, Artificial Sequence
  Synthetic oligonucleotide
acaaattaatgtgcaacacgtcgttgctta

SEQ ID NO: 185778 - DNA, 30 bp, Artificial Sequence
  Synthetic oligonucleotide
aacacgcgcaggtctgtcagattttgctta

SEQ ID NO: 185779 - DNA, 30 bp, Artificial Sequence
  Synthetic oligonucleotide
acggtgctacaaattcatggccacatctta

SEQ ID NO: 185780 - DNA, 30 bp, Artificial Sequence
  Synthetic oligonucleotide
cttgggaataggtattgtgcctagatctta

SEQ ID NO: 185781 - DNA, 30 bp, Artificial Sequence
  Synthetic oligonucleotide
ccctagtgagactatcaagctgcgatctta

SEQ ID NO: 185782 - DNA, 30 bp, Artificial Sequence
  Synthetic oligonucleotide
gtgaacgaaaggagcggtaggcccctctta

SEQ ID NO: 185783 - DNA, 30 bp, Artificial Sequence
  Synthetic oligonucleotide
ccgagcgatcttcaaggactggacgtctta

SEQ ID NO: 185784 - DNA, 30 bp, Artificial Sequence
  Synthetic oligonucleotide
tttgcgtggcaggcctataacgtcgtctta

SEQ ID NO: 185785 - DNA, 30 bp, Artificial Sequence
  Synthetic oligonucleotide
ctcaaaggtgtgagccaaggctgggtctta

SEQ ID NO: 185786 - DNA, 30 bp, Artificial Sequence
  Synthetic oligonucleotide
tcagtcgtagtggaaagctatacaaagtta

SEQ ID NO: 185787 - DNA, 30 bp, Artificial Sequence
  Synthetic oligonucleotide
ggggattattgtcctacgggagtaaagtta

SEQ ID NO: 185788 - DNA, 30 bp, Artificial Sequence
  Synthetic oligonucleotide
atggccattgcgtacactgaaactaagtta

SEQ ID NO: 185789 - DNA, 30 bp, Artificial Sequence
  Synthetic oligonucleotide
acggggtatcgggcttggttgggtaagtta

SEQ ID NO: 185790 - DNA, 30 bp, Artificial Sequence
  Synthetic oligonucleotide
ccggaatgtcccgacaccgtgattaagtta

SEQ ID NO: 185791 - DNA, 30 bp, Artificial Sequence
  Synthetic oligonucleotide
tcttccagagctcattgaggactccagtta

SEQ ID NO: 185792 - DNA, 30 bp, Artificial Sequence
  Synthetic oligonucleotide
acgaataagcgagaggctctcgagcagtta

SEQ ID NO: 185793 - DNA, 30 bp, Artificial Sequence
  Synthetic oligonucleotide
gggtaaaaggagctagaaccttacgagtta

SEQ ID NO: 185794 - DNA, 30 bp, Artificial Sequence
  Synthetic oligonucleotide
tatgcatggatcctaaagataatcgagtta

SEQ ID NO: 185795 - DNA, 30 bp, Artificial Sequence
  Synthetic oligonucleotide
gctcacatacacctttgaacaatggagtta

SEQ ID NO: 185796 - DNA, 30 bp, Artificial Sequence
  Synthetic oligonucleotide
acggaacaggatctccgcgtttgtgagtta

SEQ ID NO: 185797 - DNA, 30 bp, Artificial Sequence
  Synthetic oligonucleotide
tggcaacaggtatactttaaggaatagtta

SEQ ID NO: 185798 - DNA, 30 bp, Artificial Sequence
  Synthetic oligonucleotide
agttgccttcgcaaatcacagagctagtta

SEQ ID NO: 185799 - DNA, 30 bp, Artificial Sequence
  Synthetic oligonucleotide
atgggtaaatgtatcgatatccagtagtta

SEQ ID NO: 185800 - DNA, 30 bp, Artificial Sequence
  Synthetic oligonucleotide
gtggggtttcgcgtatatcacccgtagtta

SEQ ID NO: 185801 - DNA, 30 bp, Artificial Sequence
  Synthetic oligonucleotide
ggtatgaggctggggattaaattgtagtta

SEQ ID NO: 185802 - DNA, 30 bp, Artificial Sequence
  Synthetic oligonucleotide
cagtcggcgctcccccccaatcgttagtta

SEQ ID NO: 185803 - DNA, 30 bp, Artificial Sequence
  Synthetic oligonucleotide
taacggctatgggagcttgcccaaacgtta

SEQ ID NO: 185804 - DNA, 30 bp, Artificial Sequence
  Synthetic oligonucleotide
aaaaaataggctgtggactgataaacgtta

SEQ ID NO: 185805 - DNA, 30 bp, Artificial Sequence
  Synthetic oligonucleotide
tagtgagtcggggcatattccgagacgtta

SEQ ID NO: 185806 - DNA, 31 bp, Artificial Sequence
  Synthetic oligonucleotide
ggctaggctcggtggtgtaaaggatacgtta

SEQ ID NO: 185807 - DNA, 30 bp, Artificial Sequence
  Synthetic oligonucleotide
agggcgtgcgttgtaaagaactatacgtta

SEQ ID NO: 185808 - DNA, 30 bp, Artificial Sequence
  Synthetic oligonucleotide
caatggcgctatagctgcatcactacgtta

SEQ ID NO: 185809 - DNA, 30 bp, Artificial Sequence
  Synthetic oligonucleotide
taggctgacactctgacagagcacccgtta

SEQ ID NO: 185810 - DNA, 30 bp, Artificial Sequence
  Synthetic oligonucleotide
agactaaaaccatgaatcgcgcagccgtta

SEQ ID NO: 185811 - DNA, 30 bp, Artificial Sequence
  Synthetic oligonucleotide
cgtcttctatcaacccgaggacctgcgtta

SEQ ID NO: 185812 - DNA, 30 bp, Artificial Sequence
  Synthetic oligonucleotide
accatgaattaggttcagcagcaatcgtta

SEQ ID NO: 185813 - DNA, 30 bp, Artificial Sequence
  Synthetic oligonucleotide
agtcggttaatgattacgggggcttcgtta

SEQ ID NO: 185814 - DNA, 30 bp, Artificial Sequence
  Synthetic oligonucleotide
cgctggaaaacggctatgatggcaaggtta

SEQ ID NO: 185815 - DNA, 30 bp, Artificial Sequence
  Synthetic oligonucleotide
gagtagccaccctaaggaacttgcaggtta

SEQ ID NO: 185816 - DNA, 30 bp, Artificial Sequence
  Synthetic oligonucleotide
tgttgaattatcagacgggtgtaccggtta

SEQ ID NO: 185817 - DNA, 30 bp, Artificial Sequence
  Synthetic oligonucleotide
agcgtgacctccagtcaccgtggccggtta

SEQ ID NO: 185818 - DNA, 30 bp, Artificial Sequence
  Synthetic oligonucleotide
cgatcccgacctcggccatggtctcggtta

SEQ ID NO: 185819 - DNA, 30 bp, Artificial Sequence
  Synthetic oligonucleotide
gcagcgcgcaggtcacagacattcgggtta

SEQ ID NO: 185820 - DNA, 30 bp, Artificial Sequence
  Synthetic oligonucleotide
aaaaggggatacccacggaggtcggggtta

SEQ ID NO: 185821 - DNA, 30 bp, Artificial Sequence
  Synthetic oligonucleotide
gggtacgtaagcgttggaaatcgggggtta

SEQ ID NO: 185822 - DNA, 30 bp, Artificial Sequence
  Synthetic oligonucleotide
ctggcagcagcaactgtacacactgggtta

SEQ ID NO: 185823 - DNA, 30 bp, Artificial Sequence
  Synthetic oligonucleotide
gctcctcgtaggcgcggatgatcatggtta

SEQ ID NO: 185824 - DNA, 30 bp, Artificial Sequence
  Synthetic oligonucleotide
gttattacctcgttcagtggtccttggtta

SEQ ID NO: 185825 - DNA, 30 bp, Artificial Sequence
  Synthetic oligonucleotide
actggattcgacacacttccgtgttggtta

SEQ ID NO: 185826 - DNA, 30 bp, Artificial Sequence
  Synthetic oligonucleotide
agtggctatgctgggttgagaggaatgtta

SEQ ID NO: 185827 - DNA, 30 bp, Artificial Sequence
  Synthetic oligonucleotide
gagtaaacgtgacccccattgagcatgtta

SEQ ID NO: 185828 - DNA, 30 bp, Artificial Sequence
  Synthetic oligonucleotide
ggtacacgtatctctatgcaaccgatgtta

SEQ ID NO: 185829 - DNA, 30 bp, Artificial Sequence
  Synthetic oligonucleotide
gaaagctctgcaattgagtgggcgatgtta

SEQ ID NO: 185830 - DNA, 30 bp, Artificial Sequence
  Synthetic oligonucleotide
ccatgctgggagttcagtgagcatatgtta

SEQ ID NO: 185831 - DNA, 30 bp, Artificial Sequence
  Synthetic oligonucleotide
cagatgtttaaacggttgagatctatgtta

SEQ ID NO: 185832 - DNA, 30 bp, Artificial Sequence
  Synthetic oligonucleotide
cagcgagctgtcaagtcacgatttatgtta

SEQ ID NO: 185833 - DNA, 30 bp, Artificial Sequence
  Synthetic oligonucleotide
aggcaaatagatctgtaagttaaactgtta

SEQ ID NO: 185834 - DNA, 30 bp, Artificial Sequence
  Synthetic oligonucleotide
tctgagacataaacacagttagacctgtta

SEQ ID NO: 185835 - DNA, 30 bp, Artificial Sequence
  Synthetic oligonucleotide
caatagtccgatgaatgaacatcgctgtta

SEQ ID NO: 185836 - DNA, 30 bp, Artificial Sequence
  Synthetic oligonucleotide
gagctcggcctaactcggtcagatctgtta

SEQ ID NO: 185837 - DNA, 30 bp, Artificial Sequence
  Synthetic oligonucleotide
aaggtagcgatgcgatatggttgtctgtta

SEQ ID NO: 185838 - DNA, 30 bp, Artificial Sequence
  Synthetic oligonucleotide
tccgacaagaaggaggatgtaatagtgtta

SEQ ID NO: 185839 - DNA, 30 bp, Artificial Sequence
  Synthetic oligonucleotide
attggttagagctaatacatgaccgtgtta

SEQ ID NO: 185840 - DNA, 30 bp, Artificial Sequence
  Synthetic oligonucleotide
accgcacgcggcaattgtggggccgtgtta

SEQ ID NO: 185841 - DNA, 30 bp, Artificial Sequence
  Synthetic oligonucleotide
attaagtcggcagatcacgacgaggtgtta

SEQ ID NO: 185842 - DNA, 30 bp, Artificial Sequence
  Synthetic oligonucleotide
aatggctagtgccttagttccattgtgtta

SEQ ID NO: 185843 - DNA, 30 bp, Artificial Sequence
  Synthetic oligonucleotide
gggtccggtaggatagagagatacttgtta

SEQ ID NO: 185844 - DNA, 30 bp, Artificial Sequence
  Synthetic oligonucleotide
ccagaatgagccatcatcctccggttgtta

SEQ ID NO: 185845 - DNA, 30 bp, Artificial Sequence
  Synthetic oligonucleotide
caacggactagggcgttcgcaatgttgtta

SEQ ID NO: 185846 - DNA, 30 bp, Artificial Sequence
  Synthetic oligonucleotide
gagcgcaaatacccgcgtttcatgttgtta

SEQ ID NO: 185847 - DNA, 30 bp, Artificial Sequence
  Synthetic oligonucleotide
aacagcggtaggaaaattgcgctgttgtta

SEQ ID NO: 185848 - DNA, 29 bp, Artificial Sequence
  Synthetic oligonucleotide
gtgtgaagaagggataagctctgttgtta

SEQ ID NO: 185849 - DNA, 30 bp, Artificial Sequence
  Synthetic oligonucleotide
cgccgcgactccttggcaatatgtttgtta

SEQ ID NO: 185850 - DNA, 30 bp, Artificial Sequence
  Synthetic oligonucleotide
agactcaaccttaccgtagttgacaattta

SEQ ID NO: 185851 - DNA, 30 bp, Artificial Sequence
  Synthetic oligonucleotide
accggtagcgaactgttatgagccaattta

SEQ ID NO: 185852 - DNA, 30 bp, Artificial Sequence
  Synthetic oligonucleotide
accaccgtaggctaacatcagcagaattta

SEQ ID NO: 185853 - DNA, 30 bp, Artificial Sequence
  Synthetic oligonucleotide
taggcagtcgcaatgtgagcaactaattta

SEQ ID NO: 185854 - DNA, 30 bp, Artificial Sequence
  Synthetic oligonucleotide
ggtgcgtgccccagtgctggacaacattta

SEQ ID NO: 185855 - DNA, 30 bp, Artificial Sequence
  Synthetic oligonucleotide
atgagggggacacgctctatgcatcattta

SEQ ID NO: 185856 - DNA, 30 bp, Artificial Sequence
  Synthetic oligonucleotide
gccgactaatcagaccactgaaatgattta

SEQ ID NO: 185857 - DNA, 30 bp, Artificial Sequence
  Synthetic oligonucleotide
aaggccaggggtatatggtgaggtgattta

SEQ ID NO: 185858 - DNA, 31 bp, Artificial Sequence
  Synthetic oligonucleotide
tagtcgtgcaggtgacggtgaatactattta

SEQ ID NO: 185859 - DNA, 30 bp, Artificial Sequence
  Synthetic oligonucleotide
atggatacaggtagacgcggatagtattta

SEQ ID NO: 185860 - DNA, 30 bp, Artificial Sequence
  Synthetic oligonucleotide
aggcatctccgtgtactaatggtgtattta

SEQ ID NO: 185861 - DNA, 30 bp, Artificial Sequence
  Synthetic oligonucleotide
gaagtaccagggttacacgactcttattta

SEQ ID NO: 185862 - DNA, 30 bp, Artificial Sequence
  Synthetic oligonucleotide
aatgggagtctagaatgatacctttattta

SEQ ID NO: 185863 - DNA, 30 bp, Artificial Sequence
  Synthetic oligonucleotide
agcgtggggcaaacatatcgcgcgacttta

SEQ ID NO: 185864 - DNA, 30 bp, Artificial Sequence
  Synthetic oligonucleotide
atagcccgtggggtactcgatacagcttta

SEQ ID NO: 185865 - DNA, 30 bp, Artificial Sequence
  Synthetic oligonucleotide
atagcacaggtgacttgttaatgagcttta

SEQ ID NO: 185866 - DNA, 30 bp, Artificial Sequence
  Synthetic oligonucleotide
tccactcaagaatcgatggggatcgcttta

SEQ ID NO: 185867 - DNA, 30 bp, Artificial Sequence
  Synthetic oligonucleotide
cggtccaccacaccgtattgtttgtcttta

SEQ ID NO: 185868 - DNA, 30 bp, Artificial Sequence
  Synthetic oligonucleotide
gatgcaaagacctctgggatcccaagttta

SEQ ID NO: 185869 - DNA, 30 bp, Artificial Sequence
  Synthetic oligonucleotide
aaaggacggaatggtgtactactacgttta

SEQ ID NO: 185870 - DNA, 30 bp, Artificial Sequence
  Synthetic oligonucleotide
caggctgattcggggcacgaagcccgttta

SEQ ID NO: 185871 - DNA, 30 bp, Artificial Sequence
  Synthetic oligonucleotide
ccggtccggtagccgaacgtaagtcgttta

SEQ ID NO: 185872 - DNA, 30 bp, Artificial Sequence
  Synthetic oligonucleotide
cataacgcagtcgggacgtacccaggttta

SEQ ID NO: 185873 - DNA, 30 bp, Artificial Sequence
  Synthetic oligonucleotide
tacaagcgggcgccggatggggacggttta

SEQ ID NO: 185874 - DNA, 30 bp, Artificial Sequence
  Synthetic oligonucleotide
tccgggcgttaacaatgcgaatatggttta

SEQ ID NO: 185875 - DNA, 30 bp, Artificial Sequence
  Synthetic oligonucleotide
ggcgaggcattctaccgcatatagtgttta

SEQ ID NO: 185876 - DNA, 30 bp, Artificial Sequence
  Synthetic oligonucleotide
ttcacggactcacagacatatgcgtgttta

SEQ ID NO: 185877 - DNA, 30 bp, Artificial Sequence
  Synthetic oligonucleotide
gtccgatgcaacggatttagaaaaatttta

SEQ ID NO: 185878 - DNA, 30 bp, Artificial Sequence
  Synthetic oligonucleotide
aacagaagaaggcgtgatacaaacatttta

SEQ ID NO: 185879 - DNA, 30 bp, Artificial Sequence
  Synthetic oligonucleotide
gtgacgacccagcaaagaaacgatatttta

SEQ ID NO: 185880 - DNA, 30 bp, Artificial Sequence
  Synthetic oligonucleotide
gagcacgtaatgacgcctctgatcctttta

SEQ ID NO: 185881 - DNA, 30 bp, Artificial Sequence
  Synthetic oligonucleotide
aggctgttaatataaactgagaccgtttta

SEQ ID NO: 185882 - DNA, 30 bp, Artificial Sequence
  Synthetic oligonucleotide
ctagttcacacatgagagtactgcgtttta

SEQ ID NO: 185883 - DNA, 30 bp, Artificial Sequence
  Synthetic oligonucleotide
cactacgtatagaaggaccgtgaggtttta

SEQ ID NO: 185884 - DNA, 30 bp, Artificial Sequence
  Synthetic oligonucleotide
gtagagctaaatatacatactgtggtttta

SEQ ID NO: 185885 - DNA, 30 bp, Artificial Sequence
  Synthetic oligonucleotide
ggaaagatcgtgagtgcagttgctgtttta

SEQ ID NO: 185886 - DNA, 30 bp, Artificial Sequence
  Synthetic oligonucleotide
gaacgtaacccctcgctgtagtgtgtttta

SEQ ID NO: 185887 - DNA, 30 bp, Artificial Sequence
  Synthetic oligonucleotide
ggatgcggtatgcacaagaggaggttttta

SEQ ID NO: 185888 - DNA, 30 bp, Artificial Sequence
  Synthetic oligonucleotide
tagctgcaacgggaaggaaatactttttta

SEQ ID NO: 185889 - DNA, 30 bp, Artificial Sequence
  Synthetic oligonucleotide
cacctacaataaggaacgccaaacaaaaac

SEQ ID NO: 185890 - DNA, 31 bp, Artificial Sequence
  Synthetic oligonucleotide
ttcgtatagtctctgcaacgtacccaaaaac

SEQ ID NO: 185891 - DNA, 30 bp, Artificial Sequence
  Synthetic oligonucleotide
aagtccatccaaaaccgataccaagaaaac

SEQ ID NO: 185892 - DNA, 30 bp, Artificial Sequence
  Synthetic oligonucleotide
tcacattacgagaatcacctgatggaaaac

SEQ ID NO: 185893 - DNA, 30 bp, Artificial Sequence
  Synthetic oligonucleotide
cgtgaatcatataccgttggcgtggaaaac

SEQ ID NO: 185894 - DNA, 30 bp, Artificial Sequence
  Synthetic oligonucleotide
acgcaagcttcctgcgccgataaataaaac

SEQ ID NO: 185895 - DNA, 30 bp, Artificial Sequence
  Synthetic oligonucleotide
gactttggcacgactaatggtggataaaac

SEQ ID NO: 185896 - DNA, 30 bp, Artificial Sequence
  Synthetic oligonucleotide
acttaaagtgagttcgtagcaagctaaaac

SEQ ID NO: 185897 - DNA, 30 bp, Artificial Sequence
  Synthetic oligonucleotide
ggggtcggagtctaagattttaattaaaac

SEQ ID NO: 185898 - DNA, 30 bp, Artificial Sequence
  Synthetic oligonucleotide
tgagcacatactcaaaatatggattaaaac

SEQ ID NO: 185899 - DNA, 30 bp, Artificial Sequence
  Synthetic oligonucleotide
gcacccgtggagctgtgtcacccaacaaac

SEQ ID NO: 185900 - DNA, 30 bp, Artificial Sequence
  Synthetic oligonucleotide
cataacggtttggatattgcacgtacaaac

SEQ ID NO: 185901 - DNA, 30 bp, Artificial Sequence
  Synthetic oligonucleotide
gggaaataaggactggtcgaatgaccaaac

SEQ ID NO: 185902 - DNA, 30 bp, Artificial Sequence
  Synthetic oligonucleotide
cgacggggcaaggtatcttcgataccaaac

SEQ ID NO: 185903 - DNA, 30 bp, Artificial Sequence
  Synthetic oligonucleotide
gaatggcatccgcacatgcaagtgccaaac

SEQ ID NO: 185904 - DNA, 30 bp, Artificial Sequence
  Synthetic oligonucleotide
cggaaggagttcacgcaatcctctccaaac

SEQ ID NO: 185905 - DNA, 30 bp, Artificial Sequence
  Synthetic oligonucleotide
ggcagtgtggcagtcgccataggtccaaac

SEQ ID NO: 185906 - DNA, 30 bp, Artificial Sequence
  Synthetic oligonucleotide
ctatacgtaagtggtttcaatgaagcaaac

SEQ ID NO: 185907 - DNA, 30 bp, Artificial Sequence
  Synthetic oligonucleotide
tggattgggatcaacttccgttaagcaaac

SEQ ID NO: 185908 - DNA, 30 bp, Artificial Sequence
  Synthetic oligonucleotide
agagctgattcttaccggtaacccgcaaac

SEQ ID NO: 185909 - DNA, 30 bp, Artificial Sequence
  Synthetic oligonucleotide
cggcctcaggcgtgtgatacagcggcaaac

SEQ ID NO: 185910 - DNA, 30 bp, Artificial Sequence
  Synthetic oligonucleotide
cacgttctgccctcacagtaaagggcaaac

SEQ ID NO: 185911 - DNA, 31 bp, Artificial Sequence
  Synthetic oligonucleotide
cgggagactgggaatggatggggctgcaaac

SEQ ID NO: 185912 - DNA, 30 bp, Artificial Sequence
  Synthetic oligonucleotide
aataatgctccgccacggatgagtgcaaac

SEQ ID NO: 185913 - DNA, 30 bp, Artificial Sequence
  Synthetic oligonucleotide
ctgctctttgggccggggacaaaatcaaac

SEQ ID NO: 185914 - DNA, 30 bp, Artificial Sequence
  Synthetic oligonucleotide
ggaaccatttaaccaacgtctgcaagaaac

SEQ ID NO: 185915 - DNA, 31 bp, Artificial Sequence
  Synthetic oligonucleotide
aaacacagggagctcagtgttgtacagaaac

SEQ ID NO: 185916 - DNA, 30 bp, Artificial Sequence
  Synthetic oligonucleotide
accacagaatatcgttcgatcatgagaaac

SEQ ID NO: 185917 - DNA, 30 bp, Artificial Sequence
  Synthetic oligonucleotide
gaggtggtatttagctaaattcgaggaaac

SEQ ID NO: 185918 - DNA, 30 bp, Artificial Sequence
  Synthetic oligonucleotide
ctcacgggtccacgtcatccgcagggaaac

SEQ ID NO: 185919 - DNA, 30 bp, Artificial Sequence
  Synthetic oligonucleotide
cccacacgtagggttcggtcccggggaaac

SEQ ID NO: 185920 - DNA, 30 bp, Artificial Sequence
  Synthetic oligonucleotide
ttcggtgaatgagaggcttacatgggaaac

SEQ ID NO: 185921 - DNA, 30 bp, Artificial Sequence
  Synthetic oligonucleotide
cggtaattggagcgcaccggtgtgggaaac

SEQ ID NO: 185922 - DNA, 30 bp, Artificial Sequence
  Synthetic oligonucleotide
tgggcgatactacttctgaggttgggaaac

SEQ ID NO: 185923 - DNA, 30 bp, Artificial Sequence
  Synthetic oligonucleotide
aaaagtgacccgtcgatagctcgtggaaac

SEQ ID NO: 185924 - DNA, 30 bp, Artificial Sequence
  Synthetic oligonucleotide
cactctgtgatacatcagaaagttggaaac

SEQ ID NO: 185925 - DNA, 30 bp, Artificial Sequence
  Synthetic oligonucleotide
aggacgaaggatgagcttgttttttgaaac

SEQ ID NO: 185926 - DNA, 30 bp, Artificial Sequence
  Synthetic oligonucleotide
gaaagggaagttcctataccggacataaac

SEQ ID NO: 185927 - DNA, 30 bp, Artificial Sequence
  Synthetic oligonucleotide
gtcttatggttaacctgtagtgagataaac

SEQ ID NO: 185928 - DNA, 30 bp, Artificial Sequence
  Synthetic oligonucleotide
tgtcgctatcatgcctaccttcgtctaaac

SEQ ID NO: 185929 - DNA, 30 bp, Artificial Sequence
  Synthetic oligonucleotide
caggcttaacgttcattgggatcagtaaac

SEQ ID NO: 185930 - DNA, 30 bp, Artificial Sequence
  Synthetic oligonucleotide
cttgctccagggtgtgtggacgccgtaaac

SEQ ID NO: 185931 - DNA, 30 bp, Artificial Sequence
  Synthetic oligonucleotide
gataacgaggtaggactgcgtagcgtaaac

SEQ ID NO: 185932 - DNA, 30 bp, Artificial Sequence
  Synthetic oligonucleotide
tcttacactatcggtcgactgctcttaaac

SEQ ID NO: 185933 - DNA, 30 bp, Artificial Sequence
  Synthetic oligonucleotide
ttatccctatcaaagaaactctcgttaaac

SEQ ID NO: 185934 - DNA, 30 bp, Artificial Sequence
  Synthetic oligonucleotide
tcacagttggttcagccgatcgtgttaaac

SEQ ID NO: 185935 - DNA, 30 bp, Artificial Sequence
  Synthetic oligonucleotide
taaccgaatcctagaagaaatgctttaaac

SEQ ID NO: 185936 - DNA, 30 bp, Artificial Sequence
  Synthetic oligonucleotide
tgtgaattcgagatgtgtagggcaaacaac

SEQ ID NO: 185937 - DNA, 30 bp, Artificial Sequence
  Synthetic oligonucleotide
gcaatacctaactactagcggtcgaacaac

SEQ ID NO: 185938 - DNA, 30 bp, Artificial Sequence
  Synthetic oligonucleotide
agcgcttaacagattgggggacgtaacaac

SEQ ID NO: 185939 - DNA, 30 bp, Artificial Sequence
  Synthetic oligonucleotide
cacacgagatttggatgacttccgcacaac

SEQ ID NO: 185940 - DNA, 30 bp, Artificial Sequence
  Synthetic oligonucleotide
cgaacatcacgtgccttaggagtgcacaac

SEQ ID NO: 185941 - DNA, 30 bp, Artificial Sequence
  Synthetic oligonucleotide
cgattagaattactattcgcgacagacaac

SEQ ID NO: 185942 - DNA, 30 bp, Artificial Sequence
  Synthetic oligonucleotide
aagacaacgatcgaacataaaagagacaac

SEQ ID NO: 185943 - DNA, 30 bp, Artificial Sequence
  Synthetic oligonucleotide
gccccgtcaatagcggaagttttagacaac

SEQ ID NO: 185944 - DNA, 30 bp, Artificial Sequence
  Synthetic oligonucleotide
atcggtctactgttcggcttcagcgacaac

SEQ ID NO: 185945 - DNA, 30 bp, Artificial Sequence
  Synthetic oligonucleotide
atcaaagtggcagtaactagcagggacaac

SEQ ID NO: 185946 - DNA, 30 bp, Artificial Sequence
  Synthetic oligonucleotide
cattcagcggtgtaaatacaattggacaac

SEQ ID NO: 185947 - DNA, 30 bp, Artificial Sequence
  Synthetic oligonucleotide
gggatgaaataccggtctgagcatgacaac

SEQ ID NO: 185948 - DNA, 30 bp, Artificial Sequence
  Synthetic oligonucleotide
cggcctaagcgtgtctgatacctgtacaac

SEQ ID NO: 185949 - DNA, 30 bp, Artificial Sequence
  Synthetic oligonucleotide
ttaaggtaggtgtgaccgcttttgtacaac

SEQ ID NO: 185950 - DNA, 30 bp, Artificial Sequence
  Synthetic oligonucleotide
gcctcctgtggttaaggccgaaaaaccaac

SEQ ID NO: 185951 - DNA, 30 bp, Artificial Sequence
  Synthetic oligonucleotide
actaaagtattctggttaaagcaaaccaac

SEQ ID NO: 185952 - DNA, 30 bp, Artificial Sequence
  Synthetic oligonucleotide
gtgggcacaaaaagttccagtcaaaccaac

SEQ ID NO: 185953 - DNA, 30 bp, Artificial Sequence
  Synthetic oligonucleotide
gagtaacggggaaaaatgctccgaaccaac

SEQ ID NO: 185954 - DNA, 30 bp, Artificial Sequence
  Synthetic oligonucleotide
atcaggacgccgaccccggatgtcaccaac

SEQ ID NO: 185955 - DNA, 30 bp, Artificial Sequence
  Synthetic oligonucleotide
tggccaatgataccggtgggttataccaac

SEQ ID NO: 185956 - DNA, 30 bp, Artificial Sequence
  Synthetic oligonucleotide
gacctgggcgtttactcacgtcctaccaac

SEQ ID NO: 185957 - DNA, 30 bp, Artificial Sequence
  Synthetic oligonucleotide
cagtagctgactttagcgcgcaggcccaac

SEQ ID NO: 185958 - DNA, 30 bp, Artificial Sequence
  Synthetic oligonucleotide
aggccacgccggtgtgcgttgtggcccaac

SEQ ID NO: 185959 - DNA, 30 bp, Artificial Sequence
  Synthetic oligonucleotide
ccgccagtgagtttcatatacgatcccaac

SEQ ID NO: 185960 - DNA, 30 bp, Artificial Sequence
  Synthetic oligonucleotide
ccatagacattcgagacttttatagccaac

SEQ ID NO: 185961 - DNA, 30 bp, Artificial Sequence
  Synthetic oligonucleotide
gagatccagatagggttctatgcggccaac

SEQ ID NO: 185962 - DNA, 30 bp, Artificial Sequence
  Synthetic oligonucleotide
ataaccgcggtcaacgagagcagggccaac

SEQ ID NO: 185963 - DNA, 30 bp, Artificial Sequence
  Synthetic oligonucleotide
tataatagagaccaaggtgggcgggccaac

SEQ ID NO: 185964 - DNA, 30 bp, Artificial Sequence
  Synthetic oligonucleotide
cagtgcactgggcacatcaattgatccaac

SEQ ID NO: 185965 - DNA, 30 bp, Artificial Sequence
  Synthetic oligonucleotide
cctcgcgatgataggctagttgtatccaac

SEQ ID NO: 185966 - DNA, 30 bp, Artificial Sequence
  Synthetic oligonucleotide
tggcaagcatcattcgccactgactccaac

SEQ ID NO: 185967 - DNA, 30 bp, Artificial Sequence
  Synthetic oligonucleotide
tggtaaatggggagggctctcctaagcaac

SEQ ID NO: 185968 - DNA, 30 bp, Artificial Sequence
  Synthetic oligonucleotide
agtcggcttcctaaagatgcccacagcaac

SEQ ID NO: 185969 - DNA, 30 bp, Artificial Sequence
  Synthetic oligonucleotide
aatctcggtagagtctatccaatgagcaac

SEQ ID NO: 185970 - DNA, 30 bp, Artificial Sequence
  Synthetic oligonucleotide
aggcacatcacctcgggagaaagacgcaac

SEQ ID NO: 185971 - DNA, 30 bp, Artificial Sequence
  Synthetic oligonucleotide
caagaaccgagaacagggttggtacgcaac

SEQ ID NO: 185972 - DNA, 30 bp, Artificial Sequence
  Synthetic oligonucleotide
tgtgtaatgactatgacgattgagcgcaac

SEQ ID NO: 185973 - DNA, 30 bp, Artificial Sequence
  Synthetic oligonucleotide
ccattcgcatctaacgtgctaaggcgcaac

SEQ ID NO: 185974 - DNA, 30 bp, Artificial Sequence
  Synthetic oligonucleotide
tgccgtaaccaggagtgtagcatgcgcaac

SEQ ID NO: 185975 - DNA, 30 bp, Artificial Sequence
  Synthetic oligonucleotide
tcaaggtgccgtaagactactataggcaac

SEQ ID NO: 185976 - DNA, 30 bp, Artificial Sequence
  Synthetic oligonucleotide
tcggctatttgttcgggggtgctaggcaac

SEQ ID NO: 185977 - DNA, 30 bp, Artificial Sequence
  Synthetic oligonucleotide
tcttcaaacttcattgtgagaagcggcaac

SEQ ID NO: 185978 - DNA, 30 bp, Artificial Sequence
  Synthetic oligonucleotide
ggaatagagtggcccgtattgcgcggcaac

SEQ ID NO: 185979 - DNA, 30 bp, Artificial Sequence
  Synthetic oligonucleotide
cttataccccctaacggaagctctggcaac

SEQ ID NO: 185980 - DNA, 30 bp, Artificial Sequence
  Synthetic oligonucleotide
gatgtatcgcacacgtaccaagagtgcaac

SEQ ID NO: 185981 - DNA, 30 bp, Artificial Sequence
  Synthetic oligonucleotide
tcgtcctagtcagaacgagccgggtgcaac

SEQ ID NO: 185982 - DNA, 30 bp, Artificial Sequence
  Synthetic oligonucleotide
aactcgtccaatttatcgtcgccaatcaac

SEQ ID NO: 185983 - DNA, 30 bp, Artificial Sequence
  Synthetic oligonucleotide
ccagtgaaagaatagatcgacgacatcaac

SEQ ID NO: 185984 - DNA, 30 bp, Artificial Sequence
  Synthetic oligonucleotide
ggtatactactgtatataggttcgatcaac

SEQ ID NO: 185985 - DNA, 30 bp, Artificial Sequence
  Synthetic oligonucleotide
aaggctccgatggtctggctatacctcaac

SEQ ID NO: 185986 - DNA, 30 bp, Artificial Sequence
  Synthetic oligonucleotide
attgagctttcttgcaagggcagtctcaac

SEQ ID NO: 185987 - DNA, 30 bp, Artificial Sequence
  Synthetic oligonucleotide
ctagattccggcaactatacgccagtcaac

SEQ ID NO: 185988 - DNA, 30 bp, Artificial Sequence
  Synthetic oligonucleotide
cttatgggaacgacagggggtcgagtcaac

SEQ ID NO: 185989 - DNA, 30 bp, Artificial Sequence
  Synthetic oligonucleotide
acggttgaccaagatatgagacgcgtcaac

SEQ ID NO: 185990 - DNA, 30 bp, Artificial Sequence
  Synthetic oligonucleotide
gtgttcaacgttgggattaaccgcttcaac

SEQ ID NO: 185991 - DNA, 30 bp, Artificial Sequence
  Synthetic oligonucleotide
gtgagatatttctcttggcagggcttcaac

SEQ ID NO: 185992 - DNA, 30 bp, Artificial Sequence
  Synthetic oligonucleotide
tcttgattcgtctcagaatcggtaaagaac

SEQ ID NO: 185993 - DNA, 30 bp, Artificial Sequence
  Synthetic oligonucleotide
catgatggccattcgctgattggcaagaac

SEQ ID NO: 185994 - DNA, 30 bp, Artificial Sequence
  Synthetic oligonucleotide
tggtcttgggttaggcctgcaatcaagaac

SEQ ID NO: 185995 - DNA, 30 bp, Artificial Sequence
  Synthetic oligonucleotide
tattctcggctagatccacattttaagaac

SEQ ID NO: 185996 - DNA, 30 bp, Artificial Sequence
  Synthetic oligonucleotide
tgggtgcagcccccctaggacgatcagaac

SEQ ID NO: 185997 - DNA, 30 bp, Artificial Sequence
  Synthetic oligonucleotide
agccgcgcaaatcgaagatcatttcagaac

SEQ ID NO: 185998 - DNA, 30 bp, Artificial Sequence
  Synthetic oligonucleotide
ctaactactcaatttcatacgtgagagaac

SEQ ID NO: 185999 - DNA, 30 bp, Artificial Sequence
  Synthetic oligonucleotide
tcccgcaaccttttagagtaagtagagaac

SEQ ID NO: 186000 - DNA, 30 bp, Artificial Sequence
  Synthetic oligonucleotide
gaggtacagcgtaatatttcctgcgagaac

SEQ ID NO: 186001 - DNA, 30 bp, Artificial Sequence
  Synthetic oligonucleotide
tggccaacgctatccccgttgagggagaac

SEQ ID NO: 186002 - DNA, 30 bp, Artificial Sequence
  Synthetic oligonucleotide
agcgagcgcgttttcaatcgcaatgagaac

SEQ ID NO: 186003 - DNA, 30 bp, Artificial Sequence
  Synthetic oligonucleotide
aagcaacattagcgatgtactaaatagaac

SEQ ID NO: 186004 - DNA, 30 bp, Artificial Sequence
  Synthetic oligonucleotide
tgacatccccaatcgctccccccatagaac

SEQ ID NO: 186005 - DNA, 30 bp, Artificial Sequence
  Synthetic oligonucleotide
gtgctgcacaggcgggaacgtagatagaac

SEQ ID NO: 186006 - DNA, 30 bp, Artificial Sequence
  Synthetic oligonucleotide
aaaatcacagacatgatgcatggatagaac

SEQ ID NO: 186007 - DNA, 30 bp, Artificial Sequence
  Synthetic oligonucleotide
cgtcagacggggatatccacgtcctagaac

SEQ ID NO: 186008 - DNA, 30 bp, Artificial Sequence
  Synthetic oligonucleotide
ctttctgaaactagcctgaccctctagaac

SEQ ID NO: 186009 - DNA, 30 bp, Artificial Sequence
  Synthetic oligonucleotide
ggcggcctgccactgggacggacgtagaac

SEQ ID NO: 186010 - DNA, 30 bp, Artificial Sequence
  Synthetic oligonucleotide
acccttgcggagcctttaaaggggtagaac

SEQ ID NO: 186011 - DNA, 29 bp, Artificial Sequence
  Synthetic oligonucleotide
cttgatttaatagaagaatcaccacgaac

SEQ ID NO: 186012 - DNA, 30 bp, Artificial Sequence
  Synthetic oligonucleotide
tgctcgttctatggtgatccctggacgaac

SEQ ID NO: 186013 - DNA, 30 bp, Artificial Sequence
  Synthetic oligonucleotide
ccccgagtcccaaaaattggcggtacgaac

SEQ ID NO: 186014 - DNA, 30 bp, Artificial Sequence
  Synthetic oligonucleotide
atggcattgaacgtccatgcgggtacgaac

SEQ ID NO: 186015 - DNA, 30 bp, Artificial Sequence
  Synthetic oligonucleotide
caagattggttataggatgcgttaccgaac

SEQ ID NO: 186016 - DNA, 30 bp, Artificial Sequence
  Synthetic oligonucleotide
tctactaactagacgccaaaatgcccgaac

SEQ ID NO: 186017 - DNA, 30 bp, Artificial Sequence
  Synthetic oligonucleotide
atcgactgtatggactagtcccagccgaac

SEQ ID NO: 186018 - DNA, 30 bp, Artificial Sequence
  Synthetic oligonucleotide
cctgttctgtggtagtaaatgatggcgaac

SEQ ID NO: 186019 - DNA, 30 bp, Artificial Sequence
  Synthetic oligonucleotide
atgcgtatctgctgaaatagtggtgcgaac

SEQ ID NO: 186020 - DNA, 30 bp, Artificial Sequence
  Synthetic oligonucleotide
caagggccgggcgactctaattttgcgaac

SEQ ID NO: 186021 - DNA, 30 bp, Artificial Sequence
  Synthetic oligonucleotide
atgaattatattaagtaaaacaaatcgaac

SEQ ID NO: 186022 - DNA, 30 bp, Artificial Sequence
  Synthetic oligonucleotide
gatcaactcacaacgagacgttcatcgaac

SEQ ID NO: 186023 - DNA, 30 bp, Artificial Sequence
  Synthetic oligonucleotide
gccaccaggcgcgatacctatctctcgaac

SEQ ID NO: 186024 - DNA, 30 bp, Artificial Sequence
  Synthetic oligonucleotide
ccctggagatttttatgttcatcgtcgaac

SEQ ID NO: 186025 - DNA, 30 bp, Artificial Sequence
  Synthetic oligonucleotide
gaagtgcaatgtcttgtgaatatgtcgaac

SEQ ID NO: 186026 - DNA, 30 bp, Artificial Sequence
  Synthetic oligonucleotide
atcggtgtacttattataaggcattcgaac

SEQ ID NO: 186027 - DNA, 30 bp, Artificial Sequence
  Synthetic oligonucleotide
ccttcctgtgggcaccataaccgaaggaac

SEQ ID NO: 186028 - DNA, 30 bp, Artificial Sequence
  Synthetic oligonucleotide
gctaaagagtctccacacagaatcaggaac

SEQ ID NO: 186029 - DNA, 30 bp, Artificial Sequence
  Synthetic oligonucleotide
gtgtgaatcgctcggttggtatcgaggaac

SEQ ID NO: 186030 - DNA, 30 bp, Artificial Sequence
  Synthetic oligonucleotide
cttcgttgaataggcccagatactaggaac

SEQ ID NO: 186031 - DNA, 30 bp, Artificial Sequence
  Synthetic oligonucleotide
actatggaactggacagtgtgaagcggaac

SEQ ID NO: 186032 - DNA, 30 bp, Artificial Sequence
  Synthetic oligonucleotide
acggtctagactcggcattcaatgcggaac

SEQ ID NO: 186033 - DNA, 30 bp, Artificial Sequence
  Synthetic oligonucleotide
tggaaatcactttgaagtttaagtcggaac

SEQ ID NO: 186034 - DNA, 30 bp, Artificial Sequence
  Synthetic oligonucleotide
aaacgattgctattagggctaatagggaac

SEQ ID NO: 186035 - DNA, 30 bp, Artificial Sequence
  Synthetic oligonucleotide
gcaagagtggggaggaaacccagcgggaac

SEQ ID NO: 186036 - DNA, 30 bp, Artificial Sequence
  Synthetic oligonucleotide
cttgcttgagtccaacgttaccgcgggaac

SEQ ID NO: 186037 - DNA, 30 bp, Artificial Sequence
  Synthetic oligonucleotide
gggggagacagcgctggaccgacggggaac

SEQ ID NO: 186038 - DNA, 30 bp, Artificial Sequence
  Synthetic oligonucleotide
tggtgaggaacgacccacacggctgggaac

SEQ ID NO: 186039 - DNA, 30 bp, Artificial Sequence
  Synthetic oligonucleotide
aagagcctaaggggttgcgattactggaac

SEQ ID NO: 186040 - DNA, 30 bp, Artificial Sequence
  Synthetic oligonucleotide
ctgggaagaggagggtctctaaggtggaac

SEQ ID NO: 186041 - DNA, 30 bp, Artificial Sequence
  Synthetic oligonucleotide
ggtcactggagatatattcaacggtggaac

SEQ ID NO: 186042 - DNA, 30 bp, Artificial Sequence
  Synthetic oligonucleotide
aagacgacttgattgtaaatagggtggaac

SEQ ID NO: 186043 - DNA, 30 bp, Artificial Sequence
  Synthetic oligonucleotide
caaccacggtaaaaaagcggggtgtggaac

SEQ ID NO: 186044 - DNA, 30 bp, Artificial Sequence
  Synthetic oligonucleotide
gtcttaagtacgatcctgggcttgtggaac

SEQ ID NO: 186045 - DNA, 30 bp, Artificial Sequence
  Synthetic oligonucleotide
taatcatgggtccgtagaggcgcttggaac

SEQ ID NO: 186046 - DNA, 30 bp, Artificial Sequence
  Synthetic oligonucleotide
catgcgtgaagaaaaaagcgcgtttggaac

SEQ ID NO: 186047 - DNA, 30 bp, Artificial Sequence
  Synthetic oligonucleotide
tcgtacgattgctttaactccaacatgaac

SEQ ID NO: 186048 - DNA, 30 bp, Artificial Sequence
  Synthetic oligonucleotide
aaggagagtgtgcggccggtagggatgaac

SEQ ID NO: 186049 - DNA, 30 bp, Artificial Sequence
  Synthetic oligonucleotide
gcctattaggaagcttttagtcgtctgaac

SEQ ID NO: 186050 - DNA, 30 bp, Artificial Sequence
  Synthetic oligonucleotide
ataaataagcattcgacactcgaagtgaac

SEQ ID NO: 186051 - DNA, 30 bp, Artificial Sequence
  Synthetic oligonucleotide
gtgtgacgagaaatatgtgcattagtgaac

SEQ ID NO: 186052 - DNA, 30 bp, Artificial Sequence
  Synthetic oligonucleotide
tctcaaacagtgtttaaaatagaattgaac

SEQ ID NO: 186053 - DNA, 30 bp, Artificial Sequence
  Synthetic oligonucleotide
ttagcagagtctgccacttgttcattgaac

SEQ ID NO: 186054 - DNA, 30 bp, Artificial Sequence
  Synthetic oligonucleotide
atcgacatgtttaagttttagtgattgaac

SEQ ID NO: 186055 - DNA, 30 bp, Artificial Sequence
  Synthetic oligonucleotide
gaaaaatcacatgacaacagagatttgaac

SEQ ID NO: 186056 - DNA, 30 bp, Artificial Sequence
  Synthetic oligonucleotide
gaaccccaagactgagcaactcccaataac

SEQ ID NO: 186057 - DNA, 30 bp, Artificial Sequence
  Synthetic oligonucleotide
atgcgacaagagtggattgcgcagaataac

SEQ ID NO: 186058 - DNA, 30 bp, Artificial Sequence
  Synthetic oligonucleotide
caagctcaacccggcgtacggaggaataac

SEQ ID NO: 186059 - DNA, 30 bp, Artificial Sequence
  Synthetic oligonucleotide
atgaggaggcgcctagttccgaataataac

SEQ ID NO: 186060 - DNA, 30 bp, Artificial Sequence
  Synthetic oligonucleotide
aaaaacgcaatgagttgcgcttataataac

SEQ ID NO: 186061 - DNA, 30 bp, Artificial Sequence
  Synthetic oligonucleotide
tcgtcatcagtatgatcgtctattaataac

SEQ ID NO: 186062 - DNA, 30 bp, Artificial Sequence
  Synthetic oligonucleotide
atcggtttcagactggagattacccataac

SEQ ID NO: 186063 - DNA, 30 bp, Artificial Sequence
  Synthetic oligonucleotide
cgcacttaccgaccgatagaccagcataac

SEQ ID NO: 186064 - DNA, 30 bp, Artificial Sequence
  Synthetic oligonucleotide
ggatcagtttgcacatagggatcgcataac

SEQ ID NO: 186065 - DNA, 30 bp, Artificial Sequence
  Synthetic oligonucleotide
gctccgacttgattaatggagcttcataac

SEQ ID NO: 186066 - DNA, 30 bp, Artificial Sequence
  Synthetic oligonucleotide
cagatcccacgggaaagaagttttcataac

SEQ ID NO: 186067 - DNA, 30 bp, Artificial Sequence
  Synthetic oligonucleotide
tcgtttaggcctaacgaaaaagaagataac

SEQ ID NO: 186068 - DNA, 30 bp, Artificial Sequence
  Synthetic oligonucleotide
agttccaaaggggtgtgattctcagataac

SEQ ID NO: 186069 - DNA, 30 bp, Artificial Sequence
  Synthetic oligonucleotide
agttataatggcgaccacctcgacgataac

SEQ ID NO: 186070 - DNA, 30 bp, Artificial Sequence
  Synthetic oligonucleotide
ggggaccaagagagtctttatgcggataac

SEQ ID NO: 186071 - DNA, 30 bp, Artificial Sequence
  Synthetic oligonucleotide
gttaaaacaggatacgccaagcttgataac

SEQ ID NO: 186072 - DNA, 30 bp, Artificial Sequence
  Synthetic oligonucleotide
cgaatccaggagtgataacaaccatataac

SEQ ID NO: 186073 - DNA, 30 bp, Artificial Sequence
  Synthetic oligonucleotide
aagaacgtgtttcggcacgtgcaaactaac

SEQ ID NO: 186074 - DNA, 30 bp, Artificial Sequence
  Synthetic oligonucleotide
tcggtaacacaaccgggtgatattactaac

SEQ ID NO: 186075 - DNA, 30 bp, Artificial Sequence
  Synthetic oligonucleotide
tgaaagataaacaactgatgcggccctaac

SEQ ID NO: 186076 - DNA, 30 bp, Artificial Sequence
  Synthetic oligonucleotide
gaagctaaaaactgccggagagagcctaac

SEQ ID NO: 186077 - DNA, 30 bp, Artificial Sequence
  Synthetic oligonucleotide
aactcccatggaatcaataagcgcgctaac

SEQ ID NO: 186078 - DNA, 30 bp, Artificial Sequence
  Synthetic oligonucleotide
catgcgatttttatagcgagtacggctaac

SEQ ID NO: 186079 - DNA, 30 bp, Artificial Sequence
  Synthetic oligonucleotide
tgaactacggccgcttacaacggggctaac

SEQ ID NO: 186080 - DNA, 30 bp, Artificial Sequence
  Synthetic oligonucleotide
tagtccggggcatgcccttcagttgctaac

SEQ ID NO: 186081 - DNA, 30 bp, Artificial Sequence
  Synthetic oligonucleotide
cgcacggatggtgggacggacagatctaac

SEQ ID NO: 186082 - DNA, 30 bp, Artificial Sequence
  Synthetic oligonucleotide
aagcacacctccaggcatagatgctctaac

SEQ ID NO: 186083 - DNA, 30 bp, Artificial Sequence
  Synthetic oligonucleotide
taccgggatgcgcgctcagcggcgtctaac

SEQ ID NO: 186084 - DNA, 30 bp, Artificial Sequence
  Synthetic oligonucleotide
aagggttgtgccaagagctcagattctaac

SEQ ID NO: 186085 - DNA, 30 bp, Artificial Sequence
  Synthetic oligonucleotide
attacaaatccatagaggaattgcagtaac

SEQ ID NO: 186086 - DNA, 30 bp, Artificial Sequence
  Synthetic oligonucleotide
tactccttacttgcgaaacaaatgcgtaac

SEQ ID NO: 186087 - DNA, 30 bp, Artificial Sequence
  Synthetic oligonucleotide
ccgactgttgttcaagcggaaggaggtaac

SEQ ID NO: 186088 - DNA, 30 bp, Artificial Sequence
  Synthetic oligonucleotide
agagcggacagccggaaaatcgccggtaac

SEQ ID NO: 186089 - DNA, 30 bp, Artificial Sequence
  Synthetic oligonucleotide
ccgactcgtcgattgaagtacggtggtaac

SEQ ID NO: 186090 - DNA, 30 bp, Artificial Sequence
  Synthetic oligonucleotide
aagctcggaatcatagggtcggaatgtaac

SEQ ID NO: 186091 - DNA, 30 bp, Artificial Sequence
  Synthetic oligonucleotide
aactacgaaaactggggcgcacactgtaac

SEQ ID NO: 186092 - DNA, 30 bp, Artificial Sequence
  Synthetic oligonucleotide
gtagtgcgactgtagagagttgggattaac

SEQ ID NO: 186093 - DNA, 30 bp, Artificial Sequence
  Synthetic oligonucleotide
gtgagatgtctatgaccctagacacttaac

SEQ ID NO: 186094 - DNA, 30 bp, Artificial Sequence
  Synthetic oligonucleotide
gctaaattctcacgttcaactaaccttaac

SEQ ID NO: 186095 - DNA, 30 bp, Artificial Sequence
  Synthetic oligonucleotide
gccctaatggaaagactttgagcgcttaac

SEQ ID NO: 186096 - DNA, 30 bp, Artificial Sequence
  Synthetic oligonucleotide
gtcgacaggacattatgtaatgtagttaac

SEQ ID NO: 186097 - DNA, 30 bp, Artificial Sequence
  Synthetic oligonucleotide
aatagtttttgagtcaaatggaacgttaac

SEQ ID NO: 186098 - DNA, 30 bp, Artificial Sequence
  Synthetic oligonucleotide
gtaccagaaatagaccaattctaggttaac

SEQ ID NO: 186099 - DNA, 30 bp, Artificial Sequence
  Synthetic oligonucleotide
gcgcaccaatacgctcgcatggttgttaac

SEQ ID NO: 186100 - DNA, 30 bp, Artificial Sequence
  Synthetic oligonucleotide
ggaccgtagagatgaaacgtgtaatttaac

SEQ ID NO: 186101 - DNA, 30 bp, Artificial Sequence
  Synthetic oligonucleotide
gcttgcacaagataaccggagctatttaac

SEQ ID NO: 186102 - DNA, 30 bp, Artificial Sequence
  Synthetic oligonucleotide
ggtttaacgcaaaaccgtcggacgtttaac

SEQ ID NO: 186103 - DNA, 30 bp, Artificial Sequence
  Synthetic oligonucleotide
tacgaatgattttagcctagtctgtttaac

SEQ ID NO: 186104 - DNA, 30 bp, Artificial Sequence
  Synthetic oligonucleotide
ctagctcgtccaataacatcctattttaac

SEQ ID NO: 186105 - DNA, 30 bp, Artificial Sequence
  Synthetic oligonucleotide
tgttgtgaagataacccggtacgttttaac

SEQ ID NO: 186106 - DNA, 34 bp, Artificial Sequence
  Synthetic oligonucleotide
gatactacaccaccacgtgtccatcagaaaacac

SEQ ID NO: 186107 - DNA, 30 bp, Artificial Sequence
  Synthetic oligonucleotide
acgcaatcgtaggtcagtactaacaaacac

SEQ ID NO: 186108 - DNA, 30 bp, Artificial Sequence
  Synthetic oligonucleotide
caaggaccaactgattagcaccggcaacac

SEQ ID NO: 186109 - DNA, 30 bp, Artificial Sequence
  Synthetic oligonucleotide
acatgtagccacggacatctcccagaacac

SEQ ID NO: 186110 - DNA, 30 bp, Artificial Sequence
  Synthetic oligonucleotide
atgaccagcgattgaagtgtagtagaacac

SEQ ID NO: 186111 - DNA, 30 bp, Artificial Sequence
  Synthetic oligonucleotide
atcaatgccaggtcgttagccaaggaacac

SEQ ID NO: 186112 - DNA, 30 bp, Artificial Sequence
  Synthetic oligonucleotide
gctcatgaagcgcgaccaaagcaataacac

SEQ ID NO: 186113 - DNA, 30 bp, Artificial Sequence
  Synthetic oligonucleotide
agtagaatcccacaaacgtacgaataacac

SEQ ID NO: 186114 - DNA, 30 bp, Artificial Sequence
  Synthetic oligonucleotide
caacgaatgcggtcgagtgtcggctaacac

SEQ ID NO: 186115 - DNA, 30 bp, Artificial Sequence
  Synthetic oligonucleotide
gatgggttcccagcttatgttcggtaacac

SEQ ID NO: 186116 - DNA, 30 bp, Artificial Sequence
  Synthetic oligonucleotide
ggtatagagggatacagtttaaattaacac

SEQ ID NO: 186117 - DNA, 30 bp, Artificial Sequence
  Synthetic oligonucleotide
tgccgacgaacgcaggtccaattgacacac

SEQ ID NO: 186118 - DNA, 30 bp, Artificial Sequence
  Synthetic oligonucleotide
ttcggcttggtagctatatactctacacac

SEQ ID NO: 186119 - DNA, 30 bp, Artificial Sequence
  Synthetic oligonucleotide
aagccgtgcgcctcgtagaattaaccacac

SEQ ID NO: 186120 - DNA, 30 bp, Artificial Sequence
  Synthetic oligonucleotide
cttgaaaatgccagaaactaggcaccacac

SEQ ID NO: 186121 - DNA, 30 bp, Artificial Sequence
  Synthetic oligonucleotide
taccaccctaattatgagactcgaccacac

SEQ ID NO: 186122 - DNA, 30 bp, Artificial Sequence
  Synthetic oligonucleotide
acaatggtctagagcggcgttagtccacac

SEQ ID NO: 186123 - DNA, 30 bp, Artificial Sequence
  Synthetic oligonucleotide
cgaggtgttaggagggtggtatgtccacac

SEQ ID NO: 186124 - DNA, 30 bp, Artificial Sequence
  Synthetic oligonucleotide
tttgctgggaaagactgccagatagcacac

SEQ ID NO: 186125 - DNA, 30 bp, Artificial Sequence
  Synthetic oligonucleotide
ttaagcatgacggtcgctcccttagcacac

SEQ ID NO: 186126 - DNA, 30 bp, Artificial Sequence
  Synthetic oligonucleotide
gcatgtgttcaagatatatagacggcacac

SEQ ID NO: 186127 - DNA, 30 bp, Artificial Sequence
  Synthetic oligonucleotide
actacaccaagaattcacgatggctcacac

SEQ ID NO: 186128 - DNA, 30 bp, Artificial Sequence
  Synthetic oligonucleotide
aattggtagggttgcgggggcatctcacac

SEQ ID NO: 186129 - DNA, 30 bp, Artificial Sequence
  Synthetic oligonucleotide
tttagacttgaagacaggatagccagacac

SEQ ID NO: 186130 - DNA, 30 bp, Artificial Sequence
  Synthetic oligonucleotide
gtagaaagtactgggactcgggcgagacac

SEQ ID NO: 186131 - DNA, 30 bp, Artificial Sequence
  Synthetic oligonucleotide
gagacccgataaaaggcctccttgagacac

SEQ ID NO: 186132 - DNA, 30 bp, Artificial Sequence
  Synthetic oligonucleotide
cacaaacttaaaaacaaccggggtagacac

SEQ ID NO: 186133 - DNA, 30 bp, Artificial Sequence
  Synthetic oligonucleotide
ggagttaaggcccccttactaacgcgacac

SEQ ID NO: 186134 - DNA, 30 bp, Artificial Sequence
  Synthetic oligonucleotide
ggagtgcaatgcgtggacagtcggcgacac

SEQ ID NO: 186135 - DNA, 30 bp, Artificial Sequence
  Synthetic oligonucleotide
gcggttgttgagctcgctgtctaaggacac

SEQ ID NO: 186136 - DNA, 30 bp, Artificial Sequence
  Synthetic oligonucleotide
tatagagagtgactgatgtatccaggacac

SEQ ID NO: 186137 - DNA, 30 bp, Artificial Sequence
  Synthetic oligonucleotide
agagactactacgccaggatgtcaggacac

SEQ ID NO: 186138 - DNA, 30 bp, Artificial Sequence
  Synthetic oligonucleotide
acgtttgcaacggatgcacttagaggacac

SEQ ID NO: 186139 - DNA, 30 bp, Artificial Sequence
  Synthetic oligonucleotide
tccaatagaataattcgcaagtgaggacac

SEQ ID NO: 186140 - DNA, 30 bp, Artificial Sequence
  Synthetic oligonucleotide
aaccacaagggagggtggatgcagggacac

SEQ ID NO: 186141 - DNA, 30 bp, Artificial Sequence
  Synthetic oligonucleotide
tgagtacttggctacaaagcatggggacac

SEQ ID NO: 186142 - DNA, 30 bp, Artificial Sequence
  Synthetic oligonucleotide
tcagacaccaggtaaaacttcactggacac

SEQ ID NO: 186143 - DNA, 30 bp, Artificial Sequence
  Synthetic oligonucleotide
gctgaacggaacactgactccacatgacac

SEQ ID NO: 186144 - DNA, 30 bp, Artificial Sequence
  Synthetic oligonucleotide
gtgcattcgagaaagcaaagctgctgacac

SEQ ID NO: 186145 - DNA, 30 bp, Artificial Sequence
  Synthetic oligonucleotide
ccttgaaccccatctgcgatcctctgacac

SEQ ID NO: 186146 - DNA, 30 bp, Artificial Sequence
  Synthetic oligonucleotide
cactagggattgaatgaggcgacaatacac

SEQ ID NO: 186147 - DNA, 30 bp, Artificial Sequence
  Synthetic oligonucleotide
cttaaacaccatcggttcgcgctaatacac

SEQ ID NO: 186148 - DNA, 30 bp, Artificial Sequence
  Synthetic oligonucleotide
ttcaagcgacgaaacaaattggccatacac

SEQ ID NO: 186149 - DNA, 30 bp, Artificial Sequence
  Synthetic oligonucleotide
aagcttggcaagaactgacccgagatacac

SEQ ID NO: 186150 - DNA, 30 bp, Artificial Sequence
  Synthetic oligonucleotide
gaagagagcttccgtgctacgtggatacac

SEQ ID NO: 186151 - DNA, 30 bp, Artificial Sequence
  Synthetic oligonucleotide
tgccaccgtgcgcagctcggagttatacac

SEQ ID NO: 186152 - DNA, 30 bp, Artificial Sequence
  Synthetic oligonucleotide
cgcgtgcctgaagtccggctcaaactacac

SEQ ID NO: 186153 - DNA, 30 bp, Artificial Sequence
  Synthetic oligonucleotide
ccagggtcacaacgcggtgactgactacac

SEQ ID NO: 186154 - DNA, 30 bp, Artificial Sequence
  Synthetic oligonucleotide
gacgtgaccagtcgcatggattatctacac

SEQ ID NO: 186155 - DNA, 30 bp, Artificial Sequence
  Synthetic oligonucleotide
cccgaagttatggtctaaacgactctacac

SEQ ID NO: 186156 - DNA, 30 bp, Artificial Sequence
  Synthetic oligonucleotide
aaacagtcgactatccgactctcggtacac

SEQ ID NO: 186157 - DNA, 30 bp, Artificial Sequence
  Synthetic oligonucleotide
tgaccggatgcaccccttgtatttgtacac

SEQ ID NO: 186158 - DNA, 30 bp, Artificial Sequence
  Synthetic oligonucleotide
accgcggctagatgcacgaccaaattacac

SEQ ID NO: 186159 - DNA, 30 bp, Artificial Sequence
  Synthetic oligonucleotide
acggtagatcgcaatcaccgctgattacac

SEQ ID NO: 186160 - DNA, 30 bp, Artificial Sequence
  Synthetic oligonucleotide
atgatgaaaaaacttgatggactcttacac

SEQ ID NO: 186161 - DNA, 30 bp, Artificial Sequence
  Synthetic oligonucleotide
gaaaactccagatgcgggagaaagttacac

SEQ ID NO: 186162 - DNA, 30 bp, Artificial Sequence
  Synthetic oligonucleotide
aagaggagaccctcaatggcaagcaaccac

SEQ ID NO: 186163 - DNA, 30 bp, Artificial Sequence
  Synthetic oligonucleotide
agactggtatccgtgtgcggcatcaaccac

SEQ ID NO: 186164 - DNA, 30 bp, Artificial Sequence
  Synthetic oligonucleotide
acgttcaccctttaatctcagacgaaccac

SEQ ID NO: 186165 - DNA, 30 bp, Artificial Sequence
  Synthetic oligonucleotide
cccaaaataaattgaagagttgtgaaccac

SEQ ID NO: 186166 - DNA, 30 bp, Artificial Sequence
  Synthetic oligonucleotide
cagcacggtgaggttgaaccctagcaccac

SEQ ID NO: 186167 - DNA, 30 bp, Artificial Sequence
  Synthetic oligonucleotide
atgctccctactatggtaggagcgcaccac

SEQ ID NO: 186168 - DNA, 30 bp, Artificial Sequence
  Synthetic oligonucleotide
agtagacaacgttcgatcacggttcaccac

SEQ ID NO: 186169 - DNA, 30 bp, Artificial Sequence
  Synthetic oligonucleotide
gtattttcaaagcagggttgggccgaccac

SEQ ID NO: 186170 - DNA, 30 bp, Artificial Sequence
  Synthetic oligonucleotide
tgctcagggatggagaccataaaggaccac

SEQ ID NO: 186171 - DNA, 30 bp, Artificial Sequence
  Synthetic oligonucleotide
cgtagagaggagggagtgtgcgaataccac

SEQ ID NO: 186172 - DNA, 30 bp, Artificial Sequence
  Synthetic oligonucleotide
gcagtcagacttgacaacacacgataccac

SEQ ID NO: 186173 - DNA, 30 bp, Artificial Sequence
  Synthetic oligonucleotide
ttgtactgcaaacataagcatttcacccac

SEQ ID NO: 186174 - DNA, 30 bp, Artificial Sequence
  Synthetic oligonucleotide
cataaacttagctttagtttcgttacccac

SEQ ID NO: 186175 - DNA, 30 bp, Artificial Sequence
  Synthetic oligonucleotide
acaggggcattacagatggactgcccccac

SEQ ID NO: 186176 - DNA, 30 bp, Artificial Sequence
  Synthetic oligonucleotide
tggttccgggcgcccgaagcacagccccac

SEQ ID NO: 186177 - DNA, 30 bp, Artificial Sequence
  Synthetic oligonucleotide
gcaatcatgactaaaacatgggctccccac

SEQ ID NO: 186178 - DNA, 30 bp, Artificial Sequence
  Synthetic oligonucleotide
cgacaagattgagagcacgactgcgcccac

SEQ ID NO: 186179 - DNA, 30 bp, Artificial Sequence
  Synthetic oligonucleotide
gtgtcatgacccgcggaagcgccatcccac

SEQ ID NO: 186180 - DNA, 30 bp, Artificial Sequence
  Synthetic oligonucleotide
caagtgagatttatatggtcactatcccac

SEQ ID NO: 186181 - DNA, 30 bp, Artificial Sequence
  Synthetic oligonucleotide
actgaacatgattttcgaatctactcccac

SEQ ID NO: 186182 - DNA, 30 bp, Artificial Sequence
  Synthetic oligonucleotide
gagacaacgccagaatactttgagtcccac

SEQ ID NO: 186183 - DNA, 30 bp, Artificial Sequence
  Synthetic oligonucleotide
gtcttaccttgagtcccgaacccgtcccac

SEQ ID NO: 186184 - DNA, 31 bp, Artificial Sequence
  Synthetic oligonucleotide
tacacaatcatttcggagataaaggtcccac

SEQ ID NO: 186185 - DNA, 30 bp, Artificial Sequence
  Synthetic oligonucleotide
tcgcacggagcgaattcgcgtacttcccac

SEQ ID NO: 186186 - DNA, 30 bp, Artificial Sequence
  Synthetic oligonucleotide
tgccggacagcgcagtacaactgttcccac

SEQ ID NO: 186187 - DNA, 30 bp, Artificial Sequence
  Synthetic oligonucleotide
gtaactgtcatctcgtgaataaaaagccac

SEQ ID NO: 186188 - DNA, 30 bp, Artificial Sequence
  Synthetic oligonucleotide
gatagttaagtgagcacttcaggaagccac

SEQ ID NO: 186189 - DNA, 30 bp, Artificial Sequence
  Synthetic oligonucleotide
cacacattatgccagaaatttcccagccac

SEQ ID NO: 186190 - DNA, 30 bp, Artificial Sequence
  Synthetic oligonucleotide
tcaagcatgagggagtcccggctcagccac

SEQ ID NO: 186191 - DNA, 30 bp, Artificial Sequence
  Synthetic oligonucleotide
atgaagtgttaagacagctcggtgagccac

SEQ ID NO: 186192 - DNA, 30 bp, Artificial Sequence
  Synthetic oligonucleotide
tgaggtcatatttagggagacaatagccac

SEQ ID NO: 186193 - DNA, 30 bp, Artificial Sequence
  Synthetic oligonucleotide
catgatatctctaatgggtcatggcgccac

SEQ ID NO: 186194 - DNA, 30 bp, Artificial Sequence
  Synthetic oligonucleotide
cgcacgcacagataaagctaagatcgccac

SEQ ID NO: 186195 - DNA, 30 bp, Artificial Sequence
  Synthetic oligonucleotide
agtggtccaagcgataacgggtaaggccac

SEQ ID NO: 186196 - DNA, 30 bp, Artificial Sequence
  Synthetic oligonucleotide
gacgacggttacattcgtgctcccggccac

SEQ ID NO: 186197 - DNA, 30 bp, Artificial Sequence
  Synthetic oligonucleotide
cactgtggactctgtctgccgcatggccac

SEQ ID NO: 186198 - DNA, 30 bp, Artificial Sequence
  Synthetic oligonucleotide
gtatgtcaaggggacaattaagctggccac

SEQ ID NO: 186199 - DNA, 30 bp, Artificial Sequence
  Synthetic oligonucleotide
tgataacctacggcaactttgtctggccac

SEQ ID NO: 186200 - DNA, 30 bp, Artificial Sequence
  Synthetic oligonucleotide
taaaaagttgcctcagaatgatcctgccac

SEQ ID NO: 186201 - DNA, 30 bp, Artificial Sequence
  Synthetic oligonucleotide
gggaaagcactcaatgcaggctcctgccac

SEQ ID NO: 186202 - DNA, 30 bp, Artificial Sequence
  Synthetic oligonucleotide
ggcgcaaaccggatagcgactgggtgccac

SEQ ID NO: 186203 - DNA, 30 bp, Artificial Sequence
  Synthetic oligonucleotide
aatactgatcttgcttatagaggaatccac

SEQ ID NO: 186204 - DNA, 30 bp, Artificial Sequence
  Synthetic oligonucleotide
ggtaggcatcggaaaagggtcgacatccac

SEQ ID NO: 186205 - DNA, 30 bp, Artificial Sequence
  Synthetic oligonucleotide
gattaaaatcacaagtatcggaccatccac

SEQ ID NO: 186206 - DNA, 30 bp, Artificial Sequence
  Synthetic oligonucleotide
ccggcgtatctgaggaaattggggatccac

SEQ ID NO: 186207 - DNA, 30 bp, Artificial Sequence
  Synthetic oligonucleotide
gcaaatgggttacaggtggaatgactccac

SEQ ID NO: 186208 - DNA, 30 bp, Artificial Sequence
  Synthetic oligonucleotide
gcgtgaaagccgtgatcgttccccctccac

SEQ ID NO: 186209 - DNA, 30 bp, Artificial Sequence
  Synthetic oligonucleotide
agacgatgttctttttcggagaaagtccac

SEQ ID NO: 186210 - DNA, 30 bp, Artificial Sequence
  Synthetic oligonucleotide
ttggactaagaaataggcatacctgtccac

SEQ ID NO: 186211 - DNA, 30 bp, Artificial Sequence
  Synthetic oligonucleotide
atgttggatgaactggcctgcgttgtccac

SEQ ID NO: 186212 - DNA, 30 bp, Artificial Sequence
  Synthetic oligonucleotide
atagcaacccgaagtcagaaaagcttccac

SEQ ID NO: 186213 - DNA, 30 bp, Artificial Sequence
  Synthetic oligonucleotide
ctaagaagacgtcaaaataaaccgttccac

SEQ ID NO: 186214 - DNA, 30 bp, Artificial Sequence
  Synthetic oligonucleotide
agcgtgaataggaaggaagccgtgttccac

SEQ ID NO: 186215 - DNA, 30 bp, Artificial Sequence
  Synthetic oligonucleotide
taaaaacagggttgctgactttacaagcac

SEQ ID NO: 186216 - DNA, 30 bp, Artificial Sequence
  Synthetic oligonucleotide
agacatcgacaaagcttagtagttaagcac

SEQ ID NO: 186217 - DNA, 30 bp, Artificial Sequence
  Synthetic oligonucleotide
gtcaaaggtgcacttgctaatgttaagcac

SEQ ID NO: 186218 - DNA, 30 bp, Artificial Sequence
  Synthetic oligonucleotide
ttgcaaatagagcgtcattatgcacagcac

SEQ ID NO: 186219 - DNA, 30 bp, Artificial Sequence
  Synthetic oligonucleotide
acctttgaataccagaggcttcgacagcac

SEQ ID NO: 186220 - DNA, 30 bp, Artificial Sequence
  Synthetic oligonucleotide
cgagaaaacctcgcagctcacacgcagcac

SEQ ID NO: 186221 - DNA, 30 bp, Artificial Sequence
  Synthetic oligonucleotide
gatcaacctcggactcgtagatggcagcac

SEQ ID NO: 186222 - DNA, 30 bp, Artificial Sequence
  Synthetic oligonucleotide
atgcaatgtggcaatattaagcccgagcac

SEQ ID NO: 186223 - DNA, 30 bp, Artificial Sequence
  Synthetic oligonucleotide
ctaggctgcaagtatgtttgcttcgagcac

SEQ ID NO: 186224 - DNA, 30 bp, Artificial Sequence
  Synthetic oligonucleotide
gggggagaagggttagcgacataggagcac

SEQ ID NO: 186225 - DNA, 30 bp, Artificial Sequence
  Synthetic oligonucleotide
ataaggtttcagccagcggacgatgagcac

SEQ ID NO: 186226 - DNA, 30 bp, Artificial Sequence
  Synthetic oligonucleotide
aggaagtacattaaaactctagttgagcac

SEQ ID NO: 186227 - DNA, 30 bp, Artificial Sequence
  Synthetic oligonucleotide
gaagatcggcacaatgttatcgactagcac

SEQ ID NO: 186228 - DNA, 30 bp, Artificial Sequence
  Synthetic oligonucleotide
cctgcggattctgtctaatgtcattagcac

SEQ ID NO: 186229 - DNA, 30 bp, Artificial Sequence
  Synthetic oligonucleotide
ccacggtcagtttaccgagtcccttagcac

SEQ ID NO: 186230 - DNA, 30 bp, Artificial Sequence
  Synthetic oligonucleotide
tcggatagcaggattggtgccagaacgcac

SEQ ID NO: 186231 - DNA, 30 bp, Artificial Sequence
  Synthetic oligonucleotide
tgaaaattgctcagcgagttacgaacgcac

SEQ ID NO: 186232 - DNA, 30 bp, Artificial Sequence
  Synthetic oligonucleotide
cggagaggtagtctgctgtaaatcacgcac

SEQ ID NO: 186233 - DNA, 30 bp, Artificial Sequence
  Synthetic oligonucleotide
acggccaaggttggaatagcacctacgcac

SEQ ID NO: 186234 - DNA, 30 bp, Artificial Sequence
  Synthetic oligonucleotide
ggctttcgtaaacgcccttagagtacgcac

SEQ ID NO: 186235 - DNA, 30 bp, Artificial Sequence
  Synthetic oligonucleotide
cagggggtgcacgctcacaggtagccgcac

SEQ ID NO: 186236 - DNA, 30 bp, Artificial Sequence
  Synthetic oligonucleotide
tggcgagttatatagactaacgttccgcac

SEQ ID NO: 186237 - DNA, 30 bp, Artificial Sequence
  Synthetic oligonucleotide
cagggtcgctcggtctgataaatagcgcac

SEQ ID NO: 186238 - DNA, 30 bp, Artificial Sequence
  Synthetic oligonucleotide
cacgacagacgtaggccacaagtggcgcac

SEQ ID NO: 186239 - DNA, 30 bp, Artificial Sequence
  Synthetic oligonucleotide
ggtgacaatggtacatatagtcttgcgcac

SEQ ID NO: 186240 - DNA, 30 bp, Artificial Sequence
  Synthetic oligonucleotide
tgcttgaacgcgtcactctccgactcgcac

SEQ ID NO: 186241 - DNA, 30 bp, Artificial Sequence
  Synthetic oligonucleotide
aggactggtagacgcgacagtacgtcgcac

SEQ ID NO: 186242 - DNA, 30 bp, Artificial Sequence
  Synthetic oligonucleotide
acagaggttagtctgtattatcagaggcac

SEQ ID NO: 186243 - DNA, 30 bp, Artificial Sequence
  Synthetic oligonucleotide
atagaaagaggagctttgcgctggaggcac

SEQ ID NO: 186244 - DNA, 30 bp, Artificial Sequence
  Synthetic oligonucleotide
tggctaaatgcatgggttcaggaccggcac

SEQ ID NO: 186245 - DNA, 30 bp, Artificial Sequence
  Synthetic oligonucleotide
atgggatgcccgtccacaatagcggggcac

SEQ ID NO: 186246 - DNA, 30 bp, Artificial Sequence
  Synthetic oligonucleotide
ttacacagattggggaaattatcggggcac

SEQ ID NO: 186247 - DNA, 30 bp, Artificial Sequence
  Synthetic oligonucleotide
tagcgtttaacaaaccctcaaactgggcac

SEQ ID NO: 186248 - DNA, 30 bp, Artificial Sequence
  Synthetic oligonucleotide
ggggttaagtcgggcaagaaatctgggcac

SEQ ID NO: 186249 - DNA, 30 bp, Artificial Sequence
  Synthetic oligonucleotide
tgccttgaatacacacctttacttgggcac

SEQ ID NO: 186250 - DNA, 30 bp, Artificial Sequence
  Synthetic oligonucleotide
cttgctattgctagccgtgatgtatggcac

SEQ ID NO: 186251 - DNA, 30 bp, Artificial Sequence
  Synthetic oligonucleotide
cgtaagagggcaggttaaaaagactggcac

SEQ ID NO: 186252 - DNA, 30 bp, Artificial Sequence
  Synthetic oligonucleotide
tgggaggttcggacctccaatggctggcac

SEQ ID NO: 186253 - DNA, 30 bp, Artificial Sequence
  Synthetic oligonucleotide
cattcttagctcttacaatgatagtggcac

SEQ ID NO: 186254 - DNA, 30 bp, Artificial Sequence
  Synthetic oligonucleotide
cctgaagtggcagcactgcggaattggcac

SEQ ID NO: 186255 - DNA, 30 bp, Artificial Sequence
  Synthetic oligonucleotide
gcggggcaaaggatttatcatcgcatgcac

SEQ ID NO: 186256 - DNA, 30 bp, Artificial Sequence
  Synthetic oligonucleotide
ctggcgaagggatatggacgggatatgcac

SEQ ID NO: 186257 - DNA, 30 bp, Artificial Sequence
  Synthetic oligonucleotide
tgtctcacggatcgactccgtactatgcac

SEQ ID NO: 186258 - DNA, 30 bp, Artificial Sequence
  Synthetic oligonucleotide
gcggtcaaagagctccaccaatgactgcac

SEQ ID NO: 186259 - DNA, 30 bp, Artificial Sequence
  Synthetic oligonucleotide
tcgagagaagagcttacacacacgctgcac

SEQ ID NO: 186260 - DNA, 30 bp, Artificial Sequence
  Synthetic oligonucleotide
ccccagatacgggattaaagcgtgctgcac

SEQ ID NO: 186261 - DNA, 30 bp, Artificial Sequence
  Synthetic oligonucleotide
cctcagagcagggagtaatgaagtctgcac

SEQ ID NO: 186262 - DNA, 30 bp, Artificial Sequence
  Synthetic oligonucleotide
actttagcagcatccataacgcacgtgcac

SEQ ID NO: 186263 - DNA, 30 bp, Artificial Sequence
  Synthetic oligonucleotide
aaagtacgaacacgagcagcgcacgtgcac

SEQ ID NO: 186264 - DNA, 30 bp, Artificial Sequence
  Synthetic oligonucleotide
ggtatatggtcaggtatctcttgcttgcac

SEQ ID NO: 186265 - DNA, 30 bp, Artificial Sequence
  Synthetic oligonucleotide
aagactatctagcactgcaaccatttgcac

SEQ ID NO: 186266 - DNA, 30 bp, Artificial Sequence
  Synthetic oligonucleotide
ccatcattcatgggggaactaccaaatcac

SEQ ID NO: 186267 - DNA, 30 bp, Artificial Sequence
  Synthetic oligonucleotide
tgcacatgggtgcaagccactccaaatcac

SEQ ID NO: 186268 - DNA, 30 bp, Artificial Sequence
  Synthetic oligonucleotide
ggtgcgggggatgtaggttgcagaaatcac

SEQ ID NO: 186269 - DNA, 30 bp, Artificial Sequence
  Synthetic oligonucleotide
aagtacgttcggcctcggggaaccaatcac

SEQ ID NO: 186270 - DNA, 30 bp, Artificial Sequence
  Synthetic oligonucleotide
aacctcaaaatgggaagggggtcgaatcac

SEQ ID NO: 186271 - DNA, 30 bp, Artificial Sequence
  Synthetic oligonucleotide
gaagggaagggtaattattcagctaatcac

SEQ ID NO: 186272 - DNA, 30 bp, Artificial Sequence
  Synthetic oligonucleotide
atcagtacctgagttcgctagcttaatcac

SEQ ID NO: 186273 - DNA, 30 bp, Artificial Sequence
  Synthetic oligonucleotide
gtctgtgactcgcgaacgtcggtacatcac

SEQ ID NO: 186274 - DNA, 30 bp, Artificial Sequence
  Synthetic oligonucleotide
gtacaacagcgggggggtacgtgccatcac

SEQ ID NO: 186275 - DNA, 30 bp, Artificial Sequence
  Synthetic oligonucleotide
gttcagatgttagtcaaagtaattcatcac

SEQ ID NO: 186276 - DNA, 30 bp, Artificial Sequence
  Synthetic oligonucleotide
ttaacaggaactagcgggacttccgatcac

SEQ ID NO: 186277 - DNA, 30 bp, Artificial Sequence
  Synthetic oligonucleotide
gaggagggatccggttgactcggcgatcac

SEQ ID NO: 186278 - DNA, 30 bp, Artificial Sequence
  Synthetic oligonucleotide
cgcacacggagtcagctttcgttcgatcac

SEQ ID NO: 186279 - DNA, 30 bp, Artificial Sequence
  Synthetic oligonucleotide
caaagtaggtatgaagattcataggatcac

SEQ ID NO: 186280 - DNA, 30 bp, Artificial Sequence
  Synthetic oligonucleotide
agggacctggaagggacctgatagtatcac

SEQ ID NO: 186281 - DNA, 30 bp, Artificial Sequence
  Synthetic oligonucleotide
cggatttgacctcgaggttccatttatcac

SEQ ID NO: 186282 - DNA, 30 bp, Artificial Sequence
  Synthetic oligonucleotide
tacgctgtcatctacggcttcagaactcac

SEQ ID NO: 186283 - DNA, 30 bp, Artificial Sequence
  Synthetic oligonucleotide
aagttcaaaactttccgcgtaataactcac

SEQ ID NO: 186284 - DNA, 30 bp, Artificial Sequence
  Synthetic oligonucleotide
cgtaatcgcggttgactggatataactcac

SEQ ID NO: 186285 - DNA, 30 bp, Artificial Sequence
  Synthetic oligonucleotide
catctgacaaagatggattaatttactcac

SEQ ID NO: 186286 - DNA, 30 bp, Artificial Sequence
  Synthetic oligonucleotide
tgatatggacttgggataacgggtcctcac

SEQ ID NO: 186287 - DNA, 30 bp, Artificial Sequence
  Synthetic oligonucleotide
ctcaactggactagactctcaacggctcac

SEQ ID NO: 186288 - DNA, 30 bp, Artificial Sequence
  Synthetic oligonucleotide
gcaagggatagctatcttagtctatctcac

SEQ ID NO: 186289 - DNA, 30 bp, Artificial Sequence
  Synthetic oligonucleotide
agacgtgattcgcacacagagtgcagtcac

SEQ ID NO: 186290 - DNA, 30 bp, Artificial Sequence
  Synthetic oligonucleotide
tcgggacaaaaagtggctctaactagtcac

SEQ ID NO: 186291 - DNA, 30 bp, Artificial Sequence
  Synthetic oligonucleotide
ctggcagcacgaattgcgaaccctagtcac

SEQ ID NO: 186292 - DNA, 30 bp, Artificial Sequence
  Synthetic oligonucleotide
tggactacaagtacggcgacaattagtcac

SEQ ID NO: 186293 - DNA, 30 bp, Artificial Sequence
  Synthetic oligonucleotide
ctaggcttaacagggccttggagccgtcac

SEQ ID NO: 186294 - DNA, 30 bp, Artificial Sequence
  Synthetic oligonucleotide
attattagagagaatattaacgcgcgtcac

SEQ ID NO: 186295 - DNA, 30 bp, Artificial Sequence
  Synthetic oligonucleotide
agctaggctcagaaccgcggtaggcgtcac

SEQ ID NO: 186296 - DNA, 30 bp, Artificial Sequence
  Synthetic oligonucleotide
gggtccacgggggggaacgacatgcgtcac

SEQ ID NO: 186297 - DNA, 30 bp, Artificial Sequence
  Synthetic oligonucleotide
cgtgacccagaaggcgagggttttcgtcac

SEQ ID NO: 186298 - DNA, 29 bp, Artificial Sequence
  Synthetic oligonucleotide
cgttcgattcgagtcccggggttggtcac

SEQ ID NO: 186299 - DNA, 31 bp, Artificial Sequence
  Synthetic oligonucleotide
aggagtgtctgcccccgctgggccatgtcac

SEQ ID NO: 186300 - DNA, 30 bp, Artificial Sequence
  Synthetic oligonucleotide
aaggtgtataccattggggctccgtgtcac

SEQ ID NO: 186301 - DNA, 30 bp, Artificial Sequence
  Synthetic oligonucleotide
acgtaaccagcttaactaatgcgttgtcac

SEQ ID NO: 186302 - DNA, 30 bp, Artificial Sequence
  Synthetic oligonucleotide
gttaacaatgcttaatcttgaccaattcac

SEQ ID NO: 186303 - DNA, 30 bp, Artificial Sequence
  Synthetic oligonucleotide
ggtgctggagggtaccagtctagtattcac

SEQ ID NO: 186304 - DNA, 30 bp, Artificial Sequence
  Synthetic oligonucleotide
gccgcgaaccccgtgtagaagtcacttcac

SEQ ID NO: 186305 - DNA, 30 bp, Artificial Sequence
  Synthetic oligonucleotide
gaaagtaaaaagaaaaacggccgacttcac

SEQ ID NO: 186306 - DNA, 30 bp, Artificial Sequence
  Synthetic oligonucleotide
atagtgcgaagtaacaagtgcaatcttcac

SEQ ID NO: 186307 - DNA, 30 bp, Artificial Sequence
  Synthetic oligonucleotide
ttaatggcacgtctacccatcgttcttcac

SEQ ID NO: 186308 - DNA, 30 bp, Artificial Sequence
  Synthetic oligonucleotide
acgagggtcagcgagtgagaaccagttcac

SEQ ID NO: 186309 - DNA, 31 bp, Artificial Sequence
  Synthetic oligonucleotide
agttaccaggaaggctcggtagccagttcac

SEQ ID NO: 186310 - DNA, 30 bp, Artificial Sequence
  Synthetic oligonucleotide
gcaggacaactgaaacacggacaggttcac

SEQ ID NO: 186311 - DNA, 30 bp, Artificial Sequence
  Synthetic oligonucleotide
atacaatgccttgttcctaacgcaaaagac

SEQ ID NO: 186312 - DNA, 30 bp, Artificial Sequence
  Synthetic oligonucleotide
gatgtatgcgaaagtcgttgccacaaagac

SEQ ID NO: 186313 - DNA, 30 bp, Artificial Sequence
  Synthetic oligonucleotide
ctatcaggtaaggaaaatgtaggcaaagac

SEQ ID NO: 186314 - DNA, 30 bp, Artificial Sequence
  Synthetic oligonucleotide
ccgactttgttgggatcccgctgcaaagac

SEQ ID NO: 186315 - DNA, 30 bp, Artificial Sequence
  Synthetic oligonucleotide
ttggaatctggttacacttgaactaaagac

SEQ ID NO: 186316 - DNA, 30 bp, Artificial Sequence
  Synthetic oligonucleotide
gggatatacacttgcagtactacccaagac

SEQ ID NO: 186317 - DNA, 30 bp, Artificial Sequence
  Synthetic oligonucleotide
ccagcaacctgtacaatatcagtccaagac

SEQ ID NO: 186318 - DNA, 30 bp, Artificial Sequence
  Synthetic oligonucleotide
ggacacaagtcggaagctccggtgcaagac

SEQ ID NO: 186319 - DNA, 30 bp, Artificial Sequence
  Synthetic oligonucleotide
ccgtttacccaactctaccgtcaagaagac

SEQ ID NO: 186320 - DNA, 30 bp, Artificial Sequence
  Synthetic oligonucleotide
taccgaaatcggtcgctgatataagaagac

SEQ ID NO: 186321 - DNA, 30 bp, Artificial Sequence
  Synthetic oligonucleotide
aaacacgccaaggttctcacaagcgaagac

SEQ ID NO: 186322 - DNA, 30 bp, Artificial Sequence
  Synthetic oligonucleotide
tttgggcgaatcgccttgctggcggaagac

SEQ ID NO: 186323 - DNA, 30 bp, Artificial Sequence
  Synthetic oligonucleotide
cgtcagactgtacagtgcgtgtctgaagac

SEQ ID NO: 186324 - DNA, 30 bp, Artificial Sequence
  Synthetic oligonucleotide
agaggggccctaattcggttattctaagac

SEQ ID NO: 186325 - DNA, 30 bp, Artificial Sequence
  Synthetic oligonucleotide
cgatcgttacaatgcgcgtgcttgtaagac

SEQ ID NO: 186326 - DNA, 30 bp, Artificial Sequence
  Synthetic oligonucleotide
catgcacgagttaggtcatctcaaacagac

SEQ ID NO: 186327 - DNA, 30 bp, Artificial Sequence
  Synthetic oligonucleotide
cgtaacgcttgatacacgtgaaccacagac

SEQ ID NO: 186328 - DNA, 30 bp, Artificial Sequence
  Synthetic oligonucleotide
gcagcggttccgatggcaacggggacagac

SEQ ID NO: 186329 - DNA, 30 bp, Artificial Sequence
  Synthetic oligonucleotide
aagtgaatatacaattcgttggggacagac

SEQ ID NO: 186330 - DNA, 30 bp, Artificial Sequence
  Synthetic oligonucleotide
gccgcagacctattcctccgcaaaccagac

SEQ ID NO: 186331 - DNA, 30 bp, Artificial Sequence
  Synthetic oligonucleotide
ccacaatgatgaatgggatgggaaccagac

SEQ ID NO: 186332 - DNA, 30 bp, Artificial Sequence
  Synthetic oligonucleotide
ttgggggtgccgcgtggcctacgtccagac

SEQ ID NO: 186333 - DNA, 30 bp, Artificial Sequence
  Synthetic oligonucleotide
taagacacgggtgagatgcgtaccgcagac

SEQ ID NO: 186334 - DNA, 30 bp, Artificial Sequence
  Synthetic oligonucleotide
cagtatcggtgttccaacagagtcgcagac

SEQ ID NO: 186335 - DNA, 30 bp, Artificial Sequence
  Synthetic oligonucleotide
caagctaaattcacgtcaatgagggcagac

SEQ ID NO: 186336 - DNA, 30 bp, Artificial Sequence
  Synthetic oligonucleotide
ctaaaatgtggctcttggcgactggcagac

SEQ ID NO: 186337 - DNA, 30 bp, Artificial Sequence
  Synthetic oligonucleotide
acgtcttaggctaaaggaacttttgcagac

SEQ ID NO: 186338 - DNA, 30 bp, Artificial Sequence
  Synthetic oligonucleotide
cggtcaggatccttataagactgatcagac

SEQ ID NO: 186339 - DNA, 30 bp, Artificial Sequence
  Synthetic oligonucleotide
ggtaagctaacaggttctgaaagctcagac

SEQ ID NO: 186340 - DNA, 30 bp, Artificial Sequence
  Synthetic oligonucleotide
cgcctctccatctcaactcctgcgtcagac

SEQ ID NO: 186341 - DNA, 30 bp, Artificial Sequence
  Synthetic oligonucleotide
catatgacatctatcgggtaaaggtcagac

SEQ ID NO: 186342 - DNA, 30 bp, Artificial Sequence
  Synthetic oligonucleotide
tacacgttaagtgagagtatggtgtcagac

SEQ ID NO: 186343 - DNA, 30 bp, Artificial Sequence
  Synthetic oligonucleotide
gacgatttctaagaattcgttcattcagac

SEQ ID NO: 186344 - DNA, 30 bp, Artificial Sequence
  Synthetic oligonucleotide
aaatcgtgatgtcttactagagcttcagac

SEQ ID NO: 186345 - DNA, 30 bp, Artificial Sequence
  Synthetic oligonucleotide
acagtcctgcaatacacacgatgaagagac

SEQ ID NO: 186346 - DNA, 30 bp, Artificial Sequence
  Synthetic oligonucleotide
tcacctataaagggttatactaatagagac

SEQ ID NO: 186347 - DNA, 30 bp, Artificial Sequence
  Synthetic oligonucleotide
cttacattattgtggtagcctgtacgagac

SEQ ID NO: 186348 - DNA, 30 bp, Artificial Sequence
  Synthetic oligonucleotide
ctgctaggtggtgccactgggatccgagac

SEQ ID NO: 186349 - DNA, 30 bp, Artificial Sequence
  Synthetic oligonucleotide
ggcgtcagatagtaggatagctagcgagac

SEQ ID NO: 186350 - DNA, 30 bp, Artificial Sequence
  Synthetic oligonucleotide
tgaagagacgatctgtaaagatggcgagac

SEQ ID NO: 186351 - DNA, 30 bp, Artificial Sequence
  Synthetic oligonucleotide
ttagcaaaaaaatagtagaaagtgcgagac

SEQ ID NO: 186352 - DNA, 31 bp, Artificial Sequence
  Synthetic oligonucleotide
caaatgcttctctcgtacagaggttcgagac

SEQ ID NO: 186353 - DNA, 30 bp, Artificial Sequence
  Synthetic oligonucleotide
agtctacttaagtcgagtgtccacggagac

SEQ ID NO: 186354 - DNA, 30 bp, Artificial Sequence
  Synthetic oligonucleotide
tatcggggccggttctgactcacgggagac

SEQ ID NO: 186355 - DNA, 30 bp, Artificial Sequence
  Synthetic oligonucleotide
gttaagtgacagtaagcgggtggatgagac

SEQ ID NO: 186356 - DNA, 30 bp, Artificial Sequence
  Synthetic oligonucleotide
gtatgtgaaaaattaggatcctggtgagac

SEQ ID NO: 186357 - DNA, 30 bp, Artificial Sequence
  Synthetic oligonucleotide
gtcgggatatcgtacccctctaattgagac

SEQ ID NO: 186358 - DNA, 30 bp, Artificial Sequence
  Synthetic oligonucleotide
tctctggaggatggccgaattatttgagac

SEQ ID NO: 186359 - DNA, 30 bp, Artificial Sequence
  Synthetic oligonucleotide
tgcagacatgcgttggactcacgaatagac

SEQ ID NO: 186360 - DNA, 30 bp, Artificial Sequence
  Synthetic oligonucleotide
actcatagtgggatgccggtttgcatagac

SEQ ID NO: 186361 - DNA, 30 bp, Artificial Sequence
  Synthetic oligonucleotide
aagggtagtactagcgggtgccccctagac

SEQ ID NO: 186362 - DNA, 31 bp, Artificial Sequence
  Synthetic oligonucleotide
gtgtactaagtattgcataatagtcctagac

SEQ ID NO: 186363 - DNA, 30 bp, Artificial Sequence
  Synthetic oligonucleotide
gaaactggcgcgaatggacgcactctagac

SEQ ID NO: 186364 - DNA, 31 bp, Artificial Sequence
  Synthetic oligonucleotide
gaaagtattaatgccatacgaatcattagac

SEQ ID NO: 186365 - DNA, 30 bp, Artificial Sequence
  Synthetic oligonucleotide
cgtttctcgatttatgctggcggattagac

SEQ ID NO: 186366 - DNA, 30 bp, Artificial Sequence
  Synthetic oligonucleotide
cttgagggattgcattctcgcaccttagac

SEQ ID NO: 186367 - DNA, 30 bp, Artificial Sequence
  Synthetic oligonucleotide
ggtgcgtctgttcgagcgagggccttagac

SEQ ID NO: 186368 - DNA, 30 bp, Artificial Sequence
  Synthetic oligonucleotide
taggagtgggcatagaactcgaggttagac

SEQ ID NO: 186369 - DNA, 30 bp, Artificial Sequence
  Synthetic oligonucleotide
aacaactcccctgagatactggttttagac

SEQ ID NO: 186370 - DNA, 30 bp, Artificial Sequence
  Synthetic oligonucleotide
tgatccgcctaggaagatctcgctaacgac

SEQ ID NO: 186371 - DNA, 30 bp, Artificial Sequence
  Synthetic oligonucleotide
caggactgcaggtgcatggctacccacgac

SEQ ID NO: 186372 - DNA, 30 bp, Artificial Sequence
  Synthetic oligonucleotide
tgcgctggtcaaaggtccgcgggagacgac

SEQ ID NO: 186373 - DNA, 30 bp, Artificial Sequence
  Synthetic oligonucleotide
tgtggaatggtaggtttagctttatacgac

SEQ ID NO: 186374 - DNA, 30 bp, Artificial Sequence
  Synthetic oligonucleotide
gctccgcttacccccgaactggcctacgac

SEQ ID NO: 186375 - DNA, 30 bp, Artificial Sequence
  Synthetic oligonucleotide
gggctcgggaatcgtgtgactctcaccgac

SEQ ID NO: 186376 - DNA, 30 bp, Artificial Sequence
  Synthetic oligonucleotide
tgatattggtcacagaactatccgaccgac

SEQ ID NO: 186377 - DNA, 30 bp, Artificial Sequence
  Synthetic oligonucleotide
tgggcgtttcgggcgttgattcgtaccgac

SEQ ID NO: 186378 - DNA, 30 bp, Artificial Sequence
  Synthetic oligonucleotide
acgttttgcaataggggaaagactcccgac

SEQ ID NO: 186379 - DNA, 30 bp, Artificial Sequence
  Synthetic oligonucleotide
ctgggactctaaatgaggctgcaagccgac

SEQ ID NO: 186380 - DNA, 30 bp, Artificial Sequence
  Synthetic oligonucleotide
aagtgggggctaatcgtgaaaaatgccgac

SEQ ID NO: 186381 - DNA, 30 bp, Artificial Sequence
  Synthetic oligonucleotide
ctttgtaagagtaggccgtcttatgccgac

SEQ ID NO: 186382 - DNA, 30 bp, Artificial Sequence
  Synthetic oligonucleotide
gtatgatgctttccgggtaggtctgccgac

SEQ ID NO: 186383 - DNA, 30 bp, Artificial Sequence
  Synthetic oligonucleotide
gttaatctttagttcgcgaagcgtgccgac

SEQ ID NO: 186384 - DNA, 30 bp, Artificial Sequence
  Synthetic oligonucleotide
agttgcgcgtatcaaaccagcaattccgac

SEQ ID NO: 186385 - DNA, 30 bp, Artificial Sequence
  Synthetic oligonucleotide
taacgtaatcgtaatgttagcccaagcgac

SEQ ID NO: 186386 - DNA, 30 bp, Artificial Sequence
  Synthetic oligonucleotide
tgactcaagaatgtcataggtaagagcgac

SEQ ID NO: 186387 - DNA, 30 bp, Artificial Sequence
  Synthetic oligonucleotide
gtgcagagtttgtttatacggattagcgac

SEQ ID NO: 186388 - DNA, 30 bp, Artificial Sequence
  Synthetic oligonucleotide
aactcgtctcgtacggggtgtacacgcgac

SEQ ID NO: 186389 - DNA, 30 bp, Artificial Sequence
  Synthetic oligonucleotide
cattttagtagtatctagtacagccgcgac

SEQ ID NO: 186390 - DNA, 30 bp, Artificial Sequence
  Synthetic oligonucleotide
aatgtcaactcggagtttaagaagcgcgac

SEQ ID NO: 186391 - DNA, 30 bp, Artificial Sequence
  Synthetic oligonucleotide
acatgtccacgtttcgctgataagcgcgac

SEQ ID NO: 186392 - DNA, 30 bp, Artificial Sequence
  Synthetic oligonucleotide
agtggaaaataatatcaaaaccttcgcgac

SEQ ID NO: 186393 - DNA, 30 bp, Artificial Sequence
  Synthetic oligonucleotide
cggtactgagggatctagacctttcgcgac

SEQ ID NO: 186394 - DNA, 30 bp, Artificial Sequence
  Synthetic oligonucleotide
ctaccggaaaagtcggtagacgaaggcgac

SEQ ID NO: 186395 - DNA, 30 bp, Artificial Sequence
  Synthetic oligonucleotide
gcatgaagggatcgatgttagacgggcgac

SEQ ID NO: 186396 - DNA, 30 bp, Artificial Sequence
  Synthetic oligonucleotide
cttacgagtgttaagtgtaactcgggcgac

SEQ ID NO: 186397 - DNA, 30 bp, Artificial Sequence
  Synthetic oligonucleotide
aactcgagcatgggaaggcaattgggcgac

SEQ ID NO: 186398 - DNA, 30 bp, Artificial Sequence
  Synthetic oligonucleotide
taatacaacgacgttgcctaacatggcgac

SEQ ID NO: 186399 - DNA, 30 bp, Artificial Sequence
  Synthetic oligonucleotide
gatgtacgccaacgtaagctgtactgcgac

SEQ ID NO: 186400 - DNA, 30 bp, Artificial Sequence
  Synthetic oligonucleotide
ggtcacagttcataggcactgagttgcgac

SEQ ID NO: 186401 - DNA, 30 bp, Artificial Sequence
  Synthetic oligonucleotide
ttataactgtccccttctaagcgttgcgac

SEQ ID NO: 186402 - DNA, 30 bp, Artificial Sequence
  Synthetic oligonucleotide
ctaagttcgttccaccaaaaggcaatcgac

SEQ ID NO: 186403 - DNA, 30 bp, Artificial Sequence
  Synthetic oligonucleotide
atgcgcggtaccttggtggggtgaatcgac

SEQ ID NO: 186404 - DNA, 30 bp, Artificial Sequence
  Synthetic oligonucleotide
attcacgcctactacggtaacctaatcgac

SEQ ID NO: 186405 - DNA, 30 bp, Artificial Sequence
  Synthetic oligonucleotide
gtcggaaggcaagacgacacaatcatcgac

SEQ ID NO: 186406 - DNA, 30 bp, Artificial Sequence
  Synthetic oligonucleotide
aggggtctgagattcgtcggtgagatcgac

SEQ ID NO: 186407 - DNA, 30 bp, Artificial Sequence
  Synthetic oligonucleotide
cggtatcagaacacggcaggttagatcgac

SEQ ID NO: 186408 - DNA, 30 bp, Artificial Sequence
  Synthetic oligonucleotide
tcctacgaaagggcgcttggtaacctcgac

SEQ ID NO: 186409 - DNA, 30 bp, Artificial Sequence
  Synthetic oligonucleotide
gtgataggtgtaccgaagtaatacctcgac

SEQ ID NO: 186410 - DNA, 30 bp, Artificial Sequence
  Synthetic oligonucleotide
ctctaggtcctaggtctatgagagctcgac

SEQ ID NO: 186411 - DNA, 30 bp, Artificial Sequence
  Synthetic oligonucleotide
atagtagcagacatggagtaatagctcgac

SEQ ID NO: 186412 - DNA, 30 bp, Artificial Sequence
  Synthetic oligonucleotide
gaggagcgtaaagtgttatttcggctcgac

SEQ ID NO: 186413 - DNA, 30 bp, Artificial Sequence
  Synthetic oligonucleotide
acggccaccctcagcctagatactctcgac

SEQ ID NO: 186414 - DNA, 30 bp, Artificial Sequence
  Synthetic oligonucleotide
atacaattggggacgttgtagaaagtcgac

SEQ ID NO: 186415 - DNA, 30 bp, Artificial Sequence
  Synthetic oligonucleotide
gagtcagaaaagagttattcataagtcgac

SEQ ID NO: 186416 - DNA, 30 bp, Artificial Sequence
  Synthetic oligonucleotide
accaagttatactcctctttcatagtcgac

SEQ ID NO: 186417 - DNA, 30 bp, Artificial Sequence
  Synthetic oligonucleotide
ttagggacaaatgctccgcgtattgtcgac

SEQ ID NO: 186418 - DNA, 30 bp, Artificial Sequence
  Synthetic oligonucleotide
tgaggttggccaggctaggtacttgtcgac

SEQ ID NO: 186419 - DNA, 30 bp, Artificial Sequence
  Synthetic oligonucleotide
gtggaaatcaagctgtatcaagacttcgac

SEQ ID NO: 186420 - DNA, 30 bp, Artificial Sequence
  Synthetic oligonucleotide
ctctcggcacggtcctgaacacggttcgac

SEQ ID NO: 186421 - DNA, 30 bp, Artificial Sequence
  Synthetic oligonucleotide
agtaatacgctggccatgacccggaaggac

SEQ ID NO: 186422 - DNA, 30 bp, Artificial Sequence
  Synthetic oligonucleotide
agtaaaatctattcgtgccattaacaggac

SEQ ID NO: 186423 - DNA, 30 bp, Artificial Sequence
  Synthetic oligonucleotide
aaagtgttcaataacgatgaaactcaggac

SEQ ID NO: 186424 - DNA, 30 bp, Artificial Sequence
  Synthetic oligonucleotide
cgaactggagccgagcttaccactcaggac

SEQ ID NO: 186425 - DNA, 30 bp, Artificial Sequence
  Synthetic oligonucleotide
aagaatgcgggtcacctgagccgtcaggac

SEQ ID NO: 186426 - DNA, 30 bp, Artificial Sequence
  Synthetic oligonucleotide
gttcgcgatacaagtggatttgcagaggac

SEQ ID NO: 186427 - DNA, 31 bp, Artificial Sequence
  Synthetic oligonucleotide
acgcaccggcgttctaagggtccgagaggac

SEQ ID NO: 186428 - DNA, 30 bp, Artificial Sequence
  Synthetic oligonucleotide
cattcagagtttgggataggtctagaggac

SEQ ID NO: 186429 - DNA, 30 bp, Artificial Sequence
  Synthetic oligonucleotide
catgtggatgttgtcaggtcaggcgaggac

SEQ ID NO: 186430 - DNA, 30 bp, Artificial Sequence
  Synthetic oligonucleotide
aattcatctgctactcgagtgggcgaggac

SEQ ID NO: 186431 - DNA, 30 bp, Artificial Sequence
  Synthetic oligonucleotide
gtacgctctcgccgcaaagaacaggaggac

SEQ ID NO: 186432 - DNA, 30 bp, Artificial Sequence
  Synthetic oligonucleotide
accaaagcgcgtggcccgctaactgaggac

SEQ ID NO: 186433 - DNA, 30 bp, Artificial Sequence
  Synthetic oligonucleotide
gtctagaaatcgccacagcgggctgaggac

SEQ ID NO: 186434 - DNA, 30 bp, Artificial Sequence
  Synthetic oligonucleotide
tttcgcaagctggggtagggtagtgaggac

SEQ ID NO: 186435 - DNA, 30 bp, Artificial Sequence
  Synthetic oligonucleotide
caaaattaaatccaaagtgatcaataggac

SEQ ID NO: 186436 - DNA, 30 bp, Artificial Sequence
  Synthetic oligonucleotide
aggggacttcagtgcatcagtctgacggac

SEQ ID NO: 186437 - DNA, 30 bp, Artificial Sequence
  Synthetic oligonucleotide
aacgagtgactcatcgtaatttttacggac

SEQ ID NO: 186438 - DNA, 30 bp, Artificial Sequence
  Synthetic oligonucleotide
ccgttcctccaaaaggaagcggtcccggac

SEQ ID NO: 186439 - DNA, 30 bp, Artificial Sequence
  Synthetic oligonucleotide
tgcacggctaacacaaggattaatccggac

SEQ ID NO: 186440 - DNA, 30 bp, Artificial Sequence
  Synthetic oligonucleotide
gccaaacagtatccgtcgcttagagcggac

SEQ ID NO: 186441 - DNA, 30 bp, Artificial Sequence
  Synthetic oligonucleotide
cccgattcggttagagacgtgtacgcggac

SEQ ID NO: 186442 - DNA, 30 bp, Artificial Sequence
  Synthetic oligonucleotide
aatgactggacagatgtgttcagtgcggac

SEQ ID NO: 186443 - DNA, 30 bp, Artificial Sequence
  Synthetic oligonucleotide
taggcaccagcaaagtgtttacgtgcggac

SEQ ID NO: 186444 - DNA, 30 bp, Artificial Sequence
  Synthetic oligonucleotide
tcaaatatcccgaatcagtcctgctcggac

SEQ ID NO: 186445 - DNA, 30 bp, Artificial Sequence
  Synthetic oligonucleotide
atgtaagcccgccttagacacatttcggac

SEQ ID NO: 186446 - DNA, 30 bp, Artificial Sequence
  Synthetic oligonucleotide
aattgtacgataaggttgggtgccagggac

SEQ ID NO: 186447 - DNA, 30 bp, Artificial Sequence
  Synthetic oligonucleotide
tgccggagagtctaagcataccgcagggac

SEQ ID NO: 186448 - DNA, 30 bp, Artificial Sequence
  Synthetic oligonucleotide
tggatggcgagtaacgttgactctagggac

SEQ ID NO: 186449 - DNA, 30 bp, Artificial Sequence
  Synthetic oligonucleotide
cgaaacgccgtggtagtgttgacacgggac

SEQ ID NO: 186450 - DNA, 30 bp, Artificial Sequence
  Synthetic oligonucleotide
ctataaggcccgaagtcgttgggccgggac

SEQ ID NO: 186451 - DNA, 30 bp, Artificial Sequence
  Synthetic oligonucleotide
tattgggcagaccagagaagactgcgggac

SEQ ID NO: 186452 - DNA, 30 bp, Artificial Sequence
  Synthetic oligonucleotide
gtgaaaatggtgatgccgcccgaaggggac

SEQ ID NO: 186453 - DNA, 30 bp, Artificial Sequence
  Synthetic oligonucleotide
agaggcctcgggattggaaagcttggggac

SEQ ID NO: 186454 - DNA, 30 bp, Artificial Sequence
  Synthetic oligonucleotide
ttggcagacggaaatcaagttccatgggac

SEQ ID NO: 186455 - DNA, 30 bp, Artificial Sequence
  Synthetic oligonucleotide
acggcccacagcaaaggtattctatgggac

SEQ ID NO: 186456 - DNA, 30 bp, Artificial Sequence
  Synthetic oligonucleotide
gcgacgggcgttttggtcggtgactgggac

SEQ ID NO: 186457 - DNA, 30 bp, Artificial Sequence
  Synthetic oligonucleotide
gtgcaactgataacaggtcaggcttgggac

SEQ ID NO: 186458 - DNA, 30 bp, Artificial Sequence
  Synthetic oligonucleotide
aggatctgaataactgcggacgtttgggac

SEQ ID NO: 186459 - DNA, 40 bp, Artificial Sequence
  Synthetic oligonucleotide
gacctgtcatctctacgttaaagtcaagaacccaatggac

SEQ ID NO: 186460 - DNA, 30 bp, Artificial Sequence
  Synthetic oligonucleotide
aggatagggtacgtgggagggaagatggac

SEQ ID NO: 186461 - DNA, 30 bp, Artificial Sequence
  Synthetic oligonucleotide
gttccaccatgcactttgtggtcgatggac

SEQ ID NO: 186462 - DNA, 30 bp, Artificial Sequence
  Synthetic oligonucleotide
gcatacatgcctgctgcggacaatatggac

SEQ ID NO: 186463 - DNA, 30 bp, Artificial Sequence
  Synthetic oligonucleotide
tcttgggcgccagccggtgaatttatggac

SEQ ID NO: 186464 - DNA, 30 bp, Artificial Sequence
  Synthetic oligonucleotide
caccttaagtccacccggactctactggac

SEQ ID NO: 186465 - DNA, 30 bp, Artificial Sequence
  Synthetic oligonucleotide
gccttaagtaataaagctctagacctggac

SEQ ID NO: 186466 - DNA, 30 bp, Artificial Sequence
  Synthetic oligonucleotide
gtaggcctgtattacgcctgtaatctggac

SEQ ID NO: 186467 - DNA, 30 bp, Artificial Sequence
  Synthetic oligonucleotide
tggggatcattgcccgtagtattagtggac

SEQ ID NO: 186468 - DNA, 30 bp, Artificial Sequence
  Synthetic oligonucleotide
taaaggcaccctgcggtattgtcattggac

SEQ ID NO: 186469 - DNA, 30 bp, Artificial Sequence
  Synthetic oligonucleotide
gggcggcttcattgcatctggaatttggac

SEQ ID NO: 186470 - DNA, 30 bp, Artificial Sequence
  Synthetic oligonucleotide
cgtcttcttatgcaaattctgaagaatgac

SEQ ID NO: 186471 - DNA, 30 bp, Artificial Sequence
  Synthetic oligonucleotide
ctgcaggcctcgaatgcgagatcgaatgac

SEQ ID NO: 186472 - DNA, 30 bp, Artificial Sequence
  Synthetic oligonucleotide
tgaacgaattgggcactatacgtgaatgac

SEQ ID NO: 186473 - DNA, 30 bp, Artificial Sequence
  Synthetic oligonucleotide
gaagataatggggccgtgccatgccatgac

SEQ ID NO: 186474 - DNA, 30 bp, Artificial Sequence
  Synthetic oligonucleotide
gggtggtcactatattcgaccacgcatgac

SEQ ID NO: 186475 - DNA, 30 bp, Artificial Sequence
  Synthetic oligonucleotide
aatgacctaacagaactctggacgcatgac

SEQ ID NO: 186476 - DNA, 30 bp, Artificial Sequence
  Synthetic oligonucleotide
cggaatatccgagatattttaccgcatgac

SEQ ID NO: 186477 - DNA, 30 bp, Artificial Sequence
  Synthetic oligonucleotide
tatgggaccggggtgggactctaagatgac

SEQ ID NO: 186478 - DNA, 30 bp, Artificial Sequence
  Synthetic oligonucleotide
aaacgccggccacaaacagttgtagatgac

SEQ ID NO: 186479 - DNA, 30 bp, Artificial Sequence
  Synthetic oligonucleotide
gtagatcgccccctggacaggcacgatgac

SEQ ID NO: 186480 - DNA, 30 bp, Artificial Sequence
  Synthetic oligonucleotide
taggcaacagccataatgagtaccgatgac

SEQ ID NO: 186481 - DNA, 30 bp, Artificial Sequence
  Synthetic oligonucleotide
ctctttgcgcgaaagtagagacgtgatgac

SEQ ID NO: 186482 - DNA, 30 bp, Artificial Sequence
  Synthetic oligonucleotide
caactatcagacttgcctatatgatatgac

SEQ ID NO: 186483 - DNA, 30 bp, Artificial Sequence
  Synthetic oligonucleotide
gcctttacactcggtattgtgtactatgac

SEQ ID NO: 186484 - DNA, 30 bp, Artificial Sequence
  Synthetic oligonucleotide
agaagctccgagcatcgaaattcttatgac

SEQ ID NO: 186485 - DNA, 30 bp, Artificial Sequence
  Synthetic oligonucleotide
tttcgccacacctctaaagtagtttatgac

SEQ ID NO: 186486 - DNA, 30 bp, Artificial Sequence
  Synthetic oligonucleotide
cagcaatatctggggcactcaaaaactgac

SEQ ID NO: 186487 - DNA, 30 bp, Artificial Sequence
  Synthetic oligonucleotide
aagtggagaagcaatctgggggtaactgac

SEQ ID NO: 186488 - DNA, 30 bp, Artificial Sequence
  Synthetic oligonucleotide
acggattgcgatagacgcccagccactgac

SEQ ID NO: 186489 - DNA, 30 bp, Artificial Sequence
  Synthetic oligonucleotide
taaccgcagttagggaataaattcactgac

SEQ ID NO: 186490 - DNA, 30 bp, Artificial Sequence
  Synthetic oligonucleotide
ttgccctggtgagacctcaaggcgactgac

SEQ ID NO: 186491 - DNA, 30 bp, Artificial Sequence
  Synthetic oligonucleotide
atctacgggggcaatcaaatagtgactgac

SEQ ID NO: 186492 - DNA, 30 bp, Artificial Sequence
  Synthetic oligonucleotide
gcgtgtctcatagtcattaggcgccctgac

SEQ ID NO: 186493 - DNA, 30 bp, Artificial Sequence
  Synthetic oligonucleotide
tatcgcgttggatcaaacctcatagctgac

SEQ ID NO: 186494 - DNA, 30 bp, Artificial Sequence
  Synthetic oligonucleotide
gaggtggcaaagtagggcagagttgctgac

SEQ ID NO: 186495 - DNA, 30 bp, Artificial Sequence
  Synthetic oligonucleotide
attcagtgaaaagtgagagggctaagtgac

SEQ ID NO: 186496 - DNA, 30 bp, Artificial Sequence
  Synthetic oligonucleotide
gcggacattgggttcaaatcgcacagtgac

SEQ ID NO: 186497 - DNA, 30 bp, Artificial Sequence
  Synthetic oligonucleotide
tgttatatgtgctaggactcattcagtgac

SEQ ID NO: 186498 - DNA, 30 bp, Artificial Sequence
  Synthetic oligonucleotide
cgcgtaacgaccacggaacactagagtgac

SEQ ID NO: 186499 - DNA, 30 bp, Artificial Sequence
  Synthetic oligonucleotide
gggaagccagcgacgtatccgctgagtgac

SEQ ID NO: 186500 - DNA, 30 bp, Artificial Sequence
  Synthetic oligonucleotide
gtggcattgagatcaataggtggtcgtgac

SEQ ID NO: 186501 - DNA, 30 bp, Artificial Sequence
  Synthetic oligonucleotide
ggaattcggttatcgtagacagcaggtgac

SEQ ID NO: 186502 - DNA, 30 bp, Artificial Sequence
  Synthetic oligonucleotide
aaggataacgggacgtaggttgggggtgac

SEQ ID NO: 186503 - DNA, 30 bp, Artificial Sequence
  Synthetic oligonucleotide
tgtaaaagggaccctctagtggcttgtgac

SEQ ID NO: 186504 - DNA, 30 bp, Artificial Sequence
  Synthetic oligonucleotide
ccacaggcagaggagacttatcacattgac

SEQ ID NO: 186505 - DNA, 30 bp, Artificial Sequence
  Synthetic oligonucleotide
aagacatgttttagaacgatggtcattgac

SEQ ID NO: 186506 - DNA, 30 bp, Artificial Sequence
  Synthetic oligonucleotide
cagaaaaggctatcggttggaagtattgac

SEQ ID NO: 186507 - DNA, 30 bp, Artificial Sequence
  Synthetic oligonucleotide
tcagtgttaatcgatgtaaccggacttgac

SEQ ID NO: 186508 - DNA, 30 bp, Artificial Sequence
  Synthetic oligonucleotide
gctcctcaatgtaacccggctaaccttgac

SEQ ID NO: 186509 - DNA, 30 bp, Artificial Sequence
  Synthetic oligonucleotide
ttggattgagacgaataatctgggcttgac

SEQ ID NO: 186510 - DNA, 30 bp, Artificial Sequence
  Synthetic oligonucleotide
accagtaattaagcgtcaacaatgcttgac

SEQ ID NO: 186511 - DNA, 30 bp, Artificial Sequence
  Synthetic oligonucleotide
ccggggtactgaaggaccgtcattcttgac

SEQ ID NO: 186512 - DNA, 30 bp, Artificial Sequence
  Synthetic oligonucleotide
atctgacatgattggcactagccagttgac

SEQ ID NO: 186513 - DNA, 31 bp, Artificial Sequence
  Synthetic oligonucleotide
ccgtagttccatgcaatggagggaatttgac

SEQ ID NO: 186514 - DNA, 30 bp, Artificial Sequence
  Synthetic oligonucleotide
accacaatgcgccctccgtatctgtttgac

SEQ ID NO: 186515 - DNA, 30 bp, Artificial Sequence
  Synthetic oligonucleotide
ccatgccctcactagggagtaagaaaatac

SEQ ID NO: 186516 - DNA, 30 bp, Artificial Sequence
  Synthetic oligonucleotide
ccccaaaacctccatcgtggcagcaaatac

SEQ ID NO: 186517 - DNA, 30 bp, Artificial Sequence
  Synthetic oligonucleotide
ctactctgtaaaaaattaattaatcaatac

SEQ ID NO: 186518 - DNA, 30 bp, Artificial Sequence
  Synthetic oligonucleotide
catcgaatcgtctaatgcgaagctcaatac

SEQ ID NO: 186519 - DNA, 30 bp, Artificial Sequence
  Synthetic oligonucleotide
gcaggctggtttggagattagagtcaatac

SEQ ID NO: 186520 - DNA, 30 bp, Artificial Sequence
  Synthetic oligonucleotide
tcacggtaagcactaacgcagacagaatac

SEQ ID NO: 186521 - DNA, 30 bp, Artificial Sequence
  Synthetic oligonucleotide
gcggatacgttcttcggtgttcaggaatac

SEQ ID NO: 186522 - DNA, 30 bp, Artificial Sequence
  Synthetic oligonucleotide
gcgtgcactattgctttaagggatgaatac

SEQ ID NO: 186523 - DNA, 30 bp, Artificial Sequence
  Synthetic oligonucleotide
tgagacatatagtatcgtcctcgataatac

SEQ ID NO: 186524 - DNA, 30 bp, Artificial Sequence
  Synthetic oligonucleotide
aaacgcatatatagctagcttatataatac

SEQ ID NO: 186525 - DNA, 30 bp, Artificial Sequence
  Synthetic oligonucleotide
attacggatcgtaacgactttgactaatac

SEQ ID NO: 186526 - DNA, 30 bp, Artificial Sequence
  Synthetic oligonucleotide
caacaagaatatgagaacatcagctaatac

SEQ ID NO: 186527 - DNA, 30 bp, Artificial Sequence
  Synthetic oligonucleotide
cttaatgggtcggatttacaagattaatac

SEQ ID NO: 186528 - DNA, 32 bp, Artificial Sequence
  Synthetic oligonucleotide
ggaacacacaggttggcggaatggtcacatac

SEQ ID NO: 186529 - DNA, 30 bp, Artificial Sequence
  Synthetic oligonucleotide
ggtgcccgagtggctagataccgtacatac

SEQ ID NO: 186530 - DNA, 30 bp, Artificial Sequence
  Synthetic oligonucleotide
tcctgtagacgttgtcaaataacgccatac

SEQ ID NO: 186531 - DNA, 30 bp, Artificial Sequence
  Synthetic oligonucleotide
cgatgcactttggtacgagcaaatccatac

SEQ ID NO: 186532 - DNA, 30 bp, Artificial Sequence
  Synthetic oligonucleotide
cgtactagtgtctcgacactgtttccatac

SEQ ID NO: 186533 - DNA, 30 bp, Artificial Sequence
  Synthetic oligonucleotide
tgggttaaaatagttgggccgagagcatac

SEQ ID NO: 186534 - DNA, 30 bp, Artificial Sequence
  Synthetic oligonucleotide
ctaaaaaatacaagaactgatagagcatac

SEQ ID NO: 186535 - DNA, 30 bp, Artificial Sequence
  Synthetic oligonucleotide
gtcgaccgagaaactccagagactgcatac

SEQ ID NO: 186536 - DNA, 30 bp, Artificial Sequence
  Synthetic oligonucleotide
gcatatgaaacaaactaaggaaactcatac

SEQ ID NO: 186537 - DNA, 30 bp, Artificial Sequence
  Synthetic oligonucleotide
caccgatgaatatgtaatgaagcgtcatac

SEQ ID NO: 186538 - DNA, 30 bp, Artificial Sequence
  Synthetic oligonucleotide
gagcgattacgaattccgaactccagatac

SEQ ID NO: 186539 - DNA, 30 bp, Artificial Sequence
  Synthetic oligonucleotide
acctggcgacagttttgcctctgcagatac

SEQ ID NO: 186540 - DNA, 30 bp, Artificial Sequence
  Synthetic oligonucleotide
acggtataggcattcgtgtataggagatac

SEQ ID NO: 186541 - DNA, 30 bp, Artificial Sequence
  Synthetic oligonucleotide
cactaaggtaacagtactaacgggagatac

SEQ ID NO: 186542 - DNA, 30 bp, Artificial Sequence
  Synthetic oligonucleotide
gtccgatggtttcgatatatggatagatac

SEQ ID NO: 186543 - DNA, 30 bp, Artificial Sequence
  Synthetic oligonucleotide
ataattggcgtcatcccttaaaagcgatac

SEQ ID NO: 186544 - DNA, 30 bp, Artificial Sequence
  Synthetic oligonucleotide
accgaatcatataggggtgagctgcgatac

SEQ ID NO: 186545 - DNA, 30 bp, Artificial Sequence
  Synthetic oligonucleotide
cagatacccggttcaccattttcaggatac

SEQ ID NO: 186546 - DNA, 30 bp, Artificial Sequence
  Synthetic oligonucleotide
acaaggtggcgtggccccttcggaggatac

SEQ ID NO: 186547 - DNA, 30 bp, Artificial Sequence
  Synthetic oligonucleotide
cactctgatcggagtaccggacgcggatac

SEQ ID NO: 186548 - DNA, 30 bp, Artificial Sequence
  Synthetic oligonucleotide
ggtcgtacgctgaaacatgtgcctggatac

SEQ ID NO: 186549 - DNA, 30 bp, Artificial Sequence
  Synthetic oligonucleotide
aatacacgttgctagtggtggattggatac

SEQ ID NO: 186550 - DNA, 30 bp, Artificial Sequence
  Synthetic oligonucleotide
tcataaccatgacaatcccgcaaatgatac

SEQ ID NO: 186551 - DNA, 30 bp, Artificial Sequence
  Synthetic oligonucleotide
gtatagattgtgatcacggtgtactgatac

SEQ ID NO: 186552 - DNA, 30 bp, Artificial Sequence
  Synthetic oligonucleotide
attcggatcacacaaggtacatggtgatac

SEQ ID NO: 186553 - DNA, 30 bp, Artificial Sequence
  Synthetic oligonucleotide
gtggcggattggattcacggaatgtgatac

SEQ ID NO: 186554 - DNA, 30 bp, Artificial Sequence
  Synthetic oligonucleotide
ggtcaatggatctacgactagagttgatac

SEQ ID NO: 186555 - DNA, 30 bp, Artificial Sequence
  Synthetic oligonucleotide
cactccgatgattttattattcccatatac

SEQ ID NO: 186556 - DNA, 30 bp, Artificial Sequence
  Synthetic oligonucleotide
gctcgtcatcacgggtgtagcgatatatac

SEQ ID NO: 186557 - DNA, 30 bp, Artificial Sequence
  Synthetic oligonucleotide
accgggactgataacaacaggcgtatatac

SEQ ID NO: 186558 - DNA, 30 bp, Artificial Sequence
  Synthetic oligonucleotide
cggcaatccagcgaatctaaggcactatac

SEQ ID NO: 186559 - DNA, 30 bp, Artificial Sequence
  Synthetic oligonucleotide
actcatcgtaagtgaggggatggactatac

SEQ ID NO: 186560 - DNA, 30 bp, Artificial Sequence
  Synthetic oligonucleotide
aggtactagtacggtagtcaaagtctatac

SEQ ID NO: 186561 - DNA, 30 bp, Artificial Sequence
  Synthetic oligonucleotide
catcggagagggaagttagcctttctatac

SEQ ID NO: 186562 - DNA, 30 bp, Artificial Sequence
  Synthetic oligonucleotide
tgacgggcgttgcaagtacagagagtatac

SEQ ID NO: 186563 - DNA, 30 bp, Artificial Sequence
  Synthetic oligonucleotide
ggatacgttaggcaagtgcggagagtatac

SEQ ID NO: 186564 - DNA, 30 bp, Artificial Sequence
  Synthetic oligonucleotide
cgggcataggttcgtagcttaggagtatac

SEQ ID NO: 186565 - DNA, 30 bp, Artificial Sequence
  Synthetic oligonucleotide
gtctggattatgcgggacgctagggtatac

SEQ ID NO: 186566 - DNA, 30 bp, Artificial Sequence
  Synthetic oligonucleotide
agcccaaaacagccaagctttcatgtatac

SEQ ID NO: 186567 - DNA, 30 bp, Artificial Sequence
  Synthetic oligonucleotide
gcgaagacagtggcagttacaatattatac

SEQ ID NO: 186568 - DNA, 30 bp, Artificial Sequence
  Synthetic oligonucleotide
atcggcttgaacgtataacttgagttatac

SEQ ID NO: 186569 - DNA, 30 bp, Artificial Sequence
  Synthetic oligonucleotide
tctgagtgatgatagggaccgtcgttatac

SEQ ID NO: 186570 - DNA, 30 bp, Artificial Sequence
  Synthetic oligonucleotide
tgtgtatggcaacggctcgatgggttatac

SEQ ID NO: 186571 - DNA, 30 bp, Artificial Sequence
  Synthetic oligonucleotide
cgtagtggtgaagaaggggcgagtttatac

SEQ ID NO: 186572 - DNA, 30 bp, Artificial Sequence
  Synthetic oligonucleotide
tcttaaatgttggcttgctcccaaaactac

SEQ ID NO: 186573 - DNA, 30 bp, Artificial Sequence
  Synthetic oligonucleotide
agtgcgaaaatatagaacaggtcaaactac

SEQ ID NO: 186574 - DNA, 30 bp, Artificial Sequence
  Synthetic oligonucleotide
ggcaaaggagccaccaagcgggccaactac

SEQ ID NO: 186575 - DNA, 30 bp, Artificial Sequence
  Synthetic oligonucleotide
gcaagcggtctcggaactttaaataactac

SEQ ID NO: 186576 - DNA, 30 bp, Artificial Sequence
  Synthetic oligonucleotide
tgtccgcaatcaaataactgaatgcactac

SEQ ID NO: 186577 - DNA, 30 bp, Artificial Sequence
  Synthetic oligonucleotide
agaagtcaaatgtggcgtaggcatcactac

SEQ ID NO: 186578 - DNA, 30 bp, Artificial Sequence
  Synthetic oligonucleotide
ggagagtttaggtcgaacggcctatactac

SEQ ID NO: 186579 - DNA, 30 bp, Artificial Sequence
  Synthetic oligonucleotide
agcacctatgatagagcgtggacgtactac

SEQ ID NO: 186580 - DNA, 30 bp, Artificial Sequence
  Synthetic oligonucleotide
acaagtctggcagccatgtcaatgtactac

SEQ ID NO: 186581 - DNA, 30 bp, Artificial Sequence
  Synthetic oligonucleotide
cacttgccagagaaaagacagtgaacctac

SEQ ID NO: 186582 - DNA, 30 bp, Artificial Sequence
  Synthetic oligonucleotide
atatgaatagtgaggtcgacagcgacctac

SEQ ID NO: 186583 - DNA, 30 bp, Artificial Sequence
  Synthetic oligonucleotide
ctgggtaagcctgtttattttgggacctac

SEQ ID NO: 186584 - DNA, 30 bp, Artificial Sequence
  Synthetic oligonucleotide
aagtcgccaaaatcccgcttgatcccctac

SEQ ID NO: 186585 - DNA, 30 bp, Artificial Sequence
  Synthetic oligonucleotide
tacaggaacgggtaacagctattcccctac

SEQ ID NO: 186586 - DNA, 30 bp, Artificial Sequence
  Synthetic oligonucleotide
gaaagatcgcaactagtggaatatccctac

SEQ ID NO: 186587 - DNA, 30 bp, Artificial Sequence
  Synthetic oligonucleotide
ttagcaatccagcgttaatcgtctccctac

SEQ ID NO: 186588 - DNA, 30 bp, Artificial Sequence
  Synthetic oligonucleotide
ccgggcacgtctaagtactacagtccctac

SEQ ID NO: 186589 - DNA, 30 bp, Artificial Sequence
  Synthetic oligonucleotide
ttggggggtagtctggtggttcagtcctac

SEQ ID NO: 186590 - DNA, 30 bp, Artificial Sequence
  Synthetic oligonucleotide
agggtagcaaaggggggaaaaagttcctac

SEQ ID NO: 186591 - DNA, 30 bp, Artificial Sequence
  Synthetic oligonucleotide
ctaataaggcataagtgtatcgcaagctac

SEQ ID NO: 186592 - DNA, 30 bp, Artificial Sequence
  Synthetic oligonucleotide
ggcgtatcagaatataaaaagaccagctac

SEQ ID NO: 186593 - DNA, 30 bp, Artificial Sequence
  Synthetic oligonucleotide
cacggtaaagcgtctaatattctcagctac

SEQ ID NO: 186594 - DNA, 30 bp, Artificial Sequence
  Synthetic oligonucleotide
cgtcggagcgggggttttggtactagctac

SEQ ID NO: 186595 - DNA, 30 bp, Artificial Sequence
  Synthetic oligonucleotide
cacaagtaggtccttacacaaagtagctac

SEQ ID NO: 186596 - DNA, 30 bp, Artificial Sequence
  Synthetic oligonucleotide
gacaggacatatacttataagccgcgctac

SEQ ID NO: 186597 - DNA, 30 bp, Artificial Sequence
  Synthetic oligonucleotide
gatatttcagaattaatggtccctcgctac

SEQ ID NO: 186598 - DNA, 30 bp, Artificial Sequence
  Synthetic oligonucleotide
tgaagagtgtcagggaggctgatcggctac

SEQ ID NO: 186599 - DNA, 30 bp, Artificial Sequence
  Synthetic oligonucleotide
gcaaatacgaatagtaaggatttgggctac

SEQ ID NO: 186600 - DNA, 30 bp, Artificial Sequence
  Synthetic oligonucleotide
agtaaagtcggaacaggcctaggtggctac

SEQ ID NO: 186601 - DNA, 30 bp, Artificial Sequence
  Synthetic oligonucleotide
actacaaacgcttaaggaactatgtgctac

SEQ ID NO: 186602 - DNA, 30 bp, Artificial Sequence
  Synthetic oligonucleotide
agctggatgtgtaattgatcacccatctac

SEQ ID NO: 186603 - DNA, 30 bp, Artificial Sequence
  Synthetic oligonucleotide
agtagactggagggatattctatcatctac

SEQ ID NO: 186604 - DNA, 30 bp, Artificial Sequence
  Synthetic oligonucleotide
agggtgggataggaacgatgattgatctac

SEQ ID NO: 186605 - DNA, 30 bp, Artificial Sequence
  Synthetic oligonucleotide
aatgcgacggggagcgacacccggctctac

SEQ ID NO: 186606 - DNA, 30 bp, Artificial Sequence
  Synthetic oligonucleotide
tcggaatgtggaaagttactgagcgtctac

SEQ ID NO: 186607 - DNA, 30 bp, Artificial Sequence
  Synthetic oligonucleotide
tgcagaaatgacagaggacctcgcgtctac

SEQ ID NO: 186608 - DNA, 30 bp, Artificial Sequence
  Synthetic oligonucleotide
actgacttcctgtcaaaaaacagattctac

SEQ ID NO: 186609 - DNA, 30 bp, Artificial Sequence
  Synthetic oligonucleotide
tcgagggatttggtggatacggtgttctac

SEQ ID NO: 186610 - DNA, 30 bp, Artificial Sequence
  Synthetic oligonucleotide
ctaaggacgtgatacagacgagaaaagtac

SEQ ID NO: 186611 - DNA, 30 bp, Artificial Sequence
  Synthetic oligonucleotide
tcaatagtataggagactcgacacaagtac

SEQ ID NO: 186612 - DNA, 30 bp, Artificial Sequence
  Synthetic oligonucleotide
cccataatcgaaggaagacggtataagtac

SEQ ID NO: 186613 - DNA, 30 bp, Artificial Sequence
  Synthetic oligonucleotide
cagttgattggtccgcttattcgtaagtac

SEQ ID NO: 186614 - DNA, 30 bp, Artificial Sequence
  Synthetic oligonucleotide
aggtatagtcgggtgttccttggtaagtac

SEQ ID NO: 186615 - DNA, 30 bp, Artificial Sequence
  Synthetic oligonucleotide
tagggacaacgtgcttggagcacacagtac

SEQ ID NO: 186616 - DNA, 30 bp, Artificial Sequence
  Synthetic oligonucleotide
acggatccacatcgtcttcacatgcagtac

SEQ ID NO: 186617 - DNA, 30 bp, Artificial Sequence
  Synthetic oligonucleotide
ttcggaggcggttggcatgtcgtgcagtac

SEQ ID NO: 186618 - DNA, 30 bp, Artificial Sequence
  Synthetic oligonucleotide
aaaaagatctaatggtgttgcaatcagtac

SEQ ID NO: 186619 - DNA, 30 bp, Artificial Sequence
  Synthetic oligonucleotide
agtcactcgcaaactgcgcgacgtcagtac

SEQ ID NO: 186620 - DNA, 30 bp, Artificial Sequence
  Synthetic oligonucleotide
ctcatttgtcgcacgtgttagccagagtac

SEQ ID NO: 186621 - DNA, 30 bp, Artificial Sequence
  Synthetic oligonucleotide
actggctgagccagggaaaccagagagtac

SEQ ID NO: 186622 - DNA, 30 bp, Artificial Sequence
  Synthetic oligonucleotide
acgcaataaatttgcatatgtacggagtac

SEQ ID NO: 186623 - DNA, 30 bp, Artificial Sequence
  Synthetic oligonucleotide
agagctttatcgcgtagaccgtgggagtac

SEQ ID NO: 186624 - DNA, 30 bp, Artificial Sequence
  Synthetic oligonucleotide
gttgttgtacatggatcaagaatggagtac

SEQ ID NO: 186625 - DNA, 30 bp, Artificial Sequence
  Synthetic oligonucleotide
gatcatcagacggcattttcggtggagtac

SEQ ID NO: 186626 - DNA, 30 bp, Artificial Sequence
  Synthetic oligonucleotide
cattgttggcataatagtgtagactagtac

SEQ ID NO: 186627 - DNA, 30 bp, Artificial Sequence
  Synthetic oligonucleotide
acttaaagggtacacctactaaacacgtac

SEQ ID NO: 186628 - DNA, 30 bp, Artificial Sequence
  Synthetic oligonucleotide
tcatgtagtcgctatatctcatccacgtac

SEQ ID NO: 186629 - DNA, 30 bp, Artificial Sequence
  Synthetic oligonucleotide
aggctttgactggaagcggctatcacgtac

SEQ ID NO: 186630 - DNA, 30 bp, Artificial Sequence
  Synthetic oligonucleotide
aattatggtggaaaaacgtagctcacgtac

SEQ ID NO: 186631 - DNA, 30 bp, Artificial Sequence
  Synthetic oligonucleotide
acagcctgttacaggcgacaagggacgtac

SEQ ID NO: 186632 - DNA, 30 bp, Artificial Sequence
  Synthetic oligonucleotide
atcatcttatacaacaacctaattacgtac

SEQ ID NO: 186633 - DNA, 30 bp, Artificial Sequence
  Synthetic oligonucleotide
aacttgggacagggctttcgcagaccgtac

SEQ ID NO: 186634 - DNA, 30 bp, Artificial Sequence
  Synthetic oligonucleotide
ggtcctaagtacttgagacaattcccgtac

SEQ ID NO: 186635 - DNA, 30 bp, Artificial Sequence
  Synthetic oligonucleotide
gtgggatggaaatgtatactgtggccgtac

SEQ ID NO: 186636 - DNA, 30 bp, Artificial Sequence
  Synthetic oligonucleotide
taagttcccatgcttcgaaattctccgtac

SEQ ID NO: 186637 - DNA, 31 bp, Artificial Sequence
  Synthetic oligonucleotide
tggtaaatccccaacacccgctgtagcgtac

SEQ ID NO: 186638 - DNA, 30 bp, Artificial Sequence
  Synthetic oligonucleotide
gagactgaatcgaagcgaaggtcatcgtac

SEQ ID NO: 186639 - DNA, 30 bp, Artificial Sequence
  Synthetic oligonucleotide
agagtggaatgctttcaggcaatatcgtac

SEQ ID NO: 186640 - DNA, 30 bp, Artificial Sequence
  Synthetic oligonucleotide
gtagtcatggggggtacacgagtctcgtac

SEQ ID NO: 186641 - DNA, 30 bp, Artificial Sequence
  Synthetic oligonucleotide
ccagcattatctactgtacccgggtcgtac

SEQ ID NO: 186642 - DNA, 30 bp, Artificial Sequence
  Synthetic oligonucleotide
agggttcttctcatgactccactgtcgtac

SEQ ID NO: 186643 - DNA, 30 bp, Artificial Sequence
  Synthetic oligonucleotide
gcttgagttaggagttattgctattcgtac

SEQ ID NO: 186644 - DNA, 30 bp, Artificial Sequence
  Synthetic oligonucleotide
aaatcaggcccaagcgagcatcataggtac

SEQ ID NO: 186645 - DNA, 30 bp, Artificial Sequence
  Synthetic oligonucleotide
gcaaggtcacatcgccgtgttagacggtac

SEQ ID NO: 186646 - DNA, 30 bp, Artificial Sequence
  Synthetic oligonucleotide
cggctaggcaacgttaccgtggggcggtac

SEQ ID NO: 186647 - DNA, 30 bp, Artificial Sequence
  Synthetic oligonucleotide
aattgaggcgatgacgttcgagtagggtac

SEQ ID NO: 186648 - DNA, 30 bp, Artificial Sequence
  Synthetic oligonucleotide
gaacgtccgataatcagctcgttagggtac

SEQ ID NO: 186649 - DNA, 30 bp, Artificial Sequence
  Synthetic oligonucleotide
ggtctcacatatagtctgctacacgggtac

SEQ ID NO: 186650 - DNA, 30 bp, Artificial Sequence
  Synthetic oligonucleotide
ggttgctagcgtcttctgccgtccgggtac

SEQ ID NO: 186651 - DNA, 30 bp, Artificial Sequence
  Synthetic oligonucleotide
attacgtactcatcaatggtaagcgggtac

SEQ ID NO: 186652 - DNA, 30 bp, Artificial Sequence
  Synthetic oligonucleotide
caagactggacaagtggatttttcgggtac

SEQ ID NO: 186653 - DNA, 30 bp, Artificial Sequence
  Synthetic oligonucleotide
ttcatgatactgtggatgctaactgggtac

SEQ ID NO: 186654 - DNA, 30 bp, Artificial Sequence
  Synthetic oligonucleotide
tacatagaaggggggtactcaagtgggtac

SEQ ID NO: 186655 - DNA, 30 bp, Artificial Sequence
  Synthetic oligonucleotide
tggccctccgactatttatcacactggtac

SEQ ID NO: 186656 - DNA, 30 bp, Artificial Sequence
  Synthetic oligonucleotide
ccactaagagtactggtcgccacctggtac

SEQ ID NO: 186657 - DNA, 30 bp, Artificial Sequence
  Synthetic oligonucleotide
tctaccatgtgaacttatgactagtggtac

SEQ ID NO: 186658 - DNA, 30 bp, Artificial Sequence
  Synthetic oligonucleotide
agcgttaggactcttcgcggaagcatgtac

SEQ ID NO: 186659 - DNA, 31 bp, Artificial Sequence
  Synthetic oligonucleotide
attaatctccccgaacaaagcatggatgtac

SEQ ID NO: 186660 - DNA, 30 bp, Artificial Sequence
  Synthetic oligonucleotide
aagcatttcctgctagtgacgtcactgtac

SEQ ID NO: 186661 - DNA, 30 bp, Artificial Sequence
  Synthetic oligonucleotide
caacaaacagtaatatccaggcccctgtac

SEQ ID NO: 186662 - DNA, 30 bp, Artificial Sequence
  Synthetic oligonucleotide
tggtatacgtaagtaggagcacggctgtac

SEQ ID NO: 186663 - DNA, 30 bp, Artificial Sequence
  Synthetic oligonucleotide
gatgatgattgagtacgacatgatctgtac

SEQ ID NO: 186664 - DNA, 30 bp, Artificial Sequence
  Synthetic oligonucleotide
tgctatctcgaccaaactgtcattctgtac

SEQ ID NO: 186665 - DNA, 40 bp, Artificial Sequence
  Synthetic oligonucleotide
tagattcgttggtcccgtccatcgctccccccaggtgtac

SEQ ID NO: 186666 - DNA, 30 bp, Artificial Sequence
  Synthetic oligonucleotide
tacttacaggcaggcagggagagggtgtac

SEQ ID NO: 186667 - DNA, 30 bp, Artificial Sequence
  Synthetic oligonucleotide
acctctatggcctcgggcacaactgtgtac

SEQ ID NO: 186668 - DNA, 30 bp, Artificial Sequence
  Synthetic oligonucleotide
caacacccgtgcggctcagggtacttgtac

SEQ ID NO: 186669 - DNA, 30 bp, Artificial Sequence
  Synthetic oligonucleotide
aactgtcaccttaaagctacattgttgtac

SEQ ID NO: 186670 - DNA, 30 bp, Artificial Sequence
  Synthetic oligonucleotide
gcattcaaaggtcatgcgcctattttgtac

SEQ ID NO: 186671 - DNA, 30 bp, Artificial Sequence
  Synthetic oligonucleotide
cctgagcacagtataacacacaaaaattac

SEQ ID NO: 186672 - DNA, 30 bp, Artificial Sequence
  Synthetic oligonucleotide
cgctagtacgataaacaaggactgaattac

SEQ ID NO: 186673 - DNA, 30 bp, Artificial Sequence
  Synthetic oligonucleotide
ccctatagaagcatttggtaaaagcattac

SEQ ID NO: 186674 - DNA, 30 bp, Artificial Sequence
  Synthetic oligonucleotide
catttgtagtacggctagggagggcattac

SEQ ID NO: 186675 - DNA, 30 bp, Artificial Sequence
  Synthetic oligonucleotide
cagtgaattagttgagcaccaagtcattac

SEQ ID NO: 186676 - DNA, 30 bp, Artificial Sequence
  Synthetic oligonucleotide
tttgctaacaaacaaggtggaggtcattac

SEQ ID NO: 186677 - DNA, 30 bp, Artificial Sequence
  Synthetic oligonucleotide
ctagctcgcaaccattaaaaaaccgattac

SEQ ID NO: 186678 - DNA, 30 bp, Artificial Sequence
  Synthetic oligonucleotide
atgctcacgggacggctctaggtctattac

SEQ ID NO: 186679 - DNA, 30 bp, Artificial Sequence
  Synthetic oligonucleotide
acgaagcggcgcacaatcgggtattattac

SEQ ID NO: 186680 - DNA, 30 bp, Artificial Sequence
  Synthetic oligonucleotide
acagccaatgggacagctaacaaaacttac

SEQ ID NO: 186681 - DNA, 30 bp, Artificial Sequence
  Synthetic oligonucleotide
taacaaagtaagacgtggccaagcacttac

SEQ ID NO: 186682 - DNA, 30 bp, Artificial Sequence
  Synthetic oligonucleotide
ccggatggcgcgtaagaagctgtgacttac

SEQ ID NO: 186683 - DNA, 30 bp, Artificial Sequence
  Synthetic oligonucleotide
ctcgaagactctcgagattggaaggcttac

SEQ ID NO: 186684 - DNA, 30 bp, Artificial Sequence
  Synthetic oligonucleotide
gaagttacaggtcgagttcggcaatcttac

SEQ ID NO: 186685 - DNA, 30 bp, Artificial Sequence
  Synthetic oligonucleotide
cttaccaggattttggattgcacatcttac

SEQ ID NO: 186686 - DNA, 30 bp, Artificial Sequence
  Synthetic oligonucleotide
ccaggcatcccactgaattggacctcttac

SEQ ID NO: 186687 - DNA, 30 bp, Artificial Sequence
  Synthetic oligonucleotide
ttttgggatgaataccggttgccgtcttac

SEQ ID NO: 186688 - DNA, 30 bp, Artificial Sequence
  Synthetic oligonucleotide
cgcacgaatctctataccaattgaagttac

SEQ ID NO: 186689 - DNA, 30 bp, Artificial Sequence
  Synthetic oligonucleotide
tgacgcaattgaatgggataattcagttac

SEQ ID NO: 186690 - DNA, 30 bp, Artificial Sequence
  Synthetic oligonucleotide
gggttgagtattcgggtgtgtgggagttac

SEQ ID NO: 186691 - DNA, 30 bp, Artificial Sequence
  Synthetic oligonucleotide
agcgatgcctcgtataccgtgttgagttac

SEQ ID NO: 186692 - DNA, 30 bp, Artificial Sequence
  Synthetic oligonucleotide
ggacaccgcatacgtgatccaaggcgttac

SEQ ID NO: 186693 - DNA, 30 bp, Artificial Sequence
  Synthetic oligonucleotide
ccgcttggtctaagagattggtaaggttac

SEQ ID NO: 186694 - DNA, 30 bp, Artificial Sequence
  Synthetic oligonucleotide
tgacatacagtggctcgatattcaggttac

SEQ ID NO: 186695 - DNA, 30 bp, Artificial Sequence
  Synthetic oligonucleotide
acgcccataagcgtgagaacggtaggttac

SEQ ID NO: 186696 - DNA, 30 bp, Artificial Sequence
  Synthetic oligonucleotide
ccttgacatctccagatagatcacggttac

SEQ ID NO: 186697 - DNA, 30 bp, Artificial Sequence
  Synthetic oligonucleotide
agatttcttctgggcaaggtccagggttac

SEQ ID NO: 186698 - DNA, 30 bp, Artificial Sequence
  Synthetic oligonucleotide
gatccaagcgtagtgaactaagagggttac

SEQ ID NO: 186699 - DNA, 30 bp, Artificial Sequence
  Synthetic oligonucleotide
aggctacgagtggtttccccatatggttac

SEQ ID NO: 186700 - DNA, 30 bp, Artificial Sequence
  Synthetic oligonucleotide
gccagtggaaaggaacttagatgtggttac

SEQ ID NO: 186701 - DNA, 30 bp, Artificial Sequence
  Synthetic oligonucleotide
tccgggaaacccgccttcaagattggttac

SEQ ID NO: 186702 - DNA, 30 bp, Artificial Sequence
  Synthetic oligonucleotide
tacgttggcattaaattggcgaagtgttac

SEQ ID NO: 186703 - DNA, 30 bp, Artificial Sequence
  Synthetic oligonucleotide
tatcaccgtcgcggctaccgcgtcatttac

SEQ ID NO: 186704 - DNA, 30 bp, Artificial Sequence
  Synthetic oligonucleotide
agactaccgagcaattcaacgtatatttac

SEQ ID NO: 186705 - DNA, 30 bp, Artificial Sequence
  Synthetic oligonucleotide
acggcttttctcaagcgaaatcggctttac

SEQ ID NO: 186706 - DNA, 30 bp, Artificial Sequence
  Synthetic oligonucleotide
cacgatttttccgaataataaatgctttac

SEQ ID NO: 186707 - DNA, 30 bp, Artificial Sequence
  Synthetic oligonucleotide
aggctttaggagggcaatcatcaggtttac

SEQ ID NO: 186708 - DNA, 30 bp, Artificial Sequence
  Synthetic oligonucleotide
aaagtcgggtgtggacgtgcgagtgtttac

SEQ ID NO: 186709 - DNA, 30 bp, Artificial Sequence
  Synthetic oligonucleotide
cgcgagggcccgtgtttaacgttcttttac

SEQ ID NO: 186710 - DNA, 30 bp, Artificial Sequence
  Synthetic oligonucleotide
cacgcgtactggtattccgccgagttttac

SEQ ID NO: 186711 - DNA, 30 bp, Artificial Sequence
  Synthetic oligonucleotide
cgacacccgacatcaactttatggttttac

SEQ ID NO: 186712 - DNA, 30 bp, Artificial Sequence
  Synthetic oligonucleotide
tgaatatctctaaggggacatagtttttac

SEQ ID NO: 186713 - DNA, 30 bp, Artificial Sequence
  Synthetic oligonucleotide
tgcggagtaccggtaatacttgcaaaaacc

SEQ ID NO: 186714 - DNA, 30 bp, Artificial Sequence
  Synthetic oligonucleotide
gcctgaaaggaccctgtcaagggaaaaacc

SEQ ID NO: 186715 - DNA, 30 bp, Artificial Sequence
  Synthetic oligonucleotide
gtcgtctacaggaacacaatcgccaaaacc

SEQ ID NO: 186716 - DNA, 30 bp, Artificial Sequence
  Synthetic oligonucleotide
tggattatggcaactatcgtcctgaaaacc

SEQ ID NO: 186717 - DNA, 30 bp, Artificial Sequence
  Synthetic oligonucleotide
caggatctaaattgtgttgaattgaaaacc

SEQ ID NO: 186718 - DNA, 30 bp, Artificial Sequence
  Synthetic oligonucleotide
gtgagccacataccttcctttagacaaacc

SEQ ID NO: 186719 - DNA, 30 bp, Artificial Sequence
  Synthetic oligonucleotide
gatcggaggtgtgctttcatgcgccaaacc

SEQ ID NO: 186720 - DNA, 30 bp, Artificial Sequence
  Synthetic oligonucleotide
ggctcgagggatatccacgctcgcgaaacc

SEQ ID NO: 186721 - DNA, 30 bp, Artificial Sequence
  Synthetic oligonucleotide
taaggtccacacggggcactaactgaaacc

SEQ ID NO: 186722 - DNA, 30 bp, Artificial Sequence
  Synthetic oligonucleotide
agaacatggcaggccgcctaggattaaacc

SEQ ID NO: 186723 - DNA, 30 bp, Artificial Sequence
  Synthetic oligonucleotide
gaggatgagagcggccgtctcttaacaacc

SEQ ID NO: 186724 - DNA, 30 bp, Artificial Sequence
  Synthetic oligonucleotide
tgcttcagcggcaagcttaatagcccaacc

SEQ ID NO: 186725 - DNA, 30 bp, Artificial Sequence
  Synthetic oligonucleotide
agcttaacggtcgtatatctccggccaacc

SEQ ID NO: 186726 - DNA, 30 bp, Artificial Sequence
  Synthetic oligonucleotide
acttcccttgtcttaaaaaaccatccaacc

SEQ ID NO: 186727 - DNA, 30 bp, Artificial Sequence
  Synthetic oligonucleotide
gatccgtactatattttgttttatccaacc

SEQ ID NO: 186728 - DNA, 30 bp, Artificial Sequence
  Synthetic oligonucleotide
tacgtgtggcacgaacgaaacgcagcaacc

SEQ ID NO: 186729 - DNA, 30 bp, Artificial Sequence
  Synthetic oligonucleotide
ttaatagctaactgtgtgcccgtcgcaacc

SEQ ID NO: 186730 - DNA, 30 bp, Artificial Sequence
  Synthetic oligonucleotide
gttgctgtacgactggtgatctgtgcaacc

SEQ ID NO: 186731 - DNA, 30 bp, Artificial Sequence
  Synthetic oligonucleotide
ttgcgataaactaaaaactatctatcaacc

SEQ ID NO: 186732 - DNA, 30 bp, Artificial Sequence
  Synthetic oligonucleotide
tatacacgctatgtgcgccaggcctcaacc

SEQ ID NO: 186733 - DNA, 30 bp, Artificial Sequence
  Synthetic oligonucleotide
cgcgtggttacggccaaagcttgctcaacc

SEQ ID NO: 186734 - DNA, 30 bp, Artificial Sequence
  Synthetic oligonucleotide
ctttcgatacattaacacatatattcaacc

SEQ ID NO: 186735 - DNA, 30 bp, Artificial Sequence
  Synthetic oligonucleotide
gagaagcgttaacccgaaattaaaagaacc

SEQ ID NO: 186736 - DNA, 29 bp, Artificial Sequence
  Synthetic oligonucleotide
agcccgcggtggtggcgaatgaaagaacc

SEQ ID NO: 186737 - DNA, 30 bp, Artificial Sequence
  Synthetic oligonucleotide
gcccagagctattagcccgttgaaagaacc

SEQ ID NO: 186738 - DNA, 30 bp, Artificial Sequence
  Synthetic oligonucleotide
caaggaccttaggcgaatccaggtagaacc

SEQ ID NO: 186739 - DNA, 30 bp, Artificial Sequence
  Synthetic oligonucleotide
gtcatctttcttgatggggacggccgaacc

SEQ ID NO: 186740 - DNA, 30 bp, Artificial Sequence
  Synthetic oligonucleotide
ggaagtgcccggattatggtaagtcgaacc

SEQ ID NO: 186741 - DNA, 30 bp, Artificial Sequence
  Synthetic oligonucleotide
tagattaaacaataaacggacgaaggaacc

SEQ ID NO: 186742 - DNA, 30 bp, Artificial Sequence
  Synthetic oligonucleotide
gtataaagaacggttaagccggcgggaacc

SEQ ID NO: 186743 - DNA, 30 bp, Artificial Sequence
  Synthetic oligonucleotide
gatctgacggttggaggcttaatgggaacc

SEQ ID NO: 186744 - DNA, 30 bp, Artificial Sequence
  Synthetic oligonucleotide
cggtgaactaagatgtctaatgatggaacc

SEQ ID NO: 186745 - DNA, 30 bp, Artificial Sequence
  Synthetic oligonucleotide
cgagaccggtagggttcccgcgttggaacc

SEQ ID NO: 186746 - DNA, 30 bp, Artificial Sequence
  Synthetic oligonucleotide
atatcagcagtaatgaatgcctttggaacc

SEQ ID NO: 186747 - DNA, 30 bp, Artificial Sequence
  Synthetic oligonucleotide
ggcagggtagaattatatgccccctgaacc

SEQ ID NO: 186748 - DNA, 30 bp, Artificial Sequence
  Synthetic oligonucleotide
ccaggaattccgttacacaagggctgaacc

SEQ ID NO: 186749 - DNA, 30 bp, Artificial Sequence
  Synthetic oligonucleotide
cgccttcactatggagactctgtttgaacc

SEQ ID NO: 186750 - DNA, 30 bp, Artificial Sequence
  Synthetic oligonucleotide
gaggtgggtcaaaagacggtaacgataacc

SEQ ID NO: 186751 - DNA, 30 bp, Artificial Sequence
  Synthetic oligonucleotide
tacttaacggacggtacggctgatataacc

SEQ ID NO: 186752 - DNA, 30 bp, Artificial Sequence
  Synthetic oligonucleotide
tagcacagagcggaatcgtaggaagtaacc

SEQ ID NO: 186753 - DNA, 30 bp, Artificial Sequence
  Synthetic oligonucleotide
gctgttcaaataagcacccaagcagtaacc

SEQ ID NO: 186754 - DNA, 30 bp, Artificial Sequence
  Synthetic oligonucleotide
agcgtaaggacgcatacaaggcgcgtaacc

SEQ ID NO: 186755 - DNA, 30 bp, Artificial Sequence
  Synthetic oligonucleotide
atacccagttactgtcttcctcgggtaacc

SEQ ID NO: 186756 - DNA, 30 bp, Artificial Sequence
  Synthetic oligonucleotide
ggatgtggaaagcaagactaaggggtaacc

SEQ ID NO: 186757 - DNA, 30 bp, Artificial Sequence
  Synthetic oligonucleotide
tgaaagtcccgaatttctggcaatgtaacc

SEQ ID NO: 186758 - DNA, 30 bp, Artificial Sequence
  Synthetic oligonucleotide
tcgaaggctccccgaagccgaggcttaacc

SEQ ID NO: 186759 - DNA, 29 bp, Artificial Sequence
  Synthetic oligonucleotide
tctggaaaagactggaagcaaagttaacc

SEQ ID NO: 186760 - DNA, 30 bp, Artificial Sequence
  Synthetic oligonucleotide
tgcgggacgtaatgaccagccaagttaacc

SEQ ID NO: 186761 - DNA, 30 bp, Artificial Sequence
  Synthetic oligonucleotide
gaggtaggtacgtctaaacagtatttaacc

SEQ ID NO: 186762 - DNA, 30 bp, Artificial Sequence
  Synthetic oligonucleotide
gaactcgcgttaacgggactattaaacacc

SEQ ID NO: 186763 - DNA, 30 bp, Artificial Sequence
  Synthetic oligonucleotide
tatccacgagacattcatgacaacaacacc

SEQ ID NO: 186764 - DNA, 30 bp, Artificial Sequence
  Synthetic oligonucleotide
gttataaactgacagcaaatgcagaacacc

SEQ ID NO: 186765 - DNA, 31 bp, Artificial Sequence
  Synthetic oligonucleotide
aataaaacagaatgaatccacacggaacacc

SEQ ID NO: 186766 - DNA, 30 bp, Artificial Sequence
  Synthetic oligonucleotide
gaaaacgagcttggtcgcaccctgaacacc

SEQ ID NO: 186767 - DNA, 30 bp, Artificial Sequence
  Synthetic oligonucleotide
gacatggtaatggctccctcattgaacacc

SEQ ID NO: 186768 - DNA, 30 bp, Artificial Sequence
  Synthetic oligonucleotide
tcatagattgagcgagtaagatcccacacc

SEQ ID NO: 186769 - DNA, 30 bp, Artificial Sequence
  Synthetic oligonucleotide
tctggctccgggaaaatctgacgagacacc

SEQ ID NO: 186770 - DNA, 30 bp, Artificial Sequence
  Synthetic oligonucleotide
tcggaaggatgatcgccgagaatagacacc

SEQ ID NO: 186771 - DNA, 30 bp, Artificial Sequence
  Synthetic oligonucleotide
tcctagggagtaacgccctgatgggacacc

SEQ ID NO: 186772 - DNA, 30 bp, Artificial Sequence
  Synthetic oligonucleotide
tgcaagacaaggctattgggctcatacacc

SEQ ID NO: 186773 - DNA, 30 bp, Artificial Sequence
  Synthetic oligonucleotide
acccgacacgacgtgactgggcgctacacc

SEQ ID NO: 186774 - DNA, 30 bp, Artificial Sequence
  Synthetic oligonucleotide
aacccaatggcgttccccggtatgtacacc

SEQ ID NO: 186775 - DNA, 30 bp, Artificial Sequence
  Synthetic oligonucleotide
ggggtctcgaccaaccaagtctattacacc

SEQ ID NO: 186776 - DNA, 30 bp, Artificial Sequence
  Synthetic oligonucleotide
gtgaaccacattattcagagagaaaccacc

SEQ ID NO: 186777 - DNA, 30 bp, Artificial Sequence
  Synthetic oligonucleotide
gacagatctcttattacccatgtgaccacc

SEQ ID NO: 186778 - DNA, 30 bp, Artificial Sequence
  Synthetic oligonucleotide
aaggcacaaagtcaggtgtatacacccacc

SEQ ID NO: 186779 - DNA, 30 bp, Artificial Sequence
  Synthetic oligonucleotide
caattagggcacgtatcaataagccccacc

SEQ ID NO: 186780 - DNA, 30 bp, Artificial Sequence
  Synthetic oligonucleotide
tctaacagtttccccgcaaccccgcccacc

SEQ ID NO: 186781 - DNA, 30 bp, Artificial Sequence
  Synthetic oligonucleotide
ctaagctccaggatctgtgatagggccacc

SEQ ID NO: 186782 - DNA, 30 bp, Artificial Sequence
  Synthetic oligonucleotide
ttgtggcggtccccagcaacctcatccacc

SEQ ID NO: 186783 - DNA, 30 bp, Artificial Sequence
  Synthetic oligonucleotide
tgccaaattctggggatttaggggtccacc

SEQ ID NO: 186784 - DNA, 30 bp, Artificial Sequence
  Synthetic oligonucleotide
atggtctatgacactgaggcatggtccacc

SEQ ID NO: 186785 - DNA, 30 bp, Artificial Sequence
  Synthetic oligonucleotide
aagggaactttcgttgttggtagttccacc

SEQ ID NO: 186786 - DNA, 30 bp, Artificial Sequence
  Synthetic oligonucleotide
agtgtgcagtgtatgacgtagggccgcacc

SEQ ID NO: 186787 - DNA, 30 bp, Artificial Sequence
  Synthetic oligonucleotide
ctgctgcacatagtgggaattcgcggcacc

SEQ ID NO: 186788 - DNA, 30 bp, Artificial Sequence
  Synthetic oligonucleotide
ccgtcgataggcccaagctggttcggcacc

SEQ ID NO: 186789 - DNA, 30 bp, Artificial Sequence
  Synthetic oligonucleotide
tggttaggttgcgttgcttgtgcgggcacc

SEQ ID NO: 186790 - DNA, 30 bp, Artificial Sequence
  Synthetic oligonucleotide
caccggctaaccaacatctctgttggcacc

SEQ ID NO: 186791 - DNA, 30 bp, Artificial Sequence
  Synthetic oligonucleotide
acaggaaagaagtattcctcttgctgcacc

SEQ ID NO: 186792 - DNA, 30 bp, Artificial Sequence
  Synthetic oligonucleotide
cctgcgcatgcccaacacgtccggtgcacc

SEQ ID NO: 186793 - DNA, 30 bp, Artificial Sequence
  Synthetic oligonucleotide
aggtccttgagtcggattcagggactcacc

SEQ ID NO: 186794 - DNA, 30 bp, Artificial Sequence
  Synthetic oligonucleotide
ctttaccgatgctaaccaacatgcctcacc

SEQ ID NO: 186795 - DNA, 30 bp, Artificial Sequence
  Synthetic oligonucleotide
ttatgagtttgggcagggaccgtgctcacc

SEQ ID NO: 186796 - DNA, 30 bp, Artificial Sequence
  Synthetic oligonucleotide
gatcaggtgttatagctgcatcttctcacc

SEQ ID NO: 186797 - DNA, 30 bp, Artificial Sequence
  Synthetic oligonucleotide
tcagggctgacttcaggtcaatttgtcacc

SEQ ID NO: 186798 - DNA, 30 bp, Artificial Sequence
  Synthetic oligonucleotide
atgtgcgtactatagataggcagtttcacc

SEQ ID NO: 186799 - DNA, 30 bp, Artificial Sequence
  Synthetic oligonucleotide
aaggggattatcaaagactcagaaaagacc

SEQ ID NO: 186800 - DNA, 30 bp, Artificial Sequence
  Synthetic oligonucleotide
gcaagtgggctgcgcaccctgccaaagacc

SEQ ID NO: 186801 - DNA, 30 bp, Artificial Sequence
  Synthetic oligonucleotide
agcattggaaaagaatacggtcgaaagacc

SEQ ID NO: 186802 - DNA, 30 bp, Artificial Sequence
  Synthetic oligonucleotide
atcattggtcctccatgttttgccaagacc

SEQ ID NO: 186803 - DNA, 30 bp, Artificial Sequence
  Synthetic oligonucleotide
actacttacaagcacacggcccgtaagacc

SEQ ID NO: 186804 - DNA, 30 bp, Artificial Sequence
  Synthetic oligonucleotide
ggcaaaccatccagatgcagcttacagacc

SEQ ID NO: 186805 - DNA, 30 bp, Artificial Sequence
  Synthetic oligonucleotide
ggagcgtctagggtcgccactttacagacc

SEQ ID NO: 186806 - DNA, 30 bp, Artificial Sequence
  Synthetic oligonucleotide
attatatggacgccaccactacgccagacc

SEQ ID NO: 186807 - DNA, 30 bp, Artificial Sequence
  Synthetic oligonucleotide
tgggaattcatgtcgccttccggccagacc

SEQ ID NO: 186808 - DNA, 30 bp, Artificial Sequence
  Synthetic oligonucleotide
acaccgatagggcaagcgcaggggcagacc

SEQ ID NO: 186809 - DNA, 30 bp, Artificial Sequence
  Synthetic oligonucleotide
cctgaaatcgagagactcatggctgagacc

SEQ ID NO: 186810 - DNA, 30 bp, Artificial Sequence
  Synthetic oligonucleotide
gttgcctatgctgaccaaggactgtagacc

SEQ ID NO: 186811 - DNA, 30 bp, Artificial Sequence
  Synthetic oligonucleotide
gcattaccgattcaacgtgaacgcacgacc

SEQ ID NO: 186812 - DNA, 30 bp, Artificial Sequence
  Synthetic oligonucleotide
accggcggtggatttacgcagtgaccgacc

SEQ ID NO: 186813 - DNA, 30 bp, Artificial Sequence
  Synthetic oligonucleotide
acaagatagggcgtggctggtagcccgacc

SEQ ID NO: 186814 - DNA, 30 bp, Artificial Sequence
  Synthetic oligonucleotide
actattgaagaggccaacggaaaagcgacc

SEQ ID NO: 186815 - DNA, 30 bp, Artificial Sequence
  Synthetic oligonucleotide
cgtgtcttcttggagtatttggttgcgacc

SEQ ID NO: 186816 - DNA, 30 bp, Artificial Sequence
  Synthetic oligonucleotide
atagcaaagccgcgatcctttagatcgacc

SEQ ID NO: 186817 - DNA, 30 bp, Artificial Sequence
  Synthetic oligonucleotide
gacgtggcagcttaaagagcatggtcgacc

SEQ ID NO: 186818 - DNA, 30 bp, Artificial Sequence
  Synthetic oligonucleotide
taactacggccgtcagagttgaaaaggacc

SEQ ID NO: 186819 - DNA, 30 bp, Artificial Sequence
  Synthetic oligonucleotide
ttccagtggccagatggcgccagaaggacc

SEQ ID NO: 186820 - DNA, 30 bp, Artificial Sequence
  Synthetic oligonucleotide
cgtggtacagcgagaacctttcgaaggacc

SEQ ID NO: 186821 - DNA, 30 bp, Artificial Sequence
  Synthetic oligonucleotide
gaatccaaaggactgcctaagtgaaggacc

SEQ ID NO: 186822 - DNA, 30 bp, Artificial Sequence
  Synthetic oligonucleotide
ggggttacgatttaaccttcatggaggacc

SEQ ID NO: 186823 - DNA, 31 bp, Artificial Sequence
  Synthetic oligonucleotide
gttagagagtttcaaggttgggcataggacc

SEQ ID NO: 186824 - DNA, 30 bp, Artificial Sequence
  Synthetic oligonucleotide
gattgagagtgatcggaaccaagccggacc

SEQ ID NO: 186825 - DNA, 30 bp, Artificial Sequence
  Synthetic oligonucleotide
ctgggggccaacggtcactaggcgcggacc

SEQ ID NO: 186826 - DNA, 30 bp, Artificial Sequence
  Synthetic oligonucleotide
gcttgtgccggtagcctggaattgcggacc

SEQ ID NO: 186827 - DNA, 30 bp, Artificial Sequence
  Synthetic oligonucleotide
ctcaaaactgtgccaggttgggaagggacc

SEQ ID NO: 186828 - DNA, 30 bp, Artificial Sequence
  Synthetic oligonucleotide
ttgaactctgaaacgtttaatgtggggacc

SEQ ID NO: 186829 - DNA, 30 bp, Artificial Sequence
  Synthetic oligonucleotide
aagtcggcgaggctgtgatacacctggacc

SEQ ID NO: 186830 - DNA, 30 bp, Artificial Sequence
  Synthetic oligonucleotide
atctcgatgattagtcgtttgtcgtggacc

SEQ ID NO: 186831 - DNA, 30 bp, Artificial Sequence
  Synthetic oligonucleotide
gtgtagactcaaaccacgcggcattggacc

SEQ ID NO: 186832 - DNA, 30 bp, Artificial Sequence
  Synthetic oligonucleotide
acgcggtactctgggtaagtatattggacc

SEQ ID NO: 186833 - DNA, 30 bp, Artificial Sequence
  Synthetic oligonucleotide
gatggaaccctgtgatatgaaatttggacc

SEQ ID NO: 186834 - DNA, 30 bp, Artificial Sequence
  Synthetic oligonucleotide
agtggctatgtgttatagtgcgatatgacc

SEQ ID NO: 186835 - DNA, 30 bp, Artificial Sequence
  Synthetic oligonucleotide
cgcatcgaattcctagcaaatcctatgacc

SEQ ID NO: 186836 - DNA, 30 bp, Artificial Sequence
  Synthetic oligonucleotide
gcttctacccggagaaactatcaactgacc

SEQ ID NO: 186837 - DNA, 30 bp, Artificial Sequence
  Synthetic oligonucleotide
tgatgccccagacaaatcgtcagactgacc

SEQ ID NO: 186838 - DNA, 30 bp, Artificial Sequence
  Synthetic oligonucleotide
gcatcgagtcaagataaagtcaacctgacc

SEQ ID NO: 186839 - DNA, 30 bp, Artificial Sequence
  Synthetic oligonucleotide
gtacgatcgcgattcattagtaggctgacc

SEQ ID NO: 186840 - DNA, 30 bp, Artificial Sequence
  Synthetic oligonucleotide
cgggcgcgaagtcgcaagaggtctctgacc

SEQ ID NO: 186841 - DNA, 30 bp, Artificial Sequence
  Synthetic oligonucleotide
agacctcgaacccctgcgcatggtctgacc

SEQ ID NO: 186842 - DNA, 30 bp, Artificial Sequence
  Synthetic oligonucleotide
aatccgtttaaccaggacccagtagtgacc

SEQ ID NO: 186843 - DNA, 31 bp, Artificial Sequence
  Synthetic oligonucleotide
aaggtgcgtcctccaggtcgctaacgtgacc

SEQ ID NO: 186844 - DNA, 30 bp, Artificial Sequence
  Synthetic oligonucleotide
cggctatttatcgatgaggcgtgcgtgacc

SEQ ID NO: 186845 - DNA, 30 bp, Artificial Sequence
  Synthetic oligonucleotide
atgatacctcagtatcgagcttcattgacc

SEQ ID NO: 186846 - DNA, 30 bp, Artificial Sequence
  Synthetic oligonucleotide
atagccgggaacgcgaaccccatattgacc

SEQ ID NO: 186847 - DNA, 30 bp, Artificial Sequence
  Synthetic oligonucleotide
aagcgggctaatggctacacgtcgttgacc

SEQ ID NO: 186848 - DNA, 30 bp, Artificial Sequence
  Synthetic oligonucleotide
atcagcagggccggtggggataatttgacc

SEQ ID NO: 186849 - DNA, 30 bp, Artificial Sequence
  Synthetic oligonucleotide
ttcgttgtaggaaggatcggaagcaatacc

SEQ ID NO: 186850 - DNA, 30 bp, Artificial Sequence
  Synthetic oligonucleotide
aaggcggcattcaacgttcagtgacatacc

SEQ ID NO: 186851 - DNA, 30 bp, Artificial Sequence
  Synthetic oligonucleotide
ctgataggtgctaatggcgcgcggcatacc

SEQ ID NO: 186852 - DNA, 30 bp, Artificial Sequence
  Synthetic oligonucleotide
gtccgagagagtggccaatacccagatacc

SEQ ID NO: 186853 - DNA, 30 bp, Artificial Sequence
  Synthetic oligonucleotide
gctcacgcaatcttccggtgatctgatacc

SEQ ID NO: 186854 - DNA, 30 bp, Artificial Sequence
  Synthetic oligonucleotide
aaggtttgagagacgctgatcgaatatacc

SEQ ID NO: 186855 - DNA, 30 bp, Artificial Sequence
  Synthetic oligonucleotide
ggtccgctggtcttacgtctcagccctacc

SEQ ID NO: 186856 - DNA, 30 bp, Artificial Sequence
  Synthetic oligonucleotide
tcgcgggatgaacctattacggctcctacc

SEQ ID NO: 186857 - DNA, 30 bp, Artificial Sequence
  Synthetic oligonucleotide
agtacaattgggttaatttggggatctacc

SEQ ID NO: 186858 - DNA, 30 bp, Artificial Sequence
  Synthetic oligonucleotide
actacttgacaggcggctcaagactctacc

SEQ ID NO: 186859 - DNA, 30 bp, Artificial Sequence
  Synthetic oligonucleotide
cggaggatgcacgtaagcctttcctctacc

SEQ ID NO: 186860 - DNA, 30 bp, Artificial Sequence
  Synthetic oligonucleotide
ccgagacaatttctgatgtaacacagtacc

SEQ ID NO: 186861 - DNA, 30 bp, Artificial Sequence
  Synthetic oligonucleotide
cccttggcgtcgattatttaagccagtacc

SEQ ID NO: 186862 - DNA, 30 bp, Artificial Sequence
  Synthetic oligonucleotide
atagtcgaatgtatgcgcggtgagagtacc

SEQ ID NO: 186863 - DNA, 30 bp, Artificial Sequence
  Synthetic oligonucleotide
agtggaaggtcagctggccagcggagtacc

SEQ ID NO: 186864 - DNA, 30 bp, Artificial Sequence
  Synthetic oligonucleotide
taagtgggctaatgacggtgccatagtacc

SEQ ID NO: 186865 - DNA, 30 bp, Artificial Sequence
  Synthetic oligonucleotide
ctagatgaaacagcgactacatcacgtacc

SEQ ID NO: 186866 - DNA, 30 bp, Artificial Sequence
  Synthetic oligonucleotide
gtagtcgaaagcgcagtacgaatccgtacc

SEQ ID NO: 186867 - DNA, 30 bp, Artificial Sequence
  Synthetic oligonucleotide
tagagctcgtctaaggtcggagctcgtacc

SEQ ID NO: 186868 - DNA, 30 bp, Artificial Sequence
  Synthetic oligonucleotide
gcagacaattcgcacagaggcattcgtacc

SEQ ID NO: 186869 - DNA, 30 bp, Artificial Sequence
  Synthetic oligonucleotide
gtgttatgtccctgactgggtgacggtacc

SEQ ID NO: 186870 - DNA, 30 bp, Artificial Sequence
  Synthetic oligonucleotide
gaaatgacgaagggcttgttcagcggtacc

SEQ ID NO: 186871 - DNA, 30 bp, Artificial Sequence
  Synthetic oligonucleotide
tcctgagcatggacgaaaagatcatgtacc

SEQ ID NO: 186872 - DNA, 30 bp, Artificial Sequence
  Synthetic oligonucleotide
acacggaaatataccattcagcactgtacc

SEQ ID NO: 186873 - DNA, 30 bp, Artificial Sequence
  Synthetic oligonucleotide
ggagaagcatttgtagcgacaacctgtacc

SEQ ID NO: 186874 - DNA, 30 bp, Artificial Sequence
  Synthetic oligonucleotide
ctcgatggcggaaattacgattcctgtacc

SEQ ID NO: 186875 - DNA, 30 bp, Artificial Sequence
  Synthetic oligonucleotide
ggtcgctgagctcatcggcgccattgtacc

SEQ ID NO: 186876 - DNA, 30 bp, Artificial Sequence
  Synthetic oligonucleotide
gaggttgaaccaacgaccgggcattgtacc

SEQ ID NO: 186877 - DNA, 30 bp, Artificial Sequence
  Synthetic oligonucleotide
ggagggcgactgtatggatgatgttgtacc

SEQ ID NO: 186878 - DNA, 30 bp, Artificial Sequence
  Synthetic oligonucleotide
agaccgagacaggaaaggtgttaaattacc

SEQ ID NO: 186879 - DNA, 30 bp, Artificial Sequence
  Synthetic oligonucleotide
ggccgcgtgcatacatcttgagtgattacc

SEQ ID NO: 186880 - DNA, 30 bp, Artificial Sequence
  Synthetic oligonucleotide
cggcctgaccgtgacttggaggatcttacc

SEQ ID NO: 186881 - DNA, 30 bp, Artificial Sequence
  Synthetic oligonucleotide
aaaccgagaggtaatatgagattagttacc

SEQ ID NO: 186882 - DNA, 30 bp, Artificial Sequence
  Synthetic oligonucleotide
acatagagtttcaacgcccgaagcgttacc

SEQ ID NO: 186883 - DNA, 30 bp, Artificial Sequence
  Synthetic oligonucleotide
ttggttctcagtgaaggtgtgatcgttacc

SEQ ID NO: 186884 - DNA, 30 bp, Artificial Sequence
  Synthetic oligonucleotide
tacattcgcaatctgtccctctatgttacc

SEQ ID NO: 186885 - DNA, 30 bp, Artificial Sequence
  Synthetic oligonucleotide
gggaccgcattcttttaagccgaatttacc

SEQ ID NO: 186886 - DNA, 30 bp, Artificial Sequence
  Synthetic oligonucleotide
tgtggactaacccccttcgctacaaaaccc

SEQ ID NO: 186887 - DNA, 30 bp, Artificial Sequence
  Synthetic oligonucleotide
ttagcaacgaataaccttagatggaaaccc

SEQ ID NO: 186888 - DNA, 30 bp, Artificial Sequence
  Synthetic oligonucleotide
ttgggtaatggggctaagtgtttgaaaccc

SEQ ID NO: 186889 - DNA, 30 bp, Artificial Sequence
  Synthetic oligonucleotide
taagcggcctggtacgtaaaagaacaaccc

SEQ ID NO: 186890 - DNA, 30 bp, Artificial Sequence
  Synthetic oligonucleotide
cattcccgcgtatagcgcgtactccaaccc

SEQ ID NO: 186891 - DNA, 30 bp, Artificial Sequence
  Synthetic oligonucleotide
gggtcaaagagggttttccgctccgaaccc

SEQ ID NO: 186892 - DNA, 30 bp, Artificial Sequence
  Synthetic oligonucleotide
cgttttactctcagactctttcgggaaccc

SEQ ID NO: 186893 - DNA, 30 bp, Artificial Sequence
  Synthetic oligonucleotide
gcgtcgaagacgtgttttatttaataaccc

SEQ ID NO: 186894 - DNA, 30 bp, Artificial Sequence
  Synthetic oligonucleotide
caagcccaagaaagagggcgctgctaaccc

SEQ ID NO: 186895 - DNA, 30 bp, Artificial Sequence
  Synthetic oligonucleotide
cgccatccggacataaaccgcgtaacaccc

SEQ ID NO: 186896 - DNA, 30 bp, Artificial Sequence
  Synthetic oligonucleotide
gacgaattagaaggagaaaaaaagacaccc

SEQ ID NO: 186897 - DNA, 30 bp, Artificial Sequence
  Synthetic oligonucleotide
aaatatatcgcgatttgaaatcatacaccc

SEQ ID NO: 186898 - DNA, 30 bp, Artificial Sequence
  Synthetic oligonucleotide
taagtaagggtagggttacggtatacaccc

SEQ ID NO: 186899 - DNA, 30 bp, Artificial Sequence
  Synthetic oligonucleotide
aacggcggacatatcctagtgcgtacaccc

SEQ ID NO: 186900 - DNA, 30 bp, Artificial Sequence
  Synthetic oligonucleotide
gatcaggggaagcagtggctcagcgcaccc

SEQ ID NO: 186901 - DNA, 30 bp, Artificial Sequence
  Synthetic oligonucleotide
agactgagaatcttatcgggactggcaccc

SEQ ID NO: 186902 - DNA, 30 bp, Artificial Sequence
  Synthetic oligonucleotide
cactcaaatatggagaattatccatcaccc

SEQ ID NO: 186903 - DNA, 30 bp, Artificial Sequence
  Synthetic oligonucleotide
gcgaatggtcccgctaggaatataagaccc

SEQ ID NO: 186904 - DNA, 30 bp, Artificial Sequence
  Synthetic oligonucleotide
ttgcgtcgacggaggaaagagctgagaccc

SEQ ID NO: 186905 - DNA, 30 bp, Artificial Sequence
  Synthetic oligonucleotide
ttctggatcggggaagctcgggtgagaccc

SEQ ID NO: 186906 - DNA, 30 bp, Artificial Sequence
  Synthetic oligonucleotide
tgaacgattagtaaccatggggtacgaccc

SEQ ID NO: 186907 - DNA, 30 bp, Artificial Sequence
  Synthetic oligonucleotide
tcatgctgtggactaggcaagtagggaccc

SEQ ID NO: 186908 - DNA, 30 bp, Artificial Sequence
  Synthetic oligonucleotide
cgacctactgtggccttacatccgggaccc

SEQ ID NO: 186909 - DNA, 30 bp, Artificial Sequence
  Synthetic oligonucleotide
ataatactccaatgcagggattggggaccc

SEQ ID NO: 186910 - DNA, 30 bp, Artificial Sequence
  Synthetic oligonucleotide
agatctcactgttgttacctcagatgaccc

SEQ ID NO: 186911 - DNA, 30 bp, Artificial Sequence
  Synthetic oligonucleotide
tcgttacggtatggattcacgagaataccc

SEQ ID NO: 186912 - DNA, 31 bp, Artificial Sequence
  Synthetic oligonucleotide
gtcaataaggccaaatctctctctaataccc

SEQ ID NO: 186913 - DNA, 38 bp, Artificial Sequence
  Synthetic oligonucleotide
tttgacttgaaagcatttcactcagccaattactaccc

SEQ ID NO: 186914 - DNA, 30 bp, Artificial Sequence
  Synthetic oligonucleotide
agaaggagaggttccctcggccttctaccc

SEQ ID NO: 186915 - DNA, 30 bp, Artificial Sequence
  Synthetic oligonucleotide
gaaacggcggagaccagtcgtagcgtaccc

SEQ ID NO: 186916 - DNA, 30 bp, Artificial Sequence
  Synthetic oligonucleotide
attacgggactatcgcttaccttggtaccc

SEQ ID NO: 186917 - DNA, 30 bp, Artificial Sequence
  Synthetic oligonucleotide
ggtacagcagttgcgaccggaacattaccc

SEQ ID NO: 186918 - DNA, 30 bp, Artificial Sequence
  Synthetic oligonucleotide
aatgtaggacgaatatctttaactttaccc

SEQ ID NO: 186919 - DNA, 30 bp, Artificial Sequence
  Synthetic oligonucleotide
ttaaggccgggttattgtgaacgacacccc

SEQ ID NO: 186920 - DNA, 30 bp, Artificial Sequence
  Synthetic oligonucleotide
aagcgtgccgggggtataccgcaccacccc

SEQ ID NO: 186921 - DNA, 30 bp, Artificial Sequence
  Synthetic oligonucleotide
aattagaagagaaggtcacgaaggcacccc

SEQ ID NO: 186922 - DNA, 30 bp, Artificial Sequence
  Synthetic oligonucleotide
aagatagagccatccgaattcaaagacccc

SEQ ID NO: 186923 - DNA, 30 bp, Artificial Sequence
  Synthetic oligonucleotide
gatgcgtgctggaacgccgaaagttacccc

SEQ ID NO: 186924 - DNA, 30 bp, Artificial Sequence
  Synthetic oligonucleotide
acttcaatgcacgcgtggagaataaccccc

SEQ ID NO: 186925 - DNA, 30 bp, Artificial Sequence
  Synthetic oligonucleotide
atcacaactacagcgaattgtctaaccccc

SEQ ID NO: 186926 - DNA, 30 bp, Artificial Sequence
  Synthetic oligonucleotide
cgtaacgatgagacataagatgttaccccc

SEQ ID NO: 186927 - DNA, 30 bp, Artificial Sequence
  Synthetic oligonucleotide
cacatcttgggagtacggctgagacccccc

SEQ ID NO: 186928 - DNA, 30 bp, Artificial Sequence
  Synthetic oligonucleotide
caggcttagccacaggtttacttacccccc

SEQ ID NO: 186929 - DNA, 30 bp, Artificial Sequence
  Synthetic oligonucleotide
acaggaattgaacgaacagcatcccccccc

SEQ ID NO: 186930 - DNA, 30 bp, Artificial Sequence
  Synthetic oligonucleotide
gtacctcagcagaagagaataagagccccc

SEQ ID NO: 186931 - DNA, 30 bp, Artificial Sequence
  Synthetic oligonucleotide
cgtcgctagacttacaggtaagacagcccc

SEQ ID NO: 186932 - DNA, 30 bp, Artificial Sequence
  Synthetic oligonucleotide
ccctagtgagattaatgcgcgtacagcccc

SEQ ID NO: 186933 - DNA, 30 bp, Artificial Sequence
  Synthetic oligonucleotide
aagtgggtccggacggagggtcatagcccc

SEQ ID NO: 186934 - DNA, 30 bp, Artificial Sequence
  Synthetic oligonucleotide
ttgacagggttaaaggtgggaggtagcccc

SEQ ID NO: 186935 - DNA, 30 bp, Artificial Sequence
  Synthetic oligonucleotide
cactacccataatatacaagatcgcgcccc

SEQ ID NO: 186936 - DNA, 30 bp, Artificial Sequence
  Synthetic oligonucleotide
gtacaaccagcgctgcgttgtcaaggcccc

SEQ ID NO: 186937 - DNA, 30 bp, Artificial Sequence
  Synthetic oligonucleotide
cggtatggatattgtctcgagtgcggcccc

SEQ ID NO: 186938 - DNA, 30 bp, Artificial Sequence
  Synthetic oligonucleotide
acactgcataaggagggttggtatggcccc

SEQ ID NO: 186939 - DNA, 30 bp, Artificial Sequence
  Synthetic oligonucleotide
taggacaagatacctatgggaagtggcccc

SEQ ID NO: 186940 - DNA, 30 bp, Artificial Sequence
  Synthetic oligonucleotide
aatgaccaattgggactacaggattgcccc

SEQ ID NO: 186941 - DNA, 30 bp, Artificial Sequence
  Synthetic oligonucleotide
agcagaagtagagtagataaaggttgcccc

SEQ ID NO: 186942 - DNA, 30 bp, Artificial Sequence
  Synthetic oligonucleotide
tcatagatcgtggtgcggaaaccactcccc

SEQ ID NO: 186943 - DNA, 30 bp, Artificial Sequence
  Synthetic oligonucleotide
cagccttgtaaaaaaatgggaccactcccc

SEQ ID NO: 186944 - DNA, 30 bp, Artificial Sequence
  Synthetic oligonucleotide
aagaagacgagtcggtacgtgccgctcccc

SEQ ID NO: 186945 - DNA, 30 bp, Artificial Sequence
  Synthetic oligonucleotide
ggattcgagaacgtagtctatcgggtcccc

SEQ ID NO: 186946 - DNA, 30 bp, Artificial Sequence
  Synthetic oligonucleotide
tggtacgtccatggttggataggattcccc

SEQ ID NO: 186947 - DNA, 30 bp, Artificial Sequence
  Synthetic oligonucleotide
acgaagagcgaggtgatttaatgattcccc

SEQ ID NO: 186948 - DNA, 30 bp, Artificial Sequence
  Synthetic oligonucleotide
tagtgtgatttattataaagattcttcccc

SEQ ID NO: 186949 - DNA, 30 bp, Artificial Sequence
  Synthetic oligonucleotide
acgtcggggagtcgaacacccaggttcccc

SEQ ID NO: 186950 - DNA, 30 bp, Artificial Sequence
  Synthetic oligonucleotide
aactcccataacggacagtttgtaaagccc

SEQ ID NO: 186951 - DNA, 30 bp, Artificial Sequence
  Synthetic oligonucleotide
agtagaccaagagggttaaccgcgaagccc

SEQ ID NO: 186952 - DNA, 30 bp, Artificial Sequence
  Synthetic oligonucleotide
cagcagtactacgtgaaagaaagacagccc

SEQ ID NO: 186953 - DNA, 30 bp, Artificial Sequence
  Synthetic oligonucleotide
tcaacgcaatagagtcttgactgacagccc

SEQ ID NO: 186954 - DNA, 30 bp, Artificial Sequence
  Synthetic oligonucleotide
cagggaaagatatcaaacgattaccagccc

SEQ ID NO: 186955 - DNA, 30 bp, Artificial Sequence
  Synthetic oligonucleotide
agaccacctgcccgatgtgaggggcagccc

SEQ ID NO: 186956 - DNA, 30 bp, Artificial Sequence
  Synthetic oligonucleotide
ctcagagatattactcgcttgtaagagccc

SEQ ID NO: 186957 - DNA, 30 bp, Artificial Sequence
  Synthetic oligonucleotide
gcggttaggaagtaatctgggggtgagccc

SEQ ID NO: 186958 - DNA, 30 bp, Artificial Sequence
  Synthetic oligonucleotide
ccggcaacggcctgggaaggtaattagccc

SEQ ID NO: 186959 - DNA, 30 bp, Artificial Sequence
  Synthetic oligonucleotide
tcgcgtgacaccccgatagccgatacgccc

SEQ ID NO: 186960 - DNA, 30 bp, Artificial Sequence
  Synthetic oligonucleotide
attcttgcggatgcccgaccacttacgccc

SEQ ID NO: 186961 - DNA, 30 bp, Artificial Sequence
  Synthetic oligonucleotide
tcgcaagtaagtcggttccggccggcgccc

SEQ ID NO: 186962 - DNA, 30 bp, Artificial Sequence
  Synthetic oligonucleotide
attccgcgctataaggggtgggtggcgccc

SEQ ID NO: 186963 - DNA, 30 bp, Artificial Sequence
  Synthetic oligonucleotide
tacgggcacgctataagatcaagatcgccc

SEQ ID NO: 186964 - DNA, 30 bp, Artificial Sequence
  Synthetic oligonucleotide
agtgacctctaaccggattccggctcgccc

SEQ ID NO: 186965 - DNA, 30 bp, Artificial Sequence
  Synthetic oligonucleotide
tcggtgggcacggcttttgacctctcgccc

SEQ ID NO: 186966 - DNA, 30 bp, Artificial Sequence
  Synthetic oligonucleotide
acgtattgaaccgataagagtcagaggccc

SEQ ID NO: 186967 - DNA, 30 bp, Artificial Sequence
  Synthetic oligonucleotide
ccctgcatagaactgggccaagtgcggccc

SEQ ID NO: 186968 - DNA, 30 bp, Artificial Sequence
  Synthetic oligonucleotide
gttatgtcatggggatatgcgcctgggccc

SEQ ID NO: 186969 - DNA, 30 bp, Artificial Sequence
  Synthetic oligonucleotide
gcgtcagacagagtgttgatgtgtgggccc

SEQ ID NO: 186970 - DNA, 30 bp, Artificial Sequence
  Synthetic oligonucleotide
agcgtgaaaccgagagtcgaggcgtggccc

SEQ ID NO: 186971 - DNA, 30 bp, Artificial Sequence
  Synthetic oligonucleotide
gagggaaggactaacaggtacgatatgccc

SEQ ID NO: 186972 - DNA, 30 bp, Artificial Sequence
  Synthetic oligonucleotide
ctgggtggtcatgtcgcacaccctatgccc

SEQ ID NO: 186973 - DNA, 30 bp, Artificial Sequence
  Synthetic oligonucleotide
gagaggctggccctatcagtcacactgccc

SEQ ID NO: 186974 - DNA, 30 bp, Artificial Sequence
  Synthetic oligonucleotide
acaacaagacacggaagctaaggactgccc

SEQ ID NO: 186975 - DNA, 30 bp, Artificial Sequence
  Synthetic oligonucleotide
gctgttgggatgaaacggtgctggctgccc

SEQ ID NO: 186976 - DNA, 30 bp, Artificial Sequence
  Synthetic oligonucleotide
agtgcttcgagccacaaaattagtctgccc

SEQ ID NO: 186977 - DNA, 30 bp, Artificial Sequence
  Synthetic oligonucleotide
gaatggctcgtaatttggggtagggtgccc

SEQ ID NO: 186978 - DNA, 30 bp, Artificial Sequence
  Synthetic oligonucleotide
caatagaagaagcataatggtggtttgccc

SEQ ID NO: 186979 - DNA, 30 bp, Artificial Sequence
  Synthetic oligonucleotide
ttaggggcgtgggatgcgagagtgaatccc

SEQ ID NO: 186980 - DNA, 30 bp, Artificial Sequence
  Synthetic oligonucleotide
tcaaggtcctctccgtcggtggttaatccc

SEQ ID NO: 186981 - DNA, 30 bp, Artificial Sequence
  Synthetic oligonucleotide
cgttagtgatcgtgaagggaataccatccc

SEQ ID NO: 186982 - DNA, 30 bp, Artificial Sequence
  Synthetic oligonucleotide
ggtaagtcagggttttgggacactcatccc

SEQ ID NO: 186983 - DNA, 30 bp, Artificial Sequence
  Synthetic oligonucleotide
gtgcaggttactaaggtgcgagacgatccc

SEQ ID NO: 186984 - DNA, 28 bp, Artificial Sequence
  Synthetic oligonucleotide
gcgcgagaaatttgctgagcccgatccc

SEQ ID NO: 186985 - DNA, 30 bp, Artificial Sequence
  Synthetic oligonucleotide
gtatcaatgctagagaggactggggatccc

SEQ ID NO: 186986 - DNA, 30 bp, Artificial Sequence
  Synthetic oligonucleotide
cagtaacgcgacaattgcttatctgatccc

SEQ ID NO: 186987 - DNA, 30 bp, Artificial Sequence
  Synthetic oligonucleotide
tctgtataagatgcgacctagaaatatccc

SEQ ID NO: 186988 - DNA, 30 bp, Artificial Sequence
  Synthetic oligonucleotide
ggcctgcgatgggacgatggcctgtatccc

SEQ ID NO: 186989 - DNA, 30 bp, Artificial Sequence
  Synthetic oligonucleotide
tagcaactacgatagtatgcatgttatccc

SEQ ID NO: 186990 - DNA, 30 bp, Artificial Sequence
  Synthetic oligonucleotide
tagagttggtccccagaaggatgaactccc

SEQ ID NO: 186991 - DNA, 30 bp, Artificial Sequence
  Synthetic oligonucleotide
gcgaagagagactatgttagttacactccc

SEQ ID NO: 186992 - DNA, 30 bp, Artificial Sequence
  Synthetic oligonucleotide
cttagatataatttcgtcaataggactccc

SEQ ID NO: 186993 - DNA, 30 bp, Artificial Sequence
  Synthetic oligonucleotide
ggaataagcctcctaccgagatagcctccc

SEQ ID NO: 186994 - DNA, 30 bp, Artificial Sequence
  Synthetic oligonucleotide
ttgcggaataaataggacagaaatcctccc

SEQ ID NO: 186995 - DNA, 30 bp, Artificial Sequence
  Synthetic oligonucleotide
tggccttgttcactcagctatcctgctccc

SEQ ID NO: 186996 - DNA, 30 bp, Artificial Sequence
  Synthetic oligonucleotide
tgtataatggctagatgtgtcacctctccc

SEQ ID NO: 186997 - DNA, 30 bp, Artificial Sequence
  Synthetic oligonucleotide
ctggcgacagatccaagattcacaagtccc

SEQ ID NO: 186998 - DNA, 30 bp, Artificial Sequence
  Synthetic oligonucleotide
gtcgccgccgatactcatgtccggggtccc

SEQ ID NO: 186999 - DNA, 30 bp, Artificial Sequence
  Synthetic oligonucleotide
ttcattcgcctcaccactaaacgctgtccc

SEQ ID NO: 187000 - DNA, 30 bp, Artificial Sequence
  Synthetic oligonucleotide
aggtacaggtcctgcgtctgtcaaattccc

SEQ ID NO: 187001 - DNA, 30 bp, Artificial Sequence
  Synthetic oligonucleotide
ggtatatcggtgaacatcggcaacattccc

SEQ ID NO: 187002 - DNA, 31 bp, Artificial Sequence
  Synthetic oligonucleotide
ttaacgcgcgtagtaataaaggtcacttccc

SEQ ID NO: 187003 - DNA, 30 bp, Artificial Sequence
  Synthetic oligonucleotide
ggacgagtcaggttgtgctgcaatcttccc

SEQ ID NO: 187004 - DNA, 30 bp, Artificial Sequence
  Synthetic oligonucleotide
gcggattcaaaattcccgtcatacgttccc

SEQ ID NO: 187005 - DNA, 30 bp, Artificial Sequence
  Synthetic oligonucleotide
ccagtcggcgcaccatgcatcatcgttccc

SEQ ID NO: 187006 - DNA, 30 bp, Artificial Sequence
  Synthetic oligonucleotide
ctagctgggtaaaggagtaatttcgttccc

SEQ ID NO: 187007 - DNA, 30 bp, Artificial Sequence
  Synthetic oligonucleotide
cgtttacctcgagctcaaattacatttccc

SEQ ID NO: 187008 - DNA, 30 bp, Artificial Sequence
  Synthetic oligonucleotide
tcggtaattgcgcgcacgtcattaaaagcc

SEQ ID NO: 187009 - DNA, 30 bp, Artificial Sequence
  Synthetic oligonucleotide
gggagagacgcgcaaccggttcgcaaagcc

SEQ ID NO: 187010 - DNA, 30 bp, Artificial Sequence
  Synthetic oligonucleotide
tcacagatcccgcggattggagcacaagcc

SEQ ID NO: 187011 - DNA, 30 bp, Artificial Sequence
  Synthetic oligonucleotide
gttacgctagttaaacgggctctccaagcc

SEQ ID NO: 187012 - DNA, 30 bp, Artificial Sequence
  Synthetic oligonucleotide
tcatcatcaagatctatcgacctgcaagcc

SEQ ID NO: 187013 - DNA, 30 bp, Artificial Sequence
  Synthetic oligonucleotide
attttggggcagggacggtgtccagaagcc

SEQ ID NO: 187014 - DNA, 30 bp, Artificial Sequence
  Synthetic oligonucleotide
agctaaagatcgaaaactatatcagaagcc

SEQ ID NO: 187015 - DNA, 30 bp, Artificial Sequence
  Synthetic oligonucleotide
acgcgtaacagagaccgtgatgaggaagcc

SEQ ID NO: 187016 - DNA, 30 bp, Artificial Sequence
  Synthetic oligonucleotide
atgtttcccgagtgtgattcaacggaagcc

SEQ ID NO: 187017 - DNA, 30 bp, Artificial Sequence
  Synthetic oligonucleotide
gaaccctgagccagaagcgcgcgggaagcc

SEQ ID NO: 187018 - DNA, 30 bp, Artificial Sequence
  Synthetic oligonucleotide
catgtctagcgagaatcggctcgggaagcc

SEQ ID NO: 187019 - DNA, 30 bp, Artificial Sequence
  Synthetic oligonucleotide
acaggctaggtgttgggtgactatgaagcc

SEQ ID NO: 187020 - DNA, 30 bp, Artificial Sequence
  Synthetic oligonucleotide
cgccgcacatgggagcccagccactaagcc

SEQ ID NO: 187021 - DNA, 30 bp, Artificial Sequence
  Synthetic oligonucleotide
tcaagttaaccgctggtaagtgtttaagcc

SEQ ID NO: 187022 - DNA, 30 bp, Artificial Sequence
  Synthetic oligonucleotide
gttcgacgcggtaatttatggaaaacagcc

SEQ ID NO: 187023 - DNA, 30 bp, Artificial Sequence
  Synthetic oligonucleotide
gctgtgcgcatgatccgagaccggacagcc

SEQ ID NO: 187024 - DNA, 30 bp, Artificial Sequence
  Synthetic oligonucleotide
agcgaaggggttaagaatttgaatacagcc

SEQ ID NO: 187025 - DNA, 30 bp, Artificial Sequence
  Synthetic oligonucleotide
atgcttctcaaggtatcgtagagcccagcc

SEQ ID NO: 187026 - DNA, 30 bp, Artificial Sequence
  Synthetic oligonucleotide
tagttgctaacaagagtgacccatccagcc

SEQ ID NO: 187027 - DNA, 30 bp, Artificial Sequence
  Synthetic oligonucleotide
tacagctcaaacacatcaatatcagcagcc

SEQ ID NO: 187028 - DNA, 30 bp, Artificial Sequence
  Synthetic oligonucleotide
gtacctagaaacgggtgttctagcgcagcc

SEQ ID NO: 187029 - DNA, 30 bp, Artificial Sequence
  Synthetic oligonucleotide
tcacaaatctacaataccaggcgctcagcc

SEQ ID NO: 187030 - DNA, 30 bp, Artificial Sequence
  Synthetic oligonucleotide
tctgacccgaccccaaataagttctcagcc

SEQ ID NO: 187031 - DNA, 30 bp, Artificial Sequence
  Synthetic oligonucleotide
actggtaccttgcggcacgcccgttcagcc

SEQ ID NO: 187032 - DNA, 30 bp, Artificial Sequence
  Synthetic oligonucleotide
gctgaacgataaggcttcgtactaagagcc

SEQ ID NO: 187033 - DNA, 30 bp, Artificial Sequence
  Synthetic oligonucleotide
gttcggtcaaacattcgacggctcagagcc

SEQ ID NO: 187034 - DNA, 30 bp, Artificial Sequence
  Synthetic oligonucleotide
gggtcattgaatgacattgtgcggagagcc

SEQ ID NO: 187035 - DNA, 30 bp, Artificial Sequence
  Synthetic oligonucleotide
acttatacccaaacgtcctgcggtagagcc

SEQ ID NO: 187036 - DNA, 30 bp, Artificial Sequence
  Synthetic oligonucleotide
caaagaggcgggggcctgaggtaacgagcc

SEQ ID NO: 187037 - DNA, 30 bp, Artificial Sequence
  Synthetic oligonucleotide
tattacgacagaatccgaatctgacgagcc

SEQ ID NO: 187038 - DNA, 30 bp, Artificial Sequence
  Synthetic oligonucleotide
gatccagatgcatgggaaacatatcgagcc

SEQ ID NO: 187039 - DNA, 30 bp, Artificial Sequence
  Synthetic oligonucleotide
agactgataaagccaaatagctctcgagcc

SEQ ID NO: 187040 - DNA, 30 bp, Artificial Sequence
  Synthetic oligonucleotide
taggagtaggtccagggcgtcggtggagcc

SEQ ID NO: 187041 - DNA, 30 bp, Artificial Sequence
  Synthetic oligonucleotide
gttgtgaagggaagggcatcagttggagcc

SEQ ID NO: 187042 - DNA, 30 bp, Artificial Sequence
  Synthetic oligonucleotide
tcccgaaagccagtggtaagagttggagcc

SEQ ID NO: 187043 - DNA, 30 bp, Artificial Sequence
  Synthetic oligonucleotide
ataatgcgccataaaagtaaatttggagcc

SEQ ID NO: 187044 - DNA, 30 bp, Artificial Sequence
  Synthetic oligonucleotide
gaaaaacaagaggagcagggactatgagcc

SEQ ID NO: 187045 - DNA, 30 bp, Artificial Sequence
  Synthetic oligonucleotide
agcttgtcctcgataggtatgtggtgagcc

SEQ ID NO: 187046 - DNA, 30 bp, Artificial Sequence
  Synthetic oligonucleotide
cactgcgtatatagaaaattagaaatagcc

SEQ ID NO: 187047 - DNA, 30 bp, Artificial Sequence
  Synthetic oligonucleotide
cattatatgcagaccaagcgataaatagcc

SEQ ID NO: 187048 - DNA, 30 bp, Artificial Sequence
  Synthetic oligonucleotide
tatccccgtcaaatgacctatcacatagcc

SEQ ID NO: 187049 - DNA, 30 bp, Artificial Sequence
  Synthetic oligonucleotide
gagagatcaccgtacaagggtgccatagcc

SEQ ID NO: 187050 - DNA, 30 bp, Artificial Sequence
  Synthetic oligonucleotide
gtctcgtgaagactggtgaataagatagcc

SEQ ID NO: 187051 - DNA, 30 bp, Artificial Sequence
  Synthetic oligonucleotide
caggtacgataatactcgactgagctagcc

SEQ ID NO: 187052 - DNA, 30 bp, Artificial Sequence
  Synthetic oligonucleotide
ggtgtgacagtagttaacgctcaagtagcc

SEQ ID NO: 187053 - DNA, 30 bp, Artificial Sequence
  Synthetic oligonucleotide
cgtgcgcaattgcattacacttcggtagcc

SEQ ID NO: 187054 - DNA, 30 bp, Artificial Sequence
  Synthetic oligonucleotide
accaaagttctacgacgaactagggtagcc

SEQ ID NO: 187055 - DNA, 30 bp, Artificial Sequence
  Synthetic oligonucleotide
ctgtggttaggaaattcccgcaacttagcc

SEQ ID NO: 187056 - DNA, 30 bp, Artificial Sequence
  Synthetic oligonucleotide
accaagtgctgttatggctgcaacttagcc

SEQ ID NO: 187057 - DNA, 30 bp, Artificial Sequence
  Synthetic oligonucleotide
cgggctaaaccgctggccattaagttagcc

SEQ ID NO: 187058 - DNA, 30 bp, Artificial Sequence
  Synthetic oligonucleotide
acaggttcaatccatattcgtgatttagcc

SEQ ID NO: 187059 - DNA, 30 bp, Artificial Sequence
  Synthetic oligonucleotide
aggaacagggttcaggagatcaccaacgcc

SEQ ID NO: 187060 - DNA, 30 bp, Artificial Sequence
  Synthetic oligonucleotide
cgttacgtaatatcaagttaccctaacgcc

SEQ ID NO: 187061 - DNA, 30 bp, Artificial Sequence
  Synthetic oligonucleotide
ttagtggagaccctgactggaggtaacgcc

SEQ ID NO: 187062 - DNA, 30 bp, Artificial Sequence
  Synthetic oligonucleotide
agatttgcatcaagaaaaaaataccacgcc

SEQ ID NO: 187063 - DNA, 30 bp, Artificial Sequence
  Synthetic oligonucleotide
atgcccacggagatcaagcacatccacgcc

SEQ ID NO: 187064 - DNA, 30 bp, Artificial Sequence
  Synthetic oligonucleotide
tcgattgatgtgacgcatgttactcacgcc

SEQ ID NO: 187065 - DNA, 30 bp, Artificial Sequence
  Synthetic oligonucleotide
aaaacggcattatgcaggtacagtcacgcc

SEQ ID NO: 187066 - DNA, 30 bp, Artificial Sequence
  Synthetic oligonucleotide
tgaggtacgtctatcctagctgaagacgcc

SEQ ID NO: 187067 - DNA, 30 bp, Artificial Sequence
  Synthetic oligonucleotide
catacaaagtagctggaagcataagacgcc

SEQ ID NO: 187068 - DNA, 30 bp, Artificial Sequence
  Synthetic oligonucleotide
taaggcgaatatttttgtcgcacgtacgcc

SEQ ID NO: 187069 - DNA, 30 bp, Artificial Sequence
  Synthetic oligonucleotide
agcaagagaattacggataactcgtacgcc

SEQ ID NO: 187070 - DNA, 30 bp, Artificial Sequence
  Synthetic oligonucleotide
cactggcaaggcgtggacgcatggtacgcc

SEQ ID NO: 187071 - DNA, 30 bp, Artificial Sequence
  Synthetic oligonucleotide
aaaccgtagtacgtcgaggatacttacgcc

SEQ ID NO: 187072 - DNA, 30 bp, Artificial Sequence
  Synthetic oligonucleotide
atcaagcatgatatctgggttagcaccgcc

SEQ ID NO: 187073 - DNA, 30 bp, Artificial Sequence
  Synthetic oligonucleotide
ttgtaactgacctatcgacacatagccgcc

SEQ ID NO: 187074 - DNA, 30 bp, Artificial Sequence
  Synthetic oligonucleotide
gggtccttaaaacacttataagccgccgcc

SEQ ID NO: 187075 - DNA, 30 bp, Artificial Sequence
  Synthetic oligonucleotide
tccgcaggatgcaattcgccatcggccgcc

SEQ ID NO: 187076 - DNA, 30 bp, Artificial Sequence
  Synthetic oligonucleotide
catgacccaccggaatagataggggccgcc

SEQ ID NO: 187077 - DNA, 30 bp, Artificial Sequence
  Synthetic oligonucleotide
ggcggacgagcggagatatgccgtgccgcc

SEQ ID NO: 187078 - DNA, 30 bp, Artificial Sequence
  Synthetic oligonucleotide
tgccttcatagtgacttaagagaatccgcc

SEQ ID NO: 187079 - DNA, 30 bp, Artificial Sequence
  Synthetic oligonucleotide
tagatcgaaaggaatacaggtttctccgcc

SEQ ID NO: 187080 - DNA, 30 bp, Artificial Sequence
  Synthetic oligonucleotide
ccaggacaaatcgaattacgttagagcgcc

SEQ ID NO: 187081 - DNA, 30 bp, Artificial Sequence
  Synthetic oligonucleotide
ttgggactgctctagcgaaggtctagcgcc

SEQ ID NO: 187082 - DNA, 30 bp, Artificial Sequence
  Synthetic oligonucleotide
aggctagacacccgtatcgacaggcgcgcc

SEQ ID NO: 187083 - DNA, 30 bp, Artificial Sequence
  Synthetic oligonucleotide
ggcggtttcgaggtccgggaagttcgcgcc

SEQ ID NO: 187084 - DNA, 30 bp, Artificial Sequence
  Synthetic oligonucleotide
ataacgtaattatctcgtagagaaggcgcc

SEQ ID NO: 187085 - DNA, 30 bp, Artificial Sequence
  Synthetic oligonucleotide
cctccagaggacggcgtagtcattggcgcc

SEQ ID NO: 187086 - DNA, 30 bp, Artificial Sequence
  Synthetic oligonucleotide
caggtttagtggtgcccttggggctgcgcc

SEQ ID NO: 187087 - DNA, 30 bp, Artificial Sequence
  Synthetic oligonucleotide
gctgtacgtatgtccgacgaactgtgcgcc

SEQ ID NO: 187088 - DNA, 30 bp, Artificial Sequence
  Synthetic oligonucleotide
ccgctgtgtgatctgagttcgttttgcgcc

SEQ ID NO: 187089 - DNA, 30 bp, Artificial Sequence
  Synthetic oligonucleotide
cgcgaagccttagtccgtcagggaatcgcc

SEQ ID NO: 187090 - DNA, 30 bp, Artificial Sequence
  Synthetic oligonucleotide
aacaaaggtgacagggcggaggatatcgcc

SEQ ID NO: 187091 - DNA, 30 bp, Artificial Sequence
  Synthetic oligonucleotide
gtggcggatacgtatgtaccgtttatcgcc

SEQ ID NO: 187092 - DNA, 30 bp, Artificial Sequence
  Synthetic oligonucleotide
cctctgaatccgagtggctatgaactcgcc

SEQ ID NO: 187093 - DNA, 30 bp, Artificial Sequence
  Synthetic oligonucleotide
gactagtggggatccgtaatcacactcgcc

SEQ ID NO: 187094 - DNA, 30 bp, Artificial Sequence
  Synthetic oligonucleotide
ttcaggctatggcgcattgacagtgtcgcc

SEQ ID NO: 187095 - DNA, 30 bp, Artificial Sequence
  Synthetic oligonucleotide
gtgtaaattctgtctcgggcgggtgtcgcc

SEQ ID NO: 187096 - DNA, 30 bp, Artificial Sequence
  Synthetic oligonucleotide
cggcacttacataccgatgggtcaaaggcc

SEQ ID NO: 187097 - DNA, 30 bp, Artificial Sequence
  Synthetic oligonucleotide
gggtgatccgtgttagagtgaataaaggcc

SEQ ID NO: 187098 - DNA, 30 bp, Artificial Sequence
  Synthetic oligonucleotide
aaacttccaaaagcgaaaaccgacaaggcc

SEQ ID NO: 187099 - DNA, 30 bp, Artificial Sequence
  Synthetic oligonucleotide
ttcacgaggagtggacctgagggcaaggcc

SEQ ID NO: 187100 - DNA, 30 bp, Artificial Sequence
  Synthetic oligonucleotide
agggggggtgtggtggagacggggaaggcc

SEQ ID NO: 187101 - DNA, 30 bp, Artificial Sequence
  Synthetic oligonucleotide
taggacggaagggtagggccatcacaggcc

SEQ ID NO: 187102 - DNA, 30 bp, Artificial Sequence
  Synthetic oligonucleotide
cggcatggtagctactaaatcgccgaggcc

SEQ ID NO: 187103 - DNA, 30 bp, Artificial Sequence
  Synthetic oligonucleotide
tgcttaccccaggttacaaagagggaggcc

SEQ ID NO: 187104 - DNA, 30 bp, Artificial Sequence
  Synthetic oligonucleotide
aagtatcaggtggtgacaagcggggaggcc

SEQ ID NO: 187105 - DNA, 30 bp, Artificial Sequence
  Synthetic oligonucleotide
ccagactactaataagaattctcctaggcc

SEQ ID NO: 187106 - DNA, 30 bp, Artificial Sequence
  Synthetic oligonucleotide
tcatttggataccgcgcaagtgcgacggcc

SEQ ID NO: 187107 - DNA, 30 bp, Artificial Sequence
  Synthetic oligonucleotide
cattagcattgcaacggtataaaggcggcc

SEQ ID NO: 187108 - DNA, 30 bp, Artificial Sequence
  Synthetic oligonucleotide
agagtcttgttgatcacgtaatggtcggcc

SEQ ID NO: 187109 - DNA, 30 bp, Artificial Sequence
  Synthetic oligonucleotide
tcaagatggcttagtcgtaacacttcggcc

SEQ ID NO: 187110 - DNA, 30 bp, Artificial Sequence
  Synthetic oligonucleotide
cctgggccaggttgggagtaattttcggcc

SEQ ID NO: 187111 - DNA, 30 bp, Artificial Sequence
  Synthetic oligonucleotide
tgcactggagagtcaaaaatcggaagggcc

SEQ ID NO: 187112 - DNA, 30 bp, Artificial Sequence
  Synthetic oligonucleotide
gtaccccagtcaaatgattattgtagggcc

SEQ ID NO: 187113 - DNA, 30 bp, Artificial Sequence
  Synthetic oligonucleotide
caacctgtcgagaattgggaagagcgggcc

SEQ ID NO: 187114 - DNA, 30 bp, Artificial Sequence
  Synthetic oligonucleotide
gcgtcgtggtgcaaaagggtggaaggggcc

SEQ ID NO: 187115 - DNA, 30 bp, Artificial Sequence
  Synthetic oligonucleotide
ccaactgtgaaagaaagcaaataaggggcc

SEQ ID NO: 187116 - DNA, 30 bp, Artificial Sequence
  Synthetic oligonucleotide
agccgggagcggagggagagcaccggggcc

SEQ ID NO: 187117 - DNA, 30 bp, Artificial Sequence
  Synthetic oligonucleotide
gctcaagtttgttctaaccaggtcggggcc

SEQ ID NO: 187118 - DNA, 30 bp, Artificial Sequence
  Synthetic oligonucleotide
aactagtccaagagggtggtctagggggcc

SEQ ID NO: 187119 - DNA, 30 bp, Artificial Sequence
  Synthetic oligonucleotide
ttcataaaaacggtttcggatagtggggcc

SEQ ID NO: 187120 - DNA, 30 bp, Artificial Sequence
  Synthetic oligonucleotide
atactcattgggacctcactgacctgggcc

SEQ ID NO: 187121 - DNA, 30 bp, Artificial Sequence
  Synthetic oligonucleotide
cgctccttcaaagggtgccggaagtgggcc

SEQ ID NO: 187122 - DNA, 30 bp, Artificial Sequence
  Synthetic oligonucleotide
gccgttaaaatcactaagacgtgttgggcc

SEQ ID NO: 187123 - DNA, 30 bp, Artificial Sequence
  Synthetic oligonucleotide
tactctctacagttacatccacaaatggcc

SEQ ID NO: 187124 - DNA, 30 bp, Artificial Sequence
  Synthetic oligonucleotide
cgtgaggagtcgctgaacaacgtgctggcc

SEQ ID NO: 187125 - DNA, 30 bp, Artificial Sequence
  Synthetic oligonucleotide
caaagctacgaaaaactgaggcaagtggcc

SEQ ID NO: 187126 - DNA, 30 bp, Artificial Sequence
  Synthetic oligonucleotide
tcgtgatcgtcgggcaaatcaaacgtggcc

SEQ ID NO: 187127 - DNA, 31 bp, Artificial Sequence
  Synthetic oligonucleotide
cgtatctaagaagcgagatgagctcgtggcc

SEQ ID NO: 187128 - DNA, 30 bp, Artificial Sequence
  Synthetic oligonucleotide
acggaacgggccttcttcatccaattggcc

SEQ ID NO: 187129 - DNA, 30 bp, Artificial Sequence
  Synthetic oligonucleotide
acggtcagggggcttggttgactgttggcc

SEQ ID NO: 187130 - DNA, 30 bp, Artificial Sequence
  Synthetic oligonucleotide
catgacccggcaaaataagctctaaatgcc

SEQ ID NO: 187131 - DNA, 30 bp, Artificial Sequence
  Synthetic oligonucleotide
actaggttcactcaaggttatgacaatgcc

SEQ ID NO: 187132 - DNA, 30 bp, Artificial Sequence
  Synthetic oligonucleotide
aaacacacggttggtggaatggttaatgcc

SEQ ID NO: 187133 - DNA, 30 bp, Artificial Sequence
  Synthetic oligonucleotide
caatcgttttaaggttagatccgacatgcc

SEQ ID NO: 187134 - DNA, 30 bp, Artificial Sequence
  Synthetic oligonucleotide
cgcgactgcccgggtcccttagcgcatgcc

SEQ ID NO: 187135 - DNA, 30 bp, Artificial Sequence
  Synthetic oligonucleotide
attctaggataggtgaacgcatgtcatgcc

SEQ ID NO: 187136 - DNA, 30 bp, Artificial Sequence
  Synthetic oligonucleotide
actcggcgtagtattgaggtgtgctatgcc

SEQ ID NO: 187137 - DNA, 30 bp, Artificial Sequence
  Synthetic oligonucleotide
gcggtggggcgcaagtggcgatggtatgcc

SEQ ID NO: 187138 - DNA, 30 bp, Artificial Sequence
  Synthetic oligonucleotide
cgaagctgggatctctcgcgtctcactgcc

SEQ ID NO: 187139 - DNA, 30 bp, Artificial Sequence
  Synthetic oligonucleotide
aacgtaactagtggcacttggtcctctgcc

SEQ ID NO: 187140 - DNA, 30 bp, Artificial Sequence
  Synthetic oligonucleotide
ttaaagcactaaggtctcttcgaaagtgcc

SEQ ID NO: 187141 - DNA, 30 bp, Artificial Sequence
  Synthetic oligonucleotide
tgtcaaactatgacagctaggccaagtgcc

SEQ ID NO: 187142 - DNA, 30 bp, Artificial Sequence
  Synthetic oligonucleotide
gacaaggtgtagcctaattgagtaagtgcc

SEQ ID NO: 187143 - DNA, 30 bp, Artificial Sequence
  Synthetic oligonucleotide
gatggcggtctcgtgggaagtgatagtgcc

SEQ ID NO: 187144 - DNA, 30 bp, Artificial Sequence
  Synthetic oligonucleotide
gatccgtgggggtagacctgccttagtgcc

SEQ ID NO: 187145 - DNA, 30 bp, Artificial Sequence
  Synthetic oligonucleotide
acttatatggaaacgactaataaacgtgcc

SEQ ID NO: 187146 - DNA, 30 bp, Artificial Sequence
  Synthetic oligonucleotide
aggttctaccggcaagacggtcgacgtgcc

SEQ ID NO: 187147 - DNA, 30 bp, Artificial Sequence
  Synthetic oligonucleotide
tgtctaatgggtgaacggaatacccgtgcc

SEQ ID NO: 187148 - DNA, 30 bp, Artificial Sequence
  Synthetic oligonucleotide
caggaaagtaaaaatcccaggctcggtgcc

SEQ ID NO: 187149 - DNA, 30 bp, Artificial Sequence
  Synthetic oligonucleotide
cgaggcccgctccgacacttatatggtgcc

SEQ ID NO: 187150 - DNA, 30 bp, Artificial Sequence
  Synthetic oligonucleotide
tcaaattcgcatctagtagacattggtgcc

SEQ ID NO: 187151 - DNA, 30 bp, Artificial Sequence
  Synthetic oligonucleotide
tctaggcggattgcaaatatatttggtgcc

SEQ ID NO: 187152 - DNA, 30 bp, Artificial Sequence
  Synthetic oligonucleotide
cccctagaacagacctaatcactatgtgcc

SEQ ID NO: 187153 - DNA, 30 bp, Artificial Sequence
  Synthetic oligonucleotide
agcgacaacctacgcagacaaaatattgcc

SEQ ID NO: 187154 - DNA, 30 bp, Artificial Sequence
  Synthetic oligonucleotide
aacgacttgtttagaatctggccacttgcc

SEQ ID NO: 187155 - DNA, 30 bp, Artificial Sequence
  Synthetic oligonucleotide
aaccagaggcaaaatgcaacgccgcttgcc

SEQ ID NO: 187156 - DNA, 30 bp, Artificial Sequence
  Synthetic oligonucleotide
acaggagtgtctctggtgcggttagttgcc

SEQ ID NO: 187157 - DNA, 30 bp, Artificial Sequence
  Synthetic oligonucleotide
gacgggaactcgattttcgttttcgttgcc

SEQ ID NO: 187158 - DNA, 30 bp, Artificial Sequence
  Synthetic oligonucleotide
ttctggggaggaatggccactcaggttgcc

SEQ ID NO: 187159 - DNA, 30 bp, Artificial Sequence
  Synthetic oligonucleotide
agcccggccgacattaccaaggcggttgcc

SEQ ID NO: 187160 - DNA, 30 bp, Artificial Sequence
  Synthetic oligonucleotide
gcgtatgctcgtaatcgtccctttgttgcc

SEQ ID NO: 187161 - DNA, 30 bp, Artificial Sequence
  Synthetic oligonucleotide
actggcggccacaatcctgaagaatttgcc

SEQ ID NO: 187162 - DNA, 30 bp, Artificial Sequence
  Synthetic oligonucleotide
cgattgcacgacgtgtttgagtaatttgcc

SEQ ID NO: 187163 - DNA, 31 bp, Artificial Sequence
  Synthetic oligonucleotide
gggatagacctcacgtgaactcctttttgcc

SEQ ID NO: 187164 - DNA, 30 bp, Artificial Sequence
  Synthetic oligonucleotide
gacttgtgatatacagggagaccaaaatcc

SEQ ID NO: 187165 - DNA, 30 bp, Artificial Sequence
  Synthetic oligonucleotide
ttgttaaaagaataatggagtataaaatcc

SEQ ID NO: 187166 - DNA, 30 bp, Artificial Sequence
  Synthetic oligonucleotide
tggatgggtaaaaccgtaggttacaaatcc

SEQ ID NO: 187167 - DNA, 30 bp, Artificial Sequence
  Synthetic oligonucleotide
aactggagagataaagggtgcaagaaatcc

SEQ ID NO: 187168 - DNA, 30 bp, Artificial Sequence
  Synthetic oligonucleotide
actgacactatgagtaacggagtgaaatcc

SEQ ID NO: 187169 - DNA, 30 bp, Artificial Sequence
  Synthetic oligonucleotide
gtactatcctgggagaaagttcttaaatcc

SEQ ID NO: 187170 - DNA, 31 bp, Artificial Sequence
  Synthetic oligonucleotide
ctctctggatagtagccaaattaaccaatcc

SEQ ID NO: 187171 - DNA, 29 bp, Artificial Sequence
  Synthetic oligonucleotide
cctaatcaagttttgagggcctccaatcc

SEQ ID NO: 187172 - DNA, 30 bp, Artificial Sequence
  Synthetic oligonucleotide
tagccgcgatttcatgggcccgtgcaatcc

SEQ ID NO: 187173 - DNA, 30 bp, Artificial Sequence
  Synthetic oligonucleotide
gcgtcgttacgatcaggagctgcagaatcc

SEQ ID NO: 187174 - DNA, 30 bp, Artificial Sequence
  Synthetic oligonucleotide
atcgtgttgacgccacctccggtggaatcc

SEQ ID NO: 187175 - DNA, 30 bp, Artificial Sequence
  Synthetic oligonucleotide
tggttcgtatactgttgttcgtactaatcc

SEQ ID NO: 187176 - DNA, 30 bp, Artificial Sequence
  Synthetic oligonucleotide
tacgaccaccggtttaggcgggtctaatcc

SEQ ID NO: 187177 - DNA, 30 bp, Artificial Sequence
  Synthetic oligonucleotide
cgtgtgcttccccatgtgcaacagtaatcc

SEQ ID NO: 187178 - DNA, 30 bp, Artificial Sequence
  Synthetic oligonucleotide
agagggctcttgtgtagagtgtgttaatcc

SEQ ID NO: 187179 - DNA, 30 bp, Artificial Sequence
  Synthetic oligonucleotide
gacgaagtcgccgcttgaagggtaacatcc

SEQ ID NO: 187180 - DNA, 30 bp, Artificial Sequence
  Synthetic oligonucleotide
aacagtatgtgtgccacagtgaacacatcc

SEQ ID NO: 187181 - DNA, 30 bp, Artificial Sequence
  Synthetic oligonucleotide
gttaagttaaaccacgtcagagtcacatcc

SEQ ID NO: 187182 - DNA, 30 bp, Artificial Sequence
  Synthetic oligonucleotide
tatgtcggtgcgtaatccccatctacatcc

SEQ ID NO: 187183 - DNA, 30 bp, Artificial Sequence
  Synthetic oligonucleotide
cgaaaagtggtcactcccctttaaccatcc

SEQ ID NO: 187184 - DNA, 30 bp, Artificial Sequence
  Synthetic oligonucleotide
ctcaaggcggccaaacaacacggcccatcc

SEQ ID NO: 187185 - DNA, 30 bp, Artificial Sequence
  Synthetic oligonucleotide
gcaacgtgatgtccgagtatatagccatcc

SEQ ID NO: 187186 - DNA, 30 bp, Artificial Sequence
  Synthetic oligonucleotide
cacatccccgccgtaaaaatacgtccatcc

SEQ ID NO: 187187 - DNA, 30 bp, Artificial Sequence
  Synthetic oligonucleotide
gggcgggggcaccaagacatccttccatcc

SEQ ID NO: 187188 - DNA, 30 bp, Artificial Sequence
  Synthetic oligonucleotide
ccattcgccacgtactcgtatgaggcatcc

SEQ ID NO: 187189 - DNA, 30 bp, Artificial Sequence
  Synthetic oligonucleotide
tttgtaagattcagtcactcgctggcatcc

SEQ ID NO: 187190 - DNA, 30 bp, Artificial Sequence
  Synthetic oligonucleotide
ggaggtgaacaaggccaaaagttgtcatcc

SEQ ID NO: 187191 - DNA, 30 bp, Artificial Sequence
  Synthetic oligonucleotide
tatgcaaaagaaccctaccacttaagatcc

SEQ ID NO: 187192 - DNA, 30 bp, Artificial Sequence
  Synthetic oligonucleotide
aacaccactgggggtcataagatgagatcc

SEQ ID NO: 187193 - DNA, 30 bp, Artificial Sequence
  Synthetic oligonucleotide
tgtacgtgagtttacgaagaagggcgatcc

SEQ ID NO: 187194 - DNA, 30 bp, Artificial Sequence
  Synthetic oligonucleotide
gcgttctttcaaagggtgtgctggcgatcc

SEQ ID NO: 187195 - DNA, 30 bp, Artificial Sequence
  Synthetic oligonucleotide
agttccgtgttttgagaactacatcgatcc

SEQ ID NO: 187196 - DNA, 30 bp, Artificial Sequence
  Synthetic oligonucleotide
gcggttgggtctttcgtagcgttgggatcc

SEQ ID NO: 187197 - DNA, 30 bp, Artificial Sequence
  Synthetic oligonucleotide
actcctgcttgcaacgaagggggtggatcc

SEQ ID NO: 187198 - DNA, 30 bp, Artificial Sequence
  Synthetic oligonucleotide
ccgttaccgtaagtagcgtgcattggatcc

SEQ ID NO: 187199 - DNA, 30 bp, Artificial Sequence
  Synthetic oligonucleotide
gataaatccataccaggagtcgaatgatcc

SEQ ID NO: 187200 - DNA, 30 bp, Artificial Sequence
  Synthetic oligonucleotide
gtgtactaaaggctggggcgaaggtgatcc

SEQ ID NO: 187201 - DNA, 30 bp, Artificial Sequence
  Synthetic oligonucleotide
gtgtcagcgccatacgcgcgaaacatatcc

SEQ ID NO: 187202 - DNA, 30 bp, Artificial Sequence
  Synthetic oligonucleotide
ggacggcgtcaaaatctagattatatatcc

SEQ ID NO: 187203 - DNA, 30 bp, Artificial Sequence
  Synthetic oligonucleotide
cagagggtctatttagagattattatatcc

SEQ ID NO: 187204 - DNA, 30 bp, Artificial Sequence
  Synthetic oligonucleotide
ctccggtacgagcagcaatcccagctatcc

SEQ ID NO: 187205 - DNA, 30 bp, Artificial Sequence
  Synthetic oligonucleotide
aggcgggggcgaaaactgggtagtgtatcc

SEQ ID NO: 187206 - DNA, 30 bp, Artificial Sequence
  Synthetic oligonucleotide
gcgtgtaagtcagataatactgatttatcc

SEQ ID NO: 187207 - DNA, 30 bp, Artificial Sequence
  Synthetic oligonucleotide
gcttaagccaatatcgaaaaagttttatcc

SEQ ID NO: 187208 - DNA, 30 bp, Artificial Sequence
  Synthetic oligonucleotide
aaagatcgtggatgctgcatggcgaactcc

SEQ ID NO: 187209 - DNA, 30 bp, Artificial Sequence
  Synthetic oligonucleotide
agaaataattgtagggagacggctaactcc

SEQ ID NO: 187210 - DNA, 30 bp, Artificial Sequence
  Synthetic oligonucleotide
tcaaaaaggaggcttggctagggacactcc

SEQ ID NO: 187211 - DNA, 30 bp, Artificial Sequence
  Synthetic oligonucleotide
ggtgtttactaatcgcccatagacgactcc

SEQ ID NO: 187212 - DNA, 30 bp, Artificial Sequence
  Synthetic oligonucleotide
gtgcaagtgtacatgcttatggatgactcc

SEQ ID NO: 187213 - DNA, 30 bp, Artificial Sequence
  Synthetic oligonucleotide
gtggttatacacacctcacccggatactcc

SEQ ID NO: 187214 - DNA, 30 bp, Artificial Sequence
  Synthetic oligonucleotide
gcacagaaacagcgtctttactgatactcc

SEQ ID NO: 187215 - DNA, 30 bp, Artificial Sequence
  Synthetic oligonucleotide
tctgtaccaggaccccgaatgtaaccctcc

SEQ ID NO: 187216 - DNA, 30 bp, Artificial Sequence
  Synthetic oligonucleotide
tcgaccaggcgacggctgtctgcatcctcc

SEQ ID NO: 187217 - DNA, 30 bp, Artificial Sequence
  Synthetic oligonucleotide
tagtgttctgtgcgtccaggtagaagctcc

SEQ ID NO: 187218 - DNA, 30 bp, Artificial Sequence
  Synthetic oligonucleotide
ggcttgagaaaaaaccgaataataagctcc

SEQ ID NO: 187219 - DNA, 30 bp, Artificial Sequence
  Synthetic oligonucleotide
gctgggcatagtctggaatacctcagctcc

SEQ ID NO: 187220 - DNA, 30 bp, Artificial Sequence
  Synthetic oligonucleotide
agcactgtctcccggatgaggtggagctcc

SEQ ID NO: 187221 - DNA, 30 bp, Artificial Sequence
  Synthetic oligonucleotide
gaatcttcgcgtaagagttgcggaggctcc

SEQ ID NO: 187222 - DNA, 30 bp, Artificial Sequence
  Synthetic oligonucleotide
gggaaccaccgtggtactcaatgaggctcc

SEQ ID NO: 187223 - DNA, 30 bp, Artificial Sequence
  Synthetic oligonucleotide
aagagagtgaataaatagtggggcggctcc

SEQ ID NO: 187224 - DNA, 30 bp, Artificial Sequence
  Synthetic oligonucleotide
actcataggtaggatgactaaaggggctcc

SEQ ID NO: 187225 - DNA, 30 bp, Artificial Sequence
  Synthetic oligonucleotide
ggtatctaccggttatgcatagggggctcc

SEQ ID NO: 187226 - DNA, 30 bp, Artificial Sequence
  Synthetic oligonucleotide
ctaacgtgttagatttgggatgtgggctcc

SEQ ID NO: 187227 - DNA, 30 bp, Artificial Sequence
  Synthetic oligonucleotide
tgccaatcgtgttcaggttaagtctgctcc

SEQ ID NO: 187228 - DNA, 30 bp, Artificial Sequence
  Synthetic oligonucleotide
accccgggaaaatgatgaggattctgctcc

SEQ ID NO: 187229 - DNA, 30 bp, Artificial Sequence
  Synthetic oligonucleotide
actatgatctcgtgagggcgtccgtgctcc

SEQ ID NO: 187230 - DNA, 30 bp, Artificial Sequence
  Synthetic oligonucleotide
caacatgtcttgtctctaatttggtgctcc

SEQ ID NO: 187231 - DNA, 30 bp, Artificial Sequence
  Synthetic oligonucleotide
aaggaccgtattcgcacaattgtgtgctcc

SEQ ID NO: 187232 - DNA, 30 bp, Artificial Sequence
  Synthetic oligonucleotide
gtactatccaagcgatacggcagttgctcc

SEQ ID NO: 187233 - DNA, 30 bp, Artificial Sequence
  Synthetic oligonucleotide
agggcttcaaaaaagaggatggggatctcc

SEQ ID NO: 187234 - DNA, 30 bp, Artificial Sequence
  Synthetic oligonucleotide
cgggtttgtaggtcgacaagtttgatctcc

SEQ ID NO: 187235 - DNA, 30 bp, Artificial Sequence
  Synthetic oligonucleotide
attaagtccgttcaagatgtccgtgtctcc

SEQ ID NO: 187236 - DNA, 30 bp, Artificial Sequence
  Synthetic oligonucleotide
gtaacacgggctatatggtaacttgtctcc

SEQ ID NO: 187237 - DNA, 30 bp, Artificial Sequence
  Synthetic oligonucleotide
cagtagcaggcacgccatgcaaccttctcc

SEQ ID NO: 187238 - DNA, 30 bp, Artificial Sequence
  Synthetic oligonucleotide
gttatgctctctattggggaatcgttctcc

SEQ ID NO: 187239 - DNA, 30 bp, Artificial Sequence
  Synthetic oligonucleotide
ttcaatccgtgactgatctaggagaagtcc

SEQ ID NO: 187240 - DNA, 30 bp, Artificial Sequence
  Synthetic oligonucleotide
attaagtcactcttataagttagccagtcc

SEQ ID NO: 187241 - DNA, 30 bp, Artificial Sequence
  Synthetic oligonucleotide
ctacaacggtacaatcattattatcagtcc

SEQ ID NO: 187242 - DNA, 30 bp, Artificial Sequence
  Synthetic oligonucleotide
cgggtcaagccgccacatggtttcgagtcc

SEQ ID NO: 187243 - DNA, 30 bp, Artificial Sequence
  Synthetic oligonucleotide
aaagaacagatgccaagtccacgttagtcc

SEQ ID NO: 187244 - DNA, 30 bp, Artificial Sequence
  Synthetic oligonucleotide
ccggatcaatcgttaggggttgaaacgtcc

SEQ ID NO: 187245 - DNA, 30 bp, Artificial Sequence
  Synthetic oligonucleotide
gcatacactgtgatgtacaagacaacgtcc

SEQ ID NO: 187246 - DNA, 30 bp, Artificial Sequence
  Synthetic oligonucleotide
atcaagcactacctgacgatctgcacgtcc

SEQ ID NO: 187247 - DNA, 30 bp, Artificial Sequence
  Synthetic oligonucleotide
agctcagtgggaagagtgcagtgcacgtcc

SEQ ID NO: 187248 - DNA, 29 bp, Artificial Sequence
  Synthetic oligonucleotide
acccgaaggcggcagcaataagaccgtcc

SEQ ID NO: 187249 - DNA, 30 bp, Artificial Sequence
  Synthetic oligonucleotide
ccacaatctatgttgcccaggtgcccgtcc

SEQ ID NO: 187250 - DNA, 30 bp, Artificial Sequence
  Synthetic oligonucleotide
ccatgtgcaaactcttcgttaaatccgtcc

SEQ ID NO: 187251 - DNA, 30 bp, Artificial Sequence
  Synthetic oligonucleotide
caaaatagcggtaccacggccgctccgtcc

SEQ ID NO: 187252 - DNA, 30 bp, Artificial Sequence
  Synthetic oligonucleotide
cagggagggaatgattaattttgtccgtcc

SEQ ID NO: 187253 - DNA, 30 bp, Artificial Sequence
  Synthetic oligonucleotide
cgggcttcgattaagtgttggaccgcgtcc

SEQ ID NO: 187254 - DNA, 30 bp, Artificial Sequence
  Synthetic oligonucleotide
aaccgctaagaggtcagacctaaatcgtcc

SEQ ID NO: 187255 - DNA, 30 bp, Artificial Sequence
  Synthetic oligonucleotide
gtgcgaccagggacttacgacttatcgtcc

SEQ ID NO: 187256 - DNA, 30 bp, Artificial Sequence
  Synthetic oligonucleotide
ccactgttggactgtagggtgtattcgtcc

SEQ ID NO: 187257 - DNA, 30 bp, Artificial Sequence
  Synthetic oligonucleotide
tcccggttcaacggggcaagagtaaggtcc

SEQ ID NO: 187258 - DNA, 30 bp, Artificial Sequence
  Synthetic oligonucleotide
cacctaataagagtcaatatgtctaggtcc

SEQ ID NO: 187259 - DNA, 29 bp, Artificial Sequence
  Synthetic oligonucleotide
acgtgcgtataatatgactcggtaggtcc

SEQ ID NO: 187260 - DNA, 30 bp, Artificial Sequence
  Synthetic oligonucleotide
aagaagtcacatcatgacttataacggtcc

SEQ ID NO: 187261 - DNA, 30 bp, Artificial Sequence
  Synthetic oligonucleotide
ctccaggcgacgtatggcaaccgacggtcc

SEQ ID NO: 187262 - DNA, 30 bp, Artificial Sequence
  Synthetic oligonucleotide
gggcaatctcacaatggcctcctacggtcc

SEQ ID NO: 187263 - DNA, 30 bp, Artificial Sequence
  Synthetic oligonucleotide
tcacaaatgcgaggccccctgcgccggtcc

SEQ ID NO: 187264 - DNA, 31 bp, Artificial Sequence
  Synthetic oligonucleotide
gtacaagacgaatctacaggcgtggcggtcc

SEQ ID NO: 187265 - DNA, 30 bp, Artificial Sequence
  Synthetic oligonucleotide
ggcacggacgatctaggttaacacgggtcc

SEQ ID NO: 187266 - DNA, 30 bp, Artificial Sequence
  Synthetic oligonucleotide
tgggtggaactaactacaatgtaggggtcc

SEQ ID NO: 187267 - DNA, 30 bp, Artificial Sequence
  Synthetic oligonucleotide
gcgaacaatcatttctgcgaagcttggtcc

SEQ ID NO: 187268 - DNA, 30 bp, Artificial Sequence
  Synthetic oligonucleotide
gttggctaggggtaatacttttgaatgtcc

SEQ ID NO: 187269 - DNA, 30 bp, Artificial Sequence
  Synthetic oligonucleotide
ggaggcgtccgtaacgcacttcggatgtcc

SEQ ID NO: 187270 - DNA, 29 bp, Artificial Sequence
  Synthetic oligonucleotide
atggtcctttgtaaactgagtaactgtcc

SEQ ID NO: 187271 - DNA, 30 bp, Artificial Sequence
  Synthetic oligonucleotide
aatagcagcgattcctaatctaatctgtcc

SEQ ID NO: 187272 - DNA, 30 bp, Artificial Sequence
  Synthetic oligonucleotide
cacacgtcatggtcaaattcgcaagtgtcc

SEQ ID NO: 187273 - DNA, 30 bp, Artificial Sequence
  Synthetic oligonucleotide
cgactatataacattaaggcatcggtgtcc

SEQ ID NO: 187274 - DNA, 30 bp, Artificial Sequence
  Synthetic oligonucleotide
cctaatgagacctaaagtcatgctgtgtcc

SEQ ID NO: 187275 - DNA, 30 bp, Artificial Sequence
  Synthetic oligonucleotide
gcggactgactctgtaagtgcacattgtcc

SEQ ID NO: 187276 - DNA, 30 bp, Artificial Sequence
  Synthetic oligonucleotide
ccgtaaacgggattatcgatccgattgtcc

SEQ ID NO: 187277 - DNA, 30 bp, Artificial Sequence
  Synthetic oligonucleotide
cgggtgccgctgccagctacaaggttgtcc

SEQ ID NO: 187278 - DNA, 30 bp, Artificial Sequence
  Synthetic oligonucleotide
tcaataagacagatgatgactttgttgtcc

SEQ ID NO: 187279 - DNA, 30 bp, Artificial Sequence
  Synthetic oligonucleotide
tgcactgattttgggatgagatcgaattcc

SEQ ID NO: 187280 - DNA, 30 bp, Artificial Sequence
  Synthetic oligonucleotide
cagcctacacataatgagtacggccattcc

SEQ ID NO: 187281 - DNA, 30 bp, Artificial Sequence
  Synthetic oligonucleotide
actcctatttaagctgcaaccactcattcc

SEQ ID NO: 187282 - DNA, 30 bp, Artificial Sequence
  Synthetic oligonucleotide
ctacggtgggagctcaagtgcacagattcc

SEQ ID NO: 187283 - DNA, 30 bp, Artificial Sequence
  Synthetic oligonucleotide
agaaatctgaagtatagcctcatagattcc

SEQ ID NO: 187284 - DNA, 30 bp, Artificial Sequence
  Synthetic oligonucleotide
cccattatattgcggcctaagagggattcc

SEQ ID NO: 187285 - DNA, 30 bp, Artificial Sequence
  Synthetic oligonucleotide
ctccgaattgaattatctagcgcatattcc

SEQ ID NO: 187286 - DNA, 30 bp, Artificial Sequence
  Synthetic oligonucleotide
taatattgcggctaaaatgttaggtattcc

SEQ ID NO: 187287 - DNA, 30 bp, Artificial Sequence
  Synthetic oligonucleotide
aatagccgataaacagaaagcgcaacttcc

SEQ ID NO: 187288 - DNA, 30 bp, Artificial Sequence
  Synthetic oligonucleotide
tcgttgaagataatgaaggctgcaacttcc

SEQ ID NO: 187289 - DNA, 30 bp, Artificial Sequence
  Synthetic oligonucleotide
agacaagtcgacagagaaaccgagacttcc

SEQ ID NO: 187290 - DNA, 30 bp, Artificial Sequence
  Synthetic oligonucleotide
cctgggatcgaatattccactgggacttcc

SEQ ID NO: 187291 - DNA, 30 bp, Artificial Sequence
  Synthetic oligonucleotide
taggtagggagtatgcaagtagctacttcc

SEQ ID NO: 187292 - DNA, 30 bp, Artificial Sequence
  Synthetic oligonucleotide
ggcgctaaaaaaattgggtacaggccttcc

SEQ ID NO: 187293 - DNA, 30 bp, Artificial Sequence
  Synthetic oligonucleotide
agaaccgcgtcgtatagtttgacggcttcc

SEQ ID NO: 187294 - DNA, 30 bp, Artificial Sequence
  Synthetic oligonucleotide
acatgaactgtgctcaagacagcgagttcc

SEQ ID NO: 187295 - DNA, 30 bp, Artificial Sequence
  Synthetic oligonucleotide
gagagaagaccgtaagcacaaaatagttcc

SEQ ID NO: 187296 - DNA, 30 bp, Artificial Sequence
  Synthetic oligonucleotide
gtgttcacaccggagcggagctgtagttcc

SEQ ID NO: 187297 - DNA, 30 bp, Artificial Sequence
  Synthetic oligonucleotide
cggaaacggatctcaacagtttttcgttcc

SEQ ID NO: 187298 - DNA, 30 bp, Artificial Sequence
  Synthetic oligonucleotide
tgggacgcaattgatgttgaagccggttcc

SEQ ID NO: 187299 - DNA, 30 bp, Artificial Sequence
  Synthetic oligonucleotide
ccctttaggcaaccccaagagagtggttcc

SEQ ID NO: 187300 - DNA, 30 bp, Artificial Sequence
  Synthetic oligonucleotide
ataccgcactctgctgtggctgcctgttcc

SEQ ID NO: 187301 - DNA, 30 bp, Artificial Sequence
  Synthetic oligonucleotide
gccgaagcgtgcctaagtatcggaatttcc

SEQ ID NO: 187302 - DNA, 30 bp, Artificial Sequence
  Synthetic oligonucleotide
cgatgtccgcggccgtcttgtgagatttcc

SEQ ID NO: 187303 - DNA, 30 bp, Artificial Sequence
  Synthetic oligonucleotide
catgatcgcttcactatcgctaggatttcc

SEQ ID NO: 187304 - DNA, 30 bp, Artificial Sequence
  Synthetic oligonucleotide
taaggcagagatgtagaccagcccctttcc

SEQ ID NO: 187305 - DNA, 30 bp, Artificial Sequence
  Synthetic oligonucleotide
tggaggtttccgtcggcgtatggtgtttcc

SEQ ID NO: 187306 - DNA, 30 bp, Artificial Sequence
  Synthetic oligonucleotide
cgtatctccgggctgtcttgtaggttttcc

SEQ ID NO: 187307 - DNA, 30 bp, Artificial Sequence
  Synthetic oligonucleotide
agtgacatggctacacaacgaacaaaaagc

SEQ ID NO: 187308 - DNA, 30 bp, Artificial Sequence
  Synthetic oligonucleotide
gagctgaaaaatatcctcaatggaaaaagc

SEQ ID NO: 187309 - DNA, 30 bp, Artificial Sequence
  Synthetic oligonucleotide
ttcaggcgcggaatcctgaggttaaaaagc

SEQ ID NO: 187310 - DNA, 30 bp, Artificial Sequence
  Synthetic oligonucleotide
agataggagccccagcttgcatccaaaagc

SEQ ID NO: 187311 - DNA, 30 bp, Artificial Sequence
  Synthetic oligonucleotide
ccatcagtagcgatgaactgaaataaaagc

SEQ ID NO: 187312 - DNA, 30 bp, Artificial Sequence
  Synthetic oligonucleotide
ggggttactgtgggattaatcaataaaagc

SEQ ID NO: 187313 - DNA, 30 bp, Artificial Sequence
  Synthetic oligonucleotide
cacgcaagtaccggcgagtctgataaaagc

SEQ ID NO: 187314 - DNA, 30 bp, Artificial Sequence
  Synthetic oligonucleotide
gactgatacagattataaatcactaaaagc

SEQ ID NO: 187315 - DNA, 30 bp, Artificial Sequence
  Synthetic oligonucleotide
ctcaaagagttcaggtgcaagtgtaaaagc

SEQ ID NO: 187316 - DNA, 30 bp, Artificial Sequence
  Synthetic oligonucleotide
caacgtatatgtaacaacgtaacacaaagc

SEQ ID NO: 187317 - DNA, 30 bp, Artificial Sequence
  Synthetic oligonucleotide
gaggtcagtatggatggtgctcaccaaagc

SEQ ID NO: 187318 - DNA, 30 bp, Artificial Sequence
  Synthetic oligonucleotide
atgggtcagcatatccttaaaagccaaagc

SEQ ID NO: 187319 - DNA, 30 bp, Artificial Sequence
  Synthetic oligonucleotide
cggccactagggagctgctcttgccaaagc

SEQ ID NO: 187320 - DNA, 30 bp, Artificial Sequence
  Synthetic oligonucleotide
caacaagccgaggttagctcggagcaaagc

SEQ ID NO: 187321 - DNA, 30 bp, Artificial Sequence
  Synthetic oligonucleotide
gtgtgacgaggtactggtcgtctgcaaagc

SEQ ID NO: 187322 - DNA, 30 bp, Artificial Sequence
  Synthetic oligonucleotide
tcatgatgcgtcttatacaacggagaaagc

SEQ ID NO: 187323 - DNA, 30 bp, Artificial Sequence
  Synthetic oligonucleotide
gcgcatagctgagaatatattagcgaaagc

SEQ ID NO: 187324 - DNA, 30 bp, Artificial Sequence
  Synthetic oligonucleotide
tcaatccgcgcttgattggggatcgaaagc

SEQ ID NO: 187325 - DNA, 30 bp, Artificial Sequence
  Synthetic oligonucleotide
gattgcatcgctcgaaccaggattgaaagc

SEQ ID NO: 187326 - DNA, 30 bp, Artificial Sequence
  Synthetic oligonucleotide
ataggtgtgcagcagagagctgttgaaagc

SEQ ID NO: 187327 - DNA, 30 bp, Artificial Sequence
  Synthetic oligonucleotide
cgtattatccggtcctagccggcctaaagc

SEQ ID NO: 187328 - DNA, 30 bp, Artificial Sequence
  Synthetic oligonucleotide
gctggtacactggtgttcaaagcgtaaagc

SEQ ID NO: 187329 - DNA, 30 bp, Artificial Sequence
  Synthetic oligonucleotide
gaccacctcgaaattcacactccttaaagc

SEQ ID NO: 187330 - DNA, 30 bp, Artificial Sequence
  Synthetic oligonucleotide
gatgaatccgaaatcattggagtttaaagc

SEQ ID NO: 187331 - DNA, 30 bp, Artificial Sequence
  Synthetic oligonucleotide
cagatagcctagtcttgtaaacgaacaagc

SEQ ID NO: 187332 - DNA, 30 bp, Artificial Sequence
  Synthetic oligonucleotide
actggcgatacttgaagatcagtcacaagc

SEQ ID NO: 187333 - DNA, 30 bp, Artificial Sequence
  Synthetic oligonucleotide
acctataaaagtggccatacccttacaagc

SEQ ID NO: 187334 - DNA, 30 bp, Artificial Sequence
  Synthetic oligonucleotide
ttaacgtacagaaacagtgtacccccaagc

SEQ ID NO: 187335 - DNA, 30 bp, Artificial Sequence
  Synthetic oligonucleotide
aaggaggctcctgagtggactctcccaagc

SEQ ID NO: 187336 - DNA, 30 bp, Artificial Sequence
  Synthetic oligonucleotide
tagagcttaaccacgacgaagttcccaagc

SEQ ID NO: 187337 - DNA, 30 bp, Artificial Sequence
  Synthetic oligonucleotide
tagtagatgcggtgatacaatctgccaagc

SEQ ID NO: 187338 - DNA, 30 bp, Artificial Sequence
  Synthetic oligonucleotide
cagtagcaaaccggtaccaatgtgccaagc

SEQ ID NO: 187339 - DNA, 30 bp, Artificial Sequence
  Synthetic oligonucleotide
tgggatcccccggattgtggaatagcaagc

SEQ ID NO: 187340 - DNA, 30 bp, Artificial Sequence
  Synthetic oligonucleotide
gggtgatactaatgcccatgccccgcaagc

SEQ ID NO: 187341 - DNA, 30 bp, Artificial Sequence
  Synthetic oligonucleotide
actttaaacgcagccgaagaaagcgcaagc

SEQ ID NO: 187342 - DNA, 30 bp, Artificial Sequence
  Synthetic oligonucleotide
ggtgcgatcgggcattgtctaactgcaagc

SEQ ID NO: 187343 - DNA, 30 bp, Artificial Sequence
  Synthetic oligonucleotide
acgccgcaatctttgacctttactgcaagc

SEQ ID NO: 187344 - DNA, 30 bp, Artificial Sequence
  Synthetic oligonucleotide
accaggctggcctgcgggcggggtgcaagc

SEQ ID NO: 187345 - DNA, 30 bp, Artificial Sequence
  Synthetic oligonucleotide
gcgcgcaagatgtcttttaatcgatcaagc

SEQ ID NO: 187346 - DNA, 30 bp, Artificial Sequence
  Synthetic oligonucleotide
actaggcgggcctcgccacatgattcaagc

SEQ ID NO: 187347 - DNA, 30 bp, Artificial Sequence
  Synthetic oligonucleotide
agtgccgaggaaccgttcgggccaagaagc

SEQ ID NO: 187348 - DNA, 30 bp, Artificial Sequence
  Synthetic oligonucleotide
gacaatgcacccgagtgtaagataagaagc

SEQ ID NO: 187349 - DNA, 30 bp, Artificial Sequence
  Synthetic oligonucleotide
gaagggctgcggcactacgggaacagaagc

SEQ ID NO: 187350 - DNA, 30 bp, Artificial Sequence
  Synthetic oligonucleotide
tgtttccgaataactaagtaacatagaagc

SEQ ID NO: 187351 - DNA, 30 bp, Artificial Sequence
  Synthetic oligonucleotide
ggagcgtgtaggtcgtaaacgattagaagc

SEQ ID NO: 187352 - DNA, 30 bp, Artificial Sequence
  Synthetic oligonucleotide
cgacgtgcaaatgccgtatgtaaacgaagc

SEQ ID NO: 187353 - DNA, 30 bp, Artificial Sequence
  Synthetic oligonucleotide
cattatgtgagtaggactatgacccgaagc

SEQ ID NO: 187354 - DNA, 30 bp, Artificial Sequence
  Synthetic oligonucleotide
tgcatacaaagttcacgtaacgcccgaagc

SEQ ID NO: 187355 - DNA, 30 bp, Artificial Sequence
  Synthetic oligonucleotide
gattagcaagtcgaaaggtaatcccgaagc

SEQ ID NO: 187356 - DNA, 30 bp, Artificial Sequence
  Synthetic oligonucleotide
tagggacggtgtaacatttttcgccgaagc

SEQ ID NO: 187357 - DNA, 30 bp, Artificial Sequence
  Synthetic oligonucleotide
gggtcgcaggcaactcaattgctccgaagc

SEQ ID NO: 187358 - DNA, 30 bp, Artificial Sequence
  Synthetic oligonucleotide
acgattcgagaatattgaagtactcgaagc

SEQ ID NO: 187359 - DNA, 30 bp, Artificial Sequence
  Synthetic oligonucleotide
tgccatgcgatggtccttagcgacggaagc

SEQ ID NO: 187360 - DNA, 30 bp, Artificial Sequence
  Synthetic oligonucleotide
aacgcaggggtcaccagtaaaaaatgaagc

SEQ ID NO: 187361 - DNA, 30 bp, Artificial Sequence
  Synthetic oligonucleotide
tgctccgcctaagggtcatcgagatgaagc

SEQ ID NO: 187362 - DNA, 30 bp, Artificial Sequence
  Synthetic oligonucleotide
taggataacatcccttctttgtgctgaagc

SEQ ID NO: 187363 - DNA, 30 bp, Artificial Sequence
  Synthetic oligonucleotide
cagagaaatagtttcggagggatctgaagc

SEQ ID NO: 187364 - DNA, 30 bp, Artificial Sequence
  Synthetic oligonucleotide
tcaccctcacgtgtgtcattagtgtgaagc

SEQ ID NO: 187365 - DNA, 30 bp, Artificial Sequence
  Synthetic oligonucleotide
cactaaaaacctcattcacggggaataagc

SEQ ID NO: 187366 - DNA, 30 bp, Artificial Sequence
  Synthetic oligonucleotide
ggttcgtagggccgggtgtcatacataagc

SEQ ID NO: 187367 - DNA, 30 bp, Artificial Sequence
  Synthetic oligonucleotide
ctcttaccggcaaagtaaatctgcataagc

SEQ ID NO: 187368 - DNA, 30 bp, Artificial Sequence
  Synthetic oligonucleotide
cctcagctacgagcactgaacattataagc

SEQ ID NO: 187369 - DNA, 30 bp, Artificial Sequence
  Synthetic oligonucleotide
tcggcaggtttggcagcccggtaactaagc

SEQ ID NO: 187370 - DNA, 30 bp, Artificial Sequence
  Synthetic oligonucleotide
ctggtataatttcttaccctctccgtaagc

SEQ ID NO: 187371 - DNA, 30 bp, Artificial Sequence
  Synthetic oligonucleotide
tcacagaccattatttcacggtaggtaagc

SEQ ID NO: 187372 - DNA, 30 bp, Artificial Sequence
  Synthetic oligonucleotide
cgtattccaacggggtcacacacggtaagc

SEQ ID NO: 187373 - DNA, 30 bp, Artificial Sequence
  Synthetic oligonucleotide
ttaccatcaaaaaatgttgcgatggtaagc

SEQ ID NO: 187374 - DNA, 30 bp, Artificial Sequence
  Synthetic oligonucleotide
ttgcactatgagtaacgaggggccttaagc

SEQ ID NO: 187375 - DNA, 30 bp, Artificial Sequence
  Synthetic oligonucleotide
ggctgttgatgtgcgttagtatggttaagc

SEQ ID NO: 187376 - DNA, 30 bp, Artificial Sequence
  Synthetic oligonucleotide
aaccgtaaccgcgagtactcgtatttaagc

SEQ ID NO: 187377 - DNA, 30 bp, Artificial Sequence
  Synthetic oligonucleotide
atcctgtatagggatgacgtggtaaacagc

SEQ ID NO: 187378 - DNA, 30 bp, Artificial Sequence
  Synthetic oligonucleotide
gcagagctggatcaactgacgagcaacagc

SEQ ID NO: 187379 - DNA, 30 bp, Artificial Sequence
  Synthetic oligonucleotide
ttaggtggtttcgcatcgcattagaacagc

SEQ ID NO: 187380 - DNA, 30 bp, Artificial Sequence
  Synthetic oligonucleotide
acgattagattaataagcgagtcgaacagc

SEQ ID NO: 187381 - DNA, 30 bp, Artificial Sequence
  Synthetic oligonucleotide
cgacaaccaggtcgccggccgggtaacagc

SEQ ID NO: 187382 - DNA, 30 bp, Artificial Sequence
  Synthetic oligonucleotide
atacgttctggaaacgtagccatacacagc

SEQ ID NO: 187383 - DNA, 30 bp, Artificial Sequence
  Synthetic oligonucleotide
acgacatggctcgacacatgtcatcacagc

SEQ ID NO: 187384 - DNA, 30 bp, Artificial Sequence
  Synthetic oligonucleotide
gtcacttaccgattcaccctttgtcacagc

SEQ ID NO: 187385 - DNA, 30 bp, Artificial Sequence
  Synthetic oligonucleotide
agtgtgatagggaatctaggtgtcgacagc

SEQ ID NO: 187386 - DNA, 30 bp, Artificial Sequence
  Synthetic oligonucleotide
gacatggcaaaacaagcgcttcctgacagc

SEQ ID NO: 187387 - DNA, 31 bp, Artificial Sequence
  Synthetic oligonucleotide
aggcgctatagaggcaagggatagtgacagc

SEQ ID NO: 187388 - DNA, 31 bp, Artificial Sequence
  Synthetic oligonucleotide
taagataaagttcgggaaatggcgtgacagc

SEQ ID NO: 187389 - DNA, 30 bp, Artificial Sequence
  Synthetic oligonucleotide
tgtatccggactaccgataccgtatacagc

SEQ ID NO: 187390 - DNA, 30 bp, Artificial Sequence
  Synthetic oligonucleotide
gtcgttgaatcgaccgtcaattcgtacagc

SEQ ID NO: 187391 - DNA, 30 bp, Artificial Sequence
  Synthetic oligonucleotide
agctctgacgagggtggcacgaggtacagc

SEQ ID NO: 187392 - DNA, 30 bp, Artificial Sequence
  Synthetic oligonucleotide
tgcagacagggccggtgaacacgttacagc

SEQ ID NO: 187393 - DNA, 30 bp, Artificial Sequence
  Synthetic oligonucleotide
accaggtggacgcgcgggaggcgcaccagc

SEQ ID NO: 187394 - DNA, 30 bp, Artificial Sequence
  Synthetic oligonucleotide
ggttcctggtatatatatcaacgacccagc

SEQ ID NO: 187395 - DNA, 30 bp, Artificial Sequence
  Synthetic oligonucleotide
agatagtctagcttgacctgccaggccagc

SEQ ID NO: 187396 - DNA, 30 bp, Artificial Sequence
  Synthetic oligonucleotide
tgaaggcaggtcagcagtgagttctccagc

SEQ ID NO: 187397 - DNA, 30 bp, Artificial Sequence
  Synthetic oligonucleotide
cccacatctaaggatgtacttacttccagc

SEQ ID NO: 187398 - DNA, 30 bp, Artificial Sequence
  Synthetic oligonucleotide
ttcaccaacaggtgcaaatcaggaagcagc

SEQ ID NO: 187399 - DNA, 30 bp, Artificial Sequence
  Synthetic oligonucleotide
tggcgtaaccgtacggtacgcttaagcagc

SEQ ID NO: 187400 - DNA, 30 bp, Artificial Sequence
  Synthetic oligonucleotide
ggtgatggccctcactctgtcttaagcagc

SEQ ID NO: 187401 - DNA, 30 bp, Artificial Sequence
  Synthetic oligonucleotide
ttgctgggccggcattattaaaacagcagc

SEQ ID NO: 187402 - DNA, 30 bp, Artificial Sequence
  Synthetic oligonucleotide
gcacgatacagttgtgtatgcttcagcagc

SEQ ID NO: 187403 - DNA, 30 bp, Artificial Sequence
  Synthetic oligonucleotide
ttgtaaatggtaaccccgtcggctagcagc

SEQ ID NO: 187404 - DNA, 30 bp, Artificial Sequence
  Synthetic oligonucleotide
gttcattatgagaagccacggagtagcagc

SEQ ID NO: 187405 - DNA, 30 bp, Artificial Sequence
  Synthetic oligonucleotide
ggtggtacattcaactagggtcaccgcagc

SEQ ID NO: 187406 - DNA, 30 bp, Artificial Sequence
  Synthetic oligonucleotide
cacgtcttgactaccgaaatacttcgcagc

SEQ ID NO: 187407 - DNA, 30 bp, Artificial Sequence
  Synthetic oligonucleotide
gccttccaaaactcgtaaagagttcgcagc

SEQ ID NO: 187408 - DNA, 30 bp, Artificial Sequence
  Synthetic oligonucleotide
tcataggcaaggtttacgagccgcggcagc

SEQ ID NO: 187409 - DNA, 30 bp, Artificial Sequence
  Synthetic oligonucleotide
atgcctcggtaacgtgggacgtcgggcagc

SEQ ID NO: 187410 - DNA, 30 bp, Artificial Sequence
  Synthetic oligonucleotide
aacactgaacaacgcaacgtctctggcagc

SEQ ID NO: 187411 - DNA, 30 bp, Artificial Sequence
  Synthetic oligonucleotide
gggtggaatatcgctttatagagtggcagc

SEQ ID NO: 187412 - DNA, 30 bp, Artificial Sequence
  Synthetic oligonucleotide
tagacatcctctggattcgagcgtggcagc

SEQ ID NO: 187413 - DNA, 30 bp, Artificial Sequence
  Synthetic oligonucleotide
taggcaaaacactcttccgtccactgcagc

SEQ ID NO: 187414 - DNA, 30 bp, Artificial Sequence
  Synthetic oligonucleotide
aggtaatatcagtaatactaaacctgcagc

SEQ ID NO: 187415 - DNA, 30 bp, Artificial Sequence
  Synthetic oligonucleotide
tatactcctgtgatgacacttgggtgcagc

SEQ ID NO: 187416 - DNA, 30 bp, Artificial Sequence
  Synthetic oligonucleotide
tggagcatgtcgttacctacgggttgcagc

SEQ ID NO: 187417 - DNA, 30 bp, Artificial Sequence
  Synthetic oligonucleotide
ccagattctgggccctaggaaccactcagc

SEQ ID NO: 187418 - DNA, 30 bp, Artificial Sequence
  Synthetic oligonucleotide
agctggtgcattaataggagattcctcagc

SEQ ID NO: 187419 - DNA, 30 bp, Artificial Sequence
  Synthetic oligonucleotide
tagcaacccctaaggaatcggcggctcagc

SEQ ID NO: 187420 - DNA, 30 bp, Artificial Sequence
  Synthetic oligonucleotide
tgtacaatggtgggcgatagtttgctcagc

SEQ ID NO: 187421 - DNA, 30 bp, Artificial Sequence
  Synthetic oligonucleotide
tacttgccaacgcctgactccgaagtcagc

SEQ ID NO: 187422 - DNA, 30 bp, Artificial Sequence
  Synthetic oligonucleotide
acagactcacatatcgacgcgatcgtcagc

SEQ ID NO: 187423 - DNA, 30 bp, Artificial Sequence
  Synthetic oligonucleotide
cggggcttcaatggcatgaacaaattcagc

SEQ ID NO: 187424 - DNA, 30 bp, Artificial Sequence
  Synthetic oligonucleotide
agcttccacggaaagcaaattcaaaagagc

SEQ ID NO: 187425 - DNA, 30 bp, Artificial Sequence
  Synthetic oligonucleotide
cctgccccacacaccggcaagccaaagagc

SEQ ID NO: 187426 - DNA, 30 bp, Artificial Sequence
  Synthetic oligonucleotide
tagtagcataaacaattctagcagaagagc

SEQ ID NO: 187427 - DNA, 30 bp, Artificial Sequence
  Synthetic oligonucleotide
acatagtagaccgaggtttcagataagagc

SEQ ID NO: 187428 - DNA, 30 bp, Artificial Sequence
  Synthetic oligonucleotide
atgagattcatgtttcattttattaagagc

SEQ ID NO: 187429 - DNA, 30 bp, Artificial Sequence
  Synthetic oligonucleotide
tatggggccaaacaccccgtttcacagagc

SEQ ID NO: 187430 - DNA, 30 bp, Artificial Sequence
  Synthetic oligonucleotide
ctgagatctcctggcggttgtctacagagc

SEQ ID NO: 187431 - DNA, 30 bp, Artificial Sequence
  Synthetic oligonucleotide
gatgatatcgccactcacttttcccagagc

SEQ ID NO: 187432 - DNA, 30 bp, Artificial Sequence
  Synthetic oligonucleotide
ttacataattaacgacacctacctcagagc

SEQ ID NO: 187433 - DNA, 30 bp, Artificial Sequence
  Synthetic oligonucleotide
accgtcttagtaacgtcgcctggagagagc

SEQ ID NO: 187434 - DNA, 30 bp, Artificial Sequence
  Synthetic oligonucleotide
gttgcatagagattccagcaaagggagagc

SEQ ID NO: 187435 - DNA, 30 bp, Artificial Sequence
  Synthetic oligonucleotide
cgcgttgggtaccgtacgtattgtgagagc

SEQ ID NO: 187436 - DNA, 30 bp, Artificial Sequence
  Synthetic oligonucleotide
tgcaatcgaagcaacgcactgagaacgagc

SEQ ID NO: 187437 - DNA, 30 bp, Artificial Sequence
  Synthetic oligonucleotide
ctagttcagaggtggctagtacgaacgagc

SEQ ID NO: 187438 - DNA, 30 bp, Artificial Sequence
  Synthetic oligonucleotide
tataaaaacaagtcgctgatcgcaccgagc

SEQ ID NO: 187439 - DNA, 30 bp, Artificial Sequence
  Synthetic oligonucleotide
tgcgtatgcatggcaacccacgcgccgagc

SEQ ID NO: 187440 - DNA, 30 bp, Artificial Sequence
  Synthetic oligonucleotide
gaagcacgagcatgagggtagcggccgagc

SEQ ID NO: 187441 - DNA, 30 bp, Artificial Sequence
  Synthetic oligonucleotide
gccaggctgtccggagtctatctgccgagc

SEQ ID NO: 187442 - DNA, 30 bp, Artificial Sequence
  Synthetic oligonucleotide
gacttcaatcctcgtgccagacaagcgagc

SEQ ID NO: 187443 - DNA, 30 bp, Artificial Sequence
  Synthetic oligonucleotide
cagactcggttagtcaagagggccgcgagc

SEQ ID NO: 187444 - DNA, 30 bp, Artificial Sequence
  Synthetic oligonucleotide
cttgagagagcgatacgaggctgcgcgagc

SEQ ID NO: 187445 - DNA, 30 bp, Artificial Sequence
  Synthetic oligonucleotide
ggagggagcggcaggatgtgctcggcgagc

SEQ ID NO: 187446 - DNA, 30 bp, Artificial Sequence
  Synthetic oligonucleotide
acagggggagggatataggggaatgcgagc

SEQ ID NO: 187447 - DNA, 30 bp, Artificial Sequence
  Synthetic oligonucleotide
tagaagatgtccgcggcgtggtaatcgagc

SEQ ID NO: 187448 - DNA, 30 bp, Artificial Sequence
  Synthetic oligonucleotide
gactttgcccacactctcacagtctcgagc

SEQ ID NO: 187449 - DNA, 30 bp, Artificial Sequence
  Synthetic oligonucleotide
tggggctgtacaagacgatccgagtcgagc

SEQ ID NO: 187450 - DNA, 30 bp, Artificial Sequence
  Synthetic oligonucleotide
ctgcgagtgaataggtgtgtgacttcgagc

SEQ ID NO: 187451 - DNA, 30 bp, Artificial Sequence
  Synthetic oligonucleotide
ggcgttagcgcatgcaagacgggttcgagc

SEQ ID NO: 187452 - DNA, 30 bp, Artificial Sequence
  Synthetic oligonucleotide
catcttaatagataatagtactaaaggagc

SEQ ID NO: 187453 - DNA, 30 bp, Artificial Sequence
  Synthetic oligonucleotide
tatccgtgggctgtaaacgccataaggagc

SEQ ID NO: 187454 - DNA, 30 bp, Artificial Sequence
  Synthetic oligonucleotide
aacacgtttgagaatagtgccggacggagc

SEQ ID NO: 187455 - DNA, 30 bp, Artificial Sequence
  Synthetic oligonucleotide
gtggtataagaaggacaagatcagcggagc

SEQ ID NO: 187456 - DNA, 30 bp, Artificial Sequence
  Synthetic oligonucleotide
gacaaattcaagcaagtattggagcggagc

SEQ ID NO: 187457 - DNA, 30 bp, Artificial Sequence
  Synthetic oligonucleotide
gtaccgatttatatgatactttagcggagc

SEQ ID NO: 187458 - DNA, 30 bp, Artificial Sequence
  Synthetic oligonucleotide
ggcgaggcccaatgcctcgaaatgcggagc

SEQ ID NO: 187459 - DNA, 30 bp, Artificial Sequence
  Synthetic oligonucleotide
atcgtagctgacgtagtgaatgtgcggagc

SEQ ID NO: 187460 - DNA, 30 bp, Artificial Sequence
  Synthetic oligonucleotide
cttgcagggagtgacaatttgctcgggagc

SEQ ID NO: 187461 - DNA, 30 bp, Artificial Sequence
  Synthetic oligonucleotide
tgtatttgctcgttcactccaatggggagc

SEQ ID NO: 187462 - DNA, 30 bp, Artificial Sequence
  Synthetic oligonucleotide
gacatatgatctataccaattaatgggagc

SEQ ID NO: 187463 - DNA, 30 bp, Artificial Sequence
  Synthetic oligonucleotide
tgtcccacatagaagtcacttcagtggagc

SEQ ID NO: 187464 - DNA, 30 bp, Artificial Sequence
  Synthetic oligonucleotide
atgaagggaacgcactgaccccgaatgagc

SEQ ID NO: 187465 - DNA, 30 bp, Artificial Sequence
  Synthetic oligonucleotide
ggcaactcactatggtatgcagatatgagc

SEQ ID NO: 187466 - DNA, 30 bp, Artificial Sequence
  Synthetic oligonucleotide
gggacctattaaggtttactaagtatgagc

SEQ ID NO: 187467 - DNA, 30 bp, Artificial Sequence
  Synthetic oligonucleotide
aaggtgcgatggggtcggttacgactgagc

SEQ ID NO: 187468 - DNA, 30 bp, Artificial Sequence
  Synthetic oligonucleotide
gggctagtaatgcaattttgcttcctgagc

SEQ ID NO: 187469 - DNA, 30 bp, Artificial Sequence
  Synthetic oligonucleotide
acaaccgtgagcatcgggtgcaatctgagc

SEQ ID NO: 187470 - DNA, 30 bp, Artificial Sequence
  Synthetic oligonucleotide
tggcgcgcggacaaatctcgccaagtgagc

SEQ ID NO: 187471 - DNA, 30 bp, Artificial Sequence
  Synthetic oligonucleotide
agcatgacgtatcagccaaagggagtgagc

SEQ ID NO: 187472 - DNA, 30 bp, Artificial Sequence
  Synthetic oligonucleotide
gccgacatcgttgtccagatgatagtgagc

SEQ ID NO: 187473 - DNA, 30 bp, Artificial Sequence
  Synthetic oligonucleotide
atctaggtgttgaacaatcaatacgtgagc

SEQ ID NO: 187474 - DNA, 30 bp, Artificial Sequence
  Synthetic oligonucleotide
aatccaccagcagggggaacaggggtgagc

SEQ ID NO: 187475 - DNA, 30 bp, Artificial Sequence
  Synthetic oligonucleotide
cggtttacgcatatatgtatttgggtgagc

SEQ ID NO: 187476 - DNA, 30 bp, Artificial Sequence
  Synthetic oligonucleotide
agtggatagaacatcagatgtatggtgagc

SEQ ID NO: 187477 - DNA, 30 bp, Artificial Sequence
  Synthetic oligonucleotide
tgtggcgagactagctggcatcctgtgagc

SEQ ID NO: 187478 - DNA, 30 bp, Artificial Sequence
  Synthetic oligonucleotide
tcctagcttcgtaataaacaaacattgagc

SEQ ID NO: 187479 - DNA, 30 bp, Artificial Sequence
  Synthetic oligonucleotide
agttgcgacacatattcgactgtaaatagc

SEQ ID NO: 187480 - DNA, 30 bp, Artificial Sequence
  Synthetic oligonucleotide
agtagaacggggactcgggcgttaaatagc

SEQ ID NO: 187481 - DNA, 30 bp, Artificial Sequence
  Synthetic oligonucleotide
caagtgtagaatggagcatggcagaatagc

SEQ ID NO: 187482 - DNA, 30 bp, Artificial Sequence
  Synthetic oligonucleotide
taagccgaaataatttcactctagaatagc

SEQ ID NO: 187483 - DNA, 30 bp, Artificial Sequence
  Synthetic oligonucleotide
tgggacggcacgtacgcccgaacgaatagc

SEQ ID NO: 187484 - DNA, 30 bp, Artificial Sequence
  Synthetic oligonucleotide
atggcggtcttttaattgcgggcgaatagc

SEQ ID NO: 187485 - DNA, 30 bp, Artificial Sequence
  Synthetic oligonucleotide
tgaagacacgtccacgttggagctaatagc

SEQ ID NO: 187486 - DNA, 30 bp, Artificial Sequence
  Synthetic oligonucleotide
agatgacgggtgctgcacacttcacatagc

SEQ ID NO: 187487 - DNA, 30 bp, Artificial Sequence
  Synthetic oligonucleotide
ggagagagtacgcccccgtggtcccatagc

SEQ ID NO: 187488 - DNA, 30 bp, Artificial Sequence
  Synthetic oligonucleotide
tgggtaacgtcctttcgctcgagccatagc

SEQ ID NO: 187489 - DNA, 30 bp, Artificial Sequence
  Synthetic oligonucleotide
tccgtagcaagatgagatcgacagcatagc

SEQ ID NO: 187490 - DNA, 30 bp, Artificial Sequence
  Synthetic oligonucleotide
acctactgatggtaaggcgcgaatcatagc

SEQ ID NO: 187491 - DNA, 30 bp, Artificial Sequence
  Synthetic oligonucleotide
acagcgtaggtaccgccatcggaagatagc

SEQ ID NO: 187492 - DNA, 30 bp, Artificial Sequence
  Synthetic oligonucleotide
gccatggggtaatgctccctaagggatagc

SEQ ID NO: 187493 - DNA, 30 bp, Artificial Sequence
  Synthetic oligonucleotide
tgatgttcggtagaccgggagcatgatagc

SEQ ID NO: 187494 - DNA, 30 bp, Artificial Sequence
  Synthetic oligonucleotide
caacagtctaaccatccttgtcagtatagc

SEQ ID NO: 187495 - DNA, 30 bp, Artificial Sequence
  Synthetic oligonucleotide
gcaggtgagtcacatgcactaaatactagc

SEQ ID NO: 187496 - DNA, 30 bp, Artificial Sequence
  Synthetic oligonucleotide
ctgctagagtgcgacatggagcaacctagc

SEQ ID NO: 187497 - DNA, 30 bp, Artificial Sequence
  Synthetic oligonucleotide
aagcccaaacgcatcgtgcggaagcctagc

SEQ ID NO: 187498 - DNA, 30 bp, Artificial Sequence
  Synthetic oligonucleotide
tggcagaatcggatgatttagtggcctagc

SEQ ID NO: 187499 - DNA, 30 bp, Artificial Sequence
  Synthetic oligonucleotide
gccttggcggtagttaaggggaatcctagc

SEQ ID NO: 187500 - DNA, 30 bp, Artificial Sequence
  Synthetic oligonucleotide
agggtgcggttagcaggtcttcatcctagc

SEQ ID NO: 187501 - DNA, 30 bp, Artificial Sequence
  Synthetic oligonucleotide
atccctgcatggggcccaaaggtatctagc

SEQ ID NO: 187502 - DNA, 30 bp, Artificial Sequence
  Synthetic oligonucleotide
agttacagtttggggagcacacattctagc

SEQ ID NO: 187503 - DNA, 30 bp, Artificial Sequence
  Synthetic oligonucleotide
attaccattggtcacaaatgaagcagtagc

SEQ ID NO: 187504 - DNA, 30 bp, Artificial Sequence
  Synthetic oligonucleotide
cagtagttgaatctcaatacaatcagtagc

SEQ ID NO: 187505 - DNA, 30 bp, Artificial Sequence
  Synthetic oligonucleotide
gccgggcgcgagcggacgaagaggagtagc

SEQ ID NO: 187506 - DNA, 30 bp, Artificial Sequence
  Synthetic oligonucleotide
ttgataacagagtcgtctgatttgagtagc

SEQ ID NO: 187507 - DNA, 30 bp, Artificial Sequence
  Synthetic oligonucleotide
aagaatgtcagggacacaccgcctagtagc

SEQ ID NO: 187508 - DNA, 30 bp, Artificial Sequence
  Synthetic oligonucleotide
caaggactggcggatcttcggcctagtagc

SEQ ID NO: 187509 - DNA, 30 bp, Artificial Sequence
  Synthetic oligonucleotide
agtccgaatcgcaaggcccgtcgacgtagc

SEQ ID NO: 187510 - DNA, 30 bp, Artificial Sequence
  Synthetic oligonucleotide
tgacttctgtggatgggcgagcctcgtagc

SEQ ID NO: 187511 - DNA, 30 bp, Artificial Sequence
  Synthetic oligonucleotide
ttacgtcggaacgtcgatcatattcgtagc

SEQ ID NO: 187512 - DNA, 30 bp, Artificial Sequence
  Synthetic oligonucleotide
tcgtaagtacgtatagccgggaaaggtagc

SEQ ID NO: 187513 - DNA, 30 bp, Artificial Sequence
  Synthetic oligonucleotide
atgtggttgagggagaacccgataggtagc

SEQ ID NO: 187514 - DNA, 30 bp, Artificial Sequence
  Synthetic oligonucleotide
cggtaggcgatatttgttggtgtcggtagc

SEQ ID NO: 187515 - DNA, 30 bp, Artificial Sequence
  Synthetic oligonucleotide
actgcggctacgaccatttgaaagggtagc

SEQ ID NO: 187516 - DNA, 30 bp, Artificial Sequence
  Synthetic oligonucleotide
gtggttcataatgacaagcgaaatggtagc

SEQ ID NO: 187517 - DNA, 30 bp, Artificial Sequence
  Synthetic oligonucleotide
cctaagccgttgtccgacccgcaatgtagc

SEQ ID NO: 187518 - DNA, 30 bp, Artificial Sequence
  Synthetic oligonucleotide
tagggtacatttaaaaacggtccatgtagc

SEQ ID NO: 187519 - DNA, 30 bp, Artificial Sequence
  Synthetic oligonucleotide
tcggtgttgtatgctttccctcgctgtagc

SEQ ID NO: 187520 - DNA, 30 bp, Artificial Sequence
  Synthetic oligonucleotide
aagtataggcacgtctgcgggccgtgtagc

SEQ ID NO: 187521 - DNA, 30 bp, Artificial Sequence
  Synthetic oligonucleotide
tacctcttcaattcagggtaataaattagc

SEQ ID NO: 187522 - DNA, 30 bp, Artificial Sequence
  Synthetic oligonucleotide
aggaactgtgcggcagtgtagggcattagc

SEQ ID NO: 187523 - DNA, 30 bp, Artificial Sequence
  Synthetic oligonucleotide
gcttggtttagaacacactaggggattagc

SEQ ID NO: 187524 - DNA, 30 bp, Artificial Sequence
  Synthetic oligonucleotide
ggattgtatggctgagggtgtcgtcttagc

SEQ ID NO: 187525 - DNA, 30 bp, Artificial Sequence
  Synthetic oligonucleotide
cctccccacgttaataacggggacgttagc

SEQ ID NO: 187526 - DNA, 30 bp, Artificial Sequence
  Synthetic oligonucleotide
tcagaagctcttatacatggggcggttagc

SEQ ID NO: 187527 - DNA, 30 bp, Artificial Sequence
  Synthetic oligonucleotide
cctagcgtctgttgcttggattcggttagc

SEQ ID NO: 187528 - DNA, 30 bp, Artificial Sequence
  Synthetic oligonucleotide
gtgtaccggatactgaatcatcgggttagc

SEQ ID NO: 187529 - DNA, 30 bp, Artificial Sequence
  Synthetic oligonucleotide
tatatcaaggaggcgtactgcaaaaaacgc

SEQ ID NO: 187530 - DNA, 30 bp, Artificial Sequence
  Synthetic oligonucleotide
gttacgaaaccagacaaagtattaaaacgc

SEQ ID NO: 187531 - DNA, 30 bp, Artificial Sequence
  Synthetic oligonucleotide
aaagagcactacgggctctacgccaaacgc

SEQ ID NO: 187532 - DNA, 30 bp, Artificial Sequence
  Synthetic oligonucleotide
acatcacgaaatgtatgattctataaacgc

SEQ ID NO: 187533 - DNA, 30 bp, Artificial Sequence
  Synthetic oligonucleotide
cgacgagaacaggcgcttccggttaaacgc

SEQ ID NO: 187534 - DNA, 30 bp, Artificial Sequence
  Synthetic oligonucleotide
agggatgtcctggcttggcctggcgaacgc

SEQ ID NO: 187535 - DNA, 30 bp, Artificial Sequence
  Synthetic oligonucleotide
gacgatccaaactgtcatactcaataacgc

SEQ ID NO: 187536 - DNA, 30 bp, Artificial Sequence
  Synthetic oligonucleotide
aaactcctcggtgaccacgcaatataacgc

SEQ ID NO: 187537 - DNA, 30 bp, Artificial Sequence
  Synthetic oligonucleotide
gagcccattttgaaagtcgacaagtaacgc

SEQ ID NO: 187538 - DNA, 30 bp, Artificial Sequence
  Synthetic oligonucleotide
ttctggacatatcaagtgaaagagtaacgc

SEQ ID NO: 187539 - DNA, 30 bp, Artificial Sequence
  Synthetic oligonucleotide
taccgtgcatggcacaatgtgaattaacgc

SEQ ID NO: 187540 - DNA, 30 bp, Artificial Sequence
  Synthetic oligonucleotide
tcatcggcgttaagaacagccaaaacacgc

SEQ ID NO: 187541 - DNA, 29 bp, Artificial Sequence
  Synthetic oligonucleotide
tgggatactatagcttataaccaacacgc

SEQ ID NO: 187542 - DNA, 30 bp, Artificial Sequence
  Synthetic oligonucleotide
cgcgccaaggggcattgcctcggtacacgc

SEQ ID NO: 187543 - DNA, 30 bp, Artificial Sequence
  Synthetic oligonucleotide
tctataagatatagccaaggaataccacgc

SEQ ID NO: 187544 - DNA, 30 bp, Artificial Sequence
  Synthetic oligonucleotide
gagatggagacttcaaaatttaatccacgc

SEQ ID NO: 187545 - DNA, 30 bp, Artificial Sequence
  Synthetic oligonucleotide
ggtctggtgtgtcttatgacgtgagcacgc

SEQ ID NO: 187546 - DNA, 30 bp, Artificial Sequence
  Synthetic oligonucleotide
acataatacctatcgatgggcttcgcacgc

SEQ ID NO: 187547 - DNA, 30 bp, Artificial Sequence
  Synthetic oligonucleotide
caccttaccaggggtattcaaacatcacgc

SEQ ID NO: 187548 - DNA, 30 bp, Artificial Sequence
  Synthetic oligonucleotide
tgtgagcacaatgctcaaatttgctcacgc

SEQ ID NO: 187549 - DNA, 30 bp, Artificial Sequence
  Synthetic oligonucleotide
tccgatggagaaggttggcgttagtcacgc

SEQ ID NO: 187550 - DNA, 30 bp, Artificial Sequence
  Synthetic oligonucleotide
aagaccagacacgacaaccagcttagacgc

SEQ ID NO: 187551 - DNA, 30 bp, Artificial Sequence
  Synthetic oligonucleotide
agcgacattcctgattatcgcactggacgc

SEQ ID NO: 187552 - DNA, 30 bp, Artificial Sequence
  Synthetic oligonucleotide
cgaactacgtagcggatgtaaagtggacgc

SEQ ID NO: 187553 - DNA, 30 bp, Artificial Sequence
  Synthetic oligonucleotide
tagaaacaacctgcgatggggtgaatacgc

SEQ ID NO: 187554 - DNA, 30 bp, Artificial Sequence
  Synthetic oligonucleotide
gaaccggccattgccagggttataatacgc

SEQ ID NO: 187555 - DNA, 30 bp, Artificial Sequence
  Synthetic oligonucleotide
ttacgacgaggcgacccgccttgcatacgc

SEQ ID NO: 187556 - DNA, 30 bp, Artificial Sequence
  Synthetic oligonucleotide
atggacgaatgatgtgcggtttagatacgc

SEQ ID NO: 187557 - DNA, 30 bp, Artificial Sequence
  Synthetic oligonucleotide
caagaaccggacagcgggaagcggatacgc

SEQ ID NO: 187558 - DNA, 30 bp, Artificial Sequence
  Synthetic oligonucleotide
cacgctcgcgcgagtgactctaacctacgc

SEQ ID NO: 187559 - DNA, 30 bp, Artificial Sequence
  Synthetic oligonucleotide
tatggcaagttccatcttcagaagctacgc

SEQ ID NO: 187560 - DNA, 31 bp, Artificial Sequence
  Synthetic oligonucleotide
gtctgtagatcaaagagtaggctaggtacgc

SEQ ID NO: 187561 - DNA, 30 bp, Artificial Sequence
  Synthetic oligonucleotide
aggtagctcgcgaaattaaggcatgtacgc

SEQ ID NO: 187562 - DNA, 30 bp, Artificial Sequence
  Synthetic oligonucleotide
ataaagtatcctaaccgtggcttaaaccgc

SEQ ID NO: 187563 - DNA, 30 bp, Artificial Sequence
  Synthetic oligonucleotide
taagacaacggtgttgtcctccccaaccgc

SEQ ID NO: 187564 - DNA, 30 bp, Artificial Sequence
  Synthetic oligonucleotide
gcgggccgaaaaggttcgcgccgcaaccgc

SEQ ID NO: 187565 - DNA, 30 bp, Artificial Sequence
  Synthetic oligonucleotide
taggacgactagcgctgaacgcgcaaccgc

SEQ ID NO: 187566 - DNA, 30 bp, Artificial Sequence
  Synthetic oligonucleotide
ccgattattcccaacaacgtagggaaccgc

SEQ ID NO: 187567 - DNA, 30 bp, Artificial Sequence
  Synthetic oligonucleotide
aataccatctcacgcatattgtcacaccgc

SEQ ID NO: 187568 - DNA, 30 bp, Artificial Sequence
  Synthetic oligonucleotide
gggtctgcctaaagactcgttgtacaccgc

SEQ ID NO: 187569 - DNA, 30 bp, Artificial Sequence
  Synthetic oligonucleotide
gcccaggactgcgccatttaggcccaccgc

SEQ ID NO: 187570 - DNA, 30 bp, Artificial Sequence
  Synthetic oligonucleotide
aacatgcacgtatggctgttaaatcaccgc

SEQ ID NO: 187571 - DNA, 30 bp, Artificial Sequence
  Synthetic oligonucleotide
accacatgatactaagagcgacgtcaccgc

SEQ ID NO: 187572 - DNA, 30 bp, Artificial Sequence
  Synthetic oligonucleotide
gatatccatccaacctgtaagaaagaccgc

SEQ ID NO: 187573 - DNA, 30 bp, Artificial Sequence
  Synthetic oligonucleotide
accattagagtgagatattgcaacgaccgc

SEQ ID NO: 187574 - DNA, 30 bp, Artificial Sequence
  Synthetic oligonucleotide
caaaagaccgagtcgattttgaacgaccgc

SEQ ID NO: 187575 - DNA, 30 bp, Artificial Sequence
  Synthetic oligonucleotide
cagtgccacagatggcagtcttacgaccgc

SEQ ID NO: 187576 - DNA, 30 bp, Artificial Sequence
  Synthetic oligonucleotide
ctgcacagtgaactgccagagatcgaccgc

SEQ ID NO: 187577 - DNA, 30 bp, Artificial Sequence
  Synthetic oligonucleotide
aagcccgggtagggcgtctggagggaccgc

SEQ ID NO: 187578 - DNA, 30 bp, Artificial Sequence
  Synthetic oligonucleotide
gtgtcatacttcacataccgctgggaccgc

SEQ ID NO: 187579 - DNA, 30 bp, Artificial Sequence
  Synthetic oligonucleotide
caataatatagggcttaggggaactaccgc

SEQ ID NO: 187580 - DNA, 30 bp, Artificial Sequence
  Synthetic oligonucleotide
tctgatttgtccagtgagtgtagttaccgc

SEQ ID NO: 187581 - DNA, 30 bp, Artificial Sequence
  Synthetic oligonucleotide
aggggggtgacgggacctctgtgttaccgc

SEQ ID NO: 187582 - DNA, 31 bp, Artificial Sequence
  Synthetic oligonucleotide
gccccagtccaggagtctgagggaaacccgc

SEQ ID NO: 187583 - DNA, 30 bp, Artificial Sequence
  Synthetic oligonucleotide
gggtgaccgtgattggtaagcgtgacccgc

SEQ ID NO: 187584 - DNA, 30 bp, Artificial Sequence
  Synthetic oligonucleotide
cgattgggagctttgctaaatgaagcccgc

SEQ ID NO: 187585 - DNA, 30 bp, Artificial Sequence
  Synthetic oligonucleotide
gtgtaaagctctctcagggagccatcccgc

SEQ ID NO: 187586 - DNA, 30 bp, Artificial Sequence
  Synthetic oligonucleotide
tacgtactggcatcgtaagataattcccgc

SEQ ID NO: 187587 - DNA, 30 bp, Artificial Sequence
  Synthetic oligonucleotide
gggtggaacagcaagtaaaagtcttcccgc

SEQ ID NO: 187588 - DNA, 30 bp, Artificial Sequence
  Synthetic oligonucleotide
aaacatttcaatcgcgtacagtagagccgc

SEQ ID NO: 187589 - DNA, 30 bp, Artificial Sequence
  Synthetic oligonucleotide
agcgcgagttcagttgagacgatgagccgc

SEQ ID NO: 187590 - DNA, 30 bp, Artificial Sequence
  Synthetic oligonucleotide
tcaataacgcgtctaggtgcccaacgccgc

SEQ ID NO: 187591 - DNA, 30 bp, Artificial Sequence
  Synthetic oligonucleotide
aaccggaaggatatactgatcccgcgccgc

SEQ ID NO: 187592 - DNA, 30 bp, Artificial Sequence
  Synthetic oligonucleotide
ggttggagtcgcttgatcgaatacggccgc

SEQ ID NO: 187593 - DNA, 30 bp, Artificial Sequence
  Synthetic oligonucleotide
tactcggtcttgcgcttagggaggggccgc

SEQ ID NO: 187594 - DNA, 30 bp, Artificial Sequence
  Synthetic oligonucleotide
tcacgtttatagcggaaagcaggatgccgc

SEQ ID NO: 187595 - DNA, 30 bp, Artificial Sequence
  Synthetic oligonucleotide
tattgtcgttaagatgcctcggcgtgccgc

SEQ ID NO: 187596 - DNA, 30 bp, Artificial Sequence
  Synthetic oligonucleotide
ctcataggattaagaggatttggaatccgc

SEQ ID NO: 187597 - DNA, 31 bp, Artificial Sequence
  Synthetic oligonucleotide
gcgtttggcataaagctttactgaagtccgc

SEQ ID NO: 187598 - DNA, 30 bp, Artificial Sequence
  Synthetic oligonucleotide
agtgtcataaaaactcttggaagagtccgc

SEQ ID NO: 187599 - DNA, 30 bp, Artificial Sequence
  Synthetic oligonucleotide
aagtactcttcgttgatcaccgccgtccgc

SEQ ID NO: 187600 - DNA, 30 bp, Artificial Sequence
  Synthetic oligonucleotide
tcagccgttaccgtgtacacgaaggtccgc

SEQ ID NO: 187601 - DNA, 30 bp, Artificial Sequence
  Synthetic oligonucleotide
gaggttgtagcgctaagtgtcgcattccgc

SEQ ID NO: 187602 - DNA, 30 bp, Artificial Sequence
  Synthetic oligonucleotide
aggtgattccccatcaccggtacgttccgc

SEQ ID NO: 187603 - DNA, 30 bp, Artificial Sequence
  Synthetic oligonucleotide
taactgccctcacggccgccgtcaaagcgc

SEQ ID NO: 187604 - DNA, 30 bp, Artificial Sequence
  Synthetic oligonucleotide
gggcctaggatgccgggtttgatcaagcgc

SEQ ID NO: 187605 - DNA, 30 bp, Artificial Sequence
  Synthetic oligonucleotide
taagggcctcaggctcatatatcgaagcgc

SEQ ID NO: 187606 - DNA, 30 bp, Artificial Sequence
  Synthetic oligonucleotide
gtacggaatggtctttcgcaaaaacagcgc

SEQ ID NO: 187607 - DNA, 30 bp, Artificial Sequence
  Synthetic oligonucleotide
ggtgagggctcaagtatcatgggacagcgc

SEQ ID NO: 187608 - DNA, 30 bp, Artificial Sequence
  Synthetic oligonucleotide
gttggtaatcctactagatagttacagcgc

SEQ ID NO: 187609 - DNA, 30 bp, Artificial Sequence
  Synthetic oligonucleotide
acgcaaggcgaatcttgtcggttacagcgc

SEQ ID NO: 187610 - DNA, 30 bp, Artificial Sequence
  Synthetic oligonucleotide
ttggaggaatttgggccaatgaatcagcgc

SEQ ID NO: 187611 - DNA, 30 bp, Artificial Sequence
  Synthetic oligonucleotide
tgaagggtagccagattttatacagagcgc

SEQ ID NO: 187612 - DNA, 30 bp, Artificial Sequence
  Synthetic oligonucleotide
acgccggattgaaatgatatctgagagcgc

SEQ ID NO: 187613 - DNA, 30 bp, Artificial Sequence
  Synthetic oligonucleotide
ccctccgtacgagacggacgcgatgagcgc

SEQ ID NO: 187614 - DNA, 30 bp, Artificial Sequence
  Synthetic oligonucleotide
aggggtttggtactgcatgggggatagcgc

SEQ ID NO: 187615 - DNA, 30 bp, Artificial Sequence
  Synthetic oligonucleotide
gaatcgccggaaaagtgatgcaaaacgcgc

SEQ ID NO: 187616 - DNA, 30 bp, Artificial Sequence
  Synthetic oligonucleotide
tcaggtctccggagcgatacgaacacgcgc

SEQ ID NO: 187617 - DNA, 30 bp, Artificial Sequence
  Synthetic oligonucleotide
gacggggagtgaagttagttaggcacgcgc

SEQ ID NO: 187618 - DNA, 30 bp, Artificial Sequence
  Synthetic oligonucleotide
cctggaggaataaaattgtatttcacgcgc

SEQ ID NO: 187619 - DNA, 30 bp, Artificial Sequence
  Synthetic oligonucleotide
tggagggctgtaagaaacagtaatacgcgc

SEQ ID NO: 187620 - DNA, 31 bp, Artificial Sequence
  Synthetic oligonucleotide
gggctctgcgtagttgagggtaagtacgcgc

SEQ ID NO: 187621 - DNA, 30 bp, Artificial Sequence
  Synthetic oligonucleotide
gcaacaattggcgacgggatgactccgcgc

SEQ ID NO: 187622 - DNA, 30 bp, Artificial Sequence
  Synthetic oligonucleotide
cactaatcacttgttgcttctcagtcgcgc

SEQ ID NO: 187623 - DNA, 30 bp, Artificial Sequence
  Synthetic oligonucleotide
ggtatcagttaaggtcacgccttgtcgcgc

SEQ ID NO: 187624 - DNA, 30 bp, Artificial Sequence
  Synthetic oligonucleotide
agcaacttcctgcggttatcggccaggcgc

SEQ ID NO: 187625 - DNA, 30 bp, Artificial Sequence
  Synthetic oligonucleotide
tgtacccaggccacatatggagcgaggcgc

SEQ ID NO: 187626 - DNA, 30 bp, Artificial Sequence
  Synthetic oligonucleotide
atttgtaacccacatgacataggtcggcgc

SEQ ID NO: 187627 - DNA, 30 bp, Artificial Sequence
  Synthetic oligonucleotide
ttattgcgcgaaagagataatgtagggcgc

SEQ ID NO: 187628 - DNA, 30 bp, Artificial Sequence
  Synthetic oligonucleotide
ccgtgaaattttgcttaaggcagggggcgc

SEQ ID NO: 187629 - DNA, 30 bp, Artificial Sequence
  Synthetic oligonucleotide
aaccattgcgaagtcgcaagtggtgggcgc

SEQ ID NO: 187630 - DNA, 30 bp, Artificial Sequence
  Synthetic oligonucleotide
aggaccaaacgctcaaggggtttgtggcgc

SEQ ID NO: 187631 - DNA, 30 bp, Artificial Sequence
  Synthetic oligonucleotide
gagagaattgacaggtgttgagtaatgcgc

SEQ ID NO: 187632 - DNA, 30 bp, Artificial Sequence
  Synthetic oligonucleotide
cacttctcctatgatagcgccaccatgcgc

SEQ ID NO: 187633 - DNA, 30 bp, Artificial Sequence
  Synthetic oligonucleotide
gtggaccgcaactgccctgagatcatgcgc

SEQ ID NO: 187634 - DNA, 30 bp, Artificial Sequence
  Synthetic oligonucleotide
cagacttctcgtggcttgtaaaaactgcgc

SEQ ID NO: 187635 - DNA, 30 bp, Artificial Sequence
  Synthetic oligonucleotide
gcaagtcggtagttcgaagggcacctgcgc

SEQ ID NO: 187636 - DNA, 30 bp, Artificial Sequence
  Synthetic oligonucleotide
tgcttgacaatacgaaggcccgtgctgcgc

SEQ ID NO: 187637 - DNA, 30 bp, Artificial Sequence
  Synthetic oligonucleotide
cagattttcgatatcgaagatgcagtgcgc

SEQ ID NO: 187638 - DNA, 30 bp, Artificial Sequence
  Synthetic oligonucleotide
ccatccgtccgaccggggtggctagtgcgc

SEQ ID NO: 187639 - DNA, 30 bp, Artificial Sequence
  Synthetic oligonucleotide
tggctttaacgagaactattgagcgtgcgc

SEQ ID NO: 187640 - DNA, 30 bp, Artificial Sequence
  Synthetic oligonucleotide
cctcaaatgaggtggtatagaaacttgcgc

SEQ ID NO: 187641 - DNA, 30 bp, Artificial Sequence
  Synthetic oligonucleotide
ccattgtaacatgtagcctacagaaatcgc

SEQ ID NO: 187642 - DNA, 30 bp, Artificial Sequence
  Synthetic oligonucleotide
gtgttgaactgtcaaacgaaacacaatcgc

SEQ ID NO: 187643 - DNA, 30 bp, Artificial Sequence
  Synthetic oligonucleotide
taagtgcggagctcgtgaaggggcaatcgc

SEQ ID NO: 187644 - DNA, 30 bp, Artificial Sequence
  Synthetic oligonucleotide
tagatatgagggagtagtcacagagatcgc

SEQ ID NO: 187645 - DNA, 30 bp, Artificial Sequence
  Synthetic oligonucleotide
acatgcggttaaatttagtggctcgatcgc

SEQ ID NO: 187646 - DNA, 30 bp, Artificial Sequence
  Synthetic oligonucleotide
agccgatctccattcaccacctaggatcgc

SEQ ID NO: 187647 - DNA, 30 bp, Artificial Sequence
  Synthetic oligonucleotide
gacggaaacgattgtaaaccttctgatcgc

SEQ ID NO: 187648 - DNA, 30 bp, Artificial Sequence
  Synthetic oligonucleotide
ggcgtgcatagaattataagccgtgatcgc

SEQ ID NO: 187649 - DNA, 30 bp, Artificial Sequence
  Synthetic oligonucleotide
gctatagatcactggctatcgatatatcgc

SEQ ID NO: 187650 - DNA, 30 bp, Artificial Sequence
  Synthetic oligonucleotide
aaccggcatggtcgttcgcgcacttatcgc

SEQ ID NO: 187651 - DNA, 30 bp, Artificial Sequence
  Synthetic oligonucleotide
acaagagtcagattcctcactaagactcgc

SEQ ID NO: 187652 - DNA, 30 bp, Artificial Sequence
  Synthetic oligonucleotide
caatatccgaaacaagacgagaagcctcgc

SEQ ID NO: 187653 - DNA, 30 bp, Artificial Sequence
  Synthetic oligonucleotide
aaatgctgtcgtgagcggaacaaagctcgc

SEQ ID NO: 187654 - DNA, 30 bp, Artificial Sequence
  Synthetic oligonucleotide
acataggtcgtgaaattgccatgtgctcgc

SEQ ID NO: 187655 - DNA, 30 bp, Artificial Sequence
  Synthetic oligonucleotide
ccttttgagctatacgtggaagactctcgc

SEQ ID NO: 187656 - DNA, 30 bp, Artificial Sequence
  Synthetic oligonucleotide
gtaaacaaccttgtcctcggtacttctcgc

SEQ ID NO: 187657 - DNA, 30 bp, Artificial Sequence
  Synthetic oligonucleotide
cctcggccgtgtgcgagacggacaagtcgc

SEQ ID NO: 187658 - DNA, 30 bp, Artificial Sequence
  Synthetic oligonucleotide
ggttcggtcgccgggagtgatccaagtcgc

SEQ ID NO: 187659 - DNA, 30 bp, Artificial Sequence
  Synthetic oligonucleotide
tggtctgatagaatgagggtccccagtcgc

SEQ ID NO: 187660 - DNA, 30 bp, Artificial Sequence
  Synthetic oligonucleotide
tggatttgtcagtaatactcacaccgtcgc

SEQ ID NO: 187661 - DNA, 30 bp, Artificial Sequence
  Synthetic oligonucleotide
gacatagcgatggttgctacaaatcgtcgc

SEQ ID NO: 187662 - DNA, 30 bp, Artificial Sequence
  Synthetic oligonucleotide
cagggtaagatagccctaaagggcggtcgc

SEQ ID NO: 187663 - DNA, 30 bp, Artificial Sequence
  Synthetic oligonucleotide
tatggtacactaagcctcgcgaagggtcgc

SEQ ID NO: 187664 - DNA, 30 bp, Artificial Sequence
  Synthetic oligonucleotide
actgttagtaagccccaacagaaatgtcgc

SEQ ID NO: 187665 - DNA, 30 bp, Artificial Sequence
  Synthetic oligonucleotide
agagcgcggcatgagatggcagcatgtcgc

SEQ ID NO: 187666 - DNA, 30 bp, Artificial Sequence
  Synthetic oligonucleotide
ttctcgacaatcatgagaaactgttgtcgc

SEQ ID NO: 187667 - DNA, 30 bp, Artificial Sequence
  Synthetic oligonucleotide
ccattatggtaatgattcgaggctattcgc

SEQ ID NO: 187668 - DNA, 30 bp, Artificial Sequence
  Synthetic oligonucleotide
aagcgtcggtccgccgcggccggtattcgc

SEQ ID NO: 187669 - DNA, 30 bp, Artificial Sequence
  Synthetic oligonucleotide
ggtacatcgactttgcaaagatgtattcgc

SEQ ID NO: 187670 - DNA, 30 bp, Artificial Sequence
  Synthetic oligonucleotide
taatagtgaggagcatccaccagacttcgc

SEQ ID NO: 187671 - DNA, 30 bp, Artificial Sequence
  Synthetic oligonucleotide
gttaagtaaaccaggtctattacccttcgc

SEQ ID NO: 187672 - DNA, 30 bp, Artificial Sequence
  Synthetic oligonucleotide
ctcgaatagaagagcggtcacatcgttcgc

SEQ ID NO: 187673 - DNA, 30 bp, Artificial Sequence
  Synthetic oligonucleotide
ttcgcatttaaaaggcgcacaaaggttcgc

SEQ ID NO: 187674 - DNA, 30 bp, Artificial Sequence
  Synthetic oligonucleotide
cacgtggcggacggcgttggaagtgttcgc

SEQ ID NO: 187675 - DNA, 30 bp, Artificial Sequence
  Synthetic oligonucleotide
attatggactctcacagaatgcaatttcgc

SEQ ID NO: 187676 - DNA, 30 bp, Artificial Sequence
  Synthetic oligonucleotide
cgaaactttgataacttgcgtggaaaaggc

SEQ ID NO: 187677 - DNA, 30 bp, Artificial Sequence
  Synthetic oligonucleotide
agggcggctcggcctaggggtgagaaaggc

SEQ ID NO: 187678 - DNA, 30 bp, Artificial Sequence
  Synthetic oligonucleotide
gcggtcgcctccaactagagaaggaaaggc

SEQ ID NO: 187679 - DNA, 30 bp, Artificial Sequence
  Synthetic oligonucleotide
acggatattgttcccgtcagagggaaaggc

SEQ ID NO: 187680 - DNA, 30 bp, Artificial Sequence
  Synthetic oligonucleotide
aggggagtagatgacctgctctttcaaggc

SEQ ID NO: 187681 - DNA, 30 bp, Artificial Sequence
  Synthetic oligonucleotide
gcttcggccgtagtctcaacttccgaaggc

SEQ ID NO: 187682 - DNA, 30 bp, Artificial Sequence
  Synthetic oligonucleotide
agagtgtttttacgatacacgggctaaggc

SEQ ID NO: 187683 - DNA, 30 bp, Artificial Sequence
  Synthetic oligonucleotide
tcaattgtgcaaacagaggcccgttaaggc

SEQ ID NO: 187684 - DNA, 30 bp, Artificial Sequence
  Synthetic oligonucleotide
cgacccaggtagagagccagggtaacaggc

SEQ ID NO: 187685 - DNA, 30 bp, Artificial Sequence
  Synthetic oligonucleotide
tggtcatttggaagcacggaacgcacaggc

SEQ ID NO: 187686 - DNA, 30 bp, Artificial Sequence
  Synthetic oligonucleotide
ttgccaccggtcatatgcatgtcgacaggc

SEQ ID NO: 187687 - DNA, 30 bp, Artificial Sequence
  Synthetic oligonucleotide
cacttggttttagcgggaatggctacaggc

SEQ ID NO: 187688 - DNA, 30 bp, Artificial Sequence
  Synthetic oligonucleotide
taacggggacgcgccgaccaacgtacaggc

SEQ ID NO: 187689 - DNA, 30 bp, Artificial Sequence
  Synthetic oligonucleotide
gtaataacgagtaacttctccagcccaggc

SEQ ID NO: 187690 - DNA, 30 bp, Artificial Sequence
  Synthetic oligonucleotide
agatcgtgagccagatatattggcccaggc

SEQ ID NO: 187691 - DNA, 30 bp, Artificial Sequence
  Synthetic oligonucleotide
acataagatgggccatggcgttgcccaggc

SEQ ID NO: 187692 - DNA, 30 bp, Artificial Sequence
  Synthetic oligonucleotide
ttactttcggggtctgacactatcccaggc

SEQ ID NO: 187693 - DNA, 30 bp, Artificial Sequence
  Synthetic oligonucleotide
attaacatgttctgtcgaagaaggccaggc

SEQ ID NO: 187694 - DNA, 30 bp, Artificial Sequence
  Synthetic oligonucleotide
ctgagttaaggctctgaagaagtgccaggc

SEQ ID NO: 187695 - DNA, 30 bp, Artificial Sequence
  Synthetic oligonucleotide
cataggtgcgtgtgccctacatatccaggc

SEQ ID NO: 187696 - DNA, 30 bp, Artificial Sequence
  Synthetic oligonucleotide
gaccatcgcgacggtggcaaaacagcaggc

SEQ ID NO: 187697 - DNA, 30 bp, Artificial Sequence
  Synthetic oligonucleotide
tcacccgaaactatgtcaccgagggcaggc

SEQ ID NO: 187698 - DNA, 30 bp, Artificial Sequence
  Synthetic oligonucleotide
agttaaggcaacgattggtcattggcaggc

SEQ ID NO: 187699 - DNA, 30 bp, Artificial Sequence
  Synthetic oligonucleotide
gaagagacagctatacagcgcggtgcaggc

SEQ ID NO: 187700 - DNA, 30 bp, Artificial Sequence
  Synthetic oligonucleotide
gaacccagcgatagggatggttgatcaggc

SEQ ID NO: 187701 - DNA, 30 bp, Artificial Sequence
  Synthetic oligonucleotide
ggtctcgtgtgacctcctggcggctcaggc

SEQ ID NO: 187702 - DNA, 30 bp, Artificial Sequence
  Synthetic oligonucleotide
agaggcgacgcgcatggtgcaaagtcaggc

SEQ ID NO: 187703 - DNA, 30 bp, Artificial Sequence
  Synthetic oligonucleotide
accgaaaattagcacgcgtttcagtcaggc

SEQ ID NO: 187704 - DNA, 30 bp, Artificial Sequence
  Synthetic oligonucleotide
actccagtagtggtagccgtcttttcaggc

SEQ ID NO: 187705 - DNA, 30 bp, Artificial Sequence
  Synthetic oligonucleotide
agagcacgtggagggtgcccactaagaggc

SEQ ID NO: 187706 - DNA, 30 bp, Artificial Sequence
  Synthetic oligonucleotide
tgacataactgagttcatacggtaagaggc

SEQ ID NO: 187707 - DNA, 30 bp, Artificial Sequence
  Synthetic oligonucleotide
tacgtggtacgcttagtaagtcatagaggc

SEQ ID NO: 187708 - DNA, 30 bp, Artificial Sequence
  Synthetic oligonucleotide
aacagggaaggaccctaattccgtagaggc

SEQ ID NO: 187709 - DNA, 30 bp, Artificial Sequence
  Synthetic oligonucleotide
attcagactcgtgctacaaaggcaggaggc

SEQ ID NO: 187710 - DNA, 30 bp, Artificial Sequence
  Synthetic oligonucleotide
ttattaaactctacttagcgagtgggaggc

SEQ ID NO: 187711 - DNA, 30 bp, Artificial Sequence
  Synthetic oligonucleotide
ggaagtttcgttgtgacgaggacatgaggc

SEQ ID NO: 187712 - DNA, 30 bp, Artificial Sequence
  Synthetic oligonucleotide
gtagtagcgaaaggcatgccggcatgaggc

SEQ ID NO: 187713 - DNA, 30 bp, Artificial Sequence
  Synthetic oligonucleotide
gggaggtcatcaaaaggatcgccctgaggc

SEQ ID NO: 187714 - DNA, 30 bp, Artificial Sequence
  Synthetic oligonucleotide
gctatagtacctgcgaccatcgcgtgaggc

SEQ ID NO: 187715 - DNA, 30 bp, Artificial Sequence
  Synthetic oligonucleotide
ttaaacttacgtgaaaacgctatgtgaggc

SEQ ID NO: 187716 - DNA, 30 bp, Artificial Sequence
  Synthetic oligonucleotide
aaaaccttgggacttagccatttgtgaggc

SEQ ID NO: 187717 - DNA, 30 bp, Artificial Sequence
  Synthetic oligonucleotide
tggtagaatacagagggaacgggcataggc

SEQ ID NO: 187718 - DNA, 30 bp, Artificial Sequence
  Synthetic oligonucleotide
gccctaggcaagataaaggacgtcctaggc

SEQ ID NO: 187719 - DNA, 30 bp, Artificial Sequence
  Synthetic oligonucleotide
gtgtatgagtttgggatttcagatctaggc

SEQ ID NO: 187720 - DNA, 30 bp, Artificial Sequence
  Synthetic oligonucleotide
agcactgcattgaaagtgctccgtttaggc

SEQ ID NO: 187721 - DNA, 30 bp, Artificial Sequence
  Synthetic oligonucleotide
gtaaaggtacccgtatttgagcgtttaggc

SEQ ID NO: 187722 - DNA, 30 bp, Artificial Sequence
  Synthetic oligonucleotide
taacaaacaatgagcgatttttacaacggc

SEQ ID NO: 187723 - DNA, 30 bp, Artificial Sequence
  Synthetic oligonucleotide
tgcggcctatgaccttgctttctgaacggc

SEQ ID NO: 187724 - DNA, 30 bp, Artificial Sequence
  Synthetic oligonucleotide
caggctagtcggctaagcccagataacggc

SEQ ID NO: 187725 - DNA, 30 bp, Artificial Sequence
  Synthetic oligonucleotide
gcgccgaataatacggtgctgcttaacggc

SEQ ID NO: 187726 - DNA, 30 bp, Artificial Sequence
  Synthetic oligonucleotide
agaaagacctcaacccggtcaaaccacggc

SEQ ID NO: 187727 - DNA, 30 bp, Artificial Sequence
  Synthetic oligonucleotide
tagcgtcgaacaataaaatgataagacggc

SEQ ID NO: 187728 - DNA, 30 bp, Artificial Sequence
  Synthetic oligonucleotide
ctcgtaaaggagtgcttgaccttggacggc

SEQ ID NO: 187729 - DNA, 30 bp, Artificial Sequence
  Synthetic oligonucleotide
ttcactaaccgctgaggaggtgatgacggc

SEQ ID NO: 187730 - DNA, 30 bp, Artificial Sequence
  Synthetic oligonucleotide
actctggcatccagaagtctcccctacggc

SEQ ID NO: 187731 - DNA, 30 bp, Artificial Sequence
  Synthetic oligonucleotide
cttagggcgttctgttctaacctttacggc

SEQ ID NO: 187732 - DNA, 30 bp, Artificial Sequence
  Synthetic oligonucleotide
aagaacgaagacttgagttggctaaccggc

SEQ ID NO: 187733 - DNA, 30 bp, Artificial Sequence
  Synthetic oligonucleotide
tatttacaggacatcgagtcgtgcaccggc

SEQ ID NO: 187734 - DNA, 30 bp, Artificial Sequence
  Synthetic oligonucleotide
atagaatcggagcggtaatttgataccggc

SEQ ID NO: 187735 - DNA, 30 bp, Artificial Sequence
  Synthetic oligonucleotide
gcaatgcggcacagttctacgagccccggc

SEQ ID NO: 187736 - DNA, 30 bp, Artificial Sequence
  Synthetic oligonucleotide
gcgattgagcgtatttcgtcgaggcccggc

SEQ ID NO: 187737 - DNA, 30 bp, Artificial Sequence
  Synthetic oligonucleotide
tccaaccccgaatatctttcgactcccggc

SEQ ID NO: 187738 - DNA, 30 bp, Artificial Sequence
  Synthetic oligonucleotide
gagtgtccatgacacaccaatacagccggc

SEQ ID NO: 187739 - DNA, 30 bp, Artificial Sequence
  Synthetic oligonucleotide
tcgtacccccacccgccccacagagccggc

SEQ ID NO: 187740 - DNA, 30 bp, Artificial Sequence
  Synthetic oligonucleotide
agatcattggaattgctacacacggccggc

SEQ ID NO: 187741 - DNA, 30 bp, Artificial Sequence
  Synthetic oligonucleotide
gcctggtacactggtaaccggaaatccggc

SEQ ID NO: 187742 - DNA, 30 bp, Artificial Sequence
  Synthetic oligonucleotide
cctacgcccatgagaagatactaatccggc

SEQ ID NO: 187743 - DNA, 30 bp, Artificial Sequence
  Synthetic oligonucleotide
accgcgacattacatatataaagatccggc

SEQ ID NO: 187744 - DNA, 30 bp, Artificial Sequence
  Synthetic oligonucleotide
ttggatgtctggcttgactgggcctccggc

SEQ ID NO: 187745 - DNA, 30 bp, Artificial Sequence
  Synthetic oligonucleotide
aagggactgacttgacaatccagctccggc

SEQ ID NO: 187746 - DNA, 30 bp, Artificial Sequence
  Synthetic oligonucleotide
acaatagagtggtcaccttcaacgtccggc

SEQ ID NO: 187747 - DNA, 30 bp, Artificial Sequence
  Synthetic oligonucleotide
agacacggcctgaaaaggaaatcttccggc

SEQ ID NO: 187748 - DNA, 30 bp, Artificial Sequence
  Synthetic oligonucleotide
ttgggataaggtactacagttcgttccggc

SEQ ID NO: 187749 - DNA, 30 bp, Artificial Sequence
  Synthetic oligonucleotide
tgcgactctcgtgttaacaccgcaagcggc

SEQ ID NO: 187750 - DNA, 30 bp, Artificial Sequence
  Synthetic oligonucleotide
ccatgggctgtgcactagaaaaacagcggc

SEQ ID NO: 187751 - DNA, 30 bp, Artificial Sequence
  Synthetic oligonucleotide
ttgatctggggagaacagtagcacagcggc

SEQ ID NO: 187752 - DNA, 30 bp, Artificial Sequence
  Synthetic oligonucleotide
agacatcacgcgtttcgcgactacagcggc

SEQ ID NO: 187753 - DNA, 30 bp, Artificial Sequence
  Synthetic oligonucleotide
ggagaggatcgtgtgacgtagtgcagcggc

SEQ ID NO: 187754 - DNA, 30 bp, Artificial Sequence
  Synthetic oligonucleotide
tatatgggattattatggggggagcgcggc

SEQ ID NO: 187755 - DNA, 30 bp, Artificial Sequence
  Synthetic oligonucleotide
tatagagagtacggggctgcatcaggcggc

SEQ ID NO: 187756 - DNA, 30 bp, Artificial Sequence
  Synthetic oligonucleotide
taactggtatcagactaagagggaggcggc

SEQ ID NO: 187757 - DNA, 30 bp, Artificial Sequence
  Synthetic oligonucleotide
ccgagagccaatccccgggacctaggcggc

SEQ ID NO: 187758 - DNA, 30 bp, Artificial Sequence
  Synthetic oligonucleotide
tgagacaagtgaaacagatttcatggcggc

SEQ ID NO: 187759 - DNA, 30 bp, Artificial Sequence
  Synthetic oligonucleotide
accttgtgctaggctaaccaagagtgcggc

SEQ ID NO: 187760 - DNA, 30 bp, Artificial Sequence
  Synthetic oligonucleotide
caagaggtaatgttgccgtaggaaatcggc

SEQ ID NO: 187761 - DNA, 30 bp, Artificial Sequence
  Synthetic oligonucleotide
cgattcagcttcaaattgtctcagatcggc

SEQ ID NO: 187762 - DNA, 30 bp, Artificial Sequence
  Synthetic oligonucleotide
gatcgagagcctaagacaagtcctatcggc

SEQ ID NO: 187763 - DNA, 30 bp, Artificial Sequence
  Synthetic oligonucleotide
actaaaagacgggttacggcgggtatcggc

SEQ ID NO: 187764 - DNA, 30 bp, Artificial Sequence
  Synthetic oligonucleotide
actgcagaaggaaccgacgcaaacctcggc

SEQ ID NO: 187765 - DNA, 30 bp, Artificial Sequence
  Synthetic oligonucleotide
atagattaacaacggttagttcgcctcggc

SEQ ID NO: 187766 - DNA, 31 bp, Artificial Sequence
  Synthetic oligonucleotide
gatgcgtatgatgtgtatcgggtagctcggc

SEQ ID NO: 187767 - DNA, 30 bp, Artificial Sequence
  Synthetic oligonucleotide
atggtacactttcgatcccgaatgctcggc

SEQ ID NO: 187768 - DNA, 30 bp, Artificial Sequence
  Synthetic oligonucleotide
attagactattactggaagagcatctcggc

SEQ ID NO: 187769 - DNA, 30 bp, Artificial Sequence
  Synthetic oligonucleotide
ctagcgcagtccgcaaacgtcagtgtcggc

SEQ ID NO: 187770 - DNA, 30 bp, Artificial Sequence
  Synthetic oligonucleotide
gtaccgacccagatgcgtacacgtgtcggc

SEQ ID NO: 187771 - DNA, 30 bp, Artificial Sequence
  Synthetic oligonucleotide
ggttcttccaaggtaccctcgtgtgtcggc

SEQ ID NO: 187772 - DNA, 30 bp, Artificial Sequence
  Synthetic oligonucleotide
caccggtgacgcctaaggaggaacttcggc

SEQ ID NO: 187773 - DNA, 30 bp, Artificial Sequence
  Synthetic oligonucleotide
caaccggttggtctgggagcacacttcggc

SEQ ID NO: 187774 - DNA, 30 bp, Artificial Sequence
  Synthetic oligonucleotide
aaaacagtagaggcgagctctgtgttcggc

SEQ ID NO: 187775 - DNA, 30 bp, Artificial Sequence
  Synthetic oligonucleotide
tgatcagagctctagctgccaccaaagggc

SEQ ID NO: 187776 - DNA, 30 bp, Artificial Sequence
  Synthetic oligonucleotide
actaggaccgcacagttcaacgtcaagggc

SEQ ID NO: 187777 - DNA, 30 bp, Artificial Sequence
  Synthetic oligonucleotide
gtgatatccagtgtacgagtgttcaagggc

SEQ ID NO: 187778 - DNA, 30 bp, Artificial Sequence
  Synthetic oligonucleotide
gacaaaggtcgttgtgatgggtataagggc

SEQ ID NO: 187779 - DNA, 30 bp, Artificial Sequence
  Synthetic oligonucleotide
acgctgccgtgagatcatcggattaagggc

SEQ ID NO: 187780 - DNA, 30 bp, Artificial Sequence
  Synthetic oligonucleotide
cttacgtcaggtcgaacatgcacccagggc

SEQ ID NO: 187781 - DNA, 30 bp, Artificial Sequence
  Synthetic oligonucleotide
tgtagaatcaaggctggctatttccagggc

SEQ ID NO: 187782 - DNA, 30 bp, Artificial Sequence
  Synthetic oligonucleotide
acgattgattcggcgtaaggtgcagagggc

SEQ ID NO: 187783 - DNA, 30 bp, Artificial Sequence
  Synthetic oligonucleotide
atgttcccgagaagacgttaatgagagggc

SEQ ID NO: 187784 - DNA, 30 bp, Artificial Sequence
  Synthetic oligonucleotide
ttatgcaccttggggtgagaaatcgagggc

SEQ ID NO: 187785 - DNA, 30 bp, Artificial Sequence
  Synthetic oligonucleotide
aaggaagtctgattcgaaggcgaatagggc

SEQ ID NO: 187786 - DNA, 30 bp, Artificial Sequence
  Synthetic oligonucleotide
ttacggacactttctaatacgggctagggc

SEQ ID NO: 187787 - DNA, 30 bp, Artificial Sequence
  Synthetic oligonucleotide
gcgtcctacattagctggtttcattagggc

SEQ ID NO: 187788 - DNA, 30 bp, Artificial Sequence
  Synthetic oligonucleotide
aataaagagtggcctattgacacttagggc

SEQ ID NO: 187789 - DNA, 30 bp, Artificial Sequence
  Synthetic oligonucleotide
ccggggtcaaatctaacgggaaaaacgggc

SEQ ID NO: 187790 - DNA, 30 bp, Artificial Sequence
  Synthetic oligonucleotide
tttcacgacggcgttaaaaatcaaacgggc

SEQ ID NO: 187791 - DNA, 30 bp, Artificial Sequence
  Synthetic oligonucleotide
cgaccacgtgctaactcgtgggaaacgggc

SEQ ID NO: 187792 - DNA, 30 bp, Artificial Sequence
  Synthetic oligonucleotide
ataagctaattacaattgcgatgaacgggc

SEQ ID NO: 187793 - DNA, 30 bp, Artificial Sequence
  Synthetic oligonucleotide
gcacaaccagctagcttagccgtaacgggc

SEQ ID NO: 187794 - DNA, 30 bp, Artificial Sequence
  Synthetic oligonucleotide
gctcgtttggacggggtgagccttccgggc

SEQ ID NO: 187795 - DNA, 30 bp, Artificial Sequence
  Synthetic oligonucleotide
tctcgcagcgcagacggataacttgcgggc

SEQ ID NO: 187796 - DNA, 30 bp, Artificial Sequence
  Synthetic oligonucleotide
ggaggaaaactcggataataaccctcgggc

SEQ ID NO: 187797 - DNA, 30 bp, Artificial Sequence
  Synthetic oligonucleotide
gccaagaggtcgggtcaaatctagtcgggc

SEQ ID NO: 187798 - DNA, 30 bp, Artificial Sequence
  Synthetic oligonucleotide
gggaccgccatgctctcacacatttcgggc

SEQ ID NO: 187799 - DNA, 30 bp, Artificial Sequence
  Synthetic oligonucleotide
agacatgcgggtaaaaagcaacaaaggggc

SEQ ID NO: 187800 - DNA, 30 bp, Artificial Sequence
  Synthetic oligonucleotide
tcccgaagcagggagtatcgaagaaggggc

SEQ ID NO: 187801 - DNA, 30 bp, Artificial Sequence
  Synthetic oligonucleotide
tgcgcaaatcgcacgtcttcaaaccggggc

SEQ ID NO: 187802 - DNA, 30 bp, Artificial Sequence
  Synthetic oligonucleotide
cgcggtgctgcttgttcccaaacgcggggc

SEQ ID NO: 187803 - DNA, 30 bp, Artificial Sequence
  Synthetic oligonucleotide
tcagatgctgggggaggtaacatgcggggc

SEQ ID NO: 187804 - DNA, 30 bp, Artificial Sequence
  Synthetic oligonucleotide
tctgagaaggcgggcaaggttcgagggggc

SEQ ID NO: 187805 - DNA, 30 bp, Artificial Sequence
  Synthetic oligonucleotide
ggaggaatcaaacgggctttcacggggggc

SEQ ID NO: 187806 - DNA, 30 bp, Artificial Sequence
  Synthetic oligonucleotide
ctcaaagatatgggctccgtgaatgggggc

SEQ ID NO: 187807 - DNA, 30 bp, Artificial Sequence
  Synthetic oligonucleotide
tcaaggatagtgatgagacaccctgggggc

SEQ ID NO: 187808 - DNA, 30 bp, Artificial Sequence
  Synthetic oligonucleotide
ttaagtaaatttcgaacgaattttgggggc

SEQ ID NO: 187809 - DNA, 30 bp, Artificial Sequence
  Synthetic oligonucleotide
agagaactgttactaaagcacatatggggc

SEQ ID NO: 187810 - DNA, 30 bp, Artificial Sequence
  Synthetic oligonucleotide
gaaacaaagctgacaagtccctccatgggc

SEQ ID NO: 187811 - DNA, 30 bp, Artificial Sequence
  Synthetic oligonucleotide
gggggcggtagcgggcttgattcgatgggc

SEQ ID NO: 187812 - DNA, 31 bp, Artificial Sequence
  Synthetic oligonucleotide
caatatgacgtatagaaggaggtttatgggc

SEQ ID NO: 187813 - DNA, 30 bp, Artificial Sequence
  Synthetic oligonucleotide
atgattacagtatcaagtcaaaaactgggc

SEQ ID NO: 187814 - DNA, 30 bp, Artificial Sequence
  Synthetic oligonucleotide
tcctagataccggttcctggcaatctgggc

SEQ ID NO: 187815 - DNA, 30 bp, Artificial Sequence
  Synthetic oligonucleotide
taccaatcgtgggtggtcgactcagtgggc

SEQ ID NO: 187816 - DNA, 30 bp, Artificial Sequence
  Synthetic oligonucleotide
gaatggtcagtacgtggctcgaacgtgggc

SEQ ID NO: 187817 - DNA, 30 bp, Artificial Sequence
  Synthetic oligonucleotide
tctaaggctgtgggtaagacggaggtgggc

SEQ ID NO: 187818 - DNA, 30 bp, Artificial Sequence
  Synthetic oligonucleotide
tgctcaaaccataccgcaggggggttgggc

SEQ ID NO: 187819 - DNA, 30 bp, Artificial Sequence
  Synthetic oligonucleotide
ccacgtctatagagatctgcctacaatggc

SEQ ID NO: 187820 - DNA, 30 bp, Artificial Sequence
  Synthetic oligonucleotide
acagctaggtgcagtcgatactggaatggc

SEQ ID NO: 187821 - DNA, 30 bp, Artificial Sequence
  Synthetic oligonucleotide
gtgtggcaggccttagcatactaccatggc

SEQ ID NO: 187822 - DNA, 30 bp, Artificial Sequence
  Synthetic oligonucleotide
ggctcgtcacctcaatgttgtgggcatggc

SEQ ID NO: 187823 - DNA, 30 bp, Artificial Sequence
  Synthetic oligonucleotide
caacggcagcgaagataggttactcatggc

SEQ ID NO: 187824 - DNA, 30 bp, Artificial Sequence
  Synthetic oligonucleotide
agattggcagcgggggaggccggtcatggc

SEQ ID NO: 187825 - DNA, 30 bp, Artificial Sequence
  Synthetic oligonucleotide
agtgccgctacgatgggcatcgttcatggc

SEQ ID NO: 187826 - DNA, 30 bp, Artificial Sequence
  Synthetic oligonucleotide
ggtaggctgcttgtcggcacctcagatggc

SEQ ID NO: 187827 - DNA, 30 bp, Artificial Sequence
  Synthetic oligonucleotide
tgcgcagaaggctcagtatcaagagatggc

SEQ ID NO: 187828 - DNA, 30 bp, Artificial Sequence
  Synthetic oligonucleotide
ccaatggggggagatgaggtctacgatggc

SEQ ID NO: 187829 - DNA, 30 bp, Artificial Sequence
  Synthetic oligonucleotide
tacttaccgcccccggtcaccagcgatggc

SEQ ID NO: 187830 - DNA, 30 bp, Artificial Sequence
  Synthetic oligonucleotide
tagcgtcgtactatctaagcttgcgatggc

SEQ ID NO: 187831 - DNA, 30 bp, Artificial Sequence
  Synthetic oligonucleotide
gcagcgaacgggccacagcttcaggatggc

SEQ ID NO: 187832 - DNA, 30 bp, Artificial Sequence
  Synthetic oligonucleotide
aggcctatgtcggtaggcgcgcgatatggc

SEQ ID NO: 187833 - DNA, 30 bp, Artificial Sequence
  Synthetic oligonucleotide
ttgtaggttaaaaattagctaggctatggc

SEQ ID NO: 187834 - DNA, 30 bp, Artificial Sequence
  Synthetic oligonucleotide
agtcaccactagtaggaacgtatttatggc

SEQ ID NO: 187835 - DNA, 30 bp, Artificial Sequence
  Synthetic oligonucleotide
cggtattcaaagtttcacaatacacctggc

SEQ ID NO: 187836 - DNA, 30 bp, Artificial Sequence
  Synthetic oligonucleotide
ctccgaacgcaccaatgatgtatgcctggc

SEQ ID NO: 187837 - DNA, 30 bp, Artificial Sequence
  Synthetic oligonucleotide
acacgttctgttaatagtaaggttcctggc

SEQ ID NO: 187838 - DNA, 30 bp, Artificial Sequence
  Synthetic oligonucleotide
gatcggatgagcgtcgcagacgaagctggc

SEQ ID NO: 187839 - DNA, 30 bp, Artificial Sequence
  Synthetic oligonucleotide
agcaatgggcagccgatacagaacgctggc

SEQ ID NO: 187840 - DNA, 30 bp, Artificial Sequence
  Synthetic oligonucleotide
ataatttgcggaactgctcgatgggctggc

SEQ ID NO: 187841 - DNA, 30 bp, Artificial Sequence
  Synthetic oligonucleotide
tcagagtgcaacactgacgtgccctctggc

SEQ ID NO: 187842 - DNA, 30 bp, Artificial Sequence
  Synthetic oligonucleotide
attgggcagggacaagaatacccgtctggc

SEQ ID NO: 187843 - DNA, 30 bp, Artificial Sequence
  Synthetic oligonucleotide
aggctttgaggggaaagatgggacagtggc

SEQ ID NO: 187844 - DNA, 30 bp, Artificial Sequence
  Synthetic oligonucleotide
cgttatagctgtcaggcgcacgaacgtggc

SEQ ID NO: 187845 - DNA, 30 bp, Artificial Sequence
  Synthetic oligonucleotide
tcgcccaatctgatacggtaattccgtggc

SEQ ID NO: 187846 - DNA, 30 bp, Artificial Sequence
  Synthetic oligonucleotide
acagccgggagggtctcgcgatttcgtggc

SEQ ID NO: 187847 - DNA, 30 bp, Artificial Sequence
  Synthetic oligonucleotide
tccgttctggggtgccagaggtcaggtggc

SEQ ID NO: 187848 - DNA, 30 bp, Artificial Sequence
  Synthetic oligonucleotide
cgacattttagctgcatacggtggggtggc

SEQ ID NO: 187849 - DNA, 30 bp, Artificial Sequence
  Synthetic oligonucleotide
gtaagtgtgagtttggaatttgtgtgtggc

SEQ ID NO: 187850 - DNA, 30 bp, Artificial Sequence
  Synthetic oligonucleotide
tggggctgtgagaacgccataagtattggc

SEQ ID NO: 187851 - DNA, 30 bp, Artificial Sequence
  Synthetic oligonucleotide
ttagagggaggacgtctggactagcttggc

SEQ ID NO: 187852 - DNA, 30 bp, Artificial Sequence
  Synthetic oligonucleotide
acacgtgggagagcgggggcagtgcttggc

SEQ ID NO: 187853 - DNA, 29 bp, Artificial Sequence
  Synthetic oligonucleotide
ccttagcacagattccgactgacgttggc

SEQ ID NO: 187854 - DNA, 30 bp, Artificial Sequence
  Synthetic oligonucleotide
gttagtgttcagctggagttcgtggttggc

SEQ ID NO: 187855 - DNA, 30 bp, Artificial Sequence
  Synthetic oligonucleotide
ggcattatccttccgatggaaccatttggc

SEQ ID NO: 187856 - DNA, 30 bp, Artificial Sequence
  Synthetic oligonucleotide
cggatacgaattcagttgtgtgcctttggc

SEQ ID NO: 187857 - DNA, 30 bp, Artificial Sequence
  Synthetic oligonucleotide
gcggctatgctcgcgattatcacgtttggc

SEQ ID NO: 187858 - DNA, 30 bp, Artificial Sequence
  Synthetic oligonucleotide
gtatactactgagggtatgcgtggtttggc

SEQ ID NO: 187859 - DNA, 30 bp, Artificial Sequence
  Synthetic oligonucleotide
caatggcacgattcgaaaaactgttttggc

SEQ ID NO: 187860 - DNA, 30 bp, Artificial Sequence
  Synthetic oligonucleotide
tttacgtacaattggcacatcatttttggc

SEQ ID NO: 187861 - DNA, 30 bp, Artificial Sequence
  Synthetic oligonucleotide
ttcgaccgggtttcttaggtataaaaatgc

SEQ ID NO: 187862 - DNA, 30 bp, Artificial Sequence
  Synthetic oligonucleotide
agcaaatgaagtccataccggttaaaatgc

SEQ ID NO: 187863 - DNA, 30 bp, Artificial Sequence
  Synthetic oligonucleotide
tacacatgcagggcacatagaggtaaatgc

SEQ ID NO: 187864 - DNA, 30 bp, Artificial Sequence
  Synthetic oligonucleotide
taaccagaaggttcggtttcggttaaatgc

SEQ ID NO: 187865 - DNA, 30 bp, Artificial Sequence
  Synthetic oligonucleotide
gtgtgtccccctggggctcaactacaatgc

SEQ ID NO: 187866 - DNA, 30 bp, Artificial Sequence
  Synthetic oligonucleotide
tgcgaaggggcaatgagatgtctgcaatgc

SEQ ID NO: 187867 - DNA, 30 bp, Artificial Sequence
  Synthetic oligonucleotide
ggatgacggttagagcaattcagtcaatgc

SEQ ID NO: 187868 - DNA, 30 bp, Artificial Sequence
  Synthetic oligonucleotide
tggcgcatttgtagaggcattattcaatgc

SEQ ID NO: 187869 - DNA, 30 bp, Artificial Sequence
  Synthetic oligonucleotide
atgactagtcgtctgacacggacagaatgc

SEQ ID NO: 187870 - DNA, 30 bp, Artificial Sequence
  Synthetic oligonucleotide
caccacgaaacacgcgcttcgtgagaatgc

SEQ ID NO: 187871 - DNA, 30 bp, Artificial Sequence
  Synthetic oligonucleotide
ggtcacaatagctaagcatgtctagaatgc

SEQ ID NO: 187872 - DNA, 30 bp, Artificial Sequence
  Synthetic oligonucleotide
ccccgagacaggtgggtatacaacgaatgc

SEQ ID NO: 187873 - DNA, 30 bp, Artificial Sequence
  Synthetic oligonucleotide
tcaaaagtgaggtcagctaaattcgaatgc

SEQ ID NO: 187874 - DNA, 30 bp, Artificial Sequence
  Synthetic oligonucleotide
gaactaagaggaaggcggtgcggggaatgc

SEQ ID NO: 187875 - DNA, 30 bp, Artificial Sequence
  Synthetic oligonucleotide
gcatcgacatattctaagttgtgataatgc

SEQ ID NO: 187876 - DNA, 30 bp, Artificial Sequence
  Synthetic oligonucleotide
acgggatcgcattaggctgagctataatgc

SEQ ID NO: 187877 - DNA, 30 bp, Artificial Sequence
  Synthetic oligonucleotide
gaggttgtgaagaaaaatacgaactaatgc

SEQ ID NO: 187878 - DNA, 30 bp, Artificial Sequence
  Synthetic oligonucleotide
acaacatcgtaaacaatcaatgcttaatgc

SEQ ID NO: 187879 - DNA, 30 bp, Artificial Sequence
  Synthetic oligonucleotide
caggtcggtatcattctcaaacgttaatgc

SEQ ID NO: 187880 - DNA, 30 bp, Artificial Sequence
  Synthetic oligonucleotide
gttgaaaagaccaacaagtctcacacatgc

SEQ ID NO: 187881 - DNA, 30 bp, Artificial Sequence
  Synthetic oligonucleotide
cgtagaggtgtttaggctattttgacatgc

SEQ ID NO: 187882 - DNA, 30 bp, Artificial Sequence
  Synthetic oligonucleotide
ccggccaccaccctggatctgaaaccatgc

SEQ ID NO: 187883 - DNA, 30 bp, Artificial Sequence
  Synthetic oligonucleotide
tcgataattaacggattttaaaagccatgc

SEQ ID NO: 187884 - DNA, 30 bp, Artificial Sequence
  Synthetic oligonucleotide
gccgtcaagtttcgacttcgtatgccatgc

SEQ ID NO: 187885 - DNA, 30 bp, Artificial Sequence
  Synthetic oligonucleotide
aatggataggcccactctacgaatccatgc

SEQ ID NO: 187886 - DNA, 30 bp, Artificial Sequence
  Synthetic oligonucleotide
tatggcacgtgccgtcgctatagcgcatgc

SEQ ID NO: 187887 - DNA, 30 bp, Artificial Sequence
  Synthetic oligonucleotide
gttggtacagaaaccagaacgaaggcatgc

SEQ ID NO: 187888 - DNA, 30 bp, Artificial Sequence
  Synthetic oligonucleotide
cggatggtaagcccgtctacatatgcatgc

SEQ ID NO: 187889 - DNA, 30 bp, Artificial Sequence
  Synthetic oligonucleotide
agtgcccgcgattcgcaaccaactgcatgc

SEQ ID NO: 187890 - DNA, 30 bp, Artificial Sequence
  Synthetic oligonucleotide
gacactctaaaggagatcgaacctgcatgc

SEQ ID NO: 187891 - DNA, 30 bp, Artificial Sequence
  Synthetic oligonucleotide
gctaccacgaatgtgtcaaatggtgcatgc

SEQ ID NO: 187892 - DNA, 30 bp, Artificial Sequence
  Synthetic oligonucleotide
gaggtaactgctagcgcgccccgatcatgc

SEQ ID NO: 187893 - DNA, 30 bp, Artificial Sequence
  Synthetic oligonucleotide
gtgggggtcagttcatctagaaactcatgc

SEQ ID NO: 187894 - DNA, 30 bp, Artificial Sequence
  Synthetic oligonucleotide
cgaatttaaggctttgggaatacctcatgc

SEQ ID NO: 187895 - DNA, 30 bp, Artificial Sequence
  Synthetic oligonucleotide
tgcggattcacccaagagcaatcgtcatgc

SEQ ID NO: 187896 - DNA, 30 bp, Artificial Sequence
  Synthetic oligonucleotide
caccaggattaaaagttgctctggtcatgc

SEQ ID NO: 187897 - DNA, 30 bp, Artificial Sequence
  Synthetic oligonucleotide
aaggtcattgggtcctctaagttgtcatgc

SEQ ID NO: 187898 - DNA, 30 bp, Artificial Sequence
  Synthetic oligonucleotide
gtagccgctacaactccgtaccacagatgc

SEQ ID NO: 187899 - DNA, 30 bp, Artificial Sequence
  Synthetic oligonucleotide
catacccgttactgacgagttgggcgatgc

SEQ ID NO: 187900 - DNA, 30 bp, Artificial Sequence
  Synthetic oligonucleotide
gaacgcgcgcaaaacacgaactctcgatgc

SEQ ID NO: 187901 - DNA, 30 bp, Artificial Sequence
  Synthetic oligonucleotide
gacaatgtaactaatgtagcgcaaggatgc

SEQ ID NO: 187902 - DNA, 30 bp, Artificial Sequence
  Synthetic oligonucleotide
gctacaacggcttgataaaccggcggatgc

SEQ ID NO: 187903 - DNA, 30 bp, Artificial Sequence
  Synthetic oligonucleotide
aagactaatgtgcctcgtgaacagggatgc

SEQ ID NO: 187904 - DNA, 30 bp, Artificial Sequence
  Synthetic oligonucleotide
agtgaacattgagatcgtgataggggatgc

SEQ ID NO: 187905 - DNA, 30 bp, Artificial Sequence
  Synthetic oligonucleotide
catcaggcgtcttaagtcattgcatgatgc

SEQ ID NO: 187906 - DNA, 30 bp, Artificial Sequence
  Synthetic oligonucleotide
tacgaacgcgtcctctacgggggttgatgc

SEQ ID NO: 187907 - DNA, 30 bp, Artificial Sequence
  Synthetic oligonucleotide
tctacgacatggagtcgctccagaatatgc

SEQ ID NO: 187908 - DNA, 30 bp, Artificial Sequence
  Synthetic oligonucleotide
cgtttagtaataaactaccggtgaatatgc

SEQ ID NO: 187909 - DNA, 30 bp, Artificial Sequence
  Synthetic oligonucleotide
gtcaggctctgacggccttgtatcatatgc

SEQ ID NO: 187910 - DNA, 30 bp, Artificial Sequence
  Synthetic oligonucleotide
tggaaaacaatggtaccgcggctcatatgc

SEQ ID NO: 187911 - DNA, 30 bp, Artificial Sequence
  Synthetic oligonucleotide
agtacttcgatcacgaacgctttgatatgc

SEQ ID NO: 187912 - DNA, 30 bp, Artificial Sequence
  Synthetic oligonucleotide
tagcgggttgcaactgtctaaaacctatgc

SEQ ID NO: 187913 - DNA, 30 bp, Artificial Sequence
  Synthetic oligonucleotide
gactccgtatacacgggcaggcctctatgc

SEQ ID NO: 187914 - DNA, 30 bp, Artificial Sequence
  Synthetic oligonucleotide
ctagggttcactttgaagtatggagtatgc

SEQ ID NO: 187915 - DNA, 30 bp, Artificial Sequence
  Synthetic oligonucleotide
acccactgactatccgatggtatcgtatgc

SEQ ID NO: 187916 - DNA, 30 bp, Artificial Sequence
  Synthetic oligonucleotide
gggtgggagatttggtacggacatgtatgc

SEQ ID NO: 187917 - DNA, 30 bp, Artificial Sequence
  Synthetic oligonucleotide
tcagccattgcagactacttggatgtatgc

SEQ ID NO: 187918 - DNA, 30 bp, Artificial Sequence
  Synthetic oligonucleotide
gtaggtcgaatgcgatttaacatattatgc

SEQ ID NO: 187919 - DNA, 30 bp, Artificial Sequence
  Synthetic oligonucleotide
tatgaggatcgaataaatagaggtttatgc

SEQ ID NO: 187920 - DNA, 30 bp, Artificial Sequence
  Synthetic oligonucleotide
tagaactgtaattaacggtgtgtcaactgc

SEQ ID NO: 187921 - DNA, 30 bp, Artificial Sequence
  Synthetic oligonucleotide
gcaaacgggttaacctactccgaacactgc

SEQ ID NO: 187922 - DNA, 30 bp, Artificial Sequence
  Synthetic oligonucleotide
agcggttgcgaaacgggaggaacgcactgc

SEQ ID NO: 187923 - DNA, 30 bp, Artificial Sequence
  Synthetic oligonucleotide
ggttagtgtaaatatccacaccctcactgc

SEQ ID NO: 187924 - DNA, 30 bp, Artificial Sequence
  Synthetic oligonucleotide
aacgatggtcatgagaagtacctggactgc

SEQ ID NO: 187925 - DNA, 30 bp, Artificial Sequence
  Synthetic oligonucleotide
gatgtcggaatcacagcgattgctgactgc

SEQ ID NO: 187926 - DNA, 30 bp, Artificial Sequence
  Synthetic oligonucleotide
accgcttaccgaggaatagaggttgactgc

SEQ ID NO: 187927 - DNA, 30 bp, Artificial Sequence
  Synthetic oligonucleotide
agaggtcgtgactctaccaaccaatactgc

SEQ ID NO: 187928 - DNA, 30 bp, Artificial Sequence
  Synthetic oligonucleotide
cttccaataggtaggtcgggttgatactgc

SEQ ID NO: 187929 - DNA, 30 bp, Artificial Sequence
  Synthetic oligonucleotide
gggtgggaaagccattagaccatatactgc

SEQ ID NO: 187930 - DNA, 30 bp, Artificial Sequence
  Synthetic oligonucleotide
taggtggatatccgtgggactgtgtactgc

SEQ ID NO: 187931 - DNA, 30 bp, Artificial Sequence
  Synthetic oligonucleotide
gcgtatggctacttgaaattctaaccctgc

SEQ ID NO: 187932 - DNA, 30 bp, Artificial Sequence
  Synthetic oligonucleotide
actcacaccacaaattggctactaccctgc

SEQ ID NO: 187933 - DNA, 30 bp, Artificial Sequence
  Synthetic oligonucleotide
aactcgagcaggctcggacagctaccctgc

SEQ ID NO: 187934 - DNA, 30 bp, Artificial Sequence
  Synthetic oligonucleotide
cactcgcaatacagatgtaggactccctgc

SEQ ID NO: 187935 - DNA, 30 bp, Artificial Sequence
  Synthetic oligonucleotide
tcatttgcacgttctgagatcgttccctgc

SEQ ID NO: 187936 - DNA, 30 bp, Artificial Sequence
  Synthetic oligonucleotide
acctcttgcgggggcgactcgtttccctgc

SEQ ID NO: 187937 - DNA, 30 bp, Artificial Sequence
  Synthetic oligonucleotide
gagatgtcgccaacaattagggcagcctgc

SEQ ID NO: 187938 - DNA, 30 bp, Artificial Sequence
  Synthetic oligonucleotide
tggccttcaccacagcaaatgacggcctgc

SEQ ID NO: 187939 - DNA, 30 bp, Artificial Sequence
  Synthetic oligonucleotide
atggtgtagctcggaagtgttgcaagctgc

SEQ ID NO: 187940 - DNA, 30 bp, Artificial Sequence
  Synthetic oligonucleotide
tgtgttatacaaggaacccgagtgagctgc

SEQ ID NO: 187941 - DNA, 30 bp, Artificial Sequence
  Synthetic oligonucleotide
ttcaatacagggtgtaaggctggtagctgc

SEQ ID NO: 187942 - DNA, 30 bp, Artificial Sequence
  Synthetic oligonucleotide
agctgtaactatgaccgtaggtggcgctgc

SEQ ID NO: 187943 - DNA, 30 bp, Artificial Sequence
  Synthetic oligonucleotide
acgtctattaaaccatttgaaaggggctgc

SEQ ID NO: 187944 - DNA, 30 bp, Artificial Sequence
  Synthetic oligonucleotide
gaaggcaataagagtatgtgttgatgctgc

SEQ ID NO: 187945 - DNA, 30 bp, Artificial Sequence
  Synthetic oligonucleotide
ttcccgaaagtatcactctgactatgctgc

SEQ ID NO: 187946 - DNA, 30 bp, Artificial Sequence
  Synthetic oligonucleotide
aagacacgtgctgtcagtcaagtttgctgc

SEQ ID NO: 187947 - DNA, 30 bp, Artificial Sequence
  Synthetic oligonucleotide
ttggtacattatctaatggctctgatctgc

SEQ ID NO: 187948 - DNA, 30 bp, Artificial Sequence
  Synthetic oligonucleotide
tagatatagggagtggtgacttcactctgc

SEQ ID NO: 187949 - DNA, 30 bp, Artificial Sequence
  Synthetic oligonucleotide
aaagctaatcccgttgcagttcaagtctgc

SEQ ID NO: 187950 - DNA, 30 bp, Artificial Sequence
  Synthetic oligonucleotide
agagcctgtgcaaaaaacgcagaagtctgc

SEQ ID NO: 187951 - DNA, 30 bp, Artificial Sequence
  Synthetic oligonucleotide
gtaagcaggtcgaagcccgaacatgtctgc

SEQ ID NO: 187952 - DNA, 30 bp, Artificial Sequence
  Synthetic oligonucleotide
cactagatatgttaggaatataatttctgc

SEQ ID NO: 187953 - DNA, 30 bp, Artificial Sequence
  Synthetic oligonucleotide
catacctatatcgcgaggccgtatttctgc

SEQ ID NO: 187954 - DNA, 30 bp, Artificial Sequence
  Synthetic oligonucleotide
gcatctattgaatagatggtaaaaaagtgc

SEQ ID NO: 187955 - DNA, 30 bp, Artificial Sequence
  Synthetic oligonucleotide
agggccacgctcgggctggtgaaaaagtgc

SEQ ID NO: 187956 - DNA, 30 bp, Artificial Sequence
  Synthetic oligonucleotide
aacactgtgcttgtgaacaagataaagtgc

SEQ ID NO: 187957 - DNA, 30 bp, Artificial Sequence
  Synthetic oligonucleotide
tcgcgtagcggatcacaacttaacaagtgc

SEQ ID NO: 187958 - DNA, 30 bp, Artificial Sequence
  Synthetic oligonucleotide
aaaggaaatatggtggtcacatacgagtgc

SEQ ID NO: 187959 - DNA, 30 bp, Artificial Sequence
  Synthetic oligonucleotide
ttgtacggaccatggtcgaagtgcgagtgc

SEQ ID NO: 187960 - DNA, 30 bp, Artificial Sequence
  Synthetic oligonucleotide
ctagaatattgagacacaaaacgggagtgc

SEQ ID NO: 187961 - DNA, 30 bp, Artificial Sequence
  Synthetic oligonucleotide
aggtatcccgatccttagagttctgagtgc

SEQ ID NO: 187962 - DNA, 30 bp, Artificial Sequence
  Synthetic oligonucleotide
gtaccacgaatcgttcgatctagaacgtgc

SEQ ID NO: 187963 - DNA, 30 bp, Artificial Sequence
  Synthetic oligonucleotide
gagacgacatcgaccccaatgctaacgtgc

SEQ ID NO: 187964 - DNA, 30 bp, Artificial Sequence
  Synthetic oligonucleotide
tacagggcgcgtatcgaccgagagacgtgc

SEQ ID NO: 187965 - DNA, 30 bp, Artificial Sequence
  Synthetic oligonucleotide
aggaggaacttatgtaggatcgagacgtgc

SEQ ID NO: 187966 - DNA, 30 bp, Artificial Sequence
  Synthetic oligonucleotide
cgtcaacaagattctttgtgtgggacgtgc

SEQ ID NO: 187967 - DNA, 30 bp, Artificial Sequence
  Synthetic oligonucleotide
cttcacgccgaattcatatcaaagccgtgc

SEQ ID NO: 187968 - DNA, 30 bp, Artificial Sequence
  Synthetic oligonucleotide
taagtagtcgttcttctcacggatccgtgc

SEQ ID NO: 187969 - DNA, 30 bp, Artificial Sequence
  Synthetic oligonucleotide
gataaactagtcaatagggcccatgcgtgc

SEQ ID NO: 187970 - DNA, 30 bp, Artificial Sequence
  Synthetic oligonucleotide
gtcatattcggcctctacgcgctatcgtgc

SEQ ID NO: 187971 - DNA, 30 bp, Artificial Sequence
  Synthetic oligonucleotide
ccctacggtgcgagaaaggtagaaaggtgc

SEQ ID NO: 187972 - DNA, 30 bp, Artificial Sequence
  Synthetic oligonucleotide
ttacatacgaagatctcggactaaaggtgc

SEQ ID NO: 187973 - DNA, 30 bp, Artificial Sequence
  Synthetic oligonucleotide
cagttctccaacgaaaggagtaccaggtgc

SEQ ID NO: 187974 - DNA, 30 bp, Artificial Sequence
  Synthetic oligonucleotide
aaggcaaatgtcggggaccttcccaggtgc

SEQ ID NO: 187975 - DNA, 30 bp, Artificial Sequence
  Synthetic oligonucleotide
cagctggctagagataacggaggcaggtgc

SEQ ID NO: 187976 - DNA, 30 bp, Artificial Sequence
  Synthetic oligonucleotide
agcagaatctgaagcaattcaaagaggtgc

SEQ ID NO: 187977 - DNA, 30 bp, Artificial Sequence
  Synthetic oligonucleotide
agatttgaccatgccgccttaaagaggtgc

SEQ ID NO: 187978 - DNA, 30 bp, Artificial Sequence
  Synthetic oligonucleotide
aggcgcacatgtgacgccaaagggaggtgc

SEQ ID NO: 187979 - DNA, 30 bp, Artificial Sequence
  Synthetic oligonucleotide
cttccagatagcagatggtttcataggtgc

SEQ ID NO: 187980 - DNA, 30 bp, Artificial Sequence
  Synthetic oligonucleotide
gtagaggcagactgatgctgcaaccggtgc

SEQ ID NO: 187981 - DNA, 30 bp, Artificial Sequence
  Synthetic oligonucleotide
gggatcgggcctctacgattaacgcggtgc

SEQ ID NO: 187982 - DNA, 30 bp, Artificial Sequence
  Synthetic oligonucleotide
ttatcactaggggtgccccatttgcggtgc

SEQ ID NO: 187983 - DNA, 30 bp, Artificial Sequence
  Synthetic oligonucleotide
ccgttaccgctctcaggggtcatagggtgc

SEQ ID NO: 187984 - DNA, 30 bp, Artificial Sequence
  Synthetic oligonucleotide
ggatttgtattatctggcgtacgggggtgc

SEQ ID NO: 187985 - DNA, 30 bp, Artificial Sequence
  Synthetic oligonucleotide
caaatagcgtacggcgggaggaattggtgc

SEQ ID NO: 187986 - DNA, 30 bp, Artificial Sequence
  Synthetic oligonucleotide
gggtaattaggaggccggagtgaaatgtgc

SEQ ID NO: 187987 - DNA, 30 bp, Artificial Sequence
  Synthetic oligonucleotide
atcggttggctgacaggcattcagatgtgc

SEQ ID NO: 187988 - DNA, 30 bp, Artificial Sequence
  Synthetic oligonucleotide
ctcgttcccatgcaggagtatcgactgtgc

SEQ ID NO: 187989 - DNA, 30 bp, Artificial Sequence
  Synthetic oligonucleotide
acgaacgcatctaagtggtaaaggctgtgc

SEQ ID NO: 187990 - DNA, 30 bp, Artificial Sequence
  Synthetic oligonucleotide
acgtcctcattgccttggcgattgctgtgc

SEQ ID NO: 187991 - DNA, 30 bp, Artificial Sequence
  Synthetic oligonucleotide
ttgtgttgcgcctgttctgtggatctgtgc

SEQ ID NO: 187992 - DNA, 30 bp, Artificial Sequence
  Synthetic oligonucleotide
gggcgatccgtgtcagttcgaatcgtgtgc

SEQ ID NO: 187993 - DNA, 30 bp, Artificial Sequence
  Synthetic oligonucleotide
tctcgtccggactgagacaagtaggtgtgc

SEQ ID NO: 187994 - DNA, 30 bp, Artificial Sequence
  Synthetic oligonucleotide
attaggccttagttccacctaacggtgtgc

SEQ ID NO: 187995 - DNA, 30 bp, Artificial Sequence
  Synthetic oligonucleotide
ggtggactggcctgcaactcagcggtgtgc

SEQ ID NO: 187996 - DNA, 30 bp, Artificial Sequence
  Synthetic oligonucleotide
cgtatctgaaagaaaggagcacatgtgtgc

SEQ ID NO: 187997 - DNA, 30 bp, Artificial Sequence
  Synthetic oligonucleotide
ttggaagtcggctctagagtctaattgtgc

SEQ ID NO: 187998 - DNA, 30 bp, Artificial Sequence
  Synthetic oligonucleotide
tcgttgggcaggggtacatacaggttgtgc

SEQ ID NO: 187999 - DNA, 30 bp, Artificial Sequence
  Synthetic oligonucleotide
accttagctgtgcaagctcttcgaaattgc

SEQ ID NO: 188000 - DNA, 30 bp, Artificial Sequence
  Synthetic oligonucleotide
cttgtgagcaaaccgcgcgatgcgaattgc

SEQ ID NO: 188001 - DNA, 30 bp, Artificial Sequence
  Synthetic oligonucleotide
taacatagggttcatttaagagttaattgc

SEQ ID NO: 188002 - DNA, 30 bp, Artificial Sequence
  Synthetic oligonucleotide
ttaggttgctcagcctgcccggcccattgc

SEQ ID NO: 188003 - DNA, 30 bp, Artificial Sequence
  Synthetic oligonucleotide
agcaccacgcgcgtgtcaagcgagcattgc

SEQ ID NO: 188004 - DNA, 30 bp, Artificial Sequence
  Synthetic oligonucleotide
actacgataggatagggtttggaagattgc

SEQ ID NO: 188005 - DNA, 30 bp, Artificial Sequence
  Synthetic oligonucleotide
tgcgtatgaccggaaaggagcaaggattgc

SEQ ID NO: 188006 - DNA, 30 bp, Artificial Sequence
  Synthetic oligonucleotide
cgtaatggagccgtgcgggacggatattgc

SEQ ID NO: 188007 - DNA, 30 bp, Artificial Sequence
  Synthetic oligonucleotide
gctgggcggtaatccggtctttggtattgc

SEQ ID NO: 188008 - DNA, 30 bp, Artificial Sequence
  Synthetic oligonucleotide
ctcgaacgattcagactccttacaacttgc

SEQ ID NO: 188009 - DNA, 33 bp, Artificial Sequence
  Synthetic oligonucleotide
atacatattccgtcgaatatgtcgtttacttgc

SEQ ID NO: 188010 - DNA, 30 bp, Artificial Sequence
  Synthetic oligonucleotide
tgagacacggtaaaatggcgcacgccttgc

SEQ ID NO: 188011 - DNA, 30 bp, Artificial Sequence
  Synthetic oligonucleotide
ggttgagtgatcactgagaaaccgccttgc

SEQ ID NO: 188012 - DNA, 30 bp, Artificial Sequence
  Synthetic oligonucleotide
atgtcctgaaagttagaaaaggatccttgc

SEQ ID NO: 188013 - DNA, 30 bp, Artificial Sequence
  Synthetic oligonucleotide
taaaggccgaaggattctcgagccgcttgc

SEQ ID NO: 188014 - DNA, 30 bp, Artificial Sequence
  Synthetic oligonucleotide
cgatttccccgaacttcgaccagtgcttgc

SEQ ID NO: 188015 - DNA, 30 bp, Artificial Sequence
  Synthetic oligonucleotide
tttagaagctttgcgcaatagaggtcttgc

SEQ ID NO: 188016 - DNA, 30 bp, Artificial Sequence
  Synthetic oligonucleotide
ccctcgagatacggttgtctttagagttgc

SEQ ID NO: 188017 - DNA, 30 bp, Artificial Sequence
  Synthetic oligonucleotide
ttgcggcgctctagtaagcaaatgagttgc

SEQ ID NO: 188018 - DNA, 30 bp, Artificial Sequence
  Synthetic oligonucleotide
gatcaataatacaagccgaagcgtagttgc

SEQ ID NO: 188019 - DNA, 30 bp, Artificial Sequence
  Synthetic oligonucleotide
tcgttacctgttgctcaaccggttagttgc

SEQ ID NO: 188020 - DNA, 30 bp, Artificial Sequence
  Synthetic oligonucleotide
atggagaaggtagggcgtccctaccgttgc

SEQ ID NO: 188021 - DNA, 30 bp, Artificial Sequence
  Synthetic oligonucleotide
taaggcggatagatttagtcctgccgttgc

SEQ ID NO: 188022 - DNA, 30 bp, Artificial Sequence
  Synthetic oligonucleotide
actaaggtaaactctgcagtctagcgttgc

SEQ ID NO: 188023 - DNA, 30 bp, Artificial Sequence
  Synthetic oligonucleotide
ttacttgaacagtaagaataatcgcgttgc

SEQ ID NO: 188024 - DNA, 30 bp, Artificial Sequence
  Synthetic oligonucleotide
aagctcatactacctatttggcaaggttgc

SEQ ID NO: 188025 - DNA, 30 bp, Artificial Sequence
  Synthetic oligonucleotide
agaggcataaaattatcctggcgaggttgc

SEQ ID NO: 188026 - DNA, 30 bp, Artificial Sequence
  Synthetic oligonucleotide
gtgtgtgagctcgcatgtacgttatgttgc

SEQ ID NO: 188027 - DNA, 30 bp, Artificial Sequence
  Synthetic oligonucleotide
ggcatgggtttctgtgatatcccctgttgc

SEQ ID NO: 188028 - DNA, 30 bp, Artificial Sequence
  Synthetic oligonucleotide
atgaggaccgacagccacttgtcctgttgc

SEQ ID NO: 188029 - DNA, 30 bp, Artificial Sequence
  Synthetic oligonucleotide
tccctccgtaaaactaaagtcatctgttgc

SEQ ID NO: 188030 - DNA, 30 bp, Artificial Sequence
  Synthetic oligonucleotide
ccatgaatctcttacggtatgcagtgttgc

SEQ ID NO: 188031 - DNA, 30 bp, Artificial Sequence
  Synthetic oligonucleotide
aggtgaaaccctgtaacgagattgtgttgc

SEQ ID NO: 188032 - DNA, 30 bp, Artificial Sequence
  Synthetic oligonucleotide
tggtgtgtggcggtggacaagctaatttgc

SEQ ID NO: 188033 - DNA, 30 bp, Artificial Sequence
  Synthetic oligonucleotide
cattccgattagtcgtcaggggtgatttgc

SEQ ID NO: 188034 - DNA, 30 bp, Artificial Sequence
  Synthetic oligonucleotide
ccccccagcaagggagatatcgttatttgc

SEQ ID NO: 188035 - DNA, 30 bp, Artificial Sequence
  Synthetic oligonucleotide
aaaggtccaatcgcactgtcccccctttgc

SEQ ID NO: 188036 - DNA, 30 bp, Artificial Sequence
  Synthetic oligonucleotide
aagtgcccgcaatcgtaggcacatctttgc

SEQ ID NO: 188037 - DNA, 30 bp, Artificial Sequence
  Synthetic oligonucleotide
ggcgaatacatgcatagtacggaggtttgc

SEQ ID NO: 188038 - DNA, 30 bp, Artificial Sequence
  Synthetic oligonucleotide
aattgttttcgtatgtaccgtgttgtttgc

SEQ ID NO: 188039 - DNA, 30 bp, Artificial Sequence
  Synthetic oligonucleotide
ataactcgagtggtggcttggcgcttttgc

SEQ ID NO: 188040 - DNA, 30 bp, Artificial Sequence
  Synthetic oligonucleotide
gcatcaagcgatacggaatttcagttttgc

SEQ ID NO: 188041 - DNA, 30 bp, Artificial Sequence
  Synthetic oligonucleotide
atacacctgtgtagagttggccttttttgc

SEQ ID NO: 188042 - DNA, 30 bp, Artificial Sequence
  Synthetic oligonucleotide
cttaccacatgtggcacagcctcaaaaatc

SEQ ID NO: 188043 - DNA, 30 bp, Artificial Sequence
  Synthetic oligonucleotide
tgtgaacggttagaaacgtggcgcaaaatc

SEQ ID NO: 188044 - DNA, 30 bp, Artificial Sequence
  Synthetic oligonucleotide
tactaactgggggggggtgcttaacaaatc

SEQ ID NO: 188045 - DNA, 30 bp, Artificial Sequence
  Synthetic oligonucleotide
gaaggcgcatctttcaccaaaacccaaatc

SEQ ID NO: 188046 - DNA, 30 bp, Artificial Sequence
  Synthetic oligonucleotide
gtcagcgtgctcgaccgaattggagaaatc

SEQ ID NO: 188047 - DNA, 30 bp, Artificial Sequence
  Synthetic oligonucleotide
aggcacccgcatactgaactcaaggaaatc

SEQ ID NO: 188048 - DNA, 30 bp, Artificial Sequence
  Synthetic oligonucleotide
acccgattagttatctgaagaagggaaatc

SEQ ID NO: 188049 - DNA, 30 bp, Artificial Sequence
  Synthetic oligonucleotide
gcaatagcaaatcgtgaagtgggggaaatc

SEQ ID NO: 188050 - DNA, 30 bp, Artificial Sequence
  Synthetic oligonucleotide
tcaggatttattgggcatgcggcgtaaatc

SEQ ID NO: 188051 - DNA, 30 bp, Artificial Sequence
  Synthetic oligonucleotide
cataaaagagagccattaaatcgttaaatc

SEQ ID NO: 188052 - DNA, 30 bp, Artificial Sequence
  Synthetic oligonucleotide
gcatcaagttgggaaacagaaaaaacaatc

SEQ ID NO: 188053 - DNA, 30 bp, Artificial Sequence
  Synthetic oligonucleotide
tatcggacggcaaagactaataacacaatc

SEQ ID NO: 188054 - DNA, 30 bp, Artificial Sequence
  Synthetic oligonucleotide
atttgacaaaatctcaattaccacacaatc

SEQ ID NO: 188055 - DNA, 30 bp, Artificial Sequence
  Synthetic oligonucleotide
ttaccggtagaccatgagcacatgacaatc

SEQ ID NO: 188056 - DNA, 30 bp, Artificial Sequence
  Synthetic oligonucleotide
gctaatgcgtgaatcggttggagaccaatc

SEQ ID NO: 188057 - DNA, 30 bp, Artificial Sequence
  Synthetic oligonucleotide
tagagtgccgcatttacgtgtctaccaatc

SEQ ID NO: 188058 - DNA, 30 bp, Artificial Sequence
  Synthetic oligonucleotide
ctacccataatggcctgtggctaagcaatc

SEQ ID NO: 188059 - DNA, 30 bp, Artificial Sequence
  Synthetic oligonucleotide
gggtcccaggaatgtttcgagtaagcaatc

SEQ ID NO: 188060 - DNA, 30 bp, Artificial Sequence
  Synthetic oligonucleotide
caggaaagcatcagggctgtcggagcaatc

SEQ ID NO: 188061 - DNA, 30 bp, Artificial Sequence
  Synthetic oligonucleotide
atcactgtggcagtgcggtgtaacgcaatc

SEQ ID NO: 188062 - DNA, 30 bp, Artificial Sequence
  Synthetic oligonucleotide
tctacgtcatactactgaacaaccgcaatc

SEQ ID NO: 188063 - DNA, 30 bp, Artificial Sequence
  Synthetic oligonucleotide
agatggtcaatcctgggaacaggtgcaatc

SEQ ID NO: 188064 - DNA, 30 bp, Artificial Sequence
  Synthetic oligonucleotide
gtagagaaagtaaattgactcgtctcaatc

SEQ ID NO: 188065 - DNA, 30 bp, Artificial Sequence
  Synthetic oligonucleotide
cacaatccgaaacaattctccgagtcaatc

SEQ ID NO: 188066 - DNA, 30 bp, Artificial Sequence
  Synthetic oligonucleotide
gataacgtttcggtagctgataggtcaatc

SEQ ID NO: 188067 - DNA, 30 bp, Artificial Sequence
  Synthetic oligonucleotide
agcaggtgcgaggttagatttgtgtcaatc

SEQ ID NO: 188068 - DNA, 30 bp, Artificial Sequence
  Synthetic oligonucleotide
cagtgtatgacttgtggatattgcagaatc

SEQ ID NO: 188069 - DNA, 30 bp, Artificial Sequence
  Synthetic oligonucleotide
gctgaatcgcctccttgctaattgagaatc

SEQ ID NO: 188070 - DNA, 30 bp, Artificial Sequence
  Synthetic oligonucleotide
cgtgcgactcaagacaatatgcatagaatc

SEQ ID NO: 188071 - DNA, 30 bp, Artificial Sequence
  Synthetic oligonucleotide
cgtgttgctgttcgtgcctaatatagaatc

SEQ ID NO: 188072 - DNA, 30 bp, Artificial Sequence
  Synthetic oligonucleotide
ccaaatgcgagttagtagttaactagaatc

SEQ ID NO: 188073 - DNA, 30 bp, Artificial Sequence
  Synthetic oligonucleotide
ataaggttgtacgggtaagctagtagaatc

SEQ ID NO: 188074 - DNA, 30 bp, Artificial Sequence
  Synthetic oligonucleotide
aagcggtctagtaagtatatcggtagaatc

SEQ ID NO: 188075 - DNA, 30 bp, Artificial Sequence
  Synthetic oligonucleotide
ttgttggcaccatagtatcggcttagaatc

SEQ ID NO: 188076 - DNA, 30 bp, Artificial Sequence
  Synthetic oligonucleotide
ctgtgaacggtccacccggtgatacgaatc

SEQ ID NO: 188077 - DNA, 30 bp, Artificial Sequence
  Synthetic oligonucleotide
gggagaacttccgttattagtctgcgaatc

SEQ ID NO: 188078 - DNA, 30 bp, Artificial Sequence
  Synthetic oligonucleotide
taattcaagcgcggtgtaatggtgcgaatc

SEQ ID NO: 188079 - DNA, 30 bp, Artificial Sequence
  Synthetic oligonucleotide
agcgcgaaaggacgatcatgttgtcgaatc

SEQ ID NO: 188080 - DNA, 30 bp, Artificial Sequence
  Synthetic oligonucleotide
ggagatttcgttgttgccggaccaggaatc

SEQ ID NO: 188081 - DNA, 30 bp, Artificial Sequence
  Synthetic oligonucleotide
tatggacatcgtatagtcaagtccggaatc

SEQ ID NO: 188082 - DNA, 30 bp, Artificial Sequence
  Synthetic oligonucleotide
acgcgttaaacagctggttttttgggaatc

SEQ ID NO: 188083 - DNA, 30 bp, Artificial Sequence
  Synthetic oligonucleotide
caggtgccgacgctccgtaccgctggaatc

SEQ ID NO: 188084 - DNA, 30 bp, Artificial Sequence
  Synthetic oligonucleotide
cagtgagccccttgtttctagacatgaatc

SEQ ID NO: 188085 - DNA, 30 bp, Artificial Sequence
  Synthetic oligonucleotide
tacctaaagggatgtatcgggggctgaatc

SEQ ID NO: 188086 - DNA, 30 bp, Artificial Sequence
  Synthetic oligonucleotide
gtggcaaatcaaaatgtaactagaataatc

SEQ ID NO: 188087 - DNA, 30 bp, Artificial Sequence
  Synthetic oligonucleotide
ggatgctgtgaataatgtacatgaataatc

SEQ ID NO: 188088 - DNA, 30 bp, Artificial Sequence
  Synthetic oligonucleotide
cgataataagaaagtatcgttttcataatc

SEQ ID NO: 188089 - DNA, 30 bp, Artificial Sequence
  Synthetic oligonucleotide
agcacggcatacaatctcgggcagataatc

SEQ ID NO: 188090 - DNA, 30 bp, Artificial Sequence
  Synthetic oligonucleotide
ccggtgggtaagggggaagcagagataatc

SEQ ID NO: 188091 - DNA, 30 bp, Artificial Sequence
  Synthetic oligonucleotide
agaatcggaacgggtgactatggtataatc

SEQ ID NO: 188092 - DNA, 30 bp, Artificial Sequence
  Synthetic oligonucleotide
tgtgcccacactagagtgattacactaatc

SEQ ID NO: 188093 - DNA, 30 bp, Artificial Sequence
  Synthetic oligonucleotide
ttgaatcgtgtgcagacaagtgtcctaatc

SEQ ID NO: 188094 - DNA, 30 bp, Artificial Sequence
  Synthetic oligonucleotide
cggccatcggccagaatgggctacgtaatc

SEQ ID NO: 188095 - DNA, 30 bp, Artificial Sequence
  Synthetic oligonucleotide
atgaccgagaaattaatgcgcctggtaatc

SEQ ID NO: 188096 - DNA, 30 bp, Artificial Sequence
  Synthetic oligonucleotide
acacggtacaagtgacgtcaatatgtaatc

SEQ ID NO: 188097 - DNA, 30 bp, Artificial Sequence
  Synthetic oligonucleotide
tggtttggcgttaccgacgagaagttaatc

SEQ ID NO: 188098 - DNA, 30 bp, Artificial Sequence
  Synthetic oligonucleotide
tcatcgtatgacgattctgaagctttaatc

SEQ ID NO: 188099 - DNA, 30 bp, Artificial Sequence
  Synthetic oligonucleotide
gtacgtgaatagcttagctaagacaacatc

SEQ ID NO: 188100 - DNA, 30 bp, Artificial Sequence
  Synthetic oligonucleotide
gtaagagcacagaagtacgaaagtaacatc

SEQ ID NO: 188101 - DNA, 30 bp, Artificial Sequence
  Synthetic oligonucleotide
cacatcagaaaacaatgccgttttaacatc

SEQ ID NO: 188102 - DNA, 30 bp, Artificial Sequence
  Synthetic oligonucleotide
tcggaacatggagttatttagaaacacatc

SEQ ID NO: 188103 - DNA, 30 bp, Artificial Sequence
  Synthetic oligonucleotide
taagctataattcgggggatctcacacatc

SEQ ID NO: 188104 - DNA, 30 bp, Artificial Sequence
  Synthetic oligonucleotide
aacttggtaagcgcttcacaactccacatc

SEQ ID NO: 188105 - DNA, 30 bp, Artificial Sequence
  Synthetic oligonucleotide
agtcgcagtgcgcagaatccccagcacatc

SEQ ID NO: 188106 - DNA, 30 bp, Artificial Sequence
  Synthetic oligonucleotide
tgatcgtaggggggccccaacagagacatc

SEQ ID NO: 188107 - DNA, 30 bp, Artificial Sequence
  Synthetic oligonucleotide
gtaaattggcttggtaaggatccggacatc

SEQ ID NO: 188108 - DNA, 30 bp, Artificial Sequence
  Synthetic oligonucleotide
tccggacaggtcctcaggaggggggacatc

SEQ ID NO: 188109 - DNA, 30 bp, Artificial Sequence
  Synthetic oligonucleotide
tatgagtgtggccccgagcttaaatacatc

SEQ ID NO: 188110 - DNA, 30 bp, Artificial Sequence
  Synthetic oligonucleotide
tcggccttgaaggagtgaaacttatacatc

SEQ ID NO: 188111 - DNA, 30 bp, Artificial Sequence
  Synthetic oligonucleotide
gcatacactaagcgctctaattagtacatc

SEQ ID NO: 188112 - DNA, 30 bp, Artificial Sequence
  Synthetic oligonucleotide
atgtttaggatatgggcctgggggtacatc

SEQ ID NO: 188113 - DNA, 30 bp, Artificial Sequence
  Synthetic oligonucleotide
tattggaggggcaaattaagatggtacatc

SEQ ID NO: 188114 - DNA, 30 bp, Artificial Sequence
  Synthetic oligonucleotide
aatgagaatgtgaggcgagaacaaaccatc

SEQ ID NO: 188115 - DNA, 30 bp, Artificial Sequence
  Synthetic oligonucleotide
taatccgcatgggaaggaagtgcaaccatc

SEQ ID NO: 188116 - DNA, 30 bp, Artificial Sequence
  Synthetic oligonucleotide
tacgactccgagacgtgtcttttaaccatc

SEQ ID NO: 188117 - DNA, 30 bp, Artificial Sequence
  Synthetic oligonucleotide
cggagtaaggtgagtccgattggcaccatc

SEQ ID NO: 188118 - DNA, 30 bp, Artificial Sequence
  Synthetic oligonucleotide
ctaatcgagccgatcacggtaaagaccatc

SEQ ID NO: 188119 - DNA, 29 bp, Artificial Sequence
  Synthetic oligonucleotide
gctggtcatacccgatctagcaagccatc

SEQ ID NO: 188120 - DNA, 30 bp, Artificial Sequence
  Synthetic oligonucleotide
actcatgcccaagccccaactcaagccatc

SEQ ID NO: 188121 - DNA, 30 bp, Artificial Sequence
  Synthetic oligonucleotide
atgagccccaccacaggggcgtaagccatc

SEQ ID NO: 188122 - DNA, 30 bp, Artificial Sequence
  Synthetic oligonucleotide
ggaggagtaccgtgttggaccacggccatc

SEQ ID NO: 188123 - DNA, 30 bp, Artificial Sequence
  Synthetic oligonucleotide
ggaggataaagggtacgtgggtgtgccatc

SEQ ID NO: 188124 - DNA, 30 bp, Artificial Sequence
  Synthetic oligonucleotide
cgttcggtgcagagcgaattaacgtccatc

SEQ ID NO: 188125 - DNA, 30 bp, Artificial Sequence
  Synthetic oligonucleotide
tcaaatgacgcgtggctcccgcggtccatc

SEQ ID NO: 188126 - DNA, 30 bp, Artificial Sequence
  Synthetic oligonucleotide
gttcggaaagggaagcatattgcaagcatc

SEQ ID NO: 188127 - DNA, 30 bp, Artificial Sequence
  Synthetic oligonucleotide
ggtcacttatggcagataatactaagcatc

SEQ ID NO: 188128 - DNA, 30 bp, Artificial Sequence
  Synthetic oligonucleotide
agatcgatccaagggctcgtagcgagcatc

SEQ ID NO: 188129 - DNA, 30 bp, Artificial Sequence
  Synthetic oligonucleotide
acagtacagcagctaaaaaaccgacgcatc

SEQ ID NO: 188130 - DNA, 30 bp, Artificial Sequence
  Synthetic oligonucleotide
gggaatcacacggcaaataacccccgcatc

SEQ ID NO: 188131 - DNA, 30 bp, Artificial Sequence
  Synthetic oligonucleotide
gaagcttaaatgggtatacacaagcgcatc

SEQ ID NO: 188132 - DNA, 30 bp, Artificial Sequence
  Synthetic oligonucleotide
acaatacccctataaaacgggcttcgcatc

SEQ ID NO: 188133 - DNA, 30 bp, Artificial Sequence
  Synthetic oligonucleotide
agtgaaacatctggcctgatgtacggcatc

SEQ ID NO: 188134 - DNA, 30 bp, Artificial Sequence
  Synthetic oligonucleotide
gactgccccttaaaccactgcagcggcatc

SEQ ID NO: 188135 - DNA, 30 bp, Artificial Sequence
  Synthetic oligonucleotide
ccaagcgaaggtaccgcgtacctcggcatc

SEQ ID NO: 188136 - DNA, 30 bp, Artificial Sequence
  Synthetic oligonucleotide
ccgaatgagtaattatcataacagggcatc

SEQ ID NO: 188137 - DNA, 30 bp, Artificial Sequence
  Synthetic oligonucleotide
cgtcacaaatggtgctgtaatatgggcatc

SEQ ID NO: 188138 - DNA, 30 bp, Artificial Sequence
  Synthetic oligonucleotide
tgcatatgcattctatccgtgtctggcatc

SEQ ID NO: 188139 - DNA, 30 bp, Artificial Sequence
  Synthetic oligonucleotide
cgacactaggcgctggagtcaggatgcatc

SEQ ID NO: 188140 - DNA, 30 bp, Artificial Sequence
  Synthetic oligonucleotide
gggatatatgaggttaaaaggttatgcatc

SEQ ID NO: 188141 - DNA, 30 bp, Artificial Sequence
  Synthetic oligonucleotide
caacaatgagcgaagttaggcgcctgcatc

SEQ ID NO: 188142 - DNA, 30 bp, Artificial Sequence
  Synthetic oligonucleotide
ttccgctcacacgggcctaaaagctgcatc

SEQ ID NO: 188143 - DNA, 30 bp, Artificial Sequence
  Synthetic oligonucleotide
taatagcgttgatacacctgtcgctgcatc

SEQ ID NO: 188144 - DNA, 30 bp, Artificial Sequence
  Synthetic oligonucleotide
tgagcggaggggtcgtaggagatttgcatc

SEQ ID NO: 188145 - DNA, 30 bp, Artificial Sequence
  Synthetic oligonucleotide
ctctatagaaagataccgggttcaatcatc

SEQ ID NO: 188146 - DNA, 30 bp, Artificial Sequence
  Synthetic oligonucleotide
cggttcacgccaggaaaactcttcatcatc

SEQ ID NO: 188147 - DNA, 30 bp, Artificial Sequence
  Synthetic oligonucleotide
catcctaggttcaccgttcagcaactcatc

SEQ ID NO: 188148 - DNA, 30 bp, Artificial Sequence
  Synthetic oligonucleotide
taagcagttattaagtgatgcgcactcatc

SEQ ID NO: 188149 - DNA, 30 bp, Artificial Sequence
  Synthetic oligonucleotide
gcgcatcgctacgcgccggtagctctcatc

SEQ ID NO: 188150 - DNA, 30 bp, Artificial Sequence
  Synthetic oligonucleotide
tcgtcggggtcctttaaataccgtctcatc

SEQ ID NO: 188151 - DNA, 30 bp, Artificial Sequence
  Synthetic oligonucleotide
acgtcaggcggtcctctgacgcgtctcatc

SEQ ID NO: 188152 - DNA, 30 bp, Artificial Sequence
  Synthetic oligonucleotide
aagaactaaatagatcattacggggtcatc

SEQ ID NO: 188153 - DNA, 30 bp, Artificial Sequence
  Synthetic oligonucleotide
cgctgtaggggggaggaatagtcgttcatc

SEQ ID NO: 188154 - DNA, 30 bp, Artificial Sequence
  Synthetic oligonucleotide
ggcctacaacaggggcgcggtgaaaagatc

SEQ ID NO: 188155 - DNA, 30 bp, Artificial Sequence
  Synthetic oligonucleotide
agagacgatcaaactgtacggcagaagatc

SEQ ID NO: 188156 - DNA, 30 bp, Artificial Sequence
  Synthetic oligonucleotide
gcataggttaaatacgcaatgtcgaagatc

SEQ ID NO: 188157 - DNA, 30 bp, Artificial Sequence
  Synthetic oligonucleotide
acatgccaggggcgggcgggagcacagatc

SEQ ID NO: 188158 - DNA, 30 bp, Artificial Sequence
  Synthetic oligonucleotide
taatagtgcaaatttacgtaatcccagatc

SEQ ID NO: 188159 - DNA, 30 bp, Artificial Sequence
  Synthetic oligonucleotide
ccctcagcctggagatgaatcgtggagatc

SEQ ID NO: 188160 - DNA, 30 bp, Artificial Sequence
  Synthetic oligonucleotide
cgtacaaggtgccacattgggactgagatc

SEQ ID NO: 188161 - DNA, 30 bp, Artificial Sequence
  Synthetic oligonucleotide
actctccaacagtctggggctcactagatc

SEQ ID NO: 188162 - DNA, 30 bp, Artificial Sequence
  Synthetic oligonucleotide
tcaagcagagaatgggtagtgcagtagatc

SEQ ID NO: 188163 - DNA, 30 bp, Artificial Sequence
  Synthetic oligonucleotide
gacacatgcgggcatgctcatgggtagatc

SEQ ID NO: 188164 - DNA, 30 bp, Artificial Sequence
  Synthetic oligonucleotide
caatgtacttaactgcccagaagaacgatc

SEQ ID NO: 188165 - DNA, 30 bp, Artificial Sequence
  Synthetic oligonucleotide
tgaactcaccgcatatgtttaaccacgatc

SEQ ID NO: 188166 - DNA, 30 bp, Artificial Sequence
  Synthetic oligonucleotide
ggctcgcattgccgtggccgaggcacgatc

SEQ ID NO: 188167 - DNA, 30 bp, Artificial Sequence
  Synthetic oligonucleotide
aggactgttggttctatcttacggacgatc

SEQ ID NO: 188168 - DNA, 30 bp, Artificial Sequence
  Synthetic oligonucleotide
aatagtcacgaccggattggcactacgatc

SEQ ID NO: 188169 - DNA, 30 bp, Artificial Sequence
  Synthetic oligonucleotide
atcgactggagagcaatagcaattacgatc

SEQ ID NO: 188170 - DNA, 30 bp, Artificial Sequence
  Synthetic oligonucleotide
agccgcaaagtcatcaagacctttacgatc

SEQ ID NO: 188171 - DNA, 30 bp, Artificial Sequence
  Synthetic oligonucleotide
tagtaatcgcaggagaagatgttaccgatc

SEQ ID NO: 188172 - DNA, 30 bp, Artificial Sequence
  Synthetic oligonucleotide
aacttactacactcatcatctagagcgatc

SEQ ID NO: 188173 - DNA, 30 bp, Artificial Sequence
  Synthetic oligonucleotide
gacggcacaaacctagcacaaggagcgatc

SEQ ID NO: 188174 - DNA, 30 bp, Artificial Sequence
  Synthetic oligonucleotide
aaagcaaaggtgcattagaagatagcgatc

SEQ ID NO: 188175 - DNA, 30 bp, Artificial Sequence
  Synthetic oligonucleotide
tctgcggtaagacaagcgcgtgacgcgatc

SEQ ID NO: 188176 - DNA, 30 bp, Artificial Sequence
  Synthetic oligonucleotide
ctcgtatttcggttagtgcctgtcgcgatc

SEQ ID NO: 188177 - DNA, 30 bp, Artificial Sequence
  Synthetic oligonucleotide
acgcccaagtatcaaggatctcttgcgatc

SEQ ID NO: 188178 - DNA, 30 bp, Artificial Sequence
  Synthetic oligonucleotide
gaaagctgcgcaaaggtctaatcctcgatc

SEQ ID NO: 188179 - DNA, 30 bp, Artificial Sequence
  Synthetic oligonucleotide
gacgcggagagtatggaaacacgaaggatc

SEQ ID NO: 188180 - DNA, 30 bp, Artificial Sequence
  Synthetic oligonucleotide
atgggatattaggtcgttctaaagaggatc

SEQ ID NO: 188181 - DNA, 30 bp, Artificial Sequence
  Synthetic oligonucleotide
ttgatcgactgaaagcaatatcggaggatc

SEQ ID NO: 188182 - DNA, 30 bp, Artificial Sequence
  Synthetic oligonucleotide
agggtcagtgcgcaaaaatataataggatc

SEQ ID NO: 188183 - DNA, 30 bp, Artificial Sequence
  Synthetic oligonucleotide
agcggtgcggcaatgtaacgaggtaggatc

SEQ ID NO: 188184 - DNA, 30 bp, Artificial Sequence
  Synthetic oligonucleotide
gcgtgttagttctggtcgactgaacggatc

SEQ ID NO: 188185 - DNA, 30 bp, Artificial Sequence
  Synthetic oligonucleotide
ggcatcttgagagatgacattcgacggatc

SEQ ID NO: 188186 - DNA, 30 bp, Artificial Sequence
  Synthetic oligonucleotide
acgcgggtataatcggtatccgcgcggatc

SEQ ID NO: 188187 - DNA, 30 bp, Artificial Sequence
  Synthetic oligonucleotide
taaggctgaaaatttagggttgatcggatc

SEQ ID NO: 188188 - DNA, 30 bp, Artificial Sequence
  Synthetic oligonucleotide
gatcaacgatgtaaggcgtggtgagggatc

SEQ ID NO: 188189 - DNA, 30 bp, Artificial Sequence
  Synthetic oligonucleotide
agtacaaatatgtgactgcaagacgggatc

SEQ ID NO: 188190 - DNA, 30 bp, Artificial Sequence
  Synthetic oligonucleotide
cgacgacataaaagtcggaccggatggatc

SEQ ID NO: 188191 - DNA, 30 bp, Artificial Sequence
  Synthetic oligonucleotide
gtcaatcagctcatcaaaatgatgtggatc

SEQ ID NO: 188192 - DNA, 30 bp, Artificial Sequence
  Synthetic oligonucleotide
agacggggcattgagcatgaaaacatgatc

SEQ ID NO: 188193 - DNA, 30 bp, Artificial Sequence
  Synthetic oligonucleotide
gatccttgcgtaagcaaagatcgcatgatc

SEQ ID NO: 188194 - DNA, 30 bp, Artificial Sequence
  Synthetic oligonucleotide
cagcactggctcagttaggaagagatgatc

SEQ ID NO: 188195 - DNA, 30 bp, Artificial Sequence
  Synthetic oligonucleotide
gatcggcaagttagtttagaatggatgatc

SEQ ID NO: 188196 - DNA, 30 bp, Artificial Sequence
  Synthetic oligonucleotide
tcgatgggttatgatgtacggctactgatc

SEQ ID NO: 188197 - DNA, 30 bp, Artificial Sequence
  Synthetic oligonucleotide
gaataaggacataacgtgatgctgctgatc

SEQ ID NO: 188198 - DNA, 31 bp, Artificial Sequence
  Synthetic oligonucleotide
taccacatgttatcctatatagcgcgtgatc

SEQ ID NO: 188199 - DNA, 30 bp, Artificial Sequence
  Synthetic oligonucleotide
gctaatcaggtaagtgacagaagggtgatc

SEQ ID NO: 188200 - DNA, 30 bp, Artificial Sequence
  Synthetic oligonucleotide
atcgctcaaaaaggtagacaacatgtgatc

SEQ ID NO: 188201 - DNA, 30 bp, Artificial Sequence
  Synthetic oligonucleotide
taacccctatacgactcacactctgtgatc

SEQ ID NO: 188202 - DNA, 30 bp, Artificial Sequence
  Synthetic oligonucleotide
agcccaccgggaccctactttagtgtgatc

SEQ ID NO: 188203 - DNA, 30 bp, Artificial Sequence
  Synthetic oligonucleotide
tgagtaagggggtttgttgtaaatttgatc

SEQ ID NO: 188204 - DNA, 30 bp, Artificial Sequence
  Synthetic oligonucleotide
tgggtagtgtgcatgcccgtacctttgatc

SEQ ID NO: 188205 - DNA, 30 bp, Artificial Sequence
  Synthetic oligonucleotide
tgaacgcgagatgggtatacaaaaaatatc

SEQ ID NO: 188206 - DNA, 30 bp, Artificial Sequence
  Synthetic oligonucleotide
tcagagataaagaagatcttagaacatatc

SEQ ID NO: 188207 - DNA, 30 bp, Artificial Sequence
  Synthetic oligonucleotide
gtcagcgtacactcgatcacgttacatatc

SEQ ID NO: 188208 - DNA, 30 bp, Artificial Sequence
  Synthetic oligonucleotide
ctagatttaggaaactcatgtcaccatatc

SEQ ID NO: 188209 - DNA, 30 bp, Artificial Sequence
  Synthetic oligonucleotide
cgatatgagcgtcgagcctctgtagatatc

SEQ ID NO: 188210 - DNA, 30 bp, Artificial Sequence
  Synthetic oligonucleotide
gtaccatcgtcaattatggaggccgatatc

SEQ ID NO: 188211 - DNA, 30 bp, Artificial Sequence
  Synthetic oligonucleotide
atgagagacgcgtcgcacgacggtgatatc

SEQ ID NO: 188212 - DNA, 30 bp, Artificial Sequence
  Synthetic oligonucleotide
ttgtgttggtagagccagtattcgtatatc

SEQ ID NO: 188213 - DNA, 30 bp, Artificial Sequence
  Synthetic oligonucleotide
attacgtcttgcctactcatctattatatc

SEQ ID NO: 188214 - DNA, 30 bp, Artificial Sequence
  Synthetic oligonucleotide
caccaaagcgcatagataaattacactatc

SEQ ID NO: 188215 - DNA, 30 bp, Artificial Sequence
  Synthetic oligonucleotide
tcacttataggacaccgctaaattactatc

SEQ ID NO: 188216 - DNA, 30 bp, Artificial Sequence
  Synthetic oligonucleotide
taccctcacaaacggtgaagataacctatc

SEQ ID NO: 188217 - DNA, 30 bp, Artificial Sequence
  Synthetic oligonucleotide
acgttgtagccacattgtctctagcctatc

SEQ ID NO: 188218 - DNA, 30 bp, Artificial Sequence
  Synthetic oligonucleotide
accggatgtataaagaactcgtatcctatc

SEQ ID NO: 188219 - DNA, 30 bp, Artificial Sequence
  Synthetic oligonucleotide
tagactcggacttgtcaagggtcagctatc

SEQ ID NO: 188220 - DNA, 30 bp, Artificial Sequence
  Synthetic oligonucleotide
caaggttgcatttgtacaaatcgagctatc

SEQ ID NO: 188221 - DNA, 30 bp, Artificial Sequence
  Synthetic oligonucleotide
ctgcctcccactcgaggagttgccgctatc

SEQ ID NO: 188222 - DNA, 30 bp, Artificial Sequence
  Synthetic oligonucleotide
tatgtgggtccgcgccgcgggctcgctatc

SEQ ID NO: 188223 - DNA, 30 bp, Artificial Sequence
  Synthetic oligonucleotide
ctcgagtgcaaagggtcacaacctgctatc

SEQ ID NO: 188224 - DNA, 30 bp, Artificial Sequence
  Synthetic oligonucleotide
gaaggcctcacccgttggcgaggatctatc

SEQ ID NO: 188225 - DNA, 30 bp, Artificial Sequence
  Synthetic oligonucleotide
caagctggattcgagtatggataaagtatc

SEQ ID NO: 188226 - DNA, 30 bp, Artificial Sequence
  Synthetic oligonucleotide
gggtacagcgggaggccaaactagagtatc

SEQ ID NO: 188227 - DNA, 30 bp, Artificial Sequence
  Synthetic oligonucleotide
cgcgtactttgtgcccacgacccgagtatc

SEQ ID NO: 188228 - DNA, 30 bp, Artificial Sequence
  Synthetic oligonucleotide
agcaaaatcccacaaagatatctacgtatc

SEQ ID NO: 188229 - DNA, 30 bp, Artificial Sequence
  Synthetic oligonucleotide
gcgtctcgaggggcaaatactttgcgtatc

SEQ ID NO: 188230 - DNA, 30 bp, Artificial Sequence
  Synthetic oligonucleotide
tagggtacgagagacggcttcctaggtatc

SEQ ID NO: 188231 - DNA, 30 bp, Artificial Sequence
  Synthetic oligonucleotide
ttcccaggccaactattcaccgcgggtatc

SEQ ID NO: 188232 - DNA, 30 bp, Artificial Sequence
  Synthetic oligonucleotide
gattaccaagaatgggcgggcaggggtatc

SEQ ID NO: 188233 - DNA, 30 bp, Artificial Sequence
  Synthetic oligonucleotide
ggccaatctctgagcatttgagctggtatc

SEQ ID NO: 188234 - DNA, 30 bp, Artificial Sequence
  Synthetic oligonucleotide
taggtgattcgccggagtaatgtttgtatc

SEQ ID NO: 188235 - DNA, 30 bp, Artificial Sequence
  Synthetic oligonucleotide
caaccacactaactgcatgaggcaattatc

SEQ ID NO: 188236 - DNA, 30 bp, Artificial Sequence
  Synthetic oligonucleotide
cggccgaccacattcgcactttcgattatc

SEQ ID NO: 188237 - DNA, 30 bp, Artificial Sequence
  Synthetic oligonucleotide
tacagagggtagccagaccagtggattatc

SEQ ID NO: 188238 - DNA, 30 bp, Artificial Sequence
  Synthetic oligonucleotide
gaccaattccggatcattagtgcacttatc

SEQ ID NO: 188239 - DNA, 30 bp, Artificial Sequence
  Synthetic oligonucleotide
cagaattgcgttcagtataatcaccttatc

SEQ ID NO: 188240 - DNA, 30 bp, Artificial Sequence
  Synthetic oligonucleotide
tcgcctagtgcgagccatcgcagtcttatc

SEQ ID NO: 188241 - DNA, 30 bp, Artificial Sequence
  Synthetic oligonucleotide
ggcggatgacagtacgaattgcgcgttatc

SEQ ID NO: 188242 - DNA, 30 bp, Artificial Sequence
  Synthetic oligonucleotide
tatcacagggactgaatacagtaggttatc

SEQ ID NO: 188243 - DNA, 30 bp, Artificial Sequence
  Synthetic oligonucleotide
atgctgatgaccgcggtgtcgtcggttatc

SEQ ID NO: 188244 - DNA, 30 bp, Artificial Sequence
  Synthetic oligonucleotide
gcagagggatcgagtcgactacgggttatc

SEQ ID NO: 188245 - DNA, 30 bp, Artificial Sequence
  Synthetic oligonucleotide
caagctacacacaggggcgatagtgttatc

SEQ ID NO: 188246 - DNA, 30 bp, Artificial Sequence
  Synthetic oligonucleotide
caaaggcacgtgacaaacagttttgttatc

SEQ ID NO: 188247 - DNA, 30 bp, Artificial Sequence
  Synthetic oligonucleotide
ggttcgggctgggtgtcgattaggtttatc

SEQ ID NO: 188248 - DNA, 30 bp, Artificial Sequence
  Synthetic oligonucleotide
cgaggtaagctgagaactgtcttttttatc

SEQ ID NO: 188249 - DNA, 30 bp, Artificial Sequence
  Synthetic oligonucleotide
gcggggcaccagtgcgtggaaagaaaactc

SEQ ID NO: 188250 - DNA, 30 bp, Artificial Sequence
  Synthetic oligonucleotide
gggaaatgaggagtttgcctaccgaaactc

SEQ ID NO: 188251 - DNA, 30 bp, Artificial Sequence
  Synthetic oligonucleotide
cccgttgtagcgaaacgtctaccgcaactc

SEQ ID NO: 188252 - DNA, 30 bp, Artificial Sequence
  Synthetic oligonucleotide
aaccaatctacggcaaaacaccatcaactc

SEQ ID NO: 188253 - DNA, 30 bp, Artificial Sequence
  Synthetic oligonucleotide
gacgttggggtcctccaattcgctcaactc

SEQ ID NO: 188254 - DNA, 30 bp, Artificial Sequence
  Synthetic oligonucleotide
tgacggctcgagtaaggaccctttcaactc

SEQ ID NO: 188255 - DNA, 30 bp, Artificial Sequence
  Synthetic oligonucleotide
tgttccctggagaacctcggctgcgaactc

SEQ ID NO: 188256 - DNA, 30 bp, Artificial Sequence
  Synthetic oligonucleotide
tatttcatgcggaaatatggggaggaactc

SEQ ID NO: 188257 - DNA, 30 bp, Artificial Sequence
  Synthetic oligonucleotide
ataacagtattcctggcatctggctaactc

SEQ ID NO: 188258 - DNA, 30 bp, Artificial Sequence
  Synthetic oligonucleotide
tagacacactgaagtagatgactgtaactc

SEQ ID NO: 188259 - DNA, 30 bp, Artificial Sequence
  Synthetic oligonucleotide
cctaccagatcgtcatggtcggaaacactc

SEQ ID NO: 188260 - DNA, 30 bp, Artificial Sequence
  Synthetic oligonucleotide
gctggcgtgcccagtctactctgtacactc

SEQ ID NO: 188261 - DNA, 30 bp, Artificial Sequence
  Synthetic oligonucleotide
atccgggacggtggggctgtagtcgcactc

SEQ ID NO: 188262 - DNA, 31 bp, Artificial Sequence
  Synthetic oligonucleotide
agaggcccaacgtgcgcacacaatggcactc

SEQ ID NO: 188263 - DNA, 30 bp, Artificial Sequence
  Synthetic oligonucleotide
actgccaaacaatagagacggtctgcactc

SEQ ID NO: 188264 - DNA, 30 bp, Artificial Sequence
  Synthetic oligonucleotide
cggagatcagataatcctactcgttcactc

SEQ ID NO: 188265 - DNA, 30 bp, Artificial Sequence
  Synthetic oligonucleotide
tatgtcacatagtaagatgattcaagactc

SEQ ID NO: 188266 - DNA, 30 bp, Artificial Sequence
  Synthetic oligonucleotide
ccctactaaggcggcccatgcaacagactc

SEQ ID NO: 188267 - DNA, 30 bp, Artificial Sequence
  Synthetic oligonucleotide
ggtcattatggctaaattcgtgccagactc

SEQ ID NO: 188268 - DNA, 30 bp, Artificial Sequence
  Synthetic oligonucleotide
gagctcgttagcggcagaacgtatagactc

SEQ ID NO: 188269 - DNA, 30 bp, Artificial Sequence
  Synthetic oligonucleotide
gaggtaggaaggaagtgccgcagtagactc

SEQ ID NO: 188270 - DNA, 30 bp, Artificial Sequence
  Synthetic oligonucleotide
aaaccgcaatccatggacatttaacgactc

SEQ ID NO: 188271 - DNA, 30 bp, Artificial Sequence
  Synthetic oligonucleotide
agtggaccgttcggtgaatctttccgactc

SEQ ID NO: 188272 - DNA, 30 bp, Artificial Sequence
  Synthetic oligonucleotide
tagtcaagggagaggctctgagatcgactc

SEQ ID NO: 188273 - DNA, 30 bp, Artificial Sequence
  Synthetic oligonucleotide
acttgccaagaaggtcgtctagaaggactc

SEQ ID NO: 188274 - DNA, 30 bp, Artificial Sequence
  Synthetic oligonucleotide
agaggtggaacgcttccaaggtccggactc

SEQ ID NO: 188275 - DNA, 30 bp, Artificial Sequence
  Synthetic oligonucleotide
tcggttcctgttagcgacagaatctgactc

SEQ ID NO: 188276 - DNA, 30 bp, Artificial Sequence
  Synthetic oligonucleotide
tccgcgattcggctaatgaggtagtgactc

SEQ ID NO: 188277 - DNA, 30 bp, Artificial Sequence
  Synthetic oligonucleotide
aagcgtcaggccaagacaatgtcgtgactc

SEQ ID NO: 188278 - DNA, 30 bp, Artificial Sequence
  Synthetic oligonucleotide
cggtagtcctactcgccggatggttgactc

SEQ ID NO: 188279 - DNA, 30 bp, Artificial Sequence
  Synthetic oligonucleotide
gcgtagcatgtggtgggcaaccggatactc

SEQ ID NO: 188280 - DNA, 30 bp, Artificial Sequence
  Synthetic oligonucleotide
ccgttcagaccctctacgagtgagctactc

SEQ ID NO: 188281 - DNA, 30 bp, Artificial Sequence
  Synthetic oligonucleotide
tctgatactgtaaagggccccacgctactc

SEQ ID NO: 188282 - DNA, 30 bp, Artificial Sequence
  Synthetic oligonucleotide
atgaacggcaattaaactaacccagtactc

SEQ ID NO: 188283 - DNA, 30 bp, Artificial Sequence
  Synthetic oligonucleotide
tgctttggataggaattgaagtaggtactc

SEQ ID NO: 188284 - DNA, 30 bp, Artificial Sequence
  Synthetic oligonucleotide
cgatacattgaacagttacattgggtactc

SEQ ID NO: 188285 - DNA, 30 bp, Artificial Sequence
  Synthetic oligonucleotide
ccctgaacatagatcccaaatgaattactc

SEQ ID NO: 188286 - DNA, 30 bp, Artificial Sequence
  Synthetic oligonucleotide
actcaggaaccggggggaagtcagttactc

SEQ ID NO: 188287 - DNA, 30 bp, Artificial Sequence
  Synthetic oligonucleotide
aaggggaatgccaaggtaagtctgttactc

SEQ ID NO: 188288 - DNA, 30 bp, Artificial Sequence
  Synthetic oligonucleotide
ctgctggacggaattcgagcgcgaaacctc

SEQ ID NO: 188289 - DNA, 30 bp, Artificial Sequence
  Synthetic oligonucleotide
tgcaaatagtaaacattacgctggaacctc

SEQ ID NO: 188290 - DNA, 30 bp, Artificial Sequence
  Synthetic oligonucleotide
atcacagaatagcttcgatgtcagcacctc

SEQ ID NO: 188291 - DNA, 30 bp, Artificial Sequence
  Synthetic oligonucleotide
agggtgtgggcggtgacgcacttagacctc

SEQ ID NO: 188292 - DNA, 30 bp, Artificial Sequence
  Synthetic oligonucleotide
taaccaggtgcccaacccgacgaggacctc

SEQ ID NO: 188293 - DNA, 30 bp, Artificial Sequence
  Synthetic oligonucleotide
cgtagtctagaagttattatttctgacctc

SEQ ID NO: 188294 - DNA, 30 bp, Artificial Sequence
  Synthetic oligonucleotide
gcgcatggtctcaggttaaaacgtgacctc

SEQ ID NO: 188295 - DNA, 30 bp, Artificial Sequence
  Synthetic oligonucleotide
ggatagcaaactacgtacgagacatacctc

SEQ ID NO: 188296 - DNA, 30 bp, Artificial Sequence
  Synthetic oligonucleotide
tgtatttaagggtcatgggtccagtacctc

SEQ ID NO: 188297 - DNA, 30 bp, Artificial Sequence
  Synthetic oligonucleotide
ctagtgtgtggtggggtaccgcagtacctc

SEQ ID NO: 188298 - DNA, 30 bp, Artificial Sequence
  Synthetic oligonucleotide
tcgacgtaattgagatttcgatagtacctc

SEQ ID NO: 188299 - DNA, 30 bp, Artificial Sequence
  Synthetic oligonucleotide
gcaaggtgctgttaaagagtactgaccctc

SEQ ID NO: 188300 - DNA, 30 bp, Artificial Sequence
  Synthetic oligonucleotide
atggagtggaagctgttaactgctaccctc

SEQ ID NO: 188301 - DNA, 30 bp, Artificial Sequence
  Synthetic oligonucleotide
cgcctgttattgtatattactaaagccctc

SEQ ID NO: 188302 - DNA, 30 bp, Artificial Sequence
  Synthetic oligonucleotide
ctgaaagccccggactaggtaaccgccctc

SEQ ID NO: 188303 - DNA, 30 bp, Artificial Sequence
  Synthetic oligonucleotide
ttcccataggcggaataaaccttgtccctc

SEQ ID NO: 188304 - DNA, 30 bp, Artificial Sequence
  Synthetic oligonucleotide
gcagtagccatcgatcgatctacacgcctc

SEQ ID NO: 188305 - DNA, 30 bp, Artificial Sequence
  Synthetic oligonucleotide
gtttggtacgagtgggcagtagtgcgcctc

SEQ ID NO: 188306 - DNA, 30 bp, Artificial Sequence
  Synthetic oligonucleotide
gggattaagtaagcccaaaataacggcctc

SEQ ID NO: 188307 - DNA, 30 bp, Artificial Sequence
  Synthetic oligonucleotide
gttaaccagtgggacgagaaagctggcctc

SEQ ID NO: 188308 - DNA, 30 bp, Artificial Sequence
  Synthetic oligonucleotide
ttccaaaccccacaatagctgctaatcctc

SEQ ID NO: 188309 - DNA, 30 bp, Artificial Sequence
  Synthetic oligonucleotide
ccatcaataagaaacggcgcgttactcctc

SEQ ID NO: 188310 - DNA, 30 bp, Artificial Sequence
  Synthetic oligonucleotide
tctcgattatcacgtccgttcatgctcctc

SEQ ID NO: 188311 - DNA, 30 bp, Artificial Sequence
  Synthetic oligonucleotide
tatacgtgacaagacaagacatatctcctc

SEQ ID NO: 188312 - DNA, 30 bp, Artificial Sequence
  Synthetic oligonucleotide
gtacgggttttgtgagtgattgcagtcctc

SEQ ID NO: 188313 - DNA, 30 bp, Artificial Sequence
  Synthetic oligonucleotide
cggggcagctaagctgtgccatgggtcctc

SEQ ID NO: 188314 - DNA, 30 bp, Artificial Sequence
  Synthetic oligonucleotide
atctgaagaatgtgcacgtgatggttcctc

SEQ ID NO: 188315 - DNA, 30 bp, Artificial Sequence
  Synthetic oligonucleotide
gcaaacgtccacctagagaccgtgttcctc

SEQ ID NO: 188316 - DNA, 30 bp, Artificial Sequence
  Synthetic oligonucleotide
agagtttggccctccgatgatttgttcctc

SEQ ID NO: 188317 - DNA, 30 bp, Artificial Sequence
  Synthetic oligonucleotide
aacttgcggtaggcgtacctgtagaagctc

SEQ ID NO: 188318 - DNA, 30 bp, Artificial Sequence
  Synthetic oligonucleotide
ggcagtatggtatctgtccagattaagctc

SEQ ID NO: 188319 - DNA, 30 bp, Artificial Sequence
  Synthetic oligonucleotide
actgaacatagtatagattaacgccagctc

SEQ ID NO: 188320 - DNA, 30 bp, Artificial Sequence
  Synthetic oligonucleotide
cggtttgattcatgtttaatatgccagctc

SEQ ID NO: 188321 - DNA, 30 bp, Artificial Sequence
  Synthetic oligonucleotide
atgagatactccacgtcagtcggagagctc

SEQ ID NO: 188322 - DNA, 30 bp, Artificial Sequence
  Synthetic oligonucleotide
gtccatgaggctggacaggatatcgagctc

SEQ ID NO: 188323 - DNA, 30 bp, Artificial Sequence
  Synthetic oligonucleotide
gcgtaaatcggcatgagacatgtggagctc

SEQ ID NO: 188324 - DNA, 30 bp, Artificial Sequence
  Synthetic oligonucleotide
gacagaggtctttaaaaccacgaatagctc

SEQ ID NO: 188325 - DNA, 30 bp, Artificial Sequence
  Synthetic oligonucleotide
gtgccgatcattaacaaaccgctatagctc

SEQ ID NO: 188326 - DNA, 30 bp, Artificial Sequence
  Synthetic oligonucleotide
tccatttagagtcagtattgagtaacgctc

SEQ ID NO: 188327 - DNA, 30 bp, Artificial Sequence
  Synthetic oligonucleotide
gagtcgaaaggatgactaaagaggccgctc

SEQ ID NO: 188328 - DNA, 30 bp, Artificial Sequence
  Synthetic oligonucleotide
tattacatttacaaatcagcagtgccgctc

SEQ ID NO: 188329 - DNA, 30 bp, Artificial Sequence
  Synthetic oligonucleotide
caatagtgtaaggtaagtagacgagcgctc

SEQ ID NO: 188330 - DNA, 30 bp, Artificial Sequence
  Synthetic oligonucleotide
tgtcctccagagtaacacgcattagcgctc

SEQ ID NO: 188331 - DNA, 30 bp, Artificial Sequence
  Synthetic oligonucleotide
acaaagcctcaatatcaacgtacatcgctc

SEQ ID NO: 188332 - DNA, 30 bp, Artificial Sequence
  Synthetic oligonucleotide
caaatataactagcggcaacgaactcgctc

SEQ ID NO: 188333 - DNA, 30 bp, Artificial Sequence
  Synthetic oligonucleotide
tgggttagagtgtgcacgagactctcgctc

SEQ ID NO: 188334 - DNA, 30 bp, Artificial Sequence
  Synthetic oligonucleotide
taagattaactttggccgggtgtgtcgctc

SEQ ID NO: 188335 - DNA, 30 bp, Artificial Sequence
  Synthetic oligonucleotide
gtcaaacacttctagcaaccggcaaggctc

SEQ ID NO: 188336 - DNA, 30 bp, Artificial Sequence
  Synthetic oligonucleotide
acagaagttggttccatatccatcaggctc

SEQ ID NO: 188337 - DNA, 30 bp, Artificial Sequence
  Synthetic oligonucleotide
cagaccggaatgtttataaataagaggctc

SEQ ID NO: 188338 - DNA, 30 bp, Artificial Sequence
  Synthetic oligonucleotide
gcatttctgggtgagacgaacgttaggctc

SEQ ID NO: 188339 - DNA, 30 bp, Artificial Sequence
  Synthetic oligonucleotide
cggcttagagagtaatcgatgagccggctc

SEQ ID NO: 188340 - DNA, 30 bp, Artificial Sequence
  Synthetic oligonucleotide
agacacatgccgttaacccactacgggctc

SEQ ID NO: 188341 - DNA, 30 bp, Artificial Sequence
  Synthetic oligonucleotide
gctgagatactcgatatactgcaggggctc

SEQ ID NO: 188342 - DNA, 30 bp, Artificial Sequence
  Synthetic oligonucleotide
gcacgcacgcaatgcgaatgcggggggctc

SEQ ID NO: 188343 - DNA, 30 bp, Artificial Sequence
  Synthetic oligonucleotide
tgttgcgaatttcaagtgactcatgggctc

SEQ ID NO: 188344 - DNA, 30 bp, Artificial Sequence
  Synthetic oligonucleotide
tggactgaggtgacaatcgtgaggtggctc

SEQ ID NO: 188345 - DNA, 30 bp, Artificial Sequence
  Synthetic oligonucleotide
ttgtgtgtatcacattacgaggacatgctc

SEQ ID NO: 188346 - DNA, 30 bp, Artificial Sequence
  Synthetic oligonucleotide
tcgtgtccggcggcgccaactagcatgctc

SEQ ID NO: 188347 - DNA, 30 bp, Artificial Sequence
  Synthetic oligonucleotide
tgctagactatctaggagcagactatgctc

SEQ ID NO: 188348 - DNA, 30 bp, Artificial Sequence
  Synthetic oligonucleotide
ctacgagtgaagctctaggatggtatgctc

SEQ ID NO: 188349 - DNA, 30 bp, Artificial Sequence
  Synthetic oligonucleotide
gactgagacaccaaggtcattcggctgctc

SEQ ID NO: 188350 - DNA, 30 bp, Artificial Sequence
  Synthetic oligonucleotide
ggaatcaacgaacacgttacgtccgtgctc

SEQ ID NO: 188351 - DNA, 30 bp, Artificial Sequence
  Synthetic oligonucleotide
taaagtcgtcgagggtgatatcgcgtgctc

SEQ ID NO: 188352 - DNA, 30 bp, Artificial Sequence
  Synthetic oligonucleotide
tggtgtaatgtcagcatgcatgaggtgctc

SEQ ID NO: 188353 - DNA, 30 bp, Artificial Sequence
  Synthetic oligonucleotide
gcgctagaactctggggctcccgattgctc

SEQ ID NO: 188354 - DNA, 30 bp, Artificial Sequence
  Synthetic oligonucleotide
actcggtagacgggtcatacggcgttgctc

SEQ ID NO: 188355 - DNA, 30 bp, Artificial Sequence
  Synthetic oligonucleotide
caatgactcaaacgagactgtgatttgctc

SEQ ID NO: 188356 - DNA, 29 bp, Artificial Sequence
  Synthetic oligonucleotide
gtcagatgaacacgatcatatctttgctc

SEQ ID NO: 188357 - DNA, 30 bp, Artificial Sequence
  Synthetic oligonucleotide
ctaggtcctaagaatatggagctcaatctc

SEQ ID NO: 188358 - DNA, 30 bp, Artificial Sequence
  Synthetic oligonucleotide
tcaccactaccaatattatttcggaatctc

SEQ ID NO: 188359 - DNA, 30 bp, Artificial Sequence
  Synthetic oligonucleotide
gaaatagtcgatagtgatccagggaatctc

SEQ ID NO: 188360 - DNA, 30 bp, Artificial Sequence
  Synthetic oligonucleotide
ccgcacgcgtaacctagggtgttccatctc

SEQ ID NO: 188361 - DNA, 30 bp, Artificial Sequence
  Synthetic oligonucleotide
cggccctttcttaagaattgtggagatctc

SEQ ID NO: 188362 - DNA, 30 bp, Artificial Sequence
  Synthetic oligonucleotide
aatgaacatggtcctgaaggcatagatctc

SEQ ID NO: 188363 - DNA, 30 bp, Artificial Sequence
  Synthetic oligonucleotide
gatagtcgtcgagattggcgtgtagatctc

SEQ ID NO: 188364 - DNA, 30 bp, Artificial Sequence
  Synthetic oligonucleotide
cattaacttgggacgatcgtgacacctctc

SEQ ID NO: 188365 - DNA, 30 bp, Artificial Sequence
  Synthetic oligonucleotide
caacgagtgccaaaaaagggcaaccctctc

SEQ ID NO: 188366 - DNA, 30 bp, Artificial Sequence
  Synthetic oligonucleotide
catcgggaattttccgcttccaagcctctc

SEQ ID NO: 188367 - DNA, 30 bp, Artificial Sequence
  Synthetic oligonucleotide
ggatcgttgctcacagaatctgcagctctc

SEQ ID NO: 188368 - DNA, 30 bp, Artificial Sequence
  Synthetic oligonucleotide
gttgatgcggtgcgtcgttgtggcgctctc

SEQ ID NO: 188369 - DNA, 30 bp, Artificial Sequence
  Synthetic oligonucleotide
gagagtgctgggtgggattgtagtgctctc

SEQ ID NO: 188370 - DNA, 30 bp, Artificial Sequence
  Synthetic oligonucleotide
tgttctctttcatctattttcctctctctc

SEQ ID NO: 188371 - DNA, 30 bp, Artificial Sequence
  Synthetic oligonucleotide
gtgacaaggaggaataaattacagtctctc

SEQ ID NO: 188372 - DNA, 30 bp, Artificial Sequence
  Synthetic oligonucleotide
agatcaacctaggcgcatattgtttctctc

SEQ ID NO: 188373 - DNA, 30 bp, Artificial Sequence
  Synthetic oligonucleotide
ggttaggtatggcgtgtgcttctgagtctc

SEQ ID NO: 188374 - DNA, 30 bp, Artificial Sequence
  Synthetic oligonucleotide
atccggccgtaacgcagactcacacgtctc

SEQ ID NO: 188375 - DNA, 30 bp, Artificial Sequence
  Synthetic oligonucleotide
ccaaacaaaacagtaactaccccacgtctc

SEQ ID NO: 188376 - DNA, 30 bp, Artificial Sequence
  Synthetic oligonucleotide
ttagggcagcgacattaatccattcgtctc

SEQ ID NO: 188377 - DNA, 30 bp, Artificial Sequence
  Synthetic oligonucleotide
tgagcgtggacaacgctcggtggaggtctc

SEQ ID NO: 188378 - DNA, 30 bp, Artificial Sequence
  Synthetic oligonucleotide
tagggtatcgttaaggtcatcaagggtctc

SEQ ID NO: 188379 - DNA, 31 bp, Artificial Sequence
  Synthetic oligonucleotide
actcttcggagaatggcatacagcgggtctc

SEQ ID NO: 188380 - DNA, 30 bp, Artificial Sequence
  Synthetic oligonucleotide
accggacaactatcgcgatggaggggtctc

SEQ ID NO: 188381 - DNA, 30 bp, Artificial Sequence
  Synthetic oligonucleotide
aggtagtcctgctcaattacgatgggtctc

SEQ ID NO: 188382 - DNA, 30 bp, Artificial Sequence
  Synthetic oligonucleotide
cgggatggggggaatgcaggaaagtgtctc

SEQ ID NO: 188383 - DNA, 30 bp, Artificial Sequence
  Synthetic oligonucleotide
ggtgcaggatgttggagctcagcgtgtctc

SEQ ID NO: 188384 - DNA, 30 bp, Artificial Sequence
  Synthetic oligonucleotide
aataaagatcggaatagtgagtgttgtctc

SEQ ID NO: 188385 - DNA, 30 bp, Artificial Sequence
  Synthetic oligonucleotide
aggtacgccttgtccctgattacaattctc

SEQ ID NO: 188386 - DNA, 30 bp, Artificial Sequence
  Synthetic oligonucleotide
aggcaagccaccagtcactgaggaattctc

SEQ ID NO: 188387 - DNA, 30 bp, Artificial Sequence
  Synthetic oligonucleotide
tccagcagcattcacaccgatgcgattctc

SEQ ID NO: 188388 - DNA, 30 bp, Artificial Sequence
  Synthetic oligonucleotide
tgggcgttgtccgtctggtaggggcttctc

SEQ ID NO: 188389 - DNA, 30 bp, Artificial Sequence
  Synthetic oligonucleotide
taaatggacagggttcaacattatcttctc

SEQ ID NO: 188390 - DNA, 30 bp, Artificial Sequence
  Synthetic oligonucleotide
ggtcactacacaaacgggtaatcatttctc

SEQ ID NO: 188391 - DNA, 30 bp, Artificial Sequence
  Synthetic oligonucleotide
gcggaagaacctggacatctaagctttctc

SEQ ID NO: 188392 - DNA, 30 bp, Artificial Sequence
  Synthetic oligonucleotide
agagcctaaatgaactacactaagtttctc

SEQ ID NO: 188393 - DNA, 30 bp, Artificial Sequence
  Synthetic oligonucleotide
gataaaagaagggagagtaactggtttctc

SEQ ID NO: 188394 - DNA, 30 bp, Artificial Sequence
  Synthetic oligonucleotide
ttgccgaaacggtgaacacgtctgtttctc

SEQ ID NO: 188395 - DNA, 30 bp, Artificial Sequence
  Synthetic oligonucleotide
ccctggggcctatggttctggtccaaagtc

SEQ ID NO: 188396 - DNA, 30 bp, Artificial Sequence
  Synthetic oligonucleotide
aggaaatcgttagttccgtgatggaaagtc

SEQ ID NO: 188397 - DNA, 30 bp, Artificial Sequence
  Synthetic oligonucleotide
acctgatgaggtcgcaagggatgacaagtc

SEQ ID NO: 188398 - DNA, 30 bp, Artificial Sequence
  Synthetic oligonucleotide
atgagcaactcggctaagagatgccaagtc

SEQ ID NO: 188399 - DNA, 30 bp, Artificial Sequence
  Synthetic oligonucleotide
acatacgtatacataccacccgctgaagtc

SEQ ID NO: 188400 - DNA, 30 bp, Artificial Sequence
  Synthetic oligonucleotide
agtgcagccgttaatgtggacagtgaagtc

SEQ ID NO: 188401 - DNA, 30 bp, Artificial Sequence
  Synthetic oligonucleotide
gtaacattgggtgtcagataggagtaagtc

SEQ ID NO: 188402 - DNA, 30 bp, Artificial Sequence
  Synthetic oligonucleotide
agacacggactaaggcgatagcggtaagtc

SEQ ID NO: 188403 - DNA, 30 bp, Artificial Sequence
  Synthetic oligonucleotide
tgctgtcttagggaacttgctgattaagtc

SEQ ID NO: 188404 - DNA, 30 bp, Artificial Sequence
  Synthetic oligonucleotide
gaagtttagacagcgtcgttccacacagtc

SEQ ID NO: 188405 - DNA, 30 bp, Artificial Sequence
  Synthetic oligonucleotide
ctcagcccgtcgccacgagagagcacagtc

SEQ ID NO: 188406 - DNA, 30 bp, Artificial Sequence
  Synthetic oligonucleotide
cgtaaacatccttctaaacacggcacagtc

SEQ ID NO: 188407 - DNA, 30 bp, Artificial Sequence
  Synthetic oligonucleotide
gcgcagagaagactgaaccgtacgacagtc

SEQ ID NO: 188408 - DNA, 30 bp, Artificial Sequence
  Synthetic oligonucleotide
aacaaatcgtcgagaaatctgtatacagtc

SEQ ID NO: 188409 - DNA, 30 bp, Artificial Sequence
  Synthetic oligonucleotide
tatagcaattacaacactgtgtgtacagtc

SEQ ID NO: 188410 - DNA, 30 bp, Artificial Sequence
  Synthetic oligonucleotide
cggttgaatcgcggcagttgccggccagtc

SEQ ID NO: 188411 - DNA, 30 bp, Artificial Sequence
  Synthetic oligonucleotide
gtttggaatatgcttgcctgtggagcagtc

SEQ ID NO: 188412 - DNA, 30 bp, Artificial Sequence
  Synthetic oligonucleotide
aagatccgaagaggtggagatcgggcagtc

SEQ ID NO: 188413 - DNA, 30 bp, Artificial Sequence
  Synthetic oligonucleotide
tctaaccgcctaatccaggagggggcagtc

SEQ ID NO: 188414 - DNA, 30 bp, Artificial Sequence
  Synthetic oligonucleotide
ctaaacccttggctttgagatgtggcagtc

SEQ ID NO: 188415 - DNA, 30 bp, Artificial Sequence
  Synthetic oligonucleotide
ccgtgtactatcagtagggcctatgcagtc

SEQ ID NO: 188416 - DNA, 30 bp, Artificial Sequence
  Synthetic oligonucleotide
gtcgtgtgctatgcagtaatgtcctcagtc

SEQ ID NO: 188417 - DNA, 30 bp, Artificial Sequence
  Synthetic oligonucleotide
ctgtacggcccgtgtaaatgcagctcagtc

SEQ ID NO: 188418 - DNA, 30 bp, Artificial Sequence
  Synthetic oligonucleotide
tacaggtagcacggcgcctaaaagtcagtc

SEQ ID NO: 188419 - DNA, 30 bp, Artificial Sequence
  Synthetic oligonucleotide
aaggtagggttttcgagcatacgaagagtc

SEQ ID NO: 188420 - DNA, 30 bp, Artificial Sequence
  Synthetic oligonucleotide
gaaatctgaagtaccgataccgtaagagtc

SEQ ID NO: 188421 - DNA, 30 bp, Artificial Sequence
  Synthetic oligonucleotide
catggtgttcgggggcgtcagaatagagtc

SEQ ID NO: 188422 - DNA, 29 bp, Artificial Sequence
  Synthetic oligonucleotide
gttgaccgagttataagtcaggtagagtc

SEQ ID NO: 188423 - DNA, 30 bp, Artificial Sequence
  Synthetic oligonucleotide
agggccgaccagtgcgatcagtgtagagtc

SEQ ID NO: 188424 - DNA, 30 bp, Artificial Sequence
  Synthetic oligonucleotide
tcgccgactataaaagagccaagacgagtc

SEQ ID NO: 188425 - DNA, 30 bp, Artificial Sequence
  Synthetic oligonucleotide
cgcagcctaaggcatttccggagaggagtc

SEQ ID NO: 188426 - DNA, 30 bp, Artificial Sequence
  Synthetic oligonucleotide
gatccattgtggtcgatatggcgaggagtc

SEQ ID NO: 188427 - DNA, 30 bp, Artificial Sequence
  Synthetic oligonucleotide
gtcatcacatctaggatagattggggagtc

SEQ ID NO: 188428 - DNA, 30 bp, Artificial Sequence
  Synthetic oligonucleotide
tgagcggcggaagagaccgcacgtggagtc

SEQ ID NO: 188429 - DNA, 30 bp, Artificial Sequence
  Synthetic oligonucleotide
ggctaaataccggtaggtttgcgtggagtc

SEQ ID NO: 188430 - DNA, 30 bp, Artificial Sequence
  Synthetic oligonucleotide
acttctaacgagatagcggcatgtggagtc

SEQ ID NO: 188431 - DNA, 30 bp, Artificial Sequence
  Synthetic oligonucleotide
gtaggcggctagaaataggtacttggagtc

SEQ ID NO: 188432 - DNA, 30 bp, Artificial Sequence
  Synthetic oligonucleotide
accacatcgtctcgggtagttaggtgagtc

SEQ ID NO: 188433 - DNA, 30 bp, Artificial Sequence
  Synthetic oligonucleotide
tgtcatcgcgttaagctcaaagaactagtc

SEQ ID NO: 188434 - DNA, 30 bp, Artificial Sequence
  Synthetic oligonucleotide
cttaggcggacgagtcactaggagctagtc

SEQ ID NO: 188435 - DNA, 30 bp, Artificial Sequence
  Synthetic oligonucleotide
ctagtgaagaagagacacgccccggtagtc

SEQ ID NO: 188436 - DNA, 30 bp, Artificial Sequence
  Synthetic oligonucleotide
ctagccatatccgggcgcaatcgattagtc

SEQ ID NO: 188437 - DNA, 30 bp, Artificial Sequence
  Synthetic oligonucleotide
atcttaggctctaccgctaaacccttagtc

SEQ ID NO: 188438 - DNA, 30 bp, Artificial Sequence
  Synthetic oligonucleotide
cgtgggcaaaatcaaagtatttggttagtc

SEQ ID NO: 188439 - DNA, 30 bp, Artificial Sequence
  Synthetic oligonucleotide
aaactgggaactcaaacaggcatgttagtc

SEQ ID NO: 188440 - DNA, 30 bp, Artificial Sequence
  Synthetic oligonucleotide
caatagaccgacgaagtgtcggatttagtc

SEQ ID NO: 188441 - DNA, 28 bp, Artificial Sequence
  Synthetic oligonucleotide
catcaacttgttcgtctgttgaaacgtc

SEQ ID NO: 188442 - DNA, 30 bp, Artificial Sequence
  Synthetic oligonucleotide
tcctttcgacacctaacgaaacataacgtc

SEQ ID NO: 188443 - DNA, 30 bp, Artificial Sequence
  Synthetic oligonucleotide
gcgttcatgaacgtattggggggacacgtc

SEQ ID NO: 188444 - DNA, 30 bp, Artificial Sequence
  Synthetic oligonucleotide
attctacaagagaccgtcaatgtacacgtc

SEQ ID NO: 188445 - DNA, 30 bp, Artificial Sequence
  Synthetic oligonucleotide
gtatgcactgatctcgtgtaccaccacgtc

SEQ ID NO: 188446 - DNA, 30 bp, Artificial Sequence
  Synthetic oligonucleotide
gcttcgcttatcaatataagacggcacgtc

SEQ ID NO: 188447 - DNA, 30 bp, Artificial Sequence
  Synthetic oligonucleotide
tgtcgacaaaggaacaagctaattcacgtc

SEQ ID NO: 188448 - DNA, 30 bp, Artificial Sequence
  Synthetic oligonucleotide
tacgcaaacttgccttagcaggaagacgtc

SEQ ID NO: 188449 - DNA, 30 bp, Artificial Sequence
  Synthetic oligonucleotide
cgttcacttctcggacacgacatcgacgtc

SEQ ID NO: 188450 - DNA, 30 bp, Artificial Sequence
  Synthetic oligonucleotide
gatgcagacaatccgaaccatactgacgtc

SEQ ID NO: 188451 - DNA, 35 bp, Artificial Sequence
  Synthetic oligonucleotide
gcaaagggggcactgcggctggggagtctgacgtc

SEQ ID NO: 188452 - DNA, 30 bp, Artificial Sequence
  Synthetic oligonucleotide
cagctagatacggccgaaagatcatacgtc

SEQ ID NO: 188453 - DNA, 30 bp, Artificial Sequence
  Synthetic oligonucleotide
cggattccaaactgaaagtcaaactacgtc

SEQ ID NO: 188454 - DNA, 30 bp, Artificial Sequence
  Synthetic oligonucleotide
aggtatgcgccggattttagcatctacgtc

SEQ ID NO: 188455 - DNA, 30 bp, Artificial Sequence
  Synthetic oligonucleotide
cggtacacgctatagatgagccagtacgtc

SEQ ID NO: 188456 - DNA, 30 bp, Artificial Sequence
  Synthetic oligonucleotide
aagtagactcgacggatagttgcgtacgtc

SEQ ID NO: 188457 - DNA, 30 bp, Artificial Sequence
  Synthetic oligonucleotide
tcgtctcgtcaacttccgatcagttacgtc

SEQ ID NO: 188458 - DNA, 30 bp, Artificial Sequence
  Synthetic oligonucleotide
agtgcaaaggaaccggaagtctggaccgtc

SEQ ID NO: 188459 - DNA, 30 bp, Artificial Sequence
  Synthetic oligonucleotide
taaatcgttatcagagagcagttgaccgtc

SEQ ID NO: 188460 - DNA, 30 bp, Artificial Sequence
  Synthetic oligonucleotide
acgcgagtcttagtaataggcatggccgtc

SEQ ID NO: 188461 - DNA, 30 bp, Artificial Sequence
  Synthetic oligonucleotide
aactgggttacagcggcttccagatccgtc

SEQ ID NO: 188462 - DNA, 30 bp, Artificial Sequence
  Synthetic oligonucleotide
ccaatttgtgccgcattgtactcttccgtc

SEQ ID NO: 188463 - DNA, 30 bp, Artificial Sequence
  Synthetic oligonucleotide
gcgcgggagggtgaggactcctgttccgtc

SEQ ID NO: 188464 - DNA, 30 bp, Artificial Sequence
  Synthetic oligonucleotide
agggatgttggttgtgcgcacacaagcgtc

SEQ ID NO: 188465 - DNA, 30 bp, Artificial Sequence
  Synthetic oligonucleotide
attagcgcgtacgattacaaacgaagcgtc

SEQ ID NO: 188466 - DNA, 30 bp, Artificial Sequence
  Synthetic oligonucleotide
ccaagagttataataggtagtgacagcgtc

SEQ ID NO: 188467 - DNA, 30 bp, Artificial Sequence
  Synthetic oligonucleotide
attatgtgaacgactgggtcatcgagcgtc

SEQ ID NO: 188468 - DNA, 30 bp, Artificial Sequence
  Synthetic oligonucleotide
tgagccggccaccataacgaacttagcgtc

SEQ ID NO: 188469 - DNA, 30 bp, Artificial Sequence
  Synthetic oligonucleotide
cagtctgtaagcatgtctagagtccgcgtc

SEQ ID NO: 188470 - DNA, 30 bp, Artificial Sequence
  Synthetic oligonucleotide
taaccaaaaaaggtagccgcggagcgcgtc

SEQ ID NO: 188471 - DNA, 30 bp, Artificial Sequence
  Synthetic oligonucleotide
caaagcgatcccctttacaggactcgcgtc

SEQ ID NO: 188472 - DNA, 30 bp, Artificial Sequence
  Synthetic oligonucleotide
taatctgagtcagttatagacctcggcgtc

SEQ ID NO: 188473 - DNA, 30 bp, Artificial Sequence
  Synthetic oligonucleotide
gtgtagagatatgttgataggggtggcgtc

SEQ ID NO: 188474 - DNA, 30 bp, Artificial Sequence
  Synthetic oligonucleotide
gaataggaaaatcaatagctccgttgcgtc

SEQ ID NO: 188475 - DNA, 30 bp, Artificial Sequence
  Synthetic oligonucleotide
ttcgcaagcttagcttaggtgaaaatcgtc

SEQ ID NO: 188476 - DNA, 30 bp, Artificial Sequence
  Synthetic oligonucleotide
ttgtaacgtagattttggtcagaaatcgtc

SEQ ID NO: 188477 - DNA, 30 bp, Artificial Sequence
  Synthetic oligonucleotide
cagtggtacacgtatacaaggagtatcgtc

SEQ ID NO: 188478 - DNA, 30 bp, Artificial Sequence
  Synthetic oligonucleotide
gtgcgatgagtgaaacgatggtttatcgtc

SEQ ID NO: 188479 - DNA, 30 bp, Artificial Sequence
  Synthetic oligonucleotide
ctatgctctcgaaaatattctgaactcgtc

SEQ ID NO: 188480 - DNA, 30 bp, Artificial Sequence
  Synthetic oligonucleotide
accaactagtcccgtgaagctagcgtcgtc

SEQ ID NO: 188481 - DNA, 30 bp, Artificial Sequence
  Synthetic oligonucleotide
gaaaaactccaaggattaagttaggtcgtc

SEQ ID NO: 188482 - DNA, 30 bp, Artificial Sequence
  Synthetic oligonucleotide
cagagggcgagggtacctgtggcggtcgtc

SEQ ID NO: 188483 - DNA, 30 bp, Artificial Sequence
  Synthetic oligonucleotide
tcttgtctactgtttctgagtattgtcgtc

SEQ ID NO: 188484 - DNA, 30 bp, Artificial Sequence
  Synthetic oligonucleotide
ctctagcgggaaatgaaggagcgattcgtc

SEQ ID NO: 188485 - DNA, 30 bp, Artificial Sequence
  Synthetic oligonucleotide
agcacgagatgtaaaggtaatgtattcgtc

SEQ ID NO: 188486 - DNA, 30 bp, Artificial Sequence
  Synthetic oligonucleotide
cgccttagcccataaggtggggacttcgtc

SEQ ID NO: 188487 - DNA, 30 bp, Artificial Sequence
  Synthetic oligonucleotide
gatacaattaaaaaatagcatattttcgtc

SEQ ID NO: 188488 - DNA, 30 bp, Artificial Sequence
  Synthetic oligonucleotide
gcgtggtcccggaagggccagccccaggtc

SEQ ID NO: 188489 - DNA, 30 bp, Artificial Sequence
  Synthetic oligonucleotide
gaccattccagcgccacgcacatccaggtc

SEQ ID NO: 188490 - DNA, 30 bp, Artificial Sequence
  Synthetic oligonucleotide
atgggcaccacttaatgccgcgttcaggtc

SEQ ID NO: 188491 - DNA, 30 bp, Artificial Sequence
  Synthetic oligonucleotide
tggctcagaactaaagttttacacgaggtc

SEQ ID NO: 188492 - DNA, 30 bp, Artificial Sequence
  Synthetic oligonucleotide
acgagcgtcccctctaaaggtagggaggtc

SEQ ID NO: 188493 - DNA, 30 bp, Artificial Sequence
  Synthetic oligonucleotide
gcaatccgctatcctgaggaggatgaggtc

SEQ ID NO: 188494 - DNA, 30 bp, Artificial Sequence
  Synthetic oligonucleotide
aaatgcggtacgcccaatacatggtaggtc

SEQ ID NO: 188495 - DNA, 30 bp, Artificial Sequence
  Synthetic oligonucleotide
cgacttcagtcatgccaagcaatgtaggtc

SEQ ID NO: 188496 - DNA, 30 bp, Artificial Sequence
  Synthetic oligonucleotide
ggaagtacagtactcatgggacacacggtc

SEQ ID NO: 188497 - DNA, 30 bp, Artificial Sequence
  Synthetic oligonucleotide
gagcacaactacacggtgatattcacggtc

SEQ ID NO: 188498 - DNA, 30 bp, Artificial Sequence
  Synthetic oligonucleotide
ggggaggtttactataacagaccgacggtc

SEQ ID NO: 188499 - DNA, 30 bp, Artificial Sequence
  Synthetic oligonucleotide
aggcatctttccgggataacggtgacggtc

SEQ ID NO: 188500 - DNA, 30 bp, Artificial Sequence
  Synthetic oligonucleotide
atcatgtggaatcagccatgaagaccggtc

SEQ ID NO: 188501 - DNA, 30 bp, Artificial Sequence
  Synthetic oligonucleotide
ccggccttaggcaatcagagagctccggtc

SEQ ID NO: 188502 - DNA, 30 bp, Artificial Sequence
  Synthetic oligonucleotide
aactggaggtcgctgcggagacaagcggtc

SEQ ID NO: 188503 - DNA, 30 bp, Artificial Sequence
  Synthetic oligonucleotide
ccatggcttggtttaccttacgattcggtc

SEQ ID NO: 188504 - DNA, 30 bp, Artificial Sequence
  Synthetic oligonucleotide
cccataatgcactggtgaatcggaagggtc

SEQ ID NO: 188505 - DNA, 30 bp, Artificial Sequence
  Synthetic oligonucleotide
acgtgtcggcctcgtgcccatagcagggtc

SEQ ID NO: 188506 - DNA, 30 bp, Artificial Sequence
  Synthetic oligonucleotide
ctgtcaacggagtctacggtatgacgggtc

SEQ ID NO: 188507 - DNA, 30 bp, Artificial Sequence
  Synthetic oligonucleotide
aaacgtttcgatgtataaatgtgccgggtc

SEQ ID NO: 188508 - DNA, 30 bp, Artificial Sequence
  Synthetic oligonucleotide
ccgacctcggcggggttcatgtcgcgggtc

SEQ ID NO: 188509 - DNA, 30 bp, Artificial Sequence
  Synthetic oligonucleotide
tacgggaatcagaggaccagagggcgggtc

SEQ ID NO: 188510 - DNA, 30 bp, Artificial Sequence
  Synthetic oligonucleotide
taggcgagggagtttatcttgtatcgggtc

SEQ ID NO: 188511 - DNA, 30 bp, Artificial Sequence
  Synthetic oligonucleotide
tgtgcatcagtgagtcggggaatcggggtc

SEQ ID NO: 188512 - DNA, 30 bp, Artificial Sequence
  Synthetic oligonucleotide
atcattcgagggctcgcactattcggggtc

SEQ ID NO: 188513 - DNA, 30 bp, Artificial Sequence
  Synthetic oligonucleotide
atcgcgcccactagacgtagggggggggtc

SEQ ID NO: 188514 - DNA, 30 bp, Artificial Sequence
  Synthetic oligonucleotide
gagctcaattagacatcatgcatgggggtc

SEQ ID NO: 188515 - DNA, 30 bp, Artificial Sequence
  Synthetic oligonucleotide
accggagtcaataccgtccgtgcatgggtc

SEQ ID NO: 188516 - DNA, 30 bp, Artificial Sequence
  Synthetic oligonucleotide
gaaggattggagatatcatgtggatgggtc

SEQ ID NO: 188517 - DNA, 30 bp, Artificial Sequence
  Synthetic oligonucleotide
ctgtccaaccacaagcccccggcgtgggtc

SEQ ID NO: 188518 - DNA, 30 bp, Artificial Sequence
  Synthetic oligonucleotide
agaggaccatatttgtatagctggtgggtc

SEQ ID NO: 188519 - DNA, 30 bp, Artificial Sequence
  Synthetic oligonucleotide
ggcaaactcctgagtccccgaaattgggtc

SEQ ID NO: 188520 - DNA, 30 bp, Artificial Sequence
  Synthetic oligonucleotide
gcagccggtacttagatggtgagttgggtc

SEQ ID NO: 188521 - DNA, 30 bp, Artificial Sequence
  Synthetic oligonucleotide
caacgctatacgagtcccgtgctcatggtc

SEQ ID NO: 188522 - DNA, 30 bp, Artificial Sequence
  Synthetic oligonucleotide
agttgagatctggtcgaccacaagatggtc

SEQ ID NO: 188523 - DNA, 30 bp, Artificial Sequence
  Synthetic oligonucleotide
ccttgaaatgtaattgggagctggatggtc

SEQ ID NO: 188524 - DNA, 30 bp, Artificial Sequence
  Synthetic oligonucleotide
ttacagcgaccgtattaacccagactggtc

SEQ ID NO: 188525 - DNA, 30 bp, Artificial Sequence
  Synthetic oligonucleotide
ggaacatttggaatggcattgggactggtc

SEQ ID NO: 188526 - DNA, 30 bp, Artificial Sequence
  Synthetic oligonucleotide
cgcgtttatttacgtaaccatgggctggtc

SEQ ID NO: 188527 - DNA, 30 bp, Artificial Sequence
  Synthetic oligonucleotide
gatagcttgtgaggggcgtattcagtggtc

SEQ ID NO: 188528 - DNA, 30 bp, Artificial Sequence
  Synthetic oligonucleotide
tgcccggatcgggcgtcaggtcgagtggtc

SEQ ID NO: 188529 - DNA, 30 bp, Artificial Sequence
  Synthetic oligonucleotide
ccacgcacgaccagaatagtgcacgtggtc

SEQ ID NO: 188530 - DNA, 30 bp, Artificial Sequence
  Synthetic oligonucleotide
tgtaccagggaggttggacgatcggtggtc

SEQ ID NO: 188531 - DNA, 30 bp, Artificial Sequence
  Synthetic oligonucleotide
ccggagggatgagcccgcaaggttgtggtc

SEQ ID NO: 188532 - DNA, 30 bp, Artificial Sequence
  Synthetic oligonucleotide
tagcatggtaagtatgcccgcggcttggtc

SEQ ID NO: 188533 - DNA, 30 bp, Artificial Sequence
  Synthetic oligonucleotide
gaggaaacgatgcgcaaaccatagaatgtc

SEQ ID NO: 188534 - DNA, 30 bp, Artificial Sequence
  Synthetic oligonucleotide
ccatataggttacacaaaagaacgaatgtc

SEQ ID NO: 188535 - DNA, 30 bp, Artificial Sequence
  Synthetic oligonucleotide
agctgggggatctgcgttggaggtaatgtc

SEQ ID NO: 188536 - DNA, 30 bp, Artificial Sequence
  Synthetic oligonucleotide
agatagtccttaaacgatattaggcatgtc

SEQ ID NO: 188537 - DNA, 30 bp, Artificial Sequence
  Synthetic oligonucleotide
taggaatagagccaagaagttgggcatgtc

SEQ ID NO: 188538 - DNA, 30 bp, Artificial Sequence
  Synthetic oligonucleotide
ggtgtgcaggggccagtctgggtcgatgtc

SEQ ID NO: 188539 - DNA, 30 bp, Artificial Sequence
  Synthetic oligonucleotide
cgtcatgcaggtgatgaaagaggggatgtc

SEQ ID NO: 188540 - DNA, 30 bp, Artificial Sequence
  Synthetic oligonucleotide
agttcagtgtgataaccgtgaatggatgtc

SEQ ID NO: 188541 - DNA, 30 bp, Artificial Sequence
  Synthetic oligonucleotide
ctattggttaataggatgatccgatatgtc

SEQ ID NO: 188542 - DNA, 30 bp, Artificial Sequence
  Synthetic oligonucleotide
catgtacatgcttgcgatgtcgggtatgtc

SEQ ID NO: 188543 - DNA, 30 bp, Artificial Sequence
  Synthetic oligonucleotide
caggaggagactcacgtaaaggtgtatgtc

SEQ ID NO: 188544 - DNA, 30 bp, Artificial Sequence
  Synthetic oligonucleotide
gatctcgcgactacttacaaaggaactgtc

SEQ ID NO: 188545 - DNA, 30 bp, Artificial Sequence
  Synthetic oligonucleotide
aaacgggtatctgcccatcgcgacactgtc

SEQ ID NO: 188546 - DNA, 30 bp, Artificial Sequence
  Synthetic oligonucleotide
atcctgagcatgtccatagtgcccactgtc

SEQ ID NO: 188547 - DNA, 30 bp, Artificial Sequence
  Synthetic oligonucleotide
caactcaagtccggatcctttcgcactgtc

SEQ ID NO: 188548 - DNA, 30 bp, Artificial Sequence
  Synthetic oligonucleotide
acatacatacttgagtaaggaatcactgtc

SEQ ID NO: 188549 - DNA, 30 bp, Artificial Sequence
  Synthetic oligonucleotide
taagtaagacaacgctaacagaatactgtc

SEQ ID NO: 188550 - DNA, 30 bp, Artificial Sequence
  Synthetic oligonucleotide
gatgcacacacctcgcacctgtgccctgtc

SEQ ID NO: 188551 - DNA, 31 bp, Artificial Sequence
  Synthetic oligonucleotide
ctcggtctaatacaatgcgagggatcctgtc

SEQ ID NO: 188552 - DNA, 30 bp, Artificial Sequence
  Synthetic oligonucleotide
tatgtgaagtcatctgacaggcgtcctgtc

SEQ ID NO: 188553 - DNA, 30 bp, Artificial Sequence
  Synthetic oligonucleotide
aaagactcgcacactgtagaaacagctgtc

SEQ ID NO: 188554 - DNA, 30 bp, Artificial Sequence
  Synthetic oligonucleotide
gataaacggggcggacacagggccgctgtc

SEQ ID NO: 188555 - DNA, 30 bp, Artificial Sequence
  Synthetic oligonucleotide
accacggacaaagcgctgggggaaagtgtc

SEQ ID NO: 188556 - DNA, 30 bp, Artificial Sequence
  Synthetic oligonucleotide
attcgactcgtgtcatcaacgggaagtgtc

SEQ ID NO: 188557 - DNA, 30 bp, Artificial Sequence
  Synthetic oligonucleotide
aaatcgtgccaaataatcaaggagagtgtc

SEQ ID NO: 188558 - DNA, 30 bp, Artificial Sequence
  Synthetic oligonucleotide
tcgctaaagaatacatagtaaagtagtgtc

SEQ ID NO: 188559 - DNA, 30 bp, Artificial Sequence
  Synthetic oligonucleotide
agcgcgaccaggagacttcaccgtagtgtc

SEQ ID NO: 188560 - DNA, 30 bp, Artificial Sequence
  Synthetic oligonucleotide
gtgacagtactgacatagatatcccgtgtc

SEQ ID NO: 188561 - DNA, 30 bp, Artificial Sequence
  Synthetic oligonucleotide
cagggctataaaaagatgttctacggtgtc

SEQ ID NO: 188562 - DNA, 30 bp, Artificial Sequence
  Synthetic oligonucleotide
aggactccataaaggaaaccacatggtgtc

SEQ ID NO: 188563 - DNA, 30 bp, Artificial Sequence
  Synthetic oligonucleotide
gcggaagcacgagcgtctctaactggtgtc

SEQ ID NO: 188564 - DNA, 30 bp, Artificial Sequence
  Synthetic oligonucleotide
tagacaatctggcaccccggataatgtgtc

SEQ ID NO: 188565 - DNA, 30 bp, Artificial Sequence
  Synthetic oligonucleotide
tgactaacaatcttagatgtgtactgtgtc

SEQ ID NO: 188566 - DNA, 30 bp, Artificial Sequence
  Synthetic oligonucleotide
agcgaccccgtaggcaatcgatgctgtgtc

SEQ ID NO: 188567 - DNA, 30 bp, Artificial Sequence
  Synthetic oligonucleotide
gattaacggtgtttccggcgcaagtgtgtc

SEQ ID NO: 188568 - DNA, 30 bp, Artificial Sequence
  Synthetic oligonucleotide
ttagcatgttagctttcctatgggtgtgtc

SEQ ID NO: 188569 - DNA, 30 bp, Artificial Sequence
  Synthetic oligonucleotide
ggccggtcacataagggacttgtttgtgtc

SEQ ID NO: 188570 - DNA, 30 bp, Artificial Sequence
  Synthetic oligonucleotide
tgatctgaatggcaggtggaccagattgtc

SEQ ID NO: 188571 - DNA, 30 bp, Artificial Sequence
  Synthetic oligonucleotide
cgactaaacgacgggacgtttggacttgtc

SEQ ID NO: 188572 - DNA, 30 bp, Artificial Sequence
  Synthetic oligonucleotide
aagggaataagctcacgtagctggcttgtc

SEQ ID NO: 188573 - DNA, 30 bp, Artificial Sequence
  Synthetic oligonucleotide
gtagtcaattcagctatatttgaagttgtc

SEQ ID NO: 188574 - DNA, 30 bp, Artificial Sequence
  Synthetic oligonucleotide
gcagtgccaatttccgagccaatggttgtc

SEQ ID NO: 188575 - DNA, 30 bp, Artificial Sequence
  Synthetic oligonucleotide
tagcgaagagcggacttctcccatgttgtc

SEQ ID NO: 188576 - DNA, 30 bp, Artificial Sequence
  Synthetic oligonucleotide
gcgggcatggaaatttgttcgggatttgtc

SEQ ID NO: 188577 - DNA, 30 bp, Artificial Sequence
  Synthetic oligonucleotide
gtgcagggatgggaatcacaggtctttgtc

SEQ ID NO: 188578 - DNA, 30 bp, Artificial Sequence
  Synthetic oligonucleotide
gtataactagctcctgacccacgaaaattc

SEQ ID NO: 188579 - DNA, 30 bp, Artificial Sequence
  Synthetic oligonucleotide
caccaggtcttcaattcgttacacaaattc

SEQ ID NO: 188580 - DNA, 30 bp, Artificial Sequence
  Synthetic oligonucleotide
tgctcgttgatggtcagtaccggcaaattc

SEQ ID NO: 188581 - DNA, 30 bp, Artificial Sequence
  Synthetic oligonucleotide
atcgcaaaagatacttaaagacagaaattc

SEQ ID NO: 188582 - DNA, 30 bp, Artificial Sequence
  Synthetic oligonucleotide
cagtgcagttcccttgtgatcatgcaattc

SEQ ID NO: 188583 - DNA, 30 bp, Artificial Sequence
  Synthetic oligonucleotide
aaggtggtgcgttagctggacagtcaattc

SEQ ID NO: 188584 - DNA, 30 bp, Artificial Sequence
  Synthetic oligonucleotide
acttaataaggggggtgcgcctgcgaattc

SEQ ID NO: 188585 - DNA, 30 bp, Artificial Sequence
  Synthetic oligonucleotide
taagcagcggggtagggatgttgggaattc

SEQ ID NO: 188586 - DNA, 30 bp, Artificial Sequence
  Synthetic oligonucleotide
agccggatgggcgagtaaatattggaattc

SEQ ID NO: 188587 - DNA, 30 bp, Artificial Sequence
  Synthetic oligonucleotide
ggaataattgaactttgaccaagataattc

SEQ ID NO: 188588 - DNA, 30 bp, Artificial Sequence
  Synthetic oligonucleotide
aagcatcgaccgactggacctcggtaattc

SEQ ID NO: 188589 - DNA, 30 bp, Artificial Sequence
  Synthetic oligonucleotide
gaggccgggtgggacttcatgaaaacattc

SEQ ID NO: 188590 - DNA, 30 bp, Artificial Sequence
  Synthetic oligonucleotide
gctaacgtgttacgtctagggataacattc

SEQ ID NO: 188591 - DNA, 30 bp, Artificial Sequence
  Synthetic oligonucleotide
attgattaggccagtgaactaaccacattc

SEQ ID NO: 188592 - DNA, 30 bp, Artificial Sequence
  Synthetic oligonucleotide
taagcaccagttagctctaatgccacattc

SEQ ID NO: 188593 - DNA, 30 bp, Artificial Sequence
  Synthetic oligonucleotide
cataagtattgtcgtaagtcgagtacattc

SEQ ID NO: 188594 - DNA, 30 bp, Artificial Sequence
  Synthetic oligonucleotide
gtttacatagagttggacccccgtacattc

SEQ ID NO: 188595 - DNA, 30 bp, Artificial Sequence
  Synthetic oligonucleotide
cgaatagcagagctcaccggtcttacattc

SEQ ID NO: 188596 - DNA, 30 bp, Artificial Sequence
  Synthetic oligonucleotide
acgaactactaaaaaatatatcacccattc

SEQ ID NO: 188597 - DNA, 30 bp, Artificial Sequence
  Synthetic oligonucleotide
caactgtagtcatcaccgggaatcccattc

SEQ ID NO: 188598 - DNA, 30 bp, Artificial Sequence
  Synthetic oligonucleotide
atataaataaagcctacgccccatccattc

SEQ ID NO: 188599 - DNA, 30 bp, Artificial Sequence
  Synthetic oligonucleotide
ctggaaacggtaggaggtttgactccattc

SEQ ID NO: 188600 - DNA, 30 bp, Artificial Sequence
  Synthetic oligonucleotide
gaacgtgccgggaccatctaacaggcattc

SEQ ID NO: 188601 - DNA, 30 bp, Artificial Sequence
  Synthetic oligonucleotide
attgtaaacggggattacagggcgtcattc

SEQ ID NO: 188602 - DNA, 30 bp, Artificial Sequence
  Synthetic oligonucleotide
acaatcgatttcaattgttggaaaagattc

SEQ ID NO: 188603 - DNA, 30 bp, Artificial Sequence
  Synthetic oligonucleotide
tcttgaacttctggatcaacttaaagattc

SEQ ID NO: 188604 - DNA, 30 bp, Artificial Sequence
  Synthetic oligonucleotide
cgcgcgggggcgaaccaatatcatagattc

SEQ ID NO: 188605 - DNA, 30 bp, Artificial Sequence
  Synthetic oligonucleotide
atcctagacgatgcttaactctgtagattc

SEQ ID NO: 188606 - DNA, 30 bp, Artificial Sequence
  Synthetic oligonucleotide
agacaaacgtacagccttatcggacgattc

SEQ ID NO: 188607 - DNA, 30 bp, Artificial Sequence
  Synthetic oligonucleotide
gggtcctacggagatcagttgcctcgattc

SEQ ID NO: 188608 - DNA, 30 bp, Artificial Sequence
  Synthetic oligonucleotide
tcggatatcccctaaaattagaaaggattc

SEQ ID NO: 188609 - DNA, 30 bp, Artificial Sequence
  Synthetic oligonucleotide
ctgcgtattggatcgatattttaaggattc

SEQ ID NO: 188610 - DNA, 30 bp, Artificial Sequence
  Synthetic oligonucleotide
tcctcgtgcgtacgctcaccgacaggattc

SEQ ID NO: 188611 - DNA, 30 bp, Artificial Sequence
  Synthetic oligonucleotide
tggtaggatatgttagagtgtatgggattc

SEQ ID NO: 188612 - DNA, 30 bp, Artificial Sequence
  Synthetic oligonucleotide
caatgtggtgatgccagctgggctggattc

SEQ ID NO: 188613 - DNA, 30 bp, Artificial Sequence
  Synthetic oligonucleotide
cagaacagtgggaaaagcacagactgattc

SEQ ID NO: 188614 - DNA, 30 bp, Artificial Sequence
  Synthetic oligonucleotide
agtggatgaggaagttgattaccctgattc

SEQ ID NO: 188615 - DNA, 30 bp, Artificial Sequence
  Synthetic oligonucleotide
cacgtacatagaatggttggcaattgattc

SEQ ID NO: 188616 - DNA, 30 bp, Artificial Sequence
  Synthetic oligonucleotide
tcctgggagtgcccagtctcgaaaatattc

SEQ ID NO: 188617 - DNA, 30 bp, Artificial Sequence
  Synthetic oligonucleotide
gtaactggaaacggtaaaaacaacatattc

SEQ ID NO: 188618 - DNA, 30 bp, Artificial Sequence
  Synthetic oligonucleotide
gtgttgctaacgaggtgtttagggatattc

SEQ ID NO: 188619 - DNA, 30 bp, Artificial Sequence
  Synthetic oligonucleotide
gtgcactacctgccccgggaacgtatattc

SEQ ID NO: 188620 - DNA, 30 bp, Artificial Sequence
  Synthetic oligonucleotide
cgaaggtatcactattgggagtgtatattc

SEQ ID NO: 188621 - DNA, 30 bp, Artificial Sequence
  Synthetic oligonucleotide
tacgaataaaaccaataattataactattc

SEQ ID NO: 188622 - DNA, 30 bp, Artificial Sequence
  Synthetic oligonucleotide
cttcataattgcaaaccagatttactattc

SEQ ID NO: 188623 - DNA, 30 bp, Artificial Sequence
  Synthetic oligonucleotide
actcgcgtgtaacccagaaaccgcctattc

SEQ ID NO: 188624 - DNA, 30 bp, Artificial Sequence
  Synthetic oligonucleotide
ccgctggggctgaaaggtaaggatctattc

SEQ ID NO: 188625 - DNA, 30 bp, Artificial Sequence
  Synthetic oligonucleotide
aggaaggaacagccatccattcttctattc

SEQ ID NO: 188626 - DNA, 30 bp, Artificial Sequence
  Synthetic oligonucleotide
gtgattatgggattggaataggaagtattc

SEQ ID NO: 188627 - DNA, 30 bp, Artificial Sequence
  Synthetic oligonucleotide
agggctcgagagacggaactcctattattc

SEQ ID NO: 188628 - DNA, 31 bp, Artificial Sequence
  Synthetic oligonucleotide
agcgagcaaagtttatacaacgaatttattc

SEQ ID NO: 188629 - DNA, 30 bp, Artificial Sequence
  Synthetic oligonucleotide
tgcgaatatcccaatggcgcaagaaacttc

SEQ ID NO: 188630 - DNA, 30 bp, Artificial Sequence
  Synthetic oligonucleotide
gattatccgttagaagtggggcgcaacttc

SEQ ID NO: 188631 - DNA, 30 bp, Artificial Sequence
  Synthetic oligonucleotide
cctagcgatgaggttcgtacgcggaacttc

SEQ ID NO: 188632 - DNA, 30 bp, Artificial Sequence
  Synthetic oligonucleotide
gcggctcgtgacgagctcgcatgtaacttc

SEQ ID NO: 188633 - DNA, 30 bp, Artificial Sequence
  Synthetic oligonucleotide
ggcgtcgctggggactagctatgtaacttc

SEQ ID NO: 188634 - DNA, 30 bp, Artificial Sequence
  Synthetic oligonucleotide
taaggccagtgggctcaagcgcgacacttc

SEQ ID NO: 188635 - DNA, 30 bp, Artificial Sequence
  Synthetic oligonucleotide
gcatgattgtcggtataaaggtagcacttc

SEQ ID NO: 188636 - DNA, 30 bp, Artificial Sequence
  Synthetic oligonucleotide
ccatctaatgcacggaattgtgatcacttc

SEQ ID NO: 188637 - DNA, 30 bp, Artificial Sequence
  Synthetic oligonucleotide
agtaacctcagcggcacgggaatagacttc

SEQ ID NO: 188638 - DNA, 30 bp, Artificial Sequence
  Synthetic oligonucleotide
aaccaatcatgggtcgtgtcttaggacttc

SEQ ID NO: 188639 - DNA, 30 bp, Artificial Sequence
  Synthetic oligonucleotide
gctgagcgaaatgttatagctaatgacttc

SEQ ID NO: 188640 - DNA, 30 bp, Artificial Sequence
  Synthetic oligonucleotide
taggccacagtcgaaaccgcgccatacttc

SEQ ID NO: 188641 - DNA, 30 bp, Artificial Sequence
  Synthetic oligonucleotide
ggtagttggagtgagggggtacagtacttc

SEQ ID NO: 188642 - DNA, 30 bp, Artificial Sequence
  Synthetic oligonucleotide
agttacaatgcccgccgacacgagtacttc

SEQ ID NO: 188643 - DNA, 30 bp, Artificial Sequence
  Synthetic oligonucleotide
gcagtcatatcgtagaaccccttgtacttc

SEQ ID NO: 188644 - DNA, 30 bp, Artificial Sequence
  Synthetic oligonucleotide
atgtagaccggaaaggcgaacaagaccttc

SEQ ID NO: 188645 - DNA, 30 bp, Artificial Sequence
  Synthetic oligonucleotide
acgtacagctcatacctcgaatgagccttc

SEQ ID NO: 188646 - DNA, 30 bp, Artificial Sequence
  Synthetic oligonucleotide
tcacaagtatcgttaccaatatcggccttc

SEQ ID NO: 188647 - DNA, 30 bp, Artificial Sequence
  Synthetic oligonucleotide
gattggcgaaggaaatgcttcagtgccttc

SEQ ID NO: 188648 - DNA, 30 bp, Artificial Sequence
  Synthetic oligonucleotide
ttctgttctacatcataagcttactccttc

SEQ ID NO: 188649 - DNA, 30 bp, Artificial Sequence
  Synthetic oligonucleotide
gagcatacaagaggaaagggggtgtccttc

SEQ ID NO: 188650 - DNA, 30 bp, Artificial Sequence
  Synthetic oligonucleotide
cattgagctagtctacaacatttaagcttc

SEQ ID NO: 188651 - DNA, 30 bp, Artificial Sequence
  Synthetic oligonucleotide
gaagtcgaaggactaggtttgtcacgcttc

SEQ ID NO: 188652 - DNA, 30 bp, Artificial Sequence
  Synthetic oligonucleotide
tccgaaagttcggtcctggaagagcgcttc

SEQ ID NO: 188653 - DNA, 30 bp, Artificial Sequence
  Synthetic oligonucleotide
tgtgttatacttggctggactcatggcttc

SEQ ID NO: 188654 - DNA, 30 bp, Artificial Sequence
  Synthetic oligonucleotide
taaggatcagtaatggaggtagcatgcttc

SEQ ID NO: 188655 - DNA, 30 bp, Artificial Sequence
  Synthetic oligonucleotide
ggagtcgccccgtcttaacctgcctgcttc

SEQ ID NO: 188656 - DNA, 30 bp, Artificial Sequence
  Synthetic oligonucleotide
acatattgacgaggatctcgcagttgcttc

SEQ ID NO: 188657 - DNA, 30 bp, Artificial Sequence
  Synthetic oligonucleotide
tctggtctgtctagttcttgccaaatcttc

SEQ ID NO: 188658 - DNA, 30 bp, Artificial Sequence
  Synthetic oligonucleotide
cctgcacaaaagtttcggcatttaatcttc

SEQ ID NO: 188659 - DNA, 30 bp, Artificial Sequence
  Synthetic oligonucleotide
aatagtgcgtaatggctccattccatcttc

SEQ ID NO: 188660 - DNA, 30 bp, Artificial Sequence
  Synthetic oligonucleotide
agtcgtaaccgacgttgccgccatatcttc

SEQ ID NO: 188661 - DNA, 30 bp, Artificial Sequence
  Synthetic oligonucleotide
cgtttagccaacgaggcggaatacctcttc

SEQ ID NO: 188662 - DNA, 30 bp, Artificial Sequence
  Synthetic oligonucleotide
tagtgaggacttcaaaggtgtccgctcttc

SEQ ID NO: 188663 - DNA, 30 bp, Artificial Sequence
  Synthetic oligonucleotide
acgcgcctaaatcccaaagctgacgtcttc

SEQ ID NO: 188664 - DNA, 30 bp, Artificial Sequence
  Synthetic oligonucleotide
gtgacatgcagtacgtgttacgttgtcttc

SEQ ID NO: 188665 - DNA, 30 bp, Artificial Sequence
  Synthetic oligonucleotide
aagcggaggttgtgctcagctctattcttc

SEQ ID NO: 188666 - DNA, 30 bp, Artificial Sequence
  Synthetic oligonucleotide
tatcgttaaagagtattgagggtattcttc

SEQ ID NO: 188667 - DNA, 30 bp, Artificial Sequence
  Synthetic oligonucleotide
gcgtacggccgttctcgggcaagcttcttc

SEQ ID NO: 188668 - DNA, 30 bp, Artificial Sequence
  Synthetic oligonucleotide
gaatcatgccagaagttgaaatggttcttc

SEQ ID NO: 188669 - DNA, 30 bp, Artificial Sequence
  Synthetic oligonucleotide
atagttggtatttccttttgtgtgttcttc

SEQ ID NO: 188670 - DNA, 30 bp, Artificial Sequence
  Synthetic oligonucleotide
ggccgtcgccgcgcgacatgacttttcttc

SEQ ID NO: 188671 - DNA, 30 bp, Artificial Sequence
  Synthetic oligonucleotide
actgcatcgctttacatgggcaaacagttc

SEQ ID NO: 188672 - DNA, 30 bp, Artificial Sequence
  Synthetic oligonucleotide
cgcggggaaaagctttacctcgaacagttc

SEQ ID NO: 188673 - DNA, 31 bp, Artificial Sequence
  Synthetic oligonucleotide
acagctcaacatactgcgattgctccagttc

SEQ ID NO: 188674 - DNA, 30 bp, Artificial Sequence
  Synthetic oligonucleotide
atcgtatagagatacagctcacaagagttc

SEQ ID NO: 188675 - DNA, 30 bp, Artificial Sequence
  Synthetic oligonucleotide
attcagtataggggagacaagggcgagttc

SEQ ID NO: 188676 - DNA, 30 bp, Artificial Sequence
  Synthetic oligonucleotide
agacaatgggatattggcggtgtggagttc

SEQ ID NO: 188677 - DNA, 30 bp, Artificial Sequence
  Synthetic oligonucleotide
gccgtcaatccactagatttatgtgagttc

SEQ ID NO: 188678 - DNA, 30 bp, Artificial Sequence
  Synthetic oligonucleotide
ggtagtgcatgttgagactcgggctagttc

SEQ ID NO: 188679 - DNA, 30 bp, Artificial Sequence
  Synthetic oligonucleotide
ggtaggaggcgttccacgcttcagtagttc

SEQ ID NO: 188680 - DNA, 30 bp, Artificial Sequence
  Synthetic oligonucleotide
aaggtctacactagacccgagaattagttc

SEQ ID NO: 188681 - DNA, 30 bp, Artificial Sequence
  Synthetic oligonucleotide
ttgttactgaacacagggggatccgcgttc

SEQ ID NO: 188682 - DNA, 30 bp, Artificial Sequence
  Synthetic oligonucleotide
cgaaggaggtgctcacaatattgcgcgttc

SEQ ID NO: 188683 - DNA, 30 bp, Artificial Sequence
  Synthetic oligonucleotide
ctaaaattaacaatcagagtaattgcgttc

SEQ ID NO: 188684 - DNA, 30 bp, Artificial Sequence
  Synthetic oligonucleotide
aggcttgtaacagctagagttcattcgttc

SEQ ID NO: 188685 - DNA, 30 bp, Artificial Sequence
  Synthetic oligonucleotide
tatggcaccgatgccgggcaccgaaggttc

SEQ ID NO: 188686 - DNA, 30 bp, Artificial Sequence
  Synthetic oligonucleotide
tactcagaaggcaactattagggaaggttc

SEQ ID NO: 188687 - DNA, 30 bp, Artificial Sequence
  Synthetic oligonucleotide
agcgctcaatgactaggtgggatcaggttc

SEQ ID NO: 188688 - DNA, 30 bp, Artificial Sequence
  Synthetic oligonucleotide
cagaaggggtcaaaatcgggagagaggttc

SEQ ID NO: 188689 - DNA, 30 bp, Artificial Sequence
  Synthetic oligonucleotide
agaaaagcaatttacacctcgtgacggttc

SEQ ID NO: 188690 - DNA, 30 bp, Artificial Sequence
  Synthetic oligonucleotide
tgctacccctcgggtcgcgtagcgcggttc

SEQ ID NO: 188691 - DNA, 30 bp, Artificial Sequence
  Synthetic oligonucleotide
agggaatggggaagtccacgtcttcggttc

SEQ ID NO: 188692 - DNA, 30 bp, Artificial Sequence
  Synthetic oligonucleotide
tacagaaacttacctaacagtacggggttc

SEQ ID NO: 188693 - DNA, 30 bp, Artificial Sequence
  Synthetic oligonucleotide
ggcagaggtaatcatgaatctactgggttc

SEQ ID NO: 188694 - DNA, 30 bp, Artificial Sequence
  Synthetic oligonucleotide
agtaaggctacgtaacaaggccctgggttc

SEQ ID NO: 188695 - DNA, 30 bp, Artificial Sequence
  Synthetic oligonucleotide
accttgctgctaagactgattcgtgggttc

SEQ ID NO: 188696 - DNA, 30 bp, Artificial Sequence
  Synthetic oligonucleotide
aggtggatgtcaaacggccgccgatggttc

SEQ ID NO: 188697 - DNA, 30 bp, Artificial Sequence
  Synthetic oligonucleotide
gtgtctaccgtgagcaccattggatggttc

SEQ ID NO: 188698 - DNA, 30 bp, Artificial Sequence
  Synthetic oligonucleotide
cttctcgtcctctaatcaatctcttggttc

SEQ ID NO: 188699 - DNA, 30 bp, Artificial Sequence
  Synthetic oligonucleotide
cgagggatcgtttccgtgtcagaaatgttc

SEQ ID NO: 188700 - DNA, 30 bp, Artificial Sequence
  Synthetic oligonucleotide
ccgacgtgctgccatggactaacgatgttc

SEQ ID NO: 188701 - DNA, 30 bp, Artificial Sequence
  Synthetic oligonucleotide
gatacatgaccgtaaacctaaaatatgttc

SEQ ID NO: 188702 - DNA, 30 bp, Artificial Sequence
  Synthetic oligonucleotide
gtataaaatatgatccaggaattactgttc

SEQ ID NO: 188703 - DNA, 30 bp, Artificial Sequence
  Synthetic oligonucleotide
ctgaaggagcaagaaagtcgagtgctgttc

SEQ ID NO: 188704 - DNA, 30 bp, Artificial Sequence
  Synthetic oligonucleotide
tgatctcccctagttaagcttttgctgttc

SEQ ID NO: 188705 - DNA, 30 bp, Artificial Sequence
  Synthetic oligonucleotide
cgataccatctttagcactcctaggtgttc

SEQ ID NO: 188706 - DNA, 29 bp, Artificial Sequence
  Synthetic oligonucleotide
cgccgctctggtagttctgccgtgtgttc

SEQ ID NO: 188707 - DNA, 30 bp, Artificial Sequence
  Synthetic oligonucleotide
ttcaggaatgacagtctccgtagattgttc

SEQ ID NO: 188708 - DNA, 30 bp, Artificial Sequence
  Synthetic oligonucleotide
tcattgcataacgtgcccgtgatattgttc

SEQ ID NO: 188709 - DNA, 30 bp, Artificial Sequence
  Synthetic oligonucleotide
agtagcatgaagtctcgcgtcctattgttc

SEQ ID NO: 188710 - DNA, 30 bp, Artificial Sequence
  Synthetic oligonucleotide
cgcccgtgtccccaagagtgctccttgttc

SEQ ID NO: 188711 - DNA, 30 bp, Artificial Sequence
  Synthetic oligonucleotide
gccgctcaggcatttacgagggcgttgttc

SEQ ID NO: 188712 - DNA, 30 bp, Artificial Sequence
  Synthetic oligonucleotide
agggttgcccacacgataagaggtttgttc

SEQ ID NO: 188713 - DNA, 30 bp, Artificial Sequence
  Synthetic oligonucleotide
atactcagagcacgcagtgtaaataatttc

SEQ ID NO: 188714 - DNA, 30 bp, Artificial Sequence
  Synthetic oligonucleotide
tacatgcaaatggtgttgaggatccatttc

SEQ ID NO: 188715 - DNA, 30 bp, Artificial Sequence
  Synthetic oligonucleotide
atccatttcatccagggttggtgagatttc

SEQ ID NO: 188716 - DNA, 30 bp, Artificial Sequence
  Synthetic oligonucleotide
aggacagaattttatacgaaagtagatttc

SEQ ID NO: 188717 - DNA, 30 bp, Artificial Sequence
  Synthetic oligonucleotide
ctaaggacacacttatgaggagatgatttc

SEQ ID NO: 188718 - DNA, 30 bp, Artificial Sequence
  Synthetic oligonucleotide
actgtacctaagtacaggagaggtgatttc

SEQ ID NO: 188719 - DNA, 30 bp, Artificial Sequence
  Synthetic oligonucleotide
agactaagttcgcgagatgggcgatatttc

SEQ ID NO: 188720 - DNA, 30 bp, Artificial Sequence
  Synthetic oligonucleotide
taccatagccagtagcaaggaggatatttc

SEQ ID NO: 188721 - DNA, 30 bp, Artificial Sequence
  Synthetic oligonucleotide
aagtgcgcctggttgttaaccggatatttc

SEQ ID NO: 188722 - DNA, 30 bp, Artificial Sequence
  Synthetic oligonucleotide
cacatgagcaggaagtccggcttatatttc

SEQ ID NO: 188723 - DNA, 30 bp, Artificial Sequence
  Synthetic oligonucleotide
tacgtcaaggtcgaggctgtatactatttc

SEQ ID NO: 188724 - DNA, 30 bp, Artificial Sequence
  Synthetic oligonucleotide
acgtcctataagcgaacttgaagaactttc

SEQ ID NO: 188725 - DNA, 30 bp, Artificial Sequence
  Synthetic oligonucleotide
ttcattactgcgattcatcaatagactttc

SEQ ID NO: 188726 - DNA, 30 bp, Artificial Sequence
  Synthetic oligonucleotide
aagagtcgaaaaccatcacgaagtcctttc

SEQ ID NO: 188727 - DNA, 30 bp, Artificial Sequence
  Synthetic oligonucleotide
tcgcaagttaaggggacgcgaaaagctttc

SEQ ID NO: 188728 - DNA, 30 bp, Artificial Sequence
  Synthetic oligonucleotide
ccaggcaacgtccaaacgttctaagctttc

SEQ ID NO: 188729 - DNA, 30 bp, Artificial Sequence
  Synthetic oligonucleotide
agcactttgcggttaatggctgtcgctttc

SEQ ID NO: 188730 - DNA, 30 bp, Artificial Sequence
  Synthetic oligonucleotide
accggacacccgaatcaattgcctgctttc

SEQ ID NO: 188731 - DNA, 30 bp, Artificial Sequence
  Synthetic oligonucleotide
atccatagcaacgagagctctaaatctttc

SEQ ID NO: 188732 - DNA, 30 bp, Artificial Sequence
  Synthetic oligonucleotide
tggaggtaaaacccaggattcggctctttc

SEQ ID NO: 188733 - DNA, 30 bp, Artificial Sequence
  Synthetic oligonucleotide
ttggcggcgatcatatccgttcagtctttc

SEQ ID NO: 188734 - DNA, 30 bp, Artificial Sequence
  Synthetic oligonucleotide
gttacggaataccacacggcgcgaagtttc

SEQ ID NO: 188735 - DNA, 30 bp, Artificial Sequence
  Synthetic oligonucleotide
ggaaggtttcagactacctatcccagtttc

SEQ ID NO: 188736 - DNA, 30 bp, Artificial Sequence
  Synthetic oligonucleotide
gacgttgacctagtcgacacaatcagtttc

SEQ ID NO: 188737 - DNA, 30 bp, Artificial Sequence
  Synthetic oligonucleotide
gtgagatcgaccttgtagttcctgagtttc

SEQ ID NO: 188738 - DNA, 30 bp, Artificial Sequence
  Synthetic oligonucleotide
caagaggatttgtcggcagtatctagtttc

SEQ ID NO: 188739 - DNA, 30 bp, Artificial Sequence
  Synthetic oligonucleotide
ggatagtcaggactaagccgcggacgtttc

SEQ ID NO: 188740 - DNA, 30 bp, Artificial Sequence
  Synthetic oligonucleotide
tgggggcgcgcgttaaactgtggccgtttc

SEQ ID NO: 188741 - DNA, 30 bp, Artificial Sequence
  Synthetic oligonucleotide
gtctcgtatccctacgtttaccaaggtttc

SEQ ID NO: 188742 - DNA, 30 bp, Artificial Sequence
  Synthetic oligonucleotide
accgctaggacacggcctgataccggtttc

SEQ ID NO: 188743 - DNA, 30 bp, Artificial Sequence
  Synthetic oligonucleotide
agagaataatattgtatttcgttcggtttc

SEQ ID NO: 188744 - DNA, 30 bp, Artificial Sequence
  Synthetic oligonucleotide
tccaggagttgacaataccaaccgggtttc

SEQ ID NO: 188745 - DNA, 30 bp, Artificial Sequence
  Synthetic oligonucleotide
cgacgacgatgaagctggtttgttggtttc

SEQ ID NO: 188746 - DNA, 30 bp, Artificial Sequence
  Synthetic oligonucleotide
agtgtaagatagcaatgagtaaaatgtttc

SEQ ID NO: 188747 - DNA, 30 bp, Artificial Sequence
  Synthetic oligonucleotide
actctggctgacaatgatactagatgtttc

SEQ ID NO: 188748 - DNA, 30 bp, Artificial Sequence
  Synthetic oligonucleotide
aggcatcgaggatttgacaggggctgtttc

SEQ ID NO: 188749 - DNA, 30 bp, Artificial Sequence
  Synthetic oligonucleotide
aggcaagaggttcaggatcgagggtgtttc

SEQ ID NO: 188750 - DNA, 30 bp, Artificial Sequence
  Synthetic oligonucleotide
aacttgagctgacaacccgaagacattttc

SEQ ID NO: 188751 - DNA, 30 bp, Artificial Sequence
  Synthetic oligonucleotide
ggtcaacgccaagaaaactcaaagattttc

SEQ ID NO: 188752 - DNA, 30 bp, Artificial Sequence
  Synthetic oligonucleotide
cagcttactgtccagggcattatgattttc

SEQ ID NO: 188753 - DNA, 30 bp, Artificial Sequence
  Synthetic oligonucleotide
cgttataatggtggattgattatagttttc

SEQ ID NO: 188754 - DNA, 30 bp, Artificial Sequence
  Synthetic oligonucleotide
gaggtgcgggctcgtgagcaaggctttttc

SEQ ID NO: 188755 - DNA, 30 bp, Artificial Sequence
  Synthetic oligonucleotide
ccataaggtcgtaagcgcggacgcaaaaag

SEQ ID NO: 188756 - DNA, 30 bp, Artificial Sequence
  Synthetic oligonucleotide
tggagtaatcagcggtggacaaagaaaaag

SEQ ID NO: 188757 - DNA, 30 bp, Artificial Sequence
  Synthetic oligonucleotide
gaaataatagaggttggagagaggaaaaag

SEQ ID NO: 188758 - DNA, 30 bp, Artificial Sequence
  Synthetic oligonucleotide
ggtttggcgcgccgaccaactaaccaaaag

SEQ ID NO: 188759 - DNA, 30 bp, Artificial Sequence
  Synthetic oligonucleotide
cagggtaacgggcttctggtacaccaaaag

SEQ ID NO: 188760 - DNA, 30 bp, Artificial Sequence
  Synthetic oligonucleotide
gtccgcaggaaccgttgtgggacccaaaag

SEQ ID NO: 188761 - DNA, 30 bp, Artificial Sequence
  Synthetic oligonucleotide
tactgtaagaggtgacttaatatccaaaag

SEQ ID NO: 188762 - DNA, 30 bp, Artificial Sequence
  Synthetic oligonucleotide
gaaaaaaaaggatcggagtagtagcaaaag

SEQ ID NO: 188763 - DNA, 30 bp, Artificial Sequence
  Synthetic oligonucleotide
ttgggccactctctggctgagcaagaaaag

SEQ ID NO: 188764 - DNA, 30 bp, Artificial Sequence
  Synthetic oligonucleotide
aaacgctactccagagagttccgagaaaag

SEQ ID NO: 188765 - DNA, 30 bp, Artificial Sequence
  Synthetic oligonucleotide
attagtggttgaggaacggaacaggaaaag

SEQ ID NO: 188766 - DNA, 30 bp, Artificial Sequence
  Synthetic oligonucleotide
aatgaggaatgtttagggtattcggaaaag

SEQ ID NO: 188767 - DNA, 30 bp, Artificial Sequence
  Synthetic oligonucleotide
tactctaatcgatatccgatacatgaaaag

SEQ ID NO: 188768 - DNA, 30 bp, Artificial Sequence
  Synthetic oligonucleotide
cccctgtgagccagggtgtagtatgaaaag

SEQ ID NO: 188769 - DNA, 30 bp, Artificial Sequence
  Synthetic oligonucleotide
aacgaccataagtagacgcaaacataaaag

SEQ ID NO: 188770 - DNA, 30 bp, Artificial Sequence
  Synthetic oligonucleotide
tctatacaatcacgggtataatcataaaag

SEQ ID NO: 188771 - DNA, 30 bp, Artificial Sequence
  Synthetic oligonucleotide
cgcgaagactataaaggggggggataaaag

SEQ ID NO: 188772 - DNA, 30 bp, Artificial Sequence
  Synthetic oligonucleotide
tctaaacgtagtggcgagcttctataaaag

SEQ ID NO: 188773 - DNA, 30 bp, Artificial Sequence
  Synthetic oligonucleotide
accattgcaatgtggacttcagagtaaaag

SEQ ID NO: 188774 - DNA, 30 bp, Artificial Sequence
  Synthetic oligonucleotide
gcacgttgagagagagaatcagattaaaag

SEQ ID NO: 188775 - DNA, 30 bp, Artificial Sequence
  Synthetic oligonucleotide
ggaagtatcgcactgcaccagggttaaaag

SEQ ID NO: 188776 - DNA, 30 bp, Artificial Sequence
  Synthetic oligonucleotide
ataaagtgttaacgggacaccggaacaaag

SEQ ID NO: 188777 - DNA, 30 bp, Artificial Sequence
  Synthetic oligonucleotide
aacacgtgggttaggataacaaagacaaag

SEQ ID NO: 188778 - DNA, 30 bp, Artificial Sequence
  Synthetic oligonucleotide
ctcacgacagtgagttccgccgcgacaaag

SEQ ID NO: 188779 - DNA, 30 bp, Artificial Sequence
  Synthetic oligonucleotide
gcaatggctgatttttcgtccgcgacaaag

SEQ ID NO: 188780 - DNA, 30 bp, Artificial Sequence
  Synthetic oligonucleotide
atgacatgccgggatggacacgtgacaaag

SEQ ID NO: 188781 - DNA, 30 bp, Artificial Sequence
  Synthetic oligonucleotide
gatttgaggtaggccctacattgaccaaag

SEQ ID NO: 188782 - DNA, 30 bp, Artificial Sequence
  Synthetic oligonucleotide
cggccacgggggttacgacatgtaccaaag

SEQ ID NO: 188783 - DNA, 29 bp, Artificial Sequence
  Synthetic oligonucleotide
agctctacgccagcgagaaaaacccaaag

SEQ ID NO: 188784 - DNA, 30 bp, Artificial Sequence
  Synthetic oligonucleotide
ccagcacgggggatctagaaggagccaaag

SEQ ID NO: 188785 - DNA, 30 bp, Artificial Sequence
  Synthetic oligonucleotide
actgagttgcttgaaggctactctccaaag

SEQ ID NO: 188786 - DNA, 30 bp, Artificial Sequence
  Synthetic oligonucleotide
caggtgagagcggcgttgggttgagcaaag

SEQ ID NO: 188787 - DNA, 30 bp, Artificial Sequence
  Synthetic oligonucleotide
ctctgggtcaaaagaaggagctccgcaaag

SEQ ID NO: 188788 - DNA, 30 bp, Artificial Sequence
  Synthetic oligonucleotide
ctacccgcagaaggattctagtgtgcaaag

SEQ ID NO: 188789 - DNA, 30 bp, Artificial Sequence
  Synthetic oligonucleotide
gcaacacacgctgcgtgtcgtcaatcaaag

SEQ ID NO: 188790 - DNA, 30 bp, Artificial Sequence
  Synthetic oligonucleotide
cgcctatgctcacccaagttcaagtcaaag

SEQ ID NO: 188791 - DNA, 30 bp, Artificial Sequence
  Synthetic oligonucleotide
cagagacagtcacggggtagagagtcaaag

SEQ ID NO: 188792 - DNA, 30 bp, Artificial Sequence
  Synthetic oligonucleotide
cacggagtacggagctacatatattcaaag

SEQ ID NO: 188793 - DNA, 30 bp, Artificial Sequence
  Synthetic oligonucleotide
gtcgacggcgattaacgctactattcaaag

SEQ ID NO: 188794 - DNA, 30 bp, Artificial Sequence
  Synthetic oligonucleotide
caataatacaatgctagtatgagttcaaag

SEQ ID NO: 188795 - DNA, 30 bp, Artificial Sequence
  Synthetic oligonucleotide
accgtgaatgtgggggtttggaccagaaag

SEQ ID NO: 188796 - DNA, 30 bp, Artificial Sequence
  Synthetic oligonucleotide
aattaaggatgaggtgtctattgcagaaag

SEQ ID NO: 188797 - DNA, 30 bp, Artificial Sequence
  Synthetic oligonucleotide
aataatacaaagctttgacctaagagaaag

SEQ ID NO: 188798 - DNA, 30 bp, Artificial Sequence
  Synthetic oligonucleotide
gcgcctttagggtcggaaagcgggagaaag

SEQ ID NO: 188799 - DNA, 31 bp, Artificial Sequence
  Synthetic oligonucleotide
ccccgggtaggcttgtactctgaaacgaaag

SEQ ID NO: 188800 - DNA, 30 bp, Artificial Sequence
  Synthetic oligonucleotide
aatctgctgggcaccgctacggcacgaaag

SEQ ID NO: 188801 - DNA, 30 bp, Artificial Sequence
  Synthetic oligonucleotide
cctgcggcgacggtcacctatgcacgaaag

SEQ ID NO: 188802 - DNA, 30 bp, Artificial Sequence
  Synthetic oligonucleotide
cgtccctctgccgagacatgtgtacgaaag

SEQ ID NO: 188803 - DNA, 30 bp, Artificial Sequence
  Synthetic oligonucleotide
ctgcagggaaccgctgtttatccccgaaag

SEQ ID NO: 188804 - DNA, 30 bp, Artificial Sequence
  Synthetic oligonucleotide
gtggaattccaaaacagcataaagcgaaag

SEQ ID NO: 188805 - DNA, 30 bp, Artificial Sequence
  Synthetic oligonucleotide
gggataatctagacacatggtaaaggaaag

SEQ ID NO: 188806 - DNA, 30 bp, Artificial Sequence
  Synthetic oligonucleotide
gctgtggaccggtataccgcgcaaggaaag

SEQ ID NO: 188807 - DNA, 30 bp, Artificial Sequence
  Synthetic oligonucleotide
gcttacataaggagagttcatctaggaaag

SEQ ID NO: 188808 - DNA, 30 bp, Artificial Sequence
  Synthetic oligonucleotide
ggtgtttagggtttatgttggatcggaaag

SEQ ID NO: 188809 - DNA, 30 bp, Artificial Sequence
  Synthetic oligonucleotide
tgccgtttgcaatggtccgtcgtcggaaag

SEQ ID NO: 188810 - DNA, 30 bp, Artificial Sequence
  Synthetic oligonucleotide
ggactgggagaccgctggggattcggaaag

SEQ ID NO: 188811 - DNA, 30 bp, Artificial Sequence
  Synthetic oligonucleotide
aggatccaagtcgctgcgacactctgaaag

SEQ ID NO: 188812 - DNA, 30 bp, Artificial Sequence
  Synthetic oligonucleotide
ctctctcaacatttgataacagcgtgaaag

SEQ ID NO: 188813 - DNA, 30 bp, Artificial Sequence
  Synthetic oligonucleotide
tctagggtacgcggaaagttccggtgaaag

SEQ ID NO: 188814 - DNA, 30 bp, Artificial Sequence
  Synthetic oligonucleotide
tacatgcattgtaactggattcggtgaaag

SEQ ID NO: 188815 - DNA, 30 bp, Artificial Sequence
  Synthetic oligonucleotide
attaggccaagcacgtcgtctctcataaag

SEQ ID NO: 188816 - DNA, 30 bp, Artificial Sequence
  Synthetic oligonucleotide
tcaaacagcccattatccgcgccgataaag

SEQ ID NO: 188817 - DNA, 30 bp, Artificial Sequence
  Synthetic oligonucleotide
tacgattacacagtagagaaacaactaaag

SEQ ID NO: 188818 - DNA, 30 bp, Artificial Sequence
  Synthetic oligonucleotide
ggaattaaccattgtatagagacactaaag

SEQ ID NO: 188819 - DNA, 30 bp, Artificial Sequence
  Synthetic oligonucleotide
cagtggtacttagtggagccaggcctaaag

SEQ ID NO: 188820 - DNA, 30 bp, Artificial Sequence
  Synthetic oligonucleotide
taaccgactgttgcgtgttggcatctaaag

SEQ ID NO: 188821 - DNA, 30 bp, Artificial Sequence
  Synthetic oligonucleotide
actacgttgttgggacgaaatgaagtaaag

SEQ ID NO: 188822 - DNA, 30 bp, Artificial Sequence
  Synthetic oligonucleotide
ggacgagattgttttttttacgtagtaaag

SEQ ID NO: 188823 - DNA, 30 bp, Artificial Sequence
  Synthetic oligonucleotide
tttcaacagccaacagtctaactcgtaaag

SEQ ID NO: 188824 - DNA, 30 bp, Artificial Sequence
  Synthetic oligonucleotide
gcatatggtccatggcggggcgaggtaaag

SEQ ID NO: 188825 - DNA, 30 bp, Artificial Sequence
  Synthetic oligonucleotide
ccaaaaggaccatcaaacgagttggtaaag

SEQ ID NO: 188826 - DNA, 30 bp, Artificial Sequence
  Synthetic oligonucleotide
ggcaggattggtataataggcattgtaaag

SEQ ID NO: 188827 - DNA, 30 bp, Artificial Sequence
  Synthetic oligonucleotide
gagctagtgatttatgaacttaccttaaag

SEQ ID NO: 188828 - DNA, 30 bp, Artificial Sequence
  Synthetic oligonucleotide
tgcactgcacactgcgatcatggcttaaag

SEQ ID NO: 188829 - DNA, 30 bp, Artificial Sequence
  Synthetic oligonucleotide
tcggcagataacgaataaagggtcttaaag

SEQ ID NO: 188830 - DNA, 30 bp, Artificial Sequence
  Synthetic oligonucleotide
tggctgaggctggacactctgaccaacaag

SEQ ID NO: 188831 - DNA, 30 bp, Artificial Sequence
  Synthetic oligonucleotide
atactagtgatgggagatctcatcaacaag

SEQ ID NO: 188832 - DNA, 30 bp, Artificial Sequence
  Synthetic oligonucleotide
cgggtcattttcccaaaataggtcaacaag

SEQ ID NO: 188833 - DNA, 30 bp, Artificial Sequence
  Synthetic oligonucleotide
aaactacaaaggcccttcagcaaacacaag

SEQ ID NO: 188834 - DNA, 30 bp, Artificial Sequence
  Synthetic oligonucleotide
acaatttcacacccatccggcgaacacaag

SEQ ID NO: 188835 - DNA, 30 bp, Artificial Sequence
  Synthetic oligonucleotide
agggcttatcctttgagcgctcgacacaag

SEQ ID NO: 188836 - DNA, 30 bp, Artificial Sequence
  Synthetic oligonucleotide
aggagtcaagaattcccgggtacccacaag

SEQ ID NO: 188837 - DNA, 30 bp, Artificial Sequence
  Synthetic oligonucleotide
cgctctacttcgcggtcaagtggccacaag

SEQ ID NO: 188838 - DNA, 30 bp, Artificial Sequence
  Synthetic oligonucleotide
tgggtcgacggattttggagcttgcacaag

SEQ ID NO: 188839 - DNA, 30 bp, Artificial Sequence
  Synthetic oligonucleotide
gccgcctccttatctggaaatgctcacaag

SEQ ID NO: 188840 - DNA, 30 bp, Artificial Sequence
  Synthetic oligonucleotide
cagattccatggctagttactcgtcacaag

SEQ ID NO: 188841 - DNA, 30 bp, Artificial Sequence
  Synthetic oligonucleotide
tccatcaattatgggattgagagagacaag

SEQ ID NO: 188842 - DNA, 30 bp, Artificial Sequence
  Synthetic oligonucleotide
gatctagaccgtggtatgctaatcgacaag

SEQ ID NO: 188843 - DNA, 30 bp, Artificial Sequence
  Synthetic oligonucleotide
ctagtttgtaaacaccatggatcggacaag

SEQ ID NO: 188844 - DNA, 30 bp, Artificial Sequence
  Synthetic oligonucleotide
tgtcctgccacagcaggcatatgggacaag

SEQ ID NO: 188845 - DNA, 30 bp, Artificial Sequence
  Synthetic oligonucleotide
gaccctcagcggtaacgcgattgtgacaag

SEQ ID NO: 188846 - DNA, 30 bp, Artificial Sequence
  Synthetic oligonucleotide
atcaatattacggggacatgagactacaag

SEQ ID NO: 188847 - DNA, 30 bp, Artificial Sequence
  Synthetic oligonucleotide
caagtagtttgacactaacacacgtacaag

SEQ ID NO: 188848 - DNA, 30 bp, Artificial Sequence
  Synthetic oligonucleotide
ttggtctacggctatcgtggacggtacaag

SEQ ID NO: 188849 - DNA, 30 bp, Artificial Sequence
  Synthetic oligonucleotide
ataaccactcattaaaaaaacaaaaccaag

SEQ ID NO: 188850 - DNA, 30 bp, Artificial Sequence
  Synthetic oligonucleotide
atgaataagagtgggatacccggcaccaag

SEQ ID NO: 188851 - DNA, 30 bp, Artificial Sequence
  Synthetic oligonucleotide
ccacagagaatacgcaggattacgaccaag

SEQ ID NO: 188852 - DNA, 30 bp, Artificial Sequence
  Synthetic oligonucleotide
attatcggaactctttgttgatttaccaag

SEQ ID NO: 188853 - DNA, 30 bp, Artificial Sequence
  Synthetic oligonucleotide
tagcgatgtattatgacgtgatagcccaag

SEQ ID NO: 188854 - DNA, 30 bp, Artificial Sequence
  Synthetic oligonucleotide
gatgtgtgatgagttgaatgccggcccaag

SEQ ID NO: 188855 - DNA, 30 bp, Artificial Sequence
  Synthetic oligonucleotide
gcgcagggcctatgcaaacaactgcccaag

SEQ ID NO: 188856 - DNA, 30 bp, Artificial Sequence
  Synthetic oligonucleotide
aagcggggcttagaataataccgcgccaag

SEQ ID NO: 188857 - DNA, 30 bp, Artificial Sequence
  Synthetic oligonucleotide
aagccaatttggctccaacactgcgccaag

SEQ ID NO: 188858 - DNA, 30 bp, Artificial Sequence
  Synthetic oligonucleotide
tgggactactgtgcgcgatgcccggccaag

SEQ ID NO: 188859 - DNA, 30 bp, Artificial Sequence
  Synthetic oligonucleotide
aatgctatgcgcttagcaaatttggccaag

SEQ ID NO: 188860 - DNA, 30 bp, Artificial Sequence
  Synthetic oligonucleotide
agatttggaagattcgacataattgccaag

SEQ ID NO: 188861 - DNA, 30 bp, Artificial Sequence
  Synthetic oligonucleotide
cttatgcaggctgtgggtcaaacatccaag

SEQ ID NO: 188862 - DNA, 30 bp, Artificial Sequence
  Synthetic oligonucleotide
gttaaaaatgcgagtcaaggctcaagcaag

SEQ ID NO: 188863 - DNA, 30 bp, Artificial Sequence
  Synthetic oligonucleotide
gctgcgtttctcatgggctgctagagcaag

SEQ ID NO: 188864 - DNA, 30 bp, Artificial Sequence
  Synthetic oligonucleotide
gacgtatgtacatatgctgcgcggagcaag

SEQ ID NO: 188865 - DNA, 30 bp, Artificial Sequence
  Synthetic oligonucleotide
ttcatggcgttaaaatctaaacttagcaag

SEQ ID NO: 188866 - DNA, 30 bp, Artificial Sequence
  Synthetic oligonucleotide
acagcttgttgacagcgcgtagaacgcaag

SEQ ID NO: 188867 - DNA, 30 bp, Artificial Sequence
  Synthetic oligonucleotide
ttgtgcgtgagcttatgtgggtaacgcaag

SEQ ID NO: 188868 - DNA, 30 bp, Artificial Sequence
  Synthetic oligonucleotide
ggctaataagatggacgccagagacgcaag

SEQ ID NO: 188869 - DNA, 30 bp, Artificial Sequence
  Synthetic oligonucleotide
cggcaaaatccattttataaggtccgcaag

SEQ ID NO: 188870 - DNA, 30 bp, Artificial Sequence
  Synthetic oligonucleotide
agggggaaatcaaatgatgttatgcgcaag

SEQ ID NO: 188871 - DNA, 30 bp, Artificial Sequence
  Synthetic oligonucleotide
caatgatgccacaaggggcataatcgcaag

SEQ ID NO: 188872 - DNA, 30 bp, Artificial Sequence
  Synthetic oligonucleotide
tcccgtcgaagtgtgggtcaacctcgcaag

SEQ ID NO: 188873 - DNA, 30 bp, Artificial Sequence
  Synthetic oligonucleotide
aggggcgaggcattatggacccctcgcaag

SEQ ID NO: 188874 - DNA, 30 bp, Artificial Sequence
  Synthetic oligonucleotide
gctacaaagctgtgggcatagattcgcaag

SEQ ID NO: 188875 - DNA, 30 bp, Artificial Sequence
  Synthetic oligonucleotide
gcatccagagtaagcaactttccaggcaag

SEQ ID NO: 188876 - DNA, 30 bp, Artificial Sequence
  Synthetic oligonucleotide
aaacaatagggtcggctcgaatcaggcaag

SEQ ID NO: 188877 - DNA, 30 bp, Artificial Sequence
  Synthetic oligonucleotide
tgatgtggataatgtaagggagacggcaag

SEQ ID NO: 188878 - DNA, 30 bp, Artificial Sequence
  Synthetic oligonucleotide
ctgccgctcagatctttcgtctacggcaag

SEQ ID NO: 188879 - DNA, 30 bp, Artificial Sequence
  Synthetic oligonucleotide
actcccagcgtgtgagacggtaccggcaag

SEQ ID NO: 188880 - DNA, 30 bp, Artificial Sequence
  Synthetic oligonucleotide
cataggttcaaactatccgcgcgcggcaag

SEQ ID NO: 188881 - DNA, 30 bp, Artificial Sequence
  Synthetic oligonucleotide
cggaccgcgtcatcgacggggtttggcaag

SEQ ID NO: 188882 - DNA, 30 bp, Artificial Sequence
  Synthetic oligonucleotide
gtgggttaggctgacaagcgatcctgcaag

SEQ ID NO: 188883 - DNA, 30 bp, Artificial Sequence
  Synthetic oligonucleotide
ctgtgcggggcatcctttcccgcgtgcaag

SEQ ID NO: 188884 - DNA, 30 bp, Artificial Sequence
  Synthetic oligonucleotide
ttcctccctgcgtccgatgaatcaatcaag

SEQ ID NO: 188885 - DNA, 29 bp, Artificial Sequence
  Synthetic oligonucleotide
taaaggagcgggataaccgcagaatcaag

SEQ ID NO: 188886 - DNA, 30 bp, Artificial Sequence
  Synthetic oligonucleotide
ttctcgaggctgacaaaggcgcgcatcaag

SEQ ID NO: 188887 - DNA, 30 bp, Artificial Sequence
  Synthetic oligonucleotide
gtcacgtctgacttttcaggattcatcaag

SEQ ID NO: 188888 - DNA, 30 bp, Artificial Sequence
  Synthetic oligonucleotide
cataaacaaactgtgtccatctggatcaag

SEQ ID NO: 188889 - DNA, 30 bp, Artificial Sequence
  Synthetic oligonucleotide
agtgtgtgaatagcgcgatgttctatcaag

SEQ ID NO: 188890 - DNA, 30 bp, Artificial Sequence
  Synthetic oligonucleotide
ctataccgatttacaggactgggtatcaag

SEQ ID NO: 188891 - DNA, 30 bp, Artificial Sequence
  Synthetic oligonucleotide
cggtgactgagggtattcccacttatcaag

SEQ ID NO: 188892 - DNA, 30 bp, Artificial Sequence
  Synthetic oligonucleotide
gccttccaatagaagatgaggagactcaag

SEQ ID NO: 188893 - DNA, 30 bp, Artificial Sequence
  Synthetic oligonucleotide
acgaccgtgccagggcttctcgacctcaag

SEQ ID NO: 188894 - DNA, 30 bp, Artificial Sequence
  Synthetic oligonucleotide
cctaaagtcaattgtccaattaggctcaag

SEQ ID NO: 188895 - DNA, 30 bp, Artificial Sequence
  Synthetic oligonucleotide
gcccaggacataatggagttcttgctcaag

SEQ ID NO: 188896 - DNA, 30 bp, Artificial Sequence
  Synthetic oligonucleotide
caatgttgccatacagaaacggatctcaag

SEQ ID NO: 188897 - DNA, 30 bp, Artificial Sequence
  Synthetic oligonucleotide
tatacattcacatgggaacgcttagtcaag

SEQ ID NO: 188898 - DNA, 30 bp, Artificial Sequence
  Synthetic oligonucleotide
gcatcacaatgagaatcaaaaatggtcaag

SEQ ID NO: 188899 - DNA, 30 bp, Artificial Sequence
  Synthetic oligonucleotide
taaagttcgcgaacaagtatcttggtcaag

SEQ ID NO: 188900 - DNA, 30 bp, Artificial Sequence
  Synthetic oligonucleotide
aaagtcacaaggacatagaattctgtcaag

SEQ ID NO: 188901 - DNA, 30 bp, Artificial Sequence
  Synthetic oligonucleotide
atctacaacttctggcttagaccattcaag

SEQ ID NO: 188902 - DNA, 30 bp, Artificial Sequence
  Synthetic oligonucleotide
aagtgtcaaccagaatctataggattcaag

SEQ ID NO: 188903 - DNA, 30 bp, Artificial Sequence
  Synthetic oligonucleotide
tttcttaaggctacacgcaagggattcaag

SEQ ID NO: 188904 - DNA, 30 bp, Artificial Sequence
  Synthetic oligonucleotide
ctgtaggtgggtcggatggggatattcaag

SEQ ID NO: 188905 - DNA, 30 bp, Artificial Sequence
  Synthetic oligonucleotide
aatggctgacgtcggggtatggacttcaag

SEQ ID NO: 188906 - DNA, 30 bp, Artificial Sequence
  Synthetic oligonucleotide
gactgcgaataaattgtcactctcttcaag

SEQ ID NO: 188907 - DNA, 30 bp, Artificial Sequence
  Synthetic oligonucleotide
tactaaagaaaagcaatacacaagttcaag

SEQ ID NO: 188908 - DNA, 30 bp, Artificial Sequence
  Synthetic oligonucleotide
catttagtggtccacaggatatatttcaag

SEQ ID NO: 188909 - DNA, 30 bp, Artificial Sequence
  Synthetic oligonucleotide
tcgaaagactccgctttgatcaaaaagaag

SEQ ID NO: 188910 - DNA, 30 bp, Artificial Sequence
  Synthetic oligonucleotide
ggcccacaatgttgttgacacctaaagaag

SEQ ID NO: 188911 - DNA, 30 bp, Artificial Sequence
  Synthetic oligonucleotide
tccgcagttcggagatatacctgcaagaag

SEQ ID NO: 188912 - DNA, 30 bp, Artificial Sequence
  Synthetic oligonucleotide
tggagttacgataatggaaggctcaagaag

SEQ ID NO: 188913 - DNA, 30 bp, Artificial Sequence
  Synthetic oligonucleotide
gaactggggagagcgataaggccgaagaag

SEQ ID NO: 188914 - DNA, 30 bp, Artificial Sequence
  Synthetic oligonucleotide
ttttggccattacgtactatgtggaagaag

SEQ ID NO: 188915 - DNA, 30 bp, Artificial Sequence
  Synthetic oligonucleotide
tctccataaactaagcggaatttgaagaag

SEQ ID NO: 188916 - DNA, 30 bp, Artificial Sequence
  Synthetic oligonucleotide
tgtatcacagggaagcgatataataagaag

SEQ ID NO: 188917 - DNA, 30 bp, Artificial Sequence
  Synthetic oligonucleotide
ccaggattgttataaactggtgtccagaag

SEQ ID NO: 188918 - DNA, 30 bp, Artificial Sequence
  Synthetic oligonucleotide
gccaattggcgcaaactctaatatcagaag

SEQ ID NO: 188919 - DNA, 30 bp, Artificial Sequence
  Synthetic oligonucleotide
gatacgcttgtctcgtgaaacagtcagaag

SEQ ID NO: 188920 - DNA, 30 bp, Artificial Sequence
  Synthetic oligonucleotide
tacttccgagtagggggatacgccgagaag

SEQ ID NO: 188921 - DNA, 30 bp, Artificial Sequence
  Synthetic oligonucleotide
gaggccctggggctgacggttaaggagaag

SEQ ID NO: 188922 - DNA, 30 bp, Artificial Sequence
  Synthetic oligonucleotide
aagcaagaggcctgacatatttatgagaag

SEQ ID NO: 188923 - DNA, 30 bp, Artificial Sequence
  Synthetic oligonucleotide
ctccgaatgtacggaatgaccattgagaag

SEQ ID NO: 188924 - DNA, 30 bp, Artificial Sequence
  Synthetic oligonucleotide
gatttgttgagcatgatcgaagttgagaag

SEQ ID NO: 188925 - DNA, 30 bp, Artificial Sequence
  Synthetic oligonucleotide
gcagcgcgctcggcgtcataggttgagaag

SEQ ID NO: 188926 - DNA, 30 bp, Artificial Sequence
  Synthetic oligonucleotide
cgcagcagggttcaaacgaggtcctagaag

SEQ ID NO: 188927 - DNA, 30 bp, Artificial Sequence
  Synthetic oligonucleotide
acagtagttagcaacactccgtgctagaag

SEQ ID NO: 188928 - DNA, 30 bp, Artificial Sequence
  Synthetic oligonucleotide
cactgagtttcattcagcgcataaacgaag

SEQ ID NO: 188929 - DNA, 30 bp, Artificial Sequence
  Synthetic oligonucleotide
ctaggactatatttacagagggacacgaag

SEQ ID NO: 188930 - DNA, 30 bp, Artificial Sequence
  Synthetic oligonucleotide
acccgtctttgaatggaatattaaccgaag

SEQ ID NO: 188931 - DNA, 31 bp, Artificial Sequence
  Synthetic oligonucleotide
caatgttaaacgcttgcagtttagaccgaag

SEQ ID NO: 188932 - DNA, 30 bp, Artificial Sequence
  Synthetic oligonucleotide
gagtctaaaagaattacgttcgaagcgaag

SEQ ID NO: 188933 - DNA, 30 bp, Artificial Sequence
  Synthetic oligonucleotide
gtatttccatgctcagctaggtcagcgaag

SEQ ID NO: 188934 - DNA, 30 bp, Artificial Sequence
  Synthetic oligonucleotide
ttggtattgttgatgagataacgagcgaag

SEQ ID NO: 188935 - DNA, 30 bp, Artificial Sequence
  Synthetic oligonucleotide
aactcgatggataagcgttttcgagcgaag

SEQ ID NO: 188936 - DNA, 30 bp, Artificial Sequence
  Synthetic oligonucleotide
ctagggcttgggtaatggtgagtagcgaag

SEQ ID NO: 188937 - DNA, 30 bp, Artificial Sequence
  Synthetic oligonucleotide
cactatatattggaaatggataacgcgaag

SEQ ID NO: 188938 - DNA, 30 bp, Artificial Sequence
  Synthetic oligonucleotide
caataaccattatttctaatggtcgcgaag

SEQ ID NO: 188939 - DNA, 30 bp, Artificial Sequence
  Synthetic oligonucleotide
gggattgtcataaggagtaacacggcgaag

SEQ ID NO: 188940 - DNA, 30 bp, Artificial Sequence
  Synthetic oligonucleotide
acttgccaatgctatgactagttggcgaag

SEQ ID NO: 188941 - DNA, 30 bp, Artificial Sequence
  Synthetic oligonucleotide
ttacgtgagggagacagcttcgatgcgaag

SEQ ID NO: 188942 - DNA, 30 bp, Artificial Sequence
  Synthetic oligonucleotide
tcattatgatatacggtcaagcttgcgaag

SEQ ID NO: 188943 - DNA, 30 bp, Artificial Sequence
  Synthetic oligonucleotide
ctgacagttaatgccttgtcccaatcgaag

SEQ ID NO: 188944 - DNA, 30 bp, Artificial Sequence
  Synthetic oligonucleotide
ttatcaaggcttatacagacccagtcgaag

SEQ ID NO: 188945 - DNA, 30 bp, Artificial Sequence
  Synthetic oligonucleotide
gttagcggtggttcctaaagaatttcgaag

SEQ ID NO: 188946 - DNA, 30 bp, Artificial Sequence
  Synthetic oligonucleotide
cttgctagcatgtgtttttatcaaaggaag

SEQ ID NO: 188947 - DNA, 30 bp, Artificial Sequence
  Synthetic oligonucleotide
agctcatcccttccaattcctggaaggaag

SEQ ID NO: 188948 - DNA, 30 bp, Artificial Sequence
  Synthetic oligonucleotide
agcgactgagtcagcaggggatataggaag

SEQ ID NO: 188949 - DNA, 30 bp, Artificial Sequence
  Synthetic oligonucleotide
agaagaactttatgtacagcaattaggaag

SEQ ID NO: 188950 - DNA, 30 bp, Artificial Sequence
  Synthetic oligonucleotide
aacgggacagagggttcaaggcaacggaag

SEQ ID NO: 188951 - DNA, 30 bp, Artificial Sequence
  Synthetic oligonucleotide
cttcacctggactctccctggcaacggaag

SEQ ID NO: 188952 - DNA, 30 bp, Artificial Sequence
  Synthetic oligonucleotide
ctccgaatgcggtcggatagggggcggaag

SEQ ID NO: 188953 - DNA, 30 bp, Artificial Sequence
  Synthetic oligonucleotide
ggaaatatcaataagatctttctgcggaag

SEQ ID NO: 188954 - DNA, 30 bp, Artificial Sequence
  Synthetic oligonucleotide
tgccaggcatgcttacttatagcagggaag

SEQ ID NO: 188955 - DNA, 30 bp, Artificial Sequence
  Synthetic oligonucleotide
tcttattaaggagtatgactcggagggaag

SEQ ID NO: 188956 - DNA, 30 bp, Artificial Sequence
  Synthetic oligonucleotide
aaaggaatctatgagacggtgctagggaag

SEQ ID NO: 188957 - DNA, 30 bp, Artificial Sequence
  Synthetic oligonucleotide
aggtttttacattcgaggtgcaccgggaag

SEQ ID NO: 188958 - DNA, 30 bp, Artificial Sequence
  Synthetic oligonucleotide
cccattcccgcggaccagattgccgggaag

SEQ ID NO: 188959 - DNA, 30 bp, Artificial Sequence
  Synthetic oligonucleotide
ggagcgttgcatggttggcgataggggaag

SEQ ID NO: 188960 - DNA, 30 bp, Artificial Sequence
  Synthetic oligonucleotide
agagttccaatagtctcccgtgtggggaag

SEQ ID NO: 188961 - DNA, 30 bp, Artificial Sequence
  Synthetic oligonucleotide
tgcacggaaccaaagaaagatgttgggaag

SEQ ID NO: 188962 - DNA, 30 bp, Artificial Sequence
  Synthetic oligonucleotide
gacggtgcaggaactgggatctttgggaag

SEQ ID NO: 188963 - DNA, 30 bp, Artificial Sequence
  Synthetic oligonucleotide
aatcttgagtctcagcggaggctatggaag

SEQ ID NO: 188964 - DNA, 30 bp, Artificial Sequence
  Synthetic oligonucleotide
tcgctcagtacagttagagttttctggaag

SEQ ID NO: 188965 - DNA, 30 bp, Artificial Sequence
  Synthetic oligonucleotide
ttcgcacatcggcaatcatagatgtggaag

SEQ ID NO: 188966 - DNA, 30 bp, Artificial Sequence
  Synthetic oligonucleotide
tccaatccagcggtattagaagtttggaag

SEQ ID NO: 188967 - DNA, 30 bp, Artificial Sequence
  Synthetic oligonucleotide
gtcgtaggacaggatgtgctgccaatgaag

SEQ ID NO: 188968 - DNA, 30 bp, Artificial Sequence
  Synthetic oligonucleotide
ggtcatttagggtcaaaagcttagatgaag

SEQ ID NO: 188969 - DNA, 30 bp, Artificial Sequence
  Synthetic oligonucleotide
ccagggaatacgtgaggttgttatatgaag

SEQ ID NO: 188970 - DNA, 30 bp, Artificial Sequence
  Synthetic oligonucleotide
tgtgacgaaacgacacgagtcactatgaag

SEQ ID NO: 188971 - DNA, 30 bp, Artificial Sequence
  Synthetic oligonucleotide
ggccccgatgctaattctcaaacactgaag

SEQ ID NO: 188972 - DNA, 30 bp, Artificial Sequence
  Synthetic oligonucleotide
ctacaagggccacacatggatagcctgaag

SEQ ID NO: 188973 - DNA, 30 bp, Artificial Sequence
  Synthetic oligonucleotide
gaagtacaaaccgaactgtgaattctgaag

SEQ ID NO: 188974 - DNA, 30 bp, Artificial Sequence
  Synthetic oligonucleotide
gtggatccttgtttctgggttgaagtgaag

SEQ ID NO: 188975 - DNA, 30 bp, Artificial Sequence
  Synthetic oligonucleotide
ggttccagtcgatacacaatgtccgtgaag

SEQ ID NO: 188976 - DNA, 30 bp, Artificial Sequence
  Synthetic oligonucleotide
gtccgcaacgccagagttgtttatgtgaag

SEQ ID NO: 188977 - DNA, 30 bp, Artificial Sequence
  Synthetic oligonucleotide
aaacgtaatctgatcgcctagcaattgaag

SEQ ID NO: 188978 - DNA, 30 bp, Artificial Sequence
  Synthetic oligonucleotide
agtagaccttaagtcgtttattcattgaag

SEQ ID NO: 188979 - DNA, 30 bp, Artificial Sequence
  Synthetic oligonucleotide
cgtccccgacatcacagtcaaatcttgaag

SEQ ID NO: 188980 - DNA, 30 bp, Artificial Sequence
  Synthetic oligonucleotide
agacacttggggggtaatcttatcttgaag

SEQ ID NO: 188981 - DNA, 30 bp, Artificial Sequence
  Synthetic oligonucleotide
ttacaaaggagcggatgtggcttcttgaag

SEQ ID NO: 188982 - DNA, 30 bp, Artificial Sequence
  Synthetic oligonucleotide
atgatgtgataggagactggagagttgaag

SEQ ID NO: 188983 - DNA, 30 bp, Artificial Sequence
  Synthetic oligonucleotide
tatggtactcatagagagattcggttgaag

SEQ ID NO: 188984 - DNA, 30 bp, Artificial Sequence
  Synthetic oligonucleotide
gcaccatcaccaaatggtgggcacaataag

SEQ ID NO: 188985 - DNA, 30 bp, Artificial Sequence
  Synthetic oligonucleotide
aatgatcaggtgatttctgcgtacaataag

SEQ ID NO: 188986 - DNA, 30 bp, Artificial Sequence
  Synthetic oligonucleotide
ggcacgcgcaaaatcactcagttgaataag

SEQ ID NO: 188987 - DNA, 30 bp, Artificial Sequence
  Synthetic oligonucleotide
gaatgaggccaggctgcggtagttcataag

SEQ ID NO: 188988 - DNA, 30 bp, Artificial Sequence
  Synthetic oligonucleotide
agccctcgatgcggacccgtcgttcataag

SEQ ID NO: 188989 - DNA, 30 bp, Artificial Sequence
  Synthetic oligonucleotide
tcttgtaccgtccaccacgtgctagataag

SEQ ID NO: 188990 - DNA, 30 bp, Artificial Sequence
  Synthetic oligonucleotide
cgctggacggaatcagaatgtaaggataag

SEQ ID NO: 188991 - DNA, 30 bp, Artificial Sequence
  Synthetic oligonucleotide
ttgatacatcctcggagtcctgtggataag

SEQ ID NO: 188992 - DNA, 30 bp, Artificial Sequence
  Synthetic oligonucleotide
aagacacgtatataagagtttcgtgataag

SEQ ID NO: 188993 - DNA, 30 bp, Artificial Sequence
  Synthetic oligonucleotide
gggcaccggactttatacacatgtgataag

SEQ ID NO: 188994 - DNA, 30 bp, Artificial Sequence
  Synthetic oligonucleotide
agttggctgtcagtaccattcttatataag

SEQ ID NO: 188995 - DNA, 30 bp, Artificial Sequence
  Synthetic oligonucleotide
gtttccaaaatcatgcgacatctgtataag

SEQ ID NO: 188996 - DNA, 30 bp, Artificial Sequence
  Synthetic oligonucleotide
tcgcagggtctcatgataatgaattataag

SEQ ID NO: 188997 - DNA, 30 bp, Artificial Sequence
  Synthetic oligonucleotide
agtgatctataggaagagtatgattataag

SEQ ID NO: 188998 - DNA, 30 bp, Artificial Sequence
  Synthetic oligonucleotide
tcaagggatacgatttaacgtctcactaag

SEQ ID NO: 188999 - DNA, 30 bp, Artificial Sequence
  Synthetic oligonucleotide
gccttcttaatattcttagagggtactaag

SEQ ID NO: 189000 - DNA, 30 bp, Artificial Sequence
  Synthetic oligonucleotide
agtaaattggtacgtaacgacattactaag

SEQ ID NO: 189001 - DNA, 30 bp, Artificial Sequence
  Synthetic oligonucleotide
tcggtgtaccgcgcatccgggttacctaag

SEQ ID NO: 189002 - DNA, 30 bp, Artificial Sequence
  Synthetic oligonucleotide
gtagttgtacagggcgtttcagtgcctaag

SEQ ID NO: 189003 - DNA, 30 bp, Artificial Sequence
  Synthetic oligonucleotide
gggattgcgaattaaaacttcggcgctaag

SEQ ID NO: 189004 - DNA, 30 bp, Artificial Sequence
  Synthetic oligonucleotide
ggcctatcctcctccatcgagattgctaag

SEQ ID NO: 189005 - DNA, 30 bp, Artificial Sequence
  Synthetic oligonucleotide
gatggtccaggatggtctttgacatctaag

SEQ ID NO: 189006 - DNA, 30 bp, Artificial Sequence
  Synthetic oligonucleotide
tgacatgacgggtgccatgatgtatctaag

SEQ ID NO: 189007 - DNA, 29 bp, Artificial Sequence
  Synthetic oligonucleotide
atcgaggtattagaatattcgattctaag

SEQ ID NO: 189008 - DNA, 30 bp, Artificial Sequence
  Synthetic oligonucleotide
tactccagacctgaggacacaaaaagtaag

SEQ ID NO: 189009 - DNA, 30 bp, Artificial Sequence
  Synthetic oligonucleotide
caaggtcctctgttgactacccaaagtaag

SEQ ID NO: 189010 - DNA, 30 bp, Artificial Sequence
  Synthetic oligonucleotide
gtggtctattacctaagggcctcaagtaag

SEQ ID NO: 189011 - DNA, 30 bp, Artificial Sequence
  Synthetic oligonucleotide
cgttccgaaatgggtggggttcgcagtaag

SEQ ID NO: 189012 - DNA, 30 bp, Artificial Sequence
  Synthetic oligonucleotide
aagcctgccggctaggagttactcagtaag

SEQ ID NO: 189013 - DNA, 30 bp, Artificial Sequence
  Synthetic oligonucleotide
tgtggaagagtcacttgatccgtcagtaag

SEQ ID NO: 189014 - DNA, 30 bp, Artificial Sequence
  Synthetic oligonucleotide
gaactgagctctggtctgaatttcagtaag

SEQ ID NO: 189015 - DNA, 30 bp, Artificial Sequence
  Synthetic oligonucleotide
atgaataggaggtaggctccaactagtaag

SEQ ID NO: 189016 - DNA, 30 bp, Artificial Sequence
  Synthetic oligonucleotide
ttcctggggcaaatgggtggccttagtaag

SEQ ID NO: 189017 - DNA, 30 bp, Artificial Sequence
  Synthetic oligonucleotide
tggtaattaccagttagcgcctttagtaag

SEQ ID NO: 189018 - DNA, 30 bp, Artificial Sequence
  Synthetic oligonucleotide
ttctgtctcgaaatgcgatataaacgtaag

SEQ ID NO: 189019 - DNA, 30 bp, Artificial Sequence
  Synthetic oligonucleotide
agcactgtggattttcggggcaaccgtaag

SEQ ID NO: 189020 - DNA, 30 bp, Artificial Sequence
  Synthetic oligonucleotide
ggttgaagccttgtcgcctaagtccgtaag

SEQ ID NO: 189021 - DNA, 30 bp, Artificial Sequence
  Synthetic oligonucleotide
taaaaaagggtagtgcggtaaccgcgtaag

SEQ ID NO: 189022 - DNA, 30 bp, Artificial Sequence
  Synthetic oligonucleotide
ctcgccagggctcttcaagcgtcgcgtaag

SEQ ID NO: 189023 - DNA, 30 bp, Artificial Sequence
  Synthetic oligonucleotide
ccagaactccttattacactgattcgtaag

SEQ ID NO: 189024 - DNA, 30 bp, Artificial Sequence
  Synthetic oligonucleotide
cgtcagataattctatatgcatgcggtaag

SEQ ID NO: 189025 - DNA, 30 bp, Artificial Sequence
  Synthetic oligonucleotide
acactagccttaagagtcccccagggtaag

SEQ ID NO: 189026 - DNA, 30 bp, Artificial Sequence
  Synthetic oligonucleotide
tgcaccagtatcctacctgttcatggtaag

SEQ ID NO: 189027 - DNA, 30 bp, Artificial Sequence
  Synthetic oligonucleotide
actaagaatgggttcgggctcctatgtaag

SEQ ID NO: 189028 - DNA, 30 bp, Artificial Sequence
  Synthetic oligonucleotide
aaatgagttagtggtggttgaggctgtaag

SEQ ID NO: 189029 - DNA, 30 bp, Artificial Sequence
  Synthetic oligonucleotide
atccaatgcatggaattccagacgtgtaag

SEQ ID NO: 189030 - DNA, 30 bp, Artificial Sequence
  Synthetic oligonucleotide
actgctgatccatgactggaccggtgtaag

SEQ ID NO: 189031 - DNA, 30 bp, Artificial Sequence
  Synthetic oligonucleotide
acgggtgcccccggatgttaaatgtgtaag

SEQ ID NO: 189032 - DNA, 30 bp, Artificial Sequence
  Synthetic oligonucleotide
gtctaaagtacgaaacagacactgtgtaag

SEQ ID NO: 189033 - DNA, 30 bp, Artificial Sequence
  Synthetic oligonucleotide
gttgcacggccagaataggctgattgtaag

SEQ ID NO: 189034 - DNA, 30 bp, Artificial Sequence
  Synthetic oligonucleotide
cacgggcgcatcgtggtcagtttttgtaag

SEQ ID NO: 189035 - DNA, 30 bp, Artificial Sequence
  Synthetic oligonucleotide
gcaaaacttgcaccatcgacggcaattaag

SEQ ID NO: 189036 - DNA, 30 bp, Artificial Sequence
  Synthetic oligonucleotide
cattagttgaagaggtatgccatcattaag

SEQ ID NO: 189037 - DNA, 30 bp, Artificial Sequence
  Synthetic oligonucleotide
agcggggtcacgggtattcaccggattaag

SEQ ID NO: 189038 - DNA, 30 bp, Artificial Sequence
  Synthetic oligonucleotide
taatattgggcacgtatggcacaacttaag

SEQ ID NO: 189039 - DNA, 30 bp, Artificial Sequence
  Synthetic oligonucleotide
cacacggggcgagcgattatgcgacttaag

SEQ ID NO: 189040 - DNA, 30 bp, Artificial Sequence
  Synthetic oligonucleotide
aggtaaacccagcgattagccttgcttaag

SEQ ID NO: 189041 - DNA, 30 bp, Artificial Sequence
  Synthetic oligonucleotide
ggaatactataaaatcgcgtggctcttaag

SEQ ID NO: 189042 - DNA, 30 bp, Artificial Sequence
  Synthetic oligonucleotide
cgcgccgtccgggtctttcgtggagttaag

SEQ ID NO: 189043 - DNA, 30 bp, Artificial Sequence
  Synthetic oligonucleotide
tctatacaacttaagatcggtcaggttaag

SEQ ID NO: 189044 - DNA, 30 bp, Artificial Sequence
  Synthetic oligonucleotide
gaagcatgttcccttgacggtattgttaag

SEQ ID NO: 189045 - DNA, 30 bp, Artificial Sequence
  Synthetic oligonucleotide
cgtgccatcttggctttaccgcactttaag

SEQ ID NO: 189046 - DNA, 30 bp, Artificial Sequence
  Synthetic oligonucleotide
ggggcttggtgcagatggggaaagtttaag

SEQ ID NO: 189047 - DNA, 30 bp, Artificial Sequence
  Synthetic oligonucleotide
gtccccccgggaattacgactgcgtttaag

SEQ ID NO: 189048 - DNA, 30 bp, Artificial Sequence
  Synthetic oligonucleotide
tacttagcggctattccacccctttttaag

SEQ ID NO: 189049 - DNA, 30 bp, Artificial Sequence
  Synthetic oligonucleotide
ctcaattctgacatgatggcgccaaaacag

SEQ ID NO: 189050 - DNA, 30 bp, Artificial Sequence
  Synthetic oligonucleotide
gcagcaagtgttcaacaaccgccgaaacag

SEQ ID NO: 189051 - DNA, 30 bp, Artificial Sequence
  Synthetic oligonucleotide
gacacgtaagacagagacaattataaacag

SEQ ID NO: 189052 - DNA, 30 bp, Artificial Sequence
  Synthetic oligonucleotide
tcattgaagactgtacgtaccttgcaacag

SEQ ID NO: 189053 - DNA, 30 bp, Artificial Sequence
  Synthetic oligonucleotide
tgttctcacctattgggtttaggagaacag

SEQ ID NO: 189054 - DNA, 30 bp, Artificial Sequence
  Synthetic oligonucleotide
caggccgtgagttcgggaatcaacgaacag

SEQ ID NO: 189055 - DNA, 30 bp, Artificial Sequence
  Synthetic oligonucleotide
atgaaaaaaggagtttgactgcccgaacag

SEQ ID NO: 189056 - DNA, 30 bp, Artificial Sequence
  Synthetic oligonucleotide
accagttttctcgcttccttcgatgaacag

SEQ ID NO: 189057 - DNA, 30 bp, Artificial Sequence
  Synthetic oligonucleotide
tacgccgttaggtgccgtttagaataacag

SEQ ID NO: 189058 - DNA, 30 bp, Artificial Sequence
  Synthetic oligonucleotide
ccgaacttagtacacactctaggctaacag

SEQ ID NO: 189059 - DNA, 30 bp, Artificial Sequence
  Synthetic oligonucleotide
ataaaaatgcatctcgattgaccgtaacag

SEQ ID NO: 189060 - DNA, 31 bp, Artificial Sequence
  Synthetic oligonucleotide
aatcgatacggacttatgacatagaacacag

SEQ ID NO: 189061 - DNA, 30 bp, Artificial Sequence
  Synthetic oligonucleotide
caagccgtgtacggcgggtggggaacacag

SEQ ID NO: 189062 - DNA, 30 bp, Artificial Sequence
  Synthetic oligonucleotide
cagtcgcgggcctattgccgcctcacacag

SEQ ID NO: 189063 - DNA, 30 bp, Artificial Sequence
  Synthetic oligonucleotide
ttacattgtataggtgagccctcaccacag

SEQ ID NO: 189064 - DNA, 30 bp, Artificial Sequence
  Synthetic oligonucleotide
agacattgggtggtcgtgcgactaccacag

SEQ ID NO: 189065 - DNA, 30 bp, Artificial Sequence
  Synthetic oligonucleotide
tttgatatccgtttgctgttcttaccacag

SEQ ID NO: 189066 - DNA, 30 bp, Artificial Sequence
  Synthetic oligonucleotide
cctgcattgtatggtgtaggaagcccacag

SEQ ID NO: 189067 - DNA, 30 bp, Artificial Sequence
  Synthetic oligonucleotide
aagccacagtcaaaggacactctgccacag

SEQ ID NO: 189068 - DNA, 30 bp, Artificial Sequence
  Synthetic oligonucleotide
ttatataaatctagttcaggagttccacag

SEQ ID NO: 189069 - DNA, 30 bp, Artificial Sequence
  Synthetic oligonucleotide
tctgtcacaagttgcgaggaagtctcacag

SEQ ID NO: 189070 - DNA, 30 bp, Artificial Sequence
  Synthetic oligonucleotide
ctagcagccttagctctatagcagtcacag

SEQ ID NO: 189071 - DNA, 30 bp, Artificial Sequence
  Synthetic oligonucleotide
tccactcgattccggttccgaacgtcacag

SEQ ID NO: 189072 - DNA, 31 bp, Artificial Sequence
  Synthetic oligonucleotide
aaacctgtgggacgtgtggggagggtcacag

SEQ ID NO: 189073 - DNA, 30 bp, Artificial Sequence
  Synthetic oligonucleotide
gtgattacgttgtgcaacgtaagttcacag

SEQ ID NO: 189074 - DNA, 30 bp, Artificial Sequence
  Synthetic oligonucleotide
taccgaggtaaggtagacttactaagacag

SEQ ID NO: 189075 - DNA, 30 bp, Artificial Sequence
  Synthetic oligonucleotide
tagcgcgggggagctaagcgactcagacag

SEQ ID NO: 189076 - DNA, 30 bp, Artificial Sequence
  Synthetic oligonucleotide
aattgtaaactgccccttaattagagacag

SEQ ID NO: 189077 - DNA, 30 bp, Artificial Sequence
  Synthetic oligonucleotide
tgagtcgacccgcggcttccctcgagacag

SEQ ID NO: 189078 - DNA, 30 bp, Artificial Sequence
  Synthetic oligonucleotide
cgcatggagtatggcagttccgtgagacag

SEQ ID NO: 189079 - DNA, 30 bp, Artificial Sequence
  Synthetic oligonucleotide
cgcgagttttgactaaacctgattagacag

SEQ ID NO: 189080 - DNA, 30 bp, Artificial Sequence
  Synthetic oligonucleotide
gtgttaatattggctcatataatacgacag

SEQ ID NO: 189081 - DNA, 30 bp, Artificial Sequence
  Synthetic oligonucleotide
gcgttttttctccgcggaggaacccgacag

SEQ ID NO: 189082 - DNA, 30 bp, Artificial Sequence
  Synthetic oligonucleotide
gggccaatcagatccttaaaagcccgacag

SEQ ID NO: 189083 - DNA, 31 bp, Artificial Sequence
  Synthetic oligonucleotide
tgttcagaaagcacgtttgataagccgacag

SEQ ID NO: 189084 - DNA, 30 bp, Artificial Sequence
  Synthetic oligonucleotide
agacggtgcttataatgtattctccgacag

SEQ ID NO: 189085 - DNA, 30 bp, Artificial Sequence
  Synthetic oligonucleotide
ccagagaccgggatatctcgccggcgacag

SEQ ID NO: 189086 - DNA, 30 bp, Artificial Sequence
  Synthetic oligonucleotide
tttagaaaacgttgaatctacttgcgacag

SEQ ID NO: 189087 - DNA, 30 bp, Artificial Sequence
  Synthetic oligonucleotide
gagtatagtgcgtgcgctcaaagtcgacag

SEQ ID NO: 189088 - DNA, 30 bp, Artificial Sequence
  Synthetic oligonucleotide
ggccctacttaacagacagatacaggacag

SEQ ID NO: 189089 - DNA, 30 bp, Artificial Sequence
  Synthetic oligonucleotide
tatagcaaaaagcgttcatggtcaggacag

SEQ ID NO: 189090 - DNA, 30 bp, Artificial Sequence
  Synthetic oligonucleotide
atgtcacccgctaaacgtgtttacggacag

SEQ ID NO: 189091 - DNA, 30 bp, Artificial Sequence
  Synthetic oligonucleotide
ataagtgctgattttttccgtgcgggacag

SEQ ID NO: 189092 - DNA, 30 bp, Artificial Sequence
  Synthetic oligonucleotide
tccctgaatcccgggaagtcatggggacag

SEQ ID NO: 189093 - DNA, 30 bp, Artificial Sequence
  Synthetic oligonucleotide
acactggcacggctgaggtacatgggacag

SEQ ID NO: 189094 - DNA, 30 bp, Artificial Sequence
  Synthetic oligonucleotide
accgctggagagagactaccagaaatacag

SEQ ID NO: 189095 - DNA, 30 bp, Artificial Sequence
  Synthetic oligonucleotide
caaatgcggggaggatcccatgcaatacag

SEQ ID NO: 189096 - DNA, 30 bp, Artificial Sequence
  Synthetic oligonucleotide
gacagcgcagcgttcagtccattaatacag

SEQ ID NO: 189097 - DNA, 29 bp, Artificial Sequence
  Synthetic oligonucleotide
tacctagctcgttatcccgtaacatacag

SEQ ID NO: 189098 - DNA, 30 bp, Artificial Sequence
  Synthetic oligonucleotide
gtccttgattcggccgggggtgtactacag

SEQ ID NO: 189099 - DNA, 30 bp, Artificial Sequence
  Synthetic oligonucleotide
tcgtccgttaaactaggctgcatcctacag

SEQ ID NO: 189100 - DNA, 30 bp, Artificial Sequence
  Synthetic oligonucleotide
cagaatcgggcacttacttcacagctacag

SEQ ID NO: 189101 - DNA, 30 bp, Artificial Sequence
  Synthetic oligonucleotide
tgcatgagaatttgattgacccggctacag

SEQ ID NO: 189102 - DNA, 30 bp, Artificial Sequence
  Synthetic oligonucleotide
ttctagagctccttacgagtaaatctacag

SEQ ID NO: 189103 - DNA, 30 bp, Artificial Sequence
  Synthetic oligonucleotide
aacacgtacttttgccctccgcgtctacag

SEQ ID NO: 189104 - DNA, 30 bp, Artificial Sequence
  Synthetic oligonucleotide
cctgctggaggtccaaaatatcgcgtacag

SEQ ID NO: 189105 - DNA, 30 bp, Artificial Sequence
  Synthetic oligonucleotide
ttctcctggctttagagctatgcggtacag

SEQ ID NO: 189106 - DNA, 30 bp, Artificial Sequence
  Synthetic oligonucleotide
gaagggtcgcaatgtatataaacattacag

SEQ ID NO: 189107 - DNA, 30 bp, Artificial Sequence
  Synthetic oligonucleotide
ccgggctacgtcggagaactcgcgttacag

SEQ ID NO: 189108 - DNA, 30 bp, Artificial Sequence
  Synthetic oligonucleotide
gtcgaacgtggggggttggcgaggttacag

SEQ ID NO: 189109 - DNA, 30 bp, Artificial Sequence
  Synthetic oligonucleotide
tgcagatcacctgtggggtcaaatttacag

SEQ ID NO: 189110 - DNA, 30 bp, Artificial Sequence
  Synthetic oligonucleotide
ggggacatccggagcacctgctctttacag

SEQ ID NO: 189111 - DNA, 30 bp, Artificial Sequence
  Synthetic oligonucleotide
tccaacctgagagacgtgggcaaaaaccag

SEQ ID NO: 189112 - DNA, 30 bp, Artificial Sequence
  Synthetic oligonucleotide
cgactgaacggcgcaccttctccaaaccag

SEQ ID NO: 189113 - DNA, 30 bp, Artificial Sequence
  Synthetic oligonucleotide
tcagtagaattgaacttttgcaccaaccag

SEQ ID NO: 189114 - DNA, 30 bp, Artificial Sequence
  Synthetic oligonucleotide
cttgcaaagccttgtctaagatccaaccag

SEQ ID NO: 189115 - DNA, 30 bp, Artificial Sequence
  Synthetic oligonucleotide
aaacggggtgcttttcatacaatcaaccag

SEQ ID NO: 189116 - DNA, 30 bp, Artificial Sequence
  Synthetic oligonucleotide
taaatccaatagcaacttgttgtcaaccag

SEQ ID NO: 189117 - DNA, 30 bp, Artificial Sequence
  Synthetic oligonucleotide
acgtacgcctcaatacctttttcgaaccag

SEQ ID NO: 189118 - DNA, 30 bp, Artificial Sequence
  Synthetic oligonucleotide
atgcagaaaggccgagtttacaggaaccag

SEQ ID NO: 189119 - DNA, 30 bp, Artificial Sequence
  Synthetic oligonucleotide
tgggatagcaataagtacgtagttaaccag

SEQ ID NO: 189120 - DNA, 30 bp, Artificial Sequence
  Synthetic oligonucleotide
tgtttgcggttactgtttgactaccaccag

SEQ ID NO: 189121 - DNA, 30 bp, Artificial Sequence
  Synthetic oligonucleotide
cccgtcaaacgtgggatcagcgagcaccag

SEQ ID NO: 189122 - DNA, 30 bp, Artificial Sequence
  Synthetic oligonucleotide
accactattgagcctgcttacccgcaccag

SEQ ID NO: 189123 - DNA, 30 bp, Artificial Sequence
  Synthetic oligonucleotide
atattagggtcacggaccatgtttcaccag

SEQ ID NO: 189124 - DNA, 30 bp, Artificial Sequence
  Synthetic oligonucleotide
gcctagggaaaactacaatttcaagaccag

SEQ ID NO: 189125 - DNA, 30 bp, Artificial Sequence
  Synthetic oligonucleotide
agtaccaaagacggtcgaacgttagaccag

SEQ ID NO: 189126 - DNA, 30 bp, Artificial Sequence
  Synthetic oligonucleotide
caccatcaattatagtgtgtagcggaccag

SEQ ID NO: 189127 - DNA, 30 bp, Artificial Sequence
  Synthetic oligonucleotide
acagcaacctagctccagagatgggaccag

SEQ ID NO: 189128 - DNA, 30 bp, Artificial Sequence
  Synthetic oligonucleotide
cacaacataccgagcgaagagtgggaccag

SEQ ID NO: 189129 - DNA, 30 bp, Artificial Sequence
  Synthetic oligonucleotide
ggaaatggtggaaaaccgacgtctgaccag

SEQ ID NO: 189130 - DNA, 30 bp, Artificial Sequence
  Synthetic oligonucleotide
cccaaccgcagccaagatctacagtaccag

SEQ ID NO: 189131 - DNA, 30 bp, Artificial Sequence
  Synthetic oligonucleotide
tcttcatactcatgagactcccgttaccag

SEQ ID NO: 189132 - DNA, 30 bp, Artificial Sequence
  Synthetic oligonucleotide
ttacctctcgcgtaattagtgttaacccag

SEQ ID NO: 189133 - DNA, 30 bp, Artificial Sequence
  Synthetic oligonucleotide
atagtgaaagcaaatgaggctcacacccag

SEQ ID NO: 189134 - DNA, 30 bp, Artificial Sequence
  Synthetic oligonucleotide
cgtcgcgcaaatatcggattttgcacccag

SEQ ID NO: 189135 - DNA, 30 bp, Artificial Sequence
  Synthetic oligonucleotide
atttcgagcctatggggcggccgggcccag

SEQ ID NO: 189136 - DNA, 30 bp, Artificial Sequence
  Synthetic oligonucleotide
gcgctcatggacatgaacatctaatcccag

SEQ ID NO: 189137 - DNA, 30 bp, Artificial Sequence
  Synthetic oligonucleotide
catgagttattcagggacagtgcgtcccag

SEQ ID NO: 189138 - DNA, 30 bp, Artificial Sequence
  Synthetic oligonucleotide
ggtgattattgatatggtcccgattcccag

SEQ ID NO: 189139 - DNA, 30 bp, Artificial Sequence
  Synthetic oligonucleotide
gcgggaccaacgggaaacaagcgttcccag

SEQ ID NO: 189140 - DNA, 30 bp, Artificial Sequence
  Synthetic oligonucleotide
gatagtctcaagcttaatcaaggttcccag

SEQ ID NO: 189141 - DNA, 30 bp, Artificial Sequence
  Synthetic oligonucleotide
cgcggatacatgatgtcgaagttttcccag

SEQ ID NO: 189142 - DNA, 30 bp, Artificial Sequence
  Synthetic oligonucleotide
cgatccaaaatacgaaccttcgaaagccag

SEQ ID NO: 189143 - DNA, 30 bp, Artificial Sequence
  Synthetic oligonucleotide
ctaagggataagcggcgggtttgaagccag

SEQ ID NO: 189144 - DNA, 30 bp, Artificial Sequence
  Synthetic oligonucleotide
gaagtcggacatcccaaggaaagcagccag

SEQ ID NO: 189145 - DNA, 30 bp, Artificial Sequence
  Synthetic oligonucleotide
taggggagggcctgttcccctgatagccag

SEQ ID NO: 189146 - DNA, 30 bp, Artificial Sequence
  Synthetic oligonucleotide
atagcctgataacaacgcgttcagcgccag

SEQ ID NO: 189147 - DNA, 30 bp, Artificial Sequence
  Synthetic oligonucleotide
aaattggcggccgcaccatattagcgccag

SEQ ID NO: 189148 - DNA, 30 bp, Artificial Sequence
  Synthetic oligonucleotide
tgccgtagtgtcaatcatcataggcgccag

SEQ ID NO: 189149 - DNA, 30 bp, Artificial Sequence
  Synthetic oligonucleotide
taaggggccagaatatggcaaaaaggccag

SEQ ID NO: 189150 - DNA, 30 bp, Artificial Sequence
  Synthetic oligonucleotide
caaggactactgatgatatattacggccag

SEQ ID NO: 189151 - DNA, 30 bp, Artificial Sequence
  Synthetic oligonucleotide
gacaagtctagcatatattacggcggccag

SEQ ID NO: 189152 - DNA, 30 bp, Artificial Sequence
  Synthetic oligonucleotide
gggcgggcaagttatgtccgcgagggccag

SEQ ID NO: 189153 - DNA, 30 bp, Artificial Sequence
  Synthetic oligonucleotide
tcacaaatgatcagtctggtacggggccag

SEQ ID NO: 189154 - DNA, 30 bp, Artificial Sequence
  Synthetic oligonucleotide
gtggagccctgctaggatatttatggccag

SEQ ID NO: 189155 - DNA, 30 bp, Artificial Sequence
  Synthetic oligonucleotide
cggcttatctttttatcagtcccatgccag

SEQ ID NO: 189156 - DNA, 30 bp, Artificial Sequence
  Synthetic oligonucleotide
ttaggtagcattcccagttgagtctgccag

SEQ ID NO: 189157 - DNA, 30 bp, Artificial Sequence
  Synthetic oligonucleotide
gggaagatttgtgtactgatactaatccag

SEQ ID NO: 189158 - DNA, 30 bp, Artificial Sequence
  Synthetic oligonucleotide
atcggagtctaaggagtccaagacatccag

SEQ ID NO: 189159 - DNA, 30 bp, Artificial Sequence
  Synthetic oligonucleotide
tcaaatttataggaagtgacagagatccag

SEQ ID NO: 189160 - DNA, 30 bp, Artificial Sequence
  Synthetic oligonucleotide
cgttcggatcctgtctactttccgatccag

SEQ ID NO: 189161 - DNA, 30 bp, Artificial Sequence
  Synthetic oligonucleotide
ttcgggcacccctatgcatagccactccag

SEQ ID NO: 189162 - DNA, 30 bp, Artificial Sequence
  Synthetic oligonucleotide
gcttcatctgtaacaagaaggcgactccag

SEQ ID NO: 189163 - DNA, 30 bp, Artificial Sequence
  Synthetic oligonucleotide
cggatgccgctggatgctcacggactccag

SEQ ID NO: 189164 - DNA, 30 bp, Artificial Sequence
  Synthetic oligonucleotide
ttctcagtttatacgattaagaacctccag

SEQ ID NO: 189165 - DNA, 30 bp, Artificial Sequence
  Synthetic oligonucleotide
ccggattagtacggacaccagtctctccag

SEQ ID NO: 189166 - DNA, 30 bp, Artificial Sequence
  Synthetic oligonucleotide
gacttgcgaatcacgattcgtgcagtccag

SEQ ID NO: 189167 - DNA, 30 bp, Artificial Sequence
  Synthetic oligonucleotide
gatccaatacgtcttaagaactcagtccag

SEQ ID NO: 189168 - DNA, 30 bp, Artificial Sequence
  Synthetic oligonucleotide
tgacttaatgcgtccaatttcggcgtccag

SEQ ID NO: 189169 - DNA, 30 bp, Artificial Sequence
  Synthetic oligonucleotide
tgagccaggcgctagtatattgtcgtccag

SEQ ID NO: 189170 - DNA, 30 bp, Artificial Sequence
  Synthetic oligonucleotide
cgtgccgtgcttcatccaatggctgtccag

SEQ ID NO: 189171 - DNA, 30 bp, Artificial Sequence
  Synthetic oligonucleotide
tgattttatctggcaaggatagttgtccag

SEQ ID NO: 189172 - DNA, 30 bp, Artificial Sequence
  Synthetic oligonucleotide
aggttaaaggtctgaatctgtgttgtccag

SEQ ID NO: 189173 - DNA, 30 bp, Artificial Sequence
  Synthetic oligonucleotide
attgcggaccgttagccacgtaccttccag

SEQ ID NO: 189174 - DNA, 30 bp, Artificial Sequence
  Synthetic oligonucleotide
accactgtaacaaattgtcctcatttccag

SEQ ID NO: 189175 - DNA, 30 bp, Artificial Sequence
  Synthetic oligonucleotide
attgctctcgggagtcatccccgtttccag

SEQ ID NO: 189176 - DNA, 30 bp, Artificial Sequence
  Synthetic oligonucleotide
tgatgcgcaggacctttctgacaaaagcag

SEQ ID NO: 189177 - DNA, 30 bp, Artificial Sequence
  Synthetic oligonucleotide
ggaggggccggagggcttggatacaagcag

SEQ ID NO: 189178 - DNA, 30 bp, Artificial Sequence
  Synthetic oligonucleotide
gggtgagataggacgtctccgctcaagcag

SEQ ID NO: 189179 - DNA, 30 bp, Artificial Sequence
  Synthetic oligonucleotide
caatacataagcttccacacggctaagcag

SEQ ID NO: 189180 - DNA, 30 bp, Artificial Sequence
  Synthetic oligonucleotide
ctcgcgccggtgtgaggcgagtaacagcag

SEQ ID NO: 189181 - DNA, 30 bp, Artificial Sequence
  Synthetic oligonucleotide
aaacaaaatgacgtgatcgcggagcagcag

SEQ ID NO: 189182 - DNA, 30 bp, Artificial Sequence
  Synthetic oligonucleotide
ttggaaaaaaataaggtcgagtatcagcag

SEQ ID NO: 189183 - DNA, 30 bp, Artificial Sequence
  Synthetic oligonucleotide
ttatagtgggaaaaggacttgggcgagcag

SEQ ID NO: 189184 - DNA, 30 bp, Artificial Sequence
  Synthetic oligonucleotide
cgatcaaggcaagtggagatgtgggagcag

SEQ ID NO: 189185 - DNA, 30 bp, Artificial Sequence
  Synthetic oligonucleotide
ttcaaccgccggccttcttcaacatagcag

SEQ ID NO: 189186 - DNA, 30 bp, Artificial Sequence
  Synthetic oligonucleotide
aagaaccgtctggacggatgtacatagcag

SEQ ID NO: 189187 - DNA, 30 bp, Artificial Sequence
  Synthetic oligonucleotide
tgtataccatgtactctcggaatctagcag

SEQ ID NO: 189188 - DNA, 30 bp, Artificial Sequence
  Synthetic oligonucleotide
acagacacggaaggacggaaatggtagcag

SEQ ID NO: 189189 - DNA, 30 bp, Artificial Sequence
  Synthetic oligonucleotide
aaaagtagcccccagaaaagttggtagcag

SEQ ID NO: 189190 - DNA, 30 bp, Artificial Sequence
  Synthetic oligonucleotide
gatgggtaagtctacttatccagttagcag

SEQ ID NO: 189191 - DNA, 30 bp, Artificial Sequence
  Synthetic oligonucleotide
ggcaatagaagggactctagggtcacgcag

SEQ ID NO: 189192 - DNA, 31 bp, Artificial Sequence
  Synthetic oligonucleotide
agaacgtatagtagattttacatttacgcag

SEQ ID NO: 189193 - DNA, 30 bp, Artificial Sequence
  Synthetic oligonucleotide
gagtctttacatcaggaatatcgaccgcag

SEQ ID NO: 189194 - DNA, 30 bp, Artificial Sequence
  Synthetic oligonucleotide
aaaggtcgaccggtatagagtataccgcag

SEQ ID NO: 189195 - DNA, 30 bp, Artificial Sequence
  Synthetic oligonucleotide
tagcgcacacgaaccaccgcgtctccgcag

SEQ ID NO: 189196 - DNA, 30 bp, Artificial Sequence
  Synthetic oligonucleotide
ccctggccccataagtacccttttccgcag

SEQ ID NO: 189197 - DNA, 30 bp, Artificial Sequence
  Synthetic oligonucleotide
ttggcgatcgctagtacccacccagcgcag

SEQ ID NO: 189198 - DNA, 30 bp, Artificial Sequence
  Synthetic oligonucleotide
tagtctgttggcgtcggtaatcgcgcgcag

SEQ ID NO: 189199 - DNA, 30 bp, Artificial Sequence
  Synthetic oligonucleotide
ccgtgttagacaacaaaccagtgcgcgcag

SEQ ID NO: 189200 - DNA, 30 bp, Artificial Sequence
  Synthetic oligonucleotide
cgtcttgtcaccccattcaaagtatcgcag

SEQ ID NO: 189201 - DNA, 30 bp, Artificial Sequence
  Synthetic oligonucleotide
cggggcgattttcgtattcataactcgcag

SEQ ID NO: 189202 - DNA, 30 bp, Artificial Sequence
  Synthetic oligonucleotide
taatgtcgtaacagtcgactggcgtcgcag

SEQ ID NO: 189203 - DNA, 30 bp, Artificial Sequence
  Synthetic oligonucleotide
ttgttaaacatttcagaagtgaggtcgcag

SEQ ID NO: 189204 - DNA, 30 bp, Artificial Sequence
  Synthetic oligonucleotide
cacggatccaagctgctcataacttcgcag

SEQ ID NO: 189205 - DNA, 30 bp, Artificial Sequence
  Synthetic oligonucleotide
atcacggaatgtaagaaagtacacaggcag

SEQ ID NO: 189206 - DNA, 30 bp, Artificial Sequence
  Synthetic oligonucleotide
aaattaaatgcaaggggtcgtagcaggcag

SEQ ID NO: 189207 - DNA, 30 bp, Artificial Sequence
  Synthetic oligonucleotide
cgtcttttagtcccaaagacagtcaggcag

SEQ ID NO: 189208 - DNA, 30 bp, Artificial Sequence
  Synthetic oligonucleotide
aggcgtactaaactccgaattagtaggcag

SEQ ID NO: 189209 - DNA, 30 bp, Artificial Sequence
  Synthetic oligonucleotide
ccgtgaccgtggcgggtcggtaatcggcag

SEQ ID NO: 189210 - DNA, 30 bp, Artificial Sequence
  Synthetic oligonucleotide
tttattaaaactgagaggcgacaagggcag

SEQ ID NO: 189211 - DNA, 30 bp, Artificial Sequence
  Synthetic oligonucleotide
cttacccggtaaaatgcgaatggcgggcag

SEQ ID NO: 189212 - DNA, 30 bp, Artificial Sequence
  Synthetic oligonucleotide
gttcttcacgtgcgcggaagaagggggcag

SEQ ID NO: 189213 - DNA, 30 bp, Artificial Sequence
  Synthetic oligonucleotide
attgtcgccacgaatgatcgccgggggcag

SEQ ID NO: 189214 - DNA, 30 bp, Artificial Sequence
  Synthetic oligonucleotide
caccttgtctatattagtgcgcctgggcag

SEQ ID NO: 189215 - DNA, 30 bp, Artificial Sequence
  Synthetic oligonucleotide
ggggggctggaattccgcggggactggcag

SEQ ID NO: 189216 - DNA, 30 bp, Artificial Sequence
  Synthetic oligonucleotide
agatattaacctgaaacaactgacctgcag

SEQ ID NO: 189217 - DNA, 30 bp, Artificial Sequence
  Synthetic oligonucleotide
gcgcacaaggagaatcgttagtttctgcag

SEQ ID NO: 189218 - DNA, 30 bp, Artificial Sequence
  Synthetic oligonucleotide
cctatattaatggacagttccccagtgcag

SEQ ID NO: 189219 - DNA, 30 bp, Artificial Sequence
  Synthetic oligonucleotide
gcccactagcttgccacttgtcatgtgcag

SEQ ID NO: 189220 - DNA, 30 bp, Artificial Sequence
  Synthetic oligonucleotide
tagcaggtctctgcgatgtggattgtgcag

SEQ ID NO: 189221 - DNA, 30 bp, Artificial Sequence
  Synthetic oligonucleotide
tgaaaagaccacagcatttaaaaattgcag

SEQ ID NO: 189222 - DNA, 30 bp, Artificial Sequence
  Synthetic oligonucleotide
tacccgatactagtcatgtcggtattgcag

SEQ ID NO: 189223 - DNA, 30 bp, Artificial Sequence
  Synthetic oligonucleotide
ccgcgagaccacgaactatagcgcttgcag

SEQ ID NO: 189224 - DNA, 30 bp, Artificial Sequence
  Synthetic oligonucleotide
atggagccacccatgtctgcgggcttgcag

SEQ ID NO: 189225 - DNA, 30 bp, Artificial Sequence
  Synthetic oligonucleotide
gatggatctagatggtacaatatcttgcag

SEQ ID NO: 189226 - DNA, 30 bp, Artificial Sequence
  Synthetic oligonucleotide
tacgacaatcatagtatttcggtgttgcag

SEQ ID NO: 189227 - DNA, 30 bp, Artificial Sequence
  Synthetic oligonucleotide
gcctggtaactagatacaggcgatttgcag

SEQ ID NO: 189228 - DNA, 30 bp, Artificial Sequence
  Synthetic oligonucleotide
gtcattgaaaagcgataggccgcaaatcag

SEQ ID NO: 189229 - DNA, 30 bp, Artificial Sequence
  Synthetic oligonucleotide
ttagctctgtggaattttattcgcaatcag

SEQ ID NO: 189230 - DNA, 30 bp, Artificial Sequence
  Synthetic oligonucleotide
cagtggcatgtgggctataggtggaatcag

SEQ ID NO: 189231 - DNA, 30 bp, Artificial Sequence
  Synthetic oligonucleotide
gtctggggaaattgcatcgcaatgaatcag

SEQ ID NO: 189232 - DNA, 30 bp, Artificial Sequence
  Synthetic oligonucleotide
actagagggatcgttgagatgtataatcag

SEQ ID NO: 189233 - DNA, 30 bp, Artificial Sequence
  Synthetic oligonucleotide
ctaagatcgcacaaagtgcgatgccatcag

SEQ ID NO: 189234 - DNA, 30 bp, Artificial Sequence
  Synthetic oligonucleotide
aagatttacggtgttaccgtagagcatcag

SEQ ID NO: 189235 - DNA, 30 bp, Artificial Sequence
  Synthetic oligonucleotide
cagtattcacgcgaagggtaggcgcatcag

SEQ ID NO: 189236 - DNA, 30 bp, Artificial Sequence
  Synthetic oligonucleotide
aatcgtcggagattattacgggcgcatcag

SEQ ID NO: 189237 - DNA, 30 bp, Artificial Sequence
  Synthetic oligonucleotide
ttaaggaaactaggagtatattgtcatcag

SEQ ID NO: 189238 - DNA, 30 bp, Artificial Sequence
  Synthetic oligonucleotide
ggacgggcataagattgcgatagcgatcag

SEQ ID NO: 189239 - DNA, 30 bp, Artificial Sequence
  Synthetic oligonucleotide
gtaggaaaccggggcactagtcaggatcag

SEQ ID NO: 189240 - DNA, 30 bp, Artificial Sequence
  Synthetic oligonucleotide
atgggcagttaaaaatgtgtatcggatcag

SEQ ID NO: 189241 - DNA, 30 bp, Artificial Sequence
  Synthetic oligonucleotide
gtaatagctaacgcccgcgaacgggatcag

SEQ ID NO: 189242 - DNA, 30 bp, Artificial Sequence
  Synthetic oligonucleotide
gacctcgtccaccaggtggcacatgatcag

SEQ ID NO: 189243 - DNA, 30 bp, Artificial Sequence
  Synthetic oligonucleotide
cttaaatccgatacccagcataaatatcag

SEQ ID NO: 189244 - DNA, 30 bp, Artificial Sequence
  Synthetic oligonucleotide
ggtaaggaagcgttcatgcgagtatatcag

SEQ ID NO: 189245 - DNA, 30 bp, Artificial Sequence
  Synthetic oligonucleotide
tagccggggtttcaggggtacggctatcag

SEQ ID NO: 189246 - DNA, 30 bp, Artificial Sequence
  Synthetic oligonucleotide
ggctcgacgtaacaaactcagccgtatcag

SEQ ID NO: 189247 - DNA, 30 bp, Artificial Sequence
  Synthetic oligonucleotide
atttaggaggtggcaccccactggtatcag

SEQ ID NO: 189248 - DNA, 30 bp, Artificial Sequence
  Synthetic oligonucleotide
tcggctcaagattagtgtaacttaactcag

SEQ ID NO: 189249 - DNA, 30 bp, Artificial Sequence
  Synthetic oligonucleotide
gctacgtgattgcgtccgagcgacactcag

SEQ ID NO: 189250 - DNA, 30 bp, Artificial Sequence
  Synthetic oligonucleotide
cagagtctgaatacaatcaaccccactcag

SEQ ID NO: 189251 - DNA, 30 bp, Artificial Sequence
  Synthetic oligonucleotide
accgtactcacctatgacattaagactcag

SEQ ID NO: 189252 - DNA, 30 bp, Artificial Sequence
  Synthetic oligonucleotide
tcaaatgtcccggtctaagatcagactcag

SEQ ID NO: 189253 - DNA, 30 bp, Artificial Sequence
  Synthetic oligonucleotide
ccggatgtacttaacgctaacccgactcag

SEQ ID NO: 189254 - DNA, 30 bp, Artificial Sequence
  Synthetic oligonucleotide
tggaaaaacaggagtttaagtgatactcag

SEQ ID NO: 189255 - DNA, 30 bp, Artificial Sequence
  Synthetic oligonucleotide
tccccgatggggcgtcgagtcagtactcag

SEQ ID NO: 189256 - DNA, 30 bp, Artificial Sequence
  Synthetic oligonucleotide
gtcgactgtcaggtgatcttccaacctcag

SEQ ID NO: 189257 - DNA, 30 bp, Artificial Sequence
  Synthetic oligonucleotide
acacagaaggtgcgggggcgcagacctcag

SEQ ID NO: 189258 - DNA, 30 bp, Artificial Sequence
  Synthetic oligonucleotide
agtgggttgcgggtactttgcaaccctcag

SEQ ID NO: 189259 - DNA, 30 bp, Artificial Sequence
  Synthetic oligonucleotide
atcggttactcagaaatactcgagcctcag

SEQ ID NO: 189260 - DNA, 30 bp, Artificial Sequence
  Synthetic oligonucleotide
gctccggcagagacccgcgtcaggcctcag

SEQ ID NO: 189261 - DNA, 30 bp, Artificial Sequence
  Synthetic oligonucleotide
tagccttcctgttgcgaatctttgcctcag

SEQ ID NO: 189262 - DNA, 30 bp, Artificial Sequence
  Synthetic oligonucleotide
ttcacaatctgcggtgcacaagtagctcag

SEQ ID NO: 189263 - DNA, 30 bp, Artificial Sequence
  Synthetic oligonucleotide
aagtccggtatctgcgcttctgtcgctcag

SEQ ID NO: 189264 - DNA, 30 bp, Artificial Sequence
  Synthetic oligonucleotide
gagcagtcgtaagcattaccaacggctcag

SEQ ID NO: 189265 - DNA, 30 bp, Artificial Sequence
  Synthetic oligonucleotide
ccgtagcttccttatagcgcccccagtcag

SEQ ID NO: 189266 - DNA, 30 bp, Artificial Sequence
  Synthetic oligonucleotide
ttatcctctgctttagggccctccagtcag

SEQ ID NO: 189267 - DNA, 30 bp, Artificial Sequence
  Synthetic oligonucleotide
ctagggaagcattgcgaagcagtcagtcag

SEQ ID NO: 189268 - DNA, 30 bp, Artificial Sequence
  Synthetic oligonucleotide
ttatgacaagtgtacacccacaagagtcag

SEQ ID NO: 189269 - DNA, 30 bp, Artificial Sequence
  Synthetic oligonucleotide
agtagacgacttaaaatgccgctgagtcag

SEQ ID NO: 189270 - DNA, 30 bp, Artificial Sequence
  Synthetic oligonucleotide
gcctacccggctatggctctacgtagtcag

SEQ ID NO: 189271 - DNA, 30 bp, Artificial Sequence
  Synthetic oligonucleotide
tgtacgatattgatgttacctcaccgtcag

SEQ ID NO: 189272 - DNA, 30 bp, Artificial Sequence
  Synthetic oligonucleotide
tcacggagtgtattatatggactccgtcag

SEQ ID NO: 189273 - DNA, 30 bp, Artificial Sequence
  Synthetic oligonucleotide
cccaaaacttttgcgagaagtcggcgtcag

SEQ ID NO: 189274 - DNA, 30 bp, Artificial Sequence
  Synthetic oligonucleotide
ggggacaggtgtgatccttcaaaaggtcag

SEQ ID NO: 189275 - DNA, 30 bp, Artificial Sequence
  Synthetic oligonucleotide
cccatgcgcacgaaatgtgttgcgggtcag

SEQ ID NO: 189276 - DNA, 30 bp, Artificial Sequence
  Synthetic oligonucleotide
tgccagccccgattagatccaaggggtcag

SEQ ID NO: 189277 - DNA, 30 bp, Artificial Sequence
  Synthetic oligonucleotide
gcaacataatgattgatacgcttgggtcag

SEQ ID NO: 189278 - DNA, 30 bp, Artificial Sequence
  Synthetic oligonucleotide
cggttgactacggactggacatgtggtcag

SEQ ID NO: 189279 - DNA, 30 bp, Artificial Sequence
  Synthetic oligonucleotide
tagagtaagatcgcccatgtgccctgtcag

SEQ ID NO: 189280 - DNA, 30 bp, Artificial Sequence
  Synthetic oligonucleotide
gcatgcgcagaagtatagggacattgtcag

SEQ ID NO: 189281 - DNA, 30 bp, Artificial Sequence
  Synthetic oligonucleotide
caggaggtgttcaggattggtgcttgtcag

SEQ ID NO: 189282 - DNA, 30 bp, Artificial Sequence
  Synthetic oligonucleotide
tcacgataatcacgtgttatgagttgtcag

SEQ ID NO: 189283 - DNA, 30 bp, Artificial Sequence
  Synthetic oligonucleotide
aagtgtagctccggtcaaggcctaattcag

SEQ ID NO: 189284 - DNA, 30 bp, Artificial Sequence
  Synthetic oligonucleotide
ggcgagatggcgttgcgggtatttattcag

SEQ ID NO: 189285 - DNA, 30 bp, Artificial Sequence
  Synthetic oligonucleotide
caaagggttaaacgtccactaaaccttcag

SEQ ID NO: 189286 - DNA, 30 bp, Artificial Sequence
  Synthetic oligonucleotide
agtaacctagcagaaagatataaccttcag

SEQ ID NO: 189287 - DNA, 30 bp, Artificial Sequence
  Synthetic oligonucleotide
tgtaacttagcgatagaagcaccccttcag

SEQ ID NO: 189288 - DNA, 30 bp, Artificial Sequence
  Synthetic oligonucleotide
accgtatttgagaggccgagtgaagttcag

SEQ ID NO: 189289 - DNA, 30 bp, Artificial Sequence
  Synthetic oligonucleotide
ggcgtcgcgctcgataagtctggtgttcag

SEQ ID NO: 189290 - DNA, 30 bp, Artificial Sequence
  Synthetic oligonucleotide
gagacaaatatattcgcccgctaatttcag

SEQ ID NO: 189291 - DNA, 30 bp, Artificial Sequence
  Synthetic oligonucleotide
acaaggggttaatcgggggataactttcag

SEQ ID NO: 189292 - DNA, 30 bp, Artificial Sequence
  Synthetic oligonucleotide
caattgtgcaaacacgaatgtcggtttcag

SEQ ID NO: 189293 - DNA, 30 bp, Artificial Sequence
  Synthetic oligonucleotide
tgtgtccgagattgatgcgttaaaaaagag

SEQ ID NO: 189294 - DNA, 30 bp, Artificial Sequence
  Synthetic oligonucleotide
gaatacgtatggctaagaccgtgcaaagag

SEQ ID NO: 189295 - DNA, 30 bp, Artificial Sequence
  Synthetic oligonucleotide
cttgaagtagacgactcgctatataaagag

SEQ ID NO: 189296 - DNA, 29 bp, Artificial Sequence
  Synthetic oligonucleotide
ggtgttgtggatagaagcaacgtaaagag

SEQ ID NO: 189297 - DNA, 30 bp, Artificial Sequence
  Synthetic oligonucleotide
gtcaatggaccatccaattaggtacaagag

SEQ ID NO: 189298 - DNA, 30 bp, Artificial Sequence
  Synthetic oligonucleotide
tttcagataacgaatgttctactgcaagag

SEQ ID NO: 189299 - DNA, 30 bp, Artificial Sequence
  Synthetic oligonucleotide
aacggaagcggacagacccgctctcaagag

SEQ ID NO: 189300 - DNA, 30 bp, Artificial Sequence
  Synthetic oligonucleotide
cgacggcagttgccctcgagaggagaagag

SEQ ID NO: 189301 - DNA, 30 bp, Artificial Sequence
  Synthetic oligonucleotide
gttccacccgaacatcataggggcgaagag

SEQ ID NO: 189302 - DNA, 30 bp, Artificial Sequence
  Synthetic oligonucleotide
gggtgggaatcaaaccacctctgggaagag

SEQ ID NO: 189303 - DNA, 30 bp, Artificial Sequence
  Synthetic oligonucleotide
tgcactccggggagtaccagtggtgaagag

SEQ ID NO: 189304 - DNA, 30 bp, Artificial Sequence
  Synthetic oligonucleotide
accaaaataacggaaaatccggaataagag

SEQ ID NO: 189305 - DNA, 30 bp, Artificial Sequence
  Synthetic oligonucleotide
tatctactggaagaattcccaggataagag

SEQ ID NO: 189306 - DNA, 30 bp, Artificial Sequence
  Synthetic oligonucleotide
tttgattgcggttacttccaacagtaagag

SEQ ID NO: 189307 - DNA, 30 bp, Artificial Sequence
  Synthetic oligonucleotide
cctggaaacgggtgtgtagtcgcttaagag

SEQ ID NO: 189308 - DNA, 30 bp, Artificial Sequence
  Synthetic oligonucleotide
cgagctgtggacgggctatttgaaacagag

SEQ ID NO: 189309 - DNA, 30 bp, Artificial Sequence
  Synthetic oligonucleotide
tttcataacactactgccacgacaacagag

SEQ ID NO: 189310 - DNA, 30 bp, Artificial Sequence
  Synthetic oligonucleotide
atatgtaggaccattaaaacagcaacagag

SEQ ID NO: 189311 - DNA, 30 bp, Artificial Sequence
  Synthetic oligonucleotide
atgcgctatcgggctattgagagaacagag

SEQ ID NO: 189312 - DNA, 31 bp, Artificial Sequence
  Synthetic oligonucleotide
ggtgcaagcgcagagcttgatatctacagag

SEQ ID NO: 189313 - DNA, 30 bp, Artificial Sequence
  Synthetic oligonucleotide
atcagttggggtgcgagcgtatgtacagag

SEQ ID NO: 189314 - DNA, 30 bp, Artificial Sequence
  Synthetic oligonucleotide
atcggtacggcggtaacggaatgagcagag

SEQ ID NO: 189315 - DNA, 30 bp, Artificial Sequence
  Synthetic oligonucleotide
tgaagtattggtcgcgtacttgcggcagag

SEQ ID NO: 189316 - DNA, 30 bp, Artificial Sequence
  Synthetic oligonucleotide
gcctaaaacgcccgtgttgctttggcagag

SEQ ID NO: 189317 - DNA, 30 bp, Artificial Sequence
  Synthetic oligonucleotide
aaacacatatcatcgattaatattgcagag

SEQ ID NO: 189318 - DNA, 30 bp, Artificial Sequence
  Synthetic oligonucleotide
gtaactgatagcggacgagcgtttgcagag

SEQ ID NO: 189319 - DNA, 30 bp, Artificial Sequence
  Synthetic oligonucleotide
atacggttctagaccccgttggactcagag

SEQ ID NO: 189320 - DNA, 30 bp, Artificial Sequence
  Synthetic oligonucleotide
aaaagttggaggtcttaggaaacctcagag

SEQ ID NO: 189321 - DNA, 30 bp, Artificial Sequence
  Synthetic oligonucleotide
atataattgggtttaagctttgtgtcagag

SEQ ID NO: 189322 - DNA, 30 bp, Artificial Sequence
  Synthetic oligonucleotide
aaggatggccgtccggctcagatttcagag

SEQ ID NO: 189323 - DNA, 30 bp, Artificial Sequence
  Synthetic oligonucleotide
ctgagtaaaggacccccaaattcaagagag

SEQ ID NO: 189324 - DNA, 30 bp, Artificial Sequence
  Synthetic oligonucleotide
tcatagttaaccgtcactgagggaagagag

SEQ ID NO: 189325 - DNA, 30 bp, Artificial Sequence
  Synthetic oligonucleotide
tccctggccatggccccgatgtcgagagag

SEQ ID NO: 189326 - DNA, 30 bp, Artificial Sequence
  Synthetic oligonucleotide
gacatatacggtcgaaattgtttgagagag

SEQ ID NO: 189327 - DNA, 30 bp, Artificial Sequence
  Synthetic oligonucleotide
ctgcaaggtaccccctacgacatacgagag

SEQ ID NO: 189328 - DNA, 30 bp, Artificial Sequence
  Synthetic oligonucleotide
ggcgcatcttacacgaggatggaccgagag

SEQ ID NO: 189329 - DNA, 30 bp, Artificial Sequence
  Synthetic oligonucleotide
tgaatctcgactcaccgtatagcaggagag

SEQ ID NO: 189330 - DNA, 30 bp, Artificial Sequence
  Synthetic oligonucleotide
tctattatctttaccggggtatgaggagag

SEQ ID NO: 189331 - DNA, 30 bp, Artificial Sequence
  Synthetic oligonucleotide
aaagctcccccctgtgagacttgaggagag

SEQ ID NO: 189332 - DNA, 30 bp, Artificial Sequence
  Synthetic oligonucleotide
agaatattatcgacccgatgctacggagag

SEQ ID NO: 189333 - DNA, 30 bp, Artificial Sequence
  Synthetic oligonucleotide
cttgtaactggaaaccctatgaatggagag

SEQ ID NO: 189334 - DNA, 30 bp, Artificial Sequence
  Synthetic oligonucleotide
tgctctggaatgatccagaaagcatgagag

SEQ ID NO: 189335 - DNA, 30 bp, Artificial Sequence
  Synthetic oligonucleotide
ggttagtgccacggaagatgagcatgagag

SEQ ID NO: 189336 - DNA, 30 bp, Artificial Sequence
  Synthetic oligonucleotide
gccagtttaggttaaccgttagtatgagag

SEQ ID NO: 189337 - DNA, 30 bp, Artificial Sequence
  Synthetic oligonucleotide
caccgtgtgctcgagatgaacgcctgagag

SEQ ID NO: 189338 - DNA, 30 bp, Artificial Sequence
  Synthetic oligonucleotide
ttgattggttaccgtaggacccagtgagag

SEQ ID NO: 189339 - DNA, 30 bp, Artificial Sequence
  Synthetic oligonucleotide
gcccgggaagaaaccaggtgggggtgagag

SEQ ID NO: 189340 - DNA, 30 bp, Artificial Sequence
  Synthetic oligonucleotide
ggtggtaactcgtttagtagagtgtgagag

SEQ ID NO: 189341 - DNA, 30 bp, Artificial Sequence
  Synthetic oligonucleotide
gattatatttgcaacagcgaaggttgagag

SEQ ID NO: 189342 - DNA, 30 bp, Artificial Sequence
  Synthetic oligonucleotide
tcatctgcgcacagcagaacaataatagag

SEQ ID NO: 189343 - DNA, 30 bp, Artificial Sequence
  Synthetic oligonucleotide
agatggcgcatccggaagcccccgatagag

SEQ ID NO: 189344 - DNA, 30 bp, Artificial Sequence
  Synthetic oligonucleotide
accagcacatgattgtcagacttgatagag

SEQ ID NO: 189345 - DNA, 30 bp, Artificial Sequence
  Synthetic oligonucleotide
cgtacgtcaccggccggacacatcctagag

SEQ ID NO: 189346 - DNA, 30 bp, Artificial Sequence
  Synthetic oligonucleotide
catttgtgctcaattagagtttgagtagag

SEQ ID NO: 189347 - DNA, 30 bp, Artificial Sequence
  Synthetic oligonucleotide
gaataatgcgcgagttaatctcgggtagag

SEQ ID NO: 189348 - DNA, 30 bp, Artificial Sequence
  Synthetic oligonucleotide
ggctgacagcagatcaggttcatggtagag

SEQ ID NO: 189349 - DNA, 28 bp, Artificial Sequence
  Synthetic oligonucleotide
tatcttgagtcacgaaccagatgtagag

SEQ ID NO: 189350 - DNA, 30 bp, Artificial Sequence
  Synthetic oligonucleotide
acgtcgtcggaactcttgttcccattagag

SEQ ID NO: 189351 - DNA, 30 bp, Artificial Sequence
  Synthetic oligonucleotide
actcacggatcgcgtcctaacagattagag

SEQ ID NO: 189352 - DNA, 30 bp, Artificial Sequence
  Synthetic oligonucleotide
gggccaggcaccctaggggtgatattagag

SEQ ID NO: 189353 - DNA, 30 bp, Artificial Sequence
  Synthetic oligonucleotide
ccggtaaacggaccgatcgctccgttagag

SEQ ID NO: 189354 - DNA, 30 bp, Artificial Sequence
  Synthetic oligonucleotide
ccctccccattgtccctgtaaataaacgag

SEQ ID NO: 189355 - DNA, 30 bp, Artificial Sequence
  Synthetic oligonucleotide
acctaagtccgaagcacctctgtaaacgag

SEQ ID NO: 189356 - DNA, 30 bp, Artificial Sequence
  Synthetic oligonucleotide
tgcaaatctgattcatcttcccggaacgag

SEQ ID NO: 189357 - DNA, 30 bp, Artificial Sequence
  Synthetic oligonucleotide
ataaagtctaggcgcataaaatggaacgag

SEQ ID NO: 189358 - DNA, 30 bp, Artificial Sequence
  Synthetic oligonucleotide
attgaattagaggtttataatggtaacgag

SEQ ID NO: 189359 - DNA, 30 bp, Artificial Sequence
  Synthetic oligonucleotide
tgcttataggtcttgaacaaagtccacgag

SEQ ID NO: 189360 - DNA, 30 bp, Artificial Sequence
  Synthetic oligonucleotide
gccataggagtgcctgagtaagcgcacgag

SEQ ID NO: 189361 - DNA, 30 bp, Artificial Sequence
  Synthetic oligonucleotide
aaacgtagtagacgccctggttaagacgag

SEQ ID NO: 189362 - DNA, 31 bp, Artificial Sequence
  Synthetic oligonucleotide
tgtgctctgagtgagctagtagaacgacgag

SEQ ID NO: 189363 - DNA, 30 bp, Artificial Sequence
  Synthetic oligonucleotide
cataattaaccgacacaagcgatcgacgag

SEQ ID NO: 189364 - DNA, 30 bp, Artificial Sequence
  Synthetic oligonucleotide
ggggaccactttatacttttgaaggacgag

SEQ ID NO: 189365 - DNA, 30 bp, Artificial Sequence
  Synthetic oligonucleotide
gccgccgatatgacacgcctctcggacgag

SEQ ID NO: 189366 - DNA, 30 bp, Artificial Sequence
  Synthetic oligonucleotide
aaaacaacttcgggtcgaggctgggacgag

SEQ ID NO: 189367 - DNA, 30 bp, Artificial Sequence
  Synthetic oligonucleotide
atgatgaagacgcgagttcgggctgacgag

SEQ ID NO: 189368 - DNA, 30 bp, Artificial Sequence
  Synthetic oligonucleotide
aaaggcctgcggaggaatacgtgctacgag

SEQ ID NO: 189369 - DNA, 30 bp, Artificial Sequence
  Synthetic oligonucleotide
gctaacttttcatgcgaagatatgtacgag

SEQ ID NO: 189370 - DNA, 30 bp, Artificial Sequence
  Synthetic oligonucleotide
tacttctcaactattcatagaagttacgag

SEQ ID NO: 189371 - DNA, 30 bp, Artificial Sequence
  Synthetic oligonucleotide
aggtccttgtaatgagccccttgttacgag

SEQ ID NO: 189372 - DNA, 30 bp, Artificial Sequence
  Synthetic oligonucleotide
agagtagagaggagggcggaaaaaaccgag

SEQ ID NO: 189373 - DNA, 30 bp, Artificial Sequence
  Synthetic oligonucleotide
ctttcaagaggactggggcagtgaaccgag

SEQ ID NO: 189374 - DNA, 30 bp, Artificial Sequence
  Synthetic oligonucleotide
attcacgagccgggacgggaaggcaccgag

SEQ ID NO: 189375 - DNA, 30 bp, Artificial Sequence
  Synthetic oligonucleotide
ctaagctgaaggtctggcaggatgaccgag

SEQ ID NO: 189376 - DNA, 30 bp, Artificial Sequence
  Synthetic oligonucleotide
tgggaggtcatgacgttagacacccccgag

SEQ ID NO: 189377 - DNA, 30 bp, Artificial Sequence
  Synthetic oligonucleotide
aagcgctcaccgccatatgtgattcccgag

SEQ ID NO: 189378 - DNA, 30 bp, Artificial Sequence
  Synthetic oligonucleotide
atatctggttggcccgcatcccgagccgag

SEQ ID NO: 189379 - DNA, 30 bp, Artificial Sequence
  Synthetic oligonucleotide
agcggatcacggtcgggaatatgggccgag

SEQ ID NO: 189380 - DNA, 30 bp, Artificial Sequence
  Synthetic oligonucleotide
ctggcgatgacgcggtcttagcgatccgag

SEQ ID NO: 189381 - DNA, 31 bp, Artificial Sequence
  Synthetic oligonucleotide
ttacaaagagcaataagctccgttatccgag

SEQ ID NO: 189382 - DNA, 30 bp, Artificial Sequence
  Synthetic oligonucleotide
catgtacatgcacagcggggcttgtccgag

SEQ ID NO: 189383 - DNA, 30 bp, Artificial Sequence
  Synthetic oligonucleotide
ccgcggcattagctctacagatgaagcgag

SEQ ID NO: 189384 - DNA, 30 bp, Artificial Sequence
  Synthetic oligonucleotide
ccttcctaataagcggtgaacacgagcgag

SEQ ID NO: 189385 - DNA, 30 bp, Artificial Sequence
  Synthetic oligonucleotide
ttgggatgtatttggtaacaggcgagcgag

SEQ ID NO: 189386 - DNA, 30 bp, Artificial Sequence
  Synthetic oligonucleotide
gagtatttgagtgaatctttctggagcgag

SEQ ID NO: 189387 - DNA, 30 bp, Artificial Sequence
  Synthetic oligonucleotide
aacagtaatccctcgcgcattgatagcgag

SEQ ID NO: 189388 - DNA, 30 bp, Artificial Sequence
  Synthetic oligonucleotide
cacattataattcggtagggctgtagcgag

SEQ ID NO: 189389 - DNA, 30 bp, Artificial Sequence
  Synthetic oligonucleotide
attttacttaagcaaggggtgaagggcgag

SEQ ID NO: 189390 - DNA, 30 bp, Artificial Sequence
  Synthetic oligonucleotide
aaactcactttacatgatgtttggggcgag

SEQ ID NO: 189391 - DNA, 30 bp, Artificial Sequence
  Synthetic oligonucleotide
ttgcgcgcacccatgcgcacgtatggcgag

SEQ ID NO: 189392 - DNA, 30 bp, Artificial Sequence
  Synthetic oligonucleotide
tgttcctgaatagatgggtcttactgcgag

SEQ ID NO: 189393 - DNA, 30 bp, Artificial Sequence
  Synthetic oligonucleotide
cattatatggaaattcaccacgcctgcgag

SEQ ID NO: 189394 - DNA, 30 bp, Artificial Sequence
  Synthetic oligonucleotide
ccaacactctgatctgggccctcctgcgag

SEQ ID NO: 189395 - DNA, 30 bp, Artificial Sequence
  Synthetic oligonucleotide
agcataagggtcctcgttctatgctgcgag

SEQ ID NO: 189396 - DNA, 30 bp, Artificial Sequence
  Synthetic oligonucleotide
cataacgccgtccggaacgcccggtgcgag

SEQ ID NO: 189397 - DNA, 29 bp, Artificial Sequence
  Synthetic oligonucleotide
ggtgatatacgaccgcgccgttgtgcgag

SEQ ID NO: 189398 - DNA, 30 bp, Artificial Sequence
  Synthetic oligonucleotide
agtccaaaaggacatggatggtgttgcgag

SEQ ID NO: 189399 - DNA, 30 bp, Artificial Sequence
  Synthetic oligonucleotide
atcacaacgattggtaatacttatatcgag

SEQ ID NO: 189400 - DNA, 30 bp, Artificial Sequence
  Synthetic oligonucleotide
cgccaacgcgcgtaagtactatacctcgag

SEQ ID NO: 189401 - DNA, 30 bp, Artificial Sequence
  Synthetic oligonucleotide
aagatactgggtgtgctctactagctcgag

SEQ ID NO: 189402 - DNA, 30 bp, Artificial Sequence
  Synthetic oligonucleotide
cccgatcgaacctccggagggaatctcgag

SEQ ID NO: 189403 - DNA, 30 bp, Artificial Sequence
  Synthetic oligonucleotide
gccagtggaatggacgtgggaactctcgag

SEQ ID NO: 189404 - DNA, 30 bp, Artificial Sequence
  Synthetic oligonucleotide
tgatccagccggcgacttgagggtctcgag

SEQ ID NO: 189405 - DNA, 30 bp, Artificial Sequence
  Synthetic oligonucleotide
cttaatagttatttcgaagccaccgtcgag

SEQ ID NO: 189406 - DNA, 30 bp, Artificial Sequence
  Synthetic oligonucleotide
acaatcagttcgatagtagtcaaggtcgag

SEQ ID NO: 189407 - DNA, 30 bp, Artificial Sequence
  Synthetic oligonucleotide
ttctcgatttcatttctaatgtgggtcgag

SEQ ID NO: 189408 - DNA, 30 bp, Artificial Sequence
  Synthetic oligonucleotide
taggcctcctaccagttcttgtttgtcgag

SEQ ID NO: 189409 - DNA, 30 bp, Artificial Sequence
  Synthetic oligonucleotide
cgtaggtcgtagaccaccgcttccttcgag

SEQ ID NO: 189410 - DNA, 30 bp, Artificial Sequence
  Synthetic oligonucleotide
ttgtgaggcataactggggggagcttcgag

SEQ ID NO: 189411 - DNA, 30 bp, Artificial Sequence
  Synthetic oligonucleotide
caacatgacgaccgactatgttagttcgag

SEQ ID NO: 189412 - DNA, 30 bp, Artificial Sequence
  Synthetic oligonucleotide
ggaggtagtaaaaatgaggtagcgttcgag

SEQ ID NO: 189413 - DNA, 30 bp, Artificial Sequence
  Synthetic oligonucleotide
ttgggcgataagaccatagcggttttcgag

SEQ ID NO: 189414 - DNA, 30 bp, Artificial Sequence
  Synthetic oligonucleotide
tcaacactagtatcagctctatcaaaggag

SEQ ID NO: 189415 - DNA, 30 bp, Artificial Sequence
  Synthetic oligonucleotide
tttacgaaccgagtccagcactgaaaggag

SEQ ID NO: 189416 - DNA, 30 bp, Artificial Sequence
  Synthetic oligonucleotide
tctattagtaggtggctaggggtaaaggag

SEQ ID NO: 189417 - DNA, 30 bp, Artificial Sequence
  Synthetic oligonucleotide
aagtcacgtcgcattgctttgcacaaggag

SEQ ID NO: 189418 - DNA, 30 bp, Artificial Sequence
  Synthetic oligonucleotide
gctgattgttataagtggaaaggcaaggag

SEQ ID NO: 189419 - DNA, 30 bp, Artificial Sequence
  Synthetic oligonucleotide
acagatctatgtggcttacgtctgaaggag

SEQ ID NO: 189420 - DNA, 30 bp, Artificial Sequence
  Synthetic oligonucleotide
tctatcgttttagctcttcagactaaggag

SEQ ID NO: 189421 - DNA, 30 bp, Artificial Sequence
  Synthetic oligonucleotide
atcccaagaaaagtccaatcgagtaaggag

SEQ ID NO: 189422 - DNA, 30 bp, Artificial Sequence
  Synthetic oligonucleotide
catcgcctaaccccgatgaggggtaaggag

SEQ ID NO: 189423 - DNA, 30 bp, Artificial Sequence
  Synthetic oligonucleotide
cacatggacgtcataaaccgtggtaaggag

SEQ ID NO: 189424 - DNA, 30 bp, Artificial Sequence
  Synthetic oligonucleotide
ttgtaataagtcaccgtggttgaacaggag

SEQ ID NO: 189425 - DNA, 30 bp, Artificial Sequence
  Synthetic oligonucleotide
gcagaatcgcagcatatgataccccaggag

SEQ ID NO: 189426 - DNA, 31 bp, Artificial Sequence
  Synthetic oligonucleotide
tatagattgaacaacagcttggcctcaggag

SEQ ID NO: 189427 - DNA, 30 bp, Artificial Sequence
  Synthetic oligonucleotide
taacaggttactcgagattaaggtcaggag

SEQ ID NO: 189428 - DNA, 30 bp, Artificial Sequence
  Synthetic oligonucleotide
ttatcgtttaatcatagctccgcagaggag

SEQ ID NO: 189429 - DNA, 30 bp, Artificial Sequence
  Synthetic oligonucleotide
agcgattaattatgccaactattagaggag

SEQ ID NO: 189430 - DNA, 30 bp, Artificial Sequence
  Synthetic oligonucleotide
aattcaatgcctagacaccagcgtgaggag

SEQ ID NO: 189431 - DNA, 30 bp, Artificial Sequence
  Synthetic oligonucleotide
ttataggtgtttgcaccactaggtgaggag

SEQ ID NO: 189432 - DNA, 30 bp, Artificial Sequence
  Synthetic oligonucleotide
attggctaacaatgactgtgtggctaggag

SEQ ID NO: 189433 - DNA, 30 bp, Artificial Sequence
  Synthetic oligonucleotide
gcggccattgcggcttcaagttcgtaggag

SEQ ID NO: 189434 - DNA, 30 bp, Artificial Sequence
  Synthetic oligonucleotide
ccgggtactgtgtgaaagatgttttaggag

SEQ ID NO: 189435 - DNA, 30 bp, Artificial Sequence
  Synthetic oligonucleotide
ttctatctactactcagttgtaaaccggag

SEQ ID NO: 189436 - DNA, 30 bp, Artificial Sequence
  Synthetic oligonucleotide
tcaataatggatacagcaccgtcgccggag

SEQ ID NO: 189437 - DNA, 30 bp, Artificial Sequence
  Synthetic oligonucleotide
tgtctccagttttagtatctcagagcggag

SEQ ID NO: 189438 - DNA, 30 bp, Artificial Sequence
  Synthetic oligonucleotide
ttgtatagaatagagacgtggagagcggag

SEQ ID NO: 189439 - DNA, 30 bp, Artificial Sequence
  Synthetic oligonucleotide
atctaaagtataagatttatgcgagcggag

SEQ ID NO: 189440 - DNA, 30 bp, Artificial Sequence
  Synthetic oligonucleotide
tctactagggcatttgtcgacatagcggag

SEQ ID NO: 189441 - DNA, 30 bp, Artificial Sequence
  Synthetic oligonucleotide
cagcagccctacggtaaacaaccggcggag

SEQ ID NO: 189442 - DNA, 30 bp, Artificial Sequence
  Synthetic oligonucleotide
atggctcatacgggggcttggatggcggag

SEQ ID NO: 189443 - DNA, 30 bp, Artificial Sequence
  Synthetic oligonucleotide
ttaattacaaagcgtttacgggatgcggag

SEQ ID NO: 189444 - DNA, 30 bp, Artificial Sequence
  Synthetic oligonucleotide
tcagtaatcgccgcccgtagaattgcggag

SEQ ID NO: 189445 - DNA, 30 bp, Artificial Sequence
  Synthetic oligonucleotide
tgctgccgccagcacatggcctgctcggag

SEQ ID NO: 189446 - DNA, 30 bp, Artificial Sequence
  Synthetic oligonucleotide
cggtgcaacaaagtaatctctgtctcggag

SEQ ID NO: 189447 - DNA, 30 bp, Artificial Sequence
  Synthetic oligonucleotide
ggtcacccaaatagaataagtcagtcggag

SEQ ID NO: 189448 - DNA, 30 bp, Artificial Sequence
  Synthetic oligonucleotide
tgggaaaattactttccccggactagggag

SEQ ID NO: 189449 - DNA, 30 bp, Artificial Sequence
  Synthetic oligonucleotide
tttgggagagcaacggccaagggtagggag

SEQ ID NO: 189450 - DNA, 30 bp, Artificial Sequence
  Synthetic oligonucleotide
ttcggtctaggtaagccaaggtttagggag

SEQ ID NO: 189451 - DNA, 30 bp, Artificial Sequence
  Synthetic oligonucleotide
gcttgagtatcacccacaattaaacgggag

SEQ ID NO: 189452 - DNA, 30 bp, Artificial Sequence
  Synthetic oligonucleotide
aatatattgtcgtgctggactaaccgggag

SEQ ID NO: 189453 - DNA, 30 bp, Artificial Sequence
  Synthetic oligonucleotide
tgaacgtacgggaccgagaaatctcgggag

SEQ ID NO: 189454 - DNA, 30 bp, Artificial Sequence
  Synthetic oligonucleotide
cgtccaatctacttatgcaatttaggggag

SEQ ID NO: 189455 - DNA, 30 bp, Artificial Sequence
  Synthetic oligonucleotide
cgaccctgcttagcgatatagcagggggag

SEQ ID NO: 189456 - DNA, 30 bp, Artificial Sequence
  Synthetic oligonucleotide
gggccgacggcatggaaaccggagggggag

SEQ ID NO: 189457 - DNA, 30 bp, Artificial Sequence
  Synthetic oligonucleotide
ggtgccgaccgaacttaataatagggggag

SEQ ID NO: 189458 - DNA, 30 bp, Artificial Sequence
  Synthetic oligonucleotide
tttacgtgggacattacggtggtgggggag

SEQ ID NO: 189459 - DNA, 30 bp, Artificial Sequence
  Synthetic oligonucleotide
gggccgtgtggatttgattcgatctgggag

SEQ ID NO: 189460 - DNA, 30 bp, Artificial Sequence
  Synthetic oligonucleotide
acgcggccggaaggtattcatacttgggag

SEQ ID NO: 189461 - DNA, 30 bp, Artificial Sequence
  Synthetic oligonucleotide
gtggtatacaatctagttcatacttgggag

SEQ ID NO: 189462 - DNA, 30 bp, Artificial Sequence
  Synthetic oligonucleotide
acgagtgatagaccttcctctgcttgggag

SEQ ID NO: 189463 - DNA, 30 bp, Artificial Sequence
  Synthetic oligonucleotide
accggaccgaaactaggatagatttgggag

SEQ ID NO: 189464 - DNA, 30 bp, Artificial Sequence
  Synthetic oligonucleotide
gcacatcggtaccttgtacagtcaatggag

SEQ ID NO: 189465 - DNA, 30 bp, Artificial Sequence
  Synthetic oligonucleotide
ccgaccacagtctaataggacttaatggag

SEQ ID NO: 189466 - DNA, 30 bp, Artificial Sequence
  Synthetic oligonucleotide
gcattcggcaagcacacgagatatatggag

SEQ ID NO: 189467 - DNA, 30 bp, Artificial Sequence
  Synthetic oligonucleotide
catgtaaaaacgtttatgttacaactggag

SEQ ID NO: 189468 - DNA, 30 bp, Artificial Sequence
  Synthetic oligonucleotide
tcaccggaccgcagatgcgtacacgtggag

SEQ ID NO: 189469 - DNA, 30 bp, Artificial Sequence
  Synthetic oligonucleotide
agttttggccgtaaagtgtctatcgtggag

SEQ ID NO: 189470 - DNA, 30 bp, Artificial Sequence
  Synthetic oligonucleotide
gtccttaggggaaggcaatagtaggtggag

SEQ ID NO: 189471 - DNA, 30 bp, Artificial Sequence
  Synthetic oligonucleotide
cgggtcgtataccgtggtcagatcttggag

SEQ ID NO: 189472 - DNA, 30 bp, Artificial Sequence
  Synthetic oligonucleotide
agacacactggtgattttggaacgttggag

SEQ ID NO: 189473 - DNA, 30 bp, Artificial Sequence
  Synthetic oligonucleotide
gataatgaggagaggttatactatttggag

SEQ ID NO: 189474 - DNA, 30 bp, Artificial Sequence
  Synthetic oligonucleotide
agtcaatagggctctcccatcgctttggag

SEQ ID NO: 189475 - DNA, 30 bp, Artificial Sequence
  Synthetic oligonucleotide
actaaaaactatggattcgagtgtttggag

SEQ ID NO: 189476 - DNA, 30 bp, Artificial Sequence
  Synthetic oligonucleotide
cgctggattaatgatacatagagaaatgag

SEQ ID NO: 189477 - DNA, 30 bp, Artificial Sequence
  Synthetic oligonucleotide
gaatgccctgaatacgtggcaagacatgag

SEQ ID NO: 189478 - DNA, 30 bp, Artificial Sequence
  Synthetic oligonucleotide
actggtctggggagcgcaagcagacatgag

SEQ ID NO: 189479 - DNA, 30 bp, Artificial Sequence
  Synthetic oligonucleotide
cagtaacagatcaacgtgattttgcatgag

SEQ ID NO: 189480 - DNA, 30 bp, Artificial Sequence
  Synthetic oligonucleotide
cacggttcctaaggtcataagtatcatgag

SEQ ID NO: 189481 - DNA, 30 bp, Artificial Sequence
  Synthetic oligonucleotide
tcgtactgaggccttcgccacagtcatgag

SEQ ID NO: 189482 - DNA, 30 bp, Artificial Sequence
  Synthetic oligonucleotide
gtcgttcaagctgacaggcaggaagatgag

SEQ ID NO: 189483 - DNA, 30 bp, Artificial Sequence
  Synthetic oligonucleotide
aaagtttagctgatactttcgccagatgag

SEQ ID NO: 189484 - DNA, 30 bp, Artificial Sequence
  Synthetic oligonucleotide
ccaagtgacaggtcatggacttgagatgag

SEQ ID NO: 189485 - DNA, 30 bp, Artificial Sequence
  Synthetic oligonucleotide
gttctgtacttaattgttatgaacgatgag

SEQ ID NO: 189486 - DNA, 30 bp, Artificial Sequence
  Synthetic oligonucleotide
catggtaatcatcacatcctttaggatgag

SEQ ID NO: 189487 - DNA, 30 bp, Artificial Sequence
  Synthetic oligonucleotide
tgtaagaacaatgtgaggcccttggatgag

SEQ ID NO: 189488 - DNA, 30 bp, Artificial Sequence
  Synthetic oligonucleotide
agacccacgctatggaccagcgagtatgag

SEQ ID NO: 189489 - DNA, 30 bp, Artificial Sequence
  Synthetic oligonucleotide
aaacaatgcgttttatacaatacttatgag

SEQ ID NO: 189490 - DNA, 30 bp, Artificial Sequence
  Synthetic oligonucleotide
cagacattcagtgtcttcttaccttatgag

SEQ ID NO: 189491 - DNA, 30 bp, Artificial Sequence
  Synthetic oligonucleotide
gtgcgcttttgtaaccagcttgcaactgag

SEQ ID NO: 189492 - DNA, 30 bp, Artificial Sequence
  Synthetic oligonucleotide
tggatctctgattggcagcgagtaactgag

SEQ ID NO: 189493 - DNA, 30 bp, Artificial Sequence
  Synthetic oligonucleotide
atagtcatatcctgcattatagcgactgag

SEQ ID NO: 189494 - DNA, 30 bp, Artificial Sequence
  Synthetic oligonucleotide
acgttctcttctttaatggcgtgtactgag

SEQ ID NO: 189495 - DNA, 30 bp, Artificial Sequence
  Synthetic oligonucleotide
tggtagtaacccataccaaaggaacctgag

SEQ ID NO: 189496 - DNA, 30 bp, Artificial Sequence
  Synthetic oligonucleotide
gtggtgcttctggtcaaatctccgcctgag

SEQ ID NO: 189497 - DNA, 30 bp, Artificial Sequence
  Synthetic oligonucleotide
acctaactggctgcattgaccgtgcctgag

SEQ ID NO: 189498 - DNA, 30 bp, Artificial Sequence
  Synthetic oligonucleotide
tgagacgccctactaaacttatatcctgag

SEQ ID NO: 189499 - DNA, 30 bp, Artificial Sequence
  Synthetic oligonucleotide
ggtagacgcaggtgcctttaaagtcctgag

SEQ ID NO: 189500 - DNA, 30 bp, Artificial Sequence
  Synthetic oligonucleotide
atccgtcaggcttcgcaggatggagctgag

SEQ ID NO: 189501 - DNA, 30 bp, Artificial Sequence
  Synthetic oligonucleotide
agcgctttcttacgctgatagttcgctgag

SEQ ID NO: 189502 - DNA, 30 bp, Artificial Sequence
  Synthetic oligonucleotide
caggatagcctgtgcaagatccatgctgag

SEQ ID NO: 189503 - DNA, 30 bp, Artificial Sequence
  Synthetic oligonucleotide
cattgtggaggattataggtttatgctgag

SEQ ID NO: 189504 - DNA, 30 bp, Artificial Sequence
  Synthetic oligonucleotide
gtggttcactgtcagtgttcatgtgctgag

SEQ ID NO: 189505 - DNA, 30 bp, Artificial Sequence
  Synthetic oligonucleotide
atctcggtaatgttgctagacgaatctgag

SEQ ID NO: 189506 - DNA, 30 bp, Artificial Sequence
  Synthetic oligonucleotide
aaagaggcggccttactggctagatctgag

SEQ ID NO: 189507 - DNA, 30 bp, Artificial Sequence
  Synthetic oligonucleotide
tcaccggttaagccgaaaatcctatctgag

SEQ ID NO: 189508 - DNA, 30 bp, Artificial Sequence
  Synthetic oligonucleotide
ggtggttcgataggctagcaccagtctgag

SEQ ID NO: 189509 - DNA, 30 bp, Artificial Sequence
  Synthetic oligonucleotide
cgcgtgtatctgcgggcattgtagtctgag

SEQ ID NO: 189510 - DNA, 30 bp, Artificial Sequence
  Synthetic oligonucleotide
gggctacctactagtagctgcgtgtctgag

SEQ ID NO: 189511 - DNA, 30 bp, Artificial Sequence
  Synthetic oligonucleotide
cggatagtcgtgatctactatttgtctgag

SEQ ID NO: 189512 - DNA, 30 bp, Artificial Sequence
  Synthetic oligonucleotide
gactctctgagaataatacgcgattctgag

SEQ ID NO: 189513 - DNA, 30 bp, Artificial Sequence
  Synthetic oligonucleotide
gggaactaagccgagcactcttcaagtgag

SEQ ID NO: 189514 - DNA, 30 bp, Artificial Sequence
  Synthetic oligonucleotide
cacgctgttgccagaatataggtaagtgag

SEQ ID NO: 189515 - DNA, 30 bp, Artificial Sequence
  Synthetic oligonucleotide
taaggctgcgggatttacaggtacagtgag

SEQ ID NO: 189516 - DNA, 30 bp, Artificial Sequence
  Synthetic oligonucleotide
aagttacgattgatatccgggtacagtgag

SEQ ID NO: 189517 - DNA, 30 bp, Artificial Sequence
  Synthetic oligonucleotide
acccagtagggaatgtcaagggccagtgag

SEQ ID NO: 189518 - DNA, 30 bp, Artificial Sequence
  Synthetic oligonucleotide
tagaaacacgccgtggtgaaatccagtgag

SEQ ID NO: 189519 - DNA, 30 bp, Artificial Sequence
  Synthetic oligonucleotide
taggtgaacaatgcgggcagatccagtgag

SEQ ID NO: 189520 - DNA, 30 bp, Artificial Sequence
  Synthetic oligonucleotide
attcagggcaggattttgtattagagtgag

SEQ ID NO: 189521 - DNA, 30 bp, Artificial Sequence
  Synthetic oligonucleotide
tcatataggtgcgaatacccctggagtgag

SEQ ID NO: 189522 - DNA, 30 bp, Artificial Sequence
  Synthetic oligonucleotide
aaaacgcggcacggttgaaagctgagtgag

SEQ ID NO: 189523 - DNA, 30 bp, Artificial Sequence
  Synthetic oligonucleotide
ctctggcggctaacggtcgggcctagtgag

SEQ ID NO: 189524 - DNA, 30 bp, Artificial Sequence
  Synthetic oligonucleotide
tcgcgctttaaatacagtaccgagcgtgag

SEQ ID NO: 189525 - DNA, 30 bp, Artificial Sequence
  Synthetic oligonucleotide
gcacaacactcagattatatagctcgtgag

SEQ ID NO: 189526 - DNA, 30 bp, Artificial Sequence
  Synthetic oligonucleotide
cttaatcgctggtgtcatttgcgaggtgag

SEQ ID NO: 189527 - DNA, 30 bp, Artificial Sequence
  Synthetic oligonucleotide
taggtgttccgcgcccgtgaccacggtgag

SEQ ID NO: 189528 - DNA, 30 bp, Artificial Sequence
  Synthetic oligonucleotide
ataaccctcacttaatgagtgggatgtgag

SEQ ID NO: 189529 - DNA, 30 bp, Artificial Sequence
  Synthetic oligonucleotide
cttcaagaccaagtgggtacggtatgtgag

SEQ ID NO: 189530 - DNA, 30 bp, Artificial Sequence
  Synthetic oligonucleotide
gtctatgtctgcacgacatatagctgtgag

SEQ ID NO: 189531 - DNA, 30 bp, Artificial Sequence
  Synthetic oligonucleotide
catgttgggacaaagggttcacagtgtgag

SEQ ID NO: 189532 - DNA, 30 bp, Artificial Sequence
  Synthetic oligonucleotide
gattgcatagtcatgtagatgcagtgtgag

SEQ ID NO: 189533 - DNA, 30 bp, Artificial Sequence
  Synthetic oligonucleotide
tcccggaattcaaaacatatttgttgtgag

SEQ ID NO: 189534 - DNA, 30 bp, Artificial Sequence
  Synthetic oligonucleotide
cattcaaagcgagtgtatgcattttgtgag

SEQ ID NO: 189535 - DNA, 30 bp, Artificial Sequence
  Synthetic oligonucleotide
gtaactacggcatccccttgtcatattgag

SEQ ID NO: 189536 - DNA, 30 bp, Artificial Sequence
  Synthetic oligonucleotide
aaatatcaggcatgagcccactaacttgag

SEQ ID NO: 189537 - DNA, 30 bp, Artificial Sequence
  Synthetic oligonucleotide
cgttacagcgcaatccacaatcaccttgag

SEQ ID NO: 189538 - DNA, 30 bp, Artificial Sequence
  Synthetic oligonucleotide
tgaagcagcaggtcgtaagcgtcccttgag

SEQ ID NO: 189539 - DNA, 30 bp, Artificial Sequence
  Synthetic oligonucleotide
atctgaagcgtcggaaacttgtggcttgag

SEQ ID NO: 189540 - DNA, 30 bp, Artificial Sequence
  Synthetic oligonucleotide
gttcgaaactgggcccacgaatctcttgag

SEQ ID NO: 189541 - DNA, 30 bp, Artificial Sequence
  Synthetic oligonucleotide
actcgcatgtgggtatgatcgaacgttgag

SEQ ID NO: 189542 - DNA, 30 bp, Artificial Sequence
  Synthetic oligonucleotide
ccgggcgttaagaaccacccggacgttgag

SEQ ID NO: 189543 - DNA, 30 bp, Artificial Sequence
  Synthetic oligonucleotide
caaccatggtgctatgccaagcccgttgag

SEQ ID NO: 189544 - DNA, 30 bp, Artificial Sequence
  Synthetic oligonucleotide
agatgatcacgttatattttgtgcgttgag

SEQ ID NO: 189545 - DNA, 30 bp, Artificial Sequence
  Synthetic oligonucleotide
caagtacgggcttacgcgatacaggttgag

SEQ ID NO: 189546 - DNA, 30 bp, Artificial Sequence
  Synthetic oligonucleotide
cacgcgaccgcctaggaaaagcaggttgag

SEQ ID NO: 189547 - DNA, 30 bp, Artificial Sequence
  Synthetic oligonucleotide
tcccgcccgtgcattgacgtttgggttgag

SEQ ID NO: 189548 - DNA, 30 bp, Artificial Sequence
  Synthetic oligonucleotide
tccattaatcgccttgtcaggaaatttgag

SEQ ID NO: 189549 - DNA, 30 bp, Artificial Sequence
  Synthetic oligonucleotide
cattgggcgcggaactccggagaatttgag

SEQ ID NO: 189550 - DNA, 30 bp, Artificial Sequence
  Synthetic oligonucleotide
ccagaatggaggggacagcatcactttgag

SEQ ID NO: 189551 - DNA, 30 bp, Artificial Sequence
  Synthetic oligonucleotide
caagcgttagaatagaacgtcacctttgag

SEQ ID NO: 189552 - DNA, 30 bp, Artificial Sequence
  Synthetic oligonucleotide
acactcgcttatggggaaacgatgtttgag

SEQ ID NO: 189553 - DNA, 30 bp, Artificial Sequence
  Synthetic oligonucleotide
agtaaagtcctcacctcaagcaccaaatag

SEQ ID NO: 189554 - DNA, 30 bp, Artificial Sequence
  Synthetic oligonucleotide
ggctaacacgtggcagatagtggcaaatag

SEQ ID NO: 189555 - DNA, 30 bp, Artificial Sequence
  Synthetic oligonucleotide
cagtcccgggcaatttacaggatcaaatag

SEQ ID NO: 189556 - DNA, 30 bp, Artificial Sequence
  Synthetic oligonucleotide
gattattacagggtatcaatcccgaaatag

SEQ ID NO: 189557 - DNA, 30 bp, Artificial Sequence
  Synthetic oligonucleotide
atacatgggacgtctagattcgggaaatag

SEQ ID NO: 189558 - DNA, 30 bp, Artificial Sequence
  Synthetic oligonucleotide
cgaagcactcgtcatgataatgtgaaatag

SEQ ID NO: 189559 - DNA, 30 bp, Artificial Sequence
  Synthetic oligonucleotide
catagctaagaaagccttatgcttaaatag

SEQ ID NO: 189560 - DNA, 30 bp, Artificial Sequence
  Synthetic oligonucleotide
gcatacatgctagttggattgcttaaatag

SEQ ID NO: 189561 - DNA, 30 bp, Artificial Sequence
  Synthetic oligonucleotide
ttatgattttaggtcgtgtcgcaacaatag

SEQ ID NO: 189562 - DNA, 30 bp, Artificial Sequence
  Synthetic oligonucleotide
ggtgttgggaacaggaattacgcacaatag

SEQ ID NO: 189563 - DNA, 31 bp, Artificial Sequence
  Synthetic oligonucleotide
tcaggcaccgcgtttcttaagttaccaatag

SEQ ID NO: 189564 - DNA, 30 bp, Artificial Sequence
  Synthetic oligonucleotide
tgacccactacatgcatatgttggcaatag

SEQ ID NO: 189565 - DNA, 30 bp, Artificial Sequence
  Synthetic oligonucleotide
aacttagtagagtctaatcgaaccgaatag

SEQ ID NO: 189566 - DNA, 30 bp, Artificial Sequence
  Synthetic oligonucleotide
tgcgcccatcacgggagctccttcgaatag

SEQ ID NO: 189567 - DNA, 30 bp, Artificial Sequence
  Synthetic oligonucleotide
gttaagccactcttaagctaacgggaatag

SEQ ID NO: 189568 - DNA, 30 bp, Artificial Sequence
  Synthetic oligonucleotide
tggaactatgggcaccctaatttggaatag

SEQ ID NO: 189569 - DNA, 30 bp, Artificial Sequence
  Synthetic oligonucleotide
tacattttgagtgagccacagagtgaatag

SEQ ID NO: 189570 - DNA, 30 bp, Artificial Sequence
  Synthetic oligonucleotide
tgaacatatgataatactggaacgtaatag

SEQ ID NO: 189571 - DNA, 30 bp, Artificial Sequence
  Synthetic oligonucleotide
gtcaaaagctaacacgagccggacacatag

SEQ ID NO: 189572 - DNA, 30 bp, Artificial Sequence
  Synthetic oligonucleotide
tgcgtgctgcaagctgcttgacccacatag

SEQ ID NO: 189573 - DNA, 30 bp, Artificial Sequence
  Synthetic oligonucleotide
tcgggatccgggagaaatcggagcacatag

SEQ ID NO: 189574 - DNA, 30 bp, Artificial Sequence
  Synthetic oligonucleotide
ctagtactctctacactgtcctgcacatag

SEQ ID NO: 189575 - DNA, 30 bp, Artificial Sequence
  Synthetic oligonucleotide
tggcagatacccgctcaatgcccgacatag

SEQ ID NO: 189576 - DNA, 30 bp, Artificial Sequence
  Synthetic oligonucleotide
acgctacgggcggcaattggggggacatag

SEQ ID NO: 189577 - DNA, 30 bp, Artificial Sequence
  Synthetic oligonucleotide
ccgggcagtaggatatgaaacattacatag

SEQ ID NO: 189578 - DNA, 30 bp, Artificial Sequence
  Synthetic oligonucleotide
gataaattggcatgtgaggcataaccatag

SEQ ID NO: 189579 - DNA, 30 bp, Artificial Sequence
  Synthetic oligonucleotide
ttcgtccgcgttataactgtattaccatag

SEQ ID NO: 189580 - DNA, 30 bp, Artificial Sequence
  Synthetic oligonucleotide
ttatggtattcatggtgtaagatgccatag

SEQ ID NO: 189581 - DNA, 30 bp, Artificial Sequence
  Synthetic oligonucleotide
taacggtctgataacatcgggggagcatag

SEQ ID NO: 189582 - DNA, 30 bp, Artificial Sequence
  Synthetic oligonucleotide
ttagcagggtgagttgtccaggaggcatag

SEQ ID NO: 189583 - DNA, 30 bp, Artificial Sequence
  Synthetic oligonucleotide
acgctgagtcggggtttgggaacgtcatag

SEQ ID NO: 189584 - DNA, 30 bp, Artificial Sequence
  Synthetic oligonucleotide
tactcgcgttaccgctgcggtgtgtcatag

SEQ ID NO: 189585 - DNA, 30 bp, Artificial Sequence
  Synthetic oligonucleotide
agcgctagttagattgtcgataaaagatag

SEQ ID NO: 189586 - DNA, 30 bp, Artificial Sequence
  Synthetic oligonucleotide
tccttattctatgggaccgttgatagatag

SEQ ID NO: 189587 - DNA, 30 bp, Artificial Sequence
  Synthetic oligonucleotide
tcccaagccctttggcgccaaagtagatag

SEQ ID NO: 189588 - DNA, 30 bp, Artificial Sequence
  Synthetic oligonucleotide
ctctggccgacgatgtcgcgaacacgatag

SEQ ID NO: 189589 - DNA, 30 bp, Artificial Sequence
  Synthetic oligonucleotide
gcgaggcgaagactcgcttagggacgatag

SEQ ID NO: 189590 - DNA, 30 bp, Artificial Sequence
  Synthetic oligonucleotide
tctgggcaagccatgcctcttgcgcgatag

SEQ ID NO: 189591 - DNA, 30 bp, Artificial Sequence
  Synthetic oligonucleotide
agctacgcctttaagttagcgtctcgatag

SEQ ID NO: 189592 - DNA, 30 bp, Artificial Sequence
  Synthetic oligonucleotide
aatataaggctgttgcgtaaccaaggatag

SEQ ID NO: 189593 - DNA, 30 bp, Artificial Sequence
  Synthetic oligonucleotide
cagccaacccttgatcatcttgaaggatag

SEQ ID NO: 189594 - DNA, 30 bp, Artificial Sequence
  Synthetic oligonucleotide
accaaagcttaaggcatcatttacggatag

SEQ ID NO: 189595 - DNA, 30 bp, Artificial Sequence
  Synthetic oligonucleotide
tttggctgatagattcagaggtagggatag

SEQ ID NO: 189596 - DNA, 30 bp, Artificial Sequence
  Synthetic oligonucleotide
tacaaaagatactaatgcgggagatgatag

SEQ ID NO: 189597 - DNA, 30 bp, Artificial Sequence
  Synthetic oligonucleotide
atcaaacccttaatgtcaattccctgatag

SEQ ID NO: 189598 - DNA, 30 bp, Artificial Sequence
  Synthetic oligonucleotide
cagggcctctcgatattagagggctgatag

SEQ ID NO: 189599 - DNA, 30 bp, Artificial Sequence
  Synthetic oligonucleotide
gggggttcaaaggaacttagagggtgatag

SEQ ID NO: 189600 - DNA, 30 bp, Artificial Sequence
  Synthetic oligonucleotide
ggattagtctgagagtggaagaacatatag

SEQ ID NO: 189601 - DNA, 30 bp, Artificial Sequence
  Synthetic oligonucleotide
atagatggtaacacttactatttcatatag

SEQ ID NO: 189602 - DNA, 30 bp, Artificial Sequence
  Synthetic oligonucleotide
aaacgaaatccctgatgaggttctatatag

SEQ ID NO: 189603 - DNA, 30 bp, Artificial Sequence
  Synthetic oligonucleotide
aaatgacaatgattggtgtataaactatag

SEQ ID NO: 189604 - DNA, 30 bp, Artificial Sequence
  Synthetic oligonucleotide
atctagcaggcgtatgctatacgactatag

SEQ ID NO: 189605 - DNA, 30 bp, Artificial Sequence
  Synthetic oligonucleotide
tagtatggcatacgatcagggatactatag

SEQ ID NO: 189606 - DNA, 30 bp, Artificial Sequence
  Synthetic oligonucleotide
gaaaaggtggaaaaagtattaggcctatag

SEQ ID NO: 189607 - DNA, 30 bp, Artificial Sequence
  Synthetic oligonucleotide
agccgaaaggcctacttataagggctatag

SEQ ID NO: 189608 - DNA, 30 bp, Artificial Sequence
  Synthetic oligonucleotide
aagatatacgagggatctgagcctctatag

SEQ ID NO: 189609 - DNA, 30 bp, Artificial Sequence
  Synthetic oligonucleotide
taactatttctcagaaggaatgaagtatag

SEQ ID NO: 189610 - DNA, 30 bp, Artificial Sequence
  Synthetic oligonucleotide
gtgcaagaataccggtcggtttaagtatag

SEQ ID NO: 189611 - DNA, 30 bp, Artificial Sequence
  Synthetic oligonucleotide
gagttatggaaagtggacctggtagtatag

SEQ ID NO: 189612 - DNA, 30 bp, Artificial Sequence
  Synthetic oligonucleotide
cactctaagataggtatacaccgggtatag

SEQ ID NO: 189613 - DNA, 30 bp, Artificial Sequence
  Synthetic oligonucleotide
gtctttggatgacttccgtgggttgtatag

SEQ ID NO: 189614 - DNA, 30 bp, Artificial Sequence
  Synthetic oligonucleotide
cacccgatcgaggaaccccgacgattatag

SEQ ID NO: 189615 - DNA, 30 bp, Artificial Sequence
  Synthetic oligonucleotide
gaaggaaattttgatcccagagtattatag

SEQ ID NO: 189616 - DNA, 30 bp, Artificial Sequence
  Synthetic oligonucleotide
gtaacgatgtacctaatcagtcagttatag

SEQ ID NO: 189617 - DNA, 30 bp, Artificial Sequence
  Synthetic oligonucleotide
acccatgcccggccaactaacgcaaactag

SEQ ID NO: 189618 - DNA, 31 bp, Artificial Sequence
  Synthetic oligonucleotide
gggatgaaattagccagtggcggcccactag

SEQ ID NO: 189619 - DNA, 30 bp, Artificial Sequence
  Synthetic oligonucleotide
gtatattggcacccacctgtatggcactag

SEQ ID NO: 189620 - DNA, 30 bp, Artificial Sequence
  Synthetic oligonucleotide
aacggtctcaaccccccgttaaaagactag

SEQ ID NO: 189621 - DNA, 30 bp, Artificial Sequence
  Synthetic oligonucleotide
aggttcttcggtgggttctgacaagactag

SEQ ID NO: 189622 - DNA, 30 bp, Artificial Sequence
  Synthetic oligonucleotide
taaactcgaaattcatatttctacgactag

SEQ ID NO: 189623 - DNA, 30 bp, Artificial Sequence
  Synthetic oligonucleotide
gccccgccgtgaccacctagcgaggactag

SEQ ID NO: 189624 - DNA, 30 bp, Artificial Sequence
  Synthetic oligonucleotide
gccgatatgtggttccgaagagctgactag

SEQ ID NO: 189625 - DNA, 30 bp, Artificial Sequence
  Synthetic oligonucleotide
ctcacccaatgcgtagttatctggtactag

SEQ ID NO: 189626 - DNA, 30 bp, Artificial Sequence
  Synthetic oligonucleotide
agttacatttcccctagctaactttactag

SEQ ID NO: 189627 - DNA, 30 bp, Artificial Sequence
  Synthetic oligonucleotide
cccacgacaccgatcatattacaaacctag

SEQ ID NO: 189628 - DNA, 30 bp, Artificial Sequence
  Synthetic oligonucleotide
cagacaatactttccatacaggcaacctag

SEQ ID NO: 189629 - DNA, 30 bp, Artificial Sequence
  Synthetic oligonucleotide
gcagggtgttttcaggtgcgagcgacctag

SEQ ID NO: 189630 - DNA, 30 bp, Artificial Sequence
  Synthetic oligonucleotide
agtcacgttcgttcaagagttactacctag

SEQ ID NO: 189631 - DNA, 30 bp, Artificial Sequence
  Synthetic oligonucleotide
accatatatgtcggatagcaaattacctag

SEQ ID NO: 189632 - DNA, 30 bp, Artificial Sequence
  Synthetic oligonucleotide
agaggcaggccctcagcgcgtgcaccctag

SEQ ID NO: 189633 - DNA, 30 bp, Artificial Sequence
  Synthetic oligonucleotide
tgcagatgtacccggaaacgtctgccctag

SEQ ID NO: 189634 - DNA, 30 bp, Artificial Sequence
  Synthetic oligonucleotide
agagaataggcgcaaaggtaacctgcctag

SEQ ID NO: 189635 - DNA, 30 bp, Artificial Sequence
  Synthetic oligonucleotide
caatacatgaatatgccggttagatcctag

SEQ ID NO: 189636 - DNA, 30 bp, Artificial Sequence
  Synthetic oligonucleotide
atgaccagtcgtttagtgcataactcctag

SEQ ID NO: 189637 - DNA, 30 bp, Artificial Sequence
  Synthetic oligonucleotide
taccggctccgctggtctggctcttcctag

SEQ ID NO: 189638 - DNA, 30 bp, Artificial Sequence
  Synthetic oligonucleotide
tggcacaagtcaattctgttcataagctag

SEQ ID NO: 189639 - DNA, 30 bp, Artificial Sequence
  Synthetic oligonucleotide
tgtttggtaaggtgtaatagagacagctag

SEQ ID NO: 189640 - DNA, 30 bp, Artificial Sequence
  Synthetic oligonucleotide
ttatccacagaacacgtccaatctagctag

SEQ ID NO: 189641 - DNA, 30 bp, Artificial Sequence
  Synthetic oligonucleotide
ttatcgcaggagagcacaagaatacgctag

SEQ ID NO: 189642 - DNA, 30 bp, Artificial Sequence
  Synthetic oligonucleotide
gcgtcgtaactaatctaaggggcgcgctag

SEQ ID NO: 189643 - DNA, 30 bp, Artificial Sequence
  Synthetic oligonucleotide
ggattcgcgcccgacggttgagcaggctag

SEQ ID NO: 189644 - DNA, 30 bp, Artificial Sequence
  Synthetic oligonucleotide
ggcgcataccccgggggctaaaacggctag

SEQ ID NO: 189645 - DNA, 30 bp, Artificial Sequence
  Synthetic oligonucleotide
cattttcggggcgcattacctcacggctag

SEQ ID NO: 189646 - DNA, 30 bp, Artificial Sequence
  Synthetic oligonucleotide
tcaatgcgtttgttgggctgtaatggctag

SEQ ID NO: 189647 - DNA, 30 bp, Artificial Sequence
  Synthetic oligonucleotide
acaggcgaccctacctggtggatgtgctag

SEQ ID NO: 189648 - DNA, 30 bp, Artificial Sequence
  Synthetic oligonucleotide
tacactttgacggcgaggataaattgctag

SEQ ID NO: 189649 - DNA, 30 bp, Artificial Sequence
  Synthetic oligonucleotide
ttgggccgcaagtacctcctgggttgctag

SEQ ID NO: 189650 - DNA, 30 bp, Artificial Sequence
  Synthetic oligonucleotide
tcgcctcgaagtttgcggcgcatttgctag

SEQ ID NO: 189651 - DNA, 30 bp, Artificial Sequence
  Synthetic oligonucleotide
cgaatgccaattgctgttcccttcatctag

SEQ ID NO: 189652 - DNA, 30 bp, Artificial Sequence
  Synthetic oligonucleotide
agtcaaggctagtcttgcgcttggatctag

SEQ ID NO: 189653 - DNA, 30 bp, Artificial Sequence
  Synthetic oligonucleotide
taacactatactctcgccacgtttatctag

SEQ ID NO: 189654 - DNA, 30 bp, Artificial Sequence
  Synthetic oligonucleotide
atgtctggcacaattacatccccactctag

SEQ ID NO: 189655 - DNA, 30 bp, Artificial Sequence
  Synthetic oligonucleotide
ggcgaagatgaagacccacacaatctctag

SEQ ID NO: 189656 - DNA, 30 bp, Artificial Sequence
  Synthetic oligonucleotide
agacgaatatgccgcacgtccccagtctag

SEQ ID NO: 189657 - DNA, 30 bp, Artificial Sequence
  Synthetic oligonucleotide
atacatctccgtacgaacgtaagagtctag

SEQ ID NO: 189658 - DNA, 30 bp, Artificial Sequence
  Synthetic oligonucleotide
agccagtgtgtttaaagcgctacggtctag

SEQ ID NO: 189659 - DNA, 30 bp, Artificial Sequence
  Synthetic oligonucleotide
cgggactcgccccagcaatcccttgtctag

SEQ ID NO: 189660 - DNA, 30 bp, Artificial Sequence
  Synthetic oligonucleotide
tcgtcgggctcctatcctggaaccttctag

SEQ ID NO: 189661 - DNA, 30 bp, Artificial Sequence
  Synthetic oligonucleotide
gcggattggggttgcccgaaactcttctag

SEQ ID NO: 189662 - DNA, 30 bp, Artificial Sequence
  Synthetic oligonucleotide
attacgtcataagtacggtgccggttctag

SEQ ID NO: 189663 - DNA, 29 bp, Artificial Sequence
  Synthetic oligonucleotide
ctatccatacgaatttaagtatgttctag

SEQ ID NO: 189664 - DNA, 30 bp, Artificial Sequence
  Synthetic oligonucleotide
gccgcggccggtatgcagttaagtttctag

SEQ ID NO: 189665 - DNA, 30 bp, Artificial Sequence
  Synthetic oligonucleotide
tgtgcctcttcgttcttggtgcaaaagtag

SEQ ID NO: 189666 - DNA, 30 bp, Artificial Sequence
  Synthetic oligonucleotide
tgctacaggatgaatggttggtcaaagtag

SEQ ID NO: 189667 - DNA, 30 bp, Artificial Sequence
  Synthetic oligonucleotide
aaaagcaccaaataccagcccctaaagtag

SEQ ID NO: 189668 - DNA, 30 bp, Artificial Sequence
  Synthetic oligonucleotide
attcgtgctcgtgctacggcggggaagtag

SEQ ID NO: 189669 - DNA, 30 bp, Artificial Sequence
  Synthetic oligonucleotide
ttgagatcatcaacgtaacgtaaacagtag

SEQ ID NO: 189670 - DNA, 30 bp, Artificial Sequence
  Synthetic oligonucleotide
atcagctacatgtgtcgtgttatccagtag

SEQ ID NO: 189671 - DNA, 30 bp, Artificial Sequence
  Synthetic oligonucleotide
ccaacgatgggcccttatgtaaagcagtag

SEQ ID NO: 189672 - DNA, 30 bp, Artificial Sequence
  Synthetic oligonucleotide
tagtcaaccaattaaaaatattagcagtag

SEQ ID NO: 189673 - DNA, 30 bp, Artificial Sequence
  Synthetic oligonucleotide
ttatcgatagccccccgataaaatcagtag

SEQ ID NO: 189674 - DNA, 30 bp, Artificial Sequence
  Synthetic oligonucleotide
gcagcagccaatctaggagcggctcagtag

SEQ ID NO: 189675 - DNA, 30 bp, Artificial Sequence
  Synthetic oligonucleotide
gcttattaataccagttaccgtcagagtag

SEQ ID NO: 189676 - DNA, 30 bp, Artificial Sequence
  Synthetic oligonucleotide
tgagtcctctccaaggcaaggtgggagtag

SEQ ID NO: 189677 - DNA, 30 bp, Artificial Sequence
  Synthetic oligonucleotide
tggggaagttcctggtgtttgcgctagtag

SEQ ID NO: 189678 - DNA, 30 bp, Artificial Sequence
  Synthetic oligonucleotide
acctcaaggtacaaaagaccgtaaacgtag

SEQ ID NO: 189679 - DNA, 30 bp, Artificial Sequence
  Synthetic oligonucleotide
acgtggcatacgtagattttgtacacgtag

SEQ ID NO: 189680 - DNA, 30 bp, Artificial Sequence
  Synthetic oligonucleotide
actaattatgaactccgaggcgtgacgtag

SEQ ID NO: 189681 - DNA, 30 bp, Artificial Sequence
  Synthetic oligonucleotide
cagttgtggtccaacggacatggaccgtag

SEQ ID NO: 189682 - DNA, 30 bp, Artificial Sequence
  Synthetic oligonucleotide
ttggcagatggacgtgtttcctagccgtag

SEQ ID NO: 189683 - DNA, 30 bp, Artificial Sequence
  Synthetic oligonucleotide
gcgccgagtttgttttaggtttatccgtag

SEQ ID NO: 189684 - DNA, 30 bp, Artificial Sequence
  Synthetic oligonucleotide
caggattcgtgcccggcgcgtagtccgtag

SEQ ID NO: 189685 - DNA, 30 bp, Artificial Sequence
  Synthetic oligonucleotide
acatttggagcccttgccacttccgcgtag

SEQ ID NO: 189686 - DNA, 30 bp, Artificial Sequence
  Synthetic oligonucleotide
attactggcttgtctcggctacaggcgtag

SEQ ID NO: 189687 - DNA, 30 bp, Artificial Sequence
  Synthetic oligonucleotide
gtgtccctgagctaaagacactatgcgtag

SEQ ID NO: 189688 - DNA, 31 bp, Artificial Sequence
  Synthetic oligonucleotide
ctcggtagcattagcggtgagctgtgcgtag

SEQ ID NO: 189689 - DNA, 30 bp, Artificial Sequence
  Synthetic oligonucleotide
ccggctgggtattagacgtagtaatcgtag

SEQ ID NO: 189690 - DNA, 30 bp, Artificial Sequence
  Synthetic oligonucleotide
gttaccgacgactttgattgtgggtcgtag

SEQ ID NO: 189691 - DNA, 30 bp, Artificial Sequence
  Synthetic oligonucleotide
gctggttgtacgatattaaccagaaggtag

SEQ ID NO: 189692 - DNA, 31 bp, Artificial Sequence
  Synthetic oligonucleotide
ggcctccgtcttcgaaacggagagaaggtag

SEQ ID NO: 189693 - DNA, 30 bp, Artificial Sequence
  Synthetic oligonucleotide
cgacctatcgaccacgcacatgccaggtag

SEQ ID NO: 189694 - DNA, 30 bp, Artificial Sequence
  Synthetic oligonucleotide
atatgagggcaccattgatacgagaggtag

SEQ ID NO: 189695 - DNA, 30 bp, Artificial Sequence
  Synthetic oligonucleotide
aacatgcctgacctgcagatggagaggtag

SEQ ID NO: 189696 - DNA, 30 bp, Artificial Sequence
  Synthetic oligonucleotide
gtactttgggagccgggaagaaataggtag

SEQ ID NO: 189697 - DNA, 30 bp, Artificial Sequence
  Synthetic oligonucleotide
cacgacaacaggctgatcttgtaccggtag

SEQ ID NO: 189698 - DNA, 30 bp, Artificial Sequence
  Synthetic oligonucleotide
tcgtgttgtcgtcatcaaaaaaggcggtag

SEQ ID NO: 189699 - DNA, 30 bp, Artificial Sequence
  Synthetic oligonucleotide
ggtgttatattgtgtcccacttatcggtag

SEQ ID NO: 189700 - DNA, 30 bp, Artificial Sequence
  Synthetic oligonucleotide
gaatcagagaatgcaagattgtaagggtag

SEQ ID NO: 189701 - DNA, 30 bp, Artificial Sequence
  Synthetic oligonucleotide
gctcaacgacggagcgtcgtttaagggtag

SEQ ID NO: 189702 - DNA, 30 bp, Artificial Sequence
  Synthetic oligonucleotide
atcaggtgcatatttgaggaccccgggtag

SEQ ID NO: 189703 - DNA, 30 bp, Artificial Sequence
  Synthetic oligonucleotide
ggaacatgtatcggggggttgtgcgggtag

SEQ ID NO: 189704 - DNA, 30 bp, Artificial Sequence
  Synthetic oligonucleotide
gtctgtcttgtattcagtgcagatgggtag

SEQ ID NO: 189705 - DNA, 30 bp, Artificial Sequence
  Synthetic oligonucleotide
aatagtgatcacttaaggggaggatggtag

SEQ ID NO: 189706 - DNA, 30 bp, Artificial Sequence
  Synthetic oligonucleotide
ggtgaattctctcttgtaatgacctggtag

SEQ ID NO: 189707 - DNA, 30 bp, Artificial Sequence
  Synthetic oligonucleotide
tacgaaaagctcgtgaaccctttttggtag

SEQ ID NO: 189708 - DNA, 30 bp, Artificial Sequence
  Synthetic oligonucleotide
catcagcacatgttagcagcgcaaatgtag

SEQ ID NO: 189709 - DNA, 30 bp, Artificial Sequence
  Synthetic oligonucleotide
ctgattaaacaccagtgtgaaaacatgtag

SEQ ID NO: 189710 - DNA, 30 bp, Artificial Sequence
  Synthetic oligonucleotide
tttactgggaaacctcgaatcgtcatgtag

SEQ ID NO: 189711 - DNA, 30 bp, Artificial Sequence
  Synthetic oligonucleotide
gacaacgggatccttaggccgttcatgtag

SEQ ID NO: 189712 - DNA, 30 bp, Artificial Sequence
  Synthetic oligonucleotide
tagagagaaagagccttacccatgatgtag

SEQ ID NO: 189713 - DNA, 30 bp, Artificial Sequence
  Synthetic oligonucleotide
gactgtgatccaaaatcttcctctatgtag

SEQ ID NO: 189714 - DNA, 30 bp, Artificial Sequence
  Synthetic oligonucleotide
caaggagtagcatattagtaggtactgtag

SEQ ID NO: 189715 - DNA, 30 bp, Artificial Sequence
  Synthetic oligonucleotide
aatgatcgctgcgtaatcacccccctgtag

SEQ ID NO: 189716 - DNA, 30 bp, Artificial Sequence
  Synthetic oligonucleotide
tgcgtgaaatatccgccagaagccctgtag

SEQ ID NO: 189717 - DNA, 30 bp, Artificial Sequence
  Synthetic oligonucleotide
tcacacgctgagggaccctttatcctgtag

SEQ ID NO: 189718 - DNA, 30 bp, Artificial Sequence
  Synthetic oligonucleotide
tcataggcgaaatcgcaagtgattctgtag

SEQ ID NO: 189719 - DNA, 30 bp, Artificial Sequence
  Synthetic oligonucleotide
gctcattgggagggcattggacgcgtgtag

SEQ ID NO: 189720 - DNA, 30 bp, Artificial Sequence
  Synthetic oligonucleotide
ggatccgcgtgggtcaaacctcaattgtag

SEQ ID NO: 189721 - DNA, 30 bp, Artificial Sequence
  Synthetic oligonucleotide
atggtgagcgcatgctcagccacattgtag

SEQ ID NO: 189722 - DNA, 30 bp, Artificial Sequence
  Synthetic oligonucleotide
tgtccaagcggaccagtggcgcgattgtag

SEQ ID NO: 189723 - DNA, 30 bp, Artificial Sequence
  Synthetic oligonucleotide
cggactacctgctggatccgcttattgtag

SEQ ID NO: 189724 - DNA, 30 bp, Artificial Sequence
  Synthetic oligonucleotide
caggcatacccatagatacccgacttgtag

SEQ ID NO: 189725 - DNA, 30 bp, Artificial Sequence
  Synthetic oligonucleotide
actatacatctaagtatatatcagttgtag

SEQ ID NO: 189726 - DNA, 30 bp, Artificial Sequence
  Synthetic oligonucleotide
aacgaataattcgtggtgatctaaaattag

SEQ ID NO: 189727 - DNA, 30 bp, Artificial Sequence
  Synthetic oligonucleotide
ataaaaacaattgccgattctagaaattag

SEQ ID NO: 189728 - DNA, 30 bp, Artificial Sequence
  Synthetic oligonucleotide
gtgggacaggacacatggaactgaaattag

SEQ ID NO: 189729 - DNA, 30 bp, Artificial Sequence
  Synthetic oligonucleotide
agtccggcacctagcgttctgcctaattag

SEQ ID NO: 189730 - DNA, 30 bp, Artificial Sequence
  Synthetic oligonucleotide
tacacccattgatatgcacatgtacattag

SEQ ID NO: 189731 - DNA, 30 bp, Artificial Sequence
  Synthetic oligonucleotide
caaaggggaaaattacgagcgagccattag

SEQ ID NO: 189732 - DNA, 30 bp, Artificial Sequence
  Synthetic oligonucleotide
gcggcatgtggcagtcaccagcgccattag

SEQ ID NO: 189733 - DNA, 30 bp, Artificial Sequence
  Synthetic oligonucleotide
aagtagatggggcacacacttcgccattag

SEQ ID NO: 189734 - DNA, 30 bp, Artificial Sequence
  Synthetic oligonucleotide
ccaagggagggagtgtaggcaggccattag

SEQ ID NO: 189735 - DNA, 30 bp, Artificial Sequence
  Synthetic oligonucleotide
gccggctgcggcctagtgcataaagattag

SEQ ID NO: 189736 - DNA, 30 bp, Artificial Sequence
  Synthetic oligonucleotide
gagatagggatttagccatgtgcagattag

SEQ ID NO: 189737 - DNA, 30 bp, Artificial Sequence
  Synthetic oligonucleotide
aggtttaggaggatggcgggagtagattag

SEQ ID NO: 189738 - DNA, 30 bp, Artificial Sequence
  Synthetic oligonucleotide
gtagtgaagagactatgctcaaaggattag

SEQ ID NO: 189739 - DNA, 30 bp, Artificial Sequence
  Synthetic oligonucleotide
ccaaaaaatgtctagagaccgcgtgattag

SEQ ID NO: 189740 - DNA, 30 bp, Artificial Sequence
  Synthetic oligonucleotide
gaggctgacgtaaactggcaatcatattag

SEQ ID NO: 189741 - DNA, 30 bp, Artificial Sequence
  Synthetic oligonucleotide
ggcataggttagaaattgatcagctattag

SEQ ID NO: 189742 - DNA, 30 bp, Artificial Sequence
  Synthetic oligonucleotide
gggcagcatagcttggtaagatcttattag

SEQ ID NO: 189743 - DNA, 30 bp, Artificial Sequence
  Synthetic oligonucleotide
cgttgtcgtgcccacagactaatttattag

SEQ ID NO: 189744 - DNA, 30 bp, Artificial Sequence
  Synthetic oligonucleotide
cttgcattttgtggctaacgaggcacttag

SEQ ID NO: 189745 - DNA, 30 bp, Artificial Sequence
  Synthetic oligonucleotide
tgacgccacgggatgggtctgaatacttag

SEQ ID NO: 189746 - DNA, 30 bp, Artificial Sequence
  Synthetic oligonucleotide
cgcgctccataataggtagagattacttag

SEQ ID NO: 189747 - DNA, 30 bp, Artificial Sequence
  Synthetic oligonucleotide
atgtgctcggttaccacgaaggttacttag

SEQ ID NO: 189748 - DNA, 30 bp, Artificial Sequence
  Synthetic oligonucleotide
actggctagagtcacctatatgtcgcttag

SEQ ID NO: 189749 - DNA, 30 bp, Artificial Sequence
  Synthetic oligonucleotide
atgacccgcggatcggtccagaatgcttag

SEQ ID NO: 189750 - DNA, 30 bp, Artificial Sequence
  Synthetic oligonucleotide
caagcatattggtgggttcactgtgcttag

SEQ ID NO: 189751 - DNA, 30 bp, Artificial Sequence
  Synthetic oligonucleotide
acggacgtacattatacgctgccatcttag

SEQ ID NO: 189752 - DNA, 30 bp, Artificial Sequence
  Synthetic oligonucleotide
cggcagccaggacccttaggatgatcttag

SEQ ID NO: 189753 - DNA, 30 bp, Artificial Sequence
  Synthetic oligonucleotide
cgtattgtgcccagtgaggccatatcttag

SEQ ID NO: 189754 - DNA, 30 bp, Artificial Sequence
  Synthetic oligonucleotide
catggaaaaaacaatataggatcctcttag

SEQ ID NO: 189755 - DNA, 30 bp, Artificial Sequence
  Synthetic oligonucleotide
tagcagtttgtctatcgtgaactctcttag

SEQ ID NO: 189756 - DNA, 30 bp, Artificial Sequence
  Synthetic oligonucleotide
aggagattaacttggtgacttaaaagttag

SEQ ID NO: 189757 - DNA, 30 bp, Artificial Sequence
  Synthetic oligonucleotide
ctctggcatcatatggaccagtgaagttag

SEQ ID NO: 189758 - DNA, 30 bp, Artificial Sequence
  Synthetic oligonucleotide
tccagggtctaaaaataagtgtagagttag

SEQ ID NO: 189759 - DNA, 30 bp, Artificial Sequence
  Synthetic oligonucleotide
agactgtttagccaaaatataacacgttag

SEQ ID NO: 189760 - DNA, 30 bp, Artificial Sequence
  Synthetic oligonucleotide
taagaagaagtgtgcagcgtttaccgttag

SEQ ID NO: 189761 - DNA, 30 bp, Artificial Sequence
  Synthetic oligonucleotide
gtagaggattaaatgcctgtactccgttag

SEQ ID NO: 189762 - DNA, 30 bp, Artificial Sequence
  Synthetic oligonucleotide
tagtataggaacagattgtcatcgcgttag

SEQ ID NO: 189763 - DNA, 30 bp, Artificial Sequence
  Synthetic oligonucleotide
atatagtgatggataatggccaggcgttag

SEQ ID NO: 189764 - DNA, 30 bp, Artificial Sequence
  Synthetic oligonucleotide
agcgccggagcaaagttgggggatcgttag

SEQ ID NO: 189765 - DNA, 30 bp, Artificial Sequence
  Synthetic oligonucleotide
acacggtttcatttattcgtacctcgttag

SEQ ID NO: 189766 - DNA, 30 bp, Artificial Sequence
  Synthetic oligonucleotide
ccgtgaagccctagggtggtgcaaggttag

SEQ ID NO: 189767 - DNA, 30 bp, Artificial Sequence
  Synthetic oligonucleotide
tccgctctcattggcgattgtggcggttag

SEQ ID NO: 189768 - DNA, 30 bp, Artificial Sequence
  Synthetic oligonucleotide
ctgtaaaccagattcgtagacgggggttag

SEQ ID NO: 189769 - DNA, 30 bp, Artificial Sequence
  Synthetic oligonucleotide
gacccggcttctgttggagagaactgttag

SEQ ID NO: 189770 - DNA, 30 bp, Artificial Sequence
  Synthetic oligonucleotide
tgcttaagcgatgtgcaagggttctgttag

SEQ ID NO: 189771 - DNA, 30 bp, Artificial Sequence
  Synthetic oligonucleotide
tgaataggcaagggtttgggaggaatttag

SEQ ID NO: 189772 - DNA, 30 bp, Artificial Sequence
  Synthetic oligonucleotide
taccaaggtccgaaaaccacacgcatttag

SEQ ID NO: 189773 - DNA, 30 bp, Artificial Sequence
  Synthetic oligonucleotide
agggggcctaatccagagcgatgcatttag

SEQ ID NO: 189774 - DNA, 30 bp, Artificial Sequence
  Synthetic oligonucleotide
aaccgctgttgggctaggcttatcatttag

SEQ ID NO: 189775 - DNA, 30 bp, Artificial Sequence
  Synthetic oligonucleotide
cacaggtctcggtatcagtgttctatttag

SEQ ID NO: 189776 - DNA, 30 bp, Artificial Sequence
  Synthetic oligonucleotide
gcgctacgatgaccctgcttgcagctttag

SEQ ID NO: 189777 - DNA, 30 bp, Artificial Sequence
  Synthetic oligonucleotide
ggatcgggttaaagctgtaggttagtttag

SEQ ID NO: 189778 - DNA, 30 bp, Artificial Sequence
  Synthetic oligonucleotide
tgctaattctcatggccatcctacgtttag

SEQ ID NO: 189779 - DNA, 30 bp, Artificial Sequence
  Synthetic oligonucleotide
gggtctcaccttgaatgaaaatgggtttag

SEQ ID NO: 189780 - DNA, 30 bp, Artificial Sequence
  Synthetic oligonucleotide
agattcaggttactacagatagggttttag

SEQ ID NO: 189781 - DNA, 30 bp, Artificial Sequence
  Synthetic oligonucleotide
cacgtggttatgggatcaggaattttttag

SEQ ID NO: 189782 - DNA, 30 bp, Artificial Sequence
  Synthetic oligonucleotide
tatagccatgggacaagacaccaaaaaacg

SEQ ID NO: 189783 - DNA, 30 bp, Artificial Sequence
  Synthetic oligonucleotide
tccccgctgaccaaccggtttgcaaaaacg

SEQ ID NO: 189784 - DNA, 30 bp, Artificial Sequence
  Synthetic oligonucleotide
cggtagtccgttccaatgctattaaaaacg

SEQ ID NO: 189785 - DNA, 30 bp, Artificial Sequence
  Synthetic oligonucleotide
cattcattaagggtagcttagttcaaaacg

SEQ ID NO: 189786 - DNA, 31 bp, Artificial Sequence
  Synthetic oligonucleotide
gaggactagcatcataaatggtacgaaaacg

SEQ ID NO: 189787 - DNA, 30 bp, Artificial Sequence
  Synthetic oligonucleotide
gttaaaatagaggtaagattcctgaaaacg

SEQ ID NO: 189788 - DNA, 30 bp, Artificial Sequence
  Synthetic oligonucleotide
gagtcctattaacgtggacaatgacaaacg

SEQ ID NO: 189789 - DNA, 30 bp, Artificial Sequence
  Synthetic oligonucleotide
gctgaatgtttcaaggggcgacaccaaacg

SEQ ID NO: 189790 - DNA, 30 bp, Artificial Sequence
  Synthetic oligonucleotide
ctggggggcggttaattcttcggccaaacg

SEQ ID NO: 189791 - DNA, 30 bp, Artificial Sequence
  Synthetic oligonucleotide
aaatgtgagcgacaacgacatatgcaaacg

SEQ ID NO: 189792 - DNA, 30 bp, Artificial Sequence
  Synthetic oligonucleotide
ggttcatcaagtcggcacaatagtcaaacg

SEQ ID NO: 189793 - DNA, 30 bp, Artificial Sequence
  Synthetic oligonucleotide
cgacgatttgtattgctcagcggtcaaacg

SEQ ID NO: 189794 - DNA, 30 bp, Artificial Sequence
  Synthetic oligonucleotide
tggatgagtggtatcctcgctgcagaaacg

SEQ ID NO: 189795 - DNA, 30 bp, Artificial Sequence
  Synthetic oligonucleotide
cttcgggtcgccccgtattggtcagaaacg

SEQ ID NO: 189796 - DNA, 30 bp, Artificial Sequence
  Synthetic oligonucleotide
tgttgcagggcaacgtgcatcccggaaacg

SEQ ID NO: 189797 - DNA, 30 bp, Artificial Sequence
  Synthetic oligonucleotide
gtttcgtagaaccgcccacacttggaaacg

SEQ ID NO: 189798 - DNA, 30 bp, Artificial Sequence
  Synthetic oligonucleotide
ctgaacagctacccttacctgaatgaaacg

SEQ ID NO: 189799 - DNA, 30 bp, Artificial Sequence
  Synthetic oligonucleotide
agaccggacgggcgatcgcacactgaaacg

SEQ ID NO: 189800 - DNA, 30 bp, Artificial Sequence
  Synthetic oligonucleotide
ctgatataacgaaggccaataattgaaacg

SEQ ID NO: 189801 - DNA, 30 bp, Artificial Sequence
  Synthetic oligonucleotide
tcccacaagagaggtaggcagtttgaaacg

SEQ ID NO: 189802 - DNA, 30 bp, Artificial Sequence
  Synthetic oligonucleotide
taaccagtggggggatctaaaagataaacg

SEQ ID NO: 189803 - DNA, 30 bp, Artificial Sequence
  Synthetic oligonucleotide
gcaggatgtcattttgatatgtgataaacg

SEQ ID NO: 189804 - DNA, 30 bp, Artificial Sequence
  Synthetic oligonucleotide
tagtacatcttggtgaaagccggctaaacg

SEQ ID NO: 189805 - DNA, 30 bp, Artificial Sequence
  Synthetic oligonucleotide
atcctaccagaaactcaactatcttaaacg

SEQ ID NO: 189806 - DNA, 30 bp, Artificial Sequence
  Synthetic oligonucleotide
acggaagatcagtcaggattgtgttaaacg

SEQ ID NO: 189807 - DNA, 30 bp, Artificial Sequence
  Synthetic oligonucleotide
aatgaacggctgtatgccgtctacacaacg

SEQ ID NO: 189808 - DNA, 30 bp, Artificial Sequence
  Synthetic oligonucleotide
agcacagtgcgcaatactatttcgccaacg

SEQ ID NO: 189809 - DNA, 30 bp, Artificial Sequence
  Synthetic oligonucleotide
cacggtataccaggccgcacagtgccaacg

SEQ ID NO: 189810 - DNA, 30 bp, Artificial Sequence
  Synthetic oligonucleotide
cgtttcataccgtcataatcaagtccaacg

SEQ ID NO: 189811 - DNA, 30 bp, Artificial Sequence
  Synthetic oligonucleotide
gaaaacggttagaattgtctgttggcaacg

SEQ ID NO: 189812 - DNA, 30 bp, Artificial Sequence
  Synthetic oligonucleotide
gtggccgggacagatgactgtctatcaacg

SEQ ID NO: 189813 - DNA, 30 bp, Artificial Sequence
  Synthetic oligonucleotide
gctaccctcagccaatttgacacctcaacg

SEQ ID NO: 189814 - DNA, 30 bp, Artificial Sequence
  Synthetic oligonucleotide
tcatatagaggtatttctgttccgtcaacg

SEQ ID NO: 189815 - DNA, 30 bp, Artificial Sequence
  Synthetic oligonucleotide
gtataggctagtaattgccatcggtcaacg

SEQ ID NO: 189816 - DNA, 30 bp, Artificial Sequence
  Synthetic oligonucleotide
ccgcacataactgaggcatacacttcaacg

SEQ ID NO: 189817 - DNA, 30 bp, Artificial Sequence
  Synthetic oligonucleotide
agtcaactcccaacgggaggtccaagaacg

SEQ ID NO: 189818 - DNA, 30 bp, Artificial Sequence
  Synthetic oligonucleotide
cgttcggattttaaggtcggtaacagaacg

SEQ ID NO: 189819 - DNA, 30 bp, Artificial Sequence
  Synthetic oligonucleotide
ttgtgaaactgaatagcgacggggagaacg

SEQ ID NO: 189820 - DNA, 30 bp, Artificial Sequence
  Synthetic oligonucleotide
tcacggtagtgcgaagggttactgagaacg

SEQ ID NO: 189821 - DNA, 30 bp, Artificial Sequence
  Synthetic oligonucleotide
gaagtgcattgggtagtccctctgagaacg

SEQ ID NO: 189822 - DNA, 30 bp, Artificial Sequence
  Synthetic oligonucleotide
cacccgtatggggtagagctgcttagaacg

SEQ ID NO: 189823 - DNA, 30 bp, Artificial Sequence
  Synthetic oligonucleotide
agttgctggataccacacgcatcgcgaacg

SEQ ID NO: 189824 - DNA, 30 bp, Artificial Sequence
  Synthetic oligonucleotide
ccccaccgataagccataaaaactcgaacg

SEQ ID NO: 189825 - DNA, 30 bp, Artificial Sequence
  Synthetic oligonucleotide
gttcgggtaattagacaaacacttcgaacg

SEQ ID NO: 189826 - DNA, 30 bp, Artificial Sequence
  Synthetic oligonucleotide
tgtcttaagggtacacagaaccttcgaacg

SEQ ID NO: 189827 - DNA, 30 bp, Artificial Sequence
  Synthetic oligonucleotide
cagggcagagcccgtagtgcaccaggaacg

SEQ ID NO: 189828 - DNA, 30 bp, Artificial Sequence
  Synthetic oligonucleotide
tcatcagaacatattgacccttacggaacg

SEQ ID NO: 189829 - DNA, 30 bp, Artificial Sequence
  Synthetic oligonucleotide
tcaaattgagaactagttcacgcatgaacg

SEQ ID NO: 189830 - DNA, 30 bp, Artificial Sequence
  Synthetic oligonucleotide
tcacgggatgttctcatcgctaggtgaacg

SEQ ID NO: 189831 - DNA, 30 bp, Artificial Sequence
  Synthetic oligonucleotide
tttgacagtcctattgagggtgattgaacg

SEQ ID NO: 189832 - DNA, 30 bp, Artificial Sequence
  Synthetic oligonucleotide
gaatacctcatcgccgtcggatcttgaacg

SEQ ID NO: 189833 - DNA, 30 bp, Artificial Sequence
  Synthetic oligonucleotide
gacgactgcgcagggactatcaacataacg

SEQ ID NO: 189834 - DNA, 30 bp, Artificial Sequence
  Synthetic oligonucleotide
tctcgacacgatagggcctggaacataacg

SEQ ID NO: 189835 - DNA, 30 bp, Artificial Sequence
  Synthetic oligonucleotide
aaaacgaggcttcgcttgtccaggataacg

SEQ ID NO: 189836 - DNA, 30 bp, Artificial Sequence
  Synthetic oligonucleotide
atttcaaaagttaggccttaagctataacg

SEQ ID NO: 189837 - DNA, 29 bp, Artificial Sequence
  Synthetic oligonucleotide
taggttgatcaggcgaacaaaaactaacg

SEQ ID NO: 189838 - DNA, 30 bp, Artificial Sequence
  Synthetic oligonucleotide
gacggccttcatatattgactacactaacg

SEQ ID NO: 189839 - DNA, 30 bp, Artificial Sequence
  Synthetic oligonucleotide
ttacgcgcacccgtacaaacctcactaacg

SEQ ID NO: 189840 - DNA, 30 bp, Artificial Sequence
  Synthetic oligonucleotide
caaatgacgatgatcgacgggcccctaacg

SEQ ID NO: 189841 - DNA, 30 bp, Artificial Sequence
  Synthetic oligonucleotide
aggcgaaagtaaaccagcgtttccctaacg

SEQ ID NO: 189842 - DNA, 30 bp, Artificial Sequence
  Synthetic oligonucleotide
aggatatactacgtcccgcattgcctaacg

SEQ ID NO: 189843 - DNA, 30 bp, Artificial Sequence
  Synthetic oligonucleotide
gccactgaatcccagaatctatctctaacg

SEQ ID NO: 189844 - DNA, 30 bp, Artificial Sequence
  Synthetic oligonucleotide
cacccgagtcaaccgatcgtacacgtaacg

SEQ ID NO: 189845 - DNA, 30 bp, Artificial Sequence
  Synthetic oligonucleotide
cgcgaacctaaaggtcctgacagcgtaacg

SEQ ID NO: 189846 - DNA, 30 bp, Artificial Sequence
  Synthetic oligonucleotide
tgtggtgcggcgcgaaaggagactgtaacg

SEQ ID NO: 189847 - DNA, 30 bp, Artificial Sequence
  Synthetic oligonucleotide
taacagatctctcgtcacattattgtaacg

SEQ ID NO: 189848 - DNA, 30 bp, Artificial Sequence
  Synthetic oligonucleotide
aaacataaattacaatatggaaaattaacg

SEQ ID NO: 189849 - DNA, 30 bp, Artificial Sequence
  Synthetic oligonucleotide
gaggagggtcggtttcgcgacttcttaacg

SEQ ID NO: 189850 - DNA, 29 bp, Artificial Sequence
  Synthetic oligonucleotide
tcgttaatctgtaatggtatatgttaacg

SEQ ID NO: 189851 - DNA, 30 bp, Artificial Sequence
  Synthetic oligonucleotide
gaacgcgggcaacatgaccaattgttaacg

SEQ ID NO: 189852 - DNA, 30 bp, Artificial Sequence
  Synthetic oligonucleotide
caatagcatgtgaagatcggcgcgaacacg

SEQ ID NO: 189853 - DNA, 30 bp, Artificial Sequence
  Synthetic oligonucleotide
agcggccatctcacgattagacttaacacg

SEQ ID NO: 189854 - DNA, 30 bp, Artificial Sequence
  Synthetic oligonucleotide
tcgggtcattccgcaacgagttaccacacg

SEQ ID NO: 189855 - DNA, 30 bp, Artificial Sequence
  Synthetic oligonucleotide
atgggactttggcaaaatgaatgccacacg

SEQ ID NO: 189856 - DNA, 30 bp, Artificial Sequence
  Synthetic oligonucleotide
ttgaatgtatcaccagcgcagggtcacacg

SEQ ID NO: 189857 - DNA, 30 bp, Artificial Sequence
  Synthetic oligonucleotide
agtggttgtaagctcttgccctaagacacg

SEQ ID NO: 189858 - DNA, 30 bp, Artificial Sequence
  Synthetic oligonucleotide
cattcgaggccttataatttactcgacacg

SEQ ID NO: 189859 - DNA, 30 bp, Artificial Sequence
  Synthetic oligonucleotide
gctagtataatatctgccggcgaggacacg

SEQ ID NO: 189860 - DNA, 30 bp, Artificial Sequence
  Synthetic oligonucleotide
tcatggagaagtatggcccgacgggacacg

SEQ ID NO: 189861 - DNA, 30 bp, Artificial Sequence
  Synthetic oligonucleotide
tgattccactcagcgggcgcaaatgacacg

SEQ ID NO: 189862 - DNA, 30 bp, Artificial Sequence
  Synthetic oligonucleotide
actcaaaatcggtggtagagctatgacacg

SEQ ID NO: 189863 - DNA, 30 bp, Artificial Sequence
  Synthetic oligonucleotide
ccgacgagggcatcagattaggctgacacg

SEQ ID NO: 189864 - DNA, 30 bp, Artificial Sequence
  Synthetic oligonucleotide
acacggcatcgttaactgtcccgtgacacg

SEQ ID NO: 189865 - DNA, 30 bp, Artificial Sequence
  Synthetic oligonucleotide
ataattagagttggcttaggattatacacg

SEQ ID NO: 189866 - DNA, 30 bp, Artificial Sequence
  Synthetic oligonucleotide
taagtctgtagcagagggtaatgctacacg

SEQ ID NO: 189867 - DNA, 30 bp, Artificial Sequence
  Synthetic oligonucleotide
tacggtctctaacatacatatatctacacg

SEQ ID NO: 189868 - DNA, 30 bp, Artificial Sequence
  Synthetic oligonucleotide
gtatcagtcggtgttaggggtcagtacacg

SEQ ID NO: 189869 - DNA, 30 bp, Artificial Sequence
  Synthetic oligonucleotide
gccgcaacttgtgtaactagggcgtacacg

SEQ ID NO: 189870 - DNA, 30 bp, Artificial Sequence
  Synthetic oligonucleotide
ggcggtaggagagtaattggggggtacacg

SEQ ID NO: 189871 - DNA, 30 bp, Artificial Sequence
  Synthetic oligonucleotide
cctatgcaacagatacaagcaacttacacg

SEQ ID NO: 189872 - DNA, 30 bp, Artificial Sequence
  Synthetic oligonucleotide
gttctagatcttaattcaacgcgttacacg

SEQ ID NO: 189873 - DNA, 30 bp, Artificial Sequence
  Synthetic oligonucleotide
cgataaatttttactacagattgttacacg

SEQ ID NO: 189874 - DNA, 30 bp, Artificial Sequence
  Synthetic oligonucleotide
aaatgctaagctagcggtaaatgaaccacg

SEQ ID NO: 189875 - DNA, 30 bp, Artificial Sequence
  Synthetic oligonucleotide
acgtcaacgttggttcggtgccgcaccacg

SEQ ID NO: 189876 - DNA, 30 bp, Artificial Sequence
  Synthetic oligonucleotide
caaacaacccagtggatacgcgataccacg

SEQ ID NO: 189877 - DNA, 30 bp, Artificial Sequence
  Synthetic oligonucleotide
ctcttggcacaaagtggtaaagctaccacg

SEQ ID NO: 189878 - DNA, 30 bp, Artificial Sequence
  Synthetic oligonucleotide
tgaacaggccttccctctgtggaacccacg

SEQ ID NO: 189879 - DNA, 30 bp, Artificial Sequence
  Synthetic oligonucleotide
gtgggttgtcggggtgggactacccccacg

SEQ ID NO: 189880 - DNA, 30 bp, Artificial Sequence
  Synthetic oligonucleotide
gcctaagtacttagtcacccctgccccacg

SEQ ID NO: 189881 - DNA, 30 bp, Artificial Sequence
  Synthetic oligonucleotide
catagaaatagcctcaggagaattcccacg

SEQ ID NO: 189882 - DNA, 30 bp, Artificial Sequence
  Synthetic oligonucleotide
atggtatcgcgctttgatgggtgagccacg

SEQ ID NO: 189883 - DNA, 30 bp, Artificial Sequence
  Synthetic oligonucleotide
cgtactgctttggtacgtaccagcgccacg

SEQ ID NO: 189884 - DNA, 30 bp, Artificial Sequence
  Synthetic oligonucleotide
ccatggaattattgatagatgggtgccacg

SEQ ID NO: 189885 - DNA, 30 bp, Artificial Sequence
  Synthetic oligonucleotide
cacttgaaatttgtacctatatagtccacg

SEQ ID NO: 189886 - DNA, 31 bp, Artificial Sequence
  Synthetic oligonucleotide
gactggtgaacatcatacggtcgccagcacg

SEQ ID NO: 189887 - DNA, 30 bp, Artificial Sequence
  Synthetic oligonucleotide
attagtgcatcgcacagatatctcagcacg

SEQ ID NO: 189888 - DNA, 30 bp, Artificial Sequence
  Synthetic oligonucleotide
aaacggcgggaggagtggaagtagcgcacg

SEQ ID NO: 189889 - DNA, 30 bp, Artificial Sequence
  Synthetic oligonucleotide
ctgacggcggttgagaaaattgtgcgcacg

SEQ ID NO: 189890 - DNA, 30 bp, Artificial Sequence
  Synthetic oligonucleotide
agtgatacgagattatgagcacttcgcacg

SEQ ID NO: 189891 - DNA, 30 bp, Artificial Sequence
  Synthetic oligonucleotide
gcaaccgattatatccgtattaaaggcacg

SEQ ID NO: 189892 - DNA, 30 bp, Artificial Sequence
  Synthetic oligonucleotide
tgcatctcggacatgacgtacaaatgcacg

SEQ ID NO: 189893 - DNA, 30 bp, Artificial Sequence
  Synthetic oligonucleotide
agttggcccggcgacaactaataatgcacg

SEQ ID NO: 189894 - DNA, 30 bp, Artificial Sequence
  Synthetic oligonucleotide
acgggtccaggtcaaacgcttagctgcacg

SEQ ID NO: 189895 - DNA, 30 bp, Artificial Sequence
  Synthetic oligonucleotide
ctactcttcggcaggattagtctgtgcacg

SEQ ID NO: 189896 - DNA, 30 bp, Artificial Sequence
  Synthetic oligonucleotide
gacaaacataacaaactgcggggttgcacg

SEQ ID NO: 189897 - DNA, 30 bp, Artificial Sequence
  Synthetic oligonucleotide
tgtcagggacctaggcagtgtgtttgcacg

SEQ ID NO: 189898 - DNA, 30 bp, Artificial Sequence
  Synthetic oligonucleotide
caaatgctttggtctgatgatccaatcacg

SEQ ID NO: 189899 - DNA, 30 bp, Artificial Sequence
  Synthetic oligonucleotide
aagtgtcggatcctgcatttcgcgatcacg

SEQ ID NO: 189900 - DNA, 30 bp, Artificial Sequence
  Synthetic oligonucleotide
gggatgacaaaacgctatcattcgatcacg

SEQ ID NO: 189901 - DNA, 30 bp, Artificial Sequence
  Synthetic oligonucleotide
tctggggttgaaggcagttctgctatcacg

SEQ ID NO: 189902 - DNA, 30 bp, Artificial Sequence
  Synthetic oligonucleotide
ggcttctgaggacgacataagatcctcacg

SEQ ID NO: 189903 - DNA, 30 bp, Artificial Sequence
  Synthetic oligonucleotide
tagaagtgttcctatcaggcgagagtcacg

SEQ ID NO: 189904 - DNA, 30 bp, Artificial Sequence
  Synthetic oligonucleotide
tctcgtacagcaagcttctaactagtcacg

SEQ ID NO: 189905 - DNA, 30 bp, Artificial Sequence
  Synthetic oligonucleotide
aaagggagtaaatgtcccgtatacgtcacg

SEQ ID NO: 189906 - DNA, 30 bp, Artificial Sequence
  Synthetic oligonucleotide
acatagggcacacgagtgcatggcgtcacg

SEQ ID NO: 189907 - DNA, 30 bp, Artificial Sequence
  Synthetic oligonucleotide
tgtcagtcacacgtatctctaccggtcacg

SEQ ID NO: 189908 - DNA, 30 bp, Artificial Sequence
  Synthetic oligonucleotide
ggcgcgagacgatttgcgatcatggtcacg

SEQ ID NO: 189909 - DNA, 30 bp, Artificial Sequence
  Synthetic oligonucleotide
cttggatggtctgtgtacgtaagtgtcacg

SEQ ID NO: 189910 - DNA, 30 bp, Artificial Sequence
  Synthetic oligonucleotide
gacgaaccttttgacaccagaagcttcacg

SEQ ID NO: 189911 - DNA, 30 bp, Artificial Sequence
  Synthetic oligonucleotide
cattgcgcatgaggcatggcgattttcacg

SEQ ID NO: 189912 - DNA, 30 bp, Artificial Sequence
  Synthetic oligonucleotide
cggaccggcgcgacatttccgatccagacg

SEQ ID NO: 189913 - DNA, 30 bp, Artificial Sequence
  Synthetic oligonucleotide
tgaacgaattacagggttggcgtgcagacg

SEQ ID NO: 189914 - DNA, 30 bp, Artificial Sequence
  Synthetic oligonucleotide
catcacactctgaatagttatcgtcagacg

SEQ ID NO: 189915 - DNA, 30 bp, Artificial Sequence
  Synthetic oligonucleotide
caaaaccttaaaaacagacgtcttcagacg

SEQ ID NO: 189916 - DNA, 30 bp, Artificial Sequence
  Synthetic oligonucleotide
agtccaagtttgtcagggcggaccgagacg

SEQ ID NO: 189917 - DNA, 31 bp, Artificial Sequence
  Synthetic oligonucleotide
atcctgcgatgttctagaccccgccgagacg

SEQ ID NO: 189918 - DNA, 30 bp, Artificial Sequence
  Synthetic oligonucleotide
aatgtcgggcacaatgtttgactcgagacg

SEQ ID NO: 189919 - DNA, 30 bp, Artificial Sequence
  Synthetic oligonucleotide
taattcggagaagtcgatttatatgagacg

SEQ ID NO: 189920 - DNA, 30 bp, Artificial Sequence
  Synthetic oligonucleotide
aaacgtagggctggactaccctaatagacg

SEQ ID NO: 189921 - DNA, 30 bp, Artificial Sequence
  Synthetic oligonucleotide
ggccaacgcagataatcaatgctatagacg

SEQ ID NO: 189922 - DNA, 30 bp, Artificial Sequence
  Synthetic oligonucleotide
gcacagcaattcaatccgcgggatacgacg

SEQ ID NO: 189923 - DNA, 30 bp, Artificial Sequence
  Synthetic oligonucleotide
gggacagacgctatgactaaagttacgacg

SEQ ID NO: 189924 - DNA, 30 bp, Artificial Sequence
  Synthetic oligonucleotide
catatgtgatcttaggcatggaccccgacg

SEQ ID NO: 189925 - DNA, 30 bp, Artificial Sequence
  Synthetic oligonucleotide
gcaagtagtgagtggtagctccctccgacg

SEQ ID NO: 189926 - DNA, 30 bp, Artificial Sequence
  Synthetic oligonucleotide
atggggtagtcaaccgcctatatagcgacg

SEQ ID NO: 189927 - DNA, 30 bp, Artificial Sequence
  Synthetic oligonucleotide
gttctgggaacaacatactaggtcgcgacg

SEQ ID NO: 189928 - DNA, 30 bp, Artificial Sequence
  Synthetic oligonucleotide
gggaaatagaaattgctttactctgcgacg

SEQ ID NO: 189929 - DNA, 30 bp, Artificial Sequence
  Synthetic oligonucleotide
cgagtgtgcctatgaaattgttcatcgacg

SEQ ID NO: 189930 - DNA, 30 bp, Artificial Sequence
  Synthetic oligonucleotide
atggctgggactgtggtagaagcgtcgacg

SEQ ID NO: 189931 - DNA, 30 bp, Artificial Sequence
  Synthetic oligonucleotide
tcgccgtgtcataaccacagatcttcgacg

SEQ ID NO: 189932 - DNA, 30 bp, Artificial Sequence
  Synthetic oligonucleotide
ctataaaatcttatgcacgataaaaggacg

SEQ ID NO: 189933 - DNA, 30 bp, Artificial Sequence
  Synthetic oligonucleotide
cgtggcgtccactgttagtatctcaggacg

SEQ ID NO: 189934 - DNA, 30 bp, Artificial Sequence
  Synthetic oligonucleotide
agctagggatagacaagagtgcataggacg

SEQ ID NO: 189935 - DNA, 30 bp, Artificial Sequence
  Synthetic oligonucleotide
gtcacagggtataaaacggattcacggacg

SEQ ID NO: 189936 - DNA, 30 bp, Artificial Sequence
  Synthetic oligonucleotide
acaagcttagacactccgaaggctcggacg

SEQ ID NO: 189937 - DNA, 30 bp, Artificial Sequence
  Synthetic oligonucleotide
ggcccagtgaaccacttgctatatgggacg

SEQ ID NO: 189938 - DNA, 30 bp, Artificial Sequence
  Synthetic oligonucleotide
gagggcatgtttaaggtcttcagtgggacg

SEQ ID NO: 189939 - DNA, 30 bp, Artificial Sequence
  Synthetic oligonucleotide
tggttgcgctatctcactcgtggtgggacg

SEQ ID NO: 189940 - DNA, 30 bp, Artificial Sequence
  Synthetic oligonucleotide
taagggtctagtgtgatactgccatggacg

SEQ ID NO: 189941 - DNA, 30 bp, Artificial Sequence
  Synthetic oligonucleotide
cgagcccgtggtagtgtctcgtgctggacg

SEQ ID NO: 189942 - DNA, 30 bp, Artificial Sequence
  Synthetic oligonucleotide
gcttaagcgattatcaggttaaggtggacg

SEQ ID NO: 189943 - DNA, 30 bp, Artificial Sequence
  Synthetic oligonucleotide
taccacatcagggtaggacttgacatgacg

SEQ ID NO: 189944 - DNA, 30 bp, Artificial Sequence
  Synthetic oligonucleotide
aggttagttcatcacctgaaccggatgacg

SEQ ID NO: 189945 - DNA, 30 bp, Artificial Sequence
  Synthetic oligonucleotide
gtgcggttgaaatagccacacttgatgacg

SEQ ID NO: 189946 - DNA, 30 bp, Artificial Sequence
  Synthetic oligonucleotide
cttgcgagataacgttgagattgtatgacg

SEQ ID NO: 189947 - DNA, 30 bp, Artificial Sequence
  Synthetic oligonucleotide
cagattaggaaaccgggtgctgtgctgacg

SEQ ID NO: 189948 - DNA, 30 bp, Artificial Sequence
  Synthetic oligonucleotide
gaaaataaacatataataaggtaagtgacg

SEQ ID NO: 189949 - DNA, 30 bp, Artificial Sequence
  Synthetic oligonucleotide
ccagactcacgtatcattattccagtgacg

SEQ ID NO: 189950 - DNA, 30 bp, Artificial Sequence
  Synthetic oligonucleotide
aaggaactattacgatcactcaacgtgacg

SEQ ID NO: 189951 - DNA, 30 bp, Artificial Sequence
  Synthetic oligonucleotide
gggcgctcacgagatcactgtggggtgacg

SEQ ID NO: 189952 - DNA, 30 bp, Artificial Sequence
  Synthetic oligonucleotide
tcactgggatatagaatggtatatgtgacg

SEQ ID NO: 189953 - DNA, 30 bp, Artificial Sequence
  Synthetic oligonucleotide
gcctccaaccagacatggagaaaaaatacg

SEQ ID NO: 189954 - DNA, 31 bp, Artificial Sequence
  Synthetic oligonucleotide
attcacacaagtgcgatgggattataatacg

SEQ ID NO: 189955 - DNA, 30 bp, Artificial Sequence
  Synthetic oligonucleotide
ttgagtagcagcactaaatatcttaatacg

SEQ ID NO: 189956 - DNA, 30 bp, Artificial Sequence
  Synthetic oligonucleotide
ccgggtacagagcggacatcgactcatacg

SEQ ID NO: 189957 - DNA, 30 bp, Artificial Sequence
  Synthetic oligonucleotide
gccgggacatggcggcctataggtcatacg

SEQ ID NO: 189958 - DNA, 30 bp, Artificial Sequence
  Synthetic oligonucleotide
taaactaggtaatgatccttaggagatacg

SEQ ID NO: 189959 - DNA, 30 bp, Artificial Sequence
  Synthetic oligonucleotide
aatgattatagggaaacctgcgtagatacg

SEQ ID NO: 189960 - DNA, 30 bp, Artificial Sequence
  Synthetic oligonucleotide
taaagtgtagttttgcacgggcgatatacg

SEQ ID NO: 189961 - DNA, 30 bp, Artificial Sequence
  Synthetic oligonucleotide
tcctcaactcggttccgacgaccgtatacg

SEQ ID NO: 189962 - DNA, 30 bp, Artificial Sequence
  Synthetic oligonucleotide
agcagggactcgtacagtgggttgtatacg

SEQ ID NO: 189963 - DNA, 30 bp, Artificial Sequence
  Synthetic oligonucleotide
cacagcttagcgcgaaagtataattatacg

SEQ ID NO: 189964 - DNA, 30 bp, Artificial Sequence
  Synthetic oligonucleotide
cagaccacagaacggacgttaaacactacg

SEQ ID NO: 189965 - DNA, 30 bp, Artificial Sequence
  Synthetic oligonucleotide
aaaataagaccgggttaaggtaacactacg

SEQ ID NO: 189966 - DNA, 30 bp, Artificial Sequence
  Synthetic oligonucleotide
cgaaggaactctccatgggcagccactacg

SEQ ID NO: 189967 - DNA, 30 bp, Artificial Sequence
  Synthetic oligonucleotide
aggtcgaacagatgctaagttttgactacg

SEQ ID NO: 189968 - DNA, 30 bp, Artificial Sequence
  Synthetic oligonucleotide
tggctatctctcgctattagcaatactacg

SEQ ID NO: 189969 - DNA, 30 bp, Artificial Sequence
  Synthetic oligonucleotide
gccacatctttaagtccaggataacctacg

SEQ ID NO: 189970 - DNA, 30 bp, Artificial Sequence
  Synthetic oligonucleotide
cagaattaagtacaactagagtaccctacg

SEQ ID NO: 189971 - DNA, 30 bp, Artificial Sequence
  Synthetic oligonucleotide
tgactgtcaaggtagttaatattgcctacg

SEQ ID NO: 189972 - DNA, 30 bp, Artificial Sequence
  Synthetic oligonucleotide
cgtccgacgaggggggaggagcatcctacg

SEQ ID NO: 189973 - DNA, 30 bp, Artificial Sequence
  Synthetic oligonucleotide
tcttgtggtggggtactccttactcctacg

SEQ ID NO: 189974 - DNA, 30 bp, Artificial Sequence
  Synthetic oligonucleotide
cagactcgtacaccgctacttattcctacg

SEQ ID NO: 189975 - DNA, 30 bp, Artificial Sequence
  Synthetic oligonucleotide
atagacttgcataccggaacaccagctacg

SEQ ID NO: 189976 - DNA, 30 bp, Artificial Sequence
  Synthetic oligonucleotide
ctacggcgggttagcagaaccatagctacg

SEQ ID NO: 189977 - DNA, 30 bp, Artificial Sequence
  Synthetic oligonucleotide
cactgaagggcggtcacatatccggctacg

SEQ ID NO: 189978 - DNA, 30 bp, Artificial Sequence
  Synthetic oligonucleotide
cgctcgggttcagttcctgaactatctacg

SEQ ID NO: 189979 - DNA, 30 bp, Artificial Sequence
  Synthetic oligonucleotide
ttacagcgagagtcatgaaacttctctacg

SEQ ID NO: 189980 - DNA, 30 bp, Artificial Sequence
  Synthetic oligonucleotide
gaaggatgatatagacaagtagcgtctacg

SEQ ID NO: 189981 - DNA, 30 bp, Artificial Sequence
  Synthetic oligonucleotide
agggcatcgctgacggtaatcacaagtacg

SEQ ID NO: 189982 - DNA, 30 bp, Artificial Sequence
  Synthetic oligonucleotide
gaggacagagccgtgggcgtgacaagtacg

SEQ ID NO: 189983 - DNA, 30 bp, Artificial Sequence
  Synthetic oligonucleotide
acctcaacaatcggacattaatcaagtacg

SEQ ID NO: 189984 - DNA, 30 bp, Artificial Sequence
  Synthetic oligonucleotide
tccgcgtgatcttgttacatggtaagtacg

SEQ ID NO: 189985 - DNA, 30 bp, Artificial Sequence
  Synthetic oligonucleotide
cgggccaccggaagttgaatgttcagtacg

SEQ ID NO: 189986 - DNA, 30 bp, Artificial Sequence
  Synthetic oligonucleotide
agcagctaagtgtgaattccaatgagtacg

SEQ ID NO: 189987 - DNA, 30 bp, Artificial Sequence
  Synthetic oligonucleotide
agtcctgagtaagatttctagaatagtacg

SEQ ID NO: 189988 - DNA, 30 bp, Artificial Sequence
  Synthetic oligonucleotide
tggtctatagtagctttccctcatagtacg

SEQ ID NO: 189989 - DNA, 30 bp, Artificial Sequence
  Synthetic oligonucleotide
aaacccgagcactacaggacgattagtacg

SEQ ID NO: 189990 - DNA, 30 bp, Artificial Sequence
  Synthetic oligonucleotide
aggaagacgctcatataccggccacgtacg

SEQ ID NO: 189991 - DNA, 30 bp, Artificial Sequence
  Synthetic oligonucleotide
caggaagattccagttaggaaatacgtacg

SEQ ID NO: 189992 - DNA, 30 bp, Artificial Sequence
  Synthetic oligonucleotide
atctcacgatccaatctctcggaccgtacg

SEQ ID NO: 189993 - DNA, 30 bp, Artificial Sequence
  Synthetic oligonucleotide
acgtattgcttgatctcaacgctccgtacg

SEQ ID NO: 189994 - DNA, 30 bp, Artificial Sequence
  Synthetic oligonucleotide
gaatggattatgtcttgatagcagcgtacg

SEQ ID NO: 189995 - DNA, 30 bp, Artificial Sequence
  Synthetic oligonucleotide
gagtcgatcgggctgtccgtagggcgtacg

SEQ ID NO: 189996 - DNA, 30 bp, Artificial Sequence
  Synthetic oligonucleotide
ggtaagggagtattcctcggctaaggtacg

SEQ ID NO: 189997 - DNA, 30 bp, Artificial Sequence
  Synthetic oligonucleotide
cctgtaggaacacggggtacattaggtacg

SEQ ID NO: 189998 - DNA, 30 bp, Artificial Sequence
  Synthetic oligonucleotide
cactaatgtgtaccgcgtgacttaggtacg

SEQ ID NO: 189999 - DNA, 30 bp, Artificial Sequence
  Synthetic oligonucleotide
gtgtatcagccgataccaagagacggtacg

SEQ ID NO: 190000 - DNA, 30 bp, Artificial Sequence
  Synthetic oligonucleotide
tgtaggtgatctgaatggtgacccggtacg

SEQ ID NO: 190001 - DNA, 30 bp, Artificial Sequence
  Synthetic oligonucleotide
atcaggccgacagtgatttacctcggtacg

SEQ ID NO: 190002 - DNA, 30 bp, Artificial Sequence
  Synthetic oligonucleotide
gcaattcacattcaagagagtgtgggtacg

SEQ ID NO: 190003 - DNA, 30 bp, Artificial Sequence
  Synthetic oligonucleotide
ggcttgatcacaggtaacggttctggtacg

SEQ ID NO: 190004 - DNA, 30 bp, Artificial Sequence
  Synthetic oligonucleotide
ctagcggtaggtaacgtggtcgcatgtacg

SEQ ID NO: 190005 - DNA, 30 bp, Artificial Sequence
  Synthetic oligonucleotide
gtgtccggtttaagggcacctcgatgtacg

SEQ ID NO: 190006 - DNA, 30 bp, Artificial Sequence
  Synthetic oligonucleotide
agatagatattagaacttgtgggatgtacg

SEQ ID NO: 190007 - DNA, 30 bp, Artificial Sequence
  Synthetic oligonucleotide
acaaacgggcctacctatttaacctgtacg

SEQ ID NO: 190008 - DNA, 30 bp, Artificial Sequence
  Synthetic oligonucleotide
tgctgttaagaatttccagtgctgtgtacg

SEQ ID NO: 190009 - DNA, 30 bp, Artificial Sequence
  Synthetic oligonucleotide
ccacgtattgcgacccctgcagtaattacg

SEQ ID NO: 190010 - DNA, 30 bp, Artificial Sequence
  Synthetic oligonucleotide
tgctacctgttgttggaccatgagattacg

SEQ ID NO: 190011 - DNA, 30 bp, Artificial Sequence
  Synthetic oligonucleotide
tgctatcgggagtatgtaacggggattacg

SEQ ID NO: 190012 - DNA, 30 bp, Artificial Sequence
  Synthetic oligonucleotide
gctacggtttcggaggtaacatggattacg

SEQ ID NO: 190013 - DNA, 30 bp, Artificial Sequence
  Synthetic oligonucleotide
tctctgcaaaagcattcgtgcatgattacg

SEQ ID NO: 190014 - DNA, 29 bp, Artificial Sequence
  Synthetic oligonucleotide
agaggtgtccattgagattcgcacttacg

SEQ ID NO: 190015 - DNA, 30 bp, Artificial Sequence
  Synthetic oligonucleotide
ggagccgtaatgttaagcacagatcttacg

SEQ ID NO: 190016 - DNA, 30 bp, Artificial Sequence
  Synthetic oligonucleotide
tgataggcgtttaagtgggccacggttacg

SEQ ID NO: 190017 - DNA, 30 bp, Artificial Sequence
  Synthetic oligonucleotide
ccactgctcagccagtgtgtagcggttacg

SEQ ID NO: 190018 - DNA, 30 bp, Artificial Sequence
  Synthetic oligonucleotide
agaatatcggctgtacagatgagggttacg

SEQ ID NO: 190019 - DNA, 30 bp, Artificial Sequence
  Synthetic oligonucleotide
actgactgcgacgattcgtcccgtgttacg

SEQ ID NO: 190020 - DNA, 30 bp, Artificial Sequence
  Synthetic oligonucleotide
tgtcgagatactcgcttatgatgtgttacg

SEQ ID NO: 190021 - DNA, 30 bp, Artificial Sequence
  Synthetic oligonucleotide
taggtcacaggggggcgaatacaatttacg

SEQ ID NO: 190022 - DNA, 30 bp, Artificial Sequence
  Synthetic oligonucleotide
gatagttaggccatgatgcgaacatttacg

SEQ ID NO: 190023 - DNA, 30 bp, Artificial Sequence
  Synthetic oligonucleotide
tcgaaccatgcattcatggtagattttacg

SEQ ID NO: 190024 - DNA, 30 bp, Artificial Sequence
  Synthetic oligonucleotide
atcgggctaatgaggtcgggcatttttacg

SEQ ID NO: 190025 - DNA, 30 bp, Artificial Sequence
  Synthetic oligonucleotide
aagagaacgaaacggtggcgagaaaaaccg

SEQ ID NO: 190026 - DNA, 30 bp, Artificial Sequence
  Synthetic oligonucleotide
catggcgctggcgggggaacccacaaaccg

SEQ ID NO: 190027 - DNA, 30 bp, Artificial Sequence
  Synthetic oligonucleotide
taacggcaaactgcaagatttgccaaaccg

SEQ ID NO: 190028 - DNA, 30 bp, Artificial Sequence
  Synthetic oligonucleotide
tgaattgggctaggatggaacgtgaaaccg

SEQ ID NO: 190029 - DNA, 30 bp, Artificial Sequence
  Synthetic oligonucleotide
gcacaggaagttgcgtcagttgataaaccg

SEQ ID NO: 190030 - DNA, 30 bp, Artificial Sequence
  Synthetic oligonucleotide
gctggaaggttagggagtggtagtaaaccg

SEQ ID NO: 190031 - DNA, 30 bp, Artificial Sequence
  Synthetic oligonucleotide
agggaccgtatcgacacgaagcaccaaccg

SEQ ID NO: 190032 - DNA, 30 bp, Artificial Sequence
  Synthetic oligonucleotide
agttatcgggtctatggtggcgaccaaccg

SEQ ID NO: 190033 - DNA, 30 bp, Artificial Sequence
  Synthetic oligonucleotide
ccgataattctttcccggagtcatcaaccg

SEQ ID NO: 190034 - DNA, 30 bp, Artificial Sequence
  Synthetic oligonucleotide
ttcacgtttcaacatgcgtcatctcaaccg

SEQ ID NO: 190035 - DNA, 30 bp, Artificial Sequence
  Synthetic oligonucleotide
gataaattgcatgagttagatcgtcaaccg

SEQ ID NO: 190036 - DNA, 30 bp, Artificial Sequence
  Synthetic oligonucleotide
ccaagcagatgcctcagaacgaaagaaccg

SEQ ID NO: 190037 - DNA, 30 bp, Artificial Sequence
  Synthetic oligonucleotide
tatgaataataaaatggaccgtaagaaccg

SEQ ID NO: 190038 - DNA, 30 bp, Artificial Sequence
  Synthetic oligonucleotide
gaatattggatcacctgcgggccagaaccg

SEQ ID NO: 190039 - DNA, 30 bp, Artificial Sequence
  Synthetic oligonucleotide
ggaggttcaacgacactgattctcgaaccg

SEQ ID NO: 190040 - DNA, 30 bp, Artificial Sequence
  Synthetic oligonucleotide
cagtatcttgaggcgcctaaagaggaaccg

SEQ ID NO: 190041 - DNA, 30 bp, Artificial Sequence
  Synthetic oligonucleotide
gtcaatagctccattccgcgttatgaaccg

SEQ ID NO: 190042 - DNA, 30 bp, Artificial Sequence
  Synthetic oligonucleotide
atgtaaagttaattgtgatcggagtaaccg

SEQ ID NO: 190043 - DNA, 30 bp, Artificial Sequence
  Synthetic oligonucleotide
acgacagccaccctttatagatagtaaccg

SEQ ID NO: 190044 - DNA, 30 bp, Artificial Sequence
  Synthetic oligonucleotide
gatagggaaagtacaggctcgccaacaccg

SEQ ID NO: 190045 - DNA, 30 bp, Artificial Sequence
  Synthetic oligonucleotide
agctggagaatacgttgtatgagaacaccg

SEQ ID NO: 190046 - DNA, 30 bp, Artificial Sequence
  Synthetic oligonucleotide
ataagcacttgaacgtgctgtttcacaccg

SEQ ID NO: 190047 - DNA, 30 bp, Artificial Sequence
  Synthetic oligonucleotide
cacggctcccgtattgttcgaatgacaccg

SEQ ID NO: 190048 - DNA, 30 bp, Artificial Sequence
  Synthetic oligonucleotide
ttcgggggcgggctggggcgtaacccaccg

SEQ ID NO: 190049 - DNA, 30 bp, Artificial Sequence
  Synthetic oligonucleotide
gattccccctaagtagctcagggcccaccg

SEQ ID NO: 190050 - DNA, 30 bp, Artificial Sequence
  Synthetic oligonucleotide
ggaacatcttcgtacaatattgtcccaccg

SEQ ID NO: 190051 - DNA, 30 bp, Artificial Sequence
  Synthetic oligonucleotide
ctatggtgcagtgcaacaagcacgccaccg

SEQ ID NO: 190052 - DNA, 30 bp, Artificial Sequence
  Synthetic oligonucleotide
tcctcccacagccgaaactgtgtgccaccg

SEQ ID NO: 190053 - DNA, 30 bp, Artificial Sequence
  Synthetic oligonucleotide
gtagtcaccatgacgtcgtcagttccaccg

SEQ ID NO: 190054 - DNA, 30 bp, Artificial Sequence
  Synthetic oligonucleotide
cgactggatctgcactcagagccagcaccg

SEQ ID NO: 190055 - DNA, 30 bp, Artificial Sequence
  Synthetic oligonucleotide
atagtttctgagttcgtttgtagagcaccg

SEQ ID NO: 190056 - DNA, 30 bp, Artificial Sequence
  Synthetic oligonucleotide
acgagagataccccctgatagattgcaccg

SEQ ID NO: 190057 - DNA, 30 bp, Artificial Sequence
  Synthetic oligonucleotide
tgcagtactgaatgagagacaccatcaccg

SEQ ID NO: 190058 - DNA, 30 bp, Artificial Sequence
  Synthetic oligonucleotide
gtcgtctttgaagacataaacgcatcaccg

SEQ ID NO: 190059 - DNA, 30 bp, Artificial Sequence
  Synthetic oligonucleotide
acgactgtccacctggatccccgctcaccg

SEQ ID NO: 190060 - DNA, 30 bp, Artificial Sequence
  Synthetic oligonucleotide
tggcggtactggcgaaacgtaagaagaccg

SEQ ID NO: 190061 - DNA, 30 bp, Artificial Sequence
  Synthetic oligonucleotide
cccgcagccactatagcagggataagaccg

SEQ ID NO: 190062 - DNA, 30 bp, Artificial Sequence
  Synthetic oligonucleotide
tcatcggctcggggcagaaccgatagaccg

SEQ ID NO: 190063 - DNA, 30 bp, Artificial Sequence
  Synthetic oligonucleotide
tgcaaagacagcatggttatatgtagaccg

SEQ ID NO: 190064 - DNA, 30 bp, Artificial Sequence
  Synthetic oligonucleotide
agcgtaaggttgtgaactttcattagaccg

SEQ ID NO: 190065 - DNA, 30 bp, Artificial Sequence
  Synthetic oligonucleotide
cccgttgttactggcgctgcaactcgaccg

SEQ ID NO: 190066 - DNA, 30 bp, Artificial Sequence
  Synthetic oligonucleotide
ggtgttcgtgaagatacacagacaggaccg

SEQ ID NO: 190067 - DNA, 30 bp, Artificial Sequence
  Synthetic oligonucleotide
ccgaccggctacgccgagcgccgaggaccg

SEQ ID NO: 190068 - DNA, 30 bp, Artificial Sequence
  Synthetic oligonucleotide
aacgttgttaaatctctaggccgaggaccg

SEQ ID NO: 190069 - DNA, 30 bp, Artificial Sequence
  Synthetic oligonucleotide
atagcggaagatattcccacgtgcggaccg

SEQ ID NO: 190070 - DNA, 30 bp, Artificial Sequence
  Synthetic oligonucleotide
ggagggttggcgcatgttaccgtcggaccg

SEQ ID NO: 190071 - DNA, 29 bp, Artificial Sequence
  Synthetic oligonucleotide
atactactcgaatcctacggcagggaccg

SEQ ID NO: 190072 - DNA, 30 bp, Artificial Sequence
  Synthetic oligonucleotide
cccatgctgcaagggtaattctagggaccg

SEQ ID NO: 190073 - DNA, 30 bp, Artificial Sequence
  Synthetic oligonucleotide
gtctgggcgtaagtgaaaatcagatgaccg

SEQ ID NO: 190074 - DNA, 30 bp, Artificial Sequence
  Synthetic oligonucleotide
gagatgtaccacaggccatcgaggtgaccg

SEQ ID NO: 190075 - DNA, 30 bp, Artificial Sequence
  Synthetic oligonucleotide
agattagcgtaatctggaatacggtgaccg

SEQ ID NO: 190076 - DNA, 30 bp, Artificial Sequence
  Synthetic oligonucleotide
atcggttatcaaaaatactccagaataccg

SEQ ID NO: 190077 - DNA, 30 bp, Artificial Sequence
  Synthetic oligonucleotide
gcgcgtctgctccctaagcctaggataccg

SEQ ID NO: 190078 - DNA, 30 bp, Artificial Sequence
  Synthetic oligonucleotide
cctacggactcgaagcttctccggataccg

SEQ ID NO: 190079 - DNA, 30 bp, Artificial Sequence
  Synthetic oligonucleotide
aaaacagtattaataagtagactgataccg

SEQ ID NO: 190080 - DNA, 30 bp, Artificial Sequence
  Synthetic oligonucleotide
gaaaacattgtcccttcgattgtgataccg

SEQ ID NO: 190081 - DNA, 30 bp, Artificial Sequence
  Synthetic oligonucleotide
gacgtcatcgagggacgcggtttgataccg

SEQ ID NO: 190082 - DNA, 30 bp, Artificial Sequence
  Synthetic oligonucleotide
gccattacggagttgtaatggtacctaccg

SEQ ID NO: 190083 - DNA, 30 bp, Artificial Sequence
  Synthetic oligonucleotide
cccatgggaaaagggttaactaggctaccg

SEQ ID NO: 190084 - DNA, 30 bp, Artificial Sequence
  Synthetic oligonucleotide
cgtttagatacgtgccaggtcggagtaccg

SEQ ID NO: 190085 - DNA, 30 bp, Artificial Sequence
  Synthetic oligonucleotide
ttgaacctcctgtcgtggactggagtaccg

SEQ ID NO: 190086 - DNA, 30 bp, Artificial Sequence
  Synthetic oligonucleotide
ggcttgatacctaaacttcgcatcgtaccg

SEQ ID NO: 190087 - DNA, 30 bp, Artificial Sequence
  Synthetic oligonucleotide
tgtattcaggtgcaaaagtgtgcggtaccg

SEQ ID NO: 190088 - DNA, 30 bp, Artificial Sequence
  Synthetic oligonucleotide
gaagttgggccttagcccccatcggtaccg

SEQ ID NO: 190089 - DNA, 30 bp, Artificial Sequence
  Synthetic oligonucleotide
aaagcatctcaaatttttggggatgtaccg

SEQ ID NO: 190090 - DNA, 30 bp, Artificial Sequence
  Synthetic oligonucleotide
acgataagttgtcttgggaaatcattaccg

SEQ ID NO: 190091 - DNA, 30 bp, Artificial Sequence
  Synthetic oligonucleotide
cctgcagtaggtctaaccacgtgcttaccg

SEQ ID NO: 190092 - DNA, 30 bp, Artificial Sequence
  Synthetic oligonucleotide
catagggtaataaactgtggatttttaccg

SEQ ID NO: 190093 - DNA, 30 bp, Artificial Sequence
  Synthetic oligonucleotide
atagccaaggtgatagccttcacgaacccg

SEQ ID NO: 190094 - DNA, 30 bp, Artificial Sequence
  Synthetic oligonucleotide
atcatgctaatttcacgcatggcgaacccg

SEQ ID NO: 190095 - DNA, 30 bp, Artificial Sequence
  Synthetic oligonucleotide
agttagcgatcataaacctcgaataacccg

SEQ ID NO: 190096 - DNA, 30 bp, Artificial Sequence
  Synthetic oligonucleotide
cactgggcgtataaatgatgctaacacccg

SEQ ID NO: 190097 - DNA, 30 bp, Artificial Sequence
  Synthetic oligonucleotide
gggctgagaacgatacgcacgccacacccg

SEQ ID NO: 190098 - DNA, 30 bp, Artificial Sequence
  Synthetic oligonucleotide
atacaaaaagaggcacagggcggcgacccg

SEQ ID NO: 190099 - DNA, 30 bp, Artificial Sequence
  Synthetic oligonucleotide
tgcgatatagggaactcattgaaggacccg

SEQ ID NO: 190100 - DNA, 30 bp, Artificial Sequence
  Synthetic oligonucleotide
catatggagctgttgatgtataaggacccg

SEQ ID NO: 190101 - DNA, 30 bp, Artificial Sequence
  Synthetic oligonucleotide
tactcgggttttactttgtagtgatacccg

SEQ ID NO: 190102 - DNA, 31 bp, Artificial Sequence
  Synthetic oligonucleotide
tttacgtaactcgggggtgatcaggtacccg

SEQ ID NO: 190103 - DNA, 30 bp, Artificial Sequence
  Synthetic oligonucleotide
ggcatcggttcaaacacctcgatgtacccg

SEQ ID NO: 190104 - DNA, 30 bp, Artificial Sequence
  Synthetic oligonucleotide
aggagtgagctactgtgtgcgtattacccg

SEQ ID NO: 190105 - DNA, 30 bp, Artificial Sequence
  Synthetic oligonucleotide
gcgtgtattggaggtatgaagacttacccg

SEQ ID NO: 190106 - DNA, 31 bp, Artificial Sequence
  Synthetic oligonucleotide
ttagtaagtaactattacccacggccccccg

SEQ ID NO: 190107 - DNA, 30 bp, Artificial Sequence
  Synthetic oligonucleotide
gacgggctatggcctaattcaaggcccccg

SEQ ID NO: 190108 - DNA, 30 bp, Artificial Sequence
  Synthetic oligonucleotide
caaggcgccaagggctagggttcagccccg

SEQ ID NO: 190109 - DNA, 30 bp, Artificial Sequence
  Synthetic oligonucleotide
tctagctactttgggaacttttgggccccg

SEQ ID NO: 190110 - DNA, 30 bp, Artificial Sequence
  Synthetic oligonucleotide
ttgatattgggtgcgtggctgatatccccg

SEQ ID NO: 190111 - DNA, 30 bp, Artificial Sequence
  Synthetic oligonucleotide
ggacgatctgggaaccggtgctactccccg

SEQ ID NO: 190112 - DNA, 30 bp, Artificial Sequence
  Synthetic oligonucleotide
aatggggtgcattgtgcctgtggctccccg

SEQ ID NO: 190113 - DNA, 30 bp, Artificial Sequence
  Synthetic oligonucleotide
gaagagatcagcgatgggacctggtccccg

SEQ ID NO: 190114 - DNA, 30 bp, Artificial Sequence
  Synthetic oligonucleotide
ggtcagaaggacagcatagccccttccccg

SEQ ID NO: 190115 - DNA, 30 bp, Artificial Sequence
  Synthetic oligonucleotide
tatgaacttgaagaaacacagtgttccccg

SEQ ID NO: 190116 - DNA, 30 bp, Artificial Sequence
  Synthetic oligonucleotide
catgggtgcccacgcaaaggcataagcccg

SEQ ID NO: 190117 - DNA, 30 bp, Artificial Sequence
  Synthetic oligonucleotide
cactaaacagtacaatagtttaacagcccg

SEQ ID NO: 190118 - DNA, 30 bp, Artificial Sequence
  Synthetic oligonucleotide
agagaaattggtaacgctggaaccagcccg

SEQ ID NO: 190119 - DNA, 30 bp, Artificial Sequence
  Synthetic oligonucleotide
gcaacattgagtgggttaagtcgacgcccg

SEQ ID NO: 190120 - DNA, 30 bp, Artificial Sequence
  Synthetic oligonucleotide
tcgtggctctttcccataccggcccgcccg

SEQ ID NO: 190121 - DNA, 30 bp, Artificial Sequence
  Synthetic oligonucleotide
gcagatgatcgaagacaggacctccgcccg

SEQ ID NO: 190122 - DNA, 30 bp, Artificial Sequence
  Synthetic oligonucleotide
tcgtagccgtgaagtgttggcaatcgcccg

SEQ ID NO: 190123 - DNA, 30 bp, Artificial Sequence
  Synthetic oligonucleotide
cgcaagtaagactcgcgaggacgtcgcccg

SEQ ID NO: 190124 - DNA, 30 bp, Artificial Sequence
  Synthetic oligonucleotide
gaatggaaattgaacacattggtaggcccg

SEQ ID NO: 190125 - DNA, 30 bp, Artificial Sequence
  Synthetic oligonucleotide
ttgaaacgtgtcgctgcgatgcacggcccg

SEQ ID NO: 190126 - DNA, 30 bp, Artificial Sequence
  Synthetic oligonucleotide
tgtgacagggcaaccctgtgcggcggcccg

SEQ ID NO: 190127 - DNA, 30 bp, Artificial Sequence
  Synthetic oligonucleotide
gtagaatcgcatgggaggaccaagggcccg

SEQ ID NO: 190128 - DNA, 30 bp, Artificial Sequence
  Synthetic oligonucleotide
gtacgttatgtgggtacaggaacgggcccg

SEQ ID NO: 190129 - DNA, 30 bp, Artificial Sequence
  Synthetic oligonucleotide
cattacgggttaaaggtttaaggtggcccg

SEQ ID NO: 190130 - DNA, 30 bp, Artificial Sequence
  Synthetic oligonucleotide
actaaaacgagggcattcctgggatgcccg

SEQ ID NO: 190131 - DNA, 30 bp, Artificial Sequence
  Synthetic oligonucleotide
gactgcactgcatcgaatctcatttgcccg

SEQ ID NO: 190132 - DNA, 30 bp, Artificial Sequence
  Synthetic oligonucleotide
ggccgcaagttcttgcatgccgtttgcccg

SEQ ID NO: 190133 - DNA, 30 bp, Artificial Sequence
  Synthetic oligonucleotide
atatcgagcacgcatttcgacatcatcccg

SEQ ID NO: 190134 - DNA, 30 bp, Artificial Sequence
  Synthetic oligonucleotide
catccgcggagtaaaggcctcccgatcccg

SEQ ID NO: 190135 - DNA, 30 bp, Artificial Sequence
  Synthetic oligonucleotide
aatcggagaacactcggaatcgtgatcccg

SEQ ID NO: 190136 - DNA, 30 bp, Artificial Sequence
  Synthetic oligonucleotide
tgacgctaatttcactgttctacgctcccg

SEQ ID NO: 190137 - DNA, 30 bp, Artificial Sequence
  Synthetic oligonucleotide
taacaagacgcgtcgccctcaattctcccg

SEQ ID NO: 190138 - DNA, 30 bp, Artificial Sequence
  Synthetic oligonucleotide
gatgttaaagttacccgtagcggagtcccg

SEQ ID NO: 190139 - DNA, 30 bp, Artificial Sequence
  Synthetic oligonucleotide
aatcgcgatgggaacccttagggcgtcccg

SEQ ID NO: 190140 - DNA, 30 bp, Artificial Sequence
  Synthetic oligonucleotide
gtgcgaactacgctacgaccgtaggtcccg

SEQ ID NO: 190141 - DNA, 30 bp, Artificial Sequence
  Synthetic oligonucleotide
atccacgccgcttatgtgccatctgtcccg

SEQ ID NO: 190142 - DNA, 30 bp, Artificial Sequence
  Synthetic oligonucleotide
ccgccaatatctaccccggccggtgtcccg

SEQ ID NO: 190143 - DNA, 30 bp, Artificial Sequence
  Synthetic oligonucleotide
tggcgacagtcggataaagcggccttcccg

SEQ ID NO: 190144 - DNA, 30 bp, Artificial Sequence
  Synthetic oligonucleotide
taaagaaatagtagtctctaaagcttcccg

SEQ ID NO: 190145 - DNA, 30 bp, Artificial Sequence
  Synthetic oligonucleotide
gtacttttgaacacttgatgctcgttcccg

SEQ ID NO: 190146 - DNA, 30 bp, Artificial Sequence
  Synthetic oligonucleotide
cgatgttattgggttcgctagtatttcccg

SEQ ID NO: 190147 - DNA, 30 bp, Artificial Sequence
  Synthetic oligonucleotide
atactgtgatttcgtgacagatcaaagccg

SEQ ID NO: 190148 - DNA, 30 bp, Artificial Sequence
  Synthetic oligonucleotide
tctcgttctggggtgccctaaagaaagccg

SEQ ID NO: 190149 - DNA, 30 bp, Artificial Sequence
  Synthetic oligonucleotide
acagctccatgattggtagagcgaaagccg

SEQ ID NO: 190150 - DNA, 30 bp, Artificial Sequence
  Synthetic oligonucleotide
ctaagtgggaggccatggtccatcaagccg

SEQ ID NO: 190151 - DNA, 30 bp, Artificial Sequence
  Synthetic oligonucleotide
gtttactaactatcaacatgctcgaagccg

SEQ ID NO: 190152 - DNA, 30 bp, Artificial Sequence
  Synthetic oligonucleotide
cactctcgagctgaaaagtgaagtaagccg

SEQ ID NO: 190153 - DNA, 30 bp, Artificial Sequence
  Synthetic oligonucleotide
gtcggcatcctgcaatagtcggtacagccg

SEQ ID NO: 190154 - DNA, 30 bp, Artificial Sequence
  Synthetic oligonucleotide
accccggggataccctacaatatgcagccg

SEQ ID NO: 190155 - DNA, 30 bp, Artificial Sequence
  Synthetic oligonucleotide
tgctcccgacaggtataataccctcagccg

SEQ ID NO: 190156 - DNA, 30 bp, Artificial Sequence
  Synthetic oligonucleotide
tcatggtgtagcagtctcttaagtcagccg

SEQ ID NO: 190157 - DNA, 30 bp, Artificial Sequence
  Synthetic oligonucleotide
tgacggtgttttctaggcggttgtcagccg

SEQ ID NO: 190158 - DNA, 30 bp, Artificial Sequence
  Synthetic oligonucleotide
gtaagagaagtcttttattgaattcagccg

SEQ ID NO: 190159 - DNA, 30 bp, Artificial Sequence
  Synthetic oligonucleotide
aacagaccaaactagtttacgatcgagccg

SEQ ID NO: 190160 - DNA, 30 bp, Artificial Sequence
  Synthetic oligonucleotide
atgagttgctatggtgaatgattggagccg

SEQ ID NO: 190161 - DNA, 30 bp, Artificial Sequence
  Synthetic oligonucleotide
ctccgaatagcggtagtcttagggtagccg

SEQ ID NO: 190162 - DNA, 30 bp, Artificial Sequence
  Synthetic oligonucleotide
cacgatactaattgaaattatgggtagccg

SEQ ID NO: 190163 - DNA, 30 bp, Artificial Sequence
  Synthetic oligonucleotide
cataggatcacgttgtccaaagtttagccg

SEQ ID NO: 190164 - DNA, 30 bp, Artificial Sequence
  Synthetic oligonucleotide
gaccgagcaaaatatgttttttgcacgccg

SEQ ID NO: 190165 - DNA, 30 bp, Artificial Sequence
  Synthetic oligonucleotide
tgtccaactctttacgactctatcacgccg

SEQ ID NO: 190166 - DNA, 30 bp, Artificial Sequence
  Synthetic oligonucleotide
tatcggccaggcaacggatagtttacgccg

SEQ ID NO: 190167 - DNA, 30 bp, Artificial Sequence
  Synthetic oligonucleotide
tttaataagtgggtgggtattcatccgccg

SEQ ID NO: 190168 - DNA, 30 bp, Artificial Sequence
  Synthetic oligonucleotide
caagataggtagtaaggcagagcatcgccg

SEQ ID NO: 190169 - DNA, 30 bp, Artificial Sequence
  Synthetic oligonucleotide
gataatctggtacagttgtgcagatcgccg

SEQ ID NO: 190170 - DNA, 30 bp, Artificial Sequence
  Synthetic oligonucleotide
ttgccgcccgagagcccgtatatttcgccg

SEQ ID NO: 190171 - DNA, 30 bp, Artificial Sequence
  Synthetic oligonucleotide
gaaaattgcgagtaaaaggaggccaggccg

SEQ ID NO: 190172 - DNA, 30 bp, Artificial Sequence
  Synthetic oligonucleotide
tgcgtcagccggataataacttgacggccg

SEQ ID NO: 190173 - DNA, 30 bp, Artificial Sequence
  Synthetic oligonucleotide
ttacgtgactctataaatgaaatgcggccg

SEQ ID NO: 190174 - DNA, 30 bp, Artificial Sequence
  Synthetic oligonucleotide
aaaggttaatagatgtagattaatcggccg

SEQ ID NO: 190175 - DNA, 30 bp, Artificial Sequence
  Synthetic oligonucleotide
aggcagtataggagacatcctactcggccg

SEQ ID NO: 190176 - DNA, 30 bp, Artificial Sequence
  Synthetic oligonucleotide
gtgtgtaatctgtatgttcaataagggccg

SEQ ID NO: 190177 - DNA, 30 bp, Artificial Sequence
  Synthetic oligonucleotide
agagtgctcccggcagtgggttaagggccg

SEQ ID NO: 190178 - DNA, 30 bp, Artificial Sequence
  Synthetic oligonucleotide
gtggggtccaaataatccgcgaaggggccg

SEQ ID NO: 190179 - DNA, 30 bp, Artificial Sequence
  Synthetic oligonucleotide
gcgtagtccataggcattattactgggccg

SEQ ID NO: 190180 - DNA, 30 bp, Artificial Sequence
  Synthetic oligonucleotide
gacacacggtatccgggatcggctgggccg

SEQ ID NO: 190181 - DNA, 30 bp, Artificial Sequence
  Synthetic oligonucleotide
gcacatactccaggccacgctcgtgggccg

SEQ ID NO: 190182 - DNA, 30 bp, Artificial Sequence
  Synthetic oligonucleotide
aaacatgcgctatgcttcatagttgggccg

SEQ ID NO: 190183 - DNA, 30 bp, Artificial Sequence
  Synthetic oligonucleotide
ccttggggagcagtacttgtacagatgccg

SEQ ID NO: 190184 - DNA, 30 bp, Artificial Sequence
  Synthetic oligonucleotide
ccggaaattaatggttcatttcagatgccg

SEQ ID NO: 190185 - DNA, 30 bp, Artificial Sequence
  Synthetic oligonucleotide
tgtgatctgcgtcgcattagtgcactgccg

SEQ ID NO: 190186 - DNA, 30 bp, Artificial Sequence
  Synthetic oligonucleotide
ccgttagggaaggatgcccccttcctgccg

SEQ ID NO: 190187 - DNA, 30 bp, Artificial Sequence
  Synthetic oligonucleotide
tttaggccactcaggttacaaacgctgccg

SEQ ID NO: 190188 - DNA, 30 bp, Artificial Sequence
  Synthetic oligonucleotide
agtagatagggactggcataaaggctgccg

SEQ ID NO: 190189 - DNA, 30 bp, Artificial Sequence
  Synthetic oligonucleotide
caatatgtcgacgtttgtgggatgctgccg

SEQ ID NO: 190190 - DNA, 30 bp, Artificial Sequence
  Synthetic oligonucleotide
tggacaggcaccatgctaaaggctctgccg

SEQ ID NO: 190191 - DNA, 30 bp, Artificial Sequence
  Synthetic oligonucleotide
tgatcaattggtgactgggtacgtctgccg

SEQ ID NO: 190192 - DNA, 30 bp, Artificial Sequence
  Synthetic oligonucleotide
tgtgatagtagaatcgtcacagttctgccg

SEQ ID NO: 190193 - DNA, 30 bp, Artificial Sequence
  Synthetic oligonucleotide
agtgccctagaggcccagagagttctgccg

SEQ ID NO: 190194 - DNA, 30 bp, Artificial Sequence
  Synthetic oligonucleotide
atgcaagtttgtccttacgtagcattgccg

SEQ ID NO: 190195 - DNA, 30 bp, Artificial Sequence
  Synthetic oligonucleotide
agaggtcccattagcgatgctgagttgccg

SEQ ID NO: 190196 - DNA, 30 bp, Artificial Sequence
  Synthetic oligonucleotide
atgaagagactttttactcagatgttgccg

SEQ ID NO: 190197 - DNA, 30 bp, Artificial Sequence
  Synthetic oligonucleotide
gaccgccggtccacaactgaggacaatccg

SEQ ID NO: 190198 - DNA, 30 bp, Artificial Sequence
  Synthetic oligonucleotide
ctactccaggggaccttttaaatcaatccg

SEQ ID NO: 190199 - DNA, 29 bp, Artificial Sequence
  Synthetic oligonucleotide
atctcatactcaaacaacccctcaatccg

SEQ ID NO: 190200 - DNA, 30 bp, Artificial Sequence
  Synthetic oligonucleotide
tcaattaaagataattgtggaccgaatccg

SEQ ID NO: 190201 - DNA, 30 bp, Artificial Sequence
  Synthetic oligonucleotide
gtgtttacttgcggacacatgaataatccg

SEQ ID NO: 190202 - DNA, 30 bp, Artificial Sequence
  Synthetic oligonucleotide
actttcaatcggcatagcggatgtaatccg

SEQ ID NO: 190203 - DNA, 30 bp, Artificial Sequence
  Synthetic oligonucleotide
ctagcagccgagtcgcccgaggttaatccg

SEQ ID NO: 190204 - DNA, 30 bp, Artificial Sequence
  Synthetic oligonucleotide
agccgtgattcacggttggggcgacatccg

SEQ ID NO: 190205 - DNA, 30 bp, Artificial Sequence
  Synthetic oligonucleotide
atacgcttgaggcacaagcgcacgcatccg

SEQ ID NO: 190206 - DNA, 30 bp, Artificial Sequence
  Synthetic oligonucleotide
tgctgaataaggacagtggtacctgatccg

SEQ ID NO: 190207 - DNA, 30 bp, Artificial Sequence
  Synthetic oligonucleotide
acaggcgtcaagaaacggagatgctatccg

SEQ ID NO: 190208 - DNA, 30 bp, Artificial Sequence
  Synthetic oligonucleotide
acgcgttcagattgtgtgaactattatccg

SEQ ID NO: 190209 - DNA, 30 bp, Artificial Sequence
  Synthetic oligonucleotide
tcaagcgacgagtatgcaaacccaactccg

SEQ ID NO: 190210 - DNA, 30 bp, Artificial Sequence
  Synthetic oligonucleotide
tcgtcggtaggcttgaatacgtacactccg

SEQ ID NO: 190211 - DNA, 30 bp, Artificial Sequence
  Synthetic oligonucleotide
gcagtaaaccgtagggtgggacagactccg

SEQ ID NO: 190212 - DNA, 30 bp, Artificial Sequence
  Synthetic oligonucleotide
gtgcgctcaaccccaggtgaagcgactccg

SEQ ID NO: 190213 - DNA, 30 bp, Artificial Sequence
  Synthetic oligonucleotide
atagttagagcatcagtagttgctactccg

SEQ ID NO: 190214 - DNA, 30 bp, Artificial Sequence
  Synthetic oligonucleotide
cgaaaaggtctgagcgtgcatagacctccg

SEQ ID NO: 190215 - DNA, 30 bp, Artificial Sequence
  Synthetic oligonucleotide
tcactcctagggaatcacgagttccctccg

SEQ ID NO: 190216 - DNA, 30 bp, Artificial Sequence
  Synthetic oligonucleotide
gcgtaagactttaaacctacctaagctccg

SEQ ID NO: 190217 - DNA, 30 bp, Artificial Sequence
  Synthetic oligonucleotide
aatacaggagaaacgatggtggtcgctccg

SEQ ID NO: 190218 - DNA, 31 bp, Artificial Sequence
  Synthetic oligonucleotide
ctcggacacactatgctaaagtcatgctccg

SEQ ID NO: 190219 - DNA, 30 bp, Artificial Sequence
  Synthetic oligonucleotide
accctcgtccacatgaaaccggatgctccg

SEQ ID NO: 190220 - DNA, 30 bp, Artificial Sequence
  Synthetic oligonucleotide
ctacggggctaatctgcaccccctgctccg

SEQ ID NO: 190221 - DNA, 30 bp, Artificial Sequence
  Synthetic oligonucleotide
aagaaaaaccacacgtatccaagatctccg

SEQ ID NO: 190222 - DNA, 30 bp, Artificial Sequence
  Synthetic oligonucleotide
gcatcagtattcgcaggctgacactctccg

SEQ ID NO: 190223 - DNA, 30 bp, Artificial Sequence
  Synthetic oligonucleotide
agccaatgggcgacattatgcgccagtccg

SEQ ID NO: 190224 - DNA, 30 bp, Artificial Sequence
  Synthetic oligonucleotide
ggactgtgcgagttatgtagcgtacgtccg

SEQ ID NO: 190225 - DNA, 30 bp, Artificial Sequence
  Synthetic oligonucleotide
ccgcgtgagaggcatccgctcaggcgtccg

SEQ ID NO: 190226 - DNA, 30 bp, Artificial Sequence
  Synthetic oligonucleotide
agcggatgatctcgcccggacacaggtccg

SEQ ID NO: 190227 - DNA, 30 bp, Artificial Sequence
  Synthetic oligonucleotide
atacagcgttattcataatcccgtggtccg

SEQ ID NO: 190228 - DNA, 30 bp, Artificial Sequence
  Synthetic oligonucleotide
aactggggagaagttgtggctatgtgtccg

SEQ ID NO: 190229 - DNA, 30 bp, Artificial Sequence
  Synthetic oligonucleotide
gaccacgctacatggtgggggtcttgtccg

SEQ ID NO: 190230 - DNA, 30 bp, Artificial Sequence
  Synthetic oligonucleotide
acggggcgaaggattctaccaagcattccg

SEQ ID NO: 190231 - DNA, 30 bp, Artificial Sequence
  Synthetic oligonucleotide
gctcgtatggatgcaggtggcgtcattccg

SEQ ID NO: 190232 - DNA, 30 bp, Artificial Sequence
  Synthetic oligonucleotide
gctaactaagcccgaaagttcgggattccg

SEQ ID NO: 190233 - DNA, 30 bp, Artificial Sequence
  Synthetic oligonucleotide
caatagttcgagtacacaaatcgacttccg

SEQ ID NO: 190234 - DNA, 30 bp, Artificial Sequence
  Synthetic oligonucleotide
gtaccagtcataggctttagggaccttccg

SEQ ID NO: 190235 - DNA, 30 bp, Artificial Sequence
  Synthetic oligonucleotide
ctcccccacttacgatacttaacgcttccg

SEQ ID NO: 190236 - DNA, 30 bp, Artificial Sequence
  Synthetic oligonucleotide
acatcattcatctgatcgagcatgcttccg

SEQ ID NO: 190237 - DNA, 30 bp, Artificial Sequence
  Synthetic oligonucleotide
tagacgaaagctaatccgtgcccggttccg

SEQ ID NO: 190238 - DNA, 30 bp, Artificial Sequence
  Synthetic oligonucleotide
ataagatgtgatccatactagtgggttccg

SEQ ID NO: 190239 - DNA, 30 bp, Artificial Sequence
  Synthetic oligonucleotide
tcatttcgtggccatgcgccctagtttccg

SEQ ID NO: 190240 - DNA, 30 bp, Artificial Sequence
  Synthetic oligonucleotide
caccgatatacagtcgtgtggaggtttccg

SEQ ID NO: 190241 - DNA, 30 bp, Artificial Sequence
  Synthetic oligonucleotide
gcagatacgatacgacggatacattttccg

SEQ ID NO: 190242 - DNA, 30 bp, Artificial Sequence
  Synthetic oligonucleotide
atagggtgaatgacccattgaagttttccg

SEQ ID NO: 190243 - DNA, 30 bp, Artificial Sequence
  Synthetic oligonucleotide
tgagatcgtgtccatagcacatgttttccg

SEQ ID NO: 190244 - DNA, 30 bp, Artificial Sequence
  Synthetic oligonucleotide
agtagccttaacgacttaagccaaaaagcg

SEQ ID NO: 190245 - DNA, 30 bp, Artificial Sequence
  Synthetic oligonucleotide
tagtcgcccgcgaatgcaacgacaaaagcg

SEQ ID NO: 190246 - DNA, 30 bp, Artificial Sequence
  Synthetic oligonucleotide
gagaaagtgatcagcgagtaagcaaaagcg

SEQ ID NO: 190247 - DNA, 30 bp, Artificial Sequence
  Synthetic oligonucleotide
taatcgaggcctgagggagaattaaaagcg

SEQ ID NO: 190248 - DNA, 30 bp, Artificial Sequence
  Synthetic oligonucleotide
agcagggcgtagagcttgggaatcaaagcg

SEQ ID NO: 190249 - DNA, 30 bp, Artificial Sequence
  Synthetic oligonucleotide
tacgaaggaccgtatacaatattcaaagcg

SEQ ID NO: 190250 - DNA, 30 bp, Artificial Sequence
  Synthetic oligonucleotide
cgatcataccgtaaagctttgaataaagcg

SEQ ID NO: 190251 - DNA, 30 bp, Artificial Sequence
  Synthetic oligonucleotide
tagacacgttgctagaaactaattaaagcg

SEQ ID NO: 190252 - DNA, 30 bp, Artificial Sequence
  Synthetic oligonucleotide
tcacactacacagggtgaaatcaacaagcg

SEQ ID NO: 190253 - DNA, 30 bp, Artificial Sequence
  Synthetic oligonucleotide
atgaacaaagggacgcgcagtgtacaagcg

SEQ ID NO: 190254 - DNA, 30 bp, Artificial Sequence
  Synthetic oligonucleotide
gtcatgatacagatcgaatagcaccaagcg

SEQ ID NO: 190255 - DNA, 30 bp, Artificial Sequence
  Synthetic oligonucleotide
ggtatagggtatggtacttcactgcaagcg

SEQ ID NO: 190256 - DNA, 30 bp, Artificial Sequence
  Synthetic oligonucleotide
atggcgacacaggattgacacacagaagcg

SEQ ID NO: 190257 - DNA, 30 bp, Artificial Sequence
  Synthetic oligonucleotide
aaggcctacgtctgtggtgggttggaagcg

SEQ ID NO: 190258 - DNA, 30 bp, Artificial Sequence
  Synthetic oligonucleotide
gctattaaaagggcaaatacttatgaagcg

SEQ ID NO: 190259 - DNA, 30 bp, Artificial Sequence
  Synthetic oligonucleotide
tcaggagcccggagcagcgaatgtgaagcg

SEQ ID NO: 190260 - DNA, 30 bp, Artificial Sequence
  Synthetic oligonucleotide
tatgcccgggtgtatgaatgcgggtaagcg

SEQ ID NO: 190261 - DNA, 30 bp, Artificial Sequence
  Synthetic oligonucleotide
tacttctgctatttcgtctttgggtaagcg

SEQ ID NO: 190262 - DNA, 30 bp, Artificial Sequence
  Synthetic oligonucleotide
aggaccctaagtgtacggagtacttaagcg

SEQ ID NO: 190263 - DNA, 30 bp, Artificial Sequence
  Synthetic oligonucleotide
cacggcatgggttagcgtcctgtcacagcg

SEQ ID NO: 190264 - DNA, 30 bp, Artificial Sequence
  Synthetic oligonucleotide
taatttatccagccatgttttaatacagcg

SEQ ID NO: 190265 - DNA, 30 bp, Artificial Sequence
  Synthetic oligonucleotide
tccgagagagagggattatgggttacagcg

SEQ ID NO: 190266 - DNA, 30 bp, Artificial Sequence
  Synthetic oligonucleotide
tctgatctctggggatatctttcaccagcg

SEQ ID NO: 190267 - DNA, 30 bp, Artificial Sequence
  Synthetic oligonucleotide
tccgttcgaccaggcttttcatggccagcg

SEQ ID NO: 190268 - DNA, 30 bp, Artificial Sequence
  Synthetic oligonucleotide
gaagcccatgcggtgtaccaccgggcagcg

SEQ ID NO: 190269 - DNA, 30 bp, Artificial Sequence
  Synthetic oligonucleotide
acgcattatccggtaatggctaatgcagcg

SEQ ID NO: 190270 - DNA, 30 bp, Artificial Sequence
  Synthetic oligonucleotide
gcgacgcagaaagagaaggatgtctcagcg

SEQ ID NO: 190271 - DNA, 30 bp, Artificial Sequence
  Synthetic oligonucleotide
gaaagaatcgagctcgcgccggtgtcagcg

SEQ ID NO: 190272 - DNA, 30 bp, Artificial Sequence
  Synthetic oligonucleotide
aaagaaaggtctcaggttaatcattcagcg

SEQ ID NO: 190273 - DNA, 30 bp, Artificial Sequence
  Synthetic oligonucleotide
gggtgcatggaagaatggcatcattcagcg

SEQ ID NO: 190274 - DNA, 30 bp, Artificial Sequence
  Synthetic oligonucleotide
ctgttccttggcagtgtccgtttcagagcg

SEQ ID NO: 190275 - DNA, 30 bp, Artificial Sequence
  Synthetic oligonucleotide
aaaagttattatctggggctcgtgagagcg

SEQ ID NO: 190276 - DNA, 30 bp, Artificial Sequence
  Synthetic oligonucleotide
cgggggtgtatctcgacgattggtagagcg

SEQ ID NO: 190277 - DNA, 30 bp, Artificial Sequence
  Synthetic oligonucleotide
tcgaggataaacgaaaagcctataggagcg

SEQ ID NO: 190278 - DNA, 30 bp, Artificial Sequence
  Synthetic oligonucleotide
atgtaggcacgattagtattaggtggagcg

SEQ ID NO: 190279 - DNA, 30 bp, Artificial Sequence
  Synthetic oligonucleotide
ccatcggctgagtagtcgaccggatgagcg

SEQ ID NO: 190280 - DNA, 30 bp, Artificial Sequence
  Synthetic oligonucleotide
cgttgtgtttaaggaggaaatccaatagcg

SEQ ID NO: 190281 - DNA, 30 bp, Artificial Sequence
  Synthetic oligonucleotide
ttcaaaggttacatggtgatggtaatagcg

SEQ ID NO: 190282 - DNA, 30 bp, Artificial Sequence
  Synthetic oligonucleotide
gtattgccggtgaagagacaatacatagcg

SEQ ID NO: 190283 - DNA, 30 bp, Artificial Sequence
  Synthetic oligonucleotide
ggagatattggcgatagaagctacatagcg

SEQ ID NO: 190284 - DNA, 30 bp, Artificial Sequence
  Synthetic oligonucleotide
gggaattcgttcacgtcgctcggcatagcg

SEQ ID NO: 190285 - DNA, 30 bp, Artificial Sequence
  Synthetic oligonucleotide
gcgaatcactgtgatactgcaatcatagcg

SEQ ID NO: 190286 - DNA, 30 bp, Artificial Sequence
  Synthetic oligonucleotide
gggtacccgccacgcatgggtaagatagcg

SEQ ID NO: 190287 - DNA, 30 bp, Artificial Sequence
  Synthetic oligonucleotide
gcgtgatgcatatacgaggccactatagcg

SEQ ID NO: 190288 - DNA, 30 bp, Artificial Sequence
  Synthetic oligonucleotide
aagatgaccgttagagccagaggtatagcg

SEQ ID NO: 190289 - DNA, 30 bp, Artificial Sequence
  Synthetic oligonucleotide
ccgcgaacggaggccgcctacagactagcg

SEQ ID NO: 190290 - DNA, 30 bp, Artificial Sequence
  Synthetic oligonucleotide
tgcatttaatctttggagtgactgctagcg

SEQ ID NO: 190291 - DNA, 30 bp, Artificial Sequence
  Synthetic oligonucleotide
tactttagactttaaacggtggcagtagcg

SEQ ID NO: 190292 - DNA, 30 bp, Artificial Sequence
  Synthetic oligonucleotide
aagggtgaggggccggcagatcaattagcg

SEQ ID NO: 190293 - DNA, 30 bp, Artificial Sequence
  Synthetic oligonucleotide
ccggaattatggtgtcagtaagcattagcg

SEQ ID NO: 190294 - DNA, 30 bp, Artificial Sequence
  Synthetic oligonucleotide
caggtaggaagcgcgtctttccgcttagcg

SEQ ID NO: 190295 - DNA, 30 bp, Artificial Sequence
  Synthetic oligonucleotide
tacccgcgttctccgaacagtcgcttagcg

SEQ ID NO: 190296 - DNA, 30 bp, Artificial Sequence
  Synthetic oligonucleotide
attgggaattgacggtccagaatgttagcg

SEQ ID NO: 190297 - DNA, 30 bp, Artificial Sequence
  Synthetic oligonucleotide
gctacacagtaatgtgacgaatttttagcg

SEQ ID NO: 190298 - DNA, 30 bp, Artificial Sequence
  Synthetic oligonucleotide
cgtgacgtttaggtggtataatacaacgcg

SEQ ID NO: 190299 - DNA, 31 bp, Artificial Sequence
  Synthetic oligonucleotide
gtacggaacctgaagatggaacaagaacgcg

SEQ ID NO: 190300 - DNA, 30 bp, Artificial Sequence
  Synthetic oligonucleotide
tggtttacactcgcttgggggtcgaacgcg

SEQ ID NO: 190301 - DNA, 30 bp, Artificial Sequence
  Synthetic oligonucleotide
gactacagggaaagaggaaccatgaacgcg

SEQ ID NO: 190302 - DNA, 30 bp, Artificial Sequence
  Synthetic oligonucleotide
attgagcataacgagctaaaactgaacgcg

SEQ ID NO: 190303 - DNA, 30 bp, Artificial Sequence
  Synthetic oligonucleotide
ggaatccaataaaacatgacgaaacacgcg

SEQ ID NO: 190304 - DNA, 30 bp, Artificial Sequence
  Synthetic oligonucleotide
ataggacaagtgcaggacccgctacacgcg

SEQ ID NO: 190305 - DNA, 30 bp, Artificial Sequence
  Synthetic oligonucleotide
acatatattctagcgcacgagccgcacgcg

SEQ ID NO: 190306 - DNA, 30 bp, Artificial Sequence
  Synthetic oligonucleotide
gggcgctgtctaatttgagggtcgcacgcg

SEQ ID NO: 190307 - DNA, 30 bp, Artificial Sequence
  Synthetic oligonucleotide
ggaggaaagacagggttcttccatcacgcg

SEQ ID NO: 190308 - DNA, 30 bp, Artificial Sequence
  Synthetic oligonucleotide
gatgggaggacacatcagcggagtcacgcg

SEQ ID NO: 190309 - DNA, 30 bp, Artificial Sequence
  Synthetic oligonucleotide
caggcatccacatatcggcagcacgacgcg

SEQ ID NO: 190310 - DNA, 30 bp, Artificial Sequence
  Synthetic oligonucleotide
aaagtgtgtcgaggttagacgacggacgcg

SEQ ID NO: 190311 - DNA, 30 bp, Artificial Sequence
  Synthetic oligonucleotide
aagctgtcattatcagacagcacctacgcg

SEQ ID NO: 190312 - DNA, 30 bp, Artificial Sequence
  Synthetic oligonucleotide
gatgacgtgtaaagctcagcggggtacgcg

SEQ ID NO: 190313 - DNA, 30 bp, Artificial Sequence
  Synthetic oligonucleotide
tacttggctggctgggttcatacttacgcg

SEQ ID NO: 190314 - DNA, 30 bp, Artificial Sequence
  Synthetic oligonucleotide
aagtgcatccgggatgacgatcaaaccgcg

SEQ ID NO: 190315 - DNA, 30 bp, Artificial Sequence
  Synthetic oligonucleotide
tattgtccttgagggctctcaggaaccgcg

SEQ ID NO: 190316 - DNA, 30 bp, Artificial Sequence
  Synthetic oligonucleotide
gccgaaatatgccccgccccgttaaccgcg

SEQ ID NO: 190317 - DNA, 30 bp, Artificial Sequence
  Synthetic oligonucleotide
ttgtcagagtcacacacgggcctcaccgcg

SEQ ID NO: 190318 - DNA, 30 bp, Artificial Sequence
  Synthetic oligonucleotide
atagctcgtcaggggggggcctaccccgcg

SEQ ID NO: 190319 - DNA, 30 bp, Artificial Sequence
  Synthetic oligonucleotide
ggtgtggaggtgggtcccacagtgcccgcg

SEQ ID NO: 190320 - DNA, 30 bp, Artificial Sequence
  Synthetic oligonucleotide
tatgtagtgctcgaccgattcgtgcccgcg

SEQ ID NO: 190321 - DNA, 30 bp, Artificial Sequence
  Synthetic oligonucleotide
aaagtgtcatgggtatagaggaatcccgcg

SEQ ID NO: 190322 - DNA, 30 bp, Artificial Sequence
  Synthetic oligonucleotide
gctataaaaccctacgcctatcgagccgcg

SEQ ID NO: 190323 - DNA, 30 bp, Artificial Sequence
  Synthetic oligonucleotide
caaccacttatagcttagctcctagccgcg

SEQ ID NO: 190324 - DNA, 30 bp, Artificial Sequence
  Synthetic oligonucleotide
aactaatgatccgaatctgtgtactccgcg

SEQ ID NO: 190325 - DNA, 30 bp, Artificial Sequence
  Synthetic oligonucleotide
agcgtgcgatggaaaacggtagcttccgcg

SEQ ID NO: 190326 - DNA, 30 bp, Artificial Sequence
  Synthetic oligonucleotide
ccaacgcgcaagaaaatcaataaaagcgcg

SEQ ID NO: 190327 - DNA, 30 bp, Artificial Sequence
  Synthetic oligonucleotide
ctaccaaaaaggtaataggcccaaagcgcg

SEQ ID NO: 190328 - DNA, 30 bp, Artificial Sequence
  Synthetic oligonucleotide
tcatggtgaggcacatgattcagaagcgcg

SEQ ID NO: 190329 - DNA, 30 bp, Artificial Sequence
  Synthetic oligonucleotide
aataacaagggggttactacgcttagcgcg

SEQ ID NO: 190330 - DNA, 30 bp, Artificial Sequence
  Synthetic oligonucleotide
gggattactttcatgatccagtaccgcgcg

SEQ ID NO: 190331 - DNA, 30 bp, Artificial Sequence
  Synthetic oligonucleotide
atcttctccgggactagataggagcgcgcg

SEQ ID NO: 190332 - DNA, 30 bp, Artificial Sequence
  Synthetic oligonucleotide
taggagcgtgggtgtaaccggatgcgcgcg

SEQ ID NO: 190333 - DNA, 30 bp, Artificial Sequence
  Synthetic oligonucleotide
cctgcttagggtgcgaaggcccgcggcgcg

SEQ ID NO: 190334 - DNA, 30 bp, Artificial Sequence
  Synthetic oligonucleotide
tacaagggcgcctgccgaatgacgggcgcg

SEQ ID NO: 190335 - DNA, 31 bp, Artificial Sequence
  Synthetic oligonucleotide
attagatagcgctgggtggcccaggggcgcg

SEQ ID NO: 190336 - DNA, 30 bp, Artificial Sequence
  Synthetic oligonucleotide
gacttataactaagttaaaatagctgcgcg

SEQ ID NO: 190337 - DNA, 30 bp, Artificial Sequence
  Synthetic oligonucleotide
cgaggattatgacgtcgagcggtttgcgcg

SEQ ID NO: 190338 - DNA, 30 bp, Artificial Sequence
  Synthetic oligonucleotide
gaaatcatctcttcgtccgaataaatcgcg

SEQ ID NO: 190339 - DNA, 30 bp, Artificial Sequence
  Synthetic oligonucleotide
ccgtacaataggaccgaatgcctaatcgcg

SEQ ID NO: 190340 - DNA, 30 bp, Artificial Sequence
  Synthetic oligonucleotide
acgcggcccgcgcagcggaggaagatcgcg

SEQ ID NO: 190341 - DNA, 30 bp, Artificial Sequence
  Synthetic oligonucleotide
agagagtcagccacttcctatacgatcgcg

SEQ ID NO: 190342 - DNA, 30 bp, Artificial Sequence
  Synthetic oligonucleotide
gtcaacctgtagtactaatggtgcgtcgcg

SEQ ID NO: 190343 - DNA, 30 bp, Artificial Sequence
  Synthetic oligonucleotide
gtgtgaaaagtctaataaccctaggtcgcg

SEQ ID NO: 190344 - DNA, 30 bp, Artificial Sequence
  Synthetic oligonucleotide
agaaaaggtagctactgggaatctgtcgcg

SEQ ID NO: 190345 - DNA, 30 bp, Artificial Sequence
  Synthetic oligonucleotide
gggtgacgaacttgaagcgtatcaaaggcg

SEQ ID NO: 190346 - DNA, 30 bp, Artificial Sequence
  Synthetic oligonucleotide
gcagagtcggcgaggctgcaggcacaggcg

SEQ ID NO: 190347 - DNA, 30 bp, Artificial Sequence
  Synthetic oligonucleotide
gacggtgaacgatgtccttgtcgacaggcg

SEQ ID NO: 190348 - DNA, 30 bp, Artificial Sequence
  Synthetic oligonucleotide
actaggcataaatcgcaggagttacaggcg

SEQ ID NO: 190349 - DNA, 30 bp, Artificial Sequence
  Synthetic oligonucleotide
cagacatgttcagagggatcggcgcaggcg

SEQ ID NO: 190350 - DNA, 30 bp, Artificial Sequence
  Synthetic oligonucleotide
ctaggctgctatacaagtgtcgttcaggcg

SEQ ID NO: 190351 - DNA, 30 bp, Artificial Sequence
  Synthetic oligonucleotide
gtgagactgggtgtgacgcaaaaagaggcg

SEQ ID NO: 190352 - DNA, 30 bp, Artificial Sequence
  Synthetic oligonucleotide
acacaggaccattaataattattagaggcg

SEQ ID NO: 190353 - DNA, 30 bp, Artificial Sequence
  Synthetic oligonucleotide
gttttggtaaacgaactaaaattggaggcg

SEQ ID NO: 190354 - DNA, 30 bp, Artificial Sequence
  Synthetic oligonucleotide
cgtccttagaagaattattgaggtgaggcg

SEQ ID NO: 190355 - DNA, 30 bp, Artificial Sequence
  Synthetic oligonucleotide
tatcaggaccagttatccgtacgataggcg

SEQ ID NO: 190356 - DNA, 30 bp, Artificial Sequence
  Synthetic oligonucleotide
ttactaggagtcaaaatcgatgtataggcg

SEQ ID NO: 190357 - DNA, 30 bp, Artificial Sequence
  Synthetic oligonucleotide
actagtccggtctactaatcttactaggcg

SEQ ID NO: 190358 - DNA, 30 bp, Artificial Sequence
  Synthetic oligonucleotide
cagctgggctctcttgacggaaattaggcg

SEQ ID NO: 190359 - DNA, 30 bp, Artificial Sequence
  Synthetic oligonucleotide
gatgactctagatctacttaattcacggcg

SEQ ID NO: 190360 - DNA, 30 bp, Artificial Sequence
  Synthetic oligonucleotide
gagaattgacaggtaggaacgaagacggcg

SEQ ID NO: 190361 - DNA, 30 bp, Artificial Sequence
  Synthetic oligonucleotide
cacgctcttattccgggctctccaccggcg

SEQ ID NO: 190362 - DNA, 30 bp, Artificial Sequence
  Synthetic oligonucleotide
aggatctctggacatcttggggtaccggcg

SEQ ID NO: 190363 - DNA, 30 bp, Artificial Sequence
  Synthetic oligonucleotide
aagaacaaggtaagcctttagtgcccggcg

SEQ ID NO: 190364 - DNA, 30 bp, Artificial Sequence
  Synthetic oligonucleotide
tgataagacgatgcgatcggggcgccggcg

SEQ ID NO: 190365 - DNA, 30 bp, Artificial Sequence
  Synthetic oligonucleotide
aaaagattccgtgcgcaacgtctagcggcg

SEQ ID NO: 190366 - DNA, 30 bp, Artificial Sequence
  Synthetic oligonucleotide
cgcttccatcgcagagctggataggcggcg

SEQ ID NO: 190367 - DNA, 30 bp, Artificial Sequence
  Synthetic oligonucleotide
atcagaataggccaaacgtacagggcggcg

SEQ ID NO: 190368 - DNA, 30 bp, Artificial Sequence
  Synthetic oligonucleotide
cgcccctccgaatcgtaaacccttgcggcg

SEQ ID NO: 190369 - DNA, 30 bp, Artificial Sequence
  Synthetic oligonucleotide
ggtagaggtcgggccacagtctgctcggcg

SEQ ID NO: 190370 - DNA, 30 bp, Artificial Sequence
  Synthetic oligonucleotide
ataacaaacggaagcacaatctagtcggcg

SEQ ID NO: 190371 - DNA, 30 bp, Artificial Sequence
  Synthetic oligonucleotide
ggaatagacgaggacttgtcatattcggcg

SEQ ID NO: 190372 - DNA, 30 bp, Artificial Sequence
  Synthetic oligonucleotide
taggtgcccgaaataatcacctcttcggcg

SEQ ID NO: 190373 - DNA, 30 bp, Artificial Sequence
  Synthetic oligonucleotide
acggatcaggcagttcccagacccagggcg

SEQ ID NO: 190374 - DNA, 30 bp, Artificial Sequence
  Synthetic oligonucleotide
tggttagtttctagaggccaaaagagggcg

SEQ ID NO: 190375 - DNA, 30 bp, Artificial Sequence
  Synthetic oligonucleotide
tgggtttggaacctcgatggcgcgagggcg

SEQ ID NO: 190376 - DNA, 30 bp, Artificial Sequence
  Synthetic oligonucleotide
tttgatacgtcataagttgcatggagggcg

SEQ ID NO: 190377 - DNA, 30 bp, Artificial Sequence
  Synthetic oligonucleotide
tgagatcaaaattgacgcttataacgggcg

SEQ ID NO: 190378 - DNA, 30 bp, Artificial Sequence
  Synthetic oligonucleotide
ggtactcacaaccaaccttgttaccgggcg

SEQ ID NO: 190379 - DNA, 30 bp, Artificial Sequence
  Synthetic oligonucleotide
gccagggtaaggatggaaggccttcgggcg

SEQ ID NO: 190380 - DNA, 30 bp, Artificial Sequence
  Synthetic oligonucleotide
gggtagccggagataactttgtgaggggcg

SEQ ID NO: 190381 - DNA, 30 bp, Artificial Sequence
  Synthetic oligonucleotide
tgcaatcaaactagcctggattgcggggcg

SEQ ID NO: 190382 - DNA, 30 bp, Artificial Sequence
  Synthetic oligonucleotide
aacaatgtctagctatgagctcatggggcg

SEQ ID NO: 190383 - DNA, 30 bp, Artificial Sequence
  Synthetic oligonucleotide
tttaatgtccgaaacagattgcaatgggcg

SEQ ID NO: 190384 - DNA, 30 bp, Artificial Sequence
  Synthetic oligonucleotide
cattgaaagtgccacaggaactgatgggcg

SEQ ID NO: 190385 - DNA, 30 bp, Artificial Sequence
  Synthetic oligonucleotide
agtcgtgacctagagataagaaagtgggcg

SEQ ID NO: 190386 - DNA, 30 bp, Artificial Sequence
  Synthetic oligonucleotide
attaggaacaaaaaacggccaatgtgggcg

SEQ ID NO: 190387 - DNA, 30 bp, Artificial Sequence
  Synthetic oligonucleotide
cgactcagggccaagagaaaatattgggcg

SEQ ID NO: 190388 - DNA, 30 bp, Artificial Sequence
  Synthetic oligonucleotide
ctgttgtctagaaacccagtggcaatggcg

SEQ ID NO: 190389 - DNA, 30 bp, Artificial Sequence
  Synthetic oligonucleotide
gaatgcgaagattttcgtgcgaatatggcg

SEQ ID NO: 190390 - DNA, 30 bp, Artificial Sequence
  Synthetic oligonucleotide
acacgcgtcgattcaattacggatatggcg

SEQ ID NO: 190391 - DNA, 30 bp, Artificial Sequence
  Synthetic oligonucleotide
tacctgtcctcacggcagaagtatatggcg

SEQ ID NO: 190392 - DNA, 30 bp, Artificial Sequence
  Synthetic oligonucleotide
actcaaattcgtacctaagtcatcgtggcg

SEQ ID NO: 190393 - DNA, 30 bp, Artificial Sequence
  Synthetic oligonucleotide
ttgctttacgaacatggtcacatgttggcg

SEQ ID NO: 190394 - DNA, 30 bp, Artificial Sequence
  Synthetic oligonucleotide
gaggggctgaagaagattcgcgccaatgcg

SEQ ID NO: 190395 - DNA, 30 bp, Artificial Sequence
  Synthetic oligonucleotide
gccgaccgctcctagacctacgtcaatgcg

SEQ ID NO: 190396 - DNA, 30 bp, Artificial Sequence
  Synthetic oligonucleotide
ttgtggaccagacgtacagttacgaatgcg

SEQ ID NO: 190397 - DNA, 30 bp, Artificial Sequence
  Synthetic oligonucleotide
gtagaacctagggcatataagccgaatgcg

SEQ ID NO: 190398 - DNA, 30 bp, Artificial Sequence
  Synthetic oligonucleotide
ctcttcatcaatgatatgttacggaatgcg

SEQ ID NO: 190399 - DNA, 30 bp, Artificial Sequence
  Synthetic oligonucleotide
gatggctcctcagcctggccaattaatgcg

SEQ ID NO: 190400 - DNA, 30 bp, Artificial Sequence
  Synthetic oligonucleotide
gacggacggccttcaaatacatttaatgcg

SEQ ID NO: 190401 - DNA, 30 bp, Artificial Sequence
  Synthetic oligonucleotide
aaagtggaggtgcttaggggggtacatgcg

SEQ ID NO: 190402 - DNA, 30 bp, Artificial Sequence
  Synthetic oligonucleotide
caacggcggtccgggtagcgccctcatgcg

SEQ ID NO: 190403 - DNA, 30 bp, Artificial Sequence
  Synthetic oligonucleotide
agacgggcgtcctacaggtcacaagatgcg

SEQ ID NO: 190404 - DNA, 30 bp, Artificial Sequence
  Synthetic oligonucleotide
atatcatcgcgcgccaggcaaagagatgcg

SEQ ID NO: 190405 - DNA, 40 bp, Artificial Sequence
  Synthetic oligonucleotide
gcattggtaggccggggggtcccgccccggttctgatgcg

SEQ ID NO: 190406 - DNA, 30 bp, Artificial Sequence
  Synthetic oligonucleotide
accccatgaggtctgaggtaaaaatatgcg

SEQ ID NO: 190407 - DNA, 30 bp, Artificial Sequence
  Synthetic oligonucleotide
tagccagaaaactataacaacaactatgcg

SEQ ID NO: 190408 - DNA, 30 bp, Artificial Sequence
  Synthetic oligonucleotide
ttccgtgaaaaagcgtttgtggtaactgcg

SEQ ID NO: 190409 - DNA, 30 bp, Artificial Sequence
  Synthetic oligonucleotide
cgattactgctacggtgacagttaactgcg

SEQ ID NO: 190410 - DNA, 30 bp, Artificial Sequence
  Synthetic oligonucleotide
ttacaggttacaacacatggtaccactgcg

SEQ ID NO: 190411 - DNA, 30 bp, Artificial Sequence
  Synthetic oligonucleotide
agcgggtagctccagccgccgtccactgcg

SEQ ID NO: 190412 - DNA, 30 bp, Artificial Sequence
  Synthetic oligonucleotide
gtgaagtatgattcgctctcggtcactgcg

SEQ ID NO: 190413 - DNA, 30 bp, Artificial Sequence
  Synthetic oligonucleotide
aaccctacgcggtgtaagcccgatactgcg

SEQ ID NO: 190414 - DNA, 30 bp, Artificial Sequence
  Synthetic oligonucleotide
ggagttccctacagttgtgtagaccctgcg

SEQ ID NO: 190415 - DNA, 30 bp, Artificial Sequence
  Synthetic oligonucleotide
acaatggcttataacaaacttttagctgcg

SEQ ID NO: 190416 - DNA, 30 bp, Artificial Sequence
  Synthetic oligonucleotide
taggtaagtacgagtagtttgctcgctgcg

SEQ ID NO: 190417 - DNA, 31 bp, Artificial Sequence
  Synthetic oligonucleotide
cgtctataccattgtccgggcagaggctgcg

SEQ ID NO: 190418 - DNA, 30 bp, Artificial Sequence
  Synthetic oligonucleotide
tttcatcgcgaagcccaatatgctgctgcg

SEQ ID NO: 190419 - DNA, 30 bp, Artificial Sequence
  Synthetic oligonucleotide
aagagctgaagttgaaccgcctgctctgcg

SEQ ID NO: 190420 - DNA, 30 bp, Artificial Sequence
  Synthetic oligonucleotide
atcgggacgatcgctgtagtcccgtctgcg

SEQ ID NO: 190421 - DNA, 30 bp, Artificial Sequence
  Synthetic oligonucleotide
tgtcatctgcatgtcaatagagaaagtgcg

SEQ ID NO: 190422 - DNA, 30 bp, Artificial Sequence
  Synthetic oligonucleotide
gaaaatgaaccatacagtgtccgaagtgcg

SEQ ID NO: 190423 - DNA, 30 bp, Artificial Sequence
  Synthetic oligonucleotide
agctcgtttatagtgcagggatacagtgcg

SEQ ID NO: 190424 - DNA, 30 bp, Artificial Sequence
  Synthetic oligonucleotide
ctagcaccgttctagtctaccgagagtgcg

SEQ ID NO: 190425 - DNA, 30 bp, Artificial Sequence
  Synthetic oligonucleotide
atgaattcactcgaacttacatctagtgcg

SEQ ID NO: 190426 - DNA, 30 bp, Artificial Sequence
  Synthetic oligonucleotide
gtcgttcagcggagttggtgagcacgtgcg

SEQ ID NO: 190427 - DNA, 30 bp, Artificial Sequence
  Synthetic oligonucleotide
gttaaggaccctggaatttaagaccgtgcg

SEQ ID NO: 190428 - DNA, 30 bp, Artificial Sequence
  Synthetic oligonucleotide
acctgatccatacgaacctcttggcgtgcg

SEQ ID NO: 190429 - DNA, 30 bp, Artificial Sequence
  Synthetic oligonucleotide
aaggttcctagaagagaaattagtcgtgcg

SEQ ID NO: 190430 - DNA, 30 bp, Artificial Sequence
  Synthetic oligonucleotide
taacaatcgtgtgccataggccgcggtgcg

SEQ ID NO: 190431 - DNA, 30 bp, Artificial Sequence
  Synthetic oligonucleotide
ttccggtacgtgtatcagcagatatgtgcg

SEQ ID NO: 190432 - DNA, 30 bp, Artificial Sequence
  Synthetic oligonucleotide
ggaaataactactatgagttgtgctgtgcg

SEQ ID NO: 190433 - DNA, 30 bp, Artificial Sequence
  Synthetic oligonucleotide
ttgccgctacagatagccacagggtgtgcg

SEQ ID NO: 190434 - DNA, 30 bp, Artificial Sequence
  Synthetic oligonucleotide
ggccaagaacgcaaatggcattggtgtgcg

SEQ ID NO: 190435 - DNA, 30 bp, Artificial Sequence
  Synthetic oligonucleotide
tcattcaaaaccaagatgtaatattgtgcg

SEQ ID NO: 190436 - DNA, 30 bp, Artificial Sequence
  Synthetic oligonucleotide
atagcatatgatcgcacggatgatattgcg

SEQ ID NO: 190437 - DNA, 30 bp, Artificial Sequence
  Synthetic oligonucleotide
ccaccattgggttggcatgaatcacttgcg

SEQ ID NO: 190438 - DNA, 30 bp, Artificial Sequence
  Synthetic oligonucleotide
cgagagcggtcaccaacgcagccccttgcg

SEQ ID NO: 190439 - DNA, 30 bp, Artificial Sequence
  Synthetic oligonucleotide
ggagtccgagcaaaccacaaaaggcttgcg

SEQ ID NO: 190440 - DNA, 30 bp, Artificial Sequence
  Synthetic oligonucleotide
ccactgttggcgggcattttcttgcttgcg

SEQ ID NO: 190441 - DNA, 30 bp, Artificial Sequence
  Synthetic oligonucleotide
aacagcgttgttactacttattgtcttgcg

SEQ ID NO: 190442 - DNA, 30 bp, Artificial Sequence
  Synthetic oligonucleotide
ctcgatcggcgaatttttcgctccgttgcg

SEQ ID NO: 190443 - DNA, 30 bp, Artificial Sequence
  Synthetic oligonucleotide
gaccaagatggcatattgccgcgcgttgcg

SEQ ID NO: 190444 - DNA, 30 bp, Artificial Sequence
  Synthetic oligonucleotide
tcctgacgtaatagtttcggaagatttgcg

SEQ ID NO: 190445 - DNA, 30 bp, Artificial Sequence
  Synthetic oligonucleotide
ggtcgtacaaagacacagtggatatttgcg

SEQ ID NO: 190446 - DNA, 30 bp, Artificial Sequence
  Synthetic oligonucleotide
aagatctggtccgtatcaatggtatttgcg

SEQ ID NO: 190447 - DNA, 30 bp, Artificial Sequence
  Synthetic oligonucleotide
gctgtcggcagaggttaaatttactttgcg

SEQ ID NO: 190448 - DNA, 30 bp, Artificial Sequence
  Synthetic oligonucleotide
tgacaggccacaaaccaattgccctttgcg

SEQ ID NO: 190449 - DNA, 30 bp, Artificial Sequence
  Synthetic oligonucleotide
ggttgctggaagaattgcttaacgtttgcg

SEQ ID NO: 190450 - DNA, 30 bp, Artificial Sequence
  Synthetic oligonucleotide
tgtcgcgcgtattcaacatactcgtttgcg

SEQ ID NO: 190451 - DNA, 30 bp, Artificial Sequence
  Synthetic oligonucleotide
cgcgccgcgttgaagagtatacggtttgcg

SEQ ID NO: 190452 - DNA, 31 bp, Artificial Sequence
  Synthetic oligonucleotide
agtgagagcacctattccgcgctattttgcg

SEQ ID NO: 190453 - DNA, 30 bp, Artificial Sequence
  Synthetic oligonucleotide
tcctctcgtacggacatgtcacacaaatcg

SEQ ID NO: 190454 - DNA, 30 bp, Artificial Sequence
  Synthetic oligonucleotide
gcccccaggatcgtcggtgagggcaaatcg

SEQ ID NO: 190455 - DNA, 30 bp, Artificial Sequence
  Synthetic oligonucleotide
atcgttactactggacctacaatcaaatcg

SEQ ID NO: 190456 - DNA, 30 bp, Artificial Sequence
  Synthetic oligonucleotide
tatgaacacgcgtgcacaggaaggaaatcg

SEQ ID NO: 190457 - DNA, 30 bp, Artificial Sequence
  Synthetic oligonucleotide
agcggctgcacgctacaacatcaacaatcg

SEQ ID NO: 190458 - DNA, 30 bp, Artificial Sequence
  Synthetic oligonucleotide
gtcctgacaatgtctgcgaccgcccaatcg

SEQ ID NO: 190459 - DNA, 30 bp, Artificial Sequence
  Synthetic oligonucleotide
attgagtatcggccaccctgtaagcaatcg

SEQ ID NO: 190460 - DNA, 30 bp, Artificial Sequence
  Synthetic oligonucleotide
aatcctgtggcagaacttaataggcaatcg

SEQ ID NO: 190461 - DNA, 30 bp, Artificial Sequence
  Synthetic oligonucleotide
tgccgtgatcggcccgtgcagtctcaatcg

SEQ ID NO: 190462 - DNA, 30 bp, Artificial Sequence
  Synthetic oligonucleotide
gtgggggttcaccagaaatgcttagaatcg

SEQ ID NO: 190463 - DNA, 30 bp, Artificial Sequence
  Synthetic oligonucleotide
ggttagtcccgggcaagtacaactgaatcg

SEQ ID NO: 190464 - DNA, 30 bp, Artificial Sequence
  Synthetic oligonucleotide
caggtcatatctgcgtttacttgataatcg

SEQ ID NO: 190465 - DNA, 30 bp, Artificial Sequence
  Synthetic oligonucleotide
tgagccgacaggctattggttctataatcg

SEQ ID NO: 190466 - DNA, 29 bp, Artificial Sequence
  Synthetic oligonucleotide
aactggattggctatataaccattaatcg

SEQ ID NO: 190467 - DNA, 30 bp, Artificial Sequence
  Synthetic oligonucleotide
tgtgaaccacaaaccattaagcgttaatcg

SEQ ID NO: 190468 - DNA, 30 bp, Artificial Sequence
  Synthetic oligonucleotide
atctaggtcactgtgacgtcgtacacatcg

SEQ ID NO: 190469 - DNA, 30 bp, Artificial Sequence
  Synthetic oligonucleotide
tgcctcacttgaggctctcacaggacatcg

SEQ ID NO: 190470 - DNA, 30 bp, Artificial Sequence
  Synthetic oligonucleotide
caagtataacacgatggggacactacatcg

SEQ ID NO: 190471 - DNA, 30 bp, Artificial Sequence
  Synthetic oligonucleotide
ttcacaccagacgtagggaatcgtacatcg

SEQ ID NO: 190472 - DNA, 31 bp, Artificial Sequence
  Synthetic oligonucleotide
gtgcaactcacggcaatgatgggttacatcg

SEQ ID NO: 190473 - DNA, 30 bp, Artificial Sequence
  Synthetic oligonucleotide
tcccgccgaccaggcgagagtcaaccatcg

SEQ ID NO: 190474 - DNA, 30 bp, Artificial Sequence
  Synthetic oligonucleotide
acccttcttcatacgaagggtatcccatcg

SEQ ID NO: 190475 - DNA, 30 bp, Artificial Sequence
  Synthetic oligonucleotide
acgggttatagtgggactacctagccatcg

SEQ ID NO: 190476 - DNA, 30 bp, Artificial Sequence
  Synthetic oligonucleotide
ggtccctaactaatgtccacaaggccatcg

SEQ ID NO: 190477 - DNA, 30 bp, Artificial Sequence
  Synthetic oligonucleotide
ctacggagggagtactgccccgggccatcg

SEQ ID NO: 190478 - DNA, 30 bp, Artificial Sequence
  Synthetic oligonucleotide
ctatcgatgtgtcgtatcagcatgccatcg

SEQ ID NO: 190479 - DNA, 30 bp, Artificial Sequence
  Synthetic oligonucleotide
aaataagactccgtgtctgaaaatgcatcg

SEQ ID NO: 190480 - DNA, 30 bp, Artificial Sequence
  Synthetic oligonucleotide
tggagccgttctacgagcttacttgcatcg

SEQ ID NO: 190481 - DNA, 30 bp, Artificial Sequence
  Synthetic oligonucleotide
ttcatagaagacgaatcctgcagatcatcg

SEQ ID NO: 190482 - DNA, 30 bp, Artificial Sequence
  Synthetic oligonucleotide
tatgacattttcgacgaaagcagctcatcg

SEQ ID NO: 190483 - DNA, 30 bp, Artificial Sequence
  Synthetic oligonucleotide
acttatatgggatataacttcgtgtcatcg

SEQ ID NO: 190484 - DNA, 30 bp, Artificial Sequence
  Synthetic oligonucleotide
ttccgtaggcgttacatatacccaagatcg

SEQ ID NO: 190485 - DNA, 30 bp, Artificial Sequence
  Synthetic oligonucleotide
aatactaagtcctagaaggtcgagagatcg

SEQ ID NO: 190486 - DNA, 30 bp, Artificial Sequence
  Synthetic oligonucleotide
tagacagtgcaagcctggctggggagatcg

SEQ ID NO: 190487 - DNA, 31 bp, Artificial Sequence
  Synthetic oligonucleotide
ttgtgtagcaggtcttaccctggtgagatcg

SEQ ID NO: 190488 - DNA, 30 bp, Artificial Sequence
  Synthetic oligonucleotide
tctgtgactgacgagcaaactaatagatcg

SEQ ID NO: 190489 - DNA, 30 bp, Artificial Sequence
  Synthetic oligonucleotide
tgcgtggacctcccctgtccggatagatcg

SEQ ID NO: 190490 - DNA, 30 bp, Artificial Sequence
  Synthetic oligonucleotide
gcatgagacacactccctagggttagatcg

SEQ ID NO: 190491 - DNA, 30 bp, Artificial Sequence
  Synthetic oligonucleotide
ccaccgacgtccaattgcttagcgcgatcg

SEQ ID NO: 190492 - DNA, 30 bp, Artificial Sequence
  Synthetic oligonucleotide
atccctgataaagcggggattacaggatcg

SEQ ID NO: 190493 - DNA, 30 bp, Artificial Sequence
  Synthetic oligonucleotide
tctaaatatagcgtggaacctagaggatcg

SEQ ID NO: 190494 - DNA, 30 bp, Artificial Sequence
  Synthetic oligonucleotide
ctgttagtgcgggaggtgctatatggatcg

SEQ ID NO: 190495 - DNA, 30 bp, Artificial Sequence
  Synthetic oligonucleotide
aatggcgtgtttgagtgtgcatctggatcg

SEQ ID NO: 190496 - DNA, 30 bp, Artificial Sequence
  Synthetic oligonucleotide
aatcaaggggttagagtaacttgtggatcg

SEQ ID NO: 190497 - DNA, 30 bp, Artificial Sequence
  Synthetic oligonucleotide
gatgcgaattacttggggcttgaatgatcg

SEQ ID NO: 190498 - DNA, 30 bp, Artificial Sequence
  Synthetic oligonucleotide
tcatgatcctacgccaaatacccatgatcg

SEQ ID NO: 190499 - DNA, 30 bp, Artificial Sequence
  Synthetic oligonucleotide
ggcttttaccggttatatgggtcatgatcg

SEQ ID NO: 190500 - DNA, 30 bp, Artificial Sequence
  Synthetic oligonucleotide
tcatctgaaggtaattgattgtcctgatcg

SEQ ID NO: 190501 - DNA, 30 bp, Artificial Sequence
  Synthetic oligonucleotide
attggtcagtgtggtcggtagccgtgatcg

SEQ ID NO: 190502 - DNA, 30 bp, Artificial Sequence
  Synthetic oligonucleotide
atcaccagtacccaactctagtggtgatcg

SEQ ID NO: 190503 - DNA, 30 bp, Artificial Sequence
  Synthetic oligonucleotide
aacttaaggatccaacgaccggtgtgatcg

SEQ ID NO: 190504 - DNA, 30 bp, Artificial Sequence
  Synthetic oligonucleotide
gggggatacagggaggctacgtattgatcg

SEQ ID NO: 190505 - DNA, 30 bp, Artificial Sequence
  Synthetic oligonucleotide
ccacaggcgaaggggcgcgaaccttgatcg

SEQ ID NO: 190506 - DNA, 30 bp, Artificial Sequence
  Synthetic oligonucleotide
gtagtgtccggggccagtgatgatatatcg

SEQ ID NO: 190507 - DNA, 30 bp, Artificial Sequence
  Synthetic oligonucleotide
aagaacctgggatctagactatacctatcg

SEQ ID NO: 190508 - DNA, 30 bp, Artificial Sequence
  Synthetic oligonucleotide
cccgggccaagctccatcagacagctatcg

SEQ ID NO: 190509 - DNA, 30 bp, Artificial Sequence
  Synthetic oligonucleotide
ttgcgtaaagtgatagctgtaactctatcg

SEQ ID NO: 190510 - DNA, 30 bp, Artificial Sequence
  Synthetic oligonucleotide
tcggacagtctggatccatagagagtatcg

SEQ ID NO: 190511 - DNA, 30 bp, Artificial Sequence
  Synthetic oligonucleotide
gtcgtcggtcaggagacgctaaacgtatcg

SEQ ID NO: 190512 - DNA, 30 bp, Artificial Sequence
  Synthetic oligonucleotide
tgtgctacgcgaaacaatttccccgtatcg

SEQ ID NO: 190513 - DNA, 30 bp, Artificial Sequence
  Synthetic oligonucleotide
tagggaactccttcgcatgaggtcgtatcg

SEQ ID NO: 190514 - DNA, 30 bp, Artificial Sequence
  Synthetic oligonucleotide
atgaaagatctgtgaggactggtcgtatcg

SEQ ID NO: 190515 - DNA, 30 bp, Artificial Sequence
  Synthetic oligonucleotide
agcccgtttagaataaggttgatgttatcg

SEQ ID NO: 190516 - DNA, 30 bp, Artificial Sequence
  Synthetic oligonucleotide
aactcgagtcggccatacaggaaaaactcg

SEQ ID NO: 190517 - DNA, 30 bp, Artificial Sequence
  Synthetic oligonucleotide
gcgaccggcccggctctaatgaaaaactcg

SEQ ID NO: 190518 - DNA, 30 bp, Artificial Sequence
  Synthetic oligonucleotide
cagcaaacgtctacggcatgggaaaactcg

SEQ ID NO: 190519 - DNA, 30 bp, Artificial Sequence
  Synthetic oligonucleotide
gtcattggcaacgggaggtaaccaaactcg

SEQ ID NO: 190520 - DNA, 30 bp, Artificial Sequence
  Synthetic oligonucleotide
accccaagtagccgagagctgggaaactcg

SEQ ID NO: 190521 - DNA, 30 bp, Artificial Sequence
  Synthetic oligonucleotide
tggcggcaccgcaagttaaactgaaactcg

SEQ ID NO: 190522 - DNA, 30 bp, Artificial Sequence
  Synthetic oligonucleotide
tgtggggcatagtgcgacgggggcaactcg

SEQ ID NO: 190523 - DNA, 30 bp, Artificial Sequence
  Synthetic oligonucleotide
tctagcaagacagaacgatccttcaactcg

SEQ ID NO: 190524 - DNA, 30 bp, Artificial Sequence
  Synthetic oligonucleotide
aaacgcggaggttcaatcgattagaactcg

SEQ ID NO: 190525 - DNA, 30 bp, Artificial Sequence
  Synthetic oligonucleotide
tatcgtctccaaaaatttagcgtgaactcg

SEQ ID NO: 190526 - DNA, 31 bp, Artificial Sequence
  Synthetic oligonucleotide
gtgttgacaaataaggtttcaggtgaactcg

SEQ ID NO: 190527 - DNA, 30 bp, Artificial Sequence
  Synthetic oligonucleotide
ccactcccgaagcgaacaacctttaactcg

SEQ ID NO: 190528 - DNA, 30 bp, Artificial Sequence
  Synthetic oligonucleotide
cctgtggacaagcaggacacgtaccactcg

SEQ ID NO: 190529 - DNA, 30 bp, Artificial Sequence
  Synthetic oligonucleotide
aaaaagagcgctacaacgccaacccactcg

SEQ ID NO: 190530 - DNA, 30 bp, Artificial Sequence
  Synthetic oligonucleotide
actggtcacccgtggtgtgaacaagactcg

SEQ ID NO: 190531 - DNA, 30 bp, Artificial Sequence
  Synthetic oligonucleotide
atttaacatggctcaacgaaccaagactcg

SEQ ID NO: 190532 - DNA, 30 bp, Artificial Sequence
  Synthetic oligonucleotide
cggaccacgtccaactaaattccagactcg

SEQ ID NO: 190533 - DNA, 30 bp, Artificial Sequence
  Synthetic oligonucleotide
gctgataaccgtcttgtgtaatcagactcg

SEQ ID NO: 190534 - DNA, 30 bp, Artificial Sequence
  Synthetic oligonucleotide
tgtcttccggaccgttgagtcgaggactcg

SEQ ID NO: 190535 - DNA, 30 bp, Artificial Sequence
  Synthetic oligonucleotide
ggggggaggttcgtaattcctagggactcg

SEQ ID NO: 190536 - DNA, 30 bp, Artificial Sequence
  Synthetic oligonucleotide
gaaatgtgcgtgtacgtttatgttgactcg

SEQ ID NO: 190537 - DNA, 30 bp, Artificial Sequence
  Synthetic oligonucleotide
ctccgcccccacttgatctagggatactcg

SEQ ID NO: 190538 - DNA, 30 bp, Artificial Sequence
  Synthetic oligonucleotide
caaaataaaccggatgtatacttgtactcg

SEQ ID NO: 190539 - DNA, 30 bp, Artificial Sequence
  Synthetic oligonucleotide
caatagcggaattctaacatgttttactcg

SEQ ID NO: 190540 - DNA, 30 bp, Artificial Sequence
  Synthetic oligonucleotide
agaatcacggactatgtcctggacacctcg

SEQ ID NO: 190541 - DNA, 30 bp, Artificial Sequence
  Synthetic oligonucleotide
aaggaggcaagctacgatggcgcgacctcg

SEQ ID NO: 190542 - DNA, 30 bp, Artificial Sequence
  Synthetic oligonucleotide
tttctcaagtatgccgggacggaaccctcg

SEQ ID NO: 190543 - DNA, 30 bp, Artificial Sequence
  Synthetic oligonucleotide
tgtcttgtcttggggtaagaacatccctcg

SEQ ID NO: 190544 - DNA, 30 bp, Artificial Sequence
  Synthetic oligonucleotide
aaagtccttaccggttatcaggtcgcctcg

SEQ ID NO: 190545 - DNA, 30 bp, Artificial Sequence
  Synthetic oligonucleotide
gtatgaaactttaacgagaactaggcctcg

SEQ ID NO: 190546 - DNA, 30 bp, Artificial Sequence
  Synthetic oligonucleotide
ttgggatctcctcataggggtcaatcctcg

SEQ ID NO: 190547 - DNA, 30 bp, Artificial Sequence
  Synthetic oligonucleotide
aatacgtagcggtcacgcgcctagtcctcg

SEQ ID NO: 190548 - DNA, 30 bp, Artificial Sequence
  Synthetic oligonucleotide
ttatagcaataacaatagctaaacagctcg

SEQ ID NO: 190549 - DNA, 30 bp, Artificial Sequence
  Synthetic oligonucleotide
tactgaccacagcagacttatgacagctcg

SEQ ID NO: 190550 - DNA, 30 bp, Artificial Sequence
  Synthetic oligonucleotide
tacaacatcggtctttcaggtagcagctcg

SEQ ID NO: 190551 - DNA, 30 bp, Artificial Sequence
  Synthetic oligonucleotide
aagccgggtgaaggccggattaggagctcg

SEQ ID NO: 190552 - DNA, 30 bp, Artificial Sequence
  Synthetic oligonucleotide
acctgaaaatacgtaagcgacatgagctcg

SEQ ID NO: 190553 - DNA, 30 bp, Artificial Sequence
  Synthetic oligonucleotide
gatgtcaaaaaatgtaccagaggtagctcg

SEQ ID NO: 190554 - DNA, 30 bp, Artificial Sequence
  Synthetic oligonucleotide
taagcaaccgattgaatctctccccgctcg

SEQ ID NO: 190555 - DNA, 30 bp, Artificial Sequence
  Synthetic oligonucleotide
gtgcacactcgacgaaaaagaaagcgctcg

SEQ ID NO: 190556 - DNA, 30 bp, Artificial Sequence
  Synthetic oligonucleotide
tatgttcttaggacggtaaaggctcgctcg

SEQ ID NO: 190557 - DNA, 30 bp, Artificial Sequence
  Synthetic oligonucleotide
ataagggaatcacatgttgtatttcgctcg

SEQ ID NO: 190558 - DNA, 30 bp, Artificial Sequence
  Synthetic oligonucleotide
ggcacccgttagtagaccctctcatgctcg

SEQ ID NO: 190559 - DNA, 30 bp, Artificial Sequence
  Synthetic oligonucleotide
gaaagctcataagtataacagcgttgctcg

SEQ ID NO: 190560 - DNA, 30 bp, Artificial Sequence
  Synthetic oligonucleotide
tcctttcgttcagattctggagaaatctcg

SEQ ID NO: 190561 - DNA, 30 bp, Artificial Sequence
  Synthetic oligonucleotide
tatgtcgactaagtaaggatctgaatctcg

SEQ ID NO: 190562 - DNA, 30 bp, Artificial Sequence
  Synthetic oligonucleotide
ttcgaaatccgatcaacccagcggatctcg

SEQ ID NO: 190563 - DNA, 30 bp, Artificial Sequence
  Synthetic oligonucleotide
aaggagagagaaacgcgtatgattatctcg

SEQ ID NO: 190564 - DNA, 30 bp, Artificial Sequence
  Synthetic oligonucleotide
gtaggaaccaccgaaacttgtattatctcg

SEQ ID NO: 190565 - DNA, 31 bp, Artificial Sequence
  Synthetic oligonucleotide
tgacactgataggactgaatagaatctctcg

SEQ ID NO: 190566 - DNA, 30 bp, Artificial Sequence
  Synthetic oligonucleotide
gcagtgtatccggcataacccagtctctcg

SEQ ID NO: 190567 - DNA, 30 bp, Artificial Sequence
  Synthetic oligonucleotide
gatcaactcacgattagtataaaggtctcg

SEQ ID NO: 190568 - DNA, 30 bp, Artificial Sequence
  Synthetic oligonucleotide
aaacataagcatacaagttgacatgtctcg

SEQ ID NO: 190569 - DNA, 30 bp, Artificial Sequence
  Synthetic oligonucleotide
aggcagccatctagcactccgtctgtctcg

SEQ ID NO: 190570 - DNA, 30 bp, Artificial Sequence
  Synthetic oligonucleotide
gcagtttagtgttaaccagaggcattctcg

SEQ ID NO: 190571 - DNA, 30 bp, Artificial Sequence
  Synthetic oligonucleotide
tgttcggagattgagttacagatattctcg

SEQ ID NO: 190572 - DNA, 30 bp, Artificial Sequence
  Synthetic oligonucleotide
gttggtactgtttcgactacttcgttctcg

SEQ ID NO: 190573 - DNA, 30 bp, Artificial Sequence
  Synthetic oligonucleotide
gacaagcggggggagtgggtcgggttctcg

SEQ ID NO: 190574 - DNA, 30 bp, Artificial Sequence
  Synthetic oligonucleotide
ctaggacggctgcgaggtccaagtttctcg

SEQ ID NO: 190575 - DNA, 30 bp, Artificial Sequence
  Synthetic oligonucleotide
ctgtgttcatgaaagcccacacaaaagtcg

SEQ ID NO: 190576 - DNA, 30 bp, Artificial Sequence
  Synthetic oligonucleotide
aggagctataaaaaggttggtgcaaagtcg

SEQ ID NO: 190577 - DNA, 30 bp, Artificial Sequence
  Synthetic oligonucleotide
ttggcgaatgtaatgttcggcgtaaagtcg

SEQ ID NO: 190578 - DNA, 30 bp, Artificial Sequence
  Synthetic oligonucleotide
ttttagaacaatgtacctaatggcaagtcg

SEQ ID NO: 190579 - DNA, 30 bp, Artificial Sequence
  Synthetic oligonucleotide
cgaagtgatttttaatttgagaggaagtcg

SEQ ID NO: 190580 - DNA, 30 bp, Artificial Sequence
  Synthetic oligonucleotide
aggggactactttaggtgctgcctaagtcg

SEQ ID NO: 190581 - DNA, 30 bp, Artificial Sequence
  Synthetic oligonucleotide
gagggcacaggttgctgcggttttaagtcg

SEQ ID NO: 190582 - DNA, 30 bp, Artificial Sequence
  Synthetic oligonucleotide
actcagtggtgacaactctctgcacagtcg

SEQ ID NO: 190583 - DNA, 30 bp, Artificial Sequence
  Synthetic oligonucleotide
gtgaccccggtggtataccctgtacagtcg

SEQ ID NO: 190584 - DNA, 30 bp, Artificial Sequence
  Synthetic oligonucleotide
ctagagcgtctggggacatttatccagtcg

SEQ ID NO: 190585 - DNA, 30 bp, Artificial Sequence
  Synthetic oligonucleotide
ttaatgaggttggaatcgggagggcagtcg

SEQ ID NO: 190586 - DNA, 30 bp, Artificial Sequence
  Synthetic oligonucleotide
ccagtttcggttcgcgggtgggttcagtcg

SEQ ID NO: 190587 - DNA, 30 bp, Artificial Sequence
  Synthetic oligonucleotide
acgattaggtgctgggtgcgcctatagtcg

SEQ ID NO: 190588 - DNA, 30 bp, Artificial Sequence
  Synthetic oligonucleotide
cagggcgcatcacacatgtcacactagtcg

SEQ ID NO: 190589 - DNA, 30 bp, Artificial Sequence
  Synthetic oligonucleotide
ctacagctgaaacgaaaacgcacttagtcg

SEQ ID NO: 190590 - DNA, 30 bp, Artificial Sequence
  Synthetic oligonucleotide
agttgcaacctcaggcgcctgtgcacgtcg

SEQ ID NO: 190591 - DNA, 30 bp, Artificial Sequence
  Synthetic oligonucleotide
caagtagcgagtaccccctgttggacgtcg

SEQ ID NO: 190592 - DNA, 30 bp, Artificial Sequence
  Synthetic oligonucleotide
atgggtggtgacccattgtacgatacgtcg

SEQ ID NO: 190593 - DNA, 30 bp, Artificial Sequence
  Synthetic oligonucleotide
gaaggaatggtagacgtcaatgatacgtcg

SEQ ID NO: 190594 - DNA, 30 bp, Artificial Sequence
  Synthetic oligonucleotide
tggataagtggaaagcagcagaccccgtcg

SEQ ID NO: 190595 - DNA, 30 bp, Artificial Sequence
  Synthetic oligonucleotide
aggtcacttcacgtctctgttgatccgtcg

SEQ ID NO: 190596 - DNA, 30 bp, Artificial Sequence
  Synthetic oligonucleotide
acgattagctttttaagaccaggtccgtcg

SEQ ID NO: 190597 - DNA, 30 bp, Artificial Sequence
  Synthetic oligonucleotide
ccccgcaagatgtgagcctgaacggcgtcg

SEQ ID NO: 190598 - DNA, 30 bp, Artificial Sequence
  Synthetic oligonucleotide
gaacacatgacagtgtatcttacatcgtcg

SEQ ID NO: 190599 - DNA, 30 bp, Artificial Sequence
  Synthetic oligonucleotide
tattcatcggttatctgccaagcatcgtcg

SEQ ID NO: 190600 - DNA, 30 bp, Artificial Sequence
  Synthetic oligonucleotide
ttgatgtagcggaaagcagtggggtcgtcg

SEQ ID NO: 190601 - DNA, 30 bp, Artificial Sequence
  Synthetic oligonucleotide
gacttaaaccgatctggcctgcgaaggtcg

SEQ ID NO: 190602 - DNA, 30 bp, Artificial Sequence
  Synthetic oligonucleotide
agtggtgtactcaatggaaattgaaggtcg

SEQ ID NO: 190603 - DNA, 30 bp, Artificial Sequence
  Synthetic oligonucleotide
ggctctcgcgcggtccagttggtaaggtcg

SEQ ID NO: 190604 - DNA, 30 bp, Artificial Sequence
  Synthetic oligonucleotide
cctgcggatcctttaggagtggacaggtcg

SEQ ID NO: 190605 - DNA, 30 bp, Artificial Sequence
  Synthetic oligonucleotide
agtgggtcccacggtgaacctgacaggtcg

SEQ ID NO: 190606 - DNA, 30 bp, Artificial Sequence
  Synthetic oligonucleotide
gccgaaattaacacttctgaatacaggtcg

SEQ ID NO: 190607 - DNA, 30 bp, Artificial Sequence
  Synthetic oligonucleotide
gaaggggtgtcaatccagacgtacaggtcg

SEQ ID NO: 190608 - DNA, 30 bp, Artificial Sequence
  Synthetic oligonucleotide
aaggtattaccggaacctggcttcaggtcg

SEQ ID NO: 190609 - DNA, 30 bp, Artificial Sequence
  Synthetic oligonucleotide
gaagtttgtgtttgcttcaagattaggtcg

SEQ ID NO: 190610 - DNA, 30 bp, Artificial Sequence
  Synthetic oligonucleotide
gcgtagacagcggtcacgctagttaggtcg

SEQ ID NO: 190611 - DNA, 30 bp, Artificial Sequence
  Synthetic oligonucleotide
tggcggaaacctccataagtacgacggtcg

SEQ ID NO: 190612 - DNA, 30 bp, Artificial Sequence
  Synthetic oligonucleotide
gtccgacctccccacaccggcctacggtcg

SEQ ID NO: 190613 - DNA, 30 bp, Artificial Sequence
  Synthetic oligonucleotide
tattaagtcaggatgcggaaaaggcggtcg

SEQ ID NO: 190614 - DNA, 30 bp, Artificial Sequence
  Synthetic oligonucleotide
actacttaagtctacaaagtacggcggtcg

SEQ ID NO: 190615 - DNA, 30 bp, Artificial Sequence
  Synthetic oligonucleotide
tgaaagaagacatttctcggtcatgggtcg

SEQ ID NO: 190616 - DNA, 30 bp, Artificial Sequence
  Synthetic oligonucleotide
agcacgttcgggtaccacaacattgggtcg

SEQ ID NO: 190617 - DNA, 30 bp, Artificial Sequence
  Synthetic oligonucleotide
gatctgttcgtcagggtctttacttggtcg

SEQ ID NO: 190618 - DNA, 30 bp, Artificial Sequence
  Synthetic oligonucleotide
tccgatatatacgtccttccgtcttggtcg

SEQ ID NO: 190619 - DNA, 30 bp, Artificial Sequence
  Synthetic oligonucleotide
tgggtaataagaaccgaatcaggttggtcg

SEQ ID NO: 190620 - DNA, 30 bp, Artificial Sequence
  Synthetic oligonucleotide
caggttgagaacctttcgtcagcactgtcg

SEQ ID NO: 190621 - DNA, 30 bp, Artificial Sequence
  Synthetic oligonucleotide
cctatagcgcgaggattatgtttactgtcg

SEQ ID NO: 190622 - DNA, 30 bp, Artificial Sequence
  Synthetic oligonucleotide
gtggtatacatttacgacatgaagctgtcg

SEQ ID NO: 190623 - DNA, 30 bp, Artificial Sequence
  Synthetic oligonucleotide
cggtgagacgcctcggtaagtaccgtgtcg

SEQ ID NO: 190624 - DNA, 30 bp, Artificial Sequence
  Synthetic oligonucleotide
tgagtcacgagatttgatgtagcggtgtcg

SEQ ID NO: 190625 - DNA, 30 bp, Artificial Sequence
  Synthetic oligonucleotide
gaaaacatgggtcaatgctcagatttgtcg

SEQ ID NO: 190626 - DNA, 30 bp, Artificial Sequence
  Synthetic oligonucleotide
tgcaggtggtctatcataatatgtttgtcg

SEQ ID NO: 190627 - DNA, 30 bp, Artificial Sequence
  Synthetic oligonucleotide
gtctgttagatctaagctgttattttgtcg

SEQ ID NO: 190628 - DNA, 30 bp, Artificial Sequence
  Synthetic oligonucleotide
ttcgggaaggagatagaagcacaaaattcg

SEQ ID NO: 190629 - DNA, 30 bp, Artificial Sequence
  Synthetic oligonucleotide
cgtgaccacatgcgtatgtcgcgaaattcg

SEQ ID NO: 190630 - DNA, 30 bp, Artificial Sequence
  Synthetic oligonucleotide
tcaattcattttgagtcaccgtgaaattcg

SEQ ID NO: 190631 - DNA, 30 bp, Artificial Sequence
  Synthetic oligonucleotide
tcgattactggttacggtcctgggaattcg

SEQ ID NO: 190632 - DNA, 31 bp, Artificial Sequence
  Synthetic oligonucleotide
tttcagcatgcccaatagcgagaataattcg

SEQ ID NO: 190633 - DNA, 30 bp, Artificial Sequence
  Synthetic oligonucleotide
gtcgcgttaagctcaaaacgtcataattcg

SEQ ID NO: 190634 - DNA, 30 bp, Artificial Sequence
  Synthetic oligonucleotide
gttcgagaaacgttcaaaattcaacattcg

SEQ ID NO: 190635 - DNA, 30 bp, Artificial Sequence
  Synthetic oligonucleotide
tccacggggcatagggtgaccggacattcg

SEQ ID NO: 190636 - DNA, 30 bp, Artificial Sequence
  Synthetic oligonucleotide
gtgcgtactaatagttacccactccattcg

SEQ ID NO: 190637 - DNA, 30 bp, Artificial Sequence
  Synthetic oligonucleotide
accaagatcattgcctaccctttgcattcg

SEQ ID NO: 190638 - DNA, 39 bp, Artificial Sequence
  Synthetic oligonucleotide
tttgataccactttacccaggtaacgctccgctcattcg

SEQ ID NO: 190639 - DNA, 30 bp, Artificial Sequence
  Synthetic oligonucleotide
catagctcctcacgcccttccatcgattcg

SEQ ID NO: 190640 - DNA, 30 bp, Artificial Sequence
  Synthetic oligonucleotide
gagttggcccgccaactagctatcgattcg

SEQ ID NO: 190641 - DNA, 30 bp, Artificial Sequence
  Synthetic oligonucleotide
tgcgtaataaatatgtgtgtgctcgattcg

SEQ ID NO: 190642 - DNA, 30 bp, Artificial Sequence
  Synthetic oligonucleotide
ggcttttgtatcagaagagggtaggattcg

SEQ ID NO: 190643 - DNA, 30 bp, Artificial Sequence
  Synthetic oligonucleotide
gcgttcaaccagacgaaattctcggattcg

SEQ ID NO: 190644 - DNA, 30 bp, Artificial Sequence
  Synthetic oligonucleotide
ttccgtaaaatgcgaaaggatctggattcg

SEQ ID NO: 190645 - DNA, 30 bp, Artificial Sequence
  Synthetic oligonucleotide
attgatccccacgccatctggtgtgattcg

SEQ ID NO: 190646 - DNA, 30 bp, Artificial Sequence
  Synthetic oligonucleotide
cgcggagaatgccggaagtaataatattcg

SEQ ID NO: 190647 - DNA, 30 bp, Artificial Sequence
  Synthetic oligonucleotide
ccacccaagtgaccgaactgcccatattcg

SEQ ID NO: 190648 - DNA, 30 bp, Artificial Sequence
  Synthetic oligonucleotide
gttctaaatacgtaagtcagttactattcg

SEQ ID NO: 190649 - DNA, 30 bp, Artificial Sequence
  Synthetic oligonucleotide
gacggacatatgaaggagggcacgtattcg

SEQ ID NO: 190650 - DNA, 30 bp, Artificial Sequence
  Synthetic oligonucleotide
atacgcatacatctaggaggcgcgtattcg

SEQ ID NO: 190651 - DNA, 30 bp, Artificial Sequence
  Synthetic oligonucleotide
taaacgcgaagttctgagtcaaggtattcg

SEQ ID NO: 190652 - DNA, 30 bp, Artificial Sequence
  Synthetic oligonucleotide
ggcaaatggagggattgggatttgtattcg

SEQ ID NO: 190653 - DNA, 30 bp, Artificial Sequence
  Synthetic oligonucleotide
aacagtgtttccaagccgattgcaacttcg

SEQ ID NO: 190654 - DNA, 30 bp, Artificial Sequence
  Synthetic oligonucleotide
tgtagacgggacacaaggtgcaggacttcg

SEQ ID NO: 190655 - DNA, 30 bp, Artificial Sequence
  Synthetic oligonucleotide
caagcaggacgatgcatttggcatacttcg

SEQ ID NO: 190656 - DNA, 30 bp, Artificial Sequence
  Synthetic oligonucleotide
tttcgccaaagttgtgcaagctatacttcg

SEQ ID NO: 190657 - DNA, 30 bp, Artificial Sequence
  Synthetic oligonucleotide
gtgacacatcggagcagatgagaaccttcg

SEQ ID NO: 190658 - DNA, 30 bp, Artificial Sequence
  Synthetic oligonucleotide
acgagtccattgcatcgtggtattccttcg

SEQ ID NO: 190659 - DNA, 30 bp, Artificial Sequence
  Synthetic oligonucleotide
gaggcaatctgcatcggtcgaagcgcttcg

SEQ ID NO: 190660 - DNA, 30 bp, Artificial Sequence
  Synthetic oligonucleotide
ctaatagcaccgcctaaaaacagggcttcg

SEQ ID NO: 190661 - DNA, 30 bp, Artificial Sequence
  Synthetic oligonucleotide
caagagcgctacatcgacaattttgcttcg

SEQ ID NO: 190662 - DNA, 30 bp, Artificial Sequence
  Synthetic oligonucleotide
aggcaattttagtgtctaaaaaaatcttcg

SEQ ID NO: 190663 - DNA, 30 bp, Artificial Sequence
  Synthetic oligonucleotide
tacgtcagggtctgcatcgattaatcttcg

SEQ ID NO: 190664 - DNA, 30 bp, Artificial Sequence
  Synthetic oligonucleotide
acgaggatatcttcgttccagataagttcg

SEQ ID NO: 190665 - DNA, 30 bp, Artificial Sequence
  Synthetic oligonucleotide
ttctaccgtctaccaacttttaggagttcg

SEQ ID NO: 190666 - DNA, 30 bp, Artificial Sequence
  Synthetic oligonucleotide
agttcgaactctcctaaacggtatagttcg

SEQ ID NO: 190667 - DNA, 30 bp, Artificial Sequence
  Synthetic oligonucleotide
ccgagatcgaccttaattaccgttagttcg

SEQ ID NO: 190668 - DNA, 30 bp, Artificial Sequence
  Synthetic oligonucleotide
gtaagaccactcctgtgtaaggtaggttcg

SEQ ID NO: 190669 - DNA, 30 bp, Artificial Sequence
  Synthetic oligonucleotide
aggcctggggcctgtactccgacgggttcg

SEQ ID NO: 190670 - DNA, 30 bp, Artificial Sequence
  Synthetic oligonucleotide
cgttgtgcctcagtgaaggtgtcgggttcg

SEQ ID NO: 190671 - DNA, 30 bp, Artificial Sequence
  Synthetic oligonucleotide
ccttcaaggttatatgtaatgatgggttcg

SEQ ID NO: 190672 - DNA, 30 bp, Artificial Sequence
  Synthetic oligonucleotide
acgattagagccctaaagagacgtggttcg

SEQ ID NO: 190673 - DNA, 30 bp, Artificial Sequence
  Synthetic oligonucleotide
tcgtgttcccgctgagtaaagtttggttcg

SEQ ID NO: 190674 - DNA, 30 bp, Artificial Sequence
  Synthetic oligonucleotide
caaccgggaaatcgcgtgagggactgttcg

SEQ ID NO: 190675 - DNA, 30 bp, Artificial Sequence
  Synthetic oligonucleotide
attttgaggataactgattctagctgttcg

SEQ ID NO: 190676 - DNA, 30 bp, Artificial Sequence
  Synthetic oligonucleotide
taaggatagtgactggtcgggacaatttcg

SEQ ID NO: 190677 - DNA, 30 bp, Artificial Sequence
  Synthetic oligonucleotide
agcgcactactacaaatgggtaccatttcg

SEQ ID NO: 190678 - DNA, 30 bp, Artificial Sequence
  Synthetic oligonucleotide
taacaacccgtcgcgtaaggttatatttcg

SEQ ID NO: 190679 - DNA, 29 bp, Artificial Sequence
  Synthetic oligonucleotide
ctgtaacttaaatcagtatgcaactttcg

SEQ ID NO: 190680 - DNA, 30 bp, Artificial Sequence
  Synthetic oligonucleotide
acggaggttccaaaatgaggagccctttcg

SEQ ID NO: 190681 - DNA, 30 bp, Artificial Sequence
  Synthetic oligonucleotide
gacgtctctgacgattgtacctagctttcg

SEQ ID NO: 190682 - DNA, 30 bp, Artificial Sequence
  Synthetic oligonucleotide
gcactcgtctcatcacaaaaagtagtttcg

SEQ ID NO: 190683 - DNA, 30 bp, Artificial Sequence
  Synthetic oligonucleotide
gtgcgtcaagactggtctcggaccgtttcg

SEQ ID NO: 190684 - DNA, 30 bp, Artificial Sequence
  Synthetic oligonucleotide
cacggcgtatgattgtaccaaaacttttcg

SEQ ID NO: 190685 - DNA, 30 bp, Artificial Sequence
  Synthetic oligonucleotide
accaacgaccggaatgcttaggcaaaaagg

SEQ ID NO: 190686 - DNA, 29 bp, Artificial Sequence
  Synthetic oligonucleotide
tgtacacatcctggtaggctgcaaaaagg

SEQ ID NO: 190687 - DNA, 30 bp, Artificial Sequence
  Synthetic oligonucleotide
gtagggcgtatacagaccaaaagaaaaagg

SEQ ID NO: 190688 - DNA, 30 bp, Artificial Sequence
  Synthetic oligonucleotide
gagacgcgccggtgtgtggagggaaaaagg

SEQ ID NO: 190689 - DNA, 30 bp, Artificial Sequence
  Synthetic oligonucleotide
gtcaggaagacagcttctgccgtcaaaagg

SEQ ID NO: 190690 - DNA, 30 bp, Artificial Sequence
  Synthetic oligonucleotide
atagtcgcgtcgcagaagttggttaaaagg

SEQ ID NO: 190691 - DNA, 30 bp, Artificial Sequence
  Synthetic oligonucleotide
agaaggaggaacttagttggcaaccaaagg

SEQ ID NO: 190692 - DNA, 26 bp, Artificial Sequence
  Synthetic oligonucleotide
cggagttattaggaatcttccaaagg

SEQ ID NO: 190693 - DNA, 30 bp, Artificial Sequence
  Synthetic oligonucleotide
gcccgctaaattaaaaatgctgggcaaagg

SEQ ID NO: 190694 - DNA, 30 bp, Artificial Sequence
  Synthetic oligonucleotide
gtgcaaggtatagacggaattgctcaaagg

SEQ ID NO: 190695 - DNA, 30 bp, Artificial Sequence
  Synthetic oligonucleotide
gaggcgagggccggtgaatatatagaaagg

SEQ ID NO: 190696 - DNA, 30 bp, Artificial Sequence
  Synthetic oligonucleotide
tagggcggaaagtattcactttacgaaagg

SEQ ID NO: 190697 - DNA, 30 bp, Artificial Sequence
  Synthetic oligonucleotide
taatgggttgagcaactcaatacggaaagg

SEQ ID NO: 190698 - DNA, 30 bp, Artificial Sequence
  Synthetic oligonucleotide
agacctaacgtgtcctgctgcctggaaagg

SEQ ID NO: 190699 - DNA, 30 bp, Artificial Sequence
  Synthetic oligonucleotide
gaaaaagacagcctcgagtagccataaagg

SEQ ID NO: 190700 - DNA, 30 bp, Artificial Sequence
  Synthetic oligonucleotide
agcgacacagtatagctagtatgataaagg

SEQ ID NO: 190701 - DNA, 30 bp, Artificial Sequence
  Synthetic oligonucleotide
acagctccggaacggcgagtcccgtaaagg

SEQ ID NO: 190702 - DNA, 30 bp, Artificial Sequence
  Synthetic oligonucleotide
aacttgtgtgaagtgagatgcgggtaaagg

SEQ ID NO: 190703 - DNA, 30 bp, Artificial Sequence
  Synthetic oligonucleotide
atgggtagactggacctgcggaattaaagg

SEQ ID NO: 190704 - DNA, 30 bp, Artificial Sequence
  Synthetic oligonucleotide
tgtatctgtcgttccgaccgacacacaagg

SEQ ID NO: 190705 - DNA, 30 bp, Artificial Sequence
  Synthetic oligonucleotide
cctcgaattgagttacgggtctacacaagg

SEQ ID NO: 190706 - DNA, 30 bp, Artificial Sequence
  Synthetic oligonucleotide
cgcgtgagaagcttactcacagctacaagg

SEQ ID NO: 190707 - DNA, 30 bp, Artificial Sequence
  Synthetic oligonucleotide
agccagaccgtgcgaaaccgtggtacaagg

SEQ ID NO: 190708 - DNA, 30 bp, Artificial Sequence
  Synthetic oligonucleotide
tgagacgttccactgaatcctgtaccaagg

SEQ ID NO: 190709 - DNA, 30 bp, Artificial Sequence
  Synthetic oligonucleotide
tgtgtctccttaattcgctcgttcccaagg

SEQ ID NO: 190710 - DNA, 30 bp, Artificial Sequence
  Synthetic oligonucleotide
tcctacctgcaggcagtaggcactccaagg

SEQ ID NO: 190711 - DNA, 30 bp, Artificial Sequence
  Synthetic oligonucleotide
atgtctcacactgttccatagacagcaagg

SEQ ID NO: 190712 - DNA, 30 bp, Artificial Sequence
  Synthetic oligonucleotide
tctacataaatgaagggtctaagagcaagg

SEQ ID NO: 190713 - DNA, 30 bp, Artificial Sequence
  Synthetic oligonucleotide
gtacagacccccatgttcatttaggcaagg

SEQ ID NO: 190714 - DNA, 30 bp, Artificial Sequence
  Synthetic oligonucleotide
tcagttagtacaacccggatagctgcaagg

SEQ ID NO: 190715 - DNA, 30 bp, Artificial Sequence
  Synthetic oligonucleotide
ttggaagataacggaagcgcgacatcaagg

SEQ ID NO: 190716 - DNA, 30 bp, Artificial Sequence
  Synthetic oligonucleotide
catagttcacaagggaataatatatcaagg

SEQ ID NO: 190717 - DNA, 30 bp, Artificial Sequence
  Synthetic oligonucleotide
tggaggaatctgtgttaatttccctcaagg

SEQ ID NO: 190718 - DNA, 30 bp, Artificial Sequence
  Synthetic oligonucleotide
tggggcttcatccgcataggcatctcaagg

SEQ ID NO: 190719 - DNA, 30 bp, Artificial Sequence
  Synthetic oligonucleotide
agtaatggcgatcgggcttagttctcaagg

SEQ ID NO: 190720 - DNA, 30 bp, Artificial Sequence
  Synthetic oligonucleotide
atctactgaagttcatctaaccagtcaagg

SEQ ID NO: 190721 - DNA, 30 bp, Artificial Sequence
  Synthetic oligonucleotide
gtgaacagactaagcgttatttcgtcaagg

SEQ ID NO: 190722 - DNA, 30 bp, Artificial Sequence
  Synthetic oligonucleotide
tagtcgtagagcggcccgacgcaaagaagg

SEQ ID NO: 190723 - DNA, 30 bp, Artificial Sequence
  Synthetic oligonucleotide
agccgagatagtgtatcagggttcagaagg

SEQ ID NO: 190724 - DNA, 30 bp, Artificial Sequence
  Synthetic oligonucleotide
aagatcaacggacagggacgtgagagaagg

SEQ ID NO: 190725 - DNA, 30 bp, Artificial Sequence
  Synthetic oligonucleotide
aggcacattggcaggagcccatggagaagg

SEQ ID NO: 190726 - DNA, 30 bp, Artificial Sequence
  Synthetic oligonucleotide
aaccgggctggctgcaccgcacttagaagg

SEQ ID NO: 190727 - DNA, 30 bp, Artificial Sequence
  Synthetic oligonucleotide
ctccatgtcctaaaagatcagtcacgaagg

SEQ ID NO: 190728 - DNA, 30 bp, Artificial Sequence
  Synthetic oligonucleotide
cacatagcgccagagacacctgtccgaagg

SEQ ID NO: 190729 - DNA, 30 bp, Artificial Sequence
  Synthetic oligonucleotide
tacccagccgaattgtccctgaagcgaagg

SEQ ID NO: 190730 - DNA, 30 bp, Artificial Sequence
  Synthetic oligonucleotide
catacttcgtctgccgatatttgtcgaagg

SEQ ID NO: 190731 - DNA, 30 bp, Artificial Sequence
  Synthetic oligonucleotide
acaagccccgcgttgggaagtattcgaagg

SEQ ID NO: 190732 - DNA, 30 bp, Artificial Sequence
  Synthetic oligonucleotide
gtcactaaaactgtgctcatggaaggaagg

SEQ ID NO: 190733 - DNA, 30 bp, Artificial Sequence
  Synthetic oligonucleotide
gacgatttcgccttaacgccaaacggaagg

SEQ ID NO: 190734 - DNA, 30 bp, Artificial Sequence
  Synthetic oligonucleotide
agcaatccaccggtatgcgcaaagggaagg

SEQ ID NO: 190735 - DNA, 30 bp, Artificial Sequence
  Synthetic oligonucleotide
gaggcgtaatccctcgtaacggcgggaagg

SEQ ID NO: 190736 - DNA, 30 bp, Artificial Sequence
  Synthetic oligonucleotide
atgcggctgaggctcgcgtctaatggaagg

SEQ ID NO: 190737 - DNA, 30 bp, Artificial Sequence
  Synthetic oligonucleotide
tgcccggttaagttcaagctgcatggaagg

SEQ ID NO: 190738 - DNA, 30 bp, Artificial Sequence
  Synthetic oligonucleotide
gccgtggaagcttgtgactgacttggaagg

SEQ ID NO: 190739 - DNA, 30 bp, Artificial Sequence
  Synthetic oligonucleotide
cgcgcccctgtgatggcggcaggatgaagg

SEQ ID NO: 190740 - DNA, 30 bp, Artificial Sequence
  Synthetic oligonucleotide
gcaccgtgagggcgaaggggacactgaagg

SEQ ID NO: 190741 - DNA, 30 bp, Artificial Sequence
  Synthetic oligonucleotide
aatcgtttttagcgcactgaccccataagg

SEQ ID NO: 190742 - DNA, 30 bp, Artificial Sequence
  Synthetic oligonucleotide
ccaaataacttcgaaaaagctaagataagg

SEQ ID NO: 190743 - DNA, 30 bp, Artificial Sequence
  Synthetic oligonucleotide
cagccactaccgctgctggagacgataagg

SEQ ID NO: 190744 - DNA, 30 bp, Artificial Sequence
  Synthetic oligonucleotide
tatggcgccggactgcattacaatataagg

SEQ ID NO: 190745 - DNA, 30 bp, Artificial Sequence
  Synthetic oligonucleotide
gtcgcaaggatggacagggatgctataagg

SEQ ID NO: 190746 - DNA, 30 bp, Artificial Sequence
  Synthetic oligonucleotide
tttaccacttctgttcaagcaggactaagg

SEQ ID NO: 190747 - DNA, 30 bp, Artificial Sequence
  Synthetic oligonucleotide
cggaacgggtcccctgaaaccgtgctaagg

SEQ ID NO: 190748 - DNA, 30 bp, Artificial Sequence
  Synthetic oligonucleotide
ggtgtgaccgttggagacggaggcgtaagg

SEQ ID NO: 190749 - DNA, 30 bp, Artificial Sequence
  Synthetic oligonucleotide
ttgagcagacgaggtggaccgtttgtaagg

SEQ ID NO: 190750 - DNA, 30 bp, Artificial Sequence
  Synthetic oligonucleotide
aaacccactttgagcgataagctattaagg

SEQ ID NO: 190751 - DNA, 30 bp, Artificial Sequence
  Synthetic oligonucleotide
cccagatttagctcataactagccttaagg

SEQ ID NO: 190752 - DNA, 30 bp, Artificial Sequence
  Synthetic oligonucleotide
tcggtgtgatgtgcctcaagtggcttaagg

SEQ ID NO: 190753 - DNA, 30 bp, Artificial Sequence
  Synthetic oligonucleotide
ggcaatccctgggttgcgctcgtcttaagg

SEQ ID NO: 190754 - DNA, 30 bp, Artificial Sequence
  Synthetic oligonucleotide
caaccgtacggataacatttggagttaagg

SEQ ID NO: 190755 - DNA, 30 bp, Artificial Sequence
  Synthetic oligonucleotide
gtgtatagcccctgtgtttagaggttaagg

SEQ ID NO: 190756 - DNA, 30 bp, Artificial Sequence
  Synthetic oligonucleotide
ttggggcggaagcacggacccaaaaacagg

SEQ ID NO: 190757 - DNA, 30 bp, Artificial Sequence
  Synthetic oligonucleotide
cgactctctttacggcgttgaacaaacagg

SEQ ID NO: 190758 - DNA, 30 bp, Artificial Sequence
  Synthetic oligonucleotide
ctggtttaaatcaaagtgtcacccaacagg

SEQ ID NO: 190759 - DNA, 30 bp, Artificial Sequence
  Synthetic oligonucleotide
cggcgggtatggacgccggaattcaacagg

SEQ ID NO: 190760 - DNA, 30 bp, Artificial Sequence
  Synthetic oligonucleotide
gctgttgatcgatagttaaggacgaacagg

SEQ ID NO: 190761 - DNA, 30 bp, Artificial Sequence
  Synthetic oligonucleotide
gggctcgagcagctgtcgttcctgaacagg

SEQ ID NO: 190762 - DNA, 30 bp, Artificial Sequence
  Synthetic oligonucleotide
tttcgccgcgctacggaagttgtgaacagg

SEQ ID NO: 190763 - DNA, 30 bp, Artificial Sequence
  Synthetic oligonucleotide
aagtacataagaccggggtgtaataacagg

SEQ ID NO: 190764 - DNA, 30 bp, Artificial Sequence
  Synthetic oligonucleotide
acaaatgtccggtctgctaagtgtaacagg

SEQ ID NO: 190765 - DNA, 30 bp, Artificial Sequence
  Synthetic oligonucleotide
ggaggggagctatcaattggcgcccacagg

SEQ ID NO: 190766 - DNA, 30 bp, Artificial Sequence
  Synthetic oligonucleotide
ggaagggggacctgcgcatcttcccacagg

SEQ ID NO: 190767 - DNA, 30 bp, Artificial Sequence
  Synthetic oligonucleotide
caataacgaagcctgtataaccggcacagg

SEQ ID NO: 190768 - DNA, 30 bp, Artificial Sequence
  Synthetic oligonucleotide
cacgggggattggatgcagatactcacagg

SEQ ID NO: 190769 - DNA, 30 bp, Artificial Sequence
  Synthetic oligonucleotide
atattaacaccgaggtcagagcgtcacagg

SEQ ID NO: 190770 - DNA, 30 bp, Artificial Sequence
  Synthetic oligonucleotide
cccgggacggacacgacatcgaacgacagg

SEQ ID NO: 190771 - DNA, 30 bp, Artificial Sequence
  Synthetic oligonucleotide
tgcgtagtaatccggagcatcgacgacagg

SEQ ID NO: 190772 - DNA, 30 bp, Artificial Sequence
  Synthetic oligonucleotide
aaatcagggaatcccgaacagagcgacagg

SEQ ID NO: 190773 - DNA, 30 bp, Artificial Sequence
  Synthetic oligonucleotide
ccgctgtcccggatacgggcagtcgacagg

SEQ ID NO: 190774 - DNA, 30 bp, Artificial Sequence
  Synthetic oligonucleotide
agactttctgtcgatcggccggaggacagg

SEQ ID NO: 190775 - DNA, 30 bp, Artificial Sequence
  Synthetic oligonucleotide
cgggacctcgataggtacggcacctacagg

SEQ ID NO: 190776 - DNA, 30 bp, Artificial Sequence
  Synthetic oligonucleotide
ggtactataatttaatgctaggtctacagg

SEQ ID NO: 190777 - DNA, 30 bp, Artificial Sequence
  Synthetic oligonucleotide
ggcatagccggcggccgttaatcttacagg

SEQ ID NO: 190778 - DNA, 30 bp, Artificial Sequence
  Synthetic oligonucleotide
atacggagaatcttactggagctttacagg

SEQ ID NO: 190779 - DNA, 30 bp, Artificial Sequence
  Synthetic oligonucleotide
agcgcgacacactacgtaggtccaaccagg

SEQ ID NO: 190780 - DNA, 30 bp, Artificial Sequence
  Synthetic oligonucleotide
cccggccagaaattcgataagggaaccagg

SEQ ID NO: 190781 - DNA, 30 bp, Artificial Sequence
  Synthetic oligonucleotide
tctaccagctcatggcaggtggacaccagg

SEQ ID NO: 190782 - DNA, 31 bp, Artificial Sequence
  Synthetic oligonucleotide
gggatggtaagactgtcaggtcgcgaccagg

SEQ ID NO: 190783 - DNA, 30 bp, Artificial Sequence
  Synthetic oligonucleotide
cctgacggaggggtcaggggtgggaccagg

SEQ ID NO: 190784 - DNA, 30 bp, Artificial Sequence
  Synthetic oligonucleotide
tccggcggcgcattccaacttcctaccagg

SEQ ID NO: 190785 - DNA, 30 bp, Artificial Sequence
  Synthetic oligonucleotide
gaaggttgactgtagggttctagacccagg

SEQ ID NO: 190786 - DNA, 30 bp, Artificial Sequence
  Synthetic oligonucleotide
gtagaatgtctttcggttgcggcccccagg

SEQ ID NO: 190787 - DNA, 30 bp, Artificial Sequence
  Synthetic oligonucleotide
gctgaggtctcaaatgtggagatgcccagg

SEQ ID NO: 190788 - DNA, 30 bp, Artificial Sequence
  Synthetic oligonucleotide
agcgttcactgaggtgcaggtcaatccagg

SEQ ID NO: 190789 - DNA, 30 bp, Artificial Sequence
  Synthetic oligonucleotide
tagacaagtataaagtcgtaataatccagg

SEQ ID NO: 190790 - DNA, 30 bp, Artificial Sequence
  Synthetic oligonucleotide
tgacgggcaaaagcaggcgttgcctccagg

SEQ ID NO: 190791 - DNA, 30 bp, Artificial Sequence
  Synthetic oligonucleotide
acgaatagtgggttggagcgatgctccagg

SEQ ID NO: 190792 - DNA, 30 bp, Artificial Sequence
  Synthetic oligonucleotide
gttaccggacatcgtgttcgttcgtccagg

SEQ ID NO: 190793 - DNA, 30 bp, Artificial Sequence
  Synthetic oligonucleotide
cgcggataaaaattcgtagagtgttccagg

SEQ ID NO: 190794 - DNA, 30 bp, Artificial Sequence
  Synthetic oligonucleotide
aattgtggcggccgacactagtcaagcagg

SEQ ID NO: 190795 - DNA, 30 bp, Artificial Sequence
  Synthetic oligonucleotide
tggccataactgactttatgtataagcagg

SEQ ID NO: 190796 - DNA, 30 bp, Artificial Sequence
  Synthetic oligonucleotide
ggataattaagacagtgctcggtcagcagg

SEQ ID NO: 190797 - DNA, 30 bp, Artificial Sequence
  Synthetic oligonucleotide
tgaacaatgagatttgcttttacgagcagg

SEQ ID NO: 190798 - DNA, 30 bp, Artificial Sequence
  Synthetic oligonucleotide
caaagtgttcaggctatagcagaccgcagg

SEQ ID NO: 190799 - DNA, 30 bp, Artificial Sequence
  Synthetic oligonucleotide
ggcaggatccagtaaattgaggggcgcagg

SEQ ID NO: 190800 - DNA, 30 bp, Artificial Sequence
  Synthetic oligonucleotide
atctcccgatcatacttaaaacgaggcagg

SEQ ID NO: 190801 - DNA, 30 bp, Artificial Sequence
  Synthetic oligonucleotide
gaatgcgtaaacagaccccgccagggcagg

SEQ ID NO: 190802 - DNA, 30 bp, Artificial Sequence
  Synthetic oligonucleotide
tatcctagtacgtcacgtgcatagggcagg

SEQ ID NO: 190803 - DNA, 30 bp, Artificial Sequence
  Synthetic oligonucleotide
tacggagttaatatttgaaggaatggcagg

SEQ ID NO: 190804 - DNA, 30 bp, Artificial Sequence
  Synthetic oligonucleotide
tgctccatactaaggtcgagctatggcagg

SEQ ID NO: 190805 - DNA, 30 bp, Artificial Sequence
  Synthetic oligonucleotide
tgagtcaactagcaacaagatcctggcagg

SEQ ID NO: 190806 - DNA, 30 bp, Artificial Sequence
  Synthetic oligonucleotide
ttagttcatattaaacagacctagtgcagg

SEQ ID NO: 190807 - DNA, 30 bp, Artificial Sequence
  Synthetic oligonucleotide
acaatacggaccctagtacaggggtgcagg

SEQ ID NO: 190808 - DNA, 30 bp, Artificial Sequence
  Synthetic oligonucleotide
atgtagtaagcgtgtcagaaaatgtgcagg

SEQ ID NO: 190809 - DNA, 30 bp, Artificial Sequence
  Synthetic oligonucleotide
ctatcaactcaacgggactcaagaatcagg

SEQ ID NO: 190810 - DNA, 30 bp, Artificial Sequence
  Synthetic oligonucleotide
gacgataagcactgcattatagtaatcagg

SEQ ID NO: 190811 - DNA, 30 bp, Artificial Sequence
  Synthetic oligonucleotide
ggtaaaatcgtataggacaagggcatcagg

SEQ ID NO: 190812 - DNA, 30 bp, Artificial Sequence
  Synthetic oligonucleotide
aaacgacagcaacgtcaagtaaagatcagg

SEQ ID NO: 190813 - DNA, 30 bp, Artificial Sequence
  Synthetic oligonucleotide
ctcgtatccggcagaattgtagtgatcagg

SEQ ID NO: 190814 - DNA, 30 bp, Artificial Sequence
  Synthetic oligonucleotide
tttgtgaacaacgtctctaagtaactcagg

SEQ ID NO: 190815 - DNA, 31 bp, Artificial Sequence
  Synthetic oligonucleotide
actagtagtacggatgtatctcctagtcagg

SEQ ID NO: 190816 - DNA, 30 bp, Artificial Sequence
  Synthetic oligonucleotide
gtggtgtcatgttacgtaattttcgtcagg

SEQ ID NO: 190817 - DNA, 30 bp, Artificial Sequence
  Synthetic oligonucleotide
aggtaagtaacgtggcgaaacggggtcagg

SEQ ID NO: 190818 - DNA, 30 bp, Artificial Sequence
  Synthetic oligonucleotide
gggtctcaacggcttgtataccatgtcagg

SEQ ID NO: 190819 - DNA, 30 bp, Artificial Sequence
  Synthetic oligonucleotide
tggtttgcaggctggttcaaggatgtcagg

SEQ ID NO: 190820 - DNA, 30 bp, Artificial Sequence
  Synthetic oligonucleotide
ttcgcatccattgggcggcagatattcagg

SEQ ID NO: 190821 - DNA, 30 bp, Artificial Sequence
  Synthetic oligonucleotide
aggtttattgacttatgtgcaaggttcagg

SEQ ID NO: 190822 - DNA, 30 bp, Artificial Sequence
  Synthetic oligonucleotide
attggattgctttgttgtcttagaaagagg

SEQ ID NO: 190823 - DNA, 30 bp, Artificial Sequence
  Synthetic oligonucleotide
gttaatgcatagcgatgatctgcgaagagg

SEQ ID NO: 190824 - DNA, 30 bp, Artificial Sequence
  Synthetic oligonucleotide
tgacttcactgaagtacgtcatcgaagagg

SEQ ID NO: 190825 - DNA, 30 bp, Artificial Sequence
  Synthetic oligonucleotide
cgacacccgcgtagtggtcagttgaagagg

SEQ ID NO: 190826 - DNA, 30 bp, Artificial Sequence
  Synthetic oligonucleotide
ttaggagctcgatattcgccacgtaagagg

SEQ ID NO: 190827 - DNA, 30 bp, Artificial Sequence
  Synthetic oligonucleotide
cagcctctggctgcgtaattgcgtaagagg

SEQ ID NO: 190828 - DNA, 30 bp, Artificial Sequence
  Synthetic oligonucleotide
aagactagatattatattaccgggcagagg

SEQ ID NO: 190829 - DNA, 30 bp, Artificial Sequence
  Synthetic oligonucleotide
ataattagactatacagggtgattcagagg

SEQ ID NO: 190830 - DNA, 30 bp, Artificial Sequence
  Synthetic oligonucleotide
ttaaaggtgcgaattacaatcttcgagagg

SEQ ID NO: 190831 - DNA, 30 bp, Artificial Sequence
  Synthetic oligonucleotide
ccgtgaccggtctgacgaaaaaaggagagg

SEQ ID NO: 190832 - DNA, 30 bp, Artificial Sequence
  Synthetic oligonucleotide
acttgaaaagtcggggtcatgcaggagagg

SEQ ID NO: 190833 - DNA, 30 bp, Artificial Sequence
  Synthetic oligonucleotide
gtacccgaacccgcggtacaacgtgagagg

SEQ ID NO: 190834 - DNA, 30 bp, Artificial Sequence
  Synthetic oligonucleotide
gtcataatttgtgggtcagaagtgtagagg

SEQ ID NO: 190835 - DNA, 30 bp, Artificial Sequence
  Synthetic oligonucleotide
taagaccttcaaacaacttcgggttagagg

SEQ ID NO: 190836 - DNA, 30 bp, Artificial Sequence
  Synthetic oligonucleotide
gtatgaccagtttgctgggcgatttagagg

SEQ ID NO: 190837 - DNA, 30 bp, Artificial Sequence
  Synthetic oligonucleotide
gaatatcccagggcagcagggttcacgagg

SEQ ID NO: 190838 - DNA, 30 bp, Artificial Sequence
  Synthetic oligonucleotide
gaaatggcatacaatatcaagaggacgagg

SEQ ID NO: 190839 - DNA, 30 bp, Artificial Sequence
  Synthetic oligonucleotide
tgacgcaatggcggtatgatcggtccgagg

SEQ ID NO: 190840 - DNA, 30 bp, Artificial Sequence
  Synthetic oligonucleotide
aacgagtggttaacggtcgctattccgagg

SEQ ID NO: 190841 - DNA, 30 bp, Artificial Sequence
  Synthetic oligonucleotide
agattccgggcgacaaaggtcttagcgagg

SEQ ID NO: 190842 - DNA, 30 bp, Artificial Sequence
  Synthetic oligonucleotide
gcgcgctatacgggaaccggtaccgcgagg

SEQ ID NO: 190843 - DNA, 30 bp, Artificial Sequence
  Synthetic oligonucleotide
agccgaaattgatgtcttacgcgggcgagg

SEQ ID NO: 190844 - DNA, 30 bp, Artificial Sequence
  Synthetic oligonucleotide
tgtgagggatcatgggtcgtcggggcgagg

SEQ ID NO: 190845 - DNA, 30 bp, Artificial Sequence
  Synthetic oligonucleotide
aggaggcaatctggacagcggaagtcgagg

SEQ ID NO: 190846 - DNA, 30 bp, Artificial Sequence
  Synthetic oligonucleotide
ggtgtgcacttagcttgacatcacaggagg

SEQ ID NO: 190847 - DNA, 30 bp, Artificial Sequence
  Synthetic oligonucleotide
gggagcaacacgagctctgaccggcggagg

SEQ ID NO: 190848 - DNA, 30 bp, Artificial Sequence
  Synthetic oligonucleotide
agttgggacccactcaaagtaggagggagg

SEQ ID NO: 190849 - DNA, 30 bp, Artificial Sequence
  Synthetic oligonucleotide
gctcaatcgcgattggtccgattcgggagg

SEQ ID NO: 190850 - DNA, 30 bp, Artificial Sequence
  Synthetic oligonucleotide
gtcacagggaggggacagtattaatggagg

SEQ ID NO: 190851 - DNA, 30 bp, Artificial Sequence
  Synthetic oligonucleotide
tgggaatgactgccagaccgcacctggagg

SEQ ID NO: 190852 - DNA, 30 bp, Artificial Sequence
  Synthetic oligonucleotide
cctcattaattggaatttgtcagctggagg

SEQ ID NO: 190853 - DNA, 30 bp, Artificial Sequence
  Synthetic oligonucleotide
tgagtacgatgtcacaggtccccgtggagg

SEQ ID NO: 190854 - DNA, 30 bp, Artificial Sequence
  Synthetic oligonucleotide
actagctctattactatagcttggtggagg

SEQ ID NO: 190855 - DNA, 30 bp, Artificial Sequence
  Synthetic oligonucleotide
taccacgtaccggcgtataggcgttggagg

SEQ ID NO: 190856 - DNA, 30 bp, Artificial Sequence
  Synthetic oligonucleotide
tcgtgcacagcggggtcaacgtgttggagg

SEQ ID NO: 190857 - DNA, 30 bp, Artificial Sequence
  Synthetic oligonucleotide
gcacacaagtattattatgggaaaatgagg

SEQ ID NO: 190858 - DNA, 30 bp, Artificial Sequence
  Synthetic oligonucleotide
tggaatgacgagtcgcagtggaaaatgagg

SEQ ID NO: 190859 - DNA, 30 bp, Artificial Sequence
  Synthetic oligonucleotide
aatccaaagcgtattttatggggaatgagg

SEQ ID NO: 190860 - DNA, 30 bp, Artificial Sequence
  Synthetic oligonucleotide
tagggaagataaagattggggcccatgagg

SEQ ID NO: 190861 - DNA, 30 bp, Artificial Sequence
  Synthetic oligonucleotide
gggctgggtagtaaactgcaggtgatgagg

SEQ ID NO: 190862 - DNA, 30 bp, Artificial Sequence
  Synthetic oligonucleotide
aggtgtacattcgcattatatagtatgagg

SEQ ID NO: 190863 - DNA, 30 bp, Artificial Sequence
  Synthetic oligonucleotide
gctcaaaaaaggtcatagggcttactgagg

SEQ ID NO: 190864 - DNA, 30 bp, Artificial Sequence
  Synthetic oligonucleotide
agtaaatgccgtgtgctgaacaccctgagg

SEQ ID NO: 190865 - DNA, 30 bp, Artificial Sequence
  Synthetic oligonucleotide
tgagcaaatattcgggttacagaagtgagg

SEQ ID NO: 190866 - DNA, 30 bp, Artificial Sequence
  Synthetic oligonucleotide
tgacctgttaaaaaatttacaccagtgagg

SEQ ID NO: 190867 - DNA, 30 bp, Artificial Sequence
  Synthetic oligonucleotide
aattcgacggggtgatgttgagacgtgagg

SEQ ID NO: 190868 - DNA, 30 bp, Artificial Sequence
  Synthetic oligonucleotide
ttataacagatcaaaagtaaggccgtgagg

SEQ ID NO: 190869 - DNA, 30 bp, Artificial Sequence
  Synthetic oligonucleotide
ggtcccataccctaaggtgatttcgtgagg

SEQ ID NO: 190870 - DNA, 30 bp, Artificial Sequence
  Synthetic oligonucleotide
tttcctgcctataaaaccgaccaggtgagg

SEQ ID NO: 190871 - DNA, 30 bp, Artificial Sequence
  Synthetic oligonucleotide
ggttgtcccggaaagcaagagtatgtgagg

SEQ ID NO: 190872 - DNA, 30 bp, Artificial Sequence
  Synthetic oligonucleotide
gtaacgagtcatttcctttaatttgtgagg

SEQ ID NO: 190873 - DNA, 30 bp, Artificial Sequence
  Synthetic oligonucleotide
aacgggggatacgacctgaaagaattgagg

SEQ ID NO: 190874 - DNA, 30 bp, Artificial Sequence
  Synthetic oligonucleotide
aggtcgatggtgcagtggagaggattgagg

SEQ ID NO: 190875 - DNA, 30 bp, Artificial Sequence
  Synthetic oligonucleotide
gcagtgtaccggactcctatcatattgagg

SEQ ID NO: 190876 - DNA, 30 bp, Artificial Sequence
  Synthetic oligonucleotide
aatgtgcacgacaaatcgtgtaccttgagg

SEQ ID NO: 190877 - DNA, 30 bp, Artificial Sequence
  Synthetic oligonucleotide
cgcaattggactggtttttcactgttgagg

SEQ ID NO: 190878 - DNA, 30 bp, Artificial Sequence
  Synthetic oligonucleotide
gtgtacgcattttcatatggcgtgttgagg

SEQ ID NO: 190879 - DNA, 30 bp, Artificial Sequence
  Synthetic oligonucleotide
cgcgcttattcgtgctgtaggataaatagg

SEQ ID NO: 190880 - DNA, 30 bp, Artificial Sequence
  Synthetic oligonucleotide
gttctacggagtctaaaactcgagaatagg

SEQ ID NO: 190881 - DNA, 30 bp, Artificial Sequence
  Synthetic oligonucleotide
ttcagctatgtggcaaggggggtgaatagg

SEQ ID NO: 190882 - DNA, 30 bp, Artificial Sequence
  Synthetic oligonucleotide
tattacgctgtcgcggaaaaagaacatagg

SEQ ID NO: 190883 - DNA, 30 bp, Artificial Sequence
  Synthetic oligonucleotide
gaagtgtctgccacgtctcagggacatagg

SEQ ID NO: 190884 - DNA, 30 bp, Artificial Sequence
  Synthetic oligonucleotide
tcatgagcaaatctgcaacggtagcatagg

SEQ ID NO: 190885 - DNA, 30 bp, Artificial Sequence
  Synthetic oligonucleotide
cggctactggctgaagtattttagcatagg

SEQ ID NO: 190886 - DNA, 30 bp, Artificial Sequence
  Synthetic oligonucleotide
ggttattctggcgaacacgtgtctcatagg

SEQ ID NO: 190887 - DNA, 30 bp, Artificial Sequence
  Synthetic oligonucleotide
acgagctcctggtggaaagactgtcatagg

SEQ ID NO: 190888 - DNA, 30 bp, Artificial Sequence
  Synthetic oligonucleotide
caatggtcccagttgtggcgcgaagatagg

SEQ ID NO: 190889 - DNA, 30 bp, Artificial Sequence
  Synthetic oligonucleotide
tcaccgatacagccgcataagagagatagg

SEQ ID NO: 190890 - DNA, 30 bp, Artificial Sequence
  Synthetic oligonucleotide
ctcgaaattctaggtcacggagtcgatagg

SEQ ID NO: 190891 - DNA, 30 bp, Artificial Sequence
  Synthetic oligonucleotide
tcaaacgacagtaaatatacttaatatagg

SEQ ID NO: 190892 - DNA, 30 bp, Artificial Sequence
  Synthetic oligonucleotide
gagaccatgggggttgcttggtgatatagg

SEQ ID NO: 190893 - DNA, 30 bp, Artificial Sequence
  Synthetic oligonucleotide
actgaaagtgaccgcccccggcactatagg

SEQ ID NO: 190894 - DNA, 30 bp, Artificial Sequence
  Synthetic oligonucleotide
ttgcgtataatccattaggaggtctatagg

SEQ ID NO: 190895 - DNA, 30 bp, Artificial Sequence
  Synthetic oligonucleotide
cagtatatatagacacaacgaaggtatagg

SEQ ID NO: 190896 - DNA, 30 bp, Artificial Sequence
  Synthetic oligonucleotide
cgccgattggcgaccttagcgcggtatagg

SEQ ID NO: 190897 - DNA, 30 bp, Artificial Sequence
  Synthetic oligonucleotide
acgtgctatcacaccggtgccatttatagg

SEQ ID NO: 190898 - DNA, 30 bp, Artificial Sequence
  Synthetic oligonucleotide
gcggatggaggatccgtgtcattttatagg

SEQ ID NO: 190899 - DNA, 30 bp, Artificial Sequence
  Synthetic oligonucleotide
gagtggattatggggggcgatacaactagg

SEQ ID NO: 190900 - DNA, 30 bp, Artificial Sequence
  Synthetic oligonucleotide
tctcagagtaactggagcttgcgaactagg

SEQ ID NO: 190901 - DNA, 30 bp, Artificial Sequence
  Synthetic oligonucleotide
agtccgtgctcccgctacgctataactagg

SEQ ID NO: 190902 - DNA, 30 bp, Artificial Sequence
  Synthetic oligonucleotide
cttatgcttaattgcaagggctagactagg

SEQ ID NO: 190903 - DNA, 30 bp, Artificial Sequence
  Synthetic oligonucleotide
tagaggcccactctgtgcagtaatactagg

SEQ ID NO: 190904 - DNA, 30 bp, Artificial Sequence
  Synthetic oligonucleotide
tatcgatttcgattgcaatcatagcctagg

SEQ ID NO: 190905 - DNA, 30 bp, Artificial Sequence
  Synthetic oligonucleotide
gagcgcaacgtttactagtaaccgcctagg

SEQ ID NO: 190906 - DNA, 30 bp, Artificial Sequence
  Synthetic oligonucleotide
gcgggcaaagatgcatcgttcaatcctagg

SEQ ID NO: 190907 - DNA, 30 bp, Artificial Sequence
  Synthetic oligonucleotide
ccgattttcacgaccaaaaagaatcctagg

SEQ ID NO: 190908 - DNA, 30 bp, Artificial Sequence
  Synthetic oligonucleotide
gtaggatcataggggattgcatccgctagg

SEQ ID NO: 190909 - DNA, 30 bp, Artificial Sequence
  Synthetic oligonucleotide
cagtgatcccggggacacgaaagcgctagg

SEQ ID NO: 190910 - DNA, 30 bp, Artificial Sequence
  Synthetic oligonucleotide
aacaaagcaagtcaacattttgtcgctagg

SEQ ID NO: 190911 - DNA, 30 bp, Artificial Sequence
  Synthetic oligonucleotide
atcccggacctagtggcaatgcatgctagg

SEQ ID NO: 190912 - DNA, 30 bp, Artificial Sequence
  Synthetic oligonucleotide
cctacgaaggaagtatgtgtatgatctagg

SEQ ID NO: 190913 - DNA, 30 bp, Artificial Sequence
  Synthetic oligonucleotide
gataccaaggcccgtaccgccgcgagtagg

SEQ ID NO: 190914 - DNA, 30 bp, Artificial Sequence
  Synthetic oligonucleotide
atggattagttacaagtggggctgagtagg

SEQ ID NO: 190915 - DNA, 30 bp, Artificial Sequence
  Synthetic oligonucleotide
gaaaaagatacaaaactaaactgtagtagg

SEQ ID NO: 190916 - DNA, 30 bp, Artificial Sequence
  Synthetic oligonucleotide
atcacggattaaggccaacaagcacgtagg

SEQ ID NO: 190917 - DNA, 30 bp, Artificial Sequence
  Synthetic oligonucleotide
actattaccagaagcgcccctgagcgtagg

SEQ ID NO: 190918 - DNA, 30 bp, Artificial Sequence
  Synthetic oligonucleotide
cgggtgtctgagtaggtatacctgcgtagg

SEQ ID NO: 190919 - DNA, 31 bp, Artificial Sequence
  Synthetic oligonucleotide
cggagcagccaacgcgagccgcgaaggtagg

SEQ ID NO: 190920 - DNA, 30 bp, Artificial Sequence
  Synthetic oligonucleotide
ggtttgcgtttacgaaaccaccgaggtagg

SEQ ID NO: 190921 - DNA, 30 bp, Artificial Sequence
  Synthetic oligonucleotide
aagattcggcccttcacagctgggggtagg

SEQ ID NO: 190922 - DNA, 30 bp, Artificial Sequence
  Synthetic oligonucleotide
caggtcgatcggtcgcgcgttgaatgtagg

SEQ ID NO: 190923 - DNA, 30 bp, Artificial Sequence
  Synthetic oligonucleotide
acattggcgaactgttggaaaccatgtagg

SEQ ID NO: 190924 - DNA, 30 bp, Artificial Sequence
  Synthetic oligonucleotide
aattgcaatcatatcttgaagagctgtagg

SEQ ID NO: 190925 - DNA, 30 bp, Artificial Sequence
  Synthetic oligonucleotide
tggaaaggggcgtcacatgtcaggtgtagg

SEQ ID NO: 190926 - DNA, 30 bp, Artificial Sequence
  Synthetic oligonucleotide
tctagacttgattgatatgtcatgtgtagg

SEQ ID NO: 190927 - DNA, 30 bp, Artificial Sequence
  Synthetic oligonucleotide
acgattccaattaacagtgtcatgtgtagg

SEQ ID NO: 190928 - DNA, 30 bp, Artificial Sequence
  Synthetic oligonucleotide
tagtaaaaaagccaggagacgataattagg

SEQ ID NO: 190929 - DNA, 30 bp, Artificial Sequence
  Synthetic oligonucleotide
acagagtgttggtctaattggaacattagg

SEQ ID NO: 190930 - DNA, 30 bp, Artificial Sequence
  Synthetic oligonucleotide
cagtaaagattgtttgtaccctggattagg

SEQ ID NO: 190931 - DNA, 30 bp, Artificial Sequence
  Synthetic oligonucleotide
gcccggggacctcccgaaggaaatattagg

SEQ ID NO: 190932 - DNA, 30 bp, Artificial Sequence
  Synthetic oligonucleotide
gtgcgtccctgatgagggcttcctattagg

SEQ ID NO: 190933 - DNA, 30 bp, Artificial Sequence
  Synthetic oligonucleotide
aatggggcggaccacgatagatcacttagg

SEQ ID NO: 190934 - DNA, 30 bp, Artificial Sequence
  Synthetic oligonucleotide
gcatgttgctggcaattcgggttacttagg

SEQ ID NO: 190935 - DNA, 30 bp, Artificial Sequence
  Synthetic oligonucleotide
gcgatgaagcatttcagagatctgcttagg

SEQ ID NO: 190936 - DNA, 30 bp, Artificial Sequence
  Synthetic oligonucleotide
cagatggatagtttaactactgatcttagg

SEQ ID NO: 190937 - DNA, 30 bp, Artificial Sequence
  Synthetic oligonucleotide
tcgattatcttctgattaataaaggttagg

SEQ ID NO: 190938 - DNA, 30 bp, Artificial Sequence
  Synthetic oligonucleotide
gccccatcaaaaagtcaacgcaaggttagg

SEQ ID NO: 190939 - DNA, 30 bp, Artificial Sequence
  Synthetic oligonucleotide
caagcgaagtagggcacacctcatgttagg

SEQ ID NO: 190940 - DNA, 30 bp, Artificial Sequence
  Synthetic oligonucleotide
gtgccagttaccttggtcatagttgttagg

SEQ ID NO: 190941 - DNA, 30 bp, Artificial Sequence
  Synthetic oligonucleotide
ataccccatctttgtaaagacacatttagg

SEQ ID NO: 190942 - DNA, 30 bp, Artificial Sequence
  Synthetic oligonucleotide
tacgcccgctttgcatgaaagccatttagg

SEQ ID NO: 190943 - DNA, 30 bp, Artificial Sequence
  Synthetic oligonucleotide
tggccgggtcgagatggcgaatactttagg

SEQ ID NO: 190944 - DNA, 30 bp, Artificial Sequence
  Synthetic oligonucleotide
ggcgtacaaggccccagaaaagcttttagg

SEQ ID NO: 190945 - DNA, 30 bp, Artificial Sequence
  Synthetic oligonucleotide
caccgagaggtagtataacgaaccaaacgg

SEQ ID NO: 190946 - DNA, 30 bp, Artificial Sequence
  Synthetic oligonucleotide
cacgattcacatcgtggtacgctgaaacgg

SEQ ID NO: 190947 - DNA, 30 bp, Artificial Sequence
  Synthetic oligonucleotide
tgcatacaatttaaagacgaaacccaacgg

SEQ ID NO: 190948 - DNA, 30 bp, Artificial Sequence
  Synthetic oligonucleotide
tccggatacgaatgtatggaaccccaacgg

SEQ ID NO: 190949 - DNA, 30 bp, Artificial Sequence
  Synthetic oligonucleotide
aatgatacgtcagataaaccatagcaacgg

SEQ ID NO: 190950 - DNA, 30 bp, Artificial Sequence
  Synthetic oligonucleotide
aggtacctatatgaactcgtgcgataacgg

SEQ ID NO: 190951 - DNA, 30 bp, Artificial Sequence
  Synthetic oligonucleotide
cgatgcgctgctcggagccttggataacgg

SEQ ID NO: 190952 - DNA, 30 bp, Artificial Sequence
  Synthetic oligonucleotide
ccaggtctgagcatcatgttggtataacgg

SEQ ID NO: 190953 - DNA, 30 bp, Artificial Sequence
  Synthetic oligonucleotide
gtcgacggcatggacaaagcttactaacgg

SEQ ID NO: 190954 - DNA, 30 bp, Artificial Sequence
  Synthetic oligonucleotide
gacgggaaccagcttataagctgctaacgg

SEQ ID NO: 190955 - DNA, 30 bp, Artificial Sequence
  Synthetic oligonucleotide
tgtaggatcatttcctgcgcatattaacgg

SEQ ID NO: 190956 - DNA, 30 bp, Artificial Sequence
  Synthetic oligonucleotide
gctaataagtatagtcacttccaaacacgg

SEQ ID NO: 190957 - DNA, 30 bp, Artificial Sequence
  Synthetic oligonucleotide
ggcactccgaacaaaataccgccaacacgg

SEQ ID NO: 190958 - DNA, 30 bp, Artificial Sequence
  Synthetic oligonucleotide
actccacatgtaaagcataatggaacacgg

SEQ ID NO: 190959 - DNA, 30 bp, Artificial Sequence
  Synthetic oligonucleotide
agtgctcaaaactgcgtgaaacgcacacgg

SEQ ID NO: 190960 - DNA, 30 bp, Artificial Sequence
  Synthetic oligonucleotide
gatccagtttagagattacaagcagcacgg

SEQ ID NO: 190961 - DNA, 30 bp, Artificial Sequence
  Synthetic oligonucleotide
agtaggggtttaagaacacggttcgcacgg

SEQ ID NO: 190962 - DNA, 30 bp, Artificial Sequence
  Synthetic oligonucleotide
ttgctgcataaggatcctcagtaggcacgg

SEQ ID NO: 190963 - DNA, 30 bp, Artificial Sequence
  Synthetic oligonucleotide
agtaggataccgtgaactacacgtgcacgg

SEQ ID NO: 190964 - DNA, 30 bp, Artificial Sequence
  Synthetic oligonucleotide
tgagtactgagcgcatgatcgcttgcacgg

SEQ ID NO: 190965 - DNA, 30 bp, Artificial Sequence
  Synthetic oligonucleotide
gcaggacggtccaaacttcacctatcacgg

SEQ ID NO: 190966 - DNA, 30 bp, Artificial Sequence
  Synthetic oligonucleotide
atgacgaatccgaactcttcgttatcacgg

SEQ ID NO: 190967 - DNA, 30 bp, Artificial Sequence
  Synthetic oligonucleotide
tctaaaatgagctagtttctacgctcacgg

SEQ ID NO: 190968 - DNA, 30 bp, Artificial Sequence
  Synthetic oligonucleotide
atggatcaaatggtcttgatggaaagacgg

SEQ ID NO: 190969 - DNA, 30 bp, Artificial Sequence
  Synthetic oligonucleotide
ttcgaggcgttacaaagcacatcaagacgg

SEQ ID NO: 190970 - DNA, 30 bp, Artificial Sequence
  Synthetic oligonucleotide
ccaagagctgggacatgtaccttaagacgg

SEQ ID NO: 190971 - DNA, 30 bp, Artificial Sequence
  Synthetic oligonucleotide
ctgaagtaacaaattgggtcgtagagacgg

SEQ ID NO: 190972 - DNA, 30 bp, Artificial Sequence
  Synthetic oligonucleotide
gtcagaagccccacccgttgacggagacgg

SEQ ID NO: 190973 - DNA, 30 bp, Artificial Sequence
  Synthetic oligonucleotide
tatgcggcgaggaacgcggcgatacgacgg

SEQ ID NO: 190974 - DNA, 30 bp, Artificial Sequence
  Synthetic oligonucleotide
gagatggtgtatcaacagtcatgccgacgg

SEQ ID NO: 190975 - DNA, 30 bp, Artificial Sequence
  Synthetic oligonucleotide
ccaggaagcactggggcgtatataggacgg

SEQ ID NO: 190976 - DNA, 30 bp, Artificial Sequence
  Synthetic oligonucleotide
gtatactagatcccgcgagaagccggacgg

SEQ ID NO: 190977 - DNA, 30 bp, Artificial Sequence
  Synthetic oligonucleotide
aggggctcgatacgtatgttatcgggacgg

SEQ ID NO: 190978 - DNA, 30 bp, Artificial Sequence
  Synthetic oligonucleotide
cgtagttctccgaagaggaagtgtggacgg

SEQ ID NO: 190979 - DNA, 29 bp, Artificial Sequence
  Synthetic oligonucleotide
gccaaaacaatgtcacatagattggacgg

SEQ ID NO: 190980 - DNA, 30 bp, Artificial Sequence
  Synthetic oligonucleotide
ggagagctgttaggccccgcaaaatgacgg

SEQ ID NO: 190981 - DNA, 30 bp, Artificial Sequence
  Synthetic oligonucleotide
gtaagattcttaaggtacaaatgaatacgg

SEQ ID NO: 190982 - DNA, 30 bp, Artificial Sequence
  Synthetic oligonucleotide
cataatacgttaaagaatcagctaatacgg

SEQ ID NO: 190983 - DNA, 30 bp, Artificial Sequence
  Synthetic oligonucleotide
ggggggccgaactcagcatcgctaatacgg

SEQ ID NO: 190984 - DNA, 30 bp, Artificial Sequence
  Synthetic oligonucleotide
tggagactactacgttcaggggtaatacgg

SEQ ID NO: 190985 - DNA, 30 bp, Artificial Sequence
  Synthetic oligonucleotide
aaagtgggatacgaataggcgggcatacgg

SEQ ID NO: 190986 - DNA, 30 bp, Artificial Sequence
  Synthetic oligonucleotide
cgcactctggtaccgcagagcaggatacgg

SEQ ID NO: 190987 - DNA, 30 bp, Artificial Sequence
  Synthetic oligonucleotide
agtctacttggaaaacgccagggtatacgg

SEQ ID NO: 190988 - DNA, 30 bp, Artificial Sequence
  Synthetic oligonucleotide
gcgcctattttaccctaatcaacggtacgg

SEQ ID NO: 190989 - DNA, 30 bp, Artificial Sequence
  Synthetic oligonucleotide
tgctttcgcgatcagacaccttgggtacgg

SEQ ID NO: 190990 - DNA, 30 bp, Artificial Sequence
  Synthetic oligonucleotide
gttatcagatcgctacgttacgacttacgg

SEQ ID NO: 190991 - DNA, 30 bp, Artificial Sequence
  Synthetic oligonucleotide
taccatcagctagtaccggtagggaaccgg

SEQ ID NO: 190992 - DNA, 30 bp, Artificial Sequence
  Synthetic oligonucleotide
ctgaaggtgtagtggaatctaccacaccgg

SEQ ID NO: 190993 - DNA, 30 bp, Artificial Sequence
  Synthetic oligonucleotide
agtattagatgtgactgacgacgacaccgg

SEQ ID NO: 190994 - DNA, 30 bp, Artificial Sequence
  Synthetic oligonucleotide
tcaggggcggaaccggcaacatgacaccgg

SEQ ID NO: 190995 - DNA, 30 bp, Artificial Sequence
  Synthetic oligonucleotide
tatagtcttcaaggattaaaggtacaccgg

SEQ ID NO: 190996 - DNA, 30 bp, Artificial Sequence
  Synthetic oligonucleotide
gtaggccgatcgccactgagtcggcaccgg

SEQ ID NO: 190997 - DNA, 30 bp, Artificial Sequence
  Synthetic oligonucleotide
cagaatgaaagaatacttcgtgggcaccgg

SEQ ID NO: 190998 - DNA, 30 bp, Artificial Sequence
  Synthetic oligonucleotide
gaaggagggtcgggttgctgcatgcaccgg

SEQ ID NO: 190999 - DNA, 30 bp, Artificial Sequence
  Synthetic oligonucleotide
gggacggaatggtctagtctggatcaccgg

SEQ ID NO: 191000 - DNA, 30 bp, Artificial Sequence
  Synthetic oligonucleotide
cgttagccaggtgcaaaaccaccagaccgg

SEQ ID NO: 191001 - DNA, 30 bp, Artificial Sequence
  Synthetic oligonucleotide
tactatcgcatagatcaagtaagataccgg

SEQ ID NO: 191002 - DNA, 30 bp, Artificial Sequence
  Synthetic oligonucleotide
ggtcggggtatacagcccaactgataccgg

SEQ ID NO: 191003 - DNA, 30 bp, Artificial Sequence
  Synthetic oligonucleotide
cgatgggccgttatattacgggtataccgg

SEQ ID NO: 191004 - DNA, 30 bp, Artificial Sequence
  Synthetic oligonucleotide
tctaccctggtggacgttaagccaacccgg

SEQ ID NO: 191005 - DNA, 30 bp, Artificial Sequence
  Synthetic oligonucleotide
tttatggcacttcataacatctagacccgg

SEQ ID NO: 191006 - DNA, 30 bp, Artificial Sequence
  Synthetic oligonucleotide
agaccaatctacctaaagacggtgacccgg

SEQ ID NO: 191007 - DNA, 30 bp, Artificial Sequence
  Synthetic oligonucleotide
tcaaaaatggaacgaagcgtggtgacccgg

SEQ ID NO: 191008 - DNA, 30 bp, Artificial Sequence
  Synthetic oligonucleotide
tgtatggcacaggaatgtggggctacccgg

SEQ ID NO: 191009 - DNA, 30 bp, Artificial Sequence
  Synthetic oligonucleotide
ataaagagtacccgggaactacgaccccgg

SEQ ID NO: 191010 - DNA, 30 bp, Artificial Sequence
  Synthetic oligonucleotide
gggcgatgtggggtgtggtacgcgccccgg

SEQ ID NO: 191011 - DNA, 30 bp, Artificial Sequence
  Synthetic oligonucleotide
actgcaactcgacaccgctacggggcccgg

SEQ ID NO: 191012 - DNA, 30 bp, Artificial Sequence
  Synthetic oligonucleotide
gtgccagccctctcgctttgggttgcccgg

SEQ ID NO: 191013 - DNA, 30 bp, Artificial Sequence
  Synthetic oligonucleotide
atacacgtacggctgtgccttgcttcccgg

SEQ ID NO: 191014 - DNA, 30 bp, Artificial Sequence
  Synthetic oligonucleotide
tgaaagtggggacttaagggacaaagccgg

SEQ ID NO: 191015 - DNA, 30 bp, Artificial Sequence
  Synthetic oligonucleotide
gcgttggcgatctatgcatgcgaaagccgg

SEQ ID NO: 191016 - DNA, 30 bp, Artificial Sequence
  Synthetic oligonucleotide
tagttgctggcatccgtaaagcgtagccgg

SEQ ID NO: 191017 - DNA, 30 bp, Artificial Sequence
  Synthetic oligonucleotide
agttagtgcatctcataaaaagttagccgg

SEQ ID NO: 191018 - DNA, 30 bp, Artificial Sequence
  Synthetic oligonucleotide
ctgtcgtaaccctttagagtagcccgccgg

SEQ ID NO: 191019 - DNA, 30 bp, Artificial Sequence
  Synthetic oligonucleotide
ttaaagggccctggataaggcggccgccgg

SEQ ID NO: 191020 - DNA, 30 bp, Artificial Sequence
  Synthetic oligonucleotide
gcggaaacgttgaagcgatgtcttcgccgg

SEQ ID NO: 191021 - DNA, 30 bp, Artificial Sequence
  Synthetic oligonucleotide
ggtcgaaaatggcctatagactttcgccgg

SEQ ID NO: 191022 - DNA, 30 bp, Artificial Sequence
  Synthetic oligonucleotide
acgtactgcgaattcattcgctacggccgg

SEQ ID NO: 191023 - DNA, 30 bp, Artificial Sequence
  Synthetic oligonucleotide
gacctcggtagtagggaaatagctggccgg

SEQ ID NO: 191024 - DNA, 30 bp, Artificial Sequence
  Synthetic oligonucleotide
aggggaccaattatgaattcggactgccgg

SEQ ID NO: 191025 - DNA, 30 bp, Artificial Sequence
  Synthetic oligonucleotide
ttgggcagcttccgtctgtagtggtgccgg

SEQ ID NO: 191026 - DNA, 30 bp, Artificial Sequence
  Synthetic oligonucleotide
cgtacgactacgggtgtctgataaatccgg

SEQ ID NO: 191027 - DNA, 30 bp, Artificial Sequence
  Synthetic oligonucleotide
acatcggggctgcactaacgtcgaatccgg

SEQ ID NO: 191028 - DNA, 30 bp, Artificial Sequence
  Synthetic oligonucleotide
agtgtgcggccaattctggcacacatccgg

SEQ ID NO: 191029 - DNA, 30 bp, Artificial Sequence
  Synthetic oligonucleotide
cggctacaggcaggttctgggtctatccgg

SEQ ID NO: 191030 - DNA, 30 bp, Artificial Sequence
  Synthetic oligonucleotide
aagcttgtagatcactacgccattatccgg

SEQ ID NO: 191031 - DNA, 30 bp, Artificial Sequence
  Synthetic oligonucleotide
tcgtacgcccacgtgtaggatgccctccgg

SEQ ID NO: 191032 - DNA, 30 bp, Artificial Sequence
  Synthetic oligonucleotide
tagggaactgcgagtaccaaaggcctccgg

SEQ ID NO: 191033 - DNA, 30 bp, Artificial Sequence
  Synthetic oligonucleotide
agcttgataccatagtagcaatagctccgg

SEQ ID NO: 191034 - DNA, 30 bp, Artificial Sequence
  Synthetic oligonucleotide
aaagatattgctgactcctatcacgtccgg

SEQ ID NO: 191035 - DNA, 30 bp, Artificial Sequence
  Synthetic oligonucleotide
agacacgtaccagaattagcatcggtccgg

SEQ ID NO: 191036 - DNA, 30 bp, Artificial Sequence
  Synthetic oligonucleotide
ggcattggggttttaaccagaatggtccgg

SEQ ID NO: 191037 - DNA, 30 bp, Artificial Sequence
  Synthetic oligonucleotide
tccgatatggtcattgtctgtagtgtccgg

SEQ ID NO: 191038 - DNA, 30 bp, Artificial Sequence
  Synthetic oligonucleotide
aggtaattactatatcttcaggacttccgg

SEQ ID NO: 191039 - DNA, 31 bp, Artificial Sequence
  Synthetic oligonucleotide
tattgcgtaaattaatgctaatagaaagcgg

SEQ ID NO: 191040 - DNA, 30 bp, Artificial Sequence
  Synthetic oligonucleotide
ggctcagtgatacgacctcctggaaagcgg

SEQ ID NO: 191041 - DNA, 30 bp, Artificial Sequence
  Synthetic oligonucleotide
gtcgacctaacccgaatgctactcaagcgg

SEQ ID NO: 191042 - DNA, 30 bp, Artificial Sequence
  Synthetic oligonucleotide
aacggaccagacacgtcggtagtcaagcgg

SEQ ID NO: 191043 - DNA, 30 bp, Artificial Sequence
  Synthetic oligonucleotide
tgactggggcttagataagttagacagcgg

SEQ ID NO: 191044 - DNA, 30 bp, Artificial Sequence
  Synthetic oligonucleotide
ctatctccaatccgcggacatgtacagcgg

SEQ ID NO: 191045 - DNA, 30 bp, Artificial Sequence
  Synthetic oligonucleotide
taggatctttgtcacagtgttagccagcgg

SEQ ID NO: 191046 - DNA, 30 bp, Artificial Sequence
  Synthetic oligonucleotide
tgcatccattaggggacataagctcagcgg

SEQ ID NO: 191047 - DNA, 30 bp, Artificial Sequence
  Synthetic oligonucleotide
tgtgacacccgcggaactagtcacgagcgg

SEQ ID NO: 191048 - DNA, 30 bp, Artificial Sequence
  Synthetic oligonucleotide
cgtccctacataggtacaaggcaggagcgg

SEQ ID NO: 191049 - DNA, 30 bp, Artificial Sequence
  Synthetic oligonucleotide
atcactcaaatatggctttatagatagcgg

SEQ ID NO: 191050 - DNA, 30 bp, Artificial Sequence
  Synthetic oligonucleotide
taccgtcttagtccctctataaactagcgg

SEQ ID NO: 191051 - DNA, 30 bp, Artificial Sequence
  Synthetic oligonucleotide
ggcgacaaggggaaattgtcggcgtagcgg

SEQ ID NO: 191052 - DNA, 30 bp, Artificial Sequence
  Synthetic oligonucleotide
gaagtgtgtagttaatagagcgtaccgcgg

SEQ ID NO: 191053 - DNA, 30 bp, Artificial Sequence
  Synthetic oligonucleotide
ggcccgggtaattcgttacaagtcccgcgg

SEQ ID NO: 191054 - DNA, 30 bp, Artificial Sequence
  Synthetic oligonucleotide
gggatgtgcgcactgaggagcttagcgcgg

SEQ ID NO: 191055 - DNA, 30 bp, Artificial Sequence
  Synthetic oligonucleotide
gtacctagaccaagtggttgaagggcgcgg

SEQ ID NO: 191056 - DNA, 30 bp, Artificial Sequence
  Synthetic oligonucleotide
gggggttaagaggctgacctaatgtcgcgg

SEQ ID NO: 191057 - DNA, 30 bp, Artificial Sequence
  Synthetic oligonucleotide
aaccaggttgtgggcatacgtagttcgcgg

SEQ ID NO: 191058 - DNA, 30 bp, Artificial Sequence
  Synthetic oligonucleotide
aacagcggtcaggtgagcttactaaggcgg

SEQ ID NO: 191059 - DNA, 30 bp, Artificial Sequence
  Synthetic oligonucleotide
ccgctggagtccgacagcatagataggcgg

SEQ ID NO: 191060 - DNA, 30 bp, Artificial Sequence
  Synthetic oligonucleotide
tgcacgaaattgttgcttaggtctaggcgg

SEQ ID NO: 191061 - DNA, 30 bp, Artificial Sequence
  Synthetic oligonucleotide
agatctagaataaagagccaagtgcggcgg

SEQ ID NO: 191062 - DNA, 30 bp, Artificial Sequence
  Synthetic oligonucleotide
gagggaactaaaaggtggtagactcggcgg

SEQ ID NO: 191063 - DNA, 30 bp, Artificial Sequence
  Synthetic oligonucleotide
gagcacggaccagttcggaacggtcggcgg

SEQ ID NO: 191064 - DNA, 30 bp, Artificial Sequence
  Synthetic oligonucleotide
acggcgggttcgctagggtggcttcggcgg

SEQ ID NO: 191065 - DNA, 30 bp, Artificial Sequence
  Synthetic oligonucleotide
ctgaggggacaaaggggcctgaacgggcgg

SEQ ID NO: 191066 - DNA, 30 bp, Artificial Sequence
  Synthetic oligonucleotide
tcaaaagcacgccatatgtactgcgggcgg

SEQ ID NO: 191067 - DNA, 30 bp, Artificial Sequence
  Synthetic oligonucleotide
gatcactagtttggggcgcacgtcgggcgg

SEQ ID NO: 191068 - DNA, 30 bp, Artificial Sequence
  Synthetic oligonucleotide
gcatgtcccattaaggtacgagcgtggcgg

SEQ ID NO: 191069 - DNA, 30 bp, Artificial Sequence
  Synthetic oligonucleotide
ataggtgcaattcctcgtgtctggtggcgg

SEQ ID NO: 191070 - DNA, 30 bp, Artificial Sequence
  Synthetic oligonucleotide
aagtgaactaatcccattcgcatttggcgg

SEQ ID NO: 191071 - DNA, 30 bp, Artificial Sequence
  Synthetic oligonucleotide
agggtggaggaccttggcgttacaatgcgg

SEQ ID NO: 191072 - DNA, 30 bp, Artificial Sequence
  Synthetic oligonucleotide
gctaaagcccccgttcacggcctaatgcgg

SEQ ID NO: 191073 - DNA, 30 bp, Artificial Sequence
  Synthetic oligonucleotide
agttatatcgttcggaaaccccacatgcgg

SEQ ID NO: 191074 - DNA, 30 bp, Artificial Sequence
  Synthetic oligonucleotide
gttggcttaagaaaggctgcaatcatgcgg

SEQ ID NO: 191075 - DNA, 30 bp, Artificial Sequence
  Synthetic oligonucleotide
atgcaacttatgttggcgtattacctgcgg

SEQ ID NO: 191076 - DNA, 30 bp, Artificial Sequence
  Synthetic oligonucleotide
tgtacagtagcacggtaatggcaggtgcgg

SEQ ID NO: 191077 - DNA, 30 bp, Artificial Sequence
  Synthetic oligonucleotide
ggtgtacgttccgagtatggaaagttgcgg

SEQ ID NO: 191078 - DNA, 30 bp, Artificial Sequence
  Synthetic oligonucleotide
ggtgtttagcttacatcgtcgtagttgcgg

SEQ ID NO: 191079 - DNA, 30 bp, Artificial Sequence
  Synthetic oligonucleotide
agggcaagaagtctccatttcttgttgcgg

SEQ ID NO: 191080 - DNA, 30 bp, Artificial Sequence
  Synthetic oligonucleotide
tgtctgaccaggcgaatctgtcgtttgcgg

SEQ ID NO: 191081 - DNA, 30 bp, Artificial Sequence
  Synthetic oligonucleotide
ccttgatcgccttacccctagcgcaatcgg

SEQ ID NO: 191082 - DNA, 30 bp, Artificial Sequence
  Synthetic oligonucleotide
ttgcccaccaggactcctcccttgaatcgg

SEQ ID NO: 191083 - DNA, 30 bp, Artificial Sequence
  Synthetic oligonucleotide
agatatcatgatttactccctcataatcgg

SEQ ID NO: 191084 - DNA, 30 bp, Artificial Sequence
  Synthetic oligonucleotide
ggtgtcagatgattacatacgcctaatcgg

SEQ ID NO: 191085 - DNA, 30 bp, Artificial Sequence
  Synthetic oligonucleotide
aacaagtggtagtggacggccggccatcgg

SEQ ID NO: 191086 - DNA, 30 bp, Artificial Sequence
  Synthetic oligonucleotide
tgccgacgtgaccgtgcataaaagcatcgg

SEQ ID NO: 191087 - DNA, 30 bp, Artificial Sequence
  Synthetic oligonucleotide
ttgcacagaacgtgcaatccatcgcatcgg

SEQ ID NO: 191088 - DNA, 30 bp, Artificial Sequence
  Synthetic oligonucleotide
agggggctactagggttcaggcggcatcgg

SEQ ID NO: 191089 - DNA, 30 bp, Artificial Sequence
  Synthetic oligonucleotide
gacgtttggcgatgagatacgaaggatcgg

SEQ ID NO: 191090 - DNA, 30 bp, Artificial Sequence
  Synthetic oligonucleotide
atactgggaccacacgggtatgatgatcgg

SEQ ID NO: 191091 - DNA, 30 bp, Artificial Sequence
  Synthetic oligonucleotide
gatcgggggttgcgttcactaagtgatcgg

SEQ ID NO: 191092 - DNA, 30 bp, Artificial Sequence
  Synthetic oligonucleotide
gggtagagcgaaaggacagtttttgatcgg

SEQ ID NO: 191093 - DNA, 30 bp, Artificial Sequence
  Synthetic oligonucleotide
gtcaacaacgggaattctcgaatatatcgg

SEQ ID NO: 191094 - DNA, 30 bp, Artificial Sequence
  Synthetic oligonucleotide
ggtagtctcggaaaagccctctagactcgg

SEQ ID NO: 191095 - DNA, 30 bp, Artificial Sequence
  Synthetic oligonucleotide
ggcccatcatcggaattctacacgactcgg

SEQ ID NO: 191096 - DNA, 30 bp, Artificial Sequence
  Synthetic oligonucleotide
ggttaggtgtcaacatttcatttgactcgg

SEQ ID NO: 191097 - DNA, 30 bp, Artificial Sequence
  Synthetic oligonucleotide
agtctgtcaatacagaggcaatttactcgg

SEQ ID NO: 191098 - DNA, 30 bp, Artificial Sequence
  Synthetic oligonucleotide
acttgcactataggttaacccttacctcgg

SEQ ID NO: 191099 - DNA, 30 bp, Artificial Sequence
  Synthetic oligonucleotide
gacatacacccaaatccggttgcgcctcgg

SEQ ID NO: 191100 - DNA, 30 bp, Artificial Sequence
  Synthetic oligonucleotide
tgggatcccatggtcgcatttcttcctcgg

SEQ ID NO: 191101 - DNA, 30 bp, Artificial Sequence
  Synthetic oligonucleotide
cgaaagatgtgctttaacttgcaagctcgg

SEQ ID NO: 191102 - DNA, 30 bp, Artificial Sequence
  Synthetic oligonucleotide
cagcggagggcgggaaggacgttggctcgg

SEQ ID NO: 191103 - DNA, 30 bp, Artificial Sequence
  Synthetic oligonucleotide
tggatactacgcccctagtaccaatctcgg

SEQ ID NO: 191104 - DNA, 30 bp, Artificial Sequence
  Synthetic oligonucleotide
tcgcttaccttcatttcaggggtctctcgg

SEQ ID NO: 191105 - DNA, 30 bp, Artificial Sequence
  Synthetic oligonucleotide
gtaatgtaacaattacgcgcctattctcgg

SEQ ID NO: 191106 - DNA, 30 bp, Artificial Sequence
  Synthetic oligonucleotide
aggcaccttggtgaggtatctgcttctcgg

SEQ ID NO: 191107 - DNA, 30 bp, Artificial Sequence
  Synthetic oligonucleotide
cacgccttataattaaaattttgttctcgg

SEQ ID NO: 191108 - DNA, 30 bp, Artificial Sequence
  Synthetic oligonucleotide
ttcatcgtggatacaccctttaaaagtcgg

SEQ ID NO: 191109 - DNA, 30 bp, Artificial Sequence
  Synthetic oligonucleotide
agaggggaatctcactcttggcaaagtcgg

SEQ ID NO: 191110 - DNA, 30 bp, Artificial Sequence
  Synthetic oligonucleotide
ccgaagctcgagcgcacgaggaccagtcgg

SEQ ID NO: 191111 - DNA, 30 bp, Artificial Sequence
  Synthetic oligonucleotide
tgaagagtgtcagatattgggcgcagtcgg

SEQ ID NO: 191112 - DNA, 30 bp, Artificial Sequence
  Synthetic oligonucleotide
tcatctactttacaattagttatcagtcgg

SEQ ID NO: 191113 - DNA, 30 bp, Artificial Sequence
  Synthetic oligonucleotide
gtgttcgcgactgatcttatatggagtcgg

SEQ ID NO: 191114 - DNA, 30 bp, Artificial Sequence
  Synthetic oligonucleotide
aacgtttcggttgttaagctcgatagtcgg

SEQ ID NO: 191115 - DNA, 30 bp, Artificial Sequence
  Synthetic oligonucleotide
tagtggatagcaggtgctggcgctagtcgg

SEQ ID NO: 191116 - DNA, 30 bp, Artificial Sequence
  Synthetic oligonucleotide
actcgtaaagctttaagcccagttagtcgg

SEQ ID NO: 191117 - DNA, 30 bp, Artificial Sequence
  Synthetic oligonucleotide
cgggggcattgggcggagcaagaacgtcgg

SEQ ID NO: 191118 - DNA, 30 bp, Artificial Sequence
  Synthetic oligonucleotide
ttcgcccagtcgtaggggagtttccgtcgg

SEQ ID NO: 191119 - DNA, 30 bp, Artificial Sequence
  Synthetic oligonucleotide
cgctcttcgaggcgaaggatgatgcgtcgg

SEQ ID NO: 191120 - DNA, 30 bp, Artificial Sequence
  Synthetic oligonucleotide
aaggggtctaagcagatgtatattcgtcgg

SEQ ID NO: 191121 - DNA, 30 bp, Artificial Sequence
  Synthetic oligonucleotide
gtactgttccaagatgcaggtatgggtcgg

SEQ ID NO: 191122 - DNA, 30 bp, Artificial Sequence
  Synthetic oligonucleotide
ctacgtaccaattggggtaccgatggtcgg

SEQ ID NO: 191123 - DNA, 30 bp, Artificial Sequence
  Synthetic oligonucleotide
gtaagcagagttaaagatacatctggtcgg

SEQ ID NO: 191124 - DNA, 30 bp, Artificial Sequence
  Synthetic oligonucleotide
gatccctgcctcgctataaatacatgtcgg

SEQ ID NO: 191125 - DNA, 30 bp, Artificial Sequence
  Synthetic oligonucleotide
aacccactagggcgtcttggagcctgtcgg

SEQ ID NO: 191126 - DNA, 30 bp, Artificial Sequence
  Synthetic oligonucleotide
aaccagcgttgcgtcggggctatgtgtcgg

SEQ ID NO: 191127 - DNA, 30 bp, Artificial Sequence
  Synthetic oligonucleotide
tataggcttagagcatacgttccttgtcgg

SEQ ID NO: 191128 - DNA, 30 bp, Artificial Sequence
  Synthetic oligonucleotide
cagaagtacaacacggtcgatgtaattcgg

SEQ ID NO: 191129 - DNA, 30 bp, Artificial Sequence
  Synthetic oligonucleotide
attaaatatcctgagtcaaacgggattcgg

SEQ ID NO: 191130 - DNA, 30 bp, Artificial Sequence
  Synthetic oligonucleotide
cggcaaaggtcgtagggggagcgtattcgg

SEQ ID NO: 191131 - DNA, 30 bp, Artificial Sequence
  Synthetic oligonucleotide
ctaggggagtattgctcgacttaccttcgg

SEQ ID NO: 191132 - DNA, 30 bp, Artificial Sequence
  Synthetic oligonucleotide
cattctagacctccggcgatcagccttcgg

SEQ ID NO: 191133 - DNA, 30 bp, Artificial Sequence
  Synthetic oligonucleotide
agggagcgtccactcgcatagcatcttcgg

SEQ ID NO: 191134 - DNA, 30 bp, Artificial Sequence
  Synthetic oligonucleotide
gactagagggcagtaacacagacagttcgg

SEQ ID NO: 191135 - DNA, 30 bp, Artificial Sequence
  Synthetic oligonucleotide
atcagaagcttataagagagacgagttcgg

SEQ ID NO: 191136 - DNA, 30 bp, Artificial Sequence
  Synthetic oligonucleotide
ctccatgaggcaaaacccaccatagttcgg

SEQ ID NO: 191137 - DNA, 30 bp, Artificial Sequence
  Synthetic oligonucleotide
tcctaagttaacaggcaaaggcgatttcgg

SEQ ID NO: 191138 - DNA, 30 bp, Artificial Sequence
  Synthetic oligonucleotide
tccaagttcatgtgtagtcctgcctttcgg

SEQ ID NO: 191139 - DNA, 30 bp, Artificial Sequence
  Synthetic oligonucleotide
aggagatgacgtctgacggtgaattttcgg

SEQ ID NO: 191140 - DNA, 30 bp, Artificial Sequence
  Synthetic oligonucleotide
acctctgaaaagaagattcatctaaaaggg

SEQ ID NO: 191141 - DNA, 30 bp, Artificial Sequence
  Synthetic oligonucleotide
ggtagccgtcaatgcgctactcacaaaggg

SEQ ID NO: 191142 - DNA, 30 bp, Artificial Sequence
  Synthetic oligonucleotide
cttgcataaacagtcagaccagtcaaaggg

SEQ ID NO: 191143 - DNA, 30 bp, Artificial Sequence
  Synthetic oligonucleotide
atctagtgccatgttacggaaaggaaaggg

SEQ ID NO: 191144 - DNA, 30 bp, Artificial Sequence
  Synthetic oligonucleotide
cgatcataaggcaacaatactaggaaaggg

SEQ ID NO: 191145 - DNA, 30 bp, Artificial Sequence
  Synthetic oligonucleotide
cactgtgtttagggtcgatttatgaaaggg

SEQ ID NO: 191146 - DNA, 30 bp, Artificial Sequence
  Synthetic oligonucleotide
tcttgcgaaagtgtgtcagtcgtgaaaggg

SEQ ID NO: 191147 - DNA, 30 bp, Artificial Sequence
  Synthetic oligonucleotide
tactaaatcccgatgctctccgataaaggg

SEQ ID NO: 191148 - DNA, 30 bp, Artificial Sequence
  Synthetic oligonucleotide
ctgcccttctatttctccacggataaaggg

SEQ ID NO: 191149 - DNA, 30 bp, Artificial Sequence
  Synthetic oligonucleotide
tgctatgatgggttaggaaaacctaaaggg

SEQ ID NO: 191150 - DNA, 30 bp, Artificial Sequence
  Synthetic oligonucleotide
tgttgaggacgcgtgagagctagacaaggg

SEQ ID NO: 191151 - DNA, 30 bp, Artificial Sequence
  Synthetic oligonucleotide
accagatatatgggtagggcacgacaaggg

SEQ ID NO: 191152 - DNA, 30 bp, Artificial Sequence
  Synthetic oligonucleotide
atccgaagtagaaggtaggtcaggcaaggg

SEQ ID NO: 191153 - DNA, 30 bp, Artificial Sequence
  Synthetic oligonucleotide
atattagggttaatgtagcataatcaaggg

SEQ ID NO: 191154 - DNA, 30 bp, Artificial Sequence
  Synthetic oligonucleotide
gcgggatcgagttcgtgtgagacagaaggg

SEQ ID NO: 191155 - DNA, 30 bp, Artificial Sequence
  Synthetic oligonucleotide
gagggtagcgatagatacctgcatgaaggg

SEQ ID NO: 191156 - DNA, 30 bp, Artificial Sequence
  Synthetic oligonucleotide
ttagatatgaccgtttacgagattgaaggg

SEQ ID NO: 191157 - DNA, 30 bp, Artificial Sequence
  Synthetic oligonucleotide
ggccacgtcaaggtgcatgggattgaaggg

SEQ ID NO: 191158 - DNA, 30 bp, Artificial Sequence
  Synthetic oligonucleotide
ggtctcaggtaaaagtggtgggaataaggg

SEQ ID NO: 191159 - DNA, 30 bp, Artificial Sequence
  Synthetic oligonucleotide
gcggcttggcagggaaccagtgaataaggg

SEQ ID NO: 191160 - DNA, 30 bp, Artificial Sequence
  Synthetic oligonucleotide
ccacggggtgctgctagccatttataaggg

SEQ ID NO: 191161 - DNA, 30 bp, Artificial Sequence
  Synthetic oligonucleotide
cgtggatttactgaggcaatttggtaaggg

SEQ ID NO: 191162 - DNA, 30 bp, Artificial Sequence
  Synthetic oligonucleotide
ccggcgatgctactgaaatacaattaaggg

SEQ ID NO: 191163 - DNA, 30 bp, Artificial Sequence
  Synthetic oligonucleotide
gagtatatctcaacacgaacccgttaaggg

SEQ ID NO: 191164 - DNA, 30 bp, Artificial Sequence
  Synthetic oligonucleotide
acgagcacgctatcttcgacccgaacaggg

SEQ ID NO: 191165 - DNA, 30 bp, Artificial Sequence
  Synthetic oligonucleotide
aatgttactaattggtacaccatgacaggg

SEQ ID NO: 191166 - DNA, 30 bp, Artificial Sequence
  Synthetic oligonucleotide
tacgctaccagtctgcatttcctgacaggg

SEQ ID NO: 191167 - DNA, 30 bp, Artificial Sequence
  Synthetic oligonucleotide
acacactttaggcttgttactagtacaggg

SEQ ID NO: 191168 - DNA, 30 bp, Artificial Sequence
  Synthetic oligonucleotide
acctcgtgttaatacagcgggtgcccaggg

SEQ ID NO: 191169 - DNA, 30 bp, Artificial Sequence
  Synthetic oligonucleotide
attgcgcgactcatagcatacgccgcaggg

SEQ ID NO: 191170 - DNA, 30 bp, Artificial Sequence
  Synthetic oligonucleotide
ctggtttaacaagatctcatctgcgcaggg

SEQ ID NO: 191171 - DNA, 30 bp, Artificial Sequence
  Synthetic oligonucleotide
taatacgtgttatagagtcgatcggcaggg

SEQ ID NO: 191172 - DNA, 30 bp, Artificial Sequence
  Synthetic oligonucleotide
tcgcttcaatgatcgctaccttttgcaggg

SEQ ID NO: 191173 - DNA, 30 bp, Artificial Sequence
  Synthetic oligonucleotide
aaattaagcacaactttaggagaatcaggg

SEQ ID NO: 191174 - DNA, 30 bp, Artificial Sequence
  Synthetic oligonucleotide
ttaaaacggacatcaaactggttatcaggg

SEQ ID NO: 191175 - DNA, 30 bp, Artificial Sequence
  Synthetic oligonucleotide
cacctgtagaccgacagggttggctcaggg

SEQ ID NO: 191176 - DNA, 30 bp, Artificial Sequence
  Synthetic oligonucleotide
gcagtatgataccgcctcgtagtgtcaggg

SEQ ID NO: 191177 - DNA, 30 bp, Artificial Sequence
  Synthetic oligonucleotide
ttctcgaatataagtacagcgccaagaggg

SEQ ID NO: 191178 - DNA, 30 bp, Artificial Sequence
  Synthetic oligonucleotide
gcagtagtatctcttgagttatgaagaggg

SEQ ID NO: 191179 - DNA, 30 bp, Artificial Sequence
  Synthetic oligonucleotide
tgtccctggtgattaaaagaagccagaggg

SEQ ID NO: 191180 - DNA, 30 bp, Artificial Sequence
  Synthetic oligonucleotide
cactcctataatatcgctatctcgagaggg

SEQ ID NO: 191181 - DNA, 30 bp, Artificial Sequence
  Synthetic oligonucleotide
tgatacagaaattaccggtgggtacgaggg

SEQ ID NO: 191182 - DNA, 30 bp, Artificial Sequence
  Synthetic oligonucleotide
acccgcaattcatatctgcacgtccgaggg

SEQ ID NO: 191183 - DNA, 30 bp, Artificial Sequence
  Synthetic oligonucleotide
aaattgcataattaaatacagaagcgaggg

SEQ ID NO: 191184 - DNA, 30 bp, Artificial Sequence
  Synthetic oligonucleotide
tgggttagtagggtcgatagagcgcgaggg

SEQ ID NO: 191185 - DNA, 30 bp, Artificial Sequence
  Synthetic oligonucleotide
ggtaaaaaggtcttgtctacggttcgaggg

SEQ ID NO: 191186 - DNA, 30 bp, Artificial Sequence
  Synthetic oligonucleotide
tgccctagacggctacaactgaaaggaggg

SEQ ID NO: 191187 - DNA, 30 bp, Artificial Sequence
  Synthetic oligonucleotide
ggtcacgactatgcacacgggtgaggaggg

SEQ ID NO: 191188 - DNA, 30 bp, Artificial Sequence
  Synthetic oligonucleotide
caatgttattgaccatggcgctccggaggg

SEQ ID NO: 191189 - DNA, 30 bp, Artificial Sequence
  Synthetic oligonucleotide
gagtataagaagcttaagacgatcggaggg

SEQ ID NO: 191190 - DNA, 30 bp, Artificial Sequence
  Synthetic oligonucleotide
ggtgcggcgcgattgaggagacatggaggg

SEQ ID NO: 191191 - DNA, 30 bp, Artificial Sequence
  Synthetic oligonucleotide
tgggaggctcgtagggagtgagttggaggg

SEQ ID NO: 191192 - DNA, 30 bp, Artificial Sequence
  Synthetic oligonucleotide
gagaaatacctatgtcaacgtacatgaggg

SEQ ID NO: 191193 - DNA, 30 bp, Artificial Sequence
  Synthetic oligonucleotide
acatgacacgcgtaaatcttctcatgaggg

SEQ ID NO: 191194 - DNA, 30 bp, Artificial Sequence
  Synthetic oligonucleotide
tcccaacgaagcacgatacgcaattgaggg

SEQ ID NO: 191195 - DNA, 30 bp, Artificial Sequence
  Synthetic oligonucleotide
gggaccggggataaatatttccattgaggg

SEQ ID NO: 191196 - DNA, 30 bp, Artificial Sequence
  Synthetic oligonucleotide
tggtgcatgggtatttaaaggacttgaggg

SEQ ID NO: 191197 - DNA, 30 bp, Artificial Sequence
  Synthetic oligonucleotide
ggtaggatgaacccggaagccgcaataggg

SEQ ID NO: 191198 - DNA, 30 bp, Artificial Sequence
  Synthetic oligonucleotide
attggattgccgatcggtgcactaataggg

SEQ ID NO: 191199 - DNA, 30 bp, Artificial Sequence
  Synthetic oligonucleotide
tagactatgagtgcccgtcttggcataggg

SEQ ID NO: 191200 - DNA, 30 bp, Artificial Sequence
  Synthetic oligonucleotide
aggtttttgggaggtgagcgtgggataggg

SEQ ID NO: 191201 - DNA, 30 bp, Artificial Sequence
  Synthetic oligonucleotide
agccggcgggcaaggggatgagtgataggg

SEQ ID NO: 191202 - DNA, 30 bp, Artificial Sequence
  Synthetic oligonucleotide
gcgaattcatagagcgtgcggcgtataggg

SEQ ID NO: 191203 - DNA, 30 bp, Artificial Sequence
  Synthetic oligonucleotide
gattatgcttgtttgtgagcgtacctaggg

SEQ ID NO: 191204 - DNA, 30 bp, Artificial Sequence
  Synthetic oligonucleotide
gtgcccagcttgctcctgtttgggctaggg

SEQ ID NO: 191205 - DNA, 30 bp, Artificial Sequence
  Synthetic oligonucleotide
ttctcgtaacttttacaatacggtctaggg

SEQ ID NO: 191206 - DNA, 30 bp, Artificial Sequence
  Synthetic oligonucleotide
tgagtggaatcggctgtgccaaaagtaggg

SEQ ID NO: 191207 - DNA, 31 bp, Artificial Sequence
  Synthetic oligonucleotide
accataggtgcgatacgcgagagtagtaggg

SEQ ID NO: 191208 - DNA, 30 bp, Artificial Sequence
  Synthetic oligonucleotide
tacgggctgcctttagagatccacgtaggg

SEQ ID NO: 191209 - DNA, 30 bp, Artificial Sequence
  Synthetic oligonucleotide
tcccatacggaacagtcccatgaggtaggg

SEQ ID NO: 191210 - DNA, 30 bp, Artificial Sequence
  Synthetic oligonucleotide
ttatgtaaaacgataccttaaggtgtaggg

SEQ ID NO: 191211 - DNA, 31 bp, Artificial Sequence
  Synthetic oligonucleotide
tgggatcactaaatacggttgcggtgtaggg

SEQ ID NO: 191212 - DNA, 30 bp, Artificial Sequence
  Synthetic oligonucleotide
gccccgcgaacgagtcctcttggtgtaggg

SEQ ID NO: 191213 - DNA, 30 bp, Artificial Sequence
  Synthetic oligonucleotide
tgggtttcgtcgtgtaattgcccgttaggg

SEQ ID NO: 191214 - DNA, 30 bp, Artificial Sequence
  Synthetic oligonucleotide
ggacaaagatatcattttaagaatttaggg

SEQ ID NO: 191215 - DNA, 30 bp, Artificial Sequence
  Synthetic oligonucleotide
agccccatttctacgttagtcctaaacggg

SEQ ID NO: 191216 - DNA, 30 bp, Artificial Sequence
  Synthetic oligonucleotide
cgatctcagagttgagcaacgatcaacggg

SEQ ID NO: 191217 - DNA, 30 bp, Artificial Sequence
  Synthetic oligonucleotide
atttcgtcctattggcgataggtcaacggg

SEQ ID NO: 191218 - DNA, 30 bp, Artificial Sequence
  Synthetic oligonucleotide
ctggatggacgcactgcttcattcaacggg

SEQ ID NO: 191219 - DNA, 30 bp, Artificial Sequence
  Synthetic oligonucleotide
gtcacttgaaaaaactggatctgtaacggg

SEQ ID NO: 191220 - DNA, 30 bp, Artificial Sequence
  Synthetic oligonucleotide
tagatatgtttaaaacgagtccaacacggg

SEQ ID NO: 191221 - DNA, 30 bp, Artificial Sequence
  Synthetic oligonucleotide
ggatattcgtgctaagagactgaacacggg

SEQ ID NO: 191222 - DNA, 30 bp, Artificial Sequence
  Synthetic oligonucleotide
atgacgttcaggcccagcgaagtccacggg

SEQ ID NO: 191223 - DNA, 30 bp, Artificial Sequence
  Synthetic oligonucleotide
aggagtggccttatggctcgtacgcacggg

SEQ ID NO: 191224 - DNA, 30 bp, Artificial Sequence
  Synthetic oligonucleotide
ggataacgtaagaggtccactgctcacggg

SEQ ID NO: 191225 - DNA, 30 bp, Artificial Sequence
  Synthetic oligonucleotide
tccgattcaaaggcagatagcacagacggg

SEQ ID NO: 191226 - DNA, 30 bp, Artificial Sequence
  Synthetic oligonucleotide
ggttggtgtcaaagagatatgacagacggg

SEQ ID NO: 191227 - DNA, 30 bp, Artificial Sequence
  Synthetic oligonucleotide
aaaccatccccacgttaccattaggacggg

SEQ ID NO: 191228 - DNA, 30 bp, Artificial Sequence
  Synthetic oligonucleotide
gttcagaacgtgaatgtggaaacggacggg

SEQ ID NO: 191229 - DNA, 30 bp, Artificial Sequence
  Synthetic oligonucleotide
tacactcaaaatatggcccacccggacggg

SEQ ID NO: 191230 - DNA, 30 bp, Artificial Sequence
  Synthetic oligonucleotide
ccaaatacaacttcagacttacgggacggg

SEQ ID NO: 191231 - DNA, 30 bp, Artificial Sequence
  Synthetic oligonucleotide
tcaactgccgttataggttagggatacggg

SEQ ID NO: 191232 - DNA, 30 bp, Artificial Sequence
  Synthetic oligonucleotide
taactcacaacctcaagacccggctacggg

SEQ ID NO: 191233 - DNA, 30 bp, Artificial Sequence
  Synthetic oligonucleotide
ttagaaaataataagccgcgtgcgtacggg

SEQ ID NO: 191234 - DNA, 30 bp, Artificial Sequence
  Synthetic oligonucleotide
gcctcgtcaaggtcctctataaggtacggg

SEQ ID NO: 191235 - DNA, 30 bp, Artificial Sequence
  Synthetic oligonucleotide
gggccatctgggcgtgatcctgtgtacggg

SEQ ID NO: 191236 - DNA, 30 bp, Artificial Sequence
  Synthetic oligonucleotide
cattgacagtcagtctccattgtttacggg

SEQ ID NO: 191237 - DNA, 30 bp, Artificial Sequence
  Synthetic oligonucleotide
tagttgaaccctatgtgagcggaaaccggg

SEQ ID NO: 191238 - DNA, 30 bp, Artificial Sequence
  Synthetic oligonucleotide
tatggagtacgacactaggtgccaaccggg

SEQ ID NO: 191239 - DNA, 30 bp, Artificial Sequence
  Synthetic oligonucleotide
cttaaaaagccgcgtcctaacataaccggg

SEQ ID NO: 191240 - DNA, 30 bp, Artificial Sequence
  Synthetic oligonucleotide
tccactttggaccgcggagcgtcccccggg

SEQ ID NO: 191241 - DNA, 30 bp, Artificial Sequence
  Synthetic oligonucleotide
taggtgatcaacccggcactgcgtcccggg

SEQ ID NO: 191242 - DNA, 30 bp, Artificial Sequence
  Synthetic oligonucleotide
ccttaatatgtttgcccgtggaaagccggg

SEQ ID NO: 191243 - DNA, 30 bp, Artificial Sequence
  Synthetic oligonucleotide
agataggtatcagttgtatcatacgccggg

SEQ ID NO: 191244 - DNA, 30 bp, Artificial Sequence
  Synthetic oligonucleotide
gcaaatcacggccgcgcagtgtatgccggg

SEQ ID NO: 191245 - DNA, 30 bp, Artificial Sequence
  Synthetic oligonucleotide
tccgacgtgcctggctataagtgatccggg

SEQ ID NO: 191246 - DNA, 30 bp, Artificial Sequence
  Synthetic oligonucleotide
aagaggtggaacaatccacgacgctccggg

SEQ ID NO: 191247 - DNA, 30 bp, Artificial Sequence
  Synthetic oligonucleotide
cccaagattaggcgcacggactattccggg

SEQ ID NO: 191248 - DNA, 30 bp, Artificial Sequence
  Synthetic oligonucleotide
gtggacatctgctaaacgtacaccagcggg

SEQ ID NO: 191249 - DNA, 30 bp, Artificial Sequence
  Synthetic oligonucleotide
tgatcagctcaacaccacttggtcagcggg

SEQ ID NO: 191250 - DNA, 30 bp, Artificial Sequence
  Synthetic oligonucleotide
agtgcatggaacgcaaacttgctgagcggg

SEQ ID NO: 191251 - DNA, 30 bp, Artificial Sequence
  Synthetic oligonucleotide
tgaactaaaccgcgtattatgcgccgcggg

SEQ ID NO: 191252 - DNA, 30 bp, Artificial Sequence
  Synthetic oligonucleotide
tgggaaaacctcgcatggaaataaggcggg

SEQ ID NO: 191253 - DNA, 30 bp, Artificial Sequence
  Synthetic oligonucleotide
aaagaggctcaattgcgagtattaggcggg

SEQ ID NO: 191254 - DNA, 31 bp, Artificial Sequence
  Synthetic oligonucleotide
tccacgccgaccaactatgttattaggcggg

SEQ ID NO: 191255 - DNA, 30 bp, Artificial Sequence
  Synthetic oligonucleotide
gttgaaatgaatcaaatagacacgggcggg

SEQ ID NO: 191256 - DNA, 30 bp, Artificial Sequence
  Synthetic oligonucleotide
agacgatacataagtctctaagttggcggg

SEQ ID NO: 191257 - DNA, 30 bp, Artificial Sequence
  Synthetic oligonucleotide
taatgcgtatgagacgactggggatgcggg

SEQ ID NO: 191258 - DNA, 30 bp, Artificial Sequence
  Synthetic oligonucleotide
ggcgagatgagcaatgccatccactgcggg

SEQ ID NO: 191259 - DNA, 30 bp, Artificial Sequence
  Synthetic oligonucleotide
gaatcctcgttagcaaaggggaagtgcggg

SEQ ID NO: 191260 - DNA, 30 bp, Artificial Sequence
  Synthetic oligonucleotide
ttgcgtgtctaacttaggatgcggtgcggg

SEQ ID NO: 191261 - DNA, 30 bp, Artificial Sequence
  Synthetic oligonucleotide
cgccccactgccagtaggaccccttgcggg

SEQ ID NO: 191262 - DNA, 30 bp, Artificial Sequence
  Synthetic oligonucleotide
ctaccgaccggtagaccattcccttgcggg

SEQ ID NO: 191263 - DNA, 30 bp, Artificial Sequence
  Synthetic oligonucleotide
aaggcgcaggccgattctgaacgttgcggg

SEQ ID NO: 191264 - DNA, 30 bp, Artificial Sequence
  Synthetic oligonucleotide
gcgggatctctacagtggcaaaacatcggg

SEQ ID NO: 191265 - DNA, 30 bp, Artificial Sequence
  Synthetic oligonucleotide
gaagaagccaggcttgtagttcacatcggg

SEQ ID NO: 191266 - DNA, 30 bp, Artificial Sequence
  Synthetic oligonucleotide
aaatcggttacacatgtgccttagatcggg

SEQ ID NO: 191267 - DNA, 30 bp, Artificial Sequence
  Synthetic oligonucleotide
ctgcgtgttcatgtggatctggtgatcggg

SEQ ID NO: 191268 - DNA, 30 bp, Artificial Sequence
  Synthetic oligonucleotide
tgtggggtagaaaagaatcgacatatcggg

SEQ ID NO: 191269 - DNA, 30 bp, Artificial Sequence
  Synthetic oligonucleotide
tgatcgtggctagggcgctgtcgtatcggg

SEQ ID NO: 191270 - DNA, 30 bp, Artificial Sequence
  Synthetic oligonucleotide
atagtctaacgcaatctaaaaagactcggg

SEQ ID NO: 191271 - DNA, 30 bp, Artificial Sequence
  Synthetic oligonucleotide
tagtgcactgctgcgtatatctgactcggg

SEQ ID NO: 191272 - DNA, 30 bp, Artificial Sequence
  Synthetic oligonucleotide
tagagaatcacacaacgtaacatactcggg

SEQ ID NO: 191273 - DNA, 30 bp, Artificial Sequence
  Synthetic oligonucleotide
gtcgcaggatctcatccagccaggctcggg

SEQ ID NO: 191274 - DNA, 30 bp, Artificial Sequence
  Synthetic oligonucleotide
cagacgaagttgggcttcatcaatctcggg

SEQ ID NO: 191275 - DNA, 30 bp, Artificial Sequence
  Synthetic oligonucleotide
tgttcagtccttacggaggttaatctcggg

SEQ ID NO: 191276 - DNA, 30 bp, Artificial Sequence
  Synthetic oligonucleotide
gaaacgtgtcacttggaccgcaacgtcggg

SEQ ID NO: 191277 - DNA, 30 bp, Artificial Sequence
  Synthetic oligonucleotide
gaattgacgtccttacagctatgattcggg

SEQ ID NO: 191278 - DNA, 30 bp, Artificial Sequence
  Synthetic oligonucleotide
atgtgacatcaggaagcaacgagcttcggg

SEQ ID NO: 191279 - DNA, 30 bp, Artificial Sequence
  Synthetic oligonucleotide
ggctaatagcttccaactgcattgttcggg

SEQ ID NO: 191280 - DNA, 30 bp, Artificial Sequence
  Synthetic oligonucleotide
ccgctgggagggttcagagctgttttcggg

SEQ ID NO: 191281 - DNA, 30 bp, Artificial Sequence
  Synthetic oligonucleotide
acgccacactagtacgaaagtataaagggg

SEQ ID NO: 191282 - DNA, 30 bp, Artificial Sequence
  Synthetic oligonucleotide
gcataataacgctagcgggcatacaagggg

SEQ ID NO: 191283 - DNA, 30 bp, Artificial Sequence
  Synthetic oligonucleotide
cgaatgtggaggtgcgcgagtgtcaagggg

SEQ ID NO: 191284 - DNA, 30 bp, Artificial Sequence
  Synthetic oligonucleotide
gctgaggtattgaacagcgacaataagggg

SEQ ID NO: 191285 - DNA, 30 bp, Artificial Sequence
  Synthetic oligonucleotide
gcataggctcaccgcgcatgaactaagggg

SEQ ID NO: 191286 - DNA, 30 bp, Artificial Sequence
  Synthetic oligonucleotide
aacctatggatgctttaggactttaagggg

SEQ ID NO: 191287 - DNA, 30 bp, Artificial Sequence
  Synthetic oligonucleotide
agagactgtgaccgccaactgaaacagggg

SEQ ID NO: 191288 - DNA, 30 bp, Artificial Sequence
  Synthetic oligonucleotide
ggatatcgatagattgaatttaaacagggg

SEQ ID NO: 191289 - DNA, 30 bp, Artificial Sequence
  Synthetic oligonucleotide
acagattgactattggccttagtccagggg

SEQ ID NO: 191290 - DNA, 30 bp, Artificial Sequence
  Synthetic oligonucleotide
gcaaattaacggctacaagatgcgcagggg

SEQ ID NO: 191291 - DNA, 30 bp, Artificial Sequence
  Synthetic oligonucleotide
gattcatgacttccgtccacaaactagggg

SEQ ID NO: 191292 - DNA, 30 bp, Artificial Sequence
  Synthetic oligonucleotide
ccggatctaggctgagcaaccgcctagggg

SEQ ID NO: 191293 - DNA, 30 bp, Artificial Sequence
  Synthetic oligonucleotide
ctagcctcggtaatgaatcgatggtagggg

SEQ ID NO: 191294 - DNA, 30 bp, Artificial Sequence
  Synthetic oligonucleotide
ccggatattcgattgccgacgtggtagggg

SEQ ID NO: 191295 - DNA, 30 bp, Artificial Sequence
  Synthetic oligonucleotide
tcaggcgtaccttatcccttaatgtagggg

SEQ ID NO: 191296 - DNA, 30 bp, Artificial Sequence
  Synthetic oligonucleotide
cttgatacctggactcggatgtgttagggg

SEQ ID NO: 191297 - DNA, 30 bp, Artificial Sequence
  Synthetic oligonucleotide
atatgaactccatttggtacagaaacgggg

SEQ ID NO: 191298 - DNA, 30 bp, Artificial Sequence
  Synthetic oligonucleotide
tatgtgattgggagtgcttagccaacgggg

SEQ ID NO: 191299 - DNA, 30 bp, Artificial Sequence
  Synthetic oligonucleotide
ttgtgccagtcgaccagttgtgcaacgggg

SEQ ID NO: 191300 - DNA, 30 bp, Artificial Sequence
  Synthetic oligonucleotide
caattccacgtctgtcgagtccacacgggg

SEQ ID NO: 191301 - DNA, 30 bp, Artificial Sequence
  Synthetic oligonucleotide
acgaggaaagattgacccctgcccacgggg

SEQ ID NO: 191302 - DNA, 30 bp, Artificial Sequence
  Synthetic oligonucleotide
agaccgcccgcaatcaccatacgcacgggg

SEQ ID NO: 191303 - DNA, 30 bp, Artificial Sequence
  Synthetic oligonucleotide
taaagcgtgagtataagtactcgcacgggg

SEQ ID NO: 191304 - DNA, 30 bp, Artificial Sequence
  Synthetic oligonucleotide
atgatcggctcgggcgacaaatagacgggg

SEQ ID NO: 191305 - DNA, 30 bp, Artificial Sequence
  Synthetic oligonucleotide
aagttaagccagaacactgcttggacgggg

SEQ ID NO: 191306 - DNA, 30 bp, Artificial Sequence
  Synthetic oligonucleotide
tgctgctatccgttggcgtggtcaccgggg

SEQ ID NO: 191307 - DNA, 30 bp, Artificial Sequence
  Synthetic oligonucleotide
agtgaagaccacagcgcgacccgaccgggg

SEQ ID NO: 191308 - DNA, 30 bp, Artificial Sequence
  Synthetic oligonucleotide
gcgcatagcactctggttcgaatcccgggg

SEQ ID NO: 191309 - DNA, 30 bp, Artificial Sequence
  Synthetic oligonucleotide
ccataaatcgatgaggctggagagccgggg

SEQ ID NO: 191310 - DNA, 30 bp, Artificial Sequence
  Synthetic oligonucleotide
tctcccatcataaagttagcgtaagcgggg

SEQ ID NO: 191311 - DNA, 30 bp, Artificial Sequence
  Synthetic oligonucleotide
atctcatccataggagattttggagcgggg

SEQ ID NO: 191312 - DNA, 30 bp, Artificial Sequence
  Synthetic oligonucleotide
cacaaaaaggaccgcaaacgcagcgcgggg

SEQ ID NO: 191313 - DNA, 30 bp, Artificial Sequence
  Synthetic oligonucleotide
ttgttctaggttcataatggtaaggcgggg

SEQ ID NO: 191314 - DNA, 30 bp, Artificial Sequence
  Synthetic oligonucleotide
atgctaccagctagtgcagatcatgcgggg

SEQ ID NO: 191315 - DNA, 30 bp, Artificial Sequence
  Synthetic oligonucleotide
ccattttggtgcagcgacggtgtatcgggg

SEQ ID NO: 191316 - DNA, 30 bp, Artificial Sequence
  Synthetic oligonucleotide
gaagcggactaagttattagaacctcgggg

SEQ ID NO: 191317 - DNA, 30 bp, Artificial Sequence
  Synthetic oligonucleotide
acagaacgcaacgagcaagacctgtcgggg

SEQ ID NO: 191318 - DNA, 30 bp, Artificial Sequence
  Synthetic oligonucleotide
cgggctattctcacataacaattttcgggg

SEQ ID NO: 191319 - DNA, 30 bp, Artificial Sequence
  Synthetic oligonucleotide
aggaaacgtactgggtgcacctcaaggggg

SEQ ID NO: 191320 - DNA, 30 bp, Artificial Sequence
  Synthetic oligonucleotide
aataagccaccttcctgggtgtgcaggggg

SEQ ID NO: 191321 - DNA, 30 bp, Artificial Sequence
  Synthetic oligonucleotide
ggaactagctcctagacacacaagaggggg

SEQ ID NO: 191322 - DNA, 30 bp, Artificial Sequence
  Synthetic oligonucleotide
caattccactattacagggcaagtaggggg

SEQ ID NO: 191323 - DNA, 30 bp, Artificial Sequence
  Synthetic oligonucleotide
tttcgtatggccagtgtgacgagtaggggg

SEQ ID NO: 191324 - DNA, 30 bp, Artificial Sequence
  Synthetic oligonucleotide
acgaaatcagatacacgtgcacgtaggggg

SEQ ID NO: 191325 - DNA, 30 bp, Artificial Sequence
  Synthetic oligonucleotide
actgtaggagggggtgctgcctgccggggg

SEQ ID NO: 191326 - DNA, 30 bp, Artificial Sequence
  Synthetic oligonucleotide
acaacaaagcgtcataagcttctccggggg

SEQ ID NO: 191327 - DNA, 30 bp, Artificial Sequence
  Synthetic oligonucleotide
cttgttaaggttgattgaatattccggggg

SEQ ID NO: 191328 - DNA, 30 bp, Artificial Sequence
  Synthetic oligonucleotide
acagcctggatcaagaataccttccggggg

SEQ ID NO: 191329 - DNA, 30 bp, Artificial Sequence
  Synthetic oligonucleotide
ggcgctagacgcgtcacgaatgcgcggggg

SEQ ID NO: 191330 - DNA, 30 bp, Artificial Sequence
  Synthetic oligonucleotide
gatcctggggcgagatcagttgttcggggg

SEQ ID NO: 191331 - DNA, 30 bp, Artificial Sequence
  Synthetic oligonucleotide
ccagcttctgggagtgttatcagagggggg

SEQ ID NO: 191332 - DNA, 30 bp, Artificial Sequence
  Synthetic oligonucleotide
caacattgaaagcctttgtctaccgggggg

SEQ ID NO: 191333 - DNA, 30 bp, Artificial Sequence
  Synthetic oligonucleotide
ggtaagcggaccaaaagacatcccgggggg

SEQ ID NO: 191334 - DNA, 30 bp, Artificial Sequence
  Synthetic oligonucleotide
agccggatagggggccacgggttcgggggg

SEQ ID NO: 191335 - DNA, 30 bp, Artificial Sequence
  Synthetic oligonucleotide
gcctgttgcagacaatgattcaaggggggg

SEQ ID NO: 191336 - DNA, 31 bp, Artificial Sequence
  Synthetic oligonucleotide
tataaggctttttaagccaaataaggggggg

SEQ ID NO: 191337 - DNA, 30 bp, Artificial Sequence
  Synthetic oligonucleotide
caccttatcggccgactaacgatggggggg

SEQ ID NO: 191338 - DNA, 30 bp, Artificial Sequence
  Synthetic oligonucleotide
aagctaagagtctgggtaaccaatgggggg

SEQ ID NO: 191339 - DNA, 30 bp, Artificial Sequence
  Synthetic oligonucleotide
cggattgggctcaggttcgagtatgggggg

SEQ ID NO: 191340 - DNA, 30 bp, Artificial Sequence
  Synthetic oligonucleotide
agataccaggtagccgaacgggcttggggg

SEQ ID NO: 191341 - DNA, 30 bp, Artificial Sequence
  Synthetic oligonucleotide
tgaaaggtcgcgcacgtatacggttggggg

SEQ ID NO: 191342 - DNA, 30 bp, Artificial Sequence
  Synthetic oligonucleotide
agatgcttcgggtctaaagtggtcatgggg

SEQ ID NO: 191343 - DNA, 30 bp, Artificial Sequence
  Synthetic oligonucleotide
ctcgaaagtcagagaacgttttagatgggg

SEQ ID NO: 191344 - DNA, 30 bp, Artificial Sequence
  Synthetic oligonucleotide
gtcttaggtgaagagttgcttactatgggg

SEQ ID NO: 191345 - DNA, 30 bp, Artificial Sequence
  Synthetic oligonucleotide
atgattgtagacggaagtggcattatgggg

SEQ ID NO: 191346 - DNA, 30 bp, Artificial Sequence
  Synthetic oligonucleotide
agagtttgccctgcggagcaggcactgggg

SEQ ID NO: 191347 - DNA, 31 bp, Artificial Sequence
  Synthetic oligonucleotide
tccactaacttgaacggaggtgaacctgggg

SEQ ID NO: 191348 - DNA, 30 bp, Artificial Sequence
  Synthetic oligonucleotide
gcgctcacacatccgttcaaagtcctgggg

SEQ ID NO: 191349 - DNA, 30 bp, Artificial Sequence
  Synthetic oligonucleotide
agcctcaaaacccatcgtggcttcctgggg

SEQ ID NO: 191350 - DNA, 30 bp, Artificial Sequence
  Synthetic oligonucleotide
cctaatcaaggcctcaggtgagagctgggg

SEQ ID NO: 191351 - DNA, 30 bp, Artificial Sequence
  Synthetic oligonucleotide
agcgctgagagtttacagttaacgctgggg

SEQ ID NO: 191352 - DNA, 30 bp, Artificial Sequence
  Synthetic oligonucleotide
tcgtccatcattaggaggccattgctgggg

SEQ ID NO: 191353 - DNA, 30 bp, Artificial Sequence
  Synthetic oligonucleotide
ggggtcaggttacaagatgtagctctgggg

SEQ ID NO: 191354 - DNA, 30 bp, Artificial Sequence
  Synthetic oligonucleotide
aaaaggtcagcacttcgggggtcagtgggg

SEQ ID NO: 191355 - DNA, 30 bp, Artificial Sequence
  Synthetic oligonucleotide
tccaggtgcattggaaggtcaaacgtgggg

SEQ ID NO: 191356 - DNA, 30 bp, Artificial Sequence
  Synthetic oligonucleotide
tggcggatgcacttccgaaaggtcgtgggg

SEQ ID NO: 191357 - DNA, 30 bp, Artificial Sequence
  Synthetic oligonucleotide
taactgcatccgacagccatgttcgtgggg

SEQ ID NO: 191358 - DNA, 30 bp, Artificial Sequence
  Synthetic oligonucleotide
gccattaattcgatcgtaagacaggtgggg

SEQ ID NO: 191359 - DNA, 30 bp, Artificial Sequence
  Synthetic oligonucleotide
ctaacaatccggaaacgcgaaggggtgggg

SEQ ID NO: 191360 - DNA, 30 bp, Artificial Sequence
  Synthetic oligonucleotide
tcacgaggcttaatcttttgtgatgtgggg

SEQ ID NO: 191361 - DNA, 30 bp, Artificial Sequence
  Synthetic oligonucleotide
caactcgacaatgacctcacgtccttgggg

SEQ ID NO: 191362 - DNA, 30 bp, Artificial Sequence
  Synthetic oligonucleotide
aagaatacgtggcgggcctagtagttgggg

SEQ ID NO: 191363 - DNA, 30 bp, Artificial Sequence
  Synthetic oligonucleotide
agcaaggcagttcttgttgaaccgttgggg

SEQ ID NO: 191364 - DNA, 30 bp, Artificial Sequence
  Synthetic oligonucleotide
atatgactacggatgatgatcattttgggg

SEQ ID NO: 191365 - DNA, 31 bp, Artificial Sequence
  Synthetic oligonucleotide
cacggaggcgaaaagggtcaagcttttgggg

SEQ ID NO: 191366 - DNA, 30 bp, Artificial Sequence
  Synthetic oligonucleotide
cggtatgcgttttgcgtatcaccaaatggg

SEQ ID NO: 191367 - DNA, 30 bp, Artificial Sequence
  Synthetic oligonucleotide
ccaactcggaatgtgcagagctccaatggg

SEQ ID NO: 191368 - DNA, 30 bp, Artificial Sequence
  Synthetic oligonucleotide
gtcggctggccagttgatcctctcaatggg

SEQ ID NO: 191369 - DNA, 30 bp, Artificial Sequence
  Synthetic oligonucleotide
tactagggaatggtggcacctgtcaatggg

SEQ ID NO: 191370 - DNA, 30 bp, Artificial Sequence
  Synthetic oligonucleotide
ttaggcagtgacgaaatgggcttcaatggg

SEQ ID NO: 191371 - DNA, 30 bp, Artificial Sequence
  Synthetic oligonucleotide
tccgcattgcgtcacctgcaaaggaatggg

SEQ ID NO: 191372 - DNA, 30 bp, Artificial Sequence
  Synthetic oligonucleotide
tctcaaaggggcgagaacggggtgaatggg

SEQ ID NO: 191373 - DNA, 30 bp, Artificial Sequence
  Synthetic oligonucleotide
ctgaagtttaaatcttaccgagctaatggg

SEQ ID NO: 191374 - DNA, 30 bp, Artificial Sequence
  Synthetic oligonucleotide
gagtaggatatctgcactgaacaacatggg

SEQ ID NO: 191375 - DNA, 30 bp, Artificial Sequence
  Synthetic oligonucleotide
tacacaggcttttccgagcttgcacatggg

SEQ ID NO: 191376 - DNA, 30 bp, Artificial Sequence
  Synthetic oligonucleotide
tgcgggatccaagtgtcatgaggccatggg

SEQ ID NO: 191377 - DNA, 30 bp, Artificial Sequence
  Synthetic oligonucleotide
gtactttgcgtggaacggcgctcagatggg

SEQ ID NO: 191378 - DNA, 30 bp, Artificial Sequence
  Synthetic oligonucleotide
atggcacaatctgcctgattaatagatggg

SEQ ID NO: 191379 - DNA, 30 bp, Artificial Sequence
  Synthetic oligonucleotide
attcacaagcactggagtctttatgatggg

SEQ ID NO: 191380 - DNA, 30 bp, Artificial Sequence
  Synthetic oligonucleotide
tatgccgcttgcggaacagtaaaatatggg

SEQ ID NO: 191381 - DNA, 30 bp, Artificial Sequence
  Synthetic oligonucleotide
taggttcggatacaggcatgcaaatatggg

SEQ ID NO: 191382 - DNA, 30 bp, Artificial Sequence
  Synthetic oligonucleotide
aacacgaaataggagacgtaaacctatggg

SEQ ID NO: 191383 - DNA, 30 bp, Artificial Sequence
  Synthetic oligonucleotide
tggttaagtaactgttatccagtttatggg

SEQ ID NO: 191384 - DNA, 30 bp, Artificial Sequence
  Synthetic oligonucleotide
agtggctctcctcgagaagtcaacactggg

SEQ ID NO: 191385 - DNA, 30 bp, Artificial Sequence
  Synthetic oligonucleotide
tccggcttcgaacggggaagcgtcactggg

SEQ ID NO: 191386 - DNA, 30 bp, Artificial Sequence
  Synthetic oligonucleotide
gactagtggaaaagtctcctctggactggg

SEQ ID NO: 191387 - DNA, 30 bp, Artificial Sequence
  Synthetic oligonucleotide
tctagctggtgatttcatacattgactggg

SEQ ID NO: 191388 - DNA, 30 bp, Artificial Sequence
  Synthetic oligonucleotide
cacgagtcttcgccgaaataccatactggg

SEQ ID NO: 191389 - DNA, 30 bp, Artificial Sequence
  Synthetic oligonucleotide
ggtctgtctgaatgcaagtttgatactggg

SEQ ID NO: 191390 - DNA, 30 bp, Artificial Sequence
  Synthetic oligonucleotide
atatgaagttctttcgaaatggctactggg

SEQ ID NO: 191391 - DNA, 30 bp, Artificial Sequence
  Synthetic oligonucleotide
agcgggctaaactctttgtcgggtactggg

SEQ ID NO: 191392 - DNA, 30 bp, Artificial Sequence
  Synthetic oligonucleotide
ctgtcggggacacaggcgaggtaacctggg

SEQ ID NO: 191393 - DNA, 30 bp, Artificial Sequence
  Synthetic oligonucleotide
acccgaagagaggcggtcgcatgtcctggg

SEQ ID NO: 191394 - DNA, 30 bp, Artificial Sequence
  Synthetic oligonucleotide
gccataggaactgttgtttattaagctggg

SEQ ID NO: 191395 - DNA, 30 bp, Artificial Sequence
  Synthetic oligonucleotide
agctccatgggtatgtcaacgaccgctggg

SEQ ID NO: 191396 - DNA, 30 bp, Artificial Sequence
  Synthetic oligonucleotide
ggcggctgccatcctataaagtcggctggg

SEQ ID NO: 191397 - DNA, 30 bp, Artificial Sequence
  Synthetic oligonucleotide
gatcatgtgctgcgaagagccggtgctggg

SEQ ID NO: 191398 - DNA, 30 bp, Artificial Sequence
  Synthetic oligonucleotide
gtacttttcaaagtttctctccaatctggg

SEQ ID NO: 191399 - DNA, 30 bp, Artificial Sequence
  Synthetic oligonucleotide
tttgttggaacttgcccatggtaatctggg

SEQ ID NO: 191400 - DNA, 30 bp, Artificial Sequence
  Synthetic oligonucleotide
caccggaagacaaaatacggaaactctggg

SEQ ID NO: 191401 - DNA, 30 bp, Artificial Sequence
  Synthetic oligonucleotide
cggttcttctaagagattcggtaaagtggg

SEQ ID NO: 191402 - DNA, 30 bp, Artificial Sequence
  Synthetic oligonucleotide
cacttgcgtgcgctgtggtagtctagtggg

SEQ ID NO: 191403 - DNA, 30 bp, Artificial Sequence
  Synthetic oligonucleotide
gatacgctccggtacggctagcgtagtggg

SEQ ID NO: 191404 - DNA, 30 bp, Artificial Sequence
  Synthetic oligonucleotide
taccgcataaataatacgagttgtagtggg

SEQ ID NO: 191405 - DNA, 30 bp, Artificial Sequence
  Synthetic oligonucleotide
aacgcgggttcaggtccgggaccacgtggg

SEQ ID NO: 191406 - DNA, 30 bp, Artificial Sequence
  Synthetic oligonucleotide
acccacaccatcgtaacgatccgccgtggg

SEQ ID NO: 191407 - DNA, 30 bp, Artificial Sequence
  Synthetic oligonucleotide
gcggttaggcagagcttgattggccgtggg

SEQ ID NO: 191408 - DNA, 30 bp, Artificial Sequence
  Synthetic oligonucleotide
gataaagtacgtccctccccggagcgtggg

SEQ ID NO: 191409 - DNA, 30 bp, Artificial Sequence
  Synthetic oligonucleotide
agcagtcctcgatctgcaagcacgcgtggg

SEQ ID NO: 191410 - DNA, 30 bp, Artificial Sequence
  Synthetic oligonucleotide
ctgcggagggcaaactccatcctaggtggg

SEQ ID NO: 191411 - DNA, 30 bp, Artificial Sequence
  Synthetic oligonucleotide
gtgaaagaatttgttagtctcgatggtggg

SEQ ID NO: 191412 - DNA, 30 bp, Artificial Sequence
  Synthetic oligonucleotide
agacggttcgttgatcgtacctgtggtggg

SEQ ID NO: 191413 - DNA, 30 bp, Artificial Sequence
  Synthetic oligonucleotide
gtctgagacgctttttggctgaaatgtggg

SEQ ID NO: 191414 - DNA, 30 bp, Artificial Sequence
  Synthetic oligonucleotide
cttctcagggctactgtgttaagatgtggg

SEQ ID NO: 191415 - DNA, 30 bp, Artificial Sequence
  Synthetic oligonucleotide
agactggcttatgcctaaacaggctgtggg

SEQ ID NO: 191416 - DNA, 30 bp, Artificial Sequence
  Synthetic oligonucleotide
aaaggagcgttaacatctagcctttgtggg

SEQ ID NO: 191417 - DNA, 30 bp, Artificial Sequence
  Synthetic oligonucleotide
cttcattcgtaataatcgaatacgattggg

SEQ ID NO: 191418 - DNA, 30 bp, Artificial Sequence
  Synthetic oligonucleotide
tgcctaactacaggagacggaaggattggg

SEQ ID NO: 191419 - DNA, 30 bp, Artificial Sequence
  Synthetic oligonucleotide
tggttgagtaaggagagtcgtatgattggg

SEQ ID NO: 191420 - DNA, 30 bp, Artificial Sequence
  Synthetic oligonucleotide
ggagtgtttaacgatcctagctgtattggg

SEQ ID NO: 191421 - DNA, 30 bp, Artificial Sequence
  Synthetic oligonucleotide
gcggcaattgggtcttgagttcttattggg

SEQ ID NO: 191422 - DNA, 30 bp, Artificial Sequence
  Synthetic oligonucleotide
cgtggggtgtccacacacgtgccacttggg

SEQ ID NO: 191423 - DNA, 30 bp, Artificial Sequence
  Synthetic oligonucleotide
catcaccgtgccgccttaagggtccttggg

SEQ ID NO: 191424 - DNA, 29 bp, Artificial Sequence
  Synthetic oligonucleotide
ccactaatcttagtgccaagacgcttggg

SEQ ID NO: 191425 - DNA, 30 bp, Artificial Sequence
  Synthetic oligonucleotide
ccacgttgtacacgcgaatcagtgcttggg

SEQ ID NO: 191426 - DNA, 30 bp, Artificial Sequence
  Synthetic oligonucleotide
cgtcttgccagggggaaaacctccgttggg

SEQ ID NO: 191427 - DNA, 30 bp, Artificial Sequence
  Synthetic oligonucleotide
agatggagttccaaaccaaaagatgttggg

SEQ ID NO: 191428 - DNA, 30 bp, Artificial Sequence
  Synthetic oligonucleotide
ggatcggccagagatctgtgttttgttggg

SEQ ID NO: 191429 - DNA, 30 bp, Artificial Sequence
  Synthetic oligonucleotide
agttaacgcaagttgctgacgcgatttggg

SEQ ID NO: 191430 - DNA, 30 bp, Artificial Sequence
  Synthetic oligonucleotide
acaggcgatccgctccgaattatatttggg

SEQ ID NO: 191431 - DNA, 30 bp, Artificial Sequence
  Synthetic oligonucleotide
ctacccgaaatctaggaggttggctttggg

SEQ ID NO: 191432 - DNA, 30 bp, Artificial Sequence
  Synthetic oligonucleotide
ttacgccactttattagcgacaggtttggg

SEQ ID NO: 191433 - DNA, 30 bp, Artificial Sequence
  Synthetic oligonucleotide
caacaactgtaagcgtggttaacttttggg

SEQ ID NO: 191434 - DNA, 30 bp, Artificial Sequence
  Synthetic oligonucleotide
aacggacaaaaaactaccgtaggttttggg

SEQ ID NO: 191435 - DNA, 30 bp, Artificial Sequence
  Synthetic oligonucleotide
gcaccctgatcgggtgagtgaacaaaatgg

SEQ ID NO: 191436 - DNA, 30 bp, Artificial Sequence
  Synthetic oligonucleotide
gtttacgctctcggccaaatggcaaaatgg

SEQ ID NO: 191437 - DNA, 30 bp, Artificial Sequence
  Synthetic oligonucleotide
tatgagatgtaagataatgctcgaaaatgg

SEQ ID NO: 191438 - DNA, 30 bp, Artificial Sequence
  Synthetic oligonucleotide
taacatgtagggttcagagtagagaaatgg

SEQ ID NO: 191439 - DNA, 30 bp, Artificial Sequence
  Synthetic oligonucleotide
atgttatgaggaacaggcatttggaaatgg

SEQ ID NO: 191440 - DNA, 30 bp, Artificial Sequence
  Synthetic oligonucleotide
gtaactgcggacttgcttccaaataaatgg

SEQ ID NO: 191441 - DNA, 30 bp, Artificial Sequence
  Synthetic oligonucleotide
agagaccacgtggccccccgatataaatgg

SEQ ID NO: 191442 - DNA, 30 bp, Artificial Sequence
  Synthetic oligonucleotide
agctgcagtcaataacagactggtaaatgg

SEQ ID NO: 191443 - DNA, 30 bp, Artificial Sequence
  Synthetic oligonucleotide
cagaactaacaaggcaccaggcttaaatgg

SEQ ID NO: 191444 - DNA, 30 bp, Artificial Sequence
  Synthetic oligonucleotide
cgacgcattttgttccattaaatacaatgg

SEQ ID NO: 191445 - DNA, 30 bp, Artificial Sequence
  Synthetic oligonucleotide
ctgcggccacatatgggaagcttacaatgg

SEQ ID NO: 191446 - DNA, 30 bp, Artificial Sequence
  Synthetic oligonucleotide
ggccaactagccctcaactgatgccaatgg

SEQ ID NO: 191447 - DNA, 30 bp, Artificial Sequence
  Synthetic oligonucleotide
tgccgattgaggacaagcacgtggcaatgg

SEQ ID NO: 191448 - DNA, 30 bp, Artificial Sequence
  Synthetic oligonucleotide
ggacacttggtactgaaaagccgagaatgg

SEQ ID NO: 191449 - DNA, 30 bp, Artificial Sequence
  Synthetic oligonucleotide
cccgctcgcgtgggcgatatagcggaatgg

SEQ ID NO: 191450 - DNA, 30 bp, Artificial Sequence
  Synthetic oligonucleotide
aaggatccaaatatgggaacaatggaatgg

SEQ ID NO: 191451 - DNA, 30 bp, Artificial Sequence
  Synthetic oligonucleotide
ggtgaagcgctactcctactactggaatgg

SEQ ID NO: 191452 - DNA, 30 bp, Artificial Sequence
  Synthetic oligonucleotide
gcagtcaacaccacagtctgattggaatgg

SEQ ID NO: 191453 - DNA, 30 bp, Artificial Sequence
  Synthetic oligonucleotide
caggaattcaaacaacaaaaagttgaatgg

SEQ ID NO: 191454 - DNA, 30 bp, Artificial Sequence
  Synthetic oligonucleotide
atacgacaactgcatatagacgttgaatgg

SEQ ID NO: 191455 - DNA, 30 bp, Artificial Sequence
  Synthetic oligonucleotide
cgatttatcattctatcctaattctaatgg

SEQ ID NO: 191456 - DNA, 30 bp, Artificial Sequence
  Synthetic oligonucleotide
tcgtctggggttagcttgacaatgtaatgg

SEQ ID NO: 191457 - DNA, 30 bp, Artificial Sequence
  Synthetic oligonucleotide
gtcttggtgcgctatggactcacaacatgg

SEQ ID NO: 191458 - DNA, 30 bp, Artificial Sequence
  Synthetic oligonucleotide
gatgcctagactttcaaagcatgaacatgg

SEQ ID NO: 191459 - DNA, 30 bp, Artificial Sequence
  Synthetic oligonucleotide
gcatctcaacatctcgccagtcacacatgg

SEQ ID NO: 191460 - DNA, 30 bp, Artificial Sequence
  Synthetic oligonucleotide
aggcgcaggaacggcgagtcctgcacatgg

SEQ ID NO: 191461 - DNA, 30 bp, Artificial Sequence
  Synthetic oligonucleotide
aaactcaattagactgttctaatgacatgg

SEQ ID NO: 191462 - DNA, 30 bp, Artificial Sequence
  Synthetic oligonucleotide
tcacaagagatgaatccaccgtatacatgg

SEQ ID NO: 191463 - DNA, 30 bp, Artificial Sequence
  Synthetic oligonucleotide
ccagaatatatgcgtaaagatgttacatgg

SEQ ID NO: 191464 - DNA, 30 bp, Artificial Sequence
  Synthetic oligonucleotide
ttcaatggagtttagctccaatcaccatgg

SEQ ID NO: 191465 - DNA, 31 bp, Artificial Sequence
  Synthetic oligonucleotide
atgagataaacattgcacacacataccatgg

SEQ ID NO: 191466 - DNA, 30 bp, Artificial Sequence
  Synthetic oligonucleotide
tgcatgtgtgctatgcgaccactcccatgg

SEQ ID NO: 191467 - DNA, 30 bp, Artificial Sequence
  Synthetic oligonucleotide
cagacaaacccctccgatacccatccatgg

SEQ ID NO: 191468 - DNA, 30 bp, Artificial Sequence
  Synthetic oligonucleotide
ctgacacttagttgaagcgccgatccatgg

SEQ ID NO: 191469 - DNA, 30 bp, Artificial Sequence
  Synthetic oligonucleotide
ccccggtcgaaagacccacatccagcatgg

SEQ ID NO: 191470 - DNA, 30 bp, Artificial Sequence
  Synthetic oligonucleotide
ttccgatataataaaaggtcactagcatgg

SEQ ID NO: 191471 - DNA, 30 bp, Artificial Sequence
  Synthetic oligonucleotide
ctaaagaaccttgggtctaggcacgcatgg

SEQ ID NO: 191472 - DNA, 30 bp, Artificial Sequence
  Synthetic oligonucleotide
gtcaacccaacagtaacccgattcgcatgg

SEQ ID NO: 191473 - DNA, 30 bp, Artificial Sequence
  Synthetic oligonucleotide
ttagggttagatgggagggtgacggcatgg

SEQ ID NO: 191474 - DNA, 30 bp, Artificial Sequence
  Synthetic oligonucleotide
gagcgcgtctggctccaattaggggcatgg

SEQ ID NO: 191475 - DNA, 30 bp, Artificial Sequence
  Synthetic oligonucleotide
ggttcatgaccggccaattgggaatcatgg

SEQ ID NO: 191476 - DNA, 30 bp, Artificial Sequence
  Synthetic oligonucleotide
tgttgcgcacgtggaatcgttagatcatgg

SEQ ID NO: 191477 - DNA, 30 bp, Artificial Sequence
  Synthetic oligonucleotide
aatgtagcattcgtaatggcaggatcatgg

SEQ ID NO: 191478 - DNA, 30 bp, Artificial Sequence
  Synthetic oligonucleotide
tcgtttcgacagcaaaacagcaactcatgg

SEQ ID NO: 191479 - DNA, 30 bp, Artificial Sequence
  Synthetic oligonucleotide
ttgacctgggcagtgtactgctactcatgg

SEQ ID NO: 191480 - DNA, 30 bp, Artificial Sequence
  Synthetic oligonucleotide
caatgaactagggtgggggggccctcatgg

SEQ ID NO: 191481 - DNA, 30 bp, Artificial Sequence
  Synthetic oligonucleotide
tattcgttaagagggaaataagggtcatgg

SEQ ID NO: 191482 - DNA, 30 bp, Artificial Sequence
  Synthetic oligonucleotide
caggaacccgacttgtccgacaaaagatgg

SEQ ID NO: 191483 - DNA, 30 bp, Artificial Sequence
  Synthetic oligonucleotide
gtactttactaagactcgcgtcaaagatgg

SEQ ID NO: 191484 - DNA, 30 bp, Artificial Sequence
  Synthetic oligonucleotide
gttactccagtctcccggctcgcaagatgg

SEQ ID NO: 191485 - DNA, 30 bp, Artificial Sequence
  Synthetic oligonucleotide
tgaatggtctagagccatataggaagatgg

SEQ ID NO: 191486 - DNA, 30 bp, Artificial Sequence
  Synthetic oligonucleotide
ctgaggtatgtttaatagtgtgcgagatgg

SEQ ID NO: 191487 - DNA, 30 bp, Artificial Sequence
  Synthetic oligonucleotide
agagtatattcgggaccaatagtacgatgg

SEQ ID NO: 191488 - DNA, 30 bp, Artificial Sequence
  Synthetic oligonucleotide
cttgaggaccaaggtccgttacgccgatgg

SEQ ID NO: 191489 - DNA, 30 bp, Artificial Sequence
  Synthetic oligonucleotide
ggcccatcattcacgtcacctcgtcgatgg

SEQ ID NO: 191490 - DNA, 30 bp, Artificial Sequence
  Synthetic oligonucleotide
aggacggaccgagacacatcaggcggatgg

SEQ ID NO: 191491 - DNA, 30 bp, Artificial Sequence
  Synthetic oligonucleotide
caatgcagggcggcggatgggatcggatgg

SEQ ID NO: 191492 - DNA, 30 bp, Artificial Sequence
  Synthetic oligonucleotide
attgacggaactcagggtgacattggatgg

SEQ ID NO: 191493 - DNA, 30 bp, Artificial Sequence
  Synthetic oligonucleotide
tgaaccggctgtattatgtcagttggatgg

SEQ ID NO: 191494 - DNA, 30 bp, Artificial Sequence
  Synthetic oligonucleotide
acggccgagtgcgagcctcactaatgatgg

SEQ ID NO: 191495 - DNA, 30 bp, Artificial Sequence
  Synthetic oligonucleotide
gagcactcaagattcagaaaatactgatgg

SEQ ID NO: 191496 - DNA, 30 bp, Artificial Sequence
  Synthetic oligonucleotide
tgccatacactttctttcatggtctgatgg

SEQ ID NO: 191497 - DNA, 30 bp, Artificial Sequence
  Synthetic oligonucleotide
gagctatgtaggttcctgccaagaatatgg

SEQ ID NO: 191498 - DNA, 30 bp, Artificial Sequence
  Synthetic oligonucleotide
tattgcgctagcatccagcgaatcatatgg

SEQ ID NO: 191499 - DNA, 30 bp, Artificial Sequence
  Synthetic oligonucleotide
agcaccccgcaaaataaagaggtcatatgg

SEQ ID NO: 191500 - DNA, 30 bp, Artificial Sequence
  Synthetic oligonucleotide
tggacgtgcgactgtcgtacatatatatgg

SEQ ID NO: 191501 - DNA, 30 bp, Artificial Sequence
  Synthetic oligonucleotide
cgagaccatactgcaggaatagctatatgg

SEQ ID NO: 191502 - DNA, 30 bp, Artificial Sequence
  Synthetic oligonucleotide
tgggcttcacaagggttttagtaactatgg

SEQ ID NO: 191503 - DNA, 30 bp, Artificial Sequence
  Synthetic oligonucleotide
ttaatgtgatcatcttggccgtacctatgg

SEQ ID NO: 191504 - DNA, 30 bp, Artificial Sequence
  Synthetic oligonucleotide
ttcgattaatgaactacatagtgtctatgg

SEQ ID NO: 191505 - DNA, 30 bp, Artificial Sequence
  Synthetic oligonucleotide
gaaaaggggagggtctgtaactcagtatgg

SEQ ID NO: 191506 - DNA, 30 bp, Artificial Sequence
  Synthetic oligonucleotide
gcattcctgagatgtatgcgcggagtatgg

SEQ ID NO: 191507 - DNA, 30 bp, Artificial Sequence
  Synthetic oligonucleotide
taaactgtaaagacgaggaggtgagtatgg

SEQ ID NO: 191508 - DNA, 30 bp, Artificial Sequence
  Synthetic oligonucleotide
acatgagtcttttcgctctaggtagtatgg

SEQ ID NO: 191509 - DNA, 30 bp, Artificial Sequence
  Synthetic oligonucleotide
actggaaaagtggacgcgtataaggtatgg

SEQ ID NO: 191510 - DNA, 30 bp, Artificial Sequence
  Synthetic oligonucleotide
ccaggtggctggttgggctctggggtatgg

SEQ ID NO: 191511 - DNA, 30 bp, Artificial Sequence
  Synthetic oligonucleotide
tctcgcgctcacgctgtacaatgggtatgg

SEQ ID NO: 191512 - DNA, 30 bp, Artificial Sequence
  Synthetic oligonucleotide
aactaattatttggccgatagactgtatgg

SEQ ID NO: 191513 - DNA, 30 bp, Artificial Sequence
  Synthetic oligonucleotide
aagtggaggaatactacaagatcattatgg

SEQ ID NO: 191514 - DNA, 30 bp, Artificial Sequence
  Synthetic oligonucleotide
gacctatcttgttaaggaagtgagttatgg

SEQ ID NO: 191515 - DNA, 30 bp, Artificial Sequence
  Synthetic oligonucleotide
taattatcttgcagtcttctggggttatgg

SEQ ID NO: 191516 - DNA, 29 bp, Artificial Sequence
  Synthetic oligonucleotide
taagcaatgtcaccgatgtagatttatgg

SEQ ID NO: 191517 - DNA, 30 bp, Artificial Sequence
  Synthetic oligonucleotide
cagccagcaagccattcacgatatttatgg

SEQ ID NO: 191518 - DNA, 30 bp, Artificial Sequence
  Synthetic oligonucleotide
atgacgagaacagtaacccagacaaactgg

SEQ ID NO: 191519 - DNA, 30 bp, Artificial Sequence
  Synthetic oligonucleotide
tgccttttgcttaaggtgcggttaaactgg

SEQ ID NO: 191520 - DNA, 30 bp, Artificial Sequence
  Synthetic oligonucleotide
atagcgttagcgttatgtttcgacaactgg

SEQ ID NO: 191521 - DNA, 30 bp, Artificial Sequence
  Synthetic oligonucleotide
tagtggcgcaactgtcctaaggacaactgg

SEQ ID NO: 191522 - DNA, 30 bp, Artificial Sequence
  Synthetic oligonucleotide
tggagcgggtacggcacaatgtgcaactgg

SEQ ID NO: 191523 - DNA, 32 bp, Artificial Sequence
  Synthetic oligonucleotide
tagaacctccgcaataatctactacgaactgg

SEQ ID NO: 191524 - DNA, 30 bp, Artificial Sequence
  Synthetic oligonucleotide
ctagtgattgcaattacagtcaataactgg

SEQ ID NO: 191525 - DNA, 30 bp, Artificial Sequence
  Synthetic oligonucleotide
tgcagtaggggccttaaatcgggtaactgg

SEQ ID NO: 191526 - DNA, 30 bp, Artificial Sequence
  Synthetic oligonucleotide
tagactatgaccgaaatctaagttaactgg

SEQ ID NO: 191527 - DNA, 30 bp, Artificial Sequence
  Synthetic oligonucleotide
taacactagctttgaatgctttaacactgg

SEQ ID NO: 191528 - DNA, 30 bp, Artificial Sequence
  Synthetic oligonucleotide
gcgcatatgtgtcccttcgcgaaccactgg

SEQ ID NO: 191529 - DNA, 30 bp, Artificial Sequence
  Synthetic oligonucleotide
cgggtcgcaagaaaccctgcgccgcactgg

SEQ ID NO: 191530 - DNA, 30 bp, Artificial Sequence
  Synthetic oligonucleotide
taacggcgggcgcccaaagcgggtcactgg

SEQ ID NO: 191531 - DNA, 30 bp, Artificial Sequence
  Synthetic oligonucleotide
gaatcggtaaaaatagtcagggttcactgg

SEQ ID NO: 191532 - DNA, 30 bp, Artificial Sequence
  Synthetic oligonucleotide
ccattaggtaaggaggaaacttacgactgg

SEQ ID NO: 191533 - DNA, 30 bp, Artificial Sequence
  Synthetic oligonucleotide
atacgccactgcaagtacggcaccgactgg

SEQ ID NO: 191534 - DNA, 30 bp, Artificial Sequence
  Synthetic oligonucleotide
gcaaccgtcttgacgtaaaggatcgactgg

SEQ ID NO: 191535 - DNA, 30 bp, Artificial Sequence
  Synthetic oligonucleotide
gtatccggtaattagtggatactcgactgg

SEQ ID NO: 191536 - DNA, 30 bp, Artificial Sequence
  Synthetic oligonucleotide
cacaaagatgtgaaatcctggttcgactgg

SEQ ID NO: 191537 - DNA, 30 bp, Artificial Sequence
  Synthetic oligonucleotide
gatcgtagggggatctgagccgtggactgg

SEQ ID NO: 191538 - DNA, 30 bp, Artificial Sequence
  Synthetic oligonucleotide
aaatggcaagcatccaagtgtcttgactgg

SEQ ID NO: 191539 - DNA, 30 bp, Artificial Sequence
  Synthetic oligonucleotide
atgcccgaatcggtcgaaactagctactgg

SEQ ID NO: 191540 - DNA, 30 bp, Artificial Sequence
  Synthetic oligonucleotide
catacaatggcggcacataataattactgg

SEQ ID NO: 191541 - DNA, 30 bp, Artificial Sequence
  Synthetic oligonucleotide
ttaaggcacatcggatttactacttactgg

SEQ ID NO: 191542 - DNA, 30 bp, Artificial Sequence
  Synthetic oligonucleotide
cggcgctaaaggagagagcggcgaacctgg

SEQ ID NO: 191543 - DNA, 30 bp, Artificial Sequence
  Synthetic oligonucleotide
ttaggcaagggtcctcgtgtggggacctgg

SEQ ID NO: 191544 - DNA, 30 bp, Artificial Sequence
  Synthetic oligonucleotide
atgacacgcgtacccggccatgaaccctgg

SEQ ID NO: 191545 - DNA, 30 bp, Artificial Sequence
  Synthetic oligonucleotide
ctaaatggggtgaacccagacactccctgg

SEQ ID NO: 191546 - DNA, 30 bp, Artificial Sequence
  Synthetic oligonucleotide
gagatagtaagctcagctattcttccctgg

SEQ ID NO: 191547 - DNA, 30 bp, Artificial Sequence
  Synthetic oligonucleotide
actagagctgtaacacacacgctagcctgg

SEQ ID NO: 191548 - DNA, 30 bp, Artificial Sequence
  Synthetic oligonucleotide
agtgaaacctcgataccaagcgtagcctgg

SEQ ID NO: 191549 - DNA, 30 bp, Artificial Sequence
  Synthetic oligonucleotide
atgtaggagtgggcaggaagcagggcctgg

SEQ ID NO: 191550 - DNA, 30 bp, Artificial Sequence
  Synthetic oligonucleotide
gttccgaacaatgctcgtccaaactcctgg

SEQ ID NO: 191551 - DNA, 30 bp, Artificial Sequence
  Synthetic oligonucleotide
gacaaattgacaggctaccggctaagctgg

SEQ ID NO: 191552 - DNA, 30 bp, Artificial Sequence
  Synthetic oligonucleotide
aagcaggcacgtattttagccacgagctgg

SEQ ID NO: 191553 - DNA, 30 bp, Artificial Sequence
  Synthetic oligonucleotide
taacggatattaatgggcacgggtagctgg

SEQ ID NO: 191554 - DNA, 30 bp, Artificial Sequence
  Synthetic oligonucleotide
ctttgtccactcaaaccgacagacggctgg

SEQ ID NO: 191555 - DNA, 30 bp, Artificial Sequence
  Synthetic oligonucleotide
gacattatgaacaactcggttcggggctgg

SEQ ID NO: 191556 - DNA, 30 bp, Artificial Sequence
  Synthetic oligonucleotide
ctgtaggtaaggtgtaatacttgtggctgg

SEQ ID NO: 191557 - DNA, 30 bp, Artificial Sequence
  Synthetic oligonucleotide
acggccgtcgtaattattaataaatgctgg

SEQ ID NO: 191558 - DNA, 30 bp, Artificial Sequence
  Synthetic oligonucleotide
tcgggggtatgtccggggcgtcgatgctgg

SEQ ID NO: 191559 - DNA, 30 bp, Artificial Sequence
  Synthetic oligonucleotide
attcgtggctcgtctgtggaggcctgctgg

SEQ ID NO: 191560 - DNA, 30 bp, Artificial Sequence
  Synthetic oligonucleotide
tgcgcattttagggccgcctacgctgctgg

SEQ ID NO: 191561 - DNA, 30 bp, Artificial Sequence
  Synthetic oligonucleotide
tgatctttcgagatggagtacgggtgctgg

SEQ ID NO: 191562 - DNA, 30 bp, Artificial Sequence
  Synthetic oligonucleotide
caatggatccaaacccggcatatttgctgg

SEQ ID NO: 191563 - DNA, 30 bp, Artificial Sequence
  Synthetic oligonucleotide
tgtacggcccgatactaacgtgtttgctgg

SEQ ID NO: 191564 - DNA, 30 bp, Artificial Sequence
  Synthetic oligonucleotide
aaagtgtacgttaaatcttggaaggtctgg

SEQ ID NO: 191565 - DNA, 30 bp, Artificial Sequence
  Synthetic oligonucleotide
taaagtctttagtcaataggcacggtctgg

SEQ ID NO: 191566 - DNA, 30 bp, Artificial Sequence
  Synthetic oligonucleotide
atccgaaatacttgtacccgtcttgtctgg

SEQ ID NO: 191567 - DNA, 30 bp, Artificial Sequence
  Synthetic oligonucleotide
ggatgttttgcgacgaagtagacattctgg

SEQ ID NO: 191568 - DNA, 30 bp, Artificial Sequence
  Synthetic oligonucleotide
actaccgtacccgcttcagagatcttctgg

SEQ ID NO: 191569 - DNA, 30 bp, Artificial Sequence
  Synthetic oligonucleotide
ttgggaagataaattggctgtgatttctgg

SEQ ID NO: 191570 - DNA, 30 bp, Artificial Sequence
  Synthetic oligonucleotide
tggtggaggagggttatatattgaaagtgg

SEQ ID NO: 191571 - DNA, 30 bp, Artificial Sequence
  Synthetic oligonucleotide
atcaggggtccatattggaacgtcaagtgg

SEQ ID NO: 191572 - DNA, 30 bp, Artificial Sequence
  Synthetic oligonucleotide
gtcagtgatttcgccagatataaacagtgg

SEQ ID NO: 191573 - DNA, 30 bp, Artificial Sequence
  Synthetic oligonucleotide
ggcggcttaccgcaaaaactggaccagtgg

SEQ ID NO: 191574 - DNA, 30 bp, Artificial Sequence
  Synthetic oligonucleotide
ccgtactgtaatacaagttagagccagtgg

SEQ ID NO: 191575 - DNA, 30 bp, Artificial Sequence
  Synthetic oligonucleotide
gcttgatggtgcttacccacgacagagtgg

SEQ ID NO: 191576 - DNA, 30 bp, Artificial Sequence
  Synthetic oligonucleotide
tgtagaaacatgctggtccgcaccgagtgg

SEQ ID NO: 191577 - DNA, 30 bp, Artificial Sequence
  Synthetic oligonucleotide
aggttcggtaagaacctacatcgtgagtgg

SEQ ID NO: 191578 - DNA, 30 bp, Artificial Sequence
  Synthetic oligonucleotide
ctttattgtgggacggtcacgaagtagtgg

SEQ ID NO: 191579 - DNA, 30 bp, Artificial Sequence
  Synthetic oligonucleotide
gattacgttaccagtgccaggccgtagtgg

SEQ ID NO: 191580 - DNA, 30 bp, Artificial Sequence
  Synthetic oligonucleotide
agttaggctatcattgctaatacttagtgg

SEQ ID NO: 191581 - DNA, 30 bp, Artificial Sequence
  Synthetic oligonucleotide
cagtatccgaaaaggattacgagttagtgg

SEQ ID NO: 191582 - DNA, 30 bp, Artificial Sequence
  Synthetic oligonucleotide
gatctgggtcggatcatttgggacacgtgg

SEQ ID NO: 191583 - DNA, 30 bp, Artificial Sequence
  Synthetic oligonucleotide
acctgtatgcaatacgaagggcggacgtgg

SEQ ID NO: 191584 - DNA, 30 bp, Artificial Sequence
  Synthetic oligonucleotide
gatatcagccgaatgtgatgcctaccgtgg

SEQ ID NO: 191585 - DNA, 30 bp, Artificial Sequence
  Synthetic oligonucleotide
tccgacaacaattcttgtaattcagcgtgg

SEQ ID NO: 191586 - DNA, 30 bp, Artificial Sequence
  Synthetic oligonucleotide
gtttcaactgccaaatagtgaggtgcgtgg

SEQ ID NO: 191587 - DNA, 30 bp, Artificial Sequence
  Synthetic oligonucleotide
ttaacgtgtaaagctacccagacatcgtgg

SEQ ID NO: 191588 - DNA, 30 bp, Artificial Sequence
  Synthetic oligonucleotide
gggactcaagtgttttctccgccgtcgtgg

SEQ ID NO: 191589 - DNA, 30 bp, Artificial Sequence
  Synthetic oligonucleotide
ggcctcgtttaaggcatcttaaattcgtgg

SEQ ID NO: 191590 - DNA, 30 bp, Artificial Sequence
  Synthetic oligonucleotide
tacaatgaactgatttcattggcaaggtgg

SEQ ID NO: 191591 - DNA, 30 bp, Artificial Sequence
  Synthetic oligonucleotide
attggtgaggacgtgtcctttgctaggtgg

SEQ ID NO: 191592 - DNA, 30 bp, Artificial Sequence
  Synthetic oligonucleotide
gcgagggcatcagtatttttcatacggtgg

SEQ ID NO: 191593 - DNA, 30 bp, Artificial Sequence
  Synthetic oligonucleotide
taagtgcagggggaccaataactacggtgg

SEQ ID NO: 191594 - DNA, 31 bp, Artificial Sequence
  Synthetic oligonucleotide
ggtatgaactatcgcaatcatcaagcggtgg

SEQ ID NO: 191595 - DNA, 30 bp, Artificial Sequence
  Synthetic oligonucleotide
agatttctttatgaagttaacacagggtgg

SEQ ID NO: 191596 - DNA, 30 bp, Artificial Sequence
  Synthetic oligonucleotide
ttcaagcccctgtagatcgatgtagggtgg

SEQ ID NO: 191597 - DNA, 30 bp, Artificial Sequence
  Synthetic oligonucleotide
gtcgactacccatgcgttgccaacgggtgg

SEQ ID NO: 191598 - DNA, 30 bp, Artificial Sequence
  Synthetic oligonucleotide
cttcggtgatgcgacaatactagcgggtgg

SEQ ID NO: 191599 - DNA, 30 bp, Artificial Sequence
  Synthetic oligonucleotide
attgtacaattcgttggttaaggcgggtgg

SEQ ID NO: 191600 - DNA, 30 bp, Artificial Sequence
  Synthetic oligonucleotide
caaataagtcagcacagtgggctcgggtgg

SEQ ID NO: 191601 - DNA, 30 bp, Artificial Sequence
  Synthetic oligonucleotide
cgccttaggacggaatagtccttggggtgg

SEQ ID NO: 191602 - DNA, 30 bp, Artificial Sequence
  Synthetic oligonucleotide
cggcttaccatggtctctaaatgtgggtgg

SEQ ID NO: 191603 - DNA, 30 bp, Artificial Sequence
  Synthetic oligonucleotide
gggggtagtggtaggtttataaaatggtgg

SEQ ID NO: 191604 - DNA, 30 bp, Artificial Sequence
  Synthetic oligonucleotide
gggtcaaattcggaagaagacccatggtgg

SEQ ID NO: 191605 - DNA, 30 bp, Artificial Sequence
  Synthetic oligonucleotide
ggagatatcgcttaacattccagatggtgg

SEQ ID NO: 191606 - DNA, 30 bp, Artificial Sequence
  Synthetic oligonucleotide
tagtttcccatccctactggaatctggtgg

SEQ ID NO: 191607 - DNA, 30 bp, Artificial Sequence
  Synthetic oligonucleotide
aactataaattcatactttcggtctggtgg

SEQ ID NO: 191608 - DNA, 34 bp, Artificial Sequence
  Synthetic oligonucleotide
aactacccaagtaactacagtaggcgggtggtgg

SEQ ID NO: 191609 - DNA, 34 bp, Artificial Sequence
  Synthetic oligonucleotide
actacccaagtaactagcagtaggcgggtggtgg

SEQ ID NO: 191610 - DNA, 30 bp, Artificial Sequence
  Synthetic oligonucleotide
tagatctgaactcttcttataatgtggtgg

SEQ ID NO: 191611 - DNA, 30 bp, Artificial Sequence
  Synthetic oligonucleotide
aacaaccaccacactaaagaccattggtgg

SEQ ID NO: 191612 - DNA, 30 bp, Artificial Sequence
  Synthetic oligonucleotide
ccggtatccaggtcataggaaacttggtgg

SEQ ID NO: 191613 - DNA, 30 bp, Artificial Sequence
  Synthetic oligonucleotide
tacatccatcactgttttaaactaatgtgg

SEQ ID NO: 191614 - DNA, 30 bp, Artificial Sequence
  Synthetic oligonucleotide
acgtctattagtcatacgtgtaccatgtgg

SEQ ID NO: 191615 - DNA, 30 bp, Artificial Sequence
  Synthetic oligonucleotide
tacccttaacaaatcatgtctaagatgtgg

SEQ ID NO: 191616 - DNA, 30 bp, Artificial Sequence
  Synthetic oligonucleotide
ccgtgacttgcagtcacatttcagatgtgg

SEQ ID NO: 191617 - DNA, 30 bp, Artificial Sequence
  Synthetic oligonucleotide
gtttagctcccctcgatccgatagatgtgg

SEQ ID NO: 191618 - DNA, 30 bp, Artificial Sequence
  Synthetic oligonucleotide
taatattgaaatcggcacgcgatgatgtgg

SEQ ID NO: 191619 - DNA, 30 bp, Artificial Sequence
  Synthetic oligonucleotide
aggttgtatgacaaggcaagctatatgtgg

SEQ ID NO: 191620 - DNA, 30 bp, Artificial Sequence
  Synthetic oligonucleotide
taaaatatcggtgagagtggtcacctgtgg

SEQ ID NO: 191621 - DNA, 30 bp, Artificial Sequence
  Synthetic oligonucleotide
cccgcgtggtggagggaagtagacctgtgg

SEQ ID NO: 191622 - DNA, 30 bp, Artificial Sequence
  Synthetic oligonucleotide
gtggcagcttgggactcgtaatgcctgtgg

SEQ ID NO: 191623 - DNA, 30 bp, Artificial Sequence
  Synthetic oligonucleotide
cgacacttaatatagtaggtctctctgtgg

SEQ ID NO: 191624 - DNA, 30 bp, Artificial Sequence
  Synthetic oligonucleotide
tgagatggtctaggatatgagtacgtgtgg

SEQ ID NO: 191625 - DNA, 30 bp, Artificial Sequence
  Synthetic oligonucleotide
agttcggcgaaggctgcggcaagcgtgtgg

SEQ ID NO: 191626 - DNA, 30 bp, Artificial Sequence
  Synthetic oligonucleotide
cagtgcgaaggacctctcatacatgtgtgg

SEQ ID NO: 191627 - DNA, 30 bp, Artificial Sequence
  Synthetic oligonucleotide
tgcgatgtgggacagatcgtatatgtgtgg

SEQ ID NO: 191628 - DNA, 30 bp, Artificial Sequence
  Synthetic oligonucleotide
gacaagagtcggagtgaactatctgtgtgg

SEQ ID NO: 191629 - DNA, 30 bp, Artificial Sequence
  Synthetic oligonucleotide
gccagactacgcggttgcctgaaattgtgg

SEQ ID NO: 191630 - DNA, 30 bp, Artificial Sequence
  Synthetic oligonucleotide
tatcgccaaaatgaagctgtgagcttgtgg

SEQ ID NO: 191631 - DNA, 30 bp, Artificial Sequence
  Synthetic oligonucleotide
cgacggtcaacttgcgtcaacaagttgtgg

SEQ ID NO: 191632 - DNA, 30 bp, Artificial Sequence
  Synthetic oligonucleotide
agacgtacaaagaggttggcattaaattgg

SEQ ID NO: 191633 - DNA, 30 bp, Artificial Sequence
  Synthetic oligonucleotide
ttagtaggcggtctggttgacaagaattgg

SEQ ID NO: 191634 - DNA, 30 bp, Artificial Sequence
  Synthetic oligonucleotide
gcgttgctctatgagccatgtcagaattgg

SEQ ID NO: 191635 - DNA, 30 bp, Artificial Sequence
  Synthetic oligonucleotide
atcacttccgtcaacgtacggcggaattgg

SEQ ID NO: 191636 - DNA, 30 bp, Artificial Sequence
  Synthetic oligonucleotide
gcgtctcaacgcgcattggttactaattgg

SEQ ID NO: 191637 - DNA, 30 bp, Artificial Sequence
  Synthetic oligonucleotide
ggtagtattcgccctgttatcagtaattgg

SEQ ID NO: 191638 - DNA, 30 bp, Artificial Sequence
  Synthetic oligonucleotide
agttaacaaaatcattttaagtgccattgg

SEQ ID NO: 191639 - DNA, 30 bp, Artificial Sequence
  Synthetic oligonucleotide
ctgtctgctaaaccggggcttaggcattgg

SEQ ID NO: 191640 - DNA, 30 bp, Artificial Sequence
  Synthetic oligonucleotide
ttggtggtacggagcagatctagtcattgg

SEQ ID NO: 191641 - DNA, 30 bp, Artificial Sequence
  Synthetic oligonucleotide
cagtagccatgcaatggataccgtcattgg

SEQ ID NO: 191642 - DNA, 30 bp, Artificial Sequence
  Synthetic oligonucleotide
ggacacgtgcttaaggaaccggttcattgg

SEQ ID NO: 191643 - DNA, 30 bp, Artificial Sequence
  Synthetic oligonucleotide
ggcggccataatcccgaaagtcaagattgg

SEQ ID NO: 191644 - DNA, 30 bp, Artificial Sequence
  Synthetic oligonucleotide
gcataaatccttaccacatggatagattgg

SEQ ID NO: 191645 - DNA, 30 bp, Artificial Sequence
  Synthetic oligonucleotide
atgtagcgattgttaaggggatgcgattgg

SEQ ID NO: 191646 - DNA, 30 bp, Artificial Sequence
  Synthetic oligonucleotide
ggtttacttgtcggggagataaaggattgg

SEQ ID NO: 191647 - DNA, 30 bp, Artificial Sequence
  Synthetic oligonucleotide
tgaaacggttaaatctacaaaaatgattgg

SEQ ID NO: 191648 - DNA, 30 bp, Artificial Sequence
  Synthetic oligonucleotide
ccccgtgtagatgtgctaacgattgattgg

SEQ ID NO: 191649 - DNA, 30 bp, Artificial Sequence
  Synthetic oligonucleotide
tatgcgggaagggtaaacgacccatattgg

SEQ ID NO: 191650 - DNA, 30 bp, Artificial Sequence
  Synthetic oligonucleotide
gttagcacatttcgacagtctaggtattgg

SEQ ID NO: 191651 - DNA, 30 bp, Artificial Sequence
  Synthetic oligonucleotide
tgattagcgcaacgaaaattacggtattgg

SEQ ID NO: 191652 - DNA, 30 bp, Artificial Sequence
  Synthetic oligonucleotide
gtctccggcacggaaagtgataaaacttgg

SEQ ID NO: 191653 - DNA, 30 bp, Artificial Sequence
  Synthetic oligonucleotide
atgttcaaggagctgctgcgacgaacttgg

SEQ ID NO: 191654 - DNA, 30 bp, Artificial Sequence
  Synthetic oligonucleotide
ccgtcggtatcagccgcgaagtgaacttgg

SEQ ID NO: 191655 - DNA, 30 bp, Artificial Sequence
  Synthetic oligonucleotide
aaccggtcgggcctaggattaatgacttgg

SEQ ID NO: 191656 - DNA, 30 bp, Artificial Sequence
  Synthetic oligonucleotide
cgtttcaaggatttacagccctcaccttgg

SEQ ID NO: 191657 - DNA, 30 bp, Artificial Sequence
  Synthetic oligonucleotide
agaagcttgaccaactgcatgtcaccttgg

SEQ ID NO: 191658 - DNA, 30 bp, Artificial Sequence
  Synthetic oligonucleotide
ctaagacgggagcgacttcaagagccttgg

SEQ ID NO: 191659 - DNA, 30 bp, Artificial Sequence
  Synthetic oligonucleotide
tacgggatgagtaaccagtacttgccttgg

SEQ ID NO: 191660 - DNA, 30 bp, Artificial Sequence
  Synthetic oligonucleotide
gctaatgaagcctgagacgaacgtccttgg

SEQ ID NO: 191661 - DNA, 30 bp, Artificial Sequence
  Synthetic oligonucleotide
tagatagagatacggttccagattccttgg

SEQ ID NO: 191662 - DNA, 30 bp, Artificial Sequence
  Synthetic oligonucleotide
gtagcgggcaacatgcgtcgtaacgcttgg

SEQ ID NO: 191663 - DNA, 30 bp, Artificial Sequence
  Synthetic oligonucleotide
ctggcagcggcgaactcgagcatggcttgg

SEQ ID NO: 191664 - DNA, 30 bp, Artificial Sequence
  Synthetic oligonucleotide
cagcatgcgaacctgggcaatctttcttgg

SEQ ID NO: 191665 - DNA, 30 bp, Artificial Sequence
  Synthetic oligonucleotide
ttagcggcatgggaagttatctacagttgg

SEQ ID NO: 191666 - DNA, 30 bp, Artificial Sequence
  Synthetic oligonucleotide
tttggggaggctaattgccttgaacgttgg

SEQ ID NO: 191667 - DNA, 30 bp, Artificial Sequence
  Synthetic oligonucleotide
cgaaatgtgcatatacaaagcgtccgttgg

SEQ ID NO: 191668 - DNA, 30 bp, Artificial Sequence
  Synthetic oligonucleotide
gtacatagggtttaaaggaaggttcgttgg

SEQ ID NO: 191669 - DNA, 30 bp, Artificial Sequence
  Synthetic oligonucleotide
ctgacaggccaagtggtggagttaggttgg

SEQ ID NO: 191670 - DNA, 30 bp, Artificial Sequence
  Synthetic oligonucleotide
tgaggatctgcgggaaagtccaagggttgg

SEQ ID NO: 191671 - DNA, 30 bp, Artificial Sequence
  Synthetic oligonucleotide
gggtaaaaagagcttctatgtggatgttgg

SEQ ID NO: 191672 - DNA, 30 bp, Artificial Sequence
  Synthetic oligonucleotide
agctacttgaaagctagcgtcatatgttgg

SEQ ID NO: 191673 - DNA, 30 bp, Artificial Sequence
  Synthetic oligonucleotide
gtcgatggaagggcataatgtttatgttgg

SEQ ID NO: 191674 - DNA, 30 bp, Artificial Sequence
  Synthetic oligonucleotide
ccaaaaactatcgaatatttagtgtgttgg

SEQ ID NO: 191675 - DNA, 30 bp, Artificial Sequence
  Synthetic oligonucleotide
tgctgtggtgatgttacggcgaattgttgg

SEQ ID NO: 191676 - DNA, 31 bp, Artificial Sequence
  Synthetic oligonucleotide
agttccagcagggttaggtctgggttgttgg

SEQ ID NO: 191677 - DNA, 30 bp, Artificial Sequence
  Synthetic oligonucleotide
ctgacctccagtccgatcggcatttgttgg

SEQ ID NO: 191678 - DNA, 30 bp, Artificial Sequence
  Synthetic oligonucleotide
ggttgtcctgggcacaggaagatttgttgg

SEQ ID NO: 191679 - DNA, 30 bp, Artificial Sequence
  Synthetic oligonucleotide
cttgctcgtgtgcgtacagcaggaatttgg

SEQ ID NO: 191680 - DNA, 30 bp, Artificial Sequence
  Synthetic oligonucleotide
aataatggccataactgaactggaatttgg

SEQ ID NO: 191681 - DNA, 30 bp, Artificial Sequence
  Synthetic oligonucleotide
ttcgactcaaagggttgatcggacatttgg

SEQ ID NO: 191682 - DNA, 30 bp, Artificial Sequence
  Synthetic oligonucleotide
acatcggactgtggtacaaggaccatttgg

SEQ ID NO: 191683 - DNA, 30 bp, Artificial Sequence
  Synthetic oligonucleotide
agacggtcaataggaacgacttggatttgg

SEQ ID NO: 191684 - DNA, 30 bp, Artificial Sequence
  Synthetic oligonucleotide
tatattaccataaataagatgggactttgg

SEQ ID NO: 191685 - DNA, 30 bp, Artificial Sequence
  Synthetic oligonucleotide
aatgaagtccgcaccccctaacagctttgg

SEQ ID NO: 191686 - DNA, 30 bp, Artificial Sequence
  Synthetic oligonucleotide
gacgcttacgtgatgactgataaagtttgg

SEQ ID NO: 191687 - DNA, 30 bp, Artificial Sequence
  Synthetic oligonucleotide
acggggggtaaatcccgatagtaggtttgg

SEQ ID NO: 191688 - DNA, 30 bp, Artificial Sequence
  Synthetic oligonucleotide
atacatatcgatttttaggggcgggtttgg

SEQ ID NO: 191689 - DNA, 30 bp, Artificial Sequence
  Synthetic oligonucleotide
atacagggccacagtagaagtgatgtttgg

SEQ ID NO: 191690 - DNA, 30 bp, Artificial Sequence
  Synthetic oligonucleotide
attgaggtgtgtagcgctaatccattttgg

SEQ ID NO: 191691 - DNA, 30 bp, Artificial Sequence
  Synthetic oligonucleotide
tcacaaaggaaggagcactgcactttttgg

SEQ ID NO: 191692 - DNA, 30 bp, Artificial Sequence
  Synthetic oligonucleotide
caaatagttgtgagccgacgaataaaaatg

SEQ ID NO: 191693 - DNA, 30 bp, Artificial Sequence
  Synthetic oligonucleotide
atcggcactcttctacagcaagtaaaaatg

SEQ ID NO: 191694 - DNA, 30 bp, Artificial Sequence
  Synthetic oligonucleotide
tagaaagggcattgactattgttaaaaatg

SEQ ID NO: 191695 - DNA, 30 bp, Artificial Sequence
  Synthetic oligonucleotide
tgcgagagggacccctctaccccgaaaatg

SEQ ID NO: 191696 - DNA, 30 bp, Artificial Sequence
  Synthetic oligonucleotide
cacatttggggctcggcgcactggaaaatg

SEQ ID NO: 191697 - DNA, 30 bp, Artificial Sequence
  Synthetic oligonucleotide
gtgctccgcatattaaatatagttaaaatg

SEQ ID NO: 191698 - DNA, 30 bp, Artificial Sequence
  Synthetic oligonucleotide
cggtctaggggtattccttacggagaaatg

SEQ ID NO: 191699 - DNA, 30 bp, Artificial Sequence
  Synthetic oligonucleotide
tcgctgccattgtaaactagtcgcgaaatg

SEQ ID NO: 191700 - DNA, 30 bp, Artificial Sequence
  Synthetic oligonucleotide
caaactcatgtggtacattaaggcgaaatg

SEQ ID NO: 191701 - DNA, 30 bp, Artificial Sequence
  Synthetic oligonucleotide
aaaccattttgcgcgatcacgtgcgaaatg

SEQ ID NO: 191702 - DNA, 30 bp, Artificial Sequence
  Synthetic oligonucleotide
tgctgtctttcggttcacttcgtcgaaatg

SEQ ID NO: 191703 - DNA, 30 bp, Artificial Sequence
  Synthetic oligonucleotide
gagacgcgataagcaaattcgtatgaaatg

SEQ ID NO: 191704 - DNA, 30 bp, Artificial Sequence
  Synthetic oligonucleotide
ggataaccttgcccgaaccctcgtgaaatg

SEQ ID NO: 191705 - DNA, 30 bp, Artificial Sequence
  Synthetic oligonucleotide
tgtaacctaatgtccgattaggaataaatg

SEQ ID NO: 191706 - DNA, 30 bp, Artificial Sequence
  Synthetic oligonucleotide
atggttggtgctgagactctggtataaatg

SEQ ID NO: 191707 - DNA, 30 bp, Artificial Sequence
  Synthetic oligonucleotide
catagtctgcaccgtccagagaactaaatg

SEQ ID NO: 191708 - DNA, 30 bp, Artificial Sequence
  Synthetic oligonucleotide
aatcgaaaattggccactgaccggtaaatg

SEQ ID NO: 191709 - DNA, 30 bp, Artificial Sequence
  Synthetic oligonucleotide
accgtacatgataattcaccggggtaaatg

SEQ ID NO: 191710 - DNA, 30 bp, Artificial Sequence
  Synthetic oligonucleotide
gcagtgctcggagttgcaggtgggtaaatg

SEQ ID NO: 191711 - DNA, 30 bp, Artificial Sequence
  Synthetic oligonucleotide
ttgcataggcggagtcataggtcttaaatg

SEQ ID NO: 191712 - DNA, 30 bp, Artificial Sequence
  Synthetic oligonucleotide
ggactgtatggcggggctctgagttaaatg

SEQ ID NO: 191713 - DNA, 30 bp, Artificial Sequence
  Synthetic oligonucleotide
agttcggttattgaatatgatatttaaatg

SEQ ID NO: 191714 - DNA, 30 bp, Artificial Sequence
  Synthetic oligonucleotide
ttcgtacacatcagtagtgtgttaacaatg

SEQ ID NO: 191715 - DNA, 30 bp, Artificial Sequence
  Synthetic oligonucleotide
tcgagtataaggctatatacgacgacaatg

SEQ ID NO: 191716 - DNA, 30 bp, Artificial Sequence
  Synthetic oligonucleotide
ctcgcctccgttccgataagaagaccaatg

SEQ ID NO: 191717 - DNA, 30 bp, Artificial Sequence
  Synthetic oligonucleotide
ctttctggataggtcaatgtacacccaatg

SEQ ID NO: 191718 - DNA, 30 bp, Artificial Sequence
  Synthetic oligonucleotide
tgcaagctattgtcagtttaagtcccaatg

SEQ ID NO: 191719 - DNA, 30 bp, Artificial Sequence
  Synthetic oligonucleotide
atacgtaaagctcggagggctcagccaatg

SEQ ID NO: 191720 - DNA, 30 bp, Artificial Sequence
  Synthetic oligonucleotide
tgaaccgtgagcccgtcccgtgaagcaatg

SEQ ID NO: 191721 - DNA, 30 bp, Artificial Sequence
  Synthetic oligonucleotide
tgtgggggagtgcattatcgtgcagcaatg

SEQ ID NO: 191722 - DNA, 30 bp, Artificial Sequence
  Synthetic oligonucleotide
agagtatatcgggttgaccggcgagcaatg

SEQ ID NO: 191723 - DNA, 30 bp, Artificial Sequence
  Synthetic oligonucleotide
cgttctaggaagagcccaactgccgcaatg

SEQ ID NO: 191724 - DNA, 30 bp, Artificial Sequence
  Synthetic oligonucleotide
gtctgccagtccgacgtttataaggcaatg

SEQ ID NO: 191725 - DNA, 31 bp, Artificial Sequence
  Synthetic oligonucleotide
ctctacggtgcggcgcagaaactgggcaatg

SEQ ID NO: 191726 - DNA, 30 bp, Artificial Sequence
  Synthetic oligonucleotide
aatgttaagcaatatcgaaagttggcaatg

SEQ ID NO: 191727 - DNA, 30 bp, Artificial Sequence
  Synthetic oligonucleotide
agcaaatggatactattaatctcctcaatg

SEQ ID NO: 191728 - DNA, 30 bp, Artificial Sequence
  Synthetic oligonucleotide
gtggcacgaactcagaaagacaagtcaatg

SEQ ID NO: 191729 - DNA, 30 bp, Artificial Sequence
  Synthetic oligonucleotide
ggctggttaaggtaccgatagcaaagaatg

SEQ ID NO: 191730 - DNA, 30 bp, Artificial Sequence
  Synthetic oligonucleotide
ggcgatgcgcagcaaatgaaatcaagaatg

SEQ ID NO: 191731 - DNA, 30 bp, Artificial Sequence
  Synthetic oligonucleotide
caatacaggtaagattacgatagaagaatg

SEQ ID NO: 191732 - DNA, 30 bp, Artificial Sequence
  Synthetic oligonucleotide
ccacggtgatgtccggagacaaacagaatg

SEQ ID NO: 191733 - DNA, 30 bp, Artificial Sequence
  Synthetic oligonucleotide
aataaactcacaaactgactaaatagaatg

SEQ ID NO: 191734 - DNA, 30 bp, Artificial Sequence
  Synthetic oligonucleotide
gacgtgaaggtgttgcctcctaatagaatg

SEQ ID NO: 191735 - DNA, 30 bp, Artificial Sequence
  Synthetic oligonucleotide
tcaccgaaacccaggactggctatagaatg

SEQ ID NO: 191736 - DNA, 30 bp, Artificial Sequence
  Synthetic oligonucleotide
ggcgaagtcagagccaggacaagtagaatg

SEQ ID NO: 191737 - DNA, 30 bp, Artificial Sequence
  Synthetic oligonucleotide
gtgccggaatgatcattagggtcgcgaatg

SEQ ID NO: 191738 - DNA, 30 bp, Artificial Sequence
  Synthetic oligonucleotide
ggaaattaactaggtttacggaggcgaatg

SEQ ID NO: 191739 - DNA, 30 bp, Artificial Sequence
  Synthetic oligonucleotide
gggtccgtgattttcgacagctggcgaatg

SEQ ID NO: 191740 - DNA, 30 bp, Artificial Sequence
  Synthetic oligonucleotide
gaaagtggtaaggaatttattcaaggaatg

SEQ ID NO: 191741 - DNA, 30 bp, Artificial Sequence
  Synthetic oligonucleotide
agaatatgaacctgaattctgtagggaatg

SEQ ID NO: 191742 - DNA, 30 bp, Artificial Sequence
  Synthetic oligonucleotide
gcctggggccacgtcccgccgaggggaatg

SEQ ID NO: 191743 - DNA, 30 bp, Artificial Sequence
  Synthetic oligonucleotide
ctctgggatatgactctgtctaggggaatg

SEQ ID NO: 191744 - DNA, 30 bp, Artificial Sequence
  Synthetic oligonucleotide
ttggcaatggggcaaccggcggttggaatg

SEQ ID NO: 191745 - DNA, 30 bp, Artificial Sequence
  Synthetic oligonucleotide
aaataacgggaactatgccagcaatgaatg

SEQ ID NO: 191746 - DNA, 30 bp, Artificial Sequence
  Synthetic oligonucleotide
gtaggggtctctattcaatgaacatgaatg

SEQ ID NO: 191747 - DNA, 30 bp, Artificial Sequence
  Synthetic oligonucleotide
cgctcttgaggatcagttttcatatgaatg

SEQ ID NO: 191748 - DNA, 30 bp, Artificial Sequence
  Synthetic oligonucleotide
ccagaatccttaaacggcggtatatgaatg

SEQ ID NO: 191749 - DNA, 31 bp, Artificial Sequence
  Synthetic oligonucleotide
gagtaccgtaacgtaactggccgtatgaatg

SEQ ID NO: 191750 - DNA, 30 bp, Artificial Sequence
  Synthetic oligonucleotide
ggcaataggataaattgcggccactgaatg

SEQ ID NO: 191751 - DNA, 30 bp, Artificial Sequence
  Synthetic oligonucleotide
tgactatgatgctaaaaaacacgctgaatg

SEQ ID NO: 191752 - DNA, 30 bp, Artificial Sequence
  Synthetic oligonucleotide
atactgtgtatggttcgcactgagtgaatg

SEQ ID NO: 191753 - DNA, 30 bp, Artificial Sequence
  Synthetic oligonucleotide
gtgtttagcggatctagctcaccgtgaatg

SEQ ID NO: 191754 - DNA, 30 bp, Artificial Sequence
  Synthetic oligonucleotide
ggttacgtcagtcgtgtgtaagattgaatg

SEQ ID NO: 191755 - DNA, 30 bp, Artificial Sequence
  Synthetic oligonucleotide
tagaatgtagattccccctctaaaataatg

SEQ ID NO: 191756 - DNA, 30 bp, Artificial Sequence
  Synthetic oligonucleotide
aggtgctcgaactggccaatttaaataatg

SEQ ID NO: 191757 - DNA, 30 bp, Artificial Sequence
  Synthetic oligonucleotide
cgcgggtgaataaacattaagaacataatg

SEQ ID NO: 191758 - DNA, 30 bp, Artificial Sequence
  Synthetic oligonucleotide
ctgcgtgccaagtcactaagagtgataatg

SEQ ID NO: 191759 - DNA, 30 bp, Artificial Sequence
  Synthetic oligonucleotide
tggtaccggttgaacagggcaacactaatg

SEQ ID NO: 191760 - DNA, 30 bp, Artificial Sequence
  Synthetic oligonucleotide
agtggatgtaatattgcatgctcactaatg

SEQ ID NO: 191761 - DNA, 30 bp, Artificial Sequence
  Synthetic oligonucleotide
tggtatcatatcgtctagtgcctgctaatg

SEQ ID NO: 191762 - DNA, 30 bp, Artificial Sequence
  Synthetic oligonucleotide
ggattggctggtaactgtcacttgctaatg

SEQ ID NO: 191763 - DNA, 30 bp, Artificial Sequence
  Synthetic oligonucleotide
gtgagaataaggcgcaaaaagactctaatg

SEQ ID NO: 191764 - DNA, 30 bp, Artificial Sequence
  Synthetic oligonucleotide
tatgggaccgcgactggtgagtttctaatg

SEQ ID NO: 191765 - DNA, 30 bp, Artificial Sequence
  Synthetic oligonucleotide
cgatagtagtggatctacataatagtaatg

SEQ ID NO: 191766 - DNA, 30 bp, Artificial Sequence
  Synthetic oligonucleotide
agatccggtactgacttcaggaccgtaatg

SEQ ID NO: 191767 - DNA, 30 bp, Artificial Sequence
  Synthetic oligonucleotide
gatggataacagccgagtcctggcgtaatg

SEQ ID NO: 191768 - DNA, 30 bp, Artificial Sequence
  Synthetic oligonucleotide
gtgggccagaaggtatggggaggggtaatg

SEQ ID NO: 191769 - DNA, 30 bp, Artificial Sequence
  Synthetic oligonucleotide
agttgctccgatcgatgctcgtgggtaatg

SEQ ID NO: 191770 - DNA, 30 bp, Artificial Sequence
  Synthetic oligonucleotide
gttgatgcaggtaaccaagttacattaatg

SEQ ID NO: 191771 - DNA, 29 bp, Artificial Sequence
  Synthetic oligonucleotide
acccggtaacccaaatacgagtattaatg

SEQ ID NO: 191772 - DNA, 30 bp, Artificial Sequence
  Synthetic oligonucleotide
gggtctggccgaatgtatagggagttaatg

SEQ ID NO: 191773 - DNA, 30 bp, Artificial Sequence
  Synthetic oligonucleotide
gggaaaaaaggtttctatagctcgttaatg

SEQ ID NO: 191774 - DNA, 30 bp, Artificial Sequence
  Synthetic oligonucleotide
gacgtaaatcataacaggacattgttaatg

SEQ ID NO: 191775 - DNA, 30 bp, Artificial Sequence
  Synthetic oligonucleotide
atgagtccgttttcccatgtgttgttaatg

SEQ ID NO: 191776 - DNA, 30 bp, Artificial Sequence
  Synthetic oligonucleotide
cgtagggggatcggtggcaataatttaatg

SEQ ID NO: 191777 - DNA, 30 bp, Artificial Sequence
  Synthetic oligonucleotide
atcagacggtttgagttaacgactttaatg

SEQ ID NO: 191778 - DNA, 30 bp, Artificial Sequence
  Synthetic oligonucleotide
tattggagttgcggagcgttccacaacatg

SEQ ID NO: 191779 - DNA, 30 bp, Artificial Sequence
  Synthetic oligonucleotide
gctaccctacagagctagcagtacaacatg

SEQ ID NO: 191780 - DNA, 30 bp, Artificial Sequence
  Synthetic oligonucleotide
cgctcggcagtcacctacaggcccaacatg

SEQ ID NO: 191781 - DNA, 30 bp, Artificial Sequence
  Synthetic oligonucleotide
gagggttaggctataaaaggttggaacatg

SEQ ID NO: 191782 - DNA, 30 bp, Artificial Sequence
  Synthetic oligonucleotide
aggttgtgcgtaacctacaagatacacatg

SEQ ID NO: 191783 - DNA, 30 bp, Artificial Sequence
  Synthetic oligonucleotide
ttagagaatggatcttagttaacccacatg

SEQ ID NO: 191784 - DNA, 30 bp, Artificial Sequence
  Synthetic oligonucleotide
ttatcctatgatgagggatgtatccacatg

SEQ ID NO: 191785 - DNA, 30 bp, Artificial Sequence
  Synthetic oligonucleotide
ttgagtgtccaaccccatgggaggcacatg

SEQ ID NO: 191786 - DNA, 30 bp, Artificial Sequence
  Synthetic oligonucleotide
gttgagataagatgatctcaagtagacatg

SEQ ID NO: 191787 - DNA, 30 bp, Artificial Sequence
  Synthetic oligonucleotide
tgaaccgggatcggcgttaataccgacatg

SEQ ID NO: 191788 - DNA, 30 bp, Artificial Sequence
  Synthetic oligonucleotide
aggttcaccatatttcggttgatcgacatg

SEQ ID NO: 191789 - DNA, 30 bp, Artificial Sequence
  Synthetic oligonucleotide
agataaattttccacccagatttcgacatg

SEQ ID NO: 191790 - DNA, 30 bp, Artificial Sequence
  Synthetic oligonucleotide
ttgtatgggaaactgtacggtgtggacatg

SEQ ID NO: 191791 - DNA, 30 bp, Artificial Sequence
  Synthetic oligonucleotide
ataacatcgatatacgcgtgtgatgacatg

SEQ ID NO: 191792 - DNA, 30 bp, Artificial Sequence
  Synthetic oligonucleotide
gtcatacgggatactgccccaggatacatg

SEQ ID NO: 191793 - DNA, 30 bp, Artificial Sequence
  Synthetic oligonucleotide
gatcgcggctgtactgattgagcctacatg

SEQ ID NO: 191794 - DNA, 30 bp, Artificial Sequence
  Synthetic oligonucleotide
ttatcaacaacctgtgctcgagcgtacatg

SEQ ID NO: 191795 - DNA, 30 bp, Artificial Sequence
  Synthetic oligonucleotide
cgagtaagtagagctttcacccattacatg

SEQ ID NO: 191796 - DNA, 30 bp, Artificial Sequence
  Synthetic oligonucleotide
gagagatggaggcatgcgtattccaccatg

SEQ ID NO: 191797 - DNA, 30 bp, Artificial Sequence
  Synthetic oligonucleotide
agtctagagaggatgaaatccgataccatg

SEQ ID NO: 191798 - DNA, 30 bp, Artificial Sequence
  Synthetic oligonucleotide
ggtggctacgttcacacagaacgtaccatg

SEQ ID NO: 191799 - DNA, 30 bp, Artificial Sequence
  Synthetic oligonucleotide
gtaattatctagaaaacgatcatacccatg

SEQ ID NO: 191800 - DNA, 30 bp, Artificial Sequence
  Synthetic oligonucleotide
cactagaaagtatgtaatgatttgcccatg

SEQ ID NO: 191801 - DNA, 30 bp, Artificial Sequence
  Synthetic oligonucleotide
gtaagacgaaaaacttttttaacggccatg

SEQ ID NO: 191802 - DNA, 30 bp, Artificial Sequence
  Synthetic oligonucleotide
gttgcgcaaaaagcagcccctcatgccatg

SEQ ID NO: 191803 - DNA, 30 bp, Artificial Sequence
  Synthetic oligonucleotide
tgacgaaatcatgtcgaattggttgccatg

SEQ ID NO: 191804 - DNA, 30 bp, Artificial Sequence
  Synthetic oligonucleotide
tattaagcctgtcttacttacaaatccatg

SEQ ID NO: 191805 - DNA, 30 bp, Artificial Sequence
  Synthetic oligonucleotide
aggcttgttttccgacgtgttatatccatg

SEQ ID NO: 191806 - DNA, 30 bp, Artificial Sequence
  Synthetic oligonucleotide
cttggcaggacccgacattaatcctccatg

SEQ ID NO: 191807 - DNA, 30 bp, Artificial Sequence
  Synthetic oligonucleotide
aagagaaaagaggaggttagttggtccatg

SEQ ID NO: 191808 - DNA, 30 bp, Artificial Sequence
  Synthetic oligonucleotide
ccgcgaaatgtaccacgtcactattccatg

SEQ ID NO: 191809 - DNA, 30 bp, Artificial Sequence
  Synthetic oligonucleotide
cgcgccttgaacataaacatataaagcatg

SEQ ID NO: 191810 - DNA, 30 bp, Artificial Sequence
  Synthetic oligonucleotide
aaaatagcacaggttttgaatccaagcatg

SEQ ID NO: 191811 - DNA, 30 bp, Artificial Sequence
  Synthetic oligonucleotide
cggactgtaaaacgttgaatgagaagcatg

SEQ ID NO: 191812 - DNA, 30 bp, Artificial Sequence
  Synthetic oligonucleotide
ctccgacaagtaagcacattcgtaagcatg

SEQ ID NO: 191813 - DNA, 30 bp, Artificial Sequence
  Synthetic oligonucleotide
ttattaaatcggcatgcacaaactagcatg

SEQ ID NO: 191814 - DNA, 30 bp, Artificial Sequence
  Synthetic oligonucleotide
tcatgatactgcatgtgtggacaacgcatg

SEQ ID NO: 191815 - DNA, 30 bp, Artificial Sequence
  Synthetic oligonucleotide
cactgtagccgagtggggtcggaccgcatg

SEQ ID NO: 191816 - DNA, 30 bp, Artificial Sequence
  Synthetic oligonucleotide
ccgacaaactagcgctactgatcccgcatg

SEQ ID NO: 191817 - DNA, 30 bp, Artificial Sequence
  Synthetic oligonucleotide
tggagacagcaggcgtcaaatatccgcatg

SEQ ID NO: 191818 - DNA, 30 bp, Artificial Sequence
  Synthetic oligonucleotide
ctcgacaaagttattgatactttccgcatg

SEQ ID NO: 191819 - DNA, 30 bp, Artificial Sequence
  Synthetic oligonucleotide
aagtggcacctatttaagttaaagcgcatg

SEQ ID NO: 191820 - DNA, 30 bp, Artificial Sequence
  Synthetic oligonucleotide
atgaaccgatgttgtgtgaaacctcgcatg

SEQ ID NO: 191821 - DNA, 30 bp, Artificial Sequence
  Synthetic oligonucleotide
ccgcagttagttacctacggtgctcgcatg

SEQ ID NO: 191822 - DNA, 30 bp, Artificial Sequence
  Synthetic oligonucleotide
ttattcaagggtcgagtagataaaggcatg

SEQ ID NO: 191823 - DNA, 30 bp, Artificial Sequence
  Synthetic oligonucleotide
ttctacgtaagcaggcgacgacaaggcatg

SEQ ID NO: 191824 - DNA, 30 bp, Artificial Sequence
  Synthetic oligonucleotide
caagtgccaagcatatgggaggcaggcatg

SEQ ID NO: 191825 - DNA, 30 bp, Artificial Sequence
  Synthetic oligonucleotide
aaacgcaaacggaacccaccccgaggcatg

SEQ ID NO: 191826 - DNA, 30 bp, Artificial Sequence
  Synthetic oligonucleotide
ttagccaattcccaatgtgctgtaggcatg

SEQ ID NO: 191827 - DNA, 30 bp, Artificial Sequence
  Synthetic oligonucleotide
cgacaagaccaggtggctgaacagggcatg

SEQ ID NO: 191828 - DNA, 30 bp, Artificial Sequence
  Synthetic oligonucleotide
tggtgcaccacgagcgcggcctagggcatg

SEQ ID NO: 191829 - DNA, 30 bp, Artificial Sequence
  Synthetic oligonucleotide
tcactgcaactctacactttctcgggcatg

SEQ ID NO: 191830 - DNA, 30 bp, Artificial Sequence
  Synthetic oligonucleotide
gcaactgttcgcccgccaagttggggcatg

SEQ ID NO: 191831 - DNA, 30 bp, Artificial Sequence
  Synthetic oligonucleotide
tggaatcgctcggatcgaattggtggcatg

SEQ ID NO: 191832 - DNA, 30 bp, Artificial Sequence
  Synthetic oligonucleotide
cgcctggatgaaaaattcatctgtggcatg

SEQ ID NO: 191833 - DNA, 30 bp, Artificial Sequence
  Synthetic oligonucleotide
taaccaaatcggtaggtatgtaattgcatg

SEQ ID NO: 191834 - DNA, 30 bp, Artificial Sequence
  Synthetic oligonucleotide
agagtgcccgaactcttagatataatcatg

SEQ ID NO: 191835 - DNA, 30 bp, Artificial Sequence
  Synthetic oligonucleotide
aaccatagatacaagggttgtcccatcatg

SEQ ID NO: 191836 - DNA, 30 bp, Artificial Sequence
  Synthetic oligonucleotide
ggcagttcagcaagttttacaacgatcatg

SEQ ID NO: 191837 - DNA, 30 bp, Artificial Sequence
  Synthetic oligonucleotide
agggcatatagcgcatgcagaagtatcatg

SEQ ID NO: 191838 - DNA, 30 bp, Artificial Sequence
  Synthetic oligonucleotide
acggtcccttatcggtaatcacgtatcatg

SEQ ID NO: 191839 - DNA, 30 bp, Artificial Sequence
  Synthetic oligonucleotide
taggatatggcccgacggaatggactcatg

SEQ ID NO: 191840 - DNA, 30 bp, Artificial Sequence
  Synthetic oligonucleotide
tgactcgagataagcgaggccttactcatg

SEQ ID NO: 191841 - DNA, 30 bp, Artificial Sequence
  Synthetic oligonucleotide
cgaggcctaaacattgaaattggcctcatg

SEQ ID NO: 191842 - DNA, 30 bp, Artificial Sequence
  Synthetic oligonucleotide
ctatgttggatgcgggtggctgtgctcatg

SEQ ID NO: 191843 - DNA, 30 bp, Artificial Sequence
  Synthetic oligonucleotide
tcaagacagctaagtacgggtaaagtcatg

SEQ ID NO: 191844 - DNA, 30 bp, Artificial Sequence
  Synthetic oligonucleotide
ctaggagagctttttactacggaagtcatg

SEQ ID NO: 191845 - DNA, 30 bp, Artificial Sequence
  Synthetic oligonucleotide
taagcttaataacctagtgagaacgtcatg

SEQ ID NO: 191846 - DNA, 30 bp, Artificial Sequence
  Synthetic oligonucleotide
gtgtattgaattcgaggaaagtgcgtcatg

SEQ ID NO: 191847 - DNA, 30 bp, Artificial Sequence
  Synthetic oligonucleotide
tattaccaacaaacgttgggccgggtcatg

SEQ ID NO: 191848 - DNA, 30 bp, Artificial Sequence
  Synthetic oligonucleotide
gatagtatcatacacgaatgtggtgtcatg

SEQ ID NO: 191849 - DNA, 30 bp, Artificial Sequence
  Synthetic oligonucleotide
ttagctagagtggctaagatatgtgtcatg

SEQ ID NO: 191850 - DNA, 30 bp, Artificial Sequence
  Synthetic oligonucleotide
atgacctaatctaaaatgtgagaattcatg

SEQ ID NO: 191851 - DNA, 30 bp, Artificial Sequence
  Synthetic oligonucleotide
atatagtggtatgtcttctctgcattcatg

SEQ ID NO: 191852 - DNA, 30 bp, Artificial Sequence
  Synthetic oligonucleotide
ttgagatgttaatcgtttgcatgattcatg

SEQ ID NO: 191853 - DNA, 30 bp, Artificial Sequence
  Synthetic oligonucleotide
agtaagcccaaccctgaccgtaccttcatg

SEQ ID NO: 191854 - DNA, 30 bp, Artificial Sequence
  Synthetic oligonucleotide
cgaacagcaaattccatgaataagttcatg

SEQ ID NO: 191855 - DNA, 30 bp, Artificial Sequence
  Synthetic oligonucleotide
tgtaaggacggctttggtgttaaaaagatg

SEQ ID NO: 191856 - DNA, 30 bp, Artificial Sequence
  Synthetic oligonucleotide
aacttgcgattagcattatgcgtcaagatg

SEQ ID NO: 191857 - DNA, 30 bp, Artificial Sequence
  Synthetic oligonucleotide
tggataaatcgtattgtctatacacagatg

SEQ ID NO: 191858 - DNA, 30 bp, Artificial Sequence
  Synthetic oligonucleotide
accaaattaaccgggcaacatgcacagatg

SEQ ID NO: 191859 - DNA, 30 bp, Artificial Sequence
  Synthetic oligonucleotide
agtcacgcgcgagagtcgtcgacccagatg

SEQ ID NO: 191860 - DNA, 30 bp, Artificial Sequence
  Synthetic oligonucleotide
tgaaggtcgtaagacggaggtgagcagatg

SEQ ID NO: 191861 - DNA, 30 bp, Artificial Sequence
  Synthetic oligonucleotide
gacgtttcgctcacataatcgactcagatg

SEQ ID NO: 191862 - DNA, 30 bp, Artificial Sequence
  Synthetic oligonucleotide
gttgcaaaactcagacgtgaagttcagatg

SEQ ID NO: 191863 - DNA, 30 bp, Artificial Sequence
  Synthetic oligonucleotide
taacgtacagcggcttaagaggcagagatg

SEQ ID NO: 191864 - DNA, 30 bp, Artificial Sequence
  Synthetic oligonucleotide
gtgacgtatattagccagcatggagagatg

SEQ ID NO: 191865 - DNA, 30 bp, Artificial Sequence
  Synthetic oligonucleotide
tagacctctctacgatcatgagaggagatg

SEQ ID NO: 191866 - DNA, 30 bp, Artificial Sequence
  Synthetic oligonucleotide
ccatgcttatatagaatgcgactggagatg

SEQ ID NO: 191867 - DNA, 30 bp, Artificial Sequence
  Synthetic oligonucleotide
taggaaatagcatgcacgaagcctgagatg

SEQ ID NO: 191868 - DNA, 30 bp, Artificial Sequence
  Synthetic oligonucleotide
gaccgtcgtgtggtccagtgtattgagatg

SEQ ID NO: 191869 - DNA, 30 bp, Artificial Sequence
  Synthetic oligonucleotide
atgcggtaacgctttttgtacttctagatg

SEQ ID NO: 191870 - DNA, 30 bp, Artificial Sequence
  Synthetic oligonucleotide
aggcggtggcgctttcgcgggtagtagatg

SEQ ID NO: 191871 - DNA, 30 bp, Artificial Sequence
  Synthetic oligonucleotide
cccgcagagataggtatcggaaggtagatg

SEQ ID NO: 191872 - DNA, 30 bp, Artificial Sequence
  Synthetic oligonucleotide
cgtaagccattaagtttcatggggtagatg

SEQ ID NO: 191873 - DNA, 30 bp, Artificial Sequence
  Synthetic oligonucleotide
atggaaaattaaaaaaagaggaaaacgatg

SEQ ID NO: 191874 - DNA, 30 bp, Artificial Sequence
  Synthetic oligonucleotide
acccgttagggaagcttcaaagcaacgatg

SEQ ID NO: 191875 - DNA, 30 bp, Artificial Sequence
  Synthetic oligonucleotide
ccagagtaatctggtagagctttaacgatg

SEQ ID NO: 191876 - DNA, 30 bp, Artificial Sequence
  Synthetic oligonucleotide
gagcagctatgggtattacggttcacgatg

SEQ ID NO: 191877 - DNA, 30 bp, Artificial Sequence
  Synthetic oligonucleotide
tcaaaggaagtcgacacggcttatacgatg

SEQ ID NO: 191878 - DNA, 30 bp, Artificial Sequence
  Synthetic oligonucleotide
taagtaggaggactaagtaggtgtacgatg

SEQ ID NO: 191879 - DNA, 30 bp, Artificial Sequence
  Synthetic oligonucleotide
tcagagtggtcgcgtagttagtgaccgatg

SEQ ID NO: 191880 - DNA, 30 bp, Artificial Sequence
  Synthetic oligonucleotide
ttattacactttgctgttgagttgccgatg

SEQ ID NO: 191881 - DNA, 30 bp, Artificial Sequence
  Synthetic oligonucleotide
agtaatgatcagcggtggcgacctccgatg

SEQ ID NO: 191882 - DNA, 30 bp, Artificial Sequence
  Synthetic oligonucleotide
cggcgttcacttgatcactttaacgcgatg

SEQ ID NO: 191883 - DNA, 30 bp, Artificial Sequence
  Synthetic oligonucleotide
agtacgctggctcaatctataaaggcgatg

SEQ ID NO: 191884 - DNA, 30 bp, Artificial Sequence
  Synthetic oligonucleotide
ataggatagattctgagggcacaggcgatg

SEQ ID NO: 191885 - DNA, 30 bp, Artificial Sequence
  Synthetic oligonucleotide
gggccttggtcccacgttttggtggcgatg

SEQ ID NO: 191886 - DNA, 30 bp, Artificial Sequence
  Synthetic oligonucleotide
aacaccctggacacttgcattcgtgcgatg

SEQ ID NO: 191887 - DNA, 30 bp, Artificial Sequence
  Synthetic oligonucleotide
atagaagtgagaacattattggcatcgatg

SEQ ID NO: 191888 - DNA, 30 bp, Artificial Sequence
  Synthetic oligonucleotide
tacagcggaagcattacaccgatctcgatg

SEQ ID NO: 191889 - DNA, 30 bp, Artificial Sequence
  Synthetic oligonucleotide
cccgtgaggtctattgcgacggcgtcgatg

SEQ ID NO: 191890 - DNA, 30 bp, Artificial Sequence
  Synthetic oligonucleotide
gaggttgattgaccgtctggcgtgtcgatg

SEQ ID NO: 191891 - DNA, 30 bp, Artificial Sequence
  Synthetic oligonucleotide
ttctgaagtcttctagtctagggttcgatg

SEQ ID NO: 191892 - DNA, 30 bp, Artificial Sequence
  Synthetic oligonucleotide
tgcgtgcgaaaccccggtttgaaaaggatg

SEQ ID NO: 191893 - DNA, 30 bp, Artificial Sequence
  Synthetic oligonucleotide
taggggggactgcctgttggcagaaggatg

SEQ ID NO: 191894 - DNA, 30 bp, Artificial Sequence
  Synthetic oligonucleotide
gtgggggcatcttagaggtctcgaaggatg

SEQ ID NO: 191895 - DNA, 30 bp, Artificial Sequence
  Synthetic oligonucleotide
atatgggacaattcaaaataaagtaggatg

SEQ ID NO: 191896 - DNA, 30 bp, Artificial Sequence
  Synthetic oligonucleotide
aggaattgagttaccgatggaaaacggatg

SEQ ID NO: 191897 - DNA, 30 bp, Artificial Sequence
  Synthetic oligonucleotide
gggaagggggtcagcgggccggcacggatg

SEQ ID NO: 191898 - DNA, 30 bp, Artificial Sequence
  Synthetic oligonucleotide
actgtgtagttcgctccttctttccggatg

SEQ ID NO: 191899 - DNA, 30 bp, Artificial Sequence
  Synthetic oligonucleotide
atgggagcaggtattgatctcccgcggatg

SEQ ID NO: 191900 - DNA, 30 bp, Artificial Sequence
  Synthetic oligonucleotide
agcttcgtaagtcacaccggcaggcggatg

SEQ ID NO: 191901 - DNA, 30 bp, Artificial Sequence
  Synthetic oligonucleotide
tgaggttttagcccgtttgctgatcggatg

SEQ ID NO: 191902 - DNA, 30 bp, Artificial Sequence
  Synthetic oligonucleotide
ctgagtttaagaacccttccctatcggatg

SEQ ID NO: 191903 - DNA, 30 bp, Artificial Sequence
  Synthetic oligonucleotide
gcgattcgtatactcattttgcttcggatg

SEQ ID NO: 191904 - DNA, 30 bp, Artificial Sequence
  Synthetic oligonucleotide
gtgacaaggccgtgcgcgaccagagggatg

SEQ ID NO: 191905 - DNA, 30 bp, Artificial Sequence
  Synthetic oligonucleotide
cagcttgcccaataaattggggtagggatg

SEQ ID NO: 191906 - DNA, 30 bp, Artificial Sequence
  Synthetic oligonucleotide
aggcggcaaattctgggctgactcgggatg

SEQ ID NO: 191907 - DNA, 30 bp, Artificial Sequence
  Synthetic oligonucleotide
ttactctcattgaggctccgtaatgggatg

SEQ ID NO: 191908 - DNA, 30 bp, Artificial Sequence
  Synthetic oligonucleotide
cattcggcgccacggtatggaattgggatg

SEQ ID NO: 191909 - DNA, 30 bp, Artificial Sequence
  Synthetic oligonucleotide
gtgaaccggcgatatggtcaactatggatg

SEQ ID NO: 191910 - DNA, 30 bp, Artificial Sequence
  Synthetic oligonucleotide
agcaggcagggacaaaagaggtcctggatg

SEQ ID NO: 191911 - DNA, 30 bp, Artificial Sequence
  Synthetic oligonucleotide
aacgcggtcaaggtcagagctcgctggatg

SEQ ID NO: 191912 - DNA, 30 bp, Artificial Sequence
  Synthetic oligonucleotide
gaggcaaggtcctccacacaacattggatg

SEQ ID NO: 191913 - DNA, 30 bp, Artificial Sequence
  Synthetic oligonucleotide
ggttgctgattgtaggcaagctcttggatg

SEQ ID NO: 191914 - DNA, 30 bp, Artificial Sequence
  Synthetic oligonucleotide
gaccgtgagtttcgcatgatctccatgatg

SEQ ID NO: 191915 - DNA, 30 bp, Artificial Sequence
  Synthetic oligonucleotide
ttcgaccttaccttccgtatcagcatgatg

SEQ ID NO: 191916 - DNA, 30 bp, Artificial Sequence
  Synthetic oligonucleotide
tattatataatccgcacggagtagatgatg

SEQ ID NO: 191917 - DNA, 30 bp, Artificial Sequence
  Synthetic oligonucleotide
ggtaattgacgaaaccagtatacgatgatg

SEQ ID NO: 191918 - DNA, 30 bp, Artificial Sequence
  Synthetic oligonucleotide
aactcaggtcagctagtcgacagactgatg

SEQ ID NO: 191919 - DNA, 30 bp, Artificial Sequence
  Synthetic oligonucleotide
ccacgcaagcaggagcaacatgtcctgatg

SEQ ID NO: 191920 - DNA, 30 bp, Artificial Sequence
  Synthetic oligonucleotide
acgcctaagaacccactcagttcgctgatg

SEQ ID NO: 191921 - DNA, 30 bp, Artificial Sequence
  Synthetic oligonucleotide
cttttaacataaggcggaactaccgtgatg

SEQ ID NO: 191922 - DNA, 30 bp, Artificial Sequence
  Synthetic oligonucleotide
atggtgtgatggggccgtgcctgggtgatg

SEQ ID NO: 191923 - DNA, 30 bp, Artificial Sequence
  Synthetic oligonucleotide
aggccaatggtgcttaatgaaggcaatatg

SEQ ID NO: 191924 - DNA, 30 bp, Artificial Sequence
  Synthetic oligonucleotide
ctcatagacagcttaaggatcggcaatatg

SEQ ID NO: 191925 - DNA, 30 bp, Artificial Sequence
  Synthetic oligonucleotide
cgatggaatctacaatttgggctcaatatg

SEQ ID NO: 191926 - DNA, 30 bp, Artificial Sequence
  Synthetic oligonucleotide
ggccggcttcatggtgcctacaaacatatg

SEQ ID NO: 191927 - DNA, 30 bp, Artificial Sequence
  Synthetic oligonucleotide
aaggacccgctgagcgtgagtgaacatatg

SEQ ID NO: 191928 - DNA, 30 bp, Artificial Sequence
  Synthetic oligonucleotide
cagtgcctgtttcacagtccatggcatatg

SEQ ID NO: 191929 - DNA, 30 bp, Artificial Sequence
  Synthetic oligonucleotide
agtagagggccgcatagagcagatcatatg

SEQ ID NO: 191930 - DNA, 30 bp, Artificial Sequence
  Synthetic oligonucleotide
ggcacctgtaattgtaccctgacagatatg

SEQ ID NO: 191931 - DNA, 30 bp, Artificial Sequence
  Synthetic oligonucleotide
aagcctgtctttggaccttcgcgcgatatg

SEQ ID NO: 191932 - DNA, 30 bp, Artificial Sequence
  Synthetic oligonucleotide
aaagccgagacacgttactatcgcgatatg

SEQ ID NO: 191933 - DNA, 30 bp, Artificial Sequence
  Synthetic oligonucleotide
tgatgtgactaacgccattttatcgatatg

SEQ ID NO: 191934 - DNA, 30 bp, Artificial Sequence
  Synthetic oligonucleotide
cggttcgtgataaataggggtcgggatatg

SEQ ID NO: 191935 - DNA, 30 bp, Artificial Sequence
  Synthetic oligonucleotide
aagtgcagcctctactatgatgtggatatg

SEQ ID NO: 191936 - DNA, 30 bp, Artificial Sequence
  Synthetic oligonucleotide
tgggggacggctactttggttaaatatatg

SEQ ID NO: 191937 - DNA, 30 bp, Artificial Sequence
  Synthetic oligonucleotide
acaacaaaagcctaacctctcacatatatg

SEQ ID NO: 191938 - DNA, 30 bp, Artificial Sequence
  Synthetic oligonucleotide
tacgtagagtcgttggtattcagatatatg

SEQ ID NO: 191939 - DNA, 30 bp, Artificial Sequence
  Synthetic oligonucleotide
cgaacaacggccttaattagtgtatatatg

SEQ ID NO: 191940 - DNA, 30 bp, Artificial Sequence
  Synthetic oligonucleotide
gtaaaatcaccagacactagagactatatg

SEQ ID NO: 191941 - DNA, 30 bp, Artificial Sequence
  Synthetic oligonucleotide
agggccgaatgaataacgcaatactatatg

SEQ ID NO: 191942 - DNA, 30 bp, Artificial Sequence
  Synthetic oligonucleotide
ggtcatttcaataaagcgaagtggtatatg

SEQ ID NO: 191943 - DNA, 30 bp, Artificial Sequence
  Synthetic oligonucleotide
aaagcactccccatagtacgagaaactatg

SEQ ID NO: 191944 - DNA, 30 bp, Artificial Sequence
  Synthetic oligonucleotide
gttacctggatcatgttagggtgcactatg

SEQ ID NO: 191945 - DNA, 30 bp, Artificial Sequence
  Synthetic oligonucleotide
aagaatcagccaaatatttataagactatg

SEQ ID NO: 191946 - DNA, 30 bp, Artificial Sequence
  Synthetic oligonucleotide
aaccgatcggtaaaatgttagggtactatg

SEQ ID NO: 191947 - DNA, 30 bp, Artificial Sequence
  Synthetic oligonucleotide
agttgggatgtggtggctccacttactatg

SEQ ID NO: 191948 - DNA, 30 bp, Artificial Sequence
  Synthetic oligonucleotide
ctaaccccgagttttaagcatggacctatg

SEQ ID NO: 191949 - DNA, 30 bp, Artificial Sequence
  Synthetic oligonucleotide
taaacacttctatgttgtacaaaccctatg

SEQ ID NO: 191950 - DNA, 30 bp, Artificial Sequence
  Synthetic oligonucleotide
cctcaaatatatagattaccaggccctatg

SEQ ID NO: 191951 - DNA, 30 bp, Artificial Sequence
  Synthetic oligonucleotide
cagcgcgttcgcatttatcctctccctatg

SEQ ID NO: 191952 - DNA, 30 bp, Artificial Sequence
  Synthetic oligonucleotide
atgaatccgtggtgtttcagcggtcctatg

SEQ ID NO: 191953 - DNA, 30 bp, Artificial Sequence
  Synthetic oligonucleotide
tgtagcaattactggaggaaccaagctatg

SEQ ID NO: 191954 - DNA, 30 bp, Artificial Sequence
  Synthetic oligonucleotide
ttccggaccgagaaagacctcgaagctatg

SEQ ID NO: 191955 - DNA, 30 bp, Artificial Sequence
  Synthetic oligonucleotide
ctaaccgacataggcaaacccccagctatg

SEQ ID NO: 191956 - DNA, 30 bp, Artificial Sequence
  Synthetic oligonucleotide
taaatgaagcacggtattcgaacggctatg

SEQ ID NO: 191957 - DNA, 30 bp, Artificial Sequence
  Synthetic oligonucleotide
agcaagattggcaaaggcctagatgctatg

SEQ ID NO: 191958 - DNA, 30 bp, Artificial Sequence
  Synthetic oligonucleotide
gggtttcaagggtccttgtcggatgctatg

SEQ ID NO: 191959 - DNA, 30 bp, Artificial Sequence
  Synthetic oligonucleotide
ttaggctcgatcattaggccttatgctatg

SEQ ID NO: 191960 - DNA, 30 bp, Artificial Sequence
  Synthetic oligonucleotide
gctggacgtatcacaagtgatcgtgctatg

SEQ ID NO: 191961 - DNA, 30 bp, Artificial Sequence
  Synthetic oligonucleotide
cgtcatctcttgatcgggactggatctatg

SEQ ID NO: 191962 - DNA, 30 bp, Artificial Sequence
  Synthetic oligonucleotide
atcacccgggtgtcgactcatatatctatg

SEQ ID NO: 191963 - DNA, 29 bp, Artificial Sequence
  Synthetic oligonucleotide
agctccagccgtatctctcgacgtctatg

SEQ ID NO: 191964 - DNA, 30 bp, Artificial Sequence
  Synthetic oligonucleotide
ttctcactcaattctttatatgtgtctatg

SEQ ID NO: 191965 - DNA, 30 bp, Artificial Sequence
  Synthetic oligonucleotide
aacgaagttacgcgcggcctaaattctatg

SEQ ID NO: 191966 - DNA, 30 bp, Artificial Sequence
  Synthetic oligonucleotide
ggaggagtacaatatttgggaacttctatg

SEQ ID NO: 191967 - DNA, 30 bp, Artificial Sequence
  Synthetic oligonucleotide
gttaggttaaaacgccgtatggcaagtatg

SEQ ID NO: 191968 - DNA, 30 bp, Artificial Sequence
  Synthetic oligonucleotide
gggctgtacagcagcgtggaccgcagtatg

SEQ ID NO: 191969 - DNA, 30 bp, Artificial Sequence
  Synthetic oligonucleotide
acgtatttcccgtacctaaggccgagtatg

SEQ ID NO: 191970 - DNA, 30 bp, Artificial Sequence
  Synthetic oligonucleotide
aacgtgtccgggggtccaaacttgagtatg

SEQ ID NO: 191971 - DNA, 30 bp, Artificial Sequence
  Synthetic oligonucleotide
gaccatgttagcggtacagtctatagtatg

SEQ ID NO: 191972 - DNA, 30 bp, Artificial Sequence
  Synthetic oligonucleotide
aagcacaaagggcgcggccaagtacgtatg

SEQ ID NO: 191973 - DNA, 30 bp, Artificial Sequence
  Synthetic oligonucleotide
gctaagtcgttgtattcgagtatccgtatg

SEQ ID NO: 191974 - DNA, 30 bp, Artificial Sequence
  Synthetic oligonucleotide
caatcaatattcggcattcgatcgcgtatg

SEQ ID NO: 191975 - DNA, 30 bp, Artificial Sequence
  Synthetic oligonucleotide
agcaggttcatgaacgacgagtatcgtatg

SEQ ID NO: 191976 - DNA, 30 bp, Artificial Sequence
  Synthetic oligonucleotide
ggcataaataccgcaaccaatggaggtatg

SEQ ID NO: 191977 - DNA, 30 bp, Artificial Sequence
  Synthetic oligonucleotide
ggtaatgcatactaacatgtacagggtatg

SEQ ID NO: 191978 - DNA, 30 bp, Artificial Sequence
  Synthetic oligonucleotide
acgggcggacggtgggcccagcctggtatg

SEQ ID NO: 191979 - DNA, 30 bp, Artificial Sequence
  Synthetic oligonucleotide
gaggcggcttagcctcaaaattctggtatg

SEQ ID NO: 191980 - DNA, 30 bp, Artificial Sequence
  Synthetic oligonucleotide
aaaggcctagtcttgagcaaagcatgtatg

SEQ ID NO: 191981 - DNA, 30 bp, Artificial Sequence
  Synthetic oligonucleotide
agatctcaggacgacggctgactatgtatg

SEQ ID NO: 191982 - DNA, 30 bp, Artificial Sequence
  Synthetic oligonucleotide
tattatatcgttagggataaatgaattatg

SEQ ID NO: 191983 - DNA, 30 bp, Artificial Sequence
  Synthetic oligonucleotide
atccacgcgggcgaatgtaatagtattatg

SEQ ID NO: 191984 - DNA, 30 bp, Artificial Sequence
  Synthetic oligonucleotide
attgatgactcaattttaggacttattatg

SEQ ID NO: 191985 - DNA, 30 bp, Artificial Sequence
  Synthetic oligonucleotide
tactgggggactctgttgattgtgcttatg

SEQ ID NO: 191986 - DNA, 30 bp, Artificial Sequence
  Synthetic oligonucleotide
gacatacttatagcagtaaacggtcttatg

SEQ ID NO: 191987 - DNA, 30 bp, Artificial Sequence
  Synthetic oligonucleotide
tagcgctgtaatttagacttttcatttatg

SEQ ID NO: 191988 - DNA, 30 bp, Artificial Sequence
  Synthetic oligonucleotide
atgatcttgtccggtatccccagatttatg

SEQ ID NO: 191989 - DNA, 30 bp, Artificial Sequence
  Synthetic oligonucleotide
ggtcagactattttgcgtctcatatttatg

SEQ ID NO: 191990 - DNA, 30 bp, Artificial Sequence
  Synthetic oligonucleotide
gaagggacgacatcgcgatatacctttatg

SEQ ID NO: 191991 - DNA, 30 bp, Artificial Sequence
  Synthetic oligonucleotide
tgtgatacgagatattgtgtggcgtttatg

SEQ ID NO: 191992 - DNA, 30 bp, Artificial Sequence
  Synthetic oligonucleotide
ggacagcccatgtgcgtgcaagattttatg

SEQ ID NO: 191993 - DNA, 30 bp, Artificial Sequence
  Synthetic oligonucleotide
agcagtgtgaagatcaggacggcttttatg

SEQ ID NO: 191994 - DNA, 30 bp, Artificial Sequence
  Synthetic oligonucleotide
ggcattattatgaaaggtaagtcttttatg

SEQ ID NO: 191995 - DNA, 30 bp, Artificial Sequence
  Synthetic oligonucleotide
attcgtccgattaatgatacccgttttatg

SEQ ID NO: 191996 - DNA, 30 bp, Artificial Sequence
  Synthetic oligonucleotide
actcgcactcatacagtgctggcaaaactg

SEQ ID NO: 191997 - DNA, 30 bp, Artificial Sequence
  Synthetic oligonucleotide
catctcaaagagacaccaggcaccaaactg

SEQ ID NO: 191998 - DNA, 30 bp, Artificial Sequence
  Synthetic oligonucleotide
tggctatgatacagcgggttaagcaaactg

SEQ ID NO: 191999 - DNA, 30 bp, Artificial Sequence
  Synthetic oligonucleotide
aaagagccgagtcaggctttgtcgaaactg

SEQ ID NO: 192000 - DNA, 30 bp, Artificial Sequence
  Synthetic oligonucleotide
acgaaagacaggcttgctctccaacaactg

SEQ ID NO: 192001 - DNA, 30 bp, Artificial Sequence
  Synthetic oligonucleotide
aattggggcagtgaggtataatcacaactg

SEQ ID NO: 192002 - DNA, 30 bp, Artificial Sequence
  Synthetic oligonucleotide
atggggatgagtcatgcttcttaccaactg

SEQ ID NO: 192003 - DNA, 30 bp, Artificial Sequence
  Synthetic oligonucleotide
actccggtgggggcgtataaccgccaactg

SEQ ID NO: 192004 - DNA, 30 bp, Artificial Sequence
  Synthetic oligonucleotide
ttaaggaccactacccgtcaagtccaactg

SEQ ID NO: 192005 - DNA, 30 bp, Artificial Sequence
  Synthetic oligonucleotide
gacgagtatgcgccagagcagggggaactg

SEQ ID NO: 192006 - DNA, 30 bp, Artificial Sequence
  Synthetic oligonucleotide
agagacttagtaactgaataagctgaactg

SEQ ID NO: 192007 - DNA, 30 bp, Artificial Sequence
  Synthetic oligonucleotide
tgaaccacaataatcgtggtcgaataactg

SEQ ID NO: 192008 - DNA, 30 bp, Artificial Sequence
  Synthetic oligonucleotide
tgtggttgtgtacgcgttgtcaagtaactg

SEQ ID NO: 192009 - DNA, 30 bp, Artificial Sequence
  Synthetic oligonucleotide
tcggtgtttgcgtgatcgatcagttaactg

SEQ ID NO: 192010 - DNA, 30 bp, Artificial Sequence
  Synthetic oligonucleotide
taccaactgtatgagggcggactttaactg

SEQ ID NO: 192011 - DNA, 30 bp, Artificial Sequence
  Synthetic oligonucleotide
attaagtcgacgcctgcaaggacgacactg

SEQ ID NO: 192012 - DNA, 30 bp, Artificial Sequence
  Synthetic oligonucleotide
taggagactcggtggatcagaatgacactg

SEQ ID NO: 192013 - DNA, 30 bp, Artificial Sequence
  Synthetic oligonucleotide
aagatcaggcgagttgaatccatgacactg

SEQ ID NO: 192014 - DNA, 30 bp, Artificial Sequence
  Synthetic oligonucleotide
atccctcgctaagtaagcgttgttccactg

SEQ ID NO: 192015 - DNA, 30 bp, Artificial Sequence
  Synthetic oligonucleotide
tggcttatgcattgtgatcaaaaagcactg

SEQ ID NO: 192016 - DNA, 30 bp, Artificial Sequence
  Synthetic oligonucleotide
ggcgtccgccaaagataacatgaagcactg

SEQ ID NO: 192017 - DNA, 30 bp, Artificial Sequence
  Synthetic oligonucleotide
aggtacatagtaggctctcttaacgcactg

SEQ ID NO: 192018 - DNA, 30 bp, Artificial Sequence
  Synthetic oligonucleotide
agttggacttacatcgtccgtttggcactg

SEQ ID NO: 192019 - DNA, 30 bp, Artificial Sequence
  Synthetic oligonucleotide
ggcagagagagagacgtccgggctgcactg

SEQ ID NO: 192020 - DNA, 30 bp, Artificial Sequence
  Synthetic oligonucleotide
tcctcgcagaacccatagggtggtgcactg

SEQ ID NO: 192021 - DNA, 30 bp, Artificial Sequence
  Synthetic oligonucleotide
gagggtatttgagtggccagtgcatcactg

SEQ ID NO: 192022 - DNA, 30 bp, Artificial Sequence
  Synthetic oligonucleotide
tcttagcggctactgacaaagtcctcactg

SEQ ID NO: 192023 - DNA, 30 bp, Artificial Sequence
  Synthetic oligonucleotide
atgtccgtggaggtagcttagtattcactg

SEQ ID NO: 192024 - DNA, 30 bp, Artificial Sequence
  Synthetic oligonucleotide
agataaattgtgtatgtataatgttcactg

SEQ ID NO: 192025 - DNA, 30 bp, Artificial Sequence
  Synthetic oligonucleotide
agtcgcatctatttcgaatactaacgactg

SEQ ID NO: 192026 - DNA, 30 bp, Artificial Sequence
  Synthetic oligonucleotide
ttgggcagtaaattaacagtcttacgactg

SEQ ID NO: 192027 - DNA, 30 bp, Artificial Sequence
  Synthetic oligonucleotide
gacaggaccgatgactaatccaaccgactg

SEQ ID NO: 192028 - DNA, 30 bp, Artificial Sequence
  Synthetic oligonucleotide
ggcactgcgggttgcgtgactgcccgactg

SEQ ID NO: 192029 - DNA, 30 bp, Artificial Sequence
  Synthetic oligonucleotide
tcttaagtggccaagaggaattcaggactg

SEQ ID NO: 192030 - DNA, 30 bp, Artificial Sequence
  Synthetic oligonucleotide
tgtgtcctgttatggtacgagagcggactg

SEQ ID NO: 192031 - DNA, 30 bp, Artificial Sequence
  Synthetic oligonucleotide
gactaaaagaagcttggtggtaggggactg

SEQ ID NO: 192032 - DNA, 30 bp, Artificial Sequence
  Synthetic oligonucleotide
tgatcccagtctgaagtacgactgggactg

SEQ ID NO: 192033 - DNA, 30 bp, Artificial Sequence
  Synthetic oligonucleotide
ggcaccgcttatccctttcaccgtggactg

SEQ ID NO: 192034 - DNA, 30 bp, Artificial Sequence
  Synthetic oligonucleotide
ttgaagtcctatacggttgaatgatgactg

SEQ ID NO: 192035 - DNA, 30 bp, Artificial Sequence
  Synthetic oligonucleotide
aaggtctagccgactcctcacgagtgactg

SEQ ID NO: 192036 - DNA, 30 bp, Artificial Sequence
  Synthetic oligonucleotide
tacaactcacttgcctttagccattgactg

SEQ ID NO: 192037 - DNA, 30 bp, Artificial Sequence
  Synthetic oligonucleotide
ccattatattataagtttgattgttgactg

SEQ ID NO: 192038 - DNA, 30 bp, Artificial Sequence
  Synthetic oligonucleotide
ctactggatcgtacctttcgtgtttgactg

SEQ ID NO: 192039 - DNA, 30 bp, Artificial Sequence
  Synthetic oligonucleotide
acgaactttaaacgatacatagaaatactg

SEQ ID NO: 192040 - DNA, 30 bp, Artificial Sequence
  Synthetic oligonucleotide
taatccggtcgtagcgatactcagatactg

SEQ ID NO: 192041 - DNA, 30 bp, Artificial Sequence
  Synthetic oligonucleotide
gttgcaatgctgagtaggcaacggatactg

SEQ ID NO: 192042 - DNA, 30 bp, Artificial Sequence
  Synthetic oligonucleotide
atgttaaactttgatgggttgcatatactg

SEQ ID NO: 192043 - DNA, 30 bp, Artificial Sequence
  Synthetic oligonucleotide
gcttgaaagaagcgaagattcctactactg

SEQ ID NO: 192044 - DNA, 30 bp, Artificial Sequence
  Synthetic oligonucleotide
gggccggtcaaagagggtttttgcctactg

SEQ ID NO: 192045 - DNA, 30 bp, Artificial Sequence
  Synthetic oligonucleotide
ctgcaccgcctctcgtgtagtgcgctactg

SEQ ID NO: 192046 - DNA, 30 bp, Artificial Sequence
  Synthetic oligonucleotide
agtctagcctgtgcgctacggaggctactg

SEQ ID NO: 192047 - DNA, 30 bp, Artificial Sequence
  Synthetic oligonucleotide
gacgggctatggaggtactacattctactg

SEQ ID NO: 192048 - DNA, 30 bp, Artificial Sequence
  Synthetic oligonucleotide
ttcgcacagcctaatgcggcatgagtactg

SEQ ID NO: 192049 - DNA, 30 bp, Artificial Sequence
  Synthetic oligonucleotide
atgctgggttagaagtgcagacacgtactg

SEQ ID NO: 192050 - DNA, 30 bp, Artificial Sequence
  Synthetic oligonucleotide
tggttcctagttctgacgacatcggtactg

SEQ ID NO: 192051 - DNA, 30 bp, Artificial Sequence
  Synthetic oligonucleotide
caggccacatgggaaaccgtgcatgtactg

SEQ ID NO: 192052 - DNA, 30 bp, Artificial Sequence
  Synthetic oligonucleotide
aatcgcttgcaatatagaacacaattactg

SEQ ID NO: 192053 - DNA, 30 bp, Artificial Sequence
  Synthetic oligonucleotide
acagaaccgtatctttaccgcagtttactg

SEQ ID NO: 192054 - DNA, 30 bp, Artificial Sequence
  Synthetic oligonucleotide
gcggctccattttagctgtgtggaaacctg

SEQ ID NO: 192055 - DNA, 30 bp, Artificial Sequence
  Synthetic oligonucleotide
gagtatacagagaaaaaagactgaaacctg

SEQ ID NO: 192056 - DNA, 30 bp, Artificial Sequence
  Synthetic oligonucleotide
ttgcatcctaagcggtgccagttaaacctg

SEQ ID NO: 192057 - DNA, 30 bp, Artificial Sequence
  Synthetic oligonucleotide
ttgtgtagcctcggagtagcctggaacctg

SEQ ID NO: 192058 - DNA, 30 bp, Artificial Sequence
  Synthetic oligonucleotide
taggagttaatagggaacacgttgaacctg

SEQ ID NO: 192059 - DNA, 30 bp, Artificial Sequence
  Synthetic oligonucleotide
tctggggttggaaaacggctaagtaacctg

SEQ ID NO: 192060 - DNA, 30 bp, Artificial Sequence
  Synthetic oligonucleotide
ttgcccggtgcgagttaattagagcacctg

SEQ ID NO: 192061 - DNA, 30 bp, Artificial Sequence
  Synthetic oligonucleotide
acaaccaagaagacattggctactcacctg

SEQ ID NO: 192062 - DNA, 30 bp, Artificial Sequence
  Synthetic oligonucleotide
tcgtagcacgtggtaaattagccggacctg

SEQ ID NO: 192063 - DNA, 30 bp, Artificial Sequence
  Synthetic oligonucleotide
catgccctgtagctttgtggcgtggacctg

SEQ ID NO: 192064 - DNA, 30 bp, Artificial Sequence
  Synthetic oligonucleotide
gtgacgacgtcctgactaatctgtgacctg

SEQ ID NO: 192065 - DNA, 30 bp, Artificial Sequence
  Synthetic oligonucleotide
atcagtgacttaaataccgcataatacctg

SEQ ID NO: 192066 - DNA, 31 bp, Artificial Sequence
  Synthetic oligonucleotide
tactgaccgaatcgatgcgcccggctacctg

SEQ ID NO: 192067 - DNA, 30 bp, Artificial Sequence
  Synthetic oligonucleotide
taattcgccctgccatttatcggctacctg

SEQ ID NO: 192068 - DNA, 30 bp, Artificial Sequence
  Synthetic oligonucleotide
gttaggagtattttgaagtgtggttacctg

SEQ ID NO: 192069 - DNA, 29 bp, Artificial Sequence
  Synthetic oligonucleotide
ggcgcgatcaagtcataaaatagaccctg

SEQ ID NO: 192070 - DNA, 30 bp, Artificial Sequence
  Synthetic oligonucleotide
atcgcactttgcatgctcacgtggaccctg

SEQ ID NO: 192071 - DNA, 30 bp, Artificial Sequence
  Synthetic oligonucleotide
tattcgacgttaggagggcttgtgaccctg

SEQ ID NO: 192072 - DNA, 30 bp, Artificial Sequence
  Synthetic oligonucleotide
gaagaataaagtgggagatccgttaccctg

SEQ ID NO: 192073 - DNA, 30 bp, Artificial Sequence
  Synthetic oligonucleotide
gttaaaaccaaggtacgttggtaacccctg

SEQ ID NO: 192074 - DNA, 30 bp, Artificial Sequence
  Synthetic oligonucleotide
attgacaaaatccgatttcattgacccctg

SEQ ID NO: 192075 - DNA, 30 bp, Artificial Sequence
  Synthetic oligonucleotide
ggcactaacggtggttaaacgttccccctg

SEQ ID NO: 192076 - DNA, 30 bp, Artificial Sequence
  Synthetic oligonucleotide
cttggggagactgcggttagctgcgccctg

SEQ ID NO: 192077 - DNA, 30 bp, Artificial Sequence
  Synthetic oligonucleotide
tagtctagggatagctgcccgtgggccctg

SEQ ID NO: 192078 - DNA, 30 bp, Artificial Sequence
  Synthetic oligonucleotide
aatcataagggtaacataatgttggccctg

SEQ ID NO: 192079 - DNA, 30 bp, Artificial Sequence
  Synthetic oligonucleotide
gatcccaggataacgagtggcggtgccctg

SEQ ID NO: 192080 - DNA, 30 bp, Artificial Sequence
  Synthetic oligonucleotide
agaagcagcaaagtacattaaaaatccctg

SEQ ID NO: 192081 - DNA, 30 bp, Artificial Sequence
  Synthetic oligonucleotide
agtgcaagcgactatacagaccgaagcctg

SEQ ID NO: 192082 - DNA, 30 bp, Artificial Sequence
  Synthetic oligonucleotide
gccgtcacaacgtagatctcggacagcctg

SEQ ID NO: 192083 - DNA, 30 bp, Artificial Sequence
  Synthetic oligonucleotide
cttagctccgcaagctggagcatcagcctg

SEQ ID NO: 192084 - DNA, 30 bp, Artificial Sequence
  Synthetic oligonucleotide
caacacgacaggctcgtagggaagagcctg

SEQ ID NO: 192085 - DNA, 30 bp, Artificial Sequence
  Synthetic oligonucleotide
gtgagaaatatctaaagggtggagagcctg

SEQ ID NO: 192086 - DNA, 30 bp, Artificial Sequence
  Synthetic oligonucleotide
cgctgtctgagcccccattgtacgagcctg

SEQ ID NO: 192087 - DNA, 30 bp, Artificial Sequence
  Synthetic oligonucleotide
tccagagtcccggtaaaccaccttagcctg

SEQ ID NO: 192088 - DNA, 30 bp, Artificial Sequence
  Synthetic oligonucleotide
acctacgacggcgacgtagtactacgcctg

SEQ ID NO: 192089 - DNA, 30 bp, Artificial Sequence
  Synthetic oligonucleotide
gacgggaaaatggggggtaggttccgcctg

SEQ ID NO: 192090 - DNA, 30 bp, Artificial Sequence
  Synthetic oligonucleotide
ccactagaaagtcaatagtatttgcgcctg

SEQ ID NO: 192091 - DNA, 30 bp, Artificial Sequence
  Synthetic oligonucleotide
ccgatgctactactgctacagggaggcctg

SEQ ID NO: 192092 - DNA, 29 bp, Artificial Sequence
  Synthetic oligonucleotide
gattccggacgtctagacggtcgggcctg

SEQ ID NO: 192093 - DNA, 30 bp, Artificial Sequence
  Synthetic oligonucleotide
ctatggttatactgacatcaataaatcctg

SEQ ID NO: 192094 - DNA, 30 bp, Artificial Sequence
  Synthetic oligonucleotide
gcctggctggcaacggctgtatgaatcctg

SEQ ID NO: 192095 - DNA, 30 bp, Artificial Sequence
  Synthetic oligonucleotide
tccggagatccccggatcgtccacatcctg

SEQ ID NO: 192096 - DNA, 30 bp, Artificial Sequence
  Synthetic oligonucleotide
tcggcgcgtcttctagggaaacgcatcctg

SEQ ID NO: 192097 - DNA, 30 bp, Artificial Sequence
  Synthetic oligonucleotide
gcgtaacatgaacaggatttacagatcctg

SEQ ID NO: 192098 - DNA, 30 bp, Artificial Sequence
  Synthetic oligonucleotide
acgcgggaagcaacgtgtaacgggatcctg

SEQ ID NO: 192099 - DNA, 30 bp, Artificial Sequence
  Synthetic oligonucleotide
tgttgacatgcttaagtccaggtgatcctg

SEQ ID NO: 192100 - DNA, 31 bp, Artificial Sequence
  Synthetic oligonucleotide
ttacaattggtgactgataacctgactcctg

SEQ ID NO: 192101 - DNA, 30 bp, Artificial Sequence
  Synthetic oligonucleotide
ttggacttcaacatatcggcacccctcctg

SEQ ID NO: 192102 - DNA, 30 bp, Artificial Sequence
  Synthetic oligonucleotide
cggcatcgtcctagaagtatcgggctcctg

SEQ ID NO: 192103 - DNA, 30 bp, Artificial Sequence
  Synthetic oligonucleotide
caacttttgggtgggcaacggaatctcctg

SEQ ID NO: 192104 - DNA, 30 bp, Artificial Sequence
  Synthetic oligonucleotide
ggcacaccacggcccaatcggcatctcctg

SEQ ID NO: 192105 - DNA, 30 bp, Artificial Sequence
  Synthetic oligonucleotide
tacactaggagcacaactcccgttctcctg

SEQ ID NO: 192106 - DNA, 30 bp, Artificial Sequence
  Synthetic oligonucleotide
tgcgaagtcctacgcatgtattctgtcctg

SEQ ID NO: 192107 - DNA, 30 bp, Artificial Sequence
  Synthetic oligonucleotide
gacgtgcaccgaatatagtgggttgtcctg

SEQ ID NO: 192108 - DNA, 30 bp, Artificial Sequence
  Synthetic oligonucleotide
aaggtagcccggagccgtcatgacttcctg

SEQ ID NO: 192109 - DNA, 30 bp, Artificial Sequence
  Synthetic oligonucleotide
acacgtgataggggcagtgattgcttcctg

SEQ ID NO: 192110 - DNA, 30 bp, Artificial Sequence
  Synthetic oligonucleotide
ggcgaagtctgtgtgttgtggatgttcctg

SEQ ID NO: 192111 - DNA, 30 bp, Artificial Sequence
  Synthetic oligonucleotide
actccaccagaggccggagatggcaagctg

SEQ ID NO: 192112 - DNA, 30 bp, Artificial Sequence
  Synthetic oligonucleotide
tttgctatacagttcatggaactcaagctg

SEQ ID NO: 192113 - DNA, 30 bp, Artificial Sequence
  Synthetic oligonucleotide
ggaggtttcgacctccggggcctccagctg

SEQ ID NO: 192114 - DNA, 30 bp, Artificial Sequence
  Synthetic oligonucleotide
tttgagggtacgcaaaaaggaaggcagctg

SEQ ID NO: 192115 - DNA, 30 bp, Artificial Sequence
  Synthetic oligonucleotide
cagccccgtttggcgataattcggcagctg

SEQ ID NO: 192116 - DNA, 30 bp, Artificial Sequence
  Synthetic oligonucleotide
aaagtatatcggcaagagaaccgagagctg

SEQ ID NO: 192117 - DNA, 30 bp, Artificial Sequence
  Synthetic oligonucleotide
cgtacgcatcgggggaagatggccgagctg

SEQ ID NO: 192118 - DNA, 30 bp, Artificial Sequence
  Synthetic oligonucleotide
acgttgactccaagtctttcgcatgagctg

SEQ ID NO: 192119 - DNA, 30 bp, Artificial Sequence
  Synthetic oligonucleotide
cggaaatctataagcaaagtacgtgagctg

SEQ ID NO: 192120 - DNA, 30 bp, Artificial Sequence
  Synthetic oligonucleotide
agcggggcccacactctccgattctagctg

SEQ ID NO: 192121 - DNA, 30 bp, Artificial Sequence
  Synthetic oligonucleotide
gactattggaggccgtcgagtgtgtagctg

SEQ ID NO: 192122 - DNA, 30 bp, Artificial Sequence
  Synthetic oligonucleotide
gttcgcggcaattaagagcctaattagctg

SEQ ID NO: 192123 - DNA, 30 bp, Artificial Sequence
  Synthetic oligonucleotide
ggacagttaagagggcttttggaaacgctg

SEQ ID NO: 192124 - DNA, 30 bp, Artificial Sequence
  Synthetic oligonucleotide
ggaatgcacgccgacaaggctgaaacgctg

SEQ ID NO: 192125 - DNA, 30 bp, Artificial Sequence
  Synthetic oligonucleotide
aggacttgtgcgttgagtccggcaacgctg

SEQ ID NO: 192126 - DNA, 30 bp, Artificial Sequence
  Synthetic oligonucleotide
gacctcgtctgggctggcaagcgcacgctg

SEQ ID NO: 192127 - DNA, 30 bp, Artificial Sequence
  Synthetic oligonucleotide
tgtaaatagtgccggagaagcggcacgctg

SEQ ID NO: 192128 - DNA, 30 bp, Artificial Sequence
  Synthetic oligonucleotide
tcatgtctgtccgtcggatcagggacgctg

SEQ ID NO: 192129 - DNA, 30 bp, Artificial Sequence
  Synthetic oligonucleotide
gtccaaatgtaaatatcaaaagatacgctg

SEQ ID NO: 192130 - DNA, 30 bp, Artificial Sequence
  Synthetic oligonucleotide
acacccgtcctggaggacgaagaaccgctg

SEQ ID NO: 192131 - DNA, 30 bp, Artificial Sequence
  Synthetic oligonucleotide
ggtgttatgattcaggcatatcttgcgctg

SEQ ID NO: 192132 - DNA, 30 bp, Artificial Sequence
  Synthetic oligonucleotide
tgtcaatatcttaactaagtttcctcgctg

SEQ ID NO: 192133 - DNA, 30 bp, Artificial Sequence
  Synthetic oligonucleotide
cgttaatggacttttctatcgccgtcgctg

SEQ ID NO: 192134 - DNA, 30 bp, Artificial Sequence
  Synthetic oligonucleotide
agtccgaggaacgagtccgggcaaaggctg

SEQ ID NO: 192135 - DNA, 30 bp, Artificial Sequence
  Synthetic oligonucleotide
tcaggtgctctggaacgatactgaaggctg

SEQ ID NO: 192136 - DNA, 30 bp, Artificial Sequence
  Synthetic oligonucleotide
gaacctcgaagagcaccgagccaacggctg

SEQ ID NO: 192137 - DNA, 30 bp, Artificial Sequence
  Synthetic oligonucleotide
ccatgtcttttcagggggacgatacggctg

SEQ ID NO: 192138 - DNA, 30 bp, Artificial Sequence
  Synthetic oligonucleotide
ggtgatagtctgcatggcactgtacggctg

SEQ ID NO: 192139 - DNA, 30 bp, Artificial Sequence
  Synthetic oligonucleotide
gacctcgagtacaataagctggaccggctg

SEQ ID NO: 192140 - DNA, 30 bp, Artificial Sequence
  Synthetic oligonucleotide
ttgagctaccgtgtcgcaagccgtcggctg

SEQ ID NO: 192141 - DNA, 30 bp, Artificial Sequence
  Synthetic oligonucleotide
atagggtctctgggttacgaaagagggctg

SEQ ID NO: 192142 - DNA, 30 bp, Artificial Sequence
  Synthetic oligonucleotide
tctatggtcactcgaattctagtcgggctg

SEQ ID NO: 192143 - DNA, 30 bp, Artificial Sequence
  Synthetic oligonucleotide
tcagtgtagtgctccatcgaaatggggctg

SEQ ID NO: 192144 - DNA, 30 bp, Artificial Sequence
  Synthetic oligonucleotide
tcatctagaattaagaaaactcatgggctg

SEQ ID NO: 192145 - DNA, 30 bp, Artificial Sequence
  Synthetic oligonucleotide
gcgcgctgcgttcaggtacacagtgggctg

SEQ ID NO: 192146 - DNA, 30 bp, Artificial Sequence
  Synthetic oligonucleotide
acactccggaaagttatagcataatggctg

SEQ ID NO: 192147 - DNA, 30 bp, Artificial Sequence
  Synthetic oligonucleotide
gttatcaacacggggcggactatatggctg

SEQ ID NO: 192148 - DNA, 30 bp, Artificial Sequence
  Synthetic oligonucleotide
gttagatctctatgatcggcttcttggctg

SEQ ID NO: 192149 - DNA, 30 bp, Artificial Sequence
  Synthetic oligonucleotide
ggtgcgaaacagtctagtgacccgatgctg

SEQ ID NO: 192150 - DNA, 30 bp, Artificial Sequence
  Synthetic oligonucleotide
tctaagggaaaccagatgaaatttatgctg

SEQ ID NO: 192151 - DNA, 30 bp, Artificial Sequence
  Synthetic oligonucleotide
tgggggtcgaacctcgtgagtacactgctg

SEQ ID NO: 192152 - DNA, 30 bp, Artificial Sequence
  Synthetic oligonucleotide
cagacaggacagctttagggattactgctg

SEQ ID NO: 192153 - DNA, 30 bp, Artificial Sequence
  Synthetic oligonucleotide
aagagttgaagatatttgtgcaggctgctg

SEQ ID NO: 192154 - DNA, 30 bp, Artificial Sequence
  Synthetic oligonucleotide
gcatgcaagggtgagtgtaaaggtctgctg

SEQ ID NO: 192155 - DNA, 30 bp, Artificial Sequence
  Synthetic oligonucleotide
aaaccgcgtgagtccgtaaccaaagtgctg

SEQ ID NO: 192156 - DNA, 30 bp, Artificial Sequence
  Synthetic oligonucleotide
aatacaacgatttgtcctgtttaggtgctg

SEQ ID NO: 192157 - DNA, 30 bp, Artificial Sequence
  Synthetic oligonucleotide
gtcggccgacgggttagaggacgattgctg

SEQ ID NO: 192158 - DNA, 30 bp, Artificial Sequence
  Synthetic oligonucleotide
cggctcgagtttttcaagccgatattgctg

SEQ ID NO: 192159 - DNA, 30 bp, Artificial Sequence
  Synthetic oligonucleotide
atggccctacactccagacagcccttgctg

SEQ ID NO: 192160 - DNA, 30 bp, Artificial Sequence
  Synthetic oligonucleotide
tttgatacaaaggtggcgggacacaatctg

SEQ ID NO: 192161 - DNA, 30 bp, Artificial Sequence
  Synthetic oligonucleotide
gacgctcagttagtaggtaagctcaatctg

SEQ ID NO: 192162 - DNA, 30 bp, Artificial Sequence
  Synthetic oligonucleotide
agtatcaagaagctataaaattagaatctg

SEQ ID NO: 192163 - DNA, 30 bp, Artificial Sequence
  Synthetic oligonucleotide
tgctgggtacatttaatgttatcacatctg

SEQ ID NO: 192164 - DNA, 30 bp, Artificial Sequence
  Synthetic oligonucleotide
gagtatggtataggtattgccttccatctg

SEQ ID NO: 192165 - DNA, 30 bp, Artificial Sequence
  Synthetic oligonucleotide
gcgaggtaaattattcacaactatcatctg

SEQ ID NO: 192166 - DNA, 30 bp, Artificial Sequence
  Synthetic oligonucleotide
cacccggtatgttactacgggtacgatctg

SEQ ID NO: 192167 - DNA, 30 bp, Artificial Sequence
  Synthetic oligonucleotide
aattaggcagcagagggaggtaaggatctg

SEQ ID NO: 192168 - DNA, 30 bp, Artificial Sequence
  Synthetic oligonucleotide
gccggaacgcatcccgagtggtgtgatctg

SEQ ID NO: 192169 - DNA, 30 bp, Artificial Sequence
  Synthetic oligonucleotide
ggaagccccgggtctgggccgatgtatctg

SEQ ID NO: 192170 - DNA, 30 bp, Artificial Sequence
  Synthetic oligonucleotide
gtgcccggaagcgcaaagagcttaactctg

SEQ ID NO: 192171 - DNA, 30 bp, Artificial Sequence
  Synthetic oligonucleotide
aaagcgatggcaatcctgctcggccctctg

SEQ ID NO: 192172 - DNA, 30 bp, Artificial Sequence
  Synthetic oligonucleotide
ccctggtacatcgctcttaaacaagctctg

SEQ ID NO: 192173 - DNA, 30 bp, Artificial Sequence
  Synthetic oligonucleotide
acgtttttcagccagtttacttcagctctg

SEQ ID NO: 192174 - DNA, 30 bp, Artificial Sequence
  Synthetic oligonucleotide
gccgatatgagatgtaggagcggagctctg

SEQ ID NO: 192175 - DNA, 30 bp, Artificial Sequence
  Synthetic oligonucleotide
catgtaggcgactcgtaatcaaaggctctg

SEQ ID NO: 192176 - DNA, 30 bp, Artificial Sequence
  Synthetic oligonucleotide
cttcaacacacatcgtttcgacaggctctg

SEQ ID NO: 192177 - DNA, 30 bp, Artificial Sequence
  Synthetic oligonucleotide
ggggatgtcggtggagggctcggggctctg

SEQ ID NO: 192178 - DNA, 30 bp, Artificial Sequence
  Synthetic oligonucleotide
gggagaaccggtttataagcaaactctctg

SEQ ID NO: 192179 - DNA, 30 bp, Artificial Sequence
  Synthetic oligonucleotide
acgaaggttttgacgactattgtctctctg

SEQ ID NO: 192180 - DNA, 30 bp, Artificial Sequence
  Synthetic oligonucleotide
ttcttgccctggagttgggaattcagtctg

SEQ ID NO: 192181 - DNA, 30 bp, Artificial Sequence
  Synthetic oligonucleotide
caggtagatgcaaggcatagtgcgagtctg

SEQ ID NO: 192182 - DNA, 29 bp, Artificial Sequence
  Synthetic oligonucleotide
acggggaacgatagacgtcaggacgtctg

SEQ ID NO: 192183 - DNA, 40 bp, Artificial Sequence
  Synthetic oligonucleotide
gatcgctaagaagtctccgtgagcggctcacttgcgtctg

SEQ ID NO: 192184 - DNA, 30 bp, Artificial Sequence
  Synthetic oligonucleotide
accaacgttggcatgcctaaaactcgtctg

SEQ ID NO: 192185 - DNA, 30 bp, Artificial Sequence
  Synthetic oligonucleotide
actggtgatgtttttcatgcgggtcgtctg

SEQ ID NO: 192186 - DNA, 30 bp, Artificial Sequence
  Synthetic oligonucleotide
ggccaggggcgtcccggaaccaacggtctg

SEQ ID NO: 192187 - DNA, 30 bp, Artificial Sequence
  Synthetic oligonucleotide
agagtagcggacgcggtcgagcacggtctg

SEQ ID NO: 192188 - DNA, 30 bp, Artificial Sequence
  Synthetic oligonucleotide
atggtaatccatacttctgtgaggggtctg

SEQ ID NO: 192189 - DNA, 30 bp, Artificial Sequence
  Synthetic oligonucleotide
ggagtcatagcgtaagacgaaaaatgtctg

SEQ ID NO: 192190 - DNA, 30 bp, Artificial Sequence
  Synthetic oligonucleotide
ggcctgggaggctacattagtcaatgtctg

SEQ ID NO: 192191 - DNA, 30 bp, Artificial Sequence
  Synthetic oligonucleotide
atcttaacaaagttggatcaacgatgtctg

SEQ ID NO: 192192 - DNA, 30 bp, Artificial Sequence
  Synthetic oligonucleotide
acggtcgtaaggaatgggggaggaattctg

SEQ ID NO: 192193 - DNA, 30 bp, Artificial Sequence
  Synthetic oligonucleotide
ccacagataattgagtgctatatccttctg

SEQ ID NO: 192194 - DNA, 30 bp, Artificial Sequence
  Synthetic oligonucleotide
ctttttggagagtgggcggaatagcttctg

SEQ ID NO: 192195 - DNA, 30 bp, Artificial Sequence
  Synthetic oligonucleotide
ggaaatcggggaggcatccccaatcttctg

SEQ ID NO: 192196 - DNA, 30 bp, Artificial Sequence
  Synthetic oligonucleotide
tagtgcaagcggtacattgtacttcttctg

SEQ ID NO: 192197 - DNA, 30 bp, Artificial Sequence
  Synthetic oligonucleotide
ctttgaggatttgatatatgatatgttctg

SEQ ID NO: 192198 - DNA, 30 bp, Artificial Sequence
  Synthetic oligonucleotide
ggtggacggcaaactgggatgagatttctg

SEQ ID NO: 192199 - DNA, 30 bp, Artificial Sequence
  Synthetic oligonucleotide
agaaggggagtgtggggctcgacttttctg

SEQ ID NO: 192200 - DNA, 30 bp, Artificial Sequence
  Synthetic oligonucleotide
gaagtcagcggcatcctctggttaaaagtg

SEQ ID NO: 192201 - DNA, 30 bp, Artificial Sequence
  Synthetic oligonucleotide
gatacgttgtaagtaattagacagaaagtg

SEQ ID NO: 192202 - DNA, 30 bp, Artificial Sequence
  Synthetic oligonucleotide
cagcagtgagatcgcttgcctagtaaagtg

SEQ ID NO: 192203 - DNA, 30 bp, Artificial Sequence
  Synthetic oligonucleotide
gttatggtccgtggttggcgttgacaagtg

SEQ ID NO: 192204 - DNA, 30 bp, Artificial Sequence
  Synthetic oligonucleotide
ccacacctgtggcagggcacaccccaagtg

SEQ ID NO: 192205 - DNA, 30 bp, Artificial Sequence
  Synthetic oligonucleotide
cgaatctgtagtcgattaacaatgcaagtg

SEQ ID NO: 192206 - DNA, 29 bp, Artificial Sequence
  Synthetic oligonucleotide
tgcgggttcccatatccacgggagaagtg

SEQ ID NO: 192207 - DNA, 30 bp, Artificial Sequence
  Synthetic oligonucleotide
cagtcaatgtaatgtagcgatcgggaagtg

SEQ ID NO: 192208 - DNA, 30 bp, Artificial Sequence
  Synthetic oligonucleotide
aggtcttgtactagaagagatccgtaagtg

SEQ ID NO: 192209 - DNA, 30 bp, Artificial Sequence
  Synthetic oligonucleotide
cgccgcagaacatggtcggctcggtaagtg

SEQ ID NO: 192210 - DNA, 30 bp, Artificial Sequence
  Synthetic oligonucleotide
tctcaaaagtacgcccgctatgagacagtg

SEQ ID NO: 192211 - DNA, 30 bp, Artificial Sequence
  Synthetic oligonucleotide
cttcgtagaatgaggatgggaccgacagtg

SEQ ID NO: 192212 - DNA, 30 bp, Artificial Sequence
  Synthetic oligonucleotide
agtacccaaacttgcgtggtttggacagtg

SEQ ID NO: 192213 - DNA, 30 bp, Artificial Sequence
  Synthetic oligonucleotide
ttcggctatctatctgtccgggtgacagtg

SEQ ID NO: 192214 - DNA, 30 bp, Artificial Sequence
  Synthetic oligonucleotide
ataatacggggcatgggccaacatacagtg

SEQ ID NO: 192215 - DNA, 30 bp, Artificial Sequence
  Synthetic oligonucleotide
ccggctagttcgggatacctatgaccagtg

SEQ ID NO: 192216 - DNA, 30 bp, Artificial Sequence
  Synthetic oligonucleotide
aagcgaagaaaaatgatttctatagcagtg

SEQ ID NO: 192217 - DNA, 30 bp, Artificial Sequence
  Synthetic oligonucleotide
actggactgcatatcgacaaagccgcagtg

SEQ ID NO: 192218 - DNA, 30 bp, Artificial Sequence
  Synthetic oligonucleotide
gttcgaaataggtaaaagggtgccgcagtg

SEQ ID NO: 192219 - DNA, 30 bp, Artificial Sequence
  Synthetic oligonucleotide
gtaacatgacgaaagatgcacagatcagtg

SEQ ID NO: 192220 - DNA, 30 bp, Artificial Sequence
  Synthetic oligonucleotide
tgtctcgatggaatcagataggcgtcagtg

SEQ ID NO: 192221 - DNA, 29 bp, Artificial Sequence
  Synthetic oligonucleotide
atcgacgcaaaaacgatgtgggttcagtg

SEQ ID NO: 192222 - DNA, 30 bp, Artificial Sequence
  Synthetic oligonucleotide
agtctgaaggaacggcccgtcagcagagtg

SEQ ID NO: 192223 - DNA, 30 bp, Artificial Sequence
  Synthetic oligonucleotide
cttctaactgctggttcttaactcagagtg

SEQ ID NO: 192224 - DNA, 30 bp, Artificial Sequence
  Synthetic oligonucleotide
gaatgatttctgtacatcgagtagagagtg

SEQ ID NO: 192225 - DNA, 30 bp, Artificial Sequence
  Synthetic oligonucleotide
tcagtcggtcggtcagttcagccgagagtg

SEQ ID NO: 192226 - DNA, 30 bp, Artificial Sequence
  Synthetic oligonucleotide
gtcagttgacatgtgccaacctgtagagtg

SEQ ID NO: 192227 - DNA, 30 bp, Artificial Sequence
  Synthetic oligonucleotide
tcaataatttcagtgagtttatttagagtg

SEQ ID NO: 192228 - DNA, 30 bp, Artificial Sequence
  Synthetic oligonucleotide
ggggccggccgggtagctgtataacgagtg

SEQ ID NO: 192229 - DNA, 30 bp, Artificial Sequence
  Synthetic oligonucleotide
gagtagctgtctgaaccacaaagccgagtg

SEQ ID NO: 192230 - DNA, 30 bp, Artificial Sequence
  Synthetic oligonucleotide
taaagaactccaagttaatacatccgagtg

SEQ ID NO: 192231 - DNA, 30 bp, Artificial Sequence
  Synthetic oligonucleotide
tgtggtaaagtagtatgggagtcgcgagtg

SEQ ID NO: 192232 - DNA, 30 bp, Artificial Sequence
  Synthetic oligonucleotide
ttgataggaccgtccattacctttcgagtg

SEQ ID NO: 192233 - DNA, 30 bp, Artificial Sequence
  Synthetic oligonucleotide
ggatctgggcaaggaagggtggacggagtg

SEQ ID NO: 192234 - DNA, 30 bp, Artificial Sequence
  Synthetic oligonucleotide
ccgagttgccgggggttacttaccggagtg

SEQ ID NO: 192235 - DNA, 30 bp, Artificial Sequence
  Synthetic oligonucleotide
tatagttgaattaagggagaacgcggagtg

SEQ ID NO: 192236 - DNA, 30 bp, Artificial Sequence
  Synthetic oligonucleotide
taaagtggcctggtagacgaatcgggagtg

SEQ ID NO: 192237 - DNA, 30 bp, Artificial Sequence
  Synthetic oligonucleotide
aggccagcttacgcgggcggctggggagtg

SEQ ID NO: 192238 - DNA, 30 bp, Artificial Sequence
  Synthetic oligonucleotide
ctaaacttttggggggcacgaactggagtg

SEQ ID NO: 192239 - DNA, 30 bp, Artificial Sequence
  Synthetic oligonucleotide
gaggtttatataggctatatgggctgagtg

SEQ ID NO: 192240 - DNA, 30 bp, Artificial Sequence
  Synthetic oligonucleotide
tcgtttagttcgcatgatgaattctgagtg

SEQ ID NO: 192241 - DNA, 30 bp, Artificial Sequence
  Synthetic oligonucleotide
gctcattatagttccaccgtcacgtgagtg

SEQ ID NO: 192242 - DNA, 30 bp, Artificial Sequence
  Synthetic oligonucleotide
gtactagttagacttttgtcctcgtgagtg

SEQ ID NO: 192243 - DNA, 30 bp, Artificial Sequence
  Synthetic oligonucleotide
acgtgggggtccaatgcgcccgggtgagtg

SEQ ID NO: 192244 - DNA, 30 bp, Artificial Sequence
  Synthetic oligonucleotide
ggccacgctctgttcgtgctgttttgagtg

SEQ ID NO: 192245 - DNA, 30 bp, Artificial Sequence
  Synthetic oligonucleotide
agacagcccgttaccttggataaaatagtg

SEQ ID NO: 192246 - DNA, 30 bp, Artificial Sequence
  Synthetic oligonucleotide
cggccaattttagcagatataccaatagtg

SEQ ID NO: 192247 - DNA, 30 bp, Artificial Sequence
  Synthetic oligonucleotide
gctgttacaaattgggtcgatgcgctagtg

SEQ ID NO: 192248 - DNA, 30 bp, Artificial Sequence
  Synthetic oligonucleotide
aagtgcggactagtaactcgcaggctagtg

SEQ ID NO: 192249 - DNA, 30 bp, Artificial Sequence
  Synthetic oligonucleotide
taagcagtagcattaacgcatatgctagtg

SEQ ID NO: 192250 - DNA, 30 bp, Artificial Sequence
  Synthetic oligonucleotide
cctccggtgatcaacgaaagacgcgtagtg

SEQ ID NO: 192251 - DNA, 30 bp, Artificial Sequence
  Synthetic oligonucleotide
ggccccgtccctaccacaatatcggtagtg

SEQ ID NO: 192252 - DNA, 30 bp, Artificial Sequence
  Synthetic oligonucleotide
gcagatcatgttcggactagtgatgtagtg

SEQ ID NO: 192253 - DNA, 30 bp, Artificial Sequence
  Synthetic oligonucleotide
cccgaggtaaatctcaaacatgcgttagtg

SEQ ID NO: 192254 - DNA, 30 bp, Artificial Sequence
  Synthetic oligonucleotide
gtgtcccggaaccgtcatatccttttagtg

SEQ ID NO: 192255 - DNA, 30 bp, Artificial Sequence
  Synthetic oligonucleotide
cggagtagtatactttgcatggagaacgtg

SEQ ID NO: 192256 - DNA, 30 bp, Artificial Sequence
  Synthetic oligonucleotide
caggttttgcgtgatcagagatgtaacgtg

SEQ ID NO: 192257 - DNA, 30 bp, Artificial Sequence
  Synthetic oligonucleotide
agaagttggctaaattgaattaaccacgtg

SEQ ID NO: 192258 - DNA, 30 bp, Artificial Sequence
  Synthetic oligonucleotide
atgaagtagcggaatataatggagcacgtg

SEQ ID NO: 192259 - DNA, 30 bp, Artificial Sequence
  Synthetic oligonucleotide
gatgggcagggaaagatgggtggtcacgtg

SEQ ID NO: 192260 - DNA, 30 bp, Artificial Sequence
  Synthetic oligonucleotide
aaatccacatagagtaagaaaacagacgtg

SEQ ID NO: 192261 - DNA, 30 bp, Artificial Sequence
  Synthetic oligonucleotide
ccgtatgctggtttagttggacactacgtg

SEQ ID NO: 192262 - DNA, 30 bp, Artificial Sequence
  Synthetic oligonucleotide
catgatagtattgcttcgctaacctacgtg

SEQ ID NO: 192263 - DNA, 30 bp, Artificial Sequence
  Synthetic oligonucleotide
aaaataaaaaccgtaattcgagagtacgtg

SEQ ID NO: 192264 - DNA, 30 bp, Artificial Sequence
  Synthetic oligonucleotide
cgcaacgctgtacatgagtaattttacgtg

SEQ ID NO: 192265 - DNA, 30 bp, Artificial Sequence
  Synthetic oligonucleotide
aaataaaatcatcattcctcgaaaaccgtg

SEQ ID NO: 192266 - DNA, 30 bp, Artificial Sequence
  Synthetic oligonucleotide
ttaagatgtgctcctaaagtgagcaccgtg

SEQ ID NO: 192267 - DNA, 30 bp, Artificial Sequence
  Synthetic oligonucleotide
ataacataattgtgcagctaggagaccgtg

SEQ ID NO: 192268 - DNA, 30 bp, Artificial Sequence
  Synthetic oligonucleotide
gttaatagcccatgcccgtgtattaccgtg

SEQ ID NO: 192269 - DNA, 30 bp, Artificial Sequence
  Synthetic oligonucleotide
tgtacgaggatgctgtctgcttcccccgtg

SEQ ID NO: 192270 - DNA, 30 bp, Artificial Sequence
  Synthetic oligonucleotide
tcatcggtcaacctaaacggaacgcccgtg

SEQ ID NO: 192271 - DNA, 30 bp, Artificial Sequence
  Synthetic oligonucleotide
gcaggcaggcacccagcgttgccgcccgtg

SEQ ID NO: 192272 - DNA, 30 bp, Artificial Sequence
  Synthetic oligonucleotide
ttcccatcatttgcgaccattgggcccgtg

SEQ ID NO: 192273 - DNA, 30 bp, Artificial Sequence
  Synthetic oligonucleotide
aaatgacggacgggtcattgaatcgccgtg

SEQ ID NO: 192274 - DNA, 30 bp, Artificial Sequence
  Synthetic oligonucleotide
tccatcaggagcttgactctgcatgccgtg

SEQ ID NO: 192275 - DNA, 30 bp, Artificial Sequence
  Synthetic oligonucleotide
gtatacctgcgctcaaacagggcatccgtg

SEQ ID NO: 192276 - DNA, 30 bp, Artificial Sequence
  Synthetic oligonucleotide
tcaagaaatacgtaaaaattatcctccgtg

SEQ ID NO: 192277 - DNA, 30 bp, Artificial Sequence
  Synthetic oligonucleotide
accaaatgcgtgggttatagtatctccgtg

SEQ ID NO: 192278 - DNA, 30 bp, Artificial Sequence
  Synthetic oligonucleotide
gcgctgagaataaccgtgaggtagtccgtg

SEQ ID NO: 192279 - DNA, 35 bp, Artificial Sequence
  Synthetic oligonucleotide
tataagaaatacggcacatggcctggagttccgtg

SEQ ID NO: 192280 - DNA, 30 bp, Artificial Sequence
  Synthetic oligonucleotide
gtacttggaatccattcaggggcaagcgtg

SEQ ID NO: 192281 - DNA, 30 bp, Artificial Sequence
  Synthetic oligonucleotide
tctcggtcaaacggcgggctcgcgagcgtg

SEQ ID NO: 192282 - DNA, 30 bp, Artificial Sequence
  Synthetic oligonucleotide
tctagggtcaaaggtcattgttaacgcgtg

SEQ ID NO: 192283 - DNA, 30 bp, Artificial Sequence
  Synthetic oligonucleotide
tattgagcaattttgaaatatgcacgcgtg

SEQ ID NO: 192284 - DNA, 30 bp, Artificial Sequence
  Synthetic oligonucleotide
ggacgcgtatagcatattccatcccgcgtg

SEQ ID NO: 192285 - DNA, 30 bp, Artificial Sequence
  Synthetic oligonucleotide
tggcacagtataccgcattggtatcgcgtg

SEQ ID NO: 192286 - DNA, 30 bp, Artificial Sequence
  Synthetic oligonucleotide
gtattggacatgagctctgagtaaggcgtg

SEQ ID NO: 192287 - DNA, 30 bp, Artificial Sequence
  Synthetic oligonucleotide
agtattaagtaagcacctagaataggcgtg

SEQ ID NO: 192288 - DNA, 30 bp, Artificial Sequence
  Synthetic oligonucleotide
cataaagcaagaggaggtactgtgggcgtg

SEQ ID NO: 192289 - DNA, 30 bp, Artificial Sequence
  Synthetic oligonucleotide
ccggtgcgcgcattatgcgacattggcgtg

SEQ ID NO: 192290 - DNA, 30 bp, Artificial Sequence
  Synthetic oligonucleotide
gggaagttggtgaggtagccagcctgcgtg

SEQ ID NO: 192291 - DNA, 30 bp, Artificial Sequence
  Synthetic oligonucleotide
accgggtgcatgtaggtaactagctgcgtg

SEQ ID NO: 192292 - DNA, 30 bp, Artificial Sequence
  Synthetic oligonucleotide
gactggaactctacgctcctatgctgcgtg

SEQ ID NO: 192293 - DNA, 30 bp, Artificial Sequence
  Synthetic oligonucleotide
caccgggacggggctcactgcgagtgcgtg

SEQ ID NO: 192294 - DNA, 30 bp, Artificial Sequence
  Synthetic oligonucleotide
gagatctgggacgtttgtagccggtgcgtg

SEQ ID NO: 192295 - DNA, 30 bp, Artificial Sequence
  Synthetic oligonucleotide
gtgttggagcattgatatctaggttgcgtg

SEQ ID NO: 192296 - DNA, 30 bp, Artificial Sequence
  Synthetic oligonucleotide
tctttcgtgagaagaggggaaaaaatcgtg

SEQ ID NO: 192297 - DNA, 30 bp, Artificial Sequence
  Synthetic oligonucleotide
cgcgctaacgtatgggtggctggcatcgtg

SEQ ID NO: 192298 - DNA, 30 bp, Artificial Sequence
  Synthetic oligonucleotide
ccgtgttttatcctacagtcatgcatcgtg

SEQ ID NO: 192299 - DNA, 30 bp, Artificial Sequence
  Synthetic oligonucleotide
acctgttgcgtacgcgacttctcgatcgtg

SEQ ID NO: 192300 - DNA, 30 bp, Artificial Sequence
  Synthetic oligonucleotide
tcgttgtaagctggaaagggctaactcgtg

SEQ ID NO: 192301 - DNA, 30 bp, Artificial Sequence
  Synthetic oligonucleotide
ctgtgggatgcatttacatccggcctcgtg

SEQ ID NO: 192302 - DNA, 30 bp, Artificial Sequence
  Synthetic oligonucleotide
ttgaccccgtgtgttcctgccctgctcgtg

SEQ ID NO: 192303 - DNA, 30 bp, Artificial Sequence
  Synthetic oligonucleotide
aggtttctggaacattagaataatctcgtg

SEQ ID NO: 192304 - DNA, 30 bp, Artificial Sequence
  Synthetic oligonucleotide
tccatggagtaactgcgagtgcatctcgtg

SEQ ID NO: 192305 - DNA, 30 bp, Artificial Sequence
  Synthetic oligonucleotide
gggtggcgctaaagtaccaaacttctcgtg

SEQ ID NO: 192306 - DNA, 30 bp, Artificial Sequence
  Synthetic oligonucleotide
tgggcatcgggcaacagtggacaagtcgtg

SEQ ID NO: 192307 - DNA, 30 bp, Artificial Sequence
  Synthetic oligonucleotide
tactatttggatcgtccggaacctgtcgtg

SEQ ID NO: 192308 - DNA, 30 bp, Artificial Sequence
  Synthetic oligonucleotide
ttagcatggcaatataaacggcctgtcgtg

SEQ ID NO: 192309 - DNA, 30 bp, Artificial Sequence
  Synthetic oligonucleotide
ggcgctttgagcgtgcatcgggctgtcgtg

SEQ ID NO: 192310 - DNA, 30 bp, Artificial Sequence
  Synthetic oligonucleotide
caggcaaataacacagctctacgtgtcgtg

SEQ ID NO: 192311 - DNA, 30 bp, Artificial Sequence
  Synthetic oligonucleotide
tccgttattagggaaaagtagcagttcgtg

SEQ ID NO: 192312 - DNA, 30 bp, Artificial Sequence
  Synthetic oligonucleotide
atctgaggggattggaatgaaaggttcgtg

SEQ ID NO: 192313 - DNA, 30 bp, Artificial Sequence
  Synthetic oligonucleotide
catccgcctgattcaagtaaattgttcgtg

SEQ ID NO: 192314 - DNA, 30 bp, Artificial Sequence
  Synthetic oligonucleotide
tacacgtactgtgactatcgatcaaaggtg

SEQ ID NO: 192315 - DNA, 30 bp, Artificial Sequence
  Synthetic oligonucleotide
ccgataccaagtcagtgtcgtgtaaaggtg

SEQ ID NO: 192316 - DNA, 30 bp, Artificial Sequence
  Synthetic oligonucleotide
gatggtggctcgggatcctcgggtaaggtg

SEQ ID NO: 192317 - DNA, 30 bp, Artificial Sequence
  Synthetic oligonucleotide
cgccgaggacaccaaaaagcgacacaggtg

SEQ ID NO: 192318 - DNA, 30 bp, Artificial Sequence
  Synthetic oligonucleotide
agtgcaggcgaccagcatcatccacaggtg

SEQ ID NO: 192319 - DNA, 30 bp, Artificial Sequence
  Synthetic oligonucleotide
aatcgagaacctggcaacgcgatccaggtg

SEQ ID NO: 192320 - DNA, 30 bp, Artificial Sequence
  Synthetic oligonucleotide
tggatttataagtgtgggttgatccaggtg

SEQ ID NO: 192321 - DNA, 30 bp, Artificial Sequence
  Synthetic oligonucleotide
tgtgggggacacccaaatgatcatcaggtg

SEQ ID NO: 192322 - DNA, 30 bp, Artificial Sequence
  Synthetic oligonucleotide
ggtcgggctttggagtcatcttcagaggtg

SEQ ID NO: 192323 - DNA, 30 bp, Artificial Sequence
  Synthetic oligonucleotide
tgttgaaacgctaattgaatctgcgaggtg

SEQ ID NO: 192324 - DNA, 30 bp, Artificial Sequence
  Synthetic oligonucleotide
actttggaatatctagattcgcgggaggtg

SEQ ID NO: 192325 - DNA, 30 bp, Artificial Sequence
  Synthetic oligonucleotide
catgcagtgatagggacctatcgggaggtg

SEQ ID NO: 192326 - DNA, 30 bp, Artificial Sequence
  Synthetic oligonucleotide
atctagctaacatattgaaaagatgaggtg

SEQ ID NO: 192327 - DNA, 30 bp, Artificial Sequence
  Synthetic oligonucleotide
ttcaacgagggaacctcgctaactgaggtg

SEQ ID NO: 192328 - DNA, 30 bp, Artificial Sequence
  Synthetic oligonucleotide
ttagctgctgtctttagtacgatctaggtg

SEQ ID NO: 192329 - DNA, 30 bp, Artificial Sequence
  Synthetic oligonucleotide
ggctacgctcgttaatgggttttctaggtg

SEQ ID NO: 192330 - DNA, 30 bp, Artificial Sequence
  Synthetic oligonucleotide
aagcttagctaatcgtggagttagtaggtg

SEQ ID NO: 192331 - DNA, 30 bp, Artificial Sequence
  Synthetic oligonucleotide
ctattgggaggtatgcgatgaagttaggtg

SEQ ID NO: 192332 - DNA, 30 bp, Artificial Sequence
  Synthetic oligonucleotide
taaaatggattcggttgaacatgaacggtg

SEQ ID NO: 192333 - DNA, 30 bp, Artificial Sequence
  Synthetic oligonucleotide
caagagtgaagcaccgcaattctgacggtg

SEQ ID NO: 192334 - DNA, 30 bp, Artificial Sequence
  Synthetic oligonucleotide
ggggaacgattaacaaagccggatacggtg

SEQ ID NO: 192335 - DNA, 30 bp, Artificial Sequence
  Synthetic oligonucleotide
agcgactatggaggtttctcacaaccggtg

SEQ ID NO: 192336 - DNA, 30 bp, Artificial Sequence
  Synthetic oligonucleotide
gtcctgatagtaacagcgttatccccggtg

SEQ ID NO: 192337 - DNA, 30 bp, Artificial Sequence
  Synthetic oligonucleotide
tgaggaggttgcatctgaacgctcccggtg

SEQ ID NO: 192338 - DNA, 30 bp, Artificial Sequence
  Synthetic oligonucleotide
cttacgcattggggggagtgcacagcggtg

SEQ ID NO: 192339 - DNA, 30 bp, Artificial Sequence
  Synthetic oligonucleotide
cggatctttgatttacgaaccttcgcggtg

SEQ ID NO: 192340 - DNA, 30 bp, Artificial Sequence
  Synthetic oligonucleotide
actatgcaaaacttatagtaaagtgcggtg

SEQ ID NO: 192341 - DNA, 30 bp, Artificial Sequence
  Synthetic oligonucleotide
atcatctggacgaggccggtgatatcggtg

SEQ ID NO: 192342 - DNA, 30 bp, Artificial Sequence
  Synthetic oligonucleotide
ttgtagcgttatatacgagtgcactcggtg

SEQ ID NO: 192343 - DNA, 30 bp, Artificial Sequence
  Synthetic oligonucleotide
ttcggacaatcggaccgtatcgtctcggtg

SEQ ID NO: 192344 - DNA, 30 bp, Artificial Sequence
  Synthetic oligonucleotide
gtgtcttctgagaaaactcacgattcggtg

SEQ ID NO: 192345 - DNA, 30 bp, Artificial Sequence
  Synthetic oligonucleotide
ggttaccccgtgggtgtgcgcgtttcggtg

SEQ ID NO: 192346 - DNA, 30 bp, Artificial Sequence
  Synthetic oligonucleotide
caatttgatttcatcatagggtgaagggtg

SEQ ID NO: 192347 - DNA, 30 bp, Artificial Sequence
  Synthetic oligonucleotide
atactgggcgttgaagttgaggggagggtg

SEQ ID NO: 192348 - DNA, 30 bp, Artificial Sequence
  Synthetic oligonucleotide
agcttgcgtgttgcggtccggtggagggtg

SEQ ID NO: 192349 - DNA, 30 bp, Artificial Sequence
  Synthetic oligonucleotide
agtaagtgtacaaactctccttgtagggtg

SEQ ID NO: 192350 - DNA, 30 bp, Artificial Sequence
  Synthetic oligonucleotide
catgggggattttagggacttgtccgggtg

SEQ ID NO: 192351 - DNA, 30 bp, Artificial Sequence
  Synthetic oligonucleotide
ttacacgcattatctgtgtgattccgggtg

SEQ ID NO: 192352 - DNA, 30 bp, Artificial Sequence
  Synthetic oligonucleotide
agcagtcgacaagaagtaaggccgcgggtg

SEQ ID NO: 192353 - DNA, 30 bp, Artificial Sequence
  Synthetic oligonucleotide
ccttagcagcctcgctaagtgcctcgggtg

SEQ ID NO: 192354 - DNA, 30 bp, Artificial Sequence
  Synthetic oligonucleotide
ctcatgcggtggcggccggagtctcgggtg

SEQ ID NO: 192355 - DNA, 30 bp, Artificial Sequence
  Synthetic oligonucleotide
cagggcacacgcgatgggacccaaggggtg

SEQ ID NO: 192356 - DNA, 30 bp, Artificial Sequence
  Synthetic oligonucleotide
acaaggcatgtatggatgaggcgaggggtg

SEQ ID NO: 192357 - DNA, 30 bp, Artificial Sequence
  Synthetic oligonucleotide
ggacttggtcaagtgcttaacataggggtg

SEQ ID NO: 192358 - DNA, 30 bp, Artificial Sequence
  Synthetic oligonucleotide
aagttccacttcttataggacactggggtg

SEQ ID NO: 192359 - DNA, 30 bp, Artificial Sequence
  Synthetic oligonucleotide
caaagcactattccgcgcggataatgggtg

SEQ ID NO: 192360 - DNA, 30 bp, Artificial Sequence
  Synthetic oligonucleotide
acttactaccggagggcggtgggatgggtg

SEQ ID NO: 192361 - DNA, 30 bp, Artificial Sequence
  Synthetic oligonucleotide
acatcgttcggagccaagcagctatgggtg

SEQ ID NO: 192362 - DNA, 30 bp, Artificial Sequence
  Synthetic oligonucleotide
cactaaatggatattttacagcgctgggtg

SEQ ID NO: 192363 - DNA, 30 bp, Artificial Sequence
  Synthetic oligonucleotide
taggggggacccaggtcgacactttgggtg

SEQ ID NO: 192364 - DNA, 30 bp, Artificial Sequence
  Synthetic oligonucleotide
ttgtggggcccacaagtccgacgaatggtg

SEQ ID NO: 192365 - DNA, 30 bp, Artificial Sequence
  Synthetic oligonucleotide
atcagagcaaggcggactaggctaatggtg

SEQ ID NO: 192366 - DNA, 30 bp, Artificial Sequence
  Synthetic oligonucleotide
aacatggtgcaacatgtccaaacgatggtg

SEQ ID NO: 192367 - DNA, 30 bp, Artificial Sequence
  Synthetic oligonucleotide
tcgaaacacaaggtgagatcggcgctggtg

SEQ ID NO: 192368 - DNA, 30 bp, Artificial Sequence
  Synthetic oligonucleotide
ttattgaggtaaagttatatgtcggtggtg

SEQ ID NO: 192369 - DNA, 30 bp, Artificial Sequence
  Synthetic oligonucleotide
aggcggccaacaggaattatccgcttggtg

SEQ ID NO: 192370 - DNA, 30 bp, Artificial Sequence
  Synthetic oligonucleotide
ttaacatggccgtatcgtaggatgttggtg

SEQ ID NO: 192371 - DNA, 30 bp, Artificial Sequence
  Synthetic oligonucleotide
agggtcaacgactcgcaaacataaaatgtg

SEQ ID NO: 192372 - DNA, 30 bp, Artificial Sequence
  Synthetic oligonucleotide
cctcacttgatgggggtgaatacaaatgtg

SEQ ID NO: 192373 - DNA, 30 bp, Artificial Sequence
  Synthetic oligonucleotide
ctcttaatcatcacgctatgtggcaatgtg

SEQ ID NO: 192374 - DNA, 30 bp, Artificial Sequence
  Synthetic oligonucleotide
gggttgccggctattgggcaaaggaatgtg

SEQ ID NO: 192375 - DNA, 30 bp, Artificial Sequence
  Synthetic oligonucleotide
cagataattattatcccagtgcgtaatgtg

SEQ ID NO: 192376 - DNA, 30 bp, Artificial Sequence
  Synthetic oligonucleotide
gcacaactgtgattgacctcaacgcatgtg

SEQ ID NO: 192377 - DNA, 30 bp, Artificial Sequence
  Synthetic oligonucleotide
ccgggaaaagagaattggaaattgcatgtg

SEQ ID NO: 192378 - DNA, 30 bp, Artificial Sequence
  Synthetic oligonucleotide
agcgattactgtgcgcccccacctcatgtg

SEQ ID NO: 192379 - DNA, 30 bp, Artificial Sequence
  Synthetic oligonucleotide
gaatgccccacttcgcttccgagtcatgtg

SEQ ID NO: 192380 - DNA, 30 bp, Artificial Sequence
  Synthetic oligonucleotide
cccgtaagtagcctcggacggtgtcatgtg

SEQ ID NO: 192381 - DNA, 30 bp, Artificial Sequence
  Synthetic oligonucleotide
gtatataacgcgagcagtttccaagatgtg

SEQ ID NO: 192382 - DNA, 30 bp, Artificial Sequence
  Synthetic oligonucleotide
cgtggaatctctacgcgggattgagatgtg

SEQ ID NO: 192383 - DNA, 30 bp, Artificial Sequence
  Synthetic oligonucleotide
gggatgggtaattgagcgccggaggatgtg

SEQ ID NO: 192384 - DNA, 30 bp, Artificial Sequence
  Synthetic oligonucleotide
cttataaagttgtaaaaatgcaactatgtg

SEQ ID NO: 192385 - DNA, 30 bp, Artificial Sequence
  Synthetic oligonucleotide
gggcgactcggcggtcccgctttctatgtg

SEQ ID NO: 192386 - DNA, 30 bp, Artificial Sequence
  Synthetic oligonucleotide
gatcaggccaggcaggtaggatagtatgtg

SEQ ID NO: 192387 - DNA, 30 bp, Artificial Sequence
  Synthetic oligonucleotide
agcctgcggggtagataaggggattatgtg

SEQ ID NO: 192388 - DNA, 30 bp, Artificial Sequence
  Synthetic oligonucleotide
tccagggtcgacttgagagaatgttatgtg

SEQ ID NO: 192389 - DNA, 30 bp, Artificial Sequence
  Synthetic oligonucleotide
ggatcgcatgactactagaaccaaactgtg

SEQ ID NO: 192390 - DNA, 30 bp, Artificial Sequence
  Synthetic oligonucleotide
tgcgatacatcaactgcccttcgtactgtg

SEQ ID NO: 192391 - DNA, 30 bp, Artificial Sequence
  Synthetic oligonucleotide
ccgggaactatcccggcagtcgatcctgtg

SEQ ID NO: 192392 - DNA, 30 bp, Artificial Sequence
  Synthetic oligonucleotide
acgccacgttgttggtaatgaggggctgtg

SEQ ID NO: 192393 - DNA, 30 bp, Artificial Sequence
  Synthetic oligonucleotide
gggacggatgcaattaaatcagagtctgtg

SEQ ID NO: 192394 - DNA, 30 bp, Artificial Sequence
  Synthetic oligonucleotide
tgctacacttaattagtcgggtattctgtg

SEQ ID NO: 192395 - DNA, 30 bp, Artificial Sequence
  Synthetic oligonucleotide
tatcctgcgtgtgaaactgacgggagtgtg

SEQ ID NO: 192396 - DNA, 30 bp, Artificial Sequence
  Synthetic oligonucleotide
gaggcgcactcatctatgaaaggtagtgtg

SEQ ID NO: 192397 - DNA, 30 bp, Artificial Sequence
  Synthetic oligonucleotide
ggatcgcaacgatgtttatgtatccgtgtg

SEQ ID NO: 192398 - DNA, 30 bp, Artificial Sequence
  Synthetic oligonucleotide
gggactggtacttatactttattccgtgtg

SEQ ID NO: 192399 - DNA, 30 bp, Artificial Sequence
  Synthetic oligonucleotide
ttctcgaaaatacaagtgatggagcgtgtg

SEQ ID NO: 192400 - DNA, 30 bp, Artificial Sequence
  Synthetic oligonucleotide
ccattcgcttcaactcgtagtgatcgtgtg

SEQ ID NO: 192401 - DNA, 30 bp, Artificial Sequence
  Synthetic oligonucleotide
atagaaaggcctcggaacctagctcgtgtg

SEQ ID NO: 192402 - DNA, 30 bp, Artificial Sequence
  Synthetic oligonucleotide
ttaggtacactagccatggcatctcgtgtg

SEQ ID NO: 192403 - DNA, 30 bp, Artificial Sequence
  Synthetic oligonucleotide
tctacaccatctgggtaaggggcaggtgtg

SEQ ID NO: 192404 - DNA, 30 bp, Artificial Sequence
  Synthetic oligonucleotide
tagatcttttcgtcgacaagagtaggtgtg

SEQ ID NO: 192405 - DNA, 30 bp, Artificial Sequence
  Synthetic oligonucleotide
ggctattagacgggtcgtgtgcggggtgtg

SEQ ID NO: 192406 - DNA, 30 bp, Artificial Sequence
  Synthetic oligonucleotide
ctagtaaatctcagctacagtgtgggtgtg

SEQ ID NO: 192407 - DNA, 30 bp, Artificial Sequence
  Synthetic oligonucleotide
cagcaaaccaagaaccgaaaaggtggtgtg

SEQ ID NO: 192408 - DNA, 30 bp, Artificial Sequence
  Synthetic oligonucleotide
ggtgcgagaagacgccacggcatatgtgtg

SEQ ID NO: 192409 - DNA, 30 bp, Artificial Sequence
  Synthetic oligonucleotide
ggctcacgactcaaagccggtatatgtgtg

SEQ ID NO: 192410 - DNA, 30 bp, Artificial Sequence
  Synthetic oligonucleotide
agttaacgcgtcgacatgggcgagtgtgtg

SEQ ID NO: 192411 - DNA, 30 bp, Artificial Sequence
  Synthetic oligonucleotide
taaataaaaagcatagtagcaaccattgtg

SEQ ID NO: 192412 - DNA, 30 bp, Artificial Sequence
  Synthetic oligonucleotide
gacgtagcagagctaccaggatatattgtg

SEQ ID NO: 192413 - DNA, 30 bp, Artificial Sequence
  Synthetic oligonucleotide
cagtctcacccgaagattatgcgtattgtg
